United States Patent Application Publication US 2005/0244851 A1 - sequence listing, part 66

SEQ ID NO: 2565894 - DNA, 25 bp, Homo sapien
ggatcgattactagacatgacatta

SEQ ID NO: 2565895 - DNA, 25 bp, Homo sapien
tcctagttctactaacagtgtacat

SEQ ID NO: 2565896 - DNA, 25 bp, Homo sapien
tgagcaccagtcttacgaaatgagc

SEQ ID NO: 2565897 - DNA, 25 bp, Homo sapien
cagtgctcataaacctgacagggaa

SEQ ID NO: 2565898 - DNA, 25 bp, Homo sapien
tggtctgacagataaagcactgagg

SEQ ID NO: 2565899 - DNA, 25 bp, Homo sapien
cctactcaaagttgactactggctg

SEQ ID NO: 2565900 - DNA, 25 bp, Homo sapien
ccatctcagttggtagcatcaccat

SEQ ID NO: 2565901 - DNA, 25 bp, Homo sapien
cattagcacagggacactggtcaca

SEQ ID NO: 2565902 - DNA, 25 bp, Homo sapien
caccaatacagagggactagtacaa

SEQ ID NO: 2565903 - DNA, 25 bp, Homo sapien
tctatcatacaacctggcaacctag

SEQ ID NO: 2565904 - DNA, 25 bp, Homo sapien
tcaacttctcagaaatttgctgttc

SEQ ID NO: 2565905 - DNA, 25 bp, Homo sapien
ttgacaatttttgtacaagttctgt

SEQ ID NO: 2565906 - DNA, 25 bp, Homo sapien
aacttctcagaaatttgctgttccg

SEQ ID NO: 2565907 - DNA, 25 bp, Homo sapien
ttctcagaaatttgctgttccgtga

SEQ ID NO: 2565908 - DNA, 25 bp, Homo sapien
tcagagagaatcatattttgtttcc

SEQ ID NO: 2565909 - DNA, 25 bp, Homo sapien
agagaatcatattttgtttcctggt

SEQ ID NO: 2565910 - DNA, 25 bp, Homo sapien
atatttaattgcttcatcagagaga

SEQ ID NO: 2565911 - DNA, 25 bp, Homo sapien
tggtttcctgaacatgtttctttga

SEQ ID NO: 2565912 - DNA, 25 bp, Homo sapien
aagatttttagctgtgtcatccaga

SEQ ID NO: 2565913 - DNA, 25 bp, Homo sapien
ctagcataacacgaagatttttagc

SEQ ID NO: 2565914 - DNA, 25 bp, Homo sapien
tttagctgtgtcatccagaatttcc

SEQ ID NO: 2565915 - DNA, 25 bp, Homo sapien
ctcagattctagcataacacgaaga

SEQ ID NO: 2565916 - DNA, 25 bp, Homo sapien
ctttaacttctctatagatttcttg

SEQ ID NO: 2565917 - DNA, 25 bp, Homo sapien
tttaacttctctatagatttcttgt

SEQ ID NO: 2565918 - DNA, 25 bp, Homo sapien
taacttctctatagatttcttgttt

SEQ ID NO: 2565919 - DNA, 25 bp, Homo sapien
tcctttaacttctctatagatttct

SEQ ID NO: 2565920 - DNA, 25 bp, Homo sapien
cttcttaagcctagcattttcttct

SEQ ID NO: 2565921 - DNA, 25 bp, Homo sapien
cttcactaagcttagcttcattaag

SEQ ID NO: 2565922 - DNA, 25 bp, Homo sapien
ttcttgaacccgatggcattcagac

SEQ ID NO: 2565923 - DNA, 25 bp, Homo sapien
tcttcttaagcctagcattttcttc

SEQ ID NO: 2565924 - DNA, 25 bp, Homo sapien
catgattcccacaggttagggcttt

SEQ ID NO: 2565925 - DNA, 25 bp, Homo sapien
acacatgattcccacaggttagggc

SEQ ID NO: 2565926 - DNA, 25 bp, Homo sapien
tgattcccacaggttagggcttttg

SEQ ID NO: 2565927 - DNA, 25 bp, Homo sapien
gttaaaacacatgattcccacaggt

SEQ ID NO: 2565928 - DNA, 25 bp, Homo sapien
catgtaatttactccagtcttcgat

SEQ ID NO: 2565929 - DNA, 25 bp, Homo sapien
tactccagtcttcgatttcctgctg

SEQ ID NO: 2565930 - DNA, 25 bp, Homo sapien
tatcatccttgtgagtaagagctac

SEQ ID NO: 2565931 - DNA, 25 bp, Homo sapien
taatattatcatccttgtgagtaag

SEQ ID NO: 2565932 - DNA, 25 bp, Homo sapien
ttcagattcacactctaacagattc

SEQ ID NO: 2565933 - DNA, 25 bp, Homo sapien
cagattcaactgtgtaatgcagtta

SEQ ID NO: 2565934 - DNA, 25 bp, Homo sapien
gattcacactctaacagattcaact

SEQ ID NO: 2565935 - DNA, 25 bp, Homo sapien
actgtgtaatgcagttagtcaaagc

SEQ ID NO: 2565936 - DNA, 25 bp, Homo sapien
gagagacatccatcatctgcttaat

SEQ ID NO: 2565937 - DNA, 25 bp, Homo sapien
agacatccatcatctgcttaatttg

SEQ ID NO: 2565938 - DNA, 25 bp, Homo sapien
ccgagagacatccatcatctgctta

SEQ ID NO: 2565939 - DNA, 25 bp, Homo sapien
catccatcatctgcttaatttgatt

SEQ ID NO: 2565940 - DNA, 25 bp, Homo sapien
gctttagatcctcttcaactaccga

SEQ ID NO: 2565941 - DNA, 25 bp, Homo sapien
ggttacatttagtggacacggaggc

SEQ ID NO: 2565942 - DNA, 25 bp, Homo sapien
caactaccgatattgcagtctgtgt

SEQ ID NO: 2565943 - DNA, 25 bp, Homo sapien
acacggaggctcttagcttaagctg

SEQ ID NO: 2565944 - DNA, 25 bp, Homo sapien
cttctgctgatagagctcattcaga

SEQ ID NO: 2565945 - DNA, 25 bp, Homo sapien
tagtgagttgcggtcatcttccaat

SEQ ID NO: 2565946 - DNA, 25 bp, Homo sapien
cagcttgtagtgagttgcggtcatc

SEQ ID NO: 2565947 - DNA, 25 bp, Homo sapien
gatagagctcattcagaatctccac

SEQ ID NO: 2565948 - DNA, 25 bp, Homo sapien
ccaaggctggtaccatgataaagac

SEQ ID NO: 2565949 - DNA, 25 bp, Homo sapien
gccaggactgatcaacctaacacag

SEQ ID NO: 2565950 - DNA, 25 bp, Homo sapien
ccaactgtggcctgttgatacatca

SEQ ID NO: 2565951 - DNA, 25 bp, Homo sapien
tatttctaaccatggaaagaccact

SEQ ID NO: 2565952 - DNA, 25 bp, Homo sapien
gctgacagcctgtgctctctttctt

SEQ ID NO: 2565953 - DNA, 25 bp, Homo sapien
tctttcttgccgttcatactcttct

SEQ ID NO: 2565954 - DNA, 25 bp, Homo sapien
tgacagcctgtgctctctttcttgc

SEQ ID NO: 2565955 - DNA, 25 bp, Homo sapien
gccgttcatactcttcttgactcag

SEQ ID NO: 2565956 - DNA, 25 bp, Homo sapien
ttaaatgaccgctctgtcttctgta

SEQ ID NO: 2565957 - DNA, 25 bp, Homo sapien
ctggtttttaaatgaccgctctgtc

SEQ ID NO: 2565958 - DNA, 25 bp, Homo sapien
tttttaaatgaccgctctgtcttct

SEQ ID NO: 2565959 - DNA, 25 bp, Homo sapien
tggtttttaaatgaccgctctgtct

SEQ ID NO: 2565960 - DNA, 25 bp, Homo sapien
tagcctctattagttatcaaagaat

SEQ ID NO: 2565961 - DNA, 25 bp, Homo sapien
gttatcaaagaattccgggcactat

SEQ ID NO: 2565962 - DNA, 25 bp, Homo sapien
catacagattcattataatagcctc

SEQ ID NO: 2565963 - DNA, 25 bp, Homo sapien
ggcactatatagtagggcactagaa

SEQ ID NO: 2565964 - DNA, 25 bp, Homo sapien
atgagctttcttctcatgggtagcg

SEQ ID NO: 2565965 - DNA, 25 bp, Homo sapien
tcatgagctttcttctcatgggtag

SEQ ID NO: 2565966 - DNA, 25 bp, Homo sapien
gagctttcttctcatgggtagcgat

SEQ ID NO: 2565967 - DNA, 25 bp, Homo sapien
ccagttttcatgagctttcttctca

SEQ ID NO: 2565968 - DNA, 25 bp, Homo sapien
gtgggagactatgcacaaaataagg

SEQ ID NO: 2565969 - DNA, 25 bp, Homo sapien
tgtgggagactatgcacaaaataag

SEQ ID NO: 2565970 - DNA, 25 bp, Homo sapien
tagctctttctgcagcacgagcttt

SEQ ID NO: 2565971 - DNA, 25 bp, Homo sapien
ctctttctgcagcacgagctttgag

SEQ ID NO: 2565972 - DNA, 25 bp, Homo sapien
tatagctctttctgcagcacgagct

SEQ ID NO: 2565973 - DNA, 25 bp, Homo sapien
tttctcttcagctatagctctttct

SEQ ID NO: 2565974 - DNA, 25 bp, Homo sapien
gagaacacgcgctgaaaatatagcc

SEQ ID NO: 2565975 - DNA, 25 bp, Homo sapien
cttaagagaacacgcgctgaaaata

SEQ ID NO: 2565976 - DNA, 25 bp, Homo sapien
tgaaatagaaaccaattccttaaga

SEQ ID NO: 2565977 - DNA, 25 bp, Homo sapien
gctgaaaatatagccatcaaaatcc

SEQ ID NO: 2565978 - DNA, 25 bp, Homo sapien
ctggcattggttttacaatcacagg

SEQ ID NO: 2565979 - DNA, 25 bp, Homo sapien
cctggcattggttttacaatcacag

SEQ ID NO: 2565980 - DNA, 25 bp, Homo sapien
tcctggcattggttttacaatcaca

SEQ ID NO: 2565981 - DNA, 25 bp, Homo sapien
ttcctggcattggttttacaatcac

SEQ ID NO: 2565982 - DNA, 25 bp, Homo sapien
aaagtcacttatatacattttacat

SEQ ID NO: 2565983 - DNA, 25 bp, Homo sapien
tgccctttacaaggtagctccctta

SEQ ID NO: 2565984 - DNA, 25 bp, Homo sapien
tacatcaaaaaacagattgttgccc

SEQ ID NO: 2565985 - DNA, 25 bp, Homo sapien
gggtaccataaccattacacacaga

SEQ ID NO: 2565986 - DNA, 25 bp, Homo sapien
caaattcacttctaggcatatctct

SEQ ID NO: 2565987 - DNA, 25 bp, Homo sapien
ccactcacaggggatgggccaaaag

SEQ ID NO: 2565988 - DNA, 25 bp, Homo sapien
ctcttcgattgagagtagcagagag

SEQ ID NO: 2565989 - DNA, 25 bp, Homo sapien
gaggggagcattctccaccactcac

SEQ ID NO: 2565990 - DNA, 25 bp, Homo sapien
aggatgaggtagaggcccgtccact

SEQ ID NO: 2565991 - DNA, 25 bp, Homo sapien
accatcgaggatgaggtagaggccc

SEQ ID NO: 2565992 - DNA, 25 bp, Homo sapien
gaccatcgaggatgaggtagaggcc

SEQ ID NO: 2565993 - DNA, 25 bp, Homo sapien
tcgaggatgaggtagaggcccgtcc

SEQ ID NO: 2565994 - DNA, 25 bp, Homo sapien
gaactgatgtagacttattctgact

SEQ ID NO: 2565995 - DNA, 25 bp, Homo sapien
tgtagacttattctgacttgtgtac

SEQ ID NO: 2565996 - DNA, 25 bp, Homo sapien
taaagaccagagaactgatgtagac

SEQ ID NO: 2565997 - DNA, 25 bp, Homo sapien
ctgttaaagaccagagaactgatgt

SEQ ID NO: 2565998 - DNA, 25 bp, Homo sapien
catggtagctgtaccagatcctgga

SEQ ID NO: 2565999 - DNA, 25 bp, Homo sapien
tgctgttcatcatggtagctgtacc

SEQ ID NO: 2566000 - DNA, 25 bp, Homo sapien
aagagcctcttgagctgctgttcat

SEQ ID NO: 2566001 - DNA, 25 bp, Homo sapien
gccttcatcgagtaccctggtaggg

SEQ ID NO: 2566002 - DNA, 25 bp, Homo sapien
aaatgagatagtacagatagaacac

SEQ ID NO: 2566003 - DNA, 25 bp, Homo sapien
gagagttgtaggaagagctaaatgt

SEQ ID NO: 2566004 - DNA, 25 bp, Homo sapien
caaagagagagttgtaggaagagct

SEQ ID NO: 2566005 - DNA, 25 bp, Homo sapien
gaacacacaaataggagatgaggca

SEQ ID NO: 2566006 - DNA, 25 bp, Homo sapien
gctactggacgctcagccaaagatg

SEQ ID NO: 2566007 - DNA, 25 bp, Homo sapien
tgctactggacgctcagccaaagat

SEQ ID NO: 2566008 - DNA, 25 bp, Homo sapien
ctcagccaaagatgtaatgctggga

SEQ ID NO: 2566009 - DNA, 25 bp, Homo sapien
tcagccaaagatgtaatgctgggaa

SEQ ID NO: 2566010 - DNA, 25 bp, Homo sapien
aacttatagcccagttcagtccaca

SEQ ID NO: 2566011 - DNA, 25 bp, Homo sapien
ttaaatgtctaaccaaacaggagag

SEQ ID NO: 2566012 - DNA, 25 bp, Homo sapien
taattacagttacagcagatgctct

SEQ ID NO: 2566013 - DNA, 25 bp, Homo sapien
gagaaaaggccaatgaatccgtcag

SEQ ID NO: 2566014 - DNA, 25 bp, Homo sapien
tacacttatgtggacactgtttaag

SEQ ID NO: 2566015 - DNA, 25 bp, Homo sapien
actgtttaaggacactgctgggaac

SEQ ID NO: 2566016 - DNA, 25 bp, Homo sapien
ggctcaacgggtaattatagacttc

SEQ ID NO: 2566017 - DNA, 25 bp, Homo sapien
caagagaatacacttatgtggacac

SEQ ID NO: 2566018 - DNA, 25 bp, Homo sapien
catctgcaaatggaagggaacgcac

SEQ ID NO: 2566019 - DNA, 25 bp, Homo sapien
tctaaatatgcaggaacacaggcgc

SEQ ID NO: 2566020 - DNA, 25 bp, Homo sapien
aacccaatgaagcagatgtcaggca

SEQ ID NO: 2566021 - DNA, 25 bp, Homo sapien
gaaaggttaaaagtatgccacagga

SEQ ID NO: 2566022 - DNA, 25 bp, Homo sapien
tgaggtggtggtccatatcgaatgg

SEQ ID NO: 2566023 - DNA, 25 bp, Homo sapien
cctcccatgggggtgctcatgagag

SEQ ID NO: 2566024 - DNA, 25 bp, Homo sapien
gtccatatcgaatgggtggtggtac

SEQ ID NO: 2566025 - DNA, 25 bp, Homo sapien
cgaggcccaaaaggtccgcagagct

SEQ ID NO: 2566026 - DNA, 25 bp, Homo sapien
taaaaatttatgcagtagctcaaga

SEQ ID NO: 2566027 - DNA, 25 bp, Homo sapien
tagctcaagatgtacctaataaatg

SEQ ID NO: 2566028 - DNA, 25 bp, Homo sapien
cataaaaattaaggtgcttgccctg

SEQ ID NO: 2566029 - DNA, 25 bp, Homo sapien
cattcattagatagctgttaaattc

SEQ ID NO: 2566030 - DNA, 25 bp, Homo sapien
tacttggaagtactatataccatac

SEQ ID NO: 2566031 - DNA, 25 bp, Homo sapien
tttgtacttggaagtactatatacc

SEQ ID NO: 2566032 - DNA, 25 bp, Homo sapien
cttggaagtactatataccatacca

SEQ ID NO: 2566033 - DNA, 25 bp, Homo sapien
tgtacttggaagtactatataccat

SEQ ID NO: 2566034 - DNA, 25 bp, Homo sapien
aatgctgggattcataaagtgctgg

SEQ ID NO: 2566035 - DNA, 25 bp, Homo sapien
tgcctcagcctcgtctaatgaatgc

SEQ ID NO: 2566036 - DNA, 25 bp, Homo sapien
tgaatgctgggattcataaagtgct

SEQ ID NO: 2566037 - DNA, 25 bp, Homo sapien
gcctcgtctaatgaatgctgggatt

SEQ ID NO: 2566038 - DNA, 25 bp, Homo sapien
gaataaagtactctcttgggccaag

SEQ ID NO: 2566039 - DNA, 25 bp, Homo sapien
ttcctggtggaacgcctggtgcaaa

SEQ ID NO: 2566040 - DNA, 25 bp, Homo sapien
taagtctcttacagcaggtggtggt

SEQ ID NO: 2566041 - DNA, 25 bp, Homo sapien
catctctagagcctgacggcagtaa

SEQ ID NO: 2566042 - DNA, 25 bp, Homo sapien
aatgcacagtacactttctttccaa

SEQ ID NO: 2566043 - DNA, 25 bp, Homo sapien
ccaaggcagcttagttctaacaaca

SEQ ID NO: 2566044 - DNA, 25 bp, Homo sapien
ttgtttggctcaaaaatgcacactg

SEQ ID NO: 2566045 - DNA, 25 bp, Homo sapien
tgtaatggataatgcacagtacact

SEQ ID NO: 2566046 - DNA, 25 bp, Homo sapien
gcacatttcaaagttgtaaggacgc

SEQ ID NO: 2566047 - DNA, 25 bp, Homo sapien
attgcacatttcaaagttgtaagga

SEQ ID NO: 2566048 - DNA, 25 bp, Homo sapien
tgcacatttcaaagttgtaaggacg

SEQ ID NO: 2566049 - DNA, 25 bp, Homo sapien
ttgcacatttcaaagttgtaaggac

SEQ ID NO: 2566050 - DNA, 25 bp, Homo sapien
gatttctatacttttacggccatga

SEQ ID NO: 2566051 - DNA, 25 bp, Homo sapien
gaaagatagataagggactgtacat

SEQ ID NO: 2566052 - DNA, 25 bp, Homo sapien
tgttgtgcaccctttttctacagga

SEQ ID NO: 2566053 - DNA, 25 bp, Homo sapien
tcaaaaatcagtggcaaggaatggg

SEQ ID NO: 2566054 - DNA, 25 bp, Homo sapien
aaacagaactgatttcaacccttgg

SEQ ID NO: 2566055 - DNA, 25 bp, Homo sapien
caacccttggttgctgacctagggc

SEQ ID NO: 2566056 - DNA, 25 bp, Homo sapien
gacctagggcatgttataaccctca

SEQ ID NO: 2566057 - DNA, 25 bp, Homo sapien
taagtatggtgcaattccagatggt

SEQ ID NO: 2566058 - DNA, 25 bp, Homo sapien
gaactacaaatacctttcatcaaca

SEQ ID NO: 2566059 - DNA, 25 bp, Homo sapien
tctgctatccttcacataagtatag

SEQ ID NO: 2566060 - DNA, 25 bp, Homo sapien
tgataatttatatgaagcatctgct

SEQ ID NO: 2566061 - DNA, 25 bp, Homo sapien
taaaccataagatatgtatatcaaa

SEQ ID NO: 2566062 - DNA, 25 bp, Homo sapien
ttttatataggtagataggatcgcc

SEQ ID NO: 2566063 - DNA, 25 bp, Homo sapien
ctatttagatatactgacattcatc

SEQ ID NO: 2566064 - DNA, 25 bp, Homo sapien
gattcagtccacaatagctctaggg

SEQ ID NO: 2566065 - DNA, 25 bp, Homo sapien
tatgcaggtcattagcttactataa

SEQ ID NO: 2566066 - DNA, 25 bp, Homo sapien
cagctacttgggaggtttaggcagg

SEQ ID NO: 2566067 - DNA, 25 bp, Homo sapien
aaatcacaccactgcacccgagcct

SEQ ID NO: 2566068 - DNA, 25 bp, Homo sapien
ttagctgggcgtggtcagacatgct

SEQ ID NO: 2566069 - DNA, 25 bp, Homo sapien
gcgtggtcagacatgcttgtaatcc

SEQ ID NO: 2566070 - DNA, 25 bp, Homo sapien
gaattatgccaaccgttcaatagtt

SEQ ID NO: 2566071 - DNA, 25 bp, Homo sapien
aaatcttagaattatgccaaccgtt

SEQ ID NO: 2566072 - DNA, 25 bp, Homo sapien
tcttagaattatgccaaccgttcaa

SEQ ID NO: 2566073 - DNA, 25 bp, Homo sapien
tatgccaaccgttcaatagtttgca

SEQ ID NO: 2566074 - DNA, 25 bp, Homo sapien
ggccatgatagctaccgaggcggta

SEQ ID NO: 2566075 - DNA, 25 bp, Homo sapien
gagaaccgagactacagaaccaggg

SEQ ID NO: 2566076 - DNA, 25 bp, Homo sapien
gttgcagtcccctcaaaacgcttcg

SEQ ID NO: 2566077 - DNA, 25 bp, Homo sapien
ggaagagaagagttgcccctacctc

SEQ ID NO: 2566078 - DNA, 25 bp, Homo sapien
ggtgatcctattgcttgagactccg

SEQ ID NO: 2566079 - DNA, 25 bp, Homo sapien
tataagctctccaatgaccaatgga

SEQ ID NO: 2566080 - DNA, 25 bp, Homo sapien
gaaagccgatactgtcaacccggga

SEQ ID NO: 2566081 - DNA, 25 bp, Homo sapien
aaggagacttttggtccactgtcca

SEQ ID NO: 2566082 - DNA, 25 bp, Homo sapien
ttagagccaccaatacaacattcgg

SEQ ID NO: 2566083 - DNA, 25 bp, Homo sapien
cagggacaagggtgcctttagagcc

SEQ ID NO: 2566084 - DNA, 25 bp, Homo sapien
cattcggatcgaagctgtaagctaa

SEQ ID NO: 2566085 - DNA, 25 bp, Homo sapien
gaggactcccgctcctaacaaggga

SEQ ID NO: 2566086 - DNA, 25 bp, Homo sapien
gttttgaggagcaccacatacttaa

SEQ ID NO: 2566087 - DNA, 25 bp, Homo sapien
tgtacccaacgaaaaactgagcagg

SEQ ID NO: 2566088 - DNA, 25 bp, Homo sapien
aagctggttttgaggagcaccacat

SEQ ID NO: 2566089 - DNA, 25 bp, Homo sapien
aatgaatagagaatacagtgtgtac

SEQ ID NO: 2566090 - DNA, 25 bp, Homo sapien
ggttcctatgaaaccaatgggtcat

SEQ ID NO: 2566091 - DNA, 25 bp, Homo sapien
gccagtgactacaccatagtaatta

SEQ ID NO: 2566092 - DNA, 25 bp, Homo sapien
gtgactacaccatagtaattaaaag

SEQ ID NO: 2566093 - DNA, 25 bp, Homo sapien
gagctgtggcttttaatgggttcct

SEQ ID NO: 2566094 - DNA, 25 bp, Homo sapien
taaaactgctccctaatctacattc

SEQ ID NO: 2566095 - DNA, 25 bp, Homo sapien
ccttgacatgtaattcaacatatac

SEQ ID NO: 2566096 - DNA, 25 bp, Homo sapien
gaatatgtaaaacgtggccatcagt

SEQ ID NO: 2566097 - DNA, 25 bp, Homo sapien
taaatgttatagatccaccttttcc

SEQ ID NO: 2566098 - DNA, 25 bp, Homo sapien
cagtgaacagttcaaggagtcgtgc

SEQ ID NO: 2566099 - DNA, 25 bp, Homo sapien
tcgtgccctggatgacctcaagtca

SEQ ID NO: 2566100 - DNA, 25 bp, Homo sapien
tggattacagctcaaatcagtgaac

SEQ ID NO: 2566101 - DNA, 25 bp, Homo sapien
agtcgtgccctggatgacctcaagt

SEQ ID NO: 2566102 - DNA, 25 bp, Homo sapien
gaaatatgaatctgctgcattcttc

SEQ ID NO: 2566103 - DNA, 25 bp, Homo sapien
gagaaatatgaatctgctgcattct

SEQ ID NO: 2566104 - DNA, 25 bp, Homo sapien
agtgagaaatatgaatctgctgcat

SEQ ID NO: 2566105 - DNA, 25 bp, Homo sapien
tgagaaatatgaatctgctgcattc

SEQ ID NO: 2566106 - DNA, 25 bp, Homo sapien
gaatatatcgtaacttgctttcttg

SEQ ID NO: 2566107 - DNA, 25 bp, Homo sapien
tgtccttgcaatgtatcagtccact

SEQ ID NO: 2566108 - DNA, 25 bp, Homo sapien
tccacttgaaattttgaatatatcg

SEQ ID NO: 2566109 - DNA, 25 bp, Homo sapien
tcttgggtagattcatccaaagaat

SEQ ID NO: 2566110 - DNA, 25 bp, Homo sapien
ttccagccagtcttgaagcatattt

SEQ ID NO: 2566111 - DNA, 25 bp, Homo sapien
tttccagccagtcttgaagcatatt

SEQ ID NO: 2566112 - DNA, 25 bp, Homo sapien
atcccagctgcaatctttaggcttc

SEQ ID NO: 2566113 - DNA, 25 bp, Homo sapien
gctgcaatctttaggcttcgatgaa

SEQ ID NO: 2566114 - DNA, 25 bp, Homo sapien
tttaggcttcgatgaacttcttttg

SEQ ID NO: 2566115 - DNA, 25 bp, Homo sapien
caatctttaggcttcgatgaacttc

SEQ ID NO: 2566116 - DNA, 25 bp, Homo sapien
tcagcctgacattgaataacgtatg

SEQ ID NO: 2566117 - DNA, 25 bp, Homo sapien
cgtatgcttctatgagtcgtgactc

SEQ ID NO: 2566118 - DNA, 25 bp, Homo sapien
cctttttccgcaggtgtaatgagtt

SEQ ID NO: 2566119 - DNA, 25 bp, Homo sapien
aaatctcttcctttttccgcaggtg

SEQ ID NO: 2566120 - DNA, 25 bp, Homo sapien
cagtgcagcaattagtccaggagca

SEQ ID NO: 2566121 - DNA, 25 bp, Homo sapien
caggagcatgttttagttcaattgc

SEQ ID NO: 2566122 - DNA, 25 bp, Homo sapien
tgtttcatacgccagtgcagcaatt

SEQ ID NO: 2566123 - DNA, 25 bp, Homo sapien
aattggctgtttcatacgccagtgc

SEQ ID NO: 2566124 - DNA, 25 bp, Homo sapien
ctccatttggcagaatatgcaggct

SEQ ID NO: 2566125 - DNA, 25 bp, Homo sapien
catttggcagaatatgcaggctcca

SEQ ID NO: 2566126 - DNA, 25 bp, Homo sapien
ccatttggcagaatatgcaggctcc

SEQ ID NO: 2566127 - DNA, 25 bp, Homo sapien
tccatttggcagaatatgcaggctc

SEQ ID NO: 2566128 - DNA, 25 bp, Homo sapien
ttgtttttagcgttgtgaatactta

SEQ ID NO: 2566129 - DNA, 25 bp, Homo sapien
tgtttttagcgttgtgaatacttac

SEQ ID NO: 2566130 - DNA, 25 bp, Homo sapien
attgtttttagcgttgtgaatactt

SEQ ID NO: 2566131 - DNA, 25 bp, Homo sapien
aagtctcaccatggtaacagtaagc

SEQ ID NO: 2566132 - DNA, 25 bp, Homo sapien
cttcttggagagacctgattgcttc

SEQ ID NO: 2566133 - DNA, 25 bp, Homo sapien
gcttcaccgcatttatcactagcca

SEQ ID NO: 2566134 - DNA, 25 bp, Homo sapien
ttatcactagccaataaagtctcac

SEQ ID NO: 2566135 - DNA, 25 bp, Homo sapien
agaacagatgtcctgaaggtttgac

SEQ ID NO: 2566136 - DNA, 25 bp, Homo sapien
tagggtgttcttcacaaggtttcca

SEQ ID NO: 2566137 - DNA, 25 bp, Homo sapien
gaaggtttgactgttggtccaggtc

SEQ ID NO: 2566138 - DNA, 25 bp, Homo sapien
gtccaggtcctttggtttctccata

SEQ ID NO: 2566139 - DNA, 25 bp, Homo sapien
tgggtcttttggtgagatcaaatgc

SEQ ID NO: 2566140 - DNA, 25 bp, Homo sapien
cacttgtaggaggaaattcgaaagg

SEQ ID NO: 2566141 - DNA, 25 bp, Homo sapien
ggctctacgagaccataatttgctt

SEQ ID NO: 2566142 - DNA, 25 bp, Homo sapien
catccttgggtcttttggtgagatc

SEQ ID NO: 2566143 - DNA, 25 bp, Homo sapien
ttgaggtttgatgtctggttctttc

SEQ ID NO: 2566144 - DNA, 25 bp, Homo sapien
ggtttgatgtctggttctttcacag

SEQ ID NO: 2566145 - DNA, 25 bp, Homo sapien
gtccttttgaggtttgatgtctggt

SEQ ID NO: 2566146 - DNA, 25 bp, Homo sapien
ctggttctttcacaggtttcacttc

SEQ ID NO: 2566147 - DNA, 25 bp, Homo sapien
tatttactgctagagaaattctaag

SEQ ID NO: 2566148 - DNA, 25 bp, Homo sapien
tactgctagagaaattctaagtgca

SEQ ID NO: 2566149 - DNA, 25 bp, Homo sapien
gctagagaaattctaagtgcaagtt

SEQ ID NO: 2566150 - DNA, 25 bp, Homo sapien
gagaaattctaagtgcaagttgtat

SEQ ID NO: 2566151 - DNA, 25 bp, Homo sapien
catgtcaaagatgcctactgatgta

SEQ ID NO: 2566152 - DNA, 25 bp, Homo sapien
tcgtatatggtagtatcatccccaa

SEQ ID NO: 2566153 - DNA, 25 bp, Homo sapien
tacagaagcactgagcatattacat

SEQ ID NO: 2566154 - DNA, 25 bp, Homo sapien
ccacagagtagagagctggcatcaa

SEQ ID NO: 2566155 - DNA, 25 bp, Homo sapien
ttttgcactgttttaactgctactg

SEQ ID NO: 2566156 - DNA, 25 bp, Homo sapien
gctactggcttagtaagtataaaaa

SEQ ID NO: 2566157 - DNA, 25 bp, Homo sapien
tatttgtcgaaaaacaaaagatctc

SEQ ID NO: 2566158 - DNA, 25 bp, Homo sapien
actgttttaactgctactggcttag

SEQ ID NO: 2566159 - DNA, 25 bp, Homo sapien
agttgctcaggccaacaacactaaa

SEQ ID NO: 2566160 - DNA, 25 bp, Homo sapien
ctggcagccttctcatctcaataaa

SEQ ID NO: 2566161 - DNA, 25 bp, Homo sapien
tcaggccaacaacactaaagtcatt

SEQ ID NO: 2566162 - DNA, 25 bp, Homo sapien
caacactaaagtcattcttggttct

SEQ ID NO: 2566163 - DNA, 25 bp, Homo sapien
ttgatgcacatcttagaagacagga

SEQ ID NO: 2566164 - DNA, 25 bp, Homo sapien
tgtaccaggcttgatgcacatctta

SEQ ID NO: 2566165 - DNA, 25 bp, Homo sapien
caggcttgatgcacatcttagaaga

SEQ ID NO: 2566166 - DNA, 25 bp, Homo sapien
taccaggcttgatgcacatcttaga

SEQ ID NO: 2566167 - DNA, 25 bp, Homo sapien
catgatgtctccgtcaacaaaatgg

SEQ ID NO: 2566168 - DNA, 25 bp, Homo sapien
tttggaaggtacactcttctctagg

SEQ ID NO: 2566169 - DNA, 25 bp, Homo sapien
tggataatccttttaggagtagtct

SEQ ID NO: 2566170 - DNA, 25 bp, Homo sapien
ggtcaagtgttgaatttgtgctctg

SEQ ID NO: 2566171 - DNA, 25 bp, Homo sapien
gcttgctattcgtcctgcccaaaat

SEQ ID NO: 2566172 - DNA, 25 bp, Homo sapien
atgaggtgcttgctattcgtcctgc

SEQ ID NO: 2566173 - DNA, 25 bp, Homo sapien
tcctgcccaaaatcgtaggtagggc

SEQ ID NO: 2566174 - DNA, 25 bp, Homo sapien
gctattcgtcctgcccaaaatcgta

SEQ ID NO: 2566175 - DNA, 25 bp, Homo sapien
ggtcagagcccctatacactttcta

SEQ ID NO: 2566176 - DNA, 25 bp, Homo sapien
taccctggcaactgtgacaacaaat

SEQ ID NO: 2566177 - DNA, 25 bp, Homo sapien
tgaaggttcataccatctgcctaaa

SEQ ID NO: 2566178 - DNA, 25 bp, Homo sapien
tcatggtcctcaagctagccttagc

SEQ ID NO: 2566179 - DNA, 25 bp, Homo sapien
tgtgtcgtctgagttccaactccat

SEQ ID NO: 2566180 - DNA, 25 bp, Homo sapien
ctgtgtcgtctgagttccaactcca

SEQ ID NO: 2566181 - DNA, 25 bp, Homo sapien
ttgtatcctatagaactcgtttaac

SEQ ID NO: 2566182 - DNA, 25 bp, Homo sapien
tgggttgagtaagaccaaagaagac

SEQ ID NO: 2566183 - DNA, 25 bp, Homo sapien
tagaactcgtttaacacatactgat

SEQ ID NO: 2566184 - DNA, 25 bp, Homo sapien
cttgttttgtatcctatagaactcg

SEQ ID NO: 2566185 - DNA, 25 bp, Homo sapien
caagtgacacttttcattaggaacc

SEQ ID NO: 2566186 - DNA, 25 bp, Homo sapien
tccaagtgacacttttcattaggaa

SEQ ID NO: 2566187 - DNA, 25 bp, Homo sapien
tgacacttttcattaggaacctcag

SEQ ID NO: 2566188 - DNA, 25 bp, Homo sapien
agtgacacttttcattaggaacctc

SEQ ID NO: 2566189 - DNA, 25 bp, Homo sapien
cgccaggatggttgttggaagtaca

SEQ ID NO: 2566190 - DNA, 25 bp, Homo sapien
catgacagaggatttcagccaaaaa

SEQ ID NO: 2566191 - DNA, 25 bp, Homo sapien
tactcatgggacttgtatcacaggg

SEQ ID NO: 2566192 - DNA, 25 bp, Homo sapien
tcctggatgcttgagactaagtcac

SEQ ID NO: 2566193 - DNA, 25 bp, Homo sapien
gatcaaagaagcatgcaacactgag

SEQ ID NO: 2566194 - DNA, 25 bp, Homo sapien
gattgccactgcttaactctccatg

SEQ ID NO: 2566195 - DNA, 25 bp, Homo sapien
cccgagagcacatcacagtatggag

SEQ ID NO: 2566196 - DNA, 25 bp, Homo sapien
tgagctatcacacggagaacacctg

SEQ ID NO: 2566197 - DNA, 25 bp, Homo sapien
acaatgcacttctgacagctgtgtt

SEQ ID NO: 2566198 - DNA, 25 bp, Homo sapien
ttacacaatgcacttctgacagctg

SEQ ID NO: 2566199 - DNA, 25 bp, Homo sapien
atgcacttctgacagctgtgtttgt

SEQ ID NO: 2566200 - DNA, 25 bp, Homo sapien
tacacaatgcacttctgacagctgt

SEQ ID NO: 2566201 - DNA, 25 bp, Homo sapien
gacaaatcaaggacaggcccttcag

SEQ ID NO: 2566202 - DNA, 25 bp, Homo sapien
cacttggccccagatcagttttcca

SEQ ID NO: 2566203 - DNA, 25 bp, Homo sapien
taccttctgctccaatgagacctct

SEQ ID NO: 2566204 - DNA, 25 bp, Homo sapien
gatagctgtgtccactattatgtga

SEQ ID NO: 2566205 - DNA, 25 bp, Homo sapien
catagagtgtacgcaggtcctccat

SEQ ID NO: 2566206 - DNA, 25 bp, Homo sapien
gctccagatccggtattaaaggagg

SEQ ID NO: 2566207 - DNA, 25 bp, Homo sapien
gggctgctccagatccggtattaaa

SEQ ID NO: 2566208 - DNA, 25 bp, Homo sapien
ccagatccggtattaaaggagggcg

SEQ ID NO: 2566209 - DNA, 25 bp, Homo sapien
gatgaatgggctgttgtcttaggga

SEQ ID NO: 2566210 - DNA, 25 bp, Homo sapien
ttctgtttgtgaagcacctccttca

SEQ ID NO: 2566211 - DNA, 25 bp, Homo sapien
gggtcactgctgaaacccaattccg

SEQ ID NO: 2566212 - DNA, 25 bp, Homo sapien
tgaaacccaattccgcaacttctgt

SEQ ID NO: 2566213 - DNA, 25 bp, Homo sapien
ttcacctaaacacaaagggtcactg

SEQ ID NO: 2566214 - DNA, 25 bp, Homo sapien
ggcggcggcgcgccgaaaggcatcc

SEQ ID NO: 2566215 - DNA, 25 bp, Homo sapien
cggcggcgcgccgaaaggcatccac

SEQ ID NO: 2566216 - DNA, 25 bp, Homo sapien
gcggcggcgcgccgaaaggcatcca

SEQ ID NO: 2566217 - DNA, 25 bp, Homo sapien
caaaagcatgccaaagacccgtggg

SEQ ID NO: 2566218 - DNA, 25 bp, Homo sapien
gacccgtgggatggataagcatatt

SEQ ID NO: 2566219 - DNA, 25 bp, Homo sapien
acaacaggcctgctgattacagagg

SEQ ID NO: 2566220 - DNA, 25 bp, Homo sapien
gagaagtactctacatatggccaga

SEQ ID NO: 2566221 - DNA, 25 bp, Homo sapien
tcttctcaactcctatagggaagaa

SEQ ID NO: 2566222 - DNA, 25 bp, Homo sapien
tagggaagaaatatgttctcagata

SEQ ID NO: 2566223 - DNA, 25 bp, Homo sapien
cctcttctcaactcctatagggaag

SEQ ID NO: 2566224 - DNA, 25 bp, Homo sapien
tgtctcctcccattattcttcctcc

SEQ ID NO: 2566225 - DNA, 25 bp, Homo sapien
gtgttcagtaaaagcttagtaagtc

SEQ ID NO: 2566226 - DNA, 25 bp, Homo sapien
tagtaagtcaagtattcccagtaac

SEQ ID NO: 2566227 - DNA, 25 bp, Homo sapien
tgaagattatttcgtgagtttagaa

SEQ ID NO: 2566228 - DNA, 25 bp, Homo sapien
tgagcatgtaataccaaaatttgat

SEQ ID NO: 2566229 - DNA, 25 bp, Homo sapien
aggcattcaaatccaaaagatccat

SEQ ID NO: 2566230 - DNA, 25 bp, Homo sapien
cattcaaatccaaaagatccatcag

SEQ ID NO: 2566231 - DNA, 25 bp, Homo sapien
caaatccaaaagatccatcagtcac

SEQ ID NO: 2566232 - DNA, 25 bp, Homo sapien
gatccatcagtcacatgtgccacca

SEQ ID NO: 2566233 - DNA, 25 bp, Homo sapien
aaggaccagcccacaaagagttagc

SEQ ID NO: 2566234 - DNA, 25 bp, Homo sapien
gactcaccatgtaccaaggacactg

SEQ ID NO: 2566235 - DNA, 25 bp, Homo sapien
tgatcagaacccacagaaatgtcct

SEQ ID NO: 2566236 - DNA, 25 bp, Homo sapien
caactacaggacaggatgctatgct

SEQ ID NO: 2566237 - DNA, 25 bp, Homo sapien
aattcaacagaaataagatggtgtc

SEQ ID NO: 2566238 - DNA, 25 bp, Homo sapien
agatggtgtctgctctctcagaaat

SEQ ID NO: 2566239 - DNA, 25 bp, Homo sapien
tctgacagcttggtatatgcctttt

SEQ ID NO: 2566240 - DNA, 25 bp, Homo sapien
ttttaaatgaagctgcttctgacag

SEQ ID NO: 2566241 - DNA, 25 bp, Homo sapien
tggcagtctctgtcataggtaggta

SEQ ID NO: 2566242 - DNA, 25 bp, Homo sapien
gaatggctactggagtatatttggc

SEQ ID NO: 2566243 - DNA, 25 bp, Homo sapien
tggagtatatttggcagtctctgtc

SEQ ID NO: 2566244 - DNA, 25 bp, Homo sapien
gcagtctctgtcataggtaggtatt

SEQ ID NO: 2566245 - DNA, 25 bp, Homo sapien
gggctagcttaaacttcaggcagga

SEQ ID NO: 2566246 - DNA, 25 bp, Homo sapien
acttgtgtagtcatgggctagctta

SEQ ID NO: 2566247 - DNA, 25 bp, Homo sapien
gtcatgggctagcttaaacttcagg

SEQ ID NO: 2566248 - DNA, 25 bp, Homo sapien
tgtagtcatgggctagcttaaactt

SEQ ID NO: 2566249 - DNA, 25 bp, Homo sapien
actgggcccaatctaccggcatcta

SEQ ID NO: 2566250 - DNA, 25 bp, Homo sapien
gcccaaacttactgggcccaatcta

SEQ ID NO: 2566251 - DNA, 25 bp, Homo sapien
tgcccgcatctcttcctttcacatc

SEQ ID NO: 2566252 - DNA, 25 bp, Homo sapien
ttcacatcccaacggcccaaactta

SEQ ID NO: 2566253 - DNA, 25 bp, Homo sapien
taagtggataacctagggtggagag

SEQ ID NO: 2566254 - DNA, 25 bp, Homo sapien
tctctctcacataacagtacaaaag

SEQ ID NO: 2566255 - DNA, 25 bp, Homo sapien
cagggaacccagactagccagtcag

SEQ ID NO: 2566256 - DNA, 25 bp, Homo sapien
tgctgtcttcatcaattggcgtcca

SEQ ID NO: 2566257 - DNA, 25 bp, Homo sapien
taacagatgcctccgtgaatttgga

SEQ ID NO: 2566258 - DNA, 25 bp, Homo sapien
gatgcctccgtgaatttggacatcc

SEQ ID NO: 2566259 - DNA, 25 bp, Homo sapien
cctccgtgaatttggacatcccatt

SEQ ID NO: 2566260 - DNA, 25 bp, Homo sapien
acagatgcctccgtgaatttggaca

SEQ ID NO: 2566261 - DNA, 25 bp, Homo sapien
cagaactcaagaagcagatgctttt

SEQ ID NO: 2566262 - DNA, 25 bp, Homo sapien
tttttacgagccataccatactaga

SEQ ID NO: 2566263 - DNA, 25 bp, Homo sapien
tctcaattaggatatagatcactca

SEQ ID NO: 2566264 - DNA, 25 bp, Homo sapien
gaaatggtttagcaagcaaacagtg

SEQ ID NO: 2566265 - DNA, 25 bp, Homo sapien
caatttcatctttctcttccaccat

SEQ ID NO: 2566266 - DNA, 25 bp, Homo sapien
gctacaatttcatctttctcttcca

SEQ ID NO: 2566267 - DNA, 25 bp, Homo sapien
tacaatttcatctttctcttccacc

SEQ ID NO: 2566268 - DNA, 25 bp, Homo sapien
catcctggttgctacaatttcatct

SEQ ID NO: 2566269 - DNA, 25 bp, Homo sapien
tgggtttcaaagcaccgtattctgg

SEQ ID NO: 2566270 - DNA, 25 bp, Homo sapien
ggatcagtgtccaaacggtattcct

SEQ ID NO: 2566271 - DNA, 25 bp, Homo sapien
tttaggctcaactataggattccca

SEQ ID NO: 2566272 - DNA, 25 bp, Homo sapien
tgagaacggactaagacgcctagct

SEQ ID NO: 2566273 - DNA, 25 bp, Homo sapien
cttttgtccaattccaaagtctaca

SEQ ID NO: 2566274 - DNA, 25 bp, Homo sapien
gtccaattccaaagtctacaatctt

SEQ ID NO: 2566275 - DNA, 25 bp, Homo sapien
cagatgtaatcatggtatactacag

SEQ ID NO: 2566276 - DNA, 25 bp, Homo sapien
acagatgtaatcatggtatactaca

SEQ ID NO: 2566277 - DNA, 25 bp, Homo sapien
ctgcctcagcccctcaggtagctgg

SEQ ID NO: 2566278 - DNA, 25 bp, Homo sapien
cactgcaatctctgaagcgattctc

SEQ ID NO: 2566279 - DNA, 25 bp, Homo sapien
gactacaggcacacgctaccccgcc

SEQ ID NO: 2566280 - DNA, 25 bp, Homo sapien
ctacaggcacacgctaccccgccca

SEQ ID NO: 2566281 - DNA, 25 bp, Homo sapien
taccagaggcacaaggaggagctgg

SEQ ID NO: 2566282 - DNA, 25 bp, Homo sapien
agccgaattctaccagaggcacaag

SEQ ID NO: 2566283 - DNA, 25 bp, Homo sapien
gccgaattctaccagaggcacaagg

SEQ ID NO: 2566284 - DNA, 25 bp, Homo sapien
gaggcacaaggaggagctggtacca

SEQ ID NO: 2566285 - DNA, 25 bp, Homo sapien
aaagccaaaataagagtcacaataa

SEQ ID NO: 2566286 - DNA, 25 bp, Homo sapien
gacctttctgatgctattttctatc

SEQ ID NO: 2566287 - DNA, 25 bp, Homo sapien
gaggctctggttccctacatataaa

SEQ ID NO: 2566288 - DNA, 25 bp, Homo sapien
ctttcaaaggtcaagagaggctctg

SEQ ID NO: 2566289 - DNA, 25 bp, Homo sapien
tttgtgtatgagctccattatctga

SEQ ID NO: 2566290 - DNA, 25 bp, Homo sapien
gttggaaacgtgtcgctgaaaggtc

SEQ ID NO: 2566291 - DNA, 25 bp, Homo sapien
ttggaaacgtgtcgctgaaaggtct

SEQ ID NO: 2566292 - DNA, 25 bp, Homo sapien
tccattatctgagttggaaacgtgt

SEQ ID NO: 2566293 - DNA, 25 bp, Homo sapien
taatcgtagcctgtagcagatacca

SEQ ID NO: 2566294 - DNA, 25 bp, Homo sapien
cacatcaaagtgttccatagccaca

SEQ ID NO: 2566295 - DNA, 25 bp, Homo sapien
tgtgatcaccaagctggacattcaa

SEQ ID NO: 2566296 - DNA, 25 bp, Homo sapien
gcagataccaaacactggaagccct

SEQ ID NO: 2566297 - DNA, 25 bp, Homo sapien
catgtggtatgcatagattgagagg

SEQ ID NO: 2566298 - DNA, 25 bp, Homo sapien
tactccttgaatgaagaccactatg

SEQ ID NO: 2566299 - DNA, 25 bp, Homo sapien
aatatcacctgcatacaaacacctg

SEQ ID NO: 2566300 - DNA, 25 bp, Homo sapien
caaaagttagactccgtaggaatat

SEQ ID NO: 2566301 - DNA, 25 bp, Homo sapien
ttaaacatcttagctggcacacaag

SEQ ID NO: 2566302 - DNA, 25 bp, Homo sapien
tatgggccccacaatatgttacact

SEQ ID NO: 2566303 - DNA, 25 bp, Homo sapien
gttacatacatgacctgagatccct

SEQ ID NO: 2566304 - DNA, 25 bp, Homo sapien
tttactgctgatttatatgggcccc

SEQ ID NO: 2566305 - DNA, 25 bp, Homo sapien
aaagcaatgagttggcaggcgcagc

SEQ ID NO: 2566306 - DNA, 25 bp, Homo sapien
cggcaactgactgcaggatcacagc

SEQ ID NO: 2566307 - DNA, 25 bp, Homo sapien
caggcgcagctccacagagcggcag

SEQ ID NO: 2566308 - DNA, 25 bp, Homo sapien
gcaaatgattgcagtagcaacagcg

SEQ ID NO: 2566309 - DNA, 25 bp, Homo sapien
tacacacaaaatccgggaattcaca

SEQ ID NO: 2566310 - DNA, 25 bp, Homo sapien
caaaacggcttgtgcaggaatctct

SEQ ID NO: 2566311 - DNA, 25 bp, Homo sapien
tagcatgccattctctaagtagaca

SEQ ID NO: 2566312 - DNA, 25 bp, Homo sapien
catagtaatctcactggcaaacctg

SEQ ID NO: 2566313 - DNA, 25 bp, Homo sapien
catggtctccatcacagggggtgag

SEQ ID NO: 2566314 - DNA, 25 bp, Homo sapien
gctgttgctcagaaccacaaaatca

SEQ ID NO: 2566315 - DNA, 25 bp, Homo sapien
ctgttgctcagaaccacaaaatcat

SEQ ID NO: 2566316 - DNA, 25 bp, Homo sapien
agcactggttgcgatgctgctgttg

SEQ ID NO: 2566317 - DNA, 25 bp, Homo sapien
ctgctatggctagtcaaagggtgat

SEQ ID NO: 2566318 - DNA, 25 bp, Homo sapien
gggtaacatctgaggcattctttgg

SEQ ID NO: 2566319 - DNA, 25 bp, Homo sapien
catgcaacacgaggccaaagcagag

SEQ ID NO: 2566320 - DNA, 25 bp, Homo sapien
cctcgggatggcactcttggtgact

SEQ ID NO: 2566321 - DNA, 25 bp, Homo sapien
aaagagatgcagaatactcggagtg

SEQ ID NO: 2566322 - DNA, 25 bp, Homo sapien
gctgaagacagcacgtagtctgata

SEQ ID NO: 2566323 - DNA, 25 bp, Homo sapien
gtcaggccacggatgatgcaggcag

SEQ ID NO: 2566324 - DNA, 25 bp, Homo sapien
tacacaggtgaatgatttggacaaa

SEQ ID NO: 2566325 - DNA, 25 bp, Homo sapien
tcatgttcacgtggcattagttgaa

SEQ ID NO: 2566326 - DNA, 25 bp, Homo sapien
taaacacaagctgtcatgttcacgt

SEQ ID NO: 2566327 - DNA, 25 bp, Homo sapien
cacgtggcattagttgaatgctaaa

SEQ ID NO: 2566328 - DNA, 25 bp, Homo sapien
cacaagctgtcatgttcacgtggca

SEQ ID NO: 2566329 - DNA, 25 bp, Homo sapien
aaagtcccgtgctacaattcacagg

SEQ ID NO: 2566330 - DNA, 25 bp, Homo sapien
aaagattgccaaacacgaaagagtg

SEQ ID NO: 2566331 - DNA, 25 bp, Homo sapien
ggattctgtaatccccgcagccatg

SEQ ID NO: 2566332 - DNA, 25 bp, Homo sapien
tatggactgaggtggaaataagcac

SEQ ID NO: 2566333 - DNA, 25 bp, Homo sapien
tccatgggtgtcaattcccttttaa

SEQ ID NO: 2566334 - DNA, 25 bp, Homo sapien
ttttttgatggacaattgtggcaat

SEQ ID NO: 2566335 - DNA, 25 bp, Homo sapien
tgcctttacttccaagcaacttctc

SEQ ID NO: 2566336 - DNA, 25 bp, Homo sapien
taaacattatatagttcagccactg

SEQ ID NO: 2566337 - DNA, 25 bp, Homo sapien
gggacacccacaatgaccctccgct

SEQ ID NO: 2566338 - DNA, 25 bp, Homo sapien
accctccgctcccacaatcttgttc

SEQ ID NO: 2566339 - DNA, 25 bp, Homo sapien
acagatcatcaaatggactgttcag

SEQ ID NO: 2566340 - DNA, 25 bp, Homo sapien
tcaggacgtagattggggacaccca

SEQ ID NO: 2566341 - DNA, 25 bp, Homo sapien
gaataactcaaaacttgcttcaacc

SEQ ID NO: 2566342 - DNA, 25 bp, Homo sapien
gaatgtgactggcttttgagaggta

SEQ ID NO: 2566343 - DNA, 25 bp, Homo sapien
gcttcaaccagcacacgtggaatgt

SEQ ID NO: 2566344 - DNA, 25 bp, Homo sapien
taatacggcaataagaagatcccaa

SEQ ID NO: 2566345 - DNA, 25 bp, Homo sapien
tacggttccctctacgccaagcatt

SEQ ID NO: 2566346 - DNA, 25 bp, Homo sapien
taagaggctaagctagtcccagggt

SEQ ID NO: 2566347 - DNA, 25 bp, Homo sapien
tatggagtcctctgttacaatcaag

SEQ ID NO: 2566348 - DNA, 25 bp, Homo sapien
gataatgagtctgtggcattgccaa

SEQ ID NO: 2566349 - DNA, 25 bp, Homo sapien
tatgtcaatctgatggtaatgccac

SEQ ID NO: 2566350 - DNA, 25 bp, Homo sapien
caatgacagaaatgtgctgtgtgca

SEQ ID NO: 2566351 - DNA, 25 bp, Homo sapien
gatgtgttaaaagactgcagtgaac

SEQ ID NO: 2566352 - DNA, 25 bp, Homo sapien
gctcaagtgtctatggagtatgggc

SEQ ID NO: 2566353 - DNA, 25 bp, Homo sapien
tatcatgaatagctattattctgag

SEQ ID NO: 2566354 - DNA, 25 bp, Homo sapien
catgaatagctattattctgagata

SEQ ID NO: 2566355 - DNA, 25 bp, Homo sapien
gaatagctattattctgagatacgt

SEQ ID NO: 2566356 - DNA, 25 bp, Homo sapien
tttatcatgaatagctattattctg

SEQ ID NO: 2566357 - DNA, 25 bp, Homo sapien
tgaagcacacttagtttttctggtg

SEQ ID NO: 2566358 - DNA, 25 bp, Homo sapien
cacgttcacatctgaagaagccatg

SEQ ID NO: 2566359 - DNA, 25 bp, Homo sapien
tatgcatagagggacggagtgcagg

SEQ ID NO: 2566360 - DNA, 25 bp, Homo sapien
cttagcagctttacacagactgggc

SEQ ID NO: 2566361 - DNA, 25 bp, Homo sapien
ttggaatttcttgaagatctaaagt

SEQ ID NO: 2566362 - DNA, 25 bp, Homo sapien
ctttttggcaacttgaaaggtctgg

SEQ ID NO: 2566363 - DNA, 25 bp, Homo sapien
tggcaacttgaaaggtctggatggt

SEQ ID NO: 2566364 - DNA, 25 bp, Homo sapien
tttttggcaacttgaaaggtctgga

SEQ ID NO: 2566365 - DNA, 25 bp, Homo sapien
tttggcaacttgaaaggtctggatg

SEQ ID NO: 2566366 - DNA, 25 bp, Homo sapien
aaacacaaagaagtgtcggctatca

SEQ ID NO: 2566367 - DNA, 25 bp, Homo sapien
gaagtgtcggctatcagagctgcat

SEQ ID NO: 2566368 - DNA, 25 bp, Homo sapien
aagaagtgtcggctatcagagctgc

SEQ ID NO: 2566369 - DNA, 25 bp, Homo sapien
acaaagaagtgtcggctatcagagc

SEQ ID NO: 2566370 - DNA, 25 bp, Homo sapien
ggcactaatactccaaccaaggcac

SEQ ID NO: 2566371 - DNA, 25 bp, Homo sapien
cagcaatggatcagagaagtcaggg

SEQ ID NO: 2566372 - DNA, 25 bp, Homo sapien
ggccagtcggctatcagggctgcat

SEQ ID NO: 2566373 - DNA, 25 bp, Homo sapien
cagactacgatgaacatggtgcaca

SEQ ID NO: 2566374 - DNA, 25 bp, Homo sapien
aatctctggcctattgctgttcctc

SEQ ID NO: 2566375 - DNA, 25 bp, Homo sapien
taaagggataatttgctaatgttgc

SEQ ID NO: 2566376 - DNA, 25 bp, Homo sapien
ttcaccatattattccatgtgacca

SEQ ID NO: 2566377 - DNA, 25 bp, Homo sapien
tttggcttgttcatctgcatattta

SEQ ID NO: 2566378 - DNA, 25 bp, Homo sapien
caataaagttctcgttatttcaaag

SEQ ID NO: 2566379 - DNA, 25 bp, Homo sapien
tcaataaagttctcgttatttcaaa

SEQ ID NO: 2566380 - DNA, 25 bp, Homo sapien
gatcttcaataaagttctcgttatt

SEQ ID NO: 2566381 - DNA, 25 bp, Homo sapien
tcttcaataaagttctcgttatttc

SEQ ID NO: 2566382 - DNA, 25 bp, Homo sapien
tctctctttcataatgatcatctga

SEQ ID NO: 2566383 - DNA, 25 bp, Homo sapien
gatcatctgaccatctatcatcccg

SEQ ID NO: 2566384 - DNA, 25 bp, Homo sapien
tgtccttgtggaagttccagtcaac

SEQ ID NO: 2566385 - DNA, 25 bp, Homo sapien
ttggaacgtcgcagaaaaagctgtc

SEQ ID NO: 2566386 - DNA, 25 bp, Homo sapien
aataccactctggaatatcggtcac

SEQ ID NO: 2566387 - DNA, 25 bp, Homo sapien
ggaattatctacattgcacattgat

SEQ ID NO: 2566388 - DNA, 25 bp, Homo sapien
tgcaggtaaattccataatgtctcc

SEQ ID NO: 2566389 - DNA, 25 bp, Homo sapien
gcacattgatttaattgcaggtaaa

SEQ ID NO: 2566390 - DNA, 25 bp, Homo sapien
gcttcaaggtatgagaaacgtctcg

SEQ ID NO: 2566391 - DNA, 25 bp, Homo sapien
gacaggacgatctattgttcagaat

SEQ ID NO: 2566392 - DNA, 25 bp, Homo sapien
gctcaactattttctgacaggacga

SEQ ID NO: 2566393 - DNA, 25 bp, Homo sapien
ttcagaatggcgatgtagtttccca

SEQ ID NO: 2566394 - DNA, 25 bp, Homo sapien
caatcccggtgatggtagtcacgcc

SEQ ID NO: 2566395 - DNA, 25 bp, Homo sapien
taattcaccaatatagctgtccccg

SEQ ID NO: 2566396 - DNA, 25 bp, Homo sapien
tagtcacgccgtcagaagagttcca

SEQ ID NO: 2566397 - DNA, 25 bp, Homo sapien
taaagctggcgtggcatagtcagcc

SEQ ID NO: 2566398 - DNA, 25 bp, Homo sapien
gccccacctacagttaaggcaagga

SEQ ID NO: 2566399 - DNA, 25 bp, Homo sapien
gaccggaacacctggaactcggata

SEQ ID NO: 2566400 - DNA, 25 bp, Homo sapien
aactcggataactccagtgagggca

SEQ ID NO: 2566401 - DNA, 25 bp, Homo sapien
taacgctcaaaaggatgggacgacc

SEQ ID NO: 2566402 - DNA, 25 bp, Homo sapien
gacacgccccagattactgtgatgg

SEQ ID NO: 2566403 - DNA, 25 bp, Homo sapien
attgatatcaaacctcggccctggg

SEQ ID NO: 2566404 - DNA, 25 bp, Homo sapien
ctgggctggcgatgttaaaactgct

SEQ ID NO: 2566405 - DNA, 25 bp, Homo sapien
gaatgtctcaatgaagcagctggtg

SEQ ID NO: 2566406 - DNA, 25 bp, Homo sapien
ctgacaaaccaaccattgctgaggc

SEQ ID NO: 2566407 - DNA, 25 bp, Homo sapien
gatcactttgccttctcggtcggga

SEQ ID NO: 2566408 - DNA, 25 bp, Homo sapien
taaatgcaacagcaactgacagccc

SEQ ID NO: 2566409 - DNA, 25 bp, Homo sapien
aaagtctacagacaagccgacggca

SEQ ID NO: 2566410 - DNA, 25 bp, Homo sapien
ggcgaaagcccaactgatacacatg

SEQ ID NO: 2566411 - DNA, 25 bp, Homo sapien
tgtaacaaggcagagccagcgtcac

SEQ ID NO: 2566412 - DNA, 25 bp, Homo sapien
gacagcttggtgtgtggccttcaga

SEQ ID NO: 2566413 - DNA, 25 bp, Homo sapien
tgggcccctgggatctaaatgataa

SEQ ID NO: 2566414 - DNA, 25 bp, Homo sapien
tgcactgggtggaggaaaaaattcc

SEQ ID NO: 2566415 - DNA, 25 bp, Homo sapien
aataggacttttggttcattctgat

SEQ ID NO: 2566416 - DNA, 25 bp, Homo sapien
ttccatgtttggcatttgacagtcc

SEQ ID NO: 2566417 - DNA, 25 bp, Homo sapien
ggcttccatgtttggcatttgacag

SEQ ID NO: 2566418 - DNA, 25 bp, Homo sapien
cagaaagttccgagtgtgttaatac

SEQ ID NO: 2566419 - DNA, 25 bp, Homo sapien
cgagtgtgttaatacagcaggcaca

SEQ ID NO: 2566420 - DNA, 25 bp, Homo sapien
cagtgacttagaggaaggattgaag

SEQ ID NO: 2566421 - DNA, 25 bp, Homo sapien
tactagagagctgtgtaatttgcca

SEQ ID NO: 2566422 - DNA, 25 bp, Homo sapien
gcatcgtgcagatatttactagaga

SEQ ID NO: 2566423 - DNA, 25 bp, Homo sapien
gcttcttctcggttggcatcgtgca

SEQ ID NO: 2566424 - DNA, 25 bp, Homo sapien
ctgtgtgacagggaatcagctgaca

SEQ ID NO: 2566425 - DNA, 25 bp, Homo sapien
tatttccaggataggagatgcacct

SEQ ID NO: 2566426 - DNA, 25 bp, Homo sapien
cctgaggtactagaaagtggctggt

SEQ ID NO: 2566427 - DNA, 25 bp, Homo sapien
cgaatgtttgcaggatgagcgttaa

SEQ ID NO: 2566428 - DNA, 25 bp, Homo sapien
tgcaggtttcctgccggactccagg

SEQ ID NO: 2566429 - DNA, 25 bp, Homo sapien
tccgtcccggcagataaggaagagc

SEQ ID NO: 2566430 - DNA, 25 bp, Homo sapien
tctccgccacaccagtgcaggtttc

SEQ ID NO: 2566431 - DNA, 25 bp, Homo sapien
ggaagagccacccattctctccgcc

SEQ ID NO: 2566432 - DNA, 25 bp, Homo sapien
tggaaggattcctggatgagaccat

SEQ ID NO: 2566433 - DNA, 25 bp, Homo sapien
cccttcctactgtgggtctggaagg

SEQ ID NO: 2566434 - DNA, 25 bp, Homo sapien
tctggaaggattcctggatgagacc

SEQ ID NO: 2566435 - DNA, 25 bp, Homo sapien
ggtctggaaggattcctggatgaga

SEQ ID NO: 2566436 - DNA, 25 bp, Homo sapien
catccatgtgaggtattgactccca

SEQ ID NO: 2566437 - DNA, 25 bp, Homo sapien
tctctacatcctcggagggtccctg

SEQ ID NO: 2566438 - DNA, 25 bp, Homo sapien
cagttgcccggacacaggaagggat

SEQ ID NO: 2566439 - DNA, 25 bp, Homo sapien
cgtgtgtctaacagtgatgtgggcc

SEQ ID NO: 2566440 - DNA, 25 bp, Homo sapien
cttgggtctgatccgtaggcaggga

SEQ ID NO: 2566441 - DNA, 25 bp, Homo sapien
agcttgggtctgatccgtaggcagg

SEQ ID NO: 2566442 - DNA, 25 bp, Homo sapien
gcttgggtctgatccgtaggcaggg

SEQ ID NO: 2566443 - DNA, 25 bp, Homo sapien
gagcttgggtctgatccgtaggcag

SEQ ID NO: 2566444 - DNA, 25 bp, Homo sapien
gaatagcccaatatccagtttctgg

SEQ ID NO: 2566445 - DNA, 25 bp, Homo sapien
gggaatagcccaatatccagtttct

SEQ ID NO: 2566446 - DNA, 25 bp, Homo sapien
ttcctgatatcagggagcaattggc

SEQ ID NO: 2566447 - DNA, 25 bp, Homo sapien
ggctccttcctgatatcagggagca

SEQ ID NO: 2566448 - DNA, 25 bp, Homo sapien
tggcccagtcagattgtcgctcttg

SEQ ID NO: 2566449 - DNA, 25 bp, Homo sapien
aaatttgcaactcggactctaacag

SEQ ID NO: 2566450 - DNA, 25 bp, Homo sapien
gactctaacagcctgggtcagtttg

SEQ ID NO: 2566451 - DNA, 25 bp, Homo sapien
gtcgctcttgaaatttgcaactcgg

SEQ ID NO: 2566452 - DNA, 25 bp, Homo sapien
cagagctgatggggatgttggcctc

SEQ ID NO: 2566453 - DNA, 25 bp, Homo sapien
ggcactgttcggcctcagagctgat

SEQ ID NO: 2566454 - DNA, 25 bp, Homo sapien
gaagccagagtgatgttctcgtggc

SEQ ID NO: 2566455 - DNA, 25 bp, Homo sapien
tggttgaacatcatcctgcagagac

SEQ ID NO: 2566456 - DNA, 25 bp, Homo sapien
taggtacatcctgaactgaaacaga

SEQ ID NO: 2566457 - DNA, 25 bp, Homo sapien
agcttagagactcagaagtcagata

SEQ ID NO: 2566458 - DNA, 25 bp, Homo sapien
tgaaacagaaaccagtggaggctgc

SEQ ID NO: 2566459 - DNA, 25 bp, Homo sapien
agagactcagaagtcagataggtac

SEQ ID NO: 2566460 - DNA, 25 bp, Homo sapien
tccgtggctgtgagataacaaatct

SEQ ID NO: 2566461 - DNA, 25 bp, Homo sapien
tgggctgcaaggtaactgaaactct

SEQ ID NO: 2566462 - DNA, 25 bp, Homo sapien
gacaccgcttcactaggactgtagg

SEQ ID NO: 2566463 - DNA, 25 bp, Homo sapien
ttcccacggagagagatgtgattcc

SEQ ID NO: 2566464 - DNA, 25 bp, Homo sapien
ttcttgtgtggttttgggagatgag

SEQ ID NO: 2566465 - DNA, 25 bp, Homo sapien
atctgagaaggccaggacttcttgt

SEQ ID NO: 2566466 - DNA, 25 bp, Homo sapien
aatccagctgctccctggtctgttg

SEQ ID NO: 2566467 - DNA, 25 bp, Homo sapien
gaaggccaggacttcttgtgtggtt

SEQ ID NO: 2566468 - DNA, 25 bp, Homo sapien
cccgctccaacctgactccaccatg

SEQ ID NO: 2566469 - DNA, 25 bp, Homo sapien
ttgcagctgcttttgggcccccgct

SEQ ID NO: 2566470 - DNA, 25 bp, Homo sapien
caccatggtcatggcctaaagagct

SEQ ID NO: 2566471 - DNA, 25 bp, Homo sapien
ctggccttgcagctgcttttgggcc

SEQ ID NO: 2566472 - DNA, 25 bp, Homo sapien
tcccgtgttccctgcgtggtctgta

SEQ ID NO: 2566473 - DNA, 25 bp, Homo sapien
cccctgtctgatgggatggtggaca

SEQ ID NO: 2566474 - DNA, 25 bp, Homo sapien
tggtctgtactaagcaacctggact

SEQ ID NO: 2566475 - DNA, 25 bp, Homo sapien
cttgccatctggattcccgtgttcc

SEQ ID NO: 2566476 - DNA, 25 bp, Homo sapien
gaatttaaaaggacatgagtaaggc

SEQ ID NO: 2566477 - DNA, 25 bp, Homo sapien
tttgacagatctccatagtgctccc

SEQ ID NO: 2566478 - DNA, 25 bp, Homo sapien
gctgttattgaatttagcacaagaa

SEQ ID NO: 2566479 - DNA, 25 bp, Homo sapien
aataaggtatccttattgttgctgc

SEQ ID NO: 2566480 - DNA, 25 bp, Homo sapien
ccaattggctgtgtttaggggacat

SEQ ID NO: 2566481 - DNA, 25 bp, Homo sapien
tccaattggctgtgtttaggggaca

SEQ ID NO: 2566482 - DNA, 25 bp, Homo sapien
gaatgtccaattggctgtgtttagg

SEQ ID NO: 2566483 - DNA, 25 bp, Homo sapien
caggaatgtccaattggctgtgttt

SEQ ID NO: 2566484 - DNA, 25 bp, Homo sapien
gggatctccattgattgacacaagc

SEQ ID NO: 2566485 - DNA, 25 bp, Homo sapien
acaagctggctatgcctggagtaca

SEQ ID NO: 2566486 - DNA, 25 bp, Homo sapien
cattgattgacacaagctggctatg

SEQ ID NO: 2566487 - DNA, 25 bp, Homo sapien
aggcaccaaagggatctccattgat

SEQ ID NO: 2566488 - DNA, 25 bp, Homo sapien
agtcctccagcggtttcttggtctt

SEQ ID NO: 2566489 - DNA, 25 bp, Homo sapien
cctccagcggtttcttggtctttct

SEQ ID NO: 2566490 - DNA, 25 bp, Homo sapien
catctcgggaagatccatgtcctct

SEQ ID NO: 2566491 - DNA, 25 bp, Homo sapien
tgtgggcatctcgggaagatccatg

SEQ ID NO: 2566492 - DNA, 25 bp, Homo sapien
ttcctgagtcggacacccctctccg

SEQ ID NO: 2566493 - DNA, 25 bp, Homo sapien
ggacacccctctccggttcagagca

SEQ ID NO: 2566494 - DNA, 25 bp, Homo sapien
cctctccggttcagagcactgctca

SEQ ID NO: 2566495 - DNA, 25 bp, Homo sapien
agtcggacacccctctccggttcag

SEQ ID NO: 2566496 - DNA, 25 bp, Homo sapien
tcacaggccacttcctatttgtcct

SEQ ID NO: 2566497 - DNA, 25 bp, Homo sapien
ccttcctgagacagctgaaatgtca

SEQ ID NO: 2566498 - DNA, 25 bp, Homo sapien
ttcctatttgtccttcctgagacag

SEQ ID NO: 2566499 - DNA, 25 bp, Homo sapien
tccttcctgagacagctgaaatgtc

SEQ ID NO: 2566500 - DNA, 25 bp, Homo sapien
atttccatggttgttgcaggaagcc

SEQ ID NO: 2566501 - DNA, 25 bp, Homo sapien
tggctgattggcaagttccttcttg

SEQ ID NO: 2566502 - DNA, 25 bp, Homo sapien
gtggacacatttccatggttgttgc

SEQ ID NO: 2566503 - DNA, 25 bp, Homo sapien
gctgattggcaagttccttcttgga

SEQ ID NO: 2566504 - DNA, 25 bp, Homo sapien
gcttgtcctcatgcattcattagga

SEQ ID NO: 2566505 - DNA, 25 bp, Homo sapien
atctaagctaactgagtcattcaaa

SEQ ID NO: 2566506 - DNA, 25 bp, Homo sapien
aaggctcagacctgactgcaaagct

SEQ ID NO: 2566507 - DNA, 25 bp, Homo sapien
ggctccacttgaatctaagctaact

SEQ ID NO: 2566508 - DNA, 25 bp, Homo sapien
ggatcagccgtctcttgtgagcagc

SEQ ID NO: 2566509 - DNA, 25 bp, Homo sapien
atcagccgtctcttgtgagcagctg

SEQ ID NO: 2566510 - DNA, 25 bp, Homo sapien
ggggatcagccgtctcttgtgagca

SEQ ID NO: 2566511 - DNA, 25 bp, Homo sapien
gatcagccgtctcttgtgagcagct

SEQ ID NO: 2566512 - DNA, 25 bp, Homo sapien
ttctcctgccttatggatggttggg

SEQ ID NO: 2566513 - DNA, 25 bp, Homo sapien
gctttccccttaatggagacaccat

SEQ ID NO: 2566514 - DNA, 25 bp, Homo sapien
gacagggctttccccttaatggaga

SEQ ID NO: 2566515 - DNA, 25 bp, Homo sapien
cctgccttatggatggttggggcaa

SEQ ID NO: 2566516 - DNA, 25 bp, Homo sapien
gacctgcagggttcgttcttgggaa

SEQ ID NO: 2566517 - DNA, 25 bp, Homo sapien
tgcagggttcgttcttgggaaatag

SEQ ID NO: 2566518 - DNA, 25 bp, Homo sapien
ttcgttcttgggaaataggatgagg

SEQ ID NO: 2566519 - DNA, 25 bp, Homo sapien
cagacctgcagggttcgttcttggg

SEQ ID NO: 2566520 - DNA, 25 bp, Homo sapien
tgttgggagtcttgccgctcctgca

SEQ ID NO: 2566521 - DNA, 25 bp, Homo sapien
gcatggagtgttgggagtcttgccg

SEQ ID NO: 2566522 - DNA, 25 bp, Homo sapien
gctgtggtcaccactccaggtgctg

SEQ ID NO: 2566523 - DNA, 25 bp, Homo sapien
agaaagaagtgaccgccaagcatgg

SEQ ID NO: 2566524 - DNA, 25 bp, Homo sapien
caggctgccagtggacacgaagcgt

SEQ ID NO: 2566525 - DNA, 25 bp, Homo sapien
ccccacaggacaaacatgtcacaat

SEQ ID NO: 2566526 - DNA, 25 bp, Homo sapien
tgccagtggacacgaagcgtccaca

SEQ ID NO: 2566527 - DNA, 25 bp, Homo sapien
ccacaggacaaacatgtcacaatgg

SEQ ID NO: 2566528 - DNA, 25 bp, Homo sapien
aaaagccagcgaccacactgtaaag

SEQ ID NO: 2566529 - DNA, 25 bp, Homo sapien
cctgtgtcgagccatagaaggagca

SEQ ID NO: 2566530 - DNA, 25 bp, Homo sapien
cactgtaaagcagcgctgatgagtc

SEQ ID NO: 2566531 - DNA, 25 bp, Homo sapien
gaatgcgtggtctccaatggtggcc

SEQ ID NO: 2566532 - DNA, 25 bp, Homo sapien
gtttgagtctgtcagagtctgtgca

SEQ ID NO: 2566533 - DNA, 25 bp, Homo sapien
ctgtgcattgacaggatccaaaagc

SEQ ID NO: 2566534 - DNA, 25 bp, Homo sapien
ggctggaaggcagatgtttgagtct

SEQ ID NO: 2566535 - DNA, 25 bp, Homo sapien
gagtacatggccgaggctggaaggc

SEQ ID NO: 2566536 - DNA, 25 bp, Homo sapien
ggcgacctgccacactcattctggg

SEQ ID NO: 2566537 - DNA, 25 bp, Homo sapien
gtgagttggcagctacttggatcaa

SEQ ID NO: 2566538 - DNA, 25 bp, Homo sapien
ttggatcaaggcgacctgccacact

SEQ ID NO: 2566539 - DNA, 25 bp, Homo sapien
gcagctacttggatcaaggcgacct

SEQ ID NO: 2566540 - DNA, 25 bp, Homo sapien
ctgcagccctgcagcagcaacacac

SEQ ID NO: 2566541 - DNA, 25 bp, Homo sapien
aaccttctctatttttctctatgga

SEQ ID NO: 2566542 - DNA, 25 bp, Homo sapien
ttctgcaagcagacaagggaaagga

SEQ ID NO: 2566543 - DNA, 25 bp, Homo sapien
cttctgcaagcagacaagggaaagg

SEQ ID NO: 2566544 - DNA, 25 bp, Homo sapien
tctctatttttctctatggataata

SEQ ID NO: 2566545 - DNA, 25 bp, Homo sapien
caatccgggcctgtgaaatcttcaa

SEQ ID NO: 2566546 - DNA, 25 bp, Homo sapien
tcaagagcctcaccgcggtacatta

SEQ ID NO: 2566547 - DNA, 25 bp, Homo sapien
gtaaacatatacaggatcacctttt

SEQ ID NO: 2566548 - DNA, 25 bp, Homo sapien
ttcacaaaacgacaatccgggcctg

SEQ ID NO: 2566549 - DNA, 25 bp, Homo sapien
caagtcggcatcttataacactgcg

SEQ ID NO: 2566550 - DNA, 25 bp, Homo sapien
tattcctagcacaatttctggtaca

SEQ ID NO: 2566551 - DNA, 25 bp, Homo sapien
ttttgacaatccctctcaagtcggc

SEQ ID NO: 2566552 - DNA, 25 bp, Homo sapien
aacactgcgcccttatatcttgcca

SEQ ID NO: 2566553 - DNA, 25 bp, Homo sapien
ggtgatggtcccacggattctctgc

SEQ ID NO: 2566554 - DNA, 25 bp, Homo sapien
ccagagttgtcacagggctgcaaga

SEQ ID NO: 2566555 - DNA, 25 bp, Homo sapien
taaacagctcctgtgtagggtaaga

SEQ ID NO: 2566556 - DNA, 25 bp, Homo sapien
tgaactgacacacaaaaaactatgg

SEQ ID NO: 2566557 - DNA, 25 bp, Homo sapien
aacccttatgtttaggaatccatat

SEQ ID NO: 2566558 - DNA, 25 bp, Homo sapien
gaatccatatatccactctgcagaa

SEQ ID NO: 2566559 - DNA, 25 bp, Homo sapien
tatgtttaggaatccatatatccac

SEQ ID NO: 2566560 - DNA, 25 bp, Homo sapien
tttaggaatccatatatccactctg

SEQ ID NO: 2566561 - DNA, 25 bp, Homo sapien
tggtgctgcccaggcaaagatcctg

SEQ ID NO: 2566562 - DNA, 25 bp, Homo sapien
gtgctgcccaggcaaagatcctgct

SEQ ID NO: 2566563 - DNA, 25 bp, Homo sapien
aaggcacaggacgtggtgctgccca

SEQ ID NO: 2566564 - DNA, 25 bp, Homo sapien
tgggaaggcacaggacgtggtgctg

SEQ ID NO: 2566565 - DNA, 25 bp, Homo sapien
aacttgctatgggtgctgatcagcc

SEQ ID NO: 2566566 - DNA, 25 bp, Homo sapien
ttcatcttcagcaaaggagatgatg

SEQ ID NO: 2566567 - DNA, 25 bp, Homo sapien
aaatcaaacaactctgtacatttgt

SEQ ID NO: 2566568 - DNA, 25 bp, Homo sapien
ttatccgagttctagtaagcagaaa

SEQ ID NO: 2566569 - DNA, 25 bp, Homo sapien
tcaaacaactctgtacatttgttac

SEQ ID NO: 2566570 - DNA, 25 bp, Homo sapien
gaaatcaaacaactctgtacatttg

SEQ ID NO: 2566571 - DNA, 25 bp, Homo sapien
gattctggagcgtatatgggtcccc

SEQ ID NO: 2566572 - DNA, 25 bp, Homo sapien
tgggtccccatagctgtgttgtcag

SEQ ID NO: 2566573 - DNA, 25 bp, Homo sapien
tttggaagcccactacgaagatgtg

SEQ ID NO: 2566574 - DNA, 25 bp, Homo sapien
gatgtgggtcgcatgttttaaggcc

SEQ ID NO: 2566575 - DNA, 25 bp, Homo sapien
gagttgataatttggaaggaaacgc

SEQ ID NO: 2566576 - DNA, 25 bp, Homo sapien
tgataatttggaaggaaacgctttg

SEQ ID NO: 2566577 - DNA, 25 bp, Homo sapien
taatttggaaggaaacgctttggca

SEQ ID NO: 2566578 - DNA, 25 bp, Homo sapien
tttggaaggaaacgctttggcagcc

SEQ ID NO: 2566579 - DNA, 25 bp, Homo sapien
tagacgaactgtcacaaaggaatcg

SEQ ID NO: 2566580 - DNA, 25 bp, Homo sapien
aaggaatcgacccttttcatagatc

SEQ ID NO: 2566581 - DNA, 25 bp, Homo sapien
tctgtcttcctaagcacacgatttg

SEQ ID NO: 2566582 - DNA, 25 bp, Homo sapien
catagggtattcaacatagacgaac

SEQ ID NO: 2566583 - DNA, 25 bp, Homo sapien
tgctgttgtgggtggtatctcgtcc

SEQ ID NO: 2566584 - DNA, 25 bp, Homo sapien
tctcgtccatctaaaggaagtctgc

SEQ ID NO: 2566585 - DNA, 25 bp, Homo sapien
ctgcaggcccctctaagaaagtttg

SEQ ID NO: 2566586 - DNA, 25 bp, Homo sapien
tgctgccctactagataaagctggg

SEQ ID NO: 2566587 - DNA, 25 bp, Homo sapien
caccagtgtgtggttgagaaagctg

SEQ ID NO: 2566588 - DNA, 25 bp, Homo sapien
tgcaccagtgtgtggttgagaaagc

SEQ ID NO: 2566589 - DNA, 25 bp, Homo sapien
aatatatttaattgctcaattctgc

SEQ ID NO: 2566590 - DNA, 25 bp, Homo sapien
ttgcataaaggggattcttctcttc

SEQ ID NO: 2566591 - DNA, 25 bp, Homo sapien
ggcttcctgtgagaaccgaagcagg

SEQ ID NO: 2566592 - DNA, 25 bp, Homo sapien
tcactctagtgactgaattctggac

SEQ ID NO: 2566593 - DNA, 25 bp, Homo sapien
ggcctggagtgtcctagcacatgtc

SEQ ID NO: 2566594 - DNA, 25 bp, Homo sapien
tctagtgactgaattctggacatta

SEQ ID NO: 2566595 - DNA, 25 bp, Homo sapien
gaaactctcccttgaagcccatgga

SEQ ID NO: 2566596 - DNA, 25 bp, Homo sapien
aagcccatggaacgtggtgagagct

SEQ ID NO: 2566597 - DNA, 25 bp, Homo sapien
caggaagtacttcataagtactctt

SEQ ID NO: 2566598 - DNA, 25 bp, Homo sapien
cagaaactctcccttgaagcccatg

SEQ ID NO: 2566599 - DNA, 25 bp, Homo sapien
gcagaggtctcattccttgacttgg

SEQ ID NO: 2566600 - DNA, 25 bp, Homo sapien
ggcagaggtctcattccttgacttg

SEQ ID NO: 2566601 - DNA, 25 bp, Homo sapien
taatgtgaccagagaccaccttgtg

SEQ ID NO: 2566602 - DNA, 25 bp, Homo sapien
cattgtccatataatgtgaccagag

SEQ ID NO: 2566603 - DNA, 25 bp, Homo sapien
ccatataatgtgaccagagaccacc

SEQ ID NO: 2566604 - DNA, 25 bp, Homo sapien
tgtgaccagagaccaccttgtgttc

SEQ ID NO: 2566605 - DNA, 25 bp, Homo sapien
gtgaggctcccagaccatgagaggt

SEQ ID NO: 2566606 - DNA, 25 bp, Homo sapien
gaggttccccgtgggctcatttgct

SEQ ID NO: 2566607 - DNA, 25 bp, Homo sapien
cccgtgggctcatttgctggattca

SEQ ID NO: 2566608 - DNA, 25 bp, Homo sapien
tgagaggtgccgaggttccccgtgg

SEQ ID NO: 2566609 - DNA, 25 bp, Homo sapien
tggtctggaacatcctggccaggat

SEQ ID NO: 2566610 - DNA, 25 bp, Homo sapien
ggttgccgtgaacgccacaatcttc

SEQ ID NO: 2566611 - DNA, 25 bp, Homo sapien
tctggaacatcctggccaggatgac

SEQ ID NO: 2566612 - DNA, 25 bp, Homo sapien
cagcagcacactggttgccgtgaac

SEQ ID NO: 2566613 - DNA, 25 bp, Homo sapien
aagggtagctgcattgagtcagacc

SEQ ID NO: 2566614 - DNA, 25 bp, Homo sapien
gctgcattgagtcagaccttgagcc

SEQ ID NO: 2566615 - DNA, 25 bp, Homo sapien
tagctgcattgagtcagaccttgag

SEQ ID NO: 2566616 - DNA, 25 bp, Homo sapien
ggtagctgcattgagtcagaccttg

SEQ ID NO: 2566617 - DNA, 25 bp, Homo sapien
acccacatctagcacacatttgtgg

SEQ ID NO: 2566618 - DNA, 25 bp, Homo sapien
acccctcgtcaacatccctgcaggc

SEQ ID NO: 2566619 - DNA, 25 bp, Homo sapien
cactcagctcccatacacccctcgt

SEQ ID NO: 2566620 - DNA, 25 bp, Homo sapien
acacccaggatacagctcccaagat

SEQ ID NO: 2566621 - DNA, 25 bp, Homo sapien
agctcccatacacccctcgtcaaca

SEQ ID NO: 2566622 - DNA, 25 bp, Homo sapien
ccttgacaatgacgctcccttcctc

SEQ ID NO: 2566623 - DNA, 25 bp, Homo sapien
cagtagttactgcttccttgacaat

SEQ ID NO: 2566624 - DNA, 25 bp, Homo sapien
ttgacaatgacgctcccttcctctc

SEQ ID NO: 2566625 - DNA, 25 bp, Homo sapien
tgacaatgacgctcccttcctctct

SEQ ID NO: 2566626 - DNA, 25 bp, Homo sapien
gccatgcgacgctaatcatttccac

SEQ ID NO: 2566627 - DNA, 25 bp, Homo sapien
tatgtgctgtagattgaggtttgca

SEQ ID NO: 2566628 - DNA, 25 bp, Homo sapien
ggtttgcagctctatcgttcatatt

SEQ ID NO: 2566629 - DNA, 25 bp, Homo sapien
gatgttggaagtggtctcaaatagc

SEQ ID NO: 2566630 - DNA, 25 bp, Homo sapien
ttccagccagtcttgaagcatattt

SEQ ID NO: 2566631 - DNA, 25 bp, Homo sapien
tttccagccagtcttgaagcatatt

SEQ ID NO: 2566632 - DNA, 25 bp, Homo sapien
caatctttaggcttcgatgaacttc

SEQ ID NO: 2566633 - DNA, 25 bp, Homo sapien
gctgcaatctttaggcttcgatgaa

SEQ ID NO: 2566634 - DNA, 25 bp, Homo sapien
atcccagctgcaatctttaggcttc

SEQ ID NO: 2566635 - DNA, 25 bp, Homo sapien
tttaggcttcgatgaacttcttttg

SEQ ID NO: 2566636 - DNA, 25 bp, Homo sapien
ctgtggagagcaatgaggtaggtaa

SEQ ID NO: 2566637 - DNA, 25 bp, Homo sapien
gagagcaatgaggtaggtaagaacc

SEQ ID NO: 2566638 - DNA, 25 bp, Homo sapien
ggtaggtaagaaccatcaatacttc

SEQ ID NO: 2566639 - DNA, 25 bp, Homo sapien
ggtaagaaccatcaatacttctact

SEQ ID NO: 2566640 - DNA, 25 bp, Homo sapien
tcagccaatctctgacttaggagct

SEQ ID NO: 2566641 - DNA, 25 bp, Homo sapien
gacttaggagctaagtgcttgcctg

SEQ ID NO: 2566642 - DNA, 25 bp, Homo sapien
gcaatcgagaagtgactgccatcca

SEQ ID NO: 2566643 - DNA, 25 bp, Homo sapien
gtctgagcagcaatcgagaagtgac

SEQ ID NO: 2566644 - DNA, 25 bp, Homo sapien
tgagttgctgtggtaacctgtaagt

SEQ ID NO: 2566645 - DNA, 25 bp, Homo sapien
gttgctgtggtaacctgtaagtaat

SEQ ID NO: 2566646 - DNA, 25 bp, Homo sapien
tgctgtggtaacctgtaagtaataa

SEQ ID NO: 2566647 - DNA, 25 bp, Homo sapien
gagttgctgtggtaacctgtaagta

SEQ ID NO: 2566648 - DNA, 25 bp, Homo sapien
tcctttcagggactcctctggaaga

SEQ ID NO: 2566649 - DNA, 25 bp, Homo sapien
cagcagagtcccgtatggaggataa

SEQ ID NO: 2566650 - DNA, 25 bp, Homo sapien
tatggaagaaccagcctcctttcag

SEQ ID NO: 2566651 - DNA, 25 bp, Homo sapien
caggacccacgatgggcagcagagt

SEQ ID NO: 2566652 - DNA, 25 bp, Homo sapien
ctcagaagagcctgagacgctgtca

SEQ ID NO: 2566653 - DNA, 25 bp, Homo sapien
gccgtctaccaccacaaagtcaggg

SEQ ID NO: 2566654 - DNA, 25 bp, Homo sapien
catctgcaatgtcgatgcctgggct

SEQ ID NO: 2566655 - DNA, 25 bp, Homo sapien
cacctgggaggtgaatacagacttt

SEQ ID NO: 2566656 - DNA, 25 bp, Homo sapien
agccaaattagtgctctcatttgca

SEQ ID NO: 2566657 - DNA, 25 bp, Homo sapien
ataagccaaattagtgctctcattt

SEQ ID NO: 2566658 - DNA, 25 bp, Homo sapien
gccatttactctcaatataagccaa

SEQ ID NO: 2566659 - DNA, 25 bp, Homo sapien
ctcatttgcaaagtggcactggggc

SEQ ID NO: 2566660 - DNA, 25 bp, Homo sapien
tgtggtccccatgtagacaagttag

SEQ ID NO: 2566661 - DNA, 25 bp, Homo sapien
gatgcataatgtgaactgtggtccc

SEQ ID NO: 2566662 - DNA, 25 bp, Homo sapien
gaggctgacccatccaaatttggag

SEQ ID NO: 2566663 - DNA, 25 bp, Homo sapien
gaattgtcccatgttccacagcacg

SEQ ID NO: 2566664 - DNA, 25 bp, Homo sapien
cttttgtccaattccaaagtctaca

SEQ ID NO: 2566665 - DNA, 25 bp, Homo sapien
cagatgtaatcatggtatactacag

SEQ ID NO: 2566666 - DNA, 25 bp, Homo sapien
acagatgtaatcatggtatactaca

SEQ ID NO: 2566667 - DNA, 25 bp, Homo sapien
gtccaattccaaagtctacaatctt

SEQ ID NO: 2566668 - DNA, 25 bp, Homo sapien
ttagaagtacattgtctgcattttg

SEQ ID NO: 2566669 - DNA, 25 bp, Homo sapien
tctggtgttgatttctgtttaatta

SEQ ID NO: 2566670 - DNA, 25 bp, Homo sapien
agaagtacattgtctgcattttgag

SEQ ID NO: 2566671 - DNA, 25 bp, Homo sapien
caaatgttgacaagttgtgttttca

SEQ ID NO: 2566672 - DNA, 25 bp, Homo sapien
tgcttctatcctccaaaagagatta

SEQ ID NO: 2566673 - DNA, 25 bp, Homo sapien
tatagataattggtataatgtcttc

SEQ ID NO: 2566674 - DNA, 25 bp, Homo sapien
tacatctgggcctagtgctttctgt

SEQ ID NO: 2566675 - DNA, 25 bp, Homo sapien
gaattcaccagcaaatacatctggg

SEQ ID NO: 2566676 - DNA, 25 bp, Homo sapien
cctggcatatctgggataaattcca

SEQ ID NO: 2566677 - DNA, 25 bp, Homo sapien
tatgatgctgaaacggagtgatgag

SEQ ID NO: 2566678 - DNA, 25 bp, Homo sapien
tctcttcattaagcgtgatgttagc

SEQ ID NO: 2566679 - DNA, 25 bp, Homo sapien
ctttatacggttgaggatgttgccc

SEQ ID NO: 2566680 - DNA, 25 bp, Homo sapien
tgattaagactacattgaatctata

SEQ ID NO: 2566681 - DNA, 25 bp, Homo sapien
gttagatttgtgtctaagcattcca

SEQ ID NO: 2566682 - DNA, 25 bp, Homo sapien
gcaagttgggaagaacgaacatctg

SEQ ID NO: 2566683 - DNA, 25 bp, Homo sapien
gcctttgatcctgtgccaaatatca

SEQ ID NO: 2566684 - DNA, 25 bp, Homo sapien
tccctggtgccttctctacagcagc

SEQ ID NO: 2566685 - DNA, 25 bp, Homo sapien
tgccttctctacagcagcctgagcc

SEQ ID NO: 2566686 - DNA, 25 bp, Homo sapien
cattgagccatctgctctccctggt

SEQ ID NO: 2566687 - DNA, 25 bp, Homo sapien
ccattgagccatctgctctccctgg

SEQ ID NO: 2566688 - DNA, 25 bp, Homo sapien
cactgtggtatgttctgtaataaac

SEQ ID NO: 2566689 - DNA, 25 bp, Homo sapien
ggcactgtggtatgttctgtaataa

SEQ ID NO: 2566690 - DNA, 25 bp, Homo sapien
taaacatctagtattaatcggagat

SEQ ID NO: 2566691 - DNA, 25 bp, Homo sapien
tattaatcggagatggtcttgtcat

SEQ ID NO: 2566692 - DNA, 25 bp, Homo sapien
tttctacagtgttcacttgggctga

SEQ ID NO: 2566693 - DNA, 25 bp, Homo sapien
cacatccccgtctccagtggatttt

SEQ ID NO: 2566694 - DNA, 25 bp, Homo sapien
tacagtgttcacttgggctgatact

SEQ ID NO: 2566695 - DNA, 25 bp, Homo sapien
ggattttctacagtgttcacttggg

SEQ ID NO: 2566696 - DNA, 25 bp, Homo sapien
gtccatatcgaatgggtggtggtac

SEQ ID NO: 2566697 - DNA, 25 bp, Homo sapien
cctcccatgggggtgctcatgagag

SEQ ID NO: 2566698 - DNA, 25 bp, Homo sapien
tgaggtggtggtccatatcgaatgg

SEQ ID NO: 2566699 - DNA, 25 bp, Homo sapien
cgaggcccaaaaggtccgcagagct

SEQ ID NO: 2566700 - DNA, 25 bp, Homo sapien
taaaaatttatgcagtagctcaaga

SEQ ID NO: 2566701 - DNA, 25 bp, Homo sapien
cataaaaattaaggtgcttgccctg

SEQ ID NO: 2566702 - DNA, 25 bp, Homo sapien
cattcattagatagctgttaaattc

SEQ ID NO: 2566703 - DNA, 25 bp, Homo sapien
tagctcaagatgtacctaataaatg

SEQ ID NO: 2566704 - DNA, 25 bp, Homo sapien
aatgctgggattcataaagtgctgg

SEQ ID NO: 2566705 - DNA, 25 bp, Homo sapien
tgcctcagcctcgtctaatgaatgc

SEQ ID NO: 2566706 - DNA, 25 bp, Homo sapien
tgaatgctgggattcataaagtgct

SEQ ID NO: 2566707 - DNA, 25 bp, Homo sapien
gcctcgtctaatgaatgctgggatt

SEQ ID NO: 2566708 - DNA, 25 bp, Homo sapien
catctctagagcctgacggcagtaa

SEQ ID NO: 2566709 - DNA, 25 bp, Homo sapien
taagtctcttacagcaggtggtggt

SEQ ID NO: 2566710 - DNA, 25 bp, Homo sapien
ttcctggtggaacgcctggtgcaaa

SEQ ID NO: 2566711 - DNA, 25 bp, Homo sapien
gaataaagtactctcttgggccaag

SEQ ID NO: 2566712 - DNA, 25 bp, Homo sapien
aatgcacagtacactttctttccaa

SEQ ID NO: 2566713 - DNA, 25 bp, Homo sapien
ccaaggcagcttagttctaacaaca

SEQ ID NO: 2566714 - DNA, 25 bp, Homo sapien
ttgtttggctcaaaaatgcacactg

SEQ ID NO: 2566715 - DNA, 25 bp, Homo sapien
tgtaatggataatgcacagtacact

SEQ ID NO: 2566716 - DNA, 25 bp, Homo sapien
gcacatttcaaagttgtaaggacgc

SEQ ID NO: 2566717 - DNA, 25 bp, Homo sapien
attgcacatttcaaagttgtaagga

SEQ ID NO: 2566718 - DNA, 25 bp, Homo sapien
ttgcacatttcaaagttgtaaggac

SEQ ID NO: 2566719 - DNA, 25 bp, Homo sapien
tgcacatttcaaagttgtaaggacg

SEQ ID NO: 2566720 - DNA, 25 bp, Homo sapien
tcaaaaatcagtggcaaggaatggg

SEQ ID NO: 2566721 - DNA, 25 bp, Homo sapien
tgttgtgcaccctttttctacagga

SEQ ID NO: 2566722 - DNA, 25 bp, Homo sapien
gatttctatacttttacggccatga

SEQ ID NO: 2566723 - DNA, 25 bp, Homo sapien
gaaagatagataagggactgtacat

SEQ ID NO: 2566724 - DNA, 25 bp, Homo sapien
gacctagggcatgttataaccctca

SEQ ID NO: 2566725 - DNA, 25 bp, Homo sapien
caacccttggttgctgacctagggc

SEQ ID NO: 2566726 - DNA, 25 bp, Homo sapien
aaacagaactgatttcaacccttgg

SEQ ID NO: 2566727 - DNA, 25 bp, Homo sapien
taagtatggtgcaattccagatggt

SEQ ID NO: 2566728 - DNA, 25 bp, Homo sapien
tgataatttatatgaagcatctgct

SEQ ID NO: 2566729 - DNA, 25 bp, Homo sapien
taaaccataagatatgtatatcaaa

SEQ ID NO: 2566730 - DNA, 25 bp, Homo sapien
tctgctatccttcacataagtatag

SEQ ID NO: 2566731 - DNA, 25 bp, Homo sapien
gaactacaaatacctttcatcaaca

SEQ ID NO: 2566732 - DNA, 25 bp, Homo sapien
cttacatgtaagtctttaatgcatc

SEQ ID NO: 2566733 - DNA, 25 bp, Homo sapien
tcttacatgtaagtctttaatgcat

SEQ ID NO: 2566734 - DNA, 25 bp, Homo sapien
aatatgttcatctatcttgactcta

SEQ ID NO: 2566735 - DNA, 25 bp, Homo sapien
tcaattttggtagcccctgtcctcc

SEQ ID NO: 2566736 - DNA, 25 bp, Homo sapien
gcccctgtcctccagttatgttcat

SEQ ID NO: 2566737 - DNA, 25 bp, Homo sapien
gactctaattcccaagtggtgcttt

SEQ ID NO: 2566738 - DNA, 25 bp, Homo sapien
cacgttccatcatcgcgacataatg

SEQ ID NO: 2566739 - DNA, 25 bp, Homo sapien
gatgggcagattattccacgttcca

SEQ ID NO: 2566740 - DNA, 25 bp, Homo sapien
gacaagtgatgattagcttctctcc

SEQ ID NO: 2566741 - DNA, 25 bp, Homo sapien
aatgaaaccatattgtgtaggtcgg

SEQ ID NO: 2566742 - DNA, 25 bp, Homo sapien
caacatgcttggaattgcgaagtgc

SEQ ID NO: 2566743 - DNA, 25 bp, Homo sapien
ctgcagaaaaccataggcaaaattg

SEQ ID NO: 2566744 - DNA, 25 bp, Homo sapien
cagaaaaccataggcaaaattgcaa

SEQ ID NO: 2566745 - DNA, 25 bp, Homo sapien
gaattgcgaagtgcagctttacagg

SEQ ID NO: 2566746 - DNA, 25 bp, Homo sapien
tgtcttgaaaatcagccctgggaat

SEQ ID NO: 2566747 - DNA, 25 bp, Homo sapien
caagcattatagcagcactgactac

SEQ ID NO: 2566748 - DNA, 25 bp, Homo sapien
tcagaacctaacgagctcagggact

SEQ ID NO: 2566749 - DNA, 25 bp, Homo sapien
ctgagtatggagaacccgtgggact

SEQ ID NO: 2566750 - DNA, 25 bp, Homo sapien
tatagcgccagagtcttccaagcct

SEQ ID NO: 2566751 - DNA, 25 bp, Homo sapien
taagtagccagtggtttccgtgcac

SEQ ID NO: 2566752 - DNA, 25 bp, Homo sapien
gcctgcaggttgtgccaagcctgga

SEQ ID NO: 2566753 - DNA, 25 bp, Homo sapien
tggccattaatgagctcccaccgct

SEQ ID NO: 2566754 - DNA, 25 bp, Homo sapien
tagggctcgtccatattaaccatcg

SEQ ID NO: 2566755 - DNA, 25 bp, Homo sapien
taggtaagacgaacctcagggctac

SEQ ID NO: 2566756 - DNA, 25 bp, Homo sapien
tgggcagtagcgtgtggacttcact

SEQ ID NO: 2566757 - DNA, 25 bp, Homo sapien
tatgaacgagttcaagacagcccct

SEQ ID NO: 2566758 - DNA, 25 bp, Homo sapien
tacggctgtgggaactcacattatt

SEQ ID NO: 2566759 - DNA, 25 bp, Homo sapien
ggctctgttctgaccctcagcagga

SEQ ID NO: 2566760 - DNA, 25 bp, Homo sapien
tgatatcctgtgacttcggctctgt

SEQ ID NO: 2566761 - DNA, 25 bp, Homo sapien
gaactgcttgtagggacatgaccct

SEQ ID NO: 2566762 - DNA, 25 bp, Homo sapien
tgagcaattcctctgcgagctgagg

SEQ ID NO: 2566763 - DNA, 25 bp, Homo sapien
ttccgttggccaagtacattgtcat

SEQ ID NO: 2566764 - DNA, 25 bp, Homo sapien
gagatccattgaccaagatgttccg

SEQ ID NO: 2566765 - DNA, 25 bp, Homo sapien
taattttataaccaacttggagatc

SEQ ID NO: 2566766 - DNA, 25 bp, Homo sapien
tgctcccacagcaatgggctcatcc

SEQ ID NO: 2566767 - DNA, 25 bp, Homo sapien
tctgctcccacagcaatgggctcat

SEQ ID NO: 2566768 - DNA, 25 bp, Homo sapien
catgttctccaaacttccaagccat

SEQ ID NO: 2566769 - DNA, 25 bp, Homo sapien
aacacccccgagacctcctcctcat

SEQ ID NO: 2566770 - DNA, 25 bp, Homo sapien
ccaaacccctttccactacatgctc

SEQ ID NO: 2566771 - DNA, 25 bp, Homo sapien
aaacccctttccactacatgctctg

SEQ ID NO: 2566772 - DNA, 25 bp, Homo sapien
acccctttccactacatgctctgac

SEQ ID NO: 2566773 - DNA, 25 bp, Homo sapien
aacccctttccactacatgctctga

SEQ ID NO: 2566774 - DNA, 25 bp, Homo sapien
tataggcaaggccataaggatgcgt

SEQ ID NO: 2566775 - DNA, 25 bp, Homo sapien
gatgcgtctgcacttggaagaaata

SEQ ID NO: 2566776 - DNA, 25 bp, Homo sapien
caaggccataaggatgcgtctgcac

SEQ ID NO: 2566777 - DNA, 25 bp, Homo sapien
ccatggctgtgtttataggcaaggc

SEQ ID NO: 2566778 - DNA, 25 bp, Homo sapien
tgggatccctcgtccagaggcatgg

SEQ ID NO: 2566779 - DNA, 25 bp, Homo sapien
agagatctgaagttgaccagaaggg

SEQ ID NO: 2566780 - DNA, 25 bp, Homo sapien
ttctggtatgtggtgctgggatccc

SEQ ID NO: 2566781 - DNA, 25 bp, Homo sapien
tcaggctgttctgcctgaacgggag

SEQ ID NO: 2566782 - DNA, 25 bp, Homo sapien
agctgctctggggttgcgacacgaa

SEQ ID NO: 2566783 - DNA, 25 bp, Homo sapien
tctggggttgcgacacgaagcacac

SEQ ID NO: 2566784 - DNA, 25 bp, Homo sapien
acgaagcacacggtgcagccaaaag

SEQ ID NO: 2566785 - DNA, 25 bp, Homo sapien
cacggtgcagccaaaagctgtgaag

SEQ ID NO: 2566786 - DNA, 25 bp, Homo sapien
caacaaagagatgtcgtggaagggt

SEQ ID NO: 2566787 - DNA, 25 bp, Homo sapien
gctatgatcagttccaagctgagag

SEQ ID NO: 2566788 - DNA, 25 bp, Homo sapien
ccaagctgagagtttaaactttgtc

SEQ ID NO: 2566789 - DNA, 25 bp, Homo sapien
agagcggagtttagagtgaccgcta

SEQ ID NO: 2566790 - DNA, 25 bp, Homo sapien
cagctcaagtccttagttgtcatga

SEQ ID NO: 2566791 - DNA, 25 bp, Homo sapien
agcaagagccacatgagcatccccg

SEQ ID NO: 2566792 - DNA, 25 bp, Homo sapien
gtccttagttgtcatgaaaataatg

SEQ ID NO: 2566793 - DNA, 25 bp, Homo sapien
cggaaccctgggaacagtcatcagt

SEQ ID NO: 2566794 - DNA, 25 bp, Homo sapien
cttcagcctcctgtgttgctgggaa

SEQ ID NO: 2566795 - DNA, 25 bp, Homo sapien
gtgcacgccaccatgcctggctaat

SEQ ID NO: 2566796 - DNA, 25 bp, Homo sapien
ccatgcctggctaatttttgtactt

SEQ ID NO: 2566797 - DNA, 25 bp, Homo sapien
ctcctgtgttgctgggaatataggt

SEQ ID NO: 2566798 - DNA, 25 bp, Homo sapien
taagtagccagtggtttccgtgcac

SEQ ID NO: 2566799 - DNA, 25 bp, Homo sapien
gcctgcaggttgtgccaagcctgga

SEQ ID NO: 2566800 - DNA, 25 bp, Homo sapien
tatagcgccagagtcttccaagcct

SEQ ID NO: 2566801 - DNA, 25 bp, Homo sapien
tggccattaatgagctcccaccgct

SEQ ID NO: 2566802 - DNA, 25 bp, Homo sapien
tctttcggatgtccacttccacaag

SEQ ID NO: 2566803 - DNA, 25 bp, Homo sapien
gctgcaatctttcggatgtccactt

SEQ ID NO: 2566804 - DNA, 25 bp, Homo sapien
gcaatctttcggatgtccacttcca

SEQ ID NO: 2566805 - DNA, 25 bp, Homo sapien
aagctgcaatctttcggatgtccac

SEQ ID NO: 2566806 - DNA, 25 bp, Homo sapien
aaggccctttgtgattgaggggaag

SEQ ID NO: 2566807 - DNA, 25 bp, Homo sapien
gatgggctggagcaggaccgtggtc

SEQ ID NO: 2566808 - DNA, 25 bp, Homo sapien
gaggggaagtgaccacagatcagca

SEQ ID NO: 2566809 - DNA, 25 bp, Homo sapien
gaccgtggtccggtcctgaacaaca

SEQ ID NO: 2566810 - DNA, 25 bp, Homo sapien
ttatgtgggccccaatgtgcctggc

SEQ ID NO: 2566811 - DNA, 25 bp, Homo sapien
cccagccgtcaggtgtagacgtgca

SEQ ID NO: 2566812 - DNA, 25 bp, Homo sapien
catggtttctgcgacaggagcccag

SEQ ID NO: 2566813 - DNA, 25 bp, Homo sapien
catggcgtatcggacactgcacatt

SEQ ID NO: 2566814 - DNA, 25 bp, Homo sapien
ggagacgtggagaagtcgtgctgac

SEQ ID NO: 2566815 - DNA, 25 bp, Homo sapien
agaaagaggagacgtggagaagtcg

SEQ ID NO: 2566816 - DNA, 25 bp, Homo sapien
agaagagaaagaggagacgtggaga

SEQ ID NO: 2566817 - DNA, 25 bp, Homo sapien
agaggagacgtggagaagtcgtgct

SEQ ID NO: 2566818 - DNA, 25 bp, Homo sapien
cagaaaccgcggcaggtccgctgct

SEQ ID NO: 2566819 - DNA, 25 bp, Homo sapien
aaaccgcggcaggtccgctgctgag

SEQ ID NO: 2566820 - DNA, 25 bp, Homo sapien
cctagtccagaaaccgcggcaggtc

SEQ ID NO: 2566821 - DNA, 25 bp, Homo sapien
ctagtccagaaaccgcggcaggtcc

SEQ ID NO: 2566822 - DNA, 25 bp, Homo sapien
gatatgccaacataatacattctag

SEQ ID NO: 2566823 - DNA, 25 bp, Homo sapien
catcagcagatatgccaacataata

SEQ ID NO: 2566824 - DNA, 25 bp, Homo sapien
atgccaacataatacattctaggtg

SEQ ID NO: 2566825 - DNA, 25 bp, Homo sapien
cagcagatatgccaacataatacat

SEQ ID NO: 2566826 - DNA, 25 bp, Homo sapien
ttgaggtactctctgatgcttcact

SEQ ID NO: 2566827 - DNA, 25 bp, Homo sapien
tttgaggtactctctgatgcttcac

SEQ ID NO: 2566828 - DNA, 25 bp, Homo sapien
tgaggtactctctgatgcttcactc

SEQ ID NO: 2566829 - DNA, 25 bp, Homo sapien
agggtgcattggattttatctgcct

SEQ ID NO: 2566830 - DNA, 25 bp, Homo sapien
cattggattttatctgcctgggaag

SEQ ID NO: 2566831 - DNA, 25 bp, Homo sapien
tgcattggattttatctgcctggga

SEQ ID NO: 2566832 - DNA, 25 bp, Homo sapien
ttggattttatctgcctgggaagct

SEQ ID NO: 2566833 - DNA, 25 bp, Homo sapien
gcaaagactttgtgtccccaaccta

SEQ ID NO: 2566834 - DNA, 25 bp, Homo sapien
tgtcttcctgtttctagaagcatgt

SEQ ID NO: 2566835 - DNA, 25 bp, Homo sapien
gggtcctgccagagtcctgtcttcc

SEQ ID NO: 2566836 - DNA, 25 bp, Homo sapien
tcctggtgctgacagaccccttttc

SEQ ID NO: 2566837 - DNA, 25 bp, Homo sapien
ggttaccactgaaggcactcttgtg

SEQ ID NO: 2566838 - DNA, 25 bp, Homo sapien
gcctgtcttgcctagcaagtcctca

SEQ ID NO: 2566839 - DNA, 25 bp, Homo sapien
cactgcttccagaccacatagctaa

SEQ ID NO: 2566840 - DNA, 25 bp, Homo sapien
cttatgcattgccaagatcccaggg

SEQ ID NO: 2566841 - DNA, 25 bp, Homo sapien
atcttggtcagagatataactgggt

SEQ ID NO: 2566842 - DNA, 25 bp, Homo sapien
ctgggttcagatagcttcaagacta

SEQ ID NO: 2566843 - DNA, 25 bp, Homo sapien
ataactgggttcagatagcttcaag

SEQ ID NO: 2566844 - DNA, 25 bp, Homo sapien
aactgggttcagatagcttcaagac

SEQ ID NO: 2566845 - DNA, 25 bp, Homo sapien
ccagaacagtgcctccgttgttcat

SEQ ID NO: 2566846 - DNA, 25 bp, Homo sapien
ccatgccaggttttcggtgttgttt

SEQ ID NO: 2566847 - DNA, 25 bp, Homo sapien
agcaaaaagcatgtaggtgccattg

SEQ ID NO: 2566848 - DNA, 25 bp, Homo sapien
ttgtctgaatgcaaaaccagccatg

SEQ ID NO: 2566849 - DNA, 25 bp, Homo sapien
gatctttgcactgtaattaagtgcc

SEQ ID NO: 2566850 - DNA, 25 bp, Homo sapien
tttgtcactcaggcttcaagctgcc

SEQ ID NO: 2566851 - DNA, 25 bp, Homo sapien
tttacacctatctttcccgccttgc

SEQ ID NO: 2566852 - DNA, 25 bp, Homo sapien
ctgagaagactctataatgagatct

SEQ ID NO: 2566853 - DNA, 25 bp, Homo sapien
ttcctgggaggccataacaccgtct

SEQ ID NO: 2566854 - DNA, 25 bp, Homo sapien
caatgatctcggctgttggaagaca

SEQ ID NO: 2566855 - DNA, 25 bp, Homo sapien
agttgcatgataagccaggcccctg

SEQ ID NO: 2566856 - DNA, 25 bp, Homo sapien
ccataacaccgtctggaaggctcct

SEQ ID NO: 2566857 - DNA, 25 bp, Homo sapien
tgagaagaccctaagctgtcctggc

SEQ ID NO: 2566858 - DNA, 25 bp, Homo sapien
tcagcaaaagctttgatcaccagcc

SEQ ID NO: 2566859 - DNA, 25 bp, Homo sapien
aaggtccacatgtgagaagacccta

SEQ ID NO: 2566860 - DNA, 25 bp, Homo sapien
gaccctaagctgtcctggctgttca

SEQ ID NO: 2566861 - DNA, 25 bp, Homo sapien
gccaggcagcacaatgaagctttgc

SEQ ID NO: 2566862 - DNA, 25 bp, Homo sapien
tgcgatttcagatacgtggttcaca

SEQ ID NO: 2566863 - DNA, 25 bp, Homo sapien
taatgccatcctggcagtgctgcag

SEQ ID NO: 2566864 - DNA, 25 bp, Homo sapien
aactgctgggcactcatgaacaaag

SEQ ID NO: 2566865 - DNA, 25 bp, Homo sapien
gcaattggtagttgtgatttttcca

SEQ ID NO: 2566866 - DNA, 25 bp, Homo sapien
attggtagttgtgatttttccagcc

SEQ ID NO: 2566867 - DNA, 25 bp, Homo sapien
cggtgcaattggtagttgtgatttt

SEQ ID NO: 2566868 - DNA, 25 bp, Homo sapien
gagccttagggtgaatggtgacggt

SEQ ID NO: 2566869 - DNA, 25 bp, Homo sapien
gacatccagggatccctctaggcat

SEQ ID NO: 2566870 - DNA, 25 bp, Homo sapien
aggaatccacttgagccttacagct

SEQ ID NO: 2566871 - DNA, 25 bp, Homo sapien
ccacttgagccttacagctcacaga

SEQ ID NO: 2566872 - DNA, 25 bp, Homo sapien
cagcttgtatgatcccacaattgca

SEQ ID NO: 2566873 - DNA, 25 bp, Homo sapien
gaattgcttgagcactggaggtcca

SEQ ID NO: 2566874 - DNA, 25 bp, Homo sapien
agaattgcttgagcactggaggtcc

SEQ ID NO: 2566875 - DNA, 25 bp, Homo sapien
ttgcttgagcactggaggtccaggt

SEQ ID NO: 2566876 - DNA, 25 bp, Homo sapien
cttgagcactggaggtccaggttgc

SEQ ID NO: 2566877 - DNA, 25 bp, Homo sapien
tcatttaccgacttgttgaaggaca

SEQ ID NO: 2566878 - DNA, 25 bp, Homo sapien
cagtcacggactgtgtagcagcctt

SEQ ID NO: 2566879 - DNA, 25 bp, Homo sapien
ggtatggatgaaccagtctgcttaa

SEQ ID NO: 2566880 - DNA, 25 bp, Homo sapien
tccactccggataattctctggaga

SEQ ID NO: 2566881 - DNA, 25 bp, Homo sapien
tgtcagatacataatagaactacca

SEQ ID NO: 2566882 - DNA, 25 bp, Homo sapien
cacacagaacaatctcttagaggaa

SEQ ID NO: 2566883 - DNA, 25 bp, Homo sapien
actaccaaatatctatgatattggc

SEQ ID NO: 2566884 - DNA, 25 bp, Homo sapien
tattcacacagaacaatctcttaga

SEQ ID NO: 2566885 - DNA, 25 bp, Homo sapien
caaggctccacacgcttcaactcca

SEQ ID NO: 2566886 - DNA, 25 bp, Homo sapien
gctccacacgcttcaactccaggag

SEQ ID NO: 2566887 - DNA, 25 bp, Homo sapien
aagagccaataagaccctgctcagc

SEQ ID NO: 2566888 - DNA, 25 bp, Homo sapien
gaaagagccaataagaccctgctca

SEQ ID NO: 2566889 - DNA, 25 bp, Homo sapien
ctctgtagtttctcacgggccccta

SEQ ID NO: 2566890 - DNA, 25 bp, Homo sapien
tagcagtatcagctttgggttttct

SEQ ID NO: 2566891 - DNA, 25 bp, Homo sapien
tctgtagtttctcacgggcccctaa

SEQ ID NO: 2566892 - DNA, 25 bp, Homo sapien
ccctaacctttgtttagcagtatca

SEQ ID NO: 2566893 - DNA, 25 bp, Homo sapien
ggccagtgagtctataccatggtct

SEQ ID NO: 2566894 - DNA, 25 bp, Homo sapien
ggttccctcaataccatgctccagg

SEQ ID NO: 2566895 - DNA, 25 bp, Homo sapien
agctggagaagcttatgagaggcca

SEQ ID NO: 2566896 - DNA, 25 bp, Homo sapien
tacattcatttcaatccccttacca

SEQ ID NO: 2566897 - DNA, 25 bp, Homo sapien
tctagctctggaggcctcaaggctt

SEQ ID NO: 2566898 - DNA, 25 bp, Homo sapien
gcttatgccagctgagccaaacaga

SEQ ID NO: 2566899 - DNA, 25 bp, Homo sapien
tgagctaaccttgcctctagcccgg

SEQ ID NO: 2566900 - DNA, 25 bp, Homo sapien
taaagggctgtcttcgaatcttccc

SEQ ID NO: 2566901 - DNA, 25 bp, Homo sapien
ggatgttatttcctccaaatctcat

SEQ ID NO: 2566902 - DNA, 25 bp, Homo sapien
ttttggatgttatttcctccaaatc

SEQ ID NO: 2566903 - DNA, 25 bp, Homo sapien
tataaggacacaagttgatatgttt

SEQ ID NO: 2566904 - DNA, 25 bp, Homo sapien
cagagatcagctgccgtgaagccat

SEQ ID NO: 2566905 - DNA, 25 bp, Homo sapien
aacacttctgctaggcaagttggac

SEQ ID NO: 2566906 - DNA, 25 bp, Homo sapien
ttttctctgcaccaaatgggaacag

SEQ ID NO: 2566907 - DNA, 25 bp, Homo sapien
gaaagtatgcccgaagagaacaagc

SEQ ID NO: 2566908 - DNA, 25 bp, Homo sapien
gaatctgagttctctgttgggcatt

SEQ ID NO: 2566909 - DNA, 25 bp, Homo sapien
gaacgtcgctacacatctgtccaga

SEQ ID NO: 2566910 - DNA, 25 bp, Homo sapien
gagttgcctgtccaaagtcatgtat

SEQ ID NO: 2566911 - DNA, 25 bp, Homo sapien
acaaagatggacagggattcagaga

SEQ ID NO: 2566912 - DNA, 25 bp, Homo sapien
tgcttctctagggagaggttccttg

SEQ ID NO: 2566913 - DNA, 25 bp, Homo sapien
cggtgcttctctagggagaggttcc

SEQ ID NO: 2566914 - DNA, 25 bp, Homo sapien
cttgcggtgcttctctagggagagg

SEQ ID NO: 2566915 - DNA, 25 bp, Homo sapien
tgcggtgcttctctagggagaggtt

SEQ ID NO: 2566916 - DNA, 25 bp, Homo sapien
tttaaaatgaactgcctgagcagaa

SEQ ID NO: 2566917 - DNA, 25 bp, Homo sapien
ctgagcagaagactttttcaggaaa

SEQ ID NO: 2566918 - DNA, 25 bp, Homo sapien
ggcctccacagagcagcacttgctt

SEQ ID NO: 2566919 - DNA, 25 bp, Homo sapien
tcctctgtagttggccagtcaattc

SEQ ID NO: 2566920 - DNA, 25 bp, Homo sapien
ggagcctgcatgaccccaagcatgg

SEQ ID NO: 2566921 - DNA, 25 bp, Homo sapien
gactggagcctgcatgaccccaagc

SEQ ID NO: 2566922 - DNA, 25 bp, Homo sapien
tgcaagactggagcctgcatgaccc

SEQ ID NO: 2566923 - DNA, 25 bp, Homo sapien
acctcagagatgtctgtgcttcttc

SEQ ID NO: 2566924 - DNA, 25 bp, Homo sapien
gtgacagctcaataccctgggctct

SEQ ID NO: 2566925 - DNA, 25 bp, Homo sapien
gtgtgacagctcaataccctgggct

SEQ ID NO: 2566926 - DNA, 25 bp, Homo sapien
aagccactcatgtggttcaagttgc

SEQ ID NO: 2566927 - DNA, 25 bp, Homo sapien
gtggttcaagttgcatggccacagg

SEQ ID NO: 2566928 - DNA, 25 bp, Homo sapien
ctgaagggcgctacaaagagactgt

SEQ ID NO: 2566929 - DNA, 25 bp, Homo sapien
gaagggcgctacaaagagactgtgt

SEQ ID NO: 2566930 - DNA, 25 bp, Homo sapien
cgctacaaagagactgtgtttgaag

SEQ ID NO: 2566931 - DNA, 25 bp, Homo sapien
agggcgctacaaagagactgtgttt

SEQ ID NO: 2566932 - DNA, 25 bp, Homo sapien
cgatttcactgccaagacggattca

SEQ ID NO: 2566933 - DNA, 25 bp, Homo sapien
gcccgatttcactgccaagacggat

SEQ ID NO: 2566934 - DNA, 25 bp, Homo sapien
cccgatttcactgccaagacggatt

SEQ ID NO: 2566935 - DNA, 25 bp, Homo sapien
atttcactgccaagacggattcaag

SEQ ID NO: 2566936 - DNA, 25 bp, Homo sapien
tcccactcaaggctttgcagaggtt

SEQ ID NO: 2566937 - DNA, 25 bp, Homo sapien
ctcaaggctttgcagaggttcccat

SEQ ID NO: 2566938 - DNA, 25 bp, Homo sapien
ggatcccactcaaggctttgcagag

SEQ ID NO: 2566939 - DNA, 25 bp, Homo sapien
ctcccttctggctactcttcacaag

SEQ ID NO: 2566940 - DNA, 25 bp, Homo sapien
catctgttgttggtgcaggcacaca

SEQ ID NO: 2566941 - DNA, 25 bp, Homo sapien
tgtagaacttctctagactcaggct

SEQ ID NO: 2566942 - DNA, 25 bp, Homo sapien
cttggctcagggtggatctccagaa

SEQ ID NO: 2566943 - DNA, 25 bp, Homo sapien
gactcaggctcaggaggagtcctcc

SEQ ID NO: 2566944 - DNA, 25 bp, Homo sapien
tgcttgcttgattttgaatagatga

SEQ ID NO: 2566945 - DNA, 25 bp, Homo sapien
ctgtgcttgcttgattttgaataga

SEQ ID NO: 2566946 - DNA, 25 bp, Homo sapien
aaatgcaagacttccctgccaccat

SEQ ID NO: 2566947 - DNA, 25 bp, Homo sapien
tttcctgatgagtggttttctgtgc

SEQ ID NO: 2566948 - DNA, 25 bp, Homo sapien
tgcttcccccagaagaagctttctt

SEQ ID NO: 2566949 - DNA, 25 bp, Homo sapien
cctgcgagtagaacctagagaggtc

SEQ ID NO: 2566950 - DNA, 25 bp, Homo sapien
aagcccagtgctctgacctgcgagt

SEQ ID NO: 2566951 - DNA, 25 bp, Homo sapien
agtcctgagcaccacttcaagccca

SEQ ID NO: 2566952 - DNA, 25 bp, Homo sapien
ttcttgtgtagaccagatgttagaa

SEQ ID NO: 2566953 - DNA, 25 bp, Homo sapien
caggcacgccgtggtcctgtccagc

SEQ ID NO: 2566954 - DNA, 25 bp, Homo sapien
tgttagaactcagagacacaactcc

SEQ ID NO: 2566955 - DNA, 25 bp, Homo sapien
ccagatgttagaactcagagacaca

SEQ ID NO: 2566956 - DNA, 25 bp, Homo sapien
caacttagggagagaaatggccctc

SEQ ID NO: 2566957 - DNA, 25 bp, Homo sapien
acttagggagagaaatggccctcca

SEQ ID NO: 2566958 - DNA, 25 bp, Homo sapien
ttagggagagaaatggccctccagg

SEQ ID NO: 2566959 - DNA, 25 bp, Homo sapien
agggagagaaatggccctccaggac

SEQ ID NO: 2566960 - DNA, 25 bp, Homo sapien
ctttgtatgcaggtctcacatctga

SEQ ID NO: 2566961 - DNA, 25 bp, Homo sapien
aggctttgtatgcaggtctcacatc

SEQ ID NO: 2566962 - DNA, 25 bp, Homo sapien
gcaggctttgtatgcaggtctcaca

SEQ ID NO: 2566963 - DNA, 25 bp, Homo sapien
tccttgcaggctttgtatgcaggtc

SEQ ID NO: 2566964 - DNA, 25 bp, Homo sapien
cccagaagtggctggccttgtgcca

SEQ ID NO: 2566965 - DNA, 25 bp, Homo sapien
ccagaagtggctggccttgtgccag

SEQ ID NO: 2566966 - DNA, 25 bp, Homo sapien
gaaggagccattcctagcgataacc

SEQ ID NO: 2566967 - DNA, 25 bp, Homo sapien
aggaggcaggtcaacgggcttctcc

SEQ ID NO: 2566968 - DNA, 25 bp, Homo sapien
gaggcaggtcaacgggcttctccag

SEQ ID NO: 2566969 - DNA, 25 bp, Homo sapien
ggcaggtcaacgggcttctccaggg

SEQ ID NO: 2566970 - DNA, 25 bp, Homo sapien
cctgtgaacactaggactctttggt

SEQ ID NO: 2566971 - DNA, 25 bp, Homo sapien
ggcacgtcttgtggagtagggcaat

SEQ ID NO: 2566972 - DNA, 25 bp, Homo sapien
atgagaagcgggctgtcactgaaaa

SEQ ID NO: 2566973 - DNA, 25 bp, Homo sapien
caatggcctgatcagatgagaagcg

SEQ ID NO: 2566974 - DNA, 25 bp, Homo sapien
tactctgttggtggtggaaataaag

SEQ ID NO: 2566975 - DNA, 25 bp, Homo sapien
cagaggttgacacgttggtttggat

SEQ ID NO: 2566976 - DNA, 25 bp, Homo sapien
gaaaatggctaacttgggacttgga

SEQ ID NO: 2566977 - DNA, 25 bp, Homo sapien
ggccatgttctcgtactctgttggt

SEQ ID NO: 2566978 - DNA, 25 bp, Homo sapien
cctccttgaaatctttgtcctggtc

SEQ ID NO: 2566979 - DNA, 25 bp, Homo sapien
gcttcttgcaacatcctctcctccc

SEQ ID NO: 2566980 - DNA, 25 bp, Homo sapien
tcccttccacgtggagtcctccatg

SEQ ID NO: 2566981 - DNA, 25 bp, Homo sapien
gcttttccctcgtacttttcagtca

SEQ ID NO: 2566982 - DNA, 25 bp, Homo sapien
taccacgaggtgcagtttgaggtgt

SEQ ID NO: 2566983 - DNA, 25 bp, Homo sapien
gtttgaggtgtgtcagaggcctccc

SEQ ID NO: 2566984 - DNA, 25 bp, Homo sapien
ttgaggtgtgtcagaggcctccctt

SEQ ID NO: 2566985 - DNA, 25 bp, Homo sapien
aggccagggatttaccacgaggtgc

SEQ ID NO: 2566986 - DNA, 25 bp, Homo sapien
actccagagagtcctcagtgttggt

SEQ ID NO: 2566987 - DNA, 25 bp, Homo sapien
tcctcagtgttggttttttcccagc

SEQ ID NO: 2566988 - DNA, 25 bp, Homo sapien
tccagagagtcctcagtgttggttt

SEQ ID NO: 2566989 - DNA, 25 bp, Homo sapien
ctccagagagtcctcagtgttggtt

SEQ ID NO: 2566990 - DNA, 25 bp, Homo sapien
ttatcagcaaccccatttttagcca

SEQ ID NO: 2566991 - DNA, 25 bp, Homo sapien
cttatcagcaaccccatttttagcc

SEQ ID NO: 2566992 - DNA, 25 bp, Homo sapien
tatcagcaaccccatttttagccat

SEQ ID NO: 2566993 - DNA, 25 bp, Homo sapien
gaggtgctttgcacaacgataagaa

SEQ ID NO: 2566994 - DNA, 25 bp, Homo sapien
cctgtggatgcggactgagaaatga

SEQ ID NO: 2566995 - DNA, 25 bp, Homo sapien
tgcggactgagaaatgaggtgcttt

SEQ ID NO: 2566996 - DNA, 25 bp, Homo sapien
gaaatgaggtgctttgcacaacgat

SEQ ID NO: 2566997 - DNA, 25 bp, Homo sapien
gttgcaagcccaaacttcacaaatt

SEQ ID NO: 2566998 - DNA, 25 bp, Homo sapien
gcaacgtaatgatattttcggataa

SEQ ID NO: 2566999 - DNA, 25 bp, Homo sapien
ctggaaactcggtgaccatagcaac

SEQ ID NO: 2567000 - DNA, 25 bp, Homo sapien
cggataacttgacgaattttcttca

SEQ ID NO: 2567001 - DNA, 25 bp, Homo sapien
aaactcggtgaccatagcaacgtaa

SEQ ID NO: 2567002 - DNA, 25 bp, Homo sapien
caggattgctcctcaattctctaat

SEQ ID NO: 2567003 - DNA, 25 bp, Homo sapien
gttgatactgatagtcaggattgct

SEQ ID NO: 2567004 - DNA, 25 bp, Homo sapien
tacattacactgcaatagttgatac

SEQ ID NO: 2567005 - DNA, 25 bp, Homo sapien
ggattgctcctcaattctctaatag

SEQ ID NO: 2567006 - DNA, 25 bp, Homo sapien
ccaagttgaagttcctggagggtat

SEQ ID NO: 2567007 - DNA, 25 bp, Homo sapien
caagttgaagttcctggagggtatt

SEQ ID NO: 2567008 - DNA, 25 bp, Homo sapien
gttgaagttcctggagggtattcac

SEQ ID NO: 2567009 - DNA, 25 bp, Homo sapien
agttgaagttcctggagggtattca

SEQ ID NO: 2567010 - DNA, 25 bp, Homo sapien
ctgtgagcgatgaatcagatcctgc

SEQ ID NO: 2567011 - DNA, 25 bp, Homo sapien
tcagatcctgcctgatgctgtggtc

SEQ ID NO: 2567012 - DNA, 25 bp, Homo sapien
gctgtggtcctatccgttccagctc

SEQ ID NO: 2567013 - DNA, 25 bp, Homo sapien
gtggtcctatccgttccagctctac

SEQ ID NO: 2567014 - DNA, 25 bp, Homo sapien
cttgaaagaacatttctctcatttt

SEQ ID NO: 2567015 - DNA, 25 bp, Homo sapien
gaacatttctctcattttagaaaag

SEQ ID NO: 2567016 - DNA, 25 bp, Homo sapien
gaaagaacatttctctcattttaga

SEQ ID NO: 2567017 - DNA, 25 bp, Homo sapien
aagaacatttctctcattttagaaa

SEQ ID NO: 2567018 - DNA, 25 bp, Homo sapien
ggccatgcaaatgatcacaatattt

SEQ ID NO: 2567019 - DNA, 25 bp, Homo sapien
tcatgactgcatgctggctttctct

SEQ ID NO: 2567020 - DNA, 25 bp, Homo sapien
aggaggaaccagaaccaaggccatg

SEQ ID NO: 2567021 - DNA, 25 bp, Homo sapien
ttctcttcatatgcattgcctgtgc

SEQ ID NO: 2567022 - DNA, 25 bp, Homo sapien
ttagatttgttcctcatcatctgtc

SEQ ID NO: 2567023 - DNA, 25 bp, Homo sapien
ctccctccttcctacaggaacagga

SEQ ID NO: 2567024 - DNA, 25 bp, Homo sapien
gatttgttcctcatcatctgtcttc

SEQ ID NO: 2567025 - DNA, 25 bp, Homo sapien
tccctccttcctacaggaacaggac

SEQ ID NO: 2567026 - DNA, 25 bp, Homo sapien
ccagatggagggttctgttcataag

SEQ ID NO: 2567027 - DNA, 25 bp, Homo sapien
ttctgttcataagggaccaggagga

SEQ ID NO: 2567028 - DNA, 25 bp, Homo sapien
gaggaccaggagtccaatctctggc

SEQ ID NO: 2567029 - DNA, 25 bp, Homo sapien
aggaggaccaggagtccaatctctg

SEQ ID NO: 2567030 - DNA, 25 bp, Homo sapien
gcatgtggccagaactgcaaagccc

SEQ ID NO: 2567031 - DNA, 25 bp, Homo sapien
gaaaaacgtcttttgccctgcagag

SEQ ID NO: 2567032 - DNA, 25 bp, Homo sapien
ccaggcagtagtcttggggcaagaa

SEQ ID NO: 2567033 - DNA, 25 bp, Homo sapien
caagaagcatgggacaggcggtcct

SEQ ID NO: 2567034 - DNA, 25 bp, Homo sapien
ggcctgagtcagcctggcattgact

SEQ ID NO: 2567035 - DNA, 25 bp, Homo sapien
cctgagtcagcctggcattgactgc

SEQ ID NO: 2567036 - DNA, 25 bp, Homo sapien
gggctcccacagcccggatataaac

SEQ ID NO: 2567037 - DNA, 25 bp, Homo sapien
gcctgagtcagcctggcattgactg

SEQ ID NO: 2567038 - DNA, 25 bp, Homo sapien
actgcttagcttgaccatccttggt

SEQ ID NO: 2567039 - DNA, 25 bp, Homo sapien
tcattgctggcatgtctctgaccac

SEQ ID NO: 2567040 - DNA, 25 bp, Homo sapien
taggccataaagcacgacctcctca

SEQ ID NO: 2567041 - DNA, 25 bp, Homo sapien
ggctatacttgtgaacagacccctg

SEQ ID NO: 2567042 - DNA, 25 bp, Homo sapien
tgcagtccagagacccctgcagcag

SEQ ID NO: 2567043 - DNA, 25 bp, Homo sapien
tttttccccatgcagtccagagacc

SEQ ID NO: 2567044 - DNA, 25 bp, Homo sapien
agcagccacaggagcacgggcagat

SEQ ID NO: 2567045 - DNA, 25 bp, Homo sapien
ccaggccacaacagcaaatgtccac

SEQ ID NO: 2567046 - DNA, 25 bp, Homo sapien
tttcttgcttgttggtcttgaggat

SEQ ID NO: 2567047 - DNA, 25 bp, Homo sapien
ttcttgcttgttggtcttgaggatg

SEQ ID NO: 2567048 - DNA, 25 bp, Homo sapien
tctttttacaataactttgtgacca

SEQ ID NO: 2567049 - DNA, 25 bp, Homo sapien
ttgttattgatgttactgcatattc

SEQ ID NO: 2567050 - DNA, 25 bp, Homo sapien
gggccactcaacatagcctttattg

SEQ ID NO: 2567051 - DNA, 25 bp, Homo sapien
tgtgaccactagatgatatcaattt

SEQ ID NO: 2567052 - DNA, 25 bp, Homo sapien
actgaccatctcccaatggaccacc

SEQ ID NO: 2567053 - DNA, 25 bp, Homo sapien
catctcccaatggaccaccttcttt

SEQ ID NO: 2567054 - DNA, 25 bp, Homo sapien
cccaggtagactttctttgctggca

SEQ ID NO: 2567055 - DNA, 25 bp, Homo sapien
tcccaggtagactttctttgctggc

SEQ ID NO: 2567056 - DNA, 25 bp, Homo sapien
gcttctgttacatctggtaagttca

SEQ ID NO: 2567057 - DNA, 25 bp, Homo sapien
tccttcaggactcatcaaaacaaag

SEQ ID NO: 2567058 - DNA, 25 bp, Homo sapien
tcttccacgagaacagaagaaccgc

SEQ ID NO: 2567059 - DNA, 25 bp, Homo sapien
tcaggactcatcaaaacaaaggaca

SEQ ID NO: 2567060 - DNA, 25 bp, Homo sapien
caacgacccggatgtgagtgcctgg

SEQ ID NO: 2567061 - DNA, 25 bp, Homo sapien
tcttggacccgaggctttctttgcc

SEQ ID NO: 2567062 - DNA, 25 bp, Homo sapien
cgacccggatgtgagtgcctggctc

SEQ ID NO: 2567063 - DNA, 25 bp, Homo sapien
ttcttggacccgaggctttctttgc

SEQ ID NO: 2567064 - DNA, 25 bp, Homo sapien
tgtccgttgcccgtgtgtccctgga

SEQ ID NO: 2567065 - DNA, 25 bp, Homo sapien
gaggtaccttatcattgccactggg

SEQ ID NO: 2567066 - DNA, 25 bp, Homo sapien
actggggcagatgtcctccatggga

SEQ ID NO: 2567067 - DNA, 25 bp, Homo sapien
cccttgtacatgtccgttgcccgtg

SEQ ID NO: 2567068 - DNA, 25 bp, Homo sapien
gggctacgcatttgtttccttgtgt

SEQ ID NO: 2567069 - DNA, 25 bp, Homo sapien
gcagatgggctacgcatttgtttcc

SEQ ID NO: 2567070 - DNA, 25 bp, Homo sapien
agtggtaattttctagaagacctct

SEQ ID NO: 2567071 - DNA, 25 bp, Homo sapien
ttatagttggtcagtattaatccat

SEQ ID NO: 2567072 - DNA, 25 bp, Homo sapien
ccaagagagagaccaacaaatgtat

SEQ ID NO: 2567073 - DNA, 25 bp, Homo sapien
ccctttcagtggtagttacaggaca

SEQ ID NO: 2567074 - DNA, 25 bp, Homo sapien
ctttcagtggtagttacaggacaaa

SEQ ID NO: 2567075 - DNA, 25 bp, Homo sapien
ataatccaagagagagaccaacaaa

SEQ ID NO: 2567076 - DNA, 25 bp, Homo sapien
tacaagtaggtcactttgcctttaa

SEQ ID NO: 2567077 - DNA, 25 bp, Homo sapien
gagatattctgaagtatactggcag

SEQ ID NO: 2567078 - DNA, 25 bp, Homo sapien
caatactaatgaggaataagtcccc

SEQ ID NO: 2567079 - DNA, 25 bp, Homo sapien
gaatgaggttagtggagtgaacaca

SEQ ID NO: 2567080 - DNA, 25 bp, Homo sapien
cgcttccagagtgaggcaatgtgtc

SEQ ID NO: 2567081 - DNA, 25 bp, Homo sapien
cttccagagtgaggcaatgtgtcgc

SEQ ID NO: 2567082 - DNA, 25 bp, Homo sapien
ccagagtgaggcaatgtgtcgccct

SEQ ID NO: 2567083 - DNA, 25 bp, Homo sapien
tgctttggctcacgcacagtgcact

SEQ ID NO: 2567084 - DNA, 25 bp, Homo sapien
tctgcaaatggataggtggaactct

SEQ ID NO: 2567085 - DNA, 25 bp, Homo sapien
gaggcttgtgttcaactcccagagt

SEQ ID NO: 2567086 - DNA, 25 bp, Homo sapien
catccttctgacgttggcattcaaa

SEQ ID NO: 2567087 - DNA, 25 bp, Homo sapien
taacgtcacctaactaaacagaagc

SEQ ID NO: 2567088 - DNA, 25 bp, Homo sapien
tcaactcacggagctgaggattcct

SEQ ID NO: 2567089 - DNA, 25 bp, Homo sapien
taaacggaagcatgctcaggaactt

SEQ ID NO: 2567090 - DNA, 25 bp, Homo sapien
tctgcaagcggatatgaggacctct

SEQ ID NO: 2567091 - DNA, 25 bp, Homo sapien
gattgctttcaagtcaccgagctga

SEQ ID NO: 2567092 - DNA, 25 bp, Homo sapien
ggccccaaagcgcttgaaatctcca

SEQ ID NO: 2567093 - DNA, 25 bp, Homo sapien
tggccccaaagcgcttgaaatctcc

SEQ ID NO: 2567094 - DNA, 25 bp, Homo sapien
ttctgtctagccttacatgagaaaa

SEQ ID NO: 2567095 - DNA, 25 bp, Homo sapien
agaattcatctgtctagcagaatag

SEQ ID NO: 2567096 - DNA, 25 bp, Homo sapien
ttcatctgtctagcagaataggaag

SEQ ID NO: 2567097 - DNA, 25 bp, Homo sapien
gaattcatctgtctagcagaatagg

SEQ ID NO: 2567098 - DNA, 25 bp, Homo sapien
aattcatctgtctagcagaatagga

SEQ ID NO: 2567099 - DNA, 25 bp, Homo sapien
cttcacctgcagccaaacccttgcc

SEQ ID NO: 2567100 - DNA, 25 bp, Homo sapien
ttcacctgcagccaaacccttgcct

SEQ ID NO: 2567101 - DNA, 25 bp, Homo sapien
tcacctgcagccaaacccttgcctt

SEQ ID NO: 2567102 - DNA, 25 bp, Homo sapien
cacctgcagccaaacccttgccttg

SEQ ID NO: 2567103 - DNA, 25 bp, Homo sapien
gcctctgtgggaacgcttggcagcc

SEQ ID NO: 2567104 - DNA, 25 bp, Homo sapien
catctagagctgaagtcgagagcct

SEQ ID NO: 2567105 - DNA, 25 bp, Homo sapien
gcacgtattcctcagcacatctaga

SEQ ID NO: 2567106 - DNA, 25 bp, Homo sapien
catctctgatgttagaaagcagacc

SEQ ID NO: 2567107 - DNA, 25 bp, Homo sapien
aattccatcagtgatctgggctctt

SEQ ID NO: 2567108 - DNA, 25 bp, Homo sapien
acgcactgtccaattccatcagtga

SEQ ID NO: 2567109 - DNA, 25 bp, Homo sapien
ttccacgcactgtccaattccatca

SEQ ID NO: 2567110 - DNA, 25 bp, Homo sapien
cagtgatctgggctcttcccaaagc

SEQ ID NO: 2567111 - DNA, 25 bp, Homo sapien
gagaagcacgctttccgctgggatt

SEQ ID NO: 2567112 - DNA, 25 bp, Homo sapien
gaagcacgctttccgctgggattga

SEQ ID NO: 2567113 - DNA, 25 bp, Homo sapien
gctgctgagaagcacgctttccgct

SEQ ID NO: 2567114 - DNA, 25 bp, Homo sapien
ctgagaagcacgctttccgctggga

SEQ ID NO: 2567115 - DNA, 25 bp, Homo sapien
gaggtgtgccctccttcagcattgg

SEQ ID NO: 2567116 - DNA, 25 bp, Homo sapien
ccctccttcagcattgggaccgaaa

SEQ ID NO: 2567117 - DNA, 25 bp, Homo sapien
cagaggtgtgccctccttcagcatt

SEQ ID NO: 2567118 - DNA, 25 bp, Homo sapien
gcattgggaccgaaattcagaagtg

SEQ ID NO: 2567119 - DNA, 25 bp, Homo sapien
agttgcaataacagaattagaaggt

SEQ ID NO: 2567120 - DNA, 25 bp, Homo sapien
gcagttgcaataacagaattagaag

SEQ ID NO: 2567121 - DNA, 25 bp, Homo sapien
ctgcagttgcaataacagaattaga

SEQ ID NO: 2567122 - DNA, 25 bp, Homo sapien
tgcaataacagaattagaaggtggg

SEQ ID NO: 2567123 - DNA, 25 bp, Homo sapien
cgcaaaaacagggaccgggatgcct

SEQ ID NO: 2567124 - DNA, 25 bp, Homo sapien
gctccgactctgacaagagtgaggg

SEQ ID NO: 2567125 - DNA, 25 bp, Homo sapien
tgatgaacacgacacaacactttag

SEQ ID NO: 2567126 - DNA, 25 bp, Homo sapien
ggaggtagcagccagcgtaccaggt

SEQ ID NO: 2567127 - DNA, 25 bp, Homo sapien
tgccagctgcgagcgcaattcctgg

SEQ ID NO: 2567128 - DNA, 25 bp, Homo sapien
taggcagtagcttgagttataagga

SEQ ID NO: 2567129 - DNA, 25 bp, Homo sapien
tataaggaacttctctttgaggtct

SEQ ID NO: 2567130 - DNA, 25 bp, Homo sapien
ggaactgctgattgctctctgccag

SEQ ID NO: 2567131 - DNA, 25 bp, Homo sapien
tggactgcagttcatccctcagcac

SEQ ID NO: 2567132 - DNA, 25 bp, Homo sapien
gactgcagttcatccctcagcacag

SEQ ID NO: 2567133 - DNA, 25 bp, Homo sapien
actgcagttcatccctcagcacaga

SEQ ID NO: 2567134 - DNA, 25 bp, Homo sapien
catggactgcagttcatccctcagc

SEQ ID NO: 2567135 - DNA, 25 bp, Homo sapien
aatgaaacgccacagtcagtcaaga

SEQ ID NO: 2567136 - DNA, 25 bp, Homo sapien
taatatcctcgcagatgttccattc

SEQ ID NO: 2567137 - DNA, 25 bp, Homo sapien
cacacagccttctgatatatgagag

SEQ ID NO: 2567138 - DNA, 25 bp, Homo sapien
ggccatgggcatctctatgtgaaaa

SEQ ID NO: 2567139 - DNA, 25 bp, Homo sapien
gggttttcagatgcttgttcagcca

SEQ ID NO: 2567140 - DNA, 25 bp, Homo sapien
gaccctgggacttgtcagggtcatc

SEQ ID NO: 2567141 - DNA, 25 bp, Homo sapien
ctcagcttgtgaacaaggtgctctg

SEQ ID NO: 2567142 - DNA, 25 bp, Homo sapien
aactgggtcagctcttttgcctgag

SEQ ID NO: 2567143 - DNA, 25 bp, Homo sapien
ctgcaaatacagatgtgtccattga

SEQ ID NO: 2567144 - DNA, 25 bp, Homo sapien
gcaaatacagatgtgtccattgaaa

SEQ ID NO: 2567145 - DNA, 25 bp, Homo sapien
gatgtgtccattgaaatatttccca

SEQ ID NO: 2567146 - DNA, 25 bp, Homo sapien
tacagatgtgtccattgaaatattt

SEQ ID NO: 2567147 - DNA, 25 bp, Homo sapien
ctcgtctttgtcgtcttcatcctca

SEQ ID NO: 2567148 - DNA, 25 bp, Homo sapien
tgtactttctcaacctcctcgtctt

SEQ ID NO: 2567149 - DNA, 25 bp, Homo sapien
caggtgattcctgtactttctcaac

SEQ ID NO: 2567150 - DNA, 25 bp, Homo sapien
ttctcaacctcctcgtctttgtcgt

SEQ ID NO: 2567151 - DNA, 25 bp, Homo sapien
ccaaaaggcattgcaccccaagaag

SEQ ID NO: 2567152 - DNA, 25 bp, Homo sapien
caaaaggcattgcaccccaagaagt

SEQ ID NO: 2567153 - DNA, 25 bp, Homo sapien
cagagcagagtcgacttcgtgttcc

SEQ ID NO: 2567154 - DNA, 25 bp, Homo sapien
gggaatgtttagagcttcctcctct

SEQ ID NO: 2567155 - DNA, 25 bp, Homo sapien
gaagggttgtgactatttgaacaag

SEQ ID NO: 2567156 - DNA, 25 bp, Homo sapien
cgacttcgtgttccttaaatgtgat

SEQ ID NO: 2567157 - DNA, 25 bp, Homo sapien
tcctcctcatggtcattttgatttt

SEQ ID NO: 2567158 - DNA, 25 bp, Homo sapien
cctcctcctcctcatggtcattttg

SEQ ID NO: 2567159 - DNA, 25 bp, Homo sapien
tggggggcactggcgctttcccctc

SEQ ID NO: 2567160 - DNA, 25 bp, Homo sapien
ctggggggcactggcgctttcccct

SEQ ID NO: 2567161 - DNA, 25 bp, Homo sapien
tctggcaagtcctgcaggactccct

SEQ ID NO: 2567162 - DNA, 25 bp, Homo sapien
caaaacacatttctctggcaagtcc

SEQ ID NO: 2567163 - DNA, 25 bp, Homo sapien
ctagaatgagacaaaacacatttct

SEQ ID NO: 2567164 - DNA, 25 bp, Homo sapien
cttctcttcagaatcctgcagcttt

SEQ ID NO: 2567165 - DNA, 25 bp, Homo sapien
taaccagtatataagcatagagtct

SEQ ID NO: 2567166 - DNA, 25 bp, Homo sapien
tcttcctgaaggtatgacatccgtc

SEQ ID NO: 2567167 - DNA, 25 bp, Homo sapien
caatagggagcctaccgaggaagcc

SEQ ID NO: 2567168 - DNA, 25 bp, Homo sapien
catccgtcactatggacaaatctgg

SEQ ID NO: 2567169 - DNA, 25 bp, Homo sapien
taagtgttaatatatgatatcctga

SEQ ID NO: 2567170 - DNA, 25 bp, Homo sapien
tatttgaactttggactctctagtg

SEQ ID NO: 2567171 - DNA, 25 bp, Homo sapien
tccatttgtaggcaacctgcccttt

SEQ ID NO: 2567172 - DNA, 25 bp, Homo sapien
tctagtgaggttgggtaagtgttaa

SEQ ID NO: 2567173 - DNA, 25 bp, Homo sapien
caattgcacattgatctgttggcac

SEQ ID NO: 2567174 - DNA, 25 bp, Homo sapien
aacacaatgtatgaatcggaccagc

SEQ ID NO: 2567175 - DNA, 25 bp, Homo sapien
tacgcagtgtctgtgcaaattggca

SEQ ID NO: 2567176 - DNA, 25 bp, Homo sapien
aagatcccagggagttaatatggca

SEQ ID NO: 2567177 - DNA, 25 bp, Homo sapien
tcttaaagccctggcaattaacctc

SEQ ID NO: 2567178 - DNA, 25 bp, Homo sapien
tggctgttcccactaacagcaccat

SEQ ID NO: 2567179 - DNA, 25 bp, Homo sapien
ttggctgttcccactaacagcacca

SEQ ID NO: 2567180 - DNA, 25 bp, Homo sapien
ttcaatggaaacagggttgttggat

SEQ ID NO: 2567181 - DNA, 25 bp, Homo sapien
tcaatggaaacagggttgttggatt

SEQ ID NO: 2567182 - DNA, 25 bp, Homo sapien
ggatttcaattccaccagcatttcc

SEQ ID NO: 2567183 - DNA, 25 bp, Homo sapien
caattccaccagcatttccaacaat

SEQ ID NO: 2567184 - DNA, 25 bp, Homo sapien
tctcctggattcttgatctcaacat

SEQ ID NO: 2567185 - DNA, 25 bp, Homo sapien
tcttgatctcaacatgcaaaccaca

SEQ ID NO: 2567186 - DNA, 25 bp, Homo sapien
caggcctccaagttgtgagagaggg

SEQ ID NO: 2567187 - DNA, 25 bp, Homo sapien
cctccaagttgtgagagagggttgt

SEQ ID NO: 2567188 - DNA, 25 bp, Homo sapien
ccaagttgtgagagagggttgttat

SEQ ID NO: 2567189 - DNA, 25 bp, Homo sapien
agagagggttgttatgttctgggtc

SEQ ID NO: 2567190 - DNA, 25 bp, Homo sapien
cacatctttgttgcatcatgcactg

SEQ ID NO: 2567191 - DNA, 25 bp, Homo sapien
tgttgcatcatgcactggaattgca

SEQ ID NO: 2567192 - DNA, 25 bp, Homo sapien
catgcactggaattgcaggccaccc

SEQ ID NO: 2567193 - DNA, 25 bp, Homo sapien
catcatgcactggaattgcaggcca

SEQ ID NO: 2567194 - DNA, 25 bp, Homo sapien
ggtgaactaaggttttcgagaatgc

SEQ ID NO: 2567195 - DNA, 25 bp, Homo sapien
taaggttttcgagaatgctgacttc

SEQ ID NO: 2567196 - DNA, 25 bp, Homo sapien
aactaaggttttcgagaatgctgac

SEQ ID NO: 2567197 - DNA, 25 bp, Homo sapien
ggttttcgagaatgctgacttctac

SEQ ID NO: 2567198 - DNA, 25 bp, Homo sapien
tgattgtacgaggaacagcagtgtc

SEQ ID NO: 2567199 - DNA, 25 bp, Homo sapien
gggctcctgattcagactggaacaa

SEQ ID NO: 2567200 - DNA, 25 bp, Homo sapien
tgctctcgcctctttctgaagctat

SEQ ID NO: 2567201 - DNA, 25 bp, Homo sapien
gaacaataaggcaccttctttggga

SEQ ID NO: 2567202 - DNA, 25 bp, Homo sapien
aacacaagccaactggtcaagagca

SEQ ID NO: 2567203 - DNA, 25 bp, Homo sapien
ttgataatgactctgaacatgggta

SEQ ID NO: 2567204 - DNA, 25 bp, Homo sapien
gaagtgctccagctaaaacacaagc

SEQ ID NO: 2567205 - DNA, 25 bp, Homo sapien
gccaaccagtacaatcctaaagacg

SEQ ID NO: 2567206 - DNA, 25 bp, Homo sapien
gggggctgtattcttgctctccaac

SEQ ID NO: 2567207 - DNA, 25 bp, Homo sapien
caacaatgtccttaagttccagtct

SEQ ID NO: 2567208 - DNA, 25 bp, Homo sapien
gatgaacaccatctggcctgctttc

SEQ ID NO: 2567209 - DNA, 25 bp, Homo sapien
agcaaagatgaacaccatctggcct

SEQ ID NO: 2567210 - DNA, 25 bp, Homo sapien
tgccaaagtactccttatgaaactg

SEQ ID NO: 2567211 - DNA, 25 bp, Homo sapien
agctatcccgtagctcttgcagggt

SEQ ID NO: 2567212 - DNA, 25 bp, Homo sapien
ttagctatcccgtagctcttgcagg

SEQ ID NO: 2567213 - DNA, 25 bp, Homo sapien
agtactccttatgaaactggcagca

SEQ ID NO: 2567214 - DNA, 25 bp, Homo sapien
tgatcaagcagaaccatccacttga

SEQ ID NO: 2567215 - DNA, 25 bp, Homo sapien
taagcttaaccgagatccatccaat

SEQ ID NO: 2567216 - DNA, 25 bp, Homo sapien
caatcccacagagatcagtagaacc

SEQ ID NO: 2567217 - DNA, 25 bp, Homo sapien
tctgcggttgaagaagaagtaagct

SEQ ID NO: 2567218 - DNA, 25 bp, Homo sapien
tagggcactgttggtactactgaga

SEQ ID NO: 2567219 - DNA, 25 bp, Homo sapien
tgctcatggttagggcactgttggt

SEQ ID NO: 2567220 - DNA, 25 bp, Homo sapien
tcatggttagggcactgttggtact

SEQ ID NO: 2567221 - DNA, 25 bp, Homo sapien
gcactgttggtactactgagagact

SEQ ID NO: 2567222 - DNA, 25 bp, Homo sapien
tagagatgctcgtgcaaagtccttt

SEQ ID NO: 2567223 - DNA, 25 bp, Homo sapien
tttaagtactttcccgctctcggca

SEQ ID NO: 2567224 - DNA, 25 bp, Homo sapien
aattcagctttgaaggacaagtgac

SEQ ID NO: 2567225 - DNA, 25 bp, Homo sapien
gacaagtgacgtttatttgactgtt

SEQ ID NO: 2567226 - DNA, 25 bp, Homo sapien
aaatgaattggcaaatttgcaatgc

SEQ ID NO: 2567227 - DNA, 25 bp, Homo sapien
cttggaaaacaaatgaattggcaaa

SEQ ID NO: 2567228 - DNA, 25 bp, Homo sapien
acaaatgaattggcaaatttgcaat

SEQ ID NO: 2567229 - DNA, 25 bp, Homo sapien
atgaattggcaaatttgcaatgcca

SEQ ID NO: 2567230 - DNA, 25 bp, Homo sapien
tgctcagcgggttttggcagctccg

SEQ ID NO: 2567231 - DNA, 25 bp, Homo sapien
tactttatctgcagtgaacagcagg

SEQ ID NO: 2567232 - DNA, 25 bp, Homo sapien
aattccagatgttgggcgctgctca

SEQ ID NO: 2567233 - DNA, 25 bp, Homo sapien
gcaggcgaatagctttcttactccc

SEQ ID NO: 2567234 - DNA, 25 bp, Homo sapien
aattggatctattgcccatggctga

SEQ ID NO: 2567235 - DNA, 25 bp, Homo sapien
tgctttctgcatagtaaattggatc

SEQ ID NO: 2567236 - DNA, 25 bp, Homo sapien
tagtaaattggatctattgcccatg

SEQ ID NO: 2567237 - DNA, 25 bp, Homo sapien
gatctattgcccatggctgatttct

SEQ ID NO: 2567238 - DNA, 25 bp, Homo sapien
tctctattgtgtcctaaagccttac

SEQ ID NO: 2567239 - DNA, 25 bp, Homo sapien
ccatctctattgtgtcctaaagcct

SEQ ID NO: 2567240 - DNA, 25 bp, Homo sapien
tattgtgtcctaaagccttacttgt

SEQ ID NO: 2567241 - DNA, 25 bp, Homo sapien
tctattgtgtcctaaagccttactt

SEQ ID NO: 2567242 - DNA, 25 bp, Homo sapien
tgcctctgccatctgtcaaaggcat

SEQ ID NO: 2567243 - DNA, 25 bp, Homo sapien
gaagtcaaaagctgctgcttgctgc

SEQ ID NO: 2567244 - DNA, 25 bp, Homo sapien
tgttgaagtcaaaagctgctgcttg

SEQ ID NO: 2567245 - DNA, 25 bp, Homo sapien
ctctgttgaagtcaaaagctgctgc

SEQ ID NO: 2567246 - DNA, 25 bp, Homo sapien
tcatggattcattacttaacaggcc

SEQ ID NO: 2567247 - DNA, 25 bp, Homo sapien
gcctgagtatgcatccaataggctg

SEQ ID NO: 2567248 - DNA, 25 bp, Homo sapien
tacttaacaggcctgagtatgcatc

SEQ ID NO: 2567249 - DNA, 25 bp, Homo sapien
ggattcattacttaacaggcctgag

SEQ ID NO: 2567250 - DNA, 25 bp, Homo sapien
aaactgcagtaagggatccacaaag

SEQ ID NO: 2567251 - DNA, 25 bp, Homo sapien
tcctcaatgtactcataactgctcc

SEQ ID NO: 2567252 - DNA, 25 bp, Homo sapien
agacttggcatgacaactagcattc

SEQ ID NO: 2567253 - DNA, 25 bp, Homo sapien
gcatgacaactagcattccaaagga

SEQ ID NO: 2567254 - DNA, 25 bp, Homo sapien
gtctttagacaccaagctcgtaaga

SEQ ID NO: 2567255 - DNA, 25 bp, Homo sapien
cgtaagaatgttctcatatatattt

SEQ ID NO: 2567256 - DNA, 25 bp, Homo sapien
gacaccaagctcgtaagaatgttct

SEQ ID NO: 2567257 - DNA, 25 bp, Homo sapien
tttagacaccaagctcgtaagaatg

SEQ ID NO: 2567258 - DNA, 25 bp, Homo sapien
ctttactcatccacacgagcatttc

SEQ ID NO: 2567259 - DNA, 25 bp, Homo sapien
gacttttgtgactgtaaatcttaac

SEQ ID NO: 2567260 - DNA, 25 bp, Homo sapien
tcttgcagatatgagctatctttac

SEQ ID NO: 2567261 - DNA, 25 bp, Homo sapien
tgatcaccattattctctcttgcag

SEQ ID NO: 2567262 - DNA, 25 bp, Homo sapien
tctgacaccgtgcaatgtagaggag

SEQ ID NO: 2567263 - DNA, 25 bp, Homo sapien
ggaggtgacacattcccaatgatgc

SEQ ID NO: 2567264 - DNA, 25 bp, Homo sapien
cgagggatcttcatgggaacacaaa

SEQ ID NO: 2567265 - DNA, 25 bp, Homo sapien
ggaacacaaaagagacagctctgct

SEQ ID NO: 2567266 - DNA, 25 bp, Homo sapien
cgtttgtaggcttatttgttccaat

SEQ ID NO: 2567267 - DNA, 25 bp, Homo sapien
ctatgacttttaccgtttgtaggct

SEQ ID NO: 2567268 - DNA, 25 bp, Homo sapien
gaggctatgacttttaccgtttgta

SEQ ID NO: 2567269 - DNA, 25 bp, Homo sapien
gtttgtaggcttatttgttccaata

SEQ ID NO: 2567270 - DNA, 25 bp, Homo sapien
tcgtcttgttgaaactccttgggta

SEQ ID NO: 2567271 - DNA, 25 bp, Homo sapien
gctattttactttcgtcttgttgaa

SEQ ID NO: 2567272 - DNA, 25 bp, Homo sapien
ctgagctattttactttcgtcttgt

SEQ ID NO: 2567273 - DNA, 25 bp, Homo sapien
tcttgttgaaactccttgggtagaa

SEQ ID NO: 2567274 - DNA, 25 bp, Homo sapien
ctgcacaaagtcagtcagcaaggga

SEQ ID NO: 2567275 - DNA, 25 bp, Homo sapien
gaggcagtaaggtttgccctactct

SEQ ID NO: 2567276 - DNA, 25 bp, Homo sapien
acaaagtcagtcagcaagggaggca

SEQ ID NO: 2567277 - DNA, 25 bp, Homo sapien
caagggaggcagtaaggtttgccct

SEQ ID NO: 2567278 - DNA, 25 bp, Homo sapien
gagtaaatatcagtatggatgctgc

SEQ ID NO: 2567279 - DNA, 25 bp, Homo sapien
ggtgaagagagtttcatcaggagac

SEQ ID NO: 2567280 - DNA, 25 bp, Homo sapien
gaccttctcggcatgaaattccaga

SEQ ID NO: 2567281 - DNA, 25 bp, Homo sapien
tgcgattttatcatcaggtgaagag

SEQ ID NO: 2567282 - DNA, 25 bp, Homo sapien
taaatagcatccacgatcttagaca

SEQ ID NO: 2567283 - DNA, 25 bp, Homo sapien
gtaaatagcatccacgatcttagac

SEQ ID NO: 2567284 - DNA, 25 bp, Homo sapien
aaatagcatccacgatcttagacac

SEQ ID NO: 2567285 - DNA, 25 bp, Homo sapien
tcaacaaagtgataacctgcaacat

SEQ ID NO: 2567286 - DNA, 25 bp, Homo sapien
agttgaaagatgaccttcttgggtg

SEQ ID NO: 2567287 - DNA, 25 bp, Homo sapien
ataagttgaaagatgaccttcttgg

SEQ ID NO: 2567288 - DNA, 25 bp, Homo sapien
catgtcaacaaagtgataacctgca

SEQ ID NO: 2567289 - DNA, 25 bp, Homo sapien
ttgtcttcagcacgtgaggggccac

SEQ ID NO: 2567290 - DNA, 25 bp, Homo sapien
aggggccacgctcgcctgagaacat

SEQ ID NO: 2567291 - DNA, 25 bp, Homo sapien
aacatgccgccttccacatctgtat

SEQ ID NO: 2567292 - DNA, 25 bp, Homo sapien
cagtatcaataagattgtcttcagc

SEQ ID NO: 2567293 - DNA, 25 bp, Homo sapien
tcactgttgtagaagacttggaaca

SEQ ID NO: 2567294 - DNA, 25 bp, Homo sapien
tttcctgtaggaaccaagaggcaga

SEQ ID NO: 2567295 - DNA, 25 bp, Homo sapien
gaacataagagtcgtcaagagctgg

SEQ ID NO: 2567296 - DNA, 25 bp, Homo sapien
aatactgggccaccgctttcctgta

SEQ ID NO: 2567297 - DNA, 25 bp, Homo sapien
aatatccacctgttgcagtccagaa

SEQ ID NO: 2567298 - DNA, 25 bp, Homo sapien
tcattagagtaatatccacctgttg

SEQ ID NO: 2567299 - DNA, 25 bp, Homo sapien
gatcttcagataactggtcccagaa

SEQ ID NO: 2567300 - DNA, 25 bp, Homo sapien
cacagatcttcagataactggtccc

SEQ ID NO: 2567301 - DNA, 25 bp, Homo sapien
tgaatgatgtaacgccgatgagagt

SEQ ID NO: 2567302 - DNA, 25 bp, Homo sapien
ctttgaatgatgtaacgccgatgag

SEQ ID NO: 2567303 - DNA, 25 bp, Homo sapien
acgccgatgagagtttgggaccgcc

SEQ ID NO: 2567304 - DNA, 25 bp, Homo sapien
tgtaacgccgatgagagtttgggac

SEQ ID NO: 2567305 - DNA, 25 bp, Homo sapien
ctactgagagcttatagagataact

SEQ ID NO: 2567306 - DNA, 25 bp, Homo sapien
tcttctgaccttctaggaccttcta

SEQ ID NO: 2567307 - DNA, 25 bp, Homo sapien
gaaactgtggaaagttatattcact

SEQ ID NO: 2567308 - DNA, 25 bp, Homo sapien
aatacgatgacagtgtcttctgacc

SEQ ID NO: 2567309 - DNA, 25 bp, Homo sapien
aggatcagtctgctaactacaggat

SEQ ID NO: 2567310 - DNA, 25 bp, Homo sapien
ggattggaatcattgatccagttta

SEQ ID NO: 2567311 - DNA, 25 bp, Homo sapien
ccagtttatgaagaggaccaaaaat

SEQ ID NO: 2567312 - DNA, 25 bp, Homo sapien
tctgctaactacaggattggaatca

SEQ ID NO: 2567313 - DNA, 25 bp, Homo sapien
caaggcctgaagtacaacattatcg

SEQ ID NO: 2567314 - DNA, 25 bp, Homo sapien
tgatccatcagagtacagtagctgg

SEQ ID NO: 2567315 - DNA, 25 bp, Homo sapien
ctggtacccaaagagtaggtcactt

SEQ ID NO: 2567316 - DNA, 25 bp, Homo sapien
ccttctaagggtgagcaaggcctga

SEQ ID NO: 2567317 - DNA, 25 bp, Homo sapien
tatccctaactaattgaccaaagtg

SEQ ID NO: 2567318 - DNA, 25 bp, Homo sapien
gaattgccatacttcgaatgcctcc

SEQ ID NO: 2567319 - DNA, 25 bp, Homo sapien
gggcaccaagccttctagaaccaca

SEQ ID NO: 2567320 - DNA, 25 bp, Homo sapien
catgtgtactgtctcatatccctaa

SEQ ID NO: 2567321 - DNA, 25 bp, Homo sapien
catctttgagcaaacgtgatgttga

SEQ ID NO: 2567322 - DNA, 25 bp, Homo sapien
ttgttacagatattgagcaccacca

SEQ ID NO: 2567323 - DNA, 25 bp, Homo sapien
aagattgttacagatattgagcacc

SEQ ID NO: 2567324 - DNA, 25 bp, Homo sapien
gcaaacgtgatgttgaccactttaa

SEQ ID NO: 2567325 - DNA, 25 bp, Homo sapien
gttttgtctacaactcttatagtag

SEQ ID NO: 2567326 - DNA, 25 bp, Homo sapien
tgtctacaactcttatagtagtaaa

SEQ ID NO: 2567327 - DNA, 25 bp, Homo sapien
cctgtaagttttgtctacaactctt

SEQ ID NO: 2567328 - DNA, 25 bp, Homo sapien
ttttcctccaagatccactcttatc

SEQ ID NO: 2567329 - DNA, 25 bp, Homo sapien
aatacccacccatagctcaaaatgg

SEQ ID NO: 2567330 - DNA, 25 bp, Homo sapien
taatacccacccatagctcaaaatg

SEQ ID NO: 2567331 - DNA, 25 bp, Homo sapien
cttaatacccacccatagctcaaaa

SEQ ID NO: 2567332 - DNA, 25 bp, Homo sapien
tacccacccatagctcaaaatgggt

SEQ ID NO: 2567333 - DNA, 25 bp, Homo sapien
ggctccacaggaatcgtaaggtatc

SEQ ID NO: 2567334 - DNA, 25 bp, Homo sapien
gatgtcaaatctgtaatgtagttcc

SEQ ID NO: 2567335 - DNA, 25 bp, Homo sapien
gaatcgtaaggtatcagatgtcaaa

SEQ ID NO: 2567336 - DNA, 25 bp, Homo sapien
gatgccctcttaagatatgttctgg

SEQ ID NO: 2567337 - DNA, 25 bp, Homo sapien
catgatgctaactggggtcaaggga

SEQ ID NO: 2567338 - DNA, 25 bp, Homo sapien
taactggggtcaagggaagatccga

SEQ ID NO: 2567339 - DNA, 25 bp, Homo sapien
gggaagatccgactgccaagttgga

SEQ ID NO: 2567340 - DNA, 25 bp, Homo sapien
ttactccatgatgctaactggggtc

SEQ ID NO: 2567341 - DNA, 25 bp, Homo sapien
actggggtaatacctgccatgggtc

SEQ ID NO: 2567342 - DNA, 25 bp, Homo sapien
gagcccagaggttgtaggatgaggt

SEQ ID NO: 2567343 - DNA, 25 bp, Homo sapien
ggtgggcgtggggtgaggcacgggc

SEQ ID NO: 2567344 - DNA, 25 bp, Homo sapien
cgggccactggggtaatacctgcca

SEQ ID NO: 2567345 - DNA, 25 bp, Homo sapien
cgggccactggggtaatacctgcca

SEQ ID NO: 2567346 - DNA, 25 bp, Homo sapien
actggggtaatacctgccatgggtc

SEQ ID NO: 2567347 - DNA, 25 bp, Homo sapien
gagcccagaggttgtaggatgaggt

SEQ ID NO: 2567348 - DNA, 25 bp, Homo sapien
ggtgggcgtggggtgaggcacgggc

SEQ ID NO: 2567349 - DNA, 25 bp, Homo sapien
tcggatagatacacctgtctgggag

SEQ ID NO: 2567350 - DNA, 25 bp, Homo sapien
ctgggctggttacccccggaagcag

SEQ ID NO: 2567351 - DNA, 25 bp, Homo sapien
ttccctggtggcttcaccagtcgga

SEQ ID NO: 2567352 - DNA, 25 bp, Homo sapien
cctgtctgggagttggagctgggct

SEQ ID NO: 2567353 - DNA, 25 bp, Homo sapien
cacaggcccggctgatccgatagcc

SEQ ID NO: 2567354 - DNA, 25 bp, Homo sapien
ctgtcccttgatgcctggcaccctg

SEQ ID NO: 2567355 - DNA, 25 bp, Homo sapien
gccctgtcccttgatgcctggcacc

SEQ ID NO: 2567356 - DNA, 25 bp, Homo sapien
ggctgatccgatagccctgtccctt

SEQ ID NO: 2567357 - DNA, 25 bp, Homo sapien
aaacaatagagtcgagccggctgag

SEQ ID NO: 2567358 - DNA, 25 bp, Homo sapien
aacaatagagtcgagccggctgagc

SEQ ID NO: 2567359 - DNA, 25 bp, Homo sapien
acaatagagtcgagccggctgagcc

SEQ ID NO: 2567360 - DNA, 25 bp, Homo sapien
aaaacaatagagtcgagccggctga

SEQ ID NO: 2567361 - DNA, 25 bp, Homo sapien
gggagctctgcacctcgcataggaa

SEQ ID NO: 2567362 - DNA, 25 bp, Homo sapien
ctggcactgaagagtgcagatgcag

SEQ ID NO: 2567363 - DNA, 25 bp, Homo sapien
agccccaggctttagttccctggca

SEQ ID NO: 2567364 - DNA, 25 bp, Homo sapien
gaaggcttcaggtggcggtgcagtc

SEQ ID NO: 2567365 - DNA, 25 bp, Homo sapien
acgtgtgcccaaggatgaacatgca

SEQ ID NO: 2567366 - DNA, 25 bp, Homo sapien
cagagccccccgccaggaggctggt

SEQ ID NO: 2567367 - DNA, 25 bp, Homo sapien
aggtgaaggttgaacagaatggtga

SEQ ID NO: 2567368 - DNA, 25 bp, Homo sapien
gcagagccccccgccaggaggctgg

SEQ ID NO: 2567369 - DNA, 25 bp, Homo sapien
ctaagccgtgaagtaggtgaaggtt

SEQ ID NO: 2567370 - DNA, 25 bp, Homo sapien
acaagttcggaattgttatgtcttc

SEQ ID NO: 2567371 - DNA, 25 bp, Homo sapien
tttgaggctatactaaaagatacaa

SEQ ID NO: 2567372 - DNA, 25 bp, Homo sapien
aaagatacaaacaagttcggaattg

SEQ ID NO: 2567373 - DNA, 25 bp, Homo sapien
ttctctaataatgctctgtatatat

SEQ ID NO: 2567374 - DNA, 25 bp, Homo sapien
ctagtccgagctgggcaagtttacc

SEQ ID NO: 2567375 - DNA, 25 bp, Homo sapien
catctggattagtgttttcaggcag

SEQ ID NO: 2567376 - DNA, 25 bp, Homo sapien
gactttagatggagaccacatcctt

SEQ ID NO: 2567377 - DNA, 25 bp, Homo sapien
tgccacatcattcagcctctctagg

SEQ ID NO: 2567378 - DNA, 25 bp, Homo sapien
gggatgcttccagccggatatccat

SEQ ID NO: 2567379 - DNA, 25 bp, Homo sapien
tctccaaatgaggaccagtaactga

SEQ ID NO: 2567380 - DNA, 25 bp, Homo sapien
gagaagcaatgccaaagtgacatgg

SEQ ID NO: 2567381 - DNA, 25 bp, Homo sapien
tgaggccctggtccacatgtagacc

SEQ ID NO: 2567382 - DNA, 25 bp, Homo sapien
cagatgaagctgctttccagaagct

SEQ ID NO: 2567383 - DNA, 25 bp, Homo sapien
aggacagatgaagctgctttccaga

SEQ ID NO: 2567384 - DNA, 25 bp, Homo sapien
ctttccagaagctgatgagcaactt

SEQ ID NO: 2567385 - DNA, 25 bp, Homo sapien
cagaagctgatgagcaacttggaca

SEQ ID NO: 2567386 - DNA, 25 bp, Homo sapien
cttccacaagtactcgggcaaagag

SEQ ID NO: 2567387 - DNA, 25 bp, Homo sapien
tgacaagttcaagctcaacaagtca

SEQ ID NO: 2567388 - DNA, 25 bp, Homo sapien
ggagctgctgacccgggagctgccc

SEQ ID NO: 2567389 - DNA, 25 bp, Homo sapien
aaaggagctgctgacccgggagctg

SEQ ID NO: 2567390 - DNA, 25 bp, Homo sapien
tgtttatggctatacccccaatgcg

SEQ ID NO: 2567391 - DNA, 25 bp, Homo sapien
tcactattacgtgaccctgggcaag

SEQ ID NO: 2567392 - DNA, 25 bp, Homo sapien
aaaatgaatgcctgctaggcctgcc

SEQ ID NO: 2567393 - DNA, 25 bp, Homo sapien
ccccaatgcgtctaaatatttatac

SEQ ID NO: 2567394 - DNA, 25 bp, Homo sapien
cccaatgtgataacgtgggtcctcg

SEQ ID NO: 2567395 - DNA, 25 bp, Homo sapien
gtgataacgtgggtcctcgcatgct

SEQ ID NO: 2567396 - DNA, 25 bp, Homo sapien
caatgtgataacgtgggtcctcgca

SEQ ID NO: 2567397 - DNA, 25 bp, Homo sapien
ctgaacccaatgtgataacgtgggt

SEQ ID NO: 2567398 - DNA, 25 bp, Homo sapien
gaataattggagcttctaggaaagg

SEQ ID NO: 2567399 - DNA, 25 bp, Homo sapien
gaaatgaaatgttagggctctcagg

SEQ ID NO: 2567400 - DNA, 25 bp, Homo sapien
tttgaaggcaagaggaaaagatgcc

SEQ ID NO: 2567401 - DNA, 25 bp, Homo sapien
aagatgggcttctggcgcctgctga

SEQ ID NO: 2567402 - DNA, 25 bp, Homo sapien
caaaaagatgcgcacagtggcgcac

SEQ ID NO: 2567403 - DNA, 25 bp, Homo sapien
caaaagatgcaaaaagatgcgcaca

SEQ ID NO: 2567404 - DNA, 25 bp, Homo sapien
aaaagaatccagtccacagggcatt

SEQ ID NO: 2567405 - DNA, 25 bp, Homo sapien
cagccttggcgacagtgagtctatg

SEQ ID NO: 2567406 - DNA, 25 bp, Homo sapien
agctgccgacccttgcggcggtggg

SEQ ID NO: 2567407 - DNA, 25 bp, Homo sapien
aggatgcagggcacgtctttccggg

SEQ ID NO: 2567408 - DNA, 25 bp, Homo sapien
ctcattctagatagcaactgcccag

SEQ ID NO: 2567409 - DNA, 25 bp, Homo sapien
tccttgtagctcattctagatagca

SEQ ID NO: 2567410 - DNA, 25 bp, Homo sapien
ctgtggaccagcgaatgtaatttgg

SEQ ID NO: 2567411 - DNA, 25 bp, Homo sapien
ttagctgtggaccagcgaatgtaat

SEQ ID NO: 2567412 - DNA, 25 bp, Homo sapien
gcgaatgtaatttggagctgaggcc

SEQ ID NO: 2567413 - DNA, 25 bp, Homo sapien
tggaccagcgaatgtaatttggagc

SEQ ID NO: 2567414 - DNA, 25 bp, Homo sapien
tcacttctcagatagggtggccggg

SEQ ID NO: 2567415 - DNA, 25 bp, Homo sapien
ctcctggacgggacggctgccgggc

SEQ ID NO: 2567416 - DNA, 25 bp, Homo sapien
acttctcagatagggtggccgggca

SEQ ID NO: 2567417 - DNA, 25 bp, Homo sapien
cctcacttctcagatagggtggccg

SEQ ID NO: 2567418 - DNA, 25 bp, Homo sapien
cagtggctgcttggctggatctggg

SEQ ID NO: 2567419 - DNA, 25 bp, Homo sapien
tggctgcttggctggatctgggttt

SEQ ID NO: 2567420 - DNA, 25 bp, Homo sapien
tcagtggctgcttggctggatctgg

SEQ ID NO: 2567421 - DNA, 25 bp, Homo sapien
gtggctgcttggctggatctgggtt

SEQ ID NO: 2567422 - DNA, 25 bp, Homo sapien
cttgtccttcgagtacttttcctca

SEQ ID NO: 2567423 - DNA, 25 bp, Homo sapien
tctgtgtgaaggtccttttgcttca

SEQ ID NO: 2567424 - DNA, 25 bp, Homo sapien
aaagttctgtgtgaaggtccttttg

SEQ ID NO: 2567425 - DNA, 25 bp, Homo sapien
gtccttcgagtacttttcctcaggc

SEQ ID NO: 2567426 - DNA, 25 bp, Homo sapien
catctgggaatgagctaagcaaggc

SEQ ID NO: 2567427 - DNA, 25 bp, Homo sapien
agtttgtatcccctggtccctctgg

SEQ ID NO: 2567428 - DNA, 25 bp, Homo sapien
tcacctgttcagtctcatctaacct

SEQ ID NO: 2567429 - DNA, 25 bp, Homo sapien
ctaaccttccaatgtctgatgttcc

SEQ ID NO: 2567430 - DNA, 25 bp, Homo sapien
ccatggggcctcactgagaggaccc

SEQ ID NO: 2567431 - DNA, 25 bp, Homo sapien
gctgtgctggttgagcccggtaagg

SEQ ID NO: 2567432 - DNA, 25 bp, Homo sapien
gatttcaatccaggactcttctctg

SEQ ID NO: 2567433 - DNA, 25 bp, Homo sapien
gagaggaccctcagtgagaaactta

SEQ ID NO: 2567434 - DNA, 25 bp, Homo sapien
tggccaaggttgcaaatgtggctgc

SEQ ID NO: 2567435 - DNA, 25 bp, Homo sapien
gccaaggttgcaaatgtggctgctg

SEQ ID NO: 2567436 - DNA, 25 bp, Homo sapien
caaggttgcaaatgtggctgctgga

SEQ ID NO: 2567437 - DNA, 25 bp, Homo sapien
caggttctggacagatggccaaggt

SEQ ID NO: 2567438 - DNA, 25 bp, Homo sapien
aggaagctcatggtgggttccccac

SEQ ID NO: 2567439 - DNA, 25 bp, Homo sapien
gccaggcggtcaggaagctcatggt

SEQ ID NO: 2567440 - DNA, 25 bp, Homo sapien
ctctctccgaccttcagttcatttg

SEQ ID NO: 2567441 - DNA, 25 bp, Homo sapien
tgctccacagtgctatggtccccag

SEQ ID NO: 2567442 - DNA, 25 bp, Homo sapien
ggggccttggcagggacttgagggc

SEQ ID NO: 2567443 - DNA, 25 bp, Homo sapien
gccttggcagggacttgagggctcc

SEQ ID NO: 2567444 - DNA, 25 bp, Homo sapien
gacccttcccaacacctgggagaca

SEQ ID NO: 2567445 - DNA, 25 bp, Homo sapien
acccttcccaacacctgggagacag

SEQ ID NO: 2567446 - DNA, 25 bp, Homo sapien
gagtcagtctggtaccctcggtcag

SEQ ID NO: 2567447 - DNA, 25 bp, Homo sapien
tcaggtgtctcggatcagatgtccc

SEQ ID NO: 2567448 - DNA, 25 bp, Homo sapien
gaaaccccaagagacctaagtgcag

SEQ ID NO: 2567449 - DNA, 25 bp, Homo sapien
gacaatggcccctgatcgaatgaca

SEQ ID NO: 2567450 - DNA, 25 bp, Homo sapien
gcgtggaacacgttgatgagggtct

SEQ ID NO: 2567451 - DNA, 25 bp, Homo sapien
ggaacacgttgatgagggtctccat

SEQ ID NO: 2567452 - DNA, 25 bp, Homo sapien
cgtggaacacgttgatgagggtctc

SEQ ID NO: 2567453 - DNA, 25 bp, Homo sapien
tggaacacgttgatgagggtctcca

SEQ ID NO: 2567454 - DNA, 25 bp, Homo sapien
ccagttaccgtatgttcagtgccta

SEQ ID NO: 2567455 - DNA, 25 bp, Homo sapien
tgatgaatctacacagggcctaaca

SEQ ID NO: 2567456 - DNA, 25 bp, Homo sapien
ggtgcactttctaccgtatcctgag

SEQ ID NO: 2567457 - DNA, 25 bp, Homo sapien
taaagcaagcactacactaggagct

SEQ ID NO: 2567458 - DNA, 25 bp, Homo sapien
gaattatgggactcttctaggcctc

SEQ ID NO: 2567459 - DNA, 25 bp, Homo sapien
tgttgcctacagcataagctctttc

SEQ ID NO: 2567460 - DNA, 25 bp, Homo sapien
gtcttgagggcttctgttgcctaca

SEQ ID NO: 2567461 - DNA, 25 bp, Homo sapien
caaagatgagcgagaggaactgcat

SEQ ID NO: 2567462 - DNA, 25 bp, Homo sapien
gccacaagcaccacatactcctgga

SEQ ID NO: 2567463 - DNA, 25 bp, Homo sapien
cgtctccattctcgtctagctcctt

SEQ ID NO: 2567464 - DNA, 25 bp, Homo sapien
acctccccgtctccattctcgtcta

SEQ ID NO: 2567465 - DNA, 25 bp, Homo sapien
gcagccacaagcaccacatactcct

SEQ ID NO: 2567466 - DNA, 25 bp, Homo sapien
gaggaagggcgctgcccaatgtggc

SEQ ID NO: 2567467 - DNA, 25 bp, Homo sapien
gaccgctactcttgcgcccttggtg

SEQ ID NO: 2567468 - DNA, 25 bp, Homo sapien
ttgcaggcttggaccgctactcttg

SEQ ID NO: 2567469 - DNA, 25 bp, Homo sapien
gcctttaatgaaagatgagttgcag

SEQ ID NO: 2567470 - DNA, 25 bp, Homo sapien
tcttcttccggacaattgggcctgg

SEQ ID NO: 2567471 - DNA, 25 bp, Homo sapien
cccagtctgagagttgtgaagtgcc

SEQ ID NO: 2567472 - DNA, 25 bp, Homo sapien
gaggccagtattaggagcaaattcc

SEQ ID NO: 2567473 - DNA, 25 bp, Homo sapien
aagtgccgtaaatgctccagccaag

SEQ ID NO: 2567474 - DNA, 25 bp, Homo sapien
gcaattacgtcaggcgtcagatccg

SEQ ID NO: 2567475 - DNA, 25 bp, Homo sapien
gaaagatttgagctacgcctgcgca

SEQ ID NO: 2567476 - DNA, 25 bp, Homo sapien
taaaatggcgtctacgcaattacgt

SEQ ID NO: 2567477 - DNA, 25 bp, Homo sapien
gtcagatccgcgcacgactagaggg

SEQ ID NO: 2567478 - DNA, 25 bp, Homo sapien
tcctgctcggtgtccaaaacaaaat

SEQ ID NO: 2567479 - DNA, 25 bp, Homo sapien
ctgctcggtgtccaaaacaaaatgg

SEQ ID NO: 2567480 - DNA, 25 bp, Homo sapien
cctgctcggtgtccaaaacaaaatg

SEQ ID NO: 2567481 - DNA, 25 bp, Homo sapien
aaaacaaaatggccgccacgtccag

SEQ ID NO: 2567482 - DNA, 25 bp, Homo sapien
ctggttggctgtctagtcggccgat

SEQ ID NO: 2567483 - DNA, 25 bp, Homo sapien
tatgcgagctcagttcgttgttgct

SEQ ID NO: 2567484 - DNA, 25 bp, Homo sapien
tctagtcggccgatccgtctgctca

SEQ ID NO: 2567485 - DNA, 25 bp, Homo sapien
ttggttagatgcgtaagcggtagta

SEQ ID NO: 2567486 - DNA, 25 bp, Homo sapien
ctgagttgacggtggaggggctcgg

SEQ ID NO: 2567487 - DNA, 25 bp, Homo sapien
tgagttgacggtggaggggctcggg

SEQ ID NO: 2567488 - DNA, 25 bp, Homo sapien
aaacagacgccagtgctcctcccgg

SEQ ID NO: 2567489 - DNA, 25 bp, Homo sapien
aggaaacagacgccagtgctcctcc

SEQ ID NO: 2567490 - DNA, 25 bp, Homo sapien
ggaaacagacgccagtgctcctccc

SEQ ID NO: 2567491 - DNA, 25 bp, Homo sapien
gaaacagacgccagtgctcctcccg

SEQ ID NO: 2567492 - DNA, 25 bp, Homo sapien
caactttcggcgctgactgtgcagc

SEQ ID NO: 2567493 - DNA, 25 bp, Homo sapien
actttcggcgctgactgtgcagcca

SEQ ID NO: 2567494 - DNA, 25 bp, Homo sapien
tagcacaactttcggcgctgactgt

SEQ ID NO: 2567495 - DNA, 25 bp, Homo sapien
ttttagcacaactttcggcgctgac

SEQ ID NO: 2567496 - DNA, 25 bp, Homo sapien
tttgtgcattggaccccagggccaa

SEQ ID NO: 2567497 - DNA, 25 bp, Homo sapien
tacaggccagacacaacactgctgg

SEQ ID NO: 2567498 - DNA, 25 bp, Homo sapien
caagcctactgtagccagggtacca

SEQ ID NO: 2567499 - DNA, 25 bp, Homo sapien
caagggcctttggacatattcatgg

SEQ ID NO: 2567500 - DNA, 25 bp, Homo sapien
tgataacgagggctcaggtaacggc

SEQ ID NO: 2567501 - DNA, 25 bp, Homo sapien
gatccgaggtgcattctaaggccaa

SEQ ID NO: 2567502 - DNA, 25 bp, Homo sapien
gctccagatcccacgaacttttaag

SEQ ID NO: 2567503 - DNA, 25 bp, Homo sapien
tggtacacttagatcaaggctgatg

SEQ ID NO: 2567504 - DNA, 25 bp, Homo sapien
cttcaaggtcgaacaaaatggatgt

SEQ ID NO: 2567505 - DNA, 25 bp, Homo sapien
tctggagcattaagacccattctct

SEQ ID NO: 2567506 - DNA, 25 bp, Homo sapien
ctggagcattaagacccattctctc

SEQ ID NO: 2567507 - DNA, 25 bp, Homo sapien
ttctggagcattaagacccattctc

SEQ ID NO: 2567508 - DNA, 25 bp, Homo sapien
ctcaggatagcagggaacaggcagc

SEQ ID NO: 2567509 - DNA, 25 bp, Homo sapien
gcagccctggctgatttcgaaggct

SEQ ID NO: 2567510 - DNA, 25 bp, Homo sapien
gaggtcgtcgccttgcagccctggc

SEQ ID NO: 2567511 - DNA, 25 bp, Homo sapien
ccggttcctcgagaggtcgtcgcct

SEQ ID NO: 2567512 - DNA, 25 bp, Homo sapien
gctgatttcgaaggctaaaggcgat

SEQ ID NO: 2567513 - DNA, 25 bp, Homo sapien
tcagaccgtgcttgtgtagggcgct

SEQ ID NO: 2567514 - DNA, 25 bp, Homo sapien
cagctgcttgcaaagctcatggaaa

SEQ ID NO: 2567515 - DNA, 25 bp, Homo sapien
ggctcgagtaaattgatccagctgc

SEQ ID NO: 2567516 - DNA, 25 bp, Homo sapien
tgctggcgctgtcacgtggtcccgc

SEQ ID NO: 2567517 - DNA, 25 bp, Homo sapien
tgctgagttgcagagtccagtgcgt

SEQ ID NO: 2567518 - DNA, 25 bp, Homo sapien
tttttaatggcatgcccatgggtgg

SEQ ID NO: 2567519 - DNA, 25 bp, Homo sapien
catgggtgggtaataggaatccagt

SEQ ID NO: 2567520 - DNA, 25 bp, Homo sapien
cagtgcgttctggagcttattcata

SEQ ID NO: 2567521 - DNA, 25 bp, Homo sapien
catgtttggctgatgcgcagacgcc

SEQ ID NO: 2567522 - DNA, 25 bp, Homo sapien
tgcaccccttcctcggtgtgtgtct

SEQ ID NO: 2567523 - DNA, 25 bp, Homo sapien
tggctgatgcgcagacgccttctca

SEQ ID NO: 2567524 - DNA, 25 bp, Homo sapien
taaccaggcaaggtgatctgctggg

SEQ ID NO: 2567525 - DNA, 25 bp, Homo sapien
ctctaccctcagcagaaagcagaaa

SEQ ID NO: 2567526 - DNA, 25 bp, Homo sapien
tgcgtggaagaatgcactgatgaga

SEQ ID NO: 2567527 - DNA, 25 bp, Homo sapien
ctgcagtgcgtggaagaatgcactg

SEQ ID NO: 2567528 - DNA, 25 bp, Homo sapien
agtgcgtggaagaatgcactgatga

SEQ ID NO: 2567529 - DNA, 25 bp, Homo sapien
gcagtgcgtggaagaatgcactgat

SEQ ID NO: 2567530 - DNA, 25 bp, Homo sapien
tcataattgagtgacgtagctgaat

SEQ ID NO: 2567531 - DNA, 25 bp, Homo sapien
gattgattaagtaaacactcacagc

SEQ ID NO: 2567532 - DNA, 25 bp, Homo sapien
cagcacagacaatcataattgagtg

SEQ ID NO: 2567533 - DNA, 25 bp, Homo sapien
ttgatttagtcaccaaaacacccat

SEQ ID NO: 2567534 - DNA, 25 bp, Homo sapien
tccctcctttgtgggagttgcattt

SEQ ID NO: 2567535 - DNA, 25 bp, Homo sapien
aggcaaatcctggatctgtgcctgc

SEQ ID NO: 2567536 - DNA, 25 bp, Homo sapien
agagaggctagtgacatagagagcc

SEQ ID NO: 2567537 - DNA, 25 bp, Homo sapien
gggctccacctaggcaggcgctaga

SEQ ID NO: 2567538 - DNA, 25 bp, Homo sapien
cagaatttggaaggggcaaggccca

SEQ ID NO: 2567539 - DNA, 25 bp, Homo sapien
agaaccaactgacccagtccttttg

SEQ ID NO: 2567540 - DNA, 25 bp, Homo sapien
ctgacccagtccttttggtaccaga

SEQ ID NO: 2567541 - DNA, 25 bp, Homo sapien
cagtccttttggtaccagaatttgg

SEQ ID NO: 2567542 - DNA, 25 bp, Homo sapien
ggaaattccccataagatgggtaca

SEQ ID NO: 2567543 - DNA, 25 bp, Homo sapien
tgtctgaccggtttgcatgttccac

SEQ ID NO: 2567544 - DNA, 25 bp, Homo sapien
ccctcctttgtctgaccggtttgca

SEQ ID NO: 2567545 - DNA, 25 bp, Homo sapien
tcacttcgtaggtgccagatgtatt

SEQ ID NO: 2567546 - DNA, 25 bp, Homo sapien
gaagtcaacattctccggcatccac

SEQ ID NO: 2567547 - DNA, 25 bp, Homo sapien
gaggaagtcaacattctccggcatc

SEQ ID NO: 2567548 - DNA, 25 bp, Homo sapien
tacagacggttgtgccggtgggaga

SEQ ID NO: 2567549 - DNA, 25 bp, Homo sapien
ttagcaggggctggttacagacggt

SEQ ID NO: 2567550 - DNA, 25 bp, Homo sapien
ttgggtgcagcggaggcaatgcttg

SEQ ID NO: 2567551 - DNA, 25 bp, Homo sapien
tccctggcatctggcgctgtgccat

SEQ ID NO: 2567552 - DNA, 25 bp, Homo sapien
ggtgatgagttttcgccatcgcagc

SEQ ID NO: 2567553 - DNA, 25 bp, Homo sapien
gccatgtcccgtggcgccctgtggt

SEQ ID NO: 2567554 - DNA, 25 bp, Homo sapien
ggatgtgagggctggactttgctaa

SEQ ID NO: 2567555 - DNA, 25 bp, Homo sapien
tgagggctggactttgctaaaaata

SEQ ID NO: 2567556 - DNA, 25 bp, Homo sapien
gatgtgagggctggactttgctaaa

SEQ ID NO: 2567557 - DNA, 25 bp, Homo sapien
tgtgagggctggactttgctaaaaa

SEQ ID NO: 2567558 - DNA, 25 bp, Homo sapien
atgcaggcggcacaataccagagac

SEQ ID NO: 2567559 - DNA, 25 bp, Homo sapien
agagaggtcttgacttgttcagcgg

SEQ ID NO: 2567560 - DNA, 25 bp, Homo sapien
catccagagaggtcttgacttgttc

SEQ ID NO: 2567561 - DNA, 25 bp, Homo sapien
ggttgctggcgttgcctgggatgca

SEQ ID NO: 2567562 - DNA, 25 bp, Homo sapien
ttccagccaggtagacacccatggg

SEQ ID NO: 2567563 - DNA, 25 bp, Homo sapien
cacttgaatgcccactgacggctgc

SEQ ID NO: 2567564 - DNA, 25 bp, Homo sapien
tttggccagtgtcgtttccagccag

SEQ ID NO: 2567565 - DNA, 25 bp, Homo sapien
gcctgtgtcagccaaaatggaggaa

SEQ ID NO: 2567566 - DNA, 25 bp, Homo sapien
gggccccgcacccatctgatccctg

SEQ ID NO: 2567567 - DNA, 25 bp, Homo sapien
aacagggccccgcacccatctgatc

SEQ ID NO: 2567568 - DNA, 25 bp, Homo sapien
cagggccccgcacccatctgatccc

SEQ ID NO: 2567569 - DNA, 25 bp, Homo sapien
ccagaacagggccccgcacccatct

SEQ ID NO: 2567570 - DNA, 25 bp, Homo sapien
gggtcacatgctttctagttgctat

SEQ ID NO: 2567571 - DNA, 25 bp, Homo sapien
tattgtggaatagtaaatgaggcct

SEQ ID NO: 2567572 - DNA, 25 bp, Homo sapien
ttgtggcagatcctgctctctggac

SEQ ID NO: 2567573 - DNA, 25 bp, Homo sapien
tcctggtggagcagtctaatctggg

SEQ ID NO: 2567574 - DNA, 25 bp, Homo sapien
tccatgataacagctaaagcaacat

SEQ ID NO: 2567575 - DNA, 25 bp, Homo sapien
ttcatgacagggctgtcgacgtcta

SEQ ID NO: 2567576 - DNA, 25 bp, Homo sapien
gttctgtaggatccccatgggctct

SEQ ID NO: 2567577 - DNA, 25 bp, Homo sapien
tcgacgtctagaggctgttctgtag

SEQ ID NO: 2567578 - DNA, 25 bp, Homo sapien
aactgcagaggagtacaagataggc

SEQ ID NO: 2567579 - DNA, 25 bp, Homo sapien
cttgcatcgcataacactgggtttg

SEQ ID NO: 2567580 - DNA, 25 bp, Homo sapien
gataccacttacgacgatctggcta

SEQ ID NO: 2567581 - DNA, 25 bp, Homo sapien
caagataggcaccagtcaggaaaca

SEQ ID NO: 2567582 - DNA, 25 bp, Homo sapien
aaatggaattaatgactgccacagc

SEQ ID NO: 2567583 - DNA, 25 bp, Homo sapien
gaccagaacatgtcatatgctcttg

SEQ ID NO: 2567584 - DNA, 25 bp, Homo sapien
aagggaaggagaacgctccagtgca

SEQ ID NO: 2567585 - DNA, 25 bp, Homo sapien
cagatcacagggagggatagattcc

SEQ ID NO: 2567586 - DNA, 25 bp, Homo sapien
ccttagttgactgggaccggaagtg

SEQ ID NO: 2567587 - DNA, 25 bp, Homo sapien
ctcgttacagcatggtcggcggata

SEQ ID NO: 2567588 - DNA, 25 bp, Homo sapien
tagtcttctgagtacgtgcacgcca

SEQ ID NO: 2567589 - DNA, 25 bp, Homo sapien
tccgtggtcacgtgcaaattcccga

SEQ ID NO: 2567590 - DNA, 25 bp, Homo sapien
gcctggtactgtgacactcggtgat

SEQ ID NO: 2567591 - DNA, 25 bp, Homo sapien
tgtgacactcggtgatattagacat

SEQ ID NO: 2567592 - DNA, 25 bp, Homo sapien
ggtactgtgacactcggtgatatta

SEQ ID NO: 2567593 - DNA, 25 bp, Homo sapien
tactgtgacactcggtgatattaga

SEQ ID NO: 2567594 - DNA, 25 bp, Homo sapien
gactcgtacaaagcagtaaagaacc

SEQ ID NO: 2567595 - DNA, 25 bp, Homo sapien
tagagccctttacgcgccgtgttac

SEQ ID NO: 2567596 - DNA, 25 bp, Homo sapien
acacacgcgggcaagtcagtcactt

SEQ ID NO: 2567597 - DNA, 25 bp, Homo sapien
tgtgaaggcggttcagacacacgcg

SEQ ID NO: 2567598 - DNA, 25 bp, Homo sapien
caaaagttgcctccctgtgaaggcg

SEQ ID NO: 2567599 - DNA, 25 bp, Homo sapien
agagacgaggcacggaccgacaaag

SEQ ID NO: 2567600 - DNA, 25 bp, Homo sapien
gacaaagcccacgaacaccgatgag

SEQ ID NO: 2567601 - DNA, 25 bp, Homo sapien
gaacaccgatgagcgagctgccggc

SEQ ID NO: 2567602 - DNA, 25 bp, Homo sapien
tgacttcaagctcggaactaacgcg

SEQ ID NO: 2567603 - DNA, 25 bp, Homo sapien
tgtaagtgtctccaagtcccgcaat

SEQ ID NO: 2567604 - DNA, 25 bp, Homo sapien
tcaaaaaattggcttcaggcggatt

SEQ ID NO: 2567605 - DNA, 25 bp, Homo sapien
caaggaagtgttaaatgttgagtca

SEQ ID NO: 2567606 - DNA, 25 bp, Homo sapien
tctctcgcgtataaaatcaaggaag

SEQ ID NO: 2567607 - DNA, 25 bp, Homo sapien
aggagctgaggccaacatctgagtc

SEQ ID NO: 2567608 - DNA, 25 bp, Homo sapien
tgaggccaacatctgagtctcctca

SEQ ID NO: 2567609 - DNA, 25 bp, Homo sapien
aggccaacatctgagtctcctcagc

SEQ ID NO: 2567610 - DNA, 25 bp, Homo sapien
taggagctgaggccaacatctgagt

SEQ ID NO: 2567611 - DNA, 25 bp, Homo sapien
agaagttttcatgggccgatctgct

SEQ ID NO: 2567612 - DNA, 25 bp, Homo sapien
ctgacagatcccttcctttgtctca

SEQ ID NO: 2567613 - DNA, 25 bp, Homo sapien
tcaatacagaagttttcatgggccg

SEQ ID NO: 2567614 - DNA, 25 bp, Homo sapien
gctgccaagcccaagataacaagtg

SEQ ID NO: 2567615 - DNA, 25 bp, Homo sapien
gcttttcagattgcaggatctccac

SEQ ID NO: 2567616 - DNA, 25 bp, Homo sapien
tttcagattgcaggatctccactac

SEQ ID NO: 2567617 - DNA, 25 bp, Homo sapien
ttttcagattgcaggatctccacta

SEQ ID NO: 2567618 - DNA, 25 bp, Homo sapien
cttttcagattgcaggatctccact

SEQ ID NO: 2567619 - DNA, 25 bp, Homo sapien
tgataagctagaattccaactttga

SEQ ID NO: 2567620 - DNA, 25 bp, Homo sapien
gaagaacacttggtgatggcggctc

SEQ ID NO: 2567621 - DNA, 25 bp, Homo sapien
tctgtctgttaagctgttgttggtt

SEQ ID NO: 2567622 - DNA, 25 bp, Homo sapien
taaatttggcaccagcatagttctg

SEQ ID NO: 2567623 - DNA, 25 bp, Homo sapien
caatctactggtccatgaatgataa

SEQ ID NO: 2567624 - DNA, 25 bp, Homo sapien
tagctagaagcttataatccgattc

SEQ ID NO: 2567625 - DNA, 25 bp, Homo sapien
gcagtgcatcaggttagcatattac

SEQ ID NO: 2567626 - DNA, 25 bp, Homo sapien
tctgaatccttgtgttagctagaag

SEQ ID NO: 2567627 - DNA, 25 bp, Homo sapien
cagtccacggtcttacattcagcaa

SEQ ID NO: 2567628 - DNA, 25 bp, Homo sapien
tacactggcactttagcacaagggc

SEQ ID NO: 2567629 - DNA, 25 bp, Homo sapien
taagtggtccattgggttgcaccta

SEQ ID NO: 2567630 - DNA, 25 bp, Homo sapien
tggcaccatactcgaaactacctgt

SEQ ID NO: 2567631 - DNA, 25 bp, Homo sapien
tataactgccatcgaaaagaagaca

SEQ ID NO: 2567632 - DNA, 25 bp, Homo sapien
ggttctcgcaattgcatcgacttgg

SEQ ID NO: 2567633 - DNA, 25 bp, Homo sapien
tacctaaggttcacagtatggctga

SEQ ID NO: 2567634 - DNA, 25 bp, Homo sapien
gacttcagcagccttacatggtaag

SEQ ID NO: 2567635 - DNA, 25 bp, Homo sapien
gaattaaggtgcatattgagttggg

SEQ ID NO: 2567636 - DNA, 25 bp, Homo sapien
cactcctgggaaatgggtattattc

SEQ ID NO: 2567637 - DNA, 25 bp, Homo sapien
ttactgtgccgaaccatgtgctttt

SEQ ID NO: 2567638 - DNA, 25 bp, Homo sapien
caacagttggtagttctctaaaata

SEQ ID NO: 2567639 - DNA, 25 bp, Homo sapien
gaaagacctgggaactattgtatta

SEQ ID NO: 2567640 - DNA, 25 bp, Homo sapien
cagttcaagcgaccaaagggtgggt

SEQ ID NO: 2567641 - DNA, 25 bp, Homo sapien
ccaaactgcagctggaatacccagt

SEQ ID NO: 2567642 - DNA, 25 bp, Homo sapien
cagtaagctgctacatccagttcaa

SEQ ID NO: 2567643 - DNA, 25 bp, Homo sapien
aaaaaccggatgtctaggccaatga

SEQ ID NO: 2567644 - DNA, 25 bp, Homo sapien
cattctaggtgattctgtggtgcca

SEQ ID NO: 2567645 - DNA, 25 bp, Homo sapien
aaatttgagcaggtcgttgatggca

SEQ ID NO: 2567646 - DNA, 25 bp, Homo sapien
tgatgcttacagcacttggctcgtg

SEQ ID NO: 2567647 - DNA, 25 bp, Homo sapien
accacggcgtagcagaagccattcc

SEQ ID NO: 2567648 - DNA, 25 bp, Homo sapien
gcagaagccattccgacaatgatag

SEQ ID NO: 2567649 - DNA, 25 bp, Homo sapien
cacggcgtagcagaagccattccga

SEQ ID NO: 2567650 - DNA, 25 bp, Homo sapien
cgtagcagaagccattccgacaatg

SEQ ID NO: 2567651 - DNA, 25 bp, Homo sapien
aaaggaggagatcaagaagtcggtc

SEQ ID NO: 2567652 - DNA, 25 bp, Homo sapien
gaagtcggtcttttgattacaacta

SEQ ID NO: 2567653 - DNA, 25 bp, Homo sapien
cagatacagacgttctagaagccga

SEQ ID NO: 2567654 - DNA, 25 bp, Homo sapien
tagaagccgaagttatgaaaggagg

SEQ ID NO: 2567655 - DNA, 25 bp, Homo sapien
aatacagtttgcccagggggatcga

SEQ ID NO: 2567656 - DNA, 25 bp, Homo sapien
tgaaatacagtttgcccagggggat

SEQ ID NO: 2567657 - DNA, 25 bp, Homo sapien
gaaatacagtttgcccagggggatc

SEQ ID NO: 2567658 - DNA, 25 bp, Homo sapien
acagtttgcccagggggatcgaaag

SEQ ID NO: 2567659 - DNA, 25 bp, Homo sapien
cagtgatcaaggacagttgtgagaa

SEQ ID NO: 2567660 - DNA, 25 bp, Homo sapien
gtgatcaaggacagttgtgagaatt

SEQ ID NO: 2567661 - DNA, 25 bp, Homo sapien
atcaaggacagttgtgagaattggt

SEQ ID NO: 2567662 - DNA, 25 bp, Homo sapien
gatcaaggacagttgtgagaattgg

SEQ ID NO: 2567663 - DNA, 25 bp, Homo sapien
gaaacagctctggtggtcttgtagg

SEQ ID NO: 2567664 - DNA, 25 bp, Homo sapien
tatgaagttaaagtgtaacaggatg

SEQ ID NO: 2567665 - DNA, 25 bp, Homo sapien
tcaaaattattctggtttggtctag

SEQ ID NO: 2567666 - DNA, 25 bp, Homo sapien
gtaaatgcactctctcttatgaagt

SEQ ID NO: 2567667 - DNA, 25 bp, Homo sapien
tcaacgaaggttgaattactcctcc

SEQ ID NO: 2567668 - DNA, 25 bp, Homo sapien
cttcatcagtgtgtcacccggccaa

SEQ ID NO: 2567669 - DNA, 25 bp, Homo sapien
cccgagggcactaactcagagtgtc

SEQ ID NO: 2567670 - DNA, 25 bp, Homo sapien
taggttgaccatacctcaaaggctg

SEQ ID NO: 2567671 - DNA, 25 bp, Homo sapien
cccgagggcactaactcagagtgtc

SEQ ID NO: 2567672 - DNA, 25 bp, Homo sapien
cattgcagtagatgtttaggtttcc

SEQ ID NO: 2567673 - DNA, 25 bp, Homo sapien
cttcatcagtgtgtcacccggccaa

SEQ ID NO: 2567674 - DNA, 25 bp, Homo sapien
taggttgaccatacctcaaaggctg

SEQ ID NO: 2567675 - DNA, 25 bp, Homo sapien
ttcaacgaaggttgaattactcctc

SEQ ID NO: 2567676 - DNA, 25 bp, Homo sapien
aatttcatgttttcaacgaaggttg

SEQ ID NO: 2567677 - DNA, 25 bp, Homo sapien
catgttttcaacgaaggttgaatta

SEQ ID NO: 2567678 - DNA, 25 bp, Homo sapien
caacgaaggttgaattactcctcct

SEQ ID NO: 2567679 - DNA, 25 bp, Homo sapien
tttatgcattggaggaaaaacatgt

SEQ ID NO: 2567680 - DNA, 25 bp, Homo sapien
tatgcattggaggaaaaacatgttg

SEQ ID NO: 2567681 - DNA, 25 bp, Homo sapien
atgcattggaggaaaaacatgttgg

SEQ ID NO: 2567682 - DNA, 25 bp, Homo sapien
cttttatgcattggaggaaaaacat

SEQ ID NO: 2567683 - DNA, 25 bp, Homo sapien
aggaagccggccagttgagttacaa

SEQ ID NO: 2567684 - DNA, 25 bp, Homo sapien
ctggggagaagaaaggcaaacacat

SEQ ID NO: 2567685 - DNA, 25 bp, Homo sapien
gccagttgagttacaaaacatctct

SEQ ID NO: 2567686 - DNA, 25 bp, Homo sapien
aacatctctctttgaggtttctgaa

SEQ ID NO: 2567687 - DNA, 25 bp, Homo sapien
taataaatagtgttcactgtgtgcc

SEQ ID NO: 2567688 - DNA, 25 bp, Homo sapien
ctaataaatagtgttcactgtgtgc

SEQ ID NO: 2567689 - DNA, 25 bp, Homo sapien
tgaactgtcgctcattcctcagcat

SEQ ID NO: 2567690 - DNA, 25 bp, Homo sapien
ggacttgtccggctcatccggagta

SEQ ID NO: 2567691 - DNA, 25 bp, Homo sapien
ctcattcaatgagcgggaggcatct

SEQ ID NO: 2567692 - DNA, 25 bp, Homo sapien
aaggtgctgtgccagtctacacccc

SEQ ID NO: 2567693 - DNA, 25 bp, Homo sapien
cttgtccggctcatccggagtaagg

SEQ ID NO: 2567694 - DNA, 25 bp, Homo sapien
gggcagacgatttctgcactttctc

SEQ ID NO: 2567695 - DNA, 25 bp, Homo sapien
atcttcatcgtcatcgttgtcattt

SEQ ID NO: 2567696 - DNA, 25 bp, Homo sapien
gatttctgcactttctcagccaact

SEQ ID NO: 2567697 - DNA, 25 bp, Homo sapien
gccaactcaacttgaacatcttcat

SEQ ID NO: 2567698 - DNA, 25 bp, Homo sapien
tggctggttggagtcataagggcca

SEQ ID NO: 2567699 - DNA, 25 bp, Homo sapien
ttcctcttcctcatcatcactttca

SEQ ID NO: 2567700 - DNA, 25 bp, Homo sapien
ctgggagacactggccctttttctt

SEQ ID NO: 2567701 - DNA, 25 bp, Homo sapien
ctcttcctcatcatcactttcattt

SEQ ID NO: 2567702 - DNA, 25 bp, Homo sapien
tcttcctcatcatcactttcatttt

SEQ ID NO: 2567703 - DNA, 25 bp, Homo sapien
ctgctgtaagactggtacgaggcca

SEQ ID NO: 2567704 - DNA, 25 bp, Homo sapien
tggtacgaggccaacatttcaggag

SEQ ID NO: 2567705 - DNA, 25 bp, Homo sapien
tatgtcaacagccatgcagacttgc

SEQ ID NO: 2567706 - DNA, 25 bp, Homo sapien
agactggtacgaggccaacatttca

SEQ ID NO: 2567707 - DNA, 25 bp, Homo sapien
ggagctttatcaccttcacagtgta

SEQ ID NO: 2567708 - DNA, 25 bp, Homo sapien
gctttatcaccttcacagtgtagta

SEQ ID NO: 2567709 - DNA, 25 bp, Homo sapien
ctggagctttatcaccttcacagtg

SEQ ID NO: 2567710 - DNA, 25 bp, Homo sapien
tatcaccttcacagtgtagtactca

SEQ ID NO: 2567711 - DNA, 25 bp, Homo sapien
gaaatctacattgatatataggttc

SEQ ID NO: 2567712 - DNA, 25 bp, Homo sapien
gttcaatgtcgtgacaatcagtcca

SEQ ID NO: 2567713 - DNA, 25 bp, Homo sapien
cttgagttcaatgtcgtgacaatca

SEQ ID NO: 2567714 - DNA, 25 bp, Homo sapien
gtgacaatcagtccaggttggcacg

SEQ ID NO: 2567715 - DNA, 25 bp, Homo sapien
tgtcgtgacaatcagtccaggttgg

SEQ ID NO: 2567716 - DNA, 25 bp, Homo sapien
acctgttgcctcttggtcctccttt

SEQ ID NO: 2567717 - DNA, 25 bp, Homo sapien
ctgggacctgttgcctcttggtcct

SEQ ID NO: 2567718 - DNA, 25 bp, Homo sapien
tttttcacttgatcccaccgatgtc

SEQ ID NO: 2567719 - DNA, 25 bp, Homo sapien
gttgcctcttggtcctcctttttca

SEQ ID NO: 2567720 - DNA, 25 bp, Homo sapien
aataacatctatccagtgagtcctg

SEQ ID NO: 2567721 - DNA, 25 bp, Homo sapien
taacatctatccagtgagtcctgca

SEQ ID NO: 2567722 - DNA, 25 bp, Homo sapien
ataacatctatccagtgagtcctgc

SEQ ID NO: 2567723 - DNA, 25 bp, Homo sapien
tgatgggtcttggtcttcttccact

SEQ ID NO: 2567724 - DNA, 25 bp, Homo sapien
catgatgggtcttggtcttcttcca

SEQ ID NO: 2567725 - DNA, 25 bp, Homo sapien
gggcatgatgggtcttggtcttctt

SEQ ID NO: 2567726 - DNA, 25 bp, Homo sapien
gcatgatgggtcttggtcttcttcc

SEQ ID NO: 2567727 - DNA, 25 bp, Homo sapien
aataacatctatccagtgagtcctg

SEQ ID NO: 2567728 - DNA, 25 bp, Homo sapien
taacatctatccagtgagtcctgca

SEQ ID NO: 2567729 - DNA, 25 bp, Homo sapien
ataacatctatccagtgagtcctgc

SEQ ID NO: 2567730 - DNA, 25 bp, Homo sapien
cctcagcatgagaacaggacaatgt

SEQ ID NO: 2567731 - DNA, 25 bp, Homo sapien
tcctcagcatgagaacaggacaatg

SEQ ID NO: 2567732 - DNA, 25 bp, Homo sapien
gctcctcagcatgagaacaggacaa

SEQ ID NO: 2567733 - DNA, 25 bp, Homo sapien
tcagcatgagaacaggacaatgtga

SEQ ID NO: 2567734 - DNA, 25 bp, Homo sapien
ctggggcatggtgggccttggtctt

SEQ ID NO: 2567735 - DNA, 25 bp, Homo sapien
tggggcatggtgggccttggtcttc

SEQ ID NO: 2567736 - DNA, 25 bp, Homo sapien
gcatggtgggccttggtcttcttcc

SEQ ID NO: 2567737 - DNA, 25 bp, Homo sapien
gggcatggtgggccttggtcttctt

SEQ ID NO: 2567738 - DNA, 25 bp, Homo sapien
gtagctgttcacaattgctcagtta

SEQ ID NO: 2567739 - DNA, 25 bp, Homo sapien
tagctgttcacaattgctcagttac

SEQ ID NO: 2567740 - DNA, 25 bp, Homo sapien
aagtagctgttcacaattgctcagt

SEQ ID NO: 2567741 - DNA, 25 bp, Homo sapien
agtagctgttcacaattgctcagtt

SEQ ID NO: 2567742 - DNA, 25 bp, Homo sapien
ggacagaacagggccaaatggaaaa

SEQ ID NO: 2567743 - DNA, 25 bp, Homo sapien
acagaacagggccaaatggaaaaga

SEQ ID NO: 2567744 - DNA, 25 bp, Homo sapien
cagaacagggccaaatggaaaagaa

SEQ ID NO: 2567745 - DNA, 25 bp, Homo sapien
gaacagggccaaatggaaaagaatg

SEQ ID NO: 2567746 - DNA, 25 bp, Homo sapien
ataacatctatccagtgagtcctgc

SEQ ID NO: 2567747 - DNA, 25 bp, Homo sapien
aataacatctatccagtgagtcctg

SEQ ID NO: 2567748 - DNA, 25 bp, Homo sapien
taacatctatccagtgagtcctgca

SEQ ID NO: 2567749 - DNA, 25 bp, Homo sapien
ctggggcatggtgggttttgatctt

SEQ ID NO: 2567750 - DNA, 25 bp, Homo sapien
tccttctttgatcttcttccccttc

SEQ ID NO: 2567751 - DNA, 25 bp, Homo sapien
tcttctttccttctttgatcttctt

SEQ ID NO: 2567752 - DNA, 25 bp, Homo sapien
gggcatggtgggttttgatcttctt

SEQ ID NO: 2567753 - DNA, 25 bp, Homo sapien
taacttctatccagtgagtcctgca

SEQ ID NO: 2567754 - DNA, 25 bp, Homo sapien
ctgaaggagttgaataacttctatc

SEQ ID NO: 2567755 - DNA, 25 bp, Homo sapien
gagtcctgcaagacttcaggccctt

SEQ ID NO: 2567756 - DNA, 25 bp, Homo sapien
gaataacttctatccagtgagtcct

SEQ ID NO: 2567757 - DNA, 25 bp, Homo sapien
gctccaatacgtaaaaggcacttct

SEQ ID NO: 2567758 - DNA, 25 bp, Homo sapien
catgagtcagtcagttcaagacaac

SEQ ID NO: 2567759 - DNA, 25 bp, Homo sapien
aacagccaagccaacacgctgttgc

SEQ ID NO: 2567760 - DNA, 25 bp, Homo sapien
aacacgctgttgctccaatacgtaa

SEQ ID NO: 2567761 - DNA, 25 bp, Homo sapien
catgatgggtcttggtcttcttcca

SEQ ID NO: 2567762 - DNA, 25 bp, Homo sapien
tgatgggtcttggtcttcttccact

SEQ ID NO: 2567763 - DNA, 25 bp, Homo sapien
gggcatgatgggtcttggtcttctt

SEQ ID NO: 2567764 - DNA, 25 bp, Homo sapien
gcatgatgggtcttggtcttcttcc

SEQ ID NO: 2567765 - DNA, 25 bp, Homo sapien
taacatctatccagtgagtcctgca

SEQ ID NO: 2567766 - DNA, 25 bp, Homo sapien
ataacatctatccagtgagtcctgc

SEQ ID NO: 2567767 - DNA, 25 bp, Homo sapien
aataacatctatccagtgagtcctg

SEQ ID NO: 2567768 - DNA, 25 bp, Homo sapien
cctcagcatgagaacaggacaatgt

SEQ ID NO: 2567769 - DNA, 25 bp, Homo sapien
tcctcagcatgagaacaggacaatg

SEQ ID NO: 2567770 - DNA, 25 bp, Homo sapien
tcagcatgagaacaggacaatgtga

SEQ ID NO: 2567771 - DNA, 25 bp, Homo sapien
gctcctcagcatgagaacaggacaa

SEQ ID NO: 2567772 - DNA, 25 bp, Homo sapien
ctggggcatggtgggccttggtctt

SEQ ID NO: 2567773 - DNA, 25 bp, Homo sapien
tggggcatggtgggccttggtcttc

SEQ ID NO: 2567774 - DNA, 25 bp, Homo sapien
gcatggtgggccttggtcttcttcc

SEQ ID NO: 2567775 - DNA, 25 bp, Homo sapien
gggcatggtgggccttggtcttctt

SEQ ID NO: 2567776 - DNA, 25 bp, Homo sapien
aagtagctgttcacaattgctcagt

SEQ ID NO: 2567777 - DNA, 25 bp, Homo sapien
tagctgttcacaattgctcagttac

SEQ ID NO: 2567778 - DNA, 25 bp, Homo sapien
gtagctgttcacaattgctcagtta

SEQ ID NO: 2567779 - DNA, 25 bp, Homo sapien
agtagctgttcacaattgctcagtt

SEQ ID NO: 2567780 - DNA, 25 bp, Homo sapien
ggacagaacagggccaaatggaaaa

SEQ ID NO: 2567781 - DNA, 25 bp, Homo sapien
acagaacagggccaaatggaaaaga

SEQ ID NO: 2567782 - DNA, 25 bp, Homo sapien
cagaacagggccaaatggaaaagaa

SEQ ID NO: 2567783 - DNA, 25 bp, Homo sapien
gaacagggccaaatggaaaagaatg

SEQ ID NO: 2567784 - DNA, 25 bp, Homo sapien
taacatctatccagtgagtcctgca

SEQ ID NO: 2567785 - DNA, 25 bp, Homo sapien
ataacatctatccagtgagtcctgc

SEQ ID NO: 2567786 - DNA, 25 bp, Homo sapien
aataacatctatccagtgagtcctg

SEQ ID NO: 2567787 - DNA, 25 bp, Homo sapien
taacatctatccagtgagtcctgca

SEQ ID NO: 2567788 - DNA, 25 bp, Homo sapien
aataacatctatccagtgagtcctg

SEQ ID NO: 2567789 - DNA, 25 bp, Homo sapien
ataacatctatccagtgagtcctgc

SEQ ID NO: 2567790 - DNA, 25 bp, Homo sapien
gctccaatacgtaaaaggcacttct

SEQ ID NO: 2567791 - DNA, 25 bp, Homo sapien
aacagccaagccaacacgctgttgc

SEQ ID NO: 2567792 - DNA, 25 bp, Homo sapien
catgagtcagtcagttcaagacaac

SEQ ID NO: 2567793 - DNA, 25 bp, Homo sapien
aacacgctgttgctccaatacgtaa

SEQ ID NO: 2567794 - DNA, 25 bp, Homo sapien
ccctaaccagaagactcagtggatc

SEQ ID NO: 2567795 - DNA, 25 bp, Homo sapien
agtaggaatatgaccctaaccagaa

SEQ ID NO: 2567796 - DNA, 25 bp, Homo sapien
ctaaccagaagactcagtggatcct

SEQ ID NO: 2567797 - DNA, 25 bp, Homo sapien
gtaggaatatgaccctaaccagaag

SEQ ID NO: 2567798 - DNA, 25 bp, Homo sapien
tccttctttgatcttcttccccttc

SEQ ID NO: 2567799 - DNA, 25 bp, Homo sapien
tcttctttccttctttgatcttctt

SEQ ID NO: 2567800 - DNA, 25 bp, Homo sapien
ctggggcatggtgggttttgatctt

SEQ ID NO: 2567801 - DNA, 25 bp, Homo sapien
gggcatggtgggttttgatcttctt

SEQ ID NO: 2567802 - DNA, 25 bp, Homo sapien
gaataacttctatccagtgagtcct

SEQ ID NO: 2567803 - DNA, 25 bp, Homo sapien
taacttctatccagtgagtcctgca

SEQ ID NO: 2567804 - DNA, 25 bp, Homo sapien
ctgaaggagttgaataacttctatc

SEQ ID NO: 2567805 - DNA, 25 bp, Homo sapien
gagtcctgcaagacttcaggccctt

SEQ ID NO: 2567806 - DNA, 25 bp, Homo sapien
aacagccaagccaacacgctgttgc

SEQ ID NO: 2567807 - DNA, 25 bp, Homo sapien
catgagtcagtcagttcaagacaac

SEQ ID NO: 2567808 - DNA, 25 bp, Homo sapien
gctccaatacgtaaaaggcacttct

SEQ ID NO: 2567809 - DNA, 25 bp, Homo sapien
aacacgctgttgctccaatacgtaa

SEQ ID NO: 2567810 - DNA, 25 bp, Homo sapien
gggcatgatgggtcttggtcttctt

SEQ ID NO: 2567811 - DNA, 25 bp, Homo sapien
tgatgggtcttggtcttcttccact

SEQ ID NO: 2567812 - DNA, 25 bp, Homo sapien
catgatgggtcttggtcttcttcca

SEQ ID NO: 2567813 - DNA, 25 bp, Homo sapien
gcatgatgggtcttggtcttcttcc

SEQ ID NO: 2567814 - DNA, 25 bp, Homo sapien
aataacatctatccagtgagtcctg

SEQ ID NO: 2567815 - DNA, 25 bp, Homo sapien
ataacatctatccagtgagtcctgc

SEQ ID NO: 2567816 - DNA, 25 bp, Homo sapien
taacatctatccagtgagtcctgca

SEQ ID NO: 2567817 - DNA, 25 bp, Homo sapien
cctcagcatgagaacaggacaatgt

SEQ ID NO: 2567818 - DNA, 25 bp, Homo sapien
tcctcagcatgagaacaggacaatg

SEQ ID NO: 2567819 - DNA, 25 bp, Homo sapien
tcagcatgagaacaggacaatgtga

SEQ ID NO: 2567820 - DNA, 25 bp, Homo sapien
gctcctcagcatgagaacaggacaa

SEQ ID NO: 2567821 - DNA, 25 bp, Homo sapien
ctggggcatggtgggccttggtctt

SEQ ID NO: 2567822 - DNA, 25 bp, Homo sapien
gcatggtgggccttggtcttcttcc

SEQ ID NO: 2567823 - DNA, 25 bp, Homo sapien
gggcatggtgggccttggtcttctt

SEQ ID NO: 2567824 - DNA, 25 bp, Homo sapien
tggggcatggtgggccttggtcttc

SEQ ID NO: 2567825 - DNA, 25 bp, Homo sapien
tagctgttcacaattgctcagttac

SEQ ID NO: 2567826 - DNA, 25 bp, Homo sapien
agtagctgttcacaattgctcagtt

SEQ ID NO: 2567827 - DNA, 25 bp, Homo sapien
gtagctgttcacaattgctcagtta

SEQ ID NO: 2567828 - DNA, 25 bp, Homo sapien
aagtagctgttcacaattgctcagt

SEQ ID NO: 2567829 - DNA, 25 bp, Homo sapien
cagaacagggccaaatggaaaagaa

SEQ ID NO: 2567830 - DNA, 25 bp, Homo sapien
ggacagaacagggccaaatggaaaa

SEQ ID NO: 2567831 - DNA, 25 bp, Homo sapien
gaacagggccaaatggaaaagaatg

SEQ ID NO: 2567832 - DNA, 25 bp, Homo sapien
acagaacagggccaaatggaaaaga

SEQ ID NO: 2567833 - DNA, 25 bp, Homo sapien
taacatctatccagtgagtcctgca

SEQ ID NO: 2567834 - DNA, 25 bp, Homo sapien
aataacatctatccagtgagtcctg

SEQ ID NO: 2567835 - DNA, 25 bp, Homo sapien
ataacatctatccagtgagtcctgc

SEQ ID NO: 2567836 - DNA, 25 bp, Homo sapien
gtccctattctagtagatcgttatc

SEQ ID NO: 2567837 - DNA, 25 bp, Homo sapien
aaaatgtccctattctagtagatcg

SEQ ID NO: 2567838 - DNA, 25 bp, Homo sapien
gattgttcatggttgtgaggacttt

SEQ ID NO: 2567839 - DNA, 25 bp, Homo sapien
ctcatcaaatactcagattgttcat

SEQ ID NO: 2567840 - DNA, 25 bp, Homo sapien
ctggggcatggtgggttttgatctt

SEQ ID NO: 2567841 - DNA, 25 bp, Homo sapien
tccttctttgatcttcttccccttc

SEQ ID NO: 2567842 - DNA, 25 bp, Homo sapien
tcttctttccttctttgatcttctt

SEQ ID NO: 2567843 - DNA, 25 bp, Homo sapien
gggcatggtgggttttgatcttctt

SEQ ID NO: 2567844 - DNA, 25 bp, Homo sapien
taacatctatccagtgagtcctgca

SEQ ID NO: 2567845 - DNA, 25 bp, Homo sapien
aataacatctatccagtgagtcctg

SEQ ID NO: 2567846 - DNA, 25 bp, Homo sapien
ataacatctatccagtgagtcctgc

SEQ ID NO: 2567847 - DNA, 25 bp, Homo sapien
catgagtcagtcagttcaagacaac

SEQ ID NO: 2567848 - DNA, 25 bp, Homo sapien
aacagccaagccaacacgctgttgc

SEQ ID NO: 2567849 - DNA, 25 bp, Homo sapien
gctccaatacgtaaaaggcacttct

SEQ ID NO: 2567850 - DNA, 25 bp, Homo sapien
aacacgctgttgctccaatacgtaa

SEQ ID NO: 2567851 - DNA, 25 bp, Homo sapien
gggcatgatgggtcttggtcttctt

SEQ ID NO: 2567852 - DNA, 25 bp, Homo sapien
tgatgggtcttggtcttcttccact

SEQ ID NO: 2567853 - DNA, 25 bp, Homo sapien
gcatgatgggtcttggtcttcttcc

SEQ ID NO: 2567854 - DNA, 25 bp, Homo sapien
catgatgggtcttggtcttcttcca

SEQ ID NO: 2567855 - DNA, 25 bp, Homo sapien
aataacatctatccagtgagtcctg

SEQ ID NO: 2567856 - DNA, 25 bp, Homo sapien
ataacatctatccagtgagtcctgc

SEQ ID NO: 2567857 - DNA, 25 bp, Homo sapien
taacatctatccagtgagtcctgca

SEQ ID NO: 2567858 - DNA, 25 bp, Homo sapien
cctcagcatgagaacaggacaatgt

SEQ ID NO: 2567859 - DNA, 25 bp, Homo sapien
gctcctcagcatgagaacaggacaa

SEQ ID NO: 2567860 - DNA, 25 bp, Homo sapien
tcagcatgagaacaggacaatgtga

SEQ ID NO: 2567861 - DNA, 25 bp, Homo sapien
tcctcagcatgagaacaggacaatg

SEQ ID NO: 2567862 - DNA, 25 bp, Homo sapien
tggggcatggtgggccttggtcttc

SEQ ID NO: 2567863 - DNA, 25 bp, Homo sapien
ctggggcatggtgggccttggtctt

SEQ ID NO: 2567864 - DNA, 25 bp, Homo sapien
gcatggtgggccttggtcttcttcc

SEQ ID NO: 2567865 - DNA, 25 bp, Homo sapien
gggcatggtgggccttggtcttctt

SEQ ID NO: 2567866 - DNA, 25 bp, Homo sapien
tagctgttcacaattgctcagttac

SEQ ID NO: 2567867 - DNA, 25 bp, Homo sapien
agtagctgttcacaattgctcagtt

SEQ ID NO: 2567868 - DNA, 25 bp, Homo sapien
aagtagctgttcacaattgctcagt

SEQ ID NO: 2567869 - DNA, 25 bp, Homo sapien
gtagctgttcacaattgctcagtta

SEQ ID NO: 2567870 - DNA, 25 bp, Homo sapien
ggacagaacagggccaaatggaaaa

SEQ ID NO: 2567871 - DNA, 25 bp, Homo sapien
cagaacagggccaaatggaaaagaa

SEQ ID NO: 2567872 - DNA, 25 bp, Homo sapien
acagaacagggccaaatggaaaaga

SEQ ID NO: 2567873 - DNA, 25 bp, Homo sapien
gaacagggccaaatggaaaagaatg

SEQ ID NO: 2567874 - DNA, 25 bp, Homo sapien
taacatctatccagtgagtcctgca

SEQ ID NO: 2567875 - DNA, 25 bp, Homo sapien
ataacatctatccagtgagtcctgc

SEQ ID NO: 2567876 - DNA, 25 bp, Homo sapien
aataacatctatccagtgagtcctg

SEQ ID NO: 2567877 - DNA, 25 bp, Homo sapien
ctggggcatggtgggttttgatctt

SEQ ID NO: 2567878 - DNA, 25 bp, Homo sapien
gggcatggtgggttttgatcttctt

SEQ ID NO: 2567879 - DNA, 25 bp, Homo sapien
tccttctttgatcttcttccccttc

SEQ ID NO: 2567880 - DNA, 25 bp, Homo sapien
tcttctttccttctttgatcttctt

SEQ ID NO: 2567881 - DNA, 25 bp, Homo sapien
aataacatctatccagtgagtcctg

SEQ ID NO: 2567882 - DNA, 25 bp, Homo sapien
taacatctatccagtgagtcctgca

SEQ ID NO: 2567883 - DNA, 25 bp, Homo sapien
ataacatctatccagtgagtcctgc

SEQ ID NO: 2567884 - DNA, 25 bp, Homo sapien
catgagtcagtcagttcaagacaac

SEQ ID NO: 2567885 - DNA, 25 bp, Homo sapien
gctccaatacgtaaaaggcacttct

SEQ ID NO: 2567886 - DNA, 25 bp, Homo sapien
aacagccaagccaacacgctgttgc

SEQ ID NO: 2567887 - DNA, 25 bp, Homo sapien
aacacgctgttgctccaatacgtaa

SEQ ID NO: 2567888 - DNA, 25 bp, Homo sapien
catgatgggtcttggtcttcttcca

SEQ ID NO: 2567889 - DNA, 25 bp, Homo sapien
tgatgggtcttggtcttcttccact

SEQ ID NO: 2567890 - DNA, 25 bp, Homo sapien
gcatgatgggtcttggtcttcttcc

SEQ ID NO: 2567891 - DNA, 25 bp, Homo sapien
gggcatgatgggtcttggtcttctt

SEQ ID NO: 2567892 - DNA, 25 bp, Homo sapien
ataacatctatccagtgagtcctgc

SEQ ID NO: 2567893 - DNA, 25 bp, Homo sapien
taacatctatccagtgagtcctgca

SEQ ID NO: 2567894 - DNA, 25 bp, Homo sapien
aataacatctatccagtgagtcctg

SEQ ID NO: 2567895 - DNA, 25 bp, Homo sapien
tcagcatgagaacaggacaatgtga

SEQ ID NO: 2567896 - DNA, 25 bp, Homo sapien
gctcctcagcatgagaacaggacaa

SEQ ID NO: 2567897 - DNA, 25 bp, Homo sapien
tcctcagcatgagaacaggacaatg

SEQ ID NO: 2567898 - DNA, 25 bp, Homo sapien
cctcagcatgagaacaggacaatgt

SEQ ID NO: 2567899 - DNA, 25 bp, Homo sapien
gggcatggtgggccttggtcttctt

SEQ ID NO: 2567900 - DNA, 25 bp, Homo sapien
gcatggtgggccttggtcttcttcc

SEQ ID NO: 2567901 - DNA, 25 bp, Homo sapien
tggggcatggtgggccttggtcttc

SEQ ID NO: 2567902 - DNA, 25 bp, Homo sapien
ctggggcatggtgggccttggtctt

SEQ ID NO: 2567903 - DNA, 25 bp, Homo sapien
tagctgttcacaattgctcagttac

SEQ ID NO: 2567904 - DNA, 25 bp, Homo sapien
gtagctgttcacaattgctcagtta

SEQ ID NO: 2567905 - DNA, 25 bp, Homo sapien
aagtagctgttcacaattgctcagt

SEQ ID NO: 2567906 - DNA, 25 bp, Homo sapien
agtagctgttcacaattgctcagtt

SEQ ID NO: 2567907 - DNA, 25 bp, Homo sapien
aataacatctatccagtgagtcctg

SEQ ID NO: 2567908 - DNA, 25 bp, Homo sapien
taacatctatccagtgagtcctgca

SEQ ID NO: 2567909 - DNA, 25 bp, Homo sapien
ataacatctatccagtgagtcctgc

SEQ ID NO: 2567910 - DNA, 25 bp, Homo sapien
ctggggcatggtgggttttgatctt

SEQ ID NO: 2567911 - DNA, 25 bp, Homo sapien
tcttctttccttctttgatcttctt

SEQ ID NO: 2567912 - DNA, 25 bp, Homo sapien
gggcatggtgggttttgatcttctt

SEQ ID NO: 2567913 - DNA, 25 bp, Homo sapien
tccttctttgatcttcttccccttc

SEQ ID NO: 2567914 - DNA, 25 bp, Homo sapien
gaattaagcatccacaattgctgaa

SEQ ID NO: 2567915 - DNA, 25 bp, Homo sapien
aattaagcatccacaattgctgaaa

SEQ ID NO: 2567916 - DNA, 25 bp, Homo sapien
gcagttgccatacagcctttgaggt

SEQ ID NO: 2567917 - DNA, 25 bp, Homo sapien
tagtgccctcgggacacacagcgaa

SEQ ID NO: 2567918 - DNA, 25 bp, Homo sapien
tcgggacacacagcgaacagtgatc

SEQ ID NO: 2567919 - DNA, 25 bp, Homo sapien
taattttccataaacttgctcaaga

SEQ ID NO: 2567920 - DNA, 25 bp, Homo sapien
taacatctatccagtgagtcctgca

SEQ ID NO: 2567921 - DNA, 25 bp, Homo sapien
ataacatctatccagtgagtcctgc

SEQ ID NO: 2567922 - DNA, 25 bp, Homo sapien
aataacatctatccagtgagtcctg

SEQ ID NO: 2567923 - DNA, 25 bp, Homo sapien
gtaaacagcactgctgtagggctgg

SEQ ID NO: 2567924 - DNA, 25 bp, Homo sapien
gccaaggtactgttcctccaatgag

SEQ ID NO: 2567925 - DNA, 25 bp, Homo sapien
cctccaatgagtaaacagcactgct

SEQ ID NO: 2567926 - DNA, 25 bp, Homo sapien
cctaagtcaggcagttcaagataac

SEQ ID NO: 2567927 - DNA, 25 bp, Homo sapien
atgcgcccataggtcctgcctgcgg

SEQ ID NO: 2567928 - DNA, 25 bp, Homo sapien
atatgcgcccataggtcctgcctgc

SEQ ID NO: 2567929 - DNA, 25 bp, Homo sapien
tatatgcgcccataggtcctgcctg

SEQ ID NO: 2567930 - DNA, 25 bp, Homo sapien
ctatatgcgcccataggtcctgcct

SEQ ID NO: 2567931 - DNA, 25 bp, Homo sapien
gtctaggcttccaactgagactaca

SEQ ID NO: 2567932 - DNA, 25 bp, Homo sapien
ttcatgtctaggcttccaactgaga

SEQ ID NO: 2567933 - DNA, 25 bp, Homo sapien
atttcatgtctaggcttccaactga

SEQ ID NO: 2567934 - DNA, 25 bp, Homo sapien
catgtctaggcttccaactgagact

SEQ ID NO: 2567935 - DNA, 25 bp, Homo sapien
cctcagcatgagaacaggacaatgt

SEQ ID NO: 2567936 - DNA, 25 bp, Homo sapien
tcctcagcatgagaacaggacaatg

SEQ ID NO: 2567937 - DNA, 25 bp, Homo sapien
gctcctcagcatgagaacaggacaa

SEQ ID NO: 2567938 - DNA, 25 bp, Homo sapien
tcagcatgagaacaggacaatgtga

SEQ ID NO: 2567939 - DNA, 25 bp, Homo sapien
gggcatggtgggccttggtcttctt

SEQ ID NO: 2567940 - DNA, 25 bp, Homo sapien
gcatggtgggccttggtcttcttcc

SEQ ID NO: 2567941 - DNA, 25 bp, Homo sapien
ctggggcatggtgggccttggtctt

SEQ ID NO: 2567942 - DNA, 25 bp, Homo sapien
tggggcatggtgggccttggtcttc

SEQ ID NO: 2567943 - DNA, 25 bp, Homo sapien
gtagctgttcacaattgctcagtta

SEQ ID NO: 2567944 - DNA, 25 bp, Homo sapien
aagtagctgttcacaattgctcagt

SEQ ID NO: 2567945 - DNA, 25 bp, Homo sapien
agtagctgttcacaattgctcagtt

SEQ ID NO: 2567946 - DNA, 25 bp, Homo sapien
tagctgttcacaattgctcagttac

SEQ ID NO: 2567947 - DNA, 25 bp, Homo sapien
tgacacactgatgagggagtaacag

SEQ ID NO: 2567948 - DNA, 25 bp, Homo sapien
acacactgatgagggagtaacagga

SEQ ID NO: 2567949 - DNA, 25 bp, Homo sapien
ttgaagtctggtccacctacagtag

SEQ ID NO: 2567950 - DNA, 25 bp, Homo sapien
tgaagtctggtccacctacagtagg

SEQ ID NO: 2567951 - DNA, 25 bp, Homo sapien
ataacatctatccagtgagtcctgc

SEQ ID NO: 2567952 - DNA, 25 bp, Homo sapien
taacatctatccagtgagtcctgca

SEQ ID NO: 2567953 - DNA, 25 bp, Homo sapien
aataacatctatccagtgagtcctg

SEQ ID NO: 2567954 - DNA, 25 bp, Homo sapien
tccttctttgatcttcttccccttc

SEQ ID NO: 2567955 - DNA, 25 bp, Homo sapien
cttctttccttctttgatcttcttc

SEQ ID NO: 2567956 - DNA, 25 bp, Homo sapien
ttctttccttctttgatcttcttcc

SEQ ID NO: 2567957 - DNA, 25 bp, Homo sapien
tctttccttctttgatcttcttccc

SEQ ID NO: 2567958 - DNA, 25 bp, Homo sapien
ctggggcatggtggggtttgatctt

SEQ ID NO: 2567959 - DNA, 25 bp, Homo sapien
gcatggtggggtttgatcttcttcc

SEQ ID NO: 2567960 - DNA, 25 bp, Homo sapien
gggcatggtggggtttgatcttctt

SEQ ID NO: 2567961 - DNA, 25 bp, Homo sapien
tggggcatggtggggtttgatcttc

SEQ ID NO: 2567962 - DNA, 25 bp, Homo sapien
ataacatctatccagtgagtcctgc

SEQ ID NO: 2567963 - DNA, 25 bp, Homo sapien
taacatctatccagtgagtcctgca

SEQ ID NO: 2567964 - DNA, 25 bp, Homo sapien
aataacatctatccagtgagtcctg

SEQ ID NO: 2567965 - DNA, 25 bp, Homo sapien
tcaagatgcactccaacacgctgtt

SEQ ID NO: 2567966 - DNA, 25 bp, Homo sapien
tgtcaagatgcactccaacacgctg

SEQ ID NO: 2567967 - DNA, 25 bp, Homo sapien
catgtcaagatgcactccaacacgc

SEQ ID NO: 2567968 - DNA, 25 bp, Homo sapien
aagatgcactccaacacgctgttgc

SEQ ID NO: 2567969 - DNA, 25 bp, Homo sapien
tcagcatgagaacaggacaatgtga

SEQ ID NO: 2567970 - DNA, 25 bp, Homo sapien
gctcctcagcatgagaacaggacaa

SEQ ID NO: 2567971 - DNA, 25 bp, Homo sapien
tcctcagcatgagaacaggacaatg

SEQ ID NO: 2567972 - DNA, 25 bp, Homo sapien
cctcagcatgagaacaggacaatgt

SEQ ID NO: 2567973 - DNA, 25 bp, Homo sapien
gggcatggtgggccttggtcttctt

SEQ ID NO: 2567974 - DNA, 25 bp, Homo sapien
tggggcatggtgggccttggtcttc

SEQ ID NO: 2567975 - DNA, 25 bp, Homo sapien
ctggggcatggtgggccttggtctt

SEQ ID NO: 2567976 - DNA, 25 bp, Homo sapien
gcatggtgggccttggtcttcttcc

SEQ ID NO: 2567977 - DNA, 25 bp, Homo sapien
tagctgttcacaattgctcagttac

SEQ ID NO: 2567978 - DNA, 25 bp, Homo sapien
gtagctgttcacaattgctcagtta

SEQ ID NO: 2567979 - DNA, 25 bp, Homo sapien
agtagctgttcacaattgctcagtt

SEQ ID NO: 2567980 - DNA, 25 bp, Homo sapien
aagtagctgttcacaattgctcagt

SEQ ID NO: 2567981 - DNA, 25 bp, Homo sapien
ataacatctatccagtgagtcctgc

SEQ ID NO: 2567982 - DNA, 25 bp, Homo sapien
taacatctatccagtgagtcctgca

SEQ ID NO: 2567983 - DNA, 25 bp, Homo sapien
aataacatctatccagtgagtcctg

SEQ ID NO: 2567984 - DNA, 25 bp, Homo sapien
gagggcagcatgcttgctctcagca

SEQ ID NO: 2567985 - DNA, 25 bp, Homo sapien
aaagaaggaaggtcacggtgtagag

SEQ ID NO: 2567986 - DNA, 25 bp, Homo sapien
gagggtgaaatcagtgcttgctgtt

SEQ ID NO: 2567987 - DNA, 25 bp, Homo sapien
ctctcagcaaagagtcccgtgaggg

SEQ ID NO: 2567988 - DNA, 25 bp, Homo sapien
gcgcgagctggctgatgaagaagta

SEQ ID NO: 2567989 - DNA, 25 bp, Homo sapien
gagcgcgagctggctgatgaagaag

SEQ ID NO: 2567990 - DNA, 25 bp, Homo sapien
agcgcgagctggctgatgaagaagt

SEQ ID NO: 2567991 - DNA, 25 bp, Homo sapien
cgcgagctggctgatgaagaagtac

SEQ ID NO: 2567992 - DNA, 25 bp, Homo sapien
cagtcacgcataggtacatgagatc

SEQ ID NO: 2567993 - DNA, 25 bp, Homo sapien
ggcacagtcacgcataggtacatga

SEQ ID NO: 2567994 - DNA, 25 bp, Homo sapien
tcacgcataggtacatgagatccat

SEQ ID NO: 2567995 - DNA, 25 bp, Homo sapien
cacagtcacgcataggtacatgaga

SEQ ID NO: 2567996 - DNA, 25 bp, Homo sapien
gcactatgatcatgtgggaggagca

SEQ ID NO: 2567997 - DNA, 25 bp, Homo sapien
tgtagaaggaagcaccgaagagcag

SEQ ID NO: 2567998 - DNA, 25 bp, Homo sapien
tcttatagagggagacgtcagagca

SEQ ID NO: 2567999 - DNA, 25 bp, Homo sapien
aaaaggcagacaccatcatgtcctg

SEQ ID NO: 2568000 - DNA, 25 bp, Homo sapien
cattcttgactgcatcatgctcctc

SEQ ID NO: 2568001 - DNA, 25 bp, Homo sapien
attcttgactgcatcatgctcctca

SEQ ID NO: 2568002 - DNA, 25 bp, Homo sapien
agacgtagaagtacaaaatgatggc

SEQ ID NO: 2568003 - DNA, 25 bp, Homo sapien
aagaaatcccttttcagagctgttg

SEQ ID NO: 2568004 - DNA, 25 bp, Homo sapien
gaaacctctctagctgaggctgatc

SEQ ID NO: 2568005 - DNA, 25 bp, Homo sapien
cagaaggctcaagacgtagaagtac

SEQ ID NO: 2568006 - DNA, 25 bp, Homo sapien
tatgatccagtgtgcgatgaccaca

SEQ ID NO: 2568007 - DNA, 25 bp, Homo sapien
taatggctatgtagcgcagtggccg

SEQ ID NO: 2568008 - DNA, 25 bp, Homo sapien
gagaatacactcagacgagcccaac

SEQ ID NO: 2568009 - DNA, 25 bp, Homo sapien
aagcagatgtccacacacgagaggt

SEQ ID NO: 2568010 - DNA, 25 bp, Homo sapien
cacaaccaggtgagacgaacaggtc

SEQ ID NO: 2568011 - DNA, 25 bp, Homo sapien
tggcggcccgcagctgattttatcc

SEQ ID NO: 2568012 - DNA, 25 bp, Homo sapien
gttgaaagtcgtatccacacaggcc

SEQ ID NO: 2568013 - DNA, 25 bp, Homo sapien
gactaagatgagtaacaccgggaca

SEQ ID NO: 2568014 - DNA, 25 bp, Homo sapien
ttcggccatcttcgccacattttct

SEQ ID NO: 2568015 - DNA, 25 bp, Homo sapien
attcggccatcttcgccacattttc

SEQ ID NO: 2568016 - DNA, 25 bp, Homo sapien
gacaaaggtttctacgcatgcagaa

SEQ ID NO: 2568017 - DNA, 25 bp, Homo sapien
aggccagaagttgaactcgccacca

SEQ ID NO: 2568018 - DNA, 25 bp, Homo sapien
tccaagggccagataagggttccaa

SEQ ID NO: 2568019 - DNA, 25 bp, Homo sapien
ggatttgagttccagtgccagataa

SEQ ID NO: 2568020 - DNA, 25 bp, Homo sapien
cacatgattggcttgccatgtccaa

SEQ ID NO: 2568021 - DNA, 25 bp, Homo sapien
ttttgcctgctaccatgacttgtaa

SEQ ID NO: 2568022 - DNA, 25 bp, Homo sapien
gcattctggtagtttgatgacaacc

SEQ ID NO: 2568023 - DNA, 25 bp, Homo sapien
gatggcactcagagccataagaggt

SEQ ID NO: 2568024 - DNA, 25 bp, Homo sapien
tatataaatccctcgaaacaaggaa

SEQ ID NO: 2568025 - DNA, 25 bp, Homo sapien
ggttaccaactgcacgaagtatctg

SEQ ID NO: 2568026 - DNA, 25 bp, Homo sapien
gattatttaacctcctgacattaag

SEQ ID NO: 2568027 - DNA, 25 bp, Homo sapien
tcactttgtctcacattaacatagc

SEQ ID NO: 2568028 - DNA, 25 bp, Homo sapien
tccttacagtcctccatatgaaatc

SEQ ID NO: 2568029 - DNA, 25 bp, Homo sapien
cttccttacagtcctccatatgaaa

SEQ ID NO: 2568030 - DNA, 25 bp, Homo sapien
cctccatatgaaatccccctaaagt

SEQ ID NO: 2568031 - DNA, 25 bp, Homo sapien
ttacagtcctccatatgaaatcccc

SEQ ID NO: 2568032 - DNA, 25 bp, Homo sapien
ttcaaacaaggagctgagaggagac

SEQ ID NO: 2568033 - DNA, 25 bp, Homo sapien
tctgtgacatctgagttcaaacaag

SEQ ID NO: 2568034 - DNA, 25 bp, Homo sapien
tagtgacgaaaagttaccctcagat

SEQ ID NO: 2568035 - DNA, 25 bp, Homo sapien
cctcagatgagtgtgtgatgttgga

SEQ ID NO: 2568036 - DNA, 25 bp, Homo sapien
ggtcatcactgctctcgacttgttc

SEQ ID NO: 2568037 - DNA, 25 bp, Homo sapien
cactgctctcgacttgttctgcttc

SEQ ID NO: 2568038 - DNA, 25 bp, Homo sapien
ttctgcttctgaaacgttctattag

SEQ ID NO: 2568039 - DNA, 25 bp, Homo sapien
aacgttctattagttcttcacagca

SEQ ID NO: 2568040 - DNA, 25 bp, Homo sapien
taaaaataacaatatcttacaacat

SEQ ID NO: 2568041 - DNA, 25 bp, Homo sapien
ctgtgaaatgttagaataaaaataa

SEQ ID NO: 2568042 - DNA, 25 bp, Homo sapien
aataacaatatcttacaacatttac

SEQ ID NO: 2568043 - DNA, 25 bp, Homo sapien
tgtgaaatgttagaataaaaataac

SEQ ID NO: 2568044 - DNA, 25 bp, Homo sapien
cacatcagttgacctctgagtttca

SEQ ID NO: 2568045 - DNA, 25 bp, Homo sapien
gagggaaacagactacaatcggtcc

SEQ ID NO: 2568046 - DNA, 25 bp, Homo sapien
caaggtactgatttgtggaggtatc

SEQ ID NO: 2568047 - DNA, 25 bp, Homo sapien
caatcggtcctaatgaagagggaga

SEQ ID NO: 2568048 - DNA, 25 bp, Homo sapien
tctcagagccttacgaaaagtgaag

SEQ ID NO: 2568049 - DNA, 25 bp, Homo sapien
gagctgatgggaactctgcactcca

SEQ ID NO: 2568050 - DNA, 25 bp, Homo sapien
gagtgttgtcatccaaggaccaaga

SEQ ID NO: 2568051 - DNA, 25 bp, Homo sapien
catggtccctgttgcttatagctgc

SEQ ID NO: 2568052 - DNA, 25 bp, Homo sapien
aatgttgtatattaagaagtgtgaa

SEQ ID NO: 2568053 - DNA, 25 bp, Homo sapien
gtgtgaatcaccgtatatcaaatgg

SEQ ID NO: 2568054 - DNA, 25 bp, Homo sapien
tgaatcaccgtatatcaaatggtag

SEQ ID NO: 2568055 - DNA, 25 bp, Homo sapien
gaatcaccgtatatcaaatggtaga

SEQ ID NO: 2568056 - DNA, 25 bp, Homo sapien
aggaaaatgtagaacaaggaattct

SEQ ID NO: 2568057 - DNA, 25 bp, Homo sapien
gagataactatcttcagatcatcca

SEQ ID NO: 2568058 - DNA, 25 bp, Homo sapien
ttgagataactatcttcagatcatc

SEQ ID NO: 2568059 - DNA, 25 bp, Homo sapien
aaggaattctatctgtaactggctg

SEQ ID NO: 2568060 - DNA, 25 bp, Homo sapien
aatgtaatattccaagacacagcca

SEQ ID NO: 2568061 - DNA, 25 bp, Homo sapien
ggtgtgagatctggctgaagattcc

SEQ ID NO: 2568062 - DNA, 25 bp, Homo sapien
actgaagataagcaagcagaggcgg

SEQ ID NO: 2568063 - DNA, 25 bp, Homo sapien
aatgtggatcagaagtatcaatgta

SEQ ID NO: 2568064 - DNA, 25 bp, Homo sapien
tgtcaagtctatgagtgagagctgg

SEQ ID NO: 2568065 - DNA, 25 bp, Homo sapien
gagagctggtttataaagaagtaca

SEQ ID NO: 2568066 - DNA, 25 bp, Homo sapien
ctatgagtgagagctggtttataaa

SEQ ID NO: 2568067 - DNA, 25 bp, Homo sapien
gtcaagtctatgagtgagagctggt

SEQ ID NO: 2568068 - DNA, 25 bp, Homo sapien
tggctcatgagcacagagtaacgga

SEQ ID NO: 2568069 - DNA, 25 bp, Homo sapien
gaccgtcacaggtatcaggagcatg

SEQ ID NO: 2568070 - DNA, 25 bp, Homo sapien
tgatgccaggaggagacatacccta

SEQ ID NO: 2568071 - DNA, 25 bp, Homo sapien
tcccaactgcaggtagaagtacatc

SEQ ID NO: 2568072 - DNA, 25 bp, Homo sapien
tatggaggtttctgcacgctcagca

SEQ ID NO: 2568073 - DNA, 25 bp, Homo sapien
aatatggaggtttctgcacgctcag

SEQ ID NO: 2568074 - DNA, 25 bp, Homo sapien
ttaatatggaggtttctgcacgctc

SEQ ID NO: 2568075 - DNA, 25 bp, Homo sapien
taatatggaggtttctgcacgctca

SEQ ID NO: 2568076 - DNA, 25 bp, Homo sapien
tgtctactggatagcccatgtctct

SEQ ID NO: 2568077 - DNA, 25 bp, Homo sapien
aacgaaaagcgtttagcacagagtg

SEQ ID NO: 2568078 - DNA, 25 bp, Homo sapien
tcgaatgaggtggtgaacgaaaagc

SEQ ID NO: 2568079 - DNA, 25 bp, Homo sapien
gaaatgtgggtgaccttagcctcag

SEQ ID NO: 2568080 - DNA, 25 bp, Homo sapien
tcactttgtctcacattaacatagc

SEQ ID NO: 2568081 - DNA, 25 bp, Homo sapien
tatataaatccctcgaaacaaggaa

SEQ ID NO: 2568082 - DNA, 25 bp, Homo sapien
gattatttaacctcctgacattaag

SEQ ID NO: 2568083 - DNA, 25 bp, Homo sapien
ggttaccaactgcacgaagtatctg

SEQ ID NO: 2568084 - DNA, 25 bp, Homo sapien
tgtctactggatagcccatgtctct

SEQ ID NO: 2568085 - DNA, 25 bp, Homo sapien
gaaatgtgggtgaccttagcctcag

SEQ ID NO: 2568086 - DNA, 25 bp, Homo sapien
aacgaaaagcgtttagcacagagtg

SEQ ID NO: 2568087 - DNA, 25 bp, Homo sapien
tcgaatgaggtggtgaacgaaaagc

SEQ ID NO: 2568088 - DNA, 25 bp, Homo sapien
acaactggcgatggctgtaggaagc

SEQ ID NO: 2568089 - DNA, 25 bp, Homo sapien
cccagtgcatgctggttgcgctgaa

SEQ ID NO: 2568090 - DNA, 25 bp, Homo sapien
caggccccggaaggacaatgtgccc

SEQ ID NO: 2568091 - DNA, 25 bp, Homo sapien
tggttgcgctgaaggcgaccccgcc

SEQ ID NO: 2568092 - DNA, 25 bp, Homo sapien
gagggcagcatgcttgctctcagca

SEQ ID NO: 2568093 - DNA, 25 bp, Homo sapien
aaagaaggaaggtcacggtgtagag

SEQ ID NO: 2568094 - DNA, 25 bp, Homo sapien
gagggtgaaatcagtgcttgctgtt

SEQ ID NO: 2568095 - DNA, 25 bp, Homo sapien
ctctcagcaaagagtcccgtgaggg

SEQ ID NO: 2568096 - DNA, 25 bp, Homo sapien
tgagatccatgagcgcgagctggct

SEQ ID NO: 2568097 - DNA, 25 bp, Homo sapien
ggcacagtcacgcataggtacatga

SEQ ID NO: 2568098 - DNA, 25 bp, Homo sapien
cgcgagctggctgatgaagaagtac

SEQ ID NO: 2568099 - DNA, 25 bp, Homo sapien
taatggagaggtctgcaaacagcag

SEQ ID NO: 2568100 - DNA, 25 bp, Homo sapien
caggctgacaccaggagctggcaca

SEQ ID NO: 2568101 - DNA, 25 bp, Homo sapien
aggctgacaccaggagctggcacac

SEQ ID NO: 2568102 - DNA, 25 bp, Homo sapien
ccagcaggctgacaccaggagctgg

SEQ ID NO: 2568103 - DNA, 25 bp, Homo sapien
agcaggctgacaccaggagctggca

SEQ ID NO: 2568104 - DNA, 25 bp, Homo sapien
cagtgaccttgactgggtctcttct

SEQ ID NO: 2568105 - DNA, 25 bp, Homo sapien
tcttctctgccggacttcctgcttc

SEQ ID NO: 2568106 - DNA, 25 bp, Homo sapien
taccaattctgatgagtgtccgtga

SEQ ID NO: 2568107 - DNA, 25 bp, Homo sapien
ttacacttgtgagaggaccctctcc

SEQ ID NO: 2568108 - DNA, 25 bp, Homo sapien
tagtgacgaaaagttaccctcagat

SEQ ID NO: 2568109 - DNA, 25 bp, Homo sapien
tctgtgacatctgagttcaaacaag

SEQ ID NO: 2568110 - DNA, 25 bp, Homo sapien
ttcaaacaaggagctgagaggagac

SEQ ID NO: 2568111 - DNA, 25 bp, Homo sapien
cctcagatgagtgtgtgatgttgga

SEQ ID NO: 2568112 - DNA, 25 bp, Homo sapien
tttctgcatggtccaattctgatgg

SEQ ID NO: 2568113 - DNA, 25 bp, Homo sapien
tactgccatgtggtgtattgaggat

SEQ ID NO: 2568114 - DNA, 25 bp, Homo sapien
tatctctccgaaataattactgcca

SEQ ID NO: 2568115 - DNA, 25 bp, Homo sapien
tctgatggcgtctagtggatttatc

SEQ ID NO: 2568116 - DNA, 25 bp, Homo sapien
caggtcactttcttactcctgttgg

SEQ ID NO: 2568117 - DNA, 25 bp, Homo sapien
caactcccagaggtgatgtatcaac

SEQ ID NO: 2568118 - DNA, 25 bp, Homo sapien
ccagcccatctaggtgaggttcaag

SEQ ID NO: 2568119 - DNA, 25 bp, Homo sapien
tgttggtgctcttaacctggccaca

SEQ ID NO: 2568120 - DNA, 25 bp, Homo sapien
ataatgtggaaaaggctaaggctgt

SEQ ID NO: 2568121 - DNA, 25 bp, Homo sapien
aaaaggctaaggctgtatatgaact

SEQ ID NO: 2568122 - DNA, 25 bp, Homo sapien
tgtggaaaaggctaaggctgtatat

SEQ ID NO: 2568123 - DNA, 25 bp, Homo sapien
gatgatgatgagatttgagattact

SEQ ID NO: 2568124 - DNA, 25 bp, Homo sapien
caaggtactgatttgtggaggtatc

SEQ ID NO: 2568125 - DNA, 25 bp, Homo sapien
gagggaaacagactacaatcggtcc

SEQ ID NO: 2568126 - DNA, 25 bp, Homo sapien
cacatcagttgacctctgagtttca

SEQ ID NO: 2568127 - DNA, 25 bp, Homo sapien
caatcggtcctaatgaagagggaga

SEQ ID NO: 2568128 - DNA, 25 bp, Homo sapien
atttggctgcaagatctaagatggc

SEQ ID NO: 2568129 - DNA, 25 bp, Homo sapien
gctgcaagatctaagatggcggtgc

SEQ ID NO: 2568130 - DNA, 25 bp, Homo sapien
gcctaatacagggtatacactcaat

SEQ ID NO: 2568131 - DNA, 25 bp, Homo sapien
tattccaacagcctaatacagggta

SEQ ID NO: 2568132 - DNA, 25 bp, Homo sapien
tgactacaaatcttctcagcacaag

SEQ ID NO: 2568133 - DNA, 25 bp, Homo sapien
gttaacgagatttacacacctccat

SEQ ID NO: 2568134 - DNA, 25 bp, Homo sapien
tccattacagtactagagtgttcca

SEQ ID NO: 2568135 - DNA, 25 bp, Homo sapien
caaagtactctgttgaccttttcac

SEQ ID NO: 2568136 - DNA, 25 bp, Homo sapien
ggactgatggtgacatcatttttgt

SEQ ID NO: 2568137 - DNA, 25 bp, Homo sapien
ttttgttattaaacattttctgcat

SEQ ID NO: 2568138 - DNA, 25 bp, Homo sapien
tttggactgatggtgacatcatttt

SEQ ID NO: 2568139 - DNA, 25 bp, Homo sapien
gatggtgacatcatttttgttatta

SEQ ID NO: 2568140 - DNA, 25 bp, Homo sapien
tctaagatggttatatatctcccca

SEQ ID NO: 2568141 - DNA, 25 bp, Homo sapien
tgatctagccaagccgtcttctgtg

SEQ ID NO: 2568142 - DNA, 25 bp, Homo sapien
cactgagacatttgcgattgcgtct

SEQ ID NO: 2568143 - DNA, 25 bp, Homo sapien
gcaaagctctcatcaggagttcctt

SEQ ID NO: 2568144 - DNA, 25 bp, Homo sapien
cactgagacatttgcgattgcgtct

SEQ ID NO: 2568145 - DNA, 25 bp, Homo sapien
tgatctagccaagccgtcttctgtg

SEQ ID NO: 2568146 - DNA, 25 bp, Homo sapien
tctaagatggttatatatctcccca

SEQ ID NO: 2568147 - DNA, 25 bp, Homo sapien
gcaaagctctcatcaggagttcctt

SEQ ID NO: 2568148 - DNA, 25 bp, Homo sapien
gctgaccaacttttgaatggaaatt

SEQ ID NO: 2568149 - DNA, 25 bp, Homo sapien
attgctgaccaacttttgaatggaa

SEQ ID NO: 2568150 - DNA, 25 bp, Homo sapien
tgctgaccaacttttgaatggaaat

SEQ ID NO: 2568151 - DNA, 25 bp, Homo sapien
aatggaaattggaaggagcatttgc

SEQ ID NO: 2568152 - DNA, 25 bp, Homo sapien
ctgtctgtattgctaacgtgtgatc

SEQ ID NO: 2568153 - DNA, 25 bp, Homo sapien
taacgtgtgatcatgggtcctgcct

SEQ ID NO: 2568154 - DNA, 25 bp, Homo sapien
acgtgtgatcatgggtcctgcctgt

SEQ ID NO: 2568155 - DNA, 25 bp, Homo sapien
gtcctgcctgtctgtattgctaacg

SEQ ID NO: 2568156 - DNA, 25 bp, Homo sapien
caagcagctcttggaagtgcccatg

SEQ ID NO: 2568157 - DNA, 25 bp, Homo sapien
tattgctaacgtgtgatcatgagtc

SEQ ID NO: 2568158 - DNA, 25 bp, Homo sapien
aagtagccctacaaaccattcatgg

SEQ ID NO: 2568159 - DNA, 25 bp, Homo sapien
cagagggcattctcagtcaagtagc

SEQ ID NO: 2568160 - DNA, 25 bp, Homo sapien
agggcactgcgcatgcgtcggcctc

SEQ ID NO: 2568161 - DNA, 25 bp, Homo sapien
agctggaccggcagctgcgtcctga

SEQ ID NO: 2568162 - DNA, 25 bp, Homo sapien
acttgtaggcccgagagagcctctg

SEQ ID NO: 2568163 - DNA, 25 bp, Homo sapien
tggcttggtgaacccgtacctgacg

SEQ ID NO: 2568164 - DNA, 25 bp, Homo sapien
gcctgcccgccaccgagggacgcgt

SEQ ID NO: 2568165 - DNA, 25 bp, Homo sapien
gagcctgcccgccaccgagggacgc

SEQ ID NO: 2568166 - DNA, 25 bp, Homo sapien
tgaaagtaaggctgcaggccaagag

SEQ ID NO: 2568167 - DNA, 25 bp, Homo sapien
ggcatgaaagtaaggctgcaggcca

SEQ ID NO: 2568168 - DNA, 25 bp, Homo sapien
gatgccagagaattcaatacacttt

SEQ ID NO: 2568169 - DNA, 25 bp, Homo sapien
tgttgggcacttaaaaccactggag

SEQ ID NO: 2568170 - DNA, 25 bp, Homo sapien
cactggagctgaattcatcaacatc

SEQ ID NO: 2568171 - DNA, 25 bp, Homo sapien
gctgcacaccatttgagttctgtat

SEQ ID NO: 2568172 - DNA, 25 bp, Homo sapien
cttcatttcaatggctacgtcacga

SEQ ID NO: 2568173 - DNA, 25 bp, Homo sapien
tctttgcataggtctgcttgtgtgc

SEQ ID NO: 2568174 - DNA, 25 bp, Homo sapien
tcataaatggaagtggctaggctct

SEQ ID NO: 2568175 - DNA, 25 bp, Homo sapien
tactcttgttagcaattggaaaacc

SEQ ID NO: 2568176 - DNA, 25 bp, Homo sapien
attgggcatcggtggatgatgaagc

SEQ ID NO: 2568177 - DNA, 25 bp, Homo sapien
gaagaatcaaatgatggaaagatgg

SEQ ID NO: 2568178 - DNA, 25 bp, Homo sapien
cacggtggttgaattgggcatcggt

SEQ ID NO: 2568179 - DNA, 25 bp, Homo sapien
gaaatcctgaacactcacgaagaat

SEQ ID NO: 2568180 - DNA, 25 bp, Homo sapien
cgccttagaaatggtggtgctgtcc

SEQ ID NO: 2568181 - DNA, 25 bp, Homo sapien
ggcatccaagatagacagattcctg

SEQ ID NO: 2568182 - DNA, 25 bp, Homo sapien
gaattgacacatgaggtagggactg

SEQ ID NO: 2568183 - DNA, 25 bp, Homo sapien
tggtgacggtcacaatgaggatgtt

SEQ ID NO: 2568184 - DNA, 25 bp, Homo sapien
tcttggaaacccgagcacggtcgaa

SEQ ID NO: 2568185 - DNA, 25 bp, Homo sapien
cgagagttcacgatcacagggtagt

SEQ ID NO: 2568186 - DNA, 25 bp, Homo sapien
acgttggaccgacagaagggcagct

SEQ ID NO: 2568187 - DNA, 25 bp, Homo sapien
catagacaagaccactgagtaggga

SEQ ID NO: 2568188 - DNA, 25 bp, Homo sapien
aaggatcagatcctgggtggctgca

SEQ ID NO: 2568189 - DNA, 25 bp, Homo sapien
ggaggcattatggaataaaaaccag

SEQ ID NO: 2568190 - DNA, 25 bp, Homo sapien
tacacagaagagcatgaactgagga

SEQ ID NO: 2568191 - DNA, 25 bp, Homo sapien
tggctgcaggtatcgcaggtggcct

SEQ ID NO: 2568192 - DNA, 25 bp, Homo sapien
ggtgatattggccattggatgtttg

SEQ ID NO: 2568193 - DNA, 25 bp, Homo sapien
tattggccattggatgtttggattg

SEQ ID NO: 2568194 - DNA, 25 bp, Homo sapien
tgatattggccattggatgtttgga

SEQ ID NO: 2568195 - DNA, 25 bp, Homo sapien
caggtgatattggccattggatgtt

SEQ ID NO: 2568196 - DNA, 25 bp, Homo sapien
ggagtgaatgtgaagccatccactg

SEQ ID NO: 2568197 - DNA, 25 bp, Homo sapien
aatgatgaatctcccgggatccacg

SEQ ID NO: 2568198 - DNA, 25 bp, Homo sapien
aaatgaccacacaaagtagtgctgg

SEQ ID NO: 2568199 - DNA, 25 bp, Homo sapien
tcaatacagcaggaacttcacagaa

SEQ ID NO: 2568200 - DNA, 25 bp, Homo sapien
tgaaaggcaggttccactgttaaca

SEQ ID NO: 2568201 - DNA, 25 bp, Homo sapien
tactccatagctttttgaaaggcag

SEQ ID NO: 2568202 - DNA, 25 bp, Homo sapien
agctttttgaaaggcaggttccact

SEQ ID NO: 2568203 - DNA, 25 bp, Homo sapien
ttttgaaaggcaggttccactgtta

SEQ ID NO: 2568204 - DNA, 25 bp, Homo sapien
ggtttcattgttttcattcatggta

SEQ ID NO: 2568205 - DNA, 25 bp, Homo sapien
ctggtcaaggtttcattgttttcat

SEQ ID NO: 2568206 - DNA, 25 bp, Homo sapien
tcaaggtttcattgttttcattcat

SEQ ID NO: 2568207 - DNA, 25 bp, Homo sapien
aaggtttcattgttttcattcatgg

SEQ ID NO: 2568208 - DNA, 25 bp, Homo sapien
catttattgtgagtgaagagcccca

SEQ ID NO: 2568209 - DNA, 25 bp, Homo sapien
gcaggcgatgaaagagatggtcccc

SEQ ID NO: 2568210 - DNA, 25 bp, Homo sapien
ggatcagcagcattgcaacgcagca

SEQ ID NO: 2568211 - DNA, 25 bp, Homo sapien
cgtatacgtatacaaggcagcccca

SEQ ID NO: 2568212 - DNA, 25 bp, Homo sapien
aagcaattcatagtcattggtaccc

SEQ ID NO: 2568213 - DNA, 25 bp, Homo sapien
tctggatgccaaagtgctgtcagca

SEQ ID NO: 2568214 - DNA, 25 bp, Homo sapien
ccttcaacatctaggccatctggat

SEQ ID NO: 2568215 - DNA, 25 bp, Homo sapien
cattggtacccacaacaggaaatcc

SEQ ID NO: 2568216 - DNA, 25 bp, Homo sapien
gatcctacagttgtgccgatataag

SEQ ID NO: 2568217 - DNA, 25 bp, Homo sapien
gccgatataaggtaatatcttccaa

SEQ ID NO: 2568218 - DNA, 25 bp, Homo sapien
aaataagatgatagcattcccaggg

SEQ ID NO: 2568219 - DNA, 25 bp, Homo sapien
taacaacatgtgaattaattgttag

SEQ ID NO: 2568220 - DNA, 25 bp, Homo sapien
taatctcccgggaattgcagaaggg

SEQ ID NO: 2568221 - DNA, 25 bp, Homo sapien
gttgagctgtgcaccccacaaagga

SEQ ID NO: 2568222 - DNA, 25 bp, Homo sapien
tgaacagccccatgaaagtgaagtc

SEQ ID NO: 2568223 - DNA, 25 bp, Homo sapien
cattggccatcagtgcggtgaagaa

SEQ ID NO: 2568224 - DNA, 25 bp, Homo sapien
agaaaggaatcagcagcatcaaaac

SEQ ID NO: 2568225 - DNA, 25 bp, Homo sapien
ctacagagaaaggaatcagcagcat

SEQ ID NO: 2568226 - DNA, 25 bp, Homo sapien
cagagaaaggaatcagcagcatcaa

SEQ ID NO: 2568227 - DNA, 25 bp, Homo sapien
tacagagaaaggaatcagcagcatc

SEQ ID NO: 2568228 - DNA, 25 bp, Homo sapien
tcaggattcgggcataggaagcaag

SEQ ID NO: 2568229 - DNA, 25 bp, Homo sapien
agtcatgtgggatgagcaagtggca

SEQ ID NO: 2568230 - DNA, 25 bp, Homo sapien
actgaactgtagtcaggattcgggc

SEQ ID NO: 2568231 - DNA, 25 bp, Homo sapien
tgagcaagtggcaaatgccttcttc

SEQ ID NO: 2568232 - DNA, 25 bp, Homo sapien
gcttgtggtaagaatgtggcagcat

SEQ ID NO: 2568233 - DNA, 25 bp, Homo sapien
tgacaccctttgaggacccttgaac

SEQ ID NO: 2568234 - DNA, 25 bp, Homo sapien
catgggtgtgagaatggtgtaaaac

SEQ ID NO: 2568235 - DNA, 25 bp, Homo sapien
atggcagccccgtagaacaaggaca

SEQ ID NO: 2568236 - DNA, 25 bp, Homo sapien
tacacgaaagagatatgataaagtt

SEQ ID NO: 2568237 - DNA, 25 bp, Homo sapien
tggaaaggtatctgatttacataaa

SEQ ID NO: 2568238 - DNA, 25 bp, Homo sapien
aaggtatctgatttacataaaacat

SEQ ID NO: 2568239 - DNA, 25 bp, Homo sapien
ctgtagggtacacgaaagagatatg

SEQ ID NO: 2568240 - DNA, 25 bp, Homo sapien
cacggaataattgctctgctccata

SEQ ID NO: 2568241 - DNA, 25 bp, Homo sapien
acacggaataattgctctgctccat

SEQ ID NO: 2568242 - DNA, 25 bp, Homo sapien
ggaataattgctctgctccatagct

SEQ ID NO: 2568243 - DNA, 25 bp, Homo sapien
cggaataattgctctgctccatagc

SEQ ID NO: 2568244 - DNA, 25 bp, Homo sapien
tggatgagaatgatcttgaccacgt

SEQ ID NO: 2568245 - DNA, 25 bp, Homo sapien
gaatgatcttgaccacgttgctggc

SEQ ID NO: 2568246 - DNA, 25 bp, Homo sapien
gagaatgatcttgaccacgttgctg

SEQ ID NO: 2568247 - DNA, 25 bp, Homo sapien
ctatgtggatgagaatgatcttgac

SEQ ID NO: 2568248 - DNA, 25 bp, Homo sapien
gctcatcacctggtcgaccagcatt

SEQ ID NO: 2568249 - DNA, 25 bp, Homo sapien
gaagtgttgggcagtgcatccagca

SEQ ID NO: 2568250 - DNA, 25 bp, Homo sapien
ctaaggtcaagtagaggaagtgttg

SEQ ID NO: 2568251 - DNA, 25 bp, Homo sapien
gaaatatacaggatgtccctgaggg

SEQ ID NO: 2568252 - DNA, 25 bp, Homo sapien
agtcctaggaggaagaactcagccc

SEQ ID NO: 2568253 - DNA, 25 bp, Homo sapien
catacatggctgtctcgtaggctga

SEQ ID NO: 2568254 - DNA, 25 bp, Homo sapien
cacgtatgtgtacatggcagcccca

SEQ ID NO: 2568255 - DNA, 25 bp, Homo sapien
caatcaaccagcagatcttgcggct

SEQ ID NO: 2568256 - DNA, 25 bp, Homo sapien
ctctcaaccctggattggtcttcag

SEQ ID NO: 2568257 - DNA, 25 bp, Homo sapien
tcagtgcccgatttggctacagcca

SEQ ID NO: 2568258 - DNA, 25 bp, Homo sapien
tcttcagtgcccgatttggctacag

SEQ ID NO: 2568259 - DNA, 25 bp, Homo sapien
aatgggttacaaccaatattgatcc

SEQ ID NO: 2568260 - DNA, 25 bp, Homo sapien
gacacaacgtacctgtaaagcttga

SEQ ID NO: 2568261 - DNA, 25 bp, Homo sapien
actagagctatgagaagtatctgcc

SEQ ID NO: 2568262 - DNA, 25 bp, Homo sapien
ccagtgtcctttctgtggcaataaa

SEQ ID NO: 2568263 - DNA, 25 bp, Homo sapien
gaagtcacaggttcttctaccaggg

SEQ ID NO: 2568264 - DNA, 25 bp, Homo sapien
cagaaatctggcagcttatttaacg

SEQ ID NO: 2568265 - DNA, 25 bp, Homo sapien
gaaatctggcagcttatttaacgac

SEQ ID NO: 2568266 - DNA, 25 bp, Homo sapien
agaaatctggcagcttatttaacga

SEQ ID NO: 2568267 - DNA, 25 bp, Homo sapien
gatgggtgatgaggcctgtgaggac

SEQ ID NO: 2568268 - DNA, 25 bp, Homo sapien
ggctgttatagccaccacaaagatg

SEQ ID NO: 2568269 - DNA, 25 bp, Homo sapien
cctgtgaggacgaagttagtggagt

SEQ ID NO: 2568270 - DNA, 25 bp, Homo sapien
acgaagttagtggagttctggagaa

SEQ ID NO: 2568271 - DNA, 25 bp, Homo sapien
ccataatgtgggaggaacacgtagc

SEQ ID NO: 2568272 - DNA, 25 bp, Homo sapien
ggagccgaccaccatgaataagcaa

SEQ ID NO: 2568273 - DNA, 25 bp, Homo sapien
gtaccgtagagggttgcacacagcc

SEQ ID NO: 2568274 - DNA, 25 bp, Homo sapien
gagtcagcatgaacccatccaagga

SEQ ID NO: 2568275 - DNA, 25 bp, Homo sapien
cttcctgatcacagtcgccaccctg

SEQ ID NO: 2568276 - DNA, 25 bp, Homo sapien
ccttcctgatcacagtcgccaccct

SEQ ID NO: 2568277 - DNA, 25 bp, Homo sapien
tgaattgctgaaagtgacactgaac

SEQ ID NO: 2568278 - DNA, 25 bp, Homo sapien
tgtaatagctgcgttattggccgca

SEQ ID NO: 2568279 - DNA, 25 bp, Homo sapien
gctagtccttcctgatcagtcacca

SEQ ID NO: 2568280 - DNA, 25 bp, Homo sapien
cagatgtttgcgctagtccttgcta

SEQ ID NO: 2568281 - DNA, 25 bp, Homo sapien
cttctgaatgaaaagccacctaggg

SEQ ID NO: 2568282 - DNA, 25 bp, Homo sapien
gatcgagaaggtgctagctaaggca

SEQ ID NO: 2568283 - DNA, 25 bp, Homo sapien
tatctacgtcagcaacaatggagga

SEQ ID NO: 2568284 - DNA, 25 bp, Homo sapien
gctgaattgaaataacaccgaggat

SEQ ID NO: 2568285 - DNA, 25 bp, Homo sapien
gacaataaatctaagccacgccagc

SEQ ID NO: 2568286 - DNA, 25 bp, Homo sapien
ccacgccagctcagtgaagctgctt

SEQ ID NO: 2568287 - DNA, 25 bp, Homo sapien
gttccatcagacaataaatctaagc

SEQ ID NO: 2568288 - DNA, 25 bp, Homo sapien
ataaatctaagccacgccagctcag

SEQ ID NO: 2568289 - DNA, 25 bp, Homo sapien
ctctcagcaaagagtcccgtgaggg

SEQ ID NO: 2568290 - DNA, 25 bp, Homo sapien
aaagaaggaaggtcacggtgtagag

SEQ ID NO: 2568291 - DNA, 25 bp, Homo sapien
gagggcagcatgcttgctctcagca

SEQ ID NO: 2568292 - DNA, 25 bp, Homo sapien
gagggtgaaatcagtgcttgctgtt

SEQ ID NO: 2568293 - DNA, 25 bp, Homo sapien
taatggagaggtctgcaaacagcag

SEQ ID NO: 2568294 - DNA, 25 bp, Homo sapien
tgagatccatgagcgcgagctggct

SEQ ID NO: 2568295 - DNA, 25 bp, Homo sapien
ggcacagtcacgcataggtacatga

SEQ ID NO: 2568296 - DNA, 25 bp, Homo sapien
cgcgagctggctgatgaagaagtac

SEQ ID NO: 2568297 - DNA, 25 bp, Homo sapien
cttatagagggagacgtcagagcag

SEQ ID NO: 2568298 - DNA, 25 bp, Homo sapien
aggattttcctagactggcaaaagg

SEQ ID NO: 2568299 - DNA, 25 bp, Homo sapien
atgtaggtgtagaaggaagcaccga

SEQ ID NO: 2568300 - DNA, 25 bp, Homo sapien
cggcagaattcatcctgtggatgag

SEQ ID NO: 2568301 - DNA, 25 bp, Homo sapien
gcactatgatcatgtgggaggagca

SEQ ID NO: 2568302 - DNA, 25 bp, Homo sapien
ccgaagagcagcagcactatgatca

SEQ ID NO: 2568303 - DNA, 25 bp, Homo sapien
atctttgttgcggagactgtaaatg

SEQ ID NO: 2568304 - DNA, 25 bp, Homo sapien
gttcagcacaggagtgaagatggtg

SEQ ID NO: 2568305 - DNA, 25 bp, Homo sapien
cacaggagtgaagatggtgtaaaag

SEQ ID NO: 2568306 - DNA, 25 bp, Homo sapien
tttgttgcggagactgtaaatgagg

SEQ ID NO: 2568307 - DNA, 25 bp, Homo sapien
attcttgactgcatcatgctcctca

SEQ ID NO: 2568308 - DNA, 25 bp, Homo sapien
cattcttgactgcatcatgctcctc

SEQ ID NO: 2568309 - DNA, 25 bp, Homo sapien
ttcgtaaggctctgagagtgcaggc

SEQ ID NO: 2568310 - DNA, 25 bp, Homo sapien
tcacttttcgtaaggctctgagagt

SEQ ID NO: 2568311 - DNA, 25 bp, Homo sapien
cttttcgtaaggctctgagagtgca

SEQ ID NO: 2568312 - DNA, 25 bp, Homo sapien
ctacttcacttttcgtaaggctctg

SEQ ID NO: 2568313 - DNA, 25 bp, Homo sapien
gtcccatgaggatgaaatccaactt

SEQ ID NO: 2568314 - DNA, 25 bp, Homo sapien
aatccaactttccagtgtggttggc

SEQ ID NO: 2568315 - DNA, 25 bp, Homo sapien
ccatgaggatgaaatccaactttcc

SEQ ID NO: 2568316 - DNA, 25 bp, Homo sapien
catgaggatgaaatccaactttcca

SEQ ID NO: 2568317 - DNA, 25 bp, Homo sapien
gtctgagcaggacaggatcgttaca

SEQ ID NO: 2568318 - DNA, 25 bp, Homo sapien
gatgaccacactaagtagagctgga

SEQ ID NO: 2568319 - DNA, 25 bp, Homo sapien
caggacaggatcgttacagcaggga

SEQ ID NO: 2568320 - DNA, 25 bp, Homo sapien
cctgctagtgtcagatagaggaaca

SEQ ID NO: 2568321 - DNA, 25 bp, Homo sapien
ctaaaggacgaatctcacagttaac

SEQ ID NO: 2568322 - DNA, 25 bp, Homo sapien
aaggacgaatctcacagttaacatt

SEQ ID NO: 2568323 - DNA, 25 bp, Homo sapien
acgaatctcacagttaacattttct

SEQ ID NO: 2568324 - DNA, 25 bp, Homo sapien
ggacgaatctcacagttaacatttt

SEQ ID NO: 2568325 - DNA, 25 bp, Homo sapien
taaacacacagttcctaagtaaaga

SEQ ID NO: 2568326 - DNA, 25 bp, Homo sapien
gagaaaccctgtgtcacgtatatta

SEQ ID NO: 2568327 - DNA, 25 bp, Homo sapien
cctgtgtcacgtatattaaacacac

SEQ ID NO: 2568328 - DNA, 25 bp, Homo sapien
taaagaccacggaaagatgggagga

SEQ ID NO: 2568329 - DNA, 25 bp, Homo sapien
ccttgtttctcaggatgtagatgag

SEQ ID NO: 2568330 - DNA, 25 bp, Homo sapien
ttgtttctcaggatgtagatgaggg

SEQ ID NO: 2568331 - DNA, 25 bp, Homo sapien
ggatgtagatgagggggtttagcat

SEQ ID NO: 2568332 - DNA, 25 bp, Homo sapien
atccttgtttctcaggatgtagatg

SEQ ID NO: 2568333 - DNA, 25 bp, Homo sapien
gtttagagacttgatgtgttcccag

SEQ ID NO: 2568334 - DNA, 25 bp, Homo sapien
tgtgttctgtttagagacttgatgt

SEQ ID NO: 2568335 - DNA, 25 bp, Homo sapien
ctaccgttgttttccacattgatat

SEQ ID NO: 2568336 - DNA, 25 bp, Homo sapien
tctgtttagagacttgatgtgttcc

SEQ ID NO: 2568337 - DNA, 25 bp, Homo sapien
cagggagagataccaaacacttggg

SEQ ID NO: 2568338 - DNA, 25 bp, Homo sapien
tctggaaagtatccactggcaggca

SEQ ID NO: 2568339 - DNA, 25 bp, Homo sapien
gaacatgggcttcagacttgcatca

SEQ ID NO: 2568340 - DNA, 25 bp, Homo sapien
cagatctacaccaacactaggcaga

SEQ ID NO: 2568341 - DNA, 25 bp, Homo sapien
tcaatatgctaacccctaggtggct

SEQ ID NO: 2568342 - DNA, 25 bp, Homo sapien
ggacagagcggttacatagttgaca

SEQ ID NO: 2568343 - DNA, 25 bp, Homo sapien
cctccattgttgctgacgtagataa

SEQ ID NO: 2568344 - DNA, 25 bp, Homo sapien
tcctggagggattaagtgaagaaac

SEQ ID NO: 2568345 - DNA, 25 bp, Homo sapien
ggcacaggctggagtattcttagtt

SEQ ID NO: 2568346 - DNA, 25 bp, Homo sapien
gtggcaatgggatttgctcagatgc

SEQ ID NO: 2568347 - DNA, 25 bp, Homo sapien
tattcttagttctactggttctaca

SEQ ID NO: 2568348 - DNA, 25 bp, Homo sapien
tctactggttctacactgtgaggtg

SEQ ID NO: 2568349 - DNA, 25 bp, Homo sapien
gccgaggacgttgcctgtagaatcc

SEQ ID NO: 2568350 - DNA, 25 bp, Homo sapien
tgacgcagccaatctgtgaccacga

SEQ ID NO: 2568351 - DNA, 25 bp, Homo sapien
ccttgggttcgtcagcatgggccga

SEQ ID NO: 2568352 - DNA, 25 bp, Homo sapien
gagtggctctgtgtggaccagtccc

SEQ ID NO: 2568353 - DNA, 25 bp, Homo sapien
gcgtgggatgggatggtcctgccgg

SEQ ID NO: 2568354 - DNA, 25 bp, Homo sapien
atggtcctgccggtttaggccgtga

SEQ ID NO: 2568355 - DNA, 25 bp, Homo sapien
cctgccggtttaggccgtgattctg

SEQ ID NO: 2568356 - DNA, 25 bp, Homo sapien
acctgccaaggcgtgggatgggatg

SEQ ID NO: 2568357 - DNA, 25 bp, Homo sapien
gccatgtgggaggtatgaccctggt

SEQ ID NO: 2568358 - DNA, 25 bp, Homo sapien
ttatcccatcggccatgtgggaggt

SEQ ID NO: 2568359 - DNA, 25 bp, Homo sapien
aatgaaaagctaagcgttggccagc

SEQ ID NO: 2568360 - DNA, 25 bp, Homo sapien
ctcaggaacaactggttttgcggcc

SEQ ID NO: 2568361 - DNA, 25 bp, Homo sapien
acaactggttttgcggccaaaggct

SEQ ID NO: 2568362 - DNA, 25 bp, Homo sapien
taagcgttggccagctcaggtttta

SEQ ID NO: 2568363 - DNA, 25 bp, Homo sapien
cagctgggtctagcatcacagggaa

SEQ ID NO: 2568364 - DNA, 25 bp, Homo sapien
gactactgatcctaccggaaaccaa

SEQ ID NO: 2568365 - DNA, 25 bp, Homo sapien
ggagactttataccccatgatcctg

SEQ ID NO: 2568366 - DNA, 25 bp, Homo sapien
gatcctgccccaccgttgctgttgt

SEQ ID NO: 2568367 - DNA, 25 bp, Homo sapien
ggagcacacgacttccttggagcct

SEQ ID NO: 2568368 - DNA, 25 bp, Homo sapien
catttccaacccagttgcgttggga

SEQ ID NO: 2568369 - DNA, 25 bp, Homo sapien
gcttaagatgctcatagcccagccc

SEQ ID NO: 2568370 - DNA, 25 bp, Homo sapien
tctgactctggtctgccgagatcca

SEQ ID NO: 2568371 - DNA, 25 bp, Homo sapien
ccggcctcgtcttctgtcctcactt

SEQ ID NO: 2568372 - DNA, 25 bp, Homo sapien
gcagagtgtaggtcccacttcaccc

SEQ ID NO: 2568373 - DNA, 25 bp, Homo sapien
ttttggtcatccacacccatgagca

SEQ ID NO: 2568374 - DNA, 25 bp, Homo sapien
tgtcctcacttttggtcatccacac

SEQ ID NO: 2568375 - DNA, 25 bp, Homo sapien
tttgacgacgactgtgacagcctga

SEQ ID NO: 2568376 - DNA, 25 bp, Homo sapien
actttgacgacgactgtgacagcct

SEQ ID NO: 2568377 - DNA, 25 bp, Homo sapien
cgggagacctttgactttgacgacg

SEQ ID NO: 2568378 - DNA, 25 bp, Homo sapien
gcgggagacctttgactttgacgac

SEQ ID NO: 2568379 - DNA, 25 bp, Homo sapien
acatcaccgatgagatgaagcgcat

SEQ ID NO: 2568380 - DNA, 25 bp, Homo sapien
ggctccatgaacatcaccgatgaga

SEQ ID NO: 2568381 - DNA, 25 bp, Homo sapien
cggacgatgaggtcggctccatgaa

SEQ ID NO: 2568382 - DNA, 25 bp, Homo sapien
aggtgaaccggttctcggacgatga

SEQ ID NO: 2568383 - DNA, 25 bp, Homo sapien
gccgctcgccttcccgcaaggtgtg

SEQ ID NO: 2568384 - DNA, 25 bp, Homo sapien
cgccttcccgcaaggtgtgggccat

SEQ ID NO: 2568385 - DNA, 25 bp, Homo sapien
gagtgagtcggcctaggcgtgccgg

SEQ ID NO: 2568386 - DNA, 25 bp, Homo sapien
tgagtcggcctaggcgtgccggccg

SEQ ID NO: 2568387 - DNA, 25 bp, Homo sapien
catccacacgtgcatcagtgctgag

SEQ ID NO: 2568388 - DNA, 25 bp, Homo sapien
gctgtccattttcgggggagaagac

SEQ ID NO: 2568389 - DNA, 25 bp, Homo sapien
aaagtcaggaggcaaggcatccaca

SEQ ID NO: 2568390 - DNA, 25 bp, Homo sapien
agaagacgggcttgcagcgtgccat

SEQ ID NO: 2568391 - DNA, 25 bp, Homo sapien
agctgcgctggaacctgccccttcc

SEQ ID NO: 2568392 - DNA, 25 bp, Homo sapien
gctgcgctggaacctgccccttccc

SEQ ID NO: 2568393 - DNA, 25 bp, Homo sapien
ctgcctcagctgcgctggaacctgc

SEQ ID NO: 2568394 - DNA, 25 bp, Homo sapien
tgcgctggaacctgccccttcccag

SEQ ID NO: 2568395 - DNA, 25 bp, Homo sapien
ggtctgggtttgcctgcgatgtggt

SEQ ID NO: 2568396 - DNA, 25 bp, Homo sapien
gggtttgcctgcgatgtggtctgag

SEQ ID NO: 2568397 - DNA, 25 bp, Homo sapien
gtttgcctgcgatgtggtctgagct

SEQ ID NO: 2568398 - DNA, 25 bp, Homo sapien
tctgggtttgcctgcgatgtggtct

SEQ ID NO: 2568399 - DNA, 25 bp, Homo sapien
agggttgaattgtctgcctgcctga

SEQ ID NO: 2568400 - DNA, 25 bp, Homo sapien
cttggttgtctggtgcgggccgggc

SEQ ID NO: 2568401 - DNA, 25 bp, Homo sapien
tgcagggaatgccagcccggctgcc

SEQ ID NO: 2568402 - DNA, 25 bp, Homo sapien
tgcccttggcctgaaagggttgaat

SEQ ID NO: 2568403 - DNA, 25 bp, Homo sapien
cagggctggagaatgactaagctga

SEQ ID NO: 2568404 - DNA, 25 bp, Homo sapien
ccagcagcatgcatttgtgctccat

SEQ ID NO: 2568405 - DNA, 25 bp, Homo sapien
ttggtagccagtcgtcaccagcagc

SEQ ID NO: 2568406 - DNA, 25 bp, Homo sapien
tggtagccagtcgtcaccagcagca

SEQ ID NO: 2568407 - DNA, 25 bp, Homo sapien
cttggtagccagtcgtcaccagcag

SEQ ID NO: 2568408 - DNA, 25 bp, Homo sapien
cttcacctccgcggcagtgaaaggc

SEQ ID NO: 2568409 - DNA, 25 bp, Homo sapien
cctggtggcctcacggatgccgttt

SEQ ID NO: 2568410 - DNA, 25 bp, Homo sapien
ctggtggcctcacggatgccgtttc

SEQ ID NO: 2568411 - DNA, 25 bp, Homo sapien
ccctggtggcctcacggatgccgtt

SEQ ID NO: 2568412 - DNA, 25 bp, Homo sapien
cagggtctctggacagttcaacaca

SEQ ID NO: 2568413 - DNA, 25 bp, Homo sapien
cacagggtctctggacagttcaaca

SEQ ID NO: 2568414 - DNA, 25 bp, Homo sapien
tggacagttcaacacaccgggcacc

SEQ ID NO: 2568415 - DNA, 25 bp, Homo sapien
tctctggacagttcaacacaccggg

SEQ ID NO: 2568416 - DNA, 25 bp, Homo sapien
acaggccctcagaaaggcgattcga

SEQ ID NO: 2568417 - DNA, 25 bp, Homo sapien
ctttcagagttgaacatccacaaac

SEQ ID NO: 2568418 - DNA, 25 bp, Homo sapien
gcaaagagtgcttggagtcctccag

SEQ ID NO: 2568419 - DNA, 25 bp, Homo sapien
cgattcgaaacatcaggcccctgag

SEQ ID NO: 2568420 - DNA, 25 bp, Homo sapien
acatcatcctcagggccacagtgtg

SEQ ID NO: 2568421 - DNA, 25 bp, Homo sapien
acacatcatcctcagggccacagtg

SEQ ID NO: 2568422 - DNA, 25 bp, Homo sapien
tcacacatcatcctcagggccacag

SEQ ID NO: 2568423 - DNA, 25 bp, Homo sapien
catcatcctcagggccacagtgtgc

SEQ ID NO: 2568424 - DNA, 25 bp, Homo sapien
cttgtaaacgatgagggagtcttcc

SEQ ID NO: 2568425 - DNA, 25 bp, Homo sapien
tgtccttgtaaacgatgagggagtc

SEQ ID NO: 2568426 - DNA, 25 bp, Homo sapien
tccttgtaaacgatgagggagtctt

SEQ ID NO: 2568427 - DNA, 25 bp, Homo sapien
tgtaaacgatgagggagtcttccat

SEQ ID NO: 2568428 - DNA, 25 bp, Homo sapien
ccggaataccgcagagcttggccct

SEQ ID NO: 2568429 - DNA, 25 bp, Homo sapien
gggcgatgccgtctctcttttgctc

SEQ ID NO: 2568430 - DNA, 25 bp, Homo sapien
gcccaggacagcgtccggaataccg

SEQ ID NO: 2568431 - DNA, 25 bp, Homo sapien
cgcactgtagtagacgccttcagag

SEQ ID NO: 2568432 - DNA, 25 bp, Homo sapien
cccacggagaaatatgtgctctttc

SEQ ID NO: 2568433 - DNA, 25 bp, Homo sapien
caatacaaggagtgtcccacggaga

SEQ ID NO: 2568434 - DNA, 25 bp, Homo sapien
caaggagtgtcccacggagaaatat

SEQ ID NO: 2568435 - DNA, 25 bp, Homo sapien
gagtgtcccacggagaaatatgtgc

SEQ ID NO: 2568436 - DNA, 25 bp, Homo sapien
tctcagtcctgtatgttaaccaatc

SEQ ID NO: 2568437 - DNA, 25 bp, Homo sapien
cagtcctgtatgttaaccaatcttg

SEQ ID NO: 2568438 - DNA, 25 bp, Homo sapien
tagtatcaaaaggttttggagggca

SEQ ID NO: 2568439 - DNA, 25 bp, Homo sapien
atgctctcagtcctgtatgttaacc

SEQ ID NO: 2568440 - DNA, 25 bp, Homo sapien
gagtctggccagacagaacctggtg

SEQ ID NO: 2568441 - DNA, 25 bp, Homo sapien
acctggtggcaggatactaattgca

SEQ ID NO: 2568442 - DNA, 25 bp, Homo sapien
tgttcgcttcttgtgggagagcaga

SEQ ID NO: 2568443 - DNA, 25 bp, Homo sapien
tcataagctcccaatcaggcagggc

SEQ ID NO: 2568444 - DNA, 25 bp, Homo sapien
aaagaaggccccgaagaatgtgctt

SEQ ID NO: 2568445 - DNA, 25 bp, Homo sapien
cacaaatggtctgaaagcatcaatg

SEQ ID NO: 2568446 - DNA, 25 bp, Homo sapien
tgtgcacacagcgtctatccagtgc

SEQ ID NO: 2568447 - DNA, 25 bp, Homo sapien
gaatgtgcttccatccgcttcctca

SEQ ID NO: 2568448 - DNA, 25 bp, Homo sapien
atgggaaaggcctcgtcgtagcaga

SEQ ID NO: 2568449 - DNA, 25 bp, Homo sapien
gttgcacacgaagtcggattgctca

SEQ ID NO: 2568450 - DNA, 25 bp, Homo sapien
gaggatccggaagatgaaaagcacg

SEQ ID NO: 2568451 - DNA, 25 bp, Homo sapien
tgagccagactctgccgatgacggt

SEQ ID NO: 2568452 - DNA, 25 bp, Homo sapien
gctcctccgcctcgcggcttttgcg

SEQ ID NO: 2568453 - DNA, 25 bp, Homo sapien
ttgacgctgccctggtccgggccgc

SEQ ID NO: 2568454 - DNA, 25 bp, Homo sapien
ggccgccgttagtccccgcctgctg

SEQ ID NO: 2568455 - DNA, 25 bp, Homo sapien
gcctcgcggcttttgcgcttctcct

SEQ ID NO: 2568456 - DNA, 25 bp, Homo sapien
gtacaggaagtagtggcccacgatg

SEQ ID NO: 2568457 - DNA, 25 bp, Homo sapien
gcccacttcaaagagggtcttgaag

SEQ ID NO: 2568458 - DNA, 25 bp, Homo sapien
ccaccggctgcagcggtacagaggc

SEQ ID NO: 2568459 - DNA, 25 bp, Homo sapien
caggatccggaacccgtacaggaag

SEQ ID NO: 2568460 - DNA, 25 bp, Homo sapien
tgtgctgatcttctcctcgaactga

SEQ ID NO: 2568461 - DNA, 25 bp, Homo sapien
tcacgttgaggaatagggacacaga

SEQ ID NO: 2568462 - DNA, 25 bp, Homo sapien
ggtggcccaactccatcacgttgag

SEQ ID NO: 2568463 - DNA, 25 bp, Homo sapien
tcttcttctaggagctgatagccct

SEQ ID NO: 2568464 - DNA, 25 bp, Homo sapien
cacagagagagttttggcaacttgc

SEQ ID NO: 2568465 - DNA, 25 bp, Homo sapien
gatttcacagagagagttttggcaa

SEQ ID NO: 2568466 - DNA, 25 bp, Homo sapien
agaacccaggggctacaatgagcca

SEQ ID NO: 2568467 - DNA, 25 bp, Homo sapien
tgagaactttaggtatctcctggac

SEQ ID NO: 2568468 - DNA, 25 bp, Homo sapien
tgtgtcctttccagggatgaagctt

SEQ ID NO: 2568469 - DNA, 25 bp, Homo sapien
tgaggatttcccctgaacagactct

SEQ ID NO: 2568470 - DNA, 25 bp, Homo sapien
gaatatgaggacaggagcccttcaa

SEQ ID NO: 2568471 - DNA, 25 bp, Homo sapien
tgtgtgagcacccactttgtgagag

SEQ ID NO: 2568472 - DNA, 25 bp, Homo sapien
taggacacccctggatgtaggtagg

SEQ ID NO: 2568473 - DNA, 25 bp, Homo sapien
cagtgtgggtacgttcattgaagca

SEQ ID NO: 2568474 - DNA, 25 bp, Homo sapien
taagcagtagccagaaaatcacgtg

SEQ ID NO: 2568475 - DNA, 25 bp, Homo sapien
tggcagccaactcaatctttaggac

SEQ ID NO: 2568476 - DNA, 25 bp, Homo sapien
taactacgaggcaggttggagggac

SEQ ID NO: 2568477 - DNA, 25 bp, Homo sapien
cttactgctgttggaggaatctctc

SEQ ID NO: 2568478 - DNA, 25 bp, Homo sapien
aggaatctctcagggaatggtacca

SEQ ID NO: 2568479 - DNA, 25 bp, Homo sapien
gggaatggtaccactcagcaggcct

SEQ ID NO: 2568480 - DNA, 25 bp, Homo sapien
gagtgtctatttcacgttgaaaaac

SEQ ID NO: 2568481 - DNA, 25 bp, Homo sapien
gtgtctatttcacgttgaaaaactc

SEQ ID NO: 2568482 - DNA, 25 bp, Homo sapien
tggagtgtctatttcacgttgaaaa

SEQ ID NO: 2568483 - DNA, 25 bp, Homo sapien
gtctatttcacgttgaaaaactcac

SEQ ID NO: 2568484 - DNA, 25 bp, Homo sapien
tggtcacagatatcccctgagggtg

SEQ ID NO: 2568485 - DNA, 25 bp, Homo sapien
tgtagctgcctagagtaaagaccac

SEQ ID NO: 2568486 - DNA, 25 bp, Homo sapien
catgcagctgcttctaaatggaaac

SEQ ID NO: 2568487 - DNA, 25 bp, Homo sapien
tatctaacaagggaccgactaggag

SEQ ID NO: 2568488 - DNA, 25 bp, Homo sapien
cacagaccttcaggaatatctgtcc

SEQ ID NO: 2568489 - DNA, 25 bp, Homo sapien
tgggtccccaggtcacacagacctt

SEQ ID NO: 2568490 - DNA, 25 bp, Homo sapien
tgtgggtccccaggtcacacagacc

SEQ ID NO: 2568491 - DNA, 25 bp, Homo sapien
tgtccagtgctgtactggatgcttc

SEQ ID NO: 2568492 - DNA, 25 bp, Homo sapien
caaccaattcttgcgtgattaaaga

SEQ ID NO: 2568493 - DNA, 25 bp, Homo sapien
accaattcttgcgtgattaaagaca

SEQ ID NO: 2568494 - DNA, 25 bp, Homo sapien
caattcttgcgtgattaaagacatt

SEQ ID NO: 2568495 - DNA, 25 bp, Homo sapien
gcaaccaattcttgcgtgattaaag

SEQ ID NO: 2568496 - DNA, 25 bp, Homo sapien
aatcttgtcctaggccttccacatg

SEQ ID NO: 2568497 - DNA, 25 bp, Homo sapien
catatgtgagctctactaagccgag

SEQ ID NO: 2568498 - DNA, 25 bp, Homo sapien
tagagcacgcctaatgacccttctc

SEQ ID NO: 2568499 - DNA, 25 bp, Homo sapien
gacccttctcgggaactggagagga

SEQ ID NO: 2568500 - DNA, 25 bp, Homo sapien
tgcacacagtatgcatagagggtaa

SEQ ID NO: 2568501 - DNA, 25 bp, Homo sapien
caggcaaacctttctcatctaaact

SEQ ID NO: 2568502 - DNA, 25 bp, Homo sapien
gattgtatttacactcagaagagtt

SEQ ID NO: 2568503 - DNA, 25 bp, Homo sapien
ggtacacacttagtagttttacaga

SEQ ID NO: 2568504 - DNA, 25 bp, Homo sapien
gagaatacaggaccaccatcccaat

SEQ ID NO: 2568505 - DNA, 25 bp, Homo sapien
taacacacgactattagctctggca

SEQ ID NO: 2568506 - DNA, 25 bp, Homo sapien
cccaggaagtttgttatgaatgtgc

SEQ ID NO: 2568507 - DNA, 25 bp, Homo sapien
aaaaattgcagaaaaaggccatggg

SEQ ID NO: 2568508 - DNA, 25 bp, Homo sapien
ggagctggtttgtactggctgacaa

SEQ ID NO: 2568509 - DNA, 25 bp, Homo sapien
cagtggcattaggttggtagcttga

SEQ ID NO: 2568510 - DNA, 25 bp, Homo sapien
tactcaatggtacacatcagtcgta

SEQ ID NO: 2568511 - DNA, 25 bp, Homo sapien
cagtcgtatggtggaaacccttatc

SEQ ID NO: 2568512 - DNA, 25 bp, Homo sapien
tagccattgtttgccactcatccag

SEQ ID NO: 2568513 - DNA, 25 bp, Homo sapien
tcatccagagattggcagccagtcc

SEQ ID NO: 2568514 - DNA, 25 bp, Homo sapien
gccactcatccagagattggcagcc

SEQ ID NO: 2568515 - DNA, 25 bp, Homo sapien
tgtttgccactcatccagagattgg

SEQ ID NO: 2568516 - DNA, 25 bp, Homo sapien
ctgccatcctcttagaatagtggga

SEQ ID NO: 2568517 - DNA, 25 bp, Homo sapien
atattctcccgatccactctagctg

SEQ ID NO: 2568518 - DNA, 25 bp, Homo sapien
gaatagtgggatcttttggttctgc

SEQ ID NO: 2568519 - DNA, 25 bp, Homo sapien
ctgcctccatggacagtcacaccat

SEQ ID NO: 2568520 - DNA, 25 bp, Homo sapien
ttagtatccaattgactctcctttc

SEQ ID NO: 2568521 - DNA, 25 bp, Homo sapien
ccaattgactctcctttcaaagcaa

SEQ ID NO: 2568522 - DNA, 25 bp, Homo sapien
ttctgctggtggtggactctgacac

SEQ ID NO: 2568523 - DNA, 25 bp, Homo sapien
tggactctgacactaaaatggcttg

SEQ ID NO: 2568524 - DNA, 25 bp, Homo sapien
cagcccgacgccgtcaagctgcgcc

SEQ ID NO: 2568525 - DNA, 25 bp, Homo sapien
acaggccccctcacacggtctgcct

SEQ ID NO: 2568526 - DNA, 25 bp, Homo sapien
tgcgccccagtcagccaatcagcgg

SEQ ID NO: 2568527 - DNA, 25 bp, Homo sapien
acacggtctgccttctcccaggtgc

SEQ ID NO: 2568528 - DNA, 25 bp, Homo sapien
gaggtaatcatgatgctggagtcga

SEQ ID NO: 2568529 - DNA, 25 bp, Homo sapien
taatcatgatgctggagtcgatcag

SEQ ID NO: 2568530 - DNA, 25 bp, Homo sapien
tgctggagtcgatcaggaaactcat

SEQ ID NO: 2568531 - DNA, 25 bp, Homo sapien
tcatgatgctggagtcgatcaggaa

SEQ ID NO: 2568532 - DNA, 25 bp, Homo sapien
gctcttagcctggaggtcggcggac

SEQ ID NO: 2568533 - DNA, 25 bp, Homo sapien
accgaaattccggggatggatgccg

SEQ ID NO: 2568534 - DNA, 25 bp, Homo sapien
tggcggcgccggctcttagcctgga

SEQ ID NO: 2568535 - DNA, 25 bp, Homo sapien
tcggcggaccgcttccaaaagtgga

SEQ ID NO: 2568536 - DNA, 25 bp, Homo sapien
gacgaaacttctattgagcagagac

SEQ ID NO: 2568537 - DNA, 25 bp, Homo sapien
tacaaacaaatgaaggtggccaatg

SEQ ID NO: 2568538 - DNA, 25 bp, Homo sapien
gattacatggtaaaagcaagaggct

SEQ ID NO: 2568539 - DNA, 25 bp, Homo sapien
ggacgaggtgtcagtgcaaaaacga

SEQ ID NO: 2568540 - DNA, 25 bp, Homo sapien
tcatagtctttaaacaattggcgca

SEQ ID NO: 2568541 - DNA, 25 bp, Homo sapien
tagtctttaaacaattggcgcatga

SEQ ID NO: 2568542 - DNA, 25 bp, Homo sapien
catagtctttaaacaattggcgcat

SEQ ID NO: 2568543 - DNA, 25 bp, Homo sapien
gtctttaaacaattggcgcatgaag

SEQ ID NO: 2568544 - DNA, 25 bp, Homo sapien
tataaggcttgcaattcagggccag

SEQ ID NO: 2568545 - DNA, 25 bp, Homo sapien
tttggtaaaagcttcctatcttgga

SEQ ID NO: 2568546 - DNA, 25 bp, Homo sapien
cctgatagccttgggattttggtat

SEQ ID NO: 2568547 - DNA, 25 bp, Homo sapien
taatccttgctcctaacttctgggc

SEQ ID NO: 2568548 - DNA, 25 bp, Homo sapien
gagaagatcacctgtacaacatact

SEQ ID NO: 2568549 - DNA, 25 bp, Homo sapien
gaagatcacctgtacaacatactga

SEQ ID NO: 2568550 - DNA, 25 bp, Homo sapien
agaagatcacctgtacaacatactg

SEQ ID NO: 2568551 - DNA, 25 bp, Homo sapien
agatcacctgtacaacatactgacg

SEQ ID NO: 2568552 - DNA, 25 bp, Homo sapien
agatttcaaagatgatgagctcaaa

SEQ ID NO: 2568553 - DNA, 25 bp, Homo sapien
gctattcaatactcctaagatttca

SEQ ID NO: 2568554 - DNA, 25 bp, Homo sapien
tttcaaagatgatgagctcaaacat

SEQ ID NO: 2568555 - DNA, 25 bp, Homo sapien
ctgctattcaatactcctaagattt

SEQ ID NO: 2568556 - DNA, 25 bp, Homo sapien
tggcaggcatcacgaaacaaagagc

SEQ ID NO: 2568557 - DNA, 25 bp, Homo sapien
taccctacagggagtgaataccatt

SEQ ID NO: 2568558 - DNA, 25 bp, Homo sapien
catttagactagatacattgacagc

SEQ ID NO: 2568559 - DNA, 25 bp, Homo sapien
ttccttccttagtacagatggcagg

SEQ ID NO: 2568560 - DNA, 25 bp, Homo sapien
acaggtaaaatattgggccaagcct

SEQ ID NO: 2568561 - DNA, 25 bp, Homo sapien
atctattcatatgtgcttactggcc

SEQ ID NO: 2568562 - DNA, 25 bp, Homo sapien
tattctagatacgagtcccagtcca

SEQ ID NO: 2568563 - DNA, 25 bp, Homo sapien
ggcctaagtggttaaatggcttaca

SEQ ID NO: 2568564 - DNA, 25 bp, Homo sapien
tgctcacaataaaatagccaatgta

SEQ ID NO: 2568565 - DNA, 25 bp, Homo sapien
tgaaaaccaggatcagcagaattac

SEQ ID NO: 2568566 - DNA, 25 bp, Homo sapien
tcagcagaattacacacaggttcat

SEQ ID NO: 2568567 - DNA, 25 bp, Homo sapien
agccaatgtaaaaaggcaccatgaa

SEQ ID NO: 2568568 - DNA, 25 bp, Homo sapien
gaaaaaagcagtcgttgtttatgca

SEQ ID NO: 2568569 - DNA, 25 bp, Homo sapien
ggaaaaaagcagtcgttgtttatgc

SEQ ID NO: 2568570 - DNA, 25 bp, Homo sapien
aggaaaaaagcagtcgttgtttatg

SEQ ID NO: 2568571 - DNA, 25 bp, Homo sapien
tgggctgagaatgggaaagggatct

SEQ ID NO: 2568572 - DNA, 25 bp, Homo sapien
tgttttgggctgagaatgggaaagg

SEQ ID NO: 2568573 - DNA, 25 bp, Homo sapien
ttttgggctgagaatgggaaaggga

SEQ ID NO: 2568574 - DNA, 25 bp, Homo sapien
catgttttgggctgagaatgggaaa

SEQ ID NO: 2568575 - DNA, 25 bp, Homo sapien
tagtgcaagtcgttcccttcgttga

SEQ ID NO: 2568576 - DNA, 25 bp, Homo sapien
cactggtcatgtgagctgaatgcac

SEQ ID NO: 2568577 - DNA, 25 bp, Homo sapien
tgaaaggacaatagatacaatggcc

SEQ ID NO: 2568578 - DNA, 25 bp, Homo sapien
tcagtttccacactaggcactaggg

SEQ ID NO: 2568579 - DNA, 25 bp, Homo sapien
tctaggatagaattcactacagcca

SEQ ID NO: 2568580 - DNA, 25 bp, Homo sapien
aaatgccagagctatataattcagg

SEQ ID NO: 2568581 - DNA, 25 bp, Homo sapien
actcgttttagaggtcagtgcaacc

SEQ ID NO: 2568582 - DNA, 25 bp, Homo sapien
tattccttttctgactactggcctc

SEQ ID NO: 2568583 - DNA, 25 bp, Homo sapien
tcccctaaggtgatactcttttgct

SEQ ID NO: 2568584 - DNA, 25 bp, Homo sapien
gatctcttttattgggtgatagcag

SEQ ID NO: 2568585 - DNA, 25 bp, Homo sapien
tcccatatgcttcagagtgatctct

SEQ ID NO: 2568586 - DNA, 25 bp, Homo sapien
taaatagcaggaactactttgtgct

SEQ ID NO: 2568587 - DNA, 25 bp, Homo sapien
tccagaaagaagagccatgagagtc

SEQ ID NO: 2568588 - DNA, 25 bp, Homo sapien
tgggcagttgacagcaccaaatcca

SEQ ID NO: 2568589 - DNA, 25 bp, Homo sapien
ggaagtaagacatgtaagtgtatgg

SEQ ID NO: 2568590 - DNA, 25 bp, Homo sapien
aaagaagagccatgagagtcactcc

SEQ ID NO: 2568591 - DNA, 25 bp, Homo sapien
taaaggcaagccgtacaagtgataa

SEQ ID NO: 2568592 - DNA, 25 bp, Homo sapien
catttaggatgtatgtttaagcaca

SEQ ID NO: 2568593 - DNA, 25 bp, Homo sapien
agaaagatttccaggtcaatgccca

SEQ ID NO: 2568594 - DNA, 25 bp, Homo sapien
tactgttctgttaatatctaggagg

SEQ ID NO: 2568595 - DNA, 25 bp, Homo sapien
tccatggtttgcagcagtcgccgtt

SEQ ID NO: 2568596 - DNA, 25 bp, Homo sapien
tagaatatccgtgtcagtcacattc

SEQ ID NO: 2568597 - DNA, 25 bp, Homo sapien
tccagggctagaatatccgtgtcag

SEQ ID NO: 2568598 - DNA, 25 bp, Homo sapien
agcagtcgccgttccagggctagaa

SEQ ID NO: 2568599 - DNA, 25 bp, Homo sapien
tgtgtaatctggatccacttggagt

SEQ ID NO: 2568600 - DNA, 25 bp, Homo sapien
cttggagttagtatctattggctgc

SEQ ID NO: 2568601 - DNA, 25 bp, Homo sapien
tatcttgaacattggtcacatcgtc

SEQ ID NO: 2568602 - DNA, 25 bp, Homo sapien
tacctgcagcagctaatgtttctgc

SEQ ID NO: 2568603 - DNA, 25 bp, Homo sapien
ttaacagtcttttacagagcgaaag

SEQ ID NO: 2568604 - DNA, 25 bp, Homo sapien
cgggccttaacagtcttttacagag

SEQ ID NO: 2568605 - DNA, 25 bp, Homo sapien
tcaagtaaagaactttttgtgtagc

SEQ ID NO: 2568606 - DNA, 25 bp, Homo sapien
cttttacagagcgaaagtgttaaat

SEQ ID NO: 2568607 - DNA, 25 bp, Homo sapien
ccgactagtacagtggtagctgctg

SEQ ID NO: 2568608 - DNA, 25 bp, Homo sapien
gaggaccgactagtacagtggtagc

SEQ ID NO: 2568609 - DNA, 25 bp, Homo sapien
gaccgactagtacagtggtagctgc

SEQ ID NO: 2568610 - DNA, 25 bp, Homo sapien
ctgtggaggaccgactagtacagtg

SEQ ID NO: 2568611 - DNA, 25 bp, Homo sapien
cttctgtaatctgtcctacaggtga

SEQ ID NO: 2568612 - DNA, 25 bp, Homo sapien
gtcctacaggtgaataagtcaacag

SEQ ID NO: 2568613 - DNA, 25 bp, Homo sapien
gtgaataagtcaacaggaaacctac

SEQ ID NO: 2568614 - DNA, 25 bp, Homo sapien
caggtgaataagtcaacaggaaacc

SEQ ID NO: 2568615 - DNA, 25 bp, Homo sapien
gcacttcccccttctggaacattgt

SEQ ID NO: 2568616 - DNA, 25 bp, Homo sapien
gctgaagtggtaacactttttatca

SEQ ID NO: 2568617 - DNA, 25 bp, Homo sapien
cctgatggtttgttatgcacttccc

SEQ ID NO: 2568618 - DNA, 25 bp, Homo sapien
tttcacttcctgatgctgaagtggt

SEQ ID NO: 2568619 - DNA, 25 bp, Homo sapien
gaatcaagcagagggacaaaggata

SEQ ID NO: 2568620 - DNA, 25 bp, Homo sapien
aagaatcaagcagagggacaaagga

SEQ ID NO: 2568621 - DNA, 25 bp, Homo sapien
tgctcttggtccagagttgagaaaa

SEQ ID NO: 2568622 - DNA, 25 bp, Homo sapien
cttggtccagagttgagaaaaagaa

SEQ ID NO: 2568623 - DNA, 25 bp, Homo sapien
taggtagccattatgctttatggtg

SEQ ID NO: 2568624 - DNA, 25 bp, Homo sapien
attactttagaaatgggccatttat

SEQ ID NO: 2568625 - DNA, 25 bp, Homo sapien
caaaatgtcactggagaagcagagc

SEQ ID NO: 2568626 - DNA, 25 bp, Homo sapien
gaagcagagctacttaaaatttgtt

SEQ ID NO: 2568627 - DNA, 25 bp, Homo sapien
tcttagcactcagcctggaaatagg

SEQ ID NO: 2568628 - DNA, 25 bp, Homo sapien
ttttccaagaactcaatcaggtaga

SEQ ID NO: 2568629 - DNA, 25 bp, Homo sapien
tagtggctactactggcatggttca

SEQ ID NO: 2568630 - DNA, 25 bp, Homo sapien
tcccatgattagagggtaagctcct

SEQ ID NO: 2568631 - DNA, 25 bp, Homo sapien
cattttgcacataaggaaagtgaag

SEQ ID NO: 2568632 - DNA, 25 bp, Homo sapien
ccattttgcacataaggaaagtgaa

SEQ ID NO: 2568633 - DNA, 25 bp, Homo sapien
tcttttatatcttatcttcatggga

SEQ ID NO: 2568634 - DNA, 25 bp, Homo sapien
tatcttcatgggattgtcttatgcc

SEQ ID NO: 2568635 - DNA, 25 bp, Homo sapien
catgggattgtcttatgccatggtg

SEQ ID NO: 2568636 - DNA, 25 bp, Homo sapien
gggattgtcttatgccatggtgtta

SEQ ID NO: 2568637 - DNA, 25 bp, Homo sapien
tcctacagtggattcccggagttgc

SEQ ID NO: 2568638 - DNA, 25 bp, Homo sapien
agagcatcgccaccaaacaattacc

SEQ ID NO: 2568639 - DNA, 25 bp, Homo sapien
tttcccaacctctgacgcaggtgtg

SEQ ID NO: 2568640 - DNA, 25 bp, Homo sapien
aaaagcttctccatcaagagcatcg

SEQ ID NO: 2568641 - DNA, 25 bp, Homo sapien
gtagcatatagatcagctgtttcca

SEQ ID NO: 2568642 - DNA, 25 bp, Homo sapien
tggtagcatatagatcagctgtttc

SEQ ID NO: 2568643 - DNA, 25 bp, Homo sapien
gcatatagatcagctgtttccagaa

SEQ ID NO: 2568644 - DNA, 25 bp, Homo sapien
tagcatatagatcagctgtttccag

SEQ ID NO: 2568645 - DNA, 25 bp, Homo sapien
aggttttggagtattctattctctc

SEQ ID NO: 2568646 - DNA, 25 bp, Homo sapien
gaaggttttggagtattctattctc

SEQ ID NO: 2568647 - DNA, 25 bp, Homo sapien
ccttgaaggttttggagtattctat

SEQ ID NO: 2568648 - DNA, 25 bp, Homo sapien
ttttccaaacacagtaaatagagaa

SEQ ID NO: 2568649 - DNA, 25 bp, Homo sapien
gactatcgtcttcgtggttcagcag

SEQ ID NO: 2568650 - DNA, 25 bp, Homo sapien
tatgagcagaactgatctccctggg

SEQ ID NO: 2568651 - DNA, 25 bp, Homo sapien
gaaatgtcagcaactccaggtaggg

SEQ ID NO: 2568652 - DNA, 25 bp, Homo sapien
gaaaagcagggtagtgcaacagccc

SEQ ID NO: 2568653 - DNA, 25 bp, Homo sapien
ggacaaatccacaatagctggatcc

SEQ ID NO: 2568654 - DNA, 25 bp, Homo sapien
cctaatgacagagcttcaaaatacg

SEQ ID NO: 2568655 - DNA, 25 bp, Homo sapien
tattctactcacatacaggtaagac

SEQ ID NO: 2568656 - DNA, 25 bp, Homo sapien
tggatcccctctctcaataactgat

SEQ ID NO: 2568657 - DNA, 25 bp, Homo sapien
tcccagataattcacagtgatctca

SEQ ID NO: 2568658 - DNA, 25 bp, Homo sapien
tggattcccagataattcacagtga

SEQ ID NO: 2568659 - DNA, 25 bp, Homo sapien
attcccagataattcacagtgatct

SEQ ID NO: 2568660 - DNA, 25 bp, Homo sapien
ttcccagataattcacagtgatctc

SEQ ID NO: 2568661 - DNA, 25 bp, Homo sapien
aagagtgatcagcaatcctctgatg

SEQ ID NO: 2568662 - DNA, 25 bp, Homo sapien
taagagtgatcagcaatcctctgat

SEQ ID NO: 2568663 - DNA, 25 bp, Homo sapien
agacacttctcatgtgcagccaaca

SEQ ID NO: 2568664 - DNA, 25 bp, Homo sapien
cagacacatggaaaaatgctgatca

SEQ ID NO: 2568665 - DNA, 25 bp, Homo sapien
acttctcatgtgcagccaacagaca

SEQ ID NO: 2568666 - DNA, 25 bp, Homo sapien
aacagacacttctcatgtgcagcca

SEQ ID NO: 2568667 - DNA, 25 bp, Homo sapien
aactgtgctagatgcctgcagatcc

SEQ ID NO: 2568668 - DNA, 25 bp, Homo sapien
tgtaattgttagtaggctcccacgc

SEQ ID NO: 2568669 - DNA, 25 bp, Homo sapien
tccagcccactccaagcggttgtaa

SEQ ID NO: 2568670 - DNA, 25 bp, Homo sapien
ggactcactttccacctccgtgaag

SEQ ID NO: 2568671 - DNA, 25 bp, Homo sapien
tctgtgctaatagcaggacaatgac

SEQ ID NO: 2568672 - DNA, 25 bp, Homo sapien
aggacaatgacattggaggacttac

SEQ ID NO: 2568673 - DNA, 25 bp, Homo sapien
cattatctgtgctaatagcaggaca

SEQ ID NO: 2568674 - DNA, 25 bp, Homo sapien
ctaatagcaggacaatgacattgga

SEQ ID NO: 2568675 - DNA, 25 bp, Homo sapien
atccagaagtgactctgaatgtagt

SEQ ID NO: 2568676 - DNA, 25 bp, Homo sapien
gaagtgactctgaatgtagtgagga

SEQ ID NO: 2568677 - DNA, 25 bp, Homo sapien
aatgtagtgaggaacaggacaaagg

SEQ ID NO: 2568678 - DNA, 25 bp, Homo sapien
gactctgaatgtagtgaggaacagg

SEQ ID NO: 2568679 - DNA, 25 bp, Homo sapien
gagtatgctagagagagcgctgacc

SEQ ID NO: 2568680 - DNA, 25 bp, Homo sapien
caaggacttcagtgattatggtgcg

SEQ ID NO: 2568681 - DNA, 25 bp, Homo sapien
tactcattcggatcagcagcacaga

SEQ ID NO: 2568682 - DNA, 25 bp, Homo sapien
tgagccaaatagaggaagagtatgc

SEQ ID NO: 2568683 - DNA, 25 bp, Homo sapien
ctaacagtctgtagtaggcttaagt

SEQ ID NO: 2568684 - DNA, 25 bp, Homo sapien
ctctaacagtctgtagtaggcttaa

SEQ ID NO: 2568685 - DNA, 25 bp, Homo sapien
tctaacagtctgtagtaggcttaag

SEQ ID NO: 2568686 - DNA, 25 bp, Homo sapien
aggagtatgctatgaaggtgaaaaa

SEQ ID NO: 2568687 - DNA, 25 bp, Homo sapien
gaaggtgaaaaatgctaccatagca

SEQ ID NO: 2568688 - DNA, 25 bp, Homo sapien
ctatgaaggtgaaaaatgctaccat

SEQ ID NO: 2568689 - DNA, 25 bp, Homo sapien
gagtatgctatgaaggtgaaaaatg

SEQ ID NO: 2568690 - DNA, 25 bp, Homo sapien
gatgctactcatggtcatagtatca

SEQ ID NO: 2568691 - DNA, 25 bp, Homo sapien
cgcctctacaccagcctcatatcca

SEQ ID NO: 2568692 - DNA, 25 bp, Homo sapien
atgttctggctgatgctactcatgg

SEQ ID NO: 2568693 - DNA, 25 bp, Homo sapien
gagtattgtcttgagttagttctcc

SEQ ID NO: 2568694 - DNA, 25 bp, Homo sapien
ctctgattttaatgagtcaatctca

SEQ ID NO: 2568695 - DNA, 25 bp, Homo sapien
caaggcaaagctataaccttttcca

SEQ ID NO: 2568696 - DNA, 25 bp, Homo sapien
tttaatgagtcaatctcaaggcaaa

SEQ ID NO: 2568697 - DNA, 25 bp, Homo sapien
caaagctataaccttttccatgtga

SEQ ID NO: 2568698 - DNA, 25 bp, Homo sapien
ccaagctatgcttgataaaatgaac

SEQ ID NO: 2568699 - DNA, 25 bp, Homo sapien
atgttagatcacacaagcataataa

SEQ ID NO: 2568700 - DNA, 25 bp, Homo sapien
ggttattttaatggggcaggatcag

SEQ ID NO: 2568701 - DNA, 25 bp, Homo sapien
tgataaaatgaacgtaaggcaaaag

SEQ ID NO: 2568702 - DNA, 25 bp, Homo sapien
taaatgttgtcatggtcccacaccc

SEQ ID NO: 2568703 - DNA, 25 bp, Homo sapien
gaactgcccaatggctctgtcaagg

SEQ ID NO: 2568704 - DNA, 25 bp, Homo sapien
tctgcaggctggctaaaggtgaaaa

SEQ ID NO: 2568705 - DNA, 25 bp, Homo sapien
tcaagtccaccagatactacagagg

SEQ ID NO: 2568706 - DNA, 25 bp, Homo sapien
taaagtcacgcagcttagtaaagac

SEQ ID NO: 2568707 - DNA, 25 bp, Homo sapien
ggtggtgatatcttaggccctcctc

SEQ ID NO: 2568708 - DNA, 25 bp, Homo sapien
gccctcctcatagattaggaaaccg

SEQ ID NO: 2568709 - DNA, 25 bp, Homo sapien
gtggtatctgaacccaaattcttgg

SEQ ID NO: 2568710 - DNA, 25 bp, Homo sapien
tggctacaagtatgcccactgactt

SEQ ID NO: 2568711 - DNA, 25 bp, Homo sapien
tgagttctgagcaggaaacgagcct

SEQ ID NO: 2568712 - DNA, 25 bp, Homo sapien
gggctccagcagaaaatctgtttta

SEQ ID NO: 2568713 - DNA, 25 bp, Homo sapien
gagggtaggtcaaatcatcaaggac

SEQ ID NO: 2568714 - DNA, 25 bp, Homo sapien
caggcactgttacctttgctgagaa

SEQ ID NO: 2568715 - DNA, 25 bp, Homo sapien
cctgttctgaggtgcatctttgagc

SEQ ID NO: 2568716 - DNA, 25 bp, Homo sapien
tctgagtgcccagatagtcattcac

SEQ ID NO: 2568717 - DNA, 25 bp, Homo sapien
ttttgatagtatcctcagctgcagc

SEQ ID NO: 2568718 - DNA, 25 bp, Homo sapien
tacatacctttcttagcggcctgtg

SEQ ID NO: 2568719 - DNA, 25 bp, Homo sapien
catctcatgtccgaatctcctctag

SEQ ID NO: 2568720 - DNA, 25 bp, Homo sapien
gggtttaactcatagggtgaatgca

SEQ ID NO: 2568721 - DNA, 25 bp, Homo sapien
tcagtaatggaattgtcaactccca

SEQ ID NO: 2568722 - DNA, 25 bp, Homo sapien
tgtgggatgatggagcttctcttcc

SEQ ID NO: 2568723 - DNA, 25 bp, Homo sapien
tacacaggaaattcatccaggcctt

SEQ ID NO: 2568724 - DNA, 25 bp, Homo sapien
cctaattgtgaaacaggctctatac

SEQ ID NO: 2568725 - DNA, 25 bp, Homo sapien
ggctttcaaagacccaggagctgga

SEQ ID NO: 2568726 - DNA, 25 bp, Homo sapien
tggggagaatgccaccgctgaacta

SEQ ID NO: 2568727 - DNA, 25 bp, Homo sapien
agaatgccaccgctgaactaccaat

SEQ ID NO: 2568728 - DNA, 25 bp, Homo sapien
tgctttggccgggagttgaacccag

SEQ ID NO: 2568729 - DNA, 25 bp, Homo sapien
atgccaccgctgaactaccaatgct

SEQ ID NO: 2568730 - DNA, 25 bp, Homo sapien
tgcccggagactagatgaaagtagc

SEQ ID NO: 2568731 - DNA, 25 bp, Homo sapien
gaaagtccagcacgagaatccgtct

SEQ ID NO: 2568732 - DNA, 25 bp, Homo sapien
tccagaggtggcaggtttagcttcc

SEQ ID NO: 2568733 - DNA, 25 bp, Homo sapien
cgtctgatggcctttggattactca

SEQ ID NO: 2568734 - DNA, 25 bp, Homo sapien
ttagtggttccaacatagtatggcc

SEQ ID NO: 2568735 - DNA, 25 bp, Homo sapien
aatcatcccttgtccaccgtagtcg

SEQ ID NO: 2568736 - DNA, 25 bp, Homo sapien
cagtccttcgaaggagtgtccaaga

SEQ ID NO: 2568737 - DNA, 25 bp, Homo sapien
aactactgttagactggtgagctgg

SEQ ID NO: 2568738 - DNA, 25 bp, Homo sapien
tcagtagaacgagcttgaaccagcc

SEQ ID NO: 2568739 - DNA, 25 bp, Homo sapien
tgtgctgggtagaagaaagttgcca

SEQ ID NO: 2568740 - DNA, 25 bp, Homo sapien
cctcatgtcgtatgggagacacgga

SEQ ID NO: 2568741 - DNA, 25 bp, Homo sapien
tgaaccagccaactccagacttgga

SEQ ID NO: 2568742 - DNA, 25 bp, Homo sapien
tcagcaaggcccttactgtctttcc

SEQ ID NO: 2568743 - DNA, 25 bp, Homo sapien
cagcaaggcccttactgtctttcct

SEQ ID NO: 2568744 - DNA, 25 bp, Homo sapien
gctctcagcaaggcccttactgtct

SEQ ID NO: 2568745 - DNA, 25 bp, Homo sapien
tctcagcaaggcccttactgtcttt

SEQ ID NO: 2568746 - DNA, 25 bp, Homo sapien
ccaggaactcgagtatgaaaagctg

SEQ ID NO: 2568747 - DNA, 25 bp, Homo sapien
aggagaccagggtgataattgagct

SEQ ID NO: 2568748 - DNA, 25 bp, Homo sapien
ggacccaggaactcgagtatgaaaa

SEQ ID NO: 2568749 - DNA, 25 bp, Homo sapien
cttcaggacccaggaactcgagtat

SEQ ID NO: 2568750 - DNA, 25 bp, Homo sapien
tctttgcctccctgttgcttggttc

SEQ ID NO: 2568751 - DNA, 25 bp, Homo sapien
ctctttgcctccctgttgcttggtt

SEQ ID NO: 2568752 - DNA, 25 bp, Homo sapien
tctctttgcctccctgttgcttggt

SEQ ID NO: 2568753 - DNA, 25 bp, Homo sapien
attctaccactgaactgccaacgcc

SEQ ID NO: 2568754 - DNA, 25 bp, Homo sapien
tgcatttgccggaaatggaatccag

SEQ ID NO: 2568755 - DNA, 25 bp, Homo sapien
ttgccggaaatggaatccaggtctc

SEQ ID NO: 2568756 - DNA, 25 bp, Homo sapien
aaatggaatccaggtctcccgggtg

SEQ ID NO: 2568757 - DNA, 25 bp, Homo sapien
aagacagtctctgcaaagtctcggc

SEQ ID NO: 2568758 - DNA, 25 bp, Homo sapien
cagtctctgcaaagtctcggcttag

SEQ ID NO: 2568759 - DNA, 25 bp, Homo sapien
gcttcaaagacagtctctgcaaagt

SEQ ID NO: 2568760 - DNA, 25 bp, Homo sapien
caaagtctcggcttagataaattcc

SEQ ID NO: 2568761 - DNA, 25 bp, Homo sapien
ttagggccaaatacgtagaaacgca

SEQ ID NO: 2568762 - DNA, 25 bp, Homo sapien
ctttgtattgcagggatccgacagc

SEQ ID NO: 2568763 - DNA, 25 bp, Homo sapien
tacgtagaaacgcagagaccaagca

SEQ ID NO: 2568764 - DNA, 25 bp, Homo sapien
cagagacgataaaagtcgcgccggt

SEQ ID NO: 2568765 - DNA, 25 bp, Homo sapien
tgaaaacaggggtgaaaccggatga

SEQ ID NO: 2568766 - DNA, 25 bp, Homo sapien
atgaaaacaggggtgaaaccggatg

SEQ ID NO: 2568767 - DNA, 25 bp, Homo sapien
tgtcagcggctcttaaccctccaat

SEQ ID NO: 2568768 - DNA, 25 bp, Homo sapien
aatgcggtagctgcgatgtgacatc

SEQ ID NO: 2568769 - DNA, 25 bp, Homo sapien
taaccctccaatgcggtagctgcga

SEQ ID NO: 2568770 - DNA, 25 bp, Homo sapien
acatcgggaacccatataggcttcg

SEQ ID NO: 2568771 - DNA, 25 bp, Homo sapien
agctcctgaaactcaatcctggaag

SEQ ID NO: 2568772 - DNA, 25 bp, Homo sapien
cagctcctgaaactcaatcctggaa

SEQ ID NO: 2568773 - DNA, 25 bp, Homo sapien
ctcctgaaactcaatcctggaagaa

SEQ ID NO: 2568774 - DNA, 25 bp, Homo sapien
gctcctgaaactcaatcctggaaga

SEQ ID NO: 2568775 - DNA, 25 bp, Homo sapien
ctgaggaaaacagggagggaaacag

SEQ ID NO: 2568776 - DNA, 25 bp, Homo sapien
ggagggctgtaccagggagcctagg

SEQ ID NO: 2568777 - DNA, 25 bp, Homo sapien
gtaccagggagcctaggaaagttga

SEQ ID NO: 2568778 - DNA, 25 bp, Homo sapien
gctgtaccagggagcctaggaaagt

SEQ ID NO: 2568779 - DNA, 25 bp, Homo sapien
ctcccaacaagatgtcatcctgcaa

SEQ ID NO: 2568780 - DNA, 25 bp, Homo sapien
ttctcagggtagtagatcttttgtt

SEQ ID NO: 2568781 - DNA, 25 bp, Homo sapien
tctcagggtagtagatcttttgttt

SEQ ID NO: 2568782 - DNA, 25 bp, Homo sapien
ctcagggtagtagatcttttgtttg

SEQ ID NO: 2568783 - DNA, 25 bp, Homo sapien
tccccttgagatttttgtgaggctg

SEQ ID NO: 2568784 - DNA, 25 bp, Homo sapien
tgcagaggtgcttggccacttctcc

SEQ ID NO: 2568785 - DNA, 25 bp, Homo sapien
agatttttgtgaggctgaatgcaga

SEQ ID NO: 2568786 - DNA, 25 bp, Homo sapien
cccttgagatttttgtgaggctgaa

SEQ ID NO: 2568787 - DNA, 25 bp, Homo sapien
agatcaatgtgctggtagagttggt

SEQ ID NO: 2568788 - DNA, 25 bp, Homo sapien
aatgtgctggtagagttggtttctg

SEQ ID NO: 2568789 - DNA, 25 bp, Homo sapien
tttctcaatgttctagaggccaaaa

SEQ ID NO: 2568790 - DNA, 25 bp, Homo sapien
caatgttctagaggccaaaagtcca

SEQ ID NO: 2568791 - DNA, 25 bp, Homo sapien
tagtgagcatcttgacgatccctgc

SEQ ID NO: 2568792 - DNA, 25 bp, Homo sapien
aggatactacacaaattctgttagt

SEQ ID NO: 2568793 - DNA, 25 bp, Homo sapien
tattcattaggtgctcacgggaaac

SEQ ID NO: 2568794 - DNA, 25 bp, Homo sapien
cgatccctgcaattgagtctattca

SEQ ID NO: 2568795 - DNA, 25 bp, Homo sapien
aggttccaccgagactcgaactcgg

SEQ ID NO: 2568796 - DNA, 25 bp, Homo sapien
gagtgctcaccattacaccatggaa

SEQ ID NO: 2568797 - DNA, 25 bp, Homo sapien
ttccaccgagactcgaactcggatc

SEQ ID NO: 2568798 - DNA, 25 bp, Homo sapien
aactcggatcgctggattcagagtc

SEQ ID NO: 2568799 - DNA, 25 bp, Homo sapien
agggagtaaaacacaacattgccgt

SEQ ID NO: 2568800 - DNA, 25 bp, Homo sapien
tagggagtaaaacacaacattgccg

SEQ ID NO: 2568801 - DNA, 25 bp, Homo sapien
gggagtaaaacacaacattgccgtc

SEQ ID NO: 2568802 - DNA, 25 bp, Homo sapien
ggctcgctgatcccgactggatgac

SEQ ID NO: 2568803 - DNA, 25 bp, Homo sapien
cccgactggatgactcggcaatttc

SEQ ID NO: 2568804 - DNA, 25 bp, Homo sapien
tcgctgatcccgactggatgactcg

SEQ ID NO: 2568805 - DNA, 25 bp, Homo sapien
tgatcccgactggatgactcggcaa

SEQ ID NO: 2568806 - DNA, 25 bp, Homo sapien
cgggcctccgattgctgggtgccag

SEQ ID NO: 2568807 - DNA, 25 bp, Homo sapien
gggcctccgattgctgggtgccagg

SEQ ID NO: 2568808 - DNA, 25 bp, Homo sapien
ggcctccgattgctgggtgccagga

SEQ ID NO: 2568809 - DNA, 25 bp, Homo sapien
tgacatcttagttcgctcccaagac

SEQ ID NO: 2568810 - DNA, 25 bp, Homo sapien
aaaatgagagcgatggtcctgagcg

SEQ ID NO: 2568811 - DNA, 25 bp, Homo sapien
ccctcaaagactgcggtatttttca

SEQ ID NO: 2568812 - DNA, 25 bp, Homo sapien
ctgagcgcctggagtgacatcttag

SEQ ID NO: 2568813 - DNA, 25 bp, Homo sapien
gatcaaatatttgtaaacaggaatg

SEQ ID NO: 2568814 - DNA, 25 bp, Homo sapien
tgtgatcaaatatttgtaaacagga

SEQ ID NO: 2568815 - DNA, 25 bp, Homo sapien
gtgatcaaatatttgtaaacaggaa

SEQ ID NO: 2568816 - DNA, 25 bp, Homo sapien
gttgtgatcaaatatttgtaaacag

SEQ ID NO: 2568817 - DNA, 25 bp, Homo sapien
gccagtttaccggtctgggtgtgcc

SEQ ID NO: 2568818 - DNA, 25 bp, Homo sapien
cccaagataggaaggagtttgtctc

SEQ ID NO: 2568819 - DNA, 25 bp, Homo sapien
tagctttgctaaggagatctgatcc

SEQ ID NO: 2568820 - DNA, 25 bp, Homo sapien
gggagcttaggaatcatgtggcttc

SEQ ID NO: 2568821 - DNA, 25 bp, Homo sapien
tgctgcttcgccactggctgtttca

SEQ ID NO: 2568822 - DNA, 25 bp, Homo sapien
cgggacgaggaaggcgctgtcggtg

SEQ ID NO: 2568823 - DNA, 25 bp, Homo sapien
tgtttcaccacgaaggagctcccgt

SEQ ID NO: 2568824 - DNA, 25 bp, Homo sapien
tttcaccacgaaggagctcccgtgc

SEQ ID NO: 2568825 - DNA, 25 bp, Homo sapien
acaacagaaacacccgcttctttgg

SEQ ID NO: 2568826 - DNA, 25 bp, Homo sapien
caggctctggcaccatgttggtcgg

SEQ ID NO: 2568827 - DNA, 25 bp, Homo sapien
ttggtcggctgagtggcggagggtg

SEQ ID NO: 2568828 - DNA, 25 bp, Homo sapien
ctacaacagaaacacccgcttcttt

SEQ ID NO: 2568829 - DNA, 25 bp, Homo sapien
agcctccgcagcccgctttagatga

SEQ ID NO: 2568830 - DNA, 25 bp, Homo sapien
cagcctccgcagcccgctttagatg

SEQ ID NO: 2568831 - DNA, 25 bp, Homo sapien
gcctccgcagcccgctttagatgat

SEQ ID NO: 2568832 - DNA, 25 bp, Homo sapien
ctccgcagcccgctttagatgatag

SEQ ID NO: 2568833 - DNA, 25 bp, Homo sapien
gaaagtagctccatacatttttggg

SEQ ID NO: 2568834 - DNA, 25 bp, Homo sapien
tgcttcccgtggttcgaaatccttc

SEQ ID NO: 2568835 - DNA, 25 bp, Homo sapien
tttgggggagcacgcttttgctttg

SEQ ID NO: 2568836 - DNA, 25 bp, Homo sapien
gcctgaccattaagaaagtagctcc

SEQ ID NO: 2568837 - DNA, 25 bp, Homo sapien
cttgctcagtcatcctgccggacaa

SEQ ID NO: 2568838 - DNA, 25 bp, Homo sapien
gctctaatcgctccggttttccaag

SEQ ID NO: 2568839 - DNA, 25 bp, Homo sapien
tgctcagtcatcctgccggacaagc

SEQ ID NO: 2568840 - DNA, 25 bp, Homo sapien
tcatcctgccggacaagccctgagg

SEQ ID NO: 2568841 - DNA, 25 bp, Homo sapien
ctgcagcgccccgaatgcgactgag

SEQ ID NO: 2568842 - DNA, 25 bp, Homo sapien
tcactgggtgaaggctgtgcaaaga

SEQ ID NO: 2568843 - DNA, 25 bp, Homo sapien
ccctggctgctcgaacccgggtcgc

SEQ ID NO: 2568844 - DNA, 25 bp, Homo sapien
cgccccgaatgcgactgagcaggga

SEQ ID NO: 2568845 - DNA, 25 bp, Homo sapien
agatgtctggtctaccgctctccgg

SEQ ID NO: 2568846 - DNA, 25 bp, Homo sapien
tagatgtctggtctaccgctctccg

SEQ ID NO: 2568847 - DNA, 25 bp, Homo sapien
atgtctggtctaccgctctccggct

SEQ ID NO: 2568848 - DNA, 25 bp, Homo sapien
tctagatgtctggtctaccgctctc

SEQ ID NO: 2568849 - DNA, 25 bp, Homo sapien
cccctgatgctgtcggatgcagttt

SEQ ID NO: 2568850 - DNA, 25 bp, Homo sapien
tgatgctgtcggatgcagttttatt

SEQ ID NO: 2568851 - DNA, 25 bp, Homo sapien
ccctgatgctgtcggatgcagtttt

SEQ ID NO: 2568852 - DNA, 25 bp, Homo sapien
gacccctgatgctgtcggatgcagt

SEQ ID NO: 2568853 - DNA, 25 bp, Homo sapien
ggtgcttgtttttgccaaccaccat

SEQ ID NO: 2568854 - DNA, 25 bp, Homo sapien
tgaggtgcttgtttttgccaaccac

SEQ ID NO: 2568855 - DNA, 25 bp, Homo sapien
ttttgtgaggtgcttgtttttgcca

SEQ ID NO: 2568856 - DNA, 25 bp, Homo sapien
cttttgtgaggtgcttgtttttgcc

SEQ ID NO: 2568857 - DNA, 25 bp, Homo sapien
agatggagcccattatctcaggaaa

SEQ ID NO: 2568858 - DNA, 25 bp, Homo sapien
tggagatggagcccattatctcagg

SEQ ID NO: 2568859 - DNA, 25 bp, Homo sapien
gagatggagcccattatctcaggaa

SEQ ID NO: 2568860 - DNA, 25 bp, Homo sapien
tagtaatctggacttgttgcaacac

SEQ ID NO: 2568861 - DNA, 25 bp, Homo sapien
gtaatctggacttgttgcaacacat

SEQ ID NO: 2568862 - DNA, 25 bp, Homo sapien
agatagtaatctggacttgttgcaa

SEQ ID NO: 2568863 - DNA, 25 bp, Homo sapien
tctggacttgttgcaacacattcat

SEQ ID NO: 2568864 - DNA, 25 bp, Homo sapien
tatctttgatatcagttctgtaatt

SEQ ID NO: 2568865 - DNA, 25 bp, Homo sapien
tacatggcggtcatttttaagactc

SEQ ID NO: 2568866 - DNA, 25 bp, Homo sapien
ttgttttgtacatggcggtcatttt

SEQ ID NO: 2568867 - DNA, 25 bp, Homo sapien
gatatcagttctgtaatttaggaga

SEQ ID NO: 2568868 - DNA, 25 bp, Homo sapien
tctttttcataaccactctgagtgg

SEQ ID NO: 2568869 - DNA, 25 bp, Homo sapien
tttcaaaatatggatctctgcccat

SEQ ID NO: 2568870 - DNA, 25 bp, Homo sapien
agtggtggtcatttgtaggctaatc

SEQ ID NO: 2568871 - DNA, 25 bp, Homo sapien
taaagcccagtctaggaatccaatt

SEQ ID NO: 2568872 - DNA, 25 bp, Homo sapien
ggaatggaatcaactcgattggaat

SEQ ID NO: 2568873 - DNA, 25 bp, Homo sapien
tggaatggaatcaactcgattggaa

SEQ ID NO: 2568874 - DNA, 25 bp, Homo sapien
ggaatggaatggaatcaactcgatt

SEQ ID NO: 2568875 - DNA, 25 bp, Homo sapien
aatggaatggaatcaactcgattgg

SEQ ID NO: 2568876 - DNA, 25 bp, Homo sapien
tggaattaacccgaatagaatggaa

SEQ ID NO: 2568877 - DNA, 25 bp, Homo sapien
tggaatggaattaacccgaatagaa

SEQ ID NO: 2568878 - DNA, 25 bp, Homo sapien
tcgattgcaatcgaatggaatggaa

SEQ ID NO: 2568879 - DNA, 25 bp, Homo sapien
gaatggaatggaattaacccgaata

SEQ ID NO: 2568880 - DNA, 25 bp, Homo sapien
tccattcaagttgaatccattccat

SEQ ID NO: 2568881 - DNA, 25 bp, Homo sapien
cattgcactcgggttgattccattc

SEQ ID NO: 2568882 - DNA, 25 bp, Homo sapien
ttccattgcactcgggttgattcca

SEQ ID NO: 2568883 - DNA, 25 bp, Homo sapien
ctctccattccattgcactcgggtt

SEQ ID NO: 2568884 - DNA, 25 bp, Homo sapien
tccattccattgcactcgggttgat

SEQ ID NO: 2568885 - DNA, 25 bp, Homo sapien
cattcccctgcactcgggttgattc

SEQ ID NO: 2568886 - DNA, 25 bp, Homo sapien
attccattccattcccctgcactcg

SEQ ID NO: 2568887 - DNA, 25 bp, Homo sapien
attccattcccctgcactcgggttg

SEQ ID NO: 2568888 - DNA, 25 bp, Homo sapien
ccattccattcccctgcactcgggt

SEQ ID NO: 2568889 - DNA, 25 bp, Homo sapien
ttccattccattacaatcgagttga

SEQ ID NO: 2568890 - DNA, 25 bp, Homo sapien
tccattacaatcgagttgattccat

SEQ ID NO: 2568891 - DNA, 25 bp, Homo sapien
gattccattctaatagtttcctttc

SEQ ID NO: 2568892 - DNA, 25 bp, Homo sapien
gggttgattccattctaatagtttc

SEQ ID NO: 2568893 - DNA, 25 bp, Homo sapien
ttccctcctattccactcggaacga

SEQ ID NO: 2568894 - DNA, 25 bp, Homo sapien
tcctattccactcggaacgattcca

SEQ ID NO: 2568895 - DNA, 25 bp, Homo sapien
cctcctattccactcggaacgattc

SEQ ID NO: 2568896 - DNA, 25 bp, Homo sapien
tattccactcggaacgattccattc

SEQ ID NO: 2568897 - DNA, 25 bp, Homo sapien
tccattcaagttgaatccattccat

SEQ ID NO: 2568898 - DNA, 25 bp, Homo sapien
cattacattcggattgattctattc

SEQ ID NO: 2568899 - DNA, 25 bp, Homo sapien
tccattacattcggattgattctat

SEQ ID NO: 2568900 - DNA, 25 bp, Homo sapien
attcggattgattctattcaactcc

SEQ ID NO: 2568901 - DNA, 25 bp, Homo sapien
tacattcggattgattctattcaac

SEQ ID NO: 2568902 - DNA, 25 bp, Homo sapien
ctcgggttgattccattcctttcca

SEQ ID NO: 2568903 - DNA, 25 bp, Homo sapien
cctttccattccattcttgttgaat

SEQ ID NO: 2568904 - DNA, 25 bp, Homo sapien
tccattccattcttgttgaatccat

SEQ ID NO: 2568905 - DNA, 25 bp, Homo sapien
tttccattccattcttgttgaatcc

SEQ ID NO: 2568906 - DNA, 25 bp, Homo sapien
gcactcgggttgattccattccatt

SEQ ID NO: 2568907 - DNA, 25 bp, Homo sapien
actcgggttgattccattccattcc

SEQ ID NO: 2568908 - DNA, 25 bp, Homo sapien
cactcgggttgattccattccattc

SEQ ID NO: 2568909 - DNA, 25 bp, Homo sapien
tacattcccttccattccactcgga

SEQ ID NO: 2568910 - DNA, 25 bp, Homo sapien
cactccattacattcccttccattc

SEQ ID NO: 2568911 - DNA, 25 bp, Homo sapien
attcccttccattccactcggaatg

SEQ ID NO: 2568912 - DNA, 25 bp, Homo sapien
attacattcccttccattccactcg

SEQ ID NO: 2568913 - DNA, 25 bp, Homo sapien
tgattccattcctttgcattccatt

SEQ ID NO: 2568914 - DNA, 25 bp, Homo sapien
ttgattccattcctttgcattccat

SEQ ID NO: 2568915 - DNA, 25 bp, Homo sapien
gattccattcctttgcattccattc

SEQ ID NO: 2568916 - DNA, 25 bp, Homo sapien
gttgattccattcctttgcattcca

SEQ ID NO: 2568917 - DNA, 25 bp, Homo sapien
ttccattgcactcgggttgattcca

SEQ ID NO: 2568918 - DNA, 25 bp, Homo sapien
cattgcactcgggttgattccattc

SEQ ID NO: 2568919 - DNA, 25 bp, Homo sapien
tgcactcgggttgattccattccat

SEQ ID NO: 2568920 - DNA, 25 bp, Homo sapien
ctccattccattgcactcgggttga

SEQ ID NO: 2568921 - DNA, 25 bp, Homo sapien
tggaatggaattaacccgaatacaa

SEQ ID NO: 2568922 - DNA, 25 bp, Homo sapien
tggaattaacccgaatacaatggaa

SEQ ID NO: 2568923 - DNA, 25 bp, Homo sapien
gaatggaattaacccgaatacaatg

SEQ ID NO: 2568924 - DNA, 25 bp, Homo sapien
gaattaacccgaatacaatggaatg

SEQ ID NO: 2568925 - DNA, 25 bp, Homo sapien
gaatcaacgcgagtgcaggggaatg

SEQ ID NO: 2568926 - DNA, 25 bp, Homo sapien
aatcaacgcgagtgcaggggaatgg

SEQ ID NO: 2568927 - DNA, 25 bp, Homo sapien
atggaatcaacgcgagtgcagggga

SEQ ID NO: 2568928 - DNA, 25 bp, Homo sapien
tggaatcaacgcgagtgcaggggaa

SEQ ID NO: 2568929 - DNA, 25 bp, Homo sapien
tcaactcgattgcaatcgaatggaa

SEQ ID NO: 2568930 - DNA, 25 bp, Homo sapien
tggaatggaatcatccgtattggaa

SEQ ID NO: 2568931 - DNA, 25 bp, Homo sapien
aatcatccgtattggaatggaaagg

SEQ ID NO: 2568932 - DNA, 25 bp, Homo sapien
gaatggaatcaactcgattgcaatc

SEQ ID NO: 2568933 - DNA, 25 bp, Homo sapien
tggaatggaatggtacggaatagaa

SEQ ID NO: 2568934 - DNA, 25 bp, Homo sapien
aatggaatggaatggtacggaatag

SEQ ID NO: 2568935 - DNA, 25 bp, Homo sapien
ggaatggtacggaatagaatggaat

SEQ ID NO: 2568936 - DNA, 25 bp, Homo sapien
gaatggaatggtacggaatagaatg

SEQ ID NO: 2568937 - DNA, 25 bp, Homo sapien
gaatcaacgcgagtgcaggggaatg

SEQ ID NO: 2568938 - DNA, 25 bp, Homo sapien
ggaatcaacgcgagtgcaggggaat

SEQ ID NO: 2568939 - DNA, 25 bp, Homo sapien
atggaatcaacgcgagtgcagggga

SEQ ID NO: 2568940 - DNA, 25 bp, Homo sapien
tggaatcaacgcgagtgcaggggaa

SEQ ID NO: 2568941 - DNA, 25 bp, Homo sapien
tgaatagaatcaatccgaatgtaat

SEQ ID NO: 2568942 - DNA, 25 bp, Homo sapien
ggaatgtaatggagagtaagggagt

SEQ ID NO: 2568943 - DNA, 25 bp, Homo sapien
tgtaatggagagtaagggagttgaa

SEQ ID NO: 2568944 - DNA, 25 bp, Homo sapien
tggaatcaacgcgagtgcaggggaa

SEQ ID NO: 2568945 - DNA, 25 bp, Homo sapien
aatcatccgtaatggaatggaaagg

SEQ ID NO: 2568946 - DNA, 25 bp, Homo sapien
tggaatggaatcatccgtaatggaa

SEQ ID NO: 2568947 - DNA, 25 bp, Homo sapien
atggaatggaatcatccgtaatgga

SEQ ID NO: 2568948 - DNA, 25 bp, Homo sapien
atggaatcatccgtaatggaatgga

SEQ ID NO: 2568949 - DNA, 25 bp, Homo sapien
tggaatggaattaacccgaatacaa

SEQ ID NO: 2568950 - DNA, 25 bp, Homo sapien
gaattaacccgaatacaatggaatg

SEQ ID NO: 2568951 - DNA, 25 bp, Homo sapien
gaatggaattaacccgaatacaatg

SEQ ID NO: 2568952 - DNA, 25 bp, Homo sapien
tggaattaacccgaatacaatggaa

SEQ ID NO: 2568953 - DNA, 25 bp, Homo sapien
tgaatagaatcaatccgaatgtaat

SEQ ID NO: 2568954 - DNA, 25 bp, Homo sapien
ggaatgtaatggagagtaagggagt

SEQ ID NO: 2568955 - DNA, 25 bp, Homo sapien
ttgaatagaatcaatccgaatgtaa

SEQ ID NO: 2568956 - DNA, 25 bp, Homo sapien
gtaatggagagtaagggagttgaat

SEQ ID NO: 2568957 - DNA, 25 bp, Homo sapien
tcaacacgattgcaatcgaatggaa

SEQ ID NO: 2568958 - DNA, 25 bp, Homo sapien
tggaatggaatcaacgcgagtgcag

SEQ ID NO: 2568959 - DNA, 25 bp, Homo sapien
gaatggaatcaacacgattgcaatc

SEQ ID NO: 2568960 - DNA, 25 bp, Homo sapien
tggaatcaacacgattgcaatcgaa

SEQ ID NO: 2568961 - DNA, 25 bp, Homo sapien
tgcaacggaaccgaatggagtggaa

SEQ ID NO: 2568962 - DNA, 25 bp, Homo sapien
gcaacggaaccgaatggagtggaat

SEQ ID NO: 2568963 - DNA, 25 bp, Homo sapien
atgcaacggaaccgaatggagtgga

SEQ ID NO: 2568964 - DNA, 25 bp, Homo sapien
caacggaaccgaatggagtggaatg

SEQ ID NO: 2568965 - DNA, 25 bp, Homo sapien
tggaagcaacccgagtgcaatcgaa

SEQ ID NO: 2568966 - DNA, 25 bp, Homo sapien
gcaacccgagtgcaatcgaatggaa

SEQ ID NO: 2568967 - DNA, 25 bp, Homo sapien
gaagcaacccgagtgcaatcgaatg

SEQ ID NO: 2568968 - DNA, 25 bp, Homo sapien
gaatggaagcaacccgagtgcaatc

SEQ ID NO: 2568969 - DNA, 25 bp, Homo sapien
gaatggaattaaaccgaatagaatg

SEQ ID NO: 2568970 - DNA, 25 bp, Homo sapien
tggaattaaaccgaatagaatggaa

SEQ ID NO: 2568971 - DNA, 25 bp, Homo sapien
gaatggaatcaactcgattgcaatc

SEQ ID NO: 2568972 - DNA, 25 bp, Homo sapien
tcaactcgattgcaatcgaatggaa

SEQ ID NO: 2568973 - DNA, 25 bp, Homo sapien
ggaatgaaatgcaatggattcaact

SEQ ID NO: 2568974 - DNA, 25 bp, Homo sapien
caatggattcaactcgattgcaatg

SEQ ID NO: 2568975 - DNA, 25 bp, Homo sapien
aatgcaattaatccgaatagaatgg

SEQ ID NO: 2568976 - DNA, 25 bp, Homo sapien
ggaatggaatgcaattaatccgaat

SEQ ID NO: 2568977 - DNA, 25 bp, Homo sapien
atggaatcaacgcgagtgcagggga

SEQ ID NO: 2568978 - DNA, 25 bp, Homo sapien
tggaatcaacgcgagtgcaggggaa

SEQ ID NO: 2568979 - DNA, 25 bp, Homo sapien
ggaatcaacgcgagtgcaggggaat

SEQ ID NO: 2568980 - DNA, 25 bp, Homo sapien
gaatcaacgcgagtgcaggggaatg

SEQ ID NO: 2568981 - DNA, 25 bp, Homo sapien
ccgagtgcaatggaatggagtggaa

SEQ ID NO: 2568982 - DNA, 25 bp, Homo sapien
tggaatggaatggaacaacccgaat

SEQ ID NO: 2568983 - DNA, 25 bp, Homo sapien
agtgcaatggaatggagtggaatgg

SEQ ID NO: 2568984 - DNA, 25 bp, Homo sapien
gaatggaatggaacaacccgaatgg

SEQ ID NO: 2568985 - DNA, 25 bp, Homo sapien
caatcgagttgattccattgctttg

SEQ ID NO: 2568986 - DNA, 25 bp, Homo sapien
ctcgggttgattccaatgtattcct

SEQ ID NO: 2568987 - DNA, 25 bp, Homo sapien
ttccattccattgcaatcgagttga

SEQ ID NO: 2568988 - DNA, 25 bp, Homo sapien
cgagttgattccattgctttgcatt

SEQ ID NO: 2568989 - DNA, 25 bp, Homo sapien
cattctattccgtaccattccattc

SEQ ID NO: 2568990 - DNA, 25 bp, Homo sapien
cattacattcggattgattctattc

SEQ ID NO: 2568991 - DNA, 25 bp, Homo sapien
tccattacattcggattgattctat

SEQ ID NO: 2568992 - DNA, 25 bp, Homo sapien
tacattcggattgattctattcaac

SEQ ID NO: 2568993 - DNA, 25 bp, Homo sapien
attcggattgattctattcaactcc

SEQ ID NO: 2568994 - DNA, 25 bp, Homo sapien
gggtctaaattcctcgtacactgta

SEQ ID NO: 2568995 - DNA, 25 bp, Homo sapien
tacagtgtacgaggaatttagaccc

SEQ ID NO: 2568996 - DNA, 25 bp, Homo sapien
ccctgcactcgcgttgattccattc

SEQ ID NO: 2568997 - DNA, 25 bp, Homo sapien
tcccctgcactcgcgttgattccat

SEQ ID NO: 2568998 - DNA, 25 bp, Homo sapien
attcccctgcactcgcgttgattcc

SEQ ID NO: 2568999 - DNA, 25 bp, Homo sapien
ctgcactcgcgttgattccattcca

SEQ ID NO: 2569000 - DNA, 25 bp, Homo sapien
tcaagttgaatccattccattgcat

SEQ ID NO: 2569001 - DNA, 25 bp, Homo sapien
attcaagttgaatccattccattgc

SEQ ID NO: 2569002 - DNA, 25 bp, Homo sapien
cattcaagttgaatccattccattg

SEQ ID NO: 2569003 - DNA, 25 bp, Homo sapien
ttcaagttgaatccattccattgca

SEQ ID NO: 2569004 - DNA, 25 bp, Homo sapien
ccctgcactcgcgttcattccattc

SEQ ID NO: 2569005 - DNA, 25 bp, Homo sapien
ttcccctgcactcgcgttcattcca

SEQ ID NO: 2569006 - DNA, 25 bp, Homo sapien
attccattcccctgcactcgcgttc

SEQ ID NO: 2569007 - DNA, 25 bp, Homo sapien
cattcccctgcactcgcgttcattc

SEQ ID NO: 2569008 - DNA, 25 bp, Homo sapien
attcggattgattctattcaactcc

SEQ ID NO: 2569009 - DNA, 25 bp, Homo sapien
cattcggattgattctattcaactc

SEQ ID NO: 2569010 - DNA, 25 bp, Homo sapien
cattccgttccattccatgccatta

SEQ ID NO: 2569011 - DNA, 25 bp, Homo sapien
cgttccattccactctggttgattc

SEQ ID NO: 2569012 - DNA, 25 bp, Homo sapien
cactcgggttgattccattctatta

SEQ ID NO: 2569013 - DNA, 25 bp, Homo sapien
tccattctattagtttccattccat

SEQ ID NO: 2569014 - DNA, 25 bp, Homo sapien
ccgttccattccactctggttgatt

SEQ ID NO: 2569015 - DNA, 25 bp, Homo sapien
cattcctttcggtttgaaggcattc

SEQ ID NO: 2569016 - DNA, 25 bp, Homo sapien
ccattcctttcggtttgaaggcatt

SEQ ID NO: 2569017 - DNA, 25 bp, Homo sapien
ttcctttcggtttgaaggcattcca

SEQ ID NO: 2569018 - DNA, 25 bp, Homo sapien
attccattacattcgaattgattct

SEQ ID NO: 2569019 - DNA, 25 bp, Homo sapien
cattacattcgaattgattctattc

SEQ ID NO: 2569020 - DNA, 25 bp, Homo sapien
cattcgaattgattctattcaactc

SEQ ID NO: 2569021 - DNA, 25 bp, Homo sapien
tgccattccactcgggttgattcca

SEQ ID NO: 2569022 - DNA, 25 bp, Homo sapien
tcgattgcaatcgtgttgattccat

SEQ ID NO: 2569023 - DNA, 25 bp, Homo sapien
ttccattcgattgcaatcgtgttga

SEQ ID NO: 2569024 - DNA, 25 bp, Homo sapien
cattcgattgcaatcgtgttgattc

SEQ ID NO: 2569025 - DNA, 25 bp, Homo sapien
ttcgattgcaatcgtgttgattcca

SEQ ID NO: 2569026 - DNA, 25 bp, Homo sapien
aatcgagttgaatccattgcatttc

SEQ ID NO: 2569027 - DNA, 25 bp, Homo sapien
caatcgagttgaatccattgcattt

SEQ ID NO: 2569028 - DNA, 25 bp, Homo sapien
tcgagttgaatccattgcatttcat

SEQ ID NO: 2569029 - DNA, 25 bp, Homo sapien
atcgagttgaatccattgcatttca

SEQ ID NO: 2569030 - DNA, 25 bp, Homo sapien
attccattccattcccctgcactcg

SEQ ID NO: 2569031 - DNA, 25 bp, Homo sapien
attccattccattccggatgattcc

SEQ ID NO: 2569032 - DNA, 25 bp, Homo sapien
attccattcccctgcactcgggttg

SEQ ID NO: 2569033 - DNA, 25 bp, Homo sapien
cattcccctgcactcgggttgattc

SEQ ID NO: 2569034 - DNA, 25 bp, Homo sapien
cctcctattccactcggaacgattc

SEQ ID NO: 2569035 - DNA, 25 bp, Homo sapien
ttccctcctattccactcggaacga

SEQ ID NO: 2569036 - DNA, 25 bp, Homo sapien
tattccactcggaacgattccattc

SEQ ID NO: 2569037 - DNA, 25 bp, Homo sapien
tcctattccactcggaacgattcca

SEQ ID NO: 2569038 - DNA, 25 bp, Homo sapien
cattccattgcactcgtgttgattc

SEQ ID NO: 2569039 - DNA, 25 bp, Homo sapien
tccattccattgcactcgtgttgat

SEQ ID NO: 2569040 - DNA, 25 bp, Homo sapien
cactccattccattgcactcgtgtt

SEQ ID NO: 2569041 - DNA, 25 bp, Homo sapien
ctccattccattgcactcgtgttga

SEQ ID NO: 2569042 - DNA, 25 bp, Homo sapien
ctattccattccattcccttccttt

SEQ ID NO: 2569043 - DNA, 25 bp, Homo sapien
ttctattccattccattcccttcct

SEQ ID NO: 2569044 - DNA, 25 bp, Homo sapien
tctattccattccattcccttcctt

SEQ ID NO: 2569045 - DNA, 25 bp, Homo sapien
tccattacattcggattgattctat

SEQ ID NO: 2569046 - DNA, 25 bp, Homo sapien
cattacattcggattgattctattc

SEQ ID NO: 2569047 - DNA, 25 bp, Homo sapien
attcggattgattctattcaactcc

SEQ ID NO: 2569048 - DNA, 25 bp, Homo sapien
tacattcggattgattctattcaac

SEQ ID NO: 2569049 - DNA, 25 bp, Homo sapien
tccattcctctccattccattgcac

SEQ ID NO: 2569050 - DNA, 25 bp, Homo sapien
ttccattcctctccattccattgca

SEQ ID NO: 2569051 - DNA, 25 bp, Homo sapien
cattccattcctctccattccattg

SEQ ID NO: 2569052 - DNA, 25 bp, Homo sapien
cattcctctccattccattgcactc

SEQ ID NO: 2569053 - DNA, 25 bp, Homo sapien
ttccattcgattgcaatcgagttga

SEQ ID NO: 2569054 - DNA, 25 bp, Homo sapien
ccattccattcgattgcaatcgagt

SEQ ID NO: 2569055 - DNA, 25 bp, Homo sapien
cattcgattgcaatcgagttgattc

SEQ ID NO: 2569056 - DNA, 25 bp, Homo sapien
ttcgattgcaatcgagttgattcca

SEQ ID NO: 2569057 - DNA, 25 bp, Homo sapien
tgggttgattccaatgtactccttt

SEQ ID NO: 2569058 - DNA, 25 bp, Homo sapien
ggtgcctaggcacttgcgttgtgac

SEQ ID NO: 2569059 - DNA, 25 bp, Homo sapien
taagctttaacatcggatcccatcc

SEQ ID NO: 2569060 - DNA, 25 bp, Homo sapien
catcggatcccatccggtgcctagg

SEQ ID NO: 2569061 - DNA, 25 bp, Homo sapien
cacttgcgttgtgacggcgcaatgt

SEQ ID NO: 2569062 - DNA, 25 bp, Homo sapien
atggagtcgaatcaatgggtatggt

SEQ ID NO: 2569063 - DNA, 25 bp, Homo sapien
ctacggtatacacaggggggaagct

SEQ ID NO: 2569064 - DNA, 25 bp, Homo sapien
ggaagctgcgatggagtcgaatcaa

SEQ ID NO: 2569065 - DNA, 25 bp, Homo sapien
gcgatggagtcgaatcaatgggtat

SEQ ID NO: 2569066 - DNA, 25 bp, Homo sapien
gagaggcaggtattctttcgcaaca

SEQ ID NO: 2569067 - DNA, 25 bp, Homo sapien
cgatagtttgcttcgcggacaagaa

SEQ ID NO: 2569068 - DNA, 25 bp, Homo sapien
cacatgtgcgagtactgtgtgatag

SEQ ID NO: 2569069 - DNA, 25 bp, Homo sapien
tactgtgtgataggatgagccgata

SEQ ID NO: 2569070 - DNA, 25 bp, Homo sapien
ccaagtacttcctcagaaaatgatt

SEQ ID NO: 2569071 - DNA, 25 bp, Homo sapien
tagtcatcaagaccaagtacttcct

SEQ ID NO: 2569072 - DNA, 25 bp, Homo sapien
ctagtcatcaagaccaagtacttcc

SEQ ID NO: 2569073 - DNA, 25 bp, Homo sapien
ccactgggtatattcatacataata

SEQ ID NO: 2569074 - DNA, 25 bp, Homo sapien
cacttcaccccactgggtatattca

SEQ ID NO: 2569075 - DNA, 25 bp, Homo sapien
tcaccccactgggtatattcataca

SEQ ID NO: 2569076 - DNA, 25 bp, Homo sapien
taaatacacttcaccccactgggta

SEQ ID NO: 2569077 - DNA, 25 bp, Homo sapien
cacttctggaggttgtaagagagca

SEQ ID NO: 2569078 - DNA, 25 bp, Homo sapien
tcctggtacaatgggctgcggtgcc

SEQ ID NO: 2569079 - DNA, 25 bp, Homo sapien
atgcagaagccccagcaacaacaga

SEQ ID NO: 2569080 - DNA, 25 bp, Homo sapien
tctgttctcccatgactaggctgga

SEQ ID NO: 2569081 - DNA, 25 bp, Homo sapien
tcggagaggccaggttgcagtacaa

SEQ ID NO: 2569082 - DNA, 25 bp, Homo sapien
gaacatcactgactgactctgcatc

SEQ ID NO: 2569083 - DNA, 25 bp, Homo sapien
agcaggcggaggagcagacggagct

SEQ ID NO: 2569084 - DNA, 25 bp, Homo sapien
tttcctgtggatggcggaacatcac

SEQ ID NO: 2569085 - DNA, 25 bp, Homo sapien
tctgttgaggatcttcctgaattgc

SEQ ID NO: 2569086 - DNA, 25 bp, Homo sapien
gaacattgattcaaagatgattgct

SEQ ID NO: 2569087 - DNA, 25 bp, Homo sapien
ttgccgtatcatctgaattctggaa

SEQ ID NO: 2569088 - DNA, 25 bp, Homo sapien
caaagatgattgctggtgaaattgt

SEQ ID NO: 2569089 - DNA, 25 bp, Homo sapien
cgtactggaattttctcgcaattca

SEQ ID NO: 2569090 - DNA, 25 bp, Homo sapien
cacttagacaaagtgagtgatttgt

SEQ ID NO: 2569091 - DNA, 25 bp, Homo sapien
tctcgcaattcagaatctgtggaca

SEQ ID NO: 2569092 - DNA, 25 bp, Homo sapien
ggacagaaggctcaagtcacttaga

SEQ ID NO: 2569093 - DNA, 25 bp, Homo sapien
tgtgttgtggaagtgcattgtatga

SEQ ID NO: 2569094 - DNA, 25 bp, Homo sapien
tgagtgtcctttgttatcatgacct

SEQ ID NO: 2569095 - DNA, 25 bp, Homo sapien
attgagtgctgaatgttttctcaca

SEQ ID NO: 2569096 - DNA, 25 bp, Homo sapien
ctggggcagaagaagggtctttcac

SEQ ID NO: 2569097 - DNA, 25 bp, Homo sapien
cagtatgtgtacgaacgtgagtttt

SEQ ID NO: 2569098 - DNA, 25 bp, Homo sapien
taaggtggtggcttgctgcaaatgc

SEQ ID NO: 2569099 - DNA, 25 bp, Homo sapien
tatgtgtacgaacgtgagttttaag

SEQ ID NO: 2569100 - DNA, 25 bp, Homo sapien
ttttaaggtggtggcttgctgcaaa

SEQ ID NO: 2569101 - DNA, 25 bp, Homo sapien
gacagtgacagtccatatgaaaaat

SEQ ID NO: 2569102 - DNA, 25 bp, Homo sapien
ccctgtatgagttcgaatgtgcttc

SEQ ID NO: 2569103 - DNA, 25 bp, Homo sapien
cacagttaaacgttttccctgtgtg

SEQ ID NO: 2569104 - DNA, 25 bp, Homo sapien
tatgagttcgaatgtgcttcctcag

SEQ ID NO: 2569105 - DNA, 25 bp, Homo sapien
aacgttttccctgtgtgaagcctct

SEQ ID NO: 2569106 - DNA, 25 bp, Homo sapien
cagacaaaggtgtactctcctcggt

SEQ ID NO: 2569107 - DNA, 25 bp, Homo sapien
cctcggtgagtcttctggtgggttc

SEQ ID NO: 2569108 - DNA, 25 bp, Homo sapien
aatggcttctccttcgtgtgcactc

SEQ ID NO: 2569109 - DNA, 25 bp, Homo sapien
agccctgcacgtcacactcaaatgg

SEQ ID NO: 2569110 - DNA, 25 bp, Homo sapien
tcaaaggtacattggtaccgcttta

SEQ ID NO: 2569111 - DNA, 25 bp, Homo sapien
cagccctcaaaggtacattggtacc

SEQ ID NO: 2569112 - DNA, 25 bp, Homo sapien
ccctcaaaggtacattggtaccgct

SEQ ID NO: 2569113 - DNA, 25 bp, Homo sapien
agccctcaaaggtacattggtaccg

SEQ ID NO: 2569114 - DNA, 25 bp, Homo sapien
ctctcgaggatgagcttttgaagac

SEQ ID NO: 2569115 - DNA, 25 bp, Homo sapien
gaggatgagcttttgaagactacac

SEQ ID NO: 2569116 - DNA, 25 bp, Homo sapien
tcgaggatgagcttttgaagactac

SEQ ID NO: 2569117 - DNA, 25 bp, Homo sapien
tctcgaggatgagcttttgaagact

SEQ ID NO: 2569118 - DNA, 25 bp, Homo sapien
ggccatcggggactacggtggccac

SEQ ID NO: 2569119 - DNA, 25 bp, Homo sapien
aggttcaaggccatcggggactacg

SEQ ID NO: 2569120 - DNA, 25 bp, Homo sapien
ctgcaaaagcagacccgcgctggcc

SEQ ID NO: 2569121 - DNA, 25 bp, Homo sapien
tggtcaagctctccactgttcctgt

SEQ ID NO: 2569122 - DNA, 25 bp, Homo sapien
atcagcaagccccacgccgtcccct

SEQ ID NO: 2569123 - DNA, 25 bp, Homo sapien
ctgtgctggtgtgccttatccctcc

SEQ ID NO: 2569124 - DNA, 25 bp, Homo sapien
tggctctgtgctggtgtgccttatc

SEQ ID NO: 2569125 - DNA, 25 bp, Homo sapien
gaacaagatcagcaagccccacgcc

SEQ ID NO: 2569126 - DNA, 25 bp, Homo sapien
ggctataacacaggaattttacaca

SEQ ID NO: 2569127 - DNA, 25 bp, Homo sapien
agccaccctttaggccacctctaag

SEQ ID NO: 2569128 - DNA, 25 bp, Homo sapien
gacctatagctacctgacccctgat

SEQ ID NO: 2569129 - DNA, 25 bp, Homo sapien
tacctgacccctgatctctggaaaa

SEQ ID NO: 2569130 - DNA, 25 bp, Homo sapien
tggcctcaaacagctgtcgattacc

SEQ ID NO: 2569131 - DNA, 25 bp, Homo sapien
tcttcctgagtggcctcaaacagct

SEQ ID NO: 2569132 - DNA, 25 bp, Homo sapien
cctgagtggcctcaaacagctgtcg

SEQ ID NO: 2569133 - DNA, 25 bp, Homo sapien
gagtggcctcaaacagctgtcgatt

SEQ ID NO: 2569134 - DNA, 25 bp, Homo sapien
catgatctatcaggtgaaagccctc

SEQ ID NO: 2569135 - DNA, 25 bp, Homo sapien
gacattccgactgcagagtgagggt

SEQ ID NO: 2569136 - DNA, 25 bp, Homo sapien
gaaggcaccagtccgtttttatcca

SEQ ID NO: 2569137 - DNA, 25 bp, Homo sapien
tcctgctcaataagaacagtggtcc

SEQ ID NO: 2569138 - DNA, 25 bp, Homo sapien
ggttcagttgtgctcagcccagttg

SEQ ID NO: 2569139 - DNA, 25 bp, Homo sapien
ctcagcccagttgtgagaaatgaaa

SEQ ID NO: 2569140 - DNA, 25 bp, Homo sapien
gagaaatgaaaacgtaatgacttgt

SEQ ID NO: 2569141 - DNA, 25 bp, Homo sapien
tgagaaatgaaaacgtaatgacttg

SEQ ID NO: 2569142 - DNA, 25 bp, Homo sapien
ccagcggcaccatgattgcccccac

SEQ ID NO: 2569143 - DNA, 25 bp, Homo sapien
cagcggcaccatgattgcccccacc

SEQ ID NO: 2569144 - DNA, 25 bp, Homo sapien
aagcatctgaggtggctgtagccta

SEQ ID NO: 2569145 - DNA, 25 bp, Homo sapien
tggcctttcaggactttccatcaaa

SEQ ID NO: 2569146 - DNA, 25 bp, Homo sapien
tgagccattatctgggcaggaacgg

SEQ ID NO: 2569147 - DNA, 25 bp, Homo sapien
tcagacagagcactgaaagcatctg

SEQ ID NO: 2569148 - DNA, 25 bp, Homo sapien
ttggcagcctcaagtaaaataggag

SEQ ID NO: 2569149 - DNA, 25 bp, Homo sapien
gaactggtgaataaattcttgagcc

SEQ ID NO: 2569150 - DNA, 25 bp, Homo sapien
cagcgctgagtgtgctaaccaatgg

SEQ ID NO: 2569151 - DNA, 25 bp, Homo sapien
gtgtcttcacgactcacagcgctga

SEQ ID NO: 2569152 - DNA, 25 bp, Homo sapien
gaagcaataagctgccaaatatgct

SEQ ID NO: 2569153 - DNA, 25 bp, Homo sapien
ccagctgggtttcgaagcaataagc

SEQ ID NO: 2569154 - DNA, 25 bp, Homo sapien
tgaccagctgggtttcgaagcaata

SEQ ID NO: 2569155 - DNA, 25 bp, Homo sapien
gggtttcgaagcaataagctgccaa

SEQ ID NO: 2569156 - DNA, 25 bp, Homo sapien
ttctcgcaaaaacgccatcaagtag

SEQ ID NO: 2569157 - DNA, 25 bp, Homo sapien
tttttcagcagttctcgcaaaaacg

SEQ ID NO: 2569158 - DNA, 25 bp, Homo sapien
cagcagttctcgcaaaaacgccatc

SEQ ID NO: 2569159 - DNA, 25 bp, Homo sapien
cgcaaaaacgccatcaagtagtgga

SEQ ID NO: 2569160 - DNA, 25 bp, Homo sapien
gaaaactggttgcttaccacttggc

SEQ ID NO: 2569161 - DNA, 25 bp, Homo sapien
tgtatacacgatccaagtgcacgag

SEQ ID NO: 2569162 - DNA, 25 bp, Homo sapien
tgcctactatagtccaagaactgta

SEQ ID NO: 2569163 - DNA, 25 bp, Homo sapien
gagaggtacgggtcaaatgcaacat

SEQ ID NO: 2569164 - DNA, 25 bp, Homo sapien
aggtgctgtaacagatgacaggctc

SEQ ID NO: 2569165 - DNA, 25 bp, Homo sapien
actccaagcagttatggtaggtgct

SEQ ID NO: 2569166 - DNA, 25 bp, Homo sapien
gtgctgtaacagatgacaggctctg

SEQ ID NO: 2569167 - DNA, 25 bp, Homo sapien
cactccaagcagttatggtaggtgc

SEQ ID NO: 2569168 - DNA, 25 bp, Homo sapien
ccccattgttaaggaaccgataatg

SEQ ID NO: 2569169 - DNA, 25 bp, Homo sapien
cccattgttaaggaaccgataatgc

SEQ ID NO: 2569170 - DNA, 25 bp, Homo sapien
cattgttaaggaaccgataatgctg

SEQ ID NO: 2569171 - DNA, 25 bp, Homo sapien
tggccccattgttaaggaaccgata

SEQ ID NO: 2569172 - DNA, 25 bp, Homo sapien
tatccaagcagtccctgatatgttc

SEQ ID NO: 2569173 - DNA, 25 bp, Homo sapien
aatcattccagtatccaagcagtcc

SEQ ID NO: 2569174 - DNA, 25 bp, Homo sapien
tccagtatccaagcagtccctgata

SEQ ID NO: 2569175 - DNA, 25 bp, Homo sapien
tatcaatcattccagtatccaagca

SEQ ID NO: 2569176 - DNA, 25 bp, Homo sapien
tcaggcctggttgctgaaacagatc

SEQ ID NO: 2569177 - DNA, 25 bp, Homo sapien
ctcaggcctggttgctgaaacagat

SEQ ID NO: 2569178 - DNA, 25 bp, Homo sapien
ggcctggttgctgaaacagatcttc

SEQ ID NO: 2569179 - DNA, 25 bp, Homo sapien
caggcctggttgctgaaacagatct

SEQ ID NO: 2569180 - DNA, 25 bp, Homo sapien
gcatttcggtacaggtaatcaacca

SEQ ID NO: 2569181 - DNA, 25 bp, Homo sapien
tcggtacaggtaatcaaccatcatc

SEQ ID NO: 2569182 - DNA, 25 bp, Homo sapien
ctgctggacagcatttcggtacagg

SEQ ID NO: 2569183 - DNA, 25 bp, Homo sapien
aggtaatcaaccatcatccagagct

SEQ ID NO: 2569184 - DNA, 25 bp, Homo sapien
tcccatcatctccagtccatactgg

SEQ ID NO: 2569185 - DNA, 25 bp, Homo sapien
gggctatccaactggctcccatcat

SEQ ID NO: 2569186 - DNA, 25 bp, Homo sapien
ggggctatccaactggctcccatca

SEQ ID NO: 2569187 - DNA, 25 bp, Homo sapien
tctccagtccatactggcatcagag

SEQ ID NO: 2569188 - DNA, 25 bp, Homo sapien
tccataggaatcttttagatggcag

SEQ ID NO: 2569189 - DNA, 25 bp, Homo sapien
cataggtctgctccaaattagttcc

SEQ ID NO: 2569190 - DNA, 25 bp, Homo sapien
gcagcaaatttagtttaggatgata

SEQ ID NO: 2569191 - DNA, 25 bp, Homo sapien
caaattagttcccttgtattagaat

SEQ ID NO: 2569192 - DNA, 25 bp, Homo sapien
tgatcttggacttctcagtctccag

SEQ ID NO: 2569193 - DNA, 25 bp, Homo sapien
gacaccaaagctggcagtgccttga

SEQ ID NO: 2569194 - DNA, 25 bp, Homo sapien
atcttggacttctcagtctccagaa

SEQ ID NO: 2569195 - DNA, 25 bp, Homo sapien
cagacaccaaagctggcagtgcctt

SEQ ID NO: 2569196 - DNA, 25 bp, Homo sapien
aatcctttcccctgtccaagtgcag

SEQ ID NO: 2569197 - DNA, 25 bp, Homo sapien
agattggctctctcatgtaacacag

SEQ ID NO: 2569198 - DNA, 25 bp, Homo sapien
tgggcaggtagttcccagacacaga

SEQ ID NO: 2569199 - DNA, 25 bp, Homo sapien
caattttgtcttcacccgagttgag

SEQ ID NO: 2569200 - DNA, 25 bp, Homo sapien
acaaagagtttatagtccaactggg

SEQ ID NO: 2569201 - DNA, 25 bp, Homo sapien
caggagggaagagggtaaggcataa

SEQ ID NO: 2569202 - DNA, 25 bp, Homo sapien
aaaggtatcagccaaccaacaagca

SEQ ID NO: 2569203 - DNA, 25 bp, Homo sapien
aacaagcatccaaatgtgcttggca

SEQ ID NO: 2569204 - DNA, 25 bp, Homo sapien
gggttggcattcagccactgcttac

SEQ ID NO: 2569205 - DNA, 25 bp, Homo sapien
gggggttggcattcagccactgctt

SEQ ID NO: 2569206 - DNA, 25 bp, Homo sapien
tgctgggggttggcattcagccact

SEQ ID NO: 2569207 - DNA, 25 bp, Homo sapien
gctgggggttggcattcagccactg

SEQ ID NO: 2569208 - DNA, 25 bp, Homo sapien
tgacagggtacttgtccattatgaa

SEQ ID NO: 2569209 - DNA, 25 bp, Homo sapien
tgttgatgaattcaaaatgacaggg

SEQ ID NO: 2569210 - DNA, 25 bp, Homo sapien
tactttcaattgcatgtacttcaca

SEQ ID NO: 2569211 - DNA, 25 bp, Homo sapien
gaattgtaaaggattctactttcaa

SEQ ID NO: 2569212 - DNA, 25 bp, Homo sapien
taaagctcgtcatttacgaccctca

SEQ ID NO: 2569213 - DNA, 25 bp, Homo sapien
cttatccagggagcgaacaatttcc

SEQ ID NO: 2569214 - DNA, 25 bp, Homo sapien
tcctccagtgtcttccggtaaagct

SEQ ID NO: 2569215 - DNA, 25 bp, Homo sapien
tttccatcttatccagggagcgaac

SEQ ID NO: 2569216 - DNA, 25 bp, Homo sapien
tctttctcagtatagacggcattca

SEQ ID NO: 2569217 - DNA, 25 bp, Homo sapien
tctcagtatagacggcattcacagc

SEQ ID NO: 2569218 - DNA, 25 bp, Homo sapien
ctttctcagtatagacggcattcac

SEQ ID NO: 2569219 - DNA, 25 bp, Homo sapien
gactgagtaccttggcttctgccca

SEQ ID NO: 2569220 - DNA, 25 bp, Homo sapien
gctgagaccacagacacaagccatc

SEQ ID NO: 2569221 - DNA, 25 bp, Homo sapien
tgagaccacagacacaagccatcat

SEQ ID NO: 2569222 - DNA, 25 bp, Homo sapien
agaccacagacacaagccatcatgc

SEQ ID NO: 2569223 - DNA, 25 bp, Homo sapien
agctgagaccacagacacaagccat

SEQ ID NO: 2569224 - DNA, 25 bp, Homo sapien
tttccagagaatccgatcacaccag

SEQ ID NO: 2569225 - DNA, 25 bp, Homo sapien
actgagctgacaggcttgtggtcac

SEQ ID NO: 2569226 - DNA, 25 bp, Homo sapien
actcagctgagtgatgttcttccct

SEQ ID NO: 2569227 - DNA, 25 bp, Homo sapien
ggtcactggtcttcagggccatgtg

SEQ ID NO: 2569228 - DNA, 25 bp, Homo sapien
cgtatcatacttgtaagtaggctgg

SEQ ID NO: 2569229 - DNA, 25 bp, Homo sapien
tctttgcggccacctgaattttcag

SEQ ID NO: 2569230 - DNA, 25 bp, Homo sapien
tcgtcagagcccgtatcatacttgt

SEQ ID NO: 2569231 - DNA, 25 bp, Homo sapien
tctgtgaagccttcaaagacagtct

SEQ ID NO: 2569232 - DNA, 25 bp, Homo sapien
gatcatatgcatacagcatttgaaa

SEQ ID NO: 2569233 - DNA, 25 bp, Homo sapien
aagtccttctcttcgatgagctttt

SEQ ID NO: 2569234 - DNA, 25 bp, Homo sapien
cttctatcctgtagttgaggtcccc

SEQ ID NO: 2569235 - DNA, 25 bp, Homo sapien
acatccagctcttctatcctgtagt

SEQ ID NO: 2569236 - DNA, 25 bp, Homo sapien
tggaggtaggcagacccaaattaaa

SEQ ID NO: 2569237 - DNA, 25 bp, Homo sapien
aaatcttaagcagaactcagactac

SEQ ID NO: 2569238 - DNA, 25 bp, Homo sapien
gactacaatatagccgtcaactgct

SEQ ID NO: 2569239 - DNA, 25 bp, Homo sapien
ctaaaaactgggtttgagatgctca

SEQ ID NO: 2569240 - DNA, 25 bp, Homo sapien
tatgtactcatggtgaaccgcatgg

SEQ ID NO: 2569241 - DNA, 25 bp, Homo sapien
aaccgcatggggtggaagcccagac

SEQ ID NO: 2569242 - DNA, 25 bp, Homo sapien
tgaaaagacagagcccacaactcta

SEQ ID NO: 2569243 - DNA, 25 bp, Homo sapien
ccaggcatctccccatgaaaagaca

SEQ ID NO: 2569244 - DNA, 25 bp, Homo sapien
tctcatactcttcaatgtgggctgc

SEQ ID NO: 2569245 - DNA, 25 bp, Homo sapien
tgagaattcacaacgcagatgctgg

SEQ ID NO: 2569246 - DNA, 25 bp, Homo sapien
tgttgtggaactggaacctgatcgc

SEQ ID NO: 2569247 - DNA, 25 bp, Homo sapien
tcaggctgacaaaactgcattcgag

SEQ ID NO: 2569248 - DNA, 25 bp, Homo sapien
ccacagtctcggcttccacttctga

SEQ ID NO: 2569249 - DNA, 25 bp, Homo sapien
cagcagcataatcccaaccagtcgg

SEQ ID NO: 2569250 - DNA, 25 bp, Homo sapien
gcatgctcctgtttgacatataaca

SEQ ID NO: 2569251 - DNA, 25 bp, Homo sapien
gagatataagctgcatgctcctgtt

SEQ ID NO: 2569252 - DNA, 25 bp, Homo sapien
tcctcctttggggtatcgtgaaaga

SEQ ID NO: 2569253 - DNA, 25 bp, Homo sapien
gaaaaaagcttccttactcagatca

SEQ ID NO: 2569254 - DNA, 25 bp, Homo sapien
gaagaccctctgacacagctttgaa

SEQ ID NO: 2569255 - DNA, 25 bp, Homo sapien
catatttggcatctggatgaagacc

SEQ ID NO: 2569256 - DNA, 25 bp, Homo sapien
tggggcctggataccattgctcagc

SEQ ID NO: 2569257 - DNA, 25 bp, Homo sapien
gaggcattctttgggggactgccca

SEQ ID NO: 2569258 - DNA, 25 bp, Homo sapien
acatctggggcctggataccattgc

SEQ ID NO: 2569259 - DNA, 25 bp, Homo sapien
tctttgggggactgcccatttacat

SEQ ID NO: 2569260 - DNA, 25 bp, Homo sapien
cacaattgtatctcgcagtccaaac

SEQ ID NO: 2569261 - DNA, 25 bp, Homo sapien
gaagttctggatataggtgtaatcc

SEQ ID NO: 2569262 - DNA, 25 bp, Homo sapien
cactgtgatagtggaggagcgaacc

SEQ ID NO: 2569263 - DNA, 25 bp, Homo sapien
taaaatatgagccttgtccgacact

SEQ ID NO: 2569264 - DNA, 25 bp, Homo sapien
cttggttgcaagctttctggtttat

SEQ ID NO: 2569265 - DNA, 25 bp, Homo sapien
gagctttggtccataggcactccct

SEQ ID NO: 2569266 - DNA, 25 bp, Homo sapien
ggtctcaaaccatcaaagttagaac

SEQ ID NO: 2569267 - DNA, 25 bp, Homo sapien
tctggtttatcttgacccctggagc

SEQ ID NO: 2569268 - DNA, 25 bp, Homo sapien
ttttcacctcctccaattccattct

SEQ ID NO: 2569269 - DNA, 25 bp, Homo sapien
cacctcctccaattccattctgcca

SEQ ID NO: 2569270 - DNA, 25 bp, Homo sapien
tccattttcacctcctccaattcca

SEQ ID NO: 2569271 - DNA, 25 bp, Homo sapien
tcctccaattccattctgccaacac

SEQ ID NO: 2569272 - DNA, 25 bp, Homo sapien
ggtctctaagcccaagctaaatcat

SEQ ID NO: 2569273 - DNA, 25 bp, Homo sapien
agctaaatcatcatatcctgtgacc

SEQ ID NO: 2569274 - DNA, 25 bp, Homo sapien
cccaagctaaatcatcatatcctgt

SEQ ID NO: 2569275 - DNA, 25 bp, Homo sapien
tctaagcccaagctaaatcatcata

SEQ ID NO: 2569276 - DNA, 25 bp, Homo sapien
gaccaagaggtgttctagaagccaa

SEQ ID NO: 2569277 - DNA, 25 bp, Homo sapien
tgaataagataacagtgtctgcctc

SEQ ID NO: 2569278 - DNA, 25 bp, Homo sapien
gtatccctcactgcatgaccaagag

SEQ ID NO: 2569279 - DNA, 25 bp, Homo sapien
catagttaacttgagggtatccctc

SEQ ID NO: 2569280 - DNA, 25 bp, Homo sapien
ggccccccagagagagttagtcatc

SEQ ID NO: 2569281 - DNA, 25 bp, Homo sapien
ttggccccccagagagagttagtca

SEQ ID NO: 2569282 - DNA, 25 bp, Homo sapien
ccccagagagagttagtcatccatt

SEQ ID NO: 2569283 - DNA, 25 bp, Homo sapien
ccccccagagagagttagtcatcca

SEQ ID NO: 2569284 - DNA, 25 bp, Homo sapien
tacggcaacaggttggttagtggtg

SEQ ID NO: 2569285 - DNA, 25 bp, Homo sapien
tgaactgtctgtggtctggtgataa

SEQ ID NO: 2569286 - DNA, 25 bp, Homo sapien
ttagtggtgataggcccctggagag

SEQ ID NO: 2569287 - DNA, 25 bp, Homo sapien
aactgtctgtggtctggtgataaag

SEQ ID NO: 2569288 - DNA, 25 bp, Homo sapien
caacttcagttgctagatggaaata

SEQ ID NO: 2569289 - DNA, 25 bp, Homo sapien
aaatcagacttcactctttttaagg

SEQ ID NO: 2569290 - DNA, 25 bp, Homo sapien
ggttttctgaataagagcaacttca

SEQ ID NO: 2569291 - DNA, 25 bp, Homo sapien
ggccctgtacaggatcctcaatggg

SEQ ID NO: 2569292 - DNA, 25 bp, Homo sapien
taactggcttcagagctagctggcc

SEQ ID NO: 2569293 - DNA, 25 bp, Homo sapien
cctggctctggtgtactggctgaga

SEQ ID NO: 2569294 - DNA, 25 bp, Homo sapien
taagggaatgaagtgcctgcatggc

SEQ ID NO: 2569295 - DNA, 25 bp, Homo sapien
cagatgacccaaatagaactgaggg

SEQ ID NO: 2569296 - DNA, 25 bp, Homo sapien
gccttgtcctccgccaattgtctgg

SEQ ID NO: 2569297 - DNA, 25 bp, Homo sapien
ccaattgtctggattctggcagtct

SEQ ID NO: 2569298 - DNA, 25 bp, Homo sapien
ccgccaattgtctggattctggcag

SEQ ID NO: 2569299 - DNA, 25 bp, Homo sapien
tgtcctccgccaattgtctggattc

SEQ ID NO: 2569300 - DNA, 25 bp, Homo sapien
aggagatgaggtgctcttaaactct

SEQ ID NO: 2569301 - DNA, 25 bp, Homo sapien
caaggagatgaggtgctcttaaact

SEQ ID NO: 2569302 - DNA, 25 bp, Homo sapien
agatgaggtgctcttaaactctcac

SEQ ID NO: 2569303 - DNA, 25 bp, Homo sapien
ggcaaggagatgaggtgctcttaaa

SEQ ID NO: 2569304 - DNA, 25 bp, Homo sapien
tatcagcaccatcaggcgcttcgat

SEQ ID NO: 2569305 - DNA, 25 bp, Homo sapien
tggaaactctagtgatagtgaactc

SEQ ID NO: 2569306 - DNA, 25 bp, Homo sapien
tgaactctgagataagcccaaggaa

SEQ ID NO: 2569307 - DNA, 25 bp, Homo sapien
gcgcttcgatcgcaccttgtgatgg

SEQ ID NO: 2569308 - DNA, 25 bp, Homo sapien
tcacacagcgagttcggaacggagc

SEQ ID NO: 2569309 - DNA, 25 bp, Homo sapien
tctagtcccagagtagacagggctc

SEQ ID NO: 2569310 - DNA, 25 bp, Homo sapien
tgtacactgcgctatcatcacaggg

SEQ ID NO: 2569311 - DNA, 25 bp, Homo sapien
aagactctatcgtaggcagggcacc

SEQ ID NO: 2569312 - DNA, 25 bp, Homo sapien
tgcagtgttgcgctcccgagagccg

SEQ ID NO: 2569313 - DNA, 25 bp, Homo sapien
agccggcggcggcagacatttccct

SEQ ID NO: 2569314 - DNA, 25 bp, Homo sapien
atcgctccgccccaaaacagaacgg

SEQ ID NO: 2569315 - DNA, 25 bp, Homo sapien
gtgtgcccgctccatcaatcgaaag

SEQ ID NO: 2569316 - DNA, 25 bp, Homo sapien
aattgtcgcgtaccctggccaggta

SEQ ID NO: 2569317 - DNA, 25 bp, Homo sapien
tataccgagacagccacaggaattc

SEQ ID NO: 2569318 - DNA, 25 bp, Homo sapien
gccgagttacaaccgcgcggcgttg

SEQ ID NO: 2569319 - DNA, 25 bp, Homo sapien
aggaattcaggatcccgggtcgcag

SEQ ID NO: 2569320 - DNA, 25 bp, Homo sapien
tgaagtcactgtcggtcctagttcc

SEQ ID NO: 2569321 - DNA, 25 bp, Homo sapien
tagtccttagtagcaaccctggctc

SEQ ID NO: 2569322 - DNA, 25 bp, Homo sapien
ggcaaaccttggtgcgacacttagt

SEQ ID NO: 2569323 - DNA, 25 bp, Homo sapien
gcgttaagacctgaagcactgagtt

SEQ ID NO: 2569324 - DNA, 25 bp, Homo sapien
tgtttctacaagatgcatgctagac

SEQ ID NO: 2569325 - DNA, 25 bp, Homo sapien
catgctagaccatgagactacatag

SEQ ID NO: 2569326 - DNA, 25 bp, Homo sapien
gataaaacacatctcaaccctgcaa

SEQ ID NO: 2569327 - DNA, 25 bp, Homo sapien
tgcaatctgccagcatgccttgttt

SEQ ID NO: 2569328 - DNA, 25 bp, Homo sapien
gatcctcgtatgtcttcttattcac

SEQ ID NO: 2569329 - DNA, 25 bp, Homo sapien
gtccttgtcttttcagatcctcgta

SEQ ID NO: 2569330 - DNA, 25 bp, Homo sapien
tattcacaacattcccacttgagtc

SEQ ID NO: 2569331 - DNA, 25 bp, Homo sapien
tcttttcagatcctcgtatgtcttc

SEQ ID NO: 2569332 - DNA, 25 bp, Homo sapien
ctcagtgtcaggctgccatcgttct

SEQ ID NO: 2569333 - DNA, 25 bp, Homo sapien
cagtgtcaggctgccatcgttctga

SEQ ID NO: 2569334 - DNA, 25 bp, Homo sapien
tcaggctgccatcgttctgaagcct

SEQ ID NO: 2569335 - DNA, 25 bp, Homo sapien
ctgccatcgttctgaagccttctgc

SEQ ID NO: 2569336 - DNA, 25 bp, Homo sapien
tcaggatggactgaacatctgttgg

SEQ ID NO: 2569337 - DNA, 25 bp, Homo sapien
gcctttgagattcttgcctacccca

SEQ ID NO: 2569338 - DNA, 25 bp, Homo sapien
taggatgctccctagaagactctgc

SEQ ID NO: 2569339 - DNA, 25 bp, Homo sapien
ggttctggaccacctatagacaaaa

SEQ ID NO: 2569340 - DNA, 25 bp, Homo sapien
tattacctgggcttgaagacttcag

SEQ ID NO: 2569341 - DNA, 25 bp, Homo sapien
tagattcttgaagggctttggcaaa

SEQ ID NO: 2569342 - DNA, 25 bp, Homo sapien
tagtaagcacataacttctccagtc

SEQ ID NO: 2569343 - DNA, 25 bp, Homo sapien
cccaggctgaattcttggttagatt

SEQ ID NO: 2569344 - DNA, 25 bp, Homo sapien
gtcacattagcaaagtgagcagtgt

SEQ ID NO: 2569345 - DNA, 25 bp, Homo sapien
ggatgcccaaacacctcatgccatg

SEQ ID NO: 2569346 - DNA, 25 bp, Homo sapien
agcagtgtttgggatgcccaaacac

SEQ ID NO: 2569347 - DNA, 25 bp, Homo sapien
gtttgggatgcccaaacacctcatg

SEQ ID NO: 2569348 - DNA, 25 bp, Homo sapien
agccccagcaactccaaacacctgc

SEQ ID NO: 2569349 - DNA, 25 bp, Homo sapien
aagccccagcaactccaaacacctg

SEQ ID NO: 2569350 - DNA, 25 bp, Homo sapien
ccccagcaactccaaacacctgcat

SEQ ID NO: 2569351 - DNA, 25 bp, Homo sapien
caaagccccagcaactccaaacacc

SEQ ID NO: 2569352 - DNA, 25 bp, Homo sapien
tagtcctctgcataggcctacagag

SEQ ID NO: 2569353 - DNA, 25 bp, Homo sapien
gattttagtcgtaaggaagagccca

SEQ ID NO: 2569354 - DNA, 25 bp, Homo sapien
gggtaccggcttcatccaagctagt

SEQ ID NO: 2569355 - DNA, 25 bp, Homo sapien
gaaagatgagtgtcagttctccaga

SEQ ID NO: 2569356 - DNA, 25 bp, Homo sapien
caatttaaagcagaacgaagcccga

SEQ ID NO: 2569357 - DNA, 25 bp, Homo sapien
tacctcagagggcatgtggtccaat

SEQ ID NO: 2569358 - DNA, 25 bp, Homo sapien
tgcagctacttgaagagcagtctct

SEQ ID NO: 2569359 - DNA, 25 bp, Homo sapien
tacagggtgcatctagatcgtgtgt

SEQ ID NO: 2569360 - DNA, 25 bp, Homo sapien
ctttctcttcagcccctgttcccgg

SEQ ID NO: 2569361 - DNA, 25 bp, Homo sapien
tctcttcagcccctgttcccgggtc

SEQ ID NO: 2569362 - DNA, 25 bp, Homo sapien
ggattttgcatacagcctcatacag

SEQ ID NO: 2569363 - DNA, 25 bp, Homo sapien
caaataggcagcttaaggcctggct

SEQ ID NO: 2569364 - DNA, 25 bp, Homo sapien
gataacacgggtcgttctgcagccc

SEQ ID NO: 2569365 - DNA, 25 bp, Homo sapien
tctcggttggttgccagggcttgca

SEQ ID NO: 2569366 - DNA, 25 bp, Homo sapien
gcctggtctagggaattgacttctt

SEQ ID NO: 2569367 - DNA, 25 bp, Homo sapien
ccatgcctggtctagggaattgact

SEQ ID NO: 2569368 - DNA, 25 bp, Homo sapien
ctggtctagggaattgacttctttt

SEQ ID NO: 2569369 - DNA, 25 bp, Homo sapien
atgcctggtctagggaattgacttc

SEQ ID NO: 2569370 - DNA, 25 bp, Homo sapien
gctggtctgcccaaatctgggtaat

SEQ ID NO: 2569371 - DNA, 25 bp, Homo sapien
cactctggcgagcactgctggtctg

SEQ ID NO: 2569372 - DNA, 25 bp, Homo sapien
tgaaatggacatgtaacaccacctg

SEQ ID NO: 2569373 - DNA, 25 bp, Homo sapien
cagactgggtattcattggctgcat

SEQ ID NO: 2569374 - DNA, 25 bp, Homo sapien
agagaagtcagggtattctgctcgg

SEQ ID NO: 2569375 - DNA, 25 bp, Homo sapien
agagtccagccaccggccctgggga

SEQ ID NO: 2569376 - DNA, 25 bp, Homo sapien
tgaagggagttgttcagagtccagc

SEQ ID NO: 2569377 - DNA, 25 bp, Homo sapien
tgccagtgaagactggcccctttac

SEQ ID NO: 2569378 - DNA, 25 bp, Homo sapien
gaaagccgcctctggcggagacagc

SEQ ID NO: 2569379 - DNA, 25 bp, Homo sapien
agctccatcgccagcatcctttgga

SEQ ID NO: 2569380 - DNA, 25 bp, Homo sapien
gccagcatcctttggaaagccgcct

SEQ ID NO: 2569381 - DNA, 25 bp, Homo sapien
gcgctccaggtttggctgagacgtt

SEQ ID NO: 2569382 - DNA, 25 bp, Homo sapien
ttcccgcggtccacgccggcagcct

SEQ ID NO: 2569383 - DNA, 25 bp, Homo sapien
tgccgctgctccaccgcgtccagca

SEQ ID NO: 2569384 - DNA, 25 bp, Homo sapien
tgtgggggtggcctcccgccgagcc

SEQ ID NO: 2569385 - DNA, 25 bp, Homo sapien
tcctcgcaggctgcgatggtgtcca

SEQ ID NO: 2569386 - DNA, 25 bp, Homo sapien
gggccggcgcttgcgcggggccaag

SEQ ID NO: 2569387 - DNA, 25 bp, Homo sapien
agagacagacggtcagggccggcgc

SEQ ID NO: 2569388 - DNA, 25 bp, Homo sapien
tcagggccggcgcttgcgcggggcc

SEQ ID NO: 2569389 - DNA, 25 bp, Homo sapien
agcgagagacagacggtcagggccg

SEQ ID NO: 2569390 - DNA, 25 bp, Homo sapien
gtgaccagtctgagcccgggcccca

SEQ ID NO: 2569391 - DNA, 25 bp, Homo sapien
tgaccagtctgagcccgggccccat

SEQ ID NO: 2569392 - DNA, 25 bp, Homo sapien
ccgtgaccagtctgagcccgggccc

SEQ ID NO: 2569393 - DNA, 25 bp, Homo sapien
ccccgtgaccagtctgagcccgggc

SEQ ID NO: 2569394 - DNA, 25 bp, Homo sapien
cagcgctgcgttagggcttcgcaag

SEQ ID NO: 2569395 - DNA, 25 bp, Homo sapien
tccccagcgctgcgttagggcttcg

SEQ ID NO: 2569396 - DNA, 25 bp, Homo sapien
gctgcgttagggcttcgcaaggctg

SEQ ID NO: 2569397 - DNA, 25 bp, Homo sapien
ctgcgttagggcttcgcaaggctgc

SEQ ID NO: 2569398 - DNA, 25 bp, Homo sapien
tatcatgatatcacagcggtgcagc

SEQ ID NO: 2569399 - DNA, 25 bp, Homo sapien
cattgatagtacactgggatggcca

SEQ ID NO: 2569400 - DNA, 25 bp, Homo sapien
tatgtaccgaggacttaacgtgccc

SEQ ID NO: 2569401 - DNA, 25 bp, Homo sapien
agtgaccctggtgatggaacgctcg

SEQ ID NO: 2569402 - DNA, 25 bp, Homo sapien
agtgagagttcagcatcccttccca

SEQ ID NO: 2569403 - DNA, 25 bp, Homo sapien
gtaataagctacattgtgtccccag

SEQ ID NO: 2569404 - DNA, 25 bp, Homo sapien
gtccagagttagagcccgtatccct

SEQ ID NO: 2569405 - DNA, 25 bp, Homo sapien
catagattagaacaaaggaggacac

SEQ ID NO: 2569406 - DNA, 25 bp, Homo sapien
caaaggctcctgaagctagaaccag

SEQ ID NO: 2569407 - DNA, 25 bp, Homo sapien
ctgagcactgtagaccaagcccttg

SEQ ID NO: 2569408 - DNA, 25 bp, Homo sapien
gatttagaatctagtgagagcctcc

SEQ ID NO: 2569409 - DNA, 25 bp, Homo sapien
ctcatttgcagaggccaccggagct

SEQ ID NO: 2569410 - DNA, 25 bp, Homo sapien
gagtcaagttacactgctgttagca

SEQ ID NO: 2569411 - DNA, 25 bp, Homo sapien
gctctcagtatggattagccttcaa

SEQ ID NO: 2569412 - DNA, 25 bp, Homo sapien
tccttaggagagtaggtcaaagtgt

SEQ ID NO: 2569413 - DNA, 25 bp, Homo sapien
agtgttctccgcagccttttgtcta

SEQ ID NO: 2569414 - DNA, 25 bp, Homo sapien
tgtggtaaagccatagccagcccag

SEQ ID NO: 2569415 - DNA, 25 bp, Homo sapien
gaccacgcctagcttccaattcagt

SEQ ID NO: 2569416 - DNA, 25 bp, Homo sapien
gcctgctttaatcagggttcctgca

SEQ ID NO: 2569417 - DNA, 25 bp, Homo sapien
tcagtacagtggtttccaatgcacc

SEQ ID NO: 2569418 - DNA, 25 bp, Homo sapien
tgtgcccaggcactagctacaaggc

SEQ ID NO: 2569419 - DNA, 25 bp, Homo sapien
catggtgacatcttccagcaaggca

SEQ ID NO: 2569420 - DNA, 25 bp, Homo sapien
gaatctactgggaggagcttaaacc

SEQ ID NO: 2569421 - DNA, 25 bp, Homo sapien
tgggaaaaattaggctctggagcac

SEQ ID NO: 2569422 - DNA, 25 bp, Homo sapien
tacttgccattgaccctgttgcgcg

SEQ ID NO: 2569423 - DNA, 25 bp, Homo sapien
cgcgtattgtggttgttccagggcc

SEQ ID NO: 2569424 - DNA, 25 bp, Homo sapien
taatggaaacgatctcgggcctcac

SEQ ID NO: 2569425 - DNA, 25 bp, Homo sapien
gcaaagtaggtgtacatgccgtcaa

SEQ ID NO: 2569426 - DNA, 25 bp, Homo sapien
gatgagatacggatgcaacacagcc

SEQ ID NO: 2569427 - DNA, 25 bp, Homo sapien
tggagccagtcagtctccacagttg

SEQ ID NO: 2569428 - DNA, 25 bp, Homo sapien
aacacagcccagttctggagccagt

SEQ ID NO: 2569429 - DNA, 25 bp, Homo sapien
cagtcagtctccacagttggagtca

SEQ ID NO: 2569430 - DNA, 25 bp, Homo sapien
tgtccagctggacggtcacatctga

SEQ ID NO: 2569431 - DNA, 25 bp, Homo sapien
caaagggcagttggaatacgaggct

SEQ ID NO: 2569432 - DNA, 25 bp, Homo sapien
cgtggaggaacatcctggtttgtga

SEQ ID NO: 2569433 - DNA, 25 bp, Homo sapien
ggccctggcaacttcgtggaggaac

SEQ ID NO: 2569434 - DNA, 25 bp, Homo sapien
aaacagtgataacctcatagagctg

SEQ ID NO: 2569435 - DNA, 25 bp, Homo sapien
aaagcctgatttaggcccggtgcgg

SEQ ID NO: 2569436 - DNA, 25 bp, Homo sapien
tgagaaaagcctgatttaggcccgg

SEQ ID NO: 2569437 - DNA, 25 bp, Homo sapien
aaatggagatgcaaacagtgataac

SEQ ID NO: 2569438 - DNA, 25 bp, Homo sapien
ggatgtagagttcaccatctgggga

SEQ ID NO: 2569439 - DNA, 25 bp, Homo sapien
caaggatgtagagttcaccatctgg

SEQ ID NO: 2569440 - DNA, 25 bp, Homo sapien
atgtagagttcaccatctggggaca

SEQ ID NO: 2569441 - DNA, 25 bp, Homo sapien
aaggatgtagagttcaccatctggg

SEQ ID NO: 2569442 - DNA, 25 bp, Homo sapien
gactggcactatctggtccagagag

SEQ ID NO: 2569443 - DNA, 25 bp, Homo sapien
gagagacatcgtccccggtaatggc

SEQ ID NO: 2569444 - DNA, 25 bp, Homo sapien
cggtaatggccatcctccggtgcgt

SEQ ID NO: 2569445 - DNA, 25 bp, Homo sapien
ttcttccagcgtaaaatcccgcgag

SEQ ID NO: 2569446 - DNA, 25 bp, Homo sapien
caaatcgaggagtaaaacaacttgc

SEQ ID NO: 2569447 - DNA, 25 bp, Homo sapien
tactctttaatatggacaaatcgag

SEQ ID NO: 2569448 - DNA, 25 bp, Homo sapien
tggcctaactcactttactctttaa

SEQ ID NO: 2569449 - DNA, 25 bp, Homo sapien
tcaagatcatgtggttccaccaggt

SEQ ID NO: 2569450 - DNA, 25 bp, Homo sapien
tctgccggctgtccccctcacacag

SEQ ID NO: 2569451 - DNA, 25 bp, Homo sapien
gtagcgcacgagtcccaggaggcgg

SEQ ID NO: 2569452 - DNA, 25 bp, Homo sapien
ccgccgtgctccaggcggtagcgca

SEQ ID NO: 2569453 - DNA, 25 bp, Homo sapien
cctcacacagcacaccttgcaccgc

SEQ ID NO: 2569454 - DNA, 25 bp, Homo sapien
gcgtctcctggattgccacagactg

SEQ ID NO: 2569455 - DNA, 25 bp, Homo sapien
cagtattccccctcagccagcgtct

SEQ ID NO: 2569456 - DNA, 25 bp, Homo sapien
gcagtattccccctcagccagcgtc

SEQ ID NO: 2569457 - DNA, 25 bp, Homo sapien
cagcgtctcctggattgccacagac

SEQ ID NO: 2569458 - DNA, 25 bp, Homo sapien
ctggcccctgctgagcgcacacacc

SEQ ID NO: 2569459 - DNA, 25 bp, Homo sapien
gctggcccctgctgagcgcacacac

SEQ ID NO: 2569460 - DNA, 25 bp, Homo sapien
agggcgcacgggactccgctgcccc

SEQ ID NO: 2569461 - DNA, 25 bp, Homo sapien
cagggcgcacgggactccgctgccc

SEQ ID NO: 2569462 - DNA, 25 bp, Homo sapien
gcttgtagatcctacagggtcttct

SEQ ID NO: 2569463 - DNA, 25 bp, Homo sapien
gaaggcttgtagatcctacagggtc

SEQ ID NO: 2569464 - DNA, 25 bp, Homo sapien
ctgaaggcttgtagatcctacaggg

SEQ ID NO: 2569465 - DNA, 25 bp, Homo sapien
aaggcttgtagatcctacagggtct

SEQ ID NO: 2569466 - DNA, 25 bp, Homo sapien
tggccacagctttcggccctttgaa

SEQ ID NO: 2569467 - DNA, 25 bp, Homo sapien
agctttcggccctttgaaacagtca

SEQ ID NO: 2569468 - DNA, 25 bp, Homo sapien
catggccacagctttcggccctttg

SEQ ID NO: 2569469 - DNA, 25 bp, Homo sapien
cacagctttcggccctttgaaacag

SEQ ID NO: 2569470 - DNA, 25 bp, Homo sapien
cattgagcacgaaacagagtggccc

SEQ ID NO: 2569471 - DNA, 25 bp, Homo sapien
gctgcaccaggccatgtagtgggaa

SEQ ID NO: 2569472 - DNA, 25 bp, Homo sapien
cagacaagggctaggaccggtttca

SEQ ID NO: 2569473 - DNA, 25 bp, Homo sapien
tagtgggaagcgttgagttgaatca

SEQ ID NO: 2569474 - DNA, 25 bp, Homo sapien
tgggctaccagtaaggccagcagga

SEQ ID NO: 2569475 - DNA, 25 bp, Homo sapien
ccaggttctgggctaccagtaaggc

SEQ ID NO: 2569476 - DNA, 25 bp, Homo sapien
ggtcaactgactgcttgccaggttc

SEQ ID NO: 2569477 - DNA, 25 bp, Homo sapien
gggtcaactgactgcttgccaggtt

SEQ ID NO: 2569478 - DNA, 25 bp, Homo sapien
gtggctaccattggccacatacatc

SEQ ID NO: 2569479 - DNA, 25 bp, Homo sapien
cagctctgtggctaccattggccac

SEQ ID NO: 2569480 - DNA, 25 bp, Homo sapien
gctctgtggctaccattggccacat

SEQ ID NO: 2569481 - DNA, 25 bp, Homo sapien
tctgtggctaccattggccacatac

SEQ ID NO: 2569482 - DNA, 25 bp, Homo sapien
aaattcaggaatagaaggagaggcc

SEQ ID NO: 2569483 - DNA, 25 bp, Homo sapien
acagttgatctggtttgtcaaattc

SEQ ID NO: 2569484 - DNA, 25 bp, Homo sapien
aatagaaggagaggccctgtaggag

SEQ ID NO: 2569485 - DNA, 25 bp, Homo sapien
ggaatagaaggagaggccctgtagg

SEQ ID NO: 2569486 - DNA, 25 bp, Homo sapien
ccaaggactagtgaatccagctttt

SEQ ID NO: 2569487 - DNA, 25 bp, Homo sapien
ttttcctcttgagaatcattctggt

SEQ ID NO: 2569488 - DNA, 25 bp, Homo sapien
gaatcattctggtctcgttcagctt

SEQ ID NO: 2569489 - DNA, 25 bp, Homo sapien
tcagctttccaaggactagtgaatc

SEQ ID NO: 2569490 - DNA, 25 bp, Homo sapien
tagtgttcatcaagttggaccttgg

SEQ ID NO: 2569491 - DNA, 25 bp, Homo sapien
tagtgggcctgggaatacattcaac

SEQ ID NO: 2569492 - DNA, 25 bp, Homo sapien
tagatattagacatacacatgctcc

SEQ ID NO: 2569493 - DNA, 25 bp, Homo sapien
tcatctgtgattagtacatggctat

SEQ ID NO: 2569494 - DNA, 25 bp, Homo sapien
gcggcagccgctgcacgcagacatg

SEQ ID NO: 2569495 - DNA, 25 bp, Homo sapien
aaaggctacagggtgtggtcctggc

SEQ ID NO: 2569496 - DNA, 25 bp, Homo sapien
ctaacagtattaaagcagcggcagc

SEQ ID NO: 2569497 - DNA, 25 bp, Homo sapien
agggtgtggtcctggctcttgtgta

SEQ ID NO: 2569498 - DNA, 25 bp, Homo sapien
gatcgtttctgctgagtcaaatctc

SEQ ID NO: 2569499 - DNA, 25 bp, Homo sapien
gagatcgtttctgctgagtcaaatc

SEQ ID NO: 2569500 - DNA, 25 bp, Homo sapien
cagagatcgtttctgctgagtcaaa

SEQ ID NO: 2569501 - DNA, 25 bp, Homo sapien
agagatcgtttctgctgagtcaaat

SEQ ID NO: 2569502 - DNA, 25 bp, Homo sapien
gggcctttgttgccccatggcttct

SEQ ID NO: 2569503 - DNA, 25 bp, Homo sapien
cctttgttgccccatggcttctgtt

SEQ ID NO: 2569504 - DNA, 25 bp, Homo sapien
gcctttgttgccccatggcttctgt

SEQ ID NO: 2569505 - DNA, 25 bp, Homo sapien
ggcctttgttgccccatggcttctg

SEQ ID NO: 2569506 - DNA, 25 bp, Homo sapien
gagctgcagtcacgtattgggaaca

SEQ ID NO: 2569507 - DNA, 25 bp, Homo sapien
caagggtccctgcagcatcagaaaa

SEQ ID NO: 2569508 - DNA, 25 bp, Homo sapien
gacctgcgctgtatgaagtgtggac

SEQ ID NO: 2569509 - DNA, 25 bp, Homo sapien
aagtgtggacacctcaaggatgcgg

SEQ ID NO: 2569510 - DNA, 25 bp, Homo sapien
cctctggattgtgctggggcagcca

SEQ ID NO: 2569511 - DNA, 25 bp, Homo sapien
agccactgccctcttaactgctgat

SEQ ID NO: 2569512 - DNA, 25 bp, Homo sapien
cttggctggcctctggattgtgctg

SEQ ID NO: 2569513 - DNA, 25 bp, Homo sapien
cctcttaactgctgatggcaggcag

SEQ ID NO: 2569514 - DNA, 25 bp, Homo sapien
ttgcttcaggtctgtcagcccacat

SEQ ID NO: 2569515 - DNA, 25 bp, Homo sapien
agcggcagcattagcgtaaggtcat

SEQ ID NO: 2569516 - DNA, 25 bp, Homo sapien
gcagcattagcgtaaggtcatttcc

SEQ ID NO: 2569517 - DNA, 25 bp, Homo sapien
gtaaggtcatttcctctcgtgcccc

SEQ ID NO: 2569518 - DNA, 25 bp, Homo sapien
gagtcccagagcattttcttcaaac

SEQ ID NO: 2569519 - DNA, 25 bp, Homo sapien
agtcccagagcattttcttcaaaca

SEQ ID NO: 2569520 - DNA, 25 bp, Homo sapien
gtcccagagcattttcttcaaacat

SEQ ID NO: 2569521 - DNA, 25 bp, Homo sapien
gacacaagccacgatcgatggagca

SEQ ID NO: 2569522 - DNA, 25 bp, Homo sapien
gttcatgaacaaacaagccatctcc

SEQ ID NO: 2569523 - DNA, 25 bp, Homo sapien
gaggtacacaggcaaacttcccttc

SEQ ID NO: 2569524 - DNA, 25 bp, Homo sapien
tgttaagagaatgccgctcgagacc

SEQ ID NO: 2569525 - DNA, 25 bp, Homo sapien
tgcccacaggaaactcataaccagg

SEQ ID NO: 2569526 - DNA, 25 bp, Homo sapien
tagcttccgtagctcaatacccaga

SEQ ID NO: 2569527 - DNA, 25 bp, Homo sapien
tgatgacttcccatagatgccaggg

SEQ ID NO: 2569528 - DNA, 25 bp, Homo sapien
cagggtcaacctggaaggaacgctg

SEQ ID NO: 2569529 - DNA, 25 bp, Homo sapien
ccaggtggggctgttaatagccata

SEQ ID NO: 2569530 - DNA, 25 bp, Homo sapien
ggaactgttatggattctggaagag

SEQ ID NO: 2569531 - DNA, 25 bp, Homo sapien
tggaggagatgctgacttaagaagt

SEQ ID NO: 2569532 - DNA, 25 bp, Homo sapien
tcttgctttctctaagtgacccagg

SEQ ID NO: 2569533 - DNA, 25 bp, Homo sapien
tccttctgctgcttttggacctgca

SEQ ID NO: 2569534 - DNA, 25 bp, Homo sapien
ccttctgctgcttttggacctgcat

SEQ ID NO: 2569535 - DNA, 25 bp, Homo sapien
ctccttctgctgcttttggacctgc

SEQ ID NO: 2569536 - DNA, 25 bp, Homo sapien
cctgcttgccgtccagttgctggtc

SEQ ID NO: 2569537 - DNA, 25 bp, Homo sapien
acgcctctcgggaaggccacgtgga

SEQ ID NO: 2569538 - DNA, 25 bp, Homo sapien
aggcatggccgctctgcgctgcaca

SEQ ID NO: 2569539 - DNA, 25 bp, Homo sapien
cccaggtggatgctaccggctggct

SEQ ID NO: 2569540 - DNA, 25 bp, Homo sapien
agtgctgggacacgagggcacaggc

SEQ ID NO: 2569541 - DNA, 25 bp, Homo sapien
acctcacctgggaccaacgatggca

SEQ ID NO: 2569542 - DNA, 25 bp, Homo sapien
gacatccagctaggtgaggcagtgc

SEQ ID NO: 2569543 - DNA, 25 bp, Homo sapien
tgcctgccaagtacatcgacctaga

SEQ ID NO: 2569544 - DNA, 25 bp, Homo sapien
ctgtgttgctttgggccacctgggg

SEQ ID NO: 2569545 - DNA, 25 bp, Homo sapien
tgtgttgctttgggccacctggggc

SEQ ID NO: 2569546 - DNA, 25 bp, Homo sapien
tggtcgtggaggagttcagattccc

SEQ ID NO: 2569547 - DNA, 25 bp, Homo sapien
tcctgggaaggggacctttgagcta

SEQ ID NO: 2569548 - DNA, 25 bp, Homo sapien
tcctctgggagtcggtgtcctggga

SEQ ID NO: 2569549 - DNA, 25 bp, Homo sapien
tccttgggctgaaaggtctgggtct

SEQ ID NO: 2569550 - DNA, 25 bp, Homo sapien
acagatagcccctcttaggtctttc

SEQ ID NO: 2569551 - DNA, 25 bp, Homo sapien
tcaacagatagcccctcttaggtct

SEQ ID NO: 2569552 - DNA, 25 bp, Homo sapien
gatagcccctcttaggtctttctgc

SEQ ID NO: 2569553 - DNA, 25 bp, Homo sapien
tagcccctcttaggtctttctgcct

SEQ ID NO: 2569554 - DNA, 25 bp, Homo sapien
gagcccgggtgcagggtcaggatcc

SEQ ID NO: 2569555 - DNA, 25 bp, Homo sapien
ggctggcggctaagctgtccgggct

SEQ ID NO: 2569556 - DNA, 25 bp, Homo sapien
gctgtccgggcttggctgagcgaac

SEQ ID NO: 2569557 - DNA, 25 bp, Homo sapien
tggctgagcgaacgccacagttctc

SEQ ID NO: 2569558 - DNA, 25 bp, Homo sapien
tttgagcttggactgttgctccaac

SEQ ID NO: 2569559 - DNA, 25 bp, Homo sapien
ccaactgcagcgtctgctcctgcat

SEQ ID NO: 2569560 - DNA, 25 bp, Homo sapien
tgttgctccaactgcagcgtctgct

SEQ ID NO: 2569561 - DNA, 25 bp, Homo sapien
tgagcttggactgttgctccaactg

SEQ ID NO: 2569562 - DNA, 25 bp, Homo sapien
cattcagggcgtcctttgatgtggc

SEQ ID NO: 2569563 - DNA, 25 bp, Homo sapien
gtgccacattcagggcgtcctttga

SEQ ID NO: 2569564 - DNA, 25 bp, Homo sapien
ctgtgccacattcagggcgtccttt

SEQ ID NO: 2569565 - DNA, 25 bp, Homo sapien
cacattcagggcgtcctttgatgtg

SEQ ID NO: 2569566 - DNA, 25 bp, Homo sapien
cctcgagtggcacaggaatcccagg

SEQ ID NO: 2569567 - DNA, 25 bp, Homo sapien
gcacaggaatcccaggtagatgacg

SEQ ID NO: 2569568 - DNA, 25 bp, Homo sapien
caggaatcccaggtagatgacggcg

SEQ ID NO: 2569569 - DNA, 25 bp, Homo sapien
atcccaggtagatgacggcggccgc

SEQ ID NO: 2569570 - DNA, 25 bp, Homo sapien
gccccgaccaccctgggcacgtcag

SEQ ID NO: 2569571 - DNA, 25 bp, Homo sapien
ctgaggctggtggtcgggaggtccc

SEQ ID NO: 2569572 - DNA, 25 bp, Homo sapien
tgaggctggtggtcgggaggtcccg

SEQ ID NO: 2569573 - DNA, 25 bp, Homo sapien
cctgggcacgtcagggctgaggctg

SEQ ID NO: 2569574 - DNA, 25 bp, Homo sapien
ctgctgcagccaccccaaaaagcca

SEQ ID NO: 2569575 - DNA, 25 bp, Homo sapien
ccctcctgggaggctgtgtgattta

SEQ ID NO: 2569576 - DNA, 25 bp, Homo sapien
cgtctccctcctgggaggctgtgtg

SEQ ID NO: 2569577 - DNA, 25 bp, Homo sapien
tccctcctgggaggctgtgtgattt

SEQ ID NO: 2569578 - DNA, 25 bp, Homo sapien
tctccctcctgggaggctgtgtgat

SEQ ID NO: 2569579 - DNA, 25 bp, Homo sapien
tttcactgggtgtagcagagtccca

SEQ ID NO: 2569580 - DNA, 25 bp, Homo sapien
ggctgggccacagggtccagaccct

SEQ ID NO: 2569581 - DNA, 25 bp, Homo sapien
catagattgcactctggaagctcgc

SEQ ID NO: 2569582 - DNA, 25 bp, Homo sapien
cgttggaagacatcacatagattgc

SEQ ID NO: 2569583 - DNA, 25 bp, Homo sapien
tgtggttcctaaccagctcagctca

SEQ ID NO: 2569584 - DNA, 25 bp, Homo sapien
gctgcgcacgcgtgtaataggccga

SEQ ID NO: 2569585 - DNA, 25 bp, Homo sapien
gacagaggatctcctgttcccgcag

SEQ ID NO: 2569586 - DNA, 25 bp, Homo sapien
gacttcaccctggttcgcagatgca

SEQ ID NO: 2569587 - DNA, 25 bp, Homo sapien
ggagggcctcgcctagcatctgcac

SEQ ID NO: 2569588 - DNA, 25 bp, Homo sapien
cgtagagcttctgggagacgttgta

SEQ ID NO: 2569589 - DNA, 25 bp, Homo sapien
ggaagacctcgcgtgtgggcagcgt

SEQ ID NO: 2569590 - DNA, 25 bp, Homo sapien
gacgttgtagacacgctggatgaag

SEQ ID NO: 2569591 - DNA, 25 bp, Homo sapien
tgaggcgctccatgatccgcagctt

SEQ ID NO: 2569592 - DNA, 25 bp, Homo sapien
cccctgaggcgctccatgatccgca

SEQ ID NO: 2569593 - DNA, 25 bp, Homo sapien
caggctgcggtagtgctcgctctgc

SEQ ID NO: 2569594 - DNA, 25 bp, Homo sapien
tgcaggctgcggtagtgctcgctct

SEQ ID NO: 2569595 - DNA, 25 bp, Homo sapien
gagatgaatgagaagatggtgccca

SEQ ID NO: 2569596 - DNA, 25 bp, Homo sapien
atgaatgagaagatggtgcccaggc

SEQ ID NO: 2569597 - DNA, 25 bp, Homo sapien
tgaatgagaagatggtgcccaggct

SEQ ID NO: 2569598 - DNA, 25 bp, Homo sapien
cttggagatgaatgagaagatggtg

SEQ ID NO: 2569599 - DNA, 25 bp, Homo sapien
ttccttctcatcgagacactgcttg

SEQ ID NO: 2569600 - DNA, 25 bp, Homo sapien
gattgaaacctgtctccgagtcatc

SEQ ID NO: 2569601 - DNA, 25 bp, Homo sapien
tgaaacctgtctccgagtcatccat

SEQ ID NO: 2569602 - DNA, 25 bp, Homo sapien
catcgagacactgcttgaaactgac

SEQ ID NO: 2569603 - DNA, 25 bp, Homo sapien
ttgataggaacggaaatacagtagg

SEQ ID NO: 2569604 - DNA, 25 bp, Homo sapien
ttttgataggaacggaaatacagta

SEQ ID NO: 2569605 - DNA, 25 bp, Homo sapien
taggaacggaaatacagtagggctg

SEQ ID NO: 2569606 - DNA, 25 bp, Homo sapien
gataggaacggaaatacagtagggc

SEQ ID NO: 2569607 - DNA, 25 bp, Homo sapien
catggggagtgcgagcagccatctg

SEQ ID NO: 2569608 - DNA, 25 bp, Homo sapien
tggggagtgcgagcagccatctggg

SEQ ID NO: 2569609 - DNA, 25 bp, Homo sapien
agtgcgagcagccatctggggtggg

SEQ ID NO: 2569610 - DNA, 25 bp, Homo sapien
ggtgcatggggagtgcgagcagcca

SEQ ID NO: 2569611 - DNA, 25 bp, Homo sapien
ggttgctcagcaccctaggactggg

SEQ ID NO: 2569612 - DNA, 25 bp, Homo sapien
ccacaggttgggttgcatgcttggc

SEQ ID NO: 2569613 - DNA, 25 bp, Homo sapien
cattccacctcgaccaggaagaggg

SEQ ID NO: 2569614 - DNA, 25 bp, Homo sapien
gaacctgagagtcagctgcattcca

SEQ ID NO: 2569615 - DNA, 25 bp, Homo sapien
ttcctgcccagattcgagccagtgg

SEQ ID NO: 2569616 - DNA, 25 bp, Homo sapien
accagatattctgcgggccttgcct

SEQ ID NO: 2569617 - DNA, 25 bp, Homo sapien
gatgcagtcccatagacttccagca

SEQ ID NO: 2569618 - DNA, 25 bp, Homo sapien
ggaaggtgacccaggacacctccag

SEQ ID NO: 2569619 - DNA, 25 bp, Homo sapien
agcaggagacggggccccacggcgc

SEQ ID NO: 2569620 - DNA, 25 bp, Homo sapien
gcaggagacggggccccacggcgcc

SEQ ID NO: 2569621 - DNA, 25 bp, Homo sapien
cagatggcaccggactggatgggca

SEQ ID NO: 2569622 - DNA, 25 bp, Homo sapien
gggcttcagatggcaccggactgga

SEQ ID NO: 2569623 - DNA, 25 bp, Homo sapien
ggaagggggcttcagatggcaccgg

SEQ ID NO: 2569624 - DNA, 25 bp, Homo sapien
ttcagatggcaccggactggatggg

SEQ ID NO: 2569625 - DNA, 25 bp, Homo sapien
ccctcggcgacttccggaccgtgcg

SEQ ID NO: 2569626 - DNA, 25 bp, Homo sapien
gctccggccctctaggacgacgtcc

SEQ ID NO: 2569627 - DNA, 25 bp, Homo sapien
cccgctccggccctctaggacgacg

SEQ ID NO: 2569628 - DNA, 25 bp, Homo sapien
cctcggcgacttccggaccgtgcgg

SEQ ID NO: 2569629 - DNA, 25 bp, Homo sapien
agcgaggtggttgcgcctgcgcagt

SEQ ID NO: 2569630 - DNA, 25 bp, Homo sapien
ttgcagcgaggtggttgcgcctgcg

SEQ ID NO: 2569631 - DNA, 25 bp, Homo sapien
aagttgcagcgaggtggttgcgcct

SEQ ID NO: 2569632 - DNA, 25 bp, Homo sapien
ggaagttgcagcgaggtggttgcgc

SEQ ID NO: 2569633 - DNA, 25 bp, Homo sapien
tattgagtcactataacccttattc

SEQ ID NO: 2569634 - DNA, 25 bp, Homo sapien
gagtcactataacccttattcccag

SEQ ID NO: 2569635 - DNA, 25 bp, Homo sapien
gaattctattgagtcactataaccc

SEQ ID NO: 2569636 - DNA, 25 bp, Homo sapien
tctccttgaattctattgagtcact

SEQ ID NO: 2569637 - DNA, 25 bp, Homo sapien
caggatctatatatacgatcatgtc

SEQ ID NO: 2569638 - DNA, 25 bp, Homo sapien
tctagtctattgagagttttcaaca

SEQ ID NO: 2569639 - DNA, 25 bp, Homo sapien
gatacaggatctatatatacgatca

SEQ ID NO: 2569640 - DNA, 25 bp, Homo sapien
gcctacttgattgtcatgaataagc

SEQ ID NO: 2569641 - DNA, 25 bp, Homo sapien
tcaaccactgcatcctttctcatta

SEQ ID NO: 2569642 - DNA, 25 bp, Homo sapien
agcttgccacgtctgaagtagacct

SEQ ID NO: 2569643 - DNA, 25 bp, Homo sapien
cactgcatcctttctcattacagct

SEQ ID NO: 2569644 - DNA, 25 bp, Homo sapien
acagcttgccacgtctgaagtagac

SEQ ID NO: 2569645 - DNA, 25 bp, Homo sapien
agccgggctactaggaggccgcact

SEQ ID NO: 2569646 - DNA, 25 bp, Homo sapien
ggctactaggaggccgcactggctt

SEQ ID NO: 2569647 - DNA, 25 bp, Homo sapien
ggcagagccgggctactaggaggcc

SEQ ID NO: 2569648 - DNA, 25 bp, Homo sapien
gctactaggaggccgcactggcttc

SEQ ID NO: 2569649 - DNA, 25 bp, Homo sapien
gggcccgtgtcacatctgtgcactg

SEQ ID NO: 2569650 - DNA, 25 bp, Homo sapien
caggtgcacgctgctgcgtggagtg

SEQ ID NO: 2569651 - DNA, 25 bp, Homo sapien
tcccacgtgacaccggtgctgggac

SEQ ID NO: 2569652 - DNA, 25 bp, Homo sapien
cccctcaacagaagctcccacgtga

SEQ ID NO: 2569653 - DNA, 25 bp, Homo sapien
ttccggcatgacatgccctctgtca

SEQ ID NO: 2569654 - DNA, 25 bp, Homo sapien
gtcagccgagcgatctctaagcact

SEQ ID NO: 2569655 - DNA, 25 bp, Homo sapien
catgacatgccctctgtcagccgag

SEQ ID NO: 2569656 - DNA, 25 bp, Homo sapien
ggccagctgtgcgatcttccggcat

SEQ ID NO: 2569657 - DNA, 25 bp, Homo sapien
cccagtcgaactgctcggggtggca

SEQ ID NO: 2569658 - DNA, 25 bp, Homo sapien
ccatcacgtcgatgcaggcattgat

SEQ ID NO: 2569659 - DNA, 25 bp, Homo sapien
tgcaggcattgatggcccagtcgaa

SEQ ID NO: 2569660 - DNA, 25 bp, Homo sapien
catactcgttaagatacattctcac

SEQ ID NO: 2569661 - DNA, 25 bp, Homo sapien
ggccctgaggtcctcgcttatcttc

SEQ ID NO: 2569662 - DNA, 25 bp, Homo sapien
gccctgaggtcctcgcttatcttct

SEQ ID NO: 2569663 - DNA, 25 bp, Homo sapien
ctggcccgtgcggtacaggaaggcg

SEQ ID NO: 2569664 - DNA, 25 bp, Homo sapien
gctggcccgtgcggtacaggaaggc

SEQ ID NO: 2569665 - DNA, 25 bp, Homo sapien
cttccgaaggaaggcgtccgcttca

SEQ ID NO: 2569666 - DNA, 25 bp, Homo sapien
tggctcgcttccgaaggaaggcgtc

SEQ ID NO: 2569667 - DNA, 25 bp, Homo sapien
cgaaggaaggcgtccgcttcatcca

SEQ ID NO: 2569668 - DNA, 25 bp, Homo sapien
tcgcttccgaaggaaggcgtccgct

SEQ ID NO: 2569669 - DNA, 25 bp, Homo sapien
ggccaagctgggtgagagtgatgcc

SEQ ID NO: 2569670 - DNA, 25 bp, Homo sapien
gcagcgtccggccatggcaggagca

SEQ ID NO: 2569671 - DNA, 25 bp, Homo sapien
gcagcccacagcagcgtccggccat

SEQ ID NO: 2569672 - DNA, 25 bp, Homo sapien
agagcccacggggtcaggctctgcc

SEQ ID NO: 2569673 - DNA, 25 bp, Homo sapien
ccacgcccacctgcaggcgtgttgg

SEQ ID NO: 2569674 - DNA, 25 bp, Homo sapien
cacgcccacctgcaggcgtgttggg

SEQ ID NO: 2569675 - DNA, 25 bp, Homo sapien
gccctgagccaagtatcccactggc

SEQ ID NO: 2569676 - DNA, 25 bp, Homo sapien
ccctgagccaagtatcccactggca

SEQ ID NO: 2569677 - DNA, 25 bp, Homo sapien
caccagggtccacactcaggggact

SEQ ID NO: 2569678 - DNA, 25 bp, Homo sapien
gaaagacagggtccccaagagacac

SEQ ID NO: 2569679 - DNA, 25 bp, Homo sapien
gacagggtccccaagagacacctgg

SEQ ID NO: 2569680 - DNA, 25 bp, Homo sapien
ctgcagaaagacagggtccccaaga

SEQ ID NO: 2569681 - DNA, 25 bp, Homo sapien
tggtgcatgctgtggggacgtctca

SEQ ID NO: 2569682 - DNA, 25 bp, Homo sapien
ccgcgccggctggtattggcccagt

SEQ ID NO: 2569683 - DNA, 25 bp, Homo sapien
acgtccccgcctgtcatgatggcgt

SEQ ID NO: 2569684 - DNA, 25 bp, Homo sapien
ccggctggtattggcccagtcaaag

SEQ ID NO: 2569685 - DNA, 25 bp, Homo sapien
gcctgtcatgatggcgtagtccatg

SEQ ID NO: 2569686 - DNA, 25 bp, Homo sapien
cctctgcaaagcctgcacactccac

SEQ ID NO: 2569687 - DNA, 25 bp, Homo sapien
ccctctgcctctgcaaagcctgcac

SEQ ID NO: 2569688 - DNA, 25 bp, Homo sapien
ggagacagaacagatgttccctctg

SEQ ID NO: 2569689 - DNA, 25 bp, Homo sapien
tgaggggagacagaacagatgttcc

SEQ ID NO: 2569690 - DNA, 25 bp, Homo sapien
gcccagcgtccctgcctggaagcca

SEQ ID NO: 2569691 - DNA, 25 bp, Homo sapien
cccagcgtccctgcctggaagccac

SEQ ID NO: 2569692 - DNA, 25 bp, Homo sapien
aggctctgcccagcgtccctgcctg

SEQ ID NO: 2569693 - DNA, 25 bp, Homo sapien
tgtggaggctctgcccagcgtccct

SEQ ID NO: 2569694 - DNA, 25 bp, Homo sapien
cttggcaaacagcgtcttcccggtg

SEQ ID NO: 2569695 - DNA, 25 bp, Homo sapien
ttggcaaacagcgtcttcccggtgc

SEQ ID NO: 2569696 - DNA, 25 bp, Homo sapien
gcgatgtcgcgcacgcgtacttgca

SEQ ID NO: 2569697 - DNA, 25 bp, Homo sapien
cgatgtcgcgcacgcgtacttgcag

SEQ ID NO: 2569698 - DNA, 25 bp, Homo sapien
gatgtcgcgcacgcgtacttgcaga

SEQ ID NO: 2569699 - DNA, 25 bp, Homo sapien
ggcgatgtcgcgcacgcgtacttgc

SEQ ID NO: 2569700 - DNA, 25 bp, Homo sapien
caggggcttggaggacacagtctgc

SEQ ID NO: 2569701 - DNA, 25 bp, Homo sapien
gacaggggcttggaggacacagtct

SEQ ID NO: 2569702 - DNA, 25 bp, Homo sapien
ctggcgaggaagacaggggcttgga

SEQ ID NO: 2569703 - DNA, 25 bp, Homo sapien
aagacaggggcttggaggacacagt

SEQ ID NO: 2569704 - DNA, 25 bp, Homo sapien
ggtgtgtgcttgtcaccggggccac

SEQ ID NO: 2569705 - DNA, 25 bp, Homo sapien
tctggggtgtgtgcttgtcaccggg

SEQ ID NO: 2569706 - DNA, 25 bp, Homo sapien
aggctccaagccagccggttctggg

SEQ ID NO: 2569707 - DNA, 25 bp, Homo sapien
gccaggctccaagccagccggttct

SEQ ID NO: 2569708 - DNA, 25 bp, Homo sapien
cctaaacagagccccagcaagaggg

SEQ ID NO: 2569709 - DNA, 25 bp, Homo sapien
ccactccctaaacagagccccagca

SEQ ID NO: 2569710 - DNA, 25 bp, Homo sapien
actccctaaacagagccccagcaag

SEQ ID NO: 2569711 - DNA, 25 bp, Homo sapien
tccctaaacagagccccagcaagag

SEQ ID NO: 2569712 - DNA, 25 bp, Homo sapien
tctgcagaagcacaagtttccaaag

SEQ ID NO: 2569713 - DNA, 25 bp, Homo sapien
ttccaaagcaggattcgggatggca

SEQ ID NO: 2569714 - DNA, 25 bp, Homo sapien
tgcagaagcacaagtttccaaagca

SEQ ID NO: 2569715 - DNA, 25 bp, Homo sapien
ccaaagcaggattcgggatggcagc

SEQ ID NO: 2569716 - DNA, 25 bp, Homo sapien
cactttcggggacccagccagcgga

SEQ ID NO: 2569717 - DNA, 25 bp, Homo sapien
cacactttcggggacccagccagcg

SEQ ID NO: 2569718 - DNA, 25 bp, Homo sapien
tccagccacactttcggggacccag

SEQ ID NO: 2569719 - DNA, 25 bp, Homo sapien
tgtcgtctgagagggccctgacctc

SEQ ID NO: 2569720 - DNA, 25 bp, Homo sapien
ccccacggcccgcactgaggatctg

SEQ ID NO: 2569721 - DNA, 25 bp, Homo sapien
ggatctgatcttggctgccattcct

SEQ ID NO: 2569722 - DNA, 25 bp, Homo sapien
ccacggcccgcactgaggatctgat

SEQ ID NO: 2569723 - DNA, 25 bp, Homo sapien
tgaggatctgatcttggctgccatt

SEQ ID NO: 2569724 - DNA, 25 bp, Homo sapien
gccagccttctttctcctacggcct

SEQ ID NO: 2569725 - DNA, 25 bp, Homo sapien
aggaaacaccgccagccttctttct

SEQ ID NO: 2569726 - DNA, 25 bp, Homo sapien
ctaagaggaaacaccgccagccttc

SEQ ID NO: 2569727 - DNA, 25 bp, Homo sapien
ctttctcctacggcctttggattct

SEQ ID NO: 2569728 - DNA, 25 bp, Homo sapien
taaccatctaaacgctgggactttg

SEQ ID NO: 2569729 - DNA, 25 bp, Homo sapien
gaagcagctctatgttaaccatcta

SEQ ID NO: 2569730 - DNA, 25 bp, Homo sapien
cacgtactttcagactgttgccgga

SEQ ID NO: 2569731 - DNA, 25 bp, Homo sapien
tgggacagatgacagggtcgcctcc

SEQ ID NO: 2569732 - DNA, 25 bp, Homo sapien
tagccgaggcctgactgcgtgggct

SEQ ID NO: 2569733 - DNA, 25 bp, Homo sapien
caccactgtataggccttggtcgtg

SEQ ID NO: 2569734 - DNA, 25 bp, Homo sapien
tgtccacgaagaactcgcaggggtt

SEQ ID NO: 2569735 - DNA, 25 bp, Homo sapien
actggcggctgcctgtcaattccgg

SEQ ID NO: 2569736 - DNA, 25 bp, Homo sapien
tgtgatccgattcactgccactgcc

SEQ ID NO: 2569737 - DNA, 25 bp, Homo sapien
ccactcggtgccgtgtgatccgatt

SEQ ID NO: 2569738 - DNA, 25 bp, Homo sapien
tccgggtggacccactgcttttgct

SEQ ID NO: 2569739 - DNA, 25 bp, Homo sapien
ctgctccgggtggacccactgcttt

SEQ ID NO: 2569740 - DNA, 25 bp, Homo sapien
ctgggagtgagaacaggatggggaa

SEQ ID NO: 2569741 - DNA, 25 bp, Homo sapien
caggatggggaaggagcctgtcagc

SEQ ID NO: 2569742 - DNA, 25 bp, Homo sapien
aacaggatggggaaggagcctgtca

SEQ ID NO: 2569743 - DNA, 25 bp, Homo sapien
ggatggggaaggagcctgtcagcac

SEQ ID NO: 2569744 - DNA, 25 bp, Homo sapien
ccgggcaggaacggtggcccgtgca

SEQ ID NO: 2569745 - DNA, 25 bp, Homo sapien
cggtggcccgtgcaggacgggtggg

SEQ ID NO: 2569746 - DNA, 25 bp, Homo sapien
tggcccgtgcaggacgggtgggtgg

SEQ ID NO: 2569747 - DNA, 25 bp, Homo sapien
cgtccagaacaaccgcccccgccag

SEQ ID NO: 2569748 - DNA, 25 bp, Homo sapien
ctaaagcccgggtcctggtaggcag

SEQ ID NO: 2569749 - DNA, 25 bp, Homo sapien
gtcctgatccgaagtcccactggag

SEQ ID NO: 2569750 - DNA, 25 bp, Homo sapien
gggccagcgtgtcctgatccgaagt

SEQ ID NO: 2569751 - DNA, 25 bp, Homo sapien
tgccgctgccatagctaaagcccgg

SEQ ID NO: 2569752 - DNA, 25 bp, Homo sapien
ctgttgaggttcagggtggcgagat

SEQ ID NO: 2569753 - DNA, 25 bp, Homo sapien
tcttgttgaccgtgtgccgcaggaa

SEQ ID NO: 2569754 - DNA, 25 bp, Homo sapien
gatccccgaagacgtagtagcactg

SEQ ID NO: 2569755 - DNA, 25 bp, Homo sapien
gaagccgtgcttcagcaagctgctg

SEQ ID NO: 2569756 - DNA, 25 bp, Homo sapien
tgaagccctccacgtgtgtgtacag

SEQ ID NO: 2569757 - DNA, 25 bp, Homo sapien
atgtcactcttcaccgtcagcggcg

SEQ ID NO: 2569758 - DNA, 25 bp, Homo sapien
tccagtcccgagtctggcagctgca

SEQ ID NO: 2569759 - DNA, 25 bp, Homo sapien
atgcggtcgcggatctccagtcccg

SEQ ID NO: 2569760 - DNA, 25 bp, Homo sapien
ggacgacggcgctcatgtcactctt

SEQ ID NO: 2569761 - DNA, 25 bp, Homo sapien
caccaggcacggagctggttagtga

SEQ ID NO: 2569762 - DNA, 25 bp, Homo sapien
tggagcaccaggcacggagctggtt

SEQ ID NO: 2569763 - DNA, 25 bp, Homo sapien
acggcgctggagcagggactcgtac

SEQ ID NO: 2569764 - DNA, 25 bp, Homo sapien
aggaggagctggtgcgcgtgacggc

SEQ ID NO: 2569765 - DNA, 25 bp, Homo sapien
ccaggcggcggggtcgatgggccgc

SEQ ID NO: 2569766 - DNA, 25 bp, Homo sapien
cggcggggtcgatgggccgcaccgg

SEQ ID NO: 2569767 - DNA, 25 bp, Homo sapien
gggtcgatgggccgcaccgggtcag

SEQ ID NO: 2569768 - DNA, 25 bp, Homo sapien
gggacagccaggcggcggggtcgat

SEQ ID NO: 2569769 - DNA, 25 bp, Homo sapien
tagcttcggggcgttgggtcccagc

SEQ ID NO: 2569770 - DNA, 25 bp, Homo sapien
cgtgggacggtgaagtagcttcggg

SEQ ID NO: 2569771 - DNA, 25 bp, Homo sapien
cccgtgggacggtgaagtagcttcg

SEQ ID NO: 2569772 - DNA, 25 bp, Homo sapien
cttcggggcgttgggtcccagcact

SEQ ID NO: 2569773 - DNA, 25 bp, Homo sapien
ccgtctgggaaacgatctcccgcag

SEQ ID NO: 2569774 - DNA, 25 bp, Homo sapien
gcacccgcacggcatcgtcattgct

SEQ ID NO: 2569775 - DNA, 25 bp, Homo sapien
cacggcatcgtcattgctcatgttc

SEQ ID NO: 2569776 - DNA, 25 bp, Homo sapien
tctgggaaacgatctcccgcagcac

SEQ ID NO: 2569777 - DNA, 25 bp, Homo sapien
tgaaccccagcagcccccacagacc

SEQ ID NO: 2569778 - DNA, 25 bp, Homo sapien
accccagcagcccccacagacccac

SEQ ID NO: 2569779 - DNA, 25 bp, Homo sapien
ccacagccgcatgaaccccagcagc

SEQ ID NO: 2569780 - DNA, 25 bp, Homo sapien
cacagccgcatgaaccccagcagcc

SEQ ID NO: 2569781 - DNA, 25 bp, Homo sapien
atgtaccacagcagaccccgcagaa

SEQ ID NO: 2569782 - DNA, 25 bp, Homo sapien
ccgcagccgcatgtaccacagcaga

SEQ ID NO: 2569783 - DNA, 25 bp, Homo sapien
agaccccgcagaaccacccgcagcc

SEQ ID NO: 2569784 - DNA, 25 bp, Homo sapien
accccgcagaaccacccgcagccgc

SEQ ID NO: 2569785 - DNA, 25 bp, Homo sapien
acacaagaagcccatacagacacac

SEQ ID NO: 2569786 - DNA, 25 bp, Homo sapien
tcaacccgaagtccgcacgggccca

SEQ ID NO: 2569787 - DNA, 25 bp, Homo sapien
agacacacccgaagccgcacgtcaa

SEQ ID NO: 2569788 - DNA, 25 bp, Homo sapien
ccgaagccgcacgtcaacccgaagt

SEQ ID NO: 2569789 - DNA, 25 bp, Homo sapien
cagcaacatgtcgtagggctcgatg

SEQ ID NO: 2569790 - DNA, 25 bp, Homo sapien
gcagcaacatgtcgtagggctcgat

SEQ ID NO: 2569791 - DNA, 25 bp, Homo sapien
ctgcagcaacatgtcgtagggctcg

SEQ ID NO: 2569792 - DNA, 25 bp, Homo sapien
caacatgtcgtagggctcgatgcgg

SEQ ID NO: 2569793 - DNA, 25 bp, Homo sapien
gccgccgtctccacggtcgttgctc

SEQ ID NO: 2569794 - DNA, 25 bp, Homo sapien
cacggtcgttgctctgccccacgat

SEQ ID NO: 2569795 - DNA, 25 bp, Homo sapien
acggtcgttgctctgccccacgatg

SEQ ID NO: 2569796 - DNA, 25 bp, Homo sapien
ggtcgttgctctgccccacgatgct

SEQ ID NO: 2569797 - DNA, 25 bp, Homo sapien
gaagagccatgagccgcggccaagc

SEQ ID NO: 2569798 - DNA, 25 bp, Homo sapien
caggaagagccatgagccgcggcca

SEQ ID NO: 2569799 - DNA, 25 bp, Homo sapien
aggaagagccatgagccgcggccaa

SEQ ID NO: 2569800 - DNA, 25 bp, Homo sapien
ctgcaggaagagccatgagccgcgg

SEQ ID NO: 2569801 - DNA, 25 bp, Homo sapien
ccatgttgagcgtgacagtgacgat

SEQ ID NO: 2569802 - DNA, 25 bp, Homo sapien
tgagggacatggtggagtcggttat

SEQ ID NO: 2569803 - DNA, 25 bp, Homo sapien
ggacatggtggagtcggttatgctg

SEQ ID NO: 2569804 - DNA, 25 bp, Homo sapien
tgacagtgacgatgttgagggacat

SEQ ID NO: 2569805 - DNA, 25 bp, Homo sapien
gcttcctccgccggcgtttgtgctt

SEQ ID NO: 2569806 - DNA, 25 bp, Homo sapien
tccgccggcgtttgtgcttccggat

SEQ ID NO: 2569807 - DNA, 25 bp, Homo sapien
tcctccgccggcgtttgtgcttccg

SEQ ID NO: 2569808 - DNA, 25 bp, Homo sapien
ggtccgcctgccgaaggcgctgctt

SEQ ID NO: 2569809 - DNA, 25 bp, Homo sapien
cctcgtccgagtccacaaagctgct

SEQ ID NO: 2569810 - DNA, 25 bp, Homo sapien
gtccgagtccacaaagctgctggac

SEQ ID NO: 2569811 - DNA, 25 bp, Homo sapien
tcgtccgagtccacaaagctgctgg

SEQ ID NO: 2569812 - DNA, 25 bp, Homo sapien
atcctcgtccgagtccacaaagctg

SEQ ID NO: 2569813 - DNA, 25 bp, Homo sapien
acatcccgccgtcggtctccccttg

SEQ ID NO: 2569814 - DNA, 25 bp, Homo sapien
tgctgagggcggtggacgcgctgtc

SEQ ID NO: 2569815 - DNA, 25 bp, Homo sapien
ggcagccccacatcccgccgtcggt

SEQ ID NO: 2569816 - DNA, 25 bp, Homo sapien
tgagggcggtggacgcgctgtctgg

SEQ ID NO: 2569817 - DNA, 25 bp, Homo sapien
gggtccacagctgggcagacatgac

SEQ ID NO: 2569818 - DNA, 25 bp, Homo sapien
ggggtccacagctgggcagacatga

SEQ ID NO: 2569819 - DNA, 25 bp, Homo sapien
tcgggcaacgtcccgccggtgactg

SEQ ID NO: 2569820 - DNA, 25 bp, Homo sapien
tcccgtcacggctgctggccacatt

SEQ ID NO: 2569821 - DNA, 25 bp, Homo sapien
tgtctcgttgtccatcccgtcacgg

SEQ ID NO: 2569822 - DNA, 25 bp, Homo sapien
ggactccgtgcctgtctcgttgtcc

SEQ ID NO: 2569823 - DNA, 25 bp, Homo sapien
gtgcctgtctcgttgtccatcccgt

SEQ ID NO: 2569824 - DNA, 25 bp, Homo sapien
tgggaccccgcatccgagtgagcac

SEQ ID NO: 2569825 - DNA, 25 bp, Homo sapien
catccgagtgagcaccctcagccag

SEQ ID NO: 2569826 - DNA, 25 bp, Homo sapien
gatgccgcctgtccgctcaagaggc

SEQ ID NO: 2569827 - DNA, 25 bp, Homo sapien
cccgatgccgcctgtccgctcaaga

SEQ ID NO: 2569828 - DNA, 25 bp, Homo sapien
cgcggccgttgaagcagggaagctt

SEQ ID NO: 2569829 - DNA, 25 bp, Homo sapien
tgggcatatgctgccgtgacgccca

SEQ ID NO: 2569830 - DNA, 25 bp, Homo sapien
gggcatatgctgccgtgacgcccac

SEQ ID NO: 2569831 - DNA, 25 bp, Homo sapien
tgtgggcatatgctgccgtgacgcc

SEQ ID NO: 2569832 - DNA, 25 bp, Homo sapien
ctgtgggcatatgctgccgtgacgc

SEQ ID NO: 2569833 - DNA, 25 bp, Homo sapien
ggaggaatccactcagaggcagcgc

SEQ ID NO: 2569834 - DNA, 25 bp, Homo sapien
aatccactcagaggcagcgccctgg

SEQ ID NO: 2569835 - DNA, 25 bp, Homo sapien
cgccccggggaggaatccactcaga

SEQ ID NO: 2569836 - DNA, 25 bp, Homo sapien
ccccggggaggaatccactcagagg

SEQ ID NO: 2569837 - DNA, 25 bp, Homo sapien
tggcttctcacgaacagctgtctgg

SEQ ID NO: 2569838 - DNA, 25 bp, Homo sapien
gaaacaggcgacctgcttccctagg

SEQ ID NO: 2569839 - DNA, 25 bp, Homo sapien
tattaccgtcactatagaaacaggc

SEQ ID NO: 2569840 - DNA, 25 bp, Homo sapien
tgttgctccgtcatcgctcacagag

SEQ ID NO: 2569841 - DNA, 25 bp, Homo sapien
tgcatgtcgaaaagcgtgcagtggc

SEQ ID NO: 2569842 - DNA, 25 bp, Homo sapien
tgcagtggccttgtgacgtggccgg

SEQ ID NO: 2569843 - DNA, 25 bp, Homo sapien
cgtggccgggcccttggcaaggaag

SEQ ID NO: 2569844 - DNA, 25 bp, Homo sapien
caaggaagtcctggcgggtatcagc

SEQ ID NO: 2569845 - DNA, 25 bp, Homo sapien
tcagatctgccaacactccggagaa

SEQ ID NO: 2569846 - DNA, 25 bp, Homo sapien
tcacgtgaccgtgggctcagatctg

SEQ ID NO: 2569847 - DNA, 25 bp, Homo sapien
tctccgtgaggccttgtgctgtgct

SEQ ID NO: 2569848 - DNA, 25 bp, Homo sapien
aaggagatcctacccctccagagga

SEQ ID NO: 2569849 - DNA, 25 bp, Homo sapien
cccagccggccctccatgaatggtg

SEQ ID NO: 2569850 - DNA, 25 bp, Homo sapien
gccggccctccatgaatggtgacca

SEQ ID NO: 2569851 - DNA, 25 bp, Homo sapien
cagccggccctccatgaatggtgac

SEQ ID NO: 2569852 - DNA, 25 bp, Homo sapien
agccggccctccatgaatggtgacc

SEQ ID NO: 2569853 - DNA, 25 bp, Homo sapien
gagggagggactgagaccacctcaa

SEQ ID NO: 2569854 - DNA, 25 bp, Homo sapien
gttcttgggagacggtgccaaggcc

SEQ ID NO: 2569855 - DNA, 25 bp, Homo sapien
tgagaccacctcaatgctgcagttc

SEQ ID NO: 2569856 - DNA, 25 bp, Homo sapien
gaaggtggcccctggcacaatgccc

SEQ ID NO: 2569857 - DNA, 25 bp, Homo sapien
gaaaggggcagtggaccccatgcgg

SEQ ID NO: 2569858 - DNA, 25 bp, Homo sapien
ccccatgcggtgcagggtgtggctt

SEQ ID NO: 2569859 - DNA, 25 bp, Homo sapien
cggtgcagggtgtggctttgccagc

SEQ ID NO: 2569860 - DNA, 25 bp, Homo sapien
gagggagcccgcgtggccctgggcc

SEQ ID NO: 2569861 - DNA, 25 bp, Homo sapien
gaccccagggcagtgagtagtgaca

SEQ ID NO: 2569862 - DNA, 25 bp, Homo sapien
tgagcattgcgtgacgccgaggact

SEQ ID NO: 2569863 - DNA, 25 bp, Homo sapien
tgctccctcacgacggaaggtttcc

SEQ ID NO: 2569864 - DNA, 25 bp, Homo sapien
tccctggagagtgtcgtccctgcgg

SEQ ID NO: 2569865 - DNA, 25 bp, Homo sapien
tgtcctcaaggtcctgaatgcccag

SEQ ID NO: 2569866 - DNA, 25 bp, Homo sapien
aggtgcccctactcgcccttcctct

SEQ ID NO: 2569867 - DNA, 25 bp, Homo sapien
ccaggtgcccctactcgcccttcct

SEQ ID NO: 2569868 - DNA, 25 bp, Homo sapien
gtccaggtgcccctactcgcccttc

SEQ ID NO: 2569869 - DNA, 25 bp, Homo sapien
caggtgcccctactcgcccttcctc

SEQ ID NO: 2569870 - DNA, 25 bp, Homo sapien
aacagtcctgggtctgacgctctca

SEQ ID NO: 2569871 - DNA, 25 bp, Homo sapien
cttggggcccggtcttcacacgtgg

SEQ ID NO: 2569872 - DNA, 25 bp, Homo sapien
gacgctctcaattatcacccacgga

SEQ ID NO: 2569873 - DNA, 25 bp, Homo sapien
ctatcaacgtccaggacccaagctg

SEQ ID NO: 2569874 - DNA, 25 bp, Homo sapien
gtctgccgggttgggcgcctccgct

SEQ ID NO: 2569875 - DNA, 25 bp, Homo sapien
ggccgtcgggcgtgcaggccttggc

SEQ ID NO: 2569876 - DNA, 25 bp, Homo sapien
tacggctcacggctggcggtccccg

SEQ ID NO: 2569877 - DNA, 25 bp, Homo sapien
ctcaggtaggcgccggccctctcgg

SEQ ID NO: 2569878 - DNA, 25 bp, Homo sapien
cggtcacggtcaccaggtaggcggt

SEQ ID NO: 2569879 - DNA, 25 bp, Homo sapien
agcggcccgaactgcacgtggtagc

SEQ ID NO: 2569880 - DNA, 25 bp, Homo sapien
gaactgcacgtggtagccgagcgcc

SEQ ID NO: 2569881 - DNA, 25 bp, Homo sapien
agcggaaggcggcggtcacggtcac

SEQ ID NO: 2569882 - DNA, 25 bp, Homo sapien
cggagcgtgcgcggccgtgcgtggg

SEQ ID NO: 2569883 - DNA, 25 bp, Homo sapien
ctcacgcggagcgtgcgcggccgtg

SEQ ID NO: 2569884 - DNA, 25 bp, Homo sapien
ggagcgtgcgcggccgtgcgtggga

SEQ ID NO: 2569885 - DNA, 25 bp, Homo sapien
ggaagccgctggacgtgatctccgt

SEQ ID NO: 2569886 - DNA, 25 bp, Homo sapien
tagtagcccgagtctgcggtcagca

SEQ ID NO: 2569887 - DNA, 25 bp, Homo sapien
agatccagtccgtggcgttccctgg

SEQ ID NO: 2569888 - DNA, 25 bp, Homo sapien
ctcaggaggcgcacgttggactcag

SEQ ID NO: 2569889 - DNA, 25 bp, Homo sapien
tcagggaacagcggtcagttcctcc

SEQ ID NO: 2569890 - DNA, 25 bp, Homo sapien
agggaacagcggtcagttcctcctc

SEQ ID NO: 2569891 - DNA, 25 bp, Homo sapien
cagggaacagcggtcagttcctcct

SEQ ID NO: 2569892 - DNA, 25 bp, Homo sapien
ggtcagggaacagcggtcagttcct

SEQ ID NO: 2569893 - DNA, 25 bp, Homo sapien
tggagccatgccccgcagatgctgg

SEQ ID NO: 2569894 - DNA, 25 bp, Homo sapien
tggggattctcagaacgtgccttgg

SEQ ID NO: 2569895 - DNA, 25 bp, Homo sapien
attggaggccccactaggaaagacg

SEQ ID NO: 2569896 - DNA, 25 bp, Homo sapien
caaagacggcagagtccacggtggt

SEQ ID NO: 2569897 - DNA, 25 bp, Homo sapien
gaactcgtagtgagagacgctggct

SEQ ID NO: 2569898 - DNA, 25 bp, Homo sapien
tcggccggtgctgacaatgaacacg

SEQ ID NO: 2569899 - DNA, 25 bp, Homo sapien
tccacgtccacaaagtgcaggtgct

SEQ ID NO: 2569900 - DNA, 25 bp, Homo sapien
aaacagctgttccttggcatagacc

SEQ ID NO: 2569901 - DNA, 25 bp, Homo sapien
tctctctgggcttgtgttatcccat

SEQ ID NO: 2569902 - DNA, 25 bp, Homo sapien
tgagagggcgactctccgctccaag

SEQ ID NO: 2569903 - DNA, 25 bp, Homo sapien
cttgtgttatcccatctgtgagagg

SEQ ID NO: 2569904 - DNA, 25 bp, Homo sapien
tggccatgggatctagggctctctc

SEQ ID NO: 2569905 - DNA, 25 bp, Homo sapien
gccagcgcccagccgcaagctcagg

SEQ ID NO: 2569906 - DNA, 25 bp, Homo sapien
agggccaggccgagcgccgtccagg

SEQ ID NO: 2569907 - DNA, 25 bp, Homo sapien
agcgcccagccgcaagctcagggcc

SEQ ID NO: 2569908 - DNA, 25 bp, Homo sapien
tccgccagcgcccagccgcaagctc

SEQ ID NO: 2569909 - DNA, 25 bp, Homo sapien
cacactgggcctgttacccatatac

SEQ ID NO: 2569910 - DNA, 25 bp, Homo sapien
agatggttggttgaggccctgtcca

SEQ ID NO: 2569911 - DNA, 25 bp, Homo sapien
tgttacccatataccctacccagtg

SEQ ID NO: 2569912 - DNA, 25 bp, Homo sapien
gaagacaggaattcgagagagactc

SEQ ID NO: 2569913 - DNA, 25 bp, Homo sapien
acctggggtctgaccggaagctggc

SEQ ID NO: 2569914 - DNA, 25 bp, Homo sapien
gacctggggtctgaccggaagctgg

SEQ ID NO: 2569915 - DNA, 25 bp, Homo sapien
cctggggtctgaccggaagctggct

SEQ ID NO: 2569916 - DNA, 25 bp, Homo sapien
gatttccagagctgatgaacgttgt

SEQ ID NO: 2569917 - DNA, 25 bp, Homo sapien
gaaactggacacaattgttgaggga

SEQ ID NO: 2569918 - DNA, 25 bp, Homo sapien
gaaggaattcgtggtgaaactggac

SEQ ID NO: 2569919 - DNA, 25 bp, Homo sapien
tcagcagattagacggaagggagta

SEQ ID NO: 2569920 - DNA, 25 bp, Homo sapien
tgcgatcgaccacagctgtgcagga

SEQ ID NO: 2569921 - DNA, 25 bp, Homo sapien
tatctgttgctgcagttaccggaac

SEQ ID NO: 2569922 - DNA, 25 bp, Homo sapien
gcagttaccggaacctttgccagga

SEQ ID NO: 2569923 - DNA, 25 bp, Homo sapien
aggactagtacaggaccacgggtga

SEQ ID NO: 2569924 - DNA, 25 bp, Homo sapien
gaagggcacgttcccacaggattca

SEQ ID NO: 2569925 - DNA, 25 bp, Homo sapien
catgcagcggaaaggacagtgaacg

SEQ ID NO: 2569926 - DNA, 25 bp, Homo sapien
ggcctgaagccatctctagcaagtg

SEQ ID NO: 2569927 - DNA, 25 bp, Homo sapien
tcatgaggcacagtgacaagggcca

SEQ ID NO: 2569928 - DNA, 25 bp, Homo sapien
agggccatccctcatgtctgttatt

SEQ ID NO: 2569929 - DNA, 25 bp, Homo sapien
caaaacatggacatcatctgtgagg

SEQ ID NO: 2569930 - DNA, 25 bp, Homo sapien
caaactgcaaattactctgtctctt

SEQ ID NO: 2569931 - DNA, 25 bp, Homo sapien
tctgttattgggttgtagataaaca

SEQ ID NO: 2569932 - DNA, 25 bp, Homo sapien
cagtggtactgcaccactctggaaa

SEQ ID NO: 2569933 - DNA, 25 bp, Homo sapien
tcagtggtactgcaccactctggaa

SEQ ID NO: 2569934 - DNA, 25 bp, Homo sapien
gcaaatccttcgtgtcgcctcctac

SEQ ID NO: 2569935 - DNA, 25 bp, Homo sapien
agtggtactgcaccactctggaaaa

SEQ ID NO: 2569936 - DNA, 25 bp, Homo sapien
gatccgctaggactttcctgttgag

SEQ ID NO: 2569937 - DNA, 25 bp, Homo sapien
tggccagatccgctaggactttcct

SEQ ID NO: 2569938 - DNA, 25 bp, Homo sapien
ttgaaagtctttggctcgtagatgg

SEQ ID NO: 2569939 - DNA, 25 bp, Homo sapien
aagatttgaaagtctttggctcgta

SEQ ID NO: 2569940 - DNA, 25 bp, Homo sapien
cctaggagaatcctatctgggtggc

SEQ ID NO: 2569941 - DNA, 25 bp, Homo sapien
tgtcagtgtgagacacacactccgg

SEQ ID NO: 2569942 - DNA, 25 bp, Homo sapien
gcagaggacttccaggcaggatgct

SEQ ID NO: 2569943 - DNA, 25 bp, Homo sapien
acaccttgttcagggtccttggtca

SEQ ID NO: 2569944 - DNA, 25 bp, Homo sapien
ccacagaggatttcagaagctagtg

SEQ ID NO: 2569945 - DNA, 25 bp, Homo sapien
aagctagtgaacaatgccagagttt

SEQ ID NO: 2569946 - DNA, 25 bp, Homo sapien
tgccagagtttaaggagtagaaaag

SEQ ID NO: 2569947 - DNA, 25 bp, Homo sapien
agcattaaattcagctaccaaggca

SEQ ID NO: 2569948 - DNA, 25 bp, Homo sapien
tttgtaaagcaccaaagagtgcctt

SEQ ID NO: 2569949 - DNA, 25 bp, Homo sapien
cctaagcctaccctgaagatctttg

SEQ ID NO: 2569950 - DNA, 25 bp, Homo sapien
actacagttccctgagtaaaatggg

SEQ ID NO: 2569951 - DNA, 25 bp, Homo sapien
gcccggccaagtatgtctcctttct

SEQ ID NO: 2569952 - DNA, 25 bp, Homo sapien
ggaaacatcaggacttacatcccag

SEQ ID NO: 2569953 - DNA, 25 bp, Homo sapien
gacgtgccctgtttccaattctgct

SEQ ID NO: 2569954 - DNA, 25 bp, Homo sapien
aaagtgttgggatgcctggcctttt

SEQ ID NO: 2569955 - DNA, 25 bp, Homo sapien
ttacatcccagaaagacgtgccctg

SEQ ID NO: 2569956 - DNA, 25 bp, Homo sapien
catattgataccacacttaacatgg

SEQ ID NO: 2569957 - DNA, 25 bp, Homo sapien
ggctgttgctggcactattcctagg

SEQ ID NO: 2569958 - DNA, 25 bp, Homo sapien
tacagcccagaagtcagtctccagg

SEQ ID NO: 2569959 - DNA, 25 bp, Homo sapien
ggcactattcctaggcacaatctca

SEQ ID NO: 2569960 - DNA, 25 bp, Homo sapien
ctaaattcccaatgagcgctggata

SEQ ID NO: 2569961 - DNA, 25 bp, Homo sapien
tgagcgctggatacttcagtccatg

SEQ ID NO: 2569962 - DNA, 25 bp, Homo sapien
gatacttcagtccatgttcctggct

SEQ ID NO: 2569963 - DNA, 25 bp, Homo sapien
cagtccatgttcctggctagcagct

SEQ ID NO: 2569964 - DNA, 25 bp, Homo sapien
gagacgaggttgcattaagcctaga

SEQ ID NO: 2569965 - DNA, 25 bp, Homo sapien
gcctaagcgaaatcaagaccctgtt

SEQ ID NO: 2569966 - DNA, 25 bp, Homo sapien
tggatgttatgtcccagcaaagcct

SEQ ID NO: 2569967 - DNA, 25 bp, Homo sapien
gtgccatcactctggcctaagcgaa

SEQ ID NO: 2569968 - DNA, 25 bp, Homo sapien
cataatttgtcggagtttcgaagca

SEQ ID NO: 2569969 - DNA, 25 bp, Homo sapien
cgttagatgctaggttcatgaggct

SEQ ID NO: 2569970 - DNA, 25 bp, Homo sapien
caggcgtggtctcttcgaggagcac

SEQ ID NO: 2569971 - DNA, 25 bp, Homo sapien
cagcagatagtagccctggagggtt

SEQ ID NO: 2569972 - DNA, 25 bp, Homo sapien
tcgaatcacggttctgaccgccaac

SEQ ID NO: 2569973 - DNA, 25 bp, Homo sapien
ctttttcttcaggtatcgggctttg

SEQ ID NO: 2569974 - DNA, 25 bp, Homo sapien
tttcttcaggtatcgggctttggtg

SEQ ID NO: 2569975 - DNA, 25 bp, Homo sapien
atttcacaaaggctcgaatcacggt

SEQ ID NO: 2569976 - DNA, 25 bp, Homo sapien
ctgtagcagcgatttttccttcccc

SEQ ID NO: 2569977 - DNA, 25 bp, Homo sapien
ggtcggtgacgcgattccgcagcca

SEQ ID NO: 2569978 - DNA, 25 bp, Homo sapien
cctggatccgaaagtagcggtcggt

SEQ ID NO: 2569979 - DNA, 25 bp, Homo sapien
tcggtgacgcgattccgcagccaga

SEQ ID NO: 2569980 - DNA, 25 bp, Homo sapien
agcacctcctggatccgaaagtagc

SEQ ID NO: 2569981 - DNA, 25 bp, Homo sapien
ctgcaggccggcgtcccgaacactc

SEQ ID NO: 2569982 - DNA, 25 bp, Homo sapien
ggcgtcccgaacactcaacaacgca

SEQ ID NO: 2569983 - DNA, 25 bp, Homo sapien
gcaggccggcgtcccgaacactcaa

SEQ ID NO: 2569984 - DNA, 25 bp, Homo sapien
ggccggcgtcccgaacactcaacaa

SEQ ID NO: 2569985 - DNA, 25 bp, Homo sapien
catcttgcccgggtcggaaatggtg

SEQ ID NO: 2569986 - DNA, 25 bp, Homo sapien
gggcgaaggtcgtctcccgtcagcc

SEQ ID NO: 2569987 - DNA, 25 bp, Homo sapien
gggtcagcccctgcgatacttccgg

SEQ ID NO: 2569988 - DNA, 25 bp, Homo sapien
tgctcctgaactcgcggtggtggtg

SEQ ID NO: 2569989 - DNA, 25 bp, Homo sapien
cagtttatggacatgactgactgga

SEQ ID NO: 2569990 - DNA, 25 bp, Homo sapien
ttttcagtttatggacatgactgac

SEQ ID NO: 2569991 - DNA, 25 bp, Homo sapien
ggattttcagtttatggacatgact

SEQ ID NO: 2569992 - DNA, 25 bp, Homo sapien
ttatggacatgactgactggagaca

SEQ ID NO: 2569993 - DNA, 25 bp, Homo sapien
gttcctattactattgttactcttg

SEQ ID NO: 2569994 - DNA, 25 bp, Homo sapien
aatacaggtatcagacaagggagca

SEQ ID NO: 2569995 - DNA, 25 bp, Homo sapien
actaatttctaaacatggctcctgg

SEQ ID NO: 2569996 - DNA, 25 bp, Homo sapien
aaatcctcctattgctgggaactaa

SEQ ID NO: 2569997 - DNA, 25 bp, Homo sapien
ccacacatccgctcacatccgctca

SEQ ID NO: 2569998 - DNA, 25 bp, Homo sapien
aacatcagatggaatatctgatcca

SEQ ID NO: 2569999 - DNA, 25 bp, Homo sapien
agggactgcagaatgtagcggggag

SEQ ID NO: 2570000 - DNA, 25 bp, Homo sapien
cacatccgctcacatccgctcaggg

SEQ ID NO: 2570001 - DNA, 25 bp, Homo sapien
ctccaccttcagggtgtcaggcctc

SEQ ID NO: 2570002 - DNA, 25 bp, Homo sapien
tatctcctgtgacctgcacttatac

SEQ ID NO: 2570003 - DNA, 25 bp, Homo sapien
caccttcagggtgtcaggcctctgg

SEQ ID NO: 2570004 - DNA, 25 bp, Homo sapien
accttcagggtgtcaggcctctggg

SEQ ID NO: 2570005 - DNA, 25 bp, Homo sapien
ctgcaagagaaaaacgccctttgtc

SEQ ID NO: 2570006 - DNA, 25 bp, Homo sapien
ttgtcattttccattacccacccaa

SEQ ID NO: 2570007 - DNA, 25 bp, Homo sapien
ggttagaccgcagtctaaagtaatg

SEQ ID NO: 2570008 - DNA, 25 bp, Homo sapien
aaagtaatgcccattggctttaaag

SEQ ID NO: 2570009 - DNA, 25 bp, Homo sapien
cattcctatcaaggagagagtcggg

SEQ ID NO: 2570010 - DNA, 25 bp, Homo sapien
actgacataccggttctttgaaggg

SEQ ID NO: 2570011 - DNA, 25 bp, Homo sapien
aaatagtttccaatccagtgggacg

SEQ ID NO: 2570012 - DNA, 25 bp, Homo sapien
tattgcaactgcgaggaagttagac

SEQ ID NO: 2570013 - DNA, 25 bp, Homo sapien
gctggctctagactggtggtacgca

SEQ ID NO: 2570014 - DNA, 25 bp, Homo sapien
cagggacagcggcatcttcagccaa

SEQ ID NO: 2570015 - DNA, 25 bp, Homo sapien
tctgctgtccaagcgctttggtgca

SEQ ID NO: 2570016 - DNA, 25 bp, Homo sapien
caatcaaagggtagcctctgagggt

SEQ ID NO: 2570017 - DNA, 25 bp, Homo sapien
cctagcaatagactccttagaggag

SEQ ID NO: 2570018 - DNA, 25 bp, Homo sapien
tctagataatgcaggcggaagacct

SEQ ID NO: 2570019 - DNA, 25 bp, Homo sapien
ttcgtgcggttccagccagagagca

SEQ ID NO: 2570020 - DNA, 25 bp, Homo sapien
tccaggaattacatgaacgacagcc

SEQ ID NO: 2570021 - DNA, 25 bp, Homo sapien
ctttgcccaatcgtccccattggtt

SEQ ID NO: 2570022 - DNA, 25 bp, Homo sapien
ttgcccaatcgtccccattggtttc

SEQ ID NO: 2570023 - DNA, 25 bp, Homo sapien
agatccctttgcccaatcgtcccca

SEQ ID NO: 2570024 - DNA, 25 bp, Homo sapien
tccctttgcccaatcgtccccattg

SEQ ID NO: 2570025 - DNA, 25 bp, Homo sapien
agctccgcctaccagattctggtga

SEQ ID NO: 2570026 - DNA, 25 bp, Homo sapien
cgctcaggtaatttgtgtgtgagtg

SEQ ID NO: 2570027 - DNA, 25 bp, Homo sapien
aagctccgcctaccagattctggtg

SEQ ID NO: 2570028 - DNA, 25 bp, Homo sapien
cacacactcacatgttttggggttt

SEQ ID NO: 2570029 - DNA, 25 bp, Homo sapien
gaatcccgtcagcttaaaacttgtg

SEQ ID NO: 2570030 - DNA, 25 bp, Homo sapien
tgaaaactcagaacttgaatcccgt

SEQ ID NO: 2570031 - DNA, 25 bp, Homo sapien
gaaaaagtgaatgcacacgcccttg

SEQ ID NO: 2570032 - DNA, 25 bp, Homo sapien
tagaggttccctatatgcgcgtatg

SEQ ID NO: 2570033 - DNA, 25 bp, Homo sapien
tgaaagtgtccaggcgtgtgcacag

SEQ ID NO: 2570034 - DNA, 25 bp, Homo sapien
gctccctgctgtactgaagttttgg

SEQ ID NO: 2570035 - DNA, 25 bp, Homo sapien
ttttgcatccaatcctgtgtgcctg

SEQ ID NO: 2570036 - DNA, 25 bp, Homo sapien
tcaggacatccggagcgttatggac

SEQ ID NO: 2570037 - DNA, 25 bp, Homo sapien
tgcagggccataggagggaagtttt

SEQ ID NO: 2570038 - DNA, 25 bp, Homo sapien
gaaacacagaatgattccaaggtgc

SEQ ID NO: 2570039 - DNA, 25 bp, Homo sapien
gggactggtttgtaacccatgacat

SEQ ID NO: 2570040 - DNA, 25 bp, Homo sapien
tccaaggtgctctcgttcctgaggg

SEQ ID NO: 2570041 - DNA, 25 bp, Homo sapien
ctctgggtcgttgccagattgttgg

SEQ ID NO: 2570042 - DNA, 25 bp, Homo sapien
ctagtggattgttgggaagggtggt

SEQ ID NO: 2570043 - DNA, 25 bp, Homo sapien
tggcctctgggtcgttgccagattg

SEQ ID NO: 2570044 - DNA, 25 bp, Homo sapien
ttgctagtggattgttgggaagggt

SEQ ID NO: 2570045 - DNA, 25 bp, Homo sapien
cacacagggcgcctctactgcctga

SEQ ID NO: 2570046 - DNA, 25 bp, Homo sapien
acagggcgcctctactgcctgaggc

SEQ ID NO: 2570047 - DNA, 25 bp, Homo sapien
ttccacacagggcgcctctactgcc

SEQ ID NO: 2570048 - DNA, 25 bp, Homo sapien
gcttccacacagggcgcctctactg

SEQ ID NO: 2570049 - DNA, 25 bp, Homo sapien
accaggggctcccccgtgccacaga

SEQ ID NO: 2570050 - DNA, 25 bp, Homo sapien
agaccaggggctcccccgtgccaca

SEQ ID NO: 2570051 - DNA, 25 bp, Homo sapien
caggggctcccccgtgccacagaag

SEQ ID NO: 2570052 - DNA, 25 bp, Homo sapien
aggggctcccccgtgccacagaagc

SEQ ID NO: 2570053 - DNA, 25 bp, Homo sapien
gcaggtcttgccccatatctcgtct

SEQ ID NO: 2570054 - DNA, 25 bp, Homo sapien
ccatatctcgtcttcccaggggagg

SEQ ID NO: 2570055 - DNA, 25 bp, Homo sapien
cgtctggtgcggtgggtgggtatct

SEQ ID NO: 2570056 - DNA, 25 bp, Homo sapien
gggtgctgcccagcatccacgaggc

SEQ ID NO: 2570057 - DNA, 25 bp, Homo sapien
gcctgcatggggtgcaccccaagtt

SEQ ID NO: 2570058 - DNA, 25 bp, Homo sapien
accccaagttcctcgcagggcaggg

SEQ ID NO: 2570059 - DNA, 25 bp, Homo sapien
agctgcatgaacagggggactgggc

SEQ ID NO: 2570060 - DNA, 25 bp, Homo sapien
gggtgcaccccaagttcctcgcagg

SEQ ID NO: 2570061 - DNA, 25 bp, Homo sapien
agcccagggcaccctgaccctgaga

SEQ ID NO: 2570062 - DNA, 25 bp, Homo sapien
ccagggcaccctgaccctgagagga

SEQ ID NO: 2570063 - DNA, 25 bp, Homo sapien
acagcccagggcaccctgaccctga

SEQ ID NO: 2570064 - DNA, 25 bp, Homo sapien
ggcaccctgaccctgagaggacaca

SEQ ID NO: 2570065 - DNA, 25 bp, Homo sapien
gatagaccgtttatttaagcaagaa

SEQ ID NO: 2570066 - DNA, 25 bp, Homo sapien
catgcagttgtcattgccagattta

SEQ ID NO: 2570067 - DNA, 25 bp, Homo sapien
tcgtactgaagcaggtgctcccatt

SEQ ID NO: 2570068 - DNA, 25 bp, Homo sapien
tgctcccatttaagctgcgctctga

SEQ ID NO: 2570069 - DNA, 25 bp, Homo sapien
tgctcacacaagcatctggcgcttc

SEQ ID NO: 2570070 - DNA, 25 bp, Homo sapien
ctagtctagttccagctcatctagc

SEQ ID NO: 2570071 - DNA, 25 bp, Homo sapien
ctgctcacacaagcatctggcgctt

SEQ ID NO: 2570072 - DNA, 25 bp, Homo sapien
gtctagttccagctcatctagcttg

SEQ ID NO: 2570073 - DNA, 25 bp, Homo sapien
ccagccgggtgaagacaaacacagg

SEQ ID NO: 2570074 - DNA, 25 bp, Homo sapien
accagtctgctcatttacggccaaa

SEQ ID NO: 2570075 - DNA, 25 bp, Homo sapien
tcatttacggccaaatccactaggg

SEQ ID NO: 2570076 - DNA, 25 bp, Homo sapien
ggaggcaccagtctgctcatttacg

SEQ ID NO: 2570077 - DNA, 25 bp, Homo sapien
ggctcagtgcttattccgggtcctt

SEQ ID NO: 2570078 - DNA, 25 bp, Homo sapien
aggctcagtgcttattccgggtcct

SEQ ID NO: 2570079 - DNA, 25 bp, Homo sapien
caggctcagtgcttattccgggtcc

SEQ ID NO: 2570080 - DNA, 25 bp, Homo sapien
acaggctcagtgcttattccgggtc

SEQ ID NO: 2570081 - DNA, 25 bp, Homo sapien
tgcgggtatatccagggcccgcacc

SEQ ID NO: 2570082 - DNA, 25 bp, Homo sapien
ttgcctccgtaagggaccaggcgga

SEQ ID NO: 2570083 - DNA, 25 bp, Homo sapien
cgcaccccctgggattgtgggaaat

SEQ ID NO: 2570084 - DNA, 25 bp, Homo sapien
gaggaaccgcgcgaggactgggacc

SEQ ID NO: 2570085 - DNA, 25 bp, Homo sapien
agggcggccgcagaacggtcaattt

SEQ ID NO: 2570086 - DNA, 25 bp, Homo sapien
cggtcaatttgagccgcgtcgaggt

SEQ ID NO: 2570087 - DNA, 25 bp, Homo sapien
ttctgggacctttcggtgcgtccga

SEQ ID NO: 2570088 - DNA, 25 bp, Homo sapien
gtccgggcgccaggcaacgcgattc

SEQ ID NO: 2570089 - DNA, 25 bp, Homo sapien
gcacttgtgttccagctcccctggg

SEQ ID NO: 2570090 - DNA, 25 bp, Homo sapien
aacgggcacttgtgttccagctccc

SEQ ID NO: 2570091 - DNA, 25 bp, Homo sapien
ccctgggacctgtggccgccgccca

SEQ ID NO: 2570092 - DNA, 25 bp, Homo sapien
ctgaacgggcacttgtgttccagct

SEQ ID NO: 2570093 - DNA, 25 bp, Homo sapien
gcaaaaacgtgctgaagatccgccg

SEQ ID NO: 2570094 - DNA, 25 bp, Homo sapien
gatgaaccaccacaagtaccggaag

SEQ ID NO: 2570095 - DNA, 25 bp, Homo sapien
aagctggtgaagaagacgcggttcc

SEQ ID NO: 2570096 - DNA, 25 bp, Homo sapien
cacacctggttaggagtgcgggtct

SEQ ID NO: 2570097 - DNA, 25 bp, Homo sapien
gcagatcaagttcgagaaagacctg

SEQ ID NO: 2570098 - DNA, 25 bp, Homo sapien
gggcaaatgagtctggcgccgccct

SEQ ID NO: 2570099 - DNA, 25 bp, Homo sapien
agacctgaggcgcatctggctgaag

SEQ ID NO: 2570100 - DNA, 25 bp, Homo sapien
caagatctacctgcggggcaaatga

SEQ ID NO: 2570101 - DNA, 25 bp, Homo sapien
gggtctggaggctgtagcgggtgga

SEQ ID NO: 2570102 - DNA, 25 bp, Homo sapien
aggaagcgtcttgtggggccccagc

SEQ ID NO: 2570103 - DNA, 25 bp, Homo sapien
ggaagcgtcttgtggggccccagct

SEQ ID NO: 2570104 - DNA, 25 bp, Homo sapien
tttgaagggaccaattgtttccaca

SEQ ID NO: 2570105 - DNA, 25 bp, Homo sapien
tgaagggaccaattgtttccacaca

SEQ ID NO: 2570106 - DNA, 25 bp, Homo sapien
aagggaccaattgtttccacacagg

SEQ ID NO: 2570107 - DNA, 25 bp, Homo sapien
gggaccaattgtttccacacaggtc

SEQ ID NO: 2570108 - DNA, 25 bp, Homo sapien
cctgagcacactttagttcatagct

SEQ ID NO: 2570109 - DNA, 25 bp, Homo sapien
ttgaggttctgaattgtaccatctt

SEQ ID NO: 2570110 - DNA, 25 bp, Homo sapien
ctgaattgtaccatcttgcttttga

SEQ ID NO: 2570111 - DNA, 25 bp, Homo sapien
gcttttgagacgactcctgagcaca

SEQ ID NO: 2570112 - DNA, 25 bp, Homo sapien
ttgctggattttttcctggagttct

SEQ ID NO: 2570113 - DNA, 25 bp, Homo sapien
tgccaagtgggaatcagatacagac

SEQ ID NO: 2570114 - DNA, 25 bp, Homo sapien
cttgttggtggcctctgtttgctgg

SEQ ID NO: 2570115 - DNA, 25 bp, Homo sapien
tggagttctgccaagtgggaatcag

SEQ ID NO: 2570116 - DNA, 25 bp, Homo sapien
gttatagtggtctcatgtgaattca

SEQ ID NO: 2570117 - DNA, 25 bp, Homo sapien
tatagtggtctcatgtgaattcagc

SEQ ID NO: 2570118 - DNA, 25 bp, Homo sapien
tagtggtctcatgtgaattcagctt

SEQ ID NO: 2570119 - DNA, 25 bp, Homo sapien
atagtggtctcatgtgaattcagct

SEQ ID NO: 2570120 - DNA, 25 bp, Homo sapien
caccacgcctggtcagcagttgtat

SEQ ID NO: 2570121 - DNA, 25 bp, Homo sapien
accacgcctggtcagcagttgtatt

SEQ ID NO: 2570122 - DNA, 25 bp, Homo sapien
ccaccacgcctggtcagcagttgta

SEQ ID NO: 2570123 - DNA, 25 bp, Homo sapien
tagccagtgttgagccccggcgtcc

SEQ ID NO: 2570124 - DNA, 25 bp, Homo sapien
ttgagccccggcgtccctgctcaga

SEQ ID NO: 2570125 - DNA, 25 bp, Homo sapien
agtgttgagccccggcgtccctgct

SEQ ID NO: 2570126 - DNA, 25 bp, Homo sapien
tgttgagccccggcgtccctgctca

SEQ ID NO: 2570127 - DNA, 25 bp, Homo sapien
aataaaagttggatgtgctgttgtg

SEQ ID NO: 2570128 - DNA, 25 bp, Homo sapien
agttggatgtgctgttgtggccact

SEQ ID NO: 2570129 - DNA, 25 bp, Homo sapien
taaaagttggatgtgctgttgtggc

SEQ ID NO: 2570130 - DNA, 25 bp, Homo sapien
aaagttggatgtgctgttgtggcca

SEQ ID NO: 2570131 - DNA, 25 bp, Homo sapien
cgttcagcctcattctcgcttcggc

SEQ ID NO: 2570132 - DNA, 25 bp, Homo sapien
tcattctcgcttcggccacaagtct

SEQ ID NO: 2570133 - DNA, 25 bp, Homo sapien
tcccgttcagcctcattctcgcttc

SEQ ID NO: 2570134 - DNA, 25 bp, Homo sapien
ctcgcttcggccacaagtctcatag

SEQ ID NO: 2570135 - DNA, 25 bp, Homo sapien
cttttgaggcacggaaggcagatcc

SEQ ID NO: 2570136 - DNA, 25 bp, Homo sapien
tgaggcacggaaggcagatccacag

SEQ ID NO: 2570137 - DNA, 25 bp, Homo sapien
tttgaggcacggaaggcagatccac

SEQ ID NO: 2570138 - DNA, 25 bp, Homo sapien
aggcacggaaggcagatccacagtg

SEQ ID NO: 2570139 - DNA, 25 bp, Homo sapien
acttgttgatgaaattgccatggat

SEQ ID NO: 2570140 - DNA, 25 bp, Homo sapien
ttacttgttgatgaaattgccatgg

SEQ ID NO: 2570141 - DNA, 25 bp, Homo sapien
ttgttgatgaaattgccatggatac

SEQ ID NO: 2570142 - DNA, 25 bp, Homo sapien
tacttgttgatgaaattgccatgga

SEQ ID NO: 2570143 - DNA, 25 bp, Homo sapien
tcttcatacaaagatccgtggtcaa

SEQ ID NO: 2570144 - DNA, 25 bp, Homo sapien
gatgctcttcatacaaagatccgtg

SEQ ID NO: 2570145 - DNA, 25 bp, Homo sapien
atacaaagatccgtggtcaattccc

SEQ ID NO: 2570146 - DNA, 25 bp, Homo sapien
tcatacaaagatccgtggtcaattc

SEQ ID NO: 2570147 - DNA, 25 bp, Homo sapien
cccaatggccgtgtcctaacaagtc

SEQ ID NO: 2570148 - DNA, 25 bp, Homo sapien
gccccaatggccgtgtcctaacaag

SEQ ID NO: 2570149 - DNA, 25 bp, Homo sapien
gttgccccaatggccgtgtcctaac

SEQ ID NO: 2570150 - DNA, 25 bp, Homo sapien
ccaatggccgtgtcctaacaagtcc

SEQ ID NO: 2570151 - DNA, 25 bp, Homo sapien
ctggtcgttgagttgctgacagggc

SEQ ID NO: 2570152 - DNA, 25 bp, Homo sapien
gtcgttgagttgctgacagggcttc

SEQ ID NO: 2570153 - DNA, 25 bp, Homo sapien
cgttgagttgctgacagggcttctt

SEQ ID NO: 2570154 - DNA, 25 bp, Homo sapien
tggtcgttgagttgctgacagggct

SEQ ID NO: 2570155 - DNA, 25 bp, Homo sapien
actgtcccctcccatcggagaagga

SEQ ID NO: 2570156 - DNA, 25 bp, Homo sapien
tgtcccctcccatcggagaaggagg

SEQ ID NO: 2570157 - DNA, 25 bp, Homo sapien
tactgtcccctcccatcggagaagg

SEQ ID NO: 2570158 - DNA, 25 bp, Homo sapien
ctgtcccctcccatcggagaaggag

SEQ ID NO: 2570159 - DNA, 25 bp, Homo sapien
tttgtgtgctgggttcccatctgcc

SEQ ID NO: 2570160 - DNA, 25 bp, Homo sapien
tcagttctcaacattaaggcattaa

SEQ ID NO: 2570161 - DNA, 25 bp, Homo sapien
gcttcgtatctgtcccaatgttaag

SEQ ID NO: 2570162 - DNA, 25 bp, Homo sapien
cacacctgttggagtggcatttatc

SEQ ID NO: 2570163 - DNA, 25 bp, Homo sapien
cctggaagaatttgtatatgattta

SEQ ID NO: 2570164 - DNA, 25 bp, Homo sapien
ctggaagaatttgtatatgatttag

SEQ ID NO: 2570165 - DNA, 25 bp, Homo sapien
cccactgctgatccttcaagttgtg

SEQ ID NO: 2570166 - DNA, 25 bp, Homo sapien
tggattctgagaaattcaatctagg

SEQ ID NO: 2570167 - DNA, 25 bp, Homo sapien
ctgctgtaggttccaagactcctgg

SEQ ID NO: 2570168 - DNA, 25 bp, Homo sapien
aatctaggtgcatagcccactgctg

SEQ ID NO: 2570169 - DNA, 25 bp, Homo sapien
actgtggtaaccaaagagggtctga

SEQ ID NO: 2570170 - DNA, 25 bp, Homo sapien
gctgagttcagaaagctccagggaa

SEQ ID NO: 2570171 - DNA, 25 bp, Homo sapien
tttgccttgagaatgcggagctgaa

SEQ ID NO: 2570172 - DNA, 25 bp, Homo sapien
caatgtctgatggatgggagatcga

SEQ ID NO: 2570173 - DNA, 25 bp, Homo sapien
ccactgtcggctgctcatttgtcca

SEQ ID NO: 2570174 - DNA, 25 bp, Homo sapien
ataaacctgcctgaattaaagctga

SEQ ID NO: 2570175 - DNA, 25 bp, Homo sapien
ctcaattatgggttgaagagtacac

SEQ ID NO: 2570176 - DNA, 25 bp, Homo sapien
taaagtgctacatggcattggggct

SEQ ID NO: 2570177 - DNA, 25 bp, Homo sapien
cctggtggtatttcagataagacac

SEQ ID NO: 2570178 - DNA, 25 bp, Homo sapien
ctggtggtatttcagataagacact

SEQ ID NO: 2570179 - DNA, 25 bp, Homo sapien
cataggctcacatttgatcccaact

SEQ ID NO: 2570180 - DNA, 25 bp, Homo sapien
ttgatccataggctcacatttgatc

SEQ ID NO: 2570181 - DNA, 25 bp, Homo sapien
tccataggctcacatttgatcccaa

SEQ ID NO: 2570182 - DNA, 25 bp, Homo sapien
aggctcacatttgatcccaactggc

SEQ ID NO: 2570183 - DNA, 25 bp, Homo sapien
gactttaagatggtgaggttaccgc

SEQ ID NO: 2570184 - DNA, 25 bp, Homo sapien
ttaatggacactctcggaagcctca

SEQ ID NO: 2570185 - DNA, 25 bp, Homo sapien
tttgagtgcaataggagccatacgc

SEQ ID NO: 2570186 - DNA, 25 bp, Homo sapien
cagtttcacaggtcgacagaggtaa

SEQ ID NO: 2570187 - DNA, 25 bp, Homo sapien
tgttgccatagcaattgggtgggtg

SEQ ID NO: 2570188 - DNA, 25 bp, Homo sapien
ccctcagcggctccactgttgccat

SEQ ID NO: 2570189 - DNA, 25 bp, Homo sapien
ttgccatagcaattgggtgggtgga

SEQ ID NO: 2570190 - DNA, 25 bp, Homo sapien
agttctcacggagtggcccctccct

SEQ ID NO: 2570191 - DNA, 25 bp, Homo sapien
tactgtagcttaatgtaagtcctga

SEQ ID NO: 2570192 - DNA, 25 bp, Homo sapien
cttttccatgcatctatatgtgtgt

SEQ ID NO: 2570193 - DNA, 25 bp, Homo sapien
acttcatcatgagaacctggttgag

SEQ ID NO: 2570194 - DNA, 25 bp, Homo sapien
taagtcctgaagttggtagtgccaa

SEQ ID NO: 2570195 - DNA, 25 bp, Homo sapien
acagacacgagccacggcctgacct

SEQ ID NO: 2570196 - DNA, 25 bp, Homo sapien
gagccacggcctgacctgaactgtg

SEQ ID NO: 2570197 - DNA, 25 bp, Homo sapien
gccacggcctgacctgaactgtggg

SEQ ID NO: 2570198 - DNA, 25 bp, Homo sapien
acgagccacggcctgacctgaactg

SEQ ID NO: 2570199 - DNA, 25 bp, Homo sapien
aatgttctagatctttcccttagtg

SEQ ID NO: 2570200 - DNA, 25 bp, Homo sapien
tgttctagatctttcccttagtgtg

SEQ ID NO: 2570201 - DNA, 25 bp, Homo sapien
agatctttcccttagtgtgtcatca

SEQ ID NO: 2570202 - DNA, 25 bp, Homo sapien
ttctagatctttcccttagtgtgtc

SEQ ID NO: 2570203 - DNA, 25 bp, Homo sapien
aagggacggtaaggtgagagcctgg

SEQ ID NO: 2570204 - DNA, 25 bp, Homo sapien
ctaaacaggatttgctttcagattg

SEQ ID NO: 2570205 - DNA, 25 bp, Homo sapien
taaacaggatttgctttcagattgc

SEQ ID NO: 2570206 - DNA, 25 bp, Homo sapien
tacaaaaagtatgaaaattaagcca

SEQ ID NO: 2570207 - DNA, 25 bp, Homo sapien
ggaaacatgttgaatccccatctct

SEQ ID NO: 2570208 - DNA, 25 bp, Homo sapien
ctgggaaacatgttgaatccccatc

SEQ ID NO: 2570209 - DNA, 25 bp, Homo sapien
caaaaagtatgaaaattaagccagg

SEQ ID NO: 2570210 - DNA, 25 bp, Homo sapien
ggtcaaggttgtggtcagctgttat

SEQ ID NO: 2570211 - DNA, 25 bp, Homo sapien
ggttgtggtcagctgttattgtgcc

SEQ ID NO: 2570212 - DNA, 25 bp, Homo sapien
tcaaggttgtggtcagctgttattg

SEQ ID NO: 2570213 - DNA, 25 bp, Homo sapien
tgtggtcagctgttattgtgccact

SEQ ID NO: 2570214 - DNA, 25 bp, Homo sapien
aggcgggagtgcactgccatgatca

SEQ ID NO: 2570215 - DNA, 25 bp, Homo sapien
cgggagtgcactgccatgatcacgg

SEQ ID NO: 2570216 - DNA, 25 bp, Homo sapien
agagatagggttttggcacgttgcc

SEQ ID NO: 2570217 - DNA, 25 bp, Homo sapien
gagatagggttttggcacgttgccc

SEQ ID NO: 2570218 - DNA, 25 bp, Homo sapien
ggacttggtacacccggcttgccca

SEQ ID NO: 2570219 - DNA, 25 bp, Homo sapien
tcctggacttggtacacccggcttg

SEQ ID NO: 2570220 - DNA, 25 bp, Homo sapien
gcatcctggacttggtacacccggc

SEQ ID NO: 2570221 - DNA, 25 bp, Homo sapien
atcctggacttggtacacccggctt

SEQ ID NO: 2570222 - DNA, 25 bp, Homo sapien
cagcggcaagcgaggaatcgaacgc

SEQ ID NO: 2570223 - DNA, 25 bp, Homo sapien
aaagcttgcgacagccgcagctcga

SEQ ID NO: 2570224 - DNA, 25 bp, Homo sapien
tcgaacgcatggaacttaagccccg

SEQ ID NO: 2570225 - DNA, 25 bp, Homo sapien
tccgtcgctcgcaacaaagcttgcg

SEQ ID NO: 2570226 - DNA, 25 bp, Homo sapien
cggcccgctcctggcgccacaggtc

SEQ ID NO: 2570227 - DNA, 25 bp, Homo sapien
tcgctgtaaaccgtaacttcccatc

SEQ ID NO: 2570228 - DNA, 25 bp, Homo sapien
ctgggtggacttcgctgtaaaccgt

SEQ ID NO: 2570229 - DNA, 25 bp, Homo sapien
tcggcccgctcctggcgccacaggt

SEQ ID NO: 2570230 - DNA, 25 bp, Homo sapien
gagagtccctgaagatactggcctc

SEQ ID NO: 2570231 - DNA, 25 bp, Homo sapien
tgtagcaattgacccagcaaatgag

SEQ ID NO: 2570232 - DNA, 25 bp, Homo sapien
gggagggtgaccaaagattgcaaaa

SEQ ID NO: 2570233 - DNA, 25 bp, Homo sapien
cctgctatgtatatccaatgtgact

SEQ ID NO: 2570234 - DNA, 25 bp, Homo sapien
caggcttggcttcgaatcccagcac

SEQ ID NO: 2570235 - DNA, 25 bp, Homo sapien
tgatctcagaagcttgaaactagcc

SEQ ID NO: 2570236 - DNA, 25 bp, Homo sapien
gatgaggccctaggatgtcataggc

SEQ ID NO: 2570237 - DNA, 25 bp, Homo sapien
tgtcataggcctgagaattccatgc

SEQ ID NO: 2570238 - DNA, 25 bp, Homo sapien
gattccatttagccctatactgggg

SEQ ID NO: 2570239 - DNA, 25 bp, Homo sapien
tatgttagtttcaacttctattcct

SEQ ID NO: 2570240 - DNA, 25 bp, Homo sapien
attccatttagccctatactggggg

SEQ ID NO: 2570241 - DNA, 25 bp, Homo sapien
ttatgttagtttcaacttctattcc

SEQ ID NO: 2570242 - DNA, 25 bp, Homo sapien
tcagtgtctatgcacacccaagctt

SEQ ID NO: 2570243 - DNA, 25 bp, Homo sapien
ctggaactttggtgtcaatgctcaa

SEQ ID NO: 2570244 - DNA, 25 bp, Homo sapien
tttgcagcaggacaggtagagcaga

SEQ ID NO: 2570245 - DNA, 25 bp, Homo sapien
ccatctggctgcttgatattctaag

SEQ ID NO: 2570246 - DNA, 25 bp, Homo sapien
ttgaagttctgcatttgaagtagga

SEQ ID NO: 2570247 - DNA, 25 bp, Homo sapien
ttttgtaaacgattgaagttctgca

SEQ ID NO: 2570248 - DNA, 25 bp, Homo sapien
aagggtgtgttctattatacgattc

SEQ ID NO: 2570249 - DNA, 25 bp, Homo sapien
ggtgaagccagccaatgaataaggg

SEQ ID NO: 2570250 - DNA, 25 bp, Homo sapien
taaacaccagggctagggaacactg

SEQ ID NO: 2570251 - DNA, 25 bp, Homo sapien
gcagggagggcctgttcatgataga

SEQ ID NO: 2570252 - DNA, 25 bp, Homo sapien
gtctgggagccacacgacggcagag

SEQ ID NO: 2570253 - DNA, 25 bp, Homo sapien
gaaattagaggtcctggtagaacaa

SEQ ID NO: 2570254 - DNA, 25 bp, Homo sapien
atcagtacccaccaaaaccaatcag

SEQ ID NO: 2570255 - DNA, 25 bp, Homo sapien
catcagtacccaccaaaaccaatca

SEQ ID NO: 2570256 - DNA, 25 bp, Homo sapien
accaagtaaccagtcctgatatcat

SEQ ID NO: 2570257 - DNA, 25 bp, Homo sapien
aaccaagtaaccagtcctgatatca

SEQ ID NO: 2570258 - DNA, 25 bp, Homo sapien
agtaaggtgtctctaaaagggacag

SEQ ID NO: 2570259 - DNA, 25 bp, Homo sapien
tggacaaactagaccttctctgccc

SEQ ID NO: 2570260 - DNA, 25 bp, Homo sapien
caccggcagagtcctgggtgacatg

SEQ ID NO: 2570261 - DNA, 25 bp, Homo sapien
taagtactgacaccaattggaggct

SEQ ID NO: 2570262 - DNA, 25 bp, Homo sapien
cttcctaagtactgacaccaattgg

SEQ ID NO: 2570263 - DNA, 25 bp, Homo sapien
ccggcagagtcctgggtgacatgct

SEQ ID NO: 2570264 - DNA, 25 bp, Homo sapien
ttagagcagcacttacaggattgcc

SEQ ID NO: 2570265 - DNA, 25 bp, Homo sapien
tccatagtgtgaaaatgacttgggc

SEQ ID NO: 2570266 - DNA, 25 bp, Homo sapien
cacattcccgggttaagaacagcaa

SEQ ID NO: 2570267 - DNA, 25 bp, Homo sapien
tgggtctcattggtctaaaagcgaa

SEQ ID NO: 2570268 - DNA, 25 bp, Homo sapien
ccccagcagcttgggaactagcaag

SEQ ID NO: 2570269 - DNA, 25 bp, Homo sapien
aaactcagtgaatataggaccctga

SEQ ID NO: 2570270 - DNA, 25 bp, Homo sapien
cagcactaagaaaaagatgcgtagt

SEQ ID NO: 2570271 - DNA, 25 bp, Homo sapien
tgggaactagcaagagcacatttct

SEQ ID NO: 2570272 - DNA, 25 bp, Homo sapien
ttttgtcaccctatcttatctcggg

SEQ ID NO: 2570273 - DNA, 25 bp, Homo sapien
ccaagcctagtaaagcctagtctgt

SEQ ID NO: 2570274 - DNA, 25 bp, Homo sapien
cccattttgtcaccctatcttatct

SEQ ID NO: 2570275 - DNA, 25 bp, Homo sapien
agtaaagcctagtctgtgtcttcac

SEQ ID NO: 2570276 - DNA, 25 bp, Homo sapien
tggtataaatgcatgcctacaaagg

SEQ ID NO: 2570277 - DNA, 25 bp, Homo sapien
ctagtaagacttcatggacacagat

SEQ ID NO: 2570278 - DNA, 25 bp, Homo sapien
ccaggttcaagcgtgaagttatgaa

SEQ ID NO: 2570279 - DNA, 25 bp, Homo sapien
taaacctacaaggaagccaatatgg

SEQ ID NO: 2570280 - DNA, 25 bp, Homo sapien
gcttttcagggatgccaaatgtcaa

SEQ ID NO: 2570281 - DNA, 25 bp, Homo sapien
gaaaattgatcttggcccaggtgag

SEQ ID NO: 2570282 - DNA, 25 bp, Homo sapien
tctacggtacaaatggttccacact

SEQ ID NO: 2570283 - DNA, 25 bp, Homo sapien
taacaaagctactggtgcaaagggt

SEQ ID NO: 2570284 - DNA, 25 bp, Homo sapien
caagcacaggttctataagcacacg

SEQ ID NO: 2570285 - DNA, 25 bp, Homo sapien
tttcctctaagaagcaaaggtcctg

SEQ ID NO: 2570286 - DNA, 25 bp, Homo sapien
actaagaaaagtggatggatcggcc

SEQ ID NO: 2570287 - DNA, 25 bp, Homo sapien
tacctgtcacgctgccacaagaaag

SEQ ID NO: 2570288 - DNA, 25 bp, Homo sapien
gaagaataaactttattggcccaca

SEQ ID NO: 2570289 - DNA, 25 bp, Homo sapien
taagtcaccgtttaattctgccaaa

SEQ ID NO: 2570290 - DNA, 25 bp, Homo sapien
tctggttagtgcaaacaaggttttc

SEQ ID NO: 2570291 - DNA, 25 bp, Homo sapien
ccatgtaggctaaagtgagtttcac

SEQ ID NO: 2570292 - DNA, 25 bp, Homo sapien
cagttctatcattagtaagtcaccg

SEQ ID NO: 2570293 - DNA, 25 bp, Homo sapien
gcatgcttgtgatgaattcgcacac

SEQ ID NO: 2570294 - DNA, 25 bp, Homo sapien
gtaggcatgcttgtgatgaattcgc

SEQ ID NO: 2570295 - DNA, 25 bp, Homo sapien
tcagtaggcatgcttgtgatgaatt

SEQ ID NO: 2570296 - DNA, 25 bp, Homo sapien
taggcatgcttgtgatgaattcgca

SEQ ID NO: 2570297 - DNA, 25 bp, Homo sapien
ttctagccgactgcgtaacacctga

SEQ ID NO: 2570298 - DNA, 25 bp, Homo sapien
ggtctccagcctgtttaagcgctcc

SEQ ID NO: 2570299 - DNA, 25 bp, Homo sapien
tccaatggcggccagggtctccagc

SEQ ID NO: 2570300 - DNA, 25 bp, Homo sapien
aagaacttcttctagccgactgcgt

SEQ ID NO: 2570301 - DNA, 25 bp, Homo sapien
ctgcagagttcggtctctctcagag

SEQ ID NO: 2570302 - DNA, 25 bp, Homo sapien
ctgattaaacatgccacatggaagg

SEQ ID NO: 2570303 - DNA, 25 bp, Homo sapien
gaaagtggattagccatcaactgta

SEQ ID NO: 2570304 - DNA, 25 bp, Homo sapien
cacatggaaggaaagtggattagcc

SEQ ID NO: 2570305 - DNA, 25 bp, Homo sapien
ctgtagtgagtccacatttgtttcc

SEQ ID NO: 2570306 - DNA, 25 bp, Homo sapien
gagccacacgactttgtaaagtaat

SEQ ID NO: 2570307 - DNA, 25 bp, Homo sapien
gccacacgactttgtaaagtaattg

SEQ ID NO: 2570308 - DNA, 25 bp, Homo sapien
ttgagccacacgactttgtaaagta

SEQ ID NO: 2570309 - DNA, 25 bp, Homo sapien
ctttgagccacacgactttgtaaag

SEQ ID NO: 2570310 - DNA, 25 bp, Homo sapien
tagaacagcctttaacaggacatgg

SEQ ID NO: 2570311 - DNA, 25 bp, Homo sapien
cttaagattttgacactgaggctca

SEQ ID NO: 2570312 - DNA, 25 bp, Homo sapien
caaatgacaaagtgggtagccccgg

SEQ ID NO: 2570313 - DNA, 25 bp, Homo sapien
gctgtgtgaaacaggcactaatccc

SEQ ID NO: 2570314 - DNA, 25 bp, Homo sapien
tctggatgggcatggaacttcacca

SEQ ID NO: 2570315 - DNA, 25 bp, Homo sapien
ctctctgcttgtaaggcctcattga

SEQ ID NO: 2570316 - DNA, 25 bp, Homo sapien
gagccgactccgttcatctactagt

SEQ ID NO: 2570317 - DNA, 25 bp, Homo sapien
ttcaccagactgctatagagctgtc

SEQ ID NO: 2570318 - DNA, 25 bp, Homo sapien
caatacgcaaatggcacagtgagac

SEQ ID NO: 2570319 - DNA, 25 bp, Homo sapien
agagaggaagcaatacgcaaatggc

SEQ ID NO: 2570320 - DNA, 25 bp, Homo sapien
aaagcccactatcttagtacttaag

SEQ ID NO: 2570321 - DNA, 25 bp, Homo sapien
tgtactatgacttaaaaagcccact

SEQ ID NO: 2570322 - DNA, 25 bp, Homo sapien
tctatagctgctaccgaccaaagta

SEQ ID NO: 2570323 - DNA, 25 bp, Homo sapien
tgagattgacagctttaccatggtt

SEQ ID NO: 2570324 - DNA, 25 bp, Homo sapien
cagtagaaaaataaggtttgagccg

SEQ ID NO: 2570325 - DNA, 25 bp, Homo sapien
gagggataactattggtatgtgtcc

SEQ ID NO: 2570326 - DNA, 25 bp, Homo sapien
ctgttgtcttcggtttcctgaaatt

SEQ ID NO: 2570327 - DNA, 25 bp, Homo sapien
tcttcggtttcctgaaatttcttga

SEQ ID NO: 2570328 - DNA, 25 bp, Homo sapien
ggtcaggcgttccatagctggtatg

SEQ ID NO: 2570329 - DNA, 25 bp, Homo sapien
cctgggtcaggcgttccatagctgg

SEQ ID NO: 2570330 - DNA, 25 bp, Homo sapien
caggcgttccatagctggtatgtct

SEQ ID NO: 2570331 - DNA, 25 bp, Homo sapien
gcgttccatagctggtatgtcttca

SEQ ID NO: 2570332 - DNA, 25 bp, Homo sapien
tggtcagagactccatatcagcagc

SEQ ID NO: 2570333 - DNA, 25 bp, Homo sapien
ggtcagagactccatatcagcagcc

SEQ ID NO: 2570334 - DNA, 25 bp, Homo sapien
cagccatcatggactgtagagcaga

SEQ ID NO: 2570335 - DNA, 25 bp, Homo sapien
catggactgtagagcagaaagttcc

SEQ ID NO: 2570336 - DNA, 25 bp, Homo sapien
ctgcacagccatcatggactgtaga

SEQ ID NO: 2570337 - DNA, 25 bp, Homo sapien
catcatggactgtagagcagaaagt

SEQ ID NO: 2570338 - DNA, 25 bp, Homo sapien
gggataaggcatcaaacagcaacag

SEQ ID NO: 2570339 - DNA, 25 bp, Homo sapien
aacagctgctaacatcacgagagat

SEQ ID NO: 2570340 - DNA, 25 bp, Homo sapien
cacgagagatcaccaaacattacat

SEQ ID NO: 2570341 - DNA, 25 bp, Homo sapien
cattacatgactcctgatggaagaa

SEQ ID NO: 2570342 - DNA, 25 bp, Homo sapien
agccctgcaactgtgtccaaatctc

SEQ ID NO: 2570343 - DNA, 25 bp, Homo sapien
ttttttagccatgagttcaagttcc

SEQ ID NO: 2570344 - DNA, 25 bp, Homo sapien
tgagttcaagttcctctttggcatt

SEQ ID NO: 2570345 - DNA, 25 bp, Homo sapien
tggcattactcagttctttttccag

SEQ ID NO: 2570346 - DNA, 25 bp, Homo sapien
tacttaagctattcgcccagcctgg

SEQ ID NO: 2570347 - DNA, 25 bp, Homo sapien
taattaggaatgatcaggccggatc

SEQ ID NO: 2570348 - DNA, 25 bp, Homo sapien
gcaataagctgagcgccagatgtca

SEQ ID NO: 2570349 - DNA, 25 bp, Homo sapien
tgtttgagagctcctactgggagcc

SEQ ID NO: 2570350 - DNA, 25 bp, Homo sapien
ctctgactggagggactcaaagagc

SEQ ID NO: 2570351 - DNA, 25 bp, Homo sapien
tggagggaaagacgttcctccctga

SEQ ID NO: 2570352 - DNA, 25 bp, Homo sapien
tccagctcttgaaggtgggatcgag

SEQ ID NO: 2570353 - DNA, 25 bp, Homo sapien
cctccctgaaatgcaagacctcttg

SEQ ID NO: 2570354 - DNA, 25 bp, Homo sapien
ggtgggatcgagaggacagcagagc

SEQ ID NO: 2570355 - DNA, 25 bp, Homo sapien
ccaggccctgactgtagaagttaga

SEQ ID NO: 2570356 - DNA, 25 bp, Homo sapien
ctcattgcagagctgaggtatggac

SEQ ID NO: 2570357 - DNA, 25 bp, Homo sapien
ggactccaggccctgactgtagaag

SEQ ID NO: 2570358 - DNA, 25 bp, Homo sapien
cattgcagagctgaggtatggactc

SEQ ID NO: 2570359 - DNA, 25 bp, Homo sapien
ccagaaagtagacatttgggtaaca

SEQ ID NO: 2570360 - DNA, 25 bp, Homo sapien
ctgtcccagaaagtagacatttggg

SEQ ID NO: 2570361 - DNA, 25 bp, Homo sapien
tgtcccagaaagtagacatttgggt

SEQ ID NO: 2570362 - DNA, 25 bp, Homo sapien
tcccagaaagtagacatttgggtaa

SEQ ID NO: 2570363 - DNA, 25 bp, Homo sapien
cacatgccgtaactgcaatggtgca

SEQ ID NO: 2570364 - DNA, 25 bp, Homo sapien
taggcaggacaacaacatatggaaa

SEQ ID NO: 2570365 - DNA, 25 bp, Homo sapien
tagggatgacagtacttgcccacct

SEQ ID NO: 2570366 - DNA, 25 bp, Homo sapien
gaggacccttacagacctggttcca

SEQ ID NO: 2570367 - DNA, 25 bp, Homo sapien
ttccacgagcagtagaggtcagccg

SEQ ID NO: 2570368 - DNA, 25 bp, Homo sapien
gaggtcagccggtgttccagttgct

SEQ ID NO: 2570369 - DNA, 25 bp, Homo sapien
cccttccacgagcagtagaggtcag

SEQ ID NO: 2570370 - DNA, 25 bp, Homo sapien
agcagtagaggtcagccggtgttcc

SEQ ID NO: 2570371 - DNA, 25 bp, Homo sapien
tgggagatggagaatcctggttact

SEQ ID NO: 2570372 - DNA, 25 bp, Homo sapien
gtggggctcggctaggggacctgca

SEQ ID NO: 2570373 - DNA, 25 bp, Homo sapien
cggccaaaccaccaggacatgaaga

SEQ ID NO: 2570374 - DNA, 25 bp, Homo sapien
acctgcagcaagacctgtaaatatc

SEQ ID NO: 2570375 - DNA, 25 bp, Homo sapien
aggaagagtcggcttccaagtcgtt

SEQ ID NO: 2570376 - DNA, 25 bp, Homo sapien
aggtagtaggaagagtcggcttcca

SEQ ID NO: 2570377 - DNA, 25 bp, Homo sapien
agttgaggtagtaggaagagtcggc

SEQ ID NO: 2570378 - DNA, 25 bp, Homo sapien
gagtcggcttccaagtcgttgctca

SEQ ID NO: 2570379 - DNA, 25 bp, Homo sapien
ctgtggaagcaggaggaacagtgct

SEQ ID NO: 2570380 - DNA, 25 bp, Homo sapien
tggaagcaggaggaacagtgctggc

SEQ ID NO: 2570381 - DNA, 25 bp, Homo sapien
tgtggaagcaggaggaacagtgctg

SEQ ID NO: 2570382 - DNA, 25 bp, Homo sapien
gaagcaggaggaacagtgctggcac

SEQ ID NO: 2570383 - DNA, 25 bp, Homo sapien
tggtgtctcacagcagccaaggagg

SEQ ID NO: 2570384 - DNA, 25 bp, Homo sapien
gtgtctcacagcagccaaggaggag

SEQ ID NO: 2570385 - DNA, 25 bp, Homo sapien
tgcagcatctgtagctcctgctgag

SEQ ID NO: 2570386 - DNA, 25 bp, Homo sapien
tcagccaaggagaccactggtgtct

SEQ ID NO: 2570387 - DNA, 25 bp, Homo sapien
ttgggtatggagtgaaaatgaaagc

SEQ ID NO: 2570388 - DNA, 25 bp, Homo sapien
agcttgggtatggagtgaaaatgaa

SEQ ID NO: 2570389 - DNA, 25 bp, Homo sapien
gcttgggtatggagtgaaaatgaaa

SEQ ID NO: 2570390 - DNA, 25 bp, Homo sapien
cagcttgggtatggagtgaaaatga

SEQ ID NO: 2570391 - DNA, 25 bp, Homo sapien
gcatatatcctctgtgttcatcttg

SEQ ID NO: 2570392 - DNA, 25 bp, Homo sapien
atatatcctctgtgttcatcttgaa

SEQ ID NO: 2570393 - DNA, 25 bp, Homo sapien
catatatcctctgtgttcatcttga

SEQ ID NO: 2570394 - DNA, 25 bp, Homo sapien
gttggattcggccttagccccctga

SEQ ID NO: 2570395 - DNA, 25 bp, Homo sapien
tgttggattcggccttagccccctg

SEQ ID NO: 2570396 - DNA, 25 bp, Homo sapien
ctgttggattcggccttagccccct

SEQ ID NO: 2570397 - DNA, 25 bp, Homo sapien
caaagatggtaccacccagaaagtg

SEQ ID NO: 2570398 - DNA, 25 bp, Homo sapien
agacaaagatggtaccacccagaaa

SEQ ID NO: 2570399 - DNA, 25 bp, Homo sapien
aagatggtaccacccagaaagtgga

SEQ ID NO: 2570400 - DNA, 25 bp, Homo sapien
gacaaagatggtaccacccagaaag

SEQ ID NO: 2570401 - DNA, 25 bp, Homo sapien
ctcttcatagtgtgtgtactcgctg

SEQ ID NO: 2570402 - DNA, 25 bp, Homo sapien
ctttcttctcttcatagtgtgtgta

SEQ ID NO: 2570403 - DNA, 25 bp, Homo sapien
gagggtgtgagggaccgagcatcca

SEQ ID NO: 2570404 - DNA, 25 bp, Homo sapien
tcttctcttcatagtgtgtgtactc

SEQ ID NO: 2570405 - DNA, 25 bp, Homo sapien
aaggtcaccgaagccaacctgtcct

SEQ ID NO: 2570406 - DNA, 25 bp, Homo sapien
accaaggtcaccgaagccaacctgt

SEQ ID NO: 2570407 - DNA, 25 bp, Homo sapien
ggtcaccgaagccaacctgtcctga

SEQ ID NO: 2570408 - DNA, 25 bp, Homo sapien
aaccaaggtcaccgaagccaacctg

SEQ ID NO: 2570409 - DNA, 25 bp, Homo sapien
tggccacataatatgctgaggacaa

SEQ ID NO: 2570410 - DNA, 25 bp, Homo sapien
cataatatgctgaggacaagcaaag

SEQ ID NO: 2570411 - DNA, 25 bp, Homo sapien
ctctggccacataatatgctgagga

SEQ ID NO: 2570412 - DNA, 25 bp, Homo sapien
gccacataatatgctgaggacaagc

SEQ ID NO: 2570413 - DNA, 25 bp, Homo sapien
ttcatcagtttctcatctgaagcac

SEQ ID NO: 2570414 - DNA, 25 bp, Homo sapien
agtttataaaccactttcatcagtt

SEQ ID NO: 2570415 - DNA, 25 bp, Homo sapien
tcagtttctcatctgaagcactgat

SEQ ID NO: 2570416 - DNA, 25 bp, Homo sapien
tcattccctgggcagtttataaacc

SEQ ID NO: 2570417 - DNA, 25 bp, Homo sapien
gctagtggaggacgcataggtagtt

SEQ ID NO: 2570418 - DNA, 25 bp, Homo sapien
ccttggggctagtggaggacgcata

SEQ ID NO: 2570419 - DNA, 25 bp, Homo sapien
aaggccttggggctagtggaggacg

SEQ ID NO: 2570420 - DNA, 25 bp, Homo sapien
cagaggaagaaaccgagacccagaa

SEQ ID NO: 2570421 - DNA, 25 bp, Homo sapien
agtggatgaacaccccgaacttggc

SEQ ID NO: 2570422 - DNA, 25 bp, Homo sapien
gcctggaagaggtcggcccactcct

SEQ ID NO: 2570423 - DNA, 25 bp, Homo sapien
aacttggcttcgtcgaaccaggccg

SEQ ID NO: 2570424 - DNA, 25 bp, Homo sapien
aagaagcgcgcagtgaactgcggtc

SEQ ID NO: 2570425 - DNA, 25 bp, Homo sapien
cccgcccgccgcgacctcatccccg

SEQ ID NO: 2570426 - DNA, 25 bp, Homo sapien
gcagcaacagcgcgggacccgcccg

SEQ ID NO: 2570427 - DNA, 25 bp, Homo sapien
ctcggccgctccgaggaagagcagc

SEQ ID NO: 2570428 - DNA, 25 bp, Homo sapien
gccgcgacctcatccccggagccca

SEQ ID NO: 2570429 - DNA, 25 bp, Homo sapien
aaacagtaagcatgaacaccttagg

SEQ ID NO: 2570430 - DNA, 25 bp, Homo sapien
aaaacagtaagcatgaacaccttag

SEQ ID NO: 2570431 - DNA, 25 bp, Homo sapien
tcctcaaccaaacaacaagggcagt

SEQ ID NO: 2570432 - DNA, 25 bp, Homo sapien
tgtctccctgagcaagtcttgtcca

SEQ ID NO: 2570433 - DNA, 25 bp, Homo sapien
gaaacctaggtttgttgcactggac

SEQ ID NO: 2570434 - DNA, 25 bp, Homo sapien
caagggcagttctcagtgatatcta

SEQ ID NO: 2570435 - DNA, 25 bp, Homo sapien
tagtgtccgcctaaacttcttgtcc

SEQ ID NO: 2570436 - DNA, 25 bp, Homo sapien
tcatactattaggattagggtgggc

SEQ ID NO: 2570437 - DNA, 25 bp, Homo sapien
tgagaaaggattccaccgatgaata

SEQ ID NO: 2570438 - DNA, 25 bp, Homo sapien
ggaggataaactagtgactgccact

SEQ ID NO: 2570439 - DNA, 25 bp, Homo sapien
tgcaatcttcctgccgccaacaatt

SEQ ID NO: 2570440 - DNA, 25 bp, Homo sapien
tatgaaaaatgagtaccctgggatc

SEQ ID NO: 2570441 - DNA, 25 bp, Homo sapien
tccatttgaggtcccaaataattgc

SEQ ID NO: 2570442 - DNA, 25 bp, Homo sapien
tttaggctcctctgggaggaaccca

SEQ ID NO: 2570443 - DNA, 25 bp, Homo sapien
ctcctcccacttgctctgcttatta

SEQ ID NO: 2570444 - DNA, 25 bp, Homo sapien
cctcccacttgctctgcttattata

SEQ ID NO: 2570445 - DNA, 25 bp, Homo sapien
tcccacttgctctgcttattatatg

SEQ ID NO: 2570446 - DNA, 25 bp, Homo sapien
ccacttgctctgcttattatatgta

SEQ ID NO: 2570447 - DNA, 25 bp, Homo sapien
tcagaatatcagagagggtcctcgc

SEQ ID NO: 2570448 - DNA, 25 bp, Homo sapien
tcatcatagcatagtcctcggtcct

SEQ ID NO: 2570449 - DNA, 25 bp, Homo sapien
gggtcctcgcccaaacaacaggatg

SEQ ID NO: 2570450 - DNA, 25 bp, Homo sapien
tttttgtgtctcaggcgatcccagc

SEQ ID NO: 2570451 - DNA, 25 bp, Homo sapien
caatcagagaggtctagatctctgg

SEQ ID NO: 2570452 - DNA, 25 bp, Homo sapien
ggaatctggccacggagtgattttc

SEQ ID NO: 2570453 - DNA, 25 bp, Homo sapien
tcagcaatcagagaggtctagatct

SEQ ID NO: 2570454 - DNA, 25 bp, Homo sapien
ctggaatctggccacggagtgattt

SEQ ID NO: 2570455 - DNA, 25 bp, Homo sapien
cagaggtatcggtcaatggcggtca

SEQ ID NO: 2570456 - DNA, 25 bp, Homo sapien
caggatcagatagagcacagccacg

SEQ ID NO: 2570457 - DNA, 25 bp, Homo sapien
gaaagcaaaggccttcttgacctgg

SEQ ID NO: 2570458 - DNA, 25 bp, Homo sapien
tgaaggtcatagtcacgctgccaat

SEQ ID NO: 2570459 - DNA, 25 bp, Homo sapien
ggggtgggcccttcagattccactg

SEQ ID NO: 2570460 - DNA, 25 bp, Homo sapien
gggtgggcccttcagattccactga

SEQ ID NO: 2570461 - DNA, 25 bp, Homo sapien
ggtgggcccttcagattccactgag

SEQ ID NO: 2570462 - DNA, 25 bp, Homo sapien
gcgagaatctgtcctaggaaagaaa

SEQ ID NO: 2570463 - DNA, 25 bp, Homo sapien
agcgagaatctgtcctaggaaagaa

SEQ ID NO: 2570464 - DNA, 25 bp, Homo sapien
tagcgagaatctgtcctaggaaaga

SEQ ID NO: 2570465 - DNA, 25 bp, Homo sapien
aaggatttacccatcaggctgttgg

SEQ ID NO: 2570466 - DNA, 25 bp, Homo sapien
gagtctggaccttctcaccgacaag

SEQ ID NO: 2570467 - DNA, 25 bp, Homo sapien
gatgtcatctctattgtgcccttgg

SEQ ID NO: 2570468 - DNA, 25 bp, Homo sapien
caaagttcatgctcagattacgggc

SEQ ID NO: 2570469 - DNA, 25 bp, Homo sapien
aatgttaccacaaagaaatgcgctg

SEQ ID NO: 2570470 - DNA, 25 bp, Homo sapien
gactgtctcattttcacgatcttat

SEQ ID NO: 2570471 - DNA, 25 bp, Homo sapien
gatcttatctatgaggaaccagagg

SEQ ID NO: 2570472 - DNA, 25 bp, Homo sapien
ggaatacaatgtgatattatgatac

SEQ ID NO: 2570473 - DNA, 25 bp, Homo sapien
tttctgcactgcacttgcgtcatcc

SEQ ID NO: 2570474 - DNA, 25 bp, Homo sapien
agtactggcattggttgctgcggta

SEQ ID NO: 2570475 - DNA, 25 bp, Homo sapien
gatctgtccgacatgaatttggtca

SEQ ID NO: 2570476 - DNA, 25 bp, Homo sapien
tgagccagaactaccccaagcctct

SEQ ID NO: 2570477 - DNA, 25 bp, Homo sapien
ccagagtcaggatgtctggatgtct

SEQ ID NO: 2570478 - DNA, 25 bp, Homo sapien
gagtcaggatgtctggatgtctgac

SEQ ID NO: 2570479 - DNA, 25 bp, Homo sapien
cctccagagtcaggatgtctggatg

SEQ ID NO: 2570480 - DNA, 25 bp, Homo sapien
ctcctccagagtcaggatgtctgga

SEQ ID NO: 2570481 - DNA, 25 bp, Homo sapien
tgggcagcgccgttggcaaactcct

SEQ ID NO: 2570482 - DNA, 25 bp, Homo sapien
gcactctgccttggcccagttcagg

SEQ ID NO: 2570483 - DNA, 25 bp, Homo sapien
cagatagagggctcgccccaaaaca

SEQ ID NO: 2570484 - DNA, 25 bp, Homo sapien
caaaacatgcctcttgtttcgtggg

SEQ ID NO: 2570485 - DNA, 25 bp, Homo sapien
tagggtcatggttggaattcggatc

SEQ ID NO: 2570486 - DNA, 25 bp, Homo sapien
cctcctggtgttgagggcctcccga

SEQ ID NO: 2570487 - DNA, 25 bp, Homo sapien
cgcctcctggtgttgagggcctccc

SEQ ID NO: 2570488 - DNA, 25 bp, Homo sapien
tcctggtgttgagggcctcccgagt

SEQ ID NO: 2570489 - DNA, 25 bp, Homo sapien
tggtgttgagggcctcccgagtgac

SEQ ID NO: 2570490 - DNA, 25 bp, Homo sapien
gccatctcggcctgtgcgtcgatga

SEQ ID NO: 2570491 - DNA, 25 bp, Homo sapien
gtcaggtcgggctcctcaaacagcc

SEQ ID NO: 2570492 - DNA, 25 bp, Homo sapien
acagaagccttgggaccgcagggcc

SEQ ID NO: 2570493 - DNA, 25 bp, Homo sapien
aacgtctgccggtccatctcacaga

SEQ ID NO: 2570494 - DNA, 25 bp, Homo sapien
acagcaggacgcaggcgttcttggc

SEQ ID NO: 2570495 - DNA, 25 bp, Homo sapien
cagcaggacgcaggcgttcttggct

SEQ ID NO: 2570496 - DNA, 25 bp, Homo sapien
gacagcaggacgcaggcgttcttgg

SEQ ID NO: 2570497 - DNA, 25 bp, Homo sapien
ttgccaatgctgggacgatgtactt

SEQ ID NO: 2570498 - DNA, 25 bp, Homo sapien
ccccagaaagttgacgcaggctttt

SEQ ID NO: 2570499 - DNA, 25 bp, Homo sapien
agttgacgcaggcttttgccaatgc

SEQ ID NO: 2570500 - DNA, 25 bp, Homo sapien
cttgtccccagaaagttgacgcagg

SEQ ID NO: 2570501 - DNA, 25 bp, Homo sapien
cgtatccgcttccagatcgatctca

SEQ ID NO: 2570502 - DNA, 25 bp, Homo sapien
gtatccgcttccagatcgatctcat

SEQ ID NO: 2570503 - DNA, 25 bp, Homo sapien
atccgcttccagatcgatctcatca

SEQ ID NO: 2570504 - DNA, 25 bp, Homo sapien
tatccgcttccagatcgatctcatc

SEQ ID NO: 2570505 - DNA, 25 bp, Homo sapien
tgcgggctccacgtctggaatgtga

SEQ ID NO: 2570506 - DNA, 25 bp, Homo sapien
cgggctccacgtctggaatgtgaat

SEQ ID NO: 2570507 - DNA, 25 bp, Homo sapien
ctccacgtctggaatgtgaatttca

SEQ ID NO: 2570508 - DNA, 25 bp, Homo sapien
ggctccacgtctggaatgtgaattt

SEQ ID NO: 2570509 - DNA, 25 bp, Homo sapien
ccaggacgtacttgtgggcgggcac

SEQ ID NO: 2570510 - DNA, 25 bp, Homo sapien
gccaggacgtacttgtgggcgggca

SEQ ID NO: 2570511 - DNA, 25 bp, Homo sapien
ctgcagacagccaggacgtacttgt

SEQ ID NO: 2570512 - DNA, 25 bp, Homo sapien
agacagccaggacgtacttgtgggc

SEQ ID NO: 2570513 - DNA, 25 bp, Homo sapien
gggtcccacgacaaagtgcacgtcg

SEQ ID NO: 2570514 - DNA, 25 bp, Homo sapien
cggccacgagctcgttgttgaacat

SEQ ID NO: 2570515 - DNA, 25 bp, Homo sapien
cacgtcggccacgagctcgttgttg

SEQ ID NO: 2570516 - DNA, 25 bp, Homo sapien
acgacaaagtgcacgtcggccacga

SEQ ID NO: 2570517 - DNA, 25 bp, Homo sapien
gagcgcgttcctctcgcgcagcgtg

SEQ ID NO: 2570518 - DNA, 25 bp, Homo sapien
ctctcgcgcagcgtgggggaccgcg

SEQ ID NO: 2570519 - DNA, 25 bp, Homo sapien
agcgcgttcctctcgcgcagcgtgg

SEQ ID NO: 2570520 - DNA, 25 bp, Homo sapien
gttcctctcgcgcagcgtgggggac

SEQ ID NO: 2570521 - DNA, 25 bp, Homo sapien
cggggacgtagagctccgccgccat

SEQ ID NO: 2570522 - DNA, 25 bp, Homo sapien
cgctggcggggacgtagagctccgc

SEQ ID NO: 2570523 - DNA, 25 bp, Homo sapien
ggcggggacgtagagctccgccgcc

SEQ ID NO: 2570524 - DNA, 25 bp, Homo sapien
gggacgtagagctccgccgccatcc

SEQ ID NO: 2570525 - DNA, 25 bp, Homo sapien
taatggattggttggaggtattctc

SEQ ID NO: 2570526 - DNA, 25 bp, Homo sapien
ggcctggccgcagcaataactgctt

SEQ ID NO: 2570527 - DNA, 25 bp, Homo sapien
gtattctctctgacacatgccagca

SEQ ID NO: 2570528 - DNA, 25 bp, Homo sapien
tcctcaaggagggtaacctgctttc

SEQ ID NO: 2570529 - DNA, 25 bp, Homo sapien
tctctctaaagcaggagtaagacag

SEQ ID NO: 2570530 - DNA, 25 bp, Homo sapien
tttgtgaagcgatgtggagagccat

SEQ ID NO: 2570531 - DNA, 25 bp, Homo sapien
ggctcagctcttgaaacactctggt

SEQ ID NO: 2570532 - DNA, 25 bp, Homo sapien
tgcttatagggttgcatcagtcggg

SEQ ID NO: 2570533 - DNA, 25 bp, Homo sapien
cctcgggagccaaacttgcaaggtg

SEQ ID NO: 2570534 - DNA, 25 bp, Homo sapien
gatctagcgggatcacgggacactc

SEQ ID NO: 2570535 - DNA, 25 bp, Homo sapien
aagaacacatgttgcaatctctggc

SEQ ID NO: 2570536 - DNA, 25 bp, Homo sapien
gattctcagttggttctgaacacag

SEQ ID NO: 2570537 - DNA, 25 bp, Homo sapien
gagacacagaggacgaactcaatga

SEQ ID NO: 2570538 - DNA, 25 bp, Homo sapien
aaggtcagtgaagcaccctctggct

SEQ ID NO: 2570539 - DNA, 25 bp, Homo sapien
cagattttccaggacccaaacagac

SEQ ID NO: 2570540 - DNA, 25 bp, Homo sapien
aatgaatttgggctgaggcaacact

SEQ ID NO: 2570541 - DNA, 25 bp, Homo sapien
caccgaaccacgaagtcccctctgc

SEQ ID NO: 2570542 - DNA, 25 bp, Homo sapien
accgaaccacgaagtcccctctgct

SEQ ID NO: 2570543 - DNA, 25 bp, Homo sapien
acaccgaaccacgaagtcccctctg

SEQ ID NO: 2570544 - DNA, 25 bp, Homo sapien
tagccagacgcagtagtgcacacct

SEQ ID NO: 2570545 - DNA, 25 bp, Homo sapien
tggggaatgaggaagaagcctaaaa

SEQ ID NO: 2570546 - DNA, 25 bp, Homo sapien
aaagaatacaggtgttggggaatga

SEQ ID NO: 2570547 - DNA, 25 bp, Homo sapien
gggaatgaggaagaagcctaaaata

SEQ ID NO: 2570548 - DNA, 25 bp, Homo sapien
gggctgaggagtcccagttgttttc

SEQ ID NO: 2570549 - DNA, 25 bp, Homo sapien
tcccaggacctggccgtgggtgcca

SEQ ID NO: 2570550 - DNA, 25 bp, Homo sapien
ggagtcccagttgttttctgtcctc

SEQ ID NO: 2570551 - DNA, 25 bp, Homo sapien
gttgtgttgtgggtggctgggcact

SEQ ID NO: 2570552 - DNA, 25 bp, Homo sapien
ggctctcagccgtgaatcctgcgat

SEQ ID NO: 2570553 - DNA, 25 bp, Homo sapien
ggaaagtccctgtgtatagagcctg

SEQ ID NO: 2570554 - DNA, 25 bp, Homo sapien
tcctgcgatgcgtaagggaaagatc

SEQ ID NO: 2570555 - DNA, 25 bp, Homo sapien
taattaattacgtgaggccatgcct

SEQ ID NO: 2570556 - DNA, 25 bp, Homo sapien
tggtccttgtatgtggtcaatgcct

SEQ ID NO: 2570557 - DNA, 25 bp, Homo sapien
aaccctgagccacagtatttggtgg

SEQ ID NO: 2570558 - DNA, 25 bp, Homo sapien
gagccacagtatttggtggcaattg

SEQ ID NO: 2570559 - DNA, 25 bp, Homo sapien
ggtggcaattgtggtccttgtatgt

SEQ ID NO: 2570560 - DNA, 25 bp, Homo sapien
cctgcaaagtaccgacagctgagct

SEQ ID NO: 2570561 - DNA, 25 bp, Homo sapien
caaccagataatcctcacctgcctc

SEQ ID NO: 2570562 - DNA, 25 bp, Homo sapien
gataatgtctaatatcaccgagtgt

SEQ ID NO: 2570563 - DNA, 25 bp, Homo sapien
taatgtctaatatcaccgagtgtca

SEQ ID NO: 2570564 - DNA, 25 bp, Homo sapien
tgtctaatatcaccgagtgtcacag

SEQ ID NO: 2570565 - DNA, 25 bp, Homo sapien
aatatcaccgagtgtcacagtacca

SEQ ID NO: 2570566 - DNA, 25 bp, Homo sapien
tggagagtgacagtggagcggcggc

SEQ ID NO: 2570567 - DNA, 25 bp, Homo sapien
tcggtgagtgagaggtggcgctggc

SEQ ID NO: 2570568 - DNA, 25 bp, Homo sapien
ggctggagctcggtgagtgagaggt

SEQ ID NO: 2570569 - DNA, 25 bp, Homo sapien
gagagtgacagtggagcggcggcgg

SEQ ID NO: 2570570 - DNA, 25 bp, Homo sapien
tgaggcacatcgaaacagtgggcag

SEQ ID NO: 2570571 - DNA, 25 bp, Homo sapien
tcttcaaactgaattaagccctgag

SEQ ID NO: 2570572 - DNA, 25 bp, Homo sapien
cttctggcaggttctaagaatttgc

SEQ ID NO: 2570573 - DNA, 25 bp, Homo sapien
aaactgaattaagccctgagcggac

SEQ ID NO: 2570574 - DNA, 25 bp, Homo sapien
tctggctggcataatcaactgaaca

SEQ ID NO: 2570575 - DNA, 25 bp, Homo sapien
gcatctggctggcataatcaactga

SEQ ID NO: 2570576 - DNA, 25 bp, Homo sapien
ctgcatctggctggcataatcaact

SEQ ID NO: 2570577 - DNA, 25 bp, Homo sapien
tggctggcataatcaactgaacaat

SEQ ID NO: 2570578 - DNA, 25 bp, Homo sapien
ggaggagagcagtcctcattctttc

SEQ ID NO: 2570579 - DNA, 25 bp, Homo sapien
aggggaggagagcagtcctcattct

SEQ ID NO: 2570580 - DNA, 25 bp, Homo sapien
ggagagcagtcctcattctttcagc

SEQ ID NO: 2570581 - DNA, 25 bp, Homo sapien
agagcagtcctcattctttcagcaa

SEQ ID NO: 2570582 - DNA, 25 bp, Homo sapien
cccgggcagatttcaaaccctctgc

SEQ ID NO: 2570583 - DNA, 25 bp, Homo sapien
ccccgggcagatttcaaaccctctg

SEQ ID NO: 2570584 - DNA, 25 bp, Homo sapien
cgtgttttgattggccgcggagcct

SEQ ID NO: 2570585 - DNA, 25 bp, Homo sapien
aacaggcggcggcccgcttctcatt

SEQ ID NO: 2570586 - DNA, 25 bp, Homo sapien
cggcggcccgcttctcattggccag

SEQ ID NO: 2570587 - DNA, 25 bp, Homo sapien
aggcccgcgctgtcgtgttttgatt

SEQ ID NO: 2570588 - DNA, 25 bp, Homo sapien
gctgccgcgttagttccgagcttga

SEQ ID NO: 2570589 - DNA, 25 bp, Homo sapien
agccgctgccgcgttagttccgagc

SEQ ID NO: 2570590 - DNA, 25 bp, Homo sapien
tgccgcgttagttccgagcttgaag

SEQ ID NO: 2570591 - DNA, 25 bp, Homo sapien
cgcgttagttccgagcttgaagtca

SEQ ID NO: 2570592 - DNA, 25 bp, Homo sapien
tctgtcaacaaatacaccaaaacca

SEQ ID NO: 2570593 - DNA, 25 bp, Homo sapien
tattaaatgtagtggattaagtgtc

SEQ ID NO: 2570594 - DNA, 25 bp, Homo sapien
gtgtctgtcaacaaatacaccaaaa

SEQ ID NO: 2570595 - DNA, 25 bp, Homo sapien
aatgtagtggattaagtgtctgtca

SEQ ID NO: 2570596 - DNA, 25 bp, Homo sapien
tgctctggcctcatcattcctgcaa

SEQ ID NO: 2570597 - DNA, 25 bp, Homo sapien
tgcacaagctattctaatagtgctc

SEQ ID NO: 2570598 - DNA, 25 bp, Homo sapien
tttaatggtcactcaatagctttca

SEQ ID NO: 2570599 - DNA, 25 bp, Homo sapien
ctgtaataaacttgtagcatatgta

SEQ ID NO: 2570600 - DNA, 25 bp, Homo sapien
actgcccaagttaaatattgatagc

SEQ ID NO: 2570601 - DNA, 25 bp, Homo sapien
ctgcccaagttaaatattgatagcc

SEQ ID NO: 2570602 - DNA, 25 bp, Homo sapien
cttaatgtacatgatatgaatgtga

SEQ ID NO: 2570603 - DNA, 25 bp, Homo sapien
agacaagtttatgtagtacttaatg

SEQ ID NO: 2570604 - DNA, 25 bp, Homo sapien
tactgtgaaccttaggtaaatgctg

SEQ ID NO: 2570605 - DNA, 25 bp, Homo sapien
gctgaagtcagccatactgtgaacc

SEQ ID NO: 2570606 - DNA, 25 bp, Homo sapien
cagccatactgtgaaccttaggtaa

SEQ ID NO: 2570607 - DNA, 25 bp, Homo sapien
gctgctgaagtcagccatactgtga

SEQ ID NO: 2570608 - DNA, 25 bp, Homo sapien
tagaacctctgtccataagaacccc

SEQ ID NO: 2570609 - DNA, 25 bp, Homo sapien
gtaacctaggatctgacacttgctg

SEQ ID NO: 2570610 - DNA, 25 bp, Homo sapien
gaaaagcacatggttcggcacagta

SEQ ID NO: 2570611 - DNA, 25 bp, Homo sapien
catgatgggtattctacaaaggaca

SEQ ID NO: 2570612 - DNA, 25 bp, Homo sapien
cagaacatactaaatcagttaggat

SEQ ID NO: 2570613 - DNA, 25 bp, Homo sapien
gtgaggcagagtaaacaatttatta

SEQ ID NO: 2570614 - DNA, 25 bp, Homo sapien
tcagttaggataacagctctctgtc

SEQ ID NO: 2570615 - DNA, 25 bp, Homo sapien
tttgggggttatatcctagcatgtg

SEQ ID NO: 2570616 - DNA, 25 bp, Homo sapien
tatccagtacaatgatttgcccaca

SEQ ID NO: 2570617 - DNA, 25 bp, Homo sapien
tacctgggaaggagtagttaagaca

SEQ ID NO: 2570618 - DNA, 25 bp, Homo sapien
gggccctcttagctggatgtcaaat

SEQ ID NO: 2570619 - DNA, 25 bp, Homo sapien
ccacccaattcagtttgagacagac

SEQ ID NO: 2570620 - DNA, 25 bp, Homo sapien
gggacttcaattattccatgtagtt

SEQ ID NO: 2570621 - DNA, 25 bp, Homo sapien
agtattcatactgcagcaccttcca

SEQ ID NO: 2570622 - DNA, 25 bp, Homo sapien
gtcgcttgaactgcccttctttggt

SEQ ID NO: 2570623 - DNA, 25 bp, Homo sapien
tttggtcgcttgaactgcccttctt

SEQ ID NO: 2570624 - DNA, 25 bp, Homo sapien
cctttggtcgcttgaactgcccttc

SEQ ID NO: 2570625 - DNA, 25 bp, Homo sapien
tggtcgcttgaactgcccttctttg

SEQ ID NO: 2570626 - DNA, 25 bp, Homo sapien
tcagatctttcttgaagtgtagtaa

SEQ ID NO: 2570627 - DNA, 25 bp, Homo sapien
gaactgtactgggtattccagctgc

SEQ ID NO: 2570628 - DNA, 25 bp, Homo sapien
tactgggtattccagctgcagtttg

SEQ ID NO: 2570629 - DNA, 25 bp, Homo sapien
gtgtagtaagcagaactgtactggg

SEQ ID NO: 2570630 - DNA, 25 bp, Homo sapien
taaataaaagaaggatgtttgtcag

SEQ ID NO: 2570631 - DNA, 25 bp, Homo sapien
gaaggatgtttgtcagtttggtttc

SEQ ID NO: 2570632 - DNA, 25 bp, Homo sapien
aggatgtttgtcagtttggtttcct

SEQ ID NO: 2570633 - DNA, 25 bp, Homo sapien
taaaagaaggatgtttgtcagtttg

SEQ ID NO: 2570634 - DNA, 25 bp, Homo sapien
tacaggattttgttagttgaactgg

SEQ ID NO: 2570635 - DNA, 25 bp, Homo sapien
taacagctcatactctatgtagcac

SEQ ID NO: 2570636 - DNA, 25 bp, Homo sapien
tagcagcttactgggccaaattttc

SEQ ID NO: 2570637 - DNA, 25 bp, Homo sapien
gagaataatacaatagttcccaggt

SEQ ID NO: 2570638 - DNA, 25 bp, Homo sapien
gcagagagatcttaagtaaaaggag

SEQ ID NO: 2570639 - DNA, 25 bp, Homo sapien
atgcagagagatcttaagtaaaagg

SEQ ID NO: 2570640 - DNA, 25 bp, Homo sapien
tgcagagagatcttaagtaaaagga

SEQ ID NO: 2570641 - DNA, 25 bp, Homo sapien
tagcatgtttgcttaatttacagca

SEQ ID NO: 2570642 - DNA, 25 bp, Homo sapien
catgtttgcttaatttacagcaagc

SEQ ID NO: 2570643 - DNA, 25 bp, Homo sapien
ttatagcatgtttgcttaatttaca

SEQ ID NO: 2570644 - DNA, 25 bp, Homo sapien
gcatgtttgcttaatttacagcaag

SEQ ID NO: 2570645 - DNA, 25 bp, Homo sapien
cgtgcatataaacgattgcatagca

SEQ ID NO: 2570646 - DNA, 25 bp, Homo sapien
catcgttgtattctttacaggcaaa

SEQ ID NO: 2570647 - DNA, 25 bp, Homo sapien
tcgaaagctcaaaagatgtgactct

SEQ ID NO: 2570648 - DNA, 25 bp, Homo sapien
tttagaagcctctataagaaagaaa

SEQ ID NO: 2570649 - DNA, 25 bp, Homo sapien
cagccgggcctagacatcttgacaa

SEQ ID NO: 2570650 - DNA, 25 bp, Homo sapien
aaaagcaggcctccctcataaagag

SEQ ID NO: 2570651 - DNA, 25 bp, Homo sapien
tattatggtcaacaacgctccttaa

SEQ ID NO: 2570652 - DNA, 25 bp, Homo sapien
tatcattggcctagacatccggttt

SEQ ID NO: 2570653 - DNA, 25 bp, Homo sapien
ccttttcatatcttgagccagactt

SEQ ID NO: 2570654 - DNA, 25 bp, Homo sapien
tccttttcatatcttgagccagact

SEQ ID NO: 2570655 - DNA, 25 bp, Homo sapien
ctagaacgtgatttagccttcattt

SEQ ID NO: 2570656 - DNA, 25 bp, Homo sapien
atcttgaaaaagatcgatttcggtg

SEQ ID NO: 2570657 - DNA, 25 bp, Homo sapien
tgaaaaagatcgatttcggtgtttg

SEQ ID NO: 2570658 - DNA, 25 bp, Homo sapien
aaaagatcgatttcggtgtttgaat

SEQ ID NO: 2570659 - DNA, 25 bp, Homo sapien
aaatacatgagtctttttcaaagca

SEQ ID NO: 2570660 - DNA, 25 bp, Homo sapien
tttagagcaaaagttcactctgaaa

SEQ ID NO: 2570661 - DNA, 25 bp, Homo sapien
ggagagatataattagagtaaaaat

SEQ ID NO: 2570662 - DNA, 25 bp, Homo sapien
gcaaaagttcactctgaaattaaaa

SEQ ID NO: 2570663 - DNA, 25 bp, Homo sapien
tatcattgtcggaatggcttctgct

SEQ ID NO: 2570664 - DNA, 25 bp, Homo sapien
ctatcattgtcggaatggcttctgc

SEQ ID NO: 2570665 - DNA, 25 bp, Homo sapien
gaatggcttctgctacgccgtggtc

SEQ ID NO: 2570666 - DNA, 25 bp, Homo sapien
ctgctacgccgtggtcttccagtcg

SEQ ID NO: 2570667 - DNA, 25 bp, Homo sapien
ttttaaacagatcactgtgctacac

SEQ ID NO: 2570668 - DNA, 25 bp, Homo sapien
tttaaacagatcactgtgctacaca

SEQ ID NO: 2570669 - DNA, 25 bp, Homo sapien
aaaagaccgacttcttgatctcctc

SEQ ID NO: 2570670 - DNA, 25 bp, Homo sapien
ctatagttgtaatcaaaagaccgac

SEQ ID NO: 2570671 - DNA, 25 bp, Homo sapien
ggactatacgatcttctatagttgt

SEQ ID NO: 2570672 - DNA, 25 bp, Homo sapien
taacttcggcttctagaacgtctgt

SEQ ID NO: 2570673 - DNA, 25 bp, Homo sapien
tcataatcatcatagcgtgaagaac

SEQ ID NO: 2570674 - DNA, 25 bp, Homo sapien
catcatagcgtgaagaactgtacac

SEQ ID NO: 2570675 - DNA, 25 bp, Homo sapien
aatcatcatagcgtgaagaactgta

SEQ ID NO: 2570676 - DNA, 25 bp, Homo sapien
tcatagcgtgaagaactgtacacat

SEQ ID NO: 2570677 - DNA, 25 bp, Homo sapien
gaaatacaaagaacagaaatattta

SEQ ID NO: 2570678 - DNA, 25 bp, Homo sapien
ctaggaaatacaaagaacagaaata

SEQ ID NO: 2570679 - DNA, 25 bp, Homo sapien
aacagtattaaagccctcaataaat

SEQ ID NO: 2570680 - DNA, 25 bp, Homo sapien
taggaaatacaaagaacagaaatat

SEQ ID NO: 2570681 - DNA, 25 bp, Homo sapien
tttcaatctgccgtccacaaatcca

SEQ ID NO: 2570682 - DNA, 25 bp, Homo sapien
ctgtatttcaatctgccgtccacaa

SEQ ID NO: 2570683 - DNA, 25 bp, Homo sapien
ccactttctgtccaaattatgtaaa

SEQ ID NO: 2570684 - DNA, 25 bp, Homo sapien
tttcgatccccctgggcaaactgta

SEQ ID NO: 2570685 - DNA, 25 bp, Homo sapien
ggtatgtctggaacaattcacaatc

SEQ ID NO: 2570686 - DNA, 25 bp, Homo sapien
aagcacttgtgatttcctaaggcac

SEQ ID NO: 2570687 - DNA, 25 bp, Homo sapien
ttatagctgaatcaccaagttgtcc

SEQ ID NO: 2570688 - DNA, 25 bp, Homo sapien
aaatgccaatagttcttgtgtaagc

SEQ ID NO: 2570689 - DNA, 25 bp, Homo sapien
catatatatctaatactactatttc

SEQ ID NO: 2570690 - DNA, 25 bp, Homo sapien
tatgttgtaagccagaacgcactgc

SEQ ID NO: 2570691 - DNA, 25 bp, Homo sapien
tgctatcaagaaacagaccactgga

SEQ ID NO: 2570692 - DNA, 25 bp, Homo sapien
gctaccctcgaaaacagaatcctgg

SEQ ID NO: 2570693 - DNA, 25 bp, Homo sapien
tttgagagacaacacaagactgcag

SEQ ID NO: 2570694 - DNA, 25 bp, Homo sapien
tgaccctacaagaccaccagagctg

SEQ ID NO: 2570695 - DNA, 25 bp, Homo sapien
cctgtctctcctttaagcagggctc

SEQ ID NO: 2570696 - DNA, 25 bp, Homo sapien
gagctgtttctaagtagtccccagt

SEQ ID NO: 2570697 - DNA, 25 bp, Homo sapien
tttctagtggttctgaccctacaag

SEQ ID NO: 2570698 - DNA, 25 bp, Homo sapien
gaaaaatagttattctgtaggatac

SEQ ID NO: 2570699 - DNA, 25 bp, Homo sapien
aagaaaaatagttattctgtaggat

SEQ ID NO: 2570700 - DNA, 25 bp, Homo sapien
agaaaaatagttattctgtaggata

SEQ ID NO: 2570701 - DNA, 25 bp, Homo sapien
gagatgcttggccaaatatgacaga

SEQ ID NO: 2570702 - DNA, 25 bp, Homo sapien
cttcaagcctgatccttaagaggtc

SEQ ID NO: 2570703 - DNA, 25 bp, Homo sapien
gggtcgccataactgtacagcttta

SEQ ID NO: 2570704 - DNA, 25 bp, Homo sapien
ccccttttgtagataaagcgaggct

SEQ ID NO: 2570705 - DNA, 25 bp, Homo sapien
taaacttgaatttcaaacttcaaca

SEQ ID NO: 2570706 - DNA, 25 bp, Homo sapien
aacgaccaaattcacgccgcaagtc

SEQ ID NO: 2570707 - DNA, 25 bp, Homo sapien
ccaaattcacgccgcaagtcttcag

SEQ ID NO: 2570708 - DNA, 25 bp, Homo sapien
cgaccaaattcacgccgcaagtctt

SEQ ID NO: 2570709 - DNA, 25 bp, Homo sapien
aaattcacgccgcaagtcttcagac

SEQ ID NO: 2570710 - DNA, 25 bp, Homo sapien
ggaaagctaggatccaagaatttgg

SEQ ID NO: 2570711 - DNA, 25 bp, Homo sapien
taggcaatatatctttttgatgaag

SEQ ID NO: 2570712 - DNA, 25 bp, Homo sapien
tttttatgtccaagtccttaagatg

SEQ ID NO: 2570713 - DNA, 25 bp, Homo sapien
aaaacatcataaaaagacctcaaat

SEQ ID NO: 2570714 - DNA, 25 bp, Homo sapien
cattcctctccctcgatcccgttat

SEQ ID NO: 2570715 - DNA, 25 bp, Homo sapien
cgtgaacctcgaagaatgtgaactt

SEQ ID NO: 2570716 - DNA, 25 bp, Homo sapien
gttatttcatctcactattttttgg

SEQ ID NO: 2570717 - DNA, 25 bp, Homo sapien
caagggggcgtgaacctcgaagaat

SEQ ID NO: 2570718 - DNA, 25 bp, Homo sapien
ggtgtcgtcggccacgttcctgacg

SEQ ID NO: 2570719 - DNA, 25 bp, Homo sapien
gccacgttcctgacgaacagagacg

SEQ ID NO: 2570720 - DNA, 25 bp, Homo sapien
ttggggggacgcaggtagcgggaca

SEQ ID NO: 2570721 - DNA, 25 bp, Homo sapien
cgttcctgacgaacagagacgtgtt

SEQ ID NO: 2570722 - DNA, 25 bp, Homo sapien
tagtctctaggccaaactttgcggt

SEQ ID NO: 2570723 - DNA, 25 bp, Homo sapien
gcgcaacggttctttcccgcgagaa

SEQ ID NO: 2570724 - DNA, 25 bp, Homo sapien
agagaggctgccttaaatttcccgg

SEQ ID NO: 2570725 - DNA, 25 bp, Homo sapien
gccctgacctgcgaaagaaggattt

SEQ ID NO: 2570726 - DNA, 25 bp, Homo sapien
tctcagaggtttgaaatttaactgg

SEQ ID NO: 2570727 - DNA, 25 bp, Homo sapien
cacagttctcagaggtttgaaattt

SEQ ID NO: 2570728 - DNA, 25 bp, Homo sapien
ctaagccacagttctcagaggtttg

SEQ ID NO: 2570729 - DNA, 25 bp, Homo sapien
agccacagttctcagaggtttgaaa

SEQ ID NO: 2570730 - DNA, 25 bp, Homo sapien
ctttgacttgatgttagctggcaag

SEQ ID NO: 2570731 - DNA, 25 bp, Homo sapien
gaacaattcctgttgagcaatgccc

SEQ ID NO: 2570732 - DNA, 25 bp, Homo sapien
tcagtgtcctgcacgttttctcagg

SEQ ID NO: 2570733 - DNA, 25 bp, Homo sapien
gcaatgcccctttgaaatcattttg

SEQ ID NO: 2570734 - DNA, 25 bp, Homo sapien
tctgagaacagtgtctctggagacc

SEQ ID NO: 2570735 - DNA, 25 bp, Homo sapien
gtaatctgagaacagtgtctctgga

SEQ ID NO: 2570736 - DNA, 25 bp, Homo sapien
ggagaccagctgaactcctttgagg

SEQ ID NO: 2570737 - DNA, 25 bp, Homo sapien
ctagcttggtagtaatctgagaaca

SEQ ID NO: 2570738 - DNA, 25 bp, Homo sapien
cagaatcaaacagagcctgagtagg

SEQ ID NO: 2570739 - DNA, 25 bp, Homo sapien
tgtggtgaattgatgtactgcttca

SEQ ID NO: 2570740 - DNA, 25 bp, Homo sapien
tttaattcagaatcaaacagagcct

SEQ ID NO: 2570741 - DNA, 25 bp, Homo sapien
agagcctgagtagggacgatgggag

SEQ ID NO: 2570742 - DNA, 25 bp, Homo sapien
gtcagtaaatggatatgtgggaggc

SEQ ID NO: 2570743 - DNA, 25 bp, Homo sapien
ctagctatgcgttgccttttccctg

SEQ ID NO: 2570744 - DNA, 25 bp, Homo sapien
tagctatgcgttgccttttccctgt

SEQ ID NO: 2570745 - DNA, 25 bp, Homo sapien
cttcatggcagccaggacattgctc

SEQ ID NO: 2570746 - DNA, 25 bp, Homo sapien
ctttcttggcagtggctttcttcat

SEQ ID NO: 2570747 - DNA, 25 bp, Homo sapien
ttcttcatggcagccaggacattgc

SEQ ID NO: 2570748 - DNA, 25 bp, Homo sapien
ttggcagtggctttcttcatggcag

SEQ ID NO: 2570749 - DNA, 25 bp, Homo sapien
tcttgataaacttggaggtcttcag

SEQ ID NO: 2570750 - DNA, 25 bp, Homo sapien
ttcttgataaacttggaggtcttca

SEQ ID NO: 2570751 - DNA, 25 bp, Homo sapien
tgtgacactcgtaaggggcaaagcc

SEQ ID NO: 2570752 - DNA, 25 bp, Homo sapien
tggtgtgacactcgtaaggggcaaa

SEQ ID NO: 2570753 - DNA, 25 bp, Homo sapien
gtgtgacactcgtaaggggcaaagc

SEQ ID NO: 2570754 - DNA, 25 bp, Homo sapien
catggtgtgacactcgtaaggggca

SEQ ID NO: 2570755 - DNA, 25 bp, Homo sapien
gtttggtcaggcacctgcggtggca

SEQ ID NO: 2570756 - DNA, 25 bp, Homo sapien
tctcggatcatgtcctgcacaaact

SEQ ID NO: 2570757 - DNA, 25 bp, Homo sapien
ggtgtgtttggtcaggcacctgcgg

SEQ ID NO: 2570758 - DNA, 25 bp, Homo sapien
aggcacctgcggtggcagctgtgcc

SEQ ID NO: 2570759 - DNA, 25 bp, Homo sapien
ggatatattagggaccacaactggg

SEQ ID NO: 2570760 - DNA, 25 bp, Homo sapien
tcagaggagaactggtatccaatca

SEQ ID NO: 2570761 - DNA, 25 bp, Homo sapien
gccaagtgtacagcctgaagcaaat

SEQ ID NO: 2570762 - DNA, 25 bp, Homo sapien
aagcaaattgatgtgggcagagagc

SEQ ID NO: 2570763 - DNA, 25 bp, Homo sapien
gactgacactggcaatacaaaagct

SEQ ID NO: 2570764 - DNA, 25 bp, Homo sapien
cttcaggattaagtatttgtggggt

SEQ ID NO: 2570765 - DNA, 25 bp, Homo sapien
gggtgactgacactggcaatacaaa

SEQ ID NO: 2570766 - DNA, 25 bp, Homo sapien
atttgtggggtgactgacactggca

SEQ ID NO: 2570767 - DNA, 25 bp, Homo sapien
tcaatccgctcaaattcatactacc

SEQ ID NO: 2570768 - DNA, 25 bp, Homo sapien
tgtcttgtctgaatcactgttaata

SEQ ID NO: 2570769 - DNA, 25 bp, Homo sapien
ttccatttctcaatccgctcaaatt

SEQ ID NO: 2570770 - DNA, 25 bp, Homo sapien
ccttctaagatatcatgtcttgtct

SEQ ID NO: 2570771 - DNA, 25 bp, Homo sapien
tgcttcttcatgctaactcgccgct

SEQ ID NO: 2570772 - DNA, 25 bp, Homo sapien
tcatattttatcacgcagctttcct

SEQ ID NO: 2570773 - DNA, 25 bp, Homo sapien
tccaggggccatccggacaagggtc

SEQ ID NO: 2570774 - DNA, 25 bp, Homo sapien
tgcattgtaactctcagcttcacct

SEQ ID NO: 2570775 - DNA, 25 bp, Homo sapien
tcctccttggagaaaactgtgccat

SEQ ID NO: 2570776 - DNA, 25 bp, Homo sapien
cgtggcgatgcgtcctttttccact

SEQ ID NO: 2570777 - DNA, 25 bp, Homo sapien
tccatagggaattggtatctgtcat

SEQ ID NO: 2570778 - DNA, 25 bp, Homo sapien
tctggacactttcttcgtggcgatg

SEQ ID NO: 2570779 - DNA, 25 bp, Homo sapien
tcagcagatcgaaggggctttctgg

SEQ ID NO: 2570780 - DNA, 25 bp, Homo sapien
caggaaatgatgtacttgaaactca

SEQ ID NO: 2570781 - DNA, 25 bp, Homo sapien
gcagaaatttgcattgatggatgtt

SEQ ID NO: 2570782 - DNA, 25 bp, Homo sapien
aaactcgactgaacgtgccttgggc

SEQ ID NO: 2570783 - DNA, 25 bp, Homo sapien
tgctcatcagcacataccgagttga

SEQ ID NO: 2570784 - DNA, 25 bp, Homo sapien
tcacattcattaagacctaggtgag

SEQ ID NO: 2570785 - DNA, 25 bp, Homo sapien
ttcattaagacctaggtgagtgcag

SEQ ID NO: 2570786 - DNA, 25 bp, Homo sapien
cattcattaagacctaggtgagtgc

SEQ ID NO: 2570787 - DNA, 25 bp, Homo sapien
tcattaagacctaggtgagtgcaga

SEQ ID NO: 2570788 - DNA, 25 bp, Homo sapien
gatgaggacagcatgactcaaggca

SEQ ID NO: 2570789 - DNA, 25 bp, Homo sapien
tcaaggcaatccatgcaggaagatg

SEQ ID NO: 2570790 - DNA, 25 bp, Homo sapien
gacagcatgactcaaggcaatccat

SEQ ID NO: 2570791 - DNA, 25 bp, Homo sapien
catgactcaaggcaatccatgcagg

SEQ ID NO: 2570792 - DNA, 25 bp, Homo sapien
ctcccagaaggagttaaaagctgcc

SEQ ID NO: 2570793 - DNA, 25 bp, Homo sapien
ccagaaggagttaaaagctgcctgt

SEQ ID NO: 2570794 - DNA, 25 bp, Homo sapien
tcccagaaggagttaaaagctgcct

SEQ ID NO: 2570795 - DNA, 25 bp, Homo sapien
tgctcccagaaggagttaaaagctg

SEQ ID NO: 2570796 - DNA, 25 bp, Homo sapien
gctttactaactgtatcacaacagg

SEQ ID NO: 2570797 - DNA, 25 bp, Homo sapien
gagcatgtagacagctttactaact

SEQ ID NO: 2570798 - DNA, 25 bp, Homo sapien
ttcatacacatcagagcatgtagac

SEQ ID NO: 2570799 - DNA, 25 bp, Homo sapien
tgtatcacaacaggtaagcatgaac

SEQ ID NO: 2570800 - DNA, 25 bp, Homo sapien
ctgccacagcctgccatttaaaact

SEQ ID NO: 2570801 - DNA, 25 bp, Homo sapien
agctgcctccaacaatgttgcccat

SEQ ID NO: 2570802 - DNA, 25 bp, Homo sapien
ccacagcctgccatttaaaactact

SEQ ID NO: 2570803 - DNA, 25 bp, Homo sapien
gggattgggttacaaacaggtctgc

SEQ ID NO: 2570804 - DNA, 25 bp, Homo sapien
gcattggtgctattgtcctgtgttg

SEQ ID NO: 2570805 - DNA, 25 bp, Homo sapien
tcttgcccaagtaattcatgcctaa

SEQ ID NO: 2570806 - DNA, 25 bp, Homo sapien
gagagtctcaattcaggcattttgt

SEQ ID NO: 2570807 - DNA, 25 bp, Homo sapien
tgtgttcttctctcgcattggtgct

SEQ ID NO: 2570808 - DNA, 25 bp, Homo sapien
gctcagagctggtaattgaggataa

SEQ ID NO: 2570809 - DNA, 25 bp, Homo sapien
caagtttgtcagaaacttgctcaga

SEQ ID NO: 2570810 - DNA, 25 bp, Homo sapien
accctttcctctcactatgaggatg

SEQ ID NO: 2570811 - DNA, 25 bp, Homo sapien
gatgcattcggtgtaaaattggttc

SEQ ID NO: 2570812 - DNA, 25 bp, Homo sapien
caaaccgtgggagatgtactttatc

SEQ ID NO: 2570813 - DNA, 25 bp, Homo sapien
ggcattgaacattattccccgtgat

SEQ ID NO: 2570814 - DNA, 25 bp, Homo sapien
tctcagtgtgagtagtccatttgcc

SEQ ID NO: 2570815 - DNA, 25 bp, Homo sapien
taagggactgtgtacagcccagggc

SEQ ID NO: 2570816 - DNA, 25 bp, Homo sapien
gaaggttggatttgcaagtggtatt

SEQ ID NO: 2570817 - DNA, 25 bp, Homo sapien
taaaggagatttggttccactctcc

SEQ ID NO: 2570818 - DNA, 25 bp, Homo sapien
caagtggtattgacctcgttgccaa

SEQ ID NO: 2570819 - DNA, 25 bp, Homo sapien
tccatccctaaatgtgacggcaggg

SEQ ID NO: 2570820 - DNA, 25 bp, Homo sapien
gagggcattaactgctcttaggaag

SEQ ID NO: 2570821 - DNA, 25 bp, Homo sapien
tctatcaatcaatccctagagggca

SEQ ID NO: 2570822 - DNA, 25 bp, Homo sapien
tattgcagaagatgacacaaccgac

SEQ ID NO: 2570823 - DNA, 25 bp, Homo sapien
taaacctcgatgtgaagaaggctgt

SEQ ID NO: 2570824 - DNA, 25 bp, Homo sapien
tggctccacagaaaagatgccgaag

SEQ ID NO: 2570825 - DNA, 25 bp, Homo sapien
gatgccgaagaagacagctaaaacg

SEQ ID NO: 2570826 - DNA, 25 bp, Homo sapien
tctctctcagtacacaatttgacag

SEQ ID NO: 2570827 - DNA, 25 bp, Homo sapien
gggcaatgctctagcgactactgaa

SEQ ID NO: 2570828 - DNA, 25 bp, Homo sapien
ttagggtggctctatacgtgtgtgt

SEQ ID NO: 2570829 - DNA, 25 bp, Homo sapien
ggtggctctatacgtgtgtgtttgt

SEQ ID NO: 2570830 - DNA, 25 bp, Homo sapien
ggctctatacgtgtgtgtttgttca

SEQ ID NO: 2570831 - DNA, 25 bp, Homo sapien
agggtggctctatacgtgtgtgttt

SEQ ID NO: 2570832 - DNA, 25 bp, Homo sapien
tccatgcactttaccccatccatgt

SEQ ID NO: 2570833 - DNA, 25 bp, Homo sapien
catgcactttaccccatccatgtct

SEQ ID NO: 2570834 - DNA, 25 bp, Homo sapien
atgcactttaccccatccatgtctt

SEQ ID NO: 2570835 - DNA, 25 bp, Homo sapien
ccatgcactttaccccatccatgtc

SEQ ID NO: 2570836 - DNA, 25 bp, Homo sapien
cctgggctctggaaatggtctgata

SEQ ID NO: 2570837 - DNA, 25 bp, Homo sapien
agagctgaaaagtgacctgggctct

SEQ ID NO: 2570838 - DNA, 25 bp, Homo sapien
gataaattgaaagctaccaaaggaa

SEQ ID NO: 2570839 - DNA, 25 bp, Homo sapien
ctggaaatggtctgataaattgaaa

SEQ ID NO: 2570840 - DNA, 25 bp, Homo sapien
gtgccaataacagccgccaaaggag

SEQ ID NO: 2570841 - DNA, 25 bp, Homo sapien
gagtagaagtaatcaccaacctggg

SEQ ID NO: 2570842 - DNA, 25 bp, Homo sapien
ctcttagaagtgtcagtcggtgcca

SEQ ID NO: 2570843 - DNA, 25 bp, Homo sapien
taggtcatgtccacgaggttctgcg

SEQ ID NO: 2570844 - DNA, 25 bp, Homo sapien
gggccataatatagcctgctggaga

SEQ ID NO: 2570845 - DNA, 25 bp, Homo sapien
tgtttcagatggtggcgacagaccc

SEQ ID NO: 2570846 - DNA, 25 bp, Homo sapien
tgctggagaaccaaaaaatctgctg

SEQ ID NO: 2570847 - DNA, 25 bp, Homo sapien
gaattgtcaagcacatggaccactg

SEQ ID NO: 2570848 - DNA, 25 bp, Homo sapien
caagctgtagtaacaatagctccag

SEQ ID NO: 2570849 - DNA, 25 bp, Homo sapien
caggcaccagcgagaaaggccaggt

SEQ ID NO: 2570850 - DNA, 25 bp, Homo sapien
gaaaagcgtatagctccaggcacca

SEQ ID NO: 2570851 - DNA, 25 bp, Homo sapien
ttccgccccacactggaaaagcgta

SEQ ID NO: 2570852 - DNA, 25 bp, Homo sapien
tatctgcagtaagcgtctaattatg

SEQ ID NO: 2570853 - DNA, 25 bp, Homo sapien
gcacccagtcgaataatcatgattt

SEQ ID NO: 2570854 - DNA, 25 bp, Homo sapien
aaactatctgcagtaagcgtctaat

SEQ ID NO: 2570855 - DNA, 25 bp, Homo sapien
cactgcacccagtcgaataatcatg

SEQ ID NO: 2570856 - DNA, 25 bp, Homo sapien
tgaatggtctgtgacacacgcacgc

SEQ ID NO: 2570857 - DNA, 25 bp, Homo sapien
gacacacgcacactttcagctggag

SEQ ID NO: 2570858 - DNA, 25 bp, Homo sapien
gaacggtctgtgacacacgcatgct

SEQ ID NO: 2570859 - DNA, 25 bp, Homo sapien
gaatggtctgtgacacacgcacgct

SEQ ID NO: 2570860 - DNA, 25 bp, Homo sapien
catgctttcaggtggagtttgctct

SEQ ID NO: 2570861 - DNA, 25 bp, Homo sapien
acacgcatgctttcaggtggagttt

SEQ ID NO: 2570862 - DNA, 25 bp, Homo sapien
cgcatgctttcaggtggagtttgct

SEQ ID NO: 2570863 - DNA, 25 bp, Homo sapien
ctttcaggtggagtttgctctctct

SEQ ID NO: 2570864 - DNA, 25 bp, Homo sapien
ggaaagacacggctttgcagcagca

SEQ ID NO: 2570865 - DNA, 25 bp, Homo sapien
caggtggcctgctcttatgataaac

SEQ ID NO: 2570866 - DNA, 25 bp, Homo sapien
gaaggtgctgttatcacccacgtga

SEQ ID NO: 2570867 - DNA, 25 bp, Homo sapien
tgcacagcggtgaatccccacaata

SEQ ID NO: 2570868 - DNA, 25 bp, Homo sapien
ggtggactaacttggctaaatgaag

SEQ ID NO: 2570869 - DNA, 25 bp, Homo sapien
agtacaccacaaagtgggccgggcg

SEQ ID NO: 2570870 - DNA, 25 bp, Homo sapien
aagggtcaggtggactaacttggct

SEQ ID NO: 2570871 - DNA, 25 bp, Homo sapien
gaattctgtttcaccaaagtacacc

SEQ ID NO: 2570872 - DNA, 25 bp, Homo sapien
ggggccaggcgtggtggggccatgc

SEQ ID NO: 2570873 - DNA, 25 bp, Homo sapien
ggccaggcgtggtggggccatgctc

SEQ ID NO: 2570874 - DNA, 25 bp, Homo sapien
ccaggcgtggtggggccatgctcac

SEQ ID NO: 2570875 - DNA, 25 bp, Homo sapien
agccttccacccggggccaggcgtg

SEQ ID NO: 2570876 - DNA, 25 bp, Homo sapien
gacgtgatcgggaagccctccttct

SEQ ID NO: 2570877 - DNA, 25 bp, Homo sapien
ggccacgccgactccacatcgactt

SEQ ID NO: 2570878 - DNA, 25 bp, Homo sapien
gacttccccaacagagccggcctca

SEQ ID NO: 2570879 - DNA, 25 bp, Homo sapien
gactccacatcgacttccccaacag

SEQ ID NO: 2570880 - DNA, 25 bp, Homo sapien
gatcccagcggccacgccgactcca

SEQ ID NO: 2570881 - DNA, 25 bp, Homo sapien
cccaacagagttcccggctcacaca

SEQ ID NO: 2570882 - DNA, 25 bp, Homo sapien
cccagtggccgactcccaacagagt

SEQ ID NO: 2570883 - DNA, 25 bp, Homo sapien
tcccaacagagttcccggctcacac

SEQ ID NO: 2570884 - DNA, 25 bp, Homo sapien
ctcccaacagagttcccggctcaca

SEQ ID NO: 2570885 - DNA, 25 bp, Homo sapien
ctgcttgggtgggacgctgggaacg

SEQ ID NO: 2570886 - DNA, 25 bp, Homo sapien
tgggacgctgggaacgcaaacctgc

SEQ ID NO: 2570887 - DNA, 25 bp, Homo sapien
tgggaacgcaaacctgcacaccagc

SEQ ID NO: 2570888 - DNA, 25 bp, Homo sapien
cagaccactccacgcgctgggcctc

SEQ ID NO: 2570889 - DNA, 25 bp, Homo sapien
tctgtagaccactccataggtgccc

SEQ ID NO: 2570890 - DNA, 25 bp, Homo sapien
ggtgccctcctcgatcctgttcagg

SEQ ID NO: 2570891 - DNA, 25 bp, Homo sapien
tcaggcactggaactcctcgacgct

SEQ ID NO: 2570892 - DNA, 25 bp, Homo sapien
cataggtgccctcctcgatcctgtt

SEQ ID NO: 2570893 - DNA, 25 bp, Homo sapien
ggcctgtggcccgacgcctacgctc

SEQ ID NO: 2570894 - DNA, 25 bp, Homo sapien
ggcccgacgcctacgctcagcagca

SEQ ID NO: 2570895 - DNA, 25 bp, Homo sapien
gtggcccgacgcctacgctcagcag

SEQ ID NO: 2570896 - DNA, 25 bp, Homo sapien
cctgtggcccgacgcctacgctcag

SEQ ID NO: 2570897 - DNA, 25 bp, Homo sapien
agcagtgacagcagcgcggccgcac

SEQ ID NO: 2570898 - DNA, 25 bp, Homo sapien
tttcaagccgcagagcagtcctgcg

SEQ ID NO: 2570899 - DNA, 25 bp, Homo sapien
ctccagtgcggaggaggacgcaact

SEQ ID NO: 2570900 - DNA, 25 bp, Homo sapien
cagttccgtccagcatgagaaagag

SEQ ID NO: 2570901 - DNA, 25 bp, Homo sapien
ccctgtggtaactccgactgccaat

SEQ ID NO: 2570902 - DNA, 25 bp, Homo sapien
tgtgaggcgacagacgccaacacgg

SEQ ID NO: 2570903 - DNA, 25 bp, Homo sapien
caacacgggggccaggcttcgctca

SEQ ID NO: 2570904 - DNA, 25 bp, Homo sapien
gtaactccgactgccaatgcggaca

SEQ ID NO: 2570905 - DNA, 25 bp, Homo sapien
cagctcctgcttgagctcgatgggc

SEQ ID NO: 2570906 - DNA, 25 bp, Homo sapien
ctcctgcttgagctcgatgggcgac

SEQ ID NO: 2570907 - DNA, 25 bp, Homo sapien
tgggcagctcctgcttgagctcgat

SEQ ID NO: 2570908 - DNA, 25 bp, Homo sapien
tgcagggccggcaggtacttgggca

SEQ ID NO: 2570909 - DNA, 25 bp, Homo sapien
ctctgcggcgttccctcacccactt

SEQ ID NO: 2570910 - DNA, 25 bp, Homo sapien
gggagtcgggcacatagtcgccctc

SEQ ID NO: 2570911 - DNA, 25 bp, Homo sapien
ccggaatctcggtcgaaccgtgact

SEQ ID NO: 2570912 - DNA, 25 bp, Homo sapien
tcactctccccggaatctcggtcga

SEQ ID NO: 2570913 - DNA, 25 bp, Homo sapien
atcttcactcatttcttcctcactt

SEQ ID NO: 2570914 - DNA, 25 bp, Homo sapien
tcactcatttcttcctcacttactt

SEQ ID NO: 2570915 - DNA, 25 bp, Homo sapien
ccaagaggtggttttcattttctcg

SEQ ID NO: 2570916 - DNA, 25 bp, Homo sapien
tcgttcttcatcttcactcatttct

SEQ ID NO: 2570917 - DNA, 25 bp, Homo sapien
tcctcagagttgctgccggtctcct

SEQ ID NO: 2570918 - DNA, 25 bp, Homo sapien
tgattcttcactggtgctcccttcc

SEQ ID NO: 2570919 - DNA, 25 bp, Homo sapien
tcctcagaacctgagcctgattccg

SEQ ID NO: 2570920 - DNA, 25 bp, Homo sapien
cagactgctctgatgcctcctcaga

SEQ ID NO: 2570921 - DNA, 25 bp, Homo sapien
aaggccttggccaggcggttccagg

SEQ ID NO: 2570922 - DNA, 25 bp, Homo sapien
ggccttggccaggcggttccaggta

SEQ ID NO: 2570923 - DNA, 25 bp, Homo sapien
gccttggccaggcggttccaggtac

SEQ ID NO: 2570924 - DNA, 25 bp, Homo sapien
aggccttggccaggcggttccaggt

SEQ ID NO: 2570925 - DNA, 25 bp, Homo sapien
tgtcgctgatgtcctgtaagtcgga

SEQ ID NO: 2570926 - DNA, 25 bp, Homo sapien
tgtaagtcggacagcaggtcccttt

SEQ ID NO: 2570927 - DNA, 25 bp, Homo sapien
gctgtcgctgatgtcctgtaagtcg

SEQ ID NO: 2570928 - DNA, 25 bp, Homo sapien
ctgacgaggactcggccgagctggt

SEQ ID NO: 2570929 - DNA, 25 bp, Homo sapien
tctgaagcggttacttagctgggct

SEQ ID NO: 2570930 - DNA, 25 bp, Homo sapien
taactttgcttggtcggaaaccagc

SEQ ID NO: 2570931 - DNA, 25 bp, Homo sapien
tctcacgacacgagaggacttcagc

SEQ ID NO: 2570932 - DNA, 25 bp, Homo sapien
cagtggcgaatgtcccagcggataa

SEQ ID NO: 2570933 - DNA, 25 bp, Homo sapien
cgggctgcgactccagtggctggct

SEQ ID NO: 2570934 - DNA, 25 bp, Homo sapien
actttgtcgctgtagtcctctctca

SEQ ID NO: 2570935 - DNA, 25 bp, Homo sapien
tggctggctttcactttgtcgctgt

SEQ ID NO: 2570936 - DNA, 25 bp, Homo sapien
tggcttccggccgtctcccaactcg

SEQ ID NO: 2570937 - DNA, 25 bp, Homo sapien
acccacagcgtgcacagggtgctga

SEQ ID NO: 2570938 - DNA, 25 bp, Homo sapien
cccacagcgtgcacagggtgctgac

SEQ ID NO: 2570939 - DNA, 25 bp, Homo sapien
cttgtgctgatataaacagcaagga

SEQ ID NO: 2570940 - DNA, 25 bp, Homo sapien
gaaagccgggccttgtgctgatata

SEQ ID NO: 2570941 - DNA, 25 bp, Homo sapien
cagcaaggaacgagggttttcacac

SEQ ID NO: 2570942 - DNA, 25 bp, Homo sapien
cagcatcgtcataaggaagttgggt

SEQ ID NO: 2570943 - DNA, 25 bp, Homo sapien
ctgaagaagaaccacagcgtgaggt

SEQ ID NO: 2570944 - DNA, 25 bp, Homo sapien
tacttgttgaggaagagcgtgcaga

SEQ ID NO: 2570945 - DNA, 25 bp, Homo sapien
caagtctgactcgatgaccgtggtc

SEQ ID NO: 2570946 - DNA, 25 bp, Homo sapien
acttcggtgaccaaacagagagccc

SEQ ID NO: 2570947 - DNA, 25 bp, Homo sapien
ggcagcatgggtcaccgtgaccgcc

SEQ ID NO: 2570948 - DNA, 25 bp, Homo sapien
aagccacagccacgaacgattttac

SEQ ID NO: 2570949 - DNA, 25 bp, Homo sapien
gaacgattttacctccaggctgggc

SEQ ID NO: 2570950 - DNA, 25 bp, Homo sapien
actccgggcgccaggaacgaggcca

SEQ ID NO: 2570951 - DNA, 25 bp, Homo sapien
gaaggtgctgttatcacccacgtga

SEQ ID NO: 2570952 - DNA, 25 bp, Homo sapien
ggaaagacacggctttgcagcagca

SEQ ID NO: 2570953 - DNA, 25 bp, Homo sapien
caggtggcctgctcttatgataaac

SEQ ID NO: 2570954 - DNA, 25 bp, Homo sapien
tgcacagcggtgaatccccacaata

SEQ ID NO: 2570955 - DNA, 25 bp, Homo sapien
ggtggactaacttggctaaatgaag

SEQ ID NO: 2570956 - DNA, 25 bp, Homo sapien
aagggtcaggtggactaacttggct

SEQ ID NO: 2570957 - DNA, 25 bp, Homo sapien
gaattctgtttcaccaaagtacacc

SEQ ID NO: 2570958 - DNA, 25 bp, Homo sapien
agtacaccacaaagtgggccgggcg

SEQ ID NO: 2570959 - DNA, 25 bp, Homo sapien
tctggcttaaggtccctcctgaagc

SEQ ID NO: 2570960 - DNA, 25 bp, Homo sapien
tgagctcactcaggtggacgctggc

SEQ ID NO: 2570961 - DNA, 25 bp, Homo sapien
gctgtgacctcatccgaaggctcaa

SEQ ID NO: 2570962 - DNA, 25 bp, Homo sapien
gggaagcttagccaggcacctctgg

SEQ ID NO: 2570963 - DNA, 25 bp, Homo sapien
agtctccgccgcaggcatagcgcta

SEQ ID NO: 2570964 - DNA, 25 bp, Homo sapien
ggaaatgacgcgcagaaccctgcat

SEQ ID NO: 2570965 - DNA, 25 bp, Homo sapien
cgctggcggatccaggtgggcttca

SEQ ID NO: 2570966 - DNA, 25 bp, Homo sapien
cttcacaacaaagggacgctggcgg

SEQ ID NO: 2570967 - DNA, 25 bp, Homo sapien
gagggacacggcgcgccgagtgctc

SEQ ID NO: 2570968 - DNA, 25 bp, Homo sapien
gacacggcgcgccgagtgctccggg

SEQ ID NO: 2570969 - DNA, 25 bp, Homo sapien
acggcgcgccgagtgctccgggcgg

SEQ ID NO: 2570970 - DNA, 25 bp, Homo sapien
gggagggacacggcgcgccgagtgc

SEQ ID NO: 2570971 - DNA, 25 bp, Homo sapien
gtgcgcgtagtgcatccccgtggcc

SEQ ID NO: 2570972 - DNA, 25 bp, Homo sapien
gcagagggagaggacgacggtgcgc

SEQ ID NO: 2570973 - DNA, 25 bp, Homo sapien
acgacggtgcgcgtagtgcatcccc

SEQ ID NO: 2570974 - DNA, 25 bp, Homo sapien
gtgcatccccgtggcccgttggttc

SEQ ID NO: 2570975 - DNA, 25 bp, Homo sapien
accagcggcacttcagggcgggatc

SEQ ID NO: 2570976 - DNA, 25 bp, Homo sapien
ccgggctgttccaccagcggcactt

SEQ ID NO: 2570977 - DNA, 25 bp, Homo sapien
tgttccaccagcggcacttcagggc

SEQ ID NO: 2570978 - DNA, 25 bp, Homo sapien
cgcccgggctgttccaccagcggca

SEQ ID NO: 2570979 - DNA, 25 bp, Homo sapien
tcaggaatgaagttacggctaaagg

SEQ ID NO: 2570980 - DNA, 25 bp, Homo sapien
cttaacttagaagacacaaaggcgc

SEQ ID NO: 2570981 - DNA, 25 bp, Homo sapien
gagcttcgtcgagcgttttcctagc

SEQ ID NO: 2570982 - DNA, 25 bp, Homo sapien
ggccttcgtatccaggctggcgtcg

SEQ ID NO: 2570983 - DNA, 25 bp, Homo sapien
ggagacccagcctgcaggccactcg

SEQ ID NO: 2570984 - DNA, 25 bp, Homo sapien
cccagcctgcaggccactcggccac

SEQ ID NO: 2570985 - DNA, 25 bp, Homo sapien
agacccagcctgcaggccactcggc

SEQ ID NO: 2570986 - DNA, 25 bp, Homo sapien
acccagcctgcaggccactcggcca

SEQ ID NO: 2570987 - DNA, 25 bp, Homo sapien
gagcagcagccgctcatgcccctgc

SEQ ID NO: 2570988 - DNA, 25 bp, Homo sapien
agcagcagccgctcatgcccctgca

SEQ ID NO: 2570989 - DNA, 25 bp, Homo sapien
cggggagttctccaggccaaggtca

SEQ ID NO: 2570990 - DNA, 25 bp, Homo sapien
ggccaaggtcactcacgggcaagtt

SEQ ID NO: 2570991 - DNA, 25 bp, Homo sapien
gggagttctccaggccaaggtcact

SEQ ID NO: 2570992 - DNA, 25 bp, Homo sapien
gtcactcacgggcaagttcccgcag

SEQ ID NO: 2570993 - DNA, 25 bp, Homo sapien
ttcctctttcagctgtgcgccctgg

SEQ ID NO: 2570994 - DNA, 25 bp, Homo sapien
ttcagctgtgcgccctggttgtgga

SEQ ID NO: 2570995 - DNA, 25 bp, Homo sapien
cttggctccttggtgttgccagacc

SEQ ID NO: 2570996 - DNA, 25 bp, Homo sapien
ccctggttgtggaggctcctaagga

SEQ ID NO: 2570997 - DNA, 25 bp, Homo sapien
cacagggtggtcgttttggtctctc

SEQ ID NO: 2570998 - DNA, 25 bp, Homo sapien
tcgaaaaggtttccatgccccagag

SEQ ID NO: 2570999 - DNA, 25 bp, Homo sapien
tctctcctggacttgcacgcgtgta

SEQ ID NO: 2571000 - DNA, 25 bp, Homo sapien
gatgccgccgtttcaggctcgaaaa

SEQ ID NO: 2571001 - DNA, 25 bp, Homo sapien
acaccttctgtgttcgatgatccct

SEQ ID NO: 2571002 - DNA, 25 bp, Homo sapien
ccctggattctgaaactgccgtctt

SEQ ID NO: 2571003 - DNA, 25 bp, Homo sapien
cgatgatccctggattctgaaactg

SEQ ID NO: 2571004 - DNA, 25 bp, Homo sapien
tctgtgttcgatgatccctggattc

SEQ ID NO: 2571005 - DNA, 25 bp, Homo sapien
tgccctggcaagtcacggagaaaac

SEQ ID NO: 2571006 - DNA, 25 bp, Homo sapien
taaaaacctgtcgagtctgctggca

SEQ ID NO: 2571007 - DNA, 25 bp, Homo sapien
cgaagattaaacaatccacccggct

SEQ ID NO: 2571008 - DNA, 25 bp, Homo sapien
agttcctttccaaatcacggcccag

SEQ ID NO: 2571009 - DNA, 25 bp, Homo sapien
tgtggtcccggctgagttctcccca

SEQ ID NO: 2571010 - DNA, 25 bp, Homo sapien
aagacgaggagttccgagtctcatc

SEQ ID NO: 2571011 - DNA, 25 bp, Homo sapien
agccgcagtagccacgcctgtggtc

SEQ ID NO: 2571012 - DNA, 25 bp, Homo sapien
gttccgagtctcatcgcagctccag

SEQ ID NO: 2571013 - DNA, 25 bp, Homo sapien
tggttcgtggtggtaaggtggaagc

SEQ ID NO: 2571014 - DNA, 25 bp, Homo sapien
ctggttcgtggtggtaaggtggaag

SEQ ID NO: 2571015 - DNA, 25 bp, Homo sapien
ggacgagtcggctaccgtgagaacc

SEQ ID NO: 2571016 - DNA, 25 bp, Homo sapien
ggctaccgtgagaaccctgcccaag

SEQ ID NO: 2571017 - DNA, 25 bp, Homo sapien
acgagtcggctaccgtgagaaccct

SEQ ID NO: 2571018 - DNA, 25 bp, Homo sapien
agtcggctaccgtgagaaccctgcc

SEQ ID NO: 2571019 - DNA, 25 bp, Homo sapien
ttgaggccgtcctcagcgctgatcc

SEQ ID NO: 2571020 - DNA, 25 bp, Homo sapien
gcggaaatactcatgcttgaggccg

SEQ ID NO: 2571021 - DNA, 25 bp, Homo sapien
ttcacacgctgctgctcgctcttgg

SEQ ID NO: 2571022 - DNA, 25 bp, Homo sapien
gggtctcgcggaaatactcatgctt

SEQ ID NO: 2571023 - DNA, 25 bp, Homo sapien
caaagatgggctgtgttgggacggg

SEQ ID NO: 2571024 - DNA, 25 bp, Homo sapien
ggaagtcaccgctatggctcgggac

SEQ ID NO: 2571025 - DNA, 25 bp, Homo sapien
tcagggcatgggacgccaggcacca

SEQ ID NO: 2571026 - DNA, 25 bp, Homo sapien
agttctggaacgtggtgagccagca

SEQ ID NO: 2571027 - DNA, 25 bp, Homo sapien
tgtagccgggccagattttctcact

SEQ ID NO: 2571028 - DNA, 25 bp, Homo sapien
tcatgaggtcgaagccctggtctga

SEQ ID NO: 2571029 - DNA, 25 bp, Homo sapien
gagctcactgtagccgggccagatt

SEQ ID NO: 2571030 - DNA, 25 bp, Homo sapien
gttgttgtaggggtgctcgctgaag

SEQ ID NO: 2571031 - DNA, 25 bp, Homo sapien
gtcccgtcagagaagacaagccacc

SEQ ID NO: 2571032 - DNA, 25 bp, Homo sapien
cacaccaagtggcccacagtgttgg

SEQ ID NO: 2571033 - DNA, 25 bp, Homo sapien
gtgttggcacctgtgtcccgtcaga

SEQ ID NO: 2571034 - DNA, 25 bp, Homo sapien
ccaccaggagggctctcagtggccc

SEQ ID NO: 2571035 - DNA, 25 bp, Homo sapien
gctccccgaagatgcagcccactga

SEQ ID NO: 2571036 - DNA, 25 bp, Homo sapien
cagcagctccccgaagatgcagccc

SEQ ID NO: 2571037 - DNA, 25 bp, Homo sapien
cacatgtccacggccgtggagtatt

SEQ ID NO: 2571038 - DNA, 25 bp, Homo sapien
tctgatcgatttccgaattcccggg

SEQ ID NO: 2571039 - DNA, 25 bp, Homo sapien
gttcaggaaggccagtgcccgcgaa

SEQ ID NO: 2571040 - DNA, 25 bp, Homo sapien
gtgttcaggaaggccagtgcccgcg

SEQ ID NO: 2571041 - DNA, 25 bp, Homo sapien
caggaaggccagtgcccgcgaagct

SEQ ID NO: 2571042 - DNA, 25 bp, Homo sapien
ttcaggaaggccagtgcccgcgaag

SEQ ID NO: 2571043 - DNA, 25 bp, Homo sapien
cacgaccggggtgtaggccttcaga

SEQ ID NO: 2571044 - DNA, 25 bp, Homo sapien
gggcgcggtaccactgggtcaccac

SEQ ID NO: 2571045 - DNA, 25 bp, Homo sapien
ttcagaggggatccgtactcccgcg

SEQ ID NO: 2571046 - DNA, 25 bp, Homo sapien
cactgggtcaccacgaccggggtgt

SEQ ID NO: 2571047 - DNA, 25 bp, Homo sapien
atgggccactcggaggggggctcac

SEQ ID NO: 2571048 - DNA, 25 bp, Homo sapien
ggatgggccactcggaggggggctc

SEQ ID NO: 2571049 - DNA, 25 bp, Homo sapien
gatgggccactcggaggggggctca

SEQ ID NO: 2571050 - DNA, 25 bp, Homo sapien
tcagcagcaggttggacgtcttgag

SEQ ID NO: 2571051 - DNA, 25 bp, Homo sapien
ccagttgtcgtgcaggtgtttcacc

SEQ ID NO: 2571052 - DNA, 25 bp, Homo sapien
aggtcacggtgcaggatccagttgt

SEQ ID NO: 2571053 - DNA, 25 bp, Homo sapien
gatccagttgtcgtgcaggtgtttc

SEQ ID NO: 2571054 - DNA, 25 bp, Homo sapien
tcaccgcgggggtgaccaggacact

SEQ ID NO: 2571055 - DNA, 25 bp, Homo sapien
gtggatgcagctggccctccctgca

SEQ ID NO: 2571056 - DNA, 25 bp, Homo sapien
tgcccccacttgtacgcagacagga

SEQ ID NO: 2571057 - DNA, 25 bp, Homo sapien
gagggaggctcccatgtggacccgg

SEQ ID NO: 2571058 - DNA, 25 bp, Homo sapien
gatcttgtccatgttgctgcccacc

SEQ ID NO: 2571059 - DNA, 25 bp, Homo sapien
tagttcatcacgatgtagatcttgt

SEQ ID NO: 2571060 - DNA, 25 bp, Homo sapien
tcaggctcttgaggtcgtgctccac

SEQ ID NO: 2571061 - DNA, 25 bp, Homo sapien
ccatcaggctcttgaggtcgtgctc

SEQ ID NO: 2571062 - DNA, 25 bp, Homo sapien
gcaaatacttgcttctgtgtggtct

SEQ ID NO: 2571063 - DNA, 25 bp, Homo sapien
tctgtgaagggctccactaagtgca

SEQ ID NO: 2571064 - DNA, 25 bp, Homo sapien
tgctgagggacagtaaggacctccg

SEQ ID NO: 2571065 - DNA, 25 bp, Homo sapien
tgcaggagagtgtaggaagcacccg

SEQ ID NO: 2571066 - DNA, 25 bp, Homo sapien
tggtgttgatctccctcagggacgt

SEQ ID NO: 2571067 - DNA, 25 bp, Homo sapien
ggtgttgatctccctcagggacgtg

SEQ ID NO: 2571068 - DNA, 25 bp, Homo sapien
gtgttgatctccctcagggacgtga

SEQ ID NO: 2571069 - DNA, 25 bp, Homo sapien
atggtgttgatctccctcagggacg

SEQ ID NO: 2571070 - DNA, 25 bp, Homo sapien
ctcgttcagtgaggaccgcaggcag

SEQ ID NO: 2571071 - DNA, 25 bp, Homo sapien
caaagtcacggtaccaacagtggac

SEQ ID NO: 2571072 - DNA, 25 bp, Homo sapien
aaatacagacggcactgagaggcat

SEQ ID NO: 2571073 - DNA, 25 bp, Homo sapien
caaagcgccagcatttcacggaggg

SEQ ID NO: 2571074 - DNA, 25 bp, Homo sapien
ggccacgccgactccacatcgactt

SEQ ID NO: 2571075 - DNA, 25 bp, Homo sapien
gactccacatcgacttccccaacag

SEQ ID NO: 2571076 - DNA, 25 bp, Homo sapien
gatcccagcggccacgccgactcca

SEQ ID NO: 2571077 - DNA, 25 bp, Homo sapien
gacttccccaacagagccggcctca

SEQ ID NO: 2571078 - DNA, 25 bp, Homo sapien
ctcccaacagagttcccggctcaca

SEQ ID NO: 2571079 - DNA, 25 bp, Homo sapien
cccagtggccgactcccaacagagt

SEQ ID NO: 2571080 - DNA, 25 bp, Homo sapien
tcccaacagagttcccggctcacac

SEQ ID NO: 2571081 - DNA, 25 bp, Homo sapien
cccaacagagttcccggctcacaca

SEQ ID NO: 2571082 - DNA, 25 bp, Homo sapien
cagaccactccacgcgctgggcctc

SEQ ID NO: 2571083 - DNA, 25 bp, Homo sapien
tgggacgctgggaacgcaaacctgc

SEQ ID NO: 2571084 - DNA, 25 bp, Homo sapien
tgggaacgcaaacctgcacaccagc

SEQ ID NO: 2571085 - DNA, 25 bp, Homo sapien
ctgcttgggtgggacgctgggaacg

SEQ ID NO: 2571086 - DNA, 25 bp, Homo sapien
ggtgccctcctcgatcctgttcagg

SEQ ID NO: 2571087 - DNA, 25 bp, Homo sapien
cataggtgccctcctcgatcctgtt

SEQ ID NO: 2571088 - DNA, 25 bp, Homo sapien
tcaggcactggaactcctcgacgct

SEQ ID NO: 2571089 - DNA, 25 bp, Homo sapien
tctgtagaccactccataggtgccc

SEQ ID NO: 2571090 - DNA, 25 bp, Homo sapien
gccggtgcccaggccggatgtcacg

SEQ ID NO: 2571091 - DNA, 25 bp, Homo sapien
cggtgcccaggccggatgtcacgta

SEQ ID NO: 2571092 - DNA, 25 bp, Homo sapien
tgcccaggccggatgtcacgtactc

SEQ ID NO: 2571093 - DNA, 25 bp, Homo sapien
gtgcccaggccggatgtcacgtact

SEQ ID NO: 2571094 - DNA, 25 bp, Homo sapien
agcagtgacagcagcgcggccgcac

SEQ ID NO: 2571095 - DNA, 25 bp, Homo sapien
ctccagtgcggaggaggacgcaact

SEQ ID NO: 2571096 - DNA, 25 bp, Homo sapien
cagttccgtccagcatgagaaagag

SEQ ID NO: 2571097 - DNA, 25 bp, Homo sapien
tttcaagccgcagagcagtcctgcg

SEQ ID NO: 2571098 - DNA, 25 bp, Homo sapien
gtaactccgactgccaatgcggaca

SEQ ID NO: 2571099 - DNA, 25 bp, Homo sapien
tgtgaggcgacagacgccaacacgg

SEQ ID NO: 2571100 - DNA, 25 bp, Homo sapien
ccctgtggtaactccgactgccaat

SEQ ID NO: 2571101 - DNA, 25 bp, Homo sapien
caacacgggggccaggcttcgctca

SEQ ID NO: 2571102 - DNA, 25 bp, Homo sapien
ctcctgcttgagctcgatgggcaac

SEQ ID NO: 2571103 - DNA, 25 bp, Homo sapien
gggagtcgggcacatagtcgccctc

SEQ ID NO: 2571104 - DNA, 25 bp, Homo sapien
gagtcgggcacatagtcgccctctg

SEQ ID NO: 2571105 - DNA, 25 bp, Homo sapien
agtcgggcacatagtcgccctctgt

SEQ ID NO: 2571106 - DNA, 25 bp, Homo sapien
cgggcacatagtcgccctctgtcag

SEQ ID NO: 2571107 - DNA, 25 bp, Homo sapien
cactctccccggaatctcggtcgaa

SEQ ID NO: 2571108 - DNA, 25 bp, Homo sapien
tcttcactctccccggaatctcggt

SEQ ID NO: 2571109 - DNA, 25 bp, Homo sapien
ttcactctccccggaatctcggtcg

SEQ ID NO: 2571110 - DNA, 25 bp, Homo sapien
ccggaatctcggtcgaaccgtgact

SEQ ID NO: 2571111 - DNA, 25 bp, Homo sapien
tggttttcattttctcgttcttcat

SEQ ID NO: 2571112 - DNA, 25 bp, Homo sapien
gtggttttcattttctcgttcttca

SEQ ID NO: 2571113 - DNA, 25 bp, Homo sapien
caagaggtggttttcattttctcgt

SEQ ID NO: 2571114 - DNA, 25 bp, Homo sapien
ccaagaggtggttttcattttctcg

SEQ ID NO: 2571115 - DNA, 25 bp, Homo sapien
cttcactcatttcttcctcacttac

SEQ ID NO: 2571116 - DNA, 25 bp, Homo sapien
actcatttcttcctcacttacttct

SEQ ID NO: 2571117 - DNA, 25 bp, Homo sapien
tcactcatttcttcctcacttactt

SEQ ID NO: 2571118 - DNA, 25 bp, Homo sapien
ctcatttcttcctcacttacttctt

SEQ ID NO: 2571119 - DNA, 25 bp, Homo sapien
tcctcagagttgctgccggtctcct

SEQ ID NO: 2571120 - DNA, 25 bp, Homo sapien
ggcagactgctctgatgcctcctca

SEQ ID NO: 2571121 - DNA, 25 bp, Homo sapien
agactgctctgatgcctcctcagag

SEQ ID NO: 2571122 - DNA, 25 bp, Homo sapien
tgatgcctcctcagagttgctgccg

SEQ ID NO: 2571123 - DNA, 25 bp, Homo sapien
ctcttctcctcctcctctgattctt

SEQ ID NO: 2571124 - DNA, 25 bp, Homo sapien
cttctcctcctcctctgattcttca

SEQ ID NO: 2571125 - DNA, 25 bp, Homo sapien
ttctcctcctcctctgattcttcac

SEQ ID NO: 2571126 - DNA, 25 bp, Homo sapien
tcttctcctcctcctctgattcttc

SEQ ID NO: 2571127 - DNA, 25 bp, Homo sapien
tcttcctcagaacctgagcctgatt

SEQ ID NO: 2571128 - DNA, 25 bp, Homo sapien
ttcctcagaacctgagcctgattcc

SEQ ID NO: 2571129 - DNA, 25 bp, Homo sapien
cttcttcctcagaacctgagcctga

SEQ ID NO: 2571130 - DNA, 25 bp, Homo sapien
tcctcagaacctgagcctgattccg

SEQ ID NO: 2571131 - DNA, 25 bp, Homo sapien
aaggccttggccaggcggttccagg

SEQ ID NO: 2571132 - DNA, 25 bp, Homo sapien
gccttggccaggcggttccaggtac

SEQ ID NO: 2571133 - DNA, 25 bp, Homo sapien
ggccttggccaggcggttccaggta

SEQ ID NO: 2571134 - DNA, 25 bp, Homo sapien
aggccttggccaggcggttccaggt

SEQ ID NO: 2571135 - DNA, 25 bp, Homo sapien
tgtaagtcggacagcaggtcccttt

SEQ ID NO: 2571136 - DNA, 25 bp, Homo sapien
ctgacgaggactcggccgagctggt

SEQ ID NO: 2571137 - DNA, 25 bp, Homo sapien
gctgtcgctgatgtcctgtaagtcg

SEQ ID NO: 2571138 - DNA, 25 bp, Homo sapien
tgtcgctgatgtcctgtaagtcgga

SEQ ID NO: 2571139 - DNA, 25 bp, Homo sapien
tctcacgacacgagaggacttcagc

SEQ ID NO: 2571140 - DNA, 25 bp, Homo sapien
tctgaagcggttacttagctgggct

SEQ ID NO: 2571141 - DNA, 25 bp, Homo sapien
taactttgcttggtcggaaaccagc

SEQ ID NO: 2571142 - DNA, 25 bp, Homo sapien
cagtggcgaatgtcccagcggataa

SEQ ID NO: 2571143 - DNA, 25 bp, Homo sapien
actgtgctggcttctgcgcaggcgc

SEQ ID NO: 2571144 - DNA, 25 bp, Homo sapien
cttctgcgcaggcgccggcctggcc

SEQ ID NO: 2571145 - DNA, 25 bp, Homo sapien
tgcgcaggcgccggcctggcctcac

SEQ ID NO: 2571146 - DNA, 25 bp, Homo sapien
tctgcgcaggcgccggcctggcctc

SEQ ID NO: 2571147 - DNA, 25 bp, Homo sapien
cgggctgcgactccagtggctggct

SEQ ID NO: 2571148 - DNA, 25 bp, Homo sapien
actttgtcgctgtagtcctctctca

SEQ ID NO: 2571149 - DNA, 25 bp, Homo sapien
tggctggctttcactttgtcgctgt

SEQ ID NO: 2571150 - DNA, 25 bp, Homo sapien
tggcttccggccgtctcccaactcg

SEQ ID NO: 2571151 - DNA, 25 bp, Homo sapien
gacgcgagacagaaaccggaagctg

SEQ ID NO: 2571152 - DNA, 25 bp, Homo sapien
tgtcaaccaagaaccacgtatccag

SEQ ID NO: 2571153 - DNA, 25 bp, Homo sapien
taaagatctccattaaggtgaggac

SEQ ID NO: 2571154 - DNA, 25 bp, Homo sapien
tataaaagctcgtactggccggccg

SEQ ID NO: 2571155 - DNA, 25 bp, Homo sapien
cccgctcccgcttcctttctaactg

SEQ ID NO: 2571156 - DNA, 25 bp, Homo sapien
gctgctcccgcatcttgcgctcccg

SEQ ID NO: 2571157 - DNA, 25 bp, Homo sapien
tcctttctaactgctccaagcggtc

SEQ ID NO: 2571158 - DNA, 25 bp, Homo sapien
ctgctcccgcatcttgcgctcccgc

SEQ ID NO: 2571159 - DNA, 25 bp, Homo sapien
ctgaagaggcacacgccatcattcc

SEQ ID NO: 2571160 - DNA, 25 bp, Homo sapien
tgaagaggcacacgccatcattccc

SEQ ID NO: 2571161 - DNA, 25 bp, Homo sapien
gaagaggcacacgccatcattcccc

SEQ ID NO: 2571162 - DNA, 25 bp, Homo sapien
gttgctctagggatcaccatatgcc

SEQ ID NO: 2571163 - DNA, 25 bp, Homo sapien
ttgctctagggatcaccatatgcct

SEQ ID NO: 2571164 - DNA, 25 bp, Homo sapien
tcaaatacctcgagcacagtaaggc

SEQ ID NO: 2571165 - DNA, 25 bp, Homo sapien
acagtaaggcttccttggcccacgg

SEQ ID NO: 2571166 - DNA, 25 bp, Homo sapien
ctttcgttgttaccaccgaggcctg

SEQ ID NO: 2571167 - DNA, 25 bp, Homo sapien
actgaacgttcaggcgtcattcgca

SEQ ID NO: 2571168 - DNA, 25 bp, Homo sapien
tggctgctggcaaacatcgctgcac

SEQ ID NO: 2571169 - DNA, 25 bp, Homo sapien
ttcggcatcaacaagaaccagcgcc

SEQ ID NO: 2571170 - DNA, 25 bp, Homo sapien
tgcacacgcccttccgcttcagact

SEQ ID NO: 2571171 - DNA, 25 bp, Homo sapien
acccttcggcatcaacaagaaccag

SEQ ID NO: 2571172 - DNA, 25 bp, Homo sapien
tcaggacagttctcttggtcagcct

SEQ ID NO: 2571173 - DNA, 25 bp, Homo sapien
cattgctgtgacaggacacactacc

SEQ ID NO: 2571174 - DNA, 25 bp, Homo sapien
aatgtgacttctattgccaaattct

SEQ ID NO: 2571175 - DNA, 25 bp, Homo sapien
gatgcagtgaaaactcactccctca

SEQ ID NO: 2571176 - DNA, 25 bp, Homo sapien
cgacgttcgtgctctctttctttca

SEQ ID NO: 2571177 - DNA, 25 bp, Homo sapien
ggcgagctttatcctgttcttctcg

SEQ ID NO: 2571178 - DNA, 25 bp, Homo sapien
tcccggcgagctttatcctgttctt

SEQ ID NO: 2571179 - DNA, 25 bp, Homo sapien
tcttctcgatgtcgtttccgacgtt

SEQ ID NO: 2571180 - DNA, 25 bp, Homo sapien
gcacccagtcgaataatcatgattt

SEQ ID NO: 2571181 - DNA, 25 bp, Homo sapien
tatctgcagtaagcgtctaattatg

SEQ ID NO: 2571182 - DNA, 25 bp, Homo sapien
aaactatctgcagtaagcgtctaat

SEQ ID NO: 2571183 - DNA, 25 bp, Homo sapien
cactgcacccagtcgaataatcatg

SEQ ID NO: 2571184 - DNA, 25 bp, Homo sapien
ctagccattctgaatggtctgtgac

SEQ ID NO: 2571185 - DNA, 25 bp, Homo sapien
agccattctgaatggtctgtgacac

SEQ ID NO: 2571186 - DNA, 25 bp, Homo sapien
ccattctgaatggtctgtgacacac

SEQ ID NO: 2571187 - DNA, 25 bp, Homo sapien
gccattctgaatggtctgtgacaca

SEQ ID NO: 2571188 - DNA, 25 bp, Homo sapien
cacgctttcagctagagtttgctct

SEQ ID NO: 2571189 - DNA, 25 bp, Homo sapien
cgctttcagctagagtttgctctct

SEQ ID NO: 2571190 - DNA, 25 bp, Homo sapien
gcacgctttcagctagagtttgctc

SEQ ID NO: 2571191 - DNA, 25 bp, Homo sapien
gctttcagctagagtttgctctctc

SEQ ID NO: 2571192 - DNA, 25 bp, Homo sapien
gaacggtctgtgacacacgcatgct

SEQ ID NO: 2571193 - DNA, 25 bp, Homo sapien
tgaatggtctgtgacacacgcacgc

SEQ ID NO: 2571194 - DNA, 25 bp, Homo sapien
gaatggtctgtgacacacgcacgct

SEQ ID NO: 2571195 - DNA, 25 bp, Homo sapien
tgaacggtctgtgacacacgcatgc

SEQ ID NO: 2571196 - DNA, 25 bp, Homo sapien
ttcagctagagtattctctctatag

SEQ ID NO: 2571197 - DNA, 25 bp, Homo sapien
agctagagtattctctctatagccc

SEQ ID NO: 2571198 - DNA, 25 bp, Homo sapien
cagctagagtattctctctatagcc

SEQ ID NO: 2571199 - DNA, 25 bp, Homo sapien
ctgtgacacacgcacgctttcagct

SEQ ID NO: 2571200 - DNA, 25 bp, Homo sapien
ttgaacatgatgtcaaagaaagtaa

SEQ ID NO: 2571201 - DNA, 25 bp, Homo sapien
cttctgctgaatggctatgatgcct

SEQ ID NO: 2571202 - DNA, 25 bp, Homo sapien
ccttctgctgaatggctatgatgcc

SEQ ID NO: 2571203 - DNA, 25 bp, Homo sapien
ccccttctgctgaatggctatgatg

SEQ ID NO: 2571204 - DNA, 25 bp, Homo sapien
tctgctgaatggctatgatgcctac

SEQ ID NO: 2571205 - DNA, 25 bp, Homo sapien
tgctggggtggtttgatggccaaag

SEQ ID NO: 2571206 - DNA, 25 bp, Homo sapien
ttgctggggtggtttgatggccaaa

SEQ ID NO: 2571207 - DNA, 25 bp, Homo sapien
taaaacacaacagcactgcgtcatg

SEQ ID NO: 2571208 - DNA, 25 bp, Homo sapien
ataaaacacaacagcactgcgtcat

SEQ ID NO: 2571209 - DNA, 25 bp, Homo sapien
gtcttctcttctatacggggagttc

SEQ ID NO: 2571210 - DNA, 25 bp, Homo sapien
cttctcttctatacggggagttcct

SEQ ID NO: 2571211 - DNA, 25 bp, Homo sapien
ctcttctatacggggagttccttat

SEQ ID NO: 2571212 - DNA, 25 bp, Homo sapien
gagtcttctcttctatacggggagt

SEQ ID NO: 2571213 - DNA, 25 bp, Homo sapien
cctcctcaagggaatcccgcttgga

SEQ ID NO: 2571214 - DNA, 25 bp, Homo sapien
cccgcttggaatcccggtcatcaga

SEQ ID NO: 2571215 - DNA, 25 bp, Homo sapien
cctcaagggaatcccgcttggaatc

SEQ ID NO: 2571216 - DNA, 25 bp, Homo sapien
ggaatcccgcttggaatcccggtca

SEQ ID NO: 2571217 - DNA, 25 bp, Homo sapien
ggtttcctgagtacattaccatgca

SEQ ID NO: 2571218 - DNA, 25 bp, Homo sapien
tcaaagcagagttgctacaaacctt

SEQ ID NO: 2571219 - DNA, 25 bp, Homo sapien
taaagtgaagtgcaaggtatgcctg

SEQ ID NO: 2571220 - DNA, 25 bp, Homo sapien
caaaagaggtactttgccaatgcct

SEQ ID NO: 2571221 - DNA, 25 bp, Homo sapien
acagctttagtgtgttaaatctgcc

SEQ ID NO: 2571222 - DNA, 25 bp, Homo sapien
tgctcaatctagacacagctttagt

SEQ ID NO: 2571223 - DNA, 25 bp, Homo sapien
tccatgtatgctcaatctagacaca

SEQ ID NO: 2571224 - DNA, 25 bp, Homo sapien
tttattctccatgtatgctcaatct

SEQ ID NO: 2571225 - DNA, 25 bp, Homo sapien
caaaagaacttcatcgaagtattgt

SEQ ID NO: 2571226 - DNA, 25 bp, Homo sapien
acaaaagaacttcatcgaagtattg

SEQ ID NO: 2571227 - DNA, 25 bp, Homo sapien
aaaagaacttcatcgaagtattgtt

SEQ ID NO: 2571228 - DNA, 25 bp, Homo sapien
tgagggcaaagaaattaaatctcct

SEQ ID NO: 2571229 - DNA, 25 bp, Homo sapien
tggaaaaatgagggcaaagaaatta

SEQ ID NO: 2571230 - DNA, 25 bp, Homo sapien
aaatgagggcaaagaaattaaatct

SEQ ID NO: 2571231 - DNA, 25 bp, Homo sapien
ctaatggaaaaatgagggcaaagaa

SEQ ID NO: 2571232 - DNA, 25 bp, Homo sapien
attttttaagcgttttatctctgct

SEQ ID NO: 2571233 - DNA, 25 bp, Homo sapien
gcgcagtggctcaagacggtaaccc

SEQ ID NO: 2571234 - DNA, 25 bp, Homo sapien
gcagtggctcaagacggtaacccta

SEQ ID NO: 2571235 - DNA, 25 bp, Homo sapien
gagcagatcgctggagttccggagt

SEQ ID NO: 2571236 - DNA, 25 bp, Homo sapien
gcctagataacaaagtaagacttgg

SEQ ID NO: 2571237 - DNA, 25 bp, Homo sapien
aggttccggtgagccgaggtcgcgt

SEQ ID NO: 2571238 - DNA, 25 bp, Homo sapien
tccggtgagccgaggtcgcgtcact

SEQ ID NO: 2571239 - DNA, 25 bp, Homo sapien
gttccggtgagccgaggtcgcgtca

SEQ ID NO: 2571240 - DNA, 25 bp, Homo sapien
gcttgaatccgaaaggcggaggttc

SEQ ID NO: 2571241 - DNA, 25 bp, Homo sapien
tgaagccactagcacactggacagc

SEQ ID NO: 2571242 - DNA, 25 bp, Homo sapien
taaaggctcttaactcaggacctgc

SEQ ID NO: 2571243 - DNA, 25 bp, Homo sapien
gatagtatcgatcgcggattaaaga

SEQ ID NO: 2571244 - DNA, 25 bp, Homo sapien
gaatctgctagaaagaccgcttgga

SEQ ID NO: 2571245 - DNA, 25 bp, Homo sapien
gacgttggctccagacagcgtttgg

SEQ ID NO: 2571246 - DNA, 25 bp, Homo sapien
tgacccgggcactgggctatttcct

SEQ ID NO: 2571247 - DNA, 25 bp, Homo sapien
tccgagatgtgctcgcgaacaaggc

SEQ ID NO: 2571248 - DNA, 25 bp, Homo sapien
ttccgtgcgggatgagactgtccgc

SEQ ID NO: 2571249 - DNA, 25 bp, Homo sapien
agaagaaacagcaaccggcgctcgc

SEQ ID NO: 2571250 - DNA, 25 bp, Homo sapien
tttccggtagcgaagcccgcgcctg

SEQ ID NO: 2571251 - DNA, 25 bp, Homo sapien
cctgtgccaaggcttgcgagcagaa

SEQ ID NO: 2571252 - DNA, 25 bp, Homo sapien
gcttgcgagcagaatgccttcgcga

SEQ ID NO: 2571253 - DNA, 25 bp, Homo sapien
gaatgccttcgcgatggacgcccgc

SEQ ID NO: 2571254 - DNA, 25 bp, Homo sapien
aaatgctttagacatctgaatctca

SEQ ID NO: 2571255 - DNA, 25 bp, Homo sapien
gaagataaacatccgcatttactgg

SEQ ID NO: 2571256 - DNA, 25 bp, Homo sapien
caggagaagaggataaaacgagcaa

SEQ ID NO: 2571257 - DNA, 25 bp, Homo sapien
tccctttccatatgtcaggttttcc

SEQ ID NO: 2571258 - DNA, 25 bp, Homo sapien
attttactttgctgagcaagaatca

SEQ ID NO: 2571259 - DNA, 25 bp, Homo sapien
tttgctgagcaagaatcatagacag

SEQ ID NO: 2571260 - DNA, 25 bp, Homo sapien
gaatcatagacagctactaccacgg

SEQ ID NO: 2571261 - DNA, 25 bp, Homo sapien
tgagcaagaatcatagacagctact

SEQ ID NO: 2571262 - DNA, 25 bp, Homo sapien
ccggtgtgttcctagaagctcatct

SEQ ID NO: 2571263 - DNA, 25 bp, Homo sapien
tgtaaaaagctgtcttgttggcccg

SEQ ID NO: 2571264 - DNA, 25 bp, Homo sapien
cagagcagcgttacacaggaaatca

SEQ ID NO: 2571265 - DNA, 25 bp, Homo sapien
tatattctcgacactacgggaggct

SEQ ID NO: 2571266 - DNA, 25 bp, Homo sapien
tgtggacgtttcctttttcagcaag

SEQ ID NO: 2571267 - DNA, 25 bp, Homo sapien
tcagacatggtcagaagcctctgcc

SEQ ID NO: 2571268 - DNA, 25 bp, Homo sapien
ccagtgaagtgaccatgggtgccaa

SEQ ID NO: 2571269 - DNA, 25 bp, Homo sapien
tggtggccccagtgtgccgtactac

SEQ ID NO: 2571270 - DNA, 25 bp, Homo sapien
ggaaataattcctgaccgcacaaag

SEQ ID NO: 2571271 - DNA, 25 bp, Homo sapien
cactaggcttcaggagcatttggaa

SEQ ID NO: 2571272 - DNA, 25 bp, Homo sapien
tttcctgtctcggagatacctccta

SEQ ID NO: 2571273 - DNA, 25 bp, Homo sapien
caaagaaacatgctggtgagagaca

SEQ ID NO: 2571274 - DNA, 25 bp, Homo sapien
gaatttaccgcactgacttggacca

SEQ ID NO: 2571275 - DNA, 25 bp, Homo sapien
ttccgcaacagggtatgaggtggcc

SEQ ID NO: 2571276 - DNA, 25 bp, Homo sapien
aaaaggtccgctgatttccgcaaca

SEQ ID NO: 2571277 - DNA, 25 bp, Homo sapien
tgcacagctaccagctcggatgggt

SEQ ID NO: 2571278 - DNA, 25 bp, Homo sapien
aataaaatacataggcagggcgcgg

SEQ ID NO: 2571279 - DNA, 25 bp, Homo sapien
ccatgagggcgtacgccgtgacgct

SEQ ID NO: 2571280 - DNA, 25 bp, Homo sapien
tacgccgtgacgctctgaaggtgga

SEQ ID NO: 2571281 - DNA, 25 bp, Homo sapien
tttccccatgagggcgtacgccgtg

SEQ ID NO: 2571282 - DNA, 25 bp, Homo sapien
ccgtgacgctctgaaggtggaacag

SEQ ID NO: 2571283 - DNA, 25 bp, Homo sapien
cagcaccacgtcctggttgtagctg

SEQ ID NO: 2571284 - DNA, 25 bp, Homo sapien
tgggcgacaagacagagacttctct

SEQ ID NO: 2571285 - DNA, 25 bp, Homo sapien
gagaaagttatcatgggcaggtgca

SEQ ID NO: 2571286 - DNA, 25 bp, Homo sapien
catacacgcactgagggttgaccct

SEQ ID NO: 2571287 - DNA, 25 bp, Homo sapien
taacatctcatcgaccatggctgga

SEQ ID NO: 2571288 - DNA, 25 bp, Homo sapien
agcactgtggggagctgaggcggga

SEQ ID NO: 2571289 - DNA, 25 bp, Homo sapien
actgtggggagctgaggcgggaaga

SEQ ID NO: 2571290 - DNA, 25 bp, Homo sapien
tcacgaggtcaggagctcaagacca

SEQ ID NO: 2571291 - DNA, 25 bp, Homo sapien
tcagggggccgaagcaggagaatcg

SEQ ID NO: 2571292 - DNA, 25 bp, Homo sapien
cagccacactgggtacgcgacatgg

SEQ ID NO: 2571293 - DNA, 25 bp, Homo sapien
agccacactgggtacgcgacatggg

SEQ ID NO: 2571294 - DNA, 25 bp, Homo sapien
tgggcaccactctgagtggtcctcg

SEQ ID NO: 2571295 - DNA, 25 bp, Homo sapien
ccccgcacatgtgaccgtgagagaa

SEQ ID NO: 2571296 - DNA, 25 bp, Homo sapien
accgtgagagaagtgaaggcactgc

SEQ ID NO: 2571297 - DNA, 25 bp, Homo sapien
tctgagtggtcctcgcggcagagcc

SEQ ID NO: 2571298 - DNA, 25 bp, Homo sapien
gaatcatccgagacatgatcaccgt

SEQ ID NO: 2571299 - DNA, 25 bp, Homo sapien
cgaaaccgccacatttttcaggctg

SEQ ID NO: 2571300 - DNA, 25 bp, Homo sapien
tctcagcaaacgaaaccgccacatt

SEQ ID NO: 2571301 - DNA, 25 bp, Homo sapien
gggcggagctcttcaccgtctcagc

SEQ ID NO: 2571302 - DNA, 25 bp, Homo sapien
gaaagccgggccttgtgctgatata

SEQ ID NO: 2571303 - DNA, 25 bp, Homo sapien
cagcatcgtcataaggaagttgggt

SEQ ID NO: 2571304 - DNA, 25 bp, Homo sapien
cagcaaggaacgagggttttcacac

SEQ ID NO: 2571305 - DNA, 25 bp, Homo sapien
cttgtgctgatataaacagcaagga

SEQ ID NO: 2571306 - DNA, 25 bp, Homo sapien
ctgaagaagaaccacagcgtgaggt

SEQ ID NO: 2571307 - DNA, 25 bp, Homo sapien
caagtctgactcgatgaccgtggtc

SEQ ID NO: 2571308 - DNA, 25 bp, Homo sapien
tacttgttgaggaagagcgtgcaga

SEQ ID NO: 2571309 - DNA, 25 bp, Homo sapien
acttcggtgaccaaacagagagccc

SEQ ID NO: 2571310 - DNA, 25 bp, Homo sapien
actccgggcgccaggaacgaggcca

SEQ ID NO: 2571311 - DNA, 25 bp, Homo sapien
ggcagcatgggtcaccgtgaccgcc

SEQ ID NO: 2571312 - DNA, 25 bp, Homo sapien
gaacgattttacctccaggctgggc

SEQ ID NO: 2571313 - DNA, 25 bp, Homo sapien
aagccacagccacgaacgattttac

SEQ ID NO: 2571314 - DNA, 25 bp, Homo sapien
gctgtgacctcatccgaaggctcaa

SEQ ID NO: 2571315 - DNA, 25 bp, Homo sapien
tctggcttaaggtccctcctgaagc

SEQ ID NO: 2571316 - DNA, 25 bp, Homo sapien
gggaagcttagccaggcacctctgg

SEQ ID NO: 2571317 - DNA, 25 bp, Homo sapien
tgagctcactcaggtggacgctggc

SEQ ID NO: 2571318 - DNA, 25 bp, Homo sapien
actccaggcagacgggaggagaaac

SEQ ID NO: 2571319 - DNA, 25 bp, Homo sapien
acgggaggagaaacacggcgcgctc

SEQ ID NO: 2571320 - DNA, 25 bp, Homo sapien
gagaaacacggcgcgctcagcgtcc

SEQ ID NO: 2571321 - DNA, 25 bp, Homo sapien
cgttggttctgctcgggcccttcca

SEQ ID NO: 2571322 - DNA, 25 bp, Homo sapien
gacacggcgcgccgagtgctccggg

SEQ ID NO: 2571323 - DNA, 25 bp, Homo sapien
gagggacacggcgcgccgagtgctc

SEQ ID NO: 2571324 - DNA, 25 bp, Homo sapien
gggagggacacggcgcgccgagtgc

SEQ ID NO: 2571325 - DNA, 25 bp, Homo sapien
acggcgcgccgagtgctccgggcgg

SEQ ID NO: 2571326 - DNA, 25 bp, Homo sapien
acgacggtgcgcgtagtgcatcccc

SEQ ID NO: 2571327 - DNA, 25 bp, Homo sapien
gtgcatccccgtggcccgttggttc

SEQ ID NO: 2571328 - DNA, 25 bp, Homo sapien
gtgcgcgtagtgcatccccgtggcc

SEQ ID NO: 2571329 - DNA, 25 bp, Homo sapien
gcagagggagaggacgacggtgcgc

SEQ ID NO: 2571330 - DNA, 25 bp, Homo sapien
accagcggcacttcagggcgggatc

SEQ ID NO: 2571331 - DNA, 25 bp, Homo sapien
tgttccaccagcggcacttcagggc

SEQ ID NO: 2571332 - DNA, 25 bp, Homo sapien
cgcccgggctgttccaccagcggca

SEQ ID NO: 2571333 - DNA, 25 bp, Homo sapien
ccgggctgttccaccagcggcactt

SEQ ID NO: 2571334 - DNA, 25 bp, Homo sapien
aagcagtcatggctagctctgtcct

SEQ ID NO: 2571335 - DNA, 25 bp, Homo sapien
ggaaagcagtcatggctagctctgt

SEQ ID NO: 2571336 - DNA, 25 bp, Homo sapien
cagtcatggctagctctgtcctgcc

SEQ ID NO: 2571337 - DNA, 25 bp, Homo sapien
gaaggaaagcagtcatggctagctc

SEQ ID NO: 2571338 - DNA, 25 bp, Homo sapien
agacccagcctgcaggccactcggc

SEQ ID NO: 2571339 - DNA, 25 bp, Homo sapien
cccagcctgcaggccactcggccac

SEQ ID NO: 2571340 - DNA, 25 bp, Homo sapien
acccagcctgcaggccactcggcca

SEQ ID NO: 2571341 - DNA, 25 bp, Homo sapien
ggagacccagcctgcaggccactcg

SEQ ID NO: 2571342 - DNA, 25 bp, Homo sapien
gagcagcagccgctcatgcccctgc

SEQ ID NO: 2571343 - DNA, 25 bp, Homo sapien
agcagcagccgctcatgcccctgca

SEQ ID NO: 2571344 - DNA, 25 bp, Homo sapien
gtcactcacgggcaagttcccgcag

SEQ ID NO: 2571345 - DNA, 25 bp, Homo sapien
gggagttctccaggccaaggtcact

SEQ ID NO: 2571346 - DNA, 25 bp, Homo sapien
ggccaaggtcactcacgggcaagtt

SEQ ID NO: 2571347 - DNA, 25 bp, Homo sapien
cggggagttctccaggccaaggtca

SEQ ID NO: 2571348 - DNA, 25 bp, Homo sapien
ttcagctgtgcgccctggttgtgga

SEQ ID NO: 2571349 - DNA, 25 bp, Homo sapien
cttggctccttggtgttgccagacc

SEQ ID NO: 2571350 - DNA, 25 bp, Homo sapien
ttcctctttcagctgtgcgccctgg

SEQ ID NO: 2571351 - DNA, 25 bp, Homo sapien
ccctggttgtggaggctcctaagga

SEQ ID NO: 2571352 - DNA, 25 bp, Homo sapien
cacagggtggtcgttttggtctctc

SEQ ID NO: 2571353 - DNA, 25 bp, Homo sapien
tcgaaaaggtttccatgccccagag

SEQ ID NO: 2571354 - DNA, 25 bp, Homo sapien
tctctcctggacttgcacgcgtgta

SEQ ID NO: 2571355 - DNA, 25 bp, Homo sapien
gatgccgccgtttcaggctcgaaaa

SEQ ID NO: 2571356 - DNA, 25 bp, Homo sapien
tgagcggctggaattctgaacactg

SEQ ID NO: 2571357 - DNA, 25 bp, Homo sapien
atccaaagttttctagatcattccc

SEQ ID NO: 2571358 - DNA, 25 bp, Homo sapien
ggtcagttcacaccttctgtgttca

SEQ ID NO: 2571359 - DNA, 25 bp, Homo sapien
tctgtgttcagatgagcggctggaa

SEQ ID NO: 2571360 - DNA, 25 bp, Homo sapien
cttccagccctaacgctgggcgctg

SEQ ID NO: 2571361 - DNA, 25 bp, Homo sapien
cagccctaacgctgggcgctggtcc

SEQ ID NO: 2571362 - DNA, 25 bp, Homo sapien
agccctaacgctgggcgctggtccc

SEQ ID NO: 2571363 - DNA, 25 bp, Homo sapien
tccagccctaacgctgggcgctggt

SEQ ID NO: 2571364 - DNA, 25 bp, Homo sapien
ctcagggtttttggacgctcaagtc

SEQ ID NO: 2571365 - DNA, 25 bp, Homo sapien
ggtttttggacgctcaagtccacag

SEQ ID NO: 2571366 - DNA, 25 bp, Homo sapien
tggcggacttcaagccaggccggct

SEQ ID NO: 2571367 - DNA, 25 bp, Homo sapien
cctgtgcccagggtcatggcggact

SEQ ID NO: 2571368 - DNA, 25 bp, Homo sapien
gaggtgcccagacgagggtgagcag

SEQ ID NO: 2571369 - DNA, 25 bp, Homo sapien
acatgcctcggagaacgtgcccagg

SEQ ID NO: 2571370 - DNA, 25 bp, Homo sapien
ggtgagcagggagacacatgcctcg

SEQ ID NO: 2571371 - DNA, 25 bp, Homo sapien
ctgcgggaagctcctcacgggcaga

SEQ ID NO: 2571372 - DNA, 25 bp, Homo sapien
caaaactcagagagcagttactcaa

SEQ ID NO: 2571373 - DNA, 25 bp, Homo sapien
tccttatcgatctccagcagatgag

SEQ ID NO: 2571374 - DNA, 25 bp, Homo sapien
gggcaacttcgtgtgcaaaactcag

SEQ ID NO: 2571375 - DNA, 25 bp, Homo sapien
gcagcagtaaccaggacaccagggt

SEQ ID NO: 2571376 - DNA, 25 bp, Homo sapien
ctgtgcccgtggaagacgcgggcgc

SEQ ID NO: 2571377 - DNA, 25 bp, Homo sapien
tgtgcccgtggaagacgcgggcgcc

SEQ ID NO: 2571378 - DNA, 25 bp, Homo sapien
cgggcgccggggtaggcagcatcca

SEQ ID NO: 2571379 - DNA, 25 bp, Homo sapien
tgcccgtggaagacgcgggcgccgg

SEQ ID NO: 2571380 - DNA, 25 bp, Homo sapien
gatttaaactaccttcctgggagca

SEQ ID NO: 2571381 - DNA, 25 bp, Homo sapien
gtatgtacatcagcacttcagaaag

SEQ ID NO: 2571382 - DNA, 25 bp, Homo sapien
agcagaagctacgtgaggaatgtgt

SEQ ID NO: 2571383 - DNA, 25 bp, Homo sapien
tggcaagaccatgctttcaatggcg

SEQ ID NO: 2571384 - DNA, 25 bp, Homo sapien
tgccactgagacaggcggtcacaga

SEQ ID NO: 2571385 - DNA, 25 bp, Homo sapien
cacgcagattggtctgtccccagag

SEQ ID NO: 2571386 - DNA, 25 bp, Homo sapien
tgatttgcggaaaaatatcctggca

SEQ ID NO: 2571387 - DNA, 25 bp, Homo sapien
tatcaacattgaaggacaggtcgag

SEQ ID NO: 2571388 - DNA, 25 bp, Homo sapien
gcgaggctctcaaaccagtcgctca

SEQ ID NO: 2571389 - DNA, 25 bp, Homo sapien
gggtcccgcacacagatggagggga

SEQ ID NO: 2571390 - DNA, 25 bp, Homo sapien
ggtcccgcacacagatggaggggag

SEQ ID NO: 2571391 - DNA, 25 bp, Homo sapien
gaatggccgggactcttttcctgtg

SEQ ID NO: 2571392 - DNA, 25 bp, Homo sapien
ccgactgtgatgctgcaagacccag

SEQ ID NO: 2571393 - DNA, 25 bp, Homo sapien
gtgtctacaggccaaccgcaagagg

SEQ ID NO: 2571394 - DNA, 25 bp, Homo sapien
ctccccgaggcaggcttgagcagtg

SEQ ID NO: 2571395 - DNA, 25 bp, Homo sapien
ggatctcttgtctcttccgtccatc

SEQ ID NO: 2571396 - DNA, 25 bp, Homo sapien
ttccgtccatcaaaggacacccatg

SEQ ID NO: 2571397 - DNA, 25 bp, Homo sapien
gctgtgttccttgcttcaggtgaca

SEQ ID NO: 2571398 - DNA, 25 bp, Homo sapien
gtctccatggcggatctcttgtctc

SEQ ID NO: 2571399 - DNA, 25 bp, Homo sapien
ttgatggacagaactcgggcaccag

SEQ ID NO: 2571400 - DNA, 25 bp, Homo sapien
tggagtgcacgtcctacaggcaccg

SEQ ID NO: 2571401 - DNA, 25 bp, Homo sapien
ctgaccctgccttgcggacggtgga

SEQ ID NO: 2571402 - DNA, 25 bp, Homo sapien
cctaggatgacgaggccgcgtctga

SEQ ID NO: 2571403 - DNA, 25 bp, Homo sapien
cggaaaaggagtgtcgttggctctg

SEQ ID NO: 2571404 - DNA, 25 bp, Homo sapien
gaaaaggagtgtcgttggctctgac

SEQ ID NO: 2571405 - DNA, 25 bp, Homo sapien
ggaaaaggagtgtcgttggctctga

SEQ ID NO: 2571406 - DNA, 25 bp, Homo sapien
ccggaaaaggagtgtcgttggctct

SEQ ID NO: 2571407 - DNA, 25 bp, Homo sapien
cccgtcggggtggacacgatcactc

SEQ ID NO: 2571408 - DNA, 25 bp, Homo sapien
cggccgcggccgcatacgccgtgct

SEQ ID NO: 2571409 - DNA, 25 bp, Homo sapien
cacgttggggtggatcatggaggcc

SEQ ID NO: 2571410 - DNA, 25 bp, Homo sapien
gtgggggcagatgggcgtgatcatg

SEQ ID NO: 2571411 - DNA, 25 bp, Homo sapien
actcccgcccgagggacgctcaggg

SEQ ID NO: 2571412 - DNA, 25 bp, Homo sapien
acatccacattggacaggtaggagg

SEQ ID NO: 2571413 - DNA, 25 bp, Homo sapien
cgtcgccctgcaccgtggtgatgag

SEQ ID NO: 2571414 - DNA, 25 bp, Homo sapien
accgtggtgatgaggtgtccgtcca

SEQ ID NO: 2571415 - DNA, 25 bp, Homo sapien
tccgtccaggtagacatccacattg

SEQ ID NO: 2571416 - DNA, 25 bp, Homo sapien
ctgcagcctgcgagccgttctcacc

SEQ ID NO: 2571417 - DNA, 25 bp, Homo sapien
tgaccttcagccgactccggagaac

SEQ ID NO: 2571418 - DNA, 25 bp, Homo sapien
gactccggagaacaacagctgcgtt

SEQ ID NO: 2571419 - DNA, 25 bp, Homo sapien
tgcttcccgacatccatgtccaggc

SEQ ID NO: 2571420 - DNA, 25 bp, Homo sapien
tgaggtccagcaggagtcagagggc

SEQ ID NO: 2571421 - DNA, 25 bp, Homo sapien
ccaagttgacacacttctgtgcctt

SEQ ID NO: 2571422 - DNA, 25 bp, Homo sapien
ccagtgggagtcagagggctctttc

SEQ ID NO: 2571423 - DNA, 25 bp, Homo sapien
tcagagggcatgcatcagggaagtc

SEQ ID NO: 2571424 - DNA, 25 bp, Homo sapien
aggccatgaccggagggacgctgcc

SEQ ID NO: 2571425 - DNA, 25 bp, Homo sapien
caggtggaaggccatgaccggaggg

SEQ ID NO: 2571426 - DNA, 25 bp, Homo sapien
agttctcaaagctgaatggggtcag

SEQ ID NO: 2571427 - DNA, 25 bp, Homo sapien
cctgagtaacttgggactgaaagtt

SEQ ID NO: 2571428 - DNA, 25 bp, Homo sapien
ctggaaaagcgaggaagcgtacagc

SEQ ID NO: 2571429 - DNA, 25 bp, Homo sapien
gaagtctatctgattggaaatgtca

SEQ ID NO: 2571430 - DNA, 25 bp, Homo sapien
aggaagcgtacagcagcgtcccgtc

SEQ ID NO: 2571431 - DNA, 25 bp, Homo sapien
tctccccccaggcagatgatgaagt

SEQ ID NO: 2571432 - DNA, 25 bp, Homo sapien
cccaaagctttcatcgctggcgatg

SEQ ID NO: 2571433 - DNA, 25 bp, Homo sapien
cttttccacatacacgatcatgttc

SEQ ID NO: 2571434 - DNA, 25 bp, Homo sapien
tttccacatacacgatcatgttctc

SEQ ID NO: 2571435 - DNA, 25 bp, Homo sapien
gcgatggcagggtcttctagcactt

SEQ ID NO: 2571436 - DNA, 25 bp, Homo sapien
caaagtgccaacctgctcattccac

SEQ ID NO: 2571437 - DNA, 25 bp, Homo sapien
gtgccaacctgctcattccacctgc

SEQ ID NO: 2571438 - DNA, 25 bp, Homo sapien
aaagtgccaacctgctcattccacc

SEQ ID NO: 2571439 - DNA, 25 bp, Homo sapien
ctggaagcaaagtgccaacctgctc

SEQ ID NO: 2571440 - DNA, 25 bp, Homo sapien
acctttaagagatgactgggcggag

SEQ ID NO: 2571441 - DNA, 25 bp, Homo sapien
tctcaggaattgactaaggctgtta

SEQ ID NO: 2571442 - DNA, 25 bp, Homo sapien
gacctttaagagatgactgggcgga

SEQ ID NO: 2571443 - DNA, 25 bp, Homo sapien
gggctccctctcaggaattgactaa

SEQ ID NO: 2571444 - DNA, 25 bp, Homo sapien
gtggatggaggcccccccaactcca

SEQ ID NO: 2571445 - DNA, 25 bp, Homo sapien
tgtggatggaggcccccccaactcc

SEQ ID NO: 2571446 - DNA, 25 bp, Homo sapien
catgaggtgcgtgcagagctccttg

SEQ ID NO: 2571447 - DNA, 25 bp, Homo sapien
ccttgaacggctgcagtaggctggc

SEQ ID NO: 2571448 - DNA, 25 bp, Homo sapien
gcagagctccttgaacggctgcagt

SEQ ID NO: 2571449 - DNA, 25 bp, Homo sapien
aacggctgcagtaggctggcatctc

SEQ ID NO: 2571450 - DNA, 25 bp, Homo sapien
ttgttccacgtcagccgctggctcg

SEQ ID NO: 2571451 - DNA, 25 bp, Homo sapien
tctttggggacttgttccacgtcag

SEQ ID NO: 2571452 - DNA, 25 bp, Homo sapien
ggacgctctttggggacttgttcca

SEQ ID NO: 2571453 - DNA, 25 bp, Homo sapien
acgctctttggggacttgttccacg

SEQ ID NO: 2571454 - DNA, 25 bp, Homo sapien
tcggtatggtcctgactgtgcgccc

SEQ ID NO: 2571455 - DNA, 25 bp, Homo sapien
tcacacatgtggctcgcgaggtagc

SEQ ID NO: 2571456 - DNA, 25 bp, Homo sapien
atccaggccacgcttggcgaacacg

SEQ ID NO: 2571457 - DNA, 25 bp, Homo sapien
ggtcactcatgccatcccctatgag

SEQ ID NO: 2571458 - DNA, 25 bp, Homo sapien
gtcaaaagagcttcctacacttata

SEQ ID NO: 2571459 - DNA, 25 bp, Homo sapien
tgagccgggtgggaccaagccctct

SEQ ID NO: 2571460 - DNA, 25 bp, Homo sapien
taaaagcaactaagtcaaaagagct

SEQ ID NO: 2571461 - DNA, 25 bp, Homo sapien
tccctgctcctaactgagccgggtg

SEQ ID NO: 2571462 - DNA, 25 bp, Homo sapien
ctgtgtgtgaccacaaaccagcgcc

SEQ ID NO: 2571463 - DNA, 25 bp, Homo sapien
gcctacacccattccagccctgagg

SEQ ID NO: 2571464 - DNA, 25 bp, Homo sapien
agcgcctcgacctcttcctgggtca

SEQ ID NO: 2571465 - DNA, 25 bp, Homo sapien
cggcgtcgtacaccggcccaggcac

SEQ ID NO: 2571466 - DNA, 25 bp, Homo sapien
cccttgcaggcacgcacggctgtgg

SEQ ID NO: 2571467 - DNA, 25 bp, Homo sapien
ttgcaggcacgcacggctgtgggta

SEQ ID NO: 2571468 - DNA, 25 bp, Homo sapien
cttgcaggcacgcacggctgtgggt

SEQ ID NO: 2571469 - DNA, 25 bp, Homo sapien
ctccacaacacaggcccaccaattc

SEQ ID NO: 2571470 - DNA, 25 bp, Homo sapien
tccacaacacaggcccaccaattcc

SEQ ID NO: 2571471 - DNA, 25 bp, Homo sapien
cagctgagatgcgagtgacaaagga

SEQ ID NO: 2571472 - DNA, 25 bp, Homo sapien
gccctggcccgagtgactgacggct

SEQ ID NO: 2571473 - DNA, 25 bp, Homo sapien
cctcgggcagctcggggaccactga

SEQ ID NO: 2571474 - DNA, 25 bp, Homo sapien
ctgagtacgccctggtctgagggct

SEQ ID NO: 2571475 - DNA, 25 bp, Homo sapien
ttggtccaaaagtggtcaccgggca

SEQ ID NO: 2571476 - DNA, 25 bp, Homo sapien
tggtcaccgggcatggcccatgaag

SEQ ID NO: 2571477 - DNA, 25 bp, Homo sapien
tggcccatgaagagagcgtgtcctc

SEQ ID NO: 2571478 - DNA, 25 bp, Homo sapien
gcatggcccatgaagagagcgtgtc

SEQ ID NO: 2571479 - DNA, 25 bp, Homo sapien
cagacaggctgcgagacttggcccg

SEQ ID NO: 2571480 - DNA, 25 bp, Homo sapien
aggcagacaggctgcgagacttggc

SEQ ID NO: 2571481 - DNA, 25 bp, Homo sapien
gggtggttgtaactccaggtctcat

SEQ ID NO: 2571482 - DNA, 25 bp, Homo sapien
gtctcatcgccgtggcaggccgagc

SEQ ID NO: 2571483 - DNA, 25 bp, Homo sapien
ggttgctctagggatcaccgtatgc

SEQ ID NO: 2571484 - DNA, 25 bp, Homo sapien
ttgctctagggatcaccgtatgcct

SEQ ID NO: 2571485 - DNA, 25 bp, Homo sapien
cctaagatgtgaggagagatagtta

SEQ ID NO: 2571486 - DNA, 25 bp, Homo sapien
tatctgataatctgccccgtctgtt

SEQ ID NO: 2571487 - DNA, 25 bp, Homo sapien
acccttcggcatcaacaagaaccag

SEQ ID NO: 2571488 - DNA, 25 bp, Homo sapien
tgcacacgcccttccgcttcagact

SEQ ID NO: 2571489 - DNA, 25 bp, Homo sapien
ttcggcatcaacaagaaccagcgcc

SEQ ID NO: 2571490 - DNA, 25 bp, Homo sapien
tggctgctggcaaacatcgctgcac

SEQ ID NO: 2571491 - DNA, 25 bp, Homo sapien
gtctcactgcaagctccacctcctg

SEQ ID NO: 2571492 - DNA, 25 bp, Homo sapien
ggggtgcagtgacatgatcttgtct

SEQ ID NO: 2571493 - DNA, 25 bp, Homo sapien
ttctgaccttgtgatccgcccacct

SEQ ID NO: 2571494 - DNA, 25 bp, Homo sapien
tctgaccttgtgatccgcccacctc

SEQ ID NO: 2571495 - DNA, 25 bp, Homo sapien
ggaatcccgcttggaatcccggtca

SEQ ID NO: 2571496 - DNA, 25 bp, Homo sapien
cctcctcaagggaatcccgcttgga

SEQ ID NO: 2571497 - DNA, 25 bp, Homo sapien
cccgcttggaatcccggtcatcaga

SEQ ID NO: 2571498 - DNA, 25 bp, Homo sapien
gagtcttctcttctatacggggagt

SEQ ID NO: 2571499 - DNA, 25 bp, Homo sapien
caaaagaacttcaccgaagaagcgt

SEQ ID NO: 2571500 - DNA, 25 bp, Homo sapien
aaagaacttcaccgaagaagcgttg

SEQ ID NO: 2571501 - DNA, 25 bp, Homo sapien
agaacttcaccgaagaagcgttgtt

SEQ ID NO: 2571502 - DNA, 25 bp, Homo sapien
aagaacttcaccgaagaagcgttgt

SEQ ID NO: 2571503 - DNA, 25 bp, Homo sapien
tggaaaaatgagggcaaagaaatta

SEQ ID NO: 2571504 - DNA, 25 bp, Homo sapien
tgagggcaaagaaattaaatctcct

SEQ ID NO: 2571505 - DNA, 25 bp, Homo sapien
aaatgagggcaaagaaattaaatct

SEQ ID NO: 2571506 - DNA, 25 bp, Homo sapien
ctaatggaaaaatgagggcaaagaa

SEQ ID NO: 2571507 - DNA, 25 bp, Homo sapien
attttttaagcgttttatctctgct

SEQ ID NO: 2571508 - DNA, 25 bp, Homo sapien
tccgagatgtgctcgcgaacaaggc

SEQ ID NO: 2571509 - DNA, 25 bp, Homo sapien
tgacccgggcactgggctatttcct

SEQ ID NO: 2571510 - DNA, 25 bp, Homo sapien
cagcctggcagacgttggctccaga

SEQ ID NO: 2571511 - DNA, 25 bp, Homo sapien
acccaaagttccgtgcgggatgaga

SEQ ID NO: 2571512 - DNA, 25 bp, Homo sapien
cggaagcgagggtgtcgctcgcccc

SEQ ID NO: 2571513 - DNA, 25 bp, Homo sapien
gaaagacctcggtgcacagttctcc

SEQ ID NO: 2571514 - DNA, 25 bp, Homo sapien
tgctcggaagaaagacctcggtgca

SEQ ID NO: 2571515 - DNA, 25 bp, Homo sapien
ggaagaaagacctcggtgcacagtt

SEQ ID NO: 2571516 - DNA, 25 bp, Homo sapien
agacctcggtgcacagttctcctcg

SEQ ID NO: 2571517 - DNA, 25 bp, Homo sapien
accggcgcgcgccaaaagtatcgtc

SEQ ID NO: 2571518 - DNA, 25 bp, Homo sapien
caaccggcgcgcgccaaaagtatcg

SEQ ID NO: 2571519 - DNA, 25 bp, Homo sapien
aaccggcgcgcgccaaaagtatcgt

SEQ ID NO: 2571520 - DNA, 25 bp, Homo sapien
ccggcgcgcgccaaaagtatcgtca

SEQ ID NO: 2571521 - DNA, 25 bp, Homo sapien
cccagaactcgagacaaggacaggg

SEQ ID NO: 2571522 - DNA, 25 bp, Homo sapien
cggcccagaactcgagacaaggaca

SEQ ID NO: 2571523 - DNA, 25 bp, Homo sapien
ctccggcccagaactcgagacaagg

SEQ ID NO: 2571524 - DNA, 25 bp, Homo sapien
gcccagaactcgagacaaggacagg

SEQ ID NO: 2571525 - DNA, 25 bp, Homo sapien
agcgcacttccgacttcggcgcggg

SEQ ID NO: 2571526 - DNA, 25 bp, Homo sapien
gtccaggacgccagaagaaacagcc

SEQ ID NO: 2571527 - DNA, 25 bp, Homo sapien
ggtccaggacgccagaagaaacagc

SEQ ID NO: 2571528 - DNA, 25 bp, Homo sapien
aaacagcccggtgagcgcacttccg

SEQ ID NO: 2571529 - DNA, 25 bp, Homo sapien
ctgtgacgcaggaatcgggactccg

SEQ ID NO: 2571530 - DNA, 25 bp, Homo sapien
gggagcgacgcccacttttggagca

SEQ ID NO: 2571531 - DNA, 25 bp, Homo sapien
cagtttgcgcctgcgcggaacgcgt

SEQ ID NO: 2571532 - DNA, 25 bp, Homo sapien
gaacgcgtggccggcttccggaatc

SEQ ID NO: 2571533 - DNA, 25 bp, Homo sapien
gcttgcgagcagaatgccttcgcga

SEQ ID NO: 2571534 - DNA, 25 bp, Homo sapien
tttccggtagcgaagcccgcgcctg

SEQ ID NO: 2571535 - DNA, 25 bp, Homo sapien
gaatgccttcgcgatggacgcccgc

SEQ ID NO: 2571536 - DNA, 25 bp, Homo sapien
cctgtgccaaggcttgcgagcagaa

SEQ ID NO: 2571537 - DNA, 25 bp, Homo sapien
aagctgacactggcagtgggtcctc

SEQ ID NO: 2571538 - DNA, 25 bp, Homo sapien
tttacttttgagtcggagccttgct

SEQ ID NO: 2571539 - DNA, 25 bp, Homo sapien
atttacttttgagtcggagccttgc

SEQ ID NO: 2571540 - DNA, 25 bp, Homo sapien
tatttacttttgagtcggagccttg

SEQ ID NO: 2571541 - DNA, 25 bp, Homo sapien
ttcaacgccattatcctgcgagcct

SEQ ID NO: 2571542 - DNA, 25 bp, Homo sapien
gttcaacgccattatcctgcgagcc

SEQ ID NO: 2571543 - DNA, 25 bp, Homo sapien
caacgccattatcctgcgagcctca

SEQ ID NO: 2571544 - DNA, 25 bp, Homo sapien
ggttcaacgccattatcctgcgagc

SEQ ID NO: 2571545 - DNA, 25 bp, Homo sapien
catccacgggattagttacacggta

SEQ ID NO: 2571546 - DNA, 25 bp, Homo sapien
cagagctcaccggatttgggacaag

SEQ ID NO: 2571547 - DNA, 25 bp, Homo sapien
gcagggcacgtacatacattgggaa

SEQ ID NO: 2571548 - DNA, 25 bp, Homo sapien
ttcgttgagtgaggatccagcagcc

SEQ ID NO: 2571549 - DNA, 25 bp, Homo sapien
cagggaattgggactctcggatttt

SEQ ID NO: 2571550 - DNA, 25 bp, Homo sapien
gtgcaacagtgttctcatctttcca

SEQ ID NO: 2571551 - DNA, 25 bp, Homo sapien
cacccggtgtgttcctagaagctca

SEQ ID NO: 2571552 - DNA, 25 bp, Homo sapien
cagtggaagtaaccacacccggtgt

SEQ ID NO: 2571553 - DNA, 25 bp, Homo sapien
aatgtctgtacaatcgttaacacgg

SEQ ID NO: 2571554 - DNA, 25 bp, Homo sapien
caatcgttaacacggccaagccagg

SEQ ID NO: 2571555 - DNA, 25 bp, Homo sapien
ctgtgctgggaatgccatgaagacc

SEQ ID NO: 2571556 - DNA, 25 bp, Homo sapien
tgccatgaagaccagcggctggaaa

SEQ ID NO: 2571557 - DNA, 25 bp, Homo sapien
ttgtttctggtccacaaacagaaaa

SEQ ID NO: 2571558 - DNA, 25 bp, Homo sapien
cccagagcagcgttacacaggaaat

SEQ ID NO: 2571559 - DNA, 25 bp, Homo sapien
aattccaaggtgctcagaaccaggc

SEQ ID NO: 2571560 - DNA, 25 bp, Homo sapien
gaaaatccaaacaggatggcagctc

SEQ ID NO: 2571561 - DNA, 25 bp, Homo sapien
accaccctgggagttgctttcaatc

SEQ ID NO: 2571562 - DNA, 25 bp, Homo sapien
tatattctcgacactacaggaggct

SEQ ID NO: 2571563 - DNA, 25 bp, Homo sapien
aaagaggccggcagccacattacca

SEQ ID NO: 2571564 - DNA, 25 bp, Homo sapien
gacaaaacatcttcgcagcgcagtg

SEQ ID NO: 2571565 - DNA, 25 bp, Homo sapien
taaacagaagcgactgaacggcctc

SEQ ID NO: 2571566 - DNA, 25 bp, Homo sapien
gaaagccgcaggcaatggccaactt

SEQ ID NO: 2571567 - DNA, 25 bp, Homo sapien
gaagttctgagtgcccaccgtggca

SEQ ID NO: 2571568 - DNA, 25 bp, Homo sapien
ggtcatagcccttgagtgccgtgca

SEQ ID NO: 2571569 - DNA, 25 bp, Homo sapien
gcctggggtcctgtggaagcagcgg

SEQ ID NO: 2571570 - DNA, 25 bp, Homo sapien
tggggtcctgtggaagcagcggctc

SEQ ID NO: 2571571 - DNA, 25 bp, Homo sapien
tgcctggggtcctgtggaagcagcg

SEQ ID NO: 2571572 - DNA, 25 bp, Homo sapien
ggtcctgtggaagcagcggctccac

SEQ ID NO: 2571573 - DNA, 25 bp, Homo sapien
cgattacgctgagccagatggacaa

SEQ ID NO: 2571574 - DNA, 25 bp, Homo sapien
ggtgatcttgttgccgaaaacgatt

SEQ ID NO: 2571575 - DNA, 25 bp, Homo sapien
aggaccccaacggtcaccagggctg

SEQ ID NO: 2571576 - DNA, 25 bp, Homo sapien
tgccaacggccgacaagctggtgat

SEQ ID NO: 2571577 - DNA, 25 bp, Homo sapien
acggtgacatcagccctgcggccag

SEQ ID NO: 2571578 - DNA, 25 bp, Homo sapien
gggactcagcgtcacggtgacatca

SEQ ID NO: 2571579 - DNA, 25 bp, Homo sapien
ggtctcctcagcccgtggccagcag

SEQ ID NO: 2571580 - DNA, 25 bp, Homo sapien
cagcaggggcgctcagggctatggt

SEQ ID NO: 2571581 - DNA, 25 bp, Homo sapien
tttccccatgagggcgtacgccgtg

SEQ ID NO: 2571582 - DNA, 25 bp, Homo sapien
ccccatgagggcgtacgccgtgacg

SEQ ID NO: 2571583 - DNA, 25 bp, Homo sapien
ccatgagggcgtacgccgtgacgct

SEQ ID NO: 2571584 - DNA, 25 bp, Homo sapien
ttccccatgagggcgtacgccgtga

SEQ ID NO: 2571585 - DNA, 25 bp, Homo sapien
cagcaccacgtcctggttgtagctg

SEQ ID NO: 2571586 - DNA, 25 bp, Homo sapien
ggccgggacgagcatggccaccgca

SEQ ID NO: 2571587 - DNA, 25 bp, Homo sapien
cgggacgagcatggccaccgcagcg

SEQ ID NO: 2571588 - DNA, 25 bp, Homo sapien
cgagcatggccaccgcagcggcgct

SEQ ID NO: 2571589 - DNA, 25 bp, Homo sapien
acccgggccgggacgagcatggcca

SEQ ID NO: 2571590 - DNA, 25 bp, Homo sapien
tgttctgactcttacagtgagcagg

SEQ ID NO: 2571591 - DNA, 25 bp, Homo sapien
tagacagggtacttgtaaaggccac

SEQ ID NO: 2571592 - DNA, 25 bp, Homo sapien
tctctctagacaggactagggtgct

SEQ ID NO: 2571593 - DNA, 25 bp, Homo sapien
aatgaaaacgcaaacgcacaccagg

SEQ ID NO: 2571594 - DNA, 25 bp, Homo sapien
acctgtatttgtccccgctgagcag

SEQ ID NO: 2571595 - DNA, 25 bp, Homo sapien
aacctgtatttgtccccgctgagca

SEQ ID NO: 2571596 - DNA, 25 bp, Homo sapien
cctgtatttgtccccgctgagcagc

SEQ ID NO: 2571597 - DNA, 25 bp, Homo sapien
ctgtatttgtccccgctgagcagct

SEQ ID NO: 2571598 - DNA, 25 bp, Homo sapien
tcacgccactctctttcctcggcct

SEQ ID NO: 2571599 - DNA, 25 bp, Homo sapien
tatttttacttctgtattattcaaa

SEQ ID NO: 2571600 - DNA, 25 bp, Homo sapien
ttcacgccactctctttcctcggcc

SEQ ID NO: 2571601 - DNA, 25 bp, Homo sapien
cttctgtattattcaaaatctcacc

SEQ ID NO: 2571602 - DNA, 25 bp, Homo sapien
caattctgggtgaatctgaacggcc

SEQ ID NO: 2571603 - DNA, 25 bp, Homo sapien
ccattaacagcacggcagggaggtg

SEQ ID NO: 2571604 - DNA, 25 bp, Homo sapien
gctcacgggaggaattctcagctca

SEQ ID NO: 2571605 - DNA, 25 bp, Homo sapien
tagaagccggtcattctcaaagggc

SEQ ID NO: 2571606 - DNA, 25 bp, Homo sapien
agtccatgatgttggtggacagtgc

SEQ ID NO: 2571607 - DNA, 25 bp, Homo sapien
gacattgaagctgatctcagtggcc

SEQ ID NO: 2571608 - DNA, 25 bp, Homo sapien
ggatgagggagaggttgaccagcag

SEQ ID NO: 2571609 - DNA, 25 bp, Homo sapien
tgcggccgagaaccccaggacattg

SEQ ID NO: 2571610 - DNA, 25 bp, Homo sapien
tccctcccgagggccaggctgtttc

SEQ ID NO: 2571611 - DNA, 25 bp, Homo sapien
gacagcccctgtgagtggctgaccc

SEQ ID NO: 2571612 - DNA, 25 bp, Homo sapien
gtgagtggctgacccgccgggcgga

SEQ ID NO: 2571613 - DNA, 25 bp, Homo sapien
agcccctgtgagtggctgacccgcc

SEQ ID NO: 2571614 - DNA, 25 bp, Homo sapien
tctgctcctcgctggttttcatgca

SEQ ID NO: 2571615 - DNA, 25 bp, Homo sapien
cacactgggtacgcgacatggggct

SEQ ID NO: 2571616 - DNA, 25 bp, Homo sapien
ctgggtacgcgacatggggctgaca

SEQ ID NO: 2571617 - DNA, 25 bp, Homo sapien
tgctcctcgctggttttcatgcagc

SEQ ID NO: 2571618 - DNA, 25 bp, Homo sapien
cgaaaccgccacatttttcaggctg

SEQ ID NO: 2571619 - DNA, 25 bp, Homo sapien
tctcagcaaacgaaaccgccacatt

SEQ ID NO: 2571620 - DNA, 25 bp, Homo sapien
gaatcatccgagacatgatcaccgt

SEQ ID NO: 2571621 - DNA, 25 bp, Homo sapien
gggcggagctcttcaccgtctcagc

SEQ ID NO: 2571622 - DNA, 25 bp, Homo sapien
cacaaacagcatcgtcataaggaag

SEQ ID NO: 2571623 - DNA, 25 bp, Homo sapien
acagcaaggaacgagggttttcaca

SEQ ID NO: 2571624 - DNA, 25 bp, Homo sapien
agcaaggaacgagggttttcacaca

SEQ ID NO: 2571625 - DNA, 25 bp, Homo sapien
cagcatcgtcataaggaagttgggt

SEQ ID NO: 2571626 - DNA, 25 bp, Homo sapien
cggccctcccgggtggttgctggct

SEQ ID NO: 2571627 - DNA, 25 bp, Homo sapien
tggcaggtggccggcttccaccctg

SEQ ID NO: 2571628 - DNA, 25 bp, Homo sapien
gcaggtggccggcttccaccctgcc

SEQ ID NO: 2571629 - DNA, 25 bp, Homo sapien
ggccctcccgggtggttgctggctg

SEQ ID NO: 2571630 - DNA, 25 bp, Homo sapien
acttcggtgaccaaacagagagccc

SEQ ID NO: 2571631 - DNA, 25 bp, Homo sapien
tacttgttgaggaagagcgtgcaga

SEQ ID NO: 2571632 - DNA, 25 bp, Homo sapien
caagtctgactcgatgaccgtggtc

SEQ ID NO: 2571633 - DNA, 25 bp, Homo sapien
ctgaagaagaaccacagcgtgaggt

SEQ ID NO: 2571634 - DNA, 25 bp, Homo sapien
aagccacagccacgaacgattttac

SEQ ID NO: 2571635 - DNA, 25 bp, Homo sapien
ggcagcatgggtcaccgtgaccgcc

SEQ ID NO: 2571636 - DNA, 25 bp, Homo sapien
gaacgattttacctccaggctgggc

SEQ ID NO: 2571637 - DNA, 25 bp, Homo sapien
actccgggcgccaggaacgaggcca

SEQ ID NO: 2571638 - DNA, 25 bp, Homo sapien
ggactcatccactcctcgggccact

SEQ ID NO: 2571639 - DNA, 25 bp, Homo sapien
agttcccacagcctcggaataacaa

SEQ ID NO: 2571640 - DNA, 25 bp, Homo sapien
cacagcctcggaataacaaaggact

SEQ ID NO: 2571641 - DNA, 25 bp, Homo sapien
actgacagtgccagatctccacaaa

SEQ ID NO: 2571642 - DNA, 25 bp, Homo sapien
ggacagagcactcgcgacagggctc

SEQ ID NO: 2571643 - DNA, 25 bp, Homo sapien
agcactcgcgacagggctccgcaag

SEQ ID NO: 2571644 - DNA, 25 bp, Homo sapien
aaaggacagagcactcgcgacaggg

SEQ ID NO: 2571645 - DNA, 25 bp, Homo sapien
aagggtgcggcagagcaaaaggaca

SEQ ID NO: 2571646 - DNA, 25 bp, Homo sapien
gtgcctgtcaacagtagaaacaaac

SEQ ID NO: 2571647 - DNA, 25 bp, Homo sapien
aaacaccttattgatggagctgaag

SEQ ID NO: 2571648 - DNA, 25 bp, Homo sapien
tgcctgtcaacagtagaaacaaaca

SEQ ID NO: 2571649 - DNA, 25 bp, Homo sapien
gaaacaaacaccttattgatggagc

SEQ ID NO: 2571650 - DNA, 25 bp, Homo sapien
aagctgtagtaacaatagctccagt

SEQ ID NO: 2571651 - DNA, 25 bp, Homo sapien
tcaagctgtagtaacaatagctcca

SEQ ID NO: 2571652 - DNA, 25 bp, Homo sapien
caagctgtagtaacaatagctccag

SEQ ID NO: 2571653 - DNA, 25 bp, Homo sapien
caggcaccagcgagaaaggccaggt

SEQ ID NO: 2571654 - DNA, 25 bp, Homo sapien
gaaaagcgtatagctccaggcacca

SEQ ID NO: 2571655 - DNA, 25 bp, Homo sapien
ctgaagggcaggcacggatgagcca

SEQ ID NO: 2571656 - DNA, 25 bp, Homo sapien
ttccgccccacactggaaaagcgta

SEQ ID NO: 2571657 - DNA, 25 bp, Homo sapien
gggtgggcggagcaaagacacacag

SEQ ID NO: 2571658 - DNA, 25 bp, Homo sapien
aggtttgcgcctgaccggcgccacg

SEQ ID NO: 2571659 - DNA, 25 bp, Homo sapien
actggcgccaggtttgcgcctgacc

SEQ ID NO: 2571660 - DNA, 25 bp, Homo sapien
acatttagacactggcgccaggttt

SEQ ID NO: 2571661 - DNA, 25 bp, Homo sapien
ggtcaagtccaggtggtcagtgcca

SEQ ID NO: 2571662 - DNA, 25 bp, Homo sapien
cttccatggcgggtggcattgtctg

SEQ ID NO: 2571663 - DNA, 25 bp, Homo sapien
tggtgtccagcgtcaccaggcggtc

SEQ ID NO: 2571664 - DNA, 25 bp, Homo sapien
gcagtgccataaccctcctggtgtc

SEQ ID NO: 2571665 - DNA, 25 bp, Homo sapien
ctgggcatgcaaaggctaggggtgg

SEQ ID NO: 2571666 - DNA, 25 bp, Homo sapien
gggcatgcaaaggctaggggtggtg

SEQ ID NO: 2571667 - DNA, 25 bp, Homo sapien
ggcatgcaaaggctaggggtggtgc

SEQ ID NO: 2571668 - DNA, 25 bp, Homo sapien
tgggcatgcaaaggctaggggtggt

SEQ ID NO: 2571669 - DNA, 25 bp, Homo sapien
gcggtggaaggtcgggctgctcaag

SEQ ID NO: 2571670 - DNA, 25 bp, Homo sapien
ggccggtatctaagcttctgccctg

SEQ ID NO: 2571671 - DNA, 25 bp, Homo sapien
atccaggcagcggtggaaggtcggg

SEQ ID NO: 2571672 - DNA, 25 bp, Homo sapien
gggctgctcaaggccggtatctaag

SEQ ID NO: 2571673 - DNA, 25 bp, Homo sapien
ctaaacggtacagagcgctgcaggc

SEQ ID NO: 2571674 - DNA, 25 bp, Homo sapien
tgagaacactcaccctggccgctgg

SEQ ID NO: 2571675 - DNA, 25 bp, Homo sapien
agtcagaggtcgcacacacaaaagg

SEQ ID NO: 2571676 - DNA, 25 bp, Homo sapien
cacagggacctagtcagaggtcgca

SEQ ID NO: 2571677 - DNA, 25 bp, Homo sapien
caatggcgacggtctgtctgggaca

SEQ ID NO: 2571678 - DNA, 25 bp, Homo sapien
caaagcacagtgaccgagcaatggc

SEQ ID NO: 2571679 - DNA, 25 bp, Homo sapien
ctctataaaggcctgcggagagcgg

SEQ ID NO: 2571680 - DNA, 25 bp, Homo sapien
gcagtgggcccgagatactaaggca

SEQ ID NO: 2571681 - DNA, 25 bp, Homo sapien
cacaggcggtagaggacgctgtcgt

SEQ ID NO: 2571682 - DNA, 25 bp, Homo sapien
tctcggtgatgtaggccaccagcag

SEQ ID NO: 2571683 - DNA, 25 bp, Homo sapien
ggctcggcggtgaactccacgcact

SEQ ID NO: 2571684 - DNA, 25 bp, Homo sapien
acgatgtcctgcatgccggccggct

SEQ ID NO: 2571685 - DNA, 25 bp, Homo sapien
taggcgccgcgccacgagcagttga

SEQ ID NO: 2571686 - DNA, 25 bp, Homo sapien
cgcgccacgagcagttgagcgcgaa

SEQ ID NO: 2571687 - DNA, 25 bp, Homo sapien
ctcgcacgggaagcgcgtgtaggcg

SEQ ID NO: 2571688 - DNA, 25 bp, Homo sapien
gggccaggcgccactgcaggaggac

SEQ ID NO: 2571689 - DNA, 25 bp, Homo sapien
gctgcggttgcgcaggacgctggcg

SEQ ID NO: 2571690 - DNA, 25 bp, Homo sapien
gctgcggaagcacaggcgcccgccg

SEQ ID NO: 2571691 - DNA, 25 bp, Homo sapien
gcgcaggacgctggcgcgcagggag

SEQ ID NO: 2571692 - DNA, 25 bp, Homo sapien
ccggccggggcgtgcagcacgcagc

SEQ ID NO: 2571693 - DNA, 25 bp, Homo sapien
cttggacccctgcggcttttccgag

SEQ ID NO: 2571694 - DNA, 25 bp, Homo sapien
cagtcggggacttcgtgctttacga

SEQ ID NO: 2571695 - DNA, 25 bp, Homo sapien
ttcgtttcgcgtcgtgcagctccgc

SEQ ID NO: 2571696 - DNA, 25 bp, Homo sapien
tccgagccgaaactcacgggctgtg

SEQ ID NO: 2571697 - DNA, 25 bp, Homo sapien
gcacgcgcaggaccccgggccttgc

SEQ ID NO: 2571698 - DNA, 25 bp, Homo sapien
gggccttgcaccccaacgctggccg

SEQ ID NO: 2571699 - DNA, 25 bp, Homo sapien
tggcacgcgcaggaccccgggcctt

SEQ ID NO: 2571700 - DNA, 25 bp, Homo sapien
gccttgcaccccaacgctggccgcc

SEQ ID NO: 2571701 - DNA, 25 bp, Homo sapien
aactggaccatgagttcctgcaacc

SEQ ID NO: 2571702 - DNA, 25 bp, Homo sapien
tctggcaactggaccatgagttcct

SEQ ID NO: 2571703 - DNA, 25 bp, Homo sapien
tggaccatgagttcctgcaacccct

SEQ ID NO: 2571704 - DNA, 25 bp, Homo sapien
tggcaactggaccatgagttcctgc

SEQ ID NO: 2571705 - DNA, 25 bp, Homo sapien
cttggtccccgacctctggatggcc

SEQ ID NO: 2571706 - DNA, 25 bp, Homo sapien
ccttggtccccgacctctggatggc

SEQ ID NO: 2571707 - DNA, 25 bp, Homo sapien
cctctagtacagacaggcagcgagt

SEQ ID NO: 2571708 - DNA, 25 bp, Homo sapien
gcagcgagtcggcaggtgagtggca

SEQ ID NO: 2571709 - DNA, 25 bp, Homo sapien
agtacagacaggcagcgagtcggca

SEQ ID NO: 2571710 - DNA, 25 bp, Homo sapien
ctgacctctagtacagacaggcagc

SEQ ID NO: 2571711 - DNA, 25 bp, Homo sapien
ccatatggagccagtgacaaccggg

SEQ ID NO: 2571712 - DNA, 25 bp, Homo sapien
tgtttctgctctcctacgaagaccc

SEQ ID NO: 2571713 - DNA, 25 bp, Homo sapien
tacgaagaccccatatggagccagt

SEQ ID NO: 2571714 - DNA, 25 bp, Homo sapien
aaggcaggacgaggactgggccacg

SEQ ID NO: 2571715 - DNA, 25 bp, Homo sapien
gccactggcaatgtcctgtcctgaa

SEQ ID NO: 2571716 - DNA, 25 bp, Homo sapien
cacgtgctaactctggcactcggag

SEQ ID NO: 2571717 - DNA, 25 bp, Homo sapien
taaactatgcttgggcctgtccttt

SEQ ID NO: 2571718 - DNA, 25 bp, Homo sapien
tttgtgaagccggaagaaagttctg

SEQ ID NO: 2571719 - DNA, 25 bp, Homo sapien
atcttggctcactgtaacctccgat

SEQ ID NO: 2571720 - DNA, 25 bp, Homo sapien
tgtcaccaggctggcgtacggtggc

SEQ ID NO: 2571721 - DNA, 25 bp, Homo sapien
caccaggctggcgtacggtggcatg

SEQ ID NO: 2571722 - DNA, 25 bp, Homo sapien
atgagccaccgcgtctggctttttt

SEQ ID NO: 2571723 - DNA, 25 bp, Homo sapien
gcagagaaaagctcgagataagagc

SEQ ID NO: 2571724 - DNA, 25 bp, Homo sapien
atcggtctaggtcggaacaggagaa

SEQ ID NO: 2571725 - DNA, 25 bp, Homo sapien
agaaaagctcgagataagagctgtg

SEQ ID NO: 2571726 - DNA, 25 bp, Homo sapien
cagccgggtcaggaagtgatcggtc

SEQ ID NO: 2571727 - DNA, 25 bp, Homo sapien
gaagatcagccaggttctcagggac

SEQ ID NO: 2571728 - DNA, 25 bp, Homo sapien
cattgttcagaaacgcggagacttc

SEQ ID NO: 2571729 - DNA, 25 bp, Homo sapien
taaacaaatggagtcgggaggccac

SEQ ID NO: 2571730 - DNA, 25 bp, Homo sapien
tgtcatggcacgaacagcctaggct

SEQ ID NO: 2571731 - DNA, 25 bp, Homo sapien
gatgcgggccgtcctctcggctgat

SEQ ID NO: 2571732 - DNA, 25 bp, Homo sapien
gcgcgatgcgggccgtcctctcggc

SEQ ID NO: 2571733 - DNA, 25 bp, Homo sapien
gcgatgcgggccgtcctctcggctg

SEQ ID NO: 2571734 - DNA, 25 bp, Homo sapien
tcactggcgcgatgcgggccgtcct

SEQ ID NO: 2571735 - DNA, 25 bp, Homo sapien
gctctggcagaacgcgagcgccgtc

SEQ ID NO: 2571736 - DNA, 25 bp, Homo sapien
ccgagtcgttctccgctctggcaga

SEQ ID NO: 2571737 - DNA, 25 bp, Homo sapien
gtagggtccgcacgggatgggctgg

SEQ ID NO: 2571738 - DNA, 25 bp, Homo sapien
gctggactcggcgtagggtccgcac

SEQ ID NO: 2571739 - DNA, 25 bp, Homo sapien
ccgggcgcacgcaattacgggcccg

SEQ ID NO: 2571740 - DNA, 25 bp, Homo sapien
gcacgcaattacgggcccggcgctg

SEQ ID NO: 2571741 - DNA, 25 bp, Homo sapien
acgcaattacgggcccggcgctggc

SEQ ID NO: 2571742 - DNA, 25 bp, Homo sapien
ggcgcacgcaattacgggcccggcg

SEQ ID NO: 2571743 - DNA, 25 bp, Homo sapien
gccgcgggtcgaggtgctaactgtg

SEQ ID NO: 2571744 - DNA, 25 bp, Homo sapien
aggcggcggccctgagtgtcgcggc

SEQ ID NO: 2571745 - DNA, 25 bp, Homo sapien
gggcagacaggcgaccgagccgcgg

SEQ ID NO: 2571746 - DNA, 25 bp, Homo sapien
tgggcccgagtggacctggagccgg

SEQ ID NO: 2571747 - DNA, 25 bp, Homo sapien
ttgcacttggctctcccactttggg

SEQ ID NO: 2571748 - DNA, 25 bp, Homo sapien
tcgtccgcggcctgatagtttgcac

SEQ ID NO: 2571749 - DNA, 25 bp, Homo sapien
ggctagaggccagtcccaaagtttc

SEQ ID NO: 2571750 - DNA, 25 bp, Homo sapien
agctcttgatcgtccgcggcctgat

SEQ ID NO: 2571751 - DNA, 25 bp, Homo sapien
actccatggcctgtggcgtgccaca

SEQ ID NO: 2571752 - DNA, 25 bp, Homo sapien
cggcatttcggtgtcattaggcaca

SEQ ID NO: 2571753 - DNA, 25 bp, Homo sapien
ggatgtccatctgcgttagctggag

SEQ ID NO: 2571754 - DNA, 25 bp, Homo sapien
caagtgtctgaatgtggcgctctcc

SEQ ID NO: 2571755 - DNA, 25 bp, Homo sapien
cagggctagccttggacatctgcac

SEQ ID NO: 2571756 - DNA, 25 bp, Homo sapien
caaagtctagcatttctggcaaagg

SEQ ID NO: 2571757 - DNA, 25 bp, Homo sapien
taaacatcgggagcagttgcctgca

SEQ ID NO: 2571758 - DNA, 25 bp, Homo sapien
tcctgaagcggaagcctgggctgta

SEQ ID NO: 2571759 - DNA, 25 bp, Homo sapien
gcagcgggtgtgccaagcgccagcc

SEQ ID NO: 2571760 - DNA, 25 bp, Homo sapien
ctgcagcgggtgtgccaagcgccag

SEQ ID NO: 2571761 - DNA, 25 bp, Homo sapien
cagcgggtgtgccaagcgccagccc

SEQ ID NO: 2571762 - DNA, 25 bp, Homo sapien
tgcagcgggtgtgccaagcgccagc

SEQ ID NO: 2571763 - DNA, 25 bp, Homo sapien
aggggatgggtcctgtggccagtac

SEQ ID NO: 2571764 - DNA, 25 bp, Homo sapien
cccaggggatgggtcctgtggccag

SEQ ID NO: 2571765 - DNA, 25 bp, Homo sapien
ctgcccaggggatgggtcctgtggc

SEQ ID NO: 2571766 - DNA, 25 bp, Homo sapien
caggggatgggtcctgtggccagta

SEQ ID NO: 2571767 - DNA, 25 bp, Homo sapien
gggtcagcttgacccagacccagcc

SEQ ID NO: 2571768 - DNA, 25 bp, Homo sapien
agacccagcccagaacctgtcccat

SEQ ID NO: 2571769 - DNA, 25 bp, Homo sapien
tcggggtcagcttgacccagaccca

SEQ ID NO: 2571770 - DNA, 25 bp, Homo sapien
cctcggggtcagcttgacccagacc

SEQ ID NO: 2571771 - DNA, 25 bp, Homo sapien
cagagcctcaaaagctgctggcggc

SEQ ID NO: 2571772 - DNA, 25 bp, Homo sapien
ggccttcggaggcaggtactgagcc

SEQ ID NO: 2571773 - DNA, 25 bp, Homo sapien
gtggcaggtcttgggtgactgctgg

SEQ ID NO: 2571774 - DNA, 25 bp, Homo sapien
caagggatacaagtgctgggtcctg

SEQ ID NO: 2571775 - DNA, 25 bp, Homo sapien
catcttccagggagcgaaggtggtg

SEQ ID NO: 2571776 - DNA, 25 bp, Homo sapien
gcggcttctactacaaggaccacct

SEQ ID NO: 2571777 - DNA, 25 bp, Homo sapien
gctttatttgtgaaccctcttgcag

SEQ ID NO: 2571778 - DNA, 25 bp, Homo sapien
caatgtgtaccgtgtgggccacaag

SEQ ID NO: 2571779 - DNA, 25 bp, Homo sapien
gccctggacaagcttcgggcccaga

SEQ ID NO: 2571780 - DNA, 25 bp, Homo sapien
tggaggtggcgctgggtaacgcagc

SEQ ID NO: 2571781 - DNA, 25 bp, Homo sapien
ctggacaagcttcgggcccagaaga

SEQ ID NO: 2571782 - DNA, 25 bp, Homo sapien
cgctgggtaacgcagcccgggctct

SEQ ID NO: 2571783 - DNA, 25 bp, Homo sapien
cagctggtacgtccatgccagagtg

SEQ ID NO: 2571784 - DNA, 25 bp, Homo sapien
gatgatgtgaattcgggtgagtaca

SEQ ID NO: 2571785 - DNA, 25 bp, Homo sapien
ctgccgatcgtctgccctggacatg

SEQ ID NO: 2571786 - DNA, 25 bp, Homo sapien
tccatgccagagtgtggctgccgat

SEQ ID NO: 2571787 - DNA, 25 bp, Homo sapien
tagatccatgcagacgggcaaagat

SEQ ID NO: 2571788 - DNA, 25 bp, Homo sapien
tatcatttgatcactctcattgccc

SEQ ID NO: 2571789 - DNA, 25 bp, Homo sapien
ggtctaccatccaggacacagctgt

SEQ ID NO: 2571790 - DNA, 25 bp, Homo sapien
agaacgctcctctcctttatcaaca

SEQ ID NO: 2571791 - DNA, 25 bp, Homo sapien
gaattgacttggcaggagaccttcc

SEQ ID NO: 2571792 - DNA, 25 bp, Homo sapien
tcagggctttcaaccgagtatgtct

SEQ ID NO: 2571793 - DNA, 25 bp, Homo sapien
ctgtgacaagggactagaggactgc

SEQ ID NO: 2571794 - DNA, 25 bp, Homo sapien
tcaaacctgctgagtatgaagacag

SEQ ID NO: 2571795 - DNA, 25 bp, Homo sapien
atggtggagcctcgaagccaaccag

SEQ ID NO: 2571796 - DNA, 25 bp, Homo sapien
tcaacaatatggtggagcctcgaag

SEQ ID NO: 2571797 - DNA, 25 bp, Homo sapien
aaccagcgcgcaagctctctcgcca

SEQ ID NO: 2571798 - DNA, 25 bp, Homo sapien
tctctcgccacatgttcttggagat

SEQ ID NO: 2571799 - DNA, 25 bp, Homo sapien
tgttatgggaccagttaggatgcat

SEQ ID NO: 2571800 - DNA, 25 bp, Homo sapien
ctgttatgggaccagttaggatgca

SEQ ID NO: 2571801 - DNA, 25 bp, Homo sapien
gggcagtagtaatgagctggtccat

SEQ ID NO: 2571802 - DNA, 25 bp, Homo sapien
tccatgtcctgtcaatgcgcacctt

SEQ ID NO: 2571803 - DNA, 25 bp, Homo sapien
gggggttcaggccatgggacaaaca

SEQ ID NO: 2571804 - DNA, 25 bp, Homo sapien
tgagctggtccatgtcctgtcaatg

SEQ ID NO: 2571805 - DNA, 25 bp, Homo sapien
tttttccagattgatcgcagagttg

SEQ ID NO: 2571806 - DNA, 25 bp, Homo sapien
cagagaatgtgtgcacagtgccagg

SEQ ID NO: 2571807 - DNA, 25 bp, Homo sapien
ccagattgatcgcagagttgaacaa

SEQ ID NO: 2571808 - DNA, 25 bp, Homo sapien
gcatctatctcagcgagcgggggaa

SEQ ID NO: 2571809 - DNA, 25 bp, Homo sapien
tgggcaggggcagaggagtgtgccc

SEQ ID NO: 2571810 - DNA, 25 bp, Homo sapien
gggagaggaagtgggcaggggcaga

SEQ ID NO: 2571811 - DNA, 25 bp, Homo sapien
ggcaggggcagaggagtgtgcccac

SEQ ID NO: 2571812 - DNA, 25 bp, Homo sapien
ctgggagaggaagtgggcaggggca

SEQ ID NO: 2571813 - DNA, 25 bp, Homo sapien
aaggctgcatggcaggtgaccatta

SEQ ID NO: 2571814 - DNA, 25 bp, Homo sapien
gaccattatcaccagtgtcgccagc

SEQ ID NO: 2571815 - DNA, 25 bp, Homo sapien
tggcaggtgaccattatcaccagtg

SEQ ID NO: 2571816 - DNA, 25 bp, Homo sapien
attatcaccagtgtcgccagccagg

SEQ ID NO: 2571817 - DNA, 25 bp, Homo sapien
gtacccatgtatggcagttcccaag

SEQ ID NO: 2571818 - DNA, 25 bp, Homo sapien
ggtacctctttggtcactttgccag

SEQ ID NO: 2571819 - DNA, 25 bp, Homo sapien
caggccctcaaagtgacacagtcag

SEQ ID NO: 2571820 - DNA, 25 bp, Homo sapien
catgctattagaatcactgttgtgg

SEQ ID NO: 2571821 - DNA, 25 bp, Homo sapien
ggagcttcacagttaaccaagccat

SEQ ID NO: 2571822 - DNA, 25 bp, Homo sapien
ttttattgagagacggaacagctct

SEQ ID NO: 2571823 - DNA, 25 bp, Homo sapien
gatgcacgggtggttcccgacctga

SEQ ID NO: 2571824 - DNA, 25 bp, Homo sapien
ggaagatgggttctcaatccaggct

SEQ ID NO: 2571825 - DNA, 25 bp, Homo sapien
ctgtgtgaggctgtcacggccacga

SEQ ID NO: 2571826 - DNA, 25 bp, Homo sapien
gcctcgggaacccacgtgctgctgt

SEQ ID NO: 2571827 - DNA, 25 bp, Homo sapien
acggccacgaggatgaccacaacca

SEQ ID NO: 2571828 - DNA, 25 bp, Homo sapien
ggctgtcacggccacgaggatgacc

SEQ ID NO: 2571829 - DNA, 25 bp, Homo sapien
tcatagacagagaatcaggactgcc

SEQ ID NO: 2571830 - DNA, 25 bp, Homo sapien
gatgaagctgagaattgtgaacccc

SEQ ID NO: 2571831 - DNA, 25 bp, Homo sapien
tcactactgaaacgtgggcactgag

SEQ ID NO: 2571832 - DNA, 25 bp, Homo sapien
tgctgctacaactcggatgcacagt

SEQ ID NO: 2571833 - DNA, 25 bp, Homo sapien
gaatgtccctggtgtaacgtcgagg

SEQ ID NO: 2571834 - DNA, 25 bp, Homo sapien
tagaacctcagtgtactcccaggga

SEQ ID NO: 2571835 - DNA, 25 bp, Homo sapien
caggaatcgtgcaaagcaagggcca

SEQ ID NO: 2571836 - DNA, 25 bp, Homo sapien
ggaccggcttggctttattgatgca

SEQ ID NO: 2571837 - DNA, 25 bp, Homo sapien
tgggtgagctggtggtagagggggc

SEQ ID NO: 2571838 - DNA, 25 bp, Homo sapien
gacattggagcaggcccttctgctg

SEQ ID NO: 2571839 - DNA, 25 bp, Homo sapien
tggcccacctgacccgaggaacttg

SEQ ID NO: 2571840 - DNA, 25 bp, Homo sapien
tggccccgacattggagcaggccct

SEQ ID NO: 2571841 - DNA, 25 bp, Homo sapien
gcgtgtccctgaacttagctcttgg

SEQ ID NO: 2571842 - DNA, 25 bp, Homo sapien
cacataggcggtgccagctgatgaa

SEQ ID NO: 2571843 - DNA, 25 bp, Homo sapien
gcggtgccagctgatgaaggtgcat

SEQ ID NO: 2571844 - DNA, 25 bp, Homo sapien
gccagagacacataggcggtgccag

SEQ ID NO: 2571845 - DNA, 25 bp, Homo sapien
agacccctgtggccagagacacata

SEQ ID NO: 2571846 - DNA, 25 bp, Homo sapien
cacactggattctcgatgaagggcc

SEQ ID NO: 2571847 - DNA, 25 bp, Homo sapien
tgaagggcccccatgaaagcaccct

SEQ ID NO: 2571848 - DNA, 25 bp, Homo sapien
agcacactggattctcgatgaaggg

SEQ ID NO: 2571849 - DNA, 25 bp, Homo sapien
cactggattctcgatgaagggcccc

SEQ ID NO: 2571850 - DNA, 25 bp, Homo sapien
aaactcctgcaactcggccaggcag

SEQ ID NO: 2571851 - DNA, 25 bp, Homo sapien
gaccctgacggcagaagtcctctgc

SEQ ID NO: 2571852 - DNA, 25 bp, Homo sapien
gccaggacagacagcgaacagtagc

SEQ ID NO: 2571853 - DNA, 25 bp, Homo sapien
cccgcggagaaggaacatgcgtgca

SEQ ID NO: 2571854 - DNA, 25 bp, Homo sapien
ccgggctgcctctgacgttggggca

SEQ ID NO: 2571855 - DNA, 25 bp, Homo sapien
tgggtgccagcttcctcgtagctgc

SEQ ID NO: 2571856 - DNA, 25 bp, Homo sapien
tgcagcccctggcacgtctcccttc

SEQ ID NO: 2571857 - DNA, 25 bp, Homo sapien
cctggcacgtctcccttcttgagct

SEQ ID NO: 2571858 - DNA, 25 bp, Homo sapien
gagtcgattttgatcagcgcctccc

SEQ ID NO: 2571859 - DNA, 25 bp, Homo sapien
agtcccggggccgagcttcagagca

SEQ ID NO: 2571860 - DNA, 25 bp, Homo sapien
cagagacgatgtcgtccacggcttc

SEQ ID NO: 2571861 - DNA, 25 bp, Homo sapien
tccttgtcctcgagaggggccccag

SEQ ID NO: 2571862 - DNA, 25 bp, Homo sapien
aacatcggagagtctggagcagcgc

SEQ ID NO: 2571863 - DNA, 25 bp, Homo sapien
gagcatctgatggtctggagcagca

SEQ ID NO: 2571864 - DNA, 25 bp, Homo sapien
tgagcatctgatggtctggagcagc

SEQ ID NO: 2571865 - DNA, 25 bp, Homo sapien
acccacaaccacaggtgaacatcgg

SEQ ID NO: 2571866 - DNA, 25 bp, Homo sapien
gtgggttccgctccaggctgccgga

SEQ ID NO: 2571867 - DNA, 25 bp, Homo sapien
tgggttccgctccaggctgccggat

SEQ ID NO: 2571868 - DNA, 25 bp, Homo sapien
gctccaggctgtcaggtgctcgctg

SEQ ID NO: 2571869 - DNA, 25 bp, Homo sapien
cggttccaggctgtctgatgctcac

SEQ ID NO: 2571870 - DNA, 25 bp, Homo sapien
tcaggtgctcgctgggggtgtggct

SEQ ID NO: 2571871 - DNA, 25 bp, Homo sapien
ggtgtggctgcggttccaggctgtc

SEQ ID NO: 2571872 - DNA, 25 bp, Homo sapien
catctgggcgtatgggtgctgttcc

SEQ ID NO: 2571873 - DNA, 25 bp, Homo sapien
ctcatctgggcgtatgggtgctgtt

SEQ ID NO: 2571874 - DNA, 25 bp, Homo sapien
gctcatctgggcgtatgggtgctgt

SEQ ID NO: 2571875 - DNA, 25 bp, Homo sapien
tcatctgggcgtatgggtgctgttc

SEQ ID NO: 2571876 - DNA, 25 bp, Homo sapien
gtgggtgctgctccgtgtgttcaga

SEQ ID NO: 2571877 - DNA, 25 bp, Homo sapien
gctccaggctgtcggatgctcgcct

SEQ ID NO: 2571878 - DNA, 25 bp, Homo sapien
ggtgctgctccgtgtgttcagatgc

SEQ ID NO: 2571879 - DNA, 25 bp, Homo sapien
tgggtgctgctccgtgtgttcagat

SEQ ID NO: 2571880 - DNA, 25 bp, Homo sapien
ttccaggctgtcagatgctcacctg

SEQ ID NO: 2571881 - DNA, 25 bp, Homo sapien
ctgggggtgtgggtgctgctccagg

SEQ ID NO: 2571882 - DNA, 25 bp, Homo sapien
ctgctccaggctgtcagatgctcac

SEQ ID NO: 2571883 - DNA, 25 bp, Homo sapien
ctgttccaggctgtcagatgctcac

SEQ ID NO: 2571884 - DNA, 25 bp, Homo sapien
tgggtgctgttccaggccgtcagat

SEQ ID NO: 2571885 - DNA, 25 bp, Homo sapien
tgctgttccaggccgtcagatgctc

SEQ ID NO: 2571886 - DNA, 25 bp, Homo sapien
ctgttccaggccgtcagatgctcac

SEQ ID NO: 2571887 - DNA, 25 bp, Homo sapien
tgtgggtgctgttccaggccgtcag

SEQ ID NO: 2571888 - DNA, 25 bp, Homo sapien
ggtgtgggtgccgacccaggctgtc

SEQ ID NO: 2571889 - DNA, 25 bp, Homo sapien
tgcaggctgccggatgctctcctgg

SEQ ID NO: 2571890 - DNA, 25 bp, Homo sapien
atgctcgcctgttggtgtgggttct

SEQ ID NO: 2571891 - DNA, 25 bp, Homo sapien
ggtgctgctccatgcggtcagatgc

SEQ ID NO: 2571892 - DNA, 25 bp, Homo sapien
ctgctccgggaggtcagatgctcac

SEQ ID NO: 2571893 - DNA, 25 bp, Homo sapien
tgggggtactggtgctgctccggga

SEQ ID NO: 2571894 - DNA, 25 bp, Homo sapien
ctgggggtactggtgctgctccggg

SEQ ID NO: 2571895 - DNA, 25 bp, Homo sapien
gtgctgctccgggaggtcagatgct

SEQ ID NO: 2571896 - DNA, 25 bp, Homo sapien
tccaggttgtcagatgctcaccttg

SEQ ID NO: 2571897 - DNA, 25 bp, Homo sapien
tgctccaggttgtcagatgctcacc

SEQ ID NO: 2571898 - DNA, 25 bp, Homo sapien
caggttgtcagatgctcaccttggg

SEQ ID NO: 2571899 - DNA, 25 bp, Homo sapien
ctgctccaggttgtcagatgctcac

SEQ ID NO: 2571900 - DNA, 25 bp, Homo sapien
atgctcaactgggggtgtgggtgct

SEQ ID NO: 2571901 - DNA, 25 bp, Homo sapien
ctgctccagaccatcagatgctcaa

SEQ ID NO: 2571902 - DNA, 25 bp, Homo sapien
tgggtgctgctccagaccatcagat

SEQ ID NO: 2571903 - DNA, 25 bp, Homo sapien
ctgctccaggctgtcggatgctcac

SEQ ID NO: 2571904 - DNA, 25 bp, Homo sapien
tgggtgtgcagggtgctgttccagg

SEQ ID NO: 2571905 - DNA, 25 bp, Homo sapien
gtgctgttccaggctgtcagagact

SEQ ID NO: 2571906 - DNA, 25 bp, Homo sapien
ctgttccaggctgtcagagactcac

SEQ ID NO: 2571907 - DNA, 25 bp, Homo sapien
ctgggtgtgcagggtgctgttccag

SEQ ID NO: 2571908 - DNA, 25 bp, Homo sapien
ctgctccaggttgtcggttgcccgc

SEQ ID NO: 2571909 - DNA, 25 bp, Homo sapien
tccaggttgtcggttgcccgcctgg

SEQ ID NO: 2571910 - DNA, 25 bp, Homo sapien
tgctccaggttgtcggttgcccgcc

SEQ ID NO: 2571911 - DNA, 25 bp, Homo sapien
gctccaggttgtcggttgcccgcct

SEQ ID NO: 2571912 - DNA, 25 bp, Homo sapien
tgtgggtgtcggtgctgttccaggc

SEQ ID NO: 2571913 - DNA, 25 bp, Homo sapien
ctcgcctgtgggtgtcggtgctgtt

SEQ ID NO: 2571914 - DNA, 25 bp, Homo sapien
ctgttccaggccgtcagatgctcgc

SEQ ID NO: 2571915 - DNA, 25 bp, Homo sapien
gatgctcgcctgtgggtgtcggtgc

SEQ ID NO: 2571916 - DNA, 25 bp, Homo sapien
cgttccaggccgtcagatgctcgcc

SEQ ID NO: 2571917 - DNA, 25 bp, Homo sapien
gccgttccaggccgtcagatgctcg

SEQ ID NO: 2571918 - DNA, 25 bp, Homo sapien
tgtgggtgccgttccaggccgtcag

SEQ ID NO: 2571919 - DNA, 25 bp, Homo sapien
tgggtgccgttccaggccgtcagat

SEQ ID NO: 2571920 - DNA, 25 bp, Homo sapien
gtgcagggtgctgttgcaggctgtc

SEQ ID NO: 2571921 - DNA, 25 bp, Homo sapien
gcagggtgctgttgcaggctgtcag

SEQ ID NO: 2571922 - DNA, 25 bp, Homo sapien
tgctgttgcaggctgtcagatgctc

SEQ ID NO: 2571923 - DNA, 25 bp, Homo sapien
ctgttgcaggctgtcagatgctcac

SEQ ID NO: 2571924 - DNA, 25 bp, Homo sapien
ccaggctgtcagaggctcacctggg

SEQ ID NO: 2571925 - DNA, 25 bp, Homo sapien
gttccaggctgtcagaggctcacct

SEQ ID NO: 2571926 - DNA, 25 bp, Homo sapien
ggctgtcagaggctcacctgggcgt

SEQ ID NO: 2571927 - DNA, 25 bp, Homo sapien
ctgtcagaggctcacctgggcgtgt

SEQ ID NO: 2571928 - DNA, 25 bp, Homo sapien
gtgctgctccaggatgtcagatgct

SEQ ID NO: 2571929 - DNA, 25 bp, Homo sapien
ctgctccaggatgtcagatgctccc

SEQ ID NO: 2571930 - DNA, 25 bp, Homo sapien
ctggggttgtcggtgctgctccagg

SEQ ID NO: 2571931 - DNA, 25 bp, Homo sapien
tggggttgtcggtgctgctccagga

SEQ ID NO: 2571932 - DNA, 25 bp, Homo sapien
gggtgctgctacgggctgtcagatt

SEQ ID NO: 2571933 - DNA, 25 bp, Homo sapien
gctgctacgggctgtcagattctca

SEQ ID NO: 2571934 - DNA, 25 bp, Homo sapien
ctgctacgggctgtcagattctcac

SEQ ID NO: 2571935 - DNA, 25 bp, Homo sapien
ctgctctgttcggtcagatgctcgc

SEQ ID NO: 2571936 - DNA, 25 bp, Homo sapien
gctgctccagactctccgatgctca

SEQ ID NO: 2571937 - DNA, 25 bp, Homo sapien
cgcctgggagtgtggttgctgctcc

SEQ ID NO: 2571938 - DNA, 25 bp, Homo sapien
tccaggtcatcggatgctcgcctgg

SEQ ID NO: 2571939 - DNA, 25 bp, Homo sapien
ctgctccaggctgtcggatgctcac

SEQ ID NO: 2571940 - DNA, 25 bp, Homo sapien
caggtcatcggatgctcgcctggga

SEQ ID NO: 2571941 - DNA, 25 bp, Homo sapien
ttctgctgcaggctgccggatgctc

SEQ ID NO: 2571942 - DNA, 25 bp, Homo sapien
ggtgtgggtgccgacccaggctgtc

SEQ ID NO: 2571943 - DNA, 25 bp, Homo sapien
ggctgtcagatgctcgcctgttggt

SEQ ID NO: 2571944 - DNA, 25 bp, Homo sapien
tccaggccatcagatgcccacctgg

SEQ ID NO: 2571945 - DNA, 25 bp, Homo sapien
tgctgttccaggctatcagatgctc

SEQ ID NO: 2571946 - DNA, 25 bp, Homo sapien
ctgttccaggctatcagatgctcgc

SEQ ID NO: 2571947 - DNA, 25 bp, Homo sapien
tgtgggtgctgttccaggctatcag

SEQ ID NO: 2571948 - DNA, 25 bp, Homo sapien
tgggtgctgttccaggctatcagat

SEQ ID NO: 2571949 - DNA, 25 bp, Homo sapien
gtgctgttccaggctgtcagatgct

SEQ ID NO: 2571950 - DNA, 25 bp, Homo sapien
tgctgttccaggctgtcagatgctc

SEQ ID NO: 2571951 - DNA, 25 bp, Homo sapien
gctgttccaggctgtcagatgctca

SEQ ID NO: 2571952 - DNA, 25 bp, Homo sapien
ctgttgttgtcggtgcagctccagg

SEQ ID NO: 2571953 - DNA, 25 bp, Homo sapien
ggtgtgggtgccgacccaggctgtc

SEQ ID NO: 2571954 - DNA, 25 bp, Homo sapien
ttctgctgcaggctgccggatgctc

SEQ ID NO: 2571955 - DNA, 25 bp, Homo sapien
ctcgcctgttggtgtgggttctgct

SEQ ID NO: 2571956 - DNA, 25 bp, Homo sapien
ggctgtcagatgctcgcctgttggt

SEQ ID NO: 2571957 - DNA, 25 bp, Homo sapien
tgctgttccaggctatcagatgctc

SEQ ID NO: 2571958 - DNA, 25 bp, Homo sapien
ctgttccaggctatcagatgctcgc

SEQ ID NO: 2571959 - DNA, 25 bp, Homo sapien
tgtgggtgctgttccaggctatcag

SEQ ID NO: 2571960 - DNA, 25 bp, Homo sapien
tgggtgctgttccaggctatcagat

SEQ ID NO: 2571961 - DNA, 25 bp, Homo sapien
ctgtgcgtgtgggtgctgctgcggg

SEQ ID NO: 2571962 - DNA, 25 bp, Homo sapien
ctgctgcgggctgtcagatgctcac

SEQ ID NO: 2571963 - DNA, 25 bp, Homo sapien
tgtgcgtgtgggtgctgctgcgggc

SEQ ID NO: 2571964 - DNA, 25 bp, Homo sapien
gtgctgctgcgggctgtcagatgct

SEQ ID NO: 2571965 - DNA, 25 bp, Homo sapien
gctgctccagactctccgatgctca

SEQ ID NO: 2571966 - DNA, 25 bp, Homo sapien
gtgtgatgctccagacaatcagatt

SEQ ID NO: 2571967 - DNA, 25 bp, Homo sapien
tgtgatgctccagacaatcagattc

SEQ ID NO: 2571968 - DNA, 25 bp, Homo sapien
tgtgtgatgctccagacaatcagat

SEQ ID NO: 2571969 - DNA, 25 bp, Homo sapien
ctgctccacgatgtcagatgctcac

SEQ ID NO: 2571970 - DNA, 25 bp, Homo sapien
gctgctccacgatgtcagatgctca

SEQ ID NO: 2571971 - DNA, 25 bp, Homo sapien
gtgggtatgggtgttgttccaggct

SEQ ID NO: 2571972 - DNA, 25 bp, Homo sapien
tgggtatgggtgttgttccaggctg

SEQ ID NO: 2571973 - DNA, 25 bp, Homo sapien
gtgggttccgctccaggctgccgga

SEQ ID NO: 2571974 - DNA, 25 bp, Homo sapien
tgggttccgctccaggctgccggat

SEQ ID NO: 2571975 - DNA, 25 bp, Homo sapien
ctgctccaggctgtcggatgctcgc

SEQ ID NO: 2571976 - DNA, 25 bp, Homo sapien
ctgggtgtgtgggtgctgctccagg

SEQ ID NO: 2571977 - DNA, 25 bp, Homo sapien
tgggtgtgtgggtgctgctccaggc

SEQ ID NO: 2571978 - DNA, 25 bp, Homo sapien
gtgctgctccaggctgtcggatgct

SEQ ID NO: 2571979 - DNA, 25 bp, Homo sapien
tggggttgtcggtgctgctccagga

SEQ ID NO: 2571980 - DNA, 25 bp, Homo sapien
ctgctccaggatgtcagatgctccc

SEQ ID NO: 2571981 - DNA, 25 bp, Homo sapien
gtgctgctccaggatgtcagatgct

SEQ ID NO: 2571982 - DNA, 25 bp, Homo sapien
ctggggttgtcggtgctgctccagg

SEQ ID NO: 2571983 - DNA, 25 bp, Homo sapien
ctgctctgttcggtcagatgctcgc

SEQ ID NO: 2571984 - DNA, 25 bp, Homo sapien
ctgctccaggctgtcggatgctcac

SEQ ID NO: 2571985 - DNA, 25 bp, Homo sapien
ttgtgggtgctgctccagaccatca

SEQ ID NO: 2571986 - DNA, 25 bp, Homo sapien
gggtgctgctccagaccatcagttg

SEQ ID NO: 2571987 - DNA, 25 bp, Homo sapien
catcagttgctcaactgggggtgtg

SEQ ID NO: 2571988 - DNA, 25 bp, Homo sapien
ctgggtgtgcagggtgctgttccag

SEQ ID NO: 2571989 - DNA, 25 bp, Homo sapien
tgggtgtgcagggtgctgttccagg

SEQ ID NO: 2571990 - DNA, 25 bp, Homo sapien
gtgctgttccaggctgtcagagact

SEQ ID NO: 2571991 - DNA, 25 bp, Homo sapien
ctgttccaggctgtcagagactcac

SEQ ID NO: 2571992 - DNA, 25 bp, Homo sapien
tccaggttgtcggttgcccgcctgg

SEQ ID NO: 2571993 - DNA, 25 bp, Homo sapien
ctgctccaggttgtcggttgcccgc

SEQ ID NO: 2571994 - DNA, 25 bp, Homo sapien
tgctccaggttgtcggttgcccgcc

SEQ ID NO: 2571995 - DNA, 25 bp, Homo sapien
gctccaggttgtcggttgcccgcct

SEQ ID NO: 2571996 - DNA, 25 bp, Homo sapien
ctgttccaggccgtcagatgctcgc

SEQ ID NO: 2571997 - DNA, 25 bp, Homo sapien
ctcgcctgtgggtgtcggtgctgtt

SEQ ID NO: 2571998 - DNA, 25 bp, Homo sapien
tgtgggtgtcggtgctgttccaggc

SEQ ID NO: 2571999 - DNA, 25 bp, Homo sapien
gatgctcgcctgtgggtgtcggtgc

SEQ ID NO: 2572000 - DNA, 25 bp, Homo sapien
gctgttacaggctgtcagaggctca

SEQ ID NO: 2572001 - DNA, 25 bp, Homo sapien
tacaggctgtcagaggctcacctgg

SEQ ID NO: 2572002 - DNA, 25 bp, Homo sapien
gtgcaggctgctgttacaggctgtc

SEQ ID NO: 2572003 - DNA, 25 bp, Homo sapien
ggctgctgttacaggctgtcagagg

SEQ ID NO: 2572004 - DNA, 25 bp, Homo sapien
gccgttccaggccgtcagatgctcg

SEQ ID NO: 2572005 - DNA, 25 bp, Homo sapien
tgtgggtgccgttccaggccgtcag

SEQ ID NO: 2572006 - DNA, 25 bp, Homo sapien
cgttccaggccgtcagatgctcgcc

SEQ ID NO: 2572007 - DNA, 25 bp, Homo sapien
tgggtgccgttccaggccgtcagat

SEQ ID NO: 2572008 - DNA, 25 bp, Homo sapien
gctgttccaggctgtcagatgctca

SEQ ID NO: 2572009 - DNA, 25 bp, Homo sapien
gtgtgggtgctgttccaggctgtca

SEQ ID NO: 2572010 - DNA, 25 bp, Homo sapien
tgggtgctgttccaggctgtcagat

SEQ ID NO: 2572011 - DNA, 25 bp, Homo sapien
gtgctgttccaggctgtcagatgct

SEQ ID NO: 2572012 - DNA, 25 bp, Homo sapien
ctggggttgtcggtgctgctccagg

SEQ ID NO: 2572013 - DNA, 25 bp, Homo sapien
ctgctccaggatgtcagatgctccc

SEQ ID NO: 2572014 - DNA, 25 bp, Homo sapien
tggggttgtcggtgctgctccagga

SEQ ID NO: 2572015 - DNA, 25 bp, Homo sapien
gtgctgctccaggatgtcagatgct

SEQ ID NO: 2572016 - DNA, 25 bp, Homo sapien
ctgctacgggctgtcagattctcac

SEQ ID NO: 2572017 - DNA, 25 bp, Homo sapien
gggtgctgctacgggctgtcagatt

SEQ ID NO: 2572018 - DNA, 25 bp, Homo sapien
gctgctacgggctgtcagattctca

SEQ ID NO: 2572019 - DNA, 25 bp, Homo sapien
cgcctgggagtgtggttgctgctcc

SEQ ID NO: 2572020 - DNA, 25 bp, Homo sapien
tccaggtcatcggatgctcgcctgg

SEQ ID NO: 2572021 - DNA, 25 bp, Homo sapien
caggtcatcggatgctcgcctggga

SEQ ID NO: 2572022 - DNA, 25 bp, Homo sapien
ctgctccaggctgtcggatgctcac

SEQ ID NO: 2572023 - DNA, 25 bp, Homo sapien
gctgttccaggctatcagatgctcg

SEQ ID NO: 2572024 - DNA, 25 bp, Homo sapien
tgcaggctgccggatgctctcctgg

SEQ ID NO: 2572025 - DNA, 25 bp, Homo sapien
ggctgtcagatgctcgcctgttggt

SEQ ID NO: 2572026 - DNA, 25 bp, Homo sapien
ggtgtgggtgccgacccaggctgtc

SEQ ID NO: 2572027 - DNA, 25 bp, Homo sapien
tgtgcgtgtgggtgctgctgcgggc

SEQ ID NO: 2572028 - DNA, 25 bp, Homo sapien
gtgctgctgcgggctgtcagatgct

SEQ ID NO: 2572029 - DNA, 25 bp, Homo sapien
ctgtgcgtgtgggtgctgctgcggg

SEQ ID NO: 2572030 - DNA, 25 bp, Homo sapien
ctgctgcgggctgtcagatgctcac

SEQ ID NO: 2572031 - DNA, 25 bp, Homo sapien
gctgctccagactctccgatgctca

SEQ ID NO: 2572032 - DNA, 25 bp, Homo sapien
gctgctccacgatgtcagatgctca

SEQ ID NO: 2572033 - DNA, 25 bp, Homo sapien
ctgctccacgatgtcagatgctcac

SEQ ID NO: 2572034 - DNA, 25 bp, Homo sapien
gtgggtatgggtgttgttccaggct

SEQ ID NO: 2572035 - DNA, 25 bp, Homo sapien
tgggtatgggtgttgttccaggctg

SEQ ID NO: 2572036 - DNA, 25 bp, Homo sapien
gtgggttccgctccaggctgccgga

SEQ ID NO: 2572037 - DNA, 25 bp, Homo sapien
tgggttccgctccaggctgccggat

SEQ ID NO: 2572038 - DNA, 25 bp, Homo sapien
cggttccaggctgtctgatgctcac

SEQ ID NO: 2572039 - DNA, 25 bp, Homo sapien
ggtgtggctgcggttccaggctgtc

SEQ ID NO: 2572040 - DNA, 25 bp, Homo sapien
tgggggtgtggctgcggttccaggc

SEQ ID NO: 2572041 - DNA, 25 bp, Homo sapien
tggctgcggttccaggctgtctgat

SEQ ID NO: 2572042 - DNA, 25 bp, Homo sapien
gtgctgctccagaccatcagatgcg

SEQ ID NO: 2572043 - DNA, 25 bp, Homo sapien
ggtgtgggtgctgctccagaccatc

SEQ ID NO: 2572044 - DNA, 25 bp, Homo sapien
ctgctccagaccatcagatgcgcaa

SEQ ID NO: 2572045 - DNA, 25 bp, Homo sapien
tgggtgctgctccagaccatcagat

SEQ ID NO: 2572046 - DNA, 25 bp, Homo sapien
ggtgctgctccaggctgtcagttgc

SEQ ID NO: 2572047 - DNA, 25 bp, Homo sapien
tgtgggtgctgctccaggctgtcag

SEQ ID NO: 2572048 - DNA, 25 bp, Homo sapien
tgggtgctgctccaggctgtcagtt

SEQ ID NO: 2572049 - DNA, 25 bp, Homo sapien
gtgctgctccaggctgtcagttgct

SEQ ID NO: 2572050 - DNA, 25 bp, Homo sapien
ggcactgctccgggctgtcagatgc

SEQ ID NO: 2572051 - DNA, 25 bp, Homo sapien
gctgtcagatgctcgcctgtggctg

SEQ ID NO: 2572052 - DNA, 25 bp, Homo sapien
gctgctccagactctacgatgctca

SEQ ID NO: 2572053 - DNA, 25 bp, Homo sapien
tggctgtgggcgctgctccagactc

SEQ ID NO: 2572054 - DNA, 25 bp, Homo sapien
ccaggctgtcggatgctcacctggg

SEQ ID NO: 2572055 - DNA, 25 bp, Homo sapien
cgcctgggagtgtggttgctgctcc

SEQ ID NO: 2572056 - DNA, 25 bp, Homo sapien
tccaggtcatcggatgctcgcctgg

SEQ ID NO: 2572057 - DNA, 25 bp, Homo sapien
caggtcatcggatgctcgcctggga

SEQ ID NO: 2572058 - DNA, 25 bp, Homo sapien
cggttccaggctgtctgatgctcac

SEQ ID NO: 2572059 - DNA, 25 bp, Homo sapien
tggctgcggttccaggctgtctgat

SEQ ID NO: 2572060 - DNA, 25 bp, Homo sapien
ggtgtggctgcggttccaggctgtc

SEQ ID NO: 2572061 - DNA, 25 bp, Homo sapien
tgggggtgtggctgcggttccaggc

SEQ ID NO: 2572062 - DNA, 25 bp, Homo sapien
gtgggtgctgctccgtgtgttcaga

SEQ ID NO: 2572063 - DNA, 25 bp, Homo sapien
ggtgctgctccgtgtgttcagatgc

SEQ ID NO: 2572064 - DNA, 25 bp, Homo sapien
gctccaggctgtcggatgctcgcct

SEQ ID NO: 2572065 - DNA, 25 bp, Homo sapien
tgggtgctgctccgtgtgttcagat

SEQ ID NO: 2572066 - DNA, 25 bp, Homo sapien
ggtgtgggtgccgacccaggctgtc

SEQ ID NO: 2572067 - DNA, 25 bp, Homo sapien
ttctgctgcaggctgccggatgctc

SEQ ID NO: 2572068 - DNA, 25 bp, Homo sapien
ggctgtcagatgctcgcctgttggt

SEQ ID NO: 2572069 - DNA, 25 bp, Homo sapien
atgctcgcctgttggtgtgggttct

SEQ ID NO: 2572070 - DNA, 25 bp, Homo sapien
aacagcacccatacgcccagatgag

SEQ ID NO: 2572071 - DNA, 25 bp, Homo sapien
tggaacagcacccatacgcccagat

SEQ ID NO: 2572072 - DNA, 25 bp, Homo sapien
agcacccatacgcccagatgagcat

SEQ ID NO: 2572073 - DNA, 25 bp, Homo sapien
atggaacagcacccatacgcccaga

SEQ ID NO: 2572074 - DNA, 25 bp, Homo sapien
aggtgagcatccgacagcctggagc

SEQ ID NO: 2572075 - DNA, 25 bp, Homo sapien
gagcatccgacagcctggagcagca

SEQ ID NO: 2572076 - DNA, 25 bp, Homo sapien
cccaggtgagcatccgacagcctgg

SEQ ID NO: 2572077 - DNA, 25 bp, Homo sapien
ggtgagcatccgacagcctggagca

SEQ ID NO: 2572078 - DNA, 25 bp, Homo sapien
tgagcatctgacagcctggaacagc

SEQ ID NO: 2572079 - DNA, 25 bp, Homo sapien
cagctgaaatcctggaacagcaccc

SEQ ID NO: 2572080 - DNA, 25 bp, Homo sapien
acccccaggtgagcagctgaaatcc

SEQ ID NO: 2572081 - DNA, 25 bp, Homo sapien
caggtgagcatctgacagcctggaa

SEQ ID NO: 2572082 - DNA, 25 bp, Homo sapien
acgagcataggacagcctggagcag

SEQ ID NO: 2572083 - DNA, 25 bp, Homo sapien
cacactcccagacgagcataggaca

SEQ ID NO: 2572084 - DNA, 25 bp, Homo sapien
acccacatcgccaggcgagcatccg

SEQ ID NO: 2572085 - DNA, 25 bp, Homo sapien
gcgagcatccgccagcctggaacag

SEQ ID NO: 2572086 - DNA, 25 bp, Homo sapien
gcctggatcagcacccacactccca

SEQ ID NO: 2572087 - DNA, 25 bp, Homo sapien
agcacccacactcccaggcgagcat

SEQ ID NO: 2572088 - DNA, 25 bp, Homo sapien
tggatcagcacccacactcccaggc

SEQ ID NO: 2572089 - DNA, 25 bp, Homo sapien
acactcccaggcgagcatctgacag

SEQ ID NO: 2572090 - DNA, 25 bp, Homo sapien
cgaggtgagcatctgacagcctgga

SEQ ID NO: 2572091 - DNA, 25 bp, Homo sapien
gagcagcgcccacacaccgaggtga

SEQ ID NO: 2572092 - DNA, 25 bp, Homo sapien
tctgacagcgtggagcagcgcccac

SEQ ID NO: 2572093 - DNA, 25 bp, Homo sapien
agcgcccacacaccgaggtgagcat

SEQ ID NO: 2572094 - DNA, 25 bp, Homo sapien
ttttggatgttatttcctccaaatc

SEQ ID NO: 2572095 - DNA, 25 bp, Homo sapien
tataaggacacaagttgatatgttt

SEQ ID NO: 2572096 - DNA, 25 bp, Homo sapien
ggatgttatttcctccaaatctcat

SEQ ID NO: 2572097 - DNA, 25 bp, Homo sapien
acgtagatcagcgatacgatgattc

SEQ ID NO: 2572098 - DNA, 25 bp, Homo sapien
gtagatcagcgatacgatgattcca

SEQ ID NO: 2572099 - DNA, 25 bp, Homo sapien
gtttacgtagatcagcgatacgatg

SEQ ID NO: 2572100 - DNA, 25 bp, Homo sapien
ttacgtagatcagcgatacgatgat

SEQ ID NO: 2572101 - DNA, 25 bp, Homo sapien
ttaccgaagtaaccagtaggcattc

SEQ ID NO: 2572102 - DNA, 25 bp, Homo sapien
agtgaaggtcctcacaccaagatat

SEQ ID NO: 2572103 - DNA, 25 bp, Homo sapien
taggcattcccagatacagtgaagg

SEQ ID NO: 2572104 - DNA, 25 bp, Homo sapien
taccgaagtaaccagtaggcattcc

SEQ ID NO: 2572105 - DNA, 25 bp, Homo sapien
tctctctcacataacagtacaaaag

SEQ ID NO: 2572106 - DNA, 25 bp, Homo sapien
taagtggataacctagggtggagag

SEQ ID NO: 2572107 - DNA, 25 bp, Homo sapien
cagggaacccagactagccagtcag

SEQ ID NO: 2572108 - DNA, 25 bp, Homo sapien
tgctgtcttcatcaattggcgtcca

SEQ ID NO: 2572109 - DNA, 25 bp, Homo sapien
gcccaaacttactgggcccaatcta

SEQ ID NO: 2572110 - DNA, 25 bp, Homo sapien
tgcccgcatctcttcctttcacatc

SEQ ID NO: 2572111 - DNA, 25 bp, Homo sapien
actgggcccaatctaccggcatcta

SEQ ID NO: 2572112 - DNA, 25 bp, Homo sapien
ttcacatcccaacggcccaaactta

SEQ ID NO: 2572113 - DNA, 25 bp, Homo sapien
gggctagcttaaacttcaggcagga

SEQ ID NO: 2572114 - DNA, 25 bp, Homo sapien
gtcatgggctagcttaaacttcagg

SEQ ID NO: 2572115 - DNA, 25 bp, Homo sapien
tgtagtcatgggctagcttaaactt

SEQ ID NO: 2572116 - DNA, 25 bp, Homo sapien
acttgtgtagtcatgggctagctta

SEQ ID NO: 2572117 - DNA, 25 bp, Homo sapien
tggagtatatttggcagtctctgtc

SEQ ID NO: 2572118 - DNA, 25 bp, Homo sapien
tggcagtctctgtcataggtaggta

SEQ ID NO: 2572119 - DNA, 25 bp, Homo sapien
gcagtctctgtcataggtaggtatt

SEQ ID NO: 2572120 - DNA, 25 bp, Homo sapien
gaatggctactggagtatatttggc

SEQ ID NO: 2572121 - DNA, 25 bp, Homo sapien
gcttctgacagcttggtatatgcct

SEQ ID NO: 2572122 - DNA, 25 bp, Homo sapien
ttgagttactaaatacaattcaaca

SEQ ID NO: 2572123 - DNA, 25 bp, Homo sapien
caattcaacagaaataagatggtgt

SEQ ID NO: 2572124 - DNA, 25 bp, Homo sapien
ttttaaatgaagctgcttctgacag

SEQ ID NO: 2572125 - DNA, 25 bp, Homo sapien
gcaattggtagttgtgatttttcca

SEQ ID NO: 2572126 - DNA, 25 bp, Homo sapien
cggtgcaattggtagttgtgatttt

SEQ ID NO: 2572127 - DNA, 25 bp, Homo sapien
attggtagttgtgatttttccagcc

SEQ ID NO: 2572128 - DNA, 25 bp, Homo sapien
gagccttagggtgaatggtgacggt

SEQ ID NO: 2572129 - DNA, 25 bp, Homo sapien
caggtcctcttcatgattttcagag

SEQ ID NO: 2572130 - DNA, 25 bp, Homo sapien
aggtcctcttcatgattttcagaga

SEQ ID NO: 2572131 - DNA, 25 bp, Homo sapien
tcctcttcatgattttcagagacat

SEQ ID NO: 2572132 - DNA, 25 bp, Homo sapien
ggtcctcttcatgattttcagagac

SEQ ID NO: 2572133 - DNA, 25 bp, Homo sapien
taggaagcgccggagaacttccttg

SEQ ID NO: 2572134 - DNA, 25 bp, Homo sapien
aagttgttgtggttacgcccagagg

SEQ ID NO: 2572135 - DNA, 25 bp, Homo sapien
aagcgccggagaacttccttggagg

SEQ ID NO: 2572136 - DNA, 25 bp, Homo sapien
taaagttgttgtggttacgcccaga

SEQ ID NO: 2572137 - DNA, 25 bp, Homo sapien
aggttcctctctgccgaagtccaga

SEQ ID NO: 2572138 - DNA, 25 bp, Homo sapien
gactttctgtcttggaaggttcctc

SEQ ID NO: 2572139 - DNA, 25 bp, Homo sapien
catggtccactggaatccttggact

SEQ ID NO: 2572140 - DNA, 25 bp, Homo sapien
tgttccctggcctgttggttgctgt

SEQ ID NO: 2572141 - DNA, 25 bp, Homo sapien
cacctgatagtctcagaagttgcat

SEQ ID NO: 2572142 - DNA, 25 bp, Homo sapien
ggctgccacctgatagtctcagaag

SEQ ID NO: 2572143 - DNA, 25 bp, Homo sapien
tgccacctgatagtctcagaagttg

SEQ ID NO: 2572144 - DNA, 25 bp, Homo sapien
agggctgccacctgatagtctcaga

SEQ ID NO: 2572145 - DNA, 25 bp, Homo sapien
gtttcctctccaaaatagttcactg

SEQ ID NO: 2572146 - DNA, 25 bp, Homo sapien
gagctcctgacacttgctaccctga

SEQ ID NO: 2572147 - DNA, 25 bp, Homo sapien
ctgaggctttgcatccggggattca

SEQ ID NO: 2572148 - DNA, 25 bp, Homo sapien
tgtttttgagtatggaggagctcct

SEQ ID NO: 2572149 - DNA, 25 bp, Homo sapien
ttatacaacgctaaaagtgctgcct

SEQ ID NO: 2572150 - DNA, 25 bp, Homo sapien
tactaagcacgagacataaacaggc

SEQ ID NO: 2572151 - DNA, 25 bp, Homo sapien
taatgatacactctttagcttagcg

SEQ ID NO: 2572152 - DNA, 25 bp, Homo sapien
taagtagaaactgaacaaggagcgt

SEQ ID NO: 2572153 - DNA, 25 bp, Homo sapien
gctactggcttagtaagtataaaaa

SEQ ID NO: 2572154 - DNA, 25 bp, Homo sapien
actgttttaactgctactggcttag

SEQ ID NO: 2572155 - DNA, 25 bp, Homo sapien
tatttgtcgaaaaacaaaagatctc

SEQ ID NO: 2572156 - DNA, 25 bp, Homo sapien
ttttgcactgttttaactgctactg

SEQ ID NO: 2572157 - DNA, 25 bp, Homo sapien
gttaacaaacagttacacctctcta

SEQ ID NO: 2572158 - DNA, 25 bp, Homo sapien
catgcaacttctatacatttgataa

SEQ ID NO: 2572159 - DNA, 25 bp, Homo sapien
actttagtcacaaagtgtcaccttt

SEQ ID NO: 2572160 - DNA, 25 bp, Homo sapien
gttgtcactgcctagtatgaaatcc

SEQ ID NO: 2572161 - DNA, 25 bp, Homo sapien
aggtgccaacatacctataaaagct

SEQ ID NO: 2572162 - DNA, 25 bp, Homo sapien
ttctgatatcaaataagaggaagga

SEQ ID NO: 2572163 - DNA, 25 bp, Homo sapien
tctgcgctctgattaacacaatgga

SEQ ID NO: 2572164 - DNA, 25 bp, Homo sapien
tactggaacagggataagttcttgg

SEQ ID NO: 2572165 - DNA, 25 bp, Homo sapien
tactgctagagaaattctaagtgca

SEQ ID NO: 2572166 - DNA, 25 bp, Homo sapien
gctagagaaattctaagtgcaagtt

SEQ ID NO: 2572167 - DNA, 25 bp, Homo sapien
tatttactgctagagaaattctaag

SEQ ID NO: 2572168 - DNA, 25 bp, Homo sapien
gagaaattctaagtgcaagttgtat

SEQ ID NO: 2572169 - DNA, 25 bp, Homo sapien
ggagatgtagcacccagtgtccttt

SEQ ID NO: 2572170 - DNA, 25 bp, Homo sapien
ttaggagatgtagcacccagtgtcc

SEQ ID NO: 2572171 - DNA, 25 bp, Homo sapien
tgtagcacccagtgtccttttgagg

SEQ ID NO: 2572172 - DNA, 25 bp, Homo sapien
gatgtagcacccagtgtccttttga

SEQ ID NO: 2572173 - DNA, 25 bp, Homo sapien
tgggtcttttggtgagatcaaatgc

SEQ ID NO: 2572174 - DNA, 25 bp, Homo sapien
ggctctacgagaccataatttgctt

SEQ ID NO: 2572175 - DNA, 25 bp, Homo sapien
cacttgtaggaggaaattcgaaagg

SEQ ID NO: 2572176 - DNA, 25 bp, Homo sapien
catccttgggtcttttggtgagatc

SEQ ID NO: 2572177 - DNA, 25 bp, Homo sapien
tagggtgttcttcacaaggtttcca

SEQ ID NO: 2572178 - DNA, 25 bp, Homo sapien
gaaggtttgactgttggtccaggtc

SEQ ID NO: 2572179 - DNA, 25 bp, Homo sapien
gtccaggtcctttggtttctccata

SEQ ID NO: 2572180 - DNA, 25 bp, Homo sapien
agaacagatgtcctgaaggtttgac

SEQ ID NO: 2572181 - DNA, 25 bp, Homo sapien
gcttcaccgcatttatcactagcca

SEQ ID NO: 2572182 - DNA, 25 bp, Homo sapien
gagagacctgattgcttcaccgcat

SEQ ID NO: 2572183 - DNA, 25 bp, Homo sapien
ttatcactagccaataaagtctcac

SEQ ID NO: 2572184 - DNA, 25 bp, Homo sapien
cttcttggagagacctgattgcttc

SEQ ID NO: 2572185 - DNA, 25 bp, Homo sapien
ctccatttggcagaatatgcaggct

SEQ ID NO: 2572186 - DNA, 25 bp, Homo sapien
gtgaatacttacataagctgtgtag

SEQ ID NO: 2572187 - DNA, 25 bp, Homo sapien
gtttttagcgttgtgaatacttaca

SEQ ID NO: 2572188 - DNA, 25 bp, Homo sapien
catttggcagaatatgcaggctcca

SEQ ID NO: 2572189 - DNA, 25 bp, Homo sapien
tggaaagtgaaagtcaagatcagca

SEQ ID NO: 2572190 - DNA, 25 bp, Homo sapien
gtggaaagtgaaagtcaagatcagc

SEQ ID NO: 2572191 - DNA, 25 bp, Homo sapien
ggaaagtgaaagtcaagatcagcat

SEQ ID NO: 2572192 - DNA, 25 bp, Homo sapien
aggctttctggaactctggctccat

SEQ ID NO: 2572193 - DNA, 25 bp, Homo sapien
caggctttctggaactctggctcca

SEQ ID NO: 2572194 - DNA, 25 bp, Homo sapien
acaggctttctggaactctggctcc

SEQ ID NO: 2572195 - DNA, 25 bp, Homo sapien
cacaggctttctggaactctggctc

SEQ ID NO: 2572196 - DNA, 25 bp, Homo sapien
atatcgagaatctacgaagaactca

SEQ ID NO: 2572197 - DNA, 25 bp, Homo sapien
aatatcgagaatctacgaagaactc

SEQ ID NO: 2572198 - DNA, 25 bp, Homo sapien
tgcgagccgagcagaaaccaatggc

SEQ ID NO: 2572199 - DNA, 25 bp, Homo sapien
tctcgggtaaagtgacattctccgc

SEQ ID NO: 2572200 - DNA, 25 bp, Homo sapien
aaaggctatgcatggatttatctca

SEQ ID NO: 2572201 - DNA, 25 bp, Homo sapien
tggcccatcgtagtgaatttctcgg

SEQ ID NO: 2572202 - DNA, 25 bp, Homo sapien
aaattacgttcatctggtcctgtgc

SEQ ID NO: 2572203 - DNA, 25 bp, Homo sapien
tgccctttttacttgcagttgtcca

SEQ ID NO: 2572204 - DNA, 25 bp, Homo sapien
tacaagtagccttagcgatataatc

SEQ ID NO: 2572205 - DNA, 25 bp, Homo sapien
tataatcagggttaccatttgaacc

SEQ ID NO: 2572206 - DNA, 25 bp, Homo sapien
tacaatttcatctttctcttccacc

SEQ ID NO: 2572207 - DNA, 25 bp, Homo sapien
caatttcatctttctcttccaccat

SEQ ID NO: 2572208 - DNA, 25 bp, Homo sapien
catcctggttgctacaatttcatct

SEQ ID NO: 2572209 - DNA, 25 bp, Homo sapien
gctacaatttcatctttctcttcca

SEQ ID NO: 2572210 - DNA, 25 bp, Homo sapien
cagaactcaagaagcagatgctttt

SEQ ID NO: 2572211 - DNA, 25 bp, Homo sapien
tttttacgagccataccatactaga

SEQ ID NO: 2572212 - DNA, 25 bp, Homo sapien
tctcaattaggatatagatcactca

SEQ ID NO: 2572213 - DNA, 25 bp, Homo sapien
gaaatggtttagcaagcaaacagtg

SEQ ID NO: 2572214 - DNA, 25 bp, Homo sapien
taacagatgcctccgtgaatttgga

SEQ ID NO: 2572215 - DNA, 25 bp, Homo sapien
acagatgcctccgtgaatttggaca

SEQ ID NO: 2572216 - DNA, 25 bp, Homo sapien
gatgcctccgtgaatttggacatcc

SEQ ID NO: 2572217 - DNA, 25 bp, Homo sapien
cctccgtgaatttggacatcccatt

SEQ ID NO: 2572218 - DNA, 25 bp, Homo sapien
agaaaaagaagccttgtgtaatgct

SEQ ID NO: 2572219 - DNA, 25 bp, Homo sapien
gaaaaagaagccttgtgtaatgctt

SEQ ID NO: 2572220 - DNA, 25 bp, Homo sapien
tgagggggcttgtcctgagatttcc

SEQ ID NO: 2572221 - DNA, 25 bp, Homo sapien
accaataattcggagacctccggag

SEQ ID NO: 2572222 - DNA, 25 bp, Homo sapien
aattcggagacctccggagatgagg

SEQ ID NO: 2572223 - DNA, 25 bp, Homo sapien
aataattcggagacctccggagatg

SEQ ID NO: 2572224 - DNA, 25 bp, Homo sapien
tctgtgaattcagaattattgtgtt

SEQ ID NO: 2572225 - DNA, 25 bp, Homo sapien
aattattgtgttgagcttgggcctc

SEQ ID NO: 2572226 - DNA, 25 bp, Homo sapien
tgaattcagaattattgtgttgagc

SEQ ID NO: 2572227 - DNA, 25 bp, Homo sapien
ttcagaattattgtgttgagcttgg

SEQ ID NO: 2572228 - DNA, 25 bp, Homo sapien
gaggctccatgggctcgtattcaac

SEQ ID NO: 2572229 - DNA, 25 bp, Homo sapien
gctccatgggctcgtattcaacgtc

SEQ ID NO: 2572230 - DNA, 25 bp, Homo sapien
ggctccatgggctcgtattcaacgt

SEQ ID NO: 2572231 - DNA, 25 bp, Homo sapien
aggctccatgggctcgtattcaacg

SEQ ID NO: 2572232 - DNA, 25 bp, Homo sapien
gcggccttggccgtcaactcggctg

SEQ ID NO: 2572233 - DNA, 25 bp, Homo sapien
ggccttggccgtcaactcggctgct

SEQ ID NO: 2572234 - DNA, 25 bp, Homo sapien
gcggcggccttggccgtcaactcgg

SEQ ID NO: 2572235 - DNA, 25 bp, Homo sapien
ccttggccgtcaactcggctgctgg

SEQ ID NO: 2572236 - DNA, 25 bp, Homo sapien
catacagcacaggacttgcaaaggg

SEQ ID NO: 2572237 - DNA, 25 bp, Homo sapien
tgcaaagggcacctatctttctctt

SEQ ID NO: 2572238 - DNA, 25 bp, Homo sapien
tttcccctcatacagcacaggactt

SEQ ID NO: 2572239 - DNA, 25 bp, Homo sapien
tctttcacctcagacactctttcta

SEQ ID NO: 2572240 - DNA, 25 bp, Homo sapien
cggccccatcctttttacatataga

SEQ ID NO: 2572241 - DNA, 25 bp, Homo sapien
cccagtagcttgtggcacccagcta

SEQ ID NO: 2572242 - DNA, 25 bp, Homo sapien
gaatcagggtaaacaggctttacag

SEQ ID NO: 2572243 - DNA, 25 bp, Homo sapien
taagtactcctgttcaattatctgg

SEQ ID NO: 2572244 - DNA, 25 bp, Homo sapien
cctttgtgtttaggtgaaaaagcat

SEQ ID NO: 2572245 - DNA, 25 bp, Homo sapien
ctttgtgtttaggtgaaaaagcatg

SEQ ID NO: 2572246 - DNA, 25 bp, Homo sapien
ttgtgtttaggtgaaaaagcatgac

SEQ ID NO: 2572247 - DNA, 25 bp, Homo sapien
tttgtgtttaggtgaaaaagcatga

SEQ ID NO: 2572248 - DNA, 25 bp, Homo sapien
tcatctgcgtttcaaacagaagctt

SEQ ID NO: 2572249 - DNA, 25 bp, Homo sapien
cttttgccagtaaggaaattcaagg

SEQ ID NO: 2572250 - DNA, 25 bp, Homo sapien
tggaacaagaagaaacttggacttc

SEQ ID NO: 2572251 - DNA, 25 bp, Homo sapien
ttggacttcatctgcgtttcaaaca

SEQ ID NO: 2572252 - DNA, 25 bp, Homo sapien
gagttagctcaagtgccaaatgtcc

SEQ ID NO: 2572253 - DNA, 25 bp, Homo sapien
gttagctcaagtgccaaatgtcccc

SEQ ID NO: 2572254 - DNA, 25 bp, Homo sapien
aatgtccccattggcctacaccttg

SEQ ID NO: 2572255 - DNA, 25 bp, Homo sapien
caaatgtccccattggcctacacct

SEQ ID NO: 2572256 - DNA, 25 bp, Homo sapien
tcttagaattatgccaaccgttcaa

SEQ ID NO: 2572257 - DNA, 25 bp, Homo sapien
aaatcttagaattatgccaaccgtt

SEQ ID NO: 2572258 - DNA, 25 bp, Homo sapien
tatgccaaccgttcaatagtttgca

SEQ ID NO: 2572259 - DNA, 25 bp, Homo sapien
gaattatgccaaccgttcaatagtt

SEQ ID NO: 2572260 - DNA, 25 bp, Homo sapien
gcgtggtcagacatgcttgtaatcc

SEQ ID NO: 2572261 - DNA, 25 bp, Homo sapien
cagctacttgggaggtttaggcagg

SEQ ID NO: 2572262 - DNA, 25 bp, Homo sapien
aaatcacaccactgcacccgagcct

SEQ ID NO: 2572263 - DNA, 25 bp, Homo sapien
ttagctgggcgtggtcagacatgct

SEQ ID NO: 2572264 - DNA, 25 bp, Homo sapien
ctgccatagtatgctagtagttgtt

SEQ ID NO: 2572265 - DNA, 25 bp, Homo sapien
tctgccatagtatgctagtagttgt

SEQ ID NO: 2572266 - DNA, 25 bp, Homo sapien
ctctgccatagtatgctagtagttg

SEQ ID NO: 2572267 - DNA, 25 bp, Homo sapien
ctgtaaaagccctttataggcctga

SEQ ID NO: 2572268 - DNA, 25 bp, Homo sapien
tagcatctttaagcattccatgatg

SEQ ID NO: 2572269 - DNA, 25 bp, Homo sapien
gaaggtataatgcatgttgtaagga

SEQ ID NO: 2572270 - DNA, 25 bp, Homo sapien
cccgggaagacgtattttcaccatg

SEQ ID NO: 2572271 - DNA, 25 bp, Homo sapien
taaataattcatgacgccaatattt

SEQ ID NO: 2572272 - DNA, 25 bp, Homo sapien
ccaatatttttcatccggttagcaa

SEQ ID NO: 2572273 - DNA, 25 bp, Homo sapien
caatatttttcatccggttagcaaa

SEQ ID NO: 2572274 - DNA, 25 bp, Homo sapien
taattcatgacgccaatatttttca

SEQ ID NO: 2572275 - DNA, 25 bp, Homo sapien
ccaggaaaacaaccccggactgcag

SEQ ID NO: 2572276 - DNA, 25 bp, Homo sapien
tttcagtcctccgacacgatcagag

SEQ ID NO: 2572277 - DNA, 25 bp, Homo sapien
gacacgatcagagtgatggccagga

SEQ ID NO: 2572278 - DNA, 25 bp, Homo sapien
tgctgatccgtttcagtcctccgac

SEQ ID NO: 2572279 - DNA, 25 bp, Homo sapien
tcttacatgtaagtctttaatgcat

SEQ ID NO: 2572280 - DNA, 25 bp, Homo sapien
cttacatgtaagtctttaatgcatc

SEQ ID NO: 2572281 - DNA, 25 bp, Homo sapien
atgctgttcttagtggaaactcaga

SEQ ID NO: 2572282 - DNA, 25 bp, Homo sapien
ttatgctgttcttagtggaaactca

SEQ ID NO: 2572283 - DNA, 25 bp, Homo sapien
tggaaactcagactttaagttccac

SEQ ID NO: 2572284 - DNA, 25 bp, Homo sapien
cttagtggaaactcagactttaagt

SEQ ID NO: 2572285 - DNA, 25 bp, Homo sapien
aggccatcagtggatttgacgtctt

SEQ ID NO: 2572286 - DNA, 25 bp, Homo sapien
gtgactcactcccaataactcgagg

SEQ ID NO: 2572287 - DNA, 25 bp, Homo sapien
taaacgtgtgcctcagagcatgagc

SEQ ID NO: 2572288 - DNA, 25 bp, Homo sapien
catgagcgaagctgcctgaggatcc

SEQ ID NO: 2572289 - DNA, 25 bp, Homo sapien
tgtttttagcgttgtgaatacttac

SEQ ID NO: 2572290 - DNA, 25 bp, Homo sapien
attgtttttagcgttgtgaatactt

SEQ ID NO: 2572291 - DNA, 25 bp, Homo sapien
ttgtttttagcgttgtgaatactta

SEQ ID NO: 2572292 - DNA, 25 bp, Homo sapien
ccatttggcagaatatgcaggctcc

SEQ ID NO: 2572293 - DNA, 25 bp, Homo sapien
ctccatttggcagaatatgcaggct

SEQ ID NO: 2572294 - DNA, 25 bp, Homo sapien
tccatttggcagaatatgcaggctc

SEQ ID NO: 2572295 - DNA, 25 bp, Homo sapien
catttggcagaatatgcaggctcca

SEQ ID NO: 2572296 - DNA, 25 bp, Homo sapien
tgtttcatacgccagtgcagcaatt

SEQ ID NO: 2572297 - DNA, 25 bp, Homo sapien
caggagcatgttttagttcaattgc

SEQ ID NO: 2572298 - DNA, 25 bp, Homo sapien
aattggctgtttcatacgccagtgc

SEQ ID NO: 2572299 - DNA, 25 bp, Homo sapien
cagtgcagcaattagtccaggagca

SEQ ID NO: 2572300 - DNA, 25 bp, Homo sapien
taattggtggccctcacaaccgtac

SEQ ID NO: 2572301 - DNA, 25 bp, Homo sapien
tacactatgaagcaaaggattcttg

SEQ ID NO: 2572302 - DNA, 25 bp, Homo sapien
aactcagtggcagtgctttgtacac

SEQ ID NO: 2572303 - DNA, 25 bp, Homo sapien
gttgtagcagctattaacatccgaa

SEQ ID NO: 2572304 - DNA, 25 bp, Homo sapien
gatacaagtgttgggtcacctccag

SEQ ID NO: 2572305 - DNA, 25 bp, Homo sapien
tttacccaggagcttaggatcctcc

SEQ ID NO: 2572306 - DNA, 25 bp, Homo sapien
gtaggacacatcagcaagggccact

SEQ ID NO: 2572307 - DNA, 25 bp, Homo sapien
gatatcctcgaccatctactgttga

SEQ ID NO: 2572308 - DNA, 25 bp, Homo sapien
catcaaatgaacagtgtttctccat

SEQ ID NO: 2572309 - DNA, 25 bp, Homo sapien
taatagcctgcagaagactagctat

SEQ ID NO: 2572310 - DNA, 25 bp, Homo sapien
aacctggtgtcttccctggtttctg

SEQ ID NO: 2572311 - DNA, 25 bp, Homo sapien
tgcagaagactagctatgttggttt

SEQ ID NO: 2572312 - DNA, 25 bp, Homo sapien
gcctgcagaagactagctatgttgg

SEQ ID NO: 2572313 - DNA, 25 bp, Homo sapien
atcatgcataccacagtcacatggg

SEQ ID NO: 2572314 - DNA, 25 bp, Homo sapien
tgtcagagccatcactataactaca

SEQ ID NO: 2572315 - DNA, 25 bp, Homo sapien
tcacaactgtgcagattattctttc

SEQ ID NO: 2572316 - DNA, 25 bp, Homo sapien
tggtagctgtctagcaactcttcca

SEQ ID NO: 2572317 - DNA, 25 bp, Homo sapien
tttagccttgtacagggtggtgata

SEQ ID NO: 2572318 - DNA, 25 bp, Homo sapien
ctacttgaggccatcatcttccccc

SEQ ID NO: 2572319 - DNA, 25 bp, Homo sapien
tagccttgtacagggtggtgatatt

SEQ ID NO: 2572320 - DNA, 25 bp, Homo sapien
tacttgaggccatcatcttccccca

SEQ ID NO: 2572321 - DNA, 25 bp, Homo sapien
tgccaaccaaatcctaaattagcct

SEQ ID NO: 2572322 - DNA, 25 bp, Homo sapien
aattagcctttcccttgccaaatgt

SEQ ID NO: 2572323 - DNA, 25 bp, Homo sapien
agcctttcccttgccaaatgtcact

SEQ ID NO: 2572324 - DNA, 25 bp, Homo sapien
ttagcctttcccttgccaaatgtca

SEQ ID NO: 2572325 - DNA, 25 bp, Homo sapien
tattgattgcaatacctggtccaga

SEQ ID NO: 2572326 - DNA, 25 bp, Homo sapien
cttactaagcataaccttgagctgg

SEQ ID NO: 2572327 - DNA, 25 bp, Homo sapien
catatgtttgattccccaccagagc

SEQ ID NO: 2572328 - DNA, 25 bp, Homo sapien
tacgttccaggtacactgggcttgt

SEQ ID NO: 2572329 - DNA, 25 bp, Homo sapien
cagaggacacccttaggtggagtta

SEQ ID NO: 2572330 - DNA, 25 bp, Homo sapien
gaaatcttcaaccaatcagtgctat

SEQ ID NO: 2572331 - DNA, 25 bp, Homo sapien
tgtgacatctcatattccagaggac

SEQ ID NO: 2572332 - DNA, 25 bp, Homo sapien
gcatctaactagttctggtccctta

SEQ ID NO: 2572333 - DNA, 25 bp, Homo sapien
tgccatatttgatgccacttccagt

SEQ ID NO: 2572334 - DNA, 25 bp, Homo sapien
gatgcttcaattactttggccctca

SEQ ID NO: 2572335 - DNA, 25 bp, Homo sapien
ccacttccagtgtgcacaatacatg

SEQ ID NO: 2572336 - DNA, 25 bp, Homo sapien
tagcagacaactgaataactggtgt

SEQ ID NO: 2572337 - DNA, 25 bp, Homo sapien
gatcttgtactgtggtagaatcctt

SEQ ID NO: 2572338 - DNA, 25 bp, Homo sapien
tcttgtactgtggtagaatccttga

SEQ ID NO: 2572339 - DNA, 25 bp, Homo sapien
cttgtactgtggtagaatccttgag

SEQ ID NO: 2572340 - DNA, 25 bp, Homo sapien
ggatcttgtactgtggtagaatcct

SEQ ID NO: 2572341 - DNA, 25 bp, Homo sapien
gatacctggcagatccatcaaattc

SEQ ID NO: 2572342 - DNA, 25 bp, Homo sapien
acatctggttaagatacctggcaga

SEQ ID NO: 2572343 - DNA, 25 bp, Homo sapien
ggaatgagaccatgacgggaaagta

SEQ ID NO: 2572344 - DNA, 25 bp, Homo sapien
gttaagatacctggcagatccatca

SEQ ID NO: 2572345 - DNA, 25 bp, Homo sapien
agcatgtgacatcctgactgagcct

SEQ ID NO: 2572346 - DNA, 25 bp, Homo sapien
taattggtccaagagaaggctctcc

SEQ ID NO: 2572347 - DNA, 25 bp, Homo sapien
tgtgtagccagtatcttagcccttg

SEQ ID NO: 2572348 - DNA, 25 bp, Homo sapien
ttttagggcctgctacatggcagcg

SEQ ID NO: 2572349 - DNA, 25 bp, Homo sapien
gataacattgagttcctcctacagt

SEQ ID NO: 2572350 - DNA, 25 bp, Homo sapien
agttcctcctacagttacgcccatt

SEQ ID NO: 2572351 - DNA, 25 bp, Homo sapien
atttctaatctagcatcttcccttt

SEQ ID NO: 2572352 - DNA, 25 bp, Homo sapien
ctgagtgataacattgagttcctcc

SEQ ID NO: 2572353 - DNA, 25 bp, Homo sapien
aggatgcaagcccaacagggacaag

SEQ ID NO: 2572354 - DNA, 25 bp, Homo sapien
tgcaagcccaacagggacaaggacc

SEQ ID NO: 2572355 - DNA, 25 bp, Homo sapien
gaaaggatgcaagcccaacagggac

SEQ ID NO: 2572356 - DNA, 25 bp, Homo sapien
gctggaaaggatgcaagcccaacag

SEQ ID NO: 2572357 - DNA, 25 bp, Homo sapien
ccagggcactcagcagaaccagcat

SEQ ID NO: 2572358 - DNA, 25 bp, Homo sapien
cagcccagggcactcagcagaacca

SEQ ID NO: 2572359 - DNA, 25 bp, Homo sapien
cccagggcactcagcagaaccagca

SEQ ID NO: 2572360 - DNA, 25 bp, Homo sapien
agcccagggcactcagcagaaccag

SEQ ID NO: 2572361 - DNA, 25 bp, Homo sapien
cagggcaccgttatggccacaaagc

SEQ ID NO: 2572362 - DNA, 25 bp, Homo sapien
gttatggccacaaagccccgcagcg

SEQ ID NO: 2572363 - DNA, 25 bp, Homo sapien
atggtcccacagggcaccgttatgg

SEQ ID NO: 2572364 - DNA, 25 bp, Homo sapien
gtcccacagggcaccgttatggcca

SEQ ID NO: 2572365 - DNA, 25 bp, Homo sapien
ggctgcactgagtgacctctcccaa

SEQ ID NO: 2572366 - DNA, 25 bp, Homo sapien
agcctgggcttgatttgtggccctg

SEQ ID NO: 2572367 - DNA, 25 bp, Homo sapien
tgattttttacaccctttggctgca

SEQ ID NO: 2572368 - DNA, 25 bp, Homo sapien
ccaactgcatatgctttcaaactgg

SEQ ID NO: 2572369 - DNA, 25 bp, Homo sapien
atggcggccattggaacctccacag

SEQ ID NO: 2572370 - DNA, 25 bp, Homo sapien
ggcggccattggaacctccacagcg

SEQ ID NO: 2572371 - DNA, 25 bp, Homo sapien
acatggcggccattggaacctccac

SEQ ID NO: 2572372 - DNA, 25 bp, Homo sapien
aacatggcggccattggaacctcca

SEQ ID NO: 2572373 - DNA, 25 bp, Homo sapien
caagttgtagttttggggagtcaca

SEQ ID NO: 2572374 - DNA, 25 bp, Homo sapien
gggagtcacagtccacctcattcac

SEQ ID NO: 2572375 - DNA, 25 bp, Homo sapien
accacttctccctgtgcccgcttct

SEQ ID NO: 2572376 - DNA, 25 bp, Homo sapien
ttttccagcccacgagttctcctcc

SEQ ID NO: 2572377 - DNA, 25 bp, Homo sapien
catacagcacaggacttgcaaaggg

SEQ ID NO: 2572378 - DNA, 25 bp, Homo sapien
tttcccctcatacagcacaggactt

SEQ ID NO: 2572379 - DNA, 25 bp, Homo sapien
tgcaaagggcacctatctttctctt

SEQ ID NO: 2572380 - DNA, 25 bp, Homo sapien
tctttcacctcagacactctttcta

SEQ ID NO: 2572381 - DNA, 25 bp, Homo sapien
tcagcagcagattgcagccataaat

SEQ ID NO: 2572382 - DNA, 25 bp, Homo sapien
attttcacaaccctccatgtagaca

SEQ ID NO: 2572383 - DNA, 25 bp, Homo sapien
tgtagacaaatctttccagctctcc

SEQ ID NO: 2572384 - DNA, 25 bp, Homo sapien
cagccataaatctgagaggtggggc

SEQ ID NO: 2572385 - DNA, 25 bp, Homo sapien
gatgaactcaagattcgagttcaga

SEQ ID NO: 2572386 - DNA, 25 bp, Homo sapien
cccattctaacatatgtgaaagaaa

SEQ ID NO: 2572387 - DNA, 25 bp, Homo sapien
aactcaagattcgagttcagagctc

SEQ ID NO: 2572388 - DNA, 25 bp, Homo sapien
tgtgaaagaaactcccacgatgatg

SEQ ID NO: 2572389 - DNA, 25 bp, Homo sapien
aggggcattgtcagtcaatacagag

SEQ ID NO: 2572390 - DNA, 25 bp, Homo sapien
ggggcattgtcagtcaatacagagg

SEQ ID NO: 2572391 - DNA, 25 bp, Homo sapien
tgccctctctcccaacagtcgatga

SEQ ID NO: 2572392 - DNA, 25 bp, Homo sapien
tctcccaacagtcgatgacattcac

SEQ ID NO: 2572393 - DNA, 25 bp, Homo sapien
aacagtcgatgacattcacaccacc

SEQ ID NO: 2572394 - DNA, 25 bp, Homo sapien
ccccttccaacaatggctgtggctg

SEQ ID NO: 2572395 - DNA, 25 bp, Homo sapien
ctagatattgacagcttggaagaga

SEQ ID NO: 2572396 - DNA, 25 bp, Homo sapien
tgggatagagctggtattcagaccc

SEQ ID NO: 2572397 - DNA, 25 bp, Homo sapien
tctgcaacctgaagctgggatagag

SEQ ID NO: 2572398 - DNA, 25 bp, Homo sapien
aactcgacatattgcagtgtgggtc

SEQ ID NO: 2572399 - DNA, 25 bp, Homo sapien
ggaagaagtaaagatcctgccaccc

SEQ ID NO: 2572400 - DNA, 25 bp, Homo sapien
gccgatattcctcggcacttgcttc

SEQ ID NO: 2572401 - DNA, 25 bp, Homo sapien
gatattcctcggcacttgcttctct

SEQ ID NO: 2572402 - DNA, 25 bp, Homo sapien
ctgccgatattcctcggcacttgct

SEQ ID NO: 2572403 - DNA, 25 bp, Homo sapien
atccctgccgatattcctcggcact

SEQ ID NO: 2572404 - DNA, 25 bp, Homo sapien
cacacttaatcctgctgctaggtca

SEQ ID NO: 2572405 - DNA, 25 bp, Homo sapien
ttaatcctgctgctaggtcagatgc

SEQ ID NO: 2572406 - DNA, 25 bp, Homo sapien
tcctgctgctaggtcagatgcacag

SEQ ID NO: 2572407 - DNA, 25 bp, Homo sapien
ctgctaggtcagatgcacagcacac

SEQ ID NO: 2572408 - DNA, 25 bp, Homo sapien
ccagcaatagcctgtgctcccctgg

SEQ ID NO: 2572409 - DNA, 25 bp, Homo sapien
gcagcctcccaatgccatctccagc

SEQ ID NO: 2572410 - DNA, 25 bp, Homo sapien
tgcccagcaatagcctgtgctcccc

SEQ ID NO: 2572411 - DNA, 25 bp, Homo sapien
agctgcccagcaatagcctgtgctc

SEQ ID NO: 2572412 - DNA, 25 bp, Homo sapien
aaactgacatagaatgacaagggac

SEQ ID NO: 2572413 - DNA, 25 bp, Homo sapien
actgacatagaatgacaagggacaa

SEQ ID NO: 2572414 - DNA, 25 bp, Homo sapien
ctgaaactgacatagaatgacaagg

SEQ ID NO: 2572415 - DNA, 25 bp, Homo sapien
tgacatagaatgacaagggacaaac

SEQ ID NO: 2572416 - DNA, 25 bp, Homo sapien
ttgacaaggtgtgaggactctaagg

SEQ ID NO: 2572417 - DNA, 25 bp, Homo sapien
aggaagcatctgttttgacaaggtg

SEQ ID NO: 2572418 - DNA, 25 bp, Homo sapien
cacagctcagagatcctgttccagg

SEQ ID NO: 2572419 - DNA, 25 bp, Homo sapien
attccacagctcagagatcctgttc

SEQ ID NO: 2572420 - DNA, 25 bp, Homo sapien
gccgaggtagtatctgcttcgctga

SEQ ID NO: 2572421 - DNA, 25 bp, Homo sapien
actaaatctttcctgttactatatt

SEQ ID NO: 2572422 - DNA, 25 bp, Homo sapien
tctgcttcgctgagctgctgactta

SEQ ID NO: 2572423 - DNA, 25 bp, Homo sapien
gggtgtgcgcgctccaagactgaca

SEQ ID NO: 2572424 - DNA, 25 bp, Homo sapien
aatgttctgtgctctcaacgagaag

SEQ ID NO: 2572425 - DNA, 25 bp, Homo sapien
acttgctctacagcggccacgttca

SEQ ID NO: 2572426 - DNA, 25 bp, Homo sapien
gccacgttcagcaaccacggtgatc

SEQ ID NO: 2572427 - DNA, 25 bp, Homo sapien
tctcgacagacacgaaaatgttctg

SEQ ID NO: 2572428 - DNA, 25 bp, Homo sapien
gaaggccgttgtgaggaatgagctg

SEQ ID NO: 2572429 - DNA, 25 bp, Homo sapien
gccgggcccatgcaggcctttgaga

SEQ ID NO: 2572430 - DNA, 25 bp, Homo sapien
ccactggaggtcaagttctgggcct

SEQ ID NO: 2572431 - DNA, 25 bp, Homo sapien
aggcccactggaggtcaagttctgg

SEQ ID NO: 2572432 - DNA, 25 bp, Homo sapien
gcctgcagatgccatcggagagcag

SEQ ID NO: 2572433 - DNA, 25 bp, Homo sapien
tgtttggggcctgcagatgccatcg

SEQ ID NO: 2572434 - DNA, 25 bp, Homo sapien
cggaggctgtttggggcctgcagat

SEQ ID NO: 2572435 - DNA, 25 bp, Homo sapien
cgacttgggcctacagaggctgcca

SEQ ID NO: 2572436 - DNA, 25 bp, Homo sapien
ctgggcctgcggagcttggctttgg

SEQ ID NO: 2572437 - DNA, 25 bp, Homo sapien
gctgggcctgcggagcttggctttg

SEQ ID NO: 2572438 - DNA, 25 bp, Homo sapien
gagctgggcctgcggagcttggctt

SEQ ID NO: 2572439 - DNA, 25 bp, Homo sapien
gggcctgcggagcttggctttggga

SEQ ID NO: 2572440 - DNA, 25 bp, Homo sapien
gacgttgttgggaggccagagtcgg

SEQ ID NO: 2572441 - DNA, 25 bp, Homo sapien
agacgttgttgggaggccagagtcg

SEQ ID NO: 2572442 - DNA, 25 bp, Homo sapien
tcgggcctggagacacagcagggaa

SEQ ID NO: 2572443 - DNA, 25 bp, Homo sapien
tggagacacagcagggaagaagagc

SEQ ID NO: 2572444 - DNA, 25 bp, Homo sapien
tggagaggacgccaggaggctgcaa

SEQ ID NO: 2572445 - DNA, 25 bp, Homo sapien
aggaatgagccccatgggcctgaag

SEQ ID NO: 2572446 - DNA, 25 bp, Homo sapien
ctggagaggacgccaggaggctgca

SEQ ID NO: 2572447 - DNA, 25 bp, Homo sapien
ctgggcctggaaaggttgttgtgag

SEQ ID NO: 2572448 - DNA, 25 bp, Homo sapien
gaggcccaagcttggcatggaggag

SEQ ID NO: 2572449 - DNA, 25 bp, Homo sapien
agcttggcatggaggagcccaccga

SEQ ID NO: 2572450 - DNA, 25 bp, Homo sapien
aggcccaagcttggcatggaggagc

SEQ ID NO: 2572451 - DNA, 25 bp, Homo sapien
ccaagcttggcatggaggagcccac

SEQ ID NO: 2572452 - DNA, 25 bp, Homo sapien
gccgttgtgaggaatgagccccatg

SEQ ID NO: 2572453 - DNA, 25 bp, Homo sapien
tccggagaggacgcccggagggtgc

SEQ ID NO: 2572454 - DNA, 25 bp, Homo sapien
ctgggcccggagaggccaccggaag

SEQ ID NO: 2572455 - DNA, 25 bp, Homo sapien
gggcctggagacgcagccgtgagga

SEQ ID NO: 2572456 - DNA, 25 bp, Homo sapien
ggccactggcaggcaggagctgggc

SEQ ID NO: 2572457 - DNA, 25 bp, Homo sapien
aagaggccactggcaggcaggagct

SEQ ID NO: 2572458 - DNA, 25 bp, Homo sapien
ctgaagaggccactggcaggcagga

SEQ ID NO: 2572459 - DNA, 25 bp, Homo sapien
agaggccactggcaggcaggagctg

SEQ ID NO: 2572460 - DNA, 25 bp, Homo sapien
gaggttgtgaggcaggagacgggcc

SEQ ID NO: 2572461 - DNA, 25 bp, Homo sapien
gggccaaaggaggttgtgaggcagg

SEQ ID NO: 2572462 - DNA, 25 bp, Homo sapien
gccaaaggaggttgtgaggcaggag

SEQ ID NO: 2572463 - DNA, 25 bp, Homo sapien
ggttgtgaggcaggagacgggcctg

SEQ ID NO: 2572464 - DNA, 25 bp, Homo sapien
ctgtgcctggaaaagtcgccatggg

SEQ ID NO: 2572465 - DNA, 25 bp, Homo sapien
gaaaagtcgccatggggcatgagct

SEQ ID NO: 2572466 - DNA, 25 bp, Homo sapien
tggagatgctgagttaaggacattc

SEQ ID NO: 2572467 - DNA, 25 bp, Homo sapien
aggatgagctcgtcctggagatgct

SEQ ID NO: 2572468 - DNA, 25 bp, Homo sapien
gaggctgcagaaaggcaggagcttc

SEQ ID NO: 2572469 - DNA, 25 bp, Homo sapien
ctgcagaaaggcaggagcttcgcct

SEQ ID NO: 2572470 - DNA, 25 bp, Homo sapien
cagaaaggcaggagcttcgcctgag

SEQ ID NO: 2572471 - DNA, 25 bp, Homo sapien
tccgacagtagacagaagttgggca

SEQ ID NO: 2572472 - DNA, 25 bp, Homo sapien
aactgggccaaaaaaggctgttgtg

SEQ ID NO: 2572473 - DNA, 25 bp, Homo sapien
actgggccaaaaaaggctgttgtga

SEQ ID NO: 2572474 - DNA, 25 bp, Homo sapien
agggtatgggcctaaataggccatt

SEQ ID NO: 2572475 - DNA, 25 bp, Homo sapien
gtagggtatgggcctaaataggcca

SEQ ID NO: 2572476 - DNA, 25 bp, Homo sapien
gggtatgggcctaaataggccattg

SEQ ID NO: 2572477 - DNA, 25 bp, Homo sapien
tagggtatgggcctaaataggccat

SEQ ID NO: 2572478 - DNA, 25 bp, Homo sapien
gtgggcatgttaagcttgttttcct

SEQ ID NO: 2572479 - DNA, 25 bp, Homo sapien
gaatcagtgggcatgttaagcttgt

SEQ ID NO: 2572480 - DNA, 25 bp, Homo sapien
atcagtgggcatgttaagcttgttt

SEQ ID NO: 2572481 - DNA, 25 bp, Homo sapien
cagtgggcatgttaagcttgttttc

SEQ ID NO: 2572482 - DNA, 25 bp, Homo sapien
gccgtgtggctccttacagctccat

SEQ ID NO: 2572483 - DNA, 25 bp, Homo sapien
ctcctgccgtgtggctccttacagc

SEQ ID NO: 2572484 - DNA, 25 bp, Homo sapien
ctgccgtgtggctccttacagctcc

SEQ ID NO: 2572485 - DNA, 25 bp, Homo sapien
tcctgccgtgtggctccttacagct

SEQ ID NO: 2572486 - DNA, 25 bp, Homo sapien
cagtcttcatagtggtcaagggcag

SEQ ID NO: 2572487 - DNA, 25 bp, Homo sapien
ttcatagtggtcaagggcagcaacc

SEQ ID NO: 2572488 - DNA, 25 bp, Homo sapien
tcttcatagtggtcaagggcagcaa

SEQ ID NO: 2572489 - DNA, 25 bp, Homo sapien
gtcttcatagtggtcaagggcagca

SEQ ID NO: 2572490 - DNA, 25 bp, Homo sapien
ttcgtcacaatcaacagtaagtggt

SEQ ID NO: 2572491 - DNA, 25 bp, Homo sapien
tggtagcttgagtcattgtgaggtc

SEQ ID NO: 2572492 - DNA, 25 bp, Homo sapien
gtaagtggtagcttgagtcattgtg

SEQ ID NO: 2572493 - DNA, 25 bp, Homo sapien
tcgtcacaatcaacagtaagtggta

SEQ ID NO: 2572494 - DNA, 25 bp, Homo sapien
gcagtcagctgcgatagcactacta

SEQ ID NO: 2572495 - DNA, 25 bp, Homo sapien
cctctggaatccacgtatacgaaaa

SEQ ID NO: 2572496 - DNA, 25 bp, Homo sapien
tccacgtatacgaaaattccaaata

SEQ ID NO: 2572497 - DNA, 25 bp, Homo sapien
acccctctggaatccacgtatacga

SEQ ID NO: 2572498 - DNA, 25 bp, Homo sapien
gctcaggtaggaggatccttagccc

SEQ ID NO: 2572499 - DNA, 25 bp, Homo sapien
tcaggtaggaggatccttagcccag

SEQ ID NO: 2572500 - DNA, 25 bp, Homo sapien
aggctcaggtaggaggatccttagc

SEQ ID NO: 2572501 - DNA, 25 bp, Homo sapien
tgtgatagcactactgtactcaagc

SEQ ID NO: 2572502 - DNA, 25 bp, Homo sapien
aatctagcatcccatacttggtagg

SEQ ID NO: 2572503 - DNA, 25 bp, Homo sapien
gaaatcctgttgactgtcttcgaca

SEQ ID NO: 2572504 - DNA, 25 bp, Homo sapien
gacatgtactaaagatccccaccca

SEQ ID NO: 2572505 - DNA, 25 bp, Homo sapien
gagccactgcaatgagcctgaagag

SEQ ID NO: 2572506 - DNA, 25 bp, Homo sapien
taacatgttgcccagtcagtctctc

SEQ ID NO: 2572507 - DNA, 25 bp, Homo sapien
gaataacatgttgcccagtcagtct

SEQ ID NO: 2572508 - DNA, 25 bp, Homo sapien
ctgaataacatgttgcccagtcagt

SEQ ID NO: 2572509 - DNA, 25 bp, Homo sapien
tcagtctctcttcctggattcagaa

SEQ ID NO: 2572510 - DNA, 25 bp, Homo sapien
cattgagccatctgctctccctggt

SEQ ID NO: 2572511 - DNA, 25 bp, Homo sapien
tccctggtgccttctctacagcagc

SEQ ID NO: 2572512 - DNA, 25 bp, Homo sapien
tgccttctctacagcagcctgagcc

SEQ ID NO: 2572513 - DNA, 25 bp, Homo sapien
ccattgagccatctgctctccctgg

SEQ ID NO: 2572514 - DNA, 25 bp, Homo sapien
tgcatgccacaacacatggcttttt

SEQ ID NO: 2572515 - DNA, 25 bp, Homo sapien
caccctaggaactgagactacagct

SEQ ID NO: 2572516 - DNA, 25 bp, Homo sapien
cctaggaactgagactacagctgca

SEQ ID NO: 2572517 - DNA, 25 bp, Homo sapien
tcagccaccctaggaactgagacta

SEQ ID NO: 2572518 - DNA, 25 bp, Homo sapien
acttaagtatgtgtgctactgaggc

SEQ ID NO: 2572519 - DNA, 25 bp, Homo sapien
taagtatgtgtgctactgaggcaag

SEQ ID NO: 2572520 - DNA, 25 bp, Homo sapien
tcacagaggccgtgccaatctctct

SEQ ID NO: 2572521 - DNA, 25 bp, Homo sapien
aagtatgtgtgctactgaggcaagc

SEQ ID NO: 2572522 - DNA, 25 bp, Homo sapien
cagaccttcggcttttacagctcga

SEQ ID NO: 2572523 - DNA, 25 bp, Homo sapien
agaccttcggcttttacagctcgag

SEQ ID NO: 2572524 - DNA, 25 bp, Homo sapien
atcttcacctgttgaattcataagt

SEQ ID NO: 2572525 - DNA, 25 bp, Homo sapien
ctcacaaagctgatttatcaagttg

SEQ ID NO: 2572526 - DNA, 25 bp, Homo sapien
ttcacctgttgaattcataagttca

SEQ ID NO: 2572527 - DNA, 25 bp, Homo sapien
cacctgttgaattcataagttcatg

SEQ ID NO: 2572528 - DNA, 25 bp, Homo sapien
gtttacgtagatcagcgatacgatg

SEQ ID NO: 2572529 - DNA, 25 bp, Homo sapien
acgtagatcagcgatacgatgattc

SEQ ID NO: 2572530 - DNA, 25 bp, Homo sapien
gtagatcagcgatacgatgattcca

SEQ ID NO: 2572531 - DNA, 25 bp, Homo sapien
ttacgtagatcagcgatacgatgat

SEQ ID NO: 2572532 - DNA, 25 bp, Homo sapien
caagcaaaagttgcttctcaataat

SEQ ID NO: 2572533 - DNA, 25 bp, Homo sapien
gaaaatcaagcaaaagttgcttctc

SEQ ID NO: 2572534 - DNA, 25 bp, Homo sapien
aaagttgcttctcaataatacgtcc

SEQ ID NO: 2572535 - DNA, 25 bp, Homo sapien
ctgaaaatcaagcaaaagttgcttc

SEQ ID NO: 2572536 - DNA, 25 bp, Homo sapien
aggaaactccagtcattcgagacgg

SEQ ID NO: 2572537 - DNA, 25 bp, Homo sapien
ctctacggccaggaaacggattctc

SEQ ID NO: 2572538 - DNA, 25 bp, Homo sapien
ttcgagacgggcagcacaagctgag

SEQ ID NO: 2572539 - DNA, 25 bp, Homo sapien
ctgaggagtgcaggccacctctacg

SEQ ID NO: 2572540 - DNA, 25 bp, Homo sapien
cagaaggaagcacctcctcatggca

SEQ ID NO: 2572541 - DNA, 25 bp, Homo sapien
cccagaagcagacattccattgctg

SEQ ID NO: 2572542 - DNA, 25 bp, Homo sapien
aggaagcacctcctcatggcagagg

SEQ ID NO: 2572543 - DNA, 25 bp, Homo sapien
cagacattccattgctgtgggccat

SEQ ID NO: 2572544 - DNA, 25 bp, Homo sapien
ggactgtgaaatcgccctgagatga

SEQ ID NO: 2572545 - DNA, 25 bp, Homo sapien
ctgagatgacccacagtcctcagct

SEQ ID NO: 2572546 - DNA, 25 bp, Homo sapien
gcatgtggggactgtgaaatcgccc

SEQ ID NO: 2572547 - DNA, 25 bp, Homo sapien
cctgagatgacccacagtcctcagc

SEQ ID NO: 2572548 - DNA, 25 bp, Homo sapien
taggcattcccagatacagtgaagg

SEQ ID NO: 2572549 - DNA, 25 bp, Homo sapien
agtgaaggtcctcacaccaagatat

SEQ ID NO: 2572550 - DNA, 25 bp, Homo sapien
taccgaagtaaccagtaggcattcc

SEQ ID NO: 2572551 - DNA, 25 bp, Homo sapien
ttaccgaagtaaccagtaggcattc

SEQ ID NO: 2572552 - DNA, 25 bp, Homo sapien
agatgcacctggcatgaggcgtgcc

SEQ ID NO: 2572553 - DNA, 25 bp, Homo sapien
aggagcatggcccctgtccacagat

SEQ ID NO: 2572554 - DNA, 25 bp, Homo sapien
gatgagtttcgtctcctccactgga

SEQ ID NO: 2572555 - DNA, 25 bp, Homo sapien
acagaggcagatgagtttcgtctcc

SEQ ID NO: 2572556 - DNA, 25 bp, Homo sapien
attttccgttccccagcattggcgg

SEQ ID NO: 2572557 - DNA, 25 bp, Homo sapien
ctccctcattttccgttccccagca

SEQ ID NO: 2572558 - DNA, 25 bp, Homo sapien
actggtggctgtggtggctcgctgg

SEQ ID NO: 2572559 - DNA, 25 bp, Homo sapien
ggactggtggctgtggtggctcgct

SEQ ID NO: 2572560 - DNA, 25 bp, Homo sapien
tccaagcaggctcatggactagtgc

SEQ ID NO: 2572561 - DNA, 25 bp, Homo sapien
gacatccagtgtgattccaagcagg

SEQ ID NO: 2572562 - DNA, 25 bp, Homo sapien
tacaagacaaaacggagacatccag

SEQ ID NO: 2572563 - DNA, 25 bp, Homo sapien
ggactagtgcttaccataacccagg

SEQ ID NO: 2572564 - DNA, 25 bp, Homo sapien
tctgccagctcgcttctgctctgct

SEQ ID NO: 2572565 - DNA, 25 bp, Homo sapien
agacttctgccagctcgcttctgct

SEQ ID NO: 2572566 - DNA, 25 bp, Homo sapien
gagacttctgccagctcgcttctgc

SEQ ID NO: 2572567 - DNA, 25 bp, Homo sapien
acttctgccagctcgcttctgctct

SEQ ID NO: 2572568 - DNA, 25 bp, Homo sapien
ctcctcttgccctggcggacgtggg

SEQ ID NO: 2572569 - DNA, 25 bp, Homo sapien
ggcggacgtggggccccactctggc

SEQ ID NO: 2572570 - DNA, 25 bp, Homo sapien
ctggaagattttctagcagctttct

SEQ ID NO: 2572571 - DNA, 25 bp, Homo sapien
caggccctcgcaatgtattcttgct

SEQ ID NO: 2572572 - DNA, 25 bp, Homo sapien
gaagctaaggttgcactggaagatt

SEQ ID NO: 2572573 - DNA, 25 bp, Homo sapien
ttctcagacaaaccctgggctgggc

SEQ ID NO: 2572574 - DNA, 25 bp, Homo sapien
acgggatccgcttactcttggttct

SEQ ID NO: 2572575 - DNA, 25 bp, Homo sapien
tctgaacgggatccgcttactcttg

SEQ ID NO: 2572576 - DNA, 25 bp, Homo sapien
cgagtggtctgaacgggatccgctt

SEQ ID NO: 2572577 - DNA, 25 bp, Homo sapien
ccgcttactcttggttctcacgggc

SEQ ID NO: 2572578 - DNA, 25 bp, Homo sapien
aacagaaagcatgaggacgcaagac

SEQ ID NO: 2572579 - DNA, 25 bp, Homo sapien
acagaaagcatgaggacgcaagact

SEQ ID NO: 2572580 - DNA, 25 bp, Homo sapien
aaacagaaagcatgaggacgcaaga

SEQ ID NO: 2572581 - DNA, 25 bp, Homo sapien
taagaggtcgccaggaaatacagct

SEQ ID NO: 2572582 - DNA, 25 bp, Homo sapien
cacgtggtgcataggcacttgggta

SEQ ID NO: 2572583 - DNA, 25 bp, Homo sapien
caaacttgtaaatagatccacgtgg

SEQ ID NO: 2572584 - DNA, 25 bp, Homo sapien
cacttgggtaagaggtcgccaggaa

SEQ ID NO: 2572585 - DNA, 25 bp, Homo sapien
tttgtttgccagatgtaccatgact

SEQ ID NO: 2572586 - DNA, 25 bp, Homo sapien
aacacgttggcaagtctaccccatg

SEQ ID NO: 2572587 - DNA, 25 bp, Homo sapien
tctacggtgagaagtctgcaagcac

SEQ ID NO: 2572588 - DNA, 25 bp, Homo sapien
tgtctgttttctacggtgagaagtc

SEQ ID NO: 2572589 - DNA, 25 bp, Homo sapien
aacttgctatgggtgctgatcagcc

SEQ ID NO: 2572590 - DNA, 25 bp, Homo sapien
aaggcacaggacgtggtgctgccca

SEQ ID NO: 2572591 - DNA, 25 bp, Homo sapien
ttcatcttcagcaaaggagatgatg

SEQ ID NO: 2572592 - DNA, 25 bp, Homo sapien
gtgctgcccaggcaaagatcctgct

SEQ ID NO: 2572593 - DNA, 25 bp, Homo sapien
gatatacaggccattgagatttggg

SEQ ID NO: 2572594 - DNA, 25 bp, Homo sapien
tgcatggccataagcatagattggc

SEQ ID NO: 2572595 - DNA, 25 bp, Homo sapien
gggattcacaaccacgatagacata

SEQ ID NO: 2572596 - DNA, 25 bp, Homo sapien
gatagacataacctccagtgactga

SEQ ID NO: 2572597 - DNA, 25 bp, Homo sapien
gagagtgagtgtcgtggcctaaaat

SEQ ID NO: 2572598 - DNA, 25 bp, Homo sapien
aagagagtgagtgtcgtggcctaaa

SEQ ID NO: 2572599 - DNA, 25 bp, Homo sapien
aaagagagtgagtgtcgtggcctaa

SEQ ID NO: 2572600 - DNA, 25 bp, Homo sapien
agtgagtgtcgtggcctaaaattga

SEQ ID NO: 2572601 - DNA, 25 bp, Homo sapien
ccatctatgaggcagtgacctggaa

SEQ ID NO: 2572602 - DNA, 25 bp, Homo sapien
aggcaagcaagtgaatcatgtttat

SEQ ID NO: 2572603 - DNA, 25 bp, Homo sapien
caataggccatccacaatatttgca

SEQ ID NO: 2572604 - DNA, 25 bp, Homo sapien
acttcctacttaactgctatctgca

SEQ ID NO: 2572605 - DNA, 25 bp, Homo sapien
tccagccatagtttccacctttcaa

SEQ ID NO: 2572606 - DNA, 25 bp, Homo sapien
tctccagccatagtttccacctttc

SEQ ID NO: 2572607 - DNA, 25 bp, Homo sapien
ctccagccatagtttccacctttca

SEQ ID NO: 2572608 - DNA, 25 bp, Homo sapien
ctctccagccatagtttccaccttt

SEQ ID NO: 2572609 - DNA, 25 bp, Homo sapien
tgatcccataggcatagatggcggg

SEQ ID NO: 2572610 - DNA, 25 bp, Homo sapien
acagcacaacgccacatgttcctga

SEQ ID NO: 2572611 - DNA, 25 bp, Homo sapien
cacgtccccacagaatatccggcct

SEQ ID NO: 2572612 - DNA, 25 bp, Homo sapien
ggcctcggccctggcgcgtgatggg

SEQ ID NO: 2572613 - DNA, 25 bp, Homo sapien
cagaaacaaatggattgtccgaggg

SEQ ID NO: 2572614 - DNA, 25 bp, Homo sapien
tgccctgttcacatcgatccttaaa

SEQ ID NO: 2572615 - DNA, 25 bp, Homo sapien
tccgaggggactcggtaccgcttgc

SEQ ID NO: 2572616 - DNA, 25 bp, Homo sapien
gggactcggtaccgcttgccatgtg

SEQ ID NO: 2572617 - DNA, 25 bp, Homo sapien
gaggctggttcttcaatctccaaga

SEQ ID NO: 2572618 - DNA, 25 bp, Homo sapien
tctgagcatttccaaacaggccaaa

SEQ ID NO: 2572619 - DNA, 25 bp, Homo sapien
tgtacatatagccatccaggccaaa

SEQ ID NO: 2572620 - DNA, 25 bp, Homo sapien
ttgtccgccattatggtttgaggct

SEQ ID NO: 2572621 - DNA, 25 bp, Homo sapien
tcttgtccaggcacgaataataaat

SEQ ID NO: 2572622 - DNA, 25 bp, Homo sapien
ggatcagcccgagaaaccttcatct

SEQ ID NO: 2572623 - DNA, 25 bp, Homo sapien
tcaggtcagctttgttaggatcagc

SEQ ID NO: 2572624 - DNA, 25 bp, Homo sapien
ctcactaattcggatcttttctacc

SEQ ID NO: 2572625 - DNA, 25 bp, Homo sapien
gggtggtcaacacgatgttcttgag

SEQ ID NO: 2572626 - DNA, 25 bp, Homo sapien
aacaaagaagcgatgggtgccgtcc

SEQ ID NO: 2572627 - DNA, 25 bp, Homo sapien
ctcccatcagggaggtagacccaca

SEQ ID NO: 2572628 - DNA, 25 bp, Homo sapien
ccaggaagggttgctccaggcgact

SEQ ID NO: 2572629 - DNA, 25 bp, Homo sapien
tggcggttgagatagtcgttcctca

SEQ ID NO: 2572630 - DNA, 25 bp, Homo sapien
tcctcaggacattagggaagcaata

SEQ ID NO: 2572631 - DNA, 25 bp, Homo sapien
gggtaccgtcccttccatgagactc

SEQ ID NO: 2572632 - DNA, 25 bp, Homo sapien
tgacagttagaatggaaggcagagc

SEQ ID NO: 2572633 - DNA, 25 bp, Homo sapien
tagtcagagcaaaactcaaggtgca

SEQ ID NO: 2572634 - DNA, 25 bp, Homo sapien
cagccgaaggactcatagtcagagc

SEQ ID NO: 2572635 - DNA, 25 bp, Homo sapien
tccatgatgtcccagtaccgggcag

SEQ ID NO: 2572636 - DNA, 25 bp, Homo sapien
tgcggcggtccttgtgctgatcaca

SEQ ID NO: 2572637 - DNA, 25 bp, Homo sapien
cagggggcccggcaatgcagaccac

SEQ ID NO: 2572638 - DNA, 25 bp, Homo sapien
gattaggagtggacgttctcagcat

SEQ ID NO: 2572639 - DNA, 25 bp, Homo sapien
cacagattaggagtggacgttctca

SEQ ID NO: 2572640 - DNA, 25 bp, Homo sapien
tgcagaccaccacacagattaggag

SEQ ID NO: 2572641 - DNA, 25 bp, Homo sapien
gatttcccctttgtcgtgaacaata

SEQ ID NO: 2572642 - DNA, 25 bp, Homo sapien
ccaggtaggacctgagagtattttc

SEQ ID NO: 2572643 - DNA, 25 bp, Homo sapien
tcaaaccctgggatatggaagaatg

SEQ ID NO: 2572644 - DNA, 25 bp, Homo sapien
gagtgcattatctcatccaggtagg

SEQ ID NO: 2572645 - DNA, 25 bp, Homo sapien
gaagaggaagcgcttgtatgctgct

SEQ ID NO: 2572646 - DNA, 25 bp, Homo sapien
tcaaaccaggagatacagcctcaca

SEQ ID NO: 2572647 - DNA, 25 bp, Homo sapien
ccagtcacgacggaaatgctaatca

SEQ ID NO: 2572648 - DNA, 25 bp, Homo sapien
cacacctggtagaatgaatcgtatc

SEQ ID NO: 2572649 - DNA, 25 bp, Homo sapien
tccagagagttgcatgtcgtcacag

SEQ ID NO: 2572650 - DNA, 25 bp, Homo sapien
tagtaaccatataagcaagcagtcc

SEQ ID NO: 2572651 - DNA, 25 bp, Homo sapien
tggtgccaacacctatgagctgtga

SEQ ID NO: 2572652 - DNA, 25 bp, Homo sapien
gaagcagcttaaacatcagtggacc

SEQ ID NO: 2572653 - DNA, 25 bp, Homo sapien
gtgtccagtcaaataccgctgcatc

SEQ ID NO: 2572654 - DNA, 25 bp, Homo sapien
gtccagtcaaataccgctgcatcct

SEQ ID NO: 2572655 - DNA, 25 bp, Homo sapien
tgtccagtcaaataccgctgcatcc

SEQ ID NO: 2572656 - DNA, 25 bp, Homo sapien
cagccagcccactctactgctatga

SEQ ID NO: 2572657 - DNA, 25 bp, Homo sapien
gtcatgtctttatactgaaagagtc

SEQ ID NO: 2572658 - DNA, 25 bp, Homo sapien
caggaggttattttgccccaaactg

SEQ ID NO: 2572659 - DNA, 25 bp, Homo sapien
aattagtcctctagagtcaaaggtc

SEQ ID NO: 2572660 - DNA, 25 bp, Homo sapien
attcctcaatagaactcatcaccaa

SEQ ID NO: 2572661 - DNA, 25 bp, Homo sapien
ctaaaatggattaattagaatataa

SEQ ID NO: 2572662 - DNA, 25 bp, Homo sapien
tggattaattagaatataaaagtag

SEQ ID NO: 2572663 - DNA, 25 bp, Homo sapien
ggattaattagaatataaaagtaga

SEQ ID NO: 2572664 - DNA, 25 bp, Homo sapien
aaatggattaattagaatataaaag

SEQ ID NO: 2572665 - DNA, 25 bp, Homo sapien
tgtaattagtttgtcatttgaagaa

SEQ ID NO: 2572666 - DNA, 25 bp, Homo sapien
aaggcagtaatattgtttctctagc

SEQ ID NO: 2572667 - DNA, 25 bp, Homo sapien
tgtagtaatataagcttcttaatac

SEQ ID NO: 2572668 - DNA, 25 bp, Homo sapien
ttgcaaacaataactgctgtagagc

SEQ ID NO: 2572669 - DNA, 25 bp, Homo sapien
aactgtgaaataactaaaattcagt

SEQ ID NO: 2572670 - DNA, 25 bp, Homo sapien
gtagctacaactgtgaaataactaa

SEQ ID NO: 2572671 - DNA, 25 bp, Homo sapien
actgtgaaataactaaaattcagta

SEQ ID NO: 2572672 - DNA, 25 bp, Homo sapien
tgtgtagctacaactgtgaaataac

SEQ ID NO: 2572673 - DNA, 25 bp, Homo sapien
tgctttaaaatataccggaaatatc

SEQ ID NO: 2572674 - DNA, 25 bp, Homo sapien
agatctcttcatccgcttaattttc

SEQ ID NO: 2572675 - DNA, 25 bp, Homo sapien
tcttcatccgcttaattttcttccc

SEQ ID NO: 2572676 - DNA, 25 bp, Homo sapien
tttcctaacagtaaaccagccacaa

SEQ ID NO: 2572677 - DNA, 25 bp, Homo sapien
ttcctaacagtaaaccagccacaaa

SEQ ID NO: 2572678 - DNA, 25 bp, Homo sapien
ttttcctaacagtaaaccagccaca

SEQ ID NO: 2572679 - DNA, 25 bp, Homo sapien
ttttgcccaaaagtagctgaaatga

SEQ ID NO: 2572680 - DNA, 25 bp, Homo sapien
ccactcttcttgaacccacgcaagg

SEQ ID NO: 2572681 - DNA, 25 bp, Homo sapien
cttcttgaacccacgcaaggtggtt

SEQ ID NO: 2572682 - DNA, 25 bp, Homo sapien
actcttcttgaacccacgcaaggtg

SEQ ID NO: 2572683 - DNA, 25 bp, Homo sapien
gttatattcttagtgcatccggcaa

SEQ ID NO: 2572684 - DNA, 25 bp, Homo sapien
atgagatggtacaatctgatacaaa

SEQ ID NO: 2572685 - DNA, 25 bp, Homo sapien
gagatggtacaatctgatacaaaat

SEQ ID NO: 2572686 - DNA, 25 bp, Homo sapien
caacatcaatttatgagatggtaca

SEQ ID NO: 2572687 - DNA, 25 bp, Homo sapien
ttccaacatcaatttatgagatggt

SEQ ID NO: 2572688 - DNA, 25 bp, Homo sapien
tagattcaaaatctcagcaagacct

SEQ ID NO: 2572689 - DNA, 25 bp, Homo sapien
ccatgaaacacttagggacaaattt

SEQ ID NO: 2572690 - DNA, 25 bp, Homo sapien
catgatatgattccaagacttgcta

SEQ ID NO: 2572691 - DNA, 25 bp, Homo sapien
tggcaataactcacatttagaagac

SEQ ID NO: 2572692 - DNA, 25 bp, Homo sapien
ggttcatgaatgtaacgcatccaag

SEQ ID NO: 2572693 - DNA, 25 bp, Homo sapien
tatatcatgattaccatggtggttc

SEQ ID NO: 2572694 - DNA, 25 bp, Homo sapien
caagagaagccagattaaaatgact

SEQ ID NO: 2572695 - DNA, 25 bp, Homo sapien
tcaaatatgttacgctgagcaagag

SEQ ID NO: 2572696 - DNA, 25 bp, Homo sapien
aaccctggtcaaacatcgagataaa

SEQ ID NO: 2572697 - DNA, 25 bp, Homo sapien
ggcctaagaatgttttaatgtagat

SEQ ID NO: 2572698 - DNA, 25 bp, Homo sapien
aatggcctaagaatgttttaatgta

SEQ ID NO: 2572699 - DNA, 25 bp, Homo sapien
aaagttagaaagcaatggcctaaga

SEQ ID NO: 2572700 - DNA, 25 bp, Homo sapien
tgggctccatctcgatccccataga

SEQ ID NO: 2572701 - DNA, 25 bp, Homo sapien
catatgcataattggtgagtacctc

SEQ ID NO: 2572702 - DNA, 25 bp, Homo sapien
catttggatttgatggaaacttttc

SEQ ID NO: 2572703 - DNA, 25 bp, Homo sapien
aaagttgtataagtagatatgggca

SEQ ID NO: 2572704 - DNA, 25 bp, Homo sapien
cataactcttcacaaaagggtccca

SEQ ID NO: 2572705 - DNA, 25 bp, Homo sapien
cagctgtggttgaacacatcctggg

SEQ ID NO: 2572706 - DNA, 25 bp, Homo sapien
gggctactgcattgtaagcataatc

SEQ ID NO: 2572707 - DNA, 25 bp, Homo sapien
ctacataactcttcacaaaagggtc

SEQ ID NO: 2572708 - DNA, 25 bp, Homo sapien
gaaggtataatgcatgttgtaagga

SEQ ID NO: 2572709 - DNA, 25 bp, Homo sapien
cccgggaagacgtattttcaccatg

SEQ ID NO: 2572710 - DNA, 25 bp, Homo sapien
ctgtaaaagccctttataggcctga

SEQ ID NO: 2572711 - DNA, 25 bp, Homo sapien
tagcatctttaagcattccatgatg

SEQ ID NO: 2572712 - DNA, 25 bp, Homo sapien
ccaatatttttcatccggttagcaa

SEQ ID NO: 2572713 - DNA, 25 bp, Homo sapien
taattcatgacgccaatatttttca

SEQ ID NO: 2572714 - DNA, 25 bp, Homo sapien
taaataattcatgacgccaatattt

SEQ ID NO: 2572715 - DNA, 25 bp, Homo sapien
caatatttttcatccggttagcaaa

SEQ ID NO: 2572716 - DNA, 25 bp, Homo sapien
tttcacttccgagcttccaaataat

SEQ ID NO: 2572717 - DNA, 25 bp, Homo sapien
atttcacttccgagcttccaaataa

SEQ ID NO: 2572718 - DNA, 25 bp, Homo sapien
cattcagaaagtgcaggttgcagtt

SEQ ID NO: 2572719 - DNA, 25 bp, Homo sapien
tcaaagtaggcctcaatgaaaaggg

SEQ ID NO: 2572720 - DNA, 25 bp, Homo sapien
tccaagaactggttaaggcaaaggc

SEQ ID NO: 2572721 - DNA, 25 bp, Homo sapien
caggacaaggagatcaggagtgcca

SEQ ID NO: 2572722 - DNA, 25 bp, Homo sapien
aaacaagcacttgttgtctgagcaa

SEQ ID NO: 2572723 - DNA, 25 bp, Homo sapien
aataactgtacatgtattctgcagc

SEQ ID NO: 2572724 - DNA, 25 bp, Homo sapien
tgttgtctgagcaaaatccttcctc

SEQ ID NO: 2572725 - DNA, 25 bp, Homo sapien
tgcttcagcagagcttcttggataa

SEQ ID NO: 2572726 - DNA, 25 bp, Homo sapien
caggcccttttaattcttcactgaa

SEQ ID NO: 2572727 - DNA, 25 bp, Homo sapien
cacagtttctacgtatgtttgaagc

SEQ ID NO: 2572728 - DNA, 25 bp, Homo sapien
tgcattcctgcaccactgagcacag

SEQ ID NO: 2572729 - DNA, 25 bp, Homo sapien
ggaaaatgcattcctgcaccactga

SEQ ID NO: 2572730 - DNA, 25 bp, Homo sapien
cggttggtaactcctcctgcggcag

SEQ ID NO: 2572731 - DNA, 25 bp, Homo sapien
ccggttggtaactcctcctgcggca

SEQ ID NO: 2572732 - DNA, 25 bp, Homo sapien
cattcaaaagcggagaatgtcactt

SEQ ID NO: 2572733 - DNA, 25 bp, Homo sapien
ctgggcgaagggagcattcaaaagc

SEQ ID NO: 2572734 - DNA, 25 bp, Homo sapien
tggcggctgggcgaagggagcattc

SEQ ID NO: 2572735 - DNA, 25 bp, Homo sapien
cgaagggagcattcaaaagcggaga

SEQ ID NO: 2572736 - DNA, 25 bp, Homo sapien
ccgagaaattcactacgatgggcca

SEQ ID NO: 2572737 - DNA, 25 bp, Homo sapien
gatgggccattggtttctgctcggc

SEQ ID NO: 2572738 - DNA, 25 bp, Homo sapien
ctagtggctgtgatgagataaatcc

SEQ ID NO: 2572739 - DNA, 25 bp, Homo sapien
caatttgggcgagaatttcctttgc

SEQ ID NO: 2572740 - DNA, 25 bp, Homo sapien
aatgtgcttctcttatagacaacag

SEQ ID NO: 2572741 - DNA, 25 bp, Homo sapien
tcacagccttagagttaaaattatg

SEQ ID NO: 2572742 - DNA, 25 bp, Homo sapien
gcattattgctttacagtgtttctg

SEQ ID NO: 2572743 - DNA, 25 bp, Homo sapien
catcttaattcctctgttggcttta

SEQ ID NO: 2572744 - DNA, 25 bp, Homo sapien
atatatatcatatctatgcacattg

SEQ ID NO: 2572745 - DNA, 25 bp, Homo sapien
gtcatatatatcatatctatgcaca

SEQ ID NO: 2572746 - DNA, 25 bp, Homo sapien
tatatcatatctatgcacattgtta

SEQ ID NO: 2572747 - DNA, 25 bp, Homo sapien
ctttgttgtcatatatatcatatct

SEQ ID NO: 2572748 - DNA, 25 bp, Homo sapien
gagagaagtaactggtattagcaag

SEQ ID NO: 2572749 - DNA, 25 bp, Homo sapien
tgagagaagtaactggtattagcaa

SEQ ID NO: 2572750 - DNA, 25 bp, Homo sapien
gagaagtaactggtattagcaagag

SEQ ID NO: 2572751 - DNA, 25 bp, Homo sapien
agagaagtaactggtattagcaaga

SEQ ID NO: 2572752 - DNA, 25 bp, Homo sapien
tatgtgctgtagattgaggtttgca

SEQ ID NO: 2572753 - DNA, 25 bp, Homo sapien
gccatgcgacgctaatcatttccac

SEQ ID NO: 2572754 - DNA, 25 bp, Homo sapien
gatgttggaagtggtctcaaatagc

SEQ ID NO: 2572755 - DNA, 25 bp, Homo sapien
ggtttgcagctctatcgttcatatt

SEQ ID NO: 2572756 - DNA, 25 bp, Homo sapien
gaaatgactctagacttgaaaacca

SEQ ID NO: 2572757 - DNA, 25 bp, Homo sapien
ccagcaatagttctcaggtctcaaa

SEQ ID NO: 2572758 - DNA, 25 bp, Homo sapien
tgatgatgagacaaccagactcgtt

SEQ ID NO: 2572759 - DNA, 25 bp, Homo sapien
caaagtctggcgttgagaaatatcc

SEQ ID NO: 2572760 - DNA, 25 bp, Homo sapien
catatattaaactcgtcagtgggag

SEQ ID NO: 2572761 - DNA, 25 bp, Homo sapien
tctcgctcagcatgttcagacagtc

SEQ ID NO: 2572762 - DNA, 25 bp, Homo sapien
gctctgggctgctgaatcgtctggc

SEQ ID NO: 2572763 - DNA, 25 bp, Homo sapien
tatctgcttggttaggaagtctgtc

SEQ ID NO: 2572764 - DNA, 25 bp, Homo sapien
gtgagcatcatttcaacccaacagt

SEQ ID NO: 2572765 - DNA, 25 bp, Homo sapien
tctttatcatggtaccagccttgga

SEQ ID NO: 2572766 - DNA, 25 bp, Homo sapien
gttcaacagacattgccagtactcg

SEQ ID NO: 2572767 - DNA, 25 bp, Homo sapien
gtacaagggtaactacaagtagcac

SEQ ID NO: 2572768 - DNA, 25 bp, Homo sapien
caatagctcaaagctcgtgctgcag

SEQ ID NO: 2572769 - DNA, 25 bp, Homo sapien
cagatcgctacccatgagaagaaag

SEQ ID NO: 2572770 - DNA, 25 bp, Homo sapien
cgtgctgcagaaagagctatagctg

SEQ ID NO: 2572771 - DNA, 25 bp, Homo sapien
gaattacagaagacagagcggtcat

SEQ ID NO: 2572772 - DNA, 25 bp, Homo sapien
gaatgctcccctccattgacagtgg

SEQ ID NO: 2572773 - DNA, 25 bp, Homo sapien
tccttgcaatactcttttgggtggc

SEQ ID NO: 2572774 - DNA, 25 bp, Homo sapien
catctttaggtcctctgagccagaa

SEQ ID NO: 2572775 - DNA, 25 bp, Homo sapien
ccatcccctgtgagtggtggagaat

SEQ ID NO: 2572776 - DNA, 25 bp, Homo sapien
tcaaggatcagtggacgggcctcta

SEQ ID NO: 2572777 - DNA, 25 bp, Homo sapien
cagcagcagtcatttcagtcagacg

SEQ ID NO: 2572778 - DNA, 25 bp, Homo sapien
gaaccagagccattaatgtgcaggg

SEQ ID NO: 2572779 - DNA, 25 bp, Homo sapien
tgtgagtatccgcttaaaacaccgt

SEQ ID NO: 2572780 - DNA, 25 bp, Homo sapien
gaacgtggccttggagtcaaacctg

SEQ ID NO: 2572781 - DNA, 25 bp, Homo sapien
gagcagcttggataagacccgagac

SEQ ID NO: 2572782 - DNA, 25 bp, Homo sapien
taattacccgttgagccagttccca

SEQ ID NO: 2572783 - DNA, 25 bp, Homo sapien
tcgatgaaggcaaggtaaatgcacc

SEQ ID NO: 2572784 - DNA, 25 bp, Homo sapien
tgacctccatttataacctgtgcgt

SEQ ID NO: 2572785 - DNA, 25 bp, Homo sapien
tctttggacaagtgcctgacatctg

SEQ ID NO: 2572786 - DNA, 25 bp, Homo sapien
tactctgcaggttaatatggctcca

SEQ ID NO: 2572787 - DNA, 25 bp, Homo sapien
tctaagcttgtcagtgggaacaaat

SEQ ID NO: 2572788 - DNA, 25 bp, Homo sapien
ggcaagcaccttaatttttatggca

SEQ ID NO: 2572789 - DNA, 25 bp, Homo sapien
tattaggtacatcttgagctactgc

SEQ ID NO: 2572790 - DNA, 25 bp, Homo sapien
tcttggtatggtatatagtacttcc

SEQ ID NO: 2572791 - DNA, 25 bp, Homo sapien
gcaatgaagccatatttagtctgtc

SEQ ID NO: 2572792 - DNA, 25 bp, Homo sapien
gacacgcaccatttagacctttagg

SEQ ID NO: 2572793 - DNA, 25 bp, Homo sapien
taagagaatttgcaccaggcgttcc

SEQ ID NO: 2572794 - DNA, 25 bp, Homo sapien
tgtaagagacttactgccgtcaggc

SEQ ID NO: 2572795 - DNA, 25 bp, Homo sapien
tagtgtacaccagctgaatacggag

SEQ ID NO: 2572796 - DNA, 25 bp, Homo sapien
tcacatgctttctttacgatcctca

SEQ ID NO: 2572797 - DNA, 25 bp, Homo sapien
tctatttgagaatggttttctgaga

SEQ ID NO: 2572798 - DNA, 25 bp, Homo sapien
caagagttgtttgacctgatgttcc

SEQ ID NO: 2572799 - DNA, 25 bp, Homo sapien
gagtgagtttacattagtagcaaga

SEQ ID NO: 2572800 - DNA, 25 bp, Homo sapien
tataacatgccctaggtcagcaacc

SEQ ID NO: 2572801 - DNA, 25 bp, Homo sapien
tgtgtcatggccgtaaaagtataga

SEQ ID NO: 2572802 - DNA, 25 bp, Homo sapien
gattggaagagtataatgccatgag

SEQ ID NO: 2572803 - DNA, 25 bp, Homo sapien
tgtagaaaaagggtgcacaacagaa

SEQ ID NO: 2572804 - DNA, 25 bp, Homo sapien
cgtttctaagaacgaacttcagaca

SEQ ID NO: 2572805 - DNA, 25 bp, Homo sapien
aaaaggagcaaaagcttcaatgtga

SEQ ID NO: 2572806 - DNA, 25 bp, Homo sapien
tggaattgcaccatacttaaagtct

SEQ ID NO: 2572807 - DNA, 25 bp, Homo sapien
tgaaacctagtgtatgtcttgtcac

SEQ ID NO: 2572808 - DNA, 25 bp, Homo sapien
cataattgagaaactggtaagctgt

SEQ ID NO: 2572809 - DNA, 25 bp, Homo sapien
aagattccagtgtagcttctctgag

SEQ ID NO: 2572810 - DNA, 25 bp, Homo sapien
tgagaagttgtgagccagtccataa

SEQ ID NO: 2572811 - DNA, 25 bp, Homo sapien
tccacagaagagcataggccacttt

SEQ ID NO: 2572812 - DNA, 25 bp, Homo sapien
gtcatctccaactaattgtgtctgg

SEQ ID NO: 2572813 - DNA, 25 bp, Homo sapien
gaagcagcaatattcagcctgaaag

SEQ ID NO: 2572814 - DNA, 25 bp, Homo sapien
ttgtagttatatcgccaatggctga

SEQ ID NO: 2572815 - DNA, 25 bp, Homo sapien
taaaattgtcttatttatgaagcag

SEQ ID NO: 2572816 - DNA, 25 bp, Homo sapien
gaaaggtatttgtagttcatataaa

SEQ ID NO: 2572817 - DNA, 25 bp, Homo sapien
tgaaggatagcagatgcttcatata

SEQ ID NO: 2572818 - DNA, 25 bp, Homo sapien
catataaactatacttatgtgaagg

SEQ ID NO: 2572819 - DNA, 25 bp, Homo sapien
atcttatggtttatgagaaaagaga

SEQ ID NO: 2572820 - DNA, 25 bp, Homo sapien
cccctagagctattgtggactgaat

SEQ ID NO: 2572821 - DNA, 25 bp, Homo sapien
taatccaatcaagatgagagacaag

SEQ ID NO: 2572822 - DNA, 25 bp, Homo sapien
tcagcaacatcaaacaaaaggtact

SEQ ID NO: 2572823 - DNA, 25 bp, Homo sapien
tacagtctagggatttgacaactca

SEQ ID NO: 2572824 - DNA, 25 bp, Homo sapien
cacaacagtattgttccaggaagca

SEQ ID NO: 2572825 - DNA, 25 bp, Homo sapien
gggatactgatctggccaaggcaca

SEQ ID NO: 2572826 - DNA, 25 bp, Homo sapien
gaaaaacaatctggtcatctggaaa

SEQ ID NO: 2572827 - DNA, 25 bp, Homo sapien
cagacagaccttcttaggcagcaga

SEQ ID NO: 2572828 - DNA, 25 bp, Homo sapien
catctccatgaaagcaaaacacttg

SEQ ID NO: 2572829 - DNA, 25 bp, Homo sapien
tatggttgtcaccccgaactcttct

SEQ ID NO: 2572830 - DNA, 25 bp, Homo sapien
gttgtcaccccgaactcttctgtat

SEQ ID NO: 2572831 - DNA, 25 bp, Homo sapien
ggttgtcaccccgaactcttctgta

SEQ ID NO: 2572832 - DNA, 25 bp, Homo sapien
tggttgtcaccccgaactcttctgt

SEQ ID NO: 2572833 - DNA, 25 bp, Homo sapien
taatttttcaacatgcttctggagc

SEQ ID NO: 2572834 - DNA, 25 bp, Homo sapien
tatcttgcacaggagttaagtctat

SEQ ID NO: 2572835 - DNA, 25 bp, Homo sapien
tttttcaacatgcttctggagctca

SEQ ID NO: 2572836 - DNA, 25 bp, Homo sapien
tttcaacatgcttctggagctcaat

SEQ ID NO: 2572837 - DNA, 25 bp, Homo sapien
attctgatagtgagtaatgtcattc

SEQ ID NO: 2572838 - DNA, 25 bp, Homo sapien
tcattaaatatgactgaggcgctaa

SEQ ID NO: 2572839 - DNA, 25 bp, Homo sapien
ttcttatactagtacactggccaga

SEQ ID NO: 2572840 - DNA, 25 bp, Homo sapien
aaatagttaacaggaggcacccttg

SEQ ID NO: 2572841 - DNA, 25 bp, Homo sapien
tcataacatctgcaaataaagggac

SEQ ID NO: 2572842 - DNA, 25 bp, Homo sapien
gagtctcagttctggctagattacc

SEQ ID NO: 2572843 - DNA, 25 bp, Homo sapien
tcagttcttccctaattcaaggtag

SEQ ID NO: 2572844 - DNA, 25 bp, Homo sapien
tacatggtgagcatcctgaaagacg

SEQ ID NO: 2572845 - DNA, 25 bp, Homo sapien
tatctttactaaggaacagctgaag

SEQ ID NO: 2572846 - DNA, 25 bp, Homo sapien
cctagaccagaacgttaaagaggca

SEQ ID NO: 2572847 - DNA, 25 bp, Homo sapien
tattttatagatgcttgtcacaggc

SEQ ID NO: 2572848 - DNA, 25 bp, Homo sapien
tgcattgcacatagataacaggtca

SEQ ID NO: 2572849 - DNA, 25 bp, Homo sapien
caggcactggtacttcaatgagagg

SEQ ID NO: 2572850 - DNA, 25 bp, Homo sapien
aattccaaatctttctcaccaggtg

SEQ ID NO: 2572851 - DNA, 25 bp, Homo sapien
gggaactctagcaggaaaagaatca

SEQ ID NO: 2572852 - DNA, 25 bp, Homo sapien
tccaaatctttctcaccaggtgcca

SEQ ID NO: 2572853 - DNA, 25 bp, Homo sapien
ttcaaattccaaatctttctcacca

SEQ ID NO: 2572854 - DNA, 25 bp, Homo sapien
taagaaaacccagaactatctgaaa

SEQ ID NO: 2572855 - DNA, 25 bp, Homo sapien
tgatgtcaatgatatcaataatacc

SEQ ID NO: 2572856 - DNA, 25 bp, Homo sapien
gctgatatactgttatcattgttga

SEQ ID NO: 2572857 - DNA, 25 bp, Homo sapien
tgatatcaataataccaaagttgat

SEQ ID NO: 2572858 - DNA, 25 bp, Homo sapien
gctgaacatcaaatgggaattcttt

SEQ ID NO: 2572859 - DNA, 25 bp, Homo sapien
cttaatgggacaggctgaacatcaa

SEQ ID NO: 2572860 - DNA, 25 bp, Homo sapien
caggctgaacatcaaatgggaattc

SEQ ID NO: 2572861 - DNA, 25 bp, Homo sapien
tgggacaggctgaacatcaaatggg

SEQ ID NO: 2572862 - DNA, 25 bp, Homo sapien
gaagataaagaaacatgaattcttc

SEQ ID NO: 2572863 - DNA, 25 bp, Homo sapien
aaagaaacatgaattcttccatgaa

SEQ ID NO: 2572864 - DNA, 25 bp, Homo sapien
ctagaataagaagataaagaaacat

SEQ ID NO: 2572865 - DNA, 25 bp, Homo sapien
tagaataagaagataaagaaacatg

SEQ ID NO: 2572866 - DNA, 25 bp, Homo sapien
cttcaggtcctccagtttaaattct

SEQ ID NO: 2572867 - DNA, 25 bp, Homo sapien
agcttcttcaggtcctccagtttaa

SEQ ID NO: 2572868 - DNA, 25 bp, Homo sapien
ttggttctagcttcttcaggtcctc

SEQ ID NO: 2572869 - DNA, 25 bp, Homo sapien
cttcttcaggtcctccagtttaaat

SEQ ID NO: 2572870 - DNA, 25 bp, Homo sapien
gcatgttgcaattttgcctatggtt

SEQ ID NO: 2572871 - DNA, 25 bp, Homo sapien
aagcatgttgcaattttgcctatgg

SEQ ID NO: 2572872 - DNA, 25 bp, Homo sapien
agcatgttgcaattttgcctatggt

SEQ ID NO: 2572873 - DNA, 25 bp, Homo sapien
catgttgcaattttgcctatggttt

SEQ ID NO: 2572874 - DNA, 25 bp, Homo sapien
gagatcatacaagattgggagcatt

SEQ ID NO: 2572875 - DNA, 25 bp, Homo sapien
tctgagatcatacaagattgggagc

SEQ ID NO: 2572876 - DNA, 25 bp, Homo sapien
caagtattaatcaggaccaaccctg

SEQ ID NO: 2572877 - DNA, 25 bp, Homo sapien
atccaagtattaatcaggaccaacc

SEQ ID NO: 2572878 - DNA, 25 bp, Homo sapien
tctgtgaattcagaattattgtgtt

SEQ ID NO: 2572879 - DNA, 25 bp, Homo sapien
ttcagaattattgtgttgagcttgg

SEQ ID NO: 2572880 - DNA, 25 bp, Homo sapien
aattattgtgttgagcttgggcctc

SEQ ID NO: 2572881 - DNA, 25 bp, Homo sapien
tgaattcagaattattgtgttgagc

SEQ ID NO: 2572882 - DNA, 25 bp, Homo sapien
caattttaaacagggtggccagaga

SEQ ID NO: 2572883 - DNA, 25 bp, Homo sapien
tccaggaaatagcaaggaatgtggg

SEQ ID NO: 2572884 - DNA, 25 bp, Homo sapien
atacttccgtaattgcaacacccag

SEQ ID NO: 2572885 - DNA, 25 bp, Homo sapien
gagccctaaggcagaactatgttcc

SEQ ID NO: 2572886 - DNA, 25 bp, Homo sapien
aattggtcttaggttgctcaaggaa

SEQ ID NO: 2572887 - DNA, 25 bp, Homo sapien
tggtcttaggttgctcaaggaaact

SEQ ID NO: 2572888 - DNA, 25 bp, Homo sapien
taagacaaccctgaagttttctgtg

SEQ ID NO: 2572889 - DNA, 25 bp, Homo sapien
agaaattggtcttaggttgctcaag

SEQ ID NO: 2572890 - DNA, 25 bp, Homo sapien
gagctcctgtgcgtggtccattaat

SEQ ID NO: 2572891 - DNA, 25 bp, Homo sapien
gtaccctgcggctatacattatata

SEQ ID NO: 2572892 - DNA, 25 bp, Homo sapien
cattttgctctcttcggttcacatc

SEQ ID NO: 2572893 - DNA, 25 bp, Homo sapien
ttcggttcacatcctgcgcggactc

SEQ ID NO: 2572894 - DNA, 25 bp, Homo sapien
cagaaaccgaaacgaaatcgaggtg

SEQ ID NO: 2572895 - DNA, 25 bp, Homo sapien
tttggcagaagaggtatccctggcc

SEQ ID NO: 2572896 - DNA, 25 bp, Homo sapien
aaaacacggctcaccagaaagaggg

SEQ ID NO: 2572897 - DNA, 25 bp, Homo sapien
gaaggagcgcgagaggagacccttc

SEQ ID NO: 2572898 - DNA, 25 bp, Homo sapien
tcccctcaatcgcaaacagttccct

SEQ ID NO: 2572899 - DNA, 25 bp, Homo sapien
gagcaaggccactcatccttggaac

SEQ ID NO: 2572900 - DNA, 25 bp, Homo sapien
cgtgggcggagaacacacaagtatt

SEQ ID NO: 2572901 - DNA, 25 bp, Homo sapien
aaggaaatcgaggaaaagcaacctg

SEQ ID NO: 2572902 - DNA, 25 bp, Homo sapien
gaaactgactgccaagtgggggacc

SEQ ID NO: 2572903 - DNA, 25 bp, Homo sapien
ccctagagcagcctcgctggggctg

SEQ ID NO: 2572904 - DNA, 25 bp, Homo sapien
ccagtgcctgcggagccccaccctg

SEQ ID NO: 2572905 - DNA, 25 bp, Homo sapien
gggctggtggcgagggatctcagcc

SEQ ID NO: 2572906 - DNA, 25 bp, Homo sapien
agagcggagccgttgtccctagagc

SEQ ID NO: 2572907 - DNA, 25 bp, Homo sapien
ctgcagatacggtgatgagagacac

SEQ ID NO: 2572908 - DNA, 25 bp, Homo sapien
gagacaccgacagaaacaagggaga

SEQ ID NO: 2572909 - DNA, 25 bp, Homo sapien
cctgctcccgcggttagtcactcac

SEQ ID NO: 2572910 - DNA, 25 bp, Homo sapien
cgcacgactggagccggtctggcct

SEQ ID NO: 2572911 - DNA, 25 bp, Homo sapien
attctccctcggctccggaggtagg

SEQ ID NO: 2572912 - DNA, 25 bp, Homo sapien
gtctgggaaaaagaccatagctcaa

SEQ ID NO: 2572913 - DNA, 25 bp, Homo sapien
gagggccgccatcgctattgcggca

SEQ ID NO: 2572914 - DNA, 25 bp, Homo sapien
aaactttgcggctccaaagcgaccg

SEQ ID NO: 2572915 - DNA, 25 bp, Homo sapien
gaagtattgatggttcttacctacc

SEQ ID NO: 2572916 - DNA, 25 bp, Homo sapien
tatagtgattagaaagctctgatcc

SEQ ID NO: 2572917 - DNA, 25 bp, Homo sapien
aagtatgttattgatgagtgcagcc

SEQ ID NO: 2572918 - DNA, 25 bp, Homo sapien
cctcctagaggccagtgttgatttt

SEQ ID NO: 2572919 - DNA, 25 bp, Homo sapien
aaaggaagagatttagagtcacgac

SEQ ID NO: 2572920 - DNA, 25 bp, Homo sapien
ggaagagatttagagtcacgactca

SEQ ID NO: 2572921 - DNA, 25 bp, Homo sapien
gaagagatttagagtcacgactcat

SEQ ID NO: 2572922 - DNA, 25 bp, Homo sapien
tgcggaaaaaggaagagatttagag

SEQ ID NO: 2572923 - DNA, 25 bp, Homo sapien
tagctggtaatttgctgatgattta

SEQ ID NO: 2572924 - DNA, 25 bp, Homo sapien
tatgattagctggtaatttgctgat

SEQ ID NO: 2572925 - DNA, 25 bp, Homo sapien
gctggtaatttgctgatgatttatt

SEQ ID NO: 2572926 - DNA, 25 bp, Homo sapien
gattagctggtaatttgctgatgat

SEQ ID NO: 2572927 - DNA, 25 bp, Homo sapien
ttgctcgagcaattgaactaaaaca

SEQ ID NO: 2572928 - DNA, 25 bp, Homo sapien
acatgctcctggactaattgctgca

SEQ ID NO: 2572929 - DNA, 25 bp, Homo sapien
gcaattgaactaaaacatgctcctg

SEQ ID NO: 2572930 - DNA, 25 bp, Homo sapien
aaacatgctcctggactaattgctg

SEQ ID NO: 2572931 - DNA, 25 bp, Homo sapien
taggaaccttaacaagctgggcatg

SEQ ID NO: 2572932 - DNA, 25 bp, Homo sapien
gaagcaatcaggtctctccaagaag

SEQ ID NO: 2572933 - DNA, 25 bp, Homo sapien
agattgggcgtagaacacagctcct

SEQ ID NO: 2572934 - DNA, 25 bp, Homo sapien
taagacatcacagcggcgaattagg

SEQ ID NO: 2572935 - DNA, 25 bp, Homo sapien
ttatttgatatcagaagaatgacag

SEQ ID NO: 2572936 - DNA, 25 bp, Homo sapien
tgacaggaatcagtttttaacagag

SEQ ID NO: 2572937 - DNA, 25 bp, Homo sapien
ctggcctcaggtatgtttttctatc

SEQ ID NO: 2572938 - DNA, 25 bp, Homo sapien
caccctcctgaattaaagtgattct

SEQ ID NO: 2572939 - DNA, 25 bp, Homo sapien
tactttaacagaagtcacacatctg

SEQ ID NO: 2572940 - DNA, 25 bp, Homo sapien
cctgaggcattagatagtttttcta

SEQ ID NO: 2572941 - DNA, 25 bp, Homo sapien
taatttgggaaatagtggatgcata

SEQ ID NO: 2572942 - DNA, 25 bp, Homo sapien
gacagattgactcacttaatataaa

SEQ ID NO: 2572943 - DNA, 25 bp, Homo sapien
taagccattgaatccacacagcagc

SEQ ID NO: 2572944 - DNA, 25 bp, Homo sapien
aagccattgaatccacacagcagcc

SEQ ID NO: 2572945 - DNA, 25 bp, Homo sapien
gataagccattgaatccacacagca

SEQ ID NO: 2572946 - DNA, 25 bp, Homo sapien
atagataagccattgaatccacaca

SEQ ID NO: 2572947 - DNA, 25 bp, Homo sapien
taatattgatattggaagctgcagt

SEQ ID NO: 2572948 - DNA, 25 bp, Homo sapien
taacatacagaagtactaaatactg

SEQ ID NO: 2572949 - DNA, 25 bp, Homo sapien
taagtggagtaataactaaacagac

SEQ ID NO: 2572950 - DNA, 25 bp, Homo sapien
gcctatctgaatcaatattgcattc

SEQ ID NO: 2572951 - DNA, 25 bp, Homo sapien
tcagtaggcatctttgacatgagca

SEQ ID NO: 2572952 - DNA, 25 bp, Homo sapien
tctgtaaaatgcagcaatactggta

SEQ ID NO: 2572953 - DNA, 25 bp, Homo sapien
ggatttcatactaggcagtgacaac

SEQ ID NO: 2572954 - DNA, 25 bp, Homo sapien
catgaaggttatagagaggtgtaac

SEQ ID NO: 2572955 - DNA, 25 bp, Homo sapien
taatgtcctgtcttctaagatgtgc

SEQ ID NO: 2572956 - DNA, 25 bp, Homo sapien
taagatgtgcatcaagcctggtaca

SEQ ID NO: 2572957 - DNA, 25 bp, Homo sapien
ctgtttgggaaagctattattaggt

SEQ ID NO: 2572958 - DNA, 25 bp, Homo sapien
gtgtgaagtttttgactgttaataa

SEQ ID NO: 2572959 - DNA, 25 bp, Homo sapien
gcttcccagacaggtgttctccgtg

SEQ ID NO: 2572960 - DNA, 25 bp, Homo sapien
tctccgtgtgatagctcagtgttgc

SEQ ID NO: 2572961 - DNA, 25 bp, Homo sapien
ctccatactgtgatgtgctctcggg

SEQ ID NO: 2572962 - DNA, 25 bp, Homo sapien
tttctcttgagaagtccactgtcag

SEQ ID NO: 2572963 - DNA, 25 bp, Homo sapien
gatgagcaccatccaatccactgag

SEQ ID NO: 2572964 - DNA, 25 bp, Homo sapien
ccactgagggcttgaatgaaacaaa

SEQ ID NO: 2572965 - DNA, 25 bp, Homo sapien
attgcttgagcttggatatctcatc

SEQ ID NO: 2572966 - DNA, 25 bp, Homo sapien
catggactgggatttactaccttgg

SEQ ID NO: 2572967 - DNA, 25 bp, Homo sapien
gctaaatcctgacaattcatccttt

SEQ ID NO: 2572968 - DNA, 25 bp, Homo sapien
tccgggctttactgatggacctgtg

SEQ ID NO: 2572969 - DNA, 25 bp, Homo sapien
tcctttatggtgtctctgaaactca

SEQ ID NO: 2572970 - DNA, 25 bp, Homo sapien
gactcttggccatcaatctgtccat

SEQ ID NO: 2572971 - DNA, 25 bp, Homo sapien
catcaatcccttggttgccctagtc

SEQ ID NO: 2572972 - DNA, 25 bp, Homo sapien
atcaatcccttggttgccctagtcc

SEQ ID NO: 2572973 - DNA, 25 bp, Homo sapien
caatcccttggttgccctagtccgg

SEQ ID NO: 2572974 - DNA, 25 bp, Homo sapien
tcaatcccttggttgccctagtccg

SEQ ID NO: 2572975 - DNA, 25 bp, Homo sapien
aagctcaagttgaagcagtatctca

SEQ ID NO: 2572976 - DNA, 25 bp, Homo sapien
cccaaaagctcaagttgaagcagta

SEQ ID NO: 2572977 - DNA, 25 bp, Homo sapien
tcaagttgaagcagtatctcaaagc

SEQ ID NO: 2572978 - DNA, 25 bp, Homo sapien
tgaagcagtatctcaaagcccaggg

SEQ ID NO: 2572979 - DNA, 25 bp, Homo sapien
gttaaagtcatctaacccatggtaa

SEQ ID NO: 2572980 - DNA, 25 bp, Homo sapien
ttaatagttaaagtcatctaaccca

SEQ ID NO: 2572981 - DNA, 25 bp, Homo sapien
aatagttaaagtcatctaacccatg

SEQ ID NO: 2572982 - DNA, 25 bp, Homo sapien
tagttaaagtcatctaacccatggt

SEQ ID NO: 2572983 - DNA, 25 bp, Homo sapien
cacttagagttgatgttatgccctc

SEQ ID NO: 2572984 - DNA, 25 bp, Homo sapien
gactttctacacgatatccattcct

SEQ ID NO: 2572985 - DNA, 25 bp, Homo sapien
gatgttatgccctctaagtacagac

SEQ ID NO: 2572986 - DNA, 25 bp, Homo sapien
gcgtgaccttttacttcacttagag

SEQ ID NO: 2572987 - DNA, 25 bp, Homo sapien
tgagactggaggttgcggatgacac

SEQ ID NO: 2572988 - DNA, 25 bp, Homo sapien
tgacacggggcagagttgcatctcg

SEQ ID NO: 2572989 - DNA, 25 bp, Homo sapien
tctcggaggaaagtagtcattcgtg

SEQ ID NO: 2572990 - DNA, 25 bp, Homo sapien
cgtgtcccgggtcctggcggattga

SEQ ID NO: 2572991 - DNA, 25 bp, Homo sapien
gaggatggcaggagatggcaaaggt

SEQ ID NO: 2572992 - DNA, 25 bp, Homo sapien
gatggcaggagatggcaaaggttgg

SEQ ID NO: 2572993 - DNA, 25 bp, Homo sapien
ctgagaggatggcaggagatggcaa

SEQ ID NO: 2572994 - DNA, 25 bp, Homo sapien
agaggatggcaggagatggcaaagg

SEQ ID NO: 2572995 - DNA, 25 bp, Homo sapien
tcgtaggtgagaaggacgtcttgac

SEQ ID NO: 2572996 - DNA, 25 bp, Homo sapien
gagggtcgtaggtgagaaggacgtc

SEQ ID NO: 2572997 - DNA, 25 bp, Homo sapien
tctgagggtcgtaggtgagaaggac

SEQ ID NO: 2572998 - DNA, 25 bp, Homo sapien
ccttctctgagggtcgtaggtgaga

SEQ ID NO: 2572999 - DNA, 25 bp, Homo sapien
agaaatatgcttatccatcccacgg

SEQ ID NO: 2573000 - DNA, 25 bp, Homo sapien
gaatgaacaatgcaccttttggctg

SEQ ID NO: 2573001 - DNA, 25 bp, Homo sapien
taaactattttgacagatgccagct

SEQ ID NO: 2573002 - DNA, 25 bp, Homo sapien
aagcaggtgcatgtctctggccata

SEQ ID NO: 2573003 - DNA, 25 bp, Homo sapien
gttactttctccttggataatgatg

SEQ ID NO: 2573004 - DNA, 25 bp, Homo sapien
ctccttggataatgatgctttctca

SEQ ID NO: 2573005 - DNA, 25 bp, Homo sapien
ttactttctccttggataatgatgc

SEQ ID NO: 2573006 - DNA, 25 bp, Homo sapien
tctccttggataatgatgctttctc

SEQ ID NO: 2573007 - DNA, 25 bp, Homo sapien
aactgggttctgtcaacgttgagaa

SEQ ID NO: 2573008 - DNA, 25 bp, Homo sapien
ggttctgtcaacgttgagaatttca

SEQ ID NO: 2573009 - DNA, 25 bp, Homo sapien
tgtcaacgttgagaatttcagcacc

SEQ ID NO: 2573010 - DNA, 25 bp, Homo sapien
cgttgagaatttcagcaccattatc

SEQ ID NO: 2573011 - DNA, 25 bp, Homo sapien
tcaaaatcgattcttcatccgttca

SEQ ID NO: 2573012 - DNA, 25 bp, Homo sapien
ttggaattgatgtgttcttcagaca

SEQ ID NO: 2573013 - DNA, 25 bp, Homo sapien
cttgtctattttgtggtgacttcct

SEQ ID NO: 2573014 - DNA, 25 bp, Homo sapien
cttagcctgtaagttctcttgtcta

SEQ ID NO: 2573015 - DNA, 25 bp, Homo sapien
accaggtagcttggaatacttagcc

SEQ ID NO: 2573016 - DNA, 25 bp, Homo sapien
agaaacgactctgtaggagtcctct

SEQ ID NO: 2573017 - DNA, 25 bp, Homo sapien
aaacgactctgtaggagtcctctca

SEQ ID NO: 2573018 - DNA, 25 bp, Homo sapien
aacgactctgtaggagtcctctcat

SEQ ID NO: 2573019 - DNA, 25 bp, Homo sapien
gaaacgactctgtaggagtcctctc

SEQ ID NO: 2573020 - DNA, 25 bp, Homo sapien
tcttacatgtaagtctttaatgcat

SEQ ID NO: 2573021 - DNA, 25 bp, Homo sapien
cttacatgtaagtctttaatgcatc

SEQ ID NO: 2573022 - DNA, 25 bp, Homo sapien
gagcctctcttgacctttgaaaggg

SEQ ID NO: 2573023 - DNA, 25 bp, Homo sapien
tatatgtagggaaccagagcctctc

SEQ ID NO: 2573024 - DNA, 25 bp, Homo sapien
ttagatagaaaatagcatcagaaag

SEQ ID NO: 2573025 - DNA, 25 bp, Homo sapien
aattattgtgactcttattttggct

SEQ ID NO: 2573026 - DNA, 25 bp, Homo sapien
ttatttggcagcttggttctttgtc

SEQ ID NO: 2573027 - DNA, 25 bp, Homo sapien
tctttgtctggttcttcgtttcttc

SEQ ID NO: 2573028 - DNA, 25 bp, Homo sapien
ctttggagcagttagagagtctgtc

SEQ ID NO: 2573029 - DNA, 25 bp, Homo sapien
tctttggagcagttagagagtctgt

SEQ ID NO: 2573030 - DNA, 25 bp, Homo sapien
tgtttaatacagtctttccatgtca

SEQ ID NO: 2573031 - DNA, 25 bp, Homo sapien
aaaccaaggctcacagaaattatgt

SEQ ID NO: 2573032 - DNA, 25 bp, Homo sapien
cagcaaggccatgagaaaaccaagg

SEQ ID NO: 2573033 - DNA, 25 bp, Homo sapien
ctttttgattcctacagcaaggcca

SEQ ID NO: 2573034 - DNA, 25 bp, Homo sapien
cttgtaatgtgccaacatagtaaca

SEQ ID NO: 2573035 - DNA, 25 bp, Homo sapien
gtcaaacttgtaatgtgccaacata

SEQ ID NO: 2573036 - DNA, 25 bp, Homo sapien
accaaatcatgttgcttatgaacta

SEQ ID NO: 2573037 - DNA, 25 bp, Homo sapien
acatcagcatgaaaaccaaatcatg

SEQ ID NO: 2573038 - DNA, 25 bp, Homo sapien
aatacagtcagagattgggaaaagc

SEQ ID NO: 2573039 - DNA, 25 bp, Homo sapien
cagtgtatcagtatcaacaggaacc

SEQ ID NO: 2573040 - DNA, 25 bp, Homo sapien
aacaggaaccatcattgcaaataca

SEQ ID NO: 2573041 - DNA, 25 bp, Homo sapien
tcctggacactgtctgagtcgctgt

SEQ ID NO: 2573042 - DNA, 25 bp, Homo sapien
gccaatcaattgtaatgagttttgt

SEQ ID NO: 2573043 - DNA, 25 bp, Homo sapien
tgtggagcatgccaatcaattgtaa

SEQ ID NO: 2573044 - DNA, 25 bp, Homo sapien
gcatgccaatcaattgtaatgagtt

SEQ ID NO: 2573045 - DNA, 25 bp, Homo sapien
caattgtaatgagttttgtttcagt

SEQ ID NO: 2573046 - DNA, 25 bp, Homo sapien
tcacagccgcattataagccctctg

SEQ ID NO: 2573047 - DNA, 25 bp, Homo sapien
cagccgcattataagccctctggag

SEQ ID NO: 2573048 - DNA, 25 bp, Homo sapien
gccgcattataagccctctggagtt

SEQ ID NO: 2573049 - DNA, 25 bp, Homo sapien
acagccgcattataagccctctgga

SEQ ID NO: 2573050 - DNA, 25 bp, Homo sapien
gggctggaagcaagagatctctccc

SEQ ID NO: 2573051 - DNA, 25 bp, Homo sapien
tcagccctgaacgatggactttcat

SEQ ID NO: 2573052 - DNA, 25 bp, Homo sapien
gactgggacctttgatttcttaaga

SEQ ID NO: 2573053 - DNA, 25 bp, Homo sapien
tttgtctcggtgtcaacaggcgtga

SEQ ID NO: 2573054 - DNA, 25 bp, Homo sapien
gggtaaacaggaggctgtcccagca

SEQ ID NO: 2573055 - DNA, 25 bp, Homo sapien
gattatcaagatggtctcatccagg

SEQ ID NO: 2573056 - DNA, 25 bp, Homo sapien
tcacaagctgaagagcctgtggcct

SEQ ID NO: 2573057 - DNA, 25 bp, Homo sapien
tcttccttatctgccgggacggagc

SEQ ID NO: 2573058 - DNA, 25 bp, Homo sapien
cggaagaaatgactgccatggcctt

SEQ ID NO: 2573059 - DNA, 25 bp, Homo sapien
atggaatgacagaaggagaaaaatg

SEQ ID NO: 2573060 - DNA, 25 bp, Homo sapien
agtgtagtccagtcctttttggtgg

SEQ ID NO: 2573061 - DNA, 25 bp, Homo sapien
tgtagcctgcagcattccgaggaca

SEQ ID NO: 2573062 - DNA, 25 bp, Homo sapien
tggcagccgctgcacgcagacatga

SEQ ID NO: 2573063 - DNA, 25 bp, Homo sapien
aaagtattaaagcagtggcagccgc

SEQ ID NO: 2573064 - DNA, 25 bp, Homo sapien
tatatgcattaggtatgaggaagaa

SEQ ID NO: 2573065 - DNA, 25 bp, Homo sapien
gaacaacggtaattgtgggagactc

SEQ ID NO: 2573066 - DNA, 25 bp, Homo sapien
gtattgaggacaaaagagtgtatgg

SEQ ID NO: 2573067 - DNA, 25 bp, Homo sapien
gagacgggcttaccttccactgtga

SEQ ID NO: 2573068 - DNA, 25 bp, Homo sapien
catctttaagatcaggcacggaata

SEQ ID NO: 2573069 - DNA, 25 bp, Homo sapien
gagtgtatggggttgggcaccacag

SEQ ID NO: 2573070 - DNA, 25 bp, Homo sapien
gacgggggattgatctagcaaggga

SEQ ID NO: 2573071 - DNA, 25 bp, Homo sapien
agcaagggaggtcccccgatccgag

SEQ ID NO: 2573072 - DNA, 25 bp, Homo sapien
ggaggacgggggattgatctagcaa

SEQ ID NO: 2573073 - DNA, 25 bp, Homo sapien
aggacgggggattgatctagcaagg

SEQ ID NO: 2573074 - DNA, 25 bp, Homo sapien
cctggtgccgacgatggtgttcacg

SEQ ID NO: 2573075 - DNA, 25 bp, Homo sapien
gaagggtgtggatgtatcctcagct

SEQ ID NO: 2573076 - DNA, 25 bp, Homo sapien
tgtggatgtatcctcagcttggaca

SEQ ID NO: 2573077 - DNA, 25 bp, Homo sapien
ttccattcctggtgccgacgatggt

SEQ ID NO: 2573078 - DNA, 25 bp, Homo sapien
ctgtcagcaagaagttgcgtgcaac

SEQ ID NO: 2573079 - DNA, 25 bp, Homo sapien
cccactttggaccagcagggctagg

SEQ ID NO: 2573080 - DNA, 25 bp, Homo sapien
gcagggctaggcgtgcttccccttc

SEQ ID NO: 2573081 - DNA, 25 bp, Homo sapien
tgcaacggcgacaggaatgggccca

SEQ ID NO: 2573082 - DNA, 25 bp, Homo sapien
acccaggagttctgttggcctcaca

SEQ ID NO: 2573083 - DNA, 25 bp, Homo sapien
tcaggagccggtggtgaggaatccc

SEQ ID NO: 2573084 - DNA, 25 bp, Homo sapien
tctgctggtgtatgggctctgaagt

SEQ ID NO: 2573085 - DNA, 25 bp, Homo sapien
gggcccaggaattcatgccatccaa

SEQ ID NO: 2573086 - DNA, 25 bp, Homo sapien
ttacctcctgtctgcgctgtgccag

SEQ ID NO: 2573087 - DNA, 25 bp, Homo sapien
gcgtccacatctcatcattcctgga

SEQ ID NO: 2573088 - DNA, 25 bp, Homo sapien
ttggtgactttacctcctgtctgcg

SEQ ID NO: 2573089 - DNA, 25 bp, Homo sapien
cattcctggactgttgagattggcc

SEQ ID NO: 2573090 - DNA, 25 bp, Homo sapien
gggtagaacagctcttgctcaggga

SEQ ID NO: 2573091 - DNA, 25 bp, Homo sapien
agaacagctcttgctcagggagggc

SEQ ID NO: 2573092 - DNA, 25 bp, Homo sapien
cgctctgggcatggttgggctcggg

SEQ ID NO: 2573093 - DNA, 25 bp, Homo sapien
gcatggttgggctccacgcctgagt

SEQ ID NO: 2573094 - DNA, 25 bp, Homo sapien
ttagtacagaccacgcagggaacac

SEQ ID NO: 2573095 - DNA, 25 bp, Homo sapien
cagggaacacgggaatccagatggc

SEQ ID NO: 2573096 - DNA, 25 bp, Homo sapien
caagatctcagggtcagatgaagca

SEQ ID NO: 2573097 - DNA, 25 bp, Homo sapien
tcaagtccaggttgcttagtacaga

SEQ ID NO: 2573098 - DNA, 25 bp, Homo sapien
caccagcattgacaatttgaatacg

SEQ ID NO: 2573099 - DNA, 25 bp, Homo sapien
tttgaatacgaacacaagagaaaca

SEQ ID NO: 2573100 - DNA, 25 bp, Homo sapien
tcatgatctagttggagaagaaaca

SEQ ID NO: 2573101 - DNA, 25 bp, Homo sapien
ttggagaagaaacaccagcattgac

SEQ ID NO: 2573102 - DNA, 25 bp, Homo sapien
aatccatcagcatgtgaaggctctg

SEQ ID NO: 2573103 - DNA, 25 bp, Homo sapien
ggtccaatccatcagcatgtgaagg

SEQ ID NO: 2573104 - DNA, 25 bp, Homo sapien
ggccaagcaggtccaatccatcagc

SEQ ID NO: 2573105 - DNA, 25 bp, Homo sapien
gcaggtccaatccatcagcatgtga

SEQ ID NO: 2573106 - DNA, 25 bp, Homo sapien
ccaagaggatgttcctggtcagtca

SEQ ID NO: 2573107 - DNA, 25 bp, Homo sapien
ccggcaacacctctacatgatggga

SEQ ID NO: 2573108 - DNA, 25 bp, Homo sapien
ttccatggccctactgaggtgcaag

SEQ ID NO: 2573109 - DNA, 25 bp, Homo sapien
gaaggtgccagttgttacttccatg

SEQ ID NO: 2573110 - DNA, 25 bp, Homo sapien
cactcccgaccaagaagacagttta

SEQ ID NO: 2573111 - DNA, 25 bp, Homo sapien
taatattggctaagggaatcttccc

SEQ ID NO: 2573112 - DNA, 25 bp, Homo sapien
cttcccagatattctagcagaggag

SEQ ID NO: 2573113 - DNA, 25 bp, Homo sapien
gcagaggagattacagaccttacac

SEQ ID NO: 2573114 - DNA, 25 bp, Homo sapien
acagcttgtgcctttggcttacgta

SEQ ID NO: 2573115 - DNA, 25 bp, Homo sapien
gcctttggcttacgtatttctttgc

SEQ ID NO: 2573116 - DNA, 25 bp, Homo sapien
taaatacagcttgtgcctttggctt

SEQ ID NO: 2573117 - DNA, 25 bp, Homo sapien
tcaatcttaaatacagcttgtgcct

SEQ ID NO: 2573118 - DNA, 25 bp, Homo sapien
ttggtgccccagcttgcgcggatta

SEQ ID NO: 2573119 - DNA, 25 bp, Homo sapien
ggcaccccatgctgggtctgcaaga

SEQ ID NO: 2573120 - DNA, 25 bp, Homo sapien
tgaccgaggctttcaggcagcatcc

SEQ ID NO: 2573121 - DNA, 25 bp, Homo sapien
catgccagtctttgagcagtttggg

SEQ ID NO: 2573122 - DNA, 25 bp, Homo sapien
aagctgtgtctagataaaacgaaaa

SEQ ID NO: 2573123 - DNA, 25 bp, Homo sapien
gctgtgtctagataaaacgaaaata

SEQ ID NO: 2573124 - DNA, 25 bp, Homo sapien
gccaaagctgtgtctagataaaacg

SEQ ID NO: 2573125 - DNA, 25 bp, Homo sapien
caaagctgtgtctagataaaacgaa

SEQ ID NO: 2573126 - DNA, 25 bp, Homo sapien
ttttcctaacagtaaaccagccaca

SEQ ID NO: 2573127 - DNA, 25 bp, Homo sapien
ttttgcccaaaagtagctgaaatga

SEQ ID NO: 2573128 - DNA, 25 bp, Homo sapien
cttcttgaacccacgcaaggtggtt

SEQ ID NO: 2573129 - DNA, 25 bp, Homo sapien
cactcttcttgaacccacgcaaggt

SEQ ID NO: 2573130 - DNA, 25 bp, Homo sapien
gttatattcttagtgcatccggcaa

SEQ ID NO: 2573131 - DNA, 25 bp, Homo sapien
taatgtatggaattccaacatcaat

SEQ ID NO: 2573132 - DNA, 25 bp, Homo sapien
agtaatgtatggaattccaacatca

SEQ ID NO: 2573133 - DNA, 25 bp, Homo sapien
ttctaagtaatgtatggaattccaa

SEQ ID NO: 2573134 - DNA, 25 bp, Homo sapien
tggaattccaacatcaatttatgag

SEQ ID NO: 2573135 - DNA, 25 bp, Homo sapien
ccatgaaacacttagggacaaattt

SEQ ID NO: 2573136 - DNA, 25 bp, Homo sapien
tagattcaaaatctcagcaagacct

SEQ ID NO: 2573137 - DNA, 25 bp, Homo sapien
tggcaataactcacatttagaagac

SEQ ID NO: 2573138 - DNA, 25 bp, Homo sapien
catgatatgattccaagacttgcta

SEQ ID NO: 2573139 - DNA, 25 bp, Homo sapien
gacatgtaatagagctgaagattga

SEQ ID NO: 2573140 - DNA, 25 bp, Homo sapien
gcatgcaaggatccaatgagagaca

SEQ ID NO: 2573141 - DNA, 25 bp, Homo sapien
agagtcacttgacttccatgtggca

SEQ ID NO: 2573142 - DNA, 25 bp, Homo sapien
tgaagattgagggtggaagggtcca

SEQ ID NO: 2573143 - DNA, 25 bp, Homo sapien
cattcagaaattcttcttgtctcca

SEQ ID NO: 2573144 - DNA, 25 bp, Homo sapien
gggttggccccaaactcattcagaa

SEQ ID NO: 2573145 - DNA, 25 bp, Homo sapien
gctcttcctaccctttaccatttca

SEQ ID NO: 2573146 - DNA, 25 bp, Homo sapien
ctgtctgtattcttccctgctcttc

SEQ ID NO: 2573147 - DNA, 25 bp, Homo sapien
gaaggtataatgcatgttgtaagga

SEQ ID NO: 2573148 - DNA, 25 bp, Homo sapien
cccgggaagacgtattttcaccatg

SEQ ID NO: 2573149 - DNA, 25 bp, Homo sapien
ctgtaaaagccctttataggcctga

SEQ ID NO: 2573150 - DNA, 25 bp, Homo sapien
tagcatctttaagcattccatgatg

SEQ ID NO: 2573151 - DNA, 25 bp, Homo sapien
taaataattcatgacgccaatattt

SEQ ID NO: 2573152 - DNA, 25 bp, Homo sapien
ccaatatttttcatccggttagcaa

SEQ ID NO: 2573153 - DNA, 25 bp, Homo sapien
caatatttttcatccggttagcaaa

SEQ ID NO: 2573154 - DNA, 25 bp, Homo sapien
taattcatgacgccaatatttttca

SEQ ID NO: 2573155 - DNA, 25 bp, Homo sapien
tttcacttccgagcttccaaataat

SEQ ID NO: 2573156 - DNA, 25 bp, Homo sapien
atttcacttccgagcttccaaataa

SEQ ID NO: 2573157 - DNA, 25 bp, Homo sapien
gattgtggcgttcacggcaaccagt

SEQ ID NO: 2573158 - DNA, 25 bp, Homo sapien
cacgtggaagattgtggcgttcacg

SEQ ID NO: 2573159 - DNA, 25 bp, Homo sapien
gaagattgtggcgttcacggcaacc

SEQ ID NO: 2573160 - DNA, 25 bp, Homo sapien
gcgttcacggcaaccagtgtgctgc

SEQ ID NO: 2573161 - DNA, 25 bp, Homo sapien
ttgggctttggtctgagtagacaga

SEQ ID NO: 2573162 - DNA, 25 bp, Homo sapien
gctttggtctgagtagacagattaa

SEQ ID NO: 2573163 - DNA, 25 bp, Homo sapien
tggtctgagtagacagattaatgtc

SEQ ID NO: 2573164 - DNA, 25 bp, Homo sapien
tcaaggttgggctttggtctgagta

SEQ ID NO: 2573165 - DNA, 25 bp, Homo sapien
gccccataactggccttttatcttg

SEQ ID NO: 2573166 - DNA, 25 bp, Homo sapien
gaaccagagctcagatttacccttg

SEQ ID NO: 2573167 - DNA, 25 bp, Homo sapien
aaatcctgagatgccccactcaatg

SEQ ID NO: 2573168 - DNA, 25 bp, Homo sapien
tcctcaattctagttctaaatcctg

SEQ ID NO: 2573169 - DNA, 25 bp, Homo sapien
gaaccctgcacaggtcttatgtcca

SEQ ID NO: 2573170 - DNA, 25 bp, Homo sapien
gacctgcaatgggcctgtcacaagt

SEQ ID NO: 2573171 - DNA, 25 bp, Homo sapien
gatgacaccactttccacactggag

SEQ ID NO: 2573172 - DNA, 25 bp, Homo sapien
acagacagcacaggcatgtctgagt

SEQ ID NO: 2573173 - DNA, 25 bp, Homo sapien
tactctgttggtggtggaaataaag

SEQ ID NO: 2573174 - DNA, 25 bp, Homo sapien
gaaaatggctaacttgggacttgga

SEQ ID NO: 2573175 - DNA, 25 bp, Homo sapien
cagaggttgacacgttggtttggat

SEQ ID NO: 2573176 - DNA, 25 bp, Homo sapien
ggccatgttctcgtactctgttggt

SEQ ID NO: 2573177 - DNA, 25 bp, Homo sapien
catatttacccatacattctctgtc

SEQ ID NO: 2573178 - DNA, 25 bp, Homo sapien
aacatcatcagtgcctgctggttta

SEQ ID NO: 2573179 - DNA, 25 bp, Homo sapien
tcttgagttcatcatcgtgggagtt

SEQ ID NO: 2573180 - DNA, 25 bp, Homo sapien
cagagctctgaactcgaatcttgag

SEQ ID NO: 2573181 - DNA, 25 bp, Homo sapien
tagaagtgtgcatagttgggatctg

SEQ ID NO: 2573182 - DNA, 25 bp, Homo sapien
acattgaacatagaagtgtgcatag

SEQ ID NO: 2573183 - DNA, 25 bp, Homo sapien
tccctcatagggctctccaaggaac

SEQ ID NO: 2573184 - DNA, 25 bp, Homo sapien
gggtccctcatagggctctccaagg

SEQ ID NO: 2573185 - DNA, 25 bp, Homo sapien
cagggcaccgttatggccacaaagc

SEQ ID NO: 2573186 - DNA, 25 bp, Homo sapien
gttatggccacaaagccccgcagcg

SEQ ID NO: 2573187 - DNA, 25 bp, Homo sapien
gtcccacagggcaccgttatggcca

SEQ ID NO: 2573188 - DNA, 25 bp, Homo sapien
atggtcccacagggcaccgttatgg

SEQ ID NO: 2573189 - DNA, 25 bp, Homo sapien
ttctctctggttttagcctgaacac

SEQ ID NO: 2573190 - DNA, 25 bp, Homo sapien
cagttcccaaaacaaatatctttct

SEQ ID NO: 2573191 - DNA, 25 bp, Homo sapien
tctctggttttagcctgaacactac

SEQ ID NO: 2573192 - DNA, 25 bp, Homo sapien
aaatatctttctctctggttttagc

SEQ ID NO: 2573193 - DNA, 25 bp, Homo sapien
ataatactaataatgacaaccacag

SEQ ID NO: 2573194 - DNA, 25 bp, Homo sapien
atgatgtaagtgctctccaggcagc

SEQ ID NO: 2573195 - DNA, 25 bp, Homo sapien
aatgttacatatgatgtaagtgctc

SEQ ID NO: 2573196 - DNA, 25 bp, Homo sapien
catatgatgtaagtgctctccaggc

SEQ ID NO: 2573197 - DNA, 25 bp, Homo sapien
tttgagaatgacctggatacctgga

SEQ ID NO: 2573198 - DNA, 25 bp, Homo sapien
gagaatgacctggatacctggattg

SEQ ID NO: 2573199 - DNA, 25 bp, Homo sapien
agaatgacctggatacctggattgt

SEQ ID NO: 2573200 - DNA, 25 bp, Homo sapien
tgagaatgacctggatacctggatt

SEQ ID NO: 2573201 - DNA, 25 bp, Homo sapien
ttcagattcacactctaacagattc

SEQ ID NO: 2573202 - DNA, 25 bp, Homo sapien
cagattcaactgtgtaatgcagtta

SEQ ID NO: 2573203 - DNA, 25 bp, Homo sapien
actgtgtaatgcagttagtcaaagc

SEQ ID NO: 2573204 - DNA, 25 bp, Homo sapien
gattcacactctaacagattcaact

SEQ ID NO: 2573205 - DNA, 25 bp, Homo sapien
tatcatccttgtgagtaagagctac

SEQ ID NO: 2573206 - DNA, 25 bp, Homo sapien
taatattatcatccttgtgagtaag

SEQ ID NO: 2573207 - DNA, 25 bp, Homo sapien
catgtaatttactccagtcttcgat

SEQ ID NO: 2573208 - DNA, 25 bp, Homo sapien
tactccagtcttcgatttcctgctg

SEQ ID NO: 2573209 - DNA, 25 bp, Homo sapien
acacatgattcccacaggttagggc

SEQ ID NO: 2573210 - DNA, 25 bp, Homo sapien
tgattcccacaggttagggcttttg

SEQ ID NO: 2573211 - DNA, 25 bp, Homo sapien
gttaaaacacatgattcccacaggt

SEQ ID NO: 2573212 - DNA, 25 bp, Homo sapien
catgattcccacaggttagggcttt

SEQ ID NO: 2573213 - DNA, 25 bp, Homo sapien
cttcttaagcctagcattttcttct

SEQ ID NO: 2573214 - DNA, 25 bp, Homo sapien
cttcactaagcttagcttcattaag

SEQ ID NO: 2573215 - DNA, 25 bp, Homo sapien
ttcttgaacccgatggcattcagac

SEQ ID NO: 2573216 - DNA, 25 bp, Homo sapien
tcttcttaagcctagcattttcttc

SEQ ID NO: 2573217 - DNA, 25 bp, Homo sapien
taacttctctatagatttcttgttt

SEQ ID NO: 2573218 - DNA, 25 bp, Homo sapien
ctttaacttctctatagatttcttg

SEQ ID NO: 2573219 - DNA, 25 bp, Homo sapien
tttaacttctctatagatttcttgt

SEQ ID NO: 2573220 - DNA, 25 bp, Homo sapien
tcctttaacttctctatagatttct

SEQ ID NO: 2573221 - DNA, 25 bp, Homo sapien
ctcagattctagcataacacgaaga

SEQ ID NO: 2573222 - DNA, 25 bp, Homo sapien
tttagctgtgtcatccagaatttcc

SEQ ID NO: 2573223 - DNA, 25 bp, Homo sapien
ctagcataacacgaagatttttagc

SEQ ID NO: 2573224 - DNA, 25 bp, Homo sapien
aagatttttagctgtgtcatccaga

SEQ ID NO: 2573225 - DNA, 25 bp, Homo sapien
agagaatcatattttgtttcctggt

SEQ ID NO: 2573226 - DNA, 25 bp, Homo sapien
tcagagagaatcatattttgtttcc

SEQ ID NO: 2573227 - DNA, 25 bp, Homo sapien
atatttaattgcttcatcagagaga

SEQ ID NO: 2573228 - DNA, 25 bp, Homo sapien
tggtttcctgaacatgtttctttga

SEQ ID NO: 2573229 - DNA, 25 bp, Homo sapien
ttctcagaaatttgctgttccgtga

SEQ ID NO: 2573230 - DNA, 25 bp, Homo sapien
tcaacttctcagaaatttgctgttc

SEQ ID NO: 2573231 - DNA, 25 bp, Homo sapien
aacttctcagaaatttgctgttccg

SEQ ID NO: 2573232 - DNA, 25 bp, Homo sapien
ttgacaatttttgtacaagttctgt

SEQ ID NO: 2573233 - DNA, 25 bp, Homo sapien
tggtctgacagataaagcactgagg

SEQ ID NO: 2573234 - DNA, 25 bp, Homo sapien
cagtgctcataaacctgacagggaa

SEQ ID NO: 2573235 - DNA, 25 bp, Homo sapien
cctactcaaagttgactactggctg

SEQ ID NO: 2573236 - DNA, 25 bp, Homo sapien
tgagcaccagtcttacgaaatgagc

SEQ ID NO: 2573237 - DNA, 25 bp, Homo sapien
cctggaccagaacgccaggcagcat

SEQ ID NO: 2573238 - DNA, 25 bp, Homo sapien
tcagctctgcggaccttttgggcct

SEQ ID NO: 2573239 - DNA, 25 bp, Homo sapien
cacctcagctctgcggaccttttgg

SEQ ID NO: 2573240 - DNA, 25 bp, Homo sapien
accacctcagctctgcggacctttt

SEQ ID NO: 2573241 - DNA, 25 bp, Homo sapien
ccacctcagctctgcggaccttttg

SEQ ID NO: 2573242 - DNA, 25 bp, Homo sapien
tcttggtatggtatatagtacttcc

SEQ ID NO: 2573243 - DNA, 25 bp, Homo sapien
tattaggtacatcttgagctactgc

SEQ ID NO: 2573244 - DNA, 25 bp, Homo sapien
gcaatgaagccatatttagtctgtc

SEQ ID NO: 2573245 - DNA, 25 bp, Homo sapien
ggcaagcaccttaatttttatggca

SEQ ID NO: 2573246 - DNA, 25 bp, Homo sapien
taagagaatttgcaccaggcgttcc

SEQ ID NO: 2573247 - DNA, 25 bp, Homo sapien
tagtgtacaccagctgaatacggag

SEQ ID NO: 2573248 - DNA, 25 bp, Homo sapien
tgtaagagacttactgccgtcaggc

SEQ ID NO: 2573249 - DNA, 25 bp, Homo sapien
gacacgcaccatttagacctttagg

SEQ ID NO: 2573250 - DNA, 25 bp, Homo sapien
gattggaagagtataatgccatgag

SEQ ID NO: 2573251 - DNA, 25 bp, Homo sapien
ccattcctgtagaaaaagggtgcac

SEQ ID NO: 2573252 - DNA, 25 bp, Homo sapien
tataacatgccctaggtcagcaacc

SEQ ID NO: 2573253 - DNA, 25 bp, Homo sapien
tgtgtcatggccgtaaaagtataga

SEQ ID NO: 2573254 - DNA, 25 bp, Homo sapien
tgaaacctagtgtatgtcttgtcac

SEQ ID NO: 2573255 - DNA, 25 bp, Homo sapien
cgtttctaagaacgaacttcagaca

SEQ ID NO: 2573256 - DNA, 25 bp, Homo sapien
aaaaggagcaaaagcttcaatgtga

SEQ ID NO: 2573257 - DNA, 25 bp, Homo sapien
tggaattgcaccatacttaaagtct

SEQ ID NO: 2573258 - DNA, 25 bp, Homo sapien
tccacagaagagcataggccacttt

SEQ ID NO: 2573259 - DNA, 25 bp, Homo sapien
aagattccagtgtagcttctctgag

SEQ ID NO: 2573260 - DNA, 25 bp, Homo sapien
cataattgagaaactggtaagctgt

SEQ ID NO: 2573261 - DNA, 25 bp, Homo sapien
tgagaagttgtgagccagtccataa

SEQ ID NO: 2573262 - DNA, 25 bp, Homo sapien
gaagcagcaatattcagcctgaaag

SEQ ID NO: 2573263 - DNA, 25 bp, Homo sapien
ttgtagttatatcgccaatggctga

SEQ ID NO: 2573264 - DNA, 25 bp, Homo sapien
taaaattgtcttatttatgaagcag

SEQ ID NO: 2573265 - DNA, 25 bp, Homo sapien
gtcatctccaactaattgtgtctgg

SEQ ID NO: 2573266 - DNA, 25 bp, Homo sapien
catataaactatacttatgtgaagg

SEQ ID NO: 2573267 - DNA, 25 bp, Homo sapien
atcttatggtttatgagaaaagaga

SEQ ID NO: 2573268 - DNA, 25 bp, Homo sapien
gaaaggtatttgtagttcatataaa

SEQ ID NO: 2573269 - DNA, 25 bp, Homo sapien
tgaaggatagcagatgcttcatata

SEQ ID NO: 2573270 - DNA, 25 bp, Homo sapien
cccctagagctattgtggactgaat

SEQ ID NO: 2573271 - DNA, 25 bp, Homo sapien
tctcttgaagtgcaagggctacaac

SEQ ID NO: 2573272 - DNA, 25 bp, Homo sapien
tcagcaacatcaaacaaaaggtact

SEQ ID NO: 2573273 - DNA, 25 bp, Homo sapien
cagtctagggatttgacaactcaca

SEQ ID NO: 2573274 - DNA, 25 bp, Homo sapien
caagtattgatgagatttagccaat

SEQ ID NO: 2573275 - DNA, 25 bp, Homo sapien
catcgtgtttcatgataaagaagct

SEQ ID NO: 2573276 - DNA, 25 bp, Homo sapien
tgcatttgttcaagtattgatgaga

SEQ ID NO: 2573277 - DNA, 25 bp, Homo sapien
ttcaagaattacatcgtgtttcatg

SEQ ID NO: 2573278 - DNA, 25 bp, Homo sapien
caggatgtttccagaattccaccat

SEQ ID NO: 2573279 - DNA, 25 bp, Homo sapien
ctttttataattctccaaggccaat

SEQ ID NO: 2573280 - DNA, 25 bp, Homo sapien
aatttttctcttcaacacaggatgt

SEQ ID NO: 2573281 - DNA, 25 bp, Homo sapien
ttcaacacaggatgtttccagaatt

SEQ ID NO: 2573282 - DNA, 25 bp, Homo sapien
ctacactacactgctgctgaagtca

SEQ ID NO: 2573283 - DNA, 25 bp, Homo sapien
tacactacactgctgctgaagtcat

SEQ ID NO: 2573284 - DNA, 25 bp, Homo sapien
gtaggacacatcagcaagggccact

SEQ ID NO: 2573285 - DNA, 25 bp, Homo sapien
gatacaagtgttgggtcacctccag

SEQ ID NO: 2573286 - DNA, 25 bp, Homo sapien
gatatcctcgaccatctactgttga

SEQ ID NO: 2573287 - DNA, 25 bp, Homo sapien
tttacccaggagcttaggatcctcc

SEQ ID NO: 2573288 - DNA, 25 bp, Homo sapien
gatggaaatgcttggaccactggac

SEQ ID NO: 2573289 - DNA, 25 bp, Homo sapien
catgaatttccccacatcggacaag

SEQ ID NO: 2573290 - DNA, 25 bp, Homo sapien
gaagttttccaagaccccgacatga

SEQ ID NO: 2573291 - DNA, 25 bp, Homo sapien
tcggacaagatcaaaacaaggtggt

SEQ ID NO: 2573292 - DNA, 25 bp, Homo sapien
cttgagcataagaaggacgaaagca

SEQ ID NO: 2573293 - DNA, 25 bp, Homo sapien
aagtcgtgaccccttgaaggaagag

SEQ ID NO: 2573294 - DNA, 25 bp, Homo sapien
gcataagaaggacgaaagcagcccg

SEQ ID NO: 2573295 - DNA, 25 bp, Homo sapien
atgagagcttaaaagtcgtgacccc

SEQ ID NO: 2573296 - DNA, 25 bp, Homo sapien
aactgccagtgttgctgagcatgtt

SEQ ID NO: 2573297 - DNA, 25 bp, Homo sapien
acgctcccctggtctctcccaggaa

SEQ ID NO: 2573298 - DNA, 25 bp, Homo sapien
ggtctctcccaggaactgccagtgt

SEQ ID NO: 2573299 - DNA, 25 bp, Homo sapien
ggaactgccagtgttgctgagcatg

SEQ ID NO: 2573300 - DNA, 25 bp, Homo sapien
gacacgatcagagtgatggccagga

SEQ ID NO: 2573301 - DNA, 25 bp, Homo sapien
ccaggaaaacaaccccggactgcag

SEQ ID NO: 2573302 - DNA, 25 bp, Homo sapien
tgctgatccgtttcagtcctccgac

SEQ ID NO: 2573303 - DNA, 25 bp, Homo sapien
tttcagtcctccgacacgatcagag

SEQ ID NO: 2573304 - DNA, 25 bp, Homo sapien
ctacactccagccttggacaacaga

SEQ ID NO: 2573305 - DNA, 25 bp, Homo sapien
cagctgcgatagcactactacactc

SEQ ID NO: 2573306 - DNA, 25 bp, Homo sapien
gtcagctgcgatagcactactacac

SEQ ID NO: 2573307 - DNA, 25 bp, Homo sapien
cagccttggacaacagagggagacc

SEQ ID NO: 2573308 - DNA, 25 bp, Homo sapien
ttcgtgcagcggcagtatgttgtga

SEQ ID NO: 2573309 - DNA, 25 bp, Homo sapien
gcagcggcagtatgttgtgacatga

SEQ ID NO: 2573310 - DNA, 25 bp, Homo sapien
acgctggccatgttcgtgcagcggc

SEQ ID NO: 2573311 - DNA, 25 bp, Homo sapien
ccatgttcgtgcagcggcagtatgt

SEQ ID NO: 2573312 - DNA, 25 bp, Homo sapien
gctcaggtaggaggatccttagccc

SEQ ID NO: 2573313 - DNA, 25 bp, Homo sapien
tcaggtaggaggatccttagcccag

SEQ ID NO: 2573314 - DNA, 25 bp, Homo sapien
tgtgatagcactactgtactcaagc

SEQ ID NO: 2573315 - DNA, 25 bp, Homo sapien
aggctcaggtaggaggatccttagc

SEQ ID NO: 2573316 - DNA, 25 bp, Homo sapien
caggtgtcctttgtctccgggatgg

SEQ ID NO: 2573317 - DNA, 25 bp, Homo sapien
ggacagccttccccgagagtccagg

SEQ ID NO: 2573318 - DNA, 25 bp, Homo sapien
gatgggatgtgtgctcttccacccc

SEQ ID NO: 2573319 - DNA, 25 bp, Homo sapien
tctccgggatgggatgtgtgctctt

SEQ ID NO: 2573320 - DNA, 25 bp, Homo sapien
tctgaacatgtggatgggatgaggc

SEQ ID NO: 2573321 - DNA, 25 bp, Homo sapien
catctgctggtgtttaggttccttt

SEQ ID NO: 2573322 - DNA, 25 bp, Homo sapien
ggcaaccgcaatggctctgaacatg

SEQ ID NO: 2573323 - DNA, 25 bp, Homo sapien
gatgaggctctaagtaaggcaggtt

SEQ ID NO: 2573324 - DNA, 25 bp, Homo sapien
tcaggcagacccaaataagcttcac

SEQ ID NO: 2573325 - DNA, 25 bp, Homo sapien
gtctgcttcaggcagacccaaataa

SEQ ID NO: 2573326 - DNA, 25 bp, Homo sapien
gggtagcacgtgtcagtctgtctgc

SEQ ID NO: 2573327 - DNA, 25 bp, Homo sapien
tgggctccgggaagaggatcccaga

SEQ ID NO: 2573328 - DNA, 25 bp, Homo sapien
tgacagtcctaggcctgctgtgtgg

SEQ ID NO: 2573329 - DNA, 25 bp, Homo sapien
taaattcttcttgagactgtgtgga

SEQ ID NO: 2573330 - DNA, 25 bp, Homo sapien
ttggttctagcttcttcaggtcctc

SEQ ID NO: 2573331 - DNA, 25 bp, Homo sapien
cttcaggtcctccagtttaaattct

SEQ ID NO: 2573332 - DNA, 25 bp, Homo sapien
ccagtttaaattcttcttgagactg

SEQ ID NO: 2573333 - DNA, 25 bp, Homo sapien
aagcatgttgcaattttgcctatgg

SEQ ID NO: 2573334 - DNA, 25 bp, Homo sapien
gcatgttgcaattttgcctatggtt

SEQ ID NO: 2573335 - DNA, 25 bp, Homo sapien
catgttgcaattttgcctatggttt

SEQ ID NO: 2573336 - DNA, 25 bp, Homo sapien
agcatgttgcaattttgcctatggt

SEQ ID NO: 2573337 - DNA, 25 bp, Homo sapien
tccattagaccaacacttctcagag

SEQ ID NO: 2573338 - DNA, 25 bp, Homo sapien
ggcctgagaccactagcttcagagt

SEQ ID NO: 2573339 - DNA, 25 bp, Homo sapien
cctgagaccactagcttcagagtaa

SEQ ID NO: 2573340 - DNA, 25 bp, Homo sapien
tttctgagttggaggggatccatta

SEQ ID NO: 2573341 - DNA, 25 bp, Homo sapien
tagggctactcgaaaggcagatgca

SEQ ID NO: 2573342 - DNA, 25 bp, Homo sapien
aagcggtgggagctcattaatggcc

SEQ ID NO: 2573343 - DNA, 25 bp, Homo sapien
tgaaggtgacctcaagcgttaggcc

SEQ ID NO: 2573344 - DNA, 25 bp, Homo sapien
caggcttggaagactctggcgctat

SEQ ID NO: 2573345 - DNA, 25 bp, Homo sapien
cacaaactgggcctgcgatacacag

SEQ ID NO: 2573346 - DNA, 25 bp, Homo sapien
caaactaagccgtccatacacatac

SEQ ID NO: 2573347 - DNA, 25 bp, Homo sapien
catccacaagacatttactaagcac

SEQ ID NO: 2573348 - DNA, 25 bp, Homo sapien
tgactgcagtgtctcacaaactaag

SEQ ID NO: 2573349 - DNA, 25 bp, Homo sapien
aacacaatgtcatgtatcagtgaca

SEQ ID NO: 2573350 - DNA, 25 bp, Homo sapien
gtgacagaaaatctgtcactggggt

SEQ ID NO: 2573351 - DNA, 25 bp, Homo sapien
caatgtcatgtatcagtgacagaaa

SEQ ID NO: 2573352 - DNA, 25 bp, Homo sapien
cgcaacacaatgtcatgtatcagtg

SEQ ID NO: 2573353 - DNA, 25 bp, Homo sapien
gatgggcagtcttgctaaacaagga

SEQ ID NO: 2573354 - DNA, 25 bp, Homo sapien
caaggaaattcatcaggcagacgag

SEQ ID NO: 2573355 - DNA, 25 bp, Homo sapien
tgtgtaagtgggaaacccttgaatg

SEQ ID NO: 2573356 - DNA, 25 bp, Homo sapien
taagtgatctgctacagccagtgag

SEQ ID NO: 2573357 - DNA, 25 bp, Homo sapien
aatgtaggtccagcaagggcatacc

SEQ ID NO: 2573358 - DNA, 25 bp, Homo sapien
cattagggcaacgaaggaaaagatc

SEQ ID NO: 2573359 - DNA, 25 bp, Homo sapien
gaaaagatctgagaagccctgacat

SEQ ID NO: 2573360 - DNA, 25 bp, Homo sapien
aaagttcttggctcactagggcgag

SEQ ID NO: 2573361 - DNA, 25 bp, Homo sapien
gatgagatgagaggcagttattgca

SEQ ID NO: 2573362 - DNA, 25 bp, Homo sapien
gagggacagatgtcacaatggatga

SEQ ID NO: 2573363 - DNA, 25 bp, Homo sapien
agttattgcaatgggccctaaatcc

SEQ ID NO: 2573364 - DNA, 25 bp, Homo sapien
tccagggttcctggcgtgcaattgg

SEQ ID NO: 2573365 - DNA, 25 bp, Homo sapien
ccgtgtcacctctgacgtcaagtgg

SEQ ID NO: 2573366 - DNA, 25 bp, Homo sapien
cctctgacgtcaagtggcagggaca

SEQ ID NO: 2573367 - DNA, 25 bp, Homo sapien
agacccgtgtcacctctgacgtcaa

SEQ ID NO: 2573368 - DNA, 25 bp, Homo sapien
tcacctctgacgtcaagtggcaggg

SEQ ID NO: 2573369 - DNA, 25 bp, Homo sapien
tacgcgtcggcctcttggtgtctcc

SEQ ID NO: 2573370 - DNA, 25 bp, Homo sapien
gaaggccaggcctggaatttacgcg

SEQ ID NO: 2573371 - DNA, 25 bp, Homo sapien
ttttggagcgctggaagaaggccag

SEQ ID NO: 2573372 - DNA, 25 bp, Homo sapien
gagtctattgattgagaaggctcca

SEQ ID NO: 2573373 - DNA, 25 bp, Homo sapien
aggtctggggctgccgggcgggcac

SEQ ID NO: 2573374 - DNA, 25 bp, Homo sapien
tgaagggagtaaatccaggcaggtc

SEQ ID NO: 2573375 - DNA, 25 bp, Homo sapien
ctgaagggagtaaatccaggcaggt

SEQ ID NO: 2573376 - DNA, 25 bp, Homo sapien
caggcaggtctggggctgccgggcg

SEQ ID NO: 2573377 - DNA, 25 bp, Homo sapien
gggcggaggagcctcgaggctgtgg

SEQ ID NO: 2573378 - DNA, 25 bp, Homo sapien
cggaggagcctcgaggctgtggtcc

SEQ ID NO: 2573379 - DNA, 25 bp, Homo sapien
gcggaggagcctcgaggctgtggtc

SEQ ID NO: 2573380 - DNA, 25 bp, Homo sapien
ctggggcggaggagcctcgaggctg

SEQ ID NO: 2573381 - DNA, 25 bp, Homo sapien
aggctcgggaggacgcgccctcggg

SEQ ID NO: 2573382 - DNA, 25 bp, Homo sapien
gcgagaagagtagccgcagaggctc

SEQ ID NO: 2573383 - DNA, 25 bp, Homo sapien
aagagtagccgcagaggctcgggag

SEQ ID NO: 2573384 - DNA, 25 bp, Homo sapien
tagccgcagaggctcgggaggacgc

SEQ ID NO: 2573385 - DNA, 25 bp, Homo sapien
cctgggagatactgcgaaatctgct

SEQ ID NO: 2573386 - DNA, 25 bp, Homo sapien
gccccattggtttgtcagaatactg

SEQ ID NO: 2573387 - DNA, 25 bp, Homo sapien
tgcttccactaagaggtaccatcgt

SEQ ID NO: 2573388 - DNA, 25 bp, Homo sapien
ggagatggtgaagtatgcctgcctc

SEQ ID NO: 2573389 - DNA, 25 bp, Homo sapien
tatgaacgagttcaagacagcccct

SEQ ID NO: 2573390 - DNA, 25 bp, Homo sapien
gaactgcttgtagggacatgaccct

SEQ ID NO: 2573391 - DNA, 25 bp, Homo sapien
caagatgttccgttggccaagtaca

SEQ ID NO: 2573392 - DNA, 25 bp, Homo sapien
tagggctcgtccatattaaccatcg

SEQ ID NO: 2573393 - DNA, 25 bp, Homo sapien
tatcacagagggctagagtactcct

SEQ ID NO: 2573394 - DNA, 25 bp, Homo sapien
taggacgcagtgacagtgcttcagc

SEQ ID NO: 2573395 - DNA, 25 bp, Homo sapien
ttcatctttctagtcggagcctcag

SEQ ID NO: 2573396 - DNA, 25 bp, Homo sapien
gctggaacagctccttaaggccata

SEQ ID NO: 2573397 - DNA, 25 bp, Homo sapien
gatccctcgtacacgaagttcaagc

SEQ ID NO: 2573398 - DNA, 25 bp, Homo sapien
gggaaccctgctttatagtatgcca

SEQ ID NO: 2573399 - DNA, 25 bp, Homo sapien
tatgtgacccgcttcctaacagacc

SEQ ID NO: 2573400 - DNA, 25 bp, Homo sapien
tacattctcaccaatcacgcaggaa

SEQ ID NO: 2573401 - DNA, 25 bp, Homo sapien
taagtgatctgctacagccagtgag

SEQ ID NO: 2573402 - DNA, 25 bp, Homo sapien
caaggaaattcatcaggcagacgag

SEQ ID NO: 2573403 - DNA, 25 bp, Homo sapien
gcagtgtctcacaaactaagccgtc

SEQ ID NO: 2573404 - DNA, 25 bp, Homo sapien
cacaaactgggcctgcgatacacag

SEQ ID NO: 2573405 - DNA, 25 bp, Homo sapien
gaaaagatctgagaagccctgacat

SEQ ID NO: 2573406 - DNA, 25 bp, Homo sapien
cattagggcaacgaaggaaaagatc

SEQ ID NO: 2573407 - DNA, 25 bp, Homo sapien
aatgtaggtccagcaagggcatacc

SEQ ID NO: 2573408 - DNA, 25 bp, Homo sapien
aaagttcttggctcactagggcgag

SEQ ID NO: 2573409 - DNA, 25 bp, Homo sapien
gaagagttatttgtggcttgagata

SEQ ID NO: 2573410 - DNA, 25 bp, Homo sapien
cgaaaattgagagatttatgttgtt

SEQ ID NO: 2573411 - DNA, 25 bp, Homo sapien
catggtgttgatacgaaaattgaga

SEQ ID NO: 2573412 - DNA, 25 bp, Homo sapien
cttgagataagttggaaattgctcc

SEQ ID NO: 2573413 - DNA, 25 bp, Homo sapien
gagatggttgctacagtttgcaacg

SEQ ID NO: 2573414 - DNA, 25 bp, Homo sapien
tgcaacggaatgttattgtctttct

SEQ ID NO: 2573415 - DNA, 25 bp, Homo sapien
tgctacagtttgcaacggaatgtta

SEQ ID NO: 2573416 - DNA, 25 bp, Homo sapien
ttaggagatggttgctacagtttgc

SEQ ID NO: 2573417 - DNA, 25 bp, Homo sapien
cagagaacgagtcagggtacacaca

SEQ ID NO: 2573418 - DNA, 25 bp, Homo sapien
tagtccccttaatgcagtcagatgg

SEQ ID NO: 2573419 - DNA, 25 bp, Homo sapien
gaagccccggaactttgtgactgtg

SEQ ID NO: 2573420 - DNA, 25 bp, Homo sapien
tacatcaggattaggagctaggagc

SEQ ID NO: 2573421 - DNA, 25 bp, Homo sapien
tgcgaggctaaaaaaggagagcgtt

SEQ ID NO: 2573422 - DNA, 25 bp, Homo sapien
tagatccaagcgagttaaagccttt

SEQ ID NO: 2573423 - DNA, 25 bp, Homo sapien
gggctcgagctcatgttcacataca

SEQ ID NO: 2573424 - DNA, 25 bp, Homo sapien
gaaacatctagtatctccagcacca

SEQ ID NO: 2573425 - DNA, 25 bp, Homo sapien
tattcggccatcaaaggagcaggaa

SEQ ID NO: 2573426 - DNA, 25 bp, Homo sapien
tcccaggtccaagattctaaggttg

SEQ ID NO: 2573427 - DNA, 25 bp, Homo sapien
ggccatgagcaccactcctaggaga

SEQ ID NO: 2573428 - DNA, 25 bp, Homo sapien
gaaacgataaaaggctattcggcca

SEQ ID NO: 2573429 - DNA, 25 bp, Homo sapien
caagcattatagcagcactgactac

SEQ ID NO: 2573430 - DNA, 25 bp, Homo sapien
ctgagtatggagaacccgtgggact

SEQ ID NO: 2573431 - DNA, 25 bp, Homo sapien
tcagaacctaacgagctcagggact

SEQ ID NO: 2573432 - DNA, 25 bp, Homo sapien
tgtcttgaaaatcagccctgggaat

SEQ ID NO: 2573433 - DNA, 25 bp, Homo sapien
ctgatgcatacccatgtctgagaac

SEQ ID NO: 2573434 - DNA, 25 bp, Homo sapien
cagaagggacttctagtatgttctt

SEQ ID NO: 2573435 - DNA, 25 bp, Homo sapien
tatgttcttattctaggggcagagg

SEQ ID NO: 2573436 - DNA, 25 bp, Homo sapien
gtgaatcaggagaaaggactttttg

SEQ ID NO: 2573437 - DNA, 25 bp, Homo sapien
ttcagttcctgagactataggaatc

SEQ ID NO: 2573438 - DNA, 25 bp, Homo sapien
agcagcaagcaaaggcgctgatact

SEQ ID NO: 2573439 - DNA, 25 bp, Homo sapien
cagcagcaagcaaaggcgctgatac

SEQ ID NO: 2573440 - DNA, 25 bp, Homo sapien
aaacagcagcaagcaaaggcgctga

SEQ ID NO: 2573441 - DNA, 25 bp, Homo sapien
aaaaacagcagcaagcaaaggcgct

SEQ ID NO: 2573442 - DNA, 25 bp, Homo sapien
tgtctccaggttcggacagcgccaa

SEQ ID NO: 2573443 - DNA, 25 bp, Homo sapien
gaggctccgacatcttccctggatg

SEQ ID NO: 2573444 - DNA, 25 bp, Homo sapien
tcctgtgtattgatgggcaaagtca

SEQ ID NO: 2573445 - DNA, 25 bp, Homo sapien
caattagaaaattaacatctgaggc

SEQ ID NO: 2573446 - DNA, 25 bp, Homo sapien
ggaatagcctgcaagttcttctggc

SEQ ID NO: 2573447 - DNA, 25 bp, Homo sapien
gggtgtgctgatgggtaaagcagag

SEQ ID NO: 2573448 - DNA, 25 bp, Homo sapien
tggctttgattttccaaacagggcc

SEQ ID NO: 2573449 - DNA, 25 bp, Homo sapien
taggttggggacacaaagtctttgc

SEQ ID NO: 2573450 - DNA, 25 bp, Homo sapien
gaagccacgttgtcagtagcatcag

SEQ ID NO: 2573451 - DNA, 25 bp, Homo sapien
tcagtagcatcaggagtatgaatct

SEQ ID NO: 2573452 - DNA, 25 bp, Homo sapien
ttgtagtagtgtcaggaacatgaac

SEQ ID NO: 2573453 - DNA, 25 bp, Homo sapien
gagtatgaatcttgtagtagtgtca

SEQ ID NO: 2573454 - DNA, 25 bp, Homo sapien
ttagattatttttggcccagcacag

SEQ ID NO: 2573455 - DNA, 25 bp, Homo sapien
taattagggtcatacgcacaggcat

SEQ ID NO: 2573456 - DNA, 25 bp, Homo sapien
tcagtcagactgataattagggtca

SEQ ID NO: 2573457 - DNA, 25 bp, Homo sapien
ggcatggtcatgctgattgttgaaa

SEQ ID NO: 2573458 - DNA, 25 bp, Homo sapien
tggaggcagtggttgcagtcagccg

SEQ ID NO: 2573459 - DNA, 25 bp, Homo sapien
accctggaggcagtggttgcagtca

SEQ ID NO: 2573460 - DNA, 25 bp, Homo sapien
tcagccgagattgtgtcactgcagt

SEQ ID NO: 2573461 - DNA, 25 bp, Homo sapien
agtccagcctgggcggcagagtgag

SEQ ID NO: 2573462 - DNA, 25 bp, Homo sapien
tcaaagcgaggatgtgagtgacttc

SEQ ID NO: 2573463 - DNA, 25 bp, Homo sapien
gagtgacttcgtctgtgccgaggtc

SEQ ID NO: 2573464 - DNA, 25 bp, Homo sapien
gaaggacccgctctgtttcaaagcg

SEQ ID NO: 2573465 - DNA, 25 bp, Homo sapien
tagggccttttgttgagcagctcag

SEQ ID NO: 2573466 - DNA, 25 bp, Homo sapien
tcctcccggacgcaaaagcggcgcc

SEQ ID NO: 2573467 - DNA, 25 bp, Homo sapien
gccgcctgcgccacggttggctcct

SEQ ID NO: 2573468 - DNA, 25 bp, Homo sapien
ccggacgcaaaagcggcgccctcgc

SEQ ID NO: 2573469 - DNA, 25 bp, Homo sapien
ccacggttggctcctcccggacgca

SEQ ID NO: 2573470 - DNA, 25 bp, Homo sapien
gaaagcagcagagaactgtccttgg

SEQ ID NO: 2573471 - DNA, 25 bp, Homo sapien
ggaagaaggcacccaaagactgtct

SEQ ID NO: 2573472 - DNA, 25 bp, Homo sapien
actgtccttggaggggggttgcgag

SEQ ID NO: 2573473 - DNA, 25 bp, Homo sapien
gctggaggaagaaggcacccaaaga

SEQ ID NO: 2573474 - DNA, 25 bp, Homo sapien
tgctgagctgctgattgagcttgcc

SEQ ID NO: 2573475 - DNA, 25 bp, Homo sapien
caagtctgctgagctgctgattgag

SEQ ID NO: 2573476 - DNA, 25 bp, Homo sapien
tcaagtctgctgagctgctgattga

SEQ ID NO: 2573477 - DNA, 25 bp, Homo sapien
gtctgctgagctgctgattgagctt

SEQ ID NO: 2573478 - DNA, 25 bp, Homo sapien
ctgggagctgtaggtgccaggtgac

SEQ ID NO: 2573479 - DNA, 25 bp, Homo sapien
ggagctgtaggtgccaggtgacttt

SEQ ID NO: 2573480 - DNA, 25 bp, Homo sapien
gcctgggagctgtaggtgccaggtg

SEQ ID NO: 2573481 - DNA, 25 bp, Homo sapien
tgggagctgtaggtgccaggtgact

SEQ ID NO: 2573482 - DNA, 25 bp, Homo sapien
gactttctgtcttggaaggttcctc

SEQ ID NO: 2573483 - DNA, 25 bp, Homo sapien
tgttccctggcctgttggttgctgt

SEQ ID NO: 2573484 - DNA, 25 bp, Homo sapien
catggtccactggaatccttggact

SEQ ID NO: 2573485 - DNA, 25 bp, Homo sapien
aggttcctctctgccgaagtccaga

SEQ ID NO: 2573486 - DNA, 25 bp, Homo sapien
cagaggcaagttaaacttgctcagg

SEQ ID NO: 2573487 - DNA, 25 bp, Homo sapien
gtgtcagaggcaagttaaacttgct

SEQ ID NO: 2573488 - DNA, 25 bp, Homo sapien
gaggcaagttaaacttgctcagggc

SEQ ID NO: 2573489 - DNA, 25 bp, Homo sapien
tgtcagaggcaagttaaacttgctc

SEQ ID NO: 2573490 - DNA, 25 bp, Homo sapien
tagacagcctgatccgaaagaaggg

SEQ ID NO: 2573491 - DNA, 25 bp, Homo sapien
caagcagatacgatgcaaatccacg

SEQ ID NO: 2573492 - DNA, 25 bp, Homo sapien
ggcaccagcaatgactagactaact

SEQ ID NO: 2573493 - DNA, 25 bp, Homo sapien
aaatccacgccttctgagttctggc

SEQ ID NO: 2573494 - DNA, 25 bp, Homo sapien
ccaccgtgggggttgtctcttggct

SEQ ID NO: 2573495 - DNA, 25 bp, Homo sapien
gtctcttggctgctgagcgctcagc

SEQ ID NO: 2573496 - DNA, 25 bp, Homo sapien
ctcttggctgctgagcgctcagcag

SEQ ID NO: 2573497 - DNA, 25 bp, Homo sapien
ctggattggaagcccaccgtggggg

SEQ ID NO: 2573498 - DNA, 25 bp, Homo sapien
tgtgggagtgcagatgacacaccct

SEQ ID NO: 2573499 - DNA, 25 bp, Homo sapien
caaatgggtgatgtgggagtgcaga

SEQ ID NO: 2573500 - DNA, 25 bp, Homo sapien
tgggagtgcagatgacacaccctgg

SEQ ID NO: 2573501 - DNA, 25 bp, Homo sapien
tgacacaccctggttgggttctttc

SEQ ID NO: 2573502 - DNA, 25 bp, Homo sapien
tggagtgtcctagcacatgtcactc

SEQ ID NO: 2573503 - DNA, 25 bp, Homo sapien
tctagtgactgaattctggacatta

SEQ ID NO: 2573504 - DNA, 25 bp, Homo sapien
tcactctagtgactgaattctggac

SEQ ID NO: 2573505 - DNA, 25 bp, Homo sapien
ggcctggagtgtcctagcacatgtc

SEQ ID NO: 2573506 - DNA, 25 bp, Homo sapien
tatacctgtcggcatcttgccttgt

SEQ ID NO: 2573507 - DNA, 25 bp, Homo sapien
tggtgaggccatcagcttcaagcag

SEQ ID NO: 2573508 - DNA, 25 bp, Homo sapien
ttgtctgcacctttcatcctctgga

SEQ ID NO: 2573509 - DNA, 25 bp, Homo sapien
ttcatcctctggatagatccctctt

SEQ ID NO: 2573510 - DNA, 25 bp, Homo sapien
cagctggcagaaggcttggggaccc

SEQ ID NO: 2573511 - DNA, 25 bp, Homo sapien
accctggtggagcctccgtgggcaa

SEQ ID NO: 2573512 - DNA, 25 bp, Homo sapien
ctggtggagcctccgtgggcaaacc

SEQ ID NO: 2573513 - DNA, 25 bp, Homo sapien
ggaccctggtggagcctccgtgggc

SEQ ID NO: 2573514 - DNA, 25 bp, Homo sapien
ctgatgctcttcagcgaggtcagct

SEQ ID NO: 2573515 - DNA, 25 bp, Homo sapien
tggaatcgagtttaggagccgctgt

SEQ ID NO: 2573516 - DNA, 25 bp, Homo sapien
gctgtactccgttccccagtgcagt

SEQ ID NO: 2573517 - DNA, 25 bp, Homo sapien
gctcttcagcgaggtcagctccttt

SEQ ID NO: 2573518 - DNA, 25 bp, Homo sapien
tggtgtggatccacctagccctcat

SEQ ID NO: 2573519 - DNA, 25 bp, Homo sapien
aactgtcctatagcccctcatcagc

SEQ ID NO: 2573520 - DNA, 25 bp, Homo sapien
tttggaactgtcctatagcccctca

SEQ ID NO: 2573521 - DNA, 25 bp, Homo sapien
tgtcctatagcccctcatcagcccc

SEQ ID NO: 2573522 - DNA, 25 bp, Homo sapien
ctttggaactgtcctatagcccctc

SEQ ID NO: 2573523 - DNA, 25 bp, Homo sapien
aggtgctgctcccggtgagatggtg

SEQ ID NO: 2573524 - DNA, 25 bp, Homo sapien
tgctgctcccggtgagatggtgcat

SEQ ID NO: 2573525 - DNA, 25 bp, Homo sapien
ggtgctgctcccggtgagatggtgc

SEQ ID NO: 2573526 - DNA, 25 bp, Homo sapien
gtgctgctcccggtgagatggtgca

SEQ ID NO: 2573527 - DNA, 25 bp, Homo sapien
aactattattgatcctctgctgcca

SEQ ID NO: 2573528 - DNA, 25 bp, Homo sapien
cctcggtagtttgaaaacgtgcatc

SEQ ID NO: 2573529 - DNA, 25 bp, Homo sapien
tcagctatgtgagctcctgatcagc

SEQ ID NO: 2573530 - DNA, 25 bp, Homo sapien
ttcctgtaaacatggttggccctag

SEQ ID NO: 2573531 - DNA, 25 bp, Homo sapien
ctgagcagggtcttattggctcttt

SEQ ID NO: 2573532 - DNA, 25 bp, Homo sapien
gctggagtgccagcaccactgattt

SEQ ID NO: 2573533 - DNA, 25 bp, Homo sapien
tcttagttcaggctacaaagtacca

SEQ ID NO: 2573534 - DNA, 25 bp, Homo sapien
gaggctccctagttgtcttagttca

SEQ ID NO: 2573535 - DNA, 25 bp, Homo sapien
ccagccagccctcaagtataatgca

SEQ ID NO: 2573536 - DNA, 25 bp, Homo sapien
ttcttttaaagccagaagaatgagg

SEQ ID NO: 2573537 - DNA, 25 bp, Homo sapien
gttcttttaaagccagaagaatgag

SEQ ID NO: 2573538 - DNA, 25 bp, Homo sapien
tcttttaaagccagaagaatgagga

SEQ ID NO: 2573539 - DNA, 25 bp, Homo sapien
ggttcttttaaagccagaagaatga

SEQ ID NO: 2573540 - DNA, 25 bp, Homo sapien
ggacagccttccccgagagtccagg

SEQ ID NO: 2573541 - DNA, 25 bp, Homo sapien
tctccgggatgggatgtgtgctctt

SEQ ID NO: 2573542 - DNA, 25 bp, Homo sapien
caggtgtcctttgtctccgggatgg

SEQ ID NO: 2573543 - DNA, 25 bp, Homo sapien
gatgggatgtgtgctcttccacccc

SEQ ID NO: 2573544 - DNA, 25 bp, Homo sapien
catctgctggtgtttaggttccttt

SEQ ID NO: 2573545 - DNA, 25 bp, Homo sapien
tctgaacatgtggatgggatgaggc

SEQ ID NO: 2573546 - DNA, 25 bp, Homo sapien
ggcaaccgcaatggctctgaacatg

SEQ ID NO: 2573547 - DNA, 25 bp, Homo sapien
gatgaggctctaagtaaggcaggtt

SEQ ID NO: 2573548 - DNA, 25 bp, Homo sapien
tgggctccgggaagaggatcccaga

SEQ ID NO: 2573549 - DNA, 25 bp, Homo sapien
gtctgcttcaggcagacccaaataa

SEQ ID NO: 2573550 - DNA, 25 bp, Homo sapien
tcaggcagacccaaataagcttcac

SEQ ID NO: 2573551 - DNA, 25 bp, Homo sapien
gggtagcacgtgtcagtctgtctgc

SEQ ID NO: 2573552 - DNA, 25 bp, Homo sapien
tgacagtcctaggcctgctgtgtgg

SEQ ID NO: 2573553 - DNA, 25 bp, Homo sapien
gccagtcaggcagcttgatgttgct

SEQ ID NO: 2573554 - DNA, 25 bp, Homo sapien
ctgtcttcacaagtgctgcgggctg

SEQ ID NO: 2573555 - DNA, 25 bp, Homo sapien
tggtctgccagtcaggcagcttgat

SEQ ID NO: 2573556 - DNA, 25 bp, Homo sapien
gtcttcacaagtgctgcgggctgga

SEQ ID NO: 2573557 - DNA, 25 bp, Homo sapien
gtatttgaagagacacttcaggaca

SEQ ID NO: 2573558 - DNA, 25 bp, Homo sapien
gacttgatcaagcttccagccctca

SEQ ID NO: 2573559 - DNA, 25 bp, Homo sapien
caattttaaggatcagagctttgtt

SEQ ID NO: 2573560 - DNA, 25 bp, Homo sapien
ggaatcaactccacagatcaacatg

SEQ ID NO: 2573561 - DNA, 25 bp, Homo sapien
ggaacaacacccagtgggcatgatg

SEQ ID NO: 2573562 - DNA, 25 bp, Homo sapien
ccagatttacccaatgccatggatc

SEQ ID NO: 2573563 - DNA, 25 bp, Homo sapien
tgccacaccatgaatacaaacactg

SEQ ID NO: 2573564 - DNA, 25 bp, Homo sapien
gaaggtcggatatgtttacagaaac

SEQ ID NO: 2573565 - DNA, 25 bp, Homo sapien
caattgtcaactagagagaggctca

SEQ ID NO: 2573566 - DNA, 25 bp, Homo sapien
ttagggatcttcttccattagagga

SEQ ID NO: 2573567 - DNA, 25 bp, Homo sapien
tagggatcttcttccattagaggaa

SEQ ID NO: 2573568 - DNA, 25 bp, Homo sapien
gggatcttcttccattagaggaatc

SEQ ID NO: 2573569 - DNA, 25 bp, Homo sapien
ggatcttcttccattagaggaatct

SEQ ID NO: 2573570 - DNA, 25 bp, Homo sapien
tgcctgggctggtggatgccacctc

SEQ ID NO: 2573571 - DNA, 25 bp, Homo sapien
atgcctgggctggtggatgccacct

SEQ ID NO: 2573572 - DNA, 25 bp, Homo sapien
ctgtgtccgtgtcccctgagccggg

SEQ ID NO: 2573573 - DNA, 25 bp, Homo sapien
tgtcagggttgtccgaagcagggtg

SEQ ID NO: 2573574 - DNA, 25 bp, Homo sapien
cctgggaggtgaatacagactttgg

SEQ ID NO: 2573575 - DNA, 25 bp, Homo sapien
ctcagaagagcctgagacgctgtca

SEQ ID NO: 2573576 - DNA, 25 bp, Homo sapien
tctggtcgtccacgggtaaggggca

SEQ ID NO: 2573577 - DNA, 25 bp, Homo sapien
tacccggggcctaaggcactcaagc

SEQ ID NO: 2573578 - DNA, 25 bp, Homo sapien
tcataggacgggagcatgacgggca

SEQ ID NO: 2573579 - DNA, 25 bp, Homo sapien
gccgtctaccaccacaaagtcaggg

SEQ ID NO: 2573580 - DNA, 25 bp, Homo sapien
gggtcactgctggaactccggggag

SEQ ID NO: 2573581 - DNA, 25 bp, Homo sapien
agcatgacgggcacgccgtctacca

SEQ ID NO: 2573582 - DNA, 25 bp, Homo sapien
acccctcgtcaacatccctgcaggc

SEQ ID NO: 2573583 - DNA, 25 bp, Homo sapien
cactcagctcccatacacccctcgt

SEQ ID NO: 2573584 - DNA, 25 bp, Homo sapien
agctcccatacacccctcgtcaaca

SEQ ID NO: 2573585 - DNA, 25 bp, Homo sapien
acacccaggatacagctcccaagat

SEQ ID NO: 2573586 - DNA, 25 bp, Homo sapien
acccacatctagcacacatttgtgg

SEQ ID NO: 2573587 - DNA, 25 bp, Homo sapien
cagcagcacactggttgccgtgaac

SEQ ID NO: 2573588 - DNA, 25 bp, Homo sapien
tctggaacatcctggccaggatgac

SEQ ID NO: 2573589 - DNA, 25 bp, Homo sapien
ggttgccgtgaacgccacaatcttc

SEQ ID NO: 2573590 - DNA, 25 bp, Homo sapien
tggtctggaacatcctggccaggat

SEQ ID NO: 2573591 - DNA, 25 bp, Homo sapien
cagttccgtggttgtagcgctcaca

SEQ ID NO: 2573592 - DNA, 25 bp, Homo sapien
tgtagccaggatcgcagtaaaactc

SEQ ID NO: 2573593 - DNA, 25 bp, Homo sapien
gaaatctccgtgactcaccattgga

SEQ ID NO: 2573594 - DNA, 25 bp, Homo sapien
gacttgataagaaggaaaccactct

SEQ ID NO: 2573595 - DNA, 25 bp, Homo sapien
agtttcagaaccacaagctcacctt

SEQ ID NO: 2573596 - DNA, 25 bp, Homo sapien
cagtaggggagaataaaagtttcag

SEQ ID NO: 2573597 - DNA, 25 bp, Homo sapien
ccctgccggaggtgtcccgatgcgt

SEQ ID NO: 2573598 - DNA, 25 bp, Homo sapien
tcaaacaacactgtagtgtagatct

SEQ ID NO: 2573599 - DNA, 25 bp, Homo sapien
tgtagatcttgttggttctttcaga

SEQ ID NO: 2573600 - DNA, 25 bp, Homo sapien
gggttggaggcacactacaggcact

SEQ ID NO: 2573601 - DNA, 25 bp, Homo sapien
acatctcatcaccacattttctcag

SEQ ID NO: 2573602 - DNA, 25 bp, Homo sapien
aggccttaactctgagactgtcata

SEQ ID NO: 2573603 - DNA, 25 bp, Homo sapien
aaaaccatccattgtagaggcctta

SEQ ID NO: 2573604 - DNA, 25 bp, Homo sapien
cagggaagccccaaacattcagaga

SEQ ID NO: 2573605 - DNA, 25 bp, Homo sapien
aggcctcagacacatggcaaacagc

SEQ ID NO: 2573606 - DNA, 25 bp, Homo sapien
caaacgtcctttattgcaggagaac

SEQ ID NO: 2573607 - DNA, 25 bp, Homo sapien
taattcaaacgtcctttattgcagg

SEQ ID NO: 2573608 - DNA, 25 bp, Homo sapien
attcaaacgtcctttattgcaggag

SEQ ID NO: 2573609 - DNA, 25 bp, Homo sapien
aacgtcctttattgcaggagaacaa

SEQ ID NO: 2573610 - DNA, 25 bp, Homo sapien
gctgccaacctgatgtgtgggaaat

SEQ ID NO: 2573611 - DNA, 25 bp, Homo sapien
ggtggtgctagttgaggaacaggta

SEQ ID NO: 2573612 - DNA, 25 bp, Homo sapien
gagaggactttaacacagggcaaaa

SEQ ID NO: 2573613 - DNA, 25 bp, Homo sapien
gctagttgaggaacaggtaggtgct

SEQ ID NO: 2573614 - DNA, 25 bp, Homo sapien
gcctttgatcctgtgccaaatatca

SEQ ID NO: 2573615 - DNA, 25 bp, Homo sapien
gcaagttgggaagaacgaacatctg

SEQ ID NO: 2573616 - DNA, 25 bp, Homo sapien
gttagatttgtgtctaagcattcca

SEQ ID NO: 2573617 - DNA, 25 bp, Homo sapien
tgattaagactacattgaatctata

SEQ ID NO: 2573618 - DNA, 25 bp, Homo sapien
cctggcatatctgggataaattcca

SEQ ID NO: 2573619 - DNA, 25 bp, Homo sapien
tctcttcattaagcgtgatgttagc

SEQ ID NO: 2573620 - DNA, 25 bp, Homo sapien
ctttatacggttgaggatgttgccc

SEQ ID NO: 2573621 - DNA, 25 bp, Homo sapien
tatgatgctgaaacggagtgatgag

SEQ ID NO: 2573622 - DNA, 25 bp, Homo sapien
tgcttctatcctccaaaagagatta

SEQ ID NO: 2573623 - DNA, 25 bp, Homo sapien
gaattcaccagcaaatacatctggg

SEQ ID NO: 2573624 - DNA, 25 bp, Homo sapien
tacatctgggcctagtgctttctgt

SEQ ID NO: 2573625 - DNA, 25 bp, Homo sapien
tatagataattggtataatgtcttc

SEQ ID NO: 2573626 - DNA, 25 bp, Homo sapien
agaagtacattgtctgcattttgag

SEQ ID NO: 2573627 - DNA, 25 bp, Homo sapien
ttagaagtacattgtctgcattttg

SEQ ID NO: 2573628 - DNA, 25 bp, Homo sapien
caaatgttgacaagttgtgttttca

SEQ ID NO: 2573629 - DNA, 25 bp, Homo sapien
tctggtgttgatttctgtttaatta

SEQ ID NO: 2573630 - DNA, 25 bp, Homo sapien
tttatgtagacccaactttctgacc

SEQ ID NO: 2573631 - DNA, 25 bp, Homo sapien
cacttcacaggtagtatgagtacct

SEQ ID NO: 2573632 - DNA, 25 bp, Homo sapien
tgttatccactagatcaatcaagaa

SEQ ID NO: 2573633 - DNA, 25 bp, Homo sapien
gcaaggcctactggcaacaaacttt

SEQ ID NO: 2573634 - DNA, 25 bp, Homo sapien
ggagatgggccagagagaacagctg

SEQ ID NO: 2573635 - DNA, 25 bp, Homo sapien
ttcctctgcaatggagatgggccag

SEQ ID NO: 2573636 - DNA, 25 bp, Homo sapien
cttcctctgcaatggagatgggcca

SEQ ID NO: 2573637 - DNA, 25 bp, Homo sapien
atgggccagagagaacagctgccat

SEQ ID NO: 2573638 - DNA, 25 bp, Homo sapien
tctctgagtcactacgttaggatgt

SEQ ID NO: 2573639 - DNA, 25 bp, Homo sapien
catctctgagtcactacgttaggat

SEQ ID NO: 2573640 - DNA, 25 bp, Homo sapien
tctgagtcactacgttaggatgtcc

SEQ ID NO: 2573641 - DNA, 25 bp, Homo sapien
ctctgagtcactacgttaggatgtc

SEQ ID NO: 2573642 - DNA, 25 bp, Homo sapien
tcatgcttccccttcttaaggcctg

SEQ ID NO: 2573643 - DNA, 25 bp, Homo sapien
tggaccaatgaaatcccttcctagg

SEQ ID NO: 2573644 - DNA, 25 bp, Homo sapien
ccttcctaggaatggagaagacggg

SEQ ID NO: 2573645 - DNA, 25 bp, Homo sapien
tatggcagtgcagcctgtagtacca

SEQ ID NO: 2573646 - DNA, 25 bp, Homo sapien
agtaacacgaacagcaccagacaca

SEQ ID NO: 2573647 - DNA, 25 bp, Homo sapien
agggtcacaggcaaggtgatagtaa

SEQ ID NO: 2573648 - DNA, 25 bp, Homo sapien
tcacaggcaaggtgatagtaacacg

SEQ ID NO: 2573649 - DNA, 25 bp, Homo sapien
caaggtgatagtaacacgaacagca

SEQ ID NO: 2573650 - DNA, 25 bp, Homo sapien
tcagggctggtttagaatcttggct

SEQ ID NO: 2573651 - DNA, 25 bp, Homo sapien
tcccacggaaggcagtgcagtacag

SEQ ID NO: 2573652 - DNA, 25 bp, Homo sapien
taatacctggagttgtctagaggct

SEQ ID NO: 2573653 - DNA, 25 bp, Homo sapien
tggctctgcagcctactccctaagg

SEQ ID NO: 2573654 - DNA, 25 bp, Homo sapien
tagtgcaggccttaaaacatgcgac

SEQ ID NO: 2573655 - DNA, 25 bp, Homo sapien
gggacccatatacgctccagaatct

SEQ ID NO: 2573656 - DNA, 25 bp, Homo sapien
gtagtgggcttccaaactcttgcca

SEQ ID NO: 2573657 - DNA, 25 bp, Homo sapien
gaggctgccaaagcgtttccttcca

SEQ ID NO: 2573658 - DNA, 25 bp, Homo sapien
tgtaaatatggcttcacggcagctg

SEQ ID NO: 2573659 - DNA, 25 bp, Homo sapien
gctctcctctttaagcctaaggatg

SEQ ID NO: 2573660 - DNA, 25 bp, Homo sapien
aatatggcttcacggcagctgatct

SEQ ID NO: 2573661 - DNA, 25 bp, Homo sapien
catctaattgtaaatatggcttcac

SEQ ID NO: 2573662 - DNA, 25 bp, Homo sapien
gaagaaaagttattgcccatcataa

SEQ ID NO: 2573663 - DNA, 25 bp, Homo sapien
caaaatacaacttccgaaagaatga

SEQ ID NO: 2573664 - DNA, 25 bp, Homo sapien
agtgagaaagatgtattcagagaag

SEQ ID NO: 2573665 - DNA, 25 bp, Homo sapien
caacttccgaaagaatgagatgtgt

SEQ ID NO: 2573666 - DNA, 25 bp, Homo sapien
cagcgataggagatcacagtcccca

SEQ ID NO: 2573667 - DNA, 25 bp, Homo sapien
catcaagtttaaatccgggaaagca

SEQ ID NO: 2573668 - DNA, 25 bp, Homo sapien
tgggctggacgaccagataaggttt

SEQ ID NO: 2573669 - DNA, 25 bp, Homo sapien
taagcactcaagatacgcagaccca

SEQ ID NO: 2573670 - DNA, 25 bp, Homo sapien
cacgttccatcatcgcgacataatg

SEQ ID NO: 2573671 - DNA, 25 bp, Homo sapien
gatgggcagattattccacgttcca

SEQ ID NO: 2573672 - DNA, 25 bp, Homo sapien
gacaagtgatgattagcttctctcc

SEQ ID NO: 2573673 - DNA, 25 bp, Homo sapien
aatgaaaccatattgtgtaggtcgg

SEQ ID NO: 2573674 - DNA, 25 bp, Homo sapien
ctgcaattttgtaaaaggtacacat

SEQ ID NO: 2573675 - DNA, 25 bp, Homo sapien
gacccgagtgggggtaggtctgcat

SEQ ID NO: 2573676 - DNA, 25 bp, Homo sapien
tgcagtgggtttggaaggacccgag

SEQ ID NO: 2573677 - DNA, 25 bp, Homo sapien
ggatgctgcctgaaagcctcggtca

SEQ ID NO: 2573678 - DNA, 25 bp, Homo sapien
aggatgctgcctgaaagcctcggtc

SEQ ID NO: 2573679 - DNA, 25 bp, Homo sapien
gcttggttgcacaggcttgagaacc

SEQ ID NO: 2573680 - DNA, 25 bp, Homo sapien
tgagaacccttgtctgtggtggtcc

SEQ ID NO: 2573681 - DNA, 25 bp, Homo sapien
gggcttggttgcacaggcttgagaa

SEQ ID NO: 2573682 - DNA, 25 bp, Homo sapien
gaacccttgtctgtggtggtccacc

SEQ ID NO: 2573683 - DNA, 25 bp, Homo sapien
gcttgaatccgtcttggcagtgaaa

SEQ ID NO: 2573684 - DNA, 25 bp, Homo sapien
cagatggaattatcacttgggatcc

SEQ ID NO: 2573685 - DNA, 25 bp, Homo sapien
acacagtctctttgtagcgcccttc

SEQ ID NO: 2573686 - DNA, 25 bp, Homo sapien
gggtcctgaagccattctcgggaat

SEQ ID NO: 2573687 - DNA, 25 bp, Homo sapien
tgggtggttgtgtccctccgcttct

SEQ ID NO: 2573688 - DNA, 25 bp, Homo sapien
ctgggtggttgtgtccctccgcttc

SEQ ID NO: 2573689 - DNA, 25 bp, Homo sapien
ccgcttctcggggtgttgcacagag

SEQ ID NO: 2573690 - DNA, 25 bp, Homo sapien
gtccctccgcttctcggggtgttgc

SEQ ID NO: 2573691 - DNA, 25 bp, Homo sapien
catcctgggagtgccttgcaatggc

SEQ ID NO: 2573692 - DNA, 25 bp, Homo sapien
tctgacggaagaaatggccacctgc

SEQ ID NO: 2573693 - DNA, 25 bp, Homo sapien
cttctaccatgttctttctgacgga

SEQ ID NO: 2573694 - DNA, 25 bp, Homo sapien
tcctgatactctgcgtggaagctgc

SEQ ID NO: 2573695 - DNA, 25 bp, Homo sapien
tcctctggagataacagaaacagct

SEQ ID NO: 2573696 - DNA, 25 bp, Homo sapien
aaagggtctgagagtttgggactct

SEQ ID NO: 2573697 - DNA, 25 bp, Homo sapien
aaggaacctgtcactctggccttgg

SEQ ID NO: 2573698 - DNA, 25 bp, Homo sapien
tcaacaatgttctggacaacatcag

SEQ ID NO: 2573699 - DNA, 25 bp, Homo sapien
cagccaagccgcaggggaactgcag

SEQ ID NO: 2573700 - DNA, 25 bp, Homo sapien
tcagccaagccgcaggggaactgca

SEQ ID NO: 2573701 - DNA, 25 bp, Homo sapien
ctcctcagccaagccgcaggggaac

SEQ ID NO: 2573702 - DNA, 25 bp, Homo sapien
cctcagccaagccgcaggggaactg

SEQ ID NO: 2573703 - DNA, 25 bp, Homo sapien
tagcagtagtttgattagattagag

SEQ ID NO: 2573704 - DNA, 25 bp, Homo sapien
aatcgaataatgtgagtgtctagca

SEQ ID NO: 2573705 - DNA, 25 bp, Homo sapien
tagtggccagcagctgtaatcgaat

SEQ ID NO: 2573706 - DNA, 25 bp, Homo sapien
tgcaattgatttttagtggccagca

SEQ ID NO: 2573707 - DNA, 25 bp, Homo sapien
tgccctcagtccccactctgtccag

SEQ ID NO: 2573708 - DNA, 25 bp, Homo sapien
tcaagtgggagcaggtttgtccagg

SEQ ID NO: 2573709 - DNA, 25 bp, Homo sapien
caggtttgtccaggggcagcttgct

SEQ ID NO: 2573710 - DNA, 25 bp, Homo sapien
ggcagcttgctcagccaggtgccct

SEQ ID NO: 2573711 - DNA, 25 bp, Homo sapien
aggactcccaagagttagagatagc

SEQ ID NO: 2573712 - DNA, 25 bp, Homo sapien
cccaagagttagagatagcaggcag

SEQ ID NO: 2573713 - DNA, 25 bp, Homo sapien
gcaaagctatagaggactcccaaga

SEQ ID NO: 2573714 - DNA, 25 bp, Homo sapien
ctgcaaagctatagaggactcccaa

SEQ ID NO: 2573715 - DNA, 25 bp, Homo sapien
ttttcatctacagcatacggttgag

SEQ ID NO: 2573716 - DNA, 25 bp, Homo sapien
gaagagattgctcctaatctggctt

SEQ ID NO: 2573717 - DNA, 25 bp, Homo sapien
gaggaaagtcttgaccaatagaaga

SEQ ID NO: 2573718 - DNA, 25 bp, Homo sapien
tgtggaaccctaggacagcaatctc

SEQ ID NO: 2573719 - DNA, 25 bp, Homo sapien
catacattagagttagaggagctgg

SEQ ID NO: 2573720 - DNA, 25 bp, Homo sapien
ccatgctgcttatattaaggtagcc

SEQ ID NO: 2573721 - DNA, 25 bp, Homo sapien
gaaaagctttcactctaccatgtaa

SEQ ID NO: 2573722 - DNA, 25 bp, Homo sapien
aagctttcagattttacccactgga

SEQ ID NO: 2573723 - DNA, 25 bp, Homo sapien
ggagtcacttgttgagcaaactctt

SEQ ID NO: 2573724 - DNA, 25 bp, Homo sapien
cttaaaggagtcacttgttgagcaa

SEQ ID NO: 2573725 - DNA, 25 bp, Homo sapien
gtcacttgttgagcaaactcttggc

SEQ ID NO: 2573726 - DNA, 25 bp, Homo sapien
ggctctcttccttgaagcctggggg

SEQ ID NO: 2573727 - DNA, 25 bp, Homo sapien
ggctctggatatttttgcctggcat

SEQ ID NO: 2573728 - DNA, 25 bp, Homo sapien
aaatccatctccattgctcgggttc

SEQ ID NO: 2573729 - DNA, 25 bp, Homo sapien
aagcacagcgccagctgaaaccaca

SEQ ID NO: 2573730 - DNA, 25 bp, Homo sapien
aggatcacggccaagagtctctggg

SEQ ID NO: 2573731 - DNA, 25 bp, Homo sapien
tgctcgggttcattccatgatacat

SEQ ID NO: 2573732 - DNA, 25 bp, Homo sapien
tcatccacagagggcatccagcttg

SEQ ID NO: 2573733 - DNA, 25 bp, Homo sapien
cagagggcatccagcttgcaagagt

SEQ ID NO: 2573734 - DNA, 25 bp, Homo sapien
cacagagggcatccagcttgcaaga

SEQ ID NO: 2573735 - DNA, 25 bp, Homo sapien
tccacagagggcatccagcttgcaa

SEQ ID NO: 2573736 - DNA, 25 bp, Homo sapien
tgggcctatacatttcactctggga

SEQ ID NO: 2573737 - DNA, 25 bp, Homo sapien
gagccgggtgcactgagtaacagcc

SEQ ID NO: 2573738 - DNA, 25 bp, Homo sapien
aataagccagtctgtccgggctcgg

SEQ ID NO: 2573739 - DNA, 25 bp, Homo sapien
gaagcggaacaccacaataagccag

SEQ ID NO: 2573740 - DNA, 25 bp, Homo sapien
ctgtgggtctcatgcatgcagcttc

SEQ ID NO: 2573741 - DNA, 25 bp, Homo sapien
tgggtctcatgcatgcagcttcctt

SEQ ID NO: 2573742 - DNA, 25 bp, Homo sapien
tgtgggtctcatgcatgcagcttcc

SEQ ID NO: 2573743 - DNA, 25 bp, Homo sapien
gtgggtctcatgcatgcagcttcct

SEQ ID NO: 2573744 - DNA, 25 bp, Homo sapien
cgcgacctctgctgccgccgctgcg

SEQ ID NO: 2573745 - DNA, 25 bp, Homo sapien
acctctgctgccgccgctgcgcgag

SEQ ID NO: 2573746 - DNA, 25 bp, Homo sapien
gcgacctctgctgccgccgctgcgc

SEQ ID NO: 2573747 - DNA, 25 bp, Homo sapien
ctgtgcgcgacctctgctgccgccg

SEQ ID NO: 2573748 - DNA, 25 bp, Homo sapien
tctgccagccgcaggtgttgcgagt

SEQ ID NO: 2573749 - DNA, 25 bp, Homo sapien
agcgggtgattggtgacacgcagaa

SEQ ID NO: 2573750 - DNA, 25 bp, Homo sapien
ccctgtccggtcttggagatgcgcg

SEQ ID NO: 2573751 - DNA, 25 bp, Homo sapien
tggtgacacgcagaaggttgggtac

SEQ ID NO: 2573752 - DNA, 25 bp, Homo sapien
ggtatgttgtgcctttcttctcatt

SEQ ID NO: 2573753 - DNA, 25 bp, Homo sapien
gtatgttgtgcctttcttctcattg

SEQ ID NO: 2573754 - DNA, 25 bp, Homo sapien
tatgttgtgcctttcttctcattgg

SEQ ID NO: 2573755 - DNA, 25 bp, Homo sapien
ctggtatgttgtgcctttcttctca

SEQ ID NO: 2573756 - DNA, 25 bp, Homo sapien
tcaagccaatacagagattctgttg

SEQ ID NO: 2573757 - DNA, 25 bp, Homo sapien
atttgtagagcaaatacaccagtgc

SEQ ID NO: 2573758 - DNA, 25 bp, Homo sapien
cagtgcctgaattgcctccagaaaa

SEQ ID NO: 2573759 - DNA, 25 bp, Homo sapien
aaatacaccagtgcctgaattgcct

SEQ ID NO: 2573760 - DNA, 25 bp, Homo sapien
ctaggcaagccaggtgaggacaagc

SEQ ID NO: 2573761 - DNA, 25 bp, Homo sapien
gtgaggacaagccacgtgaggtctc

SEQ ID NO: 2573762 - DNA, 25 bp, Homo sapien
aggcaagccaggtgaggacaagcca

SEQ ID NO: 2573763 - DNA, 25 bp, Homo sapien
gaggacaagccacgtgaggtctctg

SEQ ID NO: 2573764 - DNA, 25 bp, Homo sapien
catccccccactcccgcttcctgat

SEQ ID NO: 2573765 - DNA, 25 bp, Homo sapien
ctccatccccccactcccgcttcct

SEQ ID NO: 2573766 - DNA, 25 bp, Homo sapien
ccccactcccgcttcctgatcttac

SEQ ID NO: 2573767 - DNA, 25 bp, Homo sapien
tccccccactcccgcttcctgatct

SEQ ID NO: 2573768 - DNA, 25 bp, Homo sapien
cagaaccagcaataaattccaacaa

SEQ ID NO: 2573769 - DNA, 25 bp, Homo sapien
agaaccagcaataaattccaacaaa

SEQ ID NO: 2573770 - DNA, 25 bp, Homo sapien
gaaccagcaataaattccaacaaag

SEQ ID NO: 2573771 - DNA, 25 bp, Homo sapien
gggcctctttgaaggaatgtacatc

SEQ ID NO: 2573772 - DNA, 25 bp, Homo sapien
gcctctttgaaggaatgtacatcta

SEQ ID NO: 2573773 - DNA, 25 bp, Homo sapien
tggggcctctttgaaggaatgtaca

SEQ ID NO: 2573774 - DNA, 25 bp, Homo sapien
gctggggcctctttgaaggaatgta

SEQ ID NO: 2573775 - DNA, 25 bp, Homo sapien
tctccaagggcccagtgtagccttc

SEQ ID NO: 2573776 - DNA, 25 bp, Homo sapien
gggcccagtgtagccttcaaccttg

SEQ ID NO: 2573777 - DNA, 25 bp, Homo sapien
cagtgtagccttcaaccttgccggt

SEQ ID NO: 2573778 - DNA, 25 bp, Homo sapien
gccttcaaccttgccggtgccaggt

SEQ ID NO: 2573779 - DNA, 25 bp, Homo sapien
agctcccaggtggacatttgctgtt

SEQ ID NO: 2573780 - DNA, 25 bp, Homo sapien
gttgtggcctgggagggtagcagcc

SEQ ID NO: 2573781 - DNA, 25 bp, Homo sapien
caggtggacatttgctgttgtggcc

SEQ ID NO: 2573782 - DNA, 25 bp, Homo sapien
tgctgatctgcccgtgctcctgtgg

SEQ ID NO: 2573783 - DNA, 25 bp, Homo sapien
ctagatgaagagcaggtcaaaagac

SEQ ID NO: 2573784 - DNA, 25 bp, Homo sapien
tagatgaagagcaggtcaaaagaca

SEQ ID NO: 2573785 - DNA, 25 bp, Homo sapien
attaggcctactcctcccacggcca

SEQ ID NO: 2573786 - DNA, 25 bp, Homo sapien
aggcctactcctcccacggccatct

SEQ ID NO: 2573787 - DNA, 25 bp, Homo sapien
ctcctcccacggccatctccatcat

SEQ ID NO: 2573788 - DNA, 25 bp, Homo sapien
gcctactcctcccacggccatctcc

SEQ ID NO: 2573789 - DNA, 25 bp, Homo sapien
cactccccatgtgccaggacatagt

SEQ ID NO: 2573790 - DNA, 25 bp, Homo sapien
agcaactcagtccactccccatgtg

SEQ ID NO: 2573791 - DNA, 25 bp, Homo sapien
gacatagtcacacacatagcaagcc

SEQ ID NO: 2573792 - DNA, 25 bp, Homo sapien
caagccaccggcatgttggtgacag

SEQ ID NO: 2573793 - DNA, 25 bp, Homo sapien
cagatgtaacagaagcggttcttct

SEQ ID NO: 2573794 - DNA, 25 bp, Homo sapien
gatgtaacagaagcggttcttctgt

SEQ ID NO: 2573795 - DNA, 25 bp, Homo sapien
agcggttcttctgttctcgtggaag

SEQ ID NO: 2573796 - DNA, 25 bp, Homo sapien
ttctgttctcgtggaagatgaagtt

SEQ ID NO: 2573797 - DNA, 25 bp, Homo sapien
agaggttgggggaataggtgtcctg

SEQ ID NO: 2573798 - DNA, 25 bp, Homo sapien
aggttgggggaataggtgtcctgag

SEQ ID NO: 2573799 - DNA, 25 bp, Homo sapien
ttgggggaataggtgtcctgaggaa

SEQ ID NO: 2573800 - DNA, 25 bp, Homo sapien
ggggaataggtgtcctgaggaagag

SEQ ID NO: 2573801 - DNA, 25 bp, Homo sapien
tgtcctgaacggtgctcctctaggg

SEQ ID NO: 2573802 - DNA, 25 bp, Homo sapien
ggtgctcctctagggtgcaggatct

SEQ ID NO: 2573803 - DNA, 25 bp, Homo sapien
acttcaaccctaaagcctgtcctga

SEQ ID NO: 2573804 - DNA, 25 bp, Homo sapien
ttgtcgattcctccatctgcactgg

SEQ ID NO: 2573805 - DNA, 25 bp, Homo sapien
cccagccttcctccccatcacgcac

SEQ ID NO: 2573806 - DNA, 25 bp, Homo sapien
cctgcccagccttcctccccatcac

SEQ ID NO: 2573807 - DNA, 25 bp, Homo sapien
ctcttagagggccctgcccagcctt

SEQ ID NO: 2573808 - DNA, 25 bp, Homo sapien
tgcccagccttcctccccatcacgc

SEQ ID NO: 2573809 - DNA, 25 bp, Homo sapien
tcgaggtggtgggagacattgtgca

SEQ ID NO: 2573810 - DNA, 25 bp, Homo sapien
ggagacattgtgcagtgtgggcatc

SEQ ID NO: 2573811 - DNA, 25 bp, Homo sapien
gtgagcatgcagtccctgccttcga

SEQ ID NO: 2573812 - DNA, 25 bp, Homo sapien
gcctgttgtacgtcatctgcactgg

SEQ ID NO: 2573813 - DNA, 25 bp, Homo sapien
taaccaagttctccatgagcagcct

SEQ ID NO: 2573814 - DNA, 25 bp, Homo sapien
gtgctaagctccttggtaaccaagt

SEQ ID NO: 2573815 - DNA, 25 bp, Homo sapien
ccttggtaaccaagttctccatgag

SEQ ID NO: 2573816 - DNA, 25 bp, Homo sapien
caagttctccatgagcagccttggg

SEQ ID NO: 2573817 - DNA, 25 bp, Homo sapien
tgggtgatcatctccttacttggaa

SEQ ID NO: 2573818 - DNA, 25 bp, Homo sapien
tggacctgttgcaataagcttcggg

SEQ ID NO: 2573819 - DNA, 25 bp, Homo sapien
tggtcaggaagtattggagtgtcta

SEQ ID NO: 2573820 - DNA, 25 bp, Homo sapien
ttggagtgtctagagcctcctgggt

SEQ ID NO: 2573821 - DNA, 25 bp, Homo sapien
aggcgtttgactttcccctgaactg

SEQ ID NO: 2573822 - DNA, 25 bp, Homo sapien
gtggatagcgaatcctgtcccattc

SEQ ID NO: 2573823 - DNA, 25 bp, Homo sapien
tgactttcccctgaactgtagtgga

SEQ ID NO: 2573824 - DNA, 25 bp, Homo sapien
cctgaactgtagtggatagcgaatc

SEQ ID NO: 2573825 - DNA, 25 bp, Homo sapien
attgtagcatatgttggttggtcac

SEQ ID NO: 2573826 - DNA, 25 bp, Homo sapien
catatgttggttggtcacccattac

SEQ ID NO: 2573827 - DNA, 25 bp, Homo sapien
aagtccaccgtcttcatgcactgag

SEQ ID NO: 2573828 - DNA, 25 bp, Homo sapien
cacctggttattgaaagacacagca

SEQ ID NO: 2573829 - DNA, 25 bp, Homo sapien
tctgagactgaaagatcagaattac

SEQ ID NO: 2573830 - DNA, 25 bp, Homo sapien
ctggttctgagactgaaagatcaga

SEQ ID NO: 2573831 - DNA, 25 bp, Homo sapien
gcaggaggtagaacgttcacaggac

SEQ ID NO: 2573832 - DNA, 25 bp, Homo sapien
cttgagtctccactacaaagggcag

SEQ ID NO: 2573833 - DNA, 25 bp, Homo sapien
ggttcactggaaccagccaaaatgg

SEQ ID NO: 2573834 - DNA, 25 bp, Homo sapien
ctagactagagacagcctgggtggg

SEQ ID NO: 2573835 - DNA, 25 bp, Homo sapien
tctgggccagagtgctcagtacagt

SEQ ID NO: 2573836 - DNA, 25 bp, Homo sapien
ttctttggctacacccacagtccaa

SEQ ID NO: 2573837 - DNA, 25 bp, Homo sapien
ttgtgaagactgtggtaatagcgca

SEQ ID NO: 2573838 - DNA, 25 bp, Homo sapien
aaatagactcctgcggctagctcgg

SEQ ID NO: 2573839 - DNA, 25 bp, Homo sapien
acagagtctcaccttatttgtctta

SEQ ID NO: 2573840 - DNA, 25 bp, Homo sapien
gagtctcaccttatttgtcttacat

SEQ ID NO: 2573841 - DNA, 25 bp, Homo sapien
cataagtaaaactttatgacctttg

SEQ ID NO: 2573842 - DNA, 25 bp, Homo sapien
caccttatttgtcttacataagtaa

SEQ ID NO: 2573843 - DNA, 25 bp, Homo sapien
agtggagatttcagccgctttgtgg

SEQ ID NO: 2573844 - DNA, 25 bp, Homo sapien
tgctttcaactcactgagtttaaca

SEQ ID NO: 2573845 - DNA, 25 bp, Homo sapien
aagtggatattcagacccccttgag

SEQ ID NO: 2573846 - DNA, 25 bp, Homo sapien
cagaaactcctttatgatgtgtgct

SEQ ID NO: 2573847 - DNA, 25 bp, Homo sapien
ctagacagaagaattctcagtaatt

SEQ ID NO: 2573848 - DNA, 25 bp, Homo sapien
tgctagacagaagaattctcagtaa

SEQ ID NO: 2573849 - DNA, 25 bp, Homo sapien
gaaaccgtattttttcatattatgc

SEQ ID NO: 2573850 - DNA, 25 bp, Homo sapien
catattatgctagacagaagaattc

SEQ ID NO: 2573851 - DNA, 25 bp, Homo sapien
ttttctcatgtaaggctagacagaa

SEQ ID NO: 2573852 - DNA, 25 bp, Homo sapien
agatattttgaccacttagaggcct

SEQ ID NO: 2573853 - DNA, 25 bp, Homo sapien
tatttgtgcaatttgcaagtgtaga

SEQ ID NO: 2573854 - DNA, 25 bp, Homo sapien
aagtctgcacgtagatattttgacc

SEQ ID NO: 2573855 - DNA, 25 bp, Homo sapien
ttcttcctattctgctagacagatg

SEQ ID NO: 2573856 - DNA, 25 bp, Homo sapien
tttcttcctattctgctagacagat

SEQ ID NO: 2573857 - DNA, 25 bp, Homo sapien
ccactgctcagggcctcaattttct

SEQ ID NO: 2573858 - DNA, 25 bp, Homo sapien
tcttgtacctcatccaagtatctgg

SEQ ID NO: 2573859 - DNA, 25 bp, Homo sapien
tcaaattattcttgtacctcatcca

SEQ ID NO: 2573860 - DNA, 25 bp, Homo sapien
gcctcaagcaagccacctgctccgg

SEQ ID NO: 2573861 - DNA, 25 bp, Homo sapien
aatagctgcattgtggtgctgagaa

SEQ ID NO: 2573862 - DNA, 25 bp, Homo sapien
caattttggaatagctgcattgtgg

SEQ ID NO: 2573863 - DNA, 25 bp, Homo sapien
tgtaattgactggttttaagtgagt

SEQ ID NO: 2573864 - DNA, 25 bp, Homo sapien
ccatgtaattgactggttttaagtg

SEQ ID NO: 2573865 - DNA, 25 bp, Homo sapien
tctttctaggaagaagtcacacata

SEQ ID NO: 2573866 - DNA, 25 bp, Homo sapien
ggcagtggacatcaaccatagttaa

SEQ ID NO: 2573867 - DNA, 25 bp, Homo sapien
cccactagacttgtggcctaggtaa

SEQ ID NO: 2573868 - DNA, 25 bp, Homo sapien
ggtatgaggttagctttgaaggcca

SEQ ID NO: 2573869 - DNA, 25 bp, Homo sapien
gacagaggggcttgtaggggttgga

SEQ ID NO: 2573870 - DNA, 25 bp, Homo sapien
tcatatcgaacaaccttccccaaac

SEQ ID NO: 2573871 - DNA, 25 bp, Homo sapien
atgaaagcagtctattccagacaga

SEQ ID NO: 2573872 - DNA, 25 bp, Homo sapien
gagatgaaagcagtctattccagac

SEQ ID NO: 2573873 - DNA, 25 bp, Homo sapien
atacgtgcacgtgggtcgggttaag

SEQ ID NO: 2573874 - DNA, 25 bp, Homo sapien
cacagaggctctcgacttcagctct

SEQ ID NO: 2573875 - DNA, 25 bp, Homo sapien
tgtgctgaggaatacgtgcacgtgg

SEQ ID NO: 2573876 - DNA, 25 bp, Homo sapien
gacttcagctctagatgtgctgagg

SEQ ID NO: 2573877 - DNA, 25 bp, Homo sapien
cctgcaaactggttataaactggca

SEQ ID NO: 2573878 - DNA, 25 bp, Homo sapien
tgcaaactggttataaactggcaaa

SEQ ID NO: 2573879 - DNA, 25 bp, Homo sapien
ttatatactggttaaaacctgcaaa

SEQ ID NO: 2573880 - DNA, 25 bp, Homo sapien
aaacctgcaaactggttataaactg

SEQ ID NO: 2573881 - DNA, 25 bp, Homo sapien
ttgttcggtaaattcatctggaata

SEQ ID NO: 2573882 - DNA, 25 bp, Homo sapien
gtgcatgtccgtgcaaccgcactag

SEQ ID NO: 2573883 - DNA, 25 bp, Homo sapien
tctggaatagctatactctctccta

SEQ ID NO: 2573884 - DNA, 25 bp, Homo sapien
tttcaagcggtctaaaggtgccgtg

SEQ ID NO: 2573885 - DNA, 25 bp, Homo sapien
taggaagaattattagacaataaac

SEQ ID NO: 2573886 - DNA, 25 bp, Homo sapien
aataggaagaattattagacaataa

SEQ ID NO: 2573887 - DNA, 25 bp, Homo sapien
ggaagaattattagacaataaacaa

SEQ ID NO: 2573888 - DNA, 25 bp, Homo sapien
aaataggaagaattattagacaata

SEQ ID NO: 2573889 - DNA, 25 bp, Homo sapien
ttctgcaaattaccattcttgtagg

SEQ ID NO: 2573890 - DNA, 25 bp, Homo sapien
ggaattcattcattgggctcatgca

SEQ ID NO: 2573891 - DNA, 25 bp, Homo sapien
gaaaaactcatagaatacaggtact

SEQ ID NO: 2573892 - DNA, 25 bp, Homo sapien
cagaaatttcctatagttcaactaa

SEQ ID NO: 2573893 - DNA, 25 bp, Homo sapien
ccggcaaccatctgatttctcaatt

SEQ ID NO: 2573894 - DNA, 25 bp, Homo sapien
atccacacagacccggcaaccatct

SEQ ID NO: 2573895 - DNA, 25 bp, Homo sapien
ctatccacacagacccggcaaccat

SEQ ID NO: 2573896 - DNA, 25 bp, Homo sapien
tgtctacttctatccacacagaccc

SEQ ID NO: 2573897 - DNA, 25 bp, Homo sapien
cagtggtgtaaacatcacaaaaaca

SEQ ID NO: 2573898 - DNA, 25 bp, Homo sapien
ttccagtcacaagcaattatccagc

SEQ ID NO: 2573899 - DNA, 25 bp, Homo sapien
tcactcttgttaagtggatagttct

SEQ ID NO: 2573900 - DNA, 25 bp, Homo sapien
gccttctatctagttgctaaatctc

SEQ ID NO: 2573901 - DNA, 25 bp, Homo sapien
gagacatgaggttaattgccagggc

SEQ ID NO: 2573902 - DNA, 25 bp, Homo sapien
tgcagggctccaccggagatatgac

SEQ ID NO: 2573903 - DNA, 25 bp, Homo sapien
gacaattgccaacatctgtatggga

SEQ ID NO: 2573904 - DNA, 25 bp, Homo sapien
tggaaagactgaaccttggaggcca

SEQ ID NO: 2573905 - DNA, 25 bp, Homo sapien
ccagacctgagagccattcaaatgc

SEQ ID NO: 2573906 - DNA, 25 bp, Homo sapien
gtgaagagtagtaagagaagcagcc

SEQ ID NO: 2573907 - DNA, 25 bp, Homo sapien
ttgcaaagcacccagacctgagagc

SEQ ID NO: 2573908 - DNA, 25 bp, Homo sapien
acagagggcgttgacagccagtgaa

SEQ ID NO: 2573909 - DNA, 25 bp, Homo sapien
gttcctcatgaatataaattccaat

SEQ ID NO: 2573910 - DNA, 25 bp, Homo sapien
tggcgtagttatatggagttagatc

SEQ ID NO: 2573911 - DNA, 25 bp, Homo sapien
tccaatctctctggcgtagttatat

SEQ ID NO: 2573912 - DNA, 25 bp, Homo sapien
gagttagatcatttgtgtgatgaca

SEQ ID NO: 2573913 - DNA, 25 bp, Homo sapien
ttcacacttctgttggacaccttca

SEQ ID NO: 2573914 - DNA, 25 bp, Homo sapien
tttcacacttctgttggacaccttc

SEQ ID NO: 2573915 - DNA, 25 bp, Homo sapien
atttcacacttctgttggacacctt

SEQ ID NO: 2573916 - DNA, 25 bp, Homo sapien
tcacacttctgttggacaccttcat

SEQ ID NO: 2573917 - DNA, 25 bp, Homo sapien
tgatttggaggactcagattgatcc

SEQ ID NO: 2573918 - DNA, 25 bp, Homo sapien
caaaatcttgaaatgcgttctgatt

SEQ ID NO: 2573919 - DNA, 25 bp, Homo sapien
gatcctgaaagcttcagtagttatt

SEQ ID NO: 2573920 - DNA, 25 bp, Homo sapien
aatgcgttctgatttggaggactca

SEQ ID NO: 2573921 - DNA, 25 bp, Homo sapien
tatcatgtagagctgagtcataccc

SEQ ID NO: 2573922 - DNA, 25 bp, Homo sapien
tccaagtgggtgaatatagcaaagg

SEQ ID NO: 2573923 - DNA, 25 bp, Homo sapien
gatcatattggttatcatgtagagc

SEQ ID NO: 2573924 - DNA, 25 bp, Homo sapien
ccctggaggttattgaaggaagatc

SEQ ID NO: 2573925 - DNA, 25 bp, Homo sapien
tgggagggcaaaagtttctgcttcg

SEQ ID NO: 2573926 - DNA, 25 bp, Homo sapien
gcttcgatactttggttggtctgat

SEQ ID NO: 2573927 - DNA, 25 bp, Homo sapien
ttctgcttcgatactttggttggtc

SEQ ID NO: 2573928 - DNA, 25 bp, Homo sapien
agggcaaaagtttctgcttcgatac

SEQ ID NO: 2573929 - DNA, 25 bp, Homo sapien
ctgcaataattctgtaaaggagttg

SEQ ID NO: 2573930 - DNA, 25 bp, Homo sapien
ggttggctccagctcgtcacatgcc

SEQ ID NO: 2573931 - DNA, 25 bp, Homo sapien
cacatgcccgttctgcattctgcag

SEQ ID NO: 2573932 - DNA, 25 bp, Homo sapien
ataattctgtaaaggagttgtctcc

SEQ ID NO: 2573933 - DNA, 25 bp, Homo sapien
ctgttatattgagaacctacatcag

SEQ ID NO: 2573934 - DNA, 25 bp, Homo sapien
tattgagaacctacatcagccagca

SEQ ID NO: 2573935 - DNA, 25 bp, Homo sapien
tatattgagaacctacatcagccag

SEQ ID NO: 2573936 - DNA, 25 bp, Homo sapien
gttatattgagaacctacatcagcc

SEQ ID NO: 2573937 - DNA, 25 bp, Homo sapien
cagagtcgagactcattttcaattt

SEQ ID NO: 2573938 - DNA, 25 bp, Homo sapien
cacagagtcgagactcattttcaat

SEQ ID NO: 2573939 - DNA, 25 bp, Homo sapien
cttaaagtagcatttgccaaacaca

SEQ ID NO: 2573940 - DNA, 25 bp, Homo sapien
cattcacagagtcgagactcatttt

SEQ ID NO: 2573941 - DNA, 25 bp, Homo sapien
aagtcctatccacgttgtccagtgt

SEQ ID NO: 2573942 - DNA, 25 bp, Homo sapien
aacaaacaccatcttctacaggatt

SEQ ID NO: 2573943 - DNA, 25 bp, Homo sapien
gaacaaacaccatcttctacaggat

SEQ ID NO: 2573944 - DNA, 25 bp, Homo sapien
agtcctatccacgttgtccagtgtc

SEQ ID NO: 2573945 - DNA, 25 bp, Homo sapien
ggagtgagtgagtgagattccagta

SEQ ID NO: 2573946 - DNA, 25 bp, Homo sapien
agtgagtgagtgagattccagtagg

SEQ ID NO: 2573947 - DNA, 25 bp, Homo sapien
gagaggagtgagtgagtgagattcc

SEQ ID NO: 2573948 - DNA, 25 bp, Homo sapien
tgagtgagtgagattccagtaggtt

SEQ ID NO: 2573949 - DNA, 25 bp, Homo sapien
gcgaggttttctgttaaatcaacaa

SEQ ID NO: 2573950 - DNA, 25 bp, Homo sapien
agtgtcatagatactcttcgttatg

SEQ ID NO: 2573951 - DNA, 25 bp, Homo sapien
agatactcttcgttatgaatgtgca

SEQ ID NO: 2573952 - DNA, 25 bp, Homo sapien
gcgtagactgtaagtccatctctta

SEQ ID NO: 2573953 - DNA, 25 bp, Homo sapien
ctgcagcgtagactgtaagtccatc

SEQ ID NO: 2573954 - DNA, 25 bp, Homo sapien
tgtttcattagttcttccgttcatg

SEQ ID NO: 2573955 - DNA, 25 bp, Homo sapien
gtttcattagttcttccgttcatgt

SEQ ID NO: 2573956 - DNA, 25 bp, Homo sapien
tgattgctggagtcacttcaggagg

SEQ ID NO: 2573957 - DNA, 25 bp, Homo sapien
caagcagtccccagatttattgaga

SEQ ID NO: 2573958 - DNA, 25 bp, Homo sapien
caggcatctttgtgcaagtacatga

SEQ ID NO: 2573959 - DNA, 25 bp, Homo sapien
tattaaggtgcccatttccccacac

SEQ ID NO: 2573960 - DNA, 25 bp, Homo sapien
tatactctaatgtaactagacttac

SEQ ID NO: 2573961 - DNA, 25 bp, Homo sapien
aacgtttgagatctaatctctgcag

SEQ ID NO: 2573962 - DNA, 25 bp, Homo sapien
tctttctgtccctgactgatttcaa

SEQ ID NO: 2573963 - DNA, 25 bp, Homo sapien
ttcagctgctggcaacctaggccca

SEQ ID NO: 2573964 - DNA, 25 bp, Homo sapien
tatccgactggtgaagccaccaggg

SEQ ID NO: 2573965 - DNA, 25 bp, Homo sapien
gaaaaggtaaggaactgggatcatc

SEQ ID NO: 2573966 - DNA, 25 bp, Homo sapien
agctccaactcccagacaggtgtat

SEQ ID NO: 2573967 - DNA, 25 bp, Homo sapien
tgggatcatccgcttctgctgtagg

SEQ ID NO: 2573968 - DNA, 25 bp, Homo sapien
ccaggactcataggcccaagagatc

SEQ ID NO: 2573969 - DNA, 25 bp, Homo sapien
tgcagcccaggactcataggcccaa

SEQ ID NO: 2573970 - DNA, 25 bp, Homo sapien
agcgtggacacccaattaattggca

SEQ ID NO: 2573971 - DNA, 25 bp, Homo sapien
ttagcgtggacacccaattaattgg

SEQ ID NO: 2573972 - DNA, 25 bp, Homo sapien
tctatgaaggaaagcgcccacagag

SEQ ID NO: 2573973 - DNA, 25 bp, Homo sapien
cccattgggcactggaggcgtagcc

SEQ ID NO: 2573974 - DNA, 25 bp, Homo sapien
tcctgggtgtaggactgcaccgcca

SEQ ID NO: 2573975 - DNA, 25 bp, Homo sapien
cataaggccctaggtaacccatgag

SEQ ID NO: 2573976 - DNA, 25 bp, Homo sapien
tttgactcagagaggacccccagag

SEQ ID NO: 2573977 - DNA, 25 bp, Homo sapien
agagaggacccccagagggtgtctc

SEQ ID NO: 2573978 - DNA, 25 bp, Homo sapien
actggatttgactcagagaggaccc

SEQ ID NO: 2573979 - DNA, 25 bp, Homo sapien
gagaggacccccagagggtgtctcc

SEQ ID NO: 2573980 - DNA, 25 bp, Homo sapien
agggcttcattgtagatcaaagcca

SEQ ID NO: 2573981 - DNA, 25 bp, Homo sapien
tgttccggtccaagtcttccatcag

SEQ ID NO: 2573982 - DNA, 25 bp, Homo sapien
ccttgttccggtccaagtcttccat

SEQ ID NO: 2573983 - DNA, 25 bp, Homo sapien
ttgttccggtccaagtcttccatca

SEQ ID NO: 2573984 - DNA, 25 bp, Homo sapien
cttgttccggtccaagtcttccatc

SEQ ID NO: 2573985 - DNA, 25 bp, Homo sapien
tcagggtctacatgtggaccagggc

SEQ ID NO: 2573986 - DNA, 25 bp, Homo sapien
taatcctgcttccaaaggacaaggg

SEQ ID NO: 2573987 - DNA, 25 bp, Homo sapien
gaatgtgaaatccatactcagtggt

SEQ ID NO: 2573988 - DNA, 25 bp, Homo sapien
tggtgatgacaaccctggattcttc

SEQ ID NO: 2573989 - DNA, 25 bp, Homo sapien
gagtacttgtggaagatggccacga

SEQ ID NO: 2573990 - DNA, 25 bp, Homo sapien
caatggcctgatccagggggcatgc

SEQ ID NO: 2573991 - DNA, 25 bp, Homo sapien
agggtgtgcttgtcaccctccctgc

SEQ ID NO: 2573992 - DNA, 25 bp, Homo sapien
gatggccacgaggaggccaatggcc

SEQ ID NO: 2573993 - DNA, 25 bp, Homo sapien
tcctttggaaccacccagtctcagg

SEQ ID NO: 2573994 - DNA, 25 bp, Homo sapien
gcagcttaaacacagcttcacaggg

SEQ ID NO: 2573995 - DNA, 25 bp, Homo sapien
catggtggcaatgacacacccaggg

SEQ ID NO: 2573996 - DNA, 25 bp, Homo sapien
catgggagcaaggacttctcaccca

SEQ ID NO: 2573997 - DNA, 25 bp, Homo sapien
cagtctggatccagcggctgaactg

SEQ ID NO: 2573998 - DNA, 25 bp, Homo sapien
tgctcctgactatccctccagcggg

SEQ ID NO: 2573999 - DNA, 25 bp, Homo sapien
ggacccccagcgtgagggcagctgg

SEQ ID NO: 2574000 - DNA, 25 bp, Homo sapien
gggggagcgccacagatggccccag

SEQ ID NO: 2574001 - DNA, 25 bp, Homo sapien
tacccagggctcctggagagaactc

SEQ ID NO: 2574002 - DNA, 25 bp, Homo sapien
cccagggctcctggagagaactcac

SEQ ID NO: 2574003 - DNA, 25 bp, Homo sapien
agtacccagggctcctggagagaac

SEQ ID NO: 2574004 - DNA, 25 bp, Homo sapien
ctggaaagtacccagggctcctgga

SEQ ID NO: 2574005 - DNA, 25 bp, Homo sapien
caaatgcgacgcgagcggtcgaggg

SEQ ID NO: 2574006 - DNA, 25 bp, Homo sapien
ggctgtgtcgcagtccgactggcct

SEQ ID NO: 2574007 - DNA, 25 bp, Homo sapien
tagggaggcggccaaatgcgacgcg

SEQ ID NO: 2574008 - DNA, 25 bp, Homo sapien
ccttatagcggtcggtgccccggag

SEQ ID NO: 2574009 - DNA, 25 bp, Homo sapien
cccctcgactttccacgcctcctgc

SEQ ID NO: 2574010 - DNA, 25 bp, Homo sapien
ccccctcgactttccacgcctcctg

SEQ ID NO: 2574011 - DNA, 25 bp, Homo sapien
tgtaaaggatatctacggcgcccat

SEQ ID NO: 2574012 - DNA, 25 bp, Homo sapien
ccagccctgtaagcaccattcgtta

SEQ ID NO: 2574013 - DNA, 25 bp, Homo sapien
aggatgccggtgtcccacagaggat

SEQ ID NO: 2574014 - DNA, 25 bp, Homo sapien
cacctttggtgttaatgtgcatgca

SEQ ID NO: 2574015 - DNA, 25 bp, Homo sapien
tttcctcccatggaagggtccatct

SEQ ID NO: 2574016 - DNA, 25 bp, Homo sapien
tatttcctcccatggaagggtccat

SEQ ID NO: 2574017 - DNA, 25 bp, Homo sapien
tcctcccatggaagggtccatctgg

SEQ ID NO: 2574018 - DNA, 25 bp, Homo sapien
ttatttcctcccatggaagggtcca

SEQ ID NO: 2574019 - DNA, 25 bp, Homo sapien
aagtcgatctcctggtcgctgttct

SEQ ID NO: 2574020 - DNA, 25 bp, Homo sapien
ggaacaccgagtactccttgaagtc

SEQ ID NO: 2574021 - DNA, 25 bp, Homo sapien
ttgtccaggctcttcatcaagtcat

SEQ ID NO: 2574022 - DNA, 25 bp, Homo sapien
aagtcatcgatgctgctctccttca

SEQ ID NO: 2574023 - DNA, 25 bp, Homo sapien
gaatatttgtgaaacgtggtcacca

SEQ ID NO: 2574024 - DNA, 25 bp, Homo sapien
ccctctctccccgaatatttgtgaa

SEQ ID NO: 2574025 - DNA, 25 bp, Homo sapien
tactcagggtcagtttgctaccctc

SEQ ID NO: 2574026 - DNA, 25 bp, Homo sapien
accatagtggtcagggccttctcca

SEQ ID NO: 2574027 - DNA, 25 bp, Homo sapien
gagaagacgacctcctcaaaaggcc

SEQ ID NO: 2574028 - DNA, 25 bp, Homo sapien
tgaaatccactaacaagagcgccca

SEQ ID NO: 2574029 - DNA, 25 bp, Homo sapien
gagcgcccatctatatcagtacagg

SEQ ID NO: 2574030 - DNA, 25 bp, Homo sapien
tgttgaaaagtaggcctgaggcaga

SEQ ID NO: 2574031 - DNA, 25 bp, Homo sapien
aggagtgtcccattattaaagtcgg

SEQ ID NO: 2574032 - DNA, 25 bp, Homo sapien
tatcgaggagtgtcccattattaaa

SEQ ID NO: 2574033 - DNA, 25 bp, Homo sapien
cattattaaagtcggggacagggca

SEQ ID NO: 2574034 - DNA, 25 bp, Homo sapien
ctgatatcgaggagtgtcccattat

SEQ ID NO: 2574035 - DNA, 25 bp, Homo sapien
gtgggagtgagcccagagaatccaa

SEQ ID NO: 2574036 - DNA, 25 bp, Homo sapien
gccttctgcctttatttccctgatc

SEQ ID NO: 2574037 - DNA, 25 bp, Homo sapien
tctcactgccttctgcctttatttc

SEQ ID NO: 2574038 - DNA, 25 bp, Homo sapien
actgccttctgcctttatttccctg

SEQ ID NO: 2574039 - DNA, 25 bp, Homo sapien
ctccctctcactgccttctgccttt

SEQ ID NO: 2574040 - DNA, 25 bp, Homo sapien
gatggaacaataagccgaagaaggg

SEQ ID NO: 2574041 - DNA, 25 bp, Homo sapien
gggctggggacacactgagttccca

SEQ ID NO: 2574042 - DNA, 25 bp, Homo sapien
tgaccaaaaatcagaactcaaaatc

SEQ ID NO: 2574043 - DNA, 25 bp, Homo sapien
acacacgtccccaatcccagaaact

SEQ ID NO: 2574044 - DNA, 25 bp, Homo sapien
aaaaaagtgcccactggcgacaggg

SEQ ID NO: 2574045 - DNA, 25 bp, Homo sapien
atcaagcacgtgtctgaaggagcca

SEQ ID NO: 2574046 - DNA, 25 bp, Homo sapien
gaacttgctcagcatcaagcacgtg

SEQ ID NO: 2574047 - DNA, 25 bp, Homo sapien
aaaaagtgcccactggcgacaggga

SEQ ID NO: 2574048 - DNA, 25 bp, Homo sapien
gaagtccacctcgttgtccctgttg

SEQ ID NO: 2574049 - DNA, 25 bp, Homo sapien
gttgctgtccaagttgctcatcagc

SEQ ID NO: 2574050 - DNA, 25 bp, Homo sapien
tgggctgcttatctgggaagccttc

SEQ ID NO: 2574051 - DNA, 25 bp, Homo sapien
agacacagtactcttggaagtccac

SEQ ID NO: 2574052 - DNA, 25 bp, Homo sapien
tacctggtgcaatggaaaaatgacg

SEQ ID NO: 2574053 - DNA, 25 bp, Homo sapien
gctcctttgggaggtccagtttgga

SEQ ID NO: 2574054 - DNA, 25 bp, Homo sapien
tgtttgaagggaacgtctgcaggcc

SEQ ID NO: 2574055 - DNA, 25 bp, Homo sapien
tccaaccctcaaggctaagctaggg

SEQ ID NO: 2574056 - DNA, 25 bp, Homo sapien
gatagatgccctctgtagctaatgc

SEQ ID NO: 2574057 - DNA, 25 bp, Homo sapien
cttcagttaagttgtgcaaagcacc

SEQ ID NO: 2574058 - DNA, 25 bp, Homo sapien
gtgttcaatgtgtttccaccccagg

SEQ ID NO: 2574059 - DNA, 25 bp, Homo sapien
aatgctctagagcaagactgctgcc

SEQ ID NO: 2574060 - DNA, 25 bp, Homo sapien
ctctttgcccgagtacttgtggaag

SEQ ID NO: 2574061 - DNA, 25 bp, Homo sapien
gagcttgaacttgtcaccctctttg

SEQ ID NO: 2574062 - DNA, 25 bp, Homo sapien
gttgagcttgaacttgtcaccctct

SEQ ID NO: 2574063 - DNA, 25 bp, Homo sapien
tacttgtggaaggtggacaccatca

SEQ ID NO: 2574064 - DNA, 25 bp, Homo sapien
ttcagaatgccaggctccactccca

SEQ ID NO: 2574065 - DNA, 25 bp, Homo sapien
gcaggaggcacagagaccgtcttat

SEQ ID NO: 2574066 - DNA, 25 bp, Homo sapien
gagcacttggcgagactctgctccc

SEQ ID NO: 2574067 - DNA, 25 bp, Homo sapien
cagagaccgtcttattaatcccacc

SEQ ID NO: 2574068 - DNA, 25 bp, Homo sapien
ggaaaaaaccagcacagccgcttag

SEQ ID NO: 2574069 - DNA, 25 bp, Homo sapien
tgaacatttgcaagatccgctgcgc

SEQ ID NO: 2574070 - DNA, 25 bp, Homo sapien
agattcgggcagcaaactcccaggg

SEQ ID NO: 2574071 - DNA, 25 bp, Homo sapien
gaggccatgcaccttctcgagctgg

SEQ ID NO: 2574072 - DNA, 25 bp, Homo sapien
gtgtgcaagcccacatctcagaagc

SEQ ID NO: 2574073 - DNA, 25 bp, Homo sapien
cagcgtgtgcaagcccacatctcag

SEQ ID NO: 2574074 - DNA, 25 bp, Homo sapien
aacagcgtgtgcaagcccacatctc

SEQ ID NO: 2574075 - DNA, 25 bp, Homo sapien
gcgtgtgcaagcccacatctcagaa

SEQ ID NO: 2574076 - DNA, 25 bp, Homo sapien
tggagagctcaaattcagtcacttg

SEQ ID NO: 2574077 - DNA, 25 bp, Homo sapien
ctggagagctcaaattcagtcactt

SEQ ID NO: 2574078 - DNA, 25 bp, Homo sapien
tctctttagcacatctggcccccac

SEQ ID NO: 2574079 - DNA, 25 bp, Homo sapien
gcctctgacaccccttgcatgccag

SEQ ID NO: 2574080 - DNA, 25 bp, Homo sapien
tgtgtgtgtgccatgcacacccacg

SEQ ID NO: 2574081 - DNA, 25 bp, Homo sapien
gcatgccagtcaggccaacacaact

SEQ ID NO: 2574082 - DNA, 25 bp, Homo sapien
aagaagaagcgctgaggagagaggg

SEQ ID NO: 2574083 - DNA, 25 bp, Homo sapien
tgacctatttataccccagccaggc

SEQ ID NO: 2574084 - DNA, 25 bp, Homo sapien
aagaaagaagaagcgctgaggagag

SEQ ID NO: 2574085 - DNA, 25 bp, Homo sapien
gggacggcccagaggtctgacctat

SEQ ID NO: 2574086 - DNA, 25 bp, Homo sapien
tggtctcattggtgcacgctctgct

SEQ ID NO: 2574087 - DNA, 25 bp, Homo sapien
cattcgctgggcatcctgaggaagg

SEQ ID NO: 2574088 - DNA, 25 bp, Homo sapien
ttaactgatcgcagaagacctgggc

SEQ ID NO: 2574089 - DNA, 25 bp, Homo sapien
aataggccctttcccatcgtggtct

SEQ ID NO: 2574090 - DNA, 25 bp, Homo sapien
cagtccttgaagtactcgtggcagt

SEQ ID NO: 2574091 - DNA, 25 bp, Homo sapien
tgaagtactcgtggcagtagagaca

SEQ ID NO: 2574092 - DNA, 25 bp, Homo sapien
agtactcgtggcagtagagacagag

SEQ ID NO: 2574093 - DNA, 25 bp, Homo sapien
tccttgaagtactcgtggcagtaga

SEQ ID NO: 2574094 - DNA, 25 bp, Homo sapien
cttgttggtgtccagaacactcatg

SEQ ID NO: 2574095 - DNA, 25 bp, Homo sapien
gttggtgtccagaacactcatgaat

SEQ ID NO: 2574096 - DNA, 25 bp, Homo sapien
tgtagtcacattcccgaaactcagt

SEQ ID NO: 2574097 - DNA, 25 bp, Homo sapien
tgaatttgttgtagtcacattcccg

SEQ ID NO: 2574098 - DNA, 25 bp, Homo sapien
acagcgccctgcgtattcctggaag

SEQ ID NO: 2574099 - DNA, 25 bp, Homo sapien
aaggtgcacacgatggcagctaccg

SEQ ID NO: 2574100 - DNA, 25 bp, Homo sapien
cttgagctccgcctggcagagcttg

SEQ ID NO: 2574101 - DNA, 25 bp, Homo sapien
agcttgtatttgtccccacagcgcc

SEQ ID NO: 2574102 - DNA, 25 bp, Homo sapien
ccagggatggctcggtcccagtctg

SEQ ID NO: 2574103 - DNA, 25 bp, Homo sapien
tcgctgtaaactcctcagagagaca

SEQ ID NO: 2574104 - DNA, 25 bp, Homo sapien
tgtttctcagagactgttcccagac

SEQ ID NO: 2574105 - DNA, 25 bp, Homo sapien
tccccatgtagaggtctcattgccc

SEQ ID NO: 2574106 - DNA, 25 bp, Homo sapien
agaagaaaaacttgtgggatcctct

SEQ ID NO: 2574107 - DNA, 25 bp, Homo sapien
tcgaggaagctgcacccagaagaaa

SEQ ID NO: 2574108 - DNA, 25 bp, Homo sapien
ctgaactcgaggaagctgcacccag

SEQ ID NO: 2574109 - DNA, 25 bp, Homo sapien
aaaaacttgtgggatcctctctgcc

SEQ ID NO: 2574110 - DNA, 25 bp, Homo sapien
agggatactctgttctattggaggg

SEQ ID NO: 2574111 - DNA, 25 bp, Homo sapien
gttctgtatagggatactctgttct

SEQ ID NO: 2574112 - DNA, 25 bp, Homo sapien
agggaggttctgtatagggatactc

SEQ ID NO: 2574113 - DNA, 25 bp, Homo sapien
tctgtatagggatactctgttctat

SEQ ID NO: 2574114 - DNA, 25 bp, Homo sapien
cgtttcagctgtaggagcttagaga

SEQ ID NO: 2574115 - DNA, 25 bp, Homo sapien
ctggcgtttcagctgtaggagctta

SEQ ID NO: 2574116 - DNA, 25 bp, Homo sapien
ggcgtttcagctgtaggagcttaga

SEQ ID NO: 2574117 - DNA, 25 bp, Homo sapien
ttcagctgtaggagcttagagacag

SEQ ID NO: 2574118 - DNA, 25 bp, Homo sapien
gggaatgaatttgggctagagtcac

SEQ ID NO: 2574119 - DNA, 25 bp, Homo sapien
ggcacttccagagtctaagcttgag

SEQ ID NO: 2574120 - DNA, 25 bp, Homo sapien
tttgggctagagtcacatgaaggct

SEQ ID NO: 2574121 - DNA, 25 bp, Homo sapien
taagcttgagatttctggcccttcc

SEQ ID NO: 2574122 - DNA, 25 bp, Homo sapien
caggccggcaaagaagccttcctgc

SEQ ID NO: 2574123 - DNA, 25 bp, Homo sapien
aaggagattgactcccaggccggca

SEQ ID NO: 2574124 - DNA, 25 bp, Homo sapien
ccagaaacagacatactttcatgta

SEQ ID NO: 2574125 - DNA, 25 bp, Homo sapien
caaaacctagaagagcgtgagaggg

SEQ ID NO: 2574126 - DNA, 25 bp, Homo sapien
agcacccaagccttgcctgtgccgt

SEQ ID NO: 2574127 - DNA, 25 bp, Homo sapien
gcacccaagccttgcctgtgccgtc

SEQ ID NO: 2574128 - DNA, 25 bp, Homo sapien
ccagcacccaagccttgcctgtgcc

SEQ ID NO: 2574129 - DNA, 25 bp, Homo sapien
cagcacccaagccttgcctgtgccg

SEQ ID NO: 2574130 - DNA, 25 bp, Homo sapien
aaaagaggagctgtgattagccctg

SEQ ID NO: 2574131 - DNA, 25 bp, Homo sapien
taagcagcctacctctgctctcggg

SEQ ID NO: 2574132 - DNA, 25 bp, Homo sapien
taactacctcataggtttgtgcggg

SEQ ID NO: 2574133 - DNA, 25 bp, Homo sapien
cctgttttataatgggctacatagc

SEQ ID NO: 2574134 - DNA, 25 bp, Homo sapien
tgtggagctgaccactgagaaatgc

SEQ ID NO: 2574135 - DNA, 25 bp, Homo sapien
cagatgtggagctgaccactgagaa

SEQ ID NO: 2574136 - DNA, 25 bp, Homo sapien
gagctgaccactgagaaatgcacca

SEQ ID NO: 2574137 - DNA, 25 bp, Homo sapien
tgcagatgtggagctgaccactgag

SEQ ID NO: 2574138 - DNA, 25 bp, Homo sapien
ccacttttgaggagccgtcctggag

SEQ ID NO: 2574139 - DNA, 25 bp, Homo sapien
tgtgaacatcgactatgttcttcac

SEQ ID NO: 2574140 - DNA, 25 bp, Homo sapien
gaaccacttttgaggagccgtcctg

SEQ ID NO: 2574141 - DNA, 25 bp, Homo sapien
caagaggaaccacttttgaggagcc

SEQ ID NO: 2574142 - DNA, 25 bp, Homo sapien
gaagtctaagctggagggggtaaca

SEQ ID NO: 2574143 - DNA, 25 bp, Homo sapien
tctaagctggagggggtaacacctg

SEQ ID NO: 2574144 - DNA, 25 bp, Homo sapien
aggccaggaagtctaagctggaggg

SEQ ID NO: 2574145 - DNA, 25 bp, Homo sapien
ctggagggggtaacacctggagaag

SEQ ID NO: 2574146 - DNA, 25 bp, Homo sapien
cctatctcgatttccaattttttgc

SEQ ID NO: 2574147 - DNA, 25 bp, Homo sapien
cgggttatggaacatcactgagcaa

SEQ ID NO: 2574148 - DNA, 25 bp, Homo sapien
taaagcatagctctggccttggaga

SEQ ID NO: 2574149 - DNA, 25 bp, Homo sapien
tgacaaaataaaagtcagcaaccta

SEQ ID NO: 2574150 - DNA, 25 bp, Homo sapien
aaggcatcaacagtcctgggcccaa

SEQ ID NO: 2574151 - DNA, 25 bp, Homo sapien
ggcatcaacagtcctgggcccaaga

SEQ ID NO: 2574152 - DNA, 25 bp, Homo sapien
gcatcaacagtcctgggcccaagag

SEQ ID NO: 2574153 - DNA, 25 bp, Homo sapien
caaaggcatcaacagtcctgggccc

SEQ ID NO: 2574154 - DNA, 25 bp, Homo sapien
aagaagtcattgcacatgacagtga

SEQ ID NO: 2574155 - DNA, 25 bp, Homo sapien
agaagtcattgcacatgacagtgat

SEQ ID NO: 2574156 - DNA, 25 bp, Homo sapien
gaagtcattgcacatgacagtgatg

SEQ ID NO: 2574157 - DNA, 25 bp, Homo sapien
caatgacaggattaaacagatggac

SEQ ID NO: 2574158 - DNA, 25 bp, Homo sapien
taaacagatggactcggaaggccct

SEQ ID NO: 2574159 - DNA, 25 bp, Homo sapien
ggtttctcaagtctccaatgacagg

SEQ ID NO: 2574160 - DNA, 25 bp, Homo sapien
tgatcttgggacaatcacttttccc

SEQ ID NO: 2574161 - DNA, 25 bp, Homo sapien
gaacttgtcgccctcttggcaggag

SEQ ID NO: 2574162 - DNA, 25 bp, Homo sapien
ccccttactcagcttgaacttgtcg

SEQ ID NO: 2574163 - DNA, 25 bp, Homo sapien
gctccttgtgcagaagttccttcat

SEQ ID NO: 2574164 - DNA, 25 bp, Homo sapien
gcagctccttgtgcagaagttcctt

SEQ ID NO: 2574165 - DNA, 25 bp, Homo sapien
tcctctgatggcacttgggacaccc

SEQ ID NO: 2574166 - DNA, 25 bp, Homo sapien
gggccttagctcagcctgtaggatc

SEQ ID NO: 2574167 - DNA, 25 bp, Homo sapien
ggcagacgctaaagcttcccttgtg

SEQ ID NO: 2574168 - DNA, 25 bp, Homo sapien
tgtaggatccacttctgccctatgc

SEQ ID NO: 2574169 - DNA, 25 bp, Homo sapien
cactggcccccaacttggcatttta

SEQ ID NO: 2574170 - DNA, 25 bp, Homo sapien
gaaaccaaacctgcctcaacctgat

SEQ ID NO: 2574171 - DNA, 25 bp, Homo sapien
tgaggatttatatgtgggccccact

SEQ ID NO: 2574172 - DNA, 25 bp, Homo sapien
gctctaggccaggtcaagggcagcc

SEQ ID NO: 2574173 - DNA, 25 bp, Homo sapien
gctgtgagcacacgctgagacttca

SEQ ID NO: 2574174 - DNA, 25 bp, Homo sapien
agtgctcgtgtacatacatgcgccc

SEQ ID NO: 2574175 - DNA, 25 bp, Homo sapien
gacttcatggtccagtgctcgtgta

SEQ ID NO: 2574176 - DNA, 25 bp, Homo sapien
tacatgcgcccgtgtgtgtgagaga

SEQ ID NO: 2574177 - DNA, 25 bp, Homo sapien
agtcccagagcagtaggtggaagcc

SEQ ID NO: 2574178 - DNA, 25 bp, Homo sapien
tcccagagcagtaggtggaagcccc

SEQ ID NO: 2574179 - DNA, 25 bp, Homo sapien
cccagagcagtaggtggaagcccca

SEQ ID NO: 2574180 - DNA, 25 bp, Homo sapien
gcagtcccagagcagtaggtggaag

SEQ ID NO: 2574181 - DNA, 25 bp, Homo sapien
gtgtacttgttttctctcagcctca

SEQ ID NO: 2574182 - DNA, 25 bp, Homo sapien
ctgtgtacttgttttctctcagcct

SEQ ID NO: 2574183 - DNA, 25 bp, Homo sapien
tgtgtacttgttttctctcagcctc

SEQ ID NO: 2574184 - DNA, 25 bp, Homo sapien
tcaaggaccaatcgtgaagagatgg

SEQ ID NO: 2574185 - DNA, 25 bp, Homo sapien
gaaagccaccttacatgaagcaagg

SEQ ID NO: 2574186 - DNA, 25 bp, Homo sapien
caagtatctgggaatccgaaagcca

SEQ ID NO: 2574187 - DNA, 25 bp, Homo sapien
gagatgggtccttataactgcaagt

SEQ ID NO: 2574188 - DNA, 25 bp, Homo sapien
gaggtttaaatccagggagactgcc

SEQ ID NO: 2574189 - DNA, 25 bp, Homo sapien
gatatgatacaattgcctccagaga

SEQ ID NO: 2574190 - DNA, 25 bp, Homo sapien
gggcaaaacacaaggcctatcagga

SEQ ID NO: 2574191 - DNA, 25 bp, Homo sapien
tgatctgaggcaacaagcttcctcc

SEQ ID NO: 2574192 - DNA, 25 bp, Homo sapien
tgggtgacagagtgtcaataaaata

SEQ ID NO: 2574193 - DNA, 25 bp, Homo sapien
gcctgggtgacagagtgtcaataaa

SEQ ID NO: 2574194 - DNA, 25 bp, Homo sapien
gttgcaatgcaccaagatcgtgcca

SEQ ID NO: 2574195 - DNA, 25 bp, Homo sapien
ggttgcaatgcaccaagatcgtgcc

SEQ ID NO: 2574196 - DNA, 25 bp, Homo sapien
ctttatcacgggctgggcgcagtgg

SEQ ID NO: 2574197 - DNA, 25 bp, Homo sapien
gtggcttatgcctataatcccacca

SEQ ID NO: 2574198 - DNA, 25 bp, Homo sapien
caccactttgggaagccaaggcagg

SEQ ID NO: 2574199 - DNA, 25 bp, Homo sapien
caggcgtggtagcacatgcctataa

SEQ ID NO: 2574200 - DNA, 25 bp, Homo sapien
ttttaccaagaacgaggactagaga

SEQ ID NO: 2574201 - DNA, 25 bp, Homo sapien
gaaaaattgtgctccaaagcttatc

SEQ ID NO: 2574202 - DNA, 25 bp, Homo sapien
taccaagaacgaggactagagagaa

SEQ ID NO: 2574203 - DNA, 25 bp, Homo sapien
aaaattgtgctccaaagcttatcat

SEQ ID NO: 2574204 - DNA, 25 bp, Homo sapien
tgcccataacccagaggtttcttcg

SEQ ID NO: 2574205 - DNA, 25 bp, Homo sapien
tgaatcaagcagtgatctcctgcag

SEQ ID NO: 2574206 - DNA, 25 bp, Homo sapien
caataggattatacatggtagcacc

SEQ ID NO: 2574207 - DNA, 25 bp, Homo sapien
taataaaagtgagtagggtgcccat

SEQ ID NO: 2574208 - DNA, 25 bp, Homo sapien
gaagtagccagaaggagtcgtcgcc

SEQ ID NO: 2574209 - DNA, 25 bp, Homo sapien
tgatccccgagtggctacaatgcct

SEQ ID NO: 2574210 - DNA, 25 bp, Homo sapien
gacacatcattcttctgaggaccct

SEQ ID NO: 2574211 - DNA, 25 bp, Homo sapien
aacatgctgctttcggattaatgcc

SEQ ID NO: 2574212 - DNA, 25 bp, Homo sapien
aaagactaagggtcatggtccctct

SEQ ID NO: 2574213 - DNA, 25 bp, Homo sapien
taaacgggacttacagtgtgcctgg

SEQ ID NO: 2574214 - DNA, 25 bp, Homo sapien
gctaaaagggcccagagatggtgac

SEQ ID NO: 2574215 - DNA, 25 bp, Homo sapien
aattgcagtgaggactaaacgggac

SEQ ID NO: 2574216 - DNA, 25 bp, Homo sapien
gaaggttttaatgagcatcccagag

SEQ ID NO: 2574217 - DNA, 25 bp, Homo sapien
gtgggaaggttttaatgagcatccc

SEQ ID NO: 2574218 - DNA, 25 bp, Homo sapien
ggaaggttttaatgagcatcccaga

SEQ ID NO: 2574219 - DNA, 25 bp, Homo sapien
ggagtgggaaggttttaatgagcat

SEQ ID NO: 2574220 - DNA, 25 bp, Homo sapien
tggcaggaacatcagacattggaag

SEQ ID NO: 2574221 - DNA, 25 bp, Homo sapien
tgagaaaactcttagggtccccaga

SEQ ID NO: 2574222 - DNA, 25 bp, Homo sapien
ccagttcagcaagggtcagaggaag

SEQ ID NO: 2574223 - DNA, 25 bp, Homo sapien
actgagacactcacaaagggacccc

SEQ ID NO: 2574224 - DNA, 25 bp, Homo sapien
tgagcttatccgcagccttccggtt

SEQ ID NO: 2574225 - DNA, 25 bp, Homo sapien
gcgcccatcatgattggcatccagg

SEQ ID NO: 2574226 - DNA, 25 bp, Homo sapien
tactcatcgaagctgatgcgcccat

SEQ ID NO: 2574227 - DNA, 25 bp, Homo sapien
ggtgatgccgcctatcaaggtccag

SEQ ID NO: 2574228 - DNA, 25 bp, Homo sapien
tggggaggaagcagggtcagcaatg

SEQ ID NO: 2574229 - DNA, 25 bp, Homo sapien
ctggggaggaagcagggtcagcaat

SEQ ID NO: 2574230 - DNA, 25 bp, Homo sapien
agcatctcgcggaagctgctcttgc

SEQ ID NO: 2574231 - DNA, 25 bp, Homo sapien
gctgtacttagacacatatttgtag

SEQ ID NO: 2574232 - DNA, 25 bp, Homo sapien
ctttctggagcatctcgcggaagct

SEQ ID NO: 2574233 - DNA, 25 bp, Homo sapien
gaccaggctgtacttagacacatat

SEQ ID NO: 2574234 - DNA, 25 bp, Homo sapien
ccagctccgtgtagcagtctgacat

SEQ ID NO: 2574235 - DNA, 25 bp, Homo sapien
tccagctccgtgtagcagtctgaca

SEQ ID NO: 2574236 - DNA, 25 bp, Homo sapien
tctccagctccgtgtagcagtctga

SEQ ID NO: 2574237 - DNA, 25 bp, Homo sapien
ctccagctccgtgtagcagtctgac

SEQ ID NO: 2574238 - DNA, 25 bp, Homo sapien
ctccctgcttcgcctgctggcgggg

SEQ ID NO: 2574239 - DNA, 25 bp, Homo sapien
tccctgcttcgcctgctggcggggc

SEQ ID NO: 2574240 - DNA, 25 bp, Homo sapien
cttgtttctggtccctggagaagaa

SEQ ID NO: 2574241 - DNA, 25 bp, Homo sapien
ttgtttctggtccctggagaagaag

SEQ ID NO: 2574242 - DNA, 25 bp, Homo sapien
tgtttctggtccctggagaagaagg

SEQ ID NO: 2574243 - DNA, 25 bp, Homo sapien
tttctggtccctggagaagaaggtg

SEQ ID NO: 2574244 - DNA, 25 bp, Homo sapien
tctaagcggatacagccttctgaat

SEQ ID NO: 2574245 - DNA, 25 bp, Homo sapien
actgccagagggcacatgcgtcacc

SEQ ID NO: 2574246 - DNA, 25 bp, Homo sapien
cagctggagtcggactctggacaca

SEQ ID NO: 2574247 - DNA, 25 bp, Homo sapien
gatctactctgtgagtcacggccca

SEQ ID NO: 2574248 - DNA, 25 bp, Homo sapien
ccggcgggtcctggtgaaaggagat

SEQ ID NO: 2574249 - DNA, 25 bp, Homo sapien
aggagatggacaaaacagggtcaca

SEQ ID NO: 2574250 - DNA, 25 bp, Homo sapien
aaggagatggacaaaacagggtcac

SEQ ID NO: 2574251 - DNA, 25 bp, Homo sapien
gggtcctggtgaaaggagatggaca

SEQ ID NO: 2574252 - DNA, 25 bp, Homo sapien
aagccacagtcagatttggaaggaa

SEQ ID NO: 2574253 - DNA, 25 bp, Homo sapien
aaggaaaggctgctcggtcaggccc

SEQ ID NO: 2574254 - DNA, 25 bp, Homo sapien
ggctgctcggtcaggccccaccaca

SEQ ID NO: 2574255 - DNA, 25 bp, Homo sapien
ctgagcaagccacagtcagatttgg

SEQ ID NO: 2574256 - DNA, 25 bp, Homo sapien
ctgctttccgttggccacttgtggc

SEQ ID NO: 2574257 - DNA, 25 bp, Homo sapien
tttccgttggccacttgtggccatt

SEQ ID NO: 2574258 - DNA, 25 bp, Homo sapien
ctttccgttggccacttgtggccat

SEQ ID NO: 2574259 - DNA, 25 bp, Homo sapien
ccgttggccacttgtggccattcct

SEQ ID NO: 2574260 - DNA, 25 bp, Homo sapien
aaatggacagtgctggagataacca

SEQ ID NO: 2574261 - DNA, 25 bp, Homo sapien
tggacagtgctggagataaccatct

SEQ ID NO: 2574262 - DNA, 25 bp, Homo sapien
tggagataaccatctgacaagtgct

SEQ ID NO: 2574263 - DNA, 25 bp, Homo sapien
cagtgctggagataaccatctgaca

SEQ ID NO: 2574264 - DNA, 25 bp, Homo sapien
gcccagcttgctgacttctccaaaa

SEQ ID NO: 2574265 - DNA, 25 bp, Homo sapien
aaaagcccaaattgccctgactcca

SEQ ID NO: 2574266 - DNA, 25 bp, Homo sapien
tccaaaagcccaaattgccctgact

SEQ ID NO: 2574267 - DNA, 25 bp, Homo sapien
tctccaaaagcccaaattgccctga

SEQ ID NO: 2574268 - DNA, 25 bp, Homo sapien
tagaatgtggggaaaggcagagcca

SEQ ID NO: 2574269 - DNA, 25 bp, Homo sapien
tgtggggaaaggcagagccagctcc

SEQ ID NO: 2574270 - DNA, 25 bp, Homo sapien
ccagcacccctgccctcaccaccat

SEQ ID NO: 2574271 - DNA, 25 bp, Homo sapien
gggaaaggcagagccagctccccag

SEQ ID NO: 2574272 - DNA, 25 bp, Homo sapien
agccctgcccgctgagctggctcgg

SEQ ID NO: 2574273 - DNA, 25 bp, Homo sapien
tagtggctgagctccttcttgactt

SEQ ID NO: 2574274 - DNA, 25 bp, Homo sapien
cctgcccgctgagctggctcggtgg

SEQ ID NO: 2574275 - DNA, 25 bp, Homo sapien
gggagatagtggctgagctccttct

SEQ ID NO: 2574276 - DNA, 25 bp, Homo sapien
ttttttagtaccagatatccagcca

SEQ ID NO: 2574277 - DNA, 25 bp, Homo sapien
gagcactggacagacagctatggtt

SEQ ID NO: 2574278 - DNA, 25 bp, Homo sapien
catccaagacagagtgcacagagac

SEQ ID NO: 2574279 - DNA, 25 bp, Homo sapien
acaaccatcattctgtcaatgccca

SEQ ID NO: 2574280 - DNA, 25 bp, Homo sapien
caagttttatctccaggcccacagt

SEQ ID NO: 2574281 - DNA, 25 bp, Homo sapien
caccccccaagaattccagagggag

SEQ ID NO: 2574282 - DNA, 25 bp, Homo sapien
gttttatctccaggcccacagtctc

SEQ ID NO: 2574283 - DNA, 25 bp, Homo sapien
gtagaggagacaagttttatctcca

SEQ ID NO: 2574284 - DNA, 25 bp, Homo sapien
actcctgaactccagtttagagtca

SEQ ID NO: 2574285 - DNA, 25 bp, Homo sapien
attgcagctgcccaggttggcaatt

SEQ ID NO: 2574286 - DNA, 25 bp, Homo sapien
ttgcagctgcccaggttggcaattt

SEQ ID NO: 2574287 - DNA, 25 bp, Homo sapien
actccagtttagagtcattgcagct

SEQ ID NO: 2574288 - DNA, 25 bp, Homo sapien
tcccggagcacttgcttgggaagtc

SEQ ID NO: 2574289 - DNA, 25 bp, Homo sapien
gtcccggagcacttgcttgggaagt

SEQ ID NO: 2574290 - DNA, 25 bp, Homo sapien
gggtgaccaggtcccgtagctcaga

SEQ ID NO: 2574291 - DNA, 25 bp, Homo sapien
acggagtactggtgaaagttcttga

SEQ ID NO: 2574292 - DNA, 25 bp, Homo sapien
agtcagtggggggacatagaccctc

SEQ ID NO: 2574293 - DNA, 25 bp, Homo sapien
aacatcagtgaagctccatgcaccc

SEQ ID NO: 2574294 - DNA, 25 bp, Homo sapien
gaggagtgtgggagcagaaaggcca

SEQ ID NO: 2574295 - DNA, 25 bp, Homo sapien
gcatcaccctgtgtgggcctcagaa

SEQ ID NO: 2574296 - DNA, 25 bp, Homo sapien
ctctgcgttggctgaccgacactgt

SEQ ID NO: 2574297 - DNA, 25 bp, Homo sapien
tctgcgttggctgaccgacactgtc

SEQ ID NO: 2574298 - DNA, 25 bp, Homo sapien
cgttggctgaccgacactgtcccat

SEQ ID NO: 2574299 - DNA, 25 bp, Homo sapien
tgcgttggctgaccgacactgtccc

SEQ ID NO: 2574300 - DNA, 25 bp, Homo sapien
tgtgtctggtcctttggtgagagtt

SEQ ID NO: 2574301 - DNA, 25 bp, Homo sapien
tgtctggtcctttggtgagagttct

SEQ ID NO: 2574302 - DNA, 25 bp, Homo sapien
ttggtgagagttctgttgtcctata

SEQ ID NO: 2574303 - DNA, 25 bp, Homo sapien
tctggtcctttggtgagagttctgt

SEQ ID NO: 2574304 - DNA, 25 bp, Homo sapien
tgagacaagacaggaggagccagct

SEQ ID NO: 2574305 - DNA, 25 bp, Homo sapien
gaggagccagctcacctgagctcag

SEQ ID NO: 2574306 - DNA, 25 bp, Homo sapien
aagacaggaggagccagctcacctg

SEQ ID NO: 2574307 - DNA, 25 bp, Homo sapien
agctcacctgagctcagctcttata

SEQ ID NO: 2574308 - DNA, 25 bp, Homo sapien
agattgagtgagtgtttgcctgacc

SEQ ID NO: 2574309 - DNA, 25 bp, Homo sapien
aggcagattgagtgagtgtttgcct

SEQ ID NO: 2574310 - DNA, 25 bp, Homo sapien
ggcagagagatgaatgtagagaact

SEQ ID NO: 2574311 - DNA, 25 bp, Homo sapien
cagagagatgaatgtagagaacttg

SEQ ID NO: 2574312 - DNA, 25 bp, Homo sapien
tcggccctgatcagctctgccctgc

SEQ ID NO: 2574313 - DNA, 25 bp, Homo sapien
ctcggccctgatcagctctgccctg

SEQ ID NO: 2574314 - DNA, 25 bp, Homo sapien
cgagtcctgattcacatccaagctc

SEQ ID NO: 2574315 - DNA, 25 bp, Homo sapien
ccagctccccaatcaatctccagta

SEQ ID NO: 2574316 - DNA, 25 bp, Homo sapien
gagctccgagtcctgattcacatcc

SEQ ID NO: 2574317 - DNA, 25 bp, Homo sapien
tcattgaacttgagctccgagtcct

SEQ ID NO: 2574318 - DNA, 25 bp, Homo sapien
ccagtctgggctacagagtgggact

SEQ ID NO: 2574319 - DNA, 25 bp, Homo sapien
tcctgaacttctcagtgagtaaact

SEQ ID NO: 2574320 - DNA, 25 bp, Homo sapien
tctcagtgagtaaacttctcaggaa

SEQ ID NO: 2574321 - DNA, 25 bp, Homo sapien
gaacttctcagtgagtaaacttctc

SEQ ID NO: 2574322 - DNA, 25 bp, Homo sapien
tcgaagtcctgaacttctcagtgag

SEQ ID NO: 2574323 - DNA, 25 bp, Homo sapien
ggcaactgctgggtaaccagctctt

SEQ ID NO: 2574324 - DNA, 25 bp, Homo sapien
tggtgaccacggtctcaatggactc

SEQ ID NO: 2574325 - DNA, 25 bp, Homo sapien
aactcgttgacgctgaggctatcct

SEQ ID NO: 2574326 - DNA, 25 bp, Homo sapien
ggtaaccagctctttgaactcgttg

SEQ ID NO: 2574327 - DNA, 25 bp, Homo sapien
aggccaaagctgatgtcctcaaggg

SEQ ID NO: 2574328 - DNA, 25 bp, Homo sapien
aaagctgatgtcctcaaggggctag

SEQ ID NO: 2574329 - DNA, 25 bp, Homo sapien
accctgaggccaaagctgatgtcct

SEQ ID NO: 2574330 - DNA, 25 bp, Homo sapien
ggaccctgaggccaaagctgatgtc

SEQ ID NO: 2574331 - DNA, 25 bp, Homo sapien
cttggtgttatcacatcagtctcag

SEQ ID NO: 2574332 - DNA, 25 bp, Homo sapien
cctgccttggtgttatcacatcagt

SEQ ID NO: 2574333 - DNA, 25 bp, Homo sapien
tgccttggtgttatcacatcagtct

SEQ ID NO: 2574334 - DNA, 25 bp, Homo sapien
tctcagcctggagggggcatatggg

SEQ ID NO: 2574335 - DNA, 25 bp, Homo sapien
tgtggcgtgtctgtctcaagaatcc

SEQ ID NO: 2574336 - DNA, 25 bp, Homo sapien
ctgtaggtctcacaatccgggatcc

SEQ ID NO: 2574337 - DNA, 25 bp, Homo sapien
tgtctgtggcttagggacccctctg

SEQ ID NO: 2574338 - DNA, 25 bp, Homo sapien
gagtccttcaagtctggtggcccct

SEQ ID NO: 2574339 - DNA, 25 bp, Homo sapien
gtcataaggttgtttgtctccaaag

SEQ ID NO: 2574340 - DNA, 25 bp, Homo sapien
gagctggctccgtctgaacagaccc

SEQ ID NO: 2574341 - DNA, 25 bp, Homo sapien
aagcttgtttatgttgggccctggt

SEQ ID NO: 2574342 - DNA, 25 bp, Homo sapien
cacagggtctggcaaatgtcccctg

SEQ ID NO: 2574343 - DNA, 25 bp, Homo sapien
tcctgcacgcgctgttgctcgatca

SEQ ID NO: 2574344 - DNA, 25 bp, Homo sapien
gacgggtttagtacaggcactcaca

SEQ ID NO: 2574345 - DNA, 25 bp, Homo sapien
tgtctcccggtgacaagggtcctgg

SEQ ID NO: 2574346 - DNA, 25 bp, Homo sapien
cagcagggcagagtgctgaacccag

SEQ ID NO: 2574347 - DNA, 25 bp, Homo sapien
gaggtgtcaaatttccgtggtcgat

SEQ ID NO: 2574348 - DNA, 25 bp, Homo sapien
agcccggaggtgtcaaatttccgtg

SEQ ID NO: 2574349 - DNA, 25 bp, Homo sapien
cttccaagcccggaggtgtcaaatt

SEQ ID NO: 2574350 - DNA, 25 bp, Homo sapien
tccaagcccggaggtgtcaaatttc

SEQ ID NO: 2574351 - DNA, 25 bp, Homo sapien
caaggcccagcttggggtaagacat

SEQ ID NO: 2574352 - DNA, 25 bp, Homo sapien
agccagccacaggtactgcaaggcc

SEQ ID NO: 2574353 - DNA, 25 bp, Homo sapien
acagccagccacaggtactgcaagg

SEQ ID NO: 2574354 - DNA, 25 bp, Homo sapien
aagacatccagtgtccctcccagga

SEQ ID NO: 2574355 - DNA, 25 bp, Homo sapien
aagggccccattgaagaactgggat

SEQ ID NO: 2574356 - DNA, 25 bp, Homo sapien
gggccccattgaagaactgggatgt

SEQ ID NO: 2574357 - DNA, 25 bp, Homo sapien
ctgggatgtcattcgatcaggggcc

SEQ ID NO: 2574358 - DNA, 25 bp, Homo sapien
gccccattgaagaactgggatgtca

SEQ ID NO: 2574359 - DNA, 25 bp, Homo sapien
gagaccctcatcaacgtgttccacg

SEQ ID NO: 2574360 - DNA, 25 bp, Homo sapien
agggggacaagtacaagctgagcaa

SEQ ID NO: 2574361 - DNA, 25 bp, Homo sapien
tggagacggcgatggagaccctcat

SEQ ID NO: 2574362 - DNA, 25 bp, Homo sapien
ctgctgcagacggagctctctggct

SEQ ID NO: 2574363 - DNA, 25 bp, Homo sapien
agtcagatggctttcctgaagaggt

SEQ ID NO: 2574364 - DNA, 25 bp, Homo sapien
ggtggcacttgaaccatggatttcc

SEQ ID NO: 2574365 - DNA, 25 bp, Homo sapien
cagatggctttcctgaagaggtggc

SEQ ID NO: 2574366 - DNA, 25 bp, Homo sapien
gaaccatggatttccattggaagat

SEQ ID NO: 2574367 - DNA, 25 bp, Homo sapien
aatgcagacattttaggaggaggta

SEQ ID NO: 2574368 - DNA, 25 bp, Homo sapien
gggtaaatgcagacattttaggagg

SEQ ID NO: 2574369 - DNA, 25 bp, Homo sapien
taaatgcagacattttaggaggagg

SEQ ID NO: 2574370 - DNA, 25 bp, Homo sapien
ctgggtaaatgcagacattttagga

SEQ ID NO: 2574371 - DNA, 25 bp, Homo sapien
tgaaggatgtagaaaactaggctgc

SEQ ID NO: 2574372 - DNA, 25 bp, Homo sapien
ctcaggatacggtagaaagtgcacc

SEQ ID NO: 2574373 - DNA, 25 bp, Homo sapien
tgctaaggctaaccagggccccaaa

SEQ ID NO: 2574374 - DNA, 25 bp, Homo sapien
aatgtggagcatgtcagtagtttca

SEQ ID NO: 2574375 - DNA, 25 bp, Homo sapien
tgcttgctttattataggcactgaa

SEQ ID NO: 2574376 - DNA, 25 bp, Homo sapien
gcggtccaagcctgcaactcatctt

SEQ ID NO: 2574377 - DNA, 25 bp, Homo sapien
tgcaactcatctttcattaaaggct

SEQ ID NO: 2574378 - DNA, 25 bp, Homo sapien
gcctgcaactcatctttcattaaag

SEQ ID NO: 2574379 - DNA, 25 bp, Homo sapien
caagagtagcggtccaagcctgcaa

SEQ ID NO: 2574380 - DNA, 25 bp, Homo sapien
agccatccgatgtctgtctcctctg

SEQ ID NO: 2574381 - DNA, 25 bp, Homo sapien
cagccatccgatgtctgtctcctct

SEQ ID NO: 2574382 - DNA, 25 bp, Homo sapien
ccatccgatgtctgtctcctctggg

SEQ ID NO: 2574383 - DNA, 25 bp, Homo sapien
atccgatgtctgtctcctctgggat

SEQ ID NO: 2574384 - DNA, 25 bp, Homo sapien
ggtggagacgtgaagactgttcact

SEQ ID NO: 2574385 - DNA, 25 bp, Homo sapien
ttagaaagaggtcaaggtgcattac

SEQ ID NO: 2574386 - DNA, 25 bp, Homo sapien
gacgtgaagactgttcactctcaac

SEQ ID NO: 2574387 - DNA, 25 bp, Homo sapien
tatttggggaagtgtcttatttaga

SEQ ID NO: 2574388 - DNA, 25 bp, Homo sapien
gttcaaggttccagttggaagtcga

SEQ ID NO: 2574389 - DNA, 25 bp, Homo sapien
tccagttggaagtcgaggagacatc

SEQ ID NO: 2574390 - DNA, 25 bp, Homo sapien
tggaagtcgaggagacatcagcttc

SEQ ID NO: 2574391 - DNA, 25 bp, Homo sapien
caaggttccagttggaagtcgagga

SEQ ID NO: 2574392 - DNA, 25 bp, Homo sapien
caattgtccggaagaagacgaggca

SEQ ID NO: 2574393 - DNA, 25 bp, Homo sapien
ctactggaacgtgaagtccccggca

SEQ ID NO: 2574394 - DNA, 25 bp, Homo sapien
tagacggtgtaccttggctagggaa

SEQ ID NO: 2574395 - DNA, 25 bp, Homo sapien
gacgaggcaagtccgcgtaaagatt

SEQ ID NO: 2574396 - DNA, 25 bp, Homo sapien
tagacgccattttagccggtcagac

SEQ ID NO: 2574397 - DNA, 25 bp, Homo sapien
cctgacgtaattgcgtagacgccat

SEQ ID NO: 2574398 - DNA, 25 bp, Homo sapien
tgcgcaggcgtagctcaaatctttc

SEQ ID NO: 2574399 - DNA, 25 bp, Homo sapien
cattttgttttggacaccgagcagg

SEQ ID NO: 2574400 - DNA, 25 bp, Homo sapien
atcggccgactagacagccaaccag

SEQ ID NO: 2574401 - DNA, 25 bp, Homo sapien
tactaccgcttacgcatctaaccaa

SEQ ID NO: 2574402 - DNA, 25 bp, Homo sapien
gagcagacggatcggccgactagac

SEQ ID NO: 2574403 - DNA, 25 bp, Homo sapien
ccaaccagcaacaacgaactgagct

SEQ ID NO: 2574404 - DNA, 25 bp, Homo sapien
ggaggagcactggcgtctgtttcct

SEQ ID NO: 2574405 - DNA, 25 bp, Homo sapien
ccgagcccctccaccgtcaactcag

SEQ ID NO: 2574406 - DNA, 25 bp, Homo sapien
gcccgcctgccggagccgtggtggc

SEQ ID NO: 2574407 - DNA, 25 bp, Homo sapien
cggcccgcctgccggagccgtggtg

SEQ ID NO: 2574408 - DNA, 25 bp, Homo sapien
ggctgcacagtcagcgccgaaagtt

SEQ ID NO: 2574409 - DNA, 25 bp, Homo sapien
tcgggattcgaagatggctgcacag

SEQ ID NO: 2574410 - DNA, 25 bp, Homo sapien
tagattctcgggattcgaagatggc

SEQ ID NO: 2574411 - DNA, 25 bp, Homo sapien
gcgccgaaagttgtgctaaaaagca

SEQ ID NO: 2574412 - DNA, 25 bp, Homo sapien
cctgtaagaggcaggtagcaagcca

SEQ ID NO: 2574413 - DNA, 25 bp, Homo sapien
catgaatatgtccaaaggcccttga

SEQ ID NO: 2574414 - DNA, 25 bp, Homo sapien
tcgtgcagcacggtagcatggtacc

SEQ ID NO: 2574415 - DNA, 25 bp, Homo sapien
gcatggtaccctggctacagtaggc

SEQ ID NO: 2574416 - DNA, 25 bp, Homo sapien
tattcgggcttcgatgcagcaacaa

SEQ ID NO: 2574417 - DNA, 25 bp, Homo sapien
tgctgaagaacaaacagccgacgcc

SEQ ID NO: 2574418 - DNA, 25 bp, Homo sapien
tgatctctgtgagggagtccactga

SEQ ID NO: 2574419 - DNA, 25 bp, Homo sapien
gaatgggtcttaatgctccagaagc

SEQ ID NO: 2574420 - DNA, 25 bp, Homo sapien
aaatcagcttctgcatgggtagagg

SEQ ID NO: 2574421 - DNA, 25 bp, Homo sapien
gatagagctaacaagcccaaagtga

SEQ ID NO: 2574422 - DNA, 25 bp, Homo sapien
tgacttgaacaaggagaaggagcct

SEQ ID NO: 2574423 - DNA, 25 bp, Homo sapien
ccaggccactcttgttgagaagcca

SEQ ID NO: 2574424 - DNA, 25 bp, Homo sapien
gcttaggatattcaggaggcactca

SEQ ID NO: 2574425 - DNA, 25 bp, Homo sapien
gacctacctgagaaggcgtctgcgc

SEQ ID NO: 2574426 - DNA, 25 bp, Homo sapien
tacccttgagtgataggagcctgca

SEQ ID NO: 2574427 - DNA, 25 bp, Homo sapien
taaaacgcagctaacctcaggagta

SEQ ID NO: 2574428 - DNA, 25 bp, Homo sapien
gaagaacccctgtccaaggtgatgg

SEQ ID NO: 2574429 - DNA, 25 bp, Homo sapien
ggtggagcccctgagaactatgctg

SEQ ID NO: 2574430 - DNA, 25 bp, Homo sapien
tgtagcagttttgcagagggcttcc

SEQ ID NO: 2574431 - DNA, 25 bp, Homo sapien
ggcacactagtgacagatccttgga

SEQ ID NO: 2574432 - DNA, 25 bp, Homo sapien
tccagaggctctagcggagctctct

SEQ ID NO: 2574433 - DNA, 25 bp, Homo sapien
ttattacttcacagtccaggaggac

SEQ ID NO: 2574434 - DNA, 25 bp, Homo sapien
aggctctagcggagctctctgtggc

SEQ ID NO: 2574435 - DNA, 25 bp, Homo sapien
attacttcacagtccaggaggacag

SEQ ID NO: 2574436 - DNA, 25 bp, Homo sapien
cctgcacacgcttcacagagatgct

SEQ ID NO: 2574437 - DNA, 25 bp, Homo sapien
gttgccgcgtcagctcaaaaggatg

SEQ ID NO: 2574438 - DNA, 25 bp, Homo sapien
cagagatgctgtcagacgcagagct

SEQ ID NO: 2574439 - DNA, 25 bp, Homo sapien
gtgttgtcaccaatgggattcccca

SEQ ID NO: 2574440 - DNA, 25 bp, Homo sapien
cttgctgtggactaggccctctttg

SEQ ID NO: 2574441 - DNA, 25 bp, Homo sapien
tgctgtggactaggccctctttgtc

SEQ ID NO: 2574442 - DNA, 25 bp, Homo sapien
tgggagcagggcttttgtggaaagg

SEQ ID NO: 2574443 - DNA, 25 bp, Homo sapien
ctaagggcataggggccagtttagt

SEQ ID NO: 2574444 - DNA, 25 bp, Homo sapien
ccagtttagtgggagcagggctttt

SEQ ID NO: 2574445 - DNA, 25 bp, Homo sapien
cataggggccagtttagtgggagca

SEQ ID NO: 2574446 - DNA, 25 bp, Homo sapien
actgtttggttagggcccaggcagt

SEQ ID NO: 2574447 - DNA, 25 bp, Homo sapien
tgtttggttagggcccaggcagtat

SEQ ID NO: 2574448 - DNA, 25 bp, Homo sapien
gaactgtttggttagggcccaggca

SEQ ID NO: 2574449 - DNA, 25 bp, Homo sapien
tttggttagggcccaggcagtatcc

SEQ ID NO: 2574450 - DNA, 25 bp, Homo sapien
agcctgctccacggccatctgcaac

SEQ ID NO: 2574451 - DNA, 25 bp, Homo sapien
aacagagtgatgctcagcctgctcc

SEQ ID NO: 2574452 - DNA, 25 bp, Homo sapien
cctgctccacggccatctgcaacct

SEQ ID NO: 2574453 - DNA, 25 bp, Homo sapien
tgctccacggccatctgcaacctgc

SEQ ID NO: 2574454 - DNA, 25 bp, Homo sapien
ctgagtataagtaaaggtttccaag

SEQ ID NO: 2574455 - DNA, 25 bp, Homo sapien
tgagtataagtaaaggtttccaaga

SEQ ID NO: 2574456 - DNA, 25 bp, Homo sapien
tgtcccatctacacaatgtttcagg

SEQ ID NO: 2574457 - DNA, 25 bp, Homo sapien
tcaggatactccaattgtgtaggtc

SEQ ID NO: 2574458 - DNA, 25 bp, Homo sapien
caatgtgaggactatgattgtccca

SEQ ID NO: 2574459 - DNA, 25 bp, Homo sapien
gaaacaggtgaatctccactgccaa

SEQ ID NO: 2574460 - DNA, 25 bp, Homo sapien
tgctgactggatagccagatcgtcg

SEQ ID NO: 2574461 - DNA, 25 bp, Homo sapien
gctcccttcttgtgcaaagtggatg

SEQ ID NO: 2574462 - DNA, 25 bp, Homo sapien
gatcttgtcattttgagctcccttc

SEQ ID NO: 2574463 - DNA, 25 bp, Homo sapien
tgttgctacaacttttgctgactgg

SEQ ID NO: 2574464 - DNA, 25 bp, Homo sapien
gctagtaactcttcaccaagctgta

SEQ ID NO: 2574465 - DNA, 25 bp, Homo sapien
taactcttcaccaagctgtatttct

SEQ ID NO: 2574466 - DNA, 25 bp, Homo sapien
gcttcagcatctttaaggtcaggta

SEQ ID NO: 2574467 - DNA, 25 bp, Homo sapien
cttcaaggaagaacttctgaacagc

SEQ ID NO: 2574468 - DNA, 25 bp, Homo sapien
gctctctccttggcaagcttctgtt

SEQ ID NO: 2574469 - DNA, 25 bp, Homo sapien
ccagctctctccttggcaagcttct

SEQ ID NO: 2574470 - DNA, 25 bp, Homo sapien
tctccttggcaagcttctgtttctt

SEQ ID NO: 2574471 - DNA, 25 bp, Homo sapien
ctctccttggcaagcttctgtttct

SEQ ID NO: 2574472 - DNA, 25 bp, Homo sapien
gcacttagaacgaagctaccaagag

SEQ ID NO: 2574473 - DNA, 25 bp, Homo sapien
cttagaacgaagctaccaagagggt

SEQ ID NO: 2574474 - DNA, 25 bp, Homo sapien
ggaagcacttagaacgaagctacca

SEQ ID NO: 2574475 - DNA, 25 bp, Homo sapien
aagcacttagaacgaagctaccaag

SEQ ID NO: 2574476 - DNA, 25 bp, Homo sapien
tattgagggccgcaccacgcggtcg

SEQ ID NO: 2574477 - DNA, 25 bp, Homo sapien
gcagccagcgccatcgcctattgag

SEQ ID NO: 2574478 - DNA, 25 bp, Homo sapien
gcgccatcgcctattgagggccgca

SEQ ID NO: 2574479 - DNA, 25 bp, Homo sapien
cctgcgcggcccacaggctggtggg

SEQ ID NO: 2574480 - DNA, 25 bp, Homo sapien
tgaaaagggccccgcatacaccggc

SEQ ID NO: 2574481 - DNA, 25 bp, Homo sapien
cccaatgaaaagggccccgcataca

SEQ ID NO: 2574482 - DNA, 25 bp, Homo sapien
ccaatgaaaagggccccgcatacac

SEQ ID NO: 2574483 - DNA, 25 bp, Homo sapien
aatgaaaagggccccgcatacaccg

SEQ ID NO: 2574484 - DNA, 25 bp, Homo sapien
gggccacgaaccctcagagcggtcg

SEQ ID NO: 2574485 - DNA, 25 bp, Homo sapien
cacttccggtcccagtcaactaagg

SEQ ID NO: 2574486 - DNA, 25 bp, Homo sapien
ccaggaacacagaaaggccgagcac

SEQ ID NO: 2574487 - DNA, 25 bp, Homo sapien
ccagtcaactaagggcctcgaggtc

SEQ ID NO: 2574488 - DNA, 25 bp, Homo sapien
tcacatacaccatccataaagaagt

SEQ ID NO: 2574489 - DNA, 25 bp, Homo sapien
tcaaaggtagtatcacaatgtgaat

SEQ ID NO: 2574490 - DNA, 25 bp, Homo sapien
aatgtggaagtctccacatttcaca

SEQ ID NO: 2574491 - DNA, 25 bp, Homo sapien
tcaacacatgaatagcagacgatgc

SEQ ID NO: 2574492 - DNA, 25 bp, Homo sapien
ttttattagcagtactcagcaggaa

SEQ ID NO: 2574493 - DNA, 25 bp, Homo sapien
ttattagcagtactcagcaggaaaa

SEQ ID NO: 2574494 - DNA, 25 bp, Homo sapien
tttattagcagtactcagcaggaaa

SEQ ID NO: 2574495 - DNA, 25 bp, Homo sapien
tattagcagtactcagcaggaaaag

SEQ ID NO: 2574496 - DNA, 25 bp, Homo sapien
aagtccctgcttaggtttactgaca

SEQ ID NO: 2574497 - DNA, 25 bp, Homo sapien
ttctctgtttcttagggcgtccact

SEQ ID NO: 2574498 - DNA, 25 bp, Homo sapien
tcttcttcgttttaaggagaacagc

SEQ ID NO: 2574499 - DNA, 25 bp, Homo sapien
tttattaacagaacgcatgactctg

SEQ ID NO: 2574500 - DNA, 25 bp, Homo sapien
gctgctgcactcgaagtctcctcat

SEQ ID NO: 2574501 - DNA, 25 bp, Homo sapien
taccagaaacccatctgcaaagaaa

SEQ ID NO: 2574502 - DNA, 25 bp, Homo sapien
agataagccccatccaatcccaggt

SEQ ID NO: 2574503 - DNA, 25 bp, Homo sapien
gaacgactttcaagcttgcacagat

SEQ ID NO: 2574504 - DNA, 25 bp, Homo sapien
ggcagggaacgctccattacgagat

SEQ ID NO: 2574505 - DNA, 25 bp, Homo sapien
taacaatggcaacaaacgctgtgac

SEQ ID NO: 2574506 - DNA, 25 bp, Homo sapien
tgttggactagacaccctctagggt

SEQ ID NO: 2574507 - DNA, 25 bp, Homo sapien
cattgtattagctgaccagagggca

SEQ ID NO: 2574508 - DNA, 25 bp, Homo sapien
cgtgccaaagcactccagcctgagc

SEQ ID NO: 2574509 - DNA, 25 bp, Homo sapien
gagatgggaggatcgctagagcctg

SEQ ID NO: 2574510 - DNA, 25 bp, Homo sapien
tccagcctgagcaacagagtgagac

SEQ ID NO: 2574511 - DNA, 25 bp, Homo sapien
ggcagaggctgcagtgagctgagat

SEQ ID NO: 2574512 - DNA, 25 bp, Homo sapien
atccaggttgggtggctcactgcag

SEQ ID NO: 2574513 - DNA, 25 bp, Homo sapien
tctgccatccaggttgggtggctca

SEQ ID NO: 2574514 - DNA, 25 bp, Homo sapien
ctcctgataggaccacaggcgctgg

SEQ ID NO: 2574515 - DNA, 25 bp, Homo sapien
tcctgataggaccacaggcgctggc

SEQ ID NO: 2574516 - DNA, 25 bp, Homo sapien
tggaatttgagaatggaagtgaaag

SEQ ID NO: 2574517 - DNA, 25 bp, Homo sapien
cacctagcccagttttcttaagatg

SEQ ID NO: 2574518 - DNA, 25 bp, Homo sapien
ctgcacctagcccagttttcttaag

SEQ ID NO: 2574519 - DNA, 25 bp, Homo sapien
gatggaatttgagaatggaagtgaa

SEQ ID NO: 2574520 - DNA, 25 bp, Homo sapien
agtgtcaatgcctcccagggcactt

SEQ ID NO: 2574521 - DNA, 25 bp, Homo sapien
tctcaatgatgacatgcaacagtgt

SEQ ID NO: 2574522 - DNA, 25 bp, Homo sapien
ggacagtgacaatgcattagtctcc

SEQ ID NO: 2574523 - DNA, 25 bp, Homo sapien
tcccagggcacttcgaaggacagtg

SEQ ID NO: 2574524 - DNA, 25 bp, Homo sapien
tgccgatgcctgtcattttgtctct

SEQ ID NO: 2574525 - DNA, 25 bp, Homo sapien
tctcacaatcctcacggccatgata

SEQ ID NO: 2574526 - DNA, 25 bp, Homo sapien
tagccaaaccctttgccgatgcctg

SEQ ID NO: 2574527 - DNA, 25 bp, Homo sapien
ggccatgatacttccacagtccaga

SEQ ID NO: 2574528 - DNA, 25 bp, Homo sapien
attccccacaaaaaccgatctcttg

SEQ ID NO: 2574529 - DNA, 25 bp, Homo sapien
tgctgattccagtccccttccagga

SEQ ID NO: 2574530 - DNA, 25 bp, Homo sapien
attgctgattccagtccccttccag

SEQ ID NO: 2574531 - DNA, 25 bp, Homo sapien
gctgattccagtccccttccaggaa

SEQ ID NO: 2574532 - DNA, 25 bp, Homo sapien
tgattccagtccccttccaggaaaa

SEQ ID NO: 2574533 - DNA, 25 bp, Homo sapien
gatgcgagatcaactctaatacgaa

SEQ ID NO: 2574534 - DNA, 25 bp, Homo sapien
caactctaatacgaaatccatctgc

SEQ ID NO: 2574535 - DNA, 25 bp, Homo sapien
atgaggtctcagatgcgagatcaac

SEQ ID NO: 2574536 - DNA, 25 bp, Homo sapien
tacgaaatccatctgcaatctgggc

SEQ ID NO: 2574537 - DNA, 25 bp, Homo sapien
ttcaatgcttgcgtggcagcactct

SEQ ID NO: 2574538 - DNA, 25 bp, Homo sapien
caatgcttgcgtggcagcactctcc

SEQ ID NO: 2574539 - DNA, 25 bp, Homo sapien
atgcttgcgtggcagcactctcctc

SEQ ID NO: 2574540 - DNA, 25 bp, Homo sapien
cttttcaatgcttgcgtggcagcac

SEQ ID NO: 2574541 - DNA, 25 bp, Homo sapien
ttttctgatcaggatgaattttacg

SEQ ID NO: 2574542 - DNA, 25 bp, Homo sapien
tttctgatcaggatgaattttacgt

SEQ ID NO: 2574543 - DNA, 25 bp, Homo sapien
cttaaacacaacataggcattaata

SEQ ID NO: 2574544 - DNA, 25 bp, Homo sapien
tttttctgatcaggatgaattttac

SEQ ID NO: 2574545 - DNA, 25 bp, Homo sapien
cggagattacggtgagctgagatca

SEQ ID NO: 2574546 - DNA, 25 bp, Homo sapien
gaggcggagattacggtgagctgag

SEQ ID NO: 2574547 - DNA, 25 bp, Homo sapien
ggaggcggagattacggtgagctga

SEQ ID NO: 2574548 - DNA, 25 bp, Homo sapien
ggcggagattacggtgagctgagat

SEQ ID NO: 2574549 - DNA, 25 bp, Homo sapien
tttattgctgccaactttttggata

SEQ ID NO: 2574550 - DNA, 25 bp, Homo sapien
caactttttggatagcgttccctct

SEQ ID NO: 2574551 - DNA, 25 bp, Homo sapien
aactttttggatagcgttccctctg

SEQ ID NO: 2574552 - DNA, 25 bp, Homo sapien
ttgctgccaactttttggatagcgt

SEQ ID NO: 2574553 - DNA, 25 bp, Homo sapien
ggttaaagtgcttcaccatctcact

SEQ ID NO: 2574554 - DNA, 25 bp, Homo sapien
cagcagtagatagtaagagcaactc

SEQ ID NO: 2574555 - DNA, 25 bp, Homo sapien
aaaaagttcaagagtcagcagtaga

SEQ ID NO: 2574556 - DNA, 25 bp, Homo sapien
ggttaaatttgaacctattgattca

SEQ ID NO: 2574557 - DNA, 25 bp, Homo sapien
gtacagattctatttgtccatactc

SEQ ID NO: 2574558 - DNA, 25 bp, Homo sapien
gaaatcgtacagattctatttgtcc

SEQ ID NO: 2574559 - DNA, 25 bp, Homo sapien
gattctatttgtccatactctttaa

SEQ ID NO: 2574560 - DNA, 25 bp, Homo sapien
cagagaacgaaatcgtacagattct

SEQ ID NO: 2574561 - DNA, 25 bp, Homo sapien
atgtaacaggcaaattcccaacaaa

SEQ ID NO: 2574562 - DNA, 25 bp, Homo sapien
cttcttattacatgtaacaggcaaa

SEQ ID NO: 2574563 - DNA, 25 bp, Homo sapien
tgtaacaggcaaattcccaacaaac

SEQ ID NO: 2574564 - DNA, 25 bp, Homo sapien
aatcagcactcgctagagcgctttc

SEQ ID NO: 2574565 - DNA, 25 bp, Homo sapien
tctaaatcagcactcgctagagcgc

SEQ ID NO: 2574566 - DNA, 25 bp, Homo sapien
taaatcagcactcgctagagcgctt

SEQ ID NO: 2574567 - DNA, 25 bp, Homo sapien
atcagcactcgctagagcgctttcc

SEQ ID NO: 2574568 - DNA, 25 bp, Homo sapien
tctgagcatcaatctgaaaggagaa

SEQ ID NO: 2574569 - DNA, 25 bp, Homo sapien
gatatggataagcaaggtctgagca

SEQ ID NO: 2574570 - DNA, 25 bp, Homo sapien
caatataaagtattgctggatatgg

SEQ ID NO: 2574571 - DNA, 25 bp, Homo sapien
tgtgaaacggtaaatacaatataaa

SEQ ID NO: 2574572 - DNA, 25 bp, Homo sapien
cgtgagcacgtctatattagcagaa

SEQ ID NO: 2574573 - DNA, 25 bp, Homo sapien
gaatcgtgagcacgtctatattagc

SEQ ID NO: 2574574 - DNA, 25 bp, Homo sapien
tttaaagattagaatcgtgagcacg

SEQ ID NO: 2574575 - DNA, 25 bp, Homo sapien
gattagaatcgtgagcacgtctata

SEQ ID NO: 2574576 - DNA, 25 bp, Homo sapien
gaacgtggatggatctgacggcaca

SEQ ID NO: 2574577 - DNA, 25 bp, Homo sapien
ccagaactggtacaaaggtcttcag

SEQ ID NO: 2574578 - DNA, 25 bp, Homo sapien
tgtcagtgattaacagctccagaac

SEQ ID NO: 2574579 - DNA, 25 bp, Homo sapien
tgacggcacagtccctaaaaaggca

SEQ ID NO: 2574580 - DNA, 25 bp, Homo sapien
gatcactgcactctactgcagcctg

SEQ ID NO: 2574581 - DNA, 25 bp, Homo sapien
actgcagcctgggcgtggcatcaag

SEQ ID NO: 2574582 - DNA, 25 bp, Homo sapien
tcccacctactcagggccgaggcag

SEQ ID NO: 2574583 - DNA, 25 bp, Homo sapien
cagcctgggcgtggcatcaagactc

SEQ ID NO: 2574584 - DNA, 25 bp, Homo sapien
gatgctgagtacacggggtttctta

SEQ ID NO: 2574585 - DNA, 25 bp, Homo sapien
tccaagtataggaatgttaatttac

SEQ ID NO: 2574586 - DNA, 25 bp, Homo sapien
ctgacgaatattccaagtataggaa

SEQ ID NO: 2574587 - DNA, 25 bp, Homo sapien
aatattagtaattgctgatgctgag

SEQ ID NO: 2574588 - DNA, 25 bp, Homo sapien
gtgtgtttcttcttcgctttcactt

SEQ ID NO: 2574589 - DNA, 25 bp, Homo sapien
agtgtgtttcttcttcgctttcact

SEQ ID NO: 2574590 - DNA, 25 bp, Homo sapien
tgtgtttcttcttcgctttcacttt

SEQ ID NO: 2574591 - DNA, 25 bp, Homo sapien
cttgcgaaagtggtctttcaatctg

SEQ ID NO: 2574592 - DNA, 25 bp, Homo sapien
gcgaaagtggtctttcaatctggga

SEQ ID NO: 2574593 - DNA, 25 bp, Homo sapien
cgaaagtggtctttcaatctgggat

SEQ ID NO: 2574594 - DNA, 25 bp, Homo sapien
tgcgaaagtggtctttcaatctggg

SEQ ID NO: 2574595 - DNA, 25 bp, Homo sapien
tccagagaactgaagagggacgcca

SEQ ID NO: 2574596 - DNA, 25 bp, Homo sapien
tgttcgccgcgaaataagctactgg

SEQ ID NO: 2574597 - DNA, 25 bp, Homo sapien
caagcctgtagtcttccggcggact

SEQ ID NO: 2574598 - DNA, 25 bp, Homo sapien
tactggcgacctgtccaagcctgta

SEQ ID NO: 2574599 - DNA, 25 bp, Homo sapien
gcacgagggaacgtacaacatccct

SEQ ID NO: 2574600 - DNA, 25 bp, Homo sapien
tccctccccaggtactcgtgccgcg

SEQ ID NO: 2574601 - DNA, 25 bp, Homo sapien
accgcttcgccagcacgagggaacg

SEQ ID NO: 2574602 - DNA, 25 bp, Homo sapien
ttcgccagcacgagggaacgtacaa

SEQ ID NO: 2574603 - DNA, 25 bp, Homo sapien
ttctctttctcttccgtttgctcat

SEQ ID NO: 2574604 - DNA, 25 bp, Homo sapien
ccctcctggacacttctctttctct

SEQ ID NO: 2574605 - DNA, 25 bp, Homo sapien
cttctctttctcttccgtttgctca

SEQ ID NO: 2574606 - DNA, 25 bp, Homo sapien
acacttctctttctcttccgtttgc

SEQ ID NO: 2574607 - DNA, 25 bp, Homo sapien
tccaaggccattcttactccaaaga

SEQ ID NO: 2574608 - DNA, 25 bp, Homo sapien
ggttccgggcacttccgctctctgg

SEQ ID NO: 2574609 - DNA, 25 bp, Homo sapien
cagactgcagctgcgcgccagctcg

SEQ ID NO: 2574610 - DNA, 25 bp, Homo sapien
ctcccctccggcagtcggccgccgg

SEQ ID NO: 2574611 - DNA, 25 bp, Homo sapien
ttgtcgccgtcggttggtggtcctc

SEQ ID NO: 2574612 - DNA, 25 bp, Homo sapien
ggagcaggtttgtcgccgtcggttg

SEQ ID NO: 2574613 - DNA, 25 bp, Homo sapien
tcggttggtggtcctcgccgtttca

SEQ ID NO: 2574614 - DNA, 25 bp, Homo sapien
tggtcctcgccgtttcagaaaagcc

SEQ ID NO: 2574615 - DNA, 25 bp, Homo sapien
ggctctcagccgtgaatcctgcgat

SEQ ID NO: 2574616 - DNA, 25 bp, Homo sapien
ggaaagtccctgtgtatagagcctg

SEQ ID NO: 2574617 - DNA, 25 bp, Homo sapien
tcctgcgatgcgtaagggaaagatc

SEQ ID NO: 2574618 - DNA, 25 bp, Homo sapien
taattaattacgtgaggccatgcct

SEQ ID NO: 2574619 - DNA, 25 bp, Homo sapien
tatttgcaattattgtaaagttgaa

SEQ ID NO: 2574620 - DNA, 25 bp, Homo sapien
gcaattattgtaaagttgaaccact

SEQ ID NO: 2574621 - DNA, 25 bp, Homo sapien
tgcaattattgtaaagttgaaccac

SEQ ID NO: 2574622 - DNA, 25 bp, Homo sapien
tttgcaattattgtaaagttgaacc

SEQ ID NO: 2574623 - DNA, 25 bp, Homo sapien
caaccagataatcctcacctgcctc

SEQ ID NO: 2574624 - DNA, 25 bp, Homo sapien
gacagctgagctctgaaagcgcaga

SEQ ID NO: 2574625 - DNA, 25 bp, Homo sapien
gaaagcgcagatctgttttaaagtg

SEQ ID NO: 2574626 - DNA, 25 bp, Homo sapien
ccgacagctgagctctgaaagcgca

SEQ ID NO: 2574627 - DNA, 25 bp, Homo sapien
ctgcaaagtaccgacagctgagctc

SEQ ID NO: 2574628 - DNA, 25 bp, Homo sapien
taatgtctaatatcaccgagtgtca

SEQ ID NO: 2574629 - DNA, 25 bp, Homo sapien
gataatgtctaatatcaccgagtgt

SEQ ID NO: 2574630 - DNA, 25 bp, Homo sapien
tgtctaatatcaccgagtgtcacag

SEQ ID NO: 2574631 - DNA, 25 bp, Homo sapien
aatatcaccgagtgtcacagtacca

SEQ ID NO: 2574632 - DNA, 25 bp, Homo sapien
tggagagtgacagtggagcggcggc

SEQ ID NO: 2574633 - DNA, 25 bp, Homo sapien
tcggtgagtgagaggtggcgctggc

SEQ ID NO: 2574634 - DNA, 25 bp, Homo sapien
ggctggagctcggtgagtgagaggt

SEQ ID NO: 2574635 - DNA, 25 bp, Homo sapien
gagagtgacagtggagcggcggcgg

SEQ ID NO: 2574636 - DNA, 25 bp, Homo sapien
tgaggcacatcgaaacagtgggcag

SEQ ID NO: 2574637 - DNA, 25 bp, Homo sapien
tcttcaaactgaattaagccctgag

SEQ ID NO: 2574638 - DNA, 25 bp, Homo sapien
aaactgaattaagccctgagcggac

SEQ ID NO: 2574639 - DNA, 25 bp, Homo sapien
cttctggcaggttctaagaatttgc

SEQ ID NO: 2574640 - DNA, 25 bp, Homo sapien
ctgcatctggctggcataatcaact

SEQ ID NO: 2574641 - DNA, 25 bp, Homo sapien
gcatctggctggcataatcaactga

SEQ ID NO: 2574642 - DNA, 25 bp, Homo sapien
tggctggcataatcaactgaacaat

SEQ ID NO: 2574643 - DNA, 25 bp, Homo sapien
tctggctggcataatcaactgaaca

SEQ ID NO: 2574644 - DNA, 25 bp, Homo sapien
cccgggcagatttcaaaccctctgc

SEQ ID NO: 2574645 - DNA, 25 bp, Homo sapien
ccccgggcagatttcaaaccctctg

SEQ ID NO: 2574646 - DNA, 25 bp, Homo sapien
cgtgttttgattggccgcggagcct

SEQ ID NO: 2574647 - DNA, 25 bp, Homo sapien
aacaggcggcggcccgcttctcatt

SEQ ID NO: 2574648 - DNA, 25 bp, Homo sapien
cggcggcccgcttctcattggccag

SEQ ID NO: 2574649 - DNA, 25 bp, Homo sapien
aggcccgcgctgtcgtgttttgatt

SEQ ID NO: 2574650 - DNA, 25 bp, Homo sapien
gctgccgcgttagttccgagcttga

SEQ ID NO: 2574651 - DNA, 25 bp, Homo sapien
tgccgcgttagttccgagcttgaag

SEQ ID NO: 2574652 - DNA, 25 bp, Homo sapien
cgcgttagttccgagcttgaagtca

SEQ ID NO: 2574653 - DNA, 25 bp, Homo sapien
agccgctgccgcgttagttccgagc

SEQ ID NO: 2574654 - DNA, 25 bp, Homo sapien
tctgtcaacaaatacaccaaaacca

SEQ ID NO: 2574655 - DNA, 25 bp, Homo sapien
gtgtctgtcaacaaatacaccaaaa

SEQ ID NO: 2574656 - DNA, 25 bp, Homo sapien
aatgtagtggattaagtgtctgtca

SEQ ID NO: 2574657 - DNA, 25 bp, Homo sapien
tattaaatgtagtggattaagtgtc

SEQ ID NO: 2574658 - DNA, 25 bp, Homo sapien
tgctctggcctcatcattcctgcaa

SEQ ID NO: 2574659 - DNA, 25 bp, Homo sapien
ctgtaataaacttgtagcatatgta

SEQ ID NO: 2574660 - DNA, 25 bp, Homo sapien
tgcacaagctattctaatagtgctc

SEQ ID NO: 2574661 - DNA, 25 bp, Homo sapien
tttaatggtcactcaatagctttca

SEQ ID NO: 2574662 - DNA, 25 bp, Homo sapien
caggtagtttcgagtatggtgccag

SEQ ID NO: 2574663 - DNA, 25 bp, Homo sapien
ggtgcaacccaatggaccacttatg

SEQ ID NO: 2574664 - DNA, 25 bp, Homo sapien
gatgcctaagctgtatttctccaaa

SEQ ID NO: 2574665 - DNA, 25 bp, Homo sapien
tgcctaagcaggtaagcagatgcct

SEQ ID NO: 2574666 - DNA, 25 bp, Homo sapien
cagccatactgtgaaccttaggtaa

SEQ ID NO: 2574667 - DNA, 25 bp, Homo sapien
gctgaagtcagccatactgtgaacc

SEQ ID NO: 2574668 - DNA, 25 bp, Homo sapien
tactgtgaaccttaggtaaatgctg

SEQ ID NO: 2574669 - DNA, 25 bp, Homo sapien
gctgctgaagtcagccatactgtga

SEQ ID NO: 2574670 - DNA, 25 bp, Homo sapien
tagaacctctgtccataagaacccc

SEQ ID NO: 2574671 - DNA, 25 bp, Homo sapien
gtaacctaggatctgacacttgctg

SEQ ID NO: 2574672 - DNA, 25 bp, Homo sapien
catgatgggtattctacaaaggaca

SEQ ID NO: 2574673 - DNA, 25 bp, Homo sapien
gaaaagcacatggttcggcacagta

SEQ ID NO: 2574674 - DNA, 25 bp, Homo sapien
catcatatcctaataagaaactaag

SEQ ID NO: 2574675 - DNA, 25 bp, Homo sapien
tgatgaaatcaatgtataggtaaag

SEQ ID NO: 2574676 - DNA, 25 bp, Homo sapien
tcctaataagaaactaaggaatcca

SEQ ID NO: 2574677 - DNA, 25 bp, Homo sapien
caatgtataggtaaagaaacatcat

SEQ ID NO: 2574678 - DNA, 25 bp, Homo sapien
cagaacatactaaatcagttaggat

SEQ ID NO: 2574679 - DNA, 25 bp, Homo sapien
gtgaggcagagtaaacaatttatta

SEQ ID NO: 2574680 - DNA, 25 bp, Homo sapien
tttgggggttatatcctagcatgtg

SEQ ID NO: 2574681 - DNA, 25 bp, Homo sapien
tcagttaggataacagctctctgtc

SEQ ID NO: 2574682 - DNA, 25 bp, Homo sapien
ccacccaattcagtttgagacagac

SEQ ID NO: 2574683 - DNA, 25 bp, Homo sapien
tatccagtacaatgatttgcccaca

SEQ ID NO: 2574684 - DNA, 25 bp, Homo sapien
gggccctcttagctggatgtcaaat

SEQ ID NO: 2574685 - DNA, 25 bp, Homo sapien
tacctgggaaggagtagttaagaca

SEQ ID NO: 2574686 - DNA, 25 bp, Homo sapien
gggacttcaattattccatgtagtt

SEQ ID NO: 2574687 - DNA, 25 bp, Homo sapien
cctttggtcgcttgaactgcccttc

SEQ ID NO: 2574688 - DNA, 25 bp, Homo sapien
gtcgcttgaactgcccttctttggt

SEQ ID NO: 2574689 - DNA, 25 bp, Homo sapien
tggtcgcttgaactgcccttctttg

SEQ ID NO: 2574690 - DNA, 25 bp, Homo sapien
tttggtcgcttgaactgcccttctt

SEQ ID NO: 2574691 - DNA, 25 bp, Homo sapien
gaactgtactgggtattccagctgc

SEQ ID NO: 2574692 - DNA, 25 bp, Homo sapien
tcagatctttcttgaagtgtagtaa

SEQ ID NO: 2574693 - DNA, 25 bp, Homo sapien
gtgtagtaagcagaactgtactggg

SEQ ID NO: 2574694 - DNA, 25 bp, Homo sapien
tactgggtattccagctgcagtttg

SEQ ID NO: 2574695 - DNA, 25 bp, Homo sapien
tgttagttgaactggatgtagcagc

SEQ ID NO: 2574696 - DNA, 25 bp, Homo sapien
cttctctgtggtatacaggattttg

SEQ ID NO: 2574697 - DNA, 25 bp, Homo sapien
tacaggattttgttagttgaactgg

SEQ ID NO: 2574698 - DNA, 25 bp, Homo sapien
agttgaactggatgtagcagcttac

SEQ ID NO: 2574699 - DNA, 25 bp, Homo sapien
gagaataatacaatagttcccaggt

SEQ ID NO: 2574700 - DNA, 25 bp, Homo sapien
acagctcatactctatgtagcacct

SEQ ID NO: 2574701 - DNA, 25 bp, Homo sapien
taacagctcatactctatgtagcac

SEQ ID NO: 2574702 - DNA, 25 bp, Homo sapien
cttaacagctcatactctatgtagc

SEQ ID NO: 2574703 - DNA, 25 bp, Homo sapien
agtgtgtcagccctcatttgagtgt

SEQ ID NO: 2574704 - DNA, 25 bp, Homo sapien
catgggttcaactgtaatatagtcc

SEQ ID NO: 2574705 - DNA, 25 bp, Homo sapien
tatcattgagcccagtcatacacag

SEQ ID NO: 2574706 - DNA, 25 bp, Homo sapien
tcagtaggatccaaactaccatggg

SEQ ID NO: 2574707 - DNA, 25 bp, Homo sapien
cgttaagccctaatgcgtcttgttt

SEQ ID NO: 2574708 - DNA, 25 bp, Homo sapien
cgtcttgtttacaagagggagagca

SEQ ID NO: 2574709 - DNA, 25 bp, Homo sapien
aaatcatgtcataaacgttaagccc

SEQ ID NO: 2574710 - DNA, 25 bp, Homo sapien
ccaagaggcttaatgagcaatcatg

SEQ ID NO: 2574711 - DNA, 25 bp, Homo sapien
caaagtaaaagttagttgtgcctag

SEQ ID NO: 2574712 - DNA, 25 bp, Homo sapien
aaagttagttgtgcctagtgcaaca

SEQ ID NO: 2574713 - DNA, 25 bp, Homo sapien
ttagttgtgcctagtgcaacaatga

SEQ ID NO: 2574714 - DNA, 25 bp, Homo sapien
ttcaatactgtaataattccagtta

SEQ ID NO: 2574715 - DNA, 25 bp, Homo sapien
gcatgtttgcttaatttacagcaag

SEQ ID NO: 2574716 - DNA, 25 bp, Homo sapien
ttatagcatgtttgcttaatttaca

SEQ ID NO: 2574717 - DNA, 25 bp, Homo sapien
tagcatgtttgcttaatttacagca

SEQ ID NO: 2574718 - DNA, 25 bp, Homo sapien
catgtttgcttaatttacagcaagc

SEQ ID NO: 2574719 - DNA, 25 bp, Homo sapien
cgtgcatataaacgattgcatagca

SEQ ID NO: 2574720 - DNA, 25 bp, Homo sapien
tcgaaagctcaaaagatgtgactct

SEQ ID NO: 2574721 - DNA, 25 bp, Homo sapien
catcgttgtattctttacaggcaaa

SEQ ID NO: 2574722 - DNA, 25 bp, Homo sapien
tttagaagcctctataagaaagaaa

SEQ ID NO: 2574723 - DNA, 25 bp, Homo sapien
cagccgggcctagacatcttgacaa

SEQ ID NO: 2574724 - DNA, 25 bp, Homo sapien
tatcattggcctagacatccggttt

SEQ ID NO: 2574725 - DNA, 25 bp, Homo sapien
aaaagcaggcctccctcataaagag

SEQ ID NO: 2574726 - DNA, 25 bp, Homo sapien
tattatggtcaacaacgctccttaa

SEQ ID NO: 2574727 - DNA, 25 bp, Homo sapien
ccttttcatatcttgagccagactt

SEQ ID NO: 2574728 - DNA, 25 bp, Homo sapien
tccttttcatatcttgagccagact

SEQ ID NO: 2574729 - DNA, 25 bp, Homo sapien
ctagaacgtgatttagccttcattt

SEQ ID NO: 2574730 - DNA, 25 bp, Homo sapien
aaaagatcgatttcggtgtttgaat

SEQ ID NO: 2574731 - DNA, 25 bp, Homo sapien
atcttgaaaaagatcgatttcggtg

SEQ ID NO: 2574732 - DNA, 25 bp, Homo sapien
tgaaaaagatcgatttcggtgtttg

SEQ ID NO: 2574733 - DNA, 25 bp, Homo sapien
ggagagatataattagagtaaaaat

SEQ ID NO: 2574734 - DNA, 25 bp, Homo sapien
aaatacatgagtctttttcaaagca

SEQ ID NO: 2574735 - DNA, 25 bp, Homo sapien
gcaaaagttcactctgaaattaaaa

SEQ ID NO: 2574736 - DNA, 25 bp, Homo sapien
tttagagcaaaagttcactctgaaa

SEQ ID NO: 2574737 - DNA, 25 bp, Homo sapien
tatcattgtcggaatggcttctgct

SEQ ID NO: 2574738 - DNA, 25 bp, Homo sapien
gaatggcttctgctacgccgtggtc

SEQ ID NO: 2574739 - DNA, 25 bp, Homo sapien
ctatcattgtcggaatggcttctgc

SEQ ID NO: 2574740 - DNA, 25 bp, Homo sapien
ctgctacgccgtggtcttccagtcg

SEQ ID NO: 2574741 - DNA, 25 bp, Homo sapien
cagtgacaaatatctattcatagag

SEQ ID NO: 2574742 - DNA, 25 bp, Homo sapien
gacaaatatctattcatagaggcaa

SEQ ID NO: 2574743 - DNA, 25 bp, Homo sapien
aaaagcagtgacaaatatctattca

SEQ ID NO: 2574744 - DNA, 25 bp, Homo sapien
aaatgctacagtattttttgtctca

SEQ ID NO: 2574745 - DNA, 25 bp, Homo sapien
ctatagttgtaatcaaaagaccgac

SEQ ID NO: 2574746 - DNA, 25 bp, Homo sapien
aaaagaccgacttcttgatctcctc

SEQ ID NO: 2574747 - DNA, 25 bp, Homo sapien
ggactatacgatcttctatagttgt

SEQ ID NO: 2574748 - DNA, 25 bp, Homo sapien
taacttcggcttctagaacgtctgt

SEQ ID NO: 2574749 - DNA, 25 bp, Homo sapien
catcatagcgtgaagaactgtacac

SEQ ID NO: 2574750 - DNA, 25 bp, Homo sapien
tcatagcgtgaagaactgtacacat

SEQ ID NO: 2574751 - DNA, 25 bp, Homo sapien
aatcatcatagcgtgaagaactgta

SEQ ID NO: 2574752 - DNA, 25 bp, Homo sapien
tcataatcatcatagcgtgaagaac

SEQ ID NO: 2574753 - DNA, 25 bp, Homo sapien
tctagtttatcagccaagacctggt

SEQ ID NO: 2574754 - DNA, 25 bp, Homo sapien
tatgctgatttggaatgatcccacc

SEQ ID NO: 2574755 - DNA, 25 bp, Homo sapien
tgtatccctgccttgtaagtacgca

SEQ ID NO: 2574756 - DNA, 25 bp, Homo sapien
gcgaacatctggtaagcctgcataa

SEQ ID NO: 2574757 - DNA, 25 bp, Homo sapien
tttcgatccccctgggcaaactgta

SEQ ID NO: 2574758 - DNA, 25 bp, Homo sapien
gtaaagcgtcttcagcatcacgaac

SEQ ID NO: 2574759 - DNA, 25 bp, Homo sapien
tatgtaaagcgtcttcagcatcacg

SEQ ID NO: 2574760 - DNA, 25 bp, Homo sapien
tctttcgatccccctgggcaaactg

SEQ ID NO: 2574761 - DNA, 25 bp, Homo sapien
aaatgccaatagttcttgtgtaagc

SEQ ID NO: 2574762 - DNA, 25 bp, Homo sapien
aagcacttgtgatttcctaaggcac

SEQ ID NO: 2574763 - DNA, 25 bp, Homo sapien
ttatagctgaatcaccaagttgtcc

SEQ ID NO: 2574764 - DNA, 25 bp, Homo sapien
ggtatgtctggaacaattcacaatc

SEQ ID NO: 2574765 - DNA, 25 bp, Homo sapien
caagagacgaaagcattaacttcaa

SEQ ID NO: 2574766 - DNA, 25 bp, Homo sapien
gagacgaaagcattaacttcaaatt

SEQ ID NO: 2574767 - DNA, 25 bp, Homo sapien
cttacaagagacgaaagcattaact

SEQ ID NO: 2574768 - DNA, 25 bp, Homo sapien
catatatatctaatactactatttc

SEQ ID NO: 2574769 - DNA, 25 bp, Homo sapien
tgctatcaagaaacagaccactgga

SEQ ID NO: 2574770 - DNA, 25 bp, Homo sapien
tatgttgtaagccagaacgcactgc

SEQ ID NO: 2574771 - DNA, 25 bp, Homo sapien
gctaccctcgaaaacagaatcctgg

SEQ ID NO: 2574772 - DNA, 25 bp, Homo sapien
tttgagagacaacacaagactgcag

SEQ ID NO: 2574773 - DNA, 25 bp, Homo sapien
actccgtggcatctgaccacctggt

SEQ ID NO: 2574774 - DNA, 25 bp, Homo sapien
tgtcactagaccaaaccagaataat

SEQ ID NO: 2574775 - DNA, 25 bp, Homo sapien
gagagtgcatttacacaagaccaca

SEQ ID NO: 2574776 - DNA, 25 bp, Homo sapien
cttaagaatatacatcctgttacac

SEQ ID NO: 2574777 - DNA, 25 bp, Homo sapien
gagatgcttggccaaatatgacaga

SEQ ID NO: 2574778 - DNA, 25 bp, Homo sapien
cttcaagcctgatccttaagaggtc

SEQ ID NO: 2574779 - DNA, 25 bp, Homo sapien
ccccttttgtagataaagcgaggct

SEQ ID NO: 2574780 - DNA, 25 bp, Homo sapien
gggtcgccataactgtacagcttta

SEQ ID NO: 2574781 - DNA, 25 bp, Homo sapien
ccaaattcacgccgcaagtcttcag

SEQ ID NO: 2574782 - DNA, 25 bp, Homo sapien
cgaccaaattcacgccgcaagtctt

SEQ ID NO: 2574783 - DNA, 25 bp, Homo sapien
aacgaccaaattcacgccgcaagtc

SEQ ID NO: 2574784 - DNA, 25 bp, Homo sapien
aaattcacgccgcaagtcttcagac

SEQ ID NO: 2574785 - DNA, 25 bp, Homo sapien
tttttatgtccaagtccttaagatg

SEQ ID NO: 2574786 - DNA, 25 bp, Homo sapien
ggaaagctaggatccaagaatttgg

SEQ ID NO: 2574787 - DNA, 25 bp, Homo sapien
aaaacatcataaaaagacctcaaat

SEQ ID NO: 2574788 - DNA, 25 bp, Homo sapien
taggcaatatatctttttgatgaag

SEQ ID NO: 2574789 - DNA, 25 bp, Homo sapien
tctgaaggcaactcgaaacaaggga

SEQ ID NO: 2574790 - DNA, 25 bp, Homo sapien
gcatcaaatcgactctagcactctg

SEQ ID NO: 2574791 - DNA, 25 bp, Homo sapien
tcaaagggtgaccagaatttccagg

SEQ ID NO: 2574792 - DNA, 25 bp, Homo sapien
tttactccccaattttagcgacaga

SEQ ID NO: 2574793 - DNA, 25 bp, Homo sapien
ggtgtcgtcggccacgttcctgacg

SEQ ID NO: 2574794 - DNA, 25 bp, Homo sapien
gccacgttcctgacgaacagagacg

SEQ ID NO: 2574795 - DNA, 25 bp, Homo sapien
ttggggggacgcaggtagcgggaca

SEQ ID NO: 2574796 - DNA, 25 bp, Homo sapien
cgttcctgacgaacagagacgtgtt

SEQ ID NO: 2574797 - DNA, 25 bp, Homo sapien
tacctccgcgcaaagtcgggcgcaa

SEQ ID NO: 2574798 - DNA, 25 bp, Homo sapien
cgggcgcactaacgggctcagcaaa

SEQ ID NO: 2574799 - DNA, 25 bp, Homo sapien
agctagagggctctgctacggcaac

SEQ ID NO: 2574800 - DNA, 25 bp, Homo sapien
acggcaaccgactcttctcgcgaga

SEQ ID NO: 2574801 - DNA, 25 bp, Homo sapien
ggagaccagctgaactcctttgagg

SEQ ID NO: 2574802 - DNA, 25 bp, Homo sapien
ctgcacgttttctcagggtgaacaa

SEQ ID NO: 2574803 - DNA, 25 bp, Homo sapien
tgctaatgacctcaaccaggttgct

SEQ ID NO: 2574804 - DNA, 25 bp, Homo sapien
gaacaattcctgttgagcaatgccc

SEQ ID NO: 2574805 - DNA, 25 bp, Homo sapien
ctagctatgcgttgccttttccctg

SEQ ID NO: 2574806 - DNA, 25 bp, Homo sapien
gtcagtaaatggatatgtgggaggc

SEQ ID NO: 2574807 - DNA, 25 bp, Homo sapien
tagctatgcgttgccttttccctgt

SEQ ID NO: 2574808 - DNA, 25 bp, Homo sapien
ttcttcatggcagccaggacattgc

SEQ ID NO: 2574809 - DNA, 25 bp, Homo sapien
cttcatggcagccaggacattgctc

SEQ ID NO: 2574810 - DNA, 25 bp, Homo sapien
ctttcttggcagtggctttcttcat

SEQ ID NO: 2574811 - DNA, 25 bp, Homo sapien
ttggcagtggctttcttcatggcag

SEQ ID NO: 2574812 - DNA, 25 bp, Homo sapien
ttcttgataaacttggaggtcttca

SEQ ID NO: 2574813 - DNA, 25 bp, Homo sapien
tcttgataaacttggaggtcttcag

SEQ ID NO: 2574814 - DNA, 25 bp, Homo sapien
tgtgacactcgtaaggggcaaagcc

SEQ ID NO: 2574815 - DNA, 25 bp, Homo sapien
tggtgtgacactcgtaaggggcaaa

SEQ ID NO: 2574816 - DNA, 25 bp, Homo sapien
catggtgtgacactcgtaaggggca

SEQ ID NO: 2574817 - DNA, 25 bp, Homo sapien
gtgtgacactcgtaaggggcaaagc

SEQ ID NO: 2574818 - DNA, 25 bp, Homo sapien
tggccatagggtagcgcagagccac

SEQ ID NO: 2574819 - DNA, 25 bp, Homo sapien
tctcggatcatgtcctgcacaaact

SEQ ID NO: 2574820 - DNA, 25 bp, Homo sapien
gtgtgtttggtcaggcacctgcggc

SEQ ID NO: 2574821 - DNA, 25 bp, Homo sapien
tggtcaggcacctgcggcggcagct

SEQ ID NO: 2574822 - DNA, 25 bp, Homo sapien
caaaggcagccgtggcggaaggcag

SEQ ID NO: 2574823 - DNA, 25 bp, Homo sapien
tgctctccaaaggcagccgtggcgg

SEQ ID NO: 2574824 - DNA, 25 bp, Homo sapien
tccaaaggcagccgtggcggaaggc

SEQ ID NO: 2574825 - DNA, 25 bp, Homo sapien
ctgctgctctccaaaggcagccgtg

SEQ ID NO: 2574826 - DNA, 25 bp, Homo sapien
ccgtgtcattcagcacagcccgtga

SEQ ID NO: 2574827 - DNA, 25 bp, Homo sapien
ccattcagccgtgtcattcagcaca

SEQ ID NO: 2574828 - DNA, 25 bp, Homo sapien
agcccgtgactgttcggccccaagg

SEQ ID NO: 2574829 - DNA, 25 bp, Homo sapien
tgttcggccccaaggcagttgatgg

SEQ ID NO: 2574830 - DNA, 25 bp, Homo sapien
caacaggatcccacgggagaagaag

SEQ ID NO: 2574831 - DNA, 25 bp, Homo sapien
aacaggatcccacgggagaagaagt

SEQ ID NO: 2574832 - DNA, 25 bp, Homo sapien
acaggatcccacgggagaagaagtt

SEQ ID NO: 2574833 - DNA, 25 bp, Homo sapien
caggatcccacgggagaagaagttt

SEQ ID NO: 2574834 - DNA, 25 bp, Homo sapien
gggcatgatgggtcttggtcttctt

SEQ ID NO: 2574835 - DNA, 25 bp, Homo sapien
catgatgggtcttggtcttcttcca

SEQ ID NO: 2574836 - DNA, 25 bp, Homo sapien
tgatgggtcttggtcttcttccact

SEQ ID NO: 2574837 - DNA, 25 bp, Homo sapien
gcatgatgggtcttggtcttcttcc

SEQ ID NO: 2574838 - DNA, 25 bp, Homo sapien
ttcacggtagcgaggattttagatg

SEQ ID NO: 2574839 - DNA, 25 bp, Homo sapien
tcagactgttcacggtagcgaggat

SEQ ID NO: 2574840 - DNA, 25 bp, Homo sapien
atactcagactgttcacggtagcga

SEQ ID NO: 2574841 - DNA, 25 bp, Homo sapien
gactgttcacggtagcgaggatttt

SEQ ID NO: 2574842 - DNA, 25 bp, Homo sapien
gctccaatacgtaaaaggcacttct

SEQ ID NO: 2574843 - DNA, 25 bp, Homo sapien
aacagccaagccaacacgctgttgc

SEQ ID NO: 2574844 - DNA, 25 bp, Homo sapien
catgagtcagtcagttcaagacaac

SEQ ID NO: 2574845 - DNA, 25 bp, Homo sapien
aacacgctgttgctccaatacgtaa

SEQ ID NO: 2574846 - DNA, 25 bp, Homo sapien
taacatctatccagtgagtcctgca

SEQ ID NO: 2574847 - DNA, 25 bp, Homo sapien
aataacatctatccagtgagtcctg

SEQ ID NO: 2574848 - DNA, 25 bp, Homo sapien
ataacatctatccagtgagtcctgc

SEQ ID NO: 2574849 - DNA, 25 bp, Homo sapien
aattaagcatccacaattgctgaaa

SEQ ID NO: 2574850 - DNA, 25 bp, Homo sapien
gaattaagcatccacaattgctgaa

SEQ ID NO: 2574851 - DNA, 25 bp, Homo sapien
tcttctttccttctttgatcttctt

SEQ ID NO: 2574852 - DNA, 25 bp, Homo sapien
tccttctttgatcttcttccccttc

SEQ ID NO: 2574853 - DNA, 25 bp, Homo sapien
gggcatggtgggttttgatcttctt

SEQ ID NO: 2574854 - DNA, 25 bp, Homo sapien
ctggggcatggtgggttttgatctt

SEQ ID NO: 2574855 - DNA, 25 bp, Homo sapien
aataacatctatccagtgagtcctg

SEQ ID NO: 2574856 - DNA, 25 bp, Homo sapien
taacatctatccagtgagtcctgca

SEQ ID NO: 2574857 - DNA, 25 bp, Homo sapien
ataacatctatccagtgagtcctgc

SEQ ID NO: 2574858 - DNA, 25 bp, Homo sapien
tagctgttcacaattgctcagttac

SEQ ID NO: 2574859 - DNA, 25 bp, Homo sapien
aagtagctgttcacaattgctcagt

SEQ ID NO: 2574860 - DNA, 25 bp, Homo sapien
agtagctgttcacaattgctcagtt

SEQ ID NO: 2574861 - DNA, 25 bp, Homo sapien
gtagctgttcacaattgctcagtta

SEQ ID NO: 2574862 - DNA, 25 bp, Homo sapien
tggggcatggtgggccttggtcttc

SEQ ID NO: 2574863 - DNA, 25 bp, Homo sapien
gcatggtgggccttggtcttcttcc

SEQ ID NO: 2574864 - DNA, 25 bp, Homo sapien
gggcatggtgggccttggtcttctt

SEQ ID NO: 2574865 - DNA, 25 bp, Homo sapien
ctggggcatggtgggccttggtctt

SEQ ID NO: 2574866 - DNA, 25 bp, Homo sapien
tcctcagcatgagaacaggacaatg

SEQ ID NO: 2574867 - DNA, 25 bp, Homo sapien
tcagcatgagaacaggacaatgtga

SEQ ID NO: 2574868 - DNA, 25 bp, Homo sapien
gctcctcagcatgagaacaggacaa

SEQ ID NO: 2574869 - DNA, 25 bp, Homo sapien
cctcagcatgagaacaggacaatgt

SEQ ID NO: 2574870 - DNA, 25 bp, Homo sapien
cctccaatgagtaaacagcactgct

SEQ ID NO: 2574871 - DNA, 25 bp, Homo sapien
gtaaacagcactgctgtagggctgg

SEQ ID NO: 2574872 - DNA, 25 bp, Homo sapien
cctaagtcaggcagttcaagataac

SEQ ID NO: 2574873 - DNA, 25 bp, Homo sapien
gccaaggtactgttcctccaatgag

SEQ ID NO: 2574874 - DNA, 25 bp, Homo sapien
aataacatctatccagtgagtcctg

SEQ ID NO: 2574875 - DNA, 25 bp, Homo sapien
ataacatctatccagtgagtcctgc

SEQ ID NO: 2574876 - DNA, 25 bp, Homo sapien
taacatctatccagtgagtcctgca

SEQ ID NO: 2574877 - DNA, 25 bp, Homo sapien
ctggggcatggtgggttttgatctt

SEQ ID NO: 2574878 - DNA, 25 bp, Homo sapien
gggcatggtgggttttgatcttctt

SEQ ID NO: 2574879 - DNA, 25 bp, Homo sapien
tcttctttccttctttgatcttctt

SEQ ID NO: 2574880 - DNA, 25 bp, Homo sapien
tccttctttgatcttcttccccttc

SEQ ID NO: 2574881 - DNA, 25 bp, Homo sapien
aataacatctatccagtgagtcctg

SEQ ID NO: 2574882 - DNA, 25 bp, Homo sapien
ataacatctatccagtgagtcctgc

SEQ ID NO: 2574883 - DNA, 25 bp, Homo sapien
taacatctatccagtgagtcctgca

SEQ ID NO: 2574884 - DNA, 25 bp, Homo sapien
gaacagggccaaatggaaaagaatg

SEQ ID NO: 2574885 - DNA, 25 bp, Homo sapien
cagaacagggccaaatggaaaagaa

SEQ ID NO: 2574886 - DNA, 25 bp, Homo sapien
ggacagaacagggccaaatggaaaa

SEQ ID NO: 2574887 - DNA, 25 bp, Homo sapien
acagaacagggccaaatggaaaaga

SEQ ID NO: 2574888 - DNA, 25 bp, Homo sapien
tagctgttcacaattgctcagttac

SEQ ID NO: 2574889 - DNA, 25 bp, Homo sapien
agtagctgttcacaattgctcagtt

SEQ ID NO: 2574890 - DNA, 25 bp, Homo sapien
aagtagctgttcacaattgctcagt

SEQ ID NO: 2574891 - DNA, 25 bp, Homo sapien
gtagctgttcacaattgctcagtta

SEQ ID NO: 2574892 - DNA, 25 bp, Homo sapien
tggggcatggtgggccttggtcttc

SEQ ID NO: 2574893 - DNA, 25 bp, Homo sapien
gggcatggtgggccttggtcttctt

SEQ ID NO: 2574894 - DNA, 25 bp, Homo sapien
gcatggtgggccttggtcttcttcc

SEQ ID NO: 2574895 - DNA, 25 bp, Homo sapien
ctggggcatggtgggccttggtctt

SEQ ID NO: 2574896 - DNA, 25 bp, Homo sapien
cctcagcatgagaacaggacaatgt

SEQ ID NO: 2574897 - DNA, 25 bp, Homo sapien
tcctcagcatgagaacaggacaatg

SEQ ID NO: 2574898 - DNA, 25 bp, Homo sapien
gctcctcagcatgagaacaggacaa

SEQ ID NO: 2574899 - DNA, 25 bp, Homo sapien
tcagcatgagaacaggacaatgtga

SEQ ID NO: 2574900 - DNA, 25 bp, Homo sapien
taacatctatccagtgagtcctgca

SEQ ID NO: 2574901 - DNA, 25 bp, Homo sapien
ataacatctatccagtgagtcctgc

SEQ ID NO: 2574902 - DNA, 25 bp, Homo sapien
aataacatctatccagtgagtcctg

SEQ ID NO: 2574903 - DNA, 25 bp, Homo sapien
acagaacagggccaaatggaaaaga

SEQ ID NO: 2574904 - DNA, 25 bp, Homo sapien
gaacagggccaaatggaaaagaatg

SEQ ID NO: 2574905 - DNA, 25 bp, Homo sapien
cagaacagggccaaatggaaaagaa

SEQ ID NO: 2574906 - DNA, 25 bp, Homo sapien
ggacagaacagggccaaatggaaaa

SEQ ID NO: 2574907 - DNA, 25 bp, Homo sapien
aagtagctgttcacaattgctcagt

SEQ ID NO: 2574908 - DNA, 25 bp, Homo sapien
agtagctgttcacaattgctcagtt

SEQ ID NO: 2574909 - DNA, 25 bp, Homo sapien
tagctgttcacaattgctcagttac

SEQ ID NO: 2574910 - DNA, 25 bp, Homo sapien
gtagctgttcacaattgctcagtta

SEQ ID NO: 2574911 - DNA, 25 bp, Homo sapien
gggcatggtgggccttggtcttctt

SEQ ID NO: 2574912 - DNA, 25 bp, Homo sapien
ctggggcatggtgggccttggtctt

SEQ ID NO: 2574913 - DNA, 25 bp, Homo sapien
tggggcatggtgggccttggtcttc

SEQ ID NO: 2574914 - DNA, 25 bp, Homo sapien
gcatggtgggccttggtcttcttcc

SEQ ID NO: 2574915 - DNA, 25 bp, Homo sapien
tcctcagcatgagaacaggacaatg

SEQ ID NO: 2574916 - DNA, 25 bp, Homo sapien
tcagcatgagaacaggacaatgtga

SEQ ID NO: 2574917 - DNA, 25 bp, Homo sapien
gctcctcagcatgagaacaggacaa

SEQ ID NO: 2574918 - DNA, 25 bp, Homo sapien
cctcagcatgagaacaggacaatgt

SEQ ID NO: 2574919 - DNA, 25 bp, Homo sapien
cctaagtcaggcagttcaagataac

SEQ ID NO: 2574920 - DNA, 25 bp, Homo sapien
gtaaacagcactgctgtagggctgg

SEQ ID NO: 2574921 - DNA, 25 bp, Homo sapien
gccaaggtactgttcctccaatgag

SEQ ID NO: 2574922 - DNA, 25 bp, Homo sapien
cctccaatgagtaaacagcactgct

SEQ ID NO: 2574923 - DNA, 25 bp, Homo sapien
aataacatctatccagtgagtcctg

SEQ ID NO: 2574924 - DNA, 25 bp, Homo sapien
ataacatctatccagtgagtcctgc

SEQ ID NO: 2574925 - DNA, 25 bp, Homo sapien
taacatctatccagtgagtcctgca

SEQ ID NO: 2574926 - DNA, 25 bp, Homo sapien
gctcaagattccatgcagttgccat

SEQ ID NO: 2574927 - DNA, 25 bp, Homo sapien
tcgggacacacagcgaacagtgatc

SEQ ID NO: 2574928 - DNA, 25 bp, Homo sapien
taattttccataaacttgctcaaga

SEQ ID NO: 2574929 - DNA, 25 bp, Homo sapien
ccatacagcctttgaggtatggtca

SEQ ID NO: 2574930 - DNA, 25 bp, Homo sapien
gaattaagcatccacaattgctgaa

SEQ ID NO: 2574931 - DNA, 25 bp, Homo sapien
aattaagcatccacaattgctgaaa

SEQ ID NO: 2574932 - DNA, 25 bp, Homo sapien
tccttctttgatcttcttccccttc

SEQ ID NO: 2574933 - DNA, 25 bp, Homo sapien
ctggggcatggtgggttttgatctt

SEQ ID NO: 2574934 - DNA, 25 bp, Homo sapien
tcttctttccttctttgatcttctt

SEQ ID NO: 2574935 - DNA, 25 bp, Homo sapien
gggcatggtgggttttgatcttctt

SEQ ID NO: 2574936 - DNA, 25 bp, Homo sapien
aataacatctatccagtgagtcctg

SEQ ID NO: 2574937 - DNA, 25 bp, Homo sapien
taacatctatccagtgagtcctgca

SEQ ID NO: 2574938 - DNA, 25 bp, Homo sapien
ataacatctatccagtgagtcctgc

SEQ ID NO: 2574939 - DNA, 25 bp, Homo sapien
gaacagggccaaatggaaaagaatg

SEQ ID NO: 2574940 - DNA, 25 bp, Homo sapien
acagaacagggccaaatggaaaaga

SEQ ID NO: 2574941 - DNA, 25 bp, Homo sapien
cagaacagggccaaatggaaaagaa

SEQ ID NO: 2574942 - DNA, 25 bp, Homo sapien
ggacagaacagggccaaatggaaaa

SEQ ID NO: 2574943 - DNA, 25 bp, Homo sapien
tagctgttcacaattgctcagttac

SEQ ID NO: 2574944 - DNA, 25 bp, Homo sapien
gtagctgttcacaattgctcagtta

SEQ ID NO: 2574945 - DNA, 25 bp, Homo sapien
aagtagctgttcacaattgctcagt

SEQ ID NO: 2574946 - DNA, 25 bp, Homo sapien
agtagctgttcacaattgctcagtt

SEQ ID NO: 2574947 - DNA, 25 bp, Homo sapien
tggggcatggtgggccttggtcttc

SEQ ID NO: 2574948 - DNA, 25 bp, Homo sapien
gcatggtgggccttggtcttcttcc

SEQ ID NO: 2574949 - DNA, 25 bp, Homo sapien
ctggggcatggtgggccttggtctt

SEQ ID NO: 2574950 - DNA, 25 bp, Homo sapien
gggcatggtgggccttggtcttctt

SEQ ID NO: 2574951 - DNA, 25 bp, Homo sapien
tcctcagcatgagaacaggacaatg

SEQ ID NO: 2574952 - DNA, 25 bp, Homo sapien
cctcagcatgagaacaggacaatgt

SEQ ID NO: 2574953 - DNA, 25 bp, Homo sapien
tcagcatgagaacaggacaatgtga

SEQ ID NO: 2574954 - DNA, 25 bp, Homo sapien
gctcctcagcatgagaacaggacaa

SEQ ID NO: 2574955 - DNA, 25 bp, Homo sapien
aataacatctatccagtgagtcctg

SEQ ID NO: 2574956 - DNA, 25 bp, Homo sapien
ataacatctatccagtgagtcctgc

SEQ ID NO: 2574957 - DNA, 25 bp, Homo sapien
taacatctatccagtgagtcctgca

SEQ ID NO: 2574958 - DNA, 25 bp, Homo sapien
gctcaagattccatgcagttgccat

SEQ ID NO: 2574959 - DNA, 25 bp, Homo sapien
ccatacagcctttgaggtatggtca

SEQ ID NO: 2574960 - DNA, 25 bp, Homo sapien
tcgggacacacagcgaacagtgatc

SEQ ID NO: 2574961 - DNA, 25 bp, Homo sapien
taattttccataaacttgctcaaga

SEQ ID NO: 2574962 - DNA, 25 bp, Homo sapien
tgatgggtcttggtcttcttccact

SEQ ID NO: 2574963 - DNA, 25 bp, Homo sapien
gggcatgatgggtcttggtcttctt

SEQ ID NO: 2574964 - DNA, 25 bp, Homo sapien
catgatgggtcttggtcttcttcca

SEQ ID NO: 2574965 - DNA, 25 bp, Homo sapien
gcatgatgggtcttggtcttcttcc

SEQ ID NO: 2574966 - DNA, 25 bp, Homo sapien
tcagccaagtcaacgcgctgttggt

SEQ ID NO: 2574967 - DNA, 25 bp, Homo sapien
caacgcgctgttggtacaataggta

SEQ ID NO: 2574968 - DNA, 25 bp, Homo sapien
catgtcatcagccaagtcaacgcgc

SEQ ID NO: 2574969 - DNA, 25 bp, Homo sapien
ctgttggtacaataggtaaaaggca

SEQ ID NO: 2574970 - DNA, 25 bp, Homo sapien
ggggcatggtgggttttgatcttct

SEQ ID NO: 2574971 - DNA, 25 bp, Homo sapien
tccttctttgatcttcttccccttc

SEQ ID NO: 2574972 - DNA, 25 bp, Homo sapien
gggcatggtgggttttgatcttctt

SEQ ID NO: 2574973 - DNA, 25 bp, Homo sapien
cttcttctttccttctttgatcttc

SEQ ID NO: 2574974 - DNA, 25 bp, Homo sapien
ataacatctatccagtgagtcctgc

SEQ ID NO: 2574975 - DNA, 25 bp, Homo sapien
taacatctatccagtgagtcctgca

SEQ ID NO: 2574976 - DNA, 25 bp, Homo sapien
aataacatctatccagtgagtcctg

SEQ ID NO: 2574977 - DNA, 25 bp, Homo sapien
gaacagggccaaatggaaaagaatg

SEQ ID NO: 2574978 - DNA, 25 bp, Homo sapien
ggacagaacagggccaaatggaaaa

SEQ ID NO: 2574979 - DNA, 25 bp, Homo sapien
cagaacagggccaaatggaaaagaa

SEQ ID NO: 2574980 - DNA, 25 bp, Homo sapien
acagaacagggccaaatggaaaaga

SEQ ID NO: 2574981 - DNA, 25 bp, Homo sapien
gtcagcccgctctgttttccctgaa

SEQ ID NO: 2574982 - DNA, 25 bp, Homo sapien
taatcgataatgtcagcccgctctg

SEQ ID NO: 2574983 - DNA, 25 bp, Homo sapien
gaaaagatgtaatcgataatgtcag

SEQ ID NO: 2574984 - DNA, 25 bp, Homo sapien
gatgtaatcgataatgtcagcccgc

SEQ ID NO: 2574985 - DNA, 25 bp, Homo sapien
tggggcatggtgggccttggtcttc

SEQ ID NO: 2574986 - DNA, 25 bp, Homo sapien
ctggggcatggtgggccttggtctt

SEQ ID NO: 2574987 - DNA, 25 bp, Homo sapien
gcatggtgggccttggtcttcttcc

SEQ ID NO: 2574988 - DNA, 25 bp, Homo sapien
gggcatggtgggccttggtcttctt

SEQ ID NO: 2574989 - DNA, 25 bp, Homo sapien
cctcagcatgagaacaggacaatgt

SEQ ID NO: 2574990 - DNA, 25 bp, Homo sapien
tcctcagcatgagaacaggacaatg

SEQ ID NO: 2574991 - DNA, 25 bp, Homo sapien
tcagcatgagaacaggacaatgtga

SEQ ID NO: 2574992 - DNA, 25 bp, Homo sapien
gctcctcagcatgagaacaggacaa

SEQ ID NO: 2574993 - DNA, 25 bp, Homo sapien
ataacatctatccagtgagtcctgc

SEQ ID NO: 2574994 - DNA, 25 bp, Homo sapien
aataacatctatccagtgagtcctg

SEQ ID NO: 2574995 - DNA, 25 bp, Homo sapien
taacatctatccagtgagtcctgca

SEQ ID NO: 2574996 - DNA, 25 bp, Homo sapien
gcatgatgggtcttggtcttcttcc

SEQ ID NO: 2574997 - DNA, 25 bp, Homo sapien
gggcatgatgggtcttggtcttctt

SEQ ID NO: 2574998 - DNA, 25 bp, Homo sapien
catgatgggtcttggtcttcttcca

SEQ ID NO: 2574999 - DNA, 25 bp, Homo sapien
tgatgggtcttggtcttcttccact

SEQ ID NO: 2575000 - DNA, 25 bp, Homo sapien
catgagtcagtcagttcaagacaac

SEQ ID NO: 2575001 - DNA, 25 bp, Homo sapien
gctccaatacgtaaaaggcacttct

SEQ ID NO: 2575002 - DNA, 25 bp, Homo sapien
aacagccaagccaacacgctgttgc

SEQ ID NO: 2575003 - DNA, 25 bp, Homo sapien
aacacgctgttgctccaatacgtaa

SEQ ID NO: 2575004 - DNA, 25 bp, Homo sapien
taacatctatccagtgagtcctgca

SEQ ID NO: 2575005 - DNA, 25 bp, Homo sapien
aataacatctatccagtgagtcctg

SEQ ID NO: 2575006 - DNA, 25 bp, Homo sapien
ataacatctatccagtgagtcctgc

SEQ ID NO: 2575007 - DNA, 25 bp, Homo sapien
gaattaagcatccacaattgctgaa

SEQ ID NO: 2575008 - DNA, 25 bp, Homo sapien
aattaagcatccacaattgctgaaa

SEQ ID NO: 2575009 - DNA, 25 bp, Homo sapien
ctggggcatggtgggttttgatctt

SEQ ID NO: 2575010 - DNA, 25 bp, Homo sapien
tccttctttgatcttcttccccttc

SEQ ID NO: 2575011 - DNA, 25 bp, Homo sapien
gggcatggtgggttttgatcttctt

SEQ ID NO: 2575012 - DNA, 25 bp, Homo sapien
tcttctttccttctttgatcttctt

SEQ ID NO: 2575013 - DNA, 25 bp, Homo sapien
aataacatctatccagtgagtcctg

SEQ ID NO: 2575014 - DNA, 25 bp, Homo sapien
ataacatctatccagtgagtcctgc

SEQ ID NO: 2575015 - DNA, 25 bp, Homo sapien
taacatctatccagtgagtcctgca

SEQ ID NO: 2575016 - DNA, 25 bp, Homo sapien
ggacagaacagggccaaatggaaaa

SEQ ID NO: 2575017 - DNA, 25 bp, Homo sapien
acagaacagggccaaatggaaaaga

SEQ ID NO: 2575018 - DNA, 25 bp, Homo sapien
cagaacagggccaaatggaaaagaa

SEQ ID NO: 2575019 - DNA, 25 bp, Homo sapien
gaacagggccaaatggaaaagaatg

SEQ ID NO: 2575020 - DNA, 25 bp, Homo sapien
tagctgttcacaattgctcagttac

SEQ ID NO: 2575021 - DNA, 25 bp, Homo sapien
aagtagctgttcacaattgctcagt

SEQ ID NO: 2575022 - DNA, 25 bp, Homo sapien
gtagctgttcacaattgctcagtta

SEQ ID NO: 2575023 - DNA, 25 bp, Homo sapien
agtagctgttcacaattgctcagtt

SEQ ID NO: 2575024 - DNA, 25 bp, Homo sapien
ctggggcatggtgggccttggtctt

SEQ ID NO: 2575025 - DNA, 25 bp, Homo sapien
tggggcatggtgggccttggtcttc

SEQ ID NO: 2575026 - DNA, 25 bp, Homo sapien
gcatggtgggccttggtcttcttcc

SEQ ID NO: 2575027 - DNA, 25 bp, Homo sapien
gggcatggtgggccttggtcttctt

SEQ ID NO: 2575028 - DNA, 25 bp, Homo sapien
tcctcagcatgagaacaggacaatg

SEQ ID NO: 2575029 - DNA, 25 bp, Homo sapien
tcagcatgagaacaggacaatgtga

SEQ ID NO: 2575030 - DNA, 25 bp, Homo sapien
cctcagcatgagaacaggacaatgt

SEQ ID NO: 2575031 - DNA, 25 bp, Homo sapien
gctcctcagcatgagaacaggacaa

SEQ ID NO: 2575032 - DNA, 25 bp, Homo sapien
aataacatctatccagtgagtcctg

SEQ ID NO: 2575033 - DNA, 25 bp, Homo sapien
taacatctatccagtgagtcctgca

SEQ ID NO: 2575034 - DNA, 25 bp, Homo sapien
ataacatctatccagtgagtcctgc

SEQ ID NO: 2575035 - DNA, 25 bp, Homo sapien
tgatgggtcttggtcttcttccact

SEQ ID NO: 2575036 - DNA, 25 bp, Homo sapien
gcatgatgggtcttggtcttcttcc

SEQ ID NO: 2575037 - DNA, 25 bp, Homo sapien
catgatgggtcttggtcttcttcca

SEQ ID NO: 2575038 - DNA, 25 bp, Homo sapien
gggcatgatgggtcttggtcttctt

SEQ ID NO: 2575039 - DNA, 25 bp, Homo sapien
ggacagacatattaagctggttctc

SEQ ID NO: 2575040 - DNA, 25 bp, Homo sapien
tgcaataagttcagacatggacaga

SEQ ID NO: 2575041 - DNA, 25 bp, Homo sapien
gacatggacagacatattaagctgg

SEQ ID NO: 2575042 - DNA, 25 bp, Homo sapien
catggacagacatattaagctggtt

SEQ ID NO: 2575043 - DNA, 25 bp, Homo sapien
tgacacactgatgagggagtaacag

SEQ ID NO: 2575044 - DNA, 25 bp, Homo sapien
acacactgatgagggagtaacagga

SEQ ID NO: 2575045 - DNA, 25 bp, Homo sapien
ttgaagtctggtccacctacagtag

SEQ ID NO: 2575046 - DNA, 25 bp, Homo sapien
tgaagtctggtccacctacagtagg

SEQ ID NO: 2575047 - DNA, 25 bp, Homo sapien
gtagctgttcacaattgctcagtta

SEQ ID NO: 2575048 - DNA, 25 bp, Homo sapien
aagtagctgttcacaattgctcagt

SEQ ID NO: 2575049 - DNA, 25 bp, Homo sapien
agtagctgttcacaattgctcagtt

SEQ ID NO: 2575050 - DNA, 25 bp, Homo sapien
tagctgttcacaattgctcagttac

SEQ ID NO: 2575051 - DNA, 25 bp, Homo sapien
gcatggtgggccttggtcttcttcc

SEQ ID NO: 2575052 - DNA, 25 bp, Homo sapien
tggggcatggtgggccttggtcttc

SEQ ID NO: 2575053 - DNA, 25 bp, Homo sapien
gggcatggtgggccttggtcttctt

SEQ ID NO: 2575054 - DNA, 25 bp, Homo sapien
ctggggcatggtgggccttggtctt

SEQ ID NO: 2575055 - DNA, 25 bp, Homo sapien
cctcagcatgagaacaggacaatgt

SEQ ID NO: 2575056 - DNA, 25 bp, Homo sapien
tcagcatgagaacaggacaatgtga

SEQ ID NO: 2575057 - DNA, 25 bp, Homo sapien
gctcctcagcatgagaacaggacaa

SEQ ID NO: 2575058 - DNA, 25 bp, Homo sapien
tcctcagcatgagaacaggacaatg

SEQ ID NO: 2575059 - DNA, 25 bp, Homo sapien
gccaaggtactgttcctccaatgag

SEQ ID NO: 2575060 - DNA, 25 bp, Homo sapien
cctccaatgagtaaacagcactgct

SEQ ID NO: 2575061 - DNA, 25 bp, Homo sapien
cctaagtcaggcagttcaagataac

SEQ ID NO: 2575062 - DNA, 25 bp, Homo sapien
ccaatgagtaaacagcactgctgta

SEQ ID NO: 2575063 - DNA, 25 bp, Homo sapien
taacatctatccagtgagtcctgca

SEQ ID NO: 2575064 - DNA, 25 bp, Homo sapien
ataacatctatccagtgagtcctgc

SEQ ID NO: 2575065 - DNA, 25 bp, Homo sapien
aataacatctatccagtgagtcctg

SEQ ID NO: 2575066 - DNA, 25 bp, Homo sapien
tgatgggtcttggtcttcttccact

SEQ ID NO: 2575067 - DNA, 25 bp, Homo sapien
catgatgggtcttggtcttcttcca

SEQ ID NO: 2575068 - DNA, 25 bp, Homo sapien
gggcatgatgggtcttggtcttctt

SEQ ID NO: 2575069 - DNA, 25 bp, Homo sapien
gcatgatgggtcttggtcttcttcc

SEQ ID NO: 2575070 - DNA, 25 bp, Homo sapien
gctccaatacgtaaaaggcacttct

SEQ ID NO: 2575071 - DNA, 25 bp, Homo sapien
catgagtcagtcagttcaagacaac

SEQ ID NO: 2575072 - DNA, 25 bp, Homo sapien
aacagccaagccaacacgctgttgc

SEQ ID NO: 2575073 - DNA, 25 bp, Homo sapien
aacacgctgttgctccaatacgtaa

SEQ ID NO: 2575074 - DNA, 25 bp, Homo sapien
ataacatctatccagtgagtcctgc

SEQ ID NO: 2575075 - DNA, 25 bp, Homo sapien
aataacatctatccagtgagtcctg

SEQ ID NO: 2575076 - DNA, 25 bp, Homo sapien
taacatctatccagtgagtcctgca

SEQ ID NO: 2575077 - DNA, 25 bp, Homo sapien
ctggggcatggtgggttttgatctt

SEQ ID NO: 2575078 - DNA, 25 bp, Homo sapien
gggcatggtgggttttgatcttctt

SEQ ID NO: 2575079 - DNA, 25 bp, Homo sapien
tcttctttccttctttgatcttctt

SEQ ID NO: 2575080 - DNA, 25 bp, Homo sapien
tccttctttgatcttcttccccttc

SEQ ID NO: 2575081 - DNA, 25 bp, Homo sapien
ctcatcaaatactcagattgttcat

SEQ ID NO: 2575082 - DNA, 25 bp, Homo sapien
gtccctattctagtagatcgttatc

SEQ ID NO: 2575083 - DNA, 25 bp, Homo sapien
aaaatgtccctattctagtagatcg

SEQ ID NO: 2575084 - DNA, 25 bp, Homo sapien
gattgttcatggttgtgaggacttt

SEQ ID NO: 2575085 - DNA, 25 bp, Homo sapien
taacatctatccagtgagtcctgca

SEQ ID NO: 2575086 - DNA, 25 bp, Homo sapien
ataacatctatccagtgagtcctgc

SEQ ID NO: 2575087 - DNA, 25 bp, Homo sapien
aataacatctatccagtgagtcctg

SEQ ID NO: 2575088 - DNA, 25 bp, Homo sapien
acagaacagggccaaatggaaaaga

SEQ ID NO: 2575089 - DNA, 25 bp, Homo sapien
cagaacagggccaaatggaaaagaa

SEQ ID NO: 2575090 - DNA, 25 bp, Homo sapien
ggacagaacagggccaaatggaaaa

SEQ ID NO: 2575091 - DNA, 25 bp, Homo sapien
gaacagggccaaatggaaaagaatg

SEQ ID NO: 2575092 - DNA, 25 bp, Homo sapien
aagtagctgttcacaattgctcagt

SEQ ID NO: 2575093 - DNA, 25 bp, Homo sapien
agtagctgttcacaattgctcagtt

SEQ ID NO: 2575094 - DNA, 25 bp, Homo sapien
gtagctgttcacaattgctcagtta

SEQ ID NO: 2575095 - DNA, 25 bp, Homo sapien
tagctgttcacaattgctcagttac

SEQ ID NO: 2575096 - DNA, 25 bp, Homo sapien
gcatggtgggccttggtcttcttcc

SEQ ID NO: 2575097 - DNA, 25 bp, Homo sapien
tggggcatggtgggccttggtcttc

SEQ ID NO: 2575098 - DNA, 25 bp, Homo sapien
ctggggcatggtgggccttggtctt

SEQ ID NO: 2575099 - DNA, 25 bp, Homo sapien
gggcatggtgggccttggtcttctt

SEQ ID NO: 2575100 - DNA, 25 bp, Homo sapien
cctcagcatgagaacaggacaatgt

SEQ ID NO: 2575101 - DNA, 25 bp, Homo sapien
gctcctcagcatgagaacaggacaa

SEQ ID NO: 2575102 - DNA, 25 bp, Homo sapien
tcctcagcatgagaacaggacaatg

SEQ ID NO: 2575103 - DNA, 25 bp, Homo sapien
tcagcatgagaacaggacaatgtga

SEQ ID NO: 2575104 - DNA, 25 bp, Homo sapien
ataacatctatccagtgagtcctgc

SEQ ID NO: 2575105 - DNA, 25 bp, Homo sapien
aataacatctatccagtgagtcctg

SEQ ID NO: 2575106 - DNA, 25 bp, Homo sapien
taacatctatccagtgagtcctgca

SEQ ID NO: 2575107 - DNA, 25 bp, Homo sapien
tcaatttctgcaataagttcagaca

SEQ ID NO: 2575108 - DNA, 25 bp, Homo sapien
tttcaatttctgcaataagttcaga

SEQ ID NO: 2575109 - DNA, 25 bp, Homo sapien
acttttcaatttctgcaataagttc

SEQ ID NO: 2575110 - DNA, 25 bp, Homo sapien
caatttctgcaataagttcagacat

SEQ ID NO: 2575111 - DNA, 25 bp, Homo sapien
tcaacgaaggttgaattactcctcc

SEQ ID NO: 2575112 - DNA, 25 bp, Homo sapien
cttcatcagtgtgtcacccggccaa

SEQ ID NO: 2575113 - DNA, 25 bp, Homo sapien
cccgagggcactaactcagagtgtc

SEQ ID NO: 2575114 - DNA, 25 bp, Homo sapien
taggttgaccatacctcaaaggctg

SEQ ID NO: 2575115 - DNA, 25 bp, Homo sapien
cacagggaggacctataggcacatg

SEQ ID NO: 2575116 - DNA, 25 bp, Homo sapien
tctatgaaggtgataaggatccact

SEQ ID NO: 2575117 - DNA, 25 bp, Homo sapien
caagtggccattactgagctgagag

SEQ ID NO: 2575118 - DNA, 25 bp, Homo sapien
cacatgtaggttgaatgaaactcta

SEQ ID NO: 2575119 - DNA, 25 bp, Homo sapien
cctgttccaagtggcccttactgac

SEQ ID NO: 2575120 - DNA, 25 bp, Homo sapien
cctggttttccagataggggtgata

SEQ ID NO: 2575121 - DNA, 25 bp, Homo sapien
cttactgacccgagagatgtcattg

SEQ ID NO: 2575122 - DNA, 25 bp, Homo sapien
cagataggggtgatattcctgttcc

SEQ ID NO: 2575123 - DNA, 25 bp, Homo sapien
ctactgtaggtggaccagacttcaa

SEQ ID NO: 2575124 - DNA, 25 bp, Homo sapien
actgtaggtggaccagacttcaaaa

SEQ ID NO: 2575125 - DNA, 25 bp, Homo sapien
ctgtaggtggaccagacttcaaaaa

SEQ ID NO: 2575126 - DNA, 25 bp, Homo sapien
tactgtaggtggaccagacttcaaa

SEQ ID NO: 2575127 - DNA, 25 bp, Homo sapien
tgaatcaccgtatatcaaatggtag

SEQ ID NO: 2575128 - DNA, 25 bp, Homo sapien
gtgtgaatcaccgtatatcaaatgg

SEQ ID NO: 2575129 - DNA, 25 bp, Homo sapien
aatgttgtatattaagaagtgtgaa

SEQ ID NO: 2575130 - DNA, 25 bp, Homo sapien
gaatcaccgtatatcaaatggtaga

SEQ ID NO: 2575131 - DNA, 25 bp, Homo sapien
tctcagagccttacgaaaagtgaag

SEQ ID NO: 2575132 - DNA, 25 bp, Homo sapien
gagtgttgtcatccaaggaccaaga

SEQ ID NO: 2575133 - DNA, 25 bp, Homo sapien
catggtccctgttgcttatagctgc

SEQ ID NO: 2575134 - DNA, 25 bp, Homo sapien
gagctgatgggaactctgcactcca

SEQ ID NO: 2575135 - DNA, 25 bp, Homo sapien
ccttgtttctcaggatgtagatgag

SEQ ID NO: 2575136 - DNA, 25 bp, Homo sapien
ttgtttctcaggatgtagatgaggg

SEQ ID NO: 2575137 - DNA, 25 bp, Homo sapien
atccttgtttctcaggatgtagatg

SEQ ID NO: 2575138 - DNA, 25 bp, Homo sapien
ggatgtagatgagggggtttagcat

SEQ ID NO: 2575139 - DNA, 25 bp, Homo sapien
aaggacgaatctcacagttaacatt

SEQ ID NO: 2575140 - DNA, 25 bp, Homo sapien
ctaaaggacgaatctcacagttaac

SEQ ID NO: 2575141 - DNA, 25 bp, Homo sapien
ggacgaatctcacagttaacatttt

SEQ ID NO: 2575142 - DNA, 25 bp, Homo sapien
acgaatctcacagttaacattttct

SEQ ID NO: 2575143 - DNA, 25 bp, Homo sapien
gtctgagcaggacaggatcgttaca

SEQ ID NO: 2575144 - DNA, 25 bp, Homo sapien
cctgctagtgtcagatagaggaaca

SEQ ID NO: 2575145 - DNA, 25 bp, Homo sapien
caggacaggatcgttacagcaggga

SEQ ID NO: 2575146 - DNA, 25 bp, Homo sapien
gatgaccacactaagtagagctgga

SEQ ID NO: 2575147 - DNA, 25 bp, Homo sapien
catgaggatgaaatccaaccttcca

SEQ ID NO: 2575148 - DNA, 25 bp, Homo sapien
tgaggatgaaatccaaccttccagt

SEQ ID NO: 2575149 - DNA, 25 bp, Homo sapien
tcccatgaggatgaaatccaacctt

SEQ ID NO: 2575150 - DNA, 25 bp, Homo sapien
gaggatgaaatccaaccttccagtg

SEQ ID NO: 2575151 - DNA, 25 bp, Homo sapien
tgggtgggaaagcaggtcatggcag

SEQ ID NO: 2575152 - DNA, 25 bp, Homo sapien
tctcccactctgagtgagtctccag

SEQ ID NO: 2575153 - DNA, 25 bp, Homo sapien
gccaggtcatgggccggcctgccct

SEQ ID NO: 2575154 - DNA, 25 bp, Homo sapien
ggtgggaaagcaggtcatggcaggg

SEQ ID NO: 2575155 - DNA, 25 bp, Homo sapien
tctagggtctgccttagtccacctc

SEQ ID NO: 2575156 - DNA, 25 bp, Homo sapien
ctaattcaggttcgtttcactcttt

SEQ ID NO: 2575157 - DNA, 25 bp, Homo sapien
gttcttttgccttgcgtggccgtct

SEQ ID NO: 2575158 - DNA, 25 bp, Homo sapien
tttgccttgcgtggccgtctgtgct

SEQ ID NO: 2575159 - DNA, 25 bp, Homo sapien
ttcttttgccttgcgtggccgtctg

SEQ ID NO: 2575160 - DNA, 25 bp, Homo sapien
cttttgccttgcgtggccgtctgtg

SEQ ID NO: 2575161 - DNA, 25 bp, Homo sapien
gagacattatgtgatacagatggac

SEQ ID NO: 2575162 - DNA, 25 bp, Homo sapien
ttcgcctttggtccaggcgtaccat

SEQ ID NO: 2575163 - DNA, 25 bp, Homo sapien
cccttttgcgcctacttcctgattt

SEQ ID NO: 2575164 - DNA, 25 bp, Homo sapien
tatttgtctcaggtttcgcctttgg

SEQ ID NO: 2575165 - DNA, 25 bp, Homo sapien
aacgggaaagggctgaccagcacca

SEQ ID NO: 2575166 - DNA, 25 bp, Homo sapien
gaacaagagaaagatagtgctatca

SEQ ID NO: 2575167 - DNA, 25 bp, Homo sapien
tgagcatccatatgtaaatcacaga

SEQ ID NO: 2575168 - DNA, 25 bp, Homo sapien
gaagagtcctacagcctattacaag

SEQ ID NO: 2575169 - DNA, 25 bp, Homo sapien
tcctacagccatcgccagttgtcgg

SEQ ID NO: 2575170 - DNA, 25 bp, Homo sapien
gcttcctacagccatcgccagttgt

SEQ ID NO: 2575171 - DNA, 25 bp, Homo sapien
ttgtcgggcacattgtccttccggg

SEQ ID NO: 2575172 - DNA, 25 bp, Homo sapien
ccagttgtcgggcacattgtccttc

SEQ ID NO: 2575173 - DNA, 25 bp, Homo sapien
aaggacgaatctcacagttaacatt

SEQ ID NO: 2575174 - DNA, 25 bp, Homo sapien
acgaatctcacagttaacattttct

SEQ ID NO: 2575175 - DNA, 25 bp, Homo sapien
ggacgaatctcacagttaacatttt

SEQ ID NO: 2575176 - DNA, 25 bp, Homo sapien
ctaaaggacgaatctcacagttaac

SEQ ID NO: 2575177 - DNA, 25 bp, Homo sapien
gtctgagcaggacaggatcgttaca

SEQ ID NO: 2575178 - DNA, 25 bp, Homo sapien
gatgaccacactaagtagagctgga

SEQ ID NO: 2575179 - DNA, 25 bp, Homo sapien
caggacaggatcgttacagcaggga

SEQ ID NO: 2575180 - DNA, 25 bp, Homo sapien
cctgctagtgtcagatagaggaaca

SEQ ID NO: 2575181 - DNA, 25 bp, Homo sapien
gaggatgaaatccaaccttccagtg

SEQ ID NO: 2575182 - DNA, 25 bp, Homo sapien
catgaggatgaaatccaaccttcca

SEQ ID NO: 2575183 - DNA, 25 bp, Homo sapien
tgaggatgaaatccaaccttccagt

SEQ ID NO: 2575184 - DNA, 25 bp, Homo sapien
tcccatgaggatgaaatccaacctt

SEQ ID NO: 2575185 - DNA, 25 bp, Homo sapien
attcttgactgcatcatgctcctca

SEQ ID NO: 2575186 - DNA, 25 bp, Homo sapien
cattcttgactgcatcatgctcctc

SEQ ID NO: 2575187 - DNA, 25 bp, Homo sapien
tgtagaaggaagcaccgaagagcag

SEQ ID NO: 2575188 - DNA, 25 bp, Homo sapien
cacaggagtgaagatggtgtaaaag

SEQ ID NO: 2575189 - DNA, 25 bp, Homo sapien
ctttgttgcggagactgtaaatgag

SEQ ID NO: 2575190 - DNA, 25 bp, Homo sapien
aaaaggcagacaccatcatgtcctg

SEQ ID NO: 2575191 - DNA, 25 bp, Homo sapien
gtgtatgagctggagatgaccatga

SEQ ID NO: 2575192 - DNA, 25 bp, Homo sapien
atgggggtgagaagcatgaggatgc

SEQ ID NO: 2575193 - DNA, 25 bp, Homo sapien
tgtggatgagatgcaggatgagggt

SEQ ID NO: 2575194 - DNA, 25 bp, Homo sapien
gtgagaagcatgaggatgcagcaca

SEQ ID NO: 2575195 - DNA, 25 bp, Homo sapien
ggcacagtcacgcataggtacatga

SEQ ID NO: 2575196 - DNA, 25 bp, Homo sapien
taatggagaggtctgcaaacagcag

SEQ ID NO: 2575197 - DNA, 25 bp, Homo sapien
tgagatccatgagcgcgagctggct

SEQ ID NO: 2575198 - DNA, 25 bp, Homo sapien
cgcgagctggctgatgaagaagtac

SEQ ID NO: 2575199 - DNA, 25 bp, Homo sapien
gagggcagcatgcttgctctcagca

SEQ ID NO: 2575200 - DNA, 25 bp, Homo sapien
ctctcagcaaagagtcccgtgaggg

SEQ ID NO: 2575201 - DNA, 25 bp, Homo sapien
gagggtgaaatcagtgcttgctgtt

SEQ ID NO: 2575202 - DNA, 25 bp, Homo sapien
aaagaaggaaggtcacggtgtagag

SEQ ID NO: 2575203 - DNA, 25 bp, Homo sapien
taatacatcctcaaggaaagtggca

SEQ ID NO: 2575204 - DNA, 25 bp, Homo sapien
gttgctaacacacgccaaatccatg

SEQ ID NO: 2575205 - DNA, 25 bp, Homo sapien
tctggccatggatgttaacgaacct

SEQ ID NO: 2575206 - DNA, 25 bp, Homo sapien
tgtaacacccgcatggaaaactcca

SEQ ID NO: 2575207 - DNA, 25 bp, Homo sapien
acttgttgctactttctgagcagat

SEQ ID NO: 2575208 - DNA, 25 bp, Homo sapien
tgagcagatgagcaacatgcaaata

SEQ ID NO: 2575209 - DNA, 25 bp, Homo sapien
ctgagcagatgagcaacatgcaaat

SEQ ID NO: 2575210 - DNA, 25 bp, Homo sapien
gagtttcatacaaggacgtgtctgc

SEQ ID NO: 2575211 - DNA, 25 bp, Homo sapien
ctttttgcgaccttcagcagagggc

SEQ ID NO: 2575212 - DNA, 25 bp, Homo sapien
cgtgacaatggtatagaaggctgac

SEQ ID NO: 2575213 - DNA, 25 bp, Homo sapien
ttcgggagccacagtaagggacatt

SEQ ID NO: 2575214 - DNA, 25 bp, Homo sapien
tgagcagaaagccatcgagggagcc

SEQ ID NO: 2575215 - DNA, 25 bp, Homo sapien
gggagtgagcagaaagccatcgagg

SEQ ID NO: 2575216 - DNA, 25 bp, Homo sapien
agcagaaagccatcgagggagcccc

SEQ ID NO: 2575217 - DNA, 25 bp, Homo sapien
gagtgagcagaaagccatcgaggga

SEQ ID NO: 2575218 - DNA, 25 bp, Homo sapien
aggaagaactcagaaccaatcatgg

SEQ ID NO: 2575219 - DNA, 25 bp, Homo sapien
caaaagacacttcttgcggttcatc

SEQ ID NO: 2575220 - DNA, 25 bp, Homo sapien
gaagaactcagaaccaatcatggtc

SEQ ID NO: 2575221 - DNA, 25 bp, Homo sapien
ttcatcaggactgggtatctcagag

SEQ ID NO: 2575222 - DNA, 25 bp, Homo sapien
attgatatggcccacgagcgtccca

SEQ ID NO: 2575223 - DNA, 25 bp, Homo sapien
ccatgatggacagctgactgagcag

SEQ ID NO: 2575224 - DNA, 25 bp, Homo sapien
caagagaacacggtcaagatgggaa

SEQ ID NO: 2575225 - DNA, 25 bp, Homo sapien
ggcgagagtccacctgaatcaagaa

SEQ ID NO: 2575226 - DNA, 25 bp, Homo sapien
tgagggtaccgtcaggatgaagctt

SEQ ID NO: 2575227 - DNA, 25 bp, Homo sapien
gagggtaccgtcaggatgaagcttc

SEQ ID NO: 2575228 - DNA, 25 bp, Homo sapien
ctgagggtaccgtcaggatgaagct

SEQ ID NO: 2575229 - DNA, 25 bp, Homo sapien
agggtaccgtcaggatgaagcttcc

SEQ ID NO: 2575230 - DNA, 25 bp, Homo sapien
tcaggcttagaaagctacggagcag

SEQ ID NO: 2575231 - DNA, 25 bp, Homo sapien
cttagaaagctacggagcagataca

SEQ ID NO: 2575232 - DNA, 25 bp, Homo sapien
gccaaactcaggcttagaaagctac

SEQ ID NO: 2575233 - DNA, 25 bp, Homo sapien
caaactcaggcttagaaagctacgg

SEQ ID NO: 2575234 - DNA, 25 bp, Homo sapien
ccttcctgatcacagtcgccaccct

SEQ ID NO: 2575235 - DNA, 25 bp, Homo sapien
cttcctgatcacagtcgccaccctg

SEQ ID NO: 2575236 - DNA, 25 bp, Homo sapien
ccataatgtgggaggaacacgtagc

SEQ ID NO: 2575237 - DNA, 25 bp, Homo sapien
ggagccgaccaccatgaataagcaa

SEQ ID NO: 2575238 - DNA, 25 bp, Homo sapien
gtaccgtagagggttgcacacagcc

SEQ ID NO: 2575239 - DNA, 25 bp, Homo sapien
gagtcagcatgaacccatccaagga

SEQ ID NO: 2575240 - DNA, 25 bp, Homo sapien
acgaagttagtggagttctggagaa

SEQ ID NO: 2575241 - DNA, 25 bp, Homo sapien
gatgagcagaatcatgaccaagttg

SEQ ID NO: 2575242 - DNA, 25 bp, Homo sapien
gatgaggcctgtgaggacgaagtta

SEQ ID NO: 2575243 - DNA, 25 bp, Homo sapien
ggctgttatagccaccacaaagatg

SEQ ID NO: 2575244 - DNA, 25 bp, Homo sapien
cagaaatctggcagcttatttaacg

SEQ ID NO: 2575245 - DNA, 25 bp, Homo sapien
gaaatctggcagcttatttaacgac

SEQ ID NO: 2575246 - DNA, 25 bp, Homo sapien
agaaatctggcagcttatttaacga

SEQ ID NO: 2575247 - DNA, 25 bp, Homo sapien
ccagtgtcctttctgtggcaataaa

SEQ ID NO: 2575248 - DNA, 25 bp, Homo sapien
actagagctatgagaagtatctgcc

SEQ ID NO: 2575249 - DNA, 25 bp, Homo sapien
gacacaacgtacctgtaaagcttga

SEQ ID NO: 2575250 - DNA, 25 bp, Homo sapien
gaagtcacaggttcttctaccaggg

SEQ ID NO: 2575251 - DNA, 25 bp, Homo sapien
taaataaagttctccaactattgga

SEQ ID NO: 2575252 - DNA, 25 bp, Homo sapien
agttctccaactattggattgattg

SEQ ID NO: 2575253 - DNA, 25 bp, Homo sapien
catccataaataaagttctccaact

SEQ ID NO: 2575254 - DNA, 25 bp, Homo sapien
aaagttctccaactattggattgat

SEQ ID NO: 2575255 - DNA, 25 bp, Homo sapien
acaaccttctgtagggcccctgtga

SEQ ID NO: 2575256 - DNA, 25 bp, Homo sapien
cccacaaccttctgtagggcccctg

SEQ ID NO: 2575257 - DNA, 25 bp, Homo sapien
cacaaccttctgtagggcccctgtg

SEQ ID NO: 2575258 - DNA, 25 bp, Homo sapien
caaccttctgtagggcccctgtgac

SEQ ID NO: 2575259 - DNA, 25 bp, Homo sapien
gatgaggagcatcataatacagcag

SEQ ID NO: 2575260 - DNA, 25 bp, Homo sapien
gaggcagcacgtatgtgtacatggc

SEQ ID NO: 2575261 - DNA, 25 bp, Homo sapien
ttgatctcccgagaggcacagaagg

SEQ ID NO: 2575262 - DNA, 25 bp, Homo sapien
catacatggctgtctcgtaggctga

SEQ ID NO: 2575263 - DNA, 25 bp, Homo sapien
gaagtgttgggcagtgcatccagca

SEQ ID NO: 2575264 - DNA, 25 bp, Homo sapien
tgagcaagaaaccatcgatagaccc

SEQ ID NO: 2575265 - DNA, 25 bp, Homo sapien
agtcctaggaggaagaactcagccc

SEQ ID NO: 2575266 - DNA, 25 bp, Homo sapien
caatcaaccagcagatcttgcggct

SEQ ID NO: 2575267 - DNA, 25 bp, Homo sapien
ggaaatatacaggatgtccctgagg

SEQ ID NO: 2575268 - DNA, 25 bp, Homo sapien
cacaatggtggaaatatacaggatg

SEQ ID NO: 2575269 - DNA, 25 bp, Homo sapien
tggtggaaatatacaggatgtccct

SEQ ID NO: 2575270 - DNA, 25 bp, Homo sapien
aaatatacaggatgtccctgaggga

SEQ ID NO: 2575271 - DNA, 25 bp, Homo sapien
acccagaaggataaagtcggcatac

SEQ ID NO: 2575272 - DNA, 25 bp, Homo sapien
catacacggaataattgctctgctc

SEQ ID NO: 2575273 - DNA, 25 bp, Homo sapien
gaatgatcttgaccacgttgctggc

SEQ ID NO: 2575274 - DNA, 25 bp, Homo sapien
ctatgtggatgagaatgatcttgac

SEQ ID NO: 2575275 - DNA, 25 bp, Homo sapien
tacacaaaagagatatgacaaagtt

SEQ ID NO: 2575276 - DNA, 25 bp, Homo sapien
ctgtagggtacacaaaagagatatg

SEQ ID NO: 2575277 - DNA, 25 bp, Homo sapien
gggtacacaaaagagatatgacaaa

SEQ ID NO: 2575278 - DNA, 25 bp, Homo sapien
tagggtacacaaaagagatatgaca

SEQ ID NO: 2575279 - DNA, 25 bp, Homo sapien
ttaggttctgcagggagtctgcgct

SEQ ID NO: 2575280 - DNA, 25 bp, Homo sapien
accttaggttctgcagggagtctgc

SEQ ID NO: 2575281 - DNA, 25 bp, Homo sapien
tggtccaccttaggttctgcaggga

SEQ ID NO: 2575282 - DNA, 25 bp, Homo sapien
ccaccttaggttctgcagggagtct

SEQ ID NO: 2575283 - DNA, 25 bp, Homo sapien
atgaccctcgctttttcctggccat

SEQ ID NO: 2575284 - DNA, 25 bp, Homo sapien
catgaccctcgctttttcctggcca

SEQ ID NO: 2575285 - DNA, 25 bp, Homo sapien
cagtgcacatgaccctcgctttttc

SEQ ID NO: 2575286 - DNA, 25 bp, Homo sapien
atccagtgcacatgaccctcgcttt

SEQ ID NO: 2575287 - DNA, 25 bp, Homo sapien
tagaagcagtctcgcatagtgctcc

SEQ ID NO: 2575288 - DNA, 25 bp, Homo sapien
gaagcagtctcgcatagtgctcccc

SEQ ID NO: 2575289 - DNA, 25 bp, Homo sapien
cccagacacagaatacatacctatg

SEQ ID NO: 2575290 - DNA, 25 bp, Homo sapien
tatatacctatgacattgctgagta

SEQ ID NO: 2575291 - DNA, 25 bp, Homo sapien
tgctgagtaaaagcagtctcccgta

SEQ ID NO: 2575292 - DNA, 25 bp, Homo sapien
ccagacacagaatacatacctatga

SEQ ID NO: 2575293 - DNA, 25 bp, Homo sapien
tatatacctatgacattgctgagta

SEQ ID NO: 2575294 - DNA, 25 bp, Homo sapien
cccaaacacagaatacatacctatg

SEQ ID NO: 2575295 - DNA, 25 bp, Homo sapien
cagatcttctatagtaaagaccagg

SEQ ID NO: 2575296 - DNA, 25 bp, Homo sapien
gggttttgttgcagatcttctatag

SEQ ID NO: 2575297 - DNA, 25 bp, Homo sapien
gcatttctatctacatatagtagtg

SEQ ID NO: 2575298 - DNA, 25 bp, Homo sapien
tctatctacatatagtagtgcaaat

SEQ ID NO: 2575299 - DNA, 25 bp, Homo sapien
gaaacatgttgccagtgtggacggc

SEQ ID NO: 2575300 - DNA, 25 bp, Homo sapien
tcctgaagggattctgagcaccgtt

SEQ ID NO: 2575301 - DNA, 25 bp, Homo sapien
cagggccagggtcaaaaactctaca

SEQ ID NO: 2575302 - DNA, 25 bp, Homo sapien
aaccagggccaacacatgagggatg

SEQ ID NO: 2575303 - DNA, 25 bp, Homo sapien
gataaatcagcagaaacagcccggc

SEQ ID NO: 2575304 - DNA, 25 bp, Homo sapien
taagacatgacagtaaggaaggcca

SEQ ID NO: 2575305 - DNA, 25 bp, Homo sapien
gatccaaaacggagaggttcttcag

SEQ ID NO: 2575306 - DNA, 25 bp, Homo sapien
taagagatggagcttctgcgagtca

SEQ ID NO: 2575307 - DNA, 25 bp, Homo sapien
gctcccagataccagaaaactccat

SEQ ID NO: 2575308 - DNA, 25 bp, Homo sapien
gcagctcccagataccagaaaactc

SEQ ID NO: 2575309 - DNA, 25 bp, Homo sapien
agctcccagataccagaaaactcca

SEQ ID NO: 2575310 - DNA, 25 bp, Homo sapien
ctgcagctcccagataccagaaaac

SEQ ID NO: 2575311 - DNA, 25 bp, Homo sapien
tttgtgagattgtccatttggcagg

SEQ ID NO: 2575312 - DNA, 25 bp, Homo sapien
tgtgagattgtccatttggcaggga

SEQ ID NO: 2575313 - DNA, 25 bp, Homo sapien
ttgtgagattgtccatttggcaggg

SEQ ID NO: 2575314 - DNA, 25 bp, Homo sapien
acacagtgtggtaggagtaatatcc

SEQ ID NO: 2575315 - DNA, 25 bp, Homo sapien
acagtgtggtaggagtaatatcctc

SEQ ID NO: 2575316 - DNA, 25 bp, Homo sapien
cacagtgtggtaggagtaatatcct

SEQ ID NO: 2575317 - DNA, 25 bp, Homo sapien
cgctgtgaggggcgctcgcccagca

SEQ ID NO: 2575318 - DNA, 25 bp, Homo sapien
gctgtgaggggcgctcgcccagcag

SEQ ID NO: 2575319 - DNA, 25 bp, Homo sapien
gcgctgtgaggggcgctcgcccagc

SEQ ID NO: 2575320 - DNA, 25 bp, Homo sapien
cttcacaggtgagcggatggcttgg

SEQ ID NO: 2575321 - DNA, 25 bp, Homo sapien
tctgcattcccgcattcccaggttc

SEQ ID NO: 2575322 - DNA, 25 bp, Homo sapien
tgcattcgtgaattccctcctgcat

SEQ ID NO: 2575323 - DNA, 25 bp, Homo sapien
tggcctgcagccttactttcatgcc

SEQ ID NO: 2575324 - DNA, 25 bp, Homo sapien
cagaaatggggccagaatcagaccc

SEQ ID NO: 2575325 - DNA, 25 bp, Homo sapien
tcagccatcagaaatggggccagaa

SEQ ID NO: 2575326 - DNA, 25 bp, Homo sapien
gccatcagaaatggggccagaatca

SEQ ID NO: 2575327 - DNA, 25 bp, Homo sapien
aatggggccagaatcagacccccat

SEQ ID NO: 2575328 - DNA, 25 bp, Homo sapien
gctgcccttctgtcggtccaacgtt

SEQ ID NO: 2575329 - DNA, 25 bp, Homo sapien
tcagtggtcttgtctatgcaggcat

SEQ ID NO: 2575330 - DNA, 25 bp, Homo sapien
tcacatcttttcgaccgtgctcggg

SEQ ID NO: 2575331 - DNA, 25 bp, Homo sapien
ggagcagacagaacaaaggcctttt

SEQ ID NO: 2575332 - DNA, 25 bp, Homo sapien
ggcgagggtgttgacagtttcccca

SEQ ID NO: 2575333 - DNA, 25 bp, Homo sapien
gaggcgagggtgttgacagtttccc

SEQ ID NO: 2575334 - DNA, 25 bp, Homo sapien
agaggcgagggtgttgacagtttcc

SEQ ID NO: 2575335 - DNA, 25 bp, Homo sapien
tgccgccacagatcatcaccagaag

SEQ ID NO: 2575336 - DNA, 25 bp, Homo sapien
ctgccgccacagatcatcaccagaa

SEQ ID NO: 2575337 - DNA, 25 bp, Homo sapien
tgctgccgccacagatcatcaccag

SEQ ID NO: 2575338 - DNA, 25 bp, Homo sapien
aggaaataagacacagtttccttct

SEQ ID NO: 2575339 - DNA, 25 bp, Homo sapien
tctgaggagtctggtgtgtaggagg

SEQ ID NO: 2575340 - DNA, 25 bp, Homo sapien
ctctggtttctgaggagtctggtgt

SEQ ID NO: 2575341 - DNA, 25 bp, Homo sapien
gactctggtttctgaggagtctggt

SEQ ID NO: 2575342 - DNA, 25 bp, Homo sapien
ttctgaggagtctggtgtgtaggag

SEQ ID NO: 2575343 - DNA, 25 bp, Homo sapien
ttaaagggcacattgcctgctccat

SEQ ID NO: 2575344 - DNA, 25 bp, Homo sapien
taacttttgggcaatgattttatca

SEQ ID NO: 2575345 - DNA, 25 bp, Homo sapien
gttcttttcacctggagtgacctga

SEQ ID NO: 2575346 - DNA, 25 bp, Homo sapien
tcataacttttgggcaatgatttta

SEQ ID NO: 2575347 - DNA, 25 bp, Homo sapien
ggattattagaaggagttttctcca

SEQ ID NO: 2575348 - DNA, 25 bp, Homo sapien
cagttttcagtacccatcagaacca

SEQ ID NO: 2575349 - DNA, 25 bp, Homo sapien
ggatgtttatgatgtcacatactag

SEQ ID NO: 2575350 - DNA, 25 bp, Homo sapien
tcagaaccagtttagttgatattcc

SEQ ID NO: 2575351 - DNA, 25 bp, Homo sapien
gaaaggatcacaaaccagtccaagg

SEQ ID NO: 2575352 - DNA, 25 bp, Homo sapien
aagagaaaagcggtcctggtccagg

SEQ ID NO: 2575353 - DNA, 25 bp, Homo sapien
caagatggcatcagttaacatggct

SEQ ID NO: 2575354 - DNA, 25 bp, Homo sapien
acttggtagtcagcgttgtgggcac

SEQ ID NO: 2575355 - DNA, 25 bp, Homo sapien
aagtagccctacaaaccattcatgg

SEQ ID NO: 2575356 - DNA, 25 bp, Homo sapien
caagcagctcttggaagtgcccatg

SEQ ID NO: 2575357 - DNA, 25 bp, Homo sapien
catgttaacatgtgaccatgagtcc

SEQ ID NO: 2575358 - DNA, 25 bp, Homo sapien
cagagggcattctcagtcaagtagc

SEQ ID NO: 2575359 - DNA, 25 bp, Homo sapien
gtcctgcctgtctgtattgctaacg

SEQ ID NO: 2575360 - DNA, 25 bp, Homo sapien
tgctaacgtgtgatcatgggtcctg

SEQ ID NO: 2575361 - DNA, 25 bp, Homo sapien
tcctgcctgtctgtattgctaacgt

SEQ ID NO: 2575362 - DNA, 25 bp, Homo sapien
gctaacgtgtgatcatgggtcctgc

SEQ ID NO: 2575363 - DNA, 25 bp, Homo sapien
aatggaaattggaaggagcatttgc

SEQ ID NO: 2575364 - DNA, 25 bp, Homo sapien
gctgaccaacttttgaatggaaatt

SEQ ID NO: 2575365 - DNA, 25 bp, Homo sapien
tgctgaccaacttttgaatggaaat

SEQ ID NO: 2575366 - DNA, 25 bp, Homo sapien
attgctgaccaacttttgaatggaa

SEQ ID NO: 2575367 - DNA, 25 bp, Homo sapien
tcaatatgctaacccctaggtggct

SEQ ID NO: 2575368 - DNA, 25 bp, Homo sapien
ggacagagcggttacatagttgaca

SEQ ID NO: 2575369 - DNA, 25 bp, Homo sapien
tcctggagggattaagtgaagaaac

SEQ ID NO: 2575370 - DNA, 25 bp, Homo sapien
cctccattgttgctgacgtagataa

SEQ ID NO: 2575371 - DNA, 25 bp, Homo sapien
tgactacaaatcttctcagcacaag

SEQ ID NO: 2575372 - DNA, 25 bp, Homo sapien
tccattacagtactagagtgttcca

SEQ ID NO: 2575373 - DNA, 25 bp, Homo sapien
gttaacgagatttacacacctccat

SEQ ID NO: 2575374 - DNA, 25 bp, Homo sapien
caaagtactctgttgaccttttcac

SEQ ID NO: 2575375 - DNA, 25 bp, Homo sapien
gtgtgaatcaccgtatatcaaatgg

SEQ ID NO: 2575376 - DNA, 25 bp, Homo sapien
aatgttgtatattaagaagtgtgaa

SEQ ID NO: 2575377 - DNA, 25 bp, Homo sapien
gaatcaccgtatatcaaatggtaga

SEQ ID NO: 2575378 - DNA, 25 bp, Homo sapien
tgaatcaccgtatatcaaatggtag

SEQ ID NO: 2575379 - DNA, 25 bp, Homo sapien
tctcagagccttacgaaaagtgaag

SEQ ID NO: 2575380 - DNA, 25 bp, Homo sapien
gagtgttgtcatccaaggaccaaga

SEQ ID NO: 2575381 - DNA, 25 bp, Homo sapien
catggtccctgttgcttatagctgc

SEQ ID NO: 2575382 - DNA, 25 bp, Homo sapien
gagctgatgggaactctgcactcca

SEQ ID NO: 2575383 - DNA, 25 bp, Homo sapien
caggagagatacctactgacttctt

SEQ ID NO: 2575384 - DNA, 25 bp, Homo sapien
tttcataacagaggtaaaaattgta

SEQ ID NO: 2575385 - DNA, 25 bp, Homo sapien
gagagatacctactgacttctttag

SEQ ID NO: 2575386 - DNA, 25 bp, Homo sapien
ggagagatacctactgacttcttta

SEQ ID NO: 2575387 - DNA, 25 bp, Homo sapien
cctcagatgagtgtgtgatgttgga

SEQ ID NO: 2575388 - DNA, 25 bp, Homo sapien
tctgtgacatctgagttcaaacaag

SEQ ID NO: 2575389 - DNA, 25 bp, Homo sapien
ttcaaacaaggagctgagaggagac

SEQ ID NO: 2575390 - DNA, 25 bp, Homo sapien
tagtgacgaaaagttaccctcagat

SEQ ID NO: 2575391 - DNA, 25 bp, Homo sapien
tccttacagtcctccatatgaaatc

SEQ ID NO: 2575392 - DNA, 25 bp, Homo sapien
cttccttacagtcctccatatgaaa

SEQ ID NO: 2575393 - DNA, 25 bp, Homo sapien
cctccatatgaaatccccctaaagt

SEQ ID NO: 2575394 - DNA, 25 bp, Homo sapien
ttacagtcctccatatgaaatcccc

SEQ ID NO: 2575395 - DNA, 25 bp, Homo sapien
caactctgtccaggtattgctaatc

SEQ ID NO: 2575396 - DNA, 25 bp, Homo sapien
ctctgtccaggtattgctaatctcc

SEQ ID NO: 2575397 - DNA, 25 bp, Homo sapien
actctgtccaggtattgctaatctc

SEQ ID NO: 2575398 - DNA, 25 bp, Homo sapien
tctgtccaggtattgctaatctcca

SEQ ID NO: 2575399 - DNA, 25 bp, Homo sapien
tcactttgtctcacattaacatagc

SEQ ID NO: 2575400 - DNA, 25 bp, Homo sapien
gattatttaacctcctgacattaag

SEQ ID NO: 2575401 - DNA, 25 bp, Homo sapien
ggttaccaactgcacgaagtatctg

SEQ ID NO: 2575402 - DNA, 25 bp, Homo sapien
tatataaatccctcgaaacaaggaa

SEQ ID NO: 2575403 - DNA, 25 bp, Homo sapien
cacatgattggcttgccatgtccaa

SEQ ID NO: 2575404 - DNA, 25 bp, Homo sapien
gcattctggtagtttgatgacaacc

SEQ ID NO: 2575405 - DNA, 25 bp, Homo sapien
gatggcactcagagccataagaggt

SEQ ID NO: 2575406 - DNA, 25 bp, Homo sapien
ttttgcctgctaccatgacttgtaa

SEQ ID NO: 2575407 - DNA, 25 bp, Homo sapien
tgtttccaggaagccccgtgtgttg

SEQ ID NO: 2575408 - DNA, 25 bp, Homo sapien
tgtgtgcatcagtctctcgagaacc

SEQ ID NO: 2575409 - DNA, 25 bp, Homo sapien
aagaggtgcatatcaaagtgtcagg

SEQ ID NO: 2575410 - DNA, 25 bp, Homo sapien
gaatcaggaggcatacgttccagtg

SEQ ID NO: 2575411 - DNA, 25 bp, Homo sapien
cattacctggattagtgcatgccat

SEQ ID NO: 2575412 - DNA, 25 bp, Homo sapien
gaaaagaacacgttgatgtaaccac

SEQ ID NO: 2575413 - DNA, 25 bp, Homo sapien
catgatatccctagaaacttgtcaa

SEQ ID NO: 2575414 - DNA, 25 bp, Homo sapien
tgaagggagtggatacacaccatgt

SEQ ID NO: 2575415 - DNA, 25 bp, Homo sapien
gctgaattgaaataacaccgaggat

SEQ ID NO: 2575416 - DNA, 25 bp, Homo sapien
tatctacgtcagcaacaatggagga

SEQ ID NO: 2575417 - DNA, 25 bp, Homo sapien
cttctgaatgaaaagccacctaggg

SEQ ID NO: 2575418 - DNA, 25 bp, Homo sapien
gatcgagaaggtgctagctaaggca

SEQ ID NO: 2575419 - DNA, 25 bp, Homo sapien
gccacgtccccttgcgggtcgaaga

SEQ ID NO: 2575420 - DNA, 25 bp, Homo sapien
tggctccggtcccattgccactgga

SEQ ID NO: 2575421 - DNA, 25 bp, Homo sapien
atgttcttcagctgtcgctgcaggg

SEQ ID NO: 2575422 - DNA, 25 bp, Homo sapien
ttgatggtgtgccaggagatgtctt

SEQ ID NO: 2575423 - DNA, 25 bp, Homo sapien
caggtgcttttgtcacagccgagga

SEQ ID NO: 2575424 - DNA, 25 bp, Homo sapien
gacgtcatgttctggttgggctgca

SEQ ID NO: 2575425 - DNA, 25 bp, Homo sapien
gaagttctggcgcagcacctcattg

SEQ ID NO: 2575426 - DNA, 25 bp, Homo sapien
catagaccgcagagtacacgctgta

SEQ ID NO: 2575427 - DNA, 25 bp, Homo sapien
cagactcggagttgtcagggccaat

SEQ ID NO: 2575428 - DNA, 25 bp, Homo sapien
tagagcaccggctggacattgttgg

SEQ ID NO: 2575429 - DNA, 25 bp, Homo sapien
ccaccacacgggaaatgtagttact

SEQ ID NO: 2575430 - DNA, 25 bp, Homo sapien
ttgtcctcgtgtgccaggaagtaga

SEQ ID NO: 2575431 - DNA, 25 bp, Homo sapien
ggtagaagtccgagttctcagccgg

SEQ ID NO: 2575432 - DNA, 25 bp, Homo sapien
aagttaaggtgaacaatgcccttca

SEQ ID NO: 2575433 - DNA, 25 bp, Homo sapien
ccaggcaggtagaagtccgagttct

SEQ ID NO: 2575434 - DNA, 25 bp, Homo sapien
aggccacccaggaggtaatccccag

SEQ ID NO: 2575435 - DNA, 25 bp, Homo sapien
ctcagccaggacccataggaggaag

SEQ ID NO: 2575436 - DNA, 25 bp, Homo sapien
tcagccaggacccataggaggaaga

SEQ ID NO: 2575437 - DNA, 25 bp, Homo sapien
gggtgagccatggaaacagccagcc

SEQ ID NO: 2575438 - DNA, 25 bp, Homo sapien
ttatgcaaagtccacgggggaagga

SEQ ID NO: 2575439 - DNA, 25 bp, Homo sapien
ccaggagctgcccatttgccttggc

SEQ ID NO: 2575440 - DNA, 25 bp, Homo sapien
tgcccatttgccttggcatctgctt

SEQ ID NO: 2575441 - DNA, 25 bp, Homo sapien
aaatgggcatgtcggctggaaggga

SEQ ID NO: 2575442 - DNA, 25 bp, Homo sapien
ggaaatgggcatgtcggctggaagg

SEQ ID NO: 2575443 - DNA, 25 bp, Homo sapien
aaggaaatgggcatgtcggctggaa

SEQ ID NO: 2575444 - DNA, 25 bp, Homo sapien
gggcatgtcggctggaagggactgc

SEQ ID NO: 2575445 - DNA, 25 bp, Homo sapien
tcatcggcactcctcatccgacccc

SEQ ID NO: 2575446 - DNA, 25 bp, Homo sapien
catcggcactcctcatccgacccct

SEQ ID NO: 2575447 - DNA, 25 bp, Homo sapien
agggcaactgcctgggcacataggg

SEQ ID NO: 2575448 - DNA, 25 bp, Homo sapien
gcttcggggatgagggcaactgcct

SEQ ID NO: 2575449 - DNA, 25 bp, Homo sapien
tgcttcggggatgagggcaactgcc

SEQ ID NO: 2575450 - DNA, 25 bp, Homo sapien
agatgcttcggggatgagggcaact

SEQ ID NO: 2575451 - DNA, 25 bp, Homo sapien
cttgggtgcctgaggggcatgtggt

SEQ ID NO: 2575452 - DNA, 25 bp, Homo sapien
ttgggtgcctgaggggcatgtggta

SEQ ID NO: 2575453 - DNA, 25 bp, Homo sapien
tgggtgcctgaggggcatgtggtac

SEQ ID NO: 2575454 - DNA, 25 bp, Homo sapien
gctggctggttgtgttcagagccat

SEQ ID NO: 2575455 - DNA, 25 bp, Homo sapien
agccccccggacacaggacaaggct

SEQ ID NO: 2575456 - DNA, 25 bp, Homo sapien
cacaggacaaggctggctggttgtg

SEQ ID NO: 2575457 - DNA, 25 bp, Homo sapien
gctccgtcatccaggggggctggca

SEQ ID NO: 2575458 - DNA, 25 bp, Homo sapien
cctcctcccacccatgcacagaaca

SEQ ID NO: 2575459 - DNA, 25 bp, Homo sapien
ccacccatgcacagaacacccggaa

SEQ ID NO: 2575460 - DNA, 25 bp, Homo sapien
catgcacagaacacccggaaggatg

SEQ ID NO: 2575461 - DNA, 25 bp, Homo sapien
acccatgcacagaacacccggaagg

SEQ ID NO: 2575462 - DNA, 25 bp, Homo sapien
cattttattgggtggcatctgagca

SEQ ID NO: 2575463 - DNA, 25 bp, Homo sapien
attttattgggtggcatctgagcaa

SEQ ID NO: 2575464 - DNA, 25 bp, Homo sapien
gcattttattgggtggcatctgagc

SEQ ID NO: 2575465 - DNA, 25 bp, Homo sapien
aggcattttattgggtggcatctga

SEQ ID NO: 2575466 - DNA, 25 bp, Homo sapien
cctgaggatcaaagggaaggctgac

SEQ ID NO: 2575467 - DNA, 25 bp, Homo sapien
ggattctacaggcaacgtcctcggc

SEQ ID NO: 2575468 - DNA, 25 bp, Homo sapien
tgacataggacgaaggcccatccaa

SEQ ID NO: 2575469 - DNA, 25 bp, Homo sapien
tgtgccccacaggtcagtctgagtt

SEQ ID NO: 2575470 - DNA, 25 bp, Homo sapien
gtagtggccatgttcctccccagca

SEQ ID NO: 2575471 - DNA, 25 bp, Homo sapien
gataaggggtagtggccatgttcct

SEQ ID NO: 2575472 - DNA, 25 bp, Homo sapien
tcccacatggccgatgggataaggg

SEQ ID NO: 2575473 - DNA, 25 bp, Homo sapien
tccccagcacgatctcaaaccagag

SEQ ID NO: 2575474 - DNA, 25 bp, Homo sapien
tacagtggtaagaagggagtcaagc

SEQ ID NO: 2575475 - DNA, 25 bp, Homo sapien
aggtcggccacctggacggacagac

SEQ ID NO: 2575476 - DNA, 25 bp, Homo sapien
gagtcaagcccggattatagaaagg

SEQ ID NO: 2575477 - DNA, 25 bp, Homo sapien
agctggacggtggagcccgagaggg

SEQ ID NO: 2575478 - DNA, 25 bp, Homo sapien
tgcatgtacgcgtagctccagtccc

SEQ ID NO: 2575479 - DNA, 25 bp, Homo sapien
ctccttgatgacctgcggcgacgtc

SEQ ID NO: 2575480 - DNA, 25 bp, Homo sapien
cagcgcaggatgtagtgtgggcccc

SEQ ID NO: 2575481 - DNA, 25 bp, Homo sapien
cgacgtccagcgcaggatgtagtgt

SEQ ID NO: 2575482 - DNA, 25 bp, Homo sapien
atgacctgcggcgacgtccagcgca

SEQ ID NO: 2575483 - DNA, 25 bp, Homo sapien
tgcggaaaagacacttctgtttttc

SEQ ID NO: 2575484 - DNA, 25 bp, Homo sapien
ctgcggaaaagacacttctgttttt

SEQ ID NO: 2575485 - DNA, 25 bp, Homo sapien
cagtggacttgtcgttgatgtagaa

SEQ ID NO: 2575486 - DNA, 25 bp, Homo sapien
acctttgtggcctcctgcacgacgt

SEQ ID NO: 2575487 - DNA, 25 bp, Homo sapien
tgatgtagaagttgccggcagcatt

SEQ ID NO: 2575488 - DNA, 25 bp, Homo sapien
gcagcattcctcagcacctttgtgg

SEQ ID NO: 2575489 - DNA, 25 bp, Homo sapien
tacagggctactgcgaagttgaagg

SEQ ID NO: 2575490 - DNA, 25 bp, Homo sapien
gcaaccagtgccacggaggaaagaa

SEQ ID NO: 2575491 - DNA, 25 bp, Homo sapien
tgctttgtagcatgggacaatcacc

SEQ ID NO: 2575492 - DNA, 25 bp, Homo sapien
tcaggagcagcggaaactccagctc

SEQ ID NO: 2575493 - DNA, 25 bp, Homo sapien
caccagtaccggcaacaaagagcct

SEQ ID NO: 2575494 - DNA, 25 bp, Homo sapien
gtcgaagacaccaattcctagccct

SEQ ID NO: 2575495 - DNA, 25 bp, Homo sapien
agatcccgcagagccagtcgaagac

SEQ ID NO: 2575496 - DNA, 25 bp, Homo sapien
gaggttcagatccactggtccccag

SEQ ID NO: 2575497 - DNA, 25 bp, Homo sapien
ggcagcattattactgggaaccacg

SEQ ID NO: 2575498 - DNA, 25 bp, Homo sapien
cattattactgggaaccacgtccag

SEQ ID NO: 2575499 - DNA, 25 bp, Homo sapien
tactgggaaccacgtccaggaggtg

SEQ ID NO: 2575500 - DNA, 25 bp, Homo sapien
tattactgggaaccacgtccaggag

SEQ ID NO: 2575501 - DNA, 25 bp, Homo sapien
tgaggccatagctggtggtgctgtc

SEQ ID NO: 2575502 - DNA, 25 bp, Homo sapien
cacagacagtacaggcccgaagatc

SEQ ID NO: 2575503 - DNA, 25 bp, Homo sapien
tcatccgggtagacgtacacagaca

SEQ ID NO: 2575504 - DNA, 25 bp, Homo sapien
agcgtctccttgtacttgtcatccg

SEQ ID NO: 2575505 - DNA, 25 bp, Homo sapien
acggagtcatcacacttgcccccgg

SEQ ID NO: 2575506 - DNA, 25 bp, Homo sapien
agcgtgcgtgctccagccacttctt

SEQ ID NO: 2575507 - DNA, 25 bp, Homo sapien
gggtgaggagcgtgcgtgctccagc

SEQ ID NO: 2575508 - DNA, 25 bp, Homo sapien
tctccacgatgcagggctccacaaa

SEQ ID NO: 2575509 - DNA, 25 bp, Homo sapien
cttggcatcaatcactgcagagaag

SEQ ID NO: 2575510 - DNA, 25 bp, Homo sapien
ttggcatcaatcactgcagagaaga

SEQ ID NO: 2575511 - DNA, 25 bp, Homo sapien
gaagaaggtcccaaaatcctctgca

SEQ ID NO: 2575512 - DNA, 25 bp, Homo sapien
agaaggtcccaaaatcctctgcagg

SEQ ID NO: 2575513 - DNA, 25 bp, Homo sapien
gcggcgggggtgacggtgccactca

SEQ ID NO: 2575514 - DNA, 25 bp, Homo sapien
cggcgggggtgacggtgccactcac

SEQ ID NO: 2575515 - DNA, 25 bp, Homo sapien
cgcggcgggggtgacggtgccactc

SEQ ID NO: 2575516 - DNA, 25 bp, Homo sapien
ccgcggcgggggtgacggtgccact

SEQ ID NO: 2575517 - DNA, 25 bp, Homo sapien
actttgatccgactgtgctcctcca

SEQ ID NO: 2575518 - DNA, 25 bp, Homo sapien
acgtagagacgcgagcacgcggaac

SEQ ID NO: 2575519 - DNA, 25 bp, Homo sapien
gaagtggaagttctttccgccgcac

SEQ ID NO: 2575520 - DNA, 25 bp, Homo sapien
tggccaccgtactcgaaggctgagc

SEQ ID NO: 2575521 - DNA, 25 bp, Homo sapien
tgggaaacactacatggcagacctt

SEQ ID NO: 2575522 - DNA, 25 bp, Homo sapien
cagagaaacatgctggaccaccggt

SEQ ID NO: 2575523 - DNA, 25 bp, Homo sapien
agaagttctgcacgggaggagtcca

SEQ ID NO: 2575524 - DNA, 25 bp, Homo sapien
tggaaagtggtaaccagcggcctct

SEQ ID NO: 2575525 - DNA, 25 bp, Homo sapien
ctctttcataatggccaggggaggg

SEQ ID NO: 2575526 - DNA, 25 bp, Homo sapien
gggaggaggaggtgaggcaggcctt

SEQ ID NO: 2575527 - DNA, 25 bp, Homo sapien
gaggaggaggtgaggcaggccttac

SEQ ID NO: 2575528 - DNA, 25 bp, Homo sapien
ctggggccacacgggaggaggaggt

SEQ ID NO: 2575529 - DNA, 25 bp, Homo sapien
ggggccacacgggaggaggaggtga

SEQ ID NO: 2575530 - DNA, 25 bp, Homo sapien
gccaggcgtgggaaggtgtggaacc

SEQ ID NO: 2575531 - DNA, 25 bp, Homo sapien
aggtgtggaaccggtccaggttctg

SEQ ID NO: 2575532 - DNA, 25 bp, Homo sapien
caggcgtgggaaggtgtggaaccgg

SEQ ID NO: 2575533 - DNA, 25 bp, Homo sapien
ccaggcgtgggaaggtgtggaaccg

SEQ ID NO: 2575534 - DNA, 25 bp, Homo sapien
gtagacagcatagctggccagcatg

SEQ ID NO: 2575535 - DNA, 25 bp, Homo sapien
tgaagttgatgccacagaggtgctc

SEQ ID NO: 2575536 - DNA, 25 bp, Homo sapien
cagcctcccgaaggatgcggtagac

SEQ ID NO: 2575537 - DNA, 25 bp, Homo sapien
gacagtgtccccaaataggggccca

SEQ ID NO: 2575538 - DNA, 25 bp, Homo sapien
ggcaaagaggcagagtcacaactcc

SEQ ID NO: 2575539 - DNA, 25 bp, Homo sapien
cagtcttgccaagtaagtcacggct

SEQ ID NO: 2575540 - DNA, 25 bp, Homo sapien
ggcagagtcacaactccctctcgaa

SEQ ID NO: 2575541 - DNA, 25 bp, Homo sapien
tcatttatttactagtcactcagtc

SEQ ID NO: 2575542 - DNA, 25 bp, Homo sapien
gttgccgccgattgcagtgaagtta

SEQ ID NO: 2575543 - DNA, 25 bp, Homo sapien
ccccgccaggttgccgccgattgca

SEQ ID NO: 2575544 - DNA, 25 bp, Homo sapien
gaagttaaagggcgagatggccgcc

SEQ ID NO: 2575545 - DNA, 25 bp, Homo sapien
gccaggttgccgccgattgcagtga

SEQ ID NO: 2575546 - DNA, 25 bp, Homo sapien
cttggcattgaaccggaagaagtcg

SEQ ID NO: 2575547 - DNA, 25 bp, Homo sapien
gctgcagcgtcaatctccgcttgga

SEQ ID NO: 2575548 - DNA, 25 bp, Homo sapien
cagctccaccgcatacttggcattg

SEQ ID NO: 2575549 - DNA, 25 bp, Homo sapien
gaagtcgatgagttccgctgcagcg

SEQ ID NO: 2575550 - DNA, 25 bp, Homo sapien
tgtgcccaaagcgagcactgagccg

SEQ ID NO: 2575551 - DNA, 25 bp, Homo sapien
tgacgctgtgcccaaagcgagcact

SEQ ID NO: 2575552 - DNA, 25 bp, Homo sapien
catctgacgctgtgcccaaagcgag

SEQ ID NO: 2575553 - DNA, 25 bp, Homo sapien
acatttggagggctcaccaggtccc

SEQ ID NO: 2575554 - DNA, 25 bp, Homo sapien
agagctgacgcccaccccagagggc

SEQ ID NO: 2575555 - DNA, 25 bp, Homo sapien
aggcagggagacagtgcaggccacc

SEQ ID NO: 2575556 - DNA, 25 bp, Homo sapien
gcagggagacagtgcaggccaccac

SEQ ID NO: 2575557 - DNA, 25 bp, Homo sapien
ggaggcagggagacagtgcaggcca

SEQ ID NO: 2575558 - DNA, 25 bp, Homo sapien
caagctaggaggcagggagacagtg

SEQ ID NO: 2575559 - DNA, 25 bp, Homo sapien
agtccaggcaaagcatgacaaaggc

SEQ ID NO: 2575560 - DNA, 25 bp, Homo sapien
cagtccaggcaaagcatgacaaagg

SEQ ID NO: 2575561 - DNA, 25 bp, Homo sapien
tcccaccatggtcttggcgaggatc

SEQ ID NO: 2575562 - DNA, 25 bp, Homo sapien
ccaccatggtcttggcgaggatctc

SEQ ID NO: 2575563 - DNA, 25 bp, Homo sapien
tgtcccaccatggtcttggcgagga

SEQ ID NO: 2575564 - DNA, 25 bp, Homo sapien
ctgtcccaccatggtcttggcgagg

SEQ ID NO: 2575565 - DNA, 25 bp, Homo sapien
ctgcaataggcttcaggtcccactc

SEQ ID NO: 2575566 - DNA, 25 bp, Homo sapien
aagatctgggcccggtctgcaatag

SEQ ID NO: 2575567 - DNA, 25 bp, Homo sapien
ggtcccactctttccgggcagccag

SEQ ID NO: 2575568 - DNA, 25 bp, Homo sapien
tctgggcccggtctgcaataggctt

SEQ ID NO: 2575569 - DNA, 25 bp, Homo sapien
gaacttggccaccttatgtccatgg

SEQ ID NO: 2575570 - DNA, 25 bp, Homo sapien
tgcataacagaacttggccacctta

SEQ ID NO: 2575571 - DNA, 25 bp, Homo sapien
gccaccttatgtccatggttaaaag

SEQ ID NO: 2575572 - DNA, 25 bp, Homo sapien
cttgtctgcataacagaacttggcc

SEQ ID NO: 2575573 - DNA, 25 bp, Homo sapien
tggtactgcacgtccgacgtccaca

SEQ ID NO: 2575574 - DNA, 25 bp, Homo sapien
ggatggcttccatccggcccttcag

SEQ ID NO: 2575575 - DNA, 25 bp, Homo sapien
atgggatggcttccatccggccctt

SEQ ID NO: 2575576 - DNA, 25 bp, Homo sapien
cgacacttggtactgcacgtccgac

SEQ ID NO: 2575577 - DNA, 25 bp, Homo sapien
cctgcgtgaaggctaagacgggctc

SEQ ID NO: 2575578 - DNA, 25 bp, Homo sapien
tttgcagggcatctcgctcagggct

SEQ ID NO: 2575579 - DNA, 25 bp, Homo sapien
ggctgccctgcgtgaaggctaagac

SEQ ID NO: 2575580 - DNA, 25 bp, Homo sapien
gacgggctcgttggccaccttcagg

SEQ ID NO: 2575581 - DNA, 25 bp, Homo sapien
ggatctgatctacgaaggccatgca

SEQ ID NO: 2575582 - DNA, 25 bp, Homo sapien
acaagtgggatctgatctacgaagg

SEQ ID NO: 2575583 - DNA, 25 bp, Homo sapien
ctgatctacgaaggccatgcaccgt

SEQ ID NO: 2575584 - DNA, 25 bp, Homo sapien
ctctacaagtgggatctgatctacg

SEQ ID NO: 2575585 - DNA, 25 bp, Homo sapien
ctgggatctgatccacgaaggccat

SEQ ID NO: 2575586 - DNA, 25 bp, Homo sapien
ggctacaaatgctgggatctgatcc

SEQ ID NO: 2575587 - DNA, 25 bp, Homo sapien
caccggaagttgtcagggctacaaa

SEQ ID NO: 2575588 - DNA, 25 bp, Homo sapien
ctcctgcaccggaagttgtcagggc

SEQ ID NO: 2575589 - DNA, 25 bp, Homo sapien
ggctgcaagtactgggatccgatcc

SEQ ID NO: 2575590 - DNA, 25 bp, Homo sapien
gctgcaagtactgggatccgatcca

SEQ ID NO: 2575591 - DNA, 25 bp, Homo sapien
ctgcaagtactgggatccgatccat

SEQ ID NO: 2575592 - DNA, 25 bp, Homo sapien
cagaaatctatagagggaaaaactg

SEQ ID NO: 2575593 - DNA, 25 bp, Homo sapien
ctcgtccgaggtactagtcacttca

SEQ ID NO: 2575594 - DNA, 25 bp, Homo sapien
cagtgagaaactactcagtggcttc

SEQ ID NO: 2575595 - DNA, 25 bp, Homo sapien
cacaccgcaaccaaagttaacatga

SEQ ID NO: 2575596 - DNA, 25 bp, Homo sapien
gacactcgaccgtagaatgatctgt

SEQ ID NO: 2575597 - DNA, 25 bp, Homo sapien
atgagggacactcgaccgtagaatg

SEQ ID NO: 2575598 - DNA, 25 bp, Homo sapien
tgtttacggatgaggttcagagtta

SEQ ID NO: 2575599 - DNA, 25 bp, Homo sapien
tagaatgatctgtttacggatgagg

SEQ ID NO: 2575600 - DNA, 25 bp, Homo sapien
ggagcgcgggcgccggcagcagcat

SEQ ID NO: 2575601 - DNA, 25 bp, Homo sapien
gccccggtccaggggcgggacagca

SEQ ID NO: 2575602 - DNA, 25 bp, Homo sapien
ggcgggacagcagggcgcggcggag

SEQ ID NO: 2575603 - DNA, 25 bp, Homo sapien
cgcgggcgccggcagcagcatctct

SEQ ID NO: 2575604 - DNA, 25 bp, Homo sapien
tgtgatgctagacccagctggcaga

SEQ ID NO: 2575605 - DNA, 25 bp, Homo sapien
tacccacagagttagtccacgatgg

SEQ ID NO: 2575606 - DNA, 25 bp, Homo sapien
tgggacctacactctgctgaagctg

SEQ ID NO: 2575607 - DNA, 25 bp, Homo sapien
caaggaagtcgtgtgctcccactgt

SEQ ID NO: 2575608 - DNA, 25 bp, Homo sapien
gaaactcccataccacattgtccaa

SEQ ID NO: 2575609 - DNA, 25 bp, Homo sapien
ctgccctcgaggaaacggaaaatct

SEQ ID NO: 2575610 - DNA, 25 bp, Homo sapien
gcccaactggctctgataacctttg

SEQ ID NO: 2575611 - DNA, 25 bp, Homo sapien
cctttagaacaagggtgagtgagga

SEQ ID NO: 2575612 - DNA, 25 bp, Homo sapien
gaactgctgagagcggcttgcgtgt

SEQ ID NO: 2575613 - DNA, 25 bp, Homo sapien
gcttgcgtgtgtcgaggagcagaaa

SEQ ID NO: 2575614 - DNA, 25 bp, Homo sapien
actggccagtcgagggaactgctga

SEQ ID NO: 2575615 - DNA, 25 bp, Homo sapien
agaaagaggatggccctcactccag

SEQ ID NO: 2575616 - DNA, 25 bp, Homo sapien
gctaggaataattctttggagctca

SEQ ID NO: 2575617 - DNA, 25 bp, Homo sapien
ctgctaggaataattctttggagct

SEQ ID NO: 2575618 - DNA, 25 bp, Homo sapien
tgctaggaataattctttggagctc

SEQ ID NO: 2575619 - DNA, 25 bp, Homo sapien
agggccccatcaccaagaccaccag

SEQ ID NO: 2575620 - DNA, 25 bp, Homo sapien
acagcaccattccttgggtgggtgg

SEQ ID NO: 2575621 - DNA, 25 bp, Homo sapien
gtgtggtgtggcttcgaaccccact

SEQ ID NO: 2575622 - DNA, 25 bp, Homo sapien
tagaaattgacagcaccattccttg

SEQ ID NO: 2575623 - DNA, 25 bp, Homo sapien
tgtacttcctgagtcgctgctggcc

SEQ ID NO: 2575624 - DNA, 25 bp, Homo sapien
cctcgcgctcgaactcatcctggat

SEQ ID NO: 2575625 - DNA, 25 bp, Homo sapien
tctgtacttcctgagtcgctgctgg

SEQ ID NO: 2575626 - DNA, 25 bp, Homo sapien
tccacatccgcctcgcgctcgaact

SEQ ID NO: 2575627 - DNA, 25 bp, Homo sapien
tcgtgcaggtgtcggttcatgtcac

SEQ ID NO: 2575628 - DNA, 25 bp, Homo sapien
tgcaggtgtcggttcatgtcacttt

SEQ ID NO: 2575629 - DNA, 25 bp, Homo sapien
tctgcggagcctttgatgagccggc

SEQ ID NO: 2575630 - DNA, 25 bp, Homo sapien
tgtctgcggagcctttgatgagccg

SEQ ID NO: 2575631 - DNA, 25 bp, Homo sapien
cttgaagaaggattcggtctcatgg

SEQ ID NO: 2575632 - DNA, 25 bp, Homo sapien
ctcgatctgacctatcgtttcctgg

SEQ ID NO: 2575633 - DNA, 25 bp, Homo sapien
gatctgacctatcgtttcctggtac

SEQ ID NO: 2575634 - DNA, 25 bp, Homo sapien
catggatcaagttgcccaagttttc

SEQ ID NO: 2575635 - DNA, 25 bp, Homo sapien
cggattgcagttggtgaaatcctcc

SEQ ID NO: 2575636 - DNA, 25 bp, Homo sapien
gtcacagtcgtcgtcaaagtcaaag

SEQ ID NO: 2575637 - DNA, 25 bp, Homo sapien
ctgtcacagtcgtcgtcaaagtcaa

SEQ ID NO: 2575638 - DNA, 25 bp, Homo sapien
ctcgccctgcaggtcgatggtcgga

SEQ ID NO: 2575639 - DNA, 25 bp, Homo sapien
gatgttcatggagccgacctcatcg

SEQ ID NO: 2575640 - DNA, 25 bp, Homo sapien
cagagatgtcatcatcggaagccac

SEQ ID NO: 2575641 - DNA, 25 bp, Homo sapien
cgacctcatcgtccgagaaccggtt

SEQ ID NO: 2575642 - DNA, 25 bp, Homo sapien
aacatgcgcttcatctcatcggtga

SEQ ID NO: 2575643 - DNA, 25 bp, Homo sapien
agttccgctgctgtgcgacatcgca

SEQ ID NO: 2575644 - DNA, 25 bp, Homo sapien
cgtgatatcgattcggcggcagatg

SEQ ID NO: 2575645 - DNA, 25 bp, Homo sapien
cgacatcgcacagcttggccgtgat

SEQ ID NO: 2575646 - DNA, 25 bp, Homo sapien
tggacacgtcttctgagttccgctg

SEQ ID NO: 2575647 - DNA, 25 bp, Homo sapien
gtcactcataagccccttaaacacc

SEQ ID NO: 2575648 - DNA, 25 bp, Homo sapien
gctcggccttgagccgctcgatctt

SEQ ID NO: 2575649 - DNA, 25 bp, Homo sapien
ctcataagccccttaaacaccacca

SEQ ID NO: 2575650 - DNA, 25 bp, Homo sapien
cactcataagccccttaaacaccac

SEQ ID NO: 2575651 - DNA, 25 bp, Homo sapien
caccatggtctgaaggttcatgcgc

SEQ ID NO: 2575652 - DNA, 25 bp, Homo sapien
tccaccatggtctgaaggttcatgc

SEQ ID NO: 2575653 - DNA, 25 bp, Homo sapien
aaggttcatgcgcttggcgagctcc

SEQ ID NO: 2575654 - DNA, 25 bp, Homo sapien
tggtctgaaggttcatgcgcttggc

SEQ ID NO: 2575655 - DNA, 25 bp, Homo sapien
ggcagtctggaacccttttaggatg

SEQ ID NO: 2575656 - DNA, 25 bp, Homo sapien
ctgctaccctccctacatggcctcg

SEQ ID NO: 2575657 - DNA, 25 bp, Homo sapien
ccctccctacatggcctcggagcag

SEQ ID NO: 2575658 - DNA, 25 bp, Homo sapien
cagggcagtctggaacccttttagg

SEQ ID NO: 2575659 - DNA, 25 bp, Homo sapien
ggagccagtcccgtgacgccagggc

SEQ ID NO: 2575660 - DNA, 25 bp, Homo sapien
tgtggtcaccgccacttccaccttc

SEQ ID NO: 2575661 - DNA, 25 bp, Homo sapien
ctcatctcgggaggtctcaggcaca

SEQ ID NO: 2575662 - DNA, 25 bp, Homo sapien
cagggccagtgatggctccattgtg

SEQ ID NO: 2575663 - DNA, 25 bp, Homo sapien
caagttgccactgcccatttgtacc

SEQ ID NO: 2575664 - DNA, 25 bp, Homo sapien
gaaaacattggttcccttcagcagc

SEQ ID NO: 2575665 - DNA, 25 bp, Homo sapien
aaggaaaccaagcatccaccatcac

SEQ ID NO: 2575666 - DNA, 25 bp, Homo sapien
tgtacccaggggcacgagaaaggaa

SEQ ID NO: 2575667 - DNA, 25 bp, Homo sapien
ttttccacctaacaatatacggcag

SEQ ID NO: 2575668 - DNA, 25 bp, Homo sapien
tgtcagcgcagagtccttgcaatct

SEQ ID NO: 2575669 - DNA, 25 bp, Homo sapien
ccatgtgtgacgtgttagagagaac

SEQ ID NO: 2575670 - DNA, 25 bp, Homo sapien
caacgggatgcgaccatatgtggtt

SEQ ID NO: 2575671 - DNA, 25 bp, Homo sapien
tctctttcaagatcaggcccatcta

SEQ ID NO: 2575672 - DNA, 25 bp, Homo sapien
aggggtgcaacaacagctctctcga

SEQ ID NO: 2575673 - DNA, 25 bp, Homo sapien
ggtgcaacaacagctctctcgacct

SEQ ID NO: 2575674 - DNA, 25 bp, Homo sapien
gatcaggcccatctatgggtcacag

SEQ ID NO: 2575675 - DNA, 25 bp, Homo sapien
cagatgatgggaaagttggtgtcca

SEQ ID NO: 2575676 - DNA, 25 bp, Homo sapien
atgggaaagttggtgtccacggctc

SEQ ID NO: 2575677 - DNA, 25 bp, Homo sapien
ggaaagttggtgtccacggctctcc

SEQ ID NO: 2575678 - DNA, 25 bp, Homo sapien
aagttggtgtccacggctctccatc

SEQ ID NO: 2575679 - DNA, 25 bp, Homo sapien
tgcctgggagcccagattttcctta

SEQ ID NO: 2575680 - DNA, 25 bp, Homo sapien
tgggagcccagattttccttatcat

SEQ ID NO: 2575681 - DNA, 25 bp, Homo sapien
cgcagccgccctggagccagctgcc

SEQ ID NO: 2575682 - DNA, 25 bp, Homo sapien
cctgggagcccagattttccttatc

SEQ ID NO: 2575683 - DNA, 25 bp, Homo sapien
atagtacctacacctccctggatgg

SEQ ID NO: 2575684 - DNA, 25 bp, Homo sapien
tccaggccagcatggcgagaagaag

SEQ ID NO: 2575685 - DNA, 25 bp, Homo sapien
aaaacactttgacgtcaggcagagc

SEQ ID NO: 2575686 - DNA, 25 bp, Homo sapien
cagctggtgatctgctaaagcgact

SEQ ID NO: 2575687 - DNA, 25 bp, Homo sapien
ggaatgtgcttcctaggcagtaaga

SEQ ID NO: 2575688 - DNA, 25 bp, Homo sapien
gaaccaccaggcaattgatatccaa

SEQ ID NO: 2575689 - DNA, 25 bp, Homo sapien
taatggtgctgccttgagaaccacc

SEQ ID NO: 2575690 - DNA, 25 bp, Homo sapien
gcagtagggatcatggttagacacc

SEQ ID NO: 2575691 - DNA, 25 bp, Homo sapien
taaaggttggatctggagcctgact

SEQ ID NO: 2575692 - DNA, 25 bp, Homo sapien
tgcagtgccaccaccgggtttaaat

SEQ ID NO: 2575693 - DNA, 25 bp, Homo sapien
tgatccgtggatgagaacctcgggc

SEQ ID NO: 2575694 - DNA, 25 bp, Homo sapien
caaaagctagggatactccagccca

SEQ ID NO: 2575695 - DNA, 25 bp, Homo sapien
tgaaaactaccctctcttgtaccag

SEQ ID NO: 2575696 - DNA, 25 bp, Homo sapien
acggaccctccagagaaccaggcat

SEQ ID NO: 2575697 - DNA, 25 bp, Homo sapien
gaaccaggcattgccatttgccagg

SEQ ID NO: 2575698 - DNA, 25 bp, Homo sapien
ctgttgggtgaaaactaccctctct

SEQ ID NO: 2575699 - DNA, 25 bp, Homo sapien
gaatgggcgggggacactccagctg

SEQ ID NO: 2575700 - DNA, 25 bp, Homo sapien
gcctgccccaatgacattgaccatg

SEQ ID NO: 2575701 - DNA, 25 bp, Homo sapien
tgaccatgaggggcggcgaggtggc

SEQ ID NO: 2575702 - DNA, 25 bp, Homo sapien
ctagcctgccccaatgacattgacc

SEQ ID NO: 2575703 - DNA, 25 bp, Homo sapien
tgccccaatgacattgaccatgagg

SEQ ID NO: 2575704 - DNA, 25 bp, Homo sapien
caagcagacagtattgtcggccaga

SEQ ID NO: 2575705 - DNA, 25 bp, Homo sapien
gccaagcagacagtattgtcggcca

SEQ ID NO: 2575706 - DNA, 25 bp, Homo sapien
ggaaagccaagcagacagtattgtc

SEQ ID NO: 2575707 - DNA, 25 bp, Homo sapien
aagccaagcagacagtattgtcggc

SEQ ID NO: 2575708 - DNA, 25 bp, Homo sapien
actcgtcgcgctcgcgcttcacctt

SEQ ID NO: 2575709 - DNA, 25 bp, Homo sapien
tccgcttatactcgtcgcgctcgcg

SEQ ID NO: 2575710 - DNA, 25 bp, Homo sapien
gcttatactcgtcgcgctcgcgctt

SEQ ID NO: 2575711 - DNA, 25 bp, Homo sapien
ctccgcttatactcgtcgcgctcgc

SEQ ID NO: 2575712 - DNA, 25 bp, Homo sapien
tagctccagatggtcccgggcaggc

SEQ ID NO: 2575713 - DNA, 25 bp, Homo sapien
gccgcacctgcgtgtagctccagat

SEQ ID NO: 2575714 - DNA, 25 bp, Homo sapien
gcacctgcgtgtagctccagatggt

SEQ ID NO: 2575715 - DNA, 25 bp, Homo sapien
tgcgtgtagctccagatggtcccgg

SEQ ID NO: 2575716 - DNA, 25 bp, Homo sapien
cacggcattggcgttggcgccggcc

SEQ ID NO: 2575717 - DNA, 25 bp, Homo sapien
ggcattggcgttggcgccggccgcc

SEQ ID NO: 2575718 - DNA, 25 bp, Homo sapien
ccagggccacggcattggcgttggc

SEQ ID NO: 2575719 - DNA, 25 bp, Homo sapien
ggccacggcattggcgttggcgccg

SEQ ID NO: 2575720 - DNA, 25 bp, Homo sapien
tccagcagccggttgcgccgctcca

SEQ ID NO: 2575721 - DNA, 25 bp, Homo sapien
gggagaaggtcttgtagcgcagccg

SEQ ID NO: 2575722 - DNA, 25 bp, Homo sapien
gcacggcctgctcgcgggagaaggt

SEQ ID NO: 2575723 - DNA, 25 bp, Homo sapien
tcgggcccggtctgcacggcctgct

SEQ ID NO: 2575724 - DNA, 25 bp, Homo sapien
gcgccgccgtcaccggcgacggacc

SEQ ID NO: 2575725 - DNA, 25 bp, Homo sapien
cttcaagaggtggatgttggagccc

SEQ ID NO: 2575726 - DNA, 25 bp, Homo sapien
ttcaagaggtggatgttggagccca

SEQ ID NO: 2575727 - DNA, 25 bp, Homo sapien
agcgccgccgtcaccggcgacggac

SEQ ID NO: 2575728 - DNA, 25 bp, Homo sapien
gggccagaagggtcgcgggtctcac

SEQ ID NO: 2575729 - DNA, 25 bp, Homo sapien
agcggttccagatgcgcgccagatg

SEQ ID NO: 2575730 - DNA, 25 bp, Homo sapien
cctccgcagagacggcaggacggat

SEQ ID NO: 2575731 - DNA, 25 bp, Homo sapien
ccgctcctcgggacgcggtggaggc

SEQ ID NO: 2575732 - DNA, 25 bp, Homo sapien
gcagccgcacgcagaggactctcgg

SEQ ID NO: 2575733 - DNA, 25 bp, Homo sapien
gaggactctcggccggcactgcccc

SEQ ID NO: 2575734 - DNA, 25 bp, Homo sapien
agaggactctcggccggcactgccc

SEQ ID NO: 2575735 - DNA, 25 bp, Homo sapien
ggcagccgcacgcagaggactctcg

SEQ ID NO: 2575736 - DNA, 25 bp, Homo sapien
gggcacagctaagcccgctggttcc

SEQ ID NO: 2575737 - DNA, 25 bp, Homo sapien
cgcccactgaggagccgagcagcat

SEQ ID NO: 2575738 - DNA, 25 bp, Homo sapien
tagctgcgggccttgtcctctcgag

SEQ ID NO: 2575739 - DNA, 25 bp, Homo sapien
ggtgggctcctcgaatgctagctgc

SEQ ID NO: 2575740 - DNA, 25 bp, Homo sapien
gaggccacagcagcgtccttgttcc

SEQ ID NO: 2575741 - DNA, 25 bp, Homo sapien
tgagtcagtgggacctcaaacgagg

SEQ ID NO: 2575742 - DNA, 25 bp, Homo sapien
gagtgggcttccctgctaaacataa

SEQ ID NO: 2575743 - DNA, 25 bp, Homo sapien
gaaacagactaagaggcttgccttg

SEQ ID NO: 2575744 - DNA, 25 bp, Homo sapien
tcttccagaacgagggaccaggtca

SEQ ID NO: 2575745 - DNA, 25 bp, Homo sapien
ctcttccagaacgagggaccaggtc

SEQ ID NO: 2575746 - DNA, 25 bp, Homo sapien
cttccagaacgagggaccaggtcac

SEQ ID NO: 2575747 - DNA, 25 bp, Homo sapien
cctcttccagaacgagggaccaggt

SEQ ID NO: 2575748 - DNA, 25 bp, Homo sapien
aggacccacaccaggatctggccca

SEQ ID NO: 2575749 - DNA, 25 bp, Homo sapien
tcatccccgtatccccaggacccac

SEQ ID NO: 2575750 - DNA, 25 bp, Homo sapien
ccacaccaggatctggcccagcatc

SEQ ID NO: 2575751 - DNA, 25 bp, Homo sapien
accaggatctggcccagcatcagct

SEQ ID NO: 2575752 - DNA, 25 bp, Homo sapien
tccaggttctgcggggacttccgga

SEQ ID NO: 2575753 - DNA, 25 bp, Homo sapien
tctgcggggacttccggaggtcaca

SEQ ID NO: 2575754 - DNA, 25 bp, Homo sapien
gagctccaggttctgcggggacttc

SEQ ID NO: 2575755 - DNA, 25 bp, Homo sapien
gttctgcggggacttccggaggtca

SEQ ID NO: 2575756 - DNA, 25 bp, Homo sapien
tggatgatcagccccgccgtcttgt

SEQ ID NO: 2575757 - DNA, 25 bp, Homo sapien
cccgccgtcttgttggagcctttga

SEQ ID NO: 2575758 - DNA, 25 bp, Homo sapien
ttggagcctttgattgaacgacttg

SEQ ID NO: 2575759 - DNA, 25 bp, Homo sapien
ttgattgaacgacttgcctctctgc

SEQ ID NO: 2575760 - DNA, 25 bp, Homo sapien
ctcagtccgaccaggaaacaaggca

SEQ ID NO: 2575761 - DNA, 25 bp, Homo sapien
attcaaagagctcagtccgaccagg

SEQ ID NO: 2575762 - DNA, 25 bp, Homo sapien
aaagagctcagtccgaccaggaaac

SEQ ID NO: 2575763 - DNA, 25 bp, Homo sapien
agctcagtccgaccaggaaacaagg

SEQ ID NO: 2575764 - DNA, 25 bp, Homo sapien
gggcagcttgctggcagtgcctgaa

SEQ ID NO: 2575765 - DNA, 25 bp, Homo sapien
gaatctcaagcaatcaaacaaaacc

SEQ ID NO: 2575766 - DNA, 25 bp, Homo sapien
gaattagttcccgtgaatctcaagc

SEQ ID NO: 2575767 - DNA, 25 bp, Homo sapien
tggcagtgcctgaattagttcccgt

SEQ ID NO: 2575768 - DNA, 25 bp, Homo sapien
aagccatcaccgctgtgggtgatcg

SEQ ID NO: 2575769 - DNA, 25 bp, Homo sapien
agtcgaagccatcaccgctgtgggt

SEQ ID NO: 2575770 - DNA, 25 bp, Homo sapien
gtcggggcagcacagtcgaagccat

SEQ ID NO: 2575771 - DNA, 25 bp, Homo sapien
agcacagtcgaagccatcaccgctg

SEQ ID NO: 2575772 - DNA, 25 bp, Homo sapien
taattctgtccaaggtgatgcggca

SEQ ID NO: 2575773 - DNA, 25 bp, Homo sapien
cctagttctggagatgcttcctctg

SEQ ID NO: 2575774 - DNA, 25 bp, Homo sapien
cctggttttacccatggccagtggc

SEQ ID NO: 2575775 - DNA, 25 bp, Homo sapien
cagcctgtgctaattctgtccaagg

SEQ ID NO: 2575776 - DNA, 25 bp, Homo sapien
attggtaccatcctccttcaaactg

SEQ ID NO: 2575777 - DNA, 25 bp, Homo sapien
acattggtaccatcctccttcaaac

SEQ ID NO: 2575778 - DNA, 25 bp, Homo sapien
aacattggtaccatcctccttcaaa

SEQ ID NO: 2575779 - DNA, 25 bp, Homo sapien
ttggtaccatcctccttcaaactgc

SEQ ID NO: 2575780 - DNA, 25 bp, Homo sapien
gcagctctcagacatgatcaaaggg

SEQ ID NO: 2575781 - DNA, 25 bp, Homo sapien
tagaagcaagcccagtttcgagctg

SEQ ID NO: 2575782 - DNA, 25 bp, Homo sapien
agagggagcctctcacaaagtgggt

SEQ ID NO: 2575783 - DNA, 25 bp, Homo sapien
gatcaaagggccatcagggtggcac

SEQ ID NO: 2575784 - DNA, 25 bp, Homo sapien
tcaaagcctacaaagatggagaccc

SEQ ID NO: 2575785 - DNA, 25 bp, Homo sapien
ggagacccaggtttgtactatgcaa

SEQ ID NO: 2575786 - DNA, 25 bp, Homo sapien
gatttatcggttacggtacctagca

SEQ ID NO: 2575787 - DNA, 25 bp, Homo sapien
tcaggaatcctagagcagcttgggt

SEQ ID NO: 2575788 - DNA, 25 bp, Homo sapien
taaccttggaagtcgcataccatcg

SEQ ID NO: 2575789 - DNA, 25 bp, Homo sapien
tcaattgtcaccataaaggaagccc

SEQ ID NO: 2575790 - DNA, 25 bp, Homo sapien
gattccaccgtattctctcagactg

SEQ ID NO: 2575791 - DNA, 25 bp, Homo sapien
tcatccaaggataatgtgtggtcat

SEQ ID NO: 2575792 - DNA, 25 bp, Homo sapien
cagggaaaattggaggcttgaataa

SEQ ID NO: 2575793 - DNA, 25 bp, Homo sapien
ccaagcttgcaggaccttgatgtgt

SEQ ID NO: 2575794 - DNA, 25 bp, Homo sapien
cagaatttgctggaacatagacaca

SEQ ID NO: 2575795 - DNA, 25 bp, Homo sapien
cattagtggcctattggtctgcaga

SEQ ID NO: 2575796 - DNA, 25 bp, Homo sapien
tgaaatataatgaaaactatgtaac

SEQ ID NO: 2575797 - DNA, 25 bp, Homo sapien
gcccagccccataatatatttctaa

SEQ ID NO: 2575798 - DNA, 25 bp, Homo sapien
ccagccccataatatatttctaaaa

SEQ ID NO: 2575799 - DNA, 25 bp, Homo sapien
atgcccagccccataatatatttct

SEQ ID NO: 2575800 - DNA, 25 bp, Homo sapien
agagtaccgtaggtatgaacattgc

SEQ ID NO: 2575801 - DNA, 25 bp, Homo sapien
ttagctgtcagtatgtggatggtgc

SEQ ID NO: 2575802 - DNA, 25 bp, Homo sapien
gggcccagtcctttgcattaatttg

SEQ ID NO: 2575803 - DNA, 25 bp, Homo sapien
tagtgttagtgtcaactcctgggcc

SEQ ID NO: 2575804 - DNA, 25 bp, Homo sapien
cttgatagtctctttcagcactctg

SEQ ID NO: 2575805 - DNA, 25 bp, Homo sapien
tgatagtctctttcagcactctgca

SEQ ID NO: 2575806 - DNA, 25 bp, Homo sapien
ttcagcactctgcactctacacact

SEQ ID NO: 2575807 - DNA, 25 bp, Homo sapien
tcagcactctgcactctacacactc

SEQ ID NO: 2575808 - DNA, 25 bp, Homo sapien
caaagtgtggtacatggagtgcagt

SEQ ID NO: 2575809 - DNA, 25 bp, Homo sapien
gaaacgttaacgctaccttgcattg

SEQ ID NO: 2575810 - DNA, 25 bp, Homo sapien
cggcccggcctgtaaaatctcttca

SEQ ID NO: 2575811 - DNA, 25 bp, Homo sapien
tataacatttaggacacaatgcccg

SEQ ID NO: 2575812 - DNA, 25 bp, Homo sapien
gagagccgcagtcccggctgcagca

SEQ ID NO: 2575813 - DNA, 25 bp, Homo sapien
ctgactggggcgcagcttgacggcg

SEQ ID NO: 2575814 - DNA, 25 bp, Homo sapien
ggcgtcgggctggagagccgcagtc

SEQ ID NO: 2575815 - DNA, 25 bp, Homo sapien
gcttgacggcgtcgggctggagagc

SEQ ID NO: 2575816 - DNA, 25 bp, Homo sapien
aggagccttccttacacttcgccat

SEQ ID NO: 2575817 - DNA, 25 bp, Homo sapien
agtttcctgatcgactccagcatca

SEQ ID NO: 2575818 - DNA, 25 bp, Homo sapien
cacttcgccatgagtttcctgatcg

SEQ ID NO: 2575819 - DNA, 25 bp, Homo sapien
cgtgctgtggcctccgggagtggga

SEQ ID NO: 2575820 - DNA, 25 bp, Homo sapien
cggcatccatccccggaatttcggt

SEQ ID NO: 2575821 - DNA, 25 bp, Homo sapien
agagggtgtgcgatttgctgcggcc

SEQ ID NO: 2575822 - DNA, 25 bp, Homo sapien
tccacttttggaagcggtccgccga

SEQ ID NO: 2575823 - DNA, 25 bp, Homo sapien
ctcagccccggctgtcaggaggctg

SEQ ID NO: 2575824 - DNA, 25 bp, Homo sapien
ttttctgaccctcatttcttctcca

SEQ ID NO: 2575825 - DNA, 25 bp, Homo sapien
gtttttctgaccctcatttcttctc

SEQ ID NO: 2575826 - DNA, 25 bp, Homo sapien
tttttctgaccctcatttcttctcc

SEQ ID NO: 2575827 - DNA, 25 bp, Homo sapien
ttgggtagagagttctgtagatatc

SEQ ID NO: 2575828 - DNA, 25 bp, Homo sapien
atgtgccatgtggcaccaagaagaa

SEQ ID NO: 2575829 - DNA, 25 bp, Homo sapien
tttgcattgtctgagcatgttggct

SEQ ID NO: 2575830 - DNA, 25 bp, Homo sapien
ctattttgttagattcaatttgcta

SEQ ID NO: 2575831 - DNA, 25 bp, Homo sapien
aaaattacgttaagaatgtttgcat

SEQ ID NO: 2575832 - DNA, 25 bp, Homo sapien
aagaatgtttgcattgtctgagcat

SEQ ID NO: 2575833 - DNA, 25 bp, Homo sapien
gcagctgtcacctatacagagttat

SEQ ID NO: 2575834 - DNA, 25 bp, Homo sapien
gcacaattttaataggcttatctgc

SEQ ID NO: 2575835 - DNA, 25 bp, Homo sapien
gctaagatgcttttataagcagctg

SEQ ID NO: 2575836 - DNA, 25 bp, Homo sapien
gcaaccacaacattgttacaaaagc

SEQ ID NO: 2575837 - DNA, 25 bp, Homo sapien
taaattagccgtctgcaatagccgc

SEQ ID NO: 2575838 - DNA, 25 bp, Homo sapien
tatctcttcctaagttaagcataaa

SEQ ID NO: 2575839 - DNA, 25 bp, Homo sapien
tagaagtaagagacatcatcataca

SEQ ID NO: 2575840 - DNA, 25 bp, Homo sapien
aaaaatctagctcttgccttatctc

SEQ ID NO: 2575841 - DNA, 25 bp, Homo sapien
tcacacatggtgaatggtttccagt

SEQ ID NO: 2575842 - DNA, 25 bp, Homo sapien
taaacagccaaagctattacttgtt

SEQ ID NO: 2575843 - DNA, 25 bp, Homo sapien
cacacatggtgaatggtttccagtg

SEQ ID NO: 2575844 - DNA, 25 bp, Homo sapien
ataaacagccaaagctattacttgt

SEQ ID NO: 2575845 - DNA, 25 bp, Homo sapien
cacatctctgtatcttcagaattgg

SEQ ID NO: 2575846 - DNA, 25 bp, Homo sapien
tctctgtatcttcagaattggaaga

SEQ ID NO: 2575847 - DNA, 25 bp, Homo sapien
catctctgtatcttcagaattggaa

SEQ ID NO: 2575848 - DNA, 25 bp, Homo sapien
tcacatctctgtatcttcagaattg

SEQ ID NO: 2575849 - DNA, 25 bp, Homo sapien
cagcatgcagttgacagcaattgtg

SEQ ID NO: 2575850 - DNA, 25 bp, Homo sapien
catgcagttgacagcaattgtgtag

SEQ ID NO: 2575851 - DNA, 25 bp, Homo sapien
tgcagttgacagcaattgtgtagag

SEQ ID NO: 2575852 - DNA, 25 bp, Homo sapien
tcacagcatgcagttgacagcaatt

SEQ ID NO: 2575853 - DNA, 25 bp, Homo sapien
gcttggaaataatcataggccttct

SEQ ID NO: 2575854 - DNA, 25 bp, Homo sapien
tctttccacagactagaagtgtgac

SEQ ID NO: 2575855 - DNA, 25 bp, Homo sapien
acaatagggattttcttagcttgga

SEQ ID NO: 2575856 - DNA, 25 bp, Homo sapien
caagtcagcaggaccgcccttctgt

SEQ ID NO: 2575857 - DNA, 25 bp, Homo sapien
gaccccgaatcgcatttaagtgaaa

SEQ ID NO: 2575858 - DNA, 25 bp, Homo sapien
cccgaatcgcatttaagtgaaagcc

SEQ ID NO: 2575859 - DNA, 25 bp, Homo sapien
ctggcagaccccgaatcgcatttaa

SEQ ID NO: 2575860 - DNA, 25 bp, Homo sapien
taagtgaaagccatagccattttca

SEQ ID NO: 2575861 - DNA, 25 bp, Homo sapien
gacagagccattgggcagttcttga

SEQ ID NO: 2575862 - DNA, 25 bp, Homo sapien
ctggagcctccttgacagagccatt

SEQ ID NO: 2575863 - DNA, 25 bp, Homo sapien
cagttcttgactttgatagtagaga

SEQ ID NO: 2575864 - DNA, 25 bp, Homo sapien
tatctggtggacttgagacttccag

SEQ ID NO: 2575865 - DNA, 25 bp, Homo sapien
tctttgtctaccaccaacagtgaag

SEQ ID NO: 2575866 - DNA, 25 bp, Homo sapien
tctaccacactgtcatgatccaggg

SEQ ID NO: 2575867 - DNA, 25 bp, Homo sapien
agggtttccacagactcgccgttga

SEQ ID NO: 2575868 - DNA, 25 bp, Homo sapien
cagtctgtacatgttgtccgtctct

SEQ ID NO: 2575869 - DNA, 25 bp, Homo sapien
agattttctgctggagcccaaagcc

SEQ ID NO: 2575870 - DNA, 25 bp, Homo sapien
aaaacagattttctgctggagccca

SEQ ID NO: 2575871 - DNA, 25 bp, Homo sapien
cagattttctgctggagcccaaagc

SEQ ID NO: 2575872 - DNA, 25 bp, Homo sapien
aacagattttctgctggagcccaaa

SEQ ID NO: 2575873 - DNA, 25 bp, Homo sapien
cagcaggaacatgacacggcttcct

SEQ ID NO: 2575874 - DNA, 25 bp, Homo sapien
tcatctccacaattcggggctggtg

SEQ ID NO: 2575875 - DNA, 25 bp, Homo sapien
tatcttctgctcaacatgacgcttg

SEQ ID NO: 2575876 - DNA, 25 bp, Homo sapien
ttctgagcctgccctcagatagaaa

SEQ ID NO: 2575877 - DNA, 25 bp, Homo sapien
tcaagtgatcatcagccagaactcc

SEQ ID NO: 2575878 - DNA, 25 bp, Homo sapien
tggctggcatcctctacattctctc

SEQ ID NO: 2575879 - DNA, 25 bp, Homo sapien
caccttgaggtgtaatatcagtcat

SEQ ID NO: 2575880 - DNA, 25 bp, Homo sapien
gtgatcatcagccagaactccagct

SEQ ID NO: 2575881 - DNA, 25 bp, Homo sapien
ttagccagagctcaaagatgcacct

SEQ ID NO: 2575882 - DNA, 25 bp, Homo sapien
gaaggaatcgaccagctaacacagc

SEQ ID NO: 2575883 - DNA, 25 bp, Homo sapien
tattctcagcaaaggtaacagtgcc

SEQ ID NO: 2575884 - DNA, 25 bp, Homo sapien
cctaagagggctagaagcatcaacc

SEQ ID NO: 2575885 - DNA, 25 bp, Homo sapien
gaatccccatccagaactagtaaag

SEQ ID NO: 2575886 - DNA, 25 bp, Homo sapien
tgaattcccactctttctgaccaga

SEQ ID NO: 2575887 - DNA, 25 bp, Homo sapien
tccttcacgagatagcagagccggg

SEQ ID NO: 2575888 - DNA, 25 bp, Homo sapien
ggctgggtccaagtttgcacacctc

SEQ ID NO: 2575889 - DNA, 25 bp, Homo sapien
gacacccaagtagaagcaggtagtt

SEQ ID NO: 2575890 - DNA, 25 bp, Homo sapien
ttgacacccaagtagaagcaggtag

SEQ ID NO: 2575891 - DNA, 25 bp, Homo sapien
tgacacccaagtagaagcaggtagt

SEQ ID NO: 2575892 - DNA, 25 bp, Homo sapien
acacccaagtagaagcaggtagttc

SEQ ID NO: 2575893 - DNA, 25 bp, Homo sapien
cttgtcctaaaccttctgttgtttg

SEQ ID NO: 2575894 - DNA, 25 bp, Homo sapien
aagaaatcttggagtgaaattttca

SEQ ID NO: 2575895 - DNA, 25 bp, Homo sapien
gaagaaatcttggagtgaaattttc

SEQ ID NO: 2575896 - DNA, 25 bp, Homo sapien
tagtgaaaccgcactcagtggagca

SEQ ID NO: 2575897 - DNA, 25 bp, Homo sapien
aaaggccatcagacggattctcgtg

SEQ ID NO: 2575898 - DNA, 25 bp, Homo sapien
gggcacacccctgagtaatccaaag

SEQ ID NO: 2575899 - DNA, 25 bp, Homo sapien
tggaagctaaacctgccacctctgg

SEQ ID NO: 2575900 - DNA, 25 bp, Homo sapien
gacagagtctcacgcacaggtatgc

SEQ ID NO: 2575901 - DNA, 25 bp, Homo sapien
ttcgtgagtcggagagccatcagcg

SEQ ID NO: 2575902 - DNA, 25 bp, Homo sapien
cgactacggtggacaagggatgatt

SEQ ID NO: 2575903 - DNA, 25 bp, Homo sapien
tacttaacctcgtcaaccactgtgg

SEQ ID NO: 2575904 - DNA, 25 bp, Homo sapien
tcacttgttattcgtaaagtctctt

SEQ ID NO: 2575905 - DNA, 25 bp, Homo sapien
ttattcgtaaagtctctttgtaatc

SEQ ID NO: 2575906 - DNA, 25 bp, Homo sapien
cttgttattcgtaaagtctctttgt

SEQ ID NO: 2575907 - DNA, 25 bp, Homo sapien
cttcacttgttattcgtaaagtctc

SEQ ID NO: 2575908 - DNA, 25 bp, Homo sapien
tattgagcatttatgcaatcttaca

SEQ ID NO: 2575909 - DNA, 25 bp, Homo sapien
tttatgcaatcttacatgcattacc

SEQ ID NO: 2575910 - DNA, 25 bp, Homo sapien
gcatttatgcaatcttacatgcatt

SEQ ID NO: 2575911 - DNA, 25 bp, Homo sapien
gagcatttatgcaatcttacatgca

SEQ ID NO: 2575912 - DNA, 25 bp, Homo sapien
cagactaagtggtcaaacgcgcaga

SEQ ID NO: 2575913 - DNA, 25 bp, Homo sapien
ctgcaagccgctggatagcacggcg

SEQ ID NO: 2575914 - DNA, 25 bp, Homo sapien
tccgcaggagcatttcccgagtgtc

SEQ ID NO: 2575915 - DNA, 25 bp, Homo sapien
tagaagagccacagtagaagagaga

SEQ ID NO: 2575916 - DNA, 25 bp, Homo sapien
tcctggggttaagagacgtgcatcc

SEQ ID NO: 2575917 - DNA, 25 bp, Homo sapien
cccctggaccggctgtgccaagaga

SEQ ID NO: 2575918 - DNA, 25 bp, Homo sapien
tggaccggctgtgccaagagaagca

SEQ ID NO: 2575919 - DNA, 25 bp, Homo sapien
tgtcctcctggggttaagagacgtg

SEQ ID NO: 2575920 - DNA, 25 bp, Homo sapien
ttcccacgggctgggggccttgctg

SEQ ID NO: 2575921 - DNA, 25 bp, Homo sapien
tgggggccttgctgtcccaaggacg

SEQ ID NO: 2575922 - DNA, 25 bp, Homo sapien
gggctgggggccttgctgtcccaag

SEQ ID NO: 2575923 - DNA, 25 bp, Homo sapien
gctgggggccttgctgtcccaagga

SEQ ID NO: 2575924 - DNA, 25 bp, Homo sapien
acccaggagcctccgtgcggagcca

SEQ ID NO: 2575925 - DNA, 25 bp, Homo sapien
tccaaagactgtagggagaccttct

SEQ ID NO: 2575926 - DNA, 25 bp, Homo sapien
aagactgtagggagaccttctcgcc

SEQ ID NO: 2575927 - DNA, 25 bp, Homo sapien
ggaaagcgacgtctcccatgctttc

SEQ ID NO: 2575928 - DNA, 25 bp, Homo sapien
ggtccgaaggagacccaagctcttg

SEQ ID NO: 2575929 - DNA, 25 bp, Homo sapien
tgccacggttccacgctgggtggac

SEQ ID NO: 2575930 - DNA, 25 bp, Homo sapien
cgggatccaagagccgccgttgcag

SEQ ID NO: 2575931 - DNA, 25 bp, Homo sapien
tcgtgtgcaggtccgaaggagaccc

SEQ ID NO: 2575932 - DNA, 25 bp, Homo sapien
cgcactcaagattcgtaggagggcg

SEQ ID NO: 2575933 - DNA, 25 bp, Homo sapien
cggtgagaacaccaaggaagcgcac

SEQ ID NO: 2575934 - DNA, 25 bp, Homo sapien
ggcgatatccacatcggcggtgagc

SEQ ID NO: 2575935 - DNA, 25 bp, Homo sapien
gtccctggcggcgatatccacatcg

SEQ ID NO: 2575936 - DNA, 25 bp, Homo sapien
cgagggccccgcatgtggagaaatc

SEQ ID NO: 2575937 - DNA, 25 bp, Homo sapien
tgcgcgaacccagccgccggatagc

SEQ ID NO: 2575938 - DNA, 25 bp, Homo sapien
accactgtatgtcccccgccacata

SEQ ID NO: 2575939 - DNA, 25 bp, Homo sapien
tcagcggagccgaagtgtggtggac

SEQ ID NO: 2575940 - DNA, 25 bp, Homo sapien
caagtctggagttggctggttcaag

SEQ ID NO: 2575941 - DNA, 25 bp, Homo sapien
ttgttctgcaaaagacggtggctcc

SEQ ID NO: 2575942 - DNA, 25 bp, Homo sapien
cggtggctccgcctagcattggatg

SEQ ID NO: 2575943 - DNA, 25 bp, Homo sapien
gagggtcgactgtccgtatgtcgca

SEQ ID NO: 2575944 - DNA, 25 bp, Homo sapien
ctgagagcggttacgaaggactgaa

SEQ ID NO: 2575945 - DNA, 25 bp, Homo sapien
gaactaagatgtcactccaggcgct

SEQ ID NO: 2575946 - DNA, 25 bp, Homo sapien
ttcagagcacttgggatgaggttcc

SEQ ID NO: 2575947 - DNA, 25 bp, Homo sapien
cctgatgggtcttgggagcgaacta

SEQ ID NO: 2575948 - DNA, 25 bp, Homo sapien
gagccctgcggccacttagtgttaa

SEQ ID NO: 2575949 - DNA, 25 bp, Homo sapien
tgcaggcctcggtgaacatgagcaa

SEQ ID NO: 2575950 - DNA, 25 bp, Homo sapien
ccatcattgcgactgtaaggagaac

SEQ ID NO: 2575951 - DNA, 25 bp, Homo sapien
tagtgttaaaagagctcacggcggc

SEQ ID NO: 2575952 - DNA, 25 bp, Homo sapien
tcaggggaaagcgcggacgcagtcc

SEQ ID NO: 2575953 - DNA, 25 bp, Homo sapien
agtgcaatggataagcctcgccctg

SEQ ID NO: 2575954 - DNA, 25 bp, Homo sapien
catccggagtgcaatggataagcct

SEQ ID NO: 2575955 - DNA, 25 bp, Homo sapien
gacgcagtcccccactaccacaaat

SEQ ID NO: 2575956 - DNA, 25 bp, Homo sapien
cagctcattatgaaaggcatccttt

SEQ ID NO: 2575957 - DNA, 25 bp, Homo sapien
tgtttccagtaagcgacatctccag

SEQ ID NO: 2575958 - DNA, 25 bp, Homo sapien
tcctttattaatttggagctcttca

SEQ ID NO: 2575959 - DNA, 25 bp, Homo sapien
ccagtttataggcatagtttttgat

SEQ ID NO: 2575960 - DNA, 25 bp, Homo sapien
ctttcagttaacagccgaacgcgct

SEQ ID NO: 2575961 - DNA, 25 bp, Homo sapien
ttcagttaacagccgaacgcgctaa

SEQ ID NO: 2575962 - DNA, 25 bp, Homo sapien
cagttaacagccgaacgcgctaacc

SEQ ID NO: 2575963 - DNA, 25 bp, Homo sapien
cgcgctaaccgattgcgccacagag

SEQ ID NO: 2575964 - DNA, 25 bp, Homo sapien
gaactactgcttttactgtgcgcta

SEQ ID NO: 2575965 - DNA, 25 bp, Homo sapien
tgcgctatgggaagggcgccttcaa

SEQ ID NO: 2575966 - DNA, 25 bp, Homo sapien
accggagcgattagagcggtgaatc

SEQ ID NO: 2575967 - DNA, 25 bp, Homo sapien
ctcagggcttgtccggcaggatgac

SEQ ID NO: 2575968 - DNA, 25 bp, Homo sapien
cacaccttaccaggatgaggatctc

SEQ ID NO: 2575969 - DNA, 25 bp, Homo sapien
caggtggcactgatgagatggagca

SEQ ID NO: 2575970 - DNA, 25 bp, Homo sapien
taggtccttctcagaataggcagaa

SEQ ID NO: 2575971 - DNA, 25 bp, Homo sapien
acattcccacaccttaccaggatga

SEQ ID NO: 2575972 - DNA, 25 bp, Homo sapien
gctggccgtgaccagcggttccagg

SEQ ID NO: 2575973 - DNA, 25 bp, Homo sapien
agcggttccaggtgacgctgccctg

SEQ ID NO: 2575974 - DNA, 25 bp, Homo sapien
gggctggccgtgaccagcggttcca

SEQ ID NO: 2575975 - DNA, 25 bp, Homo sapien
ccagcggttccaggtgacgctgccc

SEQ ID NO: 2575976 - DNA, 25 bp, Homo sapien
agggcacatgtgcctccgttgcgca

SEQ ID NO: 2575977 - DNA, 25 bp, Homo sapien
gggcacatgtgcctccgttgcgcac

SEQ ID NO: 2575978 - DNA, 25 bp, Homo sapien
taactcgtatttgctactttagagg

SEQ ID NO: 2575979 - DNA, 25 bp, Homo sapien
ttgctactttagaggaaccatttat

SEQ ID NO: 2575980 - DNA, 25 bp, Homo sapien
tttccacgtaactcgtatttgctac

SEQ ID NO: 2575981 - DNA, 25 bp, Homo sapien
tgccattttccacgtaactcgtatt

SEQ ID NO: 2575982 - DNA, 25 bp, Homo sapien
gaagcttctgttgcccgggtaagcc

SEQ ID NO: 2575983 - DNA, 25 bp, Homo sapien
ggtcagggattttaggatacagtcc

SEQ ID NO: 2575984 - DNA, 25 bp, Homo sapien
gccttcactgacgtgcacagagctg

SEQ ID NO: 2575985 - DNA, 25 bp, Homo sapien
gatacagtcccgaagcttctgttgc

SEQ ID NO: 2575986 - DNA, 25 bp, Homo sapien
taggaaggactgagttcattttcag

SEQ ID NO: 2575987 - DNA, 25 bp, Homo sapien
gataggaaggactgagttcattttc

SEQ ID NO: 2575988 - DNA, 25 bp, Homo sapien
ataggaaggactgagttcattttca

SEQ ID NO: 2575989 - DNA, 25 bp, Homo sapien
tgaatgttgtcacagacctgccggg

SEQ ID NO: 2575990 - DNA, 25 bp, Homo sapien
ggaatccagctagacccgcagggct

SEQ ID NO: 2575991 - DNA, 25 bp, Homo sapien
ttgacaaagagccttagtgaatctg

SEQ ID NO: 2575992 - DNA, 25 bp, Homo sapien
cctcagatatgagcgtggtgtctgt

SEQ ID NO: 2575993 - DNA, 25 bp, Homo sapien
tctaacggttctggccattctgctg

SEQ ID NO: 2575994 - DNA, 25 bp, Homo sapien
aggatggcacaatctggtgccagaa

SEQ ID NO: 2575995 - DNA, 25 bp, Homo sapien
tcttggaactgctgtgtagtgcccg

SEQ ID NO: 2575996 - DNA, 25 bp, Homo sapien
tgtagtgcccgcctgaggcctctga

SEQ ID NO: 2575997 - DNA, 25 bp, Homo sapien
gcacaatctggtgccagaaatagga

SEQ ID NO: 2575998 - DNA, 25 bp, Homo sapien
tgcctaggggcactcgatgtgaggg

SEQ ID NO: 2575999 - DNA, 25 bp, Homo sapien
tggggggtgcctaggggcactcgat

SEQ ID NO: 2576000 - DNA, 25 bp, Homo sapien
ggtgcctaggggcactcgatgtgag

SEQ ID NO: 2576001 - DNA, 25 bp, Homo sapien
ctaggggcactcgatgtgaggggca

SEQ ID NO: 2576002 - DNA, 25 bp, Homo sapien
ccagcagtgcacacgtgaggatgat

SEQ ID NO: 2576003 - DNA, 25 bp, Homo sapien
tgtgaacatacatgtatctgccacc

SEQ ID NO: 2576004 - DNA, 25 bp, Homo sapien
tgaacatacatgtatctgccaccat

SEQ ID NO: 2576005 - DNA, 25 bp, Homo sapien
gctgccatgaacatacgtgcacctt

SEQ ID NO: 2576006 - DNA, 25 bp, Homo sapien
catacgtgcaccttctgctgtgaac

SEQ ID NO: 2576007 - DNA, 25 bp, Homo sapien
cggccgccgtgtctgcaaaggcctg

SEQ ID NO: 2576008 - DNA, 25 bp, Homo sapien
cagggaggagccggaggtgcccagg

SEQ ID NO: 2576009 - DNA, 25 bp, Homo sapien
ggtgctcggccgccgtgtctgcaaa

SEQ ID NO: 2576010 - DNA, 25 bp, Homo sapien
ggaaaagccacgctactgtccccca

SEQ ID NO: 2576011 - DNA, 25 bp, Homo sapien
acttgtggccccgtgatgctgcagg

SEQ ID NO: 2576012 - DNA, 25 bp, Homo sapien
cccgacttgtggccccgtgatgctg

SEQ ID NO: 2576013 - DNA, 25 bp, Homo sapien
tgtggccccgtgatgctgcagggac

SEQ ID NO: 2576014 - DNA, 25 bp, Homo sapien
cgacttgtggccccgtgatgctgca

SEQ ID NO: 2576015 - DNA, 25 bp, Homo sapien
ccagggagcccgcagcaggcaggtc

SEQ ID NO: 2576016 - DNA, 25 bp, Homo sapien
agggagcccgcagcaggcaggtcac

SEQ ID NO: 2576017 - DNA, 25 bp, Homo sapien
cagggagcccgcagcaggcaggtca

SEQ ID NO: 2576018 - DNA, 25 bp, Homo sapien
tctgttgtggcctcagcagcgactc

SEQ ID NO: 2576019 - DNA, 25 bp, Homo sapien
gggttgcagtggttccgctcagggc

SEQ ID NO: 2576020 - DNA, 25 bp, Homo sapien
caggaggccggacccctgtcttggt

SEQ ID NO: 2576021 - DNA, 25 bp, Homo sapien
ttggtggacgctcggccgcagccct

SEQ ID NO: 2576022 - DNA, 25 bp, Homo sapien
gatgctgtttccccgcacgcggctg

SEQ ID NO: 2576023 - DNA, 25 bp, Homo sapien
gctgtttccccgcacgcggctgctc

SEQ ID NO: 2576024 - DNA, 25 bp, Homo sapien
atgctgtttccccgcacgcggctgc

SEQ ID NO: 2576025 - DNA, 25 bp, Homo sapien
tgctgtttccccgcacgcggctgct

SEQ ID NO: 2576026 - DNA, 25 bp, Homo sapien
taaatgagtgcaattccgggtccac

SEQ ID NO: 2576027 - DNA, 25 bp, Homo sapien
ccacataaatgagtgcaattccggg

SEQ ID NO: 2576028 - DNA, 25 bp, Homo sapien
cataaatgagtgcaattccgggtcc

SEQ ID NO: 2576029 - DNA, 25 bp, Homo sapien
atgagtgcaattccgggtccacccg

SEQ ID NO: 2576030 - DNA, 25 bp, Homo sapien
gaagcagagcctggcggccacgtcg

SEQ ID NO: 2576031 - DNA, 25 bp, Homo sapien
agcagagcctggcggccacgtcggc

SEQ ID NO: 2576032 - DNA, 25 bp, Homo sapien
ctgtgcacggggaagcagagcctgg

SEQ ID NO: 2576033 - DNA, 25 bp, Homo sapien
cagagcctggcggccacgtcggcct

SEQ ID NO: 2576034 - DNA, 25 bp, Homo sapien
gcatgggaggccgggtctgctcagc

SEQ ID NO: 2576035 - DNA, 25 bp, Homo sapien
gaacggagaaaggaatcatgagcag

SEQ ID NO: 2576036 - DNA, 25 bp, Homo sapien
gaaaggaatcatgagcagtggttcc

SEQ ID NO: 2576037 - DNA, 25 bp, Homo sapien
acggagaaaggaatcatgagcagtg

SEQ ID NO: 2576038 - DNA, 25 bp, Homo sapien
aatcatgagcagtggttccgggagg

SEQ ID NO: 2576039 - DNA, 25 bp, Homo sapien
tgcacccagggtgtgtgtttggcac

SEQ ID NO: 2576040 - DNA, 25 bp, Homo sapien
tggagaagtgtggacgaaacccagt

SEQ ID NO: 2576041 - DNA, 25 bp, Homo sapien
caatgagtttatcaaaagcaggaca

SEQ ID NO: 2576042 - DNA, 25 bp, Homo sapien
tgccgttgtgtaaactgtgcttgca

SEQ ID NO: 2576043 - DNA, 25 bp, Homo sapien
acaggcaatggcccgatcaggcctc

SEQ ID NO: 2576044 - DNA, 25 bp, Homo sapien
cgggcccataagtcctcctggaaat

SEQ ID NO: 2576045 - DNA, 25 bp, Homo sapien
taggcgctgtgtgaaaagtccagtg

SEQ ID NO: 2576046 - DNA, 25 bp, Homo sapien
cagcagaagtgccttcacaacgggc

SEQ ID NO: 2576047 - DNA, 25 bp, Homo sapien
cctagagcccatgtgaacttcctgg

SEQ ID NO: 2576048 - DNA, 25 bp, Homo sapien
ctagagcccatgtgaacttcctggc

SEQ ID NO: 2576049 - DNA, 25 bp, Homo sapien
tccacgggccggagtgggagaagag

SEQ ID NO: 2576050 - DNA, 25 bp, Homo sapien
gtgctcccttccacgggccggagtg

SEQ ID NO: 2576051 - DNA, 25 bp, Homo sapien
ccgctgcacctggaagctgagtgct

SEQ ID NO: 2576052 - DNA, 25 bp, Homo sapien
cacctggaagctgagtgctcccttc

SEQ ID NO: 2576053 - DNA, 25 bp, Homo sapien
cagtggagacgccttttatccactc

SEQ ID NO: 2576054 - DNA, 25 bp, Homo sapien
aagccacagtggagacgccttttat

SEQ ID NO: 2576055 - DNA, 25 bp, Homo sapien
gtggagacgccttttatccactcac

SEQ ID NO: 2576056 - DNA, 25 bp, Homo sapien
tggaagccacagtggagacgccttt

SEQ ID NO: 2576057 - DNA, 25 bp, Homo sapien
ctcaccagttcacaatcccccagtg

SEQ ID NO: 2576058 - DNA, 25 bp, Homo sapien
gtagggagaccttgagtctttggca

SEQ ID NO: 2576059 - DNA, 25 bp, Homo sapien
gccgtgacaacaggcggcagacagt

SEQ ID NO: 2576060 - DNA, 25 bp, Homo sapien
ccttgagtctttggcaaagaccttg

SEQ ID NO: 2576061 - DNA, 25 bp, Homo sapien
tagccccgtggcttgtctgtgcgct

SEQ ID NO: 2576062 - DNA, 25 bp, Homo sapien
gcgacggccgcgtgatggtcacgac

SEQ ID NO: 2576063 - DNA, 25 bp, Homo sapien
gggctccgtagccccgtggcttgtc

SEQ ID NO: 2576064 - DNA, 25 bp, Homo sapien
ggaggtcctccacggcgggacgctg

SEQ ID NO: 2576065 - DNA, 25 bp, Homo sapien
ctggctctgccttctgcatcctggt

SEQ ID NO: 2576066 - DNA, 25 bp, Homo sapien
tgctggctctgccttctgcatcctg

SEQ ID NO: 2576067 - DNA, 25 bp, Homo sapien
gctggctctgccttctgcatcctgg

SEQ ID NO: 2576068 - DNA, 25 bp, Homo sapien
ctgctggctctgccttctgcatcct

SEQ ID NO: 2576069 - DNA, 25 bp, Homo sapien
cagtgaatacgccccaggtcccagc

SEQ ID NO: 2576070 - DNA, 25 bp, Homo sapien
acacagtgaatacgccccaggtccc

SEQ ID NO: 2576071 - DNA, 25 bp, Homo sapien
ctacacagtgaatacgccccaggtc

SEQ ID NO: 2576072 - DNA, 25 bp, Homo sapien
acagtgaatacgccccaggtcccag

SEQ ID NO: 2576073 - DNA, 25 bp, Homo sapien
tctgtgagtgcatctccgagtaggg

SEQ ID NO: 2576074 - DNA, 25 bp, Homo sapien
caaaggaacagcgtgaacggaatgc

SEQ ID NO: 2576075 - DNA, 25 bp, Homo sapien
tgaacggaatgcagagcagacgctg

SEQ ID NO: 2576076 - DNA, 25 bp, Homo sapien
gcagacgctgatcgagctggattcc

SEQ ID NO: 2576077 - DNA, 25 bp, Homo sapien
cactcgccgggctgtatctaaggtc

SEQ ID NO: 2576078 - DNA, 25 bp, Homo sapien
tggagtcgtcacaccactggagggt

SEQ ID NO: 2576079 - DNA, 25 bp, Homo sapien
tgaaagcgcttccactgtccaagag

SEQ ID NO: 2576080 - DNA, 25 bp, Homo sapien
tgttcacacgagaagtaagccagct

SEQ ID NO: 2576081 - DNA, 25 bp, Homo sapien
agcaggtactggacaccaccgccgt

SEQ ID NO: 2576082 - DNA, 25 bp, Homo sapien
caccgccgtccaggcatcccgggac

SEQ ID NO: 2576083 - DNA, 25 bp, Homo sapien
tgctcaggtagcagaacccagacgt

SEQ ID NO: 2576084 - DNA, 25 bp, Homo sapien
aggctgtgctcaggtagcagaaccc

SEQ ID NO: 2576085 - DNA, 25 bp, Homo sapien
gaccacggcagtgccatggaagcag

SEQ ID NO: 2576086 - DNA, 25 bp, Homo sapien
gatggtgaccacaggctccggcacg

SEQ ID NO: 2576087 - DNA, 25 bp, Homo sapien
atcagggccgagcaccccgctgtgt

SEQ ID NO: 2576088 - DNA, 25 bp, Homo sapien
cgctgtgtgcaacacagggccggat

SEQ ID NO: 2576089 - DNA, 25 bp, Homo sapien
acaggtggaagaggacgtgcacatg

SEQ ID NO: 2576090 - DNA, 25 bp, Homo sapien
aggacgtgcacatgggccgagtccc

SEQ ID NO: 2576091 - DNA, 25 bp, Homo sapien
ggtccccggacagtgaccgcactgg

SEQ ID NO: 2576092 - DNA, 25 bp, Homo sapien
gccccagatgcgcatcttcaccagc

SEQ ID NO: 2576093 - DNA, 25 bp, Homo sapien
cctgctgaggaagggctgctcgccc

SEQ ID NO: 2576094 - DNA, 25 bp, Homo sapien
tgcaagaccagcctgctgaggaagg

SEQ ID NO: 2576095 - DNA, 25 bp, Homo sapien
ctgcaggatgtgcaagaccagcctg

SEQ ID NO: 2576096 - DNA, 25 bp, Homo sapien
gaagggctgctcgcccgggggcctc

SEQ ID NO: 2576097 - DNA, 25 bp, Homo sapien
ggttcagccgacacatgcacatcag

SEQ ID NO: 2576098 - DNA, 25 bp, Homo sapien
cagaagacgcacacggtcatggaca

SEQ ID NO: 2576099 - DNA, 25 bp, Homo sapien
tggtaatagccttgggagaagcagc

SEQ ID NO: 2576100 - DNA, 25 bp, Homo sapien
gatccagaagtcctcgtagggctcg

SEQ ID NO: 2576101 - DNA, 25 bp, Homo sapien
cagaggcgagggttgcctgaacttc

SEQ ID NO: 2576102 - DNA, 25 bp, Homo sapien
gaggcgagggttgcctgaacttcgg

SEQ ID NO: 2576103 - DNA, 25 bp, Homo sapien
cgagggttgcctgaacttcggggcg

SEQ ID NO: 2576104 - DNA, 25 bp, Homo sapien
ggggggtgtctcagaggcgaggcgg

SEQ ID NO: 2576105 - DNA, 25 bp, Homo sapien
tgaggcggggtctcagaggcagggc

SEQ ID NO: 2576106 - DNA, 25 bp, Homo sapien
gcggggcgggcatctcaaaggtggg

SEQ ID NO: 2576107 - DNA, 25 bp, Homo sapien
aggcggggcgggcatctcaaaggtg

SEQ ID NO: 2576108 - DNA, 25 bp, Homo sapien
tgtctcagaggtgaggcggggtctc

SEQ ID NO: 2576109 - DNA, 25 bp, Homo sapien
gcctcggaggtgaagcggggtctcg

SEQ ID NO: 2576110 - DNA, 25 bp, Homo sapien
ggcctcggaggtgaagcggggtctc

SEQ ID NO: 2576111 - DNA, 25 bp, Homo sapien
agacccacaaaaccaggggcaagag

SEQ ID NO: 2576112 - DNA, 25 bp, Homo sapien
cagacccacaaaaccaggggcaaga

SEQ ID NO: 2576113 - DNA, 25 bp, Homo sapien
gggctgagctgctggcgggggcggg

SEQ ID NO: 2576114 - DNA, 25 bp, Homo sapien
gacccacaaaaccaggggcaagaga

SEQ ID NO: 2576115 - DNA, 25 bp, Homo sapien
gttacacacataggaagaggctgga

SEQ ID NO: 2576116 - DNA, 25 bp, Homo sapien
ggttttattgaagttacacacatag

SEQ ID NO: 2576117 - DNA, 25 bp, Homo sapien
tattgaagttacacacataggaaga

SEQ ID NO: 2576118 - DNA, 25 bp, Homo sapien
gaagttacacacataggaagaggct

SEQ ID NO: 2576119 - DNA, 25 bp, Homo sapien
taaggcagttccatttgcattggca

SEQ ID NO: 2576120 - DNA, 25 bp, Homo sapien
catttgcattggcaatggtcatttc

SEQ ID NO: 2576121 - DNA, 25 bp, Homo sapien
gcaatggtcatttcactacttctga

SEQ ID NO: 2576122 - DNA, 25 bp, Homo sapien
gtcctaaggcagttccatttgcatt

SEQ ID NO: 2576123 - DNA, 25 bp, Homo sapien
ggccccagtgaaggcgcagagggca

SEQ ID NO: 2576124 - DNA, 25 bp, Homo sapien
tgggccccagtgaaggcgcagaggg

SEQ ID NO: 2576125 - DNA, 25 bp, Homo sapien
gattcagttacttggctgggcccca

SEQ ID NO: 2576126 - DNA, 25 bp, Homo sapien
ctcctggctggattcagttacttgg

SEQ ID NO: 2576127 - DNA, 25 bp, Homo sapien
cagctaaaagaccaacagaggtgta

SEQ ID NO: 2576128 - DNA, 25 bp, Homo sapien
catgtgcaaagcagggattgtcacc

SEQ ID NO: 2576129 - DNA, 25 bp, Homo sapien
taaacatatggcaactgtaacagga

SEQ ID NO: 2576130 - DNA, 25 bp, Homo sapien
cccacgtaagatacaaagacaggtt

SEQ ID NO: 2576131 - DNA, 25 bp, Homo sapien
ccagtgctggacctgcgttcctcca

SEQ ID NO: 2576132 - DNA, 25 bp, Homo sapien
gggctgctaggctggtaagaggtca

SEQ ID NO: 2576133 - DNA, 25 bp, Homo sapien
acccctgccgtgacagggtagccag

SEQ ID NO: 2576134 - DNA, 25 bp, Homo sapien
tgacagggtagccagtgctggacct

SEQ ID NO: 2576135 - DNA, 25 bp, Homo sapien
actgcttaagggctgcagccttgaa

SEQ ID NO: 2576136 - DNA, 25 bp, Homo sapien
aaaattacagcctcagaaagcacgc

SEQ ID NO: 2576137 - DNA, 25 bp, Homo sapien
aggattatccagctgaacacccagg

SEQ ID NO: 2576138 - DNA, 25 bp, Homo sapien
gctgtactgcttaagggctgcagcc

SEQ ID NO: 2576139 - DNA, 25 bp, Homo sapien
gggccacaaagagatcaacactggg

SEQ ID NO: 2576140 - DNA, 25 bp, Homo sapien
ggcctcaggaagagcggtggtgcag

SEQ ID NO: 2576141 - DNA, 25 bp, Homo sapien
cgggggatgcgttgctgtgggcaca

SEQ ID NO: 2576142 - DNA, 25 bp, Homo sapien
aaagagatcaacactgggcctcagg

SEQ ID NO: 2576143 - DNA, 25 bp, Homo sapien
gggttactgaagggcattgaggcag

SEQ ID NO: 2576144 - DNA, 25 bp, Homo sapien
cgggcagtcgctctgaagaggaaat

SEQ ID NO: 2576145 - DNA, 25 bp, Homo sapien
atttgcacaacagaagtgggttact

SEQ ID NO: 2576146 - DNA, 25 bp, Homo sapien
tctcgggcagtcgctctgaagagga

SEQ ID NO: 2576147 - DNA, 25 bp, Homo sapien
cgtgctccagaactgccggacttgg

SEQ ID NO: 2576148 - DNA, 25 bp, Homo sapien
agagcctttccctacagagccaaaa

SEQ ID NO: 2576149 - DNA, 25 bp, Homo sapien
tctaaggaagatcagacgtggaacc

SEQ ID NO: 2576150 - DNA, 25 bp, Homo sapien
cagaaccaattaaaccaggaggaca

SEQ ID NO: 2576151 - DNA, 25 bp, Homo sapien
tctgcggtaagactcagacacgctc

SEQ ID NO: 2576152 - DNA, 25 bp, Homo sapien
tgcggtaagactcagacacgctcac

SEQ ID NO: 2576153 - DNA, 25 bp, Homo sapien
tttctgcggtaagactcagacacgc

SEQ ID NO: 2576154 - DNA, 25 bp, Homo sapien
atgtttctgcggtaagactcagaca

SEQ ID NO: 2576155 - DNA, 25 bp, Homo sapien
catctccccagtcgtagatgttgat

SEQ ID NO: 2576156 - DNA, 25 bp, Homo sapien
tctccccagtcgtagatgttgatgc

SEQ ID NO: 2576157 - DNA, 25 bp, Homo sapien
ccccagtcgtagatgttgatgcggt

SEQ ID NO: 2576158 - DNA, 25 bp, Homo sapien
tccccagtcgtagatgttgatgcgg

SEQ ID NO: 2576159 - DNA, 25 bp, Homo sapien
tagccgaggccggttctgacacctg

SEQ ID NO: 2576160 - DNA, 25 bp, Homo sapien
agaggccagacggtcaagaacctgg

SEQ ID NO: 2576161 - DNA, 25 bp, Homo sapien
tgttggagccgagattcacctcctg

SEQ ID NO: 2576162 - DNA, 25 bp, Homo sapien
caagctgcaactacgctggacaggt

SEQ ID NO: 2576163 - DNA, 25 bp, Homo sapien
tccaccttgtgcattctgtgcgctg

SEQ ID NO: 2576164 - DNA, 25 bp, Homo sapien
agctgctggttctcaccggcgtctt

SEQ ID NO: 2576165 - DNA, 25 bp, Homo sapien
ttgtgcattctgtgcgctgcggcat

SEQ ID NO: 2576166 - DNA, 25 bp, Homo sapien
tgcacgcagcggtttttctgaagca

SEQ ID NO: 2576167 - DNA, 25 bp, Homo sapien
ctattttctagatcgacaatcataa

SEQ ID NO: 2576168 - DNA, 25 bp, Homo sapien
gggacccctgagagaactgatacga

SEQ ID NO: 2576169 - DNA, 25 bp, Homo sapien
tctagatcgacaatcataattaaag

SEQ ID NO: 2576170 - DNA, 25 bp, Homo sapien
gaactgatacgacactgtatgtgct

SEQ ID NO: 2576171 - DNA, 25 bp, Homo sapien
gactcagcctcgttaagagcccttg

SEQ ID NO: 2576172 - DNA, 25 bp, Homo sapien
gccccttgggacaaaagtgttcatc

SEQ ID NO: 2576173 - DNA, 25 bp, Homo sapien
ggtaagcccttgctcggtcatgtgg

SEQ ID NO: 2576174 - DNA, 25 bp, Homo sapien
tcgtttcgaggatggaagtcactct

SEQ ID NO: 2576175 - DNA, 25 bp, Homo sapien
tgtgtaggaagctgctccactttca

SEQ ID NO: 2576176 - DNA, 25 bp, Homo sapien
ctgtgtaggaagctgctccactttc

SEQ ID NO: 2576177 - DNA, 25 bp, Homo sapien
gtgtaggaagctgctccactttcat

SEQ ID NO: 2576178 - DNA, 25 bp, Homo sapien
tccagattccatggtgagggtgccc

SEQ ID NO: 2576179 - DNA, 25 bp, Homo sapien
tcatgtctgcaggtggttagctcca

SEQ ID NO: 2576180 - DNA, 25 bp, Homo sapien
cacccagaggattagctgacacagc

SEQ ID NO: 2576181 - DNA, 25 bp, Homo sapien
gagaataaagcgtaacacccagagg

SEQ ID NO: 2576182 - DNA, 25 bp, Homo sapien
gtggttgactgcacagccgctgcag

SEQ ID NO: 2576183 - DNA, 25 bp, Homo sapien
tgcatgtggttgactgcacagccgc

SEQ ID NO: 2576184 - DNA, 25 bp, Homo sapien
catgtggttgactgcacagccgctg

SEQ ID NO: 2576185 - DNA, 25 bp, Homo sapien
tgtggttgactgcacagccgctgca

SEQ ID NO: 2576186 - DNA, 25 bp, Homo sapien
gtggttgactgcacagccgctgcag

SEQ ID NO: 2576187 - DNA, 25 bp, Homo sapien
tgtggttgactgcacagccgctgca

SEQ ID NO: 2576188 - DNA, 25 bp, Homo sapien
tgcatgtggttgactgcacagccgc

SEQ ID NO: 2576189 - DNA, 25 bp, Homo sapien
catgtggttgactgcacagccgctg

SEQ ID NO: 2576190 - DNA, 25 bp, Homo sapien
agagaacgatgggtacccagcagca

SEQ ID NO: 2576191 - DNA, 25 bp, Homo sapien
tcagtgggagtccacctctcctcca

SEQ ID NO: 2576192 - DNA, 25 bp, Homo sapien
aggagagaacgatgggtacccagca

SEQ ID NO: 2576193 - DNA, 25 bp, Homo sapien
tgcaccaggagagaacgatgggtac

SEQ ID NO: 2576194 - DNA, 25 bp, Homo sapien
tcaccaacagactttcctggaacga

SEQ ID NO: 2576195 - DNA, 25 bp, Homo sapien
ggactgtgcatctggagccccagaa

SEQ ID NO: 2576196 - DNA, 25 bp, Homo sapien
cctggaacgatgtaggactgtgcat

SEQ ID NO: 2576197 - DNA, 25 bp, Homo sapien
caatgtgggcttcccaccctcacct

SEQ ID NO: 2576198 - DNA, 25 bp, Homo sapien
ctccactgctcaggcggaggtgagc

SEQ ID NO: 2576199 - DNA, 25 bp, Homo sapien
gccttctccactgctcaggcggagg

SEQ ID NO: 2576200 - DNA, 25 bp, Homo sapien
gccccaccagagtgccgccttctcc

SEQ ID NO: 2576201 - DNA, 25 bp, Homo sapien
gagcagccccaccagagtgccgcct

SEQ ID NO: 2576202 - DNA, 25 bp, Homo sapien
cagacgactggccagggcgcctgtg

SEQ ID NO: 2576203 - DNA, 25 bp, Homo sapien
ttgtagcaccgcccagacgactggc

SEQ ID NO: 2576204 - DNA, 25 bp, Homo sapien
gccgccagcccagttgtagcaccgc

SEQ ID NO: 2576205 - DNA, 25 bp, Homo sapien
ctaagaaccatcctggccgccagcc

SEQ ID NO: 2576206 - DNA, 25 bp, Homo sapien
ccacaggtcccatgccacagggttc

SEQ ID NO: 2576207 - DNA, 25 bp, Homo sapien
gtcccatgccacagggttccccaaa

SEQ ID NO: 2576208 - DNA, 25 bp, Homo sapien
aggtcccatgccacagggttcccca

SEQ ID NO: 2576209 - DNA, 25 bp, Homo sapien
ccatgccacagggttccccaaacat

SEQ ID NO: 2576210 - DNA, 25 bp, Homo sapien
cagttcccccagaaagggctgtttg

SEQ ID NO: 2576211 - DNA, 25 bp, Homo sapien
aggccagttcccccagaaagggctg

SEQ ID NO: 2576212 - DNA, 25 bp, Homo sapien
tgaggccagttcccccagaaagggc

SEQ ID NO: 2576213 - DNA, 25 bp, Homo sapien
cgttgaggccagttcccccagaaag

SEQ ID NO: 2576214 - DNA, 25 bp, Homo sapien
ttgtgtgacacggaagcggcagtcc

SEQ ID NO: 2576215 - DNA, 25 bp, Homo sapien
gctcatgtggaagtcacgcccgttg

SEQ ID NO: 2576216 - DNA, 25 bp, Homo sapien
tagcacgaagctctccgatgtgttg

SEQ ID NO: 2576217 - DNA, 25 bp, Homo sapien
gctcatgcggtaccagtttagcacg

SEQ ID NO: 2576218 - DNA, 25 bp, Homo sapien
gggagcagatgacggccaggaccca

SEQ ID NO: 2576219 - DNA, 25 bp, Homo sapien
aggacccagactagcagcaccaggc

SEQ ID NO: 2576220 - DNA, 25 bp, Homo sapien
cagggtttggaactggccggctggc

SEQ ID NO: 2576221 - DNA, 25 bp, Homo sapien
aggccgcccacgacaccaaccacca

SEQ ID NO: 2576222 - DNA, 25 bp, Homo sapien
ccggtgcgcctggctcctattgtcc

SEQ ID NO: 2576223 - DNA, 25 bp, Homo sapien
gccggtgcgcctggctcctattgtc

SEQ ID NO: 2576224 - DNA, 25 bp, Homo sapien
ggccggtgcgcctggctcctattgt

SEQ ID NO: 2576225 - DNA, 25 bp, Homo sapien
tccggggtcttctctcgccactgga

SEQ ID NO: 2576226 - DNA, 25 bp, Homo sapien
gggtcttctctcgccactggaaatc

SEQ ID NO: 2576227 - DNA, 25 bp, Homo sapien
acagagaacacaggcacggctgagg

SEQ ID NO: 2576228 - DNA, 25 bp, Homo sapien
agctccccatagtccacagagaaca

SEQ ID NO: 2576229 - DNA, 25 bp, Homo sapien
ttccgctaggaaagacaatggtggc

SEQ ID NO: 2576230 - DNA, 25 bp, Homo sapien
ggatgaggtgcccattccgctagga

SEQ ID NO: 2576231 - DNA, 25 bp, Homo sapien
gaggtgcccattccgctaggaaaga

SEQ ID NO: 2576232 - DNA, 25 bp, Homo sapien
gcccattccgctaggaaagacaatg

SEQ ID NO: 2576233 - DNA, 25 bp, Homo sapien
gagcagtgtccatcctcaggcctca

SEQ ID NO: 2576234 - DNA, 25 bp, Homo sapien
cagaggggccaagagcagtgtccat

SEQ ID NO: 2576235 - DNA, 25 bp, Homo sapien
ggccaagagcagtgtccatcctcag

SEQ ID NO: 2576236 - DNA, 25 bp, Homo sapien
gcagtgtccatcctcaggcctcagt

SEQ ID NO: 2576237 - DNA, 25 bp, Homo sapien
tgcagaacactggtggccaaggaag

SEQ ID NO: 2576238 - DNA, 25 bp, Homo sapien
ctgcagaacactggtggccaaggaa

SEQ ID NO: 2576239 - DNA, 25 bp, Homo sapien
cagaacactggtggccaaggaagcc

SEQ ID NO: 2576240 - DNA, 25 bp, Homo sapien
gaacactggtggccaaggaagccgg

SEQ ID NO: 2576241 - DNA, 25 bp, Homo sapien
gaaatgcgctgacccgggctcatgg

SEQ ID NO: 2576242 - DNA, 25 bp, Homo sapien
cattgagacatgagtcctgtggtgg

SEQ ID NO: 2576243 - DNA, 25 bp, Homo sapien
tggacggcctgcaatggcctgcacc

SEQ ID NO: 2576244 - DNA, 25 bp, Homo sapien
ctcctgaggaaatgcgctgacccgg

SEQ ID NO: 2576245 - DNA, 25 bp, Homo sapien
aagcagtgactgcatctggccctcc

SEQ ID NO: 2576246 - DNA, 25 bp, Homo sapien
agggcgtttcgggatgccactgcca

SEQ ID NO: 2576247 - DNA, 25 bp, Homo sapien
ctgcagggagcagataactcctggg

SEQ ID NO: 2576248 - DNA, 25 bp, Homo sapien
tgtgcccagtcttgggccctgcgtc

SEQ ID NO: 2576249 - DNA, 25 bp, Homo sapien
gaatgggttccaaggagagctccca

SEQ ID NO: 2576250 - DNA, 25 bp, Homo sapien
taggatgtccctctcccgagtggtg

SEQ ID NO: 2576251 - DNA, 25 bp, Homo sapien
cctgaccttgggaccgtaggatgtc

SEQ ID NO: 2576252 - DNA, 25 bp, Homo sapien
ccacaaagggcctgaggtgctgcct

SEQ ID NO: 2576253 - DNA, 25 bp, Homo sapien
tttggctgcggtgcccgagggcctg

SEQ ID NO: 2576254 - DNA, 25 bp, Homo sapien
cgggagttcccagagctgcgaggtc

SEQ ID NO: 2576255 - DNA, 25 bp, Homo sapien
tgggtgtttggctgcggtgcccgag

SEQ ID NO: 2576256 - DNA, 25 bp, Homo sapien
agagctgcgaggtctctgtgcctgt

SEQ ID NO: 2576257 - DNA, 25 bp, Homo sapien
gcgcgctgcgctgtcaatggatgaa

SEQ ID NO: 2576258 - DNA, 25 bp, Homo sapien
tatgagagccttgagttctggatgc

SEQ ID NO: 2576259 - DNA, 25 bp, Homo sapien
cgcgctgcgctgacaatggatgaat

SEQ ID NO: 2576260 - DNA, 25 bp, Homo sapien
gtgcgctgcgctgtcaatggatgaa

SEQ ID NO: 2576261 - DNA, 25 bp, Homo sapien
atgagagccttgagttctggatgct

SEQ ID NO: 2576262 - DNA, 25 bp, Homo sapien
tttgagagccttgagttctggatgc

SEQ ID NO: 2576263 - DNA, 25 bp, Homo sapien
aatgagagccgtgagttctggatgc

SEQ ID NO: 2576264 - DNA, 25 bp, Homo sapien
gcgcgctgcgctgtcaatggatgaa

SEQ ID NO: 2576265 - DNA, 25 bp, Homo sapien
gcgcgctgcgctgtcaatggatgaa

SEQ ID NO: 2576266 - DNA, 25 bp, Homo sapien
cgcgctgcgctgacaatggatgaat

SEQ ID NO: 2576267 - DNA, 25 bp, Homo sapien
tatgagagccttgagttctggatgc

SEQ ID NO: 2576268 - DNA, 25 bp, Homo sapien
gtgcgctgcgctgtcaatggatgaa

SEQ ID NO: 2576269 - DNA, 25 bp, Homo sapien
caagtgatctgcttgtcctgacctc

SEQ ID NO: 2576270 - DNA, 25 bp, Homo sapien
tgatctgcttgtcctgacctcccaa

SEQ ID NO: 2576271 - DNA, 25 bp, Homo sapien
agtgatctgcttgtcctgacctccc

SEQ ID NO: 2576272 - DNA, 25 bp, Homo sapien
tcaagtgatctgcttgtcctgacct

SEQ ID NO: 2576273 - DNA, 25 bp, Homo sapien
ttcagatctgaagcaaaggagccac

SEQ ID NO: 2576274 - DNA, 25 bp, Homo sapien
cgtgtgtaggtcacatgctgggtac

SEQ ID NO: 2576275 - DNA, 25 bp, Homo sapien
gctcgtggctagcagggtcatcaca

SEQ ID NO: 2576276 - DNA, 25 bp, Homo sapien
ggtacattgtgtcatgcatgtgtcc

SEQ ID NO: 2576277 - DNA, 25 bp, Homo sapien
gtgtagatcacgtgctgggtgcctt

SEQ ID NO: 2576278 - DNA, 25 bp, Homo sapien
tgtagatcacgtgctgggtgccttg

SEQ ID NO: 2576279 - DNA, 25 bp, Homo sapien
ccccagcagtgcggagcgtccaggt

SEQ ID NO: 2576280 - DNA, 25 bp, Homo sapien
gcttcggtgaccactcccaagggtg

SEQ ID NO: 2576281 - DNA, 25 bp, Homo sapien
cagcccccagcagtgcggagcgtcc

SEQ ID NO: 2576282 - DNA, 25 bp, Homo sapien
agcagagatgacctccccttgcggc

SEQ ID NO: 2576283 - DNA, 25 bp, Homo sapien
tgggcgaattctgggatgaccctgt

SEQ ID NO: 2576284 - DNA, 25 bp, Homo sapien
gctgggcgaattctgggatgaccct

SEQ ID NO: 2576285 - DNA, 25 bp, Homo sapien
ctgctgggcgaattctgggatgacc

SEQ ID NO: 2576286 - DNA, 25 bp, Homo sapien
cctgctgggcgaattctgggatgac

SEQ ID NO: 2576287 - DNA, 25 bp, Homo sapien
tccttgctcgaggttttgggtcctc

SEQ ID NO: 2576288 - DNA, 25 bp, Homo sapien
tggcttccacggtgctgtggcctct

SEQ ID NO: 2576289 - DNA, 25 bp, Homo sapien
ctccttgctcgaggttttgggtcct

SEQ ID NO: 2576290 - DNA, 25 bp, Homo sapien
ctcccccgatgacgttcaggaagtg

SEQ ID NO: 2576291 - DNA, 25 bp, Homo sapien
tcccccgatgacgttcaggaagtgg

SEQ ID NO: 2576292 - DNA, 25 bp, Homo sapien
tccaggggtccacggaccagaaggc

SEQ ID NO: 2576293 - DNA, 25 bp, Homo sapien
aggggtccacggaccagaaggccag

SEQ ID NO: 2576294 - DNA, 25 bp, Homo sapien
ccacggaccagaaggccaggttctc

SEQ ID NO: 2576295 - DNA, 25 bp, Homo sapien
gtccacggaccagaaggccaggttc

SEQ ID NO: 2576296 - DNA, 25 bp, Homo sapien
ttatgtgggtgcatgtgaatgcccc

SEQ ID NO: 2576297 - DNA, 25 bp, Homo sapien
cacagggtcgttctgcagatgggct

SEQ ID NO: 2576298 - DNA, 25 bp, Homo sapien
cccctgccgggattctgtgcaaagg

SEQ ID NO: 2576299 - DNA, 25 bp, Homo sapien
ggtctgtggtcggagtcttcgccct

SEQ ID NO: 2576300 - DNA, 25 bp, Homo sapien
cacagggtgggtgtgacactgaggg

SEQ ID NO: 2576301 - DNA, 25 bp, Homo sapien
agggtgggtgtgacactgagggttc

SEQ ID NO: 2576302 - DNA, 25 bp, Homo sapien
ctggcccacagggtgggtgtgacac

SEQ ID NO: 2576303 - DNA, 25 bp, Homo sapien
cccacagggtgggtgtgacactgag

SEQ ID NO: 2576304 - DNA, 25 bp, Homo sapien
ctctgggaggtcaactgcggcctca

SEQ ID NO: 2576305 - DNA, 25 bp, Homo sapien
tggagcagcagacccgtgtccctct

SEQ ID NO: 2576306 - DNA, 25 bp, Homo sapien
gcacagatacagagctagagcccag

SEQ ID NO: 2576307 - DNA, 25 bp, Homo sapien
cccagaggagagtgtgcactcacgg

SEQ ID NO: 2576308 - DNA, 25 bp, Homo sapien
ccagcgtgaaagggactggcaggag

SEQ ID NO: 2576309 - DNA, 25 bp, Homo sapien
gagcattggttaccaaggctgcctc

SEQ ID NO: 2576310 - DNA, 25 bp, Homo sapien
gtggtcatttgagcattggttacca

SEQ ID NO: 2576311 - DNA, 25 bp, Homo sapien
tttgagcattggttaccaaggctgc

SEQ ID NO: 2576312 - DNA, 25 bp, Homo sapien
tcatttgagcattggttaccaaggc

SEQ ID NO: 2576313 - DNA, 25 bp, Homo sapien
gcccagggatcccccacggaggctg

SEQ ID NO: 2576314 - DNA, 25 bp, Homo sapien
cccagggatcccccacggaggctgc

SEQ ID NO: 2576315 - DNA, 25 bp, Homo sapien
accacagcgccccaggtttcagaag

SEQ ID NO: 2576316 - DNA, 25 bp, Homo sapien
acagcgccccaggtttcagaagcag

SEQ ID NO: 2576317 - DNA, 25 bp, Homo sapien
tgtttcccaccacagcgccccaggt

SEQ ID NO: 2576318 - DNA, 25 bp, Homo sapien
ccaccacagcgccccaggtttcaga

SEQ ID NO: 2576319 - DNA, 25 bp, Homo sapien
agctgaaaacacgggtttttctgtg

SEQ ID NO: 2576320 - DNA, 25 bp, Homo sapien
ctgtgaaatctctagattgaaaaca

SEQ ID NO: 2576321 - DNA, 25 bp, Homo sapien
gctgaaaacacgggtttttctgtga

SEQ ID NO: 2576322 - DNA, 25 bp, Homo sapien
ttctgtgaaatctctagattgaaaa

SEQ ID NO: 2576323 - DNA, 25 bp, Homo sapien
cacagtcaccgaagaaatgaagtta

SEQ ID NO: 2576324 - DNA, 25 bp, Homo sapien
cctcagcttcacagtcaccgaagaa

SEQ ID NO: 2576325 - DNA, 25 bp, Homo sapien
gcttcacagtcaccgaagaaatgaa

SEQ ID NO: 2576326 - DNA, 25 bp, Homo sapien
caggaggggcacaccgtccttttgt

SEQ ID NO: 2576327 - DNA, 25 bp, Homo sapien
gccctgtccctgagcggaacgcagg

SEQ ID NO: 2576328 - DNA, 25 bp, Homo sapien
gtgcggtggccgctgcgttggcagc

SEQ ID NO: 2576329 - DNA, 25 bp, Homo sapien
aggagcgagcgttgggtgcggtggc

SEQ ID NO: 2576330 - DNA, 25 bp, Homo sapien
tgtccctgagcggaacgcaggtcgt

SEQ ID NO: 2576331 - DNA, 25 bp, Homo sapien
ggaggtgccgcttctgagcagagct

SEQ ID NO: 2576332 - DNA, 25 bp, Homo sapien
gcacatgtgggcccgagtgagtcca

SEQ ID NO: 2576333 - DNA, 25 bp, Homo sapien
ctgagcatcaggcagaacccgccgg

SEQ ID NO: 2576334 - DNA, 25 bp, Homo sapien
agcatgaggaggtgccgcttctgag

SEQ ID NO: 2576335 - DNA, 25 bp, Homo sapien
ggaaacattcccctgagttgaagaa

SEQ ID NO: 2576336 - DNA, 25 bp, Homo sapien
taaacgggtcctggtctcgtcatgc

SEQ ID NO: 2576337 - DNA, 25 bp, Homo sapien
tgctgaacagttgtcgcggaggcct

SEQ ID NO: 2576338 - DNA, 25 bp, Homo sapien
aaagccctgggcaaaactcttgatg

SEQ ID NO: 2576339 - DNA, 25 bp, Homo sapien
gaggaaccccgtgttccagctggag

SEQ ID NO: 2576340 - DNA, 25 bp, Homo sapien
gaaagtcatgcccaacgacaccttc

SEQ ID NO: 2576341 - DNA, 25 bp, Homo sapien
tctgttctgggcacccgggaaccag

SEQ ID NO: 2576342 - DNA, 25 bp, Homo sapien
ttcatctactacaaaacctacgccc

SEQ ID NO: 2576343 - DNA, 25 bp, Homo sapien
ctgctcccatggcagagccagccca

SEQ ID NO: 2576344 - DNA, 25 bp, Homo sapien
tgctgctcaggaactcttcctgggc

SEQ ID NO: 2576345 - DNA, 25 bp, Homo sapien
tgctcaggaactcttcctgggcagg

SEQ ID NO: 2576346 - DNA, 25 bp, Homo sapien
agccctccccgctgctcccatggca

SEQ ID NO: 2576347 - DNA, 25 bp, Homo sapien
cctgagggctgccccgtttgctgtt

SEQ ID NO: 2576348 - DNA, 25 bp, Homo sapien
caggggtgccttgaggtcccatgca

SEQ ID NO: 2576349 - DNA, 25 bp, Homo sapien
gttagcatgcacctggccgccctgg

SEQ ID NO: 2576350 - DNA, 25 bp, Homo sapien
gtttgctgttagcatgcacctggcc

SEQ ID NO: 2576351 - DNA, 25 bp, Homo sapien
tgtcataggtgaagcctgctacacc

SEQ ID NO: 2576352 - DNA, 25 bp, Homo sapien
ggtgaagcctgctacacccatgtcc

SEQ ID NO: 2576353 - DNA, 25 bp, Homo sapien
taggtgaagcctgctacacccatgt

SEQ ID NO: 2576354 - DNA, 25 bp, Homo sapien
ttctgctgtcataggtgaagcctgc

SEQ ID NO: 2576355 - DNA, 25 bp, Homo sapien
tgaccccgtaaacctagagcttctg

SEQ ID NO: 2576356 - DNA, 25 bp, Homo sapien
tggctactgtgcctcaacggttcgg

SEQ ID NO: 2576357 - DNA, 25 bp, Homo sapien
tcagatcacccggaagttcaggctg

SEQ ID NO: 2576358 - DNA, 25 bp, Homo sapien
tgaaggcaaacttgagcagacggtc

SEQ ID NO: 2576359 - DNA, 25 bp, Homo sapien
cgaggtcagacgagatcaggtgcgt

SEQ ID NO: 2576360 - DNA, 25 bp, Homo sapien
ttccgaggtcagacgagatcaggtg

SEQ ID NO: 2576361 - DNA, 25 bp, Homo sapien
cgttcagggtggtatggccgtcgac

SEQ ID NO: 2576362 - DNA, 25 bp, Homo sapien
gttcagggtggtatggccgtcgaca

SEQ ID NO: 2576363 - DNA, 25 bp, Homo sapien
tgctggtcctcgctgacttggtggt

SEQ ID NO: 2576364 - DNA, 25 bp, Homo sapien
tgacttccgggcagcaaaagcatcg

SEQ ID NO: 2576365 - DNA, 25 bp, Homo sapien
gcctctcctcctagatggacactga

SEQ ID NO: 2576366 - DNA, 25 bp, Homo sapien
catgagtctgagaaggccccactta

SEQ ID NO: 2576367 - DNA, 25 bp, Homo sapien
gaagaagtgccatcttaggcaaact

SEQ ID NO: 2576368 - DNA, 25 bp, Homo sapien
ttcaacgtattggttttgcacacat

SEQ ID NO: 2576369 - DNA, 25 bp, Homo sapien
ttggctatcctaggaccctttgcat

SEQ ID NO: 2576370 - DNA, 25 bp, Homo sapien
tccagtgccatggtaaggtgctcca

SEQ ID NO: 2576371 - DNA, 25 bp, Homo sapien
atataatcttgtaacgctgcgccag

SEQ ID NO: 2576372 - DNA, 25 bp, Homo sapien
ggaagcttcacagttcaacctaaaa

SEQ ID NO: 2576373 - DNA, 25 bp, Homo sapien
tgttctcagatgagggccagctacc

SEQ ID NO: 2576374 - DNA, 25 bp, Homo sapien
gaacagtcccagcaccctagaaagt

SEQ ID NO: 2576375 - DNA, 25 bp, Homo sapien
tgtggccccgctgactgctgtttgg

SEQ ID NO: 2576376 - DNA, 25 bp, Homo sapien
ttggctgtcaggattgatgctgccg

SEQ ID NO: 2576377 - DNA, 25 bp, Homo sapien
cgtacagacgtcccgtggcccttgt

SEQ ID NO: 2576378 - DNA, 25 bp, Homo sapien
tgtttggggcatttccctccttggc

SEQ ID NO: 2576379 - DNA, 25 bp, Homo sapien
tgcttgtccacttccttaccagtaa

SEQ ID NO: 2576380 - DNA, 25 bp, Homo sapien
catgttaatgtctaagggaacgttt

SEQ ID NO: 2576381 - DNA, 25 bp, Homo sapien
gcccagcctcgtttgtctttcttcg

SEQ ID NO: 2576382 - DNA, 25 bp, Homo sapien
tctcaaggcttataaaatgtacatc

SEQ ID NO: 2576383 - DNA, 25 bp, Homo sapien
ccgtgaggtagtgcgtgtcttgcca

SEQ ID NO: 2576384 - DNA, 25 bp, Homo sapien
ccttctcggaccatccagggtggat

SEQ ID NO: 2576385 - DNA, 25 bp, Homo sapien
catttgggttgtccacgtttacaga

SEQ ID NO: 2576386 - DNA, 25 bp, Homo sapien
tttgcagcggtctgtggagtcagcc

SEQ ID NO: 2576387 - DNA, 25 bp, Homo sapien
tcagctctcagggacaagaccagtg

SEQ ID NO: 2576388 - DNA, 25 bp, Homo sapien
ggcatctaccacctataaccagttt

SEQ ID NO: 2576389 - DNA, 25 bp, Homo sapien
tgagtgtcatgcctgtacgaccagg

SEQ ID NO: 2576390 - DNA, 25 bp, Homo sapien
caagggtcctatgagttgagtgtca

SEQ ID NO: 2576391 - DNA, 25 bp, Homo sapien
ttgccagccccctgactgagttctc

SEQ ID NO: 2576392 - DNA, 25 bp, Homo sapien
ttctcccaggcgtcttgtggcaggg

SEQ ID NO: 2576393 - DNA, 25 bp, Homo sapien
ctgtccttgccagccccctgactga

SEQ ID NO: 2576394 - DNA, 25 bp, Homo sapien
ccctgactgagttctcccaggcgtc

SEQ ID NO: 2576395 - DNA, 25 bp, Homo sapien
cctccatgtccaggtgaagatgagt

SEQ ID NO: 2576396 - DNA, 25 bp, Homo sapien
ccatgtccaggtgaagatgagtctc

SEQ ID NO: 2576397 - DNA, 25 bp, Homo sapien
gttcccgggccgcttgccaggagac

SEQ ID NO: 2576398 - DNA, 25 bp, Homo sapien
tcccgggccgcttgccaggagacag

SEQ ID NO: 2576399 - DNA, 25 bp, Homo sapien
ctaacacaaagagatgtgagggtgg

SEQ ID NO: 2576400 - DNA, 25 bp, Homo sapien
tcgatttagtgtagcctctgtgcag

SEQ ID NO: 2576401 - DNA, 25 bp, Homo sapien
catacaccatggtagtcccgtaaga

SEQ ID NO: 2576402 - DNA, 25 bp, Homo sapien
aaatatcagatccagccgtgtgcta

SEQ ID NO: 2576403 - DNA, 25 bp, Homo sapien
taatggagctgagagagtcctgtca

SEQ ID NO: 2576404 - DNA, 25 bp, Homo sapien
tagagtgcaatggcgatatctaggc

SEQ ID NO: 2576405 - DNA, 25 bp, Homo sapien
cctccgactccctggttaaagcaat

SEQ ID NO: 2576406 - DNA, 25 bp, Homo sapien
ccgactccctggttaaagcaattct

SEQ ID NO: 2576407 - DNA, 25 bp, Homo sapien
gtgccaccatgtccagctaattttt

SEQ ID NO: 2576408 - DNA, 25 bp, Homo sapien
cccaaactgaaggatgcgggccagt

SEQ ID NO: 2576409 - DNA, 25 bp, Homo sapien
gcagtgcccggtggcgttctgtgga

SEQ ID NO: 2576410 - DNA, 25 bp, Homo sapien
gacgtagtgttcttctccgccagca

SEQ ID NO: 2576411 - DNA, 25 bp, Homo sapien
tctgcttttgggcaggttccccaaa

SEQ ID NO: 2576412 - DNA, 25 bp, Homo sapien
tcctctaagcacacccgagaaaggc

SEQ ID NO: 2576413 - DNA, 25 bp, Homo sapien
ggaaaagcagaagcgtctgccacag

SEQ ID NO: 2576414 - DNA, 25 bp, Homo sapien
caggagatggactggccaccatggt

SEQ ID NO: 2576415 - DNA, 25 bp, Homo sapien
tatcggctcacttcattcgtacagt

SEQ ID NO: 2576416 - DNA, 25 bp, Homo sapien
tgtccgacgggacactgtgtgccat

SEQ ID NO: 2576417 - DNA, 25 bp, Homo sapien
gcccatgtcgcggtacggacttgcc

SEQ ID NO: 2576418 - DNA, 25 bp, Homo sapien
catcttgcggtacggacgtgctcgg

SEQ ID NO: 2576419 - DNA, 25 bp, Homo sapien
atacggcgcgcgagcggaaatacgc

SEQ ID NO: 2576420 - DNA, 25 bp, Homo sapien
cttcccagtccggccgccgactgac

SEQ ID NO: 2576421 - DNA, 25 bp, Homo sapien
gccgccgactgacccgagcggcgtc

SEQ ID NO: 2576422 - DNA, 25 bp, Homo sapien
cagtccggccgccgactgacccgag

SEQ ID NO: 2576423 - DNA, 25 bp, Homo sapien
cggccgccgactgacccgagcggcg

SEQ ID NO: 2576424 - DNA, 25 bp, Homo sapien
cctcctggacaccctcgcagctcca

SEQ ID NO: 2576425 - DNA, 25 bp, Homo sapien
ccctcctggacaccctcgcagctcc

SEQ ID NO: 2576426 - DNA, 25 bp, Homo sapien
ctcctggacaccctcgcagctccag

SEQ ID NO: 2576427 - DNA, 25 bp, Homo sapien
cagactcgcatctcttcagttatga

SEQ ID NO: 2576428 - DNA, 25 bp, Homo sapien
tcgcatctcttcagttatgaggagg

SEQ ID NO: 2576429 - DNA, 25 bp, Homo sapien
tcttcagttatgaggaggtcttccc

SEQ ID NO: 2576430 - DNA, 25 bp, Homo sapien
catctcttcagttatgaggaggtct

SEQ ID NO: 2576431 - DNA, 25 bp, Homo sapien
cctcctctcggtactgtggaggacg

SEQ ID NO: 2576432 - DNA, 25 bp, Homo sapien
aacatcatgatgtccctgctacctc

SEQ ID NO: 2576433 - DNA, 25 bp, Homo sapien
gaggtctaatcatgttgtcaagctg

SEQ ID NO: 2576434 - DNA, 25 bp, Homo sapien
attaggatgaattaaggtccatgcc

SEQ ID NO: 2576435 - DNA, 25 bp, Homo sapien
catgctttcagagacattatcaacc

SEQ ID NO: 2576436 - DNA, 25 bp, Homo sapien
ttcatccttgtacgcaagggaagcc

SEQ ID NO: 2576437 - DNA, 25 bp, Homo sapien
tccttgtacgcaagggaagccaaga

SEQ ID NO: 2576438 - DNA, 25 bp, Homo sapien
aacagggcaaagagtcgttttccat

SEQ ID NO: 2576439 - DNA, 25 bp, Homo sapien
tccttcatccttgtacgcaagggaa

SEQ ID NO: 2576440 - DNA, 25 bp, Homo sapien
ccagtatccaaacgggctctgaggt

SEQ ID NO: 2576441 - DNA, 25 bp, Homo sapien
aatgctgtattttctacccagtatc

SEQ ID NO: 2576442 - DNA, 25 bp, Homo sapien
aaaatcttcaaactcagcaaaccgg

SEQ ID NO: 2576443 - DNA, 25 bp, Homo sapien
aaaccggagagtgtcgtaggtcaga

SEQ ID NO: 2576444 - DNA, 25 bp, Homo sapien
cagagttagcagagaacagtgatca

SEQ ID NO: 2576445 - DNA, 25 bp, Homo sapien
caggccaagcggtcagaccagggtg

SEQ ID NO: 2576446 - DNA, 25 bp, Homo sapien
cacacacaacgccttaagtttgcaa

SEQ ID NO: 2576447 - DNA, 25 bp, Homo sapien
agtttgcaagtcacaagttatggca

SEQ ID NO: 2576448 - DNA, 25 bp, Homo sapien
ctgtatgtaaaccaaagtctagatg

SEQ ID NO: 2576449 - DNA, 25 bp, Homo sapien
gccacatcagacaagatctcgtcct

SEQ ID NO: 2576450 - DNA, 25 bp, Homo sapien
tctagatgccacatcagacaagatc

SEQ ID NO: 2576451 - DNA, 25 bp, Homo sapien
taaaccaaagtctagatgccacatc

SEQ ID NO: 2576452 - DNA, 25 bp, Homo sapien
ggcctcagttctccgccggtgagag

SEQ ID NO: 2576453 - DNA, 25 bp, Homo sapien
cagggtatacaacaatgatgaatgg

SEQ ID NO: 2576454 - DNA, 25 bp, Homo sapien
cggcctcagttctccgccggtgaga

SEQ ID NO: 2576455 - DNA, 25 bp, Homo sapien
cagctccagggtatacaacaatgat

SEQ ID NO: 2576456 - DNA, 25 bp, Homo sapien
aatgagcaactattcccagggcaca

SEQ ID NO: 2576457 - DNA, 25 bp, Homo sapien
tcagaactgcgacagggctgcttca

SEQ ID NO: 2576458 - DNA, 25 bp, Homo sapien
ttcccagggtacatctcacaaggtg

SEQ ID NO: 2576459 - DNA, 25 bp, Homo sapien
ccaagagagcaggttcagcgcagct

SEQ ID NO: 2576460 - DNA, 25 bp, Homo sapien
aggactcagtaacgccaagggccac

SEQ ID NO: 2576461 - DNA, 25 bp, Homo sapien
ctcttaggactcagtaacgccaagg

SEQ ID NO: 2576462 - DNA, 25 bp, Homo sapien
ttaggactcagtaacgccaagggcc

SEQ ID NO: 2576463 - DNA, 25 bp, Homo sapien
actcagtaacgccaagggccacatt

SEQ ID NO: 2576464 - DNA, 25 bp, Homo sapien
agagagaagtgctcatggccagatg

SEQ ID NO: 2576465 - DNA, 25 bp, Homo sapien
aggaggcagccggtcagtcccacac

SEQ ID NO: 2576466 - DNA, 25 bp, Homo sapien
acagagagagaagtgctcatggcca

SEQ ID NO: 2576467 - DNA, 25 bp, Homo sapien
agtcccacaccacaggcaccgactc

SEQ ID NO: 2576468 - DNA, 25 bp, Homo sapien
ctcggcctaggtgccggcacaccag

SEQ ID NO: 2576469 - DNA, 25 bp, Homo sapien
cctaggtgccggcacaccagggctt

SEQ ID NO: 2576470 - DNA, 25 bp, Homo sapien
gcctaggtgccggcacaccagggct

SEQ ID NO: 2576471 - DNA, 25 bp, Homo sapien
cggcctaggtgccggcacaccaggg

SEQ ID NO: 2576472 - DNA, 25 bp, Homo sapien
aaaaacaagtggctcattactcaag

SEQ ID NO: 2576473 - DNA, 25 bp, Homo sapien
tacctgtggtctgctctaaagagcc

SEQ ID NO: 2576474 - DNA, 25 bp, Homo sapien
tttgcttcctgagaacaccgtggcc

SEQ ID NO: 2576475 - DNA, 25 bp, Homo sapien
gttgcccatgcggatttattagcat

SEQ ID NO: 2576476 - DNA, 25 bp, Homo sapien
tagtaactgtccttcctgtcgatga

SEQ ID NO: 2576477 - DNA, 25 bp, Homo sapien
ctatctggtgaatggagtagtaact

SEQ ID NO: 2576478 - DNA, 25 bp, Homo sapien
ccttcctgtcgatgaatgcgttgag

SEQ ID NO: 2576479 - DNA, 25 bp, Homo sapien
cgttgaggacgctgaagtagctgtc

SEQ ID NO: 2576480 - DNA, 25 bp, Homo sapien
caggtttacagcctcctgctccaca

SEQ ID NO: 2576481 - DNA, 25 bp, Homo sapien
ggtgatgtgacagcagcgcacagat

SEQ ID NO: 2576482 - DNA, 25 bp, Homo sapien
tcccacgacaccagaaaagctctga

SEQ ID NO: 2576483 - DNA, 25 bp, Homo sapien
agcgcacagatggtcagaggtcagt

SEQ ID NO: 2576484 - DNA, 25 bp, Homo sapien
ttgggcccgtaccactggcctatgg

SEQ ID NO: 2576485 - DNA, 25 bp, Homo sapien
ttgccttcgccaactcccatttgcg

SEQ ID NO: 2576486 - DNA, 25 bp, Homo sapien
caggacctgggcgacagtgttgggc

SEQ ID NO: 2576487 - DNA, 25 bp, Homo sapien
ctatggacttgccttcgccaactcc

SEQ ID NO: 2576488 - DNA, 25 bp, Homo sapien
tcagcagtggaagcgcagtacatac

SEQ ID NO: 2576489 - DNA, 25 bp, Homo sapien
cagccacgtgggccggtggtcaaca

SEQ ID NO: 2576490 - DNA, 25 bp, Homo sapien
gcagcagccacgtgggccggtggtc

SEQ ID NO: 2576491 - DNA, 25 bp, Homo sapien
agcagccacgtgggccggtggtcaa

SEQ ID NO: 2576492 - DNA, 25 bp, Homo sapien
cagcagccacgtgggccggtggtca

SEQ ID NO: 2576493 - DNA, 25 bp, Homo sapien
tgtacaattcaaagacggttcatct

SEQ ID NO: 2576494 - DNA, 25 bp, Homo sapien
agacggttcatctttgcagctatag

SEQ ID NO: 2576495 - DNA, 25 bp, Homo sapien
gagtaggagaatgaccataagcttt

SEQ ID NO: 2576496 - DNA, 25 bp, Homo sapien
taagcttttgtacaattcaaagacg

SEQ ID NO: 2576497 - DNA, 25 bp, Homo sapien
tcacaacagtgttgtccattgcaat

SEQ ID NO: 2576498 - DNA, 25 bp, Homo sapien
ccattgcaatgtggaccgccaagga

SEQ ID NO: 2576499 - DNA, 25 bp, Homo sapien
tggaccgccaaggagctccacgtat

SEQ ID NO: 2576500 - DNA, 25 bp, Homo sapien
ccaaggagctccacgtatcgaagac

SEQ ID NO: 2576501 - DNA, 25 bp, Homo sapien
gcgactgacaacactcgccgaggct

SEQ ID NO: 2576502 - DNA, 25 bp, Homo sapien
aggaagtgtgtatgttgcccgtgat

SEQ ID NO: 2576503 - DNA, 25 bp, Homo sapien
tatgttgcccgtgatttcaactttc

SEQ ID NO: 2576504 - DNA, 25 bp, Homo sapien
tgtccatggaaactctgagccactt

SEQ ID NO: 2576505 - DNA, 25 bp, Homo sapien
tgtaaatgttgccacgcccaggttc

SEQ ID NO: 2576506 - DNA, 25 bp, Homo sapien
tctcttggtatgaccgccgggatag

SEQ ID NO: 2576507 - DNA, 25 bp, Homo sapien
gacgtgagataccaagtcgcggcct

SEQ ID NO: 2576508 - DNA, 25 bp, Homo sapien
cagcagggccttcataaacgatttg

SEQ ID NO: 2576509 - DNA, 25 bp, Homo sapien
caagccttgtgcatcaatgccagtg

SEQ ID NO: 2576510 - DNA, 25 bp, Homo sapien
cctaaatgggggcatcaggcacctt

SEQ ID NO: 2576511 - DNA, 25 bp, Homo sapien
ggctggatgtggatgcctttcttcc

SEQ ID NO: 2576512 - DNA, 25 bp, Homo sapien
acgccacactcaggaacccagaaac

SEQ ID NO: 2576513 - DNA, 25 bp, Homo sapien
tcccggtggtgagtttcctgctgac

SEQ ID NO: 2576514 - DNA, 25 bp, Homo sapien
tatgatcgaacacatgaatcggctc

SEQ ID NO: 2576515 - DNA, 25 bp, Homo sapien
tagctgggccggttgcttctgtgcc

SEQ ID NO: 2576516 - DNA, 25 bp, Homo sapien
gaatcggctcaagggctgatgcgta

SEQ ID NO: 2576517 - DNA, 25 bp, Homo sapien
gaaaatcacagaagtacccacgcag

SEQ ID NO: 2576518 - DNA, 25 bp, Homo sapien
gaaaaggcggctcttctcagaacgc

SEQ ID NO: 2576519 - DNA, 25 bp, Homo sapien
ggtggaaccgtcaagcatcaaaaag

SEQ ID NO: 2576520 - DNA, 25 bp, Homo sapien
catgcccggcgtctagatcgaggtt

SEQ ID NO: 2576521 - DNA, 25 bp, Homo sapien
cacagggaacgctggtcctgcacaa

SEQ ID NO: 2576522 - DNA, 25 bp, Homo sapien
ggaacgctggtcctgcacaaccttc

SEQ ID NO: 2576523 - DNA, 25 bp, Homo sapien
cgcctgcacagggaacgctggtcct

SEQ ID NO: 2576524 - DNA, 25 bp, Homo sapien
cagtggcgcctgcacagggaacgct

SEQ ID NO: 2576525 - DNA, 25 bp, Homo sapien
ttggtgacctcagctccggcaggga

SEQ ID NO: 2576526 - DNA, 25 bp, Homo sapien
catggcgacggcctgttggtgacct

SEQ ID NO: 2576527 - DNA, 25 bp, Homo sapien
tcgttgatgtccgtgagccccaggc

SEQ ID NO: 2576528 - DNA, 25 bp, Homo sapien
gaatgagaagtaccaggggtctcca

SEQ ID NO: 2576529 - DNA, 25 bp, Homo sapien
caaatggccacgtgacgacgatgcg

SEQ ID NO: 2576530 - DNA, 25 bp, Homo sapien
acaaatggccacgtgacgacgatgc

SEQ ID NO: 2576531 - DNA, 25 bp, Homo sapien
cgagagccggctgcacaaatggcca

SEQ ID NO: 2576532 - DNA, 25 bp, Homo sapien
ccccgagagccggctgcacaaatgg

SEQ ID NO: 2576533 - DNA, 25 bp, Homo sapien
acaggcacaagaaacccaatctgca

SEQ ID NO: 2576534 - DNA, 25 bp, Homo sapien
tgctgaggcccaactgggtgacaca

SEQ ID NO: 2576535 - DNA, 25 bp, Homo sapien
cacaggacatcccacaggcacaaga

SEQ ID NO: 2576536 - DNA, 25 bp, Homo sapien
ccaaagagcttactgtccaggaaag

SEQ ID NO: 2576537 - DNA, 25 bp, Homo sapien
cctccgatgacgcccagggactggg

SEQ ID NO: 2576538 - DNA, 25 bp, Homo sapien
caacgtagccgatgaagtagtgggc

SEQ ID NO: 2576539 - DNA, 25 bp, Homo sapien
gttgggcttccctccgatgacgccc

SEQ ID NO: 2576540 - DNA, 25 bp, Homo sapien
gggactggggcatcatgaagcagtg

SEQ ID NO: 2576541 - DNA, 25 bp, Homo sapien
cagaggaggccgcatttcagaccca

SEQ ID NO: 2576542 - DNA, 25 bp, Homo sapien
ggagccgagggcaccagaccatcag

SEQ ID NO: 2576543 - DNA, 25 bp, Homo sapien
agggcaccagaccatcagggaaagg

SEQ ID NO: 2576544 - DNA, 25 bp, Homo sapien
ttttccaccagtggcctcaagtggt

SEQ ID NO: 2576545 - DNA, 25 bp, Homo sapien
cgatggacgggtcaagctccgcgat

SEQ ID NO: 2576546 - DNA, 25 bp, Homo sapien
caagctccgcgatgctcatgcggca

SEQ ID NO: 2576547 - DNA, 25 bp, Homo sapien
tccgcgatgctcatgcggcacggcg

SEQ ID NO: 2576548 - DNA, 25 bp, Homo sapien
acgggtcaagctccgcgatgctcat

SEQ ID NO: 2576549 - DNA, 25 bp, Homo sapien
taggaattctcaacgctgccagatg

SEQ ID NO: 2576550 - DNA, 25 bp, Homo sapien
tgtgccttgattcgcccacgagatg

SEQ ID NO: 2576551 - DNA, 25 bp, Homo sapien
gggtcaccggcaatcacatccttaa

SEQ ID NO: 2576552 - DNA, 25 bp, Homo sapien
gccagatgcgcagatgttaacacaa

SEQ ID NO: 2576553 - DNA, 25 bp, Homo sapien
tggcaccaatcattgaagtcatctt

SEQ ID NO: 2576554 - DNA, 25 bp, Homo sapien
tcatcttcagtcttacagaaaaacc

SEQ ID NO: 2576555 - DNA, 25 bp, Homo sapien
caccaatcattgaagtcatcttcag

SEQ ID NO: 2576556 - DNA, 25 bp, Homo sapien
ctttttgacttgctggcaccaatca

SEQ ID NO: 2576557 - DNA, 25 bp, Homo sapien
gacatggccgttaggtgcagcctca

SEQ ID NO: 2576558 - DNA, 25 bp, Homo sapien
gctacacgagaacccagtgtggtga

SEQ ID NO: 2576559 - DNA, 25 bp, Homo sapien
tcagctacatagctgtgccaggcgg

SEQ ID NO: 2576560 - DNA, 25 bp, Homo sapien
caacaggagacggatgaggacactg

SEQ ID NO: 2576561 - DNA, 25 bp, Homo sapien
aggttcaggacgtcggggcaggcca

SEQ ID NO: 2576562 - DNA, 25 bp, Homo sapien
ctcaaacatgggcagggcacctcca

SEQ ID NO: 2576563 - DNA, 25 bp, Homo sapien
agctccaccagctcaaacatgggca

SEQ ID NO: 2576564 - DNA, 25 bp, Homo sapien
caggttcaggacgtcggggcaggcc

SEQ ID NO: 2576565 - DNA, 25 bp, Homo sapien
ctcacaggcgaaccactgccaagtg

SEQ ID NO: 2576566 - DNA, 25 bp, Homo sapien
ggctgctgggcgcaagcttggagga

SEQ ID NO: 2576567 - DNA, 25 bp, Homo sapien
cacaccttaatggtcaaaaccaagg

SEQ ID NO: 2576568 - DNA, 25 bp, Homo sapien
actccatacctggtctcacaggcga

SEQ ID NO: 2576569 - DNA, 25 bp, Homo sapien
ggactccatggtagcacgcccagct

SEQ ID NO: 2576570 - DNA, 25 bp, Homo sapien
gccatggtccgaggggtctacgcca

SEQ ID NO: 2576571 - DNA, 25 bp, Homo sapien
tgtctgctccagacccctgaggact

SEQ ID NO: 2576572 - DNA, 25 bp, Homo sapien
caggactgcgtcaccacagagcctg

SEQ ID NO: 2576573 - DNA, 25 bp, Homo sapien
gccggcacaatctcaggcctgaggg

SEQ ID NO: 2576574 - DNA, 25 bp, Homo sapien
cattgccattgccttgtttgtagag

SEQ ID NO: 2576575 - DNA, 25 bp, Homo sapien
gcgtctgaccctcgtggtcatcagg

SEQ ID NO: 2576576 - DNA, 25 bp, Homo sapien
ccctcgtggtcatcaggagtggttc

SEQ ID NO: 2576577 - DNA, 25 bp, Homo sapien
ccccatgcgggtgtgaacaggtccg

SEQ ID NO: 2576578 - DNA, 25 bp, Homo sapien
agctgtccccatgcgggtgtgaaca

SEQ ID NO: 2576579 - DNA, 25 bp, Homo sapien
gacagctgtccccatgcgggtgtga

SEQ ID NO: 2576580 - DNA, 25 bp, Homo sapien
cacagacagctgtccccatgcgggt

SEQ ID NO: 2576581 - DNA, 25 bp, Homo sapien
aggaacaggacatagcgcatcaggc

SEQ ID NO: 2576582 - DNA, 25 bp, Homo sapien
caggacatagcgcatcaggcatctt

SEQ ID NO: 2576583 - DNA, 25 bp, Homo sapien
catagcgcatcaggcatcttgggtg

SEQ ID NO: 2576584 - DNA, 25 bp, Homo sapien
gacatagcgcatcaggcatcttggg

SEQ ID NO: 2576585 - DNA, 25 bp, Homo sapien
tgagtcgaagaatctttccagtcgc

SEQ ID NO: 2576586 - DNA, 25 bp, Homo sapien
gagtcgaagaatctttccagtcgct

SEQ ID NO: 2576587 - DNA, 25 bp, Homo sapien
cttctgagtcgaagaatctttccag

SEQ ID NO: 2576588 - DNA, 25 bp, Homo sapien
tctgagtcgaagaatctttccagtc

SEQ ID NO: 2576589 - DNA, 25 bp, Homo sapien
tcaaagggacaggatttcaaagtct

SEQ ID NO: 2576590 - DNA, 25 bp, Homo sapien
tggaagctcctaacagacggctccg

SEQ ID NO: 2576591 - DNA, 25 bp, Homo sapien
tgacaccaagcagtaaggcctcccg

SEQ ID NO: 2576592 - DNA, 25 bp, Homo sapien
tgtcgagagaacactctggaagctc

SEQ ID NO: 2576593 - DNA, 25 bp, Homo sapien
ggatggatgaaacgcagcggcacca

SEQ ID NO: 2576594 - DNA, 25 bp, Homo sapien
cacagaaccggcgcctgggagcaag

SEQ ID NO: 2576595 - DNA, 25 bp, Homo sapien
accaaccacagaaccggcgcctggg

SEQ ID NO: 2576596 - DNA, 25 bp, Homo sapien
accacagaaccggcgcctgggagca

SEQ ID NO: 2576597 - DNA, 25 bp, Homo sapien
caaaccaaccacagaaccggcgcct

SEQ ID NO: 2576598 - DNA, 25 bp, Homo sapien
tcagggagcgcccagaaattcatgt

SEQ ID NO: 2576599 - DNA, 25 bp, Homo sapien
catctcccactgaggtagcccttgg

SEQ ID NO: 2576600 - DNA, 25 bp, Homo sapien
tagcccttggtaagccaggctgggc

SEQ ID NO: 2576601 - DNA, 25 bp, Homo sapien
caaagcaaggaggaacctcgccttc

SEQ ID NO: 2576602 - DNA, 25 bp, Homo sapien
tctcacgccagcctgcacaggtctt

SEQ ID NO: 2576603 - DNA, 25 bp, Homo sapien
ccaggccgcccacgctgtgtcctgt

SEQ ID NO: 2576604 - DNA, 25 bp, Homo sapien
ccaggacagccagccgcccttctgc

SEQ ID NO: 2576605 - DNA, 25 bp, Homo sapien
acagaatgccacagcactggaaagg

SEQ ID NO: 2576606 - DNA, 25 bp, Homo sapien
cactggaaagggacactctgagggc

SEQ ID NO: 2576607 - DNA, 25 bp, Homo sapien
caacgccgcagtagctgctcatgag

SEQ ID NO: 2576608 - DNA, 25 bp, Homo sapien
tgctcatgagaaaagtgcccacgct

SEQ ID NO: 2576609 - DNA, 25 bp, Homo sapien
catgggagggcaattctcagcaagg

SEQ ID NO: 2576610 - DNA, 25 bp, Homo sapien
caaagatactttcccaggacaggca

SEQ ID NO: 2576611 - DNA, 25 bp, Homo sapien
ccggtcagtgccgactgtccggcgc

SEQ ID NO: 2576612 - DNA, 25 bp, Homo sapien
gggccggtcagtgccgactgtccgg

SEQ ID NO: 2576613 - DNA, 25 bp, Homo sapien
ggtgggccggtcagtgccgactgtc

SEQ ID NO: 2576614 - DNA, 25 bp, Homo sapien
tcagtgccgactgtccggcgcgcgt

SEQ ID NO: 2576615 - DNA, 25 bp, Homo sapien
tatgtcttcaatgcttggggggctg

SEQ ID NO: 2576616 - DNA, 25 bp, Homo sapien
gatacgaggaaatacactatgtctt

SEQ ID NO: 2576617 - DNA, 25 bp, Homo sapien
aaaggatacgaggaaatacactatg

SEQ ID NO: 2576618 - DNA, 25 bp, Homo sapien
gaggaaatacactatgtcttcaatg

SEQ ID NO: 2576619 - DNA, 25 bp, Homo sapien
tttttcaaaacacacgagacaaagc

SEQ ID NO: 2576620 - DNA, 25 bp, Homo sapien
gaattgcaaactatactactaagaa

SEQ ID NO: 2576621 - DNA, 25 bp, Homo sapien
agcacagcggcgcaccatgaactcg

SEQ ID NO: 2576622 - DNA, 25 bp, Homo sapien
aactcggacgtggagcccaaggaat

SEQ ID NO: 2576623 - DNA, 25 bp, Homo sapien
tgagcagagcgatggagcagtctcc

SEQ ID NO: 2576624 - DNA, 25 bp, Homo sapien
gaccccacaacttcaggagctcttt

SEQ ID NO: 2576625 - DNA, 25 bp, Homo sapien
aatggtaatcagttggaattctcct

SEQ ID NO: 2576626 - DNA, 25 bp, Homo sapien
cctgatggcactctgttgtattttc

SEQ ID NO: 2576627 - DNA, 25 bp, Homo sapien
gacactggagaaaccgacacgtttg

SEQ ID NO: 2576628 - DNA, 25 bp, Homo sapien
gactggcagccgttctatctaccta

SEQ ID NO: 2576629 - DNA, 25 bp, Homo sapien
cacataacaggctctaggagtgcct

SEQ ID NO: 2576630 - DNA, 25 bp, Homo sapien
tgtaaacagccagacgtgggccttc

SEQ ID NO: 2576631 - DNA, 25 bp, Homo sapien
ttgaaagagggcgtctccctctgtt

SEQ ID NO: 2576632 - DNA, 25 bp, Homo sapien
agtacagtggaacaagcaaagctcg

SEQ ID NO: 2576633 - DNA, 25 bp, Homo sapien
tcgctataacaactcttgggcccaa

SEQ ID NO: 2576634 - DNA, 25 bp, Homo sapien
caaagatggttcatttgtagtactt

SEQ ID NO: 2576635 - DNA, 25 bp, Homo sapien
tgtccagctaatattttgtattagt

SEQ ID NO: 2576636 - DNA, 25 bp, Homo sapien
tccagctaatattttgtattagtag

SEQ ID NO: 2576637 - DNA, 25 bp, Homo sapien
gtccagctaatattttgtattagta

SEQ ID NO: 2576638 - DNA, 25 bp, Homo sapien
ggatctgttgagtgctttggcccac

SEQ ID NO: 2576639 - DNA, 25 bp, Homo sapien
gccatctgtgtatctggtttcgtaa

SEQ ID NO: 2576640 - DNA, 25 bp, Homo sapien
ggttgctattgctccagaccctcac

SEQ ID NO: 2576641 - DNA, 25 bp, Homo sapien
tggcatctcattgttctagtttgca

SEQ ID NO: 2576642 - DNA, 25 bp, Homo sapien
aaagtagagtatgtagagcgctccc

SEQ ID NO: 2576643 - DNA, 25 bp, Homo sapien
tgtcgtcgcattgtctctagaacca

SEQ ID NO: 2576644 - DNA, 25 bp, Homo sapien
ggttcctcatcatccgtgttacatg

SEQ ID NO: 2576645 - DNA, 25 bp, Homo sapien
tagaaccacggtacgtgtagccagt

SEQ ID NO: 2576646 - DNA, 25 bp, Homo sapien
aacgcagtcgtgctgggctccaggt

SEQ ID NO: 2576647 - DNA, 25 bp, Homo sapien
tacaattgccacgtggccagcgtct

SEQ ID NO: 2576648 - DNA, 25 bp, Homo sapien
gcagttttgcgcttcagggacaaca

SEQ ID NO: 2576649 - DNA, 25 bp, Homo sapien
cgcttcgggaagcatctcgctcgtt

SEQ ID NO: 2576650 - DNA, 25 bp, Homo sapien
ttgatgcaggagaataggttgaacc

SEQ ID NO: 2576651 - DNA, 25 bp, Homo sapien
tccactctgggccacaagacagaaa

SEQ ID NO: 2576652 - DNA, 25 bp, Homo sapien
cactccactctgggccacaagacag

SEQ ID NO: 2576653 - DNA, 25 bp, Homo sapien
ccactctgggccacaagacagaaac

SEQ ID NO: 2576654 - DNA, 25 bp, Homo sapien
tgtcagtggcagtacgaaggacact

SEQ ID NO: 2576655 - DNA, 25 bp, Homo sapien
tatcctaagagaggtacaccatgct

SEQ ID NO: 2576656 - DNA, 25 bp, Homo sapien
tttgatcacgcaggaacaccaagag

SEQ ID NO: 2576657 - DNA, 25 bp, Homo sapien
caagagaactgctaggatgtggacc

SEQ ID NO: 2576658 - DNA, 25 bp, Homo sapien
ggcctccagagtctcgtggagtgac

SEQ ID NO: 2576659 - DNA, 25 bp, Homo sapien
gcctccagagtctcgtggagtgact

SEQ ID NO: 2576660 - DNA, 25 bp, Homo sapien
aggcctccagagtctcgtggagtga

SEQ ID NO: 2576661 - DNA, 25 bp, Homo sapien
cctccagagtctcgtggagtgactc

SEQ ID NO: 2576662 - DNA, 25 bp, Homo sapien
ttctgaggcacgaggcgccagctca

SEQ ID NO: 2576663 - DNA, 25 bp, Homo sapien
tatctctggagcagttaagggtaac

SEQ ID NO: 2576664 - DNA, 25 bp, Homo sapien
gctgcgtgtgctgcaagctcggtta

SEQ ID NO: 2576665 - DNA, 25 bp, Homo sapien
tataacaagagtctacctgattctg

SEQ ID NO: 2576666 - DNA, 25 bp, Homo sapien
ttgccatcgtctgcctggtcaaggc

SEQ ID NO: 2576667 - DNA, 25 bp, Homo sapien
tccttcttgtatggtgtctgtccac

SEQ ID NO: 2576668 - DNA, 25 bp, Homo sapien
caacaaggggtatgtcggagagcgt

SEQ ID NO: 2576669 - DNA, 25 bp, Homo sapien
tgtgtgaaggtccacatgccacatc

SEQ ID NO: 2576670 - DNA, 25 bp, Homo sapien
taactctcccagagatcaatttgtc

SEQ ID NO: 2576671 - DNA, 25 bp, Homo sapien
gttttagaaactgccagagagggcc

SEQ ID NO: 2576672 - DNA, 25 bp, Homo sapien
ggttattggccctcacatatcatat

SEQ ID NO: 2576673 - DNA, 25 bp, Homo sapien
tattattaagggttattggccctca

SEQ ID NO: 2576674 - DNA, 25 bp, Homo sapien
tgtagaaactggtcttcatgtattt

SEQ ID NO: 2576675 - DNA, 25 bp, Homo sapien
tctgtgtagaaactggtcttcatgt

SEQ ID NO: 2576676 - DNA, 25 bp, Homo sapien
tgtgtagaaactggtcttcatgtat

SEQ ID NO: 2576677 - DNA, 25 bp, Homo sapien
tctctgtgtagaaactggtcttcat

SEQ ID NO: 2576678 - DNA, 25 bp, Homo sapien
catatttgttgcctatttgtggttc

SEQ ID NO: 2576679 - DNA, 25 bp, Homo sapien
cctttatatcttttactgattcttt

SEQ ID NO: 2576680 - DNA, 25 bp, Homo sapien
ttttaacatatttgttgcctatttg

SEQ ID NO: 2576681 - DNA, 25 bp, Homo sapien
tgttgcctatttgtggttctgtcct

SEQ ID NO: 2576682 - DNA, 25 bp, Homo sapien
cagtggcgagatcccggcttgttgc

SEQ ID NO: 2576683 - DNA, 25 bp, Homo sapien
gcagtggcgagatcccggcttgttg

SEQ ID NO: 2576684 - DNA, 25 bp, Homo sapien
tggcgagatcccggcttgttgcaac

SEQ ID NO: 2576685 - DNA, 25 bp, Homo sapien
gcgagatcccggcttgttgcaacct

SEQ ID NO: 2576686 - DNA, 25 bp, Homo sapien
ccagtgccttgtgcattcttatagg

SEQ ID NO: 2576687 - DNA, 25 bp, Homo sapien
acttaggtgatccactggcatcagc

SEQ ID NO: 2576688 - DNA, 25 bp, Homo sapien
ccccattacatgtcatacagcatag

SEQ ID NO: 2576689 - DNA, 25 bp, Homo sapien
aaatgtataatgtcagctacccccc

SEQ ID NO: 2576690 - DNA, 25 bp, Homo sapien
caaaggtgtgccgtaagatgcatgc

SEQ ID NO: 2576691 - DNA, 25 bp, Homo sapien
ggcacgtgcggcagtatgatatagt

SEQ ID NO: 2576692 - DNA, 25 bp, Homo sapien
tgatatagttaataagatggcgtgc

SEQ ID NO: 2576693 - DNA, 25 bp, Homo sapien
atctggatgccttggccgaaaaggc

SEQ ID NO: 2576694 - DNA, 25 bp, Homo sapien
tagtgctccaagtacatggcggtcg

SEQ ID NO: 2576695 - DNA, 25 bp, Homo sapien
gctccaagtacatggcggtcgccat

SEQ ID NO: 2576696 - DNA, 25 bp, Homo sapien
gatagtgctccaagtacatggcggt

SEQ ID NO: 2576697 - DNA, 25 bp, Homo sapien
ccagatagtgctccaagtacatggc

SEQ ID NO: 2576698 - DNA, 25 bp, Homo sapien
cccaaacaccgcgaccccaaagctg

SEQ ID NO: 2576699 - DNA, 25 bp, Homo sapien
ccaaacaccgcgaccccaaagctgt

SEQ ID NO: 2576700 - DNA, 25 bp, Homo sapien
caaacaccgcgaccccaaagctgtg

SEQ ID NO: 2576701 - DNA, 25 bp, Homo sapien
cactgtctcagcccctgggcgggtg

SEQ ID NO: 2576702 - DNA, 25 bp, Homo sapien
aggccgaagaccatgaggatcccca

SEQ ID NO: 2576703 - DNA, 25 bp, Homo sapien
gggcgggtgccaggccgaagaccat

SEQ ID NO: 2576704 - DNA, 25 bp, Homo sapien
tgtctcagcccctgggcgggtgcca

SEQ ID NO: 2576705 - DNA, 25 bp, Homo sapien
acagcggagcacatgggcagaatcg

SEQ ID NO: 2576706 - DNA, 25 bp, Homo sapien
gctgttcacagttaccaggcaatca

SEQ ID NO: 2576707 - DNA, 25 bp, Homo sapien
acacaaagtcaaccctccttgggag

SEQ ID NO: 2576708 - DNA, 25 bp, Homo sapien
gtgttttcccagctcccctagagga

SEQ ID NO: 2576709 - DNA, 25 bp, Homo sapien
gtggccatagggagctactgagcac

SEQ ID NO: 2576710 - DNA, 25 bp, Homo sapien
tggtggccatagggagctactgagc

SEQ ID NO: 2576711 - DNA, 25 bp, Homo sapien
tggccatagggagctactgagcact

SEQ ID NO: 2576712 - DNA, 25 bp, Homo sapien
ggccatagggagctactgagcactg

SEQ ID NO: 2576713 - DNA, 25 bp, Homo sapien
acagaagccatgtacctctcagcag

SEQ ID NO: 2576714 - DNA, 25 bp, Homo sapien
cagaagccatgtacctctcagcagc

SEQ ID NO: 2576715 - DNA, 25 bp, Homo sapien
agaagccatgtacctctcagcagca

SEQ ID NO: 2576716 - DNA, 25 bp, Homo sapien
gctggaagttcctctgaagttcgca

SEQ ID NO: 2576717 - DNA, 25 bp, Homo sapien
tccagctctcgcatcagctggaagt

SEQ ID NO: 2576718 - DNA, 25 bp, Homo sapien
ctggtccagctctcgcatcagctgg

SEQ ID NO: 2576719 - DNA, 25 bp, Homo sapien
agttcgcagggaaggttctcgatac

SEQ ID NO: 2576720 - DNA, 25 bp, Homo sapien
aatgcacgcactacacactttgaaa

SEQ ID NO: 2576721 - DNA, 25 bp, Homo sapien
aagacactgagtgatacccacggcc

SEQ ID NO: 2576722 - DNA, 25 bp, Homo sapien
gtatcaacacctactgcaagacact

SEQ ID NO: 2576723 - DNA, 25 bp, Homo sapien
caatgtggcttcaaaagtatcaaca

SEQ ID NO: 2576724 - DNA, 25 bp, Homo sapien
aatgggggaaaagctagccctgcac

SEQ ID NO: 2576725 - DNA, 25 bp, Homo sapien
gccctgcacaagacaccatgatgtg

SEQ ID NO: 2576726 - DNA, 25 bp, Homo sapien
gactggcaacaactaaagtcagcca

SEQ ID NO: 2576727 - DNA, 25 bp, Homo sapien
caccatgatgtgctcaccagactgg

SEQ ID NO: 2576728 - DNA, 25 bp, Homo sapien
ctgtaggcgttctggatcttctgca

SEQ ID NO: 2576729 - DNA, 25 bp, Homo sapien
gccagctgcactttgtcgtcactgt

SEQ ID NO: 2576730 - DNA, 25 bp, Homo sapien
tccacgcgctggtctggagacagcg

SEQ ID NO: 2576731 - DNA, 25 bp, Homo sapien
tattccttgcacttgctgtaggcgt

SEQ ID NO: 2576732 - DNA, 25 bp, Homo sapien
catcaagccttcgaatgtgtttatc

SEQ ID NO: 2576733 - DNA, 25 bp, Homo sapien
atctgcttcaaagcgcgccaggtct

SEQ ID NO: 2576734 - DNA, 25 bp, Homo sapien
cctcgccctccggagctttcaaaat

SEQ ID NO: 2576735 - DNA, 25 bp, Homo sapien
tcagatctgcttcaaagcgcgccag

SEQ ID NO: 2576736 - DNA, 25 bp, Homo sapien
gatttaccgtgacaaaactcttcaa

SEQ ID NO: 2576737 - DNA, 25 bp, Homo sapien
actcttcaaaactccatagttaaca

SEQ ID NO: 2576738 - DNA, 25 bp, Homo sapien
cctagtgatcatactttaatgattt

SEQ ID NO: 2576739 - DNA, 25 bp, Homo sapien
caaaactccatagttaacagtaata

SEQ ID NO: 2576740 - DNA, 25 bp, Homo sapien
ttcctctgatgtcctcctgcctcgg

SEQ ID NO: 2576741 - DNA, 25 bp, Homo sapien
tctttttctttggtgtgtcttcctc

SEQ ID NO: 2576742 - DNA, 25 bp, Homo sapien
ctttggtgtgtcttcctctgatgtc

SEQ ID NO: 2576743 - DNA, 25 bp, Homo sapien
gcttctttttctttggtgtgtcttc

SEQ ID NO: 2576744 - DNA, 25 bp, Homo sapien
ggcgcgcagcgtaagaatcagaata

SEQ ID NO: 2576745 - DNA, 25 bp, Homo sapien
ctacatccgggatacaggctatggg

SEQ ID NO: 2576746 - DNA, 25 bp, Homo sapien
ggtccctgcgacactgaaaatgccc

SEQ ID NO: 2576747 - DNA, 25 bp, Homo sapien
acttaaagagtggtctacattggcc

SEQ ID NO: 2576748 - DNA, 25 bp, Homo sapien
ggcacggtcgggacagggccttcag

SEQ ID NO: 2576749 - DNA, 25 bp, Homo sapien
gaagagaccaggaggagtcccactt

SEQ ID NO: 2576750 - DNA, 25 bp, Homo sapien
aggaagactcagaacgctgttgcca

SEQ ID NO: 2576751 - DNA, 25 bp, Homo sapien
cactttcacgcagaaaaggcacggt

SEQ ID NO: 2576752 - DNA, 25 bp, Homo sapien
gccatgaggccacagtggatcttcc

SEQ ID NO: 2576753 - DNA, 25 bp, Homo sapien
gtcactactgggacctgcacggcag

SEQ ID NO: 2576754 - DNA, 25 bp, Homo sapien
tgctggtcagcgcactgtcaggaca

SEQ ID NO: 2576755 - DNA, 25 bp, Homo sapien
cctgcattccttatgcctagcatac

SEQ ID NO: 2576756 - DNA, 25 bp, Homo sapien
cagggtgaccccaactgtcagcggc

SEQ ID NO: 2576757 - DNA, 25 bp, Homo sapien
agggtgaccccaactgtcagcggct

SEQ ID NO: 2576758 - DNA, 25 bp, Homo sapien
ggagccctgtcccttgcacaggcca

SEQ ID NO: 2576759 - DNA, 25 bp, Homo sapien
aagcccgacctgacatcttgagctg

SEQ ID NO: 2576760 - DNA, 25 bp, Homo sapien
atcaccaggttcgagggcgctggcc

SEQ ID NO: 2576761 - DNA, 25 bp, Homo sapien
cttctgcgccgagtccaattctgtc

SEQ ID NO: 2576762 - DNA, 25 bp, Homo sapien
ttcgagggcgctggccagatttgat

SEQ ID NO: 2576763 - DNA, 25 bp, Homo sapien
atcagcgtcacaagtccaggtccag

SEQ ID NO: 2576764 - DNA, 25 bp, Homo sapien
aggtccaggtgctgccgacactgct

SEQ ID NO: 2576765 - DNA, 25 bp, Homo sapien
gacagcagcacgcaagggtctacgt

SEQ ID NO: 2576766 - DNA, 25 bp, Homo sapien
cgattccgggatgccacctgtggct

SEQ ID NO: 2576767 - DNA, 25 bp, Homo sapien
tacaagctgcaggtactatagacag

SEQ ID NO: 2576768 - DNA, 25 bp, Homo sapien
gaacgtggccgtgagaaaaacagtc

SEQ ID NO: 2576769 - DNA, 25 bp, Homo sapien
aaacagtcacgatcagggaaagcca

SEQ ID NO: 2576770 - DNA, 25 bp, Homo sapien
tggtatgtaaacacagcaggttagc

SEQ ID NO: 2576771 - DNA, 25 bp, Homo sapien
catccttgtcactccttcatcccca

SEQ ID NO: 2576772 - DNA, 25 bp, Homo sapien
cagcagcctggcaggtgttccaccc

SEQ ID NO: 2576773 - DNA, 25 bp, Homo sapien
tgttccaccccgtctatgcctccct

SEQ ID NO: 2576774 - DNA, 25 bp, Homo sapien
aagcctgccacctgtagcaccatgg

SEQ ID NO: 2576775 - DNA, 25 bp, Homo sapien
gtccacgggcatgtccagcacatca

SEQ ID NO: 2576776 - DNA, 25 bp, Homo sapien
tgggtccacgggcatgtccagcaca

SEQ ID NO: 2576777 - DNA, 25 bp, Homo sapien
gttcgtttgggtccacgggcatgtc

SEQ ID NO: 2576778 - DNA, 25 bp, Homo sapien
cgggcatgtccagcacatcagaggg

SEQ ID NO: 2576779 - DNA, 25 bp, Homo sapien
ccacgcaggcaaagtgaaaccactc

SEQ ID NO: 2576780 - DNA, 25 bp, Homo sapien
tgggtttcgtggtaaggtccacgca

SEQ ID NO: 2576781 - DNA, 25 bp, Homo sapien
tccacgcaggcaaagtgaaaccact

SEQ ID NO: 2576782 - DNA, 25 bp, Homo sapien
taagcccggcaagattctgccatgg

SEQ ID NO: 2576783 - DNA, 25 bp, Homo sapien
aagcccggcaagattctgccatgga

SEQ ID NO: 2576784 - DNA, 25 bp, Homo sapien
ctaagcccggcaagattctgccatg

SEQ ID NO: 2576785 - DNA, 25 bp, Homo sapien
cagcaaaggggggataaagccacac

SEQ ID NO: 2576786 - DNA, 25 bp, Homo sapien
gcagcaaaggggggataaagccaca

SEQ ID NO: 2576787 - DNA, 25 bp, Homo sapien
aggcacagcagcaaaggggggataa

SEQ ID NO: 2576788 - DNA, 25 bp, Homo sapien
ggcacagcagcaaaggggggataaa

SEQ ID NO: 2576789 - DNA, 25 bp, Homo sapien
ctcccagagtccggaaggttgtcct

SEQ ID NO: 2576790 - DNA, 25 bp, Homo sapien
accaccattcctgggtgacggcatc

SEQ ID NO: 2576791 - DNA, 25 bp, Homo sapien
tatcacgtaacctggtaaccaccat

SEQ ID NO: 2576792 - DNA, 25 bp, Homo sapien
caggaggggccattaacgtgaatat

SEQ ID NO: 2576793 - DNA, 25 bp, Homo sapien
atttctgatttaagacgatccctac

SEQ ID NO: 2576794 - DNA, 25 bp, Homo sapien
catttctgatttaagacgatcccta

SEQ ID NO: 2576795 - DNA, 25 bp, Homo sapien
tcatttctgatttaagacgatccct

SEQ ID NO: 2576796 - DNA, 25 bp, Homo sapien
aatgcagaaagttgccattgccaag

SEQ ID NO: 2576797 - DNA, 25 bp, Homo sapien
caagggtcaggtagagaaaacacac

SEQ ID NO: 2576798 - DNA, 25 bp, Homo sapien
gggcagagccccagatccatgcccc

SEQ ID NO: 2576799 - DNA, 25 bp, Homo sapien
ccggcttcagggctcacatctcatg

SEQ ID NO: 2576800 - DNA, 25 bp, Homo sapien
tgcccagactacaggtttttattta

SEQ ID NO: 2576801 - DNA, 25 bp, Homo sapien
cccgatgttgcccagactacaggtt

SEQ ID NO: 2576802 - DNA, 25 bp, Homo sapien
ctcactgaagcctcggacttccagg

SEQ ID NO: 2576803 - DNA, 25 bp, Homo sapien
gaagcctcggacttccaggctcaag

SEQ ID NO: 2576804 - DNA, 25 bp, Homo sapien
tgacaagaaaggcgcagtgaggccc

SEQ ID NO: 2576805 - DNA, 25 bp, Homo sapien
cctgggcgccatttccgccagcgcg

SEQ ID NO: 2576806 - DNA, 25 bp, Homo sapien
ctgtgacaagaaaggcgcagtgagg

SEQ ID NO: 2576807 - DNA, 25 bp, Homo sapien
acaagaaaggcgcagtgaggccctg

SEQ ID NO: 2576808 - DNA, 25 bp, Homo sapien
tcttcttcctcttttcctggacaca

SEQ ID NO: 2576809 - DNA, 25 bp, Homo sapien
ttcttcttcctcttttcctggacac

SEQ ID NO: 2576810 - DNA, 25 bp, Homo sapien
cttcttcctcttttcctggacacac

SEQ ID NO: 2576811 - DNA, 25 bp, Homo sapien
cagattaacttgctcctcggatccg

SEQ ID NO: 2576812 - DNA, 25 bp, Homo sapien
ctcggatccgggcacacagctcctc

SEQ ID NO: 2576813 - DNA, 25 bp, Homo sapien
gaagggacagattaacttgctcctc

SEQ ID NO: 2576814 - DNA, 25 bp, Homo sapien
gggacagattaacttgctcctcgga

SEQ ID NO: 2576815 - DNA, 25 bp, Homo sapien
taggaaacatccagcgcttcaactg

SEQ ID NO: 2576816 - DNA, 25 bp, Homo sapien
aactggccacggagttactaagtat

SEQ ID NO: 2576817 - DNA, 25 bp, Homo sapien
actaagtatcaaccgaacaaggtag

SEQ ID NO: 2576818 - DNA, 25 bp, Homo sapien
atccagcgcttcaactggccacgga

SEQ ID NO: 2576819 - DNA, 25 bp, Homo sapien
aaggtcgcccttctgtgcgaacagg

SEQ ID NO: 2576820 - DNA, 25 bp, Homo sapien
gagtccctgcaaggtcgcccttctg

SEQ ID NO: 2576821 - DNA, 25 bp, Homo sapien
ccttctgtgcgaacaggctttggtg

SEQ ID NO: 2576822 - DNA, 25 bp, Homo sapien
ggtcgcggcggcgagtccctgcaag

SEQ ID NO: 2576823 - DNA, 25 bp, Homo sapien
tgaagtccaagctaaaaaggcggcg

SEQ ID NO: 2576824 - DNA, 25 bp, Homo sapien
cacgggagaggatttccgagcgcct

SEQ ID NO: 2576825 - DNA, 25 bp, Homo sapien
gaaaaccacaggaaagctacgcgag

SEQ ID NO: 2576826 - DNA, 25 bp, Homo sapien
gaagagccgtttactccggaggtga

SEQ ID NO: 2576827 - DNA, 25 bp, Homo sapien
ggcgctttcccttctaagccgcagg

SEQ ID NO: 2576828 - DNA, 25 bp, Homo sapien
tgtgttcaagaaccgcagaacatga

SEQ ID NO: 2576829 - DNA, 25 bp, Homo sapien
gcccagaggcatccgtgtgttcaag

SEQ ID NO: 2576830 - DNA, 25 bp, Homo sapien
tgtgaagcactgtagcctgccctct

SEQ ID NO: 2576831 - DNA, 25 bp, Homo sapien
tctccaacaaaaatacaaacttagc

SEQ ID NO: 2576832 - DNA, 25 bp, Homo sapien
aagccgaggcgggcaaatcgtgagg

SEQ ID NO: 2576833 - DNA, 25 bp, Homo sapien
atacaaacttagctgggtggccagg

SEQ ID NO: 2576834 - DNA, 25 bp, Homo sapien
agccgaggcgggcaaatcgtgaggt

SEQ ID NO: 2576835 - DNA, 25 bp, Homo sapien
ggtggagcgcaatatcaaattcatt

SEQ ID NO: 2576836 - DNA, 25 bp, Homo sapien
tgtgaacagctcaaaggtggagcgc

SEQ ID NO: 2576837 - DNA, 25 bp, Homo sapien
cagctcaaaggtggagcgcaatatc

SEQ ID NO: 2576838 - DNA, 25 bp, Homo sapien
aaaggtggagcgcaatatcaaattc

SEQ ID NO: 2576839 - DNA, 25 bp, Homo sapien
ggcagccaaaagcatcaacaacccc

SEQ ID NO: 2576840 - DNA, 25 bp, Homo sapien
aaaagcagcgagacctcaggaagcc

SEQ ID NO: 2576841 - DNA, 25 bp, Homo sapien
catcacgtgtcagacaaaagcgtcc

SEQ ID NO: 2576842 - DNA, 25 bp, Homo sapien
tcaacaaccccagcgctttccaggg

SEQ ID NO: 2576843 - DNA, 25 bp, Homo sapien
aggtcaatcgcacagccacagagga

SEQ ID NO: 2576844 - DNA, 25 bp, Homo sapien
cactcaggattcagttgggtccaaa

SEQ ID NO: 2576845 - DNA, 25 bp, Homo sapien
tctctcccacgggtagacagcgtca

SEQ ID NO: 2576846 - DNA, 25 bp, Homo sapien
aggacccacaccttcggctcagatg

SEQ ID NO: 2576847 - DNA, 25 bp, Homo sapien
agatgcagagggctcggtttcacca

SEQ ID NO: 2576848 - DNA, 25 bp, Homo sapien
cagatcactgactgataccgcagca

SEQ ID NO: 2576849 - DNA, 25 bp, Homo sapien
tcccctacaggatttcctcagatca

SEQ ID NO: 2576850 - DNA, 25 bp, Homo sapien
cagcacctagggcacattcgcagat

SEQ ID NO: 2576851 - DNA, 25 bp, Homo sapien
tctcgctgctccaggcagactggaa

SEQ ID NO: 2576852 - DNA, 25 bp, Homo sapien
tctgggccagcgtcattgctcaaag

SEQ ID NO: 2576853 - DNA, 25 bp, Homo sapien
cacggcgtccctggccaacagtggt

SEQ ID NO: 2576854 - DNA, 25 bp, Homo sapien
tggacaccagacaagctggccggtg

SEQ ID NO: 2576855 - DNA, 25 bp, Homo sapien
gacctaacctaggacagggcagacc

SEQ ID NO: 2576856 - DNA, 25 bp, Homo sapien
ggcttaaaattcctctcagcacaag

SEQ ID NO: 2576857 - DNA, 25 bp, Homo sapien
gatgaaacgtggttaaaggtggaca

SEQ ID NO: 2576858 - DNA, 25 bp, Homo sapien
tcagcacaagtattgaaggccaatc

SEQ ID NO: 2576859 - DNA, 25 bp, Homo sapien
cccgagctccaacccgcagcgcccg

SEQ ID NO: 2576860 - DNA, 25 bp, Homo sapien
acgtcccgagctccaacccgcagcg

SEQ ID NO: 2576861 - DNA, 25 bp, Homo sapien
gtcccgagctccaacccgcagcgcc

SEQ ID NO: 2576862 - DNA, 25 bp, Homo sapien
cacgtcccgagctccaacccgcagc

SEQ ID NO: 2576863 - DNA, 25 bp, Homo sapien
ctcagggcccggaggggaagggcag

SEQ ID NO: 2576864 - DNA, 25 bp, Homo sapien
gggcagggagccgctggctgcgcgc

SEQ ID NO: 2576865 - DNA, 25 bp, Homo sapien
acggagacctcgggctcctccttgg

SEQ ID NO: 2576866 - DNA, 25 bp, Homo sapien
gaagggcagggagccgctggctgcg

SEQ ID NO: 2576867 - DNA, 25 bp, Homo sapien
ccaagaacccgcggctcccggagca

SEQ ID NO: 2576868 - DNA, 25 bp, Homo sapien
gagcaccccgcaacagccacgcggg

SEQ ID NO: 2576869 - DNA, 25 bp, Homo sapien
gcgggccacgccagaggccgacggg

SEQ ID NO: 2576870 - DNA, 25 bp, Homo sapien
agccacgcgggccacgccagaggcc

SEQ ID NO: 2576871 - DNA, 25 bp, Homo sapien
ggggtccccggggcggagcagcagc

SEQ ID NO: 2576872 - DNA, 25 bp, Homo sapien
gggtccccggggcggagcagcagcc

SEQ ID NO: 2576873 - DNA, 25 bp, Homo sapien
ggtccccggggcggagcagcagcct

SEQ ID NO: 2576874 - DNA, 25 bp, Homo sapien
acgatgcgctcaaaggcggccaggt

SEQ ID NO: 2576875 - DNA, 25 bp, Homo sapien
cgcaaccagtccacgttgggagcct

SEQ ID NO: 2576876 - DNA, 25 bp, Homo sapien
agcctgcagcgcttccgggtccgtg

SEQ ID NO: 2576877 - DNA, 25 bp, Homo sapien
tagacaccgtggagaacggcaagcg

SEQ ID NO: 2576878 - DNA, 25 bp, Homo sapien
tgggacacctcctccgacgtccgtg

SEQ ID NO: 2576879 - DNA, 25 bp, Homo sapien
acacctcctccgacgtccgtggcct

SEQ ID NO: 2576880 - DNA, 25 bp, Homo sapien
cctccgacgtccgtggcctcagcag

SEQ ID NO: 2576881 - DNA, 25 bp, Homo sapien
tgtgggacacctcctccgacgtccg

SEQ ID NO: 2576882 - DNA, 25 bp, Homo sapien
tgtgttgcccccctgtgggttcacg

SEQ ID NO: 2576883 - DNA, 25 bp, Homo sapien
tgtggaagctgaggacccggttcat

SEQ ID NO: 2576884 - DNA, 25 bp, Homo sapien
ggttcacggccaggttcctctcgtg

SEQ ID NO: 2576885 - DNA, 25 bp, Homo sapien
tctcgtcaaagacggggacgctgcc

SEQ ID NO: 2576886 - DNA, 25 bp, Homo sapien
cccacagttgcagacgctggcaagg

SEQ ID NO: 2576887 - DNA, 25 bp, Homo sapien
gccccgacgggtggcacaggcttac

SEQ ID NO: 2576888 - DNA, 25 bp, Homo sapien
ggccccgacgggtggcacaggctta

SEQ ID NO: 2576889 - DNA, 25 bp, Homo sapien
gacgctggcaaggaagaactccacc

SEQ ID NO: 2576890 - DNA, 25 bp, Homo sapien
tccagcgttggttgccacgtttccc

SEQ ID NO: 2576891 - DNA, 25 bp, Homo sapien
gcagtgagccatatcgaagaaaccg

SEQ ID NO: 2576892 - DNA, 25 bp, Homo sapien
taagtccagcggcatgatgaagtcc

SEQ ID NO: 2576893 - DNA, 25 bp, Homo sapien
gatgaagtcccgttcctccacatac

SEQ ID NO: 2576894 - DNA, 25 bp, Homo sapien
gcttgggtggacacaagatggacac

SEQ ID NO: 2576895 - DNA, 25 bp, Homo sapien
gctgcttcaggtcatagcccgtgtt

SEQ ID NO: 2576896 - DNA, 25 bp, Homo sapien
gatggacaccgtggtgatgatcccc

SEQ ID NO: 2576897 - DNA, 25 bp, Homo sapien
tccgacccgatgaacagctgcttca

SEQ ID NO: 2576898 - DNA, 25 bp, Homo sapien
gagacacgggaaccgactgtccttg

SEQ ID NO: 2576899 - DNA, 25 bp, Homo sapien
atcagagcagacgctcgagcccaac

SEQ ID NO: 2576900 - DNA, 25 bp, Homo sapien
cagagatgtcaggagacacgggaac

SEQ ID NO: 2576901 - DNA, 25 bp, Homo sapien
tggattcctgattcctttggaagca

SEQ ID NO: 2576902 - DNA, 25 bp, Homo sapien
gcggggaggaggcggtgtgggggca

SEQ ID NO: 2576903 - DNA, 25 bp, Homo sapien
tggagggcggggaggaggcggtgtg

SEQ ID NO: 2576904 - DNA, 25 bp, Homo sapien
gggaggaggcggtgtgggggcagca

SEQ ID NO: 2576905 - DNA, 25 bp, Homo sapien
ctgaaggtggagggcggggaggagg

SEQ ID NO: 2576906 - DNA, 25 bp, Homo sapien
ggaaccaccgatccagatggcactg

SEQ ID NO: 2576907 - DNA, 25 bp, Homo sapien
agtaagtcggcagaagcagtcaagg

SEQ ID NO: 2576908 - DNA, 25 bp, Homo sapien
tgaagaggaaccaccgatccagatg

SEQ ID NO: 2576909 - DNA, 25 bp, Homo sapien
ggcactgccgcccagagagtaagtc

SEQ ID NO: 2576910 - DNA, 25 bp, Homo sapien
ctggagtgcgaagagcaggatgcgg

SEQ ID NO: 2576911 - DNA, 25 bp, Homo sapien
cccaggaccacaggcgggcggcaca

SEQ ID NO: 2576912 - DNA, 25 bp, Homo sapien
caggaccacaggcgggcggcacaca

SEQ ID NO: 2576913 - DNA, 25 bp, Homo sapien
agtgcgaagagcaggatgcggcagc

SEQ ID NO: 2576914 - DNA, 25 bp, Homo sapien
tccacccggcttagacgtgggcgtg

SEQ ID NO: 2576915 - DNA, 25 bp, Homo sapien
gcctgttccacccggcttagacgtg

SEQ ID NO: 2576916 - DNA, 25 bp, Homo sapien
cgtggcacgaagaggcgagtgactc

SEQ ID NO: 2576917 - DNA, 25 bp, Homo sapien
cgtgggcgtggcacgaagaggcgag

SEQ ID NO: 2576918 - DNA, 25 bp, Homo sapien
ctggagagctggaccgagcccacga

SEQ ID NO: 2576919 - DNA, 25 bp, Homo sapien
agcacgagggacaccaggaccatcc

SEQ ID NO: 2576920 - DNA, 25 bp, Homo sapien
gacaagagtgcctcgtcggaagtcg

SEQ ID NO: 2576921 - DNA, 25 bp, Homo sapien
actgggcatcttgctcagagtgggc

SEQ ID NO: 2576922 - DNA, 25 bp, Homo sapien
gcaatgcaaaggcatgtggatatca

SEQ ID NO: 2576923 - DNA, 25 bp, Homo sapien
cagggcgagacagggaggcaatgca

SEQ ID NO: 2576924 - DNA, 25 bp, Homo sapien
gaggcaatgcaaaggcatgtggata

SEQ ID NO: 2576925 - DNA, 25 bp, Homo sapien
atgcaaaggcatgtggatatcagag

SEQ ID NO: 2576926 - DNA, 25 bp, Homo sapien
ggactcagagggggcgtatcttggg

SEQ ID NO: 2576927 - DNA, 25 bp, Homo sapien
tcagagggggcgtatcttgggaatt

SEQ ID NO: 2576928 - DNA, 25 bp, Homo sapien
gactcagagggggcgtatcttggga

SEQ ID NO: 2576929 - DNA, 25 bp, Homo sapien
ctcagagggggcgtatcttgggaat

SEQ ID NO: 2576930 - DNA, 25 bp, Homo sapien
atcagcccgactcatgtgggtgggt

SEQ ID NO: 2576931 - DNA, 25 bp, Homo sapien
aacatcagcccgactcatgtgggtg

SEQ ID NO: 2576932 - DNA, 25 bp, Homo sapien
caacatcagcccgactcatgtgggt

SEQ ID NO: 2576933 - DNA, 25 bp, Homo sapien
agcaacatcagcccgactcatgtgg

SEQ ID NO: 2576934 - DNA, 25 bp, Homo sapien
aaacgggtcacagcatgtcaagcac

SEQ ID NO: 2576935 - DNA, 25 bp, Homo sapien
ctgaaacgggtcacagcatgtcaag

SEQ ID NO: 2576936 - DNA, 25 bp, Homo sapien
cgggtcacagcatgtcaagcaccac

SEQ ID NO: 2576937 - DNA, 25 bp, Homo sapien
gaaacgggtcacagcatgtcaagca

SEQ ID NO: 2576938 - DNA, 25 bp, Homo sapien
ggtgctgaaggtctgcagaacctca

SEQ ID NO: 2576939 - DNA, 25 bp, Homo sapien
aggtgctgaaggtctgcagaacctc

SEQ ID NO: 2576940 - DNA, 25 bp, Homo sapien
tgctgaaggtctgcagaacctcagc

SEQ ID NO: 2576941 - DNA, 25 bp, Homo sapien
ctgaaggtctgcagaacctcagcaa

SEQ ID NO: 2576942 - DNA, 25 bp, Homo sapien
agcatccatgaactcgaatgcagac

SEQ ID NO: 2576943 - DNA, 25 bp, Homo sapien
cagcatccatgaactcgaatgcaga

SEQ ID NO: 2576944 - DNA, 25 bp, Homo sapien
aagaatcagggctgctcgggcagaa

SEQ ID NO: 2576945 - DNA, 25 bp, Homo sapien
gaacagctgtaatagcaaccactga

SEQ ID NO: 2576946 - DNA, 25 bp, Homo sapien
gctctctggttaagctgactttcag

SEQ ID NO: 2576947 - DNA, 25 bp, Homo sapien
ctgatctttcgtggccaagaaggac

SEQ ID NO: 2576948 - DNA, 25 bp, Homo sapien
tggccatggtcccatcggtcaccag

SEQ ID NO: 2576949 - DNA, 25 bp, Homo sapien
gcttctcagcgtcatggcctgcgtt

SEQ ID NO: 2576950 - DNA, 25 bp, Homo sapien
tggcctgcgttggagcctgaagtct

SEQ ID NO: 2576951 - DNA, 25 bp, Homo sapien
tcgatgaggacgtaaaacggactct

SEQ ID NO: 2576952 - DNA, 25 bp, Homo sapien
tgactggccgcttaaccacaggctg

SEQ ID NO: 2576953 - DNA, 25 bp, Homo sapien
taggactcccgaggtccaggctaag

SEQ ID NO: 2576954 - DNA, 25 bp, Homo sapien
acacgactctatgcggagctgccgc

SEQ ID NO: 2576955 - DNA, 25 bp, Homo sapien
ttccaggcatcccaagacaaggctg

SEQ ID NO: 2576956 - DNA, 25 bp, Homo sapien
cggtgaaggtaactgagggctcctc

SEQ ID NO: 2576957 - DNA, 25 bp, Homo sapien
ccaggtcccggtaacagtgaccaat

SEQ ID NO: 2576958 - DNA, 25 bp, Homo sapien
tcaggccctggtgacggtgaccaag

SEQ ID NO: 2576959 - DNA, 25 bp, Homo sapien
accaatggctcccactatccaggcc

SEQ ID NO: 2576960 - DNA, 25 bp, Homo sapien
aacacccaggctaacacgagcctga

SEQ ID NO: 2576961 - DNA, 25 bp, Homo sapien
cacgagcctgaaatcaactaagcgg

SEQ ID NO: 2576962 - DNA, 25 bp, Homo sapien
taagcgggagtaaagtcctgcgccc

SEQ ID NO: 2576963 - DNA, 25 bp, Homo sapien
cctgaaatcaactaagcgggagtaa

SEQ ID NO: 2576964 - DNA, 25 bp, Homo sapien
tctggtgcgaccagtgtggcttcca

SEQ ID NO: 2576965 - DNA, 25 bp, Homo sapien
gccgtggtcactactcagaggagcc

SEQ ID NO: 2576966 - DNA, 25 bp, Homo sapien
tcaacatgtccaaaaacccagggct

SEQ ID NO: 2576967 - DNA, 25 bp, Homo sapien
tggaaagcagaatggctcaggacct

SEQ ID NO: 2576968 - DNA, 25 bp, Homo sapien
aaaataccacctcctcgccaccact

SEQ ID NO: 2576969 - DNA, 25 bp, Homo sapien
ttattgaggcaaccacaatgccaca

SEQ ID NO: 2576970 - DNA, 25 bp, Homo sapien
gttttattgaggcaaccacaatgcc

SEQ ID NO: 2576971 - DNA, 25 bp, Homo sapien
aataccacctcctcgccaccactgg

SEQ ID NO: 2576972 - DNA, 25 bp, Homo sapien
ggctgcagtgagctgcaactgtgtc

SEQ ID NO: 2576973 - DNA, 25 bp, Homo sapien
gctgcagtgagctgcaactgtgtca

SEQ ID NO: 2576974 - DNA, 25 bp, Homo sapien
cagtgagctgcaactgtgtcactgc

SEQ ID NO: 2576975 - DNA, 25 bp, Homo sapien
gagctgcaactgtgtcactgcactc

SEQ ID NO: 2576976 - DNA, 25 bp, Homo sapien
cctccagagaccctatcatttcagg

SEQ ID NO: 2576977 - DNA, 25 bp, Homo sapien
ccagagaccctatcatttcaggaaa

SEQ ID NO: 2576978 - DNA, 25 bp, Homo sapien
tgcccctccagagaccctatcattt

SEQ ID NO: 2576979 - DNA, 25 bp, Homo sapien
cctgcccctccagagaccctatcat

SEQ ID NO: 2576980 - DNA, 25 bp, Homo sapien
gcttgcttcgaacttccattgtgga

SEQ ID NO: 2576981 - DNA, 25 bp, Homo sapien
gaaccgggccaaatcctagggctca

SEQ ID NO: 2576982 - DNA, 25 bp, Homo sapien
gctcagacagatcggcctgtggttt

SEQ ID NO: 2576983 - DNA, 25 bp, Homo sapien
tgtggtttgcgtggcttttgcttgc

SEQ ID NO: 2576984 - DNA, 25 bp, Homo sapien
ggaggcagggacatggcgggtgggc

SEQ ID NO: 2576985 - DNA, 25 bp, Homo sapien
aggcagggacatggcgggtgggcca

SEQ ID NO: 2576986 - DNA, 25 bp, Homo sapien
gggaaggacatggtgggtgggccac

SEQ ID NO: 2576987 - DNA, 25 bp, Homo sapien
gtgggccacaggggagggaaggaca

SEQ ID NO: 2576988 - DNA, 25 bp, Homo sapien
gtcatgacacggcacagagtggcaa

SEQ ID NO: 2576989 - DNA, 25 bp, Homo sapien
agcttcaggtcatgacacggcacag

SEQ ID NO: 2576990 - DNA, 25 bp, Homo sapien
caggtcatgacacggcacagagtgg

SEQ ID NO: 2576991 - DNA, 25 bp, Homo sapien
ttcaggtcatgacacggcacagagt

SEQ ID NO: 2576992 - DNA, 25 bp, Homo sapien
tcccagacagtgaatgtcccaggct

SEQ ID NO: 2576993 - DNA, 25 bp, Homo sapien
gcaatcaggcggctgggacacctca

SEQ ID NO: 2576994 - DNA, 25 bp, Homo sapien
acgacagcaccgagcaccctgggac

SEQ ID NO: 2576995 - DNA, 25 bp, Homo sapien
tcacagaagggggacagccatgacg

SEQ ID NO: 2576996 - DNA, 25 bp, Homo sapien
acaccacacggggttagggcagcag

SEQ ID NO: 2576997 - DNA, 25 bp, Homo sapien
agacagcgaatgtcccagaccagga

SEQ ID NO: 2576998 - DNA, 25 bp, Homo sapien
acaagggctggctatgggaacgaca

SEQ ID NO: 2576999 - DNA, 25 bp, Homo sapien
tatcttcaccaggtgaggctccgac

SEQ ID NO: 2577000 - DNA, 25 bp, Homo sapien
ggctcagcgcctctgtgatcctttc

SEQ ID NO: 2577001 - DNA, 25 bp, Homo sapien
agcccaccacgtgcttggcgtgcgg

SEQ ID NO: 2577002 - DNA, 25 bp, Homo sapien
gtacttgtacacgtagccatcccgg

SEQ ID NO: 2577003 - DNA, 25 bp, Homo sapien
gtcacgatgtcgtagagccgctcca

SEQ ID NO: 2577004 - DNA, 25 bp, Homo sapien
gatgacacactcatcatgcccttaa

SEQ ID NO: 2577005 - DNA, 25 bp, Homo sapien
tcaccaagatggtctgctttatctg

SEQ ID NO: 2577006 - DNA, 25 bp, Homo sapien
tcctggcttgaggtcatattctgaa

SEQ ID NO: 2577007 - DNA, 25 bp, Homo sapien
ttacaaagtaacagagggctcattc

SEQ ID NO: 2577008 - DNA, 25 bp, Homo sapien
cagacaagtggacgcagagaattca

SEQ ID NO: 2577009 - DNA, 25 bp, Homo sapien
acaagtacgcaagaaacctgtccgg

SEQ ID NO: 2577010 - DNA, 25 bp, Homo sapien
cagggcgaccaccaacagttagtaa

SEQ ID NO: 2577011 - DNA, 25 bp, Homo sapien
cattcaagacggcaaacaagtacgc

SEQ ID NO: 2577012 - DNA, 25 bp, Homo sapien
cccacgctgtggcaaaaagccttcg

SEQ ID NO: 2577013 - DNA, 25 bp, Homo sapien
tcagcaggctggagatcccagcagg

SEQ ID NO: 2577014 - DNA, 25 bp, Homo sapien
ccacgctgtggcaaaaagccttcaa

SEQ ID NO: 2577015 - DNA, 25 bp, Homo sapien
gcttgagtctccatctgggtcagaa

SEQ ID NO: 2577016 - DNA, 25 bp, Homo sapien
atctgcagatgtggagcccgcaaat

SEQ ID NO: 2577017 - DNA, 25 bp, Homo sapien
aagtcctcgcactgtgcagccatca

SEQ ID NO: 2577018 - DNA, 25 bp, Homo sapien
taaacgacagccaaagtgacggggc

SEQ ID NO: 2577019 - DNA, 25 bp, Homo sapien
tgcagatgtggagcccgcaaataca

SEQ ID NO: 2577020 - DNA, 25 bp, Homo sapien
gaagagtccagaccgtcttccagtc

SEQ ID NO: 2577021 - DNA, 25 bp, Homo sapien
agagtccagaccgtcttccagtctg

SEQ ID NO: 2577022 - DNA, 25 bp, Homo sapien
tccagaccgtcttccagtctgtatc

SEQ ID NO: 2577023 - DNA, 25 bp, Homo sapien
accgtcttccagtctgtatccccag

SEQ ID NO: 2577024 - DNA, 25 bp, Homo sapien
tccgccgtcacattgaggtgcaggt

SEQ ID NO: 2577025 - DNA, 25 bp, Homo sapien
aagcccactccgtgctccgcgctga

SEQ ID NO: 2577026 - DNA, 25 bp, Homo sapien
tgctgtagcccaggacgtccctctt

SEQ ID NO: 2577027 - DNA, 25 bp, Homo sapien
cccggccgtccactcgtacacgtgg

SEQ ID NO: 2577028 - DNA, 25 bp, Homo sapien
cagctggcagccctctagaagatgt

SEQ ID NO: 2577029 - DNA, 25 bp, Homo sapien
agcagagccgcagcgctcaggtcct

SEQ ID NO: 2577030 - DNA, 25 bp, Homo sapien
ttccacgtgggcaaagctgccgcca

SEQ ID NO: 2577031 - DNA, 25 bp, Homo sapien
ggaaatgacacattcctgtccagac

SEQ ID NO: 2577032 - DNA, 25 bp, Homo sapien
cagctgacgagcagaaacacactct

SEQ ID NO: 2577033 - DNA, 25 bp, Homo sapien
tttttactggacattcatgacagaa

SEQ ID NO: 2577034 - DNA, 25 bp, Homo sapien
gcagcaccgcacgttctttgtagga

SEQ ID NO: 2577035 - DNA, 25 bp, Homo sapien
cagaatgagatgtgcatccagctgc

SEQ ID NO: 2577036 - DNA, 25 bp, Homo sapien
acctctgtcagtgcggctgatgcca

SEQ ID NO: 2577037 - DNA, 25 bp, Homo sapien
ggatttcacctctgtcagtgcggct

SEQ ID NO: 2577038 - DNA, 25 bp, Homo sapien
gcagctcctccctgtcgagaagcat

SEQ ID NO: 2577039 - DNA, 25 bp, Homo sapien
ttcacctctgtcagtgcggctgatg

SEQ ID NO: 2577040 - DNA, 25 bp, Homo sapien
ttaaacagtctctttcattgatgtc

SEQ ID NO: 2577041 - DNA, 25 bp, Homo sapien
taaacagtctctttcattgatgtca

SEQ ID NO: 2577042 - DNA, 25 bp, Homo sapien
aaacagtctctttcattgatgtcac

SEQ ID NO: 2577043 - DNA, 25 bp, Homo sapien
gagaagaaaacaaaaatctgcctct

SEQ ID NO: 2577044 - DNA, 25 bp, Homo sapien
ctgagaagaaaacaaaaatctgcct

SEQ ID NO: 2577045 - DNA, 25 bp, Homo sapien
agaagaaaacaaaaatctgcctctt

SEQ ID NO: 2577046 - DNA, 25 bp, Homo sapien
tgagaagaaaacaaaaatctgcctc

SEQ ID NO: 2577047 - DNA, 25 bp, Homo sapien
ctctgtgtccgggctccaagacctc

SEQ ID NO: 2577048 - DNA, 25 bp, Homo sapien
atgttgccgtgcaccacctgctctg

SEQ ID NO: 2577049 - DNA, 25 bp, Homo sapien
cgcagatgctgactgccagtccgca

SEQ ID NO: 2577050 - DNA, 25 bp, Homo sapien
tgctgactgccagtccgcagctctg

SEQ ID NO: 2577051 - DNA, 25 bp, Homo sapien
tggccccagtctctctggtatccat

SEQ ID NO: 2577052 - DNA, 25 bp, Homo sapien
cccgtggccccagtctctctggtat

SEQ ID NO: 2577053 - DNA, 25 bp, Homo sapien
cgtggccccagtctctctggtatcc

SEQ ID NO: 2577054 - DNA, 25 bp, Homo sapien
ccccgtggccccagtctctctggta

SEQ ID NO: 2577055 - DNA, 25 bp, Homo sapien
tttgattccactggcgaagaagtag

SEQ ID NO: 2577056 - DNA, 25 bp, Homo sapien
tgggagtggagcacggacctgttct

SEQ ID NO: 2577057 - DNA, 25 bp, Homo sapien
tagggcagccgagagccatggcttt

SEQ ID NO: 2577058 - DNA, 25 bp, Homo sapien
tccactggcgaagaagtagggcagc

SEQ ID NO: 2577059 - DNA, 25 bp, Homo sapien
ttcagcatctgctatcacatcatac

SEQ ID NO: 2577060 - DNA, 25 bp, Homo sapien
cagcatctgctatcacatcatactg

SEQ ID NO: 2577061 - DNA, 25 bp, Homo sapien
gatccactccacagttctcacttct

SEQ ID NO: 2577062 - DNA, 25 bp, Homo sapien
tcttcagcatctgctatcacatcat

SEQ ID NO: 2577063 - DNA, 25 bp, Homo sapien
cagacccggtggtgaaagccacctt

SEQ ID NO: 2577064 - DNA, 25 bp, Homo sapien
cagatactatgcagacccggtggtg

SEQ ID NO: 2577065 - DNA, 25 bp, Homo sapien
gtgggtggaggtcatagtgggcagc

SEQ ID NO: 2577066 - DNA, 25 bp, Homo sapien
ccggtggtgaaagccaccttcccat

SEQ ID NO: 2577067 - DNA, 25 bp, Homo sapien
acatagccttggtcagtccaacctt

SEQ ID NO: 2577068 - DNA, 25 bp, Homo sapien
gccttggtcagtccaaccttcctcc

SEQ ID NO: 2577069 - DNA, 25 bp, Homo sapien
catagccttggtcagtccaaccttc

SEQ ID NO: 2577070 - DNA, 25 bp, Homo sapien
tagccttggtcagtccaaccttcct

SEQ ID NO: 2577071 - DNA, 25 bp, Homo sapien
tgattctcactggtgcatgcagggt

SEQ ID NO: 2577072 - DNA, 25 bp, Homo sapien
aagagttgctttgctccccgctgag

SEQ ID NO: 2577073 - DNA, 25 bp, Homo sapien
gctgtgaagcctctatctgtgtcag

SEQ ID NO: 2577074 - DNA, 25 bp, Homo sapien
ccaagcacagcctttagggagatga

SEQ ID NO: 2577075 - DNA, 25 bp, Homo sapien
taaagggatacattaatctctggca

SEQ ID NO: 2577076 - DNA, 25 bp, Homo sapien
tttacaggaagagaatcatccttgg

SEQ ID NO: 2577077 - DNA, 25 bp, Homo sapien
gagtagaatgggtatatagaagcac

SEQ ID NO: 2577078 - DNA, 25 bp, Homo sapien
cattttgtcaactcaggcaattatg

SEQ ID NO: 2577079 - DNA, 25 bp, Homo sapien
gtacaccaggcatgctcctggcagc

SEQ ID NO: 2577080 - DNA, 25 bp, Homo sapien
ctatggctgatcagaaagagtactt

SEQ ID NO: 2577081 - DNA, 25 bp, Homo sapien
tccacacatatgttgtgagtgcctg

SEQ ID NO: 2577082 - DNA, 25 bp, Homo sapien
gctgatcagaaagagtacttggtgt

SEQ ID NO: 2577083 - DNA, 25 bp, Homo sapien
tgccttagcatgatctgaaacctta

SEQ ID NO: 2577084 - DNA, 25 bp, Homo sapien
tacatgccttagcatgatctgaaac

SEQ ID NO: 2577085 - DNA, 25 bp, Homo sapien
tagcatgatctgaaaccttaatatt

SEQ ID NO: 2577086 - DNA, 25 bp, Homo sapien
gaatttacatgccttagcatgatct

SEQ ID NO: 2577087 - DNA, 25 bp, Homo sapien
agagagtctggcttctaccacatag

SEQ ID NO: 2577088 - DNA, 25 bp, Homo sapien
ctacaggaataaagagagtctggct

SEQ ID NO: 2577089 - DNA, 25 bp, Homo sapien
tgagcttcggaattcttggagaaaa

SEQ ID NO: 2577090 - DNA, 25 bp, Homo sapien
taccacatagtttgtgagcttcgga

SEQ ID NO: 2577091 - DNA, 25 bp, Homo sapien
ctttgatttgtaggatgaaggagga

SEQ ID NO: 2577092 - DNA, 25 bp, Homo sapien
gatttgtaggatgaaggaggaattt

SEQ ID NO: 2577093 - DNA, 25 bp, Homo sapien
tttgatttgtaggatgaaggaggaa

SEQ ID NO: 2577094 - DNA, 25 bp, Homo sapien
aactttgatttgtaggatgaaggag

SEQ ID NO: 2577095 - DNA, 25 bp, Homo sapien
tcaggctcctctcaagaagaacggt

SEQ ID NO: 2577096 - DNA, 25 bp, Homo sapien
gaagatgaagacagacctggtgctg

SEQ ID NO: 2577097 - DNA, 25 bp, Homo sapien
accttttgagcgcaacctggttggc

SEQ ID NO: 2577098 - DNA, 25 bp, Homo sapien
cctcgcttggcctgaatttagatcc

SEQ ID NO: 2577099 - DNA, 25 bp, Homo sapien
gccaaagaggaccactcgagtgaca

SEQ ID NO: 2577100 - DNA, 25 bp, Homo sapien
aagcgataataagcagagcgtggac

SEQ ID NO: 2577101 - DNA, 25 bp, Homo sapien
gacatccctggtgtatacactggaa

SEQ ID NO: 2577102 - DNA, 25 bp, Homo sapien
tgcactcccacagaagttgggtaaa

SEQ ID NO: 2577103 - DNA, 25 bp, Homo sapien
tttagctgattgactggcctctgcc

SEQ ID NO: 2577104 - DNA, 25 bp, Homo sapien
ttttgtacccatttagctgattgac

SEQ ID NO: 2577105 - DNA, 25 bp, Homo sapien
ccatcttcaaaatcctcatcatctc

SEQ ID NO: 2577106 - DNA, 25 bp, Homo sapien
catcttgcaggtgggaagtctgagc

SEQ ID NO: 2577107 - DNA, 25 bp, Homo sapien
gcacttctcatggtgatgggcaggt

SEQ ID NO: 2577108 - DNA, 25 bp, Homo sapien
aagtctgagccatgggttgttctga

SEQ ID NO: 2577109 - DNA, 25 bp, Homo sapien
acaaggagaggacccttctgcccgt

SEQ ID NO: 2577110 - DNA, 25 bp, Homo sapien
tttcttcatcttcgagggacctcag

SEQ ID NO: 2577111 - DNA, 25 bp, Homo sapien
aaatctgaaatttgcgggagaggcg

SEQ ID NO: 2577112 - DNA, 25 bp, Homo sapien
cctgggaagtgttgatgttgcagtc

SEQ ID NO: 2577113 - DNA, 25 bp, Homo sapien
taaggaattgctcatgactgtggat

SEQ ID NO: 2577114 - DNA, 25 bp, Homo sapien
ccaccttcaagtcctaagtctttga

SEQ ID NO: 2577115 - DNA, 25 bp, Homo sapien
tctagacttgttgggtatgaggcac

SEQ ID NO: 2577116 - DNA, 25 bp, Homo sapien
catgaattgccttgggtttccacag

SEQ ID NO: 2577117 - DNA, 25 bp, Homo sapien
ggtatgaggcacatctgagcatgaa

SEQ ID NO: 2577118 - DNA, 25 bp, Homo sapien
taggcactaggcagtcctacacaga

SEQ ID NO: 2577119 - DNA, 25 bp, Homo sapien
taaattcaggattcacccagatggg

SEQ ID NO: 2577120 - DNA, 25 bp, Homo sapien
aaaaccgctgagctaaacagcatgc

SEQ ID NO: 2577121 - DNA, 25 bp, Homo sapien
gaacatcacaagaaggctaggcact

SEQ ID NO: 2577122 - DNA, 25 bp, Homo sapien
gaggaccaaggacctggctggtcac

SEQ ID NO: 2577123 - DNA, 25 bp, Homo sapien
agctcttccttgaggcacacgtcca

SEQ ID NO: 2577124 - DNA, 25 bp, Homo sapien
gctcttccttgaggcacacgtccat

SEQ ID NO: 2577125 - DNA, 25 bp, Homo sapien
ctgtgcaggacccactgtgcgctgt

SEQ ID NO: 2577126 - DNA, 25 bp, Homo sapien
tgtccacccggaacactctgagtgt

SEQ ID NO: 2577127 - DNA, 25 bp, Homo sapien
agtggcccctactggcctctcttgc

SEQ ID NO: 2577128 - DNA, 25 bp, Homo sapien
ctcttgctcttggagggcgctctgg

SEQ ID NO: 2577129 - DNA, 25 bp, Homo sapien
gcctgctcattgcagggatccacag

SEQ ID NO: 2577130 - DNA, 25 bp, Homo sapien
tttgcagccggtcaccccagggatg

SEQ ID NO: 2577131 - DNA, 25 bp, Homo sapien
gggcttgaagcagcacattgggcct

SEQ ID NO: 2577132 - DNA, 25 bp, Homo sapien
ccttcgggaaaggtatgcaggatct

SEQ ID NO: 2577133 - DNA, 25 bp, Homo sapien
atcccagttccccatagccagtgac

SEQ ID NO: 2577134 - DNA, 25 bp, Homo sapien
ggactttcagattcacattcgtttt

SEQ ID NO: 2577135 - DNA, 25 bp, Homo sapien
ctgtggcattttggcctctgccatg

SEQ ID NO: 2577136 - DNA, 25 bp, Homo sapien
tcagaattggctctttgtagtgttt

SEQ ID NO: 2577137 - DNA, 25 bp, Homo sapien
tacattcccgttctgacaattcaga

SEQ ID NO: 2577138 - DNA, 25 bp, Homo sapien
catggcttggcttcagcagtctgct

SEQ ID NO: 2577139 - DNA, 25 bp, Homo sapien
gcagaccatggcttggcttcagcag

SEQ ID NO: 2577140 - DNA, 25 bp, Homo sapien
tctctgaggatcagtggatgacggt

SEQ ID NO: 2577141 - DNA, 25 bp, Homo sapien
gcttctctctgaggatcagtggatg

SEQ ID NO: 2577142 - DNA, 25 bp, Homo sapien
tgtgcctagttctcgctgctcattg

SEQ ID NO: 2577143 - DNA, 25 bp, Homo sapien
gaggaggactctggtgccaaagtgg

SEQ ID NO: 2577144 - DNA, 25 bp, Homo sapien
tgcctatgggcttcagaggaatgct

SEQ ID NO: 2577145 - DNA, 25 bp, Homo sapien
gggctccataccctcgctgcctttt

SEQ ID NO: 2577146 - DNA, 25 bp, Homo sapien
ggctcgtgatggctccacggcaaga

SEQ ID NO: 2577147 - DNA, 25 bp, Homo sapien
tgcatggacgtgcacagcattcctg

SEQ ID NO: 2577148 - DNA, 25 bp, Homo sapien
tcagggagtccctggacatcgtgct

SEQ ID NO: 2577149 - DNA, 25 bp, Homo sapien
tcccatccatagggaggccttcagg

SEQ ID NO: 2577150 - DNA, 25 bp, Homo sapien
ggtcgacagcgtggggcgccagaca

SEQ ID NO: 2577151 - DNA, 25 bp, Homo sapien
ctggtcgacagcgtggggcgccaga

SEQ ID NO: 2577152 - DNA, 25 bp, Homo sapien
tggtcgacagcgtggggcgccagac

SEQ ID NO: 2577153 - DNA, 25 bp, Homo sapien
tcacctggatgaaaagcgaagtccc

SEQ ID NO: 2577154 - DNA, 25 bp, Homo sapien
gaagaaaaggccgatgctgaagccg

SEQ ID NO: 2577155 - DNA, 25 bp, Homo sapien
tgtgcatccctggagtaaacgcaga

SEQ ID NO: 2577156 - DNA, 25 bp, Homo sapien
gcagataaccattccaccttgtggg

SEQ ID NO: 2577157 - DNA, 25 bp, Homo sapien
gcggggggccctcgtggtcatggac

SEQ ID NO: 2577158 - DNA, 25 bp, Homo sapien
gccctcgtggtcatggactgtgaat

SEQ ID NO: 2577159 - DNA, 25 bp, Homo sapien
gggccctcgtggtcatggactgtga

SEQ ID NO: 2577160 - DNA, 25 bp, Homo sapien
cctcgtggtcatggactgtgaatta

SEQ ID NO: 2577161 - DNA, 25 bp, Homo sapien
ttagggcttgaaggtagcactggcc

SEQ ID NO: 2577162 - DNA, 25 bp, Homo sapien
tctgctcatactggtgccgctatta

SEQ ID NO: 2577163 - DNA, 25 bp, Homo sapien
taagcgagggcactttgctgcattc

SEQ ID NO: 2577164 - DNA, 25 bp, Homo sapien
tgcattctgtggcaccaaacaccgc

SEQ ID NO: 2577165 - DNA, 25 bp, Homo sapien
caggaaacattgacgggcggctctt

SEQ ID NO: 2577166 - DNA, 25 bp, Homo sapien
taaagtaagccgcagaaaagcagtg

SEQ ID NO: 2577167 - DNA, 25 bp, Homo sapien
gaattgcgcatccttgtgtccggtc

SEQ ID NO: 2577168 - DNA, 25 bp, Homo sapien
gaattctttgcacatcgttgaccgg

SEQ ID NO: 2577169 - DNA, 25 bp, Homo sapien
ggctcagtgactgacactctctggg

SEQ ID NO: 2577170 - DNA, 25 bp, Homo sapien
tctgggtgatgcgtttgatttgtca

SEQ ID NO: 2577171 - DNA, 25 bp, Homo sapien
tgactgacactctctgggtgatgcg

SEQ ID NO: 2577172 - DNA, 25 bp, Homo sapien
tgggttgtggtttgggctcagtgac

SEQ ID NO: 2577173 - DNA, 25 bp, Homo sapien
gcattataaggaccgaagtagtaac

SEQ ID NO: 2577174 - DNA, 25 bp, Homo sapien
tcctctagatggagcagtactcgct

SEQ ID NO: 2577175 - DNA, 25 bp, Homo sapien
ttgttggcttcctctagatggagca

SEQ ID NO: 2577176 - DNA, 25 bp, Homo sapien
tttttgcattataaggaccgaagta

SEQ ID NO: 2577177 - DNA, 25 bp, Homo sapien
agcgggtgagatgacgggcagagca

SEQ ID NO: 2577178 - DNA, 25 bp, Homo sapien
acgggcagagcagtccctgtgctga

SEQ ID NO: 2577179 - DNA, 25 bp, Homo sapien
gtggagggcgaagcgggtgagatga

SEQ ID NO: 2577180 - DNA, 25 bp, Homo sapien
agatgaggtggagggcgaagcgggt

SEQ ID NO: 2577181 - DNA, 25 bp, Homo sapien
ccccgagagaaatcaagcgcaacac

SEQ ID NO: 2577182 - DNA, 25 bp, Homo sapien
ggccccgagagaaatcaagcgcaac

SEQ ID NO: 2577183 - DNA, 25 bp, Homo sapien
ccgagagaaatcaagcgcaacaccg

SEQ ID NO: 2577184 - DNA, 25 bp, Homo sapien
gagagaaatcaagcgcaacaccggt

SEQ ID NO: 2577185 - DNA, 25 bp, Homo sapien
actgcgccggtttcctctacagcgg

SEQ ID NO: 2577186 - DNA, 25 bp, Homo sapien
ccctccatcactgcgccggtttcct

SEQ ID NO: 2577187 - DNA, 25 bp, Homo sapien
gccctccatcactgcgccggtttcc

SEQ ID NO: 2577188 - DNA, 25 bp, Homo sapien
catcactgcgccggtttcctctaca

SEQ ID NO: 2577189 - DNA, 25 bp, Homo sapien
cagtttcctctacagcgatccagca

SEQ ID NO: 2577190 - DNA, 25 bp, Homo sapien
agtttcctctacagcgatccagcac

SEQ ID NO: 2577191 - DNA, 25 bp, Homo sapien
gccctccatcactgcgccggtttcc

SEQ ID NO: 2577192 - DNA, 25 bp, Homo sapien
actgcgccggtttcctctacagcgg

SEQ ID NO: 2577193 - DNA, 25 bp, Homo sapien
catcactgcgccggtttcctctaca

SEQ ID NO: 2577194 - DNA, 25 bp, Homo sapien
ccctccatcactgcgccggtttcct

SEQ ID NO: 2577195 - DNA, 25 bp, Homo sapien
ggacagggagacgcactccatcact

SEQ ID NO: 2577196 - DNA, 25 bp, Homo sapien
ggacagggagacgcactccatcact

SEQ ID NO: 2577197 - DNA, 25 bp, Homo sapien
gatgcactgaggaatccgacgcagt

SEQ ID NO: 2577198 - DNA, 25 bp, Homo sapien
caggatgcactgaggaatccgacgc

SEQ ID NO: 2577199 - DNA, 25 bp, Homo sapien
atccgacgcagttggcagagacaca

SEQ ID NO: 2577200 - DNA, 25 bp, Homo sapien
tgaggaatccgacgcagttggcaga

SEQ ID NO: 2577201 - DNA, 25 bp, Homo sapien
aaatgcagacgtgagtggagctttg

SEQ ID NO: 2577202 - DNA, 25 bp, Homo sapien
cagacggtgcttaaattccacccca

SEQ ID NO: 2577203 - DNA, 25 bp, Homo sapien
ttagtccagacggtgcttaaattcc

SEQ ID NO: 2577204 - DNA, 25 bp, Homo sapien
caccccaaaatgcagacgtgagtgg

SEQ ID NO: 2577205 - DNA, 25 bp, Homo sapien
gaaagacctggtgtcactcaagagc

SEQ ID NO: 2577206 - DNA, 25 bp, Homo sapien
tacacggctggtgttaatgggcctc

SEQ ID NO: 2577207 - DNA, 25 bp, Homo sapien
tgtgctaagctgcacacaccgtggg

SEQ ID NO: 2577208 - DNA, 25 bp, Homo sapien
gggctgcacctcctgagtcaaagat

SEQ ID NO: 2577209 - DNA, 25 bp, Homo sapien
tgtcctccacccatccgtggcctcg

SEQ ID NO: 2577210 - DNA, 25 bp, Homo sapien
gctggacaggctgttagtcctatag

SEQ ID NO: 2577211 - DNA, 25 bp, Homo sapien
gctgttagtcctataggaatccttc

SEQ ID NO: 2577212 - DNA, 25 bp, Homo sapien
gacaggctgttagtcctataggaat

SEQ ID NO: 2577213 - DNA, 25 bp, Homo sapien
ggacacagcagtaatttctaagtaa

SEQ ID NO: 2577214 - DNA, 25 bp, Homo sapien
acccaacaccaaagtcggctcctgt

SEQ ID NO: 2577215 - DNA, 25 bp, Homo sapien
ctaagtaacgtgagaaaatgttgag

SEQ ID NO: 2577216 - DNA, 25 bp, Homo sapien
tgacaacgaacggagcaacagaagc

SEQ ID NO: 2577217 - DNA, 25 bp, Homo sapien
gcaggaggccccatccgtgcaggcc

SEQ ID NO: 2577218 - DNA, 25 bp, Homo sapien
ccatgctgaggccagtgagtggggc

SEQ ID NO: 2577219 - DNA, 25 bp, Homo sapien
catgctgaggccagtgagtggggca

SEQ ID NO: 2577220 - DNA, 25 bp, Homo sapien
tgctgaggccagtgagtggggcact

SEQ ID NO: 2577221 - DNA, 25 bp, Homo sapien
agtgaacacctcgataaacagtcat

SEQ ID NO: 2577222 - DNA, 25 bp, Homo sapien
cagtgaacacctcgataaacagtca

SEQ ID NO: 2577223 - DNA, 25 bp, Homo sapien
tggtgcgacatatacaaagcaaggc

SEQ ID NO: 2577224 - DNA, 25 bp, Homo sapien
cctgatggcgatgaacaaggtactc

SEQ ID NO: 2577225 - DNA, 25 bp, Homo sapien
ctcaggatccatcgcttcccgtggg

SEQ ID NO: 2577226 - DNA, 25 bp, Homo sapien
tggttaataaacagctgggtcaagt

SEQ ID NO: 2577227 - DNA, 25 bp, Homo sapien
cctgggctgtgtaaaaccggaggat

SEQ ID NO: 2577228 - DNA, 25 bp, Homo sapien
agggcgagcacctcgaacgcattcc

SEQ ID NO: 2577229 - DNA, 25 bp, Homo sapien
gaagtgtcagctccctgatgttggc

SEQ ID NO: 2577230 - DNA, 25 bp, Homo sapien
cagccagtcggtgccatcctgggct

SEQ ID NO: 2577231 - DNA, 25 bp, Homo sapien
ctggtcggaaggagagcagcatttg

SEQ ID NO: 2577232 - DNA, 25 bp, Homo sapien
gaaggagagcagcatttgttcgcca

SEQ ID NO: 2577233 - DNA, 25 bp, Homo sapien
gtcggaaggagagcagcatttgttc

SEQ ID NO: 2577234 - DNA, 25 bp, Homo sapien
gagcagcatttgttcgccatcttca

SEQ ID NO: 2577235 - DNA, 25 bp, Homo sapien
ggcccttcagtgctaggaacttggg

SEQ ID NO: 2577236 - DNA, 25 bp, Homo sapien
ggacgggcccttcagtgctaggaac

SEQ ID NO: 2577237 - DNA, 25 bp, Homo sapien
agctccttggagtttctcatttacc

SEQ ID NO: 2577238 - DNA, 25 bp, Homo sapien
gagtttctcatttacccaccccata

SEQ ID NO: 2577239 - DNA, 25 bp, Homo sapien
cttgggagacatccgggaataaaag

SEQ ID NO: 2577240 - DNA, 25 bp, Homo sapien
tacataattgatcctctaagacaca

SEQ ID NO: 2577241 - DNA, 25 bp, Homo sapien
tgcagaaacagcaaacggcaggacc

SEQ ID NO: 2577242 - DNA, 25 bp, Homo sapien
aaccagctggaatttgaggaaggaa

SEQ ID NO: 2577243 - DNA, 25 bp, Homo sapien
caacccacagtctattaagagagga

SEQ ID NO: 2577244 - DNA, 25 bp, Homo sapien
taaatgcagttaatacaacccacag

SEQ ID NO: 2577245 - DNA, 25 bp, Homo sapien
agagtatactccctgcactctggat

SEQ ID NO: 2577246 - DNA, 25 bp, Homo sapien
caatgacaggccacatacttaggtg

SEQ ID NO: 2577247 - DNA, 25 bp, Homo sapien
tctacgtgaatgaggagtctgcgat

SEQ ID NO: 2577248 - DNA, 25 bp, Homo sapien
ccagcaggctaaggtgtgggcactt

SEQ ID NO: 2577249 - DNA, 25 bp, Homo sapien
aaatgtgactttggcttcccggcac

SEQ ID NO: 2577250 - DNA, 25 bp, Homo sapien
cacgcacggctggtcctgtggcttt

SEQ ID NO: 2577251 - DNA, 25 bp, Homo sapien
aattcaaggccgaacatgaccatgt

SEQ ID NO: 2577252 - DNA, 25 bp, Homo sapien
catgtccaaggtatccaagaagagc

SEQ ID NO: 2577253 - DNA, 25 bp, Homo sapien
tctcgtgtgttggttaggttctgcg

SEQ ID NO: 2577254 - DNA, 25 bp, Homo sapien
tatctaggctacaacaattcaaggc

SEQ ID NO: 2577255 - DNA, 25 bp, Homo sapien
gctcgcacccaatcgaatgtgctca

SEQ ID NO: 2577256 - DNA, 25 bp, Homo sapien
ggtgataggtcctttctgctcgcac

SEQ ID NO: 2577257 - DNA, 25 bp, Homo sapien
ttgtgaactttaaatagcacctcac

SEQ ID NO: 2577258 - DNA, 25 bp, Homo sapien
cttgtgaactttaaatagcacctca

SEQ ID NO: 2577259 - DNA, 25 bp, Homo sapien
gatcactcgttaccatgctctgcaa

SEQ ID NO: 2577260 - DNA, 25 bp, Homo sapien
tcaacacgaaggagggaaggtacac

SEQ ID NO: 2577261 - DNA, 25 bp, Homo sapien
aaatggtggcaaccacgctgcagac

SEQ ID NO: 2577262 - DNA, 25 bp, Homo sapien
tatgtgctccagttaaccatgggca

SEQ ID NO: 2577263 - DNA, 25 bp, Homo sapien
catggattggaaacgtgcagcgctg

SEQ ID NO: 2577264 - DNA, 25 bp, Homo sapien
cagcgctggaaggtcattcccatgc

SEQ ID NO: 2577265 - DNA, 25 bp, Homo sapien
aaacagagcatggattggaaacgtg

SEQ ID NO: 2577266 - DNA, 25 bp, Homo sapien
aaacgtgcagcgctggaaggtcatt

SEQ ID NO: 2577267 - DNA, 25 bp, Homo sapien
gatgctgaagcaatagggcctctgg

SEQ ID NO: 2577268 - DNA, 25 bp, Homo sapien
tggaaggacttctcccacatggcca

SEQ ID NO: 2577269 - DNA, 25 bp, Homo sapien
gatacaagtttgcttgcaaccagca

SEQ ID NO: 2577270 - DNA, 25 bp, Homo sapien
catgaacgtggctctttggaaggac

SEQ ID NO: 2577271 - DNA, 25 bp, Homo sapien
cagcgcacaagccgcagtgccgggg

SEQ ID NO: 2577272 - DNA, 25 bp, Homo sapien
tcagcgcacaagccgcagtgccggg

SEQ ID NO: 2577273 - DNA, 25 bp, Homo sapien
agcgcacaagccgcagtgccggggt

SEQ ID NO: 2577274 - DNA, 25 bp, Homo sapien
tctgtgttgcgtttcttcttgggtt

SEQ ID NO: 2577275 - DNA, 25 bp, Homo sapien
ggcctaaataattgttaatgcccca

SEQ ID NO: 2577276 - DNA, 25 bp, Homo sapien
aataattgttaatgccccacgtgtt

SEQ ID NO: 2577277 - DNA, 25 bp, Homo sapien
ttccttgtggcctaaataattgtta

SEQ ID NO: 2577278 - DNA, 25 bp, Homo sapien
cctgttgggaggcttcacgtgccta

SEQ ID NO: 2577279 - DNA, 25 bp, Homo sapien
tgttgggaggcttcacgtgcctact

SEQ ID NO: 2577280 - DNA, 25 bp, Homo sapien
ctcctgttgggaggcttcacgtgcc

SEQ ID NO: 2577281 - DNA, 25 bp, Homo sapien
ctgttgggaggcttcacgtgcctac

SEQ ID NO: 2577282 - DNA, 25 bp, Homo sapien
aatgccggcgcttccctgagatact

SEQ ID NO: 2577283 - DNA, 25 bp, Homo sapien
cctgagatactcaacggtgatggta

SEQ ID NO: 2577284 - DNA, 25 bp, Homo sapien
agcttcagaaatgccggcgcttccc

SEQ ID NO: 2577285 - DNA, 25 bp, Homo sapien
ggtgatggtaacttcatcgccagca

SEQ ID NO: 2577286 - DNA, 25 bp, Homo sapien
gtctgtgggcggcttctaggcttca

SEQ ID NO: 2577287 - DNA, 25 bp, Homo sapien
tgggcggcttgtaggcttcagttct

SEQ ID NO: 2577288 - DNA, 25 bp, Homo sapien
tctgtgggcggcttctaggcttcag

SEQ ID NO: 2577289 - DNA, 25 bp, Homo sapien
tgtgggcggcttctaggcttcagtt

SEQ ID NO: 2577290 - DNA, 25 bp, Homo sapien
gctgaaatggatttgttcctggttg

SEQ ID NO: 2577291 - DNA, 25 bp, Homo sapien
ggagttgctgaaatggatttgttcc

SEQ ID NO: 2577292 - DNA, 25 bp, Homo sapien
ctgtgatcgatgggaaaaatggagt

SEQ ID NO: 2577293 - DNA, 25 bp, Homo sapien
aaaaatggagttgctgaaatggatt

SEQ ID NO: 2577294 - DNA, 25 bp, Homo sapien
ggaagatcgattttcctaagattgt

SEQ ID NO: 2577295 - DNA, 25 bp, Homo sapien
tccaggtttgctacaatggcaggaa

SEQ ID NO: 2577296 - DNA, 25 bp, Homo sapien
aagattgtgaatagcatagttatcc

SEQ ID NO: 2577297 - DNA, 25 bp, Homo sapien
gtttgctacaatggcaggaagatcg

SEQ ID NO: 2577298 - DNA, 25 bp, Homo sapien
gctgttgcttaaattctgctccttc

SEQ ID NO: 2577299 - DNA, 25 bp, Homo sapien
agggaagctggcttagacgcagcac

SEQ ID NO: 2577300 - DNA, 25 bp, Homo sapien
tggcttagacgcagcacccatctca

SEQ ID NO: 2577301 - DNA, 25 bp, Homo sapien
tctcactcggcctgtgaagtcacct

SEQ ID NO: 2577302 - DNA, 25 bp, Homo sapien
tcattgaagtcactatgtgactggc

SEQ ID NO: 2577303 - DNA, 25 bp, Homo sapien
ccggcagcaacgctcattgaagtca

SEQ ID NO: 2577304 - DNA, 25 bp, Homo sapien
atgtgactggcaatggaccccggag

SEQ ID NO: 2577305 - DNA, 25 bp, Homo sapien
tcaggatgccggcagcaacgctcat

SEQ ID NO: 2577306 - DNA, 25 bp, Homo sapien
gaaagtgaagtctgctcaggcacag

SEQ ID NO: 2577307 - DNA, 25 bp, Homo sapien
tcaggcacagcaattttaccttcac

SEQ ID NO: 2577308 - DNA, 25 bp, Homo sapien
gctgctcggtggatttctgcttcat

SEQ ID NO: 2577309 - DNA, 25 bp, Homo sapien
tgtgaattcagcagaggacgtttcg

SEQ ID NO: 2577310 - DNA, 25 bp, Homo sapien
agatgcaaaccgctgtcaaagaggg

SEQ ID NO: 2577311 - DNA, 25 bp, Homo sapien
gagtttccgttcagatgcaaaccgc

SEQ ID NO: 2577312 - DNA, 25 bp, Homo sapien
ctgctgtggtcgctggatggccctg

SEQ ID NO: 2577313 - DNA, 25 bp, Homo sapien
tgtggtactggagtttccgttcaga

SEQ ID NO: 2577314 - DNA, 25 bp, Homo sapien
gtcaccctgcgggagttggagccca

SEQ ID NO: 2577315 - DNA, 25 bp, Homo sapien
catttctcgtgcactaatgcctctg

SEQ ID NO: 2577316 - DNA, 25 bp, Homo sapien
tacaggattctacatttctcgtgca

SEQ ID NO: 2577317 - DNA, 25 bp, Homo sapien
ctgtggatgatgaattccccaaggg

SEQ ID NO: 2577318 - DNA, 25 bp, Homo sapien
ggtaccataaaacacactcttgagt

SEQ ID NO: 2577319 - DNA, 25 bp, Homo sapien
tgaaaatgcagccaacaaagcaact

SEQ ID NO: 2577320 - DNA, 25 bp, Homo sapien
ggtcagaggtatccacttgtaaaga

SEQ ID NO: 2577321 - DNA, 25 bp, Homo sapien
caggtaattactccagctgtcagga

SEQ ID NO: 2577322 - DNA, 25 bp, Homo sapien
caagctcgaaatttcctgcgtgaag

SEQ ID NO: 2577323 - DNA, 25 bp, Homo sapien
cacaactgattaacgcaagctcgaa

SEQ ID NO: 2577324 - DNA, 25 bp, Homo sapien
tgaaggaagcccgtctcacattgtt

SEQ ID NO: 2577325 - DNA, 25 bp, Homo sapien
tacttctcttatcgcacagcactgg

SEQ ID NO: 2577326 - DNA, 25 bp, Homo sapien
tacctcgggtccttagctatgggcg

SEQ ID NO: 2577327 - DNA, 25 bp, Homo sapien
tgtaccttgagatgcgagccatgga

SEQ ID NO: 2577328 - DNA, 25 bp, Homo sapien
gacagaggcacggacaaggtgtcca

SEQ ID NO: 2577329 - DNA, 25 bp, Homo sapien
agccagcgcttctcatacctcgggt

SEQ ID NO: 2577330 - DNA, 25 bp, Homo sapien
taggtttgtctacgtcagcatcacc

SEQ ID NO: 2577331 - DNA, 25 bp, Homo sapien
gtgcagtaggtttgtctacgtcagc

SEQ ID NO: 2577332 - DNA, 25 bp, Homo sapien
gaaggtccaggacattactgtttcc

SEQ ID NO: 2577333 - DNA, 25 bp, Homo sapien
gaggttacgatggttgatgtcacca

SEQ ID NO: 2577334 - DNA, 25 bp, Homo sapien
gcaaccctgagtgagccttgaagat

SEQ ID NO: 2577335 - DNA, 25 bp, Homo sapien
cagagggtgaccatgtcaatgaaca

SEQ ID NO: 2577336 - DNA, 25 bp, Homo sapien
tttcagcctggtgagatcccaagca

SEQ ID NO: 2577337 - DNA, 25 bp, Homo sapien
gaactgagtcctataaagtcaaggg

SEQ ID NO: 2577338 - DNA, 25 bp, Homo sapien
caaaacaaattagagtatttagcag

SEQ ID NO: 2577339 - DNA, 25 bp, Homo sapien
tagcagtataattctgacttgcagt

SEQ ID NO: 2577340 - DNA, 25 bp, Homo sapien
tctgacttgcagtatcacttttcaa

SEQ ID NO: 2577341 - DNA, 25 bp, Homo sapien
ttccattatgactactatagagccc

SEQ ID NO: 2577342 - DNA, 25 bp, Homo sapien
tgggaaaacccgcccccatgtctca

SEQ ID NO: 2577343 - DNA, 25 bp, Homo sapien
gtgcagggaaattcctgtttataaa

SEQ ID NO: 2577344 - DNA, 25 bp, Homo sapien
tcagaatctcttgggacttattcac

SEQ ID NO: 2577345 - DNA, 25 bp, Homo sapien
ggagcagaggcaggtcttacatggt

SEQ ID NO: 2577346 - DNA, 25 bp, Homo sapien
gggtcaaggttgtggccaatcctgt

SEQ ID NO: 2577347 - DNA, 25 bp, Homo sapien
tgccctgtgcccctagtcaatatgg

SEQ ID NO: 2577348 - DNA, 25 bp, Homo sapien
tgcccctagtcaatatggacattta

SEQ ID NO: 2577349 - DNA, 25 bp, Homo sapien
aaggttgtggccaatcctgtgtctg

SEQ ID NO: 2577350 - DNA, 25 bp, Homo sapien
tccataggagttcggcaggcactcc

SEQ ID NO: 2577351 - DNA, 25 bp, Homo sapien
tcctctcctagacttcctccatagg

SEQ ID NO: 2577352 - DNA, 25 bp, Homo sapien
tcttgcagaaagatggcccggcagg

SEQ ID NO: 2577353 - DNA, 25 bp, Homo sapien
gcaggcactcctggtcttcctttat

SEQ ID NO: 2577354 - DNA, 25 bp, Homo sapien
gtgacaacattcacacccacaaggt

SEQ ID NO: 2577355 - DNA, 25 bp, Homo sapien
attcacacccacaaggtcaaccagg

SEQ ID NO: 2577356 - DNA, 25 bp, Homo sapien
ctgtgacaacattcacacccacaag

SEQ ID NO: 2577357 - DNA, 25 bp, Homo sapien
ccacaaggtcaaccaggaagaaact

SEQ ID NO: 2577358 - DNA, 25 bp, Homo sapien
tcaaacatttgactatggccctggt

SEQ ID NO: 2577359 - DNA, 25 bp, Homo sapien
cctactgataggcacgtggccgctg

SEQ ID NO: 2577360 - DNA, 25 bp, Homo sapien
ccctggtggctgcacgtagctgata

SEQ ID NO: 2577361 - DNA, 25 bp, Homo sapien
cacagcagcctagggagcttcttca

SEQ ID NO: 2577362 - DNA, 25 bp, Homo sapien
atcatcaaccccacgccccgtcgtc

SEQ ID NO: 2577363 - DNA, 25 bp, Homo sapien
ccacactccatcatccgtcatcaat

SEQ ID NO: 2577364 - DNA, 25 bp, Homo sapien
tccgtcatcaatcccacattccatc

SEQ ID NO: 2577365 - DNA, 25 bp, Homo sapien
actcctctatcacccgtcatcaacc

SEQ ID NO: 2577366 - DNA, 25 bp, Homo sapien
ggtgcagtgtagcaattccacatcc

SEQ ID NO: 2577367 - DNA, 25 bp, Homo sapien
cagattcactaaggctctttgtcaa

SEQ ID NO: 2577368 - DNA, 25 bp, Homo sapien
tcaacacagcagcacagcgtttcct

SEQ ID NO: 2577369 - DNA, 25 bp, Homo sapien
gaaacaccaagatctcacgtcccat

SEQ ID NO: 2577370 - DNA, 25 bp, Homo sapien
gcagaatggccagaaccgttagagg

SEQ ID NO: 2577371 - DNA, 25 bp, Homo sapien
ggtagcctttaatggcccagcagaa

SEQ ID NO: 2577372 - DNA, 25 bp, Homo sapien
gacatctcttctgcaggctgtgcgc

SEQ ID NO: 2577373 - DNA, 25 bp, Homo sapien
taaaccacaacgctgcatcaggtga

SEQ ID NO: 2577374 - DNA, 25 bp, Homo sapien
ctgtccaaagcccacaagaagacca

SEQ ID NO: 2577375 - DNA, 25 bp, Homo sapien
tgtccaaagcccacaagaagaccac

SEQ ID NO: 2577376 - DNA, 25 bp, Homo sapien
acctcgcagctcattagtcaaaatt

SEQ ID NO: 2577377 - DNA, 25 bp, Homo sapien
gctcattagtcaaaattacaccact

SEQ ID NO: 2577378 - DNA, 25 bp, Homo sapien
aaaggaatccagctcgatcagcgtc

SEQ ID NO: 2577379 - DNA, 25 bp, Homo sapien
gctcgatcagcgtctgctctgcatt

SEQ ID NO: 2577380 - DNA, 25 bp, Homo sapien
tctgctctgcattccgttcacgctg

SEQ ID NO: 2577381 - DNA, 25 bp, Homo sapien
gctctgcattccgttcacgctgttc

SEQ ID NO: 2577382 - DNA, 25 bp, Homo sapien
tgtggtcagttctgtccacctgctg

SEQ ID NO: 2577383 - DNA, 25 bp, Homo sapien
tgctgaggccaaggcactgggtttt

SEQ ID NO: 2577384 - DNA, 25 bp, Homo sapien
gtagcagccgctcctgggcctgcat

SEQ ID NO: 2577385 - DNA, 25 bp, Homo sapien
ctgcatcctgggtcatcccgttccc

SEQ ID NO: 2577386 - DNA, 25 bp, Homo sapien
tttgtgagagccagagtggtctgca

SEQ ID NO: 2577387 - DNA, 25 bp, Homo sapien
gtctgaggtctgtggccgcagcctt

SEQ ID NO: 2577388 - DNA, 25 bp, Homo sapien
ctgtctgaggtctgtggccgcagcc

SEQ ID NO: 2577389 - DNA, 25 bp, Homo sapien
ccgcagcctttgtgagagccagagt

SEQ ID NO: 2577390 - DNA, 25 bp, Homo sapien
gcagtcacatgacagtgcaggtgtc

SEQ ID NO: 2577391 - DNA, 25 bp, Homo sapien
cacatgacagtgcaggtgtcctggt

SEQ ID NO: 2577392 - DNA, 25 bp, Homo sapien
gtcacatgacagtgcaggtgtcctg

SEQ ID NO: 2577393 - DNA, 25 bp, Homo sapien
catgacagtgcaggtgtcctggtgc

SEQ ID NO: 2577394 - DNA, 25 bp, Homo sapien
ttgacttccacgcactgaatcagtg

SEQ ID NO: 2577395 - DNA, 25 bp, Homo sapien
tccgtggccgtgtctttgacttcca

SEQ ID NO: 2577396 - DNA, 25 bp, Homo sapien
gaatcagtgactttccacttttctc

SEQ ID NO: 2577397 - DNA, 25 bp, Homo sapien
gggccggcttcctattctcagacca

SEQ ID NO: 2577398 - DNA, 25 bp, Homo sapien
agctgcgcgggatgctgagctgcgg

SEQ ID NO: 2577399 - DNA, 25 bp, Homo sapien
gagctgcggggggatgctgagctgc

SEQ ID NO: 2577400 - DNA, 25 bp, Homo sapien
ccgggctgagctgcgcgggatgctg

SEQ ID NO: 2577401 - DNA, 25 bp, Homo sapien
gggatgctgagctgcgcgggatgct

SEQ ID NO: 2577402 - DNA, 25 bp, Homo sapien
tgcattcctccttcggaatggcctc

SEQ ID NO: 2577403 - DNA, 25 bp, Homo sapien
ccagggagggatgctccgagggcga

SEQ ID NO: 2577404 - DNA, 25 bp, Homo sapien
atgagcagcgtgagtgagcggtccc

SEQ ID NO: 2577405 - DNA, 25 bp, Homo sapien
agggcgagtgcaggaggtcccttgc

SEQ ID NO: 2577406 - DNA, 25 bp, Homo sapien
tgagctcaggaagacgggtaccagc

SEQ ID NO: 2577407 - DNA, 25 bp, Homo sapien
aggaagacgggtaccagcgtgtgag

SEQ ID NO: 2577408 - DNA, 25 bp, Homo sapien
tcaggaagacgggtaccagcgtgtg

SEQ ID NO: 2577409 - DNA, 25 bp, Homo sapien
agctcaggaagacgggtaccagcgt

SEQ ID NO: 2577410 - DNA, 25 bp, Homo sapien
cagcagtgctgaaggggcacccggc

SEQ ID NO: 2577411 - DNA, 25 bp, Homo sapien
cagtgctgaaggggcacccggcttc

SEQ ID NO: 2577412 - DNA, 25 bp, Homo sapien
aggggcacccggcttcccctgatcg

SEQ ID NO: 2577413 - DNA, 25 bp, Homo sapien
gtgctgaaggggcacccggcttccc

SEQ ID NO: 2577414 - DNA, 25 bp, Homo sapien
ctgtcctggagccagccttcgggga

SEQ ID NO: 2577415 - DNA, 25 bp, Homo sapien
tgtcctggagccagccttcggggag

SEQ ID NO: 2577416 - DNA, 25 bp, Homo sapien
gtcctggagccagccttcggggagg

SEQ ID NO: 2577417 - DNA, 25 bp, Homo sapien
cctgtcctggagccagccttcgggg

SEQ ID NO: 2577418 - DNA, 25 bp, Homo sapien
tactgacatcactgaaggcaaagag

SEQ ID NO: 2577419 - DNA, 25 bp, Homo sapien
cagagaccaatgctggtggcctccc

SEQ ID NO: 2577420 - DNA, 25 bp, Homo sapien
ggcctcgtcccagtgggtcacgacg

SEQ ID NO: 2577421 - DNA, 25 bp, Homo sapien
tgatgtcaaggatgccgttgctgag

SEQ ID NO: 2577422 - DNA, 25 bp, Homo sapien
cccaaccccgcctttgagatgcccg

SEQ ID NO: 2577423 - DNA, 25 bp, Homo sapien
cgcagcaagtgtgacgccccgaagt

SEQ ID NO: 2577424 - DNA, 25 bp, Homo sapien
gttcaggcaaccctcgcctctggga

SEQ ID NO: 2577425 - DNA, 25 bp, Homo sapien
atgtgcatgtgtcggctgaaccccg

SEQ ID NO: 2577426 - DNA, 25 bp, Homo sapien
gagaccccgcctcacctctgagacc

SEQ ID NO: 2577427 - DNA, 25 bp, Homo sapien
ctccagcctcttcctatgtgtgtaa

SEQ ID NO: 2577428 - DNA, 25 bp, Homo sapien
cagcctcttcctatgtgtgtaactt

SEQ ID NO: 2577429 - DNA, 25 bp, Homo sapien
ccgagaccccgcctcacctctgaga

SEQ ID NO: 2577430 - DNA, 25 bp, Homo sapien
cccaatccaggtctcgggcccaacg

SEQ ID NO: 2577431 - DNA, 25 bp, Homo sapien
cgggcccaacggcagggacgaggat

SEQ ID NO: 2577432 - DNA, 25 bp, Homo sapien
gtccaggtctcaggggcccaactgc

SEQ ID NO: 2577433 - DNA, 25 bp, Homo sapien
tccaggtctcgggcccaacggcagg

SEQ ID NO: 2577434 - DNA, 25 bp, Homo sapien
aaggcaaatgcggtactgtgagtgc

SEQ ID NO: 2577435 - DNA, 25 bp, Homo sapien
tgtgaaggcaaatgcggtactgtga

SEQ ID NO: 2577436 - DNA, 25 bp, Homo sapien
caaatgcggtactgtgagtgctgaa

SEQ ID NO: 2577437 - DNA, 25 bp, Homo sapien
cgctgtgaaggcaaatgcggtactg

SEQ ID NO: 2577438 - DNA, 25 bp, Homo sapien
gcacagacactagctcaaaagccaa

SEQ ID NO: 2577439 - DNA, 25 bp, Homo sapien
ggcacagacactagctcaaaagcca

SEQ ID NO: 2577440 - DNA, 25 bp, Homo sapien
agtagtgaaatgaccattgccaatg

SEQ ID NO: 2577441 - DNA, 25 bp, Homo sapien
gaagtagtgaaatgaccattgccaa

SEQ ID NO: 2577442 - DNA, 25 bp, Homo sapien
agaagtagtgaaatgaccattgcca

SEQ ID NO: 2577443 - DNA, 25 bp, Homo sapien
aagtagtgaaatgaccattgccaat

SEQ ID NO: 2577444 - DNA, 25 bp, Homo sapien
cccaagctcccagcaatgacttcca

SEQ ID NO: 2577445 - DNA, 25 bp, Homo sapien
ccaggtcatcgctgggccgcctctg

SEQ ID NO: 2577446 - DNA, 25 bp, Homo sapien
tcaagaggagccacgtcttcttctt

SEQ ID NO: 2577447 - DNA, 25 bp, Homo sapien
aggcctccctcagcatcaagaggag

SEQ ID NO: 2577448 - DNA, 25 bp, Homo sapien
ctgggctccaaggtgtacctccgca

SEQ ID NO: 2577449 - DNA, 25 bp, Homo sapien
caaggtgtacctccgcacgcatggg

SEQ ID NO: 2577450 - DNA, 25 bp, Homo sapien
ctgtgtcggcgctgggctccaaggt

SEQ ID NO: 2577451 - DNA, 25 bp, Homo sapien
cgcacgcatggggttaactacgccc

SEQ ID NO: 2577452 - DNA, 25 bp, Homo sapien
aggccgctgtaggtgggcacggggc

SEQ ID NO: 2577453 - DNA, 25 bp, Homo sapien
ggaggccgctgtaggtgggcacggg

SEQ ID NO: 2577454 - DNA, 25 bp, Homo sapien
ctgggtcagccctggtgcggaggag

SEQ ID NO: 2577455 - DNA, 25 bp, Homo sapien
gcacggggcagcacgcgttaagggg

SEQ ID NO: 2577456 - DNA, 25 bp, Homo sapien
atcacagtggccctgtatttgtcca

SEQ ID NO: 2577457 - DNA, 25 bp, Homo sapien
tcacagccatttgctggaggaacgc

SEQ ID NO: 2577458 - DNA, 25 bp, Homo sapien
acagtggccctgtatttgtccagtt

SEQ ID NO: 2577459 - DNA, 25 bp, Homo sapien
acagccatttgctggaggaacgcag

SEQ ID NO: 2577460 - DNA, 25 bp, Homo sapien
cccgtgtgttgtggcagtgaagcct

SEQ ID NO: 2577461 - DNA, 25 bp, Homo sapien
tggcaggtggacaccgggtcccgtg

SEQ ID NO: 2577462 - DNA, 25 bp, Homo sapien
gcctagcagcccagaggcgccccag

SEQ ID NO: 2577463 - DNA, 25 bp, Homo sapien
acaccgggtcccgtgtgttgtggca

SEQ ID NO: 2577464 - DNA, 25 bp, Homo sapien
aacaggctgtgagtgtaagcgtgga

SEQ ID NO: 2577465 - DNA, 25 bp, Homo sapien
caggctgtgagtgtaagcgtggaat

SEQ ID NO: 2577466 - DNA, 25 bp, Homo sapien
ctgtgagtgtaagcgtggaattgct

SEQ ID NO: 2577467 - DNA, 25 bp, Homo sapien
agaaacaggctgtgagtgtaagcgt

SEQ ID NO: 2577468 - DNA, 25 bp, Homo sapien
tgaatccggcaacctgtggagctga

SEQ ID NO: 2577469 - DNA, 25 bp, Homo sapien
ccagccgaaatgttcaccgtgaatc

SEQ ID NO: 2577470 - DNA, 25 bp, Homo sapien
ttccctggatacgtcccagccgaaa

SEQ ID NO: 2577471 - DNA, 25 bp, Homo sapien
agtacaggagcttcacattccctgg

SEQ ID NO: 2577472 - DNA, 25 bp, Homo sapien
tctttctgcacgtgctgtctgtgca

SEQ ID NO: 2577473 - DNA, 25 bp, Homo sapien
gctttgtgtcaggttccgatccttc

SEQ ID NO: 2577474 - DNA, 25 bp, Homo sapien
ggctgcgcttctgcccactgactgg

SEQ ID NO: 2577475 - DNA, 25 bp, Homo sapien
tccatggccagtgttgcgagggccc

SEQ ID NO: 2577476 - DNA, 25 bp, Homo sapien
gatgaagatcctgtgaactctggcg

SEQ ID NO: 2577477 - DNA, 25 bp, Homo sapien
aactctggcgtggatgcttggaccc

SEQ ID NO: 2577478 - DNA, 25 bp, Homo sapien
cagagatgcgctagagaaccctggg

SEQ ID NO: 2577479 - DNA, 25 bp, Homo sapien
gacttaggttttattgggcaccaga

SEQ ID NO: 2577480 - DNA, 25 bp, Homo sapien
ggtgtggagggactcagtggcctcc

SEQ ID NO: 2577481 - DNA, 25 bp, Homo sapien
catgcagagtctggagctcgtgggc

SEQ ID NO: 2577482 - DNA, 25 bp, Homo sapien
agagtctggagctcgtgggccctca

SEQ ID NO: 2577483 - DNA, 25 bp, Homo sapien
gactcagtggcctccgggaccctgt

SEQ ID NO: 2577484 - DNA, 25 bp, Homo sapien
aatttcggcattgtgagtcaagctc

SEQ ID NO: 2577485 - DNA, 25 bp, Homo sapien
tagtgacggccaagcccgtgtctct

SEQ ID NO: 2577486 - DNA, 25 bp, Homo sapien
tgagtcaagctctcggaacttagtg

SEQ ID NO: 2577487 - DNA, 25 bp, Homo sapien
ggcagggcgataatttcggcattgt

SEQ ID NO: 2577488 - DNA, 25 bp, Homo sapien
ctgccacggtcccacagacttggcg

SEQ ID NO: 2577489 - DNA, 25 bp, Homo sapien
acggtcccacagacttggcgcctcc

SEQ ID NO: 2577490 - DNA, 25 bp, Homo sapien
gtcccacagacttggcgcctccggg

SEQ ID NO: 2577491 - DNA, 25 bp, Homo sapien
ccacggtcccacagacttggcgcct

SEQ ID NO: 2577492 - DNA, 25 bp, Homo sapien
aggctgccaggacagccagccccat

SEQ ID NO: 2577493 - DNA, 25 bp, Homo sapien
cagagaggctgccaggacagccagc

SEQ ID NO: 2577494 - DNA, 25 bp, Homo sapien
agccggccgcccatcccagagaggc

SEQ ID NO: 2577495 - DNA, 25 bp, Homo sapien
gccggccgcccatcccagagaggct

SEQ ID NO: 2577496 - DNA, 25 bp, Homo sapien
gaatcgtatgctactcttccaggat

SEQ ID NO: 2577497 - DNA, 25 bp, Homo sapien
ccaaaacatctttatcccgcctgaa

SEQ ID NO: 2577498 - DNA, 25 bp, Homo sapien
tctgcaggtgtcttgcgtgatgctc

SEQ ID NO: 2577499 - DNA, 25 bp, Homo sapien
tgttcagagcgcttctgcgaaccct

SEQ ID NO: 2577500 - DNA, 25 bp, Homo sapien
tctgttgagggtcctcagcctgtcc

SEQ ID NO: 2577501 - DNA, 25 bp, Homo sapien
tgttgagggtcctcagcctgtcctc

SEQ ID NO: 2577502 - DNA, 25 bp, Homo sapien
tctctgttgagggtcctcagcctgt

SEQ ID NO: 2577503 - DNA, 25 bp, Homo sapien
atttctcagtgacgggcaggttttc

SEQ ID NO: 2577504 - DNA, 25 bp, Homo sapien
tcaggacgcgccgggacatgccgca

SEQ ID NO: 2577505 - DNA, 25 bp, Homo sapien
ttaggcctcaggacgcgccgggaca

SEQ ID NO: 2577506 - DNA, 25 bp, Homo sapien
acgcgccgggacatgccgcagcgca

SEQ ID NO: 2577507 - DNA, 25 bp, Homo sapien
taggcctcaggacgcgccgggacat

SEQ ID NO: 2577508 - DNA, 25 bp, Homo sapien
cacaaggtggaaagacggtgctcag

SEQ ID NO: 2577509 - DNA, 25 bp, Homo sapien
gaagacgccggtgagaaccagcagc

SEQ ID NO: 2577510 - DNA, 25 bp, Homo sapien
gctgcttcagaaaaaccgctgcgtg

SEQ ID NO: 2577511 - DNA, 25 bp, Homo sapien
cggtgctcaggcagcgcgggtggaa

SEQ ID NO: 2577512 - DNA, 25 bp, Homo sapien
tgtgacggtgaagccggcgtcctca

SEQ ID NO: 2577513 - DNA, 25 bp, Homo sapien
tgacggtgaagccggcgtcctcaca

SEQ ID NO: 2577514 - DNA, 25 bp, Homo sapien
gtgacggtgaagccggcgtcctcac

SEQ ID NO: 2577515 - DNA, 25 bp, Homo sapien
ttccccgaaatctgccatgaaggtg

SEQ ID NO: 2577516 - DNA, 25 bp, Homo sapien
gtgaactcggttacactcaggccca

SEQ ID NO: 2577517 - DNA, 25 bp, Homo sapien
cggctgctccgcatgaggcctgctg

SEQ ID NO: 2577518 - DNA, 25 bp, Homo sapien
tgctccgcatgaggcctgctggctc

SEQ ID NO: 2577519 - DNA, 25 bp, Homo sapien
gggtcagcagctgggccaggagctg

SEQ ID NO: 2577520 - DNA, 25 bp, Homo sapien
gggggtcagcagctgggccaggagc

SEQ ID NO: 2577521 - DNA, 25 bp, Homo sapien
gtcagcagctgggccaggagctgac

SEQ ID NO: 2577522 - DNA, 25 bp, Homo sapien
ctcgtgaggccttgggggtcagcag

SEQ ID NO: 2577523 - DNA, 25 bp, Homo sapien
ctgcgtgtttaatcataatacaaag

SEQ ID NO: 2577524 - DNA, 25 bp, Homo sapien
ctgaacgttgagaggggccccgtct

SEQ ID NO: 2577525 - DNA, 25 bp, Homo sapien
aggccctgcaccgtggactcccaac

SEQ ID NO: 2577526 - DNA, 25 bp, Homo sapien
agtgtgaagggcagtgcgtcattta

SEQ ID NO: 2577527 - DNA, 25 bp, Homo sapien
tctggtgtggccgtgtctggtcccc

SEQ ID NO: 2577528 - DNA, 25 bp, Homo sapien
gctccctttctttcatcggaggcag

SEQ ID NO: 2577529 - DNA, 25 bp, Homo sapien
gccctcgacgctctgccatgggctc

SEQ ID NO: 2577530 - DNA, 25 bp, Homo sapien
ccctttctttcatcggaggcagcat

SEQ ID NO: 2577531 - DNA, 25 bp, Homo sapien
tggcgccctcgacgctctgccatgg

SEQ ID NO: 2577532 - DNA, 25 bp, Homo sapien
ccccggcccaacgtgtgcagagccc

SEQ ID NO: 2577533 - DNA, 25 bp, Homo sapien
caaaccccggcccaacgtgtgcaga

SEQ ID NO: 2577534 - DNA, 25 bp, Homo sapien
tccaaaccccggcccaacgtgtgca

SEQ ID NO: 2577535 - DNA, 25 bp, Homo sapien
aaaccccggcccaacgtgtgcagag

SEQ ID NO: 2577536 - DNA, 25 bp, Homo sapien
ccactcgctgcaacttttctttaaa

SEQ ID NO: 2577537 - DNA, 25 bp, Homo sapien
ctgcaacttttctttaaatatgccc

SEQ ID NO: 2577538 - DNA, 25 bp, Homo sapien
catccactcgctgcaacttttcttt

SEQ ID NO: 2577539 - DNA, 25 bp, Homo sapien
gcaacttttctttaaatatgcccat

SEQ ID NO: 2577540 - DNA, 25 bp, Homo sapien
gctcccgccccttggttgctgtcct

SEQ ID NO: 2577541 - DNA, 25 bp, Homo sapien
tccacaggcttcttagcacagtgag

SEQ ID NO: 2577542 - DNA, 25 bp, Homo sapien
gttggtcactcctgaaagcgacgct

SEQ ID NO: 2577543 - DNA, 25 bp, Homo sapien
agctgagaacagagcacgggaaccc

SEQ ID NO: 2577544 - DNA, 25 bp, Homo sapien
cctcggatgagtcgagccgtcacca

SEQ ID NO: 2577545 - DNA, 25 bp, Homo sapien
ttttcgcagcggctgtgatatgtgt

SEQ ID NO: 2577546 - DNA, 25 bp, Homo sapien
gtgtgttgaaggtgagtcctccaca

SEQ ID NO: 2577547 - DNA, 25 bp, Homo sapien
tattttctatttttcgcagcggctg

SEQ ID NO: 2577548 - DNA, 25 bp, Homo sapien
ttgttgctgggccgcgtgccccgtc

SEQ ID NO: 2577549 - DNA, 25 bp, Homo sapien
ttgtctcttttgttgctgggccgcg

SEQ ID NO: 2577550 - DNA, 25 bp, Homo sapien
ttttgttgctgggccgcgtgccccg

SEQ ID NO: 2577551 - DNA, 25 bp, Homo sapien
ctcttttgttgctgggccgcgtgcc

SEQ ID NO: 2577552 - DNA, 25 bp, Homo sapien
tgggtgttcattaagccgatgcgtg

SEQ ID NO: 2577553 - DNA, 25 bp, Homo sapien
gggtgttcattaagccgatgcgtgc

SEQ ID NO: 2577554 - DNA, 25 bp, Homo sapien
ttgggtgttcattaagccgatgcgt

SEQ ID NO: 2577555 - DNA, 25 bp, Homo sapien
cagagccttgaggaaggcccactgc

SEQ ID NO: 2577556 - DNA, 25 bp, Homo sapien
tcagagccttgaggaaggcccactg

SEQ ID NO: 2577557 - DNA, 25 bp, Homo sapien
gagccttgaggaaggcccactgctg

SEQ ID NO: 2577558 - DNA, 25 bp, Homo sapien
gccttgaggaaggcccactgctgcc

SEQ ID NO: 2577559 - DNA, 25 bp, Homo sapien
gggagccgattagccatggacagtt

SEQ ID NO: 2577560 - DNA, 25 bp, Homo sapien
ctttgagggggagccgattagccat

SEQ ID NO: 2577561 - DNA, 25 bp, Homo sapien
gccgattagccatggacagttgtca

SEQ ID NO: 2577562 - DNA, 25 bp, Homo sapien
gattagccatggacagttgtcattc

SEQ ID NO: 2577563 - DNA, 25 bp, Homo sapien
acaggcgccctggccagtcgtctgg

SEQ ID NO: 2577564 - DNA, 25 bp, Homo sapien
tgagcagtggagaaggcggcactct

SEQ ID NO: 2577565 - DNA, 25 bp, Homo sapien
ctacaactgggctggcggccaggat

SEQ ID NO: 2577566 - DNA, 25 bp, Homo sapien
gtctgggcggtgctacaactgggct

SEQ ID NO: 2577567 - DNA, 25 bp, Homo sapien
gtggggtcggcggtcaggtgtccca

SEQ ID NO: 2577568 - DNA, 25 bp, Homo sapien
taggtggggtcggcggtcaggtgtc

SEQ ID NO: 2577569 - DNA, 25 bp, Homo sapien
gtcggcggtcaggtgtcccagagcc

SEQ ID NO: 2577570 - DNA, 25 bp, Homo sapien
gggtcggcggtcaggtgtcccagag

SEQ ID NO: 2577571 - DNA, 25 bp, Homo sapien
tggagggaccttccaccctcagtcc

SEQ ID NO: 2577572 - DNA, 25 bp, Homo sapien
ctggagggaccttccaccctcagtc

SEQ ID NO: 2577573 - DNA, 25 bp, Homo sapien
caggtcggggggtgctgaggcgggc

SEQ ID NO: 2577574 - DNA, 25 bp, Homo sapien
ctggcaggtcggggggtgctgaggc

SEQ ID NO: 2577575 - DNA, 25 bp, Homo sapien
ggggggtgctgaggcgggcctggcc

SEQ ID NO: 2577576 - DNA, 25 bp, Homo sapien
gtcggggggtgctgaggcgggcctg

SEQ ID NO: 2577577 - DNA, 25 bp, Homo sapien
tacgacgtcaaagtttagatgagct

SEQ ID NO: 2577578 - DNA, 25 bp, Homo sapien
cgtcaaagtttagatgagctggtga

SEQ ID NO: 2577579 - DNA, 25 bp, Homo sapien
tggctttacgacgtcaaagtttaga

SEQ ID NO: 2577580 - DNA, 25 bp, Homo sapien
caaagtttagatgagctggtgatat

SEQ ID NO: 2577581 - DNA, 25 bp, Homo sapien
gtgaccacagcccgctcctggaccc

SEQ ID NO: 2577582 - DNA, 25 bp, Homo sapien
accacagcccgctcctggaccctct

SEQ ID NO: 2577583 - DNA, 25 bp, Homo sapien
gccctctgtgtacactgtgaccaca

SEQ ID NO: 2577584 - DNA, 25 bp, Homo sapien
tctcccggatcgaggagagagggag

SEQ ID NO: 2577585 - DNA, 25 bp, Homo sapien
tctagggacaagctcgctgtcctca

SEQ ID NO: 2577586 - DNA, 25 bp, Homo sapien
tcctctagggacaagctcgctgtcc

SEQ ID NO: 2577587 - DNA, 25 bp, Homo sapien
ggtcctctagggacaagctcgctgt

SEQ ID NO: 2577588 - DNA, 25 bp, Homo sapien
ccaggtcctctagggacaagctcgc

SEQ ID NO: 2577589 - DNA, 25 bp, Homo sapien
ccacgatcctacgtggatccgagag

SEQ ID NO: 2577590 - DNA, 25 bp, Homo sapien
agggcacagccctctctcatcaacc

SEQ ID NO: 2577591 - DNA, 25 bp, Homo sapien
cacagccccgggatgggctctgtct

SEQ ID NO: 2577592 - DNA, 25 bp, Homo sapien
gcctgttccacagccccgggatggg

SEQ ID NO: 2577593 - DNA, 25 bp, Homo sapien
ccagccagcacgccgtgggccagcc

SEQ ID NO: 2577594 - DNA, 25 bp, Homo sapien
ctctggtgtccagccagcacgccgt

SEQ ID NO: 2577595 - DNA, 25 bp, Homo sapien
ctggtgtccagccagcacgccgtgg

SEQ ID NO: 2577596 - DNA, 25 bp, Homo sapien
cagcacgccgtgggccagcctggct

SEQ ID NO: 2577597 - DNA, 25 bp, Homo sapien
gttagactcatatgcacaaaatccc

SEQ ID NO: 2577598 - DNA, 25 bp, Homo sapien
tgaaaacagggtgggataagcacca

SEQ ID NO: 2577599 - DNA, 25 bp, Homo sapien
ccagggatagggatagccatctgga

SEQ ID NO: 2577600 - DNA, 25 bp, Homo sapien
aaagaaagtgaaagaggaccagctt

SEQ ID NO: 2577601 - DNA, 25 bp, Homo sapien
tcacggcgctggctcggcaacggca

SEQ ID NO: 2577602 - DNA, 25 bp, Homo sapien
gctggctcggcaacggcaaagccgt

SEQ ID NO: 2577603 - DNA, 25 bp, Homo sapien
ggcaacggcaaagccgtccaaagcc

SEQ ID NO: 2577604 - DNA, 25 bp, Homo sapien
gctcggcaacggcaaagccgtccaa

SEQ ID NO: 2577605 - DNA, 25 bp, Homo sapien
ctggcgatctgggtgcagcgccaag

SEQ ID NO: 2577606 - DNA, 25 bp, Homo sapien
cctcgggctacaggagaccgggctg

SEQ ID NO: 2577607 - DNA, 25 bp, Homo sapien
gcaattcacaatcagcggccatgtg

SEQ ID NO: 2577608 - DNA, 25 bp, Homo sapien
gaacggacagcacggtgattccgca

SEQ ID NO: 2577609 - DNA, 25 bp, Homo sapien
tgattccgcacagagggagtcacct

SEQ ID NO: 2577610 - DNA, 25 bp, Homo sapien
tacatacatggaggagtattcagcc

SEQ ID NO: 2577611 - DNA, 25 bp, Homo sapien
ctggcagagccttccccggtcctga

SEQ ID NO: 2577612 - DNA, 25 bp, Homo sapien
tggcagagccttccccggtcctgag

SEQ ID NO: 2577613 - DNA, 25 bp, Homo sapien
ccaccacggcgaccggagctcctgg

SEQ ID NO: 2577614 - DNA, 25 bp, Homo sapien
ctccaccacggcgaccggagctcct

SEQ ID NO: 2577615 - DNA, 25 bp, Homo sapien
agaggctccaccacggcgaccggag

SEQ ID NO: 2577616 - DNA, 25 bp, Homo sapien
ctcgagcccaagtctgtctgacaca

SEQ ID NO: 2577617 - DNA, 25 bp, Homo sapien
gcagtgacggccaggatcccccggg

SEQ ID NO: 2577618 - DNA, 25 bp, Homo sapien
cccaagtctgtctgacacaggccga

SEQ ID NO: 2577619 - DNA, 25 bp, Homo sapien
gacacaggccgaggctgcacatggc

SEQ ID NO: 2577620 - DNA, 25 bp, Homo sapien
tcatccatgggtgggacacacgtgt

SEQ ID NO: 2577621 - DNA, 25 bp, Homo sapien
catcgtccacgggtgtgacacacgt

SEQ ID NO: 2577622 - DNA, 25 bp, Homo sapien
tggctgatgccatcgtccacgggtg

SEQ ID NO: 2577623 - DNA, 25 bp, Homo sapien
tcacacacaattcagggccgggaag

SEQ ID NO: 2577624 - DNA, 25 bp, Homo sapien
tatcgtggggcaccccaacgtattc

SEQ ID NO: 2577625 - DNA, 25 bp, Homo sapien
tccccttcctaaagagcagtccctg

SEQ ID NO: 2577626 - DNA, 25 bp, Homo sapien
gcacgattcctttatttcgagccag

SEQ ID NO: 2577627 - DNA, 25 bp, Homo sapien
ctgaggagcaacttgtttctaatcc

SEQ ID NO: 2577628 - DNA, 25 bp, Homo sapien
ggatacccatgtgtagccgagccct

SEQ ID NO: 2577629 - DNA, 25 bp, Homo sapien
tctcgtacaggcaggcaaaaaccag

SEQ ID NO: 2577630 - DNA, 25 bp, Homo sapien
aatctcatcataggaggtcctggcc

SEQ ID NO: 2577631 - DNA, 25 bp, Homo sapien
tcacgcagggagaatgtacaaaagg

SEQ ID NO: 2577632 - DNA, 25 bp, Homo sapien
ctgcagacggctgaagggcccacca

SEQ ID NO: 2577633 - DNA, 25 bp, Homo sapien
gtggactccaggaccgaggagtgga

SEQ ID NO: 2577634 - DNA, 25 bp, Homo sapien
gctgcagacggctgaagggcccacc

SEQ ID NO: 2577635 - DNA, 25 bp, Homo sapien
ctccaggaccgaggagtggaggctg

SEQ ID NO: 2577636 - DNA, 25 bp, Homo sapien
gatcttgccaaaacactctcggcgg

SEQ ID NO: 2577637 - DNA, 25 bp, Homo sapien
cgtggtcatcgctgtagaaggcgaa

SEQ ID NO: 2577638 - DNA, 25 bp, Homo sapien
aactgtcatcccgtggcctgttggg

SEQ ID NO: 2577639 - DNA, 25 bp, Homo sapien
gctggcactcgcctgagcgcaggtt

SEQ ID NO: 2577640 - DNA, 25 bp, Homo sapien
aagaagaggaagacggtgcccgtgc

SEQ ID NO: 2577641 - DNA, 25 bp, Homo sapien
gttccttcccgtggcgatctgcacg

SEQ ID NO: 2577642 - DNA, 25 bp, Homo sapien
accaccgatggcctcctcggtgagg

SEQ ID NO: 2577643 - DNA, 25 bp, Homo sapien
ccacacagcagaggcgcgcggcgtt

SEQ ID NO: 2577644 - DNA, 25 bp, Homo sapien
ctgctgtccccagcacgtgcagggc

SEQ ID NO: 2577645 - DNA, 25 bp, Homo sapien
ctgtccccagcacgtgcagggcacc

SEQ ID NO: 2577646 - DNA, 25 bp, Homo sapien
gtccccagcacgtgcagggcacccc

SEQ ID NO: 2577647 - DNA, 25 bp, Homo sapien
tgctgtccccagcacgtgcagggca

SEQ ID NO: 2577648 - DNA, 25 bp, Homo sapien
ggcccgtcctctcccgctcgaagag

SEQ ID NO: 2577649 - DNA, 25 bp, Homo sapien
ctcctcagcaccaggcggtgggcgt

SEQ ID NO: 2577650 - DNA, 25 bp, Homo sapien
tgggagtcgtcagggctgagccgct

SEQ ID NO: 2577651 - DNA, 25 bp, Homo sapien
gcacgcggtaggtcaggcccgtcct

SEQ ID NO: 2577652 - DNA, 25 bp, Homo sapien
gagaagcgcccacaggaatcagaag

SEQ ID NO: 2577653 - DNA, 25 bp, Homo sapien
ctgagaagcgcccacaggaatcaga

SEQ ID NO: 2577654 - DNA, 25 bp, Homo sapien
tcagaagctccaaagccgagtgggg

SEQ ID NO: 2577655 - DNA, 25 bp, Homo sapien
agaagctccaaagccgagtggggcc

SEQ ID NO: 2577656 - DNA, 25 bp, Homo sapien
tggtcctccaccatgcaggagcggt

SEQ ID NO: 2577657 - DNA, 25 bp, Homo sapien
tgcagacagtgggaacgctggtcct

SEQ ID NO: 2577658 - DNA, 25 bp, Homo sapien
atgcaggagcggtcagatccacggc

SEQ ID NO: 2577659 - DNA, 25 bp, Homo sapien
acagtgggaacgctggtcctccacc

SEQ ID NO: 2577660 - DNA, 25 bp, Homo sapien
gaaggctgcagagctcatcatgggt

SEQ ID NO: 2577661 - DNA, 25 bp, Homo sapien
gcagagctcatcatgggtggctgcc

SEQ ID NO: 2577662 - DNA, 25 bp, Homo sapien
agagctcatcatgggtggctgcctc

SEQ ID NO: 2577663 - DNA, 25 bp, Homo sapien
gctgcagagctcatcatgggtggct

SEQ ID NO: 2577664 - DNA, 25 bp, Homo sapien
ggacccagtccaggcaacttggcca

SEQ ID NO: 2577665 - DNA, 25 bp, Homo sapien
aggggcggacccagtccaggcaact

SEQ ID NO: 2577666 - DNA, 25 bp, Homo sapien
gggcggacccagtccaggcaacttg

SEQ ID NO: 2577667 - DNA, 25 bp, Homo sapien
ccaggaggggcggacccagtccagg

SEQ ID NO: 2577668 - DNA, 25 bp, Homo sapien
atctgcatctcgctatcgggcctcg

SEQ ID NO: 2577669 - DNA, 25 bp, Homo sapien
agctctggaaaaactgtaatctgga

SEQ ID NO: 2577670 - DNA, 25 bp, Homo sapien
tttagacgaatgcacactgacacgg

SEQ ID NO: 2577671 - DNA, 25 bp, Homo sapien
tcgggaatgagcaacccgaccctgg

SEQ ID NO: 2577672 - DNA, 25 bp, Homo sapien
ccacatgttgttcttggcgtagacg

SEQ ID NO: 2577673 - DNA, 25 bp, Homo sapien
tctgcgtgtggttcttgagcgcgcc

SEQ ID NO: 2577674 - DNA, 25 bp, Homo sapien
tgtcgttgtagaacgtccgcggcga

SEQ ID NO: 2577675 - DNA, 25 bp, Homo sapien
ggttgaaatgctcgtacaggcgcca

SEQ ID NO: 2577676 - DNA, 25 bp, Homo sapien
gggaggaggcgcgccctggccacac

SEQ ID NO: 2577677 - DNA, 25 bp, Homo sapien
gcggggaggaggcgcgccctggcca

SEQ ID NO: 2577678 - DNA, 25 bp, Homo sapien
ggggaggaggcgcgccctggccaca

SEQ ID NO: 2577679 - DNA, 25 bp, Homo sapien
ccgcggggaggaggcgcgccctggc

SEQ ID NO: 2577680 - DNA, 25 bp, Homo sapien
ccttctcgtgcggcagctccgggag

SEQ ID NO: 2577681 - DNA, 25 bp, Homo sapien
gccttctcgtgcggcagctccggga

SEQ ID NO: 2577682 - DNA, 25 bp, Homo sapien
ctggcgccttctcgtgcggcagctc

SEQ ID NO: 2577683 - DNA, 25 bp, Homo sapien
gcgccttctcgtgcggcagctccgg

SEQ ID NO: 2577684 - DNA, 25 bp, Homo sapien
tgcacatgatgttgaagcgctgctg

SEQ ID NO: 2577685 - DNA, 25 bp, Homo sapien
aggttgaacctcaggtggttgcaca

SEQ ID NO: 2577686 - DNA, 25 bp, Homo sapien
ggttgtgggtctcggcgaagcggta

SEQ ID NO: 2577687 - DNA, 25 bp, Homo sapien
tagaggatgttgagcaccgtgctgc

SEQ ID NO: 2577688 - DNA, 25 bp, Homo sapien
tctaagtccgagtgcaggaatccgg

SEQ ID NO: 2577689 - DNA, 25 bp, Homo sapien
agctctaagtccgagtgcaggaatc

SEQ ID NO: 2577690 - DNA, 25 bp, Homo sapien
agtccgagtgcaggaatccggccag

SEQ ID NO: 2577691 - DNA, 25 bp, Homo sapien
ccgagtgcaggaatccggccagcag

SEQ ID NO: 2577692 - DNA, 25 bp, Homo sapien
caccaccatgccccgggacggggct

SEQ ID NO: 2577693 - DNA, 25 bp, Homo sapien
ccgggacggggcttcaccacattgg

SEQ ID NO: 2577694 - DNA, 25 bp, Homo sapien
tcatgtgatccaccctccttggctt

SEQ ID NO: 2577695 - DNA, 25 bp, Homo sapien
catgccccgggacggggcttcacca

SEQ ID NO: 2577696 - DNA, 25 bp, Homo sapien
ttttctatgccagtacagaaacatc

SEQ ID NO: 2577697 - DNA, 25 bp, Homo sapien
ttatttggtttttctatgccagtac

SEQ ID NO: 2577698 - DNA, 25 bp, Homo sapien
ttggtttttctatgccagtacagaa

SEQ ID NO: 2577699 - DNA, 25 bp, Homo sapien
tgagcctgcagaggctcacggccac

SEQ ID NO: 2577700 - DNA, 25 bp, Homo sapien
accgttgaggcacagtagccaggcc

SEQ ID NO: 2577701 - DNA, 25 bp, Homo sapien
ttgaggagccgaaccgttgaggcac

SEQ ID NO: 2577702 - DNA, 25 bp, Homo sapien
ggagccgaaccgttgaggcacagta

SEQ ID NO: 2577703 - DNA, 25 bp, Homo sapien
ccgaaccgttgaggcacagtagcca

SEQ ID NO: 2577704 - DNA, 25 bp, Homo sapien
cattggctgtgtcgtggttgccatg

SEQ ID NO: 2577705 - DNA, 25 bp, Homo sapien
ttgccatggagaccgtctgctcaag

SEQ ID NO: 2577706 - DNA, 25 bp, Homo sapien
ggagaccgtctgctcaagtttgcct

SEQ ID NO: 2577707 - DNA, 25 bp, Homo sapien
ttcttgtaggtgacgtgaagatgct

SEQ ID NO: 2577708 - DNA, 25 bp, Homo sapien
agaatggaacaaagatagcttagtt

SEQ ID NO: 2577709 - DNA, 25 bp, Homo sapien
gaatggaacaaagatagcttagttt

SEQ ID NO: 2577710 - DNA, 25 bp, Homo sapien
ccacacactcatcacgggctgtgag

SEQ ID NO: 2577711 - DNA, 25 bp, Homo sapien
cctgtgcgcccactgcatgccacac

SEQ ID NO: 2577712 - DNA, 25 bp, Homo sapien
taggacactcagagctgctcggctg

SEQ ID NO: 2577713 - DNA, 25 bp, Homo sapien
aggacactcagagctgctcggctga

SEQ ID NO: 2577714 - DNA, 25 bp, Homo sapien
ggacactcagagctgctcggctgac

SEQ ID NO: 2577715 - DNA, 25 bp, Homo sapien
gagctgctcggctgacgatgatggg

SEQ ID NO: 2577716 - DNA, 25 bp, Homo sapien
agctgctcggctgacgatgatgggc

SEQ ID NO: 2577717 - DNA, 25 bp, Homo sapien
gctgctcggctgacgatgatgggca

SEQ ID NO: 2577718 - DNA, 25 bp, Homo sapien
agagctgctcggctgacgatgatgg

SEQ ID NO: 2577719 - DNA, 25 bp, Homo sapien
taggacacgcagagctgctcggctg

SEQ ID NO: 2577720 - DNA, 25 bp, Homo sapien
ctaggacacgcagagctgctcggct

SEQ ID NO: 2577721 - DNA, 25 bp, Homo sapien
aggacacgcagagctgctcggctga

SEQ ID NO: 2577722 - DNA, 25 bp, Homo sapien
ggacacgcagagctgctcggctgac

SEQ ID NO: 2577723 - DNA, 25 bp, Homo sapien
tgatgggcactaggacactcagagc

SEQ ID NO: 2577724 - DNA, 25 bp, Homo sapien
gatgatgggcactaggacactcaga

SEQ ID NO: 2577725 - DNA, 25 bp, Homo sapien
gggcactaggacactcagagctgct

SEQ ID NO: 2577726 - DNA, 25 bp, Homo sapien
atgggcactaggacactcagagctg

SEQ ID NO: 2577727 - DNA, 25 bp, Homo sapien
aatgggcactaggacactcagctgc

SEQ ID NO: 2577728 - DNA, 25 bp, Homo sapien
tcagctgcccggctgatgataatgg

SEQ ID NO: 2577729 - DNA, 25 bp, Homo sapien
gatgataatgggcactaggacactc

SEQ ID NO: 2577730 - DNA, 25 bp, Homo sapien
gctgcccggctgatgataatgggca

SEQ ID NO: 2577731 - DNA, 25 bp, Homo sapien
tgctcggctgacgatgatgggcact

SEQ ID NO: 2577732 - DNA, 25 bp, Homo sapien
agaactgcccggctgacgatgatgg

SEQ ID NO: 2577733 - DNA, 25 bp, Homo sapien
gctcggctgatgataatgggcacta

SEQ ID NO: 2577734 - DNA, 25 bp, Homo sapien
agctgctcggctgatgataatgggc

SEQ ID NO: 2577735 - DNA, 25 bp, Homo sapien
tgcaaggcacgtgctacacagactg

SEQ ID NO: 2577736 - DNA, 25 bp, Homo sapien
gcacagtggaaatggtcaccagacc

SEQ ID NO: 2577737 - DNA, 25 bp, Homo sapien
agatgctcaagctcgcaggtcaccg

SEQ ID NO: 2577738 - DNA, 25 bp, Homo sapien
gatgacccagcaacgacgtgaaaag

SEQ ID NO: 2577739 - DNA, 25 bp, Homo sapien
gatcgctcaagcctgggagccagaa

SEQ ID NO: 2577740 - DNA, 25 bp, Homo sapien
aggatcgctcaagcctgggagccag

SEQ ID NO: 2577741 - DNA, 25 bp, Homo sapien
gcgagccaagatcttgctactgtat

SEQ ID NO: 2577742 - DNA, 25 bp, Homo sapien
gctcaagcctgggagccagaagttg

SEQ ID NO: 2577743 - DNA, 25 bp, Homo sapien
atggcacagagccttcccctaagcg

SEQ ID NO: 2577744 - DNA, 25 bp, Homo sapien
ttaagtcgctcggtagaggtcccca

SEQ ID NO: 2577745 - DNA, 25 bp, Homo sapien
cccaggcttcgcaactccatcgtct

SEQ ID NO: 2577746 - DNA, 25 bp, Homo sapien
agcgccatgcccaggcttcgcaact

SEQ ID NO: 2577747 - DNA, 25 bp, Homo sapien
aggaagaggctgactccacagaccg

SEQ ID NO: 2577748 - DNA, 25 bp, Homo sapien
ggaagaggaagaggctgactccaca

SEQ ID NO: 2577749 - DNA, 25 bp, Homo sapien
agaggaagaggctgactccacagac

SEQ ID NO: 2577750 - DNA, 25 bp, Homo sapien
aagaggaagaggctgactccacaga

SEQ ID NO: 2577751 - DNA, 25 bp, Homo sapien
caaacagaagacaggagcgtgctgg

SEQ ID NO: 2577752 - DNA, 25 bp, Homo sapien
gtgggatgcgatgcacagctcctgc

SEQ ID NO: 2577753 - DNA, 25 bp, Homo sapien
tcctggcgatggagtgggatgcgat

SEQ ID NO: 2577754 - DNA, 25 bp, Homo sapien
ggagatcctggcgatggagtgggat

SEQ ID NO: 2577755 - DNA, 25 bp, Homo sapien
gatggagtgggatgcgatgcacagc

SEQ ID NO: 2577756 - DNA, 25 bp, Homo sapien
gaggcagccttgactctccttgcct

SEQ ID NO: 2577757 - DNA, 25 bp, Homo sapien
tgcaagccgggactccacaggaggc

SEQ ID NO: 2577758 - DNA, 25 bp, Homo sapien
cagctgtggaagcaacgatatttct

SEQ ID NO: 2577759 - DNA, 25 bp, Homo sapien
gcaagggaagggcagtcagctcacc

SEQ ID NO: 2577760 - DNA, 25 bp, Homo sapien
ctgtgttctgggcgctgacaaaggc

SEQ ID NO: 2577761 - DNA, 25 bp, Homo sapien
ctgacaaaggccaccttgttggtgt

SEQ ID NO: 2577762 - DNA, 25 bp, Homo sapien
tgttctgggcgctgacaaaggccac

SEQ ID NO: 2577763 - DNA, 25 bp, Homo sapien
ggcgctgacaaaggccaccttgttg

SEQ ID NO: 2577764 - DNA, 25 bp, Homo sapien
cgggcttgaggcgaatgaagccaca

SEQ ID NO: 2577765 - DNA, 25 bp, Homo sapien
tctgtgcatcggcttgcgcgtgtcc

SEQ ID NO: 2577766 - DNA, 25 bp, Homo sapien
gcttgcgcgtgtccgggtggaagga

SEQ ID NO: 2577767 - DNA, 25 bp, Homo sapien
aagccacactctctgtgcatcggct

SEQ ID NO: 2577768 - DNA, 25 bp, Homo sapien
cactcctgaagacgggctgttccag

SEQ ID NO: 2577769 - DNA, 25 bp, Homo sapien
gaagacgggctgttccagccacgcc

SEQ ID NO: 2577770 - DNA, 25 bp, Homo sapien
ctgaagacgggctgttccagccacg

SEQ ID NO: 2577771 - DNA, 25 bp, Homo sapien
cctccactcctgaagacgggctgtt

SEQ ID NO: 2577772 - DNA, 25 bp, Homo sapien
ctcagctcctgaagacgggctgttc

SEQ ID NO: 2577773 - DNA, 25 bp, Homo sapien
accctcagctcctgaagacgggctg

SEQ ID NO: 2577774 - DNA, 25 bp, Homo sapien
agctcctgaagacgggctgttccag

SEQ ID NO: 2577775 - DNA, 25 bp, Homo sapien
tgaagacgggctgttccagccacac

SEQ ID NO: 2577776 - DNA, 25 bp, Homo sapien
tcagtctggaattattttcagagac

SEQ ID NO: 2577777 - DNA, 25 bp, Homo sapien
agtgtggggtaggtcccggctccag

SEQ ID NO: 2577778 - DNA, 25 bp, Homo sapien
acgtgggagatgtgaacctcctcca

SEQ ID NO: 2577779 - DNA, 25 bp, Homo sapien
tggcccacgtgggagatgtgaacct

SEQ ID NO: 2577780 - DNA, 25 bp, Homo sapien
ctccaggtgggtccgacagccaggt

SEQ ID NO: 2577781 - DNA, 25 bp, Homo sapien
tcaggtttttgggccggctctctgg

SEQ ID NO: 2577782 - DNA, 25 bp, Homo sapien
gctctctggcctgtgcggagcacac

SEQ ID NO: 2577783 - DNA, 25 bp, Homo sapien
ccacttccactggtgagcgcagcct

SEQ ID NO: 2577784 - DNA, 25 bp, Homo sapien
ttccactggtgagcgcagcctgcat

SEQ ID NO: 2577785 - DNA, 25 bp, Homo sapien
acttccactggtgagcgcagcctgc

SEQ ID NO: 2577786 - DNA, 25 bp, Homo sapien
gacccacttccactggtgagcgcag

SEQ ID NO: 2577787 - DNA, 25 bp, Homo sapien
agcagcgatccagagtccaggttct

SEQ ID NO: 2577788 - DNA, 25 bp, Homo sapien
gcgatccagagtccaggttctgagc

SEQ ID NO: 2577789 - DNA, 25 bp, Homo sapien
ggagcagcgatccagagtccaggtt

SEQ ID NO: 2577790 - DNA, 25 bp, Homo sapien
ttctgagctgctgcaccggggccgc

SEQ ID NO: 2577791 - DNA, 25 bp, Homo sapien
cgcggcgccgggcatggccttcaca

SEQ ID NO: 2577792 - DNA, 25 bp, Homo sapien
ggccttcacactccccacgaggcag

SEQ ID NO: 2577793 - DNA, 25 bp, Homo sapien
aggacagccccgggctagggtgagg

SEQ ID NO: 2577794 - DNA, 25 bp, Homo sapien
gggtgaggggcacgcgccgcaagtc

SEQ ID NO: 2577795 - DNA, 25 bp, Homo sapien
cttccagattgcaggcgcgtgagct

SEQ ID NO: 2577796 - DNA, 25 bp, Homo sapien
ttctgtggcagaagacgctagagtc

SEQ ID NO: 2577797 - DNA, 25 bp, Homo sapien
tagagtcacacgtagaaggcgcatg

SEQ ID NO: 2577798 - DNA, 25 bp, Homo sapien
cacgtgcagtgagtgcgagctacaa

SEQ ID NO: 2577799 - DNA, 25 bp, Homo sapien
cccaagacactgaaagcaggcttac

SEQ ID NO: 2577800 - DNA, 25 bp, Homo sapien
ttcttttattgaaatctcaaccaaa

SEQ ID NO: 2577801 - DNA, 25 bp, Homo sapien
gcccaagacactgaaagcaggctta

SEQ ID NO: 2577802 - DNA, 25 bp, Homo sapien
tttattgaaatctcaaccaaaacac

SEQ ID NO: 2577803 - DNA, 25 bp, Homo sapien
tttctgccaattgacgggaaatgtt

SEQ ID NO: 2577804 - DNA, 25 bp, Homo sapien
tctgccaattgacgggaaatgtttg

SEQ ID NO: 2577805 - DNA, 25 bp, Homo sapien
ctcgtcaaggttcctcaaggttgtt

SEQ ID NO: 2577806 - DNA, 25 bp, Homo sapien
tctaaactccggacactcgtcaagg

SEQ ID NO: 2577807 - DNA, 25 bp, Homo sapien
gttagtgacacgttgtttcctgcca

SEQ ID NO: 2577808 - DNA, 25 bp, Homo sapien
tgtctcctggcaagcggcccgggaa

SEQ ID NO: 2577809 - DNA, 25 bp, Homo sapien
gacaggaagtgagcaaatgcaccca

SEQ ID NO: 2577810 - DNA, 25 bp, Homo sapien
tacaacagggtgcatggaagctgag

SEQ ID NO: 2577811 - DNA, 25 bp, Homo sapien
tccctaaagtctgagccatcgccat

SEQ ID NO: 2577812 - DNA, 25 bp, Homo sapien
accgccacttcctccctaaagtctg

SEQ ID NO: 2577813 - DNA, 25 bp, Homo sapien
agccagtactccagcattgctacca

SEQ ID NO: 2577814 - DNA, 25 bp, Homo sapien
gggactgccacaacagtcaccagcg

SEQ ID NO: 2577815 - DNA, 25 bp, Homo sapien
tgacatacagcctccacctagggaa

SEQ ID NO: 2577816 - DNA, 25 bp, Homo sapien
gcaccggaactaagatgacatacag

SEQ ID NO: 2577817 - DNA, 25 bp, Homo sapien
ctaataatcatggttgcttgatggg

SEQ ID NO: 2577818 - DNA, 25 bp, Homo sapien
caggaccgatcagctctcaacagtt

SEQ ID NO: 2577819 - DNA, 25 bp, Homo sapien
gacaagcattgatccagatgaaatc

SEQ ID NO: 2577820 - DNA, 25 bp, Homo sapien
ttattgacaagcattgatccagatg

SEQ ID NO: 2577821 - DNA, 25 bp, Homo sapien
gatccagatgaaatcaacaatgtgg

SEQ ID NO: 2577822 - DNA, 25 bp, Homo sapien
tgaaatcaacaatgtggtaggaata

SEQ ID NO: 2577823 - DNA, 25 bp, Homo sapien
ggaacatgggtacgcgaggctccgg

SEQ ID NO: 2577824 - DNA, 25 bp, Homo sapien
cgggaagggaacatgggtacgcgag

SEQ ID NO: 2577825 - DNA, 25 bp, Homo sapien
aagggaacatgggtacgcgaggctc

SEQ ID NO: 2577826 - DNA, 25 bp, Homo sapien
catgggtacgcgaggctccggtact

SEQ ID NO: 2577827 - DNA, 25 bp, Homo sapien
tgcaggcccctgacgccgacaggat

SEQ ID NO: 2577828 - DNA, 25 bp, Homo sapien
tccgcacctggctgtcggagcggct

SEQ ID NO: 2577829 - DNA, 25 bp, Homo sapien
tgggcgacagcaggctacttggata

SEQ ID NO: 2577830 - DNA, 25 bp, Homo sapien
agtgcagtgagtcgatgagcttgca

SEQ ID NO: 2577831 - DNA, 25 bp, Homo sapien
catcgggtttccactcgaggacggt

SEQ ID NO: 2577832 - DNA, 25 bp, Homo sapien
ggcatcttttctccgggtgcggcca

SEQ ID NO: 2577833 - DNA, 25 bp, Homo sapien
gcttgcttcaacctgcgggactctg

SEQ ID NO: 2577834 - DNA, 25 bp, Homo sapien
gagccgataaatttgcacgccccag

SEQ ID NO: 2577835 - DNA, 25 bp, Homo sapien
tggattagacgttttgagtccttta

SEQ ID NO: 2577836 - DNA, 25 bp, Homo sapien
ccagttatccctctgaacagctttt

SEQ ID NO: 2577837 - DNA, 25 bp, Homo sapien
tgaatacttagtgggagtccagtta

SEQ ID NO: 2577838 - DNA, 25 bp, Homo sapien
cagcttttaaccattggattagacg

SEQ ID NO: 2577839 - DNA, 25 bp, Homo sapien
caagtatttttgcacgcaccctaag

SEQ ID NO: 2577840 - DNA, 25 bp, Homo sapien
aagtatttttgcacgcaccctaagc

SEQ ID NO: 2577841 - DNA, 25 bp, Homo sapien
acaagtatttttgcacgcaccctaa

SEQ ID NO: 2577842 - DNA, 25 bp, Homo sapien
cgcaggaagatactgaataggatgt

SEQ ID NO: 2577843 - DNA, 25 bp, Homo sapien
tgtttaagaacataggcctgggccg

SEQ ID NO: 2577844 - DNA, 25 bp, Homo sapien
cctaataaagatccttcataaccat

SEQ ID NO: 2577845 - DNA, 25 bp, Homo sapien
gaaaaaagcaaccagcgcaggaaga

SEQ ID NO: 2577846 - DNA, 25 bp, Homo sapien
ggcgcaggtcgcgtctgcccggtcg

SEQ ID NO: 2577847 - DNA, 25 bp, Homo sapien
agcgcaggaggatgccgtccccagc

SEQ ID NO: 2577848 - DNA, 25 bp, Homo sapien
gccaggctctaagggagcgcaggag

SEQ ID NO: 2577849 - DNA, 25 bp, Homo sapien
ggctgtcagctacggaggcgcaggt

SEQ ID NO: 2577850 - DNA, 25 bp, Homo sapien
gcagcgtctccgttttggatacagt

SEQ ID NO: 2577851 - DNA, 25 bp, Homo sapien
attaggagcaacttgccctgtaccc

SEQ ID NO: 2577852 - DNA, 25 bp, Homo sapien
tgttttctctgggtacaccccaagc

SEQ ID NO: 2577853 - DNA, 25 bp, Homo sapien
ctacaagtgaactccttgcccaggc

SEQ ID NO: 2577854 - DNA, 25 bp, Homo sapien
gaggctcttctccatcaatgagtgc

SEQ ID NO: 2577855 - DNA, 25 bp, Homo sapien
gaggcttggccactggatgttttca

SEQ ID NO: 2577856 - DNA, 25 bp, Homo sapien
cacaacacttatgtatgcaccccaa

SEQ ID NO: 2577857 - DNA, 25 bp, Homo sapien
gctcagcccttagcaatcggggagt

SEQ ID NO: 2577858 - DNA, 25 bp, Homo sapien
gatgttttcactaactacactctac

SEQ ID NO: 2577859 - DNA, 25 bp, Homo sapien
gagtgcaagatcttctaaaccccaa

SEQ ID NO: 2577860 - DNA, 25 bp, Homo sapien
cctcctgcgtcaatgccatggaagg

SEQ ID NO: 2577861 - DNA, 25 bp, Homo sapien
ttggggtgcatacataagtgttgtg

SEQ ID NO: 2577862 - DNA, 25 bp, Homo sapien
ttggggtttagaagatcttgcactc

SEQ ID NO: 2577863 - DNA, 25 bp, Homo sapien
gcctgggcaaggagttcacttgtag

SEQ ID NO: 2577864 - DNA, 25 bp, Homo sapien
gtagagtgtagttagtgaaaacatc

SEQ ID NO: 2577865 - DNA, 25 bp, Homo sapien
ccttccatggcattgacgcaggagg

SEQ ID NO: 2577866 - DNA, 25 bp, Homo sapien
tgaaaacatccagtggccaagcctc

SEQ ID NO: 2577867 - DNA, 25 bp, Homo sapien
gcactcattgatggagaagagcctc

SEQ ID NO: 2577868 - DNA, 25 bp, Homo sapien
gggtacagggcaagttgctcctaat

SEQ ID NO: 2577869 - DNA, 25 bp, Homo sapien
actgtatccaaaacggagacgctgc

SEQ ID NO: 2577870 - DNA, 25 bp, Homo sapien
actccccgattgctaagggctgagc

SEQ ID NO: 2577871 - DNA, 25 bp, Homo sapien
gcttggggtgtacccagagaaaaca

SEQ ID NO: 2577872 - DNA, 25 bp, Homo sapien
ggagacggcgcgcttctcgcccttt

SEQ ID NO: 2577873 - DNA, 25 bp, Homo sapien
ctcgccctttccctgccggttggag

SEQ ID NO: 2577874 - DNA, 25 bp, Homo sapien
agttcacggccgcacagcagatcac

SEQ ID NO: 2577875 - DNA, 25 bp, Homo sapien
ccggttggagcagttcacggccgca

SEQ ID NO: 2577876 - DNA, 25 bp, Homo sapien
gacacggctcgggacgtgggccggc

SEQ ID NO: 2577877 - DNA, 25 bp, Homo sapien
cgtccgcgccgtacggcaagatgga

SEQ ID NO: 2577878 - DNA, 25 bp, Homo sapien
gcaggcccctcgcagcgtccgtcgg

SEQ ID NO: 2577879 - DNA, 25 bp, Homo sapien
cgcgtcctcgccagccgcgggttcg

SEQ ID NO: 2577880 - DNA, 25 bp, Homo sapien
tatcatcgggtcttagtttcttggg

SEQ ID NO: 2577881 - DNA, 25 bp, Homo sapien
ttagtaaccagtagattctccaagc

SEQ ID NO: 2577882 - DNA, 25 bp, Homo sapien
catcgctagcccagtagccctagaa

SEQ ID NO: 2577883 - DNA, 25 bp, Homo sapien
gaaacgtgacgtgttcatcacagta

SEQ ID NO: 2577884 - DNA, 25 bp, Homo sapien
tctctgcagtgttgaccaccggccc

SEQ ID NO: 2577885 - DNA, 25 bp, Homo sapien
tctgcagtgttgaccaccggcccac

SEQ ID NO: 2577886 - DNA, 25 bp, Homo sapien
cagtgttgaccaccggcccacgtgg

SEQ ID NO: 2577887 - DNA, 25 bp, Homo sapien
tgcagtgttgaccaccggcccacgt

SEQ ID NO: 2577888 - DNA, 25 bp, Homo sapien
tgtcccttgtgtgtgggtgcgtctt

SEQ ID NO: 2577889 - DNA, 25 bp, Homo sapien
gtgcgtcttcggcactgcatctggg

SEQ ID NO: 2577890 - DNA, 25 bp, Homo sapien
cttgtgtgtgggtgcgtcttcggca

SEQ ID NO: 2577891 - DNA, 25 bp, Homo sapien
ccagtgctgctgtgtcccttgtgtg

SEQ ID NO: 2577892 - DNA, 25 bp, Homo sapien
ggcggggaagcaggctgtcctccca

SEQ ID NO: 2577893 - DNA, 25 bp, Homo sapien
cctcccatcttcagcactgcagctg

SEQ ID NO: 2577894 - DNA, 25 bp, Homo sapien
ggaggaggaaggtggtgtgggagtg

SEQ ID NO: 2577895 - DNA, 25 bp, Homo sapien
gggaagcaggctgtcctcccatctt

SEQ ID NO: 2577896 - DNA, 25 bp, Homo sapien
tcctctgaccccacctccgccagac

SEQ ID NO: 2577897 - DNA, 25 bp, Homo sapien
gtcctctgaccccacctccgccaga

SEQ ID NO: 2577898 - DNA, 25 bp, Homo sapien
cttttgttgaggtcctctgacccca

SEQ ID NO: 2577899 - DNA, 25 bp, Homo sapien
gaggtcctctgaccccacctccgcc

SEQ ID NO: 2577900 - DNA, 25 bp, Homo sapien
tgtgccccggattttaggagccttg

SEQ ID NO: 2577901 - DNA, 25 bp, Homo sapien
tgtcttcgatacgtggagctccttg

SEQ ID NO: 2577902 - DNA, 25 bp, Homo sapien
tcatccgagaagcacctctaacgcg

SEQ ID NO: 2577903 - DNA, 25 bp, Homo sapien
tactctctgtaggaagcttgctgtc

SEQ ID NO: 2577904 - DNA, 25 bp, Homo sapien
agtccccacgggagcctcggcgagt

SEQ ID NO: 2577905 - DNA, 25 bp, Homo sapien
cggcgagtgttgtcagtcgccccat

SEQ ID NO: 2577906 - DNA, 25 bp, Homo sapien
ccccacgggagcctcggcgagtgtt

SEQ ID NO: 2577907 - DNA, 25 bp, Homo sapien
agcctcggcgagtgttgtcagtcgc

SEQ ID NO: 2577908 - DNA, 25 bp, Homo sapien
tctgggcctgaaatgggacggtctc

SEQ ID NO: 2577909 - DNA, 25 bp, Homo sapien
cccctagaaatcatgaatgacggtg

SEQ ID NO: 2577910 - DNA, 25 bp, Homo sapien
ggctctgttgtggatgctccgcccc

SEQ ID NO: 2577911 - DNA, 25 bp, Homo sapien
gatgctccgccccatttaggaggaa

SEQ ID NO: 2577912 - DNA, 25 bp, Homo sapien
cacccaagatgcctgatgcgctatg

SEQ ID NO: 2577913 - DNA, 25 bp, Homo sapien
tggaaagattcttcgactcagaaga

SEQ ID NO: 2577914 - DNA, 25 bp, Homo sapien
ctagattcttctgatgtagagcgac

SEQ ID NO: 2577915 - DNA, 25 bp, Homo sapien
gcgctatgtcctgttccttctagat

SEQ ID NO: 2577916 - DNA, 25 bp, Homo sapien
gaaagtatctttgccccactaggaa

SEQ ID NO: 2577917 - DNA, 25 bp, Homo sapien
tactgcggcgttggcaggactcgct

SEQ ID NO: 2577918 - DNA, 25 bp, Homo sapien
tgtgtgggacaccttgaccaaaggg

SEQ ID NO: 2577919 - DNA, 25 bp, Homo sapien
tgggctccacgtccgagttcatggt

SEQ ID NO: 2577920 - DNA, 25 bp, Homo sapien
gagaattccaactgattaccattta

SEQ ID NO: 2577921 - DNA, 25 bp, Homo sapien
gctcagagttatcactgaacttcag

SEQ ID NO: 2577922 - DNA, 25 bp, Homo sapien
ttccaactgattaccatttacagtg

SEQ ID NO: 2577923 - DNA, 25 bp, Homo sapien
agaaaatacaacagagtgccatcag

SEQ ID NO: 2577924 - DNA, 25 bp, Homo sapien
gagaggcgtctccagtgggcagcct

SEQ ID NO: 2577925 - DNA, 25 bp, Homo sapien
gagtctcccacctctcgggggactg

SEQ ID NO: 2577926 - DNA, 25 bp, Homo sapien
tgcaccccagctccggggcagaaga

SEQ ID NO: 2577927 - DNA, 25 bp, Homo sapien
cagatctctgctgccgggaaagagc

SEQ ID NO: 2577928 - DNA, 25 bp, Homo sapien
gcgtcctcagagagcacgcggatgt

SEQ ID NO: 2577929 - DNA, 25 bp, Homo sapien
tcctcatggacagcttcgatgcttt

SEQ ID NO: 2577930 - DNA, 25 bp, Homo sapien
gagagcacgcggatgtcctcatgga

SEQ ID NO: 2577931 - DNA, 25 bp, Homo sapien
gacagcttcgatgcttttggaagca

SEQ ID NO: 2577932 - DNA, 25 bp, Homo sapien
gaatttggtcctaacagctgtgctg

SEQ ID NO: 2577933 - DNA, 25 bp, Homo sapien
aagaggctcatcagcacgttccagg

SEQ ID NO: 2577934 - DNA, 25 bp, Homo sapien
ttagaatttgctggcactggccggg

SEQ ID NO: 2577935 - DNA, 25 bp, Homo sapien
cacactgtggtgacctccgggatac

SEQ ID NO: 2577936 - DNA, 25 bp, Homo sapien
cctagtgtgcaattctgggattctc

SEQ ID NO: 2577937 - DNA, 25 bp, Homo sapien
ttctccacgcttcctagtgtgcaat

SEQ ID NO: 2577938 - DNA, 25 bp, Homo sapien
cagccaccacggtgtcatcctgagc

SEQ ID NO: 2577939 - DNA, 25 bp, Homo sapien
cacatctgggaggaccagacggaaa

SEQ ID NO: 2577940 - DNA, 25 bp, Homo sapien
tggaaagccccgttctcatagcgct

SEQ ID NO: 2577941 - DNA, 25 bp, Homo sapien
tcatagcgctcatggccaaacgctc

SEQ ID NO: 2577942 - DNA, 25 bp, Homo sapien
agctggtggaaacaccggagcgccc

SEQ ID NO: 2577943 - DNA, 25 bp, Homo sapien
caaagtcgtgtctttcatgagctgg

SEQ ID NO: 2577944 - DNA, 25 bp, Homo sapien
ggctgtttacaccaatctagggaaa

SEQ ID NO: 2577945 - DNA, 25 bp, Homo sapien
gcccacgtctggctgtttacaccaa

SEQ ID NO: 2577946 - DNA, 25 bp, Homo sapien
tttgggaaggcccacgtctggctgt

SEQ ID NO: 2577947 - DNA, 25 bp, Homo sapien
tctggctgtttacaccaatctaggg

SEQ ID NO: 2577948 - DNA, 25 bp, Homo sapien
ccagaaaatgcgtatctgtccacga

SEQ ID NO: 2577949 - DNA, 25 bp, Homo sapien
tccttggcaccggtgaaggccacac

SEQ ID NO: 2577950 - DNA, 25 bp, Homo sapien
gtatctgtccacgacgagggtcacg

SEQ ID NO: 2577951 - DNA, 25 bp, Homo sapien
ggccacaccagaaaatgcgtatctg

SEQ ID NO: 2577952 - DNA, 25 bp, Homo sapien
ctgaaaaagaggatgctcctgagcc

SEQ ID NO: 2577953 - DNA, 25 bp, Homo sapien
taatccaaaaaggtctggatcttct

SEQ ID NO: 2577954 - DNA, 25 bp, Homo sapien
aatccaaaaaggtctggatcttctc

SEQ ID NO: 2577955 - DNA, 25 bp, Homo sapien
ttaatccaaaaaggtctggatcttc

SEQ ID NO: 2577956 - DNA, 25 bp, Homo sapien
ccacacctccagcaaaacccaacat

SEQ ID NO: 2577957 - DNA, 25 bp, Homo sapien
cccacacctccagcaaaacccaaca

SEQ ID NO: 2577958 - DNA, 25 bp, Homo sapien
cagcccatgagagaattgattaaga

SEQ ID NO: 2577959 - DNA, 25 bp, Homo sapien
aaggaaaggacagccggacgtggtg

SEQ ID NO: 2577960 - DNA, 25 bp, Homo sapien
ccatttggcgggatggatcccttga

SEQ ID NO: 2577961 - DNA, 25 bp, Homo sapien
agagaattgattaagatggacttca

SEQ ID NO: 2577962 - DNA, 25 bp, Homo sapien
agccaggtgtgttaacgtgcctata

SEQ ID NO: 2577963 - DNA, 25 bp, Homo sapien
tgtgattgcgcactgcactcagcct

SEQ ID NO: 2577964 - DNA, 25 bp, Homo sapien
gtgttaacgtgcctatagttgcagc

SEQ ID NO: 2577965 - DNA, 25 bp, Homo sapien
actcagcctgcatgacacagagacc

SEQ ID NO: 2577966 - DNA, 25 bp, Homo sapien
aggcaaaccacagcctaggagaaaa

SEQ ID NO: 2577967 - DNA, 25 bp, Homo sapien
cacagcctaggagaaaatatgtata

SEQ ID NO: 2577968 - DNA, 25 bp, Homo sapien
aaccacagcctaggagaaaatatgt

SEQ ID NO: 2577969 - DNA, 25 bp, Homo sapien
agaaaaggcaaaccacagcctagga

SEQ ID NO: 2577970 - DNA, 25 bp, Homo sapien
gatggacacaagagacgtagccctg

SEQ ID NO: 2577971 - DNA, 25 bp, Homo sapien
gaacaattgcctccataaattctag

SEQ ID NO: 2577972 - DNA, 25 bp, Homo sapien
catgtaacacggatgatgaggaacc

SEQ ID NO: 2577973 - DNA, 25 bp, Homo sapien
gcaagacacaaagctaagccggagg

SEQ ID NO: 2577974 - DNA, 25 bp, Homo sapien
gacgacaattaaagagaatgagaag

SEQ ID NO: 2577975 - DNA, 25 bp, Homo sapien
cgtggttctagagacaatgcgacga

SEQ ID NO: 2577976 - DNA, 25 bp, Homo sapien
tctagagacaatgcgacgacaatta

SEQ ID NO: 2577977 - DNA, 25 bp, Homo sapien
cagagttaggggatctgtaagtgca

SEQ ID NO: 2577978 - DNA, 25 bp, Homo sapien
aatttgtatggtatgacctcattta

SEQ ID NO: 2577979 - DNA, 25 bp, Homo sapien
aagtgttgaatgaagaggaaaccta

SEQ ID NO: 2577980 - DNA, 25 bp, Homo sapien
tcaacattaagtgttgaatgaagag

SEQ ID NO: 2577981 - DNA, 25 bp, Homo sapien
ttaagtgttgaatgaagaggaaacc

SEQ ID NO: 2577982 - DNA, 25 bp, Homo sapien
cattaagtgttgaatgaagaggaaa

SEQ ID NO: 2577983 - DNA, 25 bp, Homo sapien
cctgggcgtgatatggtgagacctt

SEQ ID NO: 2577984 - DNA, 25 bp, Homo sapien
tagggagcgctctacatactctact

SEQ ID NO: 2577985 - DNA, 25 bp, Homo sapien
aaacattaagtctatgaggccaggg

SEQ ID NO: 2577986 - DNA, 25 bp, Homo sapien
aaaaaggtggtaggagagttcatat

SEQ ID NO: 2577987 - DNA, 25 bp, Homo sapien
ctttgggaactagggcgcttcacca

SEQ ID NO: 2577988 - DNA, 25 bp, Homo sapien
tgtcattcagaatcgagtgctgcgt

SEQ ID NO: 2577989 - DNA, 25 bp, Homo sapien
cagcattcattagcgccctttggga

SEQ ID NO: 2577990 - DNA, 25 bp, Homo sapien
tgcccacaggactgctaaacagaag

SEQ ID NO: 2577991 - DNA, 25 bp, Homo sapien
tcccagcgatttgcagaaaaaagca

SEQ ID NO: 2577992 - DNA, 25 bp, Homo sapien
cagcgatttgcagaaaaaagcaggt

SEQ ID NO: 2577993 - DNA, 25 bp, Homo sapien
ttgttcccagcgatttgcagaaaaa

SEQ ID NO: 2577994 - DNA, 25 bp, Homo sapien
gatttgcagaaaaaagcaggtgcac

SEQ ID NO: 2577995 - DNA, 25 bp, Homo sapien
actcagaagtttgccgatttcagtt

SEQ ID NO: 2577996 - DNA, 25 bp, Homo sapien
tttcttttgcaagtaggaactcaga

SEQ ID NO: 2577997 - DNA, 25 bp, Homo sapien
gatcctccacgtcacttttcttttg

SEQ ID NO: 2577998 - DNA, 25 bp, Homo sapien
gaagtttgccgatttcagttgatct

SEQ ID NO: 2577999 - DNA, 25 bp, Homo sapien
cagttcggcgcggtggcccgcggcg

SEQ ID NO: 2578000 - DNA, 25 bp, Homo sapien
ccgggaaccggagcagttcggcgcg

SEQ ID NO: 2578001 - DNA, 25 bp, Homo sapien
cagcactatgagagccccgcgccgg

SEQ ID NO: 2578002 - DNA, 25 bp, Homo sapien
ctcttcccggcgcggtccacgccct

SEQ ID NO: 2578003 - DNA, 25 bp, Homo sapien
ttagctagtatttcccggcctcggc

SEQ ID NO: 2578004 - DNA, 25 bp, Homo sapien
cagcgcgcgccgtgattagctagta

SEQ ID NO: 2578005 - DNA, 25 bp, Homo sapien
attggccggcgtcaacagcgcgcgc

SEQ ID NO: 2578006 - DNA, 25 bp, Homo sapien
cggcctcggccaaattcgaagggat

SEQ ID NO: 2578007 - DNA, 25 bp, Homo sapien
tatcttagggatatcaggctgcctg

SEQ ID NO: 2578008 - DNA, 25 bp, Homo sapien
caaattatagcacggagagggaacg

SEQ ID NO: 2578009 - DNA, 25 bp, Homo sapien
tgtccccggtatctagaaagcgctc

SEQ ID NO: 2578010 - DNA, 25 bp, Homo sapien
caactcctctgaaatgtgggtcatg

SEQ ID NO: 2578011 - DNA, 25 bp, Homo sapien
atgatccgcccatctcagcctccca

SEQ ID NO: 2578012 - DNA, 25 bp, Homo sapien
catgatccgcccatctcagcctccc

SEQ ID NO: 2578013 - DNA, 25 bp, Homo sapien
cacctcccgagttcatcccattctc

SEQ ID NO: 2578014 - DNA, 25 bp, Homo sapien
ccacctcccgagttcatcccattct

SEQ ID NO: 2578015 - DNA, 25 bp, Homo sapien
tacatgaagtccagtgttaggcagg

SEQ ID NO: 2578016 - DNA, 25 bp, Homo sapien
ggttggtccacatcctagcagttct

SEQ ID NO: 2578017 - DNA, 25 bp, Homo sapien
cctgcgtgatcaaaggatgactgcc

SEQ ID NO: 2578018 - DNA, 25 bp, Homo sapien
tagcacaggtagcagaataccagcc

SEQ ID NO: 2578019 - DNA, 25 bp, Homo sapien
tcatgggtctgttaactgtgcagca

SEQ ID NO: 2578020 - DNA, 25 bp, Homo sapien
ctgactcagcaaggaatgcagtttc

SEQ ID NO: 2578021 - DNA, 25 bp, Homo sapien
catgatccccttaaaaaccttagct

SEQ ID NO: 2578022 - DNA, 25 bp, Homo sapien
gagatgtatttgaggagacgtctcc

SEQ ID NO: 2578023 - DNA, 25 bp, Homo sapien
tgagccagacaggtcccaaggagcc

SEQ ID NO: 2578024 - DNA, 25 bp, Homo sapien
agacaggtcccaaggagccttcggg

SEQ ID NO: 2578025 - DNA, 25 bp, Homo sapien
gaagggagggcctcgtggcggcctg

SEQ ID NO: 2578026 - DNA, 25 bp, Homo sapien
caggtcccaaggagccttcgggaag

SEQ ID NO: 2578027 - DNA, 25 bp, Homo sapien
ggagcacttgtgagacggcagcttc

SEQ ID NO: 2578028 - DNA, 25 bp, Homo sapien
ccatgctctcaacgcgtgcttggta

SEQ ID NO: 2578029 - DNA, 25 bp, Homo sapien
tgccatgctctcaacgcgtgcttgg

SEQ ID NO: 2578030 - DNA, 25 bp, Homo sapien
cttgtgagacggcagcttccagggc

SEQ ID NO: 2578031 - DNA, 25 bp, Homo sapien
accctgccatcggccggggaagaag

SEQ ID NO: 2578032 - DNA, 25 bp, Homo sapien
cgaccctgccatcggccggggaaga

SEQ ID NO: 2578033 - DNA, 25 bp, Homo sapien
tgccatcggccggggaagaaggacc

SEQ ID NO: 2578034 - DNA, 25 bp, Homo sapien
agcgaccctgccatcggccggggaa

SEQ ID NO: 2578035 - DNA, 25 bp, Homo sapien
aggaacgcctgggtgtcaaatcggt

SEQ ID NO: 2578036 - DNA, 25 bp, Homo sapien
ttcagaaccggcgtcctgcatagag

SEQ ID NO: 2578037 - DNA, 25 bp, Homo sapien
atagagccgcacgtgcatcggcgca

SEQ ID NO: 2578038 - DNA, 25 bp, Homo sapien
catcggcgcattttccctgcgggag

SEQ ID NO: 2578039 - DNA, 25 bp, Homo sapien
ccgcgacctcagtgtggcttttaca

SEQ ID NO: 2578040 - DNA, 25 bp, Homo sapien
cccggatccgaggagcaagttaatc

SEQ ID NO: 2578041 - DNA, 25 bp, Homo sapien
gacatggtaacctggtccacggagg

SEQ ID NO: 2578042 - DNA, 25 bp, Homo sapien
acaggttctgtccacggtgtgtcca

SEQ ID NO: 2578043 - DNA, 25 bp, Homo sapien
gaatttgatattgcgctccaccttt

SEQ ID NO: 2578044 - DNA, 25 bp, Homo sapien
cactgtgcaccatcccaggtattga

SEQ ID NO: 2578045 - DNA, 25 bp, Homo sapien
tgacacgtgatgatgtggtcctgcc

SEQ ID NO: 2578046 - DNA, 25 bp, Homo sapien
ccctgtgggacgcttttgtctgaca

SEQ ID NO: 2578047 - DNA, 25 bp, Homo sapien
gatgatgcagctttaacatgaatgt

SEQ ID NO: 2578048 - DNA, 25 bp, Homo sapien
ctgtatgtattttgtggtgtccacc

SEQ ID NO: 2578049 - DNA, 25 bp, Homo sapien
cacgtttcatccaaaacgatgatgc

SEQ ID NO: 2578050 - DNA, 25 bp, Homo sapien
tattttcaaggaattattatctatg

SEQ ID NO: 2578051 - DNA, 25 bp, Homo sapien
ctctggcgtggcccgcgtggctgtt

SEQ ID NO: 2578052 - DNA, 25 bp, Homo sapien
ggcgtggcccgcgtggctgttgcgg

SEQ ID NO: 2578053 - DNA, 25 bp, Homo sapien
tctggcgtggcccgcgtggctgttg

SEQ ID NO: 2578054 - DNA, 25 bp, Homo sapien
ccgcgtggctgttgcggggtgctcc

SEQ ID NO: 2578055 - DNA, 25 bp, Homo sapien
agccctgggtttttggacatgttga

SEQ ID NO: 2578056 - DNA, 25 bp, Homo sapien
acaatggggcttgcgcaggtccagc

SEQ ID NO: 2578057 - DNA, 25 bp, Homo sapien
gctcgatgagttgacccggatatgc

SEQ ID NO: 2578058 - DNA, 25 bp, Homo sapien
gttgtccagcattggcgaggctctg

SEQ ID NO: 2578059 - DNA, 25 bp, Homo sapien
aggcagccgatgcccgccagaccat

SEQ ID NO: 2578060 - DNA, 25 bp, Homo sapien
ttgccactctgtgccgtgtcatgac

SEQ ID NO: 2578061 - DNA, 25 bp, Homo sapien
ctctgtgccgtgtcatgacctgaag

SEQ ID NO: 2578062 - DNA, 25 bp, Homo sapien
cactctgtgccgtgtcatgacctga

SEQ ID NO: 2578063 - DNA, 25 bp, Homo sapien
ccactctgtgccgtgtcatgacctg

SEQ ID NO: 2578064 - DNA, 25 bp, Homo sapien
gataatattcatagtggatttcaga

SEQ ID NO: 2578065 - DNA, 25 bp, Homo sapien
caagaaacacgccactaccataagc

SEQ ID NO: 2578066 - DNA, 25 bp, Homo sapien
ttaggaactattgagcatgctgtga

SEQ ID NO: 2578067 - DNA, 25 bp, Homo sapien
taccataagcccatggcacatggca

SEQ ID NO: 2578068 - DNA, 25 bp, Homo sapien
tacttcctaagttcccacagtggtg

SEQ ID NO: 2578069 - DNA, 25 bp, Homo sapien
catgagatctagtcatggactcacc

SEQ ID NO: 2578070 - DNA, 25 bp, Homo sapien
tactagatggcaagcagccaagctg

SEQ ID NO: 2578071 - DNA, 25 bp, Homo sapien
ttcttgcagggaccaattccacggt

SEQ ID NO: 2578072 - DNA, 25 bp, Homo sapien
gaattgtgacagctcgtggcttgat

SEQ ID NO: 2578073 - DNA, 25 bp, Homo sapien
attccacagccagatatcccatgat

SEQ ID NO: 2578074 - DNA, 25 bp, Homo sapien
tgtgacagctcgtggcttgatattg

SEQ ID NO: 2578075 - DNA, 25 bp, Homo sapien
ttccattccacagccagatatccca

SEQ ID NO: 2578076 - DNA, 25 bp, Homo sapien
gtcctgcaggtctgatagtcaatac

SEQ ID NO: 2578077 - DNA, 25 bp, Homo sapien
tctgaatgagactaacccatgtcct

SEQ ID NO: 2578078 - DNA, 25 bp, Homo sapien
gagtctctgaatgagactaacccat

SEQ ID NO: 2578079 - DNA, 25 bp, Homo sapien
ggtctgatagtcaatacagatgagc

SEQ ID NO: 2578080 - DNA, 25 bp, Homo sapien
tactgactgtttaacacttgccagt

SEQ ID NO: 2578081 - DNA, 25 bp, Homo sapien
tcttcacataatttcgatccacctt

SEQ ID NO: 2578082 - DNA, 25 bp, Homo sapien
cataatttcgatccaccttccacaa

SEQ ID NO: 2578083 - DNA, 25 bp, Homo sapien
ctgactgtttaacacttgccagtaa

SEQ ID NO: 2578084 - DNA, 25 bp, Homo sapien
actggagcagtatgatgtgatagca

SEQ ID NO: 2578085 - DNA, 25 bp, Homo sapien
gaaacacaactggagcagtatgatg

SEQ ID NO: 2578086 - DNA, 25 bp, Homo sapien
agaactgtggagtggatccagaaac

SEQ ID NO: 2578087 - DNA, 25 bp, Homo sapien
gagcagtatgatgtgatagcagatg

SEQ ID NO: 2578088 - DNA, 25 bp, Homo sapien
cattgatctcctgtggccggtatcc

SEQ ID NO: 2578089 - DNA, 25 bp, Homo sapien
caacacctcttctagtgagaatacc

SEQ ID NO: 2578090 - DNA, 25 bp, Homo sapien
ctagtgagaatacccaattcacatt

SEQ ID NO: 2578091 - DNA, 25 bp, Homo sapien
tgtggccggtatccctgaaagcagc

SEQ ID NO: 2578092 - DNA, 25 bp, Homo sapien
tatctgtgctgcccactatgacctc

SEQ ID NO: 2578093 - DNA, 25 bp, Homo sapien
cacccacaacagtcatcagtgatga

SEQ ID NO: 2578094 - DNA, 25 bp, Homo sapien
aaggtggctttcaccaccgggtctg

SEQ ID NO: 2578095 - DNA, 25 bp, Homo sapien
cgggtctgcatagtatctgtgctgc

SEQ ID NO: 2578096 - DNA, 25 bp, Homo sapien
tatttaaatcgaaaatccaaacatg

SEQ ID NO: 2578097 - DNA, 25 bp, Homo sapien
gctctggtgctttcaacatatttaa

SEQ ID NO: 2578098 - DNA, 25 bp, Homo sapien
ctcactctgagggtagcacatgtgt

SEQ ID NO: 2578099 - DNA, 25 bp, Homo sapien
gctgttgctagaactgagggaaaaa

SEQ ID NO: 2578100 - DNA, 25 bp, Homo sapien
ttctcgcttgcaggtctaatcttgc

SEQ ID NO: 2578101 - DNA, 25 bp, Homo sapien
tcgcttgcaggtctaatcttgcatg

SEQ ID NO: 2578102 - DNA, 25 bp, Homo sapien
caggtctaatcttgcatgctccaaa

SEQ ID NO: 2578103 - DNA, 25 bp, Homo sapien
tttaaccccttctcgcttgcaggtc

SEQ ID NO: 2578104 - DNA, 25 bp, Homo sapien
ggaatgcattaagcttttagaagga

SEQ ID NO: 2578105 - DNA, 25 bp, Homo sapien
gctaccatgccaggtgaacttttaa

SEQ ID NO: 2578106 - DNA, 25 bp, Homo sapien
gccactatgcctggaatgcattaag

SEQ ID NO: 2578107 - DNA, 25 bp, Homo sapien
taaatgttttgtccagaccaggtct

SEQ ID NO: 2578108 - DNA, 25 bp, Homo sapien
cactaaatgcaacagctagggaggc

SEQ ID NO: 2578109 - DNA, 25 bp, Homo sapien
tggcccaaggtgtggctcaatcttg

SEQ ID NO: 2578110 - DNA, 25 bp, Homo sapien
caatgtggtatgaattctgcagggc

SEQ ID NO: 2578111 - DNA, 25 bp, Homo sapien
caatcttgctgctcccaaaggtgta

SEQ ID NO: 2578112 - DNA, 25 bp, Homo sapien
cccattagaatgatccactgatgat

SEQ ID NO: 2578113 - DNA, 25 bp, Homo sapien
cactgatgattcttgactcaagcaa

SEQ ID NO: 2578114 - DNA, 25 bp, Homo sapien
tccacccattagaatgatccactga

SEQ ID NO: 2578115 - DNA, 25 bp, Homo sapien
ttattaccatgatggtggccaaata

SEQ ID NO: 2578116 - DNA, 25 bp, Homo sapien
ccaatgtggtatcttgctcataata

SEQ ID NO: 2578117 - DNA, 25 bp, Homo sapien
tgattttatcaagggcataactgga

SEQ ID NO: 2578118 - DNA, 25 bp, Homo sapien
tacctcccttgactgtgctgccttt

SEQ ID NO: 2578119 - DNA, 25 bp, Homo sapien
tctttttatctagcatccaatgtgg

SEQ ID NO: 2578120 - DNA, 25 bp, Homo sapien
tccaggaaaaggttttgacatttga

SEQ ID NO: 2578121 - DNA, 25 bp, Homo sapien
gaatagatgacagaaagtcaaggcc

SEQ ID NO: 2578122 - DNA, 25 bp, Homo sapien
ggttttgacatttgaatagatgaca

SEQ ID NO: 2578123 - DNA, 25 bp, Homo sapien
ttgacatttgaatagatgacagaaa

SEQ ID NO: 2578124 - DNA, 25 bp, Homo sapien
aggctcatgcgacttgcccagagaa

SEQ ID NO: 2578125 - DNA, 25 bp, Homo sapien
ggctcatgcgacttgcccagagaag

SEQ ID NO: 2578126 - DNA, 25 bp, Homo sapien
gaggagaggctcatgcgacttgccc

SEQ ID NO: 2578127 - DNA, 25 bp, Homo sapien
ttagtgggagaacatttgaaagaat

SEQ ID NO: 2578128 - DNA, 25 bp, Homo sapien
tttagtgggagaacatttgaaagaa

SEQ ID NO: 2578129 - DNA, 25 bp, Homo sapien
ttgttttagtgggagaacatttgaa

SEQ ID NO: 2578130 - DNA, 25 bp, Homo sapien
gtaatccacccaccgaggtcattgg

SEQ ID NO: 2578131 - DNA, 25 bp, Homo sapien
tgttccagagaggatttcgctcccc

SEQ ID NO: 2578132 - DNA, 25 bp, Homo sapien
tctttcacggcacttatcttaggtg

SEQ ID NO: 2578133 - DNA, 25 bp, Homo sapien
ttaaaaggaacctcagaaggctctc

SEQ ID NO: 2578134 - DNA, 25 bp, Homo sapien
agtgtctgctctgtcttctactgag

SEQ ID NO: 2578135 - DNA, 25 bp, Homo sapien
gctcttgatttcaggctgtacagca

SEQ ID NO: 2578136 - DNA, 25 bp, Homo sapien
tcagtctgattcacattggatgctc

SEQ ID NO: 2578137 - DNA, 25 bp, Homo sapien
cctgtggcccgggcaaggtatttgc

SEQ ID NO: 2578138 - DNA, 25 bp, Homo sapien
ccatggatctttctgtagcaccttg

SEQ ID NO: 2578139 - DNA, 25 bp, Homo sapien
tagcaccttgtattagagtctagta

SEQ ID NO: 2578140 - DNA, 25 bp, Homo sapien
aaggtgctgtgacccccagggcatg

SEQ ID NO: 2578141 - DNA, 25 bp, Homo sapien
tctcaaggtgctgtgacccccaggg

SEQ ID NO: 2578142 - DNA, 25 bp, Homo sapien
gagtttagacatgaattatcttggc

SEQ ID NO: 2578143 - DNA, 25 bp, Homo sapien
caggtactcttctgattacttgggt

SEQ ID NO: 2578144 - DNA, 25 bp, Homo sapien
ggtattcagataaacttaaactaca

SEQ ID NO: 2578145 - DNA, 25 bp, Homo sapien
tggctcataacacattcagtacatg

SEQ ID NO: 2578146 - DNA, 25 bp, Homo sapien
tgtgcatctggctcatgtgggctcc

SEQ ID NO: 2578147 - DNA, 25 bp, Homo sapien
ggcttcgcaaagctaagccatcctg

SEQ ID NO: 2578148 - DNA, 25 bp, Homo sapien
tgcatctggctcatgtgggctcctt

SEQ ID NO: 2578149 - DNA, 25 bp, Homo sapien
tccccgcagaggcttcgcaaagcta

SEQ ID NO: 2578150 - DNA, 25 bp, Homo sapien
tcatctcggtaaagacagagtaagg

SEQ ID NO: 2578151 - DNA, 25 bp, Homo sapien
gaacagactccgctcgtggtttcat

SEQ ID NO: 2578152 - DNA, 25 bp, Homo sapien
gatcctcttgtgtgttccggtaccg

SEQ ID NO: 2578153 - DNA, 25 bp, Homo sapien
gattcagtttttaggattccaggag

SEQ ID NO: 2578154 - DNA, 25 bp, Homo sapien
cattttttacttccggagcaggtct

SEQ ID NO: 2578155 - DNA, 25 bp, Homo sapien
cagaggcaccacttcaataggtcac

SEQ ID NO: 2578156 - DNA, 25 bp, Homo sapien
gcaggtctgagtcccagcggaagac

SEQ ID NO: 2578157 - DNA, 25 bp, Homo sapien
tgatgcatctgcttaacttttcagt

SEQ ID NO: 2578158 - DNA, 25 bp, Homo sapien
atttccgctcacaacttcctgtctg

SEQ ID NO: 2578159 - DNA, 25 bp, Homo sapien
cgctcacaacttcctgtctggatgt

SEQ ID NO: 2578160 - DNA, 25 bp, Homo sapien
tccgctcacaacttcctgtctggat

SEQ ID NO: 2578161 - DNA, 25 bp, Homo sapien
gctcacaacttcctgtctggatgtt

SEQ ID NO: 2578162 - DNA, 25 bp, Homo sapien
tggtctgaatgacagcagtgtagcg

SEQ ID NO: 2578163 - DNA, 25 bp, Homo sapien
ctggtctgaatgacagcagtgtagc

SEQ ID NO: 2578164 - DNA, 25 bp, Homo sapien
ctaggctggtctgaatgacagcagt

SEQ ID NO: 2578165 - DNA, 25 bp, Homo sapien
ggctggtctgaatgacagcagtgta

SEQ ID NO: 2578166 - DNA, 25 bp, Homo sapien
ttttcttgcttcttaattcattgag

SEQ ID NO: 2578167 - DNA, 25 bp, Homo sapien
cttgcttcttaattcattgaggtta

SEQ ID NO: 2578168 - DNA, 25 bp, Homo sapien
tagacacgaggggaccgtgttgaat

SEQ ID NO: 2578169 - DNA, 25 bp, Homo sapien
cttagaggaaggccctagacacgag

SEQ ID NO: 2578170 - DNA, 25 bp, Homo sapien
cgccctcggctccagtgggataata

SEQ ID NO: 2578171 - DNA, 25 bp, Homo sapien
tagggcgacatgacaagctcttcgt

SEQ ID NO: 2578172 - DNA, 25 bp, Homo sapien
gctccagtgggataatagggcgaca

SEQ ID NO: 2578173 - DNA, 25 bp, Homo sapien
aagctcttcgtgctccctggaggct

SEQ ID NO: 2578174 - DNA, 25 bp, Homo sapien
cggcagcgtcgtggggccggctggc

SEQ ID NO: 2578175 - DNA, 25 bp, Homo sapien
ggccggctggcaggggaaatgtgtc

SEQ ID NO: 2578176 - DNA, 25 bp, Homo sapien
gggccggctggcaggggaaatgtgt

SEQ ID NO: 2578177 - DNA, 25 bp, Homo sapien
ctggccggcagcgtcgtggggccgg

SEQ ID NO: 2578178 - DNA, 25 bp, Homo sapien
tgcactaaagtcaaaaaagaattct

SEQ ID NO: 2578179 - DNA, 25 bp, Homo sapien
tgtttctcaggttccaaaaatctta

SEQ ID NO: 2578180 - DNA, 25 bp, Homo sapien
ttcttggccagacgatgtataagca

SEQ ID NO: 2578181 - DNA, 25 bp, Homo sapien
tgtataagcatcttacattgtatgg

SEQ ID NO: 2578182 - DNA, 25 bp, Homo sapien
ggtaaccccgatccctcagaataga

SEQ ID NO: 2578183 - DNA, 25 bp, Homo sapien
ggaatctcccaatccctcaggtaac

SEQ ID NO: 2578184 - DNA, 25 bp, Homo sapien
gatggccgggacttgtattggttca

SEQ ID NO: 2578185 - DNA, 25 bp, Homo sapien
ttggtgaaagcatcaggaatctccc

SEQ ID NO: 2578186 - DNA, 25 bp, Homo sapien
ctctggtgtaggcatgtactaggag

SEQ ID NO: 2578187 - DNA, 25 bp, Homo sapien
cagtctctggtgtaggcatgtacta

SEQ ID NO: 2578188 - DNA, 25 bp, Homo sapien
taggcatgtactaggaggaagggat

SEQ ID NO: 2578189 - DNA, 25 bp, Homo sapien
ggcatgtactaggaggaagggattg

SEQ ID NO: 2578190 - DNA, 25 bp, Homo sapien
caacgtcagcgccatgctatgctgt

SEQ ID NO: 2578191 - DNA, 25 bp, Homo sapien
tggtgaagaattcgactccgcacag

SEQ ID NO: 2578192 - DNA, 25 bp, Homo sapien
cactcctttactgtcaaggaactga

SEQ ID NO: 2578193 - DNA, 25 bp, Homo sapien
gacacgaagagtttaagcccacaca

SEQ ID NO: 2578194 - DNA, 25 bp, Homo sapien
catcttccaaggagggatagaatga

SEQ ID NO: 2578195 - DNA, 25 bp, Homo sapien
gggatagaatgaaggagctaaagac

SEQ ID NO: 2578196 - DNA, 25 bp, Homo sapien
ttacaaagtggctattcatcttcca

SEQ ID NO: 2578197 - DNA, 25 bp, Homo sapien
tggctattcatcttccaaggaggga

SEQ ID NO: 2578198 - DNA, 25 bp, Homo sapien
tgagacacgtgatctctctgcctgt

SEQ ID NO: 2578199 - DNA, 25 bp, Homo sapien
gcttcttggaaagtagccggcagag

SEQ ID NO: 2578200 - DNA, 25 bp, Homo sapien
taagaattccaagcaggtctcattg

SEQ ID NO: 2578201 - DNA, 25 bp, Homo sapien
tgccagcaacttccagataatccca

SEQ ID NO: 2578202 - DNA, 25 bp, Homo sapien
ttggtcctcacccagcatcgggtca

SEQ ID NO: 2578203 - DNA, 25 bp, Homo sapien
aagcagcaaccacatggagaagtga

SEQ ID NO: 2578204 - DNA, 25 bp, Homo sapien
cagcaaccacatggagaagtgacca

SEQ ID NO: 2578205 - DNA, 25 bp, Homo sapien
cagcatcgggtcagtgttgtttgag

SEQ ID NO: 2578206 - DNA, 25 bp, Homo sapien
tcttgttatcatcgttgcccgtggc

SEQ ID NO: 2578207 - DNA, 25 bp, Homo sapien
cttgttatcatcgttgcccgtggcc

SEQ ID NO: 2578208 - DNA, 25 bp, Homo sapien
tgttatcatcgttgcccgtggcctg

SEQ ID NO: 2578209 - DNA, 25 bp, Homo sapien
cttcttgttatcatcgttgcccgtg

SEQ ID NO: 2578210 - DNA, 25 bp, Homo sapien
cgcatggcattcaaagtactctcaa

SEQ ID NO: 2578211 - DNA, 25 bp, Homo sapien
tgtgttctccccaacataagccgtg

SEQ ID NO: 2578212 - DNA, 25 bp, Homo sapien
caagcccgtttattgctgtgccaaa

SEQ ID NO: 2578213 - DNA, 25 bp, Homo sapien
tgtgtgcaatccaacacgcatggca

SEQ ID NO: 2578214 - DNA, 25 bp, Homo sapien
gtccaccagccgctgacctgaagga

SEQ ID NO: 2578215 - DNA, 25 bp, Homo sapien
tgtgctccccaagaatgctgtgaaa

SEQ ID NO: 2578216 - DNA, 25 bp, Homo sapien
gctgacctgaaggataaagcctcat

SEQ ID NO: 2578217 - DNA, 25 bp, Homo sapien
gctccccaagaatgctgtgaaagct

SEQ ID NO: 2578218 - DNA, 25 bp, Homo sapien
aggtctcccagcagaacgtgaaagg

SEQ ID NO: 2578219 - DNA, 25 bp, Homo sapien
tttggtgcacagtgttggaggtctc

SEQ ID NO: 2578220 - DNA, 25 bp, Homo sapien
tggaggtctcccagcagaacgtgaa

SEQ ID NO: 2578221 - DNA, 25 bp, Homo sapien
cagtgttggaggtctcccagcagaa

SEQ ID NO: 2578222 - DNA, 25 bp, Homo sapien
taaaaggcaatatcgtatccagagc

SEQ ID NO: 2578223 - DNA, 25 bp, Homo sapien
ttcagcttcgtgagccgacagaggc

SEQ ID NO: 2578224 - DNA, 25 bp, Homo sapien
tatccagagcatgtgaacactcgag

SEQ ID NO: 2578225 - DNA, 25 bp, Homo sapien
gtgctgttgagatgacgccgcctcc

SEQ ID NO: 2578226 - DNA, 25 bp, Homo sapien
ggttggaatttgcaaggagcattgc

SEQ ID NO: 2578227 - DNA, 25 bp, Homo sapien
tgcaaggagcattgcggacaggccc

SEQ ID NO: 2578228 - DNA, 25 bp, Homo sapien
ggtatgaaccacgacttggaagagg

SEQ ID NO: 2578229 - DNA, 25 bp, Homo sapien
tcagttctgtaagtcctgtgtatca

SEQ ID NO: 2578230 - DNA, 25 bp, Homo sapien
gtaatccccggtgctcacatctgag

SEQ ID NO: 2578231 - DNA, 25 bp, Homo sapien
tgtgctctcatccttgcagaagcgg

SEQ ID NO: 2578232 - DNA, 25 bp, Homo sapien
tttctgagtcgtgaacaaaggaccg

SEQ ID NO: 2578233 - DNA, 25 bp, Homo sapien
aacgaatgtgaatctgaaagtcctg

SEQ ID NO: 2578234 - DNA, 25 bp, Homo sapien
tcagcctgacctcattggaactgcc

SEQ ID NO: 2578235 - DNA, 25 bp, Homo sapien
ctggaaaatccgtagcaagtggctg

SEQ ID NO: 2578236 - DNA, 25 bp, Homo sapien
caagtggctgggctagaagagcttc

SEQ ID NO: 2578237 - DNA, 25 bp, Homo sapien
tcttgccctggaagtgagcgcagct

SEQ ID NO: 2578238 - DNA, 25 bp, Homo sapien
ctgggccccgttcttgaggacagat

SEQ ID NO: 2578239 - DNA, 25 bp, Homo sapien
ttcttgaggacagatctccctgcac

SEQ ID NO: 2578240 - DNA, 25 bp, Homo sapien
atcggtgcccggacagagcattcct

SEQ ID NO: 2578241 - DNA, 25 bp, Homo sapien
actgagcactgaccacaatcggtgc

SEQ ID NO: 2578242 - DNA, 25 bp, Homo sapien
attcctgtgtatcttctcctgaggg

SEQ ID NO: 2578243 - DNA, 25 bp, Homo sapien
cctgtgtatcttctcctgagggctc

SEQ ID NO: 2578244 - DNA, 25 bp, Homo sapien
aaattcctgtgtatcttctcctgag

SEQ ID NO: 2578245 - DNA, 25 bp, Homo sapien
ctaaaattcctgtgtatcttctcct

SEQ ID NO: 2578246 - DNA, 25 bp, Homo sapien
caatctataaccactaccttctggg

SEQ ID NO: 2578247 - DNA, 25 bp, Homo sapien
caagctacttggcatgtcagtaaca

SEQ ID NO: 2578248 - DNA, 25 bp, Homo sapien
tgtccttgtccaagtataggacctc

SEQ ID NO: 2578249 - DNA, 25 bp, Homo sapien
aacaaaagctgtaagctgtagccca

SEQ ID NO: 2578250 - DNA, 25 bp, Homo sapien
ggcccttcagtgctaggaacttggg

SEQ ID NO: 2578251 - DNA, 25 bp, Homo sapien
ggacgggcccttcagtgctaggaac

SEQ ID NO: 2578252 - DNA, 25 bp, Homo sapien
agctccttggagtttctcatttacc

SEQ ID NO: 2578253 - DNA, 25 bp, Homo sapien
gagtttctcatttacccaccccata

SEQ ID NO: 2578254 - DNA, 25 bp, Homo sapien
gatcttactcgttctgttcacgaaa

SEQ ID NO: 2578255 - DNA, 25 bp, Homo sapien
tgttcacgaaacacttaatcatgcg

SEQ ID NO: 2578256 - DNA, 25 bp, Homo sapien
tcacgtgttcacatactgtcgagtt

SEQ ID NO: 2578257 - DNA, 25 bp, Homo sapien
cacatactgtcgagtttccttgatc

SEQ ID NO: 2578258 - DNA, 25 bp, Homo sapien
gcaaggtgacaacccctctgagggt

SEQ ID NO: 2578259 - DNA, 25 bp, Homo sapien
tgtctgcaaggtgacaacccctctg

SEQ ID NO: 2578260 - DNA, 25 bp, Homo sapien
aggatctgtctgcaaggtgacaacc

SEQ ID NO: 2578261 - DNA, 25 bp, Homo sapien
aggtgacaacccctctgagggtcgg

SEQ ID NO: 2578262 - DNA, 25 bp, Homo sapien
ctggtcggaaggagagcagcatttg

SEQ ID NO: 2578263 - DNA, 25 bp, Homo sapien
gagcagcatttgttcgccatcttca

SEQ ID NO: 2578264 - DNA, 25 bp, Homo sapien
gtcggaaggagagcagcatttgttc

SEQ ID NO: 2578265 - DNA, 25 bp, Homo sapien
gaaggagagcagcatttgttcgcca

SEQ ID NO: 2578266 - DNA, 25 bp, Homo sapien
cctgggctgtgtaaaaccggaggat

SEQ ID NO: 2578267 - DNA, 25 bp, Homo sapien
cagccagtcggtgccatcctgggct

SEQ ID NO: 2578268 - DNA, 25 bp, Homo sapien
gaagtgtcagctccctgatgttggc

SEQ ID NO: 2578269 - DNA, 25 bp, Homo sapien
agggcgagcacctcgaacgcattcc

SEQ ID NO: 2578270 - DNA, 25 bp, Homo sapien
tggtgcgacatatacaaagcaaggc

SEQ ID NO: 2578271 - DNA, 25 bp, Homo sapien
cctgatggcgatgaacaaggtactc

SEQ ID NO: 2578272 - DNA, 25 bp, Homo sapien
ctcaggatccatcgcttcccgtggg

SEQ ID NO: 2578273 - DNA, 25 bp, Homo sapien
tggttaataaacagctgggtcaagt

SEQ ID NO: 2578274 - DNA, 25 bp, Homo sapien
cagtgaacacctcgataaacagtca

SEQ ID NO: 2578275 - DNA, 25 bp, Homo sapien
agtgaacacctcgataaacagtcat

SEQ ID NO: 2578276 - DNA, 25 bp, Homo sapien
catgctgaggccagtgagtggggca

SEQ ID NO: 2578277 - DNA, 25 bp, Homo sapien
ccatgctgaggccagtgagtggggc

SEQ ID NO: 2578278 - DNA, 25 bp, Homo sapien
tgctgaggccagtgagtggggcact

SEQ ID NO: 2578279 - DNA, 25 bp, Homo sapien
gcaggaggccccatccgtgcaggcc

SEQ ID NO: 2578280 - DNA, 25 bp, Homo sapien
acccaacaccaaagtcggctcctgt

SEQ ID NO: 2578281 - DNA, 25 bp, Homo sapien
ctaagtaacgtgagaaaatgttgag

SEQ ID NO: 2578282 - DNA, 25 bp, Homo sapien
tgacaacgaacggagcaacagaagc

SEQ ID NO: 2578283 - DNA, 25 bp, Homo sapien
ggacacagcagtaatttctaagtaa

SEQ ID NO: 2578284 - DNA, 25 bp, Homo sapien
tgtcctccacccatccgtggcctcg

SEQ ID NO: 2578285 - DNA, 25 bp, Homo sapien
gctggacaggctgttagtcctatag

SEQ ID NO: 2578286 - DNA, 25 bp, Homo sapien
gacaggctgttagtcctataggaat

SEQ ID NO: 2578287 - DNA, 25 bp, Homo sapien
gctgttagtcctataggaatccttc

SEQ ID NO: 2578288 - DNA, 25 bp, Homo sapien
aatgatttcttagtccagacggtgc

SEQ ID NO: 2578289 - DNA, 25 bp, Homo sapien
tacacggctggtgttaatgggcctc

SEQ ID NO: 2578290 - DNA, 25 bp, Homo sapien
gaaagacctggtgtcactcaagagc

SEQ ID NO: 2578291 - DNA, 25 bp, Homo sapien
tgtgctaagctgcacacaccgtggg

SEQ ID NO: 2578292 - DNA, 25 bp, Homo sapien
ggcaggacagggagacgccctccat

SEQ ID NO: 2578293 - DNA, 25 bp, Homo sapien
caggcaggacagggagacgccctcc

SEQ ID NO: 2578294 - DNA, 25 bp, Homo sapien
cactttcctctacagcggtccagca

SEQ ID NO: 2578295 - DNA, 25 bp, Homo sapien
ctttcctctacagcggtccagcacc

SEQ ID NO: 2578296 - DNA, 25 bp, Homo sapien
ctctacagcgatccagcacctccag

SEQ ID NO: 2578297 - DNA, 25 bp, Homo sapien
ttcctctacagcgatccagcacctc

SEQ ID NO: 2578298 - DNA, 25 bp, Homo sapien
aggcaggacagggagacgccctcca

SEQ ID NO: 2578299 - DNA, 25 bp, Homo sapien
ggcaggacagggagacgccctccat

SEQ ID NO: 2578300 - DNA, 25 bp, Homo sapien
caaagtgatgagaagcacggcacgc

SEQ ID NO: 2578301 - DNA, 25 bp, Homo sapien
aaatccaggacgcaaaggctttcgg

SEQ ID NO: 2578302 - DNA, 25 bp, Homo sapien
gcaaagggcgcgcagcaaatccagg

SEQ ID NO: 2578303 - DNA, 25 bp, Homo sapien
gctcatctgcatcgtcaccaggttc

SEQ ID NO: 2578304 - DNA, 25 bp, Homo sapien
cataaaaatctaaatatgaacagga

SEQ ID NO: 2578305 - DNA, 25 bp, Homo sapien
actgatctgaccctcttgcagggcc

SEQ ID NO: 2578306 - DNA, 25 bp, Homo sapien
attttccagcagcgagtactgctcc

SEQ ID NO: 2578307 - DNA, 25 bp, Homo sapien
tttccagcagcgagtactgctccat

SEQ ID NO: 2578308 - DNA, 25 bp, Homo sapien
ctgctctcactgatctgaccctctt

SEQ ID NO: 2578309 - DNA, 25 bp, Homo sapien
tgagtgacagccgtcatcgatctcc

SEQ ID NO: 2578310 - DNA, 25 bp, Homo sapien
agagcgcctcactcgggatcagtgg

SEQ ID NO: 2578311 - DNA, 25 bp, Homo sapien
catcccaatctgtgtctgcgcaggg

SEQ ID NO: 2578312 - DNA, 25 bp, Homo sapien
cagtggtcccatcacagaccaggta

SEQ ID NO: 2578313 - DNA, 25 bp, Homo sapien
atgagttgcattttctacatgtatg

SEQ ID NO: 2578314 - DNA, 25 bp, Homo sapien
tcatgagttgcattttctacatgta

SEQ ID NO: 2578315 - DNA, 25 bp, Homo sapien
cttcatgagttgcattttctacatg

SEQ ID NO: 2578316 - DNA, 25 bp, Homo sapien
catgagttgcattttctacatgtat

SEQ ID NO: 2578317 - DNA, 25 bp, Homo sapien
gatgaccgactcatcacgaagggcc

SEQ ID NO: 2578318 - DNA, 25 bp, Homo sapien
ccagtgatgaccgactcatcacgaa

SEQ ID NO: 2578319 - DNA, 25 bp, Homo sapien
agtgatgaccgactcatcacgaagg

SEQ ID NO: 2578320 - DNA, 25 bp, Homo sapien
tgatgaccgactcatcacgaagggc

SEQ ID NO: 2578321 - DNA, 25 bp, Homo sapien
gaggaggtacagacagaaccctcgg

SEQ ID NO: 2578322 - DNA, 25 bp, Homo sapien
agacagaaccctcggcggcatctgc

SEQ ID NO: 2578323 - DNA, 25 bp, Homo sapien
ctgatgccgcgtgcccagcgtggga

SEQ ID NO: 2578324 - DNA, 25 bp, Homo sapien
gtacagacagaaccctcggcggcat

SEQ ID NO: 2578325 - DNA, 25 bp, Homo sapien
taaagtaagccgcagaaaagcagtg

SEQ ID NO: 2578326 - DNA, 25 bp, Homo sapien
caggaaacattgacgggcggctctt

SEQ ID NO: 2578327 - DNA, 25 bp, Homo sapien
gaattgcgcatccttgtgtccggtc

SEQ ID NO: 2578328 - DNA, 25 bp, Homo sapien
gaattctttgcacatcgttgaccgg

SEQ ID NO: 2578329 - DNA, 25 bp, Homo sapien
ttagggcttgaaggtagcactggcc

SEQ ID NO: 2578330 - DNA, 25 bp, Homo sapien
taagcgagggcactttgctgcattc

SEQ ID NO: 2578331 - DNA, 25 bp, Homo sapien
tgcattctgtggcaccaaacaccgc

SEQ ID NO: 2578332 - DNA, 25 bp, Homo sapien
tctgctcatactggtgccgctatta

SEQ ID NO: 2578333 - DNA, 25 bp, Homo sapien
gcggggggccctcgtggtcatggac

SEQ ID NO: 2578334 - DNA, 25 bp, Homo sapien
gggccctcgtggtcatggactgtga

SEQ ID NO: 2578335 - DNA, 25 bp, Homo sapien
cctcgtggtcatggactgtgaatta

SEQ ID NO: 2578336 - DNA, 25 bp, Homo sapien
gccctcgtggtcatggactgtgaat

SEQ ID NO: 2578337 - DNA, 25 bp, Homo sapien
tcacctggatgaaaagcgaagtccc

SEQ ID NO: 2578338 - DNA, 25 bp, Homo sapien
gaagaaaaggccgatgctgaagccg

SEQ ID NO: 2578339 - DNA, 25 bp, Homo sapien
gcagataaccattccaccttgtggg

SEQ ID NO: 2578340 - DNA, 25 bp, Homo sapien
tgtgcatccctggagtaaacgcaga

SEQ ID NO: 2578341 - DNA, 25 bp, Homo sapien
ggtcgacagcgtggggcgccagaca

SEQ ID NO: 2578342 - DNA, 25 bp, Homo sapien
tggtcgacagcgtggggcgccagac

SEQ ID NO: 2578343 - DNA, 25 bp, Homo sapien
ctggtcgacagcgtggggcgccaga

SEQ ID NO: 2578344 - DNA, 25 bp, Homo sapien
ggctcgtgatggctccacggcaaga

SEQ ID NO: 2578345 - DNA, 25 bp, Homo sapien
tgcatggacgtgcacagcattcctg

SEQ ID NO: 2578346 - DNA, 25 bp, Homo sapien
tcagggagtccctggacatcgtgct

SEQ ID NO: 2578347 - DNA, 25 bp, Homo sapien
tcccatccatagggaggccttcagg

SEQ ID NO: 2578348 - DNA, 25 bp, Homo sapien
gtgatatgagcccagcaccgcaatg

SEQ ID NO: 2578349 - DNA, 25 bp, Homo sapien
tggtacggcgcatcctgtagacatg

SEQ ID NO: 2578350 - DNA, 25 bp, Homo sapien
tgcctagcagcacacactcaggtgg

SEQ ID NO: 2578351 - DNA, 25 bp, Homo sapien
gcatttcaaagttaccttggccggc

SEQ ID NO: 2578352 - DNA, 25 bp, Homo sapien
ggcagaactgaagcctagaagccgc

SEQ ID NO: 2578353 - DNA, 25 bp, Homo sapien
cacagacggcagaactgaagcctag

SEQ ID NO: 2578354 - DNA, 25 bp, Homo sapien
ccacagacggcagaactgaagccta

SEQ ID NO: 2578355 - DNA, 25 bp, Homo sapien
cccacagacggcagaactgaagcct

SEQ ID NO: 2578356 - DNA, 25 bp, Homo sapien
taacagagcgccctggaacacactc

SEQ ID NO: 2578357 - DNA, 25 bp, Homo sapien
ttagactcatagcatgacttctgct

SEQ ID NO: 2578358 - DNA, 25 bp, Homo sapien
cccccgccagaggtttgagtagtgg

SEQ ID NO: 2578359 - DNA, 25 bp, Homo sapien
agacggcagaactaacagagcgccc

SEQ ID NO: 2578360 - DNA, 25 bp, Homo sapien
agatgcagatgcttttgcaaccctg

SEQ ID NO: 2578361 - DNA, 25 bp, Homo sapien
gcagatgcttttgcaaccctggaaa

SEQ ID NO: 2578362 - DNA, 25 bp, Homo sapien
gcttttgcaaccctggaaatgctga

SEQ ID NO: 2578363 - DNA, 25 bp, Homo sapien
gatgcttttgcaaccctggaaatgc

SEQ ID NO: 2578364 - DNA, 25 bp, Homo sapien
agaaggcctttccgggcaccctgca

SEQ ID NO: 2578365 - DNA, 25 bp, Homo sapien
caggaccagaaggcctttccgggca

SEQ ID NO: 2578366 - DNA, 25 bp, Homo sapien
atttcctccaatgtcagtgccagct

SEQ ID NO: 2578367 - DNA, 25 bp, Homo sapien
tactcttctcctaaggagaggatgc

SEQ ID NO: 2578368 - DNA, 25 bp, Homo sapien
cagagagcaaagagctgggtgtgct

SEQ ID NO: 2578369 - DNA, 25 bp, Homo sapien
caaagagctgggtgtgctggggcag

SEQ ID NO: 2578370 - DNA, 25 bp, Homo sapien
agagcaaagagctgggtgtgctggg

SEQ ID NO: 2578371 - DNA, 25 bp, Homo sapien
ctgcagagagcaaagagctgggtgt

SEQ ID NO: 2578372 - DNA, 25 bp, Homo sapien
cagaaagcccaggtctgttttctca

SEQ ID NO: 2578373 - DNA, 25 bp, Homo sapien
ggtctgttttctcacggcgcccctg

SEQ ID NO: 2578374 - DNA, 25 bp, Homo sapien
aagacacttcatgccacccttctga

SEQ ID NO: 2578375 - DNA, 25 bp, Homo sapien
cagacagatgctcggattccaggtg

SEQ ID NO: 2578376 - DNA, 25 bp, Homo sapien
tccttcaccttcccagacgggcttc

SEQ ID NO: 2578377 - DNA, 25 bp, Homo sapien
tttcgttgttggactcttgcggggc

SEQ ID NO: 2578378 - DNA, 25 bp, Homo sapien
ttcgttgttggactcttgcggggct

SEQ ID NO: 2578379 - DNA, 25 bp, Homo sapien
ccgacgaggcctcaccacttttcca

SEQ ID NO: 2578380 - DNA, 25 bp, Homo sapien
cagacccgacgaggcctcaccactt

SEQ ID NO: 2578381 - DNA, 25 bp, Homo sapien
gagagccgcagacccgacgaggcct

SEQ ID NO: 2578382 - DNA, 25 bp, Homo sapien
ctgtcgagagccgcagacccgacga

SEQ ID NO: 2578383 - DNA, 25 bp, Homo sapien
cttgagttctgtgttccaggtgcct

SEQ ID NO: 2578384 - DNA, 25 bp, Homo sapien
gttgaaatgtgttggacttgagttc

SEQ ID NO: 2578385 - DNA, 25 bp, Homo sapien
gcctctgtgacgcttcattctcctt

SEQ ID NO: 2578386 - DNA, 25 bp, Homo sapien
ctctgcctctgtgacgcttcattct

SEQ ID NO: 2578387 - DNA, 25 bp, Homo sapien
acccgaggtatgagaagcgctggct

SEQ ID NO: 2578388 - DNA, 25 bp, Homo sapien
gctggacaccttgtccgtgcctctg

SEQ ID NO: 2578389 - DNA, 25 bp, Homo sapien
tggctggacaccttgtccgtgcctc

SEQ ID NO: 2578390 - DNA, 25 bp, Homo sapien
ccatagctaaggacccgaggtatga

SEQ ID NO: 2578391 - DNA, 25 bp, Homo sapien
tgttcagcctcggaacacaagtgtt

SEQ ID NO: 2578392 - DNA, 25 bp, Homo sapien
gatttctgacacgttataagctcaa

SEQ ID NO: 2578393 - DNA, 25 bp, Homo sapien
tacaacccagtcgagcatagctttt

SEQ ID NO: 2578394 - DNA, 25 bp, Homo sapien
caataatcttacagcgcctcagcaa

SEQ ID NO: 2578395 - DNA, 25 bp, Homo sapien
aacttcatggcgctttgtttcatga

SEQ ID NO: 2578396 - DNA, 25 bp, Homo sapien
ttcttctggattgaaatcctcagcc

SEQ ID NO: 2578397 - DNA, 25 bp, Homo sapien
gaatctggtccagtttagtccctat

SEQ ID NO: 2578398 - DNA, 25 bp, Homo sapien
caggaaagcagtcctagttaaaact

SEQ ID NO: 2578399 - DNA, 25 bp, Homo sapien
ccgataataatacaagcatgcatta

SEQ ID NO: 2578400 - DNA, 25 bp, Homo sapien
gataataatacaagcatgcattagt

SEQ ID NO: 2578401 - DNA, 25 bp, Homo sapien
taataatacaagcatgcattagtga

SEQ ID NO: 2578402 - DNA, 25 bp, Homo sapien
aataatacaagcatgcattagtgaa

SEQ ID NO: 2578403 - DNA, 25 bp, Homo sapien
ttttttacgcgctcagttctcattg

SEQ ID NO: 2578404 - DNA, 25 bp, Homo sapien
tgagctagttatctcatcaagggac

SEQ ID NO: 2578405 - DNA, 25 bp, Homo sapien
tttcttagcttttttacgcgctcag

SEQ ID NO: 2578406 - DNA, 25 bp, Homo sapien
agttctcattgagctagttatctca

SEQ ID NO: 2578407 - DNA, 25 bp, Homo sapien
tggaagaacctgcagctaagtaccg

SEQ ID NO: 2578408 - DNA, 25 bp, Homo sapien
cttatcaaaaaacctactgagcttg

SEQ ID NO: 2578409 - DNA, 25 bp, Homo sapien
gcttgacagcattggaagaacctgc

SEQ ID NO: 2578410 - DNA, 25 bp, Homo sapien
ctaagtaccgtggatttgtgcagtc

SEQ ID NO: 2578411 - DNA, 25 bp, Homo sapien
cacatccctatagtaagtggtgaca

SEQ ID NO: 2578412 - DNA, 25 bp, Homo sapien
tgttcaagcagcagatgtatctgca

SEQ ID NO: 2578413 - DNA, 25 bp, Homo sapien
tatgcaattcttagagtatgacagc

SEQ ID NO: 2578414 - DNA, 25 bp, Homo sapien
taagtttcctagcagtcagtcccaa

SEQ ID NO: 2578415 - DNA, 25 bp, Homo sapien
tgattaccttctcttaaaaagtatc

SEQ ID NO: 2578416 - DNA, 25 bp, Homo sapien
ctgattaccttctcttaaaaagtat

SEQ ID NO: 2578417 - DNA, 25 bp, Homo sapien
ttaaaaagtatctcttctctatgac

SEQ ID NO: 2578418 - DNA, 25 bp, Homo sapien
ctcttaaaaagtatctcttctctat

SEQ ID NO: 2578419 - DNA, 25 bp, Homo sapien
tgtatttaacaggatagaaggaaat

SEQ ID NO: 2578420 - DNA, 25 bp, Homo sapien
atcagttgcttgtgcctataaaggg

SEQ ID NO: 2578421 - DNA, 25 bp, Homo sapien
cttattcctagattatatttgtttc

SEQ ID NO: 2578422 - DNA, 25 bp, Homo sapien
ttgcttgtgcctataaagggctttc

SEQ ID NO: 2578423 - DNA, 25 bp, Homo sapien
tcctgccccaaatcttttccgatca

SEQ ID NO: 2578424 - DNA, 25 bp, Homo sapien
cctgccccaaatcttttccgatcag

SEQ ID NO: 2578425 - DNA, 25 bp, Homo sapien
ctgccccaaatcttttccgatcagg

SEQ ID NO: 2578426 - DNA, 25 bp, Homo sapien
tgccccaaatcttttccgatcagga

SEQ ID NO: 2578427 - DNA, 25 bp, Homo sapien
gctaagggacatttcaggagttgac

SEQ ID NO: 2578428 - DNA, 25 bp, Homo sapien
tcagggctggttaacaagaccgttc

SEQ ID NO: 2578429 - DNA, 25 bp, Homo sapien
tatacacagggacagaaaggtaagg

SEQ ID NO: 2578430 - DNA, 25 bp, Homo sapien
gcagcaaccttaagagtgagggagc

SEQ ID NO: 2578431 - DNA, 25 bp, Homo sapien
caaggaatcaagcttggctgcagaa

SEQ ID NO: 2578432 - DNA, 25 bp, Homo sapien
cctggagtcatcagcaatagtttac

SEQ ID NO: 2578433 - DNA, 25 bp, Homo sapien
catatgtaaagagatggagtcccac

SEQ ID NO: 2578434 - DNA, 25 bp, Homo sapien
caagaagtcctagcaaaaattgtgc

SEQ ID NO: 2578435 - DNA, 25 bp, Homo sapien
ggtatgagaaaccttgcttctgcag

SEQ ID NO: 2578436 - DNA, 25 bp, Homo sapien
caacgttaagatggagagaccagcc

SEQ ID NO: 2578437 - DNA, 25 bp, Homo sapien
tacttcagggaacagtcacttaggg

SEQ ID NO: 2578438 - DNA, 25 bp, Homo sapien
tatgcagaagtataatcagaggaca

SEQ ID NO: 2578439 - DNA, 25 bp, Homo sapien
tatacttgatggtactgagcgaggt

SEQ ID NO: 2578440 - DNA, 25 bp, Homo sapien
gactccaggacagatgtctccgaga

SEQ ID NO: 2578441 - DNA, 25 bp, Homo sapien
tgagccaagtcccatagagtaagag

SEQ ID NO: 2578442 - DNA, 25 bp, Homo sapien
aaaacggagttaggcatcagaggac

SEQ ID NO: 2578443 - DNA, 25 bp, Homo sapien
cccaggcccagaggatataaagcca

SEQ ID NO: 2578444 - DNA, 25 bp, Homo sapien
ggatattccggttcccactgcttca

SEQ ID NO: 2578445 - DNA, 25 bp, Homo sapien
cagtgcgtcactcaaactagctgaa

SEQ ID NO: 2578446 - DNA, 25 bp, Homo sapien
tatgtgtggtgacttcaggaaaccc

SEQ ID NO: 2578447 - DNA, 25 bp, Homo sapien
cagttagagggcattagggcacttc

SEQ ID NO: 2578448 - DNA, 25 bp, Homo sapien
caccgcctgggtatctcagtttggc

SEQ ID NO: 2578449 - DNA, 25 bp, Homo sapien
aagactcagtttaggtacaggctcc

SEQ ID NO: 2578450 - DNA, 25 bp, Homo sapien
caaagtcttttactccggtgtggag

SEQ ID NO: 2578451 - DNA, 25 bp, Homo sapien
ctcagtggcgtggagatgtaacaag

SEQ ID NO: 2578452 - DNA, 25 bp, Homo sapien
gagtgatgatcaggccaacaacagt

SEQ ID NO: 2578453 - DNA, 25 bp, Homo sapien
ctgatactcagtggcgtggagatgt

SEQ ID NO: 2578454 - DNA, 25 bp, Homo sapien
tggatgtgtgagtgatgatcaggcc

SEQ ID NO: 2578455 - DNA, 25 bp, Homo sapien
gcagcgaggatcctctgaagaacac

SEQ ID NO: 2578456 - DNA, 25 bp, Homo sapien
tgggcagcgaggatcctctgaagaa

SEQ ID NO: 2578457 - DNA, 25 bp, Homo sapien
agcgaggatcctctgaagaacactc

SEQ ID NO: 2578458 - DNA, 25 bp, Homo sapien
cctgggcagcgaggatcctctgaag

SEQ ID NO: 2578459 - DNA, 25 bp, Homo sapien
gatggggatgctctgggcgactgca

SEQ ID NO: 2578460 - DNA, 25 bp, Homo sapien
ccaaccaactcagtagggggatggg

SEQ ID NO: 2578461 - DNA, 25 bp, Homo sapien
ggggatggggatgctctgggcgact

SEQ ID NO: 2578462 - DNA, 25 bp, Homo sapien
ggatggggatgctctgggcgactgc

SEQ ID NO: 2578463 - DNA, 25 bp, Homo sapien
attggtgctccgtggacaagtgaaa

SEQ ID NO: 2578464 - DNA, 25 bp, Homo sapien
tccgtggacaagtgaaagccgatcc

SEQ ID NO: 2578465 - DNA, 25 bp, Homo sapien
gaaagccgatcctgagagctgctca

SEQ ID NO: 2578466 - DNA, 25 bp, Homo sapien
gctgctcagcatagagattgtaggg

SEQ ID NO: 2578467 - DNA, 25 bp, Homo sapien
aactccccaggcagtactacattgc

SEQ ID NO: 2578468 - DNA, 25 bp, Homo sapien
cctgctggctgaagatattgctgaa

SEQ ID NO: 2578469 - DNA, 25 bp, Homo sapien
ttctgattcagggaacagtgccagc

SEQ ID NO: 2578470 - DNA, 25 bp, Homo sapien
ttcagcctgctggaacaaagctcag

SEQ ID NO: 2578471 - DNA, 25 bp, Homo sapien
ggacaacggaagaccagacctgaat

SEQ ID NO: 2578472 - DNA, 25 bp, Homo sapien
gggtactgccctgacaaaatacaga

SEQ ID NO: 2578473 - DNA, 25 bp, Homo sapien
tgatgacgtgacctcagaccttggt

SEQ ID NO: 2578474 - DNA, 25 bp, Homo sapien
gaagctcactaagagggacccaagt

SEQ ID NO: 2578475 - DNA, 25 bp, Homo sapien
agtgacttggccttcgtcaatggat

SEQ ID NO: 2578476 - DNA, 25 bp, Homo sapien
cttcatcccagttgtgagtgacttg

SEQ ID NO: 2578477 - DNA, 25 bp, Homo sapien
taggatcaggatcaacttcatccca

SEQ ID NO: 2578478 - DNA, 25 bp, Homo sapien
tcaaagggcttgtgagaaactgaag

SEQ ID NO: 2578479 - DNA, 25 bp, Homo sapien
ggctttgggtatatgataagcttca

SEQ ID NO: 2578480 - DNA, 25 bp, Homo sapien
tcaaggctttgggtatatgataagc

SEQ ID NO: 2578481 - DNA, 25 bp, Homo sapien
ctttgggtatatgataagcttcaat

SEQ ID NO: 2578482 - DNA, 25 bp, Homo sapien
gcttcaattcacaggaccaggttac

SEQ ID NO: 2578483 - DNA, 25 bp, Homo sapien
ttccaatgaccatggtattctattt

SEQ ID NO: 2578484 - DNA, 25 bp, Homo sapien
ttttccaatgaccatggtattctat

SEQ ID NO: 2578485 - DNA, 25 bp, Homo sapien
tctattttttccaatgaccatggta

SEQ ID NO: 2578486 - DNA, 25 bp, Homo sapien
ttttttccaatgaccatggtattct

SEQ ID NO: 2578487 - DNA, 25 bp, Homo sapien
cctcaggtcttcaaattcccagaga

SEQ ID NO: 2578488 - DNA, 25 bp, Homo sapien
tggtgaagctgatgaagtattggat

SEQ ID NO: 2578489 - DNA, 25 bp, Homo sapien
cttcaaattcccagagatgactaat

SEQ ID NO: 2578490 - DNA, 25 bp, Homo sapien
gactaatgtggatagttggtgaagc

SEQ ID NO: 2578491 - DNA, 25 bp, Homo sapien
aataggaagagtccatggagtgcat

SEQ ID NO: 2578492 - DNA, 25 bp, Homo sapien
actgtctctgttcccgttttctctg

SEQ ID NO: 2578493 - DNA, 25 bp, Homo sapien
ttttgctactgtctctgttcccgtt

SEQ ID NO: 2578494 - DNA, 25 bp, Homo sapien
gctactgtctctgttcccgttttct

SEQ ID NO: 2578495 - DNA, 25 bp, Homo sapien
caccaaatgacagagatagtatagg

SEQ ID NO: 2578496 - DNA, 25 bp, Homo sapien
ttctctaatgcaaaaaatgatcccc

SEQ ID NO: 2578497 - DNA, 25 bp, Homo sapien
gcaacgaccttgacgaaccttctct

SEQ ID NO: 2578498 - DNA, 25 bp, Homo sapien
cacaatccggaagaagcaacgacct

SEQ ID NO: 2578499 - DNA, 25 bp, Homo sapien
cctctgtgaggctctacttgtgatt

SEQ ID NO: 2578500 - DNA, 25 bp, Homo sapien
attacttcacaagggtaaaccatag

SEQ ID NO: 2578501 - DNA, 25 bp, Homo sapien
accatagaccttctaaataaatagc

SEQ ID NO: 2578502 - DNA, 25 bp, Homo sapien
aaaggacagctaccccctctgtgag

SEQ ID NO: 2578503 - DNA, 25 bp, Homo sapien
aaagtctactttcttctgagatgct

SEQ ID NO: 2578504 - DNA, 25 bp, Homo sapien
aagtctactttcttctgagatgctt

SEQ ID NO: 2578505 - DNA, 25 bp, Homo sapien
tagttcatgaataccctctggtgtc

SEQ ID NO: 2578506 - DNA, 25 bp, Homo sapien
tctgtaagtaagacatccctccgcc

SEQ ID NO: 2578507 - DNA, 25 bp, Homo sapien
ttcaggctgcaaatggttggctcac

SEQ ID NO: 2578508 - DNA, 25 bp, Homo sapien
ccccaaagcatacgcaggtggtttt

SEQ ID NO: 2578509 - DNA, 25 bp, Homo sapien
tgaattgacgccattctagcccaag

SEQ ID NO: 2578510 - DNA, 25 bp, Homo sapien
aacaatttatcctatggctcggcac

SEQ ID NO: 2578511 - DNA, 25 bp, Homo sapien
tgtgtgaccagatgatccatagtgc

SEQ ID NO: 2578512 - DNA, 25 bp, Homo sapien
aaaccacagcagtattagaggtgcc

SEQ ID NO: 2578513 - DNA, 25 bp, Homo sapien
agagtatcagttcattacttggtat

SEQ ID NO: 2578514 - DNA, 25 bp, Homo sapien
gaagagattctgttggaggtaccat

SEQ ID NO: 2578515 - DNA, 25 bp, Homo sapien
tttgatgcttgacatcaactggaag

SEQ ID NO: 2578516 - DNA, 25 bp, Homo sapien
cagttcattacttggtattttatca

SEQ ID NO: 2578517 - DNA, 25 bp, Homo sapien
ggtttaccctagtctccagccatgg

SEQ ID NO: 2578518 - DNA, 25 bp, Homo sapien
cagcctctaaggagcctgaatttac

SEQ ID NO: 2578519 - DNA, 25 bp, Homo sapien
taatgtgaacggtgcccaagaggca

SEQ ID NO: 2578520 - DNA, 25 bp, Homo sapien
tgggacgtttggaatccaggcagcc

SEQ ID NO: 2578521 - DNA, 25 bp, Homo sapien
ccagctccacacaaggtatgcaggc

SEQ ID NO: 2578522 - DNA, 25 bp, Homo sapien
agactttatgtctccagctccacac

SEQ ID NO: 2578523 - DNA, 25 bp, Homo sapien
tgttagactttatgtctccagctcc

SEQ ID NO: 2578524 - DNA, 25 bp, Homo sapien
cagctccacacaaggtatgcaggcc

SEQ ID NO: 2578525 - DNA, 25 bp, Homo sapien
aggaaaatgtggatagcaagcccat

SEQ ID NO: 2578526 - DNA, 25 bp, Homo sapien
ctgttctccatggaggtattgcaga

SEQ ID NO: 2578527 - DNA, 25 bp, Homo sapien
agaggaaaatgtggatagcaagccc

SEQ ID NO: 2578528 - DNA, 25 bp, Homo sapien
ctccatggaggtattgcagaggaaa

SEQ ID NO: 2578529 - DNA, 25 bp, Homo sapien
tcaagaagtccccatctgaattgta

SEQ ID NO: 2578530 - DNA, 25 bp, Homo sapien
agaagtccccatctgaattgtaaaa

SEQ ID NO: 2578531 - DNA, 25 bp, Homo sapien
agtccccatctgaattgtaaaagca

SEQ ID NO: 2578532 - DNA, 25 bp, Homo sapien
caatcaagaagtccccatctgaatt

SEQ ID NO: 2578533 - DNA, 25 bp, Homo sapien
gaatgacgcagatctcattgggctg

SEQ ID NO: 2578534 - DNA, 25 bp, Homo sapien
catcttgccaaactcggtgtaaatg

SEQ ID NO: 2578535 - DNA, 25 bp, Homo sapien
ctgaatgacgcagatctcattgggc

SEQ ID NO: 2578536 - DNA, 25 bp, Homo sapien
ccaaactcggtgtaaatgagaaggt

SEQ ID NO: 2578537 - DNA, 25 bp, Homo sapien
catagacctccaagatgtagcccct

SEQ ID NO: 2578538 - DNA, 25 bp, Homo sapien
caattggtccaaggtcaggtaactc

SEQ ID NO: 2578539 - DNA, 25 bp, Homo sapien
tcaaagtggacaccatagacctcca

SEQ ID NO: 2578540 - DNA, 25 bp, Homo sapien
gacatctatgctgaaccgcattcct

SEQ ID NO: 2578541 - DNA, 25 bp, Homo sapien
aggcttagaggcttgtaatgaagat

SEQ ID NO: 2578542 - DNA, 25 bp, Homo sapien
cttagaggcttgtaatgaagattta

SEQ ID NO: 2578543 - DNA, 25 bp, Homo sapien
gcttagaggcttgtaatgaagattt

SEQ ID NO: 2578544 - DNA, 25 bp, Homo sapien
ggcttagaggcttgtaatgaagatt

SEQ ID NO: 2578545 - DNA, 25 bp, Homo sapien
gttacacgctgttgcctaaggcatg

SEQ ID NO: 2578546 - DNA, 25 bp, Homo sapien
tccccggctggttagcaaattatag

SEQ ID NO: 2578547 - DNA, 25 bp, Homo sapien
aggtgaacaggatgacagacggccc

SEQ ID NO: 2578548 - DNA, 25 bp, Homo sapien
gaacctggaggctatgctgactata

SEQ ID NO: 2578549 - DNA, 25 bp, Homo sapien
tgtcaagagctactccacaaattgc

SEQ ID NO: 2578550 - DNA, 25 bp, Homo sapien
tttcattgctcaaagattcactgca

SEQ ID NO: 2578551 - DNA, 25 bp, Homo sapien
ctttctttcatgtcaagagctactc

SEQ ID NO: 2578552 - DNA, 25 bp, Homo sapien
ccatggttgcatgaagagaaaggct

SEQ ID NO: 2578553 - DNA, 25 bp, Homo sapien
taatgaccgtgtaaccacctggtac

SEQ ID NO: 2578554 - DNA, 25 bp, Homo sapien
gaaatcacgaggattggccaagcca

SEQ ID NO: 2578555 - DNA, 25 bp, Homo sapien
tggcagcaaacagcttgccctggta

SEQ ID NO: 2578556 - DNA, 25 bp, Homo sapien
gtacttggcgatcctcataccaggc

SEQ ID NO: 2578557 - DNA, 25 bp, Homo sapien
aaagtttgtaacactcgccttggca

SEQ ID NO: 2578558 - DNA, 25 bp, Homo sapien
tgtaacactcgccttggcaatcagt

SEQ ID NO: 2578559 - DNA, 25 bp, Homo sapien
ccttggcaatcagtaagtgctcaat

SEQ ID NO: 2578560 - DNA, 25 bp, Homo sapien
tcgccttggcaatcagtaagtgctc

SEQ ID NO: 2578561 - DNA, 25 bp, Homo sapien
tatagagtccatattacattgttgt

SEQ ID NO: 2578562 - DNA, 25 bp, Homo sapien
caagccaagctaattaactgaattc

SEQ ID NO: 2578563 - DNA, 25 bp, Homo sapien
cagaacatattatgctgcccatata

SEQ ID NO: 2578564 - DNA, 25 bp, Homo sapien
cctttgcttgtgtcctgaattgcca

SEQ ID NO: 2578565 - DNA, 25 bp, Homo sapien
tgtcctgctataggaaggtggtccc

SEQ ID NO: 2578566 - DNA, 25 bp, Homo sapien
tatgggtccgaaagtgctaaagatt

SEQ ID NO: 2578567 - DNA, 25 bp, Homo sapien
tatctgagcctagcaatagcgggaa

SEQ ID NO: 2578568 - DNA, 25 bp, Homo sapien
taatgaaggcgctactcatagaggc

SEQ ID NO: 2578569 - DNA, 25 bp, Homo sapien
gagcaatcctaacataatacttcct

SEQ ID NO: 2578570 - DNA, 25 bp, Homo sapien
ccaggtaatttcagcctagaggagc

SEQ ID NO: 2578571 - DNA, 25 bp, Homo sapien
ctgctgtgatgcttctccaggtaat

SEQ ID NO: 2578572 - DNA, 25 bp, Homo sapien
aatagacacagtgcctgggttggtg

SEQ ID NO: 2578573 - DNA, 25 bp, Homo sapien
tgtagctgtgatcccacaatatgta

SEQ ID NO: 2578574 - DNA, 25 bp, Homo sapien
gctgtgatcccacaatatgtactga

SEQ ID NO: 2578575 - DNA, 25 bp, Homo sapien
taccatctaatgcttttgtagctgt

SEQ ID NO: 2578576 - DNA, 25 bp, Homo sapien
taatgcttttgtagctgtgatccca

SEQ ID NO: 2578577 - DNA, 25 bp, Homo sapien
caggttgtacttgtagggtgtataa

SEQ ID NO: 2578578 - DNA, 25 bp, Homo sapien
ccaggccacaacattgaacggggag

SEQ ID NO: 2578579 - DNA, 25 bp, Homo sapien
gccactgagttgataaccatgaaat

SEQ ID NO: 2578580 - DNA, 25 bp, Homo sapien
tgtataattcccgtgccaggccaca

SEQ ID NO: 2578581 - DNA, 25 bp, Homo sapien
aacggtgcctgcttctcaacctcag

SEQ ID NO: 2578582 - DNA, 25 bp, Homo sapien
cctctttgggagaatacggagattc

SEQ ID NO: 2578583 - DNA, 25 bp, Homo sapien
gtgggtctgagaaccaacggtgcct

SEQ ID NO: 2578584 - DNA, 25 bp, Homo sapien
gctaattctacctgaaagggtcaag

SEQ ID NO: 2578585 - DNA, 25 bp, Homo sapien
cagtcaatactgtgaaaatggatgg

SEQ ID NO: 2578586 - DNA, 25 bp, Homo sapien
gtcaatactgtgaaaatggatgggt

SEQ ID NO: 2578587 - DNA, 25 bp, Homo sapien
agtcaatactgtgaaaatggatggg

SEQ ID NO: 2578588 - DNA, 25 bp, Homo sapien
tcaatactgtgaaaatggatgggtc

SEQ ID NO: 2578589 - DNA, 25 bp, Homo sapien
atggccactccagggcggacagact

SEQ ID NO: 2578590 - DNA, 25 bp, Homo sapien
gcctgaaggtcttatcagcaacccc

SEQ ID NO: 2578591 - DNA, 25 bp, Homo sapien
agcaaccccccatcgaggtgggaag

SEQ ID NO: 2578592 - DNA, 25 bp, Homo sapien
aaggaggcctgaaggtcttatcagc

SEQ ID NO: 2578593 - DNA, 25 bp, Homo sapien
tgaatttagatagcagtgagcttgg

SEQ ID NO: 2578594 - DNA, 25 bp, Homo sapien
gctgaagaggtgagacccagatcat

SEQ ID NO: 2578595 - DNA, 25 bp, Homo sapien
ggtgtcaagctccttgctctagtat

SEQ ID NO: 2578596 - DNA, 25 bp, Homo sapien
tcagggtcaccttcatggcttaatt

SEQ ID NO: 2578597 - DNA, 25 bp, Homo sapien
gcttacgagccctgtatcaaagtta

SEQ ID NO: 2578598 - DNA, 25 bp, Homo sapien
tactctatcatctaagcttacgagc

SEQ ID NO: 2578599 - DNA, 25 bp, Homo sapien
ttatctcccagatcataaccctttc

SEQ ID NO: 2578600 - DNA, 25 bp, Homo sapien
tcataatagagagcgaatgtactct

SEQ ID NO: 2578601 - DNA, 25 bp, Homo sapien
tttttattatccaaggcaagaccag

SEQ ID NO: 2578602 - DNA, 25 bp, Homo sapien
cactctctgacaggaatcaggctag

SEQ ID NO: 2578603 - DNA, 25 bp, Homo sapien
ggcacagctctactccatggccatg

SEQ ID NO: 2578604 - DNA, 25 bp, Homo sapien
tatcagaggtctcgagttccactct

SEQ ID NO: 2578605 - DNA, 25 bp, Homo sapien
gggtcattgtgctgtgtagactccc

SEQ ID NO: 2578606 - DNA, 25 bp, Homo sapien
cggatgagtcccatgaactcactca

SEQ ID NO: 2578607 - DNA, 25 bp, Homo sapien
accttgctttgcctcatagtgacct

SEQ ID NO: 2578608 - DNA, 25 bp, Homo sapien
tcattgtgctgtgtagactccctcc

SEQ ID NO: 2578609 - DNA, 25 bp, Homo sapien
gtgccatcggcaatcctctcaggtg

SEQ ID NO: 2578610 - DNA, 25 bp, Homo sapien
catggtgccatcggcaatcctctca

SEQ ID NO: 2578611 - DNA, 25 bp, Homo sapien
catcggcaatcctctcaggtgccag

SEQ ID NO: 2578612 - DNA, 25 bp, Homo sapien
tctcaggtgccagcttgaccttgct

SEQ ID NO: 2578613 - DNA, 25 bp, Homo sapien
aacacatttgattagatgtcaacag

SEQ ID NO: 2578614 - DNA, 25 bp, Homo sapien
caaatcaaagatttgtgtgctagag

SEQ ID NO: 2578615 - DNA, 25 bp, Homo sapien
cagaaggtatgggtaggtgaaatct

SEQ ID NO: 2578616 - DNA, 25 bp, Homo sapien
caaagatttgtgtgctagagtggtg

SEQ ID NO: 2578617 - DNA, 25 bp, Homo sapien
ttaaagatgattcaaacataaatgc

SEQ ID NO: 2578618 - DNA, 25 bp, Homo sapien
gcacttgtggtagttctcatccaaa

SEQ ID NO: 2578619 - DNA, 25 bp, Homo sapien
cagcacttgtggtagttctcatcca

SEQ ID NO: 2578620 - DNA, 25 bp, Homo sapien
agcacttgtggtagttctcatccaa

SEQ ID NO: 2578621 - DNA, 25 bp, Homo sapien
tattgagtaattaaggtgacagcca

SEQ ID NO: 2578622 - DNA, 25 bp, Homo sapien
aatactaccagaaagcatgagattc

SEQ ID NO: 2578623 - DNA, 25 bp, Homo sapien
gaactttgcaaatgcgtttccataa

SEQ ID NO: 2578624 - DNA, 25 bp, Homo sapien
ccataaaagttctgagttacttgac

SEQ ID NO: 2578625 - DNA, 25 bp, Homo sapien
ttccctggtgaaagtgttcttatgc

SEQ ID NO: 2578626 - DNA, 25 bp, Homo sapien
agcatgggaatcaggacttcttcca

SEQ ID NO: 2578627 - DNA, 25 bp, Homo sapien
ccccagcatgggaatcaggacttct

SEQ ID NO: 2578628 - DNA, 25 bp, Homo sapien
gaaagtgttcttatgccccagcatg

SEQ ID NO: 2578629 - DNA, 25 bp, Homo sapien
ccaggaaggaaaattggatcgaaca

SEQ ID NO: 2578630 - DNA, 25 bp, Homo sapien
actgtttcttcgcacactccctggg

SEQ ID NO: 2578631 - DNA, 25 bp, Homo sapien
cagttgtacggtgggttgtgccaaa

SEQ ID NO: 2578632 - DNA, 25 bp, Homo sapien
tgggctttagacagtgggattgcaa

SEQ ID NO: 2578633 - DNA, 25 bp, Homo sapien
gactgtggaagaccttgtgaaatta

SEQ ID NO: 2578634 - DNA, 25 bp, Homo sapien
aaacttacagttcagctagcctacc

SEQ ID NO: 2578635 - DNA, 25 bp, Homo sapien
catggttctgatggtcacacttgac

SEQ ID NO: 2578636 - DNA, 25 bp, Homo sapien
tgatagcattagaaagggtcctgga

SEQ ID NO: 2578637 - DNA, 25 bp, Homo sapien
caccaaatccaaactgagcagctgc

SEQ ID NO: 2578638 - DNA, 25 bp, Homo sapien
cagcatccttgttaaaggttccacc

SEQ ID NO: 2578639 - DNA, 25 bp, Homo sapien
ccaaactgagcagctgcatggtcat

SEQ ID NO: 2578640 - DNA, 25 bp, Homo sapien
aaggttccaccaaatccaaactgag

SEQ ID NO: 2578641 - DNA, 25 bp, Homo sapien
tgtgatcacatgttttccagtcctg

SEQ ID NO: 2578642 - DNA, 25 bp, Homo sapien
ctagggtgtgatcacatgttttcca

SEQ ID NO: 2578643 - DNA, 25 bp, Homo sapien
tcttggtgatcagggagagcaatga

SEQ ID NO: 2578644 - DNA, 25 bp, Homo sapien
ggtcctctgggtgaacgttacgcat

SEQ ID NO: 2578645 - DNA, 25 bp, Homo sapien
aagcaggtgctgtgtcatgcacttg

SEQ ID NO: 2578646 - DNA, 25 bp, Homo sapien
gccgcatatagtttggagtaggagt

SEQ ID NO: 2578647 - DNA, 25 bp, Homo sapien
gtgaaaaagcccctactgttggtca

SEQ ID NO: 2578648 - DNA, 25 bp, Homo sapien
gttcgagctttgtatctgacttgga

SEQ ID NO: 2578649 - DNA, 25 bp, Homo sapien
cttttccggtcagagtgcttttgtg

SEQ ID NO: 2578650 - DNA, 25 bp, Homo sapien
ggatctgcttttccggtcagagtgc

SEQ ID NO: 2578651 - DNA, 25 bp, Homo sapien
tccggtcagagtgcttttgtggaag

SEQ ID NO: 2578652 - DNA, 25 bp, Homo sapien
tcctggatctgcttttccggtcaga

SEQ ID NO: 2578653 - DNA, 25 bp, Homo sapien
ctctcagggcaccagctggcgcgcc

SEQ ID NO: 2578654 - DNA, 25 bp, Homo sapien
tctcagggcaccagctggcgcgcct

SEQ ID NO: 2578655 - DNA, 25 bp, Homo sapien
tggattaagcctccccgaactgaaa

SEQ ID NO: 2578656 - DNA, 25 bp, Homo sapien
ccttggttgggctccgggcaaccag

SEQ ID NO: 2578657 - DNA, 25 bp, Homo sapien
aaaccgaacagaaaccgcaaagctg

SEQ ID NO: 2578658 - DNA, 25 bp, Homo sapien
ctaccccaggttagagatcaggcgg

SEQ ID NO: 2578659 - DNA, 25 bp, Homo sapien
cgttcttgctgggtatcaaatccca

SEQ ID NO: 2578660 - DNA, 25 bp, Homo sapien
cagattgtgggtctgcctcaatgag

SEQ ID NO: 2578661 - DNA, 25 bp, Homo sapien
tgtgggtctgcctcaatgagtgatc

SEQ ID NO: 2578662 - DNA, 25 bp, Homo sapien
caatgagtgatcgttcttgctgggt

SEQ ID NO: 2578663 - DNA, 25 bp, Homo sapien
aaaactttgtgctgacaaaatcatt

SEQ ID NO: 2578664 - DNA, 25 bp, Homo sapien
taaaactttgtgctgacaaaatcat

SEQ ID NO: 2578665 - DNA, 25 bp, Homo sapien
tcctttcccagtatatttcaactct

SEQ ID NO: 2578666 - DNA, 25 bp, Homo sapien
cagaagatctaaaagatcttcacat

SEQ ID NO: 2578667 - DNA, 25 bp, Homo sapien
agaagatctaaaagatcttcacatc

SEQ ID NO: 2578668 - DNA, 25 bp, Homo sapien
tttcccagtatatttcaactctgga

SEQ ID NO: 2578669 - DNA, 25 bp, Homo sapien
agtccacttccccttgactcaccag

SEQ ID NO: 2578670 - DNA, 25 bp, Homo sapien
acttccccttgactcaccagggctg

SEQ ID NO: 2578671 - DNA, 25 bp, Homo sapien
tccccttgactcaccagggctgaat

SEQ ID NO: 2578672 - DNA, 25 bp, Homo sapien
tccacttccccttgactcaccaggg

SEQ ID NO: 2578673 - DNA, 25 bp, Homo sapien
catggcctcatctcttcatacgtga

SEQ ID NO: 2578674 - DNA, 25 bp, Homo sapien
catacgtgaaactccctttgtgatc

SEQ ID NO: 2578675 - DNA, 25 bp, Homo sapien
ctttgtgatcaatacgcgtcccagg

SEQ ID NO: 2578676 - DNA, 25 bp, Homo sapien
caggtttattctcaatgacaggttt

SEQ ID NO: 2578677 - DNA, 25 bp, Homo sapien
aatccaaattccttggaagcaaatc

SEQ ID NO: 2578678 - DNA, 25 bp, Homo sapien
aagcaaatccattggactgcctcat

SEQ ID NO: 2578679 - DNA, 25 bp, Homo sapien
cttggaagcaaatccattggactgc

SEQ ID NO: 2578680 - DNA, 25 bp, Homo sapien
tggaagcaaatccattggactgcct

SEQ ID NO: 2578681 - DNA, 25 bp, Homo sapien
ttctctctaccttggtattcaaaac

SEQ ID NO: 2578682 - DNA, 25 bp, Homo sapien
cattctctctaccttggtattcaaa

SEQ ID NO: 2578683 - DNA, 25 bp, Homo sapien
ctctctaccttggtattcaaaacct

SEQ ID NO: 2578684 - DNA, 25 bp, Homo sapien
ccattctctctaccttggtattcaa

SEQ ID NO: 2578685 - DNA, 25 bp, Homo sapien
gatcaagaaatatggttgtacctca

SEQ ID NO: 2578686 - DNA, 25 bp, Homo sapien
tggaattctattgtagggatgtgcc

SEQ ID NO: 2578687 - DNA, 25 bp, Homo sapien
gacttttgtctagatcaagaaatat

SEQ ID NO: 2578688 - DNA, 25 bp, Homo sapien
tgtacctcattttagcggcaacttg

SEQ ID NO: 2578689 - DNA, 25 bp, Homo sapien
aacattgtagccgaagtcatttgca

SEQ ID NO: 2578690 - DNA, 25 bp, Homo sapien
tttcaatatctgcaacatttctatg

SEQ ID NO: 2578691 - DNA, 25 bp, Homo sapien
tgctttagatttcaatatctgcaac

SEQ ID NO: 2578692 - DNA, 25 bp, Homo sapien
catttctatgtctgcaacattgtag

SEQ ID NO: 2578693 - DNA, 25 bp, Homo sapien
gatggcaatggttttctgatacctg

SEQ ID NO: 2578694 - DNA, 25 bp, Homo sapien
agggtgtagctctgaaacccatagt

SEQ ID NO: 2578695 - DNA, 25 bp, Homo sapien
ccatagttggatggcaatggttttc

SEQ ID NO: 2578696 - DNA, 25 bp, Homo sapien
gaaacccatagttggatggcaatgg

SEQ ID NO: 2578697 - DNA, 25 bp, Homo sapien
tcttaatttagattgtgccaaccag

SEQ ID NO: 2578698 - DNA, 25 bp, Homo sapien
tgcggaaataaagtgtaggcatgct

SEQ ID NO: 2578699 - DNA, 25 bp, Homo sapien
tgagttttccgttgccgttctccaa

SEQ ID NO: 2578700 - DNA, 25 bp, Homo sapien
ccagatgctctctagacaaaggttc

SEQ ID NO: 2578701 - DNA, 25 bp, Homo sapien
tgctgtgtttgataaggtcatttgg

SEQ ID NO: 2578702 - DNA, 25 bp, Homo sapien
taccgatgattcattttagccaact

SEQ ID NO: 2578703 - DNA, 25 bp, Homo sapien
tttggttctgagattctcctatggg

SEQ ID NO: 2578704 - DNA, 25 bp, Homo sapien
ttagccaactcttgatactcagttg

SEQ ID NO: 2578705 - DNA, 25 bp, Homo sapien
tctctgtgttcccgttgagcacttt

SEQ ID NO: 2578706 - DNA, 25 bp, Homo sapien
tgtgttcccgttgagcactttggta

SEQ ID NO: 2578707 - DNA, 25 bp, Homo sapien
tgagcactttggtatttagccccat

SEQ ID NO: 2578708 - DNA, 25 bp, Homo sapien
tctgtgttcccgttgagcactttgg

SEQ ID NO: 2578709 - DNA, 25 bp, Homo sapien
ggactgacatattgaggctccctgt

SEQ ID NO: 2578710 - DNA, 25 bp, Homo sapien
tccaatgtggtatcggttgtggtga

SEQ ID NO: 2578711 - DNA, 25 bp, Homo sapien
tccctgtccttaagaaggatgctct

SEQ ID NO: 2578712 - DNA, 25 bp, Homo sapien
gcatttgctctaaagtaattcatga

SEQ ID NO: 2578713 - DNA, 25 bp, Homo sapien
ttctggaatctcctgaccctggcat

SEQ ID NO: 2578714 - DNA, 25 bp, Homo sapien
cttctcagcaactgaaccaaacaga

SEQ ID NO: 2578715 - DNA, 25 bp, Homo sapien
cttggcatgcagaagtaggaaataa

SEQ ID NO: 2578716 - DNA, 25 bp, Homo sapien
caggcagtcctggtatgtcaggctt

SEQ ID NO: 2578717 - DNA, 25 bp, Homo sapien
tgaaccaaacagatctagaggtaga

SEQ ID NO: 2578718 - DNA, 25 bp, Homo sapien
gaaatgcgtccttgttcaatccact

SEQ ID NO: 2578719 - DNA, 25 bp, Homo sapien
ctggggaaatgcgtccttgttcaat

SEQ ID NO: 2578720 - DNA, 25 bp, Homo sapien
gtccttgttcaatccactttctctg

SEQ ID NO: 2578721 - DNA, 25 bp, Homo sapien
tgcgtccttgttcaatccactttct

SEQ ID NO: 2578722 - DNA, 25 bp, Homo sapien
aaaccgagaacgagatgtggacagc

SEQ ID NO: 2578723 - DNA, 25 bp, Homo sapien
gattccgccaaaataaccgatgtga

SEQ ID NO: 2578724 - DNA, 25 bp, Homo sapien
gtttattaagatgaggacgaccagc

SEQ ID NO: 2578725 - DNA, 25 bp, Homo sapien
ccatcctcgtggaaaataagggcca

SEQ ID NO: 2578726 - DNA, 25 bp, Homo sapien
ctttcggaagaacaccgagagatac

SEQ ID NO: 2578727 - DNA, 25 bp, Homo sapien
gcgtgtttgttgaagtcactccatc

SEQ ID NO: 2578728 - DNA, 25 bp, Homo sapien
cattgtttgcagaagcgcttggtga

SEQ ID NO: 2578729 - DNA, 25 bp, Homo sapien
tataaaccagccgagacttcctgct

SEQ ID NO: 2578730 - DNA, 25 bp, Homo sapien
tttgtccaggctcagccatgctcat

SEQ ID NO: 2578731 - DNA, 25 bp, Homo sapien
ctttgtctttgtccaggctcagcca

SEQ ID NO: 2578732 - DNA, 25 bp, Homo sapien
tctttgtccaggctcagccatgctc

SEQ ID NO: 2578733 - DNA, 25 bp, Homo sapien
tgtctttgtccaggctcagccatgc

SEQ ID NO: 2578734 - DNA, 25 bp, Homo sapien
ctttccttttccacgaccatcgagg

SEQ ID NO: 2578735 - DNA, 25 bp, Homo sapien
gtgtagtcactttcacattctttcc

SEQ ID NO: 2578736 - DNA, 25 bp, Homo sapien
catcgaggagtccttgtgtagtcac

SEQ ID NO: 2578737 - DNA, 25 bp, Homo sapien
gggcaatcctacagccaagagctat

SEQ ID NO: 2578738 - DNA, 25 bp, Homo sapien
taggagttcccactggcaaaatagg

SEQ ID NO: 2578739 - DNA, 25 bp, Homo sapien
gaaaccttctttagccatgtggcct

SEQ ID NO: 2578740 - DNA, 25 bp, Homo sapien
aagccagacgtgtgatttccaaagc

SEQ ID NO: 2578741 - DNA, 25 bp, Homo sapien
cccaagttgcctggttctagaagcc

SEQ ID NO: 2578742 - DNA, 25 bp, Homo sapien
tcttctcggttgttcagtcatgtga

SEQ ID NO: 2578743 - DNA, 25 bp, Homo sapien
gttcagtagacagtcgggctcttct

SEQ ID NO: 2578744 - DNA, 25 bp, Homo sapien
gtgtcacactgattgtcaccatcag

SEQ ID NO: 2578745 - DNA, 25 bp, Homo sapien
tcccgttgttcagtagacagtcggg

SEQ ID NO: 2578746 - DNA, 25 bp, Homo sapien
gtggcaggattcttcactccagata

SEQ ID NO: 2578747 - DNA, 25 bp, Homo sapien
cagatacataggtggcaggattctt

SEQ ID NO: 2578748 - DNA, 25 bp, Homo sapien
gcaggattcttcactccagatataa

SEQ ID NO: 2578749 - DNA, 25 bp, Homo sapien
gccagatacataggtggcaggattc

SEQ ID NO: 2578750 - DNA, 25 bp, Homo sapien
cattaagtgtattgaaggcgaaaag

SEQ ID NO: 2578751 - DNA, 25 bp, Homo sapien
gagggtggagttaaatcattaagtg

SEQ ID NO: 2578752 - DNA, 25 bp, Homo sapien
gctagagaatagatctctggtctga

SEQ ID NO: 2578753 - DNA, 25 bp, Homo sapien
tatttacgggcttttctcactggat

SEQ ID NO: 2578754 - DNA, 25 bp, Homo sapien
cattgattttttggcagggctccga

SEQ ID NO: 2578755 - DNA, 25 bp, Homo sapien
gaggcgggctgcgatttgcttcaca

SEQ ID NO: 2578756 - DNA, 25 bp, Homo sapien
taaactgagcttgctcgctcgggag

SEQ ID NO: 2578757 - DNA, 25 bp, Homo sapien
aggacaatgttgtagggagcccaga

SEQ ID NO: 2578758 - DNA, 25 bp, Homo sapien
cagcccaggctgtgtatgaaaacta

SEQ ID NO: 2578759 - DNA, 25 bp, Homo sapien
tcatgacttagacggagcaatgccg

SEQ ID NO: 2578760 - DNA, 25 bp, Homo sapien
catgtgcacaactctgactgggtca

SEQ ID NO: 2578761 - DNA, 25 bp, Homo sapien
tctggaataagtacctaaggcgccc

SEQ ID NO: 2578762 - DNA, 25 bp, Homo sapien
gcaaccagcaaccttactcttagag

SEQ ID NO: 2578763 - DNA, 25 bp, Homo sapien
tgtgcctacaactcagggctgcggg

SEQ ID NO: 2578764 - DNA, 25 bp, Homo sapien
tagacaactaacttatggcaccaat

SEQ ID NO: 2578765 - DNA, 25 bp, Homo sapien
tgcgggtaagtgaccaggccatgac

SEQ ID NO: 2578766 - DNA, 25 bp, Homo sapien
ctcacacaccgtttccacagaaatt

SEQ ID NO: 2578767 - DNA, 25 bp, Homo sapien
tcacacaccgtttccacagaaattc

SEQ ID NO: 2578768 - DNA, 25 bp, Homo sapien
tctcacacaccgtttccacagaaat

SEQ ID NO: 2578769 - DNA, 25 bp, Homo sapien
ctaggcggaaggagggaacattact

SEQ ID NO: 2578770 - DNA, 25 bp, Homo sapien
attcctttgccatgagtgggcagag

SEQ ID NO: 2578771 - DNA, 25 bp, Homo sapien
tgcattccgattgcatcacagggtt

SEQ ID NO: 2578772 - DNA, 25 bp, Homo sapien
ggaacattactttgtattcctttgc

SEQ ID NO: 2578773 - DNA, 25 bp, Homo sapien
ttcaacttcagaggctggtcctgtc

SEQ ID NO: 2578774 - DNA, 25 bp, Homo sapien
caacttcagaggctggtcctgtcct

SEQ ID NO: 2578775 - DNA, 25 bp, Homo sapien
tcctgtcctctcaggagagcccagg

SEQ ID NO: 2578776 - DNA, 25 bp, Homo sapien
aggaccttcaacttcagaggctggt

SEQ ID NO: 2578777 - DNA, 25 bp, Homo sapien
ttcctgtggcctgcgtggaccaatc

SEQ ID NO: 2578778 - DNA, 25 bp, Homo sapien
tccttttggaacacataaagccact

SEQ ID NO: 2578779 - DNA, 25 bp, Homo sapien
cttttggaacacataaagccactta

SEQ ID NO: 2578780 - DNA, 25 bp, Homo sapien
gcgtggaccaatccttttggaacac

SEQ ID NO: 2578781 - DNA, 25 bp, Homo sapien
cactttgcagcatttcgatcccttt

SEQ ID NO: 2578782 - DNA, 25 bp, Homo sapien
catgaagtaatacactttgcagcat

SEQ ID NO: 2578783 - DNA, 25 bp, Homo sapien
gcagcatttcgatccctttcttctt

SEQ ID NO: 2578784 - DNA, 25 bp, Homo sapien
taatacactttgcagcatttcgatc

SEQ ID NO: 2578785 - DNA, 25 bp, Homo sapien
gctgattcaatacggggaccaggaa

SEQ ID NO: 2578786 - DNA, 25 bp, Homo sapien
aacccacccgctgattcaatacggg

SEQ ID NO: 2578787 - DNA, 25 bp, Homo sapien
agtgttcgcagaaacccacccgctg

SEQ ID NO: 2578788 - DNA, 25 bp, Homo sapien
gaaacccacccgctgattcaatacg

SEQ ID NO: 2578789 - DNA, 25 bp, Homo sapien
aaaccactgttgattcccctggtgg

SEQ ID NO: 2578790 - DNA, 25 bp, Homo sapien
cctccagaggatctctgaagcgtct

SEQ ID NO: 2578791 - DNA, 25 bp, Homo sapien
ccgagctcagggaccaactgaaata

SEQ ID NO: 2578792 - DNA, 25 bp, Homo sapien
gaagcgtctgaaagcaaccgggaag

SEQ ID NO: 2578793 - DNA, 25 bp, Homo sapien
tgccctccttttgatcagactgctc

SEQ ID NO: 2578794 - DNA, 25 bp, Homo sapien
tccttttgatcagactgctcctgac

SEQ ID NO: 2578795 - DNA, 25 bp, Homo sapien
tggatgccctccttttgatcagact

SEQ ID NO: 2578796 - DNA, 25 bp, Homo sapien
cctccttttgatcagactgctcctg

SEQ ID NO: 2578797 - DNA, 25 bp, Homo sapien
tgcattttaaaaagtttgctcaccc

SEQ ID NO: 2578798 - DNA, 25 bp, Homo sapien
tctgcattttaaaaagtttgctcac

SEQ ID NO: 2578799 - DNA, 25 bp, Homo sapien
atttctgcattttaaaaagtttgct

SEQ ID NO: 2578800 - DNA, 25 bp, Homo sapien
ttctgcattttaaaaagtttgctca

SEQ ID NO: 2578801 - DNA, 25 bp, Homo sapien
tccctttctggagctacattttagc

SEQ ID NO: 2578802 - DNA, 25 bp, Homo sapien
ccgacagctgccttatcctggagga

SEQ ID NO: 2578803 - DNA, 25 bp, Homo sapien
gacctggattcatacagccccactt

SEQ ID NO: 2578804 - DNA, 25 bp, Homo sapien
ggagatgattttcccctccgacagc

SEQ ID NO: 2578805 - DNA, 25 bp, Homo sapien
tcaagaaacgcatacaggagagggt

SEQ ID NO: 2578806 - DNA, 25 bp, Homo sapien
aatgcaatattgtagggcgcccaca

SEQ ID NO: 2578807 - DNA, 25 bp, Homo sapien
gagaattttacacatgggatcgccc

SEQ ID NO: 2578808 - DNA, 25 bp, Homo sapien
gaaaaatgtctcactgtacaggccc

SEQ ID NO: 2578809 - DNA, 25 bp, Homo sapien
tctgagcaaatgctaccagggctgg

SEQ ID NO: 2578810 - DNA, 25 bp, Homo sapien
tgttctggaccaagcgtaggctctg

SEQ ID NO: 2578811 - DNA, 25 bp, Homo sapien
tgtaaagagccttgcacggtgcctg

SEQ ID NO: 2578812 - DNA, 25 bp, Homo sapien
tgatcttagacaaatttccgcgcct

SEQ ID NO: 2578813 - DNA, 25 bp, Homo sapien
tcaccggcgaggcaatgagcctgaa

SEQ ID NO: 2578814 - DNA, 25 bp, Homo sapien
tgagcctgaaaagttactcccatat

SEQ ID NO: 2578815 - DNA, 25 bp, Homo sapien
tataaatgggctgtctataatttgg

SEQ ID NO: 2578816 - DNA, 25 bp, Homo sapien
tagctagttcttctcatcaccggcg

SEQ ID NO: 2578817 - DNA, 25 bp, Homo sapien
ttgccatggcaggtcattcccgatg

SEQ ID NO: 2578818 - DNA, 25 bp, Homo sapien
gagattcctgtcctacctatcggag

SEQ ID NO: 2578819 - DNA, 25 bp, Homo sapien
cacaccaacgtaatggagtgcctgg

SEQ ID NO: 2578820 - DNA, 25 bp, Homo sapien
gagtccggacctacttctgcaaatg

SEQ ID NO: 2578821 - DNA, 25 bp, Homo sapien
ccaatatttcacgtaggttcgttct

SEQ ID NO: 2578822 - DNA, 25 bp, Homo sapien
gtctgaccaaaaatttactacagca

SEQ ID NO: 2578823 - DNA, 25 bp, Homo sapien
ccaaaaatttactacagcagagttt

SEQ ID NO: 2578824 - DNA, 25 bp, Homo sapien
caatatttcacgtaggttcgttcta

SEQ ID NO: 2578825 - DNA, 25 bp, Homo sapien
gccacaacatcagtgaagtcgccca

SEQ ID NO: 2578826 - DNA, 25 bp, Homo sapien
tttcattggccagagaattcacatg

SEQ ID NO: 2578827 - DNA, 25 bp, Homo sapien
gaaaaatcttcagagcatttcatag

SEQ ID NO: 2578828 - DNA, 25 bp, Homo sapien
tacaataatacttacagtgtctgct

SEQ ID NO: 2578829 - DNA, 25 bp, Homo sapien
tctgagaaatatggctacagggctc

SEQ ID NO: 2578830 - DNA, 25 bp, Homo sapien
gcaataaagggttattatcaggccc

SEQ ID NO: 2578831 - DNA, 25 bp, Homo sapien
agctcaggactgcatagaccacatg

SEQ ID NO: 2578832 - DNA, 25 bp, Homo sapien
tacagggctcttcttgtgagcagcc

SEQ ID NO: 2578833 - DNA, 25 bp, Homo sapien
ggacacagcactaatatttggtata

SEQ ID NO: 2578834 - DNA, 25 bp, Homo sapien
gaggtcagtggaatggccacaccca

SEQ ID NO: 2578835 - DNA, 25 bp, Homo sapien
tagcatcgttttcgaggttcatgca

SEQ ID NO: 2578836 - DNA, 25 bp, Homo sapien
tgcatattgcaggatgtaccagaac

SEQ ID NO: 2578837 - DNA, 25 bp, Homo sapien
tactactgatgagtccatgatcctg

SEQ ID NO: 2578838 - DNA, 25 bp, Homo sapien
taaccctgtggtgagcattcttgag

SEQ ID NO: 2578839 - DNA, 25 bp, Homo sapien
tggtgggccaatatgacgacttcag

SEQ ID NO: 2578840 - DNA, 25 bp, Homo sapien
aatatggctcagtttagtcatgccc

SEQ ID NO: 2578841 - DNA, 25 bp, Homo sapien
catcctttggaagagtgagcaagca

SEQ ID NO: 2578842 - DNA, 25 bp, Homo sapien
taaaatgctacccttcagccttacc

SEQ ID NO: 2578843 - DNA, 25 bp, Homo sapien
gaagtgacaatacgggaggtccaaa

SEQ ID NO: 2578844 - DNA, 25 bp, Homo sapien
ctgtccctgtgtatagattatgtaa

SEQ ID NO: 2578845 - DNA, 25 bp, Homo sapien
gcagcagcataataaggctttttgc

SEQ ID NO: 2578846 - DNA, 25 bp, Homo sapien
gtaaactattgctgatgactccagg

SEQ ID NO: 2578847 - DNA, 25 bp, Homo sapien
caatttttgctaggacttcttgaga

SEQ ID NO: 2578848 - DNA, 25 bp, Homo sapien
gccaagcttgattccttgaattata

SEQ ID NO: 2578849 - DNA, 25 bp, Homo sapien
tatcctcacagatacagagacacca

SEQ ID NO: 2578850 - DNA, 25 bp, Homo sapien
taggacttgctaagttctccacagt

SEQ ID NO: 2578851 - DNA, 25 bp, Homo sapien
gattatacttctgcataagactgta

SEQ ID NO: 2578852 - DNA, 25 bp, Homo sapien
catttctgaagattcctgtcatgta

SEQ ID NO: 2578853 - DNA, 25 bp, Homo sapien
caaggtctgaggtcacgtcatcaag

SEQ ID NO: 2578854 - DNA, 25 bp, Homo sapien
ttggtcttgaaagggccagagcctg

SEQ ID NO: 2578855 - DNA, 25 bp, Homo sapien
taacaaacacatgataagccagcag

SEQ ID NO: 2578856 - DNA, 25 bp, Homo sapien
tgaacttcatatactgggagctgga

SEQ ID NO: 2578857 - DNA, 25 bp, Homo sapien
catttggcacttggttatacttcac

SEQ ID NO: 2578858 - DNA, 25 bp, Homo sapien
aaattaagccatgaaggtgaccctg

SEQ ID NO: 2578859 - DNA, 25 bp, Homo sapien
gaggacacatactagagcaaggagc

SEQ ID NO: 2578860 - DNA, 25 bp, Homo sapien
gaaaggcaaggtctatcctcccact

SEQ ID NO: 2578861 - DNA, 25 bp, Homo sapien
aaatgtttgctgtcactctgacagc

SEQ ID NO: 2578862 - DNA, 25 bp, Homo sapien
cagattcccaacacgggctgcgtct

SEQ ID NO: 2578863 - DNA, 25 bp, Homo sapien
tcattcaatgtacagcaaatgtttg

SEQ ID NO: 2578864 - DNA, 25 bp, Homo sapien
ctgacagcagattcccaacacgggc

SEQ ID NO: 2578865 - DNA, 25 bp, Homo sapien
taggcaggaatacatatagtcatca

SEQ ID NO: 2578866 - DNA, 25 bp, Homo sapien
atagatgatttatttaggcaggaat

SEQ ID NO: 2578867 - DNA, 25 bp, Homo sapien
gaatacatatagtcatcattgccag

SEQ ID NO: 2578868 - DNA, 25 bp, Homo sapien
taatagatgatttatttaggcagga

SEQ ID NO: 2578869 - DNA, 25 bp, Homo sapien
atatgagaggtgaaatgttcgatcc

SEQ ID NO: 2578870 - DNA, 25 bp, Homo sapien
tgagaggtgaaatgttcgatccaat

SEQ ID NO: 2578871 - DNA, 25 bp, Homo sapien
gaggtgaaatgttcgatccaatttt

SEQ ID NO: 2578872 - DNA, 25 bp, Homo sapien
ttaatatgagaggtgaaatgttcga

SEQ ID NO: 2578873 - DNA, 25 bp, Homo sapien
tacacgaactctaatgggaatgcag

SEQ ID NO: 2578874 - DNA, 25 bp, Homo sapien
aatcatatacccaggctgctgacgg

SEQ ID NO: 2578875 - DNA, 25 bp, Homo sapien
taaagcccagggagtgtgcgaagaa

SEQ ID NO: 2578876 - DNA, 25 bp, Homo sapien
caaagctagacgagtgggctccagt

SEQ ID NO: 2578877 - DNA, 25 bp, Homo sapien
cccaacgaagcaaggcaggattttc

SEQ ID NO: 2578878 - DNA, 25 bp, Homo sapien
tgttcttgcataggcccaacgaagc

SEQ ID NO: 2578879 - DNA, 25 bp, Homo sapien
tattgttcttgcataggcccaacga

SEQ ID NO: 2578880 - DNA, 25 bp, Homo sapien
gacatttattgttcttgcataggcc

SEQ ID NO: 2578881 - DNA, 25 bp, Homo sapien
tctttccaggctacaaataagctgt

SEQ ID NO: 2578882 - DNA, 25 bp, Homo sapien
tttaagctgacctagtgtgaaaagc

SEQ ID NO: 2578883 - DNA, 25 bp, Homo sapien
catagggacttttgtgaaggagcac

SEQ ID NO: 2578884 - DNA, 25 bp, Homo sapien
gaaccatgcagtattcccaatgaag

SEQ ID NO: 2578885 - DNA, 25 bp, Homo sapien
gaaagtttgttctacaaggacagga

SEQ ID NO: 2578886 - DNA, 25 bp, Homo sapien
taaagattaggcaagatggccaggc

SEQ ID NO: 2578887 - DNA, 25 bp, Homo sapien
acttaaccggacatggtagcgcaca

SEQ ID NO: 2578888 - DNA, 25 bp, Homo sapien
tccctgggcctaagattgtagctgc

SEQ ID NO: 2578889 - DNA, 25 bp, Homo sapien
aaattgaaactaccctgaggcatac

SEQ ID NO: 2578890 - DNA, 25 bp, Homo sapien
gatgctgtgggttacacaaaccagg

SEQ ID NO: 2578891 - DNA, 25 bp, Homo sapien
tgaggcatacagctagaagacagaa

SEQ ID NO: 2578892 - DNA, 25 bp, Homo sapien
gacagtagtagagcttaatcatcca

SEQ ID NO: 2578893 - DNA, 25 bp, Homo sapien
cctttgcgtggtctctctcggtctc

SEQ ID NO: 2578894 - DNA, 25 bp, Homo sapien
aggactcgggccctattcccgcctg

SEQ ID NO: 2578895 - DNA, 25 bp, Homo sapien
tgcgtctgagatactgatcgggagc

SEQ ID NO: 2578896 - DNA, 25 bp, Homo sapien
atcgggagcggtggccgaccctttg

SEQ ID NO: 2578897 - DNA, 25 bp, Homo sapien
tcaggcagagtgcgcaggctcgacg

SEQ ID NO: 2578898 - DNA, 25 bp, Homo sapien
ctcgacggcttatactttgggaacg

SEQ ID NO: 2578899 - DNA, 25 bp, Homo sapien
gcagagtgcgcaggctcgacggctt

SEQ ID NO: 2578900 - DNA, 25 bp, Homo sapien
aggcagagtgcgcaggctcgacggc

SEQ ID NO: 2578901 - DNA, 25 bp, Homo sapien
cagggcacaattgcgcctgcgcgat

SEQ ID NO: 2578902 - DNA, 25 bp, Homo sapien
cttggcgaaccagggcacaattgcg

SEQ ID NO: 2578903 - DNA, 25 bp, Homo sapien
ctgaggccctttgtctatgctgacc

SEQ ID NO: 2578904 - DNA, 25 bp, Homo sapien
cctgcgcgattctgaggccctttgt

SEQ ID NO: 2578905 - DNA, 25 bp, Homo sapien
tcgttaacaaggagctccgcctctt

SEQ ID NO: 2578906 - DNA, 25 bp, Homo sapien
taacaaggagctccgcctctttctc

SEQ ID NO: 2578907 - DNA, 25 bp, Homo sapien
gatgtcgttaacaaggagctccgcc

SEQ ID NO: 2578908 - DNA, 25 bp, Homo sapien
ttggggatgtcgttaacaaggagct

SEQ ID NO: 2578909 - DNA, 25 bp, Homo sapien
cgaagtgctcttctcgcagtgcgcc

SEQ ID NO: 2578910 - DNA, 25 bp, Homo sapien
aagtgctcttctcgcagtgcgccct

SEQ ID NO: 2578911 - DNA, 25 bp, Homo sapien
gcgcatgcgcgaagtgctcttctcg

SEQ ID NO: 2578912 - DNA, 25 bp, Homo sapien
tgcgcgaagtgctcttctcgcagtg

SEQ ID NO: 2578913 - DNA, 25 bp, Homo sapien
gtgaagtcctcctttattaatgact

SEQ ID NO: 2578914 - DNA, 25 bp, Homo sapien
gcagtttactaacatcaatttcaag

SEQ ID NO: 2578915 - DNA, 25 bp, Homo sapien
gatgtcaacatcgttctcattgttt

SEQ ID NO: 2578916 - DNA, 25 bp, Homo sapien
gactttgcatgtggatccagcagtt

SEQ ID NO: 2578917 - DNA, 25 bp, Homo sapien
tagaaagccctcactcacaagaatt

SEQ ID NO: 2578918 - DNA, 25 bp, Homo sapien
tctaggactcccttttccgcacaag

SEQ ID NO: 2578919 - DNA, 25 bp, Homo sapien
aatatttggactggcttctaggact

SEQ ID NO: 2578920 - DNA, 25 bp, Homo sapien
taagcttgtgcctagatgtttgcct

SEQ ID NO: 2578921 - DNA, 25 bp, Homo sapien
aaagaacagttgagctttgccaaac

SEQ ID NO: 2578922 - DNA, 25 bp, Homo sapien
tctctgtggataaattcctccagtg

SEQ ID NO: 2578923 - DNA, 25 bp, Homo sapien
gatttgtggttagacggccttggct

SEQ ID NO: 2578924 - DNA, 25 bp, Homo sapien
ggcaatttagatttgtggttagacg

SEQ ID NO: 2578925 - DNA, 25 bp, Homo sapien
cggacagtgcttgggcggatgatgc

SEQ ID NO: 2578926 - DNA, 25 bp, Homo sapien
actgatactgactgtgtgtgagaca

SEQ ID NO: 2578927 - DNA, 25 bp, Homo sapien
gatggcggacagtgcttgggcggat

SEQ ID NO: 2578928 - DNA, 25 bp, Homo sapien
gacagtgcttgggcggacgatgctg

SEQ ID NO: 2578929 - DNA, 25 bp, Homo sapien
gcaagtgtttgaagcctcaaaggta

SEQ ID NO: 2578930 - DNA, 25 bp, Homo sapien
ttttcagcatatgggtaactgacgg

SEQ ID NO: 2578931 - DNA, 25 bp, Homo sapien
actgacggatttttagctttagact

SEQ ID NO: 2578932 - DNA, 25 bp, Homo sapien
atagtgcttgggcagacgatgcaag

SEQ ID NO: 2578933 - DNA, 25 bp, Homo sapien
gaccaaggaacctgtatcgctgcag

SEQ ID NO: 2578934 - DNA, 25 bp, Homo sapien
gacctttagaaggtgatgtgagcag

SEQ ID NO: 2578935 - DNA, 25 bp, Homo sapien
ccagctgaagaacaggtaatgatct

SEQ ID NO: 2578936 - DNA, 25 bp, Homo sapien
ccatacgaaacaagctgtgggctgg

SEQ ID NO: 2578937 - DNA, 25 bp, Homo sapien
ctgggatatcaggtatgagcctgaa

SEQ ID NO: 2578938 - DNA, 25 bp, Homo sapien
agtgtattcttatgacgcccaggct

SEQ ID NO: 2578939 - DNA, 25 bp, Homo sapien
caggtatgagcctgaaaatctattt

SEQ ID NO: 2578940 - DNA, 25 bp, Homo sapien
gctggggcatactggggcaatcata

SEQ ID NO: 2578941 - DNA, 25 bp, Homo sapien
tgcctatgtgactcttgctcccgct

SEQ ID NO: 2578942 - DNA, 25 bp, Homo sapien
ttaggagaaacaccgacacttagat

SEQ ID NO: 2578943 - DNA, 25 bp, Homo sapien
tagatgtccactgatagttctcctt

SEQ ID NO: 2578944 - DNA, 25 bp, Homo sapien
cattgggcacggattgatacattct

SEQ ID NO: 2578945 - DNA, 25 bp, Homo sapien
tgtgttaattatggatgaatcatct

SEQ ID NO: 2578946 - DNA, 25 bp, Homo sapien
tattgtgttaattatggatgaatca

SEQ ID NO: 2578947 - DNA, 25 bp, Homo sapien
gtgttaattatggatgaatcatctg

SEQ ID NO: 2578948 - DNA, 25 bp, Homo sapien
ttgtgttaattatggatgaatcatc

SEQ ID NO: 2578949 - DNA, 25 bp, Homo sapien
tatgtcgttaaaaccaaacagagga

SEQ ID NO: 2578950 - DNA, 25 bp, Homo sapien
attatgtcgttaaaaccaaacagag

SEQ ID NO: 2578951 - DNA, 25 bp, Homo sapien
ggagcgtcacatccacgagctgctt

SEQ ID NO: 2578952 - DNA, 25 bp, Homo sapien
ggagttctgacaaccagtctgcttg

SEQ ID NO: 2578953 - DNA, 25 bp, Homo sapien
gactccctctgatccgttgagctgt

SEQ ID NO: 2578954 - DNA, 25 bp, Homo sapien
tgcttcctgcgctgagtgtgcagct

SEQ ID NO: 2578955 - DNA, 25 bp, Homo sapien
caagtatggtctgatacctgacatt

SEQ ID NO: 2578956 - DNA, 25 bp, Homo sapien
taatccaggctacaaccaactgttt

SEQ ID NO: 2578957 - DNA, 25 bp, Homo sapien
gtatggtctgatacctgacatcccc

SEQ ID NO: 2578958 - DNA, 25 bp, Homo sapien
gaggaataatgctataatcagactt

SEQ ID NO: 2578959 - DNA, 25 bp, Homo sapien
ccacacgtatacactggtctttgaa

SEQ ID NO: 2578960 - DNA, 25 bp, Homo sapien
ctcacaggccacacgtatacactgg

SEQ ID NO: 2578961 - DNA, 25 bp, Homo sapien
tttctgtctcaatggtagttcctgt

SEQ ID NO: 2578962 - DNA, 25 bp, Homo sapien
ccaagcctgccccaataaccatttc

SEQ ID NO: 2578963 - DNA, 25 bp, Homo sapien
gagcatcaaaacgaagagaagttca

SEQ ID NO: 2578964 - DNA, 25 bp, Homo sapien
agttcaagcctagtaattttctcca

SEQ ID NO: 2578965 - DNA, 25 bp, Homo sapien
gagaggaagagcatcaaaacgaaga

SEQ ID NO: 2578966 - DNA, 25 bp, Homo sapien
cgaagagaagttcaagcctagtaat

SEQ ID NO: 2578967 - DNA, 25 bp, Homo sapien
atagcattaatcattgaaaaacctg

SEQ ID NO: 2578968 - DNA, 25 bp, Homo sapien
atttcacaaaatttctcacatcctc

SEQ ID NO: 2578969 - DNA, 25 bp, Homo sapien
aatttcacaaaatttctcacatcct

SEQ ID NO: 2578970 - DNA, 25 bp, Homo sapien
agcattaatcattgaaaaacctgag

SEQ ID NO: 2578971 - DNA, 25 bp, Homo sapien
agtacgcagtcagccctgcttctac

SEQ ID NO: 2578972 - DNA, 25 bp, Homo sapien
cagtacgcagtcagccctgcttcta

SEQ ID NO: 2578973 - DNA, 25 bp, Homo sapien
tcagtacgcagtcagccctgcttct

SEQ ID NO: 2578974 - DNA, 25 bp, Homo sapien
tctataaatgggaaggtccaccgag

SEQ ID NO: 2578975 - DNA, 25 bp, Homo sapien
tgctaggccctccatgaaactgttg

SEQ ID NO: 2578976 - DNA, 25 bp, Homo sapien
tcgggcgcatggatcttgggaaact

SEQ ID NO: 2578977 - DNA, 25 bp, Homo sapien
tcacatcgtgattacccagcagagc

SEQ ID NO: 2578978 - DNA, 25 bp, Homo sapien
agtcagcacttggaatatattggct

SEQ ID NO: 2578979 - DNA, 25 bp, Homo sapien
catttcagagtcagcacttggaata

SEQ ID NO: 2578980 - DNA, 25 bp, Homo sapien
tcacatttcagagtcagcacttgga

SEQ ID NO: 2578981 - DNA, 25 bp, Homo sapien
tcagagtcagcacttggaatatatt

SEQ ID NO: 2578982 - DNA, 25 bp, Homo sapien
tctggcccctttggcctctggtgtc

SEQ ID NO: 2578983 - DNA, 25 bp, Homo sapien
cagtctggcccctttggcctctggt

SEQ ID NO: 2578984 - DNA, 25 bp, Homo sapien
gacattccggttcagtctggcccct

SEQ ID NO: 2578985 - DNA, 25 bp, Homo sapien
catatgggcctgcagacattccggt

SEQ ID NO: 2578986 - DNA, 25 bp, Homo sapien
aacaggtgctctcattagttaaggg

SEQ ID NO: 2578987 - DNA, 25 bp, Homo sapien
gaaacaggtgctctcattagttaag

SEQ ID NO: 2578988 - DNA, 25 bp, Homo sapien
caggtgctctcattagttaagggaa

SEQ ID NO: 2578989 - DNA, 25 bp, Homo sapien
ggtgctctcattagttaagggaatt

SEQ ID NO: 2578990 - DNA, 25 bp, Homo sapien
ggctctcgcatatcagcactgggat

SEQ ID NO: 2578991 - DNA, 25 bp, Homo sapien
tcacctggaccagcattgcactttt

SEQ ID NO: 2578992 - DNA, 25 bp, Homo sapien
gcatctctctagaaccatccacaag

SEQ ID NO: 2578993 - DNA, 25 bp, Homo sapien
gttcatgtggctctcgcatatcagc

SEQ ID NO: 2578994 - DNA, 25 bp, Homo sapien
ttgaaatatcatggactttgattcg

SEQ ID NO: 2578995 - DNA, 25 bp, Homo sapien
gaaatatcatggactttgattcggg

SEQ ID NO: 2578996 - DNA, 25 bp, Homo sapien
catggactttgattcggggaatatg

SEQ ID NO: 2578997 - DNA, 25 bp, Homo sapien
tttgaaaataacatgcaatatgatg

SEQ ID NO: 2578998 - DNA, 25 bp, Homo sapien
catggagactttttgattggagcag

SEQ ID NO: 2578999 - DNA, 25 bp, Homo sapien
actagaatttgtagccctgatggcc

SEQ ID NO: 2579000 - DNA, 25 bp, Homo sapien
gattgaacacacgtaagaagtctaa

SEQ ID NO: 2579001 - DNA, 25 bp, Homo sapien
gctggcatggtagtacaacagaaac

SEQ ID NO: 2579002 - DNA, 25 bp, Homo sapien
tatttaatgtgggtattaaaagctc

SEQ ID NO: 2579003 - DNA, 25 bp, Homo sapien
tgggtattaaaagctcttgggtcat

SEQ ID NO: 2579004 - DNA, 25 bp, Homo sapien
cttctctttatttaatgtgggtatt

SEQ ID NO: 2579005 - DNA, 25 bp, Homo sapien
aatgtgggtattaaaagctcttggg

SEQ ID NO: 2579006 - DNA, 25 bp, Homo sapien
gggaaataagaatcaggtccttcat

SEQ ID NO: 2579007 - DNA, 25 bp, Homo sapien
taagggcactaactagggaaatagc

SEQ ID NO: 2579008 - DNA, 25 bp, Homo sapien
tctagattgcaatctatagtccaat

SEQ ID NO: 2579009 - DNA, 25 bp, Homo sapien
tgcaatctatagtccaataataggc

SEQ ID NO: 2579010 - DNA, 25 bp, Homo sapien
ccaatcgaaggtcaggtaactaagg

SEQ ID NO: 2579011 - DNA, 25 bp, Homo sapien
cattcaaaggtactgtaggcttcaa

SEQ ID NO: 2579012 - DNA, 25 bp, Homo sapien
tcacaactctagagggtagaagttc

SEQ ID NO: 2579013 - DNA, 25 bp, Homo sapien
agcatcatatccctcaagcatgtgt

SEQ ID NO: 2579014 - DNA, 25 bp, Homo sapien
ggcttgcagatgcaatactccattc

SEQ ID NO: 2579015 - DNA, 25 bp, Homo sapien
caattcggatagctggcaaacaggg

SEQ ID NO: 2579016 - DNA, 25 bp, Homo sapien
cagtgtccgacaataaaaaggcttc

SEQ ID NO: 2579017 - DNA, 25 bp, Homo sapien
taggtaatttgccactcagctctcc

SEQ ID NO: 2579018 - DNA, 25 bp, Homo sapien
tagaaatgtgccaaattacccagaa

SEQ ID NO: 2579019 - DNA, 25 bp, Homo sapien
aattggcccaagtctctaaccattt

SEQ ID NO: 2579020 - DNA, 25 bp, Homo sapien
aaattggcccaagtctctaaccatt

SEQ ID NO: 2579021 - DNA, 25 bp, Homo sapien
tggcccaagtctctaaccatttccc

SEQ ID NO: 2579022 - DNA, 25 bp, Homo sapien
catttcccctaaaggaccctggctg

SEQ ID NO: 2579023 - DNA, 25 bp, Homo sapien
tcttggggtatttgacgcacagatc

SEQ ID NO: 2579024 - DNA, 25 bp, Homo sapien
gacgcacagatcaaccacgcattgg

SEQ ID NO: 2579025 - DNA, 25 bp, Homo sapien
ccacgcattggttgataatacacaa

SEQ ID NO: 2579026 - DNA, 25 bp, Homo sapien
tatttgacgcacagatcaaccacgc

SEQ ID NO: 2579027 - DNA, 25 bp, Homo sapien
tctcggctgcactgagggtttgagt

SEQ ID NO: 2579028 - DNA, 25 bp, Homo sapien
cctccatctcggctgcactgagggt

SEQ ID NO: 2579029 - DNA, 25 bp, Homo sapien
tcctgaagagggcggtttccctgcc

SEQ ID NO: 2579030 - DNA, 25 bp, Homo sapien
aagcgcgtcctgaagagggcggttt

SEQ ID NO: 2579031 - DNA, 25 bp, Homo sapien
cagcgccccctcgccttccctgtca

SEQ ID NO: 2579032 - DNA, 25 bp, Homo sapien
caagcacttatccacaaatacagga

SEQ ID NO: 2579033 - DNA, 25 bp, Homo sapien
gcagagtagcattgcacaagcactt

SEQ ID NO: 2579034 - DNA, 25 bp, Homo sapien
tatccacaaatacaggacccaggac

SEQ ID NO: 2579035 - DNA, 25 bp, Homo sapien
ggacccaggacatcgcagagaccat

SEQ ID NO: 2579036 - DNA, 25 bp, Homo sapien
aaagacatcgggttcattcagactg

SEQ ID NO: 2579037 - DNA, 25 bp, Homo sapien
tctgcctgacgagacctttgaagtg

SEQ ID NO: 2579038 - DNA, 25 bp, Homo sapien
tcagtttatagttgccgatggacca

SEQ ID NO: 2579039 - DNA, 25 bp, Homo sapien
gactgtattgtcagaaaaggagcca

SEQ ID NO: 2579040 - DNA, 25 bp, Homo sapien
taagaacccagcaggttgcttgtgt

SEQ ID NO: 2579041 - DNA, 25 bp, Homo sapien
ccagcaggttgcttgtgtcagtcct

SEQ ID NO: 2579042 - DNA, 25 bp, Homo sapien
caaaagtctcaggaccagggaagct

SEQ ID NO: 2579043 - DNA, 25 bp, Homo sapien
gcttgtgtcagtcctgaagtccaaa

SEQ ID NO: 2579044 - DNA, 25 bp, Homo sapien
ttagtcagaagtgggccagcaaact

SEQ ID NO: 2579045 - DNA, 25 bp, Homo sapien
agtcagaagtgggccagcaaactga

SEQ ID NO: 2579046 - DNA, 25 bp, Homo sapien
gatccttctgtttagtcagaagtgg

SEQ ID NO: 2579047 - DNA, 25 bp, Homo sapien
aagatccttctgtttagtcagaagt

SEQ ID NO: 2579048 - DNA, 25 bp, Homo sapien
caggacctgtgactaccaagacttg

SEQ ID NO: 2579049 - DNA, 25 bp, Homo sapien
gtgactaccaagacttgatgacaga

SEQ ID NO: 2579050 - DNA, 25 bp, Homo sapien
gacctgtgactaccaagacttgatg

SEQ ID NO: 2579051 - DNA, 25 bp, Homo sapien
agcaggacctgtgactaccaagact

SEQ ID NO: 2579052 - DNA, 25 bp, Homo sapien
gtgaattttctggaactatattatc

SEQ ID NO: 2579053 - DNA, 25 bp, Homo sapien
ttctggaactatattatccagtaat

SEQ ID NO: 2579054 - DNA, 25 bp, Homo sapien
tctggaactatattatccagtaatt

SEQ ID NO: 2579055 - DNA, 25 bp, Homo sapien
ggctcgacgattgcccatcatgaaa

SEQ ID NO: 2579056 - DNA, 25 bp, Homo sapien
aaaaatagaatgatgcaccacaagc

SEQ ID NO: 2579057 - DNA, 25 bp, Homo sapien
gcaccacaagcacatctaaattcct

SEQ ID NO: 2579058 - DNA, 25 bp, Homo sapien
ctttcagaggaacatttgtggctcg

SEQ ID NO: 2579059 - DNA, 25 bp, Homo sapien
ctggggacctgtttgtcctggatac

SEQ ID NO: 2579060 - DNA, 25 bp, Homo sapien
tggggacctgtttgtcctggatact

SEQ ID NO: 2579061 - DNA, 25 bp, Homo sapien
ggggacctgtttgtcctggatactc

SEQ ID NO: 2579062 - DNA, 25 bp, Homo sapien
gggacctgtttgtcctggatactca

SEQ ID NO: 2579063 - DNA, 25 bp, Homo sapien
tggaatagaacaattcaccatcaag

SEQ ID NO: 2579064 - DNA, 25 bp, Homo sapien
acctggtactctggcgtggttttct

SEQ ID NO: 2579065 - DNA, 25 bp, Homo sapien
tcaccatcaagactttgccttctat

SEQ ID NO: 2579066 - DNA, 25 bp, Homo sapien
cattgctctggaactgaccactcct

SEQ ID NO: 2579067 - DNA, 25 bp, Homo sapien
gcactcttcaaattgttctctcacc

SEQ ID NO: 2579068 - DNA, 25 bp, Homo sapien
gaagacacttccacgcttcggcact

SEQ ID NO: 2579069 - DNA, 25 bp, Homo sapien
cacgcttcggcactcttcaaattgt

SEQ ID NO: 2579070 - DNA, 25 bp, Homo sapien
tgccttttgggcagaagacacttcc

SEQ ID NO: 2579071 - DNA, 25 bp, Homo sapien
tggaagttgccgaatattactttta

SEQ ID NO: 2579072 - DNA, 25 bp, Homo sapien
acattccttttgcctgcaataagag

SEQ ID NO: 2579073 - DNA, 25 bp, Homo sapien
atgcttgtctggaagttgccgaata

SEQ ID NO: 2579074 - DNA, 25 bp, Homo sapien
tgtctggaagttgccgaatattact

SEQ ID NO: 2579075 - DNA, 25 bp, Homo sapien
ggactcaacaggacacatcatgaaa

SEQ ID NO: 2579076 - DNA, 25 bp, Homo sapien
actgatctgtttccttgagtctaca

SEQ ID NO: 2579077 - DNA, 25 bp, Homo sapien
tgaaaaaagttggtatgcttcctcc

SEQ ID NO: 2579078 - DNA, 25 bp, Homo sapien
gagataacacccaaagcttctctgg

SEQ ID NO: 2579079 - DNA, 25 bp, Homo sapien
cacagctcctatgacactagcaaca

SEQ ID NO: 2579080 - DNA, 25 bp, Homo sapien
gggtggcaggaatacaaatgcagat

SEQ ID NO: 2579081 - DNA, 25 bp, Homo sapien
tgaagactctaatccagaaggaagt

SEQ ID NO: 2579082 - DNA, 25 bp, Homo sapien
cttcaccagctctgtttctgaggcc

SEQ ID NO: 2579083 - DNA, 25 bp, Homo sapien
gaatgtccacttatgtacgccctgc

SEQ ID NO: 2579084 - DNA, 25 bp, Homo sapien
gtttcttccttggaatgtccactta

SEQ ID NO: 2579085 - DNA, 25 bp, Homo sapien
ccctgctcggaaacagtgtggaatc

SEQ ID NO: 2579086 - DNA, 25 bp, Homo sapien
cagtgtggaatcatagtttgggtaa

SEQ ID NO: 2579087 - DNA, 25 bp, Homo sapien
tatcgtgctatttctggctgagtca

SEQ ID NO: 2579088 - DNA, 25 bp, Homo sapien
ctatcgtgctatttctggctgagtc

SEQ ID NO: 2579089 - DNA, 25 bp, Homo sapien
aacacagttagtcgtttgaatcaca

SEQ ID NO: 2579090 - DNA, 25 bp, Homo sapien
tgggccgcagcttctaacacagtta

SEQ ID NO: 2579091 - DNA, 25 bp, Homo sapien
tagtcgtttgaatcacaaatggtaa

SEQ ID NO: 2579092 - DNA, 25 bp, Homo sapien
tatgttggttgggccgcagcttcta

SEQ ID NO: 2579093 - DNA, 25 bp, Homo sapien
tgaaacaatgcccaggtctgcttgt

SEQ ID NO: 2579094 - DNA, 25 bp, Homo sapien
caaattggcgcaaactgtatagaga

SEQ ID NO: 2579095 - DNA, 25 bp, Homo sapien
gctacaggactataaatattcatcg

SEQ ID NO: 2579096 - DNA, 25 bp, Homo sapien
gagcccacggaaaaggatgccattg

SEQ ID NO: 2579097 - DNA, 25 bp, Homo sapien
tgaagaagaaaaattggcagggaac

SEQ ID NO: 2579098 - DNA, 25 bp, Homo sapien
gtgaagaagaaaaattggcagggaa

SEQ ID NO: 2579099 - DNA, 25 bp, Homo sapien
tgtgaagaagaaaaattggcaggga

SEQ ID NO: 2579100 - DNA, 25 bp, Homo sapien
ttgctggttttcactatgactgtgg

SEQ ID NO: 2579101 - DNA, 25 bp, Homo sapien
cacttggtgagatggaagtcaggtc

SEQ ID NO: 2579102 - DNA, 25 bp, Homo sapien
tctttccaggaaagactattctgcc

SEQ ID NO: 2579103 - DNA, 25 bp, Homo sapien
ctgtggtctattgcatcaggcagcc

SEQ ID NO: 2579104 - DNA, 25 bp, Homo sapien
acaaggtcacttgtagaaatggtga

SEQ ID NO: 2579105 - DNA, 25 bp, Homo sapien
gactgttccactggacacatttgtc

SEQ ID NO: 2579106 - DNA, 25 bp, Homo sapien
ctgggacagcaactcacagccactt

SEQ ID NO: 2579107 - DNA, 25 bp, Homo sapien
ccactggacacatttgtctgcctct

SEQ ID NO: 2579108 - DNA, 25 bp, Homo sapien
aagatgtcatcccttccttctattt

SEQ ID NO: 2579109 - DNA, 25 bp, Homo sapien
taatagctagatttgcattattcat

SEQ ID NO: 2579110 - DNA, 25 bp, Homo sapien
acccagtaagatgtcatcccttcct

SEQ ID NO: 2579111 - DNA, 25 bp, Homo sapien
tttaatagctagatttgcattattc

SEQ ID NO: 2579112 - DNA, 25 bp, Homo sapien
tggccccagttgttactaagagaga

SEQ ID NO: 2579113 - DNA, 25 bp, Homo sapien
cacataaacgttaaatactataaca

SEQ ID NO: 2579114 - DNA, 25 bp, Homo sapien
ccactcccaatcagaattttggcca

SEQ ID NO: 2579115 - DNA, 25 bp, Homo sapien
gccatggccccagttgttactaaga

SEQ ID NO: 2579116 - DNA, 25 bp, Homo sapien
ctctgtccaatgtgcagcaactgac

SEQ ID NO: 2579117 - DNA, 25 bp, Homo sapien
gactctgtccaatgtgcagcaactg

SEQ ID NO: 2579118 - DNA, 25 bp, Homo sapien
tccgactctgtccaatgtgcagcaa

SEQ ID NO: 2579119 - DNA, 25 bp, Homo sapien
catgtccgactctgtccaatgtgca

SEQ ID NO: 2579120 - DNA, 25 bp, Homo sapien
tgtatttttagtggagatggagttt

SEQ ID NO: 2579121 - DNA, 25 bp, Homo sapien
gggactacaggcatctgggtaattt

SEQ ID NO: 2579122 - DNA, 25 bp, Homo sapien
actacaggcatctgggtaatttttt

SEQ ID NO: 2579123 - DNA, 25 bp, Homo sapien
atggagtttcaccatgttagccagg

SEQ ID NO: 2579124 - DNA, 25 bp, Homo sapien
gtttatatagctaccattgatagtg

SEQ ID NO: 2579125 - DNA, 25 bp, Homo sapien
tctgcaccatgtcgatcaagagctg

SEQ ID NO: 2579126 - DNA, 25 bp, Homo sapien
gctgtgttggagatgtacgagaata

SEQ ID NO: 2579127 - DNA, 25 bp, Homo sapien
tcatccctgctaacacaaacatcca

SEQ ID NO: 2579128 - DNA, 25 bp, Homo sapien
ttttatacgtcagcatgctttcggg

SEQ ID NO: 2579129 - DNA, 25 bp, Homo sapien
tatctattaggagccggcttttccc

SEQ ID NO: 2579130 - DNA, 25 bp, Homo sapien
taaaaagcaagtgcgtggtttgacc

SEQ ID NO: 2579131 - DNA, 25 bp, Homo sapien
ccctgttgccgggtgtgaccaatta

SEQ ID NO: 2579132 - DNA, 25 bp, Homo sapien
aaacttgccacgttgcgttccaggc

SEQ ID NO: 2579133 - DNA, 25 bp, Homo sapien
gggtacccatcccacagtgctatta

SEQ ID NO: 2579134 - DNA, 25 bp, Homo sapien
ggtcttgtggcatcctttgtccaaa

SEQ ID NO: 2579135 - DNA, 25 bp, Homo sapien
tactgcacgttacctcactagccag

SEQ ID NO: 2579136 - DNA, 25 bp, Homo sapien
tgtcaggtaagtcatccacactgtg

SEQ ID NO: 2579137 - DNA, 25 bp, Homo sapien
cacttctcacaagcctgaagggcag

SEQ ID NO: 2579138 - DNA, 25 bp, Homo sapien
taatgggcttgtgctcagcgtactc

SEQ ID NO: 2579139 - DNA, 25 bp, Homo sapien
tgcaacactggtccaagcaggagta

SEQ ID NO: 2579140 - DNA, 25 bp, Homo sapien
taaagcacaaccatctcccttagag

SEQ ID NO: 2579141 - DNA, 25 bp, Homo sapien
ggtgcaagccatatgtagtgtcagc

SEQ ID NO: 2579142 - DNA, 25 bp, Homo sapien
aatgtgtggagttgtgtgcctgcct

SEQ ID NO: 2579143 - DNA, 25 bp, Homo sapien
ccttagagtgggctaaatctactgc

SEQ ID NO: 2579144 - DNA, 25 bp, Homo sapien
ggaccagctccaggtaaacaatacc

SEQ ID NO: 2579145 - DNA, 25 bp, Homo sapien
ctttttgacagctaagaaggaccag

SEQ ID NO: 2579146 - DNA, 25 bp, Homo sapien
tcttaccaattatatcactgcatta

SEQ ID NO: 2579147 - DNA, 25 bp, Homo sapien
gaatatcactactcaacttacagtt

SEQ ID NO: 2579148 - DNA, 25 bp, Homo sapien
ttatcaggagtttatgatttttctc

SEQ ID NO: 2579149 - DNA, 25 bp, Homo sapien
atggaaaatagaacgaacctacgtg

SEQ ID NO: 2579150 - DNA, 25 bp, Homo sapien
tatcaggagtttatgatttttctcc

SEQ ID NO: 2579151 - DNA, 25 bp, Homo sapien
tgcaggcagaggcccaaccatcctg

SEQ ID NO: 2579152 - DNA, 25 bp, Homo sapien
ctgtttctggggtggcctgtgcagc

SEQ ID NO: 2579153 - DNA, 25 bp, Homo sapien
cttagttagacgctacagagcagaa

SEQ ID NO: 2579154 - DNA, 25 bp, Homo sapien
caactcaactgcctggtagacaagg

SEQ ID NO: 2579155 - DNA, 25 bp, Homo sapien
gctccaaaggtgaagcagttaccct

SEQ ID NO: 2579156 - DNA, 25 bp, Homo sapien
ccttgaaggaacagtctcaccctga

SEQ ID NO: 2579157 - DNA, 25 bp, Homo sapien
tcttgctaagacgacagcagggaat

SEQ ID NO: 2579158 - DNA, 25 bp, Homo sapien
gctaagacgacagcagggaattgta

SEQ ID NO: 2579159 - DNA, 25 bp, Homo sapien
gcagatggatgggcaatccccacct

SEQ ID NO: 2579160 - DNA, 25 bp, Homo sapien
tttacttcttgctaagacgacagca

SEQ ID NO: 2579161 - DNA, 25 bp, Homo sapien
ttacttcctgaggaattcacaggct

SEQ ID NO: 2579162 - DNA, 25 bp, Homo sapien
cttcctgaggaattcacaggcttcc

SEQ ID NO: 2579163 - DNA, 25 bp, Homo sapien
tcctgaggaattcacaggcttccag

SEQ ID NO: 2579164 - DNA, 25 bp, Homo sapien
tacttcctgaggaattcacaggctt

SEQ ID NO: 2579165 - DNA, 25 bp, Homo sapien
tctcaagttcacaagacattggtgg

SEQ ID NO: 2579166 - DNA, 25 bp, Homo sapien
acattggtggtcctctagcttctcc

SEQ ID NO: 2579167 - DNA, 25 bp, Homo sapien
tagcttctcccggaatgtgaacctg

SEQ ID NO: 2579168 - DNA, 25 bp, Homo sapien
tgcacttgtctctgattgaatcgac

SEQ ID NO: 2579169 - DNA, 25 bp, Homo sapien
gaatgattgcagtgcacagggagct

SEQ ID NO: 2579170 - DNA, 25 bp, Homo sapien
catgtggtctatgcagtcctgagct

SEQ ID NO: 2579171 - DNA, 25 bp, Homo sapien
accgggagccttacaatactctgtg

SEQ ID NO: 2579172 - DNA, 25 bp, Homo sapien
aaatcccacagttatcaccgggagc

SEQ ID NO: 2579173 - DNA, 25 bp, Homo sapien
taatgcctgcgacatactgtggtcc

SEQ ID NO: 2579174 - DNA, 25 bp, Homo sapien
ttttggtttcagactggaataagca

SEQ ID NO: 2579175 - DNA, 25 bp, Homo sapien
taagcaaaacttgtccgggcagtca

SEQ ID NO: 2579176 - DNA, 25 bp, Homo sapien
tcagtgttgtcattgaacagaaggt

SEQ ID NO: 2579177 - DNA, 25 bp, Homo sapien
tccgagacaccacggcatgattcgg

SEQ ID NO: 2579178 - DNA, 25 bp, Homo sapien
cacaggcttccgtttgccatcgagg

SEQ ID NO: 2579179 - DNA, 25 bp, Homo sapien
gagcaacacctgtttcaggcgttcc

SEQ ID NO: 2579180 - DNA, 25 bp, Homo sapien
ggcgttccaccttatccatccgaga

SEQ ID NO: 2579181 - DNA, 25 bp, Homo sapien
aaatccttagcccatgcgtcattgt

SEQ ID NO: 2579182 - DNA, 25 bp, Homo sapien
tccttagcccatgcgtcattgttat

SEQ ID NO: 2579183 - DNA, 25 bp, Homo sapien
ttagcccatgcgtcattgttatttc

SEQ ID NO: 2579184 - DNA, 25 bp, Homo sapien
cttcaaatccttagcccatgcgtca

SEQ ID NO: 2579185 - DNA, 25 bp, Homo sapien
ctttcacaaatgcaacgtctccagc

SEQ ID NO: 2579186 - DNA, 25 bp, Homo sapien
tttcacaaatgcaacgtctccagca

SEQ ID NO: 2579187 - DNA, 25 bp, Homo sapien
tctttcacaaatgcaacgtctccag

SEQ ID NO: 2579188 - DNA, 25 bp, Homo sapien
ttcacaaatgcaacgtctccagcat

SEQ ID NO: 2579189 - DNA, 25 bp, Homo sapien
ggagatttacattactggcagacag

SEQ ID NO: 2579190 - DNA, 25 bp, Homo sapien
taaaaagttcagacaccctcagaca

SEQ ID NO: 2579191 - DNA, 25 bp, Homo sapien
cccggatgaatggtgctgtaaaacg

SEQ ID NO: 2579192 - DNA, 25 bp, Homo sapien
cactggtaaatagtgcccctgagaa

SEQ ID NO: 2579193 - DNA, 25 bp, Homo sapien
tgggcacgcacttattctcaccctg

SEQ ID NO: 2579194 - DNA, 25 bp, Homo sapien
attagatctcgggtcagacccaggg

SEQ ID NO: 2579195 - DNA, 25 bp, Homo sapien
gacccaggggcacagctttgactga

SEQ ID NO: 2579196 - DNA, 25 bp, Homo sapien
tcgtcgccaatacacagagcacaga

SEQ ID NO: 2579197 - DNA, 25 bp, Homo sapien
cagagcctgtgagttgcctagtcca

SEQ ID NO: 2579198 - DNA, 25 bp, Homo sapien
tgtaggcacagatggacacccaact

SEQ ID NO: 2579199 - DNA, 25 bp, Homo sapien
tacctaacagccgatgcagggtggt

SEQ ID NO: 2579200 - DNA, 25 bp, Homo sapien
aatatcagcaggagtgttgggcgcc

SEQ ID NO: 2579201 - DNA, 25 bp, Homo sapien
caggagcccgtctggttgaagagca

SEQ ID NO: 2579202 - DNA, 25 bp, Homo sapien
ctttcacagagttccaggtaaggct

SEQ ID NO: 2579203 - DNA, 25 bp, Homo sapien
tagtgtctgatctcctaaccaccgc

SEQ ID NO: 2579204 - DNA, 25 bp, Homo sapien
cagtcctgtccacggcggtgtggca

SEQ ID NO: 2579205 - DNA, 25 bp, Homo sapien
cttccacaggtctatccacacagtt

SEQ ID NO: 2579206 - DNA, 25 bp, Homo sapien
cacaggtctatccacacagttagga

SEQ ID NO: 2579207 - DNA, 25 bp, Homo sapien
cacagttaggatcagggtcactgct

SEQ ID NO: 2579208 - DNA, 25 bp, Homo sapien
tatccacacagttaggatcagggtc

SEQ ID NO: 2579209 - DNA, 25 bp, Homo sapien
gcctgcagtgtacacatatcctcca

SEQ ID NO: 2579210 - DNA, 25 bp, Homo sapien
cagtgtacacatatcctccatccaa

SEQ ID NO: 2579211 - DNA, 25 bp, Homo sapien
aaaccacatttgcctgcagtgtaca

SEQ ID NO: 2579212 - DNA, 25 bp, Homo sapien
tgtacacatatcctccatccaaact

SEQ ID NO: 2579213 - DNA, 25 bp, Homo sapien
tccactggttacacttgcgcagctc

SEQ ID NO: 2579214 - DNA, 25 bp, Homo sapien
tcaagccactccactggttacactt

SEQ ID NO: 2579215 - DNA, 25 bp, Homo sapien
aggtcacgctgccttcgctcaagcc

SEQ ID NO: 2579216 - DNA, 25 bp, Homo sapien
cactccactggttacacttgcgcag

SEQ ID NO: 2579217 - DNA, 25 bp, Homo sapien
cttgaacagcagatctttctgccca

SEQ ID NO: 2579218 - DNA, 25 bp, Homo sapien
gaatttcggtgacttgtcctttcca

SEQ ID NO: 2579219 - DNA, 25 bp, Homo sapien
gtgaagtagccggagccaaggtaca

SEQ ID NO: 2579220 - DNA, 25 bp, Homo sapien
tcgaaaacccaatggcagagtcctt

SEQ ID NO: 2579221 - DNA, 25 bp, Homo sapien
tgccacaacggcatgagaagggacc

SEQ ID NO: 2579222 - DNA, 25 bp, Homo sapien
tgtgcctggcggagaagattccaga

SEQ ID NO: 2579223 - DNA, 25 bp, Homo sapien
tgaacttgtccactggcttccgagt

SEQ ID NO: 2579224 - DNA, 25 bp, Homo sapien
ttccgagtgttgtctgggcagagta

SEQ ID NO: 2579225 - DNA, 25 bp, Homo sapien
aacactgtgctctctctgataaaag

SEQ ID NO: 2579226 - DNA, 25 bp, Homo sapien
ctctgataaaagccacgtctccagc

SEQ ID NO: 2579227 - DNA, 25 bp, Homo sapien
tctctgataaaagccacgtctccag

SEQ ID NO: 2579228 - DNA, 25 bp, Homo sapien
tctgataaaagccacgtctccagcc

SEQ ID NO: 2579229 - DNA, 25 bp, Homo sapien
cagcagaagccctccaaggagatca

SEQ ID NO: 2579230 - DNA, 25 bp, Homo sapien
cgggatgacggtgaagtgggatgag

SEQ ID NO: 2579231 - DNA, 25 bp, Homo sapien
ctcctcgggccagacggtccagttt

SEQ ID NO: 2579232 - DNA, 25 bp, Homo sapien
cctcgggccagacggtccagtttgg

SEQ ID NO: 2579233 - DNA, 25 bp, Homo sapien
caagaatgtacaacacagtcctggt

SEQ ID NO: 2579234 - DNA, 25 bp, Homo sapien
tcctggtcagagtcatgtcttgcaa

SEQ ID NO: 2579235 - DNA, 25 bp, Homo sapien
tgcaactcatatagatccctcaggg

SEQ ID NO: 2579236 - DNA, 25 bp, Homo sapien
tagctgatcaatcacacaaatagtg

SEQ ID NO: 2579237 - DNA, 25 bp, Homo sapien
gcaatgtcaccagggtgttgaagca

SEQ ID NO: 2579238 - DNA, 25 bp, Homo sapien
agatgacattgttctgcaaacaggc

SEQ ID NO: 2579239 - DNA, 25 bp, Homo sapien
gctgatcagctgattttggaagaag

SEQ ID NO: 2579240 - DNA, 25 bp, Homo sapien
aacaggcaaatcagactgtgctctt

SEQ ID NO: 2579241 - DNA, 25 bp, Homo sapien
gactgtgctctttgtctgtcctggc

SEQ ID NO: 2579242 - DNA, 25 bp, Homo sapien
gatcttcctatatccattgagtgtg

SEQ ID NO: 2579243 - DNA, 25 bp, Homo sapien
cctagatcttcctatatccattgag

SEQ ID NO: 2579244 - DNA, 25 bp, Homo sapien
tgggtaatcctagatcttcctatat

SEQ ID NO: 2579245 - DNA, 25 bp, Homo sapien
tatccattgagtgtgatggagttgg

SEQ ID NO: 2579246 - DNA, 25 bp, Homo sapien
tggtttggtagtgttccctgatccg

SEQ ID NO: 2579247 - DNA, 25 bp, Homo sapien
ctgatccggagccagttttgtggga

SEQ ID NO: 2579248 - DNA, 25 bp, Homo sapien
gtgttccctgatccggagccagttt

SEQ ID NO: 2579249 - DNA, 25 bp, Homo sapien
tgctgttggtttggtagtgttccct

SEQ ID NO: 2579250 - DNA, 25 bp, Homo sapien
ctttaccggtttgtacatgttccat

SEQ ID NO: 2579251 - DNA, 25 bp, Homo sapien
tctttaccggtttgtacatgttcca

SEQ ID NO: 2579252 - DNA, 25 bp, Homo sapien
taatggtatcagacttaaagaagga

SEQ ID NO: 2579253 - DNA, 25 bp, Homo sapien
atggtatcagacttaaagaaggaaa

SEQ ID NO: 2579254 - DNA, 25 bp, Homo sapien
ctgtgttaatggtatcagacttaaa

SEQ ID NO: 2579255 - DNA, 25 bp, Homo sapien
gtgttaatggtatcagacttaaaga

SEQ ID NO: 2579256 - DNA, 25 bp, Homo sapien
gatgcagatctggccccagtgtgag

SEQ ID NO: 2579257 - DNA, 25 bp, Homo sapien
gcagatctggccccagtgtgagcat

SEQ ID NO: 2579258 - DNA, 25 bp, Homo sapien
cagatgcagatctggccccagtgtg

SEQ ID NO: 2579259 - DNA, 25 bp, Homo sapien
tgcagatctggccccagtgtgagca

SEQ ID NO: 2579260 - DNA, 25 bp, Homo sapien
gggtgggtctgggtaccaggtgtca

SEQ ID NO: 2579261 - DNA, 25 bp, Homo sapien
attcaaccctcccagggtcaatggg

SEQ ID NO: 2579262 - DNA, 25 bp, Homo sapien
gggtctgggtaccaggtgtcattcc

SEQ ID NO: 2579263 - DNA, 25 bp, Homo sapien
tgggtctgggtaccaggtgtcattc

SEQ ID NO: 2579264 - DNA, 25 bp, Homo sapien
ctgggctccaagttgtgtgacaaaa

SEQ ID NO: 2579265 - DNA, 25 bp, Homo sapien
gttgtgtgacaaaaattggtaacac

SEQ ID NO: 2579266 - DNA, 25 bp, Homo sapien
ccaagttgtgtgacaaaaattggta

SEQ ID NO: 2579267 - DNA, 25 bp, Homo sapien
gctccaagttgtgtgacaaaaattg

SEQ ID NO: 2579268 - DNA, 25 bp, Homo sapien
tggtcactgcaaagtcgtcatctgt

SEQ ID NO: 2579269 - DNA, 25 bp, Homo sapien
cctcgatggcatgtgtgctcctttg

SEQ ID NO: 2579270 - DNA, 25 bp, Homo sapien
ctggattagcccctgcctgactggt

SEQ ID NO: 2579271 - DNA, 25 bp, Homo sapien
gatgcctcccgggaacaaggaatgg

SEQ ID NO: 2579272 - DNA, 25 bp, Homo sapien
ttcttctaagactatccaatgtgtc

SEQ ID NO: 2579273 - DNA, 25 bp, Homo sapien
tcacatgtatcaccaaattcgaggc

SEQ ID NO: 2579274 - DNA, 25 bp, Homo sapien
ccaatgtgtctcaatctattccata

SEQ ID NO: 2579275 - DNA, 25 bp, Homo sapien
aaagttgggattctctacatagaac

SEQ ID NO: 2579276 - DNA, 25 bp, Homo sapien
ggagattccgtagatgcaacccaca

SEQ ID NO: 2579277 - DNA, 25 bp, Homo sapien
acttctctacatccattgatggaga

SEQ ID NO: 2579278 - DNA, 25 bp, Homo sapien
ggagcatgtagccaccacctattgc

SEQ ID NO: 2579279 - DNA, 25 bp, Homo sapien
tctttaagcagggttctgctcatcc

SEQ ID NO: 2579280 - DNA, 25 bp, Homo sapien
ggtttccataatcttaaacacaata

SEQ ID NO: 2579281 - DNA, 25 bp, Homo sapien
ggatgaaggatcttccaccttaggc

SEQ ID NO: 2579282 - DNA, 25 bp, Homo sapien
gggctgttccttcacctcaggtaga

SEQ ID NO: 2579283 - DNA, 25 bp, Homo sapien
ccttgagtaagcacaggtatgggct

SEQ ID NO: 2579284 - DNA, 25 bp, Homo sapien
ctcgggtcccacaaccacaatggca

SEQ ID NO: 2579285 - DNA, 25 bp, Homo sapien
acatgcactatacctcgggtcccac

SEQ ID NO: 2579286 - DNA, 25 bp, Homo sapien
gcacatgcactatacctcgggtccc

SEQ ID NO: 2579287 - DNA, 25 bp, Homo sapien
atgcactatacctcgggtcccacaa

SEQ ID NO: 2579288 - DNA, 25 bp, Homo sapien
tgcagattctggattctgcttcata

SEQ ID NO: 2579289 - DNA, 25 bp, Homo sapien
gattctgcttcatacactttaagag

SEQ ID NO: 2579290 - DNA, 25 bp, Homo sapien
gattctggattctgcttcatacact

SEQ ID NO: 2579291 - DNA, 25 bp, Homo sapien
cactttaagagttccatattggtcc

SEQ ID NO: 2579292 - DNA, 25 bp, Homo sapien
ggtagaacacttcatagcagaaggt

SEQ ID NO: 2579293 - DNA, 25 bp, Homo sapien
tgtcatccgcaggaaagcatgtggt

SEQ ID NO: 2579294 - DNA, 25 bp, Homo sapien
tagtccatcgttgccggcaagtacc

SEQ ID NO: 2579295 - DNA, 25 bp, Homo sapien
gcagaaggtcttatactacacaggt

SEQ ID NO: 2579296 - DNA, 25 bp, Homo sapien
tctgtgaagagtgatggttatcttg

SEQ ID NO: 2579297 - DNA, 25 bp, Homo sapien
tgtgaagagtgatggttatcttgct

SEQ ID NO: 2579298 - DNA, 25 bp, Homo sapien
tgaagagtgatggttatcttgcttt

SEQ ID NO: 2579299 - DNA, 25 bp, Homo sapien
gaagagtgatggttatcttgctttt

SEQ ID NO: 2579300 - DNA, 25 bp, Homo sapien
gatgagaagggtaccactagcatct

SEQ ID NO: 2579301 - DNA, 25 bp, Homo sapien
gaaccctgtgttgaacactttgcaa

SEQ ID NO: 2579302 - DNA, 25 bp, Homo sapien
tttacaggtgaagaaccgacagctt

SEQ ID NO: 2579303 - DNA, 25 bp, Homo sapien
taatcctttacaacagtcctgcaag

SEQ ID NO: 2579304 - DNA, 25 bp, Homo sapien
tgtaagaattaaccagaaccacaga

SEQ ID NO: 2579305 - DNA, 25 bp, Homo sapien
gtaagaattaaccagaaccacagaa

SEQ ID NO: 2579306 - DNA, 25 bp, Homo sapien
ctgtaagaattaaccagaaccacag

SEQ ID NO: 2579307 - DNA, 25 bp, Homo sapien
gctggcaggctgttagcggtctcct

SEQ ID NO: 2579308 - DNA, 25 bp, Homo sapien
ggcaggctgttagcggtctcctgct

SEQ ID NO: 2579309 - DNA, 25 bp, Homo sapien
gctgagggatctccggcaggggcat

SEQ ID NO: 2579310 - DNA, 25 bp, Homo sapien
gggctggcaggctgttagcggtctc

SEQ ID NO: 2579311 - DNA, 25 bp, Homo sapien
cccaggcctccagcgatgaccactg

SEQ ID NO: 2579312 - DNA, 25 bp, Homo sapien
ctgagatggtgggaccttgactcac

SEQ ID NO: 2579313 - DNA, 25 bp, Homo sapien
cgatgaccactgagatggtgggacc

SEQ ID NO: 2579314 - DNA, 25 bp, Homo sapien
ggcctccagcgatgaccactgagat

SEQ ID NO: 2579315 - DNA, 25 bp, Homo sapien
tgggatccatttcccaggacctggg

SEQ ID NO: 2579316 - DNA, 25 bp, Homo sapien
ggacctggggctcgccttctcaaac

SEQ ID NO: 2579317 - DNA, 25 bp, Homo sapien
tagcaagccggctgcttgcgagctg

SEQ ID NO: 2579318 - DNA, 25 bp, Homo sapien
agatgggatccatttcccaggacct

SEQ ID NO: 2579319 - DNA, 25 bp, Homo sapien
tcaggaatcgtacatttctgctgta

SEQ ID NO: 2579320 - DNA, 25 bp, Homo sapien
ttcaggaatcgtacatttctgctgt

SEQ ID NO: 2579321 - DNA, 25 bp, Homo sapien
aaattccattgagagctgaccccat

SEQ ID NO: 2579322 - DNA, 25 bp, Homo sapien
cttccaaaattccattgagagctga

SEQ ID NO: 2579323 - DNA, 25 bp, Homo sapien
caaaattccattgagagctgacccc

SEQ ID NO: 2579324 - DNA, 25 bp, Homo sapien
tccaaaattccattgagagctgacc

SEQ ID NO: 2579325 - DNA, 25 bp, Homo sapien
ttggcaatggtggaggcccactgtc

SEQ ID NO: 2579326 - DNA, 25 bp, Homo sapien
gatgttggcaatggtggaggcccac

SEQ ID NO: 2579327 - DNA, 25 bp, Homo sapien
atggtggaggcccactgtcaggagg

SEQ ID NO: 2579328 - DNA, 25 bp, Homo sapien
gagggaggatgttggcaatggtgga

SEQ ID NO: 2579329 - DNA, 25 bp, Homo sapien
ttttccggggctcagcggcacagct

SEQ ID NO: 2579330 - DNA, 25 bp, Homo sapien
gcggcacagcttcctcataataacc

SEQ ID NO: 2579331 - DNA, 25 bp, Homo sapien
tgatgtattccggagcttttccggg

SEQ ID NO: 2579332 - DNA, 25 bp, Homo sapien
ttgatgtgatgtattccggagcttt

SEQ ID NO: 2579333 - DNA, 25 bp, Homo sapien
ccacagcaataagctttcactacct

SEQ ID NO: 2579334 - DNA, 25 bp, Homo sapien
agccatttctcttccgcactgctga

SEQ ID NO: 2579335 - DNA, 25 bp, Homo sapien
gccatttctcttccgcactgctgat

SEQ ID NO: 2579336 - DNA, 25 bp, Homo sapien
agagccaagggcatccgcatcttgt

SEQ ID NO: 2579337 - DNA, 25 bp, Homo sapien
gctgcaggctctcccgcttcggtgt

SEQ ID NO: 2579338 - DNA, 25 bp, Homo sapien
gcttcggtgttttgtacaactccag

SEQ ID NO: 2579339 - DNA, 25 bp, Homo sapien
atcttgtgcgggtcacttgtgtcac

SEQ ID NO: 2579340 - DNA, 25 bp, Homo sapien
catggtctggctacaggagaaactg

SEQ ID NO: 2579341 - DNA, 25 bp, Homo sapien
tatgtcaccgtagctaactggaacg

SEQ ID NO: 2579342 - DNA, 25 bp, Homo sapien
taactggaacgccacttccattgct

SEQ ID NO: 2579343 - DNA, 25 bp, Homo sapien
cattgctctgcatggtctggctaca

SEQ ID NO: 2579344 - DNA, 25 bp, Homo sapien
agaaatgccatttcaaccaatcccc

SEQ ID NO: 2579345 - DNA, 25 bp, Homo sapien
acaccccataacatcagaaatgcca

SEQ ID NO: 2579346 - DNA, 25 bp, Homo sapien
ccataacatcagaaatgccatttca

SEQ ID NO: 2579347 - DNA, 25 bp, Homo sapien
tcagaaatgccatttcaaccaatcc

SEQ ID NO: 2579348 - DNA, 25 bp, Homo sapien
ccgacactgactcctcgccacattc

SEQ ID NO: 2579349 - DNA, 25 bp, Homo sapien
cacattcttgcaggacgagcgccat

SEQ ID NO: 2579350 - DNA, 25 bp, Homo sapien
tgactcctcgccacattcttgcagg

SEQ ID NO: 2579351 - DNA, 25 bp, Homo sapien
ccacattcttgcaggacgagcgcca

SEQ ID NO: 2579352 - DNA, 25 bp, Homo sapien
gcagattttggcgtccttgaccagg

SEQ ID NO: 2579353 - DNA, 25 bp, Homo sapien
ccgcagcaggaaggcgcagattttg

SEQ ID NO: 2579354 - DNA, 25 bp, Homo sapien
tacgactcataagagctgctcatcg

SEQ ID NO: 2579355 - DNA, 25 bp, Homo sapien
tctttgatgacgcagagcaacttgg

SEQ ID NO: 2579356 - DNA, 25 bp, Homo sapien
gcagcaatcttacaaaaaatgcaag

SEQ ID NO: 2579357 - DNA, 25 bp, Homo sapien
tataaacgccatggcttctgagtgc

SEQ ID NO: 2579358 - DNA, 25 bp, Homo sapien
ttaatggtgactggatataaacgcc

SEQ ID NO: 2579359 - DNA, 25 bp, Homo sapien
aatgcaagcgattccaaatgtctta

SEQ ID NO: 2579360 - DNA, 25 bp, Homo sapien
taattttgagcaatgattcccccaa

SEQ ID NO: 2579361 - DNA, 25 bp, Homo sapien
aattttgagcaatgattcccccaag

SEQ ID NO: 2579362 - DNA, 25 bp, Homo sapien
ttgagcaatgattcccccaaggtta

SEQ ID NO: 2579363 - DNA, 25 bp, Homo sapien
ttttgagcaatgattcccccaaggt

SEQ ID NO: 2579364 - DNA, 25 bp, Homo sapien
gaagcgggaatctaggtacatcaca

SEQ ID NO: 2579365 - DNA, 25 bp, Homo sapien
tcttcaatgcagacagtccccgagg

SEQ ID NO: 2579366 - DNA, 25 bp, Homo sapien
tcagggataccaccatgagagctct

SEQ ID NO: 2579367 - DNA, 25 bp, Homo sapien
gaatgggcgtcctgaagacaacacc

SEQ ID NO: 2579368 - DNA, 25 bp, Homo sapien
taatgttacagccttggagtggcag

SEQ ID NO: 2579369 - DNA, 25 bp, Homo sapien
gctgtctttcgggatgtacgtaatg

SEQ ID NO: 2579370 - DNA, 25 bp, Homo sapien
tgagtaatcttcagctcgtgcttct

SEQ ID NO: 2579371 - DNA, 25 bp, Homo sapien
tccttgctctggacggcgagaacaa

SEQ ID NO: 2579372 - DNA, 25 bp, Homo sapien
ttgcggttacacattcagagtcggg

SEQ ID NO: 2579373 - DNA, 25 bp, Homo sapien
taaaggcccctgattctaggccaca

SEQ ID NO: 2579374 - DNA, 25 bp, Homo sapien
tctgtacaagggatctaaaggcccc

SEQ ID NO: 2579375 - DNA, 25 bp, Homo sapien
ctttagcagtaaggcagggagtgca

SEQ ID NO: 2579376 - DNA, 25 bp, Homo sapien
cgaggatcatcagaggcttgtcggt

SEQ ID NO: 2579377 - DNA, 25 bp, Homo sapien
ctctaaaaacgaggatcatcagagg

SEQ ID NO: 2579378 - DNA, 25 bp, Homo sapien
taaaaacgaggatcatcagaggctt

SEQ ID NO: 2579379 - DNA, 25 bp, Homo sapien
aggcttgtcggtcagttctttaaat

SEQ ID NO: 2579380 - DNA, 25 bp, Homo sapien
cattatgattcacctaaacgcacca

SEQ ID NO: 2579381 - DNA, 25 bp, Homo sapien
tcaggaatgctttgtttcaacacaa

SEQ ID NO: 2579382 - DNA, 25 bp, Homo sapien
gttatttaatctacagaaaggacat

SEQ ID NO: 2579383 - DNA, 25 bp, Homo sapien
cgcccagccccataaagaacaatta

SEQ ID NO: 2579384 - DNA, 25 bp, Homo sapien
cacagcccaaagactggccagaggg

SEQ ID NO: 2579385 - DNA, 25 bp, Homo sapien
gtctgcacagcccaaagactggcca

SEQ ID NO: 2579386 - DNA, 25 bp, Homo sapien
ctctcccgtctgcacagcccaaaga

SEQ ID NO: 2579387 - DNA, 25 bp, Homo sapien
tgcacagcccaaagactggccagag

SEQ ID NO: 2579388 - DNA, 25 bp, Homo sapien
cagggcaagtgcaagtacacgggtg

SEQ ID NO: 2579389 - DNA, 25 bp, Homo sapien
gaaaatatagaaatgcagcaaccag

SEQ ID NO: 2579390 - DNA, 25 bp, Homo sapien
caagtgcaagtacacgggtgcaaag

SEQ ID NO: 2579391 - DNA, 25 bp, Homo sapien
caagtacacgggtgcaaaggacaga

SEQ ID NO: 2579392 - DNA, 25 bp, Homo sapien
gattccaagacagtcaatcagatct

SEQ ID NO: 2579393 - DNA, 25 bp, Homo sapien
cttttgcctgaagactaagaaacag

SEQ ID NO: 2579394 - DNA, 25 bp, Homo sapien
gattcggttgggatggtctcttgaa

SEQ ID NO: 2579395 - DNA, 25 bp, Homo sapien
attggacggccggattccaagacag

SEQ ID NO: 2579396 - DNA, 25 bp, Homo sapien
ggaagagtattattagacccagtga

SEQ ID NO: 2579397 - DNA, 25 bp, Homo sapien
gatcattggatatagtattctgacc

SEQ ID NO: 2579398 - DNA, 25 bp, Homo sapien
tgagtcttactcgaagcatttcatg

SEQ ID NO: 2579399 - DNA, 25 bp, Homo sapien
gattcaggcgtcttcttcttaacaa

SEQ ID NO: 2579400 - DNA, 25 bp, Homo sapien
tttctccctgacagttgaggttaga

SEQ ID NO: 2579401 - DNA, 25 bp, Homo sapien
gaggttagatattcatggtccagga

SEQ ID NO: 2579402 - DNA, 25 bp, Homo sapien
ctttggatgactgtattcttagcag

SEQ ID NO: 2579403 - DNA, 25 bp, Homo sapien
gcagaatgttggttatcactgcctt

SEQ ID NO: 2579404 - DNA, 25 bp, Homo sapien
cagtgcgtcctgcacacgaggaaga

SEQ ID NO: 2579405 - DNA, 25 bp, Homo sapien
tggaggctaacacagaacttggcac

SEQ ID NO: 2579406 - DNA, 25 bp, Homo sapien
cagacgctggcatatgggttcctcc

SEQ ID NO: 2579407 - DNA, 25 bp, Homo sapien
aacctgatgccaagtcccgtgagtc

SEQ ID NO: 2579408 - DNA, 25 bp, Homo sapien
gatgagaagggtaccactagcatct

SEQ ID NO: 2579409 - DNA, 25 bp, Homo sapien
gaaccctgtgttgaacactttgcaa

SEQ ID NO: 2579410 - DNA, 25 bp, Homo sapien
taatcctttacaacagtcctgcaag

SEQ ID NO: 2579411 - DNA, 25 bp, Homo sapien
tttacaggtgaagaaccgacagctt

SEQ ID NO: 2579412 - DNA, 25 bp, Homo sapien
gctggcaggctgttagcggtctcct

SEQ ID NO: 2579413 - DNA, 25 bp, Homo sapien
gctgagggatctccggcaggggcat

SEQ ID NO: 2579414 - DNA, 25 bp, Homo sapien
ggcaggctgttagcggtctcctgct

SEQ ID NO: 2579415 - DNA, 25 bp, Homo sapien
gggctggcaggctgttagcggtctc

SEQ ID NO: 2579416 - DNA, 25 bp, Homo sapien
cccaggcctccagcgatgaccactg

SEQ ID NO: 2579417 - DNA, 25 bp, Homo sapien
ggcctccagcgatgaccactgagat

SEQ ID NO: 2579418 - DNA, 25 bp, Homo sapien
ctgagatggtgggaccttgactcac

SEQ ID NO: 2579419 - DNA, 25 bp, Homo sapien
cgatgaccactgagatggtgggacc

SEQ ID NO: 2579420 - DNA, 25 bp, Homo sapien
ctcgtgatctgccgtcctcggcctc

SEQ ID NO: 2579421 - DNA, 25 bp, Homo sapien
tcgtgatctgccgtcctcggcctcc

SEQ ID NO: 2579422 - DNA, 25 bp, Homo sapien
cgtgatctgccgtcctcggcctccg

SEQ ID NO: 2579423 - DNA, 25 bp, Homo sapien
agagcagtcaaacaaagcagtggga

SEQ ID NO: 2579424 - DNA, 25 bp, Homo sapien
aagagcagtcaaacaaagcagtggg

SEQ ID NO: 2579425 - DNA, 25 bp, Homo sapien
gtgaacagttagttatcaacagcac

SEQ ID NO: 2579426 - DNA, 25 bp, Homo sapien
cagttagttatcaacagcactgcat

SEQ ID NO: 2579427 - DNA, 25 bp, Homo sapien
tgtctcctgggtcccggttcaagca

SEQ ID NO: 2579428 - DNA, 25 bp, Homo sapien
attctcttgcctctcagcttcccga

SEQ ID NO: 2579429 - DNA, 25 bp, Homo sapien
ttctcttgcctctcagcttcccgag

SEQ ID NO: 2579430 - DNA, 25 bp, Homo sapien
ctctgtctcctgggtcccggttcaa

SEQ ID NO: 2579431 - DNA, 25 bp, Homo sapien
tacataagcctgcaggtacccaaat

SEQ ID NO: 2579432 - DNA, 25 bp, Homo sapien
ttctctgttgtttgacacatacata

SEQ ID NO: 2579433 - DNA, 25 bp, Homo sapien
gattttataataactgcagacatat

SEQ ID NO: 2579434 - DNA, 25 bp, Homo sapien
tatcaaacaactcttacactgtaca

SEQ ID NO: 2579435 - DNA, 25 bp, Homo sapien
gatgggtccggttgcctcaaaagag

SEQ ID NO: 2579436 - DNA, 25 bp, Homo sapien
gaacagcttgtttaccgcccagtgg

SEQ ID NO: 2579437 - DNA, 25 bp, Homo sapien
tcactacattgggtggaaggagcat

SEQ ID NO: 2579438 - DNA, 25 bp, Homo sapien
tacaagtaggctgcggtcaatcctc

SEQ ID NO: 2579439 - DNA, 25 bp, Homo sapien
cttgtgttgtctttgcagtagacag

SEQ ID NO: 2579440 - DNA, 25 bp, Homo sapien
gtagacagtgcccaggcgtcctgtg

SEQ ID NO: 2579441 - DNA, 25 bp, Homo sapien
gcgtcctgtgctctcgttcactgct

SEQ ID NO: 2579442 - DNA, 25 bp, Homo sapien
tttgcagtagacagtgcccaggcgt

SEQ ID NO: 2579443 - DNA, 25 bp, Homo sapien
actgcgcccggtccagattcttgtg

SEQ ID NO: 2579444 - DNA, 25 bp, Homo sapien
gattcttgtgtagagccagctgatc

SEQ ID NO: 2579445 - DNA, 25 bp, Homo sapien
gtagagccagctgatcggaaaccca

SEQ ID NO: 2579446 - DNA, 25 bp, Homo sapien
agctgatcggaaacccacgtgaggg

SEQ ID NO: 2579447 - DNA, 25 bp, Homo sapien
tccagcacgtcctgttttcctgttg

SEQ ID NO: 2579448 - DNA, 25 bp, Homo sapien
tgttgccctccagcacgtcctgttt

SEQ ID NO: 2579449 - DNA, 25 bp, Homo sapien
gggtgtggctgttgccctccagcac

SEQ ID NO: 2579450 - DNA, 25 bp, Homo sapien
tgtgcctctgcaggggtgtggctgt

SEQ ID NO: 2579451 - DNA, 25 bp, Homo sapien
tctcagaaactctaggatgtaagga

SEQ ID NO: 2579452 - DNA, 25 bp, Homo sapien
gtagtggttcatccctataatcgca

SEQ ID NO: 2579453 - DNA, 25 bp, Homo sapien
aaatttcgacgactgctcttcaccc

SEQ ID NO: 2579454 - DNA, 25 bp, Homo sapien
tgagcttcggagttaaacactgcag

SEQ ID NO: 2579455 - DNA, 25 bp, Homo sapien
gagaccatgcgctgtccccatggga

SEQ ID NO: 2579456 - DNA, 25 bp, Homo sapien
ctttgcctgattcgcccctttctga

SEQ ID NO: 2579457 - DNA, 25 bp, Homo sapien
ttcaccgtccgaggccaggctgtac

SEQ ID NO: 2579458 - DNA, 25 bp, Homo sapien
atgggaagcatttcttcaccgtccg

SEQ ID NO: 2579459 - DNA, 25 bp, Homo sapien
acctgcttgtgtagtgcggcctgcg

SEQ ID NO: 2579460 - DNA, 25 bp, Homo sapien
tgttccactgctgttgcggtgcctg

SEQ ID NO: 2579461 - DNA, 25 bp, Homo sapien
tcttgagctttctttgacggcccct

SEQ ID NO: 2579462 - DNA, 25 bp, Homo sapien
cgtgagcaccaggacgtcttgagct

SEQ ID NO: 2579463 - DNA, 25 bp, Homo sapien
cgtcaggctttcaagtacctgggac

SEQ ID NO: 2579464 - DNA, 25 bp, Homo sapien
cacgtcaggctttcaagtacctggg

SEQ ID NO: 2579465 - DNA, 25 bp, Homo sapien
ccacgtcaggctttcaagtacctgg

SEQ ID NO: 2579466 - DNA, 25 bp, Homo sapien
tcccacgtcaggctttcaagtacct

SEQ ID NO: 2579467 - DNA, 25 bp, Homo sapien
gctgtaatgcgcgatgataggacct

SEQ ID NO: 2579468 - DNA, 25 bp, Homo sapien
gcgatgataggacctgtgaatagcc

SEQ ID NO: 2579469 - DNA, 25 bp, Homo sapien
ggtatggtgttgtatgctgtagctc

SEQ ID NO: 2579470 - DNA, 25 bp, Homo sapien
tggtgttgtatgctgtagctccagc

SEQ ID NO: 2579471 - DNA, 25 bp, Homo sapien
gcaaggcaaccttggagtcagtcca

SEQ ID NO: 2579472 - DNA, 25 bp, Homo sapien
ttctgggcatcacggcaatgtcacg

SEQ ID NO: 2579473 - DNA, 25 bp, Homo sapien
caatgtcacgatgcccagacttgga

SEQ ID NO: 2579474 - DNA, 25 bp, Homo sapien
cagcacagaattcactttagacggg

SEQ ID NO: 2579475 - DNA, 25 bp, Homo sapien
gcaataaaggccattcgttacctac

SEQ ID NO: 2579476 - DNA, 25 bp, Homo sapien
gataaaatccatcccgtgtttgcca

SEQ ID NO: 2579477 - DNA, 25 bp, Homo sapien
catgcaagataaatagggcaggcac

SEQ ID NO: 2579478 - DNA, 25 bp, Homo sapien
gcagcccacaagatgtagcactatt

SEQ ID NO: 2579479 - DNA, 25 bp, Homo sapien
gacgaataaatggtaaaggcatata

SEQ ID NO: 2579480 - DNA, 25 bp, Homo sapien
atggtcatcgaatgttgacgaataa

SEQ ID NO: 2579481 - DNA, 25 bp, Homo sapien
catcgaatgttgacgaataaatggt

SEQ ID NO: 2579482 - DNA, 25 bp, Homo sapien
tgttgacgaataaatggtaaaggca

SEQ ID NO: 2579483 - DNA, 25 bp, Homo sapien
cgacattcagcatttcttgatgcat

SEQ ID NO: 2579484 - DNA, 25 bp, Homo sapien
aattgtaaacgacattcagcatttc

SEQ ID NO: 2579485 - DNA, 25 bp, Homo sapien
cttgataattgtaaacgacattcag

SEQ ID NO: 2579486 - DNA, 25 bp, Homo sapien
gataattgtaaacgacattcagcat

SEQ ID NO: 2579487 - DNA, 25 bp, Homo sapien
gaacagtgtctgcacttcagcgagg

SEQ ID NO: 2579488 - DNA, 25 bp, Homo sapien
tctgtcaaggccacgccgtgggact

SEQ ID NO: 2579489 - DNA, 25 bp, Homo sapien
ccaccagagggtgcctctgtcaagg

SEQ ID NO: 2579490 - DNA, 25 bp, Homo sapien
catatctgtcttcgccaaaaatggg

SEQ ID NO: 2579491 - DNA, 25 bp, Homo sapien
cccatcaacaagtggacgaaggata

SEQ ID NO: 2579492 - DNA, 25 bp, Homo sapien
caacaagtggacgaaggatatgaac

SEQ ID NO: 2579493 - DNA, 25 bp, Homo sapien
aacaagtggacgaaggatatgaaca

SEQ ID NO: 2579494 - DNA, 25 bp, Homo sapien
atcaacaagtggacgaaggatatga

SEQ ID NO: 2579495 - DNA, 25 bp, Homo sapien
gatgatcaaatgctgagacccttag

SEQ ID NO: 2579496 - DNA, 25 bp, Homo sapien
taccaaacccagtaataccagtcag

SEQ ID NO: 2579497 - DNA, 25 bp, Homo sapien
ggatatttgcctttgcttagagaaa

SEQ ID NO: 2579498 - DNA, 25 bp, Homo sapien
tcaggagttttccaccaatccccat

SEQ ID NO: 2579499 - DNA, 25 bp, Homo sapien
taatgcctttgctgcagaagggtaa

SEQ ID NO: 2579500 - DNA, 25 bp, Homo sapien
atttattaatatatgcttagcgctt

SEQ ID NO: 2579501 - DNA, 25 bp, Homo sapien
gctgggaagcttgtgcatacagaaa

SEQ ID NO: 2579502 - DNA, 25 bp, Homo sapien
cctacactatttctagccacttgca

SEQ ID NO: 2579503 - DNA, 25 bp, Homo sapien
catgtcagcatcgtaggtcctataa

SEQ ID NO: 2579504 - DNA, 25 bp, Homo sapien
gaaacatggctccataggccattgg

SEQ ID NO: 2579505 - DNA, 25 bp, Homo sapien
tcttggaaatgccatgcgtcatgca

SEQ ID NO: 2579506 - DNA, 25 bp, Homo sapien
gaagtcaccgcccatagctgggttg

SEQ ID NO: 2579507 - DNA, 25 bp, Homo sapien
tgatgccaagtctggcaggggcatt

SEQ ID NO: 2579508 - DNA, 25 bp, Homo sapien
actcatgatgccaagtctggcaggg

SEQ ID NO: 2579509 - DNA, 25 bp, Homo sapien
tgaactcatgatgccaagtctggca

SEQ ID NO: 2579510 - DNA, 25 bp, Homo sapien
ctgaactcatgatgccaagtctggc

SEQ ID NO: 2579511 - DNA, 25 bp, Homo sapien
gctccaaaaggcacgtacaacattc

SEQ ID NO: 2579512 - DNA, 25 bp, Homo sapien
tccaaaaggcacgtacaacattcct

SEQ ID NO: 2579513 - DNA, 25 bp, Homo sapien
ccaaaaggcacgtacaacattcctg

SEQ ID NO: 2579514 - DNA, 25 bp, Homo sapien
ttgctccaaaaggcacgtacaacat

SEQ ID NO: 2579515 - DNA, 25 bp, Homo sapien
ttattttgtggcattggtccgtgag

SEQ ID NO: 2579516 - DNA, 25 bp, Homo sapien
tgagaaatcaaacgggctatttgga

SEQ ID NO: 2579517 - DNA, 25 bp, Homo sapien
cgtgagaaatcaaacgggctatttg

SEQ ID NO: 2579518 - DNA, 25 bp, Homo sapien
tttgtggcattggtccgtgagaaat

SEQ ID NO: 2579519 - DNA, 25 bp, Homo sapien
gtggatcagcaaaatccaatcctgg

SEQ ID NO: 2579520 - DNA, 25 bp, Homo sapien
aaccttgtggatcagcaaaatccaa

SEQ ID NO: 2579521 - DNA, 25 bp, Homo sapien
tggatcagcaaaatccaatcctggg

SEQ ID NO: 2579522 - DNA, 25 bp, Homo sapien
tgttgaaccttgtggatcagcaaaa

SEQ ID NO: 2579523 - DNA, 25 bp, Homo sapien
gatggaccttgtggatcaggaaaat

SEQ ID NO: 2579524 - DNA, 25 bp, Homo sapien
tggaccttgtggatcaggaaaatcc

SEQ ID NO: 2579525 - DNA, 25 bp, Homo sapien
gaccttgtggatcaggaaaatccat

SEQ ID NO: 2579526 - DNA, 25 bp, Homo sapien
tgatggaccttgtggatcaggaaaa

SEQ ID NO: 2579527 - DNA, 25 bp, Homo sapien
tgtggatcagcaaaatctactcctg

SEQ ID NO: 2579528 - DNA, 25 bp, Homo sapien
gatcagcaaaatctactcctgggag

SEQ ID NO: 2579529 - DNA, 25 bp, Homo sapien
tggatcagcaaaatctactcctggg

SEQ ID NO: 2579530 - DNA, 25 bp, Homo sapien
tgatggaccttgtggatcagcaaaa

SEQ ID NO: 2579531 - DNA, 25 bp, Homo sapien
tggcttatctgatggtgccacctgc

SEQ ID NO: 2579532 - DNA, 25 bp, Homo sapien
ggcagatgtcccaggtgaattggag

SEQ ID NO: 2579533 - DNA, 25 bp, Homo sapien
gactggagaaaaggtttcagtcctg

SEQ ID NO: 2579534 - DNA, 25 bp, Homo sapien
tgctgtggcctggttggtggttgca

SEQ ID NO: 2579535 - DNA, 25 bp, Homo sapien
gatgcacaggcaaagaatattcata

SEQ ID NO: 2579536 - DNA, 25 bp, Homo sapien
ggtgggggatgcacaggcaaagaat

SEQ ID NO: 2579537 - DNA, 25 bp, Homo sapien
gggatgcacaggcaaagaatattca

SEQ ID NO: 2579538 - DNA, 25 bp, Homo sapien
tgggggatgcacaggcaaagaatat

SEQ ID NO: 2579539 - DNA, 25 bp, Homo sapien
gaccgtgcatccacaaagaattaaa

SEQ ID NO: 2579540 - DNA, 25 bp, Homo sapien
catccatggaagagaggaatgtggt

SEQ ID NO: 2579541 - DNA, 25 bp, Homo sapien
gcctcatccatggaagagaggaatg

SEQ ID NO: 2579542 - DNA, 25 bp, Homo sapien
tgattttccaaagccgtatctagaa

SEQ ID NO: 2579543 - DNA, 25 bp, Homo sapien
gtgtttaatctctgcagacttccca

SEQ ID NO: 2579544 - DNA, 25 bp, Homo sapien
tgtgtttaatctctgcagacttccc

SEQ ID NO: 2579545 - DNA, 25 bp, Homo sapien
aaggctcaaactagccatacccggt

SEQ ID NO: 2579546 - DNA, 25 bp, Homo sapien
atacccggtgttccagattgctgag

SEQ ID NO: 2579547 - DNA, 25 bp, Homo sapien
gccatacccggtgttccagattgct

SEQ ID NO: 2579548 - DNA, 25 bp, Homo sapien
tcaaggctcaaactagccatacccg

SEQ ID NO: 2579549 - DNA, 25 bp, Homo sapien
tgagtcttattggtacaaaacttcc

SEQ ID NO: 2579550 - DNA, 25 bp, Homo sapien
tacatacgggctacctgagaggcca

SEQ ID NO: 2579551 - DNA, 25 bp, Homo sapien
ggatattgctccagtacatacgggc

SEQ ID NO: 2579552 - DNA, 25 bp, Homo sapien
tccttcaatgcccattgggcgtagg

SEQ ID NO: 2579553 - DNA, 25 bp, Homo sapien
cacttaccgcttttggattgcaaga

SEQ ID NO: 2579554 - DNA, 25 bp, Homo sapien
taaatcaagtgagtctatgcgtgga

SEQ ID NO: 2579555 - DNA, 25 bp, Homo sapien
tctgggacacactctaaagactgac

SEQ ID NO: 2579556 - DNA, 25 bp, Homo sapien
gactcaataggactaaaccactgga

SEQ ID NO: 2579557 - DNA, 25 bp, Homo sapien
ttccaggaggcataggatcagtatc

SEQ ID NO: 2579558 - DNA, 25 bp, Homo sapien
tcatttccaggaggcataggatcag

SEQ ID NO: 2579559 - DNA, 25 bp, Homo sapien
ccaggaggcataggatcagtatcag

SEQ ID NO: 2579560 - DNA, 25 bp, Homo sapien
gcaaaactcatttccaggaggcata

SEQ ID NO: 2579561 - DNA, 25 bp, Homo sapien
gctctcagggcctgatgatgccaac

SEQ ID NO: 2579562 - DNA, 25 bp, Homo sapien
tctcagggcctgatgatgccaacca

SEQ ID NO: 2579563 - DNA, 25 bp, Homo sapien
ctctcagggcctgatgatgccaacc

SEQ ID NO: 2579564 - DNA, 25 bp, Homo sapien
gctcaaaaggatcaaactccttgga

SEQ ID NO: 2579565 - DNA, 25 bp, Homo sapien
aggatcaaactccttggatacaaaa

SEQ ID NO: 2579566 - DNA, 25 bp, Homo sapien
aaaggatcaaactccttggatacaa

SEQ ID NO: 2579567 - DNA, 25 bp, Homo sapien
caaaaggatcaaactccttggatac

SEQ ID NO: 2579568 - DNA, 25 bp, Homo sapien
gagaacaggacattctttaaggccc

SEQ ID NO: 2579569 - DNA, 25 bp, Homo sapien
catgatggaagtggaccagtgataa

SEQ ID NO: 2579570 - DNA, 25 bp, Homo sapien
ccagtgataacaacctgccattagg

SEQ ID NO: 2579571 - DNA, 25 bp, Homo sapien
taggtgccagctgatatcccaggga

SEQ ID NO: 2579572 - DNA, 25 bp, Homo sapien
cagcccgcagtccattcaagagcca

SEQ ID NO: 2579573 - DNA, 25 bp, Homo sapien
gtaaccttaaggcagcccgcagtcc

SEQ ID NO: 2579574 - DNA, 25 bp, Homo sapien
aggtaaccttaaggcagcccgcagt

SEQ ID NO: 2579575 - DNA, 25 bp, Homo sapien
cgcagtccattcaagagccacccag

SEQ ID NO: 2579576 - DNA, 25 bp, Homo sapien
tgggagccaccttcacaattaacag

SEQ ID NO: 2579577 - DNA, 25 bp, Homo sapien
cttcacaattaacagggttttcaga

SEQ ID NO: 2579578 - DNA, 25 bp, Homo sapien
ggttttcagaatctcctttatctag

SEQ ID NO: 2579579 - DNA, 25 bp, Homo sapien
agccaccttcacaattaacagggtt

SEQ ID NO: 2579580 - DNA, 25 bp, Homo sapien
tgaccgtagtaatttattggagact

SEQ ID NO: 2579581 - DNA, 25 bp, Homo sapien
aatttattggagacttcttacgagc

SEQ ID NO: 2579582 - DNA, 25 bp, Homo sapien
tcttacgagctaaggactgtgctaa

SEQ ID NO: 2579583 - DNA, 25 bp, Homo sapien
tactgataatgaccgtagtaattta

SEQ ID NO: 2579584 - DNA, 25 bp, Homo sapien
cctctgatgatcctcgtttttagag

SEQ ID NO: 2579585 - DNA, 25 bp, Homo sapien
gatgatcctcgtttttagaggtgag

SEQ ID NO: 2579586 - DNA, 25 bp, Homo sapien
tctgatgatcctcgtttttagaggt

SEQ ID NO: 2579587 - DNA, 25 bp, Homo sapien
agcacagcactgtactcaaggccat

SEQ ID NO: 2579588 - DNA, 25 bp, Homo sapien
gagaccaacgatgttcttaatttgc

SEQ ID NO: 2579589 - DNA, 25 bp, Homo sapien
cgctgtgtccagatcgttctatcat

SEQ ID NO: 2579590 - DNA, 25 bp, Homo sapien
gtccagatcgttctatcatcacatc

SEQ ID NO: 2579591 - DNA, 25 bp, Homo sapien
gaagtctgtgttcattcgctgtgtc

SEQ ID NO: 2579592 - DNA, 25 bp, Homo sapien
cccctgtgatgggtcttatatttca

SEQ ID NO: 2579593 - DNA, 25 bp, Homo sapien
cccacctggcctcatttgctgtttt

SEQ ID NO: 2579594 - DNA, 25 bp, Homo sapien
tgttgctgtcttgcactccaggcct

SEQ ID NO: 2579595 - DNA, 25 bp, Homo sapien
tagatgggaaatcagcagttcttcc

SEQ ID NO: 2579596 - DNA, 25 bp, Homo sapien
gctgcatgccaagcttttgaacaaa

SEQ ID NO: 2579597 - DNA, 25 bp, Homo sapien
aaatatgtaggaacaggactctgac

SEQ ID NO: 2579598 - DNA, 25 bp, Homo sapien
tcaattcctgactagcaagccaggg

SEQ ID NO: 2579599 - DNA, 25 bp, Homo sapien
tgaatcacccgctcaggaagggcct

SEQ ID NO: 2579600 - DNA, 25 bp, Homo sapien
tctacacgactaggaaaaacatgtc

SEQ ID NO: 2579601 - DNA, 25 bp, Homo sapien
aatatgagatcatgcactggagaca

SEQ ID NO: 2579602 - DNA, 25 bp, Homo sapien
gaacagtggctagtttctacacgac

SEQ ID NO: 2579603 - DNA, 25 bp, Homo sapien
tattctccggaacaggccagtgtga

SEQ ID NO: 2579604 - DNA, 25 bp, Homo sapien
aacaaaaatgcttcgctaaaatctc

SEQ ID NO: 2579605 - DNA, 25 bp, Homo sapien
aatgcaactatttggcaatgccagt

SEQ ID NO: 2579606 - DNA, 25 bp, Homo sapien
tatacacagacacatttatgataaa

SEQ ID NO: 2579607 - DNA, 25 bp, Homo sapien
actatttggcaatgccagttctttc

SEQ ID NO: 2579608 - DNA, 25 bp, Homo sapien
cacagttttggctggcaagggtccc

SEQ ID NO: 2579609 - DNA, 25 bp, Homo sapien
ttcaccggaatctgcaggctgagcg

SEQ ID NO: 2579610 - DNA, 25 bp, Homo sapien
tgaaaatgcgtactggctgcccatg

SEQ ID NO: 2579611 - DNA, 25 bp, Homo sapien
ttgaagaaggctgcacactggagtg

SEQ ID NO: 2579612 - DNA, 25 bp, Homo sapien
catccagcactggtcagagtgtccc

SEQ ID NO: 2579613 - DNA, 25 bp, Homo sapien
cctgcactcctccgtgcagagtctc

SEQ ID NO: 2579614 - DNA, 25 bp, Homo sapien
ccctgcactcctccgtgcagagtct

SEQ ID NO: 2579615 - DNA, 25 bp, Homo sapien
accctgcactcctccgtgcagagtc

SEQ ID NO: 2579616 - DNA, 25 bp, Homo sapien
agaacagatgggctttcgtggatac

SEQ ID NO: 2579617 - DNA, 25 bp, Homo sapien
tggaagaaaggccagaacagatggg

SEQ ID NO: 2579618 - DNA, 25 bp, Homo sapien
aagaaaggccagaacagatgggctt

SEQ ID NO: 2579619 - DNA, 25 bp, Homo sapien
tcatggaagaaaggccagaacagat

SEQ ID NO: 2579620 - DNA, 25 bp, Homo sapien
tttgtgtgggaattaatagcatgaa

SEQ ID NO: 2579621 - DNA, 25 bp, Homo sapien
ggatatttgtgtgggaattaatagc

SEQ ID NO: 2579622 - DNA, 25 bp, Homo sapien
tgcaggatatttgtgtgggaattaa

SEQ ID NO: 2579623 - DNA, 25 bp, Homo sapien
aaatgcaggatatttgtgtgggaat

SEQ ID NO: 2579624 - DNA, 25 bp, Homo sapien
tcgttctcttccaaccgcttaatga

SEQ ID NO: 2579625 - DNA, 25 bp, Homo sapien
tctgttcattactaaacagtgatga

SEQ ID NO: 2579626 - DNA, 25 bp, Homo sapien
tccaaccgcttaatgaaatttaaga

SEQ ID NO: 2579627 - DNA, 25 bp, Homo sapien
ttctgttcattactaaacagtgatg

SEQ ID NO: 2579628 - DNA, 25 bp, Homo sapien
ggtgtcacggtagacctgaaaataa

SEQ ID NO: 2579629 - DNA, 25 bp, Homo sapien
cattttactggtgtcacggtagacc

SEQ ID NO: 2579630 - DNA, 25 bp, Homo sapien
tttactggtgtcacggtagacctga

SEQ ID NO: 2579631 - DNA, 25 bp, Homo sapien
tttcattttactggtgtcacggtag

SEQ ID NO: 2579632 - DNA, 25 bp, Homo sapien
tccatctgtgagaaacaggtcgctg

SEQ ID NO: 2579633 - DNA, 25 bp, Homo sapien
tcacccaacagcctatctattggag

SEQ ID NO: 2579634 - DNA, 25 bp, Homo sapien
agaatctcgccccaaatcataatca

SEQ ID NO: 2579635 - DNA, 25 bp, Homo sapien
gtcaccacggccactgtctttcaag

SEQ ID NO: 2579636 - DNA, 25 bp, Homo sapien
ttcctcgaaaacttggtcttggctg

SEQ ID NO: 2579637 - DNA, 25 bp, Homo sapien
ggtgaagcattgaaagaagctgaga

SEQ ID NO: 2579638 - DNA, 25 bp, Homo sapien
gaagcattgaaagaagctgagagac

SEQ ID NO: 2579639 - DNA, 25 bp, Homo sapien
tgaagcattgaaagaagctgagaga

SEQ ID NO: 2579640 - DNA, 25 bp, Homo sapien
ctggtgaagcattgaaagaagctga

SEQ ID NO: 2579641 - DNA, 25 bp, Homo sapien
cattattttaatctgggaagcaagg

SEQ ID NO: 2579642 - DNA, 25 bp, Homo sapien
tagacagaactgattcccggaaaca

SEQ ID NO: 2579643 - DNA, 25 bp, Homo sapien
aatgctggactgtggcggaccacgc

SEQ ID NO: 2579644 - DNA, 25 bp, Homo sapien
taattcagacaaagtgaccacctgt

SEQ ID NO: 2579645 - DNA, 25 bp, Homo sapien
tgttgtgactctgccggctgcccat

SEQ ID NO: 2579646 - DNA, 25 bp, Homo sapien
gaaattctctggcacgtggtttgat

SEQ ID NO: 2579647 - DNA, 25 bp, Homo sapien
gcgtgggtgagttctaatgagaaat

SEQ ID NO: 2579648 - DNA, 25 bp, Homo sapien
gagattgtcaccaaactgttgagtg

SEQ ID NO: 2579649 - DNA, 25 bp, Homo sapien
ggtaagttgattcggccaccctgca

SEQ ID NO: 2579650 - DNA, 25 bp, Homo sapien
tgcaggccctataaccacaggaacg

SEQ ID NO: 2579651 - DNA, 25 bp, Homo sapien
cgtattattacgcaatgcaggccct

SEQ ID NO: 2579652 - DNA, 25 bp, Homo sapien
gattctgagggcatagatggctcca

SEQ ID NO: 2579653 - DNA, 25 bp, Homo sapien
tcaaactctatggaacagttcaagt

SEQ ID NO: 2579654 - DNA, 25 bp, Homo sapien
tctggcacagttgttcacggtcaat

SEQ ID NO: 2579655 - DNA, 25 bp, Homo sapien
cggtcaattgtagcccctatgctga

SEQ ID NO: 2579656 - DNA, 25 bp, Homo sapien
gagtgatcacatcaaactctatgga

SEQ ID NO: 2579657 - DNA, 25 bp, Homo sapien
tatcctcgtttactacaagtagagg

SEQ ID NO: 2579658 - DNA, 25 bp, Homo sapien
ttccccattatcctcgtttactaca

SEQ ID NO: 2579659 - DNA, 25 bp, Homo sapien
ctcgtttactacaagtagaggagaa

SEQ ID NO: 2579660 - DNA, 25 bp, Homo sapien
cattatcctcgtttactacaagtag

SEQ ID NO: 2579661 - DNA, 25 bp, Homo sapien
caaattcttgcccagtacatcgtgg

SEQ ID NO: 2579662 - DNA, 25 bp, Homo sapien
taggaagcttcaataaaacatcagc

SEQ ID NO: 2579663 - DNA, 25 bp, Homo sapien
tagtcttgcaattactgatccaacc

SEQ ID NO: 2579664 - DNA, 25 bp, Homo sapien
cctctgcatggctcgaaatcgaaca

SEQ ID NO: 2579665 - DNA, 25 bp, Homo sapien
gaaagcgtctcttaataacacagca

SEQ ID NO: 2579666 - DNA, 25 bp, Homo sapien
gcaattaacagctcgcaaacttttg

SEQ ID NO: 2579667 - DNA, 25 bp, Homo sapien
tcaacttcctttggcaacgtaaagc

SEQ ID NO: 2579668 - DNA, 25 bp, Homo sapien
tatgagatttccctcacagagcaag

SEQ ID NO: 2579669 - DNA, 25 bp, Homo sapien
ggaatccatctattgcagggtgccg

SEQ ID NO: 2579670 - DNA, 25 bp, Homo sapien
tagctgctcggctgcagactaaaca

SEQ ID NO: 2579671 - DNA, 25 bp, Homo sapien
agataccttcggcatggagtccagt

SEQ ID NO: 2579672 - DNA, 25 bp, Homo sapien
taaacacccgtgattgctgactcca

SEQ ID NO: 2579673 - DNA, 25 bp, Homo sapien
aggccccaacaatgcaaaagtgatg

SEQ ID NO: 2579674 - DNA, 25 bp, Homo sapien
tgatggcagacacagtacacaaggc

SEQ ID NO: 2579675 - DNA, 25 bp, Homo sapien
cccttcagggctgctaacgcattat

SEQ ID NO: 2579676 - DNA, 25 bp, Homo sapien
cacaactcactggtggaccaggaga

SEQ ID NO: 2579677 - DNA, 25 bp, Homo sapien
catagacattttagaccctgtagag

SEQ ID NO: 2579678 - DNA, 25 bp, Homo sapien
tctgtggcatcacacttagggctct

SEQ ID NO: 2579679 - DNA, 25 bp, Homo sapien
gaggcaaagctatctaaggtccaaa

SEQ ID NO: 2579680 - DNA, 25 bp, Homo sapien
cacctgcagggcgttatagttttct

SEQ ID NO: 2579681 - DNA, 25 bp, Homo sapien
tgtgcaaaggcacatgtccatggat

SEQ ID NO: 2579682 - DNA, 25 bp, Homo sapien
tgcagatggtgtcagtccagaagct

SEQ ID NO: 2579683 - DNA, 25 bp, Homo sapien
gatgtgagggtaaaggtgcagtgca

SEQ ID NO: 2579684 - DNA, 25 bp, Homo sapien
gaagggctccggctgtcattgcaga

SEQ ID NO: 2579685 - DNA, 25 bp, Homo sapien
catcatcagcttctgaggaactact

SEQ ID NO: 2579686 - DNA, 25 bp, Homo sapien
gaggaactactgctggtactgctta

SEQ ID NO: 2579687 - DNA, 25 bp, Homo sapien
tactctcgccgtccgcttcttcatc

SEQ ID NO: 2579688 - DNA, 25 bp, Homo sapien
gcttctgaggaactactgctggtac

SEQ ID NO: 2579689 - DNA, 25 bp, Homo sapien
caattcgctgtggattccattcatg

SEQ ID NO: 2579690 - DNA, 25 bp, Homo sapien
tggccaccacctcggtatcatcata

SEQ ID NO: 2579691 - DNA, 25 bp, Homo sapien
aatttggctgacaatggtgcaacat

SEQ ID NO: 2579692 - DNA, 25 bp, Homo sapien
aattactcaatggataaatatcagc

SEQ ID NO: 2579693 - DNA, 25 bp, Homo sapien
tgaaagacaatgagtaaaccagcca

SEQ ID NO: 2579694 - DNA, 25 bp, Homo sapien
gaggtcattcaattgtgaaagacaa

SEQ ID NO: 2579695 - DNA, 25 bp, Homo sapien
cactgtgaggtcattcaattgtgaa

SEQ ID NO: 2579696 - DNA, 25 bp, Homo sapien
caagcagagatggtcactgtgaggt

SEQ ID NO: 2579697 - DNA, 25 bp, Homo sapien
cattactggggcgacttaaatttcg

SEQ ID NO: 2579698 - DNA, 25 bp, Homo sapien
aaaaacctcagggtcccttgtcatg

SEQ ID NO: 2579699 - DNA, 25 bp, Homo sapien
catgaaaagcacaataatgatgttc

SEQ ID NO: 2579700 - DNA, 25 bp, Homo sapien
gttcatacttctgtggacattactg

SEQ ID NO: 2579701 - DNA, 25 bp, Homo sapien
ccactgtctgtgaggatgagcctgg

SEQ ID NO: 2579702 - DNA, 25 bp, Homo sapien
cagcaagatagtcaggagcaggatc

SEQ ID NO: 2579703 - DNA, 25 bp, Homo sapien
aaagttggtgccgagccactgtctg

SEQ ID NO: 2579704 - DNA, 25 bp, Homo sapien
gggtccatgataccacacgtgagga

SEQ ID NO: 2579705 - DNA, 25 bp, Homo sapien
tgatcaggaattaaggacagttacc

SEQ ID NO: 2579706 - DNA, 25 bp, Homo sapien
tccaatgggccagtcgtgctgacac

SEQ ID NO: 2579707 - DNA, 25 bp, Homo sapien
caagccaaccaatgcacaagactag

SEQ ID NO: 2579708 - DNA, 25 bp, Homo sapien
catgctctctaagggtcggttctag

SEQ ID NO: 2579709 - DNA, 25 bp, Homo sapien
ctgtgaagttgttctcgccagtaac

SEQ ID NO: 2579710 - DNA, 25 bp, Homo sapien
gctcagccgggacgataacatgtgc

SEQ ID NO: 2579711 - DNA, 25 bp, Homo sapien
gttctcgccagtaactgctttctta

SEQ ID NO: 2579712 - DNA, 25 bp, Homo sapien
tgcctcatggtgtctgtgaagttgt

SEQ ID NO: 2579713 - DNA, 25 bp, Homo sapien
ggtacttgcaaggtactgagaacag

SEQ ID NO: 2579714 - DNA, 25 bp, Homo sapien
ttggtacttgcaaggtactgagaac

SEQ ID NO: 2579715 - DNA, 25 bp, Homo sapien
tggtacttgcaaggtactgagaaca

SEQ ID NO: 2579716 - DNA, 25 bp, Homo sapien
cttggtacttgcaaggtactgagaa

SEQ ID NO: 2579717 - DNA, 25 bp, Homo sapien
ttctgttaacatgcgctgcttggtt

SEQ ID NO: 2579718 - DNA, 25 bp, Homo sapien
gtcttctgttaacatgcgctgcttg

SEQ ID NO: 2579719 - DNA, 25 bp, Homo sapien
cttctgttaacatgcgctgcttggt

SEQ ID NO: 2579720 - DNA, 25 bp, Homo sapien
tcttctgttaacatgcgctgcttgg

SEQ ID NO: 2579721 - DNA, 25 bp, Homo sapien
aactcatcacaagtacttttctcac

SEQ ID NO: 2579722 - DNA, 25 bp, Homo sapien
aatacctgcgacaattatacaagac

SEQ ID NO: 2579723 - DNA, 25 bp, Homo sapien
atacaagacattttcaagaggagac

SEQ ID NO: 2579724 - DNA, 25 bp, Homo sapien
gcgacaattatacaagacattttca

SEQ ID NO: 2579725 - DNA, 25 bp, Homo sapien
atgccccaggctccactagggccta

SEQ ID NO: 2579726 - DNA, 25 bp, Homo sapien
aggtgtggccttcgctacccatgcc

SEQ ID NO: 2579727 - DNA, 25 bp, Homo sapien
gcacacacaggtgtggccttcgcta

SEQ ID NO: 2579728 - DNA, 25 bp, Homo sapien
tagggcctatcccaactgagggcac

SEQ ID NO: 2579729 - DNA, 25 bp, Homo sapien
cacacgtcctaaatcaaatatcagc

SEQ ID NO: 2579730 - DNA, 25 bp, Homo sapien
ttatatagctgtccgaatacacaca

SEQ ID NO: 2579731 - DNA, 25 bp, Homo sapien
tcccaggaacgcaagaatgtctcaa

SEQ ID NO: 2579732 - DNA, 25 bp, Homo sapien
gatctactagggtttcatcccagga

SEQ ID NO: 2579733 - DNA, 25 bp, Homo sapien
agtatcaatgctcttattcacactg

SEQ ID NO: 2579734 - DNA, 25 bp, Homo sapien
aatgctcttattcacactggtctga

SEQ ID NO: 2579735 - DNA, 25 bp, Homo sapien
gtgccagtatcaatgctcttattca

SEQ ID NO: 2579736 - DNA, 25 bp, Homo sapien
atcaatgctcttattcacactggtc

SEQ ID NO: 2579737 - DNA, 25 bp, Homo sapien
agataccgtgatttcctagactccc

SEQ ID NO: 2579738 - DNA, 25 bp, Homo sapien
aaaagatgagataaacctatcatta

SEQ ID NO: 2579739 - DNA, 25 bp, Homo sapien
gagataaacctatcattatttgtag

SEQ ID NO: 2579740 - DNA, 25 bp, Homo sapien
ccgtgatttcctagactcccagatt

SEQ ID NO: 2579741 - DNA, 25 bp, Homo sapien
aatagtgcattaaaacagctccagt

SEQ ID NO: 2579742 - DNA, 25 bp, Homo sapien
tgacatactgattctgaacttctgg

SEQ ID NO: 2579743 - DNA, 25 bp, Homo sapien
tactaaagtggctcaatttccctca

SEQ ID NO: 2579744 - DNA, 25 bp, Homo sapien
catacatacttatttgtgaacagag

SEQ ID NO: 2579745 - DNA, 25 bp, Homo sapien
gcagacaagtgcctcccatgaaggg

SEQ ID NO: 2579746 - DNA, 25 bp, Homo sapien
gctgatttgcacttagacttgcaga

SEQ ID NO: 2579747 - DNA, 25 bp, Homo sapien
accaggacaggaagcaccgacacac

SEQ ID NO: 2579748 - DNA, 25 bp, Homo sapien
tctgcaataggccagcgtctcctgt

SEQ ID NO: 2579749 - DNA, 25 bp, Homo sapien
gcttctgtgaggatctaatgtctct

SEQ ID NO: 2579750 - DNA, 25 bp, Homo sapien
tctgctgatcggacatgagaagttc

SEQ ID NO: 2579751 - DNA, 25 bp, Homo sapien
tcatgaggagcgtacaatctagatc

SEQ ID NO: 2579752 - DNA, 25 bp, Homo sapien
cacaatgcacaattagtgggagccc

SEQ ID NO: 2579753 - DNA, 25 bp, Homo sapien
cctctaccagaacagcaaacttgtg

SEQ ID NO: 2579754 - DNA, 25 bp, Homo sapien
tgggctggtgcacccacagatggca

SEQ ID NO: 2579755 - DNA, 25 bp, Homo sapien
actctctggagtggccggaaccaca

SEQ ID NO: 2579756 - DNA, 25 bp, Homo sapien
tggagaaggttaatgcccactgtcc

SEQ ID NO: 2579757 - DNA, 25 bp, Homo sapien
actcctcggcgactctgcgcagctc

SEQ ID NO: 2579758 - DNA, 25 bp, Homo sapien
tcctcactgcaggtgtcgtgtgtgg

SEQ ID NO: 2579759 - DNA, 25 bp, Homo sapien
tcctcggaacgctggtacctctgca

SEQ ID NO: 2579760 - DNA, 25 bp, Homo sapien
ctgctcgtcgacataggcgtcgatc

SEQ ID NO: 2579761 - DNA, 25 bp, Homo sapien
cacttggaactttttcaagtgttca

SEQ ID NO: 2579762 - DNA, 25 bp, Homo sapien
gctctgaagaagtggctccgaaaag

SEQ ID NO: 2579763 - DNA, 25 bp, Homo sapien
tatgcagttcccacgtcacttggaa

SEQ ID NO: 2579764 - DNA, 25 bp, Homo sapien
caccagtgcgggcaagttgctctga

SEQ ID NO: 2579765 - DNA, 25 bp, Homo sapien
gagcttgctgttccagacgctggta

SEQ ID NO: 2579766 - DNA, 25 bp, Homo sapien
gatggtgccttcaccttggccgcag

SEQ ID NO: 2579767 - DNA, 25 bp, Homo sapien
agagggcgccgtactcctcaagcag

SEQ ID NO: 2579768 - DNA, 25 bp, Homo sapien
gctgccggagcaggcggaccttcat

SEQ ID NO: 2579769 - DNA, 25 bp, Homo sapien
tatgctgaagaagctaggaagctca

SEQ ID NO: 2579770 - DNA, 25 bp, Homo sapien
gggcacatcaactacacactggctg

SEQ ID NO: 2579771 - DNA, 25 bp, Homo sapien
catgggtttgacgtgaaggttatac

SEQ ID NO: 2579772 - DNA, 25 bp, Homo sapien
gctactctaaagtactgaagttgca

SEQ ID NO: 2579773 - DNA, 25 bp, Homo sapien
cgtgtagcgcacttctgaccagtag

SEQ ID NO: 2579774 - DNA, 25 bp, Homo sapien
ccggtccgcctctgccgaaatttct

SEQ ID NO: 2579775 - DNA, 25 bp, Homo sapien
tccttgtcaggcaccagagactggt

SEQ ID NO: 2579776 - DNA, 25 bp, Homo sapien
tcctgcctggcggtagatgcagcgc

SEQ ID NO: 2579777 - DNA, 25 bp, Homo sapien
ggagccggcaatcaggctgctgtca

SEQ ID NO: 2579778 - DNA, 25 bp, Homo sapien
ccaggagccggcaatcaggctgctg

SEQ ID NO: 2579779 - DNA, 25 bp, Homo sapien
tcccaggagccggcaatcaggctgc

SEQ ID NO: 2579780 - DNA, 25 bp, Homo sapien
caggagccggcaatcaggctgctgt

SEQ ID NO: 2579781 - DNA, 25 bp, Homo sapien
cacgagcatgcggtgtctgaaggca

SEQ ID NO: 2579782 - DNA, 25 bp, Homo sapien
tcactgcaggcctcgcacgagcatg

SEQ ID NO: 2579783 - DNA, 25 bp, Homo sapien
ccaccaagcgaggagtgaagaagaa

SEQ ID NO: 2579784 - DNA, 25 bp, Homo sapien
tgggagccaccaagcgaggagtgaa

SEQ ID NO: 2579785 - DNA, 25 bp, Homo sapien
catggagttctgactgaagaggcat

SEQ ID NO: 2579786 - DNA, 25 bp, Homo sapien
tgtggttattccaataccaaaagtg

SEQ ID NO: 2579787 - DNA, 25 bp, Homo sapien
ccatggagttctgactgaagaggca

SEQ ID NO: 2579788 - DNA, 25 bp, Homo sapien
tgtaggaatacagtagataatatct

SEQ ID NO: 2579789 - DNA, 25 bp, Homo sapien
ctctctcagcctagccaatgtaaag

SEQ ID NO: 2579790 - DNA, 25 bp, Homo sapien
cgaatgtttatagtattggtaagac

SEQ ID NO: 2579791 - DNA, 25 bp, Homo sapien
gcaaaatatttgttcatcgaatgtt

SEQ ID NO: 2579792 - DNA, 25 bp, Homo sapien
accatgtccaagtccctggtgtacc

SEQ ID NO: 2579793 - DNA, 25 bp, Homo sapien
tgttctcaaaccttccatgatcacc

SEQ ID NO: 2579794 - DNA, 25 bp, Homo sapien
tcaaaacgatttccctatgaagtcc

SEQ ID NO: 2579795 - DNA, 25 bp, Homo sapien
gactgagcgccactattcctgttct

SEQ ID NO: 2579796 - DNA, 25 bp, Homo sapien
gctccaggcagtagggagtctagaa

SEQ ID NO: 2579797 - DNA, 25 bp, Homo sapien
gagcccgacaggtaggctcccagca

SEQ ID NO: 2579798 - DNA, 25 bp, Homo sapien
cacgggacaggctttgtccatcagc

SEQ ID NO: 2579799 - DNA, 25 bp, Homo sapien
ccgccacgggacaggctttgtccat

SEQ ID NO: 2579800 - DNA, 25 bp, Homo sapien
tcacacatgtccagatacacaaacc

SEQ ID NO: 2579801 - DNA, 25 bp, Homo sapien
atgtccagatacacaaacctctgag

SEQ ID NO: 2579802 - DNA, 25 bp, Homo sapien
aaacacagattcacacatgtccaga

SEQ ID NO: 2579803 - DNA, 25 bp, Homo sapien
gattcacacatgtccagatacacaa

SEQ ID NO: 2579804 - DNA, 25 bp, Homo sapien
ttttttggacacagaggctggcctt

SEQ ID NO: 2579805 - DNA, 25 bp, Homo sapien
tttttggacacagaggctggccttg

SEQ ID NO: 2579806 - DNA, 25 bp, Homo sapien
tttggacacagaggctggccttgtc

SEQ ID NO: 2579807 - DNA, 25 bp, Homo sapien
ttttttttggacacagaggctggcc

SEQ ID NO: 2579808 - DNA, 25 bp, Homo sapien
gtcatgtgccaaaagctcaaaggga

SEQ ID NO: 2579809 - DNA, 25 bp, Homo sapien
tgcagaagcctcaagataacgtact

SEQ ID NO: 2579810 - DNA, 25 bp, Homo sapien
aacgacaaagctgttttgcagaagc

SEQ ID NO: 2579811 - DNA, 25 bp, Homo sapien
aaccatcagttaacaacccctggag

SEQ ID NO: 2579812 - DNA, 25 bp, Homo sapien
aacaagttactaatatcaggaatga

SEQ ID NO: 2579813 - DNA, 25 bp, Homo sapien
gactaggagaccgtacaagaccctg

SEQ ID NO: 2579814 - DNA, 25 bp, Homo sapien
tgatgaaacctctattaagactggc

SEQ ID NO: 2579815 - DNA, 25 bp, Homo sapien
aatcagtaaaaccaacagctggttc

SEQ ID NO: 2579816 - DNA, 25 bp, Homo sapien
caagcctgtggtgccctatcattaa

SEQ ID NO: 2579817 - DNA, 25 bp, Homo sapien
ggagggtctctccacgtcacccagg

SEQ ID NO: 2579818 - DNA, 25 bp, Homo sapien
tatcattaagaaacccaaggtagtg

SEQ ID NO: 2579819 - DNA, 25 bp, Homo sapien
cactatgcccggtccctatggtggc

SEQ ID NO: 2579820 - DNA, 25 bp, Homo sapien
tgcagaaacaccctctttggctcag

SEQ ID NO: 2579821 - DNA, 25 bp, Homo sapien
ggctcagcagccacctcgatgaagg

SEQ ID NO: 2579822 - DNA, 25 bp, Homo sapien
tgttgaagctacccacatgcagaaa

SEQ ID NO: 2579823 - DNA, 25 bp, Homo sapien
agaaacaccctctttggctcagcag

SEQ ID NO: 2579824 - DNA, 25 bp, Homo sapien
tctggttgatactgttttgggtgcc

SEQ ID NO: 2579825 - DNA, 25 bp, Homo sapien
actgttttgggtgccattttgcacc

SEQ ID NO: 2579826 - DNA, 25 bp, Homo sapien
ggttgatactgttttgggtgccatt

SEQ ID NO: 2579827 - DNA, 25 bp, Homo sapien
tgtttctggttgatactgttttggg

SEQ ID NO: 2579828 - DNA, 25 bp, Homo sapien
agtcgctctggaaccgccgcagcgg

SEQ ID NO: 2579829 - DNA, 25 bp, Homo sapien
aggcgaagcgccgtgcgcggagctg

SEQ ID NO: 2579830 - DNA, 25 bp, Homo sapien
atcacccgccgggtccagcggaagg

SEQ ID NO: 2579831 - DNA, 25 bp, Homo sapien
gggcgaggcgccacgacagaagccc

SEQ ID NO: 2579832 - DNA, 25 bp, Homo sapien
gcgtcacgccgagcacggcccacct

SEQ ID NO: 2579833 - DNA, 25 bp, Homo sapien
gtcacgccgagcacggcccacctgc

SEQ ID NO: 2579834 - DNA, 25 bp, Homo sapien
ctgacagaggccgcgtcacgccgag

SEQ ID NO: 2579835 - DNA, 25 bp, Homo sapien
cgtcacgccgagcacggcccacctg

SEQ ID NO: 2579836 - DNA, 25 bp, Homo sapien
gtcagaccctcgcagacgtccagat

SEQ ID NO: 2579837 - DNA, 25 bp, Homo sapien
gactagccgggtcagaccctcgcag

SEQ ID NO: 2579838 - DNA, 25 bp, Homo sapien
taagggcttgcgtctggaccctcct

SEQ ID NO: 2579839 - DNA, 25 bp, Homo sapien
gacgtccagatcagaaataagggct

SEQ ID NO: 2579840 - DNA, 25 bp, Homo sapien
cacagacacagaggcacaaaggaca

SEQ ID NO: 2579841 - DNA, 25 bp, Homo sapien
acagacacagaggcacaaaggacat

SEQ ID NO: 2579842 - DNA, 25 bp, Homo sapien
tatttccatctgtaacactagcaga

SEQ ID NO: 2579843 - DNA, 25 bp, Homo sapien
tggttttatttccatctgtaacact

SEQ ID NO: 2579844 - DNA, 25 bp, Homo sapien
tttatttccatctgtaacactagca

SEQ ID NO: 2579845 - DNA, 25 bp, Homo sapien
gttttatttccatctgtaacactag

SEQ ID NO: 2579846 - DNA, 25 bp, Homo sapien
aaggttgccttgctccaagtctggg

SEQ ID NO: 2579847 - DNA, 25 bp, Homo sapien
cagttattgctaacaaagccagaag

SEQ ID NO: 2579848 - DNA, 25 bp, Homo sapien
tcagccccgtctaaagtgaattctg

SEQ ID NO: 2579849 - DNA, 25 bp, Homo sapien
tcacatagaggagggacactccttc

SEQ ID NO: 2579850 - DNA, 25 bp, Homo sapien
actttgctgcccctgagagaacctg

SEQ ID NO: 2579851 - DNA, 25 bp, Homo sapien
tttgtttggcgtgaggccctctgag

SEQ ID NO: 2579852 - DNA, 25 bp, Homo sapien
catgccggcactgtaaggcctctct

SEQ ID NO: 2579853 - DNA, 25 bp, Homo sapien
cctctgaggaaggacgacagtggaa

SEQ ID NO: 2579854 - DNA, 25 bp, Homo sapien
gctacatcttgtgggctgctgaaaa

SEQ ID NO: 2579855 - DNA, 25 bp, Homo sapien
gcttctgaaataaacggcactgggt

SEQ ID NO: 2579856 - DNA, 25 bp, Homo sapien
ttcaacctgggatcctcgagctggg

SEQ ID NO: 2579857 - DNA, 25 bp, Homo sapien
aacctatggagcagtcagaagcccg

SEQ ID NO: 2579858 - DNA, 25 bp, Homo sapien
cattctgtggaaacgatgagacgtc

SEQ ID NO: 2579859 - DNA, 25 bp, Homo sapien
ttcttcagggaatcacggaggcact

SEQ ID NO: 2579860 - DNA, 25 bp, Homo sapien
ttcctacaagttgggcaagtattag

SEQ ID NO: 2579861 - DNA, 25 bp, Homo sapien
tggttgatctttttcctacaagttg

SEQ ID NO: 2579862 - DNA, 25 bp, Homo sapien
agatgggacaactgacagtacctga

SEQ ID NO: 2579863 - DNA, 25 bp, Homo sapien
tgagtatccgtccatgcagatggga

SEQ ID NO: 2579864 - DNA, 25 bp, Homo sapien
ctctgagtatccgtccatgcagatg

SEQ ID NO: 2579865 - DNA, 25 bp, Homo sapien
agtatccgtccatgcagatgggaca

SEQ ID NO: 2579866 - DNA, 25 bp, Homo sapien
gagtatgggtagtcacatatacgtc

SEQ ID NO: 2579867 - DNA, 25 bp, Homo sapien
ccctggcgtttctgggagtatgggt

SEQ ID NO: 2579868 - DNA, 25 bp, Homo sapien
cctggcgtttctgggagtatgggta

SEQ ID NO: 2579869 - DNA, 25 bp, Homo sapien
tgggagtatgggtagtcacatatac

SEQ ID NO: 2579870 - DNA, 25 bp, Homo sapien
tcaccagagcccacatctgactgtg

SEQ ID NO: 2579871 - DNA, 25 bp, Homo sapien
cagctttctcttctgaagcagagtc

SEQ ID NO: 2579872 - DNA, 25 bp, Homo sapien
aagcagagtcaccagagcccacatc

SEQ ID NO: 2579873 - DNA, 25 bp, Homo sapien
tcttctgaagcagagtcaccagagc

SEQ ID NO: 2579874 - DNA, 25 bp, Homo sapien
cagggccggcacaatgtactgtccg

SEQ ID NO: 2579875 - DNA, 25 bp, Homo sapien
ggcacaatgtactgtccgcatgaaa

SEQ ID NO: 2579876 - DNA, 25 bp, Homo sapien
gggccggcacaatgtactgtccgca

SEQ ID NO: 2579877 - DNA, 25 bp, Homo sapien
gccggcacaatgtactgtccgcatg

SEQ ID NO: 2579878 - DNA, 25 bp, Homo sapien
cattgtagttgagtagccaacccat

SEQ ID NO: 2579879 - DNA, 25 bp, Homo sapien
gactggtgcggacaatcacattgta

SEQ ID NO: 2579880 - DNA, 25 bp, Homo sapien
tcacattgtagttgagtagccaacc

SEQ ID NO: 2579881 - DNA, 25 bp, Homo sapien
caggaaagtcgggaagactggtgcg

SEQ ID NO: 2579882 - DNA, 25 bp, Homo sapien
tgtctgaggaaagcccacctgcttc

SEQ ID NO: 2579883 - DNA, 25 bp, Homo sapien
agatctggtgtctgaggaaagccca

SEQ ID NO: 2579884 - DNA, 25 bp, Homo sapien
gcagtctttgtgtggtagtcttaca

SEQ ID NO: 2579885 - DNA, 25 bp, Homo sapien
aagcccacctgcttctggtttgcag

SEQ ID NO: 2579886 - DNA, 25 bp, Homo sapien
tgaactcagttccaccatgtgcttg

SEQ ID NO: 2579887 - DNA, 25 bp, Homo sapien
gatagtgcctgcctacattgagggt

SEQ ID NO: 2579888 - DNA, 25 bp, Homo sapien
tcaggccttccaacttagaccaagc

SEQ ID NO: 2579889 - DNA, 25 bp, Homo sapien
caaaggacctagagttgtgtggtac

SEQ ID NO: 2579890 - DNA, 25 bp, Homo sapien
gtaaatatcaatccacagaggaaga

SEQ ID NO: 2579891 - DNA, 25 bp, Homo sapien
aagccggtggcatggcctgatccaa

SEQ ID NO: 2579892 - DNA, 25 bp, Homo sapien
cctcacaacagttaccgtggtaaga

SEQ ID NO: 2579893 - DNA, 25 bp, Homo sapien
tgccagggtcacaatataccatctg

SEQ ID NO: 2579894 - DNA, 25 bp, Homo sapien
ctggaatgacaacacagaacgcttt

SEQ ID NO: 2579895 - DNA, 25 bp, Homo sapien
acacagaacgctttccaaggcagca

SEQ ID NO: 2579896 - DNA, 25 bp, Homo sapien
tgtcactatccagcccccgtggctc

SEQ ID NO: 2579897 - DNA, 25 bp, Homo sapien
ctaaattaattcttcatccagctga

SEQ ID NO: 2579898 - DNA, 25 bp, Homo sapien
aattaattcttcatccagctgatgg

SEQ ID NO: 2579899 - DNA, 25 bp, Homo sapien
aaattaattcttcatccagctgatg

SEQ ID NO: 2579900 - DNA, 25 bp, Homo sapien
attaattcttcatccagctgatggc

SEQ ID NO: 2579901 - DNA, 25 bp, Homo sapien
ccttgtacttgaaggtgcatcagct

SEQ ID NO: 2579902 - DNA, 25 bp, Homo sapien
ggagagtcaacatcctcaacaactt

SEQ ID NO: 2579903 - DNA, 25 bp, Homo sapien
tcgtgaacatcccttcaagagaagc

SEQ ID NO: 2579904 - DNA, 25 bp, Homo sapien
ggcggctgtcccttctcgtgaacat

SEQ ID NO: 2579905 - DNA, 25 bp, Homo sapien
gagtgtcccttaagatctcagagga

SEQ ID NO: 2579906 - DNA, 25 bp, Homo sapien
tgggcagcctgctcactcacatggt

SEQ ID NO: 2579907 - DNA, 25 bp, Homo sapien
cagtggaggacaactcttacctgga

SEQ ID NO: 2579908 - DNA, 25 bp, Homo sapien
gaatgcatgttctgcagatgccgca

SEQ ID NO: 2579909 - DNA, 25 bp, Homo sapien
tgaatgcgacatctgtgggaaaacc

SEQ ID NO: 2579910 - DNA, 25 bp, Homo sapien
gaaagcctacatgtcctactccagc

SEQ ID NO: 2579911 - DNA, 25 bp, Homo sapien
gttctggaccagcataaaaggatcc

SEQ ID NO: 2579912 - DNA, 25 bp, Homo sapien
cagtaacagctctggccttagggtc

SEQ ID NO: 2579913 - DNA, 25 bp, Homo sapien
tgatctgattcgaccttcttcccct

SEQ ID NO: 2579914 - DNA, 25 bp, Homo sapien
gagagacctctaggggtgatctgat

SEQ ID NO: 2579915 - DNA, 25 bp, Homo sapien
gggtgatctgattcgaccttcttcc

SEQ ID NO: 2579916 - DNA, 25 bp, Homo sapien
cctctaggggtgatctgattcgacc

SEQ ID NO: 2579917 - DNA, 25 bp, Homo sapien
gctgttctgagagtctactccatcg

SEQ ID NO: 2579918 - DNA, 25 bp, Homo sapien
gttctgagagtctactccatcgaga

SEQ ID NO: 2579919 - DNA, 25 bp, Homo sapien
tgttctgagagtctactccatcgag

SEQ ID NO: 2579920 - DNA, 25 bp, Homo sapien
ctgttctgagagtctactccatcga

SEQ ID NO: 2579921 - DNA, 25 bp, Homo sapien
gaaccaaactgagcatgagagccat

SEQ ID NO: 2579922 - DNA, 25 bp, Homo sapien
gagactcagaaccaaactgagcatg

SEQ ID NO: 2579923 - DNA, 25 bp, Homo sapien
ctgatcccagcttgaggagactcag

SEQ ID NO: 2579924 - DNA, 25 bp, Homo sapien
tcccagcttgaggagactcagaacc

SEQ ID NO: 2579925 - DNA, 25 bp, Homo sapien
gaatcgaccaataacaggagctgaa

SEQ ID NO: 2579926 - DNA, 25 bp, Homo sapien
tgaatcgaccaataacaggagctga

SEQ ID NO: 2579927 - DNA, 25 bp, Homo sapien
atcgaccaataacaggagctgaaat

SEQ ID NO: 2579928 - DNA, 25 bp, Homo sapien
tctgaatcgaccaataacaggagct

SEQ ID NO: 2579929 - DNA, 25 bp, Homo sapien
gaaacaggagaatgctgcgtcctcc

SEQ ID NO: 2579930 - DNA, 25 bp, Homo sapien
ggtggaccacgctagagaactggcc

SEQ ID NO: 2579931 - DNA, 25 bp, Homo sapien
tgtggcatctgcataaatggctggt

SEQ ID NO: 2579932 - DNA, 25 bp, Homo sapien
ggaactaatcctgcacccatagagg

SEQ ID NO: 2579933 - DNA, 25 bp, Homo sapien
ggagtcgtatgccaattgtagtgac

SEQ ID NO: 2579934 - DNA, 25 bp, Homo sapien
gataatccactaccgtcagagcagc

SEQ ID NO: 2579935 - DNA, 25 bp, Homo sapien
ttgtagtgacactactaagttcgga

SEQ ID NO: 2579936 - DNA, 25 bp, Homo sapien
gacactactaagttcggataatcca

SEQ ID NO: 2579937 - DNA, 25 bp, Homo sapien
agcccgaggactgacagagtagctg

SEQ ID NO: 2579938 - DNA, 25 bp, Homo sapien
atgtctctatcaacatatcccgtga

SEQ ID NO: 2579939 - DNA, 25 bp, Homo sapien
acatatcccgtgatggaaatgagag

SEQ ID NO: 2579940 - DNA, 25 bp, Homo sapien
cagagtagctggatgtctctatcaa

SEQ ID NO: 2579941 - DNA, 25 bp, Homo sapien
tggattccacctctcggctcagatg

SEQ ID NO: 2579942 - DNA, 25 bp, Homo sapien
tggaacaggatatgctcccggcgtt

SEQ ID NO: 2579943 - DNA, 25 bp, Homo sapien
tcttggacggtcagagagatctcca

SEQ ID NO: 2579944 - DNA, 25 bp, Homo sapien
gctcagatgagcatgccgcatggaa

SEQ ID NO: 2579945 - DNA, 25 bp, Homo sapien
ctttactagtaatgtgagtcactta

SEQ ID NO: 2579946 - DNA, 25 bp, Homo sapien
atttataggtacagacttccatttt

SEQ ID NO: 2579947 - DNA, 25 bp, Homo sapien
ctttgtgtgtctttactagtaatgt

SEQ ID NO: 2579948 - DNA, 25 bp, Homo sapien
gtcacttatagacagtagtatatgg

SEQ ID NO: 2579949 - DNA, 25 bp, Homo sapien
ctccatttctagtctcttgtgtctc

SEQ ID NO: 2579950 - DNA, 25 bp, Homo sapien
aattttatcactatagtaatccatc

SEQ ID NO: 2579951 - DNA, 25 bp, Homo sapien
gtaatccatcaaatggcaatgtttt

SEQ ID NO: 2579952 - DNA, 25 bp, Homo sapien
ctcttgtgtctcactaagtgttctt

SEQ ID NO: 2579953 - DNA, 25 bp, Homo sapien
taggttatttacaccatctctcatc

SEQ ID NO: 2579954 - DNA, 25 bp, Homo sapien
attctcttgtacgtagcatgacact

SEQ ID NO: 2579955 - DNA, 25 bp, Homo sapien
tgtacgtagcatgacacttttatct

SEQ ID NO: 2579956 - DNA, 25 bp, Homo sapien
aaatgtgccatgtagaggacctttt

SEQ ID NO: 2579957 - DNA, 25 bp, Homo sapien
tgcgtgctgatggaaacactgccag

SEQ ID NO: 2579958 - DNA, 25 bp, Homo sapien
atgaaacatatgtcctttgcgtgct

SEQ ID NO: 2579959 - DNA, 25 bp, Homo sapien
atttccggatcagactcgacaagag

SEQ ID NO: 2579960 - DNA, 25 bp, Homo sapien
cggatcagactcgacaagagcaaga

SEQ ID NO: 2579961 - DNA, 25 bp, Homo sapien
tagccaggtgccacgatataggctc

SEQ ID NO: 2579962 - DNA, 25 bp, Homo sapien
caggtgccacgatataggctcgaaa

SEQ ID NO: 2579963 - DNA, 25 bp, Homo sapien
cacgatataggctcgaaaaaggtat

SEQ ID NO: 2579964 - DNA, 25 bp, Homo sapien
tgccacgatataggctcgaaaaagg

SEQ ID NO: 2579965 - DNA, 25 bp, Homo sapien
tgctggaaccatgaataaggcaccg

SEQ ID NO: 2579966 - DNA, 25 bp, Homo sapien
ctggaggctaggactagaagaagag

SEQ ID NO: 2579967 - DNA, 25 bp, Homo sapien
catgaataaggcaccggcccatgct

SEQ ID NO: 2579968 - DNA, 25 bp, Homo sapien
ccggcccatgcttctctctctcgct

SEQ ID NO: 2579969 - DNA, 25 bp, Homo sapien
gcctgtccgtgctttcttctccagt

SEQ ID NO: 2579970 - DNA, 25 bp, Homo sapien
tgcctgtccgtgctttcttctccag

SEQ ID NO: 2579971 - DNA, 25 bp, Homo sapien
ctgcctgtccgtgctttcttctcca

SEQ ID NO: 2579972 - DNA, 25 bp, Homo sapien
tgcgtgtttccgggcgtctctcaat

SEQ ID NO: 2579973 - DNA, 25 bp, Homo sapien
ctgcgtgtttccgggcgtctctcaa

SEQ ID NO: 2579974 - DNA, 25 bp, Homo sapien
gcgtgtttccgggcgtctctcaatt

SEQ ID NO: 2579975 - DNA, 25 bp, Homo sapien
caggatgggtctcagcatcactctg

SEQ ID NO: 2579976 - DNA, 25 bp, Homo sapien
tttctgcctgactttacttccttcc

SEQ ID NO: 2579977 - DNA, 25 bp, Homo sapien
cactagtgccctcaattccctgaaa

SEQ ID NO: 2579978 - DNA, 25 bp, Homo sapien
tgtgttcccgtatctgtccctgttc

SEQ ID NO: 2579979 - DNA, 25 bp, Homo sapien
tgaggacccagtacccatgatcggg

SEQ ID NO: 2579980 - DNA, 25 bp, Homo sapien
gatggtcccacactcatagtccagg

SEQ ID NO: 2579981 - DNA, 25 bp, Homo sapien
taggacggatactcaatgtagggcc

SEQ ID NO: 2579982 - DNA, 25 bp, Homo sapien
aaacgcagagcttcgggtgagccgt

SEQ ID NO: 2579983 - DNA, 25 bp, Homo sapien
ctggggaggaagggcgtggttgcct

SEQ ID NO: 2579984 - DNA, 25 bp, Homo sapien
cgtggttgcctgtgaggaggactca

SEQ ID NO: 2579985 - DNA, 25 bp, Homo sapien
aggaagggcgtggttgcctgtgagg

SEQ ID NO: 2579986 - DNA, 25 bp, Homo sapien
ctacatttcacccctggggaggaag

SEQ ID NO: 2579987 - DNA, 25 bp, Homo sapien
ttcaagatcacttagccagatggag

SEQ ID NO: 2579988 - DNA, 25 bp, Homo sapien
gaattcctgacggttcttcacctga

SEQ ID NO: 2579989 - DNA, 25 bp, Homo sapien
ctttggatctgggagagagacctta

SEQ ID NO: 2579990 - DNA, 25 bp, Homo sapien
tacttaatctacaccacagcctgtg

SEQ ID NO: 2579991 - DNA, 25 bp, Homo sapien
tcctcttgacactgtccgtactcag

SEQ ID NO: 2579992 - DNA, 25 bp, Homo sapien
tcttgacactgtccgtactcaggta

SEQ ID NO: 2579993 - DNA, 25 bp, Homo sapien
cactgtccgtactcaggtacctgag

SEQ ID NO: 2579994 - DNA, 25 bp, Homo sapien
gacactgtccgtactcaggtacctg

SEQ ID NO: 2579995 - DNA, 25 bp, Homo sapien
ctggtagtttctgggcttgtattta

SEQ ID NO: 2579996 - DNA, 25 bp, Homo sapien
agacagttcacagcagtccatcctc

SEQ ID NO: 2579997 - DNA, 25 bp, Homo sapien
atcctcatatctctaatgcctggct

SEQ ID NO: 2579998 - DNA, 25 bp, Homo sapien
ttcctagacagttcacagcagtcca

SEQ ID NO: 2579999 - DNA, 25 bp, Homo sapien
ccccaacgtgtggttactggcctca

SEQ ID NO: 2580000 - DNA, 25 bp, Homo sapien
attgcactgaatggaatatggcccc

SEQ ID NO: 2580001 - DNA, 25 bp, Homo sapien
tgtgtaccatgtgagtgagcaggct

SEQ ID NO: 2580002 - DNA, 25 bp, Homo sapien
tatggccccatggtttgcacccaag

SEQ ID NO: 2580003 - DNA, 25 bp, Homo sapien
ggtctaaatgagaatggctcctcag

SEQ ID NO: 2580004 - DNA, 25 bp, Homo sapien
caggaactctttgggtacagctgtg

SEQ ID NO: 2580005 - DNA, 25 bp, Homo sapien
gtggccaattactcaaggtcttgat

SEQ ID NO: 2580006 - DNA, 25 bp, Homo sapien
tgacactatccagacctgagaaccg

SEQ ID NO: 2580007 - DNA, 25 bp, Homo sapien
tctcatttctgaatcccacggagga

SEQ ID NO: 2580008 - DNA, 25 bp, Homo sapien
cctctcatttctgaatcccacggag

SEQ ID NO: 2580009 - DNA, 25 bp, Homo sapien
tcatttctgaatcccacggaggaaa

SEQ ID NO: 2580010 - DNA, 25 bp, Homo sapien
ttctgaatcccacggaggaaaattc

SEQ ID NO: 2580011 - DNA, 25 bp, Homo sapien
cattgcaggattggtgttcagtacc

SEQ ID NO: 2580012 - DNA, 25 bp, Homo sapien
catatcgttctctggaaggaaccgg

SEQ ID NO: 2580013 - DNA, 25 bp, Homo sapien
gttcagtaccgtttcacgcccagtg

SEQ ID NO: 2580014 - DNA, 25 bp, Homo sapien
agacgtgcactcctatggaaggcta

SEQ ID NO: 2580015 - DNA, 25 bp, Homo sapien
caaagagagagtgagccctgaacaa

SEQ ID NO: 2580016 - DNA, 25 bp, Homo sapien
taggaatccctgaatcacttctgtc

SEQ ID NO: 2580017 - DNA, 25 bp, Homo sapien
actttacctcgccacaaggagctgg

SEQ ID NO: 2580018 - DNA, 25 bp, Homo sapien
tgtcaaaatcctctccacggtagaa

SEQ ID NO: 2580019 - DNA, 25 bp, Homo sapien
ttgagttcggagagacttggtaagc

SEQ ID NO: 2580020 - DNA, 25 bp, Homo sapien
aactttctgatggtgattacgtaac

SEQ ID NO: 2580021 - DNA, 25 bp, Homo sapien
tcctatctcctgttagacttgtaag

SEQ ID NO: 2580022 - DNA, 25 bp, Homo sapien
cccactgaccaatgtgtaattggga

SEQ ID NO: 2580023 - DNA, 25 bp, Homo sapien
ggatgtgccactataacttcccaca

SEQ ID NO: 2580024 - DNA, 25 bp, Homo sapien
attccctccctcataggttctcttc

SEQ ID NO: 2580025 - DNA, 25 bp, Homo sapien
tctgggatgtgccactataacttcc

SEQ ID NO: 2580026 - DNA, 25 bp, Homo sapien
cctccctcataggttctcttctggg

SEQ ID NO: 2580027 - DNA, 25 bp, Homo sapien
tgagtgtgagatgtatgccttccca

SEQ ID NO: 2580028 - DNA, 25 bp, Homo sapien
gagagagagatgtatgctttcccac

SEQ ID NO: 2580029 - DNA, 25 bp, Homo sapien
tctcacactcgtcacacttaaaggg

SEQ ID NO: 2580030 - DNA, 25 bp, Homo sapien
cactcacaattatagggctgcttcc

SEQ ID NO: 2580031 - DNA, 25 bp, Homo sapien
tttatggactgcgaggcctgagcta

SEQ ID NO: 2580032 - DNA, 25 bp, Homo sapien
tatggagcctcctgtggactttgag

SEQ ID NO: 2580033 - DNA, 25 bp, Homo sapien
tagagcgtgagatataggctttccc

SEQ ID NO: 2580034 - DNA, 25 bp, Homo sapien
cttttatgctgttcaagggcagagc

SEQ ID NO: 2580035 - DNA, 25 bp, Homo sapien
tggatgactttatgctgaatgagaa

SEQ ID NO: 2580036 - DNA, 25 bp, Homo sapien
tgaggcctgagctgttcctgaaagc

SEQ ID NO: 2580037 - DNA, 25 bp, Homo sapien
tccagtgtggatgactttatgctga

SEQ ID NO: 2580038 - DNA, 25 bp, Homo sapien
ttatgctgaatgagaagagagctat

SEQ ID NO: 2580039 - DNA, 25 bp, Homo sapien
ggttttcccacagatgtcgcattca

SEQ ID NO: 2580040 - DNA, 25 bp, Homo sapien
ccgtgtggatccttttgtggactct

SEQ ID NO: 2580041 - DNA, 25 bp, Homo sapien
tttatggaccctaaggccagagctg

SEQ ID NO: 2580042 - DNA, 25 bp, Homo sapien
gccagagctgttactgaaggttttc

SEQ ID NO: 2580043 - DNA, 25 bp, Homo sapien
cagtgtggatccgtttgtggacccg

SEQ ID NO: 2580044 - DNA, 25 bp, Homo sapien
gaacaaggcgggaattatatttgaa

SEQ ID NO: 2580045 - DNA, 25 bp, Homo sapien
tttgtggacccgaaggctcgagctg

SEQ ID NO: 2580046 - DNA, 25 bp, Homo sapien
ttccccagtgtgcataattttatgt

SEQ ID NO: 2580047 - DNA, 25 bp, Homo sapien
tgctgattgcttccctgatgctgct

SEQ ID NO: 2580048 - DNA, 25 bp, Homo sapien
ctgtagactagggtaggaggttcca

SEQ ID NO: 2580049 - DNA, 25 bp, Homo sapien
tgtgatatgctgtgggctcagatgc

SEQ ID NO: 2580050 - DNA, 25 bp, Homo sapien
taatgttctccacacgtttgccttg

SEQ ID NO: 2580051 - DNA, 25 bp, Homo sapien
cttttggccacttagatgctgcatt

SEQ ID NO: 2580052 - DNA, 25 bp, Homo sapien
ccacttttggccacttagatgctgc

SEQ ID NO: 2580053 - DNA, 25 bp, Homo sapien
gccacttagatgctgcatttccaac

SEQ ID NO: 2580054 - DNA, 25 bp, Homo sapien
ttggccacttagatgctgcatttcc

SEQ ID NO: 2580055 - DNA, 25 bp, Homo sapien
aaatgaaaaggacacctattcactc

SEQ ID NO: 2580056 - DNA, 25 bp, Homo sapien
caagaaaatgaaaaggacacctatt

SEQ ID NO: 2580057 - DNA, 25 bp, Homo sapien
aatgaaaaggacacctattcactct

SEQ ID NO: 2580058 - DNA, 25 bp, Homo sapien
gaaaatgaaaaggacacctattcac

SEQ ID NO: 2580059 - DNA, 25 bp, Homo sapien
catactgtgtgacaggtaccatgtg

SEQ ID NO: 2580060 - DNA, 25 bp, Homo sapien
gacaaaatttctgcccctgtggaac

SEQ ID NO: 2580061 - DNA, 25 bp, Homo sapien
ccatgtgccatgtaccggtttttaa

SEQ ID NO: 2580062 - DNA, 25 bp, Homo sapien
taagtactagggatacaacaatgaa

SEQ ID NO: 2580063 - DNA, 25 bp, Homo sapien
tcagggagaaggctatgaaaccatg

SEQ ID NO: 2580064 - DNA, 25 bp, Homo sapien
gaaggctatgaaaccatgaagacag

SEQ ID NO: 2580065 - DNA, 25 bp, Homo sapien
ggtatcagggagaaggctatgaaac

SEQ ID NO: 2580066 - DNA, 25 bp, Homo sapien
gggagaaggctatgaaaccatgaag

SEQ ID NO: 2580067 - DNA, 25 bp, Homo sapien
tacatacgaccaacaacctctgggc

SEQ ID NO: 2580068 - DNA, 25 bp, Homo sapien
cttccaaactacatacgaccaacaa

SEQ ID NO: 2580069 - DNA, 25 bp, Homo sapien
gagtctaatagcctggttacatcag

SEQ ID NO: 2580070 - DNA, 25 bp, Homo sapien
cagttttcaacacgcagcatgagtc

SEQ ID NO: 2580071 - DNA, 25 bp, Homo sapien
ttgagcagacctaacatgacgctgg

SEQ ID NO: 2580072 - DNA, 25 bp, Homo sapien
tttctgcttgcaggaacacgcggca

SEQ ID NO: 2580073 - DNA, 25 bp, Homo sapien
gtcgaatcagatcacccctagaggt

SEQ ID NO: 2580074 - DNA, 25 bp, Homo sapien
tctattcacacctgcagcgggagct

SEQ ID NO: 2580075 - DNA, 25 bp, Homo sapien
acttccgcgccctctctgggacgct

SEQ ID NO: 2580076 - DNA, 25 bp, Homo sapien
ccgccagcgggacaaaagcgcggac

SEQ ID NO: 2580077 - DNA, 25 bp, Homo sapien
caaaagcgcggaccgcacggccgga

SEQ ID NO: 2580078 - DNA, 25 bp, Homo sapien
agcgggacaaaagcgcggaccgcac

SEQ ID NO: 2580079 - DNA, 25 bp, Homo sapien
gcctcctcggctatttattgaggac

SEQ ID NO: 2580080 - DNA, 25 bp, Homo sapien
cgcctcctcggctatttattgagga

SEQ ID NO: 2580081 - DNA, 25 bp, Homo sapien
ctggttcctgaacacgtgattcatt

SEQ ID NO: 2580082 - DNA, 25 bp, Homo sapien
ggttcctgaacacgtgattcattgc

SEQ ID NO: 2580083 - DNA, 25 bp, Homo sapien
cgtgattcattgccaggtgtgggtg

SEQ ID NO: 2580084 - DNA, 25 bp, Homo sapien
tggttcctgaacacgtgattcattg

SEQ ID NO: 2580085 - DNA, 25 bp, Homo sapien
ggaggggcgcaggacagcgctgggc

SEQ ID NO: 2580086 - DNA, 25 bp, Homo sapien
atccgggaggggcgcaggacagcgc

SEQ ID NO: 2580087 - DNA, 25 bp, Homo sapien
gggcgcaggacagcgctgggctggg

SEQ ID NO: 2580088 - DNA, 25 bp, Homo sapien
ctggcgggaaatggaatccgggagg

SEQ ID NO: 2580089 - DNA, 25 bp, Homo sapien
gaacgtctgggcgagttagcaggca

SEQ ID NO: 2580090 - DNA, 25 bp, Homo sapien
cgaagaacgtctgggcgagttagca

SEQ ID NO: 2580091 - DNA, 25 bp, Homo sapien
ctcgaagaacgtctgggcgagttag

SEQ ID NO: 2580092 - DNA, 25 bp, Homo sapien
aacgtctgggcgagttagcaggcag

SEQ ID NO: 2580093 - DNA, 25 bp, Homo sapien
gctgatgctattgtctagctccccg

SEQ ID NO: 2580094 - DNA, 25 bp, Homo sapien
tgtggctgatgctattgtctagctc

SEQ ID NO: 2580095 - DNA, 25 bp, Homo sapien
gatgctattgtctagctccccggta

SEQ ID NO: 2580096 - DNA, 25 bp, Homo sapien
tattgtctagctccccggtagccat

SEQ ID NO: 2580097 - DNA, 25 bp, Homo sapien
aattagatgtcaatggaatgtatct

SEQ ID NO: 2580098 - DNA, 25 bp, Homo sapien
ttagatgtcaatggaatgtatctca

SEQ ID NO: 2580099 - DNA, 25 bp, Homo sapien
attagatgtcaatggaatgtatctc

SEQ ID NO: 2580100 - DNA, 25 bp, Homo sapien
atacccagtgttggccacaatgtgc

SEQ ID NO: 2580101 - DNA, 25 bp, Homo sapien
gaaactcacaccctgctgataggaa

SEQ ID NO: 2580102 - DNA, 25 bp, Homo sapien
gataccattcctacctattggagtg

SEQ ID NO: 2580103 - DNA, 25 bp, Homo sapien
gctacacagatgacaggcacatgaa

SEQ ID NO: 2580104 - DNA, 25 bp, Homo sapien
taagttttttgaccaatgcatctct

SEQ ID NO: 2580105 - DNA, 25 bp, Homo sapien
ttgttgggaccaaatggggtatcta

SEQ ID NO: 2580106 - DNA, 25 bp, Homo sapien
tgttgggaccaaatggggtatctat

SEQ ID NO: 2580107 - DNA, 25 bp, Homo sapien
ttttgcagatctatgtcaccttgtt

SEQ ID NO: 2580108 - DNA, 25 bp, Homo sapien
acaggctttgcccgcgaccgaacag

SEQ ID NO: 2580109 - DNA, 25 bp, Homo sapien
ttgcccgcgaccgaacagggcgagc

SEQ ID NO: 2580110 - DNA, 25 bp, Homo sapien
cgaacagggcgagcaggcattttcc

SEQ ID NO: 2580111 - DNA, 25 bp, Homo sapien
gtaggcctgaaaagccacgtcaccc

SEQ ID NO: 2580112 - DNA, 25 bp, Homo sapien
taggcggggcccagcccataggccg

SEQ ID NO: 2580113 - DNA, 25 bp, Homo sapien
cggtgcccgagtgggccgcgtaggc

SEQ ID NO: 2580114 - DNA, 25 bp, Homo sapien
gtaggcggggcccagcccataggcc

SEQ ID NO: 2580115 - DNA, 25 bp, Homo sapien
cgccggtgcccgagtgggccgcgta

SEQ ID NO: 2580116 - DNA, 25 bp, Homo sapien
cctgggttcctgcaccgagtggtgc

SEQ ID NO: 2580117 - DNA, 25 bp, Homo sapien
gcctgggttcctgcaccgagtggtg

SEQ ID NO: 2580118 - DNA, 25 bp, Homo sapien
agttgccgtcctccctggtgaacag

SEQ ID NO: 2580119 - DNA, 25 bp, Homo sapien
gtcctccctggtgaacagaatcgag

SEQ ID NO: 2580120 - DNA, 25 bp, Homo sapien
ctagagttgccgtcctccctggtga

SEQ ID NO: 2580121 - DNA, 25 bp, Homo sapien
ctggtgaacagaatcgaggaatggt

SEQ ID NO: 2580122 - DNA, 25 bp, Homo sapien
ggagccgccccctcccgagcgccat

SEQ ID NO: 2580123 - DNA, 25 bp, Homo sapien
gtttgacgccgggcaccggaggagc

SEQ ID NO: 2580124 - DNA, 25 bp, Homo sapien
tgacgccgggcaccggaggagccgc

SEQ ID NO: 2580125 - DNA, 25 bp, Homo sapien
gaggagccgccccctcccgagcgcc

SEQ ID NO: 2580126 - DNA, 25 bp, Homo sapien
gtgtgtgtatgcacacgtaagcacc

SEQ ID NO: 2580127 - DNA, 25 bp, Homo sapien
gagtgtgtgtgtatgcacacgtaag

SEQ ID NO: 2580128 - DNA, 25 bp, Homo sapien
acagggagtgtgtgtgtatgcacac

SEQ ID NO: 2580129 - DNA, 25 bp, Homo sapien
gtgtgtgtgtatgcacacgtaagca

SEQ ID NO: 2580130 - DNA, 25 bp, Homo sapien
ttctccatgcacaggcgaggtgagc

SEQ ID NO: 2580131 - DNA, 25 bp, Homo sapien
tatgcgcgcttccatagggacgtcg

SEQ ID NO: 2580132 - DNA, 25 bp, Homo sapien
tccacaccggaaggagtatgcgcgc

SEQ ID NO: 2580133 - DNA, 25 bp, Homo sapien
tcttttcctaggatgccgcccaaga

SEQ ID NO: 2580134 - DNA, 25 bp, Homo sapien
aagaggaggacttgcgcttcgacag

SEQ ID NO: 2580135 - DNA, 25 bp, Homo sapien
tgcagcaggataagtatgagtgtca

SEQ ID NO: 2580136 - DNA, 25 bp, Homo sapien
cagagacatctataaccaagaggag

SEQ ID NO: 2580137 - DNA, 25 bp, Homo sapien
cggcctgacgctgagtactggaaca

SEQ ID NO: 2580138 - DNA, 25 bp, Homo sapien
aagctccctggaggttcctacatgg

SEQ ID NO: 2580139 - DNA, 25 bp, Homo sapien
ttcctacatggcaaagctgacagtg

SEQ ID NO: 2580140 - DNA, 25 bp, Homo sapien
tacatggcaaagctgacagtgacac

SEQ ID NO: 2580141 - DNA, 25 bp, Homo sapien
ctccctggaggttcctacatggcaa

SEQ ID NO: 2580142 - DNA, 25 bp, Homo sapien
gagttccaggcagttacggaactgg

SEQ ID NO: 2580143 - DNA, 25 bp, Homo sapien
ccataaacgggaggagaacctgcgc

SEQ ID NO: 2580144 - DNA, 25 bp, Homo sapien
agaacctgcgcttcgacagcaacgt

SEQ ID NO: 2580145 - DNA, 25 bp, Homo sapien
acagcaacgtggaggagttccaggc

SEQ ID NO: 2580146 - DNA, 25 bp, Homo sapien
ctaagtgtgagtgtcatatcttcaa

SEQ ID NO: 2580147 - DNA, 25 bp, Homo sapien
gctaagtgtgagtgtcatatcttca

SEQ ID NO: 2580148 - DNA, 25 bp, Homo sapien
aagtgtgagtgtcatatcttcaatg

SEQ ID NO: 2580149 - DNA, 25 bp, Homo sapien
ggctaagtgtgagtgtcatatcttc

SEQ ID NO: 2580150 - DNA, 25 bp, Homo sapien
gctcctgcatgacagcgctgacagt

SEQ ID NO: 2580151 - DNA, 25 bp, Homo sapien
ggaggctcctgcatgacagcgctga

SEQ ID NO: 2580152 - DNA, 25 bp, Homo sapien
aggctcctgcatgacagcgctgaca

SEQ ID NO: 2580153 - DNA, 25 bp, Homo sapien
tcctgcatgacagcgctgacagtga

SEQ ID NO: 2580154 - DNA, 25 bp, Homo sapien
tacctgacagttagccaagcagtga

SEQ ID NO: 2580155 - DNA, 25 bp, Homo sapien
caattaatagacctacagtgggctc

SEQ ID NO: 2580156 - DNA, 25 bp, Homo sapien
gtgggctctaactattcaactgata

SEQ ID NO: 2580157 - DNA, 25 bp, Homo sapien
aactgataggaagagtcacatgccc

SEQ ID NO: 2580158 - DNA, 25 bp, Homo sapien
cagagctttatgttccgagccctgc

SEQ ID NO: 2580159 - DNA, 25 bp, Homo sapien
gattttgggcctgagatctatctcc

SEQ ID NO: 2580160 - DNA, 25 bp, Homo sapien
ttagccctgatagccttaggcgtgc

SEQ ID NO: 2580161 - DNA, 25 bp, Homo sapien
taggcgtgccttgatgccagagctt

SEQ ID NO: 2580162 - DNA, 25 bp, Homo sapien
tgcgttgcctgactcgacacagaag

SEQ ID NO: 2580163 - DNA, 25 bp, Homo sapien
tggaggtcagaatgcctcttcgccg

SEQ ID NO: 2580164 - DNA, 25 bp, Homo sapien
cctatgacggttgtttgcagggctc

SEQ ID NO: 2580165 - DNA, 25 bp, Homo sapien
tctgagctgcgacagcctggttgcg

SEQ ID NO: 2580166 - DNA, 25 bp, Homo sapien
ctggcgttaaggccacccagtcagg

SEQ ID NO: 2580167 - DNA, 25 bp, Homo sapien
gcctggatgagtggcgcggcgtgga

SEQ ID NO: 2580168 - DNA, 25 bp, Homo sapien
gcccagatgcatggcttggcccaga

SEQ ID NO: 2580169 - DNA, 25 bp, Homo sapien
cagaacgatgctgcttcggcgagca

SEQ ID NO: 2580170 - DNA, 25 bp, Homo sapien
tacatgtattttgactagcagccgc

SEQ ID NO: 2580171 - DNA, 25 bp, Homo sapien
catgtattttgactagcagccgcat

SEQ ID NO: 2580172 - DNA, 25 bp, Homo sapien
tgtattttgactagcagccgcattc

SEQ ID NO: 2580173 - DNA, 25 bp, Homo sapien
ttttgactagcagccgcattcctgc

SEQ ID NO: 2580174 - DNA, 25 bp, Homo sapien
ttggcccagaataagagtgcatcat

SEQ ID NO: 2580175 - DNA, 25 bp, Homo sapien
ttcttaagactagggcatagatgac

SEQ ID NO: 2580176 - DNA, 25 bp, Homo sapien
tcaggtaggttcaccagatggcaag

SEQ ID NO: 2580177 - DNA, 25 bp, Homo sapien
caaaggaagtcatgtggtcaaacca

SEQ ID NO: 2580178 - DNA, 25 bp, Homo sapien
ccctgaaccaaagtcgttacctctg

SEQ ID NO: 2580179 - DNA, 25 bp, Homo sapien
ggtgtttaacactatcctggttgaa

SEQ ID NO: 2580180 - DNA, 25 bp, Homo sapien
caaaatatcacttggtgtttaacac

SEQ ID NO: 2580181 - DNA, 25 bp, Homo sapien
tgaaccaaagtcgttacctctggac

SEQ ID NO: 2580182 - DNA, 25 bp, Homo sapien
cttccaggtcgcagcttgcaaagcc

SEQ ID NO: 2580183 - DNA, 25 bp, Homo sapien
cagttctccttccaggtcgcagctt

SEQ ID NO: 2580184 - DNA, 25 bp, Homo sapien
ttcttgttgatatggttgctattgc

SEQ ID NO: 2580185 - DNA, 25 bp, Homo sapien
ttctccttccaggtcgcagcttgca

SEQ ID NO: 2580186 - DNA, 25 bp, Homo sapien
tcctccacatgctgttgtgcgtgca

SEQ ID NO: 2580187 - DNA, 25 bp, Homo sapien
gttgtgcgtgcaagaaaactcttat

SEQ ID NO: 2580188 - DNA, 25 bp, Homo sapien
tattgaagttttggatgaacagaat

SEQ ID NO: 2580189 - DNA, 25 bp, Homo sapien
tcttattgaagttttggatgaacag

SEQ ID NO: 2580190 - DNA, 25 bp, Homo sapien
tgtgagcctacagaagtcatgatgt

SEQ ID NO: 2580191 - DNA, 25 bp, Homo sapien
ttttacctatgaaagagagggacag

SEQ ID NO: 2580192 - DNA, 25 bp, Homo sapien
taaaggcctaatattctcgagaaga

SEQ ID NO: 2580193 - DNA, 25 bp, Homo sapien
tagatgaaggattggtagctgagca

SEQ ID NO: 2580194 - DNA, 25 bp, Homo sapien
tttgctggaactgctagtctcccgc

SEQ ID NO: 2580195 - DNA, 25 bp, Homo sapien
taatgttttgggtaccacatgttta

SEQ ID NO: 2580196 - DNA, 25 bp, Homo sapien
tttagccattaaatgactgttgtca

SEQ ID NO: 2580197 - DNA, 25 bp, Homo sapien
tagtctcccgcgtaaatatgggtac

SEQ ID NO: 2580198 - DNA, 25 bp, Homo sapien
ttttggaatccgtacttgcacacat

SEQ ID NO: 2580199 - DNA, 25 bp, Homo sapien
gttgattttggaatccgtacttgca

SEQ ID NO: 2580200 - DNA, 25 bp, Homo sapien
ctttaataatgtccaactctttgag

SEQ ID NO: 2580201 - DNA, 25 bp, Homo sapien
tgattttggaatccgtacttgcaca

SEQ ID NO: 2580202 - DNA, 25 bp, Homo sapien
ttattgatggttgaggtcctggttg

SEQ ID NO: 2580203 - DNA, 25 bp, Homo sapien
aacataacaccattgatcagaggag

SEQ ID NO: 2580204 - DNA, 25 bp, Homo sapien
gaggtcctggttgtcaaacataaca

SEQ ID NO: 2580205 - DNA, 25 bp, Homo sapien
attgatcagaggagatttggagatt

SEQ ID NO: 2580206 - DNA, 25 bp, Homo sapien
gtatttagctgtctgtgcaacaatg

SEQ ID NO: 2580207 - DNA, 25 bp, Homo sapien
tgttctcttcagtggttgaacttct

SEQ ID NO: 2580208 - DNA, 25 bp, Homo sapien
gcttgtgtatttagctgtctgtgca

SEQ ID NO: 2580209 - DNA, 25 bp, Homo sapien
tagctgtctgtgcaacaatgtcttt

SEQ ID NO: 2580210 - DNA, 25 bp, Homo sapien
cgttaatggtccatgcatttatgaa

SEQ ID NO: 2580211 - DNA, 25 bp, Homo sapien
ttccacatagctttcgttaatggtc

SEQ ID NO: 2580212 - DNA, 25 bp, Homo sapien
acttttattggatcagctatgtgta

SEQ ID NO: 2580213 - DNA, 25 bp, Homo sapien
ttggatcagctatgtgtatgaaatc

SEQ ID NO: 2580214 - DNA, 25 bp, Homo sapien
ttgatggcttgggtgtgacttcagg

SEQ ID NO: 2580215 - DNA, 25 bp, Homo sapien
cttgatggcttgggtgtgacttcag

SEQ ID NO: 2580216 - DNA, 25 bp, Homo sapien
catcgacgtcatgtagcattagcaa

SEQ ID NO: 2580217 - DNA, 25 bp, Homo sapien
aagtaaaatataactcctgtggatc

SEQ ID NO: 2580218 - DNA, 25 bp, Homo sapien
ccatagttaccaccagaagtaaaat

SEQ ID NO: 2580219 - DNA, 25 bp, Homo sapien
ctcctgtggatctgccttgaagtgg

SEQ ID NO: 2580220 - DNA, 25 bp, Homo sapien
gctgcagctgcacctaattgattga

SEQ ID NO: 2580221 - DNA, 25 bp, Homo sapien
aaactgatcctgttgcagacaaggc

SEQ ID NO: 2580222 - DNA, 25 bp, Homo sapien
caactgccgtttgtagatagggtcc

SEQ ID NO: 2580223 - DNA, 25 bp, Homo sapien
caatagagaaagtcgagcatcccac

SEQ ID NO: 2580224 - DNA, 25 bp, Homo sapien
ctgaaacaccaaggagtctgcctgc

SEQ ID NO: 2580225 - DNA, 25 bp, Homo sapien
tgaaacaccaaggagtctgcctgct

SEQ ID NO: 2580226 - DNA, 25 bp, Homo sapien
gaaacaccaaggagtctgcctgctt

SEQ ID NO: 2580227 - DNA, 25 bp, Homo sapien
aacaccaaggagtctgcctgctttg

SEQ ID NO: 2580228 - DNA, 25 bp, Homo sapien
caaacatggtatggttctagctgct

SEQ ID NO: 2580229 - DNA, 25 bp, Homo sapien
gctgctgccacattcacttccaaag

SEQ ID NO: 2580230 - DNA, 25 bp, Homo sapien
tctcagttaaattcactacctcaat

SEQ ID NO: 2580231 - DNA, 25 bp, Homo sapien
gttaaattcactacctcaatgctgc

SEQ ID NO: 2580232 - DNA, 25 bp, Homo sapien
caccttcgatatgtttccacagtaa

SEQ ID NO: 2580233 - DNA, 25 bp, Homo sapien
aaccaccttcgatatgtttccacag

SEQ ID NO: 2580234 - DNA, 25 bp, Homo sapien
tatgatcaatcatacttaaccacct

SEQ ID NO: 2580235 - DNA, 25 bp, Homo sapien
tacttaaccaccttcgatatgtttc

SEQ ID NO: 2580236 - DNA, 25 bp, Homo sapien
cctttgctatttaataggtaattca

SEQ ID NO: 2580237 - DNA, 25 bp, Homo sapien
ctatgttccaccatctgatagatat

SEQ ID NO: 2580238 - DNA, 25 bp, Homo sapien
tcatggcccctttatacagaatctg

SEQ ID NO: 2580239 - DNA, 25 bp, Homo sapien
gaaagcaatctttcacgttcctttg

SEQ ID NO: 2580240 - DNA, 25 bp, Homo sapien
caacatcagatatgttcccaaagcc

SEQ ID NO: 2580241 - DNA, 25 bp, Homo sapien
gacaggaaagcattgcccttggaaa

SEQ ID NO: 2580242 - DNA, 25 bp, Homo sapien
tcaagtccttagacaaagatctggg

SEQ ID NO: 2580243 - DNA, 25 bp, Homo sapien
taagggtctggttcacaacatcaga

SEQ ID NO: 2580244 - DNA, 25 bp, Homo sapien
tatgaaagaaatagggacatcagtg

SEQ ID NO: 2580245 - DNA, 25 bp, Homo sapien
gaaagaaatagggacatcagtgttt

SEQ ID NO: 2580246 - DNA, 25 bp, Homo sapien
atgaaagaaatagggacatcagtgt

SEQ ID NO: 2580247 - DNA, 25 bp, Homo sapien
tgaacaaactgagaagactcatctt

SEQ ID NO: 2580248 - DNA, 25 bp, Homo sapien
tacacatggctcaatgtaactgagt

SEQ ID NO: 2580249 - DNA, 25 bp, Homo sapien
ccaactttatggattggatgactca

SEQ ID NO: 2580250 - DNA, 25 bp, Homo sapien
gaaaaggcacagttactaaaacagc

SEQ ID NO: 2580251 - DNA, 25 bp, Homo sapien
ctccgtaacagcatagtagtgaaca

SEQ ID NO: 2580252 - DNA, 25 bp, Homo sapien
gtagtgaacatgactgacccactga

SEQ ID NO: 2580253 - DNA, 25 bp, Homo sapien
taacagcatagtagtgaacatgact

SEQ ID NO: 2580254 - DNA, 25 bp, Homo sapien
catagtagtgaacatgactgaccca

SEQ ID NO: 2580255 - DNA, 25 bp, Homo sapien
acagtgtggttccactctctcgtag

SEQ ID NO: 2580256 - DNA, 25 bp, Homo sapien
cagagaagacagaagcttcttccac

SEQ ID NO: 2580257 - DNA, 25 bp, Homo sapien
tcttccacagtgtggttccactctc

SEQ ID NO: 2580258 - DNA, 25 bp, Homo sapien
tgtggttccactctctcgtagccat

SEQ ID NO: 2580259 - DNA, 25 bp, Homo sapien
agacttcaagctaaacatgctgtcc

SEQ ID NO: 2580260 - DNA, 25 bp, Homo sapien
gggagttctcacaacagtggtagct

SEQ ID NO: 2580261 - DNA, 25 bp, Homo sapien
caagctaaacatgctgtccacagta

SEQ ID NO: 2580262 - DNA, 25 bp, Homo sapien
tcacaacagtggtagctatgatggg

SEQ ID NO: 2580263 - DNA, 25 bp, Homo sapien
taagtatgtcccacatatggcaacc

SEQ ID NO: 2580264 - DNA, 25 bp, Homo sapien
caaggaactgcgttgttaccagggt

SEQ ID NO: 2580265 - DNA, 25 bp, Homo sapien
taatgctgcatgctgtaccagcaga

SEQ ID NO: 2580266 - DNA, 25 bp, Homo sapien
tatggcaaccctagtggtcagtgtt

SEQ ID NO: 2580267 - DNA, 25 bp, Homo sapien
cacaaaaatgtggatttggctttat

SEQ ID NO: 2580268 - DNA, 25 bp, Homo sapien
tattgtttgcacactgctcatcaca

SEQ ID NO: 2580269 - DNA, 25 bp, Homo sapien
ggctttattattgtttgcacactgc

SEQ ID NO: 2580270 - DNA, 25 bp, Homo sapien
tgctcatcacaaatgaatacttcat

SEQ ID NO: 2580271 - DNA, 25 bp, Homo sapien
tttaatacagcagcagtttgtcagg

SEQ ID NO: 2580272 - DNA, 25 bp, Homo sapien
ttaatacagcagcagtttgtcagga

SEQ ID NO: 2580273 - DNA, 25 bp, Homo sapien
ctttaatacagcagcagtttgtcag

SEQ ID NO: 2580274 - DNA, 25 bp, Homo sapien
tctttaatacagcagcagtttgtca

SEQ ID NO: 2580275 - DNA, 25 bp, Homo sapien
taagagtgcgagataatcatgcagc

SEQ ID NO: 2580276 - DNA, 25 bp, Homo sapien
ctggtgaacctaataagagtgcgag

SEQ ID NO: 2580277 - DNA, 25 bp, Homo sapien
cctaataagagtgcgagataatcat

SEQ ID NO: 2580278 - DNA, 25 bp, Homo sapien
tgaacctaataagagtgcgagataa

SEQ ID NO: 2580279 - DNA, 25 bp, Homo sapien
cagactatttgtaaagatagattcc

SEQ ID NO: 2580280 - DNA, 25 bp, Homo sapien
tcgatgatcaagaattgagacactt

SEQ ID NO: 2580281 - DNA, 25 bp, Homo sapien
gggtcgatgatcaagaattgagaca

SEQ ID NO: 2580282 - DNA, 25 bp, Homo sapien
gatcaagaattgagacactttgttg

SEQ ID NO: 2580283 - DNA, 25 bp, Homo sapien
aattgagacactttgttgtcatgca

SEQ ID NO: 2580284 - DNA, 25 bp, Homo sapien
ttaggacacttgcttctgatcagca

SEQ ID NO: 2580285 - DNA, 25 bp, Homo sapien
acactgctctccacgtcagcctgga

SEQ ID NO: 2580286 - DNA, 25 bp, Homo sapien
gatcagcatctctcagaaactgcac

SEQ ID NO: 2580287 - DNA, 25 bp, Homo sapien
cctggacacaaaggcttgtccttac

SEQ ID NO: 2580288 - DNA, 25 bp, Homo sapien
ttatccatctcttttccacttcctg

SEQ ID NO: 2580289 - DNA, 25 bp, Homo sapien
cttttccacttcctgtcctgcattg

SEQ ID NO: 2580290 - DNA, 25 bp, Homo sapien
ttccacttcctgtcctgcattgatt

SEQ ID NO: 2580291 - DNA, 25 bp, Homo sapien
tatccatctcttttccacttcctgt

SEQ ID NO: 2580292 - DNA, 25 bp, Homo sapien
gctccctgctgagggtttcgttttg

SEQ ID NO: 2580293 - DNA, 25 bp, Homo sapien
ttgagagagttgttctggcagtgac

SEQ ID NO: 2580294 - DNA, 25 bp, Homo sapien
gttctggcagtgacatcttccgaga

SEQ ID NO: 2580295 - DNA, 25 bp, Homo sapien
ctgctgagggtttcgttttgtttgt

SEQ ID NO: 2580296 - DNA, 25 bp, Homo sapien
ttttctgtggaaatcggatctcgcc

SEQ ID NO: 2580297 - DNA, 25 bp, Homo sapien
tgcagtttgtgtgacagggcactgt

SEQ ID NO: 2580298 - DNA, 25 bp, Homo sapien
gagctcgatcgatctatccaccttg

SEQ ID NO: 2580299 - DNA, 25 bp, Homo sapien
tccagccagcatcgtgcagtcttgt

SEQ ID NO: 2580300 - DNA, 25 bp, Homo sapien
gatatgcgaatgctgtcctctccca

SEQ ID NO: 2580301 - DNA, 25 bp, Homo sapien
caagatgtaatcgaaacgctcgcgg

SEQ ID NO: 2580302 - DNA, 25 bp, Homo sapien
catgtcagcggaggtcagtgtatac

SEQ ID NO: 2580303 - DNA, 25 bp, Homo sapien
tgtattcgggtctctagtactgcca

SEQ ID NO: 2580304 - DNA, 25 bp, Homo sapien
tcagacacagtggcctgttgtacct

SEQ ID NO: 2580305 - DNA, 25 bp, Homo sapien
ttgtaccttcttacatcctacagcc

SEQ ID NO: 2580306 - DNA, 25 bp, Homo sapien
tgttgtaccttcttacatcctacag

SEQ ID NO: 2580307 - DNA, 25 bp, Homo sapien
gacacagtggcctgttgtaccttct

SEQ ID NO: 2580308 - DNA, 25 bp, Homo sapien
tgtggagatcgttgtgcctgctcat

SEQ ID NO: 2580309 - DNA, 25 bp, Homo sapien
gatgcctttttgacagcattggctg

SEQ ID NO: 2580310 - DNA, 25 bp, Homo sapien
cattggctgtgacgctgcgcttgtg

SEQ ID NO: 2580311 - DNA, 25 bp, Homo sapien
tgcgcttgtggagatcgttgtgcct

SEQ ID NO: 2580312 - DNA, 25 bp, Homo sapien
gctgtgtaaagacgtctttttctcc

SEQ ID NO: 2580313 - DNA, 25 bp, Homo sapien
ccatcggctgtgtaaagacgtcttt

SEQ ID NO: 2580314 - DNA, 25 bp, Homo sapien
ttagccaaccatcggctgtgtaaag

SEQ ID NO: 2580315 - DNA, 25 bp, Homo sapien
ctttttctcctactatgtttagttg

SEQ ID NO: 2580316 - DNA, 25 bp, Homo sapien
cggcagagcgcggttcagaaaacat

SEQ ID NO: 2580317 - DNA, 25 bp, Homo sapien
tgtcctccgcggaagaaaacagctt

SEQ ID NO: 2580318 - DNA, 25 bp, Homo sapien
tgacgatcacgtggcatctctcagg

SEQ ID NO: 2580319 - DNA, 25 bp, Homo sapien
tcactctgtgagaggaacaccgcac

SEQ ID NO: 2580320 - DNA, 25 bp, Homo sapien
cttcgcctgactgaacccggcgtgg

SEQ ID NO: 2580321 - DNA, 25 bp, Homo sapien
caacacatcacagataacgcaactt

SEQ ID NO: 2580322 - DNA, 25 bp, Homo sapien
gataaacgctttttgttacaacaca

SEQ ID NO: 2580323 - DNA, 25 bp, Homo sapien
cacagataacgcaacttcgcctgac

SEQ ID NO: 2580324 - DNA, 25 bp, Homo sapien
cataaagaaaccgagtgctagaaca

SEQ ID NO: 2580325 - DNA, 25 bp, Homo sapien
gaaaccgagtgctagaacacgaaga

SEQ ID NO: 2580326 - DNA, 25 bp, Homo sapien
ctgaaaggcataaagaaaccgagtg

SEQ ID NO: 2580327 - DNA, 25 bp, Homo sapien
cgagtgctagaacacgaagatgaca

SEQ ID NO: 2580328 - DNA, 25 bp, Homo sapien
taaaaactcgagtccatcgggaagc

SEQ ID NO: 2580329 - DNA, 25 bp, Homo sapien
tcctgcagttgaggttcagtgaacg

SEQ ID NO: 2580330 - DNA, 25 bp, Homo sapien
caggcaccgggatgctcacatagta

SEQ ID NO: 2580331 - DNA, 25 bp, Homo sapien
gcgcagcacgtgtggaacccaatga

SEQ ID NO: 2580332 - DNA, 25 bp, Homo sapien
tgacagtcagaaaaacgagaatgat

SEQ ID NO: 2580333 - DNA, 25 bp, Homo sapien
tgtgtcctgcatcacccagtaggta

SEQ ID NO: 2580334 - DNA, 25 bp, Homo sapien
aatttcgagccttctatgtgtcctg

SEQ ID NO: 2580335 - DNA, 25 bp, Homo sapien
tacaaaaataacactgcagagagcc

SEQ ID NO: 2580336 - DNA, 25 bp, Homo sapien
tatcttgcatttcagtctcaccatg

SEQ ID NO: 2580337 - DNA, 25 bp, Homo sapien
agcttcagtccagtcctttatcttg

SEQ ID NO: 2580338 - DNA, 25 bp, Homo sapien
taccagtgctgattgaaatagaagc

SEQ ID NO: 2580339 - DNA, 25 bp, Homo sapien
tcaacctcgcccagtgcaggtttgt

SEQ ID NO: 2580340 - DNA, 25 bp, Homo sapien
tttccttccagtagcatcttagttt

SEQ ID NO: 2580341 - DNA, 25 bp, Homo sapien
ctgtttatagcactaatttctgtgt

SEQ ID NO: 2580342 - DNA, 25 bp, Homo sapien
ccagtagcatcttagtttataaaat

SEQ ID NO: 2580343 - DNA, 25 bp, Homo sapien
tgtttatagcactaatttctgtgta

SEQ ID NO: 2580344 - DNA, 25 bp, Homo sapien
tgtgttgccgtggttgaaggcatca

SEQ ID NO: 2580345 - DNA, 25 bp, Homo sapien
ttaacaaaggcacctcgtccgtgtg

SEQ ID NO: 2580346 - DNA, 25 bp, Homo sapien
ggccctcgtccaggaacaagctgtg

SEQ ID NO: 2580347 - DNA, 25 bp, Homo sapien
ggcatcagatgcagttacttgctgc

SEQ ID NO: 2580348 - DNA, 25 bp, Homo sapien
agctgtccggtaggcggcggctgag

SEQ ID NO: 2580349 - DNA, 25 bp, Homo sapien
cagctgtccggtaggcggcggctga

SEQ ID NO: 2580350 - DNA, 25 bp, Homo sapien
ggcagctgtccggtaggcggcggct

SEQ ID NO: 2580351 - DNA, 25 bp, Homo sapien
agggcagctgtccggtaggcggcgg

SEQ ID NO: 2580352 - DNA, 25 bp, Homo sapien
ccactccttgtgcacgccatgggtt

SEQ ID NO: 2580353 - DNA, 25 bp, Homo sapien
ccttgtgcacgccatgggttgatct

SEQ ID NO: 2580354 - DNA, 25 bp, Homo sapien
tgtgcacgccatgggttgatcttcc

SEQ ID NO: 2580355 - DNA, 25 bp, Homo sapien
gcacgccatgggttgatcttccctg

SEQ ID NO: 2580356 - DNA, 25 bp, Homo sapien
tggcagccctgaggtgtccttgccc

SEQ ID NO: 2580357 - DNA, 25 bp, Homo sapien
cctctcagtcccacatgtggcagcc

SEQ ID NO: 2580358 - DNA, 25 bp, Homo sapien
tgtcctctcagtcccacatgtggca

SEQ ID NO: 2580359 - DNA, 25 bp, Homo sapien
tcccacatgtggcagccctgaggtg

SEQ ID NO: 2580360 - DNA, 25 bp, Homo sapien
gccaacagacctcagcgtgtggctg

SEQ ID NO: 2580361 - DNA, 25 bp, Homo sapien
caacagacctcagcgtgtggctgtc

SEQ ID NO: 2580362 - DNA, 25 bp, Homo sapien
gacctcagcgtgtggctgtcgtgat

SEQ ID NO: 2580363 - DNA, 25 bp, Homo sapien
cagcgtgtggctgtcgtgatgtcca

SEQ ID NO: 2580364 - DNA, 25 bp, Homo sapien
ggtggcagatacacacccggcttgt

SEQ ID NO: 2580365 - DNA, 25 bp, Homo sapien
gcaggacatagcttctgaccgctga

SEQ ID NO: 2580366 - DNA, 25 bp, Homo sapien
tctcaggctcttgccgtgcacagtg

SEQ ID NO: 2580367 - DNA, 25 bp, Homo sapien
acaagtagaatgaggatgctgggcc

SEQ ID NO: 2580368 - DNA, 25 bp, Homo sapien
caagatccccgtgaaatcctgtctc

SEQ ID NO: 2580369 - DNA, 25 bp, Homo sapien
tcctcacactggggcaactggggtg

SEQ ID NO: 2580370 - DNA, 25 bp, Homo sapien
caccttctcaagatccccgtgaaat

SEQ ID NO: 2580371 - DNA, 25 bp, Homo sapien
ctcaagatccccgtgaaatcctgtc

SEQ ID NO: 2580372 - DNA, 25 bp, Homo sapien
gctctggcccagaccatacttctga

SEQ ID NO: 2580373 - DNA, 25 bp, Homo sapien
cagaggaaaggcgggttcctggctt

SEQ ID NO: 2580374 - DNA, 25 bp, Homo sapien
tctggcccagaccatacttctgaat

SEQ ID NO: 2580375 - DNA, 25 bp, Homo sapien
ggcccagaccatacttctgaatcag

SEQ ID NO: 2580376 - DNA, 25 bp, Homo sapien
gcacggacggactcaacggcgacca

SEQ ID NO: 2580377 - DNA, 25 bp, Homo sapien
gggactcctcgcaggtcagctgagc

SEQ ID NO: 2580378 - DNA, 25 bp, Homo sapien
cggttgcgtttccacgtgtcctgcc

SEQ ID NO: 2580379 - DNA, 25 bp, Homo sapien
ctttcagtcggcgtgcacggttccc

SEQ ID NO: 2580380 - DNA, 25 bp, Homo sapien
cctgtcacatgaggtgatatggttt

SEQ ID NO: 2580381 - DNA, 25 bp, Homo sapien
gcctgtgtttttgcactttatacga

SEQ ID NO: 2580382 - DNA, 25 bp, Homo sapien
tattttgtcttacatcttaattgca

SEQ ID NO: 2580383 - DNA, 25 bp, Homo sapien
cactcccaggcaccaagctctggca

SEQ ID NO: 2580384 - DNA, 25 bp, Homo sapien
gatgaacaacctgaacacacagcag

SEQ ID NO: 2580385 - DNA, 25 bp, Homo sapien
tccataagggaagtctgaagtgagc

SEQ ID NO: 2580386 - DNA, 25 bp, Homo sapien
tggcaactccttccataagggaagt

SEQ ID NO: 2580387 - DNA, 25 bp, Homo sapien
gaagtctgaagtgagcagtcgagct

SEQ ID NO: 2580388 - DNA, 25 bp, Homo sapien
attttacttgctctatctggcaact

SEQ ID NO: 2580389 - DNA, 25 bp, Homo sapien
gagcgagagctccttaacgccagtt

SEQ ID NO: 2580390 - DNA, 25 bp, Homo sapien
ctggcgaggatacaggctcaaaggc

SEQ ID NO: 2580391 - DNA, 25 bp, Homo sapien
agctctagggctctcggatgccccg

SEQ ID NO: 2580392 - DNA, 25 bp, Homo sapien
tgttaggctgaggtcgcccagtcac

SEQ ID NO: 2580393 - DNA, 25 bp, Homo sapien
atctttgaatgtagaatccgtttcc

SEQ ID NO: 2580394 - DNA, 25 bp, Homo sapien
tccctttcgagattgtgacatcttt

SEQ ID NO: 2580395 - DNA, 25 bp, Homo sapien
agatgatctacttccctttcgagat

SEQ ID NO: 2580396 - DNA, 25 bp, Homo sapien
gtgtatctggtactccctgccggag

SEQ ID NO: 2580397 - DNA, 25 bp, Homo sapien
ttaagtaggaatggagccttcccag

SEQ ID NO: 2580398 - DNA, 25 bp, Homo sapien
agtaggaatggagccttcccagtgt

SEQ ID NO: 2580399 - DNA, 25 bp, Homo sapien
ttcccagtgttgaaataaacctgtg

SEQ ID NO: 2580400 - DNA, 25 bp, Homo sapien
tcccagtgttgaaataaacctgtgt

SEQ ID NO: 2580401 - DNA, 25 bp, Homo sapien
tcctctgtgcaatgtgcatgaagcc

SEQ ID NO: 2580402 - DNA, 25 bp, Homo sapien
gcagtcccagcaccaaggccggctt

SEQ ID NO: 2580403 - DNA, 25 bp, Homo sapien
ctgtccccatgaatctcctcctctg

SEQ ID NO: 2580404 - DNA, 25 bp, Homo sapien
acaccgctccctgttccctgctggg

SEQ ID NO: 2580405 - DNA, 25 bp, Homo sapien
ttcgataaccttcccgctgtgccta

SEQ ID NO: 2580406 - DNA, 25 bp, Homo sapien
gtcttcgataaccttcccgctgtgc

SEQ ID NO: 2580407 - DNA, 25 bp, Homo sapien
tttgtcttcgataaccttcccgctg

SEQ ID NO: 2580408 - DNA, 25 bp, Homo sapien
tgtcttcgataaccttcccgctgtg

SEQ ID NO: 2580409 - DNA, 25 bp, Homo sapien
taaccttaaccgacactatgagcta

SEQ ID NO: 2580410 - DNA, 25 bp, Homo sapien
cagcatgtgactgagatgtctaacc

SEQ ID NO: 2580411 - DNA, 25 bp, Homo sapien
tgagatctcagggtgcaaggtcaca

SEQ ID NO: 2580412 - DNA, 25 bp, Homo sapien
gattttaaacgtgctcagctctcgt

SEQ ID NO: 2580413 - DNA, 25 bp, Homo sapien
ggcaacagagggaagctacatctca

SEQ ID NO: 2580414 - DNA, 25 bp, Homo sapien
tggaagcgatgtcaatcatgcaact

SEQ ID NO: 2580415 - DNA, 25 bp, Homo sapien
agatttcaaacacttcggccgggcg

SEQ ID NO: 2580416 - DNA, 25 bp, Homo sapien
gcccatttttggtgagggtctgaca

SEQ ID NO: 2580417 - DNA, 25 bp, Homo sapien
gacaggtgactgtggcttaacagct

SEQ ID NO: 2580418 - DNA, 25 bp, Homo sapien
tggacaggtgactgtggcttaacag

SEQ ID NO: 2580419 - DNA, 25 bp, Homo sapien
taatgtaattgtcaagtaggtaatg

SEQ ID NO: 2580420 - DNA, 25 bp, Homo sapien
taattgtcaagtaggtaatgtgctc

SEQ ID NO: 2580421 - DNA, 25 bp, Homo sapien
tcagggaaatacacgtccccatttg

SEQ ID NO: 2580422 - DNA, 25 bp, Homo sapien
cagggaaatacacgtccccatttgt

SEQ ID NO: 2580423 - DNA, 25 bp, Homo sapien
ggctgaccaagcctaccctcgggga

SEQ ID NO: 2580424 - DNA, 25 bp, Homo sapien
tatttggtggcatcatacactgggc

SEQ ID NO: 2580425 - DNA, 25 bp, Homo sapien
tttggtggcatcatacactgggcac

SEQ ID NO: 2580426 - DNA, 25 bp, Homo sapien
tgtatttggtggcatcatacactgg

SEQ ID NO: 2580427 - DNA, 25 bp, Homo sapien
ctgttgatgaagagacagacgtgtc

SEQ ID NO: 2580428 - DNA, 25 bp, Homo sapien
cgcctcgcactgtcattatctgttg

SEQ ID NO: 2580429 - DNA, 25 bp, Homo sapien
tgctccaaagctgtattcagctgcc

SEQ ID NO: 2580430 - DNA, 25 bp, Homo sapien
agacgtgtctccgacaacatccagg

SEQ ID NO: 2580431 - DNA, 25 bp, Homo sapien
ttccagagcgatgttgccccacctg

SEQ ID NO: 2580432 - DNA, 25 bp, Homo sapien
tgcagaccatgaggacggcagtcct

SEQ ID NO: 2580433 - DNA, 25 bp, Homo sapien
tcactgctccgggacttccagagcg

SEQ ID NO: 2580434 - DNA, 25 bp, Homo sapien
tcaaggctgagactggcgctcagtc

SEQ ID NO: 2580435 - DNA, 25 bp, Homo sapien
tcgacacacccaggcctgatgactc

SEQ ID NO: 2580436 - DNA, 25 bp, Homo sapien
cagctcgacacacccaggcctgatg

SEQ ID NO: 2580437 - DNA, 25 bp, Homo sapien
cctgcccagctcgacacacccaggc

SEQ ID NO: 2580438 - DNA, 25 bp, Homo sapien
ctcgacacacccaggcctgatgact

SEQ ID NO: 2580439 - DNA, 25 bp, Homo sapien
gccagccagagaaagaagggtcacc

SEQ ID NO: 2580440 - DNA, 25 bp, Homo sapien
ggccccacggagagatgagcacctg

SEQ ID NO: 2580441 - DNA, 25 bp, Homo sapien
cctgtcgggcttcccttccaagaca

SEQ ID NO: 2580442 - DNA, 25 bp, Homo sapien
tgtggccatcccaggtttcttttga

SEQ ID NO: 2580443 - DNA, 25 bp, Homo sapien
ctgaaggagcagttataaacaggag

SEQ ID NO: 2580444 - DNA, 25 bp, Homo sapien
ataaacaggagactgtctctgcagc

SEQ ID NO: 2580445 - DNA, 25 bp, Homo sapien
gttataaacaggagactgtctctgc

SEQ ID NO: 2580446 - DNA, 25 bp, Homo sapien
tataaacaggagactgtctctgcag

SEQ ID NO: 2580447 - DNA, 25 bp, Homo sapien
ttccccggaacttgccggctgcttg

SEQ ID NO: 2580448 - DNA, 25 bp, Homo sapien
ccaagatagctgtagggacccacgt

SEQ ID NO: 2580449 - DNA, 25 bp, Homo sapien
cggtgcaggtccaagatagctgtag

SEQ ID NO: 2580450 - DNA, 25 bp, Homo sapien
gcttgttgacatgatccagtgttcg

SEQ ID NO: 2580451 - DNA, 25 bp, Homo sapien
gaactagtgatgcagggctcagttc

SEQ ID NO: 2580452 - DNA, 25 bp, Homo sapien
tagaactagtgatgcagggctcagt

SEQ ID NO: 2580453 - DNA, 25 bp, Homo sapien
agaactagtgatgcagggctcagtt

SEQ ID NO: 2580454 - DNA, 25 bp, Homo sapien
ctagaactagtgatgcagggctcag

SEQ ID NO: 2580455 - DNA, 25 bp, Homo sapien
cctgcctgccatcgtatctggcaat

SEQ ID NO: 2580456 - DNA, 25 bp, Homo sapien
caattcgagtggttgcttctggcag

SEQ ID NO: 2580457 - DNA, 25 bp, Homo sapien
cgtatctggcaattcgagtggttgc

SEQ ID NO: 2580458 - DNA, 25 bp, Homo sapien
cctgccatcgtatctggcaattcga

SEQ ID NO: 2580459 - DNA, 25 bp, Homo sapien
tgaagcacgggagctctttgcggat

SEQ ID NO: 2580460 - DNA, 25 bp, Homo sapien
gatcgctgcactacaggtggtgaca

SEQ ID NO: 2580461 - DNA, 25 bp, Homo sapien
tgacacactccatagagggatcgct

SEQ ID NO: 2580462 - DNA, 25 bp, Homo sapien
catgccgtatgttccttccacaagg

SEQ ID NO: 2580463 - DNA, 25 bp, Homo sapien
cagagcgtcagagaatctttgttgc

SEQ ID NO: 2580464 - DNA, 25 bp, Homo sapien
tgagaagtgcgtctcctgaaatgcc

SEQ ID NO: 2580465 - DNA, 25 bp, Homo sapien
gccataggtgagaagtgcgtctcct

SEQ ID NO: 2580466 - DNA, 25 bp, Homo sapien
tttggcatcccgcagagcgtcagag

SEQ ID NO: 2580467 - DNA, 25 bp, Homo sapien
aggcaccaacggatgacaggagcgc

SEQ ID NO: 2580468 - DNA, 25 bp, Homo sapien
aacggatgacaggagcgctccagct

SEQ ID NO: 2580469 - DNA, 25 bp, Homo sapien
atgacaggagcgctccagctgcaat

SEQ ID NO: 2580470 - DNA, 25 bp, Homo sapien
agtccccagcttcgtctctctcctt

SEQ ID NO: 2580471 - DNA, 25 bp, Homo sapien
ttcttcacgtgtagcctcgtccaag

SEQ ID NO: 2580472 - DNA, 25 bp, Homo sapien
taagggagcacgagaaagacccagt

SEQ ID NO: 2580473 - DNA, 25 bp, Homo sapien
ttcacgtgtagcctcgtccaagagc

SEQ ID NO: 2580474 - DNA, 25 bp, Homo sapien
ctaagggagcacgagaaagacccag

SEQ ID NO: 2580475 - DNA, 25 bp, Homo sapien
gggtagcactgcttggactcttgcc

SEQ ID NO: 2580476 - DNA, 25 bp, Homo sapien
aaaccactggccacgatgttgctgg

SEQ ID NO: 2580477 - DNA, 25 bp, Homo sapien
gaccaagccttgatgttgccttgac

SEQ ID NO: 2580478 - DNA, 25 bp, Homo sapien
tcttgccccggctgcattgaccaag

SEQ ID NO: 2580479 - DNA, 25 bp, Homo sapien
tctgaggacggttgtcaaacggcac

SEQ ID NO: 2580480 - DNA, 25 bp, Homo sapien
acggttgtcaaacggcactgtggga

SEQ ID NO: 2580481 - DNA, 25 bp, Homo sapien
caactgtctctgaggacggttgtca

SEQ ID NO: 2580482 - DNA, 25 bp, Homo sapien
caaacggcactgtgggaagacttgg

SEQ ID NO: 2580483 - DNA, 25 bp, Homo sapien
aataacccaactccgccactgagtg

SEQ ID NO: 2580484 - DNA, 25 bp, Homo sapien
ggcaagttcattgagcacaataacc

SEQ ID NO: 2580485 - DNA, 25 bp, Homo sapien
gccactgagtgtgtaagttagaacc

SEQ ID NO: 2580486 - DNA, 25 bp, Homo sapien
taagagacatcgtccaatccaaggg

SEQ ID NO: 2580487 - DNA, 25 bp, Homo sapien
tggctggcctcgctccgaagatggt

SEQ ID NO: 2580488 - DNA, 25 bp, Homo sapien
aaagcctctgggatacacattttct

SEQ ID NO: 2580489 - DNA, 25 bp, Homo sapien
cccttcatcttgaaagaatcccggg

SEQ ID NO: 2580490 - DNA, 25 bp, Homo sapien
tctcctcggactgcctggatcagag

SEQ ID NO: 2580491 - DNA, 25 bp, Homo sapien
gaagcaccgtctccagcaggaagta

SEQ ID NO: 2580492 - DNA, 25 bp, Homo sapien
taaacatccctgttattgaagccac

SEQ ID NO: 2580493 - DNA, 25 bp, Homo sapien
tcaatagcgttggactcaggcggtc

SEQ ID NO: 2580494 - DNA, 25 bp, Homo sapien
ggctcaacttggacagaagcaccgt

SEQ ID NO: 2580495 - DNA, 25 bp, Homo sapien
gatgacggtgggagctgtctctggg

SEQ ID NO: 2580496 - DNA, 25 bp, Homo sapien
tgcgatgacggtgggagctgtctct

SEQ ID NO: 2580497 - DNA, 25 bp, Homo sapien
cgatgacggtgggagctgtctctgg

SEQ ID NO: 2580498 - DNA, 25 bp, Homo sapien
ctgcgatgacggtgggagctgtctc

SEQ ID NO: 2580499 - DNA, 25 bp, Homo sapien
gggctgcctctcgcatttggcagcc

SEQ ID NO: 2580500 - DNA, 25 bp, Homo sapien
ctctcccacccaacgcctgtgctgt

SEQ ID NO: 2580501 - DNA, 25 bp, Homo sapien
ctgcctctcgcatttggcagccggg

SEQ ID NO: 2580502 - DNA, 25 bp, Homo sapien
gcctctcgcatttggcagccgggtc

SEQ ID NO: 2580503 - DNA, 25 bp, Homo sapien
ggtgtattgccgcctgacaacggcc

SEQ ID NO: 2580504 - DNA, 25 bp, Homo sapien
ccggagggtgtattgccgcctgaca

SEQ ID NO: 2580505 - DNA, 25 bp, Homo sapien
ggagggtgtattgccgcctgacaac

SEQ ID NO: 2580506 - DNA, 25 bp, Homo sapien
tgtattgccgcctgacaacggccca

SEQ ID NO: 2580507 - DNA, 25 bp, Homo sapien
caccagcacggaagatttgttgaga

SEQ ID NO: 2580508 - DNA, 25 bp, Homo sapien
accagcacggaagatttgttgagat

SEQ ID NO: 2580509 - DNA, 25 bp, Homo sapien
ctcaccagcacggaagatttgttga

SEQ ID NO: 2580510 - DNA, 25 bp, Homo sapien
tcaccagcacggaagatttgttgag

SEQ ID NO: 2580511 - DNA, 25 bp, Homo sapien
tcatgacagcccttttggtccggtg

SEQ ID NO: 2580512 - DNA, 25 bp, Homo sapien
cttttggtccggtgggccatcctct

SEQ ID NO: 2580513 - DNA, 25 bp, Homo sapien
tccagcaggtgtggataatgaccag

SEQ ID NO: 2580514 - DNA, 25 bp, Homo sapien
ccaggaacaggtcctcgacgatgct

SEQ ID NO: 2580515 - DNA, 25 bp, Homo sapien
ggtggagacccttccatcctgcagc

SEQ ID NO: 2580516 - DNA, 25 bp, Homo sapien
ggctgagtaacgatgagctgctggg

SEQ ID NO: 2580517 - DNA, 25 bp, Homo sapien
ctgagtaacgatgagctgctgggac

SEQ ID NO: 2580518 - DNA, 25 bp, Homo sapien
gggacagcggtggagacccttccat

SEQ ID NO: 2580519 - DNA, 25 bp, Homo sapien
caagtggacgccatggtctccaggt

SEQ ID NO: 2580520 - DNA, 25 bp, Homo sapien
tggactcgtcaagtggacgccatgg

SEQ ID NO: 2580521 - DNA, 25 bp, Homo sapien
aaaagatgacagcaacgtggactcg

SEQ ID NO: 2580522 - DNA, 25 bp, Homo sapien
gacagcaacgtggactcgtcaagtg

SEQ ID NO: 2580523 - DNA, 25 bp, Homo sapien
tttcgtatttcccatggctgcttgg

SEQ ID NO: 2580524 - DNA, 25 bp, Homo sapien
gtgggttttgtagaatgacctgaat

SEQ ID NO: 2580525 - DNA, 25 bp, Homo sapien
ccacctctcgcctgagttcctgtct

SEQ ID NO: 2580526 - DNA, 25 bp, Homo sapien
ccatctctcagatgagttcctgtct

SEQ ID NO: 2580527 - DNA, 25 bp, Homo sapien
catctctcagatgagttcctgtctc

SEQ ID NO: 2580528 - DNA, 25 bp, Homo sapien
caccatctctcacttgagttcctgt

SEQ ID NO: 2580529 - DNA, 25 bp, Homo sapien
tgcagattccaccaggtcaaaaccg

SEQ ID NO: 2580530 - DNA, 25 bp, Homo sapien
agtaccttccgcctgtgccaggtgt

SEQ ID NO: 2580531 - DNA, 25 bp, Homo sapien
aaaaccgaacccatcatcatccatg

SEQ ID NO: 2580532 - DNA, 25 bp, Homo sapien
tgccaggtgtgttgtcctaaaccgt

SEQ ID NO: 2580533 - DNA, 25 bp, Homo sapien
tagccagatgaagccggccatggcg

SEQ ID NO: 2580534 - DNA, 25 bp, Homo sapien
actcgccgtagccagatgaagccgg

SEQ ID NO: 2580535 - DNA, 25 bp, Homo sapien
ccatggcggcctcgatcccgcagct

SEQ ID NO: 2580536 - DNA, 25 bp, Homo sapien
agcggactcgccgtagccagatgaa

SEQ ID NO: 2580537 - DNA, 25 bp, Homo sapien
agaaggtctggaaaaacaggcctct

SEQ ID NO: 2580538 - DNA, 25 bp, Homo sapien
ctgaagggccataaccatggactct

SEQ ID NO: 2580539 - DNA, 25 bp, Homo sapien
ttggtgttttccaccccacactcca

SEQ ID NO: 2580540 - DNA, 25 bp, Homo sapien
aagggccataaccatggactctgga

SEQ ID NO: 2580541 - DNA, 25 bp, Homo sapien
gctgtggcaccagcaagccagaccc

SEQ ID NO: 2580542 - DNA, 25 bp, Homo sapien
tgggtcggccttgctctcagaaagt

SEQ ID NO: 2580543 - DNA, 25 bp, Homo sapien
ccagggcaggtatcgagggacatct

SEQ ID NO: 2580544 - DNA, 25 bp, Homo sapien
aagccccaccctagctgcttgagga

SEQ ID NO: 2580545 - DNA, 25 bp, Homo sapien
cctggataaaggatggccgctaccc

SEQ ID NO: 2580546 - DNA, 25 bp, Homo sapien
ctcctcctggatcacacgctcagct

SEQ ID NO: 2580547 - DNA, 25 bp, Homo sapien
tgctcctcctggatcacacgctcag

SEQ ID NO: 2580548 - DNA, 25 bp, Homo sapien
gctcctcctggatcacacgctcagc

SEQ ID NO: 2580549 - DNA, 25 bp, Homo sapien
caggggagggctccaattgctcctc

SEQ ID NO: 2580550 - DNA, 25 bp, Homo sapien
caagacaggcatctgcaagcacagc

SEQ ID NO: 2580551 - DNA, 25 bp, Homo sapien
ggctccacagaagccgccagggtcc

SEQ ID NO: 2580552 - DNA, 25 bp, Homo sapien
tgcacctcccttggttcggttctca

SEQ ID NO: 2580553 - DNA, 25 bp, Homo sapien
tggttcggttctcaagacaggcatc

SEQ ID NO: 2580554 - DNA, 25 bp, Homo sapien
tgggaaccaactagggccacaggct

SEQ ID NO: 2580555 - DNA, 25 bp, Homo sapien
cctgggaaccaactagggccacagg

SEQ ID NO: 2580556 - DNA, 25 bp, Homo sapien
ctgggaaccaactagggccacaggc

SEQ ID NO: 2580557 - DNA, 25 bp, Homo sapien
ctgcaaatttgattttgtttgtggc

SEQ ID NO: 2580558 - DNA, 25 bp, Homo sapien
tttgattttgtttgtggcacaattt

SEQ ID NO: 2580559 - DNA, 25 bp, Homo sapien
caaatttgattttgtttgtggcaca

SEQ ID NO: 2580560 - DNA, 25 bp, Homo sapien
aatttgattttgtttgtggcacaat

SEQ ID NO: 2580561 - DNA, 25 bp, Homo sapien
gagagaaccggacccagttgctttc

SEQ ID NO: 2580562 - DNA, 25 bp, Homo sapien
gagttgggcggctgggagagaaccg

SEQ ID NO: 2580563 - DNA, 25 bp, Homo sapien
tgctcaatatgacctgaagactggg

SEQ ID NO: 2580564 - DNA, 25 bp, Homo sapien
acttgggaagttcttgtcatgctca

SEQ ID NO: 2580565 - DNA, 25 bp, Homo sapien
gaagccttttgcagagaagtcaaag

SEQ ID NO: 2580566 - DNA, 25 bp, Homo sapien
tgaagaagcattaactcctccagaa

SEQ ID NO: 2580567 - DNA, 25 bp, Homo sapien
tacctgaagaagcattaactcctcc

SEQ ID NO: 2580568 - DNA, 25 bp, Homo sapien
attcatccgcgcctgaagccaaaca

SEQ ID NO: 2580569 - DNA, 25 bp, Homo sapien
ttttgtccagccagcgaggtatccc

SEQ ID NO: 2580570 - DNA, 25 bp, Homo sapien
cgtggcccagcagtccgcgtggttt

SEQ ID NO: 2580571 - DNA, 25 bp, Homo sapien
gcgaggtatcccttgcactgtgtcc

SEQ ID NO: 2580572 - DNA, 25 bp, Homo sapien
cagtccgcgtggttttgtccagcca

SEQ ID NO: 2580573 - DNA, 25 bp, Homo sapien
tacatggatgggattttgtccttca

SEQ ID NO: 2580574 - DNA, 25 bp, Homo sapien
cacagagctgcttcgtgggttttac

SEQ ID NO: 2580575 - DNA, 25 bp, Homo sapien
tctttcgacagtaagaggcccggtc

SEQ ID NO: 2580576 - DNA, 25 bp, Homo sapien
tcagttgtcaggcaaggatggcgca

SEQ ID NO: 2580577 - DNA, 25 bp, Homo sapien
gatttgtctcgtttagtcgctgcct

SEQ ID NO: 2580578 - DNA, 25 bp, Homo sapien
atgcacgccgcgtggaaccagctgg

SEQ ID NO: 2580579 - DNA, 25 bp, Homo sapien
acggaggcctgactgccgtctggcc

SEQ ID NO: 2580580 - DNA, 25 bp, Homo sapien
gatgagctgagagtttcgagttcca

SEQ ID NO: 2580581 - DNA, 25 bp, Homo sapien
accgactgaccgcagttgtccaggg

SEQ ID NO: 2580582 - DNA, 25 bp, Homo sapien
gagaggaccgactgaccgcagttgt

SEQ ID NO: 2580583 - DNA, 25 bp, Homo sapien
tgaccgcagttgtccagggcggaat

SEQ ID NO: 2580584 - DNA, 25 bp, Homo sapien
agaggaaaacgagaggaccgactga

SEQ ID NO: 2580585 - DNA, 25 bp, Homo sapien
cgaggaaccccagagatgagcagga

SEQ ID NO: 2580586 - DNA, 25 bp, Homo sapien
tccgaggaaccccagagatgagcag

SEQ ID NO: 2580587 - DNA, 25 bp, Homo sapien
ggaaccccagagatgagcaggagga

SEQ ID NO: 2580588 - DNA, 25 bp, Homo sapien
ctccgaggaaccccagagatgagca

SEQ ID NO: 2580589 - DNA, 25 bp, Homo sapien
gcagagatgtgcttccaggaggacc

SEQ ID NO: 2580590 - DNA, 25 bp, Homo sapien
agagatgtgcttccaggaggaccct

SEQ ID NO: 2580591 - DNA, 25 bp, Homo sapien
cagcacaactcagacgccagggttg

SEQ ID NO: 2580592 - DNA, 25 bp, Homo sapien
tgcccgacacagagctaagtcctcg

SEQ ID NO: 2580593 - DNA, 25 bp, Homo sapien
gccccggctcctgaaaagtgtccat

SEQ ID NO: 2580594 - DNA, 25 bp, Homo sapien
tccccattcatgtggagagatggct

SEQ ID NO: 2580595 - DNA, 25 bp, Homo sapien
cttcctaggccaacatccttgggtg

SEQ ID NO: 2580596 - DNA, 25 bp, Homo sapien
acatccttgggtgacacctgttgaa

SEQ ID NO: 2580597 - DNA, 25 bp, Homo sapien
cagcacggcgccgcatccagggagt

SEQ ID NO: 2580598 - DNA, 25 bp, Homo sapien
gccttcctaggccaacatccttggg

SEQ ID NO: 2580599 - DNA, 25 bp, Homo sapien
ccctggacccatggcgggcccaggc

SEQ ID NO: 2580600 - DNA, 25 bp, Homo sapien
ctgccctggacccatggcgggccca

SEQ ID NO: 2580601 - DNA, 25 bp, Homo sapien
tgccctggacccatggcgggcccag

SEQ ID NO: 2580602 - DNA, 25 bp, Homo sapien
ggctgccctggacccatggcgggcc

SEQ ID NO: 2580603 - DNA, 25 bp, Homo sapien
agaaacacacgtatgacagctgtgg

SEQ ID NO: 2580604 - DNA, 25 bp, Homo sapien
ctggagaaacacacgtatgacagct

SEQ ID NO: 2580605 - DNA, 25 bp, Homo sapien
ctaaatatgttgtcacgatgcccca

SEQ ID NO: 2580606 - DNA, 25 bp, Homo sapien
cagctgtggcattttgctaaatatg

SEQ ID NO: 2580607 - DNA, 25 bp, Homo sapien
gacggcatgatgagcgaactctggt

SEQ ID NO: 2580608 - DNA, 25 bp, Homo sapien
tggtctatccgaggcctgggaagct

SEQ ID NO: 2580609 - DNA, 25 bp, Homo sapien
gaattcccgcgtaatcagtcactga

SEQ ID NO: 2580610 - DNA, 25 bp, Homo sapien
ctgggaagctggctcagaagcagca

SEQ ID NO: 2580611 - DNA, 25 bp, Homo sapien
cttcgggaacagagcgccagtcagg

SEQ ID NO: 2580612 - DNA, 25 bp, Homo sapien
gtggaggggaccctggatgaggggc

SEQ ID NO: 2580613 - DNA, 25 bp, Homo sapien
tggaggggaccctggatgaggggcc

SEQ ID NO: 2580614 - DNA, 25 bp, Homo sapien
ggaggggaccctggatgaggggcca

SEQ ID NO: 2580615 - DNA, 25 bp, Homo sapien
cgaccgctggaggaaactggagtca

SEQ ID NO: 2580616 - DNA, 25 bp, Homo sapien
agcacacgaccgctggaggaaactg

SEQ ID NO: 2580617 - DNA, 25 bp, Homo sapien
caaaaaatccagcacacgaccgctg

SEQ ID NO: 2580618 - DNA, 25 bp, Homo sapien
aaatccagcacacgaccgctggagg

SEQ ID NO: 2580619 - DNA, 25 bp, Homo sapien
gaggccagctggattagcctgactg

SEQ ID NO: 2580620 - DNA, 25 bp, Homo sapien
gggctgcggttctaacacgctgtgc

SEQ ID NO: 2580621 - DNA, 25 bp, Homo sapien
ggttctaacacgctgtgctctggca

SEQ ID NO: 2580622 - DNA, 25 bp, Homo sapien
ggcccactccgagctctgtggtgcg

SEQ ID NO: 2580623 - DNA, 25 bp, Homo sapien
tctatggccccagacggaaaggctc

SEQ ID NO: 2580624 - DNA, 25 bp, Homo sapien
ctatggccccagacggaaaggctcc

SEQ ID NO: 2580625 - DNA, 25 bp, Homo sapien
ctctatggccccagacggaaaggct

SEQ ID NO: 2580626 - DNA, 25 bp, Homo sapien
tcatcacagattcggcagtggcaga

SEQ ID NO: 2580627 - DNA, 25 bp, Homo sapien
tgagaccgccgtggtctcctgttgc

SEQ ID NO: 2580628 - DNA, 25 bp, Homo sapien
tctgactgggaaccagcgaaatcat

SEQ ID NO: 2580629 - DNA, 25 bp, Homo sapien
gaggcaccgtctgtcaggagctttc

SEQ ID NO: 2580630 - DNA, 25 bp, Homo sapien
tacagcgtgcataatggctggcact

SEQ ID NO: 2580631 - DNA, 25 bp, Homo sapien
taagcatcttcgctggagacacact

SEQ ID NO: 2580632 - DNA, 25 bp, Homo sapien
ttcttgatatggcagcaggtaagca

SEQ ID NO: 2580633 - DNA, 25 bp, Homo sapien
tgtgggtcgacagcacatctgagct

SEQ ID NO: 2580634 - DNA, 25 bp, Homo sapien
tcctagagaaagagacggaccatgt

SEQ ID NO: 2580635 - DNA, 25 bp, Homo sapien
taacacggttgtttcctgcgcagtg

SEQ ID NO: 2580636 - DNA, 25 bp, Homo sapien
cacctgtgatctgcgttaacgggcc

SEQ ID NO: 2580637 - DNA, 25 bp, Homo sapien
catgttctcaaaactgtgcctcgag

SEQ ID NO: 2580638 - DNA, 25 bp, Homo sapien
acagtgaaagatgccccgaggtgct

SEQ ID NO: 2580639 - DNA, 25 bp, Homo sapien
aagtgtgaagcagatttctctcctc

SEQ ID NO: 2580640 - DNA, 25 bp, Homo sapien
gtgctgcagagttaactcggatcca

SEQ ID NO: 2580641 - DNA, 25 bp, Homo sapien
cagatgtcctgcctcgttgttggca

SEQ ID NO: 2580642 - DNA, 25 bp, Homo sapien
cctgtagcacccgtgacattgccag

SEQ ID NO: 2580643 - DNA, 25 bp, Homo sapien
gcaggggcacggcacccctgtagca

SEQ ID NO: 2580644 - DNA, 25 bp, Homo sapien
gagaattcgagtggtcgtgactgcc

SEQ ID NO: 2580645 - DNA, 25 bp, Homo sapien
tcgagtggtcgtgactgccatgagc

SEQ ID NO: 2580646 - DNA, 25 bp, Homo sapien
tgacgggctccacaagcagttcagg

SEQ ID NO: 2580647 - DNA, 25 bp, Homo sapien
gagagttggtttccctgtgattcct

SEQ ID NO: 2580648 - DNA, 25 bp, Homo sapien
cagccagcccaatgtgtaggcagaa

SEQ ID NO: 2580649 - DNA, 25 bp, Homo sapien
taggcagaagctgggaccggccaat

SEQ ID NO: 2580650 - DNA, 25 bp, Homo sapien
cagacttatatgtgtttacgcagag

SEQ ID NO: 2580651 - DNA, 25 bp, Homo sapien
tcaaaagcaaaggacgcagacttat

SEQ ID NO: 2580652 - DNA, 25 bp, Homo sapien
gcaaaggacgcagacttatatgtgt

SEQ ID NO: 2580653 - DNA, 25 bp, Homo sapien
tatatgtgtttacgcagagtaattc

SEQ ID NO: 2580654 - DNA, 25 bp, Homo sapien
tgctttcaactccatgggaccaagt

SEQ ID NO: 2580655 - DNA, 25 bp, Homo sapien
gatctgacaagaaatgctttcaact

SEQ ID NO: 2580656 - DNA, 25 bp, Homo sapien
cacgctgttgcctccaactttgaga

SEQ ID NO: 2580657 - DNA, 25 bp, Homo sapien
ccaactttgagattgggccggatct

SEQ ID NO: 2580658 - DNA, 25 bp, Homo sapien
aaagccccacacgtctctgaacatg

SEQ ID NO: 2580659 - DNA, 25 bp, Homo sapien
gaaaagccccacacgtctctgaaca

SEQ ID NO: 2580660 - DNA, 25 bp, Homo sapien
cacacgtctctgaacatgaatggag

SEQ ID NO: 2580661 - DNA, 25 bp, Homo sapien
gccccacacgtctctgaacatgaat

SEQ ID NO: 2580662 - DNA, 25 bp, Homo sapien
gacagacgtgctcggaggctctctt

SEQ ID NO: 2580663 - DNA, 25 bp, Homo sapien
cactgtacaggacgtctggtcacac

SEQ ID NO: 2580664 - DNA, 25 bp, Homo sapien
tctcctctccgcgtggaactgacag

SEQ ID NO: 2580665 - DNA, 25 bp, Homo sapien
cccagaaatgttcccggagacagac

SEQ ID NO: 2580666 - DNA, 25 bp, Homo sapien
agaagaggcatggagccgagcgcac

SEQ ID NO: 2580667 - DNA, 25 bp, Homo sapien
tgggacctgagaagaggcatggagc

SEQ ID NO: 2580668 - DNA, 25 bp, Homo sapien
cctgagaagaggcatggagccgagc

SEQ ID NO: 2580669 - DNA, 25 bp, Homo sapien
gacctgagaagaggcatggagccga

SEQ ID NO: 2580670 - DNA, 25 bp, Homo sapien
ctacagcgccaaggaggggaggggc

SEQ ID NO: 2580671 - DNA, 25 bp, Homo sapien
tacagcgccaaggaggggaggggcc

SEQ ID NO: 2580672 - DNA, 25 bp, Homo sapien
agctgtggcttatcccgtggccgca

SEQ ID NO: 2580673 - DNA, 25 bp, Homo sapien
gcactgccgccactccattgctgct

SEQ ID NO: 2580674 - DNA, 25 bp, Homo sapien
gaatcataaatgcagatgctctcac

SEQ ID NO: 2580675 - DNA, 25 bp, Homo sapien
tgctgctgtttgacccgctaggaat

SEQ ID NO: 2580676 - DNA, 25 bp, Homo sapien
ctgtgatctcaggacgcaccccatc

SEQ ID NO: 2580677 - DNA, 25 bp, Homo sapien
gagacgactgccctcggcatttcct

SEQ ID NO: 2580678 - DNA, 25 bp, Homo sapien
ttcctgagcctgtgatctctgggag

SEQ ID NO: 2580679 - DNA, 25 bp, Homo sapien
attctgcagcaggagacgactgccc

SEQ ID NO: 2580680 - DNA, 25 bp, Homo sapien
cagtgctagagagctggcgttgcct

SEQ ID NO: 2580681 - DNA, 25 bp, Homo sapien
tgctagagagctggcgttgcctccc

SEQ ID NO: 2580682 - DNA, 25 bp, Homo sapien
agagctggcgttgcctcccaaccag

SEQ ID NO: 2580683 - DNA, 25 bp, Homo sapien
cttgcgctggttacggggcctcggg

SEQ ID NO: 2580684 - DNA, 25 bp, Homo sapien
gtttgcagggactgaaaacagcagg

SEQ ID NO: 2580685 - DNA, 25 bp, Homo sapien
ctccagtgcaatgcggcttgttttc

SEQ ID NO: 2580686 - DNA, 25 bp, Homo sapien
gagcagccatcaggccgtctgaaga

SEQ ID NO: 2580687 - DNA, 25 bp, Homo sapien
caggatgaagtgtgtcatgtctggt

SEQ ID NO: 2580688 - DNA, 25 bp, Homo sapien
gacaggtgattcctgcgctcaggcg

SEQ ID NO: 2580689 - DNA, 25 bp, Homo sapien
gaagctgatctgtggatgccggcca

SEQ ID NO: 2580690 - DNA, 25 bp, Homo sapien
gagctcgtctaccacagtccaggtg

SEQ ID NO: 2580691 - DNA, 25 bp, Homo sapien
tgtgcaatgggatggccagcccaga

SEQ ID NO: 2580692 - DNA, 25 bp, Homo sapien
tctgcgcagggtggagtcacttcac

SEQ ID NO: 2580693 - DNA, 25 bp, Homo sapien
aaacagaccccacgtgatatgcagg

SEQ ID NO: 2580694 - DNA, 25 bp, Homo sapien
ttcacaagccctggagcacagaagg

SEQ ID NO: 2580695 - DNA, 25 bp, Homo sapien
tgtaatgaatgacagagcgggcctg

SEQ ID NO: 2580696 - DNA, 25 bp, Homo sapien
acgaggacatggtcgggtctgcccc

SEQ ID NO: 2580697 - DNA, 25 bp, Homo sapien
aggagagcagctcttgaggtcgctc

SEQ ID NO: 2580698 - DNA, 25 bp, Homo sapien
cacacaacgcgtcctgagggctgtg

SEQ ID NO: 2580699 - DNA, 25 bp, Homo sapien
cctggcatgcttgggagctgaaaag

SEQ ID NO: 2580700 - DNA, 25 bp, Homo sapien
ttgtccctccgctgccagcgctttg

SEQ ID NO: 2580701 - DNA, 25 bp, Homo sapien
gctttgcagtgtccgttttcccgct

SEQ ID NO: 2580702 - DNA, 25 bp, Homo sapien
agcgctttgcagtgtccgttttccc

SEQ ID NO: 2580703 - DNA, 25 bp, Homo sapien
ccagctgcagtttgtccctccgctg

SEQ ID NO: 2580704 - DNA, 25 bp, Homo sapien
tcagatctcatgagccatggacttg

SEQ ID NO: 2580705 - DNA, 25 bp, Homo sapien
catggacttgtcctttggttaagaa

SEQ ID NO: 2580706 - DNA, 25 bp, Homo sapien
tcagtgaaatttgttcagattgtaa

SEQ ID NO: 2580707 - DNA, 25 bp, Homo sapien
ccaggtacaaggagtgacaaggtga

SEQ ID NO: 2580708 - DNA, 25 bp, Homo sapien
cattcttaaggaaaacgtaggcctg

SEQ ID NO: 2580709 - DNA, 25 bp, Homo sapien
aggcattttcgtttggaccagagca

SEQ ID NO: 2580710 - DNA, 25 bp, Homo sapien
aatgctgtttcctcaggcggtggcc

SEQ ID NO: 2580711 - DNA, 25 bp, Homo sapien
aatctgaagtcacgtgggcttcgga

SEQ ID NO: 2580712 - DNA, 25 bp, Homo sapien
caaagattaaccacggaggctgcac

SEQ ID NO: 2580713 - DNA, 25 bp, Homo sapien
gaaacatcggtcactacagagctgg

SEQ ID NO: 2580714 - DNA, 25 bp, Homo sapien
tggcaccctgtacatctgagcaaag

SEQ ID NO: 2580715 - DNA, 25 bp, Homo sapien
gaggctgcacctcagattggaaaca

SEQ ID NO: 2580716 - DNA, 25 bp, Homo sapien
tgcactcttttctttaggcaactaa

SEQ ID NO: 2580717 - DNA, 25 bp, Homo sapien
ggcaactaagcctcaacatttgaat

SEQ ID NO: 2580718 - DNA, 25 bp, Homo sapien
cttttctttaggcaactaagcctca

SEQ ID NO: 2580719 - DNA, 25 bp, Homo sapien
ttaggcaactaagcctcaacatttg

SEQ ID NO: 2580720 - DNA, 25 bp, Homo sapien
tagagccgtctcatgaggcaggaac

SEQ ID NO: 2580721 - DNA, 25 bp, Homo sapien
gccgtgctctggacgaccctttaga

SEQ ID NO: 2580722 - DNA, 25 bp, Homo sapien
gccccagtggcgtttgaagcaggaa

SEQ ID NO: 2580723 - DNA, 25 bp, Homo sapien
tttgtgaacacagggcccttggagg

SEQ ID NO: 2580724 - DNA, 25 bp, Homo sapien
tagagcagctgtattaggtgggacc

SEQ ID NO: 2580725 - DNA, 25 bp, Homo sapien
ccatcctctgggctgctaaagggaa

SEQ ID NO: 2580726 - DNA, 25 bp, Homo sapien
gaaggttgggtggtcgcacatccac

SEQ ID NO: 2580727 - DNA, 25 bp, Homo sapien
accgcatgggatcgtgccaggacta

SEQ ID NO: 2580728 - DNA, 25 bp, Homo sapien
taaatgaacgttcacgctgcagcca

SEQ ID NO: 2580729 - DNA, 25 bp, Homo sapien
tttacaacagcagactgagccgtgg

SEQ ID NO: 2580730 - DNA, 25 bp, Homo sapien
aaaataaatccggtctggcccagag

SEQ ID NO: 2580731 - DNA, 25 bp, Homo sapien
cattctgaactagacgacaggccgc

SEQ ID NO: 2580732 - DNA, 25 bp, Homo sapien
acaactgtggctccccttagaacgg

SEQ ID NO: 2580733 - DNA, 25 bp, Homo sapien
ttgagtctggctgtcccaaaaggca

SEQ ID NO: 2580734 - DNA, 25 bp, Homo sapien
tacgcctcgaattgcatgactctgg

SEQ ID NO: 2580735 - DNA, 25 bp, Homo sapien
catttcagttgggagagcagatgcc

SEQ ID NO: 2580736 - DNA, 25 bp, Homo sapien
gccctcacaggctcaaagttctcat

SEQ ID NO: 2580737 - DNA, 25 bp, Homo sapien
tagttgatgtgactcccggctccat

SEQ ID NO: 2580738 - DNA, 25 bp, Homo sapien
agaatccatcatccaattttgcggg

SEQ ID NO: 2580739 - DNA, 25 bp, Homo sapien
cctcgggtgcatgctgtttctgggc

SEQ ID NO: 2580740 - DNA, 25 bp, Homo sapien
taaagtctttgaaggaatcttccaa

SEQ ID NO: 2580741 - DNA, 25 bp, Homo sapien
gacaaaaccgcatattttggatggg

SEQ ID NO: 2580742 - DNA, 25 bp, Homo sapien
attccatagaacagggcccgtttca

SEQ ID NO: 2580743 - DNA, 25 bp, Homo sapien
cagtctttctgtgggttgcgatgaa

SEQ ID NO: 2580744 - DNA, 25 bp, Homo sapien
gctcccgagctctgcgcagccacct

SEQ ID NO: 2580745 - DNA, 25 bp, Homo sapien
ctctcctaccccttcacccagggcg

SEQ ID NO: 2580746 - DNA, 25 bp, Homo sapien
ttagccacggggatcgcagctgtgt

SEQ ID NO: 2580747 - DNA, 25 bp, Homo sapien
gcagtgccttcttctgtggccgagc

SEQ ID NO: 2580748 - DNA, 25 bp, Homo sapien
gcagtgagtctgttatttgaatgta

SEQ ID NO: 2580749 - DNA, 25 bp, Homo sapien
taaacaaagattgagccacacgggg

SEQ ID NO: 2580750 - DNA, 25 bp, Homo sapien
gaccaacgtcaggatgctgttttct

SEQ ID NO: 2580751 - DNA, 25 bp, Homo sapien
ttcaggttttgcaccgtgaccaacg

SEQ ID NO: 2580752 - DNA, 25 bp, Homo sapien
agggcggcgggaccgctctccaggg

SEQ ID NO: 2580753 - DNA, 25 bp, Homo sapien
acggctacgccgacctcagcttttt

SEQ ID NO: 2580754 - DNA, 25 bp, Homo sapien
ttttctcggtggaagtgcgggagca

SEQ ID NO: 2580755 - DNA, 25 bp, Homo sapien
ggcagaatcctgtgaaacgctttcc

SEQ ID NO: 2580756 - DNA, 25 bp, Homo sapien
tttgggtacctgacatttctcatcg

SEQ ID NO: 2580757 - DNA, 25 bp, Homo sapien
ccgtgttttctttgcgcgggtagtg

SEQ ID NO: 2580758 - DNA, 25 bp, Homo sapien
catttctcatcgcccgtgttttctt

SEQ ID NO: 2580759 - DNA, 25 bp, Homo sapien
tctttgcgcgggtagtgtccctgca

SEQ ID NO: 2580760 - DNA, 25 bp, Homo sapien
tgcagctccacaggtgagccggcct

SEQ ID NO: 2580761 - DNA, 25 bp, Homo sapien
ctgcagctccacaggtgagccggcc

SEQ ID NO: 2580762 - DNA, 25 bp, Homo sapien
tttggaaaatgtcagcaccttctcc

SEQ ID NO: 2580763 - DNA, 25 bp, Homo sapien
tggtttggaaaatgtcagcaccttc

SEQ ID NO: 2580764 - DNA, 25 bp, Homo sapien
cacatctacaagctttggtttggaa

SEQ ID NO: 2580765 - DNA, 25 bp, Homo sapien
gcatttaatccagagtcagccacat

SEQ ID NO: 2580766 - DNA, 25 bp, Homo sapien
tgactcatctgagcaaatcggctgg

SEQ ID NO: 2580767 - DNA, 25 bp, Homo sapien
aatcggctggtagtcgggctgcact

SEQ ID NO: 2580768 - DNA, 25 bp, Homo sapien
catctgagcaaatcggctggtagtc

SEQ ID NO: 2580769 - DNA, 25 bp, Homo sapien
caaatcggctggtagtcgggctgca

SEQ ID NO: 2580770 - DNA, 25 bp, Homo sapien
gccgagtcaggtggcatcaccaccg

SEQ ID NO: 2580771 - DNA, 25 bp, Homo sapien
ctgctgaagccgagtcaggtggcat

SEQ ID NO: 2580772 - DNA, 25 bp, Homo sapien
gcaggctgctgaagccgagtcaggt

SEQ ID NO: 2580773 - DNA, 25 bp, Homo sapien
atcaccaccgtgtcctcgtgccatg

SEQ ID NO: 2580774 - DNA, 25 bp, Homo sapien
atccctcgccttgcaatgtcagcgc

SEQ ID NO: 2580775 - DNA, 25 bp, Homo sapien
cttgcaatgtcagcgctgacctcca

SEQ ID NO: 2580776 - DNA, 25 bp, Homo sapien
tcgccttgcaatgtcagcgctgacc

SEQ ID NO: 2580777 - DNA, 25 bp, Homo sapien
gcaatgtcagcgctgacctccagga

SEQ ID NO: 2580778 - DNA, 25 bp, Homo sapien
tggagccttgaatctcaggtcgaga

SEQ ID NO: 2580779 - DNA, 25 bp, Homo sapien
catgaagcacgttgaagagctccag

SEQ ID NO: 2580780 - DNA, 25 bp, Homo sapien
gaacgatgcgtcctagagatgaaga

SEQ ID NO: 2580781 - DNA, 25 bp, Homo sapien
caggccctgaacgtgctccagtgat

SEQ ID NO: 2580782 - DNA, 25 bp, Homo sapien
cttcgtaacacagactctagaatca

SEQ ID NO: 2580783 - DNA, 25 bp, Homo sapien
acctgttccccagtttctatctggg

SEQ ID NO: 2580784 - DNA, 25 bp, Homo sapien
tctcttcgtaacacagactctagaa

SEQ ID NO: 2580785 - DNA, 25 bp, Homo sapien
gggcttctcttcgtaacacagactc

SEQ ID NO: 2580786 - DNA, 25 bp, Homo sapien
gtgacagtcatgggtctgtacctgt

SEQ ID NO: 2580787 - DNA, 25 bp, Homo sapien
ggctgggcttgcagagactgagctg

SEQ ID NO: 2580788 - DNA, 25 bp, Homo sapien
gtggctcacggcagacctggagtga

SEQ ID NO: 2580789 - DNA, 25 bp, Homo sapien
tctttgacagaatatgcggacggcg

SEQ ID NO: 2580790 - DNA, 25 bp, Homo sapien
cagaatatgcggacggcgaaataac

SEQ ID NO: 2580791 - DNA, 25 bp, Homo sapien
aataacaaaacaggtggcggatgag

SEQ ID NO: 2580792 - DNA, 25 bp, Homo sapien
tctttgacagaacacgcggatggcg

SEQ ID NO: 2580793 - DNA, 25 bp, Homo sapien
gggccccaatgccatagatgcactt

SEQ ID NO: 2580794 - DNA, 25 bp, Homo sapien
ccccaatgccatagatgcacttcat

SEQ ID NO: 2580795 - DNA, 25 bp, Homo sapien
tccggggggccccaatgccatagat

SEQ ID NO: 2580796 - DNA, 25 bp, Homo sapien
ggggggccccaatgccatagatgca

SEQ ID NO: 2580797 - DNA, 25 bp, Homo sapien
tgtgactgaagatgatagtatgact

SEQ ID NO: 2580798 - DNA, 25 bp, Homo sapien
gactgtagtgcctcaggtctgagca

SEQ ID NO: 2580799 - DNA, 25 bp, Homo sapien
aaatgacagtgtggccgtagatggc

SEQ ID NO: 2580800 - DNA, 25 bp, Homo sapien
tagtatgactgtagattgtagtgtg

SEQ ID NO: 2580801 - DNA, 25 bp, Homo sapien
ccgcgtgaatgtagatgttagcgcc

SEQ ID NO: 2580802 - DNA, 25 bp, Homo sapien
tgtgactgtagatggccgcgtgaat

SEQ ID NO: 2580803 - DNA, 25 bp, Homo sapien
tagtgcgactatagatggcagtgcg

SEQ ID NO: 2580804 - DNA, 25 bp, Homo sapien
ctgtagacagcagtgcggccgtaga

SEQ ID NO: 2580805 - DNA, 25 bp, Homo sapien
ttattgacggtccttacatatgctc

SEQ ID NO: 2580806 - DNA, 25 bp, Homo sapien
ttgacggtccttacatatgctctga

SEQ ID NO: 2580807 - DNA, 25 bp, Homo sapien
gacggtccttacatatgctctgaag

SEQ ID NO: 2580808 - DNA, 25 bp, Homo sapien
gtccttacatatgctctgaaggaag

SEQ ID NO: 2580809 - DNA, 25 bp, Homo sapien
gtgagtggccgaagtccacacggtc

SEQ ID NO: 2580810 - DNA, 25 bp, Homo sapien
gataaagccggtgaaaaatgagggc

SEQ ID NO: 2580811 - DNA, 25 bp, Homo sapien
tgcagtcgctgccatagcagaaaca

SEQ ID NO: 2580812 - DNA, 25 bp, Homo sapien
cctctgcttgtttctcgcggagata

SEQ ID NO: 2580813 - DNA, 25 bp, Homo sapien
cttgcagcgtctcccagcccaggct

SEQ ID NO: 2580814 - DNA, 25 bp, Homo sapien
gccttgcagcgtctcccagcccagg

SEQ ID NO: 2580815 - DNA, 25 bp, Homo sapien
gagccttgcagcgtctcccagccca

SEQ ID NO: 2580816 - DNA, 25 bp, Homo sapien
tgcagcgtctcccagcccaggcttt

SEQ ID NO: 2580817 - DNA, 25 bp, Homo sapien
acgcagcaccaactcgggcttcagt

SEQ ID NO: 2580818 - DNA, 25 bp, Homo sapien
aaataatccccgcggggacacgcag

SEQ ID NO: 2580819 - DNA, 25 bp, Homo sapien
gggatgcggcggagagcgactggca

SEQ ID NO: 2580820 - DNA, 25 bp, Homo sapien
ctggcagggaaagcgtgaggtcacg

SEQ ID NO: 2580821 - DNA, 25 bp, Homo sapien
ttttcttccgactggtgtggatccc

SEQ ID NO: 2580822 - DNA, 25 bp, Homo sapien
caattcatatgctaaggagccctgg

SEQ ID NO: 2580823 - DNA, 25 bp, Homo sapien
tcctgcagggtttgagaccctctgt

SEQ ID NO: 2580824 - DNA, 25 bp, Homo sapien
ggaggtgaatccctgcgttttctat

SEQ ID NO: 2580825 - DNA, 25 bp, Homo sapien
catcatcctgtttagtgttcggcat

SEQ ID NO: 2580826 - DNA, 25 bp, Homo sapien
acatcatcctgtttagtgttcggca

SEQ ID NO: 2580827 - DNA, 25 bp, Homo sapien
ttcaacatcatcctgtttagtgttc

SEQ ID NO: 2580828 - DNA, 25 bp, Homo sapien
caacatcatcctgtttagtgttcgg

SEQ ID NO: 2580829 - DNA, 25 bp, Homo sapien
gaaaccagtcattatcccgcaggca

SEQ ID NO: 2580830 - DNA, 25 bp, Homo sapien
tagactcccggccaagagttgcgaa

SEQ ID NO: 2580831 - DNA, 25 bp, Homo sapien
cacagagctgccctaacagatgagt

SEQ ID NO: 2580832 - DNA, 25 bp, Homo sapien
aaacccaaggcatggtgcattcaat

SEQ ID NO: 2580833 - DNA, 25 bp, Homo sapien
gacactgagctgagcgaacggtatg

SEQ ID NO: 2580834 - DNA, 25 bp, Homo sapien
aactcccctgatgaagaaagtgcca

SEQ ID NO: 2580835 - DNA, 25 bp, Homo sapien
cagaggcagcaaagcagcccttata

SEQ ID NO: 2580836 - DNA, 25 bp, Homo sapien
tgtgcatttcacttggtcagcccct

SEQ ID NO: 2580837 - DNA, 25 bp, Homo sapien
gagtgcttgcatccgaaccttcagt

SEQ ID NO: 2580838 - DNA, 25 bp, Homo sapien
ggacctgatcccctatctttgcatg

SEQ ID NO: 2580839 - DNA, 25 bp, Homo sapien
tgtggctctgtgtatctcgcgctgt

SEQ ID NO: 2580840 - DNA, 25 bp, Homo sapien
tgggaagcacctggtaagaaagccc

SEQ ID NO: 2580841 - DNA, 25 bp, Homo sapien
tctctttgatctgtggcactggctg

SEQ ID NO: 2580842 - DNA, 25 bp, Homo sapien
agctggtgaaaaccacgtggaacgg

SEQ ID NO: 2580843 - DNA, 25 bp, Homo sapien
cctcagtgctggttttcctaagtcc

SEQ ID NO: 2580844 - DNA, 25 bp, Homo sapien
tgggacttaagctggtgaaaaccac

SEQ ID NO: 2580845 - DNA, 25 bp, Homo sapien
gaacgggatgctcatgggacctgcc

SEQ ID NO: 2580846 - DNA, 25 bp, Homo sapien
aagtgaagcgatgtgggaaagttcc

SEQ ID NO: 2580847 - DNA, 25 bp, Homo sapien
accacttatttatttgccagaccag

SEQ ID NO: 2580848 - DNA, 25 bp, Homo sapien
aggaaacagatgtgccgggcaccat

SEQ ID NO: 2580849 - DNA, 25 bp, Homo sapien
cacgtttagcagttctgtgcccagg

SEQ ID NO: 2580850 - DNA, 25 bp, Homo sapien
tagaaatttgcattcccggattctc

SEQ ID NO: 2580851 - DNA, 25 bp, Homo sapien
tctctgcggacacatgtggcaggcc

SEQ ID NO: 2580852 - DNA, 25 bp, Homo sapien
gaagtatggagaaattcgcttagaa

SEQ ID NO: 2580853 - DNA, 25 bp, Homo sapien
tgcattcccggattctctctgcgga

SEQ ID NO: 2580854 - DNA, 25 bp, Homo sapien
tttgctggccctccactttcggcaa

SEQ ID NO: 2580855 - DNA, 25 bp, Homo sapien
actttcggcaaagctgcttcttcag

SEQ ID NO: 2580856 - DNA, 25 bp, Homo sapien
ttccttctttgctggccctccactt

SEQ ID NO: 2580857 - DNA, 25 bp, Homo sapien
tggccctccactttcggcaaagctg

SEQ ID NO: 2580858 - DNA, 25 bp, Homo sapien
cttccgcaatatgtctcttaattcc

SEQ ID NO: 2580859 - DNA, 25 bp, Homo sapien
agtactttggcagagacacttccgc

SEQ ID NO: 2580860 - DNA, 25 bp, Homo sapien
tggcagagacacttccgcaatatgt

SEQ ID NO: 2580861 - DNA, 25 bp, Homo sapien
tctcagcaaggcttctcctgcagta

SEQ ID NO: 2580862 - DNA, 25 bp, Homo sapien
tcaagatgcctctttgaggatccgt

SEQ ID NO: 2580863 - DNA, 25 bp, Homo sapien
gacgttcaaagactgtaatagcaca

SEQ ID NO: 2580864 - DNA, 25 bp, Homo sapien
tcttgaggacgttcaaagactgtaa

SEQ ID NO: 2580865 - DNA, 25 bp, Homo sapien
aagactgtaatagcacagggacaca

SEQ ID NO: 2580866 - DNA, 25 bp, Homo sapien
caccatttccctgattggctatttc

SEQ ID NO: 2580867 - DNA, 25 bp, Homo sapien
aacaagtgtgtctcccaagcttgca

SEQ ID NO: 2580868 - DNA, 25 bp, Homo sapien
aagtggcaagcatgggtagttcctg

SEQ ID NO: 2580869 - DNA, 25 bp, Homo sapien
tggcaagcatgggtagttcctggtt

SEQ ID NO: 2580870 - DNA, 25 bp, Homo sapien
aacaatccatgagggccatgtgtcc

SEQ ID NO: 2580871 - DNA, 25 bp, Homo sapien
cacatcactccggcaaggatttttt

SEQ ID NO: 2580872 - DNA, 25 bp, Homo sapien
ccacatcactccggcaaggattttt

SEQ ID NO: 2580873 - DNA, 25 bp, Homo sapien
tctggtctcagggtcacgattagaa

SEQ ID NO: 2580874 - DNA, 25 bp, Homo sapien
tgagcttggcacctaggaacaatcg

SEQ ID NO: 2580875 - DNA, 25 bp, Homo sapien
aagcaaacgtctctgattctctgac

SEQ ID NO: 2580876 - DNA, 25 bp, Homo sapien
cacagagggtgttctgtaagcagct

SEQ ID NO: 2580877 - DNA, 25 bp, Homo sapien
tggagtaagaatagacgccgctgaa

SEQ ID NO: 2580878 - DNA, 25 bp, Homo sapien
ttaaaccacaggaggtgatgacgtc

SEQ ID NO: 2580879 - DNA, 25 bp, Homo sapien
tgacgtcatgtaaaacgctgatgga

SEQ ID NO: 2580880 - DNA, 25 bp, Homo sapien
tgaaaaaagggagcattcatcaggg

SEQ ID NO: 2580881 - DNA, 25 bp, Homo sapien
gctggtatacatcagagcaactatc

SEQ ID NO: 2580882 - DNA, 25 bp, Homo sapien
ctggtatacatcagagcaactatca

SEQ ID NO: 2580883 - DNA, 25 bp, Homo sapien
tgctggtatacatcagagcaactat

SEQ ID NO: 2580884 - DNA, 25 bp, Homo sapien
tggtatacatcagagcaactatcat

SEQ ID NO: 2580885 - DNA, 25 bp, Homo sapien
gaaaaagccgcttcttctgttcttc

SEQ ID NO: 2580886 - DNA, 25 bp, Homo sapien
ttcttctgttcttcgccccgccact

SEQ ID NO: 2580887 - DNA, 25 bp, Homo sapien
gtgaaaaagccgcttcttctgttct

SEQ ID NO: 2580888 - DNA, 25 bp, Homo sapien
atgtgaaaaagccgcttcttctgtt

SEQ ID NO: 2580889 - DNA, 25 bp, Homo sapien
tgaagaagtccagccattgggtggc

SEQ ID NO: 2580890 - DNA, 25 bp, Homo sapien
tggactagccagttcttgacgcgcg

SEQ ID NO: 2580891 - DNA, 25 bp, Homo sapien
tagcctagcaagtggaattcgatcg

SEQ ID NO: 2580892 - DNA, 25 bp, Homo sapien
cttgcgattccacgtagcagcggga

SEQ ID NO: 2580893 - DNA, 25 bp, Homo sapien
attgccgatttccagcacgaccacg

SEQ ID NO: 2580894 - DNA, 25 bp, Homo sapien
ggcggcttcgaagaagtccttttca

SEQ ID NO: 2580895 - DNA, 25 bp, Homo sapien
gtgtccagccagaacacgggcaggt

SEQ ID NO: 2580896 - DNA, 25 bp, Homo sapien
cggatgaagtccatgccgtcggcac

SEQ ID NO: 2580897 - DNA, 25 bp, Homo sapien
ctcagcccagggggcggtaggtggg

SEQ ID NO: 2580898 - DNA, 25 bp, Homo sapien
ccagggggcggtaggtggggcgcag

SEQ ID NO: 2580899 - DNA, 25 bp, Homo sapien
cagggggcggtaggtggggcgcagg

SEQ ID NO: 2580900 - DNA, 25 bp, Homo sapien
catcgctcagtgaacaggcgggcgt

SEQ ID NO: 2580901 - DNA, 25 bp, Homo sapien
tcgtcgagcacgaagatgcgtatgc

SEQ ID NO: 2580902 - DNA, 25 bp, Homo sapien
tcgtggacgatgttcagccgcaggt

SEQ ID NO: 2580903 - DNA, 25 bp, Homo sapien
accatgaggctgaggtcgtcgagca

SEQ ID NO: 2580904 - DNA, 25 bp, Homo sapien
gtgcctgccagatgccggccgtgat

SEQ ID NO: 2580905 - DNA, 25 bp, Homo sapien
cagatgccggccgtgatcaattgcc

SEQ ID NO: 2580906 - DNA, 25 bp, Homo sapien
ccgtgatcaattgccgggcctgtgc

SEQ ID NO: 2580907 - DNA, 25 bp, Homo sapien
ctgcggccagcgtgcctgccagatg

SEQ ID NO: 2580908 - DNA, 25 bp, Homo sapien
gccgggatgtctcgtgcatggcatt

SEQ ID NO: 2580909 - DNA, 25 bp, Homo sapien
ttcgccaggcggttggagcgctgtt

SEQ ID NO: 2580910 - DNA, 25 bp, Homo sapien
gagcgctgttccagctcggcatagc

SEQ ID NO: 2580911 - DNA, 25 bp, Homo sapien
gcgcgaccagttcgccgacattggg

SEQ ID NO: 2580912 - DNA, 25 bp, Homo sapien
gctgttggccgcgatatcgcccact

SEQ ID NO: 2580913 - DNA, 25 bp, Homo sapien
aagggcgccttgatgagcccggcct

SEQ ID NO: 2580914 - DNA, 25 bp, Homo sapien
tagcaggcgatctcgatctccacga

SEQ ID NO: 2580915 - DNA, 25 bp, Homo sapien
tccacgatttccacgcagttgggca

SEQ ID NO: 2580916 - DNA, 25 bp, Homo sapien
tgcaggtgcggcttgaaggcctcgg

SEQ ID NO: 2580917 - DNA, 25 bp, Homo sapien
ctgcaggtgcggcttgaaggcctcg

SEQ ID NO: 2580918 - DNA, 25 bp, Homo sapien
ccgaggtgtagtggagcacggccac

SEQ ID NO: 2580919 - DNA, 25 bp, Homo sapien
cacgggctggaagcggtcgctggcg

SEQ ID NO: 2580920 - DNA, 25 bp, Homo sapien
agcagggcctcgtagctttcgccgg

SEQ ID NO: 2580921 - DNA, 25 bp, Homo sapien
ttcgtgctcgtgcacggccacgggc

SEQ ID NO: 2580922 - DNA, 25 bp, Homo sapien
catatctagggttaggttttgaaag

SEQ ID NO: 2580923 - DNA, 25 bp, Homo sapien
agtagtcttgagaagtagggaacag

SEQ ID NO: 2580924 - DNA, 25 bp, Homo sapien
agaagaggagtagtcttgagaagta

SEQ ID NO: 2580925 - DNA, 25 bp, Homo sapien
ggagtagtcttgagaagtagggaac

SEQ ID NO: 2580926 - DNA, 25 bp, Homo sapien
caagaagaggagtagtcttgagaag

SEQ ID NO: 2580927 - DNA, 25 bp, Homo sapien
gaagaactgatgtcgatgcctagca

SEQ ID NO: 2580928 - DNA, 25 bp, Homo sapien
gattggcctcggattcgacctggac

SEQ ID NO: 2580929 - DNA, 25 bp, Homo sapien
ttggcacgagacaactcaacgagct

SEQ ID NO: 2580930 - DNA, 25 bp, Homo sapien
aaatcttcttggtgatcacggccga

SEQ ID NO: 2580931 - DNA, 25 bp, Homo sapien
acacaggtctggatgtcctgggcct

SEQ ID NO: 2580932 - DNA, 25 bp, Homo sapien
atccccggctaagccaaattgccaa

SEQ ID NO: 2580933 - DNA, 25 bp, Homo sapien
gtgcacacaggtctggatgtcctgg

SEQ ID NO: 2580934 - DNA, 25 bp, Homo sapien
ccaaggccccaaccccttgatccat

SEQ ID NO: 2580935 - DNA, 25 bp, Homo sapien
taggcaacacctcggaactggtcat

SEQ ID NO: 2580936 - DNA, 25 bp, Homo sapien
tcggaactggtcatccccgacacgg

SEQ ID NO: 2580937 - DNA, 25 bp, Homo sapien
gccatcaagcccgtcgtccaagaaa

SEQ ID NO: 2580938 - DNA, 25 bp, Homo sapien
ttctccagggccgataggcaacacc

SEQ ID NO: 2580939 - DNA, 25 bp, Homo sapien
aatggccgggccatcgtgcgcaccg

SEQ ID NO: 2580940 - DNA, 25 bp, Homo sapien
aacatcacgacatcgaccacagcaa

SEQ ID NO: 2580941 - DNA, 25 bp, Homo sapien
gcaccgacaacaaggtttggatgaa

SEQ ID NO: 2580942 - DNA, 25 bp, Homo sapien
caaaaccgtctacgtcaatggccgg

SEQ ID NO: 2580943 - DNA, 25 bp, Homo sapien
gggcacccacatccgcatgccggat

SEQ ID NO: 2580944 - DNA, 25 bp, Homo sapien
gatggccgcaccctgcactggcgtt

SEQ ID NO: 2580945 - DNA, 25 bp, Homo sapien
tcacctgcatcagatcaacatcgct

SEQ ID NO: 2580946 - DNA, 25 bp, Homo sapien
tctatggctcgggtcacctgcatca

SEQ ID NO: 2580947 - DNA, 25 bp, Homo sapien
gagaagctcaatacggcagggccat

SEQ ID NO: 2580948 - DNA, 25 bp, Homo sapien
tgctgatcgcgtgttgccatgaggt

SEQ ID NO: 2580949 - DNA, 25 bp, Homo sapien
agcagcttttcgaccgatggcggga

SEQ ID NO: 2580950 - DNA, 25 bp, Homo sapien
gatcatccgattggcctggtgaaag

SEQ ID NO: 2580951 - DNA, 25 bp, Homo sapien
ttgtgttgccgaaatcgtgcaaagt

SEQ ID NO: 2580952 - DNA, 25 bp, Homo sapien
gaggcgccgcttgtgttgccgaaat

SEQ ID NO: 2580953 - DNA, 25 bp, Homo sapien
tccgtccagctgttcgtgcaggcgg

SEQ ID NO: 2580954 - DNA, 25 bp, Homo sapien
cagtcacggtgaccggaagcgaggc

SEQ ID NO: 2580955 - DNA, 25 bp, Homo sapien
ggaaagaccaatgccgaagccgcac

SEQ ID NO: 2580956 - DNA, 25 bp, Homo sapien
tatgtccacgatggccgttccccag

SEQ ID NO: 2580957 - DNA, 25 bp, Homo sapien
aggaaagaccaatgccgaagccgca

SEQ ID NO: 2580958 - DNA, 25 bp, Homo sapien
ctatgtccacgatggccgttcccca

SEQ ID NO: 2580959 - DNA, 25 bp, Homo sapien
cttgcccgccagcgagaagggatcg

SEQ ID NO: 2580960 - DNA, 25 bp, Homo sapien
gaagggatcgggggtactcattgct

SEQ ID NO: 2580961 - DNA, 25 bp, Homo sapien
ggatcgggggtactcattgctcgac

SEQ ID NO: 2580962 - DNA, 25 bp, Homo sapien
tgcccgccagcgagaagggatcggg

SEQ ID NO: 2580963 - DNA, 25 bp, Homo sapien
aaaaatttcgtccaggtgcgtctcg

SEQ ID NO: 2580964 - DNA, 25 bp, Homo sapien
tcaatccatcgagcaagggcgtgcg

SEQ ID NO: 2580965 - DNA, 25 bp, Homo sapien
gatgtgacgaagacgatggagccct

SEQ ID NO: 2580966 - DNA, 25 bp, Homo sapien
aaatagttgcgcgtcaaccagcggc

SEQ ID NO: 2580967 - DNA, 25 bp, Homo sapien
cagaaaaatgatggacccgctcggt

SEQ ID NO: 2580968 - DNA, 25 bp, Homo sapien
gaataattcccgtcaggcctgcctt

SEQ ID NO: 2580969 - DNA, 25 bp, Homo sapien
tgttcactgagctgccggattgggc

SEQ ID NO: 2580970 - DNA, 25 bp, Homo sapien
gcaatggttaccaagcgctcgcggt

SEQ ID NO: 2580971 - DNA, 25 bp, Homo sapien
gggtgccgaggcctagagggtgtcg

SEQ ID NO: 2580972 - DNA, 25 bp, Homo sapien
cgccgcattggcgacgtcttccggg

SEQ ID NO: 2580973 - DNA, 25 bp, Homo sapien
tgcgtcagaaagcaggtacaccgcc

SEQ ID NO: 2580974 - DNA, 25 bp, Homo sapien
gttccagtaacccagcggcttgcgt

SEQ ID NO: 2580975 - DNA, 25 bp, Homo sapien
aaagaatcgctccgccatccatgac

SEQ ID NO: 2580976 - DNA, 25 bp, Homo sapien
taaagaatcgctccgccatccatga

SEQ ID NO: 2580977 - DNA, 25 bp, Homo sapien
ttaaagaatcgctccgccatccatg

SEQ ID NO: 2580978 - DNA, 25 bp, Homo sapien
catccccccgcaccgatgatcagta

SEQ ID NO: 2580979 - DNA, 25 bp, Homo sapien
ctgcatttgtgcaaggacttcgcgt

SEQ ID NO: 2580980 - DNA, 25 bp, Homo sapien
tgtgcaaggacttcgcgtccccatc

SEQ ID NO: 2580981 - DNA, 25 bp, Homo sapien
catttgtgcaaggacttcgcgtccc

SEQ ID NO: 2580982 - DNA, 25 bp, Homo sapien
ccagaaaacctttgattgtccagtc

SEQ ID NO: 2580983 - DNA, 25 bp, Homo sapien
ggcgcatacaaaggcgtcttctgag

SEQ ID NO: 2580984 - DNA, 25 bp, Homo sapien
caagaatggaggtgtcacatccggt

SEQ ID NO: 2580985 - DNA, 25 bp, Homo sapien
ctaatatgccttgcggctggagcgc

SEQ ID NO: 2580986 - DNA, 25 bp, Homo sapien
atttgtttgaggcatacgtttggcg

SEQ ID NO: 2580987 - DNA, 25 bp, Homo sapien
catacgtttggcgttggatggaaaa

SEQ ID NO: 2580988 - DNA, 25 bp, Homo sapien
tttgaggcatacgtttggcgttgga

SEQ ID NO: 2580989 - DNA, 25 bp, Homo sapien
ttggcgttggatggaaaatatccat

SEQ ID NO: 2580990 - DNA, 25 bp, Homo sapien
gaagcatacaaacacgcccatattg

SEQ ID NO: 2580991 - DNA, 25 bp, Homo sapien
tgaatctcataaccctcgtaagtag

SEQ ID NO: 2580992 - DNA, 25 bp, Homo sapien
gatctgatcgcagccttcaggcaca

SEQ ID NO: 2580993 - DNA, 25 bp, Homo sapien
gacgagtccatgtttcagttgaatc

SEQ ID NO: 2580994 - DNA, 25 bp, Homo sapien
gtgaactccaccaaagctactaact

SEQ ID NO: 2580995 - DNA, 25 bp, Homo sapien
agagcaagacaacgtgatagtgaac

SEQ ID NO: 2580996 - DNA, 25 bp, Homo sapien
ctataggcatcgtgattcaagagca

SEQ ID NO: 2580997 - DNA, 25 bp, Homo sapien
taggcatcgtgattcaagagcaaga

SEQ ID NO: 2580998 - DNA, 25 bp, Homo sapien
gaatgctttgctcgtagtccttggt

SEQ ID NO: 2580999 - DNA, 25 bp, Homo sapien
gcttgcacgataaaacgcgtcttgg

SEQ ID NO: 2581000 - DNA, 25 bp, Homo sapien
cgcgtcttggaatgacttcgaatca

SEQ ID NO: 2581001 - DNA, 25 bp, Homo sapien
aaaagatcctctgggtacatttcca

SEQ ID NO: 2581002 - DNA, 25 bp, Homo sapien
cttcgatgaccaccgccgtgaaggt

SEQ ID NO: 2581003 - DNA, 25 bp, Homo sapien
ccttcgatgaccaccgccgtgaagg

SEQ ID NO: 2581004 - DNA, 25 bp, Homo sapien
acccttcgatgaccaccgccgtgaa

SEQ ID NO: 2581005 - DNA, 25 bp, Homo sapien
agacccttcgatgaccaccgccgtg

SEQ ID NO: 2581006 - DNA, 25 bp, Homo sapien
cagagccttcgaaaaggcaacctgg

SEQ ID NO: 2581007 - DNA, 25 bp, Homo sapien
tgggctttcacttcagctcgctggt

SEQ ID NO: 2581008 - DNA, 25 bp, Homo sapien
gcctcccatgcgacattttccaaag

SEQ ID NO: 2581009 - DNA, 25 bp, Homo sapien
tcgggtcctgggtcagttggcacct

SEQ ID NO: 2581010 - DNA, 25 bp, Homo sapien
gccattggtggtagtccgcctgtgt

SEQ ID NO: 2581011 - DNA, 25 bp, Homo sapien
gtggtagtccgcctgtgtgacaggc

SEQ ID NO: 2581012 - DNA, 25 bp, Homo sapien
attggtggtagtccgcctgtgtgac

SEQ ID NO: 2581013 - DNA, 25 bp, Homo sapien
tggtagtccgcctgtgtgacaggcc

SEQ ID NO: 2581014 - DNA, 25 bp, Homo sapien
cctgtgtgatgcgttccggcagcgc

SEQ ID NO: 2581015 - DNA, 25 bp, Homo sapien
gatgcgttccggcagcgccgtctcg

SEQ ID NO: 2581016 - DNA, 25 bp, Homo sapien
cagcggattgaggaagcgctcccag

SEQ ID NO: 2581017 - DNA, 25 bp, Homo sapien
cgccagcgcgcccataaaaggcgtt

SEQ ID NO: 2581018 - DNA, 25 bp, Homo sapien
ggatgagcgacttgccaatgccctg

SEQ ID NO: 2581019 - DNA, 25 bp, Homo sapien
ggcccgcctcgttggaagactgcgt

SEQ ID NO: 2581020 - DNA, 25 bp, Homo sapien
aagactgcgtctgccaatacacgcg

SEQ ID NO: 2581021 - DNA, 25 bp, Homo sapien
cgatgaaacaggtagtgcgccaggc

SEQ ID NO: 2581022 - DNA, 25 bp, Homo sapien
agcacacgcccgctgtttcaacagg

SEQ ID NO: 2581023 - DNA, 25 bp, Homo sapien
tgattctagggttgccgggctgccc

SEQ ID NO: 2581024 - DNA, 25 bp, Homo sapien
ctagcagcgataggacaacgcgtga

SEQ ID NO: 2581025 - DNA, 25 bp, Homo sapien
tcaacaggtttcgtatccaggccgc

SEQ ID NO: 2581026 - DNA, 25 bp, Homo sapien
tgaccgatgcatagtccagccagtg

SEQ ID NO: 2581027 - DNA, 25 bp, Homo sapien
gcagcactgcattcttgttggcgga

SEQ ID NO: 2581028 - DNA, 25 bp, Homo sapien
caccagcatgatggaagagcgcatt

SEQ ID NO: 2581029 - DNA, 25 bp, Homo sapien
gctgcccagcgtgcgaaagatgtcg

SEQ ID NO: 2581030 - DNA, 25 bp, Homo sapien
tgttggccttgctggtcacgggaat

SEQ ID NO: 2581031 - DNA, 25 bp, Homo sapien
ggccttgctggtcacgggaattact

SEQ ID NO: 2581032 - DNA, 25 bp, Homo sapien
gacggtgttggccttgctggtcacg

SEQ ID NO: 2581033 - DNA, 25 bp, Homo sapien
ctggacggtgttggccttgctggtc

SEQ ID NO: 2581034 - DNA, 25 bp, Homo sapien
cacatatgctggctccccactacgc

SEQ ID NO: 2581035 - DNA, 25 bp, Homo sapien
acacggcggctcatccacatatgct

SEQ ID NO: 2581036 - DNA, 25 bp, Homo sapien
tccccactacgcaaggcgtctccaa

SEQ ID NO: 2581037 - DNA, 25 bp, Homo sapien
agacggcggctactccacacacggc

SEQ ID NO: 2581038 - DNA, 25 bp, Homo sapien
tcggaaggatatggactcacttgcc

SEQ ID NO: 2581039 - DNA, 25 bp, Homo sapien
tgaggacccaatgccacgtgatgtg

SEQ ID NO: 2581040 - DNA, 25 bp, Homo sapien
ggttactcagcgtccatcggaagga

SEQ ID NO: 2581041 - DNA, 25 bp, Homo sapien
gattggctctttgctcggttactca

SEQ ID NO: 2581042 - DNA, 25 bp, Homo sapien
tcatcctgcttttgcaatcttcgca

SEQ ID NO: 2581043 - DNA, 25 bp, Homo sapien
gtcatttgcaaagctaagcccgttg

SEQ ID NO: 2581044 - DNA, 25 bp, Homo sapien
cctctccaggaaaaacgtcatttgc

SEQ ID NO: 2581045 - DNA, 25 bp, Homo sapien
ttttgcaatcttcgcagccagcaga

SEQ ID NO: 2581046 - DNA, 25 bp, Homo sapien
caggaactgggttagctcctgagta

SEQ ID NO: 2581047 - DNA, 25 bp, Homo sapien
gaagatgcccttgcctttcatgctc

SEQ ID NO: 2581048 - DNA, 25 bp, Homo sapien
tgtgaccatgtgttttgacctctac

SEQ ID NO: 2581049 - DNA, 25 bp, Homo sapien
tcctggaatcccacgtgggaactga

SEQ ID NO: 2581050 - DNA, 25 bp, Homo sapien
tgaggtcagcttgtccaccccagtg

SEQ ID NO: 2581051 - DNA, 25 bp, Homo sapien
aggtcagcttgtccaccccagtgac

SEQ ID NO: 2581052 - DNA, 25 bp, Homo sapien
ctatgaggtcagcttgtccacccca

SEQ ID NO: 2581053 - DNA, 25 bp, Homo sapien
atgaggtcagcttgtccaccccagt

SEQ ID NO: 2581054 - DNA, 25 bp, Homo sapien
gttattttggcttgcatatgctccc

SEQ ID NO: 2581055 - DNA, 25 bp, Homo sapien
tagtggcctccacagttgctgtttt

SEQ ID NO: 2581056 - DNA, 25 bp, Homo sapien
gtttctgggtgctgtagtggcctcc

SEQ ID NO: 2581057 - DNA, 25 bp, Homo sapien
ctgttattttggcttgcatatgctc

SEQ ID NO: 2581058 - DNA, 25 bp, Homo sapien
aaatcgctgttggatcctttgaagt

SEQ ID NO: 2581059 - DNA, 25 bp, Homo sapien
tacatataattgaaaatcgctgttg

SEQ ID NO: 2581060 - DNA, 25 bp, Homo sapien
aattgaaaatcgctgttggatcctt

SEQ ID NO: 2581061 - DNA, 25 bp, Homo sapien
tataattgaaaatcgctgttggatc

SEQ ID NO: 2581062 - DNA, 25 bp, Homo sapien
ctgtggttgtaaatcactgggaggt

SEQ ID NO: 2581063 - DNA, 25 bp, Homo sapien
gaggatgatcaccatgctgcatgaa

SEQ ID NO: 2581064 - DNA, 25 bp, Homo sapien
tgaattttgtaaccagcctgtgaaa

SEQ ID NO: 2581065 - DNA, 25 bp, Homo sapien
tgccccacggccaaatttgagagtg

SEQ ID NO: 2581066 - DNA, 25 bp, Homo sapien
cttcagcatacagcagagttgcttc

SEQ ID NO: 2581067 - DNA, 25 bp, Homo sapien
ttccttaagctcttcagcatacagc

SEQ ID NO: 2581068 - DNA, 25 bp, Homo sapien
taagctcttcagcatacagcagagt

SEQ ID NO: 2581069 - DNA, 25 bp, Homo sapien
gctcttcagcatacagcagagttgc

SEQ ID NO: 2581070 - DNA, 25 bp, Homo sapien
tctgcagcagttttcagcagcgtct

SEQ ID NO: 2581071 - DNA, 25 bp, Homo sapien
gttttcagcagcgtctgcataaaca

SEQ ID NO: 2581072 - DNA, 25 bp, Homo sapien
cagttttcagcagcgtctgcataaa

SEQ ID NO: 2581073 - DNA, 25 bp, Homo sapien
cagcagttttcagcagcgtctgcat

SEQ ID NO: 2581074 - DNA, 25 bp, Homo sapien
gggcatttagagctcaggtcagagc

SEQ ID NO: 2581075 - DNA, 25 bp, Homo sapien
gcatttagagctcaggtcagagctc

SEQ ID NO: 2581076 - DNA, 25 bp, Homo sapien
tccatcgaaggacaggagtgtgaag

SEQ ID NO: 2581077 - DNA, 25 bp, Homo sapien
gagatcttctccatcgaaggacagg

SEQ ID NO: 2581078 - DNA, 25 bp, Homo sapien
gctgaagcatgcaaatggcttgtgt

SEQ ID NO: 2581079 - DNA, 25 bp, Homo sapien
gcctgatccctgatgagttgccaca

SEQ ID NO: 2581080 - DNA, 25 bp, Homo sapien
gatgggagagttcgtactaagctgt

SEQ ID NO: 2581081 - DNA, 25 bp, Homo sapien
agttactaagtgcaacccatgagcc

SEQ ID NO: 2581082 - DNA, 25 bp, Homo sapien
tctctgggtgcgtcctgcaggggca

SEQ ID NO: 2581083 - DNA, 25 bp, Homo sapien
gggtgcgtcctgcaggggcagttcc

SEQ ID NO: 2581084 - DNA, 25 bp, Homo sapien
tctgggtgcgtcctgcaggggcagt

SEQ ID NO: 2581085 - DNA, 25 bp, Homo sapien
ctctctgggtgcgtcctgcaggggc

SEQ ID NO: 2581086 - DNA, 25 bp, Homo sapien
gctctcggagtggtttttggttcac

SEQ ID NO: 2581087 - DNA, 25 bp, Homo sapien
ggctgctagcagaacacagcccaag

SEQ ID NO: 2581088 - DNA, 25 bp, Homo sapien
ccagctcgggggctgctagcagaac

SEQ ID NO: 2581089 - DNA, 25 bp, Homo sapien
tctgtgttgcgttgtggagctctcg

SEQ ID NO: 2581090 - DNA, 25 bp, Homo sapien
agaggagtagggctgcgatatgcag

SEQ ID NO: 2581091 - DNA, 25 bp, Homo sapien
ggctgcgatatgcagctgatgatgt

SEQ ID NO: 2581092 - DNA, 25 bp, Homo sapien
tagggctgcgatatgcagctgatga

SEQ ID NO: 2581093 - DNA, 25 bp, Homo sapien
gagtagggctgcgatatgcagctga

SEQ ID NO: 2581094 - DNA, 25 bp, Homo sapien
tttgtagctttgcacactcagcaat

SEQ ID NO: 2581095 - DNA, 25 bp, Homo sapien
gcacactcagcaatcataatgaaca

SEQ ID NO: 2581096 - DNA, 25 bp, Homo sapien
ctcagcaatcataatgaacaataag

SEQ ID NO: 2581097 - DNA, 25 bp, Homo sapien
gctttgcacactcagcaatcataat

SEQ ID NO: 2581098 - DNA, 25 bp, Homo sapien
tgggattttggtctgttcttcaagt

SEQ ID NO: 2581099 - DNA, 25 bp, Homo sapien
tcttcaagttcttcaggcccctctc

SEQ ID NO: 2581100 - DNA, 25 bp, Homo sapien
tcaagttcttcaggcccctctctct

SEQ ID NO: 2581101 - DNA, 25 bp, Homo sapien
ctgggattttggtctgttcttcaag

SEQ ID NO: 2581102 - DNA, 25 bp, Homo sapien
aatggtgtcaacacatgcaactgac

SEQ ID NO: 2581103 - DNA, 25 bp, Homo sapien
cagatataacttttatagctctttc

SEQ ID NO: 2581104 - DNA, 25 bp, Homo sapien
gacatggagataaacggaatggtgt

SEQ ID NO: 2581105 - DNA, 25 bp, Homo sapien
taaacggaatggtgtcaacacatgc

SEQ ID NO: 2581106 - DNA, 25 bp, Homo sapien
tttacttggcaattgaaaatgcttt

SEQ ID NO: 2581107 - DNA, 25 bp, Homo sapien
tgcttttcaacttcaccagatggga

SEQ ID NO: 2581108 - DNA, 25 bp, Homo sapien
tccaatttcgggcagataagagttc

SEQ ID NO: 2581109 - DNA, 25 bp, Homo sapien
tacgaagacaaatggtagagtgaat

SEQ ID NO: 2581110 - DNA, 25 bp, Homo sapien
tttgagtcagccgtccaagcttggt

SEQ ID NO: 2581111 - DNA, 25 bp, Homo sapien
ccgaaaaatctaccagaatgttctt

SEQ ID NO: 2581112 - DNA, 25 bp, Homo sapien
tattggcctattgtaagcagcccct

SEQ ID NO: 2581113 - DNA, 25 bp, Homo sapien
ccacttccgaatcttgcaggtctaa

SEQ ID NO: 2581114 - DNA, 25 bp, Homo sapien
acatcccgtggagaaaccactgtac

SEQ ID NO: 2581115 - DNA, 25 bp, Homo sapien
cgtggagaaaccactgtactgctga

SEQ ID NO: 2581116 - DNA, 25 bp, Homo sapien
tcccgtggagaaaccactgtactgc

SEQ ID NO: 2581117 - DNA, 25 bp, Homo sapien
ggagaaaccactgtactgctgatta

SEQ ID NO: 2581118 - DNA, 25 bp, Homo sapien
agagcccgcagaaataacgccgcat

SEQ ID NO: 2581119 - DNA, 25 bp, Homo sapien
agcccgcagaaataacgccgcatat

SEQ ID NO: 2581120 - DNA, 25 bp, Homo sapien
gcccgcagaaataacgccgcatatc

SEQ ID NO: 2581121 - DNA, 25 bp, Homo sapien
aacagagcccgcagaaataacgccg

SEQ ID NO: 2581122 - DNA, 25 bp, Homo sapien
gtttcattaccacaacataagactg

SEQ ID NO: 2581123 - DNA, 25 bp, Homo sapien
gtaaatgtcaatgttgccaggaaaa

SEQ ID NO: 2581124 - DNA, 25 bp, Homo sapien
aggtaaatgtcaatgttgccaggaa

SEQ ID NO: 2581125 - DNA, 25 bp, Homo sapien
taagactgtgctgaagccataagac

SEQ ID NO: 2581126 - DNA, 25 bp, Homo sapien
ccaactccacttcatccccatcact

SEQ ID NO: 2581127 - DNA, 25 bp, Homo sapien
aactccacttcatccccatcactct

SEQ ID NO: 2581128 - DNA, 25 bp, Homo sapien
ctgccaactccacttcatccccatc

SEQ ID NO: 2581129 - DNA, 25 bp, Homo sapien
ccacttcatccccatcactcttcat

SEQ ID NO: 2581130 - DNA, 25 bp, Homo sapien
ctttctaaaggttttccatcatctg

SEQ ID NO: 2581131 - DNA, 25 bp, Homo sapien
aaaggttttccatcatctgtgaaag

SEQ ID NO: 2581132 - DNA, 25 bp, Homo sapien
tctaaaggttttccatcatctgtga

SEQ ID NO: 2581133 - DNA, 25 bp, Homo sapien
aaggttttccatcatctgtgaaagg

SEQ ID NO: 2581134 - DNA, 25 bp, Homo sapien
cctgcaggtttatgccagatgaaac

SEQ ID NO: 2581135 - DNA, 25 bp, Homo sapien
aaacctgcaggtttatgccagatga

SEQ ID NO: 2581136 - DNA, 25 bp, Homo sapien
tttcaagatttgtagaggtaaccca

SEQ ID NO: 2581137 - DNA, 25 bp, Homo sapien
aggtaacccaattgttagggatgtg

SEQ ID NO: 2581138 - DNA, 25 bp, Homo sapien
ccaaggcaactcttgctttgattct

SEQ ID NO: 2581139 - DNA, 25 bp, Homo sapien
gtcacaacaataaccctgtaaccag

SEQ ID NO: 2581140 - DNA, 25 bp, Homo sapien
tcctgaggttaagaccatgataagc

SEQ ID NO: 2581141 - DNA, 25 bp, Homo sapien
tgtgggactctcgttaccaaggcaa

SEQ ID NO: 2581142 - DNA, 25 bp, Homo sapien
tgagagttgatcactagcccaaatc

SEQ ID NO: 2581143 - DNA, 25 bp, Homo sapien
tagatattgagagttgatcactagc

SEQ ID NO: 2581144 - DNA, 25 bp, Homo sapien
gctctgaagacttagatattgagag

SEQ ID NO: 2581145 - DNA, 25 bp, Homo sapien
tagcccaaatcaacttgtcatctgg

SEQ ID NO: 2581146 - DNA, 25 bp, Homo sapien
gccttctgggtacttcaccaagtca

SEQ ID NO: 2581147 - DNA, 25 bp, Homo sapien
tctcaactgcccagtatgctcatgg

SEQ ID NO: 2581148 - DNA, 25 bp, Homo sapien
tgctcatggcttatagttttagctt

SEQ ID NO: 2581149 - DNA, 25 bp, Homo sapien
ggtacttcaccaagtcatcaggcat

SEQ ID NO: 2581150 - DNA, 25 bp, Homo sapien
ccaggaaataagcagtgaaccagat

SEQ ID NO: 2581151 - DNA, 25 bp, Homo sapien
acagatctatggaggtgtttgtagg

SEQ ID NO: 2581152 - DNA, 25 bp, Homo sapien
aataagcagtgaaccagattgacag

SEQ ID NO: 2581153 - DNA, 25 bp, Homo sapien
aggtgtttgtagggatgcagcttca

SEQ ID NO: 2581154 - DNA, 25 bp, Homo sapien
tgtattaggaagacttttctcagtt

SEQ ID NO: 2581155 - DNA, 25 bp, Homo sapien
tctcagtttttgttggtattgtata

SEQ ID NO: 2581156 - DNA, 25 bp, Homo sapien
cagtttttgttggtattgtatacat

SEQ ID NO: 2581157 - DNA, 25 bp, Homo sapien
ctgtattaggaagacttttctcagt

SEQ ID NO: 2581158 - DNA, 25 bp, Homo sapien
tctcctgtggaccaactcacagcca

SEQ ID NO: 2581159 - DNA, 25 bp, Homo sapien
cagccagatggtgtagtactgatac

SEQ ID NO: 2581160 - DNA, 25 bp, Homo sapien
caatatctgatccacctgttcccag

SEQ ID NO: 2581161 - DNA, 25 bp, Homo sapien
caaaacagagccaatgtttcctctt

SEQ ID NO: 2581162 - DNA, 25 bp, Homo sapien
gctgcctgcaaataaactgcctgcc

SEQ ID NO: 2581163 - DNA, 25 bp, Homo sapien
ctagaagctgcctgcaaataaactg

SEQ ID NO: 2581164 - DNA, 25 bp, Homo sapien
gaagctgcctgcaaataaactgcct

SEQ ID NO: 2581165 - DNA, 25 bp, Homo sapien
gcctgcaaataaactgcctgccact

SEQ ID NO: 2581166 - DNA, 25 bp, Homo sapien
cagttgcggttggtatttcttccat

SEQ ID NO: 2581167 - DNA, 25 bp, Homo sapien
ccactggtctgtgagagactaaaat

SEQ ID NO: 2581168 - DNA, 25 bp, Homo sapien
cacccactggtctgtgagagactaa

SEQ ID NO: 2581169 - DNA, 25 bp, Homo sapien
acccactggtctgtgagagactaaa

SEQ ID NO: 2581170 - DNA, 25 bp, Homo sapien
cccactggtctgtgagagactaaaa

SEQ ID NO: 2581171 - DNA, 25 bp, Homo sapien
tagacattaagcaaggcactcttag

SEQ ID NO: 2581172 - DNA, 25 bp, Homo sapien
gtgaggaatgagcagtgtagacatt

SEQ ID NO: 2581173 - DNA, 25 bp, Homo sapien
tgagcagtgtagacattaagcaagg

SEQ ID NO: 2581174 - DNA, 25 bp, Homo sapien
tttgtgaaatctgtcacactcacac

SEQ ID NO: 2581175 - DNA, 25 bp, Homo sapien
gagcctggcacaggctttgaaacac

SEQ ID NO: 2581176 - DNA, 25 bp, Homo sapien
cttcagaaggatgcagctcagcagc

SEQ ID NO: 2581177 - DNA, 25 bp, Homo sapien
tgcttcagaaggatgcagctcagca

SEQ ID NO: 2581178 - DNA, 25 bp, Homo sapien
gcagctcagcagctcagtcctgttc

SEQ ID NO: 2581179 - DNA, 25 bp, Homo sapien
gcacaactggggacgaatttcatgt

SEQ ID NO: 2581180 - DNA, 25 bp, Homo sapien
gatgagaaagcgtgccaaaaacaga

SEQ ID NO: 2581181 - DNA, 25 bp, Homo sapien
tcagacataaactcccttcacagca

SEQ ID NO: 2581182 - DNA, 25 bp, Homo sapien
catgtctttgacagatggatgagaa

SEQ ID NO: 2581183 - DNA, 25 bp, Homo sapien
tagcattatatgagaagtccacaga

SEQ ID NO: 2581184 - DNA, 25 bp, Homo sapien
taattagtcaaaggtcagtgggaaa

SEQ ID NO: 2581185 - DNA, 25 bp, Homo sapien
tgccacagcataaagcaatccaagg

SEQ ID NO: 2581186 - DNA, 25 bp, Homo sapien
cattggctttgaatacctgttgcca

SEQ ID NO: 2581187 - DNA, 25 bp, Homo sapien
ggcaccccactatacgctgggggtc

SEQ ID NO: 2581188 - DNA, 25 bp, Homo sapien
tgggcaccccactatacgctggggg

SEQ ID NO: 2581189 - DNA, 25 bp, Homo sapien
ctgggcaccccactatacgctgggg

SEQ ID NO: 2581190 - DNA, 25 bp, Homo sapien
gcaccccactatacgctgggggtct

SEQ ID NO: 2581191 - DNA, 25 bp, Homo sapien
ccgggccctgggccgctgtagcttg

SEQ ID NO: 2581192 - DNA, 25 bp, Homo sapien
cgggccctgggccgctgtagcttgc

SEQ ID NO: 2581193 - DNA, 25 bp, Homo sapien
gggccctgggccgctgtagcttgca

SEQ ID NO: 2581194 - DNA, 25 bp, Homo sapien
accgggccctgggccgctgtagctt

SEQ ID NO: 2581195 - DNA, 25 bp, Homo sapien
tgatggcattcgtcccaggggcaca

SEQ ID NO: 2581196 - DNA, 25 bp, Homo sapien
gaactgggggtcatgctgctcatat

SEQ ID NO: 2581197 - DNA, 25 bp, Homo sapien
catgcatctggttgttggcactgat

SEQ ID NO: 2581198 - DNA, 25 bp, Homo sapien
cacatggctggcttggcccttgtcc

SEQ ID NO: 2581199 - DNA, 25 bp, Homo sapien
ggttcacagttggcattggcggccc

SEQ ID NO: 2581200 - DNA, 25 bp, Homo sapien
ttcacagttggcattggcggcccca

SEQ ID NO: 2581201 - DNA, 25 bp, Homo sapien
tcacagttggcattggcggccccat

SEQ ID NO: 2581202 - DNA, 25 bp, Homo sapien
gttcacagttggcattggcggcccc

SEQ ID NO: 2581203 - DNA, 25 bp, Homo sapien
gcagcctgcatcactgctgcggctg

SEQ ID NO: 2581204 - DNA, 25 bp, Homo sapien
ctttgtgctgagttcgcagcagcct

SEQ ID NO: 2581205 - DNA, 25 bp, Homo sapien
ttgtgctgagttcgcagcagcctgc

SEQ ID NO: 2581206 - DNA, 25 bp, Homo sapien
gtgctgagttcgcagcagcctgcat

SEQ ID NO: 2581207 - DNA, 25 bp, Homo sapien
cccggggcgtgctcctgggtggcgt

SEQ ID NO: 2581208 - DNA, 25 bp, Homo sapien
gcccggggcgtgctcctgggtggcg

SEQ ID NO: 2581209 - DNA, 25 bp, Homo sapien
ctgcccggggcgtgctcctgggtgg

SEQ ID NO: 2581210 - DNA, 25 bp, Homo sapien
tgcccggggcgtgctcctgggtggc

SEQ ID NO: 2581211 - DNA, 25 bp, Homo sapien
gtggtcacgggtagacacacagcgt

SEQ ID NO: 2581212 - DNA, 25 bp, Homo sapien
ggtcacgggtagacacacagcgtac

SEQ ID NO: 2581213 - DNA, 25 bp, Homo sapien
acgtggtcacgggtagacacacagc

SEQ ID NO: 2581214 - DNA, 25 bp, Homo sapien
cacgtggtcacgggtagacacacag

SEQ ID NO: 2581215 - DNA, 25 bp, Homo sapien
tcttgggatttgttctgatgcacaa

SEQ ID NO: 2581216 - DNA, 25 bp, Homo sapien
tgtcacccccacacataggtgcggg

SEQ ID NO: 2581217 - DNA, 25 bp, Homo sapien
gcacaagcatgagccctgtatatct

SEQ ID NO: 2581218 - DNA, 25 bp, Homo sapien
ggcaagttgaataccctgcatcctg

SEQ ID NO: 2581219 - DNA, 25 bp, Homo sapien
gaagaaaacatggggcgtccgccag

SEQ ID NO: 2581220 - DNA, 25 bp, Homo sapien
gctgggataagcaggcgacctaatg

SEQ ID NO: 2581221 - DNA, 25 bp, Homo sapien
cccagactggctgggataagcaggc

SEQ ID NO: 2581222 - DNA, 25 bp, Homo sapien
gagcctgagagttgccatagttggg

SEQ ID NO: 2581223 - DNA, 25 bp, Homo sapien
gaaagcagccatgccgaaagccatg

SEQ ID NO: 2581224 - DNA, 25 bp, Homo sapien
gccagacggcacgatcgttaacagt

SEQ ID NO: 2581225 - DNA, 25 bp, Homo sapien
tttgggtgttcctttcgcggccaga

SEQ ID NO: 2581226 - DNA, 25 bp, Homo sapien
tctatttccctctcaggcatgaagg

SEQ ID NO: 2581227 - DNA, 25 bp, Homo sapien
ttgggggtgggtatggcagccgctc

SEQ ID NO: 2581228 - DNA, 25 bp, Homo sapien
tgggggtgggtatggcagccgctca

SEQ ID NO: 2581229 - DNA, 25 bp, Homo sapien
aatattctgatactcgctggagaaa

SEQ ID NO: 2581230 - DNA, 25 bp, Homo sapien
cagacatttgcttggtggtgatata

SEQ ID NO: 2581231 - DNA, 25 bp, Homo sapien
gaaactcctcctaagtcctatgaat

SEQ ID NO: 2581232 - DNA, 25 bp, Homo sapien
tatgaatagcctgtcagctcaactg

SEQ ID NO: 2581233 - DNA, 25 bp, Homo sapien
tctaaggaagctatctggatgctgc

SEQ ID NO: 2581234 - DNA, 25 bp, Homo sapien
ttggcaaggcacagtcaaactagct

SEQ ID NO: 2581235 - DNA, 25 bp, Homo sapien
gatgaatgcttgcttcctccgactg

SEQ ID NO: 2581236 - DNA, 25 bp, Homo sapien
tctgccccagtggaagagatttcac

SEQ ID NO: 2581237 - DNA, 25 bp, Homo sapien
tctgggtgacgctcacgagtggctt

SEQ ID NO: 2581238 - DNA, 25 bp, Homo sapien
gtacagcggctgtcgaaaatctctg

SEQ ID NO: 2581239 - DNA, 25 bp, Homo sapien
gagttgaggctcccgcgccttggcc

SEQ ID NO: 2581240 - DNA, 25 bp, Homo sapien
tggggcacctcatggtctccggtcc

SEQ ID NO: 2581241 - DNA, 25 bp, Homo sapien
ggaatatccgaatgaagagggcagg

SEQ ID NO: 2581242 - DNA, 25 bp, Homo sapien
catagacagtggtgcgcgagtcacg

SEQ ID NO: 2581243 - DNA, 25 bp, Homo sapien
cgggatgttaacagagccatgaagc

SEQ ID NO: 2581244 - DNA, 25 bp, Homo sapien
tgagccatctccgagtgagcacagc

SEQ ID NO: 2581245 - DNA, 25 bp, Homo sapien
taatgacgcctagtgatgggtgcgc

SEQ ID NO: 2581246 - DNA, 25 bp, Homo sapien
gatgggtgcgctttaatgctggttc

SEQ ID NO: 2581247 - DNA, 25 bp, Homo sapien
gctggttctcgctgtgacgatccca

SEQ ID NO: 2581248 - DNA, 25 bp, Homo sapien
gggctgctaatgacgcctagtgatg

SEQ ID NO: 2581249 - DNA, 25 bp, Homo sapien
taagtatgggagaggaatgagcaca

SEQ ID NO: 2581250 - DNA, 25 bp, Homo sapien
tgcgaagttgcgaccacatgcgtgg

SEQ ID NO: 2581251 - DNA, 25 bp, Homo sapien
cagatctgagggatcaatccactgg

SEQ ID NO: 2581252 - DNA, 25 bp, Homo sapien
aaagtcaaacaaccagggcagcgag

SEQ ID NO: 2581253 - DNA, 25 bp, Homo sapien
aaatggagaccctgtgagtgaagcc

SEQ ID NO: 2581254 - DNA, 25 bp, Homo sapien
tcggaatgagcatcacgcagtgcac

SEQ ID NO: 2581255 - DNA, 25 bp, Homo sapien
taccacccttgagttatgttcggaa

SEQ ID NO: 2581256 - DNA, 25 bp, Homo sapien
tattgggaaaatgagtgcgagtgcc

SEQ ID NO: 2581257 - DNA, 25 bp, Homo sapien
tcatgtctgttacaaaggacagctg

SEQ ID NO: 2581258 - DNA, 25 bp, Homo sapien
cagggggcctgcgggcttcatgtct

SEQ ID NO: 2581259 - DNA, 25 bp, Homo sapien
catgtctgttacaaaggacagctgt

SEQ ID NO: 2581260 - DNA, 25 bp, Homo sapien
ggcctgcgggcttcatgtctgttac

SEQ ID NO: 2581261 - DNA, 25 bp, Homo sapien
cagcgtggtgttgctaacctaggag

SEQ ID NO: 2581262 - DNA, 25 bp, Homo sapien
ggtttcgaggcgacctcagcagcag

SEQ ID NO: 2581263 - DNA, 25 bp, Homo sapien
cctaggaggagtctgtggctcacaa

SEQ ID NO: 2581264 - DNA, 25 bp, Homo sapien
tgaaaatacaatgcccgagaccaca

SEQ ID NO: 2581265 - DNA, 25 bp, Homo sapien
aaaagttcaaacgtggaccatctgc

SEQ ID NO: 2581266 - DNA, 25 bp, Homo sapien
gaaatgggcattactttagcctgca

SEQ ID NO: 2581267 - DNA, 25 bp, Homo sapien
gatggcttggaaagaacactgttag

SEQ ID NO: 2581268 - DNA, 25 bp, Homo sapien
gaataccccttggagttcattaaga

SEQ ID NO: 2581269 - DNA, 25 bp, Homo sapien
gaagccataagtccactctggttca

SEQ ID NO: 2581270 - DNA, 25 bp, Homo sapien
tagggcggcgcctgcgtgttcatca

SEQ ID NO: 2581271 - DNA, 25 bp, Homo sapien
tcatcaggctagagctgttgttcat

SEQ ID NO: 2581272 - DNA, 25 bp, Homo sapien
agctgttcaccatggcgggcgccat

SEQ ID NO: 2581273 - DNA, 25 bp, Homo sapien
tgttacctgggccagcactggttag

SEQ ID NO: 2581274 - DNA, 25 bp, Homo sapien
ggaatgtcacccttcaattaggtcc

SEQ ID NO: 2581275 - DNA, 25 bp, Homo sapien
gttccgccggacacagggacatgaa

SEQ ID NO: 2581276 - DNA, 25 bp, Homo sapien
gcactcaacgcagcatcaggaaggg

SEQ ID NO: 2581277 - DNA, 25 bp, Homo sapien
ggtaaacagctaatgccccacaaag

SEQ ID NO: 2581278 - DNA, 25 bp, Homo sapien
tactggcagggcattaacgggacac

SEQ ID NO: 2581279 - DNA, 25 bp, Homo sapien
tagagtagcgtctggtgaggcaaac

SEQ ID NO: 2581280 - DNA, 25 bp, Homo sapien
gctaggttagcagaaggactcactt

SEQ ID NO: 2581281 - DNA, 25 bp, Homo sapien
ggggccagcgagtaccctggaggcc

SEQ ID NO: 2581282 - DNA, 25 bp, Homo sapien
tggggccagcgagtaccctggaggc

SEQ ID NO: 2581283 - DNA, 25 bp, Homo sapien
cgggaggaccctccatggcacagag

SEQ ID NO: 2581284 - DNA, 25 bp, Homo sapien
gaggaccctccatggcacagagtgg

SEQ ID NO: 2581285 - DNA, 25 bp, Homo sapien
gaaggaccacgactattacaaggac

SEQ ID NO: 2581286 - DNA, 25 bp, Homo sapien
gaatcactgaaacgagccatatgcc

SEQ ID NO: 2581287 - DNA, 25 bp, Homo sapien
tgtgggtcaaggtcctaaggcagct

SEQ ID NO: 2581288 - DNA, 25 bp, Homo sapien
tacaaggacgtgttaaatcaaggca

SEQ ID NO: 2581289 - DNA, 25 bp, Homo sapien
tatgtatgcgagtccacatgtcctg

SEQ ID NO: 2581290 - DNA, 25 bp, Homo sapien
agagatattacaccgcgaagaccgc

SEQ ID NO: 2581291 - DNA, 25 bp, Homo sapien
gaagaccgccttgttcaaagcagtg

SEQ ID NO: 2581292 - DNA, 25 bp, Homo sapien
tcagagcgggttcaaaggaatgaca

SEQ ID NO: 2581293 - DNA, 25 bp, Homo sapien
ttggattcaccaggagacatcatat

SEQ ID NO: 2581294 - DNA, 25 bp, Homo sapien
tttgacttgctctcgggctgtggag

SEQ ID NO: 2581295 - DNA, 25 bp, Homo sapien
cttctttgccgtctgctttgagagg

SEQ ID NO: 2581296 - DNA, 25 bp, Homo sapien
ttgctctcgggctgtggagtgcctt

SEQ ID NO: 2581297 - DNA, 25 bp, Homo sapien
gaaataccctgagagctgtagctat

SEQ ID NO: 2581298 - DNA, 25 bp, Homo sapien
ctgggctgctaatgctatcactttc

SEQ ID NO: 2581299 - DNA, 25 bp, Homo sapien
ggctgctaatgctatcactttcatc

SEQ ID NO: 2581300 - DNA, 25 bp, Homo sapien
ggctgagaaataccctgagagctgt

SEQ ID NO: 2581301 - DNA, 25 bp, Homo sapien
tgaattctacctgttaacttgagag

SEQ ID NO: 2581302 - DNA, 25 bp, Homo sapien
ttcaggaatgcttttcctattaaaa

SEQ ID NO: 2581303 - DNA, 25 bp, Homo sapien
acttgagagcattactgattcagga

SEQ ID NO: 2581304 - DNA, 25 bp, Homo sapien
acttttgagaagttatctgaattct

SEQ ID NO: 2581305 - DNA, 25 bp, Homo sapien
tactgctgtgaaactttgtggaggc

SEQ ID NO: 2581306 - DNA, 25 bp, Homo sapien
gacagtaggcaaacaaactcgccct

SEQ ID NO: 2581307 - DNA, 25 bp, Homo sapien
tatggttcgcatactgggcaggcaa

SEQ ID NO: 2581308 - DNA, 25 bp, Homo sapien
tagtaccgcctcagtgttgcaaaaa

SEQ ID NO: 2581309 - DNA, 25 bp, Homo sapien
gataagacaaataaaggcaatcatt

SEQ ID NO: 2581310 - DNA, 25 bp, Homo sapien
agtaaaacaacttccctcttgcatt

SEQ ID NO: 2581311 - DNA, 25 bp, Homo sapien
gctcaaccaatatcctgtttgtaag

SEQ ID NO: 2581312 - DNA, 25 bp, Homo sapien
aaattgctccaattagctcaaccaa

SEQ ID NO: 2581313 - DNA, 25 bp, Homo sapien
tatcggtcgacccagagctttctct

SEQ ID NO: 2581314 - DNA, 25 bp, Homo sapien
tcttgcccacggcaggcagacttga

SEQ ID NO: 2581315 - DNA, 25 bp, Homo sapien
cagacgtagagtcggaacaggtcca

SEQ ID NO: 2581316 - DNA, 25 bp, Homo sapien
tctttgacgcagacgtagagtcgga

SEQ ID NO: 2581317 - DNA, 25 bp, Homo sapien
ctgtaagaacttatccacaatgctt

SEQ ID NO: 2581318 - DNA, 25 bp, Homo sapien
ccactgtaagaacttatccacaatg

SEQ ID NO: 2581319 - DNA, 25 bp, Homo sapien
aagccactgtaagaacttatccaca

SEQ ID NO: 2581320 - DNA, 25 bp, Homo sapien
taagaacttatccacaatgcttcct

SEQ ID NO: 2581321 - DNA, 25 bp, Homo sapien
tccccacgttcgatcttgcactcaa

SEQ ID NO: 2581322 - DNA, 25 bp, Homo sapien
tgctttttcagggagctcgctgcac

SEQ ID NO: 2581323 - DNA, 25 bp, Homo sapien
actgcttgaggtgccaacgtttagg

SEQ ID NO: 2581324 - DNA, 25 bp, Homo sapien
tttaggttggttgccagctcacgcc

SEQ ID NO: 2581325 - DNA, 25 bp, Homo sapien
taattctctcatcccttaacactgc

SEQ ID NO: 2581326 - DNA, 25 bp, Homo sapien
ggccatatcccagatttaattctct

SEQ ID NO: 2581327 - DNA, 25 bp, Homo sapien
cagtgggcgtccaattaaataaaca

SEQ ID NO: 2581328 - DNA, 25 bp, Homo sapien
tgactgtgaaaccaccttcccggaa

SEQ ID NO: 2581329 - DNA, 25 bp, Homo sapien
gagaagaatgtataccaggagtcca

SEQ ID NO: 2581330 - DNA, 25 bp, Homo sapien
cctaatgatgggactggaatcggag

SEQ ID NO: 2581331 - DNA, 25 bp, Homo sapien
ttctgaagaccagggtgcctctgcc

SEQ ID NO: 2581332 - DNA, 25 bp, Homo sapien
tggctgttaagagaacaggccctcc

SEQ ID NO: 2581333 - DNA, 25 bp, Homo sapien
gggccttgcaaggatcccgagttag

SEQ ID NO: 2581334 - DNA, 25 bp, Homo sapien
ggtcacctggaacctctgccatgga

SEQ ID NO: 2581335 - DNA, 25 bp, Homo sapien
tgtgggccttgcaaggatcccgagt

SEQ ID NO: 2581336 - DNA, 25 bp, Homo sapien
cattggagtcatctggccgtgaggg

SEQ ID NO: 2581337 - DNA, 25 bp, Homo sapien
ttgttgggctcatagggcatcctgc

SEQ ID NO: 2581338 - DNA, 25 bp, Homo sapien
catggagttccgtttcgggaaggat

SEQ ID NO: 2581339 - DNA, 25 bp, Homo sapien
gaaggatgaatcactcacatctgag

SEQ ID NO: 2581340 - DNA, 25 bp, Homo sapien
tctgagaatgggtcgtgcacactga

SEQ ID NO: 2581341 - DNA, 25 bp, Homo sapien
tccatagggaaactgctggcgctgc

SEQ ID NO: 2581342 - DNA, 25 bp, Homo sapien
caggttagacattgctccggaggga

SEQ ID NO: 2581343 - DNA, 25 bp, Homo sapien
tcggtcgtaactggctccataggga

SEQ ID NO: 2581344 - DNA, 25 bp, Homo sapien
gtcataaagggctcgctgcttccag

SEQ ID NO: 2581345 - DNA, 25 bp, Homo sapien
gctggtgccctccatacggcggctg

SEQ ID NO: 2581346 - DNA, 25 bp, Homo sapien
tggtgccctccatacggcggctgtc

SEQ ID NO: 2581347 - DNA, 25 bp, Homo sapien
atactgctgcccataaggttcatgc

SEQ ID NO: 2581348 - DNA, 25 bp, Homo sapien
gcctggatactgctgcccataaggt

SEQ ID NO: 2581349 - DNA, 25 bp, Homo sapien
cagaaagacaaatcatcctgatgtg

SEQ ID NO: 2581350 - DNA, 25 bp, Homo sapien
cacagaaagacaaatcatcctgatg

SEQ ID NO: 2581351 - DNA, 25 bp, Homo sapien
gaaagacaaatcatcctgatgtgct

SEQ ID NO: 2581352 - DNA, 25 bp, Homo sapien
tcacagaaagacaaatcatcctgat

SEQ ID NO: 2581353 - DNA, 25 bp, Homo sapien
catgttgtacatgtcgccctcgtgg

SEQ ID NO: 2581354 - DNA, 25 bp, Homo sapien
cccatcatctgaggcgggattccgt

SEQ ID NO: 2581355 - DNA, 25 bp, Homo sapien
gacatataaggctgacgctggctga

SEQ ID NO: 2581356 - DNA, 25 bp, Homo sapien
gggtaccatcatatcgtctgtgcgg

SEQ ID NO: 2581357 - DNA, 25 bp, Homo sapien
tgctaggttgtccaagggtggtctc

SEQ ID NO: 2581358 - DNA, 25 bp, Homo sapien
attcgattgacatggttcttggccc

SEQ ID NO: 2581359 - DNA, 25 bp, Homo sapien
tcttggcccaagtctaccagtgcat

SEQ ID NO: 2581360 - DNA, 25 bp, Homo sapien
tgtgtacttccagatagtccagacc

SEQ ID NO: 2581361 - DNA, 25 bp, Homo sapien
gctgtcatcatacagaagaatatta

SEQ ID NO: 2581362 - DNA, 25 bp, Homo sapien
taatagtgtccaaagcccacgtact

SEQ ID NO: 2581363 - DNA, 25 bp, Homo sapien
agggacatcatcacacgccacgcct

SEQ ID NO: 2581364 - DNA, 25 bp, Homo sapien
gattgaaagtagcaacagtgctgtc

SEQ ID NO: 2581365 - DNA, 25 bp, Homo sapien
caggcattttctaaagtactcgact

SEQ ID NO: 2581366 - DNA, 25 bp, Homo sapien
gactaaaagttcgagaaatccagac

SEQ ID NO: 2581367 - DNA, 25 bp, Homo sapien
cgtctgccaaggactggctgtcatc

SEQ ID NO: 2581368 - DNA, 25 bp, Homo sapien
tctttcccagaatcgtctgccaagg

SEQ ID NO: 2581369 - DNA, 25 bp, Homo sapien
tcgtcttcctcgtcgtcatcaatac

SEQ ID NO: 2581370 - DNA, 25 bp, Homo sapien
tcctcgtcttcctcgtcgtcatcaa

SEQ ID NO: 2581371 - DNA, 25 bp, Homo sapien
ctcgtcttcctcgtcgtcatcaata

SEQ ID NO: 2581372 - DNA, 25 bp, Homo sapien
ctcctcgtcttcctcgtcgtcatca

SEQ ID NO: 2581373 - DNA, 25 bp, Homo sapien
catggacatttctcgacagactggg

SEQ ID NO: 2581374 - DNA, 25 bp, Homo sapien
tttctcataggtctgcggtgctcgc

SEQ ID NO: 2581375 - DNA, 25 bp, Homo sapien
tgccaggcacgaatgacaagctacg

SEQ ID NO: 2581376 - DNA, 25 bp, Homo sapien
tccagcagcttgatgttccggtgac

SEQ ID NO: 2581377 - DNA, 25 bp, Homo sapien
tctaatcttcactcacacatgcttg

SEQ ID NO: 2581378 - DNA, 25 bp, Homo sapien
caattggtaaatagtgaatggggca

SEQ ID NO: 2581379 - DNA, 25 bp, Homo sapien
aaaacagccagttatatgtgaccct

SEQ ID NO: 2581380 - DNA, 25 bp, Homo sapien
tcctacgctggataaacaagaacag

SEQ ID NO: 2581381 - DNA, 25 bp, Homo sapien
tgaatgcactagacagcaactttgg

SEQ ID NO: 2581382 - DNA, 25 bp, Homo sapien
gcagtttccggatcgttgtcaggta

SEQ ID NO: 2581383 - DNA, 25 bp, Homo sapien
tatatacatcacagcccataggcag

SEQ ID NO: 2581384 - DNA, 25 bp, Homo sapien
tgtcacgtggaaggtcaaacgccga

SEQ ID NO: 2581385 - DNA, 25 bp, Homo sapien
tgaaccgacacaatgtatgcgaggg

SEQ ID NO: 2581386 - DNA, 25 bp, Homo sapien
gatctcacctcaagtgggtcagcag

SEQ ID NO: 2581387 - DNA, 25 bp, Homo sapien
tgttgcccaacggtcagactctgcg

SEQ ID NO: 2581388 - DNA, 25 bp, Homo sapien
ggtagaggtccactaacagcataat

SEQ ID NO: 2581389 - DNA, 25 bp, Homo sapien
tcatgagtaatgttgcctgttcgca

SEQ ID NO: 2581390 - DNA, 25 bp, Homo sapien
ctcagcaagaagaacagggactgtt

SEQ ID NO: 2581391 - DNA, 25 bp, Homo sapien
ttcctcaaaggtgaacagacatggg

SEQ ID NO: 2581392 - DNA, 25 bp, Homo sapien
tgggccacggccctcgaaataaaga

SEQ ID NO: 2581393 - DNA, 25 bp, Homo sapien
ctcttgcctgaaggaagcgcttttg

SEQ ID NO: 2581394 - DNA, 25 bp, Homo sapien
caggaggcaactcgacaaatgctgt

SEQ ID NO: 2581395 - DNA, 25 bp, Homo sapien
gaaggaagcgcttttgtttggtgaa

SEQ ID NO: 2581396 - DNA, 25 bp, Homo sapien
gaggcaactcgacaaatgctgtggc

SEQ ID NO: 2581397 - DNA, 25 bp, Homo sapien
caggaagcagcttccgctccgagga

SEQ ID NO: 2581398 - DNA, 25 bp, Homo sapien
ccatggagcagcctttcatagcagg

SEQ ID NO: 2581399 - DNA, 25 bp, Homo sapien
tgttgaaggccgttttctccaccca

SEQ ID NO: 2581400 - DNA, 25 bp, Homo sapien
tctcaaagggcgtgtccatggagca

SEQ ID NO: 2581401 - DNA, 25 bp, Homo sapien
tgggacgccaacagattcctctagc

SEQ ID NO: 2581402 - DNA, 25 bp, Homo sapien
acagagggggtggacgcattgcagc

SEQ ID NO: 2581403 - DNA, 25 bp, Homo sapien
aatcaccagtgggacgccaacagat

SEQ ID NO: 2581404 - DNA, 25 bp, Homo sapien
cagtgggacgccaacagattcctct

SEQ ID NO: 2581405 - DNA, 25 bp, Homo sapien
gtctgtcccgcacctccttcaggct

SEQ ID NO: 2581406 - DNA, 25 bp, Homo sapien
gctcgctaatgaccgcctgaatgtt

SEQ ID NO: 2581407 - DNA, 25 bp, Homo sapien
catgctcgctaatgaccgcctgaat

SEQ ID NO: 2581408 - DNA, 25 bp, Homo sapien
acctgtctgtcccgcacctccttca

SEQ ID NO: 2581409 - DNA, 25 bp, Homo sapien
aaaggcttgaccgtgaggacggtct

SEQ ID NO: 2581410 - DNA, 25 bp, Homo sapien
gcttttatcaatcttctctcccaga

SEQ ID NO: 2581411 - DNA, 25 bp, Homo sapien
tcccagagacacatggaagctgcat

SEQ ID NO: 2581412 - DNA, 25 bp, Homo sapien
tcttctccaggcaattccggaaatt

SEQ ID NO: 2581413 - DNA, 25 bp, Homo sapien
taaaagcacccgatgggatgctggc

SEQ ID NO: 2581414 - DNA, 25 bp, Homo sapien
tcccctcggcaacgtgacaggtgtt

SEQ ID NO: 2581415 - DNA, 25 bp, Homo sapien
tgttccgctcgaagccgaaacagag

SEQ ID NO: 2581416 - DNA, 25 bp, Homo sapien
taaatagccatgctgtgtcaaggga

SEQ ID NO: 2581417 - DNA, 25 bp, Homo sapien
ttagtcccagaaacagagcgtctgt

SEQ ID NO: 2581418 - DNA, 25 bp, Homo sapien
gtcccagaaacagagcgtctgtggg

SEQ ID NO: 2581419 - DNA, 25 bp, Homo sapien
tagtcccagaaacagagcgtctgtg

SEQ ID NO: 2581420 - DNA, 25 bp, Homo sapien
cccagaaacagagcgtctgtggggc

SEQ ID NO: 2581421 - DNA, 25 bp, Homo sapien
aggccagcagcggatgcggtaggtc

SEQ ID NO: 2581422 - DNA, 25 bp, Homo sapien
gcagcggatgcggtaggtcagcggt

SEQ ID NO: 2581423 - DNA, 25 bp, Homo sapien
tgcggtaggtcagcggtgggcaggt

SEQ ID NO: 2581424 - DNA, 25 bp, Homo sapien
cggatgcggtaggtcagcggtgggc

SEQ ID NO: 2581425 - DNA, 25 bp, Homo sapien
ctcgacgtgtccagcacccacaccc

SEQ ID NO: 2581426 - DNA, 25 bp, Homo sapien
gggcttggatgaggcagtcttggct

SEQ ID NO: 2581427 - DNA, 25 bp, Homo sapien
cttggatgaggcagtcttggctccc

SEQ ID NO: 2581428 - DNA, 25 bp, Homo sapien
tccctgtgcccctcgacgtgtccag

SEQ ID NO: 2581429 - DNA, 25 bp, Homo sapien
ttaaatgcgggtgcctgggcccctc

SEQ ID NO: 2581430 - DNA, 25 bp, Homo sapien
ctcccagaagtgggcccgagtctgc

SEQ ID NO: 2581431 - DNA, 25 bp, Homo sapien
ggtgggctgactccgcgggcctggc

SEQ ID NO: 2581432 - DNA, 25 bp, Homo sapien
ccgccacgtgccgaggtcgggactg

SEQ ID NO: 2581433 - DNA, 25 bp, Homo sapien
ggagtcaggcaatatgatctgaggg

SEQ ID NO: 2581434 - DNA, 25 bp, Homo sapien
cacgggggagtcaggcaatatgatc

SEQ ID NO: 2581435 - DNA, 25 bp, Homo sapien
ctgaggggctgatatgtaaccagca

SEQ ID NO: 2581436 - DNA, 25 bp, Homo sapien
caggccttttgggtgagacacgggg

SEQ ID NO: 2581437 - DNA, 25 bp, Homo sapien
ttctgcatccgaggccccctgggca

SEQ ID NO: 2581438 - DNA, 25 bp, Homo sapien
ataggtctctgtgggtgcctcgcct

SEQ ID NO: 2581439 - DNA, 25 bp, Homo sapien
gcttggcttctgcatccgaggcccc

SEQ ID NO: 2581440 - DNA, 25 bp, Homo sapien
gtctctgtgggtgcctcgcctggta

SEQ ID NO: 2581441 - DNA, 25 bp, Homo sapien
aatgctgtcgtgttgacgaagcacc

SEQ ID NO: 2581442 - DNA, 25 bp, Homo sapien
tcgtgttgacgaagcaccagcccat

SEQ ID NO: 2581443 - DNA, 25 bp, Homo sapien
ccttggcaaatgctgtcgtgttgac

SEQ ID NO: 2581444 - DNA, 25 bp, Homo sapien
ctgcccttggcaaatgctgtcgtgt

SEQ ID NO: 2581445 - DNA, 25 bp, Homo sapien
ttgcagccggccagcttggggtaat

SEQ ID NO: 2581446 - DNA, 25 bp, Homo sapien
tgcagccggccagcttggggtaatt

SEQ ID NO: 2581447 - DNA, 25 bp, Homo sapien
gcagccggccagcttggggtaattg

SEQ ID NO: 2581448 - DNA, 25 bp, Homo sapien
cttgcagccggccagcttggggtaa

SEQ ID NO: 2581449 - DNA, 25 bp, Homo sapien
tactgcctcataaacttggaagcaa

SEQ ID NO: 2581450 - DNA, 25 bp, Homo sapien
cattcatcactatgcgggggctgtt

SEQ ID NO: 2581451 - DNA, 25 bp, Homo sapien
ggaagcaagtgatattgtctcctaa

SEQ ID NO: 2581452 - DNA, 25 bp, Homo sapien
tgtctcctaaatcaatggctgcgcg

SEQ ID NO: 2581453 - DNA, 25 bp, Homo sapien
tttcgtgtgcggccatcatggggca

SEQ ID NO: 2581454 - DNA, 25 bp, Homo sapien
cttttcgtgtgcggccatcatgggg

SEQ ID NO: 2581455 - DNA, 25 bp, Homo sapien
gccatcatggggcactggaatttta

SEQ ID NO: 2581456 - DNA, 25 bp, Homo sapien
ttttcgtgtgcggccatcatggggc

SEQ ID NO: 2581457 - DNA, 25 bp, Homo sapien
gaacagtgatcactttaaccaaact

SEQ ID NO: 2581458 - DNA, 25 bp, Homo sapien
taaatttctaaatacatgacctttc

SEQ ID NO: 2581459 - DNA, 25 bp, Homo sapien
atacatgacctttccctcaacagaa

SEQ ID NO: 2581460 - DNA, 25 bp, Homo sapien
tactatgatgtgaacacaataacca

SEQ ID NO: 2581461 - DNA, 25 bp, Homo sapien
aggtgccagccaagggtctgatcct

SEQ ID NO: 2581462 - DNA, 25 bp, Homo sapien
agctgggccacacgcgcggagaagc

SEQ ID NO: 2581463 - DNA, 25 bp, Homo sapien
gccaagggtctgatcctttacttgg

SEQ ID NO: 2581464 - DNA, 25 bp, Homo sapien
gagctgggccacacgcgcggagaag

SEQ ID NO: 2581465 - DNA, 25 bp, Homo sapien
ggcagatgttggtttggatgtcggg

SEQ ID NO: 2581466 - DNA, 25 bp, Homo sapien
ccaggggcagatgttggtttggatg

SEQ ID NO: 2581467 - DNA, 25 bp, Homo sapien
gctgtgggtgcagtacccacactgg

SEQ ID NO: 2581468 - DNA, 25 bp, Homo sapien
ggctgtgggtgcagtacccacactg

SEQ ID NO: 2581469 - DNA, 25 bp, Homo sapien
gatgagtcagaaaggcacgttaaag

SEQ ID NO: 2581470 - DNA, 25 bp, Homo sapien
agacttgttggtggcacagtgagcc

SEQ ID NO: 2581471 - DNA, 25 bp, Homo sapien
gcaagacggagagaaggagatgagt

SEQ ID NO: 2581472 - DNA, 25 bp, Homo sapien
ctggcgccaagaggaagacttgttg

SEQ ID NO: 2581473 - DNA, 25 bp, Homo sapien
accttggtgtggctgatgaccccag

SEQ ID NO: 2581474 - DNA, 25 bp, Homo sapien
gacaaggtcacgctgagttaactga

SEQ ID NO: 2581475 - DNA, 25 bp, Homo sapien
caggcacatgacaacacgagaccct

SEQ ID NO: 2581476 - DNA, 25 bp, Homo sapien
cccaaggtgcggtccacaggttgtt

SEQ ID NO: 2581477 - DNA, 25 bp, Homo sapien
ttcaggagccatgcggaaagacatg

SEQ ID NO: 2581478 - DNA, 25 bp, Homo sapien
gaaatgcatcagtgggtgtcaccct

SEQ ID NO: 2581479 - DNA, 25 bp, Homo sapien
gagaaatgcatcagtgggtgtcacc

SEQ ID NO: 2581480 - DNA, 25 bp, Homo sapien
atgcatcagtgggtgtcaccctcca

SEQ ID NO: 2581481 - DNA, 25 bp, Homo sapien
aaatgcatcagtgggtgtcaccctc

SEQ ID NO: 2581482 - DNA, 25 bp, Homo sapien
gtggcagtaacactggtcccaattc

SEQ ID NO: 2581483 - DNA, 25 bp, Homo sapien
cctctgtagatagtggcagtaacac

SEQ ID NO: 2581484 - DNA, 25 bp, Homo sapien
tggcagtaacactggtcccaattct

SEQ ID NO: 2581485 - DNA, 25 bp, Homo sapien
ctggaggcatgaatggagggcattg

SEQ ID NO: 2581486 - DNA, 25 bp, Homo sapien
gaggcatgaatggagggcattgtcc

SEQ ID NO: 2581487 - DNA, 25 bp, Homo sapien
tggaggcatgaatggagggcattgt

SEQ ID NO: 2581488 - DNA, 25 bp, Homo sapien
ggaggcatgaatggagggcattgtc

SEQ ID NO: 2581489 - DNA, 25 bp, Homo sapien
agtggccctgcatccgaccgaggag

SEQ ID NO: 2581490 - DNA, 25 bp, Homo sapien
actcagtggccctgcatccgaccga

SEQ ID NO: 2581491 - DNA, 25 bp, Homo sapien
tcagtggccctgcatccgaccgagg

SEQ ID NO: 2581492 - DNA, 25 bp, Homo sapien
gctgcacgggacgggccagtgccct

SEQ ID NO: 2581493 - DNA, 25 bp, Homo sapien
tttaatcaccctattaaccaggatg

SEQ ID NO: 2581494 - DNA, 25 bp, Homo sapien
tctttatcttgggttgagtatgaca

SEQ ID NO: 2581495 - DNA, 25 bp, Homo sapien
atgtgatggaatttcaagtttgcct

SEQ ID NO: 2581496 - DNA, 25 bp, Homo sapien
aatcacatttatctcctggagcata

SEQ ID NO: 2581497 - DNA, 25 bp, Homo sapien
actggtgtcagcaccgctgcagagg

SEQ ID NO: 2581498 - DNA, 25 bp, Homo sapien
ccctctcagggccttgtaaactggt

SEQ ID NO: 2581499 - DNA, 25 bp, Homo sapien
tgccttgtaacctcccgaagggcag

SEQ ID NO: 2581500 - DNA, 25 bp, Homo sapien
gtaaactggtgtcagcaccgctgca

SEQ ID NO: 2581501 - DNA, 25 bp, Homo sapien
ccaggaacatgggcagattgctgac

SEQ ID NO: 2581502 - DNA, 25 bp, Homo sapien
gctctggagacaccatgacagcaaa

SEQ ID NO: 2581503 - DNA, 25 bp, Homo sapien
gattgctgactgaaccagtgcactg

SEQ ID NO: 2581504 - DNA, 25 bp, Homo sapien
ttacaggaataacttccttatgtgg

SEQ ID NO: 2581505 - DNA, 25 bp, Homo sapien
ctttcgaagtaaaatgcaatcaata

SEQ ID NO: 2581506 - DNA, 25 bp, Homo sapien
acaattcccaagaactccgaatcgg

SEQ ID NO: 2581507 - DNA, 25 bp, Homo sapien
tccaacaattcccaagaactccgaa

SEQ ID NO: 2581508 - DNA, 25 bp, Homo sapien
ttagatgaacgactttcgaagtaaa

SEQ ID NO: 2581509 - DNA, 25 bp, Homo sapien
cctcggcctcctgaagtgcttggat

SEQ ID NO: 2581510 - DNA, 25 bp, Homo sapien
ttgaccaggctggtgtggaatgcct

SEQ ID NO: 2581511 - DNA, 25 bp, Homo sapien
gttgaccaggctggtgtggaatgcc

SEQ ID NO: 2581512 - DNA, 25 bp, Homo sapien
accaggctggtgtggaatgcctgac

SEQ ID NO: 2581513 - DNA, 25 bp, Homo sapien
gctctaggctcatgggcccagttga

SEQ ID NO: 2581514 - DNA, 25 bp, Homo sapien
aggcatcccgtgtgtccctcagtga

SEQ ID NO: 2581515 - DNA, 25 bp, Homo sapien
tccaagatgattcggacagctgtct

SEQ ID NO: 2581516 - DNA, 25 bp, Homo sapien
tcatttacaccctgagctctaggct

SEQ ID NO: 2581517 - DNA, 25 bp, Homo sapien
tgggacactataatgaggctcggtg

SEQ ID NO: 2581518 - DNA, 25 bp, Homo sapien
ctgggacactataatgaggctcggt

SEQ ID NO: 2581519 - DNA, 25 bp, Homo sapien
aatgaggctcggtgtgtgcacacgg

SEQ ID NO: 2581520 - DNA, 25 bp, Homo sapien
actgggacactataatgaggctcgg

SEQ ID NO: 2581521 - DNA, 25 bp, Homo sapien
gggacactatgatgagggtagatga

SEQ ID NO: 2581522 - DNA, 25 bp, Homo sapien
ctgggacactatgatgagggtagat

SEQ ID NO: 2581523 - DNA, 25 bp, Homo sapien
actgggacactatgatgagggtaga

SEQ ID NO: 2581524 - DNA, 25 bp, Homo sapien
gacactatgatgagggtagatgagc

SEQ ID NO: 2581525 - DNA, 25 bp, Homo sapien
gacactgtgatgtggctaggtgaga

SEQ ID NO: 2581526 - DNA, 25 bp, Homo sapien
actgtgatgtggctaggtgagagca

SEQ ID NO: 2581527 - DNA, 25 bp, Homo sapien
actgggacactgtgatgtggctagg

SEQ ID NO: 2581528 - DNA, 25 bp, Homo sapien
tgatgtggctaggtgagagcacact

SEQ ID NO: 2581529 - DNA, 25 bp, Homo sapien
gcttgctagcggtcaacgttgccgg

SEQ ID NO: 2581530 - DNA, 25 bp, Homo sapien
gacaaatagcagagagaccgcctta

SEQ ID NO: 2581531 - DNA, 25 bp, Homo sapien
tcccagcggaagaccaagcttgcta

SEQ ID NO: 2581532 - DNA, 25 bp, Homo sapien
tcaggaaactcatgccctccggtga

SEQ ID NO: 2581533 - DNA, 25 bp, Homo sapien
aggtgttgttaatcttaaagctcat

SEQ ID NO: 2581534 - DNA, 25 bp, Homo sapien
cttacagaaggtgttgttaatctta

SEQ ID NO: 2581535 - DNA, 25 bp, Homo sapien
tcatcttcatactaggaatagccag

SEQ ID NO: 2581536 - DNA, 25 bp, Homo sapien
gaatagccagaatacaaactcgagg

SEQ ID NO: 2581537 - DNA, 25 bp, Homo sapien
agagtggtcaagtagcagggaggcc

SEQ ID NO: 2581538 - DNA, 25 bp, Homo sapien
cagttaccctagaaaccctattgag

SEQ ID NO: 2581539 - DNA, 25 bp, Homo sapien
gcatctgctactcgctcttcagggc

SEQ ID NO: 2581540 - DNA, 25 bp, Homo sapien
gcgcatctgctactcgctcttcagg

SEQ ID NO: 2581541 - DNA, 25 bp, Homo sapien
gctactcgctcttcagggccctctg

SEQ ID NO: 2581542 - DNA, 25 bp, Homo sapien
ctagctctgcgcatctgctactcgc

SEQ ID NO: 2581543 - DNA, 25 bp, Homo sapien
tatgatggtaaaacgagaagcttcc

SEQ ID NO: 2581544 - DNA, 25 bp, Homo sapien
tcaaattcaggagagggcgtaaacc

SEQ ID NO: 2581545 - DNA, 25 bp, Homo sapien
tactatcctaagatcaggcccagca

SEQ ID NO: 2581546 - DNA, 25 bp, Homo sapien
tgaagtctagagagtgtgccgccag

SEQ ID NO: 2581547 - DNA, 25 bp, Homo sapien
ggcagcactcctccgtcgcttccag

SEQ ID NO: 2581548 - DNA, 25 bp, Homo sapien
ccggctcggcgacaactttgccgag

SEQ ID NO: 2581549 - DNA, 25 bp, Homo sapien
gggagcccaactgtcatagcagaat

SEQ ID NO: 2581550 - DNA, 25 bp, Homo sapien
caactttgccgaggacacccaggtt

SEQ ID NO: 2581551 - DNA, 25 bp, Homo sapien
ccgccgagccacgaccgccgccggc

SEQ ID NO: 2581552 - DNA, 25 bp, Homo sapien
ctgggggcgcacacccccaggagcc

SEQ ID NO: 2581553 - DNA, 25 bp, Homo sapien
cggctgggggcgcacacccccagga

SEQ ID NO: 2581554 - DNA, 25 bp, Homo sapien
ggccccgccgagccacgaccgccgc

SEQ ID NO: 2581555 - DNA, 25 bp, Homo sapien
cgtcaggtagaagacgcccgtctgc

SEQ ID NO: 2581556 - DNA, 25 bp, Homo sapien
gatcctcccgttacagaagaacttg

SEQ ID NO: 2581557 - DNA, 25 bp, Homo sapien
aagagtccgctagtgaccaggatga

SEQ ID NO: 2581558 - DNA, 25 bp, Homo sapien
ggctgtactcgcagtctttcatggg

SEQ ID NO: 2581559 - DNA, 25 bp, Homo sapien
tgtcacgtagtgtcatcctcttcct

SEQ ID NO: 2581560 - DNA, 25 bp, Homo sapien
ctggaatcggaagttgtcacgtagt

SEQ ID NO: 2581561 - DNA, 25 bp, Homo sapien
taacagacctaaggtctcctttcac

SEQ ID NO: 2581562 - DNA, 25 bp, Homo sapien
tcttccttaacagacctaaggtctc

SEQ ID NO: 2581563 - DNA, 25 bp, Homo sapien
cggtgaagacttgcatgcgcttttt

SEQ ID NO: 2581564 - DNA, 25 bp, Homo sapien
gcaggaggacagttgctactggcca

SEQ ID NO: 2581565 - DNA, 25 bp, Homo sapien
ttcctgaaaacggtgaagacttgca

SEQ ID NO: 2581566 - DNA, 25 bp, Homo sapien
tttatccccccagatataatccctg

SEQ ID NO: 2581567 - DNA, 25 bp, Homo sapien
tgctaatcagcgcacagtgtccaga

SEQ ID NO: 2581568 - DNA, 25 bp, Homo sapien
gagatccttctcatcgcctggtcta

SEQ ID NO: 2581569 - DNA, 25 bp, Homo sapien
gcctggtctaactcagtcctcttaa

SEQ ID NO: 2581570 - DNA, 25 bp, Homo sapien
ggctttgagcgacaagtattacgtt

SEQ ID NO: 2581571 - DNA, 25 bp, Homo sapien
tgacgacatcgcatagacagccttg

SEQ ID NO: 2581572 - DNA, 25 bp, Homo sapien
tctggatagcactgcagtcggctcc

SEQ ID NO: 2581573 - DNA, 25 bp, Homo sapien
cttaatagctgcaaagagggtgagc

SEQ ID NO: 2581574 - DNA, 25 bp, Homo sapien
ttctgggatggtggcttcaaaaaca

SEQ ID NO: 2581575 - DNA, 25 bp, Homo sapien
tgtagaatgcggagacccagtcaag

SEQ ID NO: 2581576 - DNA, 25 bp, Homo sapien
tttcaagtgtctgagccccaggaac

SEQ ID NO: 2581577 - DNA, 25 bp, Homo sapien
cagtcaagccccagatctaagcaga

SEQ ID NO: 2581578 - DNA, 25 bp, Homo sapien
gagaatgtccccacgttttcaagtg

SEQ ID NO: 2581579 - DNA, 25 bp, Homo sapien
gggttataaacatccttggctccat

SEQ ID NO: 2581580 - DNA, 25 bp, Homo sapien
agcagtgaacaaggcgagtccccat

SEQ ID NO: 2581581 - DNA, 25 bp, Homo sapien
tcctgagggtcacgtattgtctgta

SEQ ID NO: 2581582 - DNA, 25 bp, Homo sapien
ggttagccaagagaacatccgaatg

SEQ ID NO: 2581583 - DNA, 25 bp, Homo sapien
ggcacacgagatgaagggccgcttc

SEQ ID NO: 2581584 - DNA, 25 bp, Homo sapien
ctctcctgctcaaagaagcattctg

SEQ ID NO: 2581585 - DNA, 25 bp, Homo sapien
tatgggtgcacgaactggctgcaac

SEQ ID NO: 2581586 - DNA, 25 bp, Homo sapien
atgaagggccgcttctgccaagcaa

SEQ ID NO: 2581587 - DNA, 25 bp, Homo sapien
taagccgtcgtttcagaggagtcat

SEQ ID NO: 2581588 - DNA, 25 bp, Homo sapien
tcttgtactggtcagtggagatgca

SEQ ID NO: 2581589 - DNA, 25 bp, Homo sapien
tcattataacgacagaattcctttc

SEQ ID NO: 2581590 - DNA, 25 bp, Homo sapien
tcagtggagatgcaataagccgtcg

SEQ ID NO: 2581591 - DNA, 25 bp, Homo sapien
catctcacttgctgtgacccagcag

SEQ ID NO: 2581592 - DNA, 25 bp, Homo sapien
tgctgtgacctcagcagatgcgcat

SEQ ID NO: 2581593 - DNA, 25 bp, Homo sapien
ggtgcgcatttcactactgcagttg

SEQ ID NO: 2581594 - DNA, 25 bp, Homo sapien
cagactagcaatcagcaggtgtgca

SEQ ID NO: 2581595 - DNA, 25 bp, Homo sapien
tgtgttttagggctgtccccagtcg

SEQ ID NO: 2581596 - DNA, 25 bp, Homo sapien
tccatatgtaaatcttcagtggcgt

SEQ ID NO: 2581597 - DNA, 25 bp, Homo sapien
gcgtatcatgagcaaaacctctgtg

SEQ ID NO: 2581598 - DNA, 25 bp, Homo sapien
ccccagtcgtctgctgtggtgaaga

SEQ ID NO: 2581599 - DNA, 25 bp, Homo sapien
tgtcccctggagtcagtgcagccat

SEQ ID NO: 2581600 - DNA, 25 bp, Homo sapien
gatgtcaggtctggatgtgtcccct

SEQ ID NO: 2581601 - DNA, 25 bp, Homo sapien
cttttcctgatgtcaggtctggatg

SEQ ID NO: 2581602 - DNA, 25 bp, Homo sapien
cctgatgtcaggtctggatgtgtcc

SEQ ID NO: 2581603 - DNA, 25 bp, Homo sapien
atttccgccgacatggggatcccac

SEQ ID NO: 2581604 - DNA, 25 bp, Homo sapien
aaatgaaaactcatttccgccgaca

SEQ ID NO: 2581605 - DNA, 25 bp, Homo sapien
gaaaactcatttccgccgacatggg

SEQ ID NO: 2581606 - DNA, 25 bp, Homo sapien
atgaaaactcatttccgccgacatg

SEQ ID NO: 2581607 - DNA, 25 bp, Homo sapien
tgaatgtggaaaaccgtgactcact

SEQ ID NO: 2581608 - DNA, 25 bp, Homo sapien
tcatcatcccttgaagggaaggaat

SEQ ID NO: 2581609 - DNA, 25 bp, Homo sapien
aaggtgctgaatgtggaaaaccgtg

SEQ ID NO: 2581610 - DNA, 25 bp, Homo sapien
atcccttgaagggaaggaatcaaag

SEQ ID NO: 2581611 - DNA, 25 bp, Homo sapien
gacttgcaggttccagtcatttcaa

SEQ ID NO: 2581612 - DNA, 25 bp, Homo sapien
cagacttgcaggttccagtcatttc

SEQ ID NO: 2581613 - DNA, 25 bp, Homo sapien
gctgactcagacttgcaggttccag

SEQ ID NO: 2581614 - DNA, 25 bp, Homo sapien
gactcagacttgcaggttccagtca

SEQ ID NO: 2581615 - DNA, 25 bp, Homo sapien
cttgtgtcccgtatacactctggca

SEQ ID NO: 2581616 - DNA, 25 bp, Homo sapien
ccttgtgtcccgtatacactctggc

SEQ ID NO: 2581617 - DNA, 25 bp, Homo sapien
accttgtgtcccgtatacactctgg

SEQ ID NO: 2581618 - DNA, 25 bp, Homo sapien
tcaccttgtgtcccgtatacactct

SEQ ID NO: 2581619 - DNA, 25 bp, Homo sapien
tggatccaaaaacataaaaatgggc

SEQ ID NO: 2581620 - DNA, 25 bp, Homo sapien
ctggatccaaaaacataaaaatggg

SEQ ID NO: 2581621 - DNA, 25 bp, Homo sapien
cagggacagtgctccttttggaaca

SEQ ID NO: 2581622 - DNA, 25 bp, Homo sapien
cacgccggggatttcagcgcagaag

SEQ ID NO: 2581623 - DNA, 25 bp, Homo sapien
cgctcttgggcggtgagatgctgta

SEQ ID NO: 2581624 - DNA, 25 bp, Homo sapien
tcccacttgatcagcagggacagtg

SEQ ID NO: 2581625 - DNA, 25 bp, Homo sapien
caagaaatagagtgatcgtgccagc

SEQ ID NO: 2581626 - DNA, 25 bp, Homo sapien
aacacgttcattagacacaggcaca

SEQ ID NO: 2581627 - DNA, 25 bp, Homo sapien
gctagggcacatgacaaggttctca

SEQ ID NO: 2581628 - DNA, 25 bp, Homo sapien
cactgtgctcggtttcatgcccaaa

SEQ ID NO: 2581629 - DNA, 25 bp, Homo sapien
cagacttgggccacctttggcaggg

SEQ ID NO: 2581630 - DNA, 25 bp, Homo sapien
gggcaaaacagcacgtaacctcgtg

SEQ ID NO: 2581631 - DNA, 25 bp, Homo sapien
aaaacagcacgtaacctcgtgccct

SEQ ID NO: 2581632 - DNA, 25 bp, Homo sapien
gcaaaacagcacgtaacctcgtgcc

SEQ ID NO: 2581633 - DNA, 25 bp, Homo sapien
caatctgttgaaaaggttctggccc

SEQ ID NO: 2581634 - DNA, 25 bp, Homo sapien
gttctggccccagcgatgactttgc

SEQ ID NO: 2581635 - DNA, 25 bp, Homo sapien
catgtagcgagtccaatctgttgaa

SEQ ID NO: 2581636 - DNA, 25 bp, Homo sapien
tgggtcagcaccatgtagcgagtcc

SEQ ID NO: 2581637 - DNA, 25 bp, Homo sapien
attacaatgtccccgaaatggcccg

SEQ ID NO: 2581638 - DNA, 25 bp, Homo sapien
ccttctaacaagagccgcttgtatc

SEQ ID NO: 2581639 - DNA, 25 bp, Homo sapien
tccttctaacaagagccgcttgtat

SEQ ID NO: 2581640 - DNA, 25 bp, Homo sapien
cttctaacaagagccgcttgtatcc

SEQ ID NO: 2581641 - DNA, 25 bp, Homo sapien
taccagcacatgtaatgcgattact

SEQ ID NO: 2581642 - DNA, 25 bp, Homo sapien
gaggtggacagaaacagaacggttc

SEQ ID NO: 2581643 - DNA, 25 bp, Homo sapien
ggcccacaactcagtctttgtacca

SEQ ID NO: 2581644 - DNA, 25 bp, Homo sapien
gaaacagaacggttcactgaattct

SEQ ID NO: 2581645 - DNA, 25 bp, Homo sapien
gcagtctcaacttcatgggctcaag

SEQ ID NO: 2581646 - DNA, 25 bp, Homo sapien
gtacaggtgcacaccgccatgcttg

SEQ ID NO: 2581647 - DNA, 25 bp, Homo sapien
tgcttggctaattttttacattttg

SEQ ID NO: 2581648 - DNA, 25 bp, Homo sapien
gagtacaggtgcacaccgccatgct

SEQ ID NO: 2581649 - DNA, 25 bp, Homo sapien
tgccagtcaggaaaaggaagccttc

SEQ ID NO: 2581650 - DNA, 25 bp, Homo sapien
tctcgagcacatgcatgctttatgc

SEQ ID NO: 2581651 - DNA, 25 bp, Homo sapien
ttgctgcttgctatgccaattgctg

SEQ ID NO: 2581652 - DNA, 25 bp, Homo sapien
gctatgccaattgctgtggctgcca

SEQ ID NO: 2581653 - DNA, 25 bp, Homo sapien
tttagtcaaactcaatgagatactg

SEQ ID NO: 2581654 - DNA, 25 bp, Homo sapien
agatactgtttacggtggtggccac

SEQ ID NO: 2581655 - DNA, 25 bp, Homo sapien
gaactcctgccacagtttagtcaaa

SEQ ID NO: 2581656 - DNA, 25 bp, Homo sapien
tggtggttagaagcgtgaactcctg

SEQ ID NO: 2581657 - DNA, 25 bp, Homo sapien
gccagcatcacagcaagccacaggg

SEQ ID NO: 2581658 - DNA, 25 bp, Homo sapien
ccagggagaggtaagccagcatcac

SEQ ID NO: 2581659 - DNA, 25 bp, Homo sapien
agccagcatcacagcaagccacagg

SEQ ID NO: 2581660 - DNA, 25 bp, Homo sapien
gagaggtaagccagcatcacagcaa

SEQ ID NO: 2581661 - DNA, 25 bp, Homo sapien
tgtatagactttactggccaaagac

SEQ ID NO: 2581662 - DNA, 25 bp, Homo sapien
taccgaagacgactgaccggttgct

SEQ ID NO: 2581663 - DNA, 25 bp, Homo sapien
ggaagccaccataacatgtgtgtgt

SEQ ID NO: 2581664 - DNA, 25 bp, Homo sapien
tgggttcatgagctggagacaatct

SEQ ID NO: 2581665 - DNA, 25 bp, Homo sapien
cgcgccagtcccatcaaatcaaagt

SEQ ID NO: 2581666 - DNA, 25 bp, Homo sapien
tgcccaccgtagtcaaagctgagtc

SEQ ID NO: 2581667 - DNA, 25 bp, Homo sapien
gctgagtccctcatgagtcctgtta

SEQ ID NO: 2581668 - DNA, 25 bp, Homo sapien
tcgggaaaatgtgaacgctgcaggc

SEQ ID NO: 2581669 - DNA, 25 bp, Homo sapien
ttaaccgacgcgaaaccgctttgca

SEQ ID NO: 2581670 - DNA, 25 bp, Homo sapien
gatgctggaattgccctgtgaagac

SEQ ID NO: 2581671 - DNA, 25 bp, Homo sapien
tctcatcgaaggcagcattaaccga

SEQ ID NO: 2581672 - DNA, 25 bp, Homo sapien
tgaagacccgctgtgcagtgcaaat

SEQ ID NO: 2581673 - DNA, 25 bp, Homo sapien
tcagtgagactccaaatgccaccca

SEQ ID NO: 2581674 - DNA, 25 bp, Homo sapien
gcagaatggatcagctgacctgcac

SEQ ID NO: 2581675 - DNA, 25 bp, Homo sapien
taggaccgcgctggaactgagtcac

SEQ ID NO: 2581676 - DNA, 25 bp, Homo sapien
tgagtcacccagcagaatggatcag

SEQ ID NO: 2581677 - DNA, 25 bp, Homo sapien
agttcattacttcgcatttcgagca

SEQ ID NO: 2581678 - DNA, 25 bp, Homo sapien
ttcgcatttcgagcatgttgttcat

SEQ ID NO: 2581679 - DNA, 25 bp, Homo sapien
cgttccagttcattacttcgcattt

SEQ ID NO: 2581680 - DNA, 25 bp, Homo sapien
cattacttcgcatttcgagcatgtt

SEQ ID NO: 2581681 - DNA, 25 bp, Homo sapien
tgtgtgtgtggctcacgcatgaact

SEQ ID NO: 2581682 - DNA, 25 bp, Homo sapien
cgcatgaactgtgagccacggacta

SEQ ID NO: 2581683 - DNA, 25 bp, Homo sapien
taacacagtgcagaacgtggctctg

SEQ ID NO: 2581684 - DNA, 25 bp, Homo sapien
ggctatgtggccgtaagctaaggaa

SEQ ID NO: 2581685 - DNA, 25 bp, Homo sapien
tgaagtaggcaggagcacagaggcc

SEQ ID NO: 2581686 - DNA, 25 bp, Homo sapien
aagtaggcaggagcacagaggccac

SEQ ID NO: 2581687 - DNA, 25 bp, Homo sapien
agtaggcaggagcacagaggccacc

SEQ ID NO: 2581688 - DNA, 25 bp, Homo sapien
ctgaagtaggcaggagcacagaggc

SEQ ID NO: 2581689 - DNA, 25 bp, Homo sapien
ggtgaataatctggctgtccacact

SEQ ID NO: 2581690 - DNA, 25 bp, Homo sapien
ccaggtccctggtccagcggttggt

SEQ ID NO: 2581691 - DNA, 25 bp, Homo sapien
cgagccctggcgcacgtgtgtcagt

SEQ ID NO: 2581692 - DNA, 25 bp, Homo sapien
cacgtgtgtcagtccattcagagaa

SEQ ID NO: 2581693 - DNA, 25 bp, Homo sapien
tagaagagaacgttggccttaccta

SEQ ID NO: 2581694 - DNA, 25 bp, Homo sapien
cagcttgcagcgatagaagagaacg

SEQ ID NO: 2581695 - DNA, 25 bp, Homo sapien
cagcgatagaagagaacgttggcct

SEQ ID NO: 2581696 - DNA, 25 bp, Homo sapien
ttgcagcgatagaagagaacgttgg

SEQ ID NO: 2581697 - DNA, 25 bp, Homo sapien
acaagctcggagtcttgggtgacaa

SEQ ID NO: 2581698 - DNA, 25 bp, Homo sapien
cagtctggtagtaacgccttagtga

SEQ ID NO: 2581699 - DNA, 25 bp, Homo sapien
caaagtcgctcattgatggattgcc

SEQ ID NO: 2581700 - DNA, 25 bp, Homo sapien
ctattctgcgtgaaggtgccttgtc

SEQ ID NO: 2581701 - DNA, 25 bp, Homo sapien
tatttgcctttccagatcggcggct

SEQ ID NO: 2581702 - DNA, 25 bp, Homo sapien
aagaagaacaggatgccagcgactg

SEQ ID NO: 2581703 - DNA, 25 bp, Homo sapien
atcggcggcttcatcaggcgtggct

SEQ ID NO: 2581704 - DNA, 25 bp, Homo sapien
gattttcaccgccaggtacggacag

SEQ ID NO: 2581705 - DNA, 25 bp, Homo sapien
gaaagggcagcaacctacaactgta

SEQ ID NO: 2581706 - DNA, 25 bp, Homo sapien
caagaaagctgcctaagatgtaact

SEQ ID NO: 2581707 - DNA, 25 bp, Homo sapien
aactggtcatgctccaaggattgca

SEQ ID NO: 2581708 - DNA, 25 bp, Homo sapien
caatcctggcctggataaacaagaa

SEQ ID NO: 2581709 - DNA, 25 bp, Homo sapien
aagcaagtcctcagtgacctacaaa

SEQ ID NO: 2581710 - DNA, 25 bp, Homo sapien
aagtcctcagtgacctacaaagaga

SEQ ID NO: 2581711 - DNA, 25 bp, Homo sapien
cataaagcaagtcctcagtgaccta

SEQ ID NO: 2581712 - DNA, 25 bp, Homo sapien
agtcctcagtgacctacaaagagac

SEQ ID NO: 2581713 - DNA, 25 bp, Homo sapien
acagtgggcgcaggccagtgtgtgt

SEQ ID NO: 2581714 - DNA, 25 bp, Homo sapien
aggccagtgtgtgtgcgcaccgtgc

SEQ ID NO: 2581715 - DNA, 25 bp, Homo sapien
gccagtgtgtgtgcgcaccgtgcgc

SEQ ID NO: 2581716 - DNA, 25 bp, Homo sapien
ggcgcaggccagtgtgtgtgcgcac

SEQ ID NO: 2581717 - DNA, 25 bp, Homo sapien
ggagccaagcatggcttcctcaggg

SEQ ID NO: 2581718 - DNA, 25 bp, Homo sapien
gcaggtgttggactcccagctctgg

SEQ ID NO: 2581719 - DNA, 25 bp, Homo sapien
ggcagcactgtgcagcgggtaagag

SEQ ID NO: 2581720 - DNA, 25 bp, Homo sapien
cagctctggccaagtgacctctggc

SEQ ID NO: 2581721 - DNA, 25 bp, Homo sapien
cctcggcgctgagctgtctccctgg

SEQ ID NO: 2581722 - DNA, 25 bp, Homo sapien
gcctcggcgctgagctgtctccctg

SEQ ID NO: 2581723 - DNA, 25 bp, Homo sapien
ggcctcggcgctgagctgtctccct

SEQ ID NO: 2581724 - DNA, 25 bp, Homo sapien
aaaatcaactgtgcactttctgtcc

SEQ ID NO: 2581725 - DNA, 25 bp, Homo sapien
ctgccgaatgtgaaaatcaactgtg

SEQ ID NO: 2581726 - DNA, 25 bp, Homo sapien
ctctgccgaatgtgaaaatcaactg

SEQ ID NO: 2581727 - DNA, 25 bp, Homo sapien
aatcaactgtgcactttctgtccat

SEQ ID NO: 2581728 - DNA, 25 bp, Homo sapien
gagtaattatcagccatttctggga

SEQ ID NO: 2581729 - DNA, 25 bp, Homo sapien
tcagagtaattatcagccatttctg

SEQ ID NO: 2581730 - DNA, 25 bp, Homo sapien
agagtaattatcagccatttctggg

SEQ ID NO: 2581731 - DNA, 25 bp, Homo sapien
taattatcagccatttctgggaatg

SEQ ID NO: 2581732 - DNA, 25 bp, Homo sapien
tcacatcacccggacctgctccggc

SEQ ID NO: 2581733 - DNA, 25 bp, Homo sapien
acatcacccggacctgctccggctc

SEQ ID NO: 2581734 - DNA, 25 bp, Homo sapien
acccggacctgctccggctcctctt

SEQ ID NO: 2581735 - DNA, 25 bp, Homo sapien
atcacccggacctgctccggctcct

SEQ ID NO: 2581736 - DNA, 25 bp, Homo sapien
tgatttccagggacctcccgcttgg

SEQ ID NO: 2581737 - DNA, 25 bp, Homo sapien
ggtgtccagcccgccagagtgtcat

SEQ ID NO: 2581738 - DNA, 25 bp, Homo sapien
agggacctcccgcttggtgtccagc

SEQ ID NO: 2581739 - DNA, 25 bp, Homo sapien
ttccagggacctcccgcttggtgtc

SEQ ID NO: 2581740 - DNA, 25 bp, Homo sapien
ggatttggatgcacgtgaaaatctg

SEQ ID NO: 2581741 - DNA, 25 bp, Homo sapien
atttggatgcacgtgaaaatctgag

SEQ ID NO: 2581742 - DNA, 25 bp, Homo sapien
atttggatttggatgcacgtgaaaa

SEQ ID NO: 2581743 - DNA, 25 bp, Homo sapien
cctcccaccctgaatttggatttgg

SEQ ID NO: 2581744 - DNA, 25 bp, Homo sapien
tgacttgcagaggagtccccagagc

SEQ ID NO: 2581745 - DNA, 25 bp, Homo sapien
gaggagtccccagagctcctcaaca

SEQ ID NO: 2581746 - DNA, 25 bp, Homo sapien
tctgacttgcagaggagtccccaga

SEQ ID NO: 2581747 - DNA, 25 bp, Homo sapien
cgcgctctgacttgcagaggagtcc

SEQ ID NO: 2581748 - DNA, 25 bp, Homo sapien
tccacatgactggaaaagcctcagg

SEQ ID NO: 2581749 - DNA, 25 bp, Homo sapien
agttccacatgactggaaaagcctc

SEQ ID NO: 2581750 - DNA, 25 bp, Homo sapien
catggtggaaggcaaagagaagcag

SEQ ID NO: 2581751 - DNA, 25 bp, Homo sapien
aaatttacaatcatggtggaaggca

SEQ ID NO: 2581752 - DNA, 25 bp, Homo sapien
ctgtgggcaaaaattaggggagctg

SEQ ID NO: 2581753 - DNA, 25 bp, Homo sapien
tgtgggcaaaaattaggggagctgg

SEQ ID NO: 2581754 - DNA, 25 bp, Homo sapien
atctagtgttacccttgcaaccagc

SEQ ID NO: 2581755 - DNA, 25 bp, Homo sapien
aaaggctgcaatgggaggcgcgagg

SEQ ID NO: 2581756 - DNA, 25 bp, Homo sapien
tcttgcaggtgaaacagtatttaag

SEQ ID NO: 2581757 - DNA, 25 bp, Homo sapien
cagtatttaagtttcacggtctggc

SEQ ID NO: 2581758 - DNA, 25 bp, Homo sapien
gtttcacggtctggccattgatgat

SEQ ID NO: 2581759 - DNA, 25 bp, Homo sapien
ccaagataggtgtggaatggacact

SEQ ID NO: 2581760 - DNA, 25 bp, Homo sapien
tagacggttcccccagagatattta

SEQ ID NO: 2581761 - DNA, 25 bp, Homo sapien
cagcttaaattgtccccaagatagg

SEQ ID NO: 2581762 - DNA, 25 bp, Homo sapien
gctgtgctccttcagcttaaattgt

SEQ ID NO: 2581763 - DNA, 25 bp, Homo sapien
tgtgggcaatgggagggaacaaatg

SEQ ID NO: 2581764 - DNA, 25 bp, Homo sapien
ctgtgggcaatgggagggaacaaat

SEQ ID NO: 2581765 - DNA, 25 bp, Homo sapien
gcctattatagcctggtggctccta

SEQ ID NO: 2581766 - DNA, 25 bp, Homo sapien
ccaccgtgactttgatttaccagaa

SEQ ID NO: 2581767 - DNA, 25 bp, Homo sapien
taggttcacggctggtagagtgcac

SEQ ID NO: 2581768 - DNA, 25 bp, Homo sapien
gagtgcacaggagaggatcatactg

SEQ ID NO: 2581769 - DNA, 25 bp, Homo sapien
tgacggactttcaaacaacatgaac

SEQ ID NO: 2581770 - DNA, 25 bp, Homo sapien
agttttatatagcaaattaccagaa

SEQ ID NO: 2581771 - DNA, 25 bp, Homo sapien
ttatctcgcgatttttgtgggtcag

SEQ ID NO: 2581772 - DNA, 25 bp, Homo sapien
gatactagacatcctaatttgttcc

SEQ ID NO: 2581773 - DNA, 25 bp, Homo sapien
gcatgtttccttgcatcgttctagg

SEQ ID NO: 2581774 - DNA, 25 bp, Homo sapien
aataaatttgtggagagtacatgtc

SEQ ID NO: 2581775 - DNA, 25 bp, Homo sapien
tctgtaactcatctttggacttcac

SEQ ID NO: 2581776 - DNA, 25 bp, Homo sapien
cttcacaggacttcataatatcaaa

SEQ ID NO: 2581777 - DNA, 25 bp, Homo sapien
cacttgcttcacaaagcgttccaca

SEQ ID NO: 2581778 - DNA, 25 bp, Homo sapien
gagatggctggattcctcacctgac

SEQ ID NO: 2581779 - DNA, 25 bp, Homo sapien
cacatagcagccactccataagtgc

SEQ ID NO: 2581780 - DNA, 25 bp, Homo sapien
cagccactccataagtgcttctgga

SEQ ID NO: 2581781 - DNA, 25 bp, Homo sapien
gttgctgcattccatcatacttctg

SEQ ID NO: 2581782 - DNA, 25 bp, Homo sapien
tgctgcattccatcatacttctggc

SEQ ID NO: 2581783 - DNA, 25 bp, Homo sapien
ggcatcttctaatccaagcatgcag

SEQ ID NO: 2581784 - DNA, 25 bp, Homo sapien
tctaatccaagcatgcagctcacct

SEQ ID NO: 2581785 - DNA, 25 bp, Homo sapien
tttgcactgggcactgacactgcag

SEQ ID NO: 2581786 - DNA, 25 bp, Homo sapien
tgagctagagacataagcctggcag

SEQ ID NO: 2581787 - DNA, 25 bp, Homo sapien
ggacggagccggtcaaaaagatgca

SEQ ID NO: 2581788 - DNA, 25 bp, Homo sapien
cacaaacagggaaagtcagatgaac

SEQ ID NO: 2581789 - DNA, 25 bp, Homo sapien
cagaaagagagactccggaaggcaa

SEQ ID NO: 2581790 - DNA, 25 bp, Homo sapien
ctcacatccaggtggtcagcaggag

SEQ ID NO: 2581791 - DNA, 25 bp, Homo sapien
ggagccgctgtcacatcttcctgga

SEQ ID NO: 2581792 - DNA, 25 bp, Homo sapien
tctctgggtggttcctaatgctgct

SEQ ID NO: 2581793 - DNA, 25 bp, Homo sapien
tgtgtctgcagaaccgagtgctctg

SEQ ID NO: 2581794 - DNA, 25 bp, Homo sapien
ctcggcctccccataaatcctgttt

SEQ ID NO: 2581795 - DNA, 25 bp, Homo sapien
caagtgtgcactgcagaggccggca

SEQ ID NO: 2581796 - DNA, 25 bp, Homo sapien
agtgtgcactgcagaggccggcatt

SEQ ID NO: 2581797 - DNA, 25 bp, Homo sapien
cctgctttccaaaattgggtgaatt

SEQ ID NO: 2581798 - DNA, 25 bp, Homo sapien
cagggacagtggtgatcaaaccgtt

SEQ ID NO: 2581799 - DNA, 25 bp, Homo sapien
gaagaatgacgtgggtgataacgaa

SEQ ID NO: 2581800 - DNA, 25 bp, Homo sapien
cgtgggtgataacgaatgcaaatat

SEQ ID NO: 2581801 - DNA, 25 bp, Homo sapien
acagttgcctacccagggacagtgg

SEQ ID NO: 2581802 - DNA, 25 bp, Homo sapien
cttaagggcatttaggaatcctgtt

SEQ ID NO: 2581803 - DNA, 25 bp, Homo sapien
aagggcatttaggaatcctgtttgc

SEQ ID NO: 2581804 - DNA, 25 bp, Homo sapien
tgtccttaagggcatttaggaatcc

SEQ ID NO: 2581805 - DNA, 25 bp, Homo sapien
tccttaagggcatttaggaatcctg

SEQ ID NO: 2581806 - DNA, 25 bp, Homo sapien
gccaggatgcaacccacacgtgggc

SEQ ID NO: 2581807 - DNA, 25 bp, Homo sapien
ccaggatgcaacccacacgtgggca

SEQ ID NO: 2581808 - DNA, 25 bp, Homo sapien
caggatgcaacccacacgtgggcat

SEQ ID NO: 2581809 - DNA, 25 bp, Homo sapien
tggcctgcgtctgggtttttaggac

SEQ ID NO: 2581810 - DNA, 25 bp, Homo sapien
taggacctgcatgcggtcagcaggc

SEQ ID NO: 2581811 - DNA, 25 bp, Homo sapien
ttctttcaggctctacgccctggct

SEQ ID NO: 2581812 - DNA, 25 bp, Homo sapien
ctggaggtgcgggtgtggcctgcgt

SEQ ID NO: 2581813 - DNA, 25 bp, Homo sapien
gaagctactcggttcctttctccta

SEQ ID NO: 2581814 - DNA, 25 bp, Homo sapien
agttctgctgggttttatgtgggcc

SEQ ID NO: 2581815 - DNA, 25 bp, Homo sapien
tgccaaggtgtcttagatggttgtc

SEQ ID NO: 2581816 - DNA, 25 bp, Homo sapien
cccagtccgggcttacttacagtag

SEQ ID NO: 2581817 - DNA, 25 bp, Homo sapien
gggagggctgatggtgcagactggg

SEQ ID NO: 2581818 - DNA, 25 bp, Homo sapien
agggctgatggtgcagactgggaag

SEQ ID NO: 2581819 - DNA, 25 bp, Homo sapien
gagggctgatggtgcagactgggaa

SEQ ID NO: 2581820 - DNA, 25 bp, Homo sapien
ggctgatggtgcagactgggaaggg

SEQ ID NO: 2581821 - DNA, 25 bp, Homo sapien
ggtatcaggatggacaagttggaaa

SEQ ID NO: 2581822 - DNA, 25 bp, Homo sapien
cgtgattttcccgttgtggtgtcct

SEQ ID NO: 2581823 - DNA, 25 bp, Homo sapien
aagacctgtgctgccttcgtgattt

SEQ ID NO: 2581824 - DNA, 25 bp, Homo sapien
ggatcagcaggtatcaggatggaca

SEQ ID NO: 2581825 - DNA, 25 bp, Homo sapien
ctcatcgggaggcatcatagccagc

SEQ ID NO: 2581826 - DNA, 25 bp, Homo sapien
gcatcatagccagcggatatagaat

SEQ ID NO: 2581827 - DNA, 25 bp, Homo sapien
tcgggaggcatcatagccagcggat

SEQ ID NO: 2581828 - DNA, 25 bp, Homo sapien
ggaggcatcatagccagcggatata

SEQ ID NO: 2581829 - DNA, 25 bp, Homo sapien
tgtggagccagcgactgtggcatcc

SEQ ID NO: 2581830 - DNA, 25 bp, Homo sapien
ggcatcctgatcaggaagcacactg

SEQ ID NO: 2581831 - DNA, 25 bp, Homo sapien
ggacgacatattgactcgcacatca

SEQ ID NO: 2581832 - DNA, 25 bp, Homo sapien
caatcacagactctaattttggctt

SEQ ID NO: 2581833 - DNA, 25 bp, Homo sapien
tctctcacccggccttgccttgctt

SEQ ID NO: 2581834 - DNA, 25 bp, Homo sapien
gcctctctctcacccggccttgcct

SEQ ID NO: 2581835 - DNA, 25 bp, Homo sapien
ctctcacccggccttgccttgcttc

SEQ ID NO: 2581836 - DNA, 25 bp, Homo sapien
ctctctctcacccggccttgccttg

SEQ ID NO: 2581837 - DNA, 25 bp, Homo sapien
gagggaccgcgcaagaagtggatgt

SEQ ID NO: 2581838 - DNA, 25 bp, Homo sapien
tgatgcgagtcaaggaggcaagcgg

SEQ ID NO: 2581839 - DNA, 25 bp, Homo sapien
ccgcgcaagaagtggatgtgatgga

SEQ ID NO: 2581840 - DNA, 25 bp, Homo sapien
aggaggcaagcggaagtgagggacc

SEQ ID NO: 2581841 - DNA, 25 bp, Homo sapien
tctggttggagctgatcaagtaggt

SEQ ID NO: 2581842 - DNA, 25 bp, Homo sapien
atcaagtaggtgtggaatcctgaga

SEQ ID NO: 2581843 - DNA, 25 bp, Homo sapien
aggccaacgatggaccagacagaga

SEQ ID NO: 2581844 - DNA, 25 bp, Homo sapien
aatcctgagaggccaacgatggacc

SEQ ID NO: 2581845 - DNA, 25 bp, Homo sapien
acacagcagttggtaaagatatttc

SEQ ID NO: 2581846 - DNA, 25 bp, Homo sapien
acagggcaacacagcagttggtaaa

SEQ ID NO: 2581847 - DNA, 25 bp, Homo sapien
aaagatatttccgtagctgtaggga

SEQ ID NO: 2581848 - DNA, 25 bp, Homo sapien
cgtagctgtagggattgtaattttc

SEQ ID NO: 2581849 - DNA, 25 bp, Homo sapien
tagagaccaggtagatttgctcaat

SEQ ID NO: 2581850 - DNA, 25 bp, Homo sapien
aggattcactgaggctgataatcaa

SEQ ID NO: 2581851 - DNA, 25 bp, Homo sapien
ggtaggaagcagtaataacttggaa

SEQ ID NO: 2581852 - DNA, 25 bp, Homo sapien
catatcggtaaggtctgggtgcaca

SEQ ID NO: 2581853 - DNA, 25 bp, Homo sapien
catggagaagctctcaaaaaccccg

SEQ ID NO: 2581854 - DNA, 25 bp, Homo sapien
ggtgtccaacagaccccgcaagcag

SEQ ID NO: 2581855 - DNA, 25 bp, Homo sapien
ctcgcctgtgcatggagaagctctc

SEQ ID NO: 2581856 - DNA, 25 bp, Homo sapien
gtaggtgtccaacagaccccgcaag

SEQ ID NO: 2581857 - DNA, 25 bp, Homo sapien
cttccggtgtggatgagtctctgca

SEQ ID NO: 2581858 - DNA, 25 bp, Homo sapien
cactcgtgtttaatctgctccaaga

SEQ ID NO: 2581859 - DNA, 25 bp, Homo sapien
tccaagaaatgtgccgcagggacat

SEQ ID NO: 2581860 - DNA, 25 bp, Homo sapien
tatggaagcgcgcatactccttccg

SEQ ID NO: 2581861 - DNA, 25 bp, Homo sapien
tcaatggatctcatagtgctctggg

SEQ ID NO: 2581862 - DNA, 25 bp, Homo sapien
ggatctcatagtgctctgggtctgt

SEQ ID NO: 2581863 - DNA, 25 bp, Homo sapien
gtgctctgggtctgtgcaagcttta

SEQ ID NO: 2581864 - DNA, 25 bp, Homo sapien
tcatagtgctctgggtctgtgcaag

SEQ ID NO: 2581865 - DNA, 25 bp, Homo sapien
agtcacaaagtcttaagggacatgg

SEQ ID NO: 2581866 - DNA, 25 bp, Homo sapien
gatgcacaatctctgaccaaaaagt

SEQ ID NO: 2581867 - DNA, 25 bp, Homo sapien
tgggatccaataatacagatgcaca

SEQ ID NO: 2581868 - DNA, 25 bp, Homo sapien
tcctttcgtggaggagataatttgg

SEQ ID NO: 2581869 - DNA, 25 bp, Homo sapien
tcagtgtcactgtcagcgctgccat

SEQ ID NO: 2581870 - DNA, 25 bp, Homo sapien
ttatatccggtgtccccagccaaag

SEQ ID NO: 2581871 - DNA, 25 bp, Homo sapien
gaagctcagcaccatcagtgtcact

SEQ ID NO: 2581872 - DNA, 25 bp, Homo sapien
ccagccaaagccagtgggaagctca

SEQ ID NO: 2581873 - DNA, 25 bp, Homo sapien
agcctccagggagcttcacacacca

SEQ ID NO: 2581874 - DNA, 25 bp, Homo sapien
cctccagggagcttcacacaccatg

SEQ ID NO: 2581875 - DNA, 25 bp, Homo sapien
ggagcctccagggagcttcacacac

SEQ ID NO: 2581876 - DNA, 25 bp, Homo sapien
gcgggagcctccagggagcttcaca

SEQ ID NO: 2581877 - DNA, 25 bp, Homo sapien
tgattctgtggacgcctgaaggagc

SEQ ID NO: 2581878 - DNA, 25 bp, Homo sapien
gaaggcactgtgatctttcaggtct

SEQ ID NO: 2581879 - DNA, 25 bp, Homo sapien
tgctgtgattctgtggacgcctgaa

SEQ ID NO: 2581880 - DNA, 25 bp, Homo sapien
tctttcgatactggaaaatgctgtg

SEQ ID NO: 2581881 - DNA, 25 bp, Homo sapien
aacaatgtgataaggtcaactgtgc

SEQ ID NO: 2581882 - DNA, 25 bp, Homo sapien
caactgtgcaatcgaagtattcagg

SEQ ID NO: 2581883 - DNA, 25 bp, Homo sapien
taaggtcaactgtgcaatcgaagta

SEQ ID NO: 2581884 - DNA, 25 bp, Homo sapien
tgtgataaggtcaactgtgcaatcg

SEQ ID NO: 2581885 - DNA, 25 bp, Homo sapien
ttgtccccgcgggtggccacccagc

SEQ ID NO: 2581886 - DNA, 25 bp, Homo sapien
tgcttgaggccgtccagggttttgt

SEQ ID NO: 2581887 - DNA, 25 bp, Homo sapien
cagttcctgcgcctcaggaagaggc

SEQ ID NO: 2581888 - DNA, 25 bp, Homo sapien
ctgggatctgttccccaaggtgcct

SEQ ID NO: 2581889 - DNA, 25 bp, Homo sapien
gatcatgtgcaagcagttctgttgc

SEQ ID NO: 2581890 - DNA, 25 bp, Homo sapien
ttctgatcatgtgcaagcagttctg

SEQ ID NO: 2581891 - DNA, 25 bp, Homo sapien
aatatccaggctcattgggttggtc

SEQ ID NO: 2581892 - DNA, 25 bp, Homo sapien
acagaaatatccaggctcattgggt

SEQ ID NO: 2581893 - DNA, 25 bp, Homo sapien
gggtcctccgaccatcgcaggaaag

SEQ ID NO: 2581894 - DNA, 25 bp, Homo sapien
acctctgggagttgctgtgaaagaa

SEQ ID NO: 2581895 - DNA, 25 bp, Homo sapien
ctacctctgggagttgctgtgaaag

SEQ ID NO: 2581896 - DNA, 25 bp, Homo sapien
tccgaccatcgcaggaaagctgacg

SEQ ID NO: 2581897 - DNA, 25 bp, Homo sapien
tgtctttggagccaggtggacagat

SEQ ID NO: 2581898 - DNA, 25 bp, Homo sapien
tctttggagccaggtggacagatga

SEQ ID NO: 2581899 - DNA, 25 bp, Homo sapien
gtctttggagccaggtggacagatg

SEQ ID NO: 2581900 - DNA, 25 bp, Homo sapien
aatttaataacgtagtgcatttgtg

SEQ ID NO: 2581901 - DNA, 25 bp, Homo sapien
tttaataacgtagtgcatttgtggc

SEQ ID NO: 2581902 - DNA, 25 bp, Homo sapien
aataacgtagtgcatttgtggcaca

SEQ ID NO: 2581903 - DNA, 25 bp, Homo sapien
catttgtggcacacagggggagtac

SEQ ID NO: 2581904 - DNA, 25 bp, Homo sapien
tcagacctggttccactaacagctt

SEQ ID NO: 2581905 - DNA, 25 bp, Homo sapien
ttcagacctggttccactaacagct

SEQ ID NO: 2581906 - DNA, 25 bp, Homo sapien
cagacctggttccactaacagcttc

SEQ ID NO: 2581907 - DNA, 25 bp, Homo sapien
gacctggttccactaacagcttctt

SEQ ID NO: 2581908 - DNA, 25 bp, Homo sapien
tggaaaagtctatggagagagccgc

SEQ ID NO: 2581909 - DNA, 25 bp, Homo sapien
tcctcctctggaaaagtctatggag

SEQ ID NO: 2581910 - DNA, 25 bp, Homo sapien
aagtctatggagagagccgctacca

SEQ ID NO: 2581911 - DNA, 25 bp, Homo sapien
gagagccgctaccaaaggctcctca

SEQ ID NO: 2581912 - DNA, 25 bp, Homo sapien
agtagatgaatagcccggccccaag

SEQ ID NO: 2581913 - DNA, 25 bp, Homo sapien
gctctgtgcagattcagactgtgct

SEQ ID NO: 2581914 - DNA, 25 bp, Homo sapien
tgctctgtgcagattcagactgtgc

SEQ ID NO: 2581915 - DNA, 25 bp, Homo sapien
gattcttgaagtagatgaatagccc

SEQ ID NO: 2581916 - DNA, 25 bp, Homo sapien
agtaaagtttgcttcttggtggttg

SEQ ID NO: 2581917 - DNA, 25 bp, Homo sapien
acactcagggattagtaaagtttgc

SEQ ID NO: 2581918 - DNA, 25 bp, Homo sapien
cactcagggattagtaaagtttgct

SEQ ID NO: 2581919 - DNA, 25 bp, Homo sapien
gtaaagtttgcttcttggtggttga

SEQ ID NO: 2581920 - DNA, 25 bp, Homo sapien
ggtgtaaacctctccacttcgagga

SEQ ID NO: 2581921 - DNA, 25 bp, Homo sapien
tgttccggaaccacctgacttcaat

SEQ ID NO: 2581922 - DNA, 25 bp, Homo sapien
gggctcgtcacgcttgggtgctcca

SEQ ID NO: 2581923 - DNA, 25 bp, Homo sapien
ccattctgaatcaggcctgtggaca

SEQ ID NO: 2581924 - DNA, 25 bp, Homo sapien
ggatagaaaccattcacagagcaga

SEQ ID NO: 2581925 - DNA, 25 bp, Homo sapien
ctggatagaaaccattcacagagca

SEQ ID NO: 2581926 - DNA, 25 bp, Homo sapien
acagagcagaccaggaggttgtggt

SEQ ID NO: 2581927 - DNA, 25 bp, Homo sapien
ccaggaggttgtggtgctgcagggt

SEQ ID NO: 2581928 - DNA, 25 bp, Homo sapien
ctgggtccttgcaggatacacagtc

SEQ ID NO: 2581929 - DNA, 25 bp, Homo sapien
cttgcaggatacacagtcaccttag

SEQ ID NO: 2581930 - DNA, 25 bp, Homo sapien
ggtccttgcaggatacacagtcacc

SEQ ID NO: 2581931 - DNA, 25 bp, Homo sapien
tccttgcaggatacacagtcacctt

SEQ ID NO: 2581932 - DNA, 25 bp, Homo sapien
gagaaaggaaatgtagagggaatga

SEQ ID NO: 2581933 - DNA, 25 bp, Homo sapien
taggagaaaggaaatgtagagggaa

SEQ ID NO: 2581934 - DNA, 25 bp, Homo sapien
aggagaaaggaaatgtagagggaat

SEQ ID NO: 2581935 - DNA, 25 bp, Homo sapien
ctaggagaaaggaaatgtagaggga

SEQ ID NO: 2581936 - DNA, 25 bp, Homo sapien
tagttgtgtctgcagtaggtgtcca

SEQ ID NO: 2581937 - DNA, 25 bp, Homo sapien
gtagttgtgtctgcagtaggtgtcc

SEQ ID NO: 2581938 - DNA, 25 bp, Homo sapien
tggttatagatgtctctgtgcagga

SEQ ID NO: 2581939 - DNA, 25 bp, Homo sapien
caagtcctcctcttggttatagatg

SEQ ID NO: 2581940 - DNA, 25 bp, Homo sapien
ctgtcgaagcgcaagtcctcctctt

SEQ ID NO: 2581941 - DNA, 25 bp, Homo sapien
gatgtctctgtgcaggaaccgcacc

SEQ ID NO: 2581942 - DNA, 25 bp, Homo sapien
ctcatacttatcctgctgcaagaaa

SEQ ID NO: 2581943 - DNA, 25 bp, Homo sapien
tcatacttatcctgctgcaagaaac

SEQ ID NO: 2581944 - DNA, 25 bp, Homo sapien
ggcctccggggaagatactgacaga

SEQ ID NO: 2581945 - DNA, 25 bp, Homo sapien
ggaaccttaactgatcccaaccata

SEQ ID NO: 2581946 - DNA, 25 bp, Homo sapien
atactgacagagacgccgccatccg

SEQ ID NO: 2581947 - DNA, 25 bp, Homo sapien
gaaccttaactgatcccaaccataa

SEQ ID NO: 2581948 - DNA, 25 bp, Homo sapien
caggcaggaaaaccccttctgatcc

SEQ ID NO: 2581949 - DNA, 25 bp, Homo sapien
ccagcctattctggagacctccaag

SEQ ID NO: 2581950 - DNA, 25 bp, Homo sapien
caggaaaaccccttctgatcccaag

SEQ ID NO: 2581951 - DNA, 25 bp, Homo sapien
cccgcctccagcctattctggagac

SEQ ID NO: 2581952 - DNA, 25 bp, Homo sapien
gggatttctggatatgatgacaaca

SEQ ID NO: 2581953 - DNA, 25 bp, Homo sapien
tctgtgcaagctttagggatttctg

SEQ ID NO: 2581954 - DNA, 25 bp, Homo sapien
ctaaggatctgtgcaagctttaggg

SEQ ID NO: 2581955 - DNA, 25 bp, Homo sapien
aggatctgtgcaagctttagggatt

SEQ ID NO: 2581956 - DNA, 25 bp, Homo sapien
agtggggagctcagcaccatcagtg

SEQ ID NO: 2581957 - DNA, 25 bp, Homo sapien
ggagctcagcaccatcagtgtcact

SEQ ID NO: 2581958 - DNA, 25 bp, Homo sapien
ggtgtccccagccaaagccagtggg

SEQ ID NO: 2581959 - DNA, 25 bp, Homo sapien
tcagtgtcactgtcagctttgccat

SEQ ID NO: 2581960 - DNA, 25 bp, Homo sapien
aacctccagggagcttcagacacac

SEQ ID NO: 2581961 - DNA, 25 bp, Homo sapien
gtaggaacctccagggagcttcaga

SEQ ID NO: 2581962 - DNA, 25 bp, Homo sapien
ctccagggagcttcagacacaccat

SEQ ID NO: 2581963 - DNA, 25 bp, Homo sapien
ggaacctccagggagcttcagacac

SEQ ID NO: 2581964 - DNA, 25 bp, Homo sapien
agcaggcaagtctcactcagggaga

SEQ ID NO: 2581965 - DNA, 25 bp, Homo sapien
caggcaagtctcactcagggagaac

SEQ ID NO: 2581966 - DNA, 25 bp, Homo sapien
aagtctcactcagggagaactatga

SEQ ID NO: 2581967 - DNA, 25 bp, Homo sapien
ggcaagtctcactcagggagaacta

SEQ ID NO: 2581968 - DNA, 25 bp, Homo sapien
ttgccttgggaaaactaccctcatg

SEQ ID NO: 2581969 - DNA, 25 bp, Homo sapien
tcatctggagtgcaaggattgaaac

SEQ ID NO: 2581970 - DNA, 25 bp, Homo sapien
tgccttgggaaaactaccctcatgt

SEQ ID NO: 2581971 - DNA, 25 bp, Homo sapien
tctggagtgcaaggattgaaacttg

SEQ ID NO: 2581972 - DNA, 25 bp, Homo sapien
cacaaggggaatacagacccagggg

SEQ ID NO: 2581973 - DNA, 25 bp, Homo sapien
tggcacaaggggaatacagacccag

SEQ ID NO: 2581974 - DNA, 25 bp, Homo sapien
gcacaaggggaatacagacccaggg

SEQ ID NO: 2581975 - DNA, 25 bp, Homo sapien
tgtggcacaaggggaatacagaccc

SEQ ID NO: 2581976 - DNA, 25 bp, Homo sapien
agtaacaacctggtcctgagagagc

SEQ ID NO: 2581977 - DNA, 25 bp, Homo sapien
cgagtaacaacctggtcctgagaga

SEQ ID NO: 2581978 - DNA, 25 bp, Homo sapien
aacgagtaacaacctggtcctgaga

SEQ ID NO: 2581979 - DNA, 25 bp, Homo sapien
gaacgagtaacaacctggtcctgag

SEQ ID NO: 2581980 - DNA, 25 bp, Homo sapien
ttccttgaatgtggtcatgtgcact

SEQ ID NO: 2581981 - DNA, 25 bp, Homo sapien
ttgaatgtggtcatgtgcacttcag

SEQ ID NO: 2581982 - DNA, 25 bp, Homo sapien
ccttgaatgtggtcatgtgcacttc

SEQ ID NO: 2581983 - DNA, 25 bp, Homo sapien
ctgtggcagaaggttcttccttgaa

SEQ ID NO: 2581984 - DNA, 25 bp, Homo sapien
ttccttaatttgctccaggatctcg

SEQ ID NO: 2581985 - DNA, 25 bp, Homo sapien
ggatctcgaaccaaaggatccctac

SEQ ID NO: 2581986 - DNA, 25 bp, Homo sapien
gctccaggatctcgaaccaaaggat

SEQ ID NO: 2581987 - DNA, 25 bp, Homo sapien
acaacccacaccaaccacgacagag

SEQ ID NO: 2581988 - DNA, 25 bp, Homo sapien
ttatgttttgacgtagtaaccatgc

SEQ ID NO: 2581989 - DNA, 25 bp, Homo sapien
atgttttgacgtagtaaccatgcac

SEQ ID NO: 2581990 - DNA, 25 bp, Homo sapien
tgttttgacgtagtaaccatgcact

SEQ ID NO: 2581991 - DNA, 25 bp, Homo sapien
tatgttttgacgtagtaaccatgca

SEQ ID NO: 2581992 - DNA, 25 bp, Homo sapien
cagaaaagcctatggaaagctcctc

SEQ ID NO: 2581993 - DNA, 25 bp, Homo sapien
cctagcaaagccaaatttcctcctc

SEQ ID NO: 2581994 - DNA, 25 bp, Homo sapien
gaaaagcctatggaaagctcctcac

SEQ ID NO: 2581995 - DNA, 25 bp, Homo sapien
ttcctcctccagaaaagcctatgga

SEQ ID NO: 2581996 - DNA, 25 bp, Homo sapien
aaagcccccgactccactcagcatc

SEQ ID NO: 2581997 - DNA, 25 bp, Homo sapien
ctgattcctgaagtagatgaacagc

SEQ ID NO: 2581998 - DNA, 25 bp, Homo sapien
aagcccccgactccactcagcatct

SEQ ID NO: 2581999 - DNA, 25 bp, Homo sapien
gctacccccagtgacctatgctgat

SEQ ID NO: 2582000 - DNA, 25 bp, Homo sapien
gaaaataggattgggagagtagaaa

SEQ ID NO: 2582001 - DNA, 25 bp, Homo sapien
gcaaatgaaaataggattgggagag

SEQ ID NO: 2582002 - DNA, 25 bp, Homo sapien
agggctacccccagtgacctatgct

SEQ ID NO: 2582003 - DNA, 25 bp, Homo sapien
gcacagtccccttcttggtggttga

SEQ ID NO: 2582004 - DNA, 25 bp, Homo sapien
gggattagcacagtccccttcttgg

SEQ ID NO: 2582005 - DNA, 25 bp, Homo sapien
gctcagggattagcacagtcccctt

SEQ ID NO: 2582006 - DNA, 25 bp, Homo sapien
ttagcacagtccccttcttggtggt

SEQ ID NO: 2582007 - DNA, 25 bp, Homo sapien
atcaggcctatggagaccaccgcag

SEQ ID NO: 2582008 - DNA, 25 bp, Homo sapien
tctggatcaggcctatggagaccac

SEQ ID NO: 2582009 - DNA, 25 bp, Homo sapien
ggtgtaaacctctccactccgagga

SEQ ID NO: 2582010 - DNA, 25 bp, Homo sapien
aggtgtaaacctctccactccgagg

SEQ ID NO: 2582011 - DNA, 25 bp, Homo sapien
gcaggatacacagtcaccttaggat

SEQ ID NO: 2582012 - DNA, 25 bp, Homo sapien
ctttgcaggatacacagtcacctta

SEQ ID NO: 2582013 - DNA, 25 bp, Homo sapien
aggatacacagtcaccttaggatgg

SEQ ID NO: 2582014 - DNA, 25 bp, Homo sapien
ttgcaggatacacagtcaccttagg

SEQ ID NO: 2582015 - DNA, 25 bp, Homo sapien
ctgtgagagggctcatcacacttgg

SEQ ID NO: 2582016 - DNA, 25 bp, Homo sapien
cattccactgtgagagggctcatca

SEQ ID NO: 2582017 - DNA, 25 bp, Homo sapien
catcacacttgggtgctccacttgg

SEQ ID NO: 2582018 - DNA, 25 bp, Homo sapien
gctccacttggcacctatttatcat

SEQ ID NO: 2582019 - DNA, 25 bp, Homo sapien
cccgtaattgtatctgcagtagtcg

SEQ ID NO: 2582020 - DNA, 25 bp, Homo sapien
taattgtatctgcagtagtcgtcca

SEQ ID NO: 2582021 - DNA, 25 bp, Homo sapien
ttgtatctgcagtagtcgtccatct

SEQ ID NO: 2582022 - DNA, 25 bp, Homo sapien
atctgcagtagtcgtccatcttgtc

SEQ ID NO: 2582023 - DNA, 25 bp, Homo sapien
gtaactgcctggaactcctccacgt

SEQ ID NO: 2582024 - DNA, 25 bp, Homo sapien
tgttccagttctctgcgacaggccg

SEQ ID NO: 2582025 - DNA, 25 bp, Homo sapien
tgtatctgttcaggtactgcacccg

SEQ ID NO: 2582026 - DNA, 25 bp, Homo sapien
tgaagatatgacactcacacttagc

SEQ ID NO: 2582027 - DNA, 25 bp, Homo sapien
tgaggaagacactgacagcgacgcc

SEQ ID NO: 2582028 - DNA, 25 bp, Homo sapien
gacacgaacgatccagtcacaggga

SEQ ID NO: 2582029 - DNA, 25 bp, Homo sapien
cactgacagcgacgccgccatccag

SEQ ID NO: 2582030 - DNA, 25 bp, Homo sapien
cagggatggcctctgaggaagacac

SEQ ID NO: 2582031 - DNA, 25 bp, Homo sapien
cgggcgctgggaatcttgatcagcc

SEQ ID NO: 2582032 - DNA, 25 bp, Homo sapien
tgcgggcgctgggaatcttgatcag

SEQ ID NO: 2582033 - DNA, 25 bp, Homo sapien
gggtgcgggcgctgggaatcttgat

SEQ ID NO: 2582034 - DNA, 25 bp, Homo sapien
cgctgggaatcttgatcagccccac

SEQ ID NO: 2582035 - DNA, 25 bp, Homo sapien
acagcccaggggctgatcctccgtc

SEQ ID NO: 2582036 - DNA, 25 bp, Homo sapien
tctggcggccggcacagaagcgagt

SEQ ID NO: 2582037 - DNA, 25 bp, Homo sapien
aaaccttctggcggccggcacagaa

SEQ ID NO: 2582038 - DNA, 25 bp, Homo sapien
tgctcttcgggggtgtttcagtctg

SEQ ID NO: 2582039 - DNA, 25 bp, Homo sapien
tctgtggcttgatccagagcaggct

SEQ ID NO: 2582040 - DNA, 25 bp, Homo sapien
ggatttatatgcacttgtactgcta

SEQ ID NO: 2582041 - DNA, 25 bp, Homo sapien
gccactagatgggatttcctgctat

SEQ ID NO: 2582042 - DNA, 25 bp, Homo sapien
ttccagggtcgctggtgatgccact

SEQ ID NO: 2582043 - DNA, 25 bp, Homo sapien
gcagaacgcatcttcattgaaatat

SEQ ID NO: 2582044 - DNA, 25 bp, Homo sapien
gatagaacataacggagaactctcc

SEQ ID NO: 2582045 - DNA, 25 bp, Homo sapien
aaaatattgtagacgagatgaagaa

SEQ ID NO: 2582046 - DNA, 25 bp, Homo sapien
gaacataacggagaactctccatct

SEQ ID NO: 2582047 - DNA, 25 bp, Homo sapien
ctctcagatagaacataacggagaa

SEQ ID NO: 2582048 - DNA, 25 bp, Homo sapien
gtttgtcatacagggtgaatacaga

SEQ ID NO: 2582049 - DNA, 25 bp, Homo sapien
tgtttgtcatacagggtgaatacag

SEQ ID NO: 2582050 - DNA, 25 bp, Homo sapien
tgtgtttgtcatacagggtgaatac

SEQ ID NO: 2582051 - DNA, 25 bp, Homo sapien
gtgtttgtcatacagggtgaataca

SEQ ID NO: 2582052 - DNA, 25 bp, Homo sapien
tctgtcacaggatccagtgtaattc

SEQ ID NO: 2582053 - DNA, 25 bp, Homo sapien
ctgtcacaggatccagtgtaattcc

SEQ ID NO: 2582054 - DNA, 25 bp, Homo sapien
agttcctcctccagaaaagcctatg

SEQ ID NO: 2582055 - DNA, 25 bp, Homo sapien
cagaaaagcctatggagagagccag

SEQ ID NO: 2582056 - DNA, 25 bp, Homo sapien
gaaaagcctatggagagagccagct

SEQ ID NO: 2582057 - DNA, 25 bp, Homo sapien
ctcctccagaaaagcctatggagag

SEQ ID NO: 2582058 - DNA, 25 bp, Homo sapien
ctctgtgcagattcagaccgtgctc

SEQ ID NO: 2582059 - DNA, 25 bp, Homo sapien
attcctgaagtagatgaacagcccg

SEQ ID NO: 2582060 - DNA, 25 bp, Homo sapien
atcttgctctgtgcagattcagacc

SEQ ID NO: 2582061 - DNA, 25 bp, Homo sapien
ctgaagtagatgaacagcccggccc

SEQ ID NO: 2582062 - DNA, 25 bp, Homo sapien
gcacggtccccttcttagtgggtga

SEQ ID NO: 2582063 - DNA, 25 bp, Homo sapien
gacactcagggattagcacggtccc

SEQ ID NO: 2582064 - DNA, 25 bp, Homo sapien
tagtgggtgagaaatttaggaagtc

SEQ ID NO: 2582065 - DNA, 25 bp, Homo sapien
gatgagaacatggagcaaattaaaa

SEQ ID NO: 2582066 - DNA, 25 bp, Homo sapien
tgctgcctggatagaaaccactcac

SEQ ID NO: 2582067 - DNA, 25 bp, Homo sapien
aatgctgcctggatagaaaccactc

SEQ ID NO: 2582068 - DNA, 25 bp, Homo sapien
atgctgcctggatagaaaccactca

SEQ ID NO: 2582069 - DNA, 25 bp, Homo sapien
tttgaaggatatacagtcaccttag

SEQ ID NO: 2582070 - DNA, 25 bp, Homo sapien
ctttgaaggatatacagtcacctta

SEQ ID NO: 2582071 - DNA, 25 bp, Homo sapien
cagagtaagtctcctggtttggctg

SEQ ID NO: 2582072 - DNA, 25 bp, Homo sapien
ccttgaccaggcctatagcacagct

SEQ ID NO: 2582073 - DNA, 25 bp, Homo sapien
caacgtagagggaatgagtcaggaa

SEQ ID NO: 2582074 - DNA, 25 bp, Homo sapien
gagaaaaacaacgtagagggaatga

SEQ ID NO: 2582075 - DNA, 25 bp, Homo sapien
tcagattcccagctcacggggactc

SEQ ID NO: 2582076 - DNA, 25 bp, Homo sapien
cagattcccagctcacggggactca

SEQ ID NO: 2582077 - DNA, 25 bp, Homo sapien
gtagttgtgtctgcagtaggtgtcc

SEQ ID NO: 2582078 - DNA, 25 bp, Homo sapien
tagttgtgtctgcagtaggtgtcca

SEQ ID NO: 2582079 - DNA, 25 bp, Homo sapien
cacggactcctcctggttatagaag

SEQ ID NO: 2582080 - DNA, 25 bp, Homo sapien
acggactcctcctggttatagaagt

SEQ ID NO: 2582081 - DNA, 25 bp, Homo sapien
cggactcctcctggttatagaagta

SEQ ID NO: 2582082 - DNA, 25 bp, Homo sapien
ctcttaggctgccacaggaaacgtg

SEQ ID NO: 2582083 - DNA, 25 bp, Homo sapien
ccctcttaggctgccacaggaaacg

SEQ ID NO: 2582084 - DNA, 25 bp, Homo sapien
ctccctcttaggctgccacaggaaa

SEQ ID NO: 2582085 - DNA, 25 bp, Homo sapien
tccctcttaggctgccacaggaaac

SEQ ID NO: 2582086 - DNA, 25 bp, Homo sapien
acgaaccatccggtcacagggcggc

SEQ ID NO: 2582087 - DNA, 25 bp, Homo sapien
tggggacacgaaccatccggtcaca

SEQ ID NO: 2582088 - DNA, 25 bp, Homo sapien
gacacgaaccatccggtcacagggc

SEQ ID NO: 2582089 - DNA, 25 bp, Homo sapien
gggacacgaaccatccggtcacagg

SEQ ID NO: 2582090 - DNA, 25 bp, Homo sapien
accgcgttcaccctgtgaacacttc

SEQ ID NO: 2582091 - DNA, 25 bp, Homo sapien
tcatcccacacgctttaccggtacc

SEQ ID NO: 2582092 - DNA, 25 bp, Homo sapien
gctttaccggtaccttcaacagcac

SEQ ID NO: 2582093 - DNA, 25 bp, Homo sapien
caatgagaaatatcagaagtgtggc

SEQ ID NO: 2582094 - DNA, 25 bp, Homo sapien
tacatggcatatagtgatggcgact

SEQ ID NO: 2582095 - DNA, 25 bp, Homo sapien
catctgctgacatagaagaaacgga

SEQ ID NO: 2582096 - DNA, 25 bp, Homo sapien
gaaacggactttctatatgctcaga

SEQ ID NO: 2582097 - DNA, 25 bp, Homo sapien
atgagtagtcaccactgcacacagg

SEQ ID NO: 2582098 - DNA, 25 bp, Homo sapien
tgctgctgccaacataaatacctga

SEQ ID NO: 2582099 - DNA, 25 bp, Homo sapien
cacgccctggaatttaacacactac

SEQ ID NO: 2582100 - DNA, 25 bp, Homo sapien
gccattgaccttcggatttctccac

SEQ ID NO: 2582101 - DNA, 25 bp, Homo sapien
ggaataagcttgattgttctacccc

SEQ ID NO: 2582102 - DNA, 25 bp, Homo sapien
tgccttaagttctttaggcaccaaa

SEQ ID NO: 2582103 - DNA, 25 bp, Homo sapien
caaagaatacctcataaatgctctg

SEQ ID NO: 2582104 - DNA, 25 bp, Homo sapien
taaatgctctgtatctgtaaggtga

SEQ ID NO: 2582105 - DNA, 25 bp, Homo sapien
taggcaccaaagaatacctcataaa

SEQ ID NO: 2582106 - DNA, 25 bp, Homo sapien
caagtacccaagctccttttatgga

SEQ ID NO: 2582107 - DNA, 25 bp, Homo sapien
gtacccaagctccttttatggagga

SEQ ID NO: 2582108 - DNA, 25 bp, Homo sapien
tcatgaagagggcaagtacccaagc

SEQ ID NO: 2582109 - DNA, 25 bp, Homo sapien
tgaagagggcaagtacccaagctcc

SEQ ID NO: 2582110 - DNA, 25 bp, Homo sapien
agtgtcactgtcagcgctgtcatgc

SEQ ID NO: 2582111 - DNA, 25 bp, Homo sapien
atcagtgtcactgtcagcgctgtca

SEQ ID NO: 2582112 - DNA, 25 bp, Homo sapien
gggagctcagcaccatcagtgtcac

SEQ ID NO: 2582113 - DNA, 25 bp, Homo sapien
agcgctgtcatgcaggagcctccag

SEQ ID NO: 2582114 - DNA, 25 bp, Homo sapien
gtctcactcagggagaactatgaac

SEQ ID NO: 2582115 - DNA, 25 bp, Homo sapien
tcactcagggagaactatgaacccc

SEQ ID NO: 2582116 - DNA, 25 bp, Homo sapien
ctcagggagaactatgaacccctcc

SEQ ID NO: 2582117 - DNA, 25 bp, Homo sapien
ctcactcagggagaactatgaaccc

SEQ ID NO: 2582118 - DNA, 25 bp, Homo sapien
gtactgtggattgtagccttttgca

SEQ ID NO: 2582119 - DNA, 25 bp, Homo sapien
gatcagatttctacctttacatata

SEQ ID NO: 2582120 - DNA, 25 bp, Homo sapien
tatcagttgtcgctatgtactgtgg

SEQ ID NO: 2582121 - DNA, 25 bp, Homo sapien
taactcagagatactgggggtttca

SEQ ID NO: 2582122 - DNA, 25 bp, Homo sapien
tcaaaatttcagtcaatcacctcaa

SEQ ID NO: 2582123 - DNA, 25 bp, Homo sapien
tgctggtggagagttttgcatcgat

SEQ ID NO: 2582124 - DNA, 25 bp, Homo sapien
tgaagattgggatggctatgaaatc

SEQ ID NO: 2582125 - DNA, 25 bp, Homo sapien
gatggctactaactgatcagcctgg

SEQ ID NO: 2582126 - DNA, 25 bp, Homo sapien
atgccaaccaggcggggaagcactt

SEQ ID NO: 2582127 - DNA, 25 bp, Homo sapien
gccaaccaggcggggaagcacttct

SEQ ID NO: 2582128 - DNA, 25 bp, Homo sapien
tgccaaccaggcggggaagcacttc

SEQ ID NO: 2582129 - DNA, 25 bp, Homo sapien
ccccatgggaaagcgtgttctcatc

SEQ ID NO: 2582130 - DNA, 25 bp, Homo sapien
ggaaagcgtgttctcatcagctggc

SEQ ID NO: 2582131 - DNA, 25 bp, Homo sapien
agccccatgggaaagcgtgttctca

SEQ ID NO: 2582132 - DNA, 25 bp, Homo sapien
catgggaaagcgtgttctcatcagc

SEQ ID NO: 2582133 - DNA, 25 bp, Homo sapien
gatgcagtagcaggacacagtgccc

SEQ ID NO: 2582134 - DNA, 25 bp, Homo sapien
acctctgcggtaagcagggactggc

SEQ ID NO: 2582135 - DNA, 25 bp, Homo sapien
gctgtgacgagcagggcttgacctt

SEQ ID NO: 2582136 - DNA, 25 bp, Homo sapien
tgcccggaaggcagaacaatgaggc

SEQ ID NO: 2582137 - DNA, 25 bp, Homo sapien
aatgaagatcctgttgcttctgtcc

SEQ ID NO: 2582138 - DNA, 25 bp, Homo sapien
ctgtgggaccgggaatgaagatcct

SEQ ID NO: 2582139 - DNA, 25 bp, Homo sapien
ggaccgggaatgaagatcctgttgc

SEQ ID NO: 2582140 - DNA, 25 bp, Homo sapien
gaagatcctgttgcttctgtcccac

SEQ ID NO: 2582141 - DNA, 25 bp, Homo sapien
ccttggatgtgtgatgccctacggg

SEQ ID NO: 2582142 - DNA, 25 bp, Homo sapien
aagaggcattctgacctccagggct

SEQ ID NO: 2582143 - DNA, 25 bp, Homo sapien
ccgccgccattttcgtggcggatga

SEQ ID NO: 2582144 - DNA, 25 bp, Homo sapien
ggcccagaccaagagccctgcaaac

SEQ ID NO: 2582145 - DNA, 25 bp, Homo sapien
aagtttacagtcagaatgttggcca

SEQ ID NO: 2582146 - DNA, 25 bp, Homo sapien
cagcatggtatcctgcctcatcaaa

SEQ ID NO: 2582147 - DNA, 25 bp, Homo sapien
atttttgagagtcagaaacccaggc

SEQ ID NO: 2582148 - DNA, 25 bp, Homo sapien
ttcagggtctctcataagtttacag

SEQ ID NO: 2582149 - DNA, 25 bp, Homo sapien
accagcttcacagctcatttgcttg

SEQ ID NO: 2582150 - DNA, 25 bp, Homo sapien
cggtacatgaactgtcttgttgatt

SEQ ID NO: 2582151 - DNA, 25 bp, Homo sapien
cacggtacatgaactgtcttgttga

SEQ ID NO: 2582152 - DNA, 25 bp, Homo sapien
tcacggtacatgaactgtcttgttg

SEQ ID NO: 2582153 - DNA, 25 bp, Homo sapien
tacatgaactgtcttgttgattata

SEQ ID NO: 2582154 - DNA, 25 bp, Homo sapien
tcactgcaatattgacagagattct

SEQ ID NO: 2582155 - DNA, 25 bp, Homo sapien
gatactttcttccatcacctagttt

SEQ ID NO: 2582156 - DNA, 25 bp, Homo sapien
tcaacaggatctataatgaacatca

SEQ ID NO: 2582157 - DNA, 25 bp, Homo sapien
tttatcagtccacccatcaacagga

SEQ ID NO: 2582158 - DNA, 25 bp, Homo sapien
cttgagttcctgcaaacctggtgac

SEQ ID NO: 2582159 - DNA, 25 bp, Homo sapien
tcagctactgaatcaagggccttgg

SEQ ID NO: 2582160 - DNA, 25 bp, Homo sapien
ggagaaccagaccaaactcagctga

SEQ ID NO: 2582161 - DNA, 25 bp, Homo sapien
ggtaccagcacagccataaggaagt

SEQ ID NO: 2582162 - DNA, 25 bp, Homo sapien
gccagcggtattcttgaccaggtct

SEQ ID NO: 2582163 - DNA, 25 bp, Homo sapien
gcggtattcttgaccaggtctgcca

SEQ ID NO: 2582164 - DNA, 25 bp, Homo sapien
tgcttgcagccagcggtattcttga

SEQ ID NO: 2582165 - DNA, 25 bp, Homo sapien
tgcagccagcggtattcttgaccag

SEQ ID NO: 2582166 - DNA, 25 bp, Homo sapien
caactgctttgtgagttccagggat

SEQ ID NO: 2582167 - DNA, 25 bp, Homo sapien
taacaggactgtaggtttctgggct

SEQ ID NO: 2582168 - DNA, 25 bp, Homo sapien
cagggatctggtcaatccttccagc

SEQ ID NO: 2582169 - DNA, 25 bp, Homo sapien
gagaacgagtaacaggactgtaggt

SEQ ID NO: 2582170 - DNA, 25 bp, Homo sapien
gttagaattgccctgactagaagaa

SEQ ID NO: 2582171 - DNA, 25 bp, Homo sapien
aaaaaagtgctaaggtcagctgtcc

SEQ ID NO: 2582172 - DNA, 25 bp, Homo sapien
aaaaagtgctaaggtcagctgtccc

SEQ ID NO: 2582173 - DNA, 25 bp, Homo sapien
agaaaaaagtgctaaggtcagctgt

SEQ ID NO: 2582174 - DNA, 25 bp, Homo sapien
tgagtaactgagtgatggtgaccag

SEQ ID NO: 2582175 - DNA, 25 bp, Homo sapien
tgagaagcccaaagcaagccagtgg

SEQ ID NO: 2582176 - DNA, 25 bp, Homo sapien
tggtgaccaggtctaattccctttc

SEQ ID NO: 2582177 - DNA, 25 bp, Homo sapien
tccccagtaaccagaacaacagctg

SEQ ID NO: 2582178 - DNA, 25 bp, Homo sapien
agtggaatttatgatgtgaagatgg

SEQ ID NO: 2582179 - DNA, 25 bp, Homo sapien
tcatcttgaaatggcactgaactta

SEQ ID NO: 2582180 - DNA, 25 bp, Homo sapien
gctcacaaatatgaatcagatacat

SEQ ID NO: 2582181 - DNA, 25 bp, Homo sapien
gaacttacattcacgcttacaagca

SEQ ID NO: 2582182 - DNA, 25 bp, Homo sapien
gcacctttacttgctcacaaatatg

SEQ ID NO: 2582183 - DNA, 25 bp, Homo sapien
aagtaaccaaaggctcgagggccat

SEQ ID NO: 2582184 - DNA, 25 bp, Homo sapien
cagaaaagtaaccaaaggctcgagg

SEQ ID NO: 2582185 - DNA, 25 bp, Homo sapien
ggatcttttgtactactaagtccta

SEQ ID NO: 2582186 - DNA, 25 bp, Homo sapien
tgttaggtagtaatggtgaggatct

SEQ ID NO: 2582187 - DNA, 25 bp, Homo sapien
gagatcatgatatgcaaacacatgc

SEQ ID NO: 2582188 - DNA, 25 bp, Homo sapien
aacacatgctttagttcacatccaa

SEQ ID NO: 2582189 - DNA, 25 bp, Homo sapien
ttgctggcaaaactggtgttcagca

SEQ ID NO: 2582190 - DNA, 25 bp, Homo sapien
ctggtgttcagcactggagatactc

SEQ ID NO: 2582191 - DNA, 25 bp, Homo sapien
catgggcaacaagttatcaggaagc

SEQ ID NO: 2582192 - DNA, 25 bp, Homo sapien
agcatgggcaacaagttatcaggaa

SEQ ID NO: 2582193 - DNA, 25 bp, Homo sapien
gattgatttttcactggcagagtct

SEQ ID NO: 2582194 - DNA, 25 bp, Homo sapien
aaatattctccatccgacaatgatt

SEQ ID NO: 2582195 - DNA, 25 bp, Homo sapien
tgattgatttttcactggcagagtc

SEQ ID NO: 2582196 - DNA, 25 bp, Homo sapien
tccatccgacaatgattgatttttc

SEQ ID NO: 2582197 - DNA, 25 bp, Homo sapien
taattgcttccggtgactgtcattg

SEQ ID NO: 2582198 - DNA, 25 bp, Homo sapien
aattgcttccggtgactgtcattgc

SEQ ID NO: 2582199 - DNA, 25 bp, Homo sapien
ctaattgcttccggtgactgtcatt

SEQ ID NO: 2582200 - DNA, 25 bp, Homo sapien
tttttcccgcttaagctctgggcag

SEQ ID NO: 2582201 - DNA, 25 bp, Homo sapien
ttttcccgcttaagctctgggcaga

SEQ ID NO: 2582202 - DNA, 25 bp, Homo sapien
ctttttcccgcttaagctctgggca

SEQ ID NO: 2582203 - DNA, 25 bp, Homo sapien
tttcccgcttaagctctgggcagac

SEQ ID NO: 2582204 - DNA, 25 bp, Homo sapien
gccttcagcattgcattcgttgtca

SEQ ID NO: 2582205 - DNA, 25 bp, Homo sapien
cagccttcagcattgcattcgttgt

SEQ ID NO: 2582206 - DNA, 25 bp, Homo sapien
tcagccttcagcattgcattcgttg

SEQ ID NO: 2582207 - DNA, 25 bp, Homo sapien
ccttcagcattgcattcgttgtcat

SEQ ID NO: 2582208 - DNA, 25 bp, Homo sapien
tctaagtgttgtttgaatggtttca

SEQ ID NO: 2582209 - DNA, 25 bp, Homo sapien
ttacactccagcacggtcactggca

SEQ ID NO: 2582210 - DNA, 25 bp, Homo sapien
tggcaccacctaccacccgattagg

SEQ ID NO: 2582211 - DNA, 25 bp, Homo sapien
tttcatgaagtctggagaatactgg

SEQ ID NO: 2582212 - DNA, 25 bp, Homo sapien
tttatctttcccaaaatcagccaat

SEQ ID NO: 2582213 - DNA, 25 bp, Homo sapien
aatcctgtgcaagactgtgaagtac

SEQ ID NO: 2582214 - DNA, 25 bp, Homo sapien
caaaatcagccaattgacctgaatc

SEQ ID NO: 2582215 - DNA, 25 bp, Homo sapien
caattgacctgaatcctgtgcaaga

SEQ ID NO: 2582216 - DNA, 25 bp, Homo sapien
tcataaattcacgtgtgcaccttta

SEQ ID NO: 2582217 - DNA, 25 bp, Homo sapien
ttcacgtgtgcacctttatagatat

SEQ ID NO: 2582218 - DNA, 25 bp, Homo sapien
cctttatagatattgcgcatacatt

SEQ ID NO: 2582219 - DNA, 25 bp, Homo sapien
tattgcgcatacatttagcaattct

SEQ ID NO: 2582220 - DNA, 25 bp, Homo sapien
tcctccactgccccaaggtccttga

SEQ ID NO: 2582221 - DNA, 25 bp, Homo sapien
tgccccaaggtccttgaagtcactt

SEQ ID NO: 2582222 - DNA, 25 bp, Homo sapien
caaggtccttgaagtcacttccttt

SEQ ID NO: 2582223 - DNA, 25 bp, Homo sapien
cactgccccaaggtccttgaagtca

SEQ ID NO: 2582224 - DNA, 25 bp, Homo sapien
catagctctcaggtaccagaaggag

SEQ ID NO: 2582225 - DNA, 25 bp, Homo sapien
tggagtacataatagggatgaaagc

SEQ ID NO: 2582226 - DNA, 25 bp, Homo sapien
cataatagggatgaaagctgacagc

SEQ ID NO: 2582227 - DNA, 25 bp, Homo sapien
catagataccaacggcatagctctc

SEQ ID NO: 2582228 - DNA, 25 bp, Homo sapien
aacttggtagctttttctctgaatc

SEQ ID NO: 2582229 - DNA, 25 bp, Homo sapien
gggagacggcatggaccgtacttcc

SEQ ID NO: 2582230 - DNA, 25 bp, Homo sapien
agacggcatggaccgtacttcccaa

SEQ ID NO: 2582231 - DNA, 25 bp, Homo sapien
gcatggaccgtacttcccaaaacat

SEQ ID NO: 2582232 - DNA, 25 bp, Homo sapien
tagagtgtagcagggggagacggca

SEQ ID NO: 2582233 - DNA, 25 bp, Homo sapien
ttgtgatgagcagtgtgcaaacaat

SEQ ID NO: 2582234 - DNA, 25 bp, Homo sapien
tgtgatgagcagtgtgcaaacaata

SEQ ID NO: 2582235 - DNA, 25 bp, Homo sapien
gtgatgagcagtgtgcaaacaataa

SEQ ID NO: 2582236 - DNA, 25 bp, Homo sapien
tagtttgtggacattgtttacatat

SEQ ID NO: 2582237 - DNA, 25 bp, Homo sapien
catatgtgaatagttccctattctt

SEQ ID NO: 2582238 - DNA, 25 bp, Homo sapien
ttagtttgtggacattgtttacata

SEQ ID NO: 2582239 - DNA, 25 bp, Homo sapien
ttacatatgtgaatagttccctatt

SEQ ID NO: 2582240 - DNA, 25 bp, Homo sapien
agcaactgtagtagcaatatgaagc

SEQ ID NO: 2582241 - DNA, 25 bp, Homo sapien
ttcccttcggaccagatctttcctg

SEQ ID NO: 2582242 - DNA, 25 bp, Homo sapien
aggccttcccttcggaccagatctt

SEQ ID NO: 2582243 - DNA, 25 bp, Homo sapien
taatgattctgaggagcaactgtag

SEQ ID NO: 2582244 - DNA, 25 bp, Homo sapien
cacctactgtatcccagatgaggac

SEQ ID NO: 2582245 - DNA, 25 bp, Homo sapien
tgatgatgtaactgcagagcttagc

SEQ ID NO: 2582246 - DNA, 25 bp, Homo sapien
gcttagcacctgcaccatagccatg

SEQ ID NO: 2582247 - DNA, 25 bp, Homo sapien
catagccatggcagtcagtctagtg

SEQ ID NO: 2582248 - DNA, 25 bp, Homo sapien
gcaccgcccaacgagtgctttgaaa

SEQ ID NO: 2582249 - DNA, 25 bp, Homo sapien
ctgagcaccgcccaacgagtgcttt

SEQ ID NO: 2582250 - DNA, 25 bp, Homo sapien
gcccaacgagtgctttgaaacagca

SEQ ID NO: 2582251 - DNA, 25 bp, Homo sapien
tacagatgaagggaggcagactggc

SEQ ID NO: 2582252 - DNA, 25 bp, Homo sapien
aaagtagtagtaagcatagcattac

SEQ ID NO: 2582253 - DNA, 25 bp, Homo sapien
cattcaacactattctgcccatgag

SEQ ID NO: 2582254 - DNA, 25 bp, Homo sapien
tgcccatgaggttctattagtgctt

SEQ ID NO: 2582255 - DNA, 25 bp, Homo sapien
tcattcaacactattctgcccatga

SEQ ID NO: 2582256 - DNA, 25 bp, Homo sapien
tgtgatagttgtagtaggcaaagtg

SEQ ID NO: 2582257 - DNA, 25 bp, Homo sapien
agtgtgatagttgtagtaggcaaag

SEQ ID NO: 2582258 - DNA, 25 bp, Homo sapien
gtgtgatagttgtagtaggcaaagt

SEQ ID NO: 2582259 - DNA, 25 bp, Homo sapien
cttcgtaagtgtgatagttgtagta

SEQ ID NO: 2582260 - DNA, 25 bp, Homo sapien
ggttaagacacatgccaggacccag

SEQ ID NO: 2582261 - DNA, 25 bp, Homo sapien
acacgcggaatagggaaggaggaga

SEQ ID NO: 2582262 - DNA, 25 bp, Homo sapien
gagagaccatgcagaacacgcggaa

SEQ ID NO: 2582263 - DNA, 25 bp, Homo sapien
gggttaagacacatgccaggaccca

SEQ ID NO: 2582264 - DNA, 25 bp, Homo sapien
gagactgctggacaacaaatatcgt

SEQ ID NO: 2582265 - DNA, 25 bp, Homo sapien
taaagccacactgccactaactgtg

SEQ ID NO: 2582266 - DNA, 25 bp, Homo sapien
cagagaactgaggttagcaacacca

SEQ ID NO: 2582267 - DNA, 25 bp, Homo sapien
taacctacggtaccatgagactgct

SEQ ID NO: 2582268 - DNA, 25 bp, Homo sapien
tgtcttgccttccaagtgtttcttg

SEQ ID NO: 2582269 - DNA, 25 bp, Homo sapien
ctcctttcccttgggtgtcttgcct

SEQ ID NO: 2582270 - DNA, 25 bp, Homo sapien
ggagccatagccagacccgtcagct

SEQ ID NO: 2582271 - DNA, 25 bp, Homo sapien
aatagggcagcttctccggaggaag

SEQ ID NO: 2582272 - DNA, 25 bp, Homo sapien
caaggccctctatggagttaacagt

SEQ ID NO: 2582273 - DNA, 25 bp, Homo sapien
cacacagttaatctagtcagcatga

SEQ ID NO: 2582274 - DNA, 25 bp, Homo sapien
tatgtcgttattaatgcaaggccct

SEQ ID NO: 2582275 - DNA, 25 bp, Homo sapien
tcactggacaatctatagggttaca

SEQ ID NO: 2582276 - DNA, 25 bp, Homo sapien
atttgtaaaggacactcatcatcat

SEQ ID NO: 2582277 - DNA, 25 bp, Homo sapien
ctgaagatttgtaaaggacactcat

SEQ ID NO: 2582278 - DNA, 25 bp, Homo sapien
cttggccattccctgaagatttgta

SEQ ID NO: 2582279 - DNA, 25 bp, Homo sapien
acttggccattccctgaagatttgt

SEQ ID NO: 2582280 - DNA, 25 bp, Homo sapien
gcacttcaagtaactgtcagggcaa

SEQ ID NO: 2582281 - DNA, 25 bp, Homo sapien
tgccccacagagtatggcagaactc

SEQ ID NO: 2582282 - DNA, 25 bp, Homo sapien
aagggattatcttataaggcccagg

SEQ ID NO: 2582283 - DNA, 25 bp, Homo sapien
catcaggcgtctgttcagtagtaca

SEQ ID NO: 2582284 - DNA, 25 bp, Homo sapien
cagcaggattgtcttgtagggaata

SEQ ID NO: 2582285 - DNA, 25 bp, Homo sapien
gtctgcaggatctgtagtagacagc

SEQ ID NO: 2582286 - DNA, 25 bp, Homo sapien
tctgtagtagacagcaggattgtct

SEQ ID NO: 2582287 - DNA, 25 bp, Homo sapien
ttccagaccatacttctctaaagct

SEQ ID NO: 2582288 - DNA, 25 bp, Homo sapien
gctggtttccggcatgtctttgtaa

SEQ ID NO: 2582289 - DNA, 25 bp, Homo sapien
ctcagcagccagtcgagaattttca

SEQ ID NO: 2582290 - DNA, 25 bp, Homo sapien
tgctgcctccgtcgtttcataacca

SEQ ID NO: 2582291 - DNA, 25 bp, Homo sapien
tctgagctccgaaattcctgcattc

SEQ ID NO: 2582292 - DNA, 25 bp, Homo sapien
agcctctgactaggcattaagtgta

SEQ ID NO: 2582293 - DNA, 25 bp, Homo sapien
tgtcagcctctgactaggcattaag

SEQ ID NO: 2582294 - DNA, 25 bp, Homo sapien
tcagcctctgactaggcattaagtg

SEQ ID NO: 2582295 - DNA, 25 bp, Homo sapien
gtcagcctctgactaggcattaagt

SEQ ID NO: 2582296 - DNA, 25 bp, Homo sapien
acaactgctgcctcatggccaaaac

SEQ ID NO: 2582297 - DNA, 25 bp, Homo sapien
atatgagacaactgctgcctcatgg

SEQ ID NO: 2582298 - DNA, 25 bp, Homo sapien
aactgctgcctcatggccaaaacca

SEQ ID NO: 2582299 - DNA, 25 bp, Homo sapien
gctgcctcatggccaaaaccacaga

SEQ ID NO: 2582300 - DNA, 25 bp, Homo sapien
catcctccccttggaaaggtctatc

SEQ ID NO: 2582301 - DNA, 25 bp, Homo sapien
acatcctccccttggaaaggtctat

SEQ ID NO: 2582302 - DNA, 25 bp, Homo sapien
tccccttggaaaggtctatcatctt

SEQ ID NO: 2582303 - DNA, 25 bp, Homo sapien
tcctccccttggaaaggtctatcat

SEQ ID NO: 2582304 - DNA, 25 bp, Homo sapien
gcttttcaggtccattactttgagc

SEQ ID NO: 2582305 - DNA, 25 bp, Homo sapien
tcttgaagttctggataaccccttc

SEQ ID NO: 2582306 - DNA, 25 bp, Homo sapien
tttcctgcttttcaggtccattact

SEQ ID NO: 2582307 - DNA, 25 bp, Homo sapien
cttgaagttctggataaccccttct

SEQ ID NO: 2582308 - DNA, 25 bp, Homo sapien
cttaggaggaatggcgtcattctca

SEQ ID NO: 2582309 - DNA, 25 bp, Homo sapien
ggcgtcattctcattcttaagaaca

SEQ ID NO: 2582310 - DNA, 25 bp, Homo sapien
taagaacaaatctgccttcccgatc

SEQ ID NO: 2582311 - DNA, 25 bp, Homo sapien
tcagttgtacaactagaggtttctc

SEQ ID NO: 2582312 - DNA, 25 bp, Homo sapien
tgagtggtggcagtactagagaccc

SEQ ID NO: 2582313 - DNA, 25 bp, Homo sapien
gcgagcgtttcgattacatcttgag

SEQ ID NO: 2582314 - DNA, 25 bp, Homo sapien
ggacagcattcgcatatcaggtcga

SEQ ID NO: 2582315 - DNA, 25 bp, Homo sapien
tcaggtcgaaatttctccgcgagcg

SEQ ID NO: 2582316 - DNA, 25 bp, Homo sapien
gattaacattctgctcaattatttt

SEQ ID NO: 2582317 - DNA, 25 bp, Homo sapien
aaacagattaacattctgctcaatt

SEQ ID NO: 2582318 - DNA, 25 bp, Homo sapien
cagattaacattctgctcaattatt

SEQ ID NO: 2582319 - DNA, 25 bp, Homo sapien
ttaacattctgctcaattattttgc

SEQ ID NO: 2582320 - DNA, 25 bp, Homo sapien
tgtaagccataaccctgccaacttt

SEQ ID NO: 2582321 - DNA, 25 bp, Homo sapien
atttgtaagccataaccctgccaac

SEQ ID NO: 2582322 - DNA, 25 bp, Homo sapien
tggaattagaaatctacccaaactc

SEQ ID NO: 2582323 - DNA, 25 bp, Homo sapien
ctggaattagaaatctacccaaact

SEQ ID NO: 2582324 - DNA, 25 bp, Homo sapien
tttatctcccatactgaaatgggag

SEQ ID NO: 2582325 - DNA, 25 bp, Homo sapien
tccccaatttatctcccatactgaa

SEQ ID NO: 2582326 - DNA, 25 bp, Homo sapien
ttccccaatttatctcccatactga

SEQ ID NO: 2582327 - DNA, 25 bp, Homo sapien
caatttatctcccatactgaaatgg

SEQ ID NO: 2582328 - DNA, 25 bp, Homo sapien
gggttactcgccaagcttcactgtt

SEQ ID NO: 2582329 - DNA, 25 bp, Homo sapien
taagaaggtacaacaggccactgtg

SEQ ID NO: 2582330 - DNA, 25 bp, Homo sapien
gctgtaggatgtaagaaggtacaac

SEQ ID NO: 2582331 - DNA, 25 bp, Homo sapien
ctgagattcacccttttcatttgga

SEQ ID NO: 2582332 - DNA, 25 bp, Homo sapien
tgcgagcacttatgaggatacaaag

SEQ ID NO: 2582333 - DNA, 25 bp, Homo sapien
catggtgtgatgcaccgtgacttgt

SEQ ID NO: 2582334 - DNA, 25 bp, Homo sapien
aaagaatcgttccatgggtggcagg

SEQ ID NO: 2582335 - DNA, 25 bp, Homo sapien
tattcaagatgtagtccagtgttcc

SEQ ID NO: 2582336 - DNA, 25 bp, Homo sapien
tgctgccataattatccaggaatcc

SEQ ID NO: 2582337 - DNA, 25 bp, Homo sapien
ctgctgccataattatccaggaatc

SEQ ID NO: 2582338 - DNA, 25 bp, Homo sapien
tctgctgccataattatccaggaat

SEQ ID NO: 2582339 - DNA, 25 bp, Homo sapien
ctaatacaattctgaagaataattt

SEQ ID NO: 2582340 - DNA, 25 bp, Homo sapien
gtgctgggtctaaatgggcggcgct

SEQ ID NO: 2582341 - DNA, 25 bp, Homo sapien
ttcggttcggactggcggtgctggg

SEQ ID NO: 2582342 - DNA, 25 bp, Homo sapien
tctaaatgggcggtgctaggctcag

SEQ ID NO: 2582343 - DNA, 25 bp, Homo sapien
gttctgggtctggacgggcggtgca

SEQ ID NO: 2582344 - DNA, 25 bp, Homo sapien
aatatatgccaatggtagatgacaa

SEQ ID NO: 2582345 - DNA, 25 bp, Homo sapien
aaactgtaggagacttgaaacagca

SEQ ID NO: 2582346 - DNA, 25 bp, Homo sapien
gctgaaggaaatgtcctgctggagt

SEQ ID NO: 2582347 - DNA, 25 bp, Homo sapien
tgctggagtctggaacccaaaggca

SEQ ID NO: 2582348 - DNA, 25 bp, Homo sapien
gcagctgccggcacaactgacatga

SEQ ID NO: 2582349 - DNA, 25 bp, Homo sapien
cacaagtgctcatgagaggagagga

SEQ ID NO: 2582350 - DNA, 25 bp, Homo sapien
ggcacaactgacatgaagccatgtg

SEQ ID NO: 2582351 - DNA, 25 bp, Homo sapien
gaccacaagtgctcatgagaggaga

SEQ ID NO: 2582352 - DNA, 25 bp, Homo sapien
cacggcaacacagcttgttcctgga

SEQ ID NO: 2582353 - DNA, 25 bp, Homo sapien
cttcaaccacggcaacacagcttgt

SEQ ID NO: 2582354 - DNA, 25 bp, Homo sapien
acgagggccccacacggacgaggtg

SEQ ID NO: 2582355 - DNA, 25 bp, Homo sapien
tcaaccacggcaacacagcttgttc

SEQ ID NO: 2582356 - DNA, 25 bp, Homo sapien
aagcagaggtgtgagcagagagaca

SEQ ID NO: 2582357 - DNA, 25 bp, Homo sapien
ctttgttaagcagaggtgtgagcag

SEQ ID NO: 2582358 - DNA, 25 bp, Homo sapien
gttaagcagaggtgtgagcagagag

SEQ ID NO: 2582359 - DNA, 25 bp, Homo sapien
tttgttaagcagaggtgtgagcaga

SEQ ID NO: 2582360 - DNA, 25 bp, Homo sapien
aggggccacccgaatcagcaaccat

SEQ ID NO: 2582361 - DNA, 25 bp, Homo sapien
cacagcaaatgctaaggggccaccc

SEQ ID NO: 2582362 - DNA, 25 bp, Homo sapien
gatgagctggcaaagaaataattac

SEQ ID NO: 2582363 - DNA, 25 bp, Homo sapien
gaaataattaccatgcacgtgaaca

SEQ ID NO: 2582364 - DNA, 25 bp, Homo sapien
caatgccctgttttggtaaaactat

SEQ ID NO: 2582365 - DNA, 25 bp, Homo sapien
ttaaacgagactggctttgccgaaa

SEQ ID NO: 2582366 - DNA, 25 bp, Homo sapien
gagactggctttgccgaaaccaaaa

SEQ ID NO: 2582367 - DNA, 25 bp, Homo sapien
tgccgaaaccaaaatggacgtcaga

SEQ ID NO: 2582368 - DNA, 25 bp, Homo sapien
caaaatggacgtcagagttgatggc

SEQ ID NO: 2582369 - DNA, 25 bp, Homo sapien
gggaagaaggcagcaccatggcact

SEQ ID NO: 2582370 - DNA, 25 bp, Homo sapien
ctgggcatgctgtcttccggggaag

SEQ ID NO: 2582371 - DNA, 25 bp, Homo sapien
ccatggcactgggaaacttggtgaa

SEQ ID NO: 2582372 - DNA, 25 bp, Homo sapien
tggcactgggaaacttggtgaaaaa

SEQ ID NO: 2582373 - DNA, 25 bp, Homo sapien
tggctcttcaggctagccgtgttgt

SEQ ID NO: 2582374 - DNA, 25 bp, Homo sapien
aattggctcttcaggctagccgtgt

SEQ ID NO: 2582375 - DNA, 25 bp, Homo sapien
ctcttcaggctagccgtgttgtaga

SEQ ID NO: 2582376 - DNA, 25 bp, Homo sapien
ttcaggctagccgtgttgtagaact

SEQ ID NO: 2582377 - DNA, 25 bp, Homo sapien
cttggagattcagtagcactggagt

SEQ ID NO: 2582378 - DNA, 25 bp, Homo sapien
gattcagtagcactggagtagtttc

SEQ ID NO: 2582379 - DNA, 25 bp, Homo sapien
tgcttggagattcagtagcactgga

SEQ ID NO: 2582380 - DNA, 25 bp, Homo sapien
tggagattcagtagcactggagtag

SEQ ID NO: 2582381 - DNA, 25 bp, Homo sapien
ctcctcctcctcacctgctggccgt

SEQ ID NO: 2582382 - DNA, 25 bp, Homo sapien
gaccttgctgttttccgagcctcgt

SEQ ID NO: 2582383 - DNA, 25 bp, Homo sapien
ggacaggcagtcttaagaccgcact

SEQ ID NO: 2582384 - DNA, 25 bp, Homo sapien
tgctgacttcctaagacttcgggct

SEQ ID NO: 2582385 - DNA, 25 bp, Homo sapien
tcaggcgcctgtcctgactgctgtg

SEQ ID NO: 2582386 - DNA, 25 bp, Homo sapien
gtgcgggtcgcaaggatgtttccag

SEQ ID NO: 2582387 - DNA, 25 bp, Homo sapien
caggtgggcccagggaagatcaacc

SEQ ID NO: 2582388 - DNA, 25 bp, Homo sapien
agatcaacccatggcgtgcacaagg

SEQ ID NO: 2582389 - DNA, 25 bp, Homo sapien
ccagggaagatcaacccatggcgtg

SEQ ID NO: 2582390 - DNA, 25 bp, Homo sapien
gggtcagcatttcctcttgggaaca

SEQ ID NO: 2582391 - DNA, 25 bp, Homo sapien
accctgggtcagcatttcctcttgg

SEQ ID NO: 2582392 - DNA, 25 bp, Homo sapien
tttcctcttgggaacagcctgtggg

SEQ ID NO: 2582393 - DNA, 25 bp, Homo sapien
gcatttcctcttgggaacagcctgt

SEQ ID NO: 2582394 - DNA, 25 bp, Homo sapien
cccagtgtgaggagatgtggattgc

SEQ ID NO: 2582395 - DNA, 25 bp, Homo sapien
gattcagaagtatggtctgggccag

SEQ ID NO: 2582396 - DNA, 25 bp, Homo sapien
tagcaccccagttgccccagtgtga

SEQ ID NO: 2582397 - DNA, 25 bp, Homo sapien
tagagacagggagatggccatgtgc

SEQ ID NO: 2582398 - DNA, 25 bp, Homo sapien
tcctgtttactcactagctttctgg

SEQ ID NO: 2582399 - DNA, 25 bp, Homo sapien
cttcctgtttactcactagctttct

SEQ ID NO: 2582400 - DNA, 25 bp, Homo sapien
tgtttactcactagctttctgggtc

SEQ ID NO: 2582401 - DNA, 25 bp, Homo sapien
cctgtttactcactagctttctggg

SEQ ID NO: 2582402 - DNA, 25 bp, Homo sapien
tacttctaccttttcaggcctgtct

SEQ ID NO: 2582403 - DNA, 25 bp, Homo sapien
caggtacttctaccttttcaggcct

SEQ ID NO: 2582404 - DNA, 25 bp, Homo sapien
aatgcgaagatgtcagcaccccagg

SEQ ID NO: 2582405 - DNA, 25 bp, Homo sapien
tctctgtgccccttgaacaatgcga

SEQ ID NO: 2582406 - DNA, 25 bp, Homo sapien
ttggttgatctggtagaatatgagc

SEQ ID NO: 2582407 - DNA, 25 bp, Homo sapien
ctcgtggcccctcgcatggtgctaa

SEQ ID NO: 2582408 - DNA, 25 bp, Homo sapien
aagccatggattggttgatctggta

SEQ ID NO: 2582409 - DNA, 25 bp, Homo sapien
cctcgcatggtgctaagcgcgctgt

SEQ ID NO: 2582410 - DNA, 25 bp, Homo sapien
ccagagtccggccacgccaggctct

SEQ ID NO: 2582411 - DNA, 25 bp, Homo sapien
gccagagtccggccacgccaggctc

SEQ ID NO: 2582412 - DNA, 25 bp, Homo sapien
caacccaggggcaaccgagaagcca

SEQ ID NO: 2582413 - DNA, 25 bp, Homo sapien
acccaggggcaaccgagaagccaga

SEQ ID NO: 2582414 - DNA, 25 bp, Homo sapien
ttcataccctcaggacattgttggg

SEQ ID NO: 2582415 - DNA, 25 bp, Homo sapien
tggtaaatacctgcttcatggagag

SEQ ID NO: 2582416 - DNA, 25 bp, Homo sapien
cttctcgtgcgacacagaaccggga

SEQ ID NO: 2582417 - DNA, 25 bp, Homo sapien
ggaaacatgcactaacctggtaaat

SEQ ID NO: 2582418 - DNA, 25 bp, Homo sapien
tagacatttgcccacatttgctgac

SEQ ID NO: 2582419 - DNA, 25 bp, Homo sapien
ctagacatttgcccacatttgctga

SEQ ID NO: 2582420 - DNA, 25 bp, Homo sapien
ctctggctggtctagacactcaggg

SEQ ID NO: 2582421 - DNA, 25 bp, Homo sapien
tcagggcctttactccggctcccgc

SEQ ID NO: 2582422 - DNA, 25 bp, Homo sapien
ctttactccggctcccgccagaggc

SEQ ID NO: 2582423 - DNA, 25 bp, Homo sapien
tggctggtctagacactcagggcct

SEQ ID NO: 2582424 - DNA, 25 bp, Homo sapien
cgacgaccacgcatgaacaggaatg

SEQ ID NO: 2582425 - DNA, 25 bp, Homo sapien
catcctccgccttgggagaggccgt

SEQ ID NO: 2582426 - DNA, 25 bp, Homo sapien
tccatagctcaccagcgtccgtggt

SEQ ID NO: 2582427 - DNA, 25 bp, Homo sapien
cattgagaagtgcacctaagcggcc

SEQ ID NO: 2582428 - DNA, 25 bp, Homo sapien
gagcggaatgcacctatgaaggctg

SEQ ID NO: 2582429 - DNA, 25 bp, Homo sapien
ctagagcggaatgcacctatgaagg

SEQ ID NO: 2582430 - DNA, 25 bp, Homo sapien
aaggctgaggcctgcgcgagaacct

SEQ ID NO: 2582431 - DNA, 25 bp, Homo sapien
cggaatgcacctatgaaggctgagg

SEQ ID NO: 2582432 - DNA, 25 bp, Homo sapien
cgtccacctcctcgctgtagggtgg

SEQ ID NO: 2582433 - DNA, 25 bp, Homo sapien
cgcggccagggagccgtagaagctc

SEQ ID NO: 2582434 - DNA, 25 bp, Homo sapien
gccgcggccagggagccgtagaagc

SEQ ID NO: 2582435 - DNA, 25 bp, Homo sapien
gccagggagccgtagaagctcagtc

SEQ ID NO: 2582436 - DNA, 25 bp, Homo sapien
gggagccgtagaagctcagtcccat

SEQ ID NO: 2582437 - DNA, 25 bp, Homo sapien
tgtgacactcggttttcttaagagg

SEQ ID NO: 2582438 - DNA, 25 bp, Homo sapien
tcttaagaggtgcacgtgattcatt

SEQ ID NO: 2582439 - DNA, 25 bp, Homo sapien
ctctcacctgcgtggtaacaacgat

SEQ ID NO: 2582440 - DNA, 25 bp, Homo sapien
gaaactaatgatcaaacagaagcta

SEQ ID NO: 2582441 - DNA, 25 bp, Homo sapien
accgtgcacgccgactgaaagcaaa

SEQ ID NO: 2582442 - DNA, 25 bp, Homo sapien
gtttgggaaccgtgcacgccgactg

SEQ ID NO: 2582443 - DNA, 25 bp, Homo sapien
caccgacgtttgggaaccgtgcacg

SEQ ID NO: 2582444 - DNA, 25 bp, Homo sapien
gtgcacgccgactgaaagcaaagct

SEQ ID NO: 2582445 - DNA, 25 bp, Homo sapien
tggtcgccgttgagtccgtccgtgc

SEQ ID NO: 2582446 - DNA, 25 bp, Homo sapien
gtcgccgttgagtccgtccgtgccg

SEQ ID NO: 2582447 - DNA, 25 bp, Homo sapien
ccgttgagtccgtccgtgccgctgg

SEQ ID NO: 2582448 - DNA, 25 bp, Homo sapien
gcggtggtcgccgttgagtccgtcc

SEQ ID NO: 2582449 - DNA, 25 bp, Homo sapien
cctgccctgttttgaattagcggta

SEQ ID NO: 2582450 - DNA, 25 bp, Homo sapien
ttccacaacgttctattcgcaaggg

SEQ ID NO: 2582451 - DNA, 25 bp, Homo sapien
gaggcctggcagtgcagtgcatcct

SEQ ID NO: 2582452 - DNA, 25 bp, Homo sapien
ttagcggtagcagaaagaaacggcg

SEQ ID NO: 2582453 - DNA, 25 bp, Homo sapien
gccagctgagaggtgtctcagggct

SEQ ID NO: 2582454 - DNA, 25 bp, Homo sapien
tttcttcttttgacctcaaacaggc

SEQ ID NO: 2582455 - DNA, 25 bp, Homo sapien
caacttcttggagctgaagtctgca

SEQ ID NO: 2582456 - DNA, 25 bp, Homo sapien
gccacggttcatgactctctcagga

SEQ ID NO: 2582457 - DNA, 25 bp, Homo sapien
ttgcaacttcttggagctgaagtct

SEQ ID NO: 2582458 - DNA, 25 bp, Homo sapien
cagacgtctccggagttcgtgttgg

SEQ ID NO: 2582459 - DNA, 25 bp, Homo sapien
ggaaagccagctaaactgcaacctc

SEQ ID NO: 2582460 - DNA, 25 bp, Homo sapien
ggagattgtcagatctgcgtggaca

SEQ ID NO: 2582461 - DNA, 25 bp, Homo sapien
tcagtccccgttgaagacagcaggg

SEQ ID NO: 2582462 - DNA, 25 bp, Homo sapien
agtgttgtggagctgtcggctccct

SEQ ID NO: 2582463 - DNA, 25 bp, Homo sapien
ctgagtgttgtggagctgtcggctc

SEQ ID NO: 2582464 - DNA, 25 bp, Homo sapien
ggctgagtgttgtggagctgtcggc

SEQ ID NO: 2582465 - DNA, 25 bp, Homo sapien
ttgttcgggggtctgtccaagcctg

SEQ ID NO: 2582466 - DNA, 25 bp, Homo sapien
gaaggaatgtgccctgagtgctgag

SEQ ID NO: 2582467 - DNA, 25 bp, Homo sapien
cttccactgtgcacaggaaggaatg

SEQ ID NO: 2582468 - DNA, 25 bp, Homo sapien
cacaggaaggaatgtgccctgagtg

SEQ ID NO: 2582469 - DNA, 25 bp, Homo sapien
caggaaggaatgtgccctgagtgct

SEQ ID NO: 2582470 - DNA, 25 bp, Homo sapien
gttatcaacgcccatgcccagaggc

SEQ ID NO: 2582471 - DNA, 25 bp, Homo sapien
taccaggcgtaggttatcaacgccc

SEQ ID NO: 2582472 - DNA, 25 bp, Homo sapien
ttggtgttaccaggcgtaggttatc

SEQ ID NO: 2582473 - DNA, 25 bp, Homo sapien
gcgtaggttatcaacgcccatgccc

SEQ ID NO: 2582474 - DNA, 25 bp, Homo sapien
caaaatctctatgacctggtgctaa

SEQ ID NO: 2582475 - DNA, 25 bp, Homo sapien
tgacctggtgctaagggaccttttg

SEQ ID NO: 2582476 - DNA, 25 bp, Homo sapien
gcttttgcaaaatctctatgacctg

SEQ ID NO: 2582477 - DNA, 25 bp, Homo sapien
cttttgggtttaaagcactgcttgt

SEQ ID NO: 2582478 - DNA, 25 bp, Homo sapien
taaagggagagtaatcattgatggt

SEQ ID NO: 2582479 - DNA, 25 bp, Homo sapien
ttaaagggagagtaatcattgatgg

SEQ ID NO: 2582480 - DNA, 25 bp, Homo sapien
agggttaaagggagagtaatcattg

SEQ ID NO: 2582481 - DNA, 25 bp, Homo sapien
ggttaaagggagagtaatcattgat

SEQ ID NO: 2582482 - DNA, 25 bp, Homo sapien
tgccatgcagatgtggtcaacgggc

SEQ ID NO: 2582483 - DNA, 25 bp, Homo sapien
atgcagatgtggtcaacgggctgat

SEQ ID NO: 2582484 - DNA, 25 bp, Homo sapien
ccatgcagatgtggtcaacgggctg

SEQ ID NO: 2582485 - DNA, 25 bp, Homo sapien
ttctccctgtgccatgcagatgtgg

SEQ ID NO: 2582486 - DNA, 25 bp, Homo sapien
cgcccggccgaagtgtttgaaatct

SEQ ID NO: 2582487 - DNA, 25 bp, Homo sapien
tgtcagaccctcaccaaaaatgggc

SEQ ID NO: 2582488 - DNA, 25 bp, Homo sapien
ttccacccatgtttcagagcatctg

SEQ ID NO: 2582489 - DNA, 25 bp, Homo sapien
gcatgattgacatcgcttccaccca

SEQ ID NO: 2582490 - DNA, 25 bp, Homo sapien
catgccagccctcgcagtcacactg

SEQ ID NO: 2582491 - DNA, 25 bp, Homo sapien
taggccccagtgcaattccgagttc

SEQ ID NO: 2582492 - DNA, 25 bp, Homo sapien
cccagtgcaattccgagttccctgg

SEQ ID NO: 2582493 - DNA, 25 bp, Homo sapien
tgctataggccccagtgcaattccg

SEQ ID NO: 2582494 - DNA, 25 bp, Homo sapien
catacacagtggacattgctatggc

SEQ ID NO: 2582495 - DNA, 25 bp, Homo sapien
tacacagtggacattgctatggctt

SEQ ID NO: 2582496 - DNA, 25 bp, Homo sapien
atacacagtggacattgctatggct

SEQ ID NO: 2582497 - DNA, 25 bp, Homo sapien
taatatttgcaccacgctcagaggg

SEQ ID NO: 2582498 - DNA, 25 bp, Homo sapien
ctggcctggatgttgtcggagacac

SEQ ID NO: 2582499 - DNA, 25 bp, Homo sapien
aaaaggctcgtagtcctgagtgcat

SEQ ID NO: 2582500 - DNA, 25 bp, Homo sapien
cagataatgacagtgcgaggcgaca

SEQ ID NO: 2582501 - DNA, 25 bp, Homo sapien
aacaatgcagtctggttactgggcc

SEQ ID NO: 2582502 - DNA, 25 bp, Homo sapien
tactgggccggaatggacatgacag

SEQ ID NO: 2582503 - DNA, 25 bp, Homo sapien
caattgtaacacatgctcgctgtgg

SEQ ID NO: 2582504 - DNA, 25 bp, Homo sapien
taaagtctatcaggacacagcaggg

SEQ ID NO: 2582505 - DNA, 25 bp, Homo sapien
gcctgaatccatcttcgagcccaga

SEQ ID NO: 2582506 - DNA, 25 bp, Homo sapien
tgccaagtatgctgccccatgtctg

SEQ ID NO: 2582507 - DNA, 25 bp, Homo sapien
catcttcgagcccagagactttcag

SEQ ID NO: 2582508 - DNA, 25 bp, Homo sapien
gtcacagaccacacagatacacagt

SEQ ID NO: 2582509 - DNA, 25 bp, Homo sapien
tcattccaagtgtcccttagggacg

SEQ ID NO: 2582510 - DNA, 25 bp, Homo sapien
cttagggacgacccgtgagtcctct

SEQ ID NO: 2582511 - DNA, 25 bp, Homo sapien
cgtgagtcctctggggctgcattgt

SEQ ID NO: 2582512 - DNA, 25 bp, Homo sapien
cattccaagtgtcccttagggacga

SEQ ID NO: 2582513 - DNA, 25 bp, Homo sapien
ggctggagaacgatcgtgcagactc

SEQ ID NO: 2582514 - DNA, 25 bp, Homo sapien
ccatccagagcacacgtcacatggg

SEQ ID NO: 2582515 - DNA, 25 bp, Homo sapien
atcgtgcagactcccatccagagca

SEQ ID NO: 2582516 - DNA, 25 bp, Homo sapien
agagcacacgtcacatgggcactgg

SEQ ID NO: 2582517 - DNA, 25 bp, Homo sapien
tcattccatgccccttagtaccaga

SEQ ID NO: 2582518 - DNA, 25 bp, Homo sapien
tgccccttagtaccagaatgaccct

SEQ ID NO: 2582519 - DNA, 25 bp, Homo sapien
cccttagtaccagaatgaccctgtc

SEQ ID NO: 2582520 - DNA, 25 bp, Homo sapien
agtaccagaatgaccctgtctggac

SEQ ID NO: 2582521 - DNA, 25 bp, Homo sapien
ggaggagcccactcttacatgtcca

SEQ ID NO: 2582522 - DNA, 25 bp, Homo sapien
gacagacaggtagtctccacaggga

SEQ ID NO: 2582523 - DNA, 25 bp, Homo sapien
ggctgggccttgacgtgatttccgt

SEQ ID NO: 2582524 - DNA, 25 bp, Homo sapien
tccgttcccaaagccgacgagcagt

SEQ ID NO: 2582525 - DNA, 25 bp, Homo sapien
ttgcccctgacgcctgaaatggcac

SEQ ID NO: 2582526 - DNA, 25 bp, Homo sapien
caggcactgttcctcgcctttgccc

SEQ ID NO: 2582527 - DNA, 25 bp, Homo sapien
cgcctttgcccctgacgcctgaaat

SEQ ID NO: 2582528 - DNA, 25 bp, Homo sapien
tgttcctcgcctttgcccctgacgc

SEQ ID NO: 2582529 - DNA, 25 bp, Homo sapien
cgagggccgtgaaacatctcttggg

SEQ ID NO: 2582530 - DNA, 25 bp, Homo sapien
cctgcgtgtcggcatccccaaagcc

SEQ ID NO: 2582531 - DNA, 25 bp, Homo sapien
agcttttgaaaatgcacgtgtctgc

SEQ ID NO: 2582532 - DNA, 25 bp, Homo sapien
gaggcgagggccgtgaaacatctct

SEQ ID NO: 2582533 - DNA, 25 bp, Homo sapien
catggcgcagaaaccatggcaaaac

SEQ ID NO: 2582534 - DNA, 25 bp, Homo sapien
aaccatggcgcagaaaccatggcaa

SEQ ID NO: 2582535 - DNA, 25 bp, Homo sapien
ccgaaaccatggcgcagaaaccatg

SEQ ID NO: 2582536 - DNA, 25 bp, Homo sapien
ccatggcgcagaaaccatggcaaaa

SEQ ID NO: 2582537 - DNA, 25 bp, Homo sapien
gactgcctggggcttcgacgtccac

SEQ ID NO: 2582538 - DNA, 25 bp, Homo sapien
gcttcgacgtccacaggagccccgt

SEQ ID NO: 2582539 - DNA, 25 bp, Homo sapien
ctggggcttcgacgtccacaggagc

SEQ ID NO: 2582540 - DNA, 25 bp, Homo sapien
gcctggggcttcgacgtccacagga

SEQ ID NO: 2582541 - DNA, 25 bp, Homo sapien
gtctcccaaaagacgctcttttcca

SEQ ID NO: 2582542 - DNA, 25 bp, Homo sapien
ttttccagacaacctgactgtagga

SEQ ID NO: 2582543 - DNA, 25 bp, Homo sapien
aacctgactgtaggatcagcaccag

SEQ ID NO: 2582544 - DNA, 25 bp, Homo sapien
aagacgctcttttccagacaacctg

SEQ ID NO: 2582545 - DNA, 25 bp, Homo sapien
ggccatggacatcctcaggcctcct

SEQ ID NO: 2582546 - DNA, 25 bp, Homo sapien
gcaaatgacagtctctggactggcc

SEQ ID NO: 2582547 - DNA, 25 bp, Homo sapien
tgggagcaaatgacagtctctggac

SEQ ID NO: 2582548 - DNA, 25 bp, Homo sapien
atctctgggagcaaatgacagtctc

SEQ ID NO: 2582549 - DNA, 25 bp, Homo sapien
catttctccttgtctgctgcgttac

SEQ ID NO: 2582550 - DNA, 25 bp, Homo sapien
cggtcaatgaaaatccatttctcct

SEQ ID NO: 2582551 - DNA, 25 bp, Homo sapien
gtcaatgaaaatccatttctccttg

SEQ ID NO: 2582552 - DNA, 25 bp, Homo sapien
tccatttctccttgtctgctgcgtt

SEQ ID NO: 2582553 - DNA, 25 bp, Homo sapien
gcattgcactgacggattccaacac

SEQ ID NO: 2582554 - DNA, 25 bp, Homo sapien
ctaccaggacgagtcccacccgctt

SEQ ID NO: 2582555 - DNA, 25 bp, Homo sapien
tggcattgcactgacggattccaac

SEQ ID NO: 2582556 - DNA, 25 bp, Homo sapien
gcactgacggattccaacacacctg

SEQ ID NO: 2582557 - DNA, 25 bp, Homo sapien
gctcccaggccccagtgagagaggt

SEQ ID NO: 2582558 - DNA, 25 bp, Homo sapien
cagtgagagaggtggagtgagaagc

SEQ ID NO: 2582559 - DNA, 25 bp, Homo sapien
gaggtggagtgagaagcagcaacag

SEQ ID NO: 2582560 - DNA, 25 bp, Homo sapien
aggccccagtgagagaggtggagtg

SEQ ID NO: 2582561 - DNA, 25 bp, Homo sapien
ccactgccctgagaatgattcatct

SEQ ID NO: 2582562 - DNA, 25 bp, Homo sapien
gctggttgcagcgtgaccctggcca

SEQ ID NO: 2582563 - DNA, 25 bp, Homo sapien
gctgtctttagggtgattaatggtg

SEQ ID NO: 2582564 - DNA, 25 bp, Homo sapien
tgcagccggttgctgcgtgaccctg

SEQ ID NO: 2582565 - DNA, 25 bp, Homo sapien
caggaggacgttaatttactgcagc

SEQ ID NO: 2582566 - DNA, 25 bp, Homo sapien
ggtaaataggcacaaatcgacactg

SEQ ID NO: 2582567 - DNA, 25 bp, Homo sapien
caataatggatccagcaggaggacg

SEQ ID NO: 2582568 - DNA, 25 bp, Homo sapien
tatgttccctgagtccgtccaaaga

SEQ ID NO: 2582569 - DNA, 25 bp, Homo sapien
taaagctggctgtaggtcctcatcc

SEQ ID NO: 2582570 - DNA, 25 bp, Homo sapien
aacagcagccgggtctcaatcgtgg

SEQ ID NO: 2582571 - DNA, 25 bp, Homo sapien
agtaaagctggctgtaggtcctcat

SEQ ID NO: 2582572 - DNA, 25 bp, Homo sapien
gtctcaatcgtggactgaagtaaag

SEQ ID NO: 2582573 - DNA, 25 bp, Homo sapien
acagggcccgagcaaagtttgctag

SEQ ID NO: 2582574 - DNA, 25 bp, Homo sapien
tctggcattgatatttgtgggaacg

SEQ ID NO: 2582575 - DNA, 25 bp, Homo sapien
tgaatgtgacggtgggaccatcgca

SEQ ID NO: 2582576 - DNA, 25 bp, Homo sapien
cacgggaggcttgtgtggcccaatt

SEQ ID NO: 2582577 - DNA, 25 bp, Homo sapien
tgagctcgccctgcccggatctgca

SEQ ID NO: 2582578 - DNA, 25 bp, Homo sapien
ctgagacgcgcagagctcctgaact

SEQ ID NO: 2582579 - DNA, 25 bp, Homo sapien
agctcgccctgcccggatctgcacc

SEQ ID NO: 2582580 - DNA, 25 bp, Homo sapien
agctcctgaactaaccaaccctgag

SEQ ID NO: 2582581 - DNA, 25 bp, Homo sapien
cttgtgcgtgttctctgcggctggc

SEQ ID NO: 2582582 - DNA, 25 bp, Homo sapien
cttctctccagggtcgtgtgatggc

SEQ ID NO: 2582583 - DNA, 25 bp, Homo sapien
tcctcctactgctgctcggcagctg

SEQ ID NO: 2582584 - DNA, 25 bp, Homo sapien
ggtgctgctccagccgtcaggcttg

SEQ ID NO: 2582585 - DNA, 25 bp, Homo sapien
ttgaaaaatgtaaccaataaactca

SEQ ID NO: 2582586 - DNA, 25 bp, Homo sapien
tgtaaccaataaactcagacacctg

SEQ ID NO: 2582587 - DNA, 25 bp, Homo sapien
aatgtaaccaataaactcagacacc

SEQ ID NO: 2582588 - DNA, 25 bp, Homo sapien
gaaaaatgtaaccaataaactcaga

SEQ ID NO: 2582589 - DNA, 25 bp, Homo sapien
agtggccagaggaaaacaagccaac

SEQ ID NO: 2582590 - DNA, 25 bp, Homo sapien
tgctggccaaaccttcgcccagggt

SEQ ID NO: 2582591 - DNA, 25 bp, Homo sapien
actgtgctatgtcttccactgctgg

SEQ ID NO: 2582592 - DNA, 25 bp, Homo sapien
cctggcagtggccagaggaaaacaa

SEQ ID NO: 2582593 - DNA, 25 bp, Homo sapien
cgttcagacacgttcctggagctgg

SEQ ID NO: 2582594 - DNA, 25 bp, Homo sapien
gttcagacacgttcctggagctggg

SEQ ID NO: 2582595 - DNA, 25 bp, Homo sapien
cacgttcagacacgttcctggagct

SEQ ID NO: 2582596 - DNA, 25 bp, Homo sapien
acgttcagacacgttcctggagctg

SEQ ID NO: 2582597 - DNA, 25 bp, Homo sapien
cccagcgtggggccttgctttcatg

SEQ ID NO: 2582598 - DNA, 25 bp, Homo sapien
cagcgtggggccttgctttcatgct

SEQ ID NO: 2582599 - DNA, 25 bp, Homo sapien
agcgtggggccttgctttcatgctg

SEQ ID NO: 2582600 - DNA, 25 bp, Homo sapien
cgtggggccttgctttcatgctgga

SEQ ID NO: 2582601 - DNA, 25 bp, Homo sapien
ccttgggtcgcttagtggctgatcc

SEQ ID NO: 2582602 - DNA, 25 bp, Homo sapien
catgacatctcctgggactcgcgtg

SEQ ID NO: 2582603 - DNA, 25 bp, Homo sapien
gactcgcgtgtttctcctaaaggtg

SEQ ID NO: 2582604 - DNA, 25 bp, Homo sapien
tgtgatggtctccatgacaccgccc

SEQ ID NO: 2582605 - DNA, 25 bp, Homo sapien
tcagggtggtcctagcacagcttgg

SEQ ID NO: 2582606 - DNA, 25 bp, Homo sapien
accggaagcaaaggcgggaagactg

SEQ ID NO: 2582607 - DNA, 25 bp, Homo sapien
ggatgactttgcttcgtcatcattg

SEQ ID NO: 2582608 - DNA, 25 bp, Homo sapien
ggtactcagggtggtcctagcacag

SEQ ID NO: 2582609 - DNA, 25 bp, Homo sapien
tcctggttctgacatcgtcccgctt

SEQ ID NO: 2582610 - DNA, 25 bp, Homo sapien
tccaggtagctaaatgacaaatatc

SEQ ID NO: 2582611 - DNA, 25 bp, Homo sapien
aaaggtgcaggaatgtgcgagcgag

SEQ ID NO: 2582612 - DNA, 25 bp, Homo sapien
tgtgcgagcgagaagaaggtgcagt

SEQ ID NO: 2582613 - DNA, 25 bp, Homo sapien
tcagatgtgctgtcgacccacaaag

SEQ ID NO: 2582614 - DNA, 25 bp, Homo sapien
tctcacttagacacgaagacacccg

SEQ ID NO: 2582615 - DNA, 25 bp, Homo sapien
gaagacacccgtatttgcacagaca

SEQ ID NO: 2582616 - DNA, 25 bp, Homo sapien
gacccacaaagactctctcacttag

SEQ ID NO: 2582617 - DNA, 25 bp, Homo sapien
tttgagaacatggtccgtctctttc

SEQ ID NO: 2582618 - DNA, 25 bp, Homo sapien
aaggagtggactcgaggcacagttt

SEQ ID NO: 2582619 - DNA, 25 bp, Homo sapien
ttgagaacatggtccgtctctttct

SEQ ID NO: 2582620 - DNA, 25 bp, Homo sapien
catgaagaaggagtggactcgaggc

SEQ ID NO: 2582621 - DNA, 25 bp, Homo sapien
agaaacgcagctctcccggtgcggg

SEQ ID NO: 2582622 - DNA, 25 bp, Homo sapien
cctggatccgagttaactctgcagc

SEQ ID NO: 2582623 - DNA, 25 bp, Homo sapien
ggacgctgaagaaagaaacgcagct

SEQ ID NO: 2582624 - DNA, 25 bp, Homo sapien
ccagaagggcctggatccgagttaa

SEQ ID NO: 2582625 - DNA, 25 bp, Homo sapien
ctgggggccgaagtactcagctgct

SEQ ID NO: 2582626 - DNA, 25 bp, Homo sapien
tctcctcccagacagtgcggtgcta

SEQ ID NO: 2582627 - DNA, 25 bp, Homo sapien
ctcctcccagacagtgcggtgctat

SEQ ID NO: 2582628 - DNA, 25 bp, Homo sapien
cgaagtactcagctgctggactccg

SEQ ID NO: 2582629 - DNA, 25 bp, Homo sapien
tttggagagagcaggcgttgtcccc

SEQ ID NO: 2582630 - DNA, 25 bp, Homo sapien
catgaacgagacctcccatgtggga

SEQ ID NO: 2582631 - DNA, 25 bp, Homo sapien
ttgggcaccaccagtgcttaggctt

SEQ ID NO: 2582632 - DNA, 25 bp, Homo sapien
caagctcgggagcaacatgaacgag

SEQ ID NO: 2582633 - DNA, 25 bp, Homo sapien
gcggacatctgacccatggaggaga

SEQ ID NO: 2582634 - DNA, 25 bp, Homo sapien
gaggaaggagctttccgcagtgcct

SEQ ID NO: 2582635 - DNA, 25 bp, Homo sapien
taagactggaacctcggaagtgacc

SEQ ID NO: 2582636 - DNA, 25 bp, Homo sapien
caaatccacatgactctgtagcccg

SEQ ID NO: 2582637 - DNA, 25 bp, Homo sapien
tgggtctgaggatctcggatatggg

SEQ ID NO: 2582638 - DNA, 25 bp, Homo sapien
cggtgtcggccaatatcagagggtt

SEQ ID NO: 2582639 - DNA, 25 bp, Homo sapien
agaactcggtgtagcatgcagccca

SEQ ID NO: 2582640 - DNA, 25 bp, Homo sapien
gcgagtcagacggtgtcggccaata

SEQ ID NO: 2582641 - DNA, 25 bp, Homo sapien
ggaccacaggcatggctcagcccac

SEQ ID NO: 2582642 - DNA, 25 bp, Homo sapien
ggagaagataaggaccacaggcatg

SEQ ID NO: 2582643 - DNA, 25 bp, Homo sapien
gggagaagataaggaccacaggcat

SEQ ID NO: 2582644 - DNA, 25 bp, Homo sapien
ctctttctgactctcagggcatttt

SEQ ID NO: 2582645 - DNA, 25 bp, Homo sapien
tgccgggtccggaggctcctgctca

SEQ ID NO: 2582646 - DNA, 25 bp, Homo sapien
ggtctaatccgtcctcgccgcccca

SEQ ID NO: 2582647 - DNA, 25 bp, Homo sapien
caggcagctgctgaacggaagcccg

SEQ ID NO: 2582648 - DNA, 25 bp, Homo sapien
tggaaagcgctcttcagttcggatc

SEQ ID NO: 2582649 - DNA, 25 bp, Homo sapien
cagaagttagggcaagtgagtccac

SEQ ID NO: 2582650 - DNA, 25 bp, Homo sapien
cattcatgctgggattggccgtgcg

SEQ ID NO: 2582651 - DNA, 25 bp, Homo sapien
tgttccaaaggcaaaccagcgcatc

SEQ ID NO: 2582652 - DNA, 25 bp, Homo sapien
ctgttaactgattgactataaggag

SEQ ID NO: 2582653 - DNA, 25 bp, Homo sapien
agggcagtggttctcttagactagg

SEQ ID NO: 2582654 - DNA, 25 bp, Homo sapien
tgactataaggaggtcatttgaggg

SEQ ID NO: 2582655 - DNA, 25 bp, Homo sapien
ttagactaggacactgtgcatgttc

SEQ ID NO: 2582656 - DNA, 25 bp, Homo sapien
agttagccagtgagctttttgtctg

SEQ ID NO: 2582657 - DNA, 25 bp, Homo sapien
gttagccagtgagctttttgtctga

SEQ ID NO: 2582658 - DNA, 25 bp, Homo sapien
ttagccagtgagctttttgtctgag

SEQ ID NO: 2582659 - DNA, 25 bp, Homo sapien
cgtttctgtactgcctaaagccggg

SEQ ID NO: 2582660 - DNA, 25 bp, Homo sapien
gggccgcaggtgctctgacggtggc

SEQ ID NO: 2582661 - DNA, 25 bp, Homo sapien
tgacggtggcccacgttaggcagac

SEQ ID NO: 2582662 - DNA, 25 bp, Homo sapien
ggctgccaagccgtttctgtactgc

SEQ ID NO: 2582663 - DNA, 25 bp, Homo sapien
cagaacccgcattctgggtgtgaag

SEQ ID NO: 2582664 - DNA, 25 bp, Homo sapien
ctgagcccagaacccgcattctggg

SEQ ID NO: 2582665 - DNA, 25 bp, Homo sapien
ccgcattctgggtgtgaagtgactc

SEQ ID NO: 2582666 - DNA, 25 bp, Homo sapien
cattctgggtgtgaagtgactccac

SEQ ID NO: 2582667 - DNA, 25 bp, Homo sapien
tgtggctgcaggtaagttagtgaat

SEQ ID NO: 2582668 - DNA, 25 bp, Homo sapien
caggtaagttagtgaatctctctga

SEQ ID NO: 2582669 - DNA, 25 bp, Homo sapien
taagttagtgaatctctctgagctc

SEQ ID NO: 2582670 - DNA, 25 bp, Homo sapien
gctgcaggtaagttagtgaatctct

SEQ ID NO: 2582671 - DNA, 25 bp, Homo sapien
ccaaatacaagcagatgacttcgtt

SEQ ID NO: 2582672 - DNA, 25 bp, Homo sapien
tggccgagctgcatccaaatacaag

SEQ ID NO: 2582673 - DNA, 25 bp, Homo sapien
tcagcactcttcatggccgagctgc

SEQ ID NO: 2582674 - DNA, 25 bp, Homo sapien
taataagtctctcaaccagctgtct

SEQ ID NO: 2582675 - DNA, 25 bp, Homo sapien
cctgtctatgacactctgtgagttc

SEQ ID NO: 2582676 - DNA, 25 bp, Homo sapien
actcagcaggctgtaagttggaaca

SEQ ID NO: 2582677 - DNA, 25 bp, Homo sapien
tggccaaatcccacaggaacgttga

SEQ ID NO: 2582678 - DNA, 25 bp, Homo sapien
ggaacgttgacaggcacacggtttc

SEQ ID NO: 2582679 - DNA, 25 bp, Homo sapien
cccgcacccctgccagagctggcct

SEQ ID NO: 2582680 - DNA, 25 bp, Homo sapien
gcacccctgccagagctggcctcat

SEQ ID NO: 2582681 - DNA, 25 bp, Homo sapien
cttggcccgcacccctgccagagct

SEQ ID NO: 2582682 - DNA, 25 bp, Homo sapien
ttggcccgcacccctgccagagctg

SEQ ID NO: 2582683 - DNA, 25 bp, Homo sapien
ttgcaaaatcggtgctccctcctgg

SEQ ID NO: 2582684 - DNA, 25 bp, Homo sapien
tgataataggagctggtggccaccc

SEQ ID NO: 2582685 - DNA, 25 bp, Homo sapien
ttgggaccgcattgcacagagcact

SEQ ID NO: 2582686 - DNA, 25 bp, Homo sapien
ggaggacgctcagtgcatagaaccc

SEQ ID NO: 2582687 - DNA, 25 bp, Homo sapien
gggcttttgagctggcttggctcct

SEQ ID NO: 2582688 - DNA, 25 bp, Homo sapien
tgccggtaacgtgaaaccactggac

SEQ ID NO: 2582689 - DNA, 25 bp, Homo sapien
cattgccctggtggttgccggtaac

SEQ ID NO: 2582690 - DNA, 25 bp, Homo sapien
ggactggcctagctcatcctcgggg

SEQ ID NO: 2582691 - DNA, 25 bp, Homo sapien
tgtgtccagccccaagagtctggct

SEQ ID NO: 2582692 - DNA, 25 bp, Homo sapien
cgagttcttcccgttacagatatgt

SEQ ID NO: 2582693 - DNA, 25 bp, Homo sapien
ccagttccacatttcagggaggtga

SEQ ID NO: 2582694 - DNA, 25 bp, Homo sapien
agaatcaaccctgtccggtccccag

SEQ ID NO: 2582695 - DNA, 25 bp, Homo sapien
tgcagcagagaacacccaggcgcca

SEQ ID NO: 2582696 - DNA, 25 bp, Homo sapien
cagcagagaacacccaggcgccagt

SEQ ID NO: 2582697 - DNA, 25 bp, Homo sapien
tgtgcagcagagaacacccaggcgc

SEQ ID NO: 2582698 - DNA, 25 bp, Homo sapien
ctgtgcagcagagaacacccaggcg

SEQ ID NO: 2582699 - DNA, 25 bp, Homo sapien
tgaaatggaaatgtgtcctcacgtc

SEQ ID NO: 2582700 - DNA, 25 bp, Homo sapien
ttgaaatggaaatgtgtcctcacgt

SEQ ID NO: 2582701 - DNA, 25 bp, Homo sapien
caccaggctgcagcgtggcttgcat

SEQ ID NO: 2582702 - DNA, 25 bp, Homo sapien
gagtgggatgcgttgtcaccacttt

SEQ ID NO: 2582703 - DNA, 25 bp, Homo sapien
ggtttggagacgacacaatgcatag

SEQ ID NO: 2582704 - DNA, 25 bp, Homo sapien
catagtttctgtttggctgcatgcg

SEQ ID NO: 2582705 - DNA, 25 bp, Homo sapien
gccctgctcttgtttgcccgaaagg

SEQ ID NO: 2582706 - DNA, 25 bp, Homo sapien
cactgtctcaattcagacatgcgaa

SEQ ID NO: 2582707 - DNA, 25 bp, Homo sapien
agctttaaatcacaacactgtctca

SEQ ID NO: 2582708 - DNA, 25 bp, Homo sapien
gacatgcgaatgtccagcctaagac

SEQ ID NO: 2582709 - DNA, 25 bp, Homo sapien
tgggctgcatagatacacgtgtgta

SEQ ID NO: 2582710 - DNA, 25 bp, Homo sapien
cacaagaagagtccgtagcagggag

SEQ ID NO: 2582711 - DNA, 25 bp, Homo sapien
aaacccacaagaagagtccgtagca

SEQ ID NO: 2582712 - DNA, 25 bp, Homo sapien
ccgtagcagggaggcatcgaggcag

SEQ ID NO: 2582713 - DNA, 25 bp, Homo sapien
acccacaagaagagtccgtagcagg

SEQ ID NO: 2582714 - DNA, 25 bp, Homo sapien
cacaagaagagtccgtagcagggag

SEQ ID NO: 2582715 - DNA, 25 bp, Homo sapien
ccgtagcagggaggcatcgaggcag

SEQ ID NO: 2582716 - DNA, 25 bp, Homo sapien
aaacccacaagaagagtccgtagca

SEQ ID NO: 2582717 - DNA, 25 bp, Homo sapien
acccacaagaagagtccgtagcagg

SEQ ID NO: 2582718 - DNA, 25 bp, Homo sapien
caaacatgcaatttagtcggaaact

SEQ ID NO: 2582719 - DNA, 25 bp, Homo sapien
tccctcgtggagcttcagtgtcaag

SEQ ID NO: 2582720 - DNA, 25 bp, Homo sapien
caacaactcctgttatgcttgaagg

SEQ ID NO: 2582721 - DNA, 25 bp, Homo sapien
taccagagtgggtacagtagaaagg

SEQ ID NO: 2582722 - DNA, 25 bp, Homo sapien
ccatgtgcactggtggttccgggag

SEQ ID NO: 2582723 - DNA, 25 bp, Homo sapien
ccggccaccagcagtaatggacgct

SEQ ID NO: 2582724 - DNA, 25 bp, Homo sapien
agagggacagcaacccacccttgca

SEQ ID NO: 2582725 - DNA, 25 bp, Homo sapien
ggacgctctccgacttccagctttt

SEQ ID NO: 2582726 - DNA, 25 bp, Homo sapien
cctcggcggctttcttatgactgga

SEQ ID NO: 2582727 - DNA, 25 bp, Homo sapien
cctgggctcccaagtggatgtgcga

SEQ ID NO: 2582728 - DNA, 25 bp, Homo sapien
tcctgagtgggtgtgtgaccagccc

SEQ ID NO: 2582729 - DNA, 25 bp, Homo sapien
gctggccctggaattgctggagcca

SEQ ID NO: 2582730 - DNA, 25 bp, Homo sapien
cagtaatcctccaaggaggtacagg

SEQ ID NO: 2582731 - DNA, 25 bp, Homo sapien
tttattgtactcacaagacatactg

SEQ ID NO: 2582732 - DNA, 25 bp, Homo sapien
tacgtgcaaattctgacccaggcca

SEQ ID NO: 2582733 - DNA, 25 bp, Homo sapien
cacaagacatactgtttgctgagtc

SEQ ID NO: 2582734 - DNA, 25 bp, Homo sapien
cagccatgctgagtctcgtggagac

SEQ ID NO: 2582735 - DNA, 25 bp, Homo sapien
tactcaagtatctttggccccagcc

SEQ ID NO: 2582736 - DNA, 25 bp, Homo sapien
tttgggcataggagacataactggg

SEQ ID NO: 2582737 - DNA, 25 bp, Homo sapien
cttttcaagggccactaagctgctg

SEQ ID NO: 2582738 - DNA, 25 bp, Homo sapien
tcttcgggaagggacgcatggccca

SEQ ID NO: 2582739 - DNA, 25 bp, Homo sapien
tttctctctgggaagccgccggcca

SEQ ID NO: 2582740 - DNA, 25 bp, Homo sapien
tcgcctcttcgggaagggacgcatg

SEQ ID NO: 2582741 - DNA, 25 bp, Homo sapien
tttcgcctcttcgggaagggacgca

SEQ ID NO: 2582742 - DNA, 25 bp, Homo sapien
tgttgcacagcgaccgcagacagcg

SEQ ID NO: 2582743 - DNA, 25 bp, Homo sapien
ttgcactcagcagggtcccggaagg

SEQ ID NO: 2582744 - DNA, 25 bp, Homo sapien
agacagcgcatctccaacgggaatg

SEQ ID NO: 2582745 - DNA, 25 bp, Homo sapien
aacaggctccactgctgttgcacag

SEQ ID NO: 2582746 - DNA, 25 bp, Homo sapien
agaggccggccgctgacagggctgc

SEQ ID NO: 2582747 - DNA, 25 bp, Homo sapien
gagactccctggagagcggtcccgc

SEQ ID NO: 2582748 - DNA, 25 bp, Homo sapien
ccaggcgagaggaaagcgtttcaca

SEQ ID NO: 2582749 - DNA, 25 bp, Homo sapien
ctcccgcacttccaccgagaaaaag

SEQ ID NO: 2582750 - DNA, 25 bp, Homo sapien
gtaaaggccaagagaaactcagtct

SEQ ID NO: 2582751 - DNA, 25 bp, Homo sapien
agcactgccacccctggatcttggg

SEQ ID NO: 2582752 - DNA, 25 bp, Homo sapien
ttacagagcagggtgggtaaaggcc

SEQ ID NO: 2582753 - DNA, 25 bp, Homo sapien
ctcagtctcaggagaggcaccgtgg

SEQ ID NO: 2582754 - DNA, 25 bp, Homo sapien
aagggccttgatgcgaaaacaggac

SEQ ID NO: 2582755 - DNA, 25 bp, Homo sapien
tgatgcccagcaaggatctcaccac

SEQ ID NO: 2582756 - DNA, 25 bp, Homo sapien
ccagcaaggatctcaccacaaagct

SEQ ID NO: 2582757 - DNA, 25 bp, Homo sapien
gctaagggccttgatgcgaaaacag

SEQ ID NO: 2582758 - DNA, 25 bp, Homo sapien
gttgacttgaactcatcagtgtgtt

SEQ ID NO: 2582759 - DNA, 25 bp, Homo sapien
tggtcctgtgttgacttgaactcat

SEQ ID NO: 2582760 - DNA, 25 bp, Homo sapien
tgtcttgtgtgttttctcgcacacc

SEQ ID NO: 2582761 - DNA, 25 bp, Homo sapien
aggtggctttggtaacgtgctctga

SEQ ID NO: 2582762 - DNA, 25 bp, Homo sapien
gtgagcacatgtgactctgcgctga

SEQ ID NO: 2582763 - DNA, 25 bp, Homo sapien
tgactctgcgctgacccgttgccat

SEQ ID NO: 2582764 - DNA, 25 bp, Homo sapien
agcacatgtgactctgcgctgaccc

SEQ ID NO: 2582765 - DNA, 25 bp, Homo sapien
acatgtgactctgcgctgacccgtt

SEQ ID NO: 2582766 - DNA, 25 bp, Homo sapien
ttaaaataactgcacgtgggctcca

SEQ ID NO: 2582767 - DNA, 25 bp, Homo sapien
gggctccaggcgtattctaaacttg

SEQ ID NO: 2582768 - DNA, 25 bp, Homo sapien
tcaaaaggtaaactgtggccacctg

SEQ ID NO: 2582769 - DNA, 25 bp, Homo sapien
gcccagacagggtgtttacaaagaa

SEQ ID NO: 2582770 - DNA, 25 bp, Homo sapien
tgcaggtggtgatgggccgcgcagt

SEQ ID NO: 2582771 - DNA, 25 bp, Homo sapien
tcactggagcacgttcagggcctgc

SEQ ID NO: 2582772 - DNA, 25 bp, Homo sapien
cctggagctcttcaacgtgcttcat

SEQ ID NO: 2582773 - DNA, 25 bp, Homo sapien
cgcgcagtcgggaccctggagctct

SEQ ID NO: 2582774 - DNA, 25 bp, Homo sapien
ccagagtgcgcgttttcaggacagc

SEQ ID NO: 2582775 - DNA, 25 bp, Homo sapien
tgatatgtcccaaaacggcctctcg

SEQ ID NO: 2582776 - DNA, 25 bp, Homo sapien
tagacagcgggtgcgtaagtcagcc

SEQ ID NO: 2582777 - DNA, 25 bp, Homo sapien
caaaggccccagtgttacgtgaagc

SEQ ID NO: 2582778 - DNA, 25 bp, Homo sapien
tcatccgccacctgttttgttattt

SEQ ID NO: 2582779 - DNA, 25 bp, Homo sapien
ctcatccgccacctgttttgttatt

SEQ ID NO: 2582780 - DNA, 25 bp, Homo sapien
tttgacagagacgtgggctgacctg

SEQ ID NO: 2582781 - DNA, 25 bp, Homo sapien
caagaataactgcagcgtagggacc

SEQ ID NO: 2582782 - DNA, 25 bp, Homo sapien
tagggaccgaatagtgcacgctgca

SEQ ID NO: 2582783 - DNA, 25 bp, Homo sapien
taactgaacggcagcgtgacagcct

SEQ ID NO: 2582784 - DNA, 25 bp, Homo sapien
tggacgtctttagggtctctgccca

SEQ ID NO: 2582785 - DNA, 25 bp, Homo sapien
catgaagtgcatctatggcattggg

SEQ ID NO: 2582786 - DNA, 25 bp, Homo sapien
agagcaggggtcaatccatggacgt

SEQ ID NO: 2582787 - DNA, 25 bp, Homo sapien
agagcgccatgagctgggacaggag

SEQ ID NO: 2582788 - DNA, 25 bp, Homo sapien
aagctgagtccatgcagtgtccggt

SEQ ID NO: 2582789 - DNA, 25 bp, Homo sapien
ccatacccatcgcagtgtggaagct

SEQ ID NO: 2582790 - DNA, 25 bp, Homo sapien
ttgcccctggtagtgcaaggaccag

SEQ ID NO: 2582791 - DNA, 25 bp, Homo sapien
ggctcgccgaaagccatccaagagg

SEQ ID NO: 2582792 - DNA, 25 bp, Homo sapien
aaaagtcacggcctcagctggcaga

SEQ ID NO: 2582793 - DNA, 25 bp, Homo sapien
tcagacgtgatagagtccagacaca

SEQ ID NO: 2582794 - DNA, 25 bp, Homo sapien
tgttgtcccataagaagagcccctc

SEQ ID NO: 2582795 - DNA, 25 bp, Homo sapien
tgtgtgactcaaccacgccataaga

SEQ ID NO: 2582796 - DNA, 25 bp, Homo sapien
tgtcgaaacgcacagcaacatggcg

SEQ ID NO: 2582797 - DNA, 25 bp, Homo sapien
caggaatgcgtgtgccctgtttttc

SEQ ID NO: 2582798 - DNA, 25 bp, Homo sapien
ggccttttggtgcaatcttatcagg

SEQ ID NO: 2582799 - DNA, 25 bp, Homo sapien
cactccacaggaatgtgtcgaaacg

SEQ ID NO: 2582800 - DNA, 25 bp, Homo sapien
gaccggttatcaccctggacacagg

SEQ ID NO: 2582801 - DNA, 25 bp, Homo sapien
catgatgtcagccaaggatggaagc

SEQ ID NO: 2582802 - DNA, 25 bp, Homo sapien
tccccaggaaggctaagcacgaagt

SEQ ID NO: 2582803 - DNA, 25 bp, Homo sapien
tgcgatcgaggccagcaacattggt

SEQ ID NO: 2582804 - DNA, 25 bp, Homo sapien
ttggaacctcttttctgaaagcaca

SEQ ID NO: 2582805 - DNA, 25 bp, Homo sapien
ttgtgaaaactaaatggctgccctt

SEQ ID NO: 2582806 - DNA, 25 bp, Homo sapien
cagttttccgcggagacctggaagg

SEQ ID NO: 2582807 - DNA, 25 bp, Homo sapien
tgaaagcacacaggaatcttcagtt

SEQ ID NO: 2582808 - DNA, 25 bp, Homo sapien
catctacggccacactgtcatttac

SEQ ID NO: 2582809 - DNA, 25 bp, Homo sapien
cactgtcatttacacccactgccac

SEQ ID NO: 2582810 - DNA, 25 bp, Homo sapien
tctacggccacactgtcatttacac

SEQ ID NO: 2582811 - DNA, 25 bp, Homo sapien
tgccatctacggccacactgtcatt

SEQ ID NO: 2582812 - DNA, 25 bp, Homo sapien
tctacagtggcgctaacatctacat

SEQ ID NO: 2582813 - DNA, 25 bp, Homo sapien
acatctacattcacgcggccatcta

SEQ ID NO: 2582814 - DNA, 25 bp, Homo sapien
tgcactgccatcgttatcacgtggg

SEQ ID NO: 2582815 - DNA, 25 bp, Homo sapien
tagtcgcactaccacctacagtcga

SEQ ID NO: 2582816 - DNA, 25 bp, Homo sapien
gactgcaggactgtgaactttgccc

SEQ ID NO: 2582817 - DNA, 25 bp, Homo sapien
cttcagagcatatgtaaggaccgtc

SEQ ID NO: 2582818 - DNA, 25 bp, Homo sapien
tctcttgaggataggagcatgctgc

SEQ ID NO: 2582819 - DNA, 25 bp, Homo sapien
cgtgattagccgtgtctgtgcccca

SEQ ID NO: 2582820 - DNA, 25 bp, Homo sapien
gcacagcacaaaccatagccacccc

SEQ ID NO: 2582821 - DNA, 25 bp, Homo sapien
agacatagatttctatcagccagac

SEQ ID NO: 2582822 - DNA, 25 bp, Homo sapien
tagatttctatcagccagacgtgtg

SEQ ID NO: 2582823 - DNA, 25 bp, Homo sapien
tctatcagccagacgtgtgcacagc

SEQ ID NO: 2582824 - DNA, 25 bp, Homo sapien
aggcgcatcggagccctcactgctg

SEQ ID NO: 2582825 - DNA, 25 bp, Homo sapien
aatccagggctccttagcatatgaa

SEQ ID NO: 2582826 - DNA, 25 bp, Homo sapien
cttagcatatgaattgaggcgcatc

SEQ ID NO: 2582827 - DNA, 25 bp, Homo sapien
tgaattgaggcgcatcggagccctc

SEQ ID NO: 2582828 - DNA, 25 bp, Homo sapien
tgggatccacaccagtcggaagaaa

SEQ ID NO: 2582829 - DNA, 25 bp, Homo sapien
gggtcccgggtcagtgttcacagag

SEQ ID NO: 2582830 - DNA, 25 bp, Homo sapien
tgtctgggatccacaccagtcggaa

SEQ ID NO: 2582831 - DNA, 25 bp, Homo sapien
tctgggatccacaccagtcggaaga

SEQ ID NO: 2582832 - DNA, 25 bp, Homo sapien
tgccgaacactaaacaggatgatgt

SEQ ID NO: 2582833 - DNA, 25 bp, Homo sapien
aggcaccctcatgccgaacactaaa

SEQ ID NO: 2582834 - DNA, 25 bp, Homo sapien
agatttatgcaggtcacgagcttga

SEQ ID NO: 2582835 - DNA, 25 bp, Homo sapien
atttggagatttatgcaggtcacga

SEQ ID NO: 2582836 - DNA, 25 bp, Homo sapien
gctcagctcagtgtctatccaggca

SEQ ID NO: 2582837 - DNA, 25 bp, Homo sapien
ccaggcactgaaggttcggatgcaa

SEQ ID NO: 2582838 - DNA, 25 bp, Homo sapien
ggatgcaagcactctccagcgtagg

SEQ ID NO: 2582839 - DNA, 25 bp, Homo sapien
aatgcacactgagcaaccgtgcagc

SEQ ID NO: 2582840 - DNA, 25 bp, Homo sapien
agccgtccttggtcccgtctcagca

SEQ ID NO: 2582841 - DNA, 25 bp, Homo sapien
tgcagccgtccttggtcccgtctca

SEQ ID NO: 2582842 - DNA, 25 bp, Homo sapien
cgtctcagcaggcattcccaacaga

SEQ ID NO: 2582843 - DNA, 25 bp, Homo sapien
tcagcaggcattcccaacagagacc

SEQ ID NO: 2582844 - DNA, 25 bp, Homo sapien
tccactgataaagggccaagtccaa

SEQ ID NO: 2582845 - DNA, 25 bp, Homo sapien
tgataaagggccaagtccaaaggat

SEQ ID NO: 2582846 - DNA, 25 bp, Homo sapien
gccaagtccaaaggattcctgcctt

SEQ ID NO: 2582847 - DNA, 25 bp, Homo sapien
aagggccaagtccaaaggattcctg

SEQ ID NO: 2582848 - DNA, 25 bp, Homo sapien
tgggaagatgttcgcccaagcgctt

SEQ ID NO: 2582849 - DNA, 25 bp, Homo sapien
tgcagatagaaacgttgtccccact

SEQ ID NO: 2582850 - DNA, 25 bp, Homo sapien
tccaccaaagggagaagtcggacca

SEQ ID NO: 2582851 - DNA, 25 bp, Homo sapien
catgagcatcccgttccacgtggtt

SEQ ID NO: 2582852 - DNA, 25 bp, Homo sapien
tgtcgaaacctatccccgaagctca

SEQ ID NO: 2582853 - DNA, 25 bp, Homo sapien
tggccctgtcgaaacctatccccga

SEQ ID NO: 2582854 - DNA, 25 bp, Homo sapien
ctatccccgaagctcagtccaggtg

SEQ ID NO: 2582855 - DNA, 25 bp, Homo sapien
aagctcagtccaggtgcagtttccc

SEQ ID NO: 2582856 - DNA, 25 bp, Homo sapien
acttgtcagttagccatagactgcc

SEQ ID NO: 2582857 - DNA, 25 bp, Homo sapien
gctctgtatcttgtgtctaaaatgg

SEQ ID NO: 2582858 - DNA, 25 bp, Homo sapien
atagactgcccgcacgcagcagtgc

SEQ ID NO: 2582859 - DNA, 25 bp, Homo sapien
tcctctctgtggtgacttgtcagtt

SEQ ID NO: 2582860 - DNA, 25 bp, Homo sapien
gctccatcctctggtgtaacctcga

SEQ ID NO: 2582861 - DNA, 25 bp, Homo sapien
ttaacatggttaacaacagcggctc

SEQ ID NO: 2582862 - DNA, 25 bp, Homo sapien
cacagttacttgagcctcacggaag

SEQ ID NO: 2582863 - DNA, 25 bp, Homo sapien
tctggtgtaacctcgagagcgagtg

SEQ ID NO: 2582864 - DNA, 25 bp, Homo sapien
aaggaactttcccacatcgcttcac

SEQ ID NO: 2582865 - DNA, 25 bp, Homo sapien
tgtgtgtgatggtgcccggcacatc

SEQ ID NO: 2582866 - DNA, 25 bp, Homo sapien
ctggtctggcaaataaataagtggt

SEQ ID NO: 2582867 - DNA, 25 bp, Homo sapien
gattttgacagtggaagttagggca

SEQ ID NO: 2582868 - DNA, 25 bp, Homo sapien
gatcagaaatcgcaacttttgcgtg

SEQ ID NO: 2582869 - DNA, 25 bp, Homo sapien
tggcctcccatcgtcccaagaatga

SEQ ID NO: 2582870 - DNA, 25 bp, Homo sapien
caacttttgcgtggagatcctgggc

SEQ ID NO: 2582871 - DNA, 25 bp, Homo sapien
ctgttcagaccctttgtgactggac

SEQ ID NO: 2582872 - DNA, 25 bp, Homo sapien
cgctcatcacacaggttggataaga

SEQ ID NO: 2582873 - DNA, 25 bp, Homo sapien
ctgacgttgtaattagcacagaatt

SEQ ID NO: 2582874 - DNA, 25 bp, Homo sapien
tggataagatcgacaggaaaaaccc

SEQ ID NO: 2582875 - DNA, 25 bp, Homo sapien
gaacagggtgcctgctcgctcatca

SEQ ID NO: 2582876 - DNA, 25 bp, Homo sapien
gattccgccctgaaggtctgcgttc

SEQ ID NO: 2582877 - DNA, 25 bp, Homo sapien
tcccgagacagcctctgtttcaaaa

SEQ ID NO: 2582878 - DNA, 25 bp, Homo sapien
gcagatccagattcaggattccgcc

SEQ ID NO: 2582879 - DNA, 25 bp, Homo sapien
aggtctgcgttccctcccgagacag

SEQ ID NO: 2582880 - DNA, 25 bp, Homo sapien
gcgtgtctccacctgcgtgattcgg

SEQ ID NO: 2582881 - DNA, 25 bp, Homo sapien
acctgcgtgattcggtgaaggccca

SEQ ID NO: 2582882 - DNA, 25 bp, Homo sapien
tctccacctgcgtgattcggtgaag

SEQ ID NO: 2582883 - DNA, 25 bp, Homo sapien
ccagcgtgtctccacctgcgtgatt

SEQ ID NO: 2582884 - DNA, 25 bp, Homo sapien
tcacagtggcagaaaccatggctgg

SEQ ID NO: 2582885 - DNA, 25 bp, Homo sapien
ctcacagtggcagaaaccatggctg

SEQ ID NO: 2582886 - DNA, 25 bp, Homo sapien
tttaacgccagctccgcataccaag

SEQ ID NO: 2582887 - DNA, 25 bp, Homo sapien
gaagacagatttaacgccagctccg

SEQ ID NO: 2582888 - DNA, 25 bp, Homo sapien
gaaacagaagaagtgctggcaatat

SEQ ID NO: 2582889 - DNA, 25 bp, Homo sapien
ctgaaacagaagaagtgctggcaat

SEQ ID NO: 2582890 - DNA, 25 bp, Homo sapien
tgaaacagaagaagtgctggcaata

SEQ ID NO: 2582891 - DNA, 25 bp, Homo sapien
cagatggatagtaaggaaatttaac

SEQ ID NO: 2582892 - DNA, 25 bp, Homo sapien
tggcaggcatgcctactgtaagctg

SEQ ID NO: 2582893 - DNA, 25 bp, Homo sapien
gagtcgtcaaccttcagatggatag

SEQ ID NO: 2582894 - DNA, 25 bp, Homo sapien
tcataaataaagacacccagcttcc

SEQ ID NO: 2582895 - DNA, 25 bp, Homo sapien
caggatgtgggagtggcagggatgc

SEQ ID NO: 2582896 - DNA, 25 bp, Homo sapien
tcagcatgtgttgagttgcaggtga

SEQ ID NO: 2582897 - DNA, 25 bp, Homo sapien
ccttccacaggatgtgggagtggca

SEQ ID NO: 2582898 - DNA, 25 bp, Homo sapien
atgtgggagtggcagggatgcccag

SEQ ID NO: 2582899 - DNA, 25 bp, Homo sapien
gagatcctccttagaagatattggg

SEQ ID NO: 2582900 - DNA, 25 bp, Homo sapien
gcattgaggagatcctccttagaag

SEQ ID NO: 2582901 - DNA, 25 bp, Homo sapien
aaacacttgcattgaggagatcctc

SEQ ID NO: 2582902 - DNA, 25 bp, Homo sapien
ttgggcccaaacacttgcattgagg

SEQ ID NO: 2582903 - DNA, 25 bp, Homo sapien
ccaggcttctggggagtctggctgg

SEQ ID NO: 2582904 - DNA, 25 bp, Homo sapien
aggcttctggggagtctggctgggg

SEQ ID NO: 2582905 - DNA, 25 bp, Homo sapien
gcttctggggagtctggctgggggt

SEQ ID NO: 2582906 - DNA, 25 bp, Homo sapien
cttctggggagtctggctgggggtc

SEQ ID NO: 2582907 - DNA, 25 bp, Homo sapien
agcctttgtgcccaagtccctgtca

SEQ ID NO: 2582908 - DNA, 25 bp, Homo sapien
catgttggtgttcgcagcttctgaa

SEQ ID NO: 2582909 - DNA, 25 bp, Homo sapien
cacctgcccgggatttgcttccaga

SEQ ID NO: 2582910 - DNA, 25 bp, Homo sapien
agtatgtctccagatgtccaccagg

SEQ ID NO: 2582911 - DNA, 25 bp, Homo sapien
taaattaatagagagagggcaggca

SEQ ID NO: 2582912 - DNA, 25 bp, Homo sapien
ctgacttttgtgtcccaccgaggaa

SEQ ID NO: 2582913 - DNA, 25 bp, Homo sapien
caggtgatgaaattggcacagaaca

SEQ ID NO: 2582914 - DNA, 25 bp, Homo sapien
cagaacaccaaaggatggagctgag

SEQ ID NO: 2582915 - DNA, 25 bp, Homo sapien
gtgaaacagtgaggctccctcaggc

SEQ ID NO: 2582916 - DNA, 25 bp, Homo sapien
tttcagacggatcctcaaagaggca

SEQ ID NO: 2582917 - DNA, 25 bp, Homo sapien
ggcccaggtgtgaagtccccactgt

SEQ ID NO: 2582918 - DNA, 25 bp, Homo sapien
tcacggcgttttctactccagctct

SEQ ID NO: 2582919 - DNA, 25 bp, Homo sapien
atttgaggttagatgggctgagcgt

SEQ ID NO: 2582920 - DNA, 25 bp, Homo sapien
gaaagaatctgtcacatccttggga

SEQ ID NO: 2582921 - DNA, 25 bp, Homo sapien
gagggccaccaggattaggttagat

SEQ ID NO: 2582922 - DNA, 25 bp, Homo sapien
ggctgagcgtggcatagtcataaat

SEQ ID NO: 2582923 - DNA, 25 bp, Homo sapien
acagccagggaccaattcctcatta

SEQ ID NO: 2582924 - DNA, 25 bp, Homo sapien
atgattctatctcactcacgactgc

SEQ ID NO: 2582925 - DNA, 25 bp, Homo sapien
caagggcgtggagacaacgacagcc

SEQ ID NO: 2582926 - DNA, 25 bp, Homo sapien
gcatgggctgtaaggcagactgtcc

SEQ ID NO: 2582927 - DNA, 25 bp, Homo sapien
taaccgagtccgtgtagtccgtgtg

SEQ ID NO: 2582928 - DNA, 25 bp, Homo sapien
ccatgatgtcgagacactgctacgc

SEQ ID NO: 2582929 - DNA, 25 bp, Homo sapien
catgacgtcgagacacagtgacaca

SEQ ID NO: 2582930 - DNA, 25 bp, Homo sapien
ccatgatgtcgagatgctgtgacac

SEQ ID NO: 2582931 - DNA, 25 bp, Homo sapien
tttctggtctgttctccgaggtgcc

SEQ ID NO: 2582932 - DNA, 25 bp, Homo sapien
tgggccctgtatggagcttgctgag

SEQ ID NO: 2582933 - DNA, 25 bp, Homo sapien
tgtatggagcttgctgagatttctg

SEQ ID NO: 2582934 - DNA, 25 bp, Homo sapien
ttctggtctgttctccgaggtgcct

SEQ ID NO: 2582935 - DNA, 25 bp, Homo sapien
caggggacaacgggagcaacacctt

SEQ ID NO: 2582936 - DNA, 25 bp, Homo sapien
tgcatcacccagggcagggactcta

SEQ ID NO: 2582937 - DNA, 25 bp, Homo sapien
tgacttagggggttgagctgcttcc

SEQ ID NO: 2582938 - DNA, 25 bp, Homo sapien
gggactctacgaggcacagcatcct

SEQ ID NO: 2582939 - DNA, 25 bp, Homo sapien
ggacacagcaaacctcagccagctc

SEQ ID NO: 2582940 - DNA, 25 bp, Homo sapien
gagcagacttcaggccactgtggct

SEQ ID NO: 2582941 - DNA, 25 bp, Homo sapien
gtgggctggccccagtgatgaccag

SEQ ID NO: 2582942 - DNA, 25 bp, Homo sapien
agaagcctgagcagacttcaggcca

SEQ ID NO: 2582943 - DNA, 25 bp, Homo sapien
ctggtcctggtcctgaatagtcagg

SEQ ID NO: 2582944 - DNA, 25 bp, Homo sapien
agcggcatccttgggtcagctgaga

SEQ ID NO: 2582945 - DNA, 25 bp, Homo sapien
gattcctgacactgcgaggctgtgt

SEQ ID NO: 2582946 - DNA, 25 bp, Homo sapien
acctgtatgggcctggagcgttcgc

SEQ ID NO: 2582947 - DNA, 25 bp, Homo sapien
catggtggtccctgaacctgtatgg

SEQ ID NO: 2582948 - DNA, 25 bp, Homo sapien
tgtcaagcagtcccgtcctccagac

SEQ ID NO: 2582949 - DNA, 25 bp, Homo sapien
gcagtcccgtcctccagacttgaac

SEQ ID NO: 2582950 - DNA, 25 bp, Homo sapien
gtcccgtcctccagacttgaacatc

SEQ ID NO: 2582951 - DNA, 25 bp, Homo sapien
gtgtcaagcagtcccgtcctccaga

SEQ ID NO: 2582952 - DNA, 25 bp, Homo sapien
ctcttttggaatgggccagtcctga

SEQ ID NO: 2582953 - DNA, 25 bp, Homo sapien
gggcaagtcaggtctccgccttcac

SEQ ID NO: 2582954 - DNA, 25 bp, Homo sapien
ggccagtcctgatggtgtcagtctt

SEQ ID NO: 2582955 - DNA, 25 bp, Homo sapien
ggcttcgggcaagtcaggtctccgc

SEQ ID NO: 2582956 - DNA, 25 bp, Homo sapien
cggatgtaatccctgaaggttaatg

SEQ ID NO: 2582957 - DNA, 25 bp, Homo sapien
cagttccggatgtaatccctgaagg

SEQ ID NO: 2582958 - DNA, 25 bp, Homo sapien
ctggcagttccggatgtaatccctg

SEQ ID NO: 2582959 - DNA, 25 bp, Homo sapien
ttccggatgtaatccctgaaggtta

SEQ ID NO: 2582960 - DNA, 25 bp, Homo sapien
ttctgagagctctgtgcatggccct

SEQ ID NO: 2582961 - DNA, 25 bp, Homo sapien
tctgagagctctgtgcatggccctt

SEQ ID NO: 2582962 - DNA, 25 bp, Homo sapien
ccttctgagagctctgtgcatggcc

SEQ ID NO: 2582963 - DNA, 25 bp, Homo sapien
gccttctgagagctctgtgcatggc

SEQ ID NO: 2582964 - DNA, 25 bp, Homo sapien
aggcggtttgctgctctgggcttcc

SEQ ID NO: 2582965 - DNA, 25 bp, Homo sapien
ctgggcaaggcggtttgctgctctg

SEQ ID NO: 2582966 - DNA, 25 bp, Homo sapien
tgtttctatttctgctctccaagtt

SEQ ID NO: 2582967 - DNA, 25 bp, Homo sapien
tcccaggactctgggctttccttgt

SEQ ID NO: 2582968 - DNA, 25 bp, Homo sapien
ttcctgcctcgctcaacctgaacat

SEQ ID NO: 2582969 - DNA, 25 bp, Homo sapien
tgtgcctgcttagggcccacactgt

SEQ ID NO: 2582970 - DNA, 25 bp, Homo sapien
tgtgccccgtagacgagctccttgt

SEQ ID NO: 2582971 - DNA, 25 bp, Homo sapien
tccgcccattcccatccagcatggg

SEQ ID NO: 2582972 - DNA, 25 bp, Homo sapien
gcctcaagccaatctgatcgtccat

SEQ ID NO: 2582973 - DNA, 25 bp, Homo sapien
cacggcaacagtatggtaagcgcga

SEQ ID NO: 2582974 - DNA, 25 bp, Homo sapien
cagaaaattggatacgaacgcagca

SEQ ID NO: 2582975 - DNA, 25 bp, Homo sapien
gatacgttagccaagcaagtgccaa

SEQ ID NO: 2582976 - DNA, 25 bp, Homo sapien
tacaacgatcgtccacaggagcaag

SEQ ID NO: 2582977 - DNA, 25 bp, Homo sapien
catgatgagtaacctgattgtcagc

SEQ ID NO: 2582978 - DNA, 25 bp, Homo sapien
ctggaaggacatgatgagtaacctg

SEQ ID NO: 2582979 - DNA, 25 bp, Homo sapien
aaggacatgatgagtaacctgattg

SEQ ID NO: 2582980 - DNA, 25 bp, Homo sapien
gagtaacctgattgtcagcaaatgc

SEQ ID NO: 2582981 - DNA, 25 bp, Homo sapien
accaccttatatgtcaaacttacct

SEQ ID NO: 2582982 - DNA, 25 bp, Homo sapien
tataccaccttatatgtcaaactta

SEQ ID NO: 2582983 - DNA, 25 bp, Homo sapien
ttataccaccttatatgtcaaactt

SEQ ID NO: 2582984 - DNA, 25 bp, Homo sapien
taccaccttatatgtcaaacttacc

SEQ ID NO: 2582985 - DNA, 25 bp, Homo sapien
tataggcttcgttgccgtactgggc

SEQ ID NO: 2582986 - DNA, 25 bp, Homo sapien
gattcggcgggtttgaggccttcac

SEQ ID NO: 2582987 - DNA, 25 bp, Homo sapien
tattcggcatgcacgcgggtgttga

SEQ ID NO: 2582988 - DNA, 25 bp, Homo sapien
gatctcgatctgttcgccgtcggcg

SEQ ID NO: 2582989 - DNA, 25 bp, Homo sapien
tcaacagatgccctagcttaaaagt

SEQ ID NO: 2582990 - DNA, 25 bp, Homo sapien
ctggttcatgtagatctcgagaatc

SEQ ID NO: 2582991 - DNA, 25 bp, Homo sapien
ctcgagaatctggtttttgctcaac

SEQ ID NO: 2582992 - DNA, 25 bp, Homo sapien
gcttaaaagtcagtaagacttcgta

SEQ ID NO: 2582993 - DNA, 25 bp, Homo sapien
ctcggaagacagatagacgttgcgc

SEQ ID NO: 2582994 - DNA, 25 bp, Homo sapien
tcggaagacagatagacgttgcgcg

SEQ ID NO: 2582995 - DNA, 25 bp, Homo sapien
aagacagatagacgttgcgcgccac

SEQ ID NO: 2582996 - DNA, 25 bp, Homo sapien
ggaagacagatagacgttgcgcgcc

SEQ ID NO: 2582997 - DNA, 25 bp, Homo sapien
tataaaaatgcgtgccccagaaggt

SEQ ID NO: 2582998 - DNA, 25 bp, Homo sapien
ccttgggaaaccagtgcatgggctt

SEQ ID NO: 2582999 - DNA, 25 bp, Homo sapien
aaaaagcgcgtgtcttcaatggcca

SEQ ID NO: 2583000 - DNA, 25 bp, Homo sapien
catggtgatagtcgatgcgccctgg

SEQ ID NO: 2583001 - DNA, 25 bp, Homo sapien
gctttttcttggacgacgggcttga

SEQ ID NO: 2583002 - DNA, 25 bp, Homo sapien
aggtgttgcctatcggccctggaga

SEQ ID NO: 2583003 - DNA, 25 bp, Homo sapien
caaaccttgttgtcggtgcgcacga

SEQ ID NO: 2583004 - DNA, 25 bp, Homo sapien
tggcccggccattgacgtagacggt

SEQ ID NO: 2583005 - DNA, 25 bp, Homo sapien
caagctattgccgtgcccgggttca

SEQ ID NO: 2583006 - DNA, 25 bp, Homo sapien
tagttgtgaaagtagacggcgtgcc

SEQ ID NO: 2583007 - DNA, 25 bp, Homo sapien
tgctggttcatctggtgcttgacgg

SEQ ID NO: 2583008 - DNA, 25 bp, Homo sapien
catgactttgtcgacatagctgtag

SEQ ID NO: 2583009 - DNA, 25 bp, Homo sapien
tgagtaaactacaaagtctcccttc

SEQ ID NO: 2583010 - DNA, 25 bp, Homo sapien
cgtgagtaaactacaaagtctccct

SEQ ID NO: 2583011 - DNA, 25 bp, Homo sapien
tcgtgagtaaactacaaagtctccc

SEQ ID NO: 2583012 - DNA, 25 bp, Homo sapien
ttatcgtgagtaaactacaaagtct

SEQ ID NO: 2583013 - DNA, 25 bp, Homo sapien
aatccatgcgcacgggaatccttgc

SEQ ID NO: 2583014 - DNA, 25 bp, Homo sapien
gaaatattccctgagatggtcaaaa

SEQ ID NO: 2583015 - DNA, 25 bp, Homo sapien
gagagctaggcatcatcaatctcgc

SEQ ID NO: 2583016 - DNA, 25 bp, Homo sapien
gggactctatttctccggatgcatc

SEQ ID NO: 2583017 - DNA, 25 bp, Homo sapien
ttgagaattaatgggaaaatcattt

SEQ ID NO: 2583018 - DNA, 25 bp, Homo sapien
cttgagaattaatgggaaaatcatt

SEQ ID NO: 2583019 - DNA, 25 bp, Homo sapien
tgagaattaatgggaaaatcatttt

SEQ ID NO: 2583020 - DNA, 25 bp, Homo sapien
taatttctttgtaaagccgccggca

SEQ ID NO: 2583021 - DNA, 25 bp, Homo sapien
gtttttgcatatcaccaagaccttt

SEQ ID NO: 2583022 - DNA, 25 bp, Homo sapien
gatatttctctatcaatggcatcta

SEQ ID NO: 2583023 - DNA, 25 bp, Homo sapien
gcagcgcatcactatattcgttgtg

SEQ ID NO: 2583024 - DNA, 25 bp, Homo sapien
gtgagttgatttgccataatatttt

SEQ ID NO: 2583025 - DNA, 25 bp, Homo sapien
aattttccggcatatttaggtggat

SEQ ID NO: 2583026 - DNA, 25 bp, Homo sapien
tccggcatatttaggtggattaata

SEQ ID NO: 2583027 - DNA, 25 bp, Homo sapien
taggtggattaataagattttcaag

SEQ ID NO: 2583028 - DNA, 25 bp, Homo sapien
caatggttgtggaattttgtgatga

SEQ ID NO: 2583029 - DNA, 25 bp, Homo sapien
tttgatgtttgggtgctaaccccgc

SEQ ID NO: 2583030 - DNA, 25 bp, Homo sapien
tgctaaccccgcggccttattcatt

SEQ ID NO: 2583031 - DNA, 25 bp, Homo sapien
ggaattttgtgatgagtttgatgtt

SEQ ID NO: 2583032 - DNA, 25 bp, Homo sapien
accggttgtagtgcagcccagtctc

SEQ ID NO: 2583033 - DNA, 25 bp, Homo sapien
gatcgtaatacctgaaccggttgta

SEQ ID NO: 2583034 - DNA, 25 bp, Homo sapien
actgtccctggaaccgtagcggttg

SEQ ID NO: 2583035 - DNA, 25 bp, Homo sapien
tctcgccgtcaaagtactgtccctg

SEQ ID NO: 2583036 - DNA, 25 bp, Homo sapien
gatctggtgtgtcgactcaggccta

SEQ ID NO: 2583037 - DNA, 25 bp, Homo sapien
tagaaccgcgactatgcctaagctc

SEQ ID NO: 2583038 - DNA, 25 bp, Homo sapien
tcttgtaggctagcaaacgtagtgc

SEQ ID NO: 2583039 - DNA, 25 bp, Homo sapien
tagggttgatccttcatggaccgca

SEQ ID NO: 2583040 - DNA, 25 bp, Homo sapien
aagtgctttagatcatctgccatta

SEQ ID NO: 2583041 - DNA, 25 bp, Homo sapien
tgctttagatcatctgccattaatg

SEQ ID NO: 2583042 - DNA, 25 bp, Homo sapien
tttagatcatctgccattaatgcga

SEQ ID NO: 2583043 - DNA, 25 bp, Homo sapien
cgcaaaaggcaagtgctttagatca

SEQ ID NO: 2583044 - DNA, 25 bp, Homo sapien
tgtttctagagccacgtcggaaccg

SEQ ID NO: 2583045 - DNA, 25 bp, Homo sapien
ggcgggggcatcgttaacaccatct

SEQ ID NO: 2583046 - DNA, 25 bp, Homo sapien
ggcagctcccattgcaattcctaca

SEQ ID NO: 2583047 - DNA, 25 bp, Homo sapien
cctacagtggagttcgccatggcgg

SEQ ID NO: 2583048 - DNA, 25 bp, Homo sapien
caactggaatgctttcgccggtaac

SEQ ID NO: 2583049 - DNA, 25 bp, Homo sapien
gagttgccgcgtacgatgaagccat

SEQ ID NO: 2583050 - DNA, 25 bp, Homo sapien
taaaaatgcgagcagcagaaccgct

SEQ ID NO: 2583051 - DNA, 25 bp, Homo sapien
tataccggacagcacagcgcttggt

SEQ ID NO: 2583052 - DNA, 25 bp, Homo sapien
gaatttcgcgggacctcgccggcat

SEQ ID NO: 2583053 - DNA, 25 bp, Homo sapien
ggaatttcgcgggacctcgccggca

SEQ ID NO: 2583054 - DNA, 25 bp, Homo sapien
caggaatttcgcgggacctcgccgg

SEQ ID NO: 2583055 - DNA, 25 bp, Homo sapien
tactaactcgcctcaggcaggacca

SEQ ID NO: 2583056 - DNA, 25 bp, Homo sapien
caagcacgattaagcgaaagacaat

SEQ ID NO: 2583057 - DNA, 25 bp, Homo sapien
cgattaagcgaaagacaatctgtca

SEQ ID NO: 2583058 - DNA, 25 bp, Homo sapien
ctcaggcaggaccaagcacgattaa

SEQ ID NO: 2583059 - DNA, 25 bp, Homo sapien
caaacgctcaatgcttctccgggaa

SEQ ID NO: 2583060 - DNA, 25 bp, Homo sapien
tacgatggcgcacttgtactgcacg

SEQ ID NO: 2583061 - DNA, 25 bp, Homo sapien
cagtcaatccctgtgtaggcagtgc

SEQ ID NO: 2583062 - DNA, 25 bp, Homo sapien
tccttgaagctatcccaatgggtgc

SEQ ID NO: 2583063 - DNA, 25 bp, Homo sapien
catcccggtatttctgaggctggca

SEQ ID NO: 2583064 - DNA, 25 bp, Homo sapien
gaactcgggtttgacagtgtgcagc

SEQ ID NO: 2583065 - DNA, 25 bp, Homo sapien
tcaatgacgggatctgctgccagtt

SEQ ID NO: 2583066 - DNA, 25 bp, Homo sapien
catgcactgcgataggtcaccgtcg

SEQ ID NO: 2583067 - DNA, 25 bp, Homo sapien
gggacatttgcttagttcagttata

SEQ ID NO: 2583068 - DNA, 25 bp, Homo sapien
aggtatcgtccgaaacgtgtaggca

SEQ ID NO: 2583069 - DNA, 25 bp, Homo sapien
tccgaaacgtgtaggcagctttggt

SEQ ID NO: 2583070 - DNA, 25 bp, Homo sapien
aggcagctttggttcgggacatttg

SEQ ID NO: 2583071 - DNA, 25 bp, Homo sapien
tacaatgagctgcagcgaaaatgtg

SEQ ID NO: 2583072 - DNA, 25 bp, Homo sapien
gctgcagcgaaaatgtgtgcacact

SEQ ID NO: 2583073 - DNA, 25 bp, Homo sapien
tccccataactacaatgagctgcag

SEQ ID NO: 2583074 - DNA, 25 bp, Homo sapien
tgaaaaactccccataactacaatg

SEQ ID NO: 2583075 - DNA, 25 bp, Homo sapien
tgcaccggtcagcatgctctccttg

SEQ ID NO: 2583076 - DNA, 25 bp, Homo sapien
tatgctcctctctaaccctggacag

SEQ ID NO: 2583077 - DNA, 25 bp, Homo sapien
atgtgtgcaccggtcagcatgctgt

SEQ ID NO: 2583078 - DNA, 25 bp, Homo sapien
taatgcgtgcgcaccagtcagcatg

SEQ ID NO: 2583079 - DNA, 25 bp, Homo sapien
aatacaatctcaaggtgaaccacac

SEQ ID NO: 2583080 - DNA, 25 bp, Homo sapien
ggtgatcacaaactgtcccgcagga

SEQ ID NO: 2583081 - DNA, 25 bp, Homo sapien
ctcaggtcagtgtatagacggtcct

SEQ ID NO: 2583082 - DNA, 25 bp, Homo sapien
tgaaccacactactaccgctcaggt

SEQ ID NO: 2583083 - DNA, 25 bp, Homo sapien
gcgtggctcgtatgtgctgggcaga

SEQ ID NO: 2583084 - DNA, 25 bp, Homo sapien
cagagtggagtgagcggagcctctc

SEQ ID NO: 2583085 - DNA, 25 bp, Homo sapien
gatgttgccggagaactgtggactc

SEQ ID NO: 2583086 - DNA, 25 bp, Homo sapien
tgggtgatgaggacggatgttgccg

SEQ ID NO: 2583087 - DNA, 25 bp, Homo sapien
aaaggaaatggcgcagatggcagac

SEQ ID NO: 2583088 - DNA, 25 bp, Homo sapien
gcattgccacggcaaaggaaatggc

SEQ ID NO: 2583089 - DNA, 25 bp, Homo sapien
cagcattgccacggcaaaggaaatg

SEQ ID NO: 2583090 - DNA, 25 bp, Homo sapien
agcattgccacggcaaaggaaatgg

SEQ ID NO: 2583091 - DNA, 25 bp, Homo sapien
gaggtgtcgcatcagaaggttctcg

SEQ ID NO: 2583092 - DNA, 25 bp, Homo sapien
aaggttctcggcagttcggtagcga

SEQ ID NO: 2583093 - DNA, 25 bp, Homo sapien
tcggtagcgaatgcggcccgcaatg

SEQ ID NO: 2583094 - DNA, 25 bp, Homo sapien
gactccatgcgcagcagcaaaggct

SEQ ID NO: 2583095 - DNA, 25 bp, Homo sapien
gttcctccgcttcagatccggcctg

SEQ ID NO: 2583096 - DNA, 25 bp, Homo sapien
tgccaggagttccatgtcgtccctt

SEQ ID NO: 2583097 - DNA, 25 bp, Homo sapien
cgtcccttgttcctccgcttcagat

SEQ ID NO: 2583098 - DNA, 25 bp, Homo sapien
tccggcctgtcacacaggcggacta

SEQ ID NO: 2583099 - DNA, 25 bp, Homo sapien
caggatctgtttgccgatgcgcggc

SEQ ID NO: 2583100 - DNA, 25 bp, Homo sapien
ttggcaagtcgctcatccgtgcggt

SEQ ID NO: 2583101 - DNA, 25 bp, Homo sapien
tctggcagggctacaacgcctttta

SEQ ID NO: 2583102 - DNA, 25 bp, Homo sapien
ggagcgcttcctcaatccgctggag

SEQ ID NO: 2583103 - DNA, 25 bp, Homo sapien
gaaatgcgctcttccatcatgctgg

SEQ ID NO: 2583104 - DNA, 25 bp, Homo sapien
cactggctggactatgcatcggtca

SEQ ID NO: 2583105 - DNA, 25 bp, Homo sapien
gacatctttcgcacgctgggcagcg

SEQ ID NO: 2583106 - DNA, 25 bp, Homo sapien
tggaggacaacgtcaagggctgtac

SEQ ID NO: 2583107 - DNA, 25 bp, Homo sapien
tcctcaacgtgtggagtgcgctcgg

SEQ ID NO: 2583108 - DNA, 25 bp, Homo sapien
tcgacaattgaaagcgccgcaggac

SEQ ID NO: 2583109 - DNA, 25 bp, Homo sapien
aaatggacttcgtacgcgttgcggc

SEQ ID NO: 2583110 - DNA, 25 bp, Homo sapien
tgtagtcgccgaagacgaggccttc

SEQ ID NO: 2583111 - DNA, 25 bp, Homo sapien
gcaattagcagcagcccgacagcct

SEQ ID NO: 2583112 - DNA, 25 bp, Homo sapien
ctgcaattagcagcagcccgacagc

SEQ ID NO: 2583113 - DNA, 25 bp, Homo sapien
agcagcagcccgacagcctgggccg

SEQ ID NO: 2583114 - DNA, 25 bp, Homo sapien
cagcagcccgacagcctgggccgac

SEQ ID NO: 2583115 - DNA, 25 bp, Homo sapien
cggccaagccgaagaggagcatgta

SEQ ID NO: 2583116 - DNA, 25 bp, Homo sapien
cacgacggcaatgagcagcatggcc

SEQ ID NO: 2583117 - DNA, 25 bp, Homo sapien
aagccgtttccaagctgctggaggc

SEQ ID NO: 2583118 - DNA, 25 bp, Homo sapien
atgtagacgggaaccacccaaggct

SEQ ID NO: 2583119 - DNA, 25 bp, Homo sapien
attccttccggactggcgcaggcgc

SEQ ID NO: 2583120 - DNA, 25 bp, Homo sapien
ccggtcgacatgaacggggcgcaca

SEQ ID NO: 2583121 - DNA, 25 bp, Homo sapien
cgggttgcgccatatggcggattcc

SEQ ID NO: 2583122 - DNA, 25 bp, Homo sapien
cgcgaagcgcgggttgcgccatatg

SEQ ID NO: 2583123 - DNA, 25 bp, Homo sapien
tcatagaatcaacgaagcgtccggc

SEQ ID NO: 2583124 - DNA, 25 bp, Homo sapien
cggacaggcgaagcagatacaggct

SEQ ID NO: 2583125 - DNA, 25 bp, Homo sapien
gtgaacctgcgcacgctcatagaat

SEQ ID NO: 2583126 - DNA, 25 bp, Homo sapien
gcccgaacgggtatgcacaagcatc

SEQ ID NO: 2583127 - DNA, 25 bp, Homo sapien
gccgcttatggcgaacgacgacctt

SEQ ID NO: 2583128 - DNA, 25 bp, Homo sapien
gacagatcaaaagcgtcccggacgt

SEQ ID NO: 2583129 - DNA, 25 bp, Homo sapien
gttccgaatgaaccgtccgacagat

SEQ ID NO: 2583130 - DNA, 25 bp, Homo sapien
cgatgaagaaggtctggccggcact

SEQ ID NO: 2583131 - DNA, 25 bp, Homo sapien
tgcatggaagcgcacgccggtccaa

SEQ ID NO: 2583132 - DNA, 25 bp, Homo sapien
gggccgcgcatgctcgtggaacacc

SEQ ID NO: 2583133 - DNA, 25 bp, Homo sapien
tcgtggaacaccagcccggcgtgct

SEQ ID NO: 2583134 - DNA, 25 bp, Homo sapien
agcccggcgtgctcgcgcaatgcat

SEQ ID NO: 2583135 - DNA, 25 bp, Homo sapien
gccggcgcgttcacggcgtcaaaca

SEQ ID NO: 2583136 - DNA, 25 bp, Homo sapien
ataagctccgccttgtggccggcca

SEQ ID NO: 2583137 - DNA, 25 bp, Homo sapien
aacaccacccggtgcgcgttggcat

SEQ ID NO: 2583138 - DNA, 25 bp, Homo sapien
gcgttggcatcgatgaacctgcgca

SEQ ID NO: 2583139 - DNA, 25 bp, Homo sapien
gagaagactttccagtgccagagac

SEQ ID NO: 2583140 - DNA, 25 bp, Homo sapien
tgtgagactctttcagggacgtgga

SEQ ID NO: 2583141 - DNA, 25 bp, Homo sapien
tcagtgacagtttcgtccaccaacg

SEQ ID NO: 2583142 - DNA, 25 bp, Homo sapien
caaggcaaagcactggaatgttcca

SEQ ID NO: 2583143 - DNA, 25 bp, Homo sapien
tgttccttagttggaggtcacagcc

SEQ ID NO: 2583144 - DNA, 25 bp, Homo sapien
taaaaattgacagccctggtcagta

SEQ ID NO: 2583145 - DNA, 25 bp, Homo sapien
gggaccacaactgaaagcctcagct

SEQ ID NO: 2583146 - DNA, 25 bp, Homo sapien
tgtctgtccttaggaaggctgttcc

SEQ ID NO: 2583147 - DNA, 25 bp, Homo sapien
gtggcctgtacaatggagatttcct

SEQ ID NO: 2583148 - DNA, 25 bp, Homo sapien
ttccctatgccccttctgcacaaac

SEQ ID NO: 2583149 - DNA, 25 bp, Homo sapien
tccttccctatgccccttctgcaca

SEQ ID NO: 2583150 - DNA, 25 bp, Homo sapien
cagtggcctgtacaatggagatttc

SEQ ID NO: 2583151 - DNA, 25 bp, Homo sapien
tacgggaaggaaggtgcacccgatc

SEQ ID NO: 2583152 - DNA, 25 bp, Homo sapien
ccgatcgtgctgctgtagacatggg

SEQ ID NO: 2583153 - DNA, 25 bp, Homo sapien
gcaccatcagtgaagttacgggaag

SEQ ID NO: 2583154 - DNA, 25 bp, Homo sapien
gaaggaaggtgcacccgatcgtgct

SEQ ID NO: 2583155 - DNA, 25 bp, Homo sapien
aatgcacacttccacgtacatggac

SEQ ID NO: 2583156 - DNA, 25 bp, Homo sapien
tacatggaccgtgcactttgcatga

SEQ ID NO: 2583157 - DNA, 25 bp, Homo sapien
caactgcgtaaagagaacattccca

SEQ ID NO: 2583158 - DNA, 25 bp, Homo sapien
gacacctccataacacaaggctgaa

SEQ ID NO: 2583159 - DNA, 25 bp, Homo sapien
ttcttttgctgtatgcttcatatgt

SEQ ID NO: 2583160 - DNA, 25 bp, Homo sapien
gctgtatgcttcatatgtgggcagt

SEQ ID NO: 2583161 - DNA, 25 bp, Homo sapien
ttttcccagtagcatgcccttttct

SEQ ID NO: 2583162 - DNA, 25 bp, Homo sapien
tttgttccatgagattttatcttga

SEQ ID NO: 2583163 - DNA, 25 bp, Homo sapien
cttttgttccatgagattttatctt

SEQ ID NO: 2583164 - DNA, 25 bp, Homo sapien
gcacagagcacatagagatactgga

SEQ ID NO: 2583165 - DNA, 25 bp, Homo sapien
gttccatgagattttatcttgattc

SEQ ID NO: 2583166 - DNA, 25 bp, Homo sapien
aggatagctgctgagtttgtggttt

SEQ ID NO: 2583167 - DNA, 25 bp, Homo sapien
gatagctgctgagtttgtggttttg

SEQ ID NO: 2583168 - DNA, 25 bp, Homo sapien
tagctgctgagtttgtggttttgtt

SEQ ID NO: 2583169 - DNA, 25 bp, Homo sapien
tgaggatagctgctgagtttgtggt

SEQ ID NO: 2583170 - DNA, 25 bp, Homo sapien
catcatctctgctgaatctatagtc

SEQ ID NO: 2583171 - DNA, 25 bp, Homo sapien
taaacaggcttaacctagacgacat

SEQ ID NO: 2583172 - DNA, 25 bp, Homo sapien
tgaggtcaggatcaacgggctgttc

SEQ ID NO: 2583173 - DNA, 25 bp, Homo sapien
gagcttcttagtaaacaggcttaac

SEQ ID NO: 2583174 - DNA, 25 bp, Homo sapien
aaagcttgatctactgtagagttca

SEQ ID NO: 2583175 - DNA, 25 bp, Homo sapien
caaccatgaaagcttgatctactgt

SEQ ID NO: 2583176 - DNA, 25 bp, Homo sapien
agcacaaccatgaaagcttgatcta

SEQ ID NO: 2583177 - DNA, 25 bp, Homo sapien
catgaaagcttgatctactgtagag

SEQ ID NO: 2583178 - DNA, 25 bp, Homo sapien
tcacagaggcctagaaaagtaacag

SEQ ID NO: 2583179 - DNA, 25 bp, Homo sapien
agcctgagctcatagccactactga

SEQ ID NO: 2583180 - DNA, 25 bp, Homo sapien
agctccatggccctgtcttgtgagg

SEQ ID NO: 2583181 - DNA, 25 bp, Homo sapien
ccactactgatgagtcctggagatc

SEQ ID NO: 2583182 - DNA, 25 bp, Homo sapien
tagcgtgtaggtagcacacattacc

SEQ ID NO: 2583183 - DNA, 25 bp, Homo sapien
ccctggagcctactagcgtgtaggt

SEQ ID NO: 2583184 - DNA, 25 bp, Homo sapien
cctactagcgtgtaggtagcacaca

SEQ ID NO: 2583185 - DNA, 25 bp, Homo sapien
taggtagcacacattacctgctcct

SEQ ID NO: 2583186 - DNA, 25 bp, Homo sapien
ggtggaactcggcctgttgcagaac

SEQ ID NO: 2583187 - DNA, 25 bp, Homo sapien
agggtgcctacaggcccaaacaact

SEQ ID NO: 2583188 - DNA, 25 bp, Homo sapien
tttctttcgacaaagctgccttctg

SEQ ID NO: 2583189 - DNA, 25 bp, Homo sapien
tgttgcagaacacgggtttgatttt

SEQ ID NO: 2583190 - DNA, 25 bp, Homo sapien
aacacattatgtcgccctccttcat

SEQ ID NO: 2583191 - DNA, 25 bp, Homo sapien
ttatgtcgccctccttcatgaacag

SEQ ID NO: 2583192 - DNA, 25 bp, Homo sapien
tctaaacacattatgtcgccctcct

SEQ ID NO: 2583193 - DNA, 25 bp, Homo sapien
cattatgtcgccctccttcatgaac

SEQ ID NO: 2583194 - DNA, 25 bp, Homo sapien
tcaacaagatctcagccaagtcctc

SEQ ID NO: 2583195 - DNA, 25 bp, Homo sapien
ttcaacaagatctcagccaagtcct

SEQ ID NO: 2583196 - DNA, 25 bp, Homo sapien
tccccaatctgactggagaagcaag

SEQ ID NO: 2583197 - DNA, 25 bp, Homo sapien
ccccaatctgactggagaagcaagc

SEQ ID NO: 2583198 - DNA, 25 bp, Homo sapien
cagcattgccaccttctttagcctt

SEQ ID NO: 2583199 - DNA, 25 bp, Homo sapien
agcattgccaccttctttagccttg

SEQ ID NO: 2583200 - DNA, 25 bp, Homo sapien
cattgccaccttctttagccttgtc

SEQ ID NO: 2583201 - DNA, 25 bp, Homo sapien
gcattgccaccttctttagccttgt

SEQ ID NO: 2583202 - DNA, 25 bp, Homo sapien
cttggcagttccttgtgatgtccat

SEQ ID NO: 2583203 - DNA, 25 bp, Homo sapien
tcatgtctagggtttcatttgccat

SEQ ID NO: 2583204 - DNA, 25 bp, Homo sapien
cagtgtatgtatgccgaaacaaaaa

SEQ ID NO: 2583205 - DNA, 25 bp, Homo sapien
aatccttcagtgtatgtatgccgaa

SEQ ID NO: 2583206 - DNA, 25 bp, Homo sapien
aattctcatgtctagggtttcattt

SEQ ID NO: 2583207 - DNA, 25 bp, Homo sapien
acattacacggcatcacttgaatac

SEQ ID NO: 2583208 - DNA, 25 bp, Homo sapien
tactcagcatcacattacacggcat

SEQ ID NO: 2583209 - DNA, 25 bp, Homo sapien
gagtctactcagcatcacattacac

SEQ ID NO: 2583210 - DNA, 25 bp, Homo sapien
tcttgttttgagtctactcagcatc

SEQ ID NO: 2583211 - DNA, 25 bp, Homo sapien
aatctttgtgagcaagttgacggta

SEQ ID NO: 2583212 - DNA, 25 bp, Homo sapien
taggtgaccatatccgatcatcaaa

SEQ ID NO: 2583213 - DNA, 25 bp, Homo sapien
tctgtaagactgactaggtgaccat

SEQ ID NO: 2583214 - DNA, 25 bp, Homo sapien
ttgacggtacgtctgtaagactgac

SEQ ID NO: 2583215 - DNA, 25 bp, Homo sapien
ctaggtgcgaaaatggtatacaagt

SEQ ID NO: 2583216 - DNA, 25 bp, Homo sapien
tgcgaaaatggtatacaagtcaccc

SEQ ID NO: 2583217 - DNA, 25 bp, Homo sapien
aatggtatacaagtcaccctggcac

SEQ ID NO: 2583218 - DNA, 25 bp, Homo sapien
gaaaatggtatacaagtcaccctgg

SEQ ID NO: 2583219 - DNA, 25 bp, Homo sapien
ctgcagttttgccttgctgaatgct

SEQ ID NO: 2583220 - DNA, 25 bp, Homo sapien
gaatgcttctttctcaagtccatgc

SEQ ID NO: 2583221 - DNA, 25 bp, Homo sapien
aatgcttctttctcaagtccatgca

SEQ ID NO: 2583222 - DNA, 25 bp, Homo sapien
gcagttttgccttgctgaatgcttc

SEQ ID NO: 2583223 - DNA, 25 bp, Homo sapien
attgttttcagatgctgcccggcat

SEQ ID NO: 2583224 - DNA, 25 bp, Homo sapien
ctgcaataaacagagcatacagcat

SEQ ID NO: 2583225 - DNA, 25 bp, Homo sapien
tgcaataaacagagcatacagcatg

SEQ ID NO: 2583226 - DNA, 25 bp, Homo sapien
gcatacagcatggttgtggatctca

SEQ ID NO: 2583227 - DNA, 25 bp, Homo sapien
acagagcatacagcatggttgtgga

SEQ ID NO: 2583228 - DNA, 25 bp, Homo sapien
atgtgaatgcagtgatagtggctgc

SEQ ID NO: 2583229 - DNA, 25 bp, Homo sapien
tggctgcaagtgataagctgtgtag

SEQ ID NO: 2583230 - DNA, 25 bp, Homo sapien
cagtgatagtggctgcaagtgataa

SEQ ID NO: 2583231 - DNA, 25 bp, Homo sapien
tagtggctgcaagtgataagctgtg

SEQ ID NO: 2583232 - DNA, 25 bp, Homo sapien
tgaattcgtttttcaaagtctatgt

SEQ ID NO: 2583233 - DNA, 25 bp, Homo sapien
tatgtaaacatcactcatgtaatca

SEQ ID NO: 2583234 - DNA, 25 bp, Homo sapien
catcactcatgtaatcaggtaagag

SEQ ID NO: 2583235 - DNA, 25 bp, Homo sapien
taaacatcactcatgtaatcaggta

SEQ ID NO: 2583236 - DNA, 25 bp, Homo sapien
gattcttcaccagagaataagtttc

SEQ ID NO: 2583237 - DNA, 25 bp, Homo sapien
gaagattcttcaccagagaataagt

SEQ ID NO: 2583238 - DNA, 25 bp, Homo sapien
gggaagattcttcaccagagaataa

SEQ ID NO: 2583239 - DNA, 25 bp, Homo sapien
ttgggaagattcttcaccagagaat

SEQ ID NO: 2583240 - DNA, 25 bp, Homo sapien
caggtgcacaggagctagtttctcc

SEQ ID NO: 2583241 - DNA, 25 bp, Homo sapien
ggcatggaattctgcaggtgcacag

SEQ ID NO: 2583242 - DNA, 25 bp, Homo sapien
ctaggcatggaattctgcaggtgca

SEQ ID NO: 2583243 - DNA, 25 bp, Homo sapien
caggagctagtttctccaaacttca

SEQ ID NO: 2583244 - DNA, 25 bp, Homo sapien
ctggagaagcatatgaaagggacac

SEQ ID NO: 2583245 - DNA, 25 bp, Homo sapien
gagaagcatatgaaagggacacggc

SEQ ID NO: 2583246 - DNA, 25 bp, Homo sapien
gggacacggcgcctgagagctcagc

SEQ ID NO: 2583247 - DNA, 25 bp, Homo sapien
gaagcatatgaaagggacacggcgc

SEQ ID NO: 2583248 - DNA, 25 bp, Homo sapien
actataagaactattattagcacca

SEQ ID NO: 2583249 - DNA, 25 bp, Homo sapien
taagaactattattagcaccagaaa

SEQ ID NO: 2583250 - DNA, 25 bp, Homo sapien
tattattagcaccagaaagagagcc

SEQ ID NO: 2583251 - DNA, 25 bp, Homo sapien
gaactattattagcaccagaaagag

SEQ ID NO: 2583252 - DNA, 25 bp, Homo sapien
tgaaacattacctagcacaccactg

SEQ ID NO: 2583253 - DNA, 25 bp, Homo sapien
gaaatgtgagccaattgatgtcgcc

SEQ ID NO: 2583254 - DNA, 25 bp, Homo sapien
gatgtcgccttggtagcttgatatc

SEQ ID NO: 2583255 - DNA, 25 bp, Homo sapien
tgataagtgcctgttacattccgtg

SEQ ID NO: 2583256 - DNA, 25 bp, Homo sapien
aaattttattatatgggctcatcac

SEQ ID NO: 2583257 - DNA, 25 bp, Homo sapien
ttcactctggtttcataaattttat

SEQ ID NO: 2583258 - DNA, 25 bp, Homo sapien
atctgctcttatttgtttggaagag

SEQ ID NO: 2583259 - DNA, 25 bp, Homo sapien
agctgtcgtaattgcctggtttgta

SEQ ID NO: 2583260 - DNA, 25 bp, Homo sapien
tgtttgtttgcactgagaaacagtc

SEQ ID NO: 2583261 - DNA, 25 bp, Homo sapien
tagctcttcttggtgcactcatccc

SEQ ID NO: 2583262 - DNA, 25 bp, Homo sapien
gtttgtttgcactgagaaacagtct

SEQ ID NO: 2583263 - DNA, 25 bp, Homo sapien
ttgcgtttgctgaagagtgctttat

SEQ ID NO: 2583264 - DNA, 25 bp, Homo sapien
ccttggatataacatggagtgacac

SEQ ID NO: 2583265 - DNA, 25 bp, Homo sapien
agcagcacctgtcaacagaggcctc

SEQ ID NO: 2583266 - DNA, 25 bp, Homo sapien
ttcagactatgtgtttcaaagcctg

SEQ ID NO: 2583267 - DNA, 25 bp, Homo sapien
actgactgtgaggtttccatccaac

SEQ ID NO: 2583268 - DNA, 25 bp, Homo sapien
tggaacaccctttcttctttgattc

SEQ ID NO: 2583269 - DNA, 25 bp, Homo sapien
ttttttgtctccagaggttttcata

SEQ ID NO: 2583270 - DNA, 25 bp, Homo sapien
cctggaacaccctttcttctttgat

SEQ ID NO: 2583271 - DNA, 25 bp, Homo sapien
tttgtctccagaggttttcatatcc

SEQ ID NO: 2583272 - DNA, 25 bp, Homo sapien
catcagtgagatggcctttccagaa

SEQ ID NO: 2583273 - DNA, 25 bp, Homo sapien
tacaggtgtccttatcagtgaccac

SEQ ID NO: 2583274 - DNA, 25 bp, Homo sapien
gaatgtgggtcaaaaagcagcctaa

SEQ ID NO: 2583275 - DNA, 25 bp, Homo sapien
gactccgtgcttccagatatcataa

SEQ ID NO: 2583276 - DNA, 25 bp, Homo sapien
taatacagccttacctgctaagggc

SEQ ID NO: 2583277 - DNA, 25 bp, Homo sapien
gaccgaggtaggacaattgctcgag

SEQ ID NO: 2583278 - DNA, 25 bp, Homo sapien
tgcatcttctaatagccaggcgcag

SEQ ID NO: 2583279 - DNA, 25 bp, Homo sapien
aggaaactgaggctacctaatacag

SEQ ID NO: 2583280 - DNA, 25 bp, Homo sapien
catgaataagtctccagcgtgcggt

SEQ ID NO: 2583281 - DNA, 25 bp, Homo sapien
tgatgcggtcaaactcgagcgtcca

SEQ ID NO: 2583282 - DNA, 25 bp, Homo sapien
tatgagccggcagcttctgggttcc

SEQ ID NO: 2583283 - DNA, 25 bp, Homo sapien
gagctgcggctgacaaattgacggc

SEQ ID NO: 2583284 - DNA, 25 bp, Homo sapien
ggatgatcgtcaccgcaaacttcaa

SEQ ID NO: 2583285 - DNA, 25 bp, Homo sapien
gaacgaccgatccaaaaagcgcgcg

SEQ ID NO: 2583286 - DNA, 25 bp, Homo sapien
tgtcctgccgcctcttgaagcgatg

SEQ ID NO: 2583287 - DNA, 25 bp, Homo sapien
caaacttcaacaacgcttcgcggat

SEQ ID NO: 2583288 - DNA, 25 bp, Homo sapien
cagcgggccagcgaattcatgtccg

SEQ ID NO: 2583289 - DNA, 25 bp, Homo sapien
tcgatgccggcgtacctgagggagt

SEQ ID NO: 2583290 - DNA, 25 bp, Homo sapien
gatgctcaacgaatgggtcaggcgc

SEQ ID NO: 2583291 - DNA, 25 bp, Homo sapien
ggagtgacaagcagcgaatcgcagc

SEQ ID NO: 2583292 - DNA, 25 bp, Homo sapien
taactgccgtgacgtcagcaagcgt

SEQ ID NO: 2583293 - DNA, 25 bp, Homo sapien
cgtctacggcggtttggacagcgca

SEQ ID NO: 2583294 - DNA, 25 bp, Homo sapien
tttgatctccgtagggtgccgcttc

SEQ ID NO: 2583295 - DNA, 25 bp, Homo sapien
gccgcgggtcttggtcgtcgaaata

SEQ ID NO: 2583296 - DNA, 25 bp, Homo sapien
catctgcagctaatccataggatct

SEQ ID NO: 2583297 - DNA, 25 bp, Homo sapien
gctagtttgactgtgccttgccaaa

SEQ ID NO: 2583298 - DNA, 25 bp, Homo sapien
taacagtcggaggaagcaagcattc

SEQ ID NO: 2583299 - DNA, 25 bp, Homo sapien
gagtcagtaggaagataacagtcgg

SEQ ID NO: 2583300 - DNA, 25 bp, Homo sapien
agtcaggacagctgtcctttgtaac

SEQ ID NO: 2583301 - DNA, 25 bp, Homo sapien
gtcatttctacagccatggactcgg

SEQ ID NO: 2583302 - DNA, 25 bp, Homo sapien
tttctacagccatggactcggcatc

SEQ ID NO: 2583303 - DNA, 25 bp, Homo sapien
ttgtaacagacatgaagcccgcagg

SEQ ID NO: 2583304 - DNA, 25 bp, Homo sapien
aggtgtccagggagctgttgtattc

SEQ ID NO: 2583305 - DNA, 25 bp, Homo sapien
ctggaggcccagtaggcctgcagca

SEQ ID NO: 2583306 - DNA, 25 bp, Homo sapien
ctgccctggaggcccagtaggcctg

SEQ ID NO: 2583307 - DNA, 25 bp, Homo sapien
gtgtccagggagctgttgtattcat

SEQ ID NO: 2583308 - DNA, 25 bp, Homo sapien
gactgaatgataagtttggcccctg

SEQ ID NO: 2583309 - DNA, 25 bp, Homo sapien
cctctatacaaagcatgcgagtgtg

SEQ ID NO: 2583310 - DNA, 25 bp, Homo sapien
tttatatgggaactaatagcagcca

SEQ ID NO: 2583311 - DNA, 25 bp, Homo sapien
gcgagtgtgttaactgggtccaaac

SEQ ID NO: 2583312 - DNA, 25 bp, Homo sapien
ctacgtttcgattttgcagcacccg

SEQ ID NO: 2583313 - DNA, 25 bp, Homo sapien
tatagcagacagtgcgcttctagga

SEQ ID NO: 2583314 - DNA, 25 bp, Homo sapien
gaatctggcaatctagtcaaaaccc

SEQ ID NO: 2583315 - DNA, 25 bp, Homo sapien
tcacatgcagctctaggataaccag

SEQ ID NO: 2583316 - DNA, 25 bp, Homo sapien
ggtctttctgaaatcaagccttgca

SEQ ID NO: 2583317 - DNA, 25 bp, Homo sapien
tatctgcaaaagacggctttcttcc

SEQ ID NO: 2583318 - DNA, 25 bp, Homo sapien
aaccatgtctgcaggattattaccc

SEQ ID NO: 2583319 - DNA, 25 bp, Homo sapien
gcctgcctgaatttcgaaagcaagt

SEQ ID NO: 2583320 - DNA, 25 bp, Homo sapien
acggaatcccgcctcagatgatggg

SEQ ID NO: 2583321 - DNA, 25 bp, Homo sapien
gcacagacgatatgatggtacccga

SEQ ID NO: 2583322 - DNA, 25 bp, Homo sapien
ggataaatcatgagagccagtggcc

SEQ ID NO: 2583323 - DNA, 25 bp, Homo sapien
tcagcagaatatgtgggcagcacgc

SEQ ID NO: 2583324 - DNA, 25 bp, Homo sapien
gctagacttgtctgcttacacggaa

SEQ ID NO: 2583325 - DNA, 25 bp, Homo sapien
cacgttggccaacatttccgggcag

SEQ ID NO: 2583326 - DNA, 25 bp, Homo sapien
cagtctgtcgagaaatgtccatggc

SEQ ID NO: 2583327 - DNA, 25 bp, Homo sapien
gacttgtgctggagaccctctgtaa

SEQ ID NO: 2583328 - DNA, 25 bp, Homo sapien
gaatacatacctgacaacgatccgg

SEQ ID NO: 2583329 - DNA, 25 bp, Homo sapien
tgcgaaaatttcaccacactgagtc

SEQ ID NO: 2583330 - DNA, 25 bp, Homo sapien
ggcgtttgaccttccacgtgacagt

SEQ ID NO: 2583331 - DNA, 25 bp, Homo sapien
gctcaaggaggtatgtcggtcagta

SEQ ID NO: 2583332 - DNA, 25 bp, Homo sapien
ctggccggtgatggtactgccgtca

SEQ ID NO: 2583333 - DNA, 25 bp, Homo sapien
ggtgatggtactgccgtcagcagca

SEQ ID NO: 2583334 - DNA, 25 bp, Homo sapien
tggtctggccggtgatggtactgcc

SEQ ID NO: 2583335 - DNA, 25 bp, Homo sapien
gctggggttgttgatacgctctttg

SEQ ID NO: 2583336 - DNA, 25 bp, Homo sapien
tcagaattgtcccaattatctcctc

SEQ ID NO: 2583337 - DNA, 25 bp, Homo sapien
aacagtgtctgtcagggtgtttgga

SEQ ID NO: 2583338 - DNA, 25 bp, Homo sapien
cgctgagggccacggaaaggaaggg

SEQ ID NO: 2583339 - DNA, 25 bp, Homo sapien
cccgctgagggccacggaaaggaag

SEQ ID NO: 2583340 - DNA, 25 bp, Homo sapien
gctggtttaactgcgctgtcttttg

SEQ ID NO: 2583341 - DNA, 25 bp, Homo sapien
cagagtgtaggagtcagagtgagga

SEQ ID NO: 2583342 - DNA, 25 bp, Homo sapien
gggacctcgcagctggtttaactgc

SEQ ID NO: 2583343 - DNA, 25 bp, Homo sapien
actgcgctgtcttttggccagagga

SEQ ID NO: 2583344 - DNA, 25 bp, Homo sapien
gccaggagatacgtggagggtacca

SEQ ID NO: 2583345 - DNA, 25 bp, Homo sapien
tgattccacgccgagttgagggcag

SEQ ID NO: 2583346 - DNA, 25 bp, Homo sapien
caggaacacgtctctgatggtggcc

SEQ ID NO: 2583347 - DNA, 25 bp, Homo sapien
gcctgagtggaaagacggtctgatt

SEQ ID NO: 2583348 - DNA, 25 bp, Homo sapien
tggcggcagggacccgacagctctg

SEQ ID NO: 2583349 - DNA, 25 bp, Homo sapien
agcaggcctgggtcggtcggcctcg

SEQ ID NO: 2583350 - DNA, 25 bp, Homo sapien
tctgccgcggactccgcaggggaca

SEQ ID NO: 2583351 - DNA, 25 bp, Homo sapien
accgtgcatctagcgcgccctggtg

SEQ ID NO: 2583352 - DNA, 25 bp, Homo sapien
aggtttggccgccttcaacagcacc

SEQ ID NO: 2583353 - DNA, 25 bp, Homo sapien
aagtgggctcgcacaccgacggcct

SEQ ID NO: 2583354 - DNA, 25 bp, Homo sapien
gctgctccgccgaggtggacccggg

SEQ ID NO: 2583355 - DNA, 25 bp, Homo sapien
acagcggccctgacccgggaagtgc

SEQ ID NO: 2583356 - DNA, 25 bp, Homo sapien
cagccgggcagcgcccgagccgtcc

SEQ ID NO: 2583357 - DNA, 25 bp, Homo sapien
gcggcgccggtgtcgcagactcggg

SEQ ID NO: 2583358 - DNA, 25 bp, Homo sapien
ggaaagtgcccctgcggacgggctc

SEQ ID NO: 2583359 - DNA, 25 bp, Homo sapien
agactcgggcccacttctgggagct

SEQ ID NO: 2583360 - DNA, 25 bp, Homo sapien
gacgggctcgggtgcccggtgctgc

SEQ ID NO: 2583361 - DNA, 25 bp, Homo sapien
cagccgtaaacacgcgagctgagca

SEQ ID NO: 2583362 - DNA, 25 bp, Homo sapien
tctgaagacaaaatcgccgcagcca

SEQ ID NO: 2583363 - DNA, 25 bp, Homo sapien
gacacggccgaccacagtgcttgtt

SEQ ID NO: 2583364 - DNA, 25 bp, Homo sapien
taggagactcctcgcagttagaggc

SEQ ID NO: 2583365 - DNA, 25 bp, Homo sapien
ccagtgtctcgcagtcagagggcag

SEQ ID NO: 2583366 - DNA, 25 bp, Homo sapien
attctccagtgtctcgcagtcagag

SEQ ID NO: 2583367 - DNA, 25 bp, Homo sapien
agggaaccgaacattctccagtgtc

SEQ ID NO: 2583368 - DNA, 25 bp, Homo sapien
actcctggtgccctgcgaaggcatg

SEQ ID NO: 2583369 - DNA, 25 bp, Homo sapien
cacatggccgtccatggcagagcgc

SEQ ID NO: 2583370 - DNA, 25 bp, Homo sapien
gctccagggtaatggtgtggtcaca

SEQ ID NO: 2583371 - DNA, 25 bp, Homo sapien
cgtccatggcagagcgcccgcagtg

SEQ ID NO: 2583372 - DNA, 25 bp, Homo sapien
agtggtgtgcacatggccgtccatg

SEQ ID NO: 2583373 - DNA, 25 bp, Homo sapien
tatatcatatgtagggttagagtcg

SEQ ID NO: 2583374 - DNA, 25 bp, Homo sapien
agggcttctctatctctggaagttt

SEQ ID NO: 2583375 - DNA, 25 bp, Homo sapien
gagtcgtctcaaggttagagtttca

SEQ ID NO: 2583376 - DNA, 25 bp, Homo sapien
tcttataccttatcagggggctgga

SEQ ID NO: 2583377 - DNA, 25 bp, Homo sapien
tacttctcagcacgacacgcttgga

SEQ ID NO: 2583378 - DNA, 25 bp, Homo sapien
tatcctcagagtaggtgccttgtcc

SEQ ID NO: 2583379 - DNA, 25 bp, Homo sapien
tcgcacaatatgaaggaggtccaag

SEQ ID NO: 2583380 - DNA, 25 bp, Homo sapien
gaccagttgaacaagtacgcctgaa

SEQ ID NO: 2583381 - DNA, 25 bp, Homo sapien
tgcctcagagacacataccctaatg

SEQ ID NO: 2583382 - DNA, 25 bp, Homo sapien
gctgaacgatggctcctatctggag

SEQ ID NO: 2583383 - DNA, 25 bp, Homo sapien
gtttgctcggacacggctgaacgat

SEQ ID NO: 2583384 - DNA, 25 bp, Homo sapien
tctgcaacaagaagtcgatgccttc

SEQ ID NO: 2583385 - DNA, 25 bp, Homo sapien
gaaaacaaccaaggcaatttcagga

SEQ ID NO: 2583386 - DNA, 25 bp, Homo sapien
tttcaggattcactgtcacaatagg

SEQ ID NO: 2583387 - DNA, 25 bp, Homo sapien
aggattcactgtcacaataggccca

SEQ ID NO: 2583388 - DNA, 25 bp, Homo sapien
ccaaggcaatttcaggattcactgt

SEQ ID NO: 2583389 - DNA, 25 bp, Homo sapien
cagtgcatactgtggtaagctcagg

SEQ ID NO: 2583390 - DNA, 25 bp, Homo sapien
cataggtcagtgcatactgtggtaa

SEQ ID NO: 2583391 - DNA, 25 bp, Homo sapien
taggtcagtgcatactgtggtaagc

SEQ ID NO: 2583392 - DNA, 25 bp, Homo sapien
catactgtggtaagctcagggagat

SEQ ID NO: 2583393 - DNA, 25 bp, Homo sapien
cagctggttaatcacagagctctgg

SEQ ID NO: 2583394 - DNA, 25 bp, Homo sapien
tccggcccccgactcatcagcatcg

SEQ ID NO: 2583395 - DNA, 25 bp, Homo sapien
tcagctggttaatcacagagctctg

SEQ ID NO: 2583396 - DNA, 25 bp, Homo sapien
gttggggcatccggcccccgactca

SEQ ID NO: 2583397 - DNA, 25 bp, Homo sapien
gaagatcagtcagtgccttttgtgg

SEQ ID NO: 2583398 - DNA, 25 bp, Homo sapien
gagacccaatacagtgagcagtgcc

SEQ ID NO: 2583399 - DNA, 25 bp, Homo sapien
cagtgccttttgtggtggagaccca

SEQ ID NO: 2583400 - DNA, 25 bp, Homo sapien
ggtggagacccaatacagtgagcag

SEQ ID NO: 2583401 - DNA, 25 bp, Homo sapien
tcgatcgtctgtgaaaatgagtccg

SEQ ID NO: 2583402 - DNA, 25 bp, Homo sapien
gggcacgcgtgtgcttcaaaatttc

SEQ ID NO: 2583403 - DNA, 25 bp, Homo sapien
tccatgtgagcagccatcaatgcac

SEQ ID NO: 2583404 - DNA, 25 bp, Homo sapien
aatgagtccgtgtccaacaaacagc

SEQ ID NO: 2583405 - DNA, 25 bp, Homo sapien
cgtggctgtaacaaaaatcgatgta

SEQ ID NO: 2583406 - DNA, 25 bp, Homo sapien
tcgatgtatttctgacgcggctgcg

SEQ ID NO: 2583407 - DNA, 25 bp, Homo sapien
tatttttaattggatgggcctcgtg

SEQ ID NO: 2583408 - DNA, 25 bp, Homo sapien
gaataaggacttggaacacgctggt

SEQ ID NO: 2583409 - DNA, 25 bp, Homo sapien
tgcagacagcaaaccgcagcaccgt

SEQ ID NO: 2583410 - DNA, 25 bp, Homo sapien
gacagcaaaccgcagcaccgttgct

SEQ ID NO: 2583411 - DNA, 25 bp, Homo sapien
ggtaagtgccgcaggcagatcccgg

SEQ ID NO: 2583412 - DNA, 25 bp, Homo sapien
gcagatcccggggtgcagacagcaa

SEQ ID NO: 2583413 - DNA, 25 bp, Homo sapien
aaacacccttgacatctgcattaag

SEQ ID NO: 2583414 - DNA, 25 bp, Homo sapien
cccttgacatctgcattaagagccc

SEQ ID NO: 2583415 - DNA, 25 bp, Homo sapien
gcattaagagcccaggggacctctg

SEQ ID NO: 2583416 - DNA, 25 bp, Homo sapien
ctgcaaacacccttgacatctgcat

SEQ ID NO: 2583417 - DNA, 25 bp, Homo sapien
gaattgggcctctttatatagcatc

SEQ ID NO: 2583418 - DNA, 25 bp, Homo sapien
agctgtttggacttattcaagcatg

SEQ ID NO: 2583419 - DNA, 25 bp, Homo sapien
tgttctcaaatagcccaaataatct

SEQ ID NO: 2583420 - DNA, 25 bp, Homo sapien
tatttcaacccatagttcagctgct

SEQ ID NO: 2583421 - DNA, 25 bp, Homo sapien
taatcccctcggcagtgactaagca

SEQ ID NO: 2583422 - DNA, 25 bp, Homo sapien
ggcagtgactaagcaccttccagtc

SEQ ID NO: 2583423 - DNA, 25 bp, Homo sapien
attaatttcagcacgggcgcggcct

SEQ ID NO: 2583424 - DNA, 25 bp, Homo sapien
tgctcgtcccctggaatggctccta

SEQ ID NO: 2583425 - DNA, 25 bp, Homo sapien
ccttcaggacgcgtgggcgggacgg

SEQ ID NO: 2583426 - DNA, 25 bp, Homo sapien
tgtcgcctgcgcgtttccgggagcc

SEQ ID NO: 2583427 - DNA, 25 bp, Homo sapien
ggaccgacgctgcagccgggaggag

SEQ ID NO: 2583428 - DNA, 25 bp, Homo sapien
ctgcgggcgctgaggactgaactct

SEQ ID NO: 2583429 - DNA, 25 bp, Homo sapien
gaaaactcatgccaaagaaggaggg

SEQ ID NO: 2583430 - DNA, 25 bp, Homo sapien
tttagttccaagctttctgatggcc

SEQ ID NO: 2583431 - DNA, 25 bp, Homo sapien
taccgtgttcattgggtgaccccta

SEQ ID NO: 2583432 - DNA, 25 bp, Homo sapien
taatccgtgtattagtcttcaaggg

SEQ ID NO: 2583433 - DNA, 25 bp, Homo sapien
cagtttgtagcaagtgggccacgaa

SEQ ID NO: 2583434 - DNA, 25 bp, Homo sapien
cccttcttcccgctaagaggctggg

SEQ ID NO: 2583435 - DNA, 25 bp, Homo sapien
gggccacgaatgctccttttctgat

SEQ ID NO: 2583436 - DNA, 25 bp, Homo sapien
gctggttctgggataggacccaccc

SEQ ID NO: 2583437 - DNA, 25 bp, Homo sapien
tttgatgaatgtgaccaggcgaccc

SEQ ID NO: 2583438 - DNA, 25 bp, Homo sapien
gctgaagctcgtatcaaaggcacaa

SEQ ID NO: 2583439 - DNA, 25 bp, Homo sapien
tattaggttcactgggaagcggacg

SEQ ID NO: 2583440 - DNA, 25 bp, Homo sapien
tctgtgtgccctgcctgatcctagg

SEQ ID NO: 2583441 - DNA, 25 bp, Homo sapien
cagtaatgaaacaaaggcctcgagc

SEQ ID NO: 2583442 - DNA, 25 bp, Homo sapien
gggatcatgcctcatcaaacagtaa

SEQ ID NO: 2583443 - DNA, 25 bp, Homo sapien
tcacaaaatcgcagccttgggcaat

SEQ ID NO: 2583444 - DNA, 25 bp, Homo sapien
ggcctcgagccagcttctctaagaa

SEQ ID NO: 2583445 - DNA, 25 bp, Homo sapien
cagtgaagagtttttgctacccgca

SEQ ID NO: 2583446 - DNA, 25 bp, Homo sapien
cacaaaaggatcaggcggtgcccat

SEQ ID NO: 2583447 - DNA, 25 bp, Homo sapien
tgctgacaccagtttacaaggccct

SEQ ID NO: 2583448 - DNA, 25 bp, Homo sapien
gagggccatctcatgcacgttggaa

SEQ ID NO: 2583449 - DNA, 25 bp, Homo sapien
tattgggactccgtactcaggtgac

SEQ ID NO: 2583450 - DNA, 25 bp, Homo sapien
cagaccacatttaggacccgagagc

SEQ ID NO: 2583451 - DNA, 25 bp, Homo sapien
tattgaagacggatgacaactgggc

SEQ ID NO: 2583452 - DNA, 25 bp, Homo sapien
gggtgatcacaactcattactggct

SEQ ID NO: 2583453 - DNA, 25 bp, Homo sapien
ttaattagacacattgcagtactat

SEQ ID NO: 2583454 - DNA, 25 bp, Homo sapien
cctttaattagacacattgcagtac

SEQ ID NO: 2583455 - DNA, 25 bp, Homo sapien
tgcagtactattgctattagggggt

SEQ ID NO: 2583456 - DNA, 25 bp, Homo sapien
cagtactattgctattagggggtct

SEQ ID NO: 2583457 - DNA, 25 bp, Homo sapien
ttaaatagtcttcttaactgtggga

SEQ ID NO: 2583458 - DNA, 25 bp, Homo sapien
ggagaaatcagtcccagtccttttg

SEQ ID NO: 2583459 - DNA, 25 bp, Homo sapien
tgaggctgaatgctatccagtgcac

SEQ ID NO: 2583460 - DNA, 25 bp, Homo sapien
tggttcagtcagcaatctgcccatg

SEQ ID NO: 2583461 - DNA, 25 bp, Homo sapien
tattgattgcattttacttcgaaag

SEQ ID NO: 2583462 - DNA, 25 bp, Homo sapien
ccgattcggagttcttgggaattgt

SEQ ID NO: 2583463 - DNA, 25 bp, Homo sapien
ctcaacagccgattcggagttcttg

SEQ ID NO: 2583464 - DNA, 25 bp, Homo sapien
gcattttacttcgaaagtcgttcat

SEQ ID NO: 2583465 - DNA, 25 bp, Homo sapien
tttgggacttgtaaatcctaggcat

SEQ ID NO: 2583466 - DNA, 25 bp, Homo sapien
gtttgggacttgtaaatcctaggca

SEQ ID NO: 2583467 - DNA, 25 bp, Homo sapien
ctctggccagggttggcaatgtgct

SEQ ID NO: 2583468 - DNA, 25 bp, Homo sapien
ttgtccaaaacattaatatcacccc

SEQ ID NO: 2583469 - DNA, 25 bp, Homo sapien
tgtcactggaagatacgtaaggtct

SEQ ID NO: 2583470 - DNA, 25 bp, Homo sapien
tccttccatattacatattgtctgt

SEQ ID NO: 2583471 - DNA, 25 bp, Homo sapien
agacaactttaaagcttcagttcct

SEQ ID NO: 2583472 - DNA, 25 bp, Homo sapien
tttgatatataaccctatatctatg

SEQ ID NO: 2583473 - DNA, 25 bp, Homo sapien
ttagacaactttaaagcttcagttc

SEQ ID NO: 2583474 - DNA, 25 bp, Homo sapien
cattgtagaggaagttaccactttt

SEQ ID NO: 2583475 - DNA, 25 bp, Homo sapien
cacagagacccctaatgatggtgga

SEQ ID NO: 2583476 - DNA, 25 bp, Homo sapien
tattccacagagacccctaatgatg

SEQ ID NO: 2583477 - DNA, 25 bp, Homo sapien
acccctaatgatggtggaaactgga

SEQ ID NO: 2583478 - DNA, 25 bp, Homo sapien
atctattccacagagacccctaatg

SEQ ID NO: 2583479 - DNA, 25 bp, Homo sapien
agagccaggcgcccttgagcggcat

SEQ ID NO: 2583480 - DNA, 25 bp, Homo sapien
tctcctaggatccatccgtggcagt

SEQ ID NO: 2583481 - DNA, 25 bp, Homo sapien
gctcaacaagctcactcttcacggg

SEQ ID NO: 2583482 - DNA, 25 bp, Homo sapien
ccgtggcagttttcagagtggatac

SEQ ID NO: 2583483 - DNA, 25 bp, Homo sapien
acaggaaattcgctcctgccgagct

SEQ ID NO: 2583484 - DNA, 25 bp, Homo sapien
ctgccgagctcactctccggctggc

SEQ ID NO: 2583485 - DNA, 25 bp, Homo sapien
ggacaggaaattcgctcctgccgag

SEQ ID NO: 2583486 - DNA, 25 bp, Homo sapien
acacagggacaggaaattcgctcct

SEQ ID NO: 2583487 - DNA, 25 bp, Homo sapien
gcacaacagacacagtccaactcat

SEQ ID NO: 2583488 - DNA, 25 bp, Homo sapien
ctgcacaacagacacagtccaactc

SEQ ID NO: 2583489 - DNA, 25 bp, Homo sapien
tgcacaacagacacagtccaactca

SEQ ID NO: 2583490 - DNA, 25 bp, Homo sapien
caggacgtcgcaacgccaagagagc

SEQ ID NO: 2583491 - DNA, 25 bp, Homo sapien
aaaactgctgaccaggacgtcgcaa

SEQ ID NO: 2583492 - DNA, 25 bp, Homo sapien
gcaccttcagccctctgtggcgagt

SEQ ID NO: 2583493 - DNA, 25 bp, Homo sapien
gagagccattagcagcaccttcagc

SEQ ID NO: 2583494 - DNA, 25 bp, Homo sapien
cactacgatgttaaacctattagag

SEQ ID NO: 2583495 - DNA, 25 bp, Homo sapien
gtgcctctgtccactacgatgttaa

SEQ ID NO: 2583496 - DNA, 25 bp, Homo sapien
tctgtccactacgatgttaaaccta

SEQ ID NO: 2583497 - DNA, 25 bp, Homo sapien
tgtccactacgatgttaaacctatt

SEQ ID NO: 2583498 - DNA, 25 bp, Homo sapien
tcatagtgccccagtgtgccctcac

SEQ ID NO: 2583499 - DNA, 25 bp, Homo sapien
tcatcatagtgccccagtgtgccct

SEQ ID NO: 2583500 - DNA, 25 bp, Homo sapien
atcatagtgccccagtgtgccctca

SEQ ID NO: 2583501 - DNA, 25 bp, Homo sapien
cctcatcatagtgccccagtgtgcc

SEQ ID NO: 2583502 - DNA, 25 bp, Homo sapien
ctcatcatagtgtcccagtgtgcgc

SEQ ID NO: 2583503 - DNA, 25 bp, Homo sapien
tcatcatagtgtcccagtgtgcgct

SEQ ID NO: 2583504 - DNA, 25 bp, Homo sapien
atcatagtgccccagtgtgcactca

SEQ ID NO: 2583505 - DNA, 25 bp, Homo sapien
ctcatcatagtgtcccagtgtgcac

SEQ ID NO: 2583506 - DNA, 25 bp, Homo sapien
tcatcatagtgtcccagtgtgcact

SEQ ID NO: 2583507 - DNA, 25 bp, Homo sapien
tcatcatagtgtcccagtgtgcact

SEQ ID NO: 2583508 - DNA, 25 bp, Homo sapien
ctcatcatagtgtcccagtgtgcac

SEQ ID NO: 2583509 - DNA, 25 bp, Homo sapien
atcatagtgccccagtgtgcactca

SEQ ID NO: 2583510 - DNA, 25 bp, Homo sapien
tcatagtgccccagtgtgcactcac

SEQ ID NO: 2583511 - DNA, 25 bp, Homo sapien
tcatcatagtgtcccagtgtgcgct

SEQ ID NO: 2583512 - DNA, 25 bp, Homo sapien
ctcatcatagtgtcccagtgtgcgc

SEQ ID NO: 2583513 - DNA, 25 bp, Homo sapien
ctcatcatagtgtcccagtgtgcgc

SEQ ID NO: 2583514 - DNA, 25 bp, Homo sapien
tcatcatagtgtcccagtgtgcgct

SEQ ID NO: 2583515 - DNA, 25 bp, Homo sapien
ctcatcatagtgtcccagtgtgcac

SEQ ID NO: 2583516 - DNA, 25 bp, Homo sapien
tcatcatagtgtcccagtgtgcgct

SEQ ID NO: 2583517 - DNA, 25 bp, Homo sapien
ctcatcatagtgtcccagtgtgcgc

SEQ ID NO: 2583518 - DNA, 25 bp, Homo sapien
tcatcatagtgtcccagtgtgcact

SEQ ID NO: 2583519 - DNA, 25 bp, Homo sapien
ctagcctcatcatagtgtcccagtg

SEQ ID NO: 2583520 - DNA, 25 bp, Homo sapien
cacctagcctcatcatagtgtccca

SEQ ID NO: 2583521 - DNA, 25 bp, Homo sapien
actcacctagcctcatcatagtgtc

SEQ ID NO: 2583522 - DNA, 25 bp, Homo sapien
tgcactcacctagcctcatcatagt

SEQ ID NO: 2583523 - DNA, 25 bp, Homo sapien
ctcatcatagtgtcccagtgtgcgc

SEQ ID NO: 2583524 - DNA, 25 bp, Homo sapien
tcatcatagtgtcccagtgtgcact

SEQ ID NO: 2583525 - DNA, 25 bp, Homo sapien
tcatcatagtgtcccagtgtgcgct

SEQ ID NO: 2583526 - DNA, 25 bp, Homo sapien
ctcatcatagtgtcccagtgtgcac

SEQ ID NO: 2583527 - DNA, 25 bp, Homo sapien
cagtgtgcagtcatctggcgtcatc

SEQ ID NO: 2583528 - DNA, 25 bp, Homo sapien
agtgtgcagtcatctggcgtcatca

SEQ ID NO: 2583529 - DNA, 25 bp, Homo sapien
gtgtgcagtcatctggcgtcatcat

SEQ ID NO: 2583530 - DNA, 25 bp, Homo sapien
catcatagtgtcccagtgtgcgctc

SEQ ID NO: 2583531 - DNA, 25 bp, Homo sapien
tcatcatagtgtcccagtgtgcgct

SEQ ID NO: 2583532 - DNA, 25 bp, Homo sapien
ctcatcatagtgtcccagtgtgcgc

SEQ ID NO: 2583533 - DNA, 25 bp, Homo sapien
tcatagtgccccagtgtgcactcac

SEQ ID NO: 2583534 - DNA, 25 bp, Homo sapien
tatatatgtcaaacagcaatagaaa

SEQ ID NO: 2583535 - DNA, 25 bp, Homo sapien
atatatatgtcaaacagcaatagaa

SEQ ID NO: 2583536 - DNA, 25 bp, Homo sapien
tatatatatgtcaaacagcaataga

SEQ ID NO: 2583537 - DNA, 25 bp, Homo sapien
tgcactcgccctaatgtcaatttat

SEQ ID NO: 2583538 - DNA, 25 bp, Homo sapien
tgtaagaatttagtcacgtactctg

SEQ ID NO: 2583539 - DNA, 25 bp, Homo sapien
gtcatcatctccctagacagtgacc

SEQ ID NO: 2583540 - DNA, 25 bp, Homo sapien
gctgaagcgcaatgatcttggcaca

SEQ ID NO: 2583541 - DNA, 25 bp, Homo sapien
agcagaataaacatgtagataccag

SEQ ID NO: 2583542 - DNA, 25 bp, Homo sapien
taaacatgtagataccagggacaag

SEQ ID NO: 2583543 - DNA, 25 bp, Homo sapien
aaacatgtagataccagggacaaga

SEQ ID NO: 2583544 - DNA, 25 bp, Homo sapien
aacatgtagataccagggacaagac

SEQ ID NO: 2583545 - DNA, 25 bp, Homo sapien
tgaactcctaaagctttccagactg

SEQ ID NO: 2583546 - DNA, 25 bp, Homo sapien
actgtgaactcctaaagctttccag

SEQ ID NO: 2583547 - DNA, 25 bp, Homo sapien
ctcctaaagctttccagactgcgaa

SEQ ID NO: 2583548 - DNA, 25 bp, Homo sapien
aactcctaaagctttccagactgcg

SEQ ID NO: 2583549 - DNA, 25 bp, Homo sapien
gaagacccgctttccggtaatgcag

SEQ ID NO: 2583550 - DNA, 25 bp, Homo sapien
ggaagacccgctttccggtaatgca

SEQ ID NO: 2583551 - DNA, 25 bp, Homo sapien
gcccagagctcgcaaggcaagggaa

SEQ ID NO: 2583552 - DNA, 25 bp, Homo sapien
ctataggaaaaaagtggctagttca

SEQ ID NO: 2583553 - DNA, 25 bp, Homo sapien
tataggaaaaaagtggctagttcag

SEQ ID NO: 2583554 - DNA, 25 bp, Homo sapien
cattcccgctgcagcaacggtacca

SEQ ID NO: 2583555 - DNA, 25 bp, Homo sapien
attcccgctgcagcaacggtaccaa

SEQ ID NO: 2583556 - DNA, 25 bp, Homo sapien
agcattcccgctgcagcaacggtac

SEQ ID NO: 2583557 - DNA, 25 bp, Homo sapien
ctccagcccagaggccggctgccca

SEQ ID NO: 2583558 - DNA, 25 bp, Homo sapien
gccggtcattcgtggaccccggagc

SEQ ID NO: 2583559 - DNA, 25 bp, Homo sapien
tgcccagttgcagcgcccgctgtct

SEQ ID NO: 2583560 - DNA, 25 bp, Homo sapien
aaccaggaaaagccggtcattcgtg

SEQ ID NO: 2583561 - DNA, 25 bp, Homo sapien
tgggcccgggtggaagcgagaacca

SEQ ID NO: 2583562 - DNA, 25 bp, Homo sapien
taggtcgcctctagtgcgtccgtcc

SEQ ID NO: 2583563 - DNA, 25 bp, Homo sapien
aagcgagaaccaggcggaggagaaa

SEQ ID NO: 2583564 - DNA, 25 bp, Homo sapien
gtttaggtcgcctctagtgcgtccg

SEQ ID NO: 2583565 - DNA, 25 bp, Homo sapien
tgtttgaaagaacgctcagccccga

SEQ ID NO: 2583566 - DNA, 25 bp, Homo sapien
cctccgtcgggaagtggaacactca

SEQ ID NO: 2583567 - DNA, 25 bp, Homo sapien
gatgaccgaatgaaagtaccacccc

SEQ ID NO: 2583568 - DNA, 25 bp, Homo sapien
tccaaggccgtctcttagggaggat

SEQ ID NO: 2583569 - DNA, 25 bp, Homo sapien
aagcgagttgaaccagagtcaccac

SEQ ID NO: 2583570 - DNA, 25 bp, Homo sapien
caaagcgagttgaaccagagtcacc

SEQ ID NO: 2583571 - DNA, 25 bp, Homo sapien
gcgagttgaaccagagtcaccacca

SEQ ID NO: 2583572 - DNA, 25 bp, Homo sapien
cgagttgaaccagagtcaccaccag

SEQ ID NO: 2583573 - DNA, 25 bp, Homo sapien
gtgtgggaagtgacactgcgtgtgg

SEQ ID NO: 2583574 - DNA, 25 bp, Homo sapien
tcagtgtggtcatagagcctcagtg

SEQ ID NO: 2583575 - DNA, 25 bp, Homo sapien
tgcgtgtgggctggcatcatcagtg

SEQ ID NO: 2583576 - DNA, 25 bp, Homo sapien
catcagtgtggtcatagagcctcag

SEQ ID NO: 2583577 - DNA, 25 bp, Homo sapien
agtttggtggtcttgcatggggttc

SEQ ID NO: 2583578 - DNA, 25 bp, Homo sapien
gtttggtggtcttgcatggggttca

SEQ ID NO: 2583579 - DNA, 25 bp, Homo sapien
cagtttggtggtcttgcatggggtt

SEQ ID NO: 2583580 - DNA, 25 bp, Homo sapien
tttggtggtcttgcatggggttcat

SEQ ID NO: 2583581 - DNA, 25 bp, Homo sapien
tatctgtcttagactccgccttcac

SEQ ID NO: 2583582 - DNA, 25 bp, Homo sapien
gtatctgtcttagactccgccttca

SEQ ID NO: 2583583 - DNA, 25 bp, Homo sapien
ctgtcttagactccgccttcaccat

SEQ ID NO: 2583584 - DNA, 25 bp, Homo sapien
gcgtatctgtcttagactccgcctt

SEQ ID NO: 2583585 - DNA, 25 bp, Homo sapien
ggtttgggattgcaggcctactgtt

SEQ ID NO: 2583586 - DNA, 25 bp, Homo sapien
caggcctactgttttaattgcagac

SEQ ID NO: 2583587 - DNA, 25 bp, Homo sapien
aggtatccattggtttgggattgca

SEQ ID NO: 2583588 - DNA, 25 bp, Homo sapien
gggattgcaggcctactgttttaat

SEQ ID NO: 2583589 - DNA, 25 bp, Homo sapien
tcaaaatgtccccgaagagggctta

SEQ ID NO: 2583590 - DNA, 25 bp, Homo sapien
caaaatgtccccgaagagggcttat

SEQ ID NO: 2583591 - DNA, 25 bp, Homo sapien
tggttgcagaacagatcgtcaacag

SEQ ID NO: 2583592 - DNA, 25 bp, Homo sapien
gaggttcagattcacccctttagat

SEQ ID NO: 2583593 - DNA, 25 bp, Homo sapien
aacagatcgtcaacagtgggacggg

SEQ ID NO: 2583594 - DNA, 25 bp, Homo sapien
catgcctctgccagcggagaggttc

SEQ ID NO: 2583595 - DNA, 25 bp, Homo sapien
ataaggacaaccgccatttcatgtt

SEQ ID NO: 2583596 - DNA, 25 bp, Homo sapien
ctgataaggacaaccgccatttcat

SEQ ID NO: 2583597 - DNA, 25 bp, Homo sapien
aggacaaccgccatttcatgttttg

SEQ ID NO: 2583598 - DNA, 25 bp, Homo sapien
tgataaggacaaccgccatttcatg

SEQ ID NO: 2583599 - DNA, 25 bp, Homo sapien
cattccccaagccctgggcggacct

SEQ ID NO: 2583600 - DNA, 25 bp, Homo sapien
agccctgggcggacctccgactcgt

SEQ ID NO: 2583601 - DNA, 25 bp, Homo sapien
tccgactcgttccccactccccaga

SEQ ID NO: 2583602 - DNA, 25 bp, Homo sapien
ccaagccctgggcggacctccgact

SEQ ID NO: 2583603 - DNA, 25 bp, Homo sapien
agatgcgcagagctaggtaggccac

SEQ ID NO: 2583604 - DNA, 25 bp, Homo sapien
gcagatgcgcagagctaggtaggcc

SEQ ID NO: 2583605 - DNA, 25 bp, Homo sapien
gtaggccacggtgcctgcagtgcct

SEQ ID NO: 2583606 - DNA, 25 bp, Homo sapien
aagagcgagtagcagatgcgcagag

SEQ ID NO: 2583607 - DNA, 25 bp, Homo sapien
ggtgttaggaaaatcagtgctgagc

SEQ ID NO: 2583608 - DNA, 25 bp, Homo sapien
aaatccattctttacagagaagacc

SEQ ID NO: 2583609 - DNA, 25 bp, Homo sapien
gaagaccagaaacttttgaaatcca

SEQ ID NO: 2583610 - DNA, 25 bp, Homo sapien
cattgttagtagagagaagcatttc

SEQ ID NO: 2583611 - DNA, 25 bp, Homo sapien
gcttccttaaaacggagtgcatctt

SEQ ID NO: 2583612 - DNA, 25 bp, Homo sapien
ccttaaaacggagtgcatcttattt

SEQ ID NO: 2583613 - DNA, 25 bp, Homo sapien
aacggagtgcatcttattttgtttc

SEQ ID NO: 2583614 - DNA, 25 bp, Homo sapien
taaaacggagtgcatcttattttgt

SEQ ID NO: 2583615 - DNA, 25 bp, Homo sapien
tggcggcacactctctagacttcag

SEQ ID NO: 2583616 - DNA, 25 bp, Homo sapien
agtgctgtcatcattgagtgaggag

SEQ ID NO: 2583617 - DNA, 25 bp, Homo sapien
gcacactctctagacttcagcagca

SEQ ID NO: 2583618 - DNA, 25 bp, Homo sapien
ttggcctgggctggcggcacactct

SEQ ID NO: 2583619 - DNA, 25 bp, Homo sapien
tgaggtccaggaagagcaggccagg

SEQ ID NO: 2583620 - DNA, 25 bp, Homo sapien
ctgaggtccaggaagagcaggccag

SEQ ID NO: 2583621 - DNA, 25 bp, Homo sapien
cagtgcagccccaaggtagtgtctt

SEQ ID NO: 2583622 - DNA, 25 bp, Homo sapien
tgcagccccaaggtagtgtcttggc

SEQ ID NO: 2583623 - DNA, 25 bp, Homo sapien
agtgcagccccaaggtagtgtcttg

SEQ ID NO: 2583624 - DNA, 25 bp, Homo sapien
cagccccaaggtagtgtcttggcct

SEQ ID NO: 2583625 - DNA, 25 bp, Homo sapien
tattaacattgattacccgagggaa

SEQ ID NO: 2583626 - DNA, 25 bp, Homo sapien
taaaggacgccactcttccaaaatg

SEQ ID NO: 2583627 - DNA, 25 bp, Homo sapien
taggactgtcccatgtgaaaggaga

SEQ ID NO: 2583628 - DNA, 25 bp, Homo sapien
ggtttacgccctctcctgaatttga

SEQ ID NO: 2583629 - DNA, 25 bp, Homo sapien
tcctaggactgtgacactttgacct

SEQ ID NO: 2583630 - DNA, 25 bp, Homo sapien
tcagcagttacttccagccatccta

SEQ ID NO: 2583631 - DNA, 25 bp, Homo sapien
tatttcaacacaagatgttcccagc

SEQ ID NO: 2583632 - DNA, 25 bp, Homo sapien
gacatcccttctggcgatttcggag

SEQ ID NO: 2583633 - DNA, 25 bp, Homo sapien
tggcttcttgaaggtatgctgagaa

SEQ ID NO: 2583634 - DNA, 25 bp, Homo sapien
ctgaaaggtatataaatcatgtcct

SEQ ID NO: 2583635 - DNA, 25 bp, Homo sapien
cacagtggataaggctatacttcct

SEQ ID NO: 2583636 - DNA, 25 bp, Homo sapien
gataaggctatacttcctcttggct

SEQ ID NO: 2583637 - DNA, 25 bp, Homo sapien
ggtttgtggaatgctttgagctgct

SEQ ID NO: 2583638 - DNA, 25 bp, Homo sapien
ttgtggaatgctttgagctgctgac

SEQ ID NO: 2583639 - DNA, 25 bp, Homo sapien
atgggtttgtggaatgctttgagct

SEQ ID NO: 2583640 - DNA, 25 bp, Homo sapien
ctaatgagatgggtttgtggaatgc

SEQ ID NO: 2583641 - DNA, 25 bp, Homo sapien
ggaattttgcctgtgcccggagtca

SEQ ID NO: 2583642 - DNA, 25 bp, Homo sapien
taagggcatccacgctgttcaaacc

SEQ ID NO: 2583643 - DNA, 25 bp, Homo sapien
agtgaatgtgaacgcagcctggcca

SEQ ID NO: 2583644 - DNA, 25 bp, Homo sapien
gaacatgtgtaacgtgcaaactgcc

SEQ ID NO: 2583645 - DNA, 25 bp, Homo sapien
tagtttctaaggccccgagtcgtgc

SEQ ID NO: 2583646 - DNA, 25 bp, Homo sapien
ctctcctgcccttgtcgcgggggat

SEQ ID NO: 2583647 - DNA, 25 bp, Homo sapien
tcctgcccttgtcgcgggggatgca

SEQ ID NO: 2583648 - DNA, 25 bp, Homo sapien
taaggccccgagtcgtgcttctcct

SEQ ID NO: 2583649 - DNA, 25 bp, Homo sapien
tgcccagctgccttcgttttctgcg

SEQ ID NO: 2583650 - DNA, 25 bp, Homo sapien
ctgcgggcggaagaactacacatcc

SEQ ID NO: 2583651 - DNA, 25 bp, Homo sapien
cgggcggaagaactacacatcccag

SEQ ID NO: 2583652 - DNA, 25 bp, Homo sapien
ctcgggaaattgagcatccctgccc

SEQ ID NO: 2583653 - DNA, 25 bp, Homo sapien
tctgcgggggctcggacccgcggca

SEQ ID NO: 2583654 - DNA, 25 bp, Homo sapien
tgcgggggctcggacccgcggcaac

SEQ ID NO: 2583655 - DNA, 25 bp, Homo sapien
ctctgcgggggctcggacccgcggc

SEQ ID NO: 2583656 - DNA, 25 bp, Homo sapien
ctgcgggggctcggacccgcggcaa

SEQ ID NO: 2583657 - DNA, 25 bp, Homo sapien
gagggcgcgagcgagcagaagcccc

SEQ ID NO: 2583658 - DNA, 25 bp, Homo sapien
ccaggctccggccgtcccagggccg

SEQ ID NO: 2583659 - DNA, 25 bp, Homo sapien
tgggagggcgcgagcgagcagaagc

SEQ ID NO: 2583660 - DNA, 25 bp, Homo sapien
gggcgcgagcgagcagaagccccag

SEQ ID NO: 2583661 - DNA, 25 bp, Homo sapien
agcgagcagctgtaaacgtccgtgg

SEQ ID NO: 2583662 - DNA, 25 bp, Homo sapien
aatggagggagaaataaagcgagca

SEQ ID NO: 2583663 - DNA, 25 bp, Homo sapien
gaaataaagcgagcagctgtaaacg

SEQ ID NO: 2583664 - DNA, 25 bp, Homo sapien
ggagaggagaagcacgcgacccctc

SEQ ID NO: 2583665 - DNA, 25 bp, Homo sapien
cgggccccgagaccctcgcccgcag

SEQ ID NO: 2583666 - DNA, 25 bp, Homo sapien
tcccgaagtcaggccggcctagggc

SEQ ID NO: 2583667 - DNA, 25 bp, Homo sapien
cagcccatttctcgggcatcagcag

SEQ ID NO: 2583668 - DNA, 25 bp, Homo sapien
atttctcgggcatcagcagagtccc

SEQ ID NO: 2583669 - DNA, 25 bp, Homo sapien
tcagcagagtccccgggcgacgcga

SEQ ID NO: 2583670 - DNA, 25 bp, Homo sapien
ccccagcccatttctcgggcatcag

SEQ ID NO: 2583671 - DNA, 25 bp, Homo sapien
gaagaagggaggcgcaggccgggga

SEQ ID NO: 2583672 - DNA, 25 bp, Homo sapien
ggaggaagaagggaggcgcaggccg

SEQ ID NO: 2583673 - DNA, 25 bp, Homo sapien
agaagggaggcgcaggccggggagg

SEQ ID NO: 2583674 - DNA, 25 bp, Homo sapien
aggaagaagggaggcgcaggccggg

SEQ ID NO: 2583675 - DNA, 25 bp, Homo sapien
gggaatgagcgtgtcccgaggcggc

SEQ ID NO: 2583676 - DNA, 25 bp, Homo sapien
gataaacccggaagaagccgcgaga

SEQ ID NO: 2583677 - DNA, 25 bp, Homo sapien
agtggcttgccggtggccgtgggaa

SEQ ID NO: 2583678 - DNA, 25 bp, Homo sapien
ccgcgagacggactgaagtcggcca

SEQ ID NO: 2583679 - DNA, 25 bp, Homo sapien
gggtgtcctcggcaaagttgtcgcc

SEQ ID NO: 2583680 - DNA, 25 bp, Homo sapien
ctggaagcgacggaggagtgctgcc

SEQ ID NO: 2583681 - DNA, 25 bp, Homo sapien
gctgccggaggaaggagtggaccca

SEQ ID NO: 2583682 - DNA, 25 bp, Homo sapien
ccgcagaagtggctcccgaggaagc

SEQ ID NO: 2583683 - DNA, 25 bp, Homo sapien
tgacactagtaggtagagtcagtgg

SEQ ID NO: 2583684 - DNA, 25 bp, Homo sapien
tcccccttgatgtttaggttctgtg

SEQ ID NO: 2583685 - DNA, 25 bp, Homo sapien
ttctcacacacaactcctcttcccc

SEQ ID NO: 2583686 - DNA, 25 bp, Homo sapien
ttccccatttccgatggtatgtgca

SEQ ID NO: 2583687 - DNA, 25 bp, Homo sapien
tcatcactataagtccattgaaggg

SEQ ID NO: 2583688 - DNA, 25 bp, Homo sapien
ccacagacaagtttggaggtgttcc

SEQ ID NO: 2583689 - DNA, 25 bp, Homo sapien
tcagcagcatcatatgaggtgagga

SEQ ID NO: 2583690 - DNA, 25 bp, Homo sapien
actgggtctccgcattctacactgc

SEQ ID NO: 2583691 - DNA, 25 bp, Homo sapien
catcaggctgtacgcctcctttcct

SEQ ID NO: 2583692 - DNA, 25 bp, Homo sapien
cgccatcaggctgtacgcctccttt

SEQ ID NO: 2583693 - DNA, 25 bp, Homo sapien
aggctgtacgcctcctttccttcct

SEQ ID NO: 2583694 - DNA, 25 bp, Homo sapien
gccatcaggctgtacgcctcctttc

SEQ ID NO: 2583695 - DNA, 25 bp, Homo sapien
ttcccaccactggagcggcttccct

SEQ ID NO: 2583696 - DNA, 25 bp, Homo sapien
ctctcccaggcgcacattcctttgc

SEQ ID NO: 2583697 - DNA, 25 bp, Homo sapien
cccaggcgcacattcctttgcacat

SEQ ID NO: 2583698 - DNA, 25 bp, Homo sapien
gttgaccccggcaagggctctccca

SEQ ID NO: 2583699 - DNA, 25 bp, Homo sapien
tgcagtagtgagatgcacacctgct

SEQ ID NO: 2583700 - DNA, 25 bp, Homo sapien
gcagtagtgagatgcacacctgctg

SEQ ID NO: 2583701 - DNA, 25 bp, Homo sapien
cacacctgctgattgctagtctggg

SEQ ID NO: 2583702 - DNA, 25 bp, Homo sapien
gcacacctgctgattgctagtctgg

SEQ ID NO: 2583703 - DNA, 25 bp, Homo sapien
atgcacacctgctgattgctagtct

SEQ ID NO: 2583704 - DNA, 25 bp, Homo sapien
tgcacacctgctgattgctagtctg

SEQ ID NO: 2583705 - DNA, 25 bp, Homo sapien
tcaggtcttctggttggatcctgct

SEQ ID NO: 2583706 - DNA, 25 bp, Homo sapien
caggtcttctggttggatcctgctt

SEQ ID NO: 2583707 - DNA, 25 bp, Homo sapien
aggtcttctggttggatcctgcttt

SEQ ID NO: 2583708 - DNA, 25 bp, Homo sapien
gagactttcatccaggccaagagac

SEQ ID NO: 2583709 - DNA, 25 bp, Homo sapien
gccagagactttcatccaggccaag

SEQ ID NO: 2583710 - DNA, 25 bp, Homo sapien
cagagactttcatccaggccaagag

SEQ ID NO: 2583711 - DNA, 25 bp, Homo sapien
ctgccagagactttcatccaggcca

SEQ ID NO: 2583712 - DNA, 25 bp, Homo sapien
tttgttctgtctgaaaaatgtgttg

SEQ ID NO: 2583713 - DNA, 25 bp, Homo sapien
tgttctgtctgaaaaatgtgttgaa

SEQ ID NO: 2583714 - DNA, 25 bp, Homo sapien
tgtctgaaaaatgtgttgaaaagaa

SEQ ID NO: 2583715 - DNA, 25 bp, Homo sapien
tctgtctgaaaaatgtgttgaaaag

SEQ ID NO: 2583716 - DNA, 25 bp, Homo sapien
aggactcgacttggatgattggatg

SEQ ID NO: 2583717 - DNA, 25 bp, Homo sapien
ctaaggactcgacttggatgattgg

SEQ ID NO: 2583718 - DNA, 25 bp, Homo sapien
taaggactcgacttggatgattgga

SEQ ID NO: 2583719 - DNA, 25 bp, Homo sapien
aaggactcgacttggatgattggat

SEQ ID NO: 2583720 - DNA, 25 bp, Homo sapien
agagagggtagcctggtgcttgaca

SEQ ID NO: 2583721 - DNA, 25 bp, Homo sapien
agaagagagggtagcctggtgcttg

SEQ ID NO: 2583722 - DNA, 25 bp, Homo sapien
agagggtagcctggtgcttgacact

SEQ ID NO: 2583723 - DNA, 25 bp, Homo sapien
gaagagagggtagcctggtgcttga

SEQ ID NO: 2583724 - DNA, 25 bp, Homo sapien
ggaccaggaagtgggcgcatccatt

SEQ ID NO: 2583725 - DNA, 25 bp, Homo sapien
gcgcatccattgcagacggcctttc

SEQ ID NO: 2583726 - DNA, 25 bp, Homo sapien
tccataagagcgttttccgtggaaa

SEQ ID NO: 2583727 - DNA, 25 bp, Homo sapien
gaaacggagacttcattgtagtggg

SEQ ID NO: 2583728 - DNA, 25 bp, Homo sapien
ctggaggggcatcgggcctgggagc

SEQ ID NO: 2583729 - DNA, 25 bp, Homo sapien
gcagctgtgggagggctcgcctcat

SEQ ID NO: 2583730 - DNA, 25 bp, Homo sapien
gggcatcgggcctgggagcacagga

SEQ ID NO: 2583731 - DNA, 25 bp, Homo sapien
gaggggcatcgggcctgggagcaca

SEQ ID NO: 2583732 - DNA, 25 bp, Homo sapien
gctcctccggcaggaaccgggccat

SEQ ID NO: 2583733 - DNA, 25 bp, Homo sapien
ctcgctcctccggcaggaaccgggc

SEQ ID NO: 2583734 - DNA, 25 bp, Homo sapien
tcgctcctccggcaggaaccgggcc

SEQ ID NO: 2583735 - DNA, 25 bp, Homo sapien
ccctcgctcctccggcaggaaccgg

SEQ ID NO: 2583736 - DNA, 25 bp, Homo sapien
ccctactgagtgtggtaaaaatgcc

SEQ ID NO: 2583737 - DNA, 25 bp, Homo sapien
agtacatttaggtgcctactctgaa

SEQ ID NO: 2583738 - DNA, 25 bp, Homo sapien
tcttaattttgtggttctgactcac

SEQ ID NO: 2583739 - DNA, 25 bp, Homo sapien
tgcccaagcccattaaaacaatggc

SEQ ID NO: 2583740 - DNA, 25 bp, Homo sapien
cagcaaggacagctcggtgcgtgct

SEQ ID NO: 2583741 - DNA, 25 bp, Homo sapien
caaggacagctcggtgcgtgctgta

SEQ ID NO: 2583742 - DNA, 25 bp, Homo sapien
cagctcggtgcgtgctgtacagggc

SEQ ID NO: 2583743 - DNA, 25 bp, Homo sapien
aggacagctcggtgcgtgctgtaca

SEQ ID NO: 2583744 - DNA, 25 bp, Homo sapien
cagtgcttctgactgcgtcagacag

SEQ ID NO: 2583745 - DNA, 25 bp, Homo sapien
tgactgcgtcagacagtacccttct

SEQ ID NO: 2583746 - DNA, 25 bp, Homo sapien
gtcgcatttagggtatgcggccgcc

SEQ ID NO: 2583747 - DNA, 25 bp, Homo sapien
tggcatgggcaaggtgccgtttccc

SEQ ID NO: 2583748 - DNA, 25 bp, Homo sapien
cttttcctgggaagtgcccgcttcg

SEQ ID NO: 2583749 - DNA, 25 bp, Homo sapien
ttcctgggaagtgcccgcttcgtgt

SEQ ID NO: 2583750 - DNA, 25 bp, Homo sapien
tgcgcacccaggtccgccgtcctgt

SEQ ID NO: 2583751 - DNA, 25 bp, Homo sapien
aagtgcccgcttcgtgtctgcgcac

SEQ ID NO: 2583752 - DNA, 25 bp, Homo sapien
tagtaggcatcttctccgactcggc

SEQ ID NO: 2583753 - DNA, 25 bp, Homo sapien
tcatggaaagcaactgtctccaact

SEQ ID NO: 2583754 - DNA, 25 bp, Homo sapien
tctccgactcggcttctaagtccgg

SEQ ID NO: 2583755 - DNA, 25 bp, Homo sapien
tcttcctcttccttagtaggcatct

SEQ ID NO: 2583756 - DNA, 25 bp, Homo sapien
ccgtgggggcaaagaggatggagtt

SEQ ID NO: 2583757 - DNA, 25 bp, Homo sapien
ggggcaaagaggatggagttgctta

SEQ ID NO: 2583758 - DNA, 25 bp, Homo sapien
ctgccgtgggggcaaagaggatgga

SEQ ID NO: 2583759 - DNA, 25 bp, Homo sapien
gggcaaagaggatggagttgcttac

SEQ ID NO: 2583760 - DNA, 25 bp, Homo sapien
tggctggcgggctgcttattgcgaa

SEQ ID NO: 2583761 - DNA, 25 bp, Homo sapien
cctcttggctggcgggctgcttatt

SEQ ID NO: 2583762 - DNA, 25 bp, Homo sapien
cgggctgcttattgcgaaggtgaga

SEQ ID NO: 2583763 - DNA, 25 bp, Homo sapien
tgcttattgcgaaggtgagacagaa

SEQ ID NO: 2583764 - DNA, 25 bp, Homo sapien
tcgaaatgcgaagtaatgaactgga

SEQ ID NO: 2583765 - DNA, 25 bp, Homo sapien
tggtcttgatttcttagaactggag

SEQ ID NO: 2583766 - DNA, 25 bp, Homo sapien
cttgatttcttagaactggagcatg

SEQ ID NO: 2583767 - DNA, 25 bp, Homo sapien
ctggagcatgaacaacatgctcgaa

SEQ ID NO: 2583768 - DNA, 25 bp, Homo sapien
tgtcattcccgtgaacaggttgcgg

SEQ ID NO: 2583769 - DNA, 25 bp, Homo sapien
cttattgtcattcccgtgaacaggt

SEQ ID NO: 2583770 - DNA, 25 bp, Homo sapien
attgtcattcccgtgaacaggttgc

SEQ ID NO: 2583771 - DNA, 25 bp, Homo sapien
cattcccgtgaacaggttgcgggtc

SEQ ID NO: 2583772 - DNA, 25 bp, Homo sapien
atacggcggccagccaagaaaaggg

SEQ ID NO: 2583773 - DNA, 25 bp, Homo sapien
caaacgctacaagccatacggcggc

SEQ ID NO: 2583774 - DNA, 25 bp, Homo sapien
gactggctttgatggttatttctcc

SEQ ID NO: 2583775 - DNA, 25 bp, Homo sapien
gcttgagatcctctcttcgtgtggg

SEQ ID NO: 2583776 - DNA, 25 bp, Homo sapien
ctttttgtgtatcctcttgagggtt

SEQ ID NO: 2583777 - DNA, 25 bp, Homo sapien
tttttgtgtatcctcttgagggttc

SEQ ID NO: 2583778 - DNA, 25 bp, Homo sapien
agttcatcgccatcaccagtatatt

SEQ ID NO: 2583779 - DNA, 25 bp, Homo sapien
gcagccatgtaacggtctctcagga

SEQ ID NO: 2583780 - DNA, 25 bp, Homo sapien
ttctttagggctccagttattctga

SEQ ID NO: 2583781 - DNA, 25 bp, Homo sapien
ctgttctcagaacttgacagttctt

SEQ ID NO: 2583782 - DNA, 25 bp, Homo sapien
gaatgttgaagccaactggacaatg

SEQ ID NO: 2583783 - DNA, 25 bp, Homo sapien
tgcctgttactttgaaaaccatgtg

SEQ ID NO: 2583784 - DNA, 25 bp, Homo sapien
cctgttactttgaaaaccatgtgta

SEQ ID NO: 2583785 - DNA, 25 bp, Homo sapien
ctggctgcctgttactttgaaaacc

SEQ ID NO: 2583786 - DNA, 25 bp, Homo sapien
ggctgcctgttactttgaaaaccat

SEQ ID NO: 2583787 - DNA, 25 bp, Homo sapien
tttccgtagcggtaacatctggact

SEQ ID NO: 2583788 - DNA, 25 bp, Homo sapien
cacggtactcgtagacttgttctcc

SEQ ID NO: 2583789 - DNA, 25 bp, Homo sapien
ttactgcatcttcgtaacgccgaag

SEQ ID NO: 2583790 - DNA, 25 bp, Homo sapien
cccaaaggccttgagttactgcatc

SEQ ID NO: 2583791 - DNA, 25 bp, Homo sapien
tgggtgagcaattgaagccctagtg

SEQ ID NO: 2583792 - DNA, 25 bp, Homo sapien
ggtgagcaattgaagccctagtgtg

SEQ ID NO: 2583793 - DNA, 25 bp, Homo sapien
tgagcaattgaagccctagtgtggg

SEQ ID NO: 2583794 - DNA, 25 bp, Homo sapien
ctgggtgagcaattgaagccctagt

SEQ ID NO: 2583795 - DNA, 25 bp, Homo sapien
cttaaagcgacaaggacttcctatt

SEQ ID NO: 2583796 - DNA, 25 bp, Homo sapien
tacttaaagcgacaaggacttccta

SEQ ID NO: 2583797 - DNA, 25 bp, Homo sapien
ctacttaaagcgacaaggacttcct

SEQ ID NO: 2583798 - DNA, 25 bp, Homo sapien
taaagcgacaaggacttcctattac

SEQ ID NO: 2583799 - DNA, 25 bp, Homo sapien
tcatcagagaagtcactagacctgc

SEQ ID NO: 2583800 - DNA, 25 bp, Homo sapien
catcagagaagtcactagacctgcc

SEQ ID NO: 2583801 - DNA, 25 bp, Homo sapien
gtctgtctggttcacgttgtccagc

SEQ ID NO: 2583802 - DNA, 25 bp, Homo sapien
tggttcacgttgtccagctgtgccc

SEQ ID NO: 2583803 - DNA, 25 bp, Homo sapien
tggctttgctgtgccaacatcatct

SEQ ID NO: 2583804 - DNA, 25 bp, Homo sapien
gctgtgccctcgctgaaactggctt

SEQ ID NO: 2583805 - DNA, 25 bp, Homo sapien
cagcttcagcgaccccggagtcctc

SEQ ID NO: 2583806 - DNA, 25 bp, Homo sapien
agccacgcctgatgaagccgccgat

SEQ ID NO: 2583807 - DNA, 25 bp, Homo sapien
ggcggtgaaaatcacccctgccatc

SEQ ID NO: 2583808 - DNA, 25 bp, Homo sapien
cctgcagtcgctggcatcctgttct

SEQ ID NO: 2583809 - DNA, 25 bp, Homo sapien
ggcaaataggtaacactgaaagtct

SEQ ID NO: 2583810 - DNA, 25 bp, Homo sapien
ctggaaaggcaaataggtaacactg

SEQ ID NO: 2583811 - DNA, 25 bp, Homo sapien
taacactgaaagtctgcccatggcc

SEQ ID NO: 2583812 - DNA, 25 bp, Homo sapien
aggtaacactgaaagtctgcccatg

SEQ ID NO: 2583813 - DNA, 25 bp, Homo sapien
ggacggcaggccgagggctgtgcag

SEQ ID NO: 2583814 - DNA, 25 bp, Homo sapien
gtggggacggcaggccgagggctgt

SEQ ID NO: 2583815 - DNA, 25 bp, Homo sapien
gggacggcaggccgagggctgtgca

SEQ ID NO: 2583816 - DNA, 25 bp, Homo sapien
cagtggggacggcaggccgagggct

SEQ ID NO: 2583817 - DNA, 25 bp, Homo sapien
ccatgaaatgaaatattcctcgtgc

SEQ ID NO: 2583818 - DNA, 25 bp, Homo sapien
aaatgaaatattcctcgtgctttta

SEQ ID NO: 2583819 - DNA, 25 bp, Homo sapien
tgaaatgaaatattcctcgtgcttt

SEQ ID NO: 2583820 - DNA, 25 bp, Homo sapien
ctgtgaccatgaaatgaaatattcc

SEQ ID NO: 2583821 - DNA, 25 bp, Homo sapien
gccctgatgaacaggccagacagtg

SEQ ID NO: 2583822 - DNA, 25 bp, Homo sapien
gttgttgatgaagcgtctctccccg

SEQ ID NO: 2583823 - DNA, 25 bp, Homo sapien
catgtgtctgtgtgatgggtctgct

SEQ ID NO: 2583824 - DNA, 25 bp, Homo sapien
tctctccccgtgtaggatgtggccg

SEQ ID NO: 2583825 - DNA, 25 bp, Homo sapien
ggcctttttctagtgggacgctcac

SEQ ID NO: 2583826 - DNA, 25 bp, Homo sapien
tacagcctcgagcttcgaaacagaa

SEQ ID NO: 2583827 - DNA, 25 bp, Homo sapien
agaaagccgagcctagtatgccgcg

SEQ ID NO: 2583828 - DNA, 25 bp, Homo sapien
ggccggcgggcttggttctcaaatc

SEQ ID NO: 2583829 - DNA, 25 bp, Homo sapien
tctggcatccgagtataaagtgagc

SEQ ID NO: 2583830 - DNA, 25 bp, Homo sapien
ctctgcggattaggcaaggctcggc

SEQ ID NO: 2583831 - DNA, 25 bp, Homo sapien
gatgatgccgtattacaagcaccct

SEQ ID NO: 2583832 - DNA, 25 bp, Homo sapien
tctgtggcccttaacaagcagcatt

SEQ ID NO: 2583833 - DNA, 25 bp, Homo sapien
catgctgacacttcgctggaggaca

SEQ ID NO: 2583834 - DNA, 25 bp, Homo sapien
gccgtcatgctgtatgtgctcaggg

SEQ ID NO: 2583835 - DNA, 25 bp, Homo sapien
tgtgcgtgcatggatttgccgtcat

SEQ ID NO: 2583836 - DNA, 25 bp, Homo sapien
gaagtcacgctgtgcgtgcatggat

SEQ ID NO: 2583837 - DNA, 25 bp, Homo sapien
ttcttggtccagaagttgatctgtg

SEQ ID NO: 2583838 - DNA, 25 bp, Homo sapien
ttggtccagaagttgatctgtggca

SEQ ID NO: 2583839 - DNA, 25 bp, Homo sapien
atgaggacctcgaaacagtgggatc

SEQ ID NO: 2583840 - DNA, 25 bp, Homo sapien
gaaacagtgggatcagctccaaaga

SEQ ID NO: 2583841 - DNA, 25 bp, Homo sapien
agctgctttgtgtagggtgatggcc

SEQ ID NO: 2583842 - DNA, 25 bp, Homo sapien
gatgactgcaggaccaacgttgtca

SEQ ID NO: 2583843 - DNA, 25 bp, Homo sapien
ctgcaggaccaacgttgtcacaggg

SEQ ID NO: 2583844 - DNA, 25 bp, Homo sapien
tgtccgagctctcatcctgaatgca

SEQ ID NO: 2583845 - DNA, 25 bp, Homo sapien
acagatgactgcaggaccaacgttg

SEQ ID NO: 2583846 - DNA, 25 bp, Homo sapien
cagcggctcctgcaagaggggacaa

SEQ ID NO: 2583847 - DNA, 25 bp, Homo sapien
gtccaggaagatgtgacagcggctc

SEQ ID NO: 2583848 - DNA, 25 bp, Homo sapien
caggaagatgtgacagcggctcctg

SEQ ID NO: 2583849 - DNA, 25 bp, Homo sapien
tccaggaagatgtgacagcggctcc

SEQ ID NO: 2583850 - DNA, 25 bp, Homo sapien
gatggcactattgatttcaagaccc

SEQ ID NO: 2583851 - DNA, 25 bp, Homo sapien
gagaattaaggagaactaggcatcg

SEQ ID NO: 2583852 - DNA, 25 bp, Homo sapien
tcagccattccgagctaagatggca

SEQ ID NO: 2583853 - DNA, 25 bp, Homo sapien
tcaagacccgtaatttctagagagt

SEQ ID NO: 2583854 - DNA, 25 bp, Homo sapien
ggtggatatctccacacatgggcag

SEQ ID NO: 2583855 - DNA, 25 bp, Homo sapien
cacatgggcaggttcttttcttgtg

SEQ ID NO: 2583856 - DNA, 25 bp, Homo sapien
ttttcttgtgctgcagagtcccaag

SEQ ID NO: 2583857 - DNA, 25 bp, Homo sapien
cttgacttgattgagggtggatatc

SEQ ID NO: 2583858 - DNA, 25 bp, Homo sapien
caaataacacaaggaactctttgaa

SEQ ID NO: 2583859 - DNA, 25 bp, Homo sapien
aacacaaggaactctttgaagccat

SEQ ID NO: 2583860 - DNA, 25 bp, Homo sapien
aataacacaaggaactctttgaagc

SEQ ID NO: 2583861 - DNA, 25 bp, Homo sapien
taacacaaggaactctttgaagcca

SEQ ID NO: 2583862 - DNA, 25 bp, Homo sapien
tttgagagcacacgtctgcacgctg

SEQ ID NO: 2583863 - DNA, 25 bp, Homo sapien
ctgacagtctgcagaaccaggaaca

SEQ ID NO: 2583864 - DNA, 25 bp, Homo sapien
ccaggtgtggccagagggatttcaa

SEQ ID NO: 2583865 - DNA, 25 bp, Homo sapien
ctgctgttaggaagcaagcgtggca

SEQ ID NO: 2583866 - DNA, 25 bp, Homo sapien
ctcagacaacccgcactttccacct

SEQ ID NO: 2583867 - DNA, 25 bp, Homo sapien
agacaacccgcactttccacctggg

SEQ ID NO: 2583868 - DNA, 25 bp, Homo sapien
cttgctcagacaacccgcactttcc

SEQ ID NO: 2583869 - DNA, 25 bp, Homo sapien
ttgctcagacaacccgcactttcca

SEQ ID NO: 2583870 - DNA, 25 bp, Homo sapien
tcgctgtggatttcggtgctcactc

SEQ ID NO: 2583871 - DNA, 25 bp, Homo sapien
tcggtgctcactcgtgttccctggc

SEQ ID NO: 2583872 - DNA, 25 bp, Homo sapien
catgcatgtggggtctgaactgagt

SEQ ID NO: 2583873 - DNA, 25 bp, Homo sapien
ctggcctacccacggcatgcatgtg

SEQ ID NO: 2583874 - DNA, 25 bp, Homo sapien
agtgatgccgtgattttcttcaccc

SEQ ID NO: 2583875 - DNA, 25 bp, Homo sapien
tcatggcggccttgtcagtgatgcc

SEQ ID NO: 2583876 - DNA, 25 bp, Homo sapien
tcacgcgatcctcatggcggccttg

SEQ ID NO: 2583877 - DNA, 25 bp, Homo sapien
ccttgtcagtgatgccgtgattttc

SEQ ID NO: 2583878 - DNA, 25 bp, Homo sapien
cacagaggcactgacattccagcat

SEQ ID NO: 2583879 - DNA, 25 bp, Homo sapien
aagagagacaggtgatgccacagag

SEQ ID NO: 2583880 - DNA, 25 bp, Homo sapien
gagccaggcggtggcaagagagaca

SEQ ID NO: 2583881 - DNA, 25 bp, Homo sapien
tgccacagaggcactgacattccag

SEQ ID NO: 2583882 - DNA, 25 bp, Homo sapien
agagtccgagggacgccctgcatgc

SEQ ID NO: 2583883 - DNA, 25 bp, Homo sapien
catgccgtgtgcatcacctgctgtg

SEQ ID NO: 2583884 - DNA, 25 bp, Homo sapien
caggtgcgcgtctgccttgtgttcc

SEQ ID NO: 2583885 - DNA, 25 bp, Homo sapien
gggatatttctaccatcacctttgt

SEQ ID NO: 2583886 - DNA, 25 bp, Homo sapien
gatgatgtcgtacatgatggtgttc

SEQ ID NO: 2583887 - DNA, 25 bp, Homo sapien
gaggatgatgtcgtacatggtggtg

SEQ ID NO: 2583888 - DNA, 25 bp, Homo sapien
gaggatgatgtcgtacatgatggtg

SEQ ID NO: 2583889 - DNA, 25 bp, Homo sapien
ggatgatgtcgtacatgatggtgtt

SEQ ID NO: 2583890 - DNA, 25 bp, Homo sapien
cgtacatggtggtgttcatgggcca

SEQ ID NO: 2583891 - DNA, 25 bp, Homo sapien
gatggtgttcaggtctacactggag

SEQ ID NO: 2583892 - DNA, 25 bp, Homo sapien
tcgtacatggtggtgttcatgggcc

SEQ ID NO: 2583893 - DNA, 25 bp, Homo sapien
tacatgatggtgttcaggtctacac

SEQ ID NO: 2583894 - DNA, 25 bp, Homo sapien
ggagaacgtggctgtacatggtggt

SEQ ID NO: 2583895 - DNA, 25 bp, Homo sapien
gtggctgtacatggtggtgtttggg

SEQ ID NO: 2583896 - DNA, 25 bp, Homo sapien
aggagcagcacgaccatcaggctcg

SEQ ID NO: 2583897 - DNA, 25 bp, Homo sapien
agtcagggtcggcatcagaggagca

SEQ ID NO: 2583898 - DNA, 25 bp, Homo sapien
cacagtccgtgggtgagcacaagtg

SEQ ID NO: 2583899 - DNA, 25 bp, Homo sapien
caagtggtagccttggagagaagtc

SEQ ID NO: 2583900 - DNA, 25 bp, Homo sapien
gccaaacacggagtaggtcttcaat

SEQ ID NO: 2583901 - DNA, 25 bp, Homo sapien
tcacaaaggtggtaagattccaacc

SEQ ID NO: 2583902 - DNA, 25 bp, Homo sapien
gattccaaccaagcattgaggattt

SEQ ID NO: 2583903 - DNA, 25 bp, Homo sapien
agctgtagcaaggatgttccagtgc

SEQ ID NO: 2583904 - DNA, 25 bp, Homo sapien
atgagaaaggaccccttggaaagtg

SEQ ID NO: 2583905 - DNA, 25 bp, Homo sapien
acactcagtctgcatttcatcaccc

SEQ ID NO: 2583906 - DNA, 25 bp, Homo sapien
aaaggaccccttggaaagtgcagag

SEQ ID NO: 2583907 - DNA, 25 bp, Homo sapien
gagaaaggaccccttggaaagtgca

SEQ ID NO: 2583908 - DNA, 25 bp, Homo sapien
acgaggtacaggaagcgacccctgg

SEQ ID NO: 2583909 - DNA, 25 bp, Homo sapien
aggccctgaggagaccgacggccat

SEQ ID NO: 2583910 - DNA, 25 bp, Homo sapien
cagacgccataggtctctggattcc

SEQ ID NO: 2583911 - DNA, 25 bp, Homo sapien
gaagcgacccctggatcaaaggatg

SEQ ID NO: 2583912 - DNA, 25 bp, Homo sapien
cacagtgtgagtaatgcacaactgg

SEQ ID NO: 2583913 - DNA, 25 bp, Homo sapien
gatgaggtcgtctttctataggttg

SEQ ID NO: 2583914 - DNA, 25 bp, Homo sapien
tcttgatgggtatgcccgaggcaca

SEQ ID NO: 2583915 - DNA, 25 bp, Homo sapien
gtgtgagtaatgcacaactggatgg

SEQ ID NO: 2583916 - DNA, 25 bp, Homo sapien
gatgagcaggggtcaggttgctccc

SEQ ID NO: 2583917 - DNA, 25 bp, Homo sapien
cagtgatgagcaggggtcaggttgc

SEQ ID NO: 2583918 - DNA, 25 bp, Homo sapien
agcaggggtcaggttgctccctcca

SEQ ID NO: 2583919 - DNA, 25 bp, Homo sapien
tgcagtgatgagcaggggtcaggtt

SEQ ID NO: 2583920 - DNA, 25 bp, Homo sapien
ctgaaagtagcagaaggcaacaggt

SEQ ID NO: 2583921 - DNA, 25 bp, Homo sapien
gagggagtacaagtcatcatcaggg

SEQ ID NO: 2583922 - DNA, 25 bp, Homo sapien
tcatcagggcagataccaaatagct

SEQ ID NO: 2583923 - DNA, 25 bp, Homo sapien
gcagagggagtacaagtcatcatca

SEQ ID NO: 2583924 - DNA, 25 bp, Homo sapien
tctggttgaggtcgatgtggtatcc

SEQ ID NO: 2583925 - DNA, 25 bp, Homo sapien
ggtatgcattttgaccagtcttagt

SEQ ID NO: 2583926 - DNA, 25 bp, Homo sapien
gacacatgtaacagggaaccatcag

SEQ ID NO: 2583927 - DNA, 25 bp, Homo sapien
gaagcctgctctttgtaggttgaac

SEQ ID NO: 2583928 - DNA, 25 bp, Homo sapien
cctcactattctgggcagggatgcc

SEQ ID NO: 2583929 - DNA, 25 bp, Homo sapien
gtcagtgatgccaatacaaagcagg

SEQ ID NO: 2583930 - DNA, 25 bp, Homo sapien
gcaggattctttccccctcactatt

SEQ ID NO: 2583931 - DNA, 25 bp, Homo sapien
gatgccaatacaaagcaggattctt

SEQ ID NO: 2583932 - DNA, 25 bp, Homo sapien
tcataataatgttgattccccattc

SEQ ID NO: 2583933 - DNA, 25 bp, Homo sapien
taacacttttatattgcattggcca

SEQ ID NO: 2583934 - DNA, 25 bp, Homo sapien
agtagaggcaaatagagacacttca

SEQ ID NO: 2583935 - DNA, 25 bp, Homo sapien
atacattaaaaccatgtaacacttt

SEQ ID NO: 2583936 - DNA, 25 bp, Homo sapien
cccagacggggtggctgctggacgg

SEQ ID NO: 2583937 - DNA, 25 bp, Homo sapien
agacggggtggctgctggacggagg

SEQ ID NO: 2583938 - DNA, 25 bp, Homo sapien
cagacggggtggctgctggacggag

SEQ ID NO: 2583939 - DNA, 25 bp, Homo sapien
ccagacggggtggctgctggacgga

SEQ ID NO: 2583940 - DNA, 25 bp, Homo sapien
cctgctgtggaggtcttccctcatc

SEQ ID NO: 2583941 - DNA, 25 bp, Homo sapien
tgctgtggaggtcttccctcatcac

SEQ ID NO: 2583942 - DNA, 25 bp, Homo sapien
ctgctgtggaggtcttccctcatca

SEQ ID NO: 2583943 - DNA, 25 bp, Homo sapien
gctgtggaggtcttccctcatcact

SEQ ID NO: 2583944 - DNA, 25 bp, Homo sapien
caagagctcacctctagcccagttt

SEQ ID NO: 2583945 - DNA, 25 bp, Homo sapien
accaagagctcacctctagcccagt

SEQ ID NO: 2583946 - DNA, 25 bp, Homo sapien
agagctcacctctagcccagttttc

SEQ ID NO: 2583947 - DNA, 25 bp, Homo sapien
gcaccaagagctcacctctagccca

SEQ ID NO: 2583948 - DNA, 25 bp, Homo sapien
accatgcaccacgttggtcttcttg

SEQ ID NO: 2583949 - DNA, 25 bp, Homo sapien
tcatcagagcaacacaaccatgcac

SEQ ID NO: 2583950 - DNA, 25 bp, Homo sapien
aaattgaagctgtccatgccgccgt

SEQ ID NO: 2583951 - DNA, 25 bp, Homo sapien
tcttgggaagagtggacgactctcc

SEQ ID NO: 2583952 - DNA, 25 bp, Homo sapien
tgtgacatagcagtaagtgtacttc

SEQ ID NO: 2583953 - DNA, 25 bp, Homo sapien
tagcattcgcttgcaccttgtgaca

SEQ ID NO: 2583954 - DNA, 25 bp, Homo sapien
cagacgggggctgacaaccacagag

SEQ ID NO: 2583955 - DNA, 25 bp, Homo sapien
acagccatagcattcgcttgcacct

SEQ ID NO: 2583956 - DNA, 25 bp, Homo sapien
tcttgggcccattgtggtctcctga

SEQ ID NO: 2583957 - DNA, 25 bp, Homo sapien
gagtctcaaggcctttgatgaaaag

SEQ ID NO: 2583958 - DNA, 25 bp, Homo sapien
ggccctgtcgctttgaaaggctatg

SEQ ID NO: 2583959 - DNA, 25 bp, Homo sapien
ggctatggacagtccctttgctggg

SEQ ID NO: 2583960 - DNA, 25 bp, Homo sapien
tcgggccagtatgtctgctggctcc

SEQ ID NO: 2583961 - DNA, 25 bp, Homo sapien
gggaaagcaggcgtcacagccttta

SEQ ID NO: 2583962 - DNA, 25 bp, Homo sapien
aggcgtcacagcctttaacccgctg

SEQ ID NO: 2583963 - DNA, 25 bp, Homo sapien
ttaacccgctgcctcgggccagtat

SEQ ID NO: 2583964 - DNA, 25 bp, Homo sapien
aggaagcaaggaggccgttctgcac

SEQ ID NO: 2583965 - DNA, 25 bp, Homo sapien
gaggaaagaagaccctgcggtccag

SEQ ID NO: 2583966 - DNA, 25 bp, Homo sapien
tgtctgctgccacgcatgacagggt

SEQ ID NO: 2583967 - DNA, 25 bp, Homo sapien
gacagtgggccaagccagtcaaaca

SEQ ID NO: 2583968 - DNA, 25 bp, Homo sapien
ttggttttcactgtgtcaaagcagg

SEQ ID NO: 2583969 - DNA, 25 bp, Homo sapien
ggttttcactgtgtcaaagcaggtg

SEQ ID NO: 2583970 - DNA, 25 bp, Homo sapien
tggttttcactgtgtcaaagcaggt

SEQ ID NO: 2583971 - DNA, 25 bp, Homo sapien
ctggcgggacaggtgtgtgggagga

SEQ ID NO: 2583972 - DNA, 25 bp, Homo sapien
gggaggaggaggctgaaagcgccct

SEQ ID NO: 2583973 - DNA, 25 bp, Homo sapien
aggaggaggctgaaagcgccctccc

SEQ ID NO: 2583974 - DNA, 25 bp, Homo sapien
ggaggaggctgaaagcgccctccca

SEQ ID NO: 2583975 - DNA, 25 bp, Homo sapien
actgcggggtgaccgcccctcctcg

SEQ ID NO: 2583976 - DNA, 25 bp, Homo sapien
tgccctgcggcgtggggcgcggcgg

SEQ ID NO: 2583977 - DNA, 25 bp, Homo sapien
gcgcggcggcatccgactgcggggt

SEQ ID NO: 2583978 - DNA, 25 bp, Homo sapien
tcagtccccgcgcgggaagctttgg

SEQ ID NO: 2583979 - DNA, 25 bp, Homo sapien
actttggggagccaaagcaggagga

SEQ ID NO: 2583980 - DNA, 25 bp, Homo sapien
tcacttgaactcaggagttcaacac

SEQ ID NO: 2583981 - DNA, 25 bp, Homo sapien
agcactttggggagccaaagcagga

SEQ ID NO: 2583982 - DNA, 25 bp, Homo sapien
tggacaacatggcgagacccccatc

SEQ ID NO: 2583983 - DNA, 25 bp, Homo sapien
cctgggatgcgggaccctggatggt

SEQ ID NO: 2583984 - DNA, 25 bp, Homo sapien
cctgctgtaatatgtcccgtctggc

SEQ ID NO: 2583985 - DNA, 25 bp, Homo sapien
ttcaggagctctggttaatgtatga

SEQ ID NO: 2583986 - DNA, 25 bp, Homo sapien
taatatgtcccgtctggccttctgt

SEQ ID NO: 2583987 - DNA, 25 bp, Homo sapien
aggggcttgtaagcaccactgggga

SEQ ID NO: 2583988 - DNA, 25 bp, Homo sapien
agctcaggcatagccctctccagca

SEQ ID NO: 2583989 - DNA, 25 bp, Homo sapien
ccactggggaattcactaaaccagc

SEQ ID NO: 2583990 - DNA, 25 bp, Homo sapien
gcttgtaagcaccactggggaattc

SEQ ID NO: 2583991 - DNA, 25 bp, Homo sapien
catggacgatgcatttgacagtacg

SEQ ID NO: 2583992 - DNA, 25 bp, Homo sapien
gctggctgcacgcttgctcatggac

SEQ ID NO: 2583993 - DNA, 25 bp, Homo sapien
acgttcactagagtgctgtcatcca

SEQ ID NO: 2583994 - DNA, 25 bp, Homo sapien
tgtcatccacggcaccatcaggaag

SEQ ID NO: 2583995 - DNA, 25 bp, Homo sapien
tggaatgtggatggacagggcgtgg

SEQ ID NO: 2583996 - DNA, 25 bp, Homo sapien
ggaatgtggatggacagggcgtggg

SEQ ID NO: 2583997 - DNA, 25 bp, Homo sapien
tggatggacagggcgtggggcgggc

SEQ ID NO: 2583998 - DNA, 25 bp, Homo sapien
atgtggatggacagggcgtggggcg

SEQ ID NO: 2583999 - DNA, 25 bp, Homo sapien
aaggtgacatgaaatatcgcactgg

SEQ ID NO: 2584000 - DNA, 25 bp, Homo sapien
atcaccgtgcgtcgagccacagcca

SEQ ID NO: 2584001 - DNA, 25 bp, Homo sapien
caggttagaccctcccaccgaggag

SEQ ID NO: 2584002 - DNA, 25 bp, Homo sapien
ccgaggagctgggaagttcgctggg

SEQ ID NO: 2584003 - DNA, 25 bp, Homo sapien
cctctgctgttgcatggctatcttc

SEQ ID NO: 2584004 - DNA, 25 bp, Homo sapien
tctgcagggaggatcgccctgcacc

SEQ ID NO: 2584005 - DNA, 25 bp, Homo sapien
tgcagggaggatcgccctgcacctg

SEQ ID NO: 2584006 - DNA, 25 bp, Homo sapien
tgcatggctatcttctctgggtgtc

SEQ ID NO: 2584007 - DNA, 25 bp, Homo sapien
tggtgcacagtctcacatcctcggg

SEQ ID NO: 2584008 - DNA, 25 bp, Homo sapien
gctgtgttccctctttcaaggtcac

SEQ ID NO: 2584009 - DNA, 25 bp, Homo sapien
ccatggacagtgacttctggcatcc

SEQ ID NO: 2584010 - DNA, 25 bp, Homo sapien
aagggcatctgacacgtttctcagc

SEQ ID NO: 2584011 - DNA, 25 bp, Homo sapien
ggtaagtaacgccatgctttccaaa

SEQ ID NO: 2584012 - DNA, 25 bp, Homo sapien
acctgctggagacgtgcagcgcgca

SEQ ID NO: 2584013 - DNA, 25 bp, Homo sapien
tggcagcctcggtctgtccagtctc

SEQ ID NO: 2584014 - DNA, 25 bp, Homo sapien
gtccagtctcagttccgcccagatg

SEQ ID NO: 2584015 - DNA, 25 bp, Homo sapien
acatatgccgtcacctctaggagag

SEQ ID NO: 2584016 - DNA, 25 bp, Homo sapien
taaatcagtgctctcttccgaggcc

SEQ ID NO: 2584017 - DNA, 25 bp, Homo sapien
cattcgcaggaggatggcgtaagcc

SEQ ID NO: 2584018 - DNA, 25 bp, Homo sapien
tctgccagaaacaccgagagaagcc

SEQ ID NO: 2584019 - DNA, 25 bp, Homo sapien
ttaacgctgtcagaggagacggtcc

SEQ ID NO: 2584020 - DNA, 25 bp, Homo sapien
tgtagagaaagtttgccgagccccg

SEQ ID NO: 2584021 - DNA, 25 bp, Homo sapien
ttactcggcctgaagcgacgctgtg

SEQ ID NO: 2584022 - DNA, 25 bp, Homo sapien
taaaggcaaacctcgggacatgtga

SEQ ID NO: 2584023 - DNA, 25 bp, Homo sapien
acagaagcccaagacgaagatgatg

SEQ ID NO: 2584024 - DNA, 25 bp, Homo sapien
cagggtcacagaagcccaagacgaa

SEQ ID NO: 2584025 - DNA, 25 bp, Homo sapien
tggacaaaaggaatagtgggggcac

SEQ ID NO: 2584026 - DNA, 25 bp, Homo sapien
tgatgatgatgatggacaaaaggaa

SEQ ID NO: 2584027 - DNA, 25 bp, Homo sapien
aggacagaaggttgggaatcccagg

SEQ ID NO: 2584028 - DNA, 25 bp, Homo sapien
tcaagtgccctctggaatttcccca

SEQ ID NO: 2584029 - DNA, 25 bp, Homo sapien
caagtgccctctggaatttccccac

SEQ ID NO: 2584030 - DNA, 25 bp, Homo sapien
gcagtgggtcgagccccgccttggg

SEQ ID NO: 2584031 - DNA, 25 bp, Homo sapien
acagcagtgggtcgagccccgcctt

SEQ ID NO: 2584032 - DNA, 25 bp, Homo sapien
gaacagcagtgggtcgagccccgcc

SEQ ID NO: 2584033 - DNA, 25 bp, Homo sapien
cagcagtgggtcgagccccgccttg

SEQ ID NO: 2584034 - DNA, 25 bp, Homo sapien
atggtggccgcacacgccgtcccga

SEQ ID NO: 2584035 - DNA, 25 bp, Homo sapien
tcccgagccggaatattctgcgcat

SEQ ID NO: 2584036 - DNA, 25 bp, Homo sapien
acacgccgtcccgagccggaatatt

SEQ ID NO: 2584037 - DNA, 25 bp, Homo sapien
cgtcccgagccggaatattctgcgc

SEQ ID NO: 2584038 - DNA, 25 bp, Homo sapien
caggtgaggtgttaaacgtgacggc

SEQ ID NO: 2584039 - DNA, 25 bp, Homo sapien
ggagcgtggaagaaagtcactgatt

SEQ ID NO: 2584040 - DNA, 25 bp, Homo sapien
gggccaggtgaggtgttaaacgtga

SEQ ID NO: 2584041 - DNA, 25 bp, Homo sapien
tggaagaaagtcactgattctgcat

SEQ ID NO: 2584042 - DNA, 25 bp, Homo sapien
ttctcgaagtgctcccggaggaact

SEQ ID NO: 2584043 - DNA, 25 bp, Homo sapien
gatgcagaggtggacgatacagtct

SEQ ID NO: 2584044 - DNA, 25 bp, Homo sapien
tgcagctgcacgtacagctcacagc

SEQ ID NO: 2584045 - DNA, 25 bp, Homo sapien
gtctttgaggacctgctggatcccg

SEQ ID NO: 2584046 - DNA, 25 bp, Homo sapien
ccgaccacacgtgccgaagggtact

SEQ ID NO: 2584047 - DNA, 25 bp, Homo sapien
gcttctccccgaccacacgtgccga

SEQ ID NO: 2584048 - DNA, 25 bp, Homo sapien
ctccccgaccacacgtgccgaaggg

SEQ ID NO: 2584049 - DNA, 25 bp, Homo sapien
cacacgtgccgaagggtactttcct

SEQ ID NO: 2584050 - DNA, 25 bp, Homo sapien
gcctccacttcccaggcacgcacgt

SEQ ID NO: 2584051 - DNA, 25 bp, Homo sapien
aggggctcctgtcccggcctccact

SEQ ID NO: 2584052 - DNA, 25 bp, Homo sapien
tcacaggggctcctgtcccggcctc

SEQ ID NO: 2584053 - DNA, 25 bp, Homo sapien
acaggggctcctgtcccggcctcca

SEQ ID NO: 2584054 - DNA, 25 bp, Homo sapien
cccggacggcactccaagagctggg

SEQ ID NO: 2584055 - DNA, 25 bp, Homo sapien
ccggacggcactccaagagctgggc

SEQ ID NO: 2584056 - DNA, 25 bp, Homo sapien
agcccggacggcactccaagagctg

SEQ ID NO: 2584057 - DNA, 25 bp, Homo sapien
ccagcccggacggcactccaagagc

SEQ ID NO: 2584058 - DNA, 25 bp, Homo sapien
cttcttgaccagagacacgaagtcc

SEQ ID NO: 2584059 - DNA, 25 bp, Homo sapien
gaccagagacacgaagtcctctgag

SEQ ID NO: 2584060 - DNA, 25 bp, Homo sapien
gagacacgaagtcctctgagttaat

SEQ ID NO: 2584061 - DNA, 25 bp, Homo sapien
cacgaagtcctctgagttaattgag

SEQ ID NO: 2584062 - DNA, 25 bp, Homo sapien
ttttcttagtttcgtgccagtgttc

SEQ ID NO: 2584063 - DNA, 25 bp, Homo sapien
caagttcttagttccaatttttatg

SEQ ID NO: 2584064 - DNA, 25 bp, Homo sapien
taactccatgatctgcatcccctga

SEQ ID NO: 2584065 - DNA, 25 bp, Homo sapien
aaagtctatgtccattaactccatg

SEQ ID NO: 2584066 - DNA, 25 bp, Homo sapien
catactgatgcattgtctgagctgc

SEQ ID NO: 2584067 - DNA, 25 bp, Homo sapien
tcctgttttcatactgatgcattgt

SEQ ID NO: 2584068 - DNA, 25 bp, Homo sapien
tttcatactgatgcattgtctgagc

SEQ ID NO: 2584069 - DNA, 25 bp, Homo sapien
ctgatgcattgtctgagctgcagga

SEQ ID NO: 2584070 - DNA, 25 bp, Homo sapien
tgacggacgtgcgaggttttcacat

SEQ ID NO: 2584071 - DNA, 25 bp, Homo sapien
ttcacatcgtggctcctgtaagcag

SEQ ID NO: 2584072 - DNA, 25 bp, Homo sapien
tacttcacagaagcggaattgcgca

SEQ ID NO: 2584073 - DNA, 25 bp, Homo sapien
attacgtgtcccaggttcgtccgcg

SEQ ID NO: 2584074 - DNA, 25 bp, Homo sapien
ggtgtggggccgccacggcctccgc

SEQ ID NO: 2584075 - DNA, 25 bp, Homo sapien
ctccgccacccccagcgccgccatc

SEQ ID NO: 2584076 - DNA, 25 bp, Homo sapien
tgtggggccgccacggcctccgcca

SEQ ID NO: 2584077 - DNA, 25 bp, Homo sapien
ctcggccccctcagccgggtgtggg

SEQ ID NO: 2584078 - DNA, 25 bp, Homo sapien
cagcaagcgcggcagcagtaggcgc

SEQ ID NO: 2584079 - DNA, 25 bp, Homo sapien
cgccggcccggcttgctgtcggcct

SEQ ID NO: 2584080 - DNA, 25 bp, Homo sapien
ctggaaagcggtggggtcggcggca

SEQ ID NO: 2584081 - DNA, 25 bp, Homo sapien
gggtcgctcaggcagcgcagcaagc

SEQ ID NO: 2584082 - DNA, 25 bp, Homo sapien
gcagctgcacaagcgccaggcgcag

SEQ ID NO: 2584083 - DNA, 25 bp, Homo sapien
gcggcgccgcacaggtccacggcca

SEQ ID NO: 2584084 - DNA, 25 bp, Homo sapien
cgcgcgcagagcgtcgtccaggtgg

SEQ ID NO: 2584085 - DNA, 25 bp, Homo sapien
cagctcctcacaggcctcgggcggg

SEQ ID NO: 2584086 - DNA, 25 bp, Homo sapien
gcgccagggcggcggcgcagctgca

SEQ ID NO: 2584087 - DNA, 25 bp, Homo sapien
cgggcgtggcctgcgccagggcggc

SEQ ID NO: 2584088 - DNA, 25 bp, Homo sapien
cgccagggcggcggcgcagctgcag

SEQ ID NO: 2584089 - DNA, 25 bp, Homo sapien
tggcctgcgccagggcggcggcgca

SEQ ID NO: 2584090 - DNA, 25 bp, Homo sapien
ggacctctagatgctgctcgagcgg

SEQ ID NO: 2584091 - DNA, 25 bp, Homo sapien
tatttggggtatgggacctctagat

SEQ ID NO: 2584092 - DNA, 25 bp, Homo sapien
tatgggacctctagatgctgctcga

SEQ ID NO: 2584093 - DNA, 25 bp, Homo sapien
ttggggtatgggacctctagatgct

SEQ ID NO: 2584094 - DNA, 25 bp, Homo sapien
gatgtgggagtgtctcgttttccca

SEQ ID NO: 2584095 - DNA, 25 bp, Homo sapien
tgtgggagtgtctcgttttcccagc

SEQ ID NO: 2584096 - DNA, 25 bp, Homo sapien
tgggagtgtctcgttttcccagctt

SEQ ID NO: 2584097 - DNA, 25 bp, Homo sapien
ggagtgtctcgttttcccagcttgc

SEQ ID NO: 2584098 - DNA, 25 bp, Homo sapien
ttgccacccgaacagcgtggggcac

SEQ ID NO: 2584099 - DNA, 25 bp, Homo sapien
ccgccattgccacccgaacagcgtg

SEQ ID NO: 2584100 - DNA, 25 bp, Homo sapien
acacgtcccgccattgccacccgaa

SEQ ID NO: 2584101 - DNA, 25 bp, Homo sapien
ccctgcacacgtcccgccattgcca

SEQ ID NO: 2584102 - DNA, 25 bp, Homo sapien
aggcacagcatgagaacccggcctg

SEQ ID NO: 2584103 - DNA, 25 bp, Homo sapien
cctgcagcacccaagtccggtcctc

SEQ ID NO: 2584104 - DNA, 25 bp, Homo sapien
tgcagcacccaagtccggtcctctc

SEQ ID NO: 2584105 - DNA, 25 bp, Homo sapien
cagcacccaagtccggtcctctccc

SEQ ID NO: 2584106 - DNA, 25 bp, Homo sapien
tccaccctcacagaggctgtgctgt

SEQ ID NO: 2584107 - DNA, 25 bp, Homo sapien
ttccaccctcacagaggctgtgctg

SEQ ID NO: 2584108 - DNA, 25 bp, Homo sapien
ggctgtgctgtagaagcctgctggg

SEQ ID NO: 2584109 - DNA, 25 bp, Homo sapien
agaggctgtgctgtagaagcctgct

SEQ ID NO: 2584110 - DNA, 25 bp, Homo sapien
ctctctcaactgctggaacacagtg

SEQ ID NO: 2584111 - DNA, 25 bp, Homo sapien
gtcctttctgacagccaatgctctg

SEQ ID NO: 2584112 - DNA, 25 bp, Homo sapien
agaatggtcctttctgacagccaat

SEQ ID NO: 2584113 - DNA, 25 bp, Homo sapien
aatggtcctttctgacagccaatgc

SEQ ID NO: 2584114 - DNA, 25 bp, Homo sapien
ctcacgtcctccaccggactgtgcc

SEQ ID NO: 2584115 - DNA, 25 bp, Homo sapien
ctccaccggactgtgcccactgtgc

SEQ ID NO: 2584116 - DNA, 25 bp, Homo sapien
tcctccaccggactgtgcccactgt

SEQ ID NO: 2584117 - DNA, 25 bp, Homo sapien
cgtcctccaccggactgtgcccact

SEQ ID NO: 2584118 - DNA, 25 bp, Homo sapien
cggccttcccagcaaaagtaaggag

SEQ ID NO: 2584119 - DNA, 25 bp, Homo sapien
ctgttcacggccttcccagcaaaag

SEQ ID NO: 2584120 - DNA, 25 bp, Homo sapien
gacacagctcctgttcacggccttc

SEQ ID NO: 2584121 - DNA, 25 bp, Homo sapien
tcacggccttcccagcaaaagtaag

SEQ ID NO: 2584122 - DNA, 25 bp, Homo sapien
ggtacagatggatccaggccttcag

SEQ ID NO: 2584123 - DNA, 25 bp, Homo sapien
ggactcgagacgaatcctcctgctg

SEQ ID NO: 2584124 - DNA, 25 bp, Homo sapien
tgcggccctcatgatgctgctgcgt

SEQ ID NO: 2584125 - DNA, 25 bp, Homo sapien
gattcccttgttccgagcacactgg

SEQ ID NO: 2584126 - DNA, 25 bp, Homo sapien
tcacgtgtgagccagcgtctccgtg

SEQ ID NO: 2584127 - DNA, 25 bp, Homo sapien
gagccagcgtctccgtgtgaccctc

SEQ ID NO: 2584128 - DNA, 25 bp, Homo sapien
acgtgtgagccagcgtctccgtgtg

SEQ ID NO: 2584129 - DNA, 25 bp, Homo sapien
tgtgagccagcgtctccgtgtgacc

SEQ ID NO: 2584130 - DNA, 25 bp, Homo sapien
ggagagtaggtatttgcatctgttg

SEQ ID NO: 2584131 - DNA, 25 bp, Homo sapien
gggggagagtaggtatttgcatctg

SEQ ID NO: 2584132 - DNA, 25 bp, Homo sapien
agagtaggtatttgcatctgttggg

SEQ ID NO: 2584133 - DNA, 25 bp, Homo sapien
catgggggggagagtaggtatttgc

SEQ ID NO: 2584134 - DNA, 25 bp, Homo sapien
gttggggacctgtgccatgggggga

SEQ ID NO: 2584135 - DNA, 25 bp, Homo sapien
cgttggagtagggacctgtgccatg

SEQ ID NO: 2584136 - DNA, 25 bp, Homo sapien
gtagggacctgtgccatggggggca

SEQ ID NO: 2584137 - DNA, 25 bp, Homo sapien
gacccgttggagtagggacctgtgc

SEQ ID NO: 2584138 - DNA, 25 bp, Homo sapien
gctttccctgattagggcgcctgta

SEQ ID NO: 2584139 - DNA, 25 bp, Homo sapien
tcccggctttccctgattagggcgc

SEQ ID NO: 2584140 - DNA, 25 bp, Homo sapien
ccggctttccctgattagggcgcct

SEQ ID NO: 2584141 - DNA, 25 bp, Homo sapien
tttccctgattagggcgcctgtagg

SEQ ID NO: 2584142 - DNA, 25 bp, Homo sapien
gtgcccggggcagttacgcctcggc

SEQ ID NO: 2584143 - DNA, 25 bp, Homo sapien
gcagttacgcctcggccagggacct

SEQ ID NO: 2584144 - DNA, 25 bp, Homo sapien
gggcagttacgcctcggccagggac

SEQ ID NO: 2584145 - DNA, 25 bp, Homo sapien
ccggggcagttacgcctcggccagg

SEQ ID NO: 2584146 - DNA, 25 bp, Homo sapien
ctgggatgtgctgcagccacgatca

SEQ ID NO: 2584147 - DNA, 25 bp, Homo sapien
cgccgaggtcgggaaagctctggct

SEQ ID NO: 2584148 - DNA, 25 bp, Homo sapien
ctgatgccgtgtcctcggtcctgag

SEQ ID NO: 2584149 - DNA, 25 bp, Homo sapien
gccacgatcatctccggtatctggg

SEQ ID NO: 2584150 - DNA, 25 bp, Homo sapien
gaggtggacggtcgcttcagctctt

SEQ ID NO: 2584151 - DNA, 25 bp, Homo sapien
cggtcgcttcagctcttgacccatt

SEQ ID NO: 2584152 - DNA, 25 bp, Homo sapien
gaagaaggaggtggacggtcgcttc

SEQ ID NO: 2584153 - DNA, 25 bp, Homo sapien
tggacggtcgcttcagctcttgacc

SEQ ID NO: 2584154 - DNA, 25 bp, Homo sapien
tctgcggagctcgatgaaggcaacg

SEQ ID NO: 2584155 - DNA, 25 bp, Homo sapien
gagcttatcaaaagcccggctctgg

SEQ ID NO: 2584156 - DNA, 25 bp, Homo sapien
tcctcttgaagtagccacagtgaga

SEQ ID NO: 2584157 - DNA, 25 bp, Homo sapien
ggcagcccgtgagcttagagcttat

SEQ ID NO: 2584158 - DNA, 25 bp, Homo sapien
tgtgattgacagacggccacatcgg

SEQ ID NO: 2584159 - DNA, 25 bp, Homo sapien
tgggcatcagcacacacgtagaggt

SEQ ID NO: 2584160 - DNA, 25 bp, Homo sapien
acagagggcatcagcacacgtgtgg

SEQ ID NO: 2584161 - DNA, 25 bp, Homo sapien
cattggcacacggagatgggcatca

SEQ ID NO: 2584162 - DNA, 25 bp, Homo sapien
tgccccctgttcatggggagttctg

SEQ ID NO: 2584163 - DNA, 25 bp, Homo sapien
tctgtcatgtccatcgtggcccagc

SEQ ID NO: 2584164 - DNA, 25 bp, Homo sapien
tgtcatgtccatcgtggcccagcgt

SEQ ID NO: 2584165 - DNA, 25 bp, Homo sapien
catgtccatcgtggcccagcgtgtg

SEQ ID NO: 2584166 - DNA, 25 bp, Homo sapien
agcacgtgagtggaacgtgagcctc

SEQ ID NO: 2584167 - DNA, 25 bp, Homo sapien
gctgtggtagaagcacgtgagtgga

SEQ ID NO: 2584168 - DNA, 25 bp, Homo sapien
agcctcgagtcactggggtgcagcc

SEQ ID NO: 2584169 - DNA, 25 bp, Homo sapien
ggaacgtgagcctcgagtcactggg

SEQ ID NO: 2584170 - DNA, 25 bp, Homo sapien
cagacctttttggtacacgaggctg

SEQ ID NO: 2584171 - DNA, 25 bp, Homo sapien
agacctttttggtacacgaggctgg

SEQ ID NO: 2584172 - DNA, 25 bp, Homo sapien
acagagagttggggactgtgttcct

SEQ ID NO: 2584173 - DNA, 25 bp, Homo sapien
ccagacctttttggtacacgaggct

SEQ ID NO: 2584174 - DNA, 25 bp, Homo sapien
gctggtgacattcgggcattaacat

SEQ ID NO: 2584175 - DNA, 25 bp, Homo sapien
cgtttgtgttcaggcctttgtcggc

SEQ ID NO: 2584176 - DNA, 25 bp, Homo sapien
cctttgtcggcgatgagctggtgac

SEQ ID NO: 2584177 - DNA, 25 bp, Homo sapien
cctggagacgtttgtgttcaggcct

SEQ ID NO: 2584178 - DNA, 25 bp, Homo sapien
tctgatgcagaagtgcgaagctgtg

SEQ ID NO: 2584179 - DNA, 25 bp, Homo sapien
gagacgatttaaaatctgagccagc

SEQ ID NO: 2584180 - DNA, 25 bp, Homo sapien
gcagcttcacgtaaccttccagagt

SEQ ID NO: 2584181 - DNA, 25 bp, Homo sapien
gggcaacccacatgtgagacgattt

SEQ ID NO: 2584182 - DNA, 25 bp, Homo sapien
tcaaccccgcgtgtgtgatttcagg

SEQ ID NO: 2584183 - DNA, 25 bp, Homo sapien
cgtacgcttcctcagacgttgtggg

SEQ ID NO: 2584184 - DNA, 25 bp, Homo sapien
tttgaaggcgagtttggctgtgaac

SEQ ID NO: 2584185 - DNA, 25 bp, Homo sapien
gctgctggttctgatcccgtacgct

SEQ ID NO: 2584186 - DNA, 25 bp, Homo sapien
ttgggtgtctcccacccgcttggtg

SEQ ID NO: 2584187 - DNA, 25 bp, Homo sapien
tgggtgtctcccacccgcttggtgg

SEQ ID NO: 2584188 - DNA, 25 bp, Homo sapien
tccctgggtggtggacgagtccttg

SEQ ID NO: 2584189 - DNA, 25 bp, Homo sapien
tgaacctcacagtccggttccctgg

SEQ ID NO: 2584190 - DNA, 25 bp, Homo sapien
aggcctgcctagcttggatgagccc

SEQ ID NO: 2584191 - DNA, 25 bp, Homo sapien
gacctcgttttgtcagtgagagcca

SEQ ID NO: 2584192 - DNA, 25 bp, Homo sapien
caggacgcagctccggagagaccct

SEQ ID NO: 2584193 - DNA, 25 bp, Homo sapien
cccatctgcggtggtctgtggttga

SEQ ID NO: 2584194 - DNA, 25 bp, Homo sapien
tcagccaaagcggtgcgtggcactg

SEQ ID NO: 2584195 - DNA, 25 bp, Homo sapien
ggaggccgacggaccctcagccaaa

SEQ ID NO: 2584196 - DNA, 25 bp, Homo sapien
gagccgctgtgcgatggctgccaca

SEQ ID NO: 2584197 - DNA, 25 bp, Homo sapien
ctgtgaagttgtagccgtcagcagg

SEQ ID NO: 2584198 - DNA, 25 bp, Homo sapien
aaaacatcgatgccgcgggcatgac

SEQ ID NO: 2584199 - DNA, 25 bp, Homo sapien
ggcttttggcttcaagggtcagatc

SEQ ID NO: 2584200 - DNA, 25 bp, Homo sapien
atgccgcgggcatgactgggaacca

SEQ ID NO: 2584201 - DNA, 25 bp, Homo sapien
cttgtcctgaatgtgtctttgaaaa

SEQ ID NO: 2584202 - DNA, 25 bp, Homo sapien
caatgtggtgacgtgggtagatcta

SEQ ID NO: 2584203 - DNA, 25 bp, Homo sapien
tgtcaggcaatgtggtgacgtgggt

SEQ ID NO: 2584204 - DNA, 25 bp, Homo sapien
aaagccgcagccccaacgtgtcagg

SEQ ID NO: 2584205 - DNA, 25 bp, Homo sapien
ccgcagccccaacgtgtcaggcaat

SEQ ID NO: 2584206 - DNA, 25 bp, Homo sapien
ctggctcttccactgcgctccactt

SEQ ID NO: 2584207 - DNA, 25 bp, Homo sapien
cccgctcctgcagcgttttccagac

SEQ ID NO: 2584208 - DNA, 25 bp, Homo sapien
gaggtgggggtgtgcctggctcttc

SEQ ID NO: 2584209 - DNA, 25 bp, Homo sapien
aaacaagtattgcagcccacagagc

SEQ ID NO: 2584210 - DNA, 25 bp, Homo sapien
caaatgagaatgtgcggaatttgcc

SEQ ID NO: 2584211 - DNA, 25 bp, Homo sapien
tgtgcggaatttgcccttctgtgcc

SEQ ID NO: 2584212 - DNA, 25 bp, Homo sapien
tgagaatgtgcggaatttgcccttc

SEQ ID NO: 2584213 - DNA, 25 bp, Homo sapien
cccacaaatgagaatgtgcggaatt

SEQ ID NO: 2584214 - DNA, 25 bp, Homo sapien
ccagcccggtcgtgctgcgggtttt

SEQ ID NO: 2584215 - DNA, 25 bp, Homo sapien
tccctgcgtgctcggtggacaccgg

SEQ ID NO: 2584216 - DNA, 25 bp, Homo sapien
tctccccacactggcggcggaaggg

SEQ ID NO: 2584217 - DNA, 25 bp, Homo sapien
agcgaggtcctgtcggcagagcagg

SEQ ID NO: 2584218 - DNA, 25 bp, Homo sapien
atgcggggaggacagccgcggccat

SEQ ID NO: 2584219 - DNA, 25 bp, Homo sapien
gagacggtgacaaaggacatcctgg

SEQ ID NO: 2584220 - DNA, 25 bp, Homo sapien
ctcgagacggtgacaaaggacatcc

SEQ ID NO: 2584221 - DNA, 25 bp, Homo sapien
tggcccccaatctgcagtggcatgc

SEQ ID NO: 2584222 - DNA, 25 bp, Homo sapien
cacaggcacccctgtctccccggta

SEQ ID NO: 2584223 - DNA, 25 bp, Homo sapien
cctcccaattcgcactgagaagcag

SEQ ID NO: 2584224 - DNA, 25 bp, Homo sapien
ggaacctcccaattcgcactgagaa

SEQ ID NO: 2584225 - DNA, 25 bp, Homo sapien
tcccaattcgcactgagaagcagct

SEQ ID NO: 2584226 - DNA, 25 bp, Homo sapien
gtcaccatcaggacgaagtcgccga

SEQ ID NO: 2584227 - DNA, 25 bp, Homo sapien
tgtgaagccgcagcgactgtccttg

SEQ ID NO: 2584228 - DNA, 25 bp, Homo sapien
gctttgagtttgtcttggtggcact

SEQ ID NO: 2584229 - DNA, 25 bp, Homo sapien
gacagggtgggaactgcccgtctct

SEQ ID NO: 2584230 - DNA, 25 bp, Homo sapien
tgcaagtcacggtgccgaaaatggc

SEQ ID NO: 2584231 - DNA, 25 bp, Homo sapien
ggttcgttcattccagagagccctc

SEQ ID NO: 2584232 - DNA, 25 bp, Homo sapien
cgccagaaacctcgcggaatgcgtg

SEQ ID NO: 2584233 - DNA, 25 bp, Homo sapien
gagaccagagccacctttgaaacat

SEQ ID NO: 2584234 - DNA, 25 bp, Homo sapien
cagcgtcttcgggtcctgtgggtct

SEQ ID NO: 2584235 - DNA, 25 bp, Homo sapien
aaaggaacgtgcctcattcagtggt

SEQ ID NO: 2584236 - DNA, 25 bp, Homo sapien
tgtacccggccccagtgcatggtgg

SEQ ID NO: 2584237 - DNA, 25 bp, Homo sapien
ccctgctgcccgtggactatagtgt

SEQ ID NO: 2584238 - DNA, 25 bp, Homo sapien
gggctgagggctgcgtctgccatgg

SEQ ID NO: 2584239 - DNA, 25 bp, Homo sapien
gctgcgtctgccatggtgtctccac

SEQ ID NO: 2584240 - DNA, 25 bp, Homo sapien
tgagggctgcgtctgccatggtgtc

SEQ ID NO: 2584241 - DNA, 25 bp, Homo sapien
agggctgcgtctgccatggtgtctc

SEQ ID NO: 2584242 - DNA, 25 bp, Homo sapien
tgtgagcgccggctgtacgcaggtc

SEQ ID NO: 2584243 - DNA, 25 bp, Homo sapien
cagctgtgagcgccggctgtacgca

SEQ ID NO: 2584244 - DNA, 25 bp, Homo sapien
agcgccggctgtacgcaggtccctg

SEQ ID NO: 2584245 - DNA, 25 bp, Homo sapien
tgagcgccggctgtacgcaggtccc

SEQ ID NO: 2584246 - DNA, 25 bp, Homo sapien
gaaagatatgaaccgagagccgtgg

SEQ ID NO: 2584247 - DNA, 25 bp, Homo sapien
tgccatgcagataacacagcagggt

SEQ ID NO: 2584248 - DNA, 25 bp, Homo sapien
gcaggttctgcccaggaacagttaa

SEQ ID NO: 2584249 - DNA, 25 bp, Homo sapien
tcggctgtattttgggaggaaccgc

SEQ ID NO: 2584250 - DNA, 25 bp, Homo sapien
cctgtgcggctggatctgggctgcg

SEQ ID NO: 2584251 - DNA, 25 bp, Homo sapien
tggatctgggctgcgtcagcaccgg

SEQ ID NO: 2584252 - DNA, 25 bp, Homo sapien
ttgctcagagcaaaaggtgccgtca

SEQ ID NO: 2584253 - DNA, 25 bp, Homo sapien
aggtgccgtcagctgggtcctaccc

SEQ ID NO: 2584254 - DNA, 25 bp, Homo sapien
cagaagcagcgtggttctcgtggca

SEQ ID NO: 2584255 - DNA, 25 bp, Homo sapien
aggagttggacttgacctgtggaca

SEQ ID NO: 2584256 - DNA, 25 bp, Homo sapien
cgggaggctcaagtcaggcgtccca

SEQ ID NO: 2584257 - DNA, 25 bp, Homo sapien
cccaagactcgtgctctggcgggag

SEQ ID NO: 2584258 - DNA, 25 bp, Homo sapien
cccgggcagaagtgtccgtgctgca

SEQ ID NO: 2584259 - DNA, 25 bp, Homo sapien
ccgtgctgcaagcaggagcgctcat

SEQ ID NO: 2584260 - DNA, 25 bp, Homo sapien
caggagcgctcatgctgggaaggca

SEQ ID NO: 2584261 - DNA, 25 bp, Homo sapien
aggcagatgggtggcccgggcagaa

SEQ ID NO: 2584262 - DNA, 25 bp, Homo sapien
gacaagtggtccagtggaagtgtcc

SEQ ID NO: 2584263 - DNA, 25 bp, Homo sapien
caagtggtccagtggaagtgtccgt

SEQ ID NO: 2584264 - DNA, 25 bp, Homo sapien
agggcagacaagtggtccagtggaa

SEQ ID NO: 2584265 - DNA, 25 bp, Homo sapien
cagacaagtggtccagtggaagtgt

SEQ ID NO: 2584266 - DNA, 25 bp, Homo sapien
ggaagtgtccatgctgcgagcgctc

SEQ ID NO: 2584267 - DNA, 25 bp, Homo sapien
catggtccggtggaagtgtccctgc

SEQ ID NO: 2584268 - DNA, 25 bp, Homo sapien
atcctggcggaagtgtctgtgctgt

SEQ ID NO: 2584269 - DNA, 25 bp, Homo sapien
ccagcaggagcgctcgtgcttggaa

SEQ ID NO: 2584270 - DNA, 25 bp, Homo sapien
ataatacaatatttccaacatcgtg

SEQ ID NO: 2584271 - DNA, 25 bp, Homo sapien
catgtgtggtgctcttgggagtcgg

SEQ ID NO: 2584272 - DNA, 25 bp, Homo sapien
ttcccaatgatgattatgttctctg

SEQ ID NO: 2584273 - DNA, 25 bp, Homo sapien
ccatctgagcgcacacatgtgtggt

SEQ ID NO: 2584274 - DNA, 25 bp, Homo sapien
gatgaggggcttatcatttcaccaa

SEQ ID NO: 2584275 - DNA, 25 bp, Homo sapien
cacaagggtgcattgaactctgggt

SEQ ID NO: 2584276 - DNA, 25 bp, Homo sapien
tgcatcctgggcagagcacgtctct

SEQ ID NO: 2584277 - DNA, 25 bp, Homo sapien
tcatttcaccaagacagagctcagc

SEQ ID NO: 2584278 - DNA, 25 bp, Homo sapien
catactgttgctcatggtgttcttc

SEQ ID NO: 2584279 - DNA, 25 bp, Homo sapien
gctgctcacagtgtcgttgctcata

SEQ ID NO: 2584280 - DNA, 25 bp, Homo sapien
tgtagctgctcacagtgtcgccact

SEQ ID NO: 2584281 - DNA, 25 bp, Homo sapien
ccgttgctcgtggtgttgttcttca

SEQ ID NO: 2584282 - DNA, 25 bp, Homo sapien
tttcctgctcgatgtgtgctgctgg

SEQ ID NO: 2584283 - DNA, 25 bp, Homo sapien
tgctgcagttttcctgctcgatgtg

SEQ ID NO: 2584284 - DNA, 25 bp, Homo sapien
gcagttttcctgctcgatgtgtgct

SEQ ID NO: 2584285 - DNA, 25 bp, Homo sapien
ctttgctgcagttttcctgctcgat

SEQ ID NO: 2584286 - DNA, 25 bp, Homo sapien
ttgagtcaccatgtacgctggccgg

SEQ ID NO: 2584287 - DNA, 25 bp, Homo sapien
tggagctggcgtgggttcggcacca

SEQ ID NO: 2584288 - DNA, 25 bp, Homo sapien
cagcggaagttgagtcaccatgtac

SEQ ID NO: 2584289 - DNA, 25 bp, Homo sapien
tcaggccagcggaagttgagtcacc

SEQ ID NO: 2584290 - DNA, 25 bp, Homo sapien
catcaagacgcactttcccgaaaag

SEQ ID NO: 2584291 - DNA, 25 bp, Homo sapien
aaagccaccatggttggtggacctg

SEQ ID NO: 2584292 - DNA, 25 bp, Homo sapien
cagtgtgcacttcagcagttgcaga

SEQ ID NO: 2584293 - DNA, 25 bp, Homo sapien
cagttgcagaaggttccttagtgct

SEQ ID NO: 2584294 - DNA, 25 bp, Homo sapien
ggaggcaccagagtaaagtgacgaa

SEQ ID NO: 2584295 - DNA, 25 bp, Homo sapien
taaagtgacgaagaggctgaagaag

SEQ ID NO: 2584296 - DNA, 25 bp, Homo sapien
caccagagtaaagtgacgaagaggc

SEQ ID NO: 2584297 - DNA, 25 bp, Homo sapien
ccagagtaaagtgacgaagaggctg

SEQ ID NO: 2584298 - DNA, 25 bp, Homo sapien
tgccacagggtctgcgacggggaca

SEQ ID NO: 2584299 - DNA, 25 bp, Homo sapien
gccacagggtctgcgacggggacag

SEQ ID NO: 2584300 - DNA, 25 bp, Homo sapien
tccttctttttgtgccagataaaga

SEQ ID NO: 2584301 - DNA, 25 bp, Homo sapien
tctttttgtgccagataaagaagac

SEQ ID NO: 2584302 - DNA, 25 bp, Homo sapien
tttgtgccagataaagaagactgtg

SEQ ID NO: 2584303 - DNA, 25 bp, Homo sapien
tttttgtgccagataaagaagactg

SEQ ID NO: 2584304 - DNA, 25 bp, Homo sapien
tagcaggaataaggttcatatccac

SEQ ID NO: 2584305 - DNA, 25 bp, Homo sapien
atatccactcgcaaacgggccagag

SEQ ID NO: 2584306 - DNA, 25 bp, Homo sapien
ccagagggagtggataattcttaca

SEQ ID NO: 2584307 - DNA, 25 bp, Homo sapien
tgtcgattcaactgatatagcagga

SEQ ID NO: 2584308 - DNA, 25 bp, Homo sapien
cgttgcacccacaatgaatttgctg

SEQ ID NO: 2584309 - DNA, 25 bp, Homo sapien
gtgcacttcgtaaagcgccctcaag

SEQ ID NO: 2584310 - DNA, 25 bp, Homo sapien
caaacagtattgaagtcggacgtgc

SEQ ID NO: 2584311 - DNA, 25 bp, Homo sapien
gccctcaagcatccaaacaatatgt

SEQ ID NO: 2584312 - DNA, 25 bp, Homo sapien
attgaagccatggaagtatcctggg

SEQ ID NO: 2584313 - DNA, 25 bp, Homo sapien
ggatattgaagccatggaagtatcc

SEQ ID NO: 2584314 - DNA, 25 bp, Homo sapien
atattgaagccatggaagtatcctg

SEQ ID NO: 2584315 - DNA, 25 bp, Homo sapien
gccatggaagtatcctggggcatcc

SEQ ID NO: 2584316 - DNA, 25 bp, Homo sapien
ctctgaccattgagctacgtgggct

SEQ ID NO: 2584317 - DNA, 25 bp, Homo sapien
ggttaaaagccgcacgctctgacca

SEQ ID NO: 2584318 - DNA, 25 bp, Homo sapien
agcccacggcgagggtcgaactcgc

SEQ ID NO: 2584319 - DNA, 25 bp, Homo sapien
gcagccttccttgcggttaaaagcc

SEQ ID NO: 2584320 - DNA, 25 bp, Homo sapien
caggatgccccatgggcgcttgata

SEQ ID NO: 2584321 - DNA, 25 bp, Homo sapien
aatcctgattagcatccccgtccag

SEQ ID NO: 2584322 - DNA, 25 bp, Homo sapien
taggccccggaggtctgttggctcc

SEQ ID NO: 2584323 - DNA, 25 bp, Homo sapien
caagatccgcctttcttcgtgagga

SEQ ID NO: 2584324 - DNA, 25 bp, Homo sapien
tggtggtgggggcaccagaggtccc

SEQ ID NO: 2584325 - DNA, 25 bp, Homo sapien
agggtggtggtgggggcaccagagg

SEQ ID NO: 2584326 - DNA, 25 bp, Homo sapien
gtggtgggggcaccagaggtcccag

SEQ ID NO: 2584327 - DNA, 25 bp, Homo sapien
ggtggtggtgggggcaccagaggtc

SEQ ID NO: 2584328 - DNA, 25 bp, Homo sapien
gataagcttgcggtcagcagccatg

SEQ ID NO: 2584329 - DNA, 25 bp, Homo sapien
agcagccatgcgagccccgggagtg

SEQ ID NO: 2584330 - DNA, 25 bp, Homo sapien
tgcgagccccgggagtgcctcctgt

SEQ ID NO: 2584331 - DNA, 25 bp, Homo sapien
agggagagataagcttgcggtcagc

SEQ ID NO: 2584332 - DNA, 25 bp, Homo sapien
ggcctgatttccatgggagcccatg

SEQ ID NO: 2584333 - DNA, 25 bp, Homo sapien
cctgatttccatgggagcccatggc

SEQ ID NO: 2584334 - DNA, 25 bp, Homo sapien
ctggcctgatttccatgggagccca

SEQ ID NO: 2584335 - DNA, 25 bp, Homo sapien
tggcctgatttccatgggagcccat

SEQ ID NO: 2584336 - DNA, 25 bp, Homo sapien
ggtacaaagggaggtggatgaggac

SEQ ID NO: 2584337 - DNA, 25 bp, Homo sapien
gaggtggatgaggacaccctcggac

SEQ ID NO: 2584338 - DNA, 25 bp, Homo sapien
tggatgaggacaccctcggactgcc

SEQ ID NO: 2584339 - DNA, 25 bp, Homo sapien
agggaggtggatgaggacaccctcg

SEQ ID NO: 2584340 - DNA, 25 bp, Homo sapien
agtcgctggaggtcccggatgctgt

SEQ ID NO: 2584341 - DNA, 25 bp, Homo sapien
ctgtggatctgactgcgggccagcc

SEQ ID NO: 2584342 - DNA, 25 bp, Homo sapien
tctcgatcacctcgcgggggatctc

SEQ ID NO: 2584343 - DNA, 25 bp, Homo sapien
gggccagcctctcgatcacctcgcg

SEQ ID NO: 2584344 - DNA, 25 bp, Homo sapien
gcgaaaacaatcccggggcgagcga

SEQ ID NO: 2584345 - DNA, 25 bp, Homo sapien
ccggggcgagcgagcagccctcggc

SEQ ID NO: 2584346 - DNA, 25 bp, Homo sapien
ggaggccgcggctgaactttgtgtg

SEQ ID NO: 2584347 - DNA, 25 bp, Homo sapien
actttgtgtgacacacgcggcgttt

SEQ ID NO: 2584348 - DNA, 25 bp, Homo sapien
gccgcggctgaactttgtgtgacac

SEQ ID NO: 2584349 - DNA, 25 bp, Homo sapien
tttgtgtgacacacgcggcgttttc

SEQ ID NO: 2584350 - DNA, 25 bp, Homo sapien
gaggagccaaatgccagtcacaaag

SEQ ID NO: 2584351 - DNA, 25 bp, Homo sapien
caaatgccagtcacaaagccccacc

SEQ ID NO: 2584352 - DNA, 25 bp, Homo sapien
gagccaaatgccagtcacaaagccc

SEQ ID NO: 2584353 - DNA, 25 bp, Homo sapien
ggaggagccaaatgccagtcacaaa

SEQ ID NO: 2584354 - DNA, 25 bp, Homo sapien
tcaaggagcggccaagaccccagac

SEQ ID NO: 2584355 - DNA, 25 bp, Homo sapien
ccgaatgaaacgcttgggctccggg

SEQ ID NO: 2584356 - DNA, 25 bp, Homo sapien
cctccgaatgaaacgcttgggctcc

SEQ ID NO: 2584357 - DNA, 25 bp, Homo sapien
ctcagtctccccaactgtacagtgg

SEQ ID NO: 2584358 - DNA, 25 bp, Homo sapien
ccggcaagaatcacccctaaaactg

SEQ ID NO: 2584359 - DNA, 25 bp, Homo sapien
tggccggcaagaatcacccctaaaa

SEQ ID NO: 2584360 - DNA, 25 bp, Homo sapien
tgctcccaggacagttaaccaggag

SEQ ID NO: 2584361 - DNA, 25 bp, Homo sapien
cggcaagaatcacccctaaaactgc

SEQ ID NO: 2584362 - DNA, 25 bp, Homo sapien
gaagaggttgcaggtggtctcccct

SEQ ID NO: 2584363 - DNA, 25 bp, Homo sapien
gtgcctcctccaaggtagcccaggt

SEQ ID NO: 2584364 - DNA, 25 bp, Homo sapien
gatgcagggcatgaaacactggaaa

SEQ ID NO: 2584365 - DNA, 25 bp, Homo sapien
gcccgtgacgaagcgcagggccctt

SEQ ID NO: 2584366 - DNA, 25 bp, Homo sapien
tggaccccgtgagctctcaggctgg

SEQ ID NO: 2584367 - DNA, 25 bp, Homo sapien
aggggccgcttctcgggcacatgct

SEQ ID NO: 2584368 - DNA, 25 bp, Homo sapien
ggcacatgcttagtggcatggaccc

SEQ ID NO: 2584369 - DNA, 25 bp, Homo sapien
atggaccccgtgagctctcaggctg

SEQ ID NO: 2584370 - DNA, 25 bp, Homo sapien
cgaggaatctcgtaaatgaccgtcc

SEQ ID NO: 2584371 - DNA, 25 bp, Homo sapien
gggtcgacctgactccgaggaatct

SEQ ID NO: 2584372 - DNA, 25 bp, Homo sapien
ccagatcaggaagttggcggacgtg

SEQ ID NO: 2584373 - DNA, 25 bp, Homo sapien
gtaaatgaccgtcctggtcttgcag

SEQ ID NO: 2584374 - DNA, 25 bp, Homo sapien
tcacaacgagggaagcccgagcccc

SEQ ID NO: 2584375 - DNA, 25 bp, Homo sapien
cacaacgagggaagcccgagcccca

SEQ ID NO: 2584376 - DNA, 25 bp, Homo sapien
cgagggaagcccgagccccaccacg

SEQ ID NO: 2584377 - DNA, 25 bp, Homo sapien
tcaaagcaagtattgtagcactcgg

SEQ ID NO: 2584378 - DNA, 25 bp, Homo sapien
ggagaacaaagagacagtgcacatt

SEQ ID NO: 2584379 - DNA, 25 bp, Homo sapien
tagcactcggtgaagcagtaagaag

SEQ ID NO: 2584380 - DNA, 25 bp, Homo sapien
tgtttaatgtgacatcaaagcaagt

SEQ ID NO: 2584381 - DNA, 25 bp, Homo sapien
tttattgccagtgtgcggtctttgt

SEQ ID NO: 2584382 - DNA, 25 bp, Homo sapien
tattgccagtgtgcggtctttgttc

SEQ ID NO: 2584383 - DNA, 25 bp, Homo sapien
gctttattgccagtgtgcggtcttt

SEQ ID NO: 2584384 - DNA, 25 bp, Homo sapien
ggtgctttattgccagtgtgcggtc

SEQ ID NO: 2584385 - DNA, 25 bp, Homo sapien
cctttataaacgtgcagggctgttg

SEQ ID NO: 2584386 - DNA, 25 bp, Homo sapien
gctagtaacaccagacagcacaggg

SEQ ID NO: 2584387 - DNA, 25 bp, Homo sapien
gaaatcctttataaacgtgcagggc

SEQ ID NO: 2584388 - DNA, 25 bp, Homo sapien
gcatttggctgctagtaacaccaga

SEQ ID NO: 2584389 - DNA, 25 bp, Homo sapien
ccctgattggccttgatggtgtctg

SEQ ID NO: 2584390 - DNA, 25 bp, Homo sapien
caaccaggtaggactgtctgccgga

SEQ ID NO: 2584391 - DNA, 25 bp, Homo sapien
tgatcacaccagcaaatcacgcttc

SEQ ID NO: 2584392 - DNA, 25 bp, Homo sapien
gggaggtgcaactgactgatcacac

SEQ ID NO: 2584393 - DNA, 25 bp, Homo sapien
gacggccgtccctcggcccactcac

SEQ ID NO: 2584394 - DNA, 25 bp, Homo sapien
agataaacaaatgccgtaggtattt

SEQ ID NO: 2584395 - DNA, 25 bp, Homo sapien
caaatgccgtaggtatttgttgctt

SEQ ID NO: 2584396 - DNA, 25 bp, Homo sapien
ccgtaggtatttgttgcttcagttc

SEQ ID NO: 2584397 - DNA, 25 bp, Homo sapien
gagggtggcccaagctgcggcactg

SEQ ID NO: 2584398 - DNA, 25 bp, Homo sapien
acccaattcattagtgggctgcggg

SEQ ID NO: 2584399 - DNA, 25 bp, Homo sapien
aggagattcaggtctcactgagagg

SEQ ID NO: 2584400 - DNA, 25 bp, Homo sapien
gggctgggagtgcataagacaccca

SEQ ID NO: 2584401 - DNA, 25 bp, Homo sapien
gatgtccgaagctccatgcaggcat

SEQ ID NO: 2584402 - DNA, 25 bp, Homo sapien
tcgtcggcatcggtgttggagaaca

SEQ ID NO: 2584403 - DNA, 25 bp, Homo sapien
tgttgaaggattcgttgccctgctc

SEQ ID NO: 2584404 - DNA, 25 bp, Homo sapien
tgcaggcattcatggccgggctctg

SEQ ID NO: 2584405 - DNA, 25 bp, Homo sapien
ttctgttgtgtcctgggagcccacg

SEQ ID NO: 2584406 - DNA, 25 bp, Homo sapien
gtggcatttctgttgtgtcctggga

SEQ ID NO: 2584407 - DNA, 25 bp, Homo sapien
gttgtgtcctgggagcccacgcgcc

SEQ ID NO: 2584408 - DNA, 25 bp, Homo sapien
catttctgttgtgtcctgggagccc

SEQ ID NO: 2584409 - DNA, 25 bp, Homo sapien
cgcagatgaactcagccgtggggaa

SEQ ID NO: 2584410 - DNA, 25 bp, Homo sapien
gtgtgataaggtgcagcccacatct

SEQ ID NO: 2584411 - DNA, 25 bp, Homo sapien
ggaatcggaatgtctggtgtgataa

SEQ ID NO: 2584412 - DNA, 25 bp, Homo sapien
gaactcagccgtggggaatcggaat

SEQ ID NO: 2584413 - DNA, 25 bp, Homo sapien
gggtgttacgggtgagaagctccca

SEQ ID NO: 2584414 - DNA, 25 bp, Homo sapien
acgactctgtccactctctggggtc

SEQ ID NO: 2584415 - DNA, 25 bp, Homo sapien
cgactctgtccactctctggggtct

SEQ ID NO: 2584416 - DNA, 25 bp, Homo sapien
agagtggctggggtgttacgggtga

SEQ ID NO: 2584417 - DNA, 25 bp, Homo sapien
ctgaggggacaaaggtcagagggaa

SEQ ID NO: 2584418 - DNA, 25 bp, Homo sapien
gggacaaaggtcagagggaacagga

SEQ ID NO: 2584419 - DNA, 25 bp, Homo sapien
aggtcagagggaacaggaggcccat

SEQ ID NO: 2584420 - DNA, 25 bp, Homo sapien
aaggtcagagggaacaggaggccca

SEQ ID NO: 2584421 - DNA, 25 bp, Homo sapien
tggaggaaaacatccggctttggac

SEQ ID NO: 2584422 - DNA, 25 bp, Homo sapien
ctgcccacccatccgagggttggag

SEQ ID NO: 2584423 - DNA, 25 bp, Homo sapien
ccttcatgttcccgcttctgggagg

SEQ ID NO: 2584424 - DNA, 25 bp, Homo sapien
cgcttctgggaggcgtcttctccct

SEQ ID NO: 2584425 - DNA, 25 bp, Homo sapien
gctgctctggcgacgagcctggcct

SEQ ID NO: 2584426 - DNA, 25 bp, Homo sapien
ccgttttgggccttgcgaggtgtcg

SEQ ID NO: 2584427 - DNA, 25 bp, Homo sapien
gtgtcgagctgcttagccggaagct

SEQ ID NO: 2584428 - DNA, 25 bp, Homo sapien
cctagaccacagtgcgggggccgtt

SEQ ID NO: 2584429 - DNA, 25 bp, Homo sapien
ttggaagatgggtcctccagtgaga

SEQ ID NO: 2584430 - DNA, 25 bp, Homo sapien
ggagccgcctcctgggattgtggca

SEQ ID NO: 2584431 - DNA, 25 bp, Homo sapien
ctctccattcgtttttttggagcta

SEQ ID NO: 2584432 - DNA, 25 bp, Homo sapien
gcagccttggaagatgggtcctcca

SEQ ID NO: 2584433 - DNA, 25 bp, Homo sapien
atcaagggccgttttttgcgagtgt

SEQ ID NO: 2584434 - DNA, 25 bp, Homo sapien
cttcctgcaggatcttcccgtgtga

SEQ ID NO: 2584435 - DNA, 25 bp, Homo sapien
tcccgtgtgatgtctctatgggctt

SEQ ID NO: 2584436 - DNA, 25 bp, Homo sapien
gcttgctggcctgcaaccgtggacc

SEQ ID NO: 2584437 - DNA, 25 bp, Homo sapien
gagtcacagcctgtcctgtgttgat

SEQ ID NO: 2584438 - DNA, 25 bp, Homo sapien
gtcacagcctgtcctgtgttgattt

SEQ ID NO: 2584439 - DNA, 25 bp, Homo sapien
ctggcgagtcacagcctgtcctgtg

SEQ ID NO: 2584440 - DNA, 25 bp, Homo sapien
cacagcctgtcctgtgttgattttg

SEQ ID NO: 2584441 - DNA, 25 bp, Homo sapien
cccagcgcccttcttggtggcgggt

SEQ ID NO: 2584442 - DNA, 25 bp, Homo sapien
gcacaagcttgtggcgatggaaagc

SEQ ID NO: 2584443 - DNA, 25 bp, Homo sapien
tgtgtacgtcctgcagctcctcgtg

SEQ ID NO: 2584444 - DNA, 25 bp, Homo sapien
cagatggcgatgcagtgtgtacgtc

SEQ ID NO: 2584445 - DNA, 25 bp, Homo sapien
gagtcatcagggtacagggatcccg

SEQ ID NO: 2584446 - DNA, 25 bp, Homo sapien
tgacagtgcccttctgcggccctgt

SEQ ID NO: 2584447 - DNA, 25 bp, Homo sapien
ttacgaatccttcatgaccgtgatt

SEQ ID NO: 2584448 - DNA, 25 bp, Homo sapien
accgtgatttctgccgcttcccggg

SEQ ID NO: 2584449 - DNA, 25 bp, Homo sapien
cagcatccggcggctgaggcccctg

SEQ ID NO: 2584450 - DNA, 25 bp, Homo sapien
agcatccggcggctgaggcccctgc

SEQ ID NO: 2584451 - DNA, 25 bp, Homo sapien
gggccctgggtcttcgccgtcagca

SEQ ID NO: 2584452 - DNA, 25 bp, Homo sapien
tgaaggaggccctcgcacttctggg

SEQ ID NO: 2584453 - DNA, 25 bp, Homo sapien
ggtcttcgccgtcagcatttgaggc

SEQ ID NO: 2584454 - DNA, 25 bp, Homo sapien
ccctggccccgagcgggcactgaag

SEQ ID NO: 2584455 - DNA, 25 bp, Homo sapien
gggttgaagcgcaggacttttctga

SEQ ID NO: 2584456 - DNA, 25 bp, Homo sapien
gctgagctggctttgtcgtggcaca

SEQ ID NO: 2584457 - DNA, 25 bp, Homo sapien
tgcccaggctgaaggaacggggttg

SEQ ID NO: 2584458 - DNA, 25 bp, Homo sapien
tgaagcgcaggacttttctgatggg

SEQ ID NO: 2584459 - DNA, 25 bp, Homo sapien
ttctccaagctgacagccccaggtg

SEQ ID NO: 2584460 - DNA, 25 bp, Homo sapien
cctgcgcttctccaagctgacagcc

SEQ ID NO: 2584461 - DNA, 25 bp, Homo sapien
ctgcgcttctccaagctgacagccc

SEQ ID NO: 2584462 - DNA, 25 bp, Homo sapien
tccaagctgacagccccaggtgtgg

SEQ ID NO: 2584463 - DNA, 25 bp, Homo sapien
tggccggctcctgacgcctcagagc

SEQ ID NO: 2584464 - DNA, 25 bp, Homo sapien
ccctagccgtcgggaggcgggtgcg

SEQ ID NO: 2584465 - DNA, 25 bp, Homo sapien
gcgggtgcgccgcaggatgaacccg

SEQ ID NO: 2584466 - DNA, 25 bp, Homo sapien
gcccctgcggccacgctggccggct

SEQ ID NO: 2584467 - DNA, 25 bp, Homo sapien
gagaagcccttctggtttgtgccct

SEQ ID NO: 2584468 - DNA, 25 bp, Homo sapien
gattcccagcggtaggtgaagccga

SEQ ID NO: 2584469 - DNA, 25 bp, Homo sapien
tctttgcctgggtccagtgcgcaga

SEQ ID NO: 2584470 - DNA, 25 bp, Homo sapien
ttcatacttagccatgggttcctcc

SEQ ID NO: 2584471 - DNA, 25 bp, Homo sapien
taaaacgaggttcctgcacctgcct

SEQ ID NO: 2584472 - DNA, 25 bp, Homo sapien
gatggtgccgcctgttaaaacgagg

SEQ ID NO: 2584473 - DNA, 25 bp, Homo sapien
tcatgtcttgtgagccctgtgacct

SEQ ID NO: 2584474 - DNA, 25 bp, Homo sapien
catgtcggcgtgcacatctgtgaaa

SEQ ID NO: 2584475 - DNA, 25 bp, Homo sapien
cattggttcatccatgcaggcgagg

SEQ ID NO: 2584476 - DNA, 25 bp, Homo sapien
ctgaggctggatcctttccgagcct

SEQ ID NO: 2584477 - DNA, 25 bp, Homo sapien
atccatgcaggcgagggccctagtg

SEQ ID NO: 2584478 - DNA, 25 bp, Homo sapien
tcctgtcccgacatggggagagccc

SEQ ID NO: 2584479 - DNA, 25 bp, Homo sapien
ggttgctttcaatcttgaccccgcg

SEQ ID NO: 2584480 - DNA, 25 bp, Homo sapien
cgcgttcttcgaggaccatctgtgg

SEQ ID NO: 2584481 - DNA, 25 bp, Homo sapien
caggcccacgagacaaaccatcgag

SEQ ID NO: 2584482 - DNA, 25 bp, Homo sapien
cggccggctggcgtctgttgtccat

SEQ ID NO: 2584483 - DNA, 25 bp, Homo sapien
ggttaggccgaggacatcctcctgc

SEQ ID NO: 2584484 - DNA, 25 bp, Homo sapien
gttaggccgaggacatcctcctgca

SEQ ID NO: 2584485 - DNA, 25 bp, Homo sapien
gggttaggccgaggacatcctcctg

SEQ ID NO: 2584486 - DNA, 25 bp, Homo sapien
tttacaccgataacacacaggctgc

SEQ ID NO: 2584487 - DNA, 25 bp, Homo sapien
ctagaatgctgtgttcccacgcggc

SEQ ID NO: 2584488 - DNA, 25 bp, Homo sapien
gagtgacaacttgttccccgcagtg

SEQ ID NO: 2584489 - DNA, 25 bp, Homo sapien
gacagtgcgacggtatttttcctag

SEQ ID NO: 2584490 - DNA, 25 bp, Homo sapien
ctttattgccagtgtgcggtttttg

SEQ ID NO: 2584491 - DNA, 25 bp, Homo sapien
tgctttattgccagtgtgcggtttt

SEQ ID NO: 2584492 - DNA, 25 bp, Homo sapien
ggtgctttattgccagtgtgcggtt

SEQ ID NO: 2584493 - DNA, 25 bp, Homo sapien
gtgctttattgccagtgtgcggttt

SEQ ID NO: 2584494 - DNA, 25 bp, Homo sapien
aaagggactccttgagcacaccaaa

SEQ ID NO: 2584495 - DNA, 25 bp, Homo sapien
gggactccttgagcacaccaaaggt

SEQ ID NO: 2584496 - DNA, 25 bp, Homo sapien
ggccccatcacatgggaaaatgagg

SEQ ID NO: 2584497 - DNA, 25 bp, Homo sapien
aaaatgagggaccaccacacagccc

SEQ ID NO: 2584498 - DNA, 25 bp, Homo sapien
aatcaggcaccacttggtgtttact

SEQ ID NO: 2584499 - DNA, 25 bp, Homo sapien
gaatggagatcgcaatcaggcacca

SEQ ID NO: 2584500 - DNA, 25 bp, Homo sapien
caggcaccacttggtgtttactgag

SEQ ID NO: 2584501 - DNA, 25 bp, Homo sapien
ggaatggagatcgcaatcaggcacc

SEQ ID NO: 2584502 - DNA, 25 bp, Homo sapien
cccttcctgacatgctgttttgcaa

SEQ ID NO: 2584503 - DNA, 25 bp, Homo sapien
ctgttttgcaaattcccgtaatgcc

SEQ ID NO: 2584504 - DNA, 25 bp, Homo sapien
ctgacatgctgttttgcaaattccc

SEQ ID NO: 2584505 - DNA, 25 bp, Homo sapien
gacatgctgttttgcaaattcccgt

SEQ ID NO: 2584506 - DNA, 25 bp, Homo sapien
ggaactcctcgtacatcttgcgttt

SEQ ID NO: 2584507 - DNA, 25 bp, Homo sapien
ggagaccttgctgaggaactcctcg

SEQ ID NO: 2584508 - DNA, 25 bp, Homo sapien
gaccttgctgaggaactcctcgtac

SEQ ID NO: 2584509 - DNA, 25 bp, Homo sapien
gctgaggaactcctcgtacatcttg

SEQ ID NO: 2584510 - DNA, 25 bp, Homo sapien
gccgtgcaggggcgcagccactgac

SEQ ID NO: 2584511 - DNA, 25 bp, Homo sapien
agccgtgcaggggcgcagccactga

SEQ ID NO: 2584512 - DNA, 25 bp, Homo sapien
agggctgactatgcagtgcctggtg

SEQ ID NO: 2584513 - DNA, 25 bp, Homo sapien
cagggctgactatgcagtgcctggt

SEQ ID NO: 2584514 - DNA, 25 bp, Homo sapien
ccaggggccggaccacccaggtctg

SEQ ID NO: 2584515 - DNA, 25 bp, Homo sapien
caggggccggaccacccaggtctgg

SEQ ID NO: 2584516 - DNA, 25 bp, Homo sapien
cagggagagggtctcgcccttcatg

SEQ ID NO: 2584517 - DNA, 25 bp, Homo sapien
cttcatggcctgcagcaaccgttgt

SEQ ID NO: 2584518 - DNA, 25 bp, Homo sapien
tgcagcaaccgttgtctcgacagcg

SEQ ID NO: 2584519 - DNA, 25 bp, Homo sapien
tggcctgcagcaaccgttgtctcga

SEQ ID NO: 2584520 - DNA, 25 bp, Homo sapien
taatcagaggaacataaatgggcgg

SEQ ID NO: 2584521 - DNA, 25 bp, Homo sapien
ggttactcttctgggaggccacgga

SEQ ID NO: 2584522 - DNA, 25 bp, Homo sapien
cggagaagccggtcacattgctggc

SEQ ID NO: 2584523 - DNA, 25 bp, Homo sapien
gactttgtgccgatgctgactgggc

SEQ ID NO: 2584524 - DNA, 25 bp, Homo sapien
tgggtcccagacgcatgcagctcat

SEQ ID NO: 2584525 - DNA, 25 bp, Homo sapien
agtgggtcccagacgcatgcagctc

SEQ ID NO: 2584526 - DNA, 25 bp, Homo sapien
gtgggtcccagacgcatgcagctca

SEQ ID NO: 2584527 - DNA, 25 bp, Homo sapien
aggacaggtcatcccggggcccacg

SEQ ID NO: 2584528 - DNA, 25 bp, Homo sapien
atgaggacaggtcatcccggggccc

SEQ ID NO: 2584529 - DNA, 25 bp, Homo sapien
agccacagtccaagacaagggccac

SEQ ID NO: 2584530 - DNA, 25 bp, Homo sapien
ccacagccacagtccaagacaaggg

SEQ ID NO: 2584531 - DNA, 25 bp, Homo sapien
atgtaaaagtcgtccccaggctctc

SEQ ID NO: 2584532 - DNA, 25 bp, Homo sapien
gccacggtcagacgctcccacttct

SEQ ID NO: 2584533 - DNA, 25 bp, Homo sapien
tcttcaaactggacgggctccagcg

SEQ ID NO: 2584534 - DNA, 25 bp, Homo sapien
ctccgtgatgatgtaaaagtcgtcc

SEQ ID NO: 2584535 - DNA, 25 bp, Homo sapien
gagcgcccacgtgggaagcacgtct

SEQ ID NO: 2584536 - DNA, 25 bp, Homo sapien
gcgcccacgtgggaagcacgtctca

SEQ ID NO: 2584537 - DNA, 25 bp, Homo sapien
ccagagcgcccacgtgggaagcacg

SEQ ID NO: 2584538 - DNA, 25 bp, Homo sapien
agagcgcccacgtgggaagcacgtc

SEQ ID NO: 2584539 - DNA, 25 bp, Homo sapien
gatgtccccaacagtgacctgctgt

SEQ ID NO: 2584540 - DNA, 25 bp, Homo sapien
tatagagagatcctgcgtaccctga

SEQ ID NO: 2584541 - DNA, 25 bp, Homo sapien
accctgaatgtatgcgatgtcccca

SEQ ID NO: 2584542 - DNA, 25 bp, Homo sapien
tgccatcatcgtacatttgagtgcg

SEQ ID NO: 2584543 - DNA, 25 bp, Homo sapien
ccaacagtctgcgtgcggccaccac

SEQ ID NO: 2584544 - DNA, 25 bp, Homo sapien
ccaccacggactgcggccccagcac

SEQ ID NO: 2584545 - DNA, 25 bp, Homo sapien
ctgctcggcccacccaacagtctgc

SEQ ID NO: 2584546 - DNA, 25 bp, Homo sapien
ggcccacccaacagtctgcgtgcgg

SEQ ID NO: 2584547 - DNA, 25 bp, Homo sapien
tcacacgcgaattcctgccgtgtcc

SEQ ID NO: 2584548 - DNA, 25 bp, Homo sapien
ctcccgctgacgcacagggtgcggt

SEQ ID NO: 2584549 - DNA, 25 bp, Homo sapien
cggtgggtaccatagctctccatct

SEQ ID NO: 2584550 - DNA, 25 bp, Homo sapien
tcagggctcccgctgacgcacaggg

SEQ ID NO: 2584551 - DNA, 25 bp, Homo sapien
cacagggtgcggtgggtaccatagc

SEQ ID NO: 2584552 - DNA, 25 bp, Homo sapien
aggctgacggcaggtgcaggcctca

SEQ ID NO: 2584553 - DNA, 25 bp, Homo sapien
ggctgacggcaggtgcaggcctcac

SEQ ID NO: 2584554 - DNA, 25 bp, Homo sapien
cgaggctgacggcaggtgcaggcct

SEQ ID NO: 2584555 - DNA, 25 bp, Homo sapien
cccgaggctgacggcaggtgcaggc

SEQ ID NO: 2584556 - DNA, 25 bp, Homo sapien
ttggtaagagcccctagaaatatcc

SEQ ID NO: 2584557 - DNA, 25 bp, Homo sapien
aggactctgtccccatttagagctc

SEQ ID NO: 2584558 - DNA, 25 bp, Homo sapien
aggtgacggaacagctggaccgtcc

SEQ ID NO: 2584559 - DNA, 25 bp, Homo sapien
ccactttcccgtccgcggtgaggtg

SEQ ID NO: 2584560 - DNA, 25 bp, Homo sapien
agcagcgacccgtggattttgaaca

SEQ ID NO: 2584561 - DNA, 25 bp, Homo sapien
cgtcccctggttcaggcgtcggcgg

SEQ ID NO: 2584562 - DNA, 25 bp, Homo sapien
ctaaaagcatccagcagcgacccgt

SEQ ID NO: 2584563 - DNA, 25 bp, Homo sapien
tggattttgaacaatgggccgtccc

SEQ ID NO: 2584564 - DNA, 25 bp, Homo sapien
ccgatgacggggtgtgcacggggtc

SEQ ID NO: 2584565 - DNA, 25 bp, Homo sapien
gacggggtgtgcacggggtcctcca

SEQ ID NO: 2584566 - DNA, 25 bp, Homo sapien
gatgacggggtgtgcacggggtcct

SEQ ID NO: 2584567 - DNA, 25 bp, Homo sapien
gtgctgttttgcaggggtccctttc

SEQ ID NO: 2584568 - DNA, 25 bp, Homo sapien
caggagcctcgcggtacaggctggg

SEQ ID NO: 2584569 - DNA, 25 bp, Homo sapien
ggagcctcgcggtacaggctgggtc

SEQ ID NO: 2584570 - DNA, 25 bp, Homo sapien
aggagcctcgcggtacaggctgggt

SEQ ID NO: 2584571 - DNA, 25 bp, Homo sapien
catgtatggcttaggcccctgtggc

SEQ ID NO: 2584572 - DNA, 25 bp, Homo sapien
gtaagcagcaccacgagtaagcagc

SEQ ID NO: 2584573 - DNA, 25 bp, Homo sapien
gcggccccaaaagagcgacaagtag

SEQ ID NO: 2584574 - DNA, 25 bp, Homo sapien
tgaaagggccaccacaagtaagcag

SEQ ID NO: 2584575 - DNA, 25 bp, Homo sapien
tgccctgacccgcgagaggagggag

SEQ ID NO: 2584576 - DNA, 25 bp, Homo sapien
aggacgcgcggccggtgcaggttcc

SEQ ID NO: 2584577 - DNA, 25 bp, Homo sapien
gccctgacccgcgagaggagggagg

SEQ ID NO: 2584578 - DNA, 25 bp, Homo sapien
ccggtgcaggttcccccacaggcac

SEQ ID NO: 2584579 - DNA, 25 bp, Homo sapien
tccctctaagcaccgaggaagctct

SEQ ID NO: 2584580 - DNA, 25 bp, Homo sapien
acacccgtaatgaccctggccagtg

SEQ ID NO: 2584581 - DNA, 25 bp, Homo sapien
tattttcctgctagaggccaggcca

SEQ ID NO: 2584582 - DNA, 25 bp, Homo sapien
gatgtccgcatgcacaaagtccaca

SEQ ID NO: 2584583 - DNA, 25 bp, Homo sapien
tggagcactcaggagcctgccccag

SEQ ID NO: 2584584 - DNA, 25 bp, Homo sapien
gccgctggagcactcaggagcctgc

SEQ ID NO: 2584585 - DNA, 25 bp, Homo sapien
cagctgtggccgctggagcactcag

SEQ ID NO: 2584586 - DNA, 25 bp, Homo sapien
gcagagcaggggcactcgcagccca

SEQ ID NO: 2584587 - DNA, 25 bp, Homo sapien
ggctgccctgcaacaagagggatgt

SEQ ID NO: 2584588 - DNA, 25 bp, Homo sapien
tcagagccgggtggacctgtgtgtc

SEQ ID NO: 2584589 - DNA, 25 bp, Homo sapien
cctgctcctgggatgacgaggctgc

SEQ ID NO: 2584590 - DNA, 25 bp, Homo sapien
gccctgggggagctttgcctacaaa

SEQ ID NO: 2584591 - DNA, 25 bp, Homo sapien
tgaaaggcaagtgaagacgtcccat

SEQ ID NO: 2584592 - DNA, 25 bp, Homo sapien
aagtgaagacgtcccatgcctttgg

SEQ ID NO: 2584593 - DNA, 25 bp, Homo sapien
catctcacagttcagccgggtgctg

SEQ ID NO: 2584594 - DNA, 25 bp, Homo sapien
ggagccatctcacagttcagccggg

SEQ ID NO: 2584595 - DNA, 25 bp, Homo sapien
tctggaaatgtctgcaatggaaagc

SEQ ID NO: 2584596 - DNA, 25 bp, Homo sapien
gccaggaatctggtcagggtaatcc

SEQ ID NO: 2584597 - DNA, 25 bp, Homo sapien
tgcatggtgcttaagtctcctcgct

SEQ ID NO: 2584598 - DNA, 25 bp, Homo sapien
tacgggtgggaaacaagatctggaa

SEQ ID NO: 2584599 - DNA, 25 bp, Homo sapien
gggtgctgcaaatcgatttgtccag

SEQ ID NO: 2584600 - DNA, 25 bp, Homo sapien
accgtggggtgctgcaaatcgattt

SEQ ID NO: 2584601 - DNA, 25 bp, Homo sapien
tgcaaatcgatttgtccagaactgc

SEQ ID NO: 2584602 - DNA, 25 bp, Homo sapien
aaatcgatttgtccagaactgcgca

SEQ ID NO: 2584603 - DNA, 25 bp, Homo sapien
ttcaccaagttcctccggcagctga

SEQ ID NO: 2584604 - DNA, 25 bp, Homo sapien
tcaccaagttcctccggcagctgac

SEQ ID NO: 2584605 - DNA, 25 bp, Homo sapien
atggccgagccacaaggtaggtgac

SEQ ID NO: 2584606 - DNA, 25 bp, Homo sapien
tcggtctggccccacacgtttccca

SEQ ID NO: 2584607 - DNA, 25 bp, Homo sapien
cctggaggcatggccgagccacaag

SEQ ID NO: 2584608 - DNA, 25 bp, Homo sapien
gtgccgctaagcaccccctcggtct

SEQ ID NO: 2584609 - DNA, 25 bp, Homo sapien
ggagctcgctcccaagtggaaatgt

SEQ ID NO: 2584610 - DNA, 25 bp, Homo sapien
ccgactggagctcgctcccaagtgg

SEQ ID NO: 2584611 - DNA, 25 bp, Homo sapien
tgcaggccctttccccgactggagc

SEQ ID NO: 2584612 - DNA, 25 bp, Homo sapien
ccccaggcctcggatcctgggcggg

SEQ ID NO: 2584613 - DNA, 25 bp, Homo sapien
gggcgcggccctgccttcggcgcgg

SEQ ID NO: 2584614 - DNA, 25 bp, Homo sapien
ctcgacttcccggctcagggcgcgg

SEQ ID NO: 2584615 - DNA, 25 bp, Homo sapien
gcgcggccctgccttcggcgcggga

SEQ ID NO: 2584616 - DNA, 25 bp, Homo sapien
cggccctgccttcggcgcgggagtg

SEQ ID NO: 2584617 - DNA, 25 bp, Homo sapien
tctgtgcgccccacggatcccgacg

SEQ ID NO: 2584618 - DNA, 25 bp, Homo sapien
cgcgctctgagctgcgcctcggccg

SEQ ID NO: 2584619 - DNA, 25 bp, Homo sapien
atcccgacgcgggaggctcagaacc

SEQ ID NO: 2584620 - DNA, 25 bp, Homo sapien
gcctcggccggaggtggcgctctgt

SEQ ID NO: 2584621 - DNA, 25 bp, Homo sapien
cacgctcagacctcggcctccgcgc

SEQ ID NO: 2584622 - DNA, 25 bp, Homo sapien
ccctttctcggcgtgggagccgtct

SEQ ID NO: 2584623 - DNA, 25 bp, Homo sapien
ttctcggcgtgggagccgtctagcc

SEQ ID NO: 2584624 - DNA, 25 bp, Homo sapien
tgggagccgtctagccacgctcaga

SEQ ID NO: 2584625 - DNA, 25 bp, Homo sapien
ctagggaggcgaaatccatccagcc

SEQ ID NO: 2584626 - DNA, 25 bp, Homo sapien
tagggaggcgaaatccatccagccc

SEQ ID NO: 2584627 - DNA, 25 bp, Homo sapien
ctggcagggcactgacgagcacctg

SEQ ID NO: 2584628 - DNA, 25 bp, Homo sapien
caggacgcgtagaccccctggcagg

SEQ ID NO: 2584629 - DNA, 25 bp, Homo sapien
gcactgacgagcacctggacctgta

SEQ ID NO: 2584630 - DNA, 25 bp, Homo sapien
gacctgtagtcagggtccaatccct

SEQ ID NO: 2584631 - DNA, 25 bp, Homo sapien
tccggattcggcctttgaaatgcta

SEQ ID NO: 2584632 - DNA, 25 bp, Homo sapien
gctgcgccttaacggcctttgtctg

SEQ ID NO: 2584633 - DNA, 25 bp, Homo sapien
tgctcacccaaggaagcgtctcctg

SEQ ID NO: 2584634 - DNA, 25 bp, Homo sapien
gagaggcgtcgctccccaaatattt

SEQ ID NO: 2584635 - DNA, 25 bp, Homo sapien
atgcgcgccactccgggataactgg

SEQ ID NO: 2584636 - DNA, 25 bp, Homo sapien
cggctctttccagaagccatgcagt

SEQ ID NO: 2584637 - DNA, 25 bp, Homo sapien
gataactggccgaagaatgaggccg

SEQ ID NO: 2584638 - DNA, 25 bp, Homo sapien
gcccaggaagacaggatgcgcgcca

SEQ ID NO: 2584639 - DNA, 25 bp, Homo sapien
taagtcagccctgcggtttcaacgc

SEQ ID NO: 2584640 - DNA, 25 bp, Homo sapien
cggccgctgttgttgtggtcgccat

SEQ ID NO: 2584641 - DNA, 25 bp, Homo sapien
tgtcgcgcggctgcacaagttttcg

SEQ ID NO: 2584642 - DNA, 25 bp, Homo sapien
tagagagatgcctgcaccgctttcg

SEQ ID NO: 2584643 - DNA, 25 bp, Homo sapien
tgaaactcgattcctggccagaaag

SEQ ID NO: 2584644 - DNA, 25 bp, Homo sapien
acggtaattatgagcccgcgggcac

SEQ ID NO: 2584645 - DNA, 25 bp, Homo sapien
taatagcggctggaagtgaaactcg

SEQ ID NO: 2584646 - DNA, 25 bp, Homo sapien
tccgacgcgggagtatatttagcct

SEQ ID NO: 2584647 - DNA, 25 bp, Homo sapien
tgcgaattgaggatagtctatattt

SEQ ID NO: 2584648 - DNA, 25 bp, Homo sapien
ctgcgaattgaggatagtctatatt

SEQ ID NO: 2584649 - DNA, 25 bp, Homo sapien
gcgaattgaggatagtctatattta

SEQ ID NO: 2584650 - DNA, 25 bp, Homo sapien
cgaattgaggatagtctatatttac

SEQ ID NO: 2584651 - DNA, 25 bp, Homo sapien
tgcctgtacaccccacgtacaaatg

SEQ ID NO: 2584652 - DNA, 25 bp, Homo sapien
cagggggtgttggctgccgccccta

SEQ ID NO: 2584653 - DNA, 25 bp, Homo sapien
tctttcctgttcctgcctgtacacc

SEQ ID NO: 2584654 - DNA, 25 bp, Homo sapien
tgttcctgcctgtacaccccacgta

SEQ ID NO: 2584655 - DNA, 25 bp, Homo sapien
ggaggcttcccgacagtggaggcag

SEQ ID NO: 2584656 - DNA, 25 bp, Homo sapien
agcggagggaactggcctctgcccc

SEQ ID NO: 2584657 - DNA, 25 bp, Homo sapien
cgaagaaagccttgcccagagataa

SEQ ID NO: 2584658 - DNA, 25 bp, Homo sapien
cagggcacgctagcgcagcttttcc

SEQ ID NO: 2584659 - DNA, 25 bp, Homo sapien
ggagtccagcccactcggctggtgt

SEQ ID NO: 2584660 - DNA, 25 bp, Homo sapien
cactcggctggtgttgcttttggat

SEQ ID NO: 2584661 - DNA, 25 bp, Homo sapien
gggcctgagataatgacttaattaa

SEQ ID NO: 2584662 - DNA, 25 bp, Homo sapien
cctgcgctgggcagttttgatcttc

SEQ ID NO: 2584663 - DNA, 25 bp, Homo sapien
ttcacacagtgatagtgggctcctg

SEQ ID NO: 2584664 - DNA, 25 bp, Homo sapien
ggtctagctagactctcggctttcg

SEQ ID NO: 2584665 - DNA, 25 bp, Homo sapien
tgggctcctgtgctattttcaactt

SEQ ID NO: 2584666 - DNA, 25 bp, Homo sapien
gtttggactggccacgtctctcgtg

SEQ ID NO: 2584667 - DNA, 25 bp, Homo sapien
cctgctttgtcgtgtcggcctggag

SEQ ID NO: 2584668 - DNA, 25 bp, Homo sapien
tgttctgtgaacaagccacgctggt

SEQ ID NO: 2584669 - DNA, 25 bp, Homo sapien
cctttggtcccaagggcaagcgatc

SEQ ID NO: 2584670 - DNA, 25 bp, Homo sapien
gagtgcctgacctagatgttctagc

SEQ ID NO: 2584671 - DNA, 25 bp, Homo sapien
tcctttctgccacgacaccttgtgt

SEQ ID NO: 2584672 - DNA, 25 bp, Homo sapien
tctgccacgacaccttgtgttcctg

SEQ ID NO: 2584673 - DNA, 25 bp, Homo sapien
gaggacctgggaccttaggcacatg

SEQ ID NO: 2584674 - DNA, 25 bp, Homo sapien
ccgaggacctgggaccttaggcaca

SEQ ID NO: 2584675 - DNA, 25 bp, Homo sapien
tgactgcacaggactggagatgccc

SEQ ID NO: 2584676 - DNA, 25 bp, Homo sapien
tctgactgcacaggactggagatgc

SEQ ID NO: 2584677 - DNA, 25 bp, Homo sapien
ttttctctgactgcacaggactgga

SEQ ID NO: 2584678 - DNA, 25 bp, Homo sapien
tctctgactgcacaggactggagat

SEQ ID NO: 2584679 - DNA, 25 bp, Homo sapien
cttggaactcggaattcacatccaa

SEQ ID NO: 2584680 - DNA, 25 bp, Homo sapien
tcggaattcacatccaacatgcagg

SEQ ID NO: 2584681 - DNA, 25 bp, Homo sapien
atgcaggaacttgggccttgagtct

SEQ ID NO: 2584682 - DNA, 25 bp, Homo sapien
cacatccaacatgcaggaacttggg

SEQ ID NO: 2584683 - DNA, 25 bp, Homo sapien
aaccatccacggtcacgagaggaac

SEQ ID NO: 2584684 - DNA, 25 bp, Homo sapien
tcaaaaccggatggaatgagggacc

SEQ ID NO: 2584685 - DNA, 25 bp, Homo sapien
atccacggtcacgagaggaacagag

SEQ ID NO: 2584686 - DNA, 25 bp, Homo sapien
atggaatgagggaccacaggctgct

SEQ ID NO: 2584687 - DNA, 25 bp, Homo sapien
atctacccatgtatcacctatccat

SEQ ID NO: 2584688 - DNA, 25 bp, Homo sapien
caatgaacagctgtatacccctcac

SEQ ID NO: 2584689 - DNA, 25 bp, Homo sapien
tatccatcaatccatcttctatcca

SEQ ID NO: 2584690 - DNA, 25 bp, Homo sapien
catcatgtatccatccctccattgt

SEQ ID NO: 2584691 - DNA, 25 bp, Homo sapien
actggtggctcctggtgccaaattg

SEQ ID NO: 2584692 - DNA, 25 bp, Homo sapien
caggttgacctgcaacttccggaag

SEQ ID NO: 2584693 - DNA, 25 bp, Homo sapien
tggtgccaaattgccgccaggttga

SEQ ID NO: 2584694 - DNA, 25 bp, Homo sapien
tccggaagctcagaaagtagcctgt

SEQ ID NO: 2584695 - DNA, 25 bp, Homo sapien
cctcagccgcaaactggagctcgat

SEQ ID NO: 2584696 - DNA, 25 bp, Homo sapien
cgtggacgtcaatgggtctcctcag

SEQ ID NO: 2584697 - DNA, 25 bp, Homo sapien
gtttaggacacctgcgcacgtcagg

SEQ ID NO: 2584698 - DNA, 25 bp, Homo sapien
ggagctcgatcttgcacctgcaggg

SEQ ID NO: 2584699 - DNA, 25 bp, Homo sapien
gcagcacgagcccagacttagccag

SEQ ID NO: 2584700 - DNA, 25 bp, Homo sapien
ccagtgagatgcagcttcgcagctc

SEQ ID NO: 2584701 - DNA, 25 bp, Homo sapien
cgagcccagacttagccagtgagat

SEQ ID NO: 2584702 - DNA, 25 bp, Homo sapien
cagtgagatgcagcttcgcagctct

SEQ ID NO: 2584703 - DNA, 25 bp, Homo sapien
tcctattacctaagccaagcgtctc

SEQ ID NO: 2584704 - DNA, 25 bp, Homo sapien
tggagctgctgtcgcgtatgacgtc

SEQ ID NO: 2584705 - DNA, 25 bp, Homo sapien
tactgcctgctcctactcttcaagg

SEQ ID NO: 2584706 - DNA, 25 bp, Homo sapien
cagaggacattcacggctgtggagc

SEQ ID NO: 2584707 - DNA, 25 bp, Homo sapien
tctcagaggctgctcatgggaacag

SEQ ID NO: 2584708 - DNA, 25 bp, Homo sapien
cacttgaaaaggagcctggcgatcc

SEQ ID NO: 2584709 - DNA, 25 bp, Homo sapien
taacttctccaccaagtgcagggag

SEQ ID NO: 2584710 - DNA, 25 bp, Homo sapien
cgttgtataatccacccatagggct

SEQ ID NO: 2584711 - DNA, 25 bp, Homo sapien
gaggccaggcagtttcctcccgggc

SEQ ID NO: 2584712 - DNA, 25 bp, Homo sapien
cccgggccccccggctgccacgctg

SEQ ID NO: 2584713 - DNA, 25 bp, Homo sapien
ttgaggccaggcagtttcctcccgg

SEQ ID NO: 2584714 - DNA, 25 bp, Homo sapien
tttgaggccaggcagtttcctcccg

SEQ ID NO: 2584715 - DNA, 25 bp, Homo sapien
ctggggtgagctcaggtggggccca

SEQ ID NO: 2584716 - DNA, 25 bp, Homo sapien
ttgctggagtccaggtggtggaggc

SEQ ID NO: 2584717 - DNA, 25 bp, Homo sapien
tatgatcatgtcaccgcactcccgg

SEQ ID NO: 2584718 - DNA, 25 bp, Homo sapien
tgatcatgtcaccgcactcccgggt

SEQ ID NO: 2584719 - DNA, 25 bp, Homo sapien
atcatgtcaccgcactcccgggtga

SEQ ID NO: 2584720 - DNA, 25 bp, Homo sapien
tagacatagctccttcgtcagacgc

SEQ ID NO: 2584721 - DNA, 25 bp, Homo sapien
tgtcttcttatcactgggctggagg

SEQ ID NO: 2584722 - DNA, 25 bp, Homo sapien
tcctgatgacggacgacgtgaagca

SEQ ID NO: 2584723 - DNA, 25 bp, Homo sapien
tgaaatgtctgctcaaaatctgccc

SEQ ID NO: 2584724 - DNA, 25 bp, Homo sapien
agttcacctgatgttgctcctgtcc

SEQ ID NO: 2584725 - DNA, 25 bp, Homo sapien
cccgaaagacaagcgaggtcattgc

SEQ ID NO: 2584726 - DNA, 25 bp, Homo sapien
cccctgctggcggttacgatgcgtg

SEQ ID NO: 2584727 - DNA, 25 bp, Homo sapien
aaatgtgtcttggatcccgcagtga

SEQ ID NO: 2584728 - DNA, 25 bp, Homo sapien
tggagggaggaacgtgtcgtggccc

SEQ ID NO: 2584729 - DNA, 25 bp, Homo sapien
cgtacatcagttccgtctcggccag

SEQ ID NO: 2584730 - DNA, 25 bp, Homo sapien
tcgtcccgaggacagtttgcagccc

SEQ ID NO: 2584731 - DNA, 25 bp, Homo sapien
ttgcagcccagggtgtgtgacgtac

SEQ ID NO: 2584732 - DNA, 25 bp, Homo sapien
ggctcgcccgctgaagtgtgttttc

SEQ ID NO: 2584733 - DNA, 25 bp, Homo sapien
tccattaaacgctggcacaggagct

SEQ ID NO: 2584734 - DNA, 25 bp, Homo sapien
tggcgccgacgtccgcgggaacggc

SEQ ID NO: 2584735 - DNA, 25 bp, Homo sapien
tttgccgggccccagacctcatgga

SEQ ID NO: 2584736 - DNA, 25 bp, Homo sapien
atggatgatccattaaacgctggca

SEQ ID NO: 2584737 - DNA, 25 bp, Homo sapien
atggcagctgcgtaggtcccgggac

SEQ ID NO: 2584738 - DNA, 25 bp, Homo sapien
ttccatggcagctgcgtaggtcccg

SEQ ID NO: 2584739 - DNA, 25 bp, Homo sapien
aggtcccgggacggacagtgcctgg

SEQ ID NO: 2584740 - DNA, 25 bp, Homo sapien
ggcagctgcgtaggtcccgggacgg

SEQ ID NO: 2584741 - DNA, 25 bp, Homo sapien
gtggttgctggcgcagccacaggca

SEQ ID NO: 2584742 - DNA, 25 bp, Homo sapien
accgtggttgctggcgcagccacag

SEQ ID NO: 2584743 - DNA, 25 bp, Homo sapien
taaccgtggttgctggcgcagccac

SEQ ID NO: 2584744 - DNA, 25 bp, Homo sapien
cgtggttgctggcgcagccacaggc

SEQ ID NO: 2584745 - DNA, 25 bp, Homo sapien
cctggttccccggaacctgcagaga

SEQ ID NO: 2584746 - DNA, 25 bp, Homo sapien
tggggcctgtgctcgccctggttcc

SEQ ID NO: 2584747 - DNA, 25 bp, Homo sapien
ctggggcctgtgctcgccctggttc

SEQ ID NO: 2584748 - DNA, 25 bp, Homo sapien
ctcccacacagatggccgggagtaa

SEQ ID NO: 2584749 - DNA, 25 bp, Homo sapien
gaggtgtctgccgtcgtctgggagg

SEQ ID NO: 2584750 - DNA, 25 bp, Homo sapien
aggccgagggaggtgtctgccgtcg

SEQ ID NO: 2584751 - DNA, 25 bp, Homo sapien
gaagggacgcgttccaggctctgca

SEQ ID NO: 2584752 - DNA, 25 bp, Homo sapien
ctggaagggacgcgttccaggctct

SEQ ID NO: 2584753 - DNA, 25 bp, Homo sapien
ccagaatgatgggtggtggctgcgt

SEQ ID NO: 2584754 - DNA, 25 bp, Homo sapien
tggctggacccggaggggcccactg

SEQ ID NO: 2584755 - DNA, 25 bp, Homo sapien
gtggtggctgcgtggggtatggtct

SEQ ID NO: 2584756 - DNA, 25 bp, Homo sapien
ccgtccatccagattccaagtctca

SEQ ID NO: 2584757 - DNA, 25 bp, Homo sapien
tctgagcacgagactctccctggga

SEQ ID NO: 2584758 - DNA, 25 bp, Homo sapien
tccaagagtgcgtgtggtccatgag

SEQ ID NO: 2584759 - DNA, 25 bp, Homo sapien
tcagctcttctgttggcgacggaaa

SEQ ID NO: 2584760 - DNA, 25 bp, Homo sapien
aatgcattgcttcatgagggactcc

SEQ ID NO: 2584761 - DNA, 25 bp, Homo sapien
tggagtggcaaggtcagtgccgcca

SEQ ID NO: 2584762 - DNA, 25 bp, Homo sapien
cacgcgagggccacacgttggagtg

SEQ ID NO: 2584763 - DNA, 25 bp, Homo sapien
gcatctcctgcgtctgcgtctgctg

SEQ ID NO: 2584764 - DNA, 25 bp, Homo sapien
ggggctgttttctccccggatgctg

SEQ ID NO: 2584765 - DNA, 25 bp, Homo sapien
cgctgggttccacagcggtgccttc

SEQ ID NO: 2584766 - DNA, 25 bp, Homo sapien
tgaagttgccaaccccacagccgtg

SEQ ID NO: 2584767 - DNA, 25 bp, Homo sapien
tcagactgaagttgccaaccccaca

SEQ ID NO: 2584768 - DNA, 25 bp, Homo sapien
gtgggcttcacctcacgactttggg

SEQ ID NO: 2584769 - DNA, 25 bp, Homo sapien
gctcccaggttatgttcccgcctaa

SEQ ID NO: 2584770 - DNA, 25 bp, Homo sapien
gcctaacttgtcgtgtctcgaggag

SEQ ID NO: 2584771 - DNA, 25 bp, Homo sapien
agagatcccttgtggagcctgaaac

SEQ ID NO: 2584772 - DNA, 25 bp, Homo sapien
gctgtgttctttgctggccgtgacc

SEQ ID NO: 2584773 - DNA, 25 bp, Homo sapien
aaagaattggtagcacccaggatgt

SEQ ID NO: 2584774 - DNA, 25 bp, Homo sapien
ccaggatgttgcttcgagggtctct

SEQ ID NO: 2584775 - DNA, 25 bp, Homo sapien
tgcgaaagtcgtttgcaagagaaac

SEQ ID NO: 2584776 - DNA, 25 bp, Homo sapien
cagggaatgaaggagacaacttcta

SEQ ID NO: 2584777 - DNA, 25 bp, Homo sapien
taccgatgggagaatgttcacaatc

SEQ ID NO: 2584778 - DNA, 25 bp, Homo sapien
catgtcatcaagattgctggttgta

SEQ ID NO: 2584779 - DNA, 25 bp, Homo sapien
cagcaaactgcgtctgtgcacagaa

SEQ ID NO: 2584780 - DNA, 25 bp, Homo sapien
ggagttcaaaatgcatgtatggcat

SEQ ID NO: 2584781 - DNA, 25 bp, Homo sapien
tgtgggcccgcaaaggtttccaaga

SEQ ID NO: 2584782 - DNA, 25 bp, Homo sapien
taataagagtgtgacgctggcaccg

SEQ ID NO: 2584783 - DNA, 25 bp, Homo sapien
gatttggaacattggacagccaggc

SEQ ID NO: 2584784 - DNA, 25 bp, Homo sapien
tccacagagaggttccgaatgcaca

SEQ ID NO: 2584785 - DNA, 25 bp, Homo sapien
tgccccctgttcatggggagttctg

SEQ ID NO: 2584786 - DNA, 25 bp, Homo sapien
catgtccatcgtggcccagcgtgtg

SEQ ID NO: 2584787 - DNA, 25 bp, Homo sapien
tctgtcatgtccatcgtggcccagc

SEQ ID NO: 2584788 - DNA, 25 bp, Homo sapien
tgtcatgtccatcgtggcccagcgt

SEQ ID NO: 2584789 - DNA, 25 bp, Homo sapien
agcacgtgagtggaacgtgagcctc

SEQ ID NO: 2584790 - DNA, 25 bp, Homo sapien
agcctcgagtcactggggtgcagcc

SEQ ID NO: 2584791 - DNA, 25 bp, Homo sapien
ggaacgtgagcctcgagtcactggg

SEQ ID NO: 2584792 - DNA, 25 bp, Homo sapien
gctgtggtagaagcacgtgagtgga

SEQ ID NO: 2584793 - DNA, 25 bp, Homo sapien
acagagagttggggactgtgttcct

SEQ ID NO: 2584794 - DNA, 25 bp, Homo sapien
agacctttttggtacacgaggctgg

SEQ ID NO: 2584795 - DNA, 25 bp, Homo sapien
cagacctttttggtacacgaggctg

SEQ ID NO: 2584796 - DNA, 25 bp, Homo sapien
ccagacctttttggtacacgaggct

SEQ ID NO: 2584797 - DNA, 25 bp, Homo sapien
cctttgtcggcgatgagctggtgac

SEQ ID NO: 2584798 - DNA, 25 bp, Homo sapien
cgtttgtgttcaggcctttgtcggc

SEQ ID NO: 2584799 - DNA, 25 bp, Homo sapien
cctggagacgtttgtgttcaggcct

SEQ ID NO: 2584800 - DNA, 25 bp, Homo sapien
gctggtgacattcgggcattaacat

SEQ ID NO: 2584801 - DNA, 25 bp, Homo sapien
gcagcttcacgtaaccttccagagt

SEQ ID NO: 2584802 - DNA, 25 bp, Homo sapien
tctgatgcagaagtgcgaagctgtg

SEQ ID NO: 2584803 - DNA, 25 bp, Homo sapien
gggcaacccacatgtgagacgattt

SEQ ID NO: 2584804 - DNA, 25 bp, Homo sapien
gagacgatttaaaatctgagccagc

SEQ ID NO: 2584805 - DNA, 25 bp, Homo sapien
ttctgcgtcagacccgggctgggca

SEQ ID NO: 2584806 - DNA, 25 bp, Homo sapien
ctagagcctgcaaggaacatgtggt

SEQ ID NO: 2584807 - DNA, 25 bp, Homo sapien
ccgggctgggcactagagcctgcaa

SEQ ID NO: 2584808 - DNA, 25 bp, Homo sapien
ctgaggagcttctgcgtcagacccg

SEQ ID NO: 2584809 - DNA, 25 bp, Homo sapien
tgggcctggtcgtggctttttcacc

SEQ ID NO: 2584810 - DNA, 25 bp, Homo sapien
ggccctcgtagtgggagctggacct

SEQ ID NO: 2584811 - DNA, 25 bp, Homo sapien
ggtgggcctggtcgtggctttttca

SEQ ID NO: 2584812 - DNA, 25 bp, Homo sapien
cgtgttggtcggtgggccctcgtag

SEQ ID NO: 2584813 - DNA, 25 bp, Homo sapien
gggcgaggacccactacaccagaca

SEQ ID NO: 2584814 - DNA, 25 bp, Homo sapien
gcgaggacccactacaccagacagg

SEQ ID NO: 2584815 - DNA, 25 bp, Homo sapien
ggacctggggcgaggacccactaca

SEQ ID NO: 2584816 - DNA, 25 bp, Homo sapien
gaggacccactacaccagacagggc

SEQ ID NO: 2584817 - DNA, 25 bp, Homo sapien
ggtcccccatctgcggtggtctgtg

SEQ ID NO: 2584818 - DNA, 25 bp, Homo sapien
aggaaggtcccccatctgcggtggt

SEQ ID NO: 2584819 - DNA, 25 bp, Homo sapien
ccccatctgcggtggtctgtggttg

SEQ ID NO: 2584820 - DNA, 25 bp, Homo sapien
cccatctgcggtggtctgtggttga

SEQ ID NO: 2584821 - DNA, 25 bp, Homo sapien
aggcctgcctagcttggatgagccc

SEQ ID NO: 2584822 - DNA, 25 bp, Homo sapien
caggacgcagctccggagagaccct

SEQ ID NO: 2584823 - DNA, 25 bp, Homo sapien
ctagcttggatgagccccgccggct

SEQ ID NO: 2584824 - DNA, 25 bp, Homo sapien
cccgccggctggcaggacgcagctc

SEQ ID NO: 2584825 - DNA, 25 bp, Homo sapien
gagccgctgtgcgatggctgccaca

SEQ ID NO: 2584826 - DNA, 25 bp, Homo sapien
ggaggccgacggaccctcagccaaa

SEQ ID NO: 2584827 - DNA, 25 bp, Homo sapien
ctgtgaagttgtagccgtcagcagg

SEQ ID NO: 2584828 - DNA, 25 bp, Homo sapien
tcagccaaagcggtgcgtggcactg

SEQ ID NO: 2584829 - DNA, 25 bp, Homo sapien
cttgtcctgaatgtgtctttgaaaa

SEQ ID NO: 2584830 - DNA, 25 bp, Homo sapien
atgccgcgggcatgactgggaacca

SEQ ID NO: 2584831 - DNA, 25 bp, Homo sapien
aaaacatcgatgccgcgggcatgac

SEQ ID NO: 2584832 - DNA, 25 bp, Homo sapien
ggcttttggcttcaagggtcagatc

SEQ ID NO: 2584833 - DNA, 25 bp, Homo sapien
aaagccgcagccccaacgtgtcagg

SEQ ID NO: 2584834 - DNA, 25 bp, Homo sapien
ccgcagccccaacgtgtcaggcaat

SEQ ID NO: 2584835 - DNA, 25 bp, Homo sapien
caatgtggtgacgtgggtagatcta

SEQ ID NO: 2584836 - DNA, 25 bp, Homo sapien
tgtcaggcaatgtggtgacgtgggt

SEQ ID NO: 2584837 - DNA, 25 bp, Homo sapien
ccttgaatatctgctgaggaccacg

SEQ ID NO: 2584838 - DNA, 25 bp, Homo sapien
gaggaccacgaacagcgagctccca

SEQ ID NO: 2584839 - DNA, 25 bp, Homo sapien
ctgaggaccacgaacagcgagctcc

SEQ ID NO: 2584840 - DNA, 25 bp, Homo sapien
gtctgccttgaatatctgctgagga

SEQ ID NO: 2584841 - DNA, 25 bp, Homo sapien
cgaggtggaatgctgcagccacaca

SEQ ID NO: 2584842 - DNA, 25 bp, Homo sapien
gggtcagtgcccacatgacgctgtg

SEQ ID NO: 2584843 - DNA, 25 bp, Homo sapien
accacagagcgaggtggaatgctgc

SEQ ID NO: 2584844 - DNA, 25 bp, Homo sapien
gcaagaacccatttgtggacactgt

SEQ ID NO: 2584845 - DNA, 25 bp, Homo sapien
tgtagattccggttcacatcgctga

SEQ ID NO: 2584846 - DNA, 25 bp, Homo sapien
gagccttcaatatgagatgtccagg

SEQ ID NO: 2584847 - DNA, 25 bp, Homo sapien
tacatccctggcatttgagccacgc

SEQ ID NO: 2584848 - DNA, 25 bp, Homo sapien
tgttgtctcgtggagtcactcagcc

SEQ ID NO: 2584849 - DNA, 25 bp, Homo sapien
ttgctttctgccaagtacccaccat

SEQ ID NO: 2584850 - DNA, 25 bp, Homo sapien
caccgcaggcccgtcttcagcacaa

SEQ ID NO: 2584851 - DNA, 25 bp, Homo sapien
taaccagatcaaaatcatctgtcct

SEQ ID NO: 2584852 - DNA, 25 bp, Homo sapien
cagcacaaccaaagtcccattttcc

SEQ ID NO: 2584853 - DNA, 25 bp, Homo sapien
atttccagatgaaatcggcattctg

SEQ ID NO: 2584854 - DNA, 25 bp, Homo sapien
aaatcggcattctgggtgaatgctg

SEQ ID NO: 2584855 - DNA, 25 bp, Homo sapien
tgagacctcagaagctctgcacatt

SEQ ID NO: 2584856 - DNA, 25 bp, Homo sapien
gagacctcagaagctctgcacattt

SEQ ID NO: 2584857 - DNA, 25 bp, Homo sapien
ttcacgccctccgcgaagtcagcac

SEQ ID NO: 2584858 - DNA, 25 bp, Homo sapien
cacgccctccgcgaagtcagcacag

SEQ ID NO: 2584859 - DNA, 25 bp, Homo sapien
cgccctccgcgaagtcagcacaggc

SEQ ID NO: 2584860 - DNA, 25 bp, Homo sapien
acgccctccgcgaagtcagcacagg

SEQ ID NO: 2584861 - DNA, 25 bp, Homo sapien
agcagcgtccgcatcccgagctcag

SEQ ID NO: 2584862 - DNA, 25 bp, Homo sapien
cagcagcgtccgcatcccgagctca

SEQ ID NO: 2584863 - DNA, 25 bp, Homo sapien
cagcgtccgcatcccgagctcagcg

SEQ ID NO: 2584864 - DNA, 25 bp, Homo sapien
gcgtccgcatcccgagctcagcgtg

SEQ ID NO: 2584865 - DNA, 25 bp, Homo sapien
tagtagagcatcacatgacggccag

SEQ ID NO: 2584866 - DNA, 25 bp, Homo sapien
gcaaattcccaccagactctagtag

SEQ ID NO: 2584867 - DNA, 25 bp, Homo sapien
cctgcggttacctgatgctcttaga

SEQ ID NO: 2584868 - DNA, 25 bp, Homo sapien
taatcacgggctttgctgaacaccc

SEQ ID NO: 2584869 - DNA, 25 bp, Homo sapien
tcgtgacttgttccctggaacctgg

SEQ ID NO: 2584870 - DNA, 25 bp, Homo sapien
caccaccggcatgttgacagttgcg

SEQ ID NO: 2584871 - DNA, 25 bp, Homo sapien
ttttcataagcaccaccggcatgtt

SEQ ID NO: 2584872 - DNA, 25 bp, Homo sapien
tgacagttgcgtggagttcagagtc

SEQ ID NO: 2584873 - DNA, 25 bp, Homo sapien
attccagactggagactggcggcgc

SEQ ID NO: 2584874 - DNA, 25 bp, Homo sapien
tgactggcggttctgcggcttcaca

SEQ ID NO: 2584875 - DNA, 25 bp, Homo sapien
cccaatggggcgtcgcagctgctga

SEQ ID NO: 2584876 - DNA, 25 bp, Homo sapien
tggcggcgcccgttgaaacttgact

SEQ ID NO: 2584877 - DNA, 25 bp, Homo sapien
ctcagctggacccttagacgggaaa

SEQ ID NO: 2584878 - DNA, 25 bp, Homo sapien
aatcttagcgacttttctagggtga

SEQ ID NO: 2584879 - DNA, 25 bp, Homo sapien
gtgaagcaaagctgtgcggctccgt

SEQ ID NO: 2584880 - DNA, 25 bp, Homo sapien
tcacttcgagatgcagagtcacgag

SEQ ID NO: 2584881 - DNA, 25 bp, Homo sapien
gcttttctgagcgtgcctggcctct

SEQ ID NO: 2584882 - DNA, 25 bp, Homo sapien
gtcagcgtggtgcttctcacatgga

SEQ ID NO: 2584883 - DNA, 25 bp, Homo sapien
gcttcccgaaggcaggtgacatcgg

SEQ ID NO: 2584884 - DNA, 25 bp, Homo sapien
tgacatcggccgcaggccaggtcag

SEQ ID NO: 2584885 - DNA, 25 bp, Homo sapien
aacatggtacattctcaaccagccc

SEQ ID NO: 2584886 - DNA, 25 bp, Homo sapien
gccaacatggtacattctcaaccag

SEQ ID NO: 2584887 - DNA, 25 bp, Homo sapien
agagagaggccaacatggtacattc

SEQ ID NO: 2584888 - DNA, 25 bp, Homo sapien
gaggccaacatggtacattctcaac

SEQ ID NO: 2584889 - DNA, 25 bp, Homo sapien
agggtgacccaacagtgcagcgctg

SEQ ID NO: 2584890 - DNA, 25 bp, Homo sapien
ggtcctgtggaggacgcattgtcca

SEQ ID NO: 2584891 - DNA, 25 bp, Homo sapien
cattgtccacggttgcactgcaagg

SEQ ID NO: 2584892 - DNA, 25 bp, Homo sapien
aaagccattgttgtccaaggttgcc

SEQ ID NO: 2584893 - DNA, 25 bp, Homo sapien
gcaagcatttgatgtgtgagtggct

SEQ ID NO: 2584894 - DNA, 25 bp, Homo sapien
agcatttgatgtgtgagtggctgct

SEQ ID NO: 2584895 - DNA, 25 bp, Homo sapien
tgatgtgtgagtggctgctggaaag

SEQ ID NO: 2584896 - DNA, 25 bp, Homo sapien
ctgagggcaagcatttgatgtgtga

SEQ ID NO: 2584897 - DNA, 25 bp, Homo sapien
ttgaatgagcccgtccgtgaatgat

SEQ ID NO: 2584898 - DNA, 25 bp, Homo sapien
gtggaataaacttcccactgtggcc

SEQ ID NO: 2584899 - DNA, 25 bp, Homo sapien
tggaataaacttcccactgtggcca

SEQ ID NO: 2584900 - DNA, 25 bp, Homo sapien
tgtggccactgtgactcggagtcat

SEQ ID NO: 2584901 - DNA, 25 bp, Homo sapien
actgtggccactgtgactcggagtc

SEQ ID NO: 2584902 - DNA, 25 bp, Homo sapien
ccgcacaggtgacgcaggcttcaga

SEQ ID NO: 2584903 - DNA, 25 bp, Homo sapien
ggcataaccgggctccatcccaatg

SEQ ID NO: 2584904 - DNA, 25 bp, Homo sapien
agtgatcgagggcataaccgggctc

SEQ ID NO: 2584905 - DNA, 25 bp, Homo sapien
catcccaatgctgcctcatccctgc

SEQ ID NO: 2584906 - DNA, 25 bp, Homo sapien
gggccgctgtgaggatcccgtgagc

SEQ ID NO: 2584907 - DNA, 25 bp, Homo sapien
ggccgctgtgaggatcccgtgagca

SEQ ID NO: 2584908 - DNA, 25 bp, Homo sapien
ggggccgctgtgaggatcccgtgag

SEQ ID NO: 2584909 - DNA, 25 bp, Homo sapien
gggccgctgtgaggatcccgtgagc

SEQ ID NO: 2584910 - DNA, 25 bp, Homo sapien
ggccgctgtgaggatcccgtgagca

SEQ ID NO: 2584911 - DNA, 25 bp, Homo sapien
ggggccgctgtgaggatcccgtgag

SEQ ID NO: 2584912 - DNA, 25 bp, Homo sapien
ctccttctgggctgccggatttcct

SEQ ID NO: 2584913 - DNA, 25 bp, Homo sapien
ctgggctgccggatttcctgtgggt

SEQ ID NO: 2584914 - DNA, 25 bp, Homo sapien
tccttctgggctgccggatttcctg

SEQ ID NO: 2584915 - DNA, 25 bp, Homo sapien
ttctcctgggctgccgaatttcctg

SEQ ID NO: 2584916 - DNA, 25 bp, Homo sapien
agggtgagaccacccaaggcatctc

SEQ ID NO: 2584917 - DNA, 25 bp, Homo sapien
ggtgagatcagagagctcagtaaaa

SEQ ID NO: 2584918 - DNA, 25 bp, Homo sapien
tgaccaccagtgaattttcccttca

SEQ ID NO: 2584919 - DNA, 25 bp, Homo sapien
tgcaggcaatgaagatgtcgctgga

SEQ ID NO: 2584920 - DNA, 25 bp, Homo sapien
atttcttaaatgtcttttatatcac

SEQ ID NO: 2584921 - DNA, 25 bp, Homo sapien
atttcccgatatttcttaaatgtct

SEQ ID NO: 2584922 - DNA, 25 bp, Homo sapien
ttcttaaatgtcttttatatcacac

SEQ ID NO: 2584923 - DNA, 25 bp, Homo sapien
attatttcccgatatttcttaaatg

SEQ ID NO: 2584924 - DNA, 25 bp, Homo sapien
ctgctggtctgtgatccccgctgac

SEQ ID NO: 2584925 - DNA, 25 bp, Homo sapien
aagttttgatgctggtgtggctcct

SEQ ID NO: 2584926 - DNA, 25 bp, Homo sapien
tgcttcaccttgcagtaggcacctg

SEQ ID NO: 2584927 - DNA, 25 bp, Homo sapien
gctccaagatgacatcccagtatct

SEQ ID NO: 2584928 - DNA, 25 bp, Homo sapien
caccttgcagtaggcacctgtctct

SEQ ID NO: 2584929 - DNA, 25 bp, Homo sapien
agcagggttgggcaaaggaagaatc

SEQ ID NO: 2584930 - DNA, 25 bp, Homo sapien
tatccttagtgatcaggaaaatgca

SEQ ID NO: 2584931 - DNA, 25 bp, Homo sapien
cacagagataacattttactgtcat

SEQ ID NO: 2584932 - DNA, 25 bp, Homo sapien
ctgatggcaccaagcaaaggggcag

SEQ ID NO: 2584933 - DNA, 25 bp, Homo sapien
caacaaatatatgcagaggccgaat

SEQ ID NO: 2584934 - DNA, 25 bp, Homo sapien
gaggctgagccccagtttgcatgcc

SEQ ID NO: 2584935 - DNA, 25 bp, Homo sapien
ggcgctgcatgtgggaagatggagg

SEQ ID NO: 2584936 - DNA, 25 bp, Homo sapien
atggaggctgagccccagtttgcat

SEQ ID NO: 2584937 - DNA, 25 bp, Homo sapien
ggctgagccccagtttgcatgccat

SEQ ID NO: 2584938 - DNA, 25 bp, Homo sapien
tgtgggtcgagcatctgcaagttct

SEQ ID NO: 2584939 - DNA, 25 bp, Homo sapien
tgtgcacgtggtgaatatcatgacc

SEQ ID NO: 2584940 - DNA, 25 bp, Homo sapien
tgcaagttctgacgcaggagccctc

SEQ ID NO: 2584941 - DNA, 25 bp, Homo sapien
tcctcgggggccgtgagaacagatt

SEQ ID NO: 2584942 - DNA, 25 bp, Homo sapien
tgtgcgctgtgttccctgcaaggac

SEQ ID NO: 2584943 - DNA, 25 bp, Homo sapien
ctgcaaggacttcccggtgatcccg

SEQ ID NO: 2584944 - DNA, 25 bp, Homo sapien
gtgatcccggccacatgtgcagggc

SEQ ID NO: 2584945 - DNA, 25 bp, Homo sapien
tcaatagccagtgtgcgctgtgttc

SEQ ID NO: 2584946 - DNA, 25 bp, Homo sapien
aaacgaggggcctcgtactgaggat

SEQ ID NO: 2584947 - DNA, 25 bp, Homo sapien
tgaggatgtgagtgaatggctgact

SEQ ID NO: 2584948 - DNA, 25 bp, Homo sapien
ggatgtgagtgaatggctgactctc

SEQ ID NO: 2584949 - DNA, 25 bp, Homo sapien
gaaacgaggggcctcgtactgagga

SEQ ID NO: 2584950 - DNA, 25 bp, Homo sapien
gcccggcatctcacaggtcaagaga

SEQ ID NO: 2584951 - DNA, 25 bp, Homo sapien
tctgtgtgacatagtaagcccggca

SEQ ID NO: 2584952 - DNA, 25 bp, Homo sapien
ccttggaagcccctagacactgagg

SEQ ID NO: 2584953 - DNA, 25 bp, Homo sapien
aatcagagccgaaactccatccagg

SEQ ID NO: 2584954 - DNA, 25 bp, Homo sapien
agcatggccttacgggccagtcctt

SEQ ID NO: 2584955 - DNA, 25 bp, Homo sapien
gctcagcatggccttacgggccagt

SEQ ID NO: 2584956 - DNA, 25 bp, Homo sapien
ggccacatgcgggccacgaaggcca

SEQ ID NO: 2584957 - DNA, 25 bp, Homo sapien
gaagcacaagagagtgcgccgagca

SEQ ID NO: 2584958 - DNA, 25 bp, Homo sapien
gccagagggcagcattcacattcag

SEQ ID NO: 2584959 - DNA, 25 bp, Homo sapien
cagagggcagcattcacattcagct

SEQ ID NO: 2584960 - DNA, 25 bp, Homo sapien
ccagagggcagcattcacattcagc

SEQ ID NO: 2584961 - DNA, 25 bp, Homo sapien
ggccagagggcagcattcacattca

SEQ ID NO: 2584962 - DNA, 25 bp, Homo sapien
gaacacaaacatgtacgagagcatc

SEQ ID NO: 2584963 - DNA, 25 bp, Homo sapien
aatgtgtggtagaaggttagggtca

SEQ ID NO: 2584964 - DNA, 25 bp, Homo sapien
caaacatgtacgagagcatcctcca

SEQ ID NO: 2584965 - DNA, 25 bp, Homo sapien
gcccatgaacacaaacatgtacgag

SEQ ID NO: 2584966 - DNA, 25 bp, Homo sapien
ctccagtgtagacctgaacaccatc

SEQ ID NO: 2584967 - DNA, 25 bp, Homo sapien
tccagtgtagacctgaacaccatca

SEQ ID NO: 2584968 - DNA, 25 bp, Homo sapien
cctccagtgtagacctgaacaccat

SEQ ID NO: 2584969 - DNA, 25 bp, Homo sapien
agctaggttcatctctcgccacagg

SEQ ID NO: 2584970 - DNA, 25 bp, Homo sapien
tctgttgggtaatctgagcctgatc

SEQ ID NO: 2584971 - DNA, 25 bp, Homo sapien
gccacagggcttccttcgaggcatg

SEQ ID NO: 2584972 - DNA, 25 bp, Homo sapien
ctgatcagtgaacatctggcggaag

SEQ ID NO: 2584973 - DNA, 25 bp, Homo sapien
gggtcctgcccaaggtcttaggtgc

SEQ ID NO: 2584974 - DNA, 25 bp, Homo sapien
gtcctgcccaaggtcttaggtgccc

SEQ ID NO: 2584975 - DNA, 25 bp, Homo sapien
ggtcctgcccaaggtcttaggtgcc

SEQ ID NO: 2584976 - DNA, 25 bp, Homo sapien
ctgcggttggcagagatcatcctgc

SEQ ID NO: 2584977 - DNA, 25 bp, Homo sapien
tcatccccgtgtgggacgggacagg

SEQ ID NO: 2584978 - DNA, 25 bp, Homo sapien
cccagggctgggttactcgattctg

SEQ ID NO: 2584979 - DNA, 25 bp, Homo sapien
gggacaggaccaggacaatccccag

SEQ ID NO: 2584980 - DNA, 25 bp, Homo sapien
gaacacgtgatgtgagctctcacag

SEQ ID NO: 2584981 - DNA, 25 bp, Homo sapien
gctctcacagaggtctgagcagaat

SEQ ID NO: 2584982 - DNA, 25 bp, Homo sapien
taacgaactcgtgcaagacatcatc

SEQ ID NO: 2584983 - DNA, 25 bp, Homo sapien
agacatcatcttgggaacacgtgat

SEQ ID NO: 2584984 - DNA, 25 bp, Homo sapien
taggagcagtggatgacgatgtgat

SEQ ID NO: 2584985 - DNA, 25 bp, Homo sapien
cctcctggtttgtgtaggagcagtg

SEQ ID NO: 2584986 - DNA, 25 bp, Homo sapien
cagtggatgacgatgtgatgatttc

SEQ ID NO: 2584987 - DNA, 25 bp, Homo sapien
agacctcctggtttgtgtaggagca

SEQ ID NO: 2584988 - DNA, 25 bp, Homo sapien
ccaccatggcggctgtctccccacc

SEQ ID NO: 2584989 - DNA, 25 bp, Homo sapien
gcagctggtgattcagcctctccct

SEQ ID NO: 2584990 - DNA, 25 bp, Homo sapien
aagcagccgtggccctaaagcaagt

SEQ ID NO: 2584991 - DNA, 25 bp, Homo sapien
gaagcagccgtggccctaaagcaag

SEQ ID NO: 2584992 - DNA, 25 bp, Homo sapien
gcagccgtggccctaaagcaagtgc

SEQ ID NO: 2584993 - DNA, 25 bp, Homo sapien
agccgtggccctaaagcaagtgctg

SEQ ID NO: 2584994 - DNA, 25 bp, Homo sapien
cctcagggacttgcgggaaaatatt

SEQ ID NO: 2584995 - DNA, 25 bp, Homo sapien
taaagcgagttcttcaggctggtgg

SEQ ID NO: 2584996 - DNA, 25 bp, Homo sapien
taaatgggcctatgtgatggaaaac

SEQ ID NO: 2584997 - DNA, 25 bp, Homo sapien
taaagatgatacgtacaacaaccag

SEQ ID NO: 2584998 - DNA, 25 bp, Homo sapien
cactcacctgtccagctttcttgtt

SEQ ID NO: 2584999 - DNA, 25 bp, Homo sapien
cacactcacctgtccagctttcttg

SEQ ID NO: 2585000 - DNA, 25 bp, Homo sapien
acactcacctgtccagctttcttgt

SEQ ID NO: 2585001 - DNA, 25 bp, Homo sapien
aggcactacacaggtcaccagccct

SEQ ID NO: 2585002 - DNA, 25 bp, Homo sapien
accagccctgccgagcacattcccc

SEQ ID NO: 2585003 - DNA, 25 bp, Homo sapien
ccagccctgccgagcacattcccca

SEQ ID NO: 2585004 - DNA, 25 bp, Homo sapien
cagccctgccgagcacattccccag

SEQ ID NO: 2585005 - DNA, 25 bp, Homo sapien
cacttcaacatccagagtagttggg

SEQ ID NO: 2585006 - DNA, 25 bp, Homo sapien
cacaccgccacacctggtacttaaa

SEQ ID NO: 2585007 - DNA, 25 bp, Homo sapien
ctcccacttcaacatccagagtagt

SEQ ID NO: 2585008 - DNA, 25 bp, Homo sapien
ggtgcacaccgccacacctggtact

SEQ ID NO: 2585009 - DNA, 25 bp, Homo sapien
gctgcattcactgcgcaacgtccgt

SEQ ID NO: 2585010 - DNA, 25 bp, Homo sapien
ttcctgggtgcggttcctgagcctt

SEQ ID NO: 2585011 - DNA, 25 bp, Homo sapien
tctgcatggcgaagagaccaacaca

SEQ ID NO: 2585012 - DNA, 25 bp, Homo sapien
gatgctttgttaagctgctctggcc

SEQ ID NO: 2585013 - DNA, 25 bp, Homo sapien
gaaactgcatgtgattgtggctgat

SEQ ID NO: 2585014 - DNA, 25 bp, Homo sapien
catggagcacgcagcacatagtagg

SEQ ID NO: 2585015 - DNA, 25 bp, Homo sapien
taggagcccaagaaccgtgaacagt

SEQ ID NO: 2585016 - DNA, 25 bp, Homo sapien
gctgatgggagaggccactcatcct

SEQ ID NO: 2585017 - DNA, 25 bp, Homo sapien
tctttgtagcgacgaggtgtcacta

SEQ ID NO: 2585018 - DNA, 25 bp, Homo sapien
cgacgaggtgtcactatttggccca

SEQ ID NO: 2585019 - DNA, 25 bp, Homo sapien
tatttctttgtagcgacgaggtgtc

SEQ ID NO: 2585020 - DNA, 25 bp, Homo sapien
ttttaatatttctttgtagcgacga

SEQ ID NO: 2585021 - DNA, 25 bp, Homo sapien
cgcggaccggaagtgctgccgtaat

SEQ ID NO: 2585022 - DNA, 25 bp, Homo sapien
taatctgcgctgagagtcgcgaaag

SEQ ID NO: 2585023 - DNA, 25 bp, Homo sapien
tgagagtcgcgaaagcgctgttccc

SEQ ID NO: 2585024 - DNA, 25 bp, Homo sapien
tgttccccttagtgaccggcgacgc

SEQ ID NO: 2585025 - DNA, 25 bp, Homo sapien
tgcagtagcggccccgtcgtaggat

SEQ ID NO: 2585026 - DNA, 25 bp, Homo sapien
agtagcggccccgtcgtaggatgct

SEQ ID NO: 2585027 - DNA, 25 bp, Homo sapien
cggccccgtcgtaggatgctgagca

SEQ ID NO: 2585028 - DNA, 25 bp, Homo sapien
ctgtgcagtagcggccccgtcgtag

SEQ ID NO: 2585029 - DNA, 25 bp, Homo sapien
gtgcaaaccctgcaggtggatgcat

SEQ ID NO: 2585030 - DNA, 25 bp, Homo sapien
cctgcaggtggatgcatctgcaaag

SEQ ID NO: 2585031 - DNA, 25 bp, Homo sapien
aaaccctgcaggtggatgcatctgc

SEQ ID NO: 2585032 - DNA, 25 bp, Homo sapien
cagcaggtgtgcaaaccctgcaggt

SEQ ID NO: 2585033 - DNA, 25 bp, Homo sapien
catgagtcagagaaacggcaaagcc

SEQ ID NO: 2585034 - DNA, 25 bp, Homo sapien
tggtgagcccacgtttcctgagagc

SEQ ID NO: 2585035 - DNA, 25 bp, Homo sapien
atagtatttcgggaagccacccctg

SEQ ID NO: 2585036 - DNA, 25 bp, Homo sapien
ggcgccgagcgttctgtattccatg

SEQ ID NO: 2585037 - DNA, 25 bp, Homo sapien
ctgtgattcccaggcgagcaacggg

SEQ ID NO: 2585038 - DNA, 25 bp, Homo sapien
cagtcatggttttgtagtccttggg

SEQ ID NO: 2585039 - DNA, 25 bp, Homo sapien
tggttttgtagtccttgggaatcac

SEQ ID NO: 2585040 - DNA, 25 bp, Homo sapien
cagcgcagtcatggttttgtagtcc

SEQ ID NO: 2585041 - DNA, 25 bp, Homo sapien
ccttggccagcgcagtcatggtttt

SEQ ID NO: 2585042 - DNA, 25 bp, Homo sapien
ttcctgacgtaggacacggcgtcct

SEQ ID NO: 2585043 - DNA, 25 bp, Homo sapien
gggtgggcgacacctcctcatcatg

SEQ ID NO: 2585044 - DNA, 25 bp, Homo sapien
gtgagtttgacttttgccgcgccaa

SEQ ID NO: 2585045 - DNA, 25 bp, Homo sapien
tcatcatgggagtccgactgtgagt

SEQ ID NO: 2585046 - DNA, 25 bp, Homo sapien
cacagacaagtgcttcgaccactgt

SEQ ID NO: 2585047 - DNA, 25 bp, Homo sapien
agacaagtgcttcgaccactgtccc

SEQ ID NO: 2585048 - DNA, 25 bp, Homo sapien
ccacagacaagtgcttcgaccactg

SEQ ID NO: 2585049 - DNA, 25 bp, Homo sapien
tgcccacagacaagtgcttcgacca

SEQ ID NO: 2585050 - DNA, 25 bp, Homo sapien
acctgagtgttcaccttggtcactc

SEQ ID NO: 2585051 - DNA, 25 bp, Homo sapien
ctgagtgttcaccttggtcactcat

SEQ ID NO: 2585052 - DNA, 25 bp, Homo sapien
atgacctgagtgttcaccttggtca

SEQ ID NO: 2585053 - DNA, 25 bp, Homo sapien
gacctgagtgttcaccttggtcact

SEQ ID NO: 2585054 - DNA, 25 bp, Homo sapien
gatgcagacaccacgtgaatgccaa

SEQ ID NO: 2585055 - DNA, 25 bp, Homo sapien
cacctgtgacaaggctgagaccacg

SEQ ID NO: 2585056 - DNA, 25 bp, Homo sapien
aggcagggccttgcgtcatggacca

SEQ ID NO: 2585057 - DNA, 25 bp, Homo sapien
gagcttcccgaaaaaagatggcggc

SEQ ID NO: 2585058 - DNA, 25 bp, Homo sapien
attaccatctgccatgagttggatg

SEQ ID NO: 2585059 - DNA, 25 bp, Homo sapien
tctagctctaaaatacacttgttaa

SEQ ID NO: 2585060 - DNA, 25 bp, Homo sapien
ggagccagtcctatttcatttcacc

SEQ ID NO: 2585061 - DNA, 25 bp, Homo sapien
tgttgggaggtccatgaatgtaacc

SEQ ID NO: 2585062 - DNA, 25 bp, Homo sapien
acacgacacgtacgcttaagggcag

SEQ ID NO: 2585063 - DNA, 25 bp, Homo sapien
tcatcattggagaaaacacgacacg

SEQ ID NO: 2585064 - DNA, 25 bp, Homo sapien
caacgtctgaggaagcgtacgggat

SEQ ID NO: 2585065 - DNA, 25 bp, Homo sapien
gtgagtaactcagcccatcgttccg

SEQ ID NO: 2585066 - DNA, 25 bp, Homo sapien
tcccttccaattaggactcctctta

SEQ ID NO: 2585067 - DNA, 25 bp, Homo sapien
tctgtgtattctatgctggtttcca

SEQ ID NO: 2585068 - DNA, 25 bp, Homo sapien
taagttgagcttgcaccaaccctgc

SEQ ID NO: 2585069 - DNA, 25 bp, Homo sapien
caaccctgctgaacactcataagaa

SEQ ID NO: 2585070 - DNA, 25 bp, Homo sapien
gttcagccagttctcagagccgagg

SEQ ID NO: 2585071 - DNA, 25 bp, Homo sapien
aacaggttcagccagttctcagagc

SEQ ID NO: 2585072 - DNA, 25 bp, Homo sapien
tgctgaagcaaacaggttcagccag

SEQ ID NO: 2585073 - DNA, 25 bp, Homo sapien
gaagcaaacaggttcagccagttct

SEQ ID NO: 2585074 - DNA, 25 bp, Homo sapien
gagttggcaaagcccacggccttgt

SEQ ID NO: 2585075 - DNA, 25 bp, Homo sapien
ccgggtagagttggcaaagcccacg

SEQ ID NO: 2585076 - DNA, 25 bp, Homo sapien
tggcaaagcccacggccttgtccat

SEQ ID NO: 2585077 - DNA, 25 bp, Homo sapien
gttggcaaagcccacggccttgtcc

SEQ ID NO: 2585078 - DNA, 25 bp, Homo sapien
aatcagctgcagatgtttgggagcc

SEQ ID NO: 2585079 - DNA, 25 bp, Homo sapien
tagttcatgaaccagctgcgcacgt

SEQ ID NO: 2585080 - DNA, 25 bp, Homo sapien
tttgggagccctctcgatgaacaga

SEQ ID NO: 2585081 - DNA, 25 bp, Homo sapien
ttggtgggcacctaagcaggatgca

SEQ ID NO: 2585082 - DNA, 25 bp, Homo sapien
cactgtgtggctggcacggcctgca

SEQ ID NO: 2585083 - DNA, 25 bp, Homo sapien
actgtgtggctggcacggcctgcac

SEQ ID NO: 2585084 - DNA, 25 bp, Homo sapien
tcactgtgtggctggcacggcctgc

SEQ ID NO: 2585085 - DNA, 25 bp, Homo sapien
tgcttgtggatgacggcctccgtct

SEQ ID NO: 2585086 - DNA, 25 bp, Homo sapien
agatctgggaacagcccgctgccct

SEQ ID NO: 2585087 - DNA, 25 bp, Homo sapien
tggccgagcggtgcttgtggatgac

SEQ ID NO: 2585088 - DNA, 25 bp, Homo sapien
caggagatctgggaacagcccgctg

SEQ ID NO: 2585089 - DNA, 25 bp, Homo sapien
tcgtgcaaattggctttgtagtgaa

SEQ ID NO: 2585090 - DNA, 25 bp, Homo sapien
cgagtgatccgactcacaatgtggg

SEQ ID NO: 2585091 - DNA, 25 bp, Homo sapien
aatgtggggacgaatgacctgacgc

SEQ ID NO: 2585092 - DNA, 25 bp, Homo sapien
acgagtgatccgactcacaatgtgg

SEQ ID NO: 2585093 - DNA, 25 bp, Homo sapien
tcacaatgtggggacgaatgacctg

SEQ ID NO: 2585094 - DNA, 25 bp, Homo sapien
acacgagcgacctgatgcagcggat

SEQ ID NO: 2585095 - DNA, 25 bp, Homo sapien
ggtgcacagtagtcataacgtggat

SEQ ID NO: 2585096 - DNA, 25 bp, Homo sapien
acgtgcacggcagtcccagtgtgga

SEQ ID NO: 2585097 - DNA, 25 bp, Homo sapien
taacgtggatataagtaagctgaca

SEQ ID NO: 2585098 - DNA, 25 bp, Homo sapien
cagtcagaatgtggatacgaatgac

SEQ ID NO: 2585099 - DNA, 25 bp, Homo sapien
cggcagtcagaatgtggatacgaat

SEQ ID NO: 2585100 - DNA, 25 bp, Homo sapien
tggacggcagtcagaatgtggatac

SEQ ID NO: 2585101 - DNA, 25 bp, Homo sapien
gacggcagtcagaatgtggatacga

SEQ ID NO: 2585102 - DNA, 25 bp, Homo sapien
aatcaggaaggcaaacgtgtcaggg

SEQ ID NO: 2585103 - DNA, 25 bp, Homo sapien
atgaaaatcaggaaggcaaacgtgt

SEQ ID NO: 2585104 - DNA, 25 bp, Homo sapien
gccagaaagggttgggcgtgtctag

SEQ ID NO: 2585105 - DNA, 25 bp, Homo sapien
gaaaatcaggaaggcaaacgtgtca

SEQ ID NO: 2585106 - DNA, 25 bp, Homo sapien
cggccacgccaggaagatcgagttt

SEQ ID NO: 2585107 - DNA, 25 bp, Homo sapien
ggccacgccaggaagatccgagttt

SEQ ID NO: 2585108 - DNA, 25 bp, Homo sapien
gatgcgagtttctgacgccgcgtga

SEQ ID NO: 2585109 - DNA, 25 bp, Homo sapien
gccacgccaggaagatcgagtttct

SEQ ID NO: 2585110 - DNA, 25 bp, Homo sapien
gaggcggccacaccaggaagatccg

SEQ ID NO: 2585111 - DNA, 25 bp, Homo sapien
aggcggccacaccaggaagatccga

SEQ ID NO: 2585112 - DNA, 25 bp, Homo sapien
ctgcgcgacgggaggcggccacacc

SEQ ID NO: 2585113 - DNA, 25 bp, Homo sapien
cggccacaccaggaagatccgacat

SEQ ID NO: 2585114 - DNA, 25 bp, Homo sapien
cgcataaccggatgtagccacgccg

SEQ ID NO: 2585115 - DNA, 25 bp, Homo sapien
agccacgccgggaaaccggacgcag

SEQ ID NO: 2585116 - DNA, 25 bp, Homo sapien
taaccggatgtagccacgccgggaa

SEQ ID NO: 2585117 - DNA, 25 bp, Homo sapien
cggatgtagccacgccgggaaaccg

SEQ ID NO: 2585118 - DNA, 25 bp, Homo sapien
catgccttatatacacctatgtgta

SEQ ID NO: 2585119 - DNA, 25 bp, Homo sapien
aaagtgtaagtgtttgaagtgacgg

SEQ ID NO: 2585120 - DNA, 25 bp, Homo sapien
tgtatcacagtatcacacatgcctt

SEQ ID NO: 2585121 - DNA, 25 bp, Homo sapien
ccaatgtgatttacacacactgcat

SEQ ID NO: 2585122 - DNA, 25 bp, Homo sapien
gccgctctcagggtttgccaagaac

SEQ ID NO: 2585123 - DNA, 25 bp, Homo sapien
tgagtgaccttcaagggacggcctg

SEQ ID NO: 2585124 - DNA, 25 bp, Homo sapien
cacaggcgaggccagattattttcc

SEQ ID NO: 2585125 - DNA, 25 bp, Homo sapien
gaagtcccacgcctatctgaaaagg

SEQ ID NO: 2585126 - DNA, 25 bp, Homo sapien
caggcgccgaaagcaggcatcggaa

SEQ ID NO: 2585127 - DNA, 25 bp, Homo sapien
tcagctacagatgcccgtggcaggc

SEQ ID NO: 2585128 - DNA, 25 bp, Homo sapien
ggcatcggaacgaaggccaagccgt

SEQ ID NO: 2585129 - DNA, 25 bp, Homo sapien
aacgaaggccaagccgtcggagtct

SEQ ID NO: 2585130 - DNA, 25 bp, Homo sapien
tcaaggtgaaccagcaactctcggt

SEQ ID NO: 2585131 - DNA, 25 bp, Homo sapien
ggccctctctggatcgtcaaggtga

SEQ ID NO: 2585132 - DNA, 25 bp, Homo sapien
catcgttggacacgtcatctaggcg

SEQ ID NO: 2585133 - DNA, 25 bp, Homo sapien
gatagtaggattttgcgttggcacc

SEQ ID NO: 2585134 - DNA, 25 bp, Homo sapien
tggaaggagggagcgagacaggtgt

SEQ ID NO: 2585135 - DNA, 25 bp, Homo sapien
aaggagggagcgagacaggtgtgtg

SEQ ID NO: 2585136 - DNA, 25 bp, Homo sapien
gaaggagggagcgagacaggtgtgt

SEQ ID NO: 2585137 - DNA, 25 bp, Homo sapien
ctggaaggagggagcgagacaggtg

SEQ ID NO: 2585138 - DNA, 25 bp, Homo sapien
tttacgatggtcactccctggatgg

SEQ ID NO: 2585139 - DNA, 25 bp, Homo sapien
tggcgcggtcgactatggaagtaca

SEQ ID NO: 2585140 - DNA, 25 bp, Homo sapien
tagcaaacatctatgggcccggaca

SEQ ID NO: 2585141 - DNA, 25 bp, Homo sapien
aaatgcgctcagatgcccaaacgcg

SEQ ID NO: 2585142 - DNA, 25 bp, Homo sapien
gatcagtcgcgtcatcttcgaatcc

SEQ ID NO: 2585143 - DNA, 25 bp, Homo sapien
gagtttctctggatccgtcatgccg

SEQ ID NO: 2585144 - DNA, 25 bp, Homo sapien
tcatgccgcccgaggtttttaagaa

SEQ ID NO: 2585145 - DNA, 25 bp, Homo sapien
gataatacggcatgagatcagtcgc

SEQ ID NO: 2585146 - DNA, 25 bp, Homo sapien
ggtgctcaccatccgtgcactcctg

SEQ ID NO: 2585147 - DNA, 25 bp, Homo sapien
ctgcaatcagcaaacacatacgacg

SEQ ID NO: 2585148 - DNA, 25 bp, Homo sapien
acatacgacgtgactcacatctgtc

SEQ ID NO: 2585149 - DNA, 25 bp, Homo sapien
tcagcaaacacatacgacgtgactc

SEQ ID NO: 2585150 - DNA, 25 bp, Homo sapien
ggctttcggctggagcaccgaccgc

SEQ ID NO: 2585151 - DNA, 25 bp, Homo sapien
gctttcggctggagcaccgaccgca

SEQ ID NO: 2585152 - DNA, 25 bp, Homo sapien
taatggctcgcctgggccccaagga

SEQ ID NO: 2585153 - DNA, 25 bp, Homo sapien
cctaaaccagggtaatggctcgcct

SEQ ID NO: 2585154 - DNA, 25 bp, Homo sapien
ccgggcggcgaccaggacgcgggcg

SEQ ID NO: 2585155 - DNA, 25 bp, Homo sapien
agggcagcgccttcccgccgggcgg

SEQ ID NO: 2585156 - DNA, 25 bp, Homo sapien
ccagggcagcgccttcccgccgggc

SEQ ID NO: 2585157 - DNA, 25 bp, Homo sapien
cgccgggcggcgaccaggacgcggg

SEQ ID NO: 2585158 - DNA, 25 bp, Homo sapien
agaaacgatgcggaaagcccaggcc

SEQ ID NO: 2585159 - DNA, 25 bp, Homo sapien
catagaaacgatgcggaaagcccag

SEQ ID NO: 2585160 - DNA, 25 bp, Homo sapien
tcatagaaacgatgcggaaagccca

SEQ ID NO: 2585161 - DNA, 25 bp, Homo sapien
acgatgcggaaagcccaggcccgtc

SEQ ID NO: 2585162 - DNA, 25 bp, Homo sapien
tccccgcatgccactgcagattggg

SEQ ID NO: 2585163 - DNA, 25 bp, Homo sapien
tttgtcaccgtctcgaggtagctgg

SEQ ID NO: 2585164 - DNA, 25 bp, Homo sapien
agccgtgcggatggccgcggctgtc

SEQ ID NO: 2585165 - DNA, 25 bp, Homo sapien
ctggtgagcgcccagaggcaggaca

SEQ ID NO: 2585166 - DNA, 25 bp, Homo sapien
tggtgtccaaggtggagacaccatg

SEQ ID NO: 2585167 - DNA, 25 bp, Homo sapien
gggacctgcgtacagccggcgctca

SEQ ID NO: 2585168 - DNA, 25 bp, Homo sapien
ttgggcacccgcacagcagggacct

SEQ ID NO: 2585169 - DNA, 25 bp, Homo sapien
tggagacaccatggcagacgcagcc

SEQ ID NO: 2585170 - DNA, 25 bp, Homo sapien
gggaaccccttgcgcagtgcagtgt

SEQ ID NO: 2585171 - DNA, 25 bp, Homo sapien
aaccccttgcgcagtgcagtgttgg

SEQ ID NO: 2585172 - DNA, 25 bp, Homo sapien
agggagatggggaaccccttgcgca

SEQ ID NO: 2585173 - DNA, 25 bp, Homo sapien
gatggggaaccccttgcgcagtgca

SEQ ID NO: 2585174 - DNA, 25 bp, Homo sapien
gagttgatggtgtccgtggctctga

SEQ ID NO: 2585175 - DNA, 25 bp, Homo sapien
ttgatggtgtccgtggctctgagca

SEQ ID NO: 2585176 - DNA, 25 bp, Homo sapien
gggcacgacgtgtggcagggcttct

SEQ ID NO: 2585177 - DNA, 25 bp, Homo sapien
cctcagcgtgggcacgacgtgtggc

SEQ ID NO: 2585178 - DNA, 25 bp, Homo sapien
gcttcctctttctcaatcagtaagg

SEQ ID NO: 2585179 - DNA, 25 bp, Homo sapien
aaggtgattatcacagaaaagcagc

SEQ ID NO: 2585180 - DNA, 25 bp, Homo sapien
tgaaaacctatttggtcaggcatgg

SEQ ID NO: 2585181 - DNA, 25 bp, Homo sapien
tgggagagggcactatcggccacca

SEQ ID NO: 2585182 - DNA, 25 bp, Homo sapien
gcttatccaagcaactgtgagtcac

SEQ ID NO: 2585183 - DNA, 25 bp, Homo sapien
tggccccgggccagtgtagagggag

SEQ ID NO: 2585184 - DNA, 25 bp, Homo sapien
tccggtgggcgcgaggcttgggcgc

SEQ ID NO: 2585185 - DNA, 25 bp, Homo sapien
tccatgaatgacagggcaaggacag

SEQ ID NO: 2585186 - DNA, 25 bp, Homo sapien
aatgttcaaacctgacgcctgggcc

SEQ ID NO: 2585187 - DNA, 25 bp, Homo sapien
aatgtactcgctgctctggctcgaa

SEQ ID NO: 2585188 - DNA, 25 bp, Homo sapien
aagctgctgggacgcctgacttgag

SEQ ID NO: 2585189 - DNA, 25 bp, Homo sapien
gccacacggagacgcaatgtactcg

SEQ ID NO: 2585190 - DNA, 25 bp, Homo sapien
tgtattatatttgaggctgtgcccc

SEQ ID NO: 2585191 - DNA, 25 bp, Homo sapien
tacagtagtgcatgctcattagaga

SEQ ID NO: 2585192 - DNA, 25 bp, Homo sapien
tctgtattccaaggacacgatgttg

SEQ ID NO: 2585193 - DNA, 25 bp, Homo sapien
tcctctcaaagtttagaaattatcc

SEQ ID NO: 2585194 - DNA, 25 bp, Homo sapien
gggcccaaagagatgtgtgttccaa

SEQ ID NO: 2585195 - DNA, 25 bp, Homo sapien
tgacggccctaaggcttgcagagca

SEQ ID NO: 2585196 - DNA, 25 bp, Homo sapien
tttagattcagaggtgcacgtgcgg

SEQ ID NO: 2585197 - DNA, 25 bp, Homo sapien
taaagtgtttaatgccccgagtgca

SEQ ID NO: 2585198 - DNA, 25 bp, Homo sapien
tgcagagcacgaccaccctggtgca

SEQ ID NO: 2585199 - DNA, 25 bp, Homo sapien
gaacgatcttagcatcctcagatgc

SEQ ID NO: 2585200 - DNA, 25 bp, Homo sapien
gcatcctcagatgcagagcacgacc

SEQ ID NO: 2585201 - DNA, 25 bp, Homo sapien
gagattgtgtaagaacgatcttagc

SEQ ID NO: 2585202 - DNA, 25 bp, Homo sapien
tcagctggtcggcgctggtacctgc

SEQ ID NO: 2585203 - DNA, 25 bp, Homo sapien
gtcggcgctggtacctgctgagcac

SEQ ID NO: 2585204 - DNA, 25 bp, Homo sapien
tggtcggcgctggtacctgctgagc

SEQ ID NO: 2585205 - DNA, 25 bp, Homo sapien
gctggtcggcgctggtacctgctga

SEQ ID NO: 2585206 - DNA, 25 bp, Homo sapien
ctgactgtgcgacgatgacactgaa

SEQ ID NO: 2585207 - DNA, 25 bp, Homo sapien
gtccagtcaaggtgcgacgcggtca

SEQ ID NO: 2585208 - DNA, 25 bp, Homo sapien
accaatgtgcttgcggtagaggtcc

SEQ ID NO: 2585209 - DNA, 25 bp, Homo sapien
agctccggcgagtgtgcggtccagt

SEQ ID NO: 2585210 - DNA, 25 bp, Homo sapien
agcacgtccaagagctgcaggctgg

SEQ ID NO: 2585211 - DNA, 25 bp, Homo sapien
tcagcagcacgtccaagagctgcag

SEQ ID NO: 2585212 - DNA, 25 bp, Homo sapien
gcgagggccactattgtcagcagca

SEQ ID NO: 2585213 - DNA, 25 bp, Homo sapien
gccggtagcacctgcgagggccact

SEQ ID NO: 2585214 - DNA, 25 bp, Homo sapien
ggcgctggaggtagggtgccggcat

SEQ ID NO: 2585215 - DNA, 25 bp, Homo sapien
cccaggcgctggaggtagggtgccg

SEQ ID NO: 2585216 - DNA, 25 bp, Homo sapien
agcccttgcagggagagcccccagg

SEQ ID NO: 2585217 - DNA, 25 bp, Homo sapien
catgggagagcccttgcagggagag

SEQ ID NO: 2585218 - DNA, 25 bp, Homo sapien
caatggcaatggcatcccacaactg

SEQ ID NO: 2585219 - DNA, 25 bp, Homo sapien
agaaaagcacaagagactcctattt

SEQ ID NO: 2585220 - DNA, 25 bp, Homo sapien
atggcaatggcatcccacaactgct

SEQ ID NO: 2585221 - DNA, 25 bp, Homo sapien
cacaagagactcctatttcaacaat

SEQ ID NO: 2585222 - DNA, 25 bp, Homo sapien
aacaagggctatcagcgagggcact

SEQ ID NO: 2585223 - DNA, 25 bp, Homo sapien
ccggaacaagggctatcagcgaggg

SEQ ID NO: 2585224 - DNA, 25 bp, Homo sapien
ggaacaagggctatcagcgagggca

SEQ ID NO: 2585225 - DNA, 25 bp, Homo sapien
acaagggctatcagcgagggcactc

SEQ ID NO: 2585226 - DNA, 25 bp, Homo sapien
actgcaggtgtttccgatggcccgg

SEQ ID NO: 2585227 - DNA, 25 bp, Homo sapien
caggtgtttccgatggcccggcctg

SEQ ID NO: 2585228 - DNA, 25 bp, Homo sapien
gtcgctgggtgcttccgacagccca

SEQ ID NO: 2585229 - DNA, 25 bp, Homo sapien
agacacgtcgctgggtgcttccgac

SEQ ID NO: 2585230 - DNA, 25 bp, Homo sapien
tcccgcatctcccaagtgctcttac

SEQ ID NO: 2585231 - DNA, 25 bp, Homo sapien
caacccacagacatgtcattacgat

SEQ ID NO: 2585232 - DNA, 25 bp, Homo sapien
ctggcggcacagggcaacccacaga

SEQ ID NO: 2585233 - DNA, 25 bp, Homo sapien
tcattacgatggctgacggccgggc

SEQ ID NO: 2585234 - DNA, 25 bp, Homo sapien
ctcagggctgacaaacgtcccgacg

SEQ ID NO: 2585235 - DNA, 25 bp, Homo sapien
gagggcgtcttcttcagcgtcgata

SEQ ID NO: 2585236 - DNA, 25 bp, Homo sapien
tggctgccaggtgcggctggagggc

SEQ ID NO: 2585237 - DNA, 25 bp, Homo sapien
ccgacgagctctgcggatctggtac

SEQ ID NO: 2585238 - DNA, 25 bp, Homo sapien
acccagtcggtgatgtcgtggcaca

SEQ ID NO: 2585239 - DNA, 25 bp, Homo sapien
tccggaggacgacctccaggtgctg

SEQ ID NO: 2585240 - DNA, 25 bp, Homo sapien
tgggagcagctgtgccgacttcact

SEQ ID NO: 2585241 - DNA, 25 bp, Homo sapien
tcctcgtcggtgcaggcctggaaca

SEQ ID NO: 2585242 - DNA, 25 bp, Homo sapien
gtcttttgaggatgcacccagggaa

SEQ ID NO: 2585243 - DNA, 25 bp, Homo sapien
cccgcggtgacaaaggcttcgtcat

SEQ ID NO: 2585244 - DNA, 25 bp, Homo sapien
gcccgtggtcacgaaggcttcgtcg

SEQ ID NO: 2585245 - DNA, 25 bp, Homo sapien
ggcttcgtcgtcactctgcagtctt

SEQ ID NO: 2585246 - DNA, 25 bp, Homo sapien
cgagacgctttcctttacgctcagg

SEQ ID NO: 2585247 - DNA, 25 bp, Homo sapien
gagacgctttcctttacgctcaggc

SEQ ID NO: 2585248 - DNA, 25 bp, Homo sapien
agacgctttcctttacgctcaggca

SEQ ID NO: 2585249 - DNA, 25 bp, Homo sapien
gacgctttcctttacgctcaggcat

SEQ ID NO: 2585250 - DNA, 25 bp, Homo sapien
cgtgaacgtgtgcttccgtgtgaga

SEQ ID NO: 2585251 - DNA, 25 bp, Homo sapien
tgaacgtgtgcttccgtgtgagaag

SEQ ID NO: 2585252 - DNA, 25 bp, Homo sapien
ggcgtgaacgtgtgcttccgtgtga

SEQ ID NO: 2585253 - DNA, 25 bp, Homo sapien
caggcgtgaacgtgtgcttccgtgt

SEQ ID NO: 2585254 - DNA, 25 bp, Homo sapien
agcacagggcccgagtccaccgagg

SEQ ID NO: 2585255 - DNA, 25 bp, Homo sapien
cagggcccgagtccaccgaggagaa

SEQ ID NO: 2585256 - DNA, 25 bp, Homo sapien
agcagacagactggcccctggagcg

SEQ ID NO: 2585257 - DNA, 25 bp, Homo sapien
cccctggagcgagcggtgaggtgag

SEQ ID NO: 2585258 - DNA, 25 bp, Homo sapien
cagagcaggggggatgggggcggca

SEQ ID NO: 2585259 - DNA, 25 bp, Homo sapien
gatgggggcggcagctgccggagct

SEQ ID NO: 2585260 - DNA, 25 bp, Homo sapien
ctgtggtagggggcaggaggaaaca

SEQ ID NO: 2585261 - DNA, 25 bp, Homo sapien
ggaggaaacagagcaggggggatgg

SEQ ID NO: 2585262 - DNA, 25 bp, Homo sapien
gcaggccaacgtcctcccagaggct

SEQ ID NO: 2585263 - DNA, 25 bp, Homo sapien
catgtggagggtaatggggtggggt

SEQ ID NO: 2585264 - DNA, 25 bp, Homo sapien
ctcaggcacctcgtcgttgaggcta

SEQ ID NO: 2585265 - DNA, 25 bp, Homo sapien
gaaggagtaacggtcacgcagacac

SEQ ID NO: 2585266 - DNA, 25 bp, Homo sapien
tgacctcaggcacctcgtcgttgag

SEQ ID NO: 2585267 - DNA, 25 bp, Homo sapien
acctcgtcgttgaggctactgagca

SEQ ID NO: 2585268 - DNA, 25 bp, Homo sapien
ctgacgccacggtgcggctctgagt

SEQ ID NO: 2585269 - DNA, 25 bp, Homo sapien
gagaggaagggataaggattcgtgt

SEQ ID NO: 2585270 - DNA, 25 bp, Homo sapien
agggataaggattcgtgtaggcaaa

SEQ ID NO: 2585271 - DNA, 25 bp, Homo sapien
gatgccggggctgacgccacggtgc

SEQ ID NO: 2585272 - DNA, 25 bp, Homo sapien
gagccgtgcagcgtgttcaaagtct

SEQ ID NO: 2585273 - DNA, 25 bp, Homo sapien
agctgctacctgagccgtgcagcgt

SEQ ID NO: 2585274 - DNA, 25 bp, Homo sapien
tacctgagccgtgcagcgtgttcaa

SEQ ID NO: 2585275 - DNA, 25 bp, Homo sapien
gcagcgtgttcaaagtcttctgcat

SEQ ID NO: 2585276 - DNA, 25 bp, Homo sapien
cagtcgtaggtgcaggggacccgag

SEQ ID NO: 2585277 - DNA, 25 bp, Homo sapien
ccagtcgtaggtgcaggggacccga

SEQ ID NO: 2585278 - DNA, 25 bp, Homo sapien
gtcgtaggtgcaggggacccgagca

SEQ ID NO: 2585279 - DNA, 25 bp, Homo sapien
gtaggtgcaggggacccgagcagca

SEQ ID NO: 2585280 - DNA, 25 bp, Homo sapien
aaactgtcactgtcgtcttcaccca

SEQ ID NO: 2585281 - DNA, 25 bp, Homo sapien
ctggctagagagtccccacagaaca

SEQ ID NO: 2585282 - DNA, 25 bp, Homo sapien
tggctagagagtccccacagaacaa

SEQ ID NO: 2585283 - DNA, 25 bp, Homo sapien
cacagaacaaactgtcactgtcgtc

SEQ ID NO: 2585284 - DNA, 25 bp, Homo sapien
tacagagcgtgctccacagagttcc

SEQ ID NO: 2585285 - DNA, 25 bp, Homo sapien
tgacagtaggcttacaccgacagct

SEQ ID NO: 2585286 - DNA, 25 bp, Homo sapien
tgttttgaggagtaagacttggccc

SEQ ID NO: 2585287 - DNA, 25 bp, Homo sapien
gagttacaccgtttacagctagcaa

SEQ ID NO: 2585288 - DNA, 25 bp, Homo sapien
gcgtcttgatggatgggagcactaa

SEQ ID NO: 2585289 - DNA, 25 bp, Homo sapien
tggtgggttccaaagcccaacgaca

SEQ ID NO: 2585290 - DNA, 25 bp, Homo sapien
ccggccagcgtacatggtgactcaa

SEQ ID NO: 2585291 - DNA, 25 bp, Homo sapien
ccatggtggcttttcgggaaagtgc

SEQ ID NO: 2585292 - DNA, 25 bp, Homo sapien
aagatgtgaacaggaacgtcctgtg

SEQ ID NO: 2585293 - DNA, 25 bp, Homo sapien
ctgtgactaggaataatgaaaggac

SEQ ID NO: 2585294 - DNA, 25 bp, Homo sapien
caggaacgtcctgtgactaggaata

SEQ ID NO: 2585295 - DNA, 25 bp, Homo sapien
gaaaggacatttggtgcatacagca

SEQ ID NO: 2585296 - DNA, 25 bp, Homo sapien
tgcgggacgtcatcaaacagtcgct

SEQ ID NO: 2585297 - DNA, 25 bp, Homo sapien
aaaatggatcactgcgcctgtggct

SEQ ID NO: 2585298 - DNA, 25 bp, Homo sapien
cggacttcccgttgccaaaatggat

SEQ ID NO: 2585299 - DNA, 25 bp, Homo sapien
aatgggaaagcacgtcgtccacgga

SEQ ID NO: 2585300 - DNA, 25 bp, Homo sapien
aacagacgaggcttgtgcggaccga

SEQ ID NO: 2585301 - DNA, 25 bp, Homo sapien
ggaccgaacggtcatagagtaaaca

SEQ ID NO: 2585302 - DNA, 25 bp, Homo sapien
tggtatcccgtgttgaacttgattg

SEQ ID NO: 2585303 - DNA, 25 bp, Homo sapien
gaacttgattgaacagacgaggctt

SEQ ID NO: 2585304 - DNA, 25 bp, Homo sapien
ggaactgagggtgatacggcaccaa

SEQ ID NO: 2585305 - DNA, 25 bp, Homo sapien
agggtcacagaaggcgaccccagag

SEQ ID NO: 2585306 - DNA, 25 bp, Homo sapien
gcaaagctccaactcctcgtctggg

SEQ ID NO: 2585307 - DNA, 25 bp, Homo sapien
taaaactttgctaccgttgcctcca

SEQ ID NO: 2585308 - DNA, 25 bp, Homo sapien
ggttcaggaatgtaacacgccatgt

SEQ ID NO: 2585309 - DNA, 25 bp, Homo sapien
tttcacggaggagaacaaagaccgc

SEQ ID NO: 2585310 - DNA, 25 bp, Homo sapien
cgcacactggcaataaagcaccgta

SEQ ID NO: 2585311 - DNA, 25 bp, Homo sapien
gcttcaccgagtgctacaatacttg

SEQ ID NO: 2585312 - DNA, 25 bp, Homo sapien
atggggtctgtcaccagcaggccca

SEQ ID NO: 2585313 - DNA, 25 bp, Homo sapien
catggggtctgtcaccagcaggccc

SEQ ID NO: 2585314 - DNA, 25 bp, Homo sapien
tggggtctgtcaccagcaggcccat

SEQ ID NO: 2585315 - DNA, 25 bp, Homo sapien
ccggattcaggcttgtggtcgcgca

SEQ ID NO: 2585316 - DNA, 25 bp, Homo sapien
ccgataatccggattcaggcttgtg

SEQ ID NO: 2585317 - DNA, 25 bp, Homo sapien
tgtcctcttcccgataatccggatt

SEQ ID NO: 2585318 - DNA, 25 bp, Homo sapien
tccaaatgctcctctaacctcacct

SEQ ID NO: 2585319 - DNA, 25 bp, Homo sapien
agcttcctaaggcgttgccatggag

SEQ ID NO: 2585320 - DNA, 25 bp, Homo sapien
aagttataatcttgaggctgcagct

SEQ ID NO: 2585321 - DNA, 25 bp, Homo sapien
gcagcttcctaaggcgttgccatgg

SEQ ID NO: 2585322 - DNA, 25 bp, Homo sapien
gggaagttataatcttgaggctgca

SEQ ID NO: 2585323 - DNA, 25 bp, Homo sapien
caggcagggacgcttcaagagcctg

SEQ ID NO: 2585324 - DNA, 25 bp, Homo sapien
agctctgtgcctctacaagggccgg

SEQ ID NO: 2585325 - DNA, 25 bp, Homo sapien
tctgccaagtgacctggtgtgccca

SEQ ID NO: 2585326 - DNA, 25 bp, Homo sapien
gtctagaggtctcatggtgccggcc

SEQ ID NO: 2585327 - DNA, 25 bp, Homo sapien
tcttggtccttgctgaccccatttc

SEQ ID NO: 2585328 - DNA, 25 bp, Homo sapien
ttggtccttgctgaccccatttcca

SEQ ID NO: 2585329 - DNA, 25 bp, Homo sapien
ggtcgccatcttccctggggtctgt

SEQ ID NO: 2585330 - DNA, 25 bp, Homo sapien
gaggtcgccatcttccctggggtct

SEQ ID NO: 2585331 - DNA, 25 bp, Homo sapien
gatggaggcccctcggtcaaggtca

SEQ ID NO: 2585332 - DNA, 25 bp, Homo sapien
gatgtgcacgccgacatgcagatgg

SEQ ID NO: 2585333 - DNA, 25 bp, Homo sapien
aaggtcacagggctcacaagacatg

SEQ ID NO: 2585334 - DNA, 25 bp, Homo sapien
ttcacagatgtgcacgccgacatgc

SEQ ID NO: 2585335 - DNA, 25 bp, Homo sapien
gcattgtcgccagcatctcatggaa

SEQ ID NO: 2585336 - DNA, 25 bp, Homo sapien
attcctgggcaaggcgctgtaaccg

SEQ ID NO: 2585337 - DNA, 25 bp, Homo sapien
tgtaaccggtgcagatctggacagc

SEQ ID NO: 2585338 - DNA, 25 bp, Homo sapien
ccacagatggtcctcgaagaacgcg

SEQ ID NO: 2585339 - DNA, 25 bp, Homo sapien
caatgcatctcacgtgccgcgtggg

SEQ ID NO: 2585340 - DNA, 25 bp, Homo sapien
tagcaggctctcaggtatacaaaac

SEQ ID NO: 2585341 - DNA, 25 bp, Homo sapien
caacacagacagaagcggcaatgca

SEQ ID NO: 2585342 - DNA, 25 bp, Homo sapien
gccgcgtgggaacacagcattctag

SEQ ID NO: 2585343 - DNA, 25 bp, Homo sapien
tcgcgtggcggtttccaaaacattc

SEQ ID NO: 2585344 - DNA, 25 bp, Homo sapien
gaaaaataccgtcgcactgtcctga

SEQ ID NO: 2585345 - DNA, 25 bp, Homo sapien
ggcttaaatactacagcgaggaggt

SEQ ID NO: 2585346 - DNA, 25 bp, Homo sapien
tgtgaccacccggacaaaaatccag

SEQ ID NO: 2585347 - DNA, 25 bp, Homo sapien
tgtcctgaggacacggcaggaattc

SEQ ID NO: 2585348 - DNA, 25 bp, Homo sapien
tttaaaaagacggtggcagcttctc

SEQ ID NO: 2585349 - DNA, 25 bp, Homo sapien
tcatttttgccgtctcacgccacgg

SEQ ID NO: 2585350 - DNA, 25 bp, Homo sapien
tgtgaactcccattccgggtgccgg

SEQ ID NO: 2585351 - DNA, 25 bp, Homo sapien
gcaaagagctcaagtcccagtggat

SEQ ID NO: 2585352 - DNA, 25 bp, Homo sapien
tggcgttggaagatgctcaccaccg

SEQ ID NO: 2585353 - DNA, 25 bp, Homo sapien
tctgtacctgtcatcgggaaatgcg

SEQ ID NO: 2585354 - DNA, 25 bp, Homo sapien
tggcaacttcggcaaattcgggagc

SEQ ID NO: 2585355 - DNA, 25 bp, Homo sapien
gagatgccgggagatttctgctgac

SEQ ID NO: 2585356 - DNA, 25 bp, Homo sapien
gggcatccgagatgccgggagattt

SEQ ID NO: 2585357 - DNA, 25 bp, Homo sapien
ccgagatgccgggagatttctgctg

SEQ ID NO: 2585358 - DNA, 25 bp, Homo sapien
ccggctggggcatccgagatgccgg

SEQ ID NO: 2585359 - DNA, 25 bp, Homo sapien
cagtcttgcgagcacaacttccagt

SEQ ID NO: 2585360 - DNA, 25 bp, Homo sapien
tccactccctggttgacgactcgga

SEQ ID NO: 2585361 - DNA, 25 bp, Homo sapien
agtgttttccgctttctgaccctct

SEQ ID NO: 2585362 - DNA, 25 bp, Homo sapien
cagaggagatggcatcaccgagtcg

SEQ ID NO: 2585363 - DNA, 25 bp, Homo sapien
ctgcacaggcttcccggaaaggctc

SEQ ID NO: 2585364 - DNA, 25 bp, Homo sapien
cggaggttctacaggctctctgcag

SEQ ID NO: 2585365 - DNA, 25 bp, Homo sapien
gaacagctgcttcccggaggttcta

SEQ ID NO: 2585366 - DNA, 25 bp, Homo sapien
ccggctctccggcagtgtggttttg

SEQ ID NO: 2585367 - DNA, 25 bp, Homo sapien
gctccagtcggggaaagggcctgca

SEQ ID NO: 2585368 - DNA, 25 bp, Homo sapien
ccccgcccaggatccgaggcctggg

SEQ ID NO: 2585369 - DNA, 25 bp, Homo sapien
tttccacttgggagcgagctccagt

SEQ ID NO: 2585370 - DNA, 25 bp, Homo sapien
actcccgcgccgaaggcagggccgc

SEQ ID NO: 2585371 - DNA, 25 bp, Homo sapien
aagagccggactcgcagggccagga

SEQ ID NO: 2585372 - DNA, 25 bp, Homo sapien
ccggcctcattcttcggccagttat

SEQ ID NO: 2585373 - DNA, 25 bp, Homo sapien
tcttcggccagttatcccggagtgg

SEQ ID NO: 2585374 - DNA, 25 bp, Homo sapien
cggagtggcgcgcatcctgtcttcc

SEQ ID NO: 2585375 - DNA, 25 bp, Homo sapien
tgacttaaccaagaggtcaccgact

SEQ ID NO: 2585376 - DNA, 25 bp, Homo sapien
gcgttgaaaccgcagggctgactta

SEQ ID NO: 2585377 - DNA, 25 bp, Homo sapien
tgggtttcaggtgctcggcccagga

SEQ ID NO: 2585378 - DNA, 25 bp, Homo sapien
ccggatccccggaagacacaaggag

SEQ ID NO: 2585379 - DNA, 25 bp, Homo sapien
caaagatgtttagccctgatcggac

SEQ ID NO: 2585380 - DNA, 25 bp, Homo sapien
aaggataggcacacatcccctgcca

SEQ ID NO: 2585381 - DNA, 25 bp, Homo sapien
tgtaccacgtgaagcaaggataggc

SEQ ID NO: 2585382 - DNA, 25 bp, Homo sapien
tgatcggacctcaaggaaacaagga

SEQ ID NO: 2585383 - DNA, 25 bp, Homo sapien
tgaggagacccattgacgtccacgc

SEQ ID NO: 2585384 - DNA, 25 bp, Homo sapien
tccagtttgcggctgaggagaccca

SEQ ID NO: 2585385 - DNA, 25 bp, Homo sapien
gacgtccacgctcatggtggccctg

SEQ ID NO: 2585386 - DNA, 25 bp, Homo sapien
tgcaggtgcaagatcgagctccagt

SEQ ID NO: 2585387 - DNA, 25 bp, Homo sapien
tgactgcttagcctcctgcaggagg

SEQ ID NO: 2585388 - DNA, 25 bp, Homo sapien
ggtgacctgactgcttagcctcctg

SEQ ID NO: 2585389 - DNA, 25 bp, Homo sapien
caggcgggggaactcctgtgtcctt

SEQ ID NO: 2585390 - DNA, 25 bp, Homo sapien
gacctgactgcttagcctcctgcag

SEQ ID NO: 2585391 - DNA, 25 bp, Homo sapien
cagaatgatccccagatctgctgac

SEQ ID NO: 2585392 - DNA, 25 bp, Homo sapien
acagcgcacccctcatcctcgaaat

SEQ ID NO: 2585393 - DNA, 25 bp, Homo sapien
gtccagaatgatccccagatctgct

SEQ ID NO: 2585394 - DNA, 25 bp, Homo sapien
cacagcaaactgtggtgtccagaat

SEQ ID NO: 2585395 - DNA, 25 bp, Homo sapien
tgtgtccaccccgttctagtcaggg

SEQ ID NO: 2585396 - DNA, 25 bp, Homo sapien
tattttgcacgtactgtgtactctg

SEQ ID NO: 2585397 - DNA, 25 bp, Homo sapien
gggacacagtcccaccctcatggga

SEQ ID NO: 2585398 - DNA, 25 bp, Homo sapien
aggatgggtgacaaacacgtgaacc

SEQ ID NO: 2585399 - DNA, 25 bp, Homo sapien
ggctatttcagctgatgcgttcagc

SEQ ID NO: 2585400 - DNA, 25 bp, Homo sapien
agcccaaacacagtcagggatctta

SEQ ID NO: 2585401 - DNA, 25 bp, Homo sapien
cagctgatgcgttcagctccagaaa

SEQ ID NO: 2585402 - DNA, 25 bp, Homo sapien
tcagctccagaaaatagaaactcag

SEQ ID NO: 2585403 - DNA, 25 bp, Homo sapien
ccagaggcgggattcaggagaggtc

SEQ ID NO: 2585404 - DNA, 25 bp, Homo sapien
aagaaagagtgcgaaccacccgtct

SEQ ID NO: 2585405 - DNA, 25 bp, Homo sapien
gagagccctggttctcgtcagcaag

SEQ ID NO: 2585406 - DNA, 25 bp, Homo sapien
aagggtccggctccacatcttggtc

SEQ ID NO: 2585407 - DNA, 25 bp, Homo sapien
gaactgccatccgacccatggatcg

SEQ ID NO: 2585408 - DNA, 25 bp, Homo sapien
ccctctggtcagttctcttatctga

SEQ ID NO: 2585409 - DNA, 25 bp, Homo sapien
ccatggatcgcctgttgtgaagagc

SEQ ID NO: 2585410 - DNA, 25 bp, Homo sapien
cggtaagatcaatgaagctctttct

SEQ ID NO: 2585411 - DNA, 25 bp, Homo sapien
aggccgtgtgtgaaacccagcagga

SEQ ID NO: 2585412 - DNA, 25 bp, Homo sapien
ggcgaggccgtgtgtgaaacccagc

SEQ ID NO: 2585413 - DNA, 25 bp, Homo sapien
gtcggcgaggccgtgtgtgaaaccc

SEQ ID NO: 2585414 - DNA, 25 bp, Homo sapien
cgaggccgtgtgtgaaacccagcag

SEQ ID NO: 2585415 - DNA, 25 bp, Homo sapien
tgaggtaccacggatgagggtcact

SEQ ID NO: 2585416 - DNA, 25 bp, Homo sapien
cagaattccagagaggccgtgaggt

SEQ ID NO: 2585417 - DNA, 25 bp, Homo sapien
gaagacctcatgacaggcaccatgg

SEQ ID NO: 2585418 - DNA, 25 bp, Homo sapien
tgcagagtctcaacccaacagtgaa

SEQ ID NO: 2585419 - DNA, 25 bp, Homo sapien
ggcctaaactcatccatattcactt

SEQ ID NO: 2585420 - DNA, 25 bp, Homo sapien
tgggctccgtgaagccttgccgagc

SEQ ID NO: 2585421 - DNA, 25 bp, Homo sapien
aagcagcgacggagggtgcctaggt

SEQ ID NO: 2585422 - DNA, 25 bp, Homo sapien
ggtgcctaggtgtgatggagggtgc

SEQ ID NO: 2585423 - DNA, 25 bp, Homo sapien
aacactctgtgtgcacgtcacacgt

SEQ ID NO: 2585424 - DNA, 25 bp, Homo sapien
caggaggcaccagggagcgtctgcg

SEQ ID NO: 2585425 - DNA, 25 bp, Homo sapien
tctgcggaattaaaccaacactctg

SEQ ID NO: 2585426 - DNA, 25 bp, Homo sapien
gtcacacgtttagcggacacaggcc

SEQ ID NO: 2585427 - DNA, 25 bp, Homo sapien
cactctggtgtagaggaaccagccg

SEQ ID NO: 2585428 - DNA, 25 bp, Homo sapien
tccaacatctgagtgttccctgtgt

SEQ ID NO: 2585429 - DNA, 25 bp, Homo sapien
ccgtatcatgaacgccgtagcctgt

SEQ ID NO: 2585430 - DNA, 25 bp, Homo sapien
ccctgtgtgcatggcgcacagtgtg

SEQ ID NO: 2585431 - DNA, 25 bp, Homo sapien
catggagacgtttgccgcttttcca

SEQ ID NO: 2585432 - DNA, 25 bp, Homo sapien
cacaggacaggctgcgtccatggag

SEQ ID NO: 2585433 - DNA, 25 bp, Homo sapien
ccgacagatcgaggaagggccacag

SEQ ID NO: 2585434 - DNA, 25 bp, Homo sapien
gctgcgtccatggagacgtttgccg

SEQ ID NO: 2585435 - DNA, 25 bp, Homo sapien
ctgggcgtccctcgtcagggagttc

SEQ ID NO: 2585436 - DNA, 25 bp, Homo sapien
cgcttggcttaggtaataggaggat

SEQ ID NO: 2585437 - DNA, 25 bp, Homo sapien
cgtccctcgtcagggagttctcggg

SEQ ID NO: 2585438 - DNA, 25 bp, Homo sapien
cacaggtggggagacgcttggctta

SEQ ID NO: 2585439 - DNA, 25 bp, Homo sapien
caggcagtattccaggatgactgca

SEQ ID NO: 2585440 - DNA, 25 bp, Homo sapien
cagaggccttgaagagtaggagcag

SEQ ID NO: 2585441 - DNA, 25 bp, Homo sapien
gcagtattccaggatgactgcaggc

SEQ ID NO: 2585442 - DNA, 25 bp, Homo sapien
gggtggggcacgcagaggccttgaa

SEQ ID NO: 2585443 - DNA, 25 bp, Homo sapien
ggcagggccgcagcatcccaggccg

SEQ ID NO: 2585444 - DNA, 25 bp, Homo sapien
tcgccaggctccttttcaagtgcat

SEQ ID NO: 2585445 - DNA, 25 bp, Homo sapien
caggccggggatcgccaggctcctt

SEQ ID NO: 2585446 - DNA, 25 bp, Homo sapien
atcccaggccggggatcgccaggct

SEQ ID NO: 2585447 - DNA, 25 bp, Homo sapien
taatgcttcatgcagtattcagagc

SEQ ID NO: 2585448 - DNA, 25 bp, Homo sapien
aatgcttcatgcagtattcagagca

SEQ ID NO: 2585449 - DNA, 25 bp, Homo sapien
atgcttcatgcagtattcagagcag

SEQ ID NO: 2585450 - DNA, 25 bp, Homo sapien
gcaatgacctcgcttgtctttcggg

SEQ ID NO: 2585451 - DNA, 25 bp, Homo sapien
tgcgggatccaagacacatttaagg

SEQ ID NO: 2585452 - DNA, 25 bp, Homo sapien
tggctcacgtcatcactgcgggatc

SEQ ID NO: 2585453 - DNA, 25 bp, Homo sapien
ggacaggagcaacatcaggtgaact

SEQ ID NO: 2585454 - DNA, 25 bp, Homo sapien
gggcagtcctcacgctgccgggacc

SEQ ID NO: 2585455 - DNA, 25 bp, Homo sapien
cccgacacagacgagcagggcacgg

SEQ ID NO: 2585456 - DNA, 25 bp, Homo sapien
cacacctcacacagcggctcccggg

SEQ ID NO: 2585457 - DNA, 25 bp, Homo sapien
ggaaatgcacaaggtgatcatttat

SEQ ID NO: 2585458 - DNA, 25 bp, Homo sapien
gcccggggccggttcagcagcagtg

SEQ ID NO: 2585459 - DNA, 25 bp, Homo sapien
ggccccagcacacgctcgaagcggg

SEQ ID NO: 2585460 - DNA, 25 bp, Homo sapien
ggccggtccagcttcacacacttga

SEQ ID NO: 2585461 - DNA, 25 bp, Homo sapien
aagctgttgtaacgctgaatgttcc

SEQ ID NO: 2585462 - DNA, 25 bp, Homo sapien
gaagtagtcagagggtcccaggcgc

SEQ ID NO: 2585463 - DNA, 25 bp, Homo sapien
gccccacctccacgtactcctcatt

SEQ ID NO: 2585464 - DNA, 25 bp, Homo sapien
cctccacgtactcctcattggggga

SEQ ID NO: 2585465 - DNA, 25 bp, Homo sapien
cgaagtagtcagagggtcccaggcg

SEQ ID NO: 2585466 - DNA, 25 bp, Homo sapien
ctgccaccaccacgtcaccacccaa

SEQ ID NO: 2585467 - DNA, 25 bp, Homo sapien
ctcccacccaggtccttctccagag

SEQ ID NO: 2585468 - DNA, 25 bp, Homo sapien
cacctcccacccaggtccttctcca

SEQ ID NO: 2585469 - DNA, 25 bp, Homo sapien
tgccaccaccacgtcaccacccaaa

SEQ ID NO: 2585470 - DNA, 25 bp, Homo sapien
agagaccaccgtccggcctggccca

SEQ ID NO: 2585471 - DNA, 25 bp, Homo sapien
ggcatctgagcaccgcgggacctgc

SEQ ID NO: 2585472 - DNA, 25 bp, Homo sapien
acctgcccagagaccaccgtccggc

SEQ ID NO: 2585473 - DNA, 25 bp, Homo sapien
gttcccggcacctgtgaccagggca

SEQ ID NO: 2585474 - DNA, 25 bp, Homo sapien
agaggccgtgggcagcatatcacag

SEQ ID NO: 2585475 - DNA, 25 bp, Homo sapien
acagatgcagcctgcggacggcggg

SEQ ID NO: 2585476 - DNA, 25 bp, Homo sapien
gccgcagcacgtgctacgcacagat

SEQ ID NO: 2585477 - DNA, 25 bp, Homo sapien
gcgggttgcccagatcaatgattaa

SEQ ID NO: 2585478 - DNA, 25 bp, Homo sapien
tctcagaatccaggcgatgaacctg

SEQ ID NO: 2585479 - DNA, 25 bp, Homo sapien
gtcatcgatgctccctttgtggcca

SEQ ID NO: 2585480 - DNA, 25 bp, Homo sapien
cttgcggacagacgtcatcgatgct

SEQ ID NO: 2585481 - DNA, 25 bp, Homo sapien
aatccaggcgatgaacctgacggcc

SEQ ID NO: 2585482 - DNA, 25 bp, Homo sapien
cttaggagtcactgccaagacggcc

SEQ ID NO: 2585483 - DNA, 25 bp, Homo sapien
tccaggaacggagtcacataaaggg

SEQ ID NO: 2585484 - DNA, 25 bp, Homo sapien
cactgagtttccactgcgacgtggg

SEQ ID NO: 2585485 - DNA, 25 bp, Homo sapien
tcggataattagaagggcctctggg

SEQ ID NO: 2585486 - DNA, 25 bp, Homo sapien
tcaccttctccaaacacaccccagt

SEQ ID NO: 2585487 - DNA, 25 bp, Homo sapien
ctccggcacgtcgaccctccacctt

SEQ ID NO: 2585488 - DNA, 25 bp, Homo sapien
tccacctttaaggtcaagttcatcc

SEQ ID NO: 2585489 - DNA, 25 bp, Homo sapien
agtagagctgtgtcttgagctcaga

SEQ ID NO: 2585490 - DNA, 25 bp, Homo sapien
ccgatacgaggggaccccgatctgg

SEQ ID NO: 2585491 - DNA, 25 bp, Homo sapien
tcagggctggtggtcgcacttcccc

SEQ ID NO: 2585492 - DNA, 25 bp, Homo sapien
gcccagaccagagaccgtctggaca

SEQ ID NO: 2585493 - DNA, 25 bp, Homo sapien
gcacttccccatgcccggcaggagc

SEQ ID NO: 2585494 - DNA, 25 bp, Homo sapien
agacggtgcagacggcacttctcca

SEQ ID NO: 2585495 - DNA, 25 bp, Homo sapien
aagaccaagacggtgcagacggcac

SEQ ID NO: 2585496 - DNA, 25 bp, Homo sapien
agggggtgtcctatcttctgccaaa

SEQ ID NO: 2585497 - DNA, 25 bp, Homo sapien
agagtccagggggtgtcctatcttc

SEQ ID NO: 2585498 - DNA, 25 bp, Homo sapien
tcggcagcagaaagtgccgcgtgtc

SEQ ID NO: 2585499 - DNA, 25 bp, Homo sapien
atcttttcagaaacgccgagcccag

SEQ ID NO: 2585500 - DNA, 25 bp, Homo sapien
cgggcttcctcagtgacaacgatct

SEQ ID NO: 2585501 - DNA, 25 bp, Homo sapien
cagtggcaggcgcaatgacccagcc

SEQ ID NO: 2585502 - DNA, 25 bp, Homo sapien
actggctgtgccgagtcactccgga

SEQ ID NO: 2585503 - DNA, 25 bp, Homo sapien
gtcactccggatactggtcagcggg

SEQ ID NO: 2585504 - DNA, 25 bp, Homo sapien
ggccccactggctgtgccgagtcac

SEQ ID NO: 2585505 - DNA, 25 bp, Homo sapien
tgtgccgagtcactccggatactgg

SEQ ID NO: 2585506 - DNA, 25 bp, Homo sapien
tggagacaccagaccgggtctcccg

SEQ ID NO: 2585507 - DNA, 25 bp, Homo sapien
ccaggtcccagcacgtcccagctcg

SEQ ID NO: 2585508 - DNA, 25 bp, Homo sapien
attttgggcggtggtctacttcctg

SEQ ID NO: 2585509 - DNA, 25 bp, Homo sapien
gcgttcacattttgggcggtggtct

SEQ ID NO: 2585510 - DNA, 25 bp, Homo sapien
gggctcggagcagacgctgtccggg

SEQ ID NO: 2585511 - DNA, 25 bp, Homo sapien
ggctgcattggcaacaagcccaccg

SEQ ID NO: 2585512 - DNA, 25 bp, Homo sapien
aaggagagggctcggagcagacgct

SEQ ID NO: 2585513 - DNA, 25 bp, Homo sapien
ctgtccggggctgcattggcaacaa

SEQ ID NO: 2585514 - DNA, 25 bp, Homo sapien
tggaggggtgcggccacccaaacca

SEQ ID NO: 2585515 - DNA, 25 bp, Homo sapien
cagagtggaggggtgcggccaccca

SEQ ID NO: 2585516 - DNA, 25 bp, Homo sapien
cacccaaaccacaggcgctggctcc

SEQ ID NO: 2585517 - DNA, 25 bp, Homo sapien
tctgcccagcgatgggacagaagga

SEQ ID NO: 2585518 - DNA, 25 bp, Homo sapien
tgaggcccctccacggaacagcagt

SEQ ID NO: 2585519 - DNA, 25 bp, Homo sapien
tccacggaacagcagtcccccccgc

SEQ ID NO: 2585520 - DNA, 25 bp, Homo sapien
gcccctccacggaacagcagtcccc

SEQ ID NO: 2585521 - DNA, 25 bp, Homo sapien
ctgaggcccctccacggaacagcag

SEQ ID NO: 2585522 - DNA, 25 bp, Homo sapien
gcctccaccaggacaagactccagc

SEQ ID NO: 2585523 - DNA, 25 bp, Homo sapien
tctggggccgggtgttcacggccgc

SEQ ID NO: 2585524 - DNA, 25 bp, Homo sapien
tccaccaggacaagactccagctgc

SEQ ID NO: 2585525 - DNA, 25 bp, Homo sapien
tgcttctcggcttggtccttctcca

SEQ ID NO: 2585526 - DNA, 25 bp, Homo sapien
ccccagagcttgaggtccgtcttgg

SEQ ID NO: 2585527 - DNA, 25 bp, Homo sapien
gggtgccgtagatgagcgccagctc

SEQ ID NO: 2585528 - DNA, 25 bp, Homo sapien
tgcgccggtagctgtcccggtcgat

SEQ ID NO: 2585529 - DNA, 25 bp, Homo sapien
ctccctcgctgatgttggtcaccca

SEQ ID NO: 2585530 - DNA, 25 bp, Homo sapien
gacccagagctaggggaggactggc

SEQ ID NO: 2585531 - DNA, 25 bp, Homo sapien
gcgaggggacctcagagaatgccct

SEQ ID NO: 2585532 - DNA, 25 bp, Homo sapien
cgcgcgtgcagggatacgtggagga

SEQ ID NO: 2585533 - DNA, 25 bp, Homo sapien
atgaagccgggggaagggcctgcga

SEQ ID NO: 2585534 - DNA, 25 bp, Homo sapien
tgcaggtgacggactccagggtcca

SEQ ID NO: 2585535 - DNA, 25 bp, Homo sapien
agcacgtcgtgctgccaggagcatc

SEQ ID NO: 2585536 - DNA, 25 bp, Homo sapien
caccgtgtctatccacgctgcaggt

SEQ ID NO: 2585537 - DNA, 25 bp, Homo sapien
ccagggtccacagcacgtcgtgctg

SEQ ID NO: 2585538 - DNA, 25 bp, Homo sapien
gaccaggacgcgctgcccatgaggc

SEQ ID NO: 2585539 - DNA, 25 bp, Homo sapien
gccagggccacactgtgctcggccg

SEQ ID NO: 2585540 - DNA, 25 bp, Homo sapien
cagcctcagaggaagccattgtgcg

SEQ ID NO: 2585541 - DNA, 25 bp, Homo sapien
ttctgtctcaaagcggggatccgtg

SEQ ID NO: 2585542 - DNA, 25 bp, Homo sapien
ttcctgatgggcctccggcacttgg

SEQ ID NO: 2585543 - DNA, 25 bp, Homo sapien
aaccagggaaaaccgctagcctcag

SEQ ID NO: 2585544 - DNA, 25 bp, Homo sapien
agaagtgggtgacgtccacctccaa

SEQ ID NO: 2585545 - DNA, 25 bp, Homo sapien
agcgcagttaaatacccacggcaaa

SEQ ID NO: 2585546 - DNA, 25 bp, Homo sapien
gattcccttaaatgtggccttcacc

SEQ ID NO: 2585547 - DNA, 25 bp, Homo sapien
taaatgtggccttcacccacacggg

SEQ ID NO: 2585548 - DNA, 25 bp, Homo sapien
cacccacacgggccctgcggattta

SEQ ID NO: 2585549 - DNA, 25 bp, Homo sapien
tgagcatcctttgattcccttaaat

SEQ ID NO: 2585550 - DNA, 25 bp, Homo sapien
tgcatgcgaagggcctcccacatca

SEQ ID NO: 2585551 - DNA, 25 bp, Homo sapien
ctgcatgcgaagggcctcccacatc

SEQ ID NO: 2585552 - DNA, 25 bp, Homo sapien
tgcgaagggcctcccacatcacagg

SEQ ID NO: 2585553 - DNA, 25 bp, Homo sapien
catgcgaagggcctcccacatcaca

SEQ ID NO: 2585554 - DNA, 25 bp, Homo sapien
ccccataagtcacagccggttcccg

SEQ ID NO: 2585555 - DNA, 25 bp, Homo sapien
gggacagccccataagtcacagccg

SEQ ID NO: 2585556 - DNA, 25 bp, Homo sapien
acagccccataagtcacagccggtt

SEQ ID NO: 2585557 - DNA, 25 bp, Homo sapien
gccccataagtcacagccggttccc

SEQ ID NO: 2585558 - DNA, 25 bp, Homo sapien
cacgtgagcctgtagccaggaagtg

SEQ ID NO: 2585559 - DNA, 25 bp, Homo sapien
cccacgtgagcctgtagccaggaag

SEQ ID NO: 2585560 - DNA, 25 bp, Homo sapien
tgagcctgtagccaggaagtgggca

SEQ ID NO: 2585561 - DNA, 25 bp, Homo sapien
cgtgagcctgtagccaggaagtggg

SEQ ID NO: 2585562 - DNA, 25 bp, Homo sapien
ggtggacgaggctcttgcggtgcgt

SEQ ID NO: 2585563 - DNA, 25 bp, Homo sapien
tggccacccgcgctgaagatgagga

SEQ ID NO: 2585564 - DNA, 25 bp, Homo sapien
aagatgaggacaagcccggggcgtg

SEQ ID NO: 2585565 - DNA, 25 bp, Homo sapien
tgggtggtgggcgtttcctctgtgg

SEQ ID NO: 2585566 - DNA, 25 bp, Homo sapien
ccggacatgcaaagacgcgctattt

SEQ ID NO: 2585567 - DNA, 25 bp, Homo sapien
taacatcccatgtggtgggtgagcc

SEQ ID NO: 2585568 - DNA, 25 bp, Homo sapien
taggaatacggcactcagcgcagtg

SEQ ID NO: 2585569 - DNA, 25 bp, Homo sapien
tgatcgtgaagtcgtcggtcctagg

SEQ ID NO: 2585570 - DNA, 25 bp, Homo sapien
acatagaagttgtctccttcattcc

SEQ ID NO: 2585571 - DNA, 25 bp, Homo sapien
tccccttgatcaacgacatagaagt

SEQ ID NO: 2585572 - DNA, 25 bp, Homo sapien
cacttccccttgatcaacgacatag

SEQ ID NO: 2585573 - DNA, 25 bp, Homo sapien
gatcaacgacatagaagttgtctcc

SEQ ID NO: 2585574 - DNA, 25 bp, Homo sapien
gtacaagtctatatatatccttttg

SEQ ID NO: 2585575 - DNA, 25 bp, Homo sapien
tcaccatgctggtcacctggaccac

SEQ ID NO: 2585576 - DNA, 25 bp, Homo sapien
cgtgcctgcccttatgctatttttt

SEQ ID NO: 2585577 - DNA, 25 bp, Homo sapien
ttttaagtgcatagtccatttttcc

SEQ ID NO: 2585578 - DNA, 25 bp, Homo sapien
tgagtgacagggaacatggcatcga

SEQ ID NO: 2585579 - DNA, 25 bp, Homo sapien
gacagggaacatggcatcgaatatg

SEQ ID NO: 2585580 - DNA, 25 bp, Homo sapien
agtctccccagcgatgtgagtgaca

SEQ ID NO: 2585581 - DNA, 25 bp, Homo sapien
ttgctgtataacagtctccccagcg

SEQ ID NO: 2585582 - DNA, 25 bp, Homo sapien
tcttgtgtaaatcgcttcacagtca

SEQ ID NO: 2585583 - DNA, 25 bp, Homo sapien
gcaaaacacgccaaattagggctgc

SEQ ID NO: 2585584 - DNA, 25 bp, Homo sapien
ggcagcacagggacatttaaaccct

SEQ ID NO: 2585585 - DNA, 25 bp, Homo sapien
tttcacagtcttgtgtaaatcgctt

SEQ ID NO: 2585586 - DNA, 25 bp, Homo sapien
aggccgagtctcagggctgcgccaa

SEQ ID NO: 2585587 - DNA, 25 bp, Homo sapien
ttcatgacacgcaaactcgaagccg

SEQ ID NO: 2585588 - DNA, 25 bp, Homo sapien
tcgaagccggtgaggccgagtctca

SEQ ID NO: 2585589 - DNA, 25 bp, Homo sapien
gaagcctggctgtccaatgttccaa

SEQ ID NO: 2585590 - DNA, 25 bp, Homo sapien
ggcacccgggacaagtggggaagca

SEQ ID NO: 2585591 - DNA, 25 bp, Homo sapien
gcacccgggacaagtggggaagcac

SEQ ID NO: 2585592 - DNA, 25 bp, Homo sapien
gaccatgcagacaggacccaagggg

SEQ ID NO: 2585593 - DNA, 25 bp, Homo sapien
tccactctccgcccatgggtggtgg

SEQ ID NO: 2585594 - DNA, 25 bp, Homo sapien
ccactctccgcccatgggtggtggg

SEQ ID NO: 2585595 - DNA, 25 bp, Homo sapien
cactctccgcccatgggtggtgggg

SEQ ID NO: 2585596 - DNA, 25 bp, Homo sapien
tatgcaccgtaaggctaatagcaac

SEQ ID NO: 2585597 - DNA, 25 bp, Homo sapien
aaatagggtgtcgatgaaactgtac

SEQ ID NO: 2585598 - DNA, 25 bp, Homo sapien
taacaccgtgtggtcattaaaaatg

SEQ ID NO: 2585599 - DNA, 25 bp, Homo sapien
taatattcaccgaagcactgtcagc

SEQ ID NO: 2585600 - DNA, 25 bp, Homo sapien
tcatcattggagaaaacacgacacg

SEQ ID NO: 2585601 - DNA, 25 bp, Homo sapien
caacgtctgaggaagcgtacgggat

SEQ ID NO: 2585602 - DNA, 25 bp, Homo sapien
gtgagtaactcagcccatcgttccg

SEQ ID NO: 2585603 - DNA, 25 bp, Homo sapien
acacgacacgtacgcttaagggcag

SEQ ID NO: 2585604 - DNA, 25 bp, Homo sapien
gctgctagaagggtcacacatgtcc

SEQ ID NO: 2585605 - DNA, 25 bp, Homo sapien
ccagaggtggcctgacaggtaaaca

SEQ ID NO: 2585606 - DNA, 25 bp, Homo sapien
tcatcatgtgtggtacaagtcccaa

SEQ ID NO: 2585607 - DNA, 25 bp, Homo sapien
gagtgatgcaaatggagcggcccat

SEQ ID NO: 2585608 - DNA, 25 bp, Homo sapien
ctctctattttgaaaatctttgaac

SEQ ID NO: 2585609 - DNA, 25 bp, Homo sapien
tcaactctctattttgaaaatcttt

SEQ ID NO: 2585610 - DNA, 25 bp, Homo sapien
aactctctattttgaaaatctttga

SEQ ID NO: 2585611 - DNA, 25 bp, Homo sapien
ctctattttgaaaatctttgaacct

SEQ ID NO: 2585612 - DNA, 25 bp, Homo sapien
tgcatcaaatcagctttctggtaaa

SEQ ID NO: 2585613 - DNA, 25 bp, Homo sapien
aatttactcttcagtcggcagctgc

SEQ ID NO: 2585614 - DNA, 25 bp, Homo sapien
tgaggatgtgagaatggcctccaca

SEQ ID NO: 2585615 - DNA, 25 bp, Homo sapien
gagtgaattaagcagttactggaga

SEQ ID NO: 2585616 - DNA, 25 bp, Homo sapien
catttcaggttgacagtagccttcc

SEQ ID NO: 2585617 - DNA, 25 bp, Homo sapien
gcaattggaccccattctggttcaa

SEQ ID NO: 2585618 - DNA, 25 bp, Homo sapien
caaaaccttggtgtggatatctact

SEQ ID NO: 2585619 - DNA, 25 bp, Homo sapien
ctggttggtgttcagttatgggccc

SEQ ID NO: 2585620 - DNA, 25 bp, Homo sapien
tcttccaagtcactggtgtataaac

SEQ ID NO: 2585621 - DNA, 25 bp, Homo sapien
cagagactggctgcagaagaactca

SEQ ID NO: 2585622 - DNA, 25 bp, Homo sapien
tgtaagattctagtatcttcttcca

SEQ ID NO: 2585623 - DNA, 25 bp, Homo sapien
taagattctagtatcttcttccaag

SEQ ID NO: 2585624 - DNA, 25 bp, Homo sapien
cagctgggagaggacacacagcagc

SEQ ID NO: 2585625 - DNA, 25 bp, Homo sapien
ctgggctaatccttccagctgggag

SEQ ID NO: 2585626 - DNA, 25 bp, Homo sapien
gcagctgctggttgttgactgccac

SEQ ID NO: 2585627 - DNA, 25 bp, Homo sapien
accaccactagcatccccactcctt

SEQ ID NO: 2585628 - DNA, 25 bp, Homo sapien
gaggtgatgacacgtgcacccgtgt

SEQ ID NO: 2585629 - DNA, 25 bp, Homo sapien
gtgatgacacgtgcacccgtgttgg

SEQ ID NO: 2585630 - DNA, 25 bp, Homo sapien
ggtgatgacacgtgcacccgtgttg

SEQ ID NO: 2585631 - DNA, 25 bp, Homo sapien
aggtgatgacacgtgcacccgtgtt

SEQ ID NO: 2585632 - DNA, 25 bp, Homo sapien
tcccactctgctcggtgatgtgacc

SEQ ID NO: 2585633 - DNA, 25 bp, Homo sapien
agtccaagatagccgtgggtcccac

SEQ ID NO: 2585634 - DNA, 25 bp, Homo sapien
gtgggtcccactctgctcggtgatg

SEQ ID NO: 2585635 - DNA, 25 bp, Homo sapien
cactttttccttggttagcatgatg

SEQ ID NO: 2585636 - DNA, 25 bp, Homo sapien
ggaactggtcacctagtcagtgaag

SEQ ID NO: 2585637 - DNA, 25 bp, Homo sapien
tctcagatctcgagactggccatct

SEQ ID NO: 2585638 - DNA, 25 bp, Homo sapien
aatgctcaaatacaggccaaaggtc

SEQ ID NO: 2585639 - DNA, 25 bp, Homo sapien
tctggagtgaagctaggaactggtc

SEQ ID NO: 2585640 - DNA, 25 bp, Homo sapien
tgccctcagtgatgtaatttatgtt

SEQ ID NO: 2585641 - DNA, 25 bp, Homo sapien
gatacagctgaagttaatctgaccg

SEQ ID NO: 2585642 - DNA, 25 bp, Homo sapien
tgaagttaatctgaccgttcttggg

SEQ ID NO: 2585643 - DNA, 25 bp, Homo sapien
gtaatttatgttgttggcattgata

SEQ ID NO: 2585644 - DNA, 25 bp, Homo sapien
tttcctttggaagacacatctctga

SEQ ID NO: 2585645 - DNA, 25 bp, Homo sapien
tctctgagctctctgtgaggaggac

SEQ ID NO: 2585646 - DNA, 25 bp, Homo sapien
ctaaagttttattccaatcagtgtt

SEQ ID NO: 2585647 - DNA, 25 bp, Homo sapien
ggaagacacatctctgagctctctg

SEQ ID NO: 2585648 - DNA, 25 bp, Homo sapien
ggacctgtgggacaaaagcctatca

SEQ ID NO: 2585649 - DNA, 25 bp, Homo sapien
tattgcctgagaagtggactggagc

SEQ ID NO: 2585650 - DNA, 25 bp, Homo sapien
aaagcaccggcagaactatattgga

SEQ ID NO: 2585651 - DNA, 25 bp, Homo sapien
aaattatcaaatactatgggccagc

SEQ ID NO: 2585652 - DNA, 25 bp, Homo sapien
tatatgaggcaaccaaagtgggaga

SEQ ID NO: 2585653 - DNA, 25 bp, Homo sapien
ttgccacatatggattcctaactac

SEQ ID NO: 2585654 - DNA, 25 bp, Homo sapien
cagccagacacaaggtggcaagtgt

SEQ ID NO: 2585655 - DNA, 25 bp, Homo sapien
taactactcgctcctagcaaagcct

SEQ ID NO: 2585656 - DNA, 25 bp, Homo sapien
tccaggttggagaacgtgcttgtac

SEQ ID NO: 2585657 - DNA, 25 bp, Homo sapien
ggttggagaacgtgcttgtacttct

SEQ ID NO: 2585658 - DNA, 25 bp, Homo sapien
gcatccaggttggagaacgtgcttg

SEQ ID NO: 2585659 - DNA, 25 bp, Homo sapien
caggttggagaacgtgcttgtactt

SEQ ID NO: 2585660 - DNA, 25 bp, Homo sapien
gagggagaaacgatggaccctcttc

SEQ ID NO: 2585661 - DNA, 25 bp, Homo sapien
ttccacactgtgtcccttattaaag

SEQ ID NO: 2585662 - DNA, 25 bp, Homo sapien
gggttcctggtgtagagcactccaa

SEQ ID NO: 2585663 - DNA, 25 bp, Homo sapien
gagactctgtcggtataaattaaat

SEQ ID NO: 2585664 - DNA, 25 bp, Homo sapien
ttgggataaacgattcctgcagggc

SEQ ID NO: 2585665 - DNA, 25 bp, Homo sapien
ttttgtgttggactcgcgcgctctg

SEQ ID NO: 2585666 - DNA, 25 bp, Homo sapien
ccatttacgcgagtgggatctccgc

SEQ ID NO: 2585667 - DNA, 25 bp, Homo sapien
gccagggctgtgcagaaaaacacgt

SEQ ID NO: 2585668 - DNA, 25 bp, Homo sapien
ctgtgcacaacggaattgtggactt

SEQ ID NO: 2585669 - DNA, 25 bp, Homo sapien
cgcccccaatgcaagaagagtgcat

SEQ ID NO: 2585670 - DNA, 25 bp, Homo sapien
tcggtccacaattggggactcgccc

SEQ ID NO: 2585671 - DNA, 25 bp, Homo sapien
ggaattgtggacttcggtccacaat

SEQ ID NO: 2585672 - DNA, 25 bp, Homo sapien
tctccagggcacgcccctccactaa

SEQ ID NO: 2585673 - DNA, 25 bp, Homo sapien
ctccagggcacgcccctccactaac

SEQ ID NO: 2585674 - DNA, 25 bp, Homo sapien
tccagggcacgcccctccactaacc

SEQ ID NO: 2585675 - DNA, 25 bp, Homo sapien
cagggcacgcccctccactaaccca

SEQ ID NO: 2585676 - DNA, 25 bp, Homo sapien
tcaatctttagccagcatactctct

SEQ ID NO: 2585677 - DNA, 25 bp, Homo sapien
agattttggggcctgcccagtctgt

SEQ ID NO: 2585678 - DNA, 25 bp, Homo sapien
ctggaaccgttgaagagattttggg

SEQ ID NO: 2585679 - DNA, 25 bp, Homo sapien
tttaacggtagtgcggaggaatgct

SEQ ID NO: 2585680 - DNA, 25 bp, Homo sapien
cagctgcctaagttcaaccccagtg

SEQ ID NO: 2585681 - DNA, 25 bp, Homo sapien
gatcagccccctaggtctgtctcta

SEQ ID NO: 2585682 - DNA, 25 bp, Homo sapien
aatcagtgactggaagcgtatgagg

SEQ ID NO: 2585683 - DNA, 25 bp, Homo sapien
tcaaccccagtgagatcaaattcat

SEQ ID NO: 2585684 - DNA, 25 bp, Homo sapien
acctccacgtgaaagcccagagact

SEQ ID NO: 2585685 - DNA, 25 bp, Homo sapien
aatgaagcgccagaccccatggctg

SEQ ID NO: 2585686 - DNA, 25 bp, Homo sapien
tactccacatgggaataagctggga

SEQ ID NO: 2585687 - DNA, 25 bp, Homo sapien
agaaagctccaaccctggtgcagaa

SEQ ID NO: 2585688 - DNA, 25 bp, Homo sapien
aacaatcgagggctgtgaaccacac

SEQ ID NO: 2585689 - DNA, 25 bp, Homo sapien
tctgacccagaaaacgttaagagcc

SEQ ID NO: 2585690 - DNA, 25 bp, Homo sapien
cactgatatccaccattggagactg

SEQ ID NO: 2585691 - DNA, 25 bp, Homo sapien
tcaggacttccatgtatctagctcc

SEQ ID NO: 2585692 - DNA, 25 bp, Homo sapien
tgcttctaaagcatcaagggaaagt

SEQ ID NO: 2585693 - DNA, 25 bp, Homo sapien
tcatgagtccataatgacaagatgg

SEQ ID NO: 2585694 - DNA, 25 bp, Homo sapien
cttctaaagcatcaagggaaagttc

SEQ ID NO: 2585695 - DNA, 25 bp, Homo sapien
caagatggttaaaacatcccactcc

SEQ ID NO: 2585696 - DNA, 25 bp, Homo sapien
ggtgacgataacactccagaagcga

SEQ ID NO: 2585697 - DNA, 25 bp, Homo sapien
cagcgatggcagctcgaaggtggcc

SEQ ID NO: 2585698 - DNA, 25 bp, Homo sapien
ggaggtggcgtacttctccttgccc

SEQ ID NO: 2585699 - DNA, 25 bp, Homo sapien
cgctccgacacggaggtggcgtact

SEQ ID NO: 2585700 - DNA, 25 bp, Homo sapien
ggccagccgagaccattagggacat

SEQ ID NO: 2585701 - DNA, 25 bp, Homo sapien
acggtgagctgcagggtggcggcgg

SEQ ID NO: 2585702 - DNA, 25 bp, Homo sapien
cagcacggtgagctgcagggtggcg

SEQ ID NO: 2585703 - DNA, 25 bp, Homo sapien
agcagcgcgcggtgcagcacggtga

SEQ ID NO: 2585704 - DNA, 25 bp, Homo sapien
cttgtcgaggccgagcagcgcgcgg

SEQ ID NO: 2585705 - DNA, 25 bp, Homo sapien
agatcccgcaggtccacctcggcgc

SEQ ID NO: 2585706 - DNA, 25 bp, Homo sapien
tcctgcggccctggtcgcggtgcag

SEQ ID NO: 2585707 - DNA, 25 bp, Homo sapien
cctggtcgcggtgcagatcccgcag

SEQ ID NO: 2585708 - DNA, 25 bp, Homo sapien
tcgcggtgcagatcccgcaggtcca

SEQ ID NO: 2585709 - DNA, 25 bp, Homo sapien
cttggaagatcaagtagctgatgat

SEQ ID NO: 2585710 - DNA, 25 bp, Homo sapien
gagactggcagggtatcacctgaga

SEQ ID NO: 2585711 - DNA, 25 bp, Homo sapien
cagatactgtcagtgtacttttcca

SEQ ID NO: 2585712 - DNA, 25 bp, Homo sapien
tcttttaatgcctgcagaacttgga

SEQ ID NO: 2585713 - DNA, 25 bp, Homo sapien
cactcagggagctgggttgccagtc

SEQ ID NO: 2585714 - DNA, 25 bp, Homo sapien
cccagtggtctgctctattctgtca

SEQ ID NO: 2585715 - DNA, 25 bp, Homo sapien
gccagtctccaacgttctttttgtc

SEQ ID NO: 2585716 - DNA, 25 bp, Homo sapien
caggagtgagagtaccccagtggtc

SEQ ID NO: 2585717 - DNA, 25 bp, Homo sapien
gatgctgccgcgcgagtggtgtcct

SEQ ID NO: 2585718 - DNA, 25 bp, Homo sapien
tgctgccgcgcgagtggtgtcctct

SEQ ID NO: 2585719 - DNA, 25 bp, Homo sapien
tttggatgctgccgcgcgagtggtg

SEQ ID NO: 2585720 - DNA, 25 bp, Homo sapien
tggatgctgccgcgcgagtggtgtc

SEQ ID NO: 2585721 - DNA, 25 bp, Homo sapien
gcgcgtccgtaggcgctctccaggt

SEQ ID NO: 2585722 - DNA, 25 bp, Homo sapien
gaacgcgtcaagtttgaccttcttg

SEQ ID NO: 2585723 - DNA, 25 bp, Homo sapien
tccaggtcggccgaagagaacgcgt

SEQ ID NO: 2585724 - DNA, 25 bp, Homo sapien
ctttatcgtgcagtggcgcgccgag

SEQ ID NO: 2585725 - DNA, 25 bp, Homo sapien
atgaagaaggcgtccgccgcgtagc

SEQ ID NO: 2585726 - DNA, 25 bp, Homo sapien
acagctgctgcgtacatgggctccg

SEQ ID NO: 2585727 - DNA, 25 bp, Homo sapien
agggccccacgtagtcgctgaggta

SEQ ID NO: 2585728 - DNA, 25 bp, Homo sapien
tcggcgtcgccatcgtagacggacg

SEQ ID NO: 2585729 - DNA, 25 bp, Homo sapien
gcagcgccggcattggaagccttac

SEQ ID NO: 2585730 - DNA, 25 bp, Homo sapien
cggcggcagcgccggcattggaagc

SEQ ID NO: 2585731 - DNA, 25 bp, Homo sapien
ggcccggatcccaagctgcgcccgc

SEQ ID NO: 2585732 - DNA, 25 bp, Homo sapien
aggctgtggagggagcggcggcagc

SEQ ID NO: 2585733 - DNA, 25 bp, Homo sapien
gagcgcgaagctcttcttgcagcgc

SEQ ID NO: 2585734 - DNA, 25 bp, Homo sapien
tcgtagtgcttgttgagataggact

SEQ ID NO: 2585735 - DNA, 25 bp, Homo sapien
gcccttgaagcaggccgactcgtag

SEQ ID NO: 2585736 - DNA, 25 bp, Homo sapien
gccatggccggcatggacacgtaca

SEQ ID NO: 2585737 - DNA, 25 bp, Homo sapien
cgtattgctgagagccgacctggct

SEQ ID NO: 2585738 - DNA, 25 bp, Homo sapien
tcgaccctattgctgggagaaagcc

SEQ ID NO: 2585739 - DNA, 25 bp, Homo sapien
tcagagacccaactcggagatgagg

SEQ ID NO: 2585740 - DNA, 25 bp, Homo sapien
aacgcgtctaacactgccgggagtt

SEQ ID NO: 2585741 - DNA, 25 bp, Homo sapien
ctcagtaactctagaggcggcggca

SEQ ID NO: 2585742 - DNA, 25 bp, Homo sapien
ttattgctctatagtcggcttcgga

SEQ ID NO: 2585743 - DNA, 25 bp, Homo sapien
cggcttcggactacctaagagggag

SEQ ID NO: 2585744 - DNA, 25 bp, Homo sapien
gcggcagcttcgcatgcagtgcgca

SEQ ID NO: 2585745 - DNA, 25 bp, Homo sapien
tcctggcggactcagcaattggcct

SEQ ID NO: 2585746 - DNA, 25 bp, Homo sapien
gcctaactcaaaggtagagcccagt

SEQ ID NO: 2585747 - DNA, 25 bp, Homo sapien
tgaatgattaatgcctgaaggaggg

SEQ ID NO: 2585748 - DNA, 25 bp, Homo sapien
catgtgaacctagggacctggtctc

SEQ ID NO: 2585749 - DNA, 25 bp, Homo sapien
ggacatggcagatgtgtgttggcca

SEQ ID NO: 2585750 - DNA, 25 bp, Homo sapien
gacatggcagatgtgtgttggccag

SEQ ID NO: 2585751 - DNA, 25 bp, Homo sapien
acatggcagatgtgtgttggccaga

SEQ ID NO: 2585752 - DNA, 25 bp, Homo sapien
ttctccagccatggctctgcccctg

SEQ ID NO: 2585753 - DNA, 25 bp, Homo sapien
ccttcttctccagccatggctctgc

SEQ ID NO: 2585754 - DNA, 25 bp, Homo sapien
aggctacagctggcaccttcttctc

SEQ ID NO: 2585755 - DNA, 25 bp, Homo sapien
ttcttctccagccatggctctgccc

SEQ ID NO: 2585756 - DNA, 25 bp, Homo sapien
cagagcggtgggtcatccttgtggg

SEQ ID NO: 2585757 - DNA, 25 bp, Homo sapien
ctgctgtgcagagcggtgggtcatc

SEQ ID NO: 2585758 - DNA, 25 bp, Homo sapien
ctgtgcagagcggtgggtcatcctt

SEQ ID NO: 2585759 - DNA, 25 bp, Homo sapien
gcagagcggtgggtcatccttgtgg

SEQ ID NO: 2585760 - DNA, 25 bp, Homo sapien
tcgctaagtcggttattgtgctgct

SEQ ID NO: 2585761 - DNA, 25 bp, Homo sapien
gtgcatgcggcacaggtgggcaggc

SEQ ID NO: 2585762 - DNA, 25 bp, Homo sapien
tacctgaattcgctaagtcggttat

SEQ ID NO: 2585763 - DNA, 25 bp, Homo sapien
gctttctccttaggtaggtagacag

SEQ ID NO: 2585764 - DNA, 25 bp, Homo sapien
gcacctcgggccctacttgtagaat

SEQ ID NO: 2585765 - DNA, 25 bp, Homo sapien
cctcgggccctacttgtagaatcag

SEQ ID NO: 2585766 - DNA, 25 bp, Homo sapien
tgtagaatcagtacaaaataggtgc

SEQ ID NO: 2585767 - DNA, 25 bp, Homo sapien
tcagtacaaaataggtgctacctaa

SEQ ID NO: 2585768 - DNA, 25 bp, Homo sapien
ccggggagctggtgctattgtgctt

SEQ ID NO: 2585769 - DNA, 25 bp, Homo sapien
tctccttgtggaggtgcggtgctcc

SEQ ID NO: 2585770 - DNA, 25 bp, Homo sapien
caaatgggggcggaagaggggcacg

SEQ ID NO: 2585771 - DNA, 25 bp, Homo sapien
cctattccgggtgggaatatgtaca

SEQ ID NO: 2585772 - DNA, 25 bp, Homo sapien
ggtccaacccagctatccatggagg

SEQ ID NO: 2585773 - DNA, 25 bp, Homo sapien
gctatccatggaggcatccgcagac

SEQ ID NO: 2585774 - DNA, 25 bp, Homo sapien
ccatggaggcatccgcagacactgg

SEQ ID NO: 2585775 - DNA, 25 bp, Homo sapien
ctggaaccggtccaacccagctatc

SEQ ID NO: 2585776 - DNA, 25 bp, Homo sapien
tactcattctgtctagagcccttgg

SEQ ID NO: 2585777 - DNA, 25 bp, Homo sapien
ctagagcccttgggcgatggttgca

SEQ ID NO: 2585778 - DNA, 25 bp, Homo sapien
ctactcattctgtctagagcccttg

SEQ ID NO: 2585779 - DNA, 25 bp, Homo sapien
actcattctgtctagagcccttggg

SEQ ID NO: 2585780 - DNA, 25 bp, Homo sapien
ctggcgcgcttctgctccgcgagcc

SEQ ID NO: 2585781 - DNA, 25 bp, Homo sapien
gagccctctggttaccccggcagga

SEQ ID NO: 2585782 - DNA, 25 bp, Homo sapien
cccggcaggaacctgcttttcttcg

SEQ ID NO: 2585783 - DNA, 25 bp, Homo sapien
agtaacgtccctggcgcgcttctgc

SEQ ID NO: 2585784 - DNA, 25 bp, Homo sapien
ctgggagtcgtagtcgccgcggccg

SEQ ID NO: 2585785 - DNA, 25 bp, Homo sapien
cctgggagtcgtagtcgccgcggcc

SEQ ID NO: 2585786 - DNA, 25 bp, Homo sapien
ggctgcgggccgcaagtgcgcgcag

SEQ ID NO: 2585787 - DNA, 25 bp, Homo sapien
cgcgcagcgggaacggaccttgcat

SEQ ID NO: 2585788 - DNA, 25 bp, Homo sapien
acggccgcctctctcgtccatttgt

SEQ ID NO: 2585789 - DNA, 25 bp, Homo sapien
gcctctctcgtccatttgtagtccg

SEQ ID NO: 2585790 - DNA, 25 bp, Homo sapien
gccgcctctctcgtccatttgtagt

SEQ ID NO: 2585791 - DNA, 25 bp, Homo sapien
ctctctcgtccatttgtagtccgcg

SEQ ID NO: 2585792 - DNA, 25 bp, Homo sapien
accagcgcgttcaacccgcccgcgt

SEQ ID NO: 2585793 - DNA, 25 bp, Homo sapien
cgcctcaccagcgcgttcaacccgc

SEQ ID NO: 2585794 - DNA, 25 bp, Homo sapien
gccgtagcccgggtgaccgcctcac

SEQ ID NO: 2585795 - DNA, 25 bp, Homo sapien
ctgccggccgccgtagcccgggtga

SEQ ID NO: 2585796 - DNA, 25 bp, Homo sapien
cacccggccgcagccaagcgtgggc

SEQ ID NO: 2585797 - DNA, 25 bp, Homo sapien
gccgggttcgtagcgcccgaggcgc

SEQ ID NO: 2585798 - DNA, 25 bp, Homo sapien
cgcgaccctgtcctccggcgccggg

SEQ ID NO: 2585799 - DNA, 25 bp, Homo sapien
tggctcgagggccgcgaccctgtcc

SEQ ID NO: 2585800 - DNA, 25 bp, Homo sapien
gccgtggctcgagggccgcgaccct

SEQ ID NO: 2585801 - DNA, 25 bp, Homo sapien
ccgcgaccctgtcctccggcgccgg

SEQ ID NO: 2585802 - DNA, 25 bp, Homo sapien
acgccggcgtctccgtccttgttgg

SEQ ID NO: 2585803 - DNA, 25 bp, Homo sapien
gcccacgccggcgtctccgtccttg

SEQ ID NO: 2585804 - DNA, 25 bp, Homo sapien
cgctgcccacgccggcgtctccgtc

SEQ ID NO: 2585805 - DNA, 25 bp, Homo sapien
cgcggctcccacgtcggggcccgca

SEQ ID NO: 2585806 - DNA, 25 bp, Homo sapien
cggaagaaaggagctcacacccaga

SEQ ID NO: 2585807 - DNA, 25 bp, Homo sapien
gccggaagaaaggagctcacaccca

SEQ ID NO: 2585808 - DNA, 25 bp, Homo sapien
ggaagaaaggagctcacacccagag

SEQ ID NO: 2585809 - DNA, 25 bp, Homo sapien
ggccggaagaaaggagctcacaccc

SEQ ID NO: 2585810 - DNA, 25 bp, Homo sapien
gcaggctccctgcacctcgcagacc

SEQ ID NO: 2585811 - DNA, 25 bp, Homo sapien
tgggcctgggttcaagatggttggg

SEQ ID NO: 2585812 - DNA, 25 bp, Homo sapien
ggttggggcaggctccctgcacctc

SEQ ID NO: 2585813 - DNA, 25 bp, Homo sapien
ggctgggcctgggttcaagatggtt

SEQ ID NO: 2585814 - DNA, 25 bp, Homo sapien
ccagcagcatgtgggctacagggca

SEQ ID NO: 2585815 - DNA, 25 bp, Homo sapien
gtgcccacagagctccaagcagtca

SEQ ID NO: 2585816 - DNA, 25 bp, Homo sapien
agagctccaagcagtcagtgcggcc

SEQ ID NO: 2585817 - DNA, 25 bp, Homo sapien
caagcagtcagtgcggccagcagca

SEQ ID NO: 2585818 - DNA, 25 bp, Homo sapien
gccatgtactctggctgtggactag

SEQ ID NO: 2585819 - DNA, 25 bp, Homo sapien
cactgccatgtactctggctgtgga

SEQ ID NO: 2585820 - DNA, 25 bp, Homo sapien
tggccactgccatgtactctggctg

SEQ ID NO: 2585821 - DNA, 25 bp, Homo sapien
gtactctggctgtggactagcactg

SEQ ID NO: 2585822 - DNA, 25 bp, Homo sapien
caggatgccacggtagttgctgaag

SEQ ID NO: 2585823 - DNA, 25 bp, Homo sapien
agttcaggatgccacggtagttgct

SEQ ID NO: 2585824 - DNA, 25 bp, Homo sapien
atgccacggtagttgctgaagccac

SEQ ID NO: 2585825 - DNA, 25 bp, Homo sapien
ggatgccacggtagttgctgaagcc

SEQ ID NO: 2585826 - DNA, 25 bp, Homo sapien
tcctggggggctcctaggacccaca

SEQ ID NO: 2585827 - DNA, 25 bp, Homo sapien
cctggggggctcctaggacccacag

SEQ ID NO: 2585828 - DNA, 25 bp, Homo sapien
ccaaagctgccaatggacggtaccc

SEQ ID NO: 2585829 - DNA, 25 bp, Homo sapien
gcagaagccaaagctgccaatggac

SEQ ID NO: 2585830 - DNA, 25 bp, Homo sapien
gaagccaaagctgccaatggacggt

SEQ ID NO: 2585831 - DNA, 25 bp, Homo sapien
aaagctgccaatggacggtacccac

SEQ ID NO: 2585832 - DNA, 25 bp, Homo sapien
gcatggacacgtggcccacactgtc

SEQ ID NO: 2585833 - DNA, 25 bp, Homo sapien
cactgtcactggcctctcccgaggg

SEQ ID NO: 2585834 - DNA, 25 bp, Homo sapien
ctgcatggacacgtggcccacactg

SEQ ID NO: 2585835 - DNA, 25 bp, Homo sapien
cttctgcatggacacgtggcccaca

SEQ ID NO: 2585836 - DNA, 25 bp, Homo sapien
aagcactaccaacacctccattaag

SEQ ID NO: 2585837 - DNA, 25 bp, Homo sapien
agacctggctgaccacccggagctc

SEQ ID NO: 2585838 - DNA, 25 bp, Homo sapien
tcgggcctcatgcggtagtgaactg

SEQ ID NO: 2585839 - DNA, 25 bp, Homo sapien
gctgggccccaatgccgcagacctg

SEQ ID NO: 2585840 - DNA, 25 bp, Homo sapien
ttctccagaaataaccgggcattgc

SEQ ID NO: 2585841 - DNA, 25 bp, Homo sapien
ctccagaaataaccgggcattgctc

SEQ ID NO: 2585842 - DNA, 25 bp, Homo sapien
aggttctccagaaataaccgggcat

SEQ ID NO: 2585843 - DNA, 25 bp, Homo sapien
gaaataaccgggcattgctcaagat

SEQ ID NO: 2585844 - DNA, 25 bp, Homo sapien
gggcgggccagctatagggatcctt

SEQ ID NO: 2585845 - DNA, 25 bp, Homo sapien
acagagaaaccacctggatggggtc

SEQ ID NO: 2585846 - DNA, 25 bp, Homo sapien
cgggccagctatagggatccttcag

SEQ ID NO: 2585847 - DNA, 25 bp, Homo sapien
caataaccaggcatggggcgggcca

SEQ ID NO: 2585848 - DNA, 25 bp, Homo sapien
aatgcagccacagcaaagacattgg

SEQ ID NO: 2585849 - DNA, 25 bp, Homo sapien
tggaatgcagccacagcaaagacat

SEQ ID NO: 2585850 - DNA, 25 bp, Homo sapien
gaatgcagccacagcaaagacattg

SEQ ID NO: 2585851 - DNA, 25 bp, Homo sapien
gcagccacagcaaagacattggccg

SEQ ID NO: 2585852 - DNA, 25 bp, Homo sapien
ctggagtgatagactcaaccagtaa

SEQ ID NO: 2585853 - DNA, 25 bp, Homo sapien
tagactcaaccagtaagaccacagc

SEQ ID NO: 2585854 - DNA, 25 bp, Homo sapien
ccagtaagaccacagccgctgggaa

SEQ ID NO: 2585855 - DNA, 25 bp, Homo sapien
aaccagtaagaccacagccgctggg

SEQ ID NO: 2585856 - DNA, 25 bp, Homo sapien
ctggccctgcggcaccatgagttga

SEQ ID NO: 2585857 - DNA, 25 bp, Homo sapien
ttgacgtcgcggtaggagaagagct

SEQ ID NO: 2585858 - DNA, 25 bp, Homo sapien
aggatggtgtgcgccatcagcgcca

SEQ ID NO: 2585859 - DNA, 25 bp, Homo sapien
accatgagttgacgtcgcggtagga

SEQ ID NO: 2585860 - DNA, 25 bp, Homo sapien
gggctggtggggccctgctgctgcc

SEQ ID NO: 2585861 - DNA, 25 bp, Homo sapien
agggggctggtggggccctgctgct

SEQ ID NO: 2585862 - DNA, 25 bp, Homo sapien
ctacgagcacagcagagtgggaggg

SEQ ID NO: 2585863 - DNA, 25 bp, Homo sapien
ggagggggctggtggggccctgctg

SEQ ID NO: 2585864 - DNA, 25 bp, Homo sapien
cacggtgtgcggggcagcagcactg

SEQ ID NO: 2585865 - DNA, 25 bp, Homo sapien
attgtccgggtagctcacggtgtgc

SEQ ID NO: 2585866 - DNA, 25 bp, Homo sapien
cgcggtaggtcagattgtccgggta

SEQ ID NO: 2585867 - DNA, 25 bp, Homo sapien
gtaggtcagattgtccgggtagctc

SEQ ID NO: 2585868 - DNA, 25 bp, Homo sapien
catctcaaggatccgtcgcagcaga

SEQ ID NO: 2585869 - DNA, 25 bp, Homo sapien
gggaaagttgagctcgtagcacaag

SEQ ID NO: 2585870 - DNA, 25 bp, Homo sapien
aagttgagctcgtagcacaaggtgg

SEQ ID NO: 2585871 - DNA, 25 bp, Homo sapien
cagcagaaagcgcttccggatgcgg

SEQ ID NO: 2585872 - DNA, 25 bp, Homo sapien
ctgctggatcagccccacctggagc

SEQ ID NO: 2585873 - DNA, 25 bp, Homo sapien
cagccccacctggagctgggtgaag

SEQ ID NO: 2585874 - DNA, 25 bp, Homo sapien
ctggatcagccccacctggagctgg

SEQ ID NO: 2585875 - DNA, 25 bp, Homo sapien
tcagccccacctggagctgggtgaa

SEQ ID NO: 2585876 - DNA, 25 bp, Homo sapien
atgcccagctacacccaaccctgcc

SEQ ID NO: 2585877 - DNA, 25 bp, Homo sapien
atggagttctggatggtggggacca

SEQ ID NO: 2585878 - DNA, 25 bp, Homo sapien
agttctggatggtggggaccatcca

SEQ ID NO: 2585879 - DNA, 25 bp, Homo sapien
cttgaagggcttcatggagttctgg

SEQ ID NO: 2585880 - DNA, 25 bp, Homo sapien
tggagttctggatggtggggaccat

SEQ ID NO: 2585881 - DNA, 25 bp, Homo sapien
gctgcaagagcacctgagccactca

SEQ ID NO: 2585882 - DNA, 25 bp, Homo sapien
agctgcaagagcacctgagccactc

SEQ ID NO: 2585883 - DNA, 25 bp, Homo sapien
aggaggcgctcgatgatgcgtgagt

SEQ ID NO: 2585884 - DNA, 25 bp, Homo sapien
tcaggaggcgctcgatgatgcgtga

SEQ ID NO: 2585885 - DNA, 25 bp, Homo sapien
cttcaggaggcgctcgatgatgcgt

SEQ ID NO: 2585886 - DNA, 25 bp, Homo sapien
ccagcttcaggaggcgctcgatgat

SEQ ID NO: 2585887 - DNA, 25 bp, Homo sapien
tgggggtgggcaccaagttctagaa

SEQ ID NO: 2585888 - DNA, 25 bp, Homo sapien
tgggcaccaagttctagaaccttcc

SEQ ID NO: 2585889 - DNA, 25 bp, Homo sapien
tcctgtcctgtgcatgcgccacctg

SEQ ID NO: 2585890 - DNA, 25 bp, Homo sapien
tgtgcatgcgccacctgtccgcact

SEQ ID NO: 2585891 - DNA, 25 bp, Homo sapien
agatgagccagatgaggtgattggg

SEQ ID NO: 2585892 - DNA, 25 bp, Homo sapien
gaactcccggtctccaaactgcatg

SEQ ID NO: 2585893 - DNA, 25 bp, Homo sapien
aagatgagccagatgaggtgattgg

SEQ ID NO: 2585894 - DNA, 25 bp, Homo sapien
gtagaactcccggtctccaaactgc

SEQ ID NO: 2585895 - DNA, 25 bp, Homo sapien
gcacagggatgttccagttctgcca

SEQ ID NO: 2585896 - DNA, 25 bp, Homo sapien
cacagggatgttccagttctgccag

SEQ ID NO: 2585897 - DNA, 25 bp, Homo sapien
catggaaagcggttcaggttcacag

SEQ ID NO: 2585898 - DNA, 25 bp, Homo sapien
tggaaagcggttcaggttcacagcc

SEQ ID NO: 2585899 - DNA, 25 bp, Homo sapien
ggcatggaaagcggttcaggttcac

SEQ ID NO: 2585900 - DNA, 25 bp, Homo sapien
gcatggaaagcggttcaggttcaca

SEQ ID NO: 2585901 - DNA, 25 bp, Homo sapien
gccccgtcgaagcatgggcttgtag

SEQ ID NO: 2585902 - DNA, 25 bp, Homo sapien
tgccccgtcgaagcatgggcttgta

SEQ ID NO: 2585903 - DNA, 25 bp, Homo sapien
ttgctgctgccccgtcgaagcatgg

SEQ ID NO: 2585904 - DNA, 25 bp, Homo sapien
tgctgccccgtcgaagcatgggctt

SEQ ID NO: 2585905 - DNA, 25 bp, Homo sapien
gcccagggatgaggcaagatgcccc

SEQ ID NO: 2585906 - DNA, 25 bp, Homo sapien
ctgcccagggatgaggcaagatgcc

SEQ ID NO: 2585907 - DNA, 25 bp, Homo sapien
atgaggcaagatgccccccagagca

SEQ ID NO: 2585908 - DNA, 25 bp, Homo sapien
gggatgaggcaagatgccccccaga

SEQ ID NO: 2585909 - DNA, 25 bp, Homo sapien
attcgcagagggacgctcaccaggt

SEQ ID NO: 2585910 - DNA, 25 bp, Homo sapien
gcggaacattcgcagagggacgctc

SEQ ID NO: 2585911 - DNA, 25 bp, Homo sapien
gcccagaggcggaacattcgcagag

SEQ ID NO: 2585912 - DNA, 25 bp, Homo sapien
atcatgcccgtgaacgcccagaggc

SEQ ID NO: 2585913 - DNA, 25 bp, Homo sapien
cagctgcgttgccatagttgccctg

SEQ ID NO: 2585914 - DNA, 25 bp, Homo sapien
tgtccgatgatgagcgacagccaca

SEQ ID NO: 2585915 - DNA, 25 bp, Homo sapien
tcgtggacgtacatgaggacggcta

SEQ ID NO: 2585916 - DNA, 25 bp, Homo sapien
ttgccctggaaaaagcggcccacga

SEQ ID NO: 2585917 - DNA, 25 bp, Homo sapien
atcagactgtgtctggcctgctgtc

SEQ ID NO: 2585918 - DNA, 25 bp, Homo sapien
acagcactttattgacaccctcgga

SEQ ID NO: 2585919 - DNA, 25 bp, Homo sapien
tgctgtcgccatccctgaggggtgc

SEQ ID NO: 2585920 - DNA, 25 bp, Homo sapien
agcactttattgacaccctcggacc

SEQ ID NO: 2585921 - DNA, 25 bp, Homo sapien
ggacgcctgagctgagcttttctag

SEQ ID NO: 2585922 - DNA, 25 bp, Homo sapien
cacggtgggtgcaagttgaccatcc

SEQ ID NO: 2585923 - DNA, 25 bp, Homo sapien
tcgcccttgtgggtgtggccatacc

SEQ ID NO: 2585924 - DNA, 25 bp, Homo sapien
ctgagggccagagtgccgattcccg

SEQ ID NO: 2585925 - DNA, 25 bp, Homo sapien
cagaaaggccctgtggactgcccat

SEQ ID NO: 2585926 - DNA, 25 bp, Homo sapien
agaaaggccctgtggactgcccatc

SEQ ID NO: 2585927 - DNA, 25 bp, Homo sapien
ttaatcaagcagtcaccccagcaag

SEQ ID NO: 2585928 - DNA, 25 bp, Homo sapien
catagccattgtgtaccgtagcccc

SEQ ID NO: 2585929 - DNA, 25 bp, Homo sapien
tccagcttggtggattgcagggcct

SEQ ID NO: 2585930 - DNA, 25 bp, Homo sapien
cttgttgggccatagctgcaggtct

SEQ ID NO: 2585931 - DNA, 25 bp, Homo sapien
acgggagcctgtcccgtagctttag

SEQ ID NO: 2585932 - DNA, 25 bp, Homo sapien
aggtgttcgcactcggacaggtgat

SEQ ID NO: 2585933 - DNA, 25 bp, Homo sapien
agccagcaccctgtgtaggcacggg

SEQ ID NO: 2585934 - DNA, 25 bp, Homo sapien
cgtagctttagggttctccactcag

SEQ ID NO: 2585935 - DNA, 25 bp, Homo sapien
atgtgcttgcagttctttattgagg

SEQ ID NO: 2585936 - DNA, 25 bp, Homo sapien
tgcttgcagctagctccgtgcctgc

SEQ ID NO: 2585937 - DNA, 25 bp, Homo sapien
cggatgcttgcagctagctccgtgc

SEQ ID NO: 2585938 - DNA, 25 bp, Homo sapien
gcagttctttattgagggaccaggg

SEQ ID NO: 2585939 - DNA, 25 bp, Homo sapien
caaggaccccactgtctcctagagg

SEQ ID NO: 2585940 - DNA, 25 bp, Homo sapien
tacacacagtggatggacggacaag

SEQ ID NO: 2585941 - DNA, 25 bp, Homo sapien
gacggacaagacaggcagagatcta

SEQ ID NO: 2585942 - DNA, 25 bp, Homo sapien
cagtaggacaaacgggctcgggtct

SEQ ID NO: 2585943 - DNA, 25 bp, Homo sapien
tcacaggcttgacagggcccagcct

SEQ ID NO: 2585944 - DNA, 25 bp, Homo sapien
gccagtgtcgcagcctgaagaaccg

SEQ ID NO: 2585945 - DNA, 25 bp, Homo sapien
ctcaggccttggaagggcggcccaa

SEQ ID NO: 2585946 - DNA, 25 bp, Homo sapien
accgtcctcccttaacctggctgct

SEQ ID NO: 2585947 - DNA, 25 bp, Homo sapien
tgctttgtgagtggaaacgtggcca

SEQ ID NO: 2585948 - DNA, 25 bp, Homo sapien
tcctcgggagtaatgaaattagggc

SEQ ID NO: 2585949 - DNA, 25 bp, Homo sapien
ctttgtgagtggaaacgtggccttc

SEQ ID NO: 2585950 - DNA, 25 bp, Homo sapien
gaacgcgactgtgttttcctcggga

SEQ ID NO: 2585951 - DNA, 25 bp, Homo sapien
ccttcacctccggagctcaagggat

SEQ ID NO: 2585952 - DNA, 25 bp, Homo sapien
cagcgcagccggctggaaaactgga

SEQ ID NO: 2585953 - DNA, 25 bp, Homo sapien
gcagccggctggaaaactggaactc

SEQ ID NO: 2585954 - DNA, 25 bp, Homo sapien
aaccagcgcagccggctggaaaact

SEQ ID NO: 2585955 - DNA, 25 bp, Homo sapien
cctggcctagaggttgtcttattcc

SEQ ID NO: 2585956 - DNA, 25 bp, Homo sapien
cacagacagccatattcttaccatg

SEQ ID NO: 2585957 - DNA, 25 bp, Homo sapien
tgggccttgctagatcaaagtgttg

SEQ ID NO: 2585958 - DNA, 25 bp, Homo sapien
tttgttgtaaaactcagcagtccct

SEQ ID NO: 2585959 - DNA, 25 bp, Homo sapien
ggaatgcaatcttccgccccttcag

SEQ ID NO: 2585960 - DNA, 25 bp, Homo sapien
gatgtgatgaccgacatggcgtctg

SEQ ID NO: 2585961 - DNA, 25 bp, Homo sapien
ccctgtgcgccacggcgaacgtgat

SEQ ID NO: 2585962 - DNA, 25 bp, Homo sapien
tccacgagttctcccggtgatgtga

SEQ ID NO: 2585963 - DNA, 25 bp, Homo sapien
tcctcaactagattgggcatgccgt

SEQ ID NO: 2585964 - DNA, 25 bp, Homo sapien
tgcggctttaggtaccagattcaaa

SEQ ID NO: 2585965 - DNA, 25 bp, Homo sapien
cagacctggtttctcggcggagtcc

SEQ ID NO: 2585966 - DNA, 25 bp, Homo sapien
tactatgaaccaagtatctgcggct

SEQ ID NO: 2585967 - DNA, 25 bp, Homo sapien
caaaagatactagtggcctgggaaa

SEQ ID NO: 2585968 - DNA, 25 bp, Homo sapien
aatgcttattagaccccaaggctgc

SEQ ID NO: 2585969 - DNA, 25 bp, Homo sapien
ctaggcacgtttgaccaccgaaagg

SEQ ID NO: 2585970 - DNA, 25 bp, Homo sapien
aattcctaggtttctgcgtgagctg

SEQ ID NO: 2585971 - DNA, 25 bp, Homo sapien
cccaatatgtgttgtccaggactta

SEQ ID NO: 2585972 - DNA, 25 bp, Homo sapien
ccagaagtaggactgctagcttaaa

SEQ ID NO: 2585973 - DNA, 25 bp, Homo sapien
tgttagcaatacattagagggccct

SEQ ID NO: 2585974 - DNA, 25 bp, Homo sapien
cagactaagacaatatgtgtgcagg

SEQ ID NO: 2585975 - DNA, 25 bp, Homo sapien
cctatacatctatttcgatgtagca

SEQ ID NO: 2585976 - DNA, 25 bp, Homo sapien
gatttgttacaatattcacagttgt

SEQ ID NO: 2585977 - DNA, 25 bp, Homo sapien
gttttcttgcactagagaggcagca

SEQ ID NO: 2585978 - DNA, 25 bp, Homo sapien
tagcatttcttcaagcagatataag

SEQ ID NO: 2585979 - DNA, 25 bp, Homo sapien
gaggaatgggcccttaccagacact

SEQ ID NO: 2585980 - DNA, 25 bp, Homo sapien
tgagtaggtaatgagggtaaatccc

SEQ ID NO: 2585981 - DNA, 25 bp, Homo sapien
cagacactgtatctgccagagcctt

SEQ ID NO: 2585982 - DNA, 25 bp, Homo sapien
tgagtgagaacacactagaagtgcc

SEQ ID NO: 2585983 - DNA, 25 bp, Homo sapien
gggccaggaggagagtcagtgtcag

SEQ ID NO: 2585984 - DNA, 25 bp, Homo sapien
tggggccaggaggagagtcagtgtc

SEQ ID NO: 2585985 - DNA, 25 bp, Homo sapien
ggccaggaggagagtcagtgtcagg

SEQ ID NO: 2585986 - DNA, 25 bp, Homo sapien
ctggggccaggaggagagtcagtgt

SEQ ID NO: 2585987 - DNA, 25 bp, Homo sapien
gtgagggccaggataaagtccagct

SEQ ID NO: 2585988 - DNA, 25 bp, Homo sapien
gccaggataaagtccagcttcgggt

SEQ ID NO: 2585989 - DNA, 25 bp, Homo sapien
cagaatgttcaggataatggtgagg

SEQ ID NO: 2585990 - DNA, 25 bp, Homo sapien
acacagaatgttcaggataatggtg

SEQ ID NO: 2585991 - DNA, 25 bp, Homo sapien
aggacctaaaaggaagcgtctggct

SEQ ID NO: 2585992 - DNA, 25 bp, Homo sapien
cggcgtgttttagtcgcagaattta

SEQ ID NO: 2585993 - DNA, 25 bp, Homo sapien
tcacgttccggcgagagcgggagag

SEQ ID NO: 2585994 - DNA, 25 bp, Homo sapien
agaatttacaataaacgcccagaag

SEQ ID NO: 2585995 - DNA, 25 bp, Homo sapien
taggcaagcagtggtaatcagcccc

SEQ ID NO: 2585996 - DNA, 25 bp, Homo sapien
aatccagtcggagcttcgaggacga

SEQ ID NO: 2585997 - DNA, 25 bp, Homo sapien
tgtcagcgcccaagaacaatccagt

SEQ ID NO: 2585998 - DNA, 25 bp, Homo sapien
gaaatccacagacgggtgtcagcgc

SEQ ID NO: 2585999 - DNA, 25 bp, Homo sapien
cccactcgtggccttcccagatccc

SEQ ID NO: 2586000 - DNA, 25 bp, Homo sapien
tccccactcgtggccttcccagatc

SEQ ID NO: 2586001 - DNA, 25 bp, Homo sapien
cactcgtggccttcccagatcccct

SEQ ID NO: 2586002 - DNA, 25 bp, Homo sapien
ctccccactcgtggccttcccagat

SEQ ID NO: 2586003 - DNA, 25 bp, Homo sapien
ggaatccatccactcccggtgggac

SEQ ID NO: 2586004 - DNA, 25 bp, Homo sapien
cacagcgggccttcgctcccgagag

SEQ ID NO: 2586005 - DNA, 25 bp, Homo sapien
gagacagcgacacctaaaggcagcg

SEQ ID NO: 2586006 - DNA, 25 bp, Homo sapien
cacctaaaggcagcgcgctgcacag

SEQ ID NO: 2586007 - DNA, 25 bp, Homo sapien
tagtccaacttcacaccagacggag

SEQ ID NO: 2586008 - DNA, 25 bp, Homo sapien
gagacctgaactctcctcttccgag

SEQ ID NO: 2586009 - DNA, 25 bp, Homo sapien
tcctcttccgagagacaagttccgc

SEQ ID NO: 2586010 - DNA, 25 bp, Homo sapien
cggccccctccaatagaaaatgctt

SEQ ID NO: 2586011 - DNA, 25 bp, Homo sapien
gccaaagcacaccaaggcgactctg

SEQ ID NO: 2586012 - DNA, 25 bp, Homo sapien
tgtaggagcaagttttctccctttg

SEQ ID NO: 2586013 - DNA, 25 bp, Homo sapien
catttcgccaaagcacaccaaggcg

SEQ ID NO: 2586014 - DNA, 25 bp, Homo sapien
tcaggcatcatcctcccctggatgt

SEQ ID NO: 2586015 - DNA, 25 bp, Homo sapien
gggtggtggggagggaagacaagca

SEQ ID NO: 2586016 - DNA, 25 bp, Homo sapien
tgggtggtggggagggaagacaagc

SEQ ID NO: 2586017 - DNA, 25 bp, Homo sapien
ctgggtggtggggagggaagacaag

SEQ ID NO: 2586018 - DNA, 25 bp, Homo sapien
ggtggtggggagggaagacaagcat

SEQ ID NO: 2586019 - DNA, 25 bp, Homo sapien
gggctggccaaagagcggagggtct

SEQ ID NO: 2586020 - DNA, 25 bp, Homo sapien
gctggccaaagagcggagggtctcg

SEQ ID NO: 2586021 - DNA, 25 bp, Homo sapien
aagggctggccaaagagcggagggt

SEQ ID NO: 2586022 - DNA, 25 bp, Homo sapien
ggaagggctggccaaagagcggagg

SEQ ID NO: 2586023 - DNA, 25 bp, Homo sapien
cagcggcagtcgtacagcgggctct

SEQ ID NO: 2586024 - DNA, 25 bp, Homo sapien
attggcccggacacagtccactggg

SEQ ID NO: 2586025 - DNA, 25 bp, Homo sapien
agctgcagttggattcggcggcaca

SEQ ID NO: 2586026 - DNA, 25 bp, Homo sapien
gccccaggtggatgctccagtagat

SEQ ID NO: 2586027 - DNA, 25 bp, Homo sapien
gcctttgtgtccaaggaagaaattg

SEQ ID NO: 2586028 - DNA, 25 bp, Homo sapien
gtgacttcatctgtggttgcctttg

SEQ ID NO: 2586029 - DNA, 25 bp, Homo sapien
tgcctttgtgtccaaggaagaaatt

SEQ ID NO: 2586030 - DNA, 25 bp, Homo sapien
ctgtcacctccgacacctccccttt

SEQ ID NO: 2586031 - DNA, 25 bp, Homo sapien
tcaacgaaaattgggctttagctgc

SEQ ID NO: 2586032 - DNA, 25 bp, Homo sapien
gagaattcagctgatggccaaggag

SEQ ID NO: 2586033 - DNA, 25 bp, Homo sapien
tcccctttcagggagaattcagctg

SEQ ID NO: 2586034 - DNA, 25 bp, Homo sapien
tcgggctggtgcctctcagggaccc

SEQ ID NO: 2586035 - DNA, 25 bp, Homo sapien
ctggtgcctctcagggacccccttc

SEQ ID NO: 2586036 - DNA, 25 bp, Homo sapien
ttaatgtttcagcaggtcgggctgg

SEQ ID NO: 2586037 - DNA, 25 bp, Homo sapien
taatgtttcagcaggtcgggctggt

SEQ ID NO: 2586038 - DNA, 25 bp, Homo sapien
tgggcccatgcctaaaggacaggga

SEQ ID NO: 2586039 - DNA, 25 bp, Homo sapien
gccatgccgtgcaagtgtggctaga

SEQ ID NO: 2586040 - DNA, 25 bp, Homo sapien
ccactgggcccatgcctaaaggaca

SEQ ID NO: 2586041 - DNA, 25 bp, Homo sapien
cactgggcccatgcctaaaggacag

SEQ ID NO: 2586042 - DNA, 25 bp, Homo sapien
ggtggtggtgaatggagcggagacc

SEQ ID NO: 2586043 - DNA, 25 bp, Homo sapien
aatggagcggagacctcaaagtcag

SEQ ID NO: 2586044 - DNA, 25 bp, Homo sapien
ggtggtgaatggagcggagacctca

SEQ ID NO: 2586045 - DNA, 25 bp, Homo sapien
ggagcggagacctcaaagtcagctg

SEQ ID NO: 2586046 - DNA, 25 bp, Homo sapien
agagccggactctgtagcgtacaaa

SEQ ID NO: 2586047 - DNA, 25 bp, Homo sapien
tgtagcgtacaaataattaaagcgc

SEQ ID NO: 2586048 - DNA, 25 bp, Homo sapien
gctcaatgcctgagctgagtagttg

SEQ ID NO: 2586049 - DNA, 25 bp, Homo sapien
caaataattaaagcgctcaatgcct

SEQ ID NO: 2586050 - DNA, 25 bp, Homo sapien
cagaaataagggaatggagtttcat

SEQ ID NO: 2586051 - DNA, 25 bp, Homo sapien
gagaacagaaataagggaatggagt

SEQ ID NO: 2586052 - DNA, 25 bp, Homo sapien
acagaaataagggaatggagtttca

SEQ ID NO: 2586053 - DNA, 25 bp, Homo sapien
agaacagaaataagggaatggagtt

SEQ ID NO: 2586054 - DNA, 25 bp, Homo sapien
agcaatacactgtttttgtcctgga

SEQ ID NO: 2586055 - DNA, 25 bp, Homo sapien
ccttcattacatataccaatggtat

SEQ ID NO: 2586056 - DNA, 25 bp, Homo sapien
aatggtatcatctagtgtgctgcat

SEQ ID NO: 2586057 - DNA, 25 bp, Homo sapien
tcatctagtgtgctgcatagtttgt

SEQ ID NO: 2586058 - DNA, 25 bp, Homo sapien
agcatcacgttgccccaagtccaag

SEQ ID NO: 2586059 - DNA, 25 bp, Homo sapien
ctgtagataaaagtcccgaaacgct

SEQ ID NO: 2586060 - DNA, 25 bp, Homo sapien
tgctgtagataaaagtcccgaaacg

SEQ ID NO: 2586061 - DNA, 25 bp, Homo sapien
gctgctgtagataaaagtcccgaaa

SEQ ID NO: 2586062 - DNA, 25 bp, Homo sapien
tgctgctgtagataaaagtcccgaa

SEQ ID NO: 2586063 - DNA, 25 bp, Homo sapien
cagtaagcagcatgacacttcaggg

SEQ ID NO: 2586064 - DNA, 25 bp, Homo sapien
tctggaagacatttgacactctggc

SEQ ID NO: 2586065 - DNA, 25 bp, Homo sapien
tctggcgtcagagagccaaggcctg

SEQ ID NO: 2586066 - DNA, 25 bp, Homo sapien
ggaacacagcatctgacagttctgt

SEQ ID NO: 2586067 - DNA, 25 bp, Homo sapien
ttcccttgccaagccgggagttctg

SEQ ID NO: 2586068 - DNA, 25 bp, Homo sapien
tagatatcggaaaaccactgagctg

SEQ ID NO: 2586069 - DNA, 25 bp, Homo sapien
tcaggatggtgatcttaggagcttc

SEQ ID NO: 2586070 - DNA, 25 bp, Homo sapien
gggagttctggacacctgcactgat

SEQ ID NO: 2586071 - DNA, 25 bp, Homo sapien
tatgatgactaacccagactgacgt

SEQ ID NO: 2586072 - DNA, 25 bp, Homo sapien
gaatcttgtcgccaaaacctggagg

SEQ ID NO: 2586073 - DNA, 25 bp, Homo sapien
ttaagggcggcagaattcagaggct

SEQ ID NO: 2586074 - DNA, 25 bp, Homo sapien
catgtgcgccacgtagctttagaaa

SEQ ID NO: 2586075 - DNA, 25 bp, Homo sapien
tagaacctataacagcgtcattcat

SEQ ID NO: 2586076 - DNA, 25 bp, Homo sapien
tctgccttagaacctataacagcgt

SEQ ID NO: 2586077 - DNA, 25 bp, Homo sapien
ccttagaacctataacagcgtcatt

SEQ ID NO: 2586078 - DNA, 25 bp, Homo sapien
tgccttagaacctataacagcgtca

SEQ ID NO: 2586079 - DNA, 25 bp, Homo sapien
aagtttgcagggctaggagttgctc

SEQ ID NO: 2586080 - DNA, 25 bp, Homo sapien
gcctagggcatcattgtacaaaact

SEQ ID NO: 2586081 - DNA, 25 bp, Homo sapien
caaatgcacatactagcgtaggcct

SEQ ID NO: 2586082 - DNA, 25 bp, Homo sapien
catctgcaacacaacggtaaatatt

SEQ ID NO: 2586083 - DNA, 25 bp, Homo sapien
tgtaaatagagatagcataacctac

SEQ ID NO: 2586084 - DNA, 25 bp, Homo sapien
ggttgatgtctaccactttgttatt

SEQ ID NO: 2586085 - DNA, 25 bp, Homo sapien
caatttgtatgttgtggttgatgtc

SEQ ID NO: 2586086 - DNA, 25 bp, Homo sapien
cactgtgtaacatcatatagtgtat

SEQ ID NO: 2586087 - DNA, 25 bp, Homo sapien
gctgagactgcaccactgcactcca

SEQ ID NO: 2586088 - DNA, 25 bp, Homo sapien
tgcactccagcttggtgaacagagt

SEQ ID NO: 2586089 - DNA, 25 bp, Homo sapien
ctccagcttggtgaacagagtgaga

SEQ ID NO: 2586090 - DNA, 25 bp, Homo sapien
gagggtgaggcagaaattgcagtga

SEQ ID NO: 2586091 - DNA, 25 bp, Homo sapien
catctcacagcatgttttctcctag

SEQ ID NO: 2586092 - DNA, 25 bp, Homo sapien
tattcattcaaacgcttattcaaac

SEQ ID NO: 2586093 - DNA, 25 bp, Homo sapien
tcaaactaccgaatcctccaataac

SEQ ID NO: 2586094 - DNA, 25 bp, Homo sapien
tcctagtacaccctgattgtccaag

SEQ ID NO: 2586095 - DNA, 25 bp, Homo sapien
caagaggttctgaaagcgtgcccaa

SEQ ID NO: 2586096 - DNA, 25 bp, Homo sapien
tattcagagccagtataagtgacca

SEQ ID NO: 2586097 - DNA, 25 bp, Homo sapien
tatcagactctcaatcactcctagg

SEQ ID NO: 2586098 - DNA, 25 bp, Homo sapien
ttccaaggagacaaccaactgcagg

SEQ ID NO: 2586099 - DNA, 25 bp, Homo sapien
tgataggaagtcaattattcagcct

SEQ ID NO: 2586100 - DNA, 25 bp, Homo sapien
taactgagcttaatgtggatcaaag

SEQ ID NO: 2586101 - DNA, 25 bp, Homo sapien
taaacatctattgtgcacccacaca

SEQ ID NO: 2586102 - DNA, 25 bp, Homo sapien
gcagcactaacttggtaacttggaa

SEQ ID NO: 2586103 - DNA, 25 bp, Homo sapien
ccttcaatggtatctaatctggtgg

SEQ ID NO: 2586104 - DNA, 25 bp, Homo sapien
aaacttctactgacctgtatttcag

SEQ ID NO: 2586105 - DNA, 25 bp, Homo sapien
catccacaatataatactaacacag

SEQ ID NO: 2586106 - DNA, 25 bp, Homo sapien
tacatctccatgctgaattgaaaaa

SEQ ID NO: 2586107 - DNA, 25 bp, Homo sapien
gacttagaacaggcaaggatttcat

SEQ ID NO: 2586108 - DNA, 25 bp, Homo sapien
agcaaaaattcataaatgggaactt

SEQ ID NO: 2586109 - DNA, 25 bp, Homo sapien
caaaaattcataaatgggaacttca

SEQ ID NO: 2586110 - DNA, 25 bp, Homo sapien
attcataaatgggaacttcattagt

SEQ ID NO: 2586111 - DNA, 25 bp, Homo sapien
caacagtaaccaagctggcagtcaa

SEQ ID NO: 2586112 - DNA, 25 bp, Homo sapien
cagtcaaatcaggaaggcaatccca

SEQ ID NO: 2586113 - DNA, 25 bp, Homo sapien
catggtgctggcacaaaaacaggga

SEQ ID NO: 2586114 - DNA, 25 bp, Homo sapien
tgtgtagatttgatgccctccctca

SEQ ID NO: 2586115 - DNA, 25 bp, Homo sapien
gaagtaaaactgatgtagctggcta

SEQ ID NO: 2586116 - DNA, 25 bp, Homo sapien
tgcatgaagtaaaaacagacagaac

SEQ ID NO: 2586117 - DNA, 25 bp, Homo sapien
gctaataccagagaaagtaggattc

SEQ ID NO: 2586118 - DNA, 25 bp, Homo sapien
taaaaggttaagctcattagcaatg

SEQ ID NO: 2586119 - DNA, 25 bp, Homo sapien
acatctgcaagacctgctgaaagca

SEQ ID NO: 2586120 - DNA, 25 bp, Homo sapien
tttggcaccaatttcgtcaaaagct

SEQ ID NO: 2586121 - DNA, 25 bp, Homo sapien
tacctgagcagggttaacatctgca

SEQ ID NO: 2586122 - DNA, 25 bp, Homo sapien
cgtcaaaagctgctctatacctgag

SEQ ID NO: 2586123 - DNA, 25 bp, Homo sapien
ttagagtatacacttctattttccc

SEQ ID NO: 2586124 - DNA, 25 bp, Homo sapien
tctcatcactgcctgttagtcagaa

SEQ ID NO: 2586125 - DNA, 25 bp, Homo sapien
tagaagcaattcactcatatgagta

SEQ ID NO: 2586126 - DNA, 25 bp, Homo sapien
gcttatttagctaaaagccagaatt

SEQ ID NO: 2586127 - DNA, 25 bp, Homo sapien
gaacatcaaaatagggtgcaatttg

SEQ ID NO: 2586128 - DNA, 25 bp, Homo sapien
ggcactattttcattcccgaccaag

SEQ ID NO: 2586129 - DNA, 25 bp, Homo sapien
tgtcaattaaactgtcaaccatgtt

SEQ ID NO: 2586130 - DNA, 25 bp, Homo sapien
tgaaggtatcacaggttggcactat

SEQ ID NO: 2586131 - DNA, 25 bp, Homo sapien
ttgaaagaacaactcgatattggat

SEQ ID NO: 2586132 - DNA, 25 bp, Homo sapien
catcttcattctcaggattcatatt

SEQ ID NO: 2586133 - DNA, 25 bp, Homo sapien
atttggttgcctcattgcgatataa

SEQ ID NO: 2586134 - DNA, 25 bp, Homo sapien
gcctcattgcgatataagtatgttg

SEQ ID NO: 2586135 - DNA, 25 bp, Homo sapien
tgatcgtgggagagcagttgcacct

SEQ ID NO: 2586136 - DNA, 25 bp, Homo sapien
gaaaataacgtgtgtcccctgagtg

SEQ ID NO: 2586137 - DNA, 25 bp, Homo sapien
caggcaagaggctacattggcccaa

SEQ ID NO: 2586138 - DNA, 25 bp, Homo sapien
tcaggcacagtaattcatcatcagg

SEQ ID NO: 2586139 - DNA, 25 bp, Homo sapien
tcgaaaccaccaaatgactctaagc

SEQ ID NO: 2586140 - DNA, 25 bp, Homo sapien
tgttttagtagcagcacagcgtgtc

SEQ ID NO: 2586141 - DNA, 25 bp, Homo sapien
gccacagagtggttcacaacattaa

SEQ ID NO: 2586142 - DNA, 25 bp, Homo sapien
cggagttgcttctcggccacagagt

SEQ ID NO: 2586143 - DNA, 25 bp, Homo sapien
aagtgtccactgcacgcagcttggc

SEQ ID NO: 2586144 - DNA, 25 bp, Homo sapien
cacaatctgctgagtcgctttaaca

SEQ ID NO: 2586145 - DNA, 25 bp, Homo sapien
tgatgtgtggagacaagccgttgat

SEQ ID NO: 2586146 - DNA, 25 bp, Homo sapien
cctgtgccagccgtgaagtgtccac

SEQ ID NO: 2586147 - DNA, 25 bp, Homo sapien
gaaagctagccagagaaagtctaaa

SEQ ID NO: 2586148 - DNA, 25 bp, Homo sapien
tctttggtgtagaggacgcctttac

SEQ ID NO: 2586149 - DNA, 25 bp, Homo sapien
cattggaaagggtcctcataagagt

SEQ ID NO: 2586150 - DNA, 25 bp, Homo sapien
cactttatgagcagggttattgcaa

SEQ ID NO: 2586151 - DNA, 25 bp, Homo sapien
actaaaagaatgattggtccaccac

SEQ ID NO: 2586152 - DNA, 25 bp, Homo sapien
gaaatacagctggtacttgcaatag

SEQ ID NO: 2586153 - DNA, 25 bp, Homo sapien
tgacctctaggctcttcgttctgcc

SEQ ID NO: 2586154 - DNA, 25 bp, Homo sapien
cccagtggtaaatgttgcaagtcat

SEQ ID NO: 2586155 - DNA, 25 bp, Homo sapien
cctccaccccccatcaagccccagt

SEQ ID NO: 2586156 - DNA, 25 bp, Homo sapien
tttttctaatgctccccatccctcc

SEQ ID NO: 2586157 - DNA, 25 bp, Homo sapien
ttttttctaatgctccccatccctc

SEQ ID NO: 2586158 - DNA, 25 bp, Homo sapien
gagagctagacagagagaaaaccct

SEQ ID NO: 2586159 - DNA, 25 bp, Homo sapien
cgggatcattgagggctctcctaca

SEQ ID NO: 2586160 - DNA, 25 bp, Homo sapien
tgcaacgcgaatacaagaaagccgg

SEQ ID NO: 2586161 - DNA, 25 bp, Homo sapien
tacatcataacgtggcagctggctt

SEQ ID NO: 2586162 - DNA, 25 bp, Homo sapien
cagagactacttgtttcgtggccat

SEQ ID NO: 2586163 - DNA, 25 bp, Homo sapien
gagagcagctcaattagtagcagag

SEQ ID NO: 2586164 - DNA, 25 bp, Homo sapien
cagaggaacaggtgaattatcatcc

SEQ ID NO: 2586165 - DNA, 25 bp, Homo sapien
ttggtgttaaggacatgagccacag

SEQ ID NO: 2586166 - DNA, 25 bp, Homo sapien
attaccggtgtgcaccaccgcactc

SEQ ID NO: 2586167 - DNA, 25 bp, Homo sapien
cggtgtgcaccaccgcactcaacta

SEQ ID NO: 2586168 - DNA, 25 bp, Homo sapien
taccggtgtgcaccaccgcactcaa

SEQ ID NO: 2586169 - DNA, 25 bp, Homo sapien
ccggtgtgcaccaccgcactcaact

SEQ ID NO: 2586170 - DNA, 25 bp, Homo sapien
ctgttctcaagtagtcctggcctca

SEQ ID NO: 2586171 - DNA, 25 bp, Homo sapien
caggtgccatgtgatctaactaaag

SEQ ID NO: 2586172 - DNA, 25 bp, Homo sapien
taagagaaaggtcactccgttactg

SEQ ID NO: 2586173 - DNA, 25 bp, Homo sapien
tgttgtgacgaatcttactgcctgt

SEQ ID NO: 2586174 - DNA, 25 bp, Homo sapien
tgtggatacccaaggctgcaaatct

SEQ ID NO: 2586175 - DNA, 25 bp, Homo sapien
tagacaaatagtttaactcggtgcc

SEQ ID NO: 2586176 - DNA, 25 bp, Homo sapien
ttaaaattcgtgtatgagccattgc

SEQ ID NO: 2586177 - DNA, 25 bp, Homo sapien
gatgaagattgtgcacgctaccgtg

SEQ ID NO: 2586178 - DNA, 25 bp, Homo sapien
catagaatccttgcgtgctttaagc

SEQ ID NO: 2586179 - DNA, 25 bp, Homo sapien
gaaatgccagacagtaattcctaga

SEQ ID NO: 2586180 - DNA, 25 bp, Homo sapien
gccaagcagcaaatgaataatgtca

SEQ ID NO: 2586181 - DNA, 25 bp, Homo sapien
gatctaaagcatgcatcacatctga

SEQ ID NO: 2586182 - DNA, 25 bp, Homo sapien
gcaagcagattaatagacgaatgga

SEQ ID NO: 2586183 - DNA, 25 bp, Homo sapien
gagacctatctgataaggcaagcag

SEQ ID NO: 2586184 - DNA, 25 bp, Homo sapien
cagaagaatggatatgagacctatc

SEQ ID NO: 2586185 - DNA, 25 bp, Homo sapien
tgggttaagagaaggatgaacagaa

SEQ ID NO: 2586186 - DNA, 25 bp, Homo sapien
tgtctatactttaggctaccaccca

SEQ ID NO: 2586187 - DNA, 25 bp, Homo sapien
tattgaaggaaatgcagggtcacaa

SEQ ID NO: 2586188 - DNA, 25 bp, Homo sapien
tattacctgtcaacgcaggtcactg

SEQ ID NO: 2586189 - DNA, 25 bp, Homo sapien
ttacaatatccaacaagagccgatg

SEQ ID NO: 2586190 - DNA, 25 bp, Homo sapien
cacgcacattcaccacacagtttat

SEQ ID NO: 2586191 - DNA, 25 bp, Homo sapien
gtttatgaaggaatacagagtgccc

SEQ ID NO: 2586192 - DNA, 25 bp, Homo sapien
tcaacttcactgaatgaatatgcag

SEQ ID NO: 2586193 - DNA, 25 bp, Homo sapien
tatatatttacataaccgaaacata

SEQ ID NO: 2586194 - DNA, 25 bp, Homo sapien
catctgagatgacttggaaaacacc

SEQ ID NO: 2586195 - DNA, 25 bp, Homo sapien
tagtcagcaccgactcagaaacagc

SEQ ID NO: 2586196 - DNA, 25 bp, Homo sapien
caaaacttttaagcgctggaatgaa

SEQ ID NO: 2586197 - DNA, 25 bp, Homo sapien
tccctgctggaaatagtggtataaa

SEQ ID NO: 2586198 - DNA, 25 bp, Homo sapien
tgcctctcgccaggaaatacactga

SEQ ID NO: 2586199 - DNA, 25 bp, Homo sapien
taagagccatatgtggtaactgtcc

SEQ ID NO: 2586200 - DNA, 25 bp, Homo sapien
taactgtccagggttgttcatctct

SEQ ID NO: 2586201 - DNA, 25 bp, Homo sapien
aatacactgaattgcaagaattagg

SEQ ID NO: 2586202 - DNA, 25 bp, Homo sapien
cacagagaataaacgatggtacagt

SEQ ID NO: 2586203 - DNA, 25 bp, Homo sapien
ccccagaggctaagtcagtgggaaa

SEQ ID NO: 2586204 - DNA, 25 bp, Homo sapien
tgtacagtgtaccatagtacctatg

SEQ ID NO: 2586205 - DNA, 25 bp, Homo sapien
ggtacagttttacttggacaaggca

SEQ ID NO: 2586206 - DNA, 25 bp, Homo sapien
gattagcaagaaagaaacctcccaa

SEQ ID NO: 2586207 - DNA, 25 bp, Homo sapien
cagatgttcttgtttggattagcaa

SEQ ID NO: 2586208 - DNA, 25 bp, Homo sapien
aaagatgtgatgtctgacctcagaa

SEQ ID NO: 2586209 - DNA, 25 bp, Homo sapien
ccaggttgacaattgtgcagatgtt

SEQ ID NO: 2586210 - DNA, 25 bp, Homo sapien
cacacataaactcgcacctggaggc

SEQ ID NO: 2586211 - DNA, 25 bp, Homo sapien
taatcagacggataccaagtccact

SEQ ID NO: 2586212 - DNA, 25 bp, Homo sapien
acctggaggcaatgttcaaaacaca

SEQ ID NO: 2586213 - DNA, 25 bp, Homo sapien
caaataaacacatactcggagacag

SEQ ID NO: 2586214 - DNA, 25 bp, Homo sapien
gaaagcccgccttatgaatggcaaa

SEQ ID NO: 2586215 - DNA, 25 bp, Homo sapien
caggaaactcagagttatctggtat

SEQ ID NO: 2586216 - DNA, 25 bp, Homo sapien
caagaaatcccacagttcacaaaat

SEQ ID NO: 2586217 - DNA, 25 bp, Homo sapien
caaacacagactaatgagagttttc

SEQ ID NO: 2586218 - DNA, 25 bp, Homo sapien
cgccagatacttgaaagccttccaa

SEQ ID NO: 2586219 - DNA, 25 bp, Homo sapien
gttctagcacaaagaactacctgag

SEQ ID NO: 2586220 - DNA, 25 bp, Homo sapien
ttaggcaccaaagaagctgagggac

SEQ ID NO: 2586221 - DNA, 25 bp, Homo sapien
tacacatgctatggtggaccttagg

SEQ ID NO: 2586222 - DNA, 25 bp, Homo sapien
tgcctcagccaattaaactgtgttg

SEQ ID NO: 2586223 - DNA, 25 bp, Homo sapien
caattaaactgtgttgtctctgcag

SEQ ID NO: 2586224 - DNA, 25 bp, Homo sapien
gacctttaagcacaagaacaccttg

SEQ ID NO: 2586225 - DNA, 25 bp, Homo sapien
tgcagtgcgttttatcacaagaaca

SEQ ID NO: 2586226 - DNA, 25 bp, Homo sapien
aatatagaaagtcgaaggtttctgg

SEQ ID NO: 2586227 - DNA, 25 bp, Homo sapien
tcagttcggataattaagctgtgta

SEQ ID NO: 2586228 - DNA, 25 bp, Homo sapien
gattcacagtatgcaacaatgatca

SEQ ID NO: 2586229 - DNA, 25 bp, Homo sapien
cagtatgcaacaatgatcatattac

SEQ ID NO: 2586230 - DNA, 25 bp, Homo sapien
ggctttgcctagtgcatcccggccg

SEQ ID NO: 2586231 - DNA, 25 bp, Homo sapien
cagctagacgtagtaagttctccaa

SEQ ID NO: 2586232 - DNA, 25 bp, Homo sapien
gcgcgctgccgcactcctcagccgt

SEQ ID NO: 2586233 - DNA, 25 bp, Homo sapien
tcagccgttgggcggttgacgggac

SEQ ID NO: 2586234 - DNA, 25 bp, Homo sapien
cactgtacaaaagtaacaaatctgc

SEQ ID NO: 2586235 - DNA, 25 bp, Homo sapien
gagcatgggctgaataactacctac

SEQ ID NO: 2586236 - DNA, 25 bp, Homo sapien
caaatctgcatatgcactatctgtg

SEQ ID NO: 2586237 - DNA, 25 bp, Homo sapien
gactttatttgatggactggattag

SEQ ID NO: 2586238 - DNA, 25 bp, Homo sapien
atgtaacaaaactgcgcttcctgca

SEQ ID NO: 2586239 - DNA, 25 bp, Homo sapien
tatttttctcgacattggccttggc

SEQ ID NO: 2586240 - DNA, 25 bp, Homo sapien
acacacactataattttctgtaggg

SEQ ID NO: 2586241 - DNA, 25 bp, Homo sapien
taaaaagggcaaagctaatacagga

SEQ ID NO: 2586242 - DNA, 25 bp, Homo sapien
cattccatgtttacagattaaaaga

SEQ ID NO: 2586243 - DNA, 25 bp, Homo sapien
cagagaggcgtcatactacccaatt

SEQ ID NO: 2586244 - DNA, 25 bp, Homo sapien
ggctatctccatgaaactaccaaca

SEQ ID NO: 2586245 - DNA, 25 bp, Homo sapien
ataaagccagagaggcgtcatacta

SEQ ID NO: 2586246 - DNA, 25 bp, Homo sapien
ctaccctgacggcttgaggccagga

SEQ ID NO: 2586247 - DNA, 25 bp, Homo sapien
tcctaactaccctgacggcttgagg

SEQ ID NO: 2586248 - DNA, 25 bp, Homo sapien
taactaccctgacggcttgaggcca

SEQ ID NO: 2586249 - DNA, 25 bp, Homo sapien
tgtagtcctaactaccctgacggct

SEQ ID NO: 2586250 - DNA, 25 bp, Homo sapien
tagtcatggtgtcagatatagagaa

SEQ ID NO: 2586251 - DNA, 25 bp, Homo sapien
aggtaagcggagtaatatttcagca

SEQ ID NO: 2586252 - DNA, 25 bp, Homo sapien
cagaagaaatgggtccttgggattt

SEQ ID NO: 2586253 - DNA, 25 bp, Homo sapien
cacacaccagatgagtaaattgttg

SEQ ID NO: 2586254 - DNA, 25 bp, Homo sapien
aaagcattgctcctttatgtccgca

SEQ ID NO: 2586255 - DNA, 25 bp, Homo sapien
taggtgctgttatggcagacccaac

SEQ ID NO: 2586256 - DNA, 25 bp, Homo sapien
gcttctcttgctcacgtgcctgtag

SEQ ID NO: 2586257 - DNA, 25 bp, Homo sapien
tagaattggccgttccagtcaagca

SEQ ID NO: 2586258 - DNA, 25 bp, Homo sapien
ggctaaagacgcatctttcctgcaa

SEQ ID NO: 2586259 - DNA, 25 bp, Homo sapien
taaagttttgcccagttactgccta

SEQ ID NO: 2586260 - DNA, 25 bp, Homo sapien
tgaatagcttaaaccaagtagaagg

SEQ ID NO: 2586261 - DNA, 25 bp, Homo sapien
tatctagagagtacactgaatagct

SEQ ID NO: 2586262 - DNA, 25 bp, Homo sapien
taaaatcatgttagttcaggtcatc

SEQ ID NO: 2586263 - DNA, 25 bp, Homo sapien
tatatttcagggagttccactggta

SEQ ID NO: 2586264 - DNA, 25 bp, Homo sapien
caatcagctactcactttgaaagac

SEQ ID NO: 2586265 - DNA, 25 bp, Homo sapien
gtactttcttggcacagggtttcaa

SEQ ID NO: 2586266 - DNA, 25 bp, Homo sapien
tgagagaatactgagtaaccaaaag

SEQ ID NO: 2586267 - DNA, 25 bp, Homo sapien
tcttgagagaatactgagtaaccaa

SEQ ID NO: 2586268 - DNA, 25 bp, Homo sapien
ttttcttgagagaatactgagtaac

SEQ ID NO: 2586269 - DNA, 25 bp, Homo sapien
aattttcttgagagaatactgagta

SEQ ID NO: 2586270 - DNA, 25 bp, Homo sapien
catgaaaagattgctagtagaatta

SEQ ID NO: 2586271 - DNA, 25 bp, Homo sapien
caaagatgtgcttccaaatgccaaa

SEQ ID NO: 2586272 - DNA, 25 bp, Homo sapien
taaagagaatctgcactaacattgt

SEQ ID NO: 2586273 - DNA, 25 bp, Homo sapien
ttactataggtaaaacaatcaggga

SEQ ID NO: 2586274 - DNA, 25 bp, Homo sapien
cgacaatgaaacatctcctcatgga

SEQ ID NO: 2586275 - DNA, 25 bp, Homo sapien
gaaacatctcctcatggagcttgag

SEQ ID NO: 2586276 - DNA, 25 bp, Homo sapien
aacatctcctcatggagcttgagtt

SEQ ID NO: 2586277 - DNA, 25 bp, Homo sapien
acaatgaaacatctcctcatggagc

SEQ ID NO: 2586278 - DNA, 25 bp, Homo sapien
tgtgtgaccttcatgtcccatctgc

SEQ ID NO: 2586279 - DNA, 25 bp, Homo sapien
gattattctagggaaagccttctga

SEQ ID NO: 2586280 - DNA, 25 bp, Homo sapien
tattatgcaggatcaagtaacactc

SEQ ID NO: 2586281 - DNA, 25 bp, Homo sapien
cctgtccccatgcagtgaatgagta

SEQ ID NO: 2586282 - DNA, 25 bp, Homo sapien
ttcttaggaagcttcaggactacac

SEQ ID NO: 2586283 - DNA, 25 bp, Homo sapien
cattgtgtggagtgcaggccatcat

SEQ ID NO: 2586284 - DNA, 25 bp, Homo sapien
aatagtctaaggctggttttacagg

SEQ ID NO: 2586285 - DNA, 25 bp, Homo sapien
gaagcttcaggactacaccaaagaa

SEQ ID NO: 2586286 - DNA, 25 bp, Homo sapien
tagcctatgacctcaacatgttcag

SEQ ID NO: 2586287 - DNA, 25 bp, Homo sapien
taagtctctatggttagcatcagaa

SEQ ID NO: 2586288 - DNA, 25 bp, Homo sapien
taaacctatggaatgttaacaggca

SEQ ID NO: 2586289 - DNA, 25 bp, Homo sapien
gcagataaagatcaaaacgtcacct

SEQ ID NO: 2586290 - DNA, 25 bp, Homo sapien
tataggaagcctgcataataagcat

SEQ ID NO: 2586291 - DNA, 25 bp, Homo sapien
tattgtgcgcagctaaagttgggat

SEQ ID NO: 2586292 - DNA, 25 bp, Homo sapien
tgttagtgaaaatgagaccacgaac

SEQ ID NO: 2586293 - DNA, 25 bp, Homo sapien
caaggtgatttcatgcttctagcca

SEQ ID NO: 2586294 - DNA, 25 bp, Homo sapien
tccaagtctttgctgcccaaggtaa

SEQ ID NO: 2586295 - DNA, 25 bp, Homo sapien
actgctaggatcttagatgagttta

SEQ ID NO: 2586296 - DNA, 25 bp, Homo sapien
aatgaactgctaggatcttagatga

SEQ ID NO: 2586297 - DNA, 25 bp, Homo sapien
gaactgctaggatcttagatgagtt

SEQ ID NO: 2586298 - DNA, 25 bp, Homo sapien
tgaactgctaggatcttagatgagt

SEQ ID NO: 2586299 - DNA, 25 bp, Homo sapien
tattgccgttggatagaagacagac

SEQ ID NO: 2586300 - DNA, 25 bp, Homo sapien
tgagtgtgaactatatagctgtccc

SEQ ID NO: 2586301 - DNA, 25 bp, Homo sapien
tagctgtccctaaaacataattgag

SEQ ID NO: 2586302 - DNA, 25 bp, Homo sapien
aaggagacaggcctacttatatgcc

SEQ ID NO: 2586303 - DNA, 25 bp, Homo sapien
gatacagtacttaaagccctgacct

SEQ ID NO: 2586304 - DNA, 25 bp, Homo sapien
gtgggcctgatcagataaaaccttt

SEQ ID NO: 2586305 - DNA, 25 bp, Homo sapien
tccagaagccacctagggagtgtgc

SEQ ID NO: 2586306 - DNA, 25 bp, Homo sapien
tgatgggcacctaaatgtcaccttt

SEQ ID NO: 2586307 - DNA, 25 bp, Homo sapien
cagagacttggaaatttcaggaggg

SEQ ID NO: 2586308 - DNA, 25 bp, Homo sapien
tggaatgatagacaacagagacttg

SEQ ID NO: 2586309 - DNA, 25 bp, Homo sapien
cttacttcaacactacgtactttat

SEQ ID NO: 2586310 - DNA, 25 bp, Homo sapien
ggtgatgtatattctaaaaccctta

SEQ ID NO: 2586311 - DNA, 25 bp, Homo sapien
aaaactcttctaggtggtgatgcta

SEQ ID NO: 2586312 - DNA, 25 bp, Homo sapien
taccacagtacctgctacatagatg

SEQ ID NO: 2586313 - DNA, 25 bp, Homo sapien
aatgttgggcttgttacctgtctca

SEQ ID NO: 2586314 - DNA, 25 bp, Homo sapien
tgatgctaagctccgtaatgttggg

SEQ ID NO: 2586315 - DNA, 25 bp, Homo sapien
tattatgaacagcagtttgagccat

SEQ ID NO: 2586316 - DNA, 25 bp, Homo sapien
acccacgttttagcatttagccttg

SEQ ID NO: 2586317 - DNA, 25 bp, Homo sapien
ccttgggatgacttataaacacttc

SEQ ID NO: 2586318 - DNA, 25 bp, Homo sapien
aaattagcctcctgtttcgcattgg

SEQ ID NO: 2586319 - DNA, 25 bp, Homo sapien
taacagtatgctgtcacaggtgcca

SEQ ID NO: 2586320 - DNA, 25 bp, Homo sapien
cagagatggcatggtaaagtacgat

SEQ ID NO: 2586321 - DNA, 25 bp, Homo sapien
tacagcccctaaaagtgacttgcag

SEQ ID NO: 2586322 - DNA, 25 bp, Homo sapien
taccagtactaaggaagtacagccc

SEQ ID NO: 2586323 - DNA, 25 bp, Homo sapien
gctagtggctaatgtattgaacact

SEQ ID NO: 2586324 - DNA, 25 bp, Homo sapien
atgtattgaacactacagctgtaga

SEQ ID NO: 2586325 - DNA, 25 bp, Homo sapien
tgtattgaacactacagctgtagac

SEQ ID NO: 2586326 - DNA, 25 bp, Homo sapien
ccttggttgccttaacggatgtaga

SEQ ID NO: 2586327 - DNA, 25 bp, Homo sapien
catctgctacagactgcatgtttgt

SEQ ID NO: 2586328 - DNA, 25 bp, Homo sapien
taatatgtcagcctattaccatctg

SEQ ID NO: 2586329 - DNA, 25 bp, Homo sapien
tactgccaccctactatcgggtaga

SEQ ID NO: 2586330 - DNA, 25 bp, Homo sapien
gcatccttcagcttttaataatctg

SEQ ID NO: 2586331 - DNA, 25 bp, Homo sapien
ttacgtgggcatccttcagctttta

SEQ ID NO: 2586332 - DNA, 25 bp, Homo sapien
aaaattctatttacccattgtcaat

SEQ ID NO: 2586333 - DNA, 25 bp, Homo sapien
gaaaaattctatttacccattgtca

SEQ ID NO: 2586334 - DNA, 25 bp, Homo sapien
tctcctctacagctcccgtgtctgg

SEQ ID NO: 2586335 - DNA, 25 bp, Homo sapien
ggtctcctctacagctcccgtgtct

SEQ ID NO: 2586336 - DNA, 25 bp, Homo sapien
tcctctacagctcccgtgtctggga

SEQ ID NO: 2586337 - DNA, 25 bp, Homo sapien
gaggtctcctctacagctcccgtgt

SEQ ID NO: 2586338 - DNA, 25 bp, Homo sapien
ctcccgtttctaaagcacccactat

SEQ ID NO: 2586339 - DNA, 25 bp, Homo sapien
ctaaagcacccactatggatgcaca

SEQ ID NO: 2586340 - DNA, 25 bp, Homo sapien
ttctaaagcacccactatggatgca

SEQ ID NO: 2586341 - DNA, 25 bp, Homo sapien
cccgtttctaaagcacccactatgg

SEQ ID NO: 2586342 - DNA, 25 bp, Homo sapien
tagacgcaagattcccctgctgcca

SEQ ID NO: 2586343 - DNA, 25 bp, Homo sapien
ctaggccccgtagacgcaagattcc

SEQ ID NO: 2586344 - DNA, 25 bp, Homo sapien
tcgggtcacacacggtgtgaaaagg

SEQ ID NO: 2586345 - DNA, 25 bp, Homo sapien
tccacgggaggcttgccggggctaa

SEQ ID NO: 2586346 - DNA, 25 bp, Homo sapien
gcccctcattcctgtttgggccaag

SEQ ID NO: 2586347 - DNA, 25 bp, Homo sapien
ctgtttgggccaaggccgaggacct

SEQ ID NO: 2586348 - DNA, 25 bp, Homo sapien
tgtcactggtgccattatgtgctca

SEQ ID NO: 2586349 - DNA, 25 bp, Homo sapien
ccttgcgcgggtacctggctgcgct

SEQ ID NO: 2586350 - DNA, 25 bp, Homo sapien
tccaagcctttcaggttctaggtgg

SEQ ID NO: 2586351 - DNA, 25 bp, Homo sapien
tagctctttcgctttggccaatttc

SEQ ID NO: 2586352 - DNA, 25 bp, Homo sapien
gaattaacgttcatgaacctccgcc

SEQ ID NO: 2586353 - DNA, 25 bp, Homo sapien
tctcccatttgaaacgagtgtattt

SEQ ID NO: 2586354 - DNA, 25 bp, Homo sapien
tcctctatgcaacctagcaatcaag

SEQ ID NO: 2586355 - DNA, 25 bp, Homo sapien
tctgaagccagatattaaggtactt

SEQ ID NO: 2586356 - DNA, 25 bp, Homo sapien
tctgatcctgtctaagatctgaagc

SEQ ID NO: 2586357 - DNA, 25 bp, Homo sapien
ggctattcacaagaacgatcatcgc

SEQ ID NO: 2586358 - DNA, 25 bp, Homo sapien
tttgtatgctggtaactaattttaa

SEQ ID NO: 2586359 - DNA, 25 bp, Homo sapien
ggaaatagagaaagtacatataagc

SEQ ID NO: 2586360 - DNA, 25 bp, Homo sapien
tttatgtagatttctgctattcttg

SEQ ID NO: 2586361 - DNA, 25 bp, Homo sapien
aattaattatatttgcatctgggaa

SEQ ID NO: 2586362 - DNA, 25 bp, Homo sapien
aattactaattactcctgaaatcag

SEQ ID NO: 2586363 - DNA, 25 bp, Homo sapien
aaagattttataacagtatcctatg

SEQ ID NO: 2586364 - DNA, 25 bp, Homo sapien
gtatcctatgaaatctactactttc

SEQ ID NO: 2586365 - DNA, 25 bp, Homo sapien
gcttcctttaacaccctattcattg

SEQ ID NO: 2586366 - DNA, 25 bp, Homo sapien
atgatctggactcactgaaacctct

SEQ ID NO: 2586367 - DNA, 25 bp, Homo sapien
tgcctcccaggttcaagtgattctc

SEQ ID NO: 2586368 - DNA, 25 bp, Homo sapien
ctgcctcagcctctggaatagctgg

SEQ ID NO: 2586369 - DNA, 25 bp, Homo sapien
gccaccgtgcccggccctgaaccaa

SEQ ID NO: 2586370 - DNA, 25 bp, Homo sapien
ggaggcaagagagaccagggcttag

SEQ ID NO: 2586371 - DNA, 25 bp, Homo sapien
caagagagaccagggcttagggagg

SEQ ID NO: 2586372 - DNA, 25 bp, Homo sapien
ggcaagagagaccagggcttaggga

SEQ ID NO: 2586373 - DNA, 25 bp, Homo sapien
gagagaccagggcttagggagggac

SEQ ID NO: 2586374 - DNA, 25 bp, Homo sapien
gtcccagcctggttgtccacgactt

SEQ ID NO: 2586375 - DNA, 25 bp, Homo sapien
gtccacgactttgttttctgcattc

SEQ ID NO: 2586376 - DNA, 25 bp, Homo sapien
tggttactgcacttgacggagatct

SEQ ID NO: 2586377 - DNA, 25 bp, Homo sapien
aactggttactgcacttgacggaga

SEQ ID NO: 2586378 - DNA, 25 bp, Homo sapien
acggccaccagaggttggcacccag

SEQ ID NO: 2586379 - DNA, 25 bp, Homo sapien
ggaggcggggtgttcgtgcatcagg

SEQ ID NO: 2586380 - DNA, 25 bp, Homo sapien
tcaggtacggccaccagaggttggc

SEQ ID NO: 2586381 - DNA, 25 bp, Homo sapien
ctcccacgagtacagggaggcgggg

SEQ ID NO: 2586382 - DNA, 25 bp, Homo sapien
gcaaaagacctcccttacgcaagtc

SEQ ID NO: 2586383 - DNA, 25 bp, Homo sapien
ctgctgaagccagggctaccagatg

SEQ ID NO: 2586384 - DNA, 25 bp, Homo sapien
ttacgcaagtcccaaaccaccatta

SEQ ID NO: 2586385 - DNA, 25 bp, Homo sapien
tgcccgttcacctgtcctgggctcc

SEQ ID NO: 2586386 - DNA, 25 bp, Homo sapien
gggcacagtgcggagccccacaggg

SEQ ID NO: 2586387 - DNA, 25 bp, Homo sapien
tggctctcggtgacgggcacagtgc

SEQ ID NO: 2586388 - DNA, 25 bp, Homo sapien
agccgcacctacgacagccaaagcg

SEQ ID NO: 2586389 - DNA, 25 bp, Homo sapien
acgacagccaaagcgccaggtgtga

SEQ ID NO: 2586390 - DNA, 25 bp, Homo sapien
aggtcactggactgaacactgccag

SEQ ID NO: 2586391 - DNA, 25 bp, Homo sapien
accctgccgggtacacagagctgag

SEQ ID NO: 2586392 - DNA, 25 bp, Homo sapien
actgccagaaatgaggttcacttcc

SEQ ID NO: 2586393 - DNA, 25 bp, Homo sapien
gaggcgtagccaccctgccgggtac

SEQ ID NO: 2586394 - DNA, 25 bp, Homo sapien
cccttgtctgctgcgtaggtggagt

SEQ ID NO: 2586395 - DNA, 25 bp, Homo sapien
ccccttgtctgctgcgtaggtggag

SEQ ID NO: 2586396 - DNA, 25 bp, Homo sapien
gagtagtagctgttcacacggatca

SEQ ID NO: 2586397 - DNA, 25 bp, Homo sapien
tagttgcgataccaagagtagtagc

SEQ ID NO: 2586398 - DNA, 25 bp, Homo sapien
ccaattctcaaactgggcggccagc

SEQ ID NO: 2586399 - DNA, 25 bp, Homo sapien
gaatcaactccaggtgcccgtagtt

SEQ ID NO: 2586400 - DNA, 25 bp, Homo sapien
gaataatgggattgtgatgtcttac

SEQ ID NO: 2586401 - DNA, 25 bp, Homo sapien
aataatgggattgtgatgtcttaca

SEQ ID NO: 2586402 - DNA, 25 bp, Homo sapien
ctggtgaagccttacaagcgtttcc

SEQ ID NO: 2586403 - DNA, 25 bp, Homo sapien
tgaagccttacaagcgtttccactc

SEQ ID NO: 2586404 - DNA, 25 bp, Homo sapien
ggtgaagccttacaagcgtttccac

SEQ ID NO: 2586405 - DNA, 25 bp, Homo sapien
gaagccttacaagcgtttccactcc

SEQ ID NO: 2586406 - DNA, 25 bp, Homo sapien
ggctgtctggaaacaaggccagtaa

SEQ ID NO: 2586407 - DNA, 25 bp, Homo sapien
ctgtctggaaacaaggccagtaagg

SEQ ID NO: 2586408 - DNA, 25 bp, Homo sapien
aggctgtctggaaacaaggccagta

SEQ ID NO: 2586409 - DNA, 25 bp, Homo sapien
taggactttgtcctatgggcctggg

SEQ ID NO: 2586410 - DNA, 25 bp, Homo sapien
cagtggaaacagatcagtggccagg

SEQ ID NO: 2586411 - DNA, 25 bp, Homo sapien
ggcagaaagaatagctcaagcaaga

SEQ ID NO: 2586412 - DNA, 25 bp, Homo sapien
tcttttagttggtgattatggtgcc

SEQ ID NO: 2586413 - DNA, 25 bp, Homo sapien
cagaacagtgcagtccattgtgggt

SEQ ID NO: 2586414 - DNA, 25 bp, Homo sapien
tctgtaagcacgataaatttaaggg

SEQ ID NO: 2586415 - DNA, 25 bp, Homo sapien
tggctgttccctgtgtgtcaacggg

SEQ ID NO: 2586416 - DNA, 25 bp, Homo sapien
gcaacatatctttggtgagaaggac

SEQ ID NO: 2586417 - DNA, 25 bp, Homo sapien
ataaagatccacttgatggtgacca

SEQ ID NO: 2586418 - DNA, 25 bp, Homo sapien
aataaagatccacttgatggtgacc

SEQ ID NO: 2586419 - DNA, 25 bp, Homo sapien
ttgatggtgaccaaaatatctgtcc

SEQ ID NO: 2586420 - DNA, 25 bp, Homo sapien
agcagacttttccggtcctcttcac

SEQ ID NO: 2586421 - DNA, 25 bp, Homo sapien
tctagcagacttttccggtcctctt

SEQ ID NO: 2586422 - DNA, 25 bp, Homo sapien
gacttttccggtcctcttcactgaa

SEQ ID NO: 2586423 - DNA, 25 bp, Homo sapien
tttccggtcctcttcactgaacatc

SEQ ID NO: 2586424 - DNA, 25 bp, Homo sapien
ggtacattatcccatgcgctaaact

SEQ ID NO: 2586425 - DNA, 25 bp, Homo sapien
acgggtacattatcccatgcgctaa

SEQ ID NO: 2586426 - DNA, 25 bp, Homo sapien
tacattatcccatgcgctaaactgc

SEQ ID NO: 2586427 - DNA, 25 bp, Homo sapien
cgggtacattatcccatgcgctaaa

SEQ ID NO: 2586428 - DNA, 25 bp, Homo sapien
caatattcttacagccaaaatgtcc

SEQ ID NO: 2586429 - DNA, 25 bp, Homo sapien
tccaatattcttacagccaaaatgt

SEQ ID NO: 2586430 - DNA, 25 bp, Homo sapien
tattcttacagccaaaatgtccaga

SEQ ID NO: 2586431 - DNA, 25 bp, Homo sapien
tcttacagccaaaatgtccagaatg

SEQ ID NO: 2586432 - DNA, 25 bp, Homo sapien
cctaggaaattctcaacacaaccta

SEQ ID NO: 2586433 - DNA, 25 bp, Homo sapien
aaattctcaacacaacctacatgga

SEQ ID NO: 2586434 - DNA, 25 bp, Homo sapien
ggaaattctcaacacaacctacatg

SEQ ID NO: 2586435 - DNA, 25 bp, Homo sapien
cttttcctaggaaattctcaacaca

SEQ ID NO: 2586436 - DNA, 25 bp, Homo sapien
ctgccatattcaagacgcgttgaaa

SEQ ID NO: 2586437 - DNA, 25 bp, Homo sapien
ccatgcctggtctgaagacttttaa

SEQ ID NO: 2586438 - DNA, 25 bp, Homo sapien
gcgttgaaactcacctgtattcgat

SEQ ID NO: 2586439 - DNA, 25 bp, Homo sapien
gatgggggtcctgctatgctgaaca

SEQ ID NO: 2586440 - DNA, 25 bp, Homo sapien
ccatcctgagtttatggaaagtcca

SEQ ID NO: 2586441 - DNA, 25 bp, Homo sapien
caggtgccacgcagagaagagttgc

SEQ ID NO: 2586442 - DNA, 25 bp, Homo sapien
tgctcaccaccatacagggatgttt

SEQ ID NO: 2586443 - DNA, 25 bp, Homo sapien
cataaagctttgcacctctccacaa

SEQ ID NO: 2586444 - DNA, 25 bp, Homo sapien
tgcctctgctattcacctgtgttat

SEQ ID NO: 2586445 - DNA, 25 bp, Homo sapien
catatattatccattcttcacagca

SEQ ID NO: 2586446 - DNA, 25 bp, Homo sapien
tagctctctcacagaattatagcaa

SEQ ID NO: 2586447 - DNA, 25 bp, Homo sapien
tggctttgccgtggcaaattaaata

SEQ ID NO: 2586448 - DNA, 25 bp, Homo sapien
taaccgatatgtactgccataaaca

SEQ ID NO: 2586449 - DNA, 25 bp, Homo sapien
ccgatatgtactgccataaacaaga

SEQ ID NO: 2586450 - DNA, 25 bp, Homo sapien
aatcataaccgatatgtactgccat

SEQ ID NO: 2586451 - DNA, 25 bp, Homo sapien
cataaccgatatgtactgccataaa

SEQ ID NO: 2586452 - DNA, 25 bp, Homo sapien
gaaagactcagtgctaatctctaca

SEQ ID NO: 2586453 - DNA, 25 bp, Homo sapien
gctacagacgctattttttggttca

SEQ ID NO: 2586454 - DNA, 25 bp, Homo sapien
tttggttcaacatgacctgagcagt

SEQ ID NO: 2586455 - DNA, 25 bp, Homo sapien
gaagaagcaagaataggctcaggga

SEQ ID NO: 2586456 - DNA, 25 bp, Homo sapien
taattttaagccatatgcagcccta

SEQ ID NO: 2586457 - DNA, 25 bp, Homo sapien
caatatgagctatgtaggaagtcca

SEQ ID NO: 2586458 - DNA, 25 bp, Homo sapien
tgtatgacttacctatagaaaaccc

SEQ ID NO: 2586459 - DNA, 25 bp, Homo sapien
taatcctatcgcctcaataatgcat

SEQ ID NO: 2586460 - DNA, 25 bp, Homo sapien
ctcttaagagtccagtcctaaatca

SEQ ID NO: 2586461 - DNA, 25 bp, Homo sapien
gaataggtagcgataaaacactggc

SEQ ID NO: 2586462 - DNA, 25 bp, Homo sapien
tcatattcattctaacagaggacat

SEQ ID NO: 2586463 - DNA, 25 bp, Homo sapien
gatatctgttatatggctgaactga

SEQ ID NO: 2586464 - DNA, 25 bp, Homo sapien
gtgcacctaccccaacacactctct

SEQ ID NO: 2586465 - DNA, 25 bp, Homo sapien
tgttgctagacaaaagtgagctacg

SEQ ID NO: 2586466 - DNA, 25 bp, Homo sapien
ctagacaaaagtgagctacggatca

SEQ ID NO: 2586467 - DNA, 25 bp, Homo sapien
ttgctagacaaaagtgagctacgga

SEQ ID NO: 2586468 - DNA, 25 bp, Homo sapien
aaaggactattaactcacaaacagg

SEQ ID NO: 2586469 - DNA, 25 bp, Homo sapien
tagttggttgaaggcagaatgccca

SEQ ID NO: 2586470 - DNA, 25 bp, Homo sapien
gacttcgaggatgaagagtcactca

SEQ ID NO: 2586471 - DNA, 25 bp, Homo sapien
gaaacagccatctgcaaagacctca

SEQ ID NO: 2586472 - DNA, 25 bp, Homo sapien
gttgtacaggttatgttgtcacccg

SEQ ID NO: 2586473 - DNA, 25 bp, Homo sapien
attacgtgtgtgaaacactgcacct

SEQ ID NO: 2586474 - DNA, 25 bp, Homo sapien
caggttatgttgtcacccgggtatt

SEQ ID NO: 2586475 - DNA, 25 bp, Homo sapien
gtttaagttcagcagtacacgtgca

SEQ ID NO: 2586476 - DNA, 25 bp, Homo sapien
cacgccctgatgatagacacgtttt

SEQ ID NO: 2586477 - DNA, 25 bp, Homo sapien
tgatcatgattgtgtctgtggagac

SEQ ID NO: 2586478 - DNA, 25 bp, Homo sapien
ggcttccagtagattgagactttta

SEQ ID NO: 2586479 - DNA, 25 bp, Homo sapien
gacttttatttctagctgagctgct

SEQ ID NO: 2586480 - DNA, 25 bp, Homo sapien
tccttgcctacagaactatcagaaa

SEQ ID NO: 2586481 - DNA, 25 bp, Homo sapien
taaactaatgctatctgagagtgca

SEQ ID NO: 2586482 - DNA, 25 bp, Homo sapien
tgtaaggttgcaacagccctctcaa

SEQ ID NO: 2586483 - DNA, 25 bp, Homo sapien
agaaggccctcattacatgctggta

SEQ ID NO: 2586484 - DNA, 25 bp, Homo sapien
tccatagagcccagatcgagttcct

SEQ ID NO: 2586485 - DNA, 25 bp, Homo sapien
cactaaggcacatgggtctaattcc

SEQ ID NO: 2586486 - DNA, 25 bp, Homo sapien
gagttcctaagttctcactaaggca

SEQ ID NO: 2586487 - DNA, 25 bp, Homo sapien
gacattttcagcatggaacattcta

SEQ ID NO: 2586488 - DNA, 25 bp, Homo sapien
caccattgtattttgagagttcatg

SEQ ID NO: 2586489 - DNA, 25 bp, Homo sapien
gaaattttgtgagaatgaactgtac

SEQ ID NO: 2586490 - DNA, 25 bp, Homo sapien
tgagaatgaactgtaccgtgaagct

SEQ ID NO: 2586491 - DNA, 25 bp, Homo sapien
ccgtgaagctcacctgcatctgatt

SEQ ID NO: 2586492 - DNA, 25 bp, Homo sapien
tatcaaggatcacatgggtcagcac

SEQ ID NO: 2586493 - DNA, 25 bp, Homo sapien
ggagttgtctcactatcaaaggaac

SEQ ID NO: 2586494 - DNA, 25 bp, Homo sapien
tcattgtttatggatgggcccaaaa

SEQ ID NO: 2586495 - DNA, 25 bp, Homo sapien
tgaaactgccattagaggactatgc

SEQ ID NO: 2586496 - DNA, 25 bp, Homo sapien
tgaataggtattcaggttttcagag

SEQ ID NO: 2586497 - DNA, 25 bp, Homo sapien
tgttactgtttatcatgagtacgca

SEQ ID NO: 2586498 - DNA, 25 bp, Homo sapien
taaaaactgcgaaagcatgtccaaa

SEQ ID NO: 2586499 - DNA, 25 bp, Homo sapien
tcatgagtacgcacaaaaaaccact

SEQ ID NO: 2586500 - DNA, 25 bp, Homo sapien
cattgtccaaatgtacacgtaagat

SEQ ID NO: 2586501 - DNA, 25 bp, Homo sapien
gaaacagagatagagacattgtcca

SEQ ID NO: 2586502 - DNA, 25 bp, Homo sapien
tgagtttttggaacaagcttaactg

SEQ ID NO: 2586503 - DNA, 25 bp, Homo sapien
tcagatttatactacatgaagcaac

SEQ ID NO: 2586504 - DNA, 25 bp, Homo sapien
cacataggtgaaaatcaagagcttc

SEQ ID NO: 2586505 - DNA, 25 bp, Homo sapien
tctgagttaaaatggagagtcttcc

SEQ ID NO: 2586506 - DNA, 25 bp, Homo sapien
ccacagtggccttgaatagaaatcc

SEQ ID NO: 2586507 - DNA, 25 bp, Homo sapien
taggacgtcgacattttagtaagcc

SEQ ID NO: 2586508 - DNA, 25 bp, Homo sapien
taatttttgagtaagatgtcctata

SEQ ID NO: 2586509 - DNA, 25 bp, Homo sapien
gatgtcctatatgttaattttgcac

SEQ ID NO: 2586510 - DNA, 25 bp, Homo sapien
aattctttggtgtcattcgtgtcaa

SEQ ID NO: 2586511 - DNA, 25 bp, Homo sapien
gatagatttatgtgatctgctcatt

SEQ ID NO: 2586512 - DNA, 25 bp, Homo sapien
actcataccacttggttgcttccaa

SEQ ID NO: 2586513 - DNA, 25 bp, Homo sapien
gagtaggggccaactcataccactt

SEQ ID NO: 2586514 - DNA, 25 bp, Homo sapien
gggccaactcataccacttggttgc

SEQ ID NO: 2586515 - DNA, 25 bp, Homo sapien
caactcataccacttggttgcttcc

SEQ ID NO: 2586516 - DNA, 25 bp, Homo sapien
tatgatttcctagttcttttgtctt

SEQ ID NO: 2586517 - DNA, 25 bp, Homo sapien
gttggtgtctgttgtctttctctca

SEQ ID NO: 2586518 - DNA, 25 bp, Homo sapien
tctctcattcaggttatgatttcct

SEQ ID NO: 2586519 - DNA, 25 bp, Homo sapien
ccccttttttatgtctgtgttggtg

SEQ ID NO: 2586520 - DNA, 25 bp, Homo sapien
cagtaaattctgttggcatgttttc

SEQ ID NO: 2586521 - DNA, 25 bp, Homo sapien
ttagtcccacattctatctcctcgt

SEQ ID NO: 2586522 - DNA, 25 bp, Homo sapien
tatgtcttccatctaatttgggaag

SEQ ID NO: 2586523 - DNA, 25 bp, Homo sapien
tcctgtgattatgaatgttagctct

SEQ ID NO: 2586524 - DNA, 25 bp, Homo sapien
gaagggctgccatggaagtctctga

SEQ ID NO: 2586525 - DNA, 25 bp, Homo sapien
tctctttgctaaggcagagtaacag

SEQ ID NO: 2586526 - DNA, 25 bp, Homo sapien
gtaacagtgatctttgggctctagt

SEQ ID NO: 2586527 - DNA, 25 bp, Homo sapien
tcaggcccaacaccatatggaatcc

SEQ ID NO: 2586528 - DNA, 25 bp, Homo sapien
tcaggaaagaattgccccaaagacc

SEQ ID NO: 2586529 - DNA, 25 bp, Homo sapien
ttcggaggctccacgagaggagacc

SEQ ID NO: 2586530 - DNA, 25 bp, Homo sapien
gctttctagtctctgcgggagagca

SEQ ID NO: 2586531 - DNA, 25 bp, Homo sapien
agacaccatgtgtggcgtccaggca

SEQ ID NO: 2586532 - DNA, 25 bp, Homo sapien
tctacggcgggctttggaaatactc

SEQ ID NO: 2586533 - DNA, 25 bp, Homo sapien
gttaaatgccaacaatgaccacctg

SEQ ID NO: 2586534 - DNA, 25 bp, Homo sapien
taggagaccgtgaaaccctctactc

SEQ ID NO: 2586535 - DNA, 25 bp, Homo sapien
tgtcgagctgatcctgtaaatctga

SEQ ID NO: 2586536 - DNA, 25 bp, Homo sapien
atgaggacaggccagctgatttttc

SEQ ID NO: 2586537 - DNA, 25 bp, Homo sapien
ggaccggggatgaggacaggccagc

SEQ ID NO: 2586538 - DNA, 25 bp, Homo sapien
ggatgctgagaggtgaactggctgc

SEQ ID NO: 2586539 - DNA, 25 bp, Homo sapien
ctcctttcccacttgggatgctgag

SEQ ID NO: 2586540 - DNA, 25 bp, Homo sapien
gagaggacgcttcggtctctgtacg

SEQ ID NO: 2586541 - DNA, 25 bp, Homo sapien
cagctgcagccgacaggtaactgtt

SEQ ID NO: 2586542 - DNA, 25 bp, Homo sapien
tatcataacctggtagcaggatcca

SEQ ID NO: 2586543 - DNA, 25 bp, Homo sapien
tcaggatgcttcagccctgaggctt

SEQ ID NO: 2586544 - DNA, 25 bp, Homo sapien
tcctggaggtgaaacatgacaggtg

SEQ ID NO: 2586545 - DNA, 25 bp, Homo sapien
tctctgttgagtttgggtatcacgt

SEQ ID NO: 2586546 - DNA, 25 bp, Homo sapien
tgttcatgagtgagactggtctgta

SEQ ID NO: 2586547 - DNA, 25 bp, Homo sapien
ccaactgccaggtcttatatgttaa

SEQ ID NO: 2586548 - DNA, 25 bp, Homo sapien
ctgaacctgtgtgacttgactgcca

SEQ ID NO: 2586549 - DNA, 25 bp, Homo sapien
gcagctgtgcacacaacacacttct

SEQ ID NO: 2586550 - DNA, 25 bp, Homo sapien
cacacttcttcaacagcaagaccat

SEQ ID NO: 2586551 - DNA, 25 bp, Homo sapien
tgtgtgacttgactgccatcctttt

SEQ ID NO: 2586552 - DNA, 25 bp, Homo sapien
tctgtctcaggacactacacccttg

SEQ ID NO: 2586553 - DNA, 25 bp, Homo sapien
ttcaccttgggtgtgccctttgtct

SEQ ID NO: 2586554 - DNA, 25 bp, Homo sapien
aaatccaggcgtcctctggttttgt

SEQ ID NO: 2586555 - DNA, 25 bp, Homo sapien
caccttgggtgtgccctttgtcttg

SEQ ID NO: 2586556 - DNA, 25 bp, Homo sapien
tcctggccctagatgtgatgtagct

SEQ ID NO: 2586557 - DNA, 25 bp, Homo sapien
tctccgtgcgctgacgttgcctggg

SEQ ID NO: 2586558 - DNA, 25 bp, Homo sapien
cttggtcgagttgttggctgctgtc

SEQ ID NO: 2586559 - DNA, 25 bp, Homo sapien
ctgggcttagccttgactttggtct

SEQ ID NO: 2586560 - DNA, 25 bp, Homo sapien
ggcccacaggctggcgactcctgca

SEQ ID NO: 2586561 - DNA, 25 bp, Homo sapien
gctgtcaaagggtcccgggcccaca

SEQ ID NO: 2586562 - DNA, 25 bp, Homo sapien
ctgtcaaagggtcccgggcccacag

SEQ ID NO: 2586563 - DNA, 25 bp, Homo sapien
gcggtcaggcgtactgacttcttat

SEQ ID NO: 2586564 - DNA, 25 bp, Homo sapien
tcaggcgtactgacttcttatcctt

SEQ ID NO: 2586565 - DNA, 25 bp, Homo sapien
cgccagcggtcaggcgtactgactt

SEQ ID NO: 2586566 - DNA, 25 bp, Homo sapien
ctgccgccagcggtcaggcgtactg

SEQ ID NO: 2586567 - DNA, 25 bp, Homo sapien
taaaatctagtgcatccgctgccgg

SEQ ID NO: 2586568 - DNA, 25 bp, Homo sapien
tatttacccgagacaacgtaactgc

SEQ ID NO: 2586569 - DNA, 25 bp, Homo sapien
cctgagatgaccaaccccgggtatt

SEQ ID NO: 2586570 - DNA, 25 bp, Homo sapien
ggatacgaacttagccttgcaggga

SEQ ID NO: 2586571 - DNA, 25 bp, Homo sapien
ctggaacctgcaggcgatgaatcat

SEQ ID NO: 2586572 - DNA, 25 bp, Homo sapien
gtgggtttttctgctggaacctgca

SEQ ID NO: 2586573 - DNA, 25 bp, Homo sapien
caggatgtggtaggtgggtttttct

SEQ ID NO: 2586574 - DNA, 25 bp, Homo sapien
gctggaacctgcaggcgatgaatca

SEQ ID NO: 2586575 - DNA, 25 bp, Homo sapien
gatggactaaaacattggccgttgt

SEQ ID NO: 2586576 - DNA, 25 bp, Homo sapien
ccttatgggctttcgaacagtgacc

SEQ ID NO: 2586577 - DNA, 25 bp, Homo sapien
gtggagcttccatggtctctctggg

SEQ ID NO: 2586578 - DNA, 25 bp, Homo sapien
tgttataaaaggatgcaactcagga

SEQ ID NO: 2586579 - DNA, 25 bp, Homo sapien
aagattcaggcaagcccattttcag

SEQ ID NO: 2586580 - DNA, 25 bp, Homo sapien
gggtcgcggccaggcagaggtgctc

SEQ ID NO: 2586581 - DNA, 25 bp, Homo sapien
acggggtcgcggccaggcagaggtg

SEQ ID NO: 2586582 - DNA, 25 bp, Homo sapien
atgggatggcggccgggaagaggcg

SEQ ID NO: 2586583 - DNA, 25 bp, Homo sapien
gtcgcggccaggcagaggtgctcct

SEQ ID NO: 2586584 - DNA, 25 bp, Homo sapien
gagtttctgagcggggcccctctac

SEQ ID NO: 2586585 - DNA, 25 bp, Homo sapien
tagggaggagtttctgagcggggcc

SEQ ID NO: 2586586 - DNA, 25 bp, Homo sapien
ctagggaggagtttctgagcggggc

SEQ ID NO: 2586587 - DNA, 25 bp, Homo sapien
gaggagtttctgagcggggcccctc

SEQ ID NO: 2586588 - DNA, 25 bp, Homo sapien
tccaccacattgaggagtatgtcgg

SEQ ID NO: 2586589 - DNA, 25 bp, Homo sapien
tgtcggggtccatgcatagcttctt

SEQ ID NO: 2586590 - DNA, 25 bp, Homo sapien
catgtcctggaagacgagtccatgc

SEQ ID NO: 2586591 - DNA, 25 bp, Homo sapien
gggtcccagacagagtattcataaa

SEQ ID NO: 2586592 - DNA, 25 bp, Homo sapien
ctgtgggaacacagccccccactag

SEQ ID NO: 2586593 - DNA, 25 bp, Homo sapien
ctctgagaaactggacgccaagctg

SEQ ID NO: 2586594 - DNA, 25 bp, Homo sapien
gctctgagaaactggacgccaagct

SEQ ID NO: 2586595 - DNA, 25 bp, Homo sapien
gagaagagatgatgtaaactatacg

SEQ ID NO: 2586596 - DNA, 25 bp, Homo sapien
tatacgagcatccttatgccaagct

SEQ ID NO: 2586597 - DNA, 25 bp, Homo sapien
cctgttctccacaatggcttggctg

SEQ ID NO: 2586598 - DNA, 25 bp, Homo sapien
gcaagtactcataattcagggaggg

SEQ ID NO: 2586599 - DNA, 25 bp, Homo sapien
gcccatggtgggcaagtactcataa

SEQ ID NO: 2586600 - DNA, 25 bp, Homo sapien
catggtgggcaagtactcataattc

SEQ ID NO: 2586601 - DNA, 25 bp, Homo sapien
ggatggccttcatttgtcatgcaga

SEQ ID NO: 2586602 - DNA, 25 bp, Homo sapien
ctgccctctagcttgtgggcgaggg

SEQ ID NO: 2586603 - DNA, 25 bp, Homo sapien
tgggcgaggggcacatccatgaaca

SEQ ID NO: 2586604 - DNA, 25 bp, Homo sapien
taggctaagaatatcttgttcgggt

SEQ ID NO: 2586605 - DNA, 25 bp, Homo sapien
tttgtaggtctttaacaagctgccc

SEQ ID NO: 2586606 - DNA, 25 bp, Homo sapien
caactgcaggctatgtggagtgccc

SEQ ID NO: 2586607 - DNA, 25 bp, Homo sapien
aactgcaggctatgtggagtgccca

SEQ ID NO: 2586608 - DNA, 25 bp, Homo sapien
tgcaggctatgtggagtgcccaggg

SEQ ID NO: 2586609 - DNA, 25 bp, Homo sapien
actgcaggctatgtggagtgcccag

SEQ ID NO: 2586610 - DNA, 25 bp, Homo sapien
agtctgcgtctgattgactgagccc

SEQ ID NO: 2586611 - DNA, 25 bp, Homo sapien
tgggacctcgccaccaaagctgctg

SEQ ID NO: 2586612 - DNA, 25 bp, Homo sapien
tgagatcaggaagtctgcgtctgat

SEQ ID NO: 2586613 - DNA, 25 bp, Homo sapien
cttgctgccccgcagatcctagaga

SEQ ID NO: 2586614 - DNA, 25 bp, Homo sapien
gaattgcatgttatgcttcagctgc

SEQ ID NO: 2586615 - DNA, 25 bp, Homo sapien
taaactgaattgcatgttatgcttc

SEQ ID NO: 2586616 - DNA, 25 bp, Homo sapien
actgaattgcatgttatgcttcagc

SEQ ID NO: 2586617 - DNA, 25 bp, Homo sapien
cctcaaattaaactgaattgcatgt

SEQ ID NO: 2586618 - DNA, 25 bp, Homo sapien
gaaatcttgcacacctcagacacca

SEQ ID NO: 2586619 - DNA, 25 bp, Homo sapien
atcttgcacacctcagacaccagag

SEQ ID NO: 2586620 - DNA, 25 bp, Homo sapien
aaatcttgcacacctcagacaccag

SEQ ID NO: 2586621 - DNA, 25 bp, Homo sapien
aatcttgcacacctcagacaccaga

SEQ ID NO: 2586622 - DNA, 25 bp, Homo sapien
catctttggtatgaaaacatcctga

SEQ ID NO: 2586623 - DNA, 25 bp, Homo sapien
tctttggtatgaaaacatcctgaga

SEQ ID NO: 2586624 - DNA, 25 bp, Homo sapien
agtcatctttggtatgaaaacatcc

SEQ ID NO: 2586625 - DNA, 25 bp, Homo sapien
aaagtcatctttggtatgaaaacat

SEQ ID NO: 2586626 - DNA, 25 bp, Homo sapien
tatgtggaaatctatcgagctcctc

SEQ ID NO: 2586627 - DNA, 25 bp, Homo sapien
gcagcacagaccaggtccaattcac

SEQ ID NO: 2586628 - DNA, 25 bp, Homo sapien
ttcacagggaacacccatatgtgga

SEQ ID NO: 2586629 - DNA, 25 bp, Homo sapien
cagaccaggtccaattcacagggaa

SEQ ID NO: 2586630 - DNA, 25 bp, Homo sapien
tttgaccaacccaagcaatgctttg

SEQ ID NO: 2586631 - DNA, 25 bp, Homo sapien
taatttactgcctctgtcaaaagcc

SEQ ID NO: 2586632 - DNA, 25 bp, Homo sapien
taaggcaccactggattatagcatg

SEQ ID NO: 2586633 - DNA, 25 bp, Homo sapien
gagcgtggctttgctactcaatggc

SEQ ID NO: 2586634 - DNA, 25 bp, Homo sapien
aaaccctggcgaagtccttctgaca

SEQ ID NO: 2586635 - DNA, 25 bp, Homo sapien
gaggtagatcggagccattccatgg

SEQ ID NO: 2586636 - DNA, 25 bp, Homo sapien
cactgctgtgaggtagatcggagcc

SEQ ID NO: 2586637 - DNA, 25 bp, Homo sapien
ccttctgacactgctgtgaggtaga

SEQ ID NO: 2586638 - DNA, 25 bp, Homo sapien
ttccacaggttctgatcaacagagt

SEQ ID NO: 2586639 - DNA, 25 bp, Homo sapien
cagagcctggagaacactaaggtct

SEQ ID NO: 2586640 - DNA, 25 bp, Homo sapien
tgagagaggccactgcttgagagca

SEQ ID NO: 2586641 - DNA, 25 bp, Homo sapien
tctcatcagggtttgggtggcagaa

SEQ ID NO: 2586642 - DNA, 25 bp, Homo sapien
ccctgccttcaagtccgagccaggt

SEQ ID NO: 2586643 - DNA, 25 bp, Homo sapien
tcataccggaagtggattctcacct

SEQ ID NO: 2586644 - DNA, 25 bp, Homo sapien
acctccacagctgtcaaacctttga

SEQ ID NO: 2586645 - DNA, 25 bp, Homo sapien
gagaaaacccagaactgaggccgag

SEQ ID NO: 2586646 - DNA, 25 bp, Homo sapien
ccaaggtgcacagggcccggtgttc

SEQ ID NO: 2586647 - DNA, 25 bp, Homo sapien
ggtgcccatgatgagacccaaggtg

SEQ ID NO: 2586648 - DNA, 25 bp, Homo sapien
cgggttgaaggcagaattggcataa

SEQ ID NO: 2586649 - DNA, 25 bp, Homo sapien
gcataacctagccagttcagggcaa

SEQ ID NO: 2586650 - DNA, 25 bp, Homo sapien
caagagagctgttctcgtgaggcca

SEQ ID NO: 2586651 - DNA, 25 bp, Homo sapien
aaacccgcgcgtagacgaagagcat

SEQ ID NO: 2586652 - DNA, 25 bp, Homo sapien
gggtttcgatgctggcggtcacaca

SEQ ID NO: 2586653 - DNA, 25 bp, Homo sapien
cacgttggtcatggtctggagtctc

SEQ ID NO: 2586654 - DNA, 25 bp, Homo sapien
ggacagcaaggcatgagagcgactt

SEQ ID NO: 2586655 - DNA, 25 bp, Homo sapien
tcttctctagctgtcccagccagag

SEQ ID NO: 2586656 - DNA, 25 bp, Homo sapien
agtagcgacgcttaaaggggcagct

SEQ ID NO: 2586657 - DNA, 25 bp, Homo sapien
gggggtctcccaaatcacctggctc

SEQ ID NO: 2586658 - DNA, 25 bp, Homo sapien
tgagtcatcttgatagatgtcgcac

SEQ ID NO: 2586659 - DNA, 25 bp, Homo sapien
ggcctggtcgatacctgtctggcta

SEQ ID NO: 2586660 - DNA, 25 bp, Homo sapien
actgaaaggcgccaggaaaaaggcg

SEQ ID NO: 2586661 - DNA, 25 bp, Homo sapien
aaaaaggcggcctggtcgatacctg

SEQ ID NO: 2586662 - DNA, 25 bp, Homo sapien
tagaccctgagacgtaagaccaaga

SEQ ID NO: 2586663 - DNA, 25 bp, Homo sapien
gaatacttctcgtctcctgatcagg

SEQ ID NO: 2586664 - DNA, 25 bp, Homo sapien
tgttccccaattgcaacaacagtgg

SEQ ID NO: 2586665 - DNA, 25 bp, Homo sapien
tttgctcagtgggaaagggacacac

SEQ ID NO: 2586666 - DNA, 25 bp, Homo sapien
gatcaagaacaccagggtatgggct

SEQ ID NO: 2586667 - DNA, 25 bp, Homo sapien
atcaagaacaccagggtatgggctg

SEQ ID NO: 2586668 - DNA, 25 bp, Homo sapien
agatcaagaacaccagggtatgggc

SEQ ID NO: 2586669 - DNA, 25 bp, Homo sapien
gagatcaagaacaccagggtatggg

SEQ ID NO: 2586670 - DNA, 25 bp, Homo sapien
gggccccttggtagtgctccacacg

SEQ ID NO: 2586671 - DNA, 25 bp, Homo sapien
ggaactgctgatcattcggaaggaa

SEQ ID NO: 2586672 - DNA, 25 bp, Homo sapien
ccttggtagtgctccacacgatggc

SEQ ID NO: 2586673 - DNA, 25 bp, Homo sapien
tgatcattcggaaggaagggttcgt

SEQ ID NO: 2586674 - DNA, 25 bp, Homo sapien
aaatgtccatctcaaactgtgactc

SEQ ID NO: 2586675 - DNA, 25 bp, Homo sapien
atgtccatctcaaactgtgactctt

SEQ ID NO: 2586676 - DNA, 25 bp, Homo sapien
tccatctcaaactgtgactcttcac

SEQ ID NO: 2586677 - DNA, 25 bp, Homo sapien
ttaaatgtccatctcaaactgtgac

SEQ ID NO: 2586678 - DNA, 25 bp, Homo sapien
ccatcaggaatttccggtcatagat

SEQ ID NO: 2586679 - DNA, 25 bp, Homo sapien
caggaatttccggtcatagatgatc

SEQ ID NO: 2586680 - DNA, 25 bp, Homo sapien
tttccggtcatagatgatcctggta

SEQ ID NO: 2586681 - DNA, 25 bp, Homo sapien
cgcccgcttatcttctgggctattg

SEQ ID NO: 2586682 - DNA, 25 bp, Homo sapien
gcgcacagctgtttcttaggaggag

SEQ ID NO: 2586683 - DNA, 25 bp, Homo sapien
tagaggccagatgtggcactgctcc

SEQ ID NO: 2586684 - DNA, 25 bp, Homo sapien
aataaagacccatgcaccttctagg

SEQ ID NO: 2586685 - DNA, 25 bp, Homo sapien
aagaaccagggtgcatttgggctcc

SEQ ID NO: 2586686 - DNA, 25 bp, Homo sapien
ttaccatgttgcctagggtgggctg

SEQ ID NO: 2586687 - DNA, 25 bp, Homo sapien
tttaccatgttgcctagggtgggct

SEQ ID NO: 2586688 - DNA, 25 bp, Homo sapien
gggtgggctggaactcctgggctca

SEQ ID NO: 2586689 - DNA, 25 bp, Homo sapien
ttttaccatgttgcctagggtgggc

SEQ ID NO: 2586690 - DNA, 25 bp, Homo sapien
ccacatatttgccggtctttgctca

SEQ ID NO: 2586691 - DNA, 25 bp, Homo sapien
taaggcaagagacctccacactgtc

SEQ ID NO: 2586692 - DNA, 25 bp, Homo sapien
cgactgtaccctctgctattctcat

SEQ ID NO: 2586693 - DNA, 25 bp, Homo sapien
agggagtactgagcccgactgtacc

SEQ ID NO: 2586694 - DNA, 25 bp, Homo sapien
ccttaaggcaagagacctccacact

SEQ ID NO: 2586695 - DNA, 25 bp, Homo sapien
acagagccagattctgtcaaacaaa

SEQ ID NO: 2586696 - DNA, 25 bp, Homo sapien
gccagattctgtcaaacaaacaagc

SEQ ID NO: 2586697 - DNA, 25 bp, Homo sapien
gagccagattctgtcaaacaaacaa

SEQ ID NO: 2586698 - DNA, 25 bp, Homo sapien
cagagccagattctgtcaaacaaac

SEQ ID NO: 2586699 - DNA, 25 bp, Homo sapien
agcaggagtgactggggggtactta

SEQ ID NO: 2586700 - DNA, 25 bp, Homo sapien
cttactccaatggtttttcctgaga

SEQ ID NO: 2586701 - DNA, 25 bp, Homo sapien
tacttactccaatggtttttcctga

SEQ ID NO: 2586702 - DNA, 25 bp, Homo sapien
acttactccaatggtttttcctgag

SEQ ID NO: 2586703 - DNA, 25 bp, Homo sapien
ccaatcagtcagagctagttagaaa

SEQ ID NO: 2586704 - DNA, 25 bp, Homo sapien
ggtgagggaagttatgtttcactaa

SEQ ID NO: 2586705 - DNA, 25 bp, Homo sapien
agaaatgctgaatctaggccgggca

SEQ ID NO: 2586706 - DNA, 25 bp, Homo sapien
agtgtggtatgtgcaccaatcagtc

SEQ ID NO: 2586707 - DNA, 25 bp, Homo sapien
ggtttcatcagcgtctgtgcgctgg

SEQ ID NO: 2586708 - DNA, 25 bp, Homo sapien
tcatcatgcaaacaggcgcgtaggt

SEQ ID NO: 2586709 - DNA, 25 bp, Homo sapien
aacaggcgcgtaggtttcatcagcg

SEQ ID NO: 2586710 - DNA, 25 bp, Homo sapien
gcgtaggtttcatcagcgtctgtgc

SEQ ID NO: 2586711 - DNA, 25 bp, Homo sapien
taactcgggtctggaagacgcactc

SEQ ID NO: 2586712 - DNA, 25 bp, Homo sapien
tgtctgacacctaacagaaagagga

SEQ ID NO: 2586713 - DNA, 25 bp, Homo sapien
cgtgcgtgtttgttaggtgtcagct

SEQ ID NO: 2586714 - DNA, 25 bp, Homo sapien
gttctttccaatcacggcgcccttg

SEQ ID NO: 2586715 - DNA, 25 bp, Homo sapien
tcgtgctgtagtccccgggcgggag

SEQ ID NO: 2586716 - DNA, 25 bp, Homo sapien
gtcgtgctgtagtccccgggcggga

SEQ ID NO: 2586717 - DNA, 25 bp, Homo sapien
gagctgcacgccgtcgccgagcacc

SEQ ID NO: 2586718 - DNA, 25 bp, Homo sapien
cacccggcgagtggcggggatggcc

SEQ ID NO: 2586719 - DNA, 25 bp, Homo sapien
gtgcgctgcacccgcgaacctctcg

SEQ ID NO: 2586720 - DNA, 25 bp, Homo sapien
ctgcacccgcgaacctctcgctgcc

SEQ ID NO: 2586721 - DNA, 25 bp, Homo sapien
cgctgcacccgcgaacctctcgctg

SEQ ID NO: 2586722 - DNA, 25 bp, Homo sapien
gcacccgcgaacctctcgctgccct

SEQ ID NO: 2586723 - DNA, 25 bp, Homo sapien
cagttccttagttgcactattcata

SEQ ID NO: 2586724 - DNA, 25 bp, Homo sapien
ctcagaacattctgtcggcctacac

SEQ ID NO: 2586725 - DNA, 25 bp, Homo sapien
tgttcgatacccacatgactagcgg

SEQ ID NO: 2586726 - DNA, 25 bp, Homo sapien
tgactagcggctatctcactggaca

SEQ ID NO: 2586727 - DNA, 25 bp, Homo sapien
aggtggggcaactctgactgtctcc

SEQ ID NO: 2586728 - DNA, 25 bp, Homo sapien
gctgcattgctaggactagactaat

SEQ ID NO: 2586729 - DNA, 25 bp, Homo sapien
ggaaacagcaactgtccatttgagt

SEQ ID NO: 2586730 - DNA, 25 bp, Homo sapien
aattctagtcggcttgcgatgcaga

SEQ ID NO: 2586731 - DNA, 25 bp, Homo sapien
atcctcatacgcttccagtcactga

SEQ ID NO: 2586732 - DNA, 25 bp, Homo sapien
acaaaagtgttatttccgctgtgtt

SEQ ID NO: 2586733 - DNA, 25 bp, Homo sapien
tcactgtaatcctcatacgcttcca

SEQ ID NO: 2586734 - DNA, 25 bp, Homo sapien
cttttggcagtttgtcgagggcttt

SEQ ID NO: 2586735 - DNA, 25 bp, Homo sapien
caccaaatcaacctagtgccctaca

SEQ ID NO: 2586736 - DNA, 25 bp, Homo sapien
accaaatcaacctagtgccctacag

SEQ ID NO: 2586737 - DNA, 25 bp, Homo sapien
ttgtcactgcccttgttgttgtccc

SEQ ID NO: 2586738 - DNA, 25 bp, Homo sapien
ggattctgggtctggaaaattggga

SEQ ID NO: 2586739 - DNA, 25 bp, Homo sapien
agagtcatgggaacaacgtgctctg

SEQ ID NO: 2586740 - DNA, 25 bp, Homo sapien
cttgttgttgtccctgtgcatcccc

SEQ ID NO: 2586741 - DNA, 25 bp, Homo sapien
tcagggagcttgtcccaatggatcg

SEQ ID NO: 2586742 - DNA, 25 bp, Homo sapien
tgcatcgctggtttacaaaggacag

SEQ ID NO: 2586743 - DNA, 25 bp, Homo sapien
tctccttcctgcatcgctggtttac

SEQ ID NO: 2586744 - DNA, 25 bp, Homo sapien
gagcttgtcccaatggatcgtctcc

SEQ ID NO: 2586745 - DNA, 25 bp, Homo sapien
tctgacaccagtgtatctctcagtg

SEQ ID NO: 2586746 - DNA, 25 bp, Homo sapien
ctctcagtgtctggtggatgagaac

SEQ ID NO: 2586747 - DNA, 25 bp, Homo sapien
tgaagtgcactgaaggatgctaacg

SEQ ID NO: 2586748 - DNA, 25 bp, Homo sapien
tgagaacaacctctagggataaggt

SEQ ID NO: 2586749 - DNA, 25 bp, Homo sapien
atctctctattctatctctgatcat

SEQ ID NO: 2586750 - DNA, 25 bp, Homo sapien
caaatgtccacttccagatactaca

SEQ ID NO: 2586751 - DNA, 25 bp, Homo sapien
ccaaatgtccacttccagatactac

SEQ ID NO: 2586752 - DNA, 25 bp, Homo sapien
aatgtccacttccagatactacaaa

SEQ ID NO: 2586753 - DNA, 25 bp, Homo sapien
gtccacttccagatactacaaaaag

SEQ ID NO: 2586754 - DNA, 25 bp, Homo sapien
ctgctgtctacttttgatatataat

SEQ ID NO: 2586755 - DNA, 25 bp, Homo sapien
gatatataatcccgttgccaacgaa

SEQ ID NO: 2586756 - DNA, 25 bp, Homo sapien
gaatgttcaactctgagagctggat

SEQ ID NO: 2586757 - DNA, 25 bp, Homo sapien
tgtctacttttgatatataatcccg

SEQ ID NO: 2586758 - DNA, 25 bp, Homo sapien
gcacagttagttgagtagatacagc

SEQ ID NO: 2586759 - DNA, 25 bp, Homo sapien
agcacagttagttgagtagatacag

SEQ ID NO: 2586760 - DNA, 25 bp, Homo sapien
tcagcacagttagttgagtagatac

SEQ ID NO: 2586761 - DNA, 25 bp, Homo sapien
cagcacagttagttgagtagataca

SEQ ID NO: 2586762 - DNA, 25 bp, Homo sapien
aagtttctgagaatgctgctgtcta

SEQ ID NO: 2586763 - DNA, 25 bp, Homo sapien
tatgggaagatatttcctttttcac

SEQ ID NO: 2586764 - DNA, 25 bp, Homo sapien
tgggaagatatttcctttttcacca

SEQ ID NO: 2586765 - DNA, 25 bp, Homo sapien
ttatgggaagatatttcctttttca

SEQ ID NO: 2586766 - DNA, 25 bp, Homo sapien
gtgaggggacaatggcggcgccagg

SEQ ID NO: 2586767 - DNA, 25 bp, Homo sapien
gctcggagcccgtagacccggacca

SEQ ID NO: 2586768 - DNA, 25 bp, Homo sapien
ggcgggtgaggggacaatggcggcg

SEQ ID NO: 2586769 - DNA, 25 bp, Homo sapien
gcgctcggagcccgtagacccggac

SEQ ID NO: 2586770 - DNA, 25 bp, Homo sapien
ggctgaggcatccccgggacccctc

SEQ ID NO: 2586771 - DNA, 25 bp, Homo sapien
gaattccccactcgcgcaggctgag

SEQ ID NO: 2586772 - DNA, 25 bp, Homo sapien
cgcgcgggggaattccccactcgcg

SEQ ID NO: 2586773 - DNA, 25 bp, Homo sapien
gggggaattccccactcgcgcaggc

SEQ ID NO: 2586774 - DNA, 25 bp, Homo sapien
ttgtccgtccatccactgtgtgtat

SEQ ID NO: 2586775 - DNA, 25 bp, Homo sapien
aggccagggtgaccctcctgaccag

SEQ ID NO: 2586776 - DNA, 25 bp, Homo sapien
tgtttatagatctctgcctgtcttg

SEQ ID NO: 2586777 - DNA, 25 bp, Homo sapien
agacccgagcccgtttgtcctactg

SEQ ID NO: 2586778 - DNA, 25 bp, Homo sapien
tcggcgaagccgtccccttcggaga

SEQ ID NO: 2586779 - DNA, 25 bp, Homo sapien
agctcaaacagcaccggcaggtcgt

SEQ ID NO: 2586780 - DNA, 25 bp, Homo sapien
ggagaagtaggagccctctcccagc

SEQ ID NO: 2586781 - DNA, 25 bp, Homo sapien
ggcaggtcgttgctcccggtgtcca

SEQ ID NO: 2586782 - DNA, 25 bp, Homo sapien
tgaatccgggctgctgttctctgcc

SEQ ID NO: 2586783 - DNA, 25 bp, Homo sapien
ctgaatccgggctgctgttctctgc

SEQ ID NO: 2586784 - DNA, 25 bp, Homo sapien
gctgctgttctctgcctcgggaggc

SEQ ID NO: 2586785 - DNA, 25 bp, Homo sapien
gctgttctctgcctcgggaggcctg

SEQ ID NO: 2586786 - DNA, 25 bp, Homo sapien
tcccgctggtctcgttccccctcac

SEQ ID NO: 2586787 - DNA, 25 bp, Homo sapien
tgctgtcaaggtcaggcaggctcat

SEQ ID NO: 2586788 - DNA, 25 bp, Homo sapien
ggctgctgtcaaggtcaggcaggct

SEQ ID NO: 2586789 - DNA, 25 bp, Homo sapien
ctgctgtcaaggtcaggcaggctca

SEQ ID NO: 2586790 - DNA, 25 bp, Homo sapien
ccaggctgctgtcaaggtcaggcag

SEQ ID NO: 2586791 - DNA, 25 bp, Homo sapien
ggcacggtcaccgaggggctgaaca

SEQ ID NO: 2586792 - DNA, 25 bp, Homo sapien
gtcgggcacggtcaccgaggggctg

SEQ ID NO: 2586793 - DNA, 25 bp, Homo sapien
cgggcacggtcaccgaggggctgaa

SEQ ID NO: 2586794 - DNA, 25 bp, Homo sapien
gcacggtcaccgaggggctgaacag

SEQ ID NO: 2586795 - DNA, 25 bp, Homo sapien
gcatggtctgcaggttatccaggtt

SEQ ID NO: 2586796 - DNA, 25 bp, Homo sapien
gcatccaagtggtcactgagctcat

SEQ ID NO: 2586797 - DNA, 25 bp, Homo sapien
atccaagtggtcactgagctcattc

SEQ ID NO: 2586798 - DNA, 25 bp, Homo sapien
catccaagtggtcactgagctcatt

SEQ ID NO: 2586799 - DNA, 25 bp, Homo sapien
agcatccaagtggtcactgagctca

SEQ ID NO: 2586800 - DNA, 25 bp, Homo sapien
cgggataaggcggtacctgaaccag

SEQ ID NO: 2586801 - DNA, 25 bp, Homo sapien
ataaggcggtacctgaaccagtgcc

SEQ ID NO: 2586802 - DNA, 25 bp, Homo sapien
ggcggtacctgaaccagtgccccag

SEQ ID NO: 2586803 - DNA, 25 bp, Homo sapien
ctggcccgggataaggcggtacctg

SEQ ID NO: 2586804 - DNA, 25 bp, Homo sapien
ctgcacccccgtgtacgcctgcaca

SEQ ID NO: 2586805 - DNA, 25 bp, Homo sapien
caggctgcacccccgtgtacgcctg

SEQ ID NO: 2586806 - DNA, 25 bp, Homo sapien
ggctgcacccccgtgtacgcctgca

SEQ ID NO: 2586807 - DNA, 25 bp, Homo sapien
gcacccccgtgtacgcctgcacagg

SEQ ID NO: 2586808 - DNA, 25 bp, Homo sapien
ggagggggcagcgcattcgaggacg

SEQ ID NO: 2586809 - DNA, 25 bp, Homo sapien
gagggggcagcgcattcgaggacgg

SEQ ID NO: 2586810 - DNA, 25 bp, Homo sapien
agggggcagcgcattcgaggacggc

SEQ ID NO: 2586811 - DNA, 25 bp, Homo sapien
gcatccctttgccatgagggcctgg

SEQ ID NO: 2586812 - DNA, 25 bp, Homo sapien
gcctatgctgggcatccctttgcca

SEQ ID NO: 2586813 - DNA, 25 bp, Homo sapien
gctgggcatccctttgccatgaggg

SEQ ID NO: 2586814 - DNA, 25 bp, Homo sapien
ggctgggcctatgctgggcatccct

SEQ ID NO: 2586815 - DNA, 25 bp, Homo sapien
tggacttggccatgcggagaggaag

SEQ ID NO: 2586816 - DNA, 25 bp, Homo sapien
gggcgaccctagacatctgtggagt

SEQ ID NO: 2586817 - DNA, 25 bp, Homo sapien
gaagaggcgggcgaccctagacatc

SEQ ID NO: 2586818 - DNA, 25 bp, Homo sapien
aggcgggcgaccctagacatctgtg

SEQ ID NO: 2586819 - DNA, 25 bp, Homo sapien
gcagcctgtccggacatgcccgtgg

SEQ ID NO: 2586820 - DNA, 25 bp, Homo sapien
tgtgtctgggcagcacgacctgcca

SEQ ID NO: 2586821 - DNA, 25 bp, Homo sapien
gtgtctgggcagcacgacctgccag

SEQ ID NO: 2586822 - DNA, 25 bp, Homo sapien
ggcccggcagcctgtccggacatgc

SEQ ID NO: 2586823 - DNA, 25 bp, Homo sapien
ttgggggtagggtcctgcctcgcca

SEQ ID NO: 2586824 - DNA, 25 bp, Homo sapien
ggcgtttgggactgtggggtgatct

SEQ ID NO: 2586825 - DNA, 25 bp, Homo sapien
tgtggcgtttgggactgtggggtga

SEQ ID NO: 2586826 - DNA, 25 bp, Homo sapien
cccagccccgagctccgaggttggg

SEQ ID NO: 2586827 - DNA, 25 bp, Homo sapien
gggcaggttcactctcccgcaggat

SEQ ID NO: 2586828 - DNA, 25 bp, Homo sapien
tccgtgtggcccctggcgtccgtga

SEQ ID NO: 2586829 - DNA, 25 bp, Homo sapien
gtgtccacggaagatgggcgcccgg

SEQ ID NO: 2586830 - DNA, 25 bp, Homo sapien
aggctacgctgaggcacttttcagg

SEQ ID NO: 2586831 - DNA, 25 bp, Homo sapien
aggatggctggggtgatgcggcccc

SEQ ID NO: 2586832 - DNA, 25 bp, Homo sapien
tctcgtctatgctcccgccggggga

SEQ ID NO: 2586833 - DNA, 25 bp, Homo sapien
ctctcgtctatgctcccgccggggg

SEQ ID NO: 2586834 - DNA, 25 bp, Homo sapien
tcaggggcgtagaggctggagctgc

SEQ ID NO: 2586835 - DNA, 25 bp, Homo sapien
acagcatcaggggcgtagaggctgg

SEQ ID NO: 2586836 - DNA, 25 bp, Homo sapien
agcatcaggggcgtagaggctggag

SEQ ID NO: 2586837 - DNA, 25 bp, Homo sapien
catcaggggcgtagaggctggagct

SEQ ID NO: 2586838 - DNA, 25 bp, Homo sapien
tgtgctgagccactgtcgttcagca

SEQ ID NO: 2586839 - DNA, 25 bp, Homo sapien
aactgccggctatacttgggcatgg

SEQ ID NO: 2586840 - DNA, 25 bp, Homo sapien
ccgtggacgtgctccagggagaact

SEQ ID NO: 2586841 - DNA, 25 bp, Homo sapien
gagccactgtcgttcagcatcaggg

SEQ ID NO: 2586842 - DNA, 25 bp, Homo sapien
ggatccggtttgactgcaccagtga

SEQ ID NO: 2586843 - DNA, 25 bp, Homo sapien
caggatccggtttgactgcaccagt

SEQ ID NO: 2586844 - DNA, 25 bp, Homo sapien
ccccaggatccggtttgactgcacc

SEQ ID NO: 2586845 - DNA, 25 bp, Homo sapien
ccaggatccggtttgactgcaccag

SEQ ID NO: 2586846 - DNA, 25 bp, Homo sapien
ttgacgactttctgttgctgggcat

SEQ ID NO: 2586847 - DNA, 25 bp, Homo sapien
tgctgggcatgcttctgccgaaggc

SEQ ID NO: 2586848 - DNA, 25 bp, Homo sapien
catgcttctgccgaaggctggccac

SEQ ID NO: 2586849 - DNA, 25 bp, Homo sapien
ggctggccacctcccgccacagagc

SEQ ID NO: 2586850 - DNA, 25 bp, Homo sapien
gtggggcccaatcccatgagcccca

SEQ ID NO: 2586851 - DNA, 25 bp, Homo sapien
agtggggcccaatcccatgagcccc

SEQ ID NO: 2586852 - DNA, 25 bp, Homo sapien
tgtcccatgtcctgtaggtgctcag

SEQ ID NO: 2586853 - DNA, 25 bp, Homo sapien
cggttcttcaggctgcgacactggc

SEQ ID NO: 2586854 - DNA, 25 bp, Homo sapien
atggatccatgcgagccaggtgcac

SEQ ID NO: 2586855 - DNA, 25 bp, Homo sapien
cctggcaaacacctggagggctgcc

SEQ ID NO: 2586856 - DNA, 25 bp, Homo sapien
tcctggcggatctttatgtcttcac

SEQ ID NO: 2586857 - DNA, 25 bp, Homo sapien
agcagcttggtgacgctgtcctggc

SEQ ID NO: 2586858 - DNA, 25 bp, Homo sapien
tgcacgtccgtcagcagcttggtga

SEQ ID NO: 2586859 - DNA, 25 bp, Homo sapien
gagcttggagtccatgcactcctgc

SEQ ID NO: 2586860 - DNA, 25 bp, Homo sapien
tctggcttgaccaggccgccctgct

SEQ ID NO: 2586861 - DNA, 25 bp, Homo sapien
aagcatgggtgctggaactccgtgt

SEQ ID NO: 2586862 - DNA, 25 bp, Homo sapien
gaactccgtgtcgtctctctctggc

SEQ ID NO: 2586863 - DNA, 25 bp, Homo sapien
tcgatgtggaccactttccggaagc

SEQ ID NO: 2586864 - DNA, 25 bp, Homo sapien
gcttgaagtacttgggcagcacctc

SEQ ID NO: 2586865 - DNA, 25 bp, Homo sapien
tcgaacacgtggaagctgttcccgc

SEQ ID NO: 2586866 - DNA, 25 bp, Homo sapien
ccgcacgaagctggccatgttgttg

SEQ ID NO: 2586867 - DNA, 25 bp, Homo sapien
tccttggcaaactggccctggtcga

SEQ ID NO: 2586868 - DNA, 25 bp, Homo sapien
gtgggcagatgcgaggccttcctct

SEQ ID NO: 2586869 - DNA, 25 bp, Homo sapien
aaacacagtcgcgttcagaaatcca

SEQ ID NO: 2586870 - DNA, 25 bp, Homo sapien
cattactcccgaggaaaacacagtc

SEQ ID NO: 2586871 - DNA, 25 bp, Homo sapien
gaacagcgaaggaaatggagcccta

SEQ ID NO: 2586872 - DNA, 25 bp, Homo sapien
gagctcaggcccagagctatcagga

SEQ ID NO: 2586873 - DNA, 25 bp, Homo sapien
cccagagctatcaggaggcgctggt

SEQ ID NO: 2586874 - DNA, 25 bp, Homo sapien
cttccatttctctaccgagctcagg

SEQ ID NO: 2586875 - DNA, 25 bp, Homo sapien
tctaccgagctcaggcccagagcta

SEQ ID NO: 2586876 - DNA, 25 bp, Homo sapien
cgaaggcttaggggacagcgagaag

SEQ ID NO: 2586877 - DNA, 25 bp, Homo sapien
gcttaggggacagcgagaagcccac

SEQ ID NO: 2586878 - DNA, 25 bp, Homo sapien
aggcttaggggacagcgagaagccc

SEQ ID NO: 2586879 - DNA, 25 bp, Homo sapien
gaaggcttaggggacagcgagaagc

SEQ ID NO: 2586880 - DNA, 25 bp, Homo sapien
ctggagtgcaccagcaccaacatgg

SEQ ID NO: 2586881 - DNA, 25 bp, Homo sapien
ggagtgcaccagcaccaacatggct

SEQ ID NO: 2586882 - DNA, 25 bp, Homo sapien
ggctggagtgcaccagcaccaacat

SEQ ID NO: 2586883 - DNA, 25 bp, Homo sapien
gagtgcaccagcaccaacatggctc

SEQ ID NO: 2586884 - DNA, 25 bp, Homo sapien
gtagctgactataggcgccaccacg

SEQ ID NO: 2586885 - DNA, 25 bp, Homo sapien
cccggctcatttctgtatttttagg

SEQ ID NO: 2586886 - DNA, 25 bp, Homo sapien
ctgtatttttaggagagatggggtt

SEQ ID NO: 2586887 - DNA, 25 bp, Homo sapien
aattcctgacctcaatcaatccgcc

SEQ ID NO: 2586888 - DNA, 25 bp, Homo sapien
catgatgggtactacactcagggag

SEQ ID NO: 2586889 - DNA, 25 bp, Homo sapien
gactaagatcctggtgcacgtggcc

SEQ ID NO: 2586890 - DNA, 25 bp, Homo sapien
tttcctggatctcatgggctgggca

SEQ ID NO: 2586891 - DNA, 25 bp, Homo sapien
ggtacgaacattaagcctggtggca

SEQ ID NO: 2586892 - DNA, 25 bp, Homo sapien
cagaggctgctgtcttacccagtgc

SEQ ID NO: 2586893 - DNA, 25 bp, Homo sapien
tagggtagagcacccatgctgggaa

SEQ ID NO: 2586894 - DNA, 25 bp, Homo sapien
gaaaagctacgaagagccctgctgg

SEQ ID NO: 2586895 - DNA, 25 bp, Homo sapien
gagagaggccgtccataaggaaaga

SEQ ID NO: 2586896 - DNA, 25 bp, Homo sapien
gagtatcttctcaaagggctccctg

SEQ ID NO: 2586897 - DNA, 25 bp, Homo sapien
ccaaaacgtgaacagtgccgtattc

SEQ ID NO: 2586898 - DNA, 25 bp, Homo sapien
gtgccgtattctacaaggtggcccc

SEQ ID NO: 2586899 - DNA, 25 bp, Homo sapien
ttacatagaaagtgtctgtgtctct

SEQ ID NO: 2586900 - DNA, 25 bp, Homo sapien
cagcctcctgccaagtcaaagctgt

SEQ ID NO: 2586901 - DNA, 25 bp, Homo sapien
caggccacaagcctcttgttccagc

SEQ ID NO: 2586902 - DNA, 25 bp, Homo sapien
ccagcctcctgccaagtcaaagctg

SEQ ID NO: 2586903 - DNA, 25 bp, Homo sapien
gccacaagcctcttgttccagcctc

SEQ ID NO: 2586904 - DNA, 25 bp, Homo sapien
cggctggccggctgttccctctccg

SEQ ID NO: 2586905 - DNA, 25 bp, Homo sapien
tcggctggccggctgttccctctcc

SEQ ID NO: 2586906 - DNA, 25 bp, Homo sapien
ctcggctggccggctgttccctctc

SEQ ID NO: 2586907 - DNA, 25 bp, Homo sapien
gtctggttctgtccacatctgagcc

SEQ ID NO: 2586908 - DNA, 25 bp, Homo sapien
gagccacccgcacctttctcataaa

SEQ ID NO: 2586909 - DNA, 25 bp, Homo sapien
aagagcagcacaatcgccctcatct

SEQ ID NO: 2586910 - DNA, 25 bp, Homo sapien
gtgttctcgccacacaaggaccaag

SEQ ID NO: 2586911 - DNA, 25 bp, Homo sapien
caatctcctgacctcctgatctcgt

SEQ ID NO: 2586912 - DNA, 25 bp, Homo sapien
atctcctgacctcctgatctcgtga

SEQ ID NO: 2586913 - DNA, 25 bp, Homo sapien
aatctcctgacctcctgatctcgtg

SEQ ID NO: 2586914 - DNA, 25 bp, Homo sapien
catcttgggccaaataccagatctt

SEQ ID NO: 2586915 - DNA, 25 bp, Homo sapien
atcttgggccaaataccagatcttc

SEQ ID NO: 2586916 - DNA, 25 bp, Homo sapien
cctgccgtgggagctccggacacga

SEQ ID NO: 2586917 - DNA, 25 bp, Homo sapien
tgcctgccgtgggagctccggacac

SEQ ID NO: 2586918 - DNA, 25 bp, Homo sapien
gatccccgggatcataaccttgtgg

SEQ ID NO: 2586919 - DNA, 25 bp, Homo sapien
cacgtgcacgcccatgctcttatgt

SEQ ID NO: 2586920 - DNA, 25 bp, Homo sapien
ctgtgctgtcctccacgacttgctg

SEQ ID NO: 2586921 - DNA, 25 bp, Homo sapien
tgctgtcctccacgacttgctgggt

SEQ ID NO: 2586922 - DNA, 25 bp, Homo sapien
ggtgggaaatcaaacaacacaggga

SEQ ID NO: 2586923 - DNA, 25 bp, Homo sapien
tgggaaatcaaacaacacagggatg

SEQ ID NO: 2586924 - DNA, 25 bp, Homo sapien
aatcaaacaacacagggatggggca

SEQ ID NO: 2586925 - DNA, 25 bp, Homo sapien
gggaaatcaaacaacacagggatgg

SEQ ID NO: 2586926 - DNA, 25 bp, Homo sapien
tccaaaagctcccaatgatcagtgg

SEQ ID NO: 2586927 - DNA, 25 bp, Homo sapien
agaactctggggtcttagctcctgg

SEQ ID NO: 2586928 - DNA, 25 bp, Homo sapien
gccacacatgcttggtggcaccctg

SEQ ID NO: 2586929 - DNA, 25 bp, Homo sapien
cactctgtaggtaaagcagagcctc

SEQ ID NO: 2586930 - DNA, 25 bp, Homo sapien
tttaggcaatgatttattagacatg

SEQ ID NO: 2586931 - DNA, 25 bp, Homo sapien
acatttgtacttcaataagaaaatg

SEQ ID NO: 2586932 - DNA, 25 bp, Homo sapien
gaaaaaacaaattggacctcatcaa

SEQ ID NO: 2586933 - DNA, 25 bp, Homo sapien
catgacaccgaaaagcacaagaaac

SEQ ID NO: 2586934 - DNA, 25 bp, Homo sapien
taatcctattagtgatggaggagcc

SEQ ID NO: 2586935 - DNA, 25 bp, Homo sapien
gctagctgaatgctgcgtgaagcct

SEQ ID NO: 2586936 - DNA, 25 bp, Homo sapien
ttggtgtctggtgtgggccttcctg

SEQ ID NO: 2586937 - DNA, 25 bp, Homo sapien
caagaaagcaagctagctgaatgct

SEQ ID NO: 2586938 - DNA, 25 bp, Homo sapien
aagggatgccgccttcctcagggct

SEQ ID NO: 2586939 - DNA, 25 bp, Homo sapien
acagtttggcgagggctgcgggcag

SEQ ID NO: 2586940 - DNA, 25 bp, Homo sapien
agcactgggcgtggacagtttggcg

SEQ ID NO: 2586941 - DNA, 25 bp, Homo sapien
gcagcaccttgtgaagggatgccgc

SEQ ID NO: 2586942 - DNA, 25 bp, Homo sapien
gactgtcttccaaggtggcagctgg

SEQ ID NO: 2586943 - DNA, 25 bp, Homo sapien
ttaggatccgtttacaagactgtct

SEQ ID NO: 2586944 - DNA, 25 bp, Homo sapien
ttatttagaagccaccagctcttga

SEQ ID NO: 2586945 - DNA, 25 bp, Homo sapien
ctgttgccagctcgttatgggccat

SEQ ID NO: 2586946 - DNA, 25 bp, Homo sapien
gatttctggtgaaacaggaattcag

SEQ ID NO: 2586947 - DNA, 25 bp, Homo sapien
cacagttttctcgagaagtctggga

SEQ ID NO: 2586948 - DNA, 25 bp, Homo sapien
gagaaacagcccttcccaggtctgt

SEQ ID NO: 2586949 - DNA, 25 bp, Homo sapien
cgatgccagatgacttgagtgcttt

SEQ ID NO: 2586950 - DNA, 25 bp, Homo sapien
aggactccctgagatgggtggggct

SEQ ID NO: 2586951 - DNA, 25 bp, Homo sapien
ggagaagctgggtaaaaccagagct

SEQ ID NO: 2586952 - DNA, 25 bp, Homo sapien
gctgggtaaaaccagagctccacct

SEQ ID NO: 2586953 - DNA, 25 bp, Homo sapien
ctccacctcctgccggtgcctacct

SEQ ID NO: 2586954 - DNA, 25 bp, Homo sapien
tgctaccggaatcctctttcctact

SEQ ID NO: 2586955 - DNA, 25 bp, Homo sapien
ctcctgctaccggaatcctctttcc

SEQ ID NO: 2586956 - DNA, 25 bp, Homo sapien
tctttcctactcccgtgggagctca

SEQ ID NO: 2586957 - DNA, 25 bp, Homo sapien
tttcctactcccgtgggagctcagt

SEQ ID NO: 2586958 - DNA, 25 bp, Homo sapien
ttgccggcctccgaggaggtggtca

SEQ ID NO: 2586959 - DNA, 25 bp, Homo sapien
gaggtggtcagggcgccctggccca

SEQ ID NO: 2586960 - DNA, 25 bp, Homo sapien
cagcaggcttcttcccgagccgggg

SEQ ID NO: 2586961 - DNA, 25 bp, Homo sapien
tcaggcaggtttgccggcctccgag

SEQ ID NO: 2586962 - DNA, 25 bp, Homo sapien
gctcacacgccagtatagcgcgcat

SEQ ID NO: 2586963 - DNA, 25 bp, Homo sapien
cccgcagacactgtgcacgcacaca

SEQ ID NO: 2586964 - DNA, 25 bp, Homo sapien
cagggacgcggacgagggaccggag

SEQ ID NO: 2586965 - DNA, 25 bp, Homo sapien
ggatcgggagggagactcaacatcc

SEQ ID NO: 2586966 - DNA, 25 bp, Homo sapien
catccaaggtttagtgcagcgccat

SEQ ID NO: 2586967 - DNA, 25 bp, Homo sapien
ctgggctcctgacgtcttagactga

SEQ ID NO: 2586968 - DNA, 25 bp, Homo sapien
gaaatgacttcgcactgcatccaag

SEQ ID NO: 2586969 - DNA, 25 bp, Homo sapien
cctggacggtagagttaggctcatc

SEQ ID NO: 2586970 - DNA, 25 bp, Homo sapien
atgtgggtgcatctggcggccacca

SEQ ID NO: 2586971 - DNA, 25 bp, Homo sapien
ggtacctgagcttcacacagagtag

SEQ ID NO: 2586972 - DNA, 25 bp, Homo sapien
cagaaggaatggtcccaagtggatt

SEQ ID NO: 2586973 - DNA, 25 bp, Homo sapien
cacctgtgcacgcagtagtaatctg

SEQ ID NO: 2586974 - DNA, 25 bp, Homo sapien
tgagctcagagcctctgtatgaccc

SEQ ID NO: 2586975 - DNA, 25 bp, Homo sapien
cacaggcagtgccagcatgggagct

SEQ ID NO: 2586976 - DNA, 25 bp, Homo sapien
cccacaggcagtgccagcatgggag

SEQ ID NO: 2586977 - DNA, 25 bp, Homo sapien
gtagagctgccatggtgcccacagg

SEQ ID NO: 2586978 - DNA, 25 bp, Homo sapien
caagcctgaagatgtccgagaggcg

SEQ ID NO: 2586979 - DNA, 25 bp, Homo sapien
gggggaggcttcgtagaactcctca

SEQ ID NO: 2586980 - DNA, 25 bp, Homo sapien
tcaccggctcatagggggaggcttc

SEQ ID NO: 2586981 - DNA, 25 bp, Homo sapien
ccgagaggcgggaggtcaccggctc

SEQ ID NO: 2586982 - DNA, 25 bp, Homo sapien
gtaaggccaggtatcaattgcagga

SEQ ID NO: 2586983 - DNA, 25 bp, Homo sapien
tgtcaccaggagaatcttgctggag

SEQ ID NO: 2586984 - DNA, 25 bp, Homo sapien
gatccccagcttccatctgcgtggt

SEQ ID NO: 2586985 - DNA, 25 bp, Homo sapien
tgaagccagaatgctctccacaatc

SEQ ID NO: 2586986 - DNA, 25 bp, Homo sapien
tgttcttgttggggctgcagtcgta

SEQ ID NO: 2586987 - DNA, 25 bp, Homo sapien
accttctcctcgttcagcgccttct

SEQ ID NO: 2586988 - DNA, 25 bp, Homo sapien
ccaccttctcctcgttcagcgcctt

SEQ ID NO: 2586989 - DNA, 25 bp, Homo sapien
gggctgcagtcgtaggccaccttct

SEQ ID NO: 2586990 - DNA, 25 bp, Homo sapien
acgacggacgattcgcttagagctg

SEQ ID NO: 2586991 - DNA, 25 bp, Homo sapien
gacactcttcggtgaacagttggag

SEQ ID NO: 2586992 - DNA, 25 bp, Homo sapien
ggcacccagagcttcggaggataat

SEQ ID NO: 2586993 - DNA, 25 bp, Homo sapien
tctgcgcagggaagtagcacgactc

SEQ ID NO: 2586994 - DNA, 25 bp, Homo sapien
ttgtcgcctttatataggcacaggg

SEQ ID NO: 2586995 - DNA, 25 bp, Homo sapien
tgcggccgccacttgtcgcctttat

SEQ ID NO: 2586996 - DNA, 25 bp, Homo sapien
tcctctcccaactggcggcttcaat

SEQ ID NO: 2586997 - DNA, 25 bp, Homo sapien
caactggcggcttcaatgagtgctg

SEQ ID NO: 2586998 - DNA, 25 bp, Homo sapien
agaagccatggaagtcccacgtggg

SEQ ID NO: 2586999 - DNA, 25 bp, Homo sapien
cagaagccatggaagtcccacgtgg

SEQ ID NO: 2587000 - DNA, 25 bp, Homo sapien
cccacgtggggtggctagtggtgta

SEQ ID NO: 2587001 - DNA, 25 bp, Homo sapien
gagggcgcgcggcagggactcgggg

SEQ ID NO: 2587002 - DNA, 25 bp, Homo sapien
ggccagggcggcgggagaggcggac

SEQ ID NO: 2587003 - DNA, 25 bp, Homo sapien
taaggacaggccagggcggcgggag

SEQ ID NO: 2587004 - DNA, 25 bp, Homo sapien
acaggccagggcggcgggagaggcg

SEQ ID NO: 2587005 - DNA, 25 bp, Homo sapien
ctaaggacaggccagggcggcggga

SEQ ID NO: 2587006 - DNA, 25 bp, Homo sapien
gcgtggctggatctgggcgcgctgt

SEQ ID NO: 2587007 - DNA, 25 bp, Homo sapien
ggatctgggcgcgctgtcggacctt

SEQ ID NO: 2587008 - DNA, 25 bp, Homo sapien
ggctggatctgggcgcgctgtcgga

SEQ ID NO: 2587009 - DNA, 25 bp, Homo sapien
gtggctggatctgggcgcgctgtcg

SEQ ID NO: 2587010 - DNA, 25 bp, Homo sapien
ctgcaggcaggcgcttgcgtcctcg

SEQ ID NO: 2587011 - DNA, 25 bp, Homo sapien
cagctgcaggcaggcgcttgcgtcc

SEQ ID NO: 2587012 - DNA, 25 bp, Homo sapien
tcaccagctgcaggcaggcgcttgc

SEQ ID NO: 2587013 - DNA, 25 bp, Homo sapien
accagctgcaggcaggcgcttgcgt

SEQ ID NO: 2587014 - DNA, 25 bp, Homo sapien
gctcgtcttggcgacgtcggcctcg

SEQ ID NO: 2587015 - DNA, 25 bp, Homo sapien
ggtttgggcgctgaaaaagctcagc

SEQ ID NO: 2587016 - DNA, 25 bp, Homo sapien
gattcctgagggagcgcttgtaggg

SEQ ID NO: 2587017 - DNA, 25 bp, Homo sapien
aaacccaggtagtgcgggaagagca

SEQ ID NO: 2587018 - DNA, 25 bp, Homo sapien
gtgtcgtacaccactcgcatgtcgg

SEQ ID NO: 2587019 - DNA, 25 bp, Homo sapien
ccaaggcgtagattcctggataagc

SEQ ID NO: 2587020 - DNA, 25 bp, Homo sapien
tggataagcgtctctggacaactct

SEQ ID NO: 2587021 - DNA, 25 bp, Homo sapien
gccatgcgtggtgtagcacatctca

SEQ ID NO: 2587022 - DNA, 25 bp, Homo sapien
gcggccgtcccgcacgtgctgcttt

SEQ ID NO: 2587023 - DNA, 25 bp, Homo sapien
agccacctggctcgagcggacccgc

SEQ ID NO: 2587024 - DNA, 25 bp, Homo sapien
gtgtactggctaacccggcctccag

SEQ ID NO: 2587025 - DNA, 25 bp, Homo sapien
gtcccgcacgtgctgctttgccacc

SEQ ID NO: 2587026 - DNA, 25 bp, Homo sapien
tgataataacacaactggtcgcgta

SEQ ID NO: 2587027 - DNA, 25 bp, Homo sapien
ccagtgataataacacaactggtcg

SEQ ID NO: 2587028 - DNA, 25 bp, Homo sapien
taacacaactggtcgcgtacacagc

SEQ ID NO: 2587029 - DNA, 25 bp, Homo sapien
acaactggtcgcgtacacagcggcc

SEQ ID NO: 2587030 - DNA, 25 bp, Homo sapien
ttcaggaccacgttcaggtacctgt

SEQ ID NO: 2587031 - DNA, 25 bp, Homo sapien
tacagggcggccctgctgaggccgg

SEQ ID NO: 2587032 - DNA, 25 bp, Homo sapien
cgttcaggtacctgttcttgttggg

SEQ ID NO: 2587033 - DNA, 25 bp, Homo sapien
gccagtgaagaggacggcgcctccg

SEQ ID NO: 2587034 - DNA, 25 bp, Homo sapien
cacccgggttctcttggcatctgtg

SEQ ID NO: 2587035 - DNA, 25 bp, Homo sapien
acgacggacgattcgcttagagctg

SEQ ID NO: 2587036 - DNA, 25 bp, Homo sapien
tgagacactcttcggtgaacagttg

SEQ ID NO: 2587037 - DNA, 25 bp, Homo sapien
ggcacccagagcttcggaggataat

SEQ ID NO: 2587038 - DNA, 25 bp, Homo sapien
tgggggctgagatgcggactcccga

SEQ ID NO: 2587039 - DNA, 25 bp, Homo sapien
gggctgagatgcggactcccgaggg

SEQ ID NO: 2587040 - DNA, 25 bp, Homo sapien
aagagtgggcgatcgtcttcctctt

SEQ ID NO: 2587041 - DNA, 25 bp, Homo sapien
ggctggaagagtgggcgatcgtctt

SEQ ID NO: 2587042 - DNA, 25 bp, Homo sapien
ccgtaagctgctgaacaagtagggc

SEQ ID NO: 2587043 - DNA, 25 bp, Homo sapien
gaagacatgctcaccggacaagggt

SEQ ID NO: 2587044 - DNA, 25 bp, Homo sapien
gaatttggtagagacgaagacatgc

SEQ ID NO: 2587045 - DNA, 25 bp, Homo sapien
gctgccagaaatgtcccactaggga

SEQ ID NO: 2587046 - DNA, 25 bp, Homo sapien
ggctggtgaaggtgcgcgccaggat

SEQ ID NO: 2587047 - DNA, 25 bp, Homo sapien
gccaggatgtggactactgagccct

SEQ ID NO: 2587048 - DNA, 25 bp, Homo sapien
tgaagaaataagtccttccactttg

SEQ ID NO: 2587049 - DNA, 25 bp, Homo sapien
gaaggtgcgcgccaggatgtggact

SEQ ID NO: 2587050 - DNA, 25 bp, Homo sapien
ctgtgaggaacttaaacgagtctac

SEQ ID NO: 2587051 - DNA, 25 bp, Homo sapien
tgtgaggaacttaaacgagtctacc

SEQ ID NO: 2587052 - DNA, 25 bp, Homo sapien
tcttctatgagttactgaatcattt

SEQ ID NO: 2587053 - DNA, 25 bp, Homo sapien
taaaactacatgaactactttcaga

SEQ ID NO: 2587054 - DNA, 25 bp, Homo sapien
cccttactgataagaatacaaacaa

SEQ ID NO: 2587055 - DNA, 25 bp, Homo sapien
cagatctcttatctgtgccagccag

SEQ ID NO: 2587056 - DNA, 25 bp, Homo sapien
caaaagatgtgccatggattgagag

SEQ ID NO: 2587057 - DNA, 25 bp, Homo sapien
tgtgcagaggacctaaacattgctc

SEQ ID NO: 2587058 - DNA, 25 bp, Homo sapien
cctaaaagcactgacaacaaaagca

SEQ ID NO: 2587059 - DNA, 25 bp, Homo sapien
catagggaaaatgctccataacact

SEQ ID NO: 2587060 - DNA, 25 bp, Homo sapien
agaggactcgtggaagacagctgat

SEQ ID NO: 2587061 - DNA, 25 bp, Homo sapien
aaaacattcggtgtgcagtgagggt

SEQ ID NO: 2587062 - DNA, 25 bp, Homo sapien
caaaagtggttgttctcgaggaagg

SEQ ID NO: 2587063 - DNA, 25 bp, Homo sapien
gcactttgatatatctgcactggaa

SEQ ID NO: 2587064 - DNA, 25 bp, Homo sapien
tcccagtcgataaactgtaattcat

SEQ ID NO: 2587065 - DNA, 25 bp, Homo sapien
tgtcactgtcaatctcccagtcgat

SEQ ID NO: 2587066 - DNA, 25 bp, Homo sapien
ttgtcaaagactgattacttgcaca

SEQ ID NO: 2587067 - DNA, 25 bp, Homo sapien
gattacttgcacaagaagcacagtc

SEQ ID NO: 2587068 - DNA, 25 bp, Homo sapien
gttacaaaatctgtctattctagag

SEQ ID NO: 2587069 - DNA, 25 bp, Homo sapien
tctattctagagcaatgtccattac

SEQ ID NO: 2587070 - DNA, 25 bp, Homo sapien
gacacaatatgttcctgttacaaaa

SEQ ID NO: 2587071 - DNA, 25 bp, Homo sapien
tggacacaatatgttcctgttacaa

SEQ ID NO: 2587072 - DNA, 25 bp, Homo sapien
ttcatccgacaaatcacttccactg

SEQ ID NO: 2587073 - DNA, 25 bp, Homo sapien
catgttatgtctgtaagcccactgg

SEQ ID NO: 2587074 - DNA, 25 bp, Homo sapien
cactggtgcttttagatgtggtggt

SEQ ID NO: 2587075 - DNA, 25 bp, Homo sapien
gaaagtgtcttatcttcatccgaca

SEQ ID NO: 2587076 - DNA, 25 bp, Homo sapien
ttagtttagtgtgagtatctaagaa

SEQ ID NO: 2587077 - DNA, 25 bp, Homo sapien
ccattagtttagtgtgagtatctaa

SEQ ID NO: 2587078 - DNA, 25 bp, Homo sapien
tagtttagtgtgagtatctaagaaa

SEQ ID NO: 2587079 - DNA, 25 bp, Homo sapien
cattagtttagtgtgagtatctaag

SEQ ID NO: 2587080 - DNA, 25 bp, Homo sapien
taacatggtttagaatgtcacagga

SEQ ID NO: 2587081 - DNA, 25 bp, Homo sapien
tgtcacaggaagttagttcactctg

SEQ ID NO: 2587082 - DNA, 25 bp, Homo sapien
gcagaatcaggaacatgcttttgta

SEQ ID NO: 2587083 - DNA, 25 bp, Homo sapien
gaagaaggcaatcatctacaagcca

SEQ ID NO: 2587084 - DNA, 25 bp, Homo sapien
ggtctagggcataattcaaggtgct

SEQ ID NO: 2587085 - DNA, 25 bp, Homo sapien
tgggtctagggcataattcaaggtg

SEQ ID NO: 2587086 - DNA, 25 bp, Homo sapien
cttgcttgggtctagggcataattc

SEQ ID NO: 2587087 - DNA, 25 bp, Homo sapien
tagggcataattcaaggtgcttttc

SEQ ID NO: 2587088 - DNA, 25 bp, Homo sapien
cggattcccagaagtgttctgaaac

SEQ ID NO: 2587089 - DNA, 25 bp, Homo sapien
cagaagtgttctgaaacccttctcc

SEQ ID NO: 2587090 - DNA, 25 bp, Homo sapien
cccagaagtgttctgaaacccttct

SEQ ID NO: 2587091 - DNA, 25 bp, Homo sapien
attcccagaagtgttctgaaaccct

SEQ ID NO: 2587092 - DNA, 25 bp, Homo sapien
gaaaggatgggcattctgtattcca

SEQ ID NO: 2587093 - DNA, 25 bp, Homo sapien
ctggaaaggatgggcattctgtatt

SEQ ID NO: 2587094 - DNA, 25 bp, Homo sapien
ttctgacctgcagtggtctttctcc

SEQ ID NO: 2587095 - DNA, 25 bp, Homo sapien
ggatgggcattctgtattccaactc

SEQ ID NO: 2587096 - DNA, 25 bp, Homo sapien
gctgatcatgagacacagcaatcag

SEQ ID NO: 2587097 - DNA, 25 bp, Homo sapien
cctccactttaaccagttctatcat

SEQ ID NO: 2587098 - DNA, 25 bp, Homo sapien
cagtggtttgaagctgtaaaaagga

SEQ ID NO: 2587099 - DNA, 25 bp, Homo sapien
gtgctgatcatgagacacagcaatc

SEQ ID NO: 2587100 - DNA, 25 bp, Homo sapien
gacagagggtcgaatagagattacc

SEQ ID NO: 2587101 - DNA, 25 bp, Homo sapien
tgaggtacctagaacgggcgaatcc

SEQ ID NO: 2587102 - DNA, 25 bp, Homo sapien
gggcgaatccatatagacagagggt

SEQ ID NO: 2587103 - DNA, 25 bp, Homo sapien
tcaaacagacgccaatattcacagc

SEQ ID NO: 2587104 - DNA, 25 bp, Homo sapien
agcacccttgcatctctggataaat

SEQ ID NO: 2587105 - DNA, 25 bp, Homo sapien
cccttgcatctctggataaatgaaa

SEQ ID NO: 2587106 - DNA, 25 bp, Homo sapien
cacccttgcatctctggataaatga

SEQ ID NO: 2587107 - DNA, 25 bp, Homo sapien
ccttgcatctctggataaatgaaat

SEQ ID NO: 2587108 - DNA, 25 bp, Homo sapien
acctctggcagggtgtaagcactga

SEQ ID NO: 2587109 - DNA, 25 bp, Homo sapien
cccaatgcctgtttctgagtcaaga

SEQ ID NO: 2587110 - DNA, 25 bp, Homo sapien
taggaagtggaacctcagacaggtc

SEQ ID NO: 2587111 - DNA, 25 bp, Homo sapien
gtttttcttatcttcgccaggccag

SEQ ID NO: 2587112 - DNA, 25 bp, Homo sapien
gatgaggctaatgctagtatctcct

SEQ ID NO: 2587113 - DNA, 25 bp, Homo sapien
ttttaatgcctgatgaggctaatgc

SEQ ID NO: 2587114 - DNA, 25 bp, Homo sapien
ttgtctattctcttcagttgaactg

SEQ ID NO: 2587115 - DNA, 25 bp, Homo sapien
catcaagacttacttctaacttgtc

SEQ ID NO: 2587116 - DNA, 25 bp, Homo sapien
cacagtggaggaatgagagaagctt

SEQ ID NO: 2587117 - DNA, 25 bp, Homo sapien
cattatgcaagtgagggatgccaca

SEQ ID NO: 2587118 - DNA, 25 bp, Homo sapien
gatctctaagacttcatgacttgcc

SEQ ID NO: 2587119 - DNA, 25 bp, Homo sapien
cccctggactatatgaatgaaatga

SEQ ID NO: 2587120 - DNA, 25 bp, Homo sapien
agcttgtcatcaagctggtgggtct

SEQ ID NO: 2587121 - DNA, 25 bp, Homo sapien
aagcttgtcatcaagctggtgggtc

SEQ ID NO: 2587122 - DNA, 25 bp, Homo sapien
tgtgttggaagatgggaattatcac

SEQ ID NO: 2587123 - DNA, 25 bp, Homo sapien
cgcttttgcattgtttcacattatg

SEQ ID NO: 2587124 - DNA, 25 bp, Homo sapien
tatcactggcgcatctgtcagcctc

SEQ ID NO: 2587125 - DNA, 25 bp, Homo sapien
gggattttgcacctttcgcttttgc

SEQ ID NO: 2587126 - DNA, 25 bp, Homo sapien
cagctggggtgacatttcatttatc

SEQ ID NO: 2587127 - DNA, 25 bp, Homo sapien
agctggggtgacatttcatttatcc

SEQ ID NO: 2587128 - DNA, 25 bp, Homo sapien
tcaaagccttgacttggttttatgc

SEQ ID NO: 2587129 - DNA, 25 bp, Homo sapien
ctccaaatcatagacttgatgtgtc

SEQ ID NO: 2587130 - DNA, 25 bp, Homo sapien
gacttgatgtgtcggcatcagcaca

SEQ ID NO: 2587131 - DNA, 25 bp, Homo sapien
caaatcatagacttgatgtgtcggc

SEQ ID NO: 2587132 - DNA, 25 bp, Homo sapien
catagacttgatgtgtcggcatcag

SEQ ID NO: 2587133 - DNA, 25 bp, Homo sapien
cacctctgtgctttaacctggacca

SEQ ID NO: 2587134 - DNA, 25 bp, Homo sapien
taaacatcgccctcaatgatggtca

SEQ ID NO: 2587135 - DNA, 25 bp, Homo sapien
tctgccgcccttaatggtgacaggc

SEQ ID NO: 2587136 - DNA, 25 bp, Homo sapien
caaaatatctaaactaacaatggaa

SEQ ID NO: 2587137 - DNA, 25 bp, Homo sapien
ggcgacaagattcctctcatcagca

SEQ ID NO: 2587138 - DNA, 25 bp, Homo sapien
aggttttggcgacaagattcctctc

SEQ ID NO: 2587139 - DNA, 25 bp, Homo sapien
ctgcaggatagcctaagtccccaac

SEQ ID NO: 2587140 - DNA, 25 bp, Homo sapien
aggatagcctaagtccccaacacca

SEQ ID NO: 2587141 - DNA, 25 bp, Homo sapien
tattttaaggcatggacccactagg

SEQ ID NO: 2587142 - DNA, 25 bp, Homo sapien
taaccagctgagtatataaatccaa

SEQ ID NO: 2587143 - DNA, 25 bp, Homo sapien
tgcaacgctcctttctcttaggaga

SEQ ID NO: 2587144 - DNA, 25 bp, Homo sapien
ccactagggaattagttacaaatgg

SEQ ID NO: 2587145 - DNA, 25 bp, Homo sapien
tcagctcttggatgccatgttctgc

SEQ ID NO: 2587146 - DNA, 25 bp, Homo sapien
ggatttacgatttgattgccttcac

SEQ ID NO: 2587147 - DNA, 25 bp, Homo sapien
ttcaagttaggcatccagagctgtc

SEQ ID NO: 2587148 - DNA, 25 bp, Homo sapien
cccactatcgcataaaacttgtgaa

SEQ ID NO: 2587149 - DNA, 25 bp, Homo sapien
caattcgatattgactactggatag

SEQ ID NO: 2587150 - DNA, 25 bp, Homo sapien
gtttataaatccagtgctagacagt

SEQ ID NO: 2587151 - DNA, 25 bp, Homo sapien
gcatggttaatgcagatcatgtgaa

SEQ ID NO: 2587152 - DNA, 25 bp, Homo sapien
caaaacatgaactcttggtagaaaa

SEQ ID NO: 2587153 - DNA, 25 bp, Homo sapien
aagctgataattggtgtttcttaca

SEQ ID NO: 2587154 - DNA, 25 bp, Homo sapien
tccacacatcaaggtaaaggcgtcc

SEQ ID NO: 2587155 - DNA, 25 bp, Homo sapien
ttgtgaagcacaagtggaagctgat

SEQ ID NO: 2587156 - DNA, 25 bp, Homo sapien
caaatcaacggcttgtctccacaca

SEQ ID NO: 2587157 - DNA, 25 bp, Homo sapien
cctaattattctagttggcccaaga

SEQ ID NO: 2587158 - DNA, 25 bp, Homo sapien
tctcttcggatatgagctgcaaact

SEQ ID NO: 2587159 - DNA, 25 bp, Homo sapien
tctagttggcccaagaaaaatccta

SEQ ID NO: 2587160 - DNA, 25 bp, Homo sapien
gctgcaaactccttatataaaggct

SEQ ID NO: 2587161 - DNA, 25 bp, Homo sapien
tccaatactgtagaggcatgtgtgt

SEQ ID NO: 2587162 - DNA, 25 bp, Homo sapien
tttccaatactgtagaggcatgtgt

SEQ ID NO: 2587163 - DNA, 25 bp, Homo sapien
ttccaatactgtagaggcatgtgtg

SEQ ID NO: 2587164 - DNA, 25 bp, Homo sapien
cacggtagcgtgcacaatcttcatc

SEQ ID NO: 2587165 - DNA, 25 bp, Homo sapien
ctgcttctgccctcacggtagcgtg

SEQ ID NO: 2587166 - DNA, 25 bp, Homo sapien
gcgtgcacaatcttcatcgcatgtc

SEQ ID NO: 2587167 - DNA, 25 bp, Homo sapien
gccctcacggtagcgtgcacaatct

SEQ ID NO: 2587168 - DNA, 25 bp, Homo sapien
cccctgtggtttcatcaatggtaaa

SEQ ID NO: 2587169 - DNA, 25 bp, Homo sapien
tgtccacagcctgagcacgaagagt

SEQ ID NO: 2587170 - DNA, 25 bp, Homo sapien
cagcgccatctcctgagagggtgta

SEQ ID NO: 2587171 - DNA, 25 bp, Homo sapien
taggctccttattgcatgaatgtcc

SEQ ID NO: 2587172 - DNA, 25 bp, Homo sapien
aaggagatcacattcagtgacctgc

SEQ ID NO: 2587173 - DNA, 25 bp, Homo sapien
tggatgactataaaactcttgagag

SEQ ID NO: 2587174 - DNA, 25 bp, Homo sapien
taattcaggcagatgggtggtagcc

SEQ ID NO: 2587175 - DNA, 25 bp, Homo sapien
aaatgacatcggctcttgttggata

SEQ ID NO: 2587176 - DNA, 25 bp, Homo sapien
gatggtgcgtgaaaatgagatgcca

SEQ ID NO: 2587177 - DNA, 25 bp, Homo sapien
aaataggcactgtccaggcagttgt

SEQ ID NO: 2587178 - DNA, 25 bp, Homo sapien
gtgttttccaagtcatctcagatgg

SEQ ID NO: 2587179 - DNA, 25 bp, Homo sapien
tttactgattgaagcagccaactcc

SEQ ID NO: 2587180 - DNA, 25 bp, Homo sapien
taattcttgcaattcagtgtatttc

SEQ ID NO: 2587181 - DNA, 25 bp, Homo sapien
ctaattcttgcaattcagtgtattt

SEQ ID NO: 2587182 - DNA, 25 bp, Homo sapien
ggtcttgagcctgcccgtctttaga

SEQ ID NO: 2587183 - DNA, 25 bp, Homo sapien
tgcatacctttggactagtcagcct

SEQ ID NO: 2587184 - DNA, 25 bp, Homo sapien
gctatcctgggtctacagtttgcca

SEQ ID NO: 2587185 - DNA, 25 bp, Homo sapien
gtcagcctttataattgtgtgagcc

SEQ ID NO: 2587186 - DNA, 25 bp, Homo sapien
tacaagttgtctttatgctgcgaga

SEQ ID NO: 2587187 - DNA, 25 bp, Homo sapien
tttatgctgcgagataagtcctctc

SEQ ID NO: 2587188 - DNA, 25 bp, Homo sapien
ttgtgatcttcacttgtacaagttg

SEQ ID NO: 2587189 - DNA, 25 bp, Homo sapien
tgagctcccaccttttcagtgaact

SEQ ID NO: 2587190 - DNA, 25 bp, Homo sapien
ttgcaattaaagagccctaagactt

SEQ ID NO: 2587191 - DNA, 25 bp, Homo sapien
cctaagactttgtattgtttgggct

SEQ ID NO: 2587192 - DNA, 25 bp, Homo sapien
attagaatatcaaaattgcctagca

SEQ ID NO: 2587193 - DNA, 25 bp, Homo sapien
caccaacaatatgtgatttgtggga

SEQ ID NO: 2587194 - DNA, 25 bp, Homo sapien
attctgtgaggaatctattataaca

SEQ ID NO: 2587195 - DNA, 25 bp, Homo sapien
atgtgtattttctatgccctgaaga

SEQ ID NO: 2587196 - DNA, 25 bp, Homo sapien
tgtgaggaatctattataacaggta

SEQ ID NO: 2587197 - DNA, 25 bp, Homo sapien
tctgtgaggaatctattataacagg

SEQ ID NO: 2587198 - DNA, 25 bp, Homo sapien
taacatgacccctcaaggtggtgac

SEQ ID NO: 2587199 - DNA, 25 bp, Homo sapien
tagtctattggatgcagtgtcagag

SEQ ID NO: 2587200 - DNA, 25 bp, Homo sapien
ggcaaccatttgagcccagacttca

SEQ ID NO: 2587201 - DNA, 25 bp, Homo sapien
tgggcgcttccctgataattatagt

SEQ ID NO: 2587202 - DNA, 25 bp, Homo sapien
tacaggcacgtgagcaagagaagct

SEQ ID NO: 2587203 - DNA, 25 bp, Homo sapien
tgcggacataaaggagcaatgcttt

SEQ ID NO: 2587204 - DNA, 25 bp, Homo sapien
tcagtatgcttgactggaacggcca

SEQ ID NO: 2587205 - DNA, 25 bp, Homo sapien
tagcctatgttcttgaatgcggaca

SEQ ID NO: 2587206 - DNA, 25 bp, Homo sapien
tcctggagtacagacatggtggcta

SEQ ID NO: 2587207 - DNA, 25 bp, Homo sapien
cacaagtctagtggcaatgcattac

SEQ ID NO: 2587208 - DNA, 25 bp, Homo sapien
gaagcatgaaatcaccttgaaggta

SEQ ID NO: 2587209 - DNA, 25 bp, Homo sapien
tgggaagcttatgtactagcaacag

SEQ ID NO: 2587210 - DNA, 25 bp, Homo sapien
gaatattgtgctgtactgtccttag

SEQ ID NO: 2587211 - DNA, 25 bp, Homo sapien
tattaccatccccaaagtgtttgct

SEQ ID NO: 2587212 - DNA, 25 bp, Homo sapien
ctctagagattaggttgagaaccac

SEQ ID NO: 2587213 - DNA, 25 bp, Homo sapien
caaattttcaagtcgcatgccaaga

SEQ ID NO: 2587214 - DNA, 25 bp, Homo sapien
tctcactcatgttacctgatggaaa

SEQ ID NO: 2587215 - DNA, 25 bp, Homo sapien
ctcactcatgttacctgatggaaaa

SEQ ID NO: 2587216 - DNA, 25 bp, Homo sapien
cactcatgttacctgatggaaaatc

SEQ ID NO: 2587217 - DNA, 25 bp, Homo sapien
tcactcatgttacctgatggaaaat

SEQ ID NO: 2587218 - DNA, 25 bp, Homo sapien
tgtcttgctattgttgattctggca

SEQ ID NO: 2587219 - DNA, 25 bp, Homo sapien
tgttgattctggcaagtgaaatcat

SEQ ID NO: 2587220 - DNA, 25 bp, Homo sapien
gaagagatcaaagcctgtcttgcta

SEQ ID NO: 2587221 - DNA, 25 bp, Homo sapien
cgattgtttgcatatgaatcagact

SEQ ID NO: 2587222 - DNA, 25 bp, Homo sapien
tccgttaaggcaaccaaggattgga

SEQ ID NO: 2587223 - DNA, 25 bp, Homo sapien
gttttaatacatgtactcaatgtgt

SEQ ID NO: 2587224 - DNA, 25 bp, Homo sapien
tactcatcctactatgcaataggac

SEQ ID NO: 2587225 - DNA, 25 bp, Homo sapien
ccagaacttattcctgggttctaca

SEQ ID NO: 2587226 - DNA, 25 bp, Homo sapien
ctacccgatagtagggtggcagtag

SEQ ID NO: 2587227 - DNA, 25 bp, Homo sapien
tgattggtgatgtcttggatattct

SEQ ID NO: 2587228 - DNA, 25 bp, Homo sapien
tgttttggatgattggtgatgtctt

SEQ ID NO: 2587229 - DNA, 25 bp, Homo sapien
ttaactgtggcctcctacactgtgt

SEQ ID NO: 2587230 - DNA, 25 bp, Homo sapien
tggaactttgaatatacaacacttt

SEQ ID NO: 2587231 - DNA, 25 bp, Homo sapien
caaagatgtacagaggaaacaatgc

SEQ ID NO: 2587232 - DNA, 25 bp, Homo sapien
gcaaagatgtacagaggaaacaatg

SEQ ID NO: 2587233 - DNA, 25 bp, Homo sapien
aatgaacattcttcttccggtacat

SEQ ID NO: 2587234 - DNA, 25 bp, Homo sapien
gttaaattattgtttgatggataaa

SEQ ID NO: 2587235 - DNA, 25 bp, Homo sapien
taaattattgtttgatggataaaag

SEQ ID NO: 2587236 - DNA, 25 bp, Homo sapien
tgaacattcttcttccggtacattt

SEQ ID NO: 2587237 - DNA, 25 bp, Homo sapien
gtacctgccttgttttcacagcggt

SEQ ID NO: 2587238 - DNA, 25 bp, Homo sapien
tgtacctgccttgttttcacagcgg

SEQ ID NO: 2587239 - DNA, 25 bp, Homo sapien
tacctgccttgttttcacagcggtg

SEQ ID NO: 2587240 - DNA, 25 bp, Homo sapien
acacgaaacattcttctgatgccgg

SEQ ID NO: 2587241 - DNA, 25 bp, Homo sapien
cagtgatgtcgagtgtgcgggtgtt

SEQ ID NO: 2587242 - DNA, 25 bp, Homo sapien
agtgatgtcgagtgtgcgggtgttt

SEQ ID NO: 2587243 - DNA, 25 bp, Homo sapien
ccagtgatgtcgagtgtgcgggtgt

SEQ ID NO: 2587244 - DNA, 25 bp, Homo sapien
gtgatgtcgagtgtgcgggtgtttg

SEQ ID NO: 2587245 - DNA, 25 bp, Homo sapien
tgaaggggctccaggcaactgagcc

SEQ ID NO: 2587246 - DNA, 25 bp, Homo sapien
gaactgggggatgggctgaaggggc

SEQ ID NO: 2587247 - DNA, 25 bp, Homo sapien
cacaagcaaagtgaactgggggatg

SEQ ID NO: 2587248 - DNA, 25 bp, Homo sapien
gcaacggggagatcccacaagcaaa

SEQ ID NO: 2587249 - DNA, 25 bp, Homo sapien
actgtcggatacttgaactctcaag

SEQ ID NO: 2587250 - DNA, 25 bp, Homo sapien
ggccttggcccaaacaggaatgagg

SEQ ID NO: 2587251 - DNA, 25 bp, Homo sapien
tgtcggatacttgaactctcaagag

SEQ ID NO: 2587252 - DNA, 25 bp, Homo sapien
gaactgtcggatacttgaactctca

SEQ ID NO: 2587253 - DNA, 25 bp, Homo sapien
ctgagggagtgggcatgtgagcaca

SEQ ID NO: 2587254 - DNA, 25 bp, Homo sapien
agggagtgggcatgtgagcacataa

SEQ ID NO: 2587255 - DNA, 25 bp, Homo sapien
ggagtgggcatgtgagcacataatg

SEQ ID NO: 2587256 - DNA, 25 bp, Homo sapien
tgagggagtgggcatgtgagcacat

SEQ ID NO: 2587257 - DNA, 25 bp, Homo sapien
agcgaccataatggatgaataagcg

SEQ ID NO: 2587258 - DNA, 25 bp, Homo sapien
cataatggatgaataagcgcagcca

SEQ ID NO: 2587259 - DNA, 25 bp, Homo sapien
tgacagagcgaccataatggatgaa

SEQ ID NO: 2587260 - DNA, 25 bp, Homo sapien
accataatggatgaataagcgcagc

SEQ ID NO: 2587261 - DNA, 25 bp, Homo sapien
agggagagacgtgggcacaaaggtc

SEQ ID NO: 2587262 - DNA, 25 bp, Homo sapien
ggagggagagacgtgggcacaaagg

SEQ ID NO: 2587263 - DNA, 25 bp, Homo sapien
gagggagagacgtgggcacaaaggt

SEQ ID NO: 2587264 - DNA, 25 bp, Homo sapien
tggagggagagacgtgggcacaaag

SEQ ID NO: 2587265 - DNA, 25 bp, Homo sapien
tttagtcagacatggtgggcaggag

SEQ ID NO: 2587266 - DNA, 25 bp, Homo sapien
tgctaggttgcatagaggacaaaca

SEQ ID NO: 2587267 - DNA, 25 bp, Homo sapien
cgatgatcgttcttgtgaatagcca

SEQ ID NO: 2587268 - DNA, 25 bp, Homo sapien
ggaggtagatcccaccattttatgg

SEQ ID NO: 2587269 - DNA, 25 bp, Homo sapien
tatgctaggctttaggtcaagaagg

SEQ ID NO: 2587270 - DNA, 25 bp, Homo sapien
gagagctataaaagtctgctcagaa

SEQ ID NO: 2587271 - DNA, 25 bp, Homo sapien
cagagaaggacaatgagatatttaa

SEQ ID NO: 2587272 - DNA, 25 bp, Homo sapien
tatttaatttgccacggcaaagcca

SEQ ID NO: 2587273 - DNA, 25 bp, Homo sapien
caggtgagtgttcagatcattattc

SEQ ID NO: 2587274 - DNA, 25 bp, Homo sapien
tacaggaagcacagtggcatcttct

SEQ ID NO: 2587275 - DNA, 25 bp, Homo sapien
cagtggcatcttcttctggagaggc

SEQ ID NO: 2587276 - DNA, 25 bp, Homo sapien
cacagtggcatcttcttctggagag

SEQ ID NO: 2587277 - DNA, 25 bp, Homo sapien
aagcacagtggcatcttcttctgga

SEQ ID NO: 2587278 - DNA, 25 bp, Homo sapien
tcttgaaactaatgtccagggtgta

SEQ ID NO: 2587279 - DNA, 25 bp, Homo sapien
tatagaagcatagccatgcctgccc

SEQ ID NO: 2587280 - DNA, 25 bp, Homo sapien
taatgacctacacagggctttctag

SEQ ID NO: 2587281 - DNA, 25 bp, Homo sapien
gcttagataactccacactgtgatg

SEQ ID NO: 2587282 - DNA, 25 bp, Homo sapien
caggtgagcttcacggtacagttca

SEQ ID NO: 2587283 - DNA, 25 bp, Homo sapien
tcacggtacagttcattctcacaaa

SEQ ID NO: 2587284 - DNA, 25 bp, Homo sapien
agcttcacggtacagttcattctca

SEQ ID NO: 2587285 - DNA, 25 bp, Homo sapien
gtgagcttcacggtacagttcattc

SEQ ID NO: 2587286 - DNA, 25 bp, Homo sapien
cgtttctgacgtggccgcaggagcc

SEQ ID NO: 2587287 - DNA, 25 bp, Homo sapien
tgcagggcgtttctgacgtggccgc

SEQ ID NO: 2587288 - DNA, 25 bp, Homo sapien
ggctggtctcctctcgtggagcctc

SEQ ID NO: 2587289 - DNA, 25 bp, Homo sapien
cgtggagcctccgaagatgtcaggt

SEQ ID NO: 2587290 - DNA, 25 bp, Homo sapien
tcatcggaagtccacatggcgggtc

SEQ ID NO: 2587291 - DNA, 25 bp, Homo sapien
cctcaggaagaagcaagaatgccgc

SEQ ID NO: 2587292 - DNA, 25 bp, Homo sapien
cattttagccttcgccacaggtggt

SEQ ID NO: 2587293 - DNA, 25 bp, Homo sapien
ggatgtgtaagacaactggcctacc

SEQ ID NO: 2587294 - DNA, 25 bp, Homo sapien
ggagctgccaatcctagagaacact

SEQ ID NO: 2587295 - DNA, 25 bp, Homo sapien
tgccaatcctagagaacactggctg

SEQ ID NO: 2587296 - DNA, 25 bp, Homo sapien
gctgccaatcctagagaacactggc

SEQ ID NO: 2587297 - DNA, 25 bp, Homo sapien
aatcctagagaacactggctgtccc

SEQ ID NO: 2587298 - DNA, 25 bp, Homo sapien
tacagagaccgaagcgtcctctctc

SEQ ID NO: 2587299 - DNA, 25 bp, Homo sapien
ccccgtacagagaccgaagcgtcct

SEQ ID NO: 2587300 - DNA, 25 bp, Homo sapien
ccaccccgtacagagaccgaagcgt

SEQ ID NO: 2587301 - DNA, 25 bp, Homo sapien
cgtacagagaccgaagcgtcctctc

SEQ ID NO: 2587302 - DNA, 25 bp, Homo sapien
atgtaaagacgtggctttaggctaa

SEQ ID NO: 2587303 - DNA, 25 bp, Homo sapien
aatatgtaaagacgtggctttaggc

SEQ ID NO: 2587304 - DNA, 25 bp, Homo sapien
taaaatatgtaaagacgtggcttta

SEQ ID NO: 2587305 - DNA, 25 bp, Homo sapien
tctgtttacacctccccctgttaca

SEQ ID NO: 2587306 - DNA, 25 bp, Homo sapien
tttcttcattctggtgggtttggtg

SEQ ID NO: 2587307 - DNA, 25 bp, Homo sapien
cttggcactaatggaggagtgtgac

SEQ ID NO: 2587308 - DNA, 25 bp, Homo sapien
ggagtgtgacgtggccgtgcgcagg

SEQ ID NO: 2587309 - DNA, 25 bp, Homo sapien
agtgtgacgtggccgtgcgcaggga

SEQ ID NO: 2587310 - DNA, 25 bp, Homo sapien
gccttggcactaatggaggagtgtg

SEQ ID NO: 2587311 - DNA, 25 bp, Homo sapien
catgactgatgggaagggcctttgc

SEQ ID NO: 2587312 - DNA, 25 bp, Homo sapien
tgagcatggcagccaagtggccaga

SEQ ID NO: 2587313 - DNA, 25 bp, Homo sapien
gctgagcatggcagccaagtggcca

SEQ ID NO: 2587314 - DNA, 25 bp, Homo sapien
agggcctttgcagctgagcatggca

SEQ ID NO: 2587315 - DNA, 25 bp, Homo sapien
aggcctggccgtagagggagccgtt

SEQ ID NO: 2587316 - DNA, 25 bp, Homo sapien
cagcagcgtgtactcgaaggtgatg

SEQ ID NO: 2587317 - DNA, 25 bp, Homo sapien
cgaacagccggttgtccaggcccag

SEQ ID NO: 2587318 - DNA, 25 bp, Homo sapien
tctcagcgctctcggagaagccata

SEQ ID NO: 2587319 - DNA, 25 bp, Homo sapien
cctcatgcctccctcctcctggtta

SEQ ID NO: 2587320 - DNA, 25 bp, Homo sapien
ctcatgcctccctcctcctggttac

SEQ ID NO: 2587321 - DNA, 25 bp, Homo sapien
accgtgggcacatccgagccctggg

SEQ ID NO: 2587322 - DNA, 25 bp, Homo sapien
acaggtggctcaaccgtgggcacat

SEQ ID NO: 2587323 - DNA, 25 bp, Homo sapien
ggagacaggtggctcaaccgtgggc

SEQ ID NO: 2587324 - DNA, 25 bp, Homo sapien
tggctcaaccgtgggcacatccgag

SEQ ID NO: 2587325 - DNA, 25 bp, Homo sapien
tcagctccaggtaggacccgttgag

SEQ ID NO: 2587326 - DNA, 25 bp, Homo sapien
cataatccacgaagaagctctcggc

SEQ ID NO: 2587327 - DNA, 25 bp, Homo sapien
cctcggaggagctgttggcaaccct

SEQ ID NO: 2587328 - DNA, 25 bp, Homo sapien
tggcgttagccgagaagaactcctg

SEQ ID NO: 2587329 - DNA, 25 bp, Homo sapien
ggtaaagggtgagcagacagccctg

SEQ ID NO: 2587330 - DNA, 25 bp, Homo sapien
gtaaagggtgagcagacagccctgt

SEQ ID NO: 2587331 - DNA, 25 bp, Homo sapien
aggtaaagggtgagcagacagccct

SEQ ID NO: 2587332 - DNA, 25 bp, Homo sapien
aaggtaaagggtgagcagacagccc

SEQ ID NO: 2587333 - DNA, 25 bp, Homo sapien
aataccagggaatgccccggactgc

SEQ ID NO: 2587334 - DNA, 25 bp, Homo sapien
gcctcacacacggaataccagggaa

SEQ ID NO: 2587335 - DNA, 25 bp, Homo sapien
cgtgggcctcacacacggaatacca

SEQ ID NO: 2587336 - DNA, 25 bp, Homo sapien
acacggaataccagggaatgccccg

SEQ ID NO: 2587337 - DNA, 25 bp, Homo sapien
cctagttgatcgacccttgaggccc

SEQ ID NO: 2587338 - DNA, 25 bp, Homo sapien
tctgagtgctgacagcctagttgat

SEQ ID NO: 2587339 - DNA, 25 bp, Homo sapien
catctttggtccctgtgcggcagca

SEQ ID NO: 2587340 - DNA, 25 bp, Homo sapien
agcatcctttgatggcaggccggcc

SEQ ID NO: 2587341 - DNA, 25 bp, Homo sapien
ttgcttgcgcgccttgggcctggtc

SEQ ID NO: 2587342 - DNA, 25 bp, Homo sapien
ggctcgtgggacgagagcttccacc

SEQ ID NO: 2587343 - DNA, 25 bp, Homo sapien
accggtacatgtccgcgggactcac

SEQ ID NO: 2587344 - DNA, 25 bp, Homo sapien
gtccgcgggactcacgccttgcttg

SEQ ID NO: 2587345 - DNA, 25 bp, Homo sapien
atgtccatggaaatgggttcagggc

SEQ ID NO: 2587346 - DNA, 25 bp, Homo sapien
catggaaatgggttcagggcagttg

SEQ ID NO: 2587347 - DNA, 25 bp, Homo sapien
ccatggaaatgggttcagggcagtt

SEQ ID NO: 2587348 - DNA, 25 bp, Homo sapien
ccatgtccatggaaatgggttcagg

SEQ ID NO: 2587349 - DNA, 25 bp, Homo sapien
ccaggcgcaggggcgaacacagcat

SEQ ID NO: 2587350 - DNA, 25 bp, Homo sapien
tggccaagccggtgcccgccacgcc

SEQ ID NO: 2587351 - DNA, 25 bp, Homo sapien
cggtgcgagcctggccaagccggtg

SEQ ID NO: 2587352 - DNA, 25 bp, Homo sapien
gccacgccgcccacggcggtgcgaa

SEQ ID NO: 2587353 - DNA, 25 bp, Homo sapien
gcctggccaagttcgggtgcccaca

SEQ ID NO: 2587354 - DNA, 25 bp, Homo sapien
gcggcggtgcgagcctggccaagtt

SEQ ID NO: 2587355 - DNA, 25 bp, Homo sapien
gccgcccacagcgtgcgcggcggtg

SEQ ID NO: 2587356 - DNA, 25 bp, Homo sapien
cacgccgcccacagcgtgcgcggcg

SEQ ID NO: 2587357 - DNA, 25 bp, Homo sapien
tgacaacgcccacacgcttggagtc

SEQ ID NO: 2587358 - DNA, 25 bp, Homo sapien
gacaacgcccacacgcttggagtcc

SEQ ID NO: 2587359 - DNA, 25 bp, Homo sapien
acaacgcccacacgcttggagtccc

SEQ ID NO: 2587360 - DNA, 25 bp, Homo sapien
tggaatccaagtcccagctcagtgc

SEQ ID NO: 2587361 - DNA, 25 bp, Homo sapien
tcatggaacggtcttggctgcagct

SEQ ID NO: 2587362 - DNA, 25 bp, Homo sapien
tttccgtaaaggacgagccaggctg

SEQ ID NO: 2587363 - DNA, 25 bp, Homo sapien
tcagcatgctccttcccgaaatggg

SEQ ID NO: 2587364 - DNA, 25 bp, Homo sapien
gcctggtaccgaactgccacacagg

SEQ ID NO: 2587365 - DNA, 25 bp, Homo sapien
tgcttctttcgtcctcgcccctgca

SEQ ID NO: 2587366 - DNA, 25 bp, Homo sapien
ccttctgcttctttcgtcctcgccc

SEQ ID NO: 2587367 - DNA, 25 bp, Homo sapien
cccttgcctggtaccgaactgccac

SEQ ID NO: 2587368 - DNA, 25 bp, Homo sapien
tgttggtgccccgtactctgtaatc

SEQ ID NO: 2587369 - DNA, 25 bp, Homo sapien
cagcagacaggcctcaggacttggg

SEQ ID NO: 2587370 - DNA, 25 bp, Homo sapien
cagttcccatgtcacggagtccggg

SEQ ID NO: 2587371 - DNA, 25 bp, Homo sapien
ggagtgacatctgacggctccagcc

SEQ ID NO: 2587372 - DNA, 25 bp, Homo sapien
cgggtcagggcgtcacagtagctgt

SEQ ID NO: 2587373 - DNA, 25 bp, Homo sapien
tcgacgccatcatagcggacacaca

SEQ ID NO: 2587374 - DNA, 25 bp, Homo sapien
cagaactcgtggacaggctcgggac

SEQ ID NO: 2587375 - DNA, 25 bp, Homo sapien
tagcggacacacatggcgtacgcag

SEQ ID NO: 2587376 - DNA, 25 bp, Homo sapien
gacgcggaactggtagccctctccg

SEQ ID NO: 2587377 - DNA, 25 bp, Homo sapien
tgcctcgcacaggtcgctgtacacg

SEQ ID NO: 2587378 - DNA, 25 bp, Homo sapien
ctgtacacggagctgtcgaagccgg

SEQ ID NO: 2587379 - DNA, 25 bp, Homo sapien
tccggcaggtcttgcgttcctcggg

SEQ ID NO: 2587380 - DNA, 25 bp, Homo sapien
agacggtccactgccggtcacaggg

SEQ ID NO: 2587381 - DNA, 25 bp, Homo sapien
tctcatcctccgagcagcggatgtc

SEQ ID NO: 2587382 - DNA, 25 bp, Homo sapien
gtccccagtcggagacggtccactg

SEQ ID NO: 2587383 - DNA, 25 bp, Homo sapien
tccgagcagcggatgtccctggtca

SEQ ID NO: 2587384 - DNA, 25 bp, Homo sapien
cgtccgtcgctggtcttgcagtaca

SEQ ID NO: 2587385 - DNA, 25 bp, Homo sapien
caggtactacccgtccgtcgctggt

SEQ ID NO: 2587386 - DNA, 25 bp, Homo sapien
gcctgatggtgcggccttgcccgca

SEQ ID NO: 2587387 - DNA, 25 bp, Homo sapien
tggatggccagaggcttggtctcca

SEQ ID NO: 2587388 - DNA, 25 bp, Homo sapien
ctgcgcgtctgcggcttcccgttgg

SEQ ID NO: 2587389 - DNA, 25 bp, Homo sapien
aggcttcttggcgagcccgcactcg

SEQ ID NO: 2587390 - DNA, 25 bp, Homo sapien
tggtgtaccacttgaagcagggcct

SEQ ID NO: 2587391 - DNA, 25 bp, Homo sapien
tcgaaacacgtgctctcctcgggag

SEQ ID NO: 2587392 - DNA, 25 bp, Homo sapien
ggacgatgtcggtcccctggtagca

SEQ ID NO: 2587393 - DNA, 25 bp, Homo sapien
aacgggcttcaccaacggatcgcaa

SEQ ID NO: 2587394 - DNA, 25 bp, Homo sapien
ggtagcacttgacgtctcgcatcct

SEQ ID NO: 2587395 - DNA, 25 bp, Homo sapien
ggatcgcaaccacggacgatgtcgg

SEQ ID NO: 2587396 - DNA, 25 bp, Homo sapien
tgcccgcagaggttcactttgatgg

SEQ ID NO: 2587397 - DNA, 25 bp, Homo sapien
agtgcccgcagaggttcactttgat

SEQ ID NO: 2587398 - DNA, 25 bp, Homo sapien
gtgcccgcagaggttcactttgatg

SEQ ID NO: 2587399 - DNA, 25 bp, Homo sapien
tagatgagcactgacgctgactgca

SEQ ID NO: 2587400 - DNA, 25 bp, Homo sapien
tccacgcaggaacacggacaggttc

SEQ ID NO: 2587401 - DNA, 25 bp, Homo sapien
gggagccacaaacacaggatccacg

SEQ ID NO: 2587402 - DNA, 25 bp, Homo sapien
tcagtgccacgtctcttaggccagc

SEQ ID NO: 2587403 - DNA, 25 bp, Homo sapien
gagataacagtcacacctgcacgtt

SEQ ID NO: 2587404 - DNA, 25 bp, Homo sapien
agtggatcgttgtgaagtgctcagc

SEQ ID NO: 2587405 - DNA, 25 bp, Homo sapien
gacccatagcactggttaaacagct

SEQ ID NO: 2587406 - DNA, 25 bp, Homo sapien
cagggccatccagagtctccatgtc

SEQ ID NO: 2587407 - DNA, 25 bp, Homo sapien
gccatgcgaggaatcccggccagct

SEQ ID NO: 2587408 - DNA, 25 bp, Homo sapien
actgataaaggagcatgttcaatgc

SEQ ID NO: 2587409 - DNA, 25 bp, Homo sapien
gagcatgttcaatgccatgcgagga

SEQ ID NO: 2587410 - DNA, 25 bp, Homo sapien
tcaatgccatgcgaggaatcccggc

SEQ ID NO: 2587411 - DNA, 25 bp, Homo sapien
gaactggagctcataaacgtggaaa

SEQ ID NO: 2587412 - DNA, 25 bp, Homo sapien
aatggaagaactggccgagagcagc

SEQ ID NO: 2587413 - DNA, 25 bp, Homo sapien
cctgataaagggaggaatggaacct

SEQ ID NO: 2587414 - DNA, 25 bp, Homo sapien
tctgcaggccgcatgctagggtaac

SEQ ID NO: 2587415 - DNA, 25 bp, Homo sapien
taaaatacagagtgtaatcaggttg

SEQ ID NO: 2587416 - DNA, 25 bp, Homo sapien
aaatacagagtgtaatcaggttgtt

SEQ ID NO: 2587417 - DNA, 25 bp, Homo sapien
atacagagtgtaatcaggttgtttg

SEQ ID NO: 2587418 - DNA, 25 bp, Homo sapien
acagagtgtaatcaggttgtttgta

SEQ ID NO: 2587419 - DNA, 25 bp, Homo sapien
tttggaaacaccctaagtgttcatc

SEQ ID NO: 2587420 - DNA, 25 bp, Homo sapien
gatttggaaacaccctaagtgttca

SEQ ID NO: 2587421 - DNA, 25 bp, Homo sapien
caatactgtttataacagctaagat

SEQ ID NO: 2587422 - DNA, 25 bp, Homo sapien
tatttacccatctgtatagtaaact

SEQ ID NO: 2587423 - DNA, 25 bp, Homo sapien
tgtgtgtgcttttgtaactttattt

SEQ ID NO: 2587424 - DNA, 25 bp, Homo sapien
tctgtatagtaaacttcgggaaaca

SEQ ID NO: 2587425 - DNA, 25 bp, Homo sapien
gaattttgcattccttgtgtgtgct

SEQ ID NO: 2587426 - DNA, 25 bp, Homo sapien
ctggaagggaacaggaatacactct

SEQ ID NO: 2587427 - DNA, 25 bp, Homo sapien
gaatacactctgcagtgcacacgag

SEQ ID NO: 2587428 - DNA, 25 bp, Homo sapien
agtgcacacgagctccgctttccga

SEQ ID NO: 2587429 - DNA, 25 bp, Homo sapien
ggaacaggaatacactctgcagtgc

SEQ ID NO: 2587430 - DNA, 25 bp, Homo sapien
tgtagaagtttggagccttaggcca

SEQ ID NO: 2587431 - DNA, 25 bp, Homo sapien
tagaagtttggagccttaggccagt

SEQ ID NO: 2587432 - DNA, 25 bp, Homo sapien
tttggagccttaggccagtgctgga

SEQ ID NO: 2587433 - DNA, 25 bp, Homo sapien
gaagtttggagccttaggccagtgc

SEQ ID NO: 2587434 - DNA, 25 bp, Homo sapien
ctctggatgccaaagcgtcatactt

SEQ ID NO: 2587435 - DNA, 25 bp, Homo sapien
cctttagttcaaagcactctggatg

SEQ ID NO: 2587436 - DNA, 25 bp, Homo sapien
caaagcgtcatactttggagtataa

SEQ ID NO: 2587437 - DNA, 25 bp, Homo sapien
tatgagccccagcaataacagtctt

SEQ ID NO: 2587438 - DNA, 25 bp, Homo sapien
cttgggcccagctcctgctgcaggc

SEQ ID NO: 2587439 - DNA, 25 bp, Homo sapien
ccttgggcccagctcctgctgcagg

SEQ ID NO: 2587440 - DNA, 25 bp, Homo sapien
ttgggcccagctcctgctgcaggct

SEQ ID NO: 2587441 - DNA, 25 bp, Homo sapien
gaagatgcatagactagacaggaga

SEQ ID NO: 2587442 - DNA, 25 bp, Homo sapien
cagcgaatgagcaagggattttgga

SEQ ID NO: 2587443 - DNA, 25 bp, Homo sapien
aggcgagtgaagatgcatagactag

SEQ ID NO: 2587444 - DNA, 25 bp, Homo sapien
gttaaaatctgggtaagcagcagga

SEQ ID NO: 2587445 - DNA, 25 bp, Homo sapien
atgctcaaatcccaagtccgtattt

SEQ ID NO: 2587446 - DNA, 25 bp, Homo sapien
aatcccaagtccgtattttccatgt

SEQ ID NO: 2587447 - DNA, 25 bp, Homo sapien
tgcatagaaaatgctcaaatcccaa

SEQ ID NO: 2587448 - DNA, 25 bp, Homo sapien
atagaaaatgctcaaatcccaagtc

SEQ ID NO: 2587449 - DNA, 25 bp, Homo sapien
tgatggccttgagggtttggttttg

SEQ ID NO: 2587450 - DNA, 25 bp, Homo sapien
gctgtgctggaaggaccaagatgat

SEQ ID NO: 2587451 - DNA, 25 bp, Homo sapien
caagatgatccaagaccactggtca

SEQ ID NO: 2587452 - DNA, 25 bp, Homo sapien
ttggtacaaggtgggttcaactgac

SEQ ID NO: 2587453 - DNA, 25 bp, Homo sapien
tgtaacatagcaccaaagggaaggt

SEQ ID NO: 2587454 - DNA, 25 bp, Homo sapien
aacatagcaccaaagggaaggtcat

SEQ ID NO: 2587455 - DNA, 25 bp, Homo sapien
tgtgtaacatagcaccaaagggaag

SEQ ID NO: 2587456 - DNA, 25 bp, Homo sapien
ctgtgtaacatagcaccaaagggaa

SEQ ID NO: 2587457 - DNA, 25 bp, Homo sapien
ctggggagcttcatcttggctttcc

SEQ ID NO: 2587458 - DNA, 25 bp, Homo sapien
actggggagcttcatcttggctttc

SEQ ID NO: 2587459 - DNA, 25 bp, Homo sapien
tgcgttagctaaaactatcactgtg

SEQ ID NO: 2587460 - DNA, 25 bp, Homo sapien
tatcactgtgcttatagcctgtaag

SEQ ID NO: 2587461 - DNA, 25 bp, Homo sapien
ggagtatttagcacagttattttca

SEQ ID NO: 2587462 - DNA, 25 bp, Homo sapien
cctgtaaggctacagcatcagagag

SEQ ID NO: 2587463 - DNA, 25 bp, Homo sapien
gaaagtatatttgatgagatgcaag

SEQ ID NO: 2587464 - DNA, 25 bp, Homo sapien
tatgaaagtatatttgatgagatgc

SEQ ID NO: 2587465 - DNA, 25 bp, Homo sapien
gtatgaaagtatatttgatgagatg

SEQ ID NO: 2587466 - DNA, 25 bp, Homo sapien
aattacagacatgtgatacatatga

SEQ ID NO: 2587467 - DNA, 25 bp, Homo sapien
tgttgagtcagtgtccaaaggtttg

SEQ ID NO: 2587468 - DNA, 25 bp, Homo sapien
tctccagatgttgagtcagtgtcca

SEQ ID NO: 2587469 - DNA, 25 bp, Homo sapien
tccagatgttgagtcagtgtccaaa

SEQ ID NO: 2587470 - DNA, 25 bp, Homo sapien
cagatgttgagtcagtgtccaaagg

SEQ ID NO: 2587471 - DNA, 25 bp, Homo sapien
tcatattgcagtacacaagaaatgg

SEQ ID NO: 2587472 - DNA, 25 bp, Homo sapien
tgcttgtgggcttcacaagactgct

SEQ ID NO: 2587473 - DNA, 25 bp, Homo sapien
ctgtcatattgcagtacacaagaaa

SEQ ID NO: 2587474 - DNA, 25 bp, Homo sapien
ttgcagtacacaagaaatggtccca

SEQ ID NO: 2587475 - DNA, 25 bp, Homo sapien
ctacttagcaagtacacactatcaa

SEQ ID NO: 2587476 - DNA, 25 bp, Homo sapien
ctatgcatctaacgattatcaacat

SEQ ID NO: 2587477 - DNA, 25 bp, Homo sapien
actgcatgttttaataatgctgcca

SEQ ID NO: 2587478 - DNA, 25 bp, Homo sapien
ttctgatctatgcatctaacgatta

SEQ ID NO: 2587479 - DNA, 25 bp, Homo sapien
atgcgcagcccaagcagtgttcatt

SEQ ID NO: 2587480 - DNA, 25 bp, Homo sapien
ctacaggtgcgggcgccacaatgcc

SEQ ID NO: 2587481 - DNA, 25 bp, Homo sapien
caccatgcgcagcccaagcagtgtt

SEQ ID NO: 2587482 - DNA, 25 bp, Homo sapien
ccatgcgcagcccaagcagtgttca

SEQ ID NO: 2587483 - DNA, 25 bp, Homo sapien
ttaggtctgagtcctttagggagcc

SEQ ID NO: 2587484 - DNA, 25 bp, Homo sapien
tgtaactgctgtaaagaggcctgca

SEQ ID NO: 2587485 - DNA, 25 bp, Homo sapien
gaggcctgcagtactataagtaaca

SEQ ID NO: 2587486 - DNA, 25 bp, Homo sapien
acccttacatgggacaggatggcca

SEQ ID NO: 2587487 - DNA, 25 bp, Homo sapien
tgacccggagccacttggaaaagtc

SEQ ID NO: 2587488 - DNA, 25 bp, Homo sapien
tcactgacccggagccacttggaaa

SEQ ID NO: 2587489 - DNA, 25 bp, Homo sapien
ctgacccggagccacttggaaaagt

SEQ ID NO: 2587490 - DNA, 25 bp, Homo sapien
cactgacccggagccacttggaaaa

SEQ ID NO: 2587491 - DNA, 25 bp, Homo sapien
tgttgcaggcattgtagacgtgata

SEQ ID NO: 2587492 - DNA, 25 bp, Homo sapien
gatcagtgttgcaggcattgtagac

SEQ ID NO: 2587493 - DNA, 25 bp, Homo sapien
cctctgatcagtgttgcaggcattg

SEQ ID NO: 2587494 - DNA, 25 bp, Homo sapien
cagtgttgcaggcattgtagacgtg

SEQ ID NO: 2587495 - DNA, 25 bp, Homo sapien
gcctctcacatgtataattgggaag

SEQ ID NO: 2587496 - DNA, 25 bp, Homo sapien
tctgcctctcacatgtataattggg

SEQ ID NO: 2587497 - DNA, 25 bp, Homo sapien
tcaatcgctgctatggatttgctct

SEQ ID NO: 2587498 - DNA, 25 bp, Homo sapien
aatgctgatatagttccttcaatcg

SEQ ID NO: 2587499 - DNA, 25 bp, Homo sapien
tgtagatttccatcaacatctccaa

SEQ ID NO: 2587500 - DNA, 25 bp, Homo sapien
gtttgtagatttccatcaacatctc

SEQ ID NO: 2587501 - DNA, 25 bp, Homo sapien
ttgtagatttccatcaacatctcca

SEQ ID NO: 2587502 - DNA, 25 bp, Homo sapien
tagtttgtagatttccatcaacatc

SEQ ID NO: 2587503 - DNA, 25 bp, Homo sapien
gctgcacacgcagcatcatagatgg

SEQ ID NO: 2587504 - DNA, 25 bp, Homo sapien
caagaaagcatttcgtgggcatcct

SEQ ID NO: 2587505 - DNA, 25 bp, Homo sapien
gatgcaatccagtcaaagcaacgca

SEQ ID NO: 2587506 - DNA, 25 bp, Homo sapien
tagcatagggcattggctgcacacg

SEQ ID NO: 2587507 - DNA, 25 bp, Homo sapien
tcagcactggtcataaattccgtgg

SEQ ID NO: 2587508 - DNA, 25 bp, Homo sapien
agcactggtcataaattccgtggtc

SEQ ID NO: 2587509 - DNA, 25 bp, Homo sapien
cagcactggtcataaattccgtggt

SEQ ID NO: 2587510 - DNA, 25 bp, Homo sapien
tagacttcacgtatgcttagggcag

SEQ ID NO: 2587511 - DNA, 25 bp, Homo sapien
tagacaggtctatccaacagtaaga

SEQ ID NO: 2587512 - DNA, 25 bp, Homo sapien
cttggagccacctgtattgagtgac

SEQ ID NO: 2587513 - DNA, 25 bp, Homo sapien
cttagggcagtaaccagaggaacgt

SEQ ID NO: 2587514 - DNA, 25 bp, Homo sapien
cctggctgttcagaagacctccagc

SEQ ID NO: 2587515 - DNA, 25 bp, Homo sapien
ggacatctttaacaatcctagaggt

SEQ ID NO: 2587516 - DNA, 25 bp, Homo sapien
tgacggacatctttaacaatcctag

SEQ ID NO: 2587517 - DNA, 25 bp, Homo sapien
aagacctccagctcattggtctgtc

SEQ ID NO: 2587518 - DNA, 25 bp, Homo sapien
ggataaatttcttacttggatggac

SEQ ID NO: 2587519 - DNA, 25 bp, Homo sapien
gggtgacaccataccccaggatctc

SEQ ID NO: 2587520 - DNA, 25 bp, Homo sapien
gagtctggcaaatagtccttctcaa

SEQ ID NO: 2587521 - DNA, 25 bp, Homo sapien
actttcaaacatggtgagtctggca

SEQ ID NO: 2587522 - DNA, 25 bp, Homo sapien
agagaccgaatgcatcctagaaagc

SEQ ID NO: 2587523 - DNA, 25 bp, Homo sapien
ctgcagagaccgaatgcatcctaga

SEQ ID NO: 2587524 - DNA, 25 bp, Homo sapien
tcctagaaagcctctctgtctggtg

SEQ ID NO: 2587525 - DNA, 25 bp, Homo sapien
gaaagcctctctgtctggtggccgt

SEQ ID NO: 2587526 - DNA, 25 bp, Homo sapien
ccagatccagggccaccccattcaa

SEQ ID NO: 2587527 - DNA, 25 bp, Homo sapien
tgtggctctttcttccagatccagg

SEQ ID NO: 2587528 - DNA, 25 bp, Homo sapien
ttccagatccagggccaccccattc

SEQ ID NO: 2587529 - DNA, 25 bp, Homo sapien
tcttccagatccagggccaccccat

SEQ ID NO: 2587530 - DNA, 25 bp, Homo sapien
caagtgtccataggtgctgcagtgt

SEQ ID NO: 2587531 - DNA, 25 bp, Homo sapien
agtcacaggtgacccccctgcgttt

SEQ ID NO: 2587532 - DNA, 25 bp, Homo sapien
gaaggcacagtcacaggtgaccccc

SEQ ID NO: 2587533 - DNA, 25 bp, Homo sapien
tctccctccattgcgacacaagtgt

SEQ ID NO: 2587534 - DNA, 25 bp, Homo sapien
ctataacctgctccttggtcacact

SEQ ID NO: 2587535 - DNA, 25 bp, Homo sapien
taacctgctccttggtcacacttac

SEQ ID NO: 2587536 - DNA, 25 bp, Homo sapien
tttccctataacctgctccttggtc

SEQ ID NO: 2587537 - DNA, 25 bp, Homo sapien
ttccctataacctgctccttggtca

SEQ ID NO: 2587538 - DNA, 25 bp, Homo sapien
gcaccgccgagaggcagccagtgaa

SEQ ID NO: 2587539 - DNA, 25 bp, Homo sapien
gccagtgaagccactagtcgccgcc

SEQ ID NO: 2587540 - DNA, 25 bp, Homo sapien
ttgtgtccgggtccgcgccggcagc

SEQ ID NO: 2587541 - DNA, 25 bp, Homo sapien
ccataggggccacgtggccgcggac

SEQ ID NO: 2587542 - DNA, 25 bp, Homo sapien
gcgataatgacaagcaccaggtcat

SEQ ID NO: 2587543 - DNA, 25 bp, Homo sapien
agggccttgttacctccgatgacag

SEQ ID NO: 2587544 - DNA, 25 bp, Homo sapien
tatctaaagcgataatgacaagcac

SEQ ID NO: 2587545 - DNA, 25 bp, Homo sapien
tctgcattaaccaagggctctccct

SEQ ID NO: 2587546 - DNA, 25 bp, Homo sapien
taactgtagccttgatcctcccaag

SEQ ID NO: 2587547 - DNA, 25 bp, Homo sapien
tgtgagttagcgtgcctggcctcaa

SEQ ID NO: 2587548 - DNA, 25 bp, Homo sapien
cactccaccgttcagcttatttgtt

SEQ ID NO: 2587549 - DNA, 25 bp, Homo sapien
tgagactataggcccactccaccgt

SEQ ID NO: 2587550 - DNA, 25 bp, Homo sapien
ctctgttgatagatgcgtatggcta

SEQ ID NO: 2587551 - DNA, 25 bp, Homo sapien
agatgcgtatggctatggcagtgat

SEQ ID NO: 2587552 - DNA, 25 bp, Homo sapien
ttctctgttgatagatgcgtatggc

SEQ ID NO: 2587553 - DNA, 25 bp, Homo sapien
gttgatagatgcgtatggctatggc

SEQ ID NO: 2587554 - DNA, 25 bp, Homo sapien
ctttttttgagacttttgactcatt

SEQ ID NO: 2587555 - DNA, 25 bp, Homo sapien
ttttgagacttttgactcattttct

SEQ ID NO: 2587556 - DNA, 25 bp, Homo sapien
cactcttctttttttgagacttttg

SEQ ID NO: 2587557 - DNA, 25 bp, Homo sapien
ttctttttttgagacttttgactca

SEQ ID NO: 2587558 - DNA, 25 bp, Homo sapien
ggcctgcgtctgtcatcacaatctg

SEQ ID NO: 2587559 - DNA, 25 bp, Homo sapien
tgcgtctgtcatcacaatctgagtg

SEQ ID NO: 2587560 - DNA, 25 bp, Homo sapien
ggaaaggactattgtgtcactagtc

SEQ ID NO: 2587561 - DNA, 25 bp, Homo sapien
ttttgggaaaggactattgtgtcac

SEQ ID NO: 2587562 - DNA, 25 bp, Homo sapien
gaaggtatgaagtctcagtgttgaa

SEQ ID NO: 2587563 - DNA, 25 bp, Homo sapien
acgtcagcagtgagttctccgtgga

SEQ ID NO: 2587564 - DNA, 25 bp, Homo sapien
ttaaaaaagaagcacacgtcagcag

SEQ ID NO: 2587565 - DNA, 25 bp, Homo sapien
atgaagtctcagtgttgaaggaagc

SEQ ID NO: 2587566 - DNA, 25 bp, Homo sapien
atgggtaccctgtgacttgtccaga

SEQ ID NO: 2587567 - DNA, 25 bp, Homo sapien
taaataatgggtaccctgtgacttg

SEQ ID NO: 2587568 - DNA, 25 bp, Homo sapien
taatgggtaccctgtgacttgtcca

SEQ ID NO: 2587569 - DNA, 25 bp, Homo sapien
ataatgggtaccctgtgacttgtcc

SEQ ID NO: 2587570 - DNA, 25 bp, Homo sapien
tgatcaacttgaagagacgctcctt

SEQ ID NO: 2587571 - DNA, 25 bp, Homo sapien
ggtccattccccacatcgaaggaaa

SEQ ID NO: 2587572 - DNA, 25 bp, Homo sapien
tgttgagctgtaaacgaacgtgccc

SEQ ID NO: 2587573 - DNA, 25 bp, Homo sapien
cattaaagggagtgggtgactgcac

SEQ ID NO: 2587574 - DNA, 25 bp, Homo sapien
tctggactcacactaaattcagtta

SEQ ID NO: 2587575 - DNA, 25 bp, Homo sapien
ctctggactcacactaaattcagtt

SEQ ID NO: 2587576 - DNA, 25 bp, Homo sapien
aaattcagttataaaccaccagcac

SEQ ID NO: 2587577 - DNA, 25 bp, Homo sapien
tcagttataaaccaccagcactcac

SEQ ID NO: 2587578 - DNA, 25 bp, Homo sapien
taagagcattactaccagatgcatg

SEQ ID NO: 2587579 - DNA, 25 bp, Homo sapien
caagtgatagttactctgggacagt

SEQ ID NO: 2587580 - DNA, 25 bp, Homo sapien
tttgacaaactgtgcaagatcacca

SEQ ID NO: 2587581 - DNA, 25 bp, Homo sapien
tgggacagtaagtgcaaagtagaac

SEQ ID NO: 2587582 - DNA, 25 bp, Homo sapien
ttccccttgcattgcttccaaaaag

SEQ ID NO: 2587583 - DNA, 25 bp, Homo sapien
tatagaaacctaggagagacagttt

SEQ ID NO: 2587584 - DNA, 25 bp, Homo sapien
ttctctttagcacactgagttttga

SEQ ID NO: 2587585 - DNA, 25 bp, Homo sapien
tctgcttttggttagaagatgtttc

SEQ ID NO: 2587586 - DNA, 25 bp, Homo sapien
tgacaaatgtccacaccaatgtaac

SEQ ID NO: 2587587 - DNA, 25 bp, Homo sapien
taaataaaggtgataatctcttgtg

SEQ ID NO: 2587588 - DNA, 25 bp, Homo sapien
gacatttgtattgtactgtgaaaga

SEQ ID NO: 2587589 - DNA, 25 bp, Homo sapien
ccaatgtaaccatagtcaatcaaga

SEQ ID NO: 2587590 - DNA, 25 bp, Homo sapien
tattggtgtattctcatagccttga

SEQ ID NO: 2587591 - DNA, 25 bp, Homo sapien
atagccttgaaacactaatgtcacg

SEQ ID NO: 2587592 - DNA, 25 bp, Homo sapien
tctttctctgctacctcattcctca

SEQ ID NO: 2587593 - DNA, 25 bp, Homo sapien
cactaatgtcacgttgatgtctgca

SEQ ID NO: 2587594 - DNA, 25 bp, Homo sapien
agtcctgcaacaacagttctcaaac

SEQ ID NO: 2587595 - DNA, 25 bp, Homo sapien
tcagaagtcctgcaacaacagttct

SEQ ID NO: 2587596 - DNA, 25 bp, Homo sapien
cagaagtcctgcaacaacagttctc

SEQ ID NO: 2587597 - DNA, 25 bp, Homo sapien
gaagtcctgcaacaacagttctcaa

SEQ ID NO: 2587598 - DNA, 25 bp, Homo sapien
ctgcatagagcagcgccaagctcgg

SEQ ID NO: 2587599 - DNA, 25 bp, Homo sapien
agctcggccccgatgggagagaaga

SEQ ID NO: 2587600 - DNA, 25 bp, Homo sapien
cgtcctggctaaggcagcgccgacg

SEQ ID NO: 2587601 - DNA, 25 bp, Homo sapien
tgacgcggctattgcggagggaggc

SEQ ID NO: 2587602 - DNA, 25 bp, Homo sapien
attagaataatgcttgtgtttctgg

SEQ ID NO: 2587603 - DNA, 25 bp, Homo sapien
gtgtggacaggtggcacggtgtctg

SEQ ID NO: 2587604 - DNA, 25 bp, Homo sapien
tgtggacaggtggcacggtgtctga

SEQ ID NO: 2587605 - DNA, 25 bp, Homo sapien
gtggacaggtggcacggtgtctgac

SEQ ID NO: 2587606 - DNA, 25 bp, Homo sapien
tggacaggtggcacggtgtctgact

SEQ ID NO: 2587607 - DNA, 25 bp, Homo sapien
tcttctgttttatgtagtaagcaga

SEQ ID NO: 2587608 - DNA, 25 bp, Homo sapien
cagacagtgacagtcaaggctgtct

SEQ ID NO: 2587609 - DNA, 25 bp, Homo sapien
tgagctagggtagtgtttaacaccc

SEQ ID NO: 2587610 - DNA, 25 bp, Homo sapien
agcagagactagcttcatgagaaca

SEQ ID NO: 2587611 - DNA, 25 bp, Homo sapien
taaattcggcgaggccagggtcaga

SEQ ID NO: 2587612 - DNA, 25 bp, Homo sapien
taagcagtaaaaagccacggcaccg

SEQ ID NO: 2587613 - DNA, 25 bp, Homo sapien
ccgcggcagaaaaattcgcggtggt

SEQ ID NO: 2587614 - DNA, 25 bp, Homo sapien
ggctaaattcggcgaggccagggtc

SEQ ID NO: 2587615 - DNA, 25 bp, Homo sapien
aatcagaataatgtaagtagccaac

SEQ ID NO: 2587616 - DNA, 25 bp, Homo sapien
taacttatgtgacattgggaaagcc

SEQ ID NO: 2587617 - DNA, 25 bp, Homo sapien
aagtagatcttggaatccggtagac

SEQ ID NO: 2587618 - DNA, 25 bp, Homo sapien
caaaagaaaggttgttagcattctc

SEQ ID NO: 2587619 - DNA, 25 bp, Homo sapien
cgtggatgaagaaagctagccaaat

SEQ ID NO: 2587620 - DNA, 25 bp, Homo sapien
ctggcgtggatgaagaaagctagcc

SEQ ID NO: 2587621 - DNA, 25 bp, Homo sapien
tctggcgtggatgaagaaagctagc

SEQ ID NO: 2587622 - DNA, 25 bp, Homo sapien
ggcgtggatgaagaaagctagccaa

SEQ ID NO: 2587623 - DNA, 25 bp, Homo sapien
attaacagggatagaaaggaggtca

SEQ ID NO: 2587624 - DNA, 25 bp, Homo sapien
acagggatagaaaggaggtcattcg

SEQ ID NO: 2587625 - DNA, 25 bp, Homo sapien
ggtcattcgaagagatgatggcatg

SEQ ID NO: 2587626 - DNA, 25 bp, Homo sapien
tgatggcatgggacccaggacctga

SEQ ID NO: 2587627 - DNA, 25 bp, Homo sapien
tcaatgtaagtgaatgcaaatcacc

SEQ ID NO: 2587628 - DNA, 25 bp, Homo sapien
ctgaatcaatgtaagtgaatgcaaa

SEQ ID NO: 2587629 - DNA, 25 bp, Homo sapien
ttctgaatcaatgtaagtgaatgca

SEQ ID NO: 2587630 - DNA, 25 bp, Homo sapien
tgtaagtgaatgcaaatcaccacgt

SEQ ID NO: 2587631 - DNA, 25 bp, Homo sapien
tgccagcaaaatttaggccatgcat

SEQ ID NO: 2587632 - DNA, 25 bp, Homo sapien
tgtgccatgttcttaattggacacc

SEQ ID NO: 2587633 - DNA, 25 bp, Homo sapien
ggtgcctgcaagaggatcgtataca

SEQ ID NO: 2587634 - DNA, 25 bp, Homo sapien
cgatatcagccgatggtggaggcac

SEQ ID NO: 2587635 - DNA, 25 bp, Homo sapien
aggctctctcaggtttgcatgtggt

SEQ ID NO: 2587636 - DNA, 25 bp, Homo sapien
caggctctctcaggtttgcatgtgg

SEQ ID NO: 2587637 - DNA, 25 bp, Homo sapien
ggctctctcaggtttgcatgtggtg

SEQ ID NO: 2587638 - DNA, 25 bp, Homo sapien
gctctctcaggtttgcatgtggtga

SEQ ID NO: 2587639 - DNA, 25 bp, Homo sapien
gtagcaaagccatggaaaccttcca

SEQ ID NO: 2587640 - DNA, 25 bp, Homo sapien
gcaaagccatggaaaccttccaagt

SEQ ID NO: 2587641 - DNA, 25 bp, Homo sapien
agccatggaaaccttccaagtccat

SEQ ID NO: 2587642 - DNA, 25 bp, Homo sapien
cgtagcaaagccatggaaaccttcc

SEQ ID NO: 2587643 - DNA, 25 bp, Homo sapien
tgactgtgacgctcgggatgctgct

SEQ ID NO: 2587644 - DNA, 25 bp, Homo sapien
tacaccatgagggtgcttcctgcat

SEQ ID NO: 2587645 - DNA, 25 bp, Homo sapien
aaagctacaccatgagggtgcttcc

SEQ ID NO: 2587646 - DNA, 25 bp, Homo sapien
cacattccaattggacacaaagcta

SEQ ID NO: 2587647 - DNA, 25 bp, Homo sapien
ctggccacgtgagaccagaggaggc

SEQ ID NO: 2587648 - DNA, 25 bp, Homo sapien
tggccacgtgagaccagaggaggca

SEQ ID NO: 2587649 - DNA, 25 bp, Homo sapien
ggccacgtgagaccagaggaggcat

SEQ ID NO: 2587650 - DNA, 25 bp, Homo sapien
ttcagcacatggtttctttccacta

SEQ ID NO: 2587651 - DNA, 25 bp, Homo sapien
caaaccatcagtgtcgtcaaacatt

SEQ ID NO: 2587652 - DNA, 25 bp, Homo sapien
atttcagcacatggtttctttccac

SEQ ID NO: 2587653 - DNA, 25 bp, Homo sapien
gtgtcgtcaaacatttcagcacatg

SEQ ID NO: 2587654 - DNA, 25 bp, Homo sapien
tcaggcagacgccgagacgccgaca

SEQ ID NO: 2587655 - DNA, 25 bp, Homo sapien
ggcagacgccgagacgccgacactt

SEQ ID NO: 2587656 - DNA, 25 bp, Homo sapien
aggcagacgccgagacgccgacact

SEQ ID NO: 2587657 - DNA, 25 bp, Homo sapien
gcagacgccgagacgccgacactta

SEQ ID NO: 2587658 - DNA, 25 bp, Homo sapien
cctgtaagccagatgttgagtccga

SEQ ID NO: 2587659 - DNA, 25 bp, Homo sapien
taagccagatgttgagtccgagtca

SEQ ID NO: 2587660 - DNA, 25 bp, Homo sapien
cagatgttgagtccgagtcacaggg

SEQ ID NO: 2587661 - DNA, 25 bp, Homo sapien
ctaaccaagcctgtaagccagatgt

SEQ ID NO: 2587662 - DNA, 25 bp, Homo sapien
gcccagcccgctgagtcggtgagaa

SEQ ID NO: 2587663 - DNA, 25 bp, Homo sapien
cccagcccgctgagtcggtgagaag

SEQ ID NO: 2587664 - DNA, 25 bp, Homo sapien
agcccagcccgctgagtcggtgaga

SEQ ID NO: 2587665 - DNA, 25 bp, Homo sapien
cccaagtccaactgcactggaagct

SEQ ID NO: 2587666 - DNA, 25 bp, Homo sapien
caagtccaactgcactggaagctgg

SEQ ID NO: 2587667 - DNA, 25 bp, Homo sapien
ggaagctggctcttctttacattat

SEQ ID NO: 2587668 - DNA, 25 bp, Homo sapien
ctgcactggaagctggctcttcttt

SEQ ID NO: 2587669 - DNA, 25 bp, Homo sapien
ctaccactggtttggaggactgctt

SEQ ID NO: 2587670 - DNA, 25 bp, Homo sapien
gactaccactggtttggaggactgc

SEQ ID NO: 2587671 - DNA, 25 bp, Homo sapien
gagactaccactggtttggaggact

SEQ ID NO: 2587672 - DNA, 25 bp, Homo sapien
ccactggtttggaggactgctttgc

SEQ ID NO: 2587673 - DNA, 25 bp, Homo sapien
gctggagtccaagggattgtgcggg

SEQ ID NO: 2587674 - DNA, 25 bp, Homo sapien
ttggaaaggactggcactgctccaa

SEQ ID NO: 2587675 - DNA, 25 bp, Homo sapien
tctcccctgatgcacattctttgga

SEQ ID NO: 2587676 - DNA, 25 bp, Homo sapien
tcatttgactcatgcggcggcctct

SEQ ID NO: 2587677 - DNA, 25 bp, Homo sapien
ttggagacgctgctttctctcttgc

SEQ ID NO: 2587678 - DNA, 25 bp, Homo sapien
cagcattttcttggagacgctgctt

SEQ ID NO: 2587679 - DNA, 25 bp, Homo sapien
gctctgcctgctcgggaaactggtc

SEQ ID NO: 2587680 - DNA, 25 bp, Homo sapien
acagctctgcctgctcgggaaactg

SEQ ID NO: 2587681 - DNA, 25 bp, Homo sapien
ctgcctgctcgggaaactggtcatc

SEQ ID NO: 2587682 - DNA, 25 bp, Homo sapien
tgctcgggaaactggtcatcaccac

SEQ ID NO: 2587683 - DNA, 25 bp, Homo sapien
caacatgcagagaggtttacagaag

SEQ ID NO: 2587684 - DNA, 25 bp, Homo sapien
agacccctgcacacaaccaccacat

SEQ ID NO: 2587685 - DNA, 25 bp, Homo sapien
gaaggcagaaaaaacagacgaggat

SEQ ID NO: 2587686 - DNA, 25 bp, Homo sapien
ccacattcacagacaacatgcagag

SEQ ID NO: 2587687 - DNA, 25 bp, Homo sapien
cttcatggaggaaaaaggcatcatc

SEQ ID NO: 2587688 - DNA, 25 bp, Homo sapien
ggaggaaaaaggcatcatcagatat

SEQ ID NO: 2587689 - DNA, 25 bp, Homo sapien
atggaggaaaaaggcatcatcagat

SEQ ID NO: 2587690 - DNA, 25 bp, Homo sapien
tcatggaggaaaaaggcatcatcag

SEQ ID NO: 2587691 - DNA, 25 bp, Homo sapien
tcttcagacttgtcctcaaccgaag

SEQ ID NO: 2587692 - DNA, 25 bp, Homo sapien
tagggaaggtggtgtgattgggagc

SEQ ID NO: 2587693 - DNA, 25 bp, Homo sapien
gagatcagttcgtccatcccctctg

SEQ ID NO: 2587694 - DNA, 25 bp, Homo sapien
tgcggctgtggatcttagggaaggt

SEQ ID NO: 2587695 - DNA, 25 bp, Homo sapien
tcgacgtttagtcttggccttgact

SEQ ID NO: 2587696 - DNA, 25 bp, Homo sapien
taggtcggtaacacaagcatccact

SEQ ID NO: 2587697 - DNA, 25 bp, Homo sapien
cttctttactaagcatctggctgca

SEQ ID NO: 2587698 - DNA, 25 bp, Homo sapien
gccttgactggatctttctggtaca

SEQ ID NO: 2587699 - DNA, 25 bp, Homo sapien
tgcctcaaagcaaaaacgtgtcgga

SEQ ID NO: 2587700 - DNA, 25 bp, Homo sapien
cacaggtttgcaggacatgacgcac

SEQ ID NO: 2587701 - DNA, 25 bp, Homo sapien
ccaaaggtcgggaataggcagcaca

SEQ ID NO: 2587702 - DNA, 25 bp, Homo sapien
catgcaaatggacaactgagctagc

SEQ ID NO: 2587703 - DNA, 25 bp, Homo sapien
tcacaagcgcagtttacaacagagt

SEQ ID NO: 2587704 - DNA, 25 bp, Homo sapien
gcagattaacaggatggacgccaga

SEQ ID NO: 2587705 - DNA, 25 bp, Homo sapien
taacaggccccagataatactggtc

SEQ ID NO: 2587706 - DNA, 25 bp, Homo sapien
tatgcgaatccaacgctgctgctgt

SEQ ID NO: 2587707 - DNA, 25 bp, Homo sapien
tttcttagcaacacacccatctatg

SEQ ID NO: 2587708 - DNA, 25 bp, Homo sapien
gaaacttaccacctattagctcctg

SEQ ID NO: 2587709 - DNA, 25 bp, Homo sapien
ggcagacgcccctgaaaatacaagg

SEQ ID NO: 2587710 - DNA, 25 bp, Homo sapien
cacagctggtattgtcttaacagga

SEQ ID NO: 2587711 - DNA, 25 bp, Homo sapien
cacaaagggaatgttctgctcacag

SEQ ID NO: 2587712 - DNA, 25 bp, Homo sapien
gccttattcaaactgcgccccagag

SEQ ID NO: 2587713 - DNA, 25 bp, Homo sapien
tgtgtgcaaagtgtcatccagccca

SEQ ID NO: 2587714 - DNA, 25 bp, Homo sapien
tgcggttgagagcaaacacaaaggg

SEQ ID NO: 2587715 - DNA, 25 bp, Homo sapien
ttctgcctaagtggtggctcctcct

SEQ ID NO: 2587716 - DNA, 25 bp, Homo sapien
tcagttcagaaccagacaacccatg

SEQ ID NO: 2587717 - DNA, 25 bp, Homo sapien
aatgacagcctactggaggttctgg

SEQ ID NO: 2587718 - DNA, 25 bp, Homo sapien
gacaacccatgatgtcaaggagaca

SEQ ID NO: 2587719 - DNA, 25 bp, Homo sapien
cacaggtaacatcccagctacagag

SEQ ID NO: 2587720 - DNA, 25 bp, Homo sapien
gtgagagcacacaggtaacatccca

SEQ ID NO: 2587721 - DNA, 25 bp, Homo sapien
gacacgggtccctcaaactcagcaa

SEQ ID NO: 2587722 - DNA, 25 bp, Homo sapien
ccagctacagaggacacgggtccct

SEQ ID NO: 2587723 - DNA, 25 bp, Homo sapien
catggtcttgtacgcctgtcgggcc

SEQ ID NO: 2587724 - DNA, 25 bp, Homo sapien
cagctcaaccatcttgtggaactga

SEQ ID NO: 2587725 - DNA, 25 bp, Homo sapien
tccagcatggtcttgtacgcctgtc

SEQ ID NO: 2587726 - DNA, 25 bp, Homo sapien
tgtcgggccgccactgtcagctcaa

SEQ ID NO: 2587727 - DNA, 25 bp, Homo sapien
ctgtgtgggtaggctgggaggtgcc

SEQ ID NO: 2587728 - DNA, 25 bp, Homo sapien
cctgtgtgggtaggctgggaggtgc

SEQ ID NO: 2587729 - DNA, 25 bp, Homo sapien
tgtgtgggtaggctgggaggtgcct

SEQ ID NO: 2587730 - DNA, 25 bp, Homo sapien
tgggtacagctatccttaaggccac

SEQ ID NO: 2587731 - DNA, 25 bp, Homo sapien
ccgggctgccccttattgaggagaa

SEQ ID NO: 2587732 - DNA, 25 bp, Homo sapien
cattgtcaagctgctcacctaggga

SEQ ID NO: 2587733 - DNA, 25 bp, Homo sapien
gagaggactgaacctttacttggcc

SEQ ID NO: 2587734 - DNA, 25 bp, Homo sapien
cagcacgagtgaggaataggcatca

SEQ ID NO: 2587735 - DNA, 25 bp, Homo sapien
tgagaaaacagcacgagtgaggaat

SEQ ID NO: 2587736 - DNA, 25 bp, Homo sapien
gagtgaggaataggcatcaacaagt

SEQ ID NO: 2587737 - DNA, 25 bp, Homo sapien
aaaacagcacgagtgaggaataggc

SEQ ID NO: 2587738 - DNA, 25 bp, Homo sapien
cagatccgtagtgtgctcagaaagc

SEQ ID NO: 2587739 - DNA, 25 bp, Homo sapien
tctagctccagggtacatccactgt

SEQ ID NO: 2587740 - DNA, 25 bp, Homo sapien
gtgacctttaacaggctccgcagca

SEQ ID NO: 2587741 - DNA, 25 bp, Homo sapien
gaggaagtttccttagcagccaaag

SEQ ID NO: 2587742 - DNA, 25 bp, Homo sapien
tggccagcacagatcgctgctttta

SEQ ID NO: 2587743 - DNA, 25 bp, Homo sapien
ccaacagggttagcatggccagcac

SEQ ID NO: 2587744 - DNA, 25 bp, Homo sapien
cagtgactccccttgacagagtgcc

SEQ ID NO: 2587745 - DNA, 25 bp, Homo sapien
aggttcctcctctacggtcaggcag

SEQ ID NO: 2587746 - DNA, 25 bp, Homo sapien
ggctaacaggctttgatagctgctc

SEQ ID NO: 2587747 - DNA, 25 bp, Homo sapien
gacagtaagttctgtctggcacaag

SEQ ID NO: 2587748 - DNA, 25 bp, Homo sapien
gcacaagcaggtaaccaggatggct

SEQ ID NO: 2587749 - DNA, 25 bp, Homo sapien
acaggctttgatagctgctcgtgaa

SEQ ID NO: 2587750 - DNA, 25 bp, Homo sapien
tgccttcctgtcacatatgggagaa

SEQ ID NO: 2587751 - DNA, 25 bp, Homo sapien
tgcctctcagcacaatctgggagtg

SEQ ID NO: 2587752 - DNA, 25 bp, Homo sapien
ggagacaaagttgtccagccccggc

SEQ ID NO: 2587753 - DNA, 25 bp, Homo sapien
tcactgtgtgctaccacctgcggtg

SEQ ID NO: 2587754 - DNA, 25 bp, Homo sapien
catccagtggatctttcaagggccc

SEQ ID NO: 2587755 - DNA, 25 bp, Homo sapien
tcaagggtgccataaaggcccacag

SEQ ID NO: 2587756 - DNA, 25 bp, Homo sapien
tttccattgagaaaggtggccagtg

SEQ ID NO: 2587757 - DNA, 25 bp, Homo sapien
gaaatcccacgtcttgttgctgaga

SEQ ID NO: 2587758 - DNA, 25 bp, Homo sapien
tccatgtggtcacaggacatgtgtg

SEQ ID NO: 2587759 - DNA, 25 bp, Homo sapien
caccccagtgtctcaattggagaga

SEQ ID NO: 2587760 - DNA, 25 bp, Homo sapien
aaaatggcaattaaggtcaaagagc

SEQ ID NO: 2587761 - DNA, 25 bp, Homo sapien
attggagagacaggccctcatggtc

SEQ ID NO: 2587762 - DNA, 25 bp, Homo sapien
gggcacctagatgtacatagagaca

SEQ ID NO: 2587763 - DNA, 25 bp, Homo sapien
gcaaaacagttttggagcaccttct

SEQ ID NO: 2587764 - DNA, 25 bp, Homo sapien
aaaatgagattttacctggatgccc

SEQ ID NO: 2587765 - DNA, 25 bp, Homo sapien
gaggtagttaccaccagcatcccag

SEQ ID NO: 2587766 - DNA, 25 bp, Homo sapien
gcttaggccacccagattcttagtc

SEQ ID NO: 2587767 - DNA, 25 bp, Homo sapien
ggcttggtcatgagaaccttccaga

SEQ ID NO: 2587768 - DNA, 25 bp, Homo sapien
tgtttctgctcacaccccaagagtg

SEQ ID NO: 2587769 - DNA, 25 bp, Homo sapien
ggagaccgggcttttatagaactca

SEQ ID NO: 2587770 - DNA, 25 bp, Homo sapien
ccccagaagggtccccagagtctgg

SEQ ID NO: 2587771 - DNA, 25 bp, Homo sapien
cagctgcactgtccttgtccccaga

SEQ ID NO: 2587772 - DNA, 25 bp, Homo sapien
tccccagaagggtccccagagtctg

SEQ ID NO: 2587773 - DNA, 25 bp, Homo sapien
cactgtccttgtccccagaagggtc

SEQ ID NO: 2587774 - DNA, 25 bp, Homo sapien
tcagagcccttggaaccactgggat

SEQ ID NO: 2587775 - DNA, 25 bp, Homo sapien
agactcttgaaaggccacggccgtc

SEQ ID NO: 2587776 - DNA, 25 bp, Homo sapien
gaaggcgcccttggtcctctttgag

SEQ ID NO: 2587777 - DNA, 25 bp, Homo sapien
cacggccgtcgtgggaattagttga

SEQ ID NO: 2587778 - DNA, 25 bp, Homo sapien
gctgcttcccacgaggctggtggac

SEQ ID NO: 2587779 - DNA, 25 bp, Homo sapien
ggctggtggactccagcataggcat

SEQ ID NO: 2587780 - DNA, 25 bp, Homo sapien
gagggcacgctgcttcccacgaggc

SEQ ID NO: 2587781 - DNA, 25 bp, Homo sapien
ccacagcttcacagcaggagggcac

SEQ ID NO: 2587782 - DNA, 25 bp, Homo sapien
aaaggacagtgcaggaattaacaac

SEQ ID NO: 2587783 - DNA, 25 bp, Homo sapien
aaaaggacagtgcaggaattaacaa

SEQ ID NO: 2587784 - DNA, 25 bp, Homo sapien
aaggacagtgcaggaattaacaact

SEQ ID NO: 2587785 - DNA, 25 bp, Homo sapien
aggacagtgcaggaattaacaactt

SEQ ID NO: 2587786 - DNA, 25 bp, Homo sapien
gcatgccgtgaactcagaggggctg

SEQ ID NO: 2587787 - DNA, 25 bp, Homo sapien
tcatgggcatgccgtgaactcagag

SEQ ID NO: 2587788 - DNA, 25 bp, Homo sapien
atgggcatgccgtgaactcagaggg

SEQ ID NO: 2587789 - DNA, 25 bp, Homo sapien
gggcatgccgtgaactcagaggggc

SEQ ID NO: 2587790 - DNA, 25 bp, Homo sapien
taaactctggatgtttgtgcgcgtg

SEQ ID NO: 2587791 - DNA, 25 bp, Homo sapien
tgagctgcccactactggaagggaa

SEQ ID NO: 2587792 - DNA, 25 bp, Homo sapien
gagtgcggtacaatctggagcccac

SEQ ID NO: 2587793 - DNA, 25 bp, Homo sapien
gctgtcggtcagaacctcctgtgag

SEQ ID NO: 2587794 - DNA, 25 bp, Homo sapien
gcttttagaaatgtagacataaaca

SEQ ID NO: 2587795 - DNA, 25 bp, Homo sapien
ttaagattctcagggataaacttcc

SEQ ID NO: 2587796 - DNA, 25 bp, Homo sapien
gacataaacactccccggagcccac

SEQ ID NO: 2587797 - DNA, 25 bp, Homo sapien
cataaaatacggcttacgttgctta

SEQ ID NO: 2587798 - DNA, 25 bp, Homo sapien
taagggatacctgcccagacagtgc

SEQ ID NO: 2587799 - DNA, 25 bp, Homo sapien
tagggaggactcacagaggatcgac

SEQ ID NO: 2587800 - DNA, 25 bp, Homo sapien
gacagtgcttgaaattccgctcggc

SEQ ID NO: 2587801 - DNA, 25 bp, Homo sapien
taggttagcccgcatcgtgcagaca

SEQ ID NO: 2587802 - DNA, 25 bp, Homo sapien
gaagcgtctcgtgtctgattcaaag

SEQ ID NO: 2587803 - DNA, 25 bp, Homo sapien
cagtcttccttgcagccattagcag

SEQ ID NO: 2587804 - DNA, 25 bp, Homo sapien
gcctgacgcgttttcttctgggaca

SEQ ID NO: 2587805 - DNA, 25 bp, Homo sapien
gagctgacactaggcacagaactgg

SEQ ID NO: 2587806 - DNA, 25 bp, Homo sapien
ctgttttgttgaccatcggctgttg

SEQ ID NO: 2587807 - DNA, 25 bp, Homo sapien
gttgaccatcggctgttgtgtggac

SEQ ID NO: 2587808 - DNA, 25 bp, Homo sapien
tgttgtgtggacagaacagattgag

SEQ ID NO: 2587809 - DNA, 25 bp, Homo sapien
tgtggacagaacagattgagtgtca

SEQ ID NO: 2587810 - DNA, 25 bp, Homo sapien
gttcttttcccgtacatgttgcagg

SEQ ID NO: 2587811 - DNA, 25 bp, Homo sapien
attgtagtagcccaactgtgcagcc

SEQ ID NO: 2587812 - DNA, 25 bp, Homo sapien
cagttgcctgatacagtgcaccgag

SEQ ID NO: 2587813 - DNA, 25 bp, Homo sapien
gcaccgagtccatgtttgggttcag

SEQ ID NO: 2587814 - DNA, 25 bp, Homo sapien
cctccatgagcgcagaacatcgtgt

SEQ ID NO: 2587815 - DNA, 25 bp, Homo sapien
atgcctccatgagcgcagaacatcg

SEQ ID NO: 2587816 - DNA, 25 bp, Homo sapien
tccatgagcgcagaacatcgtgtca

SEQ ID NO: 2587817 - DNA, 25 bp, Homo sapien
ccatgagcgcagaacatcgtgtcac

SEQ ID NO: 2587818 - DNA, 25 bp, Homo sapien
ggcagcacaccgtccttctacatca

SEQ ID NO: 2587819 - DNA, 25 bp, Homo sapien
tgaaatggctcttacaagctttaat

SEQ ID NO: 2587820 - DNA, 25 bp, Homo sapien
tacatcaactaagttaggattccct

SEQ ID NO: 2587821 - DNA, 25 bp, Homo sapien
gtccttctacatcaactaagttagg

SEQ ID NO: 2587822 - DNA, 25 bp, Homo sapien
tgaacccaccggcagcagcaaagtg

SEQ ID NO: 2587823 - DNA, 25 bp, Homo sapien
tgttgccatttgttgtgcttacaca

SEQ ID NO: 2587824 - DNA, 25 bp, Homo sapien
tctacagcactcattgaacccaccg

SEQ ID NO: 2587825 - DNA, 25 bp, Homo sapien
tgccgagtatgctgacagcacctgt

SEQ ID NO: 2587826 - DNA, 25 bp, Homo sapien
tacagtagtcgcactaaatgacgta

SEQ ID NO: 2587827 - DNA, 25 bp, Homo sapien
cagttaaaaggtcataagctctccg

SEQ ID NO: 2587828 - DNA, 25 bp, Homo sapien
taagctctccgtaaagtcatgcgta

SEQ ID NO: 2587829 - DNA, 25 bp, Homo sapien
tgctcttaaggcaaaccgcagttaa

SEQ ID NO: 2587830 - DNA, 25 bp, Homo sapien
agctgcaacccatcactgggaaaaa

SEQ ID NO: 2587831 - DNA, 25 bp, Homo sapien
tacgcagtggatgcccttccagctg

SEQ ID NO: 2587832 - DNA, 25 bp, Homo sapien
ttaatctgaggtcgccacagtggat

SEQ ID NO: 2587833 - DNA, 25 bp, Homo sapien
gaaccacaaatttatccagcatatg

SEQ ID NO: 2587834 - DNA, 25 bp, Homo sapien
catagttctcggtgaataatgtatg

SEQ ID NO: 2587835 - DNA, 25 bp, Homo sapien
atagttctcggtgaataatgtatgt

SEQ ID NO: 2587836 - DNA, 25 bp, Homo sapien
tcatagttctcggtgaataatgtat

SEQ ID NO: 2587837 - DNA, 25 bp, Homo sapien
gcagctgagtcgaacccaaagtgct

SEQ ID NO: 2587838 - DNA, 25 bp, Homo sapien
gctgggccacatccttactaacaaa

SEQ ID NO: 2587839 - DNA, 25 bp, Homo sapien
tcagtcgaccactgaaacccttcag

SEQ ID NO: 2587840 - DNA, 25 bp, Homo sapien
ttcttcagtcgaccactgaaaccct

SEQ ID NO: 2587841 - DNA, 25 bp, Homo sapien
caggtggaaatgcatctgaatggat

SEQ ID NO: 2587842 - DNA, 25 bp, Homo sapien
gaatggatgatcacaccgtccggac

SEQ ID NO: 2587843 - DNA, 25 bp, Homo sapien
agtgaatagagcacagaagcgttga

SEQ ID NO: 2587844 - DNA, 25 bp, Homo sapien
aggtgtcgcctgctccaagtgtgtc

SEQ ID NO: 2587845 - DNA, 25 bp, Homo sapien
taataacccattctgtctctgtatt

SEQ ID NO: 2587846 - DNA, 25 bp, Homo sapien
gtatttcagaatcagacctgcatcc

SEQ ID NO: 2587847 - DNA, 25 bp, Homo sapien
ttaataacccattctgtctctgtat

SEQ ID NO: 2587848 - DNA, 25 bp, Homo sapien
tgtctctgtatttcagaatcagacc

SEQ ID NO: 2587849 - DNA, 25 bp, Homo sapien
gccttcgtgggtggtgcccagatct

SEQ ID NO: 2587850 - DNA, 25 bp, Homo sapien
agggctccacgtccatcccacaggg

SEQ ID NO: 2587851 - DNA, 25 bp, Homo sapien
cacagggacccggactctcatcttc

SEQ ID NO: 2587852 - DNA, 25 bp, Homo sapien
tgccttcgtgggtggtgcccagatc

SEQ ID NO: 2587853 - DNA, 25 bp, Homo sapien
agggctccacgtccatcccacaggg

SEQ ID NO: 2587854 - DNA, 25 bp, Homo sapien
cacagggacccggactctcatcttc

SEQ ID NO: 2587855 - DNA, 25 bp, Homo sapien
gccttcgtgggtggtgcccagatct

SEQ ID NO: 2587856 - DNA, 25 bp, Homo sapien
tgccttcgtgggtggtgcccagatc

SEQ ID NO: 2587857 - DNA, 25 bp, Homo sapien
cacagccgcctaccgtgtgagtgga

SEQ ID NO: 2587858 - DNA, 25 bp, Homo sapien
cagccgcctaccgtgtgagtggaaa

SEQ ID NO: 2587859 - DNA, 25 bp, Homo sapien
attgcacagccgcctaccgtgtgag

SEQ ID NO: 2587860 - DNA, 25 bp, Homo sapien
ttgcacagccgcctaccgtgtgagt

SEQ ID NO: 2587861 - DNA, 25 bp, Homo sapien
gccggatgtcccaccacactcctgc

SEQ ID NO: 2587862 - DNA, 25 bp, Homo sapien
cccagccggatgtcccaccacactc

SEQ ID NO: 2587863 - DNA, 25 bp, Homo sapien
cccaccacactcctgcctggggact

SEQ ID NO: 2587864 - DNA, 25 bp, Homo sapien
atgtcccaccacactcctgcctggg

SEQ ID NO: 2587865 - DNA, 25 bp, Homo sapien
gacacagtgggagggtgcctgtcct

SEQ ID NO: 2587866 - DNA, 25 bp, Homo sapien
acagtgggagggtgcctgtccttac

SEQ ID NO: 2587867 - DNA, 25 bp, Homo sapien
cacagtgggagggtgcctgtcctta

SEQ ID NO: 2587868 - DNA, 25 bp, Homo sapien
ctgacacagtgggagggtgcctgtc

SEQ ID NO: 2587869 - DNA, 25 bp, Homo sapien
aggcgcccttgcacaggtctcttgc

SEQ ID NO: 2587870 - DNA, 25 bp, Homo sapien
ggcgcccttgcacaggtctcttgca

SEQ ID NO: 2587871 - DNA, 25 bp, Homo sapien
caaggcgcccttgcacaggtctctt

SEQ ID NO: 2587872 - DNA, 25 bp, Homo sapien
aaggcgcccttgcacaggtctcttg

SEQ ID NO: 2587873 - DNA, 25 bp, Homo sapien
tgaggtgagaggccaagccctccgt

SEQ ID NO: 2587874 - DNA, 25 bp, Homo sapien
gtgagaggccaagccctccgtgacc

SEQ ID NO: 2587875 - DNA, 25 bp, Homo sapien
tccccaagtgttatccacaaacaca

SEQ ID NO: 2587876 - DNA, 25 bp, Homo sapien
gctccccaagtgttatccacaaaca

SEQ ID NO: 2587877 - DNA, 25 bp, Homo sapien
cttctgatgtcctgatgtagaagcg

SEQ ID NO: 2587878 - DNA, 25 bp, Homo sapien
atctctgcgacccatctctgtgacc

SEQ ID NO: 2587879 - DNA, 25 bp, Homo sapien
ggccatctctgcgacccatctctgt

SEQ ID NO: 2587880 - DNA, 25 bp, Homo sapien
cagcttctgatgtcctgatgtagaa

SEQ ID NO: 2587881 - DNA, 25 bp, Homo sapien
gagccccttagtccagggactgctt

SEQ ID NO: 2587882 - DNA, 25 bp, Homo sapien
ccccttagtccagggactgcttctg

SEQ ID NO: 2587883 - DNA, 25 bp, Homo sapien
ttgagccccttagtccagggactgc

SEQ ID NO: 2587884 - DNA, 25 bp, Homo sapien
tattgagccccttagtccagggact

SEQ ID NO: 2587885 - DNA, 25 bp, Homo sapien
agcctggtcaagagagcgagactcc

SEQ ID NO: 2587886 - DNA, 25 bp, Homo sapien
gcctggtcaagagagcgagactcca

SEQ ID NO: 2587887 - DNA, 25 bp, Homo sapien
tttgacaaatatttggccaggcatg

SEQ ID NO: 2587888 - DNA, 25 bp, Homo sapien
tatggaaatacaaattcaatttgac

SEQ ID NO: 2587889 - DNA, 25 bp, Homo sapien
ttgtatggaaatacaaattcaattt

SEQ ID NO: 2587890 - DNA, 25 bp, Homo sapien
tcaatttgacaaatatttggccagg

SEQ ID NO: 2587891 - DNA, 25 bp, Homo sapien
ttcttcttcttatattgagacgggg

SEQ ID NO: 2587892 - DNA, 25 bp, Homo sapien
ggtttctctatgttttccatgctgg

SEQ ID NO: 2587893 - DNA, 25 bp, Homo sapien
tcttcttcttcttatattgagacgg

SEQ ID NO: 2587894 - DNA, 25 bp, Homo sapien
acaggcatgaagcactttatccaga

SEQ ID NO: 2587895 - DNA, 25 bp, Homo sapien
ccctctgtgaaggcggccacttgag

SEQ ID NO: 2587896 - DNA, 25 bp, Homo sapien
aggcctcccggctcactggtcgcag

SEQ ID NO: 2587897 - DNA, 25 bp, Homo sapien
tcccggctcactggtcgcagtcttc

SEQ ID NO: 2587898 - DNA, 25 bp, Homo sapien
gcagtgcacaggatgattcagagag

SEQ ID NO: 2587899 - DNA, 25 bp, Homo sapien
cctgggtgcttccctggtcagggct

SEQ ID NO: 2587900 - DNA, 25 bp, Homo sapien
ccctgggtgcttccctggtcagggc

SEQ ID NO: 2587901 - DNA, 25 bp, Homo sapien
ctgctcaggaaatccctggcagcag

SEQ ID NO: 2587902 - DNA, 25 bp, Homo sapien
gcccagcccgcagagttcctgcaag

SEQ ID NO: 2587903 - DNA, 25 bp, Homo sapien
ttgagactcgcctggacacccacat

SEQ ID NO: 2587904 - DNA, 25 bp, Homo sapien
ggattccgggtcagccattgggatt

SEQ ID NO: 2587905 - DNA, 25 bp, Homo sapien
caagaacttcagctccgaagggata

SEQ ID NO: 2587906 - DNA, 25 bp, Homo sapien
tcagacaaatactgccacaaaccag

SEQ ID NO: 2587907 - DNA, 25 bp, Homo sapien
tacaggtaatacgagagcacagaca

SEQ ID NO: 2587908 - DNA, 25 bp, Homo sapien
cagacaccacggaaatcacataaaa

SEQ ID NO: 2587909 - DNA, 25 bp, Homo sapien
gccggctcagctgccaacaggagcc

SEQ ID NO: 2587910 - DNA, 25 bp, Homo sapien
ctgaggtatccaacagggcagcaca

SEQ ID NO: 2587911 - DNA, 25 bp, Homo sapien
acatggtcctcccaggagccgtggc

SEQ ID NO: 2587912 - DNA, 25 bp, Homo sapien
caggacctcaaggtgggccggctca

SEQ ID NO: 2587913 - DNA, 25 bp, Homo sapien
gctgatggtgtggaccttgactcca

SEQ ID NO: 2587914 - DNA, 25 bp, Homo sapien
cattgtcccacagctgatttgtcag

SEQ ID NO: 2587915 - DNA, 25 bp, Homo sapien
gcaatcacagcgaggacaaacacta

SEQ ID NO: 2587916 - DNA, 25 bp, Homo sapien
agcctggagtggctcgtcctggaca

SEQ ID NO: 2587917 - DNA, 25 bp, Homo sapien
ggaaccaagacatggtcactgacgt

SEQ ID NO: 2587918 - DNA, 25 bp, Homo sapien
tttttgctgatagacaacccaaggc

SEQ ID NO: 2587919 - DNA, 25 bp, Homo sapien
cactgacgttagaggaatggctcgc

SEQ ID NO: 2587920 - DNA, 25 bp, Homo sapien
ggagcagaggatctccacgaagacc

SEQ ID NO: 2587921 - DNA, 25 bp, Homo sapien
tcagtgccttctctacgtgctcttg

SEQ ID NO: 2587922 - DNA, 25 bp, Homo sapien
ctcagccattgagacagcagatcct

SEQ ID NO: 2587923 - DNA, 25 bp, Homo sapien
aaggttaccagtgccacagaacaaa

SEQ ID NO: 2587924 - DNA, 25 bp, Homo sapien
ccaaggttaccagtgccacagaaca

SEQ ID NO: 2587925 - DNA, 25 bp, Homo sapien
caagagcttgtggacattcagaatc

SEQ ID NO: 2587926 - DNA, 25 bp, Homo sapien
cttgtggacattcagaatcaggctt

SEQ ID NO: 2587927 - DNA, 25 bp, Homo sapien
cagccaagagcttgtggacattcag

SEQ ID NO: 2587928 - DNA, 25 bp, Homo sapien
gagcttgtggacattcagaatcagg

SEQ ID NO: 2587929 - DNA, 25 bp, Homo sapien
caacaccaagtgagtcacagggaac

SEQ ID NO: 2587930 - DNA, 25 bp, Homo sapien
tctgctcagctctgcatccatgcac

SEQ ID NO: 2587931 - DNA, 25 bp, Homo sapien
cccccaaccagactggggacacagg

SEQ ID NO: 2587932 - DNA, 25 bp, Homo sapien
gggacacagggactgtctgctcagc

SEQ ID NO: 2587933 - DNA, 25 bp, Homo sapien
cacccccaaccagactggggacaca

SEQ ID NO: 2587934 - DNA, 25 bp, Homo sapien
tatctgcaaagggtcctgtttgctg

SEQ ID NO: 2587935 - DNA, 25 bp, Homo sapien
tcagtgggctcaggactcagaatgg

SEQ ID NO: 2587936 - DNA, 25 bp, Homo sapien
caggagaccccagtaactcttcaac

SEQ ID NO: 2587937 - DNA, 25 bp, Homo sapien
aaagggtcctgtttgctgcccctgc

SEQ ID NO: 2587938 - DNA, 25 bp, Homo sapien
taacgggcagcctggcattacagcc

SEQ ID NO: 2587939 - DNA, 25 bp, Homo sapien
ctgcgcctttgggcaggtggcccct

SEQ ID NO: 2587940 - DNA, 25 bp, Homo sapien
tggcattacagcctctgtgggtccc

SEQ ID NO: 2587941 - DNA, 25 bp, Homo sapien
tccgaccagcctccattgggaataa

SEQ ID NO: 2587942 - DNA, 25 bp, Homo sapien
ccgccgtgtgtcacaggtcttgcca

SEQ ID NO: 2587943 - DNA, 25 bp, Homo sapien
tgtcacaggtcttgccattgccacg

SEQ ID NO: 2587944 - DNA, 25 bp, Homo sapien
cgtgtgtcacaggtcttgccattgc

SEQ ID NO: 2587945 - DNA, 25 bp, Homo sapien
aggtcttgccattgccacggcagtg

SEQ ID NO: 2587946 - DNA, 25 bp, Homo sapien
agacttcttcgatcaagtaatacag

SEQ ID NO: 2587947 - DNA, 25 bp, Homo sapien
agagccccccacgtttgggccactg

SEQ ID NO: 2587948 - DNA, 25 bp, Homo sapien
tcaccacggcggagctgcaatgcca

SEQ ID NO: 2587949 - DNA, 25 bp, Homo sapien
cccctgggcctcctgaggaagaaag

SEQ ID NO: 2587950 - DNA, 25 bp, Homo sapien
tccctgcatgacagcccctttggct

SEQ ID NO: 2587951 - DNA, 25 bp, Homo sapien
gcatgacagcccctttggctgtgac

SEQ ID NO: 2587952 - DNA, 25 bp, Homo sapien
ccaggtcccagagtgcctgtgcggc

SEQ ID NO: 2587953 - DNA, 25 bp, Homo sapien
cgcagccttgccaccttacaagtta

SEQ ID NO: 2587954 - DNA, 25 bp, Homo sapien
tcagagaatcctcgcagacgggggt

SEQ ID NO: 2587955 - DNA, 25 bp, Homo sapien
tgggtgcaaagcagccgacacctca

SEQ ID NO: 2587956 - DNA, 25 bp, Homo sapien
ttacaagttacccacacgcaggaga

SEQ ID NO: 2587957 - DNA, 25 bp, Homo sapien
ggcaacccaagcttctgggagaagc

SEQ ID NO: 2587958 - DNA, 25 bp, Homo sapien
ccagagaaagtcgttggaaacttgg

SEQ ID NO: 2587959 - DNA, 25 bp, Homo sapien
gtttgagggagtcctggcaacccaa

SEQ ID NO: 2587960 - DNA, 25 bp, Homo sapien
cagagaaagtcgttggaaacttgga

SEQ ID NO: 2587961 - DNA, 25 bp, Homo sapien
ccaggttccccacggccacatgatg

SEQ ID NO: 2587962 - DNA, 25 bp, Homo sapien
cgcgctgtggctgttcccatttgca

SEQ ID NO: 2587963 - DNA, 25 bp, Homo sapien
cccgtgctccgactccctgagttct

SEQ ID NO: 2587964 - DNA, 25 bp, Homo sapien
acggccacatgatgccccgcgctgt

SEQ ID NO: 2587965 - DNA, 25 bp, Homo sapien
cagtggtttcagacgaccacagcag

SEQ ID NO: 2587966 - DNA, 25 bp, Homo sapien
acagtggtttcagacgaccacagca

SEQ ID NO: 2587967 - DNA, 25 bp, Homo sapien
gtggtttcagacgaccacagcagcg

SEQ ID NO: 2587968 - DNA, 25 bp, Homo sapien
ggtttcagacgaccacagcagcgct

SEQ ID NO: 2587969 - DNA, 25 bp, Homo sapien
cctcccagcgagagaaagagtcctg

SEQ ID NO: 2587970 - DNA, 25 bp, Homo sapien
ccgcctcccagcgagagaaagagtc

SEQ ID NO: 2587971 - DNA, 25 bp, Homo sapien
cagcgagagaaagagtcctggttcc

SEQ ID NO: 2587972 - DNA, 25 bp, Homo sapien
ttgctgccgcttccggtccaagcac

SEQ ID NO: 2587973 - DNA, 25 bp, Homo sapien
cttggctcctctttcggaaggcata

SEQ ID NO: 2587974 - DNA, 25 bp, Homo sapien
acatactcctgtaagggcaggcccc

SEQ ID NO: 2587975 - DNA, 25 bp, Homo sapien
gtgcccacatactcctgtaagggca

SEQ ID NO: 2587976 - DNA, 25 bp, Homo sapien
aggcataaagaacctcatccatcag

SEQ ID NO: 2587977 - DNA, 25 bp, Homo sapien
gagactcccttgttcaccttaaata

SEQ ID NO: 2587978 - DNA, 25 bp, Homo sapien
caggttgctcattaaccacgggcag

SEQ ID NO: 2587979 - DNA, 25 bp, Homo sapien
tgacggtggccataacaaaagcaat

SEQ ID NO: 2587980 - DNA, 25 bp, Homo sapien
cagccaaaggtctggatcatatcag

SEQ ID NO: 2587981 - DNA, 25 bp, Homo sapien
tacctatagcaggtttagcaggctg

SEQ ID NO: 2587982 - DNA, 25 bp, Homo sapien
tagcaggctgggtaattgccccttt

SEQ ID NO: 2587983 - DNA, 25 bp, Homo sapien
gatgtatcaaatgcccacggcccta

SEQ ID NO: 2587984 - DNA, 25 bp, Homo sapien
agaagcaaatccttgggtgtatcac

SEQ ID NO: 2587985 - DNA, 25 bp, Homo sapien
acttggtgggtgaattcttgtggca

SEQ ID NO: 2587986 - DNA, 25 bp, Homo sapien
tgaacacgatcagaaccaaagagaa

SEQ ID NO: 2587987 - DNA, 25 bp, Homo sapien
gcatgtggagagtgctgatgaacac

SEQ ID NO: 2587988 - DNA, 25 bp, Homo sapien
caggaacgggaaaagtcatggttgt

SEQ ID NO: 2587989 - DNA, 25 bp, Homo sapien
gtaaaatcctagaggataacatcag

SEQ ID NO: 2587990 - DNA, 25 bp, Homo sapien
ccctggatacggtgatgactttgca

SEQ ID NO: 2587991 - DNA, 25 bp, Homo sapien
gaaaacctggatgaccctggatacg

SEQ ID NO: 2587992 - DNA, 25 bp, Homo sapien
gagtctagacaaagaccttataagc

SEQ ID NO: 2587993 - DNA, 25 bp, Homo sapien
taagaactttcaatctgtatgagat

SEQ ID NO: 2587994 - DNA, 25 bp, Homo sapien
gagtagacaatatttcagagatcct

SEQ ID NO: 2587995 - DNA, 25 bp, Homo sapien
tataggtgcacaactcaaaaatatc

SEQ ID NO: 2587996 - DNA, 25 bp, Homo sapien
gcctttaggacattataatgaggta

SEQ ID NO: 2587997 - DNA, 25 bp, Homo sapien
tgtgatctgctatcaaacaaggtag

SEQ ID NO: 2587998 - DNA, 25 bp, Homo sapien
cacacggaaaggcaaggaaggttag

SEQ ID NO: 2587999 - DNA, 25 bp, Homo sapien
tgtaaagcaggaccgctctggaacc

SEQ ID NO: 2588000 - DNA, 25 bp, Homo sapien
tctggaaccagggtcttgtgatctg

SEQ ID NO: 2588001 - DNA, 25 bp, Homo sapien
agtcctctgattaatgtggtaggta

SEQ ID NO: 2588002 - DNA, 25 bp, Homo sapien
ccaaagtcctctgattaatgtggta

SEQ ID NO: 2588003 - DNA, 25 bp, Homo sapien
aatgtggtaggtattgtagacgtga

SEQ ID NO: 2588004 - DNA, 25 bp, Homo sapien
tgtggtaggtattgtagacgtgata

SEQ ID NO: 2588005 - DNA, 25 bp, Homo sapien
taagcacagtgatagttttagctaa

SEQ ID NO: 2588006 - DNA, 25 bp, Homo sapien
gccttacaggctataagcacagtga

SEQ ID NO: 2588007 - DNA, 25 bp, Homo sapien
tttagctaacgcagttgaaacaacc

SEQ ID NO: 2588008 - DNA, 25 bp, Homo sapien
gatgctgtagccttacaggctataa

SEQ ID NO: 2588009 - DNA, 25 bp, Homo sapien
gaatacctcatcattgagagtcctg

SEQ ID NO: 2588010 - DNA, 25 bp, Homo sapien
tgatcccatgccaaattccagagag

SEQ ID NO: 2588011 - DNA, 25 bp, Homo sapien
caagaatcccagaacagagtggaag

SEQ ID NO: 2588012 - DNA, 25 bp, Homo sapien
cagtgccaaaaaggtcaagaatccc

SEQ ID NO: 2588013 - DNA, 25 bp, Homo sapien
tcaaacagtacataacatcagcatg

SEQ ID NO: 2588014 - DNA, 25 bp, Homo sapien
aacagtacataacatcagcatgctg

SEQ ID NO: 2588015 - DNA, 25 bp, Homo sapien
cagtacataacatcagcatgctgaa

SEQ ID NO: 2588016 - DNA, 25 bp, Homo sapien
caaacagtacataacatcagcatgc

SEQ ID NO: 2588017 - DNA, 25 bp, Homo sapien
ggacacagcgttcggctcataacaa

SEQ ID NO: 2588018 - DNA, 25 bp, Homo sapien
taataagtgttctgccaacaggcag

SEQ ID NO: 2588019 - DNA, 25 bp, Homo sapien
gatattgatgcctcagtgttcccca

SEQ ID NO: 2588020 - DNA, 25 bp, Homo sapien
cttaggagttttagagggacacagc

SEQ ID NO: 2588021 - DNA, 25 bp, Homo sapien
cacagttgaagcctggaaacactac

SEQ ID NO: 2588022 - DNA, 25 bp, Homo sapien
caagatgcaagaggatgtcaataca

SEQ ID NO: 2588023 - DNA, 25 bp, Homo sapien
gcttcttggactaccttcactggca

SEQ ID NO: 2588024 - DNA, 25 bp, Homo sapien
gtcctggaatccagagccaagtggc

SEQ ID NO: 2588025 - DNA, 25 bp, Homo sapien
tctctccctaggtgtgatagcagtg

SEQ ID NO: 2588026 - DNA, 25 bp, Homo sapien
tgctaggacagctctaaacagtgag

SEQ ID NO: 2588027 - DNA, 25 bp, Homo sapien
cagtgagctcgatgtgcaaaacgca

SEQ ID NO: 2588028 - DNA, 25 bp, Homo sapien
gctgtggctgtctctatcatcgtga

SEQ ID NO: 2588029 - DNA, 25 bp, Homo sapien
gtacaatggctccaatcagccctac

SEQ ID NO: 2588030 - DNA, 25 bp, Homo sapien
tacaatggctccaatcagccctact

SEQ ID NO: 2588031 - DNA, 25 bp, Homo sapien
ctgtacaatggctccaatcagccct

SEQ ID NO: 2588032 - DNA, 25 bp, Homo sapien
tgtacaatggctccaatcagcccta

SEQ ID NO: 2588033 - DNA, 25 bp, Homo sapien
tccatggtccacacaaacatgcatg

SEQ ID NO: 2588034 - DNA, 25 bp, Homo sapien
acaaacatgcatgagtgtgtcctgg

SEQ ID NO: 2588035 - DNA, 25 bp, Homo sapien
ttcccctgccatcttccatggtcca

SEQ ID NO: 2588036 - DNA, 25 bp, Homo sapien
aacaacctgacagctcttcccctgc

SEQ ID NO: 2588037 - DNA, 25 bp, Homo sapien
cgggaagctgagatacaaatacaga

SEQ ID NO: 2588038 - DNA, 25 bp, Homo sapien
ttccgggaagctgagatacaaatac

SEQ ID NO: 2588039 - DNA, 25 bp, Homo sapien
tctttatcatatcttgcatggtcct

SEQ ID NO: 2588040 - DNA, 25 bp, Homo sapien
agaaccaaaattcagtgacatagat

SEQ ID NO: 2588041 - DNA, 25 bp, Homo sapien
tagtgtggtttcaccgttgtcaaca

SEQ ID NO: 2588042 - DNA, 25 bp, Homo sapien
gagcttcgtgtagtttttcattagg

SEQ ID NO: 2588043 - DNA, 25 bp, Homo sapien
gatatgtttatctatactttgagct

SEQ ID NO: 2588044 - DNA, 25 bp, Homo sapien
tgtgaaatgcacaggatgatgtagg

SEQ ID NO: 2588045 - DNA, 25 bp, Homo sapien
tccttcattgatcctacatgtgctg

SEQ ID NO: 2588046 - DNA, 25 bp, Homo sapien
ctttgtcctggcataattttgtctc

SEQ ID NO: 2588047 - DNA, 25 bp, Homo sapien
ttccgacaggtgttgctcttcttca

SEQ ID NO: 2588048 - DNA, 25 bp, Homo sapien
taggacatttccgacaggtgttgct

SEQ ID NO: 2588049 - DNA, 25 bp, Homo sapien
catgaaggctaagtactatttgatc

SEQ ID NO: 2588050 - DNA, 25 bp, Homo sapien
ggctaagtactatttgatcccctta

SEQ ID NO: 2588051 - DNA, 25 bp, Homo sapien
tttgcatgaaggctaagtactattt

SEQ ID NO: 2588052 - DNA, 25 bp, Homo sapien
gaaggctaagtactatttgatcccc

SEQ ID NO: 2588053 - DNA, 25 bp, Homo sapien
tgcacttggttgagacccttgttca

SEQ ID NO: 2588054 - DNA, 25 bp, Homo sapien
acttggttgagacccttgttcagaa

SEQ ID NO: 2588055 - DNA, 25 bp, Homo sapien
ttgttcagaacaaccatcgcatttc

SEQ ID NO: 2588056 - DNA, 25 bp, Homo sapien
aataaatgcacttggttgagaccct

SEQ ID NO: 2588057 - DNA, 25 bp, Homo sapien
ttggaaggtttggacgacttgctga

SEQ ID NO: 2588058 - DNA, 25 bp, Homo sapien
gtttggacgacttgctgaggaacac

SEQ ID NO: 2588059 - DNA, 25 bp, Homo sapien
gtctaaatcagatatgtacaatgtt

SEQ ID NO: 2588060 - DNA, 25 bp, Homo sapien
gaagtgcttttgcttgtctaaatca

SEQ ID NO: 2588061 - DNA, 25 bp, Homo sapien
ctttctacgtgcaagtatctggtac

SEQ ID NO: 2588062 - DNA, 25 bp, Homo sapien
tttctacgtgcaagtatctggtact

SEQ ID NO: 2588063 - DNA, 25 bp, Homo sapien
ctctttctacgtgcaagtatctggt

SEQ ID NO: 2588064 - DNA, 25 bp, Homo sapien
ctacgtgcaagtatctggtactaac

SEQ ID NO: 2588065 - DNA, 25 bp, Homo sapien
cccattgctgtgaactagcatgaaa

SEQ ID NO: 2588066 - DNA, 25 bp, Homo sapien
tgctccccattgctgtgaactagca

SEQ ID NO: 2588067 - DNA, 25 bp, Homo sapien
ctccccattgctgtgaactagcatg

SEQ ID NO: 2588068 - DNA, 25 bp, Homo sapien
atgctccccattgctgtgaactagc

SEQ ID NO: 2588069 - DNA, 25 bp, Homo sapien
tgtttgtccataatgaatgtagcca

SEQ ID NO: 2588070 - DNA, 25 bp, Homo sapien
gtttgtccataatgaatgtagccat

SEQ ID NO: 2588071 - DNA, 25 bp, Homo sapien
ctgtttgtccataatgaatgtagcc

SEQ ID NO: 2588072 - DNA, 25 bp, Homo sapien
cgccttatgtgtgctaatgattgcc

SEQ ID NO: 2588073 - DNA, 25 bp, Homo sapien
tcaacttaaggctctctacgacagg

SEQ ID NO: 2588074 - DNA, 25 bp, Homo sapien
ctacgacaggcggaggcatgaccag

SEQ ID NO: 2588075 - DNA, 25 bp, Homo sapien
gagaaaggcataagtactttctttc

SEQ ID NO: 2588076 - DNA, 25 bp, Homo sapien
ctgtacatagcttcagcttctacat

SEQ ID NO: 2588077 - DNA, 25 bp, Homo sapien
acatagcttcagcttctacatcccc

SEQ ID NO: 2588078 - DNA, 25 bp, Homo sapien
atagcttcagcttctacatccccaa

SEQ ID NO: 2588079 - DNA, 25 bp, Homo sapien
gtacatagcttcagcttctacatcc

SEQ ID NO: 2588080 - DNA, 25 bp, Homo sapien
gtctgggacaacacgagcatactct

SEQ ID NO: 2588081 - DNA, 25 bp, Homo sapien
agaaacgtctgggacaacacgagca

SEQ ID NO: 2588082 - DNA, 25 bp, Homo sapien
tcagaatgcagaaacgtctgggaca

SEQ ID NO: 2588083 - DNA, 25 bp, Homo sapien
tgggacaacacgagcatactctctc

SEQ ID NO: 2588084 - DNA, 25 bp, Homo sapien
ttaattcattagggggcacgtggct

SEQ ID NO: 2588085 - DNA, 25 bp, Homo sapien
gggcacgtggcttgaactggcttga

SEQ ID NO: 2588086 - DNA, 25 bp, Homo sapien
cacgtggcttgaactggcttgaagg

SEQ ID NO: 2588087 - DNA, 25 bp, Homo sapien
gtcgctgtttgtgtttaattcatta

SEQ ID NO: 2588088 - DNA, 25 bp, Homo sapien
gcaatttcgaagaatccgaacaaaa

SEQ ID NO: 2588089 - DNA, 25 bp, Homo sapien
catgcaaggccaatgtacaaccctg

SEQ ID NO: 2588090 - DNA, 25 bp, Homo sapien
aacaaaagctaagcgaagttcagga

SEQ ID NO: 2588091 - DNA, 25 bp, Homo sapien
ggtacaactgccgagtttcgcatgc

SEQ ID NO: 2588092 - DNA, 25 bp, Homo sapien
gcgtgggcctgagcatgtttggaaa

SEQ ID NO: 2588093 - DNA, 25 bp, Homo sapien
ctctgcgtgggcctgagcatgtttg

SEQ ID NO: 2588094 - DNA, 25 bp, Homo sapien
ctgcgtgggcctgagcatgtttgga

SEQ ID NO: 2588095 - DNA, 25 bp, Homo sapien
cgtgggcctgagcatgtttggaaac

SEQ ID NO: 2588096 - DNA, 25 bp, Homo sapien
tgtagtaacactacccttcacattg

SEQ ID NO: 2588097 - DNA, 25 bp, Homo sapien
gtagtaacactacccttcacattgg

SEQ ID NO: 2588098 - DNA, 25 bp, Homo sapien
taacactacccttcacattggtcat

SEQ ID NO: 2588099 - DNA, 25 bp, Homo sapien
ccagtgtagtaacactacccttcac

SEQ ID NO: 2588100 - DNA, 25 bp, Homo sapien
ttttctctgtgatcatctgaagaga

SEQ ID NO: 2588101 - DNA, 25 bp, Homo sapien
tcttctgggctgacatatggtgagt

SEQ ID NO: 2588102 - DNA, 25 bp, Homo sapien
tttgatgggtgcaattctggtctgc

SEQ ID NO: 2588103 - DNA, 25 bp, Homo sapien
tgccataagttggtcagtgctgcct

SEQ ID NO: 2588104 - DNA, 25 bp, Homo sapien
ggtctgcgggatttattgccataag

SEQ ID NO: 2588105 - DNA, 25 bp, Homo sapien
gcggccctcctgtcagggttaccat

SEQ ID NO: 2588106 - DNA, 25 bp, Homo sapien
agcggccctcctgtcagggttacca

SEQ ID NO: 2588107 - DNA, 25 bp, Homo sapien
tgtcttgtgaggtccccccgatgca

SEQ ID NO: 2588108 - DNA, 25 bp, Homo sapien
tccccccgatgcagcggccctcctg

SEQ ID NO: 2588109 - DNA, 25 bp, Homo sapien
caatcgaatcttttccgtggcagat

SEQ ID NO: 2588110 - DNA, 25 bp, Homo sapien
cattgggttcgtatgcgtgcaatcg

SEQ ID NO: 2588111 - DNA, 25 bp, Homo sapien
cgtatgcgtgcaatcgaatcttttc

SEQ ID NO: 2588112 - DNA, 25 bp, Homo sapien
ctggcattgggttcgtatgcgtgca

SEQ ID NO: 2588113 - DNA, 25 bp, Homo sapien
actttcgggactcttcagcatcaaa

SEQ ID NO: 2588114 - DNA, 25 bp, Homo sapien
ctactttcgggactcttcagcatca

SEQ ID NO: 2588115 - DNA, 25 bp, Homo sapien
ctttcgggactcttcagcatcaaaa

SEQ ID NO: 2588116 - DNA, 25 bp, Homo sapien
tactttcgggactcttcagcatcaa

SEQ ID NO: 2588117 - DNA, 25 bp, Homo sapien
accgcaccccgcctgtatttggatt

SEQ ID NO: 2588118 - DNA, 25 bp, Homo sapien
aaccgagtcttgctcagtctcccag

SEQ ID NO: 2588119 - DNA, 25 bp, Homo sapien
taataatttgatccactgttcaaca

SEQ ID NO: 2588120 - DNA, 25 bp, Homo sapien
cactgttcaacagcaatcagcaaac

SEQ ID NO: 2588121 - DNA, 25 bp, Homo sapien
ctctagttgcaaaggtacattgtta

SEQ ID NO: 2588122 - DNA, 25 bp, Homo sapien
gttcctctagttgcaaaggtacatt

SEQ ID NO: 2588123 - DNA, 25 bp, Homo sapien
tagttcctctagttgcaaaggtaca

SEQ ID NO: 2588124 - DNA, 25 bp, Homo sapien
tcctctagttgcaaaggtacattgt

SEQ ID NO: 2588125 - DNA, 25 bp, Homo sapien
tggaatgtccacaatggctcttgtc

SEQ ID NO: 2588126 - DNA, 25 bp, Homo sapien
caactggaatgtccacaatggctct

SEQ ID NO: 2588127 - DNA, 25 bp, Homo sapien
caccaactggaatgtccacaatggc

SEQ ID NO: 2588128 - DNA, 25 bp, Homo sapien
aagggcatcaaccacatgacccaac

SEQ ID NO: 2588129 - DNA, 25 bp, Homo sapien
ctatggttcttggaaccaaatggac

SEQ ID NO: 2588130 - DNA, 25 bp, Homo sapien
gaatgattccaggggctttcagact

SEQ ID NO: 2588131 - DNA, 25 bp, Homo sapien
ctgaaatttgaggaatgattccagg

SEQ ID NO: 2588132 - DNA, 25 bp, Homo sapien
aggaatgattccaggggctttcaga

SEQ ID NO: 2588133 - DNA, 25 bp, Homo sapien
atgattccaggggctttcagactaa

SEQ ID NO: 2588134 - DNA, 25 bp, Homo sapien
ttacagccttaatgccagtctgcat

SEQ ID NO: 2588135 - DNA, 25 bp, Homo sapien
taatgccagtctgcattggttcctg

SEQ ID NO: 2588136 - DNA, 25 bp, Homo sapien
ttggcaccaagctatttacagcctt

SEQ ID NO: 2588137 - DNA, 25 bp, Homo sapien
actgaccatggccaattggcaccaa

SEQ ID NO: 2588138 - DNA, 25 bp, Homo sapien
ccagtctgtccattaccaataatca

SEQ ID NO: 2588139 - DNA, 25 bp, Homo sapien
tcatcagatccatcattgaaacatt

SEQ ID NO: 2588140 - DNA, 25 bp, Homo sapien
tgaccaataacaacatagacacagt

SEQ ID NO: 2588141 - DNA, 25 bp, Homo sapien
cagtggatctcttttgaccaataac

SEQ ID NO: 2588142 - DNA, 25 bp, Homo sapien
aacaacatagacacagtacagcttc

SEQ ID NO: 2588143 - DNA, 25 bp, Homo sapien
tgacaccacgatggtgtaattcatg

SEQ ID NO: 2588144 - DNA, 25 bp, Homo sapien
ctgacaccacgatggtgtaattcat

SEQ ID NO: 2588145 - DNA, 25 bp, Homo sapien
gctgacaccacgatggtgtaattca

SEQ ID NO: 2588146 - DNA, 25 bp, Homo sapien
agctgacaccacgatggtgtaattc

SEQ ID NO: 2588147 - DNA, 25 bp, Homo sapien
tgtcatagatggtcaaaacatgttt

SEQ ID NO: 2588148 - DNA, 25 bp, Homo sapien
aggcctcacaaccagggggttggca

SEQ ID NO: 2588149 - DNA, 25 bp, Homo sapien
aagcagacacatcaccagtctgttt

SEQ ID NO: 2588150 - DNA, 25 bp, Homo sapien
tcattggaatgtaagcagacacatc

SEQ ID NO: 2588151 - DNA, 25 bp, Homo sapien
gatagaaatgacattcattggaatg

SEQ ID NO: 2588152 - DNA, 25 bp, Homo sapien
cttagtgatagaaatgacattcatt

SEQ ID NO: 2588153 - DNA, 25 bp, Homo sapien
acagacagaccgacattaatggcag

SEQ ID NO: 2588154 - DNA, 25 bp, Homo sapien
cagacagaccgacattaatggcagg

SEQ ID NO: 2588155 - DNA, 25 bp, Homo sapien
agacagaccgacattaatggcaggg

SEQ ID NO: 2588156 - DNA, 25 bp, Homo sapien
tgccacctgcttcatagccctggtt

SEQ ID NO: 2588157 - DNA, 25 bp, Homo sapien
tgcttcatagccctggtttgggcag

SEQ ID NO: 2588158 - DNA, 25 bp, Homo sapien
cacctgcttcatagccctggtttgg

SEQ ID NO: 2588159 - DNA, 25 bp, Homo sapien
tcatagccctggtttgggcagcaga

SEQ ID NO: 2588160 - DNA, 25 bp, Homo sapien
gcaactcagttagacacacaccaca

SEQ ID NO: 2588161 - DNA, 25 bp, Homo sapien
caactcagttagacacacaccacaa

SEQ ID NO: 2588162 - DNA, 25 bp, Homo sapien
agaactgaactgggcaaaagtggtg

SEQ ID NO: 2588163 - DNA, 25 bp, Homo sapien
tttatcaagatagcccctaataccc

SEQ ID NO: 2588164 - DNA, 25 bp, Homo sapien
tagcccctaatacccacatggataa

SEQ ID NO: 2588165 - DNA, 25 bp, Homo sapien
cctaatacccacatggataacagcc

SEQ ID NO: 2588166 - DNA, 25 bp, Homo sapien
tcaagatagcccctaatacccacat

SEQ ID NO: 2588167 - DNA, 25 bp, Homo sapien
ggcttggtgccagctgacatgagac

SEQ ID NO: 2588168 - DNA, 25 bp, Homo sapien
gggcttggtgccagctgacatgaga

SEQ ID NO: 2588169 - DNA, 25 bp, Homo sapien
tttccaccctgacataacataaaag

SEQ ID NO: 2588170 - DNA, 25 bp, Homo sapien
tccaccctgacataacataaaagac

SEQ ID NO: 2588171 - DNA, 25 bp, Homo sapien
caccctgacataacataaaagacaa

SEQ ID NO: 2588172 - DNA, 25 bp, Homo sapien
ggtttgagcagggatacttatgtca

SEQ ID NO: 2588173 - DNA, 25 bp, Homo sapien
tatcctcctgcaagcctggaggaca

SEQ ID NO: 2588174 - DNA, 25 bp, Homo sapien
ctatcctcctgcaagcctggaggac

SEQ ID NO: 2588175 - DNA, 25 bp, Homo sapien
tccatcaaacctttattctgggctg

SEQ ID NO: 2588176 - DNA, 25 bp, Homo sapien
tcaaacctttattctgggctgcaca

SEQ ID NO: 2588177 - DNA, 25 bp, Homo sapien
tcactccatcaaacctttattctgg

SEQ ID NO: 2588178 - DNA, 25 bp, Homo sapien
aaacctttattctgggctgcacact

SEQ ID NO: 2588179 - DNA, 25 bp, Homo sapien
ttcttcttgcataaacctctgctgg

SEQ ID NO: 2588180 - DNA, 25 bp, Homo sapien
gctggtatctaacattctttattct

SEQ ID NO: 2588181 - DNA, 25 bp, Homo sapien
tatctaacattctttattctcaagg

SEQ ID NO: 2588182 - DNA, 25 bp, Homo sapien
aaacctctgctggtatctaacattc

SEQ ID NO: 2588183 - DNA, 25 bp, Homo sapien
tctttccaaaactggcgaactctgt

SEQ ID NO: 2588184 - DNA, 25 bp, Homo sapien
tgctgtccgttgtccagtcccagaa

SEQ ID NO: 2588185 - DNA, 25 bp, Homo sapien
cagagaacaactacttgcacgtata

SEQ ID NO: 2588186 - DNA, 25 bp, Homo sapien
agtcccagaagaggttcagccacgc

SEQ ID NO: 2588187 - DNA, 25 bp, Homo sapien
ctgtggtcgttaggaaacagaagaa

SEQ ID NO: 2588188 - DNA, 25 bp, Homo sapien
gaagaaagcagctagccacagcttc

SEQ ID NO: 2588189 - DNA, 25 bp, Homo sapien
agaagaaagcagctagccacagctt

SEQ ID NO: 2588190 - DNA, 25 bp, Homo sapien
aagaaagcagctagccacagcttca

SEQ ID NO: 2588191 - DNA, 25 bp, Homo sapien
cttgggcaaggacaagcaccttgac

SEQ ID NO: 2588192 - DNA, 25 bp, Homo sapien
acagaggttgtagagctctttgcag

SEQ ID NO: 2588193 - DNA, 25 bp, Homo sapien
tcagcggggaataatctccaccaag

SEQ ID NO: 2588194 - DNA, 25 bp, Homo sapien
ctccaccaagaacagtaatagcttg

SEQ ID NO: 2588195 - DNA, 25 bp, Homo sapien
tttctcatacgctgcagtagcccat

SEQ ID NO: 2588196 - DNA, 25 bp, Homo sapien
tcatacgctgcagtagcccatgcac

SEQ ID NO: 2588197 - DNA, 25 bp, Homo sapien
tgcagtagcccatgcaccacacttg

SEQ ID NO: 2588198 - DNA, 25 bp, Homo sapien
aagactttctcatacgctgcagtag

SEQ ID NO: 2588199 - DNA, 25 bp, Homo sapien
tgatctgattcgatcccacaatggg

SEQ ID NO: 2588200 - DNA, 25 bp, Homo sapien
tttacatgaccttcagcctgagggc

SEQ ID NO: 2588201 - DNA, 25 bp, Homo sapien
tgttactgagcaaacaatgggcttg

SEQ ID NO: 2588202 - DNA, 25 bp, Homo sapien
cctaatgtacatggaggccaagacc

SEQ ID NO: 2588203 - DNA, 25 bp, Homo sapien
tgacccatgcaagtggatctcctgc

SEQ ID NO: 2588204 - DNA, 25 bp, Homo sapien
caatctgacccatgcaagtggatct

SEQ ID NO: 2588205 - DNA, 25 bp, Homo sapien
ggtcatgtcattgaagccacatctg

SEQ ID NO: 2588206 - DNA, 25 bp, Homo sapien
acatctgcaatctgacccatgcaag

SEQ ID NO: 2588207 - DNA, 25 bp, Homo sapien
gcgctgcaaggacgccctgtccctg

SEQ ID NO: 2588208 - DNA, 25 bp, Homo sapien
catcgcgctgcacggtcttcccttc

SEQ ID NO: 2588209 - DNA, 25 bp, Homo sapien
tcttcccttccaacaccgagggcgc

SEQ ID NO: 2588210 - DNA, 25 bp, Homo sapien
cctgatccccatcgcgctgcacggt

SEQ ID NO: 2588211 - DNA, 25 bp, Homo sapien
ctgtcaaagtaatcagctgaaagca

SEQ ID NO: 2588212 - DNA, 25 bp, Homo sapien
gtcaaagtaatcagctgaaagcagt

SEQ ID NO: 2588213 - DNA, 25 bp, Homo sapien
aaagtaatcagctgaaagcagttgc

SEQ ID NO: 2588214 - DNA, 25 bp, Homo sapien
agtaatcagctgaaagcagttgcct

SEQ ID NO: 2588215 - DNA, 25 bp, Homo sapien
cctcttgacaaacgtttttgtgtct

SEQ ID NO: 2588216 - DNA, 25 bp, Homo sapien
gattactactagcttgttgctgatg

SEQ ID NO: 2588217 - DNA, 25 bp, Homo sapien
ttgacaaacgtttttgtgtcttcca

SEQ ID NO: 2588218 - DNA, 25 bp, Homo sapien
ttccatgaggatgattactactagc

SEQ ID NO: 2588219 - DNA, 25 bp, Homo sapien
gccagagcatctgccgaagtttggg

SEQ ID NO: 2588220 - DNA, 25 bp, Homo sapien
tggtcctcgggctgatgggctccaa

SEQ ID NO: 2588221 - DNA, 25 bp, Homo sapien
cctcgggctgatgggctccaaagcc

SEQ ID NO: 2588222 - DNA, 25 bp, Homo sapien
agccagagcatctgccgaagtttgg

SEQ ID NO: 2588223 - DNA, 25 bp, Homo sapien
aggccagccaccgaacatggccttc

SEQ ID NO: 2588224 - DNA, 25 bp, Homo sapien
taggccagccaccgaacatggcctt

SEQ ID NO: 2588225 - DNA, 25 bp, Homo sapien
ctaggccagccaccgaacatggcct

SEQ ID NO: 2588226 - DNA, 25 bp, Homo sapien
tggatgttcccatcaggagtgaact

SEQ ID NO: 2588227 - DNA, 25 bp, Homo sapien
gtagaaaaggatatatcttcctata

SEQ ID NO: 2588228 - DNA, 25 bp, Homo sapien
tagaaaaggatatatcttcctataa

SEQ ID NO: 2588229 - DNA, 25 bp, Homo sapien
aggatatatcttcctataaaatgta

SEQ ID NO: 2588230 - DNA, 25 bp, Homo sapien
aaaaggatatatcttcctataaaat

SEQ ID NO: 2588231 - DNA, 25 bp, Homo sapien
gcttcttgagtctatggtggaaaaa

SEQ ID NO: 2588232 - DNA, 25 bp, Homo sapien
tttgagcttcttgagtctatggtgg

SEQ ID NO: 2588233 - DNA, 25 bp, Homo sapien
tggcctgtggtagaaaacgaaatat

SEQ ID NO: 2588234 - DNA, 25 bp, Homo sapien
ctttgtggcctgtggtagaaaacga

SEQ ID NO: 2588235 - DNA, 25 bp, Homo sapien
ttctcatagagttaaaccttcattt

SEQ ID NO: 2588236 - DNA, 25 bp, Homo sapien
attcttctcatagagttaaaccttc

SEQ ID NO: 2588237 - DNA, 25 bp, Homo sapien
tcttctcatagagttaaaccttcat

SEQ ID NO: 2588238 - DNA, 25 bp, Homo sapien
cattttgattgagtagttttgaaac

SEQ ID NO: 2588239 - DNA, 25 bp, Homo sapien
cgctttgagacctatggtaaaaaag

SEQ ID NO: 2588240 - DNA, 25 bp, Homo sapien
agcgctttgagacctatggtaaaaa

SEQ ID NO: 2588241 - DNA, 25 bp, Homo sapien
gcgctttgagacctatggtaaaaaa

SEQ ID NO: 2588242 - DNA, 25 bp, Homo sapien
aaatctggaaggaagcattctcaga

SEQ ID NO: 2588243 - DNA, 25 bp, Homo sapien
cttcatataaaatctggaaggaagc

SEQ ID NO: 2588244 - DNA, 25 bp, Homo sapien
aaaatctggaaggaagcattctcag

SEQ ID NO: 2588245 - DNA, 25 bp, Homo sapien
atataaaatctggaaggaagcattc

SEQ ID NO: 2588246 - DNA, 25 bp, Homo sapien
ctttctgcactatctggaagtggac

SEQ ID NO: 2588247 - DNA, 25 bp, Homo sapien
ataccaggtttgagacactctttct

SEQ ID NO: 2588248 - DNA, 25 bp, Homo sapien
tttctgtagtatctgcaagcggacg

SEQ ID NO: 2588249 - DNA, 25 bp, Homo sapien
cggacgtttcaagcgctttcaggcc

SEQ ID NO: 2588250 - DNA, 25 bp, Homo sapien
caagcggacgtttcaagcgctttca

SEQ ID NO: 2588251 - DNA, 25 bp, Homo sapien
tatctgcaagcggacgtttcaagcg

SEQ ID NO: 2588252 - DNA, 25 bp, Homo sapien
ctttgtgctgtatgtcctcaattaa

SEQ ID NO: 2588253 - DNA, 25 bp, Homo sapien
cttcgaacgtctctccgccatcaat

SEQ ID NO: 2588254 - DNA, 25 bp, Homo sapien
agaagccgtggggtcggtcgttcag

SEQ ID NO: 2588255 - DNA, 25 bp, Homo sapien
ttcgaacgtctctccgccatcaatc

SEQ ID NO: 2588256 - DNA, 25 bp, Homo sapien
gcgctttgaggcctatgttgaaaaa

SEQ ID NO: 2588257 - DNA, 25 bp, Homo sapien
tttggagcgctttgaggcctatgtt

SEQ ID NO: 2588258 - DNA, 25 bp, Homo sapien
ggagcgctttgaggcctatgttgaa

SEQ ID NO: 2588259 - DNA, 25 bp, Homo sapien
gctttgaggcctatgttgaaaaagg

SEQ ID NO: 2588260 - DNA, 25 bp, Homo sapien
ttttgacagagcagttttgaagcac

SEQ ID NO: 2588261 - DNA, 25 bp, Homo sapien
tttgaagcactctttttgtagaatc

SEQ ID NO: 2588262 - DNA, 25 bp, Homo sapien
cttttgacagagcagttttgaagca

SEQ ID NO: 2588263 - DNA, 25 bp, Homo sapien
agcactctttttgtagaatctgcaa

SEQ ID NO: 2588264 - DNA, 25 bp, Homo sapien
gtgtgtattcaactaacagagatga

SEQ ID NO: 2588265 - DNA, 25 bp, Homo sapien
tgtgtgtattcaactaacagagatg

SEQ ID NO: 2588266 - DNA, 25 bp, Homo sapien
tattcaactaacagagatgaaactt

SEQ ID NO: 2588267 - DNA, 25 bp, Homo sapien
tgtattcaactaacagagatgaaac

SEQ ID NO: 2588268 - DNA, 25 bp, Homo sapien
gcgctttgaggcctatgttgaaaaa

SEQ ID NO: 2588269 - DNA, 25 bp, Homo sapien
gagcgctttgaggcctatgttgaaa

SEQ ID NO: 2588270 - DNA, 25 bp, Homo sapien
tttggagcgctttgaggcctatgtt

SEQ ID NO: 2588271 - DNA, 25 bp, Homo sapien
tggagcgctttgaggcctatgttga

SEQ ID NO: 2588272 - DNA, 25 bp, Homo sapien
ctttctgcactatctggaagtggac

SEQ ID NO: 2588273 - DNA, 25 bp, Homo sapien
ataccaggtttgagacactctttct

SEQ ID NO: 2588274 - DNA, 25 bp, Homo sapien
ctttctgcactatctggaagtggac

SEQ ID NO: 2588275 - DNA, 25 bp, Homo sapien
ataccaggtttgagacactctttct

SEQ ID NO: 2588276 - DNA, 25 bp, Homo sapien
ctttctgcactatctggaagtggac

SEQ ID NO: 2588277 - DNA, 25 bp, Homo sapien
ataccaggtttgagacactctttct

SEQ ID NO: 2588278 - DNA, 25 bp, Homo sapien
cttgtgatgtgtgtactcaagtaac

SEQ ID NO: 2588279 - DNA, 25 bp, Homo sapien
tattttgatacctttgaggatttcg

SEQ ID NO: 2588280 - DNA, 25 bp, Homo sapien
cttccttgtgatgtgtgtactcaag

SEQ ID NO: 2588281 - DNA, 25 bp, Homo sapien
ccttttgacagagcagttttgaagc

SEQ ID NO: 2588282 - DNA, 25 bp, Homo sapien
ctttctgcactatctggaagtggac

SEQ ID NO: 2588283 - DNA, 25 bp, Homo sapien
ataccaggtttgagacactctttct

SEQ ID NO: 2588284 - DNA, 25 bp, Homo sapien
ctttctgcactatctggaagtggac

SEQ ID NO: 2588285 - DNA, 25 bp, Homo sapien
ataccaggtttgagacactctttct

SEQ ID NO: 2588286 - DNA, 25 bp, Homo sapien
gatatcttcatataaaatctagaca

SEQ ID NO: 2588287 - DNA, 25 bp, Homo sapien
tcttcatataaaatctagacagaag

SEQ ID NO: 2588288 - DNA, 25 bp, Homo sapien
tatcttcatataaaatctagacaga

SEQ ID NO: 2588289 - DNA, 25 bp, Homo sapien
cgggatatcttcatataaaatctag

SEQ ID NO: 2588290 - DNA, 25 bp, Homo sapien
tgttttgatacaacattttggaaac

SEQ ID NO: 2588291 - DNA, 25 bp, Homo sapien
aaacttatttgcgatgtgtgtcctc

SEQ ID NO: 2588292 - DNA, 25 bp, Homo sapien
ttgaacctttgttttgatacaacat

SEQ ID NO: 2588293 - DNA, 25 bp, Homo sapien
acttatttgcgatgtgtgtcctcaa

SEQ ID NO: 2588294 - DNA, 25 bp, Homo sapien
ggggtgtgttccgtgagtggtagct

SEQ ID NO: 2588295 - DNA, 25 bp, Homo sapien
gtgtgttccgtgagtggtagctgca

SEQ ID NO: 2588296 - DNA, 25 bp, Homo sapien
cgggggtgtgttccgtgagtggtag

SEQ ID NO: 2588297 - DNA, 25 bp, Homo sapien
tggccgggggtgtgttccgtgagtg

SEQ ID NO: 2588298 - DNA, 25 bp, Homo sapien
ggaagggaggcattgggggtgcagc

SEQ ID NO: 2588299 - DNA, 25 bp, Homo sapien
gaagggaggcattgggggtgcagcc

SEQ ID NO: 2588300 - DNA, 25 bp, Homo sapien
ccttcctgcccatgaccaaggcccc

SEQ ID NO: 2588301 - DNA, 25 bp, Homo sapien
cagccttcctgcccatgaccaaggc

SEQ ID NO: 2588302 - DNA, 25 bp, Homo sapien
gtgctcaagggccaggtgaaggact

SEQ ID NO: 2588303 - DNA, 25 bp, Homo sapien
caggtgttgtgctcaagggccaggt

SEQ ID NO: 2588304 - DNA, 25 bp, Homo sapien
aaggactgcccttgggatgtcctgg

SEQ ID NO: 2588305 - DNA, 25 bp, Homo sapien
ccaggtgaaggactgcccttgggat

SEQ ID NO: 2588306 - DNA, 25 bp, Homo sapien
ccagcacgggtatgcggtagaagcc

SEQ ID NO: 2588307 - DNA, 25 bp, Homo sapien
ggtagaagccggctgtgtaggagac

SEQ ID NO: 2588308 - DNA, 25 bp, Homo sapien
gatggctaactaggatggcgtagac

SEQ ID NO: 2588309 - DNA, 25 bp, Homo sapien
atggacatgcgggtggtcagcccca

SEQ ID NO: 2588310 - DNA, 25 bp, Homo sapien
agcctctcagtgcccagtttgcatc

SEQ ID NO: 2588311 - DNA, 25 bp, Homo sapien
cagcctctcagtgcccagtttgcat

SEQ ID NO: 2588312 - DNA, 25 bp, Homo sapien
tcagcctctcagtgcccagtttgca

SEQ ID NO: 2588313 - DNA, 25 bp, Homo sapien
tggtggcaaggcaggctgtgcttga

SEQ ID NO: 2588314 - DNA, 25 bp, Homo sapien
tagtgtagagactgtggtaaggcca

SEQ ID NO: 2588315 - DNA, 25 bp, Homo sapien
ttttgggcacaggttggttgtagtg

SEQ ID NO: 2588316 - DNA, 25 bp, Homo sapien
tctgacctggccttgccggttcatg

SEQ ID NO: 2588317 - DNA, 25 bp, Homo sapien
tcttgctgatcttgtggtcctctga

SEQ ID NO: 2588318 - DNA, 25 bp, Homo sapien
gtcctctgaggcttccaggttattt

SEQ ID NO: 2588319 - DNA, 25 bp, Homo sapien
cagtgccttggggtgcaaaaatgtc

SEQ ID NO: 2588320 - DNA, 25 bp, Homo sapien
atgtcccctgcttctgtctatccac

SEQ ID NO: 2588321 - DNA, 25 bp, Homo sapien
gagcaccaggcgctaggctgctctg

SEQ ID NO: 2588322 - DNA, 25 bp, Homo sapien
tggccacgcaggacagacgggtcct

SEQ ID NO: 2588323 - DNA, 25 bp, Homo sapien
tgccaggacttagcgtgccaggctc

SEQ ID NO: 2588324 - DNA, 25 bp, Homo sapien
tggacacactgatcatacctcccgg

SEQ ID NO: 2588325 - DNA, 25 bp, Homo sapien
ggcgcggggatgacatcgcccacca

SEQ ID NO: 2588326 - DNA, 25 bp, Homo sapien
ggggcgcggggatgacatcgcccac

SEQ ID NO: 2588327 - DNA, 25 bp, Homo sapien
cgcggggatgacatcgcccaccact

SEQ ID NO: 2588328 - DNA, 25 bp, Homo sapien
gcggggatgacatcgcccaccactg

SEQ ID NO: 2588329 - DNA, 25 bp, Homo sapien
ccaagagatggtcgtcaagaaccca

SEQ ID NO: 2588330 - DNA, 25 bp, Homo sapien
gaccgagaggacagactgccgtgtt

SEQ ID NO: 2588331 - DNA, 25 bp, Homo sapien
tgagcttggacgaggcacgctgctc

SEQ ID NO: 2588332 - DNA, 25 bp, Homo sapien
tgggacctagagctcagaagaccga

SEQ ID NO: 2588333 - DNA, 25 bp, Homo sapien
aagcagaaaagccactgggcacgct

SEQ ID NO: 2588334 - DNA, 25 bp, Homo sapien
aaaaagcagaaaagccactgggcac

SEQ ID NO: 2588335 - DNA, 25 bp, Homo sapien
ttttatcagtgaaaaaagcagaaaa

SEQ ID NO: 2588336 - DNA, 25 bp, Homo sapien
gcagaaaagccactgggcacgctgg

SEQ ID NO: 2588337 - DNA, 25 bp, Homo sapien
tctgtgggcacgaatgctgtctttg

SEQ ID NO: 2588338 - DNA, 25 bp, Homo sapien
tggcaaatgtctgccaacaccgtgg

SEQ ID NO: 2588339 - DNA, 25 bp, Homo sapien
tagctggcagtcagggagaactctc

SEQ ID NO: 2588340 - DNA, 25 bp, Homo sapien
tggcgccggccctgtatttgttagg

SEQ ID NO: 2588341 - DNA, 25 bp, Homo sapien
aacgctttggtgaggacggagccct

SEQ ID NO: 2588342 - DNA, 25 bp, Homo sapien
agtggcattagacagcgcaggcaga

SEQ ID NO: 2588343 - DNA, 25 bp, Homo sapien
tcttgagggcattgggacatcgtgc

SEQ ID NO: 2588344 - DNA, 25 bp, Homo sapien
tggaacgaatgaccacagacagtgg

SEQ ID NO: 2588345 - DNA, 25 bp, Homo sapien
cactgttcagtggaaaaagcgaact

SEQ ID NO: 2588346 - DNA, 25 bp, Homo sapien
aaaatgagatcaacttcattaatgt

SEQ ID NO: 2588347 - DNA, 25 bp, Homo sapien
attatctttcagcatgtaattcatg

SEQ ID NO: 2588348 - DNA, 25 bp, Homo sapien
tcgcttgagcttagtagttaaagac

SEQ ID NO: 2588349 - DNA, 25 bp, Homo sapien
aggtgcccagcagagcacggcaggc

SEQ ID NO: 2588350 - DNA, 25 bp, Homo sapien
gtgcccagcagagcacggcaggcca

SEQ ID NO: 2588351 - DNA, 25 bp, Homo sapien
cccagcagagcacggcaggccaggc

SEQ ID NO: 2588352 - DNA, 25 bp, Homo sapien
tgcccagcagagcacggcaggccag

SEQ ID NO: 2588353 - DNA, 25 bp, Homo sapien
accaccagggcgagaatggatgcga

SEQ ID NO: 2588354 - DNA, 25 bp, Homo sapien
gcccagagatcccagactttcaagc

SEQ ID NO: 2588355 - DNA, 25 bp, Homo sapien
ccagactttcaagcggcctgaatcc

SEQ ID NO: 2588356 - DNA, 25 bp, Homo sapien
agagaacaggacaccctccgggaag

SEQ ID NO: 2588357 - DNA, 25 bp, Homo sapien
ctgcggtgtgagcaagagtgttagc

SEQ ID NO: 2588358 - DNA, 25 bp, Homo sapien
ggtgtgagcaagagtgttagcaggc

SEQ ID NO: 2588359 - DNA, 25 bp, Homo sapien
tgcggtgtgagcaagagtgttagca

SEQ ID NO: 2588360 - DNA, 25 bp, Homo sapien
tgtgagcaagagtgttagcaggcgg

SEQ ID NO: 2588361 - DNA, 25 bp, Homo sapien
cctccagctctttcgcctccatcag

SEQ ID NO: 2588362 - DNA, 25 bp, Homo sapien
agggccgtcacgttcttggtccctg

SEQ ID NO: 2588363 - DNA, 25 bp, Homo sapien
tcagcagggccgtcacgttcttggt

SEQ ID NO: 2588364 - DNA, 25 bp, Homo sapien
agctctttcgcctccatcagcaggg

SEQ ID NO: 2588365 - DNA, 25 bp, Homo sapien
cggcttgcaagtgcacgatttccct

SEQ ID NO: 2588366 - DNA, 25 bp, Homo sapien
actgcccggcttgcaagtgcacgat

SEQ ID NO: 2588367 - DNA, 25 bp, Homo sapien
gcactgcccggcttgcaagtgcacg

SEQ ID NO: 2588368 - DNA, 25 bp, Homo sapien
gcccggcttgcaagtgcacgatttc

SEQ ID NO: 2588369 - DNA, 25 bp, Homo sapien
cctgaggctggcaacgcgggatcaa

SEQ ID NO: 2588370 - DNA, 25 bp, Homo sapien
ctgaggctggcaacgcgggatcaac

SEQ ID NO: 2588371 - DNA, 25 bp, Homo sapien
ccctgaggctggcaacgcgggatca

SEQ ID NO: 2588372 - DNA, 25 bp, Homo sapien
gacaagcccgtcttcttgacgcaat

SEQ ID NO: 2588373 - DNA, 25 bp, Homo sapien
ccgtcttcttgacgcaattcaggtc

SEQ ID NO: 2588374 - DNA, 25 bp, Homo sapien
gcctgacagacaagcccgtcttctt

SEQ ID NO: 2588375 - DNA, 25 bp, Homo sapien
acagacaagcccgtcttcttgacgc

SEQ ID NO: 2588376 - DNA, 25 bp, Homo sapien
cttgcaggcatgtgtggtcttgagc

SEQ ID NO: 2588377 - DNA, 25 bp, Homo sapien
ctgccagtgtgcttgcaggtgggcc

SEQ ID NO: 2588378 - DNA, 25 bp, Homo sapien
tgagctctgccagtgtgcttgcagg

SEQ ID NO: 2588379 - DNA, 25 bp, Homo sapien
caggcatgtgtggtcttgagctctg

SEQ ID NO: 2588380 - DNA, 25 bp, Homo sapien
gggagcagggatggggttagatgct

SEQ ID NO: 2588381 - DNA, 25 bp, Homo sapien
tgggggagcagggatggggttagat

SEQ ID NO: 2588382 - DNA, 25 bp, Homo sapien
cttgggggagcagggatggggttag

SEQ ID NO: 2588383 - DNA, 25 bp, Homo sapien
gcagggatggggttagatgctggcc

SEQ ID NO: 2588384 - DNA, 25 bp, Homo sapien
tggggttagatgctggcccccttac

SEQ ID NO: 2588385 - DNA, 25 bp, Homo sapien
gatggggttagatgctggccccctt

SEQ ID NO: 2588386 - DNA, 25 bp, Homo sapien
agggatggggttagatgctggcccc

SEQ ID NO: 2588387 - DNA, 25 bp, Homo sapien
gcagggatggggttagatgctggcc

SEQ ID NO: 2588388 - DNA, 25 bp, Homo sapien
ccaggcctccgttgctggctcttac

SEQ ID NO: 2588389 - DNA, 25 bp, Homo sapien
ctcctagagcgaagcctgcagacct

SEQ ID NO: 2588390 - DNA, 25 bp, Homo sapien
aggcgctgcggcccagaacccagga

SEQ ID NO: 2588391 - DNA, 25 bp, Homo sapien
gggatgacgggccaggactccagca

SEQ ID NO: 2588392 - DNA, 25 bp, Homo sapien
ctgcgcggtatacagtggcagcatc

SEQ ID NO: 2588393 - DNA, 25 bp, Homo sapien
tcagcatcgcggctgcgcggtatac

SEQ ID NO: 2588394 - DNA, 25 bp, Homo sapien
agggcgttccccgagatctcgcgct

SEQ ID NO: 2588395 - DNA, 25 bp, Homo sapien
acacgtacccggagcccgtcatgtt

SEQ ID NO: 2588396 - DNA, 25 bp, Homo sapien
ggcgagcatgcgactcagagcccgt

SEQ ID NO: 2588397 - DNA, 25 bp, Homo sapien
cgagcatgcgactcagagcccgtgg

SEQ ID NO: 2588398 - DNA, 25 bp, Homo sapien
aggcgagcatgcgactcagagcccg

SEQ ID NO: 2588399 - DNA, 25 bp, Homo sapien
ctaggcgagcatgcgactcagagcc

SEQ ID NO: 2588400 - DNA, 25 bp, Homo sapien
aagagcggcccggtcttccagatgt

SEQ ID NO: 2588401 - DNA, 25 bp, Homo sapien
tctcgaggagctcgtgcacggcctg

SEQ ID NO: 2588402 - DNA, 25 bp, Homo sapien
cagatgttggtgttgcccacgcagc

SEQ ID NO: 2588403 - DNA, 25 bp, Homo sapien
gccgactcgttcttgccgttgatga

SEQ ID NO: 2588404 - DNA, 25 bp, Homo sapien
ccatgcagggactggcaaacacacc

SEQ ID NO: 2588405 - DNA, 25 bp, Homo sapien
ggctcctgggacagatactcgcctg

SEQ ID NO: 2588406 - DNA, 25 bp, Homo sapien
aacacgaaggccagaccagagctgg

SEQ ID NO: 2588407 - DNA, 25 bp, Homo sapien
taccaccttgaagccaacacgaagg

SEQ ID NO: 2588408 - DNA, 25 bp, Homo sapien
taagcgcagaatttggcctcaaggt

SEQ ID NO: 2588409 - DNA, 25 bp, Homo sapien
ggtgcacattctccttaagcgcaga

SEQ ID NO: 2588410 - DNA, 25 bp, Homo sapien
taggtctggaccttttgatacaagc

SEQ ID NO: 2588411 - DNA, 25 bp, Homo sapien
tgatacaagccgatgctcagcgggt

SEQ ID NO: 2588412 - DNA, 25 bp, Homo sapien
tcaaggatgcctcccaaaagttgtg

SEQ ID NO: 2588413 - DNA, 25 bp, Homo sapien
caagccatgcgctcacagtttgtgc

SEQ ID NO: 2588414 - DNA, 25 bp, Homo sapien
gaaatgtgcccgcttaaaacggagc

SEQ ID NO: 2588415 - DNA, 25 bp, Homo sapien
gatgagtgtggcaaacacagctcag

SEQ ID NO: 2588416 - DNA, 25 bp, Homo sapien
gggtgatcactgctaactggataaa

SEQ ID NO: 2588417 - DNA, 25 bp, Homo sapien
tgcagcacattcctgagtgtacgat

SEQ ID NO: 2588418 - DNA, 25 bp, Homo sapien
gtacgatattgacctgtagcccagc

SEQ ID NO: 2588419 - DNA, 25 bp, Homo sapien
gactttctaggcttatatcgaagct

SEQ ID NO: 2588420 - DNA, 25 bp, Homo sapien
tatccagcgttgtgaaggcaacaga

SEQ ID NO: 2588421 - DNA, 25 bp, Homo sapien
attcgaacccgaaatcctgccgtgg

SEQ ID NO: 2588422 - DNA, 25 bp, Homo sapien
tttttagcctcccagagcttcgagg

SEQ ID NO: 2588423 - DNA, 25 bp, Homo sapien
attttaaagggcgatgtatccagcg

SEQ ID NO: 2588424 - DNA, 25 bp, Homo sapien
tcttggttgcactgaaaataccgcc

SEQ ID NO: 2588425 - DNA, 25 bp, Homo sapien
aatccgtgagttttggaagccccag

SEQ ID NO: 2588426 - DNA, 25 bp, Homo sapien
cccagcctgatggtgttcccgtgct

SEQ ID NO: 2588427 - DNA, 25 bp, Homo sapien
tcgttaccttttctagtgcgttcta

SEQ ID NO: 2588428 - DNA, 25 bp, Homo sapien
cagaactcgggacacgcagcaccgg

SEQ ID NO: 2588429 - DNA, 25 bp, Homo sapien
actcgggacacgcagcaccggagca

SEQ ID NO: 2588430 - DNA, 25 bp, Homo sapien
agcaccggagcatgcgcggggatca

SEQ ID NO: 2588431 - DNA, 25 bp, Homo sapien
gcaccggagcatgcgcggggatcag

SEQ ID NO: 2588432 - DNA, 25 bp, Homo sapien
tccaaccacaggtcagcgcgctggg

SEQ ID NO: 2588433 - DNA, 25 bp, Homo sapien
gtgagtgcgcgagctccgtggagac

SEQ ID NO: 2588434 - DNA, 25 bp, Homo sapien
cagcatctatctgagccgtggccca

SEQ ID NO: 2588435 - DNA, 25 bp, Homo sapien
acagtgcctcggccccgtgagtgcg

SEQ ID NO: 2588436 - DNA, 25 bp, Homo sapien
acgaagttgtccggccggaagatct

SEQ ID NO: 2588437 - DNA, 25 bp, Homo sapien
cggccggaagatctgcccgaagggc

SEQ ID NO: 2588438 - DNA, 25 bp, Homo sapien
gttgtccggccggaagatctgcccg

SEQ ID NO: 2588439 - DNA, 25 bp, Homo sapien
gtccggccggaagatctgcccgaag

SEQ ID NO: 2588440 - DNA, 25 bp, Homo sapien
ccgccgcccagtccccagccacggc

SEQ ID NO: 2588441 - DNA, 25 bp, Homo sapien
cgcccagtccccagccacggctcac

SEQ ID NO: 2588442 - DNA, 25 bp, Homo sapien
gccgcccagtccccagccacggctc

SEQ ID NO: 2588443 - DNA, 25 bp, Homo sapien
ctttgagccgccgcccagtccccag

SEQ ID NO: 2588444 - DNA, 25 bp, Homo sapien
agattacgtgtgtggcggctcctcg

SEQ ID NO: 2588445 - DNA, 25 bp, Homo sapien
ccgccatgcgaaaaaagccgagtga

SEQ ID NO: 2588446 - DNA, 25 bp, Homo sapien
gcctgccctgctacgaattaagtca

SEQ ID NO: 2588447 - DNA, 25 bp, Homo sapien
tggaggtagagcaaacggacccttc

SEQ ID NO: 2588448 - DNA, 25 bp, Homo sapien
agcaccgagtccaccagctccgcgc

SEQ ID NO: 2588449 - DNA, 25 bp, Homo sapien
aacatccagcaccgagtccaccagc

SEQ ID NO: 2588450 - DNA, 25 bp, Homo sapien
ccagttgttcccagcaccactctga

SEQ ID NO: 2588451 - DNA, 25 bp, Homo sapien
agtccaccagctccgcgccttctgt

SEQ ID NO: 2588452 - DNA, 25 bp, Homo sapien
ctgcaggcagtcacagctctcagcc

SEQ ID NO: 2588453 - DNA, 25 bp, Homo sapien
agtcacagctctcagcctcctttct

SEQ ID NO: 2588454 - DNA, 25 bp, Homo sapien
gcaggcagtcacagctctcagcctc

SEQ ID NO: 2588455 - DNA, 25 bp, Homo sapien
tcacagctctcagcctcctttctca

SEQ ID NO: 2588456 - DNA, 25 bp, Homo sapien
taggtctcgtctgtgttttctacga

SEQ ID NO: 2588457 - DNA, 25 bp, Homo sapien
gaagcaaatgtcgtagagagcttcg

SEQ ID NO: 2588458 - DNA, 25 bp, Homo sapien
agcttcgttatcaatgcagtaggtc

SEQ ID NO: 2588459 - DNA, 25 bp, Homo sapien
ctgaacacggcggcaaccgtcaggt

SEQ ID NO: 2588460 - DNA, 25 bp, Homo sapien
gttgccaatgaaggtggcggacatt

SEQ ID NO: 2588461 - DNA, 25 bp, Homo sapien
ctgttgccaatgaaggtggcggaca

SEQ ID NO: 2588462 - DNA, 25 bp, Homo sapien
ggatgtcacagacagccgttttcac

SEQ ID NO: 2588463 - DNA, 25 bp, Homo sapien
tgggatgtcacagacagccgttttc

SEQ ID NO: 2588464 - DNA, 25 bp, Homo sapien
ccgtgaactgctcggagatgcgctt

SEQ ID NO: 2588465 - DNA, 25 bp, Homo sapien
aaggccttgcgccggaacatggccg

SEQ ID NO: 2588466 - DNA, 25 bp, Homo sapien
cttgcgccggaacatggccgtgaac

SEQ ID NO: 2588467 - DNA, 25 bp, Homo sapien
gctggtactcggacaccaggtcatt

SEQ ID NO: 2588468 - DNA, 25 bp, Homo sapien
ctcagcctcctcctcgaactcgccc

SEQ ID NO: 2588469 - DNA, 25 bp, Homo sapien
cctcctcggctgtggcatcctggta

SEQ ID NO: 2588470 - DNA, 25 bp, Homo sapien
agcctcctcctcgaactcgccctcc

SEQ ID NO: 2588471 - DNA, 25 bp, Homo sapien
tcgccctcctcctcggctgtggcat

SEQ ID NO: 2588472 - DNA, 25 bp, Homo sapien
gggagtgaataaagagttcacactg

SEQ ID NO: 2588473 - DNA, 25 bp, Homo sapien
tgggagtgaataaagagttcacact

SEQ ID NO: 2588474 - DNA, 25 bp, Homo sapien
aaaacagcaagtgcacacagtggga

SEQ ID NO: 2588475 - DNA, 25 bp, Homo sapien
tggatgtggacagggaaaacagcaa

SEQ ID NO: 2588476 - DNA, 25 bp, Homo sapien
acagcaagtgcacacagtgggacag

SEQ ID NO: 2588477 - DNA, 25 bp, Homo sapien
gtgtctgtacagcatggatgtggac

SEQ ID NO: 2588478 - DNA, 25 bp, Homo sapien
tacgccctgacattcggcaacagca

SEQ ID NO: 2588479 - DNA, 25 bp, Homo sapien
gcacccggagggcctactggaagga

SEQ ID NO: 2588480 - DNA, 25 bp, Homo sapien
cccggagggcctactggaaggaatg

SEQ ID NO: 2588481 - DNA, 25 bp, Homo sapien
caactacgccctgacattcggcaac

SEQ ID NO: 2588482 - DNA, 25 bp, Homo sapien
aatggtcccagtttgcagtgtcttg

SEQ ID NO: 2588483 - DNA, 25 bp, Homo sapien
cagtgtcttgtatggacgtgatcca

SEQ ID NO: 2588484 - DNA, 25 bp, Homo sapien
ttcttaggagtggaagcaatggtcc

SEQ ID NO: 2588485 - DNA, 25 bp, Homo sapien
gaaaaccagcgtctaccagaatgcc

SEQ ID NO: 2588486 - DNA, 25 bp, Homo sapien
gcttccatgtcctcgctagttgccg

SEQ ID NO: 2588487 - DNA, 25 bp, Homo sapien
caatgaagaagcgtagagagaggca

SEQ ID NO: 2588488 - DNA, 25 bp, Homo sapien
gattttacggaagcttcctgatgtc

SEQ ID NO: 2588489 - DNA, 25 bp, Homo sapien
ggcttaggtgggacctctcctggaa

SEQ ID NO: 2588490 - DNA, 25 bp, Homo sapien
cccaggaaggctccctggaggaaga

SEQ ID NO: 2588491 - DNA, 25 bp, Homo sapien
gaggaagaggaggagccgccacccc

SEQ ID NO: 2588492 - DNA, 25 bp, Homo sapien
gaggggcccaggaaggctccctgga

SEQ ID NO: 2588493 - DNA, 25 bp, Homo sapien
ggaagaggaggagccgccaccccat

SEQ ID NO: 2588494 - DNA, 25 bp, Homo sapien
aaaatttgccaggaatttcactgcc

SEQ ID NO: 2588495 - DNA, 25 bp, Homo sapien
ccaacggcaccacggagctctgtga

SEQ ID NO: 2588496 - DNA, 25 bp, Homo sapien
acggcaccacggagctctgtgacct

SEQ ID NO: 2588497 - DNA, 25 bp, Homo sapien
acctcactggtaggcccctctgttg

SEQ ID NO: 2588498 - DNA, 25 bp, Homo sapien
acgctgctcacaaacgtggcccggg

SEQ ID NO: 2588499 - DNA, 25 bp, Homo sapien
cctctggcagccgagagctctcggg

SEQ ID NO: 2588500 - DNA, 25 bp, Homo sapien
ggcagccgagagctctcgggtctca

SEQ ID NO: 2588501 - DNA, 25 bp, Homo sapien
tctcgggtctcacgctgctcacaaa

SEQ ID NO: 2588502 - DNA, 25 bp, Homo sapien
catggcctccacgggcgggggctct

SEQ ID NO: 2588503 - DNA, 25 bp, Homo sapien
ccacagagtgcttcggggtgtagct

SEQ ID NO: 2588504 - DNA, 25 bp, Homo sapien
ctgaaggccacagagtgcttcgggg

SEQ ID NO: 2588505 - DNA, 25 bp, Homo sapien
tgcttcggggtgtagctggacaggc

SEQ ID NO: 2588506 - DNA, 25 bp, Homo sapien
agggctggctcgctgcggaagtccg

SEQ ID NO: 2588507 - DNA, 25 bp, Homo sapien
aagtccgagaggtcattctgactgg

SEQ ID NO: 2588508 - DNA, 25 bp, Homo sapien
tgcggaagtccgagaggtcattctg

SEQ ID NO: 2588509 - DNA, 25 bp, Homo sapien
ctcgctgcggaagtccgagaggtca

SEQ ID NO: 2588510 - DNA, 25 bp, Homo sapien
gaggcaccctagctgcttccagggc

SEQ ID NO: 2588511 - DNA, 25 bp, Homo sapien
gggatacagtgaggccaaacaaggc

SEQ ID NO: 2588512 - DNA, 25 bp, Homo sapien
cagaagcgggtgcagtagtccctgg

SEQ ID NO: 2588513 - DNA, 25 bp, Homo sapien
tggctactgcccagcttccgggact

SEQ ID NO: 2588514 - DNA, 25 bp, Homo sapien
aggcaggaaagacgccactcatcac

SEQ ID NO: 2588515 - DNA, 25 bp, Homo sapien
caggaaagacgccactcatcacaga

SEQ ID NO: 2588516 - DNA, 25 bp, Homo sapien
tagggtcctgcagaggacaagtagc

SEQ ID NO: 2588517 - DNA, 25 bp, Homo sapien
cagaggcaggaaagacgccactcat

SEQ ID NO: 2588518 - DNA, 25 bp, Homo sapien
ctgtccgggtgcccctctgggtgcg

SEQ ID NO: 2588519 - DNA, 25 bp, Homo sapien
tgtccgggtgcccctctgggtgcgg

SEQ ID NO: 2588520 - DNA, 25 bp, Homo sapien
gtccgggtgcccctctgggtgcggc

SEQ ID NO: 2588521 - DNA, 25 bp, Homo sapien
tgggttccgcacgtggcaggtgcac

SEQ ID NO: 2588522 - DNA, 25 bp, Homo sapien
tactgccggaaggtctggtagcagc

SEQ ID NO: 2588523 - DNA, 25 bp, Homo sapien
ccaggccgtagtcggtgaagagcac

SEQ ID NO: 2588524 - DNA, 25 bp, Homo sapien
ctcaggatggacgtgttgacagcca

SEQ ID NO: 2588525 - DNA, 25 bp, Homo sapien
aagagttttaatggcaaagttggct

SEQ ID NO: 2588526 - DNA, 25 bp, Homo sapien
ccctgaagaagcagcgagcgaggct

SEQ ID NO: 2588527 - DNA, 25 bp, Homo sapien
tggctgcagcgacaatgccactcgg

SEQ ID NO: 2588528 - DNA, 25 bp, Homo sapien
aatggcaaagttggctgcagcgaca

SEQ ID NO: 2588529 - DNA, 25 bp, Homo sapien
gaacccctctgacacttggaaactg

SEQ ID NO: 2588530 - DNA, 25 bp, Homo sapien
gagaggctctctagtctgaaggcac

SEQ ID NO: 2588531 - DNA, 25 bp, Homo sapien
gaataagagcacgattagagtcctg

SEQ ID NO: 2588532 - DNA, 25 bp, Homo sapien
ggtttgatgccagtcaggtgccaca

SEQ ID NO: 2588533 - DNA, 25 bp, Homo sapien
cgccgggcctcgcgacccagtctct

SEQ ID NO: 2588534 - DNA, 25 bp, Homo sapien
ccgggcctcgcgacccagtctctcc

SEQ ID NO: 2588535 - DNA, 25 bp, Homo sapien
gccgggcctcgcgacccagtctctc

SEQ ID NO: 2588536 - DNA, 25 bp, Homo sapien
ggcgccgggcctcgcgacccagtct

SEQ ID NO: 2588537 - DNA, 25 bp, Homo sapien
tccgccataagggaaagacccgctc

SEQ ID NO: 2588538 - DNA, 25 bp, Homo sapien
gagggatttatgtgagcagccagac

SEQ ID NO: 2588539 - DNA, 25 bp, Homo sapien
gctctcagagaaaatgcgacgcctt

SEQ ID NO: 2588540 - DNA, 25 bp, Homo sapien
cacgtaagacctccggctgtaagga

SEQ ID NO: 2588541 - DNA, 25 bp, Homo sapien
gcacaaacaaatatcaccaggggct

SEQ ID NO: 2588542 - DNA, 25 bp, Homo sapien
caaatatcaccaggggctcgttaat

SEQ ID NO: 2588543 - DNA, 25 bp, Homo sapien
tatcaccaggggctcgttaatcaga

SEQ ID NO: 2588544 - DNA, 25 bp, Homo sapien
ccaggggctcgttaatcagattcac

SEQ ID NO: 2588545 - DNA, 25 bp, Homo sapien
ctagacgccaggcaatgaaaacggg

SEQ ID NO: 2588546 - DNA, 25 bp, Homo sapien
ggtgcatgagataaaggagagctat

SEQ ID NO: 2588547 - DNA, 25 bp, Homo sapien
aaggtgcatgagataaaggagagct

SEQ ID NO: 2588548 - DNA, 25 bp, Homo sapien
ctgaaggtgcatgagataaaggaga

SEQ ID NO: 2588549 - DNA, 25 bp, Homo sapien
gaaggtgcatgagataaaggagagc

SEQ ID NO: 2588550 - DNA, 25 bp, Homo sapien
tattagagagggcaaccggagcccc

SEQ ID NO: 2588551 - DNA, 25 bp, Homo sapien
acttcaatgtctccaggttcccttc

SEQ ID NO: 2588552 - DNA, 25 bp, Homo sapien
tggagcgctagtcctactgcacttc

SEQ ID NO: 2588553 - DNA, 25 bp, Homo sapien
ttccttggagcgctagtcctactgc

SEQ ID NO: 2588554 - DNA, 25 bp, Homo sapien
actgcacttctccacttcaatgtct

SEQ ID NO: 2588555 - DNA, 25 bp, Homo sapien
actctctcagttgctgatctcctgt

SEQ ID NO: 2588556 - DNA, 25 bp, Homo sapien
ccggcccgcactcaagacattctta

SEQ ID NO: 2588557 - DNA, 25 bp, Homo sapien
gcagccggcccgcactcaagacatt

SEQ ID NO: 2588558 - DNA, 25 bp, Homo sapien
tccactcactctctcagttgctgat

SEQ ID NO: 2588559 - DNA, 25 bp, Homo sapien
ctctggagtcccgagaggtgctcag

SEQ ID NO: 2588560 - DNA, 25 bp, Homo sapien
ccaagccacacatccgtgatgacca

SEQ ID NO: 2588561 - DNA, 25 bp, Homo sapien
ttggctctggagtcccgagaggtgc

SEQ ID NO: 2588562 - DNA, 25 bp, Homo sapien
caagccacacatccgtgatgaccat

SEQ ID NO: 2588563 - DNA, 25 bp, Homo sapien
aaccgcgtccgctgcctctctttgt

SEQ ID NO: 2588564 - DNA, 25 bp, Homo sapien
accgcgtccgctgcctctctttgtc

SEQ ID NO: 2588565 - DNA, 25 bp, Homo sapien
gcggcaggaaccgcgtccgctgcct

SEQ ID NO: 2588566 - DNA, 25 bp, Homo sapien
ggcaggaaccgcgtccgctgcctct

SEQ ID NO: 2588567 - DNA, 25 bp, Homo sapien
tgcatattggggagcacccctccac

SEQ ID NO: 2588568 - DNA, 25 bp, Homo sapien
ccctccgtggcccccttgagagctc

SEQ ID NO: 2588569 - DNA, 25 bp, Homo sapien
ctgcatattggggagcacccctcca

SEQ ID NO: 2588570 - DNA, 25 bp, Homo sapien
ctccaccctccgtggcccccttgag

SEQ ID NO: 2588571 - DNA, 25 bp, Homo sapien
agcaccagggaccagcaggcagccc

SEQ ID NO: 2588572 - DNA, 25 bp, Homo sapien
gccctggtctgaggtccagagacac

SEQ ID NO: 2588573 - DNA, 25 bp, Homo sapien
ctggtctgaggtccagagacacagc

SEQ ID NO: 2588574 - DNA, 25 bp, Homo sapien
ggtctgaggtccagagacacagcca

SEQ ID NO: 2588575 - DNA, 25 bp, Homo sapien
cctttgtttgccgccgccacggatg

SEQ ID NO: 2588576 - DNA, 25 bp, Homo sapien
gccgccacggatgccgacggcactt

SEQ ID NO: 2588577 - DNA, 25 bp, Homo sapien
ccctttgtttgccgccgccacggat

SEQ ID NO: 2588578 - DNA, 25 bp, Homo sapien
gatgccgacggcactttctcccagg

SEQ ID NO: 2588579 - DNA, 25 bp, Homo sapien
tggacgccaacgtctccgtcctcac

SEQ ID NO: 2588580 - DNA, 25 bp, Homo sapien
acacgtggacgccaacgtctccgtc

SEQ ID NO: 2588581 - DNA, 25 bp, Homo sapien
tcagggctgcgtgattcccacggga

SEQ ID NO: 2588582 - DNA, 25 bp, Homo sapien
tctgcacacgtggacgccaacgtct

SEQ ID NO: 2588583 - DNA, 25 bp, Homo sapien
aggcaggtagtgcagcctcttagtt

SEQ ID NO: 2588584 - DNA, 25 bp, Homo sapien
agcctcttagtttcgaaaggctcag

SEQ ID NO: 2588585 - DNA, 25 bp, Homo sapien
gctgcaatgctggaggcaggtagtg

SEQ ID NO: 2588586 - DNA, 25 bp, Homo sapien
tagtgcagcctcttagtttcgaaag

SEQ ID NO: 2588587 - DNA, 25 bp, Homo sapien
ccagaggccaggtcacaggacctgc

SEQ ID NO: 2588588 - DNA, 25 bp, Homo sapien
cagaggccaggtcacaggacctgcc

SEQ ID NO: 2588589 - DNA, 25 bp, Homo sapien
agaggccaggtcacaggacctgcca

SEQ ID NO: 2588590 - DNA, 25 bp, Homo sapien
tcccgggcggaagtgccctgtgtca

SEQ ID NO: 2588591 - DNA, 25 bp, Homo sapien
gggctcgtggcccagcccgcacagt

SEQ ID NO: 2588592 - DNA, 25 bp, Homo sapien
tggcacggcgctgttggcacccagt

SEQ ID NO: 2588593 - DNA, 25 bp, Homo sapien
agccacacgcccacgggctcgtggc

SEQ ID NO: 2588594 - DNA, 25 bp, Homo sapien
tggagggtgggcgtccactcagacc

SEQ ID NO: 2588595 - DNA, 25 bp, Homo sapien
ctggagggtgggcgtccactcagac

SEQ ID NO: 2588596 - DNA, 25 bp, Homo sapien
gagggtgggcgtccactcagaccca

SEQ ID NO: 2588597 - DNA, 25 bp, Homo sapien
agggtgggcgtccactcagacccac

SEQ ID NO: 2588598 - DNA, 25 bp, Homo sapien
tcgccctgtccagcaaggtgtcagg

SEQ ID NO: 2588599 - DNA, 25 bp, Homo sapien
aggttggtgcctgattgcttcttcc

SEQ ID NO: 2588600 - DNA, 25 bp, Homo sapien
agtccccaccatcggttgggcggct

SEQ ID NO: 2588601 - DNA, 25 bp, Homo sapien
ctgcaaggcactctggggacagcgt

SEQ ID NO: 2588602 - DNA, 25 bp, Homo sapien
ttctcgccgccgacgctgcccgagg

SEQ ID NO: 2588603 - DNA, 25 bp, Homo sapien
cagggaccttctcgccgccgacgct

SEQ ID NO: 2588604 - DNA, 25 bp, Homo sapien
ctgcccgaggcccatcccccacact

SEQ ID NO: 2588605 - DNA, 25 bp, Homo sapien
cccagggaccttctcgccgccgacg

SEQ ID NO: 2588606 - DNA, 25 bp, Homo sapien
ggtgggcaaaggcagccaagcccca

SEQ ID NO: 2588607 - DNA, 25 bp, Homo sapien
tgggaggaggtgggcaaaggcagcc

SEQ ID NO: 2588608 - DNA, 25 bp, Homo sapien
tgggcaaaggcagccaagccccagg

SEQ ID NO: 2588609 - DNA, 25 bp, Homo sapien
ggaggtgggcaaaggcagccaagcc

SEQ ID NO: 2588610 - DNA, 25 bp, Homo sapien
aggcccacacgcgtggtctctccgg

SEQ ID NO: 2588611 - DNA, 25 bp, Homo sapien
tcaggcccacacgcgtggtctctcc

SEQ ID NO: 2588612 - DNA, 25 bp, Homo sapien
gcccacacgcgtggtctctccggcg

SEQ ID NO: 2588613 - DNA, 25 bp, Homo sapien
cacacgcgtggtctctccggcggtg

SEQ ID NO: 2588614 - DNA, 25 bp, Homo sapien
ctctggagtcccgagaggtgctcag

SEQ ID NO: 2588615 - DNA, 25 bp, Homo sapien
ccaagccacacatccgtgatgacca

SEQ ID NO: 2588616 - DNA, 25 bp, Homo sapien
ttggctctggagtcccgagaggtgc

SEQ ID NO: 2588617 - DNA, 25 bp, Homo sapien
caagccacacatccgtgatgaccat

SEQ ID NO: 2588618 - DNA, 25 bp, Homo sapien
aaccgcgtccgctgcctctctttgt

SEQ ID NO: 2588619 - DNA, 25 bp, Homo sapien
ggcaggaaccgcgtccgctgcctct

SEQ ID NO: 2588620 - DNA, 25 bp, Homo sapien
accgcgtccgctgcctctctttgtc

SEQ ID NO: 2588621 - DNA, 25 bp, Homo sapien
gcggcaggaaccgcgtccgctgcct

SEQ ID NO: 2588622 - DNA, 25 bp, Homo sapien
aggtgtcggcagagaatccctggtc

SEQ ID NO: 2588623 - DNA, 25 bp, Homo sapien
ccaccctagacagtggtgggtctgg

SEQ ID NO: 2588624 - DNA, 25 bp, Homo sapien
ttggcagagaatcccttgtgggtcc

SEQ ID NO: 2588625 - DNA, 25 bp, Homo sapien
agatgttggcagagaatcccttgtg

SEQ ID NO: 2588626 - DNA, 25 bp, Homo sapien
gaaaataattctccgtggtggctct

SEQ ID NO: 2588627 - DNA, 25 bp, Homo sapien
acagccctcttctcccgagtgaaaa

SEQ ID NO: 2588628 - DNA, 25 bp, Homo sapien
tgctcttagaagaacgaaaataatt

SEQ ID NO: 2588629 - DNA, 25 bp, Homo sapien
tcatgcaggcatggcaaccgtactg

SEQ ID NO: 2588630 - DNA, 25 bp, Homo sapien
atgtctgttagcctctgcgcctccg

SEQ ID NO: 2588631 - DNA, 25 bp, Homo sapien
cagtgagcgccctggaaggaaacgc

SEQ ID NO: 2588632 - DNA, 25 bp, Homo sapien
gggcactgactgagtccccggcacg

SEQ ID NO: 2588633 - DNA, 25 bp, Homo sapien
tgcgcctccggaaccttcacagaat

SEQ ID NO: 2588634 - DNA, 25 bp, Homo sapien
cctccaccacgagggcaggttcaga

SEQ ID NO: 2588635 - DNA, 25 bp, Homo sapien
ctcatggggaaacggcttctcgggc

SEQ ID NO: 2588636 - DNA, 25 bp, Homo sapien
ggcccgagcggtcaaagtcctcact

SEQ ID NO: 2588637 - DNA, 25 bp, Homo sapien
gctgcgtccagtaagtctgggtccc

SEQ ID NO: 2588638 - DNA, 25 bp, Homo sapien
gctctgagcctctaagcacatggat

SEQ ID NO: 2588639 - DNA, 25 bp, Homo sapien
tctgagcctctaagcacatggatag

SEQ ID NO: 2588640 - DNA, 25 bp, Homo sapien
ggaaggctatcattgcatttctttt

SEQ ID NO: 2588641 - DNA, 25 bp, Homo sapien
tctgctctgagcctctaagcacatg

SEQ ID NO: 2588642 - DNA, 25 bp, Homo sapien
catcagctcggtggcttcttgggcc

SEQ ID NO: 2588643 - DNA, 25 bp, Homo sapien
tccatcagctcggtggcttcttggg

SEQ ID NO: 2588644 - DNA, 25 bp, Homo sapien
tttgtccatcagctcggtggcttct

SEQ ID NO: 2588645 - DNA, 25 bp, Homo sapien
tgtccatcagctcggtggcttcttg

SEQ ID NO: 2588646 - DNA, 25 bp, Homo sapien
gcctgaggccccgtcctgccaccgc

SEQ ID NO: 2588647 - DNA, 25 bp, Homo sapien
gacacagctgtcgccagcactgcca

SEQ ID NO: 2588648 - DNA, 25 bp, Homo sapien
cacagctgtcgccagcactgccagg

SEQ ID NO: 2588649 - DNA, 25 bp, Homo sapien
gaggccccgtcctgccaccgccaga

SEQ ID NO: 2588650 - DNA, 25 bp, Homo sapien
agtccccagggtggtaaaggcactg

SEQ ID NO: 2588651 - DNA, 25 bp, Homo sapien
tgttatcttatctccacaggccggg

SEQ ID NO: 2588652 - DNA, 25 bp, Homo sapien
cagaactgactgttgggcagagact

SEQ ID NO: 2588653 - DNA, 25 bp, Homo sapien
gaggcctccctggtcaggaagctgc

SEQ ID NO: 2588654 - DNA, 25 bp, Homo sapien
gacgccatggtggagcctgggcgcc

SEQ ID NO: 2588655 - DNA, 25 bp, Homo sapien
cctgggcgccccacggtgttttatg

SEQ ID NO: 2588656 - DNA, 25 bp, Homo sapien
ctgggcgccccacggtgttttatgg

SEQ ID NO: 2588657 - DNA, 25 bp, Homo sapien
tgcagagacgccatggtggagcctg

SEQ ID NO: 2588658 - DNA, 25 bp, Homo sapien
acttgctccgtcctcctacagtgga

SEQ ID NO: 2588659 - DNA, 25 bp, Homo sapien
tggtgggacggttctgagcgcagac

SEQ ID NO: 2588660 - DNA, 25 bp, Homo sapien
tctgagcgcagacgggaacactggc

SEQ ID NO: 2588661 - DNA, 25 bp, Homo sapien
agcacactgtgcacgatggtgggac

SEQ ID NO: 2588662 - DNA, 25 bp, Homo sapien
tggccacgtggtggggtacgtcctc

SEQ ID NO: 2588663 - DNA, 25 bp, Homo sapien
agcacccagaatgcggggccagtca

SEQ ID NO: 2588664 - DNA, 25 bp, Homo sapien
cccagaatgcggggccagtcacact

SEQ ID NO: 2588665 - DNA, 25 bp, Homo sapien
cagcacccagaatgcggggccagtc

SEQ ID NO: 2588666 - DNA, 25 bp, Homo sapien
gtggatctcgatttggagaacttaa

SEQ ID NO: 2588667 - DNA, 25 bp, Homo sapien
tggaaaggtggatctcgatttggag

SEQ ID NO: 2588668 - DNA, 25 bp, Homo sapien
aaggtggatctcgatttggagaact

SEQ ID NO: 2588669 - DNA, 25 bp, Homo sapien
gaaaggtggatctcgatttggagaa

SEQ ID NO: 2588670 - DNA, 25 bp, Homo sapien
gagtaggagggccggcatcaccaac

SEQ ID NO: 2588671 - DNA, 25 bp, Homo sapien
gcaaagaccagcaacactgactggg

SEQ ID NO: 2588672 - DNA, 25 bp, Homo sapien
aggagggccggcatcaccaacttcc

SEQ ID NO: 2588673 - DNA, 25 bp, Homo sapien
agggcaaagaccagcaacactgact

SEQ ID NO: 2588674 - DNA, 25 bp, Homo sapien
cgtgttgcgcggctgggtgttgtct

SEQ ID NO: 2588675 - DNA, 25 bp, Homo sapien
agggcacagcgtcaaggcagggagt

SEQ ID NO: 2588676 - DNA, 25 bp, Homo sapien
ccctggctttgactctcaaggctga

SEQ ID NO: 2588677 - DNA, 25 bp, Homo sapien
ttctgtaggatgctagggctgtgcc

SEQ ID NO: 2588678 - DNA, 25 bp, Homo sapien
tgagcaccatgtgtgcacggctggc

SEQ ID NO: 2588679 - DNA, 25 bp, Homo sapien
cagttgcgtgggctgtgagcaccat

SEQ ID NO: 2588680 - DNA, 25 bp, Homo sapien
ttcttcgttcagacagaagccgccc

SEQ ID NO: 2588681 - DNA, 25 bp, Homo sapien
caattgtgtgggatgagtgtcagca

SEQ ID NO: 2588682 - DNA, 25 bp, Homo sapien
gtgtgggcaccaggctctggtgctg

SEQ ID NO: 2588683 - DNA, 25 bp, Homo sapien
ggctgggggggaagccagtgtgggc

SEQ ID NO: 2588684 - DNA, 25 bp, Homo sapien
caccaggctctggtgctgggcaggg

SEQ ID NO: 2588685 - DNA, 25 bp, Homo sapien
tgggggggaagccagtgtgggcacc

SEQ ID NO: 2588686 - DNA, 25 bp, Homo sapien
catgcaggtcaccacagcgcgtggg

SEQ ID NO: 2588687 - DNA, 25 bp, Homo sapien
cactgccgcggggtctgatgctgct

SEQ ID NO: 2588688 - DNA, 25 bp, Homo sapien
ctgtgctgatagcaggtgcctggac

SEQ ID NO: 2588689 - DNA, 25 bp, Homo sapien
gcggccgggctcttctacactcact

SEQ ID NO: 2588690 - DNA, 25 bp, Homo sapien
tgagcacaggcagatgtgggtggaa

SEQ ID NO: 2588691 - DNA, 25 bp, Homo sapien
gagcacaggcagatgtgggtggaat

SEQ ID NO: 2588692 - DNA, 25 bp, Homo sapien
cagctgagcacaggcagatgtgggt

SEQ ID NO: 2588693 - DNA, 25 bp, Homo sapien
ctgcagctgagcacaggcagatgtg

SEQ ID NO: 2588694 - DNA, 25 bp, Homo sapien
gcgagccgaggtggagggcacacgc

SEQ ID NO: 2588695 - DNA, 25 bp, Homo sapien
agacacgggcggtcctctgcggcga

SEQ ID NO: 2588696 - DNA, 25 bp, Homo sapien
gcttggggtctcgttgccgcctctg

SEQ ID NO: 2588697 - DNA, 25 bp, Homo sapien
gtctcgttgccgcctctgtccttat

SEQ ID NO: 2588698 - DNA, 25 bp, Homo sapien
tgtctctgagtggcgtccgcctcat

SEQ ID NO: 2588699 - DNA, 25 bp, Homo sapien
tgcccctctccatgccgagcaggcc

SEQ ID NO: 2588700 - DNA, 25 bp, Homo sapien
aggggggtaaggagaagctgccgag

SEQ ID NO: 2588701 - DNA, 25 bp, Homo sapien
cctctccatgccgagcaggccaccc

SEQ ID NO: 2588702 - DNA, 25 bp, Homo sapien
gggggtaaggagaagctgccgaggc

SEQ ID NO: 2588703 - DNA, 25 bp, Homo sapien
ctgaggaagggcggcggccgaggcc

SEQ ID NO: 2588704 - DNA, 25 bp, Homo sapien
gcatgccgctctcgtaatgcaccgt

SEQ ID NO: 2588705 - DNA, 25 bp, Homo sapien
caccgtgaacgtgcgggttcctgga

SEQ ID NO: 2588706 - DNA, 25 bp, Homo sapien
ggagaggccacttttcctacgaagc

SEQ ID NO: 2588707 - DNA, 25 bp, Homo sapien
gaagctccgtgatgagcgcatgccg

SEQ ID NO: 2588708 - DNA, 25 bp, Homo sapien
tgtttctgcagatcctcgttcctag

SEQ ID NO: 2588709 - DNA, 25 bp, Homo sapien
ctgagcctgatggtgccgagtctcc

SEQ ID NO: 2588710 - DNA, 25 bp, Homo sapien
cgagcgccaccgcatgggtgagtct

SEQ ID NO: 2588711 - DNA, 25 bp, Homo sapien
ggacccaggagatcccgctggtgac

SEQ ID NO: 2588712 - DNA, 25 bp, Homo sapien
cctgcaggtgtgtgtcccccagtgg

SEQ ID NO: 2588713 - DNA, 25 bp, Homo sapien
tgtgtcccccagtggccccctcggc

SEQ ID NO: 2588714 - DNA, 25 bp, Homo sapien
tgtcccccagtggccccctcggcat

SEQ ID NO: 2588715 - DNA, 25 bp, Homo sapien
gcaggtgtgtgtcccccagtggccc

SEQ ID NO: 2588716 - DNA, 25 bp, Homo sapien
tggatctgtcctccggctttcgtgg

SEQ ID NO: 2588717 - DNA, 25 bp, Homo sapien
tggtctggatctggcgagaggctct

SEQ ID NO: 2588718 - DNA, 25 bp, Homo sapien
ttcacgggcttggtctggatctgtc

SEQ ID NO: 2588719 - DNA, 25 bp, Homo sapien
tcagcatggtcttcggctgtggccg

SEQ ID NO: 2588720 - DNA, 25 bp, Homo sapien
catgaccgtcaggagaatgacccct

SEQ ID NO: 2588721 - DNA, 25 bp, Homo sapien
gaccgtcaggagaatgacccctgcc

SEQ ID NO: 2588722 - DNA, 25 bp, Homo sapien
cgtcaggagaatgacccctgcccca

SEQ ID NO: 2588723 - DNA, 25 bp, Homo sapien
tcaggagaatgacccctgccccaca

SEQ ID NO: 2588724 - DNA, 25 bp, Homo sapien
catgtccgtcctgctgggatccggc

SEQ ID NO: 2588725 - DNA, 25 bp, Homo sapien
cagggggcatcagatttctcagcaa

SEQ ID NO: 2588726 - DNA, 25 bp, Homo sapien
aagatgctggcactcgagtcagggg

SEQ ID NO: 2588727 - DNA, 25 bp, Homo sapien
tgtccgtcctgctgggatccggcca

SEQ ID NO: 2588728 - DNA, 25 bp, Homo sapien
ctggggcggccttcatggggtgctg

SEQ ID NO: 2588729 - DNA, 25 bp, Homo sapien
atggggtgctgccagaccctgcggc

SEQ ID NO: 2588730 - DNA, 25 bp, Homo sapien
gctgccagaccctgcggcccccgac

SEQ ID NO: 2588731 - DNA, 25 bp, Homo sapien
ggggtgctgccagaccctgcggccc

SEQ ID NO: 2588732 - DNA, 25 bp, Homo sapien
taggggctgaggcagatgaggtggc

SEQ ID NO: 2588733 - DNA, 25 bp, Homo sapien
ctgaggggataggtaggggctgagg

SEQ ID NO: 2588734 - DNA, 25 bp, Homo sapien
aggggctgaggcagatgaggtggca

SEQ ID NO: 2588735 - DNA, 25 bp, Homo sapien
aggtaggggctgaggcagatgaggt

SEQ ID NO: 2588736 - DNA, 25 bp, Homo sapien
cctcccagcacccggctcgcctggg

SEQ ID NO: 2588737 - DNA, 25 bp, Homo sapien
actgtgtcccctcgagcacctggga

SEQ ID NO: 2588738 - DNA, 25 bp, Homo sapien
tgtgtcccctcgagcacctgggagg

SEQ ID NO: 2588739 - DNA, 25 bp, Homo sapien
ctcgcctgggggatagcactgtgtc

SEQ ID NO: 2588740 - DNA, 25 bp, Homo sapien
ctgccgtttgggacaagacaaacag

SEQ ID NO: 2588741 - DNA, 25 bp, Homo sapien
tggagcggcctcctgtcagggcctc

SEQ ID NO: 2588742 - DNA, 25 bp, Homo sapien
aaacagaggtggagcggcctcctgt

SEQ ID NO: 2588743 - DNA, 25 bp, Homo sapien
caagacaaacagaggtggagcggcc

SEQ ID NO: 2588744 - DNA, 25 bp, Homo sapien
aggggtgcgttggtgcaggaagcca

SEQ ID NO: 2588745 - DNA, 25 bp, Homo sapien
ggaagccaagtccaccctccagacg

SEQ ID NO: 2588746 - DNA, 25 bp, Homo sapien
cactaatgccgctgccgtctggggg

SEQ ID NO: 2588747 - DNA, 25 bp, Homo sapien
acggggcacgccaggggcaggagtg

SEQ ID NO: 2588748 - DNA, 25 bp, Homo sapien
gggggacctgctgcctttattcatt

SEQ ID NO: 2588749 - DNA, 25 bp, Homo sapien
gggacctgctgcctttattcatttg

SEQ ID NO: 2588750 - DNA, 25 bp, Homo sapien
ggacctgctgcctttattcatttgc

SEQ ID NO: 2588751 - DNA, 25 bp, Homo sapien
gtgggggacctgctgcctttattca

SEQ ID NO: 2588752 - DNA, 25 bp, Homo sapien
ctcggagcctgacggcctggctggg

SEQ ID NO: 2588753 - DNA, 25 bp, Homo sapien
ctctctcggagcctgacggcctggc

SEQ ID NO: 2588754 - DNA, 25 bp, Homo sapien
tctctcggagcctgacggcctggct

SEQ ID NO: 2588755 - DNA, 25 bp, Homo sapien
ctctcggagcctgacggcctggctg

SEQ ID NO: 2588756 - DNA, 25 bp, Homo sapien
cgctccggtgcctctgtgaacgggc

SEQ ID NO: 2588757 - DNA, 25 bp, Homo sapien
gtgcccgggactggctgctccgcag

SEQ ID NO: 2588758 - DNA, 25 bp, Homo sapien
gtttgctggcgagcgttctggcctc

SEQ ID NO: 2588759 - DNA, 25 bp, Homo sapien
agatgcggggccttcccggtcacag

SEQ ID NO: 2588760 - DNA, 25 bp, Homo sapien
tagtaaaacacccacgcagcgcagt

SEQ ID NO: 2588761 - DNA, 25 bp, Homo sapien
cacgcagcgcagtcgaacgtgagga

SEQ ID NO: 2588762 - DNA, 25 bp, Homo sapien
acccacgcagcgcagtcgaacgtga

SEQ ID NO: 2588763 - DNA, 25 bp, Homo sapien
aaaacacccacgcagcgcagtcgaa

SEQ ID NO: 2588764 - DNA, 25 bp, Homo sapien
gccacagccaatgaccgaaatctgc

SEQ ID NO: 2588765 - DNA, 25 bp, Homo sapien
acctgctcagcgcacagggcagcca

SEQ ID NO: 2588766 - DNA, 25 bp, Homo sapien
agtcccctgagacgcctggacctca

SEQ ID NO: 2588767 - DNA, 25 bp, Homo sapien
gccaatgaccgaaatctgcactgag

SEQ ID NO: 2588768 - DNA, 25 bp, Homo sapien
ggtgcacagagaagcttgccgcaga

SEQ ID NO: 2588769 - DNA, 25 bp, Homo sapien
tgcagctgtcccatggtacatccat

SEQ ID NO: 2588770 - DNA, 25 bp, Homo sapien
gtgcacagagaagcttgccgcagag

SEQ ID NO: 2588771 - DNA, 25 bp, Homo sapien
tgtgttgtgggcagtgagctgcagg

SEQ ID NO: 2588772 - DNA, 25 bp, Homo sapien
gggctgacgagggtccggatgcctg

SEQ ID NO: 2588773 - DNA, 25 bp, Homo sapien
cagcagccgggctgacgagggtccg

SEQ ID NO: 2588774 - DNA, 25 bp, Homo sapien
gaccagcgaggttccgggcgcctgc

SEQ ID NO: 2588775 - DNA, 25 bp, Homo sapien
cagccgggctgacgagggtccggat

SEQ ID NO: 2588776 - DNA, 25 bp, Homo sapien
aaccaggtcctggaaccgcctggtg

SEQ ID NO: 2588777 - DNA, 25 bp, Homo sapien
cgacccttggtgttgatccttgtgt

SEQ ID NO: 2588778 - DNA, 25 bp, Homo sapien
ttggtgttgatccttgtgtcacggg

SEQ ID NO: 2588779 - DNA, 25 bp, Homo sapien
ggtgccacctcggtgtgacctggat

SEQ ID NO: 2588780 - DNA, 25 bp, Homo sapien
tgcggcgcccgcgtgagtccgtggc

SEQ ID NO: 2588781 - DNA, 25 bp, Homo sapien
tcggtcgtcacgagggtcgccctct

SEQ ID NO: 2588782 - DNA, 25 bp, Homo sapien
gctttgcccgggagctcggtcgtca

SEQ ID NO: 2588783 - DNA, 25 bp, Homo sapien
tctgtgcgagtccagacccgtgtgt

SEQ ID NO: 2588784 - DNA, 25 bp, Homo sapien
acgacaagccgtgggaaactggcca

SEQ ID NO: 2588785 - DNA, 25 bp, Homo sapien
tttcacgacaagccgtgggaaactg

SEQ ID NO: 2588786 - DNA, 25 bp, Homo sapien
cgacaagccgtgggaaactggccat

SEQ ID NO: 2588787 - DNA, 25 bp, Homo sapien
tcacgacaagccgtgggaaactggc

SEQ ID NO: 2588788 - DNA, 25 bp, Homo sapien
agagcccgtggtcgctgtgttcgac

SEQ ID NO: 2588789 - DNA, 25 bp, Homo sapien
tgtcggtgatgtcgcctgcgccgac

SEQ ID NO: 2588790 - DNA, 25 bp, Homo sapien
cgttggctccgtgcagatgcggtca

SEQ ID NO: 2588791 - DNA, 25 bp, Homo sapien
cgacctcctgttccgttcgtggcgg

SEQ ID NO: 2588792 - DNA, 25 bp, Homo sapien
gcggcacggcctgcgcttgaaggag

SEQ ID NO: 2588793 - DNA, 25 bp, Homo sapien
gcccagcgcagtggccggtgtgccc

SEQ ID NO: 2588794 - DNA, 25 bp, Homo sapien
accggcccgcggcacggcctgcgct

SEQ ID NO: 2588795 - DNA, 25 bp, Homo sapien
agtggccggtgtgcccggggcgcac

SEQ ID NO: 2588796 - DNA, 25 bp, Homo sapien
tttcttcttgaaagcattgattatc

SEQ ID NO: 2588797 - DNA, 25 bp, Homo sapien
cttcttgaaagcattgattatcaaa

SEQ ID NO: 2588798 - DNA, 25 bp, Homo sapien
tcttgaaagcattgattatcaaaat

SEQ ID NO: 2588799 - DNA, 25 bp, Homo sapien
tcatttgccccccttttgatcaaaa

SEQ ID NO: 2588800 - DNA, 25 bp, Homo sapien
agaggtgcgggcgccaagcgccagg

SEQ ID NO: 2588801 - DNA, 25 bp, Homo sapien
cggggtctccgaggcgggcagaggt

SEQ ID NO: 2588802 - DNA, 25 bp, Homo sapien
cgggcagaggtgcgggcgccaagcg

SEQ ID NO: 2588803 - DNA, 25 bp, Homo sapien
tgcggggtctccgaggcgggcagag

SEQ ID NO: 2588804 - DNA, 25 bp, Homo sapien
gtccccacgatccacagcctgcgcg

SEQ ID NO: 2588805 - DNA, 25 bp, Homo sapien
gccgggacgcccgagaagaggtgca

SEQ ID NO: 2588806 - DNA, 25 bp, Homo sapien
aaggcgcgggcccagtccccacgat

SEQ ID NO: 2588807 - DNA, 25 bp, Homo sapien
cccgcgttgaagcacagcctggcgg

SEQ ID NO: 2588808 - DNA, 25 bp, Homo sapien
ttctgcggggtgcttgggactgagc

SEQ ID NO: 2588809 - DNA, 25 bp, Homo sapien
aacgcgagggggcacgagaagggca

SEQ ID NO: 2588810 - DNA, 25 bp, Homo sapien
acgagaagggcaccgggctccgtgc

SEQ ID NO: 2588811 - DNA, 25 bp, Homo sapien
tttgggatgcgcaggaacaggcggc

SEQ ID NO: 2588812 - DNA, 25 bp, Homo sapien
atctgctttcctaagttcccatatt

SEQ ID NO: 2588813 - DNA, 25 bp, Homo sapien
tgcatatgctgtgggttagtcgtat

SEQ ID NO: 2588814 - DNA, 25 bp, Homo sapien
gctttcctaagttcccatattccta

SEQ ID NO: 2588815 - DNA, 25 bp, Homo sapien
catgcatatgctgtgggttagtcgt

SEQ ID NO: 2588816 - DNA, 25 bp, Homo sapien
ccttggtcacggcttggtcaaatgc

SEQ ID NO: 2588817 - DNA, 25 bp, Homo sapien
ggaagaagccaaccgccatgcaggt

SEQ ID NO: 2588818 - DNA, 25 bp, Homo sapien
gttggccactcctcgctggaagaag

SEQ ID NO: 2588819 - DNA, 25 bp, Homo sapien
ctggaagttggccactcctcgctgg

SEQ ID NO: 2588820 - DNA, 25 bp, Homo sapien
cgaggctctcgggactgtgatccac

SEQ ID NO: 2588821 - DNA, 25 bp, Homo sapien
agcccaggtaagcagtgaggacccc

SEQ ID NO: 2588822 - DNA, 25 bp, Homo sapien
gatatttcaggattgcgaggctctc

SEQ ID NO: 2588823 - DNA, 25 bp, Homo sapien
cattcctcctttaggaagggacatg

SEQ ID NO: 2588824 - DNA, 25 bp, Homo sapien
ggatcgtaatccagaaagggacagt

SEQ ID NO: 2588825 - DNA, 25 bp, Homo sapien
gactgcgtatgtggtggtccctgaa

SEQ ID NO: 2588826 - DNA, 25 bp, Homo sapien
gatgaccagttataaagccaggtgc

SEQ ID NO: 2588827 - DNA, 25 bp, Homo sapien
tgctcgtagttctcacacccgtgag

SEQ ID NO: 2588828 - DNA, 25 bp, Homo sapien
tcgagccgcccccaacacctggttc

SEQ ID NO: 2588829 - DNA, 25 bp, Homo sapien
gagccgcccccaacacctggttcca

SEQ ID NO: 2588830 - DNA, 25 bp, Homo sapien
cccgctcgagccgcccccaacacct

SEQ ID NO: 2588831 - DNA, 25 bp, Homo sapien
cagccccgctcgagccgcccccaac

SEQ ID NO: 2588832 - DNA, 25 bp, Homo sapien
agggccagccagaagtcagacagag

SEQ ID NO: 2588833 - DNA, 25 bp, Homo sapien
ctccagggccagccagaagtcagac

SEQ ID NO: 2588834 - DNA, 25 bp, Homo sapien
ccagccagaagtcagacagagcctc

SEQ ID NO: 2588835 - DNA, 25 bp, Homo sapien
tccagggccagccagaagtcagaca

SEQ ID NO: 2588836 - DNA, 25 bp, Homo sapien
gcccagctgcgtgtagtcgatggca

SEQ ID NO: 2588837 - DNA, 25 bp, Homo sapien
gaaccgcaggcccagctgcgtgtag

SEQ ID NO: 2588838 - DNA, 25 bp, Homo sapien
tcccaggcttgcagcttgaaccgca

SEQ ID NO: 2588839 - DNA, 25 bp, Homo sapien
tagtcgatggcagcgtggcccctca

SEQ ID NO: 2588840 - DNA, 25 bp, Homo sapien
agctggcactgtgccgacgccacat

SEQ ID NO: 2588841 - DNA, 25 bp, Homo sapien
tgctggccgcctctgtccagagccc

SEQ ID NO: 2588842 - DNA, 25 bp, Homo sapien
tggacatggcctcccttaggctgct

SEQ ID NO: 2588843 - DNA, 25 bp, Homo sapien
tgtgccgacgccacattgtgtagca

SEQ ID NO: 2588844 - DNA, 25 bp, Homo sapien
cttcccgcaggtcacaggaagcccc

SEQ ID NO: 2588845 - DNA, 25 bp, Homo sapien
ggccatctccctccggaagcttctt

SEQ ID NO: 2588846 - DNA, 25 bp, Homo sapien
acggggtgaccaaccaggcctgcag

SEQ ID NO: 2588847 - DNA, 25 bp, Homo sapien
gaaactgggcactagggccatctcc

SEQ ID NO: 2588848 - DNA, 25 bp, Homo sapien
tgccgtggcggcagtgagccccgtc

SEQ ID NO: 2588849 - DNA, 25 bp, Homo sapien
ctgccgtggcggcagtgagccccgt

SEQ ID NO: 2588850 - DNA, 25 bp, Homo sapien
gccgtggcggcagtgagccccgtct

SEQ ID NO: 2588851 - DNA, 25 bp, Homo sapien
ttggccttgcccaggaaatccacgg

SEQ ID NO: 2588852 - DNA, 25 bp, Homo sapien
atccacgggctccaagtgcttcagg

SEQ ID NO: 2588853 - DNA, 25 bp, Homo sapien
caagtgcttcaggtgccaccggtgg

SEQ ID NO: 2588854 - DNA, 25 bp, Homo sapien
caggtgccaccggtggggccggaag

SEQ ID NO: 2588855 - DNA, 25 bp, Homo sapien
tcctggcccttacggtggcctggac

SEQ ID NO: 2588856 - DNA, 25 bp, Homo sapien
tcctatgcagccggctctagtgggc

SEQ ID NO: 2588857 - DNA, 25 bp, Homo sapien
taccgtgggcgccagtttgaggatg

SEQ ID NO: 2588858 - DNA, 25 bp, Homo sapien
ggaacacagttcgagggctcagcac

SEQ ID NO: 2588859 - DNA, 25 bp, Homo sapien
cactctactgtgatatgcggactct

SEQ ID NO: 2588860 - DNA, 25 bp, Homo sapien
tctgacccaagtgtgggcgtgacgt

SEQ ID NO: 2588861 - DNA, 25 bp, Homo sapien
ccgtgagaccttgctatctgtggca

SEQ ID NO: 2588862 - DNA, 25 bp, Homo sapien
tgccagaccaccatggagggaaatg

SEQ ID NO: 2588863 - DNA, 25 bp, Homo sapien
ggctgctgagggcggacgccccagc

SEQ ID NO: 2588864 - DNA, 25 bp, Homo sapien
ccccagccctggtcgtcggggatgg

SEQ ID NO: 2588865 - DNA, 25 bp, Homo sapien
tgctgagggcggacgccccagccct

SEQ ID NO: 2588866 - DNA, 25 bp, Homo sapien
cccagccctggtcgtcggggatggc

SEQ ID NO: 2588867 - DNA, 25 bp, Homo sapien
tgtggacacaaagcaacaacctcgc

SEQ ID NO: 2588868 - DNA, 25 bp, Homo sapien
caacctcgctctggttaagggtcgg

SEQ ID NO: 2588869 - DNA, 25 bp, Homo sapien
acctcccatcagaggaacttcgcag

SEQ ID NO: 2588870 - DNA, 25 bp, Homo sapien
atcagaggaacttcgcagccccagg

SEQ ID NO: 2588871 - DNA, 25 bp, Homo sapien
tggcatcatggttcgctcctggtcc

SEQ ID NO: 2588872 - DNA, 25 bp, Homo sapien
ctcttggggagtccatgattaggga

SEQ ID NO: 2588873 - DNA, 25 bp, Homo sapien
agtcgacgtgcagcggtcagcaccg

SEQ ID NO: 2588874 - DNA, 25 bp, Homo sapien
ctgctcctggtaggcagtcgacgtg

SEQ ID NO: 2588875 - DNA, 25 bp, Homo sapien
tctgtctctgcatcgagggggccct

SEQ ID NO: 2588876 - DNA, 25 bp, Homo sapien
aggcagcagaagcaccgacccccag

SEQ ID NO: 2588877 - DNA, 25 bp, Homo sapien
gcagcagaagcaccgacccccagca

SEQ ID NO: 2588878 - DNA, 25 bp, Homo sapien
ggcagcagaagcaccgacccccagc

SEQ ID NO: 2588879 - DNA, 25 bp, Homo sapien
cctcatgttggtcccattgtggtcc

SEQ ID NO: 2588880 - DNA, 25 bp, Homo sapien
atgttggtcccattgtggtccccag

SEQ ID NO: 2588881 - DNA, 25 bp, Homo sapien
tccaccctcatgttggtcccattgt

SEQ ID NO: 2588882 - DNA, 25 bp, Homo sapien
tgttggtcccattgtggtccccagt

SEQ ID NO: 2588883 - DNA, 25 bp, Homo sapien
accctgagggaattagtgaagcaca

SEQ ID NO: 2588884 - DNA, 25 bp, Homo sapien
tgcgctcagcgtgaaatgcaggtgc

SEQ ID NO: 2588885 - DNA, 25 bp, Homo sapien
ggaaggacgagagcttaaaggccca

SEQ ID NO: 2588886 - DNA, 25 bp, Homo sapien
ctgcagggctacgtggatgtctcca

SEQ ID NO: 2588887 - DNA, 25 bp, Homo sapien
gagcctgtttgccaacttgctccac

SEQ ID NO: 2588888 - DNA, 25 bp, Homo sapien
aggagcctgtttgccaacttgctcc

SEQ ID NO: 2588889 - DNA, 25 bp, Homo sapien
tgtttgccaacttgctccacctggg

SEQ ID NO: 2588890 - DNA, 25 bp, Homo sapien
gcctgtttgccaacttgctccacct

SEQ ID NO: 2588891 - DNA, 25 bp, Homo sapien
gcagccggcacccatgcaccagcag

SEQ ID NO: 2588892 - DNA, 25 bp, Homo sapien
agcaagactgacacagccactacca

SEQ ID NO: 2588893 - DNA, 25 bp, Homo sapien
gagcaagactgacacagccactacc

SEQ ID NO: 2588894 - DNA, 25 bp, Homo sapien
ccaggcccccccattgccggcagcc

SEQ ID NO: 2588895 - DNA, 25 bp, Homo sapien
ccagcacccgcggggtcctcacagg

SEQ ID NO: 2588896 - DNA, 25 bp, Homo sapien
gggccaggcccccccattgccggca

SEQ ID NO: 2588897 - DNA, 25 bp, Homo sapien
cccagcacccgcggggtcctcacag

SEQ ID NO: 2588898 - DNA, 25 bp, Homo sapien
gattctgagggatggggcttggcct

SEQ ID NO: 2588899 - DNA, 25 bp, Homo sapien
ctgacaggtgaagggtctagagcct

SEQ ID NO: 2588900 - DNA, 25 bp, Homo sapien
ctggtcagggccgtcttcagcccga

SEQ ID NO: 2588901 - DNA, 25 bp, Homo sapien
gggcttgcaagccttgattctgagg

SEQ ID NO: 2588902 - DNA, 25 bp, Homo sapien
agcagtgcccgcaggctggacaggt

SEQ ID NO: 2588903 - DNA, 25 bp, Homo sapien
ggccactgtgaaggcgcactgcacg

SEQ ID NO: 2588904 - DNA, 25 bp, Homo sapien
tggacaggtcggctcctcttcgtgc

SEQ ID NO: 2588905 - DNA, 25 bp, Homo sapien
ctgtgaaggcgcactgcacggtgac

SEQ ID NO: 2588906 - DNA, 25 bp, Homo sapien
ctgcctcagtcggggcggtgcccag

SEQ ID NO: 2588907 - DNA, 25 bp, Homo sapien
gcctcagtcggggcggtgcccagct

SEQ ID NO: 2588908 - DNA, 25 bp, Homo sapien
aagagattcctcagagggggcctcc

SEQ ID NO: 2588909 - DNA, 25 bp, Homo sapien
gcaaagagattcctcagagggggcc

SEQ ID NO: 2588910 - DNA, 25 bp, Homo sapien
atggggacccagtgcccgtcctcac

SEQ ID NO: 2588911 - DNA, 25 bp, Homo sapien
tggggacccagtgcccgtcctcacc

SEQ ID NO: 2588912 - DNA, 25 bp, Homo sapien
gatggggacccagtgcccgtcctca

SEQ ID NO: 2588913 - DNA, 25 bp, Homo sapien
cttcacacaggacgtccaccgtgtc

SEQ ID NO: 2588914 - DNA, 25 bp, Homo sapien
cgtgtccccctgtcggaagcccagg

SEQ ID NO: 2588915 - DNA, 25 bp, Homo sapien
tgggcggagtagctgtgctgggcca

SEQ ID NO: 2588916 - DNA, 25 bp, Homo sapien
ctctggcccctgggcggagtagctg

SEQ ID NO: 2588917 - DNA, 25 bp, Homo sapien
tctgggtgccacgtctgctcacagc

SEQ ID NO: 2588918 - DNA, 25 bp, Homo sapien
ctgcagggcgttacccaggcgtggc

SEQ ID NO: 2588919 - DNA, 25 bp, Homo sapien
agggcgttacccaggcgtggcctct

SEQ ID NO: 2588920 - DNA, 25 bp, Homo sapien
gctcacagcacaggccgagctctaa

SEQ ID NO: 2588921 - DNA, 25 bp, Homo sapien
gatgccgatgcggccgtcacagtgg

SEQ ID NO: 2588922 - DNA, 25 bp, Homo sapien
agatgccgatgcggccgtcacagtg

SEQ ID NO: 2588923 - DNA, 25 bp, Homo sapien
atgccgatgcggccgtcacagtggc

SEQ ID NO: 2588924 - DNA, 25 bp, Homo sapien
gggctcctgacatccgagggccggc

SEQ ID NO: 2588925 - DNA, 25 bp, Homo sapien
ctcctgacatccgagggccggcggg

SEQ ID NO: 2588926 - DNA, 25 bp, Homo sapien
gccgggggctcctgacatccgaggg

SEQ ID NO: 2588927 - DNA, 25 bp, Homo sapien
ccgggggctcctgacatccgagggc

SEQ ID NO: 2588928 - DNA, 25 bp, Homo sapien
ttaaaagcatcatggacacagcatc

SEQ ID NO: 2588929 - DNA, 25 bp, Homo sapien
tattaaaagcatcatggacacagca

SEQ ID NO: 2588930 - DNA, 25 bp, Homo sapien
attaaaagcatcatggacacagcat

SEQ ID NO: 2588931 - DNA, 25 bp, Homo sapien
cactggggggcatacgtgtggctag

SEQ ID NO: 2588932 - DNA, 25 bp, Homo sapien
tcacccagacaactgacttcagcag

SEQ ID NO: 2588933 - DNA, 25 bp, Homo sapien
cactctgactcacccagacaactga

SEQ ID NO: 2588934 - DNA, 25 bp, Homo sapien
cagccaaccttggtcattcccagaa

SEQ ID NO: 2588935 - DNA, 25 bp, Homo sapien
tgtccctcacgccacactgtgtgtg

SEQ ID NO: 2588936 - DNA, 25 bp, Homo sapien
ggacagagcagcacgtatcagctgg

SEQ ID NO: 2588937 - DNA, 25 bp, Homo sapien
agctggttccctgccccgtggctgg

SEQ ID NO: 2588938 - DNA, 25 bp, Homo sapien
ctggacagagttggagctaggccac

SEQ ID NO: 2588939 - DNA, 25 bp, Homo sapien
cttgttaactagttaagcactatgc

SEQ ID NO: 2588940 - DNA, 25 bp, Homo sapien
cccgtggatgctcagcggccaggca

SEQ ID NO: 2588941 - DNA, 25 bp, Homo sapien
gctagttacagtgtaggcaccccgg

SEQ ID NO: 2588942 - DNA, 25 bp, Homo sapien
tgccatgcctcgcctggaggctcag

SEQ ID NO: 2588943 - DNA, 25 bp, Homo sapien
tgcggcgcggctaccccggcggagg

SEQ ID NO: 2588944 - DNA, 25 bp, Homo sapien
agcccgagcccgagcgcgacccccg

SEQ ID NO: 2588945 - DNA, 25 bp, Homo sapien
gagcccgagcgagaccccgagcccg

SEQ ID NO: 2588946 - DNA, 25 bp, Homo sapien
gccggagcccgagcgagaccccgag

SEQ ID NO: 2588947 - DNA, 25 bp, Homo sapien
tcgaggaactgggagcaattaagcc

SEQ ID NO: 2588948 - DNA, 25 bp, Homo sapien
tcagagctccgagaacatgcacacg

SEQ ID NO: 2588949 - DNA, 25 bp, Homo sapien
cagaacaaaggccaagtcgaggaac

SEQ ID NO: 2588950 - DNA, 25 bp, Homo sapien
aaatgtcaggctggcatcagagctc

SEQ ID NO: 2588951 - DNA, 25 bp, Homo sapien
gggtcacagcagttcgaagtcctgg

SEQ ID NO: 2588952 - DNA, 25 bp, Homo sapien
aactcaattttgttcagcccttggg

SEQ ID NO: 2588953 - DNA, 25 bp, Homo sapien
gaagtcctgggcacatgtaatgcag

SEQ ID NO: 2588954 - DNA, 25 bp, Homo sapien
aggacacaggatgcccctactaggg

SEQ ID NO: 2588955 - DNA, 25 bp, Homo sapien
agcggaactacagccagatgcggat

SEQ ID NO: 2588956 - DNA, 25 bp, Homo sapien
ccctgtactctgaggagcggaacta

SEQ ID NO: 2588957 - DNA, 25 bp, Homo sapien
tagaagaggccaatgccggtcaact

SEQ ID NO: 2588958 - DNA, 25 bp, Homo sapien
tccctcagtacctccagaaggaagg

SEQ ID NO: 2588959 - DNA, 25 bp, Homo sapien
gatgacccacgccagccctgtgccc

SEQ ID NO: 2588960 - DNA, 25 bp, Homo sapien
cgggatgacccacgccagccctgtg

SEQ ID NO: 2588961 - DNA, 25 bp, Homo sapien
ccgggccgggatgacccacgccagc

SEQ ID NO: 2588962 - DNA, 25 bp, Homo sapien
gccgggatgacccacgccagccctg

SEQ ID NO: 2588963 - DNA, 25 bp, Homo sapien
ctgaggtagcacgggtgacggagca

SEQ ID NO: 2588964 - DNA, 25 bp, Homo sapien
aggtagcacgggtgacggagcaggg

SEQ ID NO: 2588965 - DNA, 25 bp, Homo sapien
gaggtagcacgggtgacggagcagg

SEQ ID NO: 2588966 - DNA, 25 bp, Homo sapien
gtagcacgggtgacggagcagggca

SEQ ID NO: 2588967 - DNA, 25 bp, Homo sapien
acacagggtgactcatacagcgggc

SEQ ID NO: 2588968 - DNA, 25 bp, Homo sapien
cacagggtgactcatacagcgggcc

SEQ ID NO: 2588969 - DNA, 25 bp, Homo sapien
ctggtgggggcagtgtaggtgctca

SEQ ID NO: 2588970 - DNA, 25 bp, Homo sapien
cccctggtgggggcagtgtaggtgc

SEQ ID NO: 2588971 - DNA, 25 bp, Homo sapien
tggtgggggcagtgtaggtgctcac

SEQ ID NO: 2588972 - DNA, 25 bp, Homo sapien
cggacccctggtgggggcagtgtag

SEQ ID NO: 2588973 - DNA, 25 bp, Homo sapien
tccaagagcccgtaagagccagcat

SEQ ID NO: 2588974 - DNA, 25 bp, Homo sapien
ccaagagcccgtaagagccagcatg

SEQ ID NO: 2588975 - DNA, 25 bp, Homo sapien
ctccaagagcccgtaagagccagca

SEQ ID NO: 2588976 - DNA, 25 bp, Homo sapien
tgggctccaagagcccgtaagagcc

SEQ ID NO: 2588977 - DNA, 25 bp, Homo sapien
gtggcgttgaccgtgctcaggggct

SEQ ID NO: 2588978 - DNA, 25 bp, Homo sapien
tggcgttgaccgtgctcaggggctg

SEQ ID NO: 2588979 - DNA, 25 bp, Homo sapien
atggtggcgttgaccgtgctcaggg

SEQ ID NO: 2588980 - DNA, 25 bp, Homo sapien
ggcgttgaccgtgctcaggggctgc

SEQ ID NO: 2588981 - DNA, 25 bp, Homo sapien
gctttcggaactcgaggctgggcca

SEQ ID NO: 2588982 - DNA, 25 bp, Homo sapien
gctgaacccgtagccctcgtgcagg

SEQ ID NO: 2588983 - DNA, 25 bp, Homo sapien
aacccgtagccctcgtgcaggaggg

SEQ ID NO: 2588984 - DNA, 25 bp, Homo sapien
gaggcacagtagtcccgcagccagc

SEQ ID NO: 2588985 - DNA, 25 bp, Homo sapien
ctttggccacccagacgccgtagct

SEQ ID NO: 2588986 - DNA, 25 bp, Homo sapien
actgagccggcgcatcggccgggat

SEQ ID NO: 2588987 - DNA, 25 bp, Homo sapien
gtgtccagccaatgtccacaccgcc

SEQ ID NO: 2588988 - DNA, 25 bp, Homo sapien
ccgtagctctctgcccgccactgag

SEQ ID NO: 2588989 - DNA, 25 bp, Homo sapien
cagaagagctggaccaaggcagccc

SEQ ID NO: 2588990 - DNA, 25 bp, Homo sapien
caaccagaagagctggaccaaggca

SEQ ID NO: 2588991 - DNA, 25 bp, Homo sapien
ctagtcctgcaaccagaagagctgg

SEQ ID NO: 2588992 - DNA, 25 bp, Homo sapien
accagaagagctggaccaaggcagc

SEQ ID NO: 2588993 - DNA, 25 bp, Homo sapien
acggtcaacgccaccatctgggagt

SEQ ID NO: 2588994 - DNA, 25 bp, Homo sapien
agcgtggccacagcgaaagcacagc

SEQ ID NO: 2588995 - DNA, 25 bp, Homo sapien
gggccagttctatgtgagcacctac

SEQ ID NO: 2588996 - DNA, 25 bp, Homo sapien
ggtccgggcttccttgtgaggcctc

SEQ ID NO: 2588997 - DNA, 25 bp, Homo sapien
ggcagcatcttcaagggcgaatccc

SEQ ID NO: 2588998 - DNA, 25 bp, Homo sapien
cagcatcttcaagggcgaatccctt

SEQ ID NO: 2588999 - DNA, 25 bp, Homo sapien
cttcaagggcgaatcccttctctat

SEQ ID NO: 2589000 - DNA, 25 bp, Homo sapien
atcttcaagggcgaatcccttctct

SEQ ID NO: 2589001 - DNA, 25 bp, Homo sapien
cggcggctcatggattttttaaggt

SEQ ID NO: 2589002 - DNA, 25 bp, Homo sapien
cgcgcggcggctcatggatttttta

SEQ ID NO: 2589003 - DNA, 25 bp, Homo sapien
taaggtaaaacgtacatacagtaga

SEQ ID NO: 2589004 - DNA, 25 bp, Homo sapien
cgcgcgcggcggctcatggattttt

SEQ ID NO: 2589005 - DNA, 25 bp, Homo sapien
ggcaggcacatgagtgccgcagcac

SEQ ID NO: 2589006 - DNA, 25 bp, Homo sapien
gcagcacggcgttctcgaaggagct

SEQ ID NO: 2589007 - DNA, 25 bp, Homo sapien
aacaaacttgggcagcttctgggca

SEQ ID NO: 2589008 - DNA, 25 bp, Homo sapien
tctcgaaggagctgcgacagccatg

SEQ ID NO: 2589009 - DNA, 25 bp, Homo sapien
ttctattggaaacattacagctatg

SEQ ID NO: 2589010 - DNA, 25 bp, Homo sapien
tagtagtcatcaagtcttttgacag

SEQ ID NO: 2589011 - DNA, 25 bp, Homo sapien
caattttggtggaaatgagtttgtg

SEQ ID NO: 2589012 - DNA, 25 bp, Homo sapien
catttacattaaggactcatggtag

SEQ ID NO: 2589013 - DNA, 25 bp, Homo sapien
gaacctcagggtatggagctcacat

SEQ ID NO: 2589014 - DNA, 25 bp, Homo sapien
caaattcaagagtggatgtggccct

SEQ ID NO: 2589015 - DNA, 25 bp, Homo sapien
gagaattcggtgacatgcctagtgc

SEQ ID NO: 2589016 - DNA, 25 bp, Homo sapien
cattgtgatggatgctggaacctca

SEQ ID NO: 2589017 - DNA, 25 bp, Homo sapien
tcctcccaccagctaattgtgtgac

SEQ ID NO: 2589018 - DNA, 25 bp, Homo sapien
taagcccatcgacatcagccaggta

SEQ ID NO: 2589019 - DNA, 25 bp, Homo sapien
gaatattgggtgactctaattcacc

SEQ ID NO: 2589020 - DNA, 25 bp, Homo sapien
tggaggctgcttgacagcgtgtgac

SEQ ID NO: 2589021 - DNA, 25 bp, Homo sapien
tctaacggggctgtcccttggttgc

SEQ ID NO: 2589022 - DNA, 25 bp, Homo sapien
agccggagtgattaactctaacggg

SEQ ID NO: 2589023 - DNA, 25 bp, Homo sapien
ccttggttgccgtgggatgcccagc

SEQ ID NO: 2589024 - DNA, 25 bp, Homo sapien
tctgtgaagccggagtgattaactc

SEQ ID NO: 2589025 - DNA, 25 bp, Homo sapien
cggtcttttgcgtgttcagcttcaa

SEQ ID NO: 2589026 - DNA, 25 bp, Homo sapien
cactgacgtgtttcatggactttta

SEQ ID NO: 2589027 - DNA, 25 bp, Homo sapien
tgtggctgcactacttcagagactg

SEQ ID NO: 2589028 - DNA, 25 bp, Homo sapien
tagattagaatgtaacactgacgtg

SEQ ID NO: 2589029 - DNA, 25 bp, Homo sapien
gcaccacccgagtgagagacgggct

SEQ ID NO: 2589030 - DNA, 25 bp, Homo sapien
ggtcagcctttatggcaccacccga

SEQ ID NO: 2589031 - DNA, 25 bp, Homo sapien
gacgggctggaccttacggacattg

SEQ ID NO: 2589032 - DNA, 25 bp, Homo sapien
tcttctgttccaggtagtggtgatc

SEQ ID NO: 2589033 - DNA, 25 bp, Homo sapien
cgaagcagtcctctgattgggcgga

SEQ ID NO: 2589034 - DNA, 25 bp, Homo sapien
ttatatcgacgcgaggacaggagac

SEQ ID NO: 2589035 - DNA, 25 bp, Homo sapien
tcaagatgctggttccgatgacccc

SEQ ID NO: 2589036 - DNA, 25 bp, Homo sapien
cacagctttgcccatgaaacgcaga

SEQ ID NO: 2589037 - DNA, 25 bp, Homo sapien
cacccaggctgtaagatgtttcatt

SEQ ID NO: 2589038 - DNA, 25 bp, Homo sapien
caatgcgaaaaagaagagctgcttc

SEQ ID NO: 2589039 - DNA, 25 bp, Homo sapien
tgtccccaaaagaggatgacgctga

SEQ ID NO: 2589040 - DNA, 25 bp, Homo sapien
gggaattgttgctgacaccttttta

SEQ ID NO: 2589041 - DNA, 25 bp, Homo sapien
ttgggctgattgtagcgtttttccc

SEQ ID NO: 2589042 - DNA, 25 bp, Homo sapien
ctttgggctgattgtagcgtttttc

SEQ ID NO: 2589043 - DNA, 25 bp, Homo sapien
gggctgattgtagcgtttttcccat

SEQ ID NO: 2589044 - DNA, 25 bp, Homo sapien
tgggctgattgtagcgtttttccca

SEQ ID NO: 2589045 - DNA, 25 bp, Homo sapien
ggtccttatgtactggcccctaatc

SEQ ID NO: 2589046 - DNA, 25 bp, Homo sapien
tccagctaatcctgatggcaacaaa

SEQ ID NO: 2589047 - DNA, 25 bp, Homo sapien
tgctgacccggtgatgaaacttcct

SEQ ID NO: 2589048 - DNA, 25 bp, Homo sapien
caaaatcatgaaagtggcccccagt

SEQ ID NO: 2589049 - DNA, 25 bp, Homo sapien
tggtgttgacagaatatagttcaca

SEQ ID NO: 2589050 - DNA, 25 bp, Homo sapien
ttttggttggtggctataagaagtg

SEQ ID NO: 2589051 - DNA, 25 bp, Homo sapien
tgcatgatgcgggaatttattgcta

SEQ ID NO: 2589052 - DNA, 25 bp, Homo sapien
tgaaatgcatgatgcgggaatttat

SEQ ID NO: 2589053 - DNA, 25 bp, Homo sapien
ccagttctgtgcaagagggactgct

SEQ ID NO: 2589054 - DNA, 25 bp, Homo sapien
tctcttgttggtgaatacgccaaac

SEQ ID NO: 2589055 - DNA, 25 bp, Homo sapien
aacagatacggctttgatgggacag

SEQ ID NO: 2589056 - DNA, 25 bp, Homo sapien
tggtgaatacgccaaacagaagaga

SEQ ID NO: 2589057 - DNA, 25 bp, Homo sapien
tgttgcggaccgaaaccagttgact

SEQ ID NO: 2589058 - DNA, 25 bp, Homo sapien
gattagcataattagcaccgagcag

SEQ ID NO: 2589059 - DNA, 25 bp, Homo sapien
gaggcgctggactgctaaatgcaac

SEQ ID NO: 2589060 - DNA, 25 bp, Homo sapien
tgcaaccatttttcgcagcagcgag

SEQ ID NO: 2589061 - DNA, 25 bp, Homo sapien
gaagtaagaagtctgctaatgatga

SEQ ID NO: 2589062 - DNA, 25 bp, Homo sapien
ggatgtagcccacgatatgttctga

SEQ ID NO: 2589063 - DNA, 25 bp, Homo sapien
cctccggtataacgtgtcgtacgat

SEQ ID NO: 2589064 - DNA, 25 bp, Homo sapien
taatgatgattgttcggagctgaga

SEQ ID NO: 2589065 - DNA, 25 bp, Homo sapien
cctccgtgagaggaagccctcccgg

SEQ ID NO: 2589066 - DNA, 25 bp, Homo sapien
ctcctccgtgagaggaagccctccc

SEQ ID NO: 2589067 - DNA, 25 bp, Homo sapien
tcctccgtgagaggaagccctcccg

SEQ ID NO: 2589068 - DNA, 25 bp, Homo sapien
gctctgcgggattctctcagtggga

SEQ ID NO: 2589069 - DNA, 25 bp, Homo sapien
gaggaggaagctctgcgggattctc

SEQ ID NO: 2589070 - DNA, 25 bp, Homo sapien
aggaggaagctctgcgggattctct

SEQ ID NO: 2589071 - DNA, 25 bp, Homo sapien
agctctgcgggattctctcagtggg

SEQ ID NO: 2589072 - DNA, 25 bp, Homo sapien
ccagtgggcacatggagcttggcta

SEQ ID NO: 2589073 - DNA, 25 bp, Homo sapien
gattttggccgactctgaagcttta

SEQ ID NO: 2589074 - DNA, 25 bp, Homo sapien
cagtgagtggagcacaaaccatggc

SEQ ID NO: 2589075 - DNA, 25 bp, Homo sapien
cacgagaggtcttggttgacatcca

SEQ ID NO: 2589076 - DNA, 25 bp, Homo sapien
ttcaagccagctgtgggagatacta

SEQ ID NO: 2589077 - DNA, 25 bp, Homo sapien
gagatactagatacagagctgccat

SEQ ID NO: 2589078 - DNA, 25 bp, Homo sapien
tcttggcagaagatgtgattcccct

SEQ ID NO: 2589079 - DNA, 25 bp, Homo sapien
gaaataagtcttggtcccctgtgct

SEQ ID NO: 2589080 - DNA, 25 bp, Homo sapien
ccttcgcggtgggattaaaagcagc

SEQ ID NO: 2589081 - DNA, 25 bp, Homo sapien
tgatagagatattcgccagcgcaca

SEQ ID NO: 2589082 - DNA, 25 bp, Homo sapien
aagttcttggttgtgggcctcctca

SEQ ID NO: 2589083 - DNA, 25 bp, Homo sapien
tatgttgttccaaagagcgctcgcc

SEQ ID NO: 2589084 - DNA, 25 bp, Homo sapien
gcagcctgcggccagcagcgtcctc

SEQ ID NO: 2589085 - DNA, 25 bp, Homo sapien
ggcagcggctgtatcggtgccccgg

SEQ ID NO: 2589086 - DNA, 25 bp, Homo sapien
agcagcggctggtctgtcaaccgga

SEQ ID NO: 2589087 - DNA, 25 bp, Homo sapien
tggcctcggctggtaacgccgccga

SEQ ID NO: 2589088 - DNA, 25 bp, Homo sapien
tatcttaatgcgaggcgttgttccc

SEQ ID NO: 2589089 - DNA, 25 bp, Homo sapien
tgcacacactgggttgcctacctgg

SEQ ID NO: 2589090 - DNA, 25 bp, Homo sapien
tgagtaatttctgccctccgcgagc

SEQ ID NO: 2589091 - DNA, 25 bp, Homo sapien
cgtgtctaccgcgaggcaaatgttc

SEQ ID NO: 2589092 - DNA, 25 bp, Homo sapien
tgttttcaatgaatccagcatcggg

SEQ ID NO: 2589093 - DNA, 25 bp, Homo sapien
tcctaccgcagggaggaacgtaata

SEQ ID NO: 2589094 - DNA, 25 bp, Homo sapien
cccgggatgccttggtgacactgga

SEQ ID NO: 2589095 - DNA, 25 bp, Homo sapien
cagaatccacctcaaagggtcgcgt

SEQ ID NO: 2589096 - DNA, 25 bp, Homo sapien
ttatcgctgggaatgtcgcactcgc

SEQ ID NO: 2589097 - DNA, 25 bp, Homo sapien
aactcctgctggctgataaggcccc

SEQ ID NO: 2589098 - DNA, 25 bp, Homo sapien
ttaacaaacccggtgtggcacagca

SEQ ID NO: 2589099 - DNA, 25 bp, Homo sapien
ttcccggaggacaccttagcaggtc

SEQ ID NO: 2589100 - DNA, 25 bp, Homo sapien
catcatttggataatctgatgtcat

SEQ ID NO: 2589101 - DNA, 25 bp, Homo sapien
gtagctgctgaatctccccccaccc

SEQ ID NO: 2589102 - DNA, 25 bp, Homo sapien
ttgtagctgctgaatctccccccac

SEQ ID NO: 2589103 - DNA, 25 bp, Homo sapien
tgtagctgctgaatctccccccacc

SEQ ID NO: 2589104 - DNA, 25 bp, Homo sapien
catgcaggacccaatagcagagatc

SEQ ID NO: 2589105 - DNA, 25 bp, Homo sapien
ccagcagtgggtcaaagggatcatg

SEQ ID NO: 2589106 - DNA, 25 bp, Homo sapien
aaaaatgccagtgctcccgggtttg

SEQ ID NO: 2589107 - DNA, 25 bp, Homo sapien
gaatggtgtgcctcctagcaaacgc

SEQ ID NO: 2589108 - DNA, 25 bp, Homo sapien
tattgtctagtagcctcatcagcca

SEQ ID NO: 2589109 - DNA, 25 bp, Homo sapien
tcatcagccattaacacctggatgc

SEQ ID NO: 2589110 - DNA, 25 bp, Homo sapien
ctgagcggtgttgtctggtagcctt

SEQ ID NO: 2589111 - DNA, 25 bp, Homo sapien
tatggctccaaaagtccaagttaac

SEQ ID NO: 2589112 - DNA, 25 bp, Homo sapien
tgcaaaacacccctgagaatgtgga

SEQ ID NO: 2589113 - DNA, 25 bp, Homo sapien
aaaacacccctgagaatgtggacat

SEQ ID NO: 2589114 - DNA, 25 bp, Homo sapien
gggccttgcaaaacacccctgagaa

SEQ ID NO: 2589115 - DNA, 25 bp, Homo sapien
gccttgcaaaacacccctgagaatg

SEQ ID NO: 2589116 - DNA, 25 bp, Homo sapien
attcggagggcatctgatggtcttc

SEQ ID NO: 2589117 - DNA, 25 bp, Homo sapien
cattcggagggcatctgatggtctt

SEQ ID NO: 2589118 - DNA, 25 bp, Homo sapien
gagcaatagtcagtggattccaagc

SEQ ID NO: 2589119 - DNA, 25 bp, Homo sapien
cccaggagggctaagatagtggttt

SEQ ID NO: 2589120 - DNA, 25 bp, Homo sapien
agtctgtgggttcctcggagagatt

SEQ ID NO: 2589121 - DNA, 25 bp, Homo sapien
cggagagattgtaggagcaatagtc

SEQ ID NO: 2589122 - DNA, 25 bp, Homo sapien
gtcaacatgaattcacctctacagg

SEQ ID NO: 2589123 - DNA, 25 bp, Homo sapien
cacacgtccagaagtgttatgaacg

SEQ ID NO: 2589124 - DNA, 25 bp, Homo sapien
gttatgaacgtatatgtcaacatga

SEQ ID NO: 2589125 - DNA, 25 bp, Homo sapien
attcacctctacaggtccattttag

SEQ ID NO: 2589126 - DNA, 25 bp, Homo sapien
tgcgggagaaacgtcccgcagctcc

SEQ ID NO: 2589127 - DNA, 25 bp, Homo sapien
gcgggagaaacgtcccgcagctccg

SEQ ID NO: 2589128 - DNA, 25 bp, Homo sapien
ctgcgggagaaacgtcccgcagctc

SEQ ID NO: 2589129 - DNA, 25 bp, Homo sapien
ctggcaacggcgacgcagagacgct

SEQ ID NO: 2589130 - DNA, 25 bp, Homo sapien
ttaaatgtgggccatgaacgggctg

SEQ ID NO: 2589131 - DNA, 25 bp, Homo sapien
ctctccagccatgcgtaggcctggt

SEQ ID NO: 2589132 - DNA, 25 bp, Homo sapien
ggaagccgcgctctctccagccatg

SEQ ID NO: 2589133 - DNA, 25 bp, Homo sapien
gtgccctggaccatcttcaaaacca

SEQ ID NO: 2589134 - DNA, 25 bp, Homo sapien
gactgtgccctggaccatcttcaaa

SEQ ID NO: 2589135 - DNA, 25 bp, Homo sapien
catgaggactgtgccctggaccatc

SEQ ID NO: 2589136 - DNA, 25 bp, Homo sapien
atagtcccatgaggactgtgccctg

SEQ ID NO: 2589137 - DNA, 25 bp, Homo sapien
ttccgctgtaagggaagaccacaca

SEQ ID NO: 2589138 - DNA, 25 bp, Homo sapien
tttccgctgtaagggaagaccacac

SEQ ID NO: 2589139 - DNA, 25 bp, Homo sapien
ttttccgctgtaagggaagaccaca

SEQ ID NO: 2589140 - DNA, 25 bp, Homo sapien
tccgctgtaagggaagaccacacac

SEQ ID NO: 2589141 - DNA, 25 bp, Homo sapien
ccattgttgtgggatgcagaagaca

SEQ ID NO: 2589142 - DNA, 25 bp, Homo sapien
gcggtgccatcgtctgtgggacaca

SEQ ID NO: 2589143 - DNA, 25 bp, Homo sapien
catcgtctgcgggacgcagaggaca

SEQ ID NO: 2589144 - DNA, 25 bp, Homo sapien
acagcctgagggtggtgccatcgtc

SEQ ID NO: 2589145 - DNA, 25 bp, Homo sapien
ctgtgggacacaggagagagcctgg

SEQ ID NO: 2589146 - DNA, 25 bp, Homo sapien
cacaggagagagcctgggggcagta

SEQ ID NO: 2589147 - DNA, 25 bp, Homo sapien
acaggagagagcctgggggcagtac

SEQ ID NO: 2589148 - DNA, 25 bp, Homo sapien
tcatctgtgggacacaggagagagc

SEQ ID NO: 2589149 - DNA, 25 bp, Homo sapien
actgcatgttttctgaaaggcctag

SEQ ID NO: 2589150 - DNA, 25 bp, Homo sapien
aaggaacaactgcatgttttctgaa

SEQ ID NO: 2589151 - DNA, 25 bp, Homo sapien
aactgcatgttttctgaaaggccta

SEQ ID NO: 2589152 - DNA, 25 bp, Homo sapien
gaacaactgcatgttttctgaaagg

SEQ ID NO: 2589153 - DNA, 25 bp, Homo sapien
cttagtgtgctgaatatgcacattc

SEQ ID NO: 2589154 - DNA, 25 bp, Homo sapien
tagtgtgctgaatatgcacattcat

SEQ ID NO: 2589155 - DNA, 25 bp, Homo sapien
ttagtgtgctgaatatgcacattca

SEQ ID NO: 2589156 - DNA, 25 bp, Homo sapien
cacgcgtttcaggaagctctctcgg

SEQ ID NO: 2589157 - DNA, 25 bp, Homo sapien
ttcacgcgtttcaggaagctctctc

SEQ ID NO: 2589158 - DNA, 25 bp, Homo sapien
tccttcacgcgtttcaggaagctct

SEQ ID NO: 2589159 - DNA, 25 bp, Homo sapien
ccttcacgcgtttcaggaagctctc

SEQ ID NO: 2589160 - DNA, 25 bp, Homo sapien
ttggttctcacagtgtgctgctctg

SEQ ID NO: 2589161 - DNA, 25 bp, Homo sapien
ggagcaggctggcgcttcagttgaa

SEQ ID NO: 2589162 - DNA, 25 bp, Homo sapien
gttctcacagtgtgctgctctgggt

SEQ ID NO: 2589163 - DNA, 25 bp, Homo sapien
gagcaggctggcgcttcagttgaat

SEQ ID NO: 2589164 - DNA, 25 bp, Homo sapien
tctctcagcctaggttcccatttgg

SEQ ID NO: 2589165 - DNA, 25 bp, Homo sapien
tggacctcgacacagactctgctga

SEQ ID NO: 2589166 - DNA, 25 bp, Homo sapien
ttgcgaagctaatgacctgcctctg

SEQ ID NO: 2589167 - DNA, 25 bp, Homo sapien
cgaagcttacgggaggctggacctc

SEQ ID NO: 2589168 - DNA, 25 bp, Homo sapien
cttgggcggcgggaggagagagaaa

SEQ ID NO: 2589169 - DNA, 25 bp, Homo sapien
catcttgggcggcgggaggagagag

SEQ ID NO: 2589170 - DNA, 25 bp, Homo sapien
tgggcggcgggaggagagagaaagg

SEQ ID NO: 2589171 - DNA, 25 bp, Homo sapien
gggcggcgggaggagagagaaagga

SEQ ID NO: 2589172 - DNA, 25 bp, Homo sapien
cggtgtctccgtgccacaccgagtg

SEQ ID NO: 2589173 - DNA, 25 bp, Homo sapien
ggctctcctagcgccaggaggagca

SEQ ID NO: 2589174 - DNA, 25 bp, Homo sapien
atggcagcggatacagccggaacct

SEQ ID NO: 2589175 - DNA, 25 bp, Homo sapien
gtgccacggaactacagctcactca

SEQ ID NO: 2589176 - DNA, 25 bp, Homo sapien
gggaacaacgcattccgctctcggc

SEQ ID NO: 2589177 - DNA, 25 bp, Homo sapien
ccgcactgcggtgctccaggcctgc

SEQ ID NO: 2589178 - DNA, 25 bp, Homo sapien
cagcaagcccgagagacgctagggc

SEQ ID NO: 2589179 - DNA, 25 bp, Homo sapien
tccatctcaatgtctccgtgccaca

SEQ ID NO: 2589180 - DNA, 25 bp, Homo sapien
gggcgggctcagaactcgtcgctca

SEQ ID NO: 2589181 - DNA, 25 bp, Homo sapien
taagctggcgagcagctttctgcaa

SEQ ID NO: 2589182 - DNA, 25 bp, Homo sapien
gagcatctcacattcagccgcacaa

SEQ ID NO: 2589183 - DNA, 25 bp, Homo sapien
agagcaaggctaagcccgagaccac

SEQ ID NO: 2589184 - DNA, 25 bp, Homo sapien
aacaagggacgctgacagcacctgc

SEQ ID NO: 2589185 - DNA, 25 bp, Homo sapien
gcctccactcgcttcgtcgggggta

SEQ ID NO: 2589186 - DNA, 25 bp, Homo sapien
tccaaaacaagggacgctgacagca

SEQ ID NO: 2589187 - DNA, 25 bp, Homo sapien
gctcctccaaaacaagggacgctga

SEQ ID NO: 2589188 - DNA, 25 bp, Homo sapien
tcttcacgacagctggggccggagc

SEQ ID NO: 2589189 - DNA, 25 bp, Homo sapien
cctgcttcttcacgacagctggggc

SEQ ID NO: 2589190 - DNA, 25 bp, Homo sapien
cttcttcacgacagctggggccgga

SEQ ID NO: 2589191 - DNA, 25 bp, Homo sapien
tgcttcttcacgacagctggggccg

SEQ ID NO: 2589192 - DNA, 25 bp, Homo sapien
gccacgaagtacagcagaattgcag

SEQ ID NO: 2589193 - DNA, 25 bp, Homo sapien
gaattgcagtcctagtacctcgctg

SEQ ID NO: 2589194 - DNA, 25 bp, Homo sapien
aacaagaagccaaggtgccacgaag

SEQ ID NO: 2589195 - DNA, 25 bp, Homo sapien
taaggactgcgaccactttacaccc

SEQ ID NO: 2589196 - DNA, 25 bp, Homo sapien
tgcatcagcgatcttggtggtttaa

SEQ ID NO: 2589197 - DNA, 25 bp, Homo sapien
gcatcagcgatcttggtggtttaaa

SEQ ID NO: 2589198 - DNA, 25 bp, Homo sapien
accgagtgaggctcaaattccatgt

SEQ ID NO: 2589199 - DNA, 25 bp, Homo sapien
caagttcatgtctggggccactagg

SEQ ID NO: 2589200 - DNA, 25 bp, Homo sapien
catgtcaagttcatgtctggggcca

SEQ ID NO: 2589201 - DNA, 25 bp, Homo sapien
agggtgacaccgagtgaggctcaaa

SEQ ID NO: 2589202 - DNA, 25 bp, Homo sapien
atttcacaaagcgggtgaggtctct

SEQ ID NO: 2589203 - DNA, 25 bp, Homo sapien
ttcacaaagcgggtgaggtctcttt

SEQ ID NO: 2589204 - DNA, 25 bp, Homo sapien
cacaaagcgggtgaggtctcttttg

SEQ ID NO: 2589205 - DNA, 25 bp, Homo sapien
ccatttcacaaagcgggtgaggtct

SEQ ID NO: 2589206 - DNA, 25 bp, Homo sapien
cagccgcttatagaggatggctctc

SEQ ID NO: 2589207 - DNA, 25 bp, Homo sapien
tgtttggcggtccagggcctgggtg

SEQ ID NO: 2589208 - DNA, 25 bp, Homo sapien
gaggcactttcagccgcttatagag

SEQ ID NO: 2589209 - DNA, 25 bp, Homo sapien
gcttatagaggatggctctctgccg

SEQ ID NO: 2589210 - DNA, 25 bp, Homo sapien
taataacaaatgctggactgcggtc

SEQ ID NO: 2589211 - DNA, 25 bp, Homo sapien
agaaactcctttccacgccacagaa

SEQ ID NO: 2589212 - DNA, 25 bp, Homo sapien
taaggaatccttgcctgagaaactc

SEQ ID NO: 2589213 - DNA, 25 bp, Homo sapien
gactgcggtcctgctatatgactat

SEQ ID NO: 2589214 - DNA, 25 bp, Homo sapien
acttgtgggccagcttaagcagctg

SEQ ID NO: 2589215 - DNA, 25 bp, Homo sapien
ctctgcttcttctcttgctttgtct

SEQ ID NO: 2589216 - DNA, 25 bp, Homo sapien
cttcttctcggcccgggccaacagt

SEQ ID NO: 2589217 - DNA, 25 bp, Homo sapien
tctggtctgtacttgtgggccagct

SEQ ID NO: 2589218 - DNA, 25 bp, Homo sapien
aggacaggtggtctcttcgttggga

SEQ ID NO: 2589219 - DNA, 25 bp, Homo sapien
tcgttgggacgtcccctttgccagc

SEQ ID NO: 2589220 - DNA, 25 bp, Homo sapien
tcgaaggacaggtggtctcttcgtt

SEQ ID NO: 2589221 - DNA, 25 bp, Homo sapien
acaggtggtctcttcgttgggacgt

SEQ ID NO: 2589222 - DNA, 25 bp, Homo sapien
cagtgttcaccctaaggtggggcct

SEQ ID NO: 2589223 - DNA, 25 bp, Homo sapien
tcaccctaaggtggggcctactcac

SEQ ID NO: 2589224 - DNA, 25 bp, Homo sapien
ttcaccctaaggtggggcctactca

SEQ ID NO: 2589225 - DNA, 25 bp, Homo sapien
caggccaagaaattttacatcactg

SEQ ID NO: 2589226 - DNA, 25 bp, Homo sapien
aggccaagaaattttacatcactgc

SEQ ID NO: 2589227 - DNA, 25 bp, Homo sapien
ggccaagaaattttacatcactgca

SEQ ID NO: 2589228 - DNA, 25 bp, Homo sapien
tcaggccaagaaattttacatcact

SEQ ID NO: 2589229 - DNA, 25 bp, Homo sapien
tgctctagtcacaagaagctgctgg

SEQ ID NO: 2589230 - DNA, 25 bp, Homo sapien
ggcctgctctagtcacaagaagctg

SEQ ID NO: 2589231 - DNA, 25 bp, Homo sapien
cctgctctagtcacaagaagctgct

SEQ ID NO: 2589232 - DNA, 25 bp, Homo sapien
tctagtcacaagaagctgctgggct

SEQ ID NO: 2589233 - DNA, 25 bp, Homo sapien
ttctccaccaaggtggtgacggtgt

SEQ ID NO: 2589234 - DNA, 25 bp, Homo sapien
caccaaggtggtgacggtgttaact

SEQ ID NO: 2589235 - DNA, 25 bp, Homo sapien
ctcgatgggatccacgtcgtgtgca

SEQ ID NO: 2589236 - DNA, 25 bp, Homo sapien
tcgtgtgcaatcaccaccagctgag

SEQ ID NO: 2589237 - DNA, 25 bp, Homo sapien
tgggttagcagtcaacaggcaaacg

SEQ ID NO: 2589238 - DNA, 25 bp, Homo sapien
gatctgtgtcagtactgccctcacc

SEQ ID NO: 2589239 - DNA, 25 bp, Homo sapien
cacttcggtcccatcactgacttgg

SEQ ID NO: 2589240 - DNA, 25 bp, Homo sapien
tcctggtactgccagaagcccttgg

SEQ ID NO: 2589241 - DNA, 25 bp, Homo sapien
agtgagagattcacatcattgcaag

SEQ ID NO: 2589242 - DNA, 25 bp, Homo sapien
cagtgagagattcacatcattgcaa

SEQ ID NO: 2589243 - DNA, 25 bp, Homo sapien
ggttaaaaagctcatggattcgcac

SEQ ID NO: 2589244 - DNA, 25 bp, Homo sapien
cagggttaaaaagctcatggattcg

SEQ ID NO: 2589245 - DNA, 25 bp, Homo sapien
ttgctcagggttaaaaagctcatgg

SEQ ID NO: 2589246 - DNA, 25 bp, Homo sapien
gctcagggttaaaaagctcatggat

SEQ ID NO: 2589247 - DNA, 25 bp, Homo sapien
gtattttgaccaaaagcagcaaatt

SEQ ID NO: 2589248 - DNA, 25 bp, Homo sapien
tgtattttgaccaaaagcagcaaat

SEQ ID NO: 2589249 - DNA, 25 bp, Homo sapien
cttgataatgcagtaagggaccccc

SEQ ID NO: 2589250 - DNA, 25 bp, Homo sapien
attttacgacacagggcaggcaaga

SEQ ID NO: 2589251 - DNA, 25 bp, Homo sapien
tgataatgcagtaagggacccccat

SEQ ID NO: 2589252 - DNA, 25 bp, Homo sapien
gacccccattttacgacacagggca

SEQ ID NO: 2589253 - DNA, 25 bp, Homo sapien
gtggactagacgtcccagtcttgcc

SEQ ID NO: 2589254 - DNA, 25 bp, Homo sapien
gactagacgtcccagtcttgccttt

SEQ ID NO: 2589255 - DNA, 25 bp, Homo sapien
tggtgcaggtcttcctgtggactag

SEQ ID NO: 2589256 - DNA, 25 bp, Homo sapien
gagttcacctgtgtgaaggcgacag

SEQ ID NO: 2589257 - DNA, 25 bp, Homo sapien
tgtgaggcatggattaaatgaactg

SEQ ID NO: 2589258 - DNA, 25 bp, Homo sapien
gtgaggcatggattaaatgaactgg

SEQ ID NO: 2589259 - DNA, 25 bp, Homo sapien
caactgtgaggcatggattaaatga

SEQ ID NO: 2589260 - DNA, 25 bp, Homo sapien
aacaactgtgaggcatggattaaat

SEQ ID NO: 2589261 - DNA, 25 bp, Homo sapien
cacatggtttattcaggtgaagaaa

SEQ ID NO: 2589262 - DNA, 25 bp, Homo sapien
ttgcctcagatgcaatgctgaccac

SEQ ID NO: 2589263 - DNA, 25 bp, Homo sapien
tttgcctcagatgcaatgctgacca

SEQ ID NO: 2589264 - DNA, 25 bp, Homo sapien
tgcctcagatgcaatgctgaccaca

SEQ ID NO: 2589265 - DNA, 25 bp, Homo sapien
aaataccttttagctcaagacagtc

SEQ ID NO: 2589266 - DNA, 25 bp, Homo sapien
tgccttagtttcccttttagaatgc

SEQ ID NO: 2589267 - DNA, 25 bp, Homo sapien
gccttagtttcccttttagaatgca

SEQ ID NO: 2589268 - DNA, 25 bp, Homo sapien
caaaaataccttttagctcaagaca

SEQ ID NO: 2589269 - DNA, 25 bp, Homo sapien
ctcatcgtatctgtcattgtaattg

SEQ ID NO: 2589270 - DNA, 25 bp, Homo sapien
cttagccaaagcgcctttgtcttcc

SEQ ID NO: 2589271 - DNA, 25 bp, Homo sapien
catcgtatctgtcattgtaattggt

SEQ ID NO: 2589272 - DNA, 25 bp, Homo sapien
tccaccagcttagccaaagcgcctt

SEQ ID NO: 2589273 - DNA, 25 bp, Homo sapien
cagtattttggtgtaaagctgcctc

SEQ ID NO: 2589274 - DNA, 25 bp, Homo sapien
gctgttccaagctgatcgtcagata

SEQ ID NO: 2589275 - DNA, 25 bp, Homo sapien
taagccagccagttatttgggagaa

SEQ ID NO: 2589276 - DNA, 25 bp, Homo sapien
gaacttctcataggttaagccagcc

SEQ ID NO: 2589277 - DNA, 25 bp, Homo sapien
cgatacgagccacagacttaggacc

SEQ ID NO: 2589278 - DNA, 25 bp, Homo sapien
ggcgatacgagccacagacttagga

SEQ ID NO: 2589279 - DNA, 25 bp, Homo sapien
ggacattgccaccccagtgacggcg

SEQ ID NO: 2589280 - DNA, 25 bp, Homo sapien
cattgccaccccagtgacggcggat

SEQ ID NO: 2589281 - DNA, 25 bp, Homo sapien
ggccgacgcgcccgcggagcagccc

SEQ ID NO: 2589282 - DNA, 25 bp, Homo sapien
gacgcgcccgcggagcagcccggcg

SEQ ID NO: 2589283 - DNA, 25 bp, Homo sapien
cgcgcccgcggagcagcccggcgga

SEQ ID NO: 2589284 - DNA, 25 bp, Homo sapien
ccgacgcgcccgcggagcagcccgg

SEQ ID NO: 2589285 - DNA, 25 bp, Homo sapien
gggtgctcccgcagaaacgcccgca

SEQ ID NO: 2589286 - DNA, 25 bp, Homo sapien
gcacgtcgcccggcaactcgctcat

SEQ ID NO: 2589287 - DNA, 25 bp, Homo sapien
ttgcgggcgtccgtctggagccgca

SEQ ID NO: 2589288 - DNA, 25 bp, Homo sapien
cgtccgtctggagccgcaggctcgg

SEQ ID NO: 2589289 - DNA, 25 bp, Homo sapien
gcggctcgaactctgcatagtcgaa

SEQ ID NO: 2589290 - DNA, 25 bp, Homo sapien
gaccagccgctggtactttttgccg

SEQ ID NO: 2589291 - DNA, 25 bp, Homo sapien
cagggcagctcgtgacctgtcagga

SEQ ID NO: 2589292 - DNA, 25 bp, Homo sapien
tttttgccgcgggtgtagacctgga

SEQ ID NO: 2589293 - DNA, 25 bp, Homo sapien
agcactggcggagtccagcggaggg

SEQ ID NO: 2589294 - DNA, 25 bp, Homo sapien
ggctgtcctaattgccctgggcctc

SEQ ID NO: 2589295 - DNA, 25 bp, Homo sapien
tctgaaagagtaggggctgcagcac

SEQ ID NO: 2589296 - DNA, 25 bp, Homo sapien
cagcggaggggctgtcctaattgcc

SEQ ID NO: 2589297 - DNA, 25 bp, Homo sapien
aggtgattccagcacccgggcgccc

SEQ ID NO: 2589298 - DNA, 25 bp, Homo sapien
ggtgattccagcacccgggcgccca

SEQ ID NO: 2589299 - DNA, 25 bp, Homo sapien
caggtgattccagcacccgggcgcc

SEQ ID NO: 2589300 - DNA, 25 bp, Homo sapien
gtgattccagcacccgggcgcccac

SEQ ID NO: 2589301 - DNA, 25 bp, Homo sapien
agggaagaacccaacgctgttcaca

SEQ ID NO: 2589302 - DNA, 25 bp, Homo sapien
aacctcaggtgagcaaacgagctca

SEQ ID NO: 2589303 - DNA, 25 bp, Homo sapien
caagcctctactcatctgggaagca

SEQ ID NO: 2589304 - DNA, 25 bp, Homo sapien
tcaggtgacaaatcacaagcctcta

SEQ ID NO: 2589305 - DNA, 25 bp, Homo sapien
gtgcctcagcacgtgttctgggcac

SEQ ID NO: 2589306 - DNA, 25 bp, Homo sapien
ccgcagggtgagtttgcagaacaac

SEQ ID NO: 2589307 - DNA, 25 bp, Homo sapien
cctcagcacgtgttctgggcacttg

SEQ ID NO: 2589308 - DNA, 25 bp, Homo sapien
ttgatgtgccgcagggtgagtttgc

SEQ ID NO: 2589309 - DNA, 25 bp, Homo sapien
catctccttcatccagcacgggtgt

SEQ ID NO: 2589310 - DNA, 25 bp, Homo sapien
ccagatccacggtgcaaccatctcc

SEQ ID NO: 2589311 - DNA, 25 bp, Homo sapien
ccagcacgggtgtccctgtttcaaa

SEQ ID NO: 2589312 - DNA, 25 bp, Homo sapien
cttcatccagcacgggtgtccctgt

SEQ ID NO: 2589313 - DNA, 25 bp, Homo sapien
tcccagaaggcttcccgcgggcgag

SEQ ID NO: 2589314 - DNA, 25 bp, Homo sapien
caccgtccatctggtcctccctcct

SEQ ID NO: 2589315 - DNA, 25 bp, Homo sapien
gtcatcacttgcagctcccccctca

SEQ ID NO: 2589316 - DNA, 25 bp, Homo sapien
cctcctcctccggtgcaccaggcag

SEQ ID NO: 2589317 - DNA, 25 bp, Homo sapien
gacagttattttaggctgagttcgc

SEQ ID NO: 2589318 - DNA, 25 bp, Homo sapien
ggggaggcagcaccacagtctgctc

SEQ ID NO: 2589319 - DNA, 25 bp, Homo sapien
ggctgagttcgctgccacctttgca

SEQ ID NO: 2589320 - DNA, 25 bp, Homo sapien
gaacacagggattggctgacagtta

SEQ ID NO: 2589321 - DNA, 25 bp, Homo sapien
tcctctttgtctgtcaaaaagtcat

SEQ ID NO: 2589322 - DNA, 25 bp, Homo sapien
tctcatcctctttgtctgtcaaaaa

SEQ ID NO: 2589323 - DNA, 25 bp, Homo sapien
tggaccagccctcggtacacggtcg

SEQ ID NO: 2589324 - DNA, 25 bp, Homo sapien
ctccgtgcttccaaggtcctttctg

SEQ ID NO: 2589325 - DNA, 25 bp, Homo sapien
aaccagtggtcttgaccgtggtcca

SEQ ID NO: 2589326 - DNA, 25 bp, Homo sapien
aatggtaggcactcacggccttccg

SEQ ID NO: 2589327 - DNA, 25 bp, Homo sapien
gagggtgtcctcacaaaccagtggt

SEQ ID NO: 2589328 - DNA, 25 bp, Homo sapien
ggacaaacacgccacagctcatagt

SEQ ID NO: 2589329 - DNA, 25 bp, Homo sapien
tgaacttctttttcaacgagcccaa

SEQ ID NO: 2589330 - DNA, 25 bp, Homo sapien
ggagctgaagctcttgggtttgcgg

SEQ ID NO: 2589331 - DNA, 25 bp, Homo sapien
tgcggtgatgactcttgaacttctt

SEQ ID NO: 2589332 - DNA, 25 bp, Homo sapien
acttctttttcaacgagcccaactg

SEQ ID NO: 2589333 - DNA, 25 bp, Homo sapien
gcagtcagcaccagttctgcaccag

SEQ ID NO: 2589334 - DNA, 25 bp, Homo sapien
gaggataagtgggatctaccaattg

SEQ ID NO: 2589335 - DNA, 25 bp, Homo sapien
gggaaacagatctaaatctcatttt

SEQ ID NO: 2589336 - DNA, 25 bp, Homo sapien
agcagcgcctccgtcctagtgggtg

SEQ ID NO: 2589337 - DNA, 25 bp, Homo sapien
tgtttcaacctcaccagggctgtct

SEQ ID NO: 2589338 - DNA, 25 bp, Homo sapien
caagtcacggtttctctgtggtcaa

SEQ ID NO: 2589339 - DNA, 25 bp, Homo sapien
cctgttagtgccgtatgacagcccc

SEQ ID NO: 2589340 - DNA, 25 bp, Homo sapien
cagggctgtctcttggtccacacct

SEQ ID NO: 2589341 - DNA, 25 bp, Homo sapien
caatggcttcaggacatgggttctc

SEQ ID NO: 2589342 - DNA, 25 bp, Homo sapien
cagattgtccgtttgctatgccgaa

SEQ ID NO: 2589343 - DNA, 25 bp, Homo sapien
taaatgccacaagggtagtcgaaca

SEQ ID NO: 2589344 - DNA, 25 bp, Homo sapien
gaactagtcccaacgcgtttgcaaa

SEQ ID NO: 2589345 - DNA, 25 bp, Homo sapien
ttctgagcaaggtctcgaaagcgca

SEQ ID NO: 2589346 - DNA, 25 bp, Homo sapien
ctgagcaaggtctcgaaagcgcagg

SEQ ID NO: 2589347 - DNA, 25 bp, Homo sapien
tgagcaaggtctcgaaagcgcaggc

SEQ ID NO: 2589348 - DNA, 25 bp, Homo sapien
tctgagcaaggtctcgaaagcgcag

SEQ ID NO: 2589349 - DNA, 25 bp, Homo sapien
cagcactggagacccacggactcaa

SEQ ID NO: 2589350 - DNA, 25 bp, Homo sapien
cacggactcaacccagttacctcac

SEQ ID NO: 2589351 - DNA, 25 bp, Homo sapien
agaccagcttgcagagccgcagccg

SEQ ID NO: 2589352 - DNA, 25 bp, Homo sapien
tgggaagggctagtgagaccacaca

SEQ ID NO: 2589353 - DNA, 25 bp, Homo sapien
ttttagtagcttgaggcaaggtgga

SEQ ID NO: 2589354 - DNA, 25 bp, Homo sapien
ctgggagttttagtagcttgaggca

SEQ ID NO: 2589355 - DNA, 25 bp, Homo sapien
cagtgggaagggctagtgagaccac

SEQ ID NO: 2589356 - DNA, 25 bp, Homo sapien
gtgccaagtgttttattgggtaaca

SEQ ID NO: 2589357 - DNA, 25 bp, Homo sapien
ttggtgccaagtgttttattgggta

SEQ ID NO: 2589358 - DNA, 25 bp, Homo sapien
tgccaagtgttttattgggtaacac

SEQ ID NO: 2589359 - DNA, 25 bp, Homo sapien
tggtgccaagtgttttattgggtaa

SEQ ID NO: 2589360 - DNA, 25 bp, Homo sapien
gacttcttccagaccatgtcggtga

SEQ ID NO: 2589361 - DNA, 25 bp, Homo sapien
gaatcgatggctcagtctgctctgg

SEQ ID NO: 2589362 - DNA, 25 bp, Homo sapien
gaacatcgtgggcacagctctgatg

SEQ ID NO: 2589363 - DNA, 25 bp, Homo sapien
gatgttgtttctgccccgcattgta

SEQ ID NO: 2589364 - DNA, 25 bp, Homo sapien
gttctgatgttcatgaccctccttc

SEQ ID NO: 2589365 - DNA, 25 bp, Homo sapien
ccccaaacagtacatgcagctcgga

SEQ ID NO: 2589366 - DNA, 25 bp, Homo sapien
gaagagcatgtttgcgggcgtcccc

SEQ ID NO: 2589367 - DNA, 25 bp, Homo sapien
tgctcctagcagaatcccgttctga

SEQ ID NO: 2589368 - DNA, 25 bp, Homo sapien
caggtcattcggtactgggccatct

SEQ ID NO: 2589369 - DNA, 25 bp, Homo sapien
catccttgagggttcagtgtcactc

SEQ ID NO: 2589370 - DNA, 25 bp, Homo sapien
tctatgattaccgtgacaagggaag

SEQ ID NO: 2589371 - DNA, 25 bp, Homo sapien
aagggaagtctcgagcttggctgca

SEQ ID NO: 2589372 - DNA, 25 bp, Homo sapien
aactctgaggcctagacttatcgga

SEQ ID NO: 2589373 - DNA, 25 bp, Homo sapien
taatgtgttcgtgtggctttgctag

SEQ ID NO: 2589374 - DNA, 25 bp, Homo sapien
aattaacagccttatccccgcaggg

SEQ ID NO: 2589375 - DNA, 25 bp, Homo sapien
taaaagaatcccgttatgtcgacaa

SEQ ID NO: 2589376 - DNA, 25 bp, Homo sapien
ggccggcggcgcgagtcctggcgtt

SEQ ID NO: 2589377 - DNA, 25 bp, Homo sapien
tccccgcacgtttttcctctcactg

SEQ ID NO: 2589378 - DNA, 25 bp, Homo sapien
cctggcgttgggtcgggtctgaggc

SEQ ID NO: 2589379 - DNA, 25 bp, Homo sapien
gagcgcctcggcgtttggagctgct

SEQ ID NO: 2589380 - DNA, 25 bp, Homo sapien
gccctctgtcccggctggacagccc

SEQ ID NO: 2589381 - DNA, 25 bp, Homo sapien
gggccctctgtcccggctggacagc

SEQ ID NO: 2589382 - DNA, 25 bp, Homo sapien
ggccctctgtcccggctggacagcc

SEQ ID NO: 2589383 - DNA, 25 bp, Homo sapien
ggagccgcagccgacgcggagcgag

SEQ ID NO: 2589384 - DNA, 25 bp, Homo sapien
ccgcagcgggtgcgggcgccgacgg

SEQ ID NO: 2589385 - DNA, 25 bp, Homo sapien
ccgggcacttcctgtggaggccgca

SEQ ID NO: 2589386 - DNA, 25 bp, Homo sapien
ggcgccgacgggcgagagccagcga

SEQ ID NO: 2589387 - DNA, 25 bp, Homo sapien
tggcccaagcatgatcagtagcgac

SEQ ID NO: 2589388 - DNA, 25 bp, Homo sapien
gcccaagcatgatcagtagcgaccg

SEQ ID NO: 2589389 - DNA, 25 bp, Homo sapien
cctggcccaagcatgatcagtagcg

SEQ ID NO: 2589390 - DNA, 25 bp, Homo sapien
ccctggcccaagcatgatcagtagc

SEQ ID NO: 2589391 - DNA, 25 bp, Homo sapien
caaggccccaggattcagctggtac

SEQ ID NO: 2589392 - DNA, 25 bp, Homo sapien
ccccaggattcagctggtacaaaac

SEQ ID NO: 2589393 - DNA, 25 bp, Homo sapien
ttatcacatgcttgactttggtttc

SEQ ID NO: 2589394 - DNA, 25 bp, Homo sapien
tcacatgcttgactttggtttccat

SEQ ID NO: 2589395 - DNA, 25 bp, Homo sapien
gctgccgcatcaggaagcttctcca

SEQ ID NO: 2589396 - DNA, 25 bp, Homo sapien
caaccagattagtctccgcaagtgt

SEQ ID NO: 2589397 - DNA, 25 bp, Homo sapien
tccgcaagtgtcagcagcgaggaat

SEQ ID NO: 2589398 - DNA, 25 bp, Homo sapien
gattagtctccgcaagtgtcagcag

SEQ ID NO: 2589399 - DNA, 25 bp, Homo sapien
ctccagggcctgactggcgtaatgg

SEQ ID NO: 2589400 - DNA, 25 bp, Homo sapien
gcctgactggcgtaatggtcatcca

SEQ ID NO: 2589401 - DNA, 25 bp, Homo sapien
cgtaatggtcatccatgcattccac

SEQ ID NO: 2589402 - DNA, 25 bp, Homo sapien
gactggcgtaatggtcatccatgca

SEQ ID NO: 2589403 - DNA, 25 bp, Homo sapien
catatgttctaagttgtcggcacct

SEQ ID NO: 2589404 - DNA, 25 bp, Homo sapien
tcatccaggcactcaacaagaaggt

SEQ ID NO: 2589405 - DNA, 25 bp, Homo sapien
tcttccagagggaaaactaccctga

SEQ ID NO: 2589406 - DNA, 25 bp, Homo sapien
tggtgctgatgctctatccctccct

SEQ ID NO: 2589407 - DNA, 25 bp, Homo sapien
ttgttaaacagttctggtatgggtg

SEQ ID NO: 2589408 - DNA, 25 bp, Homo sapien
taaacagttctggtatgggtgtggt

SEQ ID NO: 2589409 - DNA, 25 bp, Homo sapien
ttaaacagttctggtatgggtgtgg

SEQ ID NO: 2589410 - DNA, 25 bp, Homo sapien
tgttttgttaaacagttctggtatg

SEQ ID NO: 2589411 - DNA, 25 bp, Homo sapien
tccccattccacgtgatgaacagct

SEQ ID NO: 2589412 - DNA, 25 bp, Homo sapien
cacagagatgtgggcgtgccgcagc

SEQ ID NO: 2589413 - DNA, 25 bp, Homo sapien
ctccccattccacgtgatgaacagc

SEQ ID NO: 2589414 - DNA, 25 bp, Homo sapien
agatgtgggcgtgccgcagcttcag

SEQ ID NO: 2589415 - DNA, 25 bp, Homo sapien
gagctcattgaactccatcaccagg

SEQ ID NO: 2589416 - DNA, 25 bp, Homo sapien
ctcttatcctcaatgacctcctgga

SEQ ID NO: 2589417 - DNA, 25 bp, Homo sapien
catcaccaggcagaggtacagagaa

SEQ ID NO: 2589418 - DNA, 25 bp, Homo sapien
tcctcaatgacctcctggaagctga

SEQ ID NO: 2589419 - DNA, 25 bp, Homo sapien
cgcggtgattctaaagctgggctcc

SEQ ID NO: 2589420 - DNA, 25 bp, Homo sapien
ccccagttagagtaggtctgctgca

SEQ ID NO: 2589421 - DNA, 25 bp, Homo sapien
gagacaagctccatcgagtacccag

SEQ ID NO: 2589422 - DNA, 25 bp, Homo sapien
gaagggcttcactcacaaagtctga

SEQ ID NO: 2589423 - DNA, 25 bp, Homo sapien
ccaaatggtgcaggtattccagcgc

SEQ ID NO: 2589424 - DNA, 25 bp, Homo sapien
tgcaggtattccagcgcgtccagca

SEQ ID NO: 2589425 - DNA, 25 bp, Homo sapien
tggtgcaggtattccagcgcgtcca

SEQ ID NO: 2589426 - DNA, 25 bp, Homo sapien
aatggtgcaggtattccagcgcgtc

SEQ ID NO: 2589427 - DNA, 25 bp, Homo sapien
tctgtcattagcacattggaactca

SEQ ID NO: 2589428 - DNA, 25 bp, Homo sapien
tcctccgcacgaatattccatttgg

SEQ ID NO: 2589429 - DNA, 25 bp, Homo sapien
ggctttgtctgtcattagcacattg

SEQ ID NO: 2589430 - DNA, 25 bp, Homo sapien
caggtcctgcagtttgcagtggtca

SEQ ID NO: 2589431 - DNA, 25 bp, Homo sapien
ttctcaactggaaccccagacaggg

SEQ ID NO: 2589432 - DNA, 25 bp, Homo sapien
gctggactccaaggacgcatgccat

SEQ ID NO: 2589433 - DNA, 25 bp, Homo sapien
tctgagtccatcagtccctggttgg

SEQ ID NO: 2589434 - DNA, 25 bp, Homo sapien
gaggcacgtgccaagaaactgtgca

SEQ ID NO: 2589435 - DNA, 25 bp, Homo sapien
aagcaaggtgggatccctgagtcct

SEQ ID NO: 2589436 - DNA, 25 bp, Homo sapien
tggtaaaagcaaggtgggatccctg

SEQ ID NO: 2589437 - DNA, 25 bp, Homo sapien
ctgttggtaaaagcaaggtgggatc

SEQ ID NO: 2589438 - DNA, 25 bp, Homo sapien
taaaagcaaggtgggatccctgagt

SEQ ID NO: 2589439 - DNA, 25 bp, Homo sapien
aggggccatccaggacttacgaaag

SEQ ID NO: 2589440 - DNA, 25 bp, Homo sapien
tcgcgtgggatggtctgaatattac

SEQ ID NO: 2589441 - DNA, 25 bp, Homo sapien
ttgcttgcaactccgtgcagccttc

SEQ ID NO: 2589442 - DNA, 25 bp, Homo sapien
gggctgctgcgagggtcgcgtggga

SEQ ID NO: 2589443 - DNA, 25 bp, Homo sapien
cactgggttcccgttgcttgcaact

SEQ ID NO: 2589444 - DNA, 25 bp, Homo sapien
gagagaggacagctctgtgtattcc

SEQ ID NO: 2589445 - DNA, 25 bp, Homo sapien
cacggagagaggacagctctgtgta

SEQ ID NO: 2589446 - DNA, 25 bp, Homo sapien
ctgcacggagagaggacagctctgt

SEQ ID NO: 2589447 - DNA, 25 bp, Homo sapien
cggagagaggacagctctgtgtatt

SEQ ID NO: 2589448 - DNA, 25 bp, Homo sapien
tatcgttattcgatccgaggggtcg

SEQ ID NO: 2589449 - DNA, 25 bp, Homo sapien
ttcaggacggccttcaggctgcctg

SEQ ID NO: 2589450 - DNA, 25 bp, Homo sapien
tgaaggtttccacatccgggatctg

SEQ ID NO: 2589451 - DNA, 25 bp, Homo sapien
ctggagcatcaagggcagaagattc

SEQ ID NO: 2589452 - DNA, 25 bp, Homo sapien
gcaaagcccagctgtgcagggataa

SEQ ID NO: 2589453 - DNA, 25 bp, Homo sapien
tactcgccgcagcacggtttgggag

SEQ ID NO: 2589454 - DNA, 25 bp, Homo sapien
gcagggataatcagggcatctgtga

SEQ ID NO: 2589455 - DNA, 25 bp, Homo sapien
tgaggcgttacaaagccaactagct

SEQ ID NO: 2589456 - DNA, 25 bp, Homo sapien
gacgcaggcaccatctgccggtgca

SEQ ID NO: 2589457 - DNA, 25 bp, Homo sapien
tcagagagacgcacgaggacttgaa

SEQ ID NO: 2589458 - DNA, 25 bp, Homo sapien
aatgctggccacgttgccttctaac

SEQ ID NO: 2589459 - DNA, 25 bp, Homo sapien
gaaggagcctctcaagaaggtgatg

SEQ ID NO: 2589460 - DNA, 25 bp, Homo sapien
taatgaaccctctggaactaaacaa

SEQ ID NO: 2589461 - DNA, 25 bp, Homo sapien
ttcagggcacgctccccctttgtgt

SEQ ID NO: 2589462 - DNA, 25 bp, Homo sapien
gggcataaataatgaaccctctgga

SEQ ID NO: 2589463 - DNA, 25 bp, Homo sapien
actaaacaataggatgccaaggcca

SEQ ID NO: 2589464 - DNA, 25 bp, Homo sapien
ccagccagagaatttctgcatgacc

SEQ ID NO: 2589465 - DNA, 25 bp, Homo sapien
cagccagagaatttctgcatgacct

SEQ ID NO: 2589466 - DNA, 25 bp, Homo sapien
tggacttcgggccagccagagaatt

SEQ ID NO: 2589467 - DNA, 25 bp, Homo sapien
gccctgagctggacttcgggccagc

SEQ ID NO: 2589468 - DNA, 25 bp, Homo sapien
tttccccagggaggcaaagtctctc

SEQ ID NO: 2589469 - DNA, 25 bp, Homo sapien
cagcttccctagtttccccagggag

SEQ ID NO: 2589470 - DNA, 25 bp, Homo sapien
cctttgggatggggcccaacagctt

SEQ ID NO: 2589471 - DNA, 25 bp, Homo sapien
cccagggactctgtcctggtcacag

SEQ ID NO: 2589472 - DNA, 25 bp, Homo sapien
agctggacatcgaggaccctgtcat

SEQ ID NO: 2589473 - DNA, 25 bp, Homo sapien
ggacatcgaggaccctgtcatgtag

SEQ ID NO: 2589474 - DNA, 25 bp, Homo sapien
tgtagctccatggtcgtgaccacca

SEQ ID NO: 2589475 - DNA, 25 bp, Homo sapien
acatcgaggaccctgtcatgtagct

SEQ ID NO: 2589476 - DNA, 25 bp, Homo sapien
tctgaagagcactcagcagggtgga

SEQ ID NO: 2589477 - DNA, 25 bp, Homo sapien
gggttgtggtgatggctagcaggct

SEQ ID NO: 2589478 - DNA, 25 bp, Homo sapien
ctgtagaccatgacaagaagtggct

SEQ ID NO: 2589479 - DNA, 25 bp, Homo sapien
cttggcttccgggtggtgcaccagc

SEQ ID NO: 2589480 - DNA, 25 bp, Homo sapien
ggccgctggcgcagacgtccctgct

SEQ ID NO: 2589481 - DNA, 25 bp, Homo sapien
gccgctggcgcagacgtccctgctt

SEQ ID NO: 2589482 - DNA, 25 bp, Homo sapien
cccaggccgctggcgcagacgtccc

SEQ ID NO: 2589483 - DNA, 25 bp, Homo sapien
caggccgctggcgcagacgtccctg

SEQ ID NO: 2589484 - DNA, 25 bp, Homo sapien
tccgtggtttggagctctctttttc

SEQ ID NO: 2589485 - DNA, 25 bp, Homo sapien
tttcctggggcgctggagtgccaag

SEQ ID NO: 2589486 - DNA, 25 bp, Homo sapien
ctttccgtggtttggagctctcttt

SEQ ID NO: 2589487 - DNA, 25 bp, Homo sapien
cgggctttccgtggtttggagctct

SEQ ID NO: 2589488 - DNA, 25 bp, Homo sapien
agaagactccgcagctggcttctgc

SEQ ID NO: 2589489 - DNA, 25 bp, Homo sapien
ttccccatccgcagggtaggtggcc

SEQ ID NO: 2589490 - DNA, 25 bp, Homo sapien
agcagccagaagactccgcagctgg

SEQ ID NO: 2589491 - DNA, 25 bp, Homo sapien
aacacctggctgatgaggtccggga

SEQ ID NO: 2589492 - DNA, 25 bp, Homo sapien
aggcattgttcaccagcagggctct

SEQ ID NO: 2589493 - DNA, 25 bp, Homo sapien
ggccagtccccggtaggcattgttc

SEQ ID NO: 2589494 - DNA, 25 bp, Homo sapien
ctggcacagccggatgctttgcagg

SEQ ID NO: 2589495 - DNA, 25 bp, Homo sapien
cagccggatgctttgcaggagcagc

SEQ ID NO: 2589496 - DNA, 25 bp, Homo sapien
gagccttctgcccaggacgggatgg

SEQ ID NO: 2589497 - DNA, 25 bp, Homo sapien
ttctgcccaggacgggatgggaccc

SEQ ID NO: 2589498 - DNA, 25 bp, Homo sapien
tgggagtgggttcattccctgcttt

SEQ ID NO: 2589499 - DNA, 25 bp, Homo sapien
tgctttcccctgaaagggaagagcc

SEQ ID NO: 2589500 - DNA, 25 bp, Homo sapien
gaccagcagcatgcccacgttctcc

SEQ ID NO: 2589501 - DNA, 25 bp, Homo sapien
gcagcatgcccacgttctccaccac

SEQ ID NO: 2589502 - DNA, 25 bp, Homo sapien
agcatgcccacgttctccaccacct

SEQ ID NO: 2589503 - DNA, 25 bp, Homo sapien
cagcagcatgcccacgttctccacc

SEQ ID NO: 2589504 - DNA, 25 bp, Homo sapien
tggagcagggccttcatactactgg

SEQ ID NO: 2589505 - DNA, 25 bp, Homo sapien
gcctggtttgctgaaggcgctgctg

SEQ ID NO: 2589506 - DNA, 25 bp, Homo sapien
ctggtttgctgaaggcgctgctgtc

SEQ ID NO: 2589507 - DNA, 25 bp, Homo sapien
tggtttgctgaaggcgctgctgtca

SEQ ID NO: 2589508 - DNA, 25 bp, Homo sapien
aggcctggtttgctgaaggcgctgc

SEQ ID NO: 2589509 - DNA, 25 bp, Homo sapien
ccgtttaagattgattttggcccag

SEQ ID NO: 2589510 - DNA, 25 bp, Homo sapien
caggagcagttactcatgtgactca

SEQ ID NO: 2589511 - DNA, 25 bp, Homo sapien
catagagatgggataataggcaggc

SEQ ID NO: 2589512 - DNA, 25 bp, Homo sapien
caagtcagttttcgtggacagtccc

SEQ ID NO: 2589513 - DNA, 25 bp, Homo sapien
cactttttccgcgcaagaaaccagt

SEQ ID NO: 2589514 - DNA, 25 bp, Homo sapien
gcactttttccgcgcaagaaaccag

SEQ ID NO: 2589515 - DNA, 25 bp, Homo sapien
cttccccacccagtgggctgggaga

SEQ ID NO: 2589516 - DNA, 25 bp, Homo sapien
ctgggagaggtggctgcctccagcc

SEQ ID NO: 2589517 - DNA, 25 bp, Homo sapien
tgcttccccacccagtgggctggga

SEQ ID NO: 2589518 - DNA, 25 bp, Homo sapien
gagctgcttccccacccagtgggct

SEQ ID NO: 2589519 - DNA, 25 bp, Homo sapien
ggcctgtggggtatctgtcttctcc

SEQ ID NO: 2589520 - DNA, 25 bp, Homo sapien
cctgtggggtatctgtcttctcccc

SEQ ID NO: 2589521 - DNA, 25 bp, Homo sapien
gggcctgtggggtatctgtcttctc

SEQ ID NO: 2589522 - DNA, 25 bp, Homo sapien
acagtggcccatggaaaggaaggac

SEQ ID NO: 2589523 - DNA, 25 bp, Homo sapien
cagacacaccgaggatgcgatttaa

SEQ ID NO: 2589524 - DNA, 25 bp, Homo sapien
aagctatgtgatgctagccggtggc

SEQ ID NO: 2589525 - DNA, 25 bp, Homo sapien
caaggcgttattgggccacctgaca

SEQ ID NO: 2589526 - DNA, 25 bp, Homo sapien
aaccttgggctatttgagctggaga

SEQ ID NO: 2589527 - DNA, 25 bp, Homo sapien
tcctgtggccgtttgaactttgagc

SEQ ID NO: 2589528 - DNA, 25 bp, Homo sapien
aggcttctccccatagcacgaggat

SEQ ID NO: 2589529 - DNA, 25 bp, Homo sapien
cagctggccggcacaacaggtgtta

SEQ ID NO: 2589530 - DNA, 25 bp, Homo sapien
ccagggttggctggtgggtcaccca

SEQ ID NO: 2589531 - DNA, 25 bp, Homo sapien
tgcttcttccgagcgttgagcagag

SEQ ID NO: 2589532 - DNA, 25 bp, Homo sapien
cagtacacgtgtgtggaaggaaagc

SEQ ID NO: 2589533 - DNA, 25 bp, Homo sapien
aagcgtgctgaagccagaaagaccc

SEQ ID NO: 2589534 - DNA, 25 bp, Homo sapien
gaaagacccaagtatgaggcctgtc

SEQ ID NO: 2589535 - DNA, 25 bp, Homo sapien
caaggcctgtctccttatggaggct

SEQ ID NO: 2589536 - DNA, 25 bp, Homo sapien
ctagagtgtgcgcatgataaggcag

SEQ ID NO: 2589537 - DNA, 25 bp, Homo sapien
gcacagcgacttcaccaaggcctgt

SEQ ID NO: 2589538 - DNA, 25 bp, Homo sapien
cactttaccctgatgtcgtctgttc

SEQ ID NO: 2589539 - DNA, 25 bp, Homo sapien
accagacagctctccggatgtgcac

SEQ ID NO: 2589540 - DNA, 25 bp, Homo sapien
taagatggttgcagttcagggtaac

SEQ ID NO: 2589541 - DNA, 25 bp, Homo sapien
tatggaatgggacaggcctgctcac

SEQ ID NO: 2589542 - DNA, 25 bp, Homo sapien
ctgctcactactgggcgggacgatt

SEQ ID NO: 2589543 - DNA, 25 bp, Homo sapien
agtaagaagacacggcctgtggctc

SEQ ID NO: 2589544 - DNA, 25 bp, Homo sapien
caagtaagaagacacggcctgtggc

SEQ ID NO: 2589545 - DNA, 25 bp, Homo sapien
agaagacacggcctgtggctccaaa

SEQ ID NO: 2589546 - DNA, 25 bp, Homo sapien
ggctcaagtaagaagacacggcctg

SEQ ID NO: 2589547 - DNA, 25 bp, Homo sapien
agctcctgaaaatcagccagctcag

SEQ ID NO: 2589548 - DNA, 25 bp, Homo sapien
acggtcagaaaccacaagagctcct

SEQ ID NO: 2589549 - DNA, 25 bp, Homo sapien
gaaaatcagccagctcagcagaggc

SEQ ID NO: 2589550 - DNA, 25 bp, Homo sapien
gtcagaaaccacaagagctcctgaa

SEQ ID NO: 2589551 - DNA, 25 bp, Homo sapien
tgtttcccacagaaggaataaatat

SEQ ID NO: 2589552 - DNA, 25 bp, Homo sapien
atcttgtttcccacagaaggaataa

SEQ ID NO: 2589553 - DNA, 25 bp, Homo sapien
tcccacagaaggaataaatatttac

SEQ ID NO: 2589554 - DNA, 25 bp, Homo sapien
ctatcttgtttcccacagaaggaat

SEQ ID NO: 2589555 - DNA, 25 bp, Homo sapien
gcctctggaagccaggggaaggagg

SEQ ID NO: 2589556 - DNA, 25 bp, Homo sapien
gcctctgcctctggaagccagggga

SEQ ID NO: 2589557 - DNA, 25 bp, Homo sapien
ctgcctctggaagccaggggaagga

SEQ ID NO: 2589558 - DNA, 25 bp, Homo sapien
ctctggaagccaggggaaggagggc

SEQ ID NO: 2589559 - DNA, 25 bp, Homo sapien
aagacatcggggcccacggccacca

SEQ ID NO: 2589560 - DNA, 25 bp, Homo sapien
gaagacatcggggcccacggccacc

SEQ ID NO: 2589561 - DNA, 25 bp, Homo sapien
agcacatagcgctctgtgtcctcct

SEQ ID NO: 2589562 - DNA, 25 bp, Homo sapien
gttggtgagcacatagcgctctgtg

SEQ ID NO: 2589563 - DNA, 25 bp, Homo sapien
ttgaggttggtgagcacatagcgct

SEQ ID NO: 2589564 - DNA, 25 bp, Homo sapien
atgttgaggttggtgagcacatagc

SEQ ID NO: 2589565 - DNA, 25 bp, Homo sapien
ctgcacagtccagcgtggggcactc

SEQ ID NO: 2589566 - DNA, 25 bp, Homo sapien
tgcacagtccagcgtggggcactca

SEQ ID NO: 2589567 - DNA, 25 bp, Homo sapien
gcacagtccagcgtggggcactcac

SEQ ID NO: 2589568 - DNA, 25 bp, Homo sapien
attcagactaccagatacaccagcc

SEQ ID NO: 2589569 - DNA, 25 bp, Homo sapien
ccacagacattggtcaccagccctg

SEQ ID NO: 2589570 - DNA, 25 bp, Homo sapien
tattcagactaccagatacaccagc

SEQ ID NO: 2589571 - DNA, 25 bp, Homo sapien
tgtattcagactaccagatacacca

SEQ ID NO: 2589572 - DNA, 25 bp, Homo sapien
accaggtgcacccgaaactgagccc

SEQ ID NO: 2589573 - DNA, 25 bp, Homo sapien
gacgggtcccgaagcagttctgccc

SEQ ID NO: 2589574 - DNA, 25 bp, Homo sapien
cagggacgggtcccgaagcagttct

SEQ ID NO: 2589575 - DNA, 25 bp, Homo sapien
caggctctgtcagaatgaccatctt

SEQ ID NO: 2589576 - DNA, 25 bp, Homo sapien
caggatccgtgtcgtcctcagggtt

SEQ ID NO: 2589577 - DNA, 25 bp, Homo sapien
tcagcagggacgaggtgaggttggc

SEQ ID NO: 2589578 - DNA, 25 bp, Homo sapien
tagtgatatagaggaccaggtcagc

SEQ ID NO: 2589579 - DNA, 25 bp, Homo sapien
cccacagacgctcagcagggacgag

SEQ ID NO: 2589580 - DNA, 25 bp, Homo sapien
gcacctgccggttaccatcaggcaa

SEQ ID NO: 2589581 - DNA, 25 bp, Homo sapien
accatcaggcaactccaggtcaaac

SEQ ID NO: 2589582 - DNA, 25 bp, Homo sapien
tgtcctcggtaatgaggcagctcca

SEQ ID NO: 2589583 - DNA, 25 bp, Homo sapien
gtgactcccaggtcgaagccagtgt

SEQ ID NO: 2589584 - DNA, 25 bp, Homo sapien
cgggtcccacacgcagcgcgcccgt

SEQ ID NO: 2589585 - DNA, 25 bp, Homo sapien
gtcccacacgcagcgcgcccgtcct

SEQ ID NO: 2589586 - DNA, 25 bp, Homo sapien
gcatccggcgggtgccccgcggacc

SEQ ID NO: 2589587 - DNA, 25 bp, Homo sapien
ctgcgcatccggcgggtgccccgcg

SEQ ID NO: 2589588 - DNA, 25 bp, Homo sapien
aaggccacgcggcactgctcgttgg

SEQ ID NO: 2589589 - DNA, 25 bp, Homo sapien
tgctccctggcgaaggtgcaggcga

SEQ ID NO: 2589590 - DNA, 25 bp, Homo sapien
caggtgctccctggcgaaggtgcag

SEQ ID NO: 2589591 - DNA, 25 bp, Homo sapien
gccttggggccgaaggccacgcggc

SEQ ID NO: 2589592 - DNA, 25 bp, Homo sapien
tctccacgccacattctgtcccatc

SEQ ID NO: 2589593 - DNA, 25 bp, Homo sapien
tccagcgggtctgtgtggcaggaga

SEQ ID NO: 2589594 - DNA, 25 bp, Homo sapien
tccacgccacattctgtcccatcca

SEQ ID NO: 2589595 - DNA, 25 bp, Homo sapien
cacgccacattctgtcccatccagg

SEQ ID NO: 2589596 - DNA, 25 bp, Homo sapien
cactgctgctatgggggtcagctcc

SEQ ID NO: 2589597 - DNA, 25 bp, Homo sapien
ttcggggaccccagctagaccagcg

SEQ ID NO: 2589598 - DNA, 25 bp, Homo sapien
caggagcgggagcaaggacttcggg

SEQ ID NO: 2589599 - DNA, 25 bp, Homo sapien
gagcggcagcgacccttggagcacc

SEQ ID NO: 2589600 - DNA, 25 bp, Homo sapien
ctgagtgttgcacatctcggcctgg

SEQ ID NO: 2589601 - DNA, 25 bp, Homo sapien
caccaacacatgcacgccccccaaa

SEQ ID NO: 2589602 - DNA, 25 bp, Homo sapien
gagtgttgcacatctcggcctggag

SEQ ID NO: 2589603 - DNA, 25 bp, Homo sapien
acatgcacgccccccaaaggcaggt

SEQ ID NO: 2589604 - DNA, 25 bp, Homo sapien
cagcaccccagtggtagaaggaggc

SEQ ID NO: 2589605 - DNA, 25 bp, Homo sapien
agcgcagcggctggccgtcggtcct

SEQ ID NO: 2589606 - DNA, 25 bp, Homo sapien
gcgcactgttgcgacatgaactcca

SEQ ID NO: 2589607 - DNA, 25 bp, Homo sapien
tcggtcctggcgcactgttgcgaca

SEQ ID NO: 2589608 - DNA, 25 bp, Homo sapien
atgatgaagctctcgccaatggccc

SEQ ID NO: 2589609 - DNA, 25 bp, Homo sapien
aagctgtctccacgcttcatgatga

SEQ ID NO: 2589610 - DNA, 25 bp, Homo sapien
gggtcccatcgaggaagctgtctcc

SEQ ID NO: 2589611 - DNA, 25 bp, Homo sapien
gggccacttggcatacaccgggtcc

SEQ ID NO: 2589612 - DNA, 25 bp, Homo sapien
caggaagcaagcttagagggctcag

SEQ ID NO: 2589613 - DNA, 25 bp, Homo sapien
ctgagattctgggatccacaaaacc

SEQ ID NO: 2589614 - DNA, 25 bp, Homo sapien
ttccgataggacaggtaggccccag

SEQ ID NO: 2589615 - DNA, 25 bp, Homo sapien
cccaggagccttccgataggacagg

SEQ ID NO: 2589616 - DNA, 25 bp, Homo sapien
ctggcacctgtcccatacctgctgg

SEQ ID NO: 2589617 - DNA, 25 bp, Homo sapien
tggcacctgtcccatacctgctggg

SEQ ID NO: 2589618 - DNA, 25 bp, Homo sapien
tccatcctaccatcacagccaaatg

SEQ ID NO: 2589619 - DNA, 25 bp, Homo sapien
cctggcacctgtcccatacctgctg

SEQ ID NO: 2589620 - DNA, 25 bp, Homo sapien
tcaggttgggggtaactgtcagaaa

SEQ ID NO: 2589621 - DNA, 25 bp, Homo sapien
caatgtagacactggtcaggttggg

SEQ ID NO: 2589622 - DNA, 25 bp, Homo sapien
gcaatgtagacactggtcaggttgg

SEQ ID NO: 2589623 - DNA, 25 bp, Homo sapien
gtcaggttgggggtaactgtcagaa

SEQ ID NO: 2589624 - DNA, 25 bp, Homo sapien
agggccactctgtactcgacacgac

SEQ ID NO: 2589625 - DNA, 25 bp, Homo sapien
agccggtcctcggtgagggccactc

SEQ ID NO: 2589626 - DNA, 25 bp, Homo sapien
agccacgacatagcgccctccgatc

SEQ ID NO: 2589627 - DNA, 25 bp, Homo sapien
ggtgttaggggagatgctcatcttc

SEQ ID NO: 2589628 - DNA, 25 bp, Homo sapien
gaactgcagggccttctcccacggg

SEQ ID NO: 2589629 - DNA, 25 bp, Homo sapien
gatcccagaactgcagggccttctc

SEQ ID NO: 2589630 - DNA, 25 bp, Homo sapien
ctgatcccagaactgcagggccttc

SEQ ID NO: 2589631 - DNA, 25 bp, Homo sapien
actgcagggccttctcccacgggct

SEQ ID NO: 2589632 - DNA, 25 bp, Homo sapien
ccacagctcaccgagcagggcccac

SEQ ID NO: 2589633 - DNA, 25 bp, Homo sapien
ctggaagtaggtgaaggtgatgtct

SEQ ID NO: 2589634 - DNA, 25 bp, Homo sapien
gaggttgccatactcctcgccatac

SEQ ID NO: 2589635 - DNA, 25 bp, Homo sapien
tggcttaggctggaagtaggtgaag

SEQ ID NO: 2589636 - DNA, 25 bp, Homo sapien
agggagggcagggttcgagcacgca

SEQ ID NO: 2589637 - DNA, 25 bp, Homo sapien
gcagggttcgagcacgcaggcctct

SEQ ID NO: 2589638 - DNA, 25 bp, Homo sapien
gttcgagcacgcaggcctctggcca

SEQ ID NO: 2589639 - DNA, 25 bp, Homo sapien
cactggacagtctccaccaactcct

SEQ ID NO: 2589640 - DNA, 25 bp, Homo sapien
ggcgctgcatgggccgaagtctccc

SEQ ID NO: 2589641 - DNA, 25 bp, Homo sapien
ctccacgcagcgcactggccgctcc

SEQ ID NO: 2589642 - DNA, 25 bp, Homo sapien
tgcatgggccgaagtctcccaccgc

SEQ ID NO: 2589643 - DNA, 25 bp, Homo sapien
gggttgcaggtttccagcgccacag

SEQ ID NO: 2589644 - DNA, 25 bp, Homo sapien
acatgacatcccgacacagggctca

SEQ ID NO: 2589645 - DNA, 25 bp, Homo sapien
tggaggacatgacatcccgacacag

SEQ ID NO: 2589646 - DNA, 25 bp, Homo sapien
gagccaggcccctcagtcactggag

SEQ ID NO: 2589647 - DNA, 25 bp, Homo sapien
agcttctcatctacggagccaggcc

SEQ ID NO: 2589648 - DNA, 25 bp, Homo sapien
cctcagcagcatgagtgctcactgt

SEQ ID NO: 2589649 - DNA, 25 bp, Homo sapien
ctcagcagcatgagtgctcactgtg

SEQ ID NO: 2589650 - DNA, 25 bp, Homo sapien
gtccacacgtgtgcagcttgagccc

SEQ ID NO: 2589651 - DNA, 25 bp, Homo sapien
tgccgcaggggtccacacgtgtgca

SEQ ID NO: 2589652 - DNA, 25 bp, Homo sapien
agacggagcacgaccctgccgcagg

SEQ ID NO: 2589653 - DNA, 25 bp, Homo sapien
ccgcaggagacggagcacgaccctg

SEQ ID NO: 2589654 - DNA, 25 bp, Homo sapien
ttcctggacaggcaccctgagggca

SEQ ID NO: 2589655 - DNA, 25 bp, Homo sapien
gtccatgcacaggaaacgcagctcc

SEQ ID NO: 2589656 - DNA, 25 bp, Homo sapien
tcctggacaggcaccctgagggcag

SEQ ID NO: 2589657 - DNA, 25 bp, Homo sapien
cctggacaggcaccctgagggcaga

SEQ ID NO: 2589658 - DNA, 25 bp, Homo sapien
cagggcacgggacagcctggcagac

SEQ ID NO: 2589659 - DNA, 25 bp, Homo sapien
cgagcagggcacgggacagcctggc

SEQ ID NO: 2589660 - DNA, 25 bp, Homo sapien
agcagggcacgggacagcctggcag

SEQ ID NO: 2589661 - DNA, 25 bp, Homo sapien
gcagggcacgggacagcctggcaga

SEQ ID NO: 2589662 - DNA, 25 bp, Homo sapien
ctccgcaggtcaccgggcatggagc

SEQ ID NO: 2589663 - DNA, 25 bp, Homo sapien
caggtcaccgggcatggagccaagg

SEQ ID NO: 2589664 - DNA, 25 bp, Homo sapien
gcaggtcaccgggcatggagccaag

SEQ ID NO: 2589665 - DNA, 25 bp, Homo sapien
cgcaggtcaccgggcatggagccaa

SEQ ID NO: 2589666 - DNA, 25 bp, Homo sapien
tgcaggccgccagcttgtactgcca

SEQ ID NO: 2589667 - DNA, 25 bp, Homo sapien
gcactgggtgtccaacaggatctcc

SEQ ID NO: 2589668 - DNA, 25 bp, Homo sapien
caggatctcctcaccatcgtcctcc

SEQ ID NO: 2589669 - DNA, 25 bp, Homo sapien
catgggcccgggcacaatacaggat

SEQ ID NO: 2589670 - DNA, 25 bp, Homo sapien
tggccttggtcgagctgcacacagg

SEQ ID NO: 2589671 - DNA, 25 bp, Homo sapien
cagtcggcaatgagacaggggacac

SEQ ID NO: 2589672 - DNA, 25 bp, Homo sapien
accgagcgtctagcagtgccaaggc

SEQ ID NO: 2589673 - DNA, 25 bp, Homo sapien
aacatgccagcggtaggtgcagtcg

SEQ ID NO: 2589674 - DNA, 25 bp, Homo sapien
agggattccgagtgcccgctgtgct

SEQ ID NO: 2589675 - DNA, 25 bp, Homo sapien
cagccccatagggattccgagtgcc

SEQ ID NO: 2589676 - DNA, 25 bp, Homo sapien
cgatgagccaatgcctcctagactc

SEQ ID NO: 2589677 - DNA, 25 bp, Homo sapien
ttcctttcaggggacacgatgagcc

SEQ ID NO: 2589678 - DNA, 25 bp, Homo sapien
gtgtcacgccggcgctggatgccat

SEQ ID NO: 2589679 - DNA, 25 bp, Homo sapien
ggcaggtgtcacgccggcgctggat

SEQ ID NO: 2589680 - DNA, 25 bp, Homo sapien
tcaccggcttgggcaagtgctggca

SEQ ID NO: 2589681 - DNA, 25 bp, Homo sapien
tggcagaaatcagctggcacaggcg

SEQ ID NO: 2589682 - DNA, 25 bp, Homo sapien
agggcccagcccagcagccacgcac

SEQ ID NO: 2589683 - DNA, 25 bp, Homo sapien
tcgtggggcaccaggctgggcgtac

SEQ ID NO: 2589684 - DNA, 25 bp, Homo sapien
ggtggctgtggtccgtcctggagca

SEQ ID NO: 2589685 - DNA, 25 bp, Homo sapien
gtccgtcctggagcagcggcttctt

SEQ ID NO: 2589686 - DNA, 25 bp, Homo sapien
tggagcagcggcttcttcgtggggc

SEQ ID NO: 2589687 - DNA, 25 bp, Homo sapien
tggactgcactgagttttcctgggg

SEQ ID NO: 2589688 - DNA, 25 bp, Homo sapien
gcagctgcctgacaggaaggaggac

SEQ ID NO: 2589689 - DNA, 25 bp, Homo sapien
cagctgcctgacaggaaggaggaca

SEQ ID NO: 2589690 - DNA, 25 bp, Homo sapien
tgcagcagctgcctgacaggaagga

SEQ ID NO: 2589691 - DNA, 25 bp, Homo sapien
cagcagctgcctgacaggaaggagg

SEQ ID NO: 2589692 - DNA, 25 bp, Homo sapien
aggcacacaacccagggaccaagtg

SEQ ID NO: 2589693 - DNA, 25 bp, Homo sapien
ggaccaagtgcttgtgccagtcctt

SEQ ID NO: 2589694 - DNA, 25 bp, Homo sapien
cagggaccaagtgcttgtgccagtc

SEQ ID NO: 2589695 - DNA, 25 bp, Homo sapien
caacccagggaccaagtgcttgtgc

SEQ ID NO: 2589696 - DNA, 25 bp, Homo sapien
caagttacttccccttgatagtagt

SEQ ID NO: 2589697 - DNA, 25 bp, Homo sapien
tcaagttacttccccttgatagtag

SEQ ID NO: 2589698 - DNA, 25 bp, Homo sapien
ttcaagttacttccccttgatagta

SEQ ID NO: 2589699 - DNA, 25 bp, Homo sapien
cttcaagttacttccccttgatagt

SEQ ID NO: 2589700 - DNA, 25 bp, Homo sapien
cctgttggctcaaggtgctgcctgc

SEQ ID NO: 2589701 - DNA, 25 bp, Homo sapien
tgttggctcaaggtgctgcctgcca

SEQ ID NO: 2589702 - DNA, 25 bp, Homo sapien
ctgttggctcaaggtgctgcctgcc

SEQ ID NO: 2589703 - DNA, 25 bp, Homo sapien
tcaaggacgcggagggtcaccacct

SEQ ID NO: 2589704 - DNA, 25 bp, Homo sapien
aactctcaaggacgcggagggtcac

SEQ ID NO: 2589705 - DNA, 25 bp, Homo sapien
ctgcagttgagagaactctcaagga

SEQ ID NO: 2589706 - DNA, 25 bp, Homo sapien
agaactctcaaggacgcggagggtc

SEQ ID NO: 2589707 - DNA, 25 bp, Homo sapien
tctgtagaaggtttcaggagcaagc

SEQ ID NO: 2589708 - DNA, 25 bp, Homo sapien
ggagcaagctggctcccataccgca

SEQ ID NO: 2589709 - DNA, 25 bp, Homo sapien
ggagctgaaagtcatgtccaacagc

SEQ ID NO: 2589710 - DNA, 25 bp, Homo sapien
ccagcgtgttggtcttggagctgaa

SEQ ID NO: 2589711 - DNA, 25 bp, Homo sapien
ttgctgcacggtcccaaaaaggagg

SEQ ID NO: 2589712 - DNA, 25 bp, Homo sapien
gaaacaatggcatgcactgagcaga

SEQ ID NO: 2589713 - DNA, 25 bp, Homo sapien
ggcaacaaagataggctccacccat

SEQ ID NO: 2589714 - DNA, 25 bp, Homo sapien
caggacaaccgagagggctatcaga

SEQ ID NO: 2589715 - DNA, 25 bp, Homo sapien
gtcccagcgcccatgttggtggcca

SEQ ID NO: 2589716 - DNA, 25 bp, Homo sapien
ccagggcatggatggcaatccgtgc

SEQ ID NO: 2589717 - DNA, 25 bp, Homo sapien
cgtgcgtgcggagccacattaatga

SEQ ID NO: 2589718 - DNA, 25 bp, Homo sapien
acattaatgaagagccggcagcccc

SEQ ID NO: 2589719 - DNA, 25 bp, Homo sapien
taattagcactcacggaagccttcg

SEQ ID NO: 2589720 - DNA, 25 bp, Homo sapien
gggaagctgataccctgcagaacac

SEQ ID NO: 2589721 - DNA, 25 bp, Homo sapien
tgcaagggctcacagattccggatc

SEQ ID NO: 2589722 - DNA, 25 bp, Homo sapien
ggaccggccacaagtaataattagc

SEQ ID NO: 2589723 - DNA, 25 bp, Homo sapien
tggctgctctctgactcccagtaga

SEQ ID NO: 2589724 - DNA, 25 bp, Homo sapien
ggaacgctgtggtcctcaagctgtg

SEQ ID NO: 2589725 - DNA, 25 bp, Homo sapien
tctgactcccagtagagcacctgct

SEQ ID NO: 2589726 - DNA, 25 bp, Homo sapien
ctgctgcccatggaacgctgtggtc

SEQ ID NO: 2589727 - DNA, 25 bp, Homo sapien
ttcccttccaggactgagggtcctg

SEQ ID NO: 2589728 - DNA, 25 bp, Homo sapien
actgagggtcctgcatctccggtac

SEQ ID NO: 2589729 - DNA, 25 bp, Homo sapien
ggactgagggtcctgcatctccggt

SEQ ID NO: 2589730 - DNA, 25 bp, Homo sapien
cttccaggactgagggtcctgcatc

SEQ ID NO: 2589731 - DNA, 25 bp, Homo sapien
tggccagacacggaacaaatgttca

SEQ ID NO: 2589732 - DNA, 25 bp, Homo sapien
ctaagattggaaaaagttcgaattg

SEQ ID NO: 2589733 - DNA, 25 bp, Homo sapien
caaccccctagccttttggacattg

SEQ ID NO: 2589734 - DNA, 25 bp, Homo sapien
tggagaagactctaaagtagatacc

SEQ ID NO: 2589735 - DNA, 25 bp, Homo sapien
tcacaaagggctcggtagccggccg

SEQ ID NO: 2589736 - DNA, 25 bp, Homo sapien
cggccgcgtccgagccggcgcgctg

SEQ ID NO: 2589737 - DNA, 25 bp, Homo sapien
cctcacaaagggctcggtagccggc

SEQ ID NO: 2589738 - DNA, 25 bp, Homo sapien
ctcacaaagggctcggtagccggcc

SEQ ID NO: 2589739 - DNA, 25 bp, Homo sapien
gcgcagagctggcggacgccccggg

SEQ ID NO: 2589740 - DNA, 25 bp, Homo sapien
acacagccagcggtaccaccacgtc

SEQ ID NO: 2589741 - DNA, 25 bp, Homo sapien
ggcgacacagccagcggtaccacca

SEQ ID NO: 2589742 - DNA, 25 bp, Homo sapien
agccagcggtaccaccacgtcatgc

SEQ ID NO: 2589743 - DNA, 25 bp, Homo sapien
aggcgacacagccagcggtaccacc

SEQ ID NO: 2589744 - DNA, 25 bp, Homo sapien
ctgacagctcggctgtgcttcctgc

SEQ ID NO: 2589745 - DNA, 25 bp, Homo sapien
cagctcggctgtgcttcctgctgca

SEQ ID NO: 2589746 - DNA, 25 bp, Homo sapien
gacagctcggctgtgcttcctgctg

SEQ ID NO: 2589747 - DNA, 25 bp, Homo sapien
tgacagctcggctgtgcttcctgct

SEQ ID NO: 2589748 - DNA, 25 bp, Homo sapien
gttgaagaggccagagatcgcgcaa

SEQ ID NO: 2589749 - DNA, 25 bp, Homo sapien
acacgccggccgcaatgttcagagg

SEQ ID NO: 2589750 - DNA, 25 bp, Homo sapien
tgttcagagggtggatggtgatgca

SEQ ID NO: 2589751 - DNA, 25 bp, Homo sapien
tgatgcagttgaagaggccagagat

SEQ ID NO: 2589752 - DNA, 25 bp, Homo sapien
cagagggcgagggccccagtatagt

SEQ ID NO: 2589753 - DNA, 25 bp, Homo sapien
ctcagtggatgctccagaaatgtct

SEQ ID NO: 2589754 - DNA, 25 bp, Homo sapien
ccccagtatagtggacttggcatct

SEQ ID NO: 2589755 - DNA, 25 bp, Homo sapien
cagtggatgctccagaaatgtctgg

SEQ ID NO: 2589756 - DNA, 25 bp, Homo sapien
ctttagcaagtccttgcatccagcc

SEQ ID NO: 2589757 - DNA, 25 bp, Homo sapien
acggaaggtgtctgctgtggtcttg

SEQ ID NO: 2589758 - DNA, 25 bp, Homo sapien
ggaagaactttagcaagtccttgca

SEQ ID NO: 2589759 - DNA, 25 bp, Homo sapien
ccactggtgacggaaggtgtctgct

SEQ ID NO: 2589760 - DNA, 25 bp, Homo sapien
tggccaccaaaagccgtcagtggca

SEQ ID NO: 2589761 - DNA, 25 bp, Homo sapien
tgtgtcctctgtctgctgttagtat

SEQ ID NO: 2589762 - DNA, 25 bp, Homo sapien
atggcactgctacaacgctgcggca

SEQ ID NO: 2589763 - DNA, 25 bp, Homo sapien
gctgttagtattatcgccatggcca

SEQ ID NO: 2589764 - DNA, 25 bp, Homo sapien
tcctagagggaagcccctgggcttc

SEQ ID NO: 2589765 - DNA, 25 bp, Homo sapien
tcggagagcctctgctgaagactcc

SEQ ID NO: 2589766 - DNA, 25 bp, Homo sapien
cactcctagagggaagcccctgggc

SEQ ID NO: 2589767 - DNA, 25 bp, Homo sapien
cctcggagagcctctgctgaagact

SEQ ID NO: 2589768 - DNA, 25 bp, Homo sapien
gccggtccaccttctccgccactgt

SEQ ID NO: 2589769 - DNA, 25 bp, Homo sapien
ttgcaaactcgatgaactggcagca

SEQ ID NO: 2589770 - DNA, 25 bp, Homo sapien
agaagggcgcctcacacagcaacaa

SEQ ID NO: 2589771 - DNA, 25 bp, Homo sapien
ccactgtgtttgcaaactcgatgaa

SEQ ID NO: 2589772 - DNA, 25 bp, Homo sapien
agagaggaactgaatacactgccca

SEQ ID NO: 2589773 - DNA, 25 bp, Homo sapien
ttccagtgactacggcacagcgaca

SEQ ID NO: 2589774 - DNA, 25 bp, Homo sapien
tagatgaacccactcttcggaaagg

SEQ ID NO: 2589775 - DNA, 25 bp, Homo sapien
ggcacgttttggcagctatgagcaa

SEQ ID NO: 2589776 - DNA, 25 bp, Homo sapien
caataatgaatacagctgccaccag

SEQ ID NO: 2589777 - DNA, 25 bp, Homo sapien
ccctaaggacatgacactgcgtgta

SEQ ID NO: 2589778 - DNA, 25 bp, Homo sapien
gcacacacatcagaagattagcagg

SEQ ID NO: 2589779 - DNA, 25 bp, Homo sapien
cagcgggcttcgagtaacattgttc

SEQ ID NO: 2589780 - DNA, 25 bp, Homo sapien
tagcttcgcgggcaagttactcgga

SEQ ID NO: 2589781 - DNA, 25 bp, Homo sapien
taaacagtaacgagatggtccagtg

SEQ ID NO: 2589782 - DNA, 25 bp, Homo sapien
gatcaaagcttgtccgaggtcagtc

SEQ ID NO: 2589783 - DNA, 25 bp, Homo sapien
gttactcggaatctccaccgcggag

SEQ ID NO: 2589784 - DNA, 25 bp, Homo sapien
agagcagagagtccgtacagcaccc

SEQ ID NO: 2589785 - DNA, 25 bp, Homo sapien
tagcaaaggcgatggcgttgcccag

SEQ ID NO: 2589786 - DNA, 25 bp, Homo sapien
tgatgacgatgggaacgaccgccat

SEQ ID NO: 2589787 - DNA, 25 bp, Homo sapien
agcacccccgtagcaaaggcgatgg

SEQ ID NO: 2589788 - DNA, 25 bp, Homo sapien
ccaggggctgggcctggcagacgca

SEQ ID NO: 2589789 - DNA, 25 bp, Homo sapien
ggcggagggaggaaggccctgccca

SEQ ID NO: 2589790 - DNA, 25 bp, Homo sapien
tgcccaggggctgggcctggcagac

SEQ ID NO: 2589791 - DNA, 25 bp, Homo sapien
caggggctgggcctggcagacgcac

SEQ ID NO: 2589792 - DNA, 25 bp, Homo sapien
cctctgctgctggatcctggcatag

SEQ ID NO: 2589793 - DNA, 25 bp, Homo sapien
gctgctggatcctggcataggagat

SEQ ID NO: 2589794 - DNA, 25 bp, Homo sapien
agggtctccgcgagcttctcctcat

SEQ ID NO: 2589795 - DNA, 25 bp, Homo sapien
cctccagggtctccgcgagcttctc

SEQ ID NO: 2589796 - DNA, 25 bp, Homo sapien
gtggacagtccaggcctcacttgga

SEQ ID NO: 2589797 - DNA, 25 bp, Homo sapien
tgccaaggctgcagttccaggtacc

SEQ ID NO: 2589798 - DNA, 25 bp, Homo sapien
cagccgccggaagagacgttccttg

SEQ ID NO: 2589799 - DNA, 25 bp, Homo sapien
ttcacttagcaagacccagtacctg

SEQ ID NO: 2589800 - DNA, 25 bp, Homo sapien
gccacgctttattgcttaagacgca

SEQ ID NO: 2589801 - DNA, 25 bp, Homo sapien
cgctttattgcttaagacgcacaca

SEQ ID NO: 2589802 - DNA, 25 bp, Homo sapien
cacgctttattgcttaagacgcaca

SEQ ID NO: 2589803 - DNA, 25 bp, Homo sapien
cggccacgctttattgcttaagacg

SEQ ID NO: 2589804 - DNA, 25 bp, Homo sapien
tcacacacaggcaccaaggcagaag

SEQ ID NO: 2589805 - DNA, 25 bp, Homo sapien
tgcctggcttccacactcacacaca

SEQ ID NO: 2589806 - DNA, 25 bp, Homo sapien
ctggcttccacactcacacacaggc

SEQ ID NO: 2589807 - DNA, 25 bp, Homo sapien
cacacaggcaccaaggcagaaggga

SEQ ID NO: 2589808 - DNA, 25 bp, Homo sapien
agtttgaaacagctttgatgcccat

SEQ ID NO: 2589809 - DNA, 25 bp, Homo sapien
ggaggggcctgccctcagctgccat

SEQ ID NO: 2589810 - DNA, 25 bp, Homo sapien
cttccagccatggggggtcccatgt

SEQ ID NO: 2589811 - DNA, 25 bp, Homo sapien
atggggggtcccatgtcctgggagg

SEQ ID NO: 2589812 - DNA, 25 bp, Homo sapien
gggaggggcctgccctcagctgcca

SEQ ID NO: 2589813 - DNA, 25 bp, Homo sapien
agctgggtgtgcaaggcccagtcac

SEQ ID NO: 2589814 - DNA, 25 bp, Homo sapien
cagctgggtgtgcaaggcccagtca

SEQ ID NO: 2589815 - DNA, 25 bp, Homo sapien
ccagctgggtgtgcaaggcccagtc

SEQ ID NO: 2589816 - DNA, 25 bp, Homo sapien
cccagctgggtgtgcaaggcccagt

SEQ ID NO: 2589817 - DNA, 25 bp, Homo sapien
ctgtcccctcggagacctcggccct

SEQ ID NO: 2589818 - DNA, 25 bp, Homo sapien
cggcagccctactgtcccctcggag

SEQ ID NO: 2589819 - DNA, 25 bp, Homo sapien
caagacacggcagccctactgtccc

SEQ ID NO: 2589820 - DNA, 25 bp, Homo sapien
cttcccaagacacggcagccctact

SEQ ID NO: 2589821 - DNA, 25 bp, Homo sapien
tgggtgccagagaccttctcccctg

SEQ ID NO: 2589822 - DNA, 25 bp, Homo sapien
ggtgccagagaccttctcccctggg

SEQ ID NO: 2589823 - DNA, 25 bp, Homo sapien
gtcacggaaggcaccaggtccgagt

SEQ ID NO: 2589824 - DNA, 25 bp, Homo sapien
cagccagggtcacggaaggcgccag

SEQ ID NO: 2589825 - DNA, 25 bp, Homo sapien
agcagcagctttggcaaggtccgtc

SEQ ID NO: 2589826 - DNA, 25 bp, Homo sapien
tagcagcagctttggcaaggtccgt

SEQ ID NO: 2589827 - DNA, 25 bp, Homo sapien
ttagcagcagctttggcaaggtccg

SEQ ID NO: 2589828 - DNA, 25 bp, Homo sapien
tcacttggctttaactgcgataccc

SEQ ID NO: 2589829 - DNA, 25 bp, Homo sapien
ggatttgagcccgatctgcctgagc

SEQ ID NO: 2589830 - DNA, 25 bp, Homo sapien
agaggaagtggatttgagcccgatc

SEQ ID NO: 2589831 - DNA, 25 bp, Homo sapien
gcaaagattcagacggggccaaggt

SEQ ID NO: 2589832 - DNA, 25 bp, Homo sapien
ttgccccttctcggtggctgcttct

SEQ ID NO: 2589833 - DNA, 25 bp, Homo sapien
gccccttctcggtggctgcttctcg

SEQ ID NO: 2589834 - DNA, 25 bp, Homo sapien
tgccccttctcggtggctgcttctc

SEQ ID NO: 2589835 - DNA, 25 bp, Homo sapien
aggacaaagcgtggtttgggaatgt

SEQ ID NO: 2589836 - DNA, 25 bp, Homo sapien
aaggacaaagcgtggtttgggaatg

SEQ ID NO: 2589837 - DNA, 25 bp, Homo sapien
tcaggcatctggctgcccagcagcc

SEQ ID NO: 2589838 - DNA, 25 bp, Homo sapien
caggcatctggctgcccagcagccc

SEQ ID NO: 2589839 - DNA, 25 bp, Homo sapien
cgcggagccatgtcacgctgcgcag

SEQ ID NO: 2589840 - DNA, 25 bp, Homo sapien
ggataatatcggattgctcattgca

SEQ ID NO: 2589841 - DNA, 25 bp, Homo sapien
accctgggtggcagtccagacaggc

SEQ ID NO: 2589842 - DNA, 25 bp, Homo sapien
cgcagaggcacacgcggagccatgt

SEQ ID NO: 2589843 - DNA, 25 bp, Homo sapien
agggatagggacctgagcagccctg

SEQ ID NO: 2589844 - DNA, 25 bp, Homo sapien
gcactggcgttttctgttaggccaa

SEQ ID NO: 2589845 - DNA, 25 bp, Homo sapien
gccaacgctgaaagctcgagctggg

SEQ ID NO: 2589846 - DNA, 25 bp, Homo sapien
tgtctatggctaacagagactgctt

SEQ ID NO: 2589847 - DNA, 25 bp, Homo sapien
cgttttctgttaggccaacgctgaa

SEQ ID NO: 2589848 - DNA, 25 bp, Homo sapien
ccagggccttgcgagccctgactca

SEQ ID NO: 2589849 - DNA, 25 bp, Homo sapien
agcccagggatgtggtgcccaagag

SEQ ID NO: 2589850 - DNA, 25 bp, Homo sapien
agggccttgcgagccctgactcagc

SEQ ID NO: 2589851 - DNA, 25 bp, Homo sapien
cccagggatgtggtgcccaagaggg

SEQ ID NO: 2589852 - DNA, 25 bp, Homo sapien
cacacggccatgacctccagagatg

SEQ ID NO: 2589853 - DNA, 25 bp, Homo sapien
aggcacactcaagagacaactgaga

SEQ ID NO: 2589854 - DNA, 25 bp, Homo sapien
tgaaagctggcggaccggaagaacc

SEQ ID NO: 2589855 - DNA, 25 bp, Homo sapien
cagagatgccccgtgtcagggatat

SEQ ID NO: 2589856 - DNA, 25 bp, Homo sapien
aggctggcggtggcaaagccccagc

SEQ ID NO: 2589857 - DNA, 25 bp, Homo sapien
gctggcggtggcaaagccccagccc

SEQ ID NO: 2589858 - DNA, 25 bp, Homo sapien
ggctggcggtggcaaagccccagcc

SEQ ID NO: 2589859 - DNA, 25 bp, Homo sapien
aactgggggccacatgtcgggtgtc

SEQ ID NO: 2589860 - DNA, 25 bp, Homo sapien
acatgtcgggtgtccagacggagca

SEQ ID NO: 2589861 - DNA, 25 bp, Homo sapien
gggccacatgtcgggtgtccagacg

SEQ ID NO: 2589862 - DNA, 25 bp, Homo sapien
ccacatgtcgggtgtccagacggag

SEQ ID NO: 2589863 - DNA, 25 bp, Homo sapien
ggaggaacactcacacttcccacca

SEQ ID NO: 2589864 - DNA, 25 bp, Homo sapien
gggaggaacactcacacttcccacc

SEQ ID NO: 2589865 - DNA, 25 bp, Homo sapien
gaggaacactcacacttcccaccag

SEQ ID NO: 2589866 - DNA, 25 bp, Homo sapien
ggggaggaacactcacacttcccac

SEQ ID NO: 2589867 - DNA, 25 bp, Homo sapien
gcgcagcccagtggcggctctgcgc

SEQ ID NO: 2589868 - DNA, 25 bp, Homo sapien
gggaggggcgcagcccagtggcggc

SEQ ID NO: 2589869 - DNA, 25 bp, Homo sapien
aggggcgcagcccagtggcggctct

SEQ ID NO: 2589870 - DNA, 25 bp, Homo sapien
ggggcgcagcccagtggcggctctg

SEQ ID NO: 2589871 - DNA, 25 bp, Homo sapien
tgcggagggcagacggcgccaggtg

SEQ ID NO: 2589872 - DNA, 25 bp, Homo sapien
ttcgggtcagcaggttgtcctccca

SEQ ID NO: 2589873 - DNA, 25 bp, Homo sapien
gggtcagcaggttgtcctcccagag

SEQ ID NO: 2589874 - DNA, 25 bp, Homo sapien
gtcagcaggttgtcctcccagagaa

SEQ ID NO: 2589875 - DNA, 25 bp, Homo sapien
tggcttcgggtcagcaggttgtcct

SEQ ID NO: 2589876 - DNA, 25 bp, Homo sapien
agcagcctccatccaacttgaagag

SEQ ID NO: 2589877 - DNA, 25 bp, Homo sapien
tgaagagtttccttgcaggcccggc

SEQ ID NO: 2589878 - DNA, 25 bp, Homo sapien
aggccagaggccaactcgggctctg

SEQ ID NO: 2589879 - DNA, 25 bp, Homo sapien
aggcccggcacctgcagattttcag

SEQ ID NO: 2589880 - DNA, 25 bp, Homo sapien
agtgcccaggcctcaaggttatctg

SEQ ID NO: 2589881 - DNA, 25 bp, Homo sapien
cctcaaggttatctgggactagttg

SEQ ID NO: 2589882 - DNA, 25 bp, Homo sapien
cttccagatgaccagggtacgcttt

SEQ ID NO: 2589883 - DNA, 25 bp, Homo sapien
actagttggtcgtggttgtctggca

SEQ ID NO: 2589884 - DNA, 25 bp, Homo sapien
gtggacccggttgacactgtgtccc

SEQ ID NO: 2589885 - DNA, 25 bp, Homo sapien
ggacccggttgacactgtgtcccca

SEQ ID NO: 2589886 - DNA, 25 bp, Homo sapien
cgtggacccggttgacactgtgtcc

SEQ ID NO: 2589887 - DNA, 25 bp, Homo sapien
tggacccggttgacactgtgtcccc

SEQ ID NO: 2589888 - DNA, 25 bp, Homo sapien
ccctccaggctattggatgttgggc

SEQ ID NO: 2589889 - DNA, 25 bp, Homo sapien
cgcaactgcgggaacacgccgtcca

SEQ ID NO: 2589890 - DNA, 25 bp, Homo sapien
gaacacgccgtccacttggtccact

SEQ ID NO: 2589891 - DNA, 25 bp, Homo sapien
accagaaggccgtggcgtcggtgcc

SEQ ID NO: 2589892 - DNA, 25 bp, Homo sapien
cagaaagatgcaggctcggagtgag

SEQ ID NO: 2589893 - DNA, 25 bp, Homo sapien
gcagaaagatgcaggctcggagtga

SEQ ID NO: 2589894 - DNA, 25 bp, Homo sapien
ctggcagaaagatgcaggctcggag

SEQ ID NO: 2589895 - DNA, 25 bp, Homo sapien
gaaagatgcaggctcggagtgaggg

SEQ ID NO: 2589896 - DNA, 25 bp, Homo sapien
tgcccgtgcaggtcctgttcccggg

SEQ ID NO: 2589897 - DNA, 25 bp, Homo sapien
accgcttggacgtgcccgtgcaggt

SEQ ID NO: 2589898 - DNA, 25 bp, Homo sapien
gagctggtaccgcttggacgtgccc

SEQ ID NO: 2589899 - DNA, 25 bp, Homo sapien
ctgcagagctggtaccgcttggacg

SEQ ID NO: 2589900 - DNA, 25 bp, Homo sapien
tcctcgcggaagctcctcccgtccg

SEQ ID NO: 2589901 - DNA, 25 bp, Homo sapien
aagctcctcccgtccggcggacact

SEQ ID NO: 2589902 - DNA, 25 bp, Homo sapien
aggcttccactggtgcgtccgcccg

SEQ ID NO: 2589903 - DNA, 25 bp, Homo sapien
ggcttccactggtgcgtccgcccgt

SEQ ID NO: 2589904 - DNA, 25 bp, Homo sapien
caggtcacacggtttgctggagatg

SEQ ID NO: 2589905 - DNA, 25 bp, Homo sapien
ccacggtggtacagtgcaggtcaca

SEQ ID NO: 2589906 - DNA, 25 bp, Homo sapien
gggaccatgagctgccgctggccgt

SEQ ID NO: 2589907 - DNA, 25 bp, Homo sapien
tgccgctggccgtccacggtggtac

SEQ ID NO: 2589908 - DNA, 25 bp, Homo sapien
cagcacagtgagaccggcggtactt

SEQ ID NO: 2589909 - DNA, 25 bp, Homo sapien
cgggcagtcagcacagtgagaccgg

SEQ ID NO: 2589910 - DNA, 25 bp, Homo sapien
tgagaccggcggtacttttgctaca

SEQ ID NO: 2589911 - DNA, 25 bp, Homo sapien
gagaccggcggtacttttgctacaa

SEQ ID NO: 2589912 - DNA, 25 bp, Homo sapien
agagggagagggctgctgggagggc

SEQ ID NO: 2589913 - DNA, 25 bp, Homo sapien
gagggagagggctgctgggagggcg

SEQ ID NO: 2589914 - DNA, 25 bp, Homo sapien
tagttgcccgtcacgtgggtgcagc

SEQ ID NO: 2589915 - DNA, 25 bp, Homo sapien
tgggcattccccttgcgatagttgc

SEQ ID NO: 2589916 - DNA, 25 bp, Homo sapien
gatgccacacttgtccagtgtgtgg

SEQ ID NO: 2589917 - DNA, 25 bp, Homo sapien
tgtgggtggagaaaagcaccccgtc

SEQ ID NO: 2589918 - DNA, 25 bp, Homo sapien
atctggatgtctcgggcaccagccg

SEQ ID NO: 2589919 - DNA, 25 bp, Homo sapien
accagccgggatgtgggtcaccaga

SEQ ID NO: 2589920 - DNA, 25 bp, Homo sapien
agcacgtcagcggacttcttcctct

SEQ ID NO: 2589921 - DNA, 25 bp, Homo sapien
cctctctacaatctggatgtctcgg

SEQ ID NO: 2589922 - DNA, 25 bp, Homo sapien
aaccaaaagctcagtgaggcagctg

SEQ ID NO: 2589923 - DNA, 25 bp, Homo sapien
cacaaccaaaagctcagtgaggcag

SEQ ID NO: 2589924 - DNA, 25 bp, Homo sapien
caaccaaaagctcagtgaggcagct

SEQ ID NO: 2589925 - DNA, 25 bp, Homo sapien
accaaaagctcagtgaggcagctgc

SEQ ID NO: 2589926 - DNA, 25 bp, Homo sapien
tagtagccagcttcgtctgcaagag

SEQ ID NO: 2589927 - DNA, 25 bp, Homo sapien
ccgtgcctgcgatgttgaagttctt

SEQ ID NO: 2589928 - DNA, 25 bp, Homo sapien
tccaccttgtagttgccgttgaaga

SEQ ID NO: 2589929 - DNA, 25 bp, Homo sapien
gggctgtccaccttgtagttgccgt

SEQ ID NO: 2589930 - DNA, 25 bp, Homo sapien
gattccggtctcatagacatccatg

SEQ ID NO: 2589931 - DNA, 25 bp, Homo sapien
tactcgattccggtctcatagacat

SEQ ID NO: 2589932 - DNA, 25 bp, Homo sapien
ccctgtgccacgatgtactcgattc

SEQ ID NO: 2589933 - DNA, 25 bp, Homo sapien
cacgatgtactcgattccggtctca

SEQ ID NO: 2589934 - DNA, 25 bp, Homo sapien
tggctggattctggggaaacagtgc

SEQ ID NO: 2589935 - DNA, 25 bp, Homo sapien
gcccccaaggcctgcggcacacgta

SEQ ID NO: 2589936 - DNA, 25 bp, Homo sapien
ttctggggaaacagtgcccagggcc

SEQ ID NO: 2589937 - DNA, 25 bp, Homo sapien
ggcccccaaggcctgcggcacacgt

SEQ ID NO: 2589938 - DNA, 25 bp, Homo sapien
cactaaggaccgagcaccatagtgc

SEQ ID NO: 2589939 - DNA, 25 bp, Homo sapien
gccctggcactaaggaccgagcacc

SEQ ID NO: 2589940 - DNA, 25 bp, Homo sapien
tggcactaaggaccgagcaccatag

SEQ ID NO: 2589941 - DNA, 25 bp, Homo sapien
cctggcactaaggaccgagcaccat

SEQ ID NO: 2589942 - DNA, 25 bp, Homo sapien
tctcagcgctctcggagaagccata

SEQ ID NO: 2589943 - DNA, 25 bp, Homo sapien
aggcctggccgtagagggagccgtt

SEQ ID NO: 2589944 - DNA, 25 bp, Homo sapien
cagcagcgtgtactcgaaggtgatg

SEQ ID NO: 2589945 - DNA, 25 bp, Homo sapien
cgaacagccggttgtccaggcccag

SEQ ID NO: 2589946 - DNA, 25 bp, Homo sapien
ctcatgcctccctcctcctggttac

SEQ ID NO: 2589947 - DNA, 25 bp, Homo sapien
cctcatgcctccctcctcctggtta

SEQ ID NO: 2589948 - DNA, 25 bp, Homo sapien
ggagacaggtggctcaaccgtgggc

SEQ ID NO: 2589949 - DNA, 25 bp, Homo sapien
accgtgggcacatccgagccctggg

SEQ ID NO: 2589950 - DNA, 25 bp, Homo sapien
tggctcaaccgtgggcacatccgag

SEQ ID NO: 2589951 - DNA, 25 bp, Homo sapien
acaggtggctcaaccgtgggcacat

SEQ ID NO: 2589952 - DNA, 25 bp, Homo sapien
tcagctccaggtaggacccgttgag

SEQ ID NO: 2589953 - DNA, 25 bp, Homo sapien
tggcgttagccgagaagaactcctg

SEQ ID NO: 2589954 - DNA, 25 bp, Homo sapien
cataatccacgaagaagctctcggc

SEQ ID NO: 2589955 - DNA, 25 bp, Homo sapien
cctcggaggagctgttggcaaccct

SEQ ID NO: 2589956 - DNA, 25 bp, Homo sapien
ggtaaagggtgagcagacagccctg

SEQ ID NO: 2589957 - DNA, 25 bp, Homo sapien
gtaaagggtgagcagacagccctgt

SEQ ID NO: 2589958 - DNA, 25 bp, Homo sapien
aggtaaagggtgagcagacagccct

SEQ ID NO: 2589959 - DNA, 25 bp, Homo sapien
aaggtaaagggtgagcagacagccc

SEQ ID NO: 2589960 - DNA, 25 bp, Homo sapien
cgtgggcctcacacacggaatacca

SEQ ID NO: 2589961 - DNA, 25 bp, Homo sapien
gcctcacacacggaataccagggaa

SEQ ID NO: 2589962 - DNA, 25 bp, Homo sapien
acacggaataccagggaatgccccg

SEQ ID NO: 2589963 - DNA, 25 bp, Homo sapien
aataccagggaatgccccggactgc

SEQ ID NO: 2589964 - DNA, 25 bp, Homo sapien
tctgagtgctgacagcctagttgat

SEQ ID NO: 2589965 - DNA, 25 bp, Homo sapien
cctagttgatcgacccttgaggccc

SEQ ID NO: 2589966 - DNA, 25 bp, Homo sapien
agcatcctttgatggcaggccggcc

SEQ ID NO: 2589967 - DNA, 25 bp, Homo sapien
catctttggtccctgtgcggcagca

SEQ ID NO: 2589968 - DNA, 25 bp, Homo sapien
gctctgggacgccaccatggagtcc

SEQ ID NO: 2589969 - DNA, 25 bp, Homo sapien
aaccagtaggtgtgcctgggcccaa

SEQ ID NO: 2589970 - DNA, 25 bp, Homo sapien
ttcactgggctgaaacgtgggccag

SEQ ID NO: 2589971 - DNA, 25 bp, Homo sapien
ccaaagccaactattgttaggactg

SEQ ID NO: 2589972 - DNA, 25 bp, Homo sapien
ggtttattccgctgtggcgacctca

SEQ ID NO: 2589973 - DNA, 25 bp, Homo sapien
agaatgtacagtatgggtgtttccc

SEQ ID NO: 2589974 - DNA, 25 bp, Homo sapien
taatgctggataagttggcggttta

SEQ ID NO: 2589975 - DNA, 25 bp, Homo sapien
gtttcccagtgatggattgcagctg

SEQ ID NO: 2589976 - DNA, 25 bp, Homo sapien
gggttgccacagcaaaatgaaccgc

SEQ ID NO: 2589977 - DNA, 25 bp, Homo sapien
gccaacttatccagcattttatgca

SEQ ID NO: 2589978 - DNA, 25 bp, Homo sapien
aaaatgaaccgccaacttatccagc

SEQ ID NO: 2589979 - DNA, 25 bp, Homo sapien
gccacagcaaaatgaaccgccaact

SEQ ID NO: 2589980 - DNA, 25 bp, Homo sapien
tccttcacgcgtttcaggaagctct

SEQ ID NO: 2589981 - DNA, 25 bp, Homo sapien
cacgcgtttcaggaagctctctcgg

SEQ ID NO: 2589982 - DNA, 25 bp, Homo sapien
ttcacgcgtttcaggaagctctctc

SEQ ID NO: 2589983 - DNA, 25 bp, Homo sapien
ccttcacgcgtttcaggaagctctc

SEQ ID NO: 2589984 - DNA, 25 bp, Homo sapien
ggaaccctcaggcaaaatggatgtc

SEQ ID NO: 2589985 - DNA, 25 bp, Homo sapien
tgtcagttcatcctaccgggatagg

SEQ ID NO: 2589986 - DNA, 25 bp, Homo sapien
gactggataactgatgatacatggc

SEQ ID NO: 2589987 - DNA, 25 bp, Homo sapien
ggatagggccccgtcatggttccat

SEQ ID NO: 2589988 - DNA, 25 bp, Homo sapien
gagcggcagcgacccttggagcacc

SEQ ID NO: 2589989 - DNA, 25 bp, Homo sapien
cactgctgctatgggggtcagctcc

SEQ ID NO: 2589990 - DNA, 25 bp, Homo sapien
ttcggggaccccagctagaccagcg

SEQ ID NO: 2589991 - DNA, 25 bp, Homo sapien
caggagcgggagcaaggacttcggg

SEQ ID NO: 2589992 - DNA, 25 bp, Homo sapien
caaagactccagtctttgtgggctg

SEQ ID NO: 2589993 - DNA, 25 bp, Homo sapien
agactccagtctttgtgggctgcct

SEQ ID NO: 2589994 - DNA, 25 bp, Homo sapien
aacaaagactccagtctttgtgggc

SEQ ID NO: 2589995 - DNA, 25 bp, Homo sapien
ggaacaaagactccagtctttgtgg

SEQ ID NO: 2589996 - DNA, 25 bp, Homo sapien
gagtggcaaggtggtcccctgaact

SEQ ID NO: 2589997 - DNA, 25 bp, Homo sapien
gacatagtgggaccaaagtgggcca

SEQ ID NO: 2589998 - DNA, 25 bp, Homo sapien
caagggactctgaagccatgctgtg

SEQ ID NO: 2589999 - DNA, 25 bp, Homo sapien
tgatgccatcacaagggtggtctcc

SEQ ID NO: 2590000 - DNA, 25 bp, Homo sapien
tgcccacatgccagctgggttcagc

SEQ ID NO: 2590001 - DNA, 25 bp, Homo sapien
ctgcccacatgccagctgggttcag

SEQ ID NO: 2590002 - DNA, 25 bp, Homo sapien
cacatgccagctgggttcagccaca

SEQ ID NO: 2590003 - DNA, 25 bp, Homo sapien
cccacatgccagctgggttcagcca

SEQ ID NO: 2590004 - DNA, 25 bp, Homo sapien
agatggatgcagatgccagcggcac

SEQ ID NO: 2590005 - DNA, 25 bp, Homo sapien
ggttaaggtgggaggcatccactcc

SEQ ID NO: 2590006 - DNA, 25 bp, Homo sapien
gactccagatgctctgcaagatgga

SEQ ID NO: 2590007 - DNA, 25 bp, Homo sapien
tctgaaatgcaggaaattgagctct

SEQ ID NO: 2590008 - DNA, 25 bp, Homo sapien
tgtcagagataagtgagctggaatg

SEQ ID NO: 2590009 - DNA, 25 bp, Homo sapien
gtgtgtcagagataagtgagctgga

SEQ ID NO: 2590010 - DNA, 25 bp, Homo sapien
tgtgtcagagataagtgagctggaa

SEQ ID NO: 2590011 - DNA, 25 bp, Homo sapien
tcagagataagtgagctggaatgga

SEQ ID NO: 2590012 - DNA, 25 bp, Homo sapien
tttgaactcatcattgcaatgtgtc

SEQ ID NO: 2590013 - DNA, 25 bp, Homo sapien
ttgaacaagggttttaccgcaggca

SEQ ID NO: 2590014 - DNA, 25 bp, Homo sapien
ggcatatagccctgctctgctgttg

SEQ ID NO: 2590015 - DNA, 25 bp, Homo sapien
aaactttgaactcatcattgcaatg

SEQ ID NO: 2590016 - DNA, 25 bp, Homo sapien
catgaagtccaggggtaggttgctc

SEQ ID NO: 2590017 - DNA, 25 bp, Homo sapien
ggtaggttgctcagggtaagagtgt

SEQ ID NO: 2590018 - DNA, 25 bp, Homo sapien
tgctcagggtaagagtgtggctcca

SEQ ID NO: 2590019 - DNA, 25 bp, Homo sapien
tccaggggtaggttgctcagggtaa

SEQ ID NO: 2590020 - DNA, 25 bp, Homo sapien
agaagtcagcagagcactgtaggcc

SEQ ID NO: 2590021 - DNA, 25 bp, Homo sapien
cagagcactgtaggccaagggactg

SEQ ID NO: 2590022 - DNA, 25 bp, Homo sapien
tcagcagagcactgtaggccaaggg

SEQ ID NO: 2590023 - DNA, 25 bp, Homo sapien
agtcagcagagcactgtaggccaag

SEQ ID NO: 2590024 - DNA, 25 bp, Homo sapien
gctctcagaaagtgcagaagagacc

SEQ ID NO: 2590025 - DNA, 25 bp, Homo sapien
tgcagaagagacctcagtggttcct

SEQ ID NO: 2590026 - DNA, 25 bp, Homo sapien
gacagggatccttggggagcctgag

SEQ ID NO: 2590027 - DNA, 25 bp, Homo sapien
tgtctctgcacagctctgcgctgct

SEQ ID NO: 2590028 - DNA, 25 bp, Homo sapien
gtctgtggccaacctttttgtaaca

SEQ ID NO: 2590029 - DNA, 25 bp, Homo sapien
gaacaaaccgatgactctgaacaca

SEQ ID NO: 2590030 - DNA, 25 bp, Homo sapien
tctgaacacaattgactgctttgct

SEQ ID NO: 2590031 - DNA, 25 bp, Homo sapien
gtttggaaatagtcacagcgtcagt

SEQ ID NO: 2590032 - DNA, 25 bp, Homo sapien
gatggctgctgatcaaagaggactt

SEQ ID NO: 2590033 - DNA, 25 bp, Homo sapien
ggtcatagcaggttgcacccagcat

SEQ ID NO: 2590034 - DNA, 25 bp, Homo sapien
tgtatgcacaaggaaccagattgca

SEQ ID NO: 2590035 - DNA, 25 bp, Homo sapien
gaaaacaggacgctgtctccatgtg

SEQ ID NO: 2590036 - DNA, 25 bp, Homo sapien
gggatgcccacctccttatctcagg

SEQ ID NO: 2590037 - DNA, 25 bp, Homo sapien
ggaacgggcagctaacacctcagag

SEQ ID NO: 2590038 - DNA, 25 bp, Homo sapien
gaaggaacgggcagctaacacctca

SEQ ID NO: 2590039 - DNA, 25 bp, Homo sapien
tctcagggagtaacctgtgcacagt

SEQ ID NO: 2590040 - DNA, 25 bp, Homo sapien
caacattctactgcggagagctgca

SEQ ID NO: 2590041 - DNA, 25 bp, Homo sapien
taaatggcactaatcagcacaaggt

SEQ ID NO: 2590042 - DNA, 25 bp, Homo sapien
caagcgaggccaatatacagggatt

SEQ ID NO: 2590043 - DNA, 25 bp, Homo sapien
gataaaaaaccatggccctactgtg

SEQ ID NO: 2590044 - DNA, 25 bp, Homo sapien
cagagtaccaataacccagagggct

SEQ ID NO: 2590045 - DNA, 25 bp, Homo sapien
acccagagggcttttaatgaatcat

SEQ ID NO: 2590046 - DNA, 25 bp, Homo sapien
agagtaccaataacccagagggctt

SEQ ID NO: 2590047 - DNA, 25 bp, Homo sapien
tgtaatccgtccacaatcagaactt

SEQ ID NO: 2590048 - DNA, 25 bp, Homo sapien
tgccgttaggtgtctgaaactgcaa

SEQ ID NO: 2590049 - DNA, 25 bp, Homo sapien
aaattcaaggatactgccaatgggc

SEQ ID NO: 2590050 - DNA, 25 bp, Homo sapien
gctgttgaataatctgagtgccgtt

SEQ ID NO: 2590051 - DNA, 25 bp, Homo sapien
cacctcagcggggtgctgtctgttg

SEQ ID NO: 2590052 - DNA, 25 bp, Homo sapien
tatcggctgtgggtaccacctcagc

SEQ ID NO: 2590053 - DNA, 25 bp, Homo sapien
tccctgtgcttgatgttaccagctc

SEQ ID NO: 2590054 - DNA, 25 bp, Homo sapien
cttgatgttaccagctctccacctg

SEQ ID NO: 2590055 - DNA, 25 bp, Homo sapien
gacagctcgagaaaggtcaacgttc

SEQ ID NO: 2590056 - DNA, 25 bp, Homo sapien
ggtcaacgttcgaaagtccctcaga

SEQ ID NO: 2590057 - DNA, 25 bp, Homo sapien
gctcgagaaaggtcaacgttcgaaa

SEQ ID NO: 2590058 - DNA, 25 bp, Homo sapien
gaaagtccctcagatcctgaaacat

SEQ ID NO: 2590059 - DNA, 25 bp, Homo sapien
ctggcccctcgagcctccacttcca

SEQ ID NO: 2590060 - DNA, 25 bp, Homo sapien
tcacaggccgaggactggcccctcg

SEQ ID NO: 2590061 - DNA, 25 bp, Homo sapien
cacaggccgaggactggcccctcga

SEQ ID NO: 2590062 - DNA, 25 bp, Homo sapien
acaggccgaggactggcccctcgag

SEQ ID NO: 2590063 - DNA, 25 bp, Homo sapien
tcagacagctgaaggacacattccc

SEQ ID NO: 2590064 - DNA, 25 bp, Homo sapien
cagtaactccagtgagcaaatgtga

SEQ ID NO: 2590065 - DNA, 25 bp, Homo sapien
cacatggtgagtcataaaactgcct

SEQ ID NO: 2590066 - DNA, 25 bp, Homo sapien
cccatgcttgggtcattcattagaa

SEQ ID NO: 2590067 - DNA, 25 bp, Homo sapien
agtggttgcaccagaagaattcagt

SEQ ID NO: 2590068 - DNA, 25 bp, Homo sapien
aagtggttgcaccagaagaattcag

SEQ ID NO: 2590069 - DNA, 25 bp, Homo sapien
caaagccctctgtgtaaaaggttgt

SEQ ID NO: 2590070 - DNA, 25 bp, Homo sapien
tgtaaaaggttgttggtgccaactg

SEQ ID NO: 2590071 - DNA, 25 bp, Homo sapien
ctgcagtataatgagactcggccag

SEQ ID NO: 2590072 - DNA, 25 bp, Homo sapien
gcagtataatgagactcggccaggc

SEQ ID NO: 2590073 - DNA, 25 bp, Homo sapien
cagtataatgagactcggccaggcc

SEQ ID NO: 2590074 - DNA, 25 bp, Homo sapien
tgcagtataatgagactcggccagg

SEQ ID NO: 2590075 - DNA, 25 bp, Homo sapien
cttcttgttgtgtagggagggacca

SEQ ID NO: 2590076 - DNA, 25 bp, Homo sapien
agcaatgtcccttgtaattgttggg

SEQ ID NO: 2590077 - DNA, 25 bp, Homo sapien
tttgggtcctgcttacaggatctgg

SEQ ID NO: 2590078 - DNA, 25 bp, Homo sapien
cttctcttgtaaagccttgggctca

SEQ ID NO: 2590079 - DNA, 25 bp, Homo sapien
taaggaggccctgttgagactggcc

SEQ ID NO: 2590080 - DNA, 25 bp, Homo sapien
aactgcctgatagccctgcacaatg

SEQ ID NO: 2590081 - DNA, 25 bp, Homo sapien
cctgttgagactggccagatgtgat

SEQ ID NO: 2590082 - DNA, 25 bp, Homo sapien
cagatgtgatctgtttaggctctgc

SEQ ID NO: 2590083 - DNA, 25 bp, Homo sapien
actatctgcagatcttttgctctcg

SEQ ID NO: 2590084 - DNA, 25 bp, Homo sapien
tttgctctcgttcctgaaatttctg

SEQ ID NO: 2590085 - DNA, 25 bp, Homo sapien
gaactctggattgtgactatctgca

SEQ ID NO: 2590086 - DNA, 25 bp, Homo sapien
ttgttatcctcccagaaggtgaact

SEQ ID NO: 2590087 - DNA, 25 bp, Homo sapien
tggctgaatcagatgcggagacctg

SEQ ID NO: 2590088 - DNA, 25 bp, Homo sapien
ttgaataactccatggatttaacct

SEQ ID NO: 2590089 - DNA, 25 bp, Homo sapien
gctgaatcagatgcggagacctgga

SEQ ID NO: 2590090 - DNA, 25 bp, Homo sapien
gaatggagtggcgagctttggattt

SEQ ID NO: 2590091 - DNA, 25 bp, Homo sapien
caatgtgagtggcaatcagagagtt

SEQ ID NO: 2590092 - DNA, 25 bp, Homo sapien
atgtgagtggcaatcagagagttag

SEQ ID NO: 2590093 - DNA, 25 bp, Homo sapien
tggcaatcagagagttaggaaacat

SEQ ID NO: 2590094 - DNA, 25 bp, Homo sapien
tgagtggcaatcagagagttaggaa

SEQ ID NO: 2590095 - DNA, 25 bp, Homo sapien
ctggaacgcaaagggagtagagcct

SEQ ID NO: 2590096 - DNA, 25 bp, Homo sapien
gggagtggccacattccgcgctaag

SEQ ID NO: 2590097 - DNA, 25 bp, Homo sapien
taagcaggcctctgcgttaacactg

SEQ ID NO: 2590098 - DNA, 25 bp, Homo sapien
tgcggtgccggcatggcacctcgct

SEQ ID NO: 2590099 - DNA, 25 bp, Homo sapien
tccgccttgtgtgtggtggacgctc

SEQ ID NO: 2590100 - DNA, 25 bp, Homo sapien
cgccttgtgtgtggtggacgctcac

SEQ ID NO: 2590101 - DNA, 25 bp, Homo sapien
gagagcctccgccttgtgtgtggtg

SEQ ID NO: 2590102 - DNA, 25 bp, Homo sapien
agcctccgccttgtgtgtggtggac

SEQ ID NO: 2590103 - DNA, 25 bp, Homo sapien
gcagaagaattcgacaacaggcctt

SEQ ID NO: 2590104 - DNA, 25 bp, Homo sapien
tcagagccgtgcctcatttgccact

SEQ ID NO: 2590105 - DNA, 25 bp, Homo sapien
tgcaccacgactggacaaagggcag

SEQ ID NO: 2590106 - DNA, 25 bp, Homo sapien
ctgttgacattgcaaaatagcagaa

SEQ ID NO: 2590107 - DNA, 25 bp, Homo sapien
taacccagaaatggacttcggagtg

SEQ ID NO: 2590108 - DNA, 25 bp, Homo sapien
aaggcataacccagaaatggacttc

SEQ ID NO: 2590109 - DNA, 25 bp, Homo sapien
tcggagtgggtcattaagccacaaa

SEQ ID NO: 2590110 - DNA, 25 bp, Homo sapien
tggacttcggagtgggtcattaagc

SEQ ID NO: 2590111 - DNA, 25 bp, Homo sapien
tcagatttgatcaatgacatctcca

SEQ ID NO: 2590112 - DNA, 25 bp, Homo sapien
aagtattgggtttctcagatttgat

SEQ ID NO: 2590113 - DNA, 25 bp, Homo sapien
tctccataaagctatccagttgttg

SEQ ID NO: 2590114 - DNA, 25 bp, Homo sapien
ccataaagctatccagttgttgtgt

SEQ ID NO: 2590115 - DNA, 25 bp, Homo sapien
tcggtgcttcgtcggcgaggtgagg

SEQ ID NO: 2590116 - DNA, 25 bp, Homo sapien
cttcgtcggcgaggtgaggagtgag

SEQ ID NO: 2590117 - DNA, 25 bp, Homo sapien
tgcttcgtcggcgaggtgaggagtg

SEQ ID NO: 2590118 - DNA, 25 bp, Homo sapien
tcaagtcggtgcttcgtcggcgagg

SEQ ID NO: 2590119 - DNA, 25 bp, Homo sapien
acatcgcaaacttcaggagatggga

SEQ ID NO: 2590120 - DNA, 25 bp, Homo sapien
gggttccctctttgctgcctgtcag

SEQ ID NO: 2590121 - DNA, 25 bp, Homo sapien
tgggtgaccaagctgtcatggctgc

SEQ ID NO: 2590122 - DNA, 25 bp, Homo sapien
ggtgtcggcagtgcccacatcgcaa

SEQ ID NO: 2590123 - DNA, 25 bp, Homo sapien
tggtggtccagtcatggacccctgt

SEQ ID NO: 2590124 - DNA, 25 bp, Homo sapien
gcaaacgcattaccacccttacaaa

SEQ ID NO: 2590125 - DNA, 25 bp, Homo sapien
ggctggtggtccagtcatggacccc

SEQ ID NO: 2590126 - DNA, 25 bp, Homo sapien
gcttcctccagatgcaaacgcatta

SEQ ID NO: 2590127 - DNA, 25 bp, Homo sapien
gccacttgttacaaagatagacagt

SEQ ID NO: 2590128 - DNA, 25 bp, Homo sapien
gatctccaaactggaacactaacag

SEQ ID NO: 2590129 - DNA, 25 bp, Homo sapien
ctgacaataacttgtacagatttgg

SEQ ID NO: 2590130 - DNA, 25 bp, Homo sapien
tacaaagatagacagtttctgacaa

SEQ ID NO: 2590131 - DNA, 25 bp, Homo sapien
ttttgatacaggttgtccttcatgt

SEQ ID NO: 2590132 - DNA, 25 bp, Homo sapien
tttgatacaggttgtccttcatgtg

SEQ ID NO: 2590133 - DNA, 25 bp, Homo sapien
gactgaagagtctgcacatgcacag

SEQ ID NO: 2590134 - DNA, 25 bp, Homo sapien
tacatatcccaaattgactgaagag

SEQ ID NO: 2590135 - DNA, 25 bp, Homo sapien
gggcttgatgagcaccctacatatc

SEQ ID NO: 2590136 - DNA, 25 bp, Homo sapien
gttcctagaagtggatcatccacag

SEQ ID NO: 2590137 - DNA, 25 bp, Homo sapien
gtattcactgtagaatgcaagctcc

SEQ ID NO: 2590138 - DNA, 25 bp, Homo sapien
ctgtattcactgtagaatgcaagct

SEQ ID NO: 2590139 - DNA, 25 bp, Homo sapien
attcactgtagaatgcaagctccat

SEQ ID NO: 2590140 - DNA, 25 bp, Homo sapien
tattcactgtagaatgcaagctcca

SEQ ID NO: 2590141 - DNA, 25 bp, Homo sapien
gcttctcaactgtagagaaaagcat

SEQ ID NO: 2590142 - DNA, 25 bp, Homo sapien
tagacatcagcaagtacttatgtgc

SEQ ID NO: 2590143 - DNA, 25 bp, Homo sapien
acagaagcttctcaactgtagagaa

SEQ ID NO: 2590144 - DNA, 25 bp, Homo sapien
acatcagcaagtacttatgtgcagc

SEQ ID NO: 2590145 - DNA, 25 bp, Homo sapien
ttcatccacgtttgcagtgcagcgg

SEQ ID NO: 2590146 - DNA, 25 bp, Homo sapien
tgctgcacaggcttagaatcccaaa

SEQ ID NO: 2590147 - DNA, 25 bp, Homo sapien
gaagttgtgccctgctgaaagagtg

SEQ ID NO: 2590148 - DNA, 25 bp, Homo sapien
cacgagcatgccacgcattagggct

SEQ ID NO: 2590149 - DNA, 25 bp, Homo sapien
gaattgcttcttagttccaccagct

SEQ ID NO: 2590150 - DNA, 25 bp, Homo sapien
ttgcttcttagttccaccagcttct

SEQ ID NO: 2590151 - DNA, 25 bp, Homo sapien
tgatgctttcggatgattctgcagg

SEQ ID NO: 2590152 - DNA, 25 bp, Homo sapien
tcccagtgatgctttcggatgattc

SEQ ID NO: 2590153 - DNA, 25 bp, Homo sapien
cattcagaaacgagatgtcatgaat

SEQ ID NO: 2590154 - DNA, 25 bp, Homo sapien
atttcaaatagagctgaagctgttg

SEQ ID NO: 2590155 - DNA, 25 bp, Homo sapien
ttcagaaacgagatgtcatgaatta

SEQ ID NO: 2590156 - DNA, 25 bp, Homo sapien
aatagagctgaagctgttgcctcta

SEQ ID NO: 2590157 - DNA, 25 bp, Homo sapien
atttccttgtcttggctcttgtctc

SEQ ID NO: 2590158 - DNA, 25 bp, Homo sapien
ccttaatttccttgtcttggctctt

SEQ ID NO: 2590159 - DNA, 25 bp, Homo sapien
tctgctgctccttaatttccttgtc

SEQ ID NO: 2590160 - DNA, 25 bp, Homo sapien
taatttccttgtcttggctcttgtc

SEQ ID NO: 2590161 - DNA, 25 bp, Homo sapien
tctgcacgaaatccacaagtttctg

SEQ ID NO: 2590162 - DNA, 25 bp, Homo sapien
ggtaatgagacaacctggaccctgt

SEQ ID NO: 2590163 - DNA, 25 bp, Homo sapien
ggattgttctgccagctcctattca

SEQ ID NO: 2590164 - DNA, 25 bp, Homo sapien
tcaggagagaggtaaggattgttct

SEQ ID NO: 2590165 - DNA, 25 bp, Homo sapien
gctcatgcatagagcagacactgag

SEQ ID NO: 2590166 - DNA, 25 bp, Homo sapien
cacaagctattgtggctaaatccag

SEQ ID NO: 2590167 - DNA, 25 bp, Homo sapien
gcagacagaggcagatcaaatctct

SEQ ID NO: 2590168 - DNA, 25 bp, Homo sapien
gctaaatccagaattagggtccatt

SEQ ID NO: 2590169 - DNA, 25 bp, Homo sapien
caccatccctgggaacgttccagtt

SEQ ID NO: 2590170 - DNA, 25 bp, Homo sapien
ggcaccatccctgggaacgttccag

SEQ ID NO: 2590171 - DNA, 25 bp, Homo sapien
gcaccatccctgggaacgttccagt

SEQ ID NO: 2590172 - DNA, 25 bp, Homo sapien
caacttagcagcatgcattacatat

SEQ ID NO: 2590173 - DNA, 25 bp, Homo sapien
catatacacacgatagaccctttcc

SEQ ID NO: 2590174 - DNA, 25 bp, Homo sapien
caaaagattcatcaacttagcagca

SEQ ID NO: 2590175 - DNA, 25 bp, Homo sapien
tcagctgactgcatttggcctgaga

SEQ ID NO: 2590176 - DNA, 25 bp, Homo sapien
tccaatgggccgaggtgacacatag

SEQ ID NO: 2590177 - DNA, 25 bp, Homo sapien
gctctgcacagatgccgataggtca

SEQ ID NO: 2590178 - DNA, 25 bp, Homo sapien
ccagtgccagtctacaggctctgca

SEQ ID NO: 2590179 - DNA, 25 bp, Homo sapien
gggcttgaacgaccagaggctgaat

SEQ ID NO: 2590180 - DNA, 25 bp, Homo sapien
taattagatcccattcatctatttt

SEQ ID NO: 2590181 - DNA, 25 bp, Homo sapien
aattagatcccattcatctattttg

SEQ ID NO: 2590182 - DNA, 25 bp, Homo sapien
attagatcccattcatctattttgg

SEQ ID NO: 2590183 - DNA, 25 bp, Homo sapien
tcctgcaggattcgtgttgtgttct

SEQ ID NO: 2590184 - DNA, 25 bp, Homo sapien
catcctgcaggattcgtgttgtgtt

SEQ ID NO: 2590185 - DNA, 25 bp, Homo sapien
atcctgcaggattcgtgttgtgttc

SEQ ID NO: 2590186 - DNA, 25 bp, Homo sapien
tcatcctgcaggattcgtgttgtgt

SEQ ID NO: 2590187 - DNA, 25 bp, Homo sapien
caatgcctatggtgctattcacctc

SEQ ID NO: 2590188 - DNA, 25 bp, Homo sapien
tgacgttagcaatgcctatggtgct

SEQ ID NO: 2590189 - DNA, 25 bp, Homo sapien
tcttcccctctgatagcgtgcgcaa

SEQ ID NO: 2590190 - DNA, 25 bp, Homo sapien
tagcgtgcgcaaacttgacgttagc

SEQ ID NO: 2590191 - DNA, 25 bp, Homo sapien
cattcctcccaccaagaattcttgg

SEQ ID NO: 2590192 - DNA, 25 bp, Homo sapien
gcaaaactgcttctaaggtcaacct

SEQ ID NO: 2590193 - DNA, 25 bp, Homo sapien
aactccagagcatcttccttagcag

SEQ ID NO: 2590194 - DNA, 25 bp, Homo sapien
gatattcttgcaatgatagggacaa

SEQ ID NO: 2590195 - DNA, 25 bp, Homo sapien
ttttggtctcattgcttccaggctt

SEQ ID NO: 2590196 - DNA, 25 bp, Homo sapien
ggagagtggtttgggtggatgcagg

SEQ ID NO: 2590197 - DNA, 25 bp, Homo sapien
ttggtctcattgcttccaggctttc

SEQ ID NO: 2590198 - DNA, 25 bp, Homo sapien
cattttggtctcattgcttccaggc

SEQ ID NO: 2590199 - DNA, 25 bp, Homo sapien
ggccctaatgccgagtagaatattc

SEQ ID NO: 2590200 - DNA, 25 bp, Homo sapien
cttcccagccaggataggccatggg

SEQ ID NO: 2590201 - DNA, 25 bp, Homo sapien
tcaacctccagcattataggaacct

SEQ ID NO: 2590202 - DNA, 25 bp, Homo sapien
ggtctcaggaaatggcgcctcctgc

SEQ ID NO: 2590203 - DNA, 25 bp, Homo sapien
tctctttgcaaactggcctctcgat

SEQ ID NO: 2590204 - DNA, 25 bp, Homo sapien
tctttgcaaactggcctctcgattc

SEQ ID NO: 2590205 - DNA, 25 bp, Homo sapien
ctctctttgcaaactggcctctcga

SEQ ID NO: 2590206 - DNA, 25 bp, Homo sapien
ctctttgcaaactggcctctcgatt

SEQ ID NO: 2590207 - DNA, 25 bp, Homo sapien
cttgttccaaataagcgtttggcct

SEQ ID NO: 2590208 - DNA, 25 bp, Homo sapien
taagcgtttggcctggatcggttgc

SEQ ID NO: 2590209 - DNA, 25 bp, Homo sapien
ggatcggttgctcttgcaggacagc

SEQ ID NO: 2590210 - DNA, 25 bp, Homo sapien
tggcctggatcggttgctcttgcag

SEQ ID NO: 2590211 - DNA, 25 bp, Homo sapien
ccagtcttgtgggtttgtattgtta

SEQ ID NO: 2590212 - DNA, 25 bp, Homo sapien
cagtcttgtgggtttgtattgttac

SEQ ID NO: 2590213 - DNA, 25 bp, Homo sapien
tctccagtcttgtgggtttgtattg

SEQ ID NO: 2590214 - DNA, 25 bp, Homo sapien
ttgccctgtggttctctccagtctt

SEQ ID NO: 2590215 - DNA, 25 bp, Homo sapien
ttgccaggcgcacagggatgcctcg

SEQ ID NO: 2590216 - DNA, 25 bp, Homo sapien
gatgcctcgtcatgaaaggcaccat

SEQ ID NO: 2590217 - DNA, 25 bp, Homo sapien
gcacagtctgaggttgccaggcgca

SEQ ID NO: 2590218 - DNA, 25 bp, Homo sapien
ccagtggccggcacagtctgaggtt

SEQ ID NO: 2590219 - DNA, 25 bp, Homo sapien
ggccccctccttgagcacctggaag

SEQ ID NO: 2590220 - DNA, 25 bp, Homo sapien
gcacctggaagagcacccagtctct

SEQ ID NO: 2590221 - DNA, 25 bp, Homo sapien
ttgccctgggtgcatctctgcgtgc

SEQ ID NO: 2590222 - DNA, 25 bp, Homo sapien
tctctgcgtgctcctgaatagctgt

SEQ ID NO: 2590223 - DNA, 25 bp, Homo sapien
caaagactccagtctttgtgggctg

SEQ ID NO: 2590224 - DNA, 25 bp, Homo sapien
agactccagtctttgtgggctgcct

SEQ ID NO: 2590225 - DNA, 25 bp, Homo sapien
aacaaagactccagtctttgtgggc

SEQ ID NO: 2590226 - DNA, 25 bp, Homo sapien
ggaacaaagactccagtctttgtgg

SEQ ID NO: 2590227 - DNA, 25 bp, Homo sapien
tgatgccatcacaagggtggtctcc

SEQ ID NO: 2590228 - DNA, 25 bp, Homo sapien
gagtggcaaggtggtcccctgaact

SEQ ID NO: 2590229 - DNA, 25 bp, Homo sapien
gacatagtgggaccaaagtgggcca

SEQ ID NO: 2590230 - DNA, 25 bp, Homo sapien
caagggactctgaagccatgctgtg

SEQ ID NO: 2590231 - DNA, 25 bp, Homo sapien
ttgagccccaggatgggacagactc

SEQ ID NO: 2590232 - DNA, 25 bp, Homo sapien
gatgggacagactctcctggcttga

SEQ ID NO: 2590233 - DNA, 25 bp, Homo sapien
cctctaagttctgaaagagggagga

SEQ ID NO: 2590234 - DNA, 25 bp, Homo sapien
gaggagaaggcactcttcccttccc

SEQ ID NO: 2590235 - DNA, 25 bp, Homo sapien
gcaaggcgtgctgccgctcctgcag

SEQ ID NO: 2590236 - DNA, 25 bp, Homo sapien
ctacagcaaggcgtgctgccgctcc

SEQ ID NO: 2590237 - DNA, 25 bp, Homo sapien
acagcaaggcgtgctgccgctcctg

SEQ ID NO: 2590238 - DNA, 25 bp, Homo sapien
agcaaggcgtgctgccgctcctgca

SEQ ID NO: 2590239 - DNA, 25 bp, Homo sapien
cattgacgtcatttccttagcagca

SEQ ID NO: 2590240 - DNA, 25 bp, Homo sapien
ccttgtctttgagggcggtgccttc

SEQ ID NO: 2590241 - DNA, 25 bp, Homo sapien
aggtcttcagatggcagcagtaggc

SEQ ID NO: 2590242 - DNA, 25 bp, Homo sapien
tgagtaagggcaagaagtgtcctgc

SEQ ID NO: 2590243 - DNA, 25 bp, Homo sapien
gagcactgggtctatacatttccgc

SEQ ID NO: 2590244 - DNA, 25 bp, Homo sapien
ccttctagggggcagctggtccatc

SEQ ID NO: 2590245 - DNA, 25 bp, Homo sapien
caagggccctgatgcccctgaaagt

SEQ ID NO: 2590246 - DNA, 25 bp, Homo sapien
aaagctggtcagggcggagcatccc

SEQ ID NO: 2590247 - DNA, 25 bp, Homo sapien
tcagcaccaggttgcggttggagtg

SEQ ID NO: 2590248 - DNA, 25 bp, Homo sapien
gccggcccgttggtcagcaccaggt

SEQ ID NO: 2590249 - DNA, 25 bp, Homo sapien
tgaacggcgaagtctggttcctcct

SEQ ID NO: 2590250 - DNA, 25 bp, Homo sapien
gctcacgctcttgtagagcacgcgc

SEQ ID NO: 2590251 - DNA, 25 bp, Homo sapien
cagagggacggtgaccatgcggccg

SEQ ID NO: 2590252 - DNA, 25 bp, Homo sapien
gggacggtgaccatgcggccgcccg

SEQ ID NO: 2590253 - DNA, 25 bp, Homo sapien
gagggacggtgaccatgcggccgcc

SEQ ID NO: 2590254 - DNA, 25 bp, Homo sapien
ggcagagggacggtgaccatgcggc

SEQ ID NO: 2590255 - DNA, 25 bp, Homo sapien
tgatgaccacggtcccggctgtcat

SEQ ID NO: 2590256 - DNA, 25 bp, Homo sapien
gagcaaaatcacagtcgccaagatg

SEQ ID NO: 2590257 - DNA, 25 bp, Homo sapien
gtagcacagaacagcgatgatgcag

SEQ ID NO: 2590258 - DNA, 25 bp, Homo sapien
cacagaacagcgatgatgcagagca

SEQ ID NO: 2590259 - DNA, 25 bp, Homo sapien
caatcagctaatgactgcagctgct

SEQ ID NO: 2590260 - DNA, 25 bp, Homo sapien
tccattgccagattccggggggtct

SEQ ID NO: 2590261 - DNA, 25 bp, Homo sapien
cctcatcttgacgtcacaatcagct

SEQ ID NO: 2590262 - DNA, 25 bp, Homo sapien
ggcttcctgttgcatcactcccagg

SEQ ID NO: 2590263 - DNA, 25 bp, Homo sapien
gttggagagtcagaaggcgctggtc

SEQ ID NO: 2590264 - DNA, 25 bp, Homo sapien
ctgtagccacgggtggggttttcag

SEQ ID NO: 2590265 - DNA, 25 bp, Homo sapien
agaaggcgctggtccccggagggag

SEQ ID NO: 2590266 - DNA, 25 bp, Homo sapien
gctgtagccacgggtggggttttca

SEQ ID NO: 2590267 - DNA, 25 bp, Homo sapien
ctttcccatagggaagcatgggcct

SEQ ID NO: 2590268 - DNA, 25 bp, Homo sapien
tgatagcaatgggggccactgcttt

SEQ ID NO: 2590269 - DNA, 25 bp, Homo sapien
tcccactgctgtcaggctgagactg

SEQ ID NO: 2590270 - DNA, 25 bp, Homo sapien
tgctttcccatagggaagcatgggc

SEQ ID NO: 2590271 - DNA, 25 bp, Homo sapien
gaagtgctcggctgccctgtgctgc

SEQ ID NO: 2590272 - DNA, 25 bp, Homo sapien
cagtaataaacagacgaggaagtgc

SEQ ID NO: 2590273 - DNA, 25 bp, Homo sapien
gccgcggttggtctccgagatgtta

SEQ ID NO: 2590274 - DNA, 25 bp, Homo sapien
cgagatgttatccagagcccggctg

SEQ ID NO: 2590275 - DNA, 25 bp, Homo sapien
cgtaggcggctttcccaggtggtgg

SEQ ID NO: 2590276 - DNA, 25 bp, Homo sapien
ctgaggtaagagtggttcggccact

SEQ ID NO: 2590277 - DNA, 25 bp, Homo sapien
caggtggtggcgtgaactgaggtaa

SEQ ID NO: 2590278 - DNA, 25 bp, Homo sapien
gtaagagtggttcggccactgtcca

SEQ ID NO: 2590279 - DNA, 25 bp, Homo sapien
taggccatcggggaagcagggggtc

SEQ ID NO: 2590280 - DNA, 25 bp, Homo sapien
agggctggagccctgcctggcccac

SEQ ID NO: 2590281 - DNA, 25 bp, Homo sapien
cggcgaccagggcgacccagggctg

SEQ ID NO: 2590282 - DNA, 25 bp, Homo sapien
ggcgaccagggcgacccagggctgg

SEQ ID NO: 2590283 - DNA, 25 bp, Homo sapien
gccctgcctggcccactactggcat

SEQ ID NO: 2590284 - DNA, 25 bp, Homo sapien
tcatatagtaagttttactcattct

SEQ ID NO: 2590285 - DNA, 25 bp, Homo sapien
aaacaacctgattacactctgtatt

SEQ ID NO: 2590286 - DNA, 25 bp, Homo sapien
caaacaacctgattacactctgtat

SEQ ID NO: 2590287 - DNA, 25 bp, Homo sapien
tatctaaataacgtttagtgactta

SEQ ID NO: 2590288 - DNA, 25 bp, Homo sapien
taacgtttagtgacttaattctctg

SEQ ID NO: 2590289 - DNA, 25 bp, Homo sapien
tatatatctaaataacgtttagtga

SEQ ID NO: 2590290 - DNA, 25 bp, Homo sapien
cgtttagtgacttaattctctgcaa

SEQ ID NO: 2590291 - DNA, 25 bp, Homo sapien
cgtttcgctgtcttgcaaaaggtgc

SEQ ID NO: 2590292 - DNA, 25 bp, Homo sapien
gcaatttgatgcatccgtttcgctg

SEQ ID NO: 2590293 - DNA, 25 bp, Homo sapien
gaagagatcatttgttaagagcgga

SEQ ID NO: 2590294 - DNA, 25 bp, Homo sapien
caaaaggtgcagtgaccaatgggct

SEQ ID NO: 2590295 - DNA, 25 bp, Homo sapien
tctctggtttcaacttccaagtctt

SEQ ID NO: 2590296 - DNA, 25 bp, Homo sapien
tcaccaaccatgttccttagtagga

SEQ ID NO: 2590297 - DNA, 25 bp, Homo sapien
ctatgtctcataggaaaccatatca

SEQ ID NO: 2590298 - DNA, 25 bp, Homo sapien
tgaaaaatatgtcatcacacattct

SEQ ID NO: 2590299 - DNA, 25 bp, Homo sapien
atgcatctttctctgcggcgtcgcc

SEQ ID NO: 2590300 - DNA, 25 bp, Homo sapien
aatgcatctttctctgcggcgtcgc

SEQ ID NO: 2590301 - DNA, 25 bp, Homo sapien
gctgctaggacggtttggagatctc

SEQ ID NO: 2590302 - DNA, 25 bp, Homo sapien
catgatgttgtgcaccaccgttccc

SEQ ID NO: 2590303 - DNA, 25 bp, Homo sapien
gctgctttggaagaccgtgactgag

SEQ ID NO: 2590304 - DNA, 25 bp, Homo sapien
ctgatttgctagtcttccccaccgg

SEQ ID NO: 2590305 - DNA, 25 bp, Homo sapien
aggaaaatctcggggtgactcttgg

SEQ ID NO: 2590306 - DNA, 25 bp, Homo sapien
aaaatctcggggtgactcttggtct

SEQ ID NO: 2590307 - DNA, 25 bp, Homo sapien
tcataaggaaaatctcggggtgact

SEQ ID NO: 2590308 - DNA, 25 bp, Homo sapien
atctcggggtgactcttggtctttc

SEQ ID NO: 2590309 - DNA, 25 bp, Homo sapien
aatctgctagaccaagaacttgtgg

SEQ ID NO: 2590310 - DNA, 25 bp, Homo sapien
tgtaggaatctgctagaccaagaac

SEQ ID NO: 2590311 - DNA, 25 bp, Homo sapien
tgttgtgtcgccagtcctcacatcc

SEQ ID NO: 2590312 - DNA, 25 bp, Homo sapien
agtcctcacatccttcttgtaggaa

SEQ ID NO: 2590313 - DNA, 25 bp, Homo sapien
taatccacaagtacacttttgagca

SEQ ID NO: 2590314 - DNA, 25 bp, Homo sapien
cacttttgagcatcaggcagagaac

SEQ ID NO: 2590315 - DNA, 25 bp, Homo sapien
cacaagtacacttttgagcatcagg

SEQ ID NO: 2590316 - DNA, 25 bp, Homo sapien
ttgagcatcaggcagagaacctccc

SEQ ID NO: 2590317 - DNA, 25 bp, Homo sapien
caaaataataggtgtcacctgaatc

SEQ ID NO: 2590318 - DNA, 25 bp, Homo sapien
tgaacagctgtgtcatcgtccacca

SEQ ID NO: 2590319 - DNA, 25 bp, Homo sapien
tcacctgaatcaatgagcacagcca

SEQ ID NO: 2590320 - DNA, 25 bp, Homo sapien
gaacagctgtgtcatcgtccaccac

SEQ ID NO: 2590321 - DNA, 25 bp, Homo sapien
cactgcccatcgtttaatccagcac

SEQ ID NO: 2590322 - DNA, 25 bp, Homo sapien
ccactgcccatcgtttaatccagca

SEQ ID NO: 2590323 - DNA, 25 bp, Homo sapien
caattttgaacgtggaacagagcag

SEQ ID NO: 2590324 - DNA, 25 bp, Homo sapien
ttcaattttgaacgtggaacagagc

SEQ ID NO: 2590325 - DNA, 25 bp, Homo sapien
ttttgaacgtggaacagagcaggac

SEQ ID NO: 2590326 - DNA, 25 bp, Homo sapien
ttttcaattttgaacgtggaacaga

SEQ ID NO: 2590327 - DNA, 25 bp, Homo sapien
cccatatacaaggaatacccttgag

SEQ ID NO: 2590328 - DNA, 25 bp, Homo sapien
catatacaaggaatacccttgagct

SEQ ID NO: 2590329 - DNA, 25 bp, Homo sapien
cttcccatatacaaggaataccctt

SEQ ID NO: 2590330 - DNA, 25 bp, Homo sapien
ttcccatatacaaggaatacccttg

SEQ ID NO: 2590331 - DNA, 25 bp, Homo sapien
gttggatagacctgtctactggaag

SEQ ID NO: 2590332 - DNA, 25 bp, Homo sapien
ggtcttactgttggatagacctgtc

SEQ ID NO: 2590333 - DNA, 25 bp, Homo sapien
cttactgttggatagacctgtctac

SEQ ID NO: 2590334 - DNA, 25 bp, Homo sapien
ttgtggtcttactgttggatagacc

SEQ ID NO: 2590335 - DNA, 25 bp, Homo sapien
gctgcctgcgttgctcttcatagtg

SEQ ID NO: 2590336 - DNA, 25 bp, Homo sapien
tggagcccactgcatgaatcacgat

SEQ ID NO: 2590337 - DNA, 25 bp, Homo sapien
gggctggactgatgactctgcttat

SEQ ID NO: 2590338 - DNA, 25 bp, Homo sapien
tgaggtcccaattcatcactggctg

SEQ ID NO: 2590339 - DNA, 25 bp, Homo sapien
tcaagaaactatatggaaactgttg

SEQ ID NO: 2590340 - DNA, 25 bp, Homo sapien
gaaactatatggaaactgttggaga

SEQ ID NO: 2590341 - DNA, 25 bp, Homo sapien
gagagcagcggtgagtcctgcaggg

SEQ ID NO: 2590342 - DNA, 25 bp, Homo sapien
actatatggaaactgttggagagca

SEQ ID NO: 2590343 - DNA, 25 bp, Homo sapien
tcaacggtcaggaaggcgctcttga

SEQ ID NO: 2590344 - DNA, 25 bp, Homo sapien
cgctcttgaatgctctttggtccaa

SEQ ID NO: 2590345 - DNA, 25 bp, Homo sapien
aagagaaggagagagcggtcagggc

SEQ ID NO: 2590346 - DNA, 25 bp, Homo sapien
gtccaaccaagagcgggaagagaag

SEQ ID NO: 2590347 - DNA, 25 bp, Homo sapien
tccgccaggttcaccgcggcccgca

SEQ ID NO: 2590348 - DNA, 25 bp, Homo sapien
gcgccgcgctgtcccgcagcgcaga

SEQ ID NO: 2590349 - DNA, 25 bp, Homo sapien
gcagcgctccgccaggttcaccgcg

SEQ ID NO: 2590350 - DNA, 25 bp, Homo sapien
gagccagccgctgctcgcagcgctc

SEQ ID NO: 2590351 - DNA, 25 bp, Homo sapien
tctgctgagcagaaacgggcaaagg

SEQ ID NO: 2590352 - DNA, 25 bp, Homo sapien
gtctgctgagcagaaacgggcaaag

SEQ ID NO: 2590353 - DNA, 25 bp, Homo sapien
tctctccctaggtgtgatagcagtg

SEQ ID NO: 2590354 - DNA, 25 bp, Homo sapien
tgctaggacagctctaaacagtgag

SEQ ID NO: 2590355 - DNA, 25 bp, Homo sapien
cagtgagctcgatgtgcaaaacgca

SEQ ID NO: 2590356 - DNA, 25 bp, Homo sapien
gctgtggctgtctctatcatcgtga

SEQ ID NO: 2590357 - DNA, 25 bp, Homo sapien
tccacatcaatttccaaacaatgaa

SEQ ID NO: 2590358 - DNA, 25 bp, Homo sapien
aacaatgaattaggtatggccattc

SEQ ID NO: 2590359 - DNA, 25 bp, Homo sapien
acagtcctccacatcaatttccaaa

SEQ ID NO: 2590360 - DNA, 25 bp, Homo sapien
ttccaaacaatgaattaggtatggc

SEQ ID NO: 2590361 - DNA, 25 bp, Homo sapien
tcttgccgagtgtgccagatggtgt

SEQ ID NO: 2590362 - DNA, 25 bp, Homo sapien
gtttctgtagccaatcgtgtaggca

SEQ ID NO: 2590363 - DNA, 25 bp, Homo sapien
ggttcaacaaggagcctgagcctct

SEQ ID NO: 2590364 - DNA, 25 bp, Homo sapien
tggtgtggtgtctccatcccctaat

SEQ ID NO: 2590365 - DNA, 25 bp, Homo sapien
agtctcgtttttctgcatcgccgtc

SEQ ID NO: 2590366 - DNA, 25 bp, Homo sapien
tctcgtttttctgcatcgccgtcat

SEQ ID NO: 2590367 - DNA, 25 bp, Homo sapien
tctgcatcgccgtcattatctcctt

SEQ ID NO: 2590368 - DNA, 25 bp, Homo sapien
tttctgcatcgccgtcattatctcc

SEQ ID NO: 2590369 - DNA, 25 bp, Homo sapien
cctgtgtctgcacaagtctcaattt

SEQ ID NO: 2590370 - DNA, 25 bp, Homo sapien
ttcctgtgtctgcacaagtctcaat

SEQ ID NO: 2590371 - DNA, 25 bp, Homo sapien
tgtgtctgcacaagtctcaattttc

SEQ ID NO: 2590372 - DNA, 25 bp, Homo sapien
tgtctgcacaagtctcaattttctg

SEQ ID NO: 2590373 - DNA, 25 bp, Homo sapien
cccattggagggcatacagttttct

SEQ ID NO: 2590374 - DNA, 25 bp, Homo sapien
aataaccattaagggaggcactgaa

SEQ ID NO: 2590375 - DNA, 25 bp, Homo sapien
gctgaaaagacccatgtcattacag

SEQ ID NO: 2590376 - DNA, 25 bp, Homo sapien
gaaatataactgcatatcaactccg

SEQ ID NO: 2590377 - DNA, 25 bp, Homo sapien
tctctttttctttacacaaaagata

SEQ ID NO: 2590378 - DNA, 25 bp, Homo sapien
ttttctttacacaaaagatattcac

SEQ ID NO: 2590379 - DNA, 25 bp, Homo sapien
tcagggttctctttttctttacaca

SEQ ID NO: 2590380 - DNA, 25 bp, Homo sapien
ctatttttctaactcagggttctct

SEQ ID NO: 2590381 - DNA, 25 bp, Homo sapien
gctcacatacagcaataagctcgga

SEQ ID NO: 2590382 - DNA, 25 bp, Homo sapien
tgtggttcggaagctcagtgtgatc

SEQ ID NO: 2590383 - DNA, 25 bp, Homo sapien
cattgttggcgaggataactgaaag

SEQ ID NO: 2590384 - DNA, 25 bp, Homo sapien
gaaaggtattcctcatagaaagagc

SEQ ID NO: 2590385 - DNA, 25 bp, Homo sapien
aatgaagaaacgagagagctggagt

SEQ ID NO: 2590386 - DNA, 25 bp, Homo sapien
tgaagaaacgagagagctggagttt

SEQ ID NO: 2590387 - DNA, 25 bp, Homo sapien
ttcacttaaagtgtaatgttcttga

SEQ ID NO: 2590388 - DNA, 25 bp, Homo sapien
cacttaaagtgtaatgttcttgaaa

SEQ ID NO: 2590389 - DNA, 25 bp, Homo sapien
taaacagtcgaatcaccagaagggc

SEQ ID NO: 2590390 - DNA, 25 bp, Homo sapien
taattggcgctgatccgtagtacac

SEQ ID NO: 2590391 - DNA, 25 bp, Homo sapien
ttaaaatcccgatctctggaggtgg

SEQ ID NO: 2590392 - DNA, 25 bp, Homo sapien
tagctgcctgctacaacagagaagc

SEQ ID NO: 2590393 - DNA, 25 bp, Homo sapien
tattcagaacgtgttaggtcaggct

SEQ ID NO: 2590394 - DNA, 25 bp, Homo sapien
tcttgacacggatgcccattggcca

SEQ ID NO: 2590395 - DNA, 25 bp, Homo sapien
tgacagtgtctttggaaatagcccc

SEQ ID NO: 2590396 - DNA, 25 bp, Homo sapien
tcttgtcaaaggaaactgcgctctg

SEQ ID NO: 2590397 - DNA, 25 bp, Homo sapien
ccttttctcatgctaacctaagtga

SEQ ID NO: 2590398 - DNA, 25 bp, Homo sapien
cattgtgtggtctggtgacacacag

SEQ ID NO: 2590399 - DNA, 25 bp, Homo sapien
accttcttggaaagttcatgggctt

SEQ ID NO: 2590400 - DNA, 25 bp, Homo sapien
gctgagatacactgacaactaaaca

SEQ ID NO: 2590401 - DNA, 25 bp, Homo sapien
gctaattcggtaacatccactccat

SEQ ID NO: 2590402 - DNA, 25 bp, Homo sapien
tttcttggctaattcggtaacatcc

SEQ ID NO: 2590403 - DNA, 25 bp, Homo sapien
tgaatgcccgcgatcttccgggtgt

SEQ ID NO: 2590404 - DNA, 25 bp, Homo sapien
gcgatcttccgggtgtcggaattcc

SEQ ID NO: 2590405 - DNA, 25 bp, Homo sapien
tcgatgaggacggaatgccagtgct

SEQ ID NO: 2590406 - DNA, 25 bp, Homo sapien
gaggagctcgatgaggacggaatgc

SEQ ID NO: 2590407 - DNA, 25 bp, Homo sapien
gcaatagtggaaggcagcttagcat

SEQ ID NO: 2590408 - DNA, 25 bp, Homo sapien
gtcacaggagcaatagtggaaggca

SEQ ID NO: 2590409 - DNA, 25 bp, Homo sapien
attaattccagagtaatgtgatttc

SEQ ID NO: 2590410 - DNA, 25 bp, Homo sapien
ttaattccagagtaatgtgatttcc

SEQ ID NO: 2590411 - DNA, 25 bp, Homo sapien
aattaattccagagtaatgtgattt

SEQ ID NO: 2590412 - DNA, 25 bp, Homo sapien
taattaattccagagtaatgtgatt

SEQ ID NO: 2590413 - DNA, 25 bp, Homo sapien
tacagcagagcactttgtccatcaa

SEQ ID NO: 2590414 - DNA, 25 bp, Homo sapien
taaaccacctcagattctaggaaag

SEQ ID NO: 2590415 - DNA, 25 bp, Homo sapien
ataaaccacctcagattctaggaaa

SEQ ID NO: 2590416 - DNA, 25 bp, Homo sapien
tatacagcagagcactttgtccatc

SEQ ID NO: 2590417 - DNA, 25 bp, Homo sapien
tcatcacgtcaagcatttcacatcc

SEQ ID NO: 2590418 - DNA, 25 bp, Homo sapien
gcatccctcatcacgtcaagcattt

SEQ ID NO: 2590419 - DNA, 25 bp, Homo sapien
taaataagtgctgaacactctgcat

SEQ ID NO: 2590420 - DNA, 25 bp, Homo sapien
cacagtagacatttgacttgccaat

SEQ ID NO: 2590421 - DNA, 25 bp, Homo sapien
aaatgtctcatggaagagttcttaa

SEQ ID NO: 2590422 - DNA, 25 bp, Homo sapien
ttaacactccacagcctgcctttct

SEQ ID NO: 2590423 - DNA, 25 bp, Homo sapien
tcaaatgtctcatggaagagttctt

SEQ ID NO: 2590424 - DNA, 25 bp, Homo sapien
aatcaaatgtctcatggaagagttc

SEQ ID NO: 2590425 - DNA, 25 bp, Homo sapien
aggtctcgcccgtatagcctgtgcc

SEQ ID NO: 2590426 - DNA, 25 bp, Homo sapien
aatggcaggtctcgcccgtatagcc

SEQ ID NO: 2590427 - DNA, 25 bp, Homo sapien
acgactgggaacactcgcccccatg

SEQ ID NO: 2590428 - DNA, 25 bp, Homo sapien
aggaatggcaggtctcgcccgtata

SEQ ID NO: 2590429 - DNA, 25 bp, Homo sapien
tgagcagggttggatctcagcctct

SEQ ID NO: 2590430 - DNA, 25 bp, Homo sapien
cttgagcagggttggatctcagcct

SEQ ID NO: 2590431 - DNA, 25 bp, Homo sapien
taaggacctggtaaagagtgaagat

SEQ ID NO: 2590432 - DNA, 25 bp, Homo sapien
tcccactgctgagtacacagctaag

SEQ ID NO: 2590433 - DNA, 25 bp, Homo sapien
aggccgtgagggacatcatagtcca

SEQ ID NO: 2590434 - DNA, 25 bp, Homo sapien
ggccgtgagggacatcatagtccat

SEQ ID NO: 2590435 - DNA, 25 bp, Homo sapien
ccaggccgtgagggacatcatagtc

SEQ ID NO: 2590436 - DNA, 25 bp, Homo sapien
caggccgtgagggacatcatagtcc

SEQ ID NO: 2590437 - DNA, 25 bp, Homo sapien
cccataattccatatgaagaagcct

SEQ ID NO: 2590438 - DNA, 25 bp, Homo sapien
ataattccatatgaagaagccttgt

SEQ ID NO: 2590439 - DNA, 25 bp, Homo sapien
cacccataattccatatgaagaagc

SEQ ID NO: 2590440 - DNA, 25 bp, Homo sapien
cataattccatatgaagaagccttg

SEQ ID NO: 2590441 - DNA, 25 bp, Homo sapien
cgcagccaacgcaggctgccaaagg

SEQ ID NO: 2590442 - DNA, 25 bp, Homo sapien
ccaacgcaggctgccaaaggagatg

SEQ ID NO: 2590443 - DNA, 25 bp, Homo sapien
agccaacgcaggctgccaaaggaga

SEQ ID NO: 2590444 - DNA, 25 bp, Homo sapien
gcagccaacgcaggctgccaaagga

SEQ ID NO: 2590445 - DNA, 25 bp, Homo sapien
aatggaatcatcaacgaatggaata

SEQ ID NO: 2590446 - DNA, 25 bp, Homo sapien
tggaatcatcaacgaatggaataga

SEQ ID NO: 2590447 - DNA, 25 bp, Homo sapien
aatcatcaacgaatggaatagaatg

SEQ ID NO: 2590448 - DNA, 25 bp, Homo sapien
gaatggaatcatcaacgaatggaat

SEQ ID NO: 2590449 - DNA, 25 bp, Homo sapien
ggaatcatcatcgaatagaatcgaa

SEQ ID NO: 2590450 - DNA, 25 bp, Homo sapien
atcatcatcgaatagaatcgaatgg

SEQ ID NO: 2590451 - DNA, 25 bp, Homo sapien
ctaatggaatcgattggaatcatca

SEQ ID NO: 2590452 - DNA, 25 bp, Homo sapien
catcatcgaatagaatcgaatggaa

SEQ ID NO: 2590453 - DNA, 25 bp, Homo sapien
gaatgaaattgaaaggaatcatcat

SEQ ID NO: 2590454 - DNA, 25 bp, Homo sapien
tcgaatgaaattgaaaggaatcatc

SEQ ID NO: 2590455 - DNA, 25 bp, Homo sapien
gaaattgaaaggaatcatcatcgaa

SEQ ID NO: 2590456 - DNA, 25 bp, Homo sapien
catcgaatgaaattgaaaggaatca

SEQ ID NO: 2590457 - DNA, 25 bp, Homo sapien
atggaatccaatggattcaccatca

SEQ ID NO: 2590458 - DNA, 25 bp, Homo sapien
tggaatccaatggattcaccatcaa

SEQ ID NO: 2590459 - DNA, 25 bp, Homo sapien
gacagaaaatttataggtcagtatc

SEQ ID NO: 2590460 - DNA, 25 bp, Homo sapien
tattattctgttctccatatgttca

SEQ ID NO: 2590461 - DNA, 25 bp, Homo sapien
aattcttcttagattgtctcacagc

SEQ ID NO: 2590462 - DNA, 25 bp, Homo sapien
aatatttccctcatgtttaaggctg

SEQ ID NO: 2590463 - DNA, 25 bp, Homo sapien
tagctatgctacttttctttactcc

SEQ ID NO: 2590464 - DNA, 25 bp, Homo sapien
ttagctatgctacttttctttactc

SEQ ID NO: 2590465 - DNA, 25 bp, Homo sapien
tatgctacttttctttactcctgga

SEQ ID NO: 2590466 - DNA, 25 bp, Homo sapien
gctatgctacttttctttactcctg

SEQ ID NO: 2590467 - DNA, 25 bp, Homo sapien
gggcgactgtctactctcgattttg

SEQ ID NO: 2590468 - DNA, 25 bp, Homo sapien
tgcttccctgaattttaaggaagag

SEQ ID NO: 2590469 - DNA, 25 bp, Homo sapien
ctaatgtacacacccttaatttaag

SEQ ID NO: 2590470 - DNA, 25 bp, Homo sapien
caagtttttaccggatacattggat

SEQ ID NO: 2590471 - DNA, 25 bp, Homo sapien
aaatagagatacttctcctgcccct

SEQ ID NO: 2590472 - DNA, 25 bp, Homo sapien
aaaaatagagatacttctcctgccc

SEQ ID NO: 2590473 - DNA, 25 bp, Homo sapien
taaatcagagtatctactctaagtc

SEQ ID NO: 2590474 - DNA, 25 bp, Homo sapien
tatctgctaatggacatggtagatt

SEQ ID NO: 2590475 - DNA, 25 bp, Homo sapien
ttgccgccgtggatttttgaccatg

SEQ ID NO: 2590476 - DNA, 25 bp, Homo sapien
ttttgccgccgtggatttttgacca

SEQ ID NO: 2590477 - DNA, 25 bp, Homo sapien
ccgtggatttttgaccatgccgctg

SEQ ID NO: 2590478 - DNA, 25 bp, Homo sapien
ctttctgaccctggcctcgccgaat

SEQ ID NO: 2590479 - DNA, 25 bp, Homo sapien
tagcccctgccgtcacggctttttg

SEQ ID NO: 2590480 - DNA, 25 bp, Homo sapien
ttttggggctctttgccctcgccgc

SEQ ID NO: 2590481 - DNA, 25 bp, Homo sapien
gctttttggggctctttgccctcgc

SEQ ID NO: 2590482 - DNA, 25 bp, Homo sapien
tttttgccgccgcagctttttgcat

SEQ ID NO: 2590483 - DNA, 25 bp, Homo sapien
tttgcgaccttttcccccctgctgc

SEQ ID NO: 2590484 - DNA, 25 bp, Homo sapien
cactgtggctttttacgccttttcg

SEQ ID NO: 2590485 - DNA, 25 bp, Homo sapien
cgcggctttttgctgctatttgtcc

SEQ ID NO: 2590486 - DNA, 25 bp, Homo sapien
gccgcggctttttgctgctatttgt

SEQ ID NO: 2590487 - DNA, 25 bp, Homo sapien
ccgcggctttttgctgctatttgtc

SEQ ID NO: 2590488 - DNA, 25 bp, Homo sapien
ggctccttgccccctacgtggcttc

SEQ ID NO: 2590489 - DNA, 25 bp, Homo sapien
gccgcggctccttgccccctacgtg

SEQ ID NO: 2590490 - DNA, 25 bp, Homo sapien
gcggctccttgccccctacgtggct

SEQ ID NO: 2590491 - DNA, 25 bp, Homo sapien
ccgcggctccttgccccctacgtgg

SEQ ID NO: 2590492 - DNA, 25 bp, Homo sapien
cgtggctttttgcggcttttggcac

SEQ ID NO: 2590493 - DNA, 25 bp, Homo sapien
ccgtggctttttgcggcttttggca

SEQ ID NO: 2590494 - DNA, 25 bp, Homo sapien
cctccaccgtggctttttgcggctt

SEQ ID NO: 2590495 - DNA, 25 bp, Homo sapien
cacctccaccgtggctttttgcggc

SEQ ID NO: 2590496 - DNA, 25 bp, Homo sapien
ggtcactgtactaatgtctaatttc

SEQ ID NO: 2590497 - DNA, 25 bp, Homo sapien
gaggtcactgtactaatgtctaatt

SEQ ID NO: 2590498 - DNA, 25 bp, Homo sapien
aggtcactgtactaatgtctaattt

SEQ ID NO: 2590499 - DNA, 25 bp, Homo sapien
agtacaatggcacaaaccttaaagg

SEQ ID NO: 2590500 - DNA, 25 bp, Homo sapien
cagctgcattttgggcccatgtata

SEQ ID NO: 2590501 - DNA, 25 bp, Homo sapien
ccttaaaggactgcggtgtggatga

SEQ ID NO: 2590502 - DNA, 25 bp, Homo sapien
tcaagaagtataaggctcagtcccg

SEQ ID NO: 2590503 - DNA, 25 bp, Homo sapien
cctgcggtatttagggacttgatcc

SEQ ID NO: 2590504 - DNA, 25 bp, Homo sapien
gaaggtcttagtgcacctgcggtat

SEQ ID NO: 2590505 - DNA, 25 bp, Homo sapien
tctgcaagtgtatcttcttcgggca

SEQ ID NO: 2590506 - DNA, 25 bp, Homo sapien
tcttcgggcacgtgggaaggtctta

SEQ ID NO: 2590507 - DNA, 25 bp, Homo sapien
cccctgtatgagatgccctgtgttc

SEQ ID NO: 2590508 - DNA, 25 bp, Homo sapien
aaaactgctgcccataggttcacag

SEQ ID NO: 2590509 - DNA, 25 bp, Homo sapien
agttcctgtcaaagcatagagcccc

SEQ ID NO: 2590510 - DNA, 25 bp, Homo sapien
cctgtgttctggacgagaagatacc

SEQ ID NO: 2590511 - DNA, 25 bp, Homo sapien
tctgcctcattctcgtcgacagtgt

SEQ ID NO: 2590512 - DNA, 25 bp, Homo sapien
tcattctcgtcgacagtgttattta

SEQ ID NO: 2590513 - DNA, 25 bp, Homo sapien
tgcctcattctcgtcgacagtgtta

SEQ ID NO: 2590514 - DNA, 25 bp, Homo sapien
cctcattctcgtcgacagtgttatt

SEQ ID NO: 2590515 - DNA, 25 bp, Homo sapien
aaaaaccctacagctaacattatat

SEQ ID NO: 2590516 - DNA, 25 bp, Homo sapien
ccggacgtcatggtaggtacctgta

SEQ ID NO: 2590517 - DNA, 25 bp, Homo sapien
ttatatctgatactgaggaactcaa

SEQ ID NO: 2590518 - DNA, 25 bp, Homo sapien
aattagccggacgtcatggtaggta

SEQ ID NO: 2590519 - DNA, 25 bp, Homo sapien
tcctttggggctgaattgtaggaac

SEQ ID NO: 2590520 - DNA, 25 bp, Homo sapien
gctgaattgtaggaaccggatggct

SEQ ID NO: 2590521 - DNA, 25 bp, Homo sapien
ccggatggctgtgaactcaaaggat

SEQ ID NO: 2590522 - DNA, 25 bp, Homo sapien
ttgtaggaaccggatggctgtgaac

SEQ ID NO: 2590523 - DNA, 25 bp, Homo sapien
ttctggagcatgaccttgtgcacac

SEQ ID NO: 2590524 - DNA, 25 bp, Homo sapien
gtgcacatgcaggtgagtgatgctt

SEQ ID NO: 2590525 - DNA, 25 bp, Homo sapien
tggagcatgaccttgtgcacacggg

SEQ ID NO: 2590526 - DNA, 25 bp, Homo sapien
tggaaaagtggagttggctgtgcct

SEQ ID NO: 2590527 - DNA, 25 bp, Homo sapien
agcatgtgttcacctggcctgtgag

SEQ ID NO: 2590528 - DNA, 25 bp, Homo sapien
tacatatggagagcagtcaagcatg

SEQ ID NO: 2590529 - DNA, 25 bp, Homo sapien
gaggtcatgggcagccctcggtaca

SEQ ID NO: 2590530 - DNA, 25 bp, Homo sapien
tgagtgttagcgtgtcccaggtgtt

SEQ ID NO: 2590531 - DNA, 25 bp, Homo sapien
gacatcaggctcgtattggtcatcg

SEQ ID NO: 2590532 - DNA, 25 bp, Homo sapien
ggaggctccgataatgacatcaggc

SEQ ID NO: 2590533 - DNA, 25 bp, Homo sapien
gcaaaaactcccacaagaccactgt

SEQ ID NO: 2590534 - DNA, 25 bp, Homo sapien
tgtgcactccgaggtgaatgcttgt

SEQ ID NO: 2590535 - DNA, 25 bp, Homo sapien
agcatgtgttcacctggcctgtgag

SEQ ID NO: 2590536 - DNA, 25 bp, Homo sapien
tacatatggagagcagtcaagcatg

SEQ ID NO: 2590537 - DNA, 25 bp, Homo sapien
gaggtcatgggcagccctcggtaca

SEQ ID NO: 2590538 - DNA, 25 bp, Homo sapien
tgagtgttagcgtgtcccaggtgtt

SEQ ID NO: 2590539 - DNA, 25 bp, Homo sapien
gccttcactgagtgtattggctgac

SEQ ID NO: 2590540 - DNA, 25 bp, Homo sapien
cagaagccttcactgagtgtattgg

SEQ ID NO: 2590541 - DNA, 25 bp, Homo sapien
agaagccttcactgagtgtattggc

SEQ ID NO: 2590542 - DNA, 25 bp, Homo sapien
tcactgagtgtattggctgacccat

SEQ ID NO: 2590543 - DNA, 25 bp, Homo sapien
attatggtttccctgagagtgggac

SEQ ID NO: 2590544 - DNA, 25 bp, Homo sapien
ggtttccctgagagtgggaccattc

SEQ ID NO: 2590545 - DNA, 25 bp, Homo sapien
ttccctgagagtgggaccattcatc

SEQ ID NO: 2590546 - DNA, 25 bp, Homo sapien
ctagattatggtttccctgagagtg

SEQ ID NO: 2590547 - DNA, 25 bp, Homo sapien
tcttggattctcaggggctccggca

SEQ ID NO: 2590548 - DNA, 25 bp, Homo sapien
cttggattctcaggggctccggcat

SEQ ID NO: 2590549 - DNA, 25 bp, Homo sapien
catcttggattctcaggggctccgg

SEQ ID NO: 2590550 - DNA, 25 bp, Homo sapien
tcatcttggattctcaggggctccg

SEQ ID NO: 2590551 - DNA, 25 bp, Homo sapien
atggattgacttgaaggctacagag

SEQ ID NO: 2590552 - DNA, 25 bp, Homo sapien
tggattgacttgaaggctacagagc

SEQ ID NO: 2590553 - DNA, 25 bp, Homo sapien
tgatagagtctcacttcatatggat

SEQ ID NO: 2590554 - DNA, 25 bp, Homo sapien
agaaataatccatctcaaccttacc

SEQ ID NO: 2590555 - DNA, 25 bp, Homo sapien
aaagaaataatccatctcaacctta

SEQ ID NO: 2590556 - DNA, 25 bp, Homo sapien
tttgaaatattgtgatctccctccc

SEQ ID NO: 2590557 - DNA, 25 bp, Homo sapien
aaataatccatctcaaccttaccct

SEQ ID NO: 2590558 - DNA, 25 bp, Homo sapien
aatacaatccttctgcatgtcatgc

SEQ ID NO: 2590559 - DNA, 25 bp, Homo sapien
catgaacaaggtagtgcatcttgcc

SEQ ID NO: 2590560 - DNA, 25 bp, Homo sapien
gctcaaggcatctcggctctgatca

SEQ ID NO: 2590561 - DNA, 25 bp, Homo sapien
tgtcccaggaaactagggctcccac

SEQ ID NO: 2590562 - DNA, 25 bp, Homo sapien
cagtggctccataatcattgatggg

SEQ ID NO: 2590563 - DNA, 25 bp, Homo sapien
gccggccctgcgagttctttcagaa

SEQ ID NO: 2590564 - DNA, 25 bp, Homo sapien
tgagaagcaaaggtatcccgctggg

SEQ ID NO: 2590565 - DNA, 25 bp, Homo sapien
gggtgttacattaaggacctcactc

SEQ ID NO: 2590566 - DNA, 25 bp, Homo sapien
tgatggctgcccaacaatatggatg

SEQ ID NO: 2590567 - DNA, 25 bp, Homo sapien
tccctagagtagtcagtcacagcga

SEQ ID NO: 2590568 - DNA, 25 bp, Homo sapien
cagctgcgcgaaggccaatgttaca

SEQ ID NO: 2590569 - DNA, 25 bp, Homo sapien
gctacagagactccaggctggtcaa

SEQ ID NO: 2590570 - DNA, 25 bp, Homo sapien
tcatattccaccctcttggaggaaa

SEQ ID NO: 2590571 - DNA, 25 bp, Homo sapien
ttggaggaaactcccaatggtccca

SEQ ID NO: 2590572 - DNA, 25 bp, Homo sapien
tcttggaggaaactcccaatggtcc

SEQ ID NO: 2590573 - DNA, 25 bp, Homo sapien
catccctcgggattgtggacagggt

SEQ ID NO: 2590574 - DNA, 25 bp, Homo sapien
tcatccctcgggattgtggacaggg

SEQ ID NO: 2590575 - DNA, 25 bp, Homo sapien
tcgggattgtggacagggtgctggc

SEQ ID NO: 2590576 - DNA, 25 bp, Homo sapien
ccctcgggattgtggacagggtgct

SEQ ID NO: 2590577 - DNA, 25 bp, Homo sapien
tcacgagcaccctaaattgcagaag

SEQ ID NO: 2590578 - DNA, 25 bp, Homo sapien
acgagcaccctaaattgcagaagga

SEQ ID NO: 2590579 - DNA, 25 bp, Homo sapien
cacgagcaccctaaattgcagaagg

SEQ ID NO: 2590580 - DNA, 25 bp, Homo sapien
gggagcagactatcacagaccagtg

SEQ ID NO: 2590581 - DNA, 25 bp, Homo sapien
gatgctcatgtcctgtaagaacacc

SEQ ID NO: 2590582 - DNA, 25 bp, Homo sapien
cagtgtgatgggcacaaagagatat

SEQ ID NO: 2590583 - DNA, 25 bp, Homo sapien
gagactgtggctagaagcgacaatg

SEQ ID NO: 2590584 - DNA, 25 bp, Homo sapien
cagtcgtagcttcctggacatgcca

SEQ ID NO: 2590585 - DNA, 25 bp, Homo sapien
cacgctctgtacagggaaggcatga

SEQ ID NO: 2590586 - DNA, 25 bp, Homo sapien
catttgccttcttatgagcgttcca

SEQ ID NO: 2590587 - DNA, 25 bp, Homo sapien
catgacacaggtgtgggaaggctgc

SEQ ID NO: 2590588 - DNA, 25 bp, Homo sapien
catgctgttaggagtacttctcagg

SEQ ID NO: 2590589 - DNA, 25 bp, Homo sapien
taccaactatagtcttgtgctgctg

SEQ ID NO: 2590590 - DNA, 25 bp, Homo sapien
tgttaagacaataccagctgtgtgt

SEQ ID NO: 2590591 - DNA, 25 bp, Homo sapien
tctcaggtgctgttgggttttccag

SEQ ID NO: 2590592 - DNA, 25 bp, Homo sapien
cagaatagctgagccaagtgagtga

SEQ ID NO: 2590593 - DNA, 25 bp, Homo sapien
gctttctgagcacactacggatctg

SEQ ID NO: 2590594 - DNA, 25 bp, Homo sapien
tgggaacacttggaggatttgctaa

SEQ ID NO: 2590595 - DNA, 25 bp, Homo sapien
ggctgctaaggaaacttcctctcca

SEQ ID NO: 2590596 - DNA, 25 bp, Homo sapien
gatggttccgtgagcaagactggca

SEQ ID NO: 2590597 - DNA, 25 bp, Homo sapien
catcagtttgtagtggttgaagcca

SEQ ID NO: 2590598 - DNA, 25 bp, Homo sapien
gacacctgttgtgatggatcctgaa

SEQ ID NO: 2590599 - DNA, 25 bp, Homo sapien
tatgctgatcccacacaaaggctgg

SEQ ID NO: 2590600 - DNA, 25 bp, Homo sapien
aactgcagcgcttgataaaatagag

SEQ ID NO: 2590601 - DNA, 25 bp, Homo sapien
taatatggcaccaggagatttgcat

SEQ ID NO: 2590602 - DNA, 25 bp, Homo sapien
tcaagtttggtgtcctgttgcagaa

SEQ ID NO: 2590603 - DNA, 25 bp, Homo sapien
cagaagctgagcattgacgggacag

SEQ ID NO: 2590604 - DNA, 25 bp, Homo sapien
caaagacttgacagatgcactccca

SEQ ID NO: 2590605 - DNA, 25 bp, Homo sapien
tcccagatcgcatctcacagtcatt

SEQ ID NO: 2590606 - DNA, 25 bp, Homo sapien
caaggcatttccatgtggagtctca

SEQ ID NO: 2590607 - DNA, 25 bp, Homo sapien
ccagtcatgcatcttggagttcctt

SEQ ID NO: 2590608 - DNA, 25 bp, Homo sapien
tagttcacgagcagctatcaaagcc

SEQ ID NO: 2590609 - DNA, 25 bp, Homo sapien
cctgaccgtagaggaggaacctgca

SEQ ID NO: 2590610 - DNA, 25 bp, Homo sapien
tcactgggacggtgtaggatcagcc

SEQ ID NO: 2590611 - DNA, 25 bp, Homo sapien
taaaagcagcgatctgtgctggcca

SEQ ID NO: 2590612 - DNA, 25 bp, Homo sapien
gcctctgcccatcaggtggtggccc

SEQ ID NO: 2590613 - DNA, 25 bp, Homo sapien
tgcccatcaggtggtggcccaatgg

SEQ ID NO: 2590614 - DNA, 25 bp, Homo sapien
tctgcccatcaggtggtggcccaat

SEQ ID NO: 2590615 - DNA, 25 bp, Homo sapien
cccatcaggtggtggcccaatggct

SEQ ID NO: 2590616 - DNA, 25 bp, Homo sapien
gggttgaggtcggtgtcagggactc

SEQ ID NO: 2590617 - DNA, 25 bp, Homo sapien
ggttgaggtcggtgtcagggactcc

SEQ ID NO: 2590618 - DNA, 25 bp, Homo sapien
tggggttgaggtcggtgtcagggac

SEQ ID NO: 2590619 - DNA, 25 bp, Homo sapien
ttggggttgaggtcggtgtcaggga

SEQ ID NO: 2590620 - DNA, 25 bp, Homo sapien
ctacagggtgtccttgctacagctt

SEQ ID NO: 2590621 - DNA, 25 bp, Homo sapien
tacagggtgtccttgctacagcttt

SEQ ID NO: 2590622 - DNA, 25 bp, Homo sapien
atcatccggtcgtgctccccagcca

SEQ ID NO: 2590623 - DNA, 25 bp, Homo sapien
ctgcatcatccggtcgtgctcccca

SEQ ID NO: 2590624 - DNA, 25 bp, Homo sapien
gtccacctctcctggtgggtcactt

SEQ ID NO: 2590625 - DNA, 25 bp, Homo sapien
ggtccacctctcctggtgggtcact

SEQ ID NO: 2590626 - DNA, 25 bp, Homo sapien
tgccaccgtgcaagcatgctttcca

SEQ ID NO: 2590627 - DNA, 25 bp, Homo sapien
tggccacctttctcaatggaaagcc

SEQ ID NO: 2590628 - DNA, 25 bp, Homo sapien
attacctcataaaagggtaccagtg

SEQ ID NO: 2590629 - DNA, 25 bp, Homo sapien
ttatggcacccttgatgcccactgg

SEQ ID NO: 2590630 - DNA, 25 bp, Homo sapien
catcgggcagtgcatgggtctgcac

SEQ ID NO: 2590631 - DNA, 25 bp, Homo sapien
tactcagcgctttccctgatggcgt

SEQ ID NO: 2590632 - DNA, 25 bp, Homo sapien
tgcaccttcgaagtcttgttccctg

SEQ ID NO: 2590633 - DNA, 25 bp, Homo sapien
ggacagagcagcgatactcagcgct

SEQ ID NO: 2590634 - DNA, 25 bp, Homo sapien
caacttccaattcagtccctgggac

SEQ ID NO: 2590635 - DNA, 25 bp, Homo sapien
aagtgacttgggacaacttccaatt

SEQ ID NO: 2590636 - DNA, 25 bp, Homo sapien
gacttgggacaacttccaattcagt

SEQ ID NO: 2590637 - DNA, 25 bp, Homo sapien
tgcaggggggttacctctgctgtcc

SEQ ID NO: 2590638 - DNA, 25 bp, Homo sapien
catctgttgcaacctgccagggtgg

SEQ ID NO: 2590639 - DNA, 25 bp, Homo sapien
ggccaggccctgcagaattacacta

SEQ ID NO: 2590640 - DNA, 25 bp, Homo sapien
tcatcccagggcaagaagtctgcgc

SEQ ID NO: 2590641 - DNA, 25 bp, Homo sapien
tacactaggactgccgagtgcagca

SEQ ID NO: 2590642 - DNA, 25 bp, Homo sapien
ccggccttccttgctcgtgaagtct

SEQ ID NO: 2590643 - DNA, 25 bp, Homo sapien
cgtgaagtctgttggccctccaggg

SEQ ID NO: 2590644 - DNA, 25 bp, Homo sapien
gctcgtgaagtctgttggccctcca

SEQ ID NO: 2590645 - DNA, 25 bp, Homo sapien
tccttgctcgtgaagtctgttggcc

SEQ ID NO: 2590646 - DNA, 25 bp, Homo sapien
ctttagaagttagatttgccctaga

SEQ ID NO: 2590647 - DNA, 25 bp, Homo sapien
tagatgtccatcaacctcacaatga

SEQ ID NO: 2590648 - DNA, 25 bp, Homo sapien
tacagaccctggagttgagctggga

SEQ ID NO: 2590649 - DNA, 25 bp, Homo sapien
tctgcttgaccatgacacctcgtaa

SEQ ID NO: 2590650 - DNA, 25 bp, Homo sapien
tcaaaatgttttggactctggccac

SEQ ID NO: 2590651 - DNA, 25 bp, Homo sapien
cagaaggtgctccaaaactgttttg

SEQ ID NO: 2590652 - DNA, 25 bp, Homo sapien
gtctctatgtacatctaggtgccca

SEQ ID NO: 2590653 - DNA, 25 bp, Homo sapien
tgaagtgagttctataaaagcccgg

SEQ ID NO: 2590654 - DNA, 25 bp, Homo sapien
gaagctgcctcatctaacatgcgaa

SEQ ID NO: 2590655 - DNA, 25 bp, Homo sapien
gtaaaggcacgtggaattatcccag

SEQ ID NO: 2590656 - DNA, 25 bp, Homo sapien
caagggccaggtttattcaccaggg

SEQ ID NO: 2590657 - DNA, 25 bp, Homo sapien
gttacctcaagagagcggccaggct

SEQ ID NO: 2590658 - DNA, 25 bp, Homo sapien
ggagatgacaaggggcttctcagta

SEQ ID NO: 2590659 - DNA, 25 bp, Homo sapien
gaacagactttgctgactcttgggc

SEQ ID NO: 2590660 - DNA, 25 bp, Homo sapien
gggcctcctgctggcagatagaaca

SEQ ID NO: 2590661 - DNA, 25 bp, Homo sapien
cgaacaatgcagagacagcaggagc

SEQ ID NO: 2590662 - DNA, 25 bp, Homo sapien
cagagacagcaggagcctgtggagg

SEQ ID NO: 2590663 - DNA, 25 bp, Homo sapien
caatgcagagacagcaggagcctgt

SEQ ID NO: 2590664 - DNA, 25 bp, Homo sapien
cacacactatgacgggaggtgtcaa

SEQ ID NO: 2590665 - DNA, 25 bp, Homo sapien
cactatgacgggaggtgtcaactga

SEQ ID NO: 2590666 - DNA, 25 bp, Homo sapien
tatgacgggaggtgtcaactgagca

SEQ ID NO: 2590667 - DNA, 25 bp, Homo sapien
acactatgacgggaggtgtcaactg

SEQ ID NO: 2590668 - DNA, 25 bp, Homo sapien
cctctcaaatacctgtgtttatatc

SEQ ID NO: 2590669 - DNA, 25 bp, Homo sapien
ggttgccactgcctctcaaatacct

SEQ ID NO: 2590670 - DNA, 25 bp, Homo sapien
gggttgccactgcctctcaaatacc

SEQ ID NO: 2590671 - DNA, 25 bp, Homo sapien
cagccaggacctatttgcaagtgag

SEQ ID NO: 2590672 - DNA, 25 bp, Homo sapien
caggtgggtgcggtcactttcccca

SEQ ID NO: 2590673 - DNA, 25 bp, Homo sapien
tactgcccataaagaagcgggaagc

SEQ ID NO: 2590674 - DNA, 25 bp, Homo sapien
gcgggaagccagttagtgcaagatc

SEQ ID NO: 2590675 - DNA, 25 bp, Homo sapien
caagtgaacgagaatgtcccagatg

SEQ ID NO: 2590676 - DNA, 25 bp, Homo sapien
aagtgaacgagaatgtcccagatgg

SEQ ID NO: 2590677 - DNA, 25 bp, Homo sapien
aacaagtgaacgagaatgtcccaga

SEQ ID NO: 2590678 - DNA, 25 bp, Homo sapien
acaagtgaacgagaatgtcccagat

SEQ ID NO: 2590679 - DNA, 25 bp, Homo sapien
ggcagcttctcctgtccagtgctgg

SEQ ID NO: 2590680 - DNA, 25 bp, Homo sapien
cggcagcttctcctgtccagtgctg

SEQ ID NO: 2590681 - DNA, 25 bp, Homo sapien
tccagtgctggctgccaagggacat

SEQ ID NO: 2590682 - DNA, 25 bp, Homo sapien
ctgtccagtgctggctgccaaggga

SEQ ID NO: 2590683 - DNA, 25 bp, Homo sapien
tgaaagcgtgaaacggctcaacccg

SEQ ID NO: 2590684 - DNA, 25 bp, Homo sapien
ggttgacccctgtacactagaagtg

SEQ ID NO: 2590685 - DNA, 25 bp, Homo sapien
actgtctacagtttccctcgggatg

SEQ ID NO: 2590686 - DNA, 25 bp, Homo sapien
tcgggatggacccacaatgaaagcg

SEQ ID NO: 2590687 - DNA, 25 bp, Homo sapien
tgcacgtgctgtgcctggtcactca

SEQ ID NO: 2590688 - DNA, 25 bp, Homo sapien
cgtgcacgtgctgtgcctggtcact

SEQ ID NO: 2590689 - DNA, 25 bp, Homo sapien
cccagggcgtgcacgtgctgtgcct

SEQ ID NO: 2590690 - DNA, 25 bp, Homo sapien
gttccccagggcgtgcacgtgctgt

SEQ ID NO: 2590691 - DNA, 25 bp, Homo sapien
gagagggcaaaacacagcaggaaac

SEQ ID NO: 2590692 - DNA, 25 bp, Homo sapien
actgaggaagaagtcgccaggagca

SEQ ID NO: 2590693 - DNA, 25 bp, Homo sapien
aaacggacagaaaagagcgagccca

SEQ ID NO: 2590694 - DNA, 25 bp, Homo sapien
gcttaggagacgaggctgtgagaca

SEQ ID NO: 2590695 - DNA, 25 bp, Homo sapien
ggaagataagactgtccacacacgc

SEQ ID NO: 2590696 - DNA, 25 bp, Homo sapien
tcctatcatgctggaagataagact

SEQ ID NO: 2590697 - DNA, 25 bp, Homo sapien
gaagataagactgtccacacacgcg

SEQ ID NO: 2590698 - DNA, 25 bp, Homo sapien
atcctatcatgctggaagataagac

SEQ ID NO: 2590699 - DNA, 25 bp, Homo sapien
taaccagtgttgaaatcgtaccacc

SEQ ID NO: 2590700 - DNA, 25 bp, Homo sapien
catctgtctcacaggaggttctgac

SEQ ID NO: 2590701 - DNA, 25 bp, Homo sapien
aacagcgccgtatgcttgagggtgc

SEQ ID NO: 2590702 - DNA, 25 bp, Homo sapien
cttcccgatgggtatttacaaagcg

SEQ ID NO: 2590703 - DNA, 25 bp, Homo sapien
gctccagattgtaccgcactcccat

SEQ ID NO: 2590704 - DNA, 25 bp, Homo sapien
tgtgggctccagattgtaccgcact

SEQ ID NO: 2590705 - DNA, 25 bp, Homo sapien
gctgtgggctccagattgtaccgca

SEQ ID NO: 2590706 - DNA, 25 bp, Homo sapien
tgggctccagattgtaccgcactcc

SEQ ID NO: 2590707 - DNA, 25 bp, Homo sapien
gactgacttcggaacacaagactgg

SEQ ID NO: 2590708 - DNA, 25 bp, Homo sapien
tgtctgcacgatgcgggctaaccta

SEQ ID NO: 2590709 - DNA, 25 bp, Homo sapien
gaaaaggttcgtgccaatctggaca

SEQ ID NO: 2590710 - DNA, 25 bp, Homo sapien
cacgagactcggatactgaacagga

SEQ ID NO: 2590711 - DNA, 25 bp, Homo sapien
gcgtctgagtcagcgaacttcagct

SEQ ID NO: 2590712 - DNA, 25 bp, Homo sapien
tctgagtcagcgaacttcagctcac

SEQ ID NO: 2590713 - DNA, 25 bp, Homo sapien
tgcgtctgagtcagcgaacttcagc

SEQ ID NO: 2590714 - DNA, 25 bp, Homo sapien
gtctgagtcagcgaacttcagctca

SEQ ID NO: 2590715 - DNA, 25 bp, Homo sapien
tctactaacgtctccttcaggctct

SEQ ID NO: 2590716 - DNA, 25 bp, Homo sapien
cctggcagaaaggtcgtcgatcctc

SEQ ID NO: 2590717 - DNA, 25 bp, Homo sapien
tctcatagccggtgtccagggctgg

SEQ ID NO: 2590718 - DNA, 25 bp, Homo sapien
atggtgtcttgctcggtctcatagc

SEQ ID NO: 2590719 - DNA, 25 bp, Homo sapien
cttcccaattagtagggccgagcgg

SEQ ID NO: 2590720 - DNA, 25 bp, Homo sapien
attagtagggccgagcggaatttca

SEQ ID NO: 2590721 - DNA, 25 bp, Homo sapien
tagggccgagcggaatttcaagcac

SEQ ID NO: 2590722 - DNA, 25 bp, Homo sapien
ggccgagcggaatttcaagcactgt

SEQ ID NO: 2590723 - DNA, 25 bp, Homo sapien
aagagggacatgaggaggcggttgt

SEQ ID NO: 2590724 - DNA, 25 bp, Homo sapien
atagcagttgtagaaaaagaggcag

SEQ ID NO: 2590725 - DNA, 25 bp, Homo sapien
gaagagggacatgaggaggcggttg

SEQ ID NO: 2590726 - DNA, 25 bp, Homo sapien
cttatagcagttgtagaaaaagagg

SEQ ID NO: 2590727 - DNA, 25 bp, Homo sapien
ttttctccgagtggagctgggggac

SEQ ID NO: 2590728 - DNA, 25 bp, Homo sapien
atggttttctccgagtggagctggg

SEQ ID NO: 2590729 - DNA, 25 bp, Homo sapien
tggttttctccgagtggagctgggg

SEQ ID NO: 2590730 - DNA, 25 bp, Homo sapien
gttttctccgagtggagctggggga

SEQ ID NO: 2590731 - DNA, 25 bp, Homo sapien
ttcgcaggatgtgccggtgggcgca

SEQ ID NO: 2590732 - DNA, 25 bp, Homo sapien
tggtggcaatcctactaccttctgt

SEQ ID NO: 2590733 - DNA, 25 bp, Homo sapien
gggtggatgccaccaacactttggt

SEQ ID NO: 2590734 - DNA, 25 bp, Homo sapien
gatgacgatctttggttcgcaggat

SEQ ID NO: 2590735 - DNA, 25 bp, Homo sapien
gaacaactgacaaggtgggggccac

SEQ ID NO: 2590736 - DNA, 25 bp, Homo sapien
tgaacaactgacaaggtgggggcca

SEQ ID NO: 2590737 - DNA, 25 bp, Homo sapien
ctgaacaactgacaaggtgggggcc

SEQ ID NO: 2590738 - DNA, 25 bp, Homo sapien
atttcagttccgctgtgccaccgtg

SEQ ID NO: 2590739 - DNA, 25 bp, Homo sapien
tgccaccgtgcttgaaaaaatgctg

SEQ ID NO: 2590740 - DNA, 25 bp, Homo sapien
ttcacttccaggacgtgcttggcga

SEQ ID NO: 2590741 - DNA, 25 bp, Homo sapien
tgcttggcgaccacttggaagaccg

SEQ ID NO: 2590742 - DNA, 25 bp, Homo sapien
taggttttgcttaatgagccccaag

SEQ ID NO: 2590743 - DNA, 25 bp, Homo sapien
gcaccgtgaaatggctacaagacct

SEQ ID NO: 2590744 - DNA, 25 bp, Homo sapien
tccacaggcgggtgaatcccaggtg

SEQ ID NO: 2590745 - DNA, 25 bp, Homo sapien
acttgacctctgttccgagtggaga

SEQ ID NO: 2590746 - DNA, 25 bp, Homo sapien
agaagcatcgccgctcatctcctga

SEQ ID NO: 2590747 - DNA, 25 bp, Homo sapien
ccgggcacacagaagcatcgccgct

SEQ ID NO: 2590748 - DNA, 25 bp, Homo sapien
ggcacacagaagcatcgccgctcat

SEQ ID NO: 2590749 - DNA, 25 bp, Homo sapien
aagcatcgccgctcatctcctgaat

SEQ ID NO: 2590750 - DNA, 25 bp, Homo sapien
cgtgttattcacccacacacatggg

SEQ ID NO: 2590751 - DNA, 25 bp, Homo sapien
ctgcaaaacaaccggcacgtgttat

SEQ ID NO: 2590752 - DNA, 25 bp, Homo sapien
cacacacatgggggacatccccagg

SEQ ID NO: 2590753 - DNA, 25 bp, Homo sapien
caaaacaaccggcacgtgttattca

SEQ ID NO: 2590754 - DNA, 25 bp, Homo sapien
gtgcttcccacagaaggccagcggg

SEQ ID NO: 2590755 - DNA, 25 bp, Homo sapien
tctcggtctggtgcagagccacgca

SEQ ID NO: 2590756 - DNA, 25 bp, Homo sapien
tggaccacgcccgagttagagccag

SEQ ID NO: 2590757 - DNA, 25 bp, Homo sapien
acagtcctcgcaggtgccgtgcttc

SEQ ID NO: 2590758 - DNA, 25 bp, Homo sapien
gagaggtactcagaaccagaggcaa

SEQ ID NO: 2590759 - DNA, 25 bp, Homo sapien
gaggcctaacataacagggatgcca

SEQ ID NO: 2590760 - DNA, 25 bp, Homo sapien
gccaaacggacgacatgcaaaggat

SEQ ID NO: 2590761 - DNA, 25 bp, Homo sapien
cagaatccacgtgctatgtcagggc

SEQ ID NO: 2590762 - DNA, 25 bp, Homo sapien
gggaagtcaacctccgagctccaga

SEQ ID NO: 2590763 - DNA, 25 bp, Homo sapien
agacgggaagtcaacctccgagctc

SEQ ID NO: 2590764 - DNA, 25 bp, Homo sapien
gacgggaagtcaacctccgagctcc

SEQ ID NO: 2590765 - DNA, 25 bp, Homo sapien
acgggaagtcaacctccgagctcca

SEQ ID NO: 2590766 - DNA, 25 bp, Homo sapien
ttctgggacacttggttcccagtga

SEQ ID NO: 2590767 - DNA, 25 bp, Homo sapien
tctgggacacttggttcccagtgac

SEQ ID NO: 2590768 - DNA, 25 bp, Homo sapien
cttctgggacacttggttcccagtg

SEQ ID NO: 2590769 - DNA, 25 bp, Homo sapien
gcagatgaggccatgtgtgagccac

SEQ ID NO: 2590770 - DNA, 25 bp, Homo sapien
gctgggtaacttccaagggacagct

SEQ ID NO: 2590771 - DNA, 25 bp, Homo sapien
gaggtggcggaaacattctctggca

SEQ ID NO: 2590772 - DNA, 25 bp, Homo sapien
cccagatcacagttcgggcatcgcg

SEQ ID NO: 2590773 - DNA, 25 bp, Homo sapien
caaggacttgaggtatctgcacacc

SEQ ID NO: 2590774 - DNA, 25 bp, Homo sapien
aaaatgcgggactcacaaaatgcgg

SEQ ID NO: 2590775 - DNA, 25 bp, Homo sapien
gatgaacgcacacacaaaatgcggg

SEQ ID NO: 2590776 - DNA, 25 bp, Homo sapien
gagcaaccgtgtccatcaagggatg

SEQ ID NO: 2590777 - DNA, 25 bp, Homo sapien
tgatcaccgtgagagagcctgatgg

SEQ ID NO: 2590778 - DNA, 25 bp, Homo sapien
gggcgtggtactggccgtttctcca

SEQ ID NO: 2590779 - DNA, 25 bp, Homo sapien
cctgatggggtcaggcggcacagtc

SEQ ID NO: 2590780 - DNA, 25 bp, Homo sapien
agggtggaggcacagcgcacctccc

SEQ ID NO: 2590781 - DNA, 25 bp, Homo sapien
ttgtccaggcaactaagccacgtcc

SEQ ID NO: 2590782 - DNA, 25 bp, Homo sapien
gcaggcaggatgtatttccgcttgt

SEQ ID NO: 2590783 - DNA, 25 bp, Homo sapien
agccacgtccccacgaatggaggct

SEQ ID NO: 2590784 - DNA, 25 bp, Homo sapien
agaaggcacaggaccccacggcagg

SEQ ID NO: 2590785 - DNA, 25 bp, Homo sapien
gtgacccttggaacagagtgtcatt

SEQ ID NO: 2590786 - DNA, 25 bp, Homo sapien
ctttgaggatcagtgcccatgtgcc

SEQ ID NO: 2590787 - DNA, 25 bp, Homo sapien
gatgttgtaggtgcctgcccagtct

SEQ ID NO: 2590788 - DNA, 25 bp, Homo sapien
ggtccagtaggaccagcaagcgctt

SEQ ID NO: 2590789 - DNA, 25 bp, Homo sapien
ctcgaggctgatggctttgtgcaga

SEQ ID NO: 2590790 - DNA, 25 bp, Homo sapien
tgatggctttgtgcagagctccccg

SEQ ID NO: 2590791 - DNA, 25 bp, Homo sapien
gagctgggtctcctcgatgatgtga

SEQ ID NO: 2590792 - DNA, 25 bp, Homo sapien
tgtgaacagcgtgctcgaggctgat

SEQ ID NO: 2590793 - DNA, 25 bp, Homo sapien
tgcagggccaaagctacaggtcagt

SEQ ID NO: 2590794 - DNA, 25 bp, Homo sapien
ctgcagggccaaagctacaggtcag

SEQ ID NO: 2590795 - DNA, 25 bp, Homo sapien
cagggccaaagctacaggtcagtga

SEQ ID NO: 2590796 - DNA, 25 bp, Homo sapien
gggccaaagctacaggtcagtgaca

SEQ ID NO: 2590797 - DNA, 25 bp, Homo sapien
cacatgagggggctcccatgctcca

SEQ ID NO: 2590798 - DNA, 25 bp, Homo sapien
caacagtcgacattacacttgaggc

SEQ ID NO: 2590799 - DNA, 25 bp, Homo sapien
cttgaggctaagtgccacatgaggg

SEQ ID NO: 2590800 - DNA, 25 bp, Homo sapien
cattacacttgaggctaagtgccac

SEQ ID NO: 2590801 - DNA, 25 bp, Homo sapien
tggtctttaacgaactgcagcgtct

SEQ ID NO: 2590802 - DNA, 25 bp, Homo sapien
tgcagcgtcttgtctggcaaattca

SEQ ID NO: 2590803 - DNA, 25 bp, Homo sapien
tgtgctgacaaacatgacatcatag

SEQ ID NO: 2590804 - DNA, 25 bp, Homo sapien
tcatccatcaaagggtggtctttaa

SEQ ID NO: 2590805 - DNA, 25 bp, Homo sapien
tgcagggagaaaatccccgctgtta

SEQ ID NO: 2590806 - DNA, 25 bp, Homo sapien
cacacaatgcatgccttgaaatgag

SEQ ID NO: 2590807 - DNA, 25 bp, Homo sapien
ggctgcaaaacctggaaaccacaca

SEQ ID NO: 2590808 - DNA, 25 bp, Homo sapien
gttaacgtgctcgtgtcccaccacg

SEQ ID NO: 2590809 - DNA, 25 bp, Homo sapien
tggacaggttgtaggcgcacactgc

SEQ ID NO: 2590810 - DNA, 25 bp, Homo sapien
gctctgcatgtacttcccgtgggag

SEQ ID NO: 2590811 - DNA, 25 bp, Homo sapien
tgggtaccgggccattatagcgcac

SEQ ID NO: 2590812 - DNA, 25 bp, Homo sapien
acccacttggtgtgggactgctcca

SEQ ID NO: 2590813 - DNA, 25 bp, Homo sapien
gcatagaacacaggcaccttcaggc

SEQ ID NO: 2590814 - DNA, 25 bp, Homo sapien
ccaagccgctgtctggccgggagca

SEQ ID NO: 2590815 - DNA, 25 bp, Homo sapien
aagacatcccgcagcacattgaaga

SEQ ID NO: 2590816 - DNA, 25 bp, Homo sapien
cgggagcagatgagtcgggctttca

SEQ ID NO: 2590817 - DNA, 25 bp, Homo sapien
gggctgtctgggctttttcggatca

SEQ ID NO: 2590818 - DNA, 25 bp, Homo sapien
tcacgtcagcaaacacgaaactagg

SEQ ID NO: 2590819 - DNA, 25 bp, Homo sapien
aagtagaccctgtcatcctcgccgt

SEQ ID NO: 2590820 - DNA, 25 bp, Homo sapien
cacactcttgctatccgtgggatca

SEQ ID NO: 2590821 - DNA, 25 bp, Homo sapien
tcccactaaggtgcactgctcttcc

SEQ ID NO: 2590822 - DNA, 25 bp, Homo sapien
gttcagccaagggattgcatattct

SEQ ID NO: 2590823 - DNA, 25 bp, Homo sapien
gatgatgggttcacttcccaaaaaa

SEQ ID NO: 2590824 - DNA, 25 bp, Homo sapien
caagggattgcatattctgtcctca

SEQ ID NO: 2590825 - DNA, 25 bp, Homo sapien
aagaatttcgggagatgatgggttc

SEQ ID NO: 2590826 - DNA, 25 bp, Homo sapien
aaagggacatcttcctttgccatct

SEQ ID NO: 2590827 - DNA, 25 bp, Homo sapien
ctgggtcaaagggacatcttccttt

SEQ ID NO: 2590828 - DNA, 25 bp, Homo sapien
caaccatgacggatgtgtagctgtg

SEQ ID NO: 2590829 - DNA, 25 bp, Homo sapien
atgtgtagctgtgtgctgggtcaaa

SEQ ID NO: 2590830 - DNA, 25 bp, Homo sapien
gggaagtggcgctgagtggctgcag

SEQ ID NO: 2590831 - DNA, 25 bp, Homo sapien
caggccggctggaatgcgttggtcc

SEQ ID NO: 2590832 - DNA, 25 bp, Homo sapien
cacacacgtaaagggaagtggcgct

SEQ ID NO: 2590833 - DNA, 25 bp, Homo sapien
cacccggatgtagttgaggcactct

SEQ ID NO: 2590834 - DNA, 25 bp, Homo sapien
tttttgtgtccgatgacgacgaacc

SEQ ID NO: 2590835 - DNA, 25 bp, Homo sapien
ttggtttatctgagctgaggtgatt

SEQ ID NO: 2590836 - DNA, 25 bp, Homo sapien
gaaccacaaaatggctcgcaattat

SEQ ID NO: 2590837 - DNA, 25 bp, Homo sapien
gaggtgattgtaatgcacattctcc

SEQ ID NO: 2590838 - DNA, 25 bp, Homo sapien
tctctctgaacataattggcacttg

SEQ ID NO: 2590839 - DNA, 25 bp, Homo sapien
gcacttgaggagtcttgacgatttc

SEQ ID NO: 2590840 - DNA, 25 bp, Homo sapien
ttttcaaggcgttgcattgccagtg

SEQ ID NO: 2590841 - DNA, 25 bp, Homo sapien
gaatgattcttttataacagcgtct

SEQ ID NO: 2590842 - DNA, 25 bp, Homo sapien
tgctgcagagcgagtctctcatctg

SEQ ID NO: 2590843 - DNA, 25 bp, Homo sapien
caaccgcagatcatccggcagcatt

SEQ ID NO: 2590844 - DNA, 25 bp, Homo sapien
aaaccagttatggagatgcagctgc

SEQ ID NO: 2590845 - DNA, 25 bp, Homo sapien
tctggctgcagacaaccgcagatca

SEQ ID NO: 2590846 - DNA, 25 bp, Homo sapien
catacatttcatactccggagggaa

SEQ ID NO: 2590847 - DNA, 25 bp, Homo sapien
tcattgcaaacaggacgatccctag

SEQ ID NO: 2590848 - DNA, 25 bp, Homo sapien
tggtcggagatactaggtaaagccc

SEQ ID NO: 2590849 - DNA, 25 bp, Homo sapien
tcagggctagtccaacgatagttcc

SEQ ID NO: 2590850 - DNA, 25 bp, Homo sapien
catacaaggtgtgggtcgctccatg

SEQ ID NO: 2590851 - DNA, 25 bp, Homo sapien
gaagcgaagcaagtccatacaaggt

SEQ ID NO: 2590852 - DNA, 25 bp, Homo sapien
caaacgctcgcagcatgaatggcct

SEQ ID NO: 2590853 - DNA, 25 bp, Homo sapien
tatgtcccgatggaagacaccgcga

SEQ ID NO: 2590854 - DNA, 25 bp, Homo sapien
ttccttcatcattggtgactttaca

SEQ ID NO: 2590855 - DNA, 25 bp, Homo sapien
tggtgactttacagcatatttcaca

SEQ ID NO: 2590856 - DNA, 25 bp, Homo sapien
ggtgactttacagcatatttcacag

SEQ ID NO: 2590857 - DNA, 25 bp, Homo sapien
ccttgatttccttcatcattggtga

SEQ ID NO: 2590858 - DNA, 25 bp, Homo sapien
ttttctgtgacgtcctcctctagct

SEQ ID NO: 2590859 - DNA, 25 bp, Homo sapien
tttctgtgacgtcctcctctagctg

SEQ ID NO: 2590860 - DNA, 25 bp, Homo sapien
cattttctgtgacgtcctcctctag

SEQ ID NO: 2590861 - DNA, 25 bp, Homo sapien
attttctgtgacgtcctcctctagc

SEQ ID NO: 2590862 - DNA, 25 bp, Homo sapien
ggaacctcatcaggcccaatggttg

SEQ ID NO: 2590863 - DNA, 25 bp, Homo sapien
tactggtagtccttcgcagcctgga

SEQ ID NO: 2590864 - DNA, 25 bp, Homo sapien
tagttttgcgatggaagactggcca

SEQ ID NO: 2590865 - DNA, 25 bp, Homo sapien
tacttgagtagtacacagggactgt

SEQ ID NO: 2590866 - DNA, 25 bp, Homo sapien
tggcactaataggattctttgcccc

SEQ ID NO: 2590867 - DNA, 25 bp, Homo sapien
actttacccgactcactgtgcagtc

SEQ ID NO: 2590868 - DNA, 25 bp, Homo sapien
gactcactgtgcagtctgccacatc

SEQ ID NO: 2590869 - DNA, 25 bp, Homo sapien
ccccttgccaatcttgtaaagaaag

SEQ ID NO: 2590870 - DNA, 25 bp, Homo sapien
caggagttgaggctttaacatatct

SEQ ID NO: 2590871 - DNA, 25 bp, Homo sapien
aatcagggcccactccaatcaggtg

SEQ ID NO: 2590872 - DNA, 25 bp, Homo sapien
aggtgagttgtattgaatcagggcc

SEQ ID NO: 2590873 - DNA, 25 bp, Homo sapien
gtgtgactgcgtcttcacttgatta

SEQ ID NO: 2590874 - DNA, 25 bp, Homo sapien
tcactttggagatgtctgatgtcaa

SEQ ID NO: 2590875 - DNA, 25 bp, Homo sapien
tctggctgcctaaaggattatttct

SEQ ID NO: 2590876 - DNA, 25 bp, Homo sapien
gggacagaattctacccacaaattc

SEQ ID NO: 2590877 - DNA, 25 bp, Homo sapien
tctagataaggaggcattgcttctt

SEQ ID NO: 2590878 - DNA, 25 bp, Homo sapien
aataggatggctgttccggccagga

SEQ ID NO: 2590879 - DNA, 25 bp, Homo sapien
gaggtctctttgatctcacgcgaga

SEQ ID NO: 2590880 - DNA, 25 bp, Homo sapien
tgtgctgccctgttggatacctcag

SEQ ID NO: 2590881 - DNA, 25 bp, Homo sapien
gggactgatgagcacatatctcggg

SEQ ID NO: 2590882 - DNA, 25 bp, Homo sapien
gtatctcagaatatgccagggcaga

SEQ ID NO: 2590883 - DNA, 25 bp, Homo sapien
ttgctgggttgaactgtgaccccca

SEQ ID NO: 2590884 - DNA, 25 bp, Homo sapien
tgctgggttgaactgtgacccccaa

SEQ ID NO: 2590885 - DNA, 25 bp, Homo sapien
tgtatctcagaatatgccagggcag

SEQ ID NO: 2590886 - DNA, 25 bp, Homo sapien
tttcgagaccttgatcggcctccca

SEQ ID NO: 2590887 - DNA, 25 bp, Homo sapien
taagatgtacgtttgtttggtcagg

SEQ ID NO: 2590888 - DNA, 25 bp, Homo sapien
catcttattcaggagtggactggga

SEQ ID NO: 2590889 - DNA, 25 bp, Homo sapien
gtctgtcatttgtctacgaggaatt

SEQ ID NO: 2590890 - DNA, 25 bp, Homo sapien
tatttaaggtgaacaagggagtctc

SEQ ID NO: 2590891 - DNA, 25 bp, Homo sapien
tcagctttcaggcatgcaaatcccc

SEQ ID NO: 2590892 - DNA, 25 bp, Homo sapien
tctctatgtggtttatatttaaggt

SEQ ID NO: 2590893 - DNA, 25 bp, Homo sapien
gaaagtcaccgtctgatatgatcca

SEQ ID NO: 2590894 - DNA, 25 bp, Homo sapien
tcctcagtagtcagatccaagctca

SEQ ID NO: 2590895 - DNA, 25 bp, Homo sapien
cctcacattgtttactcagtcataa

SEQ ID NO: 2590896 - DNA, 25 bp, Homo sapien
cacttccttgggtctacgcactttt

SEQ ID NO: 2590897 - DNA, 25 bp, Homo sapien
gctgtccaattattaacatcagtct

SEQ ID NO: 2590898 - DNA, 25 bp, Homo sapien
tagagcaacagtgatcagcttgtga

SEQ ID NO: 2590899 - DNA, 25 bp, Homo sapien
agagttctcttttcataagaaacct

SEQ ID NO: 2590900 - DNA, 25 bp, Homo sapien
tcactatcaccatgaaaatctcagt

SEQ ID NO: 2590901 - DNA, 25 bp, Homo sapien
tgagtaaaagccaaataccaggcac

SEQ ID NO: 2590902 - DNA, 25 bp, Homo sapien
ctgccaaagcctcatttgcaatttc

SEQ ID NO: 2590903 - DNA, 25 bp, Homo sapien
tcagttgatacatcttttcagtaac

SEQ ID NO: 2590904 - DNA, 25 bp, Homo sapien
ctgaactcagttgatacatcttttc

SEQ ID NO: 2590905 - DNA, 25 bp, Homo sapien
tgccaaagcctcatttgcaatttca

SEQ ID NO: 2590906 - DNA, 25 bp, Homo sapien
tcaggggttaaatggattcaaaaca

SEQ ID NO: 2590907 - DNA, 25 bp, Homo sapien
cagaaatcagtaaagctgtcattgc

SEQ ID NO: 2590908 - DNA, 25 bp, Homo sapien
atcagtaaagctgtcattgcagatt

SEQ ID NO: 2590909 - DNA, 25 bp, Homo sapien
caggggttaaatggattcaaaacag

SEQ ID NO: 2590910 - DNA, 25 bp, Homo sapien
ctcaggacatggaaaatacggactt

SEQ ID NO: 2590911 - DNA, 25 bp, Homo sapien
ttctcaggacatggaaaatacggac

SEQ ID NO: 2590912 - DNA, 25 bp, Homo sapien
tcaggacatggaaaatacggacttg

SEQ ID NO: 2590913 - DNA, 25 bp, Homo sapien
tctcaggacatggaaaatacggact

SEQ ID NO: 2590914 - DNA, 25 bp, Homo sapien
tctgctaataatccatcactgtggt

SEQ ID NO: 2590915 - DNA, 25 bp, Homo sapien
ctgcccgcttgcactgtaactccaa

SEQ ID NO: 2590916 - DNA, 25 bp, Homo sapien
aaggaagctttcacctaaagcttgg

SEQ ID NO: 2590917 - DNA, 25 bp, Homo sapien
tcacctaaagcttgggagaaatgat

SEQ ID NO: 2590918 - DNA, 25 bp, Homo sapien
catgaagtatggagaataggtggac

SEQ ID NO: 2590919 - DNA, 25 bp, Homo sapien
tcatgaagtatggagaataggtgga

SEQ ID NO: 2590920 - DNA, 25 bp, Homo sapien
gaagtatggagaataggtggacaat

SEQ ID NO: 2590921 - DNA, 25 bp, Homo sapien
tgaagtatggagaataggtggacaa

SEQ ID NO: 2590922 - DNA, 25 bp, Homo sapien
tgcgttagctaaaactatcactgtg

SEQ ID NO: 2590923 - DNA, 25 bp, Homo sapien
tatcactgtgcttatagcctgtaag

SEQ ID NO: 2590924 - DNA, 25 bp, Homo sapien
cctgtaaggctacagcatcagagag

SEQ ID NO: 2590925 - DNA, 25 bp, Homo sapien
ggagtatttagcacagttattttca

SEQ ID NO: 2590926 - DNA, 25 bp, Homo sapien
ctggggagcttcatcttggctttcc

SEQ ID NO: 2590927 - DNA, 25 bp, Homo sapien
actggggagcttcatcttggctttc

SEQ ID NO: 2590928 - DNA, 25 bp, Homo sapien
tgtaacatagcaccaaagggaaggt

SEQ ID NO: 2590929 - DNA, 25 bp, Homo sapien
tgtgtaacatagcaccaaagggaag

SEQ ID NO: 2590930 - DNA, 25 bp, Homo sapien
aacatagcaccaaagggaaggtcat

SEQ ID NO: 2590931 - DNA, 25 bp, Homo sapien
ctgtgtaacatagcaccaaagggaa

SEQ ID NO: 2590932 - DNA, 25 bp, Homo sapien
ggcgcatctggagtctgtctcttct

SEQ ID NO: 2590933 - DNA, 25 bp, Homo sapien
ggtggcgcatctggagtctgtctct

SEQ ID NO: 2590934 - DNA, 25 bp, Homo sapien
cgcatctggagtctgtctcttctga

SEQ ID NO: 2590935 - DNA, 25 bp, Homo sapien
tggcgcatctggagtctgtctcttc

SEQ ID NO: 2590936 - DNA, 25 bp, Homo sapien
tgtagaagtttggagccttaggcca

SEQ ID NO: 2590937 - DNA, 25 bp, Homo sapien
tagaagtttggagccttaggccagt

SEQ ID NO: 2590938 - DNA, 25 bp, Homo sapien
tttggagccttaggccagtgctgga

SEQ ID NO: 2590939 - DNA, 25 bp, Homo sapien
gaagtttggagccttaggccagtgc

SEQ ID NO: 2590940 - DNA, 25 bp, Homo sapien
tggaagggaacaggaatacactcac

SEQ ID NO: 2590941 - DNA, 25 bp, Homo sapien
ctggaagggaacaggaatacactca

SEQ ID NO: 2590942 - DNA, 25 bp, Homo sapien
agtgcacacgagctccgctttccga

SEQ ID NO: 2590943 - DNA, 25 bp, Homo sapien
tacactctgcagtgcacacgagctc

SEQ ID NO: 2590944 - DNA, 25 bp, Homo sapien
aggaatacactctgcagtgcacacg

SEQ ID NO: 2590945 - DNA, 25 bp, Homo sapien
tctgcagtgcacacgagctccgctt

SEQ ID NO: 2590946 - DNA, 25 bp, Homo sapien
tacttttactcatgctgcagaactc

SEQ ID NO: 2590947 - DNA, 25 bp, Homo sapien
tgcagaactcacatgacactgctat

SEQ ID NO: 2590948 - DNA, 25 bp, Homo sapien
cctgaaaggcttttacactgttctc

SEQ ID NO: 2590949 - DNA, 25 bp, Homo sapien
tagcatttgctttagggattacacc

SEQ ID NO: 2590950 - DNA, 25 bp, Homo sapien
gggtttccaccttgttagcaggatg

SEQ ID NO: 2590951 - DNA, 25 bp, Homo sapien
gacattgtgattttacctcgttggg

SEQ ID NO: 2590952 - DNA, 25 bp, Homo sapien
ctaacatctgtgtatgtgctgggtc

SEQ ID NO: 2590953 - DNA, 25 bp, Homo sapien
taagccttttcttgtcacatcctaa

SEQ ID NO: 2590954 - DNA, 25 bp, Homo sapien
tcaacctataggcaataaactatgt

SEQ ID NO: 2590955 - DNA, 25 bp, Homo sapien
tatataacggcacaataaaatgcaa

SEQ ID NO: 2590956 - DNA, 25 bp, Homo sapien
aaatgcaaccatgtgaacctcacat

SEQ ID NO: 2590957 - DNA, 25 bp, Homo sapien
cacaggaagtagtgcttcagtacat

SEQ ID NO: 2590958 - DNA, 25 bp, Homo sapien
gatttggaaacaccctaagtgttca

SEQ ID NO: 2590959 - DNA, 25 bp, Homo sapien
tttggaaacaccctaagtgttcatc

SEQ ID NO: 2590960 - DNA, 25 bp, Homo sapien
caatactgtttataacagctaagat

SEQ ID NO: 2590961 - DNA, 25 bp, Homo sapien
acagagtgtaatcaggttgtttgta

SEQ ID NO: 2590962 - DNA, 25 bp, Homo sapien
taaaatacagagtgtaatcaggttg

SEQ ID NO: 2590963 - DNA, 25 bp, Homo sapien
aaatacagagtgtaatcaggttgtt

SEQ ID NO: 2590964 - DNA, 25 bp, Homo sapien
atacagagtgtaatcaggttgtttg

SEQ ID NO: 2590965 - DNA, 25 bp, Homo sapien
ggtaatctatgggaatttggcccca

SEQ ID NO: 2590966 - DNA, 25 bp, Homo sapien
taaaccttaatgagacatgttccag

SEQ ID NO: 2590967 - DNA, 25 bp, Homo sapien
cataaacctttgatcagactggcag

SEQ ID NO: 2590968 - DNA, 25 bp, Homo sapien
tagtccttggtaggcagttggtatc

SEQ ID NO: 2590969 - DNA, 25 bp, Homo sapien
tctggttttcatggactgcgttttg

SEQ ID NO: 2590970 - DNA, 25 bp, Homo sapien
catggactgcgttttgcacatcgag

SEQ ID NO: 2590971 - DNA, 25 bp, Homo sapien
catcgagctcactgtttagagctgt

SEQ ID NO: 2590972 - DNA, 25 bp, Homo sapien
tgcgttttgcacatcgagctcactg

SEQ ID NO: 2590973 - DNA, 25 bp, Homo sapien
tctttttttgagacttttgactcat

SEQ ID NO: 2590974 - DNA, 25 bp, Homo sapien
ttctttttttgagacttttgactca

SEQ ID NO: 2590975 - DNA, 25 bp, Homo sapien
ctagcactcttctttttttgagact

SEQ ID NO: 2590976 - DNA, 25 bp, Homo sapien
cactcttctttttttgagacttttg

SEQ ID NO: 2590977 - DNA, 25 bp, Homo sapien
agatgcgtatggctatggcagtgat

SEQ ID NO: 2590978 - DNA, 25 bp, Homo sapien
ctttgcgtaactttctctgttgata

SEQ ID NO: 2590979 - DNA, 25 bp, Homo sapien
ttctctgttgatagatgcgtatggc

SEQ ID NO: 2590980 - DNA, 25 bp, Homo sapien
tttctttgcgtaactttctctgttg

SEQ ID NO: 2590981 - DNA, 25 bp, Homo sapien
gcgataatgacaagcaccaggtcat

SEQ ID NO: 2590982 - DNA, 25 bp, Homo sapien
tatctaaagcgataatgacaagcac

SEQ ID NO: 2590983 - DNA, 25 bp, Homo sapien
tatcattatctaaagcgataatgac

SEQ ID NO: 2590984 - DNA, 25 bp, Homo sapien
taaagcgataatgacaagcaccagg

SEQ ID NO: 2590985 - DNA, 25 bp, Homo sapien
gtctgcattaaccaagggctctccc

SEQ ID NO: 2590986 - DNA, 25 bp, Homo sapien
tgcattaaccaagggctctccctca

SEQ ID NO: 2590987 - DNA, 25 bp, Homo sapien
tctgcattaaccaagggctctccct

SEQ ID NO: 2590988 - DNA, 25 bp, Homo sapien
caacagggaaaggaagaatgatgtt

SEQ ID NO: 2590989 - DNA, 25 bp, Homo sapien
cagggaaaggaagaatgatgtttaa

SEQ ID NO: 2590990 - DNA, 25 bp, Homo sapien
ctacaacagggaaaggaagaatgat

SEQ ID NO: 2590991 - DNA, 25 bp, Homo sapien
ggaaaggaagaatgatgtttaatag

SEQ ID NO: 2590992 - DNA, 25 bp, Homo sapien
agccagttcccgcgccggggagccg

SEQ ID NO: 2590993 - DNA, 25 bp, Homo sapien
gccagtgaagccactagtcgccgcc

SEQ ID NO: 2590994 - DNA, 25 bp, Homo sapien
ttgtgtccgggtccgcgccggcagc

SEQ ID NO: 2590995 - DNA, 25 bp, Homo sapien
gcaccgccgagaggcagccagtgaa

SEQ ID NO: 2590996 - DNA, 25 bp, Homo sapien
cgcccgccttgtgtccgggtccgcg

SEQ ID NO: 2590997 - DNA, 25 bp, Homo sapien
tagccctcacaatcaaaatcatgcc

SEQ ID NO: 2590998 - DNA, 25 bp, Homo sapien
gtttgagagctcaacttccctagcc

SEQ ID NO: 2590999 - DNA, 25 bp, Homo sapien
tagttcttggcatgccccttcattt

SEQ ID NO: 2591000 - DNA, 25 bp, Homo sapien
aaatttatcagctgttgcctgctag

SEQ ID NO: 2591001 - DNA, 25 bp, Homo sapien
gatatttatgaatatgcctccccat

SEQ ID NO: 2591002 - DNA, 25 bp, Homo sapien
tagacaatatgatagacaattactg

SEQ ID NO: 2591003 - DNA, 25 bp, Homo sapien
tactgtaactttctaccttgcgtaa

SEQ ID NO: 2591004 - DNA, 25 bp, Homo sapien
tcttaattgagttacataagatggg

SEQ ID NO: 2591005 - DNA, 25 bp, Homo sapien
tatgagagatttgacggcgttgaat

SEQ ID NO: 2591006 - DNA, 25 bp, Homo sapien
agatttgacggcgttgaattctgtc

SEQ ID NO: 2591007 - DNA, 25 bp, Homo sapien
tttgacggcgttgaattctgtccct

SEQ ID NO: 2591008 - DNA, 25 bp, Homo sapien
tgagagatttgacggcgttgaattc

SEQ ID NO: 2591009 - DNA, 25 bp, Homo sapien
gaaggatctataattggcagaatcc

SEQ ID NO: 2591010 - DNA, 25 bp, Homo sapien
tatgttgtgtgcttttaaaccgtgt

SEQ ID NO: 2591011 - DNA, 25 bp, Homo sapien
tcttcttgacttatggaagagcagc

SEQ ID NO: 2591012 - DNA, 25 bp, Homo sapien
gcagcactgaatgggttgctcttct

SEQ ID NO: 2591013 - DNA, 25 bp, Homo sapien
gagaacattcccctattgagtaaag

SEQ ID NO: 2591014 - DNA, 25 bp, Homo sapien
tgatgtctatctagcttgtacctaa

SEQ ID NO: 2591015 - DNA, 25 bp, Homo sapien
tcaggattttgatgtctatctagct

SEQ ID NO: 2591016 - DNA, 25 bp, Homo sapien
tatctagcttgtacctaatctgcaa

SEQ ID NO: 2591017 - DNA, 25 bp, Homo sapien
gattttgatgtctatctagcttgta

SEQ ID NO: 2591018 - DNA, 25 bp, Homo sapien
gaaatataactgcatatcaactccg

SEQ ID NO: 2591019 - DNA, 25 bp, Homo sapien
aataaccattaagggaggcactgaa

SEQ ID NO: 2591020 - DNA, 25 bp, Homo sapien
cccattggagggcatacagttttct

SEQ ID NO: 2591021 - DNA, 25 bp, Homo sapien
gctgaaaagacccatgtcattacag

SEQ ID NO: 2591022 - DNA, 25 bp, Homo sapien
ggtattcctcatagaaagagctcac

SEQ ID NO: 2591023 - DNA, 25 bp, Homo sapien
tggcgaggataactgaaaggtattc

SEQ ID NO: 2591024 - DNA, 25 bp, Homo sapien
cattgttggcgaggataactgaaag

SEQ ID NO: 2591025 - DNA, 25 bp, Homo sapien
gaaaggtattcctcatagaaagagc

SEQ ID NO: 2591026 - DNA, 25 bp, Homo sapien
gaagctcagtgtgatcatttctctg

SEQ ID NO: 2591027 - DNA, 25 bp, Homo sapien
cagtgtgatcatttctctggtcaat

SEQ ID NO: 2591028 - DNA, 25 bp, Homo sapien
ggttcggaagctcagtgtgatcatt

SEQ ID NO: 2591029 - DNA, 25 bp, Homo sapien
tcgtgtggttcggaagctcagtgtg

SEQ ID NO: 2591030 - DNA, 25 bp, Homo sapien
tgaagaaacgagagagctggagttt

SEQ ID NO: 2591031 - DNA, 25 bp, Homo sapien
aatgaagaaacgagagagctggagt

SEQ ID NO: 2591032 - DNA, 25 bp, Homo sapien
cacttaaagtgtaatgttcttgaaa

SEQ ID NO: 2591033 - DNA, 25 bp, Homo sapien
ttcacttaaagtgtaatgttcttga

SEQ ID NO: 2591034 - DNA, 25 bp, Homo sapien
tccgcctgtcgtagagagccttaag

SEQ ID NO: 2591035 - DNA, 25 bp, Homo sapien
ttttacgagagagtgggccctgtcc

SEQ ID NO: 2591036 - DNA, 25 bp, Homo sapien
aatgtgcatttgaccttgaggatac

SEQ ID NO: 2591037 - DNA, 25 bp, Homo sapien
ggcaatcattagcacacataaggcg

SEQ ID NO: 2591038 - DNA, 25 bp, Homo sapien
tgagcttttgctttaaaatacattc

SEQ ID NO: 2591039 - DNA, 25 bp, Homo sapien
tttgagcttttgctttaaaatacat

SEQ ID NO: 2591040 - DNA, 25 bp, Homo sapien
ctttgagcttttgctttaaaataca

SEQ ID NO: 2591041 - DNA, 25 bp, Homo sapien
agcttttgctttaaaatacattcag

SEQ ID NO: 2591042 - DNA, 25 bp, Homo sapien
ctgttcatgcactgactcttctaac

SEQ ID NO: 2591043 - DNA, 25 bp, Homo sapien
gcccagaagactcttgcagtggtga

SEQ ID NO: 2591044 - DNA, 25 bp, Homo sapien
gcagtggtgagccagtctctttatc

SEQ ID NO: 2591045 - DNA, 25 bp, Homo sapien
ggagaggcccagtaccaagatgatc

SEQ ID NO: 2591046 - DNA, 25 bp, Homo sapien
atgatcatccacaataacctgcaca

SEQ ID NO: 2591047 - DNA, 25 bp, Homo sapien
agaagccgcatggagatctggcacg

SEQ ID NO: 2591048 - DNA, 25 bp, Homo sapien
agaacgggagtcagcattgcgctca

SEQ ID NO: 2591049 - DNA, 25 bp, Homo sapien
tcagaacgggcaatgggaacaacca

SEQ ID NO: 2591050 - DNA, 25 bp, Homo sapien
gtcagcattgcgctcatggctctcc

SEQ ID NO: 2591051 - DNA, 25 bp, Homo sapien
taacctggctaagtgtctttgaaaa

SEQ ID NO: 2591052 - DNA, 25 bp, Homo sapien
tggagggaccatgccttaaaagagt

SEQ ID NO: 2591053 - DNA, 25 bp, Homo sapien
tccattggcccgtatatgaacaggc

SEQ ID NO: 2591054 - DNA, 25 bp, Homo sapien
caataattcgctgcttcgggaaggg

SEQ ID NO: 2591055 - DNA, 25 bp, Homo sapien
agtagaagcgaacggagacagctat

SEQ ID NO: 2591056 - DNA, 25 bp, Homo sapien
gaagcgaacggagacagctatgaag

SEQ ID NO: 2591057 - DNA, 25 bp, Homo sapien
aactgtaaagtagaagcgaacggag

SEQ ID NO: 2591058 - DNA, 25 bp, Homo sapien
taaagtagaagcgaacggagacagc

SEQ ID NO: 2591059 - DNA, 25 bp, Homo sapien
tttgggccctgatgaaaatgataaa

SEQ ID NO: 2591060 - DNA, 25 bp, Homo sapien
gaagaaacctccaggaattagcagg

SEQ ID NO: 2591061 - DNA, 25 bp, Homo sapien
tagagatggcatatgtttgggccct

SEQ ID NO: 2591062 - DNA, 25 bp, Homo sapien
tgataaaattgtggcctggttgcag

SEQ ID NO: 2591063 - DNA, 25 bp, Homo sapien
aacagggatgggagaatacctctgg

SEQ ID NO: 2591064 - DNA, 25 bp, Homo sapien
catagtgcttatcatataccaggta

SEQ ID NO: 2591065 - DNA, 25 bp, Homo sapien
tactggattctcataactccctggg

SEQ ID NO: 2591066 - DNA, 25 bp, Homo sapien
caagtgaggctcatacacggtgtga

SEQ ID NO: 2591067 - DNA, 25 bp, Homo sapien
cccaggcagagaggactggaccagg

SEQ ID NO: 2591068 - DNA, 25 bp, Homo sapien
aggactggaccaggcgtggacctct

SEQ ID NO: 2591069 - DNA, 25 bp, Homo sapien
actggaccaggcgtggacctctgac

SEQ ID NO: 2591070 - DNA, 25 bp, Homo sapien
gagaggactggaccaggcgtggacc

SEQ ID NO: 2591071 - DNA, 25 bp, Homo sapien
cctccttcaattgtagatgctgcag

SEQ ID NO: 2591072 - DNA, 25 bp, Homo sapien
aaatgaccatgtatctcgagaagag

SEQ ID NO: 2591073 - DNA, 25 bp, Homo sapien
cagtctcaggattgtcagccatcca

SEQ ID NO: 2591074 - DNA, 25 bp, Homo sapien
gatcttgtcagtctcaggattgtca

SEQ ID NO: 2591075 - DNA, 25 bp, Homo sapien
aattcatggtgaaatgaccatgtat

SEQ ID NO: 2591076 - DNA, 25 bp, Homo sapien
tttagagacaatggcaaacatgttt

SEQ ID NO: 2591077 - DNA, 25 bp, Homo sapien
actggctgttccatgggagagtatt

SEQ ID NO: 2591078 - DNA, 25 bp, Homo sapien
ccatgggagagtattttagagacaa

SEQ ID NO: 2591079 - DNA, 25 bp, Homo sapien
gagtattttagagacaatggcaaac

SEQ ID NO: 2591080 - DNA, 25 bp, Homo sapien
gcctcaggagtagggctggtgagag

SEQ ID NO: 2591081 - DNA, 25 bp, Homo sapien
gcagcctcaggagtagggctggtga

SEQ ID NO: 2591082 - DNA, 25 bp, Homo sapien
gcaggcagcctcaggagtagggctg

SEQ ID NO: 2591083 - DNA, 25 bp, Homo sapien
tcaggagtagggctggtgagaggcg

SEQ ID NO: 2591084 - DNA, 25 bp, Homo sapien
ctgcctgtggatccgctgctgacac

SEQ ID NO: 2591085 - DNA, 25 bp, Homo sapien
ggcatagaacttcttccgggcaagc

SEQ ID NO: 2591086 - DNA, 25 bp, Homo sapien
cttcttccgggcaagctgcctgtgg

SEQ ID NO: 2591087 - DNA, 25 bp, Homo sapien
gtgttgctcttccactccgccttca

SEQ ID NO: 2591088 - DNA, 25 bp, Homo sapien
tccagccaggacacaatcttcttac

SEQ ID NO: 2591089 - DNA, 25 bp, Homo sapien
cctgctctttcactacggtgttctg

SEQ ID NO: 2591090 - DNA, 25 bp, Homo sapien
tgctctttcactacggtgttctgtt

SEQ ID NO: 2591091 - DNA, 25 bp, Homo sapien
atctcccaagattccttggcctttt

SEQ ID NO: 2591092 - DNA, 25 bp, Homo sapien
ccctgctctttcactacggtgttct

SEQ ID NO: 2591093 - DNA, 25 bp, Homo sapien
cccctcactaacctcaaagcggagc

SEQ ID NO: 2591094 - DNA, 25 bp, Homo sapien
ccctcactaacctcaaagcggagcg

SEQ ID NO: 2591095 - DNA, 25 bp, Homo sapien
ctcactaacctcaaagcggagcgcc

SEQ ID NO: 2591096 - DNA, 25 bp, Homo sapien
cctcactaacctcaaagcggagcgc

SEQ ID NO: 2591097 - DNA, 25 bp, Homo sapien
accatagcgccctcatcgggcttga

SEQ ID NO: 2591098 - DNA, 25 bp, Homo sapien
gagtccctattctgcggatgattcc

SEQ ID NO: 2591099 - DNA, 25 bp, Homo sapien
atcgggcttgacatagccttcaccg

SEQ ID NO: 2591100 - DNA, 25 bp, Homo sapien
tcaaacacaagcgtggcgttatggg

SEQ ID NO: 2591101 - DNA, 25 bp, Homo sapien
atattctggtttgcaggtgatgtgg

SEQ ID NO: 2591102 - DNA, 25 bp, Homo sapien
ggcatattctggtttgcaggtgatg

SEQ ID NO: 2591103 - DNA, 25 bp, Homo sapien
tctggtttgcaggtgatgtggccca

SEQ ID NO: 2591104 - DNA, 25 bp, Homo sapien
ctaggcatattctggtttgcaggtg

SEQ ID NO: 2591105 - DNA, 25 bp, Homo sapien
gtcttgatgactttcagcactcctt

SEQ ID NO: 2591106 - DNA, 25 bp, Homo sapien
ggctgcgccgcactctcggtcgcct

SEQ ID NO: 2591107 - DNA, 25 bp, Homo sapien
gctgcgccgcactctcggtcgcctt

SEQ ID NO: 2591108 - DNA, 25 bp, Homo sapien
cggctgcgccgcactctcggtcgcc

SEQ ID NO: 2591109 - DNA, 25 bp, Homo sapien
tctgcgtggcgcgaaatttttccgg

SEQ ID NO: 2591110 - DNA, 25 bp, Homo sapien
cgcgaaatttttccgggagatggcg

SEQ ID NO: 2591111 - DNA, 25 bp, Homo sapien
tggcgcgaaatttttccgggagatg

SEQ ID NO: 2591112 - DNA, 25 bp, Homo sapien
aatttttccgggagatggcgcaggc

SEQ ID NO: 2591113 - DNA, 25 bp, Homo sapien
tcatcccgatactcagtaacctcat

SEQ ID NO: 2591114 - DNA, 25 bp, Homo sapien
catcccgatactcagtaacctcatt

SEQ ID NO: 2591115 - DNA, 25 bp, Homo sapien
cttgctatcagtaattgtattcact

SEQ ID NO: 2591116 - DNA, 25 bp, Homo sapien
gaagtatgttggcactttgaccttg

SEQ ID NO: 2591117 - DNA, 25 bp, Homo sapien
ggaacacattaacgttggtttcaga

SEQ ID NO: 2591118 - DNA, 25 bp, Homo sapien
tgtattcactgaagtattgaggaac

SEQ ID NO: 2591119 - DNA, 25 bp, Homo sapien
ccggtcagggtgccttgaagcagat

SEQ ID NO: 2591120 - DNA, 25 bp, Homo sapien
tgttggaagggaagaccgtgcagcg

SEQ ID NO: 2591121 - DNA, 25 bp, Homo sapien
tgaagcagattctgtcctcaggagc

SEQ ID NO: 2591122 - DNA, 25 bp, Homo sapien
cttgcagcgccctcggtgttggaag

SEQ ID NO: 2591123 - DNA, 25 bp, Homo sapien
tccatcctgcctgtgaggagtcgtc

SEQ ID NO: 2591124 - DNA, 25 bp, Homo sapien
gtccacagaggtccacactttattt

SEQ ID NO: 2591125 - DNA, 25 bp, Homo sapien
ccacagaggtccacactttattttc

SEQ ID NO: 2591126 - DNA, 25 bp, Homo sapien
tgtgaggagtcgtctttactttggg

SEQ ID NO: 2591127 - DNA, 25 bp, Homo sapien
ccaatgaccggtaatcttctacttc

SEQ ID NO: 2591128 - DNA, 25 bp, Homo sapien
taccaatgaccggtaatcttctact

SEQ ID NO: 2591129 - DNA, 25 bp, Homo sapien
caatgaccggtaatcttctacttca

SEQ ID NO: 2591130 - DNA, 25 bp, Homo sapien
aatgaccggtaatcttctacttcaa

SEQ ID NO: 2591131 - DNA, 25 bp, Homo sapien
ttccttcacgtggaagtgcaggtgt

SEQ ID NO: 2591132 - DNA, 25 bp, Homo sapien
ggttccttgactcctgggtcatggg

SEQ ID NO: 2591133 - DNA, 25 bp, Homo sapien
gactggacagcaaagagcatggttc

SEQ ID NO: 2591134 - DNA, 25 bp, Homo sapien
tcctagtgatacaccaggcaccaga

SEQ ID NO: 2591135 - DNA, 25 bp, Homo sapien
aacgccatggatgcagggtgccaag

SEQ ID NO: 2591136 - DNA, 25 bp, Homo sapien
agcctcaacgccatggatgcagggt

SEQ ID NO: 2591137 - DNA, 25 bp, Homo sapien
acagcggcaccacgaggccaagaac

SEQ ID NO: 2591138 - DNA, 25 bp, Homo sapien
acgaggccaagaaccggcactcagc

SEQ ID NO: 2591139 - DNA, 25 bp, Homo sapien
gggaagccacgttggcccacagaca

SEQ ID NO: 2591140 - DNA, 25 bp, Homo sapien
ggaagccacgttggcccacagacac

SEQ ID NO: 2591141 - DNA, 25 bp, Homo sapien
gaagccacgttggcccacagacact

SEQ ID NO: 2591142 - DNA, 25 bp, Homo sapien
tgcagccgccaccagcacatggagc

SEQ ID NO: 2591143 - DNA, 25 bp, Homo sapien
gccgccaccagcacatggagcaggg

SEQ ID NO: 2591144 - DNA, 25 bp, Homo sapien
cagccgccaccagcacatggagcag

SEQ ID NO: 2591145 - DNA, 25 bp, Homo sapien
ctgcagccgccaccagcacatggag

SEQ ID NO: 2591146 - DNA, 25 bp, Homo sapien
cagcccggcctcagcaagtcaggta

SEQ ID NO: 2591147 - DNA, 25 bp, Homo sapien
attgggaatccgtgaccaggcgagc

SEQ ID NO: 2591148 - DNA, 25 bp, Homo sapien
gaatccgtgaccaggcgagcgcctc

SEQ ID NO: 2591149 - DNA, 25 bp, Homo sapien
gcccggcctcagcaagtcaggtagt

SEQ ID NO: 2591150 - DNA, 25 bp, Homo sapien
actctggccagatgggcggtgcact

SEQ ID NO: 2591151 - DNA, 25 bp, Homo sapien
ccacgggtgacgtagtgacgaagta

SEQ ID NO: 2591152 - DNA, 25 bp, Homo sapien
caggaggcatgcacactctggccag

SEQ ID NO: 2591153 - DNA, 25 bp, Homo sapien
ggcatgggttttggcccgcggtgca

SEQ ID NO: 2591154 - DNA, 25 bp, Homo sapien
aggacggagtcttggctgcagactc

SEQ ID NO: 2591155 - DNA, 25 bp, Homo sapien
cccaccgactcttggtactggccat

SEQ ID NO: 2591156 - DNA, 25 bp, Homo sapien
cggagtcttggctgcagactcagcc

SEQ ID NO: 2591157 - DNA, 25 bp, Homo sapien
catcttgcaggacggagtcttggct

SEQ ID NO: 2591158 - DNA, 25 bp, Homo sapien
gtccgtttgcaaatactacagaaag

SEQ ID NO: 2591159 - DNA, 25 bp, Homo sapien
tgaaatgtccgtttgcaaatactac

SEQ ID NO: 2591160 - DNA, 25 bp, Homo sapien
ataggcctgaaagcgtatgaaatgt

SEQ ID NO: 2591161 - DNA, 25 bp, Homo sapien
aagcgtatgaaatgtccgtttgcaa

SEQ ID NO: 2591162 - DNA, 25 bp, Homo sapien
acctgtgtgggtggtgagggggcac

SEQ ID NO: 2591163 - DNA, 25 bp, Homo sapien
ctacctgtgtgggtggtgagggggc

SEQ ID NO: 2591164 - DNA, 25 bp, Homo sapien
tacctgtgtgggtggtgagggggca

SEQ ID NO: 2591165 - DNA, 25 bp, Homo sapien
ccgggagtcgagagacgccagtccc

SEQ ID NO: 2591166 - DNA, 25 bp, Homo sapien
tcagatccgggttcagggcagggtt

SEQ ID NO: 2591167 - DNA, 25 bp, Homo sapien
atccgtgtgacccaagagacacact

SEQ ID NO: 2591168 - DNA, 25 bp, Homo sapien
ggctcggccctggtatagccagcga

SEQ ID NO: 2591169 - DNA, 25 bp, Homo sapien
aggcatagccagaccggccctgccc

SEQ ID NO: 2591170 - DNA, 25 bp, Homo sapien
gtagtcttgccaccctcccggtaca

SEQ ID NO: 2591171 - DNA, 25 bp, Homo sapien
caccccggggacgtctgtgggagag

SEQ ID NO: 2591172 - DNA, 25 bp, Homo sapien
gagtgggtgaattcacagggctgcc

SEQ ID NO: 2591173 - DNA, 25 bp, Homo sapien
ttaggctgtggcctgggatgttcac

SEQ ID NO: 2591174 - DNA, 25 bp, Homo sapien
gatgctactgccaggttgttctgag

SEQ ID NO: 2591175 - DNA, 25 bp, Homo sapien
gctgggccacacgaagctgcgtata

SEQ ID NO: 2591176 - DNA, 25 bp, Homo sapien
cacgaagctgcgtataggatgctac

SEQ ID NO: 2591177 - DNA, 25 bp, Homo sapien
atggcccctcctcacccctgcccac

SEQ ID NO: 2591178 - DNA, 25 bp, Homo sapien
ccccgctgggtggaagcaaatggcc

SEQ ID NO: 2591179 - DNA, 25 bp, Homo sapien
agccccgctgggtggaagcaaatgg

SEQ ID NO: 2591180 - DNA, 25 bp, Homo sapien
gcaaatggcccctcctcacccctgc

SEQ ID NO: 2591181 - DNA, 25 bp, Homo sapien
gactggtcagacaagttctcgtggc

SEQ ID NO: 2591182 - DNA, 25 bp, Homo sapien
cagacaagttctcgtggctggcctg

SEQ ID NO: 2591183 - DNA, 25 bp, Homo sapien
tggtcagacaagttctcgtggctgg

SEQ ID NO: 2591184 - DNA, 25 bp, Homo sapien
gtcagacaagttctcgtggctggcc

SEQ ID NO: 2591185 - DNA, 25 bp, Homo sapien
gattccgtttcaggagctcgggctg

SEQ ID NO: 2591186 - DNA, 25 bp, Homo sapien
tgtcccggcatgtcccggcactgtg

SEQ ID NO: 2591187 - DNA, 25 bp, Homo sapien
cagtggtgggcgatgtcatccccgc

SEQ ID NO: 2591188 - DNA, 25 bp, Homo sapien
tattgcctgggccttaaggtaatca

SEQ ID NO: 2591189 - DNA, 25 bp, Homo sapien
tgtaggggttgccaggctgctgcca

SEQ ID NO: 2591190 - DNA, 25 bp, Homo sapien
tgctgccaggcctgctggttctgga

SEQ ID NO: 2591191 - DNA, 25 bp, Homo sapien
caggcctgctggttctggatggggg

SEQ ID NO: 2591192 - DNA, 25 bp, Homo sapien
gctggttctggatgggggcagcccc

SEQ ID NO: 2591193 - DNA, 25 bp, Homo sapien
tgggccctgggacctcggtcggctg

SEQ ID NO: 2591194 - DNA, 25 bp, Homo sapien
cctgggacctcggtcggctgcaaga

SEQ ID NO: 2591195 - DNA, 25 bp, Homo sapien
tgcaagaggtgggttggctctgggg

SEQ ID NO: 2591196 - DNA, 25 bp, Homo sapien
gctgcaagaggtgggttggctctgg

SEQ ID NO: 2591197 - DNA, 25 bp, Homo sapien
acgaccatctcttgggggtccatgg

SEQ ID NO: 2591198 - DNA, 25 bp, Homo sapien
tatgggttcttgacgaccatctctt

SEQ ID NO: 2591199 - DNA, 25 bp, Homo sapien
tgctgatgtgggcatatgggttctt

SEQ ID NO: 2591200 - DNA, 25 bp, Homo sapien
ggtggaagccacctctaactgctgc

SEQ ID NO: 2591201 - DNA, 25 bp, Homo sapien
ttgagcgactggcagccgccttttc

SEQ ID NO: 2591202 - DNA, 25 bp, Homo sapien
ctgtggtggcaacacggcagtctgt

SEQ ID NO: 2591203 - DNA, 25 bp, Homo sapien
gagctctaggtcccagtgcctgagt

SEQ ID NO: 2591204 - DNA, 25 bp, Homo sapien
gtcctctcggtcttctgagctctag

SEQ ID NO: 2591205 - DNA, 25 bp, Homo sapien
ccaagaggccccagcaactggagca

SEQ ID NO: 2591206 - DNA, 25 bp, Homo sapien
ctttgaggggcactgccaaaccagt

SEQ ID NO: 2591207 - DNA, 25 bp, Homo sapien
tggggttcccaagatcccaagaggc

SEQ ID NO: 2591208 - DNA, 25 bp, Homo sapien
gggcactgccaaaccagtgactcag

SEQ ID NO: 2591209 - DNA, 25 bp, Homo sapien
caggaggtgagcctgaggtcacggc

SEQ ID NO: 2591210 - DNA, 25 bp, Homo sapien
atggcctgggccctaaagggcatct

SEQ ID NO: 2591211 - DNA, 25 bp, Homo sapien
ccggggcatggcctgggccctaaag

SEQ ID NO: 2591212 - DNA, 25 bp, Homo sapien
gcatctgcagcttgcctgagaggag

SEQ ID NO: 2591213 - DNA, 25 bp, Homo sapien
caatcagtgacacgggctttagaca

SEQ ID NO: 2591214 - DNA, 25 bp, Homo sapien
gggcttctaagcctctgagcctctt

SEQ ID NO: 2591215 - DNA, 25 bp, Homo sapien
ggcgaggcagggcttctaagcctct

SEQ ID NO: 2591216 - DNA, 25 bp, Homo sapien
gatttgcacgttttgtcacaggtct

SEQ ID NO: 2591217 - DNA, 25 bp, Homo sapien
ccgcggggacgacccacggcagtgg

SEQ ID NO: 2591218 - DNA, 25 bp, Homo sapien
tccatctgcaccggcgcaggcaggg

SEQ ID NO: 2591219 - DNA, 25 bp, Homo sapien
gcagcgggcactggcgagtgccgcg

SEQ ID NO: 2591220 - DNA, 25 bp, Homo sapien
gagtgccgcggggacgacccacggc

SEQ ID NO: 2591221 - DNA, 25 bp, Homo sapien
gcgcgtgccggtgcacgttctcctt

SEQ ID NO: 2591222 - DNA, 25 bp, Homo sapien
tgcaacgcctccagcttagacgggg

SEQ ID NO: 2591223 - DNA, 25 bp, Homo sapien
ggtgcaggtgaatgaggagccgcag

SEQ ID NO: 2591224 - DNA, 25 bp, Homo sapien
atgaggagccgcagcgcgtgccggt

SEQ ID NO: 2591225 - DNA, 25 bp, Homo sapien
ccaaaggccaagtcgccaaaggtct

SEQ ID NO: 2591226 - DNA, 25 bp, Homo sapien
agggcaaattcgtcggccagcagcg

SEQ ID NO: 2591227 - DNA, 25 bp, Homo sapien
tggaggaagatgtcgccaaaggcca

SEQ ID NO: 2591228 - DNA, 25 bp, Homo sapien
agcagcgcaaggttgcccgtgagca

SEQ ID NO: 2591229 - DNA, 25 bp, Homo sapien
gggtgggacctgtggcagggaagca

SEQ ID NO: 2591230 - DNA, 25 bp, Homo sapien
cacggtgttggcagacatttgccaa

SEQ ID NO: 2591231 - DNA, 25 bp, Homo sapien
ccacggtgttggcagacatttgcca

SEQ ID NO: 2591232 - DNA, 25 bp, Homo sapien
gagccagcacaacgccccaaacggg

SEQ ID NO: 2591233 - DNA, 25 bp, Homo sapien
tttgccaagagccagcacaacgccc

SEQ ID NO: 2591234 - DNA, 25 bp, Homo sapien
tggccttcctagtatcccggatggg

SEQ ID NO: 2591235 - DNA, 25 bp, Homo sapien
caggccacatggaggtgacgtgtgc

SEQ ID NO: 2591236 - DNA, 25 bp, Homo sapien
cctttatgaggacaacccagctggc

SEQ ID NO: 2591237 - DNA, 25 bp, Homo sapien
tgacgtgtgcggacaggttgaggat

SEQ ID NO: 2591238 - DNA, 25 bp, Homo sapien
cttggccggccacatggccaggtgg

SEQ ID NO: 2591239 - DNA, 25 bp, Homo sapien
gccttggccggccacatggccaggt

SEQ ID NO: 2591240 - DNA, 25 bp, Homo sapien
ccttggccggccacatggccaggtg

SEQ ID NO: 2591241 - DNA, 25 bp, Homo sapien
acacagtcccgaccaggggatccag

SEQ ID NO: 2591242 - DNA, 25 bp, Homo sapien
caggcacacagtcccgaccagggga

SEQ ID NO: 2591243 - DNA, 25 bp, Homo sapien
cacacagtcccgaccaggggatcca

SEQ ID NO: 2591244 - DNA, 25 bp, Homo sapien
gtggcaggcacacagtcccgaccag

SEQ ID NO: 2591245 - DNA, 25 bp, Homo sapien
cggcagtgaacctggctcagatgtg

SEQ ID NO: 2591246 - DNA, 25 bp, Homo sapien
gggaccgtccacacagcaggcagga

SEQ ID NO: 2591247 - DNA, 25 bp, Homo sapien
aggcgcatcccaaccctgacgggac

SEQ ID NO: 2591248 - DNA, 25 bp, Homo sapien
agtcagtcggcagaggagcggcagt

SEQ ID NO: 2591249 - DNA, 25 bp, Homo sapien
tagagatgcctacgtctgcagcctg

SEQ ID NO: 2591250 - DNA, 25 bp, Homo sapien
ggtgctgggtcctcaccgtaccatg

SEQ ID NO: 2591251 - DNA, 25 bp, Homo sapien
gcgtgctctccccaaatgtgactga

SEQ ID NO: 2591252 - DNA, 25 bp, Homo sapien
ccagacatcgtgctgagggacaggc

SEQ ID NO: 2591253 - DNA, 25 bp, Homo sapien
aaagcgttctcgctgttagcacagg

SEQ ID NO: 2591254 - DNA, 25 bp, Homo sapien
gagaaacacaataggcacgtgctgt

SEQ ID NO: 2591255 - DNA, 25 bp, Homo sapien
caacactgctgaggtcgtgagggct

SEQ ID NO: 2591256 - DNA, 25 bp, Homo sapien
aaagctggaaaacgcatgcacgcgc

SEQ ID NO: 2591257 - DNA, 25 bp, Homo sapien
ctcgcaggccatgcgctgctcctgc

SEQ ID NO: 2591258 - DNA, 25 bp, Homo sapien
gcggaggagcgcgttcttgttcctc

SEQ ID NO: 2591259 - DNA, 25 bp, Homo sapien
acctcgcaggccatgcgctgctcct

SEQ ID NO: 2591260 - DNA, 25 bp, Homo sapien
gaggagcgcgttcttgttcctctgc

SEQ ID NO: 2591261 - DNA, 25 bp, Homo sapien
tctgatccacattgaaagtgtagtc

SEQ ID NO: 2591262 - DNA, 25 bp, Homo sapien
gctttcgggaagtgtgtttggatat

SEQ ID NO: 2591263 - DNA, 25 bp, Homo sapien
aaggacatgagcatcgggaggaacc

SEQ ID NO: 2591264 - DNA, 25 bp, Homo sapien
tctcctcagccggaagtttctgatc

SEQ ID NO: 2591265 - DNA, 25 bp, Homo sapien
gaagacctggctgtcgatcatgtcc

SEQ ID NO: 2591266 - DNA, 25 bp, Homo sapien
aagacctggctgtcgatcatgtccc

SEQ ID NO: 2591267 - DNA, 25 bp, Homo sapien
ttgaagacctggctgtcgatcatgt

SEQ ID NO: 2591268 - DNA, 25 bp, Homo sapien
gacctggctgtcgatcatgtcccag

SEQ ID NO: 2591269 - DNA, 25 bp, Homo sapien
agggccccaacagctgcctccacct

SEQ ID NO: 2591270 - DNA, 25 bp, Homo sapien
tgggccactgcagtccacatccccg

SEQ ID NO: 2591271 - DNA, 25 bp, Homo sapien
tccacctggccgctgctgtccacac

SEQ ID NO: 2591272 - DNA, 25 bp, Homo sapien
tccacatccccgaccaccagagcag

SEQ ID NO: 2591273 - DNA, 25 bp, Homo sapien
tggccgcatggccccgacagctgct

SEQ ID NO: 2591274 - DNA, 25 bp, Homo sapien
ggccgcatggccccgacagctgctg

SEQ ID NO: 2591275 - DNA, 25 bp, Homo sapien
gtggccgcatggccccgacagctgc

SEQ ID NO: 2591276 - DNA, 25 bp, Homo sapien
gtcacacaggatcatggacaggtcc

SEQ ID NO: 2591277 - DNA, 25 bp, Homo sapien
tgtgctcagtgccagcgtgttgatg

SEQ ID NO: 2591278 - DNA, 25 bp, Homo sapien
gcagtgtctcctggccgaccagctc

SEQ ID NO: 2591279 - DNA, 25 bp, Homo sapien
tgactgtgctcagtgccagcgtgtt

SEQ ID NO: 2591280 - DNA, 25 bp, Homo sapien
tcggatgcaggcgtccaggcaccag

SEQ ID NO: 2591281 - DNA, 25 bp, Homo sapien
gtccacgaaccgctctcggatgcag

SEQ ID NO: 2591282 - DNA, 25 bp, Homo sapien
ttgacgccatcgagaaacccctgca

SEQ ID NO: 2591283 - DNA, 25 bp, Homo sapien
ctggcccttcttgacgccatcgaga

SEQ ID NO: 2591284 - DNA, 25 bp, Homo sapien
cagatttcacccacgtccaggtcgt

SEQ ID NO: 2591285 - DNA, 25 bp, Homo sapien
cacgggtccacggtgcagatttcac

SEQ ID NO: 2591286 - DNA, 25 bp, Homo sapien
cagtagtgcacattccgcgtgcgca

SEQ ID NO: 2591287 - DNA, 25 bp, Homo sapien
gaagagcgtgcgcagaaactgcagc

SEQ ID NO: 2591288 - DNA, 25 bp, Homo sapien
gacgcccgttgccaggcggaccagg

SEQ ID NO: 2591289 - DNA, 25 bp, Homo sapien
cgcccgttgccaggcggaccagggt

SEQ ID NO: 2591290 - DNA, 25 bp, Homo sapien
cggtagcgaaaaatgtgaaggaaca

SEQ ID NO: 2591291 - DNA, 25 bp, Homo sapien
gaccagggtctagcggtagcgaaaa

SEQ ID NO: 2591292 - DNA, 25 bp, Homo sapien
gacagagagctctgtactgaagaga

SEQ ID NO: 2591293 - DNA, 25 bp, Homo sapien
gcaggctcgatacagctccttgtca

SEQ ID NO: 2591294 - DNA, 25 bp, Homo sapien
gaaggactgaaaaagttgtgcagga

SEQ ID NO: 2591295 - DNA, 25 bp, Homo sapien
tccaggatgtactgcttcaggagtg

SEQ ID NO: 2591296 - DNA, 25 bp, Homo sapien
agtgctaaggttcggtctccacgcg

SEQ ID NO: 2591297 - DNA, 25 bp, Homo sapien
ggaacttccactaaccaagggcatg

SEQ ID NO: 2591298 - DNA, 25 bp, Homo sapien
cacgcggctcatgtgggagaagtca

SEQ ID NO: 2591299 - DNA, 25 bp, Homo sapien
tccacgccatcagggttagggttag

SEQ ID NO: 2591300 - DNA, 25 bp, Homo sapien
accacgggctgcagggacggcatct

SEQ ID NO: 2591301 - DNA, 25 bp, Homo sapien
acaactcacaggattgatggtgcag

SEQ ID NO: 2591302 - DNA, 25 bp, Homo sapien
tggtgcagcgatgcgccaaatcgca

SEQ ID NO: 2591303 - DNA, 25 bp, Homo sapien
cacaggattgatggtgcagcgatgc

SEQ ID NO: 2591304 - DNA, 25 bp, Homo sapien
gattgatggtgcagcgatgcgccaa

SEQ ID NO: 2591305 - DNA, 25 bp, Homo sapien
ttgtcccgcagctcatcgaataccg

SEQ ID NO: 2591306 - DNA, 25 bp, Homo sapien
cctccgaagcgatggctgacactcg

SEQ ID NO: 2591307 - DNA, 25 bp, Homo sapien
tcgaataccgactggtggaactcca

SEQ ID NO: 2591308 - DNA, 25 bp, Homo sapien
gagggctgactgaagagatggcagc

SEQ ID NO: 2591309 - DNA, 25 bp, Homo sapien
tcgccgttggccacgcccaggtcct

SEQ ID NO: 2591310 - DNA, 25 bp, Homo sapien
ccccgcgaacatggccgaggccccg

SEQ ID NO: 2591311 - DNA, 25 bp, Homo sapien
tcgatggccttgagcggctccgtgc

SEQ ID NO: 2591312 - DNA, 25 bp, Homo sapien
ggcgccgccgcagacaccccagaag

SEQ ID NO: 2591313 - DNA, 25 bp, Homo sapien
cgccgcgcgactccgcgcgcgtccc

SEQ ID NO: 2591314 - DNA, 25 bp, Homo sapien
ccgcaccgcccaggtccgcccgcca

SEQ ID NO: 2591315 - DNA, 25 bp, Homo sapien
gcgactccgcgcgcgtcccgcagcc

SEQ ID NO: 2591316 - DNA, 25 bp, Homo sapien
cgcgcgactccgcgcgcgtcccgca

SEQ ID NO: 2591317 - DNA, 25 bp, Homo sapien
tacaggcatcagttactgcgcctgg

SEQ ID NO: 2591318 - DNA, 25 bp, Homo sapien
caggcatcagttactgcgcctggcc

SEQ ID NO: 2591319 - DNA, 25 bp, Homo sapien
attacaggcatcagttactgcgcct

SEQ ID NO: 2591320 - DNA, 25 bp, Homo sapien
ggcatcagttactgcgcctggcctc

SEQ ID NO: 2591321 - DNA, 25 bp, Homo sapien
gcagctgcttatgcagactccaggg

SEQ ID NO: 2591322 - DNA, 25 bp, Homo sapien
ggacgctggatccaccaatatctca

SEQ ID NO: 2591323 - DNA, 25 bp, Homo sapien
gccctgcagagaaaggtctgacaga

SEQ ID NO: 2591324 - DNA, 25 bp, Homo sapien
cacatgtttgaacatagaggaccag

SEQ ID NO: 2591325 - DNA, 25 bp, Homo sapien
gcttgtatcaaaaggtccagaccta

SEQ ID NO: 2591326 - DNA, 25 bp, Homo sapien
tgtcagtcaacaacacccgctgagc

SEQ ID NO: 2591327 - DNA, 25 bp, Homo sapien
ctgccggcaagcgtgggccattcat

SEQ ID NO: 2591328 - DNA, 25 bp, Homo sapien
gaggccaaattctgcgcttaaggag

SEQ ID NO: 2591329 - DNA, 25 bp, Homo sapien
tgcaaccctccgaggttggatttcc

SEQ ID NO: 2591330 - DNA, 25 bp, Homo sapien
gtgggaagagccttgcaccggagct

SEQ ID NO: 2591331 - DNA, 25 bp, Homo sapien
tccgaggttggatttccagtccctg

SEQ ID NO: 2591332 - DNA, 25 bp, Homo sapien
cggagctgccgggtctgcaaccctc

SEQ ID NO: 2591333 - DNA, 25 bp, Homo sapien
tttgagccatgtgaacgaaaagcct

SEQ ID NO: 2591334 - DNA, 25 bp, Homo sapien
taaccttgggagttgaaagagctgg

SEQ ID NO: 2591335 - DNA, 25 bp, Homo sapien
tccatggctccgttttaagcgggca

SEQ ID NO: 2591336 - DNA, 25 bp, Homo sapien
cacttctgcgggtgctgcgttacac

SEQ ID NO: 2591337 - DNA, 25 bp, Homo sapien
ggcacagccacttccgtgagaggag

SEQ ID NO: 2591338 - DNA, 25 bp, Homo sapien
agcacgcgagcgtctgaacagagtt

SEQ ID NO: 2591339 - DNA, 25 bp, Homo sapien
tccatttaaacacatagcgggtgtg

SEQ ID NO: 2591340 - DNA, 25 bp, Homo sapien
tccatggctaaggtagcggcacctg

SEQ ID NO: 2591341 - DNA, 25 bp, Homo sapien
gaggtcccaaacagaattatcgaaa

SEQ ID NO: 2591342 - DNA, 25 bp, Homo sapien
ctgagaacagttgaccgcaagctga

SEQ ID NO: 2591343 - DNA, 25 bp, Homo sapien
agcaagcatctggaacaatggtgta

SEQ ID NO: 2591344 - DNA, 25 bp, Homo sapien
ccgcaagctgaaactggtgtgtgga

SEQ ID NO: 2591345 - DNA, 25 bp, Homo sapien
aatggtgtatgggttgtttatgtta

SEQ ID NO: 2591346 - DNA, 25 bp, Homo sapien
aggagataaacttcgactcttctgc

SEQ ID NO: 2591347 - DNA, 25 bp, Homo sapien
atagattagtttgctttctggaata

SEQ ID NO: 2591348 - DNA, 25 bp, Homo sapien
ggtgtgtggaagtcacagcttcatc

SEQ ID NO: 2591349 - DNA, 25 bp, Homo sapien
aaaactcccaagatcagtcaacttt

SEQ ID NO: 2591350 - DNA, 25 bp, Homo sapien
ctcttctgccttcaactgagaacag

SEQ ID NO: 2591351 - DNA, 25 bp, Homo sapien
aatgcaacaaacaacttccgcttaa

SEQ ID NO: 2591352 - DNA, 25 bp, Homo sapien
gcagaagagtcgaagtttatctcct

SEQ ID NO: 2591353 - DNA, 25 bp, Homo sapien
tttcgataattctgtttgggacctc

SEQ ID NO: 2591354 - DNA, 25 bp, Homo sapien
ctgttctcagttgaaggcagaagag

SEQ ID NO: 2591355 - DNA, 25 bp, Homo sapien
gatgaagctgtgacttccacacacc

SEQ ID NO: 2591356 - DNA, 25 bp, Homo sapien
taacataaacaacccatacaccatt

SEQ ID NO: 2591357 - DNA, 25 bp, Homo sapien
tccacacaccagtttcagcttgcgg

SEQ ID NO: 2591358 - DNA, 25 bp, Homo sapien
ttaagcggaagttgtttgttgcatt

SEQ ID NO: 2591359 - DNA, 25 bp, Homo sapien
aaagttgactgatcttgggagtttt

SEQ ID NO: 2591360 - DNA, 25 bp, Homo sapien
tcagcttgcggtcaactgttctcag

SEQ ID NO: 2591361 - DNA, 25 bp, Homo sapien
tattccagaaagcaaactaatctat

SEQ ID NO: 2591362 - DNA, 25 bp, Homo sapien
tacaccattgttccagatgcttgct

SEQ ID NO: 2591363 - DNA, 25 bp, Homo sapien
tctacttactcgttgcggctcaggg

SEQ ID NO: 2591364 - DNA, 25 bp, Homo sapien
tgctcccgtccgaagtgtgacctgt

SEQ ID NO: 2591365 - DNA, 25 bp, Homo sapien
tgacctgtggttggtcgcgtccacg

SEQ ID NO: 2591366 - DNA, 25 bp, Homo sapien
tgcagaagccacgagtcgctaaggg

SEQ ID NO: 2591367 - DNA, 25 bp, Homo sapien
cgccccgctcccgagctagcaaagc

SEQ ID NO: 2591368 - DNA, 25 bp, Homo sapien
cccgctcccgagctagcaaagccca

SEQ ID NO: 2591369 - DNA, 25 bp, Homo sapien
gctcccgagctagcaaagcccacat

SEQ ID NO: 2591370 - DNA, 25 bp, Homo sapien
cgctcccgagctagcaaagcccaca

SEQ ID NO: 2591371 - DNA, 25 bp, Homo sapien
ccaaggcacacctgcagatctggga

SEQ ID NO: 2591372 - DNA, 25 bp, Homo sapien
ctgacggtgtaggctgggccaccca

SEQ ID NO: 2591373 - DNA, 25 bp, Homo sapien
gggctgacggtgtaggctgggccac

SEQ ID NO: 2591374 - DNA, 25 bp, Homo sapien
ggaggccggggctgacggtgtaggc

SEQ ID NO: 2591375 - DNA, 25 bp, Homo sapien
agggctgcccgggcaggcttccttt

SEQ ID NO: 2591376 - DNA, 25 bp, Homo sapien
acagggctgcccgggcaggcttcct

SEQ ID NO: 2591377 - DNA, 25 bp, Homo sapien
gctgcccgggcaggcttccttttgt

SEQ ID NO: 2591378 - DNA, 25 bp, Homo sapien
ctgcccacagggctgcccgggcagg

SEQ ID NO: 2591379 - DNA, 25 bp, Homo sapien
ccaacggctgggcattcccgggctg

SEQ ID NO: 2591380 - DNA, 25 bp, Homo sapien
actctcctttccaacggctgggcat

SEQ ID NO: 2591381 - DNA, 25 bp, Homo sapien
ctttccaacggctgggcattcccgg

SEQ ID NO: 2591382 - DNA, 25 bp, Homo sapien
tctcctttccaacggctgggcattc

SEQ ID NO: 2591383 - DNA, 25 bp, Homo sapien
ggataggaaatgcgtaaccgacgga

SEQ ID NO: 2591384 - DNA, 25 bp, Homo sapien
caggataggaaatgcgtaaccgacg

SEQ ID NO: 2591385 - DNA, 25 bp, Homo sapien
aggataggaaatgcgtaaccgacgg

SEQ ID NO: 2591386 - DNA, 25 bp, Homo sapien
gataggaaatgcgtaaccgacggaa

SEQ ID NO: 2591387 - DNA, 25 bp, Homo sapien
tataaatttttcacgctgggctaca

SEQ ID NO: 2591388 - DNA, 25 bp, Homo sapien
ggtcaatatcgtacactcaggaatg

SEQ ID NO: 2591389 - DNA, 25 bp, Homo sapien
tgtgctgcacaaactttatccagtt

SEQ ID NO: 2591390 - DNA, 25 bp, Homo sapien
tatccagttagcagtgatcaccccg

SEQ ID NO: 2591391 - DNA, 25 bp, Homo sapien
tcaatgtctgcttgtttcactgaca

SEQ ID NO: 2591392 - DNA, 25 bp, Homo sapien
ttataaaaagcgacggagggctgcc

SEQ ID NO: 2591393 - DNA, 25 bp, Homo sapien
atacgaccagccacgcacaaagggc

SEQ ID NO: 2591394 - DNA, 25 bp, Homo sapien
tccttgtggagtaatctgtgcctcc

SEQ ID NO: 2591395 - DNA, 25 bp, Homo sapien
ctgtgtcctcaagtgctccccattt

SEQ ID NO: 2591396 - DNA, 25 bp, Homo sapien
ggaagggcgcctttcaggacagaaa

SEQ ID NO: 2591397 - DNA, 25 bp, Homo sapien
gccattagcacaagagattcacagt

SEQ ID NO: 2591398 - DNA, 25 bp, Homo sapien
gacagaaagtgacgcaggagaacct

SEQ ID NO: 2591399 - DNA, 25 bp, Homo sapien
ccacggcaggatttcgggttcgaat

SEQ ID NO: 2591400 - DNA, 25 bp, Homo sapien
gcggcggcggagcgctccgagtccg

SEQ ID NO: 2591401 - DNA, 25 bp, Homo sapien
gagcgctccgagtccgccttcggat

SEQ ID NO: 2591402 - DNA, 25 bp, Homo sapien
cggcggagcgctccgagtccgcctt

SEQ ID NO: 2591403 - DNA, 25 bp, Homo sapien
tcctcggctgcagccggcatcggcg

SEQ ID NO: 2591404 - DNA, 25 bp, Homo sapien
cactgcagttcttgggcaggcggta

SEQ ID NO: 2591405 - DNA, 25 bp, Homo sapien
tgtgtcactgcagttcttgggcagg

SEQ ID NO: 2591406 - DNA, 25 bp, Homo sapien
tgcagttcttgggcaggcggtagac

SEQ ID NO: 2591407 - DNA, 25 bp, Homo sapien
tgtcactgcagttcttgggcaggcg

SEQ ID NO: 2591408 - DNA, 25 bp, Homo sapien
cggccgagtagacgagctgctggtc

SEQ ID NO: 2591409 - DNA, 25 bp, Homo sapien
gccggccgagtagacgagctgctgg

SEQ ID NO: 2591410 - DNA, 25 bp, Homo sapien
ccgagtagacgagctgctggtcccg

SEQ ID NO: 2591411 - DNA, 25 bp, Homo sapien
gccgagtagacgagctgctggtccc

SEQ ID NO: 2591412 - DNA, 25 bp, Homo sapien
cagtcaccacaaacatgcggagcat

SEQ ID NO: 2591413 - DNA, 25 bp, Homo sapien
agcatggcctggatgtacgtccaga

SEQ ID NO: 2591414 - DNA, 25 bp, Homo sapien
tgcaggtcaatctcggccagtgcag

SEQ ID NO: 2591415 - DNA, 25 bp, Homo sapien
caaacatgcggagcatgttgtagat

SEQ ID NO: 2591416 - DNA, 25 bp, Homo sapien
tggccccccgtggggcctgcacgcg

SEQ ID NO: 2591417 - DNA, 25 bp, Homo sapien
ggccccccgtggggcctgcacgcgc

SEQ ID NO: 2591418 - DNA, 25 bp, Homo sapien
gccccccgtggggcctgcacgcgca

SEQ ID NO: 2591419 - DNA, 25 bp, Homo sapien
ccccccgtggggcctgcacgcgcac

SEQ ID NO: 2591420 - DNA, 25 bp, Homo sapien
gaggccatgccggagtcgctctcgt

SEQ ID NO: 2591421 - DNA, 25 bp, Homo sapien
tgagcaccatgttgtcccggtcctg

SEQ ID NO: 2591422 - DNA, 25 bp, Homo sapien
tcttcaccgccttgctcagttcctc

SEQ ID NO: 2591423 - DNA, 25 bp, Homo sapien
ctctcgtcgtcactgtcaatgagca

SEQ ID NO: 2591424 - DNA, 25 bp, Homo sapien
cagagtcaccgggacgctgggcagc

SEQ ID NO: 2591425 - DNA, 25 bp, Homo sapien
aaagggaagggtgccgcctgctggc

SEQ ID NO: 2591426 - DNA, 25 bp, Homo sapien
ctgcgtgcagagtcaccgggacgct

SEQ ID NO: 2591427 - DNA, 25 bp, Homo sapien
tgcctcccgtcagccgagaggtcgg

SEQ ID NO: 2591428 - DNA, 25 bp, Homo sapien
ggcccagggtgtgcttccaactgag

SEQ ID NO: 2591429 - DNA, 25 bp, Homo sapien
tgtgcttccaactgagggtccgcat

SEQ ID NO: 2591430 - DNA, 25 bp, Homo sapien
tgaaaatacagcaagatcaccgcct

SEQ ID NO: 2591431 - DNA, 25 bp, Homo sapien
accgccacagacagcgtgcggtcgg

SEQ ID NO: 2591432 - DNA, 25 bp, Homo sapien
agggccagggtcagcacgggcagct

SEQ ID NO: 2591433 - DNA, 25 bp, Homo sapien
agcacgggcagctcggctgcagggc

SEQ ID NO: 2591434 - DNA, 25 bp, Homo sapien
ggagggccagggtcagcacgggcag

SEQ ID NO: 2591435 - DNA, 25 bp, Homo sapien
tcagcacgggcagctcggctgcagg

SEQ ID NO: 2591436 - DNA, 25 bp, Homo sapien
tctgccacctggtaccagtgagaaa

SEQ ID NO: 2591437 - DNA, 25 bp, Homo sapien
ctgccacctggtaccagtgagaaag

SEQ ID NO: 2591438 - DNA, 25 bp, Homo sapien
gccacctggtaccagtgagaaaggg

SEQ ID NO: 2591439 - DNA, 25 bp, Homo sapien
tgccacctggtaccagtgagaaagg

SEQ ID NO: 2591440 - DNA, 25 bp, Homo sapien
cataaggtgtgtcccgaaaaggcta

SEQ ID NO: 2591441 - DNA, 25 bp, Homo sapien
aggtgtgtcccgaaaaggctacagg

SEQ ID NO: 2591442 - DNA, 25 bp, Homo sapien
tcataaggtgtgtcccgaaaaggct

SEQ ID NO: 2591443 - DNA, 25 bp, Homo sapien
gcatcataaggtgtgtcccgaaaag

SEQ ID NO: 2591444 - DNA, 25 bp, Homo sapien
ccaaagaggattcgcaggcctggaa

SEQ ID NO: 2591445 - DNA, 25 bp, Homo sapien
gaattgtgcccctcgaaaaatgaca

SEQ ID NO: 2591446 - DNA, 25 bp, Homo sapien
gaaatgaccgtgctactgggaaccg

SEQ ID NO: 2591447 - DNA, 25 bp, Homo sapien
tgagaattttacacccgcagaagtg

SEQ ID NO: 2591448 - DNA, 25 bp, Homo sapien
tcctcctcccggatgttggcattga

SEQ ID NO: 2591449 - DNA, 25 bp, Homo sapien
ttctcgtccttgaagggcggccaga

SEQ ID NO: 2591450 - DNA, 25 bp, Homo sapien
aactcactggacaggatgacagcgt

SEQ ID NO: 2591451 - DNA, 25 bp, Homo sapien
atgacagcgtagaccccgaacggtg

SEQ ID NO: 2591452 - DNA, 25 bp, Homo sapien
cttcagcatgacttcacagaagtgc

SEQ ID NO: 2591453 - DNA, 25 bp, Homo sapien
tcacagaagtgcattggggcctcgc

SEQ ID NO: 2591454 - DNA, 25 bp, Homo sapien
tcagcatgacttcacagaagtgcat

SEQ ID NO: 2591455 - DNA, 25 bp, Homo sapien
cacagaagtgcattggggcctcgcc

SEQ ID NO: 2591456 - DNA, 25 bp, Homo sapien
tctgggcagggggtcgtgatgagcc

SEQ ID NO: 2591457 - DNA, 25 bp, Homo sapien
ctggaaagacgagtgtctgggcagg

SEQ ID NO: 2591458 - DNA, 25 bp, Homo sapien
ggcagggggtcgtgatgagccccag

SEQ ID NO: 2591459 - DNA, 25 bp, Homo sapien
gggcagggggtcgtgatgagcccca

SEQ ID NO: 2591460 - DNA, 25 bp, Homo sapien
ctgatgatgtccgatgaacgccgct

SEQ ID NO: 2591461 - DNA, 25 bp, Homo sapien
gaagaggtccttgctgccgtagatg

SEQ ID NO: 2591462 - DNA, 25 bp, Homo sapien
cagcagcgagcggtactcattgatg

SEQ ID NO: 2591463 - DNA, 25 bp, Homo sapien
gctgccgtagatgctgaccagcagg

SEQ ID NO: 2591464 - DNA, 25 bp, Homo sapien
cagggtccgggacccagtcctctgg

SEQ ID NO: 2591465 - DNA, 25 bp, Homo sapien
atcggcatccacagggtccgggacc

SEQ ID NO: 2591466 - DNA, 25 bp, Homo sapien
gtctccaggctcgccgggtcggtct

SEQ ID NO: 2591467 - DNA, 25 bp, Homo sapien
tcttggacagctcaacagccaggtc

SEQ ID NO: 2591468 - DNA, 25 bp, Homo sapien
gtgatgatgtcacacgtgttgacgc

SEQ ID NO: 2591469 - DNA, 25 bp, Homo sapien
tagcggcggataggctcacaggcca

SEQ ID NO: 2591470 - DNA, 25 bp, Homo sapien
cacgcgcagcgccttgatggcagag

SEQ ID NO: 2591471 - DNA, 25 bp, Homo sapien
ccatggaagggtccagcacgcgcag

SEQ ID NO: 2591472 - DNA, 25 bp, Homo sapien
acttgaggtcctcgatggctggccg

SEQ ID NO: 2591473 - DNA, 25 bp, Homo sapien
agtacttgaggtcctcgatggctgg

SEQ ID NO: 2591474 - DNA, 25 bp, Homo sapien
tgaggtcctcgatggctggccggga

SEQ ID NO: 2591475 - DNA, 25 bp, Homo sapien
gaggtcctcgatggctggccgggag

SEQ ID NO: 2591476 - DNA, 25 bp, Homo sapien
tgccctgatccaggcacgggggacg

SEQ ID NO: 2591477 - DNA, 25 bp, Homo sapien
ccctgatccaggcacgggggacgcc

SEQ ID NO: 2591478 - DNA, 25 bp, Homo sapien
gccctgatccaggcacgggggacgc

SEQ ID NO: 2591479 - DNA, 25 bp, Homo sapien
tgttgccggcctcgggagatgcggg

SEQ ID NO: 2591480 - DNA, 25 bp, Homo sapien
ggcgtagatgcggtagaagaacctt

SEQ ID NO: 2591481 - DNA, 25 bp, Homo sapien
acctttgcacgtggcagcgccagcg

SEQ ID NO: 2591482 - DNA, 25 bp, Homo sapien
gctcctcgatgcgcaggctggcgta

SEQ ID NO: 2591483 - DNA, 25 bp, Homo sapien
ccgaaggccacctgcgtctggaggc

SEQ ID NO: 2591484 - DNA, 25 bp, Homo sapien
agcccgaaggccacctgcgtctgga

SEQ ID NO: 2591485 - DNA, 25 bp, Homo sapien
gggagcccgaaggccacctgcgtct

SEQ ID NO: 2591486 - DNA, 25 bp, Homo sapien
cccgaaggccacctgcgtctggagg

SEQ ID NO: 2591487 - DNA, 25 bp, Homo sapien
acacttatcactggcgacaacaacc

SEQ ID NO: 2591488 - DNA, 25 bp, Homo sapien
caggaaggagcgctcgtactcgccc

SEQ ID NO: 2591489 - DNA, 25 bp, Homo sapien
ggtggtcacagcctcggcactgacc

SEQ ID NO: 2591490 - DNA, 25 bp, Homo sapien
actcgccccggcaacggtcctccat

SEQ ID NO: 2591491 - DNA, 25 bp, Homo sapien
gcactgacccgctccagcagactga

SEQ ID NO: 2591492 - DNA, 25 bp, Homo sapien
tgtcgacgagggtgagaatcattcc

SEQ ID NO: 2591493 - DNA, 25 bp, Homo sapien
cacatagggccttaccagggtcaag

SEQ ID NO: 2591494 - DNA, 25 bp, Homo sapien
tccccaggatcgacaaaaggcacag

SEQ ID NO: 2591495 - DNA, 25 bp, Homo sapien
gacacgctgcacaggaatccctggg

SEQ ID NO: 2591496 - DNA, 25 bp, Homo sapien
tctaggctacgcaggtagggatcca

SEQ ID NO: 2591497 - DNA, 25 bp, Homo sapien
tagtgtggacttcttctcgcagccc

SEQ ID NO: 2591498 - DNA, 25 bp, Homo sapien
caagactccgcgcaacatagtgtgg

SEQ ID NO: 2591499 - DNA, 25 bp, Homo sapien
aagaagcacccatacagacgctgga

SEQ ID NO: 2591500 - DNA, 25 bp, Homo sapien
ctgtccctgcctggcggtaacacac

SEQ ID NO: 2591501 - DNA, 25 bp, Homo sapien
ggcgtctggtcctttaaggcagcca

SEQ ID NO: 2591502 - DNA, 25 bp, Homo sapien
gcgtctggtcctttaaggcagccaa

SEQ ID NO: 2591503 - DNA, 25 bp, Homo sapien
tttaaggcagccaatactgtctgcc

SEQ ID NO: 2591504 - DNA, 25 bp, Homo sapien
agtaaacagagccttcgttgtggat

SEQ ID NO: 2591505 - DNA, 25 bp, Homo sapien
aacagagccttcgttgtggatcctc

SEQ ID NO: 2591506 - DNA, 25 bp, Homo sapien
gccttcgttgtggatcctccgacag

SEQ ID NO: 2591507 - DNA, 25 bp, Homo sapien
gagccttcgttgtggatcctccgac

SEQ ID NO: 2591508 - DNA, 25 bp, Homo sapien
gtctactgctgtcttgtccccagcc

SEQ ID NO: 2591509 - DNA, 25 bp, Homo sapien
tgtctactgctgtcttgtccccagc

SEQ ID NO: 2591510 - DNA, 25 bp, Homo sapien
caatgcaagggcaaagtaggcaagc

SEQ ID NO: 2591511 - DNA, 25 bp, Homo sapien
ggcaaagtaggcaagctggtgccat

SEQ ID NO: 2591512 - DNA, 25 bp, Homo sapien
aagggcaaagtaggcaagctggtgc

SEQ ID NO: 2591513 - DNA, 25 bp, Homo sapien
atgcaagggcaaagtaggcaagctg

SEQ ID NO: 2591514 - DNA, 25 bp, Homo sapien
gtttagtgtggtgccttcgcccaaa

SEQ ID NO: 2591515 - DNA, 25 bp, Homo sapien
ttcgcccaaagtgtcagacacagtg

SEQ ID NO: 2591516 - DNA, 25 bp, Homo sapien
gacaggatcatgaacacgtttagtg

SEQ ID NO: 2591517 - DNA, 25 bp, Homo sapien
tcatgaacacgtttagtgtggtgcc

SEQ ID NO: 2591518 - DNA, 25 bp, Homo sapien
gagcaaatgcttaatgtcccaaaca

SEQ ID NO: 2591519 - DNA, 25 bp, Homo sapien
gggctaaaaatgtccgccaccttca

SEQ ID NO: 2591520 - DNA, 25 bp, Homo sapien
gaagctggctgtgaacatggtcccg

SEQ ID NO: 2591521 - DNA, 25 bp, Homo sapien
gtttccccggctgcacttcttcatg

SEQ ID NO: 2591522 - DNA, 25 bp, Homo sapien
catgctgtacagacaccaccattaa

SEQ ID NO: 2591523 - DNA, 25 bp, Homo sapien
gtgcacttgctgttttccctgtcca

SEQ ID NO: 2591524 - DNA, 25 bp, Homo sapien
cctgtccacatccatgctgtacaga

SEQ ID NO: 2591525 - DNA, 25 bp, Homo sapien
tggcctgtcccactgtgtgcacttg

SEQ ID NO: 2591526 - DNA, 25 bp, Homo sapien
tgtcagggcgtagttgtcctgcatg

SEQ ID NO: 2591527 - DNA, 25 bp, Homo sapien
tgtgtggtttcgctttgcccattcc

SEQ ID NO: 2591528 - DNA, 25 bp, Homo sapien
tgctgttgccgaatgtcagggcgta

SEQ ID NO: 2591529 - DNA, 25 bp, Homo sapien
ccctccgggtgctgttgccgaatgt

SEQ ID NO: 2591530 - DNA, 25 bp, Homo sapien
tgggaccctggtaatggtcagacag

SEQ ID NO: 2591531 - DNA, 25 bp, Homo sapien
gacaggtggtcctgaaccagcaatg

SEQ ID NO: 2591532 - DNA, 25 bp, Homo sapien
gaggatggcagacaatcctacccca

SEQ ID NO: 2591533 - DNA, 25 bp, Homo sapien
gcttgttgaaggcaggcctgtcctg

SEQ ID NO: 2591534 - DNA, 25 bp, Homo sapien
catgtagaaggggatcaggccttgg

SEQ ID NO: 2591535 - DNA, 25 bp, Homo sapien
tagaaggggatcaggccttggctgc

SEQ ID NO: 2591536 - DNA, 25 bp, Homo sapien
tcacagtgggggtttctaaacagga

SEQ ID NO: 2591537 - DNA, 25 bp, Homo sapien
ccttggctgctgtagatgtggttgc

SEQ ID NO: 2591538 - DNA, 25 bp, Homo sapien
ccggcactccgtgggaaagctgcta

SEQ ID NO: 2591539 - DNA, 25 bp, Homo sapien
tccccggcaggcaaacagatagtca

SEQ ID NO: 2591540 - DNA, 25 bp, Homo sapien
gacaggaaggtgctaacaagctccc

SEQ ID NO: 2591541 - DNA, 25 bp, Homo sapien
gatccaagcaagactcaggagagag

SEQ ID NO: 2591542 - DNA, 25 bp, Homo sapien
tccatggcttgcatgacgccgtctc

SEQ ID NO: 2591543 - DNA, 25 bp, Homo sapien
taattcaaccccattacccaggtga

SEQ ID NO: 2591544 - DNA, 25 bp, Homo sapien
catgacgccgtctcggtaattcaac

SEQ ID NO: 2591545 - DNA, 25 bp, Homo sapien
tggctcttgtcgaattcgtccatgg

SEQ ID NO: 2591546 - DNA, 25 bp, Homo sapien
gggggtaggcagatgtacgggctac

SEQ ID NO: 2591547 - DNA, 25 bp, Homo sapien
gggtaggcagatgtacgggctaccc

SEQ ID NO: 2591548 - DNA, 25 bp, Homo sapien
taggcagatgtacgggctaccccaa

SEQ ID NO: 2591549 - DNA, 25 bp, Homo sapien
ctgggggtaggcagatgtacgggct

SEQ ID NO: 2591550 - DNA, 25 bp, Homo sapien
ccgcctcgtcttgggaaaagctggg

SEQ ID NO: 2591551 - DNA, 25 bp, Homo sapien
aggcaaggctccctttcgttccctg

SEQ ID NO: 2591552 - DNA, 25 bp, Homo sapien
gttccctgaacgttggcgactgtct

SEQ ID NO: 2591553 - DNA, 25 bp, Homo sapien
ggcaggcaaggcaccgcctcgtctt

SEQ ID NO: 2591554 - DNA, 25 bp, Homo sapien
aagctgcccacatctagcgtctcct

SEQ ID NO: 2591555 - DNA, 25 bp, Homo sapien
atctagcgtctcctgctggcggcgg

SEQ ID NO: 2591556 - DNA, 25 bp, Homo sapien
ttaggttagggtggtccagctgcgg

SEQ ID NO: 2591557 - DNA, 25 bp, Homo sapien
ctgagatggccttgcgttggattag

SEQ ID NO: 2591558 - DNA, 25 bp, Homo sapien
cctcgcaaacaggagtggcgctctt

SEQ ID NO: 2591559 - DNA, 25 bp, Homo sapien
ctgcctgggggcctcgcaaacagga

SEQ ID NO: 2591560 - DNA, 25 bp, Homo sapien
tgggggcctcgcaaacaggagtggc

SEQ ID NO: 2591561 - DNA, 25 bp, Homo sapien
gggcctcgcaaacaggagtggcgct

SEQ ID NO: 2591562 - DNA, 25 bp, Homo sapien
tgggtgtcccaagtctctggagtct

SEQ ID NO: 2591563 - DNA, 25 bp, Homo sapien
gaatctgtctgggtatgttctctac

SEQ ID NO: 2591564 - DNA, 25 bp, Homo sapien
ggtgcggggtgtcgggcgtgaagcc

SEQ ID NO: 2591565 - DNA, 25 bp, Homo sapien
tcttccccgtatactgggtgtccca

SEQ ID NO: 2591566 - DNA, 25 bp, Homo sapien
ctcaaagttcttagagggcttcaga

SEQ ID NO: 2591567 - DNA, 25 bp, Homo sapien
tcaaagttcttagagggcttcagac

SEQ ID NO: 2591568 - DNA, 25 bp, Homo sapien
tggcccagaatctcaaagttcttag

SEQ ID NO: 2591569 - DNA, 25 bp, Homo sapien
ggagctggcccagaatctcaaagtt

SEQ ID NO: 2591570 - DNA, 25 bp, Homo sapien
ctgtgagtgccgggacaggcaggcg

SEQ ID NO: 2591571 - DNA, 25 bp, Homo sapien
tgtagggctccgtcaggtcttggca

SEQ ID NO: 2591572 - DNA, 25 bp, Homo sapien
cctcaatgaacttgggtttggacat

SEQ ID NO: 2591573 - DNA, 25 bp, Homo sapien
cacctggtagcgcagctgcggaaag

SEQ ID NO: 2591574 - DNA, 25 bp, Homo sapien
tgccccgtggtacgcccataggtgt

SEQ ID NO: 2591575 - DNA, 25 bp, Homo sapien
gccaccccaggaggccagtagcctc

SEQ ID NO: 2591576 - DNA, 25 bp, Homo sapien
tgtgccaccccaggaggccagtagc

SEQ ID NO: 2591577 - DNA, 25 bp, Homo sapien
tgccaccccaggaggccagtagcct

SEQ ID NO: 2591578 - DNA, 25 bp, Homo sapien
ctgtgccaccccaggaggccagtag

SEQ ID NO: 2591579 - DNA, 25 bp, Homo sapien
aaaatgaaatgaagtgtggagtcct

SEQ ID NO: 2591580 - DNA, 25 bp, Homo sapien
aatgaaatgaagtgtggagtcctct

SEQ ID NO: 2591581 - DNA, 25 bp, Homo sapien
gtcctctctggagtgggcgtcgggc

SEQ ID NO: 2591582 - DNA, 25 bp, Homo sapien
tctggagtgggcgtcgggcacttac

SEQ ID NO: 2591583 - DNA, 25 bp, Homo sapien
ctggccaccaggtatcgagttcgca

SEQ ID NO: 2591584 - DNA, 25 bp, Homo sapien
gacccagtttctgctcgacagacgt

SEQ ID NO: 2591585 - DNA, 25 bp, Homo sapien
ctcgacagacgtgctggccaccagg

SEQ ID NO: 2591586 - DNA, 25 bp, Homo sapien
tggccaccaggtatcgagttcgcag

SEQ ID NO: 2591587 - DNA, 25 bp, Homo sapien
aggcctgggcccctggcaaccccat

SEQ ID NO: 2591588 - DNA, 25 bp, Homo sapien
cagcagggagggtgaggcctgggcc

SEQ ID NO: 2591589 - DNA, 25 bp, Homo sapien
gtgaggcctgggcccctggcaaccc

SEQ ID NO: 2591590 - DNA, 25 bp, Homo sapien
ggagggtgaggcctgggcccctggc

SEQ ID NO: 2591591 - DNA, 25 bp, Homo sapien
ctgcagtgccccgtggtgtggcctt

SEQ ID NO: 2591592 - DNA, 25 bp, Homo sapien
tgcagtgccccgtggtgtggccttc

SEQ ID NO: 2591593 - DNA, 25 bp, Homo sapien
gcagtgccccgtggtgtggccttca

SEQ ID NO: 2591594 - DNA, 25 bp, Homo sapien
gactgcagtgccccgtggtgtggcc

SEQ ID NO: 2591595 - DNA, 25 bp, Homo sapien
gaagagatcgtgtttctgagtagtt

SEQ ID NO: 2591596 - DNA, 25 bp, Homo sapien
gctccggcgtgaagagatcgtgttt

SEQ ID NO: 2591597 - DNA, 25 bp, Homo sapien
agggacatagtgaggctccggcgtg

SEQ ID NO: 2591598 - DNA, 25 bp, Homo sapien
gatcgtgtttctgagtagttgtcat

SEQ ID NO: 2591599 - DNA, 25 bp, Homo sapien
gctggctccagtccctcccggcatc

SEQ ID NO: 2591600 - DNA, 25 bp, Homo sapien
tttgctttcactctggccttgctgg

SEQ ID NO: 2591601 - DNA, 25 bp, Homo sapien
ttgctggctccagtccctcccggca

SEQ ID NO: 2591602 - DNA, 25 bp, Homo sapien
ccttgctggctccagtccctcccgg

SEQ ID NO: 2591603 - DNA, 25 bp, Homo sapien
tctggcattctggtagacgctggtt

SEQ ID NO: 2591604 - DNA, 25 bp, Homo sapien
gggaccattgcttccactcctaaga

SEQ ID NO: 2591605 - DNA, 25 bp, Homo sapien
caagacactgcaaactgggaccatt

SEQ ID NO: 2591606 - DNA, 25 bp, Homo sapien
tggatcacgtccatacaagacactg

SEQ ID NO: 2591607 - DNA, 25 bp, Homo sapien
tgtttcctcaagcacgtgtccatct

SEQ ID NO: 2591608 - DNA, 25 bp, Homo sapien
cctggtggattctgggccaaggtca

SEQ ID NO: 2591609 - DNA, 25 bp, Homo sapien
cggtggcaacgtttattacagggca

SEQ ID NO: 2591610 - DNA, 25 bp, Homo sapien
agcaaagtacactctgttccactgg

SEQ ID NO: 2591611 - DNA, 25 bp, Homo sapien
aacagaggggcctaccagtgaggtc

SEQ ID NO: 2591612 - DNA, 25 bp, Homo sapien
gacccgctgatcatttagttagtgg

SEQ ID NO: 2591613 - DNA, 25 bp, Homo sapien
caggcggacccgctgatcatttagt

SEQ ID NO: 2591614 - DNA, 25 bp, Homo sapien
ccagggccagacaatgtgtcttcct

SEQ ID NO: 2591615 - DNA, 25 bp, Homo sapien
cccttgcaggcccaaggcatctgtg

SEQ ID NO: 2591616 - DNA, 25 bp, Homo sapien
cccacccagtaactggcggagaggg

SEQ ID NO: 2591617 - DNA, 25 bp, Homo sapien
ttgcaggcccaaggcatctgtgctg

SEQ ID NO: 2591618 - DNA, 25 bp, Homo sapien
gacacaaccagagcccacccagtaa

SEQ ID NO: 2591619 - DNA, 25 bp, Homo sapien
ccagctgccctcaggagggcctgca

SEQ ID NO: 2591620 - DNA, 25 bp, Homo sapien
agctttaattcccctcccccagctg

SEQ ID NO: 2591621 - DNA, 25 bp, Homo sapien
tcccccagctgccctcaggagggcc

SEQ ID NO: 2591622 - DNA, 25 bp, Homo sapien
ccccagctgccctcaggagggcctg

SEQ ID NO: 2591623 - DNA, 25 bp, Homo sapien
tcagccctctactcaggtggtaggg

SEQ ID NO: 2591624 - DNA, 25 bp, Homo sapien
atggggatggccacaaggctctgat

SEQ ID NO: 2591625 - DNA, 25 bp, Homo sapien
ctctgatcctctagtggtggcacca

SEQ ID NO: 2591626 - DNA, 25 bp, Homo sapien
ggcggctcctctgaagaagcctcca

SEQ ID NO: 2591627 - DNA, 25 bp, Homo sapien
cgtaaaccgggtgcaggtccatgag

SEQ ID NO: 2591628 - DNA, 25 bp, Homo sapien
taaaccgggtgcaggtccatgagat

SEQ ID NO: 2591629 - DNA, 25 bp, Homo sapien
tgggactccacgtaaaccgggtgca

SEQ ID NO: 2591630 - DNA, 25 bp, Homo sapien
cacgtaaaccgggtgcaggtccatg

SEQ ID NO: 2591631 - DNA, 25 bp, Homo sapien
cagcacacgcctaggaaacgccatt

SEQ ID NO: 2591632 - DNA, 25 bp, Homo sapien
gacgaaggccaacatgagtcctgga

SEQ ID NO: 2591633 - DNA, 25 bp, Homo sapien
aggccaacatgagtcctggaacagt

SEQ ID NO: 2591634 - DNA, 25 bp, Homo sapien
gggacgaaggccaacatgagtcctg

SEQ ID NO: 2591635 - DNA, 25 bp, Homo sapien
ccaggtgacagcccacccagggggt

SEQ ID NO: 2591636 - DNA, 25 bp, Homo sapien
caggtgacagcccacccagggggta

SEQ ID NO: 2591637 - DNA, 25 bp, Homo sapien
ccccaggtgacagcccacccagggg

SEQ ID NO: 2591638 - DNA, 25 bp, Homo sapien
accccaggtgacagcccacccaggg

SEQ ID NO: 2591639 - DNA, 25 bp, Homo sapien
ctgatgcccgccagcaccacaagga

SEQ ID NO: 2591640 - DNA, 25 bp, Homo sapien
caaggagggcgatgagggcctcgcg

SEQ ID NO: 2591641 - DNA, 25 bp, Homo sapien
ccaattgccacgatgacgagggcac

SEQ ID NO: 2591642 - DNA, 25 bp, Homo sapien
ccttggcccgcaagacaccaattgc

SEQ ID NO: 2591643 - DNA, 25 bp, Homo sapien
ctgcagagacagggccacatggcca

SEQ ID NO: 2591644 - DNA, 25 bp, Homo sapien
tgcagagacagggccacatggccat

SEQ ID NO: 2591645 - DNA, 25 bp, Homo sapien
cagggccacatggccatgggccggt

SEQ ID NO: 2591646 - DNA, 25 bp, Homo sapien
ggccacatggccatgggccggtcac

SEQ ID NO: 2591647 - DNA, 25 bp, Homo sapien
gcagagggcccccaagtctgcccct

SEQ ID NO: 2591648 - DNA, 25 bp, Homo sapien
cagagggcccccaagtctgcccctg

SEQ ID NO: 2591649 - DNA, 25 bp, Homo sapien
tagccaccagaaggacaccagagct

SEQ ID NO: 2591650 - DNA, 25 bp, Homo sapien
ggtagccaccagaaggacaccagag

SEQ ID NO: 2591651 - DNA, 25 bp, Homo sapien
agccaccagaaggacaccagagctc

SEQ ID NO: 2591652 - DNA, 25 bp, Homo sapien
ctggtagccaccagaaggacaccag

SEQ ID NO: 2591653 - DNA, 25 bp, Homo sapien
atggctgggagtggagtgcgggggc

SEQ ID NO: 2591654 - DNA, 25 bp, Homo sapien
aactgttggaaggtgctgacttcac

SEQ ID NO: 2591655 - DNA, 25 bp, Homo sapien
cagaagggacaaatatgtgaggccc

SEQ ID NO: 2591656 - DNA, 25 bp, Homo sapien
gcagaagggacaaatatgtgaggcc

SEQ ID NO: 2591657 - DNA, 25 bp, Homo sapien
ggaccgggggccatgtccagccctg

SEQ ID NO: 2591658 - DNA, 25 bp, Homo sapien
caggtgtcaccgtgtcctcagagac

SEQ ID NO: 2591659 - DNA, 25 bp, Homo sapien
atttccagcagatgagacctcaaag

SEQ ID NO: 2591660 - DNA, 25 bp, Homo sapien
tcaaagccgggcagcagttcatagc

SEQ ID NO: 2591661 - DNA, 25 bp, Homo sapien
ctgtccttggctcgcagcatgcagg

SEQ ID NO: 2591662 - DNA, 25 bp, Homo sapien
gaggccacagctgagcaggttggga

SEQ ID NO: 2591663 - DNA, 25 bp, Homo sapien
gtgtgaggccacagctgagcaggtt

SEQ ID NO: 2591664 - DNA, 25 bp, Homo sapien
ctggagtgtgaggccacagctgagc

SEQ ID NO: 2591665 - DNA, 25 bp, Homo sapien
tgtgaggccacagctgagcaggttg

SEQ ID NO: 2591666 - DNA, 25 bp, Homo sapien
agagctctccagctggaccctgcag

SEQ ID NO: 2591667 - DNA, 25 bp, Homo sapien
tccaggagggggcacagagctctcc

SEQ ID NO: 2591668 - DNA, 25 bp, Homo sapien
ccagctggaccctgcaggcgtccat

SEQ ID NO: 2591669 - DNA, 25 bp, Homo sapien
catcaaccgttccgggggctccagg

SEQ ID NO: 2591670 - DNA, 25 bp, Homo sapien
gtccctaatgaatatgagcggcccc

SEQ ID NO: 2591671 - DNA, 25 bp, Homo sapien
cggccccagtggtccctaatgaata

SEQ ID NO: 2591672 - DNA, 25 bp, Homo sapien
gcagccctgagggagctcgaaatat

SEQ ID NO: 2591673 - DNA, 25 bp, Homo sapien
gcccccgcttgcagcagatggaagc

SEQ ID NO: 2591674 - DNA, 25 bp, Homo sapien
cactcgtcagcccatctgggtgttg

SEQ ID NO: 2591675 - DNA, 25 bp, Homo sapien
gcagtccctgtcacactcgtcagcc

SEQ ID NO: 2591676 - DNA, 25 bp, Homo sapien
tgtcacactcgtcagcccatctggg

SEQ ID NO: 2591677 - DNA, 25 bp, Homo sapien
tcgtcagcccatctgggtgttgccc

SEQ ID NO: 2591678 - DNA, 25 bp, Homo sapien
gccaccaccattgagatggtctcaa

SEQ ID NO: 2591679 - DNA, 25 bp, Homo sapien
caccaccattgagatggtctcaatc

SEQ ID NO: 2591680 - DNA, 25 bp, Homo sapien
caccatgttagccaccaccattgag

SEQ ID NO: 2591681 - DNA, 25 bp, Homo sapien
catgttagccaccaccattgagatg

SEQ ID NO: 2591682 - DNA, 25 bp, Homo sapien
cctggagacctttaggtactggtca

SEQ ID NO: 2591683 - DNA, 25 bp, Homo sapien
tcctggtgactgctgagccacatga

SEQ ID NO: 2591684 - DNA, 25 bp, Homo sapien
gagacctttaggtactggtcacagt

SEQ ID NO: 2591685 - DNA, 25 bp, Homo sapien
ttaggtactggtcacagttacaggc

SEQ ID NO: 2591686 - DNA, 25 bp, Homo sapien
gcccaggcggggcttctccgggtgc

SEQ ID NO: 2591687 - DNA, 25 bp, Homo sapien
ccagccctctgctcgctcctcgaag

SEQ ID NO: 2591688 - DNA, 25 bp, Homo sapien
actgtgctggcttctcgtgggccct

SEQ ID NO: 2591689 - DNA, 25 bp, Homo sapien
gactgtgctggcttctcgtgggccc

SEQ ID NO: 2591690 - DNA, 25 bp, Homo sapien
cctgatacctgcgcctcccactgcc

SEQ ID NO: 2591691 - DNA, 25 bp, Homo sapien
ttccctgatacctgcgcctcccact

SEQ ID NO: 2591692 - DNA, 25 bp, Homo sapien
tttccctgatacctgcgcctcccac

SEQ ID NO: 2591693 - DNA, 25 bp, Homo sapien
tccctgatacctgcgcctcccactg

SEQ ID NO: 2591694 - DNA, 25 bp, Homo sapien
gctagaagtaaccacccagaggcca

SEQ ID NO: 2591695 - DNA, 25 bp, Homo sapien
aggaaggaagcctgcgctagaagta

SEQ ID NO: 2591696 - DNA, 25 bp, Homo sapien
agcgcagcctcatgggtgccctatg

SEQ ID NO: 2591697 - DNA, 25 bp, Homo sapien
cagaggccaccatttactgcaaggg

SEQ ID NO: 2591698 - DNA, 25 bp, Homo sapien
tcctgggtcactgcaccggtgaggt

SEQ ID NO: 2591699 - DNA, 25 bp, Homo sapien
gtgaggtggagcggcccaggccacc

SEQ ID NO: 2591700 - DNA, 25 bp, Homo sapien
tgggtcactgcaccggtgaggtgga

SEQ ID NO: 2591701 - DNA, 25 bp, Homo sapien
gaggtggagcggcccaggccaccac

SEQ ID NO: 2591702 - DNA, 25 bp, Homo sapien
ggagtgcggctgtgctcgggagctg

SEQ ID NO: 2591703 - DNA, 25 bp, Homo sapien
ggctggtccgagaggatgacggctg

SEQ ID NO: 2591704 - DNA, 25 bp, Homo sapien
tccgagaggatgacggctgctggcc

SEQ ID NO: 2591705 - DNA, 25 bp, Homo sapien
tggggggacgaggacacagctcact

SEQ ID NO: 2591706 - DNA, 25 bp, Homo sapien
ctagatacgcggctgcgtccgggct

SEQ ID NO: 2591707 - DNA, 25 bp, Homo sapien
cgtccgctggcatggacttggcgtt

SEQ ID NO: 2591708 - DNA, 25 bp, Homo sapien
cttccgagacgtccgctggcatgga

SEQ ID NO: 2591709 - DNA, 25 bp, Homo sapien
agatggacatcagggcttccgagac

SEQ ID NO: 2591710 - DNA, 25 bp, Homo sapien
agtatgcaccctggcggtccagcag

SEQ ID NO: 2591711 - DNA, 25 bp, Homo sapien
ctgccaggtagaagtatgcaccctg

SEQ ID NO: 2591712 - DNA, 25 bp, Homo sapien
tcccggagccggtgctgcacatata

SEQ ID NO: 2591713 - DNA, 25 bp, Homo sapien
cggtgctgcacatatactttctgct

SEQ ID NO: 2591714 - DNA, 25 bp, Homo sapien
tcccgccagcggcagccaaaaaaca

SEQ ID NO: 2591715 - DNA, 25 bp, Homo sapien
agaagtcttggtcccgccagcggca

SEQ ID NO: 2591716 - DNA, 25 bp, Homo sapien
gtagaagtcttggtcccgccagcgg

SEQ ID NO: 2591717 - DNA, 25 bp, Homo sapien
agtagaagtcttggtcccgccagcg

SEQ ID NO: 2591718 - DNA, 25 bp, Homo sapien
tcggaagggggctaccccagtgcca

SEQ ID NO: 2591719 - DNA, 25 bp, Homo sapien
ggccacacgctcctggatggctgct

SEQ ID NO: 2591720 - DNA, 25 bp, Homo sapien
ggccccaccatgatcacaggtgtgt

SEQ ID NO: 2591721 - DNA, 25 bp, Homo sapien
acgctcctggatggctgctcggaag

SEQ ID NO: 2591722 - DNA, 25 bp, Homo sapien
tcccaggccgcacccagaggggcac

SEQ ID NO: 2591723 - DNA, 25 bp, Homo sapien
tggtgtctctgggaaggccagactc

SEQ ID NO: 2591724 - DNA, 25 bp, Homo sapien
gccagactcccaggccgcacccaga

SEQ ID NO: 2591725 - DNA, 25 bp, Homo sapien
tctctgggaaggccagactcccagg

SEQ ID NO: 2591726 - DNA, 25 bp, Homo sapien
ggcgagtctggaactgcactacagc

SEQ ID NO: 2591727 - DNA, 25 bp, Homo sapien
tctggaactgcactacagccacgag

SEQ ID NO: 2591728 - DNA, 25 bp, Homo sapien
ggaactgcactacagccacgaggat

SEQ ID NO: 2591729 - DNA, 25 bp, Homo sapien
cgagtctggaactgcactacagcca

SEQ ID NO: 2591730 - DNA, 25 bp, Homo sapien
cagtactgtggggccgcgtgcacct

SEQ ID NO: 2591731 - DNA, 25 bp, Homo sapien
tgccacgtgcggaacccactgtccg

SEQ ID NO: 2591732 - DNA, 25 bp, Homo sapien
ggaacccactgtccgcctgctccat

SEQ ID NO: 2591733 - DNA, 25 bp, Homo sapien
gccgcgtgcacctgccacgtgcgga

SEQ ID NO: 2591734 - DNA, 25 bp, Homo sapien
cttatctgaacacagggtgggcgga

SEQ ID NO: 2591735 - DNA, 25 bp, Homo sapien
caatgggaggtcttgattgaaggcc

SEQ ID NO: 2591736 - DNA, 25 bp, Homo sapien
ccttgggttcagctagtgtctgggc

SEQ ID NO: 2591737 - DNA, 25 bp, Homo sapien
tgaattttcgcagcatggacccctc

SEQ ID NO: 2591738 - DNA, 25 bp, Homo sapien
tccaggagcacgaagagcagtccca

SEQ ID NO: 2591739 - DNA, 25 bp, Homo sapien
ccagggcccagggttgcggtgatag

SEQ ID NO: 2591740 - DNA, 25 bp, Homo sapien
ccagggttgcggtgataggatgcag

SEQ ID NO: 2591741 - DNA, 25 bp, Homo sapien
gctcctcctgtagccggcagatctc

SEQ ID NO: 2591742 - DNA, 25 bp, Homo sapien
gggcccagggttgcggtgataggat

SEQ ID NO: 2591743 - DNA, 25 bp, Homo sapien
aggtcggcactggaggccgagccca

SEQ ID NO: 2591744 - DNA, 25 bp, Homo sapien
agcccacacacaggccgtggctaca

SEQ ID NO: 2591745 - DNA, 25 bp, Homo sapien
ctctgggcccgtagggctctgtgca

SEQ ID NO: 2591746 - DNA, 25 bp, Homo sapien
tccagcacgggcgtcttctggcggc

SEQ ID NO: 2591747 - DNA, 25 bp, Homo sapien
gcaggggctcactggctgtagtctc

SEQ ID NO: 2591748 - DNA, 25 bp, Homo sapien
gcccaaggtcatcccctttgcttgc

SEQ ID NO: 2591749 - DNA, 25 bp, Homo sapien
ccagcaggggctcactggctgtagt

SEQ ID NO: 2591750 - DNA, 25 bp, Homo sapien
cccaaggtcatcccctttgcttgct

SEQ ID NO: 2591751 - DNA, 25 bp, Homo sapien
tggcccggaccctgctttcaccagg

SEQ ID NO: 2591752 - DNA, 25 bp, Homo sapien
tgtccgtggacggtgcacaggccac

SEQ ID NO: 2591753 - DNA, 25 bp, Homo sapien
gaaatgccaattctggagccccgag

SEQ ID NO: 2591754 - DNA, 25 bp, Homo sapien
gagcagccccaacgaaccagtttct

SEQ ID NO: 2591755 - DNA, 25 bp, Homo sapien
cgccacacgcaagcaggttcaccag

SEQ ID NO: 2591756 - DNA, 25 bp, Homo sapien
ctctcccgccacacgcaagcaggtt

SEQ ID NO: 2591757 - DNA, 25 bp, Homo sapien
atccgtggtccccaaaaagcatctg

SEQ ID NO: 2591758 - DNA, 25 bp, Homo sapien
cttgccatccgtggtccccaaaaag

SEQ ID NO: 2591759 - DNA, 25 bp, Homo sapien
cttagggccctcctcaaatcacctt

SEQ ID NO: 2591760 - DNA, 25 bp, Homo sapien
agaagccaagtgtctcctcccttag

SEQ ID NO: 2591761 - DNA, 25 bp, Homo sapien
ttcatttcagctttccagaagccaa

SEQ ID NO: 2591762 - DNA, 25 bp, Homo sapien
ctaaaggaagcatctgatgttcatc

SEQ ID NO: 2591763 - DNA, 25 bp, Homo sapien
gccaagagtgccaattaagagacct

SEQ ID NO: 2591764 - DNA, 25 bp, Homo sapien
tagagaatcttctggccccaaaggc

SEQ ID NO: 2591765 - DNA, 25 bp, Homo sapien
caggagcactgcgaaacagactgca

SEQ ID NO: 2591766 - DNA, 25 bp, Homo sapien
gcttgtcacaagtgaaggctgctac

SEQ ID NO: 2591767 - DNA, 25 bp, Homo sapien
caggtgtgctaagagtgccagccca

SEQ ID NO: 2591768 - DNA, 25 bp, Homo sapien
gcatcaaaccaaagttcgtaggcca

SEQ ID NO: 2591769 - DNA, 25 bp, Homo sapien
tgtggcacctgactggcatcaaacc

SEQ ID NO: 2591770 - DNA, 25 bp, Homo sapien
tgcctatgagtatctgacacctgtt

SEQ ID NO: 2591771 - DNA, 25 bp, Homo sapien
ctgggatagtaagccaagcagtgcc

SEQ ID NO: 2591772 - DNA, 25 bp, Homo sapien
tgtgcaacagtactttcccaggatc

SEQ ID NO: 2591773 - DNA, 25 bp, Homo sapien
gaagtctggtctggatagacggcac

SEQ ID NO: 2591774 - DNA, 25 bp, Homo sapien
caatctctctcgtggcacagggaag

SEQ ID NO: 2591775 - DNA, 25 bp, Homo sapien
tcggctcgaggtcaacattctagtt

SEQ ID NO: 2591776 - DNA, 25 bp, Homo sapien
ttggaatagggaaacccggcactca

SEQ ID NO: 2591777 - DNA, 25 bp, Homo sapien
ctccggtgcgctgcaagtagggcct

SEQ ID NO: 2591778 - DNA, 25 bp, Homo sapien
tctactcaaagcattaaacaaaagg

SEQ ID NO: 2591779 - DNA, 25 bp, Homo sapien
ttgagactcaggaccgtaagtaccc

SEQ ID NO: 2591780 - DNA, 25 bp, Homo sapien
ggcacaacagcatctcgaagacgaa

SEQ ID NO: 2591781 - DNA, 25 bp, Homo sapien
tgcacgaagatctcgaaggtggcga

SEQ ID NO: 2591782 - DNA, 25 bp, Homo sapien
taagtacccagaaaaggcggagcac

SEQ ID NO: 2591783 - DNA, 25 bp, Homo sapien
cccggccgagcgtgccacccgcggg

SEQ ID NO: 2591784 - DNA, 25 bp, Homo sapien
tggccgcccgtgaacgcccgcctcg

SEQ ID NO: 2591785 - DNA, 25 bp, Homo sapien
acgcccgcctcgatcggacgccatg

SEQ ID NO: 2591786 - DNA, 25 bp, Homo sapien
ctcggccctgatgcgccggcaatcc

SEQ ID NO: 2591787 - DNA, 25 bp, Homo sapien
ggcatagcaagcttggacagtgcag

SEQ ID NO: 2591788 - DNA, 25 bp, Homo sapien
ggcgcaaaaggcagcatcaactccc

SEQ ID NO: 2591789 - DNA, 25 bp, Homo sapien
cacggagaccctggcgccttgagtg

SEQ ID NO: 2591790 - DNA, 25 bp, Homo sapien
tccaccgggaactgccgagagccag

SEQ ID NO: 2591791 - DNA, 25 bp, Homo sapien
cagggaggccccgactgggccagtc

SEQ ID NO: 2591792 - DNA, 25 bp, Homo sapien
aaggccttcgcacccgaagcctgct

SEQ ID NO: 2591793 - DNA, 25 bp, Homo sapien
gctgatttccgctccaggcaggaag

SEQ ID NO: 2591794 - DNA, 25 bp, Homo sapien
gcctgctccttactctgggcagagg

SEQ ID NO: 2591795 - DNA, 25 bp, Homo sapien
gcagtcgggcactttccatgtttat

SEQ ID NO: 2591796 - DNA, 25 bp, Homo sapien
ccagcagtcgggcactttccatgtt

SEQ ID NO: 2591797 - DNA, 25 bp, Homo sapien
cagcagtcgggcactttccatgttt

SEQ ID NO: 2591798 - DNA, 25 bp, Homo sapien
agcagtcgggcactttccatgttta

SEQ ID NO: 2591799 - DNA, 25 bp, Homo sapien
tgccgtcggccagcatgtccggtgt

SEQ ID NO: 2591800 - DNA, 25 bp, Homo sapien
gtagaagcaccgcagcccaggtgtc

SEQ ID NO: 2591801 - DNA, 25 bp, Homo sapien
atgtccggtgtctccgcccgcaggt

SEQ ID NO: 2591802 - DNA, 25 bp, Homo sapien
tctcggaagtgggtggcaacacgac

SEQ ID NO: 2591803 - DNA, 25 bp, Homo sapien
gctccctatccgctgactctgcgtc

SEQ ID NO: 2591804 - DNA, 25 bp, Homo sapien
ctttctgctccctatccgctgactc

SEQ ID NO: 2591805 - DNA, 25 bp, Homo sapien
tctgctccctatccgctgactctgc

SEQ ID NO: 2591806 - DNA, 25 bp, Homo sapien
tccctatccgctgactctgcgtcct

SEQ ID NO: 2591807 - DNA, 25 bp, Homo sapien
cctgcaccgcctggctctgggtggc

SEQ ID NO: 2591808 - DNA, 25 bp, Homo sapien
ctggctcctgcaccgcctggctctg

SEQ ID NO: 2591809 - DNA, 25 bp, Homo sapien
ctcctgcaccgcctggctctgggtg

SEQ ID NO: 2591810 - DNA, 25 bp, Homo sapien
tgcaccgcctggctctgggtggcct

SEQ ID NO: 2591811 - DNA, 25 bp, Homo sapien
ggaagagagctggtccgggactgtc

SEQ ID NO: 2591812 - DNA, 25 bp, Homo sapien
ctgtcagtcaaggaagagagctggt

SEQ ID NO: 2591813 - DNA, 25 bp, Homo sapien
gctggtccgggactgtcctagggat

SEQ ID NO: 2591814 - DNA, 25 bp, Homo sapien
aagagagctggtccgggactgtcct

SEQ ID NO: 2591815 - DNA, 25 bp, Homo sapien
gccaccaccattgagatggtctcaa

SEQ ID NO: 2591816 - DNA, 25 bp, Homo sapien
caccatgttagccaccaccattgag

SEQ ID NO: 2591817 - DNA, 25 bp, Homo sapien
caccaccattgagatggtctcaatc

SEQ ID NO: 2591818 - DNA, 25 bp, Homo sapien
catgttagccaccaccattgagatg

SEQ ID NO: 2591819 - DNA, 25 bp, Homo sapien
tcctggtgactgctgagccacatga

SEQ ID NO: 2591820 - DNA, 25 bp, Homo sapien
gagacctttaggtactggtcacagt

SEQ ID NO: 2591821 - DNA, 25 bp, Homo sapien
ttaggtactggtcacagttacaggc

SEQ ID NO: 2591822 - DNA, 25 bp, Homo sapien
cctggagacctttaggtactggtca

SEQ ID NO: 2591823 - DNA, 25 bp, Homo sapien
gcccaggcggggcttctccgggtgc

SEQ ID NO: 2591824 - DNA, 25 bp, Homo sapien
aggcttactgcgatgctgggggtgg

SEQ ID NO: 2591825 - DNA, 25 bp, Homo sapien
caggcttactgcgatgctgggggtg

SEQ ID NO: 2591826 - DNA, 25 bp, Homo sapien
ccaggcttactgcgatgctgggggt

SEQ ID NO: 2591827 - DNA, 25 bp, Homo sapien
ggcttactgcgatgctgggggtggg

SEQ ID NO: 2591828 - DNA, 25 bp, Homo sapien
gggcacgtgagtctccggaggccgg

SEQ ID NO: 2591829 - DNA, 25 bp, Homo sapien
ggagacgtctctcagaagcaccagg

SEQ ID NO: 2591830 - DNA, 25 bp, Homo sapien
ctcgtgcgcggggagacgtctctca

SEQ ID NO: 2591831 - DNA, 25 bp, Homo sapien
tctgggcacacgtgcgcaacagcca

SEQ ID NO: 2591832 - DNA, 25 bp, Homo sapien
tgtcaccctgaggagctccccagga

SEQ ID NO: 2591833 - DNA, 25 bp, Homo sapien
cttgtcaccctgaggagctccccag

SEQ ID NO: 2591834 - DNA, 25 bp, Homo sapien
tcaccctgaggagctccccaggact

SEQ ID NO: 2591835 - DNA, 25 bp, Homo sapien
ccaggactccctcccttgaacctgg

SEQ ID NO: 2591836 - DNA, 25 bp, Homo sapien
ggccggtccctcctgcgtgcacccc

SEQ ID NO: 2591837 - DNA, 25 bp, Homo sapien
ccggtccctcctgcgtgcacccctg

SEQ ID NO: 2591838 - DNA, 25 bp, Homo sapien
cacccctggcaccccgaggacagcc

SEQ ID NO: 2591839 - DNA, 25 bp, Homo sapien
ccctggcaccccgaggacagcctgc

SEQ ID NO: 2591840 - DNA, 25 bp, Homo sapien
ctgaggagggcagtgggtctcggca

SEQ ID NO: 2591841 - DNA, 25 bp, Homo sapien
tgaggagggcagtgggtctcggcat

SEQ ID NO: 2591842 - DNA, 25 bp, Homo sapien
tggtcctcaggcactacctcacgaa

SEQ ID NO: 2591843 - DNA, 25 bp, Homo sapien
ctcaggcactacctcacgaacctgt

SEQ ID NO: 2591844 - DNA, 25 bp, Homo sapien
caggcactacctcacgaacctgtgg

SEQ ID NO: 2591845 - DNA, 25 bp, Homo sapien
ggcactacctcacgaacctgtggtc

SEQ ID NO: 2591846 - DNA, 25 bp, Homo sapien
ccttcagggagcagtcgaccgagag

SEQ ID NO: 2591847 - DNA, 25 bp, Homo sapien
agcagtcgaccgagaggcagcgccc

SEQ ID NO: 2591848 - DNA, 25 bp, Homo sapien
aatgcttgagcacagccttggcctg

SEQ ID NO: 2591849 - DNA, 25 bp, Homo sapien
tgtctgcgtgggtgacacgcacgtt

SEQ ID NO: 2591850 - DNA, 25 bp, Homo sapien
gtcagaatgatcctcccctcctgcc

SEQ ID NO: 2591851 - DNA, 25 bp, Homo sapien
gctgccccgacgtcagaatgatcct

SEQ ID NO: 2591852 - DNA, 25 bp, Homo sapien
tgtggaatggctgccccgacgtcag

SEQ ID NO: 2591853 - DNA, 25 bp, Homo sapien
aatggctgccccgacgtcagaatga

SEQ ID NO: 2591854 - DNA, 25 bp, Homo sapien
caggcatgtgttaagggtccccaag

SEQ ID NO: 2591855 - DNA, 25 bp, Homo sapien
cccaagatcatcctgaggtgattca

SEQ ID NO: 2591856 - DNA, 25 bp, Homo sapien
gattcagtgttacaggactcagcac

SEQ ID NO: 2591857 - DNA, 25 bp, Homo sapien
gcacacagtcacactctggctaaga

SEQ ID NO: 2591858 - DNA, 25 bp, Homo sapien
tcacaggattaaactctaggcatgg

SEQ ID NO: 2591859 - DNA, 25 bp, Homo sapien
tctgcagctacagggaataagggct

SEQ ID NO: 2591860 - DNA, 25 bp, Homo sapien
gccaagatagaagcttgcaggtcct

SEQ ID NO: 2591861 - DNA, 25 bp, Homo sapien
caggtccttcgtgtggagctgagct

SEQ ID NO: 2591862 - DNA, 25 bp, Homo sapien
aattaagggtatcccatggcaatat

SEQ ID NO: 2591863 - DNA, 25 bp, Homo sapien
cccaattaagggtatcccatggcaa

SEQ ID NO: 2591864 - DNA, 25 bp, Homo sapien
ttcccaattaagggtatcccatggc

SEQ ID NO: 2591865 - DNA, 25 bp, Homo sapien
caattaagggtatcccatggcaata

SEQ ID NO: 2591866 - DNA, 25 bp, Homo sapien
tctggagatcccctcagcagaacac

SEQ ID NO: 2591867 - DNA, 25 bp, Homo sapien
cccatggcgtttcccgccactacct

SEQ ID NO: 2591868 - DNA, 25 bp, Homo sapien
ccaggttcacctgacaaagtcagct

SEQ ID NO: 2591869 - DNA, 25 bp, Homo sapien
ggacacagccccatggcgtttcccg

SEQ ID NO: 2591870 - DNA, 25 bp, Homo sapien
gaacatcctagaccgacataaacag

SEQ ID NO: 2591871 - DNA, 25 bp, Homo sapien
taaacagacaatccttgaagctgca

SEQ ID NO: 2591872 - DNA, 25 bp, Homo sapien
tgtgagatcactgcacctgtgagta

SEQ ID NO: 2591873 - DNA, 25 bp, Homo sapien
tgtgaacacctgtctagaacatcct

SEQ ID NO: 2591874 - DNA, 25 bp, Homo sapien
tttggctttgatctgacaccctcac

SEQ ID NO: 2591875 - DNA, 25 bp, Homo sapien
tttcagctgcattgaccagcatccc

SEQ ID NO: 2591876 - DNA, 25 bp, Homo sapien
tctcggctccatctgtttcagctgc

SEQ ID NO: 2591877 - DNA, 25 bp, Homo sapien
actcttgccgtttaggtcgaaccat

SEQ ID NO: 2591878 - DNA, 25 bp, Homo sapien
taatgtccgtatttccacagatggt

SEQ ID NO: 2591879 - DNA, 25 bp, Homo sapien
cgccctgcggtggtcttcaccattg

SEQ ID NO: 2591880 - DNA, 25 bp, Homo sapien
cacaccgagacagcggaggctccgt

SEQ ID NO: 2591881 - DNA, 25 bp, Homo sapien
gccctgcggtggtcttcaccattgc

SEQ ID NO: 2591882 - DNA, 25 bp, Homo sapien
tgcccagcatgcgtgcatccacacc

SEQ ID NO: 2591883 - DNA, 25 bp, Homo sapien
agcatgttgtcacacaccacacgga

SEQ ID NO: 2591884 - DNA, 25 bp, Homo sapien
atgttgtcacacaccacacggaagg

SEQ ID NO: 2591885 - DNA, 25 bp, Homo sapien
gttgtcacacaccacacggaaggcc

SEQ ID NO: 2591886 - DNA, 25 bp, Homo sapien
ctgcagcatgttgtcacacaccaca

SEQ ID NO: 2591887 - DNA, 25 bp, Homo sapien
ctgaggggcagcgccctcagacaca

SEQ ID NO: 2591888 - DNA, 25 bp, Homo sapien
tgaggggcagcgccctcagacacag

SEQ ID NO: 2591889 - DNA, 25 bp, Homo sapien
cggtgctgacgctttctgcaggccg

SEQ ID NO: 2591890 - DNA, 25 bp, Homo sapien
tgggtgcggccggtgctgacgcttt

SEQ ID NO: 2591891 - DNA, 25 bp, Homo sapien
gggtggcttccgtgcccctggtctc

SEQ ID NO: 2591892 - DNA, 25 bp, Homo sapien
ccaggtcctccgacaggtggaagcg

SEQ ID NO: 2591893 - DNA, 25 bp, Homo sapien
gggctggcacgctcgccacccgcat

SEQ ID NO: 2591894 - DNA, 25 bp, Homo sapien
gcggcctccggtcccagttggacag

SEQ ID NO: 2591895 - DNA, 25 bp, Homo sapien
acagctgctgcgtcttgtccagggc

SEQ ID NO: 2591896 - DNA, 25 bp, Homo sapien
gcagagcggcctccggtcccagttg

SEQ ID NO: 2591897 - DNA, 25 bp, Homo sapien
aggacgtgcccagtttttgcaggtc

SEQ ID NO: 2591898 - DNA, 25 bp, Homo sapien
gaatctgcttctccacatgggccag

SEQ ID NO: 2591899 - DNA, 25 bp, Homo sapien
gcagcaggtccatgccgcccagaat

SEQ ID NO: 2591900 - DNA, 25 bp, Homo sapien
cggggcaggacgtgcccagtttttg

SEQ ID NO: 2591901 - DNA, 25 bp, Homo sapien
aacacaggtgtccactccacgtcta

SEQ ID NO: 2591902 - DNA, 25 bp, Homo sapien
caggacgtccagaaggaacacgtgg

SEQ ID NO: 2591903 - DNA, 25 bp, Homo sapien
cctgccctgttggtggctgcgagag

SEQ ID NO: 2591904 - DNA, 25 bp, Homo sapien
cacgtctacaccaaccacttggtgg

SEQ ID NO: 2591905 - DNA, 25 bp, Homo sapien
ctctccgaatgccatgcccctgatg

SEQ ID NO: 2591906 - DNA, 25 bp, Homo sapien
gcagcactgggtaaatgccagcagc

SEQ ID NO: 2591907 - DNA, 25 bp, Homo sapien
ctgccccagcggccgagggaaccac

SEQ ID NO: 2591908 - DNA, 25 bp, Homo sapien
ttgcctctctccgaatgccatgccc

SEQ ID NO: 2591909 - DNA, 25 bp, Homo sapien
tgtctggtcaggtcttcccacgagg

SEQ ID NO: 2591910 - DNA, 25 bp, Homo sapien
atgggcagctggtagtaacggtcct

SEQ ID NO: 2591911 - DNA, 25 bp, Homo sapien
tgcaccctcgtgtctggtcaggtct

SEQ ID NO: 2591912 - DNA, 25 bp, Homo sapien
tggtagtaacggtccttcatgtcct

SEQ ID NO: 2591913 - DNA, 25 bp, Homo sapien
tgaaccggcggagttccacagccac

SEQ ID NO: 2591914 - DNA, 25 bp, Homo sapien
agcctgaaccggcggagttccacag

SEQ ID NO: 2591915 - DNA, 25 bp, Homo sapien
cctggagcctgaaccggcggagttc

SEQ ID NO: 2591916 - DNA, 25 bp, Homo sapien
ctggagcctgaaccggcggagttcc

SEQ ID NO: 2591917 - DNA, 25 bp, Homo sapien
tgaagccacgggctctgccccacca

SEQ ID NO: 2591918 - DNA, 25 bp, Homo sapien
gctgctcctgaagccacgggctctg

SEQ ID NO: 2591919 - DNA, 25 bp, Homo sapien
actgggtcactgtgggagaccagca

SEQ ID NO: 2591920 - DNA, 25 bp, Homo sapien
ggcacactgggcggccgtgactggg

SEQ ID NO: 2591921 - DNA, 25 bp, Homo sapien
tgcagactggctatgagcactcggg

SEQ ID NO: 2591922 - DNA, 25 bp, Homo sapien
cgtagaccccgaccttgcagactgg

SEQ ID NO: 2591923 - DNA, 25 bp, Homo sapien
catctgtcctgcctgaggtcaaggt

SEQ ID NO: 2591924 - DNA, 25 bp, Homo sapien
gtcaaggttccacaggaccaaagcg

SEQ ID NO: 2591925 - DNA, 25 bp, Homo sapien
aagcgagggtctccctccccgcaag

SEQ ID NO: 2591926 - DNA, 25 bp, Homo sapien
cccgcaaggtcctggagtccatggg

SEQ ID NO: 2591927 - DNA, 25 bp, Homo sapien
ctccctccccgcaaggtcctggagt

SEQ ID NO: 2591928 - DNA, 25 bp, Homo sapien
cacaagcgagggtctccctccccgc

SEQ ID NO: 2591929 - DNA, 25 bp, Homo sapien
caggcgccttgcacctctctggtga

SEQ ID NO: 2591930 - DNA, 25 bp, Homo sapien
gttcgggtggcacggacgctgccgt

SEQ ID NO: 2591931 - DNA, 25 bp, Homo sapien
cagctccgctgggttggttcgggtg

SEQ ID NO: 2591932 - DNA, 25 bp, Homo sapien
tctctggtgactctcagcccccacc

SEQ ID NO: 2591933 - DNA, 25 bp, Homo sapien
catggtcggtccagttctcctgtga

SEQ ID NO: 2591934 - DNA, 25 bp, Homo sapien
tgcacatggtcggtccagttctcct

SEQ ID NO: 2591935 - DNA, 25 bp, Homo sapien
cacatggtcggtccagttctcctgt

SEQ ID NO: 2591936 - DNA, 25 bp, Homo sapien
tggtcggtccagttctcctgtgaca

SEQ ID NO: 2591937 - DNA, 25 bp, Homo sapien
tcccaggccaaactctgtggctcag

SEQ ID NO: 2591938 - DNA, 25 bp, Homo sapien
aagaagcagctcctacttgatatgt

SEQ ID NO: 2591939 - DNA, 25 bp, Homo sapien
tcctacttgatatgtctgtgcaccc

SEQ ID NO: 2591940 - DNA, 25 bp, Homo sapien
cctgcagtgcgcagtgagtatccca

SEQ ID NO: 2591941 - DNA, 25 bp, Homo sapien
gccgccaggcgctgctgaatggccg

SEQ ID NO: 2591942 - DNA, 25 bp, Homo sapien
ccacaaaccgcttgtggcacaggtg

SEQ ID NO: 2591943 - DNA, 25 bp, Homo sapien
ctgaatggccgcgttgggacacagc

SEQ ID NO: 2591944 - DNA, 25 bp, Homo sapien
acaaaccgcttgtggcacaggtgcc

SEQ ID NO: 2591945 - DNA, 25 bp, Homo sapien
caaggaggtcacctcagggtaccgt

SEQ ID NO: 2591946 - DNA, 25 bp, Homo sapien
gggctacgccgtaccgctcctgcag

SEQ ID NO: 2591947 - DNA, 25 bp, Homo sapien
tgcagacgcaagacctgcctgctca

SEQ ID NO: 2591948 - DNA, 25 bp, Homo sapien
tgctcagcgccttcggactcagctt

SEQ ID NO: 2591949 - DNA, 25 bp, Homo sapien
gtcctttatcccacatctttttcag

SEQ ID NO: 2591950 - DNA, 25 bp, Homo sapien
attctggataacagtcctttatccc

SEQ ID NO: 2591951 - DNA, 25 bp, Homo sapien
ccaccgtgcacggcccctttgccca

SEQ ID NO: 2591952 - DNA, 25 bp, Homo sapien
cttattgctgagttttgagagatct

SEQ ID NO: 2591953 - DNA, 25 bp, Homo sapien
ttgaccagatatagagcaggaagcc

SEQ ID NO: 2591954 - DNA, 25 bp, Homo sapien
tcagccccattgtgcgaatgaggaa

SEQ ID NO: 2591955 - DNA, 25 bp, Homo sapien
tgacgtccaagtccaagcctgtgac

SEQ ID NO: 2591956 - DNA, 25 bp, Homo sapien
tacaggcaccatatgggctccttgt

SEQ ID NO: 2591957 - DNA, 25 bp, Homo sapien
acaaaggaatggatgaacaagaaag

SEQ ID NO: 2591958 - DNA, 25 bp, Homo sapien
aagaacaaaggaatggatgaacaag

SEQ ID NO: 2591959 - DNA, 25 bp, Homo sapien
aagaaagcagtacggttgccatgcc

SEQ ID NO: 2591960 - DNA, 25 bp, Homo sapien
aacaagaaagcagtacggttgccat

SEQ ID NO: 2591961 - DNA, 25 bp, Homo sapien
actcgggagaagagggctgtgctcc

SEQ ID NO: 2591962 - DNA, 25 bp, Homo sapien
cactcgggagaagagggctgtgctc

SEQ ID NO: 2591963 - DNA, 25 bp, Homo sapien
ctcgggagaagagggctgtgctcct

SEQ ID NO: 2591964 - DNA, 25 bp, Homo sapien
tcactcgggagaagagggctgtgct

SEQ ID NO: 2591965 - DNA, 25 bp, Homo sapien
cacgcgcctgctgcccccctacact

SEQ ID NO: 2591966 - DNA, 25 bp, Homo sapien
agagctctcccacgcgcctgctgcc

SEQ ID NO: 2591967 - DNA, 25 bp, Homo sapien
ccacgcgcctgctgcccccctacac

SEQ ID NO: 2591968 - DNA, 25 bp, Homo sapien
gggagagctctcccacgcgcctgct

SEQ ID NO: 2591969 - DNA, 25 bp, Homo sapien
tagcgctccacgagggccaccttgt

SEQ ID NO: 2591970 - DNA, 25 bp, Homo sapien
ggccacatagcgctccacgagggcc

SEQ ID NO: 2591971 - DNA, 25 bp, Homo sapien
ccttgatgtcaaagccgggctggca

SEQ ID NO: 2591972 - DNA, 25 bp, Homo sapien
cgggaagccggccacatagcgctcc

SEQ ID NO: 2591973 - DNA, 25 bp, Homo sapien
ctgcagggggacacacggtcaggcc

SEQ ID NO: 2591974 - DNA, 25 bp, Homo sapien
ggggacacacggtcaggccacagcc

SEQ ID NO: 2591975 - DNA, 25 bp, Homo sapien
cagggggacacacggtcaggccaca

SEQ ID NO: 2591976 - DNA, 25 bp, Homo sapien
gggacacacggtcaggccacagcct

SEQ ID NO: 2591977 - DNA, 25 bp, Homo sapien
ggagcggccaaagtgtcagaacgaa

SEQ ID NO: 2591978 - DNA, 25 bp, Homo sapien
cggccaaagtgtcagaacgaaaggg

SEQ ID NO: 2591979 - DNA, 25 bp, Homo sapien
cccagcagtgctcgcccggccagtg

SEQ ID NO: 2591980 - DNA, 25 bp, Homo sapien
acccagagggagcggccaaagtgtc

SEQ ID NO: 2591981 - DNA, 25 bp, Homo sapien
tgtgtccctgtgatgtgcacgaagt

SEQ ID NO: 2591982 - DNA, 25 bp, Homo sapien
tgcacgaagtcccattgtagaagct

SEQ ID NO: 2591983 - DNA, 25 bp, Homo sapien
cggaaattcacagttaggtgactgc

SEQ ID NO: 2591984 - DNA, 25 bp, Homo sapien
gaagcttggatctgccatccctgca

SEQ ID NO: 2591985 - DNA, 25 bp, Homo sapien
caaacactgtttatagagacctggg

SEQ ID NO: 2591986 - DNA, 25 bp, Homo sapien
tgggcgttatccaagtttgaaccta

SEQ ID NO: 2591987 - DNA, 25 bp, Homo sapien
tggtggactcccgacctccaacaaa

SEQ ID NO: 2591988 - DNA, 25 bp, Homo sapien
tgtacgtgcggctgcgtctgatttg

SEQ ID NO: 2591989 - DNA, 25 bp, Homo sapien
cttttcaacgccaagctccgactgc

SEQ ID NO: 2591990 - DNA, 25 bp, Homo sapien
tttcaacgccaagctccgactgcag

SEQ ID NO: 2591991 - DNA, 25 bp, Homo sapien
tccgactgcagcttcaacgtcgcgc

SEQ ID NO: 2591992 - DNA, 25 bp, Homo sapien
ttcaacgtcgcgcccagcgtggctg

SEQ ID NO: 2591993 - DNA, 25 bp, Homo sapien
ctggcctggcagacaagcccccccg

SEQ ID NO: 2591994 - DNA, 25 bp, Homo sapien
ttcccgtgttcagccacgtggccct

SEQ ID NO: 2591995 - DNA, 25 bp, Homo sapien
acgtggccctcaggccgaggggcct

SEQ ID NO: 2591996 - DNA, 25 bp, Homo sapien
cctggcagacaagcccccccgtgct

SEQ ID NO: 2591997 - DNA, 25 bp, Homo sapien
ctgggacaggtgggaggcctgggct

SEQ ID NO: 2591998 - DNA, 25 bp, Homo sapien
gacaggtgggaggcctgggcttggc

SEQ ID NO: 2591999 - DNA, 25 bp, Homo sapien
tgggacaggtgggaggcctgggctt

SEQ ID NO: 2592000 - DNA, 25 bp, Homo sapien
ggacaggtgggaggcctgggcttgg

SEQ ID NO: 2592001 - DNA, 25 bp, Homo sapien
caggccctgagcaggtgacgctggg

SEQ ID NO: 2592002 - DNA, 25 bp, Homo sapien
aggccctgagcaggtgacgctggga

SEQ ID NO: 2592003 - DNA, 25 bp, Homo sapien
gccctgagcaggtgacgctgggacc

SEQ ID NO: 2592004 - DNA, 25 bp, Homo sapien
ggccctgagcaggtgacgctgggac

SEQ ID NO: 2592005 - DNA, 25 bp, Homo sapien
ggttggatactgatccgacgcatct

SEQ ID NO: 2592006 - DNA, 25 bp, Homo sapien
ggatactgatccgacgcatctcgca

SEQ ID NO: 2592007 - DNA, 25 bp, Homo sapien
tgaagggttggatactgatccgacg

SEQ ID NO: 2592008 - DNA, 25 bp, Homo sapien
gccagtgaagggttggatactgatc

SEQ ID NO: 2592009 - DNA, 25 bp, Homo sapien
ctgggcgactgtgccgaggtgcgac

SEQ ID NO: 2592010 - DNA, 25 bp, Homo sapien
actgtgccgaggtgcgactggtgcc

SEQ ID NO: 2592011 - DNA, 25 bp, Homo sapien
gtgccgaggtgcgactggtgccctg

SEQ ID NO: 2592012 - DNA, 25 bp, Homo sapien
cgaggtgcgactggtgccctggccc

SEQ ID NO: 2592013 - DNA, 25 bp, Homo sapien
tgctggccagtggtgccgcaaggct

SEQ ID NO: 2592014 - DNA, 25 bp, Homo sapien
aacctgccctcgtggtggaggcggt

SEQ ID NO: 2592015 - DNA, 25 bp, Homo sapien
ggctctcagtgaggactttgaccgc

SEQ ID NO: 2592016 - DNA, 25 bp, Homo sapien
tggaggcggtggacgtgtgccagca

SEQ ID NO: 2592017 - DNA, 25 bp, Homo sapien
ggcttaggaagcagcgcctgccact

SEQ ID NO: 2592018 - DNA, 25 bp, Homo sapien
ccatggggccgattgaggcaggcct

SEQ ID NO: 2592019 - DNA, 25 bp, Homo sapien
aggcaggcctggcttaggaagcagc

SEQ ID NO: 2592020 - DNA, 25 bp, Homo sapien
catgtgtgggcatcgggtggtctgc

SEQ ID NO: 2592021 - DNA, 25 bp, Homo sapien
ctggcttgctgagcgggctgcaaag

SEQ ID NO: 2592022 - DNA, 25 bp, Homo sapien
cttgctgagcgggctgcaaaggcct

SEQ ID NO: 2592023 - DNA, 25 bp, Homo sapien
tgaagccacgggctgagtcttggcc

SEQ ID NO: 2592024 - DNA, 25 bp, Homo sapien
cacgggctgagtcttggccatagcc

SEQ ID NO: 2592025 - DNA, 25 bp, Homo sapien
agcatgtccagaagcccggccaggg

SEQ ID NO: 2592026 - DNA, 25 bp, Homo sapien
cagggggtcgtccaaggcagcaaac

SEQ ID NO: 2592027 - DNA, 25 bp, Homo sapien
ggccagggggtcgtccaaggcagca

SEQ ID NO: 2592028 - DNA, 25 bp, Homo sapien
gtcgtccaaggcagcaaacccccgc

SEQ ID NO: 2592029 - DNA, 25 bp, Homo sapien
gcctgccctcagcaggcgaaagaaa

SEQ ID NO: 2592030 - DNA, 25 bp, Homo sapien
tggcctgccctcagcaggcgaaaga

SEQ ID NO: 2592031 - DNA, 25 bp, Homo sapien
ctgcggcactcgcgggacacgggcc

SEQ ID NO: 2592032 - DNA, 25 bp, Homo sapien
actcgcgggacacgggcctggcctg

SEQ ID NO: 2592033 - DNA, 25 bp, Homo sapien
aggctgcaagccgagagcgtgggcc

SEQ ID NO: 2592034 - DNA, 25 bp, Homo sapien
gcaagagggtgagttcccagctgct

SEQ ID NO: 2592035 - DNA, 25 bp, Homo sapien
tctcgtccctgcgatgtggatggtg

SEQ ID NO: 2592036 - DNA, 25 bp, Homo sapien
gtgggccgcgctgttctcgtccctg

SEQ ID NO: 2592037 - DNA, 25 bp, Homo sapien
tcagcgctgtccaggagggtgccat

SEQ ID NO: 2592038 - DNA, 25 bp, Homo sapien
caaaggatgcccctcggggaaagtg

SEQ ID NO: 2592039 - DNA, 25 bp, Homo sapien
gggtgccatgcccaaaggcgcggga

SEQ ID NO: 2592040 - DNA, 25 bp, Homo sapien
gtgtgtgaggagacctcagcgctgt

SEQ ID NO: 2592041 - DNA, 25 bp, Homo sapien
tctgtgcaacatagcggaactccgt

SEQ ID NO: 2592042 - DNA, 25 bp, Homo sapien
gactgagcgtgcaacgtggttacag

SEQ ID NO: 2592043 - DNA, 25 bp, Homo sapien
tgagcagcaagcgactgactgagcg

SEQ ID NO: 2592044 - DNA, 25 bp, Homo sapien
ggttacagccaaacacagagagtcg

SEQ ID NO: 2592045 - DNA, 25 bp, Homo sapien
aattagccagcatagtggagcctgt

SEQ ID NO: 2592046 - DNA, 25 bp, Homo sapien
ttagccagcatagtggagcctgtag

SEQ ID NO: 2592047 - DNA, 25 bp, Homo sapien
aaattagccagcatagtggagcctg

SEQ ID NO: 2592048 - DNA, 25 bp, Homo sapien
agccagcatagtggagcctgtagtc

SEQ ID NO: 2592049 - DNA, 25 bp, Homo sapien
gtggagatggcgcagatgaccctca

SEQ ID NO: 2592050 - DNA, 25 bp, Homo sapien
tacttatttacaacggccagaggtg

SEQ ID NO: 2592051 - DNA, 25 bp, Homo sapien
tactcagccacggaaaaggaggaag

SEQ ID NO: 2592052 - DNA, 25 bp, Homo sapien
gaccgcatgtgtgtgaactgtccag

SEQ ID NO: 2592053 - DNA, 25 bp, Homo sapien
acagacgaaggtccgacaagagagc

SEQ ID NO: 2592054 - DNA, 25 bp, Homo sapien
tcacagacgaaggtccgacaagaga

SEQ ID NO: 2592055 - DNA, 25 bp, Homo sapien
cacagacgaaggtccgacaagagag

SEQ ID NO: 2592056 - DNA, 25 bp, Homo sapien
cttccgctcccgcgtggaccacagg

SEQ ID NO: 2592057 - DNA, 25 bp, Homo sapien
tgcttccgctcccgcgtggaccaca

SEQ ID NO: 2592058 - DNA, 25 bp, Homo sapien
tccgctcccgcgtggaccacagggt

SEQ ID NO: 2592059 - DNA, 25 bp, Homo sapien
ctgcttccgctcccgcgtggaccac

SEQ ID NO: 2592060 - DNA, 25 bp, Homo sapien
ctgcaggagcaggagggggtcccgg

SEQ ID NO: 2592061 - DNA, 25 bp, Homo sapien
tgcaggagcaggagggggtcccggc

SEQ ID NO: 2592062 - DNA, 25 bp, Homo sapien
ggcgccctcggcaacctcatcagca

SEQ ID NO: 2592063 - DNA, 25 bp, Homo sapien
tggcgccctcggcaacctcatcagc

SEQ ID NO: 2592064 - DNA, 25 bp, Homo sapien
gcgccctcggcaacctcatcagcat

SEQ ID NO: 2592065 - DNA, 25 bp, Homo sapien
cctggcgccctcggcaacctcatca

SEQ ID NO: 2592066 - DNA, 25 bp, Homo sapien
gggggctgtggaagctgctgggccc

SEQ ID NO: 2592067 - DNA, 25 bp, Homo sapien
tggggggctgtggaagctgctgggc

SEQ ID NO: 2592068 - DNA, 25 bp, Homo sapien
gggctgtggaagctgctgggccccc

SEQ ID NO: 2592069 - DNA, 25 bp, Homo sapien
ctggggggctgtggaagctgctggg

SEQ ID NO: 2592070 - DNA, 25 bp, Homo sapien
cagatcagacctcagcagctggatt

SEQ ID NO: 2592071 - DNA, 25 bp, Homo sapien
agatcagatcagacctcagcagctg

SEQ ID NO: 2592072 - DNA, 25 bp, Homo sapien
gatcagatcagacctcagcagctgg

SEQ ID NO: 2592073 - DNA, 25 bp, Homo sapien
atgagatcagatcagacctcagcag

SEQ ID NO: 2592074 - DNA, 25 bp, Homo sapien
tggccccgcattctgggtgctgcat

SEQ ID NO: 2592075 - DNA, 25 bp, Homo sapien
tgactggccccgcattctgggtgct

SEQ ID NO: 2592076 - DNA, 25 bp, Homo sapien
agtgtgactggccccgcattctggg

SEQ ID NO: 2592077 - DNA, 25 bp, Homo sapien
actggccccgcattctgggtgctgc

SEQ ID NO: 2592078 - DNA, 25 bp, Homo sapien
tcagacacggccatgctgacactca

SEQ ID NO: 2592079 - DNA, 25 bp, Homo sapien
ctggcttcctgttcatacaacagaa

SEQ ID NO: 2592080 - DNA, 25 bp, Homo sapien
gctgacactcatcccacacaattgc

SEQ ID NO: 2592081 - DNA, 25 bp, Homo sapien
gctggcttcctgttcatacaacaga

SEQ ID NO: 2592082 - DNA, 25 bp, Homo sapien
caagttccctgaattcgccaagttc

SEQ ID NO: 2592083 - DNA, 25 bp, Homo sapien
tccccagcgtggatgtttggccgga

SEQ ID NO: 2592084 - DNA, 25 bp, Homo sapien
aagttcatcagtgctgcaccgatgc

SEQ ID NO: 2592085 - DNA, 25 bp, Homo sapien
tgaggtcgcctcctcgtgcagtagc

SEQ ID NO: 2592086 - DNA, 25 bp, Homo sapien
cccacggcctcagctcccctcagag

SEQ ID NO: 2592087 - DNA, 25 bp, Homo sapien
ccacggcctcagctcccctcagaga

SEQ ID NO: 2592088 - DNA, 25 bp, Homo sapien
agcagaaagggccagcccacggcct

SEQ ID NO: 2592089 - DNA, 25 bp, Homo sapien
gcccacggacagcagaaagggccag

SEQ ID NO: 2592090 - DNA, 25 bp, Homo sapien
caacagaaatattggaagatgaaat

SEQ ID NO: 2592091 - DNA, 25 bp, Homo sapien
ggagccaggtggatgcatgcagaga

SEQ ID NO: 2592092 - DNA, 25 bp, Homo sapien
gctgaagaaaagatcctacctacaa

SEQ ID NO: 2592093 - DNA, 25 bp, Homo sapien
aagaaaagatcctacctacaacaga

SEQ ID NO: 2592094 - DNA, 25 bp, Homo sapien
aaggaatctgtgagcgcagtggaca

SEQ ID NO: 2592095 - DNA, 25 bp, Homo sapien
gagggcctctctagaacacgccaga

SEQ ID NO: 2592096 - DNA, 25 bp, Homo sapien
cctggaccaggcactctacctaaaa

SEQ ID NO: 2592097 - DNA, 25 bp, Homo sapien
tgcaatgacacaacctcggataact

SEQ ID NO: 2592098 - DNA, 25 bp, Homo sapien
cacggacaggtgtccaggcagcgag

SEQ ID NO: 2592099 - DNA, 25 bp, Homo sapien
gctggacacgaaccatgtaagggca

SEQ ID NO: 2592100 - DNA, 25 bp, Homo sapien
tgttccagcgggcaccatgtctgtt

SEQ ID NO: 2592101 - DNA, 25 bp, Homo sapien
caccgaggctgttccagggggcatc

SEQ ID NO: 2592102 - DNA, 25 bp, Homo sapien
gggccctgctagctggggtgttgca

SEQ ID NO: 2592103 - DNA, 25 bp, Homo sapien
gctggggtgttgcactttgaaaaca

SEQ ID NO: 2592104 - DNA, 25 bp, Homo sapien
ccagggggcgccgaggctgttccag

SEQ ID NO: 2592105 - DNA, 25 bp, Homo sapien
gcgccgaggctgttccaggggccct

SEQ ID NO: 2592106 - DNA, 25 bp, Homo sapien
gagaagaggctgtagaagcctgtgg

SEQ ID NO: 2592107 - DNA, 25 bp, Homo sapien
gaagaggctgtagaagcctgtgggt

SEQ ID NO: 2592108 - DNA, 25 bp, Homo sapien
cccactctgcttaggtggagaagag

SEQ ID NO: 2592109 - DNA, 25 bp, Homo sapien
agaggctgtagaagcctgtgggtgc

SEQ ID NO: 2592110 - DNA, 25 bp, Homo sapien
agggaaggcgacatgcccggaggtg

SEQ ID NO: 2592111 - DNA, 25 bp, Homo sapien
tacatcagggaaggcgacatgcccg

SEQ ID NO: 2592112 - DNA, 25 bp, Homo sapien
ctggctacatcagggaaggcgacat

SEQ ID NO: 2592113 - DNA, 25 bp, Homo sapien
aaggcgacatgcccggaggtgcccc

SEQ ID NO: 2592114 - DNA, 25 bp, Homo sapien
gactcggcaccatcaggctcagact

SEQ ID NO: 2592115 - DNA, 25 bp, Homo sapien
agggagactcggcaccatcaggctc

SEQ ID NO: 2592116 - DNA, 25 bp, Homo sapien
gggagactcggcaccatcaggctca

SEQ ID NO: 2592117 - DNA, 25 bp, Homo sapien
gagactcggcaccatcaggctcaga

SEQ ID NO: 2592118 - DNA, 25 bp, Homo sapien
agggtcaccagcgggatctcctggg

SEQ ID NO: 2592119 - DNA, 25 bp, Homo sapien
tcgccagcggcagggtcaccagcgg

SEQ ID NO: 2592120 - DNA, 25 bp, Homo sapien
gtcaccagcgggatctcctgggtcc

SEQ ID NO: 2592121 - DNA, 25 bp, Homo sapien
gtggcgctcgccagcggcagggtca

SEQ ID NO: 2592122 - DNA, 25 bp, Homo sapien
ggccgggccgaggacgctggcaggc

SEQ ID NO: 2592123 - DNA, 25 bp, Homo sapien
cagggccgggccgaggacgctggca

SEQ ID NO: 2592124 - DNA, 25 bp, Homo sapien
cctcagggccgggccgaggacgctg

SEQ ID NO: 2592125 - DNA, 25 bp, Homo sapien
ccgggccgaggacgctggcaggcag

SEQ ID NO: 2592126 - DNA, 25 bp, Homo sapien
caacaggcagccatgcagagcccac

SEQ ID NO: 2592127 - DNA, 25 bp, Homo sapien
tgcaacaggcagccatgcagagccc

SEQ ID NO: 2592128 - DNA, 25 bp, Homo sapien
gcaacaggcagccatgcagagccca

SEQ ID NO: 2592129 - DNA, 25 bp, Homo sapien
gccaagtttggaccctgcattccag

SEQ ID NO: 2592130 - DNA, 25 bp, Homo sapien
aagtttggaccctgcattccagttc

SEQ ID NO: 2592131 - DNA, 25 bp, Homo sapien
gctgccaagtttggaccctgcattc

SEQ ID NO: 2592132 - DNA, 25 bp, Homo sapien
aagtgggacccccagtcgctgagca

SEQ ID NO: 2592133 - DNA, 25 bp, Homo sapien
agctccgtaagactccaggcggccg

SEQ ID NO: 2592134 - DNA, 25 bp, Homo sapien
tacgcagctccgtaagactccaggc

SEQ ID NO: 2592135 - DNA, 25 bp, Homo sapien
cagtacgcagctccgtaagactcca

SEQ ID NO: 2592136 - DNA, 25 bp, Homo sapien
cgtaagactccaggcggccgctgac

SEQ ID NO: 2592137 - DNA, 25 bp, Homo sapien
gcgtccaacatcctcgtaacacgtg

SEQ ID NO: 2592138 - DNA, 25 bp, Homo sapien
gggtcattctcctgacggtcatggt

SEQ ID NO: 2592139 - DNA, 25 bp, Homo sapien
tacacagactgtccctgtggcacag

SEQ ID NO: 2592140 - DNA, 25 bp, Homo sapien
gatcccagcaggacggacatggtgt

SEQ ID NO: 2592141 - DNA, 25 bp, Homo sapien
gctcttcaccaggaaatgaagggga

SEQ ID NO: 2592142 - DNA, 25 bp, Homo sapien
cagcctgggctcttcaccaggaaat

SEQ ID NO: 2592143 - DNA, 25 bp, Homo sapien
gatgccccagcctgggctcttcacc

SEQ ID NO: 2592144 - DNA, 25 bp, Homo sapien
ggctcttcaccaggaaatgaagggg

SEQ ID NO: 2592145 - DNA, 25 bp, Homo sapien
tcatggttcaagaaatgccaggctc

SEQ ID NO: 2592146 - DNA, 25 bp, Homo sapien
aacaataaactttacgtctcatggt

SEQ ID NO: 2592147 - DNA, 25 bp, Homo sapien
cctgataaatgttagagttagcctg

SEQ ID NO: 2592148 - DNA, 25 bp, Homo sapien
cacattgaagtagatcaagttcctg

SEQ ID NO: 2592149 - DNA, 25 bp, Homo sapien
aagcataaaccccaacgcagcggct

SEQ ID NO: 2592150 - DNA, 25 bp, Homo sapien
tctgtgccgtgcaaagggcaggtct

SEQ ID NO: 2592151 - DNA, 25 bp, Homo sapien
ccttggctaagggagggtgactggt

SEQ ID NO: 2592152 - DNA, 25 bp, Homo sapien
gcctgccctaaataccgcagaggtg

SEQ ID NO: 2592153 - DNA, 25 bp, Homo sapien
ggctggcacctctagggcccctgga

SEQ ID NO: 2592154 - DNA, 25 bp, Homo sapien
tagggcccctggaccaccgcagaac

SEQ ID NO: 2592155 - DNA, 25 bp, Homo sapien
ggtgggcataggctggcacctctag

SEQ ID NO: 2592156 - DNA, 25 bp, Homo sapien
tcagtgcagatttcggtcattggct

SEQ ID NO: 2592157 - DNA, 25 bp, Homo sapien
catggcaggccagcggcggccgtca

SEQ ID NO: 2592158 - DNA, 25 bp, Homo sapien
cttgaaggaccccacaagaacccag

SEQ ID NO: 2592159 - DNA, 25 bp, Homo sapien
ccagcggcggccgtcagtctctcca

SEQ ID NO: 2592160 - DNA, 25 bp, Homo sapien
acaagaacccaggttgctggcagag

SEQ ID NO: 2592161 - DNA, 25 bp, Homo sapien
cggtgccacagcaccaccagccccg

SEQ ID NO: 2592162 - DNA, 25 bp, Homo sapien
ggtgccacagcaccaccagccccgg

SEQ ID NO: 2592163 - DNA, 25 bp, Homo sapien
gtgccacagcaccaccagccccggg

SEQ ID NO: 2592164 - DNA, 25 bp, Homo sapien
gccacagcaccaccagccccgggac

SEQ ID NO: 2592165 - DNA, 25 bp, Homo sapien
ttctgagagcgccaaccttgagggc

SEQ ID NO: 2592166 - DNA, 25 bp, Homo sapien
gagagcgccaaccttgagggccctg

SEQ ID NO: 2592167 - DNA, 25 bp, Homo sapien
cacccccaggatgcggcaaggacag

SEQ ID NO: 2592168 - DNA, 25 bp, Homo sapien
tgccctcttctgagagcgccaacct

SEQ ID NO: 2592169 - DNA, 25 bp, Homo sapien
catggatgtaccatgggacagctgc

SEQ ID NO: 2592170 - DNA, 25 bp, Homo sapien
ggacagctgcaaggacgggtcaggt

SEQ ID NO: 2592171 - DNA, 25 bp, Homo sapien
tgcaaggacgggtcaggtggcccat

SEQ ID NO: 2592172 - DNA, 25 bp, Homo sapien
agctcactgcccacaacacatggat

SEQ ID NO: 2592173 - DNA, 25 bp, Homo sapien
cggaacctcgctggtccccgggcag

SEQ ID NO: 2592174 - DNA, 25 bp, Homo sapien
tccaccagaaacatccggccggccc

SEQ ID NO: 2592175 - DNA, 25 bp, Homo sapien
ccgggcaggcgcccggaacctcgct

SEQ ID NO: 2592176 - DNA, 25 bp, Homo sapien
caccagaaacatccggccggcccag

SEQ ID NO: 2592177 - DNA, 25 bp, Homo sapien
gatcaacaccaagggtcggtaggcc

SEQ ID NO: 2592178 - DNA, 25 bp, Homo sapien
gtcggtaggccgtcccgcagcctag

SEQ ID NO: 2592179 - DNA, 25 bp, Homo sapien
tggcaccaggcggttccaggacctg

SEQ ID NO: 2592180 - DNA, 25 bp, Homo sapien
tggttccccgtgacacaaggatcaa

SEQ ID NO: 2592181 - DNA, 25 bp, Homo sapien
aaaggcggcgggtggtgagcacagc

SEQ ID NO: 2592182 - DNA, 25 bp, Homo sapien
tgaggccgaacctgaccacgggttc

SEQ ID NO: 2592183 - DNA, 25 bp, Homo sapien
gggatggccagtttcccacggcttg

SEQ ID NO: 2592184 - DNA, 25 bp, Homo sapien
acggcttgtcgtgaaaatgggaaag

SEQ ID NO: 2592185 - DNA, 25 bp, Homo sapien
tatttttggatatgacgagactgct

SEQ ID NO: 2592186 - DNA, 25 bp, Homo sapien
taaaaagccccttgggatgactgga

SEQ ID NO: 2592187 - DNA, 25 bp, Homo sapien
actgctttgaggaatcgaggttcgc

SEQ ID NO: 2592188 - DNA, 25 bp, Homo sapien
caaggcttggactgggatgacgtat

SEQ ID NO: 2592189 - DNA, 25 bp, Homo sapien
ggcgcggaaccttggcccgaccgca

SEQ ID NO: 2592190 - DNA, 25 bp, Homo sapien
ccgctggcccggagggctttatccg

SEQ ID NO: 2592191 - DNA, 25 bp, Homo sapien
gcgcggaaccttggcccgaccgcag

SEQ ID NO: 2592192 - DNA, 25 bp, Homo sapien
cagccgctggcccggagggctttat

SEQ ID NO: 2592193 - DNA, 25 bp, Homo sapien
agcctggagacaccacgagtcctgg

SEQ ID NO: 2592194 - DNA, 25 bp, Homo sapien
ggacccctgtgcctccgtggtcttg

SEQ ID NO: 2592195 - DNA, 25 bp, Homo sapien
agaaaggcacctacggccctggaag

SEQ ID NO: 2592196 - DNA, 25 bp, Homo sapien
catctgctcagacaacagcagggag

SEQ ID NO: 2592197 - DNA, 25 bp, Homo sapien
gtgtccagccaatgtccacaccgcc

SEQ ID NO: 2592198 - DNA, 25 bp, Homo sapien
actgagccggcgcatcggccgggat

SEQ ID NO: 2592199 - DNA, 25 bp, Homo sapien
ctttggccacccagacgccgtagct

SEQ ID NO: 2592200 - DNA, 25 bp, Homo sapien
ccgtagctctctgcccgccactgag

SEQ ID NO: 2592201 - DNA, 25 bp, Homo sapien
gaggcacagtagtcccgcagccagc

SEQ ID NO: 2592202 - DNA, 25 bp, Homo sapien
gctttcggaactcgaggctgggcca

SEQ ID NO: 2592203 - DNA, 25 bp, Homo sapien
gctgaacccgtagccctcgtgcagg

SEQ ID NO: 2592204 - DNA, 25 bp, Homo sapien
aacccgtagccctcgtgcaggaggg

SEQ ID NO: 2592205 - DNA, 25 bp, Homo sapien
tgcagccagggagcccagggcccac

SEQ ID NO: 2592206 - DNA, 25 bp, Homo sapien
cagggaccctcgctgcagccaggga

SEQ ID NO: 2592207 - DNA, 25 bp, Homo sapien
cctcagggaccctcgctgcagccag

SEQ ID NO: 2592208 - DNA, 25 bp, Homo sapien
ctgcagccagggagcccagggccca

SEQ ID NO: 2592209 - DNA, 25 bp, Homo sapien
ggcgttgaccgtgctcaggggctgc

SEQ ID NO: 2592210 - DNA, 25 bp, Homo sapien
tggcgttgaccgtgctcaggggctg

SEQ ID NO: 2592211 - DNA, 25 bp, Homo sapien
gtggcgttgaccgtgctcaggggct

SEQ ID NO: 2592212 - DNA, 25 bp, Homo sapien
atggtggcgttgaccgtgctcaggg

SEQ ID NO: 2592213 - DNA, 25 bp, Homo sapien
aggtgtagtagaagttggagaaggc

SEQ ID NO: 2592214 - DNA, 25 bp, Homo sapien
gaaggtgtagtagaagttggagaag

SEQ ID NO: 2592215 - DNA, 25 bp, Homo sapien
tcaggaagtggaaggtgtagtagaa

SEQ ID NO: 2592216 - DNA, 25 bp, Homo sapien
gtggaaggtgtagtagaagttggag

SEQ ID NO: 2592217 - DNA, 25 bp, Homo sapien
ctggtgggggcagtgtaggtgctca

SEQ ID NO: 2592218 - DNA, 25 bp, Homo sapien
tggtgggggcagtgtaggtgctcac

SEQ ID NO: 2592219 - DNA, 25 bp, Homo sapien
cccctggtgggggcagtgtaggtgc

SEQ ID NO: 2592220 - DNA, 25 bp, Homo sapien
cggacccctggtgggggcagtgtag

SEQ ID NO: 2592221 - DNA, 25 bp, Homo sapien
acacagggtgactcatacagcgggc

SEQ ID NO: 2592222 - DNA, 25 bp, Homo sapien
cacagggtgactcatacagcgggcc

SEQ ID NO: 2592223 - DNA, 25 bp, Homo sapien
atctggtcccgtccaaagcacaggt

SEQ ID NO: 2592224 - DNA, 25 bp, Homo sapien
tggtcccgtccaaagcacaggtagc

SEQ ID NO: 2592225 - DNA, 25 bp, Homo sapien
tgctcagcatctggtcccgtccaaa

SEQ ID NO: 2592226 - DNA, 25 bp, Homo sapien
agcatctggtcccgtccaaagcaca

SEQ ID NO: 2592227 - DNA, 25 bp, Homo sapien
agccgtagaggcgaaaatcggcctg

SEQ ID NO: 2592228 - DNA, 25 bp, Homo sapien
gctgtagtcggagccgtagaggcga

SEQ ID NO: 2592229 - DNA, 25 bp, Homo sapien
gcctgggtgctcttgtccaagatgg

SEQ ID NO: 2592230 - DNA, 25 bp, Homo sapien
ggcccccaggcacgaacgtgatctg

SEQ ID NO: 2592231 - DNA, 25 bp, Homo sapien
gacaccagcccctcgcagaccagcc

SEQ ID NO: 2592232 - DNA, 25 bp, Homo sapien
caagccgtagttgacagtgatccaa

SEQ ID NO: 2592233 - DNA, 25 bp, Homo sapien
gtgatccaaccaaaggcaccttcgg

SEQ ID NO: 2592234 - DNA, 25 bp, Homo sapien
cgtccccaagccgtagttgacagtg

SEQ ID NO: 2592235 - DNA, 25 bp, Homo sapien
aggagctcggcaccccaaaagtcca

SEQ ID NO: 2592236 - DNA, 25 bp, Homo sapien
ggtgccaaggccatgcctgcctcac

SEQ ID NO: 2592237 - DNA, 25 bp, Homo sapien
tgcagccactccccgtgggtgccaa

SEQ ID NO: 2592238 - DNA, 25 bp, Homo sapien
ctgcagccactccccgtgggtgcca

SEQ ID NO: 2592239 - DNA, 25 bp, Homo sapien
ccaggaacgtgggtgttttccgatg

SEQ ID NO: 2592240 - DNA, 25 bp, Homo sapien
accagcctgtgcagcattagaagtg

SEQ ID NO: 2592241 - DNA, 25 bp, Homo sapien
ggtgttttccgatgctgggcctctg

SEQ ID NO: 2592242 - DNA, 25 bp, Homo sapien
gagcaacctcatgccagccgtggcc

SEQ ID NO: 2592243 - DNA, 25 bp, Homo sapien
tgttcgccagccactgatacaggaa

SEQ ID NO: 2592244 - DNA, 25 bp, Homo sapien
tggctgaccacacccgtgccattct

SEQ ID NO: 2592245 - DNA, 25 bp, Homo sapien
gggaggagcccgcatcaaacacgat

SEQ ID NO: 2592246 - DNA, 25 bp, Homo sapien
acccgtgccattctccttgttcgcc

SEQ ID NO: 2592247 - DNA, 25 bp, Homo sapien
ggagcacgctggtggcctccaccag

SEQ ID NO: 2592248 - DNA, 25 bp, Homo sapien
caggaggagaatgagtgccgtgagg

SEQ ID NO: 2592249 - DNA, 25 bp, Homo sapien
atgagtgccgtgaggcctgagaccc

SEQ ID NO: 2592250 - DNA, 25 bp, Homo sapien
gagcacgctggtggcctccaccagg

SEQ ID NO: 2592251 - DNA, 25 bp, Homo sapien
catagaggcatccccggggctcaga

SEQ ID NO: 2592252 - DNA, 25 bp, Homo sapien
atagaggcatccccggggctcagac

SEQ ID NO: 2592253 - DNA, 25 bp, Homo sapien
agacggtctcccgtggccatagagg

SEQ ID NO: 2592254 - DNA, 25 bp, Homo sapien
gcctcccgtggccatagaggcatct

SEQ ID NO: 2592255 - DNA, 25 bp, Homo sapien
agccacgcctgccaggggtgccatg

SEQ ID NO: 2592256 - DNA, 25 bp, Homo sapien
ccgtggccttagaggcatctccggg

SEQ ID NO: 2592257 - DNA, 25 bp, Homo sapien
ctgggcacgtggaaagtgggacacg

SEQ ID NO: 2592258 - DNA, 25 bp, Homo sapien
ggcacgtggaaagtgggacacgctg

SEQ ID NO: 2592259 - DNA, 25 bp, Homo sapien
cgtggaaagtgggacacgctgtggg

SEQ ID NO: 2592260 - DNA, 25 bp, Homo sapien
cacgtggaaagtgggacacgctgtg

SEQ ID NO: 2592261 - DNA, 25 bp, Homo sapien
aagcccattttaaggagggtagatg

SEQ ID NO: 2592262 - DNA, 25 bp, Homo sapien
ctgtatgtccgggggatataagccc

SEQ ID NO: 2592263 - DNA, 25 bp, Homo sapien
atgtccgggggatataagcccattt

SEQ ID NO: 2592264 - DNA, 25 bp, Homo sapien
gtatgtccgggggatataagcccat

SEQ ID NO: 2592265 - DNA, 25 bp, Homo sapien
cggagcggcaaggaggaagctgtgc

SEQ ID NO: 2592266 - DNA, 25 bp, Homo sapien
cacttcccggagcggcaaggaggaa

SEQ ID NO: 2592267 - DNA, 25 bp, Homo sapien
gacgcttctgtgtccgcgcacctgg

SEQ ID NO: 2592268 - DNA, 25 bp, Homo sapien
agctgtgcttagacgcttctgtgtc

SEQ ID NO: 2592269 - DNA, 25 bp, Homo sapien
cggcccgggcaggtcggagtcaggt

SEQ ID NO: 2592270 - DNA, 25 bp, Homo sapien
ggagtcaggtgaccccgaaggtcca

SEQ ID NO: 2592271 - DNA, 25 bp, Homo sapien
ctcgggcgatgcgctgtgcacctgg

SEQ ID NO: 2592272 - DNA, 25 bp, Homo sapien
gggcagggcggtgacagcctcgggc

SEQ ID NO: 2592273 - DNA, 25 bp, Homo sapien
tgctgaagtcagttgtctgggtgag

SEQ ID NO: 2592274 - DNA, 25 bp, Homo sapien
tgacagagcgcacagagacgtggga

SEQ ID NO: 2592275 - DNA, 25 bp, Homo sapien
tagagacagatattcgggcgccccc

SEQ ID NO: 2592276 - DNA, 25 bp, Homo sapien
cactcacaggcacgcctgagggttg

SEQ ID NO: 2592277 - DNA, 25 bp, Homo sapien
gaggcaatgctaacagcaagggtgt

SEQ ID NO: 2592278 - DNA, 25 bp, Homo sapien
agcaagggtgtgaccgccacagctc

SEQ ID NO: 2592279 - DNA, 25 bp, Homo sapien
acagcaagggtgtgaccgccacagc

SEQ ID NO: 2592280 - DNA, 25 bp, Homo sapien
cccacagaggcaatgctaacagcaa

SEQ ID NO: 2592281 - DNA, 25 bp, Homo sapien
caataagcctcgtgagcatcggatc

SEQ ID NO: 2592282 - DNA, 25 bp, Homo sapien
ccaggtagtcacgagagtgcatcca

SEQ ID NO: 2592283 - DNA, 25 bp, Homo sapien
aaaagccattgtgcgatcgggccac

SEQ ID NO: 2592284 - DNA, 25 bp, Homo sapien
catcgatgtgaagcgtgacccagtc

SEQ ID NO: 2592285 - DNA, 25 bp, Homo sapien
tgcagcaaagtagccgaggttgccc

SEQ ID NO: 2592286 - DNA, 25 bp, Homo sapien
ggtctcagagctcaggtgacggaca

SEQ ID NO: 2592287 - DNA, 25 bp, Homo sapien
caggagccacctgacgggttaggac

SEQ ID NO: 2592288 - DNA, 25 bp, Homo sapien
cctactttgaagagtgccacccttg

SEQ ID NO: 2592289 - DNA, 25 bp, Homo sapien
tgtggcgtgagggacatacagccct

SEQ ID NO: 2592290 - DNA, 25 bp, Homo sapien
gggtggtctagtggcctagctccaa

SEQ ID NO: 2592291 - DNA, 25 bp, Homo sapien
tgactgcacacacagtgtggcgtga

SEQ ID NO: 2592292 - DNA, 25 bp, Homo sapien
tgaccctagcccagctgatacgtgc

SEQ ID NO: 2592293 - DNA, 25 bp, Homo sapien
ggatcaggtttaatggtcactatga

SEQ ID NO: 2592294 - DNA, 25 bp, Homo sapien
gtatcgtacatcgttccaagcccgg

SEQ ID NO: 2592295 - DNA, 25 bp, Homo sapien
gggtatcgtacatcgttccaagccc

SEQ ID NO: 2592296 - DNA, 25 bp, Homo sapien
tcgccccagctatatacacgacagc

SEQ ID NO: 2592297 - DNA, 25 bp, Homo sapien
tatatacacgacagcccatcctgct

SEQ ID NO: 2592298 - DNA, 25 bp, Homo sapien
tatttctatgaaccccatggaggga

SEQ ID NO: 2592299 - DNA, 25 bp, Homo sapien
tgagcaacgtctgaggtgccctgaa

SEQ ID NO: 2592300 - DNA, 25 bp, Homo sapien
gagactcggccagtgtagacagacc

SEQ ID NO: 2592301 - DNA, 25 bp, Homo sapien
cactgtggtgccagcgagtttctca

SEQ ID NO: 2592302 - DNA, 25 bp, Homo sapien
cgatacaaccggaagtcaaagtacg

SEQ ID NO: 2592303 - DNA, 25 bp, Homo sapien
agcagcttcgagtgctggcggctct

SEQ ID NO: 2592304 - DNA, 25 bp, Homo sapien
aaagtccagcagcttcgagtgctgg

SEQ ID NO: 2592305 - DNA, 25 bp, Homo sapien
tcttccacaggcgatacaaccggaa

SEQ ID NO: 2592306 - DNA, 25 bp, Homo sapien
tcgaaggtgaccctataaggagtca

SEQ ID NO: 2592307 - DNA, 25 bp, Homo sapien
tataaggagtcatgagggtcctgag

SEQ ID NO: 2592308 - DNA, 25 bp, Homo sapien
gactcgaaggtgaccctataaggag

SEQ ID NO: 2592309 - DNA, 25 bp, Homo sapien
ggtgaccctataaggagtcatgagg

SEQ ID NO: 2592310 - DNA, 25 bp, Homo sapien
gatgacgttcggctctgggttcact

SEQ ID NO: 2592311 - DNA, 25 bp, Homo sapien
gttcactttgctcatcaggcggctc

SEQ ID NO: 2592312 - DNA, 25 bp, Homo sapien
ccagaatgtagcagcccatgatgtg

SEQ ID NO: 2592313 - DNA, 25 bp, Homo sapien
tgggttcactttgctcatcaggcgg

SEQ ID NO: 2592314 - DNA, 25 bp, Homo sapien
cccactccacagagcggaccgtgga

SEQ ID NO: 2592315 - DNA, 25 bp, Homo sapien
ccactccacagagcggaccgtggag

SEQ ID NO: 2592316 - DNA, 25 bp, Homo sapien
ccccactccacagagcggaccgtgg

SEQ ID NO: 2592317 - DNA, 25 bp, Homo sapien
tccactttggcaaaggtggccacct

SEQ ID NO: 2592318 - DNA, 25 bp, Homo sapien
cttctccactttggcaaaggtggcc

SEQ ID NO: 2592319 - DNA, 25 bp, Homo sapien
ctttggcaaaggtggccaccttgtt

SEQ ID NO: 2592320 - DNA, 25 bp, Homo sapien
cactttggcaaaggtggccaccttg

SEQ ID NO: 2592321 - DNA, 25 bp, Homo sapien
aggagatagaggtgtccaggacctc

SEQ ID NO: 2592322 - DNA, 25 bp, Homo sapien
ggagatagaggtgtccaggacctcc

SEQ ID NO: 2592323 - DNA, 25 bp, Homo sapien
cttgaggagatagaggtgtccagga

SEQ ID NO: 2592324 - DNA, 25 bp, Homo sapien
tgaggagatagaggtgtccaggacc

SEQ ID NO: 2592325 - DNA, 25 bp, Homo sapien
ggtagacgttcagcttcctctctat

SEQ ID NO: 2592326 - DNA, 25 bp, Homo sapien
tcccttgtggtagacgttcagcttc

SEQ ID NO: 2592327 - DNA, 25 bp, Homo sapien
cttggctcccttgtggtagacgttc

SEQ ID NO: 2592328 - DNA, 25 bp, Homo sapien
tgtggtagacgttcagcttcctctc

SEQ ID NO: 2592329 - DNA, 25 bp, Homo sapien
agagagaaggccaatgaggcacata

SEQ ID NO: 2592330 - DNA, 25 bp, Homo sapien
cagagagaaggccaatgaggcacat

SEQ ID NO: 2592331 - DNA, 25 bp, Homo sapien
gagagaaggccaatgaggcacatac

SEQ ID NO: 2592332 - DNA, 25 bp, Homo sapien
tcctcgaaggttgcgtgctcatggt

SEQ ID NO: 2592333 - DNA, 25 bp, Homo sapien
caaggatgtcctcgaaggttgcgtg

SEQ ID NO: 2592334 - DNA, 25 bp, Homo sapien
aaggatgtcctcgaaggttgcgtgc

SEQ ID NO: 2592335 - DNA, 25 bp, Homo sapien
gatgtcctcgaaggttgcgtgctca

SEQ ID NO: 2592336 - DNA, 25 bp, Homo sapien
catcaaggctgcgtcagagccagca

SEQ ID NO: 2592337 - DNA, 25 bp, Homo sapien
ccacatcaaggctgcgtcagagcca

SEQ ID NO: 2592338 - DNA, 25 bp, Homo sapien
ggccacatcaaggctgcgtcagagc

SEQ ID NO: 2592339 - DNA, 25 bp, Homo sapien
cacatcaaggctgcgtcagagccag

SEQ ID NO: 2592340 - DNA, 25 bp, Homo sapien
gggccgcaagagggcatctgttggg

SEQ ID NO: 2592341 - DNA, 25 bp, Homo sapien
tggggccgcaagagggcatctgttg

SEQ ID NO: 2592342 - DNA, 25 bp, Homo sapien
ccgcaagagggcatctgttgggggc

SEQ ID NO: 2592343 - DNA, 25 bp, Homo sapien
gccgcaagagggcatctgttggggg

SEQ ID NO: 2592344 - DNA, 25 bp, Homo sapien
ggtcatcccggcggatgatagtggg

SEQ ID NO: 2592345 - DNA, 25 bp, Homo sapien
gatggaggggtcatcccggcggatg

SEQ ID NO: 2592346 - DNA, 25 bp, Homo sapien
gatgatagtggggatgtactcagcc

SEQ ID NO: 2592347 - DNA, 25 bp, Homo sapien
tggggatgtactcagccttgggcac

SEQ ID NO: 2592348 - DNA, 25 bp, Homo sapien
tgctcggggtgtagaggagcactgc

SEQ ID NO: 2592349 - DNA, 25 bp, Homo sapien
cgggttggggcggagtcctgctcgg

SEQ ID NO: 2592350 - DNA, 25 bp, Homo sapien
tagaggagcactgcccgggctgggc

SEQ ID NO: 2592351 - DNA, 25 bp, Homo sapien
gcccatccaaaagccaaggggctgt

SEQ ID NO: 2592352 - DNA, 25 bp, Homo sapien
ctttggtggcacgaagccttcggtg

SEQ ID NO: 2592353 - DNA, 25 bp, Homo sapien
tcgaaggcctcgtccagcgtgcagt

SEQ ID NO: 2592354 - DNA, 25 bp, Homo sapien
aagccttcggtgtcgcaggccacag

SEQ ID NO: 2592355 - DNA, 25 bp, Homo sapien
catgacctttggtggcacgaagcct

SEQ ID NO: 2592356 - DNA, 25 bp, Homo sapien
tgttagccccgcctttgcgatcgga

SEQ ID NO: 2592357 - DNA, 25 bp, Homo sapien
atcggagatgctgagggcgtcccca

SEQ ID NO: 2592358 - DNA, 25 bp, Homo sapien
agcactgccgcggccgttgttagcc

SEQ ID NO: 2592359 - DNA, 25 bp, Homo sapien
ttcaggagtgcaaaagcgcagccca

SEQ ID NO: 2592360 - DNA, 25 bp, Homo sapien
caggaccggctgaagctccgctcgc

SEQ ID NO: 2592361 - DNA, 25 bp, Homo sapien
cgtgggaagtgtcggctttcatggg

SEQ ID NO: 2592362 - DNA, 25 bp, Homo sapien
ctccgctcgcgccgctcagcgaacg

SEQ ID NO: 2592363 - DNA, 25 bp, Homo sapien
gtcgtgggaagtgtcggctttcatg

SEQ ID NO: 2592364 - DNA, 25 bp, Homo sapien
tccggctgccgaccatgcgcaggtg

SEQ ID NO: 2592365 - DNA, 25 bp, Homo sapien
gctgccgaccatgcgcaggtgtttg

SEQ ID NO: 2592366 - DNA, 25 bp, Homo sapien
cgaccatgcgcaggtgtttgcggaa

SEQ ID NO: 2592367 - DNA, 25 bp, Homo sapien
catgcgcaggtgtttgcggaagttc

SEQ ID NO: 2592368 - DNA, 25 bp, Homo sapien
agaggatccagcctgcctgcgctgc

SEQ ID NO: 2592369 - DNA, 25 bp, Homo sapien
agagacacgtgccctcggagtgcag

SEQ ID NO: 2592370 - DNA, 25 bp, Homo sapien
caaggcccaacatccaaaacgggca

SEQ ID NO: 2592371 - DNA, 25 bp, Homo sapien
caccaaactttggaccctgccaagg

SEQ ID NO: 2592372 - DNA, 25 bp, Homo sapien
attacagacgcggaatcattctccc

SEQ ID NO: 2592373 - DNA, 25 bp, Homo sapien
ctctggattacagacgcggaatcat

SEQ ID NO: 2592374 - DNA, 25 bp, Homo sapien
cattctcccgtttccggcgcttcct

SEQ ID NO: 2592375 - DNA, 25 bp, Homo sapien
cagacgcggaatcattctcccgttt

SEQ ID NO: 2592376 - DNA, 25 bp, Homo sapien
tgggaaaccaccgcgagtcagcact

SEQ ID NO: 2592377 - DNA, 25 bp, Homo sapien
ctgggaaaccaccgcgagtcagcac

SEQ ID NO: 2592378 - DNA, 25 bp, Homo sapien
ggagggacacagacgtcgggacagt

SEQ ID NO: 2592379 - DNA, 25 bp, Homo sapien
ggacacagacgtcgggacagtggtg

SEQ ID NO: 2592380 - DNA, 25 bp, Homo sapien
gggcacggggcccggcagaggagtc

SEQ ID NO: 2592381 - DNA, 25 bp, Homo sapien
ctggggcacggggcccggcagagga

SEQ ID NO: 2592382 - DNA, 25 bp, Homo sapien
cacggggcccggcagaggagtccca

SEQ ID NO: 2592383 - DNA, 25 bp, Homo sapien
ggcacggggcccggcagaggagtcc

SEQ ID NO: 2592384 - DNA, 25 bp, Homo sapien
agagagcggcactccctcaagaccc

SEQ ID NO: 2592385 - DNA, 25 bp, Homo sapien
gccctgctgcgacctcggtgcccgc

SEQ ID NO: 2592386 - DNA, 25 bp, Homo sapien
gagagcggcactccctcaagaccca

SEQ ID NO: 2592387 - DNA, 25 bp, Homo sapien
tgcgacctcggtgcccgctgggagc

SEQ ID NO: 2592388 - DNA, 25 bp, Homo sapien
ggcaccaagtcatacaggtacttac

SEQ ID NO: 2592389 - DNA, 25 bp, Homo sapien
acagctgtgcccttaggcaccaagt

SEQ ID NO: 2592390 - DNA, 25 bp, Homo sapien
ttaggcaccaagtcatacaggtact

SEQ ID NO: 2592391 - DNA, 25 bp, Homo sapien
tgcccttaggcaccaagtcatacag

SEQ ID NO: 2592392 - DNA, 25 bp, Homo sapien
cacagtgagctcaaccccgggcctc

SEQ ID NO: 2592393 - DNA, 25 bp, Homo sapien
agggatggcgtgagagagaagacac

SEQ ID NO: 2592394 - DNA, 25 bp, Homo sapien
agggccagaagggatggcgtgagag

SEQ ID NO: 2592395 - DNA, 25 bp, Homo sapien
ctacagttcccttcttgtcactgac

SEQ ID NO: 2592396 - DNA, 25 bp, Homo sapien
aataggtccctcacaggtaacccag

SEQ ID NO: 2592397 - DNA, 25 bp, Homo sapien
caataggtccctcacaggtaaccca

SEQ ID NO: 2592398 - DNA, 25 bp, Homo sapien
ataggtccctcacaggtaacccagc

SEQ ID NO: 2592399 - DNA, 25 bp, Homo sapien
ggaaccaggtacgaatagggatgtc

SEQ ID NO: 2592400 - DNA, 25 bp, Homo sapien
aaccaggtacgaatagggatgtcgt

SEQ ID NO: 2592401 - DNA, 25 bp, Homo sapien
gaaccaggtacgaatagggatgtcg

SEQ ID NO: 2592402 - DNA, 25 bp, Homo sapien
gaagcctgccggttttaatcttgag

SEQ ID NO: 2592403 - DNA, 25 bp, Homo sapien
tcttgagtccgctggcatgctgtga

SEQ ID NO: 2592404 - DNA, 25 bp, Homo sapien
catgctgtgacctgagcacctgttc

SEQ ID NO: 2592405 - DNA, 25 bp, Homo sapien
gagctcacagctcatagggtgtgga

SEQ ID NO: 2592406 - DNA, 25 bp, Homo sapien
cagacacacggtcaacgctgtacat

SEQ ID NO: 2592407 - DNA, 25 bp, Homo sapien
ggcactccttggagccctggcggct

SEQ ID NO: 2592408 - DNA, 25 bp, Homo sapien
ccagagatggtgtacactcgaggct

SEQ ID NO: 2592409 - DNA, 25 bp, Homo sapien
cttcttgcggcgaccggaggtctca

SEQ ID NO: 2592410 - DNA, 25 bp, Homo sapien
tgccctcgtagcagccgttggagac

SEQ ID NO: 2592411 - DNA, 25 bp, Homo sapien
gtggccagagtaggcatcagccagc

SEQ ID NO: 2592412 - DNA, 25 bp, Homo sapien
ttgcctggtgccaacttccccctcc

SEQ ID NO: 2592413 - DNA, 25 bp, Homo sapien
tttgcctggtgccaacttccccctc

SEQ ID NO: 2592414 - DNA, 25 bp, Homo sapien
ctggcacggcctcgcgtgcccctac

SEQ ID NO: 2592415 - DNA, 25 bp, Homo sapien
tggggggtctgggcggccctggcac

SEQ ID NO: 2592416 - DNA, 25 bp, Homo sapien
ggtctgggcggccctggcacggcct

SEQ ID NO: 2592417 - DNA, 25 bp, Homo sapien
tcagcatcccttgggctggggggtc

SEQ ID NO: 2592418 - DNA, 25 bp, Homo sapien
cgttgcggttctcagggtgactctg

SEQ ID NO: 2592419 - DNA, 25 bp, Homo sapien
ggtactctccaaacgctcgggctgc

SEQ ID NO: 2592420 - DNA, 25 bp, Homo sapien
tgactctgggacaggtactctccaa

SEQ ID NO: 2592421 - DNA, 25 bp, Homo sapien
cgccgttgcggttctcagggtgact

SEQ ID NO: 2592422 - DNA, 25 bp, Homo sapien
cgccaccgaggacatggcctcgctc

SEQ ID NO: 2592423 - DNA, 25 bp, Homo sapien
ttggccgccaccgaggacatggcct

SEQ ID NO: 2592424 - DNA, 25 bp, Homo sapien
ccgccaccgaggacatggcctcgct

SEQ ID NO: 2592425 - DNA, 25 bp, Homo sapien
ggccgccaccgaggacatggcctcg

SEQ ID NO: 2592426 - DNA, 25 bp, Homo sapien
tcgggctcggggtctcgctcgggct

SEQ ID NO: 2592427 - DNA, 25 bp, Homo sapien
ccgcacccggcgctccgcgcgtgcc

SEQ ID NO: 2592428 - DNA, 25 bp, Homo sapien
gtagccgcgccgcaccgggggtcgc

SEQ ID NO: 2592429 - DNA, 25 bp, Homo sapien
ccggtccccgcatggccgcacccgg

SEQ ID NO: 2592430 - DNA, 25 bp, Homo sapien
tgcatccgggctctttagcagaggc

SEQ ID NO: 2592431 - DNA, 25 bp, Homo sapien
ggcaggtacagaggcccctaggact

SEQ ID NO: 2592432 - DNA, 25 bp, Homo sapien
tgaaacatcacacggcagcatcagg

SEQ ID NO: 2592433 - DNA, 25 bp, Homo sapien
agtcccacggaagacgctgcatccg

SEQ ID NO: 2592434 - DNA, 25 bp, Homo sapien
ggtgtcgatgccgcagtgaggactc

SEQ ID NO: 2592435 - DNA, 25 bp, Homo sapien
actggggtgtcgatgccgcagtgag

SEQ ID NO: 2592436 - DNA, 25 bp, Homo sapien
ggagccctcagacagttttgggaaa

SEQ ID NO: 2592437 - DNA, 25 bp, Homo sapien
acagttttgggaaagccagactggg

SEQ ID NO: 2592438 - DNA, 25 bp, Homo sapien
gcaagcagaccgcatgttccaggtg

SEQ ID NO: 2592439 - DNA, 25 bp, Homo sapien
cagggagggagtggccggcacaggg

SEQ ID NO: 2592440 - DNA, 25 bp, Homo sapien
gaccgcatgttccaggtgaggacca

SEQ ID NO: 2592441 - DNA, 25 bp, Homo sapien
ctctgcagcgctggtaacccggtgg

SEQ ID NO: 2592442 - DNA, 25 bp, Homo sapien
aggtgggaccatgcccagctcctca

SEQ ID NO: 2592443 - DNA, 25 bp, Homo sapien
tgggcaccaggtgggaccatgccca

SEQ ID NO: 2592444 - DNA, 25 bp, Homo sapien
ctgtgggcaccaggtgggaccatgc

SEQ ID NO: 2592445 - DNA, 25 bp, Homo sapien
ggtgggaccatgcccagctcctcac

SEQ ID NO: 2592446 - DNA, 25 bp, Homo sapien
tggaagtctgcgtatgcatccctgg

SEQ ID NO: 2592447 - DNA, 25 bp, Homo sapien
ggaagtctgcgtatgcatccctggg

SEQ ID NO: 2592448 - DNA, 25 bp, Homo sapien
cctcctcgtactccgtctggtagtc

SEQ ID NO: 2592449 - DNA, 25 bp, Homo sapien
tcgtactccgtctggtagtcagatt

SEQ ID NO: 2592450 - DNA, 25 bp, Homo sapien
tggcaccgagggtagggctgcgtca

SEQ ID NO: 2592451 - DNA, 25 bp, Homo sapien
gcaccgagggtagggctgcgtcagt

SEQ ID NO: 2592452 - DNA, 25 bp, Homo sapien
ctggcaccgagggtagggctgcgtc

SEQ ID NO: 2592453 - DNA, 25 bp, Homo sapien
ccgagggtagggctgcgtcagtccc

SEQ ID NO: 2592454 - DNA, 25 bp, Homo sapien
aaggaagggaccgtacccagcatag

SEQ ID NO: 2592455 - DNA, 25 bp, Homo sapien
cacatcacttcgtgggtcttccaca

SEQ ID NO: 2592456 - DNA, 25 bp, Homo sapien
ctcagaggcagaaccggccacagat

SEQ ID NO: 2592457 - DNA, 25 bp, Homo sapien
actcctccccttgtcagccaagcac

SEQ ID NO: 2592458 - DNA, 25 bp, Homo sapien
cggcagccatgaagacgtctcccag

SEQ ID NO: 2592459 - DNA, 25 bp, Homo sapien
gcccagggccctctcggcctgcggc

SEQ ID NO: 2592460 - DNA, 25 bp, Homo sapien
ggccctctcggcctgcggcagccat

SEQ ID NO: 2592461 - DNA, 25 bp, Homo sapien
ccctctcggcctgcggcagccatga

SEQ ID NO: 2592462 - DNA, 25 bp, Homo sapien
tggacccgcccttcttgtcctgcgg

SEQ ID NO: 2592463 - DNA, 25 bp, Homo sapien
ctgaaggcccaagcgcagggccctg

SEQ ID NO: 2592464 - DNA, 25 bp, Homo sapien
catggagggtagtggacccgccctt

SEQ ID NO: 2592465 - DNA, 25 bp, Homo sapien
atggagcatggagggtagtggaccc

SEQ ID NO: 2592466 - DNA, 25 bp, Homo sapien
aaacgtggttctacttcaggcctga

SEQ ID NO: 2592467 - DNA, 25 bp, Homo sapien
ggaggcaaaacgtggttctacttca

SEQ ID NO: 2592468 - DNA, 25 bp, Homo sapien
ggttctacttcaggcctgaggtgtg

SEQ ID NO: 2592469 - DNA, 25 bp, Homo sapien
ggcaaaacgtggttctacttcaggc

SEQ ID NO: 2592470 - DNA, 25 bp, Homo sapien
cacggcttcgtcttgcgcctccact

SEQ ID NO: 2592471 - DNA, 25 bp, Homo sapien
ctccacggcttcgtcttgcgcctcc

SEQ ID NO: 2592472 - DNA, 25 bp, Homo sapien
cggcttcgtcttgcgcctccactca

SEQ ID NO: 2592473 - DNA, 25 bp, Homo sapien
tccacggcttcgtcttgcgcctcca

SEQ ID NO: 2592474 - DNA, 25 bp, Homo sapien
gcttggcgggctcaatgcgagacac

SEQ ID NO: 2592475 - DNA, 25 bp, Homo sapien
gctcaatgcgagacacaatttcggc

SEQ ID NO: 2592476 - DNA, 25 bp, Homo sapien
caatttcggcaaggtccgtgaagga

SEQ ID NO: 2592477 - DNA, 25 bp, Homo sapien
aggaggcgttgggacaggtgaggac

SEQ ID NO: 2592478 - DNA, 25 bp, Homo sapien
ctgctggtcgcggagcatcttctcc

SEQ ID NO: 2592479 - DNA, 25 bp, Homo sapien
cgcactcgcgggcttcttgctcggc

SEQ ID NO: 2592480 - DNA, 25 bp, Homo sapien
gtcaaacaccgtgcgcccgtgctgg

SEQ ID NO: 2592481 - DNA, 25 bp, Homo sapien
cagatgtcaaacaccgtgcgcccgt

SEQ ID NO: 2592482 - DNA, 25 bp, Homo sapien
gcagatctcgttgaacttgccgaag

SEQ ID NO: 2592483 - DNA, 25 bp, Homo sapien
tcgcagtagtcactgctcttcacca

SEQ ID NO: 2592484 - DNA, 25 bp, Homo sapien
ccagggtgctgtagctgtcgatggg

SEQ ID NO: 2592485 - DNA, 25 bp, Homo sapien
tgaacttgccgaagtccagggtgct

SEQ ID NO: 2592486 - DNA, 25 bp, Homo sapien
ctgccgcacgcaacacacgtaggcc

SEQ ID NO: 2592487 - DNA, 25 bp, Homo sapien
ggccaggcgcgtctgaatctctgcc

SEQ ID NO: 2592488 - DNA, 25 bp, Homo sapien
acgtaggccaggcgcgtctgaatct

SEQ ID NO: 2592489 - DNA, 25 bp, Homo sapien
cgcacgcaacacacgtaggccaggc

SEQ ID NO: 2592490 - DNA, 25 bp, Homo sapien
tggcccgtggcgcaggacaggttct

SEQ ID NO: 2592491 - DNA, 25 bp, Homo sapien
agcctggcccgtggcgcaggacagg

SEQ ID NO: 2592492 - DNA, 25 bp, Homo sapien
cccagcctggcccgtggcgcaggac

SEQ ID NO: 2592493 - DNA, 25 bp, Homo sapien
ggcccgtggcgcaggacaggttctg

SEQ ID NO: 2592494 - DNA, 25 bp, Homo sapien
cgtcaatggcgatcaccacttttgc

SEQ ID NO: 2592495 - DNA, 25 bp, Homo sapien
cagacagcgcatccccatagttggt

SEQ ID NO: 2592496 - DNA, 25 bp, Homo sapien
gaggtccgtctcatctcggctgccc

SEQ ID NO: 2592497 - DNA, 25 bp, Homo sapien
ctttcgtggccaaggggttccagcg

SEQ ID NO: 2592498 - DNA, 25 bp, Homo sapien
tagggagaagccagccctggttacc

SEQ ID NO: 2592499 - DNA, 25 bp, Homo sapien
ctagggagaagccagccctggttac

SEQ ID NO: 2592500 - DNA, 25 bp, Homo sapien
gcatgcagagccaggggacgggggc

SEQ ID NO: 2592501 - DNA, 25 bp, Homo sapien
caggcatgcagagccaggggacggg

SEQ ID NO: 2592502 - DNA, 25 bp, Homo sapien
tggacaggcatgcagagccagggga

SEQ ID NO: 2592503 - DNA, 25 bp, Homo sapien
ctggacaggcatgcagagccagggg

SEQ ID NO: 2592504 - DNA, 25 bp, Homo sapien
cacgcgtgtgcatgttctcggagct

SEQ ID NO: 2592505 - DNA, 25 bp, Homo sapien
tggagcacatgctgccggtgcctgc

SEQ ID NO: 2592506 - DNA, 25 bp, Homo sapien
taattgctcccagttcctcgacttg

SEQ ID NO: 2592507 - DNA, 25 bp, Homo sapien
aggaaaacgtgttccagcccaggct

SEQ ID NO: 2592508 - DNA, 25 bp, Homo sapien
gtccatcagcaggtgtccgtccttc

SEQ ID NO: 2592509 - DNA, 25 bp, Homo sapien
gtgtccgtccttcgggtcacagaga

SEQ ID NO: 2592510 - DNA, 25 bp, Homo sapien
gcaggtgtccgtccttcgggtcaca

SEQ ID NO: 2592511 - DNA, 25 bp, Homo sapien
ggttgttgatgtagcccccgtccat

SEQ ID NO: 2592512 - DNA, 25 bp, Homo sapien
gtggtgatggcgaaataaggaatcc

SEQ ID NO: 2592513 - DNA, 25 bp, Homo sapien
gtcggtggtgatggcgaaataagga

SEQ ID NO: 2592514 - DNA, 25 bp, Homo sapien
cgtcggtgtggacccgcatggccga

SEQ ID NO: 2592515 - DNA, 25 bp, Homo sapien
tgtggacccgcatggccgaggctgt

SEQ ID NO: 2592516 - DNA, 25 bp, Homo sapien
tctcccatcacgctcctgtcctgtg

SEQ ID NO: 2592517 - DNA, 25 bp, Homo sapien
gccctctcccatcacgctcctgtcc

SEQ ID NO: 2592518 - DNA, 25 bp, Homo sapien
ctgcgggcggacggggctcagatgg

SEQ ID NO: 2592519 - DNA, 25 bp, Homo sapien
ggacggggctcagatgggccctctc

SEQ ID NO: 2592520 - DNA, 25 bp, Homo sapien
tgttgaagccggctccggagaacat

SEQ ID NO: 2592521 - DNA, 25 bp, Homo sapien
ccggctccggagaacatggacgtga

SEQ ID NO: 2592522 - DNA, 25 bp, Homo sapien
taggtgaggtccagcgcggccttca

SEQ ID NO: 2592523 - DNA, 25 bp, Homo sapien
cggccttcatcaaggacgtcatgcc

SEQ ID NO: 2592524 - DNA, 25 bp, Homo sapien
gtggaatttacagaaggcttccacc

SEQ ID NO: 2592525 - DNA, 25 bp, Homo sapien
acggtcctgaggcttggcgccctgg

SEQ ID NO: 2592526 - DNA, 25 bp, Homo sapien
gggtccagagtgtccttgggcccca

SEQ ID NO: 2592527 - DNA, 25 bp, Homo sapien
ttcctgatccctaagccctcgctgg

SEQ ID NO: 2592528 - DNA, 25 bp, Homo sapien
acacgtggcgtgctgagggcctctc

SEQ ID NO: 2592529 - DNA, 25 bp, Homo sapien
cccggatccgcatctggctgtagtt

SEQ ID NO: 2592530 - DNA, 25 bp, Homo sapien
tgtagttccgctcctcagagtacag

SEQ ID NO: 2592531 - DNA, 25 bp, Homo sapien
gcactccgccaaggccttgagaacg

SEQ ID NO: 2592532 - DNA, 25 bp, Homo sapien
acgaaggccccgatggacgtgcctc

SEQ ID NO: 2592533 - DNA, 25 bp, Homo sapien
aggctgcgccctgcagaggccttgt

SEQ ID NO: 2592534 - DNA, 25 bp, Homo sapien
caggcccaggctgcgccctgcagag

SEQ ID NO: 2592535 - DNA, 25 bp, Homo sapien
ccaggctgcgccctgcagaggcctt

SEQ ID NO: 2592536 - DNA, 25 bp, Homo sapien
gcccaggctgcgccctgcagaggcc

SEQ ID NO: 2592537 - DNA, 25 bp, Homo sapien
agtcatatgagaagaaaagcctcat

SEQ ID NO: 2592538 - DNA, 25 bp, Homo sapien
cagtcatatgagaagaaaagcctca

SEQ ID NO: 2592539 - DNA, 25 bp, Homo sapien
acacaggccgccaggactcgtggtg

SEQ ID NO: 2592540 - DNA, 25 bp, Homo sapien
gccgtaggtgcctttctgcacacag

SEQ ID NO: 2592541 - DNA, 25 bp, Homo sapien
cagggcaccgtcagggtggtgctgg

SEQ ID NO: 2592542 - DNA, 25 bp, Homo sapien
tccttccgcaactgggcttccaggg

SEQ ID NO: 2592543 - DNA, 25 bp, Homo sapien
gttgcggccccttcttggcgggcca

SEQ ID NO: 2592544 - DNA, 25 bp, Homo sapien
tgcgggttgcggccccttcttggcg

SEQ ID NO: 2592545 - DNA, 25 bp, Homo sapien
tgcggccccttcttggcgggccaga

SEQ ID NO: 2592546 - DNA, 25 bp, Homo sapien
cgtggtgcgggttgcggccccttct

SEQ ID NO: 2592547 - DNA, 25 bp, Homo sapien
ggcgttgaccgtgctcaggggctgc

SEQ ID NO: 2592548 - DNA, 25 bp, Homo sapien
gtggcgttgaccgtgctcaggggct

SEQ ID NO: 2592549 - DNA, 25 bp, Homo sapien
tggcgttgaccgtgctcaggggctg

SEQ ID NO: 2592550 - DNA, 25 bp, Homo sapien
atggtggcgttgaccgtgctcaggg

SEQ ID NO: 2592551 - DNA, 25 bp, Homo sapien
aggtgtagtagaagttggagaaggc

SEQ ID NO: 2592552 - DNA, 25 bp, Homo sapien
gtggaaggtgtagtagaagttggag

SEQ ID NO: 2592553 - DNA, 25 bp, Homo sapien
gaaggtgtagtagaagttggagaag

SEQ ID NO: 2592554 - DNA, 25 bp, Homo sapien
tcaggaagtggaaggtgtagtagaa

SEQ ID NO: 2592555 - DNA, 25 bp, Homo sapien
tgtggccacgctgggccagatccac

SEQ ID NO: 2592556 - DNA, 25 bp, Homo sapien
ctgtggccacgctgggccagatcca

SEQ ID NO: 2592557 - DNA, 25 bp, Homo sapien
ctggtgggggcagtgtaggtgctca

SEQ ID NO: 2592558 - DNA, 25 bp, Homo sapien
tggtgggggcagtgtaggtgctcac

SEQ ID NO: 2592559 - DNA, 25 bp, Homo sapien
cccctggtgggggcagtgtaggtgc

SEQ ID NO: 2592560 - DNA, 25 bp, Homo sapien
cggacccctggtgggggcagtgtag

SEQ ID NO: 2592561 - DNA, 25 bp, Homo sapien
gtagaccccgtcaaaggcgcagtcc

SEQ ID NO: 2592562 - DNA, 25 bp, Homo sapien
ggtagaccccgtcaaaggcgcagtc

SEQ ID NO: 2592563 - DNA, 25 bp, Homo sapien
tggtagaccccgtcaaaggcgcagt

SEQ ID NO: 2592564 - DNA, 25 bp, Homo sapien
tagaccccgtcaaaggcgcagtcct

SEQ ID NO: 2592565 - DNA, 25 bp, Homo sapien
ctgtgaggttatgggggaggctcag

SEQ ID NO: 2592566 - DNA, 25 bp, Homo sapien
ggctcagcgggggtgtggcgtggac

SEQ ID NO: 2592567 - DNA, 25 bp, Homo sapien
tgtggcgtggacacagggtgactca

SEQ ID NO: 2592568 - DNA, 25 bp, Homo sapien
gggtgtggcgtggacacagggtgac

SEQ ID NO: 2592569 - DNA, 25 bp, Homo sapien
tggtagccgctgaggtagcacgggt

SEQ ID NO: 2592570 - DNA, 25 bp, Homo sapien
cgctgaggtagcacgggtgacggag

SEQ ID NO: 2592571 - DNA, 25 bp, Homo sapien
tagccgctgaggtagcacgggtgac

SEQ ID NO: 2592572 - DNA, 25 bp, Homo sapien
gtagcacgggtgacggagcagggca

SEQ ID NO: 2592573 - DNA, 25 bp, Homo sapien
cccggggccggatgacccacgccag

SEQ ID NO: 2592574 - DNA, 25 bp, Homo sapien
ggccggatgacccacgccagccccg

SEQ ID NO: 2592575 - DNA, 25 bp, Homo sapien
ccggatgacccacgccagccccgcg

SEQ ID NO: 2592576 - DNA, 25 bp, Homo sapien
ggggccggatgacccacgccagccc

SEQ ID NO: 2592577 - DNA, 25 bp, Homo sapien
gtaccagccccacgaggagcctgct

SEQ ID NO: 2592578 - DNA, 25 bp, Homo sapien
cagccccacgaggagcctgctcagc

SEQ ID NO: 2592579 - DNA, 25 bp, Homo sapien
gccccacgaggagcctgctcagcat

SEQ ID NO: 2592580 - DNA, 25 bp, Homo sapien
ctgtaccagccccacgaggagcctg

SEQ ID NO: 2592581 - DNA, 25 bp, Homo sapien
tggtcccgtccaaagcacaggtagc

SEQ ID NO: 2592582 - DNA, 25 bp, Homo sapien
tggggtccgttttgagcaaaggaga

SEQ ID NO: 2592583 - DNA, 25 bp, Homo sapien
gtccgttttgagcaaaggagacgct

SEQ ID NO: 2592584 - DNA, 25 bp, Homo sapien
ggtccgttttgagcaaaggagacgc

SEQ ID NO: 2592585 - DNA, 25 bp, Homo sapien
aggcaactggaaggtgtcatatggt

SEQ ID NO: 2592586 - DNA, 25 bp, Homo sapien
tatgaaatggttggtccaccacacc

SEQ ID NO: 2592587 - DNA, 25 bp, Homo sapien
tgattaagttcatggtacacagcca

SEQ ID NO: 2592588 - DNA, 25 bp, Homo sapien
tactacaagcaactgggaggaacca

SEQ ID NO: 2592589 - DNA, 25 bp, Homo sapien
gtctctgcaggtgtaatcccatctg

SEQ ID NO: 2592590 - DNA, 25 bp, Homo sapien
taaggatggcctttccaccgtcatc

SEQ ID NO: 2592591 - DNA, 25 bp, Homo sapien
accgtcatccaataacactcttcat

SEQ ID NO: 2592592 - DNA, 25 bp, Homo sapien
catcagaaaggcttttacctccata

SEQ ID NO: 2592593 - DNA, 25 bp, Homo sapien
cactcttcatttacgtctgagacaa

SEQ ID NO: 2592594 - DNA, 25 bp, Homo sapien
aatataggagcagaagctagtgaaa

SEQ ID NO: 2592595 - DNA, 25 bp, Homo sapien
cttataaaaagggagacatcactac

SEQ ID NO: 2592596 - DNA, 25 bp, Homo sapien
gacaaacttctggtatgactaatca

SEQ ID NO: 2592597 - DNA, 25 bp, Homo sapien
gcaaacatataaaatgaggaccaac

SEQ ID NO: 2592598 - DNA, 25 bp, Homo sapien
caagctatccatggaacagtgtgct

SEQ ID NO: 2592599 - DNA, 25 bp, Homo sapien
cagtgtgctaatgctcttcctgaag

SEQ ID NO: 2592600 - DNA, 25 bp, Homo sapien
tgaagaatacactggagagtagact

SEQ ID NO: 2592601 - DNA, 25 bp, Homo sapien
cacagatttaatatccatccaagct

SEQ ID NO: 2592602 - DNA, 25 bp, Homo sapien
ctgccatgtgcagcggcccctttgt

SEQ ID NO: 2592603 - DNA, 25 bp, Homo sapien
tgcctgccatgtgcagcggcccctt

SEQ ID NO: 2592604 - DNA, 25 bp, Homo sapien
tttgtgcccgcgcacccggcccggc

SEQ ID NO: 2592605 - DNA, 25 bp, Homo sapien
agcggcccctttgtgcccgcgcacc

SEQ ID NO: 2592606 - DNA, 25 bp, Homo sapien
gggtgatgatcacactaaaagctca

SEQ ID NO: 2592607 - DNA, 25 bp, Homo sapien
taacagagctatgcttatacccact

SEQ ID NO: 2592608 - DNA, 25 bp, Homo sapien
aacaaaaatagggtcaggtgataag

SEQ ID NO: 2592609 - DNA, 25 bp, Homo sapien
ggtcagcaagatgaaacaacagttt

SEQ ID NO: 2592610 - DNA, 25 bp, Homo sapien
gaactgatgtgagctccataccctg

SEQ ID NO: 2592611 - DNA, 25 bp, Homo sapien
gaaaagatatcctgacgcttccagc

SEQ ID NO: 2592612 - DNA, 25 bp, Homo sapien
gagagtctagcttttgccgggctga

SEQ ID NO: 2592613 - DNA, 25 bp, Homo sapien
aaacactggtgcatgaagaatcccc

SEQ ID NO: 2592614 - DNA, 25 bp, Homo sapien
gaaatttcaaaagcgtctctgcgcg

SEQ ID NO: 2592615 - DNA, 25 bp, Homo sapien
gatgcctggattcgggatggaccac

SEQ ID NO: 2592616 - DNA, 25 bp, Homo sapien
ctcaaacaggccgtggtcagtctca

SEQ ID NO: 2592617 - DNA, 25 bp, Homo sapien
tcacaccggacgtggaaaggcacgt

SEQ ID NO: 2592618 - DNA, 25 bp, Homo sapien
ctccgagtcggaggaatcagacccg

SEQ ID NO: 2592619 - DNA, 25 bp, Homo sapien
tgggcctcgtagtgccgaagctcct

SEQ ID NO: 2592620 - DNA, 25 bp, Homo sapien
cctgacactgtcgtctgggaactat

SEQ ID NO: 2592621 - DNA, 25 bp, Homo sapien
gcttccacgatcacttggtgggcag

SEQ ID NO: 2592622 - DNA, 25 bp, Homo sapien
ctacacgtgggacatccccgtgtca

SEQ ID NO: 2592623 - DNA, 25 bp, Homo sapien
tgggacatccccgtgtcactactga

SEQ ID NO: 2592624 - DNA, 25 bp, Homo sapien
cacgtgggacatccccgtgtcacta

SEQ ID NO: 2592625 - DNA, 25 bp, Homo sapien
gggacatccccgtgtcactactgac

SEQ ID NO: 2592626 - DNA, 25 bp, Homo sapien
acaaaagcacgggaagcaaaaccag

SEQ ID NO: 2592627 - DNA, 25 bp, Homo sapien
aaaccagcccattgagaacgccgag

SEQ ID NO: 2592628 - DNA, 25 bp, Homo sapien
gcccattgagaacgccgaggatggt

SEQ ID NO: 2592629 - DNA, 25 bp, Homo sapien
aggatggtgaggatcgccagcacag

SEQ ID NO: 2592630 - DNA, 25 bp, Homo sapien
agcagagtggacacggcgccatcca

SEQ ID NO: 2592631 - DNA, 25 bp, Homo sapien
caggacgggtgcaaacatgtgctcc

SEQ ID NO: 2592632 - DNA, 25 bp, Homo sapien
caatgaagtcgaactcagatcccgc

SEQ ID NO: 2592633 - DNA, 25 bp, Homo sapien
aagcacagccctgcggttcttgtcg

SEQ ID NO: 2592634 - DNA, 25 bp, Homo sapien
ctggacttcacctggtaaatgctca

SEQ ID NO: 2592635 - DNA, 25 bp, Homo sapien
tcacctggtaaatgctcagctctgt

SEQ ID NO: 2592636 - DNA, 25 bp, Homo sapien
gacttcacctggtaaatgctcagct

SEQ ID NO: 2592637 - DNA, 25 bp, Homo sapien
cttcacctggtaaatgctcagctct

SEQ ID NO: 2592638 - DNA, 25 bp, Homo sapien
tatgccaacagaagcgatcaggatg

SEQ ID NO: 2592639 - DNA, 25 bp, Homo sapien
gatcaggatgaccacgggcacggca

SEQ ID NO: 2592640 - DNA, 25 bp, Homo sapien
ggtgaactccactcctatgccaaca

SEQ ID NO: 2592641 - DNA, 25 bp, Homo sapien
gagcttgattccgatgaggcccatc

SEQ ID NO: 2592642 - DNA, 25 bp, Homo sapien
ggttcagaaggaagacagcgcacac

SEQ ID NO: 2592643 - DNA, 25 bp, Homo sapien
gaactgggcatactcgatgggctct

SEQ ID NO: 2592644 - DNA, 25 bp, Homo sapien
cacacgaggaatgtgcaggccaaca

SEQ ID NO: 2592645 - DNA, 25 bp, Homo sapien
cacaaagtctgaggtgtcccgcaag

SEQ ID NO: 2592646 - DNA, 25 bp, Homo sapien
ctttgcatgaaagcttactgactgc

SEQ ID NO: 2592647 - DNA, 25 bp, Homo sapien
tgcatgaaagcttactgactgctct

SEQ ID NO: 2592648 - DNA, 25 bp, Homo sapien
gaactttgcatgaaagcttactgac

SEQ ID NO: 2592649 - DNA, 25 bp, Homo sapien
ttgcatgaaagcttactgactgctc

SEQ ID NO: 2592650 - DNA, 25 bp, Homo sapien
gcttataggaatgacccaatgtgcc

SEQ ID NO: 2592651 - DNA, 25 bp, Homo sapien
gaagaggacgctgttgtatacagac

SEQ ID NO: 2592652 - DNA, 25 bp, Homo sapien
cagtgcaggtgcttggtggcttata

SEQ ID NO: 2592653 - DNA, 25 bp, Homo sapien
ttaaacagctttgacacagtgcagg

SEQ ID NO: 2592654 - DNA, 25 bp, Homo sapien
acccattctggtcggtgtggccgga

SEQ ID NO: 2592655 - DNA, 25 bp, Homo sapien
ggtcgttgctgacccaagccgtcag

SEQ ID NO: 2592656 - DNA, 25 bp, Homo sapien
ccgtcaggtagatgtagaaagcgct

SEQ ID NO: 2592657 - DNA, 25 bp, Homo sapien
tgtagtcggctttgtcgtggaccca

SEQ ID NO: 2592658 - DNA, 25 bp, Homo sapien
tggctgatgtcgatgggcttatcgc

SEQ ID NO: 2592659 - DNA, 25 bp, Homo sapien
gactccatcgtctgatccattcttg

SEQ ID NO: 2592660 - DNA, 25 bp, Homo sapien
tgccggtttgcaccaggagtttgta

SEQ ID NO: 2592661 - DNA, 25 bp, Homo sapien
gagtttgtaggcaaggactccatcg

SEQ ID NO: 2592662 - DNA, 25 bp, Homo sapien
gcaaggaaagctgactcaaggataa

SEQ ID NO: 2592663 - DNA, 25 bp, Homo sapien
aacgtgtaggcagcaaagggctcca

SEQ ID NO: 2592664 - DNA, 25 bp, Homo sapien
cacatcaaccattcaacaggcctga

SEQ ID NO: 2592665 - DNA, 25 bp, Homo sapien
tctgtgttgagtgctctagcggacc

SEQ ID NO: 2592666 - DNA, 25 bp, Homo sapien
taacgctctcataatcatgacaaag

SEQ ID NO: 2592667 - DNA, 25 bp, Homo sapien
caaaagaccgaaaggacgagagcct

SEQ ID NO: 2592668 - DNA, 25 bp, Homo sapien
ttgaagctgaacacgcaaaagaccg

SEQ ID NO: 2592669 - DNA, 25 bp, Homo sapien
taaaagtccatgaaacacgtcagtg

SEQ ID NO: 2592670 - DNA, 25 bp, Homo sapien
gatattcgggtagtctgctttctgg

SEQ ID NO: 2592671 - DNA, 25 bp, Homo sapien
tcactcgggtggtgccataaaggct

SEQ ID NO: 2592672 - DNA, 25 bp, Homo sapien
tctggtttcccgaggtacaatgtcc

SEQ ID NO: 2592673 - DNA, 25 bp, Homo sapien
acaatgtccgtaaggtccagcccgt

SEQ ID NO: 2592674 - DNA, 25 bp, Homo sapien
tcggtgtaggcctgaggttcaacct

SEQ ID NO: 2592675 - DNA, 25 bp, Homo sapien
gatgagagtgtccacttcgtacagg

SEQ ID NO: 2592676 - DNA, 25 bp, Homo sapien
tgcacagagatctcggagcgcggct

SEQ ID NO: 2592677 - DNA, 25 bp, Homo sapien
taatctgcgtttcatgggcaaagct

SEQ ID NO: 2592678 - DNA, 25 bp, Homo sapien
aaattgaacaccactactaccgctg

SEQ ID NO: 2592679 - DNA, 25 bp, Homo sapien
agtctcctgtcctcgcgtcgatata

SEQ ID NO: 2592680 - DNA, 25 bp, Homo sapien
gcgtcgatataaatccatgctgaga

SEQ ID NO: 2592681 - DNA, 25 bp, Homo sapien
aatgagcagaaccatggcaaaattg

SEQ ID NO: 2592682 - DNA, 25 bp, Homo sapien
cacctgcctgaggttatccagtaaa

SEQ ID NO: 2592683 - DNA, 25 bp, Homo sapien
cctagctcagctgagaaccgggagt

SEQ ID NO: 2592684 - DNA, 25 bp, Homo sapien
tcaaacaaagacttgatgccaagcc

SEQ ID NO: 2592685 - DNA, 25 bp, Homo sapien
gataaagtccccgaagtgcggtcaa

SEQ ID NO: 2592686 - DNA, 25 bp, Homo sapien
cgggaattgggattaacgcggccat

SEQ ID NO: 2592687 - DNA, 25 bp, Homo sapien
gattaacgcggccatgaagaaggct

SEQ ID NO: 2592688 - DNA, 25 bp, Homo sapien
gctggctcctgtgcgcttcaggcac

SEQ ID NO: 2592689 - DNA, 25 bp, Homo sapien
ggagaacgcccgcagagcgggaatt

SEQ ID NO: 2592690 - DNA, 25 bp, Homo sapien
aacaccaagagcgagaaatggcaaa

SEQ ID NO: 2592691 - DNA, 25 bp, Homo sapien
ctgtcctgtttcactgaaggcgtgg

SEQ ID NO: 2592692 - DNA, 25 bp, Homo sapien
cacaccaacaccaagagcgagaaat

SEQ ID NO: 2592693 - DNA, 25 bp, Homo sapien
ctgtttcactgaaggcgtgggccag

SEQ ID NO: 2592694 - DNA, 25 bp, Homo sapien
ttgttgcagcgttaaaggaaattcc

SEQ ID NO: 2592695 - DNA, 25 bp, Homo sapien
actgacagtgcaaccagcaggacgc

SEQ ID NO: 2592696 - DNA, 25 bp, Homo sapien
ttccgatcaatgagcacaggcccag

SEQ ID NO: 2592697 - DNA, 25 bp, Homo sapien
ccagcgcagcatggttagacaggca

SEQ ID NO: 2592698 - DNA, 25 bp, Homo sapien
catgagtaagtagccgctggccacg

SEQ ID NO: 2592699 - DNA, 25 bp, Homo sapien
gaaagcaccttttgagtggagttct

SEQ ID NO: 2592700 - DNA, 25 bp, Homo sapien
agaaggatttcaggatgtcgtccag

SEQ ID NO: 2592701 - DNA, 25 bp, Homo sapien
ttctgtgcgacactctgatgaacca

SEQ ID NO: 2592702 - DNA, 25 bp, Homo sapien
gcttgggagtcattaactggaacat

SEQ ID NO: 2592703 - DNA, 25 bp, Homo sapien
gccgctttgtcctcgttccagttga

SEQ ID NO: 2592704 - DNA, 25 bp, Homo sapien
gatgtgtgagacatactcgtacccc

SEQ ID NO: 2592705 - DNA, 25 bp, Homo sapien
tactcgtaccccttgaagtgctcgt

SEQ ID NO: 2592706 - DNA, 25 bp, Homo sapien
catagattgtcctcgggagctggct

SEQ ID NO: 2592707 - DNA, 25 bp, Homo sapien
ggaagaagactacagggcatagatt

SEQ ID NO: 2592708 - DNA, 25 bp, Homo sapien
gactacagggcatagattgtcctcg

SEQ ID NO: 2592709 - DNA, 25 bp, Homo sapien
caaatacacttgccgatgtcaggag

SEQ ID NO: 2592710 - DNA, 25 bp, Homo sapien
agtgctgttcttgactgtgccaccc

SEQ ID NO: 2592711 - DNA, 25 bp, Homo sapien
tcttgactgtgccacccacaatcaa

SEQ ID NO: 2592712 - DNA, 25 bp, Homo sapien
tgttcttgactgtgccacccacaat

SEQ ID NO: 2592713 - DNA, 25 bp, Homo sapien
tcaaaacaagggccatatcaagagg

SEQ ID NO: 2592714 - DNA, 25 bp, Homo sapien
cgaagtttgtccaccgcaaaggagg

SEQ ID NO: 2592715 - DNA, 25 bp, Homo sapien
ggcagtctggatcggccggattgag

SEQ ID NO: 2592716 - DNA, 25 bp, Homo sapien
ccagctgtccacttgatagtttatt

SEQ ID NO: 2592717 - DNA, 25 bp, Homo sapien
tgtaaccatgaccaacctcagcctt

SEQ ID NO: 2592718 - DNA, 25 bp, Homo sapien
tacttatgagcgctctctgacagcc

SEQ ID NO: 2592719 - DNA, 25 bp, Homo sapien
cctggcaatggaatgggcaagcccc

SEQ ID NO: 2592720 - DNA, 25 bp, Homo sapien
taaccaggctgaagtcattattcgg

SEQ ID NO: 2592721 - DNA, 25 bp, Homo sapien
taaaactgtacactgaaggtcaggg

SEQ ID NO: 2592722 - DNA, 25 bp, Homo sapien
agcaacattagaaacactgagtcct

SEQ ID NO: 2592723 - DNA, 25 bp, Homo sapien
actgaaatggaacaaacaatgataa

SEQ ID NO: 2592724 - DNA, 25 bp, Homo sapien
gagtcctagagaagtcacagacatc

SEQ ID NO: 2592725 - DNA, 25 bp, Homo sapien
gaaacactgagtcctagagaagtca

SEQ ID NO: 2592726 - DNA, 25 bp, Homo sapien
agactgtaatttcgccccttcccag

SEQ ID NO: 2592727 - DNA, 25 bp, Homo sapien
aggaggtatgctgtcccagactgta

SEQ ID NO: 2592728 - DNA, 25 bp, Homo sapien
aagcagtccaaaggtgtaataatca

SEQ ID NO: 2592729 - DNA, 25 bp, Homo sapien
taataatcaaacaagggtaaagata

SEQ ID NO: 2592730 - DNA, 25 bp, Homo sapien
tctcctgatttgtaacacaaatgtt

SEQ ID NO: 2592731 - DNA, 25 bp, Homo sapien
cctgatttgtaacacaaatgttcca

SEQ ID NO: 2592732 - DNA, 25 bp, Homo sapien
tctgtgataagctctcctgatttgt

SEQ ID NO: 2592733 - DNA, 25 bp, Homo sapien
ttgtaacacaaatgttccaatttcc

SEQ ID NO: 2592734 - DNA, 25 bp, Homo sapien
agatctcctgctgaaacctggcgca

SEQ ID NO: 2592735 - DNA, 25 bp, Homo sapien
tacagaccaacagggcaagtttgcc

SEQ ID NO: 2592736 - DNA, 25 bp, Homo sapien
taaacaacaacatgtgccaggtggg

SEQ ID NO: 2592737 - DNA, 25 bp, Homo sapien
tacagcatcaacatagactatccgg

SEQ ID NO: 2592738 - DNA, 25 bp, Homo sapien
tgtatacatggacacggctggcctg

SEQ ID NO: 2592739 - DNA, 25 bp, Homo sapien
tgttgtaggagcgcttctgtggtca

SEQ ID NO: 2592740 - DNA, 25 bp, Homo sapien
ctgtatcatgagttgaggattaaac

SEQ ID NO: 2592741 - DNA, 25 bp, Homo sapien
tgtggtcaggacattagcaccttct

SEQ ID NO: 2592742 - DNA, 25 bp, Homo sapien
tataatttaattcacgacttactcg

SEQ ID NO: 2592743 - DNA, 25 bp, Homo sapien
tcttctggcgagtataatttaattc

SEQ ID NO: 2592744 - DNA, 25 bp, Homo sapien
tctccaatcttctggcgagtataat

SEQ ID NO: 2592745 - DNA, 25 bp, Homo sapien
aattcacgacttactcgtcctccaa

SEQ ID NO: 2592746 - DNA, 25 bp, Homo sapien
tcccattgttactgcctcctcgaac

SEQ ID NO: 2592747 - DNA, 25 bp, Homo sapien
tctttgtgttatcacatctaatgcc

SEQ ID NO: 2592748 - DNA, 25 bp, Homo sapien
cattgttactgcctcctcgaacatc

SEQ ID NO: 2592749 - DNA, 25 bp, Homo sapien
atcacatctaatgccacaaacccag

SEQ ID NO: 2592750 - DNA, 25 bp, Homo sapien
agcggagcaagtgtcagttcaccca

SEQ ID NO: 2592751 - DNA, 25 bp, Homo sapien
ggagcaagtgtcagttcacccatgc

SEQ ID NO: 2592752 - DNA, 25 bp, Homo sapien
gcaagtgtcagttcacccatgcctt

SEQ ID NO: 2592753 - DNA, 25 bp, Homo sapien
agtgtcagttcacccatgcctttgt

SEQ ID NO: 2592754 - DNA, 25 bp, Homo sapien
cacataaagcttcagagtcggccaa

SEQ ID NO: 2592755 - DNA, 25 bp, Homo sapien
aatctagccaagctccatgtgccca

SEQ ID NO: 2592756 - DNA, 25 bp, Homo sapien
gagttctaagcaaggaagacctgaa

SEQ ID NO: 2592757 - DNA, 25 bp, Homo sapien
cactggctttggtgggagttctaag

SEQ ID NO: 2592758 - DNA, 25 bp, Homo sapien
cttgacgctggcctgcagcaatgtt

SEQ ID NO: 2592759 - DNA, 25 bp, Homo sapien
aatgttaacatccaaacaccaaagc

SEQ ID NO: 2592760 - DNA, 25 bp, Homo sapien
tggattcattacaaggctgctgccc

SEQ ID NO: 2592761 - DNA, 25 bp, Homo sapien
ggcctgcagcaatgttaacatccaa

SEQ ID NO: 2592762 - DNA, 25 bp, Homo sapien
catcctgaaagggatcactgaagcg

SEQ ID NO: 2592763 - DNA, 25 bp, Homo sapien
gggatcactgaagcgattatgcgca

SEQ ID NO: 2592764 - DNA, 25 bp, Homo sapien
gattatgcgcataactcttcagctt

SEQ ID NO: 2592765 - DNA, 25 bp, Homo sapien
ttctcaactaaatactccaactcca

SEQ ID NO: 2592766 - DNA, 25 bp, Homo sapien
cgcctccgcagccccgcgctgcgcc

SEQ ID NO: 2592767 - DNA, 25 bp, Homo sapien
gccgcggccgccgggggcgcgcaca

SEQ ID NO: 2592768 - DNA, 25 bp, Homo sapien
ccggccctccccagcgcggcggccg

SEQ ID NO: 2592769 - DNA, 25 bp, Homo sapien
cgccgcctccgcagccccgcgctgc

SEQ ID NO: 2592770 - DNA, 25 bp, Homo sapien
ccgcgaaggccccaaatatgaggag

SEQ ID NO: 2592771 - DNA, 25 bp, Homo sapien
gctgcttttaatcccaccgcgaagg

SEQ ID NO: 2592772 - DNA, 25 bp, Homo sapien
tccacgttggtctcgaggttcgctg

SEQ ID NO: 2592773 - DNA, 25 bp, Homo sapien
aggaggcccacaaccaagaacttgc

SEQ ID NO: 2592774 - DNA, 25 bp, Homo sapien
cccgcgggatccctgagcgacttgg

SEQ ID NO: 2592775 - DNA, 25 bp, Homo sapien
ctgcacctcggggacatcagggcgc

SEQ ID NO: 2592776 - DNA, 25 bp, Homo sapien
ggctcggtcataaagccgggccgca

SEQ ID NO: 2592777 - DNA, 25 bp, Homo sapien
agccccggcggatctgagcgtcatg

SEQ ID NO: 2592778 - DNA, 25 bp, Homo sapien
ctgtgtgagctgaattaggaagtgg

SEQ ID NO: 2592779 - DNA, 25 bp, Homo sapien
gctgtgtgagctgaattaggaagtg

SEQ ID NO: 2592780 - DNA, 25 bp, Homo sapien
tgtgtgagctgaattaggaagtggg

SEQ ID NO: 2592781 - DNA, 25 bp, Homo sapien
tatttgtgatcggaagagggcagcc

SEQ ID NO: 2592782 - DNA, 25 bp, Homo sapien
cgtaaacacaatgaacccggcagct

SEQ ID NO: 2592783 - DNA, 25 bp, Homo sapien
tggattccacacatttcagcgagcc

SEQ ID NO: 2592784 - DNA, 25 bp, Homo sapien
gagaggcggctcaaaacctggaaaa

SEQ ID NO: 2592785 - DNA, 25 bp, Homo sapien
gctccagagcgaaggcggcgtcgca

SEQ ID NO: 2592786 - DNA, 25 bp, Homo sapien
tcggcggcgttaccagccgaggcca

SEQ ID NO: 2592787 - DNA, 25 bp, Homo sapien
atagtcccggtccggcgcggcagca

SEQ ID NO: 2592788 - DNA, 25 bp, Homo sapien
gcgtcgcagtagctgggccggtgca

SEQ ID NO: 2592789 - DNA, 25 bp, Homo sapien
cgggctccggttgacagaccagccg

SEQ ID NO: 2592790 - DNA, 25 bp, Homo sapien
gctcgggctccggttgacagaccag

SEQ ID NO: 2592791 - DNA, 25 bp, Homo sapien
cctgggcgctcggcttgcgaggacg

SEQ ID NO: 2592792 - DNA, 25 bp, Homo sapien
ctgggcgctcggcttgcgaggacgc

SEQ ID NO: 2592793 - DNA, 25 bp, Homo sapien
gccgctgccggggagtcagaccctg

SEQ ID NO: 2592794 - DNA, 25 bp, Homo sapien
gctgccggggagtcagaccctgcgc

SEQ ID NO: 2592795 - DNA, 25 bp, Homo sapien
cgctgccggggagtcagaccctgcg

SEQ ID NO: 2592796 - DNA, 25 bp, Homo sapien
cggccgctgccggggagtcagaccc

SEQ ID NO: 2592797 - DNA, 25 bp, Homo sapien
gctgggttcgcggtggctgctcggt

SEQ ID NO: 2592798 - DNA, 25 bp, Homo sapien
tgggttcgcggtggctgctcggtcc

SEQ ID NO: 2592799 - DNA, 25 bp, Homo sapien
ttgtgctcctcggcaacccgctgga

SEQ ID NO: 2592800 - DNA, 25 bp, Homo sapien
gttcgcggtggctgctcggtcccgg

SEQ ID NO: 2592801 - DNA, 25 bp, Homo sapien
taggagattataaatgccccgatgc

SEQ ID NO: 2592802 - DNA, 25 bp, Homo sapien
caagttattacgttcctccctgcgg

SEQ ID NO: 2592803 - DNA, 25 bp, Homo sapien
gaaaacaaactgtgcgcggatcgcg

SEQ ID NO: 2592804 - DNA, 25 bp, Homo sapien
ccctttgaggtggattctggagcca

SEQ ID NO: 2592805 - DNA, 25 bp, Homo sapien
ggcgcggacgctgggcttggatttc

SEQ ID NO: 2592806 - DNA, 25 bp, Homo sapien
tttcggcggagtgcagcgcggactc

SEQ ID NO: 2592807 - DNA, 25 bp, Homo sapien
tcggagcgcgggtgccgatggcgcg

SEQ ID NO: 2592808 - DNA, 25 bp, Homo sapien
ttgtcgctgcgggtctctttgtctc

SEQ ID NO: 2592809 - DNA, 25 bp, Homo sapien
cataggcaggacctgtcagggtcac

SEQ ID NO: 2592810 - DNA, 25 bp, Homo sapien
tttctattaagcagttccatggccc

SEQ ID NO: 2592811 - DNA, 25 bp, Homo sapien
caaagtaaactcgaggaacgtgcta

SEQ ID NO: 2592812 - DNA, 25 bp, Homo sapien
cacagccctcctgggtaaacaggcg

SEQ ID NO: 2592813 - DNA, 25 bp, Homo sapien
ctagatgacaggcctacgggccgcc

SEQ ID NO: 2592814 - DNA, 25 bp, Homo sapien
tagatgacaggcctacgggccgcca

SEQ ID NO: 2592815 - DNA, 25 bp, Homo sapien
gatgacaggcctacgggccgccaga

SEQ ID NO: 2592816 - DNA, 25 bp, Homo sapien
agatgacaggcctacgggccgccag

SEQ ID NO: 2592817 - DNA, 25 bp, Homo sapien
ggttcagaagaaacagttgcccaca

SEQ ID NO: 2592818 - DNA, 25 bp, Homo sapien
gaatgctgctcttgcacatggtcag

SEQ ID NO: 2592819 - DNA, 25 bp, Homo sapien
taaaagtactcttgctcaatgtggg

SEQ ID NO: 2592820 - DNA, 25 bp, Homo sapien
cacggtaacctccagcaattggaag

SEQ ID NO: 2592821 - DNA, 25 bp, Homo sapien
gggcagccttgttaacgaagaatgt

SEQ ID NO: 2592822 - DNA, 25 bp, Homo sapien
aagttgctcttcctccaacagaggt

SEQ ID NO: 2592823 - DNA, 25 bp, Homo sapien
cagtgatgaccttcccatatgtaga

SEQ ID NO: 2592824 - DNA, 25 bp, Homo sapien
gaggtacacatacaaactgactcct

SEQ ID NO: 2592825 - DNA, 25 bp, Homo sapien
ccctaaggcagtcgtttccaaggct

SEQ ID NO: 2592826 - DNA, 25 bp, Homo sapien
aaggcagtcgtttccaaggctgctg

SEQ ID NO: 2592827 - DNA, 25 bp, Homo sapien
gcagtcgtttccaaggctgctgttc

SEQ ID NO: 2592828 - DNA, 25 bp, Homo sapien
cctaaggcagtcgtttccaaggctg

SEQ ID NO: 2592829 - DNA, 25 bp, Homo sapien
tatagtctagaaacccacgcagtct

SEQ ID NO: 2592830 - DNA, 25 bp, Homo sapien
tgttactttatgagccccaacgtgg

SEQ ID NO: 2592831 - DNA, 25 bp, Homo sapien
gaaagcccattcctacagagattta

SEQ ID NO: 2592832 - DNA, 25 bp, Homo sapien
ctccaagggaacgaggaaagcccat

SEQ ID NO: 2592833 - DNA, 25 bp, Homo sapien
cctgtggctggagatgctgccccag

SEQ ID NO: 2592834 - DNA, 25 bp, Homo sapien
agagttctggggaaagctgccctgt

SEQ ID NO: 2592835 - DNA, 25 bp, Homo sapien
ttctggggaaagctgccctgtggct

SEQ ID NO: 2592836 - DNA, 25 bp, Homo sapien
tggctggagatgctgccccaggggc

SEQ ID NO: 2592837 - DNA, 25 bp, Homo sapien
tcttccacctactccttcaaattgg

SEQ ID NO: 2592838 - DNA, 25 bp, Homo sapien
aggactgccctgacattcatcgatg

SEQ ID NO: 2592839 - DNA, 25 bp, Homo sapien
tcgatggagtgctcgcatcctgcag

SEQ ID NO: 2592840 - DNA, 25 bp, Homo sapien
cctggtggcaagcttctcttggcct

SEQ ID NO: 2592841 - DNA, 25 bp, Homo sapien
tctcaggaagctacttgcactcaag

SEQ ID NO: 2592842 - DNA, 25 bp, Homo sapien
gaaccgagctccagttttccacagg

SEQ ID NO: 2592843 - DNA, 25 bp, Homo sapien
gggaaacccacattaagacaatcac

SEQ ID NO: 2592844 - DNA, 25 bp, Homo sapien
tggctccatgagttccccagtggaa

SEQ ID NO: 2592845 - DNA, 25 bp, Homo sapien
tctcgacctcttgacctcaagcaat

SEQ ID NO: 2592846 - DNA, 25 bp, Homo sapien
tggtctcgacctcttgacctcaagc

SEQ ID NO: 2592847 - DNA, 25 bp, Homo sapien
cgacctcttgacctcaagcaatctg

SEQ ID NO: 2592848 - DNA, 25 bp, Homo sapien
gacctcttgacctcaagcaatctgc

SEQ ID NO: 2592849 - DNA, 25 bp, Homo sapien
ccaaatgtgtgtctgtcattaagca

SEQ ID NO: 2592850 - DNA, 25 bp, Homo sapien
ggttctgtcatacagcctaggtctg

SEQ ID NO: 2592851 - DNA, 25 bp, Homo sapien
tacagtgttgagtagagttgcatgc

SEQ ID NO: 2592852 - DNA, 25 bp, Homo sapien
tgtgtacacatgaagaaaattgcct

SEQ ID NO: 2592853 - DNA, 25 bp, Homo sapien
tgttaagaccttgtaagaatgtgaa

SEQ ID NO: 2592854 - DNA, 25 bp, Homo sapien
gatgaacatcaaatggatccacggc

SEQ ID NO: 2592855 - DNA, 25 bp, Homo sapien
tgcggaggacccaagacaacttgct

SEQ ID NO: 2592856 - DNA, 25 bp, Homo sapien
gaatgtgaacgactcctcatggccg

SEQ ID NO: 2592857 - DNA, 25 bp, Homo sapien
ggccgggctgtttgagtccactgtt

SEQ ID NO: 2592858 - DNA, 25 bp, Homo sapien
taaggacgctgcattagaagagccc

SEQ ID NO: 2592859 - DNA, 25 bp, Homo sapien
cattgcagcatacagctaaggacgc

SEQ ID NO: 2592860 - DNA, 25 bp, Homo sapien
ggtctatttcctccccgttgatggc

SEQ ID NO: 2592861 - DNA, 25 bp, Homo sapien
ccaagggatttctgtgggcatggaa

SEQ ID NO: 2592862 - DNA, 25 bp, Homo sapien
gaagcacgatgggagttctgcatca

SEQ ID NO: 2592863 - DNA, 25 bp, Homo sapien
tctggcttgtctgacgtttgtgcaa

SEQ ID NO: 2592864 - DNA, 25 bp, Homo sapien
aaggctgattcgctgttgagggcat

SEQ ID NO: 2592865 - DNA, 25 bp, Homo sapien
cttagtcccggcccggccctgtgcg

SEQ ID NO: 2592866 - DNA, 25 bp, Homo sapien
ggcgtccttggcgagtagagaggcc

SEQ ID NO: 2592867 - DNA, 25 bp, Homo sapien
cgtccttggcgagtagagaggccat

SEQ ID NO: 2592868 - DNA, 25 bp, Homo sapien
ttccggggccgaatgggagcagatc

SEQ ID NO: 2592869 - DNA, 25 bp, Homo sapien
tgcgcgcctgctgttccggggccga

SEQ ID NO: 2592870 - DNA, 25 bp, Homo sapien
tgggggtcgaatgccaactatagtg

SEQ ID NO: 2592871 - DNA, 25 bp, Homo sapien
taaggttaattagttctgacatccc

SEQ ID NO: 2592872 - DNA, 25 bp, Homo sapien
ttagttctgacatcccactgccatt

SEQ ID NO: 2592873 - DNA, 25 bp, Homo sapien
gacactaaggttaattagttctgac

SEQ ID NO: 2592874 - DNA, 25 bp, Homo sapien
taaaataccggcactaggagcaccg

SEQ ID NO: 2592875 - DNA, 25 bp, Homo sapien
caaagtctggccagttccttccggg

SEQ ID NO: 2592876 - DNA, 25 bp, Homo sapien
tgacgtaggcccaagagagaactgc

SEQ ID NO: 2592877 - DNA, 25 bp, Homo sapien
tctgcatttctaaggtgagcctggc

SEQ ID NO: 2592878 - DNA, 25 bp, Homo sapien
caacgggccagacctagcttggaaa

SEQ ID NO: 2592879 - DNA, 25 bp, Homo sapien
caacggcagaattaggaatgagtcc

SEQ ID NO: 2592880 - DNA, 25 bp, Homo sapien
ccaaatgggaacctaggctgagaga

SEQ ID NO: 2592881 - DNA, 25 bp, Homo sapien
tgttcctgagaacgaagcgtggccc

SEQ ID NO: 2592882 - DNA, 25 bp, Homo sapien
ggccaccagcatgggagtgggcagg

SEQ ID NO: 2592883 - DNA, 25 bp, Homo sapien
caggcgtgctcagtggggccagggc

SEQ ID NO: 2592884 - DNA, 25 bp, Homo sapien
tcaggcgtgctcagtggggccaggg

SEQ ID NO: 2592885 - DNA, 25 bp, Homo sapien
ccagggccaccagcatgggagtggg

SEQ ID NO: 2592886 - DNA, 25 bp, Homo sapien
agagtctgtgtcgaggtccagcctc

SEQ ID NO: 2592887 - DNA, 25 bp, Homo sapien
agcctcccgtaagcttcgcacagag

SEQ ID NO: 2592888 - DNA, 25 bp, Homo sapien
gcttcgcacagaggcaggtcattag

SEQ ID NO: 2592889 - DNA, 25 bp, Homo sapien
cagcagagtctgtgtcgaggtccag

SEQ ID NO: 2592890 - DNA, 25 bp, Homo sapien
tgttcagtctcagaaccgtcctggg

SEQ ID NO: 2592891 - DNA, 25 bp, Homo sapien
tgtcactacactgcaaagagctctc

SEQ ID NO: 2592892 - DNA, 25 bp, Homo sapien
gagagccaccctagcattctgaaag

SEQ ID NO: 2592893 - DNA, 25 bp, Homo sapien
tccctgcctgagacttagcctgaag

SEQ ID NO: 2592894 - DNA, 25 bp, Homo sapien
tgtctgtcggtcaaacgctctggcc

SEQ ID NO: 2592895 - DNA, 25 bp, Homo sapien
tcacattgcactgtgggaaaggccc

SEQ ID NO: 2592896 - DNA, 25 bp, Homo sapien
tgagtgggtcacgaattggagctcc

SEQ ID NO: 2592897 - DNA, 25 bp, Homo sapien
ccagctcaaacggtcgaaggtttca

SEQ ID NO: 2592898 - DNA, 25 bp, Homo sapien
gaagtcattgaggatcaggaactgc

SEQ ID NO: 2592899 - DNA, 25 bp, Homo sapien
tggtcaatggcctcgttcacggagg

SEQ ID NO: 2592900 - DNA, 25 bp, Homo sapien
tcaatggagatctcgtctcgcagcg

SEQ ID NO: 2592901 - DNA, 25 bp, Homo sapien
cgtgatgagcttccggtcgcactcc

SEQ ID NO: 2592902 - DNA, 25 bp, Homo sapien
tctcgtaattgtcctgttcaccctg

SEQ ID NO: 2592903 - DNA, 25 bp, Homo sapien
ctcgtaattgtcctgttcaccctga

SEQ ID NO: 2592904 - DNA, 25 bp, Homo sapien
gtgacacctgcgtctcgtcctcaat

SEQ ID NO: 2592905 - DNA, 25 bp, Homo sapien
ctgagtggcccgtgacacctgcgtc

SEQ ID NO: 2592906 - DNA, 25 bp, Homo sapien
tgttgtaggactgcagcagcgtctc

SEQ ID NO: 2592907 - DNA, 25 bp, Homo sapien
gatgatctcggtgaagttgtccatg

SEQ ID NO: 2592908 - DNA, 25 bp, Homo sapien
ccttcagccgcttgttgtaggactg

SEQ ID NO: 2592909 - DNA, 25 bp, Homo sapien
tgtccatgatggacttaatgtcgtc

SEQ ID NO: 2592910 - DNA, 25 bp, Homo sapien
agcctcaagcagcgcagcggggaga

SEQ ID NO: 2592911 - DNA, 25 bp, Homo sapien
gagcctcaagcagcgcagcggggag

SEQ ID NO: 2592912 - DNA, 25 bp, Homo sapien
ctcaagcagcgcagcggggagacct

SEQ ID NO: 2592913 - DNA, 25 bp, Homo sapien
cctcaagcagcgcagcggggagacc

SEQ ID NO: 2592914 - DNA, 25 bp, Homo sapien
ggtaattccactccctcgcttaaca

SEQ ID NO: 2592915 - DNA, 25 bp, Homo sapien
cctccagtctctgcgcggcagggaa

SEQ ID NO: 2592916 - DNA, 25 bp, Homo sapien
gaggtcctaaaaagtggtcattcca

SEQ ID NO: 2592917 - DNA, 25 bp, Homo sapien
cagggggagactacgtctccaaaag

SEQ ID NO: 2592918 - DNA, 25 bp, Homo sapien
cctaggttcggagtctggcgcacga

SEQ ID NO: 2592919 - DNA, 25 bp, Homo sapien
actggacggcctcggcgctggagtt

SEQ ID NO: 2592920 - DNA, 25 bp, Homo sapien
catggttccccggtgcgccgggaca

SEQ ID NO: 2592921 - DNA, 25 bp, Homo sapien
gacaaggggctcaagttccgcgccg

SEQ ID NO: 2592922 - DNA, 25 bp, Homo sapien
gtggtcaagtgcctctgcgacccgc

SEQ ID NO: 2592923 - DNA, 25 bp, Homo sapien
gcgccgcggtccgaaaacctagtca

SEQ ID NO: 2592924 - DNA, 25 bp, Homo sapien
gcactttcccgcgtctctcccacgg

SEQ ID NO: 2592925 - DNA, 25 bp, Homo sapien
cgcggtccgaaaacctagtcagccg

SEQ ID NO: 2592926 - DNA, 25 bp, Homo sapien
ggccccagctgtcgtgaagaagcag

SEQ ID NO: 2592927 - DNA, 25 bp, Homo sapien
ggctaagaaagtggtgaatcccctg

SEQ ID NO: 2592928 - DNA, 25 bp, Homo sapien
gaaagaaggtggctccggccccagc

SEQ ID NO: 2592929 - DNA, 25 bp, Homo sapien
aagcaggaggctaagaaagtggtga

SEQ ID NO: 2592930 - DNA, 25 bp, Homo sapien
cgctttgtgaaatggccccgctata

SEQ ID NO: 2592931 - DNA, 25 bp, Homo sapien
gagagccatcctctataagcggctg

SEQ ID NO: 2592932 - DNA, 25 bp, Homo sapien
ggccccgctatatcaggttgcagcg

SEQ ID NO: 2592933 - DNA, 25 bp, Homo sapien
ccaaaagagacctcacccgctttgt

SEQ ID NO: 2592934 - DNA, 25 bp, Homo sapien
acgtcccaacgaagagaccacctgt

SEQ ID NO: 2592935 - DNA, 25 bp, Homo sapien
agagactgttggcccgggccgagaa

SEQ ID NO: 2592936 - DNA, 25 bp, Homo sapien
ccgggccgagaagaaggctgctggc

SEQ ID NO: 2592937 - DNA, 25 bp, Homo sapien
ttggcccgggccgagaagaaggctg

SEQ ID NO: 2592938 - DNA, 25 bp, Homo sapien
caccgtcaccaccttggtggagaac

SEQ ID NO: 2592939 - DNA, 25 bp, Homo sapien
gtggtgattgcacacgacgtggatc

SEQ ID NO: 2592940 - DNA, 25 bp, Homo sapien
acaccgtcaccaccttggtggagaa

SEQ ID NO: 2592941 - DNA, 25 bp, Homo sapien
tgcacacgacgtggatcccatcgag

SEQ ID NO: 2592942 - DNA, 25 bp, Homo sapien
ttatgatgaaccagtcatgagctca

SEQ ID NO: 2592943 - DNA, 25 bp, Homo sapien
catgatccagcataaaggcagtctt

SEQ ID NO: 2592944 - DNA, 25 bp, Homo sapien
tagaaggccagaactttataccagt

SEQ ID NO: 2592945 - DNA, 25 bp, Homo sapien
gtcatgagctcatttaaggtagaag

SEQ ID NO: 2592946 - DNA, 25 bp, Homo sapien
accacaggtaggatgtagctgcaga

SEQ ID NO: 2592947 - DNA, 25 bp, Homo sapien
aaaccacaggtaggatgtagctgca

SEQ ID NO: 2592948 - DNA, 25 bp, Homo sapien
cacaggtaggatgtagctgcagaga

SEQ ID NO: 2592949 - DNA, 25 bp, Homo sapien
tcttaaaccacaggtaggatgtagc

SEQ ID NO: 2592950 - DNA, 25 bp, Homo sapien
cagagtaactctggtttgccctcca

SEQ ID NO: 2592951 - DNA, 25 bp, Homo sapien
gatgctcgttcctcagagtaactct

SEQ ID NO: 2592952 - DNA, 25 bp, Homo sapien
caggtcacgatgtactgcagatgct

SEQ ID NO: 2592953 - DNA, 25 bp, Homo sapien
ggtttgccctccaatgggtcctcca

SEQ ID NO: 2592954 - DNA, 25 bp, Homo sapien
tacttgttccgagatgggctggtcc

SEQ ID NO: 2592955 - DNA, 25 bp, Homo sapien
ttgtccgctcagtacttgcctaggt

SEQ ID NO: 2592956 - DNA, 25 bp, Homo sapien
tggcctttacgttgggtgaccatcc

SEQ ID NO: 2592957 - DNA, 25 bp, Homo sapien
tcatttttgcgtggccagttggaag

SEQ ID NO: 2592958 - DNA, 25 bp, Homo sapien
cttccaggtctcgataatgccagtg

SEQ ID NO: 2592959 - DNA, 25 bp, Homo sapien
gaagttggcatcaatgaagatgggc

SEQ ID NO: 2592960 - DNA, 25 bp, Homo sapien
ttgttctcagggacaaaaggctgcc

SEQ ID NO: 2592961 - DNA, 25 bp, Homo sapien
gaagatgggctctgcgcctgtgatt

SEQ ID NO: 2592962 - DNA, 25 bp, Homo sapien
agtaggaagagtccatgtcccttac

SEQ ID NO: 2592963 - DNA, 25 bp, Homo sapien
aaggtgtgtgagattgcatggagcc

SEQ ID NO: 2592964 - DNA, 25 bp, Homo sapien
tctctaaagtaggaagagtccatgt

SEQ ID NO: 2592965 - DNA, 25 bp, Homo sapien
tgtgagattgcatggagcctggtgg

SEQ ID NO: 2592966 - DNA, 25 bp, Homo sapien
acgaaccctctatttaccaggatgg

SEQ ID NO: 2592967 - DNA, 25 bp, Homo sapien
ctggcctttctgccgggtttcagga

SEQ ID NO: 2592968 - DNA, 25 bp, Homo sapien
tgccgggtttcaggattcactttct

SEQ ID NO: 2592969 - DNA, 25 bp, Homo sapien
aacgaaccctctatttaccaggatg

SEQ ID NO: 2592970 - DNA, 25 bp, Homo sapien
ggaggagatgaggccgccctcccgg

SEQ ID NO: 2592971 - DNA, 25 bp, Homo sapien
agtgaccacataggccccactctga

SEQ ID NO: 2592972 - DNA, 25 bp, Homo sapien
acagggtccaccatggtccggggca

SEQ ID NO: 2592973 - DNA, 25 bp, Homo sapien
gtccaccatggtccggggcatcata

SEQ ID NO: 2592974 - DNA, 25 bp, Homo sapien
ctccttggaatggtcaaagcacccc

SEQ ID NO: 2592975 - DNA, 25 bp, Homo sapien
gctccttggaatggtcaaagcaccc

SEQ ID NO: 2592976 - DNA, 25 bp, Homo sapien
ttcactggcctatactccagatttt

SEQ ID NO: 2592977 - DNA, 25 bp, Homo sapien
aaagcaccccctgaccttcactggc

SEQ ID NO: 2592978 - DNA, 25 bp, Homo sapien
caagagaggctaaaaatctggactc

SEQ ID NO: 2592979 - DNA, 25 bp, Homo sapien
aacagtggccgagcaaggtttggct

SEQ ID NO: 2592980 - DNA, 25 bp, Homo sapien
aatcccctgagggtggcagactaca

SEQ ID NO: 2592981 - DNA, 25 bp, Homo sapien
cagagtccaactttacaagagaggc

SEQ ID NO: 2592982 - DNA, 25 bp, Homo sapien
ctgttgaactcaagtaaaacaggcc

SEQ ID NO: 2592983 - DNA, 25 bp, Homo sapien
gtcccaccaaaaggggcaagctggc

SEQ ID NO: 2592984 - DNA, 25 bp, Homo sapien
gtcaaggcagtgactaaaagtccca

SEQ ID NO: 2592985 - DNA, 25 bp, Homo sapien
aaggcagtgactaaaagtcccacca

SEQ ID NO: 2592986 - DNA, 25 bp, Homo sapien
ttcagcttccacttccgacgctgga

SEQ ID NO: 2592987 - DNA, 25 bp, Homo sapien
actccaactctgcaatcaggttcag

SEQ ID NO: 2592988 - DNA, 25 bp, Homo sapien
actctgcaatcaggttcagcttcca

SEQ ID NO: 2592989 - DNA, 25 bp, Homo sapien
tcaggttcagcttccacttccgacg

SEQ ID NO: 2592990 - DNA, 25 bp, Homo sapien
cagatggcagcaaggtcaagggccc

SEQ ID NO: 2592991 - DNA, 25 bp, Homo sapien
ctacagtgacagagcataaggccaa

SEQ ID NO: 2592992 - DNA, 25 bp, Homo sapien
gtcaagggcccagagttacgcacac

SEQ ID NO: 2592993 - DNA, 25 bp, Homo sapien
cagtgacagagcataaggccaagca

SEQ ID NO: 2592994 - DNA, 25 bp, Homo sapien
tcttccgcttttgtggcagatgctt

SEQ ID NO: 2592995 - DNA, 25 bp, Homo sapien
caagccaaaggcagtcacagggatg

SEQ ID NO: 2592996 - DNA, 25 bp, Homo sapien
ggagcaggacccactgaagaaagga

SEQ ID NO: 2592997 - DNA, 25 bp, Homo sapien
gaagaaaggagtcatcttccgcttt

SEQ ID NO: 2592998 - DNA, 25 bp, Homo sapien
ctgccacatctgcttggcctccagg

SEQ ID NO: 2592999 - DNA, 25 bp, Homo sapien
catctgcttggcctccaggccaccc

SEQ ID NO: 2593000 - DNA, 25 bp, Homo sapien
gccacatctgcttggcctccaggcc

SEQ ID NO: 2593001 - DNA, 25 bp, Homo sapien
cacatctgcttggcctccaggccac

SEQ ID NO: 2593002 - DNA, 25 bp, Homo sapien
gagagtttcacaacactgacatgga

SEQ ID NO: 2593003 - DNA, 25 bp, Homo sapien
gccagaagccctcgaacacagacct

SEQ ID NO: 2593004 - DNA, 25 bp, Homo sapien
tggagagtttcacaacactgacatg

SEQ ID NO: 2593005 - DNA, 25 bp, Homo sapien
acactgacatggagccagaagccct

SEQ ID NO: 2593006 - DNA, 25 bp, Homo sapien
cattagctggatgggacgttcggaa

SEQ ID NO: 2593007 - DNA, 25 bp, Homo sapien
tgcacactgagaggaacacgtaagc

SEQ ID NO: 2593008 - DNA, 25 bp, Homo sapien
cgttgtgaggacaaagcgctcgcta

SEQ ID NO: 2593009 - DNA, 25 bp, Homo sapien
aatacggaacttgtcactcccaggg

SEQ ID NO: 2593010 - DNA, 25 bp, Homo sapien
gggagaccctgaggacgctcctcca

SEQ ID NO: 2593011 - DNA, 25 bp, Homo sapien
cgcggggagaccctgaggacgctcc

SEQ ID NO: 2593012 - DNA, 25 bp, Homo sapien
cggggagaccctgaggacgctcctc

SEQ ID NO: 2593013 - DNA, 25 bp, Homo sapien
gagaccctgaggacgctcctccagg

SEQ ID NO: 2593014 - DNA, 25 bp, Homo sapien
gccccagctgcaacgcagccaccgc

SEQ ID NO: 2593015 - DNA, 25 bp, Homo sapien
agccccagctgcaacgcagccaccg

SEQ ID NO: 2593016 - DNA, 25 bp, Homo sapien
gcagccccagctgcaacgcagccac

SEQ ID NO: 2593017 - DNA, 25 bp, Homo sapien
cagccccagctgcaacgcagccacc

SEQ ID NO: 2593018 - DNA, 25 bp, Homo sapien
cgtttctgcgggagcacccgagcct

SEQ ID NO: 2593019 - DNA, 25 bp, Homo sapien
ggcgcttccgggacgcaggaggcat

SEQ ID NO: 2593020 - DNA, 25 bp, Homo sapien
catgagcgagttgccgggcgacgtg

SEQ ID NO: 2593021 - DNA, 25 bp, Homo sapien
ggctccaggttctgcgagcggcttc

SEQ ID NO: 2593022 - DNA, 25 bp, Homo sapien
aatgagatttagatctgtttcccac

SEQ ID NO: 2593023 - DNA, 25 bp, Homo sapien
tgttttgccagaatcaattggtaga

SEQ ID NO: 2593024 - DNA, 25 bp, Homo sapien
ggcatcttcccgaatcaggccctag

SEQ ID NO: 2593025 - DNA, 25 bp, Homo sapien
aacaggaacacccactaggacggag

SEQ ID NO: 2593026 - DNA, 25 bp, Homo sapien
tgtcatacggcactaacagggagcg

SEQ ID NO: 2593027 - DNA, 25 bp, Homo sapien
catttactatggtgcagacgacagg

SEQ ID NO: 2593028 - DNA, 25 bp, Homo sapien
caaacggacaatctgagtgagcgac

SEQ ID NO: 2593029 - DNA, 25 bp, Homo sapien
caaacgcgttgggactagttcggct

SEQ ID NO: 2593030 - DNA, 25 bp, Homo sapien
gttcactccaaagcctcggcgtggg

SEQ ID NO: 2593031 - DNA, 25 bp, Homo sapien
gcctgcactgaagggtcagacgcca

SEQ ID NO: 2593032 - DNA, 25 bp, Homo sapien
taataccaatgcgtctgctcacagt

SEQ ID NO: 2593033 - DNA, 25 bp, Homo sapien
tgagatgccacagccaagcgggctg

SEQ ID NO: 2593034 - DNA, 25 bp, Homo sapien
tgacggccacgggtcttagccaggc

SEQ ID NO: 2593035 - DNA, 25 bp, Homo sapien
ttgttgaatccaccccgaaccagtc

SEQ ID NO: 2593036 - DNA, 25 bp, Homo sapien
catctgtgcctttaccaagggaggg

SEQ ID NO: 2593037 - DNA, 25 bp, Homo sapien
gggaagaggatacataaaagctggc

SEQ ID NO: 2593038 - DNA, 25 bp, Homo sapien
aaatatacgttgatggcaaagagcc

SEQ ID NO: 2593039 - DNA, 25 bp, Homo sapien
tatttcaggaagtcatgcatgggct

SEQ ID NO: 2593040 - DNA, 25 bp, Homo sapien
tcaccgacatggtctggaagaagtc

SEQ ID NO: 2593041 - DNA, 25 bp, Homo sapien
catgggcttgtagactggaatggtc

SEQ ID NO: 2593042 - DNA, 25 bp, Homo sapien
gatgtagctactgctgagacggctg

SEQ ID NO: 2593043 - DNA, 25 bp, Homo sapien
tccatcaggctgatgtagctactgc

SEQ ID NO: 2593044 - DNA, 25 bp, Homo sapien
gctgctgcacgtcatgaagtctcta

SEQ ID NO: 2593045 - DNA, 25 bp, Homo sapien
gcataggttgaaacgtaagaaattc

SEQ ID NO: 2593046 - DNA, 25 bp, Homo sapien
aaaaagtttgctccgccgagcacgg

SEQ ID NO: 2593047 - DNA, 25 bp, Homo sapien
taaattcccaagtgcttcttggccc

SEQ ID NO: 2593048 - DNA, 25 bp, Homo sapien
tctcagtcagctccggaggtgtgct

SEQ ID NO: 2593049 - DNA, 25 bp, Homo sapien
gaagttcccaactagtaacaggctg

SEQ ID NO: 2593050 - DNA, 25 bp, Homo sapien
gaaaagaagctggcgtcaaagtgaa

SEQ ID NO: 2593051 - DNA, 25 bp, Homo sapien
aaagaagctggcgtcaaagtgaagg

SEQ ID NO: 2593052 - DNA, 25 bp, Homo sapien
agaaaagaagctggcgtcaaagtga

SEQ ID NO: 2593053 - DNA, 25 bp, Homo sapien
aagaagctggcgtcaaagtgaagga

SEQ ID NO: 2593054 - DNA, 25 bp, Homo sapien
tggggacgcccgcaaacatgctctt

SEQ ID NO: 2593055 - DNA, 25 bp, Homo sapien
cttcagaacgggattctgctaggag

SEQ ID NO: 2593056 - DNA, 25 bp, Homo sapien
aacgggattctgctaggagcagcaa

SEQ ID NO: 2593057 - DNA, 25 bp, Homo sapien
agctctcacgcatggtggggacgcc

SEQ ID NO: 2593058 - DNA, 25 bp, Homo sapien
aatgctcaacctgtagaaggagcgt

SEQ ID NO: 2593059 - DNA, 25 bp, Homo sapien
tagaaggagcgtatactaaaaccaa

SEQ ID NO: 2593060 - DNA, 25 bp, Homo sapien
tgtagaaggagcgtatactaaaacc

SEQ ID NO: 2593061 - DNA, 25 bp, Homo sapien
caacctgtagaaggagcgtatacta

SEQ ID NO: 2593062 - DNA, 25 bp, Homo sapien
aagtcccataaaatgctgtaggcaa

SEQ ID NO: 2593063 - DNA, 25 bp, Homo sapien
cccataaaatgctgtaggcaatcgt

SEQ ID NO: 2593064 - DNA, 25 bp, Homo sapien
gtcccataaaatgctgtaggcaatc

SEQ ID NO: 2593065 - DNA, 25 bp, Homo sapien
tcatcaaaaacttcaagtcccataa

SEQ ID NO: 2593066 - DNA, 25 bp, Homo sapien
caaaaccattgtaggagaccgagga

SEQ ID NO: 2593067 - DNA, 25 bp, Homo sapien
aaagatggcccagtaccgaatgacc

SEQ ID NO: 2593068 - DNA, 25 bp, Homo sapien
tgaagcaacgtgataacaagacagc

SEQ ID NO: 2593069 - DNA, 25 bp, Homo sapien
taggccgtctctccaatgtcagctg

SEQ ID NO: 2593070 - DNA, 25 bp, Homo sapien
aaagagcccgaagcaggcgtactgc

SEQ ID NO: 2593071 - DNA, 25 bp, Homo sapien
ccgaagcaggcgtactgcacgaagt

SEQ ID NO: 2593072 - DNA, 25 bp, Homo sapien
tactgcacgaagttcctgctcaaca

SEQ ID NO: 2593073 - DNA, 25 bp, Homo sapien
tgcagagctatgattccaaagagcc

SEQ ID NO: 2593074 - DNA, 25 bp, Homo sapien
agtcgcgctgctcgctccactggaa

SEQ ID NO: 2593075 - DNA, 25 bp, Homo sapien
cactggaaccacatacggatgccgt

SEQ ID NO: 2593076 - DNA, 25 bp, Homo sapien
ttccaggtggtgtcgatgtagtcgc

SEQ ID NO: 2593077 - DNA, 25 bp, Homo sapien
tgaggaagacgaaggacgaggccag

SEQ ID NO: 2593078 - DNA, 25 bp, Homo sapien
acagaaacccaagggtgaggtggct

SEQ ID NO: 2593079 - DNA, 25 bp, Homo sapien
gggcggggtgtgtgaggaacagacg

SEQ ID NO: 2593080 - DNA, 25 bp, Homo sapien
tgcagggccacagaaacccaagggt

SEQ ID NO: 2593081 - DNA, 25 bp, Homo sapien
aggccgctgccaggcacgtccttgg

SEQ ID NO: 2593082 - DNA, 25 bp, Homo sapien
aatggcctcacatcgtggcccagct

SEQ ID NO: 2593083 - DNA, 25 bp, Homo sapien
ggaatggcctcacatcgtggcccag

SEQ ID NO: 2593084 - DNA, 25 bp, Homo sapien
gaatggcctcacatcgtggcccagc

SEQ ID NO: 2593085 - DNA, 25 bp, Homo sapien
tggcctcacatcgtggcccagctgg

SEQ ID NO: 2593086 - DNA, 25 bp, Homo sapien
cattaagtctctccgagaaccgcgc

SEQ ID NO: 2593087 - DNA, 25 bp, Homo sapien
ttaagtctctccgagaaccgcgcca

SEQ ID NO: 2593088 - DNA, 25 bp, Homo sapien
taagtctctccgagaaccgcgccat

SEQ ID NO: 2593089 - DNA, 25 bp, Homo sapien
ctcattaagtctctccgagaaccgc

SEQ ID NO: 2593090 - DNA, 25 bp, Homo sapien
gacgaaaaaggcaggtcagatttcc

SEQ ID NO: 2593091 - DNA, 25 bp, Homo sapien
gagctggctcgagctcactggctca

SEQ ID NO: 2593092 - DNA, 25 bp, Homo sapien
ctagaaacaagcacctgcggcccag

SEQ ID NO: 2593093 - DNA, 25 bp, Homo sapien
aaagcagcttgcaaattcgtggtga

SEQ ID NO: 2593094 - DNA, 25 bp, Homo sapien
gctccagaacttccccgagccccgc

SEQ ID NO: 2593095 - DNA, 25 bp, Homo sapien
tgcagctccagaacttccccgagcc

SEQ ID NO: 2593096 - DNA, 25 bp, Homo sapien
tccagaacttccccgagccccgctc

SEQ ID NO: 2593097 - DNA, 25 bp, Homo sapien
cagctccagaacttccccgagcccc

SEQ ID NO: 2593098 - DNA, 25 bp, Homo sapien
gacgtaactgagaacgactgggccc

SEQ ID NO: 2593099 - DNA, 25 bp, Homo sapien
tgctctataggttcacactgcaccc

SEQ ID NO: 2593100 - DNA, 25 bp, Homo sapien
aggatgtcgccagcccaatgtggga

SEQ ID NO: 2593101 - DNA, 25 bp, Homo sapien
cccaactataggaaagacgtaactg

SEQ ID NO: 2593102 - DNA, 25 bp, Homo sapien
gtctcagcagtttctacagagcatg

SEQ ID NO: 2593103 - DNA, 25 bp, Homo sapien
ggtgttcatcgggaccctcacagtg

SEQ ID NO: 2593104 - DNA, 25 bp, Homo sapien
tgtctaataggcaatgaggagcagc

SEQ ID NO: 2593105 - DNA, 25 bp, Homo sapien
tgccaagctcctgcatagagcacgt

SEQ ID NO: 2593106 - DNA, 25 bp, Homo sapien
cagactgctcgtccccgtggaccag

SEQ ID NO: 2593107 - DNA, 25 bp, Homo sapien
gcaggccagaaggaaagatcagtca

SEQ ID NO: 2593108 - DNA, 25 bp, Homo sapien
ctgcaggccagaaggaaagatcagt

SEQ ID NO: 2593109 - DNA, 25 bp, Homo sapien
tgcaggccagaaggaaagatcagtc

SEQ ID NO: 2593110 - DNA, 25 bp, Homo sapien
tccgataagtctaggcctcagagtt

SEQ ID NO: 2593111 - DNA, 25 bp, Homo sapien
gcaaagccacacgaacacattaagt

SEQ ID NO: 2593112 - DNA, 25 bp, Homo sapien
aaggcataaatctgcgtaaccacca

SEQ ID NO: 2593113 - DNA, 25 bp, Homo sapien
gaaaaaacggcaagtgggccacaca

SEQ ID NO: 2593114 - DNA, 25 bp, Homo sapien
tggtcggcgaagtcctcggccgtgc

SEQ ID NO: 2593115 - DNA, 25 bp, Homo sapien
tcggccgtgcccatcaggtcgttct

SEQ ID NO: 2593116 - DNA, 25 bp, Homo sapien
aagtcctcggccgtgcccatcaggt

SEQ ID NO: 2593117 - DNA, 25 bp, Homo sapien
gccgtgcccatcaggtcgttctggc

SEQ ID NO: 2593118 - DNA, 25 bp, Homo sapien
cctccacaggaagtgcccggcggcc

SEQ ID NO: 2593119 - DNA, 25 bp, Homo sapien
ctcgctggctctcgcccgtcggcgc

SEQ ID NO: 2593120 - DNA, 25 bp, Homo sapien
ctcgctcgctggctctcgcccgtcg

SEQ ID NO: 2593121 - DNA, 25 bp, Homo sapien
tggctctcgcccgtcggcgcccgca

SEQ ID NO: 2593122 - DNA, 25 bp, Homo sapien
ccatcctctcgggatgatgggagac

SEQ ID NO: 2593123 - DNA, 25 bp, Homo sapien
ttcttgcaactagaccatcctctcg

SEQ ID NO: 2593124 - DNA, 25 bp, Homo sapien
tagaccatcctctcgggatgatggg

SEQ ID NO: 2593125 - DNA, 25 bp, Homo sapien
tgcaactagaccatcctctcgggat

SEQ ID NO: 2593126 - DNA, 25 bp, Homo sapien
agtgtccagtgtccgcaccaatggg

SEQ ID NO: 2593127 - DNA, 25 bp, Homo sapien
tcctctgctagggacgtggtgcaca

SEQ ID NO: 2593128 - DNA, 25 bp, Homo sapien
tccatggagtacgtccctgggtgtg

SEQ ID NO: 2593129 - DNA, 25 bp, Homo sapien
tatgagagaccctgccaaatgaatc

SEQ ID NO: 2593130 - DNA, 25 bp, Homo sapien
ggaaccctcaggcaaaatggatgtc

SEQ ID NO: 2593131 - DNA, 25 bp, Homo sapien
tgtcagttcatcctaccgggatagg

SEQ ID NO: 2593132 - DNA, 25 bp, Homo sapien
gactggataactgatgatacatggc

SEQ ID NO: 2593133 - DNA, 25 bp, Homo sapien
ggatagggccccgtcatggttccat

SEQ ID NO: 2593134 - DNA, 25 bp, Homo sapien
taagaccaggtttcagaccacaaag

SEQ ID NO: 2593135 - DNA, 25 bp, Homo sapien
tgacagcaccgtatggactggcggc

SEQ ID NO: 2593136 - DNA, 25 bp, Homo sapien
caccccagggtgtcaccgaagatgg

SEQ ID NO: 2593137 - DNA, 25 bp, Homo sapien
tcagcagtcggtaaagcgtggccag

SEQ ID NO: 2593138 - DNA, 25 bp, Homo sapien
ctaggcgtcgtcactgcagtggtct

SEQ ID NO: 2593139 - DNA, 25 bp, Homo sapien
taggcgtcgtcactgcagtggtctg

SEQ ID NO: 2593140 - DNA, 25 bp, Homo sapien
agtcagcagggggcgcctgtctcgg

SEQ ID NO: 2593141 - DNA, 25 bp, Homo sapien
gggcgcctgtctcgggccatgctct

SEQ ID NO: 2593142 - DNA, 25 bp, Homo sapien
atgacgtacagcctcattgctgcct

SEQ ID NO: 2593143 - DNA, 25 bp, Homo sapien
accatgacgtacagcctcattgctg

SEQ ID NO: 2593144 - DNA, 25 bp, Homo sapien
ttcaccatgacgtacagcctcattg

SEQ ID NO: 2593145 - DNA, 25 bp, Homo sapien
ccttcttcaccatgacgtacagcct

SEQ ID NO: 2593146 - DNA, 25 bp, Homo sapien
ctctgaaagtagtctcagagacggc

SEQ ID NO: 2593147 - DNA, 25 bp, Homo sapien
agtagtctcagagacggccttccac

SEQ ID NO: 2593148 - DNA, 25 bp, Homo sapien
tgaacagtgctccgcctgctggacc

SEQ ID NO: 2593149 - DNA, 25 bp, Homo sapien
tgaaagtagtctcagagacggcctt

SEQ ID NO: 2593150 - DNA, 25 bp, Homo sapien
tgtgtgtcccgaatcttcttttttg

SEQ ID NO: 2593151 - DNA, 25 bp, Homo sapien
atttctgtgtgtcccgaatcttctt

SEQ ID NO: 2593152 - DNA, 25 bp, Homo sapien
tatatttctgtgtgtcccgaatctt

SEQ ID NO: 2593153 - DNA, 25 bp, Homo sapien
tctgtgtgtcccgaatcttcttttt

SEQ ID NO: 2593154 - DNA, 25 bp, Homo sapien
gccacttccttctgaacaacttcaa

SEQ ID NO: 2593155 - DNA, 25 bp, Homo sapien
tccttctgaacaacttcaagctctt

SEQ ID NO: 2593156 - DNA, 25 bp, Homo sapien
gagcgtgccccactagaattctgcc

SEQ ID NO: 2593157 - DNA, 25 bp, Homo sapien
ggtcattatgcagagcgtgccccac

SEQ ID NO: 2593158 - DNA, 25 bp, Homo sapien
gctgtcctatagtccgtcacgggct

SEQ ID NO: 2593159 - DNA, 25 bp, Homo sapien
catactggttcacgatggacacacg

SEQ ID NO: 2593160 - DNA, 25 bp, Homo sapien
ttgaggttctcaggccgaatcccac

SEQ ID NO: 2593161 - DNA, 25 bp, Homo sapien
tcataaacgcacttcccatactggt

SEQ ID NO: 2593162 - DNA, 25 bp, Homo sapien
gccctccacggctaagcatccccag

SEQ ID NO: 2593163 - DNA, 25 bp, Homo sapien
gaccccactccctgagaccagcgta

SEQ ID NO: 2593164 - DNA, 25 bp, Homo sapien
cttgaagaagccccgccctccacgg

SEQ ID NO: 2593165 - DNA, 25 bp, Homo sapien
acggctaagcatccccagcagaccc

SEQ ID NO: 2593166 - DNA, 25 bp, Homo sapien
gaaggcctgctctttcacgaggctg

SEQ ID NO: 2593167 - DNA, 25 bp, Homo sapien
tgccctcgctctgacccaactgttt

SEQ ID NO: 2593168 - DNA, 25 bp, Homo sapien
ggcctgctctttcacgaggctgagg

SEQ ID NO: 2593169 - DNA, 25 bp, Homo sapien
tcgctctgacccaactgtttcctcg

SEQ ID NO: 2593170 - DNA, 25 bp, Homo sapien
tatgctcgatgtcccctcgttctgg

SEQ ID NO: 2593171 - DNA, 25 bp, Homo sapien
tcccttcacttgaggcgaggtctct

SEQ ID NO: 2593172 - DNA, 25 bp, Homo sapien
ccttggtgcgaggtactggcgccct

SEQ ID NO: 2593173 - DNA, 25 bp, Homo sapien
ccatcttggaacctgaaggaacaga

SEQ ID NO: 2593174 - DNA, 25 bp, Homo sapien
gatgacaagaggcttttctggggcc

SEQ ID NO: 2593175 - DNA, 25 bp, Homo sapien
gggcctgagatttttgtttcagcag

SEQ ID NO: 2593176 - DNA, 25 bp, Homo sapien
ctgagagatgacaagaggcttttct

SEQ ID NO: 2593177 - DNA, 25 bp, Homo sapien
aagaggcttttctggggcctgagat

SEQ ID NO: 2593178 - DNA, 25 bp, Homo sapien
ccaccacagtgcgatgatgaggcgg

SEQ ID NO: 2593179 - DNA, 25 bp, Homo sapien
tcaaatccccagtgggagtgggcgc

SEQ ID NO: 2593180 - DNA, 25 bp, Homo sapien
gatgaggcgggtgctacttacctgt

SEQ ID NO: 2593181 - DNA, 25 bp, Homo sapien
ctggagtggctgaagaactgctagc

SEQ ID NO: 2593182 - DNA, 25 bp, Homo sapien
aaccagctctcaaatgaaccagcag

SEQ ID NO: 2593183 - DNA, 25 bp, Homo sapien
aagaaaaaacgtttatgtagctcat

SEQ ID NO: 2593184 - DNA, 25 bp, Homo sapien
gaatacctgtgtttggtaatttata

SEQ ID NO: 2593185 - DNA, 25 bp, Homo sapien
tggtgaggccgaaggaagcttccca

SEQ ID NO: 2593186 - DNA, 25 bp, Homo sapien
caacacagccttaaaagcatggact

SEQ ID NO: 2593187 - DNA, 25 bp, Homo sapien
caatagcgatgatggaagtgtccac

SEQ ID NO: 2593188 - DNA, 25 bp, Homo sapien
ggttcccagccgcaatcttagatga

SEQ ID NO: 2593189 - DNA, 25 bp, Homo sapien
gagcaggcaacctctacagaagtgc

SEQ ID NO: 2593190 - DNA, 25 bp, Homo sapien
gtcttgacaggacccggcttagcca

SEQ ID NO: 2593191 - DNA, 25 bp, Homo sapien
ggtgcctttggaggtcgcaccacag

SEQ ID NO: 2593192 - DNA, 25 bp, Homo sapien
tggtgcctttggaggtcgcaccaca

SEQ ID NO: 2593193 - DNA, 25 bp, Homo sapien
agcgtcttgacaggacccggcttag

SEQ ID NO: 2593194 - DNA, 25 bp, Homo sapien
cgtccaggaaaagactccggaagag

SEQ ID NO: 2593195 - DNA, 25 bp, Homo sapien
gttgcgcatacctcagcacgcacgc

SEQ ID NO: 2593196 - DNA, 25 bp, Homo sapien
aggccaggccgaaacacacccaccg

SEQ ID NO: 2593197 - DNA, 25 bp, Homo sapien
agagaccccgcacgcgttgcgcata

SEQ ID NO: 2593198 - DNA, 25 bp, Homo sapien
aaggccacgcggcactgctcgttgg

SEQ ID NO: 2593199 - DNA, 25 bp, Homo sapien
gggccgaaggccacgcggcactgct

SEQ ID NO: 2593200 - DNA, 25 bp, Homo sapien
tgctccctggcgaaggtgcaggcga

SEQ ID NO: 2593201 - DNA, 25 bp, Homo sapien
ctcgttggcgctgtagtagaggcca

SEQ ID NO: 2593202 - DNA, 25 bp, Homo sapien
agcctcctgaagacattgcccccag

SEQ ID NO: 2593203 - DNA, 25 bp, Homo sapien
gggagcggccagtgcgctgcgtgga

SEQ ID NO: 2593204 - DNA, 25 bp, Homo sapien
agtgcgctgcgtggaggcccagggc

SEQ ID NO: 2593205 - DNA, 25 bp, Homo sapien
tgggagacttcggcccatgcagcgc

SEQ ID NO: 2593206 - DNA, 25 bp, Homo sapien
ccccgaagtccttcagtgaggagga

SEQ ID NO: 2593207 - DNA, 25 bp, Homo sapien
ggcggtcgttcccatcgtcatcagc

SEQ ID NO: 2593208 - DNA, 25 bp, Homo sapien
ctgtacggactctctgctctgggca

SEQ ID NO: 2593209 - DNA, 25 bp, Homo sapien
gctgggcaacgccatcgcctttgct

SEQ ID NO: 2593210 - DNA, 25 bp, Homo sapien
agatgccaccagatcagagcgcgat

SEQ ID NO: 2593211 - DNA, 25 bp, Homo sapien
gatatgactacgttacttggctgcc

SEQ ID NO: 2593212 - DNA, 25 bp, Homo sapien
tgaacacagtttgcagataggagct

SEQ ID NO: 2593213 - DNA, 25 bp, Homo sapien
gggttgtatgcactcctgcggccca

SEQ ID NO: 2593214 - DNA, 25 bp, Homo sapien
cagatggccgcgaagaagaagaaag

SEQ ID NO: 2593215 - DNA, 25 bp, Homo sapien
ggaccgtcccttggtctcgggcaca

SEQ ID NO: 2593216 - DNA, 25 bp, Homo sapien
gcctgtgaacaccaggctcaccaag

SEQ ID NO: 2593217 - DNA, 25 bp, Homo sapien
tctccccgtgcggaagaaggactcg

SEQ ID NO: 2593218 - DNA, 25 bp, Homo sapien
ctggtcacagggcccgtagttttga

SEQ ID NO: 2593219 - DNA, 25 bp, Homo sapien
tcacagattctggctggtcacaggg

SEQ ID NO: 2593220 - DNA, 25 bp, Homo sapien
cctcacagattctggctggtcacag

SEQ ID NO: 2593221 - DNA, 25 bp, Homo sapien
tggtcacagggcccgtagttttgaa

SEQ ID NO: 2593222 - DNA, 25 bp, Homo sapien
cgcaggggcaggacctcagacatga

SEQ ID NO: 2593223 - DNA, 25 bp, Homo sapien
gcacgcaggggcaggacctcagaca

SEQ ID NO: 2593224 - DNA, 25 bp, Homo sapien
agccctgaggccacgccacgggcac

SEQ ID NO: 2593225 - DNA, 25 bp, Homo sapien
gagccctgaggccacgccacgggca

SEQ ID NO: 2593226 - DNA, 25 bp, Homo sapien
agtcaggttggcagcaaacatgatg

SEQ ID NO: 2593227 - DNA, 25 bp, Homo sapien
gtgaggtagccagcgggtgctgcca

SEQ ID NO: 2593228 - DNA, 25 bp, Homo sapien
ggccaaagtggatgtacagccccag

SEQ ID NO: 2593229 - DNA, 25 bp, Homo sapien
caccagggtgaggtagccagcgggt

SEQ ID NO: 2593230 - DNA, 25 bp, Homo sapien
ggagccccagcggacctttctggac

SEQ ID NO: 2593231 - DNA, 25 bp, Homo sapien
cagccctgacccatgcggaggagtg

SEQ ID NO: 2593232 - DNA, 25 bp, Homo sapien
tgatacttgcgtggtccagctcgtg

SEQ ID NO: 2593233 - DNA, 25 bp, Homo sapien
gcgtgttaggctcccaccgtggagt

SEQ ID NO: 2593234 - DNA, 25 bp, Homo sapien
atcagcacggacaggagccgcacgg

SEQ ID NO: 2593235 - DNA, 25 bp, Homo sapien
ccaacgatggctgcgtcgtccttgg

SEQ ID NO: 2593236 - DNA, 25 bp, Homo sapien
ctgagacgaagagcagcaccttgcg

SEQ ID NO: 2593237 - DNA, 25 bp, Homo sapien
accttgcggcctgcgaggtccatgg

SEQ ID NO: 2593238 - DNA, 25 bp, Homo sapien
caggatgggcgtgatgcccgtcagc

SEQ ID NO: 2593239 - DNA, 25 bp, Homo sapien
gcccgtgcctcagcccacgatactc

SEQ ID NO: 2593240 - DNA, 25 bp, Homo sapien
acagcggtgctgtcgaagatggact

SEQ ID NO: 2593241 - DNA, 25 bp, Homo sapien
gcgcatcagcaaggccacggtgatg

SEQ ID NO: 2593242 - DNA, 25 bp, Homo sapien
ctgaaacacaaggccgccgctgagg

SEQ ID NO: 2593243 - DNA, 25 bp, Homo sapien
caaggccgccgctgagggcgttggg

SEQ ID NO: 2593244 - DNA, 25 bp, Homo sapien
acacaaggccgccgctgagggcgtt

SEQ ID NO: 2593245 - DNA, 25 bp, Homo sapien
gggcgttgggccagcctctccagca

SEQ ID NO: 2593246 - DNA, 25 bp, Homo sapien
aactcccagtggacatcgacgtccg

SEQ ID NO: 2593247 - DNA, 25 bp, Homo sapien
atctgctcgaactcccagtggacat

SEQ ID NO: 2593248 - DNA, 25 bp, Homo sapien
tgtctccggacgttgtcctggatct

SEQ ID NO: 2593249 - DNA, 25 bp, Homo sapien
agtggacatcgacgtccgtcccacg

SEQ ID NO: 2593250 - DNA, 25 bp, Homo sapien
ctgccccgagagagcaggaagcgcg

SEQ ID NO: 2593251 - DNA, 25 bp, Homo sapien
atgatgagcacaggcgcctccccgg

SEQ ID NO: 2593252 - DNA, 25 bp, Homo sapien
gcagcaggatcatgatgagcacagg

SEQ ID NO: 2593253 - DNA, 25 bp, Homo sapien
aagcgcggcgagttgggcatgaagc

SEQ ID NO: 2593254 - DNA, 25 bp, Homo sapien
cacgtctaccttggcggcacccacc

SEQ ID NO: 2593255 - DNA, 25 bp, Homo sapien
ccacgtctaccttggcggcacccac

SEQ ID NO: 2593256 - DNA, 25 bp, Homo sapien
tgggggagcaatctcagacacgtac

SEQ ID NO: 2593257 - DNA, 25 bp, Homo sapien
gaacgcctgggggagcaatctcaga

SEQ ID NO: 2593258 - DNA, 25 bp, Homo sapien
cgcctgggggagcaatctcagacac

SEQ ID NO: 2593259 - DNA, 25 bp, Homo sapien
cagagccccacgaacgcctggggga

SEQ ID NO: 2593260 - DNA, 25 bp, Homo sapien
caggttttgctgaaaatactggttc

SEQ ID NO: 2593261 - DNA, 25 bp, Homo sapien
aagcccgtcagcgtccttccgagca

SEQ ID NO: 2593262 - DNA, 25 bp, Homo sapien
cgaagcccgtcagcgtccttccgag

SEQ ID NO: 2593263 - DNA, 25 bp, Homo sapien
ccggcgaagcccgtcagcgtccttc

SEQ ID NO: 2593264 - DNA, 25 bp, Homo sapien
cccgtcagcgtccttccgagcagca

SEQ ID NO: 2593265 - DNA, 25 bp, Homo sapien
agcttccggcccaggaggtcgttga

SEQ ID NO: 2593266 - DNA, 25 bp, Homo sapien
ccgacggcacagctgagaacatgat

SEQ ID NO: 2593267 - DNA, 25 bp, Homo sapien
cacagctgagaacatgatgctcagc

SEQ ID NO: 2593268 - DNA, 25 bp, Homo sapien
gaggtcgttgaggatcatggcactc

SEQ ID NO: 2593269 - DNA, 25 bp, Homo sapien
aggtcaggatccaaggagcgctcca

SEQ ID NO: 2593270 - DNA, 25 bp, Homo sapien
accaggatgcctgggatttggtcag

SEQ ID NO: 2593271 - DNA, 25 bp, Homo sapien
gatgtgtagaccagggcatacccaa

SEQ ID NO: 2593272 - DNA, 25 bp, Homo sapien
aaagctgaaattgccgagcactgcg

SEQ ID NO: 2593273 - DNA, 25 bp, Homo sapien
caggccattgttagctcatccgcag

SEQ ID NO: 2593274 - DNA, 25 bp, Homo sapien
tgggcccggtactctcgtggatcgt

SEQ ID NO: 2593275 - DNA, 25 bp, Homo sapien
tgatggtggcggacaaaaagaccag

SEQ ID NO: 2593276 - DNA, 25 bp, Homo sapien
ccttaaataggagtagcgtgtctgg

SEQ ID NO: 2593277 - DNA, 25 bp, Homo sapien
cctggcgacgggggcggcttctcgg

SEQ ID NO: 2593278 - DNA, 25 bp, Homo sapien
ctggcgacgggggcggcttctcggg

SEQ ID NO: 2593279 - DNA, 25 bp, Homo sapien
gcttctcggggaaggtgtcgtagtc

SEQ ID NO: 2593280 - DNA, 25 bp, Homo sapien
gtgtcgtagtccgggccctcggctc

SEQ ID NO: 2593281 - DNA, 25 bp, Homo sapien
gctcagactggagcagccgcccggg

SEQ ID NO: 2593282 - DNA, 25 bp, Homo sapien
gcggagggcgctcagactggagcag

SEQ ID NO: 2593283 - DNA, 25 bp, Homo sapien
gagcggagggcgctcagactggagc

SEQ ID NO: 2593284 - DNA, 25 bp, Homo sapien
gcgagcggagggcgctcagactgga

SEQ ID NO: 2593285 - DNA, 25 bp, Homo sapien
tggctggtgtgggacggaccttgcc

SEQ ID NO: 2593286 - DNA, 25 bp, Homo sapien
gtgtgggacggaccttgccaaagct

SEQ ID NO: 2593287 - DNA, 25 bp, Homo sapien
ctggtgccttccgtgaccctggcgc

SEQ ID NO: 2593288 - DNA, 25 bp, Homo sapien
ctggcgccttccgtgaccctggctg

SEQ ID NO: 2593289 - DNA, 25 bp, Homo sapien
gctgggctgggtaagtagggcctgc

SEQ ID NO: 2593290 - DNA, 25 bp, Homo sapien
gggcagatgagctctagggtgtagg

SEQ ID NO: 2593291 - DNA, 25 bp, Homo sapien
tagggtgtaggaggagtaggccagg

SEQ ID NO: 2593292 - DNA, 25 bp, Homo sapien
gctgggtaagtagggcctgcaggaa

SEQ ID NO: 2593293 - DNA, 25 bp, Homo sapien
ggcagaccatagtccagcgtgctgc

SEQ ID NO: 2593294 - DNA, 25 bp, Homo sapien
ctgtctctgggcagaccatagtcca

SEQ ID NO: 2593295 - DNA, 25 bp, Homo sapien
ccggggggctgtacgcttcctctgt

SEQ ID NO: 2593296 - DNA, 25 bp, Homo sapien
tctctgggcagaccatagtccagcg

SEQ ID NO: 2593297 - DNA, 25 bp, Homo sapien
ggttaggaaagtatgtgcttttgcc

SEQ ID NO: 2593298 - DNA, 25 bp, Homo sapien
taggaaagtatgtgcttttgccggg

SEQ ID NO: 2593299 - DNA, 25 bp, Homo sapien
cagccagatgcctgaggttaggaaa

SEQ ID NO: 2593300 - DNA, 25 bp, Homo sapien
gaggttaggaaagtatgtgcttttg

SEQ ID NO: 2593301 - DNA, 25 bp, Homo sapien
tttgcttggggatggcaatgagcct

SEQ ID NO: 2593302 - DNA, 25 bp, Homo sapien
gcttggggatggcaatgagccttcc

SEQ ID NO: 2593303 - DNA, 25 bp, Homo sapien
ctaattttgcttggggatggcaatg

SEQ ID NO: 2593304 - DNA, 25 bp, Homo sapien
aattttgcttggggatggcaatgag

SEQ ID NO: 2593305 - DNA, 25 bp, Homo sapien
gatgtgcagcgaccttgggctgtaa

SEQ ID NO: 2593306 - DNA, 25 bp, Homo sapien
gctgtaacctcagggggttcgcgcc

SEQ ID NO: 2593307 - DNA, 25 bp, Homo sapien
tgcagcgaccttgggctgtaacctc

SEQ ID NO: 2593308 - DNA, 25 bp, Homo sapien
gccagatgtgcagcgaccttgggct

SEQ ID NO: 2593309 - DNA, 25 bp, Homo sapien
tccccggaatagatctctggggttg

SEQ ID NO: 2593310 - DNA, 25 bp, Homo sapien
atgttccactggaaggcctgagggc

SEQ ID NO: 2593311 - DNA, 25 bp, Homo sapien
aaatgttccactggaaggcctgagg

SEQ ID NO: 2593312 - DNA, 25 bp, Homo sapien
caaaaatgttccactggaaggcctg

SEQ ID NO: 2593313 - DNA, 25 bp, Homo sapien
gggcccccttgttgctcagctgctg

SEQ ID NO: 2593314 - DNA, 25 bp, Homo sapien
cccccttgttgctcagctgctgtcc

SEQ ID NO: 2593315 - DNA, 25 bp, Homo sapien
ctgtcctggggtcacggctctcggc

SEQ ID NO: 2593316 - DNA, 25 bp, Homo sapien
tgtcctggggtcacggctctcggcc

SEQ ID NO: 2593317 - DNA, 25 bp, Homo sapien
tgtggacatcgtgttctcgagcctg

SEQ ID NO: 2593318 - DNA, 25 bp, Homo sapien
gagcctgtggacatcgtgttctcga

SEQ ID NO: 2593319 - DNA, 25 bp, Homo sapien
tcgtgttctcgagcctgaaggacca

SEQ ID NO: 2593320 - DNA, 25 bp, Homo sapien
tctcgagcctgaaggaccagcaggg

SEQ ID NO: 2593321 - DNA, 25 bp, Homo sapien
cctgggatgccacacgtattgtaat

SEQ ID NO: 2593322 - DNA, 25 bp, Homo sapien
ctgtgttcacatggctagggtccgg

SEQ ID NO: 2593323 - DNA, 25 bp, Homo sapien
cttcttgcgcatggaggatgggtac

SEQ ID NO: 2593324 - DNA, 25 bp, Homo sapien
ttgcccatatcgacagagaagcccg

SEQ ID NO: 2593325 - DNA, 25 bp, Homo sapien
aagcccccagagctcaactctcctg

SEQ ID NO: 2593326 - DNA, 25 bp, Homo sapien
atcagggatgctgtcgcctccacca

SEQ ID NO: 2593327 - DNA, 25 bp, Homo sapien
ggatgctgtcgcctccaccactgag

SEQ ID NO: 2593328 - DNA, 25 bp, Homo sapien
gtggcccatcagggatgctgtcgcc

SEQ ID NO: 2593329 - DNA, 25 bp, Homo sapien
aagtccagacacaatgtgtctcggt

SEQ ID NO: 2593330 - DNA, 25 bp, Homo sapien
gacacaatgtgtctcggtcaggcat

SEQ ID NO: 2593331 - DNA, 25 bp, Homo sapien
tgagaaatggaactcgtccccagac

SEQ ID NO: 2593332 - DNA, 25 bp, Homo sapien
aggcgagtgcccgttgggcccttct

SEQ ID NO: 2593333 - DNA, 25 bp, Homo sapien
ggggctgggggtggagcggcgtcca

SEQ ID NO: 2593334 - DNA, 25 bp, Homo sapien
tgggggctgggggtggagcggcgtc

SEQ ID NO: 2593335 - DNA, 25 bp, Homo sapien
ggctgggggtggagcggcgtccagg

SEQ ID NO: 2593336 - DNA, 25 bp, Homo sapien
gctgggggctgggggtggagcggcg

SEQ ID NO: 2593337 - DNA, 25 bp, Homo sapien
tgaaggcttgccgtctcagagactg

SEQ ID NO: 2593338 - DNA, 25 bp, Homo sapien
tgatgatggcgataaaatagtttga

SEQ ID NO: 2593339 - DNA, 25 bp, Homo sapien
acatgctgggccatagagagagaca

SEQ ID NO: 2593340 - DNA, 25 bp, Homo sapien
tgaccgacctcagtaccagttagaa

SEQ ID NO: 2593341 - DNA, 25 bp, Homo sapien
ccaagccagcagcagacgcttatca

SEQ ID NO: 2593342 - DNA, 25 bp, Homo sapien
agccagcagcagacgcttatcagcc

SEQ ID NO: 2593343 - DNA, 25 bp, Homo sapien
ccagcagcagacgcttatcagcctg

SEQ ID NO: 2593344 - DNA, 25 bp, Homo sapien
caagccagcagcagacgcttatcag

SEQ ID NO: 2593345 - DNA, 25 bp, Homo sapien
cagatgtggccgcagctactcgata

SEQ ID NO: 2593346 - DNA, 25 bp, Homo sapien
ccaaacgtcttccagatgtggccgc

SEQ ID NO: 2593347 - DNA, 25 bp, Homo sapien
gtgcgggggccgaactctgcccaaa

SEQ ID NO: 2593348 - DNA, 25 bp, Homo sapien
cagctactcgatagcctggctccag

SEQ ID NO: 2593349 - DNA, 25 bp, Homo sapien
ctgggacagaagccggcaatggaca

SEQ ID NO: 2593350 - DNA, 25 bp, Homo sapien
gggacagaagccggcaatggacaca

SEQ ID NO: 2593351 - DNA, 25 bp, Homo sapien
tgggacagaagccggcaatggacac

SEQ ID NO: 2593352 - DNA, 25 bp, Homo sapien
ggacagaagccggcaatggacacac

SEQ ID NO: 2593353 - DNA, 25 bp, Homo sapien
tccacgtgggcagtggtggctttct

SEQ ID NO: 2593354 - DNA, 25 bp, Homo sapien
ctggcaccgttctctccacgtgggc

SEQ ID NO: 2593355 - DNA, 25 bp, Homo sapien
agccatcatagacacggcccgaggg

SEQ ID NO: 2593356 - DNA, 25 bp, Homo sapien
catggccagactcagaaccatggaa

SEQ ID NO: 2593357 - DNA, 25 bp, Homo sapien
gacaaagccatcatagacacggccc

SEQ ID NO: 2593358 - DNA, 25 bp, Homo sapien
caggggcatggccagactcagaacc

SEQ ID NO: 2593359 - DNA, 25 bp, Homo sapien
taacttgcagcgttggggtgaccat

SEQ ID NO: 2593360 - DNA, 25 bp, Homo sapien
attccagggacacgacgccctcggg

SEQ ID NO: 2593361 - DNA, 25 bp, Homo sapien
ctttcttgttaacttgcagcgttgg

SEQ ID NO: 2593362 - DNA, 25 bp, Homo sapien
tgttaacttgcagcgttggggtgac

SEQ ID NO: 2593363 - DNA, 25 bp, Homo sapien
cccaagatgtcaaagtgggccgtgg

SEQ ID NO: 2593364 - DNA, 25 bp, Homo sapien
ctggctccctggtcagagcccccaa

SEQ ID NO: 2593365 - DNA, 25 bp, Homo sapien
tccctggtcagagcccccaagatgt

SEQ ID NO: 2593366 - DNA, 25 bp, Homo sapien
ccaagatgtcaaagtgggccgtggt

SEQ ID NO: 2593367 - DNA, 25 bp, Homo sapien
ttcgcgcttggcagggccctcgtcg

SEQ ID NO: 2593368 - DNA, 25 bp, Homo sapien
ggccttcgtaaatcgctgcagtgag

SEQ ID NO: 2593369 - DNA, 25 bp, Homo sapien
cagtgtggcccttcgcgcttggcag

SEQ ID NO: 2593370 - DNA, 25 bp, Homo sapien
gtcgccgccctgctcggagtggcct

SEQ ID NO: 2593371 - DNA, 25 bp, Homo sapien
ccccggggatccagccttcttgttg

SEQ ID NO: 2593372 - DNA, 25 bp, Homo sapien
ggggatccagccttcttgttgacct

SEQ ID NO: 2593373 - DNA, 25 bp, Homo sapien
acagggtggagcagtccagcttggc

SEQ ID NO: 2593374 - DNA, 25 bp, Homo sapien
tgtggacataagtgtagtcccagtc

SEQ ID NO: 2593375 - DNA, 25 bp, Homo sapien
cggtcgcgctcacagtggtttttct

SEQ ID NO: 2593376 - DNA, 25 bp, Homo sapien
gcgctcacagtggtttttctctcca

SEQ ID NO: 2593377 - DNA, 25 bp, Homo sapien
cccacggtcgcgctcacagtggttt

SEQ ID NO: 2593378 - DNA, 25 bp, Homo sapien
tcgcgctcacagtggtttttctctc

SEQ ID NO: 2593379 - DNA, 25 bp, Homo sapien
tctgagatgccagctgtctgtaggc

SEQ ID NO: 2593380 - DNA, 25 bp, Homo sapien
ctgagatgccagctgtctgtaggca

SEQ ID NO: 2593381 - DNA, 25 bp, Homo sapien
ggtggtgctggggacggcattgccc

SEQ ID NO: 2593382 - DNA, 25 bp, Homo sapien
tggggacggcattgcccccgacata

SEQ ID NO: 2593383 - DNA, 25 bp, Homo sapien
tgctggggacggcattgcccccgac

SEQ ID NO: 2593384 - DNA, 25 bp, Homo sapien
gggacggcattgcccccgacatagc

SEQ ID NO: 2593385 - DNA, 25 bp, Homo sapien
tatctgctgggtgtagacgctcttg

SEQ ID NO: 2593386 - DNA, 25 bp, Homo sapien
agaagcgtagcatcagggccagcgc

SEQ ID NO: 2593387 - DNA, 25 bp, Homo sapien
ctcaaagaagaagcgtagcatcagg

SEQ ID NO: 2593388 - DNA, 25 bp, Homo sapien
gacgctcttgtctgggtacaggccc

SEQ ID NO: 2593389 - DNA, 25 bp, Homo sapien
ccgtagccccatcggtcatggtaga

SEQ ID NO: 2593390 - DNA, 25 bp, Homo sapien
tggtagatccgcacagcaatggtca

SEQ ID NO: 2593391 - DNA, 25 bp, Homo sapien
tgacctcttgggttcgtcgaagtcg

SEQ ID NO: 2593392 - DNA, 25 bp, Homo sapien
ggacgccgaacatcacaaatgttga

SEQ ID NO: 2593393 - DNA, 25 bp, Homo sapien
agggctgtcccgtagacactgaaat

SEQ ID NO: 2593394 - DNA, 25 bp, Homo sapien
aatactccaggatgtcgtgacgcat

SEQ ID NO: 2593395 - DNA, 25 bp, Homo sapien
tgaaatactccaggatgtcgtgacg

SEQ ID NO: 2593396 - DNA, 25 bp, Homo sapien
gggctgtcccgtagacactgaaata

SEQ ID NO: 2593397 - DNA, 25 bp, Homo sapien
gcacagacaagccgggtccattgca

SEQ ID NO: 2593398 - DNA, 25 bp, Homo sapien
agcacagacaagccgggtccattgc

SEQ ID NO: 2593399 - DNA, 25 bp, Homo sapien
acagacaagccgggtccattgcagg

SEQ ID NO: 2593400 - DNA, 25 bp, Homo sapien
cagcacagacaagccgggtccattg

SEQ ID NO: 2593401 - DNA, 25 bp, Homo sapien
tgggaaacagcacggtggactcttg

SEQ ID NO: 2593402 - DNA, 25 bp, Homo sapien
ggaaagcagcccgtgtctggaggcg

SEQ ID NO: 2593403 - DNA, 25 bp, Homo sapien
cggtggactcttggtcagcccagct

SEQ ID NO: 2593404 - DNA, 25 bp, Homo sapien
tcaactggcacaaacaagcttggga

SEQ ID NO: 2593405 - DNA, 25 bp, Homo sapien
ggaggggcctgatcaaggtgcttac

SEQ ID NO: 2593406 - DNA, 25 bp, Homo sapien
aggaggggcctgatcaaggtgctta

SEQ ID NO: 2593407 - DNA, 25 bp, Homo sapien
caggaggggcctgatcaaggtgctt

SEQ ID NO: 2593408 - DNA, 25 bp, Homo sapien
cttggggacagggaagcttcaggag

SEQ ID NO: 2593409 - DNA, 25 bp, Homo sapien
acttggcattcttgcccatagaggc

SEQ ID NO: 2593410 - DNA, 25 bp, Homo sapien
cttggcattcttgcccatagaggcc

SEQ ID NO: 2593411 - DNA, 25 bp, Homo sapien
tcatctctgctccatcgtggcctat

SEQ ID NO: 2593412 - DNA, 25 bp, Homo sapien
catcgtggcctatgggtagagctcg

SEQ ID NO: 2593413 - DNA, 25 bp, Homo sapien
tctgctccatcgtggcctatgggta

SEQ ID NO: 2593414 - DNA, 25 bp, Homo sapien
caggccttcacactccctgaaccct

SEQ ID NO: 2593415 - DNA, 25 bp, Homo sapien
gaagaggtagaccatggcctccatg

SEQ ID NO: 2593416 - DNA, 25 bp, Homo sapien
aaccgcctcttggccgcgatgctga

SEQ ID NO: 2593417 - DNA, 25 bp, Homo sapien
ggtgaagaggtagaccatggcctcc

SEQ ID NO: 2593418 - DNA, 25 bp, Homo sapien
gaaccgcctcttggccgcgatgctg

SEQ ID NO: 2593419 - DNA, 25 bp, Homo sapien
ctgtctcgttgggcccttccagcag

SEQ ID NO: 2593420 - DNA, 25 bp, Homo sapien
ttgagccccaggatgggacagactc

SEQ ID NO: 2593421 - DNA, 25 bp, Homo sapien
gatgggacagactctcctggcttga

SEQ ID NO: 2593422 - DNA, 25 bp, Homo sapien
cctctaagttctgaaagagggagga

SEQ ID NO: 2593423 - DNA, 25 bp, Homo sapien
gaggagaaggcactcttcccttccc

SEQ ID NO: 2593424 - DNA, 25 bp, Homo sapien
gaggcgagagcgctacccactgtgc

SEQ ID NO: 2593425 - DNA, 25 bp, Homo sapien
cttcttgctgtgaggcgagagcgct

SEQ ID NO: 2593426 - DNA, 25 bp, Homo sapien
gaaccagcgaccttcttgctgtgag

SEQ ID NO: 2593427 - DNA, 25 bp, Homo sapien
tgccgagactcgaaccagcgacctt

SEQ ID NO: 2593428 - DNA, 25 bp, Homo sapien
cacaaatgtcaccatggctagactg

SEQ ID NO: 2593429 - DNA, 25 bp, Homo sapien
ggccaagtatatgcaaattgatgag

SEQ ID NO: 2593430 - DNA, 25 bp, Homo sapien
ggcactgttgtaaacaagtaagggc

SEQ ID NO: 2593431 - DNA, 25 bp, Homo sapien
ctagactgggagagtctacagtgtt

SEQ ID NO: 2593432 - DNA, 25 bp, Homo sapien
ctggattcaactgaagcgccagcct

SEQ ID NO: 2593433 - DNA, 25 bp, Homo sapien
tggattcaactgaagcgccagcctg

SEQ ID NO: 2593434 - DNA, 25 bp, Homo sapien
ctccacccagagcagcacactgtga

SEQ ID NO: 2593435 - DNA, 25 bp, Homo sapien
cacccagagcagcacactgtgagaa

SEQ ID NO: 2593436 - DNA, 25 bp, Homo sapien
atgaattcatggcatcgtgggtgtt

SEQ ID NO: 2593437 - DNA, 25 bp, Homo sapien
ttcatggcatcgtgggtgttaaaaa

SEQ ID NO: 2593438 - DNA, 25 bp, Homo sapien
tgaattcatggcatcgtgggtgtta

SEQ ID NO: 2593439 - DNA, 25 bp, Homo sapien
attcatggcatcgtgggtgttaaaa

SEQ ID NO: 2593440 - DNA, 25 bp, Homo sapien
catcatccacttggcagatgtagat

SEQ ID NO: 2593441 - DNA, 25 bp, Homo sapien
tggatgaaggagaatttgttccgcc

SEQ ID NO: 2593442 - DNA, 25 bp, Homo sapien
aatttgttccgccacctctaggtgg

SEQ ID NO: 2593443 - DNA, 25 bp, Homo sapien
tctaggtggcagcctcgtcctgtcc

SEQ ID NO: 2593444 - DNA, 25 bp, Homo sapien
cagccggatgctttgcaggagcagc

SEQ ID NO: 2593445 - DNA, 25 bp, Homo sapien
ctggcacagccggatgctttgcagg

SEQ ID NO: 2593446 - DNA, 25 bp, Homo sapien
ggccagtccccggtaggcattgttc

SEQ ID NO: 2593447 - DNA, 25 bp, Homo sapien
aggcattgttcaccagcagggctct

SEQ ID NO: 2593448 - DNA, 25 bp, Homo sapien
agaagactccgcagctggcttctgc

SEQ ID NO: 2593449 - DNA, 25 bp, Homo sapien
ttccccatccgcagggtaggtggcc

SEQ ID NO: 2593450 - DNA, 25 bp, Homo sapien
agcagccagaagactccgcagctgg

SEQ ID NO: 2593451 - DNA, 25 bp, Homo sapien
aacacctggctgatgaggtccggga

SEQ ID NO: 2593452 - DNA, 25 bp, Homo sapien
tttcctggggcgctggagtgccaag

SEQ ID NO: 2593453 - DNA, 25 bp, Homo sapien
cgggctttccgtggtttggagctct

SEQ ID NO: 2593454 - DNA, 25 bp, Homo sapien
tccgtggtttggagctctctttttc

SEQ ID NO: 2593455 - DNA, 25 bp, Homo sapien
ctttccgtggtttggagctctcttt

SEQ ID NO: 2593456 - DNA, 25 bp, Homo sapien
ggccgctggcgcagacgtccctgct

SEQ ID NO: 2593457 - DNA, 25 bp, Homo sapien
caggccgctggcgcagacgtccctg

SEQ ID NO: 2593458 - DNA, 25 bp, Homo sapien
cccaggccgctggcgcagacgtccc

SEQ ID NO: 2593459 - DNA, 25 bp, Homo sapien
gccgctggcgcagacgtccctgctt

SEQ ID NO: 2593460 - DNA, 25 bp, Homo sapien
gccaagtcgtgtgcactcaatggag

SEQ ID NO: 2593461 - DNA, 25 bp, Homo sapien
caagtcgtgtgcactcaatggagcc

SEQ ID NO: 2593462 - DNA, 25 bp, Homo sapien
tgctctgggccaagtcgtgtgcact

SEQ ID NO: 2593463 - DNA, 25 bp, Homo sapien
tctgggccaagtcgtgtgcactcaa

SEQ ID NO: 2593464 - DNA, 25 bp, Homo sapien
caactgtccttaggctctctcgagg

SEQ ID NO: 2593465 - DNA, 25 bp, Homo sapien
ggcaactgtccttaggctctctcga

SEQ ID NO: 2593466 - DNA, 25 bp, Homo sapien
gtccttaggctctctcgaggcccag

SEQ ID NO: 2593467 - DNA, 25 bp, Homo sapien
actgtccttaggctctctcgaggcc

SEQ ID NO: 2593468 - DNA, 25 bp, Homo sapien
ccgatttgtgggtgaaggtgtgagc

SEQ ID NO: 2593469 - DNA, 25 bp, Homo sapien
gagcgctctgtatggccctctcctt

SEQ ID NO: 2593470 - DNA, 25 bp, Homo sapien
ctggctggcggcttcggaagcccac

SEQ ID NO: 2593471 - DNA, 25 bp, Homo sapien
tggctggcggcttcggaagcccact

SEQ ID NO: 2593472 - DNA, 25 bp, Homo sapien
ccatagcagcagtgcatgggcgctg

SEQ ID NO: 2593473 - DNA, 25 bp, Homo sapien
cgctggtctagctggggtccccgaa

SEQ ID NO: 2593474 - DNA, 25 bp, Homo sapien
gtcgctgccgctccctggtggagct

SEQ ID NO: 2593475 - DNA, 25 bp, Homo sapien
ttgcagtggtgctccaagggtcgct

SEQ ID NO: 2593476 - DNA, 25 bp, Homo sapien
caatcccaggccaccgccggcagac

SEQ ID NO: 2593477 - DNA, 25 bp, Homo sapien
ccaatcccaggccaccgccggcaga

SEQ ID NO: 2593478 - DNA, 25 bp, Homo sapien
aatcccaggccaccgccggcagact

SEQ ID NO: 2593479 - DNA, 25 bp, Homo sapien
aaggccacgcggcactgctcgttgg

SEQ ID NO: 2593480 - DNA, 25 bp, Homo sapien
gggccgaaggccacgcggcactgct

SEQ ID NO: 2593481 - DNA, 25 bp, Homo sapien
tgctccctggcgaaggtgcaggcga

SEQ ID NO: 2593482 - DNA, 25 bp, Homo sapien
ctcgttggcgctgtagtagaggcca

SEQ ID NO: 2593483 - DNA, 25 bp, Homo sapien
gtcccacacgcagcgcgcccgtcct

SEQ ID NO: 2593484 - DNA, 25 bp, Homo sapien
gcatccggcgggtgccccgcggacc

SEQ ID NO: 2593485 - DNA, 25 bp, Homo sapien
ctgcgcatccggcgggtgccccgcg

SEQ ID NO: 2593486 - DNA, 25 bp, Homo sapien
cgggtcccacacgcagcgcgcccgt

SEQ ID NO: 2593487 - DNA, 25 bp, Homo sapien
gcgcggcgccgtccgaagccatcac

SEQ ID NO: 2593488 - DNA, 25 bp, Homo sapien
ccgaagccatcacgtgtccgctggg

SEQ ID NO: 2593489 - DNA, 25 bp, Homo sapien
atcacgtgtccgctggggccgcagc

SEQ ID NO: 2593490 - DNA, 25 bp, Homo sapien
cgcgccgtcgtgctccaggccgaag

SEQ ID NO: 2593491 - DNA, 25 bp, Homo sapien
gatgcacctggtacgcatggcacac

SEQ ID NO: 2593492 - DNA, 25 bp, Homo sapien
tctggtacccctgatgtgaatagtc

SEQ ID NO: 2593493 - DNA, 25 bp, Homo sapien
tgaatagtccctgggcacacctggt

SEQ ID NO: 2593494 - DNA, 25 bp, Homo sapien
ggttctctggcatacctggtccctg

SEQ ID NO: 2593495 - DNA, 25 bp, Homo sapien
gtgtctgcctcaacccaacccaggg

SEQ ID NO: 2593496 - DNA, 25 bp, Homo sapien
cagtgaccgatgcagagaccaacac

SEQ ID NO: 2593497 - DNA, 25 bp, Homo sapien
cagactcagttgttgtctacactgt

SEQ ID NO: 2593498 - DNA, 25 bp, Homo sapien
agtagaccacactccatgaagatgg

SEQ ID NO: 2593499 - DNA, 25 bp, Homo sapien
aggcctcccctacactacttgtatt

SEQ ID NO: 2593500 - DNA, 25 bp, Homo sapien
tttgggaccagcatgctcggaatat

SEQ ID NO: 2593501 - DNA, 25 bp, Homo sapien
tgtattttgggaccagcatgctcgg

SEQ ID NO: 2593502 - DNA, 25 bp, Homo sapien
acactacttgtattttgggaccagc

SEQ ID NO: 2593503 - DNA, 25 bp, Homo sapien
tttggagcaggcagatcagaaatgc

SEQ ID NO: 2593504 - DNA, 25 bp, Homo sapien
ctgggaggcgatagcagatggccca

SEQ ID NO: 2593505 - DNA, 25 bp, Homo sapien
ggcccagtactagtcccagctttgg

SEQ ID NO: 2593506 - DNA, 25 bp, Homo sapien
cagatggcccagtactagtcccagc

SEQ ID NO: 2593507 - DNA, 25 bp, Homo sapien
cctctgcttcatttggatgggcaat

SEQ ID NO: 2593508 - DNA, 25 bp, Homo sapien
ttggatgggcaattgtcttggagta

SEQ ID NO: 2593509 - DNA, 25 bp, Homo sapien
gcttcatttggatgggcaattgtct

SEQ ID NO: 2593510 - DNA, 25 bp, Homo sapien
catttggatgggcaattgtcttgga

SEQ ID NO: 2593511 - DNA, 25 bp, Homo sapien
ctatgaaaaagggtgtgttttccat

SEQ ID NO: 2593512 - DNA, 25 bp, Homo sapien
attcccatttcaagcttattattcc

SEQ ID NO: 2593513 - DNA, 25 bp, Homo sapien
tcaagcttattattccagcagcatg

SEQ ID NO: 2593514 - DNA, 25 bp, Homo sapien
aaaattcccatttcaagcttattat

SEQ ID NO: 2593515 - DNA, 25 bp, Homo sapien
ttcaagcttattattccagcagcat

SEQ ID NO: 2593516 - DNA, 25 bp, Homo sapien
tagcaaggcagctagctcagcacga

SEQ ID NO: 2593517 - DNA, 25 bp, Homo sapien
catgggcagtccagaggcaacctgg

SEQ ID NO: 2593518 - DNA, 25 bp, Homo sapien
gagtttggcaaggatggtttgccca

SEQ ID NO: 2593519 - DNA, 25 bp, Homo sapien
cagcacgaggcaacaccacgctggt

SEQ ID NO: 2593520 - DNA, 25 bp, Homo sapien
ctgaaggtggacgtgtaatgaggac

SEQ ID NO: 2593521 - DNA, 25 bp, Homo sapien
caaggtcaaaggactttctgcccca

SEQ ID NO: 2593522 - DNA, 25 bp, Homo sapien
cgtgtaatgaggacaggaccttcac

SEQ ID NO: 2593523 - DNA, 25 bp, Homo sapien
cattctcctgtgtcatggtaagcag

SEQ ID NO: 2593524 - DNA, 25 bp, Homo sapien
cacaggctggacattcccttgttca

SEQ ID NO: 2593525 - DNA, 25 bp, Homo sapien
gcacaggctggacattcccttgttc

SEQ ID NO: 2593526 - DNA, 25 bp, Homo sapien
gctggacattcccttgttcatcccc

SEQ ID NO: 2593527 - DNA, 25 bp, Homo sapien
caggctggacattcccttgttcatc

SEQ ID NO: 2593528 - DNA, 25 bp, Homo sapien
ttcatgggcacagtgcctcctggcc

SEQ ID NO: 2593529 - DNA, 25 bp, Homo sapien
ctctcccttcatgggcacagtgcct

SEQ ID NO: 2593530 - DNA, 25 bp, Homo sapien
tgggcacagtgcctcctggcctcat

SEQ ID NO: 2593531 - DNA, 25 bp, Homo sapien
gtctctcccttcatgggcacagtgc

SEQ ID NO: 2593532 - DNA, 25 bp, Homo sapien
tagcccttccccagcgtgctatcag

SEQ ID NO: 2593533 - DNA, 25 bp, Homo sapien
cagcgtgctatcaggaaggtgagct

SEQ ID NO: 2593534 - DNA, 25 bp, Homo sapien
ccttccccagcgtgctatcaggaag

SEQ ID NO: 2593535 - DNA, 25 bp, Homo sapien
ccccagcgtgctatcaggaaggtga

SEQ ID NO: 2593536 - DNA, 25 bp, Homo sapien
ctggctctcagagtagggagccacc

SEQ ID NO: 2593537 - DNA, 25 bp, Homo sapien
gctctcagagtagggagccaccttc

SEQ ID NO: 2593538 - DNA, 25 bp, Homo sapien
ggctctcagagtagggagccacctt

SEQ ID NO: 2593539 - DNA, 25 bp, Homo sapien
tctcagagtagggagccaccttccc

SEQ ID NO: 2593540 - DNA, 25 bp, Homo sapien
gaaaaagcctggaagagggggctga

SEQ ID NO: 2593541 - DNA, 25 bp, Homo sapien
aagcctggaagagggggctgactgc

SEQ ID NO: 2593542 - DNA, 25 bp, Homo sapien
agaaaaagcctggaagagggggctg

SEQ ID NO: 2593543 - DNA, 25 bp, Homo sapien
tggaagagggggctgactgctgctg

SEQ ID NO: 2593544 - DNA, 25 bp, Homo sapien
aaccgtagggttgtacttgatctca

SEQ ID NO: 2593545 - DNA, 25 bp, Homo sapien
cccagtctgggtgcctgttcagagc

SEQ ID NO: 2593546 - DNA, 25 bp, Homo sapien
gacagtggtcagtccctgagcaaca

SEQ ID NO: 2593547 - DNA, 25 bp, Homo sapien
gagctgttcagcaatgacccctttg

SEQ ID NO: 2593548 - DNA, 25 bp, Homo sapien
atggagcccttgcataatacaaacc

SEQ ID NO: 2593549 - DNA, 25 bp, Homo sapien
tttgcgtctgttactaggatctagg

SEQ ID NO: 2593550 - DNA, 25 bp, Homo sapien
aggatctaggatatgcatggagccc

SEQ ID NO: 2593551 - DNA, 25 bp, Homo sapien
tatgactcaagctggtacatttgcg

SEQ ID NO: 2593552 - DNA, 25 bp, Homo sapien
tgggcagtcccttggcctacagtgc

SEQ ID NO: 2593553 - DNA, 25 bp, Homo sapien
tcagtcctattccacgttggttggg

SEQ ID NO: 2593554 - DNA, 25 bp, Homo sapien
ttggcctacagtgctctgctgactt

SEQ ID NO: 2593555 - DNA, 25 bp, Homo sapien
cccttcatgtaaggtgacaggaacc

SEQ ID NO: 2593556 - DNA, 25 bp, Homo sapien
aattcctgctttcggagggctccag

SEQ ID NO: 2593557 - DNA, 25 bp, Homo sapien
aagcttctctgcatggcggaattcc

SEQ ID NO: 2593558 - DNA, 25 bp, Homo sapien
ggtcaacattatttggcaagggagg

SEQ ID NO: 2593559 - DNA, 25 bp, Homo sapien
tgcatccattgaaatttacatccag

SEQ ID NO: 2593560 - DNA, 25 bp, Homo sapien
cagcagcgcttcctcagatgggtgt

SEQ ID NO: 2593561 - DNA, 25 bp, Homo sapien
tgagagcccagcatcggatttgatg

SEQ ID NO: 2593562 - DNA, 25 bp, Homo sapien
taatgccccagcagagcgtgtgaga

SEQ ID NO: 2593563 - DNA, 25 bp, Homo sapien
agcccagaagcaataaagccccagt

SEQ ID NO: 2593564 - DNA, 25 bp, Homo sapien
caggtctccgcatctgattcagcca

SEQ ID NO: 2593565 - DNA, 25 bp, Homo sapien
caggcaactggatcctgtgcccagc

SEQ ID NO: 2593566 - DNA, 25 bp, Homo sapien
caaattcccagaaatggtgcgggta

SEQ ID NO: 2593567 - DNA, 25 bp, Homo sapien
tctgttctctgtcgtggaatgcaac

SEQ ID NO: 2593568 - DNA, 25 bp, Homo sapien
gacccctaagatttgggctccttga

SEQ ID NO: 2593569 - DNA, 25 bp, Homo sapien
cccctaagatttgggctccttgatc

SEQ ID NO: 2593570 - DNA, 25 bp, Homo sapien
acccctaagatttgggctccttgat

SEQ ID NO: 2593571 - DNA, 25 bp, Homo sapien
ttctgcagccaacacgaacagtgtg

SEQ ID NO: 2593572 - DNA, 25 bp, Homo sapien
catctttgatcctaacgtagcagca

SEQ ID NO: 2593573 - DNA, 25 bp, Homo sapien
tatatccattagacgcctgtgacac

SEQ ID NO: 2593574 - DNA, 25 bp, Homo sapien
gtggtgcccagggagcatatatcca

SEQ ID NO: 2593575 - DNA, 25 bp, Homo sapien
agacatacccaaactttgtgcctgt

SEQ ID NO: 2593576 - DNA, 25 bp, Homo sapien
acaggaccctaagccacgtggacat

SEQ ID NO: 2593577 - DNA, 25 bp, Homo sapien
agcctcctggtgaacccacagacat

SEQ ID NO: 2593578 - DNA, 25 bp, Homo sapien
cacgtggacatgcaatgtctccaag

SEQ ID NO: 2593579 - DNA, 25 bp, Homo sapien
gatatcatgacgctgaccctctcag

SEQ ID NO: 2593580 - DNA, 25 bp, Homo sapien
tcactcctcacctcgccgacgaagc

SEQ ID NO: 2593581 - DNA, 25 bp, Homo sapien
gacttgacaagttctgatatcatga

SEQ ID NO: 2593582 - DNA, 25 bp, Homo sapien
cgccgacgaagcaccgacttgacaa

SEQ ID NO: 2593583 - DNA, 25 bp, Homo sapien
tctgagttgcagacatggccaggtg

SEQ ID NO: 2593584 - DNA, 25 bp, Homo sapien
tgaagtttgcgatgtgggcactgcc

SEQ ID NO: 2593585 - DNA, 25 bp, Homo sapien
gatgggattcgccttccagaagtac

SEQ ID NO: 2593586 - DNA, 25 bp, Homo sapien
gaaatgccaaagaggcgtgaacctt

SEQ ID NO: 2593587 - DNA, 25 bp, Homo sapien
aagagcaacctgtgcctatgacatc

SEQ ID NO: 2593588 - DNA, 25 bp, Homo sapien
ctgcagaggcccttgaaagtctgca

SEQ ID NO: 2593589 - DNA, 25 bp, Homo sapien
ccttgaaagtctgcacggcgtgggt

SEQ ID NO: 2593590 - DNA, 25 bp, Homo sapien
tgccatgatgcaggacaagagcaac

SEQ ID NO: 2593591 - DNA, 25 bp, Homo sapien
gatggagagggcagcattttcccct

SEQ ID NO: 2593592 - DNA, 25 bp, Homo sapien
gcttcgatggagagggcagcatttt

SEQ ID NO: 2593593 - DNA, 25 bp, Homo sapien
ggtcaatatactcagagccctccat

SEQ ID NO: 2593594 - DNA, 25 bp, Homo sapien
ctctctggtcaatatactcagagcc

SEQ ID NO: 2593595 - DNA, 25 bp, Homo sapien
tttgaagaggaccaaaacagacaac

SEQ ID NO: 2593596 - DNA, 25 bp, Homo sapien
tctacttgacattcgtgaacattgc

SEQ ID NO: 2593597 - DNA, 25 bp, Homo sapien
taacaaagattacgtcaggctttta

SEQ ID NO: 2593598 - DNA, 25 bp, Homo sapien
gcagcactccatgaaagttcggaaa

SEQ ID NO: 2593599 - DNA, 25 bp, Homo sapien
tgttagcattttcagcagtgacttt

SEQ ID NO: 2593600 - DNA, 25 bp, Homo sapien
gtgttagcattttcagcagtgactt

SEQ ID NO: 2593601 - DNA, 25 bp, Homo sapien
tcagcaagagctaggtgtgcctgtc

SEQ ID NO: 2593602 - DNA, 25 bp, Homo sapien
aggtgtgcctgtctgccctggattt

SEQ ID NO: 2593603 - DNA, 25 bp, Homo sapien
caagagctaggtgtgcctgtctgcc

SEQ ID NO: 2593604 - DNA, 25 bp, Homo sapien
agctaggtgtgcctgtctgccctgg

SEQ ID NO: 2593605 - DNA, 25 bp, Homo sapien
tctccagtcttgtgggtttgtattg

SEQ ID NO: 2593606 - DNA, 25 bp, Homo sapien
ttgccctgtggttctctccagtctt

SEQ ID NO: 2593607 - DNA, 25 bp, Homo sapien
cttgttccaaataagcgtttggcct

SEQ ID NO: 2593608 - DNA, 25 bp, Homo sapien
tggcctggatcggttgctcttgcag

SEQ ID NO: 2593609 - DNA, 25 bp, Homo sapien
taagcgtttggcctggatcggttgc

SEQ ID NO: 2593610 - DNA, 25 bp, Homo sapien
ggatcggttgctcttgcaggacagc

SEQ ID NO: 2593611 - DNA, 25 bp, Homo sapien
tgctacgtatctttcacagttgatg

SEQ ID NO: 2593612 - DNA, 25 bp, Homo sapien
cccacaacgtgccagaaggagggcc

SEQ ID NO: 2593613 - DNA, 25 bp, Homo sapien
tgtgctcaaactcatccatttgcct

SEQ ID NO: 2593614 - DNA, 25 bp, Homo sapien
ttcttcttcctagttggaacctctc

SEQ ID NO: 2593615 - DNA, 25 bp, Homo sapien
ctattcaaggactctgatgcattcc

SEQ ID NO: 2593616 - DNA, 25 bp, Homo sapien
ctcgtgccttactgagttcatttgg

SEQ ID NO: 2593617 - DNA, 25 bp, Homo sapien
ttctgcttgattaactccactattc

SEQ ID NO: 2593618 - DNA, 25 bp, Homo sapien
gattggtccctcgtgccttactgag

SEQ ID NO: 2593619 - DNA, 25 bp, Homo sapien
tgctcatcgtgcctgtggaatgtcc

SEQ ID NO: 2593620 - DNA, 25 bp, Homo sapien
gggtggcacacaaggtcctctcaga

SEQ ID NO: 2593621 - DNA, 25 bp, Homo sapien
tgacccttgaaagacagaccacctt

SEQ ID NO: 2593622 - DNA, 25 bp, Homo sapien
aaacaaatttaagatccaggcaggg

SEQ ID NO: 2593623 - DNA, 25 bp, Homo sapien
tccagggatttgacctcatgtaggg

SEQ ID NO: 2593624 - DNA, 25 bp, Homo sapien
ttgaaggtatccacagaaagggtac

SEQ ID NO: 2593625 - DNA, 25 bp, Homo sapien
gctggtgatggcagtcgccttcata

SEQ ID NO: 2593626 - DNA, 25 bp, Homo sapien
tctagtgtgttatatgccatccagg

SEQ ID NO: 2593627 - DNA, 25 bp, Homo sapien
agttggctctgtactcaatctgtcg

SEQ ID NO: 2593628 - DNA, 25 bp, Homo sapien
tgacgtcactcatcatgtagcctct

SEQ ID NO: 2593629 - DNA, 25 bp, Homo sapien
caatctgtcgtgacgtcactcatca

SEQ ID NO: 2593630 - DNA, 25 bp, Homo sapien
tgtactcaatctgtcgtgacgtcac

SEQ ID NO: 2593631 - DNA, 25 bp, Homo sapien
tggagaagatgacacgctggccagc

SEQ ID NO: 2593632 - DNA, 25 bp, Homo sapien
ggctgagtcccaagaaggaccctgt

SEQ ID NO: 2593633 - DNA, 25 bp, Homo sapien
gactgtccaccctgtgctcataggt

SEQ ID NO: 2593634 - DNA, 25 bp, Homo sapien
tgaacacatttccaggtctcagcag

SEQ ID NO: 2593635 - DNA, 25 bp, Homo sapien
tgctgtcttcctgctctgagtttat

SEQ ID NO: 2593636 - DNA, 25 bp, Homo sapien
ccttgctgtcttcctgctctgagtt

SEQ ID NO: 2593637 - DNA, 25 bp, Homo sapien
ctattccttgctgtcttcctgctct

SEQ ID NO: 2593638 - DNA, 25 bp, Homo sapien
tccttgctgtcttcctgctctgagt

SEQ ID NO: 2593639 - DNA, 25 bp, Homo sapien
gaataagtgtctacactgtggtttt

SEQ ID NO: 2593640 - DNA, 25 bp, Homo sapien
agaataagtgtctacactgtggttt

SEQ ID NO: 2593641 - DNA, 25 bp, Homo sapien
aataagtgtctacactgtggttttc

SEQ ID NO: 2593642 - DNA, 25 bp, Homo sapien
ataagtgtctacactgtggttttcc

SEQ ID NO: 2593643 - DNA, 25 bp, Homo sapien
agctcccctgcatccacccaaacca

SEQ ID NO: 2593644 - DNA, 25 bp, Homo sapien
gcaggcttccatgcggccagggctt

SEQ ID NO: 2593645 - DNA, 25 bp, Homo sapien
caggcaggcttccatgcggccaggg

SEQ ID NO: 2593646 - DNA, 25 bp, Homo sapien
tccatgcggccagggctttgctatt

SEQ ID NO: 2593647 - DNA, 25 bp, Homo sapien
gaggactgttggaaagcattaggac

SEQ ID NO: 2593648 - DNA, 25 bp, Homo sapien
tatacacgcttttatacgtaagaaa

SEQ ID NO: 2593649 - DNA, 25 bp, Homo sapien
ttaggacagatgtataaggagcata

SEQ ID NO: 2593650 - DNA, 25 bp, Homo sapien
cttggtgaggcttagagtgaggact

SEQ ID NO: 2593651 - DNA, 25 bp, Homo sapien
ggaagagacagtagataatggagcc

SEQ ID NO: 2593652 - DNA, 25 bp, Homo sapien
caggattgtgcattaggtgagtgtc

SEQ ID NO: 2593653 - DNA, 25 bp, Homo sapien
ataactttgcttactcctaaacagg

SEQ ID NO: 2593654 - DNA, 25 bp, Homo sapien
gcttactcctaaacagggagtcaca

SEQ ID NO: 2593655 - DNA, 25 bp, Homo sapien
caggttgcacaagccaccgggtttt

SEQ ID NO: 2593656 - DNA, 25 bp, Homo sapien
ggattccttagcgataagacatgca

SEQ ID NO: 2593657 - DNA, 25 bp, Homo sapien
tagtcgtgctgtatcaagtggtgtg

SEQ ID NO: 2593658 - DNA, 25 bp, Homo sapien
cagatggaaagaccgcctctgcagg

SEQ ID NO: 2593659 - DNA, 25 bp, Homo sapien
tccataaagcagtcttacgttctga

SEQ ID NO: 2593660 - DNA, 25 bp, Homo sapien
catccataaagcagtcttacgttct

SEQ ID NO: 2593661 - DNA, 25 bp, Homo sapien
tcatccataaagcagtcttacgttc

SEQ ID NO: 2593662 - DNA, 25 bp, Homo sapien
atccataaagcagtcttacgttctg

SEQ ID NO: 2593663 - DNA, 25 bp, Homo sapien
caggcggagggatgggtttccaggg

SEQ ID NO: 2593664 - DNA, 25 bp, Homo sapien
tgcaggcggagggatgggtttccag

SEQ ID NO: 2593665 - DNA, 25 bp, Homo sapien
gcaggcggagggatgggtttccagg

SEQ ID NO: 2593666 - DNA, 25 bp, Homo sapien
ctgcaggcggagggatgggtttcca

SEQ ID NO: 2593667 - DNA, 25 bp, Homo sapien
agagaagccaggttgtgtgggagaa

SEQ ID NO: 2593668 - DNA, 25 bp, Homo sapien
agccatcttggggaaggcccagctc

SEQ ID NO: 2593669 - DNA, 25 bp, Homo sapien
gatgtcgcttcaccccatggcctat

SEQ ID NO: 2593670 - DNA, 25 bp, Homo sapien
acttgggaggatgtcgcttcacccc

SEQ ID NO: 2593671 - DNA, 25 bp, Homo sapien
caacttgggaggatgtcgcttcacc

SEQ ID NO: 2593672 - DNA, 25 bp, Homo sapien
gggaggatgtcgcttcaccccatgg

SEQ ID NO: 2593673 - DNA, 25 bp, Homo sapien
gcctggaagattccgctgcctctcc

SEQ ID NO: 2593674 - DNA, 25 bp, Homo sapien
cagctctgtccaccttactctgagg

SEQ ID NO: 2593675 - DNA, 25 bp, Homo sapien
ccaccttactctgagggtgcctgga

SEQ ID NO: 2593676 - DNA, 25 bp, Homo sapien
actactgagggagactcggggcacc

SEQ ID NO: 2593677 - DNA, 25 bp, Homo sapien
tctttgccctcgaggaatggctctt

SEQ ID NO: 2593678 - DNA, 25 bp, Homo sapien
gcagaattggctaacaaagacccct

SEQ ID NO: 2593679 - DNA, 25 bp, Homo sapien
tccccatccgtgtggagaagtttca

SEQ ID NO: 2593680 - DNA, 25 bp, Homo sapien
ggtcttggcaggtcccagcacagtt

SEQ ID NO: 2593681 - DNA, 25 bp, Homo sapien
ggtcagtgtggcgagtaaacaaatg

SEQ ID NO: 2593682 - DNA, 25 bp, Homo sapien
tcagtgtggcgagtaaacaaatggg

SEQ ID NO: 2593683 - DNA, 25 bp, Homo sapien
ggtggtcagtgtggcgagtaaacaa

SEQ ID NO: 2593684 - DNA, 25 bp, Homo sapien
cgagtaaacaaatggggatgcccag

SEQ ID NO: 2593685 - DNA, 25 bp, Homo sapien
ctgcgtgagtgcatgacaaataatt

SEQ ID NO: 2593686 - DNA, 25 bp, Homo sapien
tgcgtgagtgcatgacaaataattt

SEQ ID NO: 2593687 - DNA, 25 bp, Homo sapien
ggattctcacggctgtgggtgccgt

SEQ ID NO: 2593688 - DNA, 25 bp, Homo sapien
tgtggcggccgggaatgccccgctc

SEQ ID NO: 2593689 - DNA, 25 bp, Homo sapien
ccctcagtggacatcgggggattct

SEQ ID NO: 2593690 - DNA, 25 bp, Homo sapien
gcatcggagctttcccagtagaggc

SEQ ID NO: 2593691 - DNA, 25 bp, Homo sapien
tctgagagtcgctggctctctgcac

SEQ ID NO: 2593692 - DNA, 25 bp, Homo sapien
ggcttgaggccatgcggccccagcc

SEQ ID NO: 2593693 - DNA, 25 bp, Homo sapien
ctgagagtcgctggctctctgcact

SEQ ID NO: 2593694 - DNA, 25 bp, Homo sapien
ttgaggccatgcggccccagccttg

SEQ ID NO: 2593695 - DNA, 25 bp, Homo sapien
cagtaacatgctggctttcagcagc

SEQ ID NO: 2593696 - DNA, 25 bp, Homo sapien
cctctcagagaaggagaatcaaatt

SEQ ID NO: 2593697 - DNA, 25 bp, Homo sapien
aaaccagcaccctctcagagaagga

SEQ ID NO: 2593698 - DNA, 25 bp, Homo sapien
gaatcaaatttgtactccagtaaca

SEQ ID NO: 2593699 - DNA, 25 bp, Homo sapien
tccaaacttcattgtttcaggtcct

SEQ ID NO: 2593700 - DNA, 25 bp, Homo sapien
tcaacagcttctaaaagctcacaca

SEQ ID NO: 2593701 - DNA, 25 bp, Homo sapien
tgttctccaggactgctcaacagct

SEQ ID NO: 2593702 - DNA, 25 bp, Homo sapien
ttcattgtttcaggtccttcctgga

SEQ ID NO: 2593703 - DNA, 25 bp, Homo sapien
taacattcctctgagattcaccttg

SEQ ID NO: 2593704 - DNA, 25 bp, Homo sapien
tgtaacattcctctgagattcacct

SEQ ID NO: 2593705 - DNA, 25 bp, Homo sapien
aatgtaacattcctctgagattcac

SEQ ID NO: 2593706 - DNA, 25 bp, Homo sapien
ggaaatgtaacattcctctgagatt

SEQ ID NO: 2593707 - DNA, 25 bp, Homo sapien
tctacccacaatcagtggagatgtc

SEQ ID NO: 2593708 - DNA, 25 bp, Homo sapien
cttcccctggagaaggtcttctcag

SEQ ID NO: 2593709 - DNA, 25 bp, Homo sapien
tacccacaatcagtggagatgtccc

SEQ ID NO: 2593710 - DNA, 25 bp, Homo sapien
acccacaatcagtggagatgtccca

SEQ ID NO: 2593711 - DNA, 25 bp, Homo sapien
ttggcatagagatggcccagagccc

SEQ ID NO: 2593712 - DNA, 25 bp, Homo sapien
catgagccttcctcctgggtcatct

SEQ ID NO: 2593713 - DNA, 25 bp, Homo sapien
cactctgacggtaaggaggagccat

SEQ ID NO: 2593714 - DNA, 25 bp, Homo sapien
cctgggtcatctccactctgacggt

SEQ ID NO: 2593715 - DNA, 25 bp, Homo sapien
cataaggtgcccaagggcagatcag

SEQ ID NO: 2593716 - DNA, 25 bp, Homo sapien
tcaggctccataaggtgcccaaggg

SEQ ID NO: 2593717 - DNA, 25 bp, Homo sapien
agcagatgccctggatttcaggctc

SEQ ID NO: 2593718 - DNA, 25 bp, Homo sapien
ggcagatcaggatgcagttccacta

SEQ ID NO: 2593719 - DNA, 25 bp, Homo sapien
ttggactcgggcctcagtatggcct

SEQ ID NO: 2593720 - DNA, 25 bp, Homo sapien
cctgcggggttggaatcagtgcact

SEQ ID NO: 2593721 - DNA, 25 bp, Homo sapien
tcctggcctgggtaccattccttta

SEQ ID NO: 2593722 - DNA, 25 bp, Homo sapien
tatggcctctagacagtctcctggc

SEQ ID NO: 2593723 - DNA, 25 bp, Homo sapien
ctggccctctcccttgttctaagga

SEQ ID NO: 2593724 - DNA, 25 bp, Homo sapien
cgtacatgctttgcacaaatgctgt

SEQ ID NO: 2593725 - DNA, 25 bp, Homo sapien
gggcctctgtccctacgtacatgct

SEQ ID NO: 2593726 - DNA, 25 bp, Homo sapien
acctgcctgaaatctgtgctgccca

SEQ ID NO: 2593727 - DNA, 25 bp, Homo sapien
agcatctggcttgctgctagcctca

SEQ ID NO: 2593728 - DNA, 25 bp, Homo sapien
caataatcaaccatttcagcatctg

SEQ ID NO: 2593729 - DNA, 25 bp, Homo sapien
tcagcaataatcaaccatttcagca

SEQ ID NO: 2593730 - DNA, 25 bp, Homo sapien
gctgctagcctcagcatattttatt

SEQ ID NO: 2593731 - DNA, 25 bp, Homo sapien
ggatatagtcaaagcgaatttagca

SEQ ID NO: 2593732 - DNA, 25 bp, Homo sapien
gacatcaattcttgccaaattcagg

SEQ ID NO: 2593733 - DNA, 25 bp, Homo sapien
taaagacgcacagaatgaggaacat

SEQ ID NO: 2593734 - DNA, 25 bp, Homo sapien
agtttattatgctaagggcctggga

SEQ ID NO: 2593735 - DNA, 25 bp, Homo sapien
cacacaatgcccctcttgtgaatct

SEQ ID NO: 2593736 - DNA, 25 bp, Homo sapien
gcatgttattgtcaatgttcttcag

SEQ ID NO: 2593737 - DNA, 25 bp, Homo sapien
aatgtttcatacaccaccagtttgt

SEQ ID NO: 2593738 - DNA, 25 bp, Homo sapien
cctcacatgccgcaaaactgaaaga

SEQ ID NO: 2593739 - DNA, 25 bp, Homo sapien
gcaggacggtaagcaaagcggctcc

SEQ ID NO: 2593740 - DNA, 25 bp, Homo sapien
cccagcgtctgtagcgagggttgcc

SEQ ID NO: 2593741 - DNA, 25 bp, Homo sapien
ggacctcctagcgacggctgggacc

SEQ ID NO: 2593742 - DNA, 25 bp, Homo sapien
gagggttgccgcagggcccgcggac

SEQ ID NO: 2593743 - DNA, 25 bp, Homo sapien
ctgcaatcggatgttgaggatcacc

SEQ ID NO: 2593744 - DNA, 25 bp, Homo sapien
ccgagcccgcgacgtagaagtacgg

SEQ ID NO: 2593745 - DNA, 25 bp, Homo sapien
gcagaagacgccgtacgaggtgggt

SEQ ID NO: 2593746 - DNA, 25 bp, Homo sapien
ctgacggccaaggaggacggagccg

SEQ ID NO: 2593747 - DNA, 25 bp, Homo sapien
gaaagaacaattaccctaggccaga

SEQ ID NO: 2593748 - DNA, 25 bp, Homo sapien
tgtttgctggacacaatgagtggaa

SEQ ID NO: 2593749 - DNA, 25 bp, Homo sapien
gaaaaagcgccacctaagcttagct

SEQ ID NO: 2593750 - DNA, 25 bp, Homo sapien
aaaaggctataggagaatgtgccca

SEQ ID NO: 2593751 - DNA, 25 bp, Homo sapien
taagctgtaacgcatcgtttcccat

SEQ ID NO: 2593752 - DNA, 25 bp, Homo sapien
tagttaaaataagctgtaacgcatc

SEQ ID NO: 2593753 - DNA, 25 bp, Homo sapien
gatatgctatttgtcaagtaatcac

SEQ ID NO: 2593754 - DNA, 25 bp, Homo sapien
cccttaggttacatatgttgctatg

SEQ ID NO: 2593755 - DNA, 25 bp, Homo sapien
tatgaaagaccctcaatagttatgt

SEQ ID NO: 2593756 - DNA, 25 bp, Homo sapien
taaatcccggtttgcttctctgaaa

SEQ ID NO: 2593757 - DNA, 25 bp, Homo sapien
tatgtgagaattacggagctcatgt

SEQ ID NO: 2593758 - DNA, 25 bp, Homo sapien
tactggagattcatttgaggtctgg

SEQ ID NO: 2593759 - DNA, 25 bp, Homo sapien
atgaacagatgcagtcttattcccc

SEQ ID NO: 2593760 - DNA, 25 bp, Homo sapien
acagatgcagtcttattccccttct

SEQ ID NO: 2593761 - DNA, 25 bp, Homo sapien
ccttctcttcaaaacaggccttcat

SEQ ID NO: 2593762 - DNA, 25 bp, Homo sapien
ctcatatgaacagatgcagtcttat

SEQ ID NO: 2593763 - DNA, 25 bp, Homo sapien
agtgcctggcaatgctatttattat

SEQ ID NO: 2593764 - DNA, 25 bp, Homo sapien
ggattacaggttcctacgaccacat

SEQ ID NO: 2593765 - DNA, 25 bp, Homo sapien
tgcccggcctgattgttagaacaca

SEQ ID NO: 2593766 - DNA, 25 bp, Homo sapien
tattattctaccatgagagttgagg

SEQ ID NO: 2593767 - DNA, 25 bp, Homo sapien
acaacacacccctgagggctgtggc

SEQ ID NO: 2593768 - DNA, 25 bp, Homo sapien
tttatggctccaactgcagacaaca

SEQ ID NO: 2593769 - DNA, 25 bp, Homo sapien
actgcagacaacacacccctgaggg

SEQ ID NO: 2593770 - DNA, 25 bp, Homo sapien
ttatggctccaactgcagacaacac

SEQ ID NO: 2593771 - DNA, 25 bp, Homo sapien
agcaggcaggctacgtttatccaaa

SEQ ID NO: 2593772 - DNA, 25 bp, Homo sapien
tgatgatgtttgtcagagcaggcag

SEQ ID NO: 2593773 - DNA, 25 bp, Homo sapien
tcttatctcgtgaaagctcatggac

SEQ ID NO: 2593774 - DNA, 25 bp, Homo sapien
gctcatggacagtggcaccaatgtc

SEQ ID NO: 2593775 - DNA, 25 bp, Homo sapien
ctccacaaggccagaacactggagt

SEQ ID NO: 2593776 - DNA, 25 bp, Homo sapien
tgggctttccttgccttggttatac

SEQ ID NO: 2593777 - DNA, 25 bp, Homo sapien
acactggagtgggctttccttgcct

SEQ ID NO: 2593778 - DNA, 25 bp, Homo sapien
gcatggctgtccactctccacaagg

SEQ ID NO: 2593779 - DNA, 25 bp, Homo sapien
agactctgggtgctggtcactgtcc

SEQ ID NO: 2593780 - DNA, 25 bp, Homo sapien
gcacccatgactttcggggggctgc

SEQ ID NO: 2593781 - DNA, 25 bp, Homo sapien
ggcttctttcatggttatcagagac

SEQ ID NO: 2593782 - DNA, 25 bp, Homo sapien
acagaacgtcagggcttctttcatg

SEQ ID NO: 2593783 - DNA, 25 bp, Homo sapien
gtgaggagtgtgcagtctacactca

SEQ ID NO: 2593784 - DNA, 25 bp, Homo sapien
ttgtgaggagtgtgcagtctacact

SEQ ID NO: 2593785 - DNA, 25 bp, Homo sapien
tgaggagtgtgcagtctacactcac

SEQ ID NO: 2593786 - DNA, 25 bp, Homo sapien
tgtgaggagtgtgcagtctacactc

SEQ ID NO: 2593787 - DNA, 25 bp, Homo sapien
tcctccctagccccatgcagggcca

SEQ ID NO: 2593788 - DNA, 25 bp, Homo sapien
cagggccaacatgatccggtttaaa

SEQ ID NO: 2593789 - DNA, 25 bp, Homo sapien
agggccaacatgatccggtttaaat

SEQ ID NO: 2593790 - DNA, 25 bp, Homo sapien
gcagggccaacatgatccggtttaa

SEQ ID NO: 2593791 - DNA, 25 bp, Homo sapien
tcaggaatcaggtacacatagatgt

SEQ ID NO: 2593792 - DNA, 25 bp, Homo sapien
aattcaggaatcaggtacacataga

SEQ ID NO: 2593793 - DNA, 25 bp, Homo sapien
ttcaggaatcaggtacacatagatg

SEQ ID NO: 2593794 - DNA, 25 bp, Homo sapien
caggaatcaggtacacatagatgtt

SEQ ID NO: 2593795 - DNA, 25 bp, Homo sapien
tcatccactggcatattgagatgct

SEQ ID NO: 2593796 - DNA, 25 bp, Homo sapien
catccactggcatattgagatgctt

SEQ ID NO: 2593797 - DNA, 25 bp, Homo sapien
atccactggcatattgagatgcttt

SEQ ID NO: 2593798 - DNA, 25 bp, Homo sapien
tcattattatcctccttggctgcat

SEQ ID NO: 2593799 - DNA, 25 bp, Homo sapien
cctggctttaccctctggatgttct

SEQ ID NO: 2593800 - DNA, 25 bp, Homo sapien
tttctgaggatcctggctttaccct

SEQ ID NO: 2593801 - DNA, 25 bp, Homo sapien
tggatgttcttcattattatcctcc

SEQ ID NO: 2593802 - DNA, 25 bp, Homo sapien
tattctctgtaattgttccaacttt

SEQ ID NO: 2593803 - DNA, 25 bp, Homo sapien
aatattctctgtaattgttccaact

SEQ ID NO: 2593804 - DNA, 25 bp, Homo sapien
attctctgtaattgttccaacttta

SEQ ID NO: 2593805 - DNA, 25 bp, Homo sapien
ctaatattctctgtaattgttccaa

SEQ ID NO: 2593806 - DNA, 25 bp, Homo sapien
gcaggacggtaagcaaagcggctcc

SEQ ID NO: 2593807 - DNA, 25 bp, Homo sapien
cccagcgtctgtagcgagggttgcc

SEQ ID NO: 2593808 - DNA, 25 bp, Homo sapien
ggacctcctagcgacggctgggacc

SEQ ID NO: 2593809 - DNA, 25 bp, Homo sapien
gagggttgccgcagggcccgcggac

SEQ ID NO: 2593810 - DNA, 25 bp, Homo sapien
ctgcaatcggatgttgaggatcacc

SEQ ID NO: 2593811 - DNA, 25 bp, Homo sapien
ccgagcccgcgacgtagaagtacgg

SEQ ID NO: 2593812 - DNA, 25 bp, Homo sapien
gcagaagacgccgtacgaggtgggt

SEQ ID NO: 2593813 - DNA, 25 bp, Homo sapien
ctgacggccaaggaggacggagccg

SEQ ID NO: 2593814 - DNA, 25 bp, Homo sapien
tcttgcttacaatccagtccgagga

SEQ ID NO: 2593815 - DNA, 25 bp, Homo sapien
tgaggagctccgctagcagctaaga

SEQ ID NO: 2593816 - DNA, 25 bp, Homo sapien
gaaataatgcatcctctgcgctttg

SEQ ID NO: 2593817 - DNA, 25 bp, Homo sapien
cacaggatcactgaagtagagccca

SEQ ID NO: 2593818 - DNA, 25 bp, Homo sapien
tgtaggaggcaaactataccccaag

SEQ ID NO: 2593819 - DNA, 25 bp, Homo sapien
taatggatattacctggaagtgtgc

SEQ ID NO: 2593820 - DNA, 25 bp, Homo sapien
cacatactgttactaccgggtgtaa

SEQ ID NO: 2593821 - DNA, 25 bp, Homo sapien
cactgaattgcatcatgtaggaggc

SEQ ID NO: 2593822 - DNA, 25 bp, Homo sapien
tctggatcaatcaacgtgcatgatg

SEQ ID NO: 2593823 - DNA, 25 bp, Homo sapien
agcccaatttatgggcaataaagtg

SEQ ID NO: 2593824 - DNA, 25 bp, Homo sapien
gatcaatcaacgtgcatgatggcct

SEQ ID NO: 2593825 - DNA, 25 bp, Homo sapien
taactataccacctatgtctctgct

SEQ ID NO: 2593826 - DNA, 25 bp, Homo sapien
tccattctgaggacaacgttctttc

SEQ ID NO: 2593827 - DNA, 25 bp, Homo sapien
caaaagctattgatgtcctgccaga

SEQ ID NO: 2593828 - DNA, 25 bp, Homo sapien
tttagttagggatcctcaggacagg

SEQ ID NO: 2593829 - DNA, 25 bp, Homo sapien
tctgggtagcacaggaaagtgtttc

SEQ ID NO: 2593830 - DNA, 25 bp, Homo sapien
cctttgtaggataagtgcaaaatca

SEQ ID NO: 2593831 - DNA, 25 bp, Homo sapien
ccatgaatactagtgtgtcacacca

SEQ ID NO: 2593832 - DNA, 25 bp, Homo sapien
tcaaaaccacactttgacacaggat

SEQ ID NO: 2593833 - DNA, 25 bp, Homo sapien
gaattcaagctatcctacctttgta

SEQ ID NO: 2593834 - DNA, 25 bp, Homo sapien
gatacttgtttcacagtcaagccta

SEQ ID NO: 2593835 - DNA, 25 bp, Homo sapien
gaatgtaacattttctgtaaggagg

SEQ ID NO: 2593836 - DNA, 25 bp, Homo sapien
ccccatcttaggtggcagaccatgt

SEQ ID NO: 2593837 - DNA, 25 bp, Homo sapien
tagtgggactgccaactaagttagc

SEQ ID NO: 2593838 - DNA, 25 bp, Homo sapien
gagggccatgaaaatggtgatgtct

SEQ ID NO: 2593839 - DNA, 25 bp, Homo sapien
agcacagaggcccataggagggcca

SEQ ID NO: 2593840 - DNA, 25 bp, Homo sapien
gaggcccataggagggccatgaaaa

SEQ ID NO: 2593841 - DNA, 25 bp, Homo sapien
cataggagggccatgaaaatggtga

SEQ ID NO: 2593842 - DNA, 25 bp, Homo sapien
tgtgctgcctcacaaaaccagtctg

SEQ ID NO: 2593843 - DNA, 25 bp, Homo sapien
tccgagatcatggagttaggaccag

SEQ ID NO: 2593844 - DNA, 25 bp, Homo sapien
gaccagaagttacgcaagttaggac

SEQ ID NO: 2593845 - DNA, 25 bp, Homo sapien
cagtctgggagatctataggcacaa

SEQ ID NO: 2593846 - DNA, 25 bp, Homo sapien
aaactcctattggaaggtcggtgtg

SEQ ID NO: 2593847 - DNA, 25 bp, Homo sapien
tttctggatcaatgttgatataaaa

SEQ ID NO: 2593848 - DNA, 25 bp, Homo sapien
ggtcggtgtgaatgaagcccacctt

SEQ ID NO: 2593849 - DNA, 25 bp, Homo sapien
cctattggaaggtcggtgtgaatga

SEQ ID NO: 2593850 - DNA, 25 bp, Homo sapien
ttcccaaagtccaagctcagcccga

SEQ ID NO: 2593851 - DNA, 25 bp, Homo sapien
aagctcagcccgactccttgcggtg

SEQ ID NO: 2593852 - DNA, 25 bp, Homo sapien
agtgactgaggtcagtcgtgtgtcc

SEQ ID NO: 2593853 - DNA, 25 bp, Homo sapien
ctgaggtcagtcgtgtgtccccatt

SEQ ID NO: 2593854 - DNA, 25 bp, Homo sapien
tcagctgggtttgttgttgcagtgc

SEQ ID NO: 2593855 - DNA, 25 bp, Homo sapien
ctcccggctgaataaacaggcggcg

SEQ ID NO: 2593856 - DNA, 25 bp, Homo sapien
tctccattcagctgggtttgttgtt

SEQ ID NO: 2593857 - DNA, 25 bp, Homo sapien
gcgcgtgccggactcccggctgaat

SEQ ID NO: 2593858 - DNA, 25 bp, Homo sapien
aatgtctgggcagtaatcaaccatt

SEQ ID NO: 2593859 - DNA, 25 bp, Homo sapien
ttgctactagcctcagcatatttta

SEQ ID NO: 2593860 - DNA, 25 bp, Homo sapien
tcaaccatttcagcaactggcttgc

SEQ ID NO: 2593861 - DNA, 25 bp, Homo sapien
gcaactggcttgctactagcctcag

SEQ ID NO: 2593862 - DNA, 25 bp, Homo sapien
ctcttggtttagcagagttgattta

SEQ ID NO: 2593863 - DNA, 25 bp, Homo sapien
ggtttagcagagttgatttatcagt

SEQ ID NO: 2593864 - DNA, 25 bp, Homo sapien
tagcagagttgatttatcagttatg

SEQ ID NO: 2593865 - DNA, 25 bp, Homo sapien
ttcccacactcttggtttagcagag

SEQ ID NO: 2593866 - DNA, 25 bp, Homo sapien
catatttatcccaaccggatttcac

SEQ ID NO: 2593867 - DNA, 25 bp, Homo sapien
aatcgagtgtgtccccttcaaatgc

SEQ ID NO: 2593868 - DNA, 25 bp, Homo sapien
tctgaaaaagaaagacctccacttc

SEQ ID NO: 2593869 - DNA, 25 bp, Homo sapien
tcaaatgccatttatgcctgtggtc

SEQ ID NO: 2593870 - DNA, 25 bp, Homo sapien
actgtggtcagtgcaaggcatagcc

SEQ ID NO: 2593871 - DNA, 25 bp, Homo sapien
tagccttgccagtcagaagtcttaa

SEQ ID NO: 2593872 - DNA, 25 bp, Homo sapien
tatgggtgtcttcaggccaacctcc

SEQ ID NO: 2593873 - DNA, 25 bp, Homo sapien
gacttcactcggtgagacttcactg

SEQ ID NO: 2593874 - DNA, 25 bp, Homo sapien
gcttctgcttcttagtggcctctca

SEQ ID NO: 2593875 - DNA, 25 bp, Homo sapien
cttctgcttcttagtggcctctcac

SEQ ID NO: 2593876 - DNA, 25 bp, Homo sapien
ctagcttctgcttcttagtggcctc

SEQ ID NO: 2593877 - DNA, 25 bp, Homo sapien
tagcttctgcttcttagtggcctct

SEQ ID NO: 2593878 - DNA, 25 bp, Homo sapien
gaaaacattagtgatctctagggct

SEQ ID NO: 2593879 - DNA, 25 bp, Homo sapien
tagcctttacatgacttgcagagca

SEQ ID NO: 2593880 - DNA, 25 bp, Homo sapien
ggtgtttttcacagctaaaccatgc

SEQ ID NO: 2593881 - DNA, 25 bp, Homo sapien
tatctcctgactgacttgttttcgg

SEQ ID NO: 2593882 - DNA, 25 bp, Homo sapien
tataggacaggaacaaataacctgt

SEQ ID NO: 2593883 - DNA, 25 bp, Homo sapien
caaataacctgtttctactgctgaa

SEQ ID NO: 2593884 - DNA, 25 bp, Homo sapien
tacagtcaggtaatttataggacag

SEQ ID NO: 2593885 - DNA, 25 bp, Homo sapien
gaaattggcttatctccaacccata

SEQ ID NO: 2593886 - DNA, 25 bp, Homo sapien
tcataacagtcatattccttgtcca

SEQ ID NO: 2593887 - DNA, 25 bp, Homo sapien
ctttcataacagtcatattccttgt

SEQ ID NO: 2593888 - DNA, 25 bp, Homo sapien
ttcataacagtcatattccttgtcc

SEQ ID NO: 2593889 - DNA, 25 bp, Homo sapien
cataacagtcatattccttgtccat

SEQ ID NO: 2593890 - DNA, 25 bp, Homo sapien
gaaattacatgccaaactggagggt

SEQ ID NO: 2593891 - DNA, 25 bp, Homo sapien
cagcaaagatgtggtgagcgtatat

SEQ ID NO: 2593892 - DNA, 25 bp, Homo sapien
agcctttattgccttccccgagatg

SEQ ID NO: 2593893 - DNA, 25 bp, Homo sapien
cccgagatgcccacttggagtaata

SEQ ID NO: 2593894 - DNA, 25 bp, Homo sapien
tgccaagtcgggaatgagaaccatt

SEQ ID NO: 2593895 - DNA, 25 bp, Homo sapien
ttatcacttcacatgaattaagtca

SEQ ID NO: 2593896 - DNA, 25 bp, Homo sapien
tgttctaagctattgcccgggaagg

SEQ ID NO: 2593897 - DNA, 25 bp, Homo sapien
ccatactgatcttagagaggaggaa

SEQ ID NO: 2593898 - DNA, 25 bp, Homo sapien
gacggtcgcaggcttagtccaattg

SEQ ID NO: 2593899 - DNA, 25 bp, Homo sapien
tgcctaaacctgtctaatcgacggg

SEQ ID NO: 2593900 - DNA, 25 bp, Homo sapien
tactgtgcggagatgcaccacgcaa

SEQ ID NO: 2593901 - DNA, 25 bp, Homo sapien
tgagagtcccggaagtgcctaaacc

SEQ ID NO: 2593902 - DNA, 25 bp, Homo sapien
aaggggggcggattattcatataat

SEQ ID NO: 2593903 - DNA, 25 bp, Homo sapien
atcctgactgtttcagctgggggta

SEQ ID NO: 2593904 - DNA, 25 bp, Homo sapien
cctgactgtttcagctgggggtaag

SEQ ID NO: 2593905 - DNA, 25 bp, Homo sapien
gtaaggggggcggattattcatata

SEQ ID NO: 2593906 - DNA, 25 bp, Homo sapien
cagagtcagtgaactggatttctac

SEQ ID NO: 2593907 - DNA, 25 bp, Homo sapien
gccagagtcagtgaactggatttct

SEQ ID NO: 2593908 - DNA, 25 bp, Homo sapien
tgaactggatttctactctgtgcct

SEQ ID NO: 2593909 - DNA, 25 bp, Homo sapien
gtcagtgaactggatttctactctg

SEQ ID NO: 2593910 - DNA, 25 bp, Homo sapien
gaacaggcgccctctgtgtcctaaa

SEQ ID NO: 2593911 - DNA, 25 bp, Homo sapien
cctaaatgccacattcccattgtgc

SEQ ID NO: 2593912 - DNA, 25 bp, Homo sapien
ctggggaacaggcgccctctgtgtc

SEQ ID NO: 2593913 - DNA, 25 bp, Homo sapien
tgtgtcagatctaatagaccaatcc

SEQ ID NO: 2593914 - DNA, 25 bp, Homo sapien
tcaggataaatgagtgacttaatgg

SEQ ID NO: 2593915 - DNA, 25 bp, Homo sapien
taatggataggtaggcacctagtgc

SEQ ID NO: 2593916 - DNA, 25 bp, Homo sapien
tgagtgacttaatggataggtaggc

SEQ ID NO: 2593917 - DNA, 25 bp, Homo sapien
taggtaggcacctagtgccactatt

SEQ ID NO: 2593918 - DNA, 25 bp, Homo sapien
tctgcagcattggttcctggtgtct

SEQ ID NO: 2593919 - DNA, 25 bp, Homo sapien
ttaaggtcaacaactcttaggtctg

SEQ ID NO: 2593920 - DNA, 25 bp, Homo sapien
catctagttcattggtgtctgggca

SEQ ID NO: 2593921 - DNA, 25 bp, Homo sapien
gatgtattggagatccgttgcacgt

SEQ ID NO: 2593922 - DNA, 25 bp, Homo sapien
ctgtgcttagtattaccagtaagtt

SEQ ID NO: 2593923 - DNA, 25 bp, Homo sapien
tcaatgtattgacaagttgttgttg

SEQ ID NO: 2593924 - DNA, 25 bp, Homo sapien
tactcatcttttcgtcattctactc

SEQ ID NO: 2593925 - DNA, 25 bp, Homo sapien
taatttatacactatatttacaatg

SEQ ID NO: 2593926 - DNA, 25 bp, Homo sapien
ccaatttagtggtgtacagttgctc

SEQ ID NO: 2593927 - DNA, 25 bp, Homo sapien
ggaagacttcattatggcttaggtc

SEQ ID NO: 2593928 - DNA, 25 bp, Homo sapien
ccttaagatgcattgatagcttgtt

SEQ ID NO: 2593929 - DNA, 25 bp, Homo sapien
tgagtttgaaagtactcccttcact

SEQ ID NO: 2593930 - DNA, 25 bp, Homo sapien
taatccacagttaggtatgactgcc

SEQ ID NO: 2593931 - DNA, 25 bp, Homo sapien
gagttactaggtcttaaggtcttga

SEQ ID NO: 2593932 - DNA, 25 bp, Homo sapien
ctgtctaggtgtaagaagagattcc

SEQ ID NO: 2593933 - DNA, 25 bp, Homo sapien
gagaattcctgtttgtaaggcacaa

SEQ ID NO: 2593934 - DNA, 25 bp, Homo sapien
tcatacaatgagtcataatcacatc

SEQ ID NO: 2593935 - DNA, 25 bp, Homo sapien
caggcacatcggaaaggttatctca

SEQ ID NO: 2593936 - DNA, 25 bp, Homo sapien
tctacagtccaatgagatacgcttt

SEQ ID NO: 2593937 - DNA, 25 bp, Homo sapien
cacttagttattcagtaccaggcac

SEQ ID NO: 2593938 - DNA, 25 bp, Homo sapien
caaatccaaagttatcagggtatgc

SEQ ID NO: 2593939 - DNA, 25 bp, Homo sapien
tcagccattgataacagagaaaggg

SEQ ID NO: 2593940 - DNA, 25 bp, Homo sapien
catcaaatccaaagttatcagggta

SEQ ID NO: 2593941 - DNA, 25 bp, Homo sapien
atccaaagttatcagggtatgcttg

SEQ ID NO: 2593942 - DNA, 25 bp, Homo sapien
ctgtggagtaactgccttttgcttc

SEQ ID NO: 2593943 - DNA, 25 bp, Homo sapien
tgtggagtaactgccttttgcttct

SEQ ID NO: 2593944 - DNA, 25 bp, Homo sapien
gtggagtaactgccttttgcttctt

SEQ ID NO: 2593945 - DNA, 25 bp, Homo sapien
tggagtaactgccttttgcttcttc

SEQ ID NO: 2593946 - DNA, 25 bp, Homo sapien
gatagagaaattactcaaagggcta

SEQ ID NO: 2593947 - DNA, 25 bp, Homo sapien
ttggatagagaaattactcaaaggg

SEQ ID NO: 2593948 - DNA, 25 bp, Homo sapien
aaattactcaaagggctaattcctg

SEQ ID NO: 2593949 - DNA, 25 bp, Homo sapien
gagaaattactcaaagggctaattc

SEQ ID NO: 2593950 - DNA, 25 bp, Homo sapien
tactataacgcgtgtgctgctccct

SEQ ID NO: 2593951 - DNA, 25 bp, Homo sapien
tgagcgcttcccgttttctgaaagc

SEQ ID NO: 2593952 - DNA, 25 bp, Homo sapien
cagttgctcttcatatctccgtgaa

SEQ ID NO: 2593953 - DNA, 25 bp, Homo sapien
cattttgcgcattgactcaggtccc

SEQ ID NO: 2593954 - DNA, 25 bp, Homo sapien
tttcaaagggctgagaatagcatag

SEQ ID NO: 2593955 - DNA, 25 bp, Homo sapien
caccaactcgtttctagagggctaa

SEQ ID NO: 2593956 - DNA, 25 bp, Homo sapien
gctaagaactgcactttaagaaagg

SEQ ID NO: 2593957 - DNA, 25 bp, Homo sapien
aaaccaatgtctacagcttattggg

SEQ ID NO: 2593958 - DNA, 25 bp, Homo sapien
ggcaacctatcaaaaccaactggct

SEQ ID NO: 2593959 - DNA, 25 bp, Homo sapien
cccgaactggttaggatagatacaa

SEQ ID NO: 2593960 - DNA, 25 bp, Homo sapien
cactttgagtttggacagtagctgc

SEQ ID NO: 2593961 - DNA, 25 bp, Homo sapien
tgctgaagtacaactggtggcctct

SEQ ID NO: 2593962 - DNA, 25 bp, Homo sapien
tttggagagatctgcgcttggcaga

SEQ ID NO: 2593963 - DNA, 25 bp, Homo sapien
caagagtgtgggaaatatgtacaac

SEQ ID NO: 2593964 - DNA, 25 bp, Homo sapien
cctgtgaggtggataattaaggcta

SEQ ID NO: 2593965 - DNA, 25 bp, Homo sapien
tgaggagccgaaagaaaaagtagat

SEQ ID NO: 2593966 - DNA, 25 bp, Homo sapien
gctagcatggttacagtcgtatctg

SEQ ID NO: 2593967 - DNA, 25 bp, Homo sapien
gatatcagggttacagtaaagggta

SEQ ID NO: 2593968 - DNA, 25 bp, Homo sapien
gaacagctgaatccaatagcttggc

SEQ ID NO: 2593969 - DNA, 25 bp, Homo sapien
ccactcggtggaatttaccaacgct

SEQ ID NO: 2593970 - DNA, 25 bp, Homo sapien
tgaacgggtataactatgctagaca

SEQ ID NO: 2593971 - DNA, 25 bp, Homo sapien
gtctataagtgtaatgtaggtgccc

SEQ ID NO: 2593972 - DNA, 25 bp, Homo sapien
tagtagtaaacataccatgtccgac

SEQ ID NO: 2593973 - DNA, 25 bp, Homo sapien
tagggcaggactaatatcaatgggc

SEQ ID NO: 2593974 - DNA, 25 bp, Homo sapien
tatgctagaaatgaaaatggtaaca

SEQ ID NO: 2593975 - DNA, 25 bp, Homo sapien
tgtcttggaacttaccttcaatttg

SEQ ID NO: 2593976 - DNA, 25 bp, Homo sapien
gtatgctagaaatgaaaatggtaac

SEQ ID NO: 2593977 - DNA, 25 bp, Homo sapien
gtcttggaacttaccttcaatttga

SEQ ID NO: 2593978 - DNA, 25 bp, Homo sapien
tattgccgagacattagaaggaaca

SEQ ID NO: 2593979 - DNA, 25 bp, Homo sapien
ggaccccaacagtatcacaagaaga

SEQ ID NO: 2593980 - DNA, 25 bp, Homo sapien
aatatgatcaaagtaaaccaattct

SEQ ID NO: 2593981 - DNA, 25 bp, Homo sapien
ttgacattaattagagctatgaagc

SEQ ID NO: 2593982 - DNA, 25 bp, Homo sapien
tataaaacgttctagacaccatcag

SEQ ID NO: 2593983 - DNA, 25 bp, Homo sapien
tctgctaaaagacacaccatgctcc

SEQ ID NO: 2593984 - DNA, 25 bp, Homo sapien
tctgttatttcacccagcacgtcac

SEQ ID NO: 2593985 - DNA, 25 bp, Homo sapien
tacatacactacaacaaactgacag

SEQ ID NO: 2593986 - DNA, 25 bp, Homo sapien
ttatgctgattacatagtactaggg

SEQ ID NO: 2593987 - DNA, 25 bp, Homo sapien
tcctgtgagtcaagagaaagcaaga

SEQ ID NO: 2593988 - DNA, 25 bp, Homo sapien
catagtactagggaagatgtatgat

SEQ ID NO: 2593989 - DNA, 25 bp, Homo sapien
gaaagcaagacagctattacctctc

SEQ ID NO: 2593990 - DNA, 25 bp, Homo sapien
aaaggttaacggctcacttcatgta

SEQ ID NO: 2593991 - DNA, 25 bp, Homo sapien
tatttggaagttagcttgcgggaag

SEQ ID NO: 2593992 - DNA, 25 bp, Homo sapien
caagaccgcgtgcaactacactagt

SEQ ID NO: 2593993 - DNA, 25 bp, Homo sapien
ttgcgggaaggagcacaaagcatcc

SEQ ID NO: 2593994 - DNA, 25 bp, Homo sapien
gcagatataggctgtggccaaacct

SEQ ID NO: 2593995 - DNA, 25 bp, Homo sapien
caaagactagtggtttcaagtggaa

SEQ ID NO: 2593996 - DNA, 25 bp, Homo sapien
gaggatattgctccaacgtgttaat

SEQ ID NO: 2593997 - DNA, 25 bp, Homo sapien
tagcctctgccaaaactagatgggt

SEQ ID NO: 2593998 - DNA, 25 bp, Homo sapien
tcttcttacgtatgcccctcagttg

SEQ ID NO: 2593999 - DNA, 25 bp, Homo sapien
cagactcgtatgaaattgccaccag

SEQ ID NO: 2594000 - DNA, 25 bp, Homo sapien
gacttgacgttgctgcagactcgta

SEQ ID NO: 2594001 - DNA, 25 bp, Homo sapien
gtaaaccagatattggccaccccag

SEQ ID NO: 2594002 - DNA, 25 bp, Homo sapien
acttatactgcctccctgttaacca

SEQ ID NO: 2594003 - DNA, 25 bp, Homo sapien
tactgcctccctgttaaccacttgg

SEQ ID NO: 2594004 - DNA, 25 bp, Homo sapien
tctatacacttatactgcctccctg

SEQ ID NO: 2594005 - DNA, 25 bp, Homo sapien
tacacttatactgcctccctgttaa

SEQ ID NO: 2594006 - DNA, 25 bp, Homo sapien
tgtttgaataggagttaatttgagc

SEQ ID NO: 2594007 - DNA, 25 bp, Homo sapien
gtttgaataggagttaatttgagct

SEQ ID NO: 2594008 - DNA, 25 bp, Homo sapien
tttgaataggagttaatttgagctg

SEQ ID NO: 2594009 - DNA, 25 bp, Homo sapien
ggatatagtcaaagcgaatttagca

SEQ ID NO: 2594010 - DNA, 25 bp, Homo sapien
agtttattatgctaagggcctggga

SEQ ID NO: 2594011 - DNA, 25 bp, Homo sapien
gacatcaattcttgccaaattcagg

SEQ ID NO: 2594012 - DNA, 25 bp, Homo sapien
taaagacgcacagaatgaggaacat

SEQ ID NO: 2594013 - DNA, 25 bp, Homo sapien
attctctgtaattgttccaacttta

SEQ ID NO: 2594014 - DNA, 25 bp, Homo sapien
ctaatattctctgtaattgttccaa

SEQ ID NO: 2594015 - DNA, 25 bp, Homo sapien
aatattctctgtaattgttccaact

SEQ ID NO: 2594016 - DNA, 25 bp, Homo sapien
tattctctgtaattgttccaacttt

SEQ ID NO: 2594017 - DNA, 25 bp, Homo sapien
tttccgcaggcgctcacggagagct

SEQ ID NO: 2594018 - DNA, 25 bp, Homo sapien
gagagctcgcggtaattccgtttcc

SEQ ID NO: 2594019 - DNA, 25 bp, Homo sapien
gcgctcacggagagctcgcggtaat

SEQ ID NO: 2594020 - DNA, 25 bp, Homo sapien
gtgactactgtttccgcaggcgctc

SEQ ID NO: 2594021 - DNA, 25 bp, Homo sapien
cagtcttcgccgccaaaaacggact

SEQ ID NO: 2594022 - DNA, 25 bp, Homo sapien
cggtaccagttgttggatccaagag

SEQ ID NO: 2594023 - DNA, 25 bp, Homo sapien
gatccaagagaattccggaacccaa

SEQ ID NO: 2594024 - DNA, 25 bp, Homo sapien
aaacggtccattaccgcggctctgg

SEQ ID NO: 2594025 - DNA, 25 bp, Homo sapien
cagcccccgggttgtgaggcggaag

SEQ ID NO: 2594026 - DNA, 25 bp, Homo sapien
aggggcgaacccagcggagccggcg

SEQ ID NO: 2594027 - DNA, 25 bp, Homo sapien
gaacccagcggagccggcgtgcaca

SEQ ID NO: 2594028 - DNA, 25 bp, Homo sapien
tgaggcggaagccaaaggggcgaac

SEQ ID NO: 2594029 - DNA, 25 bp, Homo sapien
cgccgcctccaccgcgcggggcttg

SEQ ID NO: 2594030 - DNA, 25 bp, Homo sapien
ccgcctccaccgcgcggggcttgga

SEQ ID NO: 2594031 - DNA, 25 bp, Homo sapien
gcccggggccgtcgctgccaccgcc

SEQ ID NO: 2594032 - DNA, 25 bp, Homo sapien
cctccaccgcgcggggcttggacat

SEQ ID NO: 2594033 - DNA, 25 bp, Homo sapien
tagatctttgactgcccggtaaata

SEQ ID NO: 2594034 - DNA, 25 bp, Homo sapien
tgaagggggaaacgcattccagagc

SEQ ID NO: 2594035 - DNA, 25 bp, Homo sapien
cattccagagcatttgttcgggctc

SEQ ID NO: 2594036 - DNA, 25 bp, Homo sapien
cgggctcatgtaggaatagatcttt

SEQ ID NO: 2594037 - DNA, 25 bp, Homo sapien
tcagaacgaggccatttcaaaagct

SEQ ID NO: 2594038 - DNA, 25 bp, Homo sapien
gacagaacatggctcaaacctctcg

SEQ ID NO: 2594039 - DNA, 25 bp, Homo sapien
gaaagcagggagaacctgtcaaacc

SEQ ID NO: 2594040 - DNA, 25 bp, Homo sapien
tatgctaactcttgtgaaagcaggg

SEQ ID NO: 2594041 - DNA, 25 bp, Homo sapien
ggaaggaagtcagttccctacatga

SEQ ID NO: 2594042 - DNA, 25 bp, Homo sapien
cctggtctgtacaacctgaattcat

SEQ ID NO: 2594043 - DNA, 25 bp, Homo sapien
gggtcaaggccagctcataaaaggg

SEQ ID NO: 2594044 - DNA, 25 bp, Homo sapien
ctacatgaacacattagttaggtct

SEQ ID NO: 2594045 - DNA, 25 bp, Homo sapien
ctttgatcttctgttcctcggactt

SEQ ID NO: 2594046 - DNA, 25 bp, Homo sapien
ttttcagggcttgcttggcgatggc

SEQ ID NO: 2594047 - DNA, 25 bp, Homo sapien
gctccgtactgcgttcccagcattt

SEQ ID NO: 2594048 - DNA, 25 bp, Homo sapien
caggggacctttcctggcgtctttg

SEQ ID NO: 2594049 - DNA, 25 bp, Homo sapien
gctccttcggacagggtagaaatcc

SEQ ID NO: 2594050 - DNA, 25 bp, Homo sapien
tagaaatccgtaagtttgcgattct

SEQ ID NO: 2594051 - DNA, 25 bp, Homo sapien
agtttgcgattctgttgcgtttttc

SEQ ID NO: 2594052 - DNA, 25 bp, Homo sapien
ccgtaagtttgcgattctgttgcgt

SEQ ID NO: 2594053 - DNA, 25 bp, Homo sapien
cctgcccctccacaaactggaattt

SEQ ID NO: 2594054 - DNA, 25 bp, Homo sapien
tgcccctccacaaactggaatttaa

SEQ ID NO: 2594055 - DNA, 25 bp, Homo sapien
ctccacaaactggaatttaaagcac

SEQ ID NO: 2594056 - DNA, 25 bp, Homo sapien
cctccacaaactggaatttaaagca

SEQ ID NO: 2594057 - DNA, 25 bp, Homo sapien
cgccaagcactgcttggtgggccac

SEQ ID NO: 2594058 - DNA, 25 bp, Homo sapien
gcacacgccaagcactgcttggtgg

SEQ ID NO: 2594059 - DNA, 25 bp, Homo sapien
cacgccaagcactgcttggtgggcc

SEQ ID NO: 2594060 - DNA, 25 bp, Homo sapien
cacacgccaagcactgcttggtggg

SEQ ID NO: 2594061 - DNA, 25 bp, Homo sapien
gccgcatagctcaaccctctgcaaa

SEQ ID NO: 2594062 - DNA, 25 bp, Homo sapien
ccagccggtgctgctcactggtctg

SEQ ID NO: 2594063 - DNA, 25 bp, Homo sapien
aaatattgactgcctgccgcatagc

SEQ ID NO: 2594064 - DNA, 25 bp, Homo sapien
ctgcaaacatggcagcggaggcccg

SEQ ID NO: 2594065 - DNA, 25 bp, Homo sapien
tccaggctgggtggcggagtgagat

SEQ ID NO: 2594066 - DNA, 25 bp, Homo sapien
aatttcagctactcgggacactgag

SEQ ID NO: 2594067 - DNA, 25 bp, Homo sapien
ggctgggtggcggagtgagatgctg

SEQ ID NO: 2594068 - DNA, 25 bp, Homo sapien
caggctgggtggcggagtgagatgc

SEQ ID NO: 2594069 - DNA, 25 bp, Homo sapien
cagacgttgaatggctgcgatggaa

SEQ ID NO: 2594070 - DNA, 25 bp, Homo sapien
tgtttaaatttgaccgtcgccagac

SEQ ID NO: 2594071 - DNA, 25 bp, Homo sapien
gcaggctgcccgtagtgataggcca

SEQ ID NO: 2594072 - DNA, 25 bp, Homo sapien
taactgcaaacgctttcccgacagg

SEQ ID NO: 2594073 - DNA, 25 bp, Homo sapien
tagggagcatactgcactaaagcaa

SEQ ID NO: 2594074 - DNA, 25 bp, Homo sapien
gacgcagtggctggaaatgaccaag

SEQ ID NO: 2594075 - DNA, 25 bp, Homo sapien
ggagatctctttgccgcatacctgg

SEQ ID NO: 2594076 - DNA, 25 bp, Homo sapien
tgtcctgacagccaactaagtatgc

SEQ ID NO: 2594077 - DNA, 25 bp, Homo sapien
gacgaaagatgacgctgcacagtga

SEQ ID NO: 2594078 - DNA, 25 bp, Homo sapien
tgcacagtgattcaggctgggctca

SEQ ID NO: 2594079 - DNA, 25 bp, Homo sapien
ggagctagcctctttatgcctcagt

SEQ ID NO: 2594080 - DNA, 25 bp, Homo sapien
tagctcgaggcaacagacatgtgct

SEQ ID NO: 2594081 - DNA, 25 bp, Homo sapien
ttggcgcggatctcgtcgcgttgtt

SEQ ID NO: 2594082 - DNA, 25 bp, Homo sapien
atcacctgtcgctcccgctctgaca

SEQ ID NO: 2594083 - DNA, 25 bp, Homo sapien
caacgtcctcatttttcaggcccag

SEQ ID NO: 2594084 - DNA, 25 bp, Homo sapien
tcgtcgcgttgtttgtccaccacct

SEQ ID NO: 2594085 - DNA, 25 bp, Homo sapien
caccgtgacccggtgccgaaggtca

SEQ ID NO: 2594086 - DNA, 25 bp, Homo sapien
ccggtgccgaaggtcatggttgatc

SEQ ID NO: 2594087 - DNA, 25 bp, Homo sapien
cttctgttcgatcagggctttcccc

SEQ ID NO: 2594088 - DNA, 25 bp, Homo sapien
tgatcttcatcagccgtgtctgctg

SEQ ID NO: 2594089 - DNA, 25 bp, Homo sapien
caggccagtagcttgttctctctga

SEQ ID NO: 2594090 - DNA, 25 bp, Homo sapien
aggccagtagcttgttctctctgag

SEQ ID NO: 2594091 - DNA, 25 bp, Homo sapien
tgtgtgtcctcaggccagtagcttg

SEQ ID NO: 2594092 - DNA, 25 bp, Homo sapien
tgtcctcaggccagtagcttgttct

SEQ ID NO: 2594093 - DNA, 25 bp, Homo sapien
tctctcccagctgcgcgaaacagtg

SEQ ID NO: 2594094 - DNA, 25 bp, Homo sapien
tgcgcgaaacagtgaacctactgag

SEQ ID NO: 2594095 - DNA, 25 bp, Homo sapien
tactgagtcaagctcattcccctca

SEQ ID NO: 2594096 - DNA, 25 bp, Homo sapien
caagccctcccctgatcttatactc

SEQ ID NO: 2594097 - DNA, 25 bp, Homo sapien
tctgctcacccctattgggttttaa

SEQ ID NO: 2594098 - DNA, 25 bp, Homo sapien
tgggttttaactgcccaagacattg

SEQ ID NO: 2594099 - DNA, 25 bp, Homo sapien
tgaagggcttccttagaacctgagt

SEQ ID NO: 2594100 - DNA, 25 bp, Homo sapien
taactgcccaagacattgaagggct

SEQ ID NO: 2594101 - DNA, 25 bp, Homo sapien
ggtcaggacagcagtgaaaaagctc

SEQ ID NO: 2594102 - DNA, 25 bp, Homo sapien
tgcaagtcagccagtcaatctacag

SEQ ID NO: 2594103 - DNA, 25 bp, Homo sapien
aaagctccagaacagggaaagggag

SEQ ID NO: 2594104 - DNA, 25 bp, Homo sapien
ctctcaaaggaatggagtgtcccca

SEQ ID NO: 2594105 - DNA, 25 bp, Homo sapien
ggtccttgagatccatggccacctt

SEQ ID NO: 2594106 - DNA, 25 bp, Homo sapien
caccttctctgcgtcggagatgctc

SEQ ID NO: 2594107 - DNA, 25 bp, Homo sapien
cttggacttgagctcgttcctctcg

SEQ ID NO: 2594108 - DNA, 25 bp, Homo sapien
tgagctcgttcctctcgtgcagcac

SEQ ID NO: 2594109 - DNA, 25 bp, Homo sapien
cttgcctcttatagtaagccagctc

SEQ ID NO: 2594110 - DNA, 25 bp, Homo sapien
gacacttgcctcttatagtaagcca

SEQ ID NO: 2594111 - DNA, 25 bp, Homo sapien
tgcctcttatagtaagccagctcct

SEQ ID NO: 2594112 - DNA, 25 bp, Homo sapien
cacttgcctcttatagtaagccagc

SEQ ID NO: 2594113 - DNA, 25 bp, Homo sapien
agtgctgggaacttagccatggaca

SEQ ID NO: 2594114 - DNA, 25 bp, Homo sapien
cagggaccacctctggtgcatgggt

SEQ ID NO: 2594115 - DNA, 25 bp, Homo sapien
tgtgtgccaagctccattctaagtg

SEQ ID NO: 2594116 - DNA, 25 bp, Homo sapien
cagtatacagtcagtaaacctttca

SEQ ID NO: 2594117 - DNA, 25 bp, Homo sapien
cgcttgatgcccgactccggctggg

SEQ ID NO: 2594118 - DNA, 25 bp, Homo sapien
gacgtcctcgggtgggcgatgggtg

SEQ ID NO: 2594119 - DNA, 25 bp, Homo sapien
agtcgcttgatgcccgactccggct

SEQ ID NO: 2594120 - DNA, 25 bp, Homo sapien
acgtcctcgggtgggcgatgggtgg

SEQ ID NO: 2594121 - DNA, 25 bp, Homo sapien
ggagagaatgcagctccaacactgc

SEQ ID NO: 2594122 - DNA, 25 bp, Homo sapien
tacacgatccgactggctttccaac

SEQ ID NO: 2594123 - DNA, 25 bp, Homo sapien
gcattgtctactcacagggcaagaa

SEQ ID NO: 2594124 - DNA, 25 bp, Homo sapien
cttgcagagagctcacagtgtgggc

SEQ ID NO: 2594125 - DNA, 25 bp, Homo sapien
gcctgaaaggctaattcttaacgac

SEQ ID NO: 2594126 - DNA, 25 bp, Homo sapien
gaaggatgcagaacacaagtctctt

SEQ ID NO: 2594127 - DNA, 25 bp, Homo sapien
gctgaaggatgcagaacacaagtct

SEQ ID NO: 2594128 - DNA, 25 bp, Homo sapien
tcttaacgacctgggaacaaatggc

SEQ ID NO: 2594129 - DNA, 25 bp, Homo sapien
tgcctgcactggtcaaaagcccttt

SEQ ID NO: 2594130 - DNA, 25 bp, Homo sapien
tgaaggatggaaggacgctcagaac

SEQ ID NO: 2594131 - DNA, 25 bp, Homo sapien
gcaaccagaagccaacctaagtggg

SEQ ID NO: 2594132 - DNA, 25 bp, Homo sapien
gaagagctctgaaaacagggcccca

SEQ ID NO: 2594133 - DNA, 25 bp, Homo sapien
ctccccaactgcgatgagctgcagg

SEQ ID NO: 2594134 - DNA, 25 bp, Homo sapien
tgcaggcgccatgaccctaagcgcc

SEQ ID NO: 2594135 - DNA, 25 bp, Homo sapien
ccaactgcgatgagctgcaggcgcc

SEQ ID NO: 2594136 - DNA, 25 bp, Homo sapien
gaccctaagcgccaggcgagaacca

SEQ ID NO: 2594137 - DNA, 25 bp, Homo sapien
caaccaccattttgtttgggcccag

SEQ ID NO: 2594138 - DNA, 25 bp, Homo sapien
gacttgagtttgttgcgttcctgca

SEQ ID NO: 2594139 - DNA, 25 bp, Homo sapien
cttagctcctgcagagtgaagcggg

SEQ ID NO: 2594140 - DNA, 25 bp, Homo sapien
tgggatctgtcaggtcaaccaccat

SEQ ID NO: 2594141 - DNA, 25 bp, Homo sapien
cagagccagcctacatgcaaagaga

SEQ ID NO: 2594142 - DNA, 25 bp, Homo sapien
tgttctcacagtcaaagcaagtcac

SEQ ID NO: 2594143 - DNA, 25 bp, Homo sapien
cacagaatgctggtctcaaggaagc

SEQ ID NO: 2594144 - DNA, 25 bp, Homo sapien
tgtggtccacctgctagcctgagct

SEQ ID NO: 2594145 - DNA, 25 bp, Homo sapien
tctgccccccggggctcacgccatc

SEQ ID NO: 2594146 - DNA, 25 bp, Homo sapien
ctgccccccggggctcacgccatcc

SEQ ID NO: 2594147 - DNA, 25 bp, Homo sapien
tgccccccggggctcacgccatcct

SEQ ID NO: 2594148 - DNA, 25 bp, Homo sapien
ccaatgtgatgcctcgtttcttttt

SEQ ID NO: 2594149 - DNA, 25 bp, Homo sapien
gatgattatggtaatattacggttg

SEQ ID NO: 2594150 - DNA, 25 bp, Homo sapien
tatggtaatattacggttgaaagca

SEQ ID NO: 2594151 - DNA, 25 bp, Homo sapien
tgaaaataaagggtcttaatgatga

SEQ ID NO: 2594152 - DNA, 25 bp, Homo sapien
agctctgaaaataaagggtcttaat

SEQ ID NO: 2594153 - DNA, 25 bp, Homo sapien
cactgagcctggcttttattacaga

SEQ ID NO: 2594154 - DNA, 25 bp, Homo sapien
atgaaccactgagcctggcttttat

SEQ ID NO: 2594155 - DNA, 25 bp, Homo sapien
gaaccactgagcctggcttttatta

SEQ ID NO: 2594156 - DNA, 25 bp, Homo sapien
accactgagcctggcttttattaca

SEQ ID NO: 2594157 - DNA, 25 bp, Homo sapien
tagtaaccacagcatctttttctct

SEQ ID NO: 2594158 - DNA, 25 bp, Homo sapien
gcttttttatgattgtcttctcctc

SEQ ID NO: 2594159 - DNA, 25 bp, Homo sapien
gggccttctcttggtggaatcaggc

SEQ ID NO: 2594160 - DNA, 25 bp, Homo sapien
cctgccagcatttttggcactagta

SEQ ID NO: 2594161 - DNA, 25 bp, Homo sapien
gccatagccttacttgtggccttgg

SEQ ID NO: 2594162 - DNA, 25 bp, Homo sapien
tcttctagaatcagagccatagcct

SEQ ID NO: 2594163 - DNA, 25 bp, Homo sapien
caagggtgtctagttctgcagccag

SEQ ID NO: 2594164 - DNA, 25 bp, Homo sapien
ccaggcatcttggaaggttgtcttc

SEQ ID NO: 2594165 - DNA, 25 bp, Homo sapien
tcagtgaagtcaccactggaatctc

SEQ ID NO: 2594166 - DNA, 25 bp, Homo sapien
gagcagatgagtaggacacgcgtct

SEQ ID NO: 2594167 - DNA, 25 bp, Homo sapien
tctgctaaccattgaagaccagggt

SEQ ID NO: 2594168 - DNA, 25 bp, Homo sapien
gaaaggcatgttggctaaatcaaat

SEQ ID NO: 2594169 - DNA, 25 bp, Homo sapien
tagttcctttgcgaagtgcagacac

SEQ ID NO: 2594170 - DNA, 25 bp, Homo sapien
gaatggttgcggcagcctcattagt

SEQ ID NO: 2594171 - DNA, 25 bp, Homo sapien
agaagacaggctcacggaatggttg

SEQ ID NO: 2594172 - DNA, 25 bp, Homo sapien
tcaggatgagtcctaaaatcgatag

SEQ ID NO: 2594173 - DNA, 25 bp, Homo sapien
acaatgcggaaaggaacccgagcgg

SEQ ID NO: 2594174 - DNA, 25 bp, Homo sapien
cgttgatgggactggacaccatgga

SEQ ID NO: 2594175 - DNA, 25 bp, Homo sapien
agcttccacaatgcggaaaggaacc

SEQ ID NO: 2594176 - DNA, 25 bp, Homo sapien
tgcactcctcaacccttgggtcgtt

SEQ ID NO: 2594177 - DNA, 25 bp, Homo sapien
gcctggccagggttgcagtgttaca

SEQ ID NO: 2594178 - DNA, 25 bp, Homo sapien
ttctagggattaggagccctgatct

SEQ ID NO: 2594179 - DNA, 25 bp, Homo sapien
gagccctgatctaatgatgctgttg

SEQ ID NO: 2594180 - DNA, 25 bp, Homo sapien
ggttgcagtgttacacagggttcta

SEQ ID NO: 2594181 - DNA, 25 bp, Homo sapien
gtaaaagatgactgctggccaggca

SEQ ID NO: 2594182 - DNA, 25 bp, Homo sapien
cgcccagccctatttgttcattgta

SEQ ID NO: 2594183 - DNA, 25 bp, Homo sapien
ttgtaaaagatgactgctggccagg

SEQ ID NO: 2594184 - DNA, 25 bp, Homo sapien
aaataaaagatgattgctacagcaa

SEQ ID NO: 2594185 - DNA, 25 bp, Homo sapien
agtgcctccaagttctgatatgtag

SEQ ID NO: 2594186 - DNA, 25 bp, Homo sapien
tcagtgtttacaagtactcaggact

SEQ ID NO: 2594187 - DNA, 25 bp, Homo sapien
gactaatagctaataagtgcctcca

SEQ ID NO: 2594188 - DNA, 25 bp, Homo sapien
gccttgcacatagccttcagtaatc

SEQ ID NO: 2594189 - DNA, 25 bp, Homo sapien
gaggctgtcctcgtctttgattccc

SEQ ID NO: 2594190 - DNA, 25 bp, Homo sapien
tcagcaaattggaagaggatccgat

SEQ ID NO: 2594191 - DNA, 25 bp, Homo sapien
tccgatgggagtgtaaatgtgagac

SEQ ID NO: 2594192 - DNA, 25 bp, Homo sapien
ggcctcacgacggtgctacctaaga

SEQ ID NO: 2594193 - DNA, 25 bp, Homo sapien
tcaaggatagggctaaggttttcac

SEQ ID NO: 2594194 - DNA, 25 bp, Homo sapien
tcaccttaactgtgaaggcaggagg

SEQ ID NO: 2594195 - DNA, 25 bp, Homo sapien
gcaggaggaataggtgactgcttcc

SEQ ID NO: 2594196 - DNA, 25 bp, Homo sapien
ctgtcccttcagtccagggggccgg

SEQ ID NO: 2594197 - DNA, 25 bp, Homo sapien
caaggacgcaactgtgagctgaggt

SEQ ID NO: 2594198 - DNA, 25 bp, Homo sapien
tcctcctgcaaggacgcaactgtga

SEQ ID NO: 2594199 - DNA, 25 bp, Homo sapien
cctgcaaggacgcaactgtgagctg

SEQ ID NO: 2594200 - DNA, 25 bp, Homo sapien
gtgtcctcctgcaaggacgcaactg

SEQ ID NO: 2594201 - DNA, 25 bp, Homo sapien
gcatcagggcgtgaaatcaaactag

SEQ ID NO: 2594202 - DNA, 25 bp, Homo sapien
taacgtctcaacaggcgctcactga

SEQ ID NO: 2594203 - DNA, 25 bp, Homo sapien
tctgggcaccttgaagcatcagggc

SEQ ID NO: 2594204 - DNA, 25 bp, Homo sapien
tgtgcttcccgtgcatgcagtcaaa

SEQ ID NO: 2594205 - DNA, 25 bp, Homo sapien
atcaagctacgcacgatgggcctag

SEQ ID NO: 2594206 - DNA, 25 bp, Homo sapien
gcaatcagggctcaagaccatcaag

SEQ ID NO: 2594207 - DNA, 25 bp, Homo sapien
gccacactggtttggagcttccgat

SEQ ID NO: 2594208 - DNA, 25 bp, Homo sapien
cattttttaacgtgctgcatgggca

SEQ ID NO: 2594209 - DNA, 25 bp, Homo sapien
cttaagttactctggtgaatttgtc

SEQ ID NO: 2594210 - DNA, 25 bp, Homo sapien
acattggtatattactgttggttga

SEQ ID NO: 2594211 - DNA, 25 bp, Homo sapien
gtcacagctaagtaacaaccaacat

SEQ ID NO: 2594212 - DNA, 25 bp, Homo sapien
ttacccatcttctctcacttaagtt

SEQ ID NO: 2594213 - DNA, 25 bp, Homo sapien
ggtacaaccactggcagcctctaat

SEQ ID NO: 2594214 - DNA, 25 bp, Homo sapien
gctggtggacagtagctcactgcca

SEQ ID NO: 2594215 - DNA, 25 bp, Homo sapien
aaatcacactgtatgcaaccttggg

SEQ ID NO: 2594216 - DNA, 25 bp, Homo sapien
tctcagtgttttcgacggcacatcg

SEQ ID NO: 2594217 - DNA, 25 bp, Homo sapien
taagttgaaagaaagactatcgaat

SEQ ID NO: 2594218 - DNA, 25 bp, Homo sapien
tatgcagttacctgggacattttac

SEQ ID NO: 2594219 - DNA, 25 bp, Homo sapien
gactatcgaatatgcagttacctgg

SEQ ID NO: 2594220 - DNA, 25 bp, Homo sapien
aattgctaattcaacaactaagttg

SEQ ID NO: 2594221 - DNA, 25 bp, Homo sapien
attggtagcagcagattcgccgccg

SEQ ID NO: 2594222 - DNA, 25 bp, Homo sapien
attttactcccacgcaacgagggtg

SEQ ID NO: 2594223 - DNA, 25 bp, Homo sapien
tgcaggcgacagcagattctccgcg

SEQ ID NO: 2594224 - DNA, 25 bp, Homo sapien
tctgcaaagcttgggctcccttccg

SEQ ID NO: 2594225 - DNA, 25 bp, Homo sapien
acacaagcgcgggcacagcgtctgg

SEQ ID NO: 2594226 - DNA, 25 bp, Homo sapien
gtaaggcgccatccttccaatccag

SEQ ID NO: 2594227 - DNA, 25 bp, Homo sapien
tgccaggtttcaacatggcgcccca

SEQ ID NO: 2594228 - DNA, 25 bp, Homo sapien
gcaacccagaatgtcgtcccctttg

SEQ ID NO: 2594229 - DNA, 25 bp, Homo sapien
cgcagtgggcctcggaggcaaacac

SEQ ID NO: 2594230 - DNA, 25 bp, Homo sapien
agggcatgcgcagtgggcctcggag

SEQ ID NO: 2594231 - DNA, 25 bp, Homo sapien
aagactttgcccctcctgtgaaaag

SEQ ID NO: 2594232 - DNA, 25 bp, Homo sapien
agcaaaactgaaggcggaacccaca

SEQ ID NO: 2594233 - DNA, 25 bp, Homo sapien
tgacccgaaatgtcgacgctgcagt

SEQ ID NO: 2594234 - DNA, 25 bp, Homo sapien
ttgacccgaaatgtcgacgctgcag

SEQ ID NO: 2594235 - DNA, 25 bp, Homo sapien
gacccgaaatgtcgacgctgcagtg

SEQ ID NO: 2594236 - DNA, 25 bp, Homo sapien
ttctccgggcgtggggtcgcgcctg

SEQ ID NO: 2594237 - DNA, 25 bp, Homo sapien
atcaatcaataatcaattctccggg

SEQ ID NO: 2594238 - DNA, 25 bp, Homo sapien
aagtgagaccccgtttcaatcaatc

SEQ ID NO: 2594239 - DNA, 25 bp, Homo sapien
atcaataatcaattctccgggcgtg

SEQ ID NO: 2594240 - DNA, 25 bp, Homo sapien
taaatgtcacttcactaggtttttg

SEQ ID NO: 2594241 - DNA, 25 bp, Homo sapien
gagcttcaggattcttattgtgaaa

SEQ ID NO: 2594242 - DNA, 25 bp, Homo sapien
gatcatatggtgtctataaaaatgc

SEQ ID NO: 2594243 - DNA, 25 bp, Homo sapien
tgtgaaatgtagctaaatgtcactt

SEQ ID NO: 2594244 - DNA, 25 bp, Homo sapien
ctgatgtcagatgacccgcctgcct

SEQ ID NO: 2594245 - DNA, 25 bp, Homo sapien
agatgacccgcctgcctcagcctcc

SEQ ID NO: 2594246 - DNA, 25 bp, Homo sapien
taggttgagatttcctacaacaatc

SEQ ID NO: 2594247 - DNA, 25 bp, Homo sapien
tttctaggtgcacttcctccccggc

SEQ ID NO: 2594248 - DNA, 25 bp, Homo sapien
ttcctccccggcagcattaggttga

SEQ ID NO: 2594249 - DNA, 25 bp, Homo sapien
atctctttcgatttttacattctct

SEQ ID NO: 2594250 - DNA, 25 bp, Homo sapien
gggagtgattacttagaggtgcact

SEQ ID NO: 2594251 - DNA, 25 bp, Homo sapien
ggcttgagccttggaacttgagact

SEQ ID NO: 2594252 - DNA, 25 bp, Homo sapien
gttatatagggggagtgattactta

SEQ ID NO: 2594253 - DNA, 25 bp, Homo sapien
agtgattacttagaggtgcactgtg

SEQ ID NO: 2594254 - DNA, 25 bp, Homo sapien
ggcgaggtaggtgggcgccttaatc

SEQ ID NO: 2594255 - DNA, 25 bp, Homo sapien
aggcgaggtaggtgggcgccttaat

SEQ ID NO: 2594256 - DNA, 25 bp, Homo sapien
gcgaggtaggtgggcgccttaatcc

SEQ ID NO: 2594257 - DNA, 25 bp, Homo sapien
ggtctgcaagtttagtctggccaca

SEQ ID NO: 2594258 - DNA, 25 bp, Homo sapien
gcgtagccctttgaaaaacctgtga

SEQ ID NO: 2594259 - DNA, 25 bp, Homo sapien
caatgctgcccgctttgagtggatc

SEQ ID NO: 2594260 - DNA, 25 bp, Homo sapien
cttgtattcgatgaaggcgtagccc

SEQ ID NO: 2594261 - DNA, 25 bp, Homo sapien
cccagtgtctttctcgggatcgaga

SEQ ID NO: 2594262 - DNA, 25 bp, Homo sapien
gaccgcctccaagtcgccgagggat

SEQ ID NO: 2594263 - DNA, 25 bp, Homo sapien
tcagttgcccagactccttttttcc

SEQ ID NO: 2594264 - DNA, 25 bp, Homo sapien
ctatagaggtcgtttttaacaactg

SEQ ID NO: 2594265 - DNA, 25 bp, Homo sapien
cctggtcggctctctttcttgccat

SEQ ID NO: 2594266 - DNA, 25 bp, Homo sapien
tcccagtcattgtcgggccacaccc

SEQ ID NO: 2594267 - DNA, 25 bp, Homo sapien
gggccacaccctggtcggctctctt

SEQ ID NO: 2594268 - DNA, 25 bp, Homo sapien
cagtcattgtcgggccacaccctgg

SEQ ID NO: 2594269 - DNA, 25 bp, Homo sapien
gttttattcaaccattagactcacg

SEQ ID NO: 2594270 - DNA, 25 bp, Homo sapien
tccactcatttccactgtaacttca

SEQ ID NO: 2594271 - DNA, 25 bp, Homo sapien
atttccactgtaacttcactttggg

SEQ ID NO: 2594272 - DNA, 25 bp, Homo sapien
cacgctgcgttgaaagacaatcccc

SEQ ID NO: 2594273 - DNA, 25 bp, Homo sapien
tgctgacctggctgtgcagactgcc

SEQ ID NO: 2594274 - DNA, 25 bp, Homo sapien
ggtcataacctctttttgccacgta

SEQ ID NO: 2594275 - DNA, 25 bp, Homo sapien
tcagcaaactcttgggctatggata

SEQ ID NO: 2594276 - DNA, 25 bp, Homo sapien
aaggcagtcggcattttgagtgaga

SEQ ID NO: 2594277 - DNA, 25 bp, Homo sapien
tttgaaaatcatccgaacagtatgg

SEQ ID NO: 2594278 - DNA, 25 bp, Homo sapien
tgaactttcaaagacggccatttat

SEQ ID NO: 2594279 - DNA, 25 bp, Homo sapien
atctagctctcgagcaccccagaga

SEQ ID NO: 2594280 - DNA, 25 bp, Homo sapien
gtcctcagaagttaaggtcagcaga

SEQ ID NO: 2594281 - DNA, 25 bp, Homo sapien
cctaggtgacatagcaataacccac

SEQ ID NO: 2594282 - DNA, 25 bp, Homo sapien
tttaaatggcagcataatatattca

SEQ ID NO: 2594283 - DNA, 25 bp, Homo sapien
gagtttaagacaaacctaggtgaca

SEQ ID NO: 2594284 - DNA, 25 bp, Homo sapien
tgaaatatcctagagagggccaagg

SEQ ID NO: 2594285 - DNA, 25 bp, Homo sapien
aggaggccgagacaggagaattcct

SEQ ID NO: 2594286 - DNA, 25 bp, Homo sapien
ccagcctgggcgacagagtgagact

SEQ ID NO: 2594287 - DNA, 25 bp, Homo sapien
tgagcctagatcgtgccattgcact

SEQ ID NO: 2594288 - DNA, 25 bp, Homo sapien
tgaacctaggaggcagaggttgcag

SEQ ID NO: 2594289 - DNA, 25 bp, Homo sapien
cacagattgagcgaggtagcacctc

SEQ ID NO: 2594290 - DNA, 25 bp, Homo sapien
agcactcaagtttatcagggccgcg

SEQ ID NO: 2594291 - DNA, 25 bp, Homo sapien
gaaaccattaggtgaggctgggcac

SEQ ID NO: 2594292 - DNA, 25 bp, Homo sapien
tacttagtcccctgcaaagaagaag

SEQ ID NO: 2594293 - DNA, 25 bp, Homo sapien
ggccagacttctgcgttaacttcag

SEQ ID NO: 2594294 - DNA, 25 bp, Homo sapien
tacccagggctatcactgtttctaa

SEQ ID NO: 2594295 - DNA, 25 bp, Homo sapien
gatgactctgatcccgtaggatata

SEQ ID NO: 2594296 - DNA, 25 bp, Homo sapien
aacacaagcttctttaagccaaata

SEQ ID NO: 2594297 - DNA, 25 bp, Homo sapien
aagtaattgtgaagtttcccctcat

SEQ ID NO: 2594298 - DNA, 25 bp, Homo sapien
tataatccatctgttacaattccac

SEQ ID NO: 2594299 - DNA, 25 bp, Homo sapien
caagtaattgtgaagtttcccctca

SEQ ID NO: 2594300 - DNA, 25 bp, Homo sapien
catctttataatccatctgttacaa

SEQ ID NO: 2594301 - DNA, 25 bp, Homo sapien
tccagaatgacaatgttgacacaat

SEQ ID NO: 2594302 - DNA, 25 bp, Homo sapien
gccttttgtgttgttgtggtccaga

SEQ ID NO: 2594303 - DNA, 25 bp, Homo sapien
ttggaaagttaatgttggatgcgtc

SEQ ID NO: 2594304 - DNA, 25 bp, Homo sapien
caatccaaaccagtagttggaaagt

SEQ ID NO: 2594305 - DNA, 25 bp, Homo sapien
tgagaagtgtgccatgcataagcat

SEQ ID NO: 2594306 - DNA, 25 bp, Homo sapien
tatacaaaagctttcggacaagtcc

SEQ ID NO: 2594307 - DNA, 25 bp, Homo sapien
agtttggagtgcaccccaagttgga

SEQ ID NO: 2594308 - DNA, 25 bp, Homo sapien
ggatcactgaagcacataactatag

SEQ ID NO: 2594309 - DNA, 25 bp, Homo sapien
caaatttgtgtttatgattgtgttg

SEQ ID NO: 2594310 - DNA, 25 bp, Homo sapien
aatttgtgtttatgattgtgttggg

SEQ ID NO: 2594311 - DNA, 25 bp, Homo sapien
aaatttgtgtttatgattgtgttgg

SEQ ID NO: 2594312 - DNA, 25 bp, Homo sapien
agtcccatgctcgttttctctatca

SEQ ID NO: 2594313 - DNA, 25 bp, Homo sapien
gctcgttttctctatcacattctac

SEQ ID NO: 2594314 - DNA, 25 bp, Homo sapien
tttccagtcccatgctcgttttctc

SEQ ID NO: 2594315 - DNA, 25 bp, Homo sapien
tcccatgctcgttttctctatcaca

SEQ ID NO: 2594316 - DNA, 25 bp, Homo sapien
tgtctgacgtccacctttttccaat

SEQ ID NO: 2594317 - DNA, 25 bp, Homo sapien
tcaatgtctgacgtccacctttttc

SEQ ID NO: 2594318 - DNA, 25 bp, Homo sapien
tctgacgtccacctttttccaatta

SEQ ID NO: 2594319 - DNA, 25 bp, Homo sapien
aatgtctgacgtccacctttttcca

SEQ ID NO: 2594320 - DNA, 25 bp, Homo sapien
gcatgtagagtaaagatgagaaggc

SEQ ID NO: 2594321 - DNA, 25 bp, Homo sapien
tgcatgtagagtaaagatgagaagg

SEQ ID NO: 2594322 - DNA, 25 bp, Homo sapien
ctgcatgtagagtaaagatgagaag

SEQ ID NO: 2594323 - DNA, 25 bp, Homo sapien
accagggcaactacttttcacccag

SEQ ID NO: 2594324 - DNA, 25 bp, Homo sapien
gtcaccagggcaactacttttcacc

SEQ ID NO: 2594325 - DNA, 25 bp, Homo sapien
cagggcaactacttttcacccagtg

SEQ ID NO: 2594326 - DNA, 25 bp, Homo sapien
cagtcaccagggcaactacttttca

SEQ ID NO: 2594327 - DNA, 25 bp, Homo sapien
gtagattatctctgatatcatcaca

SEQ ID NO: 2594328 - DNA, 25 bp, Homo sapien
attgtcaaaaccaataactgcaaca

SEQ ID NO: 2594329 - DNA, 25 bp, Homo sapien
caaagtagctttatgtagattatct

SEQ ID NO: 2594330 - DNA, 25 bp, Homo sapien
tgtcaaaaccaataactgcaacact

SEQ ID NO: 2594331 - DNA, 25 bp, Homo sapien
attctggttcgttattaaatcctgg

SEQ ID NO: 2594332 - DNA, 25 bp, Homo sapien
agatgtggcattctggttcgttatt

SEQ ID NO: 2594333 - DNA, 25 bp, Homo sapien
tgtggcattctggttcgttattaaa

SEQ ID NO: 2594334 - DNA, 25 bp, Homo sapien
ggcattctggttcgttattaaatcc

SEQ ID NO: 2594335 - DNA, 25 bp, Homo sapien
agggacatagaaccaagccccaggc

SEQ ID NO: 2594336 - DNA, 25 bp, Homo sapien
tcagctacacgaccgccgctgggat

SEQ ID NO: 2594337 - DNA, 25 bp, Homo sapien
aggcctgctcagctacacgaccgcc

SEQ ID NO: 2594338 - DNA, 25 bp, Homo sapien
tgctcagctacacgaccgccgctgg

SEQ ID NO: 2594339 - DNA, 25 bp, Homo sapien
gtggtgtagtcggtggtcgttgggg

SEQ ID NO: 2594340 - DNA, 25 bp, Homo sapien
ccccaacgaccaccgactacaccac

SEQ ID NO: 2594341 - DNA, 25 bp, Homo sapien
gcccgcaaatgcacgtcaagcccct

SEQ ID NO: 2594342 - DNA, 25 bp, Homo sapien
tccacggcccgcaaatgcacgtcaa

SEQ ID NO: 2594343 - DNA, 25 bp, Homo sapien
gggtccacggcccgcaaatgcacgt

SEQ ID NO: 2594344 - DNA, 25 bp, Homo sapien
acggcccgcaaatgcacgtcaagcc

SEQ ID NO: 2594345 - DNA, 25 bp, Homo sapien
gacacattacctggaaaagccctcc

SEQ ID NO: 2594346 - DNA, 25 bp, Homo sapien
gatgtcgattaaggagagaactggt

SEQ ID NO: 2594347 - DNA, 25 bp, Homo sapien
gattcttctgcccaacactctagac

SEQ ID NO: 2594348 - DNA, 25 bp, Homo sapien
aaggcaaatgatgtcgattaaggag

SEQ ID NO: 2594349 - DNA, 25 bp, Homo sapien
cagagatttattcgtttcttgttgc

SEQ ID NO: 2594350 - DNA, 25 bp, Homo sapien
gaaacacccagaggacactggaaac

SEQ ID NO: 2594351 - DNA, 25 bp, Homo sapien
tcgtttcttgttgctcttggaaaca

SEQ ID NO: 2594352 - DNA, 25 bp, Homo sapien
ttgctcttggaaacacccagaggac

SEQ ID NO: 2594353 - DNA, 25 bp, Homo sapien
tgctctcttttcgggttccattcca

SEQ ID NO: 2594354 - DNA, 25 bp, Homo sapien
catgctctcttttcgggttccattc

SEQ ID NO: 2594355 - DNA, 25 bp, Homo sapien
gcatgctctcttttcgggttccatt

SEQ ID NO: 2594356 - DNA, 25 bp, Homo sapien
atgccttagcggaagatgactgttt

SEQ ID NO: 2594357 - DNA, 25 bp, Homo sapien
gaccatttccactgtacaacatgct

SEQ ID NO: 2594358 - DNA, 25 bp, Homo sapien
catttccactgcacaacacgccgtg

SEQ ID NO: 2594359 - DNA, 25 bp, Homo sapien
ccatttccactgtacaacatgctgt

SEQ ID NO: 2594360 - DNA, 25 bp, Homo sapien
accatttccactgtacaacatgctg

SEQ ID NO: 2594361 - DNA, 25 bp, Homo sapien
gtggcatttctctgtaactcgtttg

SEQ ID NO: 2594362 - DNA, 25 bp, Homo sapien
ctgtaactcgtttgggtacgacagt

SEQ ID NO: 2594363 - DNA, 25 bp, Homo sapien
ttctctgtaactcgtttgggtacga

SEQ ID NO: 2594364 - DNA, 25 bp, Homo sapien
ggcatttctctgtaactcgtttggg

SEQ ID NO: 2594365 - DNA, 25 bp, Homo sapien
tgaggctaaggccctacattttggt

SEQ ID NO: 2594366 - DNA, 25 bp, Homo sapien
aaggccctacattttggtcacactc

SEQ ID NO: 2594367 - DNA, 25 bp, Homo sapien
gtcacactctcaactaagtgagaac

SEQ ID NO: 2594368 - DNA, 25 bp, Homo sapien
gagaacttgactgaaaaggaggatt

SEQ ID NO: 2594369 - DNA, 25 bp, Homo sapien
ataccaaattcttggtgttatccca

SEQ ID NO: 2594370 - DNA, 25 bp, Homo sapien
ccctggtgcactgtacttactcaaa

SEQ ID NO: 2594371 - DNA, 25 bp, Homo sapien
ggtgcactgtacttactcaaatgtt

SEQ ID NO: 2594372 - DNA, 25 bp, Homo sapien
tgttatcccaatagtcataagagtc

SEQ ID NO: 2594373 - DNA, 25 bp, Homo sapien
gattttccattgtgatgcagcttgg

SEQ ID NO: 2594374 - DNA, 25 bp, Homo sapien
agggccagcctgacctacaaggaaa

SEQ ID NO: 2594375 - DNA, 25 bp, Homo sapien
tgttaatttggttactccaagcaac

SEQ ID NO: 2594376 - DNA, 25 bp, Homo sapien
ctgagtggattcttcctgtgattcc

SEQ ID NO: 2594377 - DNA, 25 bp, Homo sapien
caaattcagatccaagttgaggcca

SEQ ID NO: 2594378 - DNA, 25 bp, Homo sapien
tacccacagtggaagttgtttgcag

SEQ ID NO: 2594379 - DNA, 25 bp, Homo sapien
gcctgggcactatgggcacagctac

SEQ ID NO: 2594380 - DNA, 25 bp, Homo sapien
caacctggcctggtttgtgcaagct

SEQ ID NO: 2594381 - DNA, 25 bp, Homo sapien
tccaagctgtagagaaacaggactg

SEQ ID NO: 2594382 - DNA, 25 bp, Homo sapien
gagaaaaagaactgtcagtgaggtc

SEQ ID NO: 2594383 - DNA, 25 bp, Homo sapien
cttctagatttgagtccctgtggac

SEQ ID NO: 2594384 - DNA, 25 bp, Homo sapien
cataataggaactgttacagtgaac

SEQ ID NO: 2594385 - DNA, 25 bp, Homo sapien
gaacacacccttcaggttttgccaa

SEQ ID NO: 2594386 - DNA, 25 bp, Homo sapien
caaagctcctgtgcttgttagtgaa

SEQ ID NO: 2594387 - DNA, 25 bp, Homo sapien
cagtgctggccagatgcacagatca

SEQ ID NO: 2594388 - DNA, 25 bp, Homo sapien
catggattcctaaggatgtcaccac

SEQ ID NO: 2594389 - DNA, 25 bp, Homo sapien
cataagctaaaatcattgatataaa

SEQ ID NO: 2594390 - DNA, 25 bp, Homo sapien
aatgttagcatattatatacattgc

SEQ ID NO: 2594391 - DNA, 25 bp, Homo sapien
tatacattgcatattaacataagct

SEQ ID NO: 2594392 - DNA, 25 bp, Homo sapien
ggtagaaaatatgacaatgttcttc

SEQ ID NO: 2594393 - DNA, 25 bp, Homo sapien
tctgccaacccaggattaggccctg

SEQ ID NO: 2594394 - DNA, 25 bp, Homo sapien
gccaacccaggattaggccctgcag

SEQ ID NO: 2594395 - DNA, 25 bp, Homo sapien
ctgccaacccaggattaggccctgc

SEQ ID NO: 2594396 - DNA, 25 bp, Homo sapien
tgccaacccaggattaggccctgca

SEQ ID NO: 2594397 - DNA, 25 bp, Homo sapien
cacacaagtcagttgcatttccata

SEQ ID NO: 2594398 - DNA, 25 bp, Homo sapien
ctcaaacccatgctaaagggaagct

SEQ ID NO: 2594399 - DNA, 25 bp, Homo sapien
aaagtctgaagctagaagagcttgt

SEQ ID NO: 2594400 - DNA, 25 bp, Homo sapien
acataaaagcgcaagataaagcagc

SEQ ID NO: 2594401 - DNA, 25 bp, Homo sapien
gctagaagagcttgtttcttgaggt

SEQ ID NO: 2594402 - DNA, 25 bp, Homo sapien
aacataaaagcgcaagataaagcag

SEQ ID NO: 2594403 - DNA, 25 bp, Homo sapien
gagggaggaattgtggtacaataaa

SEQ ID NO: 2594404 - DNA, 25 bp, Homo sapien
ttgatctgaccaataagtttgtaga

SEQ ID NO: 2594405 - DNA, 25 bp, Homo sapien
atgagtaacactaatacaaggaatg

SEQ ID NO: 2594406 - DNA, 25 bp, Homo sapien
gaccaagaagttcatagacaataac

SEQ ID NO: 2594407 - DNA, 25 bp, Homo sapien
gatggcgtcattatcacaggaacag

SEQ ID NO: 2594408 - DNA, 25 bp, Homo sapien
caaagtcacggagaacaggcaacat

SEQ ID NO: 2594409 - DNA, 25 bp, Homo sapien
catccaattcactcaagcgagagac

SEQ ID NO: 2594410 - DNA, 25 bp, Homo sapien
cagatggaccatttcttgcaacaag

SEQ ID NO: 2594411 - DNA, 25 bp, Homo sapien
tcagagcaacatgtcggaacctggg

SEQ ID NO: 2594412 - DNA, 25 bp, Homo sapien
tgcagagtgtcagtacctgggacct

SEQ ID NO: 2594413 - DNA, 25 bp, Homo sapien
aagaactgatgtaagctgaccggca

SEQ ID NO: 2594414 - DNA, 25 bp, Homo sapien
aagcagccaagattagcacccaggg

SEQ ID NO: 2594415 - DNA, 25 bp, Homo sapien
catatattctgtaagcataaatatt

SEQ ID NO: 2594416 - DNA, 25 bp, Homo sapien
taatctccttgaaactttgtcaccc

SEQ ID NO: 2594417 - DNA, 25 bp, Homo sapien
tagaaaatagtagaagataagcttt

SEQ ID NO: 2594418 - DNA, 25 bp, Homo sapien
aggaatattgggacttaatctcctt

SEQ ID NO: 2594419 - DNA, 25 bp, Homo sapien
gtttccacggagaactcagccatca

SEQ ID NO: 2594420 - DNA, 25 bp, Homo sapien
tgcaaaactgcaagttgcacacagg

SEQ ID NO: 2594421 - DNA, 25 bp, Homo sapien
ctgcaagttgcacacaggcagagat

SEQ ID NO: 2594422 - DNA, 25 bp, Homo sapien
caagtagcggcaaccccagagacag

SEQ ID NO: 2594423 - DNA, 25 bp, Homo sapien
tccttgctggtctgaggtcccgcat

SEQ ID NO: 2594424 - DNA, 25 bp, Homo sapien
tcacccggagatacatttaaacagt

SEQ ID NO: 2594425 - DNA, 25 bp, Homo sapien
ttctaagggaaagcccagcatgccg

SEQ ID NO: 2594426 - DNA, 25 bp, Homo sapien
tggagccagcgagctcttcctgcgt

SEQ ID NO: 2594427 - DNA, 25 bp, Homo sapien
tctcccgaaataggaatgccaggtc

SEQ ID NO: 2594428 - DNA, 25 bp, Homo sapien
tgatgtcaacatcggcgtcctatgt

SEQ ID NO: 2594429 - DNA, 25 bp, Homo sapien
caattggtaaaagaacaaggcagcg

SEQ ID NO: 2594430 - DNA, 25 bp, Homo sapien
tattgtcaacagtggtgcaaccaac

SEQ ID NO: 2594431 - DNA, 25 bp, Homo sapien
tttttacatttccactctgacctga

SEQ ID NO: 2594432 - DNA, 25 bp, Homo sapien
ttttacatttccactctgacctgac

SEQ ID NO: 2594433 - DNA, 25 bp, Homo sapien
atttttacatttccactctgacctg

SEQ ID NO: 2594434 - DNA, 25 bp, Homo sapien
tttacatttccactctgacctgacc

SEQ ID NO: 2594435 - DNA, 25 bp, Homo sapien
tgtgatgaacctgtaacacatttct

SEQ ID NO: 2594436 - DNA, 25 bp, Homo sapien
gccatgtagacaaagatgtgatgaa

SEQ ID NO: 2594437 - DNA, 25 bp, Homo sapien
gaggcacacaaatggataataattc

SEQ ID NO: 2594438 - DNA, 25 bp, Homo sapien
cagggtccatttccataattctaaa

SEQ ID NO: 2594439 - DNA, 25 bp, Homo sapien
ctctgcttactgcacacaagcacat

SEQ ID NO: 2594440 - DNA, 25 bp, Homo sapien
aacattgtagaggtaagtggctgaa

SEQ ID NO: 2594441 - DNA, 25 bp, Homo sapien
tgaaaaacaggaacattgtagaggt

SEQ ID NO: 2594442 - DNA, 25 bp, Homo sapien
aagtggctgaaaatgctctgcttac

SEQ ID NO: 2594443 - DNA, 25 bp, Homo sapien
gaacagacactaatatcatgagtgc

SEQ ID NO: 2594444 - DNA, 25 bp, Homo sapien
cactgggagatagggcttcaggtta

SEQ ID NO: 2594445 - DNA, 25 bp, Homo sapien
gagatatgtatctctggtgactctt

SEQ ID NO: 2594446 - DNA, 25 bp, Homo sapien
catgagtgctcagattgctagtgaa

SEQ ID NO: 2594447 - DNA, 25 bp, Homo sapien
aaaccagtaagtcctcagtgaaaat

SEQ ID NO: 2594448 - DNA, 25 bp, Homo sapien
ttatttgcccggagtgtcatctgat

SEQ ID NO: 2594449 - DNA, 25 bp, Homo sapien
tggtttagtgacacggaccctgccc

SEQ ID NO: 2594450 - DNA, 25 bp, Homo sapien
tggtgggtggtttagtgacacggac

SEQ ID NO: 2594451 - DNA, 25 bp, Homo sapien
gcacaataggttgagggacttctct

SEQ ID NO: 2594452 - DNA, 25 bp, Homo sapien
aactcattgcacaataggttgaggg

SEQ ID NO: 2594453 - DNA, 25 bp, Homo sapien
ccgcttctcaaaactcattgcacaa

SEQ ID NO: 2594454 - DNA, 25 bp, Homo sapien
ttctcaaaactcattgcacaatagg

SEQ ID NO: 2594455 - DNA, 25 bp, Homo sapien
gatagatttgttcgcaggttagaga

SEQ ID NO: 2594456 - DNA, 25 bp, Homo sapien
gcagtggatcatggcacaatttacc

SEQ ID NO: 2594457 - DNA, 25 bp, Homo sapien
tgaggtttaggagagttatgtgccc

SEQ ID NO: 2594458 - DNA, 25 bp, Homo sapien
caaattcagtactgtgccgtctgct

SEQ ID NO: 2594459 - DNA, 25 bp, Homo sapien
gactggtgtggtctgagaaacatcc

SEQ ID NO: 2594460 - DNA, 25 bp, Homo sapien
ctgggaacctcttctcactgtccgt

SEQ ID NO: 2594461 - DNA, 25 bp, Homo sapien
cactgtccgtcaagattgggaggcc

SEQ ID NO: 2594462 - DNA, 25 bp, Homo sapien
ttgagcctcgccatgactcagtttc

SEQ ID NO: 2594463 - DNA, 25 bp, Homo sapien
ctcgcagggcgacactgtctgcggt

SEQ ID NO: 2594464 - DNA, 25 bp, Homo sapien
actgtctgcggtgccggctctggta

SEQ ID NO: 2594465 - DNA, 25 bp, Homo sapien
acactgtctgcggtgccggctctgg

SEQ ID NO: 2594466 - DNA, 25 bp, Homo sapien
ggcgacactgtctgcggtgccggct

SEQ ID NO: 2594467 - DNA, 25 bp, Homo sapien
ggtggccaggccggaggacgtgtag

SEQ ID NO: 2594468 - DNA, 25 bp, Homo sapien
tccgtctccacatggtcatgcacaa

SEQ ID NO: 2594469 - DNA, 25 bp, Homo sapien
tcatgcacaaggttggcgtgctggt

SEQ ID NO: 2594470 - DNA, 25 bp, Homo sapien
ccacatggtcatgcacaaggttggc

SEQ ID NO: 2594471 - DNA, 25 bp, Homo sapien
catggtcatgcacaaggttggcgtg

SEQ ID NO: 2594472 - DNA, 25 bp, Homo sapien
caggcctgtagtggttctcacggag

SEQ ID NO: 2594473 - DNA, 25 bp, Homo sapien
gccagatttcgggactcaggtgtct

SEQ ID NO: 2594474 - DNA, 25 bp, Homo sapien
tcaggtgtctcacgcatagagggct

SEQ ID NO: 2594475 - DNA, 25 bp, Homo sapien
tgtccccggctctgtataggatgaa

SEQ ID NO: 2594476 - DNA, 25 bp, Homo sapien
catcacttcgcaggcacccttgttg

SEQ ID NO: 2594477 - DNA, 25 bp, Homo sapien
gtgtctccatcacttcgcaggcacc

SEQ ID NO: 2594478 - DNA, 25 bp, Homo sapien
tccatcacttcgcaggcacccttgt

SEQ ID NO: 2594479 - DNA, 25 bp, Homo sapien
cacttcgcaggcacccttgttgcag

SEQ ID NO: 2594480 - DNA, 25 bp, Homo sapien
atccggtccttggtgaggatcccag

SEQ ID NO: 2594481 - DNA, 25 bp, Homo sapien
gcaccagatccggtccttggtgagg

SEQ ID NO: 2594482 - DNA, 25 bp, Homo sapien
cagatccggtccttggtgaggatcc

SEQ ID NO: 2594483 - DNA, 25 bp, Homo sapien
cctgagcaccagatccggtccttgg

SEQ ID NO: 2594484 - DNA, 25 bp, Homo sapien
cttgcacgatggctctcttcagcag

SEQ ID NO: 2594485 - DNA, 25 bp, Homo sapien
gctcctgaatgttccggatgggctc

SEQ ID NO: 2594486 - DNA, 25 bp, Homo sapien
gaatgttccggatgggctcagcttc

SEQ ID NO: 2594487 - DNA, 25 bp, Homo sapien
tgcttgcacgatggctctcttcagc

SEQ ID NO: 2594488 - DNA, 25 bp, Homo sapien
ggagtcatcccttgggcagccctcg

SEQ ID NO: 2594489 - DNA, 25 bp, Homo sapien
ggggtcaggagtcatcccttgggca

SEQ ID NO: 2594490 - DNA, 25 bp, Homo sapien
gagtcatcccttgggcagccctcga

SEQ ID NO: 2594491 - DNA, 25 bp, Homo sapien
aggagtcatcccttgggcagccctc

SEQ ID NO: 2594492 - DNA, 25 bp, Homo sapien
tggccattcaaactcaggctgggct

SEQ ID NO: 2594493 - DNA, 25 bp, Homo sapien
ggccattcaaactcaggctgggctg

SEQ ID NO: 2594494 - DNA, 25 bp, Homo sapien
gatctctgtgtgctctcggttcatt

SEQ ID NO: 2594495 - DNA, 25 bp, Homo sapien
ctcgcagatctctgtgtgctctcgg

SEQ ID NO: 2594496 - DNA, 25 bp, Homo sapien
cgcagatctctgtgtgctctcggtt

SEQ ID NO: 2594497 - DNA, 25 bp, Homo sapien
cagatctctgtgtgctctcggttca

SEQ ID NO: 2594498 - DNA, 25 bp, Homo sapien
gtctcgtcgaggttgtaggcctcca

SEQ ID NO: 2594499 - DNA, 25 bp, Homo sapien
tggtggcgcccgcaagtctcgtcga

SEQ ID NO: 2594500 - DNA, 25 bp, Homo sapien
gcccgcaagtctcgtcgaggttgta

SEQ ID NO: 2594501 - DNA, 25 bp, Homo sapien
tctggctgtggtggcgcccgcaagt

SEQ ID NO: 2594502 - DNA, 25 bp, Homo sapien
gcgcctgggactgaccgcatcccac

SEQ ID NO: 2594503 - DNA, 25 bp, Homo sapien
gccagggcaaacagttgcccaagtg

SEQ ID NO: 2594504 - DNA, 25 bp, Homo sapien
cggcgcctgggactgaccgcatccc

SEQ ID NO: 2594505 - DNA, 25 bp, Homo sapien
tttctcatgccagggcaaacagttg

SEQ ID NO: 2594506 - DNA, 25 bp, Homo sapien
ctgtgtgaacttggtccgggtctct

SEQ ID NO: 2594507 - DNA, 25 bp, Homo sapien
tgtgtgaacttggtccgggtctctg

SEQ ID NO: 2594508 - DNA, 25 bp, Homo sapien
gccatgctgaggccctagagtcaga

SEQ ID NO: 2594509 - DNA, 25 bp, Homo sapien
tacataggtttacggagaggtgaca

SEQ ID NO: 2594510 - DNA, 25 bp, Homo sapien
gggttgcaacacactgcgatcatac

SEQ ID NO: 2594511 - DNA, 25 bp, Homo sapien
agtgtcacctggttttacataggtt

SEQ ID NO: 2594512 - DNA, 25 bp, Homo sapien
ccccatgcccgggcatatggaatgt

SEQ ID NO: 2594513 - DNA, 25 bp, Homo sapien
gagagtcaggcagcctgttgtctct

SEQ ID NO: 2594514 - DNA, 25 bp, Homo sapien
gcctgttgtctcttagctctggtcc

SEQ ID NO: 2594515 - DNA, 25 bp, Homo sapien
ttagctctggtccaagaacccccat

SEQ ID NO: 2594516 - DNA, 25 bp, Homo sapien
gcatgttgggccggtgtgagagcag

SEQ ID NO: 2594517 - DNA, 25 bp, Homo sapien
actgggctgcttcgcggcacagctg

SEQ ID NO: 2594518 - DNA, 25 bp, Homo sapien
tgggctatgtgcagaggttcctcct

SEQ ID NO: 2594519 - DNA, 25 bp, Homo sapien
tccttcagtgccaccacgttgtgtt

SEQ ID NO: 2594520 - DNA, 25 bp, Homo sapien
gccaccaggcatccgttaacaaggg

SEQ ID NO: 2594521 - DNA, 25 bp, Homo sapien
gcccaggcgtaggtcatactttcca

SEQ ID NO: 2594522 - DNA, 25 bp, Homo sapien
tgtctgaaggagcttcctcccggga

SEQ ID NO: 2594523 - DNA, 25 bp, Homo sapien
gaaacaaaaggacggcccatctatg

SEQ ID NO: 2594524 - DNA, 25 bp, Homo sapien
ttcctgatatttgacggaaggaggc

SEQ ID NO: 2594525 - DNA, 25 bp, Homo sapien
gatatttgacggaaggaggcaccca

SEQ ID NO: 2594526 - DNA, 25 bp, Homo sapien
cctgatatttgacggaaggaggcac

SEQ ID NO: 2594527 - DNA, 25 bp, Homo sapien
cattcctgatatttgacggaaggag

SEQ ID NO: 2594528 - DNA, 25 bp, Homo sapien
ctagggcagagcataaattacgagg

SEQ ID NO: 2594529 - DNA, 25 bp, Homo sapien
cataaattacgagggtcctcccagg

SEQ ID NO: 2594530 - DNA, 25 bp, Homo sapien
ggaatgagtgacccgcgtgcaatct

SEQ ID NO: 2594531 - DNA, 25 bp, Homo sapien
tgagtgacccgcgtgcaatctcgac

SEQ ID NO: 2594532 - DNA, 25 bp, Homo sapien
ctgggaagacgccatgaaaggatcc

SEQ ID NO: 2594533 - DNA, 25 bp, Homo sapien
ccaaaactcccaatgggagctggca

SEQ ID NO: 2594534 - DNA, 25 bp, Homo sapien
acccaaaactcccaatgggagctgg

SEQ ID NO: 2594535 - DNA, 25 bp, Homo sapien
tgcaggggacccaaaactcccaatg

SEQ ID NO: 2594536 - DNA, 25 bp, Homo sapien
aaaactcccaatgggagctggcagg

SEQ ID NO: 2594537 - DNA, 25 bp, Homo sapien
ttgggggtgttgggtgtgtgagctg

SEQ ID NO: 2594538 - DNA, 25 bp, Homo sapien
gggggtgttgggtgtgtgagctggg

SEQ ID NO: 2594539 - DNA, 25 bp, Homo sapien
tgggggtgttgggtgtgtgagctgg

SEQ ID NO: 2594540 - DNA, 25 bp, Homo sapien
cttgggggtgttgggtgtgtgagct

SEQ ID NO: 2594541 - DNA, 25 bp, Homo sapien
tgtgatggacatgttcagctcctcc

SEQ ID NO: 2594542 - DNA, 25 bp, Homo sapien
ctgtgatggacatgttcagctcctc

SEQ ID NO: 2594543 - DNA, 25 bp, Homo sapien
gtgatggacatgttcagctcctcca

SEQ ID NO: 2594544 - DNA, 25 bp, Homo sapien
tgatggacatgttcagctcctccac

SEQ ID NO: 2594545 - DNA, 25 bp, Homo sapien
tacgatgggccatgcacttctggcg

SEQ ID NO: 2594546 - DNA, 25 bp, Homo sapien
ccatgcacttctggcggtcgatgaa

SEQ ID NO: 2594547 - DNA, 25 bp, Homo sapien
tgggccatgcacttctggcggtcga

SEQ ID NO: 2594548 - DNA, 25 bp, Homo sapien
agtacgatgggccatgcacttctgg

SEQ ID NO: 2594549 - DNA, 25 bp, Homo sapien
aagctaatgcactgtttatttgggg

SEQ ID NO: 2594550 - DNA, 25 bp, Homo sapien
gctaatgcactgtttatttggggga

SEQ ID NO: 2594551 - DNA, 25 bp, Homo sapien
atgcactgtttatttgggggattgg

SEQ ID NO: 2594552 - DNA, 25 bp, Homo sapien
taatgcactgtttatttgggggatt

SEQ ID NO: 2594553 - DNA, 25 bp, Homo sapien
ggattcctcgtcgtcagctctgacc

SEQ ID NO: 2594554 - DNA, 25 bp, Homo sapien
ttcctcgtcgtcagctctgacccct

SEQ ID NO: 2594555 - DNA, 25 bp, Homo sapien
cagggattcctcgtcgtcagctctg

SEQ ID NO: 2594556 - DNA, 25 bp, Homo sapien
agggattcctcgtcgtcagctctga

SEQ ID NO: 2594557 - DNA, 25 bp, Homo sapien
gtttttcgtcttcagcagtggcctc

SEQ ID NO: 2594558 - DNA, 25 bp, Homo sapien
tcgtcttcagcagtggcctctggag

SEQ ID NO: 2594559 - DNA, 25 bp, Homo sapien
cagtagtgtttttcgtcttcagcag

SEQ ID NO: 2594560 - DNA, 25 bp, Homo sapien
cccagtgaacggcagtagtgttttt

SEQ ID NO: 2594561 - DNA, 25 bp, Homo sapien
tgagagtggccgggtgggaagaaga

SEQ ID NO: 2594562 - DNA, 25 bp, Homo sapien
gaagaagaatcctcactgcctggca

SEQ ID NO: 2594563 - DNA, 25 bp, Homo sapien
ctgagagtggccgggtgggaagaag

SEQ ID NO: 2594564 - DNA, 25 bp, Homo sapien
ccaccctcccacagctgacccctcc

SEQ ID NO: 2594565 - DNA, 25 bp, Homo sapien
gggagggcactgcagacaccaccct

SEQ ID NO: 2594566 - DNA, 25 bp, Homo sapien
ccacagctgacccctccctggccat

SEQ ID NO: 2594567 - DNA, 25 bp, Homo sapien
gcagggagggcactgcagacaccac

SEQ ID NO: 2594568 - DNA, 25 bp, Homo sapien
gactcctcgctactgtgctgaggct

SEQ ID NO: 2594569 - DNA, 25 bp, Homo sapien
actcctcgctactgtgctgaggctg

SEQ ID NO: 2594570 - DNA, 25 bp, Homo sapien
ggactcctcgctactgtgctgaggc

SEQ ID NO: 2594571 - DNA, 25 bp, Homo sapien
tcagacctgggtgatgaggacacag

SEQ ID NO: 2594572 - DNA, 25 bp, Homo sapien
ccacatccccaaggggagactgtgg

SEQ ID NO: 2594573 - DNA, 25 bp, Homo sapien
tgcaggtgggcagccacatccccaa

SEQ ID NO: 2594574 - DNA, 25 bp, Homo sapien
gctttgcaggtgggcagccacatcc

SEQ ID NO: 2594575 - DNA, 25 bp, Homo sapien
tcactggttggtggtagttgaccca

SEQ ID NO: 2594576 - DNA, 25 bp, Homo sapien
gatttaatgccgacttggattggat

SEQ ID NO: 2594577 - DNA, 25 bp, Homo sapien
tggttggtggtagttgacccactgt

SEQ ID NO: 2594578 - DNA, 25 bp, Homo sapien
ggaatcaagatttaatgccgacttg

SEQ ID NO: 2594579 - DNA, 25 bp, Homo sapien
cacttccttaacttcaaaagagaag

SEQ ID NO: 2594580 - DNA, 25 bp, Homo sapien
tccttaacttcaaaagagaagaata

SEQ ID NO: 2594581 - DNA, 25 bp, Homo sapien
agagaagaataagtattattttcca

SEQ ID NO: 2594582 - DNA, 25 bp, Homo sapien
ttcaaaagagaagaataagtattat

SEQ ID NO: 2594583 - DNA, 25 bp, Homo sapien
atcctcatcccactgggctttggga

SEQ ID NO: 2594584 - DNA, 25 bp, Homo sapien
gatgtacagtctaatgccctactca

SEQ ID NO: 2594585 - DNA, 25 bp, Homo sapien
gtacagtctaatgccctactcagtc

SEQ ID NO: 2594586 - DNA, 25 bp, Homo sapien
tagatgtacagtctaatgccctact

SEQ ID NO: 2594587 - DNA, 25 bp, Homo sapien
tttagatgtacagtctaatgcccta

SEQ ID NO: 2594588 - DNA, 25 bp, Homo sapien
gcttctttgaatttacaattcaacg

SEQ ID NO: 2594589 - DNA, 25 bp, Homo sapien
tgaatttacaattcaacgtgaaaat

SEQ ID NO: 2594590 - DNA, 25 bp, Homo sapien
ttcaacgtgaaaatcacctcgggac

SEQ ID NO: 2594591 - DNA, 25 bp, Homo sapien
atttacaattcaacgtgaaaatcac

SEQ ID NO: 2594592 - DNA, 25 bp, Homo sapien
ccctagtcaactggtttgaatctac

SEQ ID NO: 2594593 - DNA, 25 bp, Homo sapien
aacaactaaactccctagtcaactg

SEQ ID NO: 2594594 - DNA, 25 bp, Homo sapien
taaattgatgagacttaaacccacg

SEQ ID NO: 2594595 - DNA, 25 bp, Homo sapien
taaactccctagtcaactggtttga

SEQ ID NO: 2594596 - DNA, 25 bp, Homo sapien
tttttggatgctatcgaaactttgg

SEQ ID NO: 2594597 - DNA, 25 bp, Homo sapien
tgttttttggatgctatcgaaactt

SEQ ID NO: 2594598 - DNA, 25 bp, Homo sapien
tggatgctatcgaaactttggaaat

SEQ ID NO: 2594599 - DNA, 25 bp, Homo sapien
gctatcgaaactttggaaatcatgg

SEQ ID NO: 2594600 - DNA, 25 bp, Homo sapien
ttgcggagagccgaaattgtgccat

SEQ ID NO: 2594601 - DNA, 25 bp, Homo sapien
atcccagctcctcggaagccagagg

SEQ ID NO: 2594602 - DNA, 25 bp, Homo sapien
agcctggcaacaagagtgaatctcc

SEQ ID NO: 2594603 - DNA, 25 bp, Homo sapien
cggagagccgaaattgtgccattgc

SEQ ID NO: 2594604 - DNA, 25 bp, Homo sapien
cagaatccactttgaatcaacttcc

SEQ ID NO: 2594605 - DNA, 25 bp, Homo sapien
acagaatccactttgaatcaacttc

SEQ ID NO: 2594606 - DNA, 25 bp, Homo sapien
aaacagaatccactttgaatcaact

SEQ ID NO: 2594607 - DNA, 25 bp, Homo sapien
aacagaatccactttgaatcaactt

SEQ ID NO: 2594608 - DNA, 25 bp, Homo sapien
cattacggttcggcaatggctgccc

SEQ ID NO: 2594609 - DNA, 25 bp, Homo sapien
ttacggttcggcaatggctgccccg

SEQ ID NO: 2594610 - DNA, 25 bp, Homo sapien
agcattacggttcggcaatggctgc

SEQ ID NO: 2594611 - DNA, 25 bp, Homo sapien
tcagcattacggttcggcaatggct

SEQ ID NO: 2594612 - DNA, 25 bp, Homo sapien
ggcccacctgccacatcccaggagg

SEQ ID NO: 2594613 - DNA, 25 bp, Homo sapien
cacctgccacatcccaggaggcctg

SEQ ID NO: 2594614 - DNA, 25 bp, Homo sapien
ctgccacatcccaggaggcctggct

SEQ ID NO: 2594615 - DNA, 25 bp, Homo sapien
ggttaggacggactggcccacctgc

SEQ ID NO: 2594616 - DNA, 25 bp, Homo sapien
gggcgcagccaggtggcagaagctg

SEQ ID NO: 2594617 - DNA, 25 bp, Homo sapien
tcacactgggtggggctttgcaggg

SEQ ID NO: 2594618 - DNA, 25 bp, Homo sapien
gcagaagctgcaggggggcagccag

SEQ ID NO: 2594619 - DNA, 25 bp, Homo sapien
gcagaagctgcaggggcgcagccag

SEQ ID NO: 2594620 - DNA, 25 bp, Homo sapien
tgccagcagcagacatagacgggtg

SEQ ID NO: 2594621 - DNA, 25 bp, Homo sapien
tgggaaaatgaacgtccaggacaca

SEQ ID NO: 2594622 - DNA, 25 bp, Homo sapien
gaggattctcggcactaacacatag

SEQ ID NO: 2594623 - DNA, 25 bp, Homo sapien
acacagaaaagctacgccggctggc

SEQ ID NO: 2594624 - DNA, 25 bp, Homo sapien
gccccaaacagagcatccgtgctgc

SEQ ID NO: 2594625 - DNA, 25 bp, Homo sapien
aacagagcatccgtgctgccctcat

SEQ ID NO: 2594626 - DNA, 25 bp, Homo sapien
aggacagctgccggccccaaacaga

SEQ ID NO: 2594627 - DNA, 25 bp, Homo sapien
agctgccggccccaaacagagcatc

SEQ ID NO: 2594628 - DNA, 25 bp, Homo sapien
tggccaggcaatttctgacccagca

SEQ ID NO: 2594629 - DNA, 25 bp, Homo sapien
tgcatggccaggcaatttctgaccc

SEQ ID NO: 2594630 - DNA, 25 bp, Homo sapien
atttacccacatgtctctgaggact

SEQ ID NO: 2594631 - DNA, 25 bp, Homo sapien
gatactctggatttgaggggacagc

SEQ ID NO: 2594632 - DNA, 25 bp, Homo sapien
acctggaactcatgcaagttgggaa

SEQ ID NO: 2594633 - DNA, 25 bp, Homo sapien
cctggaactcatgcaagttgggaat

SEQ ID NO: 2594634 - DNA, 25 bp, Homo sapien
ctggaactcatgcaagttgggaatt

SEQ ID NO: 2594635 - DNA, 25 bp, Homo sapien
tccacatggcccctccgaggccacc

SEQ ID NO: 2594636 - DNA, 25 bp, Homo sapien
tgggcacccaggcaagcagctgagg

SEQ ID NO: 2594637 - DNA, 25 bp, Homo sapien
gcacccaggcaagcagctgaggatg

SEQ ID NO: 2594638 - DNA, 25 bp, Homo sapien
ctcagagccttcctggccaaccttc

SEQ ID NO: 2594639 - DNA, 25 bp, Homo sapien
agagccttcctggccaaccttccct

SEQ ID NO: 2594640 - DNA, 25 bp, Homo sapien
aactcttctcccataagcgccctcc

SEQ ID NO: 2594641 - DNA, 25 bp, Homo sapien
tcttgtctgcagggctaaactcttc

SEQ ID NO: 2594642 - DNA, 25 bp, Homo sapien
ggctcaaagcctgcgccaggatgca

SEQ ID NO: 2594643 - DNA, 25 bp, Homo sapien
ctccttgtacagggggccggctcaa

SEQ ID NO: 2594644 - DNA, 25 bp, Homo sapien
tgtacagggggccggctcaaagcct

SEQ ID NO: 2594645 - DNA, 25 bp, Homo sapien
cggctcaaagcctgcgccaggatgc

SEQ ID NO: 2594646 - DNA, 25 bp, Homo sapien
ggtcacccaggcctgcaaggcgccc

SEQ ID NO: 2594647 - DNA, 25 bp, Homo sapien
caaggcgcccctgcgtccaacagat

SEQ ID NO: 2594648 - DNA, 25 bp, Homo sapien
gcccctgcgtccaacagatctgtgg

SEQ ID NO: 2594649 - DNA, 25 bp, Homo sapien
ttcaggttggcatcctggtcaccca

SEQ ID NO: 2594650 - DNA, 25 bp, Homo sapien
cccagccgcagagtgtccatactcc

SEQ ID NO: 2594651 - DNA, 25 bp, Homo sapien
cagccgcagagtgtccatactccca

SEQ ID NO: 2594652 - DNA, 25 bp, Homo sapien
agccgcagagtgtccatactcccat

SEQ ID NO: 2594653 - DNA, 25 bp, Homo sapien
ggcccagccgcagagtgtccatact

SEQ ID NO: 2594654 - DNA, 25 bp, Homo sapien
gagagccaggctttgcagccagctc

SEQ ID NO: 2594655 - DNA, 25 bp, Homo sapien
agagcccagctgggcttccacttac

SEQ ID NO: 2594656 - DNA, 25 bp, Homo sapien
gccagctctgactgtgagcccagag

SEQ ID NO: 2594657 - DNA, 25 bp, Homo sapien
gggagagccaggctttgcagccagc

SEQ ID NO: 2594658 - DNA, 25 bp, Homo sapien
agtagtccagagtacacagggacac

SEQ ID NO: 2594659 - DNA, 25 bp, Homo sapien
ctgcagtagtccagagtacacaggg

SEQ ID NO: 2594660 - DNA, 25 bp, Homo sapien
tgcagtagtccagagtacacaggga

SEQ ID NO: 2594661 - DNA, 25 bp, Homo sapien
agagtacacagggacacagggcctg

SEQ ID NO: 2594662 - DNA, 25 bp, Homo sapien
agggagtcagtggctccgggctgca

SEQ ID NO: 2594663 - DNA, 25 bp, Homo sapien
ctcagggtgttcagggagtgttcct

SEQ ID NO: 2594664 - DNA, 25 bp, Homo sapien
ccaggcaggctggtgttgtggagag

SEQ ID NO: 2594665 - DNA, 25 bp, Homo sapien
gagagagcaccggatagggagtcag

SEQ ID NO: 2594666 - DNA, 25 bp, Homo sapien
tgtggtggccccaggcgtgcttggc

SEQ ID NO: 2594667 - DNA, 25 bp, Homo sapien
cgtgaactcccaggtcacggccgat

SEQ ID NO: 2594668 - DNA, 25 bp, Homo sapien
ccaggtcacggccgattgcccaggg

SEQ ID NO: 2594669 - DNA, 25 bp, Homo sapien
cagtctgatggccacttgtgggtct

SEQ ID NO: 2594670 - DNA, 25 bp, Homo sapien
gaactcccaggtcacggccgattgc

SEQ ID NO: 2594671 - DNA, 25 bp, Homo sapien
ccacagtcccagaagtgctgtggcc

SEQ ID NO: 2594672 - DNA, 25 bp, Homo sapien
acagtcccagaagtgctgtggccat

SEQ ID NO: 2594673 - DNA, 25 bp, Homo sapien
tttgtcagcggtgccagccacagtc

SEQ ID NO: 2594674 - DNA, 25 bp, Homo sapien
ctgtggctttgtcagcggtgccagc

SEQ ID NO: 2594675 - DNA, 25 bp, Homo sapien
tggctgtggcagggtgggggggcac

SEQ ID NO: 2594676 - DNA, 25 bp, Homo sapien
tgtggcagggtgggggggcacttac

SEQ ID NO: 2594677 - DNA, 25 bp, Homo sapien
cgaccacctggctgtggcagggtgg

SEQ ID NO: 2594678 - DNA, 25 bp, Homo sapien
gctgtggcagggtgggggggcactt

SEQ ID NO: 2594679 - DNA, 25 bp, Homo sapien
gagcctgtcatggtgaccgcctgct

SEQ ID NO: 2594680 - DNA, 25 bp, Homo sapien
gatgtgggggttggctctgacgacc

SEQ ID NO: 2594681 - DNA, 25 bp, Homo sapien
taggagcctgtcatggtgaccgcct

SEQ ID NO: 2594682 - DNA, 25 bp, Homo sapien
tggctctgacgacccccccaggtct

SEQ ID NO: 2594683 - DNA, 25 bp, Homo sapien
gaaacatcccgtccgcagccgtgga

SEQ ID NO: 2594684 - DNA, 25 bp, Homo sapien
gacaacgtggacatcaaggctgcca

SEQ ID NO: 2594685 - DNA, 25 bp, Homo sapien
cgagctcggaattgctgtgtgaaac

SEQ ID NO: 2594686 - DNA, 25 bp, Homo sapien
gctgccagcgagctcggaattgctg

SEQ ID NO: 2594687 - DNA, 25 bp, Homo sapien
atcaggattttcaaggtttccaggg

SEQ ID NO: 2594688 - DNA, 25 bp, Homo sapien
gatgagcaaggccctggagtttcct

SEQ ID NO: 2594689 - DNA, 25 bp, Homo sapien
aggttgcatcaggattttcaaggtt

SEQ ID NO: 2594690 - DNA, 25 bp, Homo sapien
ttccagggatgagcaaggccctgga

SEQ ID NO: 2594691 - DNA, 25 bp, Homo sapien
tcttcaccaggctgataatatctgc

SEQ ID NO: 2594692 - DNA, 25 bp, Homo sapien
gttggaggacggttttcacttctga

SEQ ID NO: 2594693 - DNA, 25 bp, Homo sapien
gaaatgaagctcaaccagtcagaag

SEQ ID NO: 2594694 - DNA, 25 bp, Homo sapien
caacctcgcttgatttgcaaataca

SEQ ID NO: 2594695 - DNA, 25 bp, Homo sapien
ctccttctgttcatggttcacccag

SEQ ID NO: 2594696 - DNA, 25 bp, Homo sapien
aaagtatattttgcagacccaggct

SEQ ID NO: 2594697 - DNA, 25 bp, Homo sapien
tgtgctcagtgcatcctgtgcacgg

SEQ ID NO: 2594698 - DNA, 25 bp, Homo sapien
cccagtgccgtgtgtgctcagtgca

SEQ ID NO: 2594699 - DNA, 25 bp, Homo sapien
agagaaacgtgcttcccgtgatgac

SEQ ID NO: 2594700 - DNA, 25 bp, Homo sapien
aaacagcccctgaactttgactcac

SEQ ID NO: 2594701 - DNA, 25 bp, Homo sapien
cagtaatttagtcttcagtggtcaa

SEQ ID NO: 2594702 - DNA, 25 bp, Homo sapien
gaacagttgtgggtgaaggtaatcc

SEQ ID NO: 2594703 - DNA, 25 bp, Homo sapien
ttctgagtttcagccttacaaaggc

SEQ ID NO: 2594704 - DNA, 25 bp, Homo sapien
gaatccacattcttgagacagctct

SEQ ID NO: 2594705 - DNA, 25 bp, Homo sapien
cccagtagatggaaccttgaagagt

SEQ ID NO: 2594706 - DNA, 25 bp, Homo sapien
ccaggaatccacattcttgagacag

SEQ ID NO: 2594707 - DNA, 25 bp, Homo sapien
ggctggagagcctgactttccttct

SEQ ID NO: 2594708 - DNA, 25 bp, Homo sapien
tatgtgggtctctacatggagcatc

SEQ ID NO: 2594709 - DNA, 25 bp, Homo sapien
caacattgccctaaaagtcagcact

SEQ ID NO: 2594710 - DNA, 25 bp, Homo sapien
cagaaagatcgagggcgcaaacgag

SEQ ID NO: 2594711 - DNA, 25 bp, Homo sapien
aattattacatcatgtctgcacccc

SEQ ID NO: 2594712 - DNA, 25 bp, Homo sapien
ccctggtgggtccaacatgtggtac

SEQ ID NO: 2594713 - DNA, 25 bp, Homo sapien
gtctgaggaccgctggacaaaagca

SEQ ID NO: 2594714 - DNA, 25 bp, Homo sapien
ccaacccaggaccaaacagtctgag

SEQ ID NO: 2594715 - DNA, 25 bp, Homo sapien
gagtctgtagctacacattcaggag

SEQ ID NO: 2594716 - DNA, 25 bp, Homo sapien
ttggcaccgtcccacttatcaggtt

SEQ ID NO: 2594717 - DNA, 25 bp, Homo sapien
agagctctacacctactgcactggg

SEQ ID NO: 2594718 - DNA, 25 bp, Homo sapien
ttgtgttgtaatcagctggctcagg

SEQ ID NO: 2594719 - DNA, 25 bp, Homo sapien
gctcacttatccactctaaagagag

SEQ ID NO: 2594720 - DNA, 25 bp, Homo sapien
tagaggagaagttacactgtcataa

SEQ ID NO: 2594721 - DNA, 25 bp, Homo sapien
caaacctgtcagtcaattagaggag

SEQ ID NO: 2594722 - DNA, 25 bp, Homo sapien
taaaatacggcaaagacattatccc

SEQ ID NO: 2594723 - DNA, 25 bp, Homo sapien
gaggctgacgtaagattattccttg

SEQ ID NO: 2594724 - DNA, 25 bp, Homo sapien
gtaattccatcaatcaggtagtgag

SEQ ID NO: 2594725 - DNA, 25 bp, Homo sapien
agtgagcatagtactaagtagacag

SEQ ID NO: 2594726 - DNA, 25 bp, Homo sapien
agatttaggaggtacctacacaggt

SEQ ID NO: 2594727 - DNA, 25 bp, Homo sapien
tgctgacttcaagattctcggtgtt

SEQ ID NO: 2594728 - DNA, 25 bp, Homo sapien
gatagttttggcagacatagtgttc

SEQ ID NO: 2594729 - DNA, 25 bp, Homo sapien
gacaggcctagtgggtataaattta

SEQ ID NO: 2594730 - DNA, 25 bp, Homo sapien
gggtaaacttgtacatgctaagtca

SEQ ID NO: 2594731 - DNA, 25 bp, Homo sapien
agctttttgatgtggacattagtgc

SEQ ID NO: 2594732 - DNA, 25 bp, Homo sapien
ccatgactggccctttctagctttt

SEQ ID NO: 2594733 - DNA, 25 bp, Homo sapien
ccaccatgactggccctttctagct

SEQ ID NO: 2594734 - DNA, 25 bp, Homo sapien
catgactggccctttctagcttttt

SEQ ID NO: 2594735 - DNA, 25 bp, Homo sapien
tttcttgtgggagagtttcactctg

SEQ ID NO: 2594736 - DNA, 25 bp, Homo sapien
ggctgttaacttcagatctttctaa

SEQ ID NO: 2594737 - DNA, 25 bp, Homo sapien
ttttttggaagagttctcagtgtct

SEQ ID NO: 2594738 - DNA, 25 bp, Homo sapien
gctagctttcaggtttgttttcact

SEQ ID NO: 2594739 - DNA, 25 bp, Homo sapien
cccttgagctgatccgacttagcaa

SEQ ID NO: 2594740 - DNA, 25 bp, Homo sapien
gataaaactgatactggagaccctt

SEQ ID NO: 2594741 - DNA, 25 bp, Homo sapien
actgatactggagacccttgagctg

SEQ ID NO: 2594742 - DNA, 25 bp, Homo sapien
gagacccttgagctgatccgactta

SEQ ID NO: 2594743 - DNA, 25 bp, Homo sapien
tgtgtggaagacgtaagaagcaggc

SEQ ID NO: 2594744 - DNA, 25 bp, Homo sapien
gtgtggaagacgtaagaagcaggcg

SEQ ID NO: 2594745 - DNA, 25 bp, Homo sapien
ctgtgtggaagacgtaagaagcagg

SEQ ID NO: 2594746 - DNA, 25 bp, Homo sapien
tgtggaagacgtaagaagcaggcga

SEQ ID NO: 2594747 - DNA, 25 bp, Homo sapien
gaatgcacttatgtttcccgtggca

SEQ ID NO: 2594748 - DNA, 25 bp, Homo sapien
gtattctgttttgaaccgaggacca

SEQ ID NO: 2594749 - DNA, 25 bp, Homo sapien
gaggaccatgattggcaagcttgcc

SEQ ID NO: 2594750 - DNA, 25 bp, Homo sapien
tgggtgtcacaaactctgaactgga

SEQ ID NO: 2594751 - DNA, 25 bp, Homo sapien
taagtaagcagttactattgtacat

SEQ ID NO: 2594752 - DNA, 25 bp, Homo sapien
taccacaacacccaaggagcttatg

SEQ ID NO: 2594753 - DNA, 25 bp, Homo sapien
ccaaggagcttatgattcttccacc

SEQ ID NO: 2594754 - DNA, 25 bp, Homo sapien
gcttggactacttggacacgtacca

SEQ ID NO: 2594755 - DNA, 25 bp, Homo sapien
gcctaactcaggcttgtggtaaaat

SEQ ID NO: 2594756 - DNA, 25 bp, Homo sapien
tttttcagcctaactcaggcttgtg

SEQ ID NO: 2594757 - DNA, 25 bp, Homo sapien
acccaggacactagagccactttag

SEQ ID NO: 2594758 - DNA, 25 bp, Homo sapien
atatatagctatattcacttgacaa

SEQ ID NO: 2594759 - DNA, 25 bp, Homo sapien
taggtccttggggacgcacagttaa

SEQ ID NO: 2594760 - DNA, 25 bp, Homo sapien
ttgggatccgtctcctctttcgcct

SEQ ID NO: 2594761 - DNA, 25 bp, Homo sapien
gggagccccgggctactctttcaca

SEQ ID NO: 2594762 - DNA, 25 bp, Homo sapien
tctttcgcctcctccgctttgggag

SEQ ID NO: 2594763 - DNA, 25 bp, Homo sapien
gagtgtggcactggtgaccatcacc

SEQ ID NO: 2594764 - DNA, 25 bp, Homo sapien
ggcactggtgaccatcacctgacat

SEQ ID NO: 2594765 - DNA, 25 bp, Homo sapien
tgtggcactggtgaccatcacctga

SEQ ID NO: 2594766 - DNA, 25 bp, Homo sapien
tggcactggtgaccatcacctgaca

SEQ ID NO: 2594767 - DNA, 25 bp, Homo sapien
gactccctcccagaacaagtggggc

SEQ ID NO: 2594768 - DNA, 25 bp, Homo sapien
gattaggagctgaccagattcctct

SEQ ID NO: 2594769 - DNA, 25 bp, Homo sapien
caggtgctgcaattaatgttgcccc

SEQ ID NO: 2594770 - DNA, 25 bp, Homo sapien
gggcaggtgctgcaattaatgttgc

SEQ ID NO: 2594771 - DNA, 25 bp, Homo sapien
ctgagggtgtgatctgcaggcttcc

SEQ ID NO: 2594772 - DNA, 25 bp, Homo sapien
ggccaatgcagaagcctgcaaagtg

SEQ ID NO: 2594773 - DNA, 25 bp, Homo sapien
tgtgagctcttctgcgaggccctga

SEQ ID NO: 2594774 - DNA, 25 bp, Homo sapien
cggacatctcaccagaaagcagtgg

SEQ ID NO: 2594775 - DNA, 25 bp, Homo sapien
ctgcatacacacagaggatgcacac

SEQ ID NO: 2594776 - DNA, 25 bp, Homo sapien
tctgatgactgccatggggcccaca

SEQ ID NO: 2594777 - DNA, 25 bp, Homo sapien
tctcggcttggtgggctaagcatct

SEQ ID NO: 2594778 - DNA, 25 bp, Homo sapien
tgatgactgccatggggcccacaac

SEQ ID NO: 2594779 - DNA, 25 bp, Homo sapien
cagggctctcggcttggtgggctaa

SEQ ID NO: 2594780 - DNA, 25 bp, Homo sapien
ggctcctgggatgccacttgttctg

SEQ ID NO: 2594781 - DNA, 25 bp, Homo sapien
gctcctgggatgccacttgttctgg

SEQ ID NO: 2594782 - DNA, 25 bp, Homo sapien
tcctgggatgccacttgttctgggt

SEQ ID NO: 2594783 - DNA, 25 bp, Homo sapien
tgcaagatgcatggggacctcaagt

SEQ ID NO: 2594784 - DNA, 25 bp, Homo sapien
acactctctgagagctgcaagatgc

SEQ ID NO: 2594785 - DNA, 25 bp, Homo sapien
gaacacactctctgagagctgcaag

SEQ ID NO: 2594786 - DNA, 25 bp, Homo sapien
gctggaacacactctctgagagctg

SEQ ID NO: 2594787 - DNA, 25 bp, Homo sapien
cccaagaggggccatcgtgtctcta

SEQ ID NO: 2594788 - DNA, 25 bp, Homo sapien
ggccatcgtgtctctagaaccagaa

SEQ ID NO: 2594789 - DNA, 25 bp, Homo sapien
catcgtgtctctagaaccagaactg

SEQ ID NO: 2594790 - DNA, 25 bp, Homo sapien
gaggggccatcgtgtctctagaacc

SEQ ID NO: 2594791 - DNA, 25 bp, Homo sapien
tgtcgaagaccagctcaagagcctg

SEQ ID NO: 2594792 - DNA, 25 bp, Homo sapien
ttcagcagggttgactgcagcttct

SEQ ID NO: 2594793 - DNA, 25 bp, Homo sapien
agctcaagagcctggacccatatgc

SEQ ID NO: 2594794 - DNA, 25 bp, Homo sapien
catatgccaccttcagcagggttga

SEQ ID NO: 2594795 - DNA, 25 bp, Homo sapien
tgctcaaagcctgcatccacatgta

SEQ ID NO: 2594796 - DNA, 25 bp, Homo sapien
actgctcaaagcctgcatccacatg

SEQ ID NO: 2594797 - DNA, 25 bp, Homo sapien
ctgctcaaagcctgcatccacatgt

SEQ ID NO: 2594798 - DNA, 25 bp, Homo sapien
gctcaaagcctgcatccacatgtac

SEQ ID NO: 2594799 - DNA, 25 bp, Homo sapien
aggtgtcatctgtctctggtgttcc

SEQ ID NO: 2594800 - DNA, 25 bp, Homo sapien
tcctggaatttctaacccaaatgcc

SEQ ID NO: 2594801 - DNA, 25 bp, Homo sapien
ttagccatcgtaaaacttgacatta

SEQ ID NO: 2594802 - DNA, 25 bp, Homo sapien
cgtaaaacttgacattatgaagcag

SEQ ID NO: 2594803 - DNA, 25 bp, Homo sapien
catttagcctggtgtgatagttcca

SEQ ID NO: 2594804 - DNA, 25 bp, Homo sapien
caaccagggcaactatgcaagatgt

SEQ ID NO: 2594805 - DNA, 25 bp, Homo sapien
cacttgagccagtagttctaggcta

SEQ ID NO: 2594806 - DNA, 25 bp, Homo sapien
tcagctatgctggacattgaggcag

SEQ ID NO: 2594807 - DNA, 25 bp, Homo sapien
aagtatgtccatgactttggcacag

SEQ ID NO: 2594808 - DNA, 25 bp, Homo sapien
tcaggagagctgaaaggcaagaaca

SEQ ID NO: 2594809 - DNA, 25 bp, Homo sapien
gaagacagcatctcggtaattagcc

SEQ ID NO: 2594810 - DNA, 25 bp, Homo sapien
gttaacaaatttcgagacaagtgga

SEQ ID NO: 2594811 - DNA, 25 bp, Homo sapien
caggcaaacataaagcacggcacag

SEQ ID NO: 2594812 - DNA, 25 bp, Homo sapien
cagtgcaccacaggatctgctcttg

SEQ ID NO: 2594813 - DNA, 25 bp, Homo sapien
catgcgtgctcaggcctctgaacag

SEQ ID NO: 2594814 - DNA, 25 bp, Homo sapien
aagtttgggcagacttaggtgtcca

SEQ ID NO: 2594815 - DNA, 25 bp, Homo sapien
ccagctgtctgcacctaaacgtcat

SEQ ID NO: 2594816 - DNA, 25 bp, Homo sapien
ggccgaggccggtgatcagcacagg

SEQ ID NO: 2594817 - DNA, 25 bp, Homo sapien
cggtgatcagcacagggccacccag

SEQ ID NO: 2594818 - DNA, 25 bp, Homo sapien
ggccagctgtctgcacctaaacgtc

SEQ ID NO: 2594819 - DNA, 25 bp, Homo sapien
ctcagatgacacacagtcgacagga

SEQ ID NO: 2594820 - DNA, 25 bp, Homo sapien
tgtgctcagatgacacacagtcgac

SEQ ID NO: 2594821 - DNA, 25 bp, Homo sapien
atgacacacagtcgacaggacccat

SEQ ID NO: 2594822 - DNA, 25 bp, Homo sapien
ttctggttctggagacacgatggcc

SEQ ID NO: 2594823 - DNA, 25 bp, Homo sapien
ccccatgtggatgcggtaatgctgc

SEQ ID NO: 2594824 - DNA, 25 bp, Homo sapien
catgtggatgcggtaatgctgcctg

SEQ ID NO: 2594825 - DNA, 25 bp, Homo sapien
tgtgtccagcaaaagccccatgtgg

SEQ ID NO: 2594826 - DNA, 25 bp, Homo sapien
tgcggtaatgctgcctgctggtcct

SEQ ID NO: 2594827 - DNA, 25 bp, Homo sapien
ctgctcaggccggttctcgaagagc

SEQ ID NO: 2594828 - DNA, 25 bp, Homo sapien
gggctataggcacctttaatgtggc

SEQ ID NO: 2594829 - DNA, 25 bp, Homo sapien
gctataggcacctttaatgtggctc

SEQ ID NO: 2594830 - DNA, 25 bp, Homo sapien
tgctcaggccggttctcgaagagca

SEQ ID NO: 2594831 - DNA, 25 bp, Homo sapien
tcctgttagcaagaaaacctgctca

SEQ ID NO: 2594832 - DNA, 25 bp, Homo sapien
catcctgttagcaagaaaacctgct

SEQ ID NO: 2594833 - DNA, 25 bp, Homo sapien
cctgttagcaagaaaacctgctcac

SEQ ID NO: 2594834 - DNA, 25 bp, Homo sapien
tcatcctgttagcaagaaaacctgc

SEQ ID NO: 2594835 - DNA, 25 bp, Homo sapien
tacaaggccacgtgatggtcacaga

SEQ ID NO: 2594836 - DNA, 25 bp, Homo sapien
gcactgtgttagcttctcactcaca

SEQ ID NO: 2594837 - DNA, 25 bp, Homo sapien
acagctcccgtgagtattgcaaggc

SEQ ID NO: 2594838 - DNA, 25 bp, Homo sapien
ttctcactcacagtctcagaatacc

SEQ ID NO: 2594839 - DNA, 25 bp, Homo sapien
acttgctggagcacgagaggcctga

SEQ ID NO: 2594840 - DNA, 25 bp, Homo sapien
agatgtctacactcatgggcacagg

SEQ ID NO: 2594841 - DNA, 25 bp, Homo sapien
gatgtccatacaccccattcacgtg

SEQ ID NO: 2594842 - DNA, 25 bp, Homo sapien
tgggcacaggcatattccacacttg

SEQ ID NO: 2594843 - DNA, 25 bp, Homo sapien
ccgggactgtagggatccccaaatg

SEQ ID NO: 2594844 - DNA, 25 bp, Homo sapien
ggactgtagggatccccaaatgccc

SEQ ID NO: 2594845 - DNA, 25 bp, Homo sapien
gactgtagggatccccaaatgcccc

SEQ ID NO: 2594846 - DNA, 25 bp, Homo sapien
cgggactgtagggatccccaaatgc

SEQ ID NO: 2594847 - DNA, 25 bp, Homo sapien
gatgtcctggcaccttaactatgcg

SEQ ID NO: 2594848 - DNA, 25 bp, Homo sapien
gcaccttaactatgcgtccccaagg

SEQ ID NO: 2594849 - DNA, 25 bp, Homo sapien
gccagcaccagcgagagacacagat

SEQ ID NO: 2594850 - DNA, 25 bp, Homo sapien
ctcccaaggtgcaggaggcgaaaga

SEQ ID NO: 2594851 - DNA, 25 bp, Homo sapien
ctgatgaaccttttaacatagactc

SEQ ID NO: 2594852 - DNA, 25 bp, Homo sapien
ctgaagcaaaatgcaggtttaaccc

SEQ ID NO: 2594853 - DNA, 25 bp, Homo sapien
tgttcagataaactgatgaaccttt

SEQ ID NO: 2594854 - DNA, 25 bp, Homo sapien
taaggctaccatataactggaacca

SEQ ID NO: 2594855 - DNA, 25 bp, Homo sapien
tcttttaaacctcgtaatatgctgc

SEQ ID NO: 2594856 - DNA, 25 bp, Homo sapien
tctagcaatgtctctcacaagcatg

SEQ ID NO: 2594857 - DNA, 25 bp, Homo sapien
aagagactaaagcagacagagtgga

SEQ ID NO: 2594858 - DNA, 25 bp, Homo sapien
ccaaaggagtgcaacggtaatgctt

SEQ ID NO: 2594859 - DNA, 25 bp, Homo sapien
cttcacattgatatgatgaaatgct

SEQ ID NO: 2594860 - DNA, 25 bp, Homo sapien
tgagacttaggtgacaggcctgcag

SEQ ID NO: 2594861 - DNA, 25 bp, Homo sapien
ctgagacttaggtgacaggcctgca

SEQ ID NO: 2594862 - DNA, 25 bp, Homo sapien
gtgaaaaacacaagagaattcatac

SEQ ID NO: 2594863 - DNA, 25 bp, Homo sapien
gaaaaacacaagagaattcatactc

SEQ ID NO: 2594864 - DNA, 25 bp, Homo sapien
aaaacacaagagaattcatactcac

SEQ ID NO: 2594865 - DNA, 25 bp, Homo sapien
ctgtgaaaaacacaagagaattcat

SEQ ID NO: 2594866 - DNA, 25 bp, Homo sapien
gacttggctataactcatttgacct

SEQ ID NO: 2594867 - DNA, 25 bp, Homo sapien
atggtcccggcttcaaaacagaata

SEQ ID NO: 2594868 - DNA, 25 bp, Homo sapien
tggtcccggcttcaaaacagaatac

SEQ ID NO: 2594869 - DNA, 25 bp, Homo sapien
tagacttggctataactcatttgac

SEQ ID NO: 2594870 - DNA, 25 bp, Homo sapien
gcaagacgacagaatgtgaggttct

SEQ ID NO: 2594871 - DNA, 25 bp, Homo sapien
tattaacagcttacataatgtataa

SEQ ID NO: 2594872 - DNA, 25 bp, Homo sapien
gctgctcttcttatcaaatactata

SEQ ID NO: 2594873 - DNA, 25 bp, Homo sapien
gctgccacagcaaacgtaagtgcat

SEQ ID NO: 2594874 - DNA, 25 bp, Homo sapien
ctttaaactgtgtgcagtcatgaaa

SEQ ID NO: 2594875 - DNA, 25 bp, Homo sapien
ttagccatagcctcaaacccgtggg

SEQ ID NO: 2594876 - DNA, 25 bp, Homo sapien
cttagccatagcctcaaacccgtgg

SEQ ID NO: 2594877 - DNA, 25 bp, Homo sapien
ccaagtgcctgggatggatcctttc

SEQ ID NO: 2594878 - DNA, 25 bp, Homo sapien
gatcctttctgcgtctcaccaaggc

SEQ ID NO: 2594879 - DNA, 25 bp, Homo sapien
tatgtcaaggacgtcagccatctgg

SEQ ID NO: 2594880 - DNA, 25 bp, Homo sapien
gaaggctccgttgcaaacctggtct

SEQ ID NO: 2594881 - DNA, 25 bp, Homo sapien
actgacctggatgaaacccttgtgc

SEQ ID NO: 2594882 - DNA, 25 bp, Homo sapien
tatgagcccctgagatccataggga

SEQ ID NO: 2594883 - DNA, 25 bp, Homo sapien
gagtcaacaccattgctatgtcgga

SEQ ID NO: 2594884 - DNA, 25 bp, Homo sapien
agcatgttggacagtcaagttcccc

SEQ ID NO: 2594885 - DNA, 25 bp, Homo sapien
tgctatgtcggatcagctccagcgt

SEQ ID NO: 2594886 - DNA, 25 bp, Homo sapien
gctccagcgtctccaatatcagttt

SEQ ID NO: 2594887 - DNA, 25 bp, Homo sapien
tatagtatcagaagccttggccagg

SEQ ID NO: 2594888 - DNA, 25 bp, Homo sapien
ggagcccactgactgtacaaagaca

SEQ ID NO: 2594889 - DNA, 25 bp, Homo sapien
taaacgagagtgtcgaccggaatgc

SEQ ID NO: 2594890 - DNA, 25 bp, Homo sapien
cctttggcccgggatcaatcaggag

SEQ ID NO: 2594891 - DNA, 25 bp, Homo sapien
gattcagcaaacagggcacgtacaa

SEQ ID NO: 2594892 - DNA, 25 bp, Homo sapien
ggtgaagcttcattacaactggtcg

SEQ ID NO: 2594893 - DNA, 25 bp, Homo sapien
tgtagtattactcacaaacatgtta

SEQ ID NO: 2594894 - DNA, 25 bp, Homo sapien
ggacgtagcatcaacggatgagaca

SEQ ID NO: 2594895 - DNA, 25 bp, Homo sapien
aatgctttataacattggacggtga

SEQ ID NO: 2594896 - DNA, 25 bp, Homo sapien
taatactagacccttgtaccttgcc

SEQ ID NO: 2594897 - DNA, 25 bp, Homo sapien
aagagacagcttaggcgatgacaga

SEQ ID NO: 2594898 - DNA, 25 bp, Homo sapien
tcatatacatgtgacaaaaggctaa

SEQ ID NO: 2594899 - DNA, 25 bp, Homo sapien
gatctctctagggaagcccaactaa

SEQ ID NO: 2594900 - DNA, 25 bp, Homo sapien
gaatactgttgatatagctacccaa

SEQ ID NO: 2594901 - DNA, 25 bp, Homo sapien
taatatgcccaataagcccggaagt

SEQ ID NO: 2594902 - DNA, 25 bp, Homo sapien
tctactctgaaaacgacaaaacatg

SEQ ID NO: 2594903 - DNA, 25 bp, Homo sapien
taagagggctgaaagtttggacgat

SEQ ID NO: 2594904 - DNA, 25 bp, Homo sapien
tcttcctcttgcctaatttccttgg

SEQ ID NO: 2594905 - DNA, 25 bp, Homo sapien
cctttattgagttaaggcacatacc

SEQ ID NO: 2594906 - DNA, 25 bp, Homo sapien
tcatcataatcaaggctgaatttca

SEQ ID NO: 2594907 - DNA, 25 bp, Homo sapien
gatgagagagtccagacataagtcc

SEQ ID NO: 2594908 - DNA, 25 bp, Homo sapien
ttctaaacatactatgaacatatag

SEQ ID NO: 2594909 - DNA, 25 bp, Homo sapien
taccaatgaaactttttgcagaagt

SEQ ID NO: 2594910 - DNA, 25 bp, Homo sapien
gagccacaaccctcagctgattcaa

SEQ ID NO: 2594911 - DNA, 25 bp, Homo sapien
gactacaggaacattccaccattca

SEQ ID NO: 2594912 - DNA, 25 bp, Homo sapien
taagtggagattcccctgaacaaag

SEQ ID NO: 2594913 - DNA, 25 bp, Homo sapien
tgtttgctccaataattgtgagacc

SEQ ID NO: 2594914 - DNA, 25 bp, Homo sapien
tatagcttctcacaatattgcccag

SEQ ID NO: 2594915 - DNA, 25 bp, Homo sapien
cagaatgttgttatgttgcctcggc

SEQ ID NO: 2594916 - DNA, 25 bp, Homo sapien
acaggatcttactctatctcctggg

SEQ ID NO: 2594917 - DNA, 25 bp, Homo sapien
tctcctgggacagattgcagtggtg

SEQ ID NO: 2594918 - DNA, 25 bp, Homo sapien
gaaaggcattgcataacgatagaga

SEQ ID NO: 2594919 - DNA, 25 bp, Homo sapien
cacaagaattcctatacacaataat

SEQ ID NO: 2594920 - DNA, 25 bp, Homo sapien
tcacaagaattcctatacacaataa

SEQ ID NO: 2594921 - DNA, 25 bp, Homo sapien
acaagaattcctatacacaataata

SEQ ID NO: 2594922 - DNA, 25 bp, Homo sapien
cagaaaaggtctaaaatcggcatca

SEQ ID NO: 2594923 - DNA, 25 bp, Homo sapien
cagctaaagtagtgtgcaaagggaa

SEQ ID NO: 2594924 - DNA, 25 bp, Homo sapien
tattactacaatgcaacttctcccc

SEQ ID NO: 2594925 - DNA, 25 bp, Homo sapien
gaacatctttgtgatataaactgca

SEQ ID NO: 2594926 - DNA, 25 bp, Homo sapien
tctatggcccaatgcaggagcacta

SEQ ID NO: 2594927 - DNA, 25 bp, Homo sapien
tacaatggaccacgggctatgatct

SEQ ID NO: 2594928 - DNA, 25 bp, Homo sapien
taaaggcagaggtacccaactgaac

SEQ ID NO: 2594929 - DNA, 25 bp, Homo sapien
gtaaagaccaacataacagagcctg

SEQ ID NO: 2594930 - DNA, 25 bp, Homo sapien
tgatgacagtaatatggcccttggg

SEQ ID NO: 2594931 - DNA, 25 bp, Homo sapien
gctctggtgatgactcgcttctgaa

SEQ ID NO: 2594932 - DNA, 25 bp, Homo sapien
tctcaagtcacatgcaaattcaggg

SEQ ID NO: 2594933 - DNA, 25 bp, Homo sapien
tcaggttgtcagcacggttgagctc

SEQ ID NO: 2594934 - DNA, 25 bp, Homo sapien
tgggcctagactaagtttttgcaga

SEQ ID NO: 2594935 - DNA, 25 bp, Homo sapien
cctagactaagtttttgcagaaggc

SEQ ID NO: 2594936 - DNA, 25 bp, Homo sapien
catgggcctagactaagtttttgca

SEQ ID NO: 2594937 - DNA, 25 bp, Homo sapien
agaccatgggcctagactaagtttt

SEQ ID NO: 2594938 - DNA, 25 bp, Homo sapien
ttaacaagtactctgttttgaccac

SEQ ID NO: 2594939 - DNA, 25 bp, Homo sapien
taatctgtgtccgtctttgtgatag

SEQ ID NO: 2594940 - DNA, 25 bp, Homo sapien
caaagttttgttaacaagtactctg

SEQ ID NO: 2594941 - DNA, 25 bp, Homo sapien
cttaggagggatatgtataaatatg

SEQ ID NO: 2594942 - DNA, 25 bp, Homo sapien
gtattgatagggatagtctctcttc

SEQ ID NO: 2594943 - DNA, 25 bp, Homo sapien
tctcacggcttactgttgggaatgt

SEQ ID NO: 2594944 - DNA, 25 bp, Homo sapien
tgttgggaatgttaccaggtgtatt

SEQ ID NO: 2594945 - DNA, 25 bp, Homo sapien
tgagtgtcgtacatttcccaggact

SEQ ID NO: 2594946 - DNA, 25 bp, Homo sapien
tttacttcaacacagtaagtagcat

SEQ ID NO: 2594947 - DNA, 25 bp, Homo sapien
taaagagtgcatgtttgcataacaa

SEQ ID NO: 2594948 - DNA, 25 bp, Homo sapien
aaaatgtaaagagtgcatgtttgca

SEQ ID NO: 2594949 - DNA, 25 bp, Homo sapien
aatgtaaagagtgcatgtttgcata

SEQ ID NO: 2594950 - DNA, 25 bp, Homo sapien
tgtaaagagtgcatgtttgcataac

SEQ ID NO: 2594951 - DNA, 25 bp, Homo sapien
agaactctcataccttagggagccc

SEQ ID NO: 2594952 - DNA, 25 bp, Homo sapien
tagaactctcataccttagggagcc

SEQ ID NO: 2594953 - DNA, 25 bp, Homo sapien
caggctagaagtttgcttttaagat

SEQ ID NO: 2594954 - DNA, 25 bp, Homo sapien
tttcaccctgattgattcaaactga

SEQ ID NO: 2594955 - DNA, 25 bp, Homo sapien
tcatggattggcctcatgctgcatt

SEQ ID NO: 2594956 - DNA, 25 bp, Homo sapien
gaagttggattcatggattggcctc

SEQ ID NO: 2594957 - DNA, 25 bp, Homo sapien
tgtaggtctgctacaactgagcaca

SEQ ID NO: 2594958 - DNA, 25 bp, Homo sapien
gtaggtctgctacaactgagcacat

SEQ ID NO: 2594959 - DNA, 25 bp, Homo sapien
ctgtaggtctgctacaactgagcac

SEQ ID NO: 2594960 - DNA, 25 bp, Homo sapien
gggccagcatactaatgtgaagctt

SEQ ID NO: 2594961 - DNA, 25 bp, Homo sapien
tttcaacctcttttacattcactgt

SEQ ID NO: 2594962 - DNA, 25 bp, Homo sapien
caaaattagcttaatgatttcaacc

SEQ ID NO: 2594963 - DNA, 25 bp, Homo sapien
cttctttgaattcaggaagtccaaa

SEQ ID NO: 2594964 - DNA, 25 bp, Homo sapien
aaggacggattgacgaactgatgga

SEQ ID NO: 2594965 - DNA, 25 bp, Homo sapien
gattgacgaactgatggattgacgc

SEQ ID NO: 2594966 - DNA, 25 bp, Homo sapien
gcggtaggagggaggaccgacgcca

SEQ ID NO: 2594967 - DNA, 25 bp, Homo sapien
tgacgaactgatggattgacgcgcg

SEQ ID NO: 2594968 - DNA, 25 bp, Homo sapien
gaaaagcaaggcttacagaaggatg

SEQ ID NO: 2594969 - DNA, 25 bp, Homo sapien
acggtctttagccatgcacaaatgg

SEQ ID NO: 2594970 - DNA, 25 bp, Homo sapien
gatgttccttcaggaagaagcagca

SEQ ID NO: 2594971 - DNA, 25 bp, Homo sapien
agccatgcacaaatggtagttttgt

SEQ ID NO: 2594972 - DNA, 25 bp, Homo sapien
tctccctgggcagccatcatggtgt

SEQ ID NO: 2594973 - DNA, 25 bp, Homo sapien
gggctctccctgggcagccatcatg

SEQ ID NO: 2594974 - DNA, 25 bp, Homo sapien
ctagacctggggctctccctgggca

SEQ ID NO: 2594975 - DNA, 25 bp, Homo sapien
gctctccctgggcagccatcatggt

SEQ ID NO: 2594976 - DNA, 25 bp, Homo sapien
gtcaaatgatgtttcaccaaagtag

SEQ ID NO: 2594977 - DNA, 25 bp, Homo sapien
ttcaccagtcaaatgatgtttcacc

SEQ ID NO: 2594978 - DNA, 25 bp, Homo sapien
caaatgatgtttcaccaaagtagtt

SEQ ID NO: 2594979 - DNA, 25 bp, Homo sapien
cagtcaaatgatgtttcaccaaagt

SEQ ID NO: 2594980 - DNA, 25 bp, Homo sapien
aactatacttctgatactgggctcc

SEQ ID NO: 2594981 - DNA, 25 bp, Homo sapien
ggccggctgtatcccatttattgaa

SEQ ID NO: 2594982 - DNA, 25 bp, Homo sapien
cacactgggctatgggttcgatgta

SEQ ID NO: 2594983 - DNA, 25 bp, Homo sapien
tgttgccacacaacatcatggtgat

SEQ ID NO: 2594984 - DNA, 25 bp, Homo sapien
aagtcaagactctggcatcctaaca

SEQ ID NO: 2594985 - DNA, 25 bp, Homo sapien
ttacctttagcaactcgttcaagtc

SEQ ID NO: 2594986 - DNA, 25 bp, Homo sapien
aagtcacccttgaccctatgcgtct

SEQ ID NO: 2594987 - DNA, 25 bp, Homo sapien
tctgcctcggtgtctgcagttttac

SEQ ID NO: 2594988 - DNA, 25 bp, Homo sapien
acggccagcaaaggccggcaggact

SEQ ID NO: 2594989 - DNA, 25 bp, Homo sapien
ctaggcgacggtccagggattgagg

SEQ ID NO: 2594990 - DNA, 25 bp, Homo sapien
ccagggattgaggacggccagcaaa

SEQ ID NO: 2594991 - DNA, 25 bp, Homo sapien
gacggtccagggattgaggacggcc

SEQ ID NO: 2594992 - DNA, 25 bp, Homo sapien
actaagtgaaggaagctgatctgaa

SEQ ID NO: 2594993 - DNA, 25 bp, Homo sapien
tgataacacaattaaacagttagtc

SEQ ID NO: 2594994 - DNA, 25 bp, Homo sapien
gcttgaatgcctattactaagtgaa

SEQ ID NO: 2594995 - DNA, 25 bp, Homo sapien
cagcagaaggatcattgattgtcaa

SEQ ID NO: 2594996 - DNA, 25 bp, Homo sapien
tcccctgactctggcggagagatgg

SEQ ID NO: 2594997 - DNA, 25 bp, Homo sapien
gggtatgcgcctctcagttcttccc

SEQ ID NO: 2594998 - DNA, 25 bp, Homo sapien
gcgttgtcctgagtgagcggcagta

SEQ ID NO: 2594999 - DNA, 25 bp, Homo sapien
tgagtgagcggcagtagcggctcag

SEQ ID NO: 2595000 - DNA, 25 bp, Homo sapien
tattttggttggttagaccacaggc

SEQ ID NO: 2595001 - DNA, 25 bp, Homo sapien
tcccttgtttgattcttaggcaagt

SEQ ID NO: 2595002 - DNA, 25 bp, Homo sapien
tgattcttaggcaagtgggctttct

SEQ ID NO: 2595003 - DNA, 25 bp, Homo sapien
gggctttcttggtctcattattttg

SEQ ID NO: 2595004 - DNA, 25 bp, Homo sapien
gagcctcaggataaggtagagcgtg

SEQ ID NO: 2595005 - DNA, 25 bp, Homo sapien
ttcactgcaccttgggaaatgctcc

SEQ ID NO: 2595006 - DNA, 25 bp, Homo sapien
taaggtagagcgtgttaaaggcagc

SEQ ID NO: 2595007 - DNA, 25 bp, Homo sapien
cctttggctcgcagtcagcacttag

SEQ ID NO: 2595008 - DNA, 25 bp, Homo sapien
ttttcacacagacgcctttccatgt

SEQ ID NO: 2595009 - DNA, 25 bp, Homo sapien
gtttttcacacagacgcctttccat

SEQ ID NO: 2595010 - DNA, 25 bp, Homo sapien
tcacacagacgcctttccatgtatt

SEQ ID NO: 2595011 - DNA, 25 bp, Homo sapien
cacagacgcctttccatgtattcca

SEQ ID NO: 2595012 - DNA, 25 bp, Homo sapien
tatggaatacttactcatgtcagat

SEQ ID NO: 2595013 - DNA, 25 bp, Homo sapien
gtaattcacttaatcctccaacaac

SEQ ID NO: 2595014 - DNA, 25 bp, Homo sapien
tacttactcatgtcagatattgttg

SEQ ID NO: 2595015 - DNA, 25 bp, Homo sapien
gatattgttgtaaatagtaattcac

SEQ ID NO: 2595016 - DNA, 25 bp, Homo sapien
gactttcactatattgtgcaggcca

SEQ ID NO: 2595017 - DNA, 25 bp, Homo sapien
ccaggccaaccacagatacttttaa

SEQ ID NO: 2595018 - DNA, 25 bp, Homo sapien
gagggcagggacttatttatgcccc

SEQ ID NO: 2595019 - DNA, 25 bp, Homo sapien
ttagcacacagtagtagacactgac

SEQ ID NO: 2595020 - DNA, 25 bp, Homo sapien
tgactgattagtgttcaccacaata

SEQ ID NO: 2595021 - DNA, 25 bp, Homo sapien
tagtgttcaccacaataactgcaac

SEQ ID NO: 2595022 - DNA, 25 bp, Homo sapien
caggccactgttcttgactgacagg

SEQ ID NO: 2595023 - DNA, 25 bp, Homo sapien
tgcaacaaccctaacaaacaggcca

SEQ ID NO: 2595024 - DNA, 25 bp, Homo sapien
tggggtcttcttcctcatctgccat

SEQ ID NO: 2595025 - DNA, 25 bp, Homo sapien
cgtggggtcttcttcctcatctgcc

SEQ ID NO: 2595026 - DNA, 25 bp, Homo sapien
gtggggtcttcttcctcatctgcca

SEQ ID NO: 2595027 - DNA, 25 bp, Homo sapien
tctgcacctcctccaatttcttcat

SEQ ID NO: 2595028 - DNA, 25 bp, Homo sapien
ttcttttaccctgtccaccttctgc

SEQ ID NO: 2595029 - DNA, 25 bp, Homo sapien
cttttaccctgtccaccttctgcac

SEQ ID NO: 2595030 - DNA, 25 bp, Homo sapien
ccttctgcacctcctccaatttctt

SEQ ID NO: 2595031 - DNA, 25 bp, Homo sapien
tgattcacgcctccttcaagcaaca

SEQ ID NO: 2595032 - DNA, 25 bp, Homo sapien
gctgttgatagcgtaatctttgcct

SEQ ID NO: 2595033 - DNA, 25 bp, Homo sapien
catctgttggtatatctgccgctgt

SEQ ID NO: 2595034 - DNA, 25 bp, Homo sapien
tgttcagtaagattctgctgctgat

SEQ ID NO: 2595035 - DNA, 25 bp, Homo sapien
ggcttccacaaggtgattcctccag

SEQ ID NO: 2595036 - DNA, 25 bp, Homo sapien
tgatccaggattacgaggagtgctt

SEQ ID NO: 2595037 - DNA, 25 bp, Homo sapien
cattagatccattgcctttgctccc

SEQ ID NO: 2595038 - DNA, 25 bp, Homo sapien
tgagtgctgatacctcattaccaag

SEQ ID NO: 2595039 - DNA, 25 bp, Homo sapien
gaaaatgctccttaactattcccat

SEQ ID NO: 2595040 - DNA, 25 bp, Homo sapien
tgtacttaatctcagccaaaaagct

SEQ ID NO: 2595041 - DNA, 25 bp, Homo sapien
tgtaaatatgcagtcttccactgct

SEQ ID NO: 2595042 - DNA, 25 bp, Homo sapien
tgaattcctataagcatccaagtgc

SEQ ID NO: 2595043 - DNA, 25 bp, Homo sapien
aacactcgtgaaactgctcaggcca

SEQ ID NO: 2595044 - DNA, 25 bp, Homo sapien
tgaacaaagcacctaagatgcgccg

SEQ ID NO: 2595045 - DNA, 25 bp, Homo sapien
ggtttagatgtagattctctggtca

SEQ ID NO: 2595046 - DNA, 25 bp, Homo sapien
ccgccggacctacagagctcatggt

SEQ ID NO: 2595047 - DNA, 25 bp, Homo sapien
tatgcttaaatccaaccccagacag

SEQ ID NO: 2595048 - DNA, 25 bp, Homo sapien
ttctagatacctgaaaaaagccgag

SEQ ID NO: 2595049 - DNA, 25 bp, Homo sapien
taatgtctcactgtttacggccagc

SEQ ID NO: 2595050 - DNA, 25 bp, Homo sapien
taaaataagctctggattcagtggc

SEQ ID NO: 2595051 - DNA, 25 bp, Homo sapien
gtggcttaatgaccgaatgttctga

SEQ ID NO: 2595052 - DNA, 25 bp, Homo sapien
ctggagaatctccaagaggtggctt

SEQ ID NO: 2595053 - DNA, 25 bp, Homo sapien
cttaatgaccgaatgttctgaagag

SEQ ID NO: 2595054 - DNA, 25 bp, Homo sapien
tctccaagaggtggcttaatgaccg

SEQ ID NO: 2595055 - DNA, 25 bp, Homo sapien
tagataaagccctgcggagctgagc

SEQ ID NO: 2595056 - DNA, 25 bp, Homo sapien
caccttcgtcattacaactttgaag

SEQ ID NO: 2595057 - DNA, 25 bp, Homo sapien
gtcattacaactttgaagccctctg

SEQ ID NO: 2595058 - DNA, 25 bp, Homo sapien
tgagctggtttcaccttcgtcatta

SEQ ID NO: 2595059 - DNA, 25 bp, Homo sapien
tgataagaaaccgtggctgctcagg

SEQ ID NO: 2595060 - DNA, 25 bp, Homo sapien
aagaaaccgtggctgctcaggcggc

SEQ ID NO: 2595061 - DNA, 25 bp, Homo sapien
gaaaccgtggctgctcaggcggctg

SEQ ID NO: 2595062 - DNA, 25 bp, Homo sapien
ataagaaaccgtggctgctcaggcg

SEQ ID NO: 2595063 - DNA, 25 bp, Homo sapien
attcctgcaaagcttagtcctggcc

SEQ ID NO: 2595064 - DNA, 25 bp, Homo sapien
ctctaaaaccaggttattcctgcaa

SEQ ID NO: 2595065 - DNA, 25 bp, Homo sapien
cctctaaaaccaggttattcctgca

SEQ ID NO: 2595066 - DNA, 25 bp, Homo sapien
ttcctgcaaagcttagtcctggccc

SEQ ID NO: 2595067 - DNA, 25 bp, Homo sapien
cagtttcccggaggaaacattgaag

SEQ ID NO: 2595068 - DNA, 25 bp, Homo sapien
ggaaacattgaaggcgactcaatgg

SEQ ID NO: 2595069 - DNA, 25 bp, Homo sapien
cagtggtcaatatcacagtttcccg

SEQ ID NO: 2595070 - DNA, 25 bp, Homo sapien
aaggcgactcaatggcactgcttcc

SEQ ID NO: 2595071 - DNA, 25 bp, Homo sapien
tggctcagagtctcttaggaggtta

SEQ ID NO: 2595072 - DNA, 25 bp, Homo sapien
gagtctcttaggaggttacagtcaa

SEQ ID NO: 2595073 - DNA, 25 bp, Homo sapien
cagagtctcttaggaggttacagtc

SEQ ID NO: 2595074 - DNA, 25 bp, Homo sapien
gctcagagtctcttaggaggttaca

SEQ ID NO: 2595075 - DNA, 25 bp, Homo sapien
gacagaaatctcctttggcccaata

SEQ ID NO: 2595076 - DNA, 25 bp, Homo sapien
ctgggccgcatagcaagactctctc

SEQ ID NO: 2595077 - DNA, 25 bp, Homo sapien
tattgcttcctaacaaattacccta

SEQ ID NO: 2595078 - DNA, 25 bp, Homo sapien
gctggacatggtgacgtaaatctgt

SEQ ID NO: 2595079 - DNA, 25 bp, Homo sapien
tgggtcttctcatggcataaggcct

SEQ ID NO: 2595080 - DNA, 25 bp, Homo sapien
tgttacatggccttcctcttgtgtg

SEQ ID NO: 2595081 - DNA, 25 bp, Homo sapien
gaaatttgggcccatcctaatccat

SEQ ID NO: 2595082 - DNA, 25 bp, Homo sapien
gcaagccaggagtctaaaaccaaag

SEQ ID NO: 2595083 - DNA, 25 bp, Homo sapien
atctgtggtcagctgacaggcttgg

SEQ ID NO: 2595084 - DNA, 25 bp, Homo sapien
tcagctgacaggcttggacagcttt

SEQ ID NO: 2595085 - DNA, 25 bp, Homo sapien
ttagccctctccatctgtggtcagc

SEQ ID NO: 2595086 - DNA, 25 bp, Homo sapien
agctttggctgtgaggaaggcgaag

SEQ ID NO: 2595087 - DNA, 25 bp, Homo sapien
taatccgccgtgcttgtcaagggcc

SEQ ID NO: 2595088 - DNA, 25 bp, Homo sapien
gacaagccaaagtctagtgcaggac

SEQ ID NO: 2595089 - DNA, 25 bp, Homo sapien
cgctttattagagttcgggcggaag

SEQ ID NO: 2595090 - DNA, 25 bp, Homo sapien
tgcagcctgcttggttacccagagg

SEQ ID NO: 2595091 - DNA, 25 bp, Homo sapien
gttcagtggtaatagcggcggagat

SEQ ID NO: 2595092 - DNA, 25 bp, Homo sapien
ttcccgatccgggccgaggtgactg

SEQ ID NO: 2595093 - DNA, 25 bp, Homo sapien
gggagcgcccgcttgacacttcccg

SEQ ID NO: 2595094 - DNA, 25 bp, Homo sapien
tcagtggtaatagcggcggagatgg

SEQ ID NO: 2595095 - DNA, 25 bp, Homo sapien
cacgtgctaccccttttctctcata

SEQ ID NO: 2595096 - DNA, 25 bp, Homo sapien
ttcacgtgctaccccttttctctca

SEQ ID NO: 2595097 - DNA, 25 bp, Homo sapien
cttcacgtgctaccccttttctctc

SEQ ID NO: 2595098 - DNA, 25 bp, Homo sapien
acgtgctaccccttttctctcataa

SEQ ID NO: 2595099 - DNA, 25 bp, Homo sapien
gttttgagacgaggtactttcttga

SEQ ID NO: 2595100 - DNA, 25 bp, Homo sapien
ccttcttctctgatagcagccaggt

SEQ ID NO: 2595101 - DNA, 25 bp, Homo sapien
cttctctgatagcagccaggttttg

SEQ ID NO: 2595102 - DNA, 25 bp, Homo sapien
gacgaggtactttcttgaagtaggc

SEQ ID NO: 2595103 - DNA, 25 bp, Homo sapien
acactgtccagagatggcagtctct

SEQ ID NO: 2595104 - DNA, 25 bp, Homo sapien
gctccacactgtccagagatggcag

SEQ ID NO: 2595105 - DNA, 25 bp, Homo sapien
cacactgtccagagatggcagtctc

SEQ ID NO: 2595106 - DNA, 25 bp, Homo sapien
tccacactgtccagagatggcagtc

SEQ ID NO: 2595107 - DNA, 25 bp, Homo sapien
ttaaaacagactccaatgtaccatt

SEQ ID NO: 2595108 - DNA, 25 bp, Homo sapien
catctggatgctaaaatagacaatt

SEQ ID NO: 2595109 - DNA, 25 bp, Homo sapien
cagactccaatgtaccatttacaga

SEQ ID NO: 2595110 - DNA, 25 bp, Homo sapien
aaaaagcatctgagttaattaactc

SEQ ID NO: 2595111 - DNA, 25 bp, Homo sapien
gacgtaaaaggccattacaacacaa

SEQ ID NO: 2595112 - DNA, 25 bp, Homo sapien
aacacaagcaattgccacagcagca

SEQ ID NO: 2595113 - DNA, 25 bp, Homo sapien
gccattacaacacaagcaattgcca

SEQ ID NO: 2595114 - DNA, 25 bp, Homo sapien
acaagcaattgccacagcagcatgc

SEQ ID NO: 2595115 - DNA, 25 bp, Homo sapien
ttcatccccgtccccttggttggca

SEQ ID NO: 2595116 - DNA, 25 bp, Homo sapien
tgggttcaggtctccaacaggttct

SEQ ID NO: 2595117 - DNA, 25 bp, Homo sapien
ggttcaggtctccaacaggttcttc

SEQ ID NO: 2595118 - DNA, 25 bp, Homo sapien
cccttggttggcagttgatgacttg

SEQ ID NO: 2595119 - DNA, 25 bp, Homo sapien
gatccttccatagatataagcaggg

SEQ ID NO: 2595120 - DNA, 25 bp, Homo sapien
gaagttctagacatccaacagctga

SEQ ID NO: 2595121 - DNA, 25 bp, Homo sapien
catctaaaatggtctgctcaggagt

SEQ ID NO: 2595122 - DNA, 25 bp, Homo sapien
aagctggctttctgtagtcccctga

SEQ ID NO: 2595123 - DNA, 25 bp, Homo sapien
tcctgaagagataacagccacaact

SEQ ID NO: 2595124 - DNA, 25 bp, Homo sapien
ccacaaggtgtaactctctttcctg

SEQ ID NO: 2595125 - DNA, 25 bp, Homo sapien
taccctgtggaccaattcctgaaga

SEQ ID NO: 2595126 - DNA, 25 bp, Homo sapien
tctcatctcaaaggtcctcagaaat

SEQ ID NO: 2595127 - DNA, 25 bp, Homo sapien
gtgacattcccttctgccaacaggt

SEQ ID NO: 2595128 - DNA, 25 bp, Homo sapien
acacaagagtttgggtcaagacgac

SEQ ID NO: 2595129 - DNA, 25 bp, Homo sapien
ggagctgacttcattccaccctggc

SEQ ID NO: 2595130 - DNA, 25 bp, Homo sapien
cctacagggtttatggtgatgccag

SEQ ID NO: 2595131 - DNA, 25 bp, Homo sapien
taagatcaaagtgtaagcgggagga

SEQ ID NO: 2595132 - DNA, 25 bp, Homo sapien
ggtgggcgcacgcactcgcctaaca

SEQ ID NO: 2595133 - DNA, 25 bp, Homo sapien
ctaacacgctccaagcgcgcacact

SEQ ID NO: 2595134 - DNA, 25 bp, Homo sapien
gggtcacgatccgatcaaataagat

SEQ ID NO: 2595135 - DNA, 25 bp, Homo sapien
cccgagggggcttcgcaggaggaga

SEQ ID NO: 2595136 - DNA, 25 bp, Homo sapien
ggggcttcgcaggaggagagctttt

SEQ ID NO: 2595137 - DNA, 25 bp, Homo sapien
gccgcctaaggggcctcgctgcaca

SEQ ID NO: 2595138 - DNA, 25 bp, Homo sapien
caattcatcacttctgagcgccggg

SEQ ID NO: 2595139 - DNA, 25 bp, Homo sapien
agaatcgcctcgataatcagtggcc

SEQ ID NO: 2595140 - DNA, 25 bp, Homo sapien
atcgcctcgataatcagtggccggg

SEQ ID NO: 2595141 - DNA, 25 bp, Homo sapien
tcgataatcagtggccggggacaag

SEQ ID NO: 2595142 - DNA, 25 bp, Homo sapien
ctcgataatcagtggccggggacaa

SEQ ID NO: 2595143 - DNA, 25 bp, Homo sapien
aataaattgaatggatgggcccggc

SEQ ID NO: 2595144 - DNA, 25 bp, Homo sapien
tcccttcggaaaagatgagttcaca

SEQ ID NO: 2595145 - DNA, 25 bp, Homo sapien
caacctctcaacatgaaataggcac

SEQ ID NO: 2595146 - DNA, 25 bp, Homo sapien
tccttgcatgggataagtgctcagt

SEQ ID NO: 2595147 - DNA, 25 bp, Homo sapien
tcatatatcaaacttggactttctc

SEQ ID NO: 2595148 - DNA, 25 bp, Homo sapien
gattaagtctgtacatgtgcgtgca

SEQ ID NO: 2595149 - DNA, 25 bp, Homo sapien
taaacatttcagctaggaataccac

SEQ ID NO: 2595150 - DNA, 25 bp, Homo sapien
gaatgttcagttctagccaaggtag

SEQ ID NO: 2595151 - DNA, 25 bp, Homo sapien
tgatttcagaggagtaaggcatgcc

SEQ ID NO: 2595152 - DNA, 25 bp, Homo sapien
ctatgacaaacgtgctttattcttc

SEQ ID NO: 2595153 - DNA, 25 bp, Homo sapien
taacgcagtaagaattaggtggaat

SEQ ID NO: 2595154 - DNA, 25 bp, Homo sapien
caagtgcaggaaagccctgtgtgtc

SEQ ID NO: 2595155 - DNA, 25 bp, Homo sapien
gtttcatttctagccatacaattga

SEQ ID NO: 2595156 - DNA, 25 bp, Homo sapien
cagcagtgctataggtgggaaatac

SEQ ID NO: 2595157 - DNA, 25 bp, Homo sapien
aaatagtttgagtagcagcagtgct

SEQ ID NO: 2595158 - DNA, 25 bp, Homo sapien
aatattctaatgtagctatctcgcc

SEQ ID NO: 2595159 - DNA, 25 bp, Homo sapien
tttttggtacactgggcagacttca

SEQ ID NO: 2595160 - DNA, 25 bp, Homo sapien
gttaaactttcaccaatgtctgctc

SEQ ID NO: 2595161 - DNA, 25 bp, Homo sapien
aggttaaactttcaccaatgtctgc

SEQ ID NO: 2595162 - DNA, 25 bp, Homo sapien
ggttaaactttcaccaatgtctgct

SEQ ID NO: 2595163 - DNA, 25 bp, Homo sapien
taaactttcaccaatgtctgctctg

SEQ ID NO: 2595164 - DNA, 25 bp, Homo sapien
tagtactttaccacaaatacagtgt

SEQ ID NO: 2595165 - DNA, 25 bp, Homo sapien
gacttaagtaccaaaatgcatacca

SEQ ID NO: 2595166 - DNA, 25 bp, Homo sapien
tacagtgtaatatcatcagtccaaa

SEQ ID NO: 2595167 - DNA, 25 bp, Homo sapien
agaattaaatgataaacttagagac

SEQ ID NO: 2595168 - DNA, 25 bp, Homo sapien
caggatctactccaagtgaccaaca

SEQ ID NO: 2595169 - DNA, 25 bp, Homo sapien
aatatcaaactagccagacaattaa

SEQ ID NO: 2595170 - DNA, 25 bp, Homo sapien
ctcaatatcaaactagccagacaat

SEQ ID NO: 2595171 - DNA, 25 bp, Homo sapien
tcaatatcaaactagccagacaatt

SEQ ID NO: 2595172 - DNA, 25 bp, Homo sapien
actcaatatcaaactagccagacaa

SEQ ID NO: 2595173 - DNA, 25 bp, Homo sapien
gctcgggtgccgctcgagtctcttc

SEQ ID NO: 2595174 - DNA, 25 bp, Homo sapien
ctagccgcgggtgggagcgatcttt

SEQ ID NO: 2595175 - DNA, 25 bp, Homo sapien
ggcgatgacgtttatcatgcttcct

SEQ ID NO: 2595176 - DNA, 25 bp, Homo sapien
tctttaagaaggctgggcgatgacg

SEQ ID NO: 2595177 - DNA, 25 bp, Homo sapien
gaaaagagcctggtgatgagcgagc

SEQ ID NO: 2595178 - DNA, 25 bp, Homo sapien
gcctgatcaagaaagagtcatggaa

SEQ ID NO: 2595179 - DNA, 25 bp, Homo sapien
cgagctgcggactggacttgggaga

SEQ ID NO: 2595180 - DNA, 25 bp, Homo sapien
ctgtggtgaggacgataaaaaggcc

SEQ ID NO: 2595181 - DNA, 25 bp, Homo sapien
aagaacaatgtgctattcttggcaa

SEQ ID NO: 2595182 - DNA, 25 bp, Homo sapien
aaagaacaatgtgctattcttggca

SEQ ID NO: 2595183 - DNA, 25 bp, Homo sapien
tcaggaaacatctagggactaatga

SEQ ID NO: 2595184 - DNA, 25 bp, Homo sapien
gaagtaattgcctagagtctctgaa

SEQ ID NO: 2595185 - DNA, 25 bp, Homo sapien
aacagtggagcattccatggttgca

SEQ ID NO: 2595186 - DNA, 25 bp, Homo sapien
ccaaggtttgttacactgcgtgtcc

SEQ ID NO: 2595187 - DNA, 25 bp, Homo sapien
gactgagtgatttctggcaggcaca

SEQ ID NO: 2595188 - DNA, 25 bp, Homo sapien
gcctatactccttatcccattatga

SEQ ID NO: 2595189 - DNA, 25 bp, Homo sapien
gctcccttgcttcttgcaataataa

SEQ ID NO: 2595190 - DNA, 25 bp, Homo sapien
cacaaggtaaattcatagcttagcc

SEQ ID NO: 2595191 - DNA, 25 bp, Homo sapien
tgggcagtgaagaaagcggagtcct

SEQ ID NO: 2595192 - DNA, 25 bp, Homo sapien
aatttataaactaaggatcattgca

SEQ ID NO: 2595193 - DNA, 25 bp, Homo sapien
taaactaaggatcattgcatatccc

SEQ ID NO: 2595194 - DNA, 25 bp, Homo sapien
gaagaaagcggagtcctcagaccaa

SEQ ID NO: 2595195 - DNA, 25 bp, Homo sapien
tcttctgatgaagtctggcgaagtc

SEQ ID NO: 2595196 - DNA, 25 bp, Homo sapien
tcttttgtgccgtagaatgttctcg

SEQ ID NO: 2595197 - DNA, 25 bp, Homo sapien
catcaaaaaagagcactggaagcct

SEQ ID NO: 2595198 - DNA, 25 bp, Homo sapien
ttgcacagatcagaggttcacacag

SEQ ID NO: 2595199 - DNA, 25 bp, Homo sapien
cctgctgaaactgcacaggtcaacc

SEQ ID NO: 2595200 - DNA, 25 bp, Homo sapien
gtacctgctgaaactgcacaggtca

SEQ ID NO: 2595201 - DNA, 25 bp, Homo sapien
tgctgaaactgcacaggtcaacctt

SEQ ID NO: 2595202 - DNA, 25 bp, Homo sapien
tacctgctgaaactgcacaggtcaa

SEQ ID NO: 2595203 - DNA, 25 bp, Homo sapien
tatagcagcaagagatacaccgtaa

SEQ ID NO: 2595204 - DNA, 25 bp, Homo sapien
gatacaccgtaatggtcttctggaa

SEQ ID NO: 2595205 - DNA, 25 bp, Homo sapien
aagagatacaccgtaatggtcttct

SEQ ID NO: 2595206 - DNA, 25 bp, Homo sapien
cagcaagagatacaccgtaatggtc

SEQ ID NO: 2595207 - DNA, 25 bp, Homo sapien
tttgtaggtgccgtagcagcagccc

SEQ ID NO: 2595208 - DNA, 25 bp, Homo sapien
taaaaatctaatctgccagtttagt

SEQ ID NO: 2595209 - DNA, 25 bp, Homo sapien
gccgtagcagcagcccttgcagtct

SEQ ID NO: 2595210 - DNA, 25 bp, Homo sapien
ggtgccgtagcagcagcccttgcag

SEQ ID NO: 2595211 - DNA, 25 bp, Homo sapien
aggtacccagggtgctatgctgcat

SEQ ID NO: 2595212 - DNA, 25 bp, Homo sapien
cttaagtccataggctttttgtcct

SEQ ID NO: 2595213 - DNA, 25 bp, Homo sapien
tctgtggtctcaaggtacccagggt

SEQ ID NO: 2595214 - DNA, 25 bp, Homo sapien
tggtctcaaggtacccagggtgcta

SEQ ID NO: 2595215 - DNA, 25 bp, Homo sapien
cccgagagcagcctatgttgcagta

SEQ ID NO: 2595216 - DNA, 25 bp, Homo sapien
cagtacaaaggcaagcagtttaaga

SEQ ID NO: 2595217 - DNA, 25 bp, Homo sapien
cagtttaagagctgagatgaacttg

SEQ ID NO: 2595218 - DNA, 25 bp, Homo sapien
catttcatagtgtctaaactacact

SEQ ID NO: 2595219 - DNA, 25 bp, Homo sapien
ttgttcataggagtacaataacttg

SEQ ID NO: 2595220 - DNA, 25 bp, Homo sapien
ttcataggagtacaataacttgtta

SEQ ID NO: 2595221 - DNA, 25 bp, Homo sapien
cataggagtacaataacttgttaaa

SEQ ID NO: 2595222 - DNA, 25 bp, Homo sapien
tgttcataggagtacaataacttgt

SEQ ID NO: 2595223 - DNA, 25 bp, Homo sapien
tgttcagcgactgtgtagacagagc

SEQ ID NO: 2595224 - DNA, 25 bp, Homo sapien
ctgtgtagacagagcatgtggcttt

SEQ ID NO: 2595225 - DNA, 25 bp, Homo sapien
tgtggcttttactggctccataaaa

SEQ ID NO: 2595226 - DNA, 25 bp, Homo sapien
gacagagcatgtggcttttactggc

SEQ ID NO: 2595227 - DNA, 25 bp, Homo sapien
gaagtttgaggactcgcgtccatga

SEQ ID NO: 2595228 - DNA, 25 bp, Homo sapien
agagcatagtttggttttacacgtt

SEQ ID NO: 2595229 - DNA, 25 bp, Homo sapien
gaaggtcctggtgacatgtgccgag

SEQ ID NO: 2595230 - DNA, 25 bp, Homo sapien
tattttgcgaagtttgaggactcgc

SEQ ID NO: 2595231 - DNA, 25 bp, Homo sapien
agagctcctagagaccccaccctcc

SEQ ID NO: 2595232 - DNA, 25 bp, Homo sapien
cccaccctcccagcagaagaagaaa

SEQ ID NO: 2595233 - DNA, 25 bp, Homo sapien
accctcccagcagaagaagaaaagg

SEQ ID NO: 2595234 - DNA, 25 bp, Homo sapien
ctgcagagctcctagagaccccacc

SEQ ID NO: 2595235 - DNA, 25 bp, Homo sapien
gttgattagtgtgtactgcagcgcc

SEQ ID NO: 2595236 - DNA, 25 bp, Homo sapien
tggtcatggttgattagtgtgtact

SEQ ID NO: 2595237 - DNA, 25 bp, Homo sapien
catggttgattagtgtgtactgcag

SEQ ID NO: 2595238 - DNA, 25 bp, Homo sapien
tgattagtgtgtactgcagcgccat

SEQ ID NO: 2595239 - DNA, 25 bp, Homo sapien
gtttggcacaactcctattagcgac

SEQ ID NO: 2595240 - DNA, 25 bp, Homo sapien
attcccgtctttcacaaaagccctg

SEQ ID NO: 2595241 - DNA, 25 bp, Homo sapien
gacaggtcagggttcattcccgtct

SEQ ID NO: 2595242 - DNA, 25 bp, Homo sapien
gttggacttttcacacgaaatctgt

SEQ ID NO: 2595243 - DNA, 25 bp, Homo sapien
aggtaagcatccctccacatggagt

SEQ ID NO: 2595244 - DNA, 25 bp, Homo sapien
gcccctggaaagcacgcatagtcga

SEQ ID NO: 2595245 - DNA, 25 bp, Homo sapien
caaaagtagcccatagacccaaaag

SEQ ID NO: 2595246 - DNA, 25 bp, Homo sapien
aatgacgaggcaggagtcaagagcc

SEQ ID NO: 2595247 - DNA, 25 bp, Homo sapien
gttggagcctgggaaccatggaaac

SEQ ID NO: 2595248 - DNA, 25 bp, Homo sapien
tgccgaggcccctcctgaatgaggg

SEQ ID NO: 2595249 - DNA, 25 bp, Homo sapien
ggcattttccacaggacaccgggag

SEQ ID NO: 2595250 - DNA, 25 bp, Homo sapien
ctagcttttcagagagcggctgccg

SEQ ID NO: 2595251 - DNA, 25 bp, Homo sapien
cacatagttccccatggaagtaaaa

SEQ ID NO: 2595252 - DNA, 25 bp, Homo sapien
tccaggactcgcagagctttctgaa

SEQ ID NO: 2595253 - DNA, 25 bp, Homo sapien
catccaacacatagttccccatgga

SEQ ID NO: 2595254 - DNA, 25 bp, Homo sapien
tggctatcggcctgcgtctttaaga

SEQ ID NO: 2595255 - DNA, 25 bp, Homo sapien
gttggttaagactgacttggtgagc

SEQ ID NO: 2595256 - DNA, 25 bp, Homo sapien
ctgtgttggttaagactgacttggt

SEQ ID NO: 2595257 - DNA, 25 bp, Homo sapien
tgtgttggttaagactgacttggtg

SEQ ID NO: 2595258 - DNA, 25 bp, Homo sapien
tgttggttaagactgacttggtgag

SEQ ID NO: 2595259 - DNA, 25 bp, Homo sapien
gctcctgagactttgacgtaacttg

SEQ ID NO: 2595260 - DNA, 25 bp, Homo sapien
tcagcgtttgagtttccagagcggc

SEQ ID NO: 2595261 - DNA, 25 bp, Homo sapien
tgtcatcggtgcaaagggtgtcaaa

SEQ ID NO: 2595262 - DNA, 25 bp, Homo sapien
taacctcgatgtttgtgacagtcac

SEQ ID NO: 2595263 - DNA, 25 bp, Homo sapien
ggctaagatgctgttcgtccttcag

SEQ ID NO: 2595264 - DNA, 25 bp, Homo sapien
ctaagatgctgttcgtccttcagct

SEQ ID NO: 2595265 - DNA, 25 bp, Homo sapien
gctaagatgctgttcgtccttcagc

SEQ ID NO: 2595266 - DNA, 25 bp, Homo sapien
taagatgctgttcgtccttcagctg

SEQ ID NO: 2595267 - DNA, 25 bp, Homo sapien
tcgtaaaaggatcaatgcacagtgt

SEQ ID NO: 2595268 - DNA, 25 bp, Homo sapien
tcaccgcctgcgtttcatggaagag

SEQ ID NO: 2595269 - DNA, 25 bp, Homo sapien
gaggagagcaaaagagttaccccaa

SEQ ID NO: 2595270 - DNA, 25 bp, Homo sapien
gttaccccaagatggagtgccccag

SEQ ID NO: 2595271 - DNA, 25 bp, Homo sapien
gaagacgtgcgcgatgtgacagccc

SEQ ID NO: 2595272 - DNA, 25 bp, Homo sapien
cattccggggacactatgggggtca

SEQ ID NO: 2595273 - DNA, 25 bp, Homo sapien
gtgacagcccgtgagtccgtccatt

SEQ ID NO: 2595274 - DNA, 25 bp, Homo sapien
tgcgcgatgtgacagcccgtgagtc

SEQ ID NO: 2595275 - DNA, 25 bp, Homo sapien
gcagtcaggtgaaggagtaagttcc

SEQ ID NO: 2595276 - DNA, 25 bp, Homo sapien
agttactgtgtatttctgcctcctc

SEQ ID NO: 2595277 - DNA, 25 bp, Homo sapien
gctgtcatgttaagggaagtaagcc

SEQ ID NO: 2595278 - DNA, 25 bp, Homo sapien
tccagtgttccatagtacagttcac

SEQ ID NO: 2595279 - DNA, 25 bp, Homo sapien
ctctctggaggagccatcattctgg

SEQ ID NO: 2595280 - DNA, 25 bp, Homo sapien
ggagccatcattctggcctcagatt

SEQ ID NO: 2595281 - DNA, 25 bp, Homo sapien
cctctctggaggagccatcattctg

SEQ ID NO: 2595282 - DNA, 25 bp, Homo sapien
ctggaggagccatcattctggcctc

SEQ ID NO: 2595283 - DNA, 25 bp, Homo sapien
tattttcctacagagcgcggtcact

SEQ ID NO: 2595284 - DNA, 25 bp, Homo sapien
cttagaacagtttagggccacgtcg

SEQ ID NO: 2595285 - DNA, 25 bp, Homo sapien
gtcacttccagaggcgagagaggca

SEQ ID NO: 2595286 - DNA, 25 bp, Homo sapien
gccagatgcctgagaatgacacacg

SEQ ID NO: 2595287 - DNA, 25 bp, Homo sapien
gtgaccaccaagaggtccttgagga

SEQ ID NO: 2595288 - DNA, 25 bp, Homo sapien
ccttgaggatccaggtaggctgggg

SEQ ID NO: 2595289 - DNA, 25 bp, Homo sapien
taggctggggtgttagtcctgccag

SEQ ID NO: 2595290 - DNA, 25 bp, Homo sapien
tgaccaccaagaggtccttgaggat

SEQ ID NO: 2595291 - DNA, 25 bp, Homo sapien
ccgtttcccagcgctgggtcctaga

SEQ ID NO: 2595292 - DNA, 25 bp, Homo sapien
gtttcccagcgctgggtcctagagc

SEQ ID NO: 2595293 - DNA, 25 bp, Homo sapien
gcccgtttcccagcgctgggtccta

SEQ ID NO: 2595294 - DNA, 25 bp, Homo sapien
cgcccgtttcccagcgctgggtcct

SEQ ID NO: 2595295 - DNA, 25 bp, Homo sapien
tgtgcaatccacgactgcttcctgg

SEQ ID NO: 2595296 - DNA, 25 bp, Homo sapien
ggctttgcgtcatagccctccggga

SEQ ID NO: 2595297 - DNA, 25 bp, Homo sapien
gcttttccggctcatctctgaaggc

SEQ ID NO: 2595298 - DNA, 25 bp, Homo sapien
cagtccagcctcatttgtgcaatcc

SEQ ID NO: 2595299 - DNA, 25 bp, Homo sapien
gctgtatggatagacctctttgtcc

SEQ ID NO: 2595300 - DNA, 25 bp, Homo sapien
cactgcactgggcttagaacacttt

SEQ ID NO: 2595301 - DNA, 25 bp, Homo sapien
tgcctattttggacacttacgtaaa

SEQ ID NO: 2595302 - DNA, 25 bp, Homo sapien
gaatggtgctgccatgtacacgcat

SEQ ID NO: 2595303 - DNA, 25 bp, Homo sapien
aggtccgcctgctctcgggacagga

SEQ ID NO: 2595304 - DNA, 25 bp, Homo sapien
tttgcacgtgtccagtgtctggccg

SEQ ID NO: 2595305 - DNA, 25 bp, Homo sapien
gacaggagttgtgcccggcccagca

SEQ ID NO: 2595306 - DNA, 25 bp, Homo sapien
gccgatgttccttcaggtccgcctg

SEQ ID NO: 2595307 - DNA, 25 bp, Homo sapien
gtaatcttctgacccaggttgggtg

SEQ ID NO: 2595308 - DNA, 25 bp, Homo sapien
tatgatgtctccttgctacttgccc

SEQ ID NO: 2595309 - DNA, 25 bp, Homo sapien
ggtgtcaggcatgttggcatcttgc

SEQ ID NO: 2595310 - DNA, 25 bp, Homo sapien
ctagtggcctgcagatctgtgttct

SEQ ID NO: 2595311 - DNA, 25 bp, Homo sapien
gcagagctgaccaccccaaggtggt

SEQ ID NO: 2595312 - DNA, 25 bp, Homo sapien
cagcccgaggtcagggtaagggaca

SEQ ID NO: 2595313 - DNA, 25 bp, Homo sapien
ggccacaatgagcttcagcagggcc

SEQ ID NO: 2595314 - DNA, 25 bp, Homo sapien
ggcggtggggatggagacaacacct

SEQ ID NO: 2595315 - DNA, 25 bp, Homo sapien
gggtctgcacagtggagccgtccgg

SEQ ID NO: 2595316 - DNA, 25 bp, Homo sapien
agaagggcggtgagctcaagctgcg

SEQ ID NO: 2595317 - DNA, 25 bp, Homo sapien
gcggtgagctcaagctgcgggcagg

SEQ ID NO: 2595318 - DNA, 25 bp, Homo sapien
acagtggagccgtccggtctccgca

SEQ ID NO: 2595319 - DNA, 25 bp, Homo sapien
tgtgggcctcctcgggtttcgccaa

SEQ ID NO: 2595320 - DNA, 25 bp, Homo sapien
aggcgcctggcggacactcctgaag

SEQ ID NO: 2595321 - DNA, 25 bp, Homo sapien
ccttcgcctgtcttcttccgatgct

SEQ ID NO: 2595322 - DNA, 25 bp, Homo sapien
tcttccgatgctcctctgctcgtcc

SEQ ID NO: 2595323 - DNA, 25 bp, Homo sapien
ccgacttcgctgcagtgtttgggag

SEQ ID NO: 2595324 - DNA, 25 bp, Homo sapien
tccttgacgcactcggcgtgcttgg

SEQ ID NO: 2595325 - DNA, 25 bp, Homo sapien
tgcgccccgccatcaagaggatggg

SEQ ID NO: 2595326 - DNA, 25 bp, Homo sapien
tctgagggtccagacagacgccaga

SEQ ID NO: 2595327 - DNA, 25 bp, Homo sapien
cgcctgtgcactcatatgcttcata

SEQ ID NO: 2595328 - DNA, 25 bp, Homo sapien
cggaaattcgttcgctgggcctcct

SEQ ID NO: 2595329 - DNA, 25 bp, Homo sapien
ttctggtagccagagtgggcatgcc

SEQ ID NO: 2595330 - DNA, 25 bp, Homo sapien
caaggcggatcacccaatgaatgac

SEQ ID NO: 2595331 - DNA, 25 bp, Homo sapien
tggacccagtccgacttccccatga

SEQ ID NO: 2595332 - DNA, 25 bp, Homo sapien
gcaccagtgggtgcagcgggctctg

SEQ ID NO: 2595333 - DNA, 25 bp, Homo sapien
tggacatcctggacacacgcctata

SEQ ID NO: 2595334 - DNA, 25 bp, Homo sapien
gacacacgcctatactggacccagt

SEQ ID NO: 2595335 - DNA, 25 bp, Homo sapien
caagcccagcgcaacaaaggaaaac

SEQ ID NO: 2595336 - DNA, 25 bp, Homo sapien
actacgaaccggctgtccaaggctg

SEQ ID NO: 2595337 - DNA, 25 bp, Homo sapien
tctagaatgtaatgggacgccccac

SEQ ID NO: 2595338 - DNA, 25 bp, Homo sapien
gacgtcgcagcctccgggttgttgt

SEQ ID NO: 2595339 - DNA, 25 bp, Homo sapien
gaagaagacgcgcacagtcttctcc

SEQ ID NO: 2595340 - DNA, 25 bp, Homo sapien
agtcttctcccgcagccaggtcttc

SEQ ID NO: 2595341 - DNA, 25 bp, Homo sapien
acacgcggcggcgttggcgtgggcg

SEQ ID NO: 2595342 - DNA, 25 bp, Homo sapien
tggaatccaccttcgacctgaagcg

SEQ ID NO: 2595343 - DNA, 25 bp, Homo sapien
tcatcgagaacctgctggcggccga

SEQ ID NO: 2595344 - DNA, 25 bp, Homo sapien
tccttcctcatcgagaacctgctgg

SEQ ID NO: 2595345 - DNA, 25 bp, Homo sapien
cgaccccgaagacgaggacgccgag

SEQ ID NO: 2595346 - DNA, 25 bp, Homo sapien
gaggacgccgagcaggcgcggcggc

SEQ ID NO: 2595347 - DNA, 25 bp, Homo sapien
cagcccgcgaccccccgcccctgct

SEQ ID NO: 2595348 - DNA, 25 bp, Homo sapien
agcccgcgaccccccgcccctgctg

SEQ ID NO: 2595349 - DNA, 25 bp, Homo sapien
ggcagatggtgtggtgcttagagga

SEQ ID NO: 2595350 - DNA, 25 bp, Homo sapien
ctgtctgatgacaatctcggcagcc

SEQ ID NO: 2595351 - DNA, 25 bp, Homo sapien
gggtgcggcagatggtgtggtgctt

SEQ ID NO: 2595352 - DNA, 25 bp, Homo sapien
gtctgatgacaatctcggcagccag

SEQ ID NO: 2595353 - DNA, 25 bp, Homo sapien
ggccctagcttgtcatattcttgca

SEQ ID NO: 2595354 - DNA, 25 bp, Homo sapien
tcccgaagatatcaggtgctaaacc

SEQ ID NO: 2595355 - DNA, 25 bp, Homo sapien
aaacctcagcactatttcccgaaga

SEQ ID NO: 2595356 - DNA, 25 bp, Homo sapien
tctggtgtctaaggaggacttgctc

SEQ ID NO: 2595357 - DNA, 25 bp, Homo sapien
tgctgccacactggcttctctgatg

SEQ ID NO: 2595358 - DNA, 25 bp, Homo sapien
cttctgagaaacccagccatgctgc

SEQ ID NO: 2595359 - DNA, 25 bp, Homo sapien
tggcttctgagaaacccagccatgc

SEQ ID NO: 2595360 - DNA, 25 bp, Homo sapien
ggagcccacccctgttggcttctga

SEQ ID NO: 2595361 - DNA, 25 bp, Homo sapien
tcatctcggtgctgtgagtccgccg

SEQ ID NO: 2595362 - DNA, 25 bp, Homo sapien
cataggcacagggattcacgtgggc

SEQ ID NO: 2595363 - DNA, 25 bp, Homo sapien
aacagactcattcccctaaaggtgg

SEQ ID NO: 2595364 - DNA, 25 bp, Homo sapien
tgtcagatttgatgggagcccagtc

SEQ ID NO: 2595365 - DNA, 25 bp, Homo sapien
ttttctcaggctcaattttcctcca

SEQ ID NO: 2595366 - DNA, 25 bp, Homo sapien
ccatgaggaccaggcgctgggtaac

SEQ ID NO: 2595367 - DNA, 25 bp, Homo sapien
cttggcgtcagcactgggaaatcgg

SEQ ID NO: 2595368 - DNA, 25 bp, Homo sapien
aggtgactgactcccatacatctct

SEQ ID NO: 2595369 - DNA, 25 bp, Homo sapien
agtgtagttcctccagactgttcgg

SEQ ID NO: 2595370 - DNA, 25 bp, Homo sapien
gagacaactcgcagcttcgcggtcg

SEQ ID NO: 2595371 - DNA, 25 bp, Homo sapien
taacagcgctcaggtgacgcaactt

SEQ ID NO: 2595372 - DNA, 25 bp, Homo sapien
gatagcgtcttcgtaagcgtctgtg

SEQ ID NO: 2595373 - DNA, 25 bp, Homo sapien
aacagggaaggaagcgtcttatccg

SEQ ID NO: 2595374 - DNA, 25 bp, Homo sapien
gaggtcacatcagagccttgagcaa

SEQ ID NO: 2595375 - DNA, 25 bp, Homo sapien
ttgagcaaccgagaaagaaacccag

SEQ ID NO: 2595376 - DNA, 25 bp, Homo sapien
gtcttatccggcttaaaacgcgcag

SEQ ID NO: 2595377 - DNA, 25 bp, Homo sapien
tgctcgctccgtcgcggcatggact

SEQ ID NO: 2595378 - DNA, 25 bp, Homo sapien
tcctcgggaactgcgccgcggtagt

SEQ ID NO: 2595379 - DNA, 25 bp, Homo sapien
aggcactcgaccatgtccaagtctg

SEQ ID NO: 2595380 - DNA, 25 bp, Homo sapien
agacagtaattcctgcccgggaggg

SEQ ID NO: 2595381 - DNA, 25 bp, Homo sapien
ccctgggcccattttgagaacggcg

SEQ ID NO: 2595382 - DNA, 25 bp, Homo sapien
cctgggcccattttgagaacggcgt

SEQ ID NO: 2595383 - DNA, 25 bp, Homo sapien
gccctgggcccattttgagaacggc

SEQ ID NO: 2595384 - DNA, 25 bp, Homo sapien
tgggcccattttgagaacggcgtta

SEQ ID NO: 2595385 - DNA, 25 bp, Homo sapien
tccttcgccagaggggagcgccagc

SEQ ID NO: 2595386 - DNA, 25 bp, Homo sapien
cattgtccccagtggcgcagcgtgt

SEQ ID NO: 2595387 - DNA, 25 bp, Homo sapien
cagctcattggggtcgcattgtccc

SEQ ID NO: 2595388 - DNA, 25 bp, Homo sapien
gcgctcggtctctgcccaggagtcc

SEQ ID NO: 2595389 - DNA, 25 bp, Homo sapien
tgatcttgggcactgccataccctg

SEQ ID NO: 2595390 - DNA, 25 bp, Homo sapien
accatgatcttgggcactgccatac

SEQ ID NO: 2595391 - DNA, 25 bp, Homo sapien
ccatgatcttgggcactgccatacc

SEQ ID NO: 2595392 - DNA, 25 bp, Homo sapien
aaccatgatcttgggcactgccata

SEQ ID NO: 2595393 - DNA, 25 bp, Homo sapien
acagcgcctcttctcagcactcccc

SEQ ID NO: 2595394 - DNA, 25 bp, Homo sapien
tcaacagcgcctcttctcagcactc

SEQ ID NO: 2595395 - DNA, 25 bp, Homo sapien
caacagcgcctcttctcagcactcc

SEQ ID NO: 2595396 - DNA, 25 bp, Homo sapien
agcgcctcttctcagcactccccac

SEQ ID NO: 2595397 - DNA, 25 bp, Homo sapien
tctgaactccacagatggcaacttg

SEQ ID NO: 2595398 - DNA, 25 bp, Homo sapien
tccacagatggcaacttgacccctt

SEQ ID NO: 2595399 - DNA, 25 bp, Homo sapien
ctgaactccacagatggcaacttga

SEQ ID NO: 2595400 - DNA, 25 bp, Homo sapien
gcccgagggccaggaaagccttgga

SEQ ID NO: 2595401 - DNA, 25 bp, Homo sapien
tccaaagcttgcaccagcccacaag

SEQ ID NO: 2595402 - DNA, 25 bp, Homo sapien
ggcaaggcggggctctcagagatgc

SEQ ID NO: 2595403 - DNA, 25 bp, Homo sapien
cttgatgctctttctgctggaaggt

SEQ ID NO: 2595404 - DNA, 25 bp, Homo sapien
aaagccggtgggaggtgtggcggct

SEQ ID NO: 2595405 - DNA, 25 bp, Homo sapien
gtccccgccgcacctgagggctcta

SEQ ID NO: 2595406 - DNA, 25 bp, Homo sapien
agggccaggctgtctctcgtccccg

SEQ ID NO: 2595407 - DNA, 25 bp, Homo sapien
cagcatccccggcactccgggtgcc

SEQ ID NO: 2595408 - DNA, 25 bp, Homo sapien
tctggtgacagcatccccggcactc

SEQ ID NO: 2595409 - DNA, 25 bp, Homo sapien
agcaggttcctttcgaacccctgtg

SEQ ID NO: 2595410 - DNA, 25 bp, Homo sapien
gatggaggctgctgcgaatccgcat

SEQ ID NO: 2595411 - DNA, 25 bp, Homo sapien
tgtggacctgtccagttctagcagg

SEQ ID NO: 2595412 - DNA, 25 bp, Homo sapien
tgggctgggcttttggactctctga

SEQ ID NO: 2595413 - DNA, 25 bp, Homo sapien
gggagaatccagtagcctcaagaca

SEQ ID NO: 2595414 - DNA, 25 bp, Homo sapien
gcaggtcatctaccggttggaaatt

SEQ ID NO: 2595415 - DNA, 25 bp, Homo sapien
cgtagctggaagatgctctctgtct

SEQ ID NO: 2595416 - DNA, 25 bp, Homo sapien
gactgcaggtcatctaccggttgga

SEQ ID NO: 2595417 - DNA, 25 bp, Homo sapien
ccgaggcacgggaccaacacctggg

SEQ ID NO: 2595418 - DNA, 25 bp, Homo sapien
ccgtaagtgcgtgaagatgccacaa

SEQ ID NO: 2595419 - DNA, 25 bp, Homo sapien
gagcaccgaggcacgggaccaacac

SEQ ID NO: 2595420 - DNA, 25 bp, Homo sapien
tgccacaatccgcagctctgctggg

SEQ ID NO: 2595421 - DNA, 25 bp, Homo sapien
aggcatcaggcaggggtctggcccc

SEQ ID NO: 2595422 - DNA, 25 bp, Homo sapien
cttccaggcatcaggcaggggtctg

SEQ ID NO: 2595423 - DNA, 25 bp, Homo sapien
ccaggcatcaggcaggggtctggcc

SEQ ID NO: 2595424 - DNA, 25 bp, Homo sapien
ttccaggcatcaggcaggggtctgg

SEQ ID NO: 2595425 - DNA, 25 bp, Homo sapien
tcactttgctgaataaatccgatgg

SEQ ID NO: 2595426 - DNA, 25 bp, Homo sapien
gcatggacactcacactttctgcag

SEQ ID NO: 2595427 - DNA, 25 bp, Homo sapien
gcacagcggcacacagtaactgtca

SEQ ID NO: 2595428 - DNA, 25 bp, Homo sapien
gtgtcggtcccacccaggtgacaag

SEQ ID NO: 2595429 - DNA, 25 bp, Homo sapien
gacgctctggaatgtaaaccttcat

SEQ ID NO: 2595430 - DNA, 25 bp, Homo sapien
gtggacgctctggaatgtaaacctt

SEQ ID NO: 2595431 - DNA, 25 bp, Homo sapien
tggtggacgctctggaatgtaaacc

SEQ ID NO: 2595432 - DNA, 25 bp, Homo sapien
ggacgctctggaatgtaaaccttca

SEQ ID NO: 2595433 - DNA, 25 bp, Homo sapien
gaggcctcgacaggcggtggccggg

SEQ ID NO: 2595434 - DNA, 25 bp, Homo sapien
aagctgacctcggaggcctcgacag

SEQ ID NO: 2595435 - DNA, 25 bp, Homo sapien
gctgacctcggaggcctcgacaggc

SEQ ID NO: 2595436 - DNA, 25 bp, Homo sapien
ctcggaggcctcgacaggcggtggc

SEQ ID NO: 2595437 - DNA, 25 bp, Homo sapien
agaaggcagaatggctctggagccc

SEQ ID NO: 2595438 - DNA, 25 bp, Homo sapien
acccaggactcttggaacataaacg

SEQ ID NO: 2595439 - DNA, 25 bp, Homo sapien
tcttggaacataaacgagggtgagg

SEQ ID NO: 2595440 - DNA, 25 bp, Homo sapien
ggcagaatggctctggagcccactg

SEQ ID NO: 2595441 - DNA, 25 bp, Homo sapien
cgaacctggacccggtgaggcgtca

SEQ ID NO: 2595442 - DNA, 25 bp, Homo sapien
cgaggcgatgcctgcttcccatgaa

SEQ ID NO: 2595443 - DNA, 25 bp, Homo sapien
aggcgtcaccgaggcgatgcctgct

SEQ ID NO: 2595444 - DNA, 25 bp, Homo sapien
cctggacccggtgaggcgtcaccga

SEQ ID NO: 2595445 - DNA, 25 bp, Homo sapien
caattgtgggtgtcgttctggtgtc

SEQ ID NO: 2595446 - DNA, 25 bp, Homo sapien
ggagtcctcgtcacagcgtctccag

SEQ ID NO: 2595447 - DNA, 25 bp, Homo sapien
gttctctgaacagatggaaggagca

SEQ ID NO: 2595448 - DNA, 25 bp, Homo sapien
caaggtcacgaagcctgctgagcct

SEQ ID NO: 2595449 - DNA, 25 bp, Homo sapien
agctggctctgtgcacccgacggtt

SEQ ID NO: 2595450 - DNA, 25 bp, Homo sapien
ccctggtagcgccaggtgggcacct

SEQ ID NO: 2595451 - DNA, 25 bp, Homo sapien
gacataatccaagtggggaccctgg

SEQ ID NO: 2595452 - DNA, 25 bp, Homo sapien
tgacagctggctctgtgcacccgac

SEQ ID NO: 2595453 - DNA, 25 bp, Homo sapien
gacacagggcgctgtagacagcagc

SEQ ID NO: 2595454 - DNA, 25 bp, Homo sapien
aggacacagggcgctgtagacagca

SEQ ID NO: 2595455 - DNA, 25 bp, Homo sapien
acacagggcgctgtagacagcagca

SEQ ID NO: 2595456 - DNA, 25 bp, Homo sapien
cacagggcgctgtagacagcagcag

SEQ ID NO: 2595457 - DNA, 25 bp, Homo sapien
tgcataaatcactgcatttaccacg

SEQ ID NO: 2595458 - DNA, 25 bp, Homo sapien
tgcaagagtcagcatgaataattca

SEQ ID NO: 2595459 - DNA, 25 bp, Homo sapien
ctgcatttaccacgcatttccttga

SEQ ID NO: 2595460 - DNA, 25 bp, Homo sapien
tccttgatggggtgtcaagctcgga

SEQ ID NO: 2595461 - DNA, 25 bp, Homo sapien
gggcattgccgcagccttgtcagcg

SEQ ID NO: 2595462 - DNA, 25 bp, Homo sapien
ttgtcagcgagctgtacatcttagg

SEQ ID NO: 2595463 - DNA, 25 bp, Homo sapien
agtgcgtactgcctgatgttccaca

SEQ ID NO: 2595464 - DNA, 25 bp, Homo sapien
gcgtactgcctgatgttccacaggt

SEQ ID NO: 2595465 - DNA, 25 bp, Homo sapien
aatgttcgtcggtaggactgggtct

SEQ ID NO: 2595466 - DNA, 25 bp, Homo sapien
gcacacagcaatactctgtgaatgt

SEQ ID NO: 2595467 - DNA, 25 bp, Homo sapien
tgatggctttcttgcagtggcttag

SEQ ID NO: 2595468 - DNA, 25 bp, Homo sapien
tcaagggatcccagaagagcgtcca

SEQ ID NO: 2595469 - DNA, 25 bp, Homo sapien
gatcggtacaatgtaccagtcaccc

SEQ ID NO: 2595470 - DNA, 25 bp, Homo sapien
gcccatctgatgttggtgccagtct

SEQ ID NO: 2595471 - DNA, 25 bp, Homo sapien
actgtccgtggtatcatcccactct

SEQ ID NO: 2595472 - DNA, 25 bp, Homo sapien
tcccaggctcccgatcggtacaatg

SEQ ID NO: 2595473 - DNA, 25 bp, Homo sapien
cccccacttctcctccatggcttct

SEQ ID NO: 2595474 - DNA, 25 bp, Homo sapien
ccacttctcctccatggcttcttct

SEQ ID NO: 2595475 - DNA, 25 bp, Homo sapien
gccccccacttctcctccatggctt

SEQ ID NO: 2595476 - DNA, 25 bp, Homo sapien
cccacttctcctccatggcttcttc

SEQ ID NO: 2595477 - DNA, 25 bp, Homo sapien
tgctctttgggggacttcacagcac

SEQ ID NO: 2595478 - DNA, 25 bp, Homo sapien
ttgggggacttcacagcacgccctc

SEQ ID NO: 2595479 - DNA, 25 bp, Homo sapien
tctttgggggacttcacagcacgcc

SEQ ID NO: 2595480 - DNA, 25 bp, Homo sapien
tttgggggacttcacagcacgccct

SEQ ID NO: 2595481 - DNA, 25 bp, Homo sapien
tgaaatcaagatggcagtgtctgcc

SEQ ID NO: 2595482 - DNA, 25 bp, Homo sapien
agatggcagtgtctgcccatctcat

SEQ ID NO: 2595483 - DNA, 25 bp, Homo sapien
ccacagatgggccaatgaaatcaag

SEQ ID NO: 2595484 - DNA, 25 bp, Homo sapien
cccagcccacagatgggccaatgaa

SEQ ID NO: 2595485 - DNA, 25 bp, Homo sapien
tcctcctcctgtatctgccagagga

SEQ ID NO: 2595486 - DNA, 25 bp, Homo sapien
ctcctcctgtatctgccagaggaag

SEQ ID NO: 2595487 - DNA, 25 bp, Homo sapien
cctcctcctgtatctgccagaggaa

SEQ ID NO: 2595488 - DNA, 25 bp, Homo sapien
aaaggcccattagaggaaggtgagg

SEQ ID NO: 2595489 - DNA, 25 bp, Homo sapien
cctgggtcctccacgaacgaaagtg

SEQ ID NO: 2595490 - DNA, 25 bp, Homo sapien
tagcggtacctctaggcggtcagag

SEQ ID NO: 2595491 - DNA, 25 bp, Homo sapien
ctgcagggatcctggcgtccctggt

SEQ ID NO: 2595492 - DNA, 25 bp, Homo sapien
aaaaaaccgcagctttgagaagcgg

SEQ ID NO: 2595493 - DNA, 25 bp, Homo sapien
gagcgccttgggcccgctcgtgtta

SEQ ID NO: 2595494 - DNA, 25 bp, Homo sapien
catccatggttcgagtccagggagc

SEQ ID NO: 2595495 - DNA, 25 bp, Homo sapien
tccagggagcgccttgggctgctag

SEQ ID NO: 2595496 - DNA, 25 bp, Homo sapien
gtccactaccaccaatgggtgaaat

SEQ ID NO: 2595497 - DNA, 25 bp, Homo sapien
tccactaccaccaatgggtgaaatc

SEQ ID NO: 2595498 - DNA, 25 bp, Homo sapien
cacaccaaccaacgtacaaattgtt

SEQ ID NO: 2595499 - DNA, 25 bp, Homo sapien
caaccaacgtacaaattgtttgctc

SEQ ID NO: 2595500 - DNA, 25 bp, Homo sapien
aatgcaaacacaccaaccaacgtac

SEQ ID NO: 2595501 - DNA, 25 bp, Homo sapien
attcaaattcaaactggtgctgcac

SEQ ID NO: 2595502 - DNA, 25 bp, Homo sapien
ggatggagacgtccaggccctgcca

SEQ ID NO: 2595503 - DNA, 25 bp, Homo sapien
catggctgttactgaccgggtcagg

SEQ ID NO: 2595504 - DNA, 25 bp, Homo sapien
cttggcagttcacagagggaggggt

SEQ ID NO: 2595505 - DNA, 25 bp, Homo sapien
tggcccatggctgttactgaccggg

SEQ ID NO: 2595506 - DNA, 25 bp, Homo sapien
gacctgcccagggaacgccaaagaa

SEQ ID NO: 2595507 - DNA, 25 bp, Homo sapien
cctgtccgtgtagctcctcaaagct

SEQ ID NO: 2595508 - DNA, 25 bp, Homo sapien
ccagggaacgccaaagaaccatctc

SEQ ID NO: 2595509 - DNA, 25 bp, Homo sapien
agttggtgtcctgtccgtgtagctc

SEQ ID NO: 2595510 - DNA, 25 bp, Homo sapien
cacatcaatgctgatgccttagcta

SEQ ID NO: 2595511 - DNA, 25 bp, Homo sapien
ttctgtttgcaaggataatatcaaa

SEQ ID NO: 2595512 - DNA, 25 bp, Homo sapien
tcattcctaggccaactttgaccag

SEQ ID NO: 2595513 - DNA, 25 bp, Homo sapien
tcttgaataggtataataagtccac

SEQ ID NO: 2595514 - DNA, 25 bp, Homo sapien
ctctgaaatttctagggatgttctt

SEQ ID NO: 2595515 - DNA, 25 bp, Homo sapien
tcaaacatagtcaagagtacaactg

SEQ ID NO: 2595516 - DNA, 25 bp, Homo sapien
gttacaagaactgagtgcagattaa

SEQ ID NO: 2595517 - DNA, 25 bp, Homo sapien
caactgtgatatttcatggaagtta

SEQ ID NO: 2595518 - DNA, 25 bp, Homo sapien
catgccatgcaaaggaaggaatatt

SEQ ID NO: 2595519 - DNA, 25 bp, Homo sapien
ctttgttttcaccattcctgcatgc

SEQ ID NO: 2595520 - DNA, 25 bp, Homo sapien
tcctgcatgccatgcaaaggaagga

SEQ ID NO: 2595521 - DNA, 25 bp, Homo sapien
ttgttttcaccattcctgcatgcca

SEQ ID NO: 2595522 - DNA, 25 bp, Homo sapien
tagacatgttctatggagccgtggg

SEQ ID NO: 2595523 - DNA, 25 bp, Homo sapien
tggaacccgtgtagacatgttctat

SEQ ID NO: 2595524 - DNA, 25 bp, Homo sapien
gacatgttctatggagccgtgggct

SEQ ID NO: 2595525 - DNA, 25 bp, Homo sapien
gtatctggaacccgtgtagacatgt

SEQ ID NO: 2595526 - DNA, 25 bp, Homo sapien
gccagacgtggtacatcagttcttc

SEQ ID NO: 2595527 - DNA, 25 bp, Homo sapien
cagacgtggtacatcagttcttcta

SEQ ID NO: 2595528 - DNA, 25 bp, Homo sapien
gacgtggtacatcagttcttctacc

SEQ ID NO: 2595529 - DNA, 25 bp, Homo sapien
tgccagacgtggtacatcagttctt

SEQ ID NO: 2595530 - DNA, 25 bp, Homo sapien
actcattggcaaagagcttactgat

SEQ ID NO: 2595531 - DNA, 25 bp, Homo sapien
cacatgttgcctgttctctgtgact

SEQ ID NO: 2595532 - DNA, 25 bp, Homo sapien
cattggcaaagagcttactgatgtt

SEQ ID NO: 2595533 - DNA, 25 bp, Homo sapien
tatgaagatgatgtccagaatgttg

SEQ ID NO: 2595534 - DNA, 25 bp, Homo sapien
ggataagcattcagaccctcgtagc

SEQ ID NO: 2595535 - DNA, 25 bp, Homo sapien
ataagcattcagaccctcgtagcag

SEQ ID NO: 2595536 - DNA, 25 bp, Homo sapien
atgtgagggagaagcattcagagca

SEQ ID NO: 2595537 - DNA, 25 bp, Homo sapien
ggagaagcattcagagcacagcagg

SEQ ID NO: 2595538 - DNA, 25 bp, Homo sapien
acagtgttctggaatactaggtgag

SEQ ID NO: 2595539 - DNA, 25 bp, Homo sapien
gttctggaatcctatatgacggacc

SEQ ID NO: 2595540 - DNA, 25 bp, Homo sapien
tggaatactaggtgagggagaaata

SEQ ID NO: 2595541 - DNA, 25 bp, Homo sapien
ggaccaacattcagacccttgcaac

SEQ ID NO: 2595542 - DNA, 25 bp, Homo sapien
ccacagtcttggatatcatcttctg

SEQ ID NO: 2595543 - DNA, 25 bp, Homo sapien
cccacagtcttggatatcatcttct

SEQ ID NO: 2595544 - DNA, 25 bp, Homo sapien
aatactgtgagaatgaccgaaatgt

SEQ ID NO: 2595545 - DNA, 25 bp, Homo sapien
ctgtgagaatgaccgaaatgtgaca

SEQ ID NO: 2595546 - DNA, 25 bp, Homo sapien
cttaaaatactgtgagaatgaccga

SEQ ID NO: 2595547 - DNA, 25 bp, Homo sapien
tttgatagactctgacaatctctat

SEQ ID NO: 2595548 - DNA, 25 bp, Homo sapien
agtgtattgacacagcaacctgaca

SEQ ID NO: 2595549 - DNA, 25 bp, Homo sapien
gacacagcaacctgacataaagata

SEQ ID NO: 2595550 - DNA, 25 bp, Homo sapien
tcaatttagaaactatgatctccta

SEQ ID NO: 2595551 - DNA, 25 bp, Homo sapien
tagaaactatgatctcctaagtgta

SEQ ID NO: 2595552 - DNA, 25 bp, Homo sapien
acgagtagtctagtaaaggctttgc

SEQ ID NO: 2595553 - DNA, 25 bp, Homo sapien
tggcctctagttagcctcacgagta

SEQ ID NO: 2595554 - DNA, 25 bp, Homo sapien
ggcttttgcttcagaccattcatgg

SEQ ID NO: 2595555 - DNA, 25 bp, Homo sapien
gacctgataagatgttgtccttcca

SEQ ID NO: 2595556 - DNA, 25 bp, Homo sapien
agtcttgatgcccttccaggttgaa

SEQ ID NO: 2595557 - DNA, 25 bp, Homo sapien
gagtcttgatgcccttccaggttga

SEQ ID NO: 2595558 - DNA, 25 bp, Homo sapien
tggggtttctctgttttgatcaggg

SEQ ID NO: 2595559 - DNA, 25 bp, Homo sapien
tctctgttttgatcagggtggtctc

SEQ ID NO: 2595560 - DNA, 25 bp, Homo sapien
tttctctgttttgatcagggtggtc

SEQ ID NO: 2595561 - DNA, 25 bp, Homo sapien
ggtttctctgttttgatcagggtgg

SEQ ID NO: 2595562 - DNA, 25 bp, Homo sapien
agtttttagaaactgcatcaccatt

SEQ ID NO: 2595563 - DNA, 25 bp, Homo sapien
tctagaattttgcatgcttgtgaag

SEQ ID NO: 2595564 - DNA, 25 bp, Homo sapien
tgttcccgagtgtttttcatggtcc

SEQ ID NO: 2595565 - DNA, 25 bp, Homo sapien
tctttcatgaatcttctattctaga

SEQ ID NO: 2595566 - DNA, 25 bp, Homo sapien
tgtaagactatgaacccaaagttta

SEQ ID NO: 2595567 - DNA, 25 bp, Homo sapien
gtatggttccgagtgtggagggacc

SEQ ID NO: 2595568 - DNA, 25 bp, Homo sapien
tcagaagatccagtcatcagattct

SEQ ID NO: 2595569 - DNA, 25 bp, Homo sapien
tgagttgtaagactatgaacccaaa

SEQ ID NO: 2595570 - DNA, 25 bp, Homo sapien
tggaacaaggacttgagtagaaggt

SEQ ID NO: 2595571 - DNA, 25 bp, Homo sapien
aaattgtgcatctaatgtctaccaa

SEQ ID NO: 2595572 - DNA, 25 bp, Homo sapien
tgtctaccaattaatgtacttgtag

SEQ ID NO: 2595573 - DNA, 25 bp, Homo sapien
gatgtatcttatcttaacttgagtc

SEQ ID NO: 2595574 - DNA, 25 bp, Homo sapien
taatgtgtctagagtgttgggcaga

SEQ ID NO: 2595575 - DNA, 25 bp, Homo sapien
tgttgggaatatcatttcaacctcc

SEQ ID NO: 2595576 - DNA, 25 bp, Homo sapien
cttgcatgcaaatctccaactcgga

SEQ ID NO: 2595577 - DNA, 25 bp, Homo sapien
tcctgctccgcccaatcctattgct

SEQ ID NO: 2595578 - DNA, 25 bp, Homo sapien
ttgctttcactcttccacaggtgtt

SEQ ID NO: 2595579 - DNA, 25 bp, Homo sapien
aatgcctcaaaagaaggtctccaga

SEQ ID NO: 2595580 - DNA, 25 bp, Homo sapien
gaaggtctccagagtgttgctctac

SEQ ID NO: 2595581 - DNA, 25 bp, Homo sapien
agaaggtctccagagtgttgctcta

SEQ ID NO: 2595582 - DNA, 25 bp, Homo sapien
tctggtggtgaaatgcctcaaaaga

SEQ ID NO: 2595583 - DNA, 25 bp, Homo sapien
gattggcatacatattcctctgcct

SEQ ID NO: 2595584 - DNA, 25 bp, Homo sapien
gtttctcactgttacacccaggcat

SEQ ID NO: 2595585 - DNA, 25 bp, Homo sapien
ctggctgcctggattggcatacata

SEQ ID NO: 2595586 - DNA, 25 bp, Homo sapien
ttgtttctcactgttacacccaggc

SEQ ID NO: 2595587 - DNA, 25 bp, Homo sapien
tatcaacattggttccaacatcatt

SEQ ID NO: 2595588 - DNA, 25 bp, Homo sapien
tttcaaaattatcaacattggttcc

SEQ ID NO: 2595589 - DNA, 25 bp, Homo sapien
tgcttatttattaaacctgggataa

SEQ ID NO: 2595590 - DNA, 25 bp, Homo sapien
taattgcccgacttctatcatctga

SEQ ID NO: 2595591 - DNA, 25 bp, Homo sapien
tccaatccctctataaccttggaga

SEQ ID NO: 2595592 - DNA, 25 bp, Homo sapien
ccaatccctctataaccttggagat

SEQ ID NO: 2595593 - DNA, 25 bp, Homo sapien
tacttgttgaagtatcacgatctag

SEQ ID NO: 2595594 - DNA, 25 bp, Homo sapien
cacacttatggagggtaggccccag

SEQ ID NO: 2595595 - DNA, 25 bp, Homo sapien
ggctgctgcacacttatggagggta

SEQ ID NO: 2595596 - DNA, 25 bp, Homo sapien
acgatctagtaggaagatgtgcctc

SEQ ID NO: 2595597 - DNA, 25 bp, Homo sapien
gagctattgcctggttagaagcagc

SEQ ID NO: 2595598 - DNA, 25 bp, Homo sapien
tgtggagagagctattgcctggtta

SEQ ID NO: 2595599 - DNA, 25 bp, Homo sapien
ctgggttgacctgaaaaaggaactg

SEQ ID NO: 2595600 - DNA, 25 bp, Homo sapien
tttcaaagcacggtgtggagagagc

SEQ ID NO: 2595601 - DNA, 25 bp, Homo sapien
ctaagtttgagaaagtttgtctgtc

SEQ ID NO: 2595602 - DNA, 25 bp, Homo sapien
taagtttgagaaagtttgtctgtct

SEQ ID NO: 2595603 - DNA, 25 bp, Homo sapien
agtctaagtttgagaaagtttgtct

SEQ ID NO: 2595604 - DNA, 25 bp, Homo sapien
gtttgagaaagtttgtctgtcttga

SEQ ID NO: 2595605 - DNA, 25 bp, Homo sapien
tgtcgccagagtctaagttctacgt

SEQ ID NO: 2595606 - DNA, 25 bp, Homo sapien
aaatgcccctttttcgctgcgcagt

SEQ ID NO: 2595607 - DNA, 25 bp, Homo sapien
tacgtgttgctcatgaaatgcccct

SEQ ID NO: 2595608 - DNA, 25 bp, Homo sapien
gaataggaaccttggttgtcgccag

SEQ ID NO: 2595609 - DNA, 25 bp, Homo sapien
ttctaatgattgactccctattgcc

SEQ ID NO: 2595610 - DNA, 25 bp, Homo sapien
caaataagccagatgtcaaggagag

SEQ ID NO: 2595611 - DNA, 25 bp, Homo sapien
ttagaaggggtcacaaataagccag

SEQ ID NO: 2595612 - DNA, 25 bp, Homo sapien
tattgcctgctaaatacagaccaac

SEQ ID NO: 2595613 - DNA, 25 bp, Homo sapien
gatggctggtatataaacaagctct

SEQ ID NO: 2595614 - DNA, 25 bp, Homo sapien
cattccccaagggagctttaaatat

SEQ ID NO: 2595615 - DNA, 25 bp, Homo sapien
gatgaaatttaaaactggagtcgta

SEQ ID NO: 2595616 - DNA, 25 bp, Homo sapien
gcaggcctttgcttggaacagttta

SEQ ID NO: 2595617 - DNA, 25 bp, Homo sapien
caaggctgataggtgttaatagaac

SEQ ID NO: 2595618 - DNA, 25 bp, Homo sapien
cctgatgaatgcttatggaactgat

SEQ ID NO: 2595619 - DNA, 25 bp, Homo sapien
tcttactccgagaaggtgcctgatg

SEQ ID NO: 2595620 - DNA, 25 bp, Homo sapien
aatgcagtcggctatttgggttctc

SEQ ID NO: 2595621 - DNA, 25 bp, Homo sapien
tcacaattcgaatttggaagaaaga

SEQ ID NO: 2595622 - DNA, 25 bp, Homo sapien
ttcacaattcgaatttggaagaaag

SEQ ID NO: 2595623 - DNA, 25 bp, Homo sapien
ctatcaattcacaattcgaatttgg

SEQ ID NO: 2595624 - DNA, 25 bp, Homo sapien
tcaattcacaattcgaatttggaag

SEQ ID NO: 2595625 - DNA, 25 bp, Homo sapien
tcttggaggtattgatttaggtggt

SEQ ID NO: 2595626 - DNA, 25 bp, Homo sapien
cttctgccctcgagagaagcggtct

SEQ ID NO: 2595627 - DNA, 25 bp, Homo sapien
gtctgcatgtgcccgccgtagccgt

SEQ ID NO: 2595628 - DNA, 25 bp, Homo sapien
tccacggagcgctggagaccaccgt

SEQ ID NO: 2595629 - DNA, 25 bp, Homo sapien
gatgtgtcccgtgccgagcaggctt

SEQ ID NO: 2595630 - DNA, 25 bp, Homo sapien
ccgtgccgagcaggctttttcctgc

SEQ ID NO: 2595631 - DNA, 25 bp, Homo sapien
tgccaagagaagctagtaaccaaaa

SEQ ID NO: 2595632 - DNA, 25 bp, Homo sapien
caagagaagctagtaaccaaaaaca

SEQ ID NO: 2595633 - DNA, 25 bp, Homo sapien
agacgctagcgggagcttcctcctc

SEQ ID NO: 2595634 - DNA, 25 bp, Homo sapien
accaagtagaaagggtcgccgctgc

SEQ ID NO: 2595635 - DNA, 25 bp, Homo sapien
tgcggcacgcgagggagctagtcgc

SEQ ID NO: 2595636 - DNA, 25 bp, Homo sapien
cttcctccagccgcgggaagtggga

SEQ ID NO: 2595637 - DNA, 25 bp, Homo sapien
gacatccttgcgcttcacgcaacat

SEQ ID NO: 2595638 - DNA, 25 bp, Homo sapien
ccatccctagaccacatctcggccc

SEQ ID NO: 2595639 - DNA, 25 bp, Homo sapien
cccgatggacttctcttcgcccact

SEQ ID NO: 2595640 - DNA, 25 bp, Homo sapien
aggatgggtgttccgcgcagcttcc

SEQ ID NO: 2595641 - DNA, 25 bp, Homo sapien
ccgtagggcagtcgtcgttggcatc

SEQ ID NO: 2595642 - DNA, 25 bp, Homo sapien
tggcatcgcgcgtaatcatcggccg

SEQ ID NO: 2595643 - DNA, 25 bp, Homo sapien
cagccgcggtccaccgtagggcagt

SEQ ID NO: 2595644 - DNA, 25 bp, Homo sapien
actctgtcctggctcacggaccgca

SEQ ID NO: 2595645 - DNA, 25 bp, Homo sapien
catcggtcgatagaaaacgggcggt

SEQ ID NO: 2595646 - DNA, 25 bp, Homo sapien
cagctcttcctattggctatgggcc

SEQ ID NO: 2595647 - DNA, 25 bp, Homo sapien
aattggccgtgcctcagctcaagag

SEQ ID NO: 2595648 - DNA, 25 bp, Homo sapien
attccgggcctctcgggatcagctc

SEQ ID NO: 2595649 - DNA, 25 bp, Homo sapien
cttcctccgctctgcgggtccgcgg

SEQ ID NO: 2595650 - DNA, 25 bp, Homo sapien
tggggtctgtcaccgaacacgttgg

SEQ ID NO: 2595651 - DNA, 25 bp, Homo sapien
ccctcagcgtgctcgcgctgtttct

SEQ ID NO: 2595652 - DNA, 25 bp, Homo sapien
tgaagtcgctttagaggctcagtcg

SEQ ID NO: 2595653 - DNA, 25 bp, Homo sapien
ctttttctgccaggcgatcccggat

SEQ ID NO: 2595654 - DNA, 25 bp, Homo sapien
aggcgatcccggattctcctccgtc

SEQ ID NO: 2595655 - DNA, 25 bp, Homo sapien
gatcccggattctcctccgtcccgc

SEQ ID NO: 2595656 - DNA, 25 bp, Homo sapien
ttctgccaggcgatcccggattctc

SEQ ID NO: 2595657 - DNA, 25 bp, Homo sapien
aaaattcaaattgcgggacctagag

SEQ ID NO: 2595658 - DNA, 25 bp, Homo sapien
ggaaacaagagtaatgctcctacta

SEQ ID NO: 2595659 - DNA, 25 bp, Homo sapien
tctgttttcccggtggcggagtaga

SEQ ID NO: 2595660 - DNA, 25 bp, Homo sapien
tgctgtcggatctcgggctaagcgt

SEQ ID NO: 2595661 - DNA, 25 bp, Homo sapien
tgagcacttgtttacagaatttgca

SEQ ID NO: 2595662 - DNA, 25 bp, Homo sapien
gagctgagcacttgtttacagaatt

SEQ ID NO: 2595663 - DNA, 25 bp, Homo sapien
gagcacttgtttacagaatttgcaa

SEQ ID NO: 2595664 - DNA, 25 bp, Homo sapien
gctgagcacttgtttacagaatttg

SEQ ID NO: 2595665 - DNA, 25 bp, Homo sapien
tagagaaaaggtctatttcagtatc

SEQ ID NO: 2595666 - DNA, 25 bp, Homo sapien
tatcagccagcaaaacagccttcat

SEQ ID NO: 2595667 - DNA, 25 bp, Homo sapien
atttcagtatcagccagcaaaacag

SEQ ID NO: 2595668 - DNA, 25 bp, Homo sapien
cagtatcagccagcaaaacagcctt

SEQ ID NO: 2595669 - DNA, 25 bp, Homo sapien
cagatccaagccataagtgttccca

SEQ ID NO: 2595670 - DNA, 25 bp, Homo sapien
gatcatcaaactggtgggagtggct

SEQ ID NO: 2595671 - DNA, 25 bp, Homo sapien
cttaagagatgtgtggtcgcatgac

SEQ ID NO: 2595672 - DNA, 25 bp, Homo sapien
tctacgccacggacttgattcagtg

SEQ ID NO: 2595673 - DNA, 25 bp, Homo sapien
ataggaagcaaattcttaaggactc

SEQ ID NO: 2595674 - DNA, 25 bp, Homo sapien
taaggactctacacccaaaagcagt

SEQ ID NO: 2595675 - DNA, 25 bp, Homo sapien
tcttaaggactctacacccaaaagc

SEQ ID NO: 2595676 - DNA, 25 bp, Homo sapien
caaataggaagcaaattcttaagga

SEQ ID NO: 2595677 - DNA, 25 bp, Homo sapien
aacatgcgatgtccttcagtttaca

SEQ ID NO: 2595678 - DNA, 25 bp, Homo sapien
ttgcagattttggtgaaatagcatc

SEQ ID NO: 2595679 - DNA, 25 bp, Homo sapien
cattttaaacatgcgatgtccttca

SEQ ID NO: 2595680 - DNA, 25 bp, Homo sapien
gcatcttccagtgaagtccactgcg

SEQ ID NO: 2595681 - DNA, 25 bp, Homo sapien
tccatgactttaattaccgcctata

SEQ ID NO: 2595682 - DNA, 25 bp, Homo sapien
tattaaatagagtgaacctacaggg

SEQ ID NO: 2595683 - DNA, 25 bp, Homo sapien
ttcaagcttagtcttactctgtgag

SEQ ID NO: 2595684 - DNA, 25 bp, Homo sapien
taggagtgccagttatttgtaagac

SEQ ID NO: 2595685 - DNA, 25 bp, Homo sapien
cacatgataacctacaatgttccca

SEQ ID NO: 2595686 - DNA, 25 bp, Homo sapien
taaactgcctggctgtgaaacatcc

SEQ ID NO: 2595687 - DNA, 25 bp, Homo sapien
gacaggaactacatggaacaatcac

SEQ ID NO: 2595688 - DNA, 25 bp, Homo sapien
ctgtggagtctagtctgttaatatc

SEQ ID NO: 2595689 - DNA, 25 bp, Homo sapien
tctggagtcagaatatgtatcaagg

SEQ ID NO: 2595690 - DNA, 25 bp, Homo sapien
ctgctctcggccgaataagtatttt

SEQ ID NO: 2595691 - DNA, 25 bp, Homo sapien
tccacttgtgcctgtacaacatact

SEQ ID NO: 2595692 - DNA, 25 bp, Homo sapien
gaaattcagccaagtttgaggcctt

SEQ ID NO: 2595693 - DNA, 25 bp, Homo sapien
atctcttgttagaggataatgcagc

SEQ ID NO: 2595694 - DNA, 25 bp, Homo sapien
taaatgtaaatggagggctgaagcc

SEQ ID NO: 2595695 - DNA, 25 bp, Homo sapien
taactgtttaccttgactgagggag

SEQ ID NO: 2595696 - DNA, 25 bp, Homo sapien
ggttcaaggcgacatgcacagggat

SEQ ID NO: 2595697 - DNA, 25 bp, Homo sapien
cattttgactctgagggcatttgcc

SEQ ID NO: 2595698 - DNA, 25 bp, Homo sapien
ctcttctatctctggcaagttgccc

SEQ ID NO: 2595699 - DNA, 25 bp, Homo sapien
cctctgctgagatatttaacacatc

SEQ ID NO: 2595700 - DNA, 25 bp, Homo sapien
ctctggcaagttgccccgaagtagg

SEQ ID NO: 2595701 - DNA, 25 bp, Homo sapien
cactcctctgctgagatatttaaca

SEQ ID NO: 2595702 - DNA, 25 bp, Homo sapien
tgaaatatgcgtgggtactaggcct

SEQ ID NO: 2595703 - DNA, 25 bp, Homo sapien
tgcccatggaaacctaacagcttgt

SEQ ID NO: 2595704 - DNA, 25 bp, Homo sapien
tagaacctatgagaaccagtgccca

SEQ ID NO: 2595705 - DNA, 25 bp, Homo sapien
taagaatacacctacactgggcaga

SEQ ID NO: 2595706 - DNA, 25 bp, Homo sapien
catacaatatgtgggcataacaaaa

SEQ ID NO: 2595707 - DNA, 25 bp, Homo sapien
caatatgtgggcataacaaaaaatt

SEQ ID NO: 2595708 - DNA, 25 bp, Homo sapien
tacaatatgtgggcataacaaaaaa

SEQ ID NO: 2595709 - DNA, 25 bp, Homo sapien
acatacaatatgtgggcataacaaa

SEQ ID NO: 2595710 - DNA, 25 bp, Homo sapien
agttcccctcttggcatcttgcaga

SEQ ID NO: 2595711 - DNA, 25 bp, Homo sapien
aagttcccctcttggcatcttgcag

SEQ ID NO: 2595712 - DNA, 25 bp, Homo sapien
aaagcccaagttcccctcttggcat

SEQ ID NO: 2595713 - DNA, 25 bp, Homo sapien
tcccctcttggcatcttgcagaagt

SEQ ID NO: 2595714 - DNA, 25 bp, Homo sapien
aaagtgtccttgtttgaattgattg

SEQ ID NO: 2595715 - DNA, 25 bp, Homo sapien
agtgtccttgtttgaattgattgaa

SEQ ID NO: 2595716 - DNA, 25 bp, Homo sapien
cccaaagtgtccttgtttgaattga

SEQ ID NO: 2595717 - DNA, 25 bp, Homo sapien
ccttgtttgaattgattgaaatctt

SEQ ID NO: 2595718 - DNA, 25 bp, Homo sapien
ttctggattatcgtcagtttctgga

SEQ ID NO: 2595719 - DNA, 25 bp, Homo sapien
cagtttctggattatcgtctgtttc

SEQ ID NO: 2595720 - DNA, 25 bp, Homo sapien
tctttactgacgatacccgattcca

SEQ ID NO: 2595721 - DNA, 25 bp, Homo sapien
cagtcagtttctggattatcgtcag

SEQ ID NO: 2595722 - DNA, 25 bp, Homo sapien
cttttagttaacagccaaacgcgct

SEQ ID NO: 2595723 - DNA, 25 bp, Homo sapien
gcctctgggtgggttcgaaccgcca

SEQ ID NO: 2595724 - DNA, 25 bp, Homo sapien
tagttaacagccaaacgcgctagcc

SEQ ID NO: 2595725 - DNA, 25 bp, Homo sapien
ttagttaacagccaaacgcgctagc

SEQ ID NO: 2595726 - DNA, 25 bp, Homo sapien
gagtagacacttcaagtaaccagtt

SEQ ID NO: 2595727 - DNA, 25 bp, Homo sapien
ggattctacgtctgtactttgagta

SEQ ID NO: 2595728 - DNA, 25 bp, Homo sapien
gcactaacagagatcctgttggagg

SEQ ID NO: 2595729 - DNA, 25 bp, Homo sapien
tgatcaggttggatccagtcctctg

SEQ ID NO: 2595730 - DNA, 25 bp, Homo sapien
agctgaacaatgcacactctctatg

SEQ ID NO: 2595731 - DNA, 25 bp, Homo sapien
caggtgcagctgaacaatgcacact

SEQ ID NO: 2595732 - DNA, 25 bp, Homo sapien
tgctgacatgagctcaccgccaggt

SEQ ID NO: 2595733 - DNA, 25 bp, Homo sapien
gcagctgaacaatgcacactctcta

SEQ ID NO: 2595734 - DNA, 25 bp, Homo sapien
cacaggcactgataagcatggacag

SEQ ID NO: 2595735 - DNA, 25 bp, Homo sapien
caggcactgataagcatggacaggc

SEQ ID NO: 2595736 - DNA, 25 bp, Homo sapien
gcactgataagcatggacaggcctg

SEQ ID NO: 2595737 - DNA, 25 bp, Homo sapien
caaacacaggcactgataagcatgg

SEQ ID NO: 2595738 - DNA, 25 bp, Homo sapien
ggttcaactggagcccacggactgg

SEQ ID NO: 2595739 - DNA, 25 bp, Homo sapien
cagcccgtccaagccattgttccct

SEQ ID NO: 2595740 - DNA, 25 bp, Homo sapien
ccagctcgccgtgcttggacagctg

SEQ ID NO: 2595741 - DNA, 25 bp, Homo sapien
tcccttgttgtgacagggggttcaa

SEQ ID NO: 2595742 - DNA, 25 bp, Homo sapien
gggtcaagaaattgtttctgccaca

SEQ ID NO: 2595743 - DNA, 25 bp, Homo sapien
aatctttcattgattgggtcaagaa

SEQ ID NO: 2595744 - DNA, 25 bp, Homo sapien
gccacatgccctgtgccaggtcata

SEQ ID NO: 2595745 - DNA, 25 bp, Homo sapien
tatgttcaatctttcattgattggg

SEQ ID NO: 2595746 - DNA, 25 bp, Homo sapien
tataaatgaaatccagggctaggca

SEQ ID NO: 2595747 - DNA, 25 bp, Homo sapien
aaactcaacagtaggccaggtgcag

SEQ ID NO: 2595748 - DNA, 25 bp, Homo sapien
taaaaagataagctgcggagagaac

SEQ ID NO: 2595749 - DNA, 25 bp, Homo sapien
caaaaaatgttcttaggcttcacac

SEQ ID NO: 2595750 - DNA, 25 bp, Homo sapien
gtgatctcagctcactgcaacctct

SEQ ID NO: 2595751 - DNA, 25 bp, Homo sapien
gtcacccaggctgtagtgcaatggc

SEQ ID NO: 2595752 - DNA, 25 bp, Homo sapien
tttttgagacggagtcttgctctgt

SEQ ID NO: 2595753 - DNA, 25 bp, Homo sapien
tgagacttgagtcttttttttgaga

SEQ ID NO: 2595754 - DNA, 25 bp, Homo sapien
ttatcctatggtcgtcagtcctgcc

SEQ ID NO: 2595755 - DNA, 25 bp, Homo sapien
cagggtgtgtcagagccagacatac

SEQ ID NO: 2595756 - DNA, 25 bp, Homo sapien
cagggagcccagatggtttgccttc

SEQ ID NO: 2595757 - DNA, 25 bp, Homo sapien
gagaggcctccagaaggactgagca

SEQ ID NO: 2595758 - DNA, 25 bp, Homo sapien
gaacattttcgctgaactagggccc

SEQ ID NO: 2595759 - DNA, 25 bp, Homo sapien
ttagtgactatcacagccgaggccg

SEQ ID NO: 2595760 - DNA, 25 bp, Homo sapien
aaaaagtgatgctcgccctgggcta

SEQ ID NO: 2595761 - DNA, 25 bp, Homo sapien
taactatctacgctgcctgcaaggg

SEQ ID NO: 2595762 - DNA, 25 bp, Homo sapien
ctattgccaacctatgggacagggt

SEQ ID NO: 2595763 - DNA, 25 bp, Homo sapien
tcagctggattgcattgagtggcac

SEQ ID NO: 2595764 - DNA, 25 bp, Homo sapien
tattagcacggttgagcaaaagaac

SEQ ID NO: 2595765 - DNA, 25 bp, Homo sapien
tctaggaaacctactgtatgaagag

SEQ ID NO: 2595766 - DNA, 25 bp, Homo sapien
tacccagtcggtggtggtctgtcgc

SEQ ID NO: 2595767 - DNA, 25 bp, Homo sapien
tatgcaccaggcactattaaatggc

SEQ ID NO: 2595768 - DNA, 25 bp, Homo sapien
caaagatagatcaagccagggattc

SEQ ID NO: 2595769 - DNA, 25 bp, Homo sapien
tccagagggtacaagtcagtcaaca

SEQ ID NO: 2595770 - DNA, 25 bp, Homo sapien
gaactaagagactaccattggcaca

SEQ ID NO: 2595771 - DNA, 25 bp, Homo sapien
aatccggaagcatgctagagaggca

SEQ ID NO: 2595772 - DNA, 25 bp, Homo sapien
ccttagttccaacagacgagggagg

SEQ ID NO: 2595773 - DNA, 25 bp, Homo sapien
gataacatctcacatagccgtggca

SEQ ID NO: 2595774 - DNA, 25 bp, Homo sapien
aattgtagactgaccctaggccctg

SEQ ID NO: 2595775 - DNA, 25 bp, Homo sapien
gacagatgcagtgttggtcaaaacc

SEQ ID NO: 2595776 - DNA, 25 bp, Homo sapien
tatattgccatcaggccttgtggac

SEQ ID NO: 2595777 - DNA, 25 bp, Homo sapien
agttttggactgatgcaattcccca

SEQ ID NO: 2595778 - DNA, 25 bp, Homo sapien
gaacccaggtttctactgcctcgtg

SEQ ID NO: 2595779 - DNA, 25 bp, Homo sapien
tccagattagttcggcagctccaca

SEQ ID NO: 2595780 - DNA, 25 bp, Homo sapien
taagacagatgttcatgtgtcttgc

SEQ ID NO: 2595781 - DNA, 25 bp, Homo sapien
tcgtggcacaaaacggctgctggag

SEQ ID NO: 2595782 - DNA, 25 bp, Homo sapien
gaaaatccggatggcctgggtttgc

SEQ ID NO: 2595783 - DNA, 25 bp, Homo sapien
gtgagacttgaaagcagcccaggca

SEQ ID NO: 2595784 - DNA, 25 bp, Homo sapien
tcagccaggtctcccatgcagaaaa

SEQ ID NO: 2595785 - DNA, 25 bp, Homo sapien
tctaaacacccagtagttgacttca

SEQ ID NO: 2595786 - DNA, 25 bp, Homo sapien
caatgggcctgatatcagaacgact

SEQ ID NO: 2595787 - DNA, 25 bp, Homo sapien
gctaaggtgcccgaagttctctcag

SEQ ID NO: 2595788 - DNA, 25 bp, Homo sapien
tgcagctcgcagaatagaaatgtat

SEQ ID NO: 2595789 - DNA, 25 bp, Homo sapien
cgataagcccagcatgccacatctt

SEQ ID NO: 2595790 - DNA, 25 bp, Homo sapien
ctcctagttaagctccatggccaag

SEQ ID NO: 2595791 - DNA, 25 bp, Homo sapien
tctaaggagcacaggccaaaatgat

SEQ ID NO: 2595792 - DNA, 25 bp, Homo sapien
gcaattcacttcctcctagttaagc

SEQ ID NO: 2595793 - DNA, 25 bp, Homo sapien
actcgtctcccattgatccctggga

SEQ ID NO: 2595794 - DNA, 25 bp, Homo sapien
cagaaaacgtgacgtcaggccttaa

SEQ ID NO: 2595795 - DNA, 25 bp, Homo sapien
caaaagctggtgaatccaaaggaca

SEQ ID NO: 2595796 - DNA, 25 bp, Homo sapien
tgagatgtttaatgatcccagatcc

SEQ ID NO: 2595797 - DNA, 25 bp, Homo sapien
tggcatacacttccaacgacctctg

SEQ ID NO: 2595798 - DNA, 25 bp, Homo sapien
gcctggtggcagaggactatcagta

SEQ ID NO: 2595799 - DNA, 25 bp, Homo sapien
caaattgggtctaatccgaggctgc

SEQ ID NO: 2595800 - DNA, 25 bp, Homo sapien
cagaatgttaggcagaaagatccca

SEQ ID NO: 2595801 - DNA, 25 bp, Homo sapien
caaattactagacagctccaaggag

SEQ ID NO: 2595802 - DNA, 25 bp, Homo sapien
acacgccatgctgacgaccatgagc

SEQ ID NO: 2595803 - DNA, 25 bp, Homo sapien
ccatgctgacgaccatgagcgacat

SEQ ID NO: 2595804 - DNA, 25 bp, Homo sapien
acgccatgctgacgaccatgagcga

SEQ ID NO: 2595805 - DNA, 25 bp, Homo sapien
aacacacgccatgctgacgaccatg

SEQ ID NO: 2595806 - DNA, 25 bp, Homo sapien
tggccagggcccctccagcaagaag

SEQ ID NO: 2595807 - DNA, 25 bp, Homo sapien
cagggcccctccagcaagaagaacc

SEQ ID NO: 2595808 - DNA, 25 bp, Homo sapien
gccagggcccctccagcaagaagaa

SEQ ID NO: 2595809 - DNA, 25 bp, Homo sapien
acatgtggccagggcccctccagca

SEQ ID NO: 2595810 - DNA, 25 bp, Homo sapien
gtgtgggtgtgaactgcaacatctg

SEQ ID NO: 2595811 - DNA, 25 bp, Homo sapien
gggtgtgaactgcaacatctgtagg

SEQ ID NO: 2595812 - DNA, 25 bp, Homo sapien
gcccatgagaaagctgttccggaat

SEQ ID NO: 2595813 - DNA, 25 bp, Homo sapien
ggtcacagggcccatgagaaagctg

SEQ ID NO: 2595814 - DNA, 25 bp, Homo sapien
caggagggaaggttttctgtggact

SEQ ID NO: 2595815 - DNA, 25 bp, Homo sapien
gccaggagggaaggttttctgtgga

SEQ ID NO: 2595816 - DNA, 25 bp, Homo sapien
actgggagccgacaactcatagggt

SEQ ID NO: 2595817 - DNA, 25 bp, Homo sapien
atctgaccaacattgcaggatgacc

SEQ ID NO: 2595818 - DNA, 25 bp, Homo sapien
ggatgaccgtctctcccgatttcac

SEQ ID NO: 2595819 - DNA, 25 bp, Homo sapien
gaatagttgacctgggaacccgcat

SEQ ID NO: 2595820 - DNA, 25 bp, Homo sapien
atggtgtcctgcgacgacgacagct

SEQ ID NO: 2595821 - DNA, 25 bp, Homo sapien
gccatggtgtcctgcgacgacgaca

SEQ ID NO: 2595822 - DNA, 25 bp, Homo sapien
gtgtcctgcgacgacgacagctcca

SEQ ID NO: 2595823 - DNA, 25 bp, Homo sapien
tggtgtcctgcgacgacgacagctc

SEQ ID NO: 2595824 - DNA, 25 bp, Homo sapien
ggtaaatgtcaaacaagctccggga

SEQ ID NO: 2595825 - DNA, 25 bp, Homo sapien
accgcagtgagcctaagttcaccgg

SEQ ID NO: 2595826 - DNA, 25 bp, Homo sapien
tagttccctccgtgggtcacagggc

SEQ ID NO: 2595827 - DNA, 25 bp, Homo sapien
attgaccctcagcaccgcagtgagc

SEQ ID NO: 2595828 - DNA, 25 bp, Homo sapien
cctcccttattttcatgtcggtcac

SEQ ID NO: 2595829 - DNA, 25 bp, Homo sapien
tgtcggtcactgttaatcaggtagg

SEQ ID NO: 2595830 - DNA, 25 bp, Homo sapien
ttcatgtcggtcactgttaatcagg

SEQ ID NO: 2595831 - DNA, 25 bp, Homo sapien
cactgttaatcaggtagggattcct

SEQ ID NO: 2595832 - DNA, 25 bp, Homo sapien
tctttttgttggcacaccagcgatg

SEQ ID NO: 2595833 - DNA, 25 bp, Homo sapien
gttccctgcaggctcttggtccatt

SEQ ID NO: 2595834 - DNA, 25 bp, Homo sapien
ttccctgcaggctcttggtccatta

SEQ ID NO: 2595835 - DNA, 25 bp, Homo sapien
tgttccctgcaggctcttggtccat

SEQ ID NO: 2595836 - DNA, 25 bp, Homo sapien
tccctgcaggctcttggtccattac

SEQ ID NO: 2595837 - DNA, 25 bp, Homo sapien
gtcacctcctgagggtcttgttcat

SEQ ID NO: 2595838 - DNA, 25 bp, Homo sapien
caactgtgcgtatgtcacctcctga

SEQ ID NO: 2595839 - DNA, 25 bp, Homo sapien
acctcctgagggtcttgttcatcag

SEQ ID NO: 2595840 - DNA, 25 bp, Homo sapien
actgtgcgtatgtcacctcctgagg

SEQ ID NO: 2595841 - DNA, 25 bp, Homo sapien
gtatctgttgggggtgtcttgggcc

SEQ ID NO: 2595842 - DNA, 25 bp, Homo sapien
gagctggcaacccggttttgagaca

SEQ ID NO: 2595843 - DNA, 25 bp, Homo sapien
ctggtacatgggagctggcaacccg

SEQ ID NO: 2595844 - DNA, 25 bp, Homo sapien
gctggcaacccggttttgagacagg

SEQ ID NO: 2595845 - DNA, 25 bp, Homo sapien
ctggcaacccggttttgagacaggg

SEQ ID NO: 2595846 - DNA, 25 bp, Homo sapien
catgttcagattcgtggtgtgagga

SEQ ID NO: 2595847 - DNA, 25 bp, Homo sapien
cctcaagtagactaggaagtaagcc

SEQ ID NO: 2595848 - DNA, 25 bp, Homo sapien
atggagaattgtgggctaagcaaag

SEQ ID NO: 2595849 - DNA, 25 bp, Homo sapien
gaggaagagcgatgccctaagatgc

SEQ ID NO: 2595850 - DNA, 25 bp, Homo sapien
gcggccgcgccccagctcagctcag

SEQ ID NO: 2595851 - DNA, 25 bp, Homo sapien
ctgtgcagacaggcggccgcgcccc

SEQ ID NO: 2595852 - DNA, 25 bp, Homo sapien
gccgcgccccagctcagctcagcag

SEQ ID NO: 2595853 - DNA, 25 bp, Homo sapien
tgtgcagacaggcggccgcgcccca

SEQ ID NO: 2595854 - DNA, 25 bp, Homo sapien
acacgccatgctgacgaccatgagc

SEQ ID NO: 2595855 - DNA, 25 bp, Homo sapien
acgccatgctgacgaccatgagcga

SEQ ID NO: 2595856 - DNA, 25 bp, Homo sapien
aacacacgccatgctgacgaccatg

SEQ ID NO: 2595857 - DNA, 25 bp, Homo sapien
ccatgctgacgaccatgagcgacat

SEQ ID NO: 2595858 - DNA, 25 bp, Homo sapien
cctcatgtggccaggccccctgcag

SEQ ID NO: 2595859 - DNA, 25 bp, Homo sapien
caggccccctgcagcaagaagaacc

SEQ ID NO: 2595860 - DNA, 25 bp, Homo sapien
catgtggccaggccccctgcagcaa

SEQ ID NO: 2595861 - DNA, 25 bp, Homo sapien
ggccaggccccctgcagcaagaaga

SEQ ID NO: 2595862 - DNA, 25 bp, Homo sapien
cagacagcaagggcttgtcctgacc

SEQ ID NO: 2595863 - DNA, 25 bp, Homo sapien
ctagaggcaccacaaggctgggcca

SEQ ID NO: 2595864 - DNA, 25 bp, Homo sapien
gacagcaagggcttgtcctgaccac

SEQ ID NO: 2595865 - DNA, 25 bp, Homo sapien
aggcagacagcaagggcttgtcctg

SEQ ID NO: 2595866 - DNA, 25 bp, Homo sapien
ccaagataagagtgacaccgaagaa

SEQ ID NO: 2595867 - DNA, 25 bp, Homo sapien
aagagtgacaccgaagaatgacatg

SEQ ID NO: 2595868 - DNA, 25 bp, Homo sapien
gagtgacaccgaagaatgacatgtc

SEQ ID NO: 2595869 - DNA, 25 bp, Homo sapien
gataagagtgacaccgaagaatgac

SEQ ID NO: 2595870 - DNA, 25 bp, Homo sapien
caggagggaaggttttctgtggact

SEQ ID NO: 2595871 - DNA, 25 bp, Homo sapien
gccaggagggaaggttttctgtgga

SEQ ID NO: 2595872 - DNA, 25 bp, Homo sapien
gggagtgagtaacagaaccgtagca

SEQ ID NO: 2595873 - DNA, 25 bp, Homo sapien
gaccaacattgcaggatgactgtct

SEQ ID NO: 2595874 - DNA, 25 bp, Homo sapien
tgatgacgatgtccagagggtcact

SEQ ID NO: 2595875 - DNA, 25 bp, Homo sapien
aaggtcttgcatcatgggaccgatg

SEQ ID NO: 2595876 - DNA, 25 bp, Homo sapien
tctgtaggttcctccgtgggtggca

SEQ ID NO: 2595877 - DNA, 25 bp, Homo sapien
tggaatgttccgttgaccttgggcc

SEQ ID NO: 2595878 - DNA, 25 bp, Homo sapien
ggtacatgtcataggagctccggga

SEQ ID NO: 2595879 - DNA, 25 bp, Homo sapien
tatggagagtcacggaaagagccga

SEQ ID NO: 2595880 - DNA, 25 bp, Homo sapien
gtgggtgaaggccaactatttgaag

SEQ ID NO: 2595881 - DNA, 25 bp, Homo sapien
agtgggtgaaggccaactatttgaa

SEQ ID NO: 2595882 - DNA, 25 bp, Homo sapien
gagcttggttcagtgggtgaaggcc

SEQ ID NO: 2595883 - DNA, 25 bp, Homo sapien
tgggtgaaggccaactatttgaagg

SEQ ID NO: 2595884 - DNA, 25 bp, Homo sapien
catggtctacctgaatctccacagg

SEQ ID NO: 2595885 - DNA, 25 bp, Homo sapien
tgctggaggattcagcggactttca

SEQ ID NO: 2595886 - DNA, 25 bp, Homo sapien
agtgttaatgtttacctccccatgg

SEQ ID NO: 2595887 - DNA, 25 bp, Homo sapien
gaccagagcactttctctattccag

SEQ ID NO: 2595888 - DNA, 25 bp, Homo sapien
ttgttggagcaccagcgatgaagga

SEQ ID NO: 2595889 - DNA, 25 bp, Homo sapien
ttttgttggagcaccagcgatgaag

SEQ ID NO: 2595890 - DNA, 25 bp, Homo sapien
tttttttgttggagcaccagcgatg

SEQ ID NO: 2595891 - DNA, 25 bp, Homo sapien
ttttttgttggagcaccagcgatga

SEQ ID NO: 2595892 - DNA, 25 bp, Homo sapien
ctcgctattcgctgttctgttccct

SEQ ID NO: 2595893 - DNA, 25 bp, Homo sapien
tgttccctgcagactcttggtccat

SEQ ID NO: 2595894 - DNA, 25 bp, Homo sapien
gactcttggtccattaccgcagcat

SEQ ID NO: 2595895 - DNA, 25 bp, Homo sapien
tgcagactcttggtccattaccgca

SEQ ID NO: 2595896 - DNA, 25 bp, Homo sapien
gtcacctcctgagggtcttgttcat

SEQ ID NO: 2595897 - DNA, 25 bp, Homo sapien
acctcctgagggtcttgttcatcag

SEQ ID NO: 2595898 - DNA, 25 bp, Homo sapien
tcacctcctgagggtcttgttcatc

SEQ ID NO: 2595899 - DNA, 25 bp, Homo sapien
cacctcctgagggtcttgttcatca

SEQ ID NO: 2595900 - DNA, 25 bp, Homo sapien
ggaagttccgtgtacacgatgatat

SEQ ID NO: 2595901 - DNA, 25 bp, Homo sapien
tccgtgtacacgatgatatctgttg

SEQ ID NO: 2595902 - DNA, 25 bp, Homo sapien
cgtgtacacgatgatatctgttggg

SEQ ID NO: 2595903 - DNA, 25 bp, Homo sapien
agttccgtgtacacgatgatatctg

SEQ ID NO: 2595904 - DNA, 25 bp, Homo sapien
tgagttcctcagtgtgattgcagcc

SEQ ID NO: 2595905 - DNA, 25 bp, Homo sapien
gaggaagagcgatgccctaagatgc

SEQ ID NO: 2595906 - DNA, 25 bp, Homo sapien
ctggtacatgggagctggcaacccg

SEQ ID NO: 2595907 - DNA, 25 bp, Homo sapien
gattgcagcctcaagtagactagga

SEQ ID NO: 2595908 - DNA, 25 bp, Homo sapien
aggatgttatttggcgccctgccca

SEQ ID NO: 2595909 - DNA, 25 bp, Homo sapien
ctcagcagcgcacaggatgttattt

SEQ ID NO: 2595910 - DNA, 25 bp, Homo sapien
gctcagcagcgcacaggatgttatt

SEQ ID NO: 2595911 - DNA, 25 bp, Homo sapien
acaggatgttatttggcgccctgcc

SEQ ID NO: 2595912 - DNA, 25 bp, Homo sapien
ggccaggccccctgcagcaagaaga

SEQ ID NO: 2595913 - DNA, 25 bp, Homo sapien
cctcatgtggccaggccccctgcag

SEQ ID NO: 2595914 - DNA, 25 bp, Homo sapien
caggccccctgcagcaagaagaacc

SEQ ID NO: 2595915 - DNA, 25 bp, Homo sapien
catgtggccaggccccctgcagcaa

SEQ ID NO: 2595916 - DNA, 25 bp, Homo sapien
ctccttcagacaccacagggctggg

SEQ ID NO: 2595917 - DNA, 25 bp, Homo sapien
ggtgtttcggaatactctgttgtag

SEQ ID NO: 2595918 - DNA, 25 bp, Homo sapien
tgctgaccacccagtgaggaagtgt

SEQ ID NO: 2595919 - DNA, 25 bp, Homo sapien
cagggcctatgaaaacggtgtttcg

SEQ ID NO: 2595920 - DNA, 25 bp, Homo sapien
caggagggaaggttttctgtggact

SEQ ID NO: 2595921 - DNA, 25 bp, Homo sapien
gccaggagggaaggttttctgtgga

SEQ ID NO: 2595922 - DNA, 25 bp, Homo sapien
accaacattgcaggatgactgtctc

SEQ ID NO: 2595923 - DNA, 25 bp, Homo sapien
cacgatgtccagagggtcactggga

SEQ ID NO: 2595924 - DNA, 25 bp, Homo sapien
aaggaagtgctcaaacatgacatct

SEQ ID NO: 2595925 - DNA, 25 bp, Homo sapien
catgacatctgaccaacattgcagg

SEQ ID NO: 2595926 - DNA, 25 bp, Homo sapien
ctcctgccttaaccatggggcgcgg

SEQ ID NO: 2595927 - DNA, 25 bp, Homo sapien
ctgccttaaccatggggcgcggctg

SEQ ID NO: 2595928 - DNA, 25 bp, Homo sapien
ggaacctaagttcatgagcctcccc

SEQ ID NO: 2595929 - DNA, 25 bp, Homo sapien
gggaacctaagttcatgagcctccc

SEQ ID NO: 2595930 - DNA, 25 bp, Homo sapien
agccaggaagaccagaccagccaca

SEQ ID NO: 2595931 - DNA, 25 bp, Homo sapien
ggaactctccacagtatagttctgg

SEQ ID NO: 2595932 - DNA, 25 bp, Homo sapien
cagcattgccaaaagagccaggaag

SEQ ID NO: 2595933 - DNA, 25 bp, Homo sapien
gtggcccctcatgtctccaccaggt

SEQ ID NO: 2595934 - DNA, 25 bp, Homo sapien
catggccgtgttcaacccaacaatg

SEQ ID NO: 2595935 - DNA, 25 bp, Homo sapien
tacgccaaaactcagtgtccaactt

SEQ ID NO: 2595936 - DNA, 25 bp, Homo sapien
gacttaggattttgctgtacgccaa

SEQ ID NO: 2595937 - DNA, 25 bp, Homo sapien
ggatgtacaacatggccgtgttcaa

SEQ ID NO: 2595938 - DNA, 25 bp, Homo sapien
caggacgcagtgactcggctcgact

SEQ ID NO: 2595939 - DNA, 25 bp, Homo sapien
gacacattgaccacaacatgtgaag

SEQ ID NO: 2595940 - DNA, 25 bp, Homo sapien
gggcccggatcgtgcagttgacaca

SEQ ID NO: 2595941 - DNA, 25 bp, Homo sapien
ctcgactgaccggtgcagaggatgt

SEQ ID NO: 2595942 - DNA, 25 bp, Homo sapien
ccaggatgatgaccgtgggtgacat

SEQ ID NO: 2595943 - DNA, 25 bp, Homo sapien
caagacatgccaggatgatgaccgt

SEQ ID NO: 2595944 - DNA, 25 bp, Homo sapien
atgccaggatgatgaccgtgggtga

SEQ ID NO: 2595945 - DNA, 25 bp, Homo sapien
aagacatgccaggatgatgaccgtg

SEQ ID NO: 2595946 - DNA, 25 bp, Homo sapien
ccacgtgtgcccacacactctggtc

SEQ ID NO: 2595947 - DNA, 25 bp, Homo sapien
agagcagaagggcttgtcctgacca

SEQ ID NO: 2595948 - DNA, 25 bp, Homo sapien
gcagagcagaagggcttgtcctgac

SEQ ID NO: 2595949 - DNA, 25 bp, Homo sapien
gagcagaagggcttgtcctgaccac

SEQ ID NO: 2595950 - DNA, 25 bp, Homo sapien
aggcagagcagaagggcttgtcctg

SEQ ID NO: 2595951 - DNA, 25 bp, Homo sapien
cagggaccccatctttcttgtacag

SEQ ID NO: 2595952 - DNA, 25 bp, Homo sapien
ggagtgcgggtgaaaacctcgacat

SEQ ID NO: 2595953 - DNA, 25 bp, Homo sapien
tgtacagcgtgaagatgttaaaccc

SEQ ID NO: 2595954 - DNA, 25 bp, Homo sapien
ccatctttcttgtacagcgtgaaga

SEQ ID NO: 2595955 - DNA, 25 bp, Homo sapien
ggagatccatggaaagagccgaagc

SEQ ID NO: 2595956 - DNA, 25 bp, Homo sapien
ggctgtaagcgaaggtttctcatat

SEQ ID NO: 2595957 - DNA, 25 bp, Homo sapien
cgggtctgaccactcgtagggagat

SEQ ID NO: 2595958 - DNA, 25 bp, Homo sapien
gccgggctgtaagcgaaggtttctc

SEQ ID NO: 2595959 - DNA, 25 bp, Homo sapien
tttgaagcttggttcagtgggtgaa

SEQ ID NO: 2595960 - DNA, 25 bp, Homo sapien
tcagtgggtgaaggccaactactag

SEQ ID NO: 2595961 - DNA, 25 bp, Homo sapien
tgggtgaaggccaactactagaagg

SEQ ID NO: 2595962 - DNA, 25 bp, Homo sapien
cagttttgaagcttggttcagtggg

SEQ ID NO: 2595963 - DNA, 25 bp, Homo sapien
actgagtacctaatcacagcatgca

SEQ ID NO: 2595964 - DNA, 25 bp, Homo sapien
agtacctaatcacagcatgcaggtg

SEQ ID NO: 2595965 - DNA, 25 bp, Homo sapien
gccactgagtacctaatcacagcat

SEQ ID NO: 2595966 - DNA, 25 bp, Homo sapien
gatggccactgagtacctaatcaca

SEQ ID NO: 2595967 - DNA, 25 bp, Homo sapien
tgcttccgcacagggccctgagttc

SEQ ID NO: 2595968 - DNA, 25 bp, Homo sapien
gctcccatcctgcttccgcacaggg

SEQ ID NO: 2595969 - DNA, 25 bp, Homo sapien
tgctcccatcctgcttccgcacagg

SEQ ID NO: 2595970 - DNA, 25 bp, Homo sapien
atcctgcttccgcacagggccctga

SEQ ID NO: 2595971 - DNA, 25 bp, Homo sapien
cactgttctgtgtcccgcaggctct

SEQ ID NO: 2595972 - DNA, 25 bp, Homo sapien
actgttctgtgtcccgcaggctctt

SEQ ID NO: 2595973 - DNA, 25 bp, Homo sapien
ttcactgttctgtgtcccgcaggct

SEQ ID NO: 2595974 - DNA, 25 bp, Homo sapien
ggtatctgttgagggtctcttgctc

SEQ ID NO: 2595975 - DNA, 25 bp, Homo sapien
tggaagttctatacacacgctggta

SEQ ID NO: 2595976 - DNA, 25 bp, Homo sapien
ggagacaacgctctgggctcagcat

SEQ ID NO: 2595977 - DNA, 25 bp, Homo sapien
ctggcaagctgggtttgagacaggg

SEQ ID NO: 2595978 - DNA, 25 bp, Homo sapien
gaggagagaactacactgaaatcaa

SEQ ID NO: 2595979 - DNA, 25 bp, Homo sapien
aaatagtctgaggaaaggtggaaca

SEQ ID NO: 2595980 - DNA, 25 bp, Homo sapien
aattttataaggtttgctgatgcca

SEQ ID NO: 2595981 - DNA, 25 bp, Homo sapien
gagtgatgctctaagatggagactc

SEQ ID NO: 2595982 - DNA, 25 bp, Homo sapien
acacgccatgctgacgaccatgagc

SEQ ID NO: 2595983 - DNA, 25 bp, Homo sapien
caacacacgccatgctgacgaccat

SEQ ID NO: 2595984 - DNA, 25 bp, Homo sapien
acacacgccatgctgacgaccatga

SEQ ID NO: 2595985 - DNA, 25 bp, Homo sapien
aacacacgccatgctgacgaccatg

SEQ ID NO: 2595986 - DNA, 25 bp, Homo sapien
tggaccggccctctggaccaagaac

SEQ ID NO: 2595987 - DNA, 25 bp, Homo sapien
tgtggaccggccctctggaccaaga

SEQ ID NO: 2595988 - DNA, 25 bp, Homo sapien
ccatgtgtggaccggccctctggac

SEQ ID NO: 2595989 - DNA, 25 bp, Homo sapien
gaccggccctctggaccaagaacaa

SEQ ID NO: 2595990 - DNA, 25 bp, Homo sapien
aacctatgacgatagtgacaccgaa

SEQ ID NO: 2595991 - DNA, 25 bp, Homo sapien
taaacctatgacgatagtgacaccg

SEQ ID NO: 2595992 - DNA, 25 bp, Homo sapien
gtggtcacagggctcatgttgaagc

SEQ ID NO: 2595993 - DNA, 25 bp, Homo sapien
ctatgacgatagtgacaccgaagag

SEQ ID NO: 2595994 - DNA, 25 bp, Homo sapien
atctgaccaacattgcaggatgact

SEQ ID NO: 2595995 - DNA, 25 bp, Homo sapien
catggatctgtccaacgaggcgtga

SEQ ID NO: 2595996 - DNA, 25 bp, Homo sapien
gtgagtaacagaaccgtagcatctg

SEQ ID NO: 2595997 - DNA, 25 bp, Homo sapien
agtaacagaaccgtagcatctgtag

SEQ ID NO: 2595998 - DNA, 25 bp, Homo sapien
cccctccctggatagatggtacatg

SEQ ID NO: 2595999 - DNA, 25 bp, Homo sapien
gtacatgtcataggagctccgggag

SEQ ID NO: 2596000 - DNA, 25 bp, Homo sapien
ccctggatagatggtacatgtcata

SEQ ID NO: 2596001 - DNA, 25 bp, Homo sapien
ctgcagggagcctacgttcatgggc

SEQ ID NO: 2596002 - DNA, 25 bp, Homo sapien
tcgggtctgaccactcgtagggaga

SEQ ID NO: 2596003 - DNA, 25 bp, Homo sapien
ctgtgacagaaacaagcagtgggtc

SEQ ID NO: 2596004 - DNA, 25 bp, Homo sapien
acagaaacaagcagtgggtcactcg

SEQ ID NO: 2596005 - DNA, 25 bp, Homo sapien
ggtcactcgggtctgaccactcgta

SEQ ID NO: 2596006 - DNA, 25 bp, Homo sapien
taaggatttaggatcataggacatg

SEQ ID NO: 2596007 - DNA, 25 bp, Homo sapien
tccttagctaaggatttaggatcat

SEQ ID NO: 2596008 - DNA, 25 bp, Homo sapien
aggacatgagagagatatgggcttt

SEQ ID NO: 2596009 - DNA, 25 bp, Homo sapien
tgagagagatatgggcttttctcac

SEQ ID NO: 2596010 - DNA, 25 bp, Homo sapien
tttggagcttggttctgtgggtgaa

SEQ ID NO: 2596011 - DNA, 25 bp, Homo sapien
tgggtgaaggccaactacttgaagg

SEQ ID NO: 2596012 - DNA, 25 bp, Homo sapien
ttggttctgtgggtgaaggccaact

SEQ ID NO: 2596013 - DNA, 25 bp, Homo sapien
ctgtgggtgaaggccaactacttga

SEQ ID NO: 2596014 - DNA, 25 bp, Homo sapien
ttgttggagcaccagcgatgaagga

SEQ ID NO: 2596015 - DNA, 25 bp, Homo sapien
gggattttgaccactgaggtcccaa

SEQ ID NO: 2596016 - DNA, 25 bp, Homo sapien
aggatggtgaaagggattttgacca

SEQ ID NO: 2596017 - DNA, 25 bp, Homo sapien
ttttttgttggagcaccagcgatga

SEQ ID NO: 2596018 - DNA, 25 bp, Homo sapien
tccctgcaggctcttggtccattac

SEQ ID NO: 2596019 - DNA, 25 bp, Homo sapien
gttccctgcaggctcttggtccatt

SEQ ID NO: 2596020 - DNA, 25 bp, Homo sapien
ttccctgcaggctcttggtccatta

SEQ ID NO: 2596021 - DNA, 25 bp, Homo sapien
tgttccctgcaggctcttggtccat

SEQ ID NO: 2596022 - DNA, 25 bp, Homo sapien
tgccctaagatgaagactgatgcct

SEQ ID NO: 2596023 - DNA, 25 bp, Homo sapien
ttatgcgtatgacacctcctgatgg

SEQ ID NO: 2596024 - DNA, 25 bp, Homo sapien
tagaagatcccctcaaggcctgact

SEQ ID NO: 2596025 - DNA, 25 bp, Homo sapien
gattgcagcctcaagtagactagga

SEQ ID NO: 2596026 - DNA, 25 bp, Homo sapien
ggtgctgccggtgcagacaggcggc

SEQ ID NO: 2596027 - DNA, 25 bp, Homo sapien
tgctgccggtgcagacaggcggccg

SEQ ID NO: 2596028 - DNA, 25 bp, Homo sapien
ctgccggtgcagacaggcggccgcg

SEQ ID NO: 2596029 - DNA, 25 bp, Homo sapien
tgccggtgcagacaggcggccgcgc

SEQ ID NO: 2596030 - DNA, 25 bp, Homo sapien
cacacgccatgctgatgaccatgag

SEQ ID NO: 2596031 - DNA, 25 bp, Homo sapien
caacacacgccatgctgatgaccat

SEQ ID NO: 2596032 - DNA, 25 bp, Homo sapien
cacgccatgctgatgaccatgagcg

SEQ ID NO: 2596033 - DNA, 25 bp, Homo sapien
ccatgctgatgaccatgagcgacat

SEQ ID NO: 2596034 - DNA, 25 bp, Homo sapien
caggccccctgcagcaagaagaacc

SEQ ID NO: 2596035 - DNA, 25 bp, Homo sapien
cctcatgtgtccaggccccctgcag

SEQ ID NO: 2596036 - DNA, 25 bp, Homo sapien
tccaggccccctgcagcaagaagaa

SEQ ID NO: 2596037 - DNA, 25 bp, Homo sapien
tgtccaggccccctgcagcaagaag

SEQ ID NO: 2596038 - DNA, 25 bp, Homo sapien
ctgtgaccacgatcaccagggggtt

SEQ ID NO: 2596039 - DNA, 25 bp, Homo sapien
tgaaccccgacatctgtaggtccct

SEQ ID NO: 2596040 - DNA, 25 bp, Homo sapien
ggtgtgaaccccgacatctgtaggt

SEQ ID NO: 2596041 - DNA, 25 bp, Homo sapien
gtgggtgtgaaccccgacatctgta

SEQ ID NO: 2596042 - DNA, 25 bp, Homo sapien
gggtgagtcatggagagagccgaag

SEQ ID NO: 2596043 - DNA, 25 bp, Homo sapien
agggagcctaggttcatgggccctc

SEQ ID NO: 2596044 - DNA, 25 bp, Homo sapien
gatggtacatgtcaaatgagctcct

SEQ ID NO: 2596045 - DNA, 25 bp, Homo sapien
actcatagggtgagtcatggagaga

SEQ ID NO: 2596046 - DNA, 25 bp, Homo sapien
ttcagtgggtgaagatgaactactt

SEQ ID NO: 2596047 - DNA, 25 bp, Homo sapien
gaagatgaactacttgaagagtttc

SEQ ID NO: 2596048 - DNA, 25 bp, Homo sapien
ggttcagtgggtgaagatgaactac

SEQ ID NO: 2596049 - DNA, 25 bp, Homo sapien
agtgggtgaagatgaactacttgaa

SEQ ID NO: 2596050 - DNA, 25 bp, Homo sapien
gatgaagaggatgatagccactgag

SEQ ID NO: 2596051 - DNA, 25 bp, Homo sapien
gatagccactgaggtcccaatcaga

SEQ ID NO: 2596052 - DNA, 25 bp, Homo sapien
gaggtcccaatcagaatgtgcaggt

SEQ ID NO: 2596053 - DNA, 25 bp, Homo sapien
ctttttgttggagcagcagcaatga

SEQ ID NO: 2596054 - DNA, 25 bp, Homo sapien
ggcaggctcttggtccattacagca

SEQ ID NO: 2596055 - DNA, 25 bp, Homo sapien
tccctgttcactgttctgtccccgg

SEQ ID NO: 2596056 - DNA, 25 bp, Homo sapien
tccccggcaggctcttggtccatta

SEQ ID NO: 2596057 - DNA, 25 bp, Homo sapien
ttctgtccccggcaggctcttggtc

SEQ ID NO: 2596058 - DNA, 25 bp, Homo sapien
caatgatcttggcttagcatttgga

SEQ ID NO: 2596059 - DNA, 25 bp, Homo sapien
caaatagtgtcacattacctaaagc

SEQ ID NO: 2596060 - DNA, 25 bp, Homo sapien
ggttatgtggacatggtaatgataa

SEQ ID NO: 2596061 - DNA, 25 bp, Homo sapien
gataacagcggtttctttcagcaaa

SEQ ID NO: 2596062 - DNA, 25 bp, Homo sapien
tctttcagcaaatagtgtcacatta

SEQ ID NO: 2596063 - DNA, 25 bp, Homo sapien
cacacgccatgctgatgaccatgag

SEQ ID NO: 2596064 - DNA, 25 bp, Homo sapien
ccatgctgatgaccatgagcgacat

SEQ ID NO: 2596065 - DNA, 25 bp, Homo sapien
caacacacgccatgctgatgaccat

SEQ ID NO: 2596066 - DNA, 25 bp, Homo sapien
cacgccatgctgatgaccatgagcg

SEQ ID NO: 2596067 - DNA, 25 bp, Homo sapien
gtggccaggccccctgcagcaagaa

SEQ ID NO: 2596068 - DNA, 25 bp, Homo sapien
cctcatgtggccaggccccctgcag

SEQ ID NO: 2596069 - DNA, 25 bp, Homo sapien
catgtggccaggccccctgcagcaa

SEQ ID NO: 2596070 - DNA, 25 bp, Homo sapien
ggccaggccccctgcagcaagaaga

SEQ ID NO: 2596071 - DNA, 25 bp, Homo sapien
gaaagcaagggcttgtcctgaccac

SEQ ID NO: 2596072 - DNA, 25 bp, Homo sapien
caaggctgggccaggtagaaagcaa

SEQ ID NO: 2596073 - DNA, 25 bp, Homo sapien
gcaccacaaggctgggccaggtaga

SEQ ID NO: 2596074 - DNA, 25 bp, Homo sapien
gccaggtagaaagcaagggcttgtc

SEQ ID NO: 2596075 - DNA, 25 bp, Homo sapien
gttgttaaacccaagattagagtga

SEQ ID NO: 2596076 - DNA, 25 bp, Homo sapien
agttgttaaacccaagattagagtg

SEQ ID NO: 2596077 - DNA, 25 bp, Homo sapien
tgaagttgttaaacccaagattaga

SEQ ID NO: 2596078 - DNA, 25 bp, Homo sapien
ctgaagttgttaaacccaagattag

SEQ ID NO: 2596079 - DNA, 25 bp, Homo sapien
tgggccaggagggaaggttttctgc

SEQ ID NO: 2596080 - DNA, 25 bp, Homo sapien
gccaggagggaaggttttctgcgga

SEQ ID NO: 2596081 - DNA, 25 bp, Homo sapien
caggagggaaggttttctgcggaat

SEQ ID NO: 2596082 - DNA, 25 bp, Homo sapien
gaccaacattgcaggatgactgtct

SEQ ID NO: 2596083 - DNA, 25 bp, Homo sapien
ggaagtgctcaaacatgacatctga

SEQ ID NO: 2596084 - DNA, 25 bp, Homo sapien
gggagtgagtaacagaaccgtagca

SEQ ID NO: 2596085 - DNA, 25 bp, Homo sapien
tgatcacgatgtccagagggtcact

SEQ ID NO: 2596086 - DNA, 25 bp, Homo sapien
tgcagggagcctacgttcatgggcc

SEQ ID NO: 2596087 - DNA, 25 bp, Homo sapien
ggtacatgtcataggagctccggga

SEQ ID NO: 2596088 - DNA, 25 bp, Homo sapien
tatggagagtcacggaaagagccga

SEQ ID NO: 2596089 - DNA, 25 bp, Homo sapien
cacttgactttgaccactcgtatgg

SEQ ID NO: 2596090 - DNA, 25 bp, Homo sapien
gtgggtgaaggccaactatttgaag

SEQ ID NO: 2596091 - DNA, 25 bp, Homo sapien
gagcttggttcagtgggtgaaggcc

SEQ ID NO: 2596092 - DNA, 25 bp, Homo sapien
agtgggtgaaggccaactatttgaa

SEQ ID NO: 2596093 - DNA, 25 bp, Homo sapien
ttgttggagcaccagcgatgaagga

SEQ ID NO: 2596094 - DNA, 25 bp, Homo sapien
tttttttgttggagcaccagcgatg

SEQ ID NO: 2596095 - DNA, 25 bp, Homo sapien
ttttttgttggagcaccagcgatga

SEQ ID NO: 2596096 - DNA, 25 bp, Homo sapien
ttttgttggagcaccagcgatgaag

SEQ ID NO: 2596097 - DNA, 25 bp, Homo sapien
gcaggcccttggtccattacagatg

SEQ ID NO: 2596098 - DNA, 25 bp, Homo sapien
caggcccttggtccattacagatgc

SEQ ID NO: 2596099 - DNA, 25 bp, Homo sapien
cgcaggcccttggtccattacagat

SEQ ID NO: 2596100 - DNA, 25 bp, Homo sapien
ggcccttggtccattacagatgcat

SEQ ID NO: 2596101 - DNA, 25 bp, Homo sapien
ctcctgatggtcctgttcatcagaa

SEQ ID NO: 2596102 - DNA, 25 bp, Homo sapien
cctgatggtcctgttcatcagaatc

SEQ ID NO: 2596103 - DNA, 25 bp, Homo sapien
tcctgatggtcctgttcatcagaat

SEQ ID NO: 2596104 - DNA, 25 bp, Homo sapien
ctagaagatcccctcaaggcctgac

SEQ ID NO: 2596105 - DNA, 25 bp, Homo sapien
aagatcccctcaaggcctgactgtg

SEQ ID NO: 2596106 - DNA, 25 bp, Homo sapien
gaagttctatgtacatgctggtatc

SEQ ID NO: 2596107 - DNA, 25 bp, Homo sapien
agcatttggaagttctatgtacatg

SEQ ID NO: 2596108 - DNA, 25 bp, Homo sapien
tgagttcctcagtgtgattgcagcc

SEQ ID NO: 2596109 - DNA, 25 bp, Homo sapien
gattgcagcctcaagtagactagga

SEQ ID NO: 2596110 - DNA, 25 bp, Homo sapien
ctggtacatgggagctggcaacccg

SEQ ID NO: 2596111 - DNA, 25 bp, Homo sapien
tgaggaagagcgatcccctaagatg

SEQ ID NO: 2596112 - DNA, 25 bp, Homo sapien
acacgccatgctgacgaccgtgagc

SEQ ID NO: 2596113 - DNA, 25 bp, Homo sapien
aacacacgccatgctgacgaccgtg

SEQ ID NO: 2596114 - DNA, 25 bp, Homo sapien
acgccatgctgacgaccgtgagcga

SEQ ID NO: 2596115 - DNA, 25 bp, Homo sapien
ccatgctgacgaccgtgagcgacat

SEQ ID NO: 2596116 - DNA, 25 bp, Homo sapien
cctaagcccatatcgccaatccagg

SEQ ID NO: 2596117 - DNA, 25 bp, Homo sapien
tatctccatcctaggcacatatctc

SEQ ID NO: 2596118 - DNA, 25 bp, Homo sapien
acccaggcccgtatctccatcctag

SEQ ID NO: 2596119 - DNA, 25 bp, Homo sapien
tccaggccgatatttccaccctaag

SEQ ID NO: 2596120 - DNA, 25 bp, Homo sapien
caagaacagggctgtcggctgtgca

SEQ ID NO: 2596121 - DNA, 25 bp, Homo sapien
ccaagaacagggctgtcggctgtgc

SEQ ID NO: 2596122 - DNA, 25 bp, Homo sapien
ggccaggccccctgcagcaagaaga

SEQ ID NO: 2596123 - DNA, 25 bp, Homo sapien
cctcatgtggccaggccccctgcag

SEQ ID NO: 2596124 - DNA, 25 bp, Homo sapien
caggccccctgcagcaagaagaacc

SEQ ID NO: 2596125 - DNA, 25 bp, Homo sapien
catgtggccaggccccctgcagcaa

SEQ ID NO: 2596126 - DNA, 25 bp, Homo sapien
caggagggaaggttttctgtggact

SEQ ID NO: 2596127 - DNA, 25 bp, Homo sapien
gccaggagggaaggttttctgtgga

SEQ ID NO: 2596128 - DNA, 25 bp, Homo sapien
accaacattgcaggatgactgtctc

SEQ ID NO: 2596129 - DNA, 25 bp, Homo sapien
catgacatctgaccaacattgcagg

SEQ ID NO: 2596130 - DNA, 25 bp, Homo sapien
tctgaccaacattgcaggatgactg

SEQ ID NO: 2596131 - DNA, 25 bp, Homo sapien
tcaaacatgacatctgaccaacatt

SEQ ID NO: 2596132 - DNA, 25 bp, Homo sapien
gggagtgagtaacagaaccgtagca

SEQ ID NO: 2596133 - DNA, 25 bp, Homo sapien
cacgatgtccagagggtcactggga

SEQ ID NO: 2596134 - DNA, 25 bp, Homo sapien
tgatcacgatgtccagagggtcact

SEQ ID NO: 2596135 - DNA, 25 bp, Homo sapien
agtaacagaaccgtagcatctgtag

SEQ ID NO: 2596136 - DNA, 25 bp, Homo sapien
tgcagggagcctacgttcatgggcc

SEQ ID NO: 2596137 - DNA, 25 bp, Homo sapien
ggtacatgtcataggagctccggga

SEQ ID NO: 2596138 - DNA, 25 bp, Homo sapien
tatggagagtcacggaaagagccga

SEQ ID NO: 2596139 - DNA, 25 bp, Homo sapien
cacttgactttgaccactcgtatgg

SEQ ID NO: 2596140 - DNA, 25 bp, Homo sapien
gtgggtgaaggccaactatttgaag

SEQ ID NO: 2596141 - DNA, 25 bp, Homo sapien
tgggtgaaggccaactatttgaagg

SEQ ID NO: 2596142 - DNA, 25 bp, Homo sapien
gagcttggttcagtgggtgaaggcc

SEQ ID NO: 2596143 - DNA, 25 bp, Homo sapien
agtgggtgaaggccaactatttgaa

SEQ ID NO: 2596144 - DNA, 25 bp, Homo sapien
gggattttgaccactgaggtcccaa

SEQ ID NO: 2596145 - DNA, 25 bp, Homo sapien
gaaagggattttgaccactgaggtc

SEQ ID NO: 2596146 - DNA, 25 bp, Homo sapien
aggatggtgaaagggattttgacca

SEQ ID NO: 2596147 - DNA, 25 bp, Homo sapien
ggtgaaagggattttgaccactgag

SEQ ID NO: 2596148 - DNA, 25 bp, Homo sapien
gttccctgcaggctcttggtccatt

SEQ ID NO: 2596149 - DNA, 25 bp, Homo sapien
ttccctgcaggctcttggtccatta

SEQ ID NO: 2596150 - DNA, 25 bp, Homo sapien
tgttccctgcaggctcttggtccat

SEQ ID NO: 2596151 - DNA, 25 bp, Homo sapien
tccctgcaggctcttggtccattac

SEQ ID NO: 2596152 - DNA, 25 bp, Homo sapien
tttgggaataagactagccacgagg

SEQ ID NO: 2596153 - DNA, 25 bp, Homo sapien
aataagactagccacgaggctgggc

SEQ ID NO: 2596154 - DNA, 25 bp, Homo sapien
ttgggaataagactagccacgaggc

SEQ ID NO: 2596155 - DNA, 25 bp, Homo sapien
ttatgcgtatgacacctcctgatgg

SEQ ID NO: 2596156 - DNA, 25 bp, Homo sapien
tatgcgtatgacacctcctgatggt

SEQ ID NO: 2596157 - DNA, 25 bp, Homo sapien
tgcgtatgacacctcctgatggtct

SEQ ID NO: 2596158 - DNA, 25 bp, Homo sapien
gtatgacacctcctgatggtcttgt

SEQ ID NO: 2596159 - DNA, 25 bp, Homo sapien
ggtgctcgtggacagaagacaactt

SEQ ID NO: 2596160 - DNA, 25 bp, Homo sapien
ggcctctcagaagggcgagtgattt

SEQ ID NO: 2596161 - DNA, 25 bp, Homo sapien
gaagttctatgtacatgctggtatc

SEQ ID NO: 2596162 - DNA, 25 bp, Homo sapien
tagaagatcccctcaaggcctgact

SEQ ID NO: 2596163 - DNA, 25 bp, Homo sapien
caacacacgccatgctgacgaccat

SEQ ID NO: 2596164 - DNA, 25 bp, Homo sapien
ggccaggccccctgcagcaagaaga

SEQ ID NO: 2596165 - DNA, 25 bp, Homo sapien
cctcatgtggccaggccccctgcag

SEQ ID NO: 2596166 - DNA, 25 bp, Homo sapien
caggccccctgcagcaagaagaacc

SEQ ID NO: 2596167 - DNA, 25 bp, Homo sapien
catgtggccaggccccctgcagcaa

SEQ ID NO: 2596168 - DNA, 25 bp, Homo sapien
cagacagcaagggcttgtcctgacc

SEQ ID NO: 2596169 - DNA, 25 bp, Homo sapien
ctagaggcaccacaaggctgggcca

SEQ ID NO: 2596170 - DNA, 25 bp, Homo sapien
aggcagacagcaagggcttgtcctg

SEQ ID NO: 2596171 - DNA, 25 bp, Homo sapien
gacagcaagggcttgtcctgaccac

SEQ ID NO: 2596172 - DNA, 25 bp, Homo sapien
ccaagataagagtgacaccgaagaa

SEQ ID NO: 2596173 - DNA, 25 bp, Homo sapien
aagagtgacaccgaagaatgacatg

SEQ ID NO: 2596174 - DNA, 25 bp, Homo sapien
gagtgacaccgaagaatgacatgtc

SEQ ID NO: 2596175 - DNA, 25 bp, Homo sapien
gataagagtgacaccgaagaatgac

SEQ ID NO: 2596176 - DNA, 25 bp, Homo sapien
caggagggaaggttttctgtggact

SEQ ID NO: 2596177 - DNA, 25 bp, Homo sapien
gccaggagggaaggttttctgtgga

SEQ ID NO: 2596178 - DNA, 25 bp, Homo sapien
accaacattgcaggatgactgtctc

SEQ ID NO: 2596179 - DNA, 25 bp, Homo sapien
catcatgggaccgatggagaagttg

SEQ ID NO: 2596180 - DNA, 25 bp, Homo sapien
ctgacatctgaccaacattgcagga

SEQ ID NO: 2596181 - DNA, 25 bp, Homo sapien
aaggtcttgcatcatgggaccgatg

SEQ ID NO: 2596182 - DNA, 25 bp, Homo sapien
ggggagtgagtaacagaaccgtagc

SEQ ID NO: 2596183 - DNA, 25 bp, Homo sapien
atagggggagtgagtaacagaaccg

SEQ ID NO: 2596184 - DNA, 25 bp, Homo sapien
ggagtgagtaacagaaccgtagcat

SEQ ID NO: 2596185 - DNA, 25 bp, Homo sapien
tgatagggggagtgagtaacagaac

SEQ ID NO: 2596186 - DNA, 25 bp, Homo sapien
gtccagagggtcactgggagctgac

SEQ ID NO: 2596187 - DNA, 25 bp, Homo sapien
ctgtgatgacgatgtccagagggtc

SEQ ID NO: 2596188 - DNA, 25 bp, Homo sapien
tgatgacgatgtccagagggtcact

SEQ ID NO: 2596189 - DNA, 25 bp, Homo sapien
atgacgatgtccagagggtcactgg

SEQ ID NO: 2596190 - DNA, 25 bp, Homo sapien
tggaatgttccgttgaccttgggcc

SEQ ID NO: 2596191 - DNA, 25 bp, Homo sapien
cccctccctggatagatggtacatg

SEQ ID NO: 2596192 - DNA, 25 bp, Homo sapien
ggtacatgtcataggagctccggga

SEQ ID NO: 2596193 - DNA, 25 bp, Homo sapien
cagaggaaagtcggcctggaatgtt

SEQ ID NO: 2596194 - DNA, 25 bp, Homo sapien
ctgtgacagaaacaagcagtgggtc

SEQ ID NO: 2596195 - DNA, 25 bp, Homo sapien
gaaacaagcagtgggtcactcgagt

SEQ ID NO: 2596196 - DNA, 25 bp, Homo sapien
gtgggtcactcgagtttgaccactc

SEQ ID NO: 2596197 - DNA, 25 bp, Homo sapien
tagggagagtcacggaaagagccga

SEQ ID NO: 2596198 - DNA, 25 bp, Homo sapien
tgggtgaaggccaactatttgaagg

SEQ ID NO: 2596199 - DNA, 25 bp, Homo sapien
gtgggtgaaggccaactatttgaag

SEQ ID NO: 2596200 - DNA, 25 bp, Homo sapien
gagcttggttcagtgggtgaaggcc

SEQ ID NO: 2596201 - DNA, 25 bp, Homo sapien
agtgggtgaaggccaactatttgaa

SEQ ID NO: 2596202 - DNA, 25 bp, Homo sapien
ttgttggagcaccagcgatgaagga

SEQ ID NO: 2596203 - DNA, 25 bp, Homo sapien
gggattttgaccactgaggtcccaa

SEQ ID NO: 2596204 - DNA, 25 bp, Homo sapien
aggatggtgaaagggattttgacca

SEQ ID NO: 2596205 - DNA, 25 bp, Homo sapien
ttttttgttggagcaccagcgatga

SEQ ID NO: 2596206 - DNA, 25 bp, Homo sapien
tgttccctgcaggctcttggtccat

SEQ ID NO: 2596207 - DNA, 25 bp, Homo sapien
tccctgcaggctcttggtccattac

SEQ ID NO: 2596208 - DNA, 25 bp, Homo sapien
gttccctgcaggctcttggtccatt

SEQ ID NO: 2596209 - DNA, 25 bp, Homo sapien
ttccctgcaggctcttggtccatta

SEQ ID NO: 2596210 - DNA, 25 bp, Homo sapien
ttgggaataagactagccacgaggc

SEQ ID NO: 2596211 - DNA, 25 bp, Homo sapien
tttgggaataagactagccacgagg

SEQ ID NO: 2596212 - DNA, 25 bp, Homo sapien
aataagactagccacgaggctgggc

SEQ ID NO: 2596213 - DNA, 25 bp, Homo sapien
tatgcgtatgacacctcctgatggt

SEQ ID NO: 2596214 - DNA, 25 bp, Homo sapien
gtatgacacctcctgatggtcttgt

SEQ ID NO: 2596215 - DNA, 25 bp, Homo sapien
tgcgtatgacacctcctgatggtct

SEQ ID NO: 2596216 - DNA, 25 bp, Homo sapien
ttatgcgtatgacacctcctgatgg

SEQ ID NO: 2596217 - DNA, 25 bp, Homo sapien
ggtgctcgtggacagaagacaactt

SEQ ID NO: 2596218 - DNA, 25 bp, Homo sapien
ggcctctcagaagggcgagtgattt

SEQ ID NO: 2596219 - DNA, 25 bp, Homo sapien
gaagttctatgtacatgctggtatc

SEQ ID NO: 2596220 - DNA, 25 bp, Homo sapien
tagaagatcccctcaaggcctgact

SEQ ID NO: 2596221 - DNA, 25 bp, Homo sapien
tgagttcctcagtgtgattgcagcc

SEQ ID NO: 2596222 - DNA, 25 bp, Homo sapien
ctggtacatgggagctggcaacccg

SEQ ID NO: 2596223 - DNA, 25 bp, Homo sapien
tgccctaagatgaagactgatgcct

SEQ ID NO: 2596224 - DNA, 25 bp, Homo sapien
catgttcagattcgtggtgtgagga

SEQ ID NO: 2596225 - DNA, 25 bp, Homo sapien
gagtggccaggccccctgcagcaag

SEQ ID NO: 2596226 - DNA, 25 bp, Homo sapien
ccatgagtggccaggccccctgcag

SEQ ID NO: 2596227 - DNA, 25 bp, Homo sapien
ccaggccccctgcagcaagaagaac

SEQ ID NO: 2596228 - DNA, 25 bp, Homo sapien
caggccccctgcagcaagaagaacc

SEQ ID NO: 2596229 - DNA, 25 bp, Homo sapien
tgaaccccgacatctgtaggtccct

SEQ ID NO: 2596230 - DNA, 25 bp, Homo sapien
gtgaaccccgacatctgtaggtccc

SEQ ID NO: 2596231 - DNA, 25 bp, Homo sapien
accaacattgcaggatgactgtctc

SEQ ID NO: 2596232 - DNA, 25 bp, Homo sapien
caaacatgacatctgaccaacattg

SEQ ID NO: 2596233 - DNA, 25 bp, Homo sapien
catggatctgtccaacgaggcgtga

SEQ ID NO: 2596234 - DNA, 25 bp, Homo sapien
gaagtgctcaaacatgacatctgac

SEQ ID NO: 2596235 - DNA, 25 bp, Homo sapien
aacagaaccataacatctgtaggtt

SEQ ID NO: 2596236 - DNA, 25 bp, Homo sapien
agcctacgttcatgggcctcccctt

SEQ ID NO: 2596237 - DNA, 25 bp, Homo sapien
agatggtagatgtcataggagctcc

SEQ ID NO: 2596238 - DNA, 25 bp, Homo sapien
tctcctgcctgaaccgtggggcccg

SEQ ID NO: 2596239 - DNA, 25 bp, Homo sapien
ggagcctacgttcatgggcctcccc

SEQ ID NO: 2596240 - DNA, 25 bp, Homo sapien
tcacttgagtttgaccacacgcagg

SEQ ID NO: 2596241 - DNA, 25 bp, Homo sapien
tgagtttgaccacacgcagggcagg

SEQ ID NO: 2596242 - DNA, 25 bp, Homo sapien
ttgagtttgaccacacgcagggcag

SEQ ID NO: 2596243 - DNA, 25 bp, Homo sapien
gggtcacttgagtttgaccacacgc

SEQ ID NO: 2596244 - DNA, 25 bp, Homo sapien
ttctccccatcatcggcaggaagct

SEQ ID NO: 2596245 - DNA, 25 bp, Homo sapien
tgcttctccccatcatcggcaggaa

SEQ ID NO: 2596246 - DNA, 25 bp, Homo sapien
cctcagctatggctctaggatcata

SEQ ID NO: 2596247 - DNA, 25 bp, Homo sapien
gacatgggacagacacgggttttcc

SEQ ID NO: 2596248 - DNA, 25 bp, Homo sapien
tttggagcttggttctgtgggtgaa

SEQ ID NO: 2596249 - DNA, 25 bp, Homo sapien
tgggtgaaggccaactacttgaagg

SEQ ID NO: 2596250 - DNA, 25 bp, Homo sapien
ctgtgggtgaaggccaactacttga

SEQ ID NO: 2596251 - DNA, 25 bp, Homo sapien
ttggttctgtgggtgaaggccaact

SEQ ID NO: 2596252 - DNA, 25 bp, Homo sapien
gctccttggcctccgttccctttgc

SEQ ID NO: 2596253 - DNA, 25 bp, Homo sapien
ctctgtggctccttggcctccgttc

SEQ ID NO: 2596254 - DNA, 25 bp, Homo sapien
tgtggctccttggcctccgttccct

SEQ ID NO: 2596255 - DNA, 25 bp, Homo sapien
cttagcctctgtggctccttggcct

SEQ ID NO: 2596256 - DNA, 25 bp, Homo sapien
tccagcttagcctccttggtagggt

SEQ ID NO: 2596257 - DNA, 25 bp, Homo sapien
agggtaccggcagtgtccctccagg

SEQ ID NO: 2596258 - DNA, 25 bp, Homo sapien
ttcccggtttggttactgctcgctg

SEQ ID NO: 2596259 - DNA, 25 bp, Homo sapien
tcctccttgtctctaatcctgtgtc

SEQ ID NO: 2596260 - DNA, 25 bp, Homo sapien
tctggtggataaatatagcccctgc

SEQ ID NO: 2596261 - DNA, 25 bp, Homo sapien
ggtggataaatatagcccctgctca

SEQ ID NO: 2596262 - DNA, 25 bp, Homo sapien
ttccttctctctggtggataaatat

SEQ ID NO: 2596263 - DNA, 25 bp, Homo sapien
tctctctggtggataaatatagccc

SEQ ID NO: 2596264 - DNA, 25 bp, Homo sapien
tcaggctagactgtcccgggtcttc

SEQ ID NO: 2596265 - DNA, 25 bp, Homo sapien
tctggcaccgcttgagaaggtctct

SEQ ID NO: 2596266 - DNA, 25 bp, Homo sapien
gctcaggctagactgtcccgggtct

SEQ ID NO: 2596267 - DNA, 25 bp, Homo sapien
tgggtttctcgtagtgcccgtctgg

SEQ ID NO: 2596268 - DNA, 25 bp, Homo sapien
ccgctggagccgtgtggctcgcact

SEQ ID NO: 2596269 - DNA, 25 bp, Homo sapien
ggtgcccacccgcaccgccgctgga

SEQ ID NO: 2596270 - DNA, 25 bp, Homo sapien
cccgcaccgccgctggagccgtgtg

SEQ ID NO: 2596271 - DNA, 25 bp, Homo sapien
ccgtgtggctcgcactgggctcgct

SEQ ID NO: 2596272 - DNA, 25 bp, Homo sapien
ggatctgtgcgttctctctaacaag

SEQ ID NO: 2596273 - DNA, 25 bp, Homo sapien
ttctctctaacaaggctccactgtc

SEQ ID NO: 2596274 - DNA, 25 bp, Homo sapien
gaggcatgccagcaacgccctgcag

SEQ ID NO: 2596275 - DNA, 25 bp, Homo sapien
cctgcaggttgaggccagaagataa

SEQ ID NO: 2596276 - DNA, 25 bp, Homo sapien
ctcccagtgcccccaccatcttcac

SEQ ID NO: 2596277 - DNA, 25 bp, Homo sapien
cccagtgcccccaccatcttcactt

SEQ ID NO: 2596278 - DNA, 25 bp, Homo sapien
gtgcccccaccatcttcactttcat

SEQ ID NO: 2596279 - DNA, 25 bp, Homo sapien
agtgcccccaccatcttcactttca

SEQ ID NO: 2596280 - DNA, 25 bp, Homo sapien
tactctagcggctgagcttagggag

SEQ ID NO: 2596281 - DNA, 25 bp, Homo sapien
tcctctgtctttgggctactctagc

SEQ ID NO: 2596282 - DNA, 25 bp, Homo sapien
gctgtggacctgagaccgtttccct

SEQ ID NO: 2596283 - DNA, 25 bp, Homo sapien
tgttacactctgattgctgtggacc

SEQ ID NO: 2596284 - DNA, 25 bp, Homo sapien
gctcctgctgaatgcagtagctctc

SEQ ID NO: 2596285 - DNA, 25 bp, Homo sapien
tgccgggctcctgctgaatgcagta

SEQ ID NO: 2596286 - DNA, 25 bp, Homo sapien
cgggctcctgctgaatgcagtagct

SEQ ID NO: 2596287 - DNA, 25 bp, Homo sapien
ctgctgaatgcagtagctctccggg

SEQ ID NO: 2596288 - DNA, 25 bp, Homo sapien
cacatattacaaggtctaggagggc

SEQ ID NO: 2596289 - DNA, 25 bp, Homo sapien
tagactattgggtaatgacactgcc

SEQ ID NO: 2596290 - DNA, 25 bp, Homo sapien
tcctgcgacgatggccagtctgtgg

SEQ ID NO: 2596291 - DNA, 25 bp, Homo sapien
gtcacagcaagtcacaagcacctgg

SEQ ID NO: 2596292 - DNA, 25 bp, Homo sapien
ctggctgatgctgctgtggggcaca

SEQ ID NO: 2596293 - DNA, 25 bp, Homo sapien
tcctggctgatgctgctgtggggca

SEQ ID NO: 2596294 - DNA, 25 bp, Homo sapien
atggctcctggctgatgctgctgtg

SEQ ID NO: 2596295 - DNA, 25 bp, Homo sapien
ggctcctggctgatgctgctgtggg

SEQ ID NO: 2596296 - DNA, 25 bp, Homo sapien
agtaattgctgccttggttacaagc

SEQ ID NO: 2596297 - DNA, 25 bp, Homo sapien
ctgccttggttacaagcagtgagtg

SEQ ID NO: 2596298 - DNA, 25 bp, Homo sapien
ttgaccctcacagtaattgctgcct

SEQ ID NO: 2596299 - DNA, 25 bp, Homo sapien
tttgaccctcacagtaattgctgcc

SEQ ID NO: 2596300 - DNA, 25 bp, Homo sapien
tctgccaggctgctcatgtgcttca

SEQ ID NO: 2596301 - DNA, 25 bp, Homo sapien
atgggatatggcgtcttctgcaggc

SEQ ID NO: 2596302 - DNA, 25 bp, Homo sapien
aagacagcacggttcctctccaggt

SEQ ID NO: 2596303 - DNA, 25 bp, Homo sapien
gggaacatcagacgccagatttgct

SEQ ID NO: 2596304 - DNA, 25 bp, Homo sapien
ttccaccagatcctattggggtggg

SEQ ID NO: 2596305 - DNA, 25 bp, Homo sapien
gatctcccagtggtgtgtgcgtgct

SEQ ID NO: 2596306 - DNA, 25 bp, Homo sapien
gtttgcctgacttttcttccaccag

SEQ ID NO: 2596307 - DNA, 25 bp, Homo sapien
agagccagctagaagatctgatctc

SEQ ID NO: 2596308 - DNA, 25 bp, Homo sapien
gggcggggtttccttggctcagtgc

SEQ ID NO: 2596309 - DNA, 25 bp, Homo sapien
gcggggtttccttggctcagtgcca

SEQ ID NO: 2596310 - DNA, 25 bp, Homo sapien
gggtttccttggctcagtgccaggg

SEQ ID NO: 2596311 - DNA, 25 bp, Homo sapien
agtgccagggcagccctggtcttca

SEQ ID NO: 2596312 - DNA, 25 bp, Homo sapien
ctccctctaaggtggtctcttccaa

SEQ ID NO: 2596313 - DNA, 25 bp, Homo sapien
aggcaggcctctccaaggaggtctg

SEQ ID NO: 2596314 - DNA, 25 bp, Homo sapien
ctaaggtggtctcttccaaggcagg

SEQ ID NO: 2596315 - DNA, 25 bp, Homo sapien
ccctctaaggtggtctcttccaagg

SEQ ID NO: 2596316 - DNA, 25 bp, Homo sapien
gtcttggtcgtcttgttggctggcc

SEQ ID NO: 2596317 - DNA, 25 bp, Homo sapien
ccagtcccgggtcttggtcgtcttg

SEQ ID NO: 2596318 - DNA, 25 bp, Homo sapien
ttggctggccttgggccactgaggc

SEQ ID NO: 2596319 - DNA, 25 bp, Homo sapien
ggccttgggccactgaggccaagat

SEQ ID NO: 2596320 - DNA, 25 bp, Homo sapien
gcagtagcattcgcggggacagtca

SEQ ID NO: 2596321 - DNA, 25 bp, Homo sapien
ttgcggctatcacagtagagggcag

SEQ ID NO: 2596322 - DNA, 25 bp, Homo sapien
ctttcgcaggttgcggctatcacag

SEQ ID NO: 2596323 - DNA, 25 bp, Homo sapien
cagtcagggaagatagatggagggc

SEQ ID NO: 2596324 - DNA, 25 bp, Homo sapien
tgaagttgttctggagatagaggta

SEQ ID NO: 2596325 - DNA, 25 bp, Homo sapien
tccaccgggagctcagtgatgaagt

SEQ ID NO: 2596326 - DNA, 25 bp, Homo sapien
gttaatccatcgcaggcctgtggca

SEQ ID NO: 2596327 - DNA, 25 bp, Homo sapien
cttgcggattcggttgttgtccagg

SEQ ID NO: 2596328 - DNA, 25 bp, Homo sapien
cctgttgttgatggcgggcacactg

SEQ ID NO: 2596329 - DNA, 25 bp, Homo sapien
aagctcttgaagtatccgttaggga

SEQ ID NO: 2596330 - DNA, 25 bp, Homo sapien
acactgctgatcctgttgtgggaca

SEQ ID NO: 2596331 - DNA, 25 bp, Homo sapien
tccagcttgctgaagacaccaggcg

SEQ ID NO: 2596332 - DNA, 25 bp, Homo sapien
tctccctagagagggtggaagtgct

SEQ ID NO: 2596333 - DNA, 25 bp, Homo sapien
gtctccctagagagggtggaagtgc

SEQ ID NO: 2596334 - DNA, 25 bp, Homo sapien
catggaacgccactaggtcgttggg

SEQ ID NO: 2596335 - DNA, 25 bp, Homo sapien
ggatgggcggcttcaagtagtttcc

SEQ ID NO: 2596336 - DNA, 25 bp, Homo sapien
tccaggtccgaggagaagtcatgga

SEQ ID NO: 2596337 - DNA, 25 bp, Homo sapien
gaagcacatcatgaggtccagcggg

SEQ ID NO: 2596338 - DNA, 25 bp, Homo sapien
tcagatagtccacggcccagatgta

SEQ ID NO: 2596339 - DNA, 25 bp, Homo sapien
tcaagtgcggtcagagcagatccgg

SEQ ID NO: 2596340 - DNA, 25 bp, Homo sapien
tgtttgctcggccaggaccaagatc

SEQ ID NO: 2596341 - DNA, 25 bp, Homo sapien
tttcaactgggtggaaccaaactga

SEQ ID NO: 2596342 - DNA, 25 bp, Homo sapien
tccttcccgatacccgggccagcag

SEQ ID NO: 2596343 - DNA, 25 bp, Homo sapien
tctggtgccggggaaccaagcggcg

SEQ ID NO: 2596344 - DNA, 25 bp, Homo sapien
gtttctcggcctctttgagccagag

SEQ ID NO: 2596345 - DNA, 25 bp, Homo sapien
ctcgctcctccttcccgatacccgg

SEQ ID NO: 2596346 - DNA, 25 bp, Homo sapien
cctgggctcactcacgatgggaatg

SEQ ID NO: 2596347 - DNA, 25 bp, Homo sapien
caaacgggagccgactatgtcctca

SEQ ID NO: 2596348 - DNA, 25 bp, Homo sapien
caacgagtctgggtttgcaggatca

SEQ ID NO: 2596349 - DNA, 25 bp, Homo sapien
gcaccaggttgctttcggccataat

SEQ ID NO: 2596350 - DNA, 25 bp, Homo sapien
ctgaacatccgtgaagtgaaccgaa

SEQ ID NO: 2596351 - DNA, 25 bp, Homo sapien
tcctgggagaccttcgacaatttag

SEQ ID NO: 2596352 - DNA, 25 bp, Homo sapien
gaaccgaagtcgatgtttagtagcc

SEQ ID NO: 2596353 - DNA, 25 bp, Homo sapien
ggtggacttccgcatggcatgtaga

SEQ ID NO: 2596354 - DNA, 25 bp, Homo sapien
ccttcaatgcttctggatcctggat

SEQ ID NO: 2596355 - DNA, 25 bp, Homo sapien
cccttcaatgcttctggatcctgga

SEQ ID NO: 2596356 - DNA, 25 bp, Homo sapien
tggatcctggatggagagccctgca

SEQ ID NO: 2596357 - DNA, 25 bp, Homo sapien
atgcttctggatcctggatggagag

SEQ ID NO: 2596358 - DNA, 25 bp, Homo sapien
ctgagaatcccttcagcggctggtc

SEQ ID NO: 2596359 - DNA, 25 bp, Homo sapien
cagatgggactgagaatcccttcag

SEQ ID NO: 2596360 - DNA, 25 bp, Homo sapien
tgggactgagaatcccttcagcggc

SEQ ID NO: 2596361 - DNA, 25 bp, Homo sapien
gactgagaatcccttcagcggctgg

SEQ ID NO: 2596362 - DNA, 25 bp, Homo sapien
acatcattccgcagaggcagaactt

SEQ ID NO: 2596363 - DNA, 25 bp, Homo sapien
ggcagaacttcaaaggaatcgcctt

SEQ ID NO: 2596364 - DNA, 25 bp, Homo sapien
tgggttcaggacatcattccgcaga

SEQ ID NO: 2596365 - DNA, 25 bp, Homo sapien
aggaatcgccttccctgggcatctg

SEQ ID NO: 2596366 - DNA, 25 bp, Homo sapien
caggtcaatgacttcaccatagttg

SEQ ID NO: 2596367 - DNA, 25 bp, Homo sapien
ggagttggtccccataatctgtgag

SEQ ID NO: 2596368 - DNA, 25 bp, Homo sapien
agttggtccccataatctgtgagct

SEQ ID NO: 2596369 - DNA, 25 bp, Homo sapien
agctcctcatagttgctcaggtcaa

SEQ ID NO: 2596370 - DNA, 25 bp, Homo sapien
caggagcgaggctagtcaccttaac

SEQ ID NO: 2596371 - DNA, 25 bp, Homo sapien
ctggttgcaggagcgaggctagtca

SEQ ID NO: 2596372 - DNA, 25 bp, Homo sapien
ggttgcaggagcgaggctagtcacc

SEQ ID NO: 2596373 - DNA, 25 bp, Homo sapien
ttgcaggagcgaggctagtcacctt

SEQ ID NO: 2596374 - DNA, 25 bp, Homo sapien
gtccctggagccgtagtgctcttgg

SEQ ID NO: 2596375 - DNA, 25 bp, Homo sapien
gagggtgtccctggagccgtagtgc

SEQ ID NO: 2596376 - DNA, 25 bp, Homo sapien
ggtttgacgagggtgtccctggagc

SEQ ID NO: 2596377 - DNA, 25 bp, Homo sapien
ccgtagtgctcttggcgggactgat

SEQ ID NO: 2596378 - DNA, 25 bp, Homo sapien
ctgggaactcagtagcagccctgct

SEQ ID NO: 2596379 - DNA, 25 bp, Homo sapien
gccctgctgtagtaggtctggtcat

SEQ ID NO: 2596380 - DNA, 25 bp, Homo sapien
gggctgggaactcagtagcagccct

SEQ ID NO: 2596381 - DNA, 25 bp, Homo sapien
gtagcagccctgctgtagtaggtct

SEQ ID NO: 2596382 - DNA, 25 bp, Homo sapien
aggtcaatgtcatcgcaatacacag

SEQ ID NO: 2596383 - DNA, 25 bp, Homo sapien
catcgcaatacacagaggaaccgag

SEQ ID NO: 2596384 - DNA, 25 bp, Homo sapien
caatgtcatcgcaatacacagagga

SEQ ID NO: 2596385 - DNA, 25 bp, Homo sapien
tgtcatcgcaatacacagaggaacc

SEQ ID NO: 2596386 - DNA, 25 bp, Homo sapien
tcagccctttgaagtcttcggccct

SEQ ID NO: 2596387 - DNA, 25 bp, Homo sapien
cggctgatgcggttgaagcgtgcat

SEQ ID NO: 2596388 - DNA, 25 bp, Homo sapien
aggtaggcagtcctccgaggaagag

SEQ ID NO: 2596389 - DNA, 25 bp, Homo sapien
ctgatgcggttgaagcgtgcataca

SEQ ID NO: 2596390 - DNA, 25 bp, Homo sapien
gcaggcggaaggcatcattatcgat

SEQ ID NO: 2596391 - DNA, 25 bp, Homo sapien
gctctggagccgatttaggcggaca

SEQ ID NO: 2596392 - DNA, 25 bp, Homo sapien
tgcaggctgtatccccgagctctgg

SEQ ID NO: 2596393 - DNA, 25 bp, Homo sapien
cacgggcagagcttccaactggttc

SEQ ID NO: 2596394 - DNA, 25 bp, Homo sapien
gggatagaatccagcaggttgtctg

SEQ ID NO: 2596395 - DNA, 25 bp, Homo sapien
ctgcaggtgtacagagcgcaggctc

SEQ ID NO: 2596396 - DNA, 25 bp, Homo sapien
tgcaggtgtacagagcgcaggctca

SEQ ID NO: 2596397 - DNA, 25 bp, Homo sapien
caaaggccccgggatagaatccagc

SEQ ID NO: 2596398 - DNA, 25 bp, Homo sapien
cctgcgggtgtgtttgtgctcctcg

SEQ ID NO: 2596399 - DNA, 25 bp, Homo sapien
cagaagacgtctctctgcatggtct

SEQ ID NO: 2596400 - DNA, 25 bp, Homo sapien
tgctcctcggggtcacagaagacgt

SEQ ID NO: 2596401 - DNA, 25 bp, Homo sapien
tgcctgcgggtgtgtttgtgctcct

SEQ ID NO: 2596402 - DNA, 25 bp, Homo sapien
ctgggaggagtggaagggctccgag

SEQ ID NO: 2596403 - DNA, 25 bp, Homo sapien
tgggcttctttgtcacccgcaggga

SEQ ID NO: 2596404 - DNA, 25 bp, Homo sapien
ggagaatgtgatgcccgctggtcca

SEQ ID NO: 2596405 - DNA, 25 bp, Homo sapien
gagaagggagacgtgagagctgtgg

SEQ ID NO: 2596406 - DNA, 25 bp, Homo sapien
ggaattttattacaatgaggcagga

SEQ ID NO: 2596407 - DNA, 25 bp, Homo sapien
cagggcgttctgtgtgggctcattt

SEQ ID NO: 2596408 - DNA, 25 bp, Homo sapien
taattctggagtcggtacagtggca

SEQ ID NO: 2596409 - DNA, 25 bp, Homo sapien
catttgaaaggaagtacacaagccc

SEQ ID NO: 2596410 - DNA, 25 bp, Homo sapien
caaaaagctatttgctgtggtgcct

SEQ ID NO: 2596411 - DNA, 25 bp, Homo sapien
tggacaacgtgtaattcaaaggtcg

SEQ ID NO: 2596412 - DNA, 25 bp, Homo sapien
cagaaagggcctgaaaagcttggat

SEQ ID NO: 2596413 - DNA, 25 bp, Homo sapien
caagagaggtgctgcggctctcaca

SEQ ID NO: 2596414 - DNA, 25 bp, Homo sapien
ctgtgccgagcctccttcagggatt

SEQ ID NO: 2596415 - DNA, 25 bp, Homo sapien
cttgttgcctggtagccaagcaaca

SEQ ID NO: 2596416 - DNA, 25 bp, Homo sapien
ttgttgcctggtagccaagcaacag

SEQ ID NO: 2596417 - DNA, 25 bp, Homo sapien
tgccacagggttaggcaacttgtcc

SEQ ID NO: 2596418 - DNA, 25 bp, Homo sapien
gaagagaagcagagccgtctgccac

SEQ ID NO: 2596419 - DNA, 25 bp, Homo sapien
caacttgtccctcatcccttgtggg

SEQ ID NO: 2596420 - DNA, 25 bp, Homo sapien
gcagagccgtctgccacagggttag

SEQ ID NO: 2596421 - DNA, 25 bp, Homo sapien
aactgaggacctagttggagagaca

SEQ ID NO: 2596422 - DNA, 25 bp, Homo sapien
gaccctccaggattgatgggctatg

SEQ ID NO: 2596423 - DNA, 25 bp, Homo sapien
gaattatggatgtcgcatccgccag

SEQ ID NO: 2596424 - DNA, 25 bp, Homo sapien
cacgagcgtatgtcttgcagagaaa

SEQ ID NO: 2596425 - DNA, 25 bp, Homo sapien
tagcattattgcctacagttactgc

SEQ ID NO: 2596426 - DNA, 25 bp, Homo sapien
gtctgtcactgttagcattattgcc

SEQ ID NO: 2596427 - DNA, 25 bp, Homo sapien
tgtcccgagcaccatgtctgtcact

SEQ ID NO: 2596428 - DNA, 25 bp, Homo sapien
cattattgcctacagttactgcccc

SEQ ID NO: 2596429 - DNA, 25 bp, Homo sapien
gcctcctccgaggaatcttccagcc

SEQ ID NO: 2596430 - DNA, 25 bp, Homo sapien
ctgagggcaggctcattaagcgaat

SEQ ID NO: 2596431 - DNA, 25 bp, Homo sapien
caggctcattaagcgaatgaggagg

SEQ ID NO: 2596432 - DNA, 25 bp, Homo sapien
gcagctgtcagtgtgggcacgccct

SEQ ID NO: 2596433 - DNA, 25 bp, Homo sapien
ggacggcctggtccgtattcaagac

SEQ ID NO: 2596434 - DNA, 25 bp, Homo sapien
acagccatgaggacggcctggtccg

SEQ ID NO: 2596435 - DNA, 25 bp, Homo sapien
catgaggacggcctggtccgtattc

SEQ ID NO: 2596436 - DNA, 25 bp, Homo sapien
gaggacggcctggtccgtattcaag

SEQ ID NO: 2596437 - DNA, 25 bp, Homo sapien
cctgatcatttactgacatgttgac

SEQ ID NO: 2596438 - DNA, 25 bp, Homo sapien
tgttccttgaataataacctgatca

SEQ ID NO: 2596439 - DNA, 25 bp, Homo sapien
gacttcctagggagtgtgtcttctt

SEQ ID NO: 2596440 - DNA, 25 bp, Homo sapien
tgggacttcctagggagtgtgtctt

SEQ ID NO: 2596441 - DNA, 25 bp, Homo sapien
ttttccaccagctcactggaaaatc

SEQ ID NO: 2596442 - DNA, 25 bp, Homo sapien
ccagatggttcgaccaagggttaca

SEQ ID NO: 2596443 - DNA, 25 bp, Homo sapien
cgtattattcgccagatggttcgac

SEQ ID NO: 2596444 - DNA, 25 bp, Homo sapien
tcctttacccgattctgctgtccct

SEQ ID NO: 2596445 - DNA, 25 bp, Homo sapien
ggcttctgtaagagtggccgtatta

SEQ ID NO: 2596446 - DNA, 25 bp, Homo sapien
tgggagtcagctgaattgggggccg

SEQ ID NO: 2596447 - DNA, 25 bp, Homo sapien
gaagaagactggatgggagtcagct

SEQ ID NO: 2596448 - DNA, 25 bp, Homo sapien
agaagaagactggatgggagtcagc

SEQ ID NO: 2596449 - DNA, 25 bp, Homo sapien
gtcagctgaattgggggccgcagag

SEQ ID NO: 2596450 - DNA, 25 bp, Homo sapien
tggcttgccattttggatacctgga

SEQ ID NO: 2596451 - DNA, 25 bp, Homo sapien
gcttgccattttggatacctggatt

SEQ ID NO: 2596452 - DNA, 25 bp, Homo sapien
cacgccaccgcaggaaaatctggct

SEQ ID NO: 2596453 - DNA, 25 bp, Homo sapien
agctgccacgccaccgcaggaaaat

SEQ ID NO: 2596454 - DNA, 25 bp, Homo sapien
ccagctgctggggagtacagctttc

SEQ ID NO: 2596455 - DNA, 25 bp, Homo sapien
ctgcatctgtgaggggcctgctggg

SEQ ID NO: 2596456 - DNA, 25 bp, Homo sapien
agctgctggggagtacagctttctc

SEQ ID NO: 2596457 - DNA, 25 bp, Homo sapien
gaccagctgctggggagtacagctt

SEQ ID NO: 2596458 - DNA, 25 bp, Homo sapien
ctgcaggcatcatgaaagctccatg

SEQ ID NO: 2596459 - DNA, 25 bp, Homo sapien
taaaggtgaccgaagcactcttcac

SEQ ID NO: 2596460 - DNA, 25 bp, Homo sapien
cacccatgttaaaggtgaccgaagc

SEQ ID NO: 2596461 - DNA, 25 bp, Homo sapien
cgtgcagcccaaaacacccatgtta

SEQ ID NO: 2596462 - DNA, 25 bp, Homo sapien
actcttcacccgaaagctgccttgg

SEQ ID NO: 2596463 - DNA, 25 bp, Homo sapien
caccaggactgatgcagtggaccct

SEQ ID NO: 2596464 - DNA, 25 bp, Homo sapien
gcaccaggactgatgcagtggaccc

SEQ ID NO: 2596465 - DNA, 25 bp, Homo sapien
ccaggactgatgcagtggaccctgc

SEQ ID NO: 2596466 - DNA, 25 bp, Homo sapien
caggactgatgcagtggaccctgct

SEQ ID NO: 2596467 - DNA, 25 bp, Homo sapien
ctgagaatatggaggttctgaagac

SEQ ID NO: 2596468 - DNA, 25 bp, Homo sapien
ccgaacccccgccacaaatgtggca

SEQ ID NO: 2596469 - DNA, 25 bp, Homo sapien
caggagcagtcattcgtagcagtgg

SEQ ID NO: 2596470 - DNA, 25 bp, Homo sapien
tttgaccacatgctgatgagggcag

SEQ ID NO: 2596471 - DNA, 25 bp, Homo sapien
agggcagggtttgtgtctccctgct

SEQ ID NO: 2596472 - DNA, 25 bp, Homo sapien
tcaacactgagctcaacgggcgtct

SEQ ID NO: 2596473 - DNA, 25 bp, Homo sapien
catccatcaacactgagctcaacgg

SEQ ID NO: 2596474 - DNA, 25 bp, Homo sapien
acactgagctcaacgggcgtctcct

SEQ ID NO: 2596475 - DNA, 25 bp, Homo sapien
catcaacactgagctcaacgggcgt

SEQ ID NO: 2596476 - DNA, 25 bp, Homo sapien
ggaaacttgttttctgccagaagtc

SEQ ID NO: 2596477 - DNA, 25 bp, Homo sapien
gcctgctgaggaccatgtatcctgt

SEQ ID NO: 2596478 - DNA, 25 bp, Homo sapien
gtgtctcccaaacatgaagcctgct

SEQ ID NO: 2596479 - DNA, 25 bp, Homo sapien
catgcttttggctgattaggaaact

SEQ ID NO: 2596480 - DNA, 25 bp, Homo sapien
actctccctggcataggagactctt

SEQ ID NO: 2596481 - DNA, 25 bp, Homo sapien
cactctccctggcataggagactct

SEQ ID NO: 2596482 - DNA, 25 bp, Homo sapien
tcttcctttgttatgactctttttc

SEQ ID NO: 2596483 - DNA, 25 bp, Homo sapien
cccaagcccactttctttctgtcat

SEQ ID NO: 2596484 - DNA, 25 bp, Homo sapien
tctcttcctttgttatgactctttt

SEQ ID NO: 2596485 - DNA, 25 bp, Homo sapien
ccttcttccctctgttcctctgcct

SEQ ID NO: 2596486 - DNA, 25 bp, Homo sapien
gagccacttgtgaaaagggctgcga

SEQ ID NO: 2596487 - DNA, 25 bp, Homo sapien
cacttgtgaaaagggctgcgagaga

SEQ ID NO: 2596488 - DNA, 25 bp, Homo sapien
aagggctgcgagagacgcccaagat

SEQ ID NO: 2596489 - DNA, 25 bp, Homo sapien
gagagacgcccaagatggatcagcc

SEQ ID NO: 2596490 - DNA, 25 bp, Homo sapien
catagcggcgtgatgccagcatggt

SEQ ID NO: 2596491 - DNA, 25 bp, Homo sapien
tgatgccagcatggtgggtgcttct

SEQ ID NO: 2596492 - DNA, 25 bp, Homo sapien
ggcttcatagcggcgtgatgccagc

SEQ ID NO: 2596493 - DNA, 25 bp, Homo sapien
atgccagcatggtgggtgcttctgc

SEQ ID NO: 2596494 - DNA, 25 bp, Homo sapien
cctttgtatccagcccaaaggcgga

SEQ ID NO: 2596495 - DNA, 25 bp, Homo sapien
tatccagcccaaaggcggagatacc

SEQ ID NO: 2596496 - DNA, 25 bp, Homo sapien
tcttgcatccagctttgaatcatct

SEQ ID NO: 2596497 - DNA, 25 bp, Homo sapien
gcggagatacctttcctgtgatggt

SEQ ID NO: 2596498 - DNA, 25 bp, Homo sapien
caagaaaccccaagggcagccgcgg

SEQ ID NO: 2596499 - DNA, 25 bp, Homo sapien
ccttttgagatatgaggcgaagctc

SEQ ID NO: 2596500 - DNA, 25 bp, Homo sapien
tactttcgaggcatagctctggccc

SEQ ID NO: 2596501 - DNA, 25 bp, Homo sapien
gaggcatagctctggcccttttgag

SEQ ID NO: 2596502 - DNA, 25 bp, Homo sapien
tatgaggcgaagctctgatcagccc

SEQ ID NO: 2596503 - DNA, 25 bp, Homo sapien
gttccggttccgtgtggtgcagaga

SEQ ID NO: 2596504 - DNA, 25 bp, Homo sapien
tcgggttccggttccgtgtggtgca

SEQ ID NO: 2596505 - DNA, 25 bp, Homo sapien
ttccgtgtggtgcagagagctagct

SEQ ID NO: 2596506 - DNA, 25 bp, Homo sapien
cggttccgtgtggtgcagagagcta

SEQ ID NO: 2596507 - DNA, 25 bp, Homo sapien
agcttgaagacgttgtacgtggaag

SEQ ID NO: 2596508 - DNA, 25 bp, Homo sapien
cgttgtacgtggaagtgaacagaac

SEQ ID NO: 2596509 - DNA, 25 bp, Homo sapien
gaagacgttgtacgtggaagtgaac

SEQ ID NO: 2596510 - DNA, 25 bp, Homo sapien
tacgtggaagtgaacagaacacaca

SEQ ID NO: 2596511 - DNA, 25 bp, Homo sapien
cgcgcttctcccctagatactccgg

SEQ ID NO: 2596512 - DNA, 25 bp, Homo sapien
cttctcccctagatactccggccat

SEQ ID NO: 2596513 - DNA, 25 bp, Homo sapien
gcatcgcgcttctcccctagatact

SEQ ID NO: 2596514 - DNA, 25 bp, Homo sapien
gcgcttctcccctagatactccggc

SEQ ID NO: 2596515 - DNA, 25 bp, Homo sapien
gagccggtggacgaatctgtccttg

SEQ ID NO: 2596516 - DNA, 25 bp, Homo sapien
cggtggacgaatctgtccttgctgc

SEQ ID NO: 2596517 - DNA, 25 bp, Homo sapien
ttgcaagaatggccgtgtccccagg

SEQ ID NO: 2596518 - DNA, 25 bp, Homo sapien
caggagccggtggacgaatctgtcc

SEQ ID NO: 2596519 - DNA, 25 bp, Homo sapien
tgtagaatggaaagcgtcgtgccag

SEQ ID NO: 2596520 - DNA, 25 bp, Homo sapien
aatggaaagcgtcgtgccagacagt

SEQ ID NO: 2596521 - DNA, 25 bp, Homo sapien
tggaaagcgtcgtgccagacagtgc

SEQ ID NO: 2596522 - DNA, 25 bp, Homo sapien
agaatggaaagcgtcgtgccagaca

SEQ ID NO: 2596523 - DNA, 25 bp, Homo sapien
gttcccatggcctggccggtctgca

SEQ ID NO: 2596524 - DNA, 25 bp, Homo sapien
ttgtagccgtcagggagcacctgtt

SEQ ID NO: 2596525 - DNA, 25 bp, Homo sapien
ggcccgtgcacccatggttttgtag

SEQ ID NO: 2596526 - DNA, 25 bp, Homo sapien
ggtctgcagtccttgtagtcagctg

SEQ ID NO: 2596527 - DNA, 25 bp, Homo sapien
atggcagacgccatgaggaaggacc

SEQ ID NO: 2596528 - DNA, 25 bp, Homo sapien
cctgttcgcgaggtccctgggcaga

SEQ ID NO: 2596529 - DNA, 25 bp, Homo sapien
cctgggcagagttcggccgggcgat

SEQ ID NO: 2596530 - DNA, 25 bp, Homo sapien
gaactcatttccctgttcgcgaggt

SEQ ID NO: 2596531 - DNA, 25 bp, Homo sapien
cgtggcaacagctggcagtgcagcc

SEQ ID NO: 2596532 - DNA, 25 bp, Homo sapien
cagtgcagccccaccacgcagagag

SEQ ID NO: 2596533 - DNA, 25 bp, Homo sapien
agccccaccacgcagagagctgcac

SEQ ID NO: 2596534 - DNA, 25 bp, Homo sapien
tgcagccccaccacgcagagagctg

SEQ ID NO: 2596535 - DNA, 25 bp, Homo sapien
ctggccccgagccagcagctttgtg

SEQ ID NO: 2596536 - DNA, 25 bp, Homo sapien
cggatcttcagaatgcgcctccagc

SEQ ID NO: 2596537 - DNA, 25 bp, Homo sapien
tagcacacagaaggtcccggagcag

SEQ ID NO: 2596538 - DNA, 25 bp, Homo sapien
cagctttgtgccctgtgttaccgga

SEQ ID NO: 2596539 - DNA, 25 bp, Homo sapien
tccggcccacccgcctgcggtcctg

SEQ ID NO: 2596540 - DNA, 25 bp, Homo sapien
ccacccgcctgcggtcctgtgtgct

SEQ ID NO: 2596541 - DNA, 25 bp, Homo sapien
gcccacccgcctgcggtcctgtgtg

SEQ ID NO: 2596542 - DNA, 25 bp, Homo sapien
cggcccacccgcctgcggtcctgtg

SEQ ID NO: 2596543 - DNA, 25 bp, Homo sapien
tgtccacaccttgggtgcccccgtc

SEQ ID NO: 2596544 - DNA, 25 bp, Homo sapien
tccctctcctcatgtcctaataggt

SEQ ID NO: 2596545 - DNA, 25 bp, Homo sapien
ccgtcctccctctcctcatgtccta

SEQ ID NO: 2596546 - DNA, 25 bp, Homo sapien
gtcctccctctcctcatgtcctaat

SEQ ID NO: 2596547 - DNA, 25 bp, Homo sapien
cggtgcgcgtggacgtggcaggtgt

SEQ ID NO: 2596548 - DNA, 25 bp, Homo sapien
aaggtctttaggtaggggcagtgcg

SEQ ID NO: 2596549 - DNA, 25 bp, Homo sapien
gtgatgacgctttctgaaggctaaa

SEQ ID NO: 2596550 - DNA, 25 bp, Homo sapien
tgcgcgtggacgtggcggtgcgcgt

SEQ ID NO: 2596551 - DNA, 25 bp, Homo sapien
tcagtcagtgatgtgtttgagctgc

SEQ ID NO: 2596552 - DNA, 25 bp, Homo sapien
gtgatgtgtttgagctgctgtgtcc

SEQ ID NO: 2596553 - DNA, 25 bp, Homo sapien
gagagtcagtcagtgatgtgtttga

SEQ ID NO: 2596554 - DNA, 25 bp, Homo sapien
tgtcctcctctttgctgttacgggt

SEQ ID NO: 2596555 - DNA, 25 bp, Homo sapien
tggcggaagtccccaggggagtgtc

SEQ ID NO: 2596556 - DNA, 25 bp, Homo sapien
ctggtggtggcggaagtccccaggg

SEQ ID NO: 2596557 - DNA, 25 bp, Homo sapien
tgggcccctggtgacccgcatttgt

SEQ ID NO: 2596558 - DNA, 25 bp, Homo sapien
ttttctttggcctcgtactcagctg

SEQ ID NO: 2596559 - DNA, 25 bp, Homo sapien
tttgtctgcccacattgactcgtgg

SEQ ID NO: 2596560 - DNA, 25 bp, Homo sapien
ctggcagcggttggtgataacgtct

SEQ ID NO: 2596561 - DNA, 25 bp, Homo sapien
gcctttttaaggcagagtgccctgc

SEQ ID NO: 2596562 - DNA, 25 bp, Homo sapien
ctttttaaggcagagtgccctgccc

SEQ ID NO: 2596563 - DNA, 25 bp, Homo sapien
tgcgcccggcctgaaggtgcctttt

SEQ ID NO: 2596564 - DNA, 25 bp, Homo sapien
cctgaaggtgcctttttaaggcaga

SEQ ID NO: 2596565 - DNA, 25 bp, Homo sapien
ggatcccaaaatgtggggtagccat

SEQ ID NO: 2596566 - DNA, 25 bp, Homo sapien
ctctgctgaggatcccaaaatgtgg

SEQ ID NO: 2596567 - DNA, 25 bp, Homo sapien
gctgaggatcccaaaatgtggggta

SEQ ID NO: 2596568 - DNA, 25 bp, Homo sapien
tgaggatcccaaaatgtggggtagc

SEQ ID NO: 2596569 - DNA, 25 bp, Homo sapien
tcaatggccccagtggagaggccca

SEQ ID NO: 2596570 - DNA, 25 bp, Homo sapien
ccagtggagaggcccactgagcatc

SEQ ID NO: 2596571 - DNA, 25 bp, Homo sapien
aatggccccagtggagaggcccact

SEQ ID NO: 2596572 - DNA, 25 bp, Homo sapien
ctgtcaatggccccagtggagaggc

SEQ ID NO: 2596573 - DNA, 25 bp, Homo sapien
ccagaccttccacggggtctggtgg

SEQ ID NO: 2596574 - DNA, 25 bp, Homo sapien
gctctgctgcgatgtttccgaggct

SEQ ID NO: 2596575 - DNA, 25 bp, Homo sapien
cagttaatcagatctgtcagcccag

SEQ ID NO: 2596576 - DNA, 25 bp, Homo sapien
gtttccgaggctcccagttaatcag

SEQ ID NO: 2596577 - DNA, 25 bp, Homo sapien
tcagcagacgcagggctgctccgca

SEQ ID NO: 2596578 - DNA, 25 bp, Homo sapien
gggtggttttcacacgtgcgcctgc

SEQ ID NO: 2596579 - DNA, 25 bp, Homo sapien
ctccgcacagccagcttgggccgca

SEQ ID NO: 2596580 - DNA, 25 bp, Homo sapien
gggtccttgagtgatgaagattctg

SEQ ID NO: 2596581 - DNA, 25 bp, Homo sapien
ggaaatcgtcttgggctcgtctgcc

SEQ ID NO: 2596582 - DNA, 25 bp, Homo sapien
gaccacgggtgaagtctggagaccc

SEQ ID NO: 2596583 - DNA, 25 bp, Homo sapien
gggttaatgtgcacggctcactcca

SEQ ID NO: 2596584 - DNA, 25 bp, Homo sapien
aggcctgcggtctttccgtctcgag

SEQ ID NO: 2596585 - DNA, 25 bp, Homo sapien
gatgtcgcattttcaaggtccgctg

SEQ ID NO: 2596586 - DNA, 25 bp, Homo sapien
ttttcctgtgacgtcagcgtcagct

SEQ ID NO: 2596587 - DNA, 25 bp, Homo sapien
gactgtgctgatgcagagatgcttg

SEQ ID NO: 2596588 - DNA, 25 bp, Homo sapien
catgccgtgttttagtttgtgcctc

SEQ ID NO: 2596589 - DNA, 25 bp, Homo sapien
tcactcgccacggccacagctgcgc

SEQ ID NO: 2596590 - DNA, 25 bp, Homo sapien
cactcgccacggccacagctgcgct

SEQ ID NO: 2596591 - DNA, 25 bp, Homo sapien
gaaggggctgcagccatgtgggtgg

SEQ ID NO: 2596592 - DNA, 25 bp, Homo sapien
ggggctgcagccatgtgggtggagc

SEQ ID NO: 2596593 - DNA, 25 bp, Homo sapien
ctggggcagatagcaggggaagggg

SEQ ID NO: 2596594 - DNA, 25 bp, Homo sapien
gctgcagccatgtgggtggagccat

SEQ ID NO: 2596595 - DNA, 25 bp, Homo sapien
tctctggatgcaagggtggcaaagt

SEQ ID NO: 2596596 - DNA, 25 bp, Homo sapien
tcatggccagggatgttaatagcag

SEQ ID NO: 2596597 - DNA, 25 bp, Homo sapien
ttggcaagcgggaggttttcatggc

SEQ ID NO: 2596598 - DNA, 25 bp, Homo sapien
caaagtcgccttggcctgtgtaggg

SEQ ID NO: 2596599 - DNA, 25 bp, Homo sapien
agcagcgagagcaaggctggatcca

SEQ ID NO: 2596600 - DNA, 25 bp, Homo sapien
tgtgagaggcagcagtacgttcctt

SEQ ID NO: 2596601 - DNA, 25 bp, Homo sapien
tcaggccacgggactctggacgtgt

SEQ ID NO: 2596602 - DNA, 25 bp, Homo sapien
agcccgaaatgcagcagatccctca

SEQ ID NO: 2596603 - DNA, 25 bp, Homo sapien
cagtgccgggtgaggccagtgtgtg

SEQ ID NO: 2596604 - DNA, 25 bp, Homo sapien
ctgcagtgccgggtgaggccagtgt

SEQ ID NO: 2596605 - DNA, 25 bp, Homo sapien
tgtgtggccggtagattcccgggta

SEQ ID NO: 2596606 - DNA, 25 bp, Homo sapien
aggccagtgtgtggccggtagattc

SEQ ID NO: 2596607 - DNA, 25 bp, Homo sapien
ggcccctctcccgcttgtttctcca

SEQ ID NO: 2596608 - DNA, 25 bp, Homo sapien
gcacgggggtccgcatgaggggccg

SEQ ID NO: 2596609 - DNA, 25 bp, Homo sapien
gggtccgcatgaggggccgcaggtg

SEQ ID NO: 2596610 - DNA, 25 bp, Homo sapien
gcccctctcccgcttgtttctccat

SEQ ID NO: 2596611 - DNA, 25 bp, Homo sapien
tcacgccccggtcgagtggggatcc

SEQ ID NO: 2596612 - DNA, 25 bp, Homo sapien
tctgtggcggcctcagtggtgttgg

SEQ ID NO: 2596613 - DNA, 25 bp, Homo sapien
gggtggagtaatcgggcggtggagc

SEQ ID NO: 2596614 - DNA, 25 bp, Homo sapien
tgcatctgtggcggcctcagtggtg

SEQ ID NO: 2596615 - DNA, 25 bp, Homo sapien
cggcattgcctctctgcccgtgtgg

SEQ ID NO: 2596616 - DNA, 25 bp, Homo sapien
ctttctgtctacgacctcggcattg

SEQ ID NO: 2596617 - DNA, 25 bp, Homo sapien
aagggaggcccgcatttgctcggcc

SEQ ID NO: 2596618 - DNA, 25 bp, Homo sapien
aacctgccggccttgcgtagggaag

SEQ ID NO: 2596619 - DNA, 25 bp, Homo sapien
ccgaggagccatccggaggtgggcc

SEQ ID NO: 2596620 - DNA, 25 bp, Homo sapien
gccggcaaggccgaggagccatccg

SEQ ID NO: 2596621 - DNA, 25 bp, Homo sapien
aggccgaggagccatccggaggtgg

SEQ ID NO: 2596622 - DNA, 25 bp, Homo sapien
ggcaaggccgaggagccatccggag

SEQ ID NO: 2596623 - DNA, 25 bp, Homo sapien
gccttgttcgttgtgtgggcaggag

SEQ ID NO: 2596624 - DNA, 25 bp, Homo sapien
gggcaggagctcctggaccgaggcc

SEQ ID NO: 2596625 - DNA, 25 bp, Homo sapien
caggagctcctggaccgaggccgct

SEQ ID NO: 2596626 - DNA, 25 bp, Homo sapien
ccttgttcgttgtgtgggcaggagc

SEQ ID NO: 2596627 - DNA, 25 bp, Homo sapien
ttcctactgcatcccggagactgtt

SEQ ID NO: 2596628 - DNA, 25 bp, Homo sapien
cccggagactgttgggccctgagca

SEQ ID NO: 2596629 - DNA, 25 bp, Homo sapien
caggtggctacgctgctctcgggcc

SEQ ID NO: 2596630 - DNA, 25 bp, Homo sapien
ctcgggccgcgcatcccatggctgt

SEQ ID NO: 2596631 - DNA, 25 bp, Homo sapien
tgaactgttgatccgttgtgccacg

SEQ ID NO: 2596632 - DNA, 25 bp, Homo sapien
aggttcaccctcgtggagcgtcagg

SEQ ID NO: 2596633 - DNA, 25 bp, Homo sapien
ggcctgccatgtccgggagaagaca

SEQ ID NO: 2596634 - DNA, 25 bp, Homo sapien
ggcgggacttcctccgtgagactgt

SEQ ID NO: 2596635 - DNA, 25 bp, Homo sapien
gatgggaccaaagctcgaaaccacc

SEQ ID NO: 2596636 - DNA, 25 bp, Homo sapien
caaagccccatgatgagctgacgca

SEQ ID NO: 2596637 - DNA, 25 bp, Homo sapien
tgtgtccacttctggcgtagcttgg

SEQ ID NO: 2596638 - DNA, 25 bp, Homo sapien
gccagccggtcacgtctttgtctct

SEQ ID NO: 2596639 - DNA, 25 bp, Homo sapien
cttagtgaagccggcggcctgcacc

SEQ ID NO: 2596640 - DNA, 25 bp, Homo sapien
gctcgcgcccatcccggggtcaccc

SEQ ID NO: 2596641 - DNA, 25 bp, Homo sapien
agtgaagccggcggcctgcaccgac

SEQ ID NO: 2596642 - DNA, 25 bp, Homo sapien
gcggcctgcaccgacccggctcgcg

SEQ ID NO: 2596643 - DNA, 25 bp, Homo sapien
cctctagattggccggaaactggct

SEQ ID NO: 2596644 - DNA, 25 bp, Homo sapien
tggcctctagattggccggaaactg

SEQ ID NO: 2596645 - DNA, 25 bp, Homo sapien
ggcctctagattggccggaaactgg

SEQ ID NO: 2596646 - DNA, 25 bp, Homo sapien
tctagattggccggaaactggcttc

SEQ ID NO: 2596647 - DNA, 25 bp, Homo sapien
gacgttctggctattggacttgtcc

SEQ ID NO: 2596648 - DNA, 25 bp, Homo sapien
tggaggtcagcaggttaaaacttgg

SEQ ID NO: 2596649 - DNA, 25 bp, Homo sapien
tattggacttgtccagggacctggg

SEQ ID NO: 2596650 - DNA, 25 bp, Homo sapien
cttggtatggttgacgttctggcta

SEQ ID NO: 2596651 - DNA, 25 bp, Homo sapien
tccgctcccgcgagggtggctgctg

SEQ ID NO: 2596652 - DNA, 25 bp, Homo sapien
tgggacctccgctcccgcgagggtg

SEQ ID NO: 2596653 - DNA, 25 bp, Homo sapien
cgtctccaggagccccgaactggga

SEQ ID NO: 2596654 - DNA, 25 bp, Homo sapien
tgttcttccacctgtgcgcgtctcc

SEQ ID NO: 2596655 - DNA, 25 bp, Homo sapien
acgtcgtggacagcgcgggctcctt

SEQ ID NO: 2596656 - DNA, 25 bp, Homo sapien
gctcctgcgcgagagggagagaggg

SEQ ID NO: 2596657 - DNA, 25 bp, Homo sapien
tcctcggcccggtcattgtggtaga

SEQ ID NO: 2596658 - DNA, 25 bp, Homo sapien
gggctgtcgcgggaggtcctcggtc

SEQ ID NO: 2596659 - DNA, 25 bp, Homo sapien
tcccggggcgcagcgctgacggcgg

SEQ ID NO: 2596660 - DNA, 25 bp, Homo sapien
gagctcccggggcgcagcgctgacg

SEQ ID NO: 2596661 - DNA, 25 bp, Homo sapien
ccgcgccatggccggagctcccggg

SEQ ID NO: 2596662 - DNA, 25 bp, Homo sapien
agctcccggggcgcagcgctgacgg

SEQ ID NO: 2596663 - DNA, 25 bp, Homo sapien
cgcgccgcaggagtttcgattcgga

SEQ ID NO: 2596664 - DNA, 25 bp, Homo sapien
tcagtccgcaagtgtgagatgtcag

SEQ ID NO: 2596665 - DNA, 25 bp, Homo sapien
cctacaggggaccttggattcgctg

SEQ ID NO: 2596666 - DNA, 25 bp, Homo sapien
tgggcgaaggccgagaactcgcgtt

SEQ ID NO: 2596667 - DNA, 25 bp, Homo sapien
ctgggcgaagtgagcggttgcactc

SEQ ID NO: 2596668 - DNA, 25 bp, Homo sapien
gggcgaagtgagcggttgcactcac

SEQ ID NO: 2596669 - DNA, 25 bp, Homo sapien
tgggcgaagtgagcggttgcactca

SEQ ID NO: 2596670 - DNA, 25 bp, Homo sapien
aaggtcatgggcgactcgggccaat

SEQ ID NO: 2596671 - DNA, 25 bp, Homo sapien
cccctcgagtaaggcccgagaggct

SEQ ID NO: 2596672 - DNA, 25 bp, Homo sapien
tgatcagggaaaaccgtattttcag

SEQ ID NO: 2596673 - DNA, 25 bp, Homo sapien
cctggagggcgattgtccagatcaa

SEQ ID NO: 2596674 - DNA, 25 bp, Homo sapien
cagtggatgcagccagtaagggatg

SEQ ID NO: 2596675 - DNA, 25 bp, Homo sapien
agtggatgcagccagtaagggatgg

SEQ ID NO: 2596676 - DNA, 25 bp, Homo sapien
gtggatgcagccagtaagggatggg

SEQ ID NO: 2596677 - DNA, 25 bp, Homo sapien
tcagtggatgcagccagtaagggat

SEQ ID NO: 2596678 - DNA, 25 bp, Homo sapien
ctgggtgaggtcctgcaggcagcag

SEQ ID NO: 2596679 - DNA, 25 bp, Homo sapien
gtgcctgggtgaggtcctgcaggca

SEQ ID NO: 2596680 - DNA, 25 bp, Homo sapien
ctggtgcctgggtgaggtcctgcag

SEQ ID NO: 2596681 - DNA, 25 bp, Homo sapien
cctgggtgaggtcctgcaggcagca

SEQ ID NO: 2596682 - DNA, 25 bp, Homo sapien
cctggcatcaaggaggcgccaggca

SEQ ID NO: 2596683 - DNA, 25 bp, Homo sapien
aacgacagcttctgcgtaggagagg

SEQ ID NO: 2596684 - DNA, 25 bp, Homo sapien
gaaaaaacgacagcttctgcgtagg

SEQ ID NO: 2596685 - DNA, 25 bp, Homo sapien
ccggcttggcggaagctttgctgta

SEQ ID NO: 2596686 - DNA, 25 bp, Homo sapien
ggcgtgttccccagtggtctggacc

SEQ ID NO: 2596687 - DNA, 25 bp, Homo sapien
gttctccactctgagggcgtgtcca

SEQ ID NO: 2596688 - DNA, 25 bp, Homo sapien
tggcgctgtgtccccgcacaggtct

SEQ ID NO: 2596689 - DNA, 25 bp, Homo sapien
actctgagggcgtgtccagtccaga

SEQ ID NO: 2596690 - DNA, 25 bp, Homo sapien
gctcccgacactcagtaacttcact

SEQ ID NO: 2596691 - DNA, 25 bp, Homo sapien
caggcccgggagagttggaaggagg

SEQ ID NO: 2596692 - DNA, 25 bp, Homo sapien
tggctcccgacactcagtaacttca

SEQ ID NO: 2596693 - DNA, 25 bp, Homo sapien
gctggctcccgacactcagtaactt

SEQ ID NO: 2596694 - DNA, 25 bp, Homo sapien
cgtgctgtgaatcaggctttctgcc

SEQ ID NO: 2596695 - DNA, 25 bp, Homo sapien
ccccagggcgatcagaggagattcg

SEQ ID NO: 2596696 - DNA, 25 bp, Homo sapien
gagattcggtcatcggcctgctcct

SEQ ID NO: 2596697 - DNA, 25 bp, Homo sapien
tgctcctcagcgtgctgtgaatcag

SEQ ID NO: 2596698 - DNA, 25 bp, Homo sapien
tccctgcttggaccgtgcagaggct

SEQ ID NO: 2596699 - DNA, 25 bp, Homo sapien
gcctccctgcttggaccgtgcagag

SEQ ID NO: 2596700 - DNA, 25 bp, Homo sapien
tgcttggaccgtgcagaggctccag

SEQ ID NO: 2596701 - DNA, 25 bp, Homo sapien
ctgcttggaccgtgcagaggctcca

SEQ ID NO: 2596702 - DNA, 25 bp, Homo sapien
agcccgtcagccaggaccgtcgcct

SEQ ID NO: 2596703 - DNA, 25 bp, Homo sapien
caggaccgtcgcctggctgcttgga

SEQ ID NO: 2596704 - DNA, 25 bp, Homo sapien
agccaggaccgtcgcctggctgctt

SEQ ID NO: 2596705 - DNA, 25 bp, Homo sapien
accgtcgcctggctgcttggactgt

SEQ ID NO: 2596706 - DNA, 25 bp, Homo sapien
ctcagttggttgttcatcgcccact

SEQ ID NO: 2596707 - DNA, 25 bp, Homo sapien
ttgttcatcgcccactccagggaca

SEQ ID NO: 2596708 - DNA, 25 bp, Homo sapien
ttggttgttcatcgcccactccagg

SEQ ID NO: 2596709 - DNA, 25 bp, Homo sapien
gttcatcgcccactccagggacatg

SEQ ID NO: 2596710 - DNA, 25 bp, Homo sapien
ttctccgaggagaccaaggctctcc

SEQ ID NO: 2596711 - DNA, 25 bp, Homo sapien
ccttctccgaggagaccaaggctct

SEQ ID NO: 2596712 - DNA, 25 bp, Homo sapien
cttctccgaggagaccaaggctctc

SEQ ID NO: 2596713 - DNA, 25 bp, Homo sapien
tctccgaggagaccaaggctctcct

SEQ ID NO: 2596714 - DNA, 25 bp, Homo sapien
ttaaaccagatgtagcccgaagggc

SEQ ID NO: 2596715 - DNA, 25 bp, Homo sapien
gatgccatgttaagcttgtctgcgg

SEQ ID NO: 2596716 - DNA, 25 bp, Homo sapien
tctgcggctgattcttcaaggtggt

SEQ ID NO: 2596717 - DNA, 25 bp, Homo sapien
ctgcttgcatctgttccggcggatg

SEQ ID NO: 2596718 - DNA, 25 bp, Homo sapien
ggctgccagggctccgtacaccccc

SEQ ID NO: 2596719 - DNA, 25 bp, Homo sapien
gctgccagggctccgtacaccccca

SEQ ID NO: 2596720 - DNA, 25 bp, Homo sapien
ctgccagggctccgtacacccccat

SEQ ID NO: 2596721 - DNA, 25 bp, Homo sapien
caggctgtgcccgagagcagatgag

SEQ ID NO: 2596722 - DNA, 25 bp, Homo sapien
cacaggccgagctgcttccccaagg

SEQ ID NO: 2596723 - DNA, 25 bp, Homo sapien
gggatggacacaggccgagctgctt

SEQ ID NO: 2596724 - DNA, 25 bp, Homo sapien
gagagcagatgagggcactgcccac

SEQ ID NO: 2596725 - DNA, 25 bp, Homo sapien
gggacccaggcatccggggcactgc

SEQ ID NO: 2596726 - DNA, 25 bp, Homo sapien
ccaggtgtctggggcgctaccatcc

SEQ ID NO: 2596727 - DNA, 25 bp, Homo sapien
gtctggggcgctaccatcctctgca

SEQ ID NO: 2596728 - DNA, 25 bp, Homo sapien
ctgcgggacccaggcatccggggca

SEQ ID NO: 2596729 - DNA, 25 bp, Homo sapien
tgacaggcagctcttaatgaggggt

SEQ ID NO: 2596730 - DNA, 25 bp, Homo sapien
cactgggtcattactcgtggaagaa

SEQ ID NO: 2596731 - DNA, 25 bp, Homo sapien
cactgccacggacatggggagacca

SEQ ID NO: 2596732 - DNA, 25 bp, Homo sapien
acagggcactgggtcattactcgtg

SEQ ID NO: 2596733 - DNA, 25 bp, Homo sapien
atgtccccgcgctgtgatgaggcca

SEQ ID NO: 2596734 - DNA, 25 bp, Homo sapien
tcagcagggcaggcttcgagggaag

SEQ ID NO: 2596735 - DNA, 25 bp, Homo sapien
gggtctcctcatctatgtccccgcg

SEQ ID NO: 2596736 - DNA, 25 bp, Homo sapien
ggcaggcttcgagggaagagcttca

SEQ ID NO: 2596737 - DNA, 25 bp, Homo sapien
aggttctgaccgagaggctgagcca

SEQ ID NO: 2596738 - DNA, 25 bp, Homo sapien
tttcgaagtgggatgacagtcggcc

SEQ ID NO: 2596739 - DNA, 25 bp, Homo sapien
aacttcctgggagaaagagccctcg

SEQ ID NO: 2596740 - DNA, 25 bp, Homo sapien
cagtcggccacggaaaacaagagga

SEQ ID NO: 2596741 - DNA, 25 bp, Homo sapien
gatgtagatatagaggtggctgacc

SEQ ID NO: 2596742 - DNA, 25 bp, Homo sapien
ctcagagaccgtgaagatgtagata

SEQ ID NO: 2596743 - DNA, 25 bp, Homo sapien
tagtagagatggcagcacccaacac

SEQ ID NO: 2596744 - DNA, 25 bp, Homo sapien
agagttttcccattggaggtgcggg

SEQ ID NO: 2596745 - DNA, 25 bp, Homo sapien
gcggcgcgtgagggcagcggtcccg

SEQ ID NO: 2596746 - DNA, 25 bp, Homo sapien
tgcggcgcgtgagggcagcggtccc

SEQ ID NO: 2596747 - DNA, 25 bp, Homo sapien
ggcgcgtgagggcagcggtcccgga

SEQ ID NO: 2596748 - DNA, 25 bp, Homo sapien
cgcgtgagggcagcggtcccggaga

SEQ ID NO: 2596749 - DNA, 25 bp, Homo sapien
accgcctcgggacgaggttctgccg

SEQ ID NO: 2596750 - DNA, 25 bp, Homo sapien
gccggtgtcgcctcccatgaagaca

SEQ ID NO: 2596751 - DNA, 25 bp, Homo sapien
ctcccatgaagacacccggagggtc

SEQ ID NO: 2596752 - DNA, 25 bp, Homo sapien
gaagcagccacgcagacgtgcgacc

SEQ ID NO: 2596753 - DNA, 25 bp, Homo sapien
agggcccttcatccagaagcacgca

SEQ ID NO: 2596754 - DNA, 25 bp, Homo sapien
ttcatccagaagcacgcagcctcgg

SEQ ID NO: 2596755 - DNA, 25 bp, Homo sapien
gcctcggggacagcttcgccatttt

SEQ ID NO: 2596756 - DNA, 25 bp, Homo sapien
taagtgttttcacgaggggttgaca

SEQ ID NO: 2596757 - DNA, 25 bp, Homo sapien
ccaccaaggagaagacggacaagac

SEQ ID NO: 2596758 - DNA, 25 bp, Homo sapien
tacttcatccaatacaccaccaagg

SEQ ID NO: 2596759 - DNA, 25 bp, Homo sapien
aggagaagacggacaagacccctgt

SEQ ID NO: 2596760 - DNA, 25 bp, Homo sapien
cttcatccaatacaccaccaaggag

SEQ ID NO: 2596761 - DNA, 25 bp, Homo sapien
caggagatggggcataacctccagt

SEQ ID NO: 2596762 - DNA, 25 bp, Homo sapien
cagagcctcgttcggagggtgggtt

SEQ ID NO: 2596763 - DNA, 25 bp, Homo sapien
gagggtgggttctcccacaggacag

SEQ ID NO: 2596764 - DNA, 25 bp, Homo sapien
tattccccagagagcgggcagccca

SEQ ID NO: 2596765 - DNA, 25 bp, Homo sapien
aaagggctctggatggatcctcccc

SEQ ID NO: 2596766 - DNA, 25 bp, Homo sapien
caaagggctctggatggatcctccc

SEQ ID NO: 2596767 - DNA, 25 bp, Homo sapien
aagggctctggatggatcctccccg

SEQ ID NO: 2596768 - DNA, 25 bp, Homo sapien
ccaaagggctctggatggatcctcc

SEQ ID NO: 2596769 - DNA, 25 bp, Homo sapien
tgcacgttctgctccgtgccatatg

SEQ ID NO: 2596770 - DNA, 25 bp, Homo sapien
ttccagagccaaaggtgcacgttct

SEQ ID NO: 2596771 - DNA, 25 bp, Homo sapien
cgagtcagtgactcccagggctaac

SEQ ID NO: 2596772 - DNA, 25 bp, Homo sapien
tgtccagggaagaaccgagtcagtg

SEQ ID NO: 2596773 - DNA, 25 bp, Homo sapien
taagcgtggtttccgactgaactgc

SEQ ID NO: 2596774 - DNA, 25 bp, Homo sapien
ctttgtttcagtagacggccggtct

SEQ ID NO: 2596775 - DNA, 25 bp, Homo sapien
tgcttatccacatgaacggagtccg

SEQ ID NO: 2596776 - DNA, 25 bp, Homo sapien
gaaaaaatgttctaagcggccaagc

SEQ ID NO: 2596777 - DNA, 25 bp, Homo sapien
tggacggtcccgttaatgagctgcc

SEQ ID NO: 2596778 - DNA, 25 bp, Homo sapien
cagcagcccactttaggcgtcttcg

SEQ ID NO: 2596779 - DNA, 25 bp, Homo sapien
tgagctgccgcgagttccattcgcg

SEQ ID NO: 2596780 - DNA, 25 bp, Homo sapien
tccattcgcggccagatcttgtctc

SEQ ID NO: 2596781 - DNA, 25 bp, Homo sapien
taaacaaaccgaggtgtgagcatgc

SEQ ID NO: 2596782 - DNA, 25 bp, Homo sapien
gaacgacggctctgctagaaatcca

SEQ ID NO: 2596783 - DNA, 25 bp, Homo sapien
tcagcttttgtaggtctgggtcccg

SEQ ID NO: 2596784 - DNA, 25 bp, Homo sapien
tagcccagaactgcatatgtcccag

SEQ ID NO: 2596785 - DNA, 25 bp, Homo sapien
ccgcagtgccagatcgctttcctcc

SEQ ID NO: 2596786 - DNA, 25 bp, Homo sapien
ttccgcagtgccagatcgctttcct

SEQ ID NO: 2596787 - DNA, 25 bp, Homo sapien
tccgcagtgccagatcgctttcctc

SEQ ID NO: 2596788 - DNA, 25 bp, Homo sapien
cttccgcagtgccagatcgctttcc

SEQ ID NO: 2596789 - DNA, 25 bp, Homo sapien
cagctccatggcaacggaagactcc

SEQ ID NO: 2596790 - DNA, 25 bp, Homo sapien
ggtccttggcgattgccctccgcgg

SEQ ID NO: 2596791 - DNA, 25 bp, Homo sapien
gaggcacagacaccccgggctgctc

SEQ ID NO: 2596792 - DNA, 25 bp, Homo sapien
tcaggcaggcggcggtccttggcga

SEQ ID NO: 2596793 - DNA, 25 bp, Homo sapien
aagggcatcggccaaaagctcgtcc

SEQ ID NO: 2596794 - DNA, 25 bp, Homo sapien
aaagaagggcatcggccaaaagctc

SEQ ID NO: 2596795 - DNA, 25 bp, Homo sapien
atcggccaaaagctcgtcctcaggg

SEQ ID NO: 2596796 - DNA, 25 bp, Homo sapien
caaaagaagggcatcggccaaaagc

SEQ ID NO: 2596797 - DNA, 25 bp, Homo sapien
gaagacatttgatgtcaaactccgg

SEQ ID NO: 2596798 - DNA, 25 bp, Homo sapien
ttcctgtagaagacatttgatgtca

SEQ ID NO: 2596799 - DNA, 25 bp, Homo sapien
tgatgtcaaactccggatcctctaa

SEQ ID NO: 2596800 - DNA, 25 bp, Homo sapien
tccggatcctctaattcatctcttt

SEQ ID NO: 2596801 - DNA, 25 bp, Homo sapien
agcatcagtatctagttctttcact

SEQ ID NO: 2596802 - DNA, 25 bp, Homo sapien
gcatcagtatctagttctttcactg

SEQ ID NO: 2596803 - DNA, 25 bp, Homo sapien
catcagtatctagttctttcactga

SEQ ID NO: 2596804 - DNA, 25 bp, Homo sapien
atcagtatctagttctttcactgag

SEQ ID NO: 2596805 - DNA, 25 bp, Homo sapien
cttctcagtgaaaagctcttgctcc

SEQ ID NO: 2596806 - DNA, 25 bp, Homo sapien
agtgaaaagctcttgctcctcatgc

SEQ ID NO: 2596807 - DNA, 25 bp, Homo sapien
tgctcctcatgcatcttatccaggg

SEQ ID NO: 2596808 - DNA, 25 bp, Homo sapien
catgcatcttatccagggcgctcag

SEQ ID NO: 2596809 - DNA, 25 bp, Homo sapien
gcgccaccactctccgctgaatgtt

SEQ ID NO: 2596810 - DNA, 25 bp, Homo sapien
gccaccactctccgctgaatgtttt

SEQ ID NO: 2596811 - DNA, 25 bp, Homo sapien
accactctccgctgaatgtttttag

SEQ ID NO: 2596812 - DNA, 25 bp, Homo sapien
cactctccgctgaatgtttttagtt

SEQ ID NO: 2596813 - DNA, 25 bp, Homo sapien
cccgcctctgccgacaggcgcgcag

SEQ ID NO: 2596814 - DNA, 25 bp, Homo sapien
aggtcccgcctctgccgacaggcgc

SEQ ID NO: 2596815 - DNA, 25 bp, Homo sapien
gcctctgccgacaggcgcgcagctc

SEQ ID NO: 2596816 - DNA, 25 bp, Homo sapien
gctgcttgtcgatcaggtcccgcct

SEQ ID NO: 2596817 - DNA, 25 bp, Homo sapien
tgcactagcccctccaggtcgggca

SEQ ID NO: 2596818 - DNA, 25 bp, Homo sapien
ctgggctgaactcggcaggccctgc

SEQ ID NO: 2596819 - DNA, 25 bp, Homo sapien
ccggagcaatgcctgttggtgagtg

SEQ ID NO: 2596820 - DNA, 25 bp, Homo sapien
aggacctgctggttcccttgcccct

SEQ ID NO: 2596821 - DNA, 25 bp, Homo sapien
ttcagcacggcctcagtcctcgact

SEQ ID NO: 2596822 - DNA, 25 bp, Homo sapien
gctctgcaaacaggcgtctggacac

SEQ ID NO: 2596823 - DNA, 25 bp, Homo sapien
aaacaggcgtctggacacggcctgg

SEQ ID NO: 2596824 - DNA, 25 bp, Homo sapien
tcgactgcaggtctctctcgttctc

SEQ ID NO: 2596825 - DNA, 25 bp, Homo sapien
cagtcccggctgcacaccgactcac

SEQ ID NO: 2596826 - DNA, 25 bp, Homo sapien
acttccccgcagtttgccggtcagg

SEQ ID NO: 2596827 - DNA, 25 bp, Homo sapien
tcaggtgcaaaaccccccagatctt

SEQ ID NO: 2596828 - DNA, 25 bp, Homo sapien
cattcaccgagtcccctttccactt

SEQ ID NO: 2596829 - DNA, 25 bp, Homo sapien
ttccaaccactgcattcaccgagtc

SEQ ID NO: 2596830 - DNA, 25 bp, Homo sapien
gcacaaagcatgagaaacgaggaaa

SEQ ID NO: 2596831 - DNA, 25 bp, Homo sapien
aaagcatgagaaacgaggaaagagg

SEQ ID NO: 2596832 - DNA, 25 bp, Homo sapien
ctgtggaagcacaaagcatgagaaa

SEQ ID NO: 2596833 - DNA, 25 bp, Homo sapien
tggaagcacaaagcatgagaaacga

SEQ ID NO: 2596834 - DNA, 25 bp, Homo sapien
gccgaaggcaactcgacgcatccaa

SEQ ID NO: 2596835 - DNA, 25 bp, Homo sapien
acaggaaagcatttaggacgaggca

SEQ ID NO: 2596836 - DNA, 25 bp, Homo sapien
gggctttgaaaacccagctcgctgt

SEQ ID NO: 2596837 - DNA, 25 bp, Homo sapien
cttcttgccaaactcgccgaaggca

SEQ ID NO: 2596838 - DNA, 25 bp, Homo sapien
tcagtcgccctgagaaattcgtgca

SEQ ID NO: 2596839 - DNA, 25 bp, Homo sapien
tgggccagaaactacgtcacagcaa

SEQ ID NO: 2596840 - DNA, 25 bp, Homo sapien
tcacagtgagtgcaggtcagagact

SEQ ID NO: 2596841 - DNA, 25 bp, Homo sapien
cagagactgggtcgtgactacatca

SEQ ID NO: 2596842 - DNA, 25 bp, Homo sapien
gggcatgacagagccagttgtcaaa

SEQ ID NO: 2596843 - DNA, 25 bp, Homo sapien
cgcaggggacagtgttctccacgct

SEQ ID NO: 2596844 - DNA, 25 bp, Homo sapien
ggacagtgttctccacgctcagcca

SEQ ID NO: 2596845 - DNA, 25 bp, Homo sapien
ccagttgtcaaaggagtgtcgcagg

SEQ ID NO: 2596846 - DNA, 25 bp, Homo sapien
taaagaagtggacaatcacatcaac

SEQ ID NO: 2596847 - DNA, 25 bp, Homo sapien
cacatcaacctagtaaagtgaggcc

SEQ ID NO: 2596848 - DNA, 25 bp, Homo sapien
ttcattagccctgtgaagcccctca

SEQ ID NO: 2596849 - DNA, 25 bp, Homo sapien
ggccttctggggttcattagccctg

SEQ ID NO: 2596850 - DNA, 25 bp, Homo sapien
tggagcacccagaccaatcctgatg

SEQ ID NO: 2596851 - DNA, 25 bp, Homo sapien
atgggccggatcatacccgcaggga

SEQ ID NO: 2596852 - DNA, 25 bp, Homo sapien
aggatgcggaaggatgccaccgcca

SEQ ID NO: 2596853 - DNA, 25 bp, Homo sapien
agcggcagacacgaacgcaggatgc

SEQ ID NO: 2596854 - DNA, 25 bp, Homo sapien
gctggccaggaaatgcccgtgagtc

SEQ ID NO: 2596855 - DNA, 25 bp, Homo sapien
acagatcgcagtgggcgcctcacag

SEQ ID NO: 2596856 - DNA, 25 bp, Homo sapien
cgagagactgtatctaagccaccgg

SEQ ID NO: 2596857 - DNA, 25 bp, Homo sapien
aagccaccggcacagatcgcagtgg

SEQ ID NO: 2596858 - DNA, 25 bp, Homo sapien
ggaggacgggtgaacgagagactgt

SEQ ID NO: 2596859 - DNA, 25 bp, Homo sapien
agctgtccggaaggcctcgagtcgc

SEQ ID NO: 2596860 - DNA, 25 bp, Homo sapien
agctgctcggctgcgcgcacctgga

SEQ ID NO: 2596861 - DNA, 25 bp, Homo sapien
ctcctcacggtcagctgtccggaag

SEQ ID NO: 2596862 - DNA, 25 bp, Homo sapien
tcagcagtcggttccgctccacctt

SEQ ID NO: 2596863 - DNA, 25 bp, Homo sapien
accgcacggcaaccttgtggttctt

SEQ ID NO: 2596864 - DNA, 25 bp, Homo sapien
cacggcaaccttgtggttcttccgg

SEQ ID NO: 2596865 - DNA, 25 bp, Homo sapien
gaaccgcacggcaaccttgtggttc

SEQ ID NO: 2596866 - DNA, 25 bp, Homo sapien
ttcaggaaccgcacggcaaccttgt

SEQ ID NO: 2596867 - DNA, 25 bp, Homo sapien
tgcgtcgcctcatgtactcgtggca

SEQ ID NO: 2596868 - DNA, 25 bp, Homo sapien
tcatgtactcgtggcactccatctc

SEQ ID NO: 2596869 - DNA, 25 bp, Homo sapien
gcatccatgcgtcgcctcatgtact

SEQ ID NO: 2596870 - DNA, 25 bp, Homo sapien
ttcagcgccaccaccgcatccatgc

SEQ ID NO: 2596871 - DNA, 25 bp, Homo sapien
tgccttggcacggtcccatgcttgg

SEQ ID NO: 2596872 - DNA, 25 bp, Homo sapien
gacaaggtgcctgaatgcatccctg

SEQ ID NO: 2596873 - DNA, 25 bp, Homo sapien
atgcttggaacttccgcagtgtgtc

SEQ ID NO: 2596874 - DNA, 25 bp, Homo sapien
ctgggccagaatcgccttcttctca

SEQ ID NO: 2596875 - DNA, 25 bp, Homo sapien
gaatccgactgatgatctcctgctt

SEQ ID NO: 2596876 - DNA, 25 bp, Homo sapien
tttcagaatccgactgatgatctcc

SEQ ID NO: 2596877 - DNA, 25 bp, Homo sapien
gactgatgatctcctgctttctgag

SEQ ID NO: 2596878 - DNA, 25 bp, Homo sapien
tcctctttcagaatccgactgatga

SEQ ID NO: 2596879 - DNA, 25 bp, Homo sapien
ggtcttcttgcaaaagtcagaaatg

SEQ ID NO: 2596880 - DNA, 25 bp, Homo sapien
cagtgtgtacgtgttggttgggact

SEQ ID NO: 2596881 - DNA, 25 bp, Homo sapien
tgttggttgggactgtggtcttctt

SEQ ID NO: 2596882 - DNA, 25 bp, Homo sapien
tgggactgtggtcttcttgcaaaag

SEQ ID NO: 2596883 - DNA, 25 bp, Homo sapien
gcttctgtctacaggaaggcgtttt

SEQ ID NO: 2596884 - DNA, 25 bp, Homo sapien
ctccacaggtgtgcggcttctgtct

SEQ ID NO: 2596885 - DNA, 25 bp, Homo sapien
ggtgtgcggcttctgtctacaggaa

SEQ ID NO: 2596886 - DNA, 25 bp, Homo sapien
tgcggcttctgtctacaggaaggcg

SEQ ID NO: 2596887 - DNA, 25 bp, Homo sapien
gagatctcgggctcagctaacgttt

SEQ ID NO: 2596888 - DNA, 25 bp, Homo sapien
cttccagcaaccgagagggcccggg

SEQ ID NO: 2596889 - DNA, 25 bp, Homo sapien
gtagtcttcattccaaagcccagag

SEQ ID NO: 2596890 - DNA, 25 bp, Homo sapien
tcactggaaacgacttccagcaacc

SEQ ID NO: 2596891 - DNA, 25 bp, Homo sapien
tcggaggcgagggtagcggttagca

SEQ ID NO: 2596892 - DNA, 25 bp, Homo sapien
tggcagctcggaggcgagggtagcg

SEQ ID NO: 2596893 - DNA, 25 bp, Homo sapien
ggtagcggttagcagagcacggaca

SEQ ID NO: 2596894 - DNA, 25 bp, Homo sapien
ggcggcgccggtggcagctcggagg

SEQ ID NO: 2596895 - DNA, 25 bp, Homo sapien
tgtccttgtccatctttgtcccgcc

SEQ ID NO: 2596896 - DNA, 25 bp, Homo sapien
gtccatctttgtcccgcccacgggc

SEQ ID NO: 2596897 - DNA, 25 bp, Homo sapien
gaaggggcgtccttggaactcacgc

SEQ ID NO: 2596898 - DNA, 25 bp, Homo sapien
gaggagctccggtttgctgttgaag

SEQ ID NO: 2596899 - DNA, 25 bp, Homo sapien
gttgatcgtgtaggtggtgtttacc

SEQ ID NO: 2596900 - DNA, 25 bp, Homo sapien
cttgcagtagttgatcgtgtaggtg

SEQ ID NO: 2596901 - DNA, 25 bp, Homo sapien
taggtggtgtttaccaacgtgatct

SEQ ID NO: 2596902 - DNA, 25 bp, Homo sapien
cagcttgcagtagttgatcgtgtag

SEQ ID NO: 2596903 - DNA, 25 bp, Homo sapien
aagtcccggaggtgctcctccacgc

SEQ ID NO: 2596904 - DNA, 25 bp, Homo sapien
tggatgaagtcccggaggtgctcct

SEQ ID NO: 2596905 - DNA, 25 bp, Homo sapien
gatgaagtcccggaggtgctcctcc

SEQ ID NO: 2596906 - DNA, 25 bp, Homo sapien
tcaacgtggatgaagtcccggaggt

SEQ ID NO: 2596907 - DNA, 25 bp, Homo sapien
tgacccatagcacacgggggttagt

SEQ ID NO: 2596908 - DNA, 25 bp, Homo sapien
gtgacccatagcacacgggggttag

SEQ ID NO: 2596909 - DNA, 25 bp, Homo sapien
cgtgacccatagcacacgggggtta

SEQ ID NO: 2596910 - DNA, 25 bp, Homo sapien
agcacttcacaggacattccggctg

SEQ ID NO: 2596911 - DNA, 25 bp, Homo sapien
tcacaggacattccggctgacaggg

SEQ ID NO: 2596912 - DNA, 25 bp, Homo sapien
acaagcacttcacaggacattccgg

SEQ ID NO: 2596913 - DNA, 25 bp, Homo sapien
gaaggtgacaagcacttcacaggac

SEQ ID NO: 2596914 - DNA, 25 bp, Homo sapien
agtggaactgaaaactcgcccgtct

SEQ ID NO: 2596915 - DNA, 25 bp, Homo sapien
gcccgtctgagccaaaaatgagata

SEQ ID NO: 2596916 - DNA, 25 bp, Homo sapien
aactcgcccgtctgagccaaaaatg

SEQ ID NO: 2596917 - DNA, 25 bp, Homo sapien
ctttgttgaacatttcagtggaact

SEQ ID NO: 2596918 - DNA, 25 bp, Homo sapien
gagataatgacgtccccactgtcct

SEQ ID NO: 2596919 - DNA, 25 bp, Homo sapien
gggcttcacactcgcggctgagcca

SEQ ID NO: 2596920 - DNA, 25 bp, Homo sapien
ggctggccgcagagggcttcacact

SEQ ID NO: 2596921 - DNA, 25 bp, Homo sapien
tctgggagatgctcgtgctgccgta

SEQ ID NO: 2596922 - DNA, 25 bp, Homo sapien
cagggcaaggagctgctcgggtgcc

SEQ ID NO: 2596923 - DNA, 25 bp, Homo sapien
cacagggcaaggagctgctcgggtg

SEQ ID NO: 2596924 - DNA, 25 bp, Homo sapien
cagccacagggcaaggagctgctcg

SEQ ID NO: 2596925 - DNA, 25 bp, Homo sapien
gccacagggcaaggagctgctcggg

SEQ ID NO: 2596926 - DNA, 25 bp, Homo sapien
cgcacagccgagtgccggcccaacc

SEQ ID NO: 2596927 - DNA, 25 bp, Homo sapien
agccgagtgccggcccaaccgtgac

SEQ ID NO: 2596928 - DNA, 25 bp, Homo sapien
gcacagccgagtgccggcccaaccg

SEQ ID NO: 2596929 - DNA, 25 bp, Homo sapien
gagtgccggcccaaccgtgaccgct

SEQ ID NO: 2596930 - DNA, 25 bp, Homo sapien
ggctctgcccaatggcccctcctcg

SEQ ID NO: 2596931 - DNA, 25 bp, Homo sapien
tcggctctgcccaatggcccctcct

SEQ ID NO: 2596932 - DNA, 25 bp, Homo sapien
acctcggctctgcccaatggcccct

SEQ ID NO: 2596933 - DNA, 25 bp, Homo sapien
gctctgcccaatggcccctcctcgg

SEQ ID NO: 2596934 - DNA, 25 bp, Homo sapien
ctggtgctggctaaggatgcaggcc

SEQ ID NO: 2596935 - DNA, 25 bp, Homo sapien
tgctggctaaggatgcaggcccggg

SEQ ID NO: 2596936 - DNA, 25 bp, Homo sapien
tggtgctggctaaggatgcaggccc

SEQ ID NO: 2596937 - DNA, 25 bp, Homo sapien
ggtgctggctaaggatgcaggcccg

SEQ ID NO: 2596938 - DNA, 25 bp, Homo sapien
caatgagctccttgtcgagggacag

SEQ ID NO: 2596939 - DNA, 25 bp, Homo sapien
gaagtcaatgagctccttgtcgagg

SEQ ID NO: 2596940 - DNA, 25 bp, Homo sapien
cacgtagctgccgaagtcaatgagc

SEQ ID NO: 2596941 - DNA, 25 bp, Homo sapien
tagctgccgaagtcaatgagctcct

SEQ ID NO: 2596942 - DNA, 25 bp, Homo sapien
gactgggagtcgtccatctcacagg

SEQ ID NO: 2596943 - DNA, 25 bp, Homo sapien
gaacttgaaagtcgtgcccaagccc

SEQ ID NO: 2596944 - DNA, 25 bp, Homo sapien
cgtgatggtccgagacgtggtctct

SEQ ID NO: 2596945 - DNA, 25 bp, Homo sapien
aagcccccaacgttggtcagcgtga

SEQ ID NO: 2596946 - DNA, 25 bp, Homo sapien
ttccggctctgcatgtccgcctggg

SEQ ID NO: 2596947 - DNA, 25 bp, Homo sapien
tatcttcgtaggtcaggagactgct

SEQ ID NO: 2596948 - DNA, 25 bp, Homo sapien
agctggtggcggctttgtcatacaa

SEQ ID NO: 2596949 - DNA, 25 bp, Homo sapien
atgtccgcctgggaggactccgtgc

SEQ ID NO: 2596950 - DNA, 25 bp, Homo sapien
ccaatgctggaggtgccttcaagtc

SEQ ID NO: 2596951 - DNA, 25 bp, Homo sapien
tcaagtcttcggttagcgtcaacgt

SEQ ID NO: 2596952 - DNA, 25 bp, Homo sapien
gagacgcaagcgattcccgatggcg

SEQ ID NO: 2596953 - DNA, 25 bp, Homo sapien
tcacttaacatcgaaggcctgggaa

SEQ ID NO: 2596954 - DNA, 25 bp, Homo sapien
ctcacacaggctgtggagaaccggc

SEQ ID NO: 2596955 - DNA, 25 bp, Homo sapien
tgaggctcacacaggctgtggagaa

SEQ ID NO: 2596956 - DNA, 25 bp, Homo sapien
cggaagtgaggctcacacaggctgt

SEQ ID NO: 2596957 - DNA, 25 bp, Homo sapien
agaaccggcccagctccgcgctgag

SEQ ID NO: 2596958 - DNA, 25 bp, Homo sapien
cggaagtgcggctcacaccggaagt

SEQ ID NO: 2596959 - DNA, 25 bp, Homo sapien
cggaagtgaggctcacaccggaagt

SEQ ID NO: 2596960 - DNA, 25 bp, Homo sapien
aagtgaggctcacaccggaagtgag

SEQ ID NO: 2596961 - DNA, 25 bp, Homo sapien
aagtgcggctcacaccggaagtgag

SEQ ID NO: 2596962 - DNA, 25 bp, Homo sapien
gcactggcagaaggacggatctaga

SEQ ID NO: 2596963 - DNA, 25 bp, Homo sapien
gaaacgccacgcagtggtgaggaca

SEQ ID NO: 2596964 - DNA, 25 bp, Homo sapien
tagaacccgaggctctctcaggaaa

SEQ ID NO: 2596965 - DNA, 25 bp, Homo sapien
gctctctcaggaaaggaaacgccac

SEQ ID NO: 2596966 - DNA, 25 bp, Homo sapien
gatacaacttgtaaatgggcccagg

SEQ ID NO: 2596967 - DNA, 25 bp, Homo sapien
tgaaaaagaactcggtgggctaggc

SEQ ID NO: 2596968 - DNA, 25 bp, Homo sapien
tcctgcggatgtgaagcaaggccct

SEQ ID NO: 2596969 - DNA, 25 bp, Homo sapien
gaacggccttcgcaacagtgtgtac

SEQ ID NO: 2596970 - DNA, 25 bp, Homo sapien
gttttggtcactctaggtcctctgg

SEQ ID NO: 2596971 - DNA, 25 bp, Homo sapien
aggcacgtctcacacagcggcagga

SEQ ID NO: 2596972 - DNA, 25 bp, Homo sapien
aattgttatggcctcacttgttgaa

SEQ ID NO: 2596973 - DNA, 25 bp, Homo sapien
gattctcttgttccgttgggtctct

SEQ ID NO: 2596974 - DNA, 25 bp, Homo sapien
gcgtgtttgagtcatcacttccctg

SEQ ID NO: 2596975 - DNA, 25 bp, Homo sapien
aaggccccgggtagcagagctgttt

SEQ ID NO: 2596976 - DNA, 25 bp, Homo sapien
agctgtttccttgcaagtctgagca

SEQ ID NO: 2596977 - DNA, 25 bp, Homo sapien
ctgctactggcgtgtttgagtcatc

SEQ ID NO: 2596978 - DNA, 25 bp, Homo sapien
tgatctccgtctgctcttcgctggg

SEQ ID NO: 2596979 - DNA, 25 bp, Homo sapien
cccagcgtgatctccgtctgctctt

SEQ ID NO: 2596980 - DNA, 25 bp, Homo sapien
cgtgatctccgtctgctcttcgctg

SEQ ID NO: 2596981 - DNA, 25 bp, Homo sapien
agcgtgatctccgtctgctcttcgc

SEQ ID NO: 2596982 - DNA, 25 bp, Homo sapien
ctttgaacctggcttggacgtcgcc

SEQ ID NO: 2596983 - DNA, 25 bp, Homo sapien
agtgaagacgatgggcaccttgatg

SEQ ID NO: 2596984 - DNA, 25 bp, Homo sapien
tgaacctggcttggacgtcgcctgg

SEQ ID NO: 2596985 - DNA, 25 bp, Homo sapien
cgtcgcctgggacgaccggagtgaa

SEQ ID NO: 2596986 - DNA, 25 bp, Homo sapien
tgaggtgagccgaggactctgaaca

SEQ ID NO: 2596987 - DNA, 25 bp, Homo sapien
aacactgtcgaggatgccaggagcc

SEQ ID NO: 2596988 - DNA, 25 bp, Homo sapien
cagtggtactgtcctggtgctgtga

SEQ ID NO: 2596989 - DNA, 25 bp, Homo sapien
ctaggcagtggtactgtcctggtgc

SEQ ID NO: 2596990 - DNA, 25 bp, Homo sapien
catatggacacaggagctcagcaac

SEQ ID NO: 2596991 - DNA, 25 bp, Homo sapien
ggacacaggagctcagcaacaggag

SEQ ID NO: 2596992 - DNA, 25 bp, Homo sapien
ctgcatatggacacaggagctcagc

SEQ ID NO: 2596993 - DNA, 25 bp, Homo sapien
cacaggagctcagcaacaggagttc

SEQ ID NO: 2596994 - DNA, 25 bp, Homo sapien
atcttcaggtccacgctgggcttcg

SEQ ID NO: 2596995 - DNA, 25 bp, Homo sapien
gtagagccggtcatacatgcagatc

SEQ ID NO: 2596996 - DNA, 25 bp, Homo sapien
tgcagatcttcaggtccacgctggg

SEQ ID NO: 2596997 - DNA, 25 bp, Homo sapien
cgtgtgcacgagcacagagtcctgg

SEQ ID NO: 2596998 - DNA, 25 bp, Homo sapien
cacaggcctcggttatgacagcagc

SEQ ID NO: 2596999 - DNA, 25 bp, Homo sapien
taaccacatcgaaacggaagcacgg

SEQ ID NO: 2597000 - DNA, 25 bp, Homo sapien
cacggtcctaatgggctctcgggaa

SEQ ID NO: 2597001 - DNA, 25 bp, Homo sapien
gacaatcggagtcctcaaagccctg

SEQ ID NO: 2597002 - DNA, 25 bp, Homo sapien
ttgagctgcacggagtaggacgact

SEQ ID NO: 2597003 - DNA, 25 bp, Homo sapien
cgcggcaggaacttgagctgcacgg

SEQ ID NO: 2597004 - DNA, 25 bp, Homo sapien
tgcacggagtaggacgactgtgcct

SEQ ID NO: 2597005 - DNA, 25 bp, Homo sapien
gaacttgagctgcacggagtaggac

SEQ ID NO: 2597006 - DNA, 25 bp, Homo sapien
gggacaccctcaagacacaggtaaa

SEQ ID NO: 2597007 - DNA, 25 bp, Homo sapien
caggaagcagccgattttaagctca

SEQ ID NO: 2597008 - DNA, 25 bp, Homo sapien
ccttggattagacgagggacagctg

SEQ ID NO: 2597009 - DNA, 25 bp, Homo sapien
cagcaatgagaacagaggagtggcc

SEQ ID NO: 2597010 - DNA, 25 bp, Homo sapien
caaaatacctccctgcgtcctccgg

SEQ ID NO: 2597011 - DNA, 25 bp, Homo sapien
tgtcaaaatacctccctgcgtcctc

SEQ ID NO: 2597012 - DNA, 25 bp, Homo sapien
atacctccctgcgtcctccgggagg

SEQ ID NO: 2597013 - DNA, 25 bp, Homo sapien
ctccctgcgtcctccgggagggagt

SEQ ID NO: 2597014 - DNA, 25 bp, Homo sapien
tctctctggcccatgagcaccctcc

SEQ ID NO: 2597015 - DNA, 25 bp, Homo sapien
ggcaagcccctctggccgctagacg

SEQ ID NO: 2597016 - DNA, 25 bp, Homo sapien
gcaggcaagcccctctggccgctag

SEQ ID NO: 2597017 - DNA, 25 bp, Homo sapien
ctctctctggcccatgagcaccctc

SEQ ID NO: 2597018 - DNA, 25 bp, Homo sapien
ctgagagcccgctgcaggtggagtg

SEQ ID NO: 2597019 - DNA, 25 bp, Homo sapien
ctgcgggtgggtggcagctgagagc

SEQ ID NO: 2597020 - DNA, 25 bp, Homo sapien
ggcagctgagagcccgctgcaggtg

SEQ ID NO: 2597021 - DNA, 25 bp, Homo sapien
gtgggtggcagctgagagcccgctg

SEQ ID NO: 2597022 - DNA, 25 bp, Homo sapien
caaactctgaggcgcaaccactgct

SEQ ID NO: 2597023 - DNA, 25 bp, Homo sapien
aggacacgacgaggccgtctcttca

SEQ ID NO: 2597024 - DNA, 25 bp, Homo sapien
cttcataaaacccacttccctgtga

SEQ ID NO: 2597025 - DNA, 25 bp, Homo sapien
cccactgtttccaggacacgacgag

SEQ ID NO: 2597026 - DNA, 25 bp, Homo sapien
caaaatccacctccgagggactgag

SEQ ID NO: 2597027 - DNA, 25 bp, Homo sapien
ggaggctgatttccgtcctgatggc

SEQ ID NO: 2597028 - DNA, 25 bp, Homo sapien
tgacaatggcatgcacggtgaatcc

SEQ ID NO: 2597029 - DNA, 25 bp, Homo sapien
tcctgatggcctcatagatggtgca

SEQ ID NO: 2597030 - DNA, 25 bp, Homo sapien
tgggctggaagatcacacagaactg

SEQ ID NO: 2597031 - DNA, 25 bp, Homo sapien
aggatcgtcccaaacccatcgttgg

SEQ ID NO: 2597032 - DNA, 25 bp, Homo sapien
cgtttccaggggcaggatcgtccca

SEQ ID NO: 2597033 - DNA, 25 bp, Homo sapien
gaatctgtgttcctcggccttggtg

SEQ ID NO: 2597034 - DNA, 25 bp, Homo sapien
cagcaggaactcgaaagacgtgggc

SEQ ID NO: 2597035 - DNA, 25 bp, Homo sapien
tacagcccggcaagacagcttgaag

SEQ ID NO: 2597036 - DNA, 25 bp, Homo sapien
caaacttgatctggtagtgggacag

SEQ ID NO: 2597037 - DNA, 25 bp, Homo sapien
gagttgatgacgtacactgtagcca

SEQ ID NO: 2597038 - DNA, 25 bp, Homo sapien
atgcccttcctcacttaggccttcg

SEQ ID NO: 2597039 - DNA, 25 bp, Homo sapien
tgcccttcctcacttaggccttcgg

SEQ ID NO: 2597040 - DNA, 25 bp, Homo sapien
cctcacttaggccttcggcagccct

SEQ ID NO: 2597041 - DNA, 25 bp, Homo sapien
taggccttcggcagccctcagggtc

SEQ ID NO: 2597042 - DNA, 25 bp, Homo sapien
cttctcgggcagcactggccggaag

SEQ ID NO: 2597043 - DNA, 25 bp, Homo sapien
agggcttcctggcggatcagcttct

SEQ ID NO: 2597044 - DNA, 25 bp, Homo sapien
tctttgttcaggagtgggagggctt

SEQ ID NO: 2597045 - DNA, 25 bp, Homo sapien
gggagggcttcctggcggatcagct

SEQ ID NO: 2597046 - DNA, 25 bp, Homo sapien
gcccgaggaagacagtagccagtgc

SEQ ID NO: 2597047 - DNA, 25 bp, Homo sapien
gactgtggcgtctgcttcaccagag

SEQ ID NO: 2597048 - DNA, 25 bp, Homo sapien
tgaatgtggggacgcaaaagccgac

SEQ ID NO: 2597049 - DNA, 25 bp, Homo sapien
cgcgggagccgcagttgggactgaa

SEQ ID NO: 2597050 - DNA, 25 bp, Homo sapien
tctggggggccatattctttcggaa

SEQ ID NO: 2597051 - DNA, 25 bp, Homo sapien
cttgtcgcggttctgtgctcgaaga

SEQ ID NO: 2597052 - DNA, 25 bp, Homo sapien
gagactttgaacagcttgtcgcggt

SEQ ID NO: 2597053 - DNA, 25 bp, Homo sapien
gagaatgacagtccatgcaggtcct

SEQ ID NO: 2597054 - DNA, 25 bp, Homo sapien
ttccagccacatgggtcattccggg

SEQ ID NO: 2597055 - DNA, 25 bp, Homo sapien
gctttgctccccacccgtggattga

SEQ ID NO: 2597056 - DNA, 25 bp, Homo sapien
tcattccgggcaatctgtagggagg

SEQ ID NO: 2597057 - DNA, 25 bp, Homo sapien
cctttggcccctggctagagagcca

SEQ ID NO: 2597058 - DNA, 25 bp, Homo sapien
tcgggcggcctggtactcgtcggaa

SEQ ID NO: 2597059 - DNA, 25 bp, Homo sapien
tcgcctggaacgctctgagcagggt

SEQ ID NO: 2597060 - DNA, 25 bp, Homo sapien
tttgatgtcgccactggcaacaaca

SEQ ID NO: 2597061 - DNA, 25 bp, Homo sapien
tacaaatgtgtcaaacttcgcctgg

SEQ ID NO: 2597062 - DNA, 25 bp, Homo sapien
cagtagcagagggacagcgcgtttg

SEQ ID NO: 2597063 - DNA, 25 bp, Homo sapien
cagagttgggcagtagcagagggac

SEQ ID NO: 2597064 - DNA, 25 bp, Homo sapien
tgcggctgaccacaccctgttctgg

SEQ ID NO: 2597065 - DNA, 25 bp, Homo sapien
ggacagcgcgtttgcggctgaccac

SEQ ID NO: 2597066 - DNA, 25 bp, Homo sapien
ccacagcgacgtcgccgaagttaaa

SEQ ID NO: 2597067 - DNA, 25 bp, Homo sapien
cacaacagatggtgccaccgtcggg

SEQ ID NO: 2597068 - DNA, 25 bp, Homo sapien
tggtcttgcctttatgggacgtcac

SEQ ID NO: 2597069 - DNA, 25 bp, Homo sapien
accgtcgggcaccacagctccaggt

SEQ ID NO: 2597070 - DNA, 25 bp, Homo sapien
ggagagacgttctggatggagatct

SEQ ID NO: 2597071 - DNA, 25 bp, Homo sapien
gagacgttctggatggagatcttct

SEQ ID NO: 2597072 - DNA, 25 bp, Homo sapien
atcctcgggagagacgttctggatg

SEQ ID NO: 2597073 - DNA, 25 bp, Homo sapien
gatcctcgggagagacgttctggat

SEQ ID NO: 2597074 - DNA, 25 bp, Homo sapien
aggaggggatacaggtgtctgcagg

SEQ ID NO: 2597075 - DNA, 25 bp, Homo sapien
caaaggggccgttggggttcagcag

SEQ ID NO: 2597076 - DNA, 25 bp, Homo sapien
ctggagtggttcagcaggacaaagg

SEQ ID NO: 2597077 - DNA, 25 bp, Homo sapien
tggagtggttcagcaggacaaaggg

SEQ ID NO: 2597078 - DNA, 25 bp, Homo sapien
gacctgggtcccacctgcacgcagc

SEQ ID NO: 2597079 - DNA, 25 bp, Homo sapien
cctgggtcccacctgcacgcagcag

SEQ ID NO: 2597080 - DNA, 25 bp, Homo sapien
acctgggtcccacctgcacgcagca

SEQ ID NO: 2597081 - DNA, 25 bp, Homo sapien
ctgggtcccacctgcacgcagcagg

SEQ ID NO: 2597082 - DNA, 25 bp, Homo sapien
tcacatagcccatgttgaggacgct

SEQ ID NO: 2597083 - DNA, 25 bp, Homo sapien
tgaggacgctgccttcaatggagca

SEQ ID NO: 2597084 - DNA, 25 bp, Homo sapien
caatggagcacgtgatcatggacgc

SEQ ID NO: 2597085 - DNA, 25 bp, Homo sapien
tgagcgtgcctctcttggtgatgat

SEQ ID NO: 2597086 - DNA, 25 bp, Homo sapien
cacctccgtcctctgggagggcgag

SEQ ID NO: 2597087 - DNA, 25 bp, Homo sapien
gggagggcgagctgaggaactgcgg

SEQ ID NO: 2597088 - DNA, 25 bp, Homo sapien
ggagggcgagctgaggaactgcggc

SEQ ID NO: 2597089 - DNA, 25 bp, Homo sapien
tgggagggcgagctgaggaactgcg

SEQ ID NO: 2597090 - DNA, 25 bp, Homo sapien
acgctgaacacgctctgaccgttga

SEQ ID NO: 2597091 - DNA, 25 bp, Homo sapien
cagtgaagtcttgtgtcttcccggg

SEQ ID NO: 2597092 - DNA, 25 bp, Homo sapien
gcttgtcggagaagtagaggctttc

SEQ ID NO: 2597093 - DNA, 25 bp, Homo sapien
gagcaccacctggagcttgtcggag

SEQ ID NO: 2597094 - DNA, 25 bp, Homo sapien
gggtcaaatacagggatcgctgtca

SEQ ID NO: 2597095 - DNA, 25 bp, Homo sapien
gccctccacgaacatcatgtgctga

SEQ ID NO: 2597096 - DNA, 25 bp, Homo sapien
gaacatcatgtgctgacaggcggca

SEQ ID NO: 2597097 - DNA, 25 bp, Homo sapien
gctgtcagagactccacgggcacgt

SEQ ID NO: 2597098 - DNA, 25 bp, Homo sapien
tggagagagagggcctggccgggag

SEQ ID NO: 2597099 - DNA, 25 bp, Homo sapien
gagagagggcctggccgggagctgg

SEQ ID NO: 2597100 - DNA, 25 bp, Homo sapien
ctggagagagagggcctggccggga

SEQ ID NO: 2597101 - DNA, 25 bp, Homo sapien
gagagagagggcctggccgggagct

SEQ ID NO: 2597102 - DNA, 25 bp, Homo sapien
ggctggcgtgtctgtgtcaaactgg

SEQ ID NO: 2597103 - DNA, 25 bp, Homo sapien
gctgggtggtccggatacagcccac

SEQ ID NO: 2597104 - DNA, 25 bp, Homo sapien
gatggctgggtggtccggatacagc

SEQ ID NO: 2597105 - DNA, 25 bp, Homo sapien
tggctgggtggtccggatacagccc

SEQ ID NO: 2597106 - DNA, 25 bp, Homo sapien
agatggctgggtggtccggatacag

SEQ ID NO: 2597107 - DNA, 25 bp, Homo sapien
tgccacaggaagtccgagaaaagcc

SEQ ID NO: 2597108 - DNA, 25 bp, Homo sapien
cagctgccacaggaagtccgagaaa

SEQ ID NO: 2597109 - DNA, 25 bp, Homo sapien
ccacagctgccacaggaagtccgag

SEQ ID NO: 2597110 - DNA, 25 bp, Homo sapien
cacaggaagtccgagaaaagcccgg

SEQ ID NO: 2597111 - DNA, 25 bp, Homo sapien
gaccaggcaccgctcccagaagcag

SEQ ID NO: 2597112 - DNA, 25 bp, Homo sapien
tggcgaccaggcaccgctcccagaa

SEQ ID NO: 2597113 - DNA, 25 bp, Homo sapien
ggctggcgaccaggcaccgctccca

SEQ ID NO: 2597114 - DNA, 25 bp, Homo sapien
ccaggcaccgctcccagaagcagtg

SEQ ID NO: 2597115 - DNA, 25 bp, Homo sapien
gcgacgctgtctatgctgaactcaa

SEQ ID NO: 2597116 - DNA, 25 bp, Homo sapien
atcaaagtccgcaggtggcacccag

SEQ ID NO: 2597117 - DNA, 25 bp, Homo sapien
gagaaacccttgtgctgcagggatg

SEQ ID NO: 2597118 - DNA, 25 bp, Homo sapien
atggtcttcgtctggccgcgctcca

SEQ ID NO: 2597119 - DNA, 25 bp, Homo sapien
acatccccccttagctgcagcaggg

SEQ ID NO: 2597120 - DNA, 25 bp, Homo sapien
gatgaccttgtaggtctccttcaca

SEQ ID NO: 2597121 - DNA, 25 bp, Homo sapien
agcagggccgacaccatgagtgggt

SEQ ID NO: 2597122 - DNA, 25 bp, Homo sapien
ttcacatccccccttagctgcagca

SEQ ID NO: 2597123 - DNA, 25 bp, Homo sapien
cgtggcgccatgtggagggcggcct

SEQ ID NO: 2597124 - DNA, 25 bp, Homo sapien
caaaaaatttattgacaggctgtgg

SEQ ID NO: 2597125 - DNA, 25 bp, Homo sapien
tcccaggctctagggtagtatgacc

SEQ ID NO: 2597126 - DNA, 25 bp, Homo sapien
tctggctaggatggctgagggctgg

SEQ ID NO: 2597127 - DNA, 25 bp, Homo sapien
gggaatgtgacctccattcccgagg

SEQ ID NO: 2597128 - DNA, 25 bp, Homo sapien
ctccattcccgagggccacagggag

SEQ ID NO: 2597129 - DNA, 25 bp, Homo sapien
aatgtgacctccattcccgagggcc

SEQ ID NO: 2597130 - DNA, 25 bp, Homo sapien
ccttccctcagcctgcaatgtctgc

SEQ ID NO: 2597131 - DNA, 25 bp, Homo sapien
aacttggtgtttggacacttgattg

SEQ ID NO: 2597132 - DNA, 25 bp, Homo sapien
cccgaacttggtgtttggacacttg

SEQ ID NO: 2597133 - DNA, 25 bp, Homo sapien
ttggacacttgattgtggacctgcg

SEQ ID NO: 2597134 - DNA, 25 bp, Homo sapien
gtgtttggacacttgattgtggacc

SEQ ID NO: 2597135 - DNA, 25 bp, Homo sapien
ggtaacgccaccaagatgctgggca

SEQ ID NO: 2597136 - DNA, 25 bp, Homo sapien
ttaacctcggccgagcgtggcctgc

SEQ ID NO: 2597137 - DNA, 25 bp, Homo sapien
ccaggtggactgtagggtaacgcca

SEQ ID NO: 2597138 - DNA, 25 bp, Homo sapien
tggcctggaaagtcgtggctgcctt

SEQ ID NO: 2597139 - DNA, 25 bp, Homo sapien
ggcaggagcggcaggagcggcagca

SEQ ID NO: 2597140 - DNA, 25 bp, Homo sapien
ggcaggagcggcaggagcggcagga

SEQ ID NO: 2597141 - DNA, 25 bp, Homo sapien
cagcagcagccgcagtccgcgggcg

SEQ ID NO: 2597142 - DNA, 25 bp, Homo sapien
agcagcagccgcagtccgcgggcgg

SEQ ID NO: 2597143 - DNA, 25 bp, Homo sapien
tggccgaaccgagagagaacgccgc

SEQ ID NO: 2597144 - DNA, 25 bp, Homo sapien
gggcgtggtccgagcagggacccgc

SEQ ID NO: 2597145 - DNA, 25 bp, Homo sapien
cccgcggtggccgaaccgagagaga

SEQ ID NO: 2597146 - DNA, 25 bp, Homo sapien
gaaccgagagagaacgccgcccgac

SEQ ID NO: 2597147 - DNA, 25 bp, Homo sapien
tccgaggggtcgcagctgccgtccg

SEQ ID NO: 2597148 - DNA, 25 bp, Homo sapien
tggtccgaggggtcgcagctgccgt

SEQ ID NO: 2597149 - DNA, 25 bp, Homo sapien
gcagctgccgtccgcgaagcccagc

SEQ ID NO: 2597150 - DNA, 25 bp, Homo sapien
gctgccgtccgcgaagcccagcgcc

SEQ ID NO: 2597151 - DNA, 25 bp, Homo sapien
tgcctccccatagggcggggccagg

SEQ ID NO: 2597152 - DNA, 25 bp, Homo sapien
ctcgccacccgtgcctccccatagg

SEQ ID NO: 2597153 - DNA, 25 bp, Homo sapien
atgggacggccgacctcgccacccg

SEQ ID NO: 2597154 - DNA, 25 bp, Homo sapien
gggcatgggacggccgacctcgcca

SEQ ID NO: 2597155 - DNA, 25 bp, Homo sapien
gctccagcgggcctggggcgggcac

SEQ ID NO: 2597156 - DNA, 25 bp, Homo sapien
ggctgctccagcgggcctggggcgg

SEQ ID NO: 2597157 - DNA, 25 bp, Homo sapien
cccacgtgccacaggctgctccagc

SEQ ID NO: 2597158 - DNA, 25 bp, Homo sapien
tgctccagcgggcctggggcgggca

SEQ ID NO: 2597159 - DNA, 25 bp, Homo sapien
tcgtaggggactcccgcggaggcca

SEQ ID NO: 2597160 - DNA, 25 bp, Homo sapien
tcccaggactcgctgtcctcagcga

SEQ ID NO: 2597161 - DNA, 25 bp, Homo sapien
actgctgagcgggatcgtaggggac

SEQ ID NO: 2597162 - DNA, 25 bp, Homo sapien
tgctccaggtcagttcccgccagcg

SEQ ID NO: 2597163 - DNA, 25 bp, Homo sapien
gagcaaggctctaccactggactga

SEQ ID NO: 2597164 - DNA, 25 bp, Homo sapien
accaccgaagacaggttaacaggat

SEQ ID NO: 2597165 - DNA, 25 bp, Homo sapien
ggagagcaaggctctaccactggac

SEQ ID NO: 2597166 - DNA, 25 bp, Homo sapien
caccctggggaatgtcgtggcacaa

SEQ ID NO: 2597167 - DNA, 25 bp, Homo sapien
gctgtcactgtccatagggatgact

SEQ ID NO: 2597168 - DNA, 25 bp, Homo sapien
tgccacgtcgcagggctgccgtgct

SEQ ID NO: 2597169 - DNA, 25 bp, Homo sapien
tgcttccggaggcagcagaaccgga

SEQ ID NO: 2597170 - DNA, 25 bp, Homo sapien
aggtcacagtgctgtgtacagggct

SEQ ID NO: 2597171 - DNA, 25 bp, Homo sapien
gaaccagagtgggttcgtggaggcg

SEQ ID NO: 2597172 - DNA, 25 bp, Homo sapien
ggttcgtggaggcgggcttggcatt

SEQ ID NO: 2597173 - DNA, 25 bp, Homo sapien
tggaggcgggcttggcatttacccc

SEQ ID NO: 2597174 - DNA, 25 bp, Homo sapien
tccaccctcaactggcgggccccta

SEQ ID NO: 2597175 - DNA, 25 bp, Homo sapien
gggcaaccgcatgcccagtgggtac

SEQ ID NO: 2597176 - DNA, 25 bp, Homo sapien
cttcatcgtaggagggtggaggctc

SEQ ID NO: 2597177 - DNA, 25 bp, Homo sapien
ggaggctccggggtgtacaggctgt

SEQ ID NO: 2597178 - DNA, 25 bp, Homo sapien
aaagggcaggggcaaccgcatgccc

SEQ ID NO: 2597179 - DNA, 25 bp, Homo sapien
tagttgagtattggggcccgactcc

SEQ ID NO: 2597180 - DNA, 25 bp, Homo sapien
gtggtctctaggcccgaggccccaa

SEQ ID NO: 2597181 - DNA, 25 bp, Homo sapien
cagggctacaaggtggtagttgagt

SEQ ID NO: 2597182 - DNA, 25 bp, Homo sapien
ctctaggcccgaggccccaaggaga

SEQ ID NO: 2597183 - DNA, 25 bp, Homo sapien
aagaagatgcagacgtcacaggtgg

SEQ ID NO: 2597184 - DNA, 25 bp, Homo sapien
ccaggggccggtgtaacatggcacc

SEQ ID NO: 2597185 - DNA, 25 bp, Homo sapien
tccaagctctggtccgttctcctac

SEQ ID NO: 2597186 - DNA, 25 bp, Homo sapien
gggcccttggctccaagcattagtt

SEQ ID NO: 2597187 - DNA, 25 bp, Homo sapien
ttgtgtcttcgtcccgcactggtgc

SEQ ID NO: 2597188 - DNA, 25 bp, Homo sapien
tgtgcaggggcttgtgtcttcgtcc

SEQ ID NO: 2597189 - DNA, 25 bp, Homo sapien
tcgtcccgcactggtgcctggttgc

SEQ ID NO: 2597190 - DNA, 25 bp, Homo sapien
gggcttgtgtcttcgtcccgcactg

SEQ ID NO: 2597191 - DNA, 25 bp, Homo sapien
ctggtccatccctctgcccttccaa

SEQ ID NO: 2597192 - DNA, 25 bp, Homo sapien
gtccatccctctgcccttccaacac

SEQ ID NO: 2597193 - DNA, 25 bp, Homo sapien
ccatccctctgcccttccaacacac

SEQ ID NO: 2597194 - DNA, 25 bp, Homo sapien
tggtccatccctctgcccttccaac

SEQ ID NO: 2597195 - DNA, 25 bp, Homo sapien
ggccctgccggctctgatttaagtc

SEQ ID NO: 2597196 - DNA, 25 bp, Homo sapien
gggccctgccggctctgatttaagt

SEQ ID NO: 2597197 - DNA, 25 bp, Homo sapien
agggccctgccggctctgatttaag

SEQ ID NO: 2597198 - DNA, 25 bp, Homo sapien
ggtccagaccccgtagatgccgcag

SEQ ID NO: 2597199 - DNA, 25 bp, Homo sapien
cgcagcgaggttccggctgcagctc

SEQ ID NO: 2597200 - DNA, 25 bp, Homo sapien
gctcgggggaaccagtgttgcctct

SEQ ID NO: 2597201 - DNA, 25 bp, Homo sapien
accgggtccactcgaccgcagcgag

SEQ ID NO: 2597202 - DNA, 25 bp, Homo sapien
gggcaggcgacagcgtgatgggaag

SEQ ID NO: 2597203 - DNA, 25 bp, Homo sapien
aggcgacagcgtgatgggaagcagc

SEQ ID NO: 2597204 - DNA, 25 bp, Homo sapien
gcaggcgacagcgtgatgggaagca

SEQ ID NO: 2597205 - DNA, 25 bp, Homo sapien
cgacagcgtgatgggaagcagcggg

SEQ ID NO: 2597206 - DNA, 25 bp, Homo sapien
tcctcagcatactcctcaaactcct

SEQ ID NO: 2597207 - DNA, 25 bp, Homo sapien
ctcagccgtggcatcctgatattgc

SEQ ID NO: 2597208 - DNA, 25 bp, Homo sapien
tattgctgatattcagacaccaggt

SEQ ID NO: 2597209 - DNA, 25 bp, Homo sapien
agccgtggcatcctgatattgctga

SEQ ID NO: 2597210 - DNA, 25 bp, Homo sapien
tgatgcccactccatagaggactcc

SEQ ID NO: 2597211 - DNA, 25 bp, Homo sapien
gatgcccactccatagaggactcca

SEQ ID NO: 2597212 - DNA, 25 bp, Homo sapien
ctgatgcccactccatagaggactc

SEQ ID NO: 2597213 - DNA, 25 bp, Homo sapien
tgcccactccatagaggactccaca

SEQ ID NO: 2597214 - DNA, 25 bp, Homo sapien
ggcagccaaacagctggcagaggcc

SEQ ID NO: 2597215 - DNA, 25 bp, Homo sapien
gggcagccaaacagctggcagaggc

SEQ ID NO: 2597216 - DNA, 25 bp, Homo sapien
tagctgcaaacaaggccactgaatg

SEQ ID NO: 2597217 - DNA, 25 bp, Homo sapien
ctagctgcaaacaaggccactgaat

SEQ ID NO: 2597218 - DNA, 25 bp, Homo sapien
ttacaagtcccacagcaggggctgt

SEQ ID NO: 2597219 - DNA, 25 bp, Homo sapien
cagcactgatttggatccatctgtg

SEQ ID NO: 2597220 - DNA, 25 bp, Homo sapien
tccatctgtggacgccgtgtctgag

SEQ ID NO: 2597221 - DNA, 25 bp, Homo sapien
ggcaccccccattctggtttgctta

SEQ ID NO: 2597222 - DNA, 25 bp, Homo sapien
cttaggagtattccgtgcaggcacc

SEQ ID NO: 2597223 - DNA, 25 bp, Homo sapien
ttgcccagattttatctccagcatc

SEQ ID NO: 2597224 - DNA, 25 bp, Homo sapien
gttggccagaatggccgtccttcct

SEQ ID NO: 2597225 - DNA, 25 bp, Homo sapien
tgtgggctggagcattggtcagtgt

SEQ ID NO: 2597226 - DNA, 25 bp, Homo sapien
cctctgagacgagggcccaggagat

SEQ ID NO: 2597227 - DNA, 25 bp, Homo sapien
tccttcctctgagacgagggcccag

SEQ ID NO: 2597228 - DNA, 25 bp, Homo sapien
cctcacccgcctccccgcggcggag

SEQ ID NO: 2597229 - DNA, 25 bp, Homo sapien
gcagccttcccgcaccccccggcac

SEQ ID NO: 2597230 - DNA, 25 bp, Homo sapien
cgcagccttcccgcaccccccggca

SEQ ID NO: 2597231 - DNA, 25 bp, Homo sapien
ccccgcggcggagtccggcgacgct

SEQ ID NO: 2597232 - DNA, 25 bp, Homo sapien
tgatgttccagctgcgcactgggcc

SEQ ID NO: 2597233 - DNA, 25 bp, Homo sapien
catacacgttaagcagtcggtccct

SEQ ID NO: 2597234 - DNA, 25 bp, Homo sapien
gggaacttcgtgctcaactttctga

SEQ ID NO: 2597235 - DNA, 25 bp, Homo sapien
gctgtgaacatttgccgccggcacg

SEQ ID NO: 2597236 - DNA, 25 bp, Homo sapien
cagagaccaccttgctcagagagct

SEQ ID NO: 2597237 - DNA, 25 bp, Homo sapien
agctgagtttccggcactgtcctag

SEQ ID NO: 2597238 - DNA, 25 bp, Homo sapien
tgtcctagccggctctccttcatga

SEQ ID NO: 2597239 - DNA, 25 bp, Homo sapien
acagagaccaccttgctcagagagc

SEQ ID NO: 2597240 - DNA, 25 bp, Homo sapien
ggctgacgtgcagtggtactgtttt

SEQ ID NO: 2597241 - DNA, 25 bp, Homo sapien
tgacgtgcagtggtactgttttggc

SEQ ID NO: 2597242 - DNA, 25 bp, Homo sapien
caggctgacgtgcagtggtactgtt

SEQ ID NO: 2597243 - DNA, 25 bp, Homo sapien
gctgacgtgcagtggtactgttttg

SEQ ID NO: 2597244 - DNA, 25 bp, Homo sapien
gcgccagggcgtccgggaagtctgg

SEQ ID NO: 2597245 - DNA, 25 bp, Homo sapien
ggcgccagggcgtccgggaagtctg

SEQ ID NO: 2597246 - DNA, 25 bp, Homo sapien
aatcccgagcccgtcagtcgcgccc

SEQ ID NO: 2597247 - DNA, 25 bp, Homo sapien
ccgcgcgcgccgagccaatcccgag

SEQ ID NO: 2597248 - DNA, 25 bp, Homo sapien
aaatccactgacttgccattgccag

SEQ ID NO: 2597249 - DNA, 25 bp, Homo sapien
aatccactgacttgccattgccagc

SEQ ID NO: 2597250 - DNA, 25 bp, Homo sapien
aaaggctgctttgtcctgcggacgc

SEQ ID NO: 2597251 - DNA, 25 bp, Homo sapien
acatcttaagttccagggctccaaa

SEQ ID NO: 2597252 - DNA, 25 bp, Homo sapien
cacggccatgggtgcactaggtgtt

SEQ ID NO: 2597253 - DNA, 25 bp, Homo sapien
gctgctgatctctggacatcttaag

SEQ ID NO: 2597254 - DNA, 25 bp, Homo sapien
taggacttcacagagattcccgggc

SEQ ID NO: 2597255 - DNA, 25 bp, Homo sapien
aatatgtgtcccgatggctcagcac

SEQ ID NO: 2597256 - DNA, 25 bp, Homo sapien
tggattacccggaagtgcactctgg

SEQ ID NO: 2597257 - DNA, 25 bp, Homo sapien
gcatggtctcaagcaggtcccagga

SEQ ID NO: 2597258 - DNA, 25 bp, Homo sapien
gggctctcacaggtgttttctgagt

SEQ ID NO: 2597259 - DNA, 25 bp, Homo sapien
ggggctctcacaggtgttttctgag

SEQ ID NO: 2597260 - DNA, 25 bp, Homo sapien
gcctgcggggctctcacaggtgttt

SEQ ID NO: 2597261 - DNA, 25 bp, Homo sapien
ctctcacaggtgttttctgagtggc

SEQ ID NO: 2597262 - DNA, 25 bp, Homo sapien
gtgtgctcacgacagtgccctgcat

SEQ ID NO: 2597263 - DNA, 25 bp, Homo sapien
tggtgtgctcacgacagtgccctgc

SEQ ID NO: 2597264 - DNA, 25 bp, Homo sapien
ggtgtgctcacgacagtgccctgca

SEQ ID NO: 2597265 - DNA, 25 bp, Homo sapien
tccctgaaggagacccctgaacaca

SEQ ID NO: 2597266 - DNA, 25 bp, Homo sapien
gagctgggcagtcgcggggctccgc

SEQ ID NO: 2597267 - DNA, 25 bp, Homo sapien
agtgagctgggcagtcgcggggctc

SEQ ID NO: 2597268 - DNA, 25 bp, Homo sapien
actctttacctgctgtcacctcaca

SEQ ID NO: 2597269 - DNA, 25 bp, Homo sapien
gtctcagcctcccgaatagctagga

SEQ ID NO: 2597270 - DNA, 25 bp, Homo sapien
tggctctccataacctccgcctccc

SEQ ID NO: 2597271 - DNA, 25 bp, Homo sapien
ttggctctccataacctccgcctcc

SEQ ID NO: 2597272 - DNA, 25 bp, Homo sapien
tctcagcctcccgaatagctaggat

SEQ ID NO: 2597273 - DNA, 25 bp, Homo sapien
gcccacagcacggacactcacagca

SEQ ID NO: 2597274 - DNA, 25 bp, Homo sapien
ccacagcacggacactcacagcatg

SEQ ID NO: 2597275 - DNA, 25 bp, Homo sapien
acagcacggacacccacggcagtgg

SEQ ID NO: 2597276 - DNA, 25 bp, Homo sapien
acccacggcagtggcccacagcacg

SEQ ID NO: 2597277 - DNA, 25 bp, Homo sapien
cggctctcagccgtcgcctggggcc

SEQ ID NO: 2597278 - DNA, 25 bp, Homo sapien
gctctcagccgtcgcctggggccct

SEQ ID NO: 2597279 - DNA, 25 bp, Homo sapien
tcagccgtcgcctggggccctttgt

SEQ ID NO: 2597280 - DNA, 25 bp, Homo sapien
gggccggctctcagccgtcgcctgg

SEQ ID NO: 2597281 - DNA, 25 bp, Homo sapien
ggaacataagatctctaaatctgaa

SEQ ID NO: 2597282 - DNA, 25 bp, Homo sapien
gttgatcggaagtctgccagcccaa

SEQ ID NO: 2597283 - DNA, 25 bp, Homo sapien
gcccaatttatgatggaacataaga

SEQ ID NO: 2597284 - DNA, 25 bp, Homo sapien
ccagcctcacggaagacagctttat

SEQ ID NO: 2597285 - DNA, 25 bp, Homo sapien
ctctgtggacctggcgtgaggcttc

SEQ ID NO: 2597286 - DNA, 25 bp, Homo sapien
tctgagtctcctatggaccatctgt

SEQ ID NO: 2597287 - DNA, 25 bp, Homo sapien
catccaaggcggtgtcctggactcc

SEQ ID NO: 2597288 - DNA, 25 bp, Homo sapien
cagggtgagtgcgtggcatcctttt

SEQ ID NO: 2597289 - DNA, 25 bp, Homo sapien
acccaggtcgctggcgtctgtgcca

SEQ ID NO: 2597290 - DNA, 25 bp, Homo sapien
agaggcagataaagacccacagcat

SEQ ID NO: 2597291 - DNA, 25 bp, Homo sapien
agagaatgacccaggtcgctggcgt

SEQ ID NO: 2597292 - DNA, 25 bp, Homo sapien
taaagacccacagcatggtctctgg

SEQ ID NO: 2597293 - DNA, 25 bp, Homo sapien
ctgcacattggctggtgagcttggc

SEQ ID NO: 2597294 - DNA, 25 bp, Homo sapien
ctgaggcccctagcaggtcgggctt

SEQ ID NO: 2597295 - DNA, 25 bp, Homo sapien
cgcttgttctgaggcccctagcagg

SEQ ID NO: 2597296 - DNA, 25 bp, Homo sapien
gctgcacattggctggtgagcttgg

SEQ ID NO: 2597297 - DNA, 25 bp, Homo sapien
ggtgctgtgtgacggcctcgggcca

SEQ ID NO: 2597298 - DNA, 25 bp, Homo sapien
caggtgctgtgtgacggcctcgggc

SEQ ID NO: 2597299 - DNA, 25 bp, Homo sapien
tcagcacaggtgctgtgtgacggcc

SEQ ID NO: 2597300 - DNA, 25 bp, Homo sapien
agcacaggtgctgtgtgacggcctc

SEQ ID NO: 2597301 - DNA, 25 bp, Homo sapien
ctgccatgtcactagcgtgctgacg

SEQ ID NO: 2597302 - DNA, 25 bp, Homo sapien
gagagctacagtgctcggcccggca

SEQ ID NO: 2597303 - DNA, 25 bp, Homo sapien
cgtgctgacgcagacaccggcgaga

SEQ ID NO: 2597304 - DNA, 25 bp, Homo sapien
ggcacatcccagacaattcctctgt

SEQ ID NO: 2597305 - DNA, 25 bp, Homo sapien
caacttgcccgtgcctttgggtgct

SEQ ID NO: 2597306 - DNA, 25 bp, Homo sapien
ggctgccgtgatgcaacttgcccgt

SEQ ID NO: 2597307 - DNA, 25 bp, Homo sapien
gaggacgcaagaaggtgtttccaag

SEQ ID NO: 2597308 - DNA, 25 bp, Homo sapien
ctgtgagctggctgcgtgccacgtc

SEQ ID NO: 2597309 - DNA, 25 bp, Homo sapien
gacgctcctgcagaagtggccagga

SEQ ID NO: 2597310 - DNA, 25 bp, Homo sapien
tatagacaccggtgcagacaggatg

SEQ ID NO: 2597311 - DNA, 25 bp, Homo sapien
ctgtggtatatcagctgggctccct

SEQ ID NO: 2597312 - DNA, 25 bp, Homo sapien
ggcacacgtgatcctcagccaaggt

SEQ ID NO: 2597313 - DNA, 25 bp, Homo sapien
ctttgcgcagcgaatctgatggtgg

SEQ ID NO: 2597314 - DNA, 25 bp, Homo sapien
gagggcgtgggtggtctcagtgcac

SEQ ID NO: 2597315 - DNA, 25 bp, Homo sapien
tgatggtgggcgttggtgtccggga

SEQ ID NO: 2597316 - DNA, 25 bp, Homo sapien
gctctgggactttgcgcagcgaatc

SEQ ID NO: 2597317 - DNA, 25 bp, Homo sapien
cagcaacttattccggcccgggctg

SEQ ID NO: 2597318 - DNA, 25 bp, Homo sapien
tggagctgctatcgatcccggatcg

SEQ ID NO: 2597319 - DNA, 25 bp, Homo sapien
cctcagaggccggagacatggagct

SEQ ID NO: 2597320 - DNA, 25 bp, Homo sapien
gatcgactcgccgagcgccgcagtt

SEQ ID NO: 2597321 - DNA, 25 bp, Homo sapien
tcgcggcccgggaactccttcttga

SEQ ID NO: 2597322 - DNA, 25 bp, Homo sapien
ggaactccttcttgaccgccggcat

SEQ ID NO: 2597323 - DNA, 25 bp, Homo sapien
gggaactccttcttgaccgccggca

SEQ ID NO: 2597324 - DNA, 25 bp, Homo sapien
ggcagcgcggccagggtcgggtgga

SEQ ID NO: 2597325 - DNA, 25 bp, Homo sapien
agcggcagcgcggccagggtcgggt

SEQ ID NO: 2597326 - DNA, 25 bp, Homo sapien
gcagcgcggccagggtcgggtggaa

SEQ ID NO: 2597327 - DNA, 25 bp, Homo sapien
gcagcggcagcgcggccagggtcgg

SEQ ID NO: 2597328 - DNA, 25 bp, Homo sapien
tcgatgcacggctcgccgttgtcca

SEQ ID NO: 2597329 - DNA, 25 bp, Homo sapien
gccgctgacgaactggaactcgttg

SEQ ID NO: 2597330 - DNA, 25 bp, Homo sapien
ccctggcagagtttgcgcacgtaga

SEQ ID NO: 2597331 - DNA, 25 bp, Homo sapien
ctttgtggcggatgctgcgcttcca

SEQ ID NO: 2597332 - DNA, 25 bp, Homo sapien
tgcagcgccccctcggccgagccgg

SEQ ID NO: 2597333 - DNA, 25 bp, Homo sapien
ggggtgtccccgcgcagccctggag

SEQ ID NO: 2597334 - DNA, 25 bp, Homo sapien
gagccggaggctcccgggtgtccga

SEQ ID NO: 2597335 - DNA, 25 bp, Homo sapien
cgcgggtcccggcagcgaagggagg

SEQ ID NO: 2597336 - DNA, 25 bp, Homo sapien
cgagcggagggagcggcccgcgagc

SEQ ID NO: 2597337 - DNA, 25 bp, Homo sapien
tccgagcggagggagcggcccgcga

SEQ ID NO: 2597338 - DNA, 25 bp, Homo sapien
cttccgagcggagggagcggcccgc

SEQ ID NO: 2597339 - DNA, 25 bp, Homo sapien
gagcggagggagcggcccgcgagcc

SEQ ID NO: 2597340 - DNA, 25 bp, Homo sapien
tcggcccgacttcccagcccgcttc

SEQ ID NO: 2597341 - DNA, 25 bp, Homo sapien
ctcggcccgacttcccagcccgctt

SEQ ID NO: 2597342 - DNA, 25 bp, Homo sapien
tgcaggatccccttggacataagcg

SEQ ID NO: 2597343 - DNA, 25 bp, Homo sapien
tcgcagatcggaggatgcacctgca

SEQ ID NO: 2597344 - DNA, 25 bp, Homo sapien
gcagtcgcagatcggaggatgcacc

SEQ ID NO: 2597345 - DNA, 25 bp, Homo sapien
gacataagcgtcttcagacttttcc

SEQ ID NO: 2597346 - DNA, 25 bp, Homo sapien
gggccgctcaaatccaaacagagac

SEQ ID NO: 2597347 - DNA, 25 bp, Homo sapien
agacccaaggctaggcagcgggctg

SEQ ID NO: 2597348 - DNA, 25 bp, Homo sapien
tcaagggggccgctcaaatccaaac

SEQ ID NO: 2597349 - DNA, 25 bp, Homo sapien
gctcaaatccaaacagagacccaag

SEQ ID NO: 2597350 - DNA, 25 bp, Homo sapien
acactagagacctcggccacagcac

SEQ ID NO: 2597351 - DNA, 25 bp, Homo sapien
cacagatctgaaaactcggcccctg

SEQ ID NO: 2597352 - DNA, 25 bp, Homo sapien
gatctgaaaactcggcccctgacag

SEQ ID NO: 2597353 - DNA, 25 bp, Homo sapien
tcctcttggaaggtgcttggcctgc

SEQ ID NO: 2597354 - DNA, 25 bp, Homo sapien
gaagacacaatgctttgctctctgc

SEQ ID NO: 2597355 - DNA, 25 bp, Homo sapien
aagacacaatgctttgctctctgct

SEQ ID NO: 2597356 - DNA, 25 bp, Homo sapien
gggtctgccctggtctcgcacccca

SEQ ID NO: 2597357 - DNA, 25 bp, Homo sapien
aggccgagccccaagcacggcagag

SEQ ID NO: 2597358 - DNA, 25 bp, Homo sapien
aagcacggcagaggtgccctcagag

SEQ ID NO: 2597359 - DNA, 25 bp, Homo sapien
atctcccgggggtctgccctggtct

SEQ ID NO: 2597360 - DNA, 25 bp, Homo sapien
tctcttcatgatacggatgtgcgga

SEQ ID NO: 2597361 - DNA, 25 bp, Homo sapien
gatgtgcggaccatcctcctgcttc

SEQ ID NO: 2597362 - DNA, 25 bp, Homo sapien
agagaagctgggagttcgctccttc

SEQ ID NO: 2597363 - DNA, 25 bp, Homo sapien
cttcttcaggttccgggcggcaggc

SEQ ID NO: 2597364 - DNA, 25 bp, Homo sapien
ctgcaggacgcctctcggaaagaga

SEQ ID NO: 2597365 - DNA, 25 bp, Homo sapien
cctctcggaaagagatgttcacgtc

SEQ ID NO: 2597366 - DNA, 25 bp, Homo sapien
gacgcctctcggaaagagatgttca

SEQ ID NO: 2597367 - DNA, 25 bp, Homo sapien
caggacgcctctcggaaagagatgt

SEQ ID NO: 2597368 - DNA, 25 bp, Homo sapien
tcagcattctcacctccttgtgggt

SEQ ID NO: 2597369 - DNA, 25 bp, Homo sapien
atcagcattctcacctccttgtggg

SEQ ID NO: 2597370 - DNA, 25 bp, Homo sapien
agcattctcacctccttgtgggtct

SEQ ID NO: 2597371 - DNA, 25 bp, Homo sapien
acatcagcattctcacctccttgtg

SEQ ID NO: 2597372 - DNA, 25 bp, Homo sapien
ccgggaagaggccgatctgctcagg

SEQ ID NO: 2597373 - DNA, 25 bp, Homo sapien
gggaagaggccgatctgctcagggg

SEQ ID NO: 2597374 - DNA, 25 bp, Homo sapien
cgggaagaggccgatctgctcaggg

SEQ ID NO: 2597375 - DNA, 25 bp, Homo sapien
cccgggaagaggccgatctgctcag

SEQ ID NO: 2597376 - DNA, 25 bp, Homo sapien
ctctctggaattcacagcggctctg

SEQ ID NO: 2597377 - DNA, 25 bp, Homo sapien
tcgggcataacgaggtggcggctgc

SEQ ID NO: 2597378 - DNA, 25 bp, Homo sapien
cagcggctctgatgctcgggcataa

SEQ ID NO: 2597379 - DNA, 25 bp, Homo sapien
tggcggctgcggtggacgctggata

SEQ ID NO: 2597380 - DNA, 25 bp, Homo sapien
catctctcagggggcccttggtcct

SEQ ID NO: 2597381 - DNA, 25 bp, Homo sapien
tcctggtgagtacaggccttgccca

SEQ ID NO: 2597382 - DNA, 25 bp, Homo sapien
gccccagccttcagcgcagaggaca

SEQ ID NO: 2597383 - DNA, 25 bp, Homo sapien
ttcagcgcagaggacatcacgcctg

SEQ ID NO: 2597384 - DNA, 25 bp, Homo sapien
gattcgcttcgtgccctcttctctg

SEQ ID NO: 2597385 - DNA, 25 bp, Homo sapien
cttgaggcgattcgcttcgtgccct

SEQ ID NO: 2597386 - DNA, 25 bp, Homo sapien
cagtcgctgctgatacggggggagc

SEQ ID NO: 2597387 - DNA, 25 bp, Homo sapien
ggcgattcgcttcgtgccctcttct

SEQ ID NO: 2597388 - DNA, 25 bp, Homo sapien
cccagctcccgcggcagcagcagcg

SEQ ID NO: 2597389 - DNA, 25 bp, Homo sapien
ctgggccccagctcccgcggcagca

SEQ ID NO: 2597390 - DNA, 25 bp, Homo sapien
agctcccgcggcagcagcagcgcct

SEQ ID NO: 2597391 - DNA, 25 bp, Homo sapien
gctgggccccagctcccgcggcagc

SEQ ID NO: 2597392 - DNA, 25 bp, Homo sapien
gtgctgacacaagccggcggtaatg

SEQ ID NO: 2597393 - DNA, 25 bp, Homo sapien
tggcctcgctcagtgctgacacaag

SEQ ID NO: 2597394 - DNA, 25 bp, Homo sapien
ccaggtggtagaggcgctgagggtc

SEQ ID NO: 2597395 - DNA, 25 bp, Homo sapien
caagccggcggtaatggtcctccgg

SEQ ID NO: 2597396 - DNA, 25 bp, Homo sapien
gagggggatcatgccagggtgggtc

SEQ ID NO: 2597397 - DNA, 25 bp, Homo sapien
gggggatcatgccagggtgggtcct

SEQ ID NO: 2597398 - DNA, 25 bp, Homo sapien
gggatcatgccagggtgggtcctca

SEQ ID NO: 2597399 - DNA, 25 bp, Homo sapien
ggatcatgccagggtgggtcctcac

SEQ ID NO: 2597400 - DNA, 25 bp, Homo sapien
catggggcaggacgtgtggcagagg

SEQ ID NO: 2597401 - DNA, 25 bp, Homo sapien
gagctagtcatgaccctggggacct

SEQ ID NO: 2597402 - DNA, 25 bp, Homo sapien
catggaggtgtggcccgccccaggg

SEQ ID NO: 2597403 - DNA, 25 bp, Homo sapien
atataaaatgtgagctagtcatgac

SEQ ID NO: 2597404 - DNA, 25 bp, Homo sapien
gtccactggctgcatagacgactca

SEQ ID NO: 2597405 - DNA, 25 bp, Homo sapien
aggtcggcgtccactggctgcatag

SEQ ID NO: 2597406 - DNA, 25 bp, Homo sapien
gctgcatagacgactcacagaccac

SEQ ID NO: 2597407 - DNA, 25 bp, Homo sapien
gcaggcgtctggcaggtcggcgtcc

SEQ ID NO: 2597408 - DNA, 25 bp, Homo sapien
gacccctggagaacgtcctgaggtg

SEQ ID NO: 2597409 - DNA, 25 bp, Homo sapien
gtccgagtgcatcccggagggaccc

SEQ ID NO: 2597410 - DNA, 25 bp, Homo sapien
ggtgaattattcaggctcttggtgc

SEQ ID NO: 2597411 - DNA, 25 bp, Homo sapien
tgcctggtgtgaggaatcctgcctc

SEQ ID NO: 2597412 - DNA, 25 bp, Homo sapien
gcgcggccgcccgcatcgatcccag

SEQ ID NO: 2597413 - DNA, 25 bp, Homo sapien
ggccgcccgcatcgatcccagcggg

SEQ ID NO: 2597414 - DNA, 25 bp, Homo sapien
gcggccgcccgcatcgatcccagcg

SEQ ID NO: 2597415 - DNA, 25 bp, Homo sapien
gcccgcatcgatcccagcggggccc

SEQ ID NO: 2597416 - DNA, 25 bp, Homo sapien
gccacctcctgccggaccctcagga

SEQ ID NO: 2597417 - DNA, 25 bp, Homo sapien
ccgccacctcctgccggaccctcag

SEQ ID NO: 2597418 - DNA, 25 bp, Homo sapien
cacctcctgccggaccctcaggaga

SEQ ID NO: 2597419 - DNA, 25 bp, Homo sapien
acctcctgccggaccctcaggagat

SEQ ID NO: 2597420 - DNA, 25 bp, Homo sapien
ctctccgagaaggacggggcggcag

SEQ ID NO: 2597421 - DNA, 25 bp, Homo sapien
tctccgagaaggacggggcggcagc

SEQ ID NO: 2597422 - DNA, 25 bp, Homo sapien
ctccgagaaggacggggcggcagct

SEQ ID NO: 2597423 - DNA, 25 bp, Homo sapien
ggcgccctcccggtgctgagccagg

SEQ ID NO: 2597424 - DNA, 25 bp, Homo sapien
gggcattctgcggcgacagcaaggg

SEQ ID NO: 2597425 - DNA, 25 bp, Homo sapien
tctgcggcgacagcaaggggggcgg

SEQ ID NO: 2597426 - DNA, 25 bp, Homo sapien
cagggcgacgtgaggggcattctgc

SEQ ID NO: 2597427 - DNA, 25 bp, Homo sapien
cacagagccgagggcacccccagga

SEQ ID NO: 2597428 - DNA, 25 bp, Homo sapien
aggcggtccgagccggccctttgca

SEQ ID NO: 2597429 - DNA, 25 bp, Homo sapien
gcggtccgagccggccctttgcaat

SEQ ID NO: 2597430 - DNA, 25 bp, Homo sapien
cgaggcggtccgagccggccctttg

SEQ ID NO: 2597431 - DNA, 25 bp, Homo sapien
cggtccgagccggccctttgcaatc

SEQ ID NO: 2597432 - DNA, 25 bp, Homo sapien
ggagctcctgctgccaggcgaacat

SEQ ID NO: 2597433 - DNA, 25 bp, Homo sapien
ggccaggttctgcttccgcaggagc

SEQ ID NO: 2597434 - DNA, 25 bp, Homo sapien
gccaggttctgcttccgcaggagct

SEQ ID NO: 2597435 - DNA, 25 bp, Homo sapien
aacatctccgcctgcgcggggggca

SEQ ID NO: 2597436 - DNA, 25 bp, Homo sapien
tgcagctcctcggcgccgtcgttgg

SEQ ID NO: 2597437 - DNA, 25 bp, Homo sapien
ctgacggcataagggaagcccaggg

SEQ ID NO: 2597438 - DNA, 25 bp, Homo sapien
tccttggactcgctgggccgcgctg

SEQ ID NO: 2597439 - DNA, 25 bp, Homo sapien
ggctcgtcttccgagccatcttgtg

SEQ ID NO: 2597440 - DNA, 25 bp, Homo sapien
tcctgaccgtcgtgtgccccaattg

SEQ ID NO: 2597441 - DNA, 25 bp, Homo sapien
acccgcccgtctcctgaccgtcgtg

SEQ ID NO: 2597442 - DNA, 25 bp, Homo sapien
tgtggggcgtgttactagggctctg

SEQ ID NO: 2597443 - DNA, 25 bp, Homo sapien
gcccgtctcctgaccgtcgtgtgcc

SEQ ID NO: 2597444 - DNA, 25 bp, Homo sapien
cggtccacttggtgacgtcctcagg

SEQ ID NO: 2597445 - DNA, 25 bp, Homo sapien
ccatccatggagagtccccctaccg

SEQ ID NO: 2597446 - DNA, 25 bp, Homo sapien
aggccccccacgaagctgcagacgt

SEQ ID NO: 2597447 - DNA, 25 bp, Homo sapien
atccatggagagtccccctaccgcg

SEQ ID NO: 2597448 - DNA, 25 bp, Homo sapien
gcccggatcttgagggcgggcccca

SEQ ID NO: 2597449 - DNA, 25 bp, Homo sapien
agcttcagccccatgttggtcagca

SEQ ID NO: 2597450 - DNA, 25 bp, Homo sapien
gtcagcagtggcagggtctccccgt

SEQ ID NO: 2597451 - DNA, 25 bp, Homo sapien
cccatgttggtcagcaggtgctcct

SEQ ID NO: 2597452 - DNA, 25 bp, Homo sapien
tgcccagctgtggtctggagaccct

SEQ ID NO: 2597453 - DNA, 25 bp, Homo sapien
ctgacctcactccccagcgtctcac

SEQ ID NO: 2597454 - DNA, 25 bp, Homo sapien
cctggtgggggctgtcgcacaccca

SEQ ID NO: 2597455 - DNA, 25 bp, Homo sapien
ctggtgggggctgtcgcacacccac

SEQ ID NO: 2597456 - DNA, 25 bp, Homo sapien
cacggggaagctggccacgtagaaa

SEQ ID NO: 2597457 - DNA, 25 bp, Homo sapien
cacgtagaaaactcggcccaggcgc

SEQ ID NO: 2597458 - DNA, 25 bp, Homo sapien
tggccacgtagaaaactcggcccag

SEQ ID NO: 2597459 - DNA, 25 bp, Homo sapien
gaagctggccacgtagaaaactcgg

SEQ ID NO: 2597460 - DNA, 25 bp, Homo sapien
gggctgctctcctgtgccgagttct

SEQ ID NO: 2597461 - DNA, 25 bp, Homo sapien
tcctgtgccgagttctcgctccggg

SEQ ID NO: 2597462 - DNA, 25 bp, Homo sapien
aagggctgctctcctgtgccgagtt

SEQ ID NO: 2597463 - DNA, 25 bp, Homo sapien
tctcctgtgccgagttctcgctccg

SEQ ID NO: 2597464 - DNA, 25 bp, Homo sapien
cctccatagggggacgtggccgtcg

SEQ ID NO: 2597465 - DNA, 25 bp, Homo sapien
ccctggaagtagagccaaggtccca

SEQ ID NO: 2597466 - DNA, 25 bp, Homo sapien
tgggtgaagtttgaccggcaagggc

SEQ ID NO: 2597467 - DNA, 25 bp, Homo sapien
catagggggacgtggccgtcgtggg

SEQ ID NO: 2597468 - DNA, 25 bp, Homo sapien
tcctggagatttgtgtggccccacc

SEQ ID NO: 2597469 - DNA, 25 bp, Homo sapien
ggagatttgtgtggccccaccccta

SEQ ID NO: 2597470 - DNA, 25 bp, Homo sapien
tggagatttgtgtggccccacccct

SEQ ID NO: 2597471 - DNA, 25 bp, Homo sapien
cctggagatttgtgtggccccaccc

SEQ ID NO: 2597472 - DNA, 25 bp, Homo sapien
gagctgaccctgacgtcagcagacc

SEQ ID NO: 2597473 - DNA, 25 bp, Homo sapien
accgagaccagtcccagttccaggg

SEQ ID NO: 2597474 - DNA, 25 bp, Homo sapien
agaccaaacgtatcgagagctgggc

SEQ ID NO: 2597475 - DNA, 25 bp, Homo sapien
tgttttgcatccgaaaccgaaagaa

SEQ ID NO: 2597476 - DNA, 25 bp, Homo sapien
gcagctctcagaggacgactgaggc

SEQ ID NO: 2597477 - DNA, 25 bp, Homo sapien
cccaggggccggaggacgagctgga

SEQ ID NO: 2597478 - DNA, 25 bp, Homo sapien
tagaggctggcgtctgtgcagttgg

SEQ ID NO: 2597479 - DNA, 25 bp, Homo sapien
tctcagaggacgactgaggcagccc

SEQ ID NO: 2597480 - DNA, 25 bp, Homo sapien
acagcagcaactcggagggtgaatg

SEQ ID NO: 2597481 - DNA, 25 bp, Homo sapien
gaggacagcagcaactcggagggtg

SEQ ID NO: 2597482 - DNA, 25 bp, Homo sapien
gcatggggtggaagacgatgaagag

SEQ ID NO: 2597483 - DNA, 25 bp, Homo sapien
ggacagcagcaactcggagggtgaa

SEQ ID NO: 2597484 - DNA, 25 bp, Homo sapien
tgtacccatcctgcagggggctcac

SEQ ID NO: 2597485 - DNA, 25 bp, Homo sapien
aagtgaaggcctactgggattggta

SEQ ID NO: 2597486 - DNA, 25 bp, Homo sapien
gcctactgggattggtaactctgtc

SEQ ID NO: 2597487 - DNA, 25 bp, Homo sapien
ccacgagggccacctgtacccatcc

SEQ ID NO: 2597488 - DNA, 25 bp, Homo sapien
tctagcgcactatgacttgagacca

SEQ ID NO: 2597489 - DNA, 25 bp, Homo sapien
tgaccttgtactacagccactggcg

SEQ ID NO: 2597490 - DNA, 25 bp, Homo sapien
ccgtgcccggatgattcgacttgga

SEQ ID NO: 2597491 - DNA, 25 bp, Homo sapien
tttccttcggcgtctctgagcagca

SEQ ID NO: 2597492 - DNA, 25 bp, Homo sapien
gctgcgtcttctggttgctcgggac

SEQ ID NO: 2597493 - DNA, 25 bp, Homo sapien
catctgtcccgtcctgtgtctggca

SEQ ID NO: 2597494 - DNA, 25 bp, Homo sapien
ctcgggacggagccccatgtggcat

SEQ ID NO: 2597495 - DNA, 25 bp, Homo sapien
tctgtcccgtcctgtgtctggcact

SEQ ID NO: 2597496 - DNA, 25 bp, Homo sapien
gcaaaaatctcttcccgatctagga

SEQ ID NO: 2597497 - DNA, 25 bp, Homo sapien
caaactctgtcctaggcagggagcg

SEQ ID NO: 2597498 - DNA, 25 bp, Homo sapien
gggacatgcgtgagcagaacctctt

SEQ ID NO: 2597499 - DNA, 25 bp, Homo sapien
tttactgagctcctgttccgtgcca

SEQ ID NO: 2597500 - DNA, 25 bp, Homo sapien
ccatcttccttctccgagaagcccc

SEQ ID NO: 2597501 - DNA, 25 bp, Homo sapien
ggactagacgttggacgcggattct

SEQ ID NO: 2597502 - DNA, 25 bp, Homo sapien
ggacgcggattcttccagcgctgcg

SEQ ID NO: 2597503 - DNA, 25 bp, Homo sapien
ccgcagccgctgtttctcggcgccg

SEQ ID NO: 2597504 - DNA, 25 bp, Homo sapien
tcggctgccggacccaccgccgatt

SEQ ID NO: 2597505 - DNA, 25 bp, Homo sapien
actgccggagggctgctcggcggtg

SEQ ID NO: 2597506 - DNA, 25 bp, Homo sapien
gattcgcggaggacccgcgggctta

SEQ ID NO: 2597507 - DNA, 25 bp, Homo sapien
ttaacggacgcggagactgccggag

SEQ ID NO: 2597508 - DNA, 25 bp, Homo sapien
ggccccgggctgccgtgctccgggc

SEQ ID NO: 2597509 - DNA, 25 bp, Homo sapien
cccgggctgccgtgctccgggctct

SEQ ID NO: 2597510 - DNA, 25 bp, Homo sapien
ccgggccccgggctgccgtgctccg

SEQ ID NO: 2597511 - DNA, 25 bp, Homo sapien
gcccgggccccgggctgccgtgctc

SEQ ID NO: 2597512 - DNA, 25 bp, Homo sapien
gggggctgcgggccgagcctgccgg

SEQ ID NO: 2597513 - DNA, 25 bp, Homo sapien
gggccgcgtgcgctctgcctcgggg

SEQ ID NO: 2597514 - DNA, 25 bp, Homo sapien
tgccggggccgcgtgcgctctgcct

SEQ ID NO: 2597515 - DNA, 25 bp, Homo sapien
tgcgggccgagcctgccggggccgc

SEQ ID NO: 2597516 - DNA, 25 bp, Homo sapien
gccacgtgcaggacgatgtcgcaca

SEQ ID NO: 2597517 - DNA, 25 bp, Homo sapien
tgtgcgcacggatctccttggcagc

SEQ ID NO: 2597518 - DNA, 25 bp, Homo sapien
catcgtggtagtgccgcttggagtt

SEQ ID NO: 2597519 - DNA, 25 bp, Homo sapien
tcatggccacgaaggcatcgtggta

SEQ ID NO: 2597520 - DNA, 25 bp, Homo sapien
agcccccagcgccgcccaggcgggt

SEQ ID NO: 2597521 - DNA, 25 bp, Homo sapien
gagcccccagcgccgcccaggcggg

SEQ ID NO: 2597522 - DNA, 25 bp, Homo sapien
gcccccagcgccgcccaggcgggta

SEQ ID NO: 2597523 - DNA, 25 bp, Homo sapien
ggagcccccagcgccgcccaggcgg

SEQ ID NO: 2597524 - DNA, 25 bp, Homo sapien
agcgggttacacgagctgacccgag

SEQ ID NO: 2597525 - DNA, 25 bp, Homo sapien
cagcgggttacacgagctgacccga

SEQ ID NO: 2597526 - DNA, 25 bp, Homo sapien
gacagcgggttacacgagctgaccc

SEQ ID NO: 2597527 - DNA, 25 bp, Homo sapien
gggacagcgggttacacgagctgac

SEQ ID NO: 2597528 - DNA, 25 bp, Homo sapien
aatctcagccgtgtaggcaaactgc

SEQ ID NO: 2597529 - DNA, 25 bp, Homo sapien
atgtcgtgcagcgtcacgtgggtct

SEQ ID NO: 2597530 - DNA, 25 bp, Homo sapien
acgtgggtctggcggctctcgctca

SEQ ID NO: 2597531 - DNA, 25 bp, Homo sapien
caaggcctgagggtcgatgtcgtgc

SEQ ID NO: 2597532 - DNA, 25 bp, Homo sapien
gggatccgggtgagggagccctcac

SEQ ID NO: 2597533 - DNA, 25 bp, Homo sapien
cgggatccgggtgagggagccctca

SEQ ID NO: 2597534 - DNA, 25 bp, Homo sapien
gagggaggcacagggtcgggggaca

SEQ ID NO: 2597535 - DNA, 25 bp, Homo sapien
gacaccgggatccgggtgagggagc

SEQ ID NO: 2597536 - DNA, 25 bp, Homo sapien
cgagctgactcagtagaaacttgca

SEQ ID NO: 2597537 - DNA, 25 bp, Homo sapien
tcttggccacgtccacgaagtgctg

SEQ ID NO: 2597538 - DNA, 25 bp, Homo sapien
gcataaactcctcggtcttggccac

SEQ ID NO: 2597539 - DNA, 25 bp, Homo sapien
aacttgcagcaagcgtctcggacgc

SEQ ID NO: 2597540 - DNA, 25 bp, Homo sapien
ctgtgtcaggaacaaaacggggtcg

SEQ ID NO: 2597541 - DNA, 25 bp, Homo sapien
gggctgagtgttcatactgggaggg

SEQ ID NO: 2597542 - DNA, 25 bp, Homo sapien
agtcaggagccacagacgaggctcc

SEQ ID NO: 2597543 - DNA, 25 bp, Homo sapien
ccagaaaggtctcggggacacacag

SEQ ID NO: 2597544 - DNA, 25 bp, Homo sapien
ggagtgggggtcctcagacctgaga

SEQ ID NO: 2597545 - DNA, 25 bp, Homo sapien
ctgagatctggggagggtcctgtgg

SEQ ID NO: 2597546 - DNA, 25 bp, Homo sapien
gtcctgtggacccagggagccctga

SEQ ID NO: 2597547 - DNA, 25 bp, Homo sapien
tgggggtcctcagacctgagatctg

SEQ ID NO: 2597548 - DNA, 25 bp, Homo sapien
agctcaggacggctcggtagacctc

SEQ ID NO: 2597549 - DNA, 25 bp, Homo sapien
tgaaggcacgttcaggctgtcgcta

SEQ ID NO: 2597550 - DNA, 25 bp, Homo sapien
tgcctgcgggcgtccacgtcgtgtt

SEQ ID NO: 2597551 - DNA, 25 bp, Homo sapien
tcaggctgtcgctagagaccagttc

SEQ ID NO: 2597552 - DNA, 25 bp, Homo sapien
ggctggtgcctaggacgcccctctg

SEQ ID NO: 2597553 - DNA, 25 bp, Homo sapien
gacgtgtgcggctggtgcctaggac

SEQ ID NO: 2597554 - DNA, 25 bp, Homo sapien
gaagtcgcggctcagcaagggcagc

SEQ ID NO: 2597555 - DNA, 25 bp, Homo sapien
aagtcgcggctcagcaagggcagcc

SEQ ID NO: 2597556 - DNA, 25 bp, Homo sapien
ggtggagacgggactcgtgagtgga

SEQ ID NO: 2597557 - DNA, 25 bp, Homo sapien
agacgggactcgtgagtggatccca

SEQ ID NO: 2597558 - DNA, 25 bp, Homo sapien
gggactcgtgagtggatcccactgc

SEQ ID NO: 2597559 - DNA, 25 bp, Homo sapien
acgggactcgtgagtggatcccact

SEQ ID NO: 2597560 - DNA, 25 bp, Homo sapien
aggccaccacgtgccagcggtcggt

SEQ ID NO: 2597561 - DNA, 25 bp, Homo sapien
gcgcgtgtcgtaggcctcacagtct

SEQ ID NO: 2597562 - DNA, 25 bp, Homo sapien
gccagcggtcggtgcgcgtgtcgta

SEQ ID NO: 2597563 - DNA, 25 bp, Homo sapien
agcatagagccggttccccaccgca

SEQ ID NO: 2597564 - DNA, 25 bp, Homo sapien
ctagcggaattaagccactgcaggt

SEQ ID NO: 2597565 - DNA, 25 bp, Homo sapien
tggcctggcgggcacgtgccagacc

SEQ ID NO: 2597566 - DNA, 25 bp, Homo sapien
tagcggaattaagccactgcaggtc

SEQ ID NO: 2597567 - DNA, 25 bp, Homo sapien
gcacgtgccagacccgacccaagtc

SEQ ID NO: 2597568 - DNA, 25 bp, Homo sapien
aggagtccatgcaaggcggccacac

SEQ ID NO: 2597569 - DNA, 25 bp, Homo sapien
ccggctgccacgtgttagtcacggg

SEQ ID NO: 2597570 - DNA, 25 bp, Homo sapien
gggtcgtaggactccacggtagcca

SEQ ID NO: 2597571 - DNA, 25 bp, Homo sapien
tccacggtagccaggtctgaggtcc

SEQ ID NO: 2597572 - DNA, 25 bp, Homo sapien
aggccccgtcatagccgccggccga

SEQ ID NO: 2597573 - DNA, 25 bp, Homo sapien
aggaggccccgtcatagccgccggc

SEQ ID NO: 2597574 - DNA, 25 bp, Homo sapien
ccccgtcatagccgccggccgagta

SEQ ID NO: 2597575 - DNA, 25 bp, Homo sapien
ggaggccccgtcatagccgccggcc

SEQ ID NO: 2597576 - DNA, 25 bp, Homo sapien
cagatacgacccctgtgatggtgac

SEQ ID NO: 2597577 - DNA, 25 bp, Homo sapien
gaatggctgaaatcttaccctagga

SEQ ID NO: 2597578 - DNA, 25 bp, Homo sapien
taccctaggagtcaaactcagaccg

SEQ ID NO: 2597579 - DNA, 25 bp, Homo sapien
caaacttgcctcttgcagatggact

SEQ ID NO: 2597580 - DNA, 25 bp, Homo sapien
aagcgtggccactcgcacatagcgc

SEQ ID NO: 2597581 - DNA, 25 bp, Homo sapien
ctccgggtgctcatggcagcgacgg

SEQ ID NO: 2597582 - DNA, 25 bp, Homo sapien
ggtcagggggtcgtagcgttcagca

SEQ ID NO: 2597583 - DNA, 25 bp, Homo sapien
cgacggacgtccacgttccggtcag

SEQ ID NO: 2597584 - DNA, 25 bp, Homo sapien
tgtgaggagctgtcgtagccgccca

SEQ ID NO: 2597585 - DNA, 25 bp, Homo sapien
ggagctgtcgtagccgcccacagca

SEQ ID NO: 2597586 - DNA, 25 bp, Homo sapien
ccaggtgtgaggagctgtcgtagcc

SEQ ID NO: 2597587 - DNA, 25 bp, Homo sapien
gccaggtgtgaggagctgtcgtagc

SEQ ID NO: 2597588 - DNA, 25 bp, Homo sapien
agctgcgtcggctcagcatggacgc

SEQ ID NO: 2597589 - DNA, 25 bp, Homo sapien
gcctttggactgtatctctctaccg

SEQ ID NO: 2597590 - DNA, 25 bp, Homo sapien
tctctctaccgagttgaggcagctg

SEQ ID NO: 2597591 - DNA, 25 bp, Homo sapien
tgcggatattcatgggcgccacgct

SEQ ID NO: 2597592 - DNA, 25 bp, Homo sapien
acggcgtacaaccatccgtccatgg

SEQ ID NO: 2597593 - DNA, 25 bp, Homo sapien
tgtacttctcgatggagttgaggct

SEQ ID NO: 2597594 - DNA, 25 bp, Homo sapien
cacttgttggtcctcgggttgtact

SEQ ID NO: 2597595 - DNA, 25 bp, Homo sapien
ggtgaacatgcaggatgcggccacc

SEQ ID NO: 2597596 - DNA, 25 bp, Homo sapien
cacggacagcgtcggggaggatggc

SEQ ID NO: 2597597 - DNA, 25 bp, Homo sapien
aggatggcggcgggaaattgagcag

SEQ ID NO: 2597598 - DNA, 25 bp, Homo sapien
ggaggatggcggcgggaaattgagc

SEQ ID NO: 2597599 - DNA, 25 bp, Homo sapien
tggtggaggacacggacagcgtcgg

SEQ ID NO: 2597600 - DNA, 25 bp, Homo sapien
ggccacggtccccttaaggcatgtg

SEQ ID NO: 2597601 - DNA, 25 bp, Homo sapien
gcagagacgtgaacggatggcgcag

SEQ ID NO: 2597602 - DNA, 25 bp, Homo sapien
ctaaaggtgtaaacgggcagccgtg

SEQ ID NO: 2597603 - DNA, 25 bp, Homo sapien
tcctcacccctcaataaataagata

SEQ ID NO: 2597604 - DNA, 25 bp, Homo sapien
gaccccgccatgtgcaaaattcgag

SEQ ID NO: 2597605 - DNA, 25 bp, Homo sapien
ccgccatgtgcaaaattcgagctgg

SEQ ID NO: 2597606 - DNA, 25 bp, Homo sapien
ccgggaccccgccatgtgcaaaatt

SEQ ID NO: 2597607 - DNA, 25 bp, Homo sapien
tgcaaggtctgagcaggcaacggcc

SEQ ID NO: 2597608 - DNA, 25 bp, Homo sapien
cacacggcagacgacgacaggaagg

SEQ ID NO: 2597609 - DNA, 25 bp, Homo sapien
tgtggggtcccagtgcacgcgtgtg

SEQ ID NO: 2597610 - DNA, 25 bp, Homo sapien
attaagttggactcgtattgctgtg

SEQ ID NO: 2597611 - DNA, 25 bp, Homo sapien
tattaagttggactcgtattgctgt

SEQ ID NO: 2597612 - DNA, 25 bp, Homo sapien
gacaggacccaaagttgcgcagctg

SEQ ID NO: 2597613 - DNA, 25 bp, Homo sapien
caggacccaaagttgcgcagctgcc

SEQ ID NO: 2597614 - DNA, 25 bp, Homo sapien
agacaggacccaaagttgcgcagct

SEQ ID NO: 2597615 - DNA, 25 bp, Homo sapien
ggacccaaagttgcgcagctgcccc

SEQ ID NO: 2597616 - DNA, 25 bp, Homo sapien
cccgagtcaccggtgactgcaggga

SEQ ID NO: 2597617 - DNA, 25 bp, Homo sapien
tgtttccatctaaactctggccggc

SEQ ID NO: 2597618 - DNA, 25 bp, Homo sapien
cttgtgctccggcttggtgaacccg

SEQ ID NO: 2597619 - DNA, 25 bp, Homo sapien
ttgtgctccggcttggtgaacccgg

SEQ ID NO: 2597620 - DNA, 25 bp, Homo sapien
ggccagagtcgtacaggtcggcaag

SEQ ID NO: 2597621 - DNA, 25 bp, Homo sapien
gagggacacagtggctgttccccat

SEQ ID NO: 2597622 - DNA, 25 bp, Homo sapien
ctgagggacacagtggctgttcccc

SEQ ID NO: 2597623 - DNA, 25 bp, Homo sapien
tgagggacacagtggctgttcccca

SEQ ID NO: 2597624 - DNA, 25 bp, Homo sapien
tcccttcagcgagggctttctggag

SEQ ID NO: 2597625 - DNA, 25 bp, Homo sapien
ctgtttcccttcagcgagggctttc

SEQ ID NO: 2597626 - DNA, 25 bp, Homo sapien
tctggagaaggaggcccggagcctc

SEQ ID NO: 2597627 - DNA, 25 bp, Homo sapien
ttctggagaaggaggcccggagcct

SEQ ID NO: 2597628 - DNA, 25 bp, Homo sapien
ccggcaggccggccgacatccgcgc

SEQ ID NO: 2597629 - DNA, 25 bp, Homo sapien
ccgcttcgagcagcctcggggcccg

SEQ ID NO: 2597630 - DNA, 25 bp, Homo sapien
ggcgtccccgcttcgagcagcctcg

SEQ ID NO: 2597631 - DNA, 25 bp, Homo sapien
ggcaggccggccgacatccgcgcgc

SEQ ID NO: 2597632 - DNA, 25 bp, Homo sapien
cagggtcacactgcatgtcctgggc

SEQ ID NO: 2597633 - DNA, 25 bp, Homo sapien
ccccagggtcacactgcatgtcctg

SEQ ID NO: 2597634 - DNA, 25 bp, Homo sapien
tcataggaccccccagggtcacact

SEQ ID NO: 2597635 - DNA, 25 bp, Homo sapien
ctcataggaccccccagggtcacac

SEQ ID NO: 2597636 - DNA, 25 bp, Homo sapien
tcctggcaagggaggaccactacgg

SEQ ID NO: 2597637 - DNA, 25 bp, Homo sapien
tggcaagggaggaccactacggcca

SEQ ID NO: 2597638 - DNA, 25 bp, Homo sapien
ctggcaagggaggaccactacggcc

SEQ ID NO: 2597639 - DNA, 25 bp, Homo sapien
gcaagggaggaccactacggccacc

SEQ ID NO: 2597640 - DNA, 25 bp, Homo sapien
ttttctcgctggttctccaggtcca

SEQ ID NO: 2597641 - DNA, 25 bp, Homo sapien
cagctggaccttggcgtaatgcaca

SEQ ID NO: 2597642 - DNA, 25 bp, Homo sapien
gctgtgctggaaccgcagctggacc

SEQ ID NO: 2597643 - DNA, 25 bp, Homo sapien
gccccttcttgaacacactcaggaa

SEQ ID NO: 2597644 - DNA, 25 bp, Homo sapien
tgggcctggaagtacaggtgggcgg

SEQ ID NO: 2597645 - DNA, 25 bp, Homo sapien
aaatgtgagtccttccgagccgtgg

SEQ ID NO: 2597646 - DNA, 25 bp, Homo sapien
cggggaatagctccaggtagcagtc

SEQ ID NO: 2597647 - DNA, 25 bp, Homo sapien
aggtgggcggggaatagctccaggt

SEQ ID NO: 2597648 - DNA, 25 bp, Homo sapien
acactcagctccgtcagcggtaaca

SEQ ID NO: 2597649 - DNA, 25 bp, Homo sapien
gggacccctcgagcgggcagacact

SEQ ID NO: 2597650 - DNA, 25 bp, Homo sapien
actcagctccgtcagcggtaacagc

SEQ ID NO: 2597651 - DNA, 25 bp, Homo sapien
tctcgggacccctcgagcgggcaga

SEQ ID NO: 2597652 - DNA, 25 bp, Homo sapien
gggtcaggagtgcctctgggggccc

SEQ ID NO: 2597653 - DNA, 25 bp, Homo sapien
tcctgggtcaggagtgcctctgggg

SEQ ID NO: 2597654 - DNA, 25 bp, Homo sapien
ctctgggggcccgggaagcatccca

SEQ ID NO: 2597655 - DNA, 25 bp, Homo sapien
tctgggggcccgggaagcatcccaa

SEQ ID NO: 2597656 - DNA, 25 bp, Homo sapien
caccaggaggggtgcgggcagtggg

SEQ ID NO: 2597657 - DNA, 25 bp, Homo sapien
agcaccaggaggggtgcgggcagtg

SEQ ID NO: 2597658 - DNA, 25 bp, Homo sapien
cagagcaccaggaggggtgcgggca

SEQ ID NO: 2597659 - DNA, 25 bp, Homo sapien
ggggcagagcaccaggaggggtgcg

SEQ ID NO: 2597660 - DNA, 25 bp, Homo sapien
ggggtgccgagtggcagcgccgcgg

SEQ ID NO: 2597661 - DNA, 25 bp, Homo sapien
gtggtaaagccagcggtccagctcg

SEQ ID NO: 2597662 - DNA, 25 bp, Homo sapien
ggtaaagccagcggtccagctcggc

SEQ ID NO: 2597663 - DNA, 25 bp, Homo sapien
tggtaaagccagcggtccagctcgg

SEQ ID NO: 2597664 - DNA, 25 bp, Homo sapien
caggggagttcgtctccgcaggacc

SEQ ID NO: 2597665 - DNA, 25 bp, Homo sapien
caaagtccaggggagttcgtctccg

SEQ ID NO: 2597666 - DNA, 25 bp, Homo sapien
agtccaggggagttcgtctccgcag

SEQ ID NO: 2597667 - DNA, 25 bp, Homo sapien
tgcaaagtccaggggagttcgtctc

SEQ ID NO: 2597668 - DNA, 25 bp, Homo sapien
acgccgtccgcagccgggttagacg

SEQ ID NO: 2597669 - DNA, 25 bp, Homo sapien
acagacagcactgccgccgggttcg

SEQ ID NO: 2597670 - DNA, 25 bp, Homo sapien
agcttgaccctcgaggcacagacag

SEQ ID NO: 2597671 - DNA, 25 bp, Homo sapien
cgggttcgtgccctgacgccgtccg

SEQ ID NO: 2597672 - DNA, 25 bp, Homo sapien
ttgaagcaaagcccgtccagctcct

SEQ ID NO: 2597673 - DNA, 25 bp, Homo sapien
caaggacgttgggtacaggaccaag

SEQ ID NO: 2597674 - DNA, 25 bp, Homo sapien
acaggaccaagagccggtcccactg

SEQ ID NO: 2597675 - DNA, 25 bp, Homo sapien
aaatggccaaggacgttgggtacag

SEQ ID NO: 2597676 - DNA, 25 bp, Homo sapien
ccccgaaatacaggttcctcctgca

SEQ ID NO: 2597677 - DNA, 25 bp, Homo sapien
agccccgaaatacaggttcctcctg

SEQ ID NO: 2597678 - DNA, 25 bp, Homo sapien
gccccgaaatacaggttcctcctgc

SEQ ID NO: 2597679 - DNA, 25 bp, Homo sapien
tggacggcacggagtgggagctccc

SEQ ID NO: 2597680 - DNA, 25 bp, Homo sapien
tccaggttgatgtggacggcacgga

SEQ ID NO: 2597681 - DNA, 25 bp, Homo sapien
aggttgatgtggacggcacggagtg

SEQ ID NO: 2597682 - DNA, 25 bp, Homo sapien
ggacggcacggagtgggagctcccc

SEQ ID NO: 2597683 - DNA, 25 bp, Homo sapien
cacaccacgcggatggtgttgatga

SEQ ID NO: 2597684 - DNA, 25 bp, Homo sapien
gtagtcctcgtagctggcgcacacc

SEQ ID NO: 2597685 - DNA, 25 bp, Homo sapien
acagcagccagtgaccgtagtcctc

SEQ ID NO: 2597686 - DNA, 25 bp, Homo sapien
gggtgacagcgcgaaggcacagcag

SEQ ID NO: 2597687 - DNA, 25 bp, Homo sapien
ggaggagcagcccacggtggatggc

SEQ ID NO: 2597688 - DNA, 25 bp, Homo sapien
gagtcccagctggtctgtccgcctg

SEQ ID NO: 2597689 - DNA, 25 bp, Homo sapien
ggtggatggcactgaggactcaggc

SEQ ID NO: 2597690 - DNA, 25 bp, Homo sapien
ctgaggagagtgagcctcggccact

SEQ ID NO: 2597691 - DNA, 25 bp, Homo sapien
ctttcgtctgccaccccgtaagcgc

SEQ ID NO: 2597692 - DNA, 25 bp, Homo sapien
tgccccactttcgtctgccaccccg

SEQ ID NO: 2597693 - DNA, 25 bp, Homo sapien
ttctgccccactttcgtctgccacc

SEQ ID NO: 2597694 - DNA, 25 bp, Homo sapien
ccactttcgtctgccaccccgtaag

SEQ ID NO: 2597695 - DNA, 25 bp, Homo sapien
tgctgccactgcgtctcagctcggt

SEQ ID NO: 2597696 - DNA, 25 bp, Homo sapien
ctggcacggtcagagttggcctggt

SEQ ID NO: 2597697 - DNA, 25 bp, Homo sapien
ggtcctccgtcggccaatgctggca

SEQ ID NO: 2597698 - DNA, 25 bp, Homo sapien
ggctgctgccactgcgtctcagctc

SEQ ID NO: 2597699 - DNA, 25 bp, Homo sapien
tggtgtgtaggggtcggcatagagg

SEQ ID NO: 2597700 - DNA, 25 bp, Homo sapien
tgtgaccctgcggtgggaggtggcg

SEQ ID NO: 2597701 - DNA, 25 bp, Homo sapien
ccaggccccggacatctgtgaccct

SEQ ID NO: 2597702 - DNA, 25 bp, Homo sapien
ggcgagtgtgatgtttccgaagtgt

SEQ ID NO: 2597703 - DNA, 25 bp, Homo sapien
tttctgtcacccagcaggggcctga

SEQ ID NO: 2597704 - DNA, 25 bp, Homo sapien
cctttctgtcacccagcaggggcct

SEQ ID NO: 2597705 - DNA, 25 bp, Homo sapien
ctttctgtcacccagcaggggcctg

SEQ ID NO: 2597706 - DNA, 25 bp, Homo sapien
ttctgtcacccagcaggggcctgac

SEQ ID NO: 2597707 - DNA, 25 bp, Homo sapien
tgagccccggtgtctctgagcggct

SEQ ID NO: 2597708 - DNA, 25 bp, Homo sapien
gagtgggctcgagggcgtgggtcca

SEQ ID NO: 2597709 - DNA, 25 bp, Homo sapien
tccacgtgcactctgcatggcactg

SEQ ID NO: 2597710 - DNA, 25 bp, Homo sapien
gctcccttcttggagagcaagtagg

SEQ ID NO: 2597711 - DNA, 25 bp, Homo sapien
aggcagccagggttcgggcgaacct

SEQ ID NO: 2597712 - DNA, 25 bp, Homo sapien
gcagccagggttcgggcgaaccttc

SEQ ID NO: 2597713 - DNA, 25 bp, Homo sapien
ctcgtcccagaggtggtcgtagccg

SEQ ID NO: 2597714 - DNA, 25 bp, Homo sapien
gacaaagtctcgtcccagaggtggt

SEQ ID NO: 2597715 - DNA, 25 bp, Homo sapien
aagtctcgtcccagaggtggtcgta

SEQ ID NO: 2597716 - DNA, 25 bp, Homo sapien
tgggaggaagacaaagtctcgtccc

SEQ ID NO: 2597717 - DNA, 25 bp, Homo sapien
cgctggccagggcatcctttggatg

SEQ ID NO: 2597718 - DNA, 25 bp, Homo sapien
tggtgcgcgccaggccacacaagga

SEQ ID NO: 2597719 - DNA, 25 bp, Homo sapien
agctgctggcaccaaggaacaggag

SEQ ID NO: 2597720 - DNA, 25 bp, Homo sapien
cagaccctgacttgtaatttgaagt

SEQ ID NO: 2597721 - DNA, 25 bp, Homo sapien
gggtcctcaagactgtgggagaccc

SEQ ID NO: 2597722 - DNA, 25 bp, Homo sapien
aattcggtggcctcagatggagggc

SEQ ID NO: 2597723 - DNA, 25 bp, Homo sapien
tcctcaagactgtgggagaccctgg

SEQ ID NO: 2597724 - DNA, 25 bp, Homo sapien
caggtgcagagggagaattcggtgg

SEQ ID NO: 2597725 - DNA, 25 bp, Homo sapien
tccaaggcccatcactcttgatcct

SEQ ID NO: 2597726 - DNA, 25 bp, Homo sapien
aatcaaatgcaaccgcaccctgcgt

SEQ ID NO: 2597727 - DNA, 25 bp, Homo sapien
gagcagcaagacactccggctggag

SEQ ID NO: 2597728 - DNA, 25 bp, Homo sapien
gggtctgagcagcaagacactccgg

SEQ ID NO: 2597729 - DNA, 25 bp, Homo sapien
tgcttgacagaaatccttggggcaa

SEQ ID NO: 2597730 - DNA, 25 bp, Homo sapien
ctgcttgacagaaatccttggggca

SEQ ID NO: 2597731 - DNA, 25 bp, Homo sapien
acagaaatccttggggcaaatgcca

SEQ ID NO: 2597732 - DNA, 25 bp, Homo sapien
ttgacagaaatccttggggcaaatg

SEQ ID NO: 2597733 - DNA, 25 bp, Homo sapien
tccttcacatgcaccgggaggaggc

SEQ ID NO: 2597734 - DNA, 25 bp, Homo sapien
ccagccccggtcagggatgaggtct

SEQ ID NO: 2597735 - DNA, 25 bp, Homo sapien
gacatcgtgtcgttgtgcaccttct

SEQ ID NO: 2597736 - DNA, 25 bp, Homo sapien
aggaggcccaagctgtcggcggaga

SEQ ID NO: 2597737 - DNA, 25 bp, Homo sapien
ctggacagggcaacgggtgtggggg

SEQ ID NO: 2597738 - DNA, 25 bp, Homo sapien
tggacagggcaacgggtgtggggga

SEQ ID NO: 2597739 - DNA, 25 bp, Homo sapien
tcagcatggagcgtggagagaggaa

SEQ ID NO: 2597740 - DNA, 25 bp, Homo sapien
ggcagcggcatctgagccgttgggc

SEQ ID NO: 2597741 - DNA, 25 bp, Homo sapien
gaaggcagcggcatctgagccgttg

SEQ ID NO: 2597742 - DNA, 25 bp, Homo sapien
aggaaggcagcggcatctgagccgt

SEQ ID NO: 2597743 - DNA, 25 bp, Homo sapien
acgttcccctgaaccagcgccgcgg

SEQ ID NO: 2597744 - DNA, 25 bp, Homo sapien
aggcagcgccggacgttcccctgaa

SEQ ID NO: 2597745 - DNA, 25 bp, Homo sapien
ttcccctgaaccagcgccgcggtcg

SEQ ID NO: 2597746 - DNA, 25 bp, Homo sapien
cggacgttcccctgaaccagcgccg

SEQ ID NO: 2597747 - DNA, 25 bp, Homo sapien
aagccaagaggctcgagaccgaggc

SEQ ID NO: 2597748 - DNA, 25 bp, Homo sapien
cggctctgtcgctcccaaggctttc

SEQ ID NO: 2597749 - DNA, 25 bp, Homo sapien
tcaaactcggagaccgagcagggcc

SEQ ID NO: 2597750 - DNA, 25 bp, Homo sapien
ggccgagccggtgtcggatcaaact

SEQ ID NO: 2597751 - DNA, 25 bp, Homo sapien
tgctgagttcgccagcgggtcacct

SEQ ID NO: 2597752 - DNA, 25 bp, Homo sapien
aggcttgcgtcatcgccccgggtgc

SEQ ID NO: 2597753 - DNA, 25 bp, Homo sapien
gggccacatgacgtcatcccagcag

SEQ ID NO: 2597754 - DNA, 25 bp, Homo sapien
aagcacgtggcgacacgggccacat

SEQ ID NO: 2597755 - DNA, 25 bp, Homo sapien
ggtctccacacccgggcccaggcca

SEQ ID NO: 2597756 - DNA, 25 bp, Homo sapien
ctcctgcccggattgaaagcccggg

SEQ ID NO: 2597757 - DNA, 25 bp, Homo sapien
gcctcctgcccggattgaaagcccg

SEQ ID NO: 2597758 - DNA, 25 bp, Homo sapien
tgaaagcccgggagggtctccacac

SEQ ID NO: 2597759 - DNA, 25 bp, Homo sapien
agcctccccacccactcggcaggca

SEQ ID NO: 2597760 - DNA, 25 bp, Homo sapien
ggagcctccccacccactcggcagg

SEQ ID NO: 2597761 - DNA, 25 bp, Homo sapien
gccggagcctccccacccactcggc

SEQ ID NO: 2597762 - DNA, 25 bp, Homo sapien
gcctccccacccactcggcaggcat

SEQ ID NO: 2597763 - DNA, 25 bp, Homo sapien
tgtggccaccggatgatgacccgga

SEQ ID NO: 2597764 - DNA, 25 bp, Homo sapien
cggaaacgtgtcactggagaccctg

SEQ ID NO: 2597765 - DNA, 25 bp, Homo sapien
attccctgtggccaccggatgatga

SEQ ID NO: 2597766 - DNA, 25 bp, Homo sapien
ggaaacgtgtcactggagaccctgg

SEQ ID NO: 2597767 - DNA, 25 bp, Homo sapien
tgtgctggaccccgattctcgccgt

SEQ ID NO: 2597768 - DNA, 25 bp, Homo sapien
ttctccgctgtcgccatcatctgtg

SEQ ID NO: 2597769 - DNA, 25 bp, Homo sapien
ctccgctgtcgccatcatctgtgct

SEQ ID NO: 2597770 - DNA, 25 bp, Homo sapien
tggaccccgattctcgccgtgtctt

SEQ ID NO: 2597771 - DNA, 25 bp, Homo sapien
gaaaccctgtccctgcaatacataa

SEQ ID NO: 2597772 - DNA, 25 bp, Homo sapien
aaaccctgtccctgcaatacataaa

SEQ ID NO: 2597773 - DNA, 25 bp, Homo sapien
aacgaccggaactggtagagccgca

SEQ ID NO: 2597774 - DNA, 25 bp, Homo sapien
tagcaggaacggagcacatgtccat

SEQ ID NO: 2597775 - DNA, 25 bp, Homo sapien
cgaaggccgcagagtgttggttcca

SEQ ID NO: 2597776 - DNA, 25 bp, Homo sapien
gcttcagagccacaagcccctttgg

SEQ ID NO: 2597777 - DNA, 25 bp, Homo sapien
agcctgcgctggtggccaaatttgg

SEQ ID NO: 2597778 - DNA, 25 bp, Homo sapien
gctggtggccaaatttggcttcagt

SEQ ID NO: 2597779 - DNA, 25 bp, Homo sapien
gtcagggggcgtgccgccgagcctg

SEQ ID NO: 2597780 - DNA, 25 bp, Homo sapien
gggcgtgccgccgagcctgcgctgg

SEQ ID NO: 2597781 - DNA, 25 bp, Homo sapien
tgtgggccacggcacaagctcctgt

SEQ ID NO: 2597782 - DNA, 25 bp, Homo sapien
cctgtactggcaaagatgagttcgc

SEQ ID NO: 2597783 - DNA, 25 bp, Homo sapien
caaagatgagttcgctgcctctcag

SEQ ID NO: 2597784 - DNA, 25 bp, Homo sapien
ggccacggcacaagctcctgtactg

SEQ ID NO: 2597785 - DNA, 25 bp, Homo sapien
tcagaggttcgtcgcatttgtccac

SEQ ID NO: 2597786 - DNA, 25 bp, Homo sapien
gatcttctgggtgatctgcgccttc

SEQ ID NO: 2597787 - DNA, 25 bp, Homo sapien
tgctggaaggcgtgcacgccgatct

SEQ ID NO: 2597788 - DNA, 25 bp, Homo sapien
ctcgggtggacagccagacgctgct

SEQ ID NO: 2597789 - DNA, 25 bp, Homo sapien
gcttcccctcgaaggtcagccagaa

SEQ ID NO: 2597790 - DNA, 25 bp, Homo sapien
caggcgcagattcatgaacacggtg

SEQ ID NO: 2597791 - DNA, 25 bp, Homo sapien
cgtaggtgctgctgcggcccttgtt

SEQ ID NO: 2597792 - DNA, 25 bp, Homo sapien
tgcgtcagccgtacctcgtaggtgc

SEQ ID NO: 2597793 - DNA, 25 bp, Homo sapien
cctgctcggatgctggtggaggccc

SEQ ID NO: 2597794 - DNA, 25 bp, Homo sapien
tcctgctcggatgctggtggaggcc

SEQ ID NO: 2597795 - DNA, 25 bp, Homo sapien
caacagcctttatttccggcccttg

SEQ ID NO: 2597796 - DNA, 25 bp, Homo sapien
gtcccggtgagcaccacgttcgcct

SEQ ID NO: 2597797 - DNA, 25 bp, Homo sapien
ggccaccacaaggagcggcagcagc

SEQ ID NO: 2597798 - DNA, 25 bp, Homo sapien
cttgcaggagtacgtgtgctgcacc

SEQ ID NO: 2597799 - DNA, 25 bp, Homo sapien
cgggtccacgttgaggatctcctcc

SEQ ID NO: 2597800 - DNA, 25 bp, Homo sapien
gagcccctactaggagaagatggtg

SEQ ID NO: 2597801 - DNA, 25 bp, Homo sapien
tgccctggccgctgtggaggagact

SEQ ID NO: 2597802 - DNA, 25 bp, Homo sapien
cccgcaccggccagtctgaaagaag

SEQ ID NO: 2597803 - DNA, 25 bp, Homo sapien
tctccacctccgtggagggaaatga

SEQ ID NO: 2597804 - DNA, 25 bp, Homo sapien
acggtggcctgtggtaaaggctaca

SEQ ID NO: 2597805 - DNA, 25 bp, Homo sapien
tggcctgtggtaaaggctacagccg

SEQ ID NO: 2597806 - DNA, 25 bp, Homo sapien
tgtggtaaaggctacagccgacctg

SEQ ID NO: 2597807 - DNA, 25 bp, Homo sapien
gtaaaggctacagccgacctggcgg

SEQ ID NO: 2597808 - DNA, 25 bp, Homo sapien
tccgcagggtgatccgcatgaggct

SEQ ID NO: 2597809 - DNA, 25 bp, Homo sapien
ggtctttgcccttcaagtaccgcca

SEQ ID NO: 2597810 - DNA, 25 bp, Homo sapien
ggtgcagggttcacaaagaagatcc

SEQ ID NO: 2597811 - DNA, 25 bp, Homo sapien
tgagcatcagctcgttcttgtgggc

SEQ ID NO: 2597812 - DNA, 25 bp, Homo sapien
aggagtgctcgacacgcgggcccgt

SEQ ID NO: 2597813 - DNA, 25 bp, Homo sapien
tccacggcgaggagtgctcgacacg

SEQ ID NO: 2597814 - DNA, 25 bp, Homo sapien
cgcccgatctccacggcgaggagtg

SEQ ID NO: 2597815 - DNA, 25 bp, Homo sapien
ctccacatccgcagaagccctcgcc

SEQ ID NO: 2597816 - DNA, 25 bp, Homo sapien
cctgtggtctcaggggtagcttctg

SEQ ID NO: 2597817 - DNA, 25 bp, Homo sapien
gggctgcccagacgccatcctgtgc

SEQ ID NO: 2597818 - DNA, 25 bp, Homo sapien
caggatggggttcccatacaaggtg

SEQ ID NO: 2597819 - DNA, 25 bp, Homo sapien
tagcttctgaagactaggggctgcc

SEQ ID NO: 2597820 - DNA, 25 bp, Homo sapien
tgtcttagttatgccaggaatgtgg

SEQ ID NO: 2597821 - DNA, 25 bp, Homo sapien
tcttagttatgccaggaatgtggct

SEQ ID NO: 2597822 - DNA, 25 bp, Homo sapien
gtcttagttatgccaggaatgtggc

SEQ ID NO: 2597823 - DNA, 25 bp, Homo sapien
ctgtcttagttatgccaggaatgtg

SEQ ID NO: 2597824 - DNA, 25 bp, Homo sapien
agtctgcaggaacaatggagccagg

SEQ ID NO: 2597825 - DNA, 25 bp, Homo sapien
tagtctgcaggaacaatggagccag

SEQ ID NO: 2597826 - DNA, 25 bp, Homo sapien
gtctgcaggaacaatggagccaggg

SEQ ID NO: 2597827 - DNA, 25 bp, Homo sapien
ctagtctgcaggaacaatggagcca

SEQ ID NO: 2597828 - DNA, 25 bp, Homo sapien
ccacaggtggaagcaaagccctggg

SEQ ID NO: 2597829 - DNA, 25 bp, Homo sapien
gggcgtctgcttctgcagttgtttt

SEQ ID NO: 2597830 - DNA, 25 bp, Homo sapien
gacctgggtcccacaggtggaagca

SEQ ID NO: 2597831 - DNA, 25 bp, Homo sapien
gcttctgcagttgttttccaccctc

SEQ ID NO: 2597832 - DNA, 25 bp, Homo sapien
ctccagcggggggtgcgtgggagcc

SEQ ID NO: 2597833 - DNA, 25 bp, Homo sapien
tgggagcctcccacctgcggacacg

SEQ ID NO: 2597834 - DNA, 25 bp, Homo sapien
gccgtgggccggtgtttgtgcttgt

SEQ ID NO: 2597835 - DNA, 25 bp, Homo sapien
tgcggacacgcaggggcttgcttct

SEQ ID NO: 2597836 - DNA, 25 bp, Homo sapien
aggtgccaaccgtgagtgtgtgaat

SEQ ID NO: 2597837 - DNA, 25 bp, Homo sapien
tggaggtgccaaccgtgagtgtgtg

SEQ ID NO: 2597838 - DNA, 25 bp, Homo sapien
agccccgtggaggtgccaaccgtga

SEQ ID NO: 2597839 - DNA, 25 bp, Homo sapien
aatgcacagctccttcccggcttcc

SEQ ID NO: 2597840 - DNA, 25 bp, Homo sapien
gaattctcccggagtagaaatccca

SEQ ID NO: 2597841 - DNA, 25 bp, Homo sapien
ctgtgccctcagagttcacccagtc

SEQ ID NO: 2597842 - DNA, 25 bp, Homo sapien
tccaggctcatcgtgggaggagggc

SEQ ID NO: 2597843 - DNA, 25 bp, Homo sapien
cccaaatgtgggctccgaggtaggc

SEQ ID NO: 2597844 - DNA, 25 bp, Homo sapien
gaggaacagcagcaccgcgaagccg

SEQ ID NO: 2597845 - DNA, 25 bp, Homo sapien
ccgagcgtggcggtggccagcagga

SEQ ID NO: 2597846 - DNA, 25 bp, Homo sapien
aagcctcgcaccagcagggaggcgc

SEQ ID NO: 2597847 - DNA, 25 bp, Homo sapien
atcaggcaggcgttgcagggcacca

SEQ ID NO: 2597848 - DNA, 25 bp, Homo sapien
aaatccccaagttaggctcctctga

SEQ ID NO: 2597849 - DNA, 25 bp, Homo sapien
ctggaagagtccaccgcaggtcctg

SEQ ID NO: 2597850 - DNA, 25 bp, Homo sapien
gaggtctgagacagaggcccctgct

SEQ ID NO: 2597851 - DNA, 25 bp, Homo sapien
agccaaatagtcatggcctgacccc

SEQ ID NO: 2597852 - DNA, 25 bp, Homo sapien
caggaggcgtcggaggcactggagt

SEQ ID NO: 2597853 - DNA, 25 bp, Homo sapien
ggaggcgtcggaggcactggagtga

SEQ ID NO: 2597854 - DNA, 25 bp, Homo sapien
catcaggaggcgtcggaggcactgg

SEQ ID NO: 2597855 - DNA, 25 bp, Homo sapien
atcaggaggcgtcggaggcactgga

SEQ ID NO: 2597856 - DNA, 25 bp, Homo sapien
tcaccttggccacgcagaccggtct

SEQ ID NO: 2597857 - DNA, 25 bp, Homo sapien
gctctgaggagcctttgggatctca

SEQ ID NO: 2597858 - DNA, 25 bp, Homo sapien
gcctttgggatctcataggaacagc

SEQ ID NO: 2597859 - DNA, 25 bp, Homo sapien
tgaggagcctttgggatctcatagg

SEQ ID NO: 2597860 - DNA, 25 bp, Homo sapien
tcaggaagggggacagcaaccccac

SEQ ID NO: 2597861 - DNA, 25 bp, Homo sapien
tcacaaaccacccatggtgctgtgc

SEQ ID NO: 2597862 - DNA, 25 bp, Homo sapien
catggtgctgtgctgccctgaccca

SEQ ID NO: 2597863 - DNA, 25 bp, Homo sapien
agtctcaggaagggggacagcaacc

SEQ ID NO: 2597864 - DNA, 25 bp, Homo sapien
actgctagaaatgccagcactgggc

SEQ ID NO: 2597865 - DNA, 25 bp, Homo sapien
agccacgccccgagatgtctcccct

SEQ ID NO: 2597866 - DNA, 25 bp, Homo sapien
caggaggaaggtaggccacctgaca

SEQ ID NO: 2597867 - DNA, 25 bp, Homo sapien
gaaggtaggccacctgacaaggcca

SEQ ID NO: 2597868 - DNA, 25 bp, Homo sapien
ccaagggcactgttcctggatggcg

SEQ ID NO: 2597869 - DNA, 25 bp, Homo sapien
ggatggcgggcatgctcctcatcca

SEQ ID NO: 2597870 - DNA, 25 bp, Homo sapien
ggtcctgctacgtcccaagacagag

SEQ ID NO: 2597871 - DNA, 25 bp, Homo sapien
aaggccctgacaccatggccaaggg

SEQ ID NO: 2597872 - DNA, 25 bp, Homo sapien
aggtcccgcgtctggccctcagggg

SEQ ID NO: 2597873 - DNA, 25 bp, Homo sapien
aactcgggcacaagcagtccaggcc

SEQ ID NO: 2597874 - DNA, 25 bp, Homo sapien
gaaaagcagagacgcctcgaaacca

SEQ ID NO: 2597875 - DNA, 25 bp, Homo sapien
ctcgaaaccaactcgggcacaagca

SEQ ID NO: 2597876 - DNA, 25 bp, Homo sapien
ctcgtgggcctccagcgaaaagcag

SEQ ID NO: 2597877 - DNA, 25 bp, Homo sapien
gcatcgggggtccaccacggacacg

SEQ ID NO: 2597878 - DNA, 25 bp, Homo sapien
acacgcgtgcgtgcgctcacaggac

SEQ ID NO: 2597879 - DNA, 25 bp, Homo sapien
acacggacacgcgtgcgtgcgctca

SEQ ID NO: 2597880 - DNA, 25 bp, Homo sapien
gagaccttgccgtgctcgcagcccg

SEQ ID NO: 2597881 - DNA, 25 bp, Homo sapien
gctcttcttgcagacgcaggacgcc

SEQ ID NO: 2597882 - DNA, 25 bp, Homo sapien
gtggaggcgtccgacccacacacag

SEQ ID NO: 2597883 - DNA, 25 bp, Homo sapien
ctgagcaggcggatgcggcgctgct

SEQ ID NO: 2597884 - DNA, 25 bp, Homo sapien
gctcgcattcgttgctgtaggtgga

SEQ ID NO: 2597885 - DNA, 25 bp, Homo sapien
cgaagctgcaggtcacgttggagca

SEQ ID NO: 2597886 - DNA, 25 bp, Homo sapien
cacaagggccgtcgaacttcttgaa

SEQ ID NO: 2597887 - DNA, 25 bp, Homo sapien
agcgcgcacaggtgctgccgaagct

SEQ ID NO: 2597888 - DNA, 25 bp, Homo sapien
gaagacattctcctggcgggcgcag

SEQ ID NO: 2597889 - DNA, 25 bp, Homo sapien
gctctcgggccgtaggagcatctca

SEQ ID NO: 2597890 - DNA, 25 bp, Homo sapien
ttcgtaggtgactccgtcgtcccca

SEQ ID NO: 2597891 - DNA, 25 bp, Homo sapien
ccatgacacagtcgttttcgtaggt

SEQ ID NO: 2597892 - DNA, 25 bp, Homo sapien
tggccggagcgcactttctgcagga

SEQ ID NO: 2597893 - DNA, 25 bp, Homo sapien
aggccccgtcacaggtgacgcggtc

SEQ ID NO: 2597894 - DNA, 25 bp, Homo sapien
gcacacacgggcctgtaggccccgt

SEQ ID NO: 2597895 - DNA, 25 bp, Homo sapien
cacggcgggacaggcacacggcatt

SEQ ID NO: 2597896 - DNA, 25 bp, Homo sapien
actgtcatacgtgcgcccgtcctgg

SEQ ID NO: 2597897 - DNA, 25 bp, Homo sapien
caaaacggccgacggctgcccatgt

SEQ ID NO: 2597898 - DNA, 25 bp, Homo sapien
ccaagagtgaggaccctggtgttgt

SEQ ID NO: 2597899 - DNA, 25 bp, Homo sapien
ctgacactgcctccaaaacggccga

SEQ ID NO: 2597900 - DNA, 25 bp, Homo sapien
caagacgaacacgacgggacacgac

SEQ ID NO: 2597901 - DNA, 25 bp, Homo sapien
acacccatgcatgtgggggggctct

SEQ ID NO: 2597902 - DNA, 25 bp, Homo sapien
tgccgcacacaggatcgtagaggct

SEQ ID NO: 2597903 - DNA, 25 bp, Homo sapien
gctgccgtatgtgacgccgtcgctg

SEQ ID NO: 2597904 - DNA, 25 bp, Homo sapien
aaatgcacactgcaccccgaggcat

SEQ ID NO: 2597905 - DNA, 25 bp, Homo sapien
acagggtcctttgcgcgccacctgg

SEQ ID NO: 2597906 - DNA, 25 bp, Homo sapien
gtacgtgtgcccgtcggagccacac

SEQ ID NO: 2597907 - DNA, 25 bp, Homo sapien
tgggccaaagccacgcattcagagg

SEQ ID NO: 2597908 - DNA, 25 bp, Homo sapien
ccggtctcggcctcgcacagggctc

SEQ ID NO: 2597909 - DNA, 25 bp, Homo sapien
gcacgtgcagcatgcactcgctggg

SEQ ID NO: 2597910 - DNA, 25 bp, Homo sapien
gtaggtgacaccgtcgctgccacac

SEQ ID NO: 2597911 - DNA, 25 bp, Homo sapien
cctcgatctgtgtctgctggaggca

SEQ ID NO: 2597912 - DNA, 25 bp, Homo sapien
aggcactgccgtaggtgacaccgtc

SEQ ID NO: 2597913 - DNA, 25 bp, Homo sapien
ggcttcccgtagctcgcaggcactg

SEQ ID NO: 2597914 - DNA, 25 bp, Homo sapien
agagccagagcctccggaaccgcac

SEQ ID NO: 2597915 - DNA, 25 bp, Homo sapien
gtcacagacacacggcccgtcctcc

SEQ ID NO: 2597916 - DNA, 25 bp, Homo sapien
gtcccagatgccaccgcgctgccgg

SEQ ID NO: 2597917 - DNA, 25 bp, Homo sapien
ccagagcctccggaaccgcactcgg

SEQ ID NO: 2597918 - DNA, 25 bp, Homo sapien
taggtgaccccatctgagccgcaca

SEQ ID NO: 2597919 - DNA, 25 bp, Homo sapien
tcggtgctgtaggtgaccccatctg

SEQ ID NO: 2597920 - DNA, 25 bp, Homo sapien
ctgtaggtgaccccatctgagccgc

SEQ ID NO: 2597921 - DNA, 25 bp, Homo sapien
ctcggtgctgtaggtgaccccatct

SEQ ID NO: 2597922 - DNA, 25 bp, Homo sapien
ccgctacgtagagccctcgctgtga

SEQ ID NO: 2597923 - DNA, 25 bp, Homo sapien
tgggccgctacgtagagccctcgct

SEQ ID NO: 2597924 - DNA, 25 bp, Homo sapien
gtagagccctcgctgtgactcacac

SEQ ID NO: 2597925 - DNA, 25 bp, Homo sapien
aggctccctgggccgctacgtagag

SEQ ID NO: 2597926 - DNA, 25 bp, Homo sapien
ggtgaggctcccacatcttacgcaa

SEQ ID NO: 2597927 - DNA, 25 bp, Homo sapien
gaggctcccacatcttacgcaagaa

SEQ ID NO: 2597928 - DNA, 25 bp, Homo sapien
ctgtcaccactcagccgtcccgatc

SEQ ID NO: 2597929 - DNA, 25 bp, Homo sapien
tcccacatcttacgcaagaacatgt

SEQ ID NO: 2597930 - DNA, 25 bp, Homo sapien
ccacgccccgggctgcggtgatatt

SEQ ID NO: 2597931 - DNA, 25 bp, Homo sapien
cccgggctgcggtgatattgtcctg

SEQ ID NO: 2597932 - DNA, 25 bp, Homo sapien
gcagcagccgtagggcgtctgggca

SEQ ID NO: 2597933 - DNA, 25 bp, Homo sapien
gtcctggcagcagccgtagggcgtc

SEQ ID NO: 2597934 - DNA, 25 bp, Homo sapien
acaaggtcacgtggccgcacagccg

SEQ ID NO: 2597935 - DNA, 25 bp, Homo sapien
ggacaaggtcacgtggccgcacagc

SEQ ID NO: 2597936 - DNA, 25 bp, Homo sapien
aaggtcacgtggccgcacagccgca

SEQ ID NO: 2597937 - DNA, 25 bp, Homo sapien
aggacaaggtcacgtggccgcacag

SEQ ID NO: 2597938 - DNA, 25 bp, Homo sapien
gtgtacagccactccggccatcggt

SEQ ID NO: 2597939 - DNA, 25 bp, Homo sapien
ctcgaaagttccagaagccaggctc

SEQ ID NO: 2597940 - DNA, 25 bp, Homo sapien
aggctcacagcggtcacacctgagg

SEQ ID NO: 2597941 - DNA, 25 bp, Homo sapien
ggccatcggtgacgatgcctcgaaa

SEQ ID NO: 2597942 - DNA, 25 bp, Homo sapien
cagggcacggccgtctggacactgc

SEQ ID NO: 2597943 - DNA, 25 bp, Homo sapien
gagcacagccccgtcatctgctcac

SEQ ID NO: 2597944 - DNA, 25 bp, Homo sapien
agtcatcccgcacggcgccttgggg

SEQ ID NO: 2597945 - DNA, 25 bp, Homo sapien
ggacactgcccacacttgggtccag

SEQ ID NO: 2597946 - DNA, 25 bp, Homo sapien
acaggtgagcatcgggcagacacag

SEQ ID NO: 2597947 - DNA, 25 bp, Homo sapien
tcacagcgcatctccgcacaggtcg

SEQ ID NO: 2597948 - DNA, 25 bp, Homo sapien
accgcgcaccgaactcacagcgcat

SEQ ID NO: 2597949 - DNA, 25 bp, Homo sapien
cttggtagcgttggcctctggacag

SEQ ID NO: 2597950 - DNA, 25 bp, Homo sapien
gcggcaggcgatggtcttcagctga

SEQ ID NO: 2597951 - DNA, 25 bp, Homo sapien
actcgttgccgtatgtgactccatc

SEQ ID NO: 2597952 - DNA, 25 bp, Homo sapien
tggtcttcagctgacactcgttgcc

SEQ ID NO: 2597953 - DNA, 25 bp, Homo sapien
gctgacactcgttgccgtatgtgac

SEQ ID NO: 2597954 - DNA, 25 bp, Homo sapien
ccaggctctggatagagatttgcag

SEQ ID NO: 2597955 - DNA, 25 bp, Homo sapien
gcccaggctctggatagagatttgc

SEQ ID NO: 2597956 - DNA, 25 bp, Homo sapien
cccaggctctggatagagatttgca

SEQ ID NO: 2597957 - DNA, 25 bp, Homo sapien
aggccttcctggtcagttctggggc

SEQ ID NO: 2597958 - DNA, 25 bp, Homo sapien
cagattcaccaaaggcggacgccac

SEQ ID NO: 2597959 - DNA, 25 bp, Homo sapien
tgtcgggtgagtgctgggagcaaca

SEQ ID NO: 2597960 - DNA, 25 bp, Homo sapien
tggtctggctgtgtgcggtactgct

SEQ ID NO: 2597961 - DNA, 25 bp, Homo sapien
gctggcagtggtccgaggtcgtgat

SEQ ID NO: 2597962 - DNA, 25 bp, Homo sapien
tggtccccgctcagttcctcatcgc

SEQ ID NO: 2597963 - DNA, 25 bp, Homo sapien
cctcctggtccccgctcagttcctc

SEQ ID NO: 2597964 - DNA, 25 bp, Homo sapien
tcctggtccccgctcagttcctcat

SEQ ID NO: 2597965 - DNA, 25 bp, Homo sapien
ctggtccccgctcagttcctcatcg

SEQ ID NO: 2597966 - DNA, 25 bp, Homo sapien
tgcccacccaccccaagtccttgat

SEQ ID NO: 2597967 - DNA, 25 bp, Homo sapien
accccaagtccttgatccctgctca

SEQ ID NO: 2597968 - DNA, 25 bp, Homo sapien
acccaccccaagtccttgatccctg

SEQ ID NO: 2597969 - DNA, 25 bp, Homo sapien
ccccaagtccttgatccctgctcac

SEQ ID NO: 2597970 - DNA, 25 bp, Homo sapien
tggggagacgcgctctgagcccagg

SEQ ID NO: 2597971 - DNA, 25 bp, Homo sapien
cccaggctctggtggagcctctcgg

SEQ ID NO: 2597972 - DNA, 25 bp, Homo sapien
ctggggagacgcgctctgagcccag

SEQ ID NO: 2597973 - DNA, 25 bp, Homo sapien
aggctctggtggagcctctcggcgc

SEQ ID NO: 2597974 - DNA, 25 bp, Homo sapien
tagcaggaagccctctcgacaggtg

SEQ ID NO: 2597975 - DNA, 25 bp, Homo sapien
gggcagttggagccctctgcgtcca

SEQ ID NO: 2597976 - DNA, 25 bp, Homo sapien
cagcccaacgcggagttgtagcagg

SEQ ID NO: 2597977 - DNA, 25 bp, Homo sapien
agcgagggcgtcttcccatcagagc

SEQ ID NO: 2597978 - DNA, 25 bp, Homo sapien
acaccggcttgcaacgagagagacg

SEQ ID NO: 2597979 - DNA, 25 bp, Homo sapien
tggtgtcggttaccaggaggactcc

SEQ ID NO: 2597980 - DNA, 25 bp, Homo sapien
tcagagcagtgtgccacaccggctt

SEQ ID NO: 2597981 - DNA, 25 bp, Homo sapien
cagcaagccacaagggtgcaaggga

SEQ ID NO: 2597982 - DNA, 25 bp, Homo sapien
tcgggcgtgtagaacagctcctggc

SEQ ID NO: 2597983 - DNA, 25 bp, Homo sapien
ggctgtctccccgaacagttctgac

SEQ ID NO: 2597984 - DNA, 25 bp, Homo sapien
tctccccgaacagttctgacttggg

SEQ ID NO: 2597985 - DNA, 25 bp, Homo sapien
ggtcagccatctcgggcgtgtagaa

SEQ ID NO: 2597986 - DNA, 25 bp, Homo sapien
ctgtggcagggagtaggcaaggact

SEQ ID NO: 2597987 - DNA, 25 bp, Homo sapien
cagggagtaggcaaggacttggggg

SEQ ID NO: 2597988 - DNA, 25 bp, Homo sapien
tgtggcagggagtaggcaaggactt

SEQ ID NO: 2597989 - DNA, 25 bp, Homo sapien
gtggcagggagtaggcaaggacttg

SEQ ID NO: 2597990 - DNA, 25 bp, Homo sapien
tccgaaaatccttcttgacgtctga

SEQ ID NO: 2597991 - DNA, 25 bp, Homo sapien
tcccgcaagcggacactccgaaaat

SEQ ID NO: 2597992 - DNA, 25 bp, Homo sapien
tctgaattccggaagaggtcgtcca

SEQ ID NO: 2597993 - DNA, 25 bp, Homo sapien
tcaaagtgcacatccacaatggcgc

SEQ ID NO: 2597994 - DNA, 25 bp, Homo sapien
aggaagggtccagggtgcaggtctc

SEQ ID NO: 2597995 - DNA, 25 bp, Homo sapien
ccattgcctcccaggaagggtccag

SEQ ID NO: 2597996 - DNA, 25 bp, Homo sapien
ccaggaagggtccagggtgcaggtc

SEQ ID NO: 2597997 - DNA, 25 bp, Homo sapien
gaagggtccagggtgcaggtctcac

SEQ ID NO: 2597998 - DNA, 25 bp, Homo sapien
gcccgggccacgtcgggtgccctga

SEQ ID NO: 2597999 - DNA, 25 bp, Homo sapien
ccgggccacgtcgggtgccctgaag

SEQ ID NO: 2598000 - DNA, 25 bp, Homo sapien
ccacgtcgggtgccctgaaggctgt

SEQ ID NO: 2598001 - DNA, 25 bp, Homo sapien
ggccacgtcgggtgccctgaaggct

SEQ ID NO: 2598002 - DNA, 25 bp, Homo sapien
caaagtccataaatcgcacgtgctc

SEQ ID NO: 2598003 - DNA, 25 bp, Homo sapien
ccataaatcgcacgtgctcctgcag

SEQ ID NO: 2598004 - DNA, 25 bp, Homo sapien
aaggaccggcgcctggacacctgga

SEQ ID NO: 2598005 - DNA, 25 bp, Homo sapien
aagtccataaatcgcacgtgctcct

SEQ ID NO: 2598006 - DNA, 25 bp, Homo sapien
cggcaggcgcgatgcagtggtggct

SEQ ID NO: 2598007 - DNA, 25 bp, Homo sapien
ccccgtgataaacgcaggaaaccag

SEQ ID NO: 2598008 - DNA, 25 bp, Homo sapien
cgcagcaatggctcctgacgtggcc

SEQ ID NO: 2598009 - DNA, 25 bp, Homo sapien
caacgggctggcttgtgtgactggg

SEQ ID NO: 2598010 - DNA, 25 bp, Homo sapien
tggaaaagctccgaggattccccac

SEQ ID NO: 2598011 - DNA, 25 bp, Homo sapien
ctgcaaagggcgaccgggagggccg

SEQ ID NO: 2598012 - DNA, 25 bp, Homo sapien
gccggctggaaaagctccgaggatt

SEQ ID NO: 2598013 - DNA, 25 bp, Homo sapien
ggagggccggctggaaaagctccga

SEQ ID NO: 2598014 - DNA, 25 bp, Homo sapien
aaggccggcacaggggcgccaagca

SEQ ID NO: 2598015 - DNA, 25 bp, Homo sapien
tctagcagcgccaatgccaggaagt

SEQ ID NO: 2598016 - DNA, 25 bp, Homo sapien
ttgccccgggcgttgccattgtaca

SEQ ID NO: 2598017 - DNA, 25 bp, Homo sapien
cggaattccagtgccaggcgcagcg

SEQ ID NO: 2598018 - DNA, 25 bp, Homo sapien
acgcggccatctagcagcgccaatg

SEQ ID NO: 2598019 - DNA, 25 bp, Homo sapien
ctgtgtccaggttgaggccgtcggt

SEQ ID NO: 2598020 - DNA, 25 bp, Homo sapien
gctctaccggcacggcactggtcag

SEQ ID NO: 2598021 - DNA, 25 bp, Homo sapien
cgcccacaaagaggtctgtgtccag

SEQ ID NO: 2598022 - DNA, 25 bp, Homo sapien
aggcggtgccactggcccggctcta

SEQ ID NO: 2598023 - DNA, 25 bp, Homo sapien
cgggcactggcaatggaaccttcca

SEQ ID NO: 2598024 - DNA, 25 bp, Homo sapien
agctccaggcgctggttgttgacgt

SEQ ID NO: 2598025 - DNA, 25 bp, Homo sapien
ttgacgtccagcaaacggatgcacc

SEQ ID NO: 2598026 - DNA, 25 bp, Homo sapien
ggcgggcactggcaatggaaccttc

SEQ ID NO: 2598027 - DNA, 25 bp, Homo sapien
ctcttctcatcggcacaggttggtc

SEQ ID NO: 2598028 - DNA, 25 bp, Homo sapien
ggggcactcgcactgagcaccaccc

SEQ ID NO: 2598029 - DNA, 25 bp, Homo sapien
ggggctcttctcatcggcacaggtt

SEQ ID NO: 2598030 - DNA, 25 bp, Homo sapien
ggctcttctcatcggcacaggttgg

SEQ ID NO: 2598031 - DNA, 25 bp, Homo sapien
ccaggtcccgtgcaaaggtgtgcag

SEQ ID NO: 2598032 - DNA, 25 bp, Homo sapien
aggtgggagaagccgttgaagtcag

SEQ ID NO: 2598033 - DNA, 25 bp, Homo sapien
cccaggtcccgtgcaaaggtgtgca

SEQ ID NO: 2598034 - DNA, 25 bp, Homo sapien
tctgcccgttgtagagcaggaggcc

SEQ ID NO: 2598035 - DNA, 25 bp, Homo sapien
aggtcgtagcggaactccaggcggc

SEQ ID NO: 2598036 - DNA, 25 bp, Homo sapien
tcccgcagtgccagcgacacgaagt

SEQ ID NO: 2598037 - DNA, 25 bp, Homo sapien
ggaacacgacctccagcgccatctt

SEQ ID NO: 2598038 - DNA, 25 bp, Homo sapien
acacgggggccgtcgcccacacgca

SEQ ID NO: 2598039 - DNA, 25 bp, Homo sapien
gcagggcacccttgcggccgtttcg

SEQ ID NO: 2598040 - DNA, 25 bp, Homo sapien
acacgcagggcacccttgcggccgt

SEQ ID NO: 2598041 - DNA, 25 bp, Homo sapien
cgtttcgctccagtgagaccctggt

SEQ ID NO: 2598042 - DNA, 25 bp, Homo sapien
ggagcgccccctacgtagagcggct

SEQ ID NO: 2598043 - DNA, 25 bp, Homo sapien
ctccttcaggttgaggacggtgtgc

SEQ ID NO: 2598044 - DNA, 25 bp, Homo sapien
gatggcaccgtcgaagccagaggac

SEQ ID NO: 2598045 - DNA, 25 bp, Homo sapien
cagcttgctgaagtcgggagcgccc

SEQ ID NO: 2598046 - DNA, 25 bp, Homo sapien
cgtgacgtccacctgccgcagcacg

SEQ ID NO: 2598047 - DNA, 25 bp, Homo sapien
tgacgtccacctgccgcagcacgtg

SEQ ID NO: 2598048 - DNA, 25 bp, Homo sapien
tgccgcagcacgtgctccggggtca

SEQ ID NO: 2598049 - DNA, 25 bp, Homo sapien
aaggacgtgacgtccacctgccgca

SEQ ID NO: 2598050 - DNA, 25 bp, Homo sapien
agcctccctcgggacgcaggaggcc

SEQ ID NO: 2598051 - DNA, 25 bp, Homo sapien
cctcgggacgcaggaggccccattg

SEQ ID NO: 2598052 - DNA, 25 bp, Homo sapien
tcgcagtgcggtcctgagaatcccc

SEQ ID NO: 2598053 - DNA, 25 bp, Homo sapien
acacaggcacacataggcagcctcc

SEQ ID NO: 2598054 - DNA, 25 bp, Homo sapien
ctcgacaaaggtccgcccgtcaaag

SEQ ID NO: 2598055 - DNA, 25 bp, Homo sapien
gtcaaaggccaaggtatccacgtcc

SEQ ID NO: 2598056 - DNA, 25 bp, Homo sapien
tcacagcgttgaggtactcgacaaa

SEQ ID NO: 2598057 - DNA, 25 bp, Homo sapien
cccgtcaaaggccaaggtatccacg

SEQ ID NO: 2598058 - DNA, 25 bp, Homo sapien
cggaagtgcacacggacacagacat

SEQ ID NO: 2598059 - DNA, 25 bp, Homo sapien
gaaacggcctcttgcagccaaatag

SEQ ID NO: 2598060 - DNA, 25 bp, Homo sapien
gcatgttcacacacgcggaagtgca

SEQ ID NO: 2598061 - DNA, 25 bp, Homo sapien
catgcatatgcgcacaggtgtgtac

SEQ ID NO: 2598062 - DNA, 25 bp, Homo sapien
acgagacacttgagggcacagacac

SEQ ID NO: 2598063 - DNA, 25 bp, Homo sapien
cagcagggacacctacacatgcttg

SEQ ID NO: 2598064 - DNA, 25 bp, Homo sapien
gcttgtgcggacacgagacacgtga

SEQ ID NO: 2598065 - DNA, 25 bp, Homo sapien
gacacccacgtgcagacacgagaca

SEQ ID NO: 2598066 - DNA, 25 bp, Homo sapien
cccacagaagacatgcgtgacctcg

SEQ ID NO: 2598067 - DNA, 25 bp, Homo sapien
gggccaatgcaaacccatctcaaca

SEQ ID NO: 2598068 - DNA, 25 bp, Homo sapien
agaagacatgcgtgacctcgaggat

SEQ ID NO: 2598069 - DNA, 25 bp, Homo sapien
gcaggcacccacagaagacatgcgt

SEQ ID NO: 2598070 - DNA, 25 bp, Homo sapien
tgtgaagggccccggaatccagagt

SEQ ID NO: 2598071 - DNA, 25 bp, Homo sapien
ctgtgaagggccccggaatccagag

SEQ ID NO: 2598072 - DNA, 25 bp, Homo sapien
agagagatcagagagacgggcggga

SEQ ID NO: 2598073 - DNA, 25 bp, Homo sapien
cagagagagatcagagagacgggcg

SEQ ID NO: 2598074 - DNA, 25 bp, Homo sapien
agacgggcgggaggacagatgggcc

SEQ ID NO: 2598075 - DNA, 25 bp, Homo sapien
ggcgggaggacagatgggccagcca

SEQ ID NO: 2598076 - DNA, 25 bp, Homo sapien
gctgcggaggccacaagggctgtga

SEQ ID NO: 2598077 - DNA, 25 bp, Homo sapien
ggcagacaccgacagtgggagggag

SEQ ID NO: 2598078 - DNA, 25 bp, Homo sapien
tggtgggcagacaccgacagtggga

SEQ ID NO: 2598079 - DNA, 25 bp, Homo sapien
ccacaagggctgtgacgggacccag

SEQ ID NO: 2598080 - DNA, 25 bp, Homo sapien
ctggagggcagagggcaggtcaggg

SEQ ID NO: 2598081 - DNA, 25 bp, Homo sapien
ggagggcagagggcaggtcagggcc

SEQ ID NO: 2598082 - DNA, 25 bp, Homo sapien
tggagggcagagggcaggtcagggc

SEQ ID NO: 2598083 - DNA, 25 bp, Homo sapien
gagggcagagggcaggtcagggcct

SEQ ID NO: 2598084 - DNA, 25 bp, Homo sapien
aggtgcccgtccacaatggccagtg

SEQ ID NO: 2598085 - DNA, 25 bp, Homo sapien
aaagtggttgctctgcagtgccttc

SEQ ID NO: 2598086 - DNA, 25 bp, Homo sapien
ttgtagctcagttgcaggtgcccgt

SEQ ID NO: 2598087 - DNA, 25 bp, Homo sapien
tcagtgcgcaggctcagttcaaagt

SEQ ID NO: 2598088 - DNA, 25 bp, Homo sapien
actattctcggcacgctgggttccc

SEQ ID NO: 2598089 - DNA, 25 bp, Homo sapien
gggacattcctgcagctcaagcttt

SEQ ID NO: 2598090 - DNA, 25 bp, Homo sapien
tcggctcaggcagcaaggcgtgtcc

SEQ ID NO: 2598091 - DNA, 25 bp, Homo sapien
ctcaagctttgctggaggcgacggc

SEQ ID NO: 2598092 - DNA, 25 bp, Homo sapien
gagccggtcacaggggcctcattgc

SEQ ID NO: 2598093 - DNA, 25 bp, Homo sapien
agccacagggctccatcagtgtcca

SEQ ID NO: 2598094 - DNA, 25 bp, Homo sapien
tcagtgtccagctgcgtggcgccca

SEQ ID NO: 2598095 - DNA, 25 bp, Homo sapien
gggcctcattgcccacctgcaggga

SEQ ID NO: 2598096 - DNA, 25 bp, Homo sapien
ccttgggcatccctctctagtctcc

SEQ ID NO: 2598097 - DNA, 25 bp, Homo sapien
tggagtctgtccctcggatatcatg

SEQ ID NO: 2598098 - DNA, 25 bp, Homo sapien
caccctgactcaagggtgggcgctg

SEQ ID NO: 2598099 - DNA, 25 bp, Homo sapien
ccctcggatatcatgagacccttgg

SEQ ID NO: 2598100 - DNA, 25 bp, Homo sapien
caaagcctgtgccgtaggccttggg

SEQ ID NO: 2598101 - DNA, 25 bp, Homo sapien
aagcctgtgccgtaggccttgggca

SEQ ID NO: 2598102 - DNA, 25 bp, Homo sapien
ctctggcttggtgacggcgtcctcc

SEQ ID NO: 2598103 - DNA, 25 bp, Homo sapien
cttggtgacggcgtcctccagcagg

SEQ ID NO: 2598104 - DNA, 25 bp, Homo sapien
agaaaataattacagcgggcgcggg

SEQ ID NO: 2598105 - DNA, 25 bp, Homo sapien
gtccctccggccaacactcaggcaa

SEQ ID NO: 2598106 - DNA, 25 bp, Homo sapien
ctgtccatccctcggcactaggtct

SEQ ID NO: 2598107 - DNA, 25 bp, Homo sapien
ctgcagcacggctgcctggacggaa

SEQ ID NO: 2598108 - DNA, 25 bp, Homo sapien
aagtcacagtattggcgcaggaggc

SEQ ID NO: 2598109 - DNA, 25 bp, Homo sapien
tctctgggacacgagtcccgcctga

SEQ ID NO: 2598110 - DNA, 25 bp, Homo sapien
tgagggtcaggacacccagatcggc

SEQ ID NO: 2598111 - DNA, 25 bp, Homo sapien
tggcagagggatacggtcacgtcca

SEQ ID NO: 2598112 - DNA, 25 bp, Homo sapien
gcaggcggcagaggtcaaccccatc

SEQ ID NO: 2598113 - DNA, 25 bp, Homo sapien
cagtgagctcctctcgatagcccct

SEQ ID NO: 2598114 - DNA, 25 bp, Homo sapien
caggcaggcggcagaggtcaacccc

SEQ ID NO: 2598115 - DNA, 25 bp, Homo sapien
agctcctctcgatagcccctcgcag

SEQ ID NO: 2598116 - DNA, 25 bp, Homo sapien
ctttcactgacgctgtggggaggat

SEQ ID NO: 2598117 - DNA, 25 bp, Homo sapien
tgggaaagatgagacccaccactcc

SEQ ID NO: 2598118 - DNA, 25 bp, Homo sapien
cctcagccgctctcaggcgagatgg

SEQ ID NO: 2598119 - DNA, 25 bp, Homo sapien
aataaaatcaacacatgaagaacac

SEQ ID NO: 2598120 - DNA, 25 bp, Homo sapien
cagacactggctggcccctggtcat

SEQ ID NO: 2598121 - DNA, 25 bp, Homo sapien
ctggctggcccctggtcattctgag

SEQ ID NO: 2598122 - DNA, 25 bp, Homo sapien
tgccccttgaccttggtcagacact

SEQ ID NO: 2598123 - DNA, 25 bp, Homo sapien
ccttgaccttggtcagacactggct

SEQ ID NO: 2598124 - DNA, 25 bp, Homo sapien
tagagttagtaacacggcacccagc

SEQ ID NO: 2598125 - DNA, 25 bp, Homo sapien
gacgggacgttgcagtttaaggcat

SEQ ID NO: 2598126 - DNA, 25 bp, Homo sapien
ccgcttcatcgggtcctgctcctag

SEQ ID NO: 2598127 - DNA, 25 bp, Homo sapien
catttctggcttcggagccatccct

SEQ ID NO: 2598128 - DNA, 25 bp, Homo sapien
agttttcagactttatttcacagcg

SEQ ID NO: 2598129 - DNA, 25 bp, Homo sapien
aagttttcagactttatttcacagc

SEQ ID NO: 2598130 - DNA, 25 bp, Homo sapien
aaagttttcagactttatttcacag

SEQ ID NO: 2598131 - DNA, 25 bp, Homo sapien
agagacagcagtttgcgaagggcca

SEQ ID NO: 2598132 - DNA, 25 bp, Homo sapien
agacagcagtttgcgaagggccacc

SEQ ID NO: 2598133 - DNA, 25 bp, Homo sapien
gcagtttgcgaagggccacccagct

SEQ ID NO: 2598134 - DNA, 25 bp, Homo sapien
tggccacacaccctaccccttcttc

SEQ ID NO: 2598135 - DNA, 25 bp, Homo sapien
ccggctgtctccagtcagactggat

SEQ ID NO: 2598136 - DNA, 25 bp, Homo sapien
agggtggacaatcttcatggcctcc

SEQ ID NO: 2598137 - DNA, 25 bp, Homo sapien
gacatggggacccttcaggcaggac

SEQ ID NO: 2598138 - DNA, 25 bp, Homo sapien
ccaggcacgcttgggtgccagagtt

SEQ ID NO: 2598139 - DNA, 25 bp, Homo sapien
gacattgtaggagtgcccacaggtg

SEQ ID NO: 2598140 - DNA, 25 bp, Homo sapien
agagcacagtctcacggcggcaggt

SEQ ID NO: 2598141 - DNA, 25 bp, Homo sapien
caggactcgtagagaatctgcaggc

SEQ ID NO: 2598142 - DNA, 25 bp, Homo sapien
gggccaggccgaatcacgtactgat

SEQ ID NO: 2598143 - DNA, 25 bp, Homo sapien
aagagttttaatggcaaagttggct

SEQ ID NO: 2598144 - DNA, 25 bp, Homo sapien
tggctgcagcgacaatgccactcgg

SEQ ID NO: 2598145 - DNA, 25 bp, Homo sapien
aatggcaaagttggctgcagcgaca

SEQ ID NO: 2598146 - DNA, 25 bp, Homo sapien
ccctgaagaagcagcgagcgaggct

SEQ ID NO: 2598147 - DNA, 25 bp, Homo sapien
agcctgctggcccttgagcttctgg

SEQ ID NO: 2598148 - DNA, 25 bp, Homo sapien
ctggaccgctctggccgctgagcag

SEQ ID NO: 2598149 - DNA, 25 bp, Homo sapien
gggctgctgctggtcttcacgccgc

SEQ ID NO: 2598150 - DNA, 25 bp, Homo sapien
gctgctgggactgctcttcgtgctc

SEQ ID NO: 2598151 - DNA, 25 bp, Homo sapien
gctctgcgcaggtactgcctcacca

SEQ ID NO: 2598152 - DNA, 25 bp, Homo sapien
tgctctgcgcaggtactgcctcacc

SEQ ID NO: 2598153 - DNA, 25 bp, Homo sapien
ctgctctgcgcaggtactgcctcac

SEQ ID NO: 2598154 - DNA, 25 bp, Homo sapien
tgcccctttatgtggacccgagaac

SEQ ID NO: 2598155 - DNA, 25 bp, Homo sapien
tcagcccgagctcctgaaacggaat

SEQ ID NO: 2598156 - DNA, 25 bp, Homo sapien
caggacccagacttcagcaaatgtg

SEQ ID NO: 2598157 - DNA, 25 bp, Homo sapien
cactgcaaggacagggatgccactg

SEQ ID NO: 2598158 - DNA, 25 bp, Homo sapien
ggcgcggggatgacatcgcccacca

SEQ ID NO: 2598159 - DNA, 25 bp, Homo sapien
ggggcgcggggatgacatcgcccac

SEQ ID NO: 2598160 - DNA, 25 bp, Homo sapien
cgcggggatgacatcgcccaccact

SEQ ID NO: 2598161 - DNA, 25 bp, Homo sapien
gcggggatgacatcgcccaccactg

SEQ ID NO: 2598162 - DNA, 25 bp, Homo sapien
gaacccctctgacacttggaaactg

SEQ ID NO: 2598163 - DNA, 25 bp, Homo sapien
ggtttgatgccagtcaggtgccaca

SEQ ID NO: 2598164 - DNA, 25 bp, Homo sapien
gagaggctctctagtctgaaggcac

SEQ ID NO: 2598165 - DNA, 25 bp, Homo sapien
gaataagagcacgattagagtcctg

SEQ ID NO: 2598166 - DNA, 25 bp, Homo sapien
ttcttccggaatataaacctccaga

SEQ ID NO: 2598167 - DNA, 25 bp, Homo sapien
gcagtggagggcaggttcttccgga

SEQ ID NO: 2598168 - DNA, 25 bp, Homo sapien
cttccggaatataaacctccagaag

SEQ ID NO: 2598169 - DNA, 25 bp, Homo sapien
ctgacagagggcagtggagggcagg

SEQ ID NO: 2598170 - DNA, 25 bp, Homo sapien
tggcgtatgaggagtccccgaggcc

SEQ ID NO: 2598171 - DNA, 25 bp, Homo sapien
ggcgtatgaggagtccccgaggccc

SEQ ID NO: 2598172 - DNA, 25 bp, Homo sapien
ttggcgtatgaggagtccccgaggc

SEQ ID NO: 2598173 - DNA, 25 bp, Homo sapien
tggcaggagcatacggggtcctcct

SEQ ID NO: 2598174 - DNA, 25 bp, Homo sapien
gtgcagaggagcactgtgaaaatgc

SEQ ID NO: 2598175 - DNA, 25 bp, Homo sapien
agaggagcactgtgaaaatgcccag

SEQ ID NO: 2598176 - DNA, 25 bp, Homo sapien
gccactccttgcttagggtgcagag

SEQ ID NO: 2598177 - DNA, 25 bp, Homo sapien
ccgttgtggggtctaaagatgccat

SEQ ID NO: 2598178 - DNA, 25 bp, Homo sapien
caccgttgtggggtctaaagatgcc

SEQ ID NO: 2598179 - DNA, 25 bp, Homo sapien
ctgggccctacgtggacagtcgggg

SEQ ID NO: 2598180 - DNA, 25 bp, Homo sapien
ttcaccgttgtggggtctaaagatg

SEQ ID NO: 2598181 - DNA, 25 bp, Homo sapien
ttttgatgctcggtgctcagcggac

SEQ ID NO: 2598182 - DNA, 25 bp, Homo sapien
acctggctatgcaaacggcttttga

SEQ ID NO: 2598183 - DNA, 25 bp, Homo sapien
ggcttttgatgctcggtgctcagcg

SEQ ID NO: 2598184 - DNA, 25 bp, Homo sapien
tctgaaatgactgacacctggctat

SEQ ID NO: 2598185 - DNA, 25 bp, Homo sapien
tctgctcgcagagaatgagcctgtg

SEQ ID NO: 2598186 - DNA, 25 bp, Homo sapien
tcgtcccactgatgggccctcatcc

SEQ ID NO: 2598187 - DNA, 25 bp, Homo sapien
gggctgccgagaccagggcagctgc

SEQ ID NO: 2598188 - DNA, 25 bp, Homo sapien
aggcggcctcgtcccactgatgggc

SEQ ID NO: 2598189 - DNA, 25 bp, Homo sapien
caagctgcagtagccgtcggtgcag

SEQ ID NO: 2598190 - DNA, 25 bp, Homo sapien
aagctgcagtagccgtcggtgcagc

SEQ ID NO: 2598191 - DNA, 25 bp, Homo sapien
ccaagctgcagtagccgtcggtgca

SEQ ID NO: 2598192 - DNA, 25 bp, Homo sapien
gaggataaaatgacccagaacgttg

SEQ ID NO: 2598193 - DNA, 25 bp, Homo sapien
gataaaatgacccagaacgttgtgt

SEQ ID NO: 2598194 - DNA, 25 bp, Homo sapien
caagggaggataaaatgacccagaa

SEQ ID NO: 2598195 - DNA, 25 bp, Homo sapien
tggcacaagggaggataaaatgacc

SEQ ID NO: 2598196 - DNA, 25 bp, Homo sapien
cctgaacatgtaattgaaatggaca

SEQ ID NO: 2598197 - DNA, 25 bp, Homo sapien
caaagttccgggattgcaagcaaga

SEQ ID NO: 2598198 - DNA, 25 bp, Homo sapien
tggcctcaatagatattcccaactg

SEQ ID NO: 2598199 - DNA, 25 bp, Homo sapien
caagcctgcactgggagtttttgaa

SEQ ID NO: 2598200 - DNA, 25 bp, Homo sapien
tatgtcagggcgatgtcacttctgc

SEQ ID NO: 2598201 - DNA, 25 bp, Homo sapien
tcctggtctacatgtcgaaaaatcc

SEQ ID NO: 2598202 - DNA, 25 bp, Homo sapien
ggatgtggtatcttccctgagcaga

SEQ ID NO: 2598203 - DNA, 25 bp, Homo sapien
tgcatgtggctctcgattaagtgaa

SEQ ID NO: 2598204 - DNA, 25 bp, Homo sapien
aaaaagcccctcaagcacaagactg

SEQ ID NO: 2598205 - DNA, 25 bp, Homo sapien
tgcgtgcaactacacaaggcatctg

SEQ ID NO: 2598206 - DNA, 25 bp, Homo sapien
ggaggagtatctgctgtctgaaaaa

SEQ ID NO: 2598207 - DNA, 25 bp, Homo sapien
ccatcaagcccgtaggagaggagaa

SEQ ID NO: 2598208 - DNA, 25 bp, Homo sapien
ggagcttggtcataactaggatcac

SEQ ID NO: 2598209 - DNA, 25 bp, Homo sapien
gatattagaagcaacagctcctact

SEQ ID NO: 2598210 - DNA, 25 bp, Homo sapien
gaattactcgtattccactcagggt

SEQ ID NO: 2598211 - DNA, 25 bp, Homo sapien
gaagacacacgatgcaccccttgtg

SEQ ID NO: 2598212 - DNA, 25 bp, Homo sapien
aagtgtaactgaaatggatatgcat

SEQ ID NO: 2598213 - DNA, 25 bp, Homo sapien
ctcacattattcgtgaactgtggag

SEQ ID NO: 2598214 - DNA, 25 bp, Homo sapien
gcagctggcaggacactcacattat

SEQ ID NO: 2598215 - DNA, 25 bp, Homo sapien
catccagcctgcattgagagtttct

SEQ ID NO: 2598216 - DNA, 25 bp, Homo sapien
cactcaatggaatttaccagtgcta

SEQ ID NO: 2598217 - DNA, 25 bp, Homo sapien
gatcttttgtctcttgaaccactca

SEQ ID NO: 2598218 - DNA, 25 bp, Homo sapien
gctaccatggttacagtcatatttg

SEQ ID NO: 2598219 - DNA, 25 bp, Homo sapien
cagcataaaagatagtagggtcaga

SEQ ID NO: 2598220 - DNA, 25 bp, Homo sapien
catctgatataagtagactttaagt

SEQ ID NO: 2598221 - DNA, 25 bp, Homo sapien
gtagactttaagtcccatggaaaca

SEQ ID NO: 2598222 - DNA, 25 bp, Homo sapien
taagtagactttaagtcccatggaa

SEQ ID NO: 2598223 - DNA, 25 bp, Homo sapien
tgatataagtagactttaagtccca

SEQ ID NO: 2598224 - DNA, 25 bp, Homo sapien
gcatgttattgtcaatgttcttcag

SEQ ID NO: 2598225 - DNA, 25 bp, Homo sapien
cctcacatgccgcaaaactgaaaga

SEQ ID NO: 2598226 - DNA, 25 bp, Homo sapien
cacacaatgcccctcttgtgaatct

SEQ ID NO: 2598227 - DNA, 25 bp, Homo sapien
aatgtttcatacaccaccagtttgt

SEQ ID NO: 2598228 - DNA, 25 bp, Homo sapien
tcagttgcttgggaagttttataac

SEQ ID NO: 2598229 - DNA, 25 bp, Homo sapien
catttgtctttagcgacttcagttg

SEQ ID NO: 2598230 - DNA, 25 bp, Homo sapien
cccgatatgtagatcgtatagtaaa

SEQ ID NO: 2598231 - DNA, 25 bp, Homo sapien
taaagggagcttgatcataactaag

SEQ ID NO: 2598232 - DNA, 25 bp, Homo sapien
tgagcaatatgtaatcacctaaagc

SEQ ID NO: 2598233 - DNA, 25 bp, Homo sapien
ggtgtgtaaacctcgctaaagtaca

SEQ ID NO: 2598234 - DNA, 25 bp, Homo sapien
gatggtgttaaggtgtagagtcttc

SEQ ID NO: 2598235 - DNA, 25 bp, Homo sapien
gttcccgcaacctttgaagatatag

SEQ ID NO: 2598236 - DNA, 25 bp, Homo sapien
tcctgatggagtactatggtgccag

SEQ ID NO: 2598237 - DNA, 25 bp, Homo sapien
cttaactcagctcaaggtaaagcca

SEQ ID NO: 2598238 - DNA, 25 bp, Homo sapien
cagagggcaaaatgggcttgaaaac

SEQ ID NO: 2598239 - DNA, 25 bp, Homo sapien
caggaggcttcttgaccagttcaaa

SEQ ID NO: 2598240 - DNA, 25 bp, Homo sapien
caatgagaatgtcatctaagaacat

SEQ ID NO: 2598241 - DNA, 25 bp, Homo sapien
gaattgatgtcatcacaacaatgag

SEQ ID NO: 2598242 - DNA, 25 bp, Homo sapien
atgtatacctgaatttggcaagaat

SEQ ID NO: 2598243 - DNA, 25 bp, Homo sapien
caacaatgagaatgtcatctaagaa

SEQ ID NO: 2598244 - DNA, 25 bp, Homo sapien
tttcctccttatgaaaagtccatta

SEQ ID NO: 2598245 - DNA, 25 bp, Homo sapien
ctaatgataatcttattataagaca

SEQ ID NO: 2598246 - DNA, 25 bp, Homo sapien
agtccattatccaaacaatttactg

SEQ ID NO: 2598247 - DNA, 25 bp, Homo sapien
caaacaatttactgcaaaaaacaca

SEQ ID NO: 2598248 - DNA, 25 bp, Homo sapien
cttccagaactccaaaagtatgtta

SEQ ID NO: 2598249 - DNA, 25 bp, Homo sapien
tcaatagtccttttagttacgcaca

SEQ ID NO: 2598250 - DNA, 25 bp, Homo sapien
gtttatgaaatgtctgctactcctt

SEQ ID NO: 2598251 - DNA, 25 bp, Homo sapien
gctactcctttgaaacgcactgaaa

SEQ ID NO: 2598252 - DNA, 25 bp, Homo sapien
tagtcaaagtagcactacacatcca

SEQ ID NO: 2598253 - DNA, 25 bp, Homo sapien
cctgaatggaagagttcattttgtc

SEQ ID NO: 2598254 - DNA, 25 bp, Homo sapien
gagagaaccctacctgataaatgtg

SEQ ID NO: 2598255 - DNA, 25 bp, Homo sapien
gataaatgtgatagatgtgacctca

SEQ ID NO: 2598256 - DNA, 25 bp, Homo sapien
ggcccactcaatgcagtttaccagt

SEQ ID NO: 2598257 - DNA, 25 bp, Homo sapien
tgattctgactatagccaagctggt

SEQ ID NO: 2598258 - DNA, 25 bp, Homo sapien
tccgatattctacttcactgacagc

SEQ ID NO: 2598259 - DNA, 25 bp, Homo sapien
gaaatcagctgatgagaccttccaa

SEQ ID NO: 2598260 - DNA, 25 bp, Homo sapien
gaagtcgagtatgtaaacatgcaaa

SEQ ID NO: 2598261 - DNA, 25 bp, Homo sapien
tgaatagaaattgttagaaataaca

SEQ ID NO: 2598262 - DNA, 25 bp, Homo sapien
gactaaagaagcgaagtcgagtatg

SEQ ID NO: 2598263 - DNA, 25 bp, Homo sapien
aagaagcgaagtcgagtatgtaaac

SEQ ID NO: 2598264 - DNA, 25 bp, Homo sapien
aataatttgatagtagacccatcag

SEQ ID NO: 2598265 - DNA, 25 bp, Homo sapien
gagctccaacactcttctgtgcgga

SEQ ID NO: 2598266 - DNA, 25 bp, Homo sapien
ccagttttggccagtaataatttga

SEQ ID NO: 2598267 - DNA, 25 bp, Homo sapien
aattgcaccattttagtgacatctt

SEQ ID NO: 2598268 - DNA, 25 bp, Homo sapien
tttgctttaacttgtttaccagcag

SEQ ID NO: 2598269 - DNA, 25 bp, Homo sapien
cagccacatctggtcttgatgaaga

SEQ ID NO: 2598270 - DNA, 25 bp, Homo sapien
gaagaaggttgcacatctaaccaga

SEQ ID NO: 2598271 - DNA, 25 bp, Homo sapien
catctaaccagaagactggaacttt

SEQ ID NO: 2598272 - DNA, 25 bp, Homo sapien
ctggatgacctggtctgacacccat

SEQ ID NO: 2598273 - DNA, 25 bp, Homo sapien
cctggatgacctggtctgacaccca

SEQ ID NO: 2598274 - DNA, 25 bp, Homo sapien
gtttgcatactagcaaatgagaatt

SEQ ID NO: 2598275 - DNA, 25 bp, Homo sapien
acttcccaagcaactgaagtcgcta

SEQ ID NO: 2598276 - DNA, 25 bp, Homo sapien
gtccttgtttgcatactagcaaatg

SEQ ID NO: 2598277 - DNA, 25 bp, Homo sapien
agcaactgaagtcgctaaagacaaa

SEQ ID NO: 2598278 - DNA, 25 bp, Homo sapien
gaatgttacccacagtaagttggaa

SEQ ID NO: 2598279 - DNA, 25 bp, Homo sapien
gcgaagatcttgatttccatcctca

SEQ ID NO: 2598280 - DNA, 25 bp, Homo sapien
tccatcctcaggagaatctgtattc

SEQ ID NO: 2598281 - DNA, 25 bp, Homo sapien
taagttggaatctcaatgttgctaa

SEQ ID NO: 2598282 - DNA, 25 bp, Homo sapien
gttgtattcctcagcctcaggattt

SEQ ID NO: 2598283 - DNA, 25 bp, Homo sapien
ttgtattcctcagcctcaggatttt

SEQ ID NO: 2598284 - DNA, 25 bp, Homo sapien
agaccagacatcacttgagtaaatc

SEQ ID NO: 2598285 - DNA, 25 bp, Homo sapien
cacttgagtaaatcaagaggtctgc

SEQ ID NO: 2598286 - DNA, 25 bp, Homo sapien
aagaggtctgctgagtcaagattca

SEQ ID NO: 2598287 - DNA, 25 bp, Homo sapien
gaggtctgctgagtcaagattcaca

SEQ ID NO: 2598288 - DNA, 25 bp, Homo sapien
ggtacatatttagagccatgactaa

SEQ ID NO: 2598289 - DNA, 25 bp, Homo sapien
tgaacttcccgtacttctacgtcgc

SEQ ID NO: 2598290 - DNA, 25 bp, Homo sapien
ggtgatcctcaacatccgattgcag

SEQ ID NO: 2598291 - DNA, 25 bp, Homo sapien
gtacttctacgtcgcgggctcggtg

SEQ ID NO: 2598292 - DNA, 25 bp, Homo sapien
gaaggtttgtcactgctatggccaa

SEQ ID NO: 2598293 - DNA, 25 bp, Homo sapien
tgaaatacgtaccttctccaggaag

SEQ ID NO: 2598294 - DNA, 25 bp, Homo sapien
gccaggatcctcagaaaatgatgga

SEQ ID NO: 2598295 - DNA, 25 bp, Homo sapien
cctgtaaatccagggcaggcgactc

SEQ ID NO: 2598296 - DNA, 25 bp, Homo sapien
tacctttgcctcagacgtgggactt

SEQ ID NO: 2598297 - DNA, 25 bp, Homo sapien
caatgtcttgtatcagtggagggtc

SEQ ID NO: 2598298 - DNA, 25 bp, Homo sapien
gagtccacacatgcactatagagaa

SEQ ID NO: 2598299 - DNA, 25 bp, Homo sapien
gtagcaacagatggctttcacccag

SEQ ID NO: 2598300 - DNA, 25 bp, Homo sapien
taatcttccacagcattatcagtga

SEQ ID NO: 2598301 - DNA, 25 bp, Homo sapien
cttgctcttcccaagaatcagaatc

SEQ ID NO: 2598302 - DNA, 25 bp, Homo sapien
tcagtgaggtctgactcagcttgct

SEQ ID NO: 2598303 - DNA, 25 bp, Homo sapien
tccacagcattatcagtgaggtctg

SEQ ID NO: 2598304 - DNA, 25 bp, Homo sapien
aagtgaatcaaatctgctataaaag

SEQ ID NO: 2598305 - DNA, 25 bp, Homo sapien
gccctgcggcaaccctcgctacaga

SEQ ID NO: 2598306 - DNA, 25 bp, Homo sapien
gtcgctaggaggtccgcgggccctg

SEQ ID NO: 2598307 - DNA, 25 bp, Homo sapien
ggtcccagccgtcgctaggaggtcc

SEQ ID NO: 2598308 - DNA, 25 bp, Homo sapien
tgccggtcccagccgtcgctaggag

SEQ ID NO: 2598309 - DNA, 25 bp, Homo sapien
tgaacttcccgtacttctacgtcgc

SEQ ID NO: 2598310 - DNA, 25 bp, Homo sapien
ggtgatcctcaacatccgattgcag

SEQ ID NO: 2598311 - DNA, 25 bp, Homo sapien
gtacttctacgtcgcgggctcggtg

SEQ ID NO: 2598312 - DNA, 25 bp, Homo sapien
ggtacatatttagagccatgactaa

SEQ ID NO: 2598313 - DNA, 25 bp, Homo sapien
cgggagactgagataggagagttgt

SEQ ID NO: 2598314 - DNA, 25 bp, Homo sapien
gagataggagagttgtttgaaccca

SEQ ID NO: 2598315 - DNA, 25 bp, Homo sapien
gagactgagataggagagttgtttg

SEQ ID NO: 2598316 - DNA, 25 bp, Homo sapien
actgagataggagagttgtttgaac

SEQ ID NO: 2598317 - DNA, 25 bp, Homo sapien
tgtgctggagtctctagagcccaag

SEQ ID NO: 2598318 - DNA, 25 bp, Homo sapien
caagtgattagtcatgtgccaaagc

SEQ ID NO: 2598319 - DNA, 25 bp, Homo sapien
tccaattgtggagatagccaagcag

SEQ ID NO: 2598320 - DNA, 25 bp, Homo sapien
gaacacattccccagcatgctgatg

SEQ ID NO: 2598321 - DNA, 25 bp, Homo sapien
gaccgatattgttactctttttgca

SEQ ID NO: 2598322 - DNA, 25 bp, Homo sapien
gatgggtaacaagagagtttctcct

SEQ ID NO: 2598323 - DNA, 25 bp, Homo sapien
tccttcactattatgcaaacacaga

SEQ ID NO: 2598324 - DNA, 25 bp, Homo sapien
ggtgatgggtaacaagagagtttct

SEQ ID NO: 2598325 - DNA, 25 bp, Homo sapien
cctttcagtgatataaaactaaaat

SEQ ID NO: 2598326 - DNA, 25 bp, Homo sapien
gcgtactgtgatggcttacctgatt

SEQ ID NO: 2598327 - DNA, 25 bp, Homo sapien
aactaaaatagcgtactgtgatggc

SEQ ID NO: 2598328 - DNA, 25 bp, Homo sapien
tataaaactaaaatagcgtactgtg

SEQ ID NO: 2598329 - DNA, 25 bp, Homo sapien
cctaaagagtccatgagagtgaata

SEQ ID NO: 2598330 - DNA, 25 bp, Homo sapien
ccctgcccgtgctgcaaatacttgg

SEQ ID NO: 2598331 - DNA, 25 bp, Homo sapien
cctcttcctctcaaaaggcctgaaa

SEQ ID NO: 2598332 - DNA, 25 bp, Homo sapien
aaggcctgaaaatcagttactggtc

SEQ ID NO: 2598333 - DNA, 25 bp, Homo sapien
attcctcgccccagccggtagtctc

SEQ ID NO: 2598334 - DNA, 25 bp, Homo sapien
tcagtcacttcggtaaactgccctt

SEQ ID NO: 2598335 - DNA, 25 bp, Homo sapien
aactgcccttgctttccggaggcgg

SEQ ID NO: 2598336 - DNA, 25 bp, Homo sapien
tccaaggctctaggcgcctgcattc

SEQ ID NO: 2598337 - DNA, 25 bp, Homo sapien
ttaaagcccttcctcgcggatgaga

SEQ ID NO: 2598338 - DNA, 25 bp, Homo sapien
cggatgagacccttggtgcgttcca

SEQ ID NO: 2598339 - DNA, 25 bp, Homo sapien
caagtccccaagagctctcagaggt

SEQ ID NO: 2598340 - DNA, 25 bp, Homo sapien
cagaggttcctgaccctgagcgtta

SEQ ID NO: 2598341 - DNA, 25 bp, Homo sapien
tgggagatttgatgggctgaaatcc

SEQ ID NO: 2598342 - DNA, 25 bp, Homo sapien
tgttgggtacaccttccagaagaac

SEQ ID NO: 2598343 - DNA, 25 bp, Homo sapien
gggagaacctaaagtttgctggagc

SEQ ID NO: 2598344 - DNA, 25 bp, Homo sapien
ttgggctgagtagcatgttgggtac

SEQ ID NO: 2598345 - DNA, 25 bp, Homo sapien
ggtgtgaatcccacggggttcagcc

SEQ ID NO: 2598346 - DNA, 25 bp, Homo sapien
tgaggtgtgaatcccacggggttca

SEQ ID NO: 2598347 - DNA, 25 bp, Homo sapien
ctcctatacttccagagacctctta

SEQ ID NO: 2598348 - DNA, 25 bp, Homo sapien
ttccagagacctcttaggccctttc

SEQ ID NO: 2598349 - DNA, 25 bp, Homo sapien
cctctcggcgccagcacgcggcccc

SEQ ID NO: 2598350 - DNA, 25 bp, Homo sapien
ccctccctctcggcgccagcacgcg

SEQ ID NO: 2598351 - DNA, 25 bp, Homo sapien
ctccctctcggcgccagcacgcggc

SEQ ID NO: 2598352 - DNA, 25 bp, Homo sapien
ctccccctccctctcggcgccagca

SEQ ID NO: 2598353 - DNA, 25 bp, Homo sapien
tctagcaactggctcttgcaagctg

SEQ ID NO: 2598354 - DNA, 25 bp, Homo sapien
cagcataggaaaacaacagaacatg

SEQ ID NO: 2598355 - DNA, 25 bp, Homo sapien
atgttatcacaacaaacagcatagg

SEQ ID NO: 2598356 - DNA, 25 bp, Homo sapien
aaacaataggaaaatctagcaactg

SEQ ID NO: 2598357 - DNA, 25 bp, Homo sapien
cctgaacgtgtaattgaactggata

SEQ ID NO: 2598358 - DNA, 25 bp, Homo sapien
aactggatacgtatggcagctggca

SEQ ID NO: 2598359 - DNA, 25 bp, Homo sapien
cacatccagcctgcagggggaggtt

SEQ ID NO: 2598360 - DNA, 25 bp, Homo sapien
tggcaggactttcacattcttcgtg

SEQ ID NO: 2598361 - DNA, 25 bp, Homo sapien
tgttagaggcatacatagtgggcat

SEQ ID NO: 2598362 - DNA, 25 bp, Homo sapien
cacgtctctgacaagcctgtgggag

SEQ ID NO: 2598363 - DNA, 25 bp, Homo sapien
tataggctactggtctcaaatggag

SEQ ID NO: 2598364 - DNA, 25 bp, Homo sapien
tatggccactgagccaaatgatcca

SEQ ID NO: 2598365 - DNA, 25 bp, Homo sapien
tttcaggacaggtctagtggctcac

SEQ ID NO: 2598366 - DNA, 25 bp, Homo sapien
tatgtatttaacctccatcgtagta

SEQ ID NO: 2598367 - DNA, 25 bp, Homo sapien
tcttagctatggtgactaaatctgg

SEQ ID NO: 2598368 - DNA, 25 bp, Homo sapien
gaaaaaaggtgtctagccgtcataa

SEQ ID NO: 2598369 - DNA, 25 bp, Homo sapien
gacactcccaatatatgtcttcttg

SEQ ID NO: 2598370 - DNA, 25 bp, Homo sapien
gaatttgccagtaatccagacactc

SEQ ID NO: 2598371 - DNA, 25 bp, Homo sapien
taacatcgatgttaccacaccttgg

SEQ ID NO: 2598372 - DNA, 25 bp, Homo sapien
tcccaattgttatgatgatcactca

SEQ ID NO: 2598373 - DNA, 25 bp, Homo sapien
tgcccactcatcattggcactgaga

SEQ ID NO: 2598374 - DNA, 25 bp, Homo sapien
taaatgtgcccactcatcattggca

SEQ ID NO: 2598375 - DNA, 25 bp, Homo sapien
ccactcatcattggcactgagagca

SEQ ID NO: 2598376 - DNA, 25 bp, Homo sapien
aaatgtagtaaatgtgcccactcat

SEQ ID NO: 2598377 - DNA, 25 bp, Homo sapien
gagataggagagttgtttgaaccca

SEQ ID NO: 2598378 - DNA, 25 bp, Homo sapien
gagactgagataggagagttgtttg

SEQ ID NO: 2598379 - DNA, 25 bp, Homo sapien
actgagataggagagttgtttgaac

SEQ ID NO: 2598380 - DNA, 25 bp, Homo sapien
cgggagactgagataggagagttgt

SEQ ID NO: 2598381 - DNA, 25 bp, Homo sapien
tccttcactattatgcaaacacaga

SEQ ID NO: 2598382 - DNA, 25 bp, Homo sapien
gatgggtaacaagagagtttctcct

SEQ ID NO: 2598383 - DNA, 25 bp, Homo sapien
gaccgatattgttactctttttgca

SEQ ID NO: 2598384 - DNA, 25 bp, Homo sapien
ggtgatgggtaacaagagagtttct

SEQ ID NO: 2598385 - DNA, 25 bp, Homo sapien
caaacggattacttcagtcagaaag

SEQ ID NO: 2598386 - DNA, 25 bp, Homo sapien
cacttgaagctataaaacgtacggg

SEQ ID NO: 2598387 - DNA, 25 bp, Homo sapien
ccagatctgtcctagaaaaatttca

SEQ ID NO: 2598388 - DNA, 25 bp, Homo sapien
taatcaatttccctaagctcaagga

SEQ ID NO: 2598389 - DNA, 25 bp, Homo sapien
atgaacagatgcagtcttattcccc

SEQ ID NO: 2598390 - DNA, 25 bp, Homo sapien
ctcatatgaacagatgcagtcttat

SEQ ID NO: 2598391 - DNA, 25 bp, Homo sapien
ccttctcttcaaaacaggccttcat

SEQ ID NO: 2598392 - DNA, 25 bp, Homo sapien
acagatgcagtcttattccccttct

SEQ ID NO: 2598393 - DNA, 25 bp, Homo sapien
tccactttcctatgaacttacacaa

SEQ ID NO: 2598394 - DNA, 25 bp, Homo sapien
gaataatacaaaaccgacacatttc

SEQ ID NO: 2598395 - DNA, 25 bp, Homo sapien
ttattctcagcatcaggcctagaca

SEQ ID NO: 2598396 - DNA, 25 bp, Homo sapien
ggcctagacaaataccctcacataa

SEQ ID NO: 2598397 - DNA, 25 bp, Homo sapien
gagctcagagctctgtacatctgct

SEQ ID NO: 2598398 - DNA, 25 bp, Homo sapien
agctcagagctctgtacatctgctt

SEQ ID NO: 2598399 - DNA, 25 bp, Homo sapien
cctcaccccaagaatgagagactgg

SEQ ID NO: 2598400 - DNA, 25 bp, Homo sapien
taacagcggttgataatagatggaa

SEQ ID NO: 2598401 - DNA, 25 bp, Homo sapien
gactgggaccaggatatttgcattt

SEQ ID NO: 2598402 - DNA, 25 bp, Homo sapien
gatatgtccaaatgttaacagcggt

SEQ ID NO: 2598403 - DNA, 25 bp, Homo sapien
tgtgacagtcgctcagacagtactt

SEQ ID NO: 2598404 - DNA, 25 bp, Homo sapien
taccaagaatgcataccatcaacat

SEQ ID NO: 2598405 - DNA, 25 bp, Homo sapien
gagttttcaggagtaatggtcatgt

SEQ ID NO: 2598406 - DNA, 25 bp, Homo sapien
gtcacatggctgaggtgtctttgtc

SEQ ID NO: 2598407 - DNA, 25 bp, Homo sapien
tgcaaccactgtcataccacaggaa

SEQ ID NO: 2598408 - DNA, 25 bp, Homo sapien
tataaacatgactgagacaaggttc

SEQ ID NO: 2598409 - DNA, 25 bp, Homo sapien
gacataatgtatatgctgagcacgc

SEQ ID NO: 2598410 - DNA, 25 bp, Homo sapien
gccagcttctgggatatgcaaccac

SEQ ID NO: 2598411 - DNA, 25 bp, Homo sapien
gtttgctacgacattatccaagaca

SEQ ID NO: 2598412 - DNA, 25 bp, Homo sapien
ttatccaagacaaacatgattgtag

SEQ ID NO: 2598413 - DNA, 25 bp, Homo sapien
gaaaagaacatggaagtttgctacg

SEQ ID NO: 2598414 - DNA, 25 bp, Homo sapien
catggaagtttgctacgacattatc

SEQ ID NO: 2598415 - DNA, 25 bp, Homo sapien
tcaaataagcgcaatactttggcca

SEQ ID NO: 2598416 - DNA, 25 bp, Homo sapien
tttgagtgagaagatcagtgatatg

SEQ ID NO: 2598417 - DNA, 25 bp, Homo sapien
gcagttgtcttcaatatagcttgtt

SEQ ID NO: 2598418 - DNA, 25 bp, Homo sapien
gatatggcaccattttgattgcagt

SEQ ID NO: 2598419 - DNA, 25 bp, Homo sapien
agtgcctggcaatgctatttattat

SEQ ID NO: 2598420 - DNA, 25 bp, Homo sapien
ggattacaggttcctacgaccacat

SEQ ID NO: 2598421 - DNA, 25 bp, Homo sapien
tattattctaccatgagagttgagg

SEQ ID NO: 2598422 - DNA, 25 bp, Homo sapien
tgcccggcctgattgttagaacaca

SEQ ID NO: 2598423 - DNA, 25 bp, Homo sapien
tcttggttaatgtggagtttgtcag

SEQ ID NO: 2598424 - DNA, 25 bp, Homo sapien
tcagtgaatcagtatcagaaggtag

SEQ ID NO: 2598425 - DNA, 25 bp, Homo sapien
ttgatctcttggttaatgtggagtt

SEQ ID NO: 2598426 - DNA, 25 bp, Homo sapien
tactggtttgtctcaatattggtga

SEQ ID NO: 2598427 - DNA, 25 bp, Homo sapien
ctcataagtcttgggagggaactga

SEQ ID NO: 2598428 - DNA, 25 bp, Homo sapien
aaatcagctatttttccagggatcc

SEQ ID NO: 2598429 - DNA, 25 bp, Homo sapien
tatttcgaaaacagtatctgggagg

SEQ ID NO: 2598430 - DNA, 25 bp, Homo sapien
tgcttttactgccataggcctgaaa

SEQ ID NO: 2598431 - DNA, 25 bp, Homo sapien
ttctggagctatgacaaaggcagtg

SEQ ID NO: 2598432 - DNA, 25 bp, Homo sapien
gacaaaggcagtgtaaagtatctct

SEQ ID NO: 2598433 - DNA, 25 bp, Homo sapien
tcaagtggggcgttctttctggagc

SEQ ID NO: 2598434 - DNA, 25 bp, Homo sapien
taaagtatctctacgactgtaacca

SEQ ID NO: 2598435 - DNA, 25 bp, Homo sapien
ggagttgtctattcactttaccatt

SEQ ID NO: 2598436 - DNA, 25 bp, Homo sapien
gaccagatgctcattaacctggagt

SEQ ID NO: 2598437 - DNA, 25 bp, Homo sapien
catttctcctatctaatgttccttg

SEQ ID NO: 2598438 - DNA, 25 bp, Homo sapien
tctcctatctaatgttccttgtttg

SEQ ID NO: 2598439 - DNA, 25 bp, Homo sapien
tgtgctgcctcacaaaaccagtctg

SEQ ID NO: 2598440 - DNA, 25 bp, Homo sapien
tccgagatcatggagttaggaccag

SEQ ID NO: 2598441 - DNA, 25 bp, Homo sapien
gaccagaagttacgcaagttaggac

SEQ ID NO: 2598442 - DNA, 25 bp, Homo sapien
cagtctgggagatctataggcacaa

SEQ ID NO: 2598443 - DNA, 25 bp, Homo sapien
gtttactctgggtcatattattaca

SEQ ID NO: 2598444 - DNA, 25 bp, Homo sapien
atagattagaagtaagaatttttgg

SEQ ID NO: 2598445 - DNA, 25 bp, Homo sapien
tacattggtatgcaactgtgtttaa

SEQ ID NO: 2598446 - DNA, 25 bp, Homo sapien
taatgtctcagcaataaccaagcat

SEQ ID NO: 2598447 - DNA, 25 bp, Homo sapien
ttttatcaggaaatcattgttgttt

SEQ ID NO: 2598448 - DNA, 25 bp, Homo sapien
agcttttatcaggaaatcattgttg

SEQ ID NO: 2598449 - DNA, 25 bp, Homo sapien
ttatcaggaaatcattgttgttttc

SEQ ID NO: 2598450 - DNA, 25 bp, Homo sapien
gcttttatcaggaaatcattgttgt

SEQ ID NO: 2598451 - DNA, 25 bp, Homo sapien
atttgtaccacatatatgtacttaa

SEQ ID NO: 2598452 - DNA, 25 bp, Homo sapien
tgtaccacatatatgtacttaacta

SEQ ID NO: 2598453 - DNA, 25 bp, Homo sapien
ccacatatatgtacttaactatcat

SEQ ID NO: 2598454 - DNA, 25 bp, Homo sapien
taccacatatatgtacttaactatc

SEQ ID NO: 2598455 - DNA, 25 bp, Homo sapien
atagcgtgagctgcgtgtaaaagta

SEQ ID NO: 2598456 - DNA, 25 bp, Homo sapien
ttgtgactctatccgaatagcgtga

SEQ ID NO: 2598457 - DNA, 25 bp, Homo sapien
tctatccgaatagcgtgagctgcgt

SEQ ID NO: 2598458 - DNA, 25 bp, Homo sapien
taagcttgtgactctatccgaatag

SEQ ID NO: 2598459 - DNA, 25 bp, Homo sapien
ggtagccagcacgtcttccagagtt

SEQ ID NO: 2598460 - DNA, 25 bp, Homo sapien
tcttgtcagttagcaaggacgtgat

SEQ ID NO: 2598461 - DNA, 25 bp, Homo sapien
gattcagtttgcgtgtctccagcca

SEQ ID NO: 2598462 - DNA, 25 bp, Homo sapien
gacgtgattagaatcctactcggcc

SEQ ID NO: 2598463 - DNA, 25 bp, Homo sapien
aaactcgaggcaaagttagtcgttg

SEQ ID NO: 2598464 - DNA, 25 bp, Homo sapien
tgcgaaggcaaactcgaaaaattca

SEQ ID NO: 2598465 - DNA, 25 bp, Homo sapien
cgttgtttgccacaatgcgaaggca

SEQ ID NO: 2598466 - DNA, 25 bp, Homo sapien
tctgaatgggaaatatccagtctcg

SEQ ID NO: 2598467 - DNA, 25 bp, Homo sapien
aaagccgcctttgatgctctggcta

SEQ ID NO: 2598468 - DNA, 25 bp, Homo sapien
gatgggggaaagccgccaacccaca

SEQ ID NO: 2598469 - DNA, 25 bp, Homo sapien
tgatgctctggctaccagggctatt

SEQ ID NO: 2598470 - DNA, 25 bp, Homo sapien
gctctggctaccagggctattttgg

SEQ ID NO: 2598471 - DNA, 25 bp, Homo sapien
tctgcaaagtgcgttggagaggact

SEQ ID NO: 2598472 - DNA, 25 bp, Homo sapien
agtggatgtaggggacaaaagctcc

SEQ ID NO: 2598473 - DNA, 25 bp, Homo sapien
tggatgtaggggacaaaagctccgc

SEQ ID NO: 2598474 - DNA, 25 bp, Homo sapien
aagtggatgtaggggacaaaagctc

SEQ ID NO: 2598475 - DNA, 25 bp, Homo sapien
gatgtaggggacaaaagctccgcac

SEQ ID NO: 2598476 - DNA, 25 bp, Homo sapien
aagcttgcactaccgggctcagcgc

SEQ ID NO: 2598477 - DNA, 25 bp, Homo sapien
ggaagcttgcactaccgggctcagc

SEQ ID NO: 2598478 - DNA, 25 bp, Homo sapien
cgggaagcttgcactaccgggctca

SEQ ID NO: 2598479 - DNA, 25 bp, Homo sapien
tagagagagcctccccctcgccgct

SEQ ID NO: 2598480 - DNA, 25 bp, Homo sapien
gatgcctgggagaggtcatacaaga

SEQ ID NO: 2598481 - DNA, 25 bp, Homo sapien
cagatgaatgaccacccagaccagg

SEQ ID NO: 2598482 - DNA, 25 bp, Homo sapien
catacaagatagtactgcaggtggg

SEQ ID NO: 2598483 - DNA, 25 bp, Homo sapien
tgggcagatgaatgaccacccagac

SEQ ID NO: 2598484 - DNA, 25 bp, Homo sapien
gttcccatagactgatttagttgac

SEQ ID NO: 2598485 - DNA, 25 bp, Homo sapien
atgccacactggtgaaattcagcag

SEQ ID NO: 2598486 - DNA, 25 bp, Homo sapien
taagaactactgcttataatatctg

SEQ ID NO: 2598487 - DNA, 25 bp, Homo sapien
ctgggcagtaaccggccatttcagc

SEQ ID NO: 2598488 - DNA, 25 bp, Homo sapien
gcagtaaccggccatttcagcaact

SEQ ID NO: 2598489 - DNA, 25 bp, Homo sapien
agaactactgcttataatatctggg

SEQ ID NO: 2598490 - DNA, 25 bp, Homo sapien
gctgttcttcagcccacccgttcat

SEQ ID NO: 2598491 - DNA, 25 bp, Homo sapien
cttcatgttctgccaagctattgga

SEQ ID NO: 2598492 - DNA, 25 bp, Homo sapien
ccaagctattggattcagctgttct

SEQ ID NO: 2598493 - DNA, 25 bp, Homo sapien
tttgctcttgctttcgccaagtcaa

SEQ ID NO: 2598494 - DNA, 25 bp, Homo sapien
aagagtctgtcaacatccacacaaa

SEQ ID NO: 2598495 - DNA, 25 bp, Homo sapien
tgtcttgggatttacctgcagcagc

SEQ ID NO: 2598496 - DNA, 25 bp, Homo sapien
acacaaatgcacacgaagttgcagg

SEQ ID NO: 2598497 - DNA, 25 bp, Homo sapien
cagctgaagtgtgagaacctgcaag

SEQ ID NO: 2598498 - DNA, 25 bp, Homo sapien
cattatgtccggcaactttgagaaa

SEQ ID NO: 2598499 - DNA, 25 bp, Homo sapien
gaagatccaatctcctattaaagtg

SEQ ID NO: 2598500 - DNA, 25 bp, Homo sapien
gatgccacagtagtctcaaggagct

SEQ ID NO: 2598501 - DNA, 25 bp, Homo sapien
tagagacatttccttgaatcagaca

SEQ ID NO: 2598502 - DNA, 25 bp, Homo sapien
ggcccactcaatgcagtttaccagt

SEQ ID NO: 2598503 - DNA, 25 bp, Homo sapien
tgattctgactatagccaagctggt

SEQ ID NO: 2598504 - DNA, 25 bp, Homo sapien
tccgatattctacttcactgacagc

SEQ ID NO: 2598505 - DNA, 25 bp, Homo sapien
gaaatcagctgatgagaccttccaa

SEQ ID NO: 2598506 - DNA, 25 bp, Homo sapien
gaaggtttgtcactgctatggccaa

SEQ ID NO: 2598507 - DNA, 25 bp, Homo sapien
tgaaatacgtaccttctccaggaag

SEQ ID NO: 2598508 - DNA, 25 bp, Homo sapien
gccaggatcctcagaaaatgatgga

SEQ ID NO: 2598509 - DNA, 25 bp, Homo sapien
cctgtaaatccagggcaggcgactc

SEQ ID NO: 2598510 - DNA, 25 bp, Homo sapien
tagcctacctagtttactctctttg

SEQ ID NO: 2598511 - DNA, 25 bp, Homo sapien
taaattatgactttgtagcctacct

SEQ ID NO: 2598512 - DNA, 25 bp, Homo sapien
tacctgctcaccttgtaacttcagt

SEQ ID NO: 2598513 - DNA, 25 bp, Homo sapien
tttggtctactgctaactaaaagga

SEQ ID NO: 2598514 - DNA, 25 bp, Homo sapien
taatcttccacagcattatcagtga

SEQ ID NO: 2598515 - DNA, 25 bp, Homo sapien
cttgctcttcccaagaatcagaatc

SEQ ID NO: 2598516 - DNA, 25 bp, Homo sapien
tcagtgaggtctgactcagcttgct

SEQ ID NO: 2598517 - DNA, 25 bp, Homo sapien
tccacagcattatcagtgaggtctg

SEQ ID NO: 2598518 - DNA, 25 bp, Homo sapien
aagtgaatcaaatctgctataaaag

SEQ ID NO: 2598519 - DNA, 25 bp, Homo sapien
ttacccaagcaacggagtcaaacag

SEQ ID NO: 2598520 - DNA, 25 bp, Homo sapien
cccaagcaacggagtcaaacagcac

SEQ ID NO: 2598521 - DNA, 25 bp, Homo sapien
agcaacggagtcaaacagcactttc

SEQ ID NO: 2598522 - DNA, 25 bp, Homo sapien
gcttattacccaagcaacggagtca

SEQ ID NO: 2598523 - DNA, 25 bp, Homo sapien
cattaagtgggagccccggtgtgtc

SEQ ID NO: 2598524 - DNA, 25 bp, Homo sapien
gggttacttgcggtttcactgccaa

SEQ ID NO: 2598525 - DNA, 25 bp, Homo sapien
gctctgattctagccgtggtcgcgc

SEQ ID NO: 2598526 - DNA, 25 bp, Homo sapien
acagacgtgggatggccgagctcac

SEQ ID NO: 2598527 - DNA, 25 bp, Homo sapien
taggtaacttcctgggccgtagctc

SEQ ID NO: 2598528 - DNA, 25 bp, Homo sapien
tccaagtgacagaaacgctgctagg

SEQ ID NO: 2598529 - DNA, 25 bp, Homo sapien
ggaattaccgcgagctctccgtgag

SEQ ID NO: 2598530 - DNA, 25 bp, Homo sapien
tgcggaaacagtagtcacgtgactc

SEQ ID NO: 2598531 - DNA, 25 bp, Homo sapien
gggccgaggatagccggcggagtcc

SEQ ID NO: 2598532 - DNA, 25 bp, Homo sapien
ctcttggatccaacaactggtaccg

SEQ ID NO: 2598533 - DNA, 25 bp, Homo sapien
ttggatccaacaactggtaccgggc

SEQ ID NO: 2598534 - DNA, 25 bp, Homo sapien
caacaactggtaccgggccgaggat

SEQ ID NO: 2598535 - DNA, 25 bp, Homo sapien
cgactcgcttagttctgcctcggcg

SEQ ID NO: 2598536 - DNA, 25 bp, Homo sapien
ggtctcgtacatgccccgctcttgg

SEQ ID NO: 2598537 - DNA, 25 bp, Homo sapien
aaatctgaaccccacagcgcggtct

SEQ ID NO: 2598538 - DNA, 25 bp, Homo sapien
gacgcggtcgtccttcctaaatctg

SEQ ID NO: 2598539 - DNA, 25 bp, Homo sapien
tagctgggatcacaaaatcgcttga

SEQ ID NO: 2598540 - DNA, 25 bp, Homo sapien
caaaacccatggacgatttttatgt

SEQ ID NO: 2598541 - DNA, 25 bp, Homo sapien
gtttttataatggaaacattgctgt

SEQ ID NO: 2598542 - DNA, 25 bp, Homo sapien
gagatcatgccaccaggcaacagag

SEQ ID NO: 2598543 - DNA, 25 bp, Homo sapien
cactgtgccctgacttttgtttttg

SEQ ID NO: 2598544 - DNA, 25 bp, Homo sapien
cctcccaaatagctgatatttttag

SEQ ID NO: 2598545 - DNA, 25 bp, Homo sapien
tcccaaatagctgatatttttagta

SEQ ID NO: 2598546 - DNA, 25 bp, Homo sapien
gccactgtgccctgacttttgtttt

SEQ ID NO: 2598547 - DNA, 25 bp, Homo sapien
ctgcggggaggcgtcctcctcgggt

SEQ ID NO: 2598548 - DNA, 25 bp, Homo sapien
aggtatttgcccaagtggccggcac

SEQ ID NO: 2598549 - DNA, 25 bp, Homo sapien
gggaggcgtcctcctcgggtggctc

SEQ ID NO: 2598550 - DNA, 25 bp, Homo sapien
tatttgcccaagtggccggcaccgg

SEQ ID NO: 2598551 - DNA, 25 bp, Homo sapien
cactggcatcgtcgcctgctgttct

SEQ ID NO: 2598552 - DNA, 25 bp, Homo sapien
gtggcactggcatcgtcgcctgctg

SEQ ID NO: 2598553 - DNA, 25 bp, Homo sapien
aaacacaccagggatgcttgttcat

SEQ ID NO: 2598554 - DNA, 25 bp, Homo sapien
catcgtcgcctgctgttctggaaac

SEQ ID NO: 2598555 - DNA, 25 bp, Homo sapien
gcttcatgagcccagatagtctctg

SEQ ID NO: 2598556 - DNA, 25 bp, Homo sapien
cttcagccatttgttcccaggtcgt

SEQ ID NO: 2598557 - DNA, 25 bp, Homo sapien
cagatagtctctgcatgggctgagg

SEQ ID NO: 2598558 - DNA, 25 bp, Homo sapien
taagaattagcctttcaggccgggc

SEQ ID NO: 2598559 - DNA, 25 bp, Homo sapien
gcctggcaataaatattttaatttg

SEQ ID NO: 2598560 - DNA, 25 bp, Homo sapien
cctggcaataaatattttaatttgt

SEQ ID NO: 2598561 - DNA, 25 bp, Homo sapien
tcccatcggatcctcttccaatttg

SEQ ID NO: 2598562 - DNA, 25 bp, Homo sapien
tcttccaatttgctgaccactgacc

SEQ ID NO: 2598563 - DNA, 25 bp, Homo sapien
atttacactcccatcggatcctctt

SEQ ID NO: 2598564 - DNA, 25 bp, Homo sapien
caatttgctgaccactgaccaggct

SEQ ID NO: 2598565 - DNA, 25 bp, Homo sapien
tcacagttaaggtgaaaaccttagc

SEQ ID NO: 2598566 - DNA, 25 bp, Homo sapien
tgacaaacacaaggcctcgacagca

SEQ ID NO: 2598567 - DNA, 25 bp, Homo sapien
aaaaaaagcagccacttcactcact

SEQ ID NO: 2598568 - DNA, 25 bp, Homo sapien
aggaggacactgggtgtctgacaaa

SEQ ID NO: 2598569 - DNA, 25 bp, Homo sapien
aaaaagcagccacttcactcacttc

SEQ ID NO: 2598570 - DNA, 25 bp, Homo sapien
gcttggaaacatcccgtccaggcca

SEQ ID NO: 2598571 - DNA, 25 bp, Homo sapien
tgagtctttgactgcatgcacggga

SEQ ID NO: 2598572 - DNA, 25 bp, Homo sapien
tataaggccatctgttcaagtccac

SEQ ID NO: 2598573 - DNA, 25 bp, Homo sapien
tgcacgggaagcacaaacgttcggc

SEQ ID NO: 2598574 - DNA, 25 bp, Homo sapien
cgatgtcgtgcagtttggtttggca

SEQ ID NO: 2598575 - DNA, 25 bp, Homo sapien
ggatgaggtgaggtacgccgtcgat

SEQ ID NO: 2598576 - DNA, 25 bp, Homo sapien
gggcttcaatggaagccttgctgcg

SEQ ID NO: 2598577 - DNA, 25 bp, Homo sapien
tcaatggaagccttgctgcggtccc

SEQ ID NO: 2598578 - DNA, 25 bp, Homo sapien
ggaaatggtagagtttcacaaaata

SEQ ID NO: 2598579 - DNA, 25 bp, Homo sapien
caaagggctctttatggaggcacag

SEQ ID NO: 2598580 - DNA, 25 bp, Homo sapien
taggacccaaagggctctttatgga

SEQ ID NO: 2598581 - DNA, 25 bp, Homo sapien
gctatttttgagagcctgcacaggc

SEQ ID NO: 2598582 - DNA, 25 bp, Homo sapien
aaattagctgggctactctggaggc

SEQ ID NO: 2598583 - DNA, 25 bp, Homo sapien
aaacagaatcaggagttcctggccc

SEQ ID NO: 2598584 - DNA, 25 bp, Homo sapien
cagaaaagccactctaagcaacagt

SEQ ID NO: 2598585 - DNA, 25 bp, Homo sapien
agaattctttgagcctgagaggagg

SEQ ID NO: 2598586 - DNA, 25 bp, Homo sapien
cctcccgtttcttggcgtcggtgat

SEQ ID NO: 2598587 - DNA, 25 bp, Homo sapien
tagtacatgtagcagcccgtggaag

SEQ ID NO: 2598588 - DNA, 25 bp, Homo sapien
tgcttggtggcaatcacacccctgc

SEQ ID NO: 2598589 - DNA, 25 bp, Homo sapien
gatgaggtccccgtggtattccacc

SEQ ID NO: 2598590 - DNA, 25 bp, Homo sapien
ccttcccactttcaatcaattcatc

SEQ ID NO: 2598591 - DNA, 25 bp, Homo sapien
cttcccactttcaatcaattcatct

SEQ ID NO: 2598592 - DNA, 25 bp, Homo sapien
agtgatggcaaagcccccaagtatc

SEQ ID NO: 2598593 - DNA, 25 bp, Homo sapien
gccacaatcggcctcatttggcatc

SEQ ID NO: 2598594 - DNA, 25 bp, Homo sapien
atcggcctcatttggcatcactggg

SEQ ID NO: 2598595 - DNA, 25 bp, Homo sapien
cgggccacaatcggcctcatttggc

SEQ ID NO: 2598596 - DNA, 25 bp, Homo sapien
ggctcgtagatatgttctgttgccc

SEQ ID NO: 2598597 - DNA, 25 bp, Homo sapien
tctgttgcccatgcagcacgttaaa

SEQ ID NO: 2598598 - DNA, 25 bp, Homo sapien
cacctgaaaatcaggcctctgactt

SEQ ID NO: 2598599 - DNA, 25 bp, Homo sapien
aaaatcaggtacagtgggccaggcg

SEQ ID NO: 2598600 - DNA, 25 bp, Homo sapien
gaattgcagtttcaccccagaccat

SEQ ID NO: 2598601 - DNA, 25 bp, Homo sapien
agcagccctgatcccaccctgttgc

SEQ ID NO: 2598602 - DNA, 25 bp, Homo sapien
tcaatggaggtatataagaggctct

SEQ ID NO: 2598603 - DNA, 25 bp, Homo sapien
ctgctgtcttcagcctcaatggagg

SEQ ID NO: 2598604 - DNA, 25 bp, Homo sapien
tgaccagctctagccacgtcatccc

SEQ ID NO: 2598605 - DNA, 25 bp, Homo sapien
gagccccagctgtcccgttcttggg

SEQ ID NO: 2598606 - DNA, 25 bp, Homo sapien
ccgttcttgggctttatctgtgcag

SEQ ID NO: 2598607 - DNA, 25 bp, Homo sapien
gaaaatattccaccctgaccagctc

SEQ ID NO: 2598608 - DNA, 25 bp, Homo sapien
cagtaagagtgaatatatactacag

SEQ ID NO: 2598609 - DNA, 25 bp, Homo sapien
gggagtgtcacgttttgtgcttagt

SEQ ID NO: 2598610 - DNA, 25 bp, Homo sapien
gttttatctgactcttacgcagtaa

SEQ ID NO: 2598611 - DNA, 25 bp, Homo sapien
caaaggggagtgtcacgttttgtgc

SEQ ID NO: 2598612 - DNA, 25 bp, Homo sapien
aaaaaatgccccgagatgattgagc

SEQ ID NO: 2598613 - DNA, 25 bp, Homo sapien
gattgagcaacttggcccaaatctc

SEQ ID NO: 2598614 - DNA, 25 bp, Homo sapien
tctcactgctagttagtggtcatgt

SEQ ID NO: 2598615 - DNA, 25 bp, Homo sapien
ccaaatctcactgctagttagtggt

SEQ ID NO: 2598616 - DNA, 25 bp, Homo sapien
caaaggaagttgagcgctatgcctc

SEQ ID NO: 2598617 - DNA, 25 bp, Homo sapien
taagacaaaggaagttgagcgctat

SEQ ID NO: 2598618 - DNA, 25 bp, Homo sapien
gttgagcgctatgcctcatgcctgt

SEQ ID NO: 2598619 - DNA, 25 bp, Homo sapien
ggaagttgagcgctatgcctcatgc

SEQ ID NO: 2598620 - DNA, 25 bp, Homo sapien
tctgagagcaccgttgagctcaacg

SEQ ID NO: 2598621 - DNA, 25 bp, Homo sapien
gagctcaacgtatccaattcggtag

SEQ ID NO: 2598622 - DNA, 25 bp, Homo sapien
gcaaacatacggagaaaggcccaga

SEQ ID NO: 2598623 - DNA, 25 bp, Homo sapien
gagagggcacagcaattttgttgtt

SEQ ID NO: 2598624 - DNA, 25 bp, Homo sapien
aataaccacgaaaggcatgcctggc

SEQ ID NO: 2598625 - DNA, 25 bp, Homo sapien
cataggaatcggacgactgcacacc

SEQ ID NO: 2598626 - DNA, 25 bp, Homo sapien
tgagctaaccctttgggagccggac

SEQ ID NO: 2598627 - DNA, 25 bp, Homo sapien
cctagcaggtggaagacatgccttc

SEQ ID NO: 2598628 - DNA, 25 bp, Homo sapien
catttaagtgtgtctcagattgctc

SEQ ID NO: 2598629 - DNA, 25 bp, Homo sapien
gccatttaagtgtgtctcagattgc

SEQ ID NO: 2598630 - DNA, 25 bp, Homo sapien
ctagatgccatttaagtgtgtctca

SEQ ID NO: 2598631 - DNA, 25 bp, Homo sapien
tttaagtgtgtctcagattgctcac

SEQ ID NO: 2598632 - DNA, 25 bp, Homo sapien
tgattcatgacaagcccagcaggga

SEQ ID NO: 2598633 - DNA, 25 bp, Homo sapien
catgcgtgcactgatgcacagggaa

SEQ ID NO: 2598634 - DNA, 25 bp, Homo sapien
gaaggctgtggaagcaaagttccct

SEQ ID NO: 2598635 - DNA, 25 bp, Homo sapien
ggaagcggctcagagccctcaggtc

SEQ ID NO: 2598636 - DNA, 25 bp, Homo sapien
agaagtgtcagaagtttaacatagt

SEQ ID NO: 2598637 - DNA, 25 bp, Homo sapien
tgtcagaagtttaacatagtttccc

SEQ ID NO: 2598638 - DNA, 25 bp, Homo sapien
tgcagaagtgtcagaagtttaacat

SEQ ID NO: 2598639 - DNA, 25 bp, Homo sapien
cagaagtttaacatagtttccctat

SEQ ID NO: 2598640 - DNA, 25 bp, Homo sapien
gcttgagcacgatgttcacagcagc

SEQ ID NO: 2598641 - DNA, 25 bp, Homo sapien
gtccacacaaaagcttgagcacgat

SEQ ID NO: 2598642 - DNA, 25 bp, Homo sapien
tgacgtctcacaggtccatccatag

SEQ ID NO: 2598643 - DNA, 25 bp, Homo sapien
tagatgagtgggcaaacgacatgca

SEQ ID NO: 2598644 - DNA, 25 bp, Homo sapien
cagccttaaccacagggtctccagc

SEQ ID NO: 2598645 - DNA, 25 bp, Homo sapien
gccttaaccacagggtctccagcag

SEQ ID NO: 2598646 - DNA, 25 bp, Homo sapien
agccttaaccacagggtctccagca

SEQ ID NO: 2598647 - DNA, 25 bp, Homo sapien
cttaaccacagggtctccagcagcc

SEQ ID NO: 2598648 - DNA, 25 bp, Homo sapien
gctgggcgatctgggagaggaggtc

SEQ ID NO: 2598649 - DNA, 25 bp, Homo sapien
gaaattgacatccttgtgggagagg

SEQ ID NO: 2598650 - DNA, 25 bp, Homo sapien
gcctcccctcgccacacatcctcca

SEQ ID NO: 2598651 - DNA, 25 bp, Homo sapien
aattgacatccttgtgggagaggtt

SEQ ID NO: 2598652 - DNA, 25 bp, Homo sapien
gggtcttcaaccactgactcgatca

SEQ ID NO: 2598653 - DNA, 25 bp, Homo sapien
caactccagtccttggatcggctca

SEQ ID NO: 2598654 - DNA, 25 bp, Homo sapien
ccaaaacaaaggctcacgaagtgaa

SEQ ID NO: 2598655 - DNA, 25 bp, Homo sapien
tcagtttccctcagtggtggaacca

SEQ ID NO: 2598656 - DNA, 25 bp, Homo sapien
gctcacaaagcagggttgctgttgt

SEQ ID NO: 2598657 - DNA, 25 bp, Homo sapien
agctagctcacaaagcagggttgct

SEQ ID NO: 2598658 - DNA, 25 bp, Homo sapien
cttggtaaaaccgtaagctagctca

SEQ ID NO: 2598659 - DNA, 25 bp, Homo sapien
gggttgctgttgtctgtataaaaca

SEQ ID NO: 2598660 - DNA, 25 bp, Homo sapien
cagcccagtggttctccggagaagt

SEQ ID NO: 2598661 - DNA, 25 bp, Homo sapien
gattctcgcctctgagttgaccact

SEQ ID NO: 2598662 - DNA, 25 bp, Homo sapien
tgccaagtgcattcctacctcagga

SEQ ID NO: 2598663 - DNA, 25 bp, Homo sapien
gactgccccatctgttagactacca

SEQ ID NO: 2598664 - DNA, 25 bp, Homo sapien
aaaattacagtgtgcctgtagtctt

SEQ ID NO: 2598665 - DNA, 25 bp, Homo sapien
gatgacagagtacgtccctgactca

SEQ ID NO: 2598666 - DNA, 25 bp, Homo sapien
aaaaatctctatctcttcctcatgc

SEQ ID NO: 2598667 - DNA, 25 bp, Homo sapien
gcagggagccgtgatgccatcattg

SEQ ID NO: 2598668 - DNA, 25 bp, Homo sapien
gcctcgcagccgtgctggtcaatga

SEQ ID NO: 2598669 - DNA, 25 bp, Homo sapien
tggcccacaagcgacgcgatgtcgt

SEQ ID NO: 2598670 - DNA, 25 bp, Homo sapien
gcgatgtcgtacacgtccatgacgg

SEQ ID NO: 2598671 - DNA, 25 bp, Homo sapien
acgcgcacgaccttgggcatgaggc

SEQ ID NO: 2598672 - DNA, 25 bp, Homo sapien
gacatttatatctacacccaagaag

SEQ ID NO: 2598673 - DNA, 25 bp, Homo sapien
gaagtcaatgtaggtcgaatcacag

SEQ ID NO: 2598674 - DNA, 25 bp, Homo sapien
gaaggatacatcctctaggtttcgg

SEQ ID NO: 2598675 - DNA, 25 bp, Homo sapien
taggtttcggcagtaataatagacc

SEQ ID NO: 2598676 - DNA, 25 bp, Homo sapien
caaccaccattttgtttgggcccag

SEQ ID NO: 2598677 - DNA, 25 bp, Homo sapien
gacttgagtttgttgcgttcctgca

SEQ ID NO: 2598678 - DNA, 25 bp, Homo sapien
cttagctcctgcagagtgaagcggg

SEQ ID NO: 2598679 - DNA, 25 bp, Homo sapien
tgggatctgtcaggtcaaccaccat

SEQ ID NO: 2598680 - DNA, 25 bp, Homo sapien
ctccccgctggccggagggctctgt

SEQ ID NO: 2598681 - DNA, 25 bp, Homo sapien
cccgctggccggagggctctgtctc

SEQ ID NO: 2598682 - DNA, 25 bp, Homo sapien
gctggccggagggctctgtctccgc

SEQ ID NO: 2598683 - DNA, 25 bp, Homo sapien
ctggccggagggctctgtctccgca

SEQ ID NO: 2598684 - DNA, 25 bp, Homo sapien
gacgcggacgactttgaactgcagc

SEQ ID NO: 2598685 - DNA, 25 bp, Homo sapien
agggccataagctcgcggcccaaca

SEQ ID NO: 2598686 - DNA, 25 bp, Homo sapien
cccaacaggtaggagatgtcataca

SEQ ID NO: 2598687 - DNA, 25 bp, Homo sapien
acgtcctcggcggtcagctggaagg

SEQ ID NO: 2598688 - DNA, 25 bp, Homo sapien
cttggagtctcccaaaggttagact

SEQ ID NO: 2598689 - DNA, 25 bp, Homo sapien
caaaactttccgctgggcagagtcc

SEQ ID NO: 2598690 - DNA, 25 bp, Homo sapien
gcagagtccctacctgcccaatcag

SEQ ID NO: 2598691 - DNA, 25 bp, Homo sapien
cgcgcacgcgactcttgggcctgcg

SEQ ID NO: 2598692 - DNA, 25 bp, Homo sapien
cagagtattgctgtgttgatgaggc

SEQ ID NO: 2598693 - DNA, 25 bp, Homo sapien
tggagaaattccagccacgagagaa

SEQ ID NO: 2598694 - DNA, 25 bp, Homo sapien
tgatgacagacatattgccctcctt

SEQ ID NO: 2598695 - DNA, 25 bp, Homo sapien
ttcttttactgacagcagagaggca

SEQ ID NO: 2598696 - DNA, 25 bp, Homo sapien
tcaaagggtggatccctcggcgact

SEQ ID NO: 2598697 - DNA, 25 bp, Homo sapien
gcgtgccgtgatcaaagcttaccga

SEQ ID NO: 2598698 - DNA, 25 bp, Homo sapien
tctcgatcccgagaaagacactggg

SEQ ID NO: 2598699 - DNA, 25 bp, Homo sapien
tcgaatacaaggaggagcgtgccgt

SEQ ID NO: 2598700 - DNA, 25 bp, Homo sapien
gataccatcaggacaaaaagcaaag

SEQ ID NO: 2598701 - DNA, 25 bp, Homo sapien
caagactgcctgcattagggaagcc

SEQ ID NO: 2598702 - DNA, 25 bp, Homo sapien
tgttcccttattatggcaccagaag

SEQ ID NO: 2598703 - DNA, 25 bp, Homo sapien
tagggaagccttgtgagataccatc

SEQ ID NO: 2598704 - DNA, 25 bp, Homo sapien
tgagagccgctgtcttatgtactca

SEQ ID NO: 2598705 - DNA, 25 bp, Homo sapien
gagccgctgtcttatgtactcatat

SEQ ID NO: 2598706 - DNA, 25 bp, Homo sapien
cgctgtcttatgtactcatatggag

SEQ ID NO: 2598707 - DNA, 25 bp, Homo sapien
gtactcatatggagttattgctata

SEQ ID NO: 2598708 - DNA, 25 bp, Homo sapien
ctcaagagctggatctgctgactta

SEQ ID NO: 2598709 - DNA, 25 bp, Homo sapien
tttcctttctgtcccgattatctag

SEQ ID NO: 2598710 - DNA, 25 bp, Homo sapien
tctgctgacttatcaaaaaagtgac

SEQ ID NO: 2598711 - DNA, 25 bp, Homo sapien
cccgattatctagcctctgatgtgc

SEQ ID NO: 2598712 - DNA, 25 bp, Homo sapien
tggtgccactatactttggcttggg

SEQ ID NO: 2598713 - DNA, 25 bp, Homo sapien
agagatggtgccactatactttggc

SEQ ID NO: 2598714 - DNA, 25 bp, Homo sapien
ctatactttggcttgggcaatagag

SEQ ID NO: 2598715 - DNA, 25 bp, Homo sapien
ccactatactttggcttgggcaata

SEQ ID NO: 2598716 - DNA, 25 bp, Homo sapien
tgagcctgtgacttcagaccccttg

SEQ ID NO: 2598717 - DNA, 25 bp, Homo sapien
tattagaaacagtgatagccctggg

SEQ ID NO: 2598718 - DNA, 25 bp, Homo sapien
tagaatgtttagaacgcggccctga

SEQ ID NO: 2598719 - DNA, 25 bp, Homo sapien
gacagtgttatgtgggcaagcctcc

SEQ ID NO: 2598720 - DNA, 25 bp, Homo sapien
tgtttgcccactgtccaaaggactc

SEQ ID NO: 2598721 - DNA, 25 bp, Homo sapien
ttgctctgtgtaaccgtcatcgcgg

SEQ ID NO: 2598722 - DNA, 25 bp, Homo sapien
gactcctggatgtgcacgtttctct

SEQ ID NO: 2598723 - DNA, 25 bp, Homo sapien
gccaggcgcttcttatctcgggaga

SEQ ID NO: 2598724 - DNA, 25 bp, Homo sapien
tagccgctatggaggatttatcccg

SEQ ID NO: 2598725 - DNA, 25 bp, Homo sapien
aacatatactatgggctgagcgcga

SEQ ID NO: 2598726 - DNA, 25 bp, Homo sapien
tgaaggcacaattctcacactgggt

SEQ ID NO: 2598727 - DNA, 25 bp, Homo sapien
tgcctacaagggaaacaagtcgtcg

SEQ ID NO: 2598728 - DNA, 25 bp, Homo sapien
agcaagctagacaaaagtgggattt

SEQ ID NO: 2598729 - DNA, 25 bp, Homo sapien
gcaagctagacaaaagtgggattta

SEQ ID NO: 2598730 - DNA, 25 bp, Homo sapien
caagctagacaaaagtgggatttag

SEQ ID NO: 2598731 - DNA, 25 bp, Homo sapien
cagcaagctagacaaaagtgggatt

SEQ ID NO: 2598732 - DNA, 25 bp, Homo sapien
ggaagtgcggatcccagcggcggtc

SEQ ID NO: 2598733 - DNA, 25 bp, Homo sapien
tccggaagtgcggatcccagcggcg

SEQ ID NO: 2598734 - DNA, 25 bp, Homo sapien
cggaagtgcggatcccagcggcggt

SEQ ID NO: 2598735 - DNA, 25 bp, Homo sapien
cctccggaagtgcggatcccagcgg

SEQ ID NO: 2598736 - DNA, 25 bp, Homo sapien
tcttaaaacatttgagtaagtacag

SEQ ID NO: 2598737 - DNA, 25 bp, Homo sapien
ctcttatgactattgggataacacc

SEQ ID NO: 2598738 - DNA, 25 bp, Homo sapien
caccaagaatttggtatatgctcct

SEQ ID NO: 2598739 - DNA, 25 bp, Homo sapien
acatttgagtaagtacagtgcacca

SEQ ID NO: 2598740 - DNA, 25 bp, Homo sapien
gttgcttggagtaaccaaattaaca

SEQ ID NO: 2598741 - DNA, 25 bp, Homo sapien
tcaccacattatagctctgggggcc

SEQ ID NO: 2598742 - DNA, 25 bp, Homo sapien
gtaagactcaaacttgctcccagat

SEQ ID NO: 2598743 - DNA, 25 bp, Homo sapien
tcaaactggtaagactcaaacttgc

SEQ ID NO: 2598744 - DNA, 25 bp, Homo sapien
gcaaaacctgaagggtgtgttcgtg

SEQ ID NO: 2598745 - DNA, 25 bp, Homo sapien
caagcacaggagctttgttatattt

SEQ ID NO: 2598746 - DNA, 25 bp, Homo sapien
cacgtttgacaagggccaataaaga

SEQ ID NO: 2598747 - DNA, 25 bp, Homo sapien
gcattcaggagttagtgggtcacgt

SEQ ID NO: 2598748 - DNA, 25 bp, Homo sapien
taacatggtgtaaggtaagagtcca

SEQ ID NO: 2598749 - DNA, 25 bp, Homo sapien
cttggcatccttgtggaagatcatc

SEQ ID NO: 2598750 - DNA, 25 bp, Homo sapien
gcttttactgcctgagcttttaatg

SEQ ID NO: 2598751 - DNA, 25 bp, Homo sapien
gaagaaactgtccttcgccattgag

SEQ ID NO: 2598752 - DNA, 25 bp, Homo sapien
tatgtttatactgtgctgtataaag

SEQ ID NO: 2598753 - DNA, 25 bp, Homo sapien
aatagcatatgtctacaaagtatgc

SEQ ID NO: 2598754 - DNA, 25 bp, Homo sapien
taaaagtatgtttatactgtgctgt

SEQ ID NO: 2598755 - DNA, 25 bp, Homo sapien
gtgcaatagcatatgtctacaaagt

SEQ ID NO: 2598756 - DNA, 25 bp, Homo sapien
agctactggcctgtcttgcttacag

SEQ ID NO: 2598757 - DNA, 25 bp, Homo sapien
tgcatgaggtctagctactggcctg

SEQ ID NO: 2598758 - DNA, 25 bp, Homo sapien
taagtgtttgttgcatgaggtctag

SEQ ID NO: 2598759 - DNA, 25 bp, Homo sapien
ggtctagctactggcctgtcttgct

SEQ ID NO: 2598760 - DNA, 25 bp, Homo sapien
tgctgtctacttcattcattaggcc

SEQ ID NO: 2598761 - DNA, 25 bp, Homo sapien
taggcccttagcatattctccagag

SEQ ID NO: 2598762 - DNA, 25 bp, Homo sapien
gctgagtccagtctactaataagcc

SEQ ID NO: 2598763 - DNA, 25 bp, Homo sapien
cagagattcttaactcagctgagtc

SEQ ID NO: 2598764 - DNA, 25 bp, Homo sapien
attcctggactcattgtcaaagagc

SEQ ID NO: 2598765 - DNA, 25 bp, Homo sapien
cattgtcaaagagcttactgatgtt

SEQ ID NO: 2598766 - DNA, 25 bp, Homo sapien
tcctggactcattgtcaaagagctt

SEQ ID NO: 2598767 - DNA, 25 bp, Homo sapien
gactcattgtcaaagagcttactga

SEQ ID NO: 2598768 - DNA, 25 bp, Homo sapien
tcttcagtgttggtgggatacgtca

SEQ ID NO: 2598769 - DNA, 25 bp, Homo sapien
gatacgtcagaaagcgatggaagat

SEQ ID NO: 2598770 - DNA, 25 bp, Homo sapien
cagtgttggtgggatacgtcagaaa

SEQ ID NO: 2598771 - DNA, 25 bp, Homo sapien
ttggtgggatacgtcagaaagcgat

SEQ ID NO: 2598772 - DNA, 25 bp, Homo sapien
gccagacgtggtacatcagttcttc

SEQ ID NO: 2598773 - DNA, 25 bp, Homo sapien
gacgtggtacatcagttcttctatc

SEQ ID NO: 2598774 - DNA, 25 bp, Homo sapien
cagacgtggtacatcagttcttcta

SEQ ID NO: 2598775 - DNA, 25 bp, Homo sapien
tgccagacgtggtacatcagttctt

SEQ ID NO: 2598776 - DNA, 25 bp, Homo sapien
gccagacgtggtacatcagttcttc

SEQ ID NO: 2598777 - DNA, 25 bp, Homo sapien
cagacgtggtacatcagttcttcta

SEQ ID NO: 2598778 - DNA, 25 bp, Homo sapien
gacgtggtacatcagttcttctatc

SEQ ID NO: 2598779 - DNA, 25 bp, Homo sapien
tgccagacgtggtacatcagttctt

SEQ ID NO: 2598780 - DNA, 25 bp, Homo sapien
gacatgttctatggagccgtgggcc

SEQ ID NO: 2598781 - DNA, 25 bp, Homo sapien
catgttctatggagccgtgggccgt

SEQ ID NO: 2598782 - DNA, 25 bp, Homo sapien
cgtgtagacatgttctatggagccg

SEQ ID NO: 2598783 - DNA, 25 bp, Homo sapien
tagacatgttctatggagccgtggg

SEQ ID NO: 2598784 - DNA, 25 bp, Homo sapien
ctgcggctcccgaagccgaataact

SEQ ID NO: 2598785 - DNA, 25 bp, Homo sapien
tgcggctcccgaagccgaataactt

SEQ ID NO: 2598786 - DNA, 25 bp, Homo sapien
gcggctcccgaagccgaataacttc

SEQ ID NO: 2598787 - DNA, 25 bp, Homo sapien
ggctcccgaagccgaataacttcat

SEQ ID NO: 2598788 - DNA, 25 bp, Homo sapien
tgagctcgcaggtcctcttgggatc

SEQ ID NO: 2598789 - DNA, 25 bp, Homo sapien
cgcaggtcctcttgggatcgcccgg

SEQ ID NO: 2598790 - DNA, 25 bp, Homo sapien
tgggctggcgccgatgagctcgcag

SEQ ID NO: 2598791 - DNA, 25 bp, Homo sapien
tggcgccgatgagctcgcaggtcct

SEQ ID NO: 2598792 - DNA, 25 bp, Homo sapien
caccacgtctagactgcagctgcgg

SEQ ID NO: 2598793 - DNA, 25 bp, Homo sapien
ctgcggctccgatgtcggcgtcagc

SEQ ID NO: 2598794 - DNA, 25 bp, Homo sapien
tgcggctccgatgtcggcgtcagct

SEQ ID NO: 2598795 - DNA, 25 bp, Homo sapien
gctgcggctccgatgtcggcgtcag

SEQ ID NO: 2598796 - DNA, 25 bp, Homo sapien
gtgtgtgcgggtagggtgagtggca

SEQ ID NO: 2598797 - DNA, 25 bp, Homo sapien
gcaggtgtgtgtgcgggtagggtga

SEQ ID NO: 2598798 - DNA, 25 bp, Homo sapien
tgtgtgcgggtagggtgagtggcac

SEQ ID NO: 2598799 - DNA, 25 bp, Homo sapien
ggcaggtgtgtgtgcgggtagggtg

SEQ ID NO: 2598800 - DNA, 25 bp, Homo sapien
gctcccctggatggcgtcaggtttg

SEQ ID NO: 2598801 - DNA, 25 bp, Homo sapien
tgggacctgtcccgcgtccacgtga

SEQ ID NO: 2598802 - DNA, 25 bp, Homo sapien
gtccacgtgaatgcggagcgcagca

SEQ ID NO: 2598803 - DNA, 25 bp, Homo sapien
cagtacctgcgtctcaggaagaggt

SEQ ID NO: 2598804 - DNA, 25 bp, Homo sapien
tgtatctccgggtgaacgctgtggc

SEQ ID NO: 2598805 - DNA, 25 bp, Homo sapien
ctgaaacagcggtccccgaggtgct

SEQ ID NO: 2598806 - DNA, 25 bp, Homo sapien
agcggtccccgaggtgctccacagg

SEQ ID NO: 2598807 - DNA, 25 bp, Homo sapien
acagcggtccccgaggtgctccaca

SEQ ID NO: 2598808 - DNA, 25 bp, Homo sapien
aaacagcggtccccgaggtgctcca

SEQ ID NO: 2598809 - DNA, 25 bp, Homo sapien
cctatttcgggagaccagaagtggg

SEQ ID NO: 2598810 - DNA, 25 bp, Homo sapien
tcctatttcgggagaccagaagtgg

SEQ ID NO: 2598811 - DNA, 25 bp, Homo sapien
accactgttgacaatagctaagatt

SEQ ID NO: 2598812 - DNA, 25 bp, Homo sapien
ggatatataccccagaaataagaaa

SEQ ID NO: 2598813 - DNA, 25 bp, Homo sapien
tataggttctacctaaccatctcta

SEQ ID NO: 2598814 - DNA, 25 bp, Homo sapien
caaggctgacttccgtaatataggt

SEQ ID NO: 2598815 - DNA, 25 bp, Homo sapien
cgctgtcaaggaggaccagtgttaa

SEQ ID NO: 2598816 - DNA, 25 bp, Homo sapien
tattgtaagcagcagttcaattgtt

SEQ ID NO: 2598817 - DNA, 25 bp, Homo sapien
caactgtgatatttcatggaagtta

SEQ ID NO: 2598818 - DNA, 25 bp, Homo sapien
tcaaacatagtcaagagtacaactg

SEQ ID NO: 2598819 - DNA, 25 bp, Homo sapien
gttacaagaactgagtgcagattaa

SEQ ID NO: 2598820 - DNA, 25 bp, Homo sapien
ctctgaaatttctagggatgttctt

SEQ ID NO: 2598821 - DNA, 25 bp, Homo sapien
cactgggggaggtgataatgttgac

SEQ ID NO: 2598822 - DNA, 25 bp, Homo sapien
ctgctgaagacgaaaaacactactg

SEQ ID NO: 2598823 - DNA, 25 bp, Homo sapien
tgaagacgaaaaacactactgccgt

SEQ ID NO: 2598824 - DNA, 25 bp, Homo sapien
gagccttcttgggaatcctactcag

SEQ ID NO: 2598825 - DNA, 25 bp, Homo sapien
ttctgtcactgctttaaacaaaggt

SEQ ID NO: 2598826 - DNA, 25 bp, Homo sapien
tccatcttctgtcactgctttaaac

SEQ ID NO: 2598827 - DNA, 25 bp, Homo sapien
tgaacgcacagccaaaaatccatct

SEQ ID NO: 2598828 - DNA, 25 bp, Homo sapien
ctttagcttctgaacgcacagccaa

SEQ ID NO: 2598829 - DNA, 25 bp, Homo sapien
ccatccactttggtctggtattcaa

SEQ ID NO: 2598830 - DNA, 25 bp, Homo sapien
catacaaattgtttgctcaattcct

SEQ ID NO: 2598831 - DNA, 25 bp, Homo sapien
gtattcaaattcaaactggtactgc

SEQ ID NO: 2598832 - DNA, 25 bp, Homo sapien
gaaatgcaaacacaccatccaacat

SEQ ID NO: 2598833 - DNA, 25 bp, Homo sapien
gatgaaaagtccttgatgtatttct

SEQ ID NO: 2598834 - DNA, 25 bp, Homo sapien
aggatgaaaagtccttgatgtattt

SEQ ID NO: 2598835 - DNA, 25 bp, Homo sapien
ctttgaggatgaaaagtccttgatg

SEQ ID NO: 2598836 - DNA, 25 bp, Homo sapien
accatcactggcaaactttgaggat

SEQ ID NO: 2598837 - DNA, 25 bp, Homo sapien
gagataacatagaatgctttgcaaa

SEQ ID NO: 2598838 - DNA, 25 bp, Homo sapien
catacttagagcaaatgagataaca

SEQ ID NO: 2598839 - DNA, 25 bp, Homo sapien
tatcatcgtaatcaacaagctctga

SEQ ID NO: 2598840 - DNA, 25 bp, Homo sapien
cagttccctgtctacatacttagag

SEQ ID NO: 2598841 - DNA, 25 bp, Homo sapien
tgggtcaactaccaccaaccagtga

SEQ ID NO: 2598842 - DNA, 25 bp, Homo sapien
aaaacaggatgcatttggacccctg

SEQ ID NO: 2598843 - DNA, 25 bp, Homo sapien
acagtgggtcaactaccaccaacca

SEQ ID NO: 2598844 - DNA, 25 bp, Homo sapien
gtgggtcaactaccaccaaccagtg

SEQ ID NO: 2598845 - DNA, 25 bp, Homo sapien
tctatagcgatttcccatttggttg

SEQ ID NO: 2598846 - DNA, 25 bp, Homo sapien
tattcaatatccaatccaagtcggc

SEQ ID NO: 2598847 - DNA, 25 bp, Homo sapien
gctataagctccctatggagagaaa

SEQ ID NO: 2598848 - DNA, 25 bp, Homo sapien
tgattccagaaacgtgcataaacca

SEQ ID NO: 2598849 - DNA, 25 bp, Homo sapien
tatcaaatatgtccccaaggagcct

SEQ ID NO: 2598850 - DNA, 25 bp, Homo sapien
ggcccttttgttagaagagctagaa

SEQ ID NO: 2598851 - DNA, 25 bp, Homo sapien
tagataaagactatataggcccatt

SEQ ID NO: 2598852 - DNA, 25 bp, Homo sapien
gaccccaatccaacactagataaag

SEQ ID NO: 2598853 - DNA, 25 bp, Homo sapien
tcacagcgtcttggaaggatgttct

SEQ ID NO: 2598854 - DNA, 25 bp, Homo sapien
aagccagggggactcggttcctgct

SEQ ID NO: 2598855 - DNA, 25 bp, Homo sapien
cgccccctcgatgccactgcagcct

SEQ ID NO: 2598856 - DNA, 25 bp, Homo sapien
tggctcaggaagcgccccctcgatg

SEQ ID NO: 2598857 - DNA, 25 bp, Homo sapien
gctccaggaactggcctgcggcgtt

SEQ ID NO: 2598858 - DNA, 25 bp, Homo sapien
ctgcggcgttggctttggctgggcg

SEQ ID NO: 2598859 - DNA, 25 bp, Homo sapien
ttggctttggctgggcgccccagga

SEQ ID NO: 2598860 - DNA, 25 bp, Homo sapien
gaaaccccaacatcccgctccagga

SEQ ID NO: 2598861 - DNA, 25 bp, Homo sapien
gggcagtgctgagacacttgtcccc

SEQ ID NO: 2598862 - DNA, 25 bp, Homo sapien
cgcacaggagctccgaagactcaca

SEQ ID NO: 2598863 - DNA, 25 bp, Homo sapien
tgtccccgcacaggagctccgaaga

SEQ ID NO: 2598864 - DNA, 25 bp, Homo sapien
ctgagacacttgtccccgcacagga

SEQ ID NO: 2598865 - DNA, 25 bp, Homo sapien
tttggactcccagtagccatggcgc

SEQ ID NO: 2598866 - DNA, 25 bp, Homo sapien
agcagtggcccgaagaaagggccct

SEQ ID NO: 2598867 - DNA, 25 bp, Homo sapien
gcggacccggactgacccctgtgtg

SEQ ID NO: 2598868 - DNA, 25 bp, Homo sapien
caagaggcagtgagccggtggacct

SEQ ID NO: 2598869 - DNA, 25 bp, Homo sapien
agctagcatgctcaaaagctctcag

SEQ ID NO: 2598870 - DNA, 25 bp, Homo sapien
tagctagcatgctcaaaagctctca

SEQ ID NO: 2598871 - DNA, 25 bp, Homo sapien
gctagcatgctcaaaagctctcaga

SEQ ID NO: 2598872 - DNA, 25 bp, Homo sapien
tcagggctggactcacttcgtggtt

SEQ ID NO: 2598873 - DNA, 25 bp, Homo sapien
gagcccttgtttgcggttgagcccc

SEQ ID NO: 2598874 - DNA, 25 bp, Homo sapien
tgaatgtgggtaactgcgccacccc

SEQ ID NO: 2598875 - DNA, 25 bp, Homo sapien
tgtgggaccctgacttgtaaaacca

SEQ ID NO: 2598876 - DNA, 25 bp, Homo sapien
ggcctggggaccatgctcagtggcc

SEQ ID NO: 2598877 - DNA, 25 bp, Homo sapien
gaggcctggggaccatgctcagtgg

SEQ ID NO: 2598878 - DNA, 25 bp, Homo sapien
gcctggggaccatgctcagtggcca

SEQ ID NO: 2598879 - DNA, 25 bp, Homo sapien
aggcctggggaccatgctcagtggc

SEQ ID NO: 2598880 - DNA, 25 bp, Homo sapien
aggcctgaggatcagcaggttgacc

SEQ ID NO: 2598881 - DNA, 25 bp, Homo sapien
aggatcagcaggttgaccacaggga

SEQ ID NO: 2598882 - DNA, 25 bp, Homo sapien
cctgaggatcagcaggttgaccaca

SEQ ID NO: 2598883 - DNA, 25 bp, Homo sapien
atcagcaggttgaccacagggaggt

SEQ ID NO: 2598884 - DNA, 25 bp, Homo sapien
tgagggtgccgcggtcccaagaggg

SEQ ID NO: 2598885 - DNA, 25 bp, Homo sapien
gggctgagggtgccgcggtcccaag

SEQ ID NO: 2598886 - DNA, 25 bp, Homo sapien
tgccgcggtcccaagagggggcttg

SEQ ID NO: 2598887 - DNA, 25 bp, Homo sapien
gctgagggtgccgcggtcccaagag

SEQ ID NO: 2598888 - DNA, 25 bp, Homo sapien
tggaggtaagatgatccctggcagg

SEQ ID NO: 2598889 - DNA, 25 bp, Homo sapien
gccaggatgacctaggccaggctca

SEQ ID NO: 2598890 - DNA, 25 bp, Homo sapien
gagccccaagggtcagagccgacgc

SEQ ID NO: 2598891 - DNA, 25 bp, Homo sapien
gggtcagagccgacgctcacccagg

SEQ ID NO: 2598892 - DNA, 25 bp, Homo sapien
tcacccaggcctgccgcacgccatc

SEQ ID NO: 2598893 - DNA, 25 bp, Homo sapien
cttgtgaggccacccttaggcctca

SEQ ID NO: 2598894 - DNA, 25 bp, Homo sapien
ctgtgcttgtgaggccacccttagg

SEQ ID NO: 2598895 - DNA, 25 bp, Homo sapien
tggcactgtgcttgtgaggccaccc

SEQ ID NO: 2598896 - DNA, 25 bp, Homo sapien
ctggcactgtgcttgtgaggccacc

SEQ ID NO: 2598897 - DNA, 25 bp, Homo sapien
cagaaggtgtcccggccttgccctg

SEQ ID NO: 2598898 - DNA, 25 bp, Homo sapien
tctggacccagaaggtgtcccggcc

SEQ ID NO: 2598899 - DNA, 25 bp, Homo sapien
ggaaagcagtgtggcctcaggtagg

SEQ ID NO: 2598900 - DNA, 25 bp, Homo sapien
cagtgtggcctcaggtaggacacct

SEQ ID NO: 2598901 - DNA, 25 bp, Homo sapien
tccttcaagtgcaaagacctgatga

SEQ ID NO: 2598902 - DNA, 25 bp, Homo sapien
tcctagggcacccaggccaagtggc

SEQ ID NO: 2598903 - DNA, 25 bp, Homo sapien
aggctctgattcccaagggtcctag

SEQ ID NO: 2598904 - DNA, 25 bp, Homo sapien
gtggctctgagtccccgggtccttc

SEQ ID NO: 2598905 - DNA, 25 bp, Homo sapien
gagatgggctcccagaactccggcc

SEQ ID NO: 2598906 - DNA, 25 bp, Homo sapien
ttgcaaaggaattagccagcgagcc

SEQ ID NO: 2598907 - DNA, 25 bp, Homo sapien
gaactgaagttgcaaaggaattagc

SEQ ID NO: 2598908 - DNA, 25 bp, Homo sapien
tagccagcgagcctgcgtagagatg

SEQ ID NO: 2598909 - DNA, 25 bp, Homo sapien
tggcacgcctggtgcgggaaccgct

SEQ ID NO: 2598910 - DNA, 25 bp, Homo sapien
caggaatggcctatgtctgggagca

SEQ ID NO: 2598911 - DNA, 25 bp, Homo sapien
agccaggtggcacgcctggtgcggg

SEQ ID NO: 2598912 - DNA, 25 bp, Homo sapien
tgcgggaaccgctggggccaatcag

SEQ ID NO: 2598913 - DNA, 25 bp, Homo sapien
gggacagcccaaaggtgcctggagg

SEQ ID NO: 2598914 - DNA, 25 bp, Homo sapien
gtaaccaggtgccaggcccatggcc

SEQ ID NO: 2598915 - DNA, 25 bp, Homo sapien
ccagcaaggcctcagggtctgtgtc

SEQ ID NO: 2598916 - DNA, 25 bp, Homo sapien
agggtctgtgtccagtgccccagct

SEQ ID NO: 2598917 - DNA, 25 bp, Homo sapien
gaagggtggggacgcagcaccttgg

SEQ ID NO: 2598918 - DNA, 25 bp, Homo sapien
gaggctgccgtcagaagggtgggga

SEQ ID NO: 2598919 - DNA, 25 bp, Homo sapien
cgtcagaagggtggggacgcagcac

SEQ ID NO: 2598920 - DNA, 25 bp, Homo sapien
ggggacgcagcaccttggtcgccat

SEQ ID NO: 2598921 - DNA, 25 bp, Homo sapien
gactcctggaacctgacgtgggtga

SEQ ID NO: 2598922 - DNA, 25 bp, Homo sapien
tcaaggcatgggagctacctactgc

SEQ ID NO: 2598923 - DNA, 25 bp, Homo sapien
gactcagagcgtccaggcatggtta

SEQ ID NO: 2598924 - DNA, 25 bp, Homo sapien
gatgtgcaaaatgccgccgggttcc

SEQ ID NO: 2598925 - DNA, 25 bp, Homo sapien
catgggcttctgatagctgcgcagc

SEQ ID NO: 2598926 - DNA, 25 bp, Homo sapien
ctctcggaacttgggcagcgtggtc

SEQ ID NO: 2598927 - DNA, 25 bp, Homo sapien
tgcaggtgttgcacttgacgaagca

SEQ ID NO: 2598928 - DNA, 25 bp, Homo sapien
ttgcaggtgaagacctcggtgcgct

SEQ ID NO: 2598929 - DNA, 25 bp, Homo sapien
actggggccgacagaaggcacctca

SEQ ID NO: 2598930 - DNA, 25 bp, Homo sapien
tgcggctgtggaatgaggtgcctca

SEQ ID NO: 2598931 - DNA, 25 bp, Homo sapien
ggcgtccgatattccggccactggg

SEQ ID NO: 2598932 - DNA, 25 bp, Homo sapien
caggagcctggcgtccgatattccg

SEQ ID NO: 2598933 - DNA, 25 bp, Homo sapien
cctcaccgtcctgggtgtgacccct

SEQ ID NO: 2598934 - DNA, 25 bp, Homo sapien
ctacacaaccaagccctcaccgtcc

SEQ ID NO: 2598935 - DNA, 25 bp, Homo sapien
gtcctgggtgtgacccctgcacccc

SEQ ID NO: 2598936 - DNA, 25 bp, Homo sapien
cacaaccaagccctcaccgtcctgg

SEQ ID NO: 2598937 - DNA, 25 bp, Homo sapien
gatggcgtacgtgaaggcagcctca

SEQ ID NO: 2598938 - DNA, 25 bp, Homo sapien
tgtagtagccctgcttctcgcggtc

SEQ ID NO: 2598939 - DNA, 25 bp, Homo sapien
ggagaagtcgatgccgtaacgcacg

SEQ ID NO: 2598940 - DNA, 25 bp, Homo sapien
gttatgcaggttcatgaggcgccgc

SEQ ID NO: 2598941 - DNA, 25 bp, Homo sapien
tctccctgttcccaagactgggcag

SEQ ID NO: 2598942 - DNA, 25 bp, Homo sapien
tgcgactgccctccagcatgcagtg

SEQ ID NO: 2598943 - DNA, 25 bp, Homo sapien
agtgctgccgacagcttctctccct

SEQ ID NO: 2598944 - DNA, 25 bp, Homo sapien
tctccagccctgagagtgactggtg

SEQ ID NO: 2598945 - DNA, 25 bp, Homo sapien
aggtccctcgctggcaccttcactg

SEQ ID NO: 2598946 - DNA, 25 bp, Homo sapien
ccaccagctggttccctccaagggc

SEQ ID NO: 2598947 - DNA, 25 bp, Homo sapien
agaactgcctggacttgggcagcag

SEQ ID NO: 2598948 - DNA, 25 bp, Homo sapien
gcagtctggccaggtccctcgctgg

SEQ ID NO: 2598949 - DNA, 25 bp, Homo sapien
ctgccggtagagccaagcccacggc

SEQ ID NO: 2598950 - DNA, 25 bp, Homo sapien
cggtagagccaagcccacggctgag

SEQ ID NO: 2598951 - DNA, 25 bp, Homo sapien
ccggtagagccaagcccacggctga

SEQ ID NO: 2598952 - DNA, 25 bp, Homo sapien
tgccggtagagccaagcccacggct

SEQ ID NO: 2598953 - DNA, 25 bp, Homo sapien
cagcggggacttccatatgggtccg

SEQ ID NO: 2598954 - DNA, 25 bp, Homo sapien
gggacttccatatgggtccgaagac

SEQ ID NO: 2598955 - DNA, 25 bp, Homo sapien
ttccatatgggtccgaagacccgag

SEQ ID NO: 2598956 - DNA, 25 bp, Homo sapien
atatgggtccgaagacccgagatgg

SEQ ID NO: 2598957 - DNA, 25 bp, Homo sapien
caagcacaggtctgtacccccagat

SEQ ID NO: 2598958 - DNA, 25 bp, Homo sapien
ccaagcacaggtctgtacccccaga

SEQ ID NO: 2598959 - DNA, 25 bp, Homo sapien
tttgggatcttcgtgggcagacaca

SEQ ID NO: 2598960 - DNA, 25 bp, Homo sapien
ggtgtgacacacgacacatttggga

SEQ ID NO: 2598961 - DNA, 25 bp, Homo sapien
gacacatttgggatcttcgtgggca

SEQ ID NO: 2598962 - DNA, 25 bp, Homo sapien
tgagcttcatgcctgtaggtgtgac

SEQ ID NO: 2598963 - DNA, 25 bp, Homo sapien
acggaacccacgtgggaagctctgc

SEQ ID NO: 2598964 - DNA, 25 bp, Homo sapien
gctctgcggggacctccatgtcccc

SEQ ID NO: 2598965 - DNA, 25 bp, Homo sapien
cggaacccacgtgggaagctctgcg

SEQ ID NO: 2598966 - DNA, 25 bp, Homo sapien
gaacccacgtgggaagctctgcggg

SEQ ID NO: 2598967 - DNA, 25 bp, Homo sapien
ggccccagttgtccgtacagtcctg

SEQ ID NO: 2598968 - DNA, 25 bp, Homo sapien
tcaaggccccagttgtccgtacagt

SEQ ID NO: 2598969 - DNA, 25 bp, Homo sapien
cttcaaggccccagttgtccgtaca

SEQ ID NO: 2598970 - DNA, 25 bp, Homo sapien
agttgtccgtacagtcctggctgcc

SEQ ID NO: 2598971 - DNA, 25 bp, Homo sapien
atggaagccatgagcaggagtgagc

SEQ ID NO: 2598972 - DNA, 25 bp, Homo sapien
gttcgcatgggtcgcagggaatgga

SEQ ID NO: 2598973 - DNA, 25 bp, Homo sapien
tcaggccagaggttcgcatgggtcg

SEQ ID NO: 2598974 - DNA, 25 bp, Homo sapien
tgggtcgcagggaatggaagccatg

SEQ ID NO: 2598975 - DNA, 25 bp, Homo sapien
tcacaatgatggcatcgggccgact

SEQ ID NO: 2598976 - DNA, 25 bp, Homo sapien
tccagcgtccgaagcggaactggta

SEQ ID NO: 2598977 - DNA, 25 bp, Homo sapien
gctaggccaggaatcttgttgcaga

SEQ ID NO: 2598978 - DNA, 25 bp, Homo sapien
tcttctcgccgagggcagagcagtt

SEQ ID NO: 2598979 - DNA, 25 bp, Homo sapien
aagtccgtctgctcaaagcccatcc

SEQ ID NO: 2598980 - DNA, 25 bp, Homo sapien
caagtccgtctgctcaaagcccatc

SEQ ID NO: 2598981 - DNA, 25 bp, Homo sapien
tcacagtcaccacgtccatgccccg

SEQ ID NO: 2598982 - DNA, 25 bp, Homo sapien
agtcaccacgtccatgccccgcttc

SEQ ID NO: 2598983 - DNA, 25 bp, Homo sapien
tctcacagtcaccacgtccatgccc

SEQ ID NO: 2598984 - DNA, 25 bp, Homo sapien
cctctcacagtcaccacgtccatgc

SEQ ID NO: 2598985 - DNA, 25 bp, Homo sapien
tcccacgcagcgagaaggttaagtg

SEQ ID NO: 2598986 - DNA, 25 bp, Homo sapien
cagcagctcccacgcagcgagaagg

SEQ ID NO: 2598987 - DNA, 25 bp, Homo sapien
cacgcagcgagaaggttaagtgcag

SEQ ID NO: 2598988 - DNA, 25 bp, Homo sapien
agctcccacgcagcgagaaggttaa

SEQ ID NO: 2598989 - DNA, 25 bp, Homo sapien
caccaggatgcaccaggtgctggcc

SEQ ID NO: 2598990 - DNA, 25 bp, Homo sapien
tgacctcccaaaccacaggacgctg

SEQ ID NO: 2598991 - DNA, 25 bp, Homo sapien
aggtaccttgctccctccagcagcc

SEQ ID NO: 2598992 - DNA, 25 bp, Homo sapien
acttcagaaccttccagatctctac

SEQ ID NO: 2598993 - DNA, 25 bp, Homo sapien
ttaggagcctgctaccgcctctcca

SEQ ID NO: 2598994 - DNA, 25 bp, Homo sapien
taggagcctgctaccgcctctccat

SEQ ID NO: 2598995 - DNA, 25 bp, Homo sapien
tggctggcaccgctgacaaagccac

SEQ ID NO: 2598996 - DNA, 25 bp, Homo sapien
gccatggtgccatgggagtaggcct

SEQ ID NO: 2598997 - DNA, 25 bp, Homo sapien
gggagtaggcctggttcatctcctc

SEQ ID NO: 2598998 - DNA, 25 bp, Homo sapien
gctggcaccgctgacaaagccacag

SEQ ID NO: 2598999 - DNA, 25 bp, Homo sapien
gaacgtgtctgggttcctctccgct

SEQ ID NO: 2599000 - DNA, 25 bp, Homo sapien
gtgtctgggttcctctccgcttggg

SEQ ID NO: 2599001 - DNA, 25 bp, Homo sapien
ggaaggctggcgtcagcgtcttcct

SEQ ID NO: 2599002 - DNA, 25 bp, Homo sapien
ccctcactccgggaacgtgtctggg

SEQ ID NO: 2599003 - DNA, 25 bp, Homo sapien
aggtggtgcttaagttcgttgagac

SEQ ID NO: 2599004 - DNA, 25 bp, Homo sapien
tcacgtcgacgactgcccttcgtat

SEQ ID NO: 2599005 - DNA, 25 bp, Homo sapien
aaagctaaagggctgcgactcgttc

SEQ ID NO: 2599006 - DNA, 25 bp, Homo sapien
gcttaagttcgttgagactgcagtg

SEQ ID NO: 2599007 - DNA, 25 bp, Homo sapien
gtcttcccacgaatgcgggccactc

SEQ ID NO: 2599008 - DNA, 25 bp, Homo sapien
cttcccacgaatgcgggccactccc

SEQ ID NO: 2599009 - DNA, 25 bp, Homo sapien
cgtcttcccacgaatgcgggccact

SEQ ID NO: 2599010 - DNA, 25 bp, Homo sapien
agcgtcttcccacgaatgcgggcca

SEQ ID NO: 2599011 - DNA, 25 bp, Homo sapien
gctccatgctctgaacccgcttgcc

SEQ ID NO: 2599012 - DNA, 25 bp, Homo sapien
tccatgctctgaacccgcttgcctt

SEQ ID NO: 2599013 - DNA, 25 bp, Homo sapien
ctcgcagatctgctccatgctctga

SEQ ID NO: 2599014 - DNA, 25 bp, Homo sapien
catgctctgaacccgcttgccttcc

SEQ ID NO: 2599015 - DNA, 25 bp, Homo sapien
cggtacatgttgagaatgtggcagt

SEQ ID NO: 2599016 - DNA, 25 bp, Homo sapien
ggtacatgttgagaatgtggcagtt

SEQ ID NO: 2599017 - DNA, 25 bp, Homo sapien
gtacatgttgagaatgtggcagttg

SEQ ID NO: 2599018 - DNA, 25 bp, Homo sapien
attgtgtggtgcatcatggggccca

SEQ ID NO: 2599019 - DNA, 25 bp, Homo sapien
ctccctggtgaggtgattgtgtggt

SEQ ID NO: 2599020 - DNA, 25 bp, Homo sapien
ccccacgatcactctcaaggacttg

SEQ ID NO: 2599021 - DNA, 25 bp, Homo sapien
ccacgatcactctcaaggacttgaa

SEQ ID NO: 2599022 - DNA, 25 bp, Homo sapien
gctctgtttagaactttctcgtgga

SEQ ID NO: 2599023 - DNA, 25 bp, Homo sapien
acagtgcagtcacggccgaccagga

SEQ ID NO: 2599024 - DNA, 25 bp, Homo sapien
cgaccaggaacgctgccagtgagcg

SEQ ID NO: 2599025 - DNA, 25 bp, Homo sapien
tcctgcgtggactgcatcatagaag

SEQ ID NO: 2599026 - DNA, 25 bp, Homo sapien
ctggcggcgaattccttcacaaatt

SEQ ID NO: 2599027 - DNA, 25 bp, Homo sapien
cgcgcagtcaatcaacgaatctcac

SEQ ID NO: 2599028 - DNA, 25 bp, Homo sapien
atgaaacccatttggttgcaactca

SEQ ID NO: 2599029 - DNA, 25 bp, Homo sapien
tgaaacccatttggttgcaactcag

SEQ ID NO: 2599030 - DNA, 25 bp, Homo sapien
gcaactcagccaccatcgcgcagtc

SEQ ID NO: 2599031 - DNA, 25 bp, Homo sapien
gctctgagcctcgggcgtgggttgg

SEQ ID NO: 2599032 - DNA, 25 bp, Homo sapien
gctcctggagtccgcgaccgctggg

SEQ ID NO: 2599033 - DNA, 25 bp, Homo sapien
ctctgagcctcgggcgtgggttggg

SEQ ID NO: 2599034 - DNA, 25 bp, Homo sapien
gagctcctggagtccgcgaccgctg

SEQ ID NO: 2599035 - DNA, 25 bp, Homo sapien
tctaagctcctcccttgccggagcc

SEQ ID NO: 2599036 - DNA, 25 bp, Homo sapien
ggtgtctaagctcctcccttgccgg

SEQ ID NO: 2599037 - DNA, 25 bp, Homo sapien
gtgtctaagctcctcccttgccgga

SEQ ID NO: 2599038 - DNA, 25 bp, Homo sapien
tgtctaagctcctcccttgccggag

SEQ ID NO: 2599039 - DNA, 25 bp, Homo sapien
aaaaagtctgtattgttggtctcag

SEQ ID NO: 2599040 - DNA, 25 bp, Homo sapien
ttagcacaacaaaaagtctgtattg

SEQ ID NO: 2599041 - DNA, 25 bp, Homo sapien
tagcacaacaaaaagtctgtattgt

SEQ ID NO: 2599042 - DNA, 25 bp, Homo sapien
aacaaaaagtctgtattgttggtct

SEQ ID NO: 2599043 - DNA, 25 bp, Homo sapien
cagagcatccaggagattgaaatcc

SEQ ID NO: 2599044 - DNA, 25 bp, Homo sapien
caggtatttactgctgtccagagca

SEQ ID NO: 2599045 - DNA, 25 bp, Homo sapien
cgtcttctagcaggcggcagtaagt

SEQ ID NO: 2599046 - DNA, 25 bp, Homo sapien
ttttggatagcttgcaggtatttac

SEQ ID NO: 2599047 - DNA, 25 bp, Homo sapien
acaggtcctcgtgctcttgggcgtg

SEQ ID NO: 2599048 - DNA, 25 bp, Homo sapien
atgttccacaggtcctcgtgctctt

SEQ ID NO: 2599049 - DNA, 25 bp, Homo sapien
ccacaggtcctcgtgctcttgggcg

SEQ ID NO: 2599050 - DNA, 25 bp, Homo sapien
ttccacaggtcctcgtgctcttggg

SEQ ID NO: 2599051 - DNA, 25 bp, Homo sapien
ttgagtccagttcgatatccaagga

SEQ ID NO: 2599052 - DNA, 25 bp, Homo sapien
ggactgtacatctcaaccccctgag

SEQ ID NO: 2599053 - DNA, 25 bp, Homo sapien
tccaagctgactttcagatatctca

SEQ ID NO: 2599054 - DNA, 25 bp, Homo sapien
atatctcattgagtccagttcgata

SEQ ID NO: 2599055 - DNA, 25 bp, Homo sapien
taatgtcgcactccacaaactggca

SEQ ID NO: 2599056 - DNA, 25 bp, Homo sapien
tgttatcagtaatgtcgcactccac

SEQ ID NO: 2599057 - DNA, 25 bp, Homo sapien
tatcagtaatgtcgcactccacaaa

SEQ ID NO: 2599058 - DNA, 25 bp, Homo sapien
tgacactggtgttatcagtaatgtc

SEQ ID NO: 2599059 - DNA, 25 bp, Homo sapien
tcaggaattgtaatgcttccaactt

SEQ ID NO: 2599060 - DNA, 25 bp, Homo sapien
ttaaatctgcagctcactttgggca

SEQ ID NO: 2599061 - DNA, 25 bp, Homo sapien
gaaattatagtctgtagccttcagt

SEQ ID NO: 2599062 - DNA, 25 bp, Homo sapien
cactagcgtttgatgttccctgtcc

SEQ ID NO: 2599063 - DNA, 25 bp, Homo sapien
taggtatgtttaccgcagcccaagg

SEQ ID NO: 2599064 - DNA, 25 bp, Homo sapien
gaccctatgggtggcctatctgccc

SEQ ID NO: 2599065 - DNA, 25 bp, Homo sapien
tagtataaccattgctgtcccctgg

SEQ ID NO: 2599066 - DNA, 25 bp, Homo sapien
caaaggtagctggttatgaacgtgc

SEQ ID NO: 2599067 - DNA, 25 bp, Homo sapien
taggtgctggcttcagtgatatatc

SEQ ID NO: 2599068 - DNA, 25 bp, Homo sapien
gaatcccatctgtgagctggacaca

SEQ ID NO: 2599069 - DNA, 25 bp, Homo sapien
tatcagaatcccatctgtgagctgg

SEQ ID NO: 2599070 - DNA, 25 bp, Homo sapien
gatatatcagaatcccatctgtgag

SEQ ID NO: 2599071 - DNA, 25 bp, Homo sapien
agcgtggactgtcgctggagaaacc

SEQ ID NO: 2599072 - DNA, 25 bp, Homo sapien
tccagggcggactgctcataagagt

SEQ ID NO: 2599073 - DNA, 25 bp, Homo sapien
tcataagagtgagacagcgtggact

SEQ ID NO: 2599074 - DNA, 25 bp, Homo sapien
gagttcaacccatgctcgtgcctct

SEQ ID NO: 2599075 - DNA, 25 bp, Homo sapien
tttctgagacactggcaagtcagga

SEQ ID NO: 2599076 - DNA, 25 bp, Homo sapien
tgaagatagcgggtttcaaacgacc

SEQ ID NO: 2599077 - DNA, 25 bp, Homo sapien
tgctcctgagggatccggtcccatt

SEQ ID NO: 2599078 - DNA, 25 bp, Homo sapien
aaatgtcgctccaacaaagctggaa

SEQ ID NO: 2599079 - DNA, 25 bp, Homo sapien
tgcagaaggcgcaatgctctggaaa

SEQ ID NO: 2599080 - DNA, 25 bp, Homo sapien
ctgcagaaggcgcaatgctctggaa

SEQ ID NO: 2599081 - DNA, 25 bp, Homo sapien
gcagaaggcgcaatgctctggaaag

SEQ ID NO: 2599082 - DNA, 25 bp, Homo sapien
taaggtgcctatgtagggtaatacc

SEQ ID NO: 2599083 - DNA, 25 bp, Homo sapien
agcgcagacctgtcctctaggtcca

SEQ ID NO: 2599084 - DNA, 25 bp, Homo sapien
gccaatcagttgaggacaacccgcc

SEQ ID NO: 2599085 - DNA, 25 bp, Homo sapien
cgatttgggcaaaggtaaggtgcct

SEQ ID NO: 2599086 - DNA, 25 bp, Homo sapien
cagtgctttggacaccgggaagtcc

SEQ ID NO: 2599087 - DNA, 25 bp, Homo sapien
gggaagtccacaccgctctgcccct

SEQ ID NO: 2599088 - DNA, 25 bp, Homo sapien
caccgggaagtccacaccgctctgc

SEQ ID NO: 2599089 - DNA, 25 bp, Homo sapien
agtgctttggacaccgggaagtcca

SEQ ID NO: 2599090 - DNA, 25 bp, Homo sapien
agcaagccgaaggagacgcacacag

SEQ ID NO: 2599091 - DNA, 25 bp, Homo sapien
tgagagcagttaacagactacagct

SEQ ID NO: 2599092 - DNA, 25 bp, Homo sapien
cataatgggatggtagtcctgcagc

SEQ ID NO: 2599093 - DNA, 25 bp, Homo sapien
tctttctccactgacgggccgtgtc

SEQ ID NO: 2599094 - DNA, 25 bp, Homo sapien
cctgcagcccggtgatgagaggtct

SEQ ID NO: 2599095 - DNA, 25 bp, Homo sapien
gctgggagtgtttacgagaatacgt

SEQ ID NO: 2599096 - DNA, 25 bp, Homo sapien
gctaggattgtagcgctgcagccca

SEQ ID NO: 2599097 - DNA, 25 bp, Homo sapien
aagaccagcgaggtgtgcagagcct

SEQ ID NO: 2599098 - DNA, 25 bp, Homo sapien
gcaaggcgctcacacgtctttctct

SEQ ID NO: 2599099 - DNA, 25 bp, Homo sapien
tcttcctacagtgacgcgcgttgtc

SEQ ID NO: 2599100 - DNA, 25 bp, Homo sapien
tcctacagcgatgtgatgaaagggc

SEQ ID NO: 2599101 - DNA, 25 bp, Homo sapien
gcgccccgtgcatgctggaattgta

SEQ ID NO: 2599102 - DNA, 25 bp, Homo sapien
tccctgagccagagatatgctgaaa

SEQ ID NO: 2599103 - DNA, 25 bp, Homo sapien
tgatacacactgtccatgaacccgc

SEQ ID NO: 2599104 - DNA, 25 bp, Homo sapien
cagtgactagtgcactctccctgag

SEQ ID NO: 2599105 - DNA, 25 bp, Homo sapien
tatgctgaaattgtactgctgcagc

SEQ ID NO: 2599106 - DNA, 25 bp, Homo sapien
tgtgaccaaagggccaagagaccac

SEQ ID NO: 2599107 - DNA, 25 bp, Homo sapien
ttccccgtgtcgcatactgctttga

SEQ ID NO: 2599108 - DNA, 25 bp, Homo sapien
tgctttgatcccgatgcatcctggg

SEQ ID NO: 2599109 - DNA, 25 bp, Homo sapien
ggagacgcacacagctccgcatctt

SEQ ID NO: 2599110 - DNA, 25 bp, Homo sapien
tcctgtagccctgtgacaaaaggtc

SEQ ID NO: 2599111 - DNA, 25 bp, Homo sapien
ggattgtagtcttccgcctcttcct

SEQ ID NO: 2599112 - DNA, 25 bp, Homo sapien
tgggattgtagtcttccgcctcttc

SEQ ID NO: 2599113 - DNA, 25 bp, Homo sapien
gctgggattgtagtcttccgcctct

SEQ ID NO: 2599114 - DNA, 25 bp, Homo sapien
tggctgggattgtagtcttccgcct

SEQ ID NO: 2599115 - DNA, 25 bp, Homo sapien
gacagacaggattgcacatgaccgt

SEQ ID NO: 2599116 - DNA, 25 bp, Homo sapien
aaagactgggagtgtatgtcaggcc

SEQ ID NO: 2599117 - DNA, 25 bp, Homo sapien
gacagaacctgacttttatgcacat

SEQ ID NO: 2599118 - DNA, 25 bp, Homo sapien
cctgggcatgggcttatcctataac

SEQ ID NO: 2599119 - DNA, 25 bp, Homo sapien
tgtgataggaactacagggactctg

SEQ ID NO: 2599120 - DNA, 25 bp, Homo sapien
tctactgattacagcatcttgcaca

SEQ ID NO: 2599121 - DNA, 25 bp, Homo sapien
tcttgcacatcttgagaataggttc

SEQ ID NO: 2599122 - DNA, 25 bp, Homo sapien
cagtcttctaaacagtgtgcctttc

SEQ ID NO: 2599123 - DNA, 25 bp, Homo sapien
catgctgctatgagcttaggtgtac

SEQ ID NO: 2599124 - DNA, 25 bp, Homo sapien
cattttgagtgaagtgagtcatgct

SEQ ID NO: 2599125 - DNA, 25 bp, Homo sapien
tcattgacgataattcaaacaacac

SEQ ID NO: 2599126 - DNA, 25 bp, Homo sapien
gatcatacggtgattttgagtgtaa

SEQ ID NO: 2599127 - DNA, 25 bp, Homo sapien
cccagcactaattgttgtaaaggca

SEQ ID NO: 2599128 - DNA, 25 bp, Homo sapien
ttggtgccctgttaaaagaaatcac

SEQ ID NO: 2599129 - DNA, 25 bp, Homo sapien
tgtaaaggcagttcatttcccataa

SEQ ID NO: 2599130 - DNA, 25 bp, Homo sapien
gccaaatccagccttatgacgtgtt

SEQ ID NO: 2599131 - DNA, 25 bp, Homo sapien
tagctaagtgaaccagtgagactgg

SEQ ID NO: 2599132 - DNA, 25 bp, Homo sapien
gaaaggctagctaagtgaaccagtg

SEQ ID NO: 2599133 - DNA, 25 bp, Homo sapien
aaggctagctaagtgaaccagtgag

SEQ ID NO: 2599134 - DNA, 25 bp, Homo sapien
ggctagctaagtgaaccagtgagac

SEQ ID NO: 2599135 - DNA, 25 bp, Homo sapien
aacgtgtacttgcaatatttaatgg

SEQ ID NO: 2599136 - DNA, 25 bp, Homo sapien
taatggtatcagtataggaacaaaa

SEQ ID NO: 2599137 - DNA, 25 bp, Homo sapien
gcactatgacactttcttagacact

SEQ ID NO: 2599138 - DNA, 25 bp, Homo sapien
caagattttacgcagggcttgccag

SEQ ID NO: 2599139 - DNA, 25 bp, Homo sapien
tatttgagtaagagcaattgataaa

SEQ ID NO: 2599140 - DNA, 25 bp, Homo sapien
aatatcagacggaaagatattgagt

SEQ ID NO: 2599141 - DNA, 25 bp, Homo sapien
taaaatatcagacggaaagatattg

SEQ ID NO: 2599142 - DNA, 25 bp, Homo sapien
aaattataaaatatcagacggaaag

SEQ ID NO: 2599143 - DNA, 25 bp, Homo sapien
acagtgtaagaagcaagtatttatt

SEQ ID NO: 2599144 - DNA, 25 bp, Homo sapien
gaaacatatgtagggaacagcctgg

SEQ ID NO: 2599145 - DNA, 25 bp, Homo sapien
taatataaacgcaaacccggctcta

SEQ ID NO: 2599146 - DNA, 25 bp, Homo sapien
gaatcagaagtgaaaaccgtcctcc

SEQ ID NO: 2599147 - DNA, 25 bp, Homo sapien
tagggaatacaaggcctccactctc

SEQ ID NO: 2599148 - DNA, 25 bp, Homo sapien
tgtgcaaatggagggagaatcgtca

SEQ ID NO: 2599149 - DNA, 25 bp, Homo sapien
tattgggtggtagacagacactgcc

SEQ ID NO: 2599150 - DNA, 25 bp, Homo sapien
taaccaaatgctcctacagatgaca

SEQ ID NO: 2599151 - DNA, 25 bp, Homo sapien
gatgacacatagtacccatgctttg

SEQ ID NO: 2599152 - DNA, 25 bp, Homo sapien
gccctatggatttgtactttcttag

SEQ ID NO: 2599153 - DNA, 25 bp, Homo sapien
tttcaccttaggtcaattgcctttc

SEQ ID NO: 2599154 - DNA, 25 bp, Homo sapien
tcaggctgagtatattggcttatgc

SEQ ID NO: 2599155 - DNA, 25 bp, Homo sapien
ttgcagttctcatgtgccctatgga

SEQ ID NO: 2599156 - DNA, 25 bp, Homo sapien
ctacacttagctcttaaggtcttgg

SEQ ID NO: 2599157 - DNA, 25 bp, Homo sapien
gactagcagctgttaaatctgggtg

SEQ ID NO: 2599158 - DNA, 25 bp, Homo sapien
tctgtaataaaacacgtgtagaaaa

SEQ ID NO: 2599159 - DNA, 25 bp, Homo sapien
cagttcacattgtaccttgcaatga

SEQ ID NO: 2599160 - DNA, 25 bp, Homo sapien
tgttcctatattgctgtatgcaagt

SEQ ID NO: 2599161 - DNA, 25 bp, Homo sapien
tatattgctgtatgcaagttattca

SEQ ID NO: 2599162 - DNA, 25 bp, Homo sapien
ctctcaggacatcgtcaggtgtata

SEQ ID NO: 2599163 - DNA, 25 bp, Homo sapien
atagtacatatttgcataacaatcc

SEQ ID NO: 2599164 - DNA, 25 bp, Homo sapien
ttttacctcagtacagtaagtagca

SEQ ID NO: 2599165 - DNA, 25 bp, Homo sapien
ttacctcagtacagtaagtagcatg

SEQ ID NO: 2599166 - DNA, 25 bp, Homo sapien
tttacctcagtacagtaagtagcat

SEQ ID NO: 2599167 - DNA, 25 bp, Homo sapien
atttttacctcagtacagtaagtag

SEQ ID NO: 2599168 - DNA, 25 bp, Homo sapien
tgaactatatccagtcacgggtgct

SEQ ID NO: 2599169 - DNA, 25 bp, Homo sapien
caaatgtgtggcaagaagagcctca

SEQ ID NO: 2599170 - DNA, 25 bp, Homo sapien
tcagaggtcagtacactagagccac

SEQ ID NO: 2599171 - DNA, 25 bp, Homo sapien
cttagagacacattgcaggccaggc

SEQ ID NO: 2599172 - DNA, 25 bp, Homo sapien
catcactgaaccagataggagcagg

SEQ ID NO: 2599173 - DNA, 25 bp, Homo sapien
tagaacggcttgacttgacccttgg

SEQ ID NO: 2599174 - DNA, 25 bp, Homo sapien
aatgcaccttacagacacagtggag

SEQ ID NO: 2599175 - DNA, 25 bp, Homo sapien
cacagtggagcagagcgtagcagct

SEQ ID NO: 2599176 - DNA, 25 bp, Homo sapien
atttcttcagcagaatgagcgtagc

SEQ ID NO: 2599177 - DNA, 25 bp, Homo sapien
cagcttactgttggaaatgctatca

SEQ ID NO: 2599178 - DNA, 25 bp, Homo sapien
tgagcgtagcatgtctcccaggtct

SEQ ID NO: 2599179 - DNA, 25 bp, Homo sapien
aatgctatcagttgtaaagataggg

SEQ ID NO: 2599180 - DNA, 25 bp, Homo sapien
agggatagatactttggcttttctt

SEQ ID NO: 2599181 - DNA, 25 bp, Homo sapien
agctgggactttgcgcctcctggaa

SEQ ID NO: 2599182 - DNA, 25 bp, Homo sapien
gaattataagatataagccccttat

SEQ ID NO: 2599183 - DNA, 25 bp, Homo sapien
gaggtagattaattgtcaaattaca

SEQ ID NO: 2599184 - DNA, 25 bp, Homo sapien
tgaatgactaactggtaagtagaag

SEQ ID NO: 2599185 - DNA, 25 bp, Homo sapien
agaccatcgactaaaagctaaggcc

SEQ ID NO: 2599186 - DNA, 25 bp, Homo sapien
gaagtcttagaccatcgactaaaag

SEQ ID NO: 2599187 - DNA, 25 bp, Homo sapien
tgaataatttttgctggattcttca

SEQ ID NO: 2599188 - DNA, 25 bp, Homo sapien
tgaaggctcagttgattattcctgg

SEQ ID NO: 2599189 - DNA, 25 bp, Homo sapien
cactgaaggctcagttgattattcc

SEQ ID NO: 2599190 - DNA, 25 bp, Homo sapien
gaccactgaaggctcagttgattat

SEQ ID NO: 2599191 - DNA, 25 bp, Homo sapien
gaggaccactgaaggctcagttgat

SEQ ID NO: 2599192 - DNA, 25 bp, Homo sapien
cagatgcagttgaggtagagataga

SEQ ID NO: 2599193 - DNA, 25 bp, Homo sapien
ccaatcatggaaggagcctttgtca

SEQ ID NO: 2599194 - DNA, 25 bp, Homo sapien
gatatagagccttggtaagctggaa

SEQ ID NO: 2599195 - DNA, 25 bp, Homo sapien
ttctagacttggtctaagaagttac

SEQ ID NO: 2599196 - DNA, 25 bp, Homo sapien
ccatggtaagaaggaccgacgactc

SEQ ID NO: 2599197 - DNA, 25 bp, Homo sapien
gaatattatcaacaggtgagagccc

SEQ ID NO: 2599198 - DNA, 25 bp, Homo sapien
tactcatgggaaggccgtaggacaa

SEQ ID NO: 2599199 - DNA, 25 bp, Homo sapien
tgtctgtagagacccctatgtggct

SEQ ID NO: 2599200 - DNA, 25 bp, Homo sapien
tgagacttcatgataaataaaaaag

SEQ ID NO: 2599201 - DNA, 25 bp, Homo sapien
gagacttcatgataaataaaaaaga

SEQ ID NO: 2599202 - DNA, 25 bp, Homo sapien
agagtgagacttcatgataaataaa

SEQ ID NO: 2599203 - DNA, 25 bp, Homo sapien
agtgagacttcatgataaataaaaa

SEQ ID NO: 2599204 - DNA, 25 bp, Homo sapien
ctacttcctagggaatgtgttaggt

SEQ ID NO: 2599205 - DNA, 25 bp, Homo sapien
gtctcaggtactccatcattgcagt

SEQ ID NO: 2599206 - DNA, 25 bp, Homo sapien
tgtagtgtcacctgtagataatgca

SEQ ID NO: 2599207 - DNA, 25 bp, Homo sapien
cattgtgtattataacccctaggtg

SEQ ID NO: 2599208 - DNA, 25 bp, Homo sapien
ggtagcatgggccacaactcaaaca

SEQ ID NO: 2599209 - DNA, 25 bp, Homo sapien
tacaacacaatggaccaagggctct

SEQ ID NO: 2599210 - DNA, 25 bp, Homo sapien
caaacctgataagtgggacggtgcc

SEQ ID NO: 2599211 - DNA, 25 bp, Homo sapien
cagtagctgagattttccgtggacc

SEQ ID NO: 2599212 - DNA, 25 bp, Homo sapien
ggagcactaccgaacaaatctgata

SEQ ID NO: 2599213 - DNA, 25 bp, Homo sapien
ggctatttattatgacagtgtaact

SEQ ID NO: 2599214 - DNA, 25 bp, Homo sapien
tgtggctatttattatgacagtgta

SEQ ID NO: 2599215 - DNA, 25 bp, Homo sapien
cagtgtaacttctcctctaattgac

SEQ ID NO: 2599216 - DNA, 25 bp, Homo sapien
tattatgacagtgtaacttctcctc

SEQ ID NO: 2599217 - DNA, 25 bp, Homo sapien
gcaaaccagtaggaagtcgaatcct

SEQ ID NO: 2599218 - DNA, 25 bp, Homo sapien
taccctcccaagtgcaaaccagtag

SEQ ID NO: 2599219 - DNA, 25 bp, Homo sapien
cagaatattataaatacctctttgc

SEQ ID NO: 2599220 - DNA, 25 bp, Homo sapien
taaataaacttctagccagactaat

SEQ ID NO: 2599221 - DNA, 25 bp, Homo sapien
tggcatgtccacatcatggaatacg

SEQ ID NO: 2599222 - DNA, 25 bp, Homo sapien
taagtgtaaaagttcaaggccagag

SEQ ID NO: 2599223 - DNA, 25 bp, Homo sapien
gagtagaaaagctaacatcgcatgt

SEQ ID NO: 2599224 - DNA, 25 bp, Homo sapien
catagcatactttgtgccgtttaca

SEQ ID NO: 2599225 - DNA, 25 bp, Homo sapien
aaagttgagagtgctaaatacctgc

SEQ ID NO: 2599226 - DNA, 25 bp, Homo sapien
tcctgggacagagtacactggtgga

SEQ ID NO: 2599227 - DNA, 25 bp, Homo sapien
tttcggaagtcaagcagtcatgcca

SEQ ID NO: 2599228 - DNA, 25 bp, Homo sapien
tattgcgtaacgataaagggttcaa

SEQ ID NO: 2599229 - DNA, 25 bp, Homo sapien
taaaaagtgtcacatgtacagcaat

SEQ ID NO: 2599230 - DNA, 25 bp, Homo sapien
ccagcctattgatggtaaattgaat

SEQ ID NO: 2599231 - DNA, 25 bp, Homo sapien
catgtccagcctattgatggtaaat

SEQ ID NO: 2599232 - DNA, 25 bp, Homo sapien
acatgtacagcaatactacttagca

SEQ ID NO: 2599233 - DNA, 25 bp, Homo sapien
tattccagatagaccacctgttaag

SEQ ID NO: 2599234 - DNA, 25 bp, Homo sapien
gttaacatgtcactactaccgaaag

SEQ ID NO: 2599235 - DNA, 25 bp, Homo sapien
cagaggatttcaacaacacgatagg

SEQ ID NO: 2599236 - DNA, 25 bp, Homo sapien
gaagttaaaaacactagcatgtcaa

SEQ ID NO: 2599237 - DNA, 25 bp, Homo sapien
actgttccaagaattcacaataagg

SEQ ID NO: 2599238 - DNA, 25 bp, Homo sapien
ccttaccttgcaccaataaaaacat

SEQ ID NO: 2599239 - DNA, 25 bp, Homo sapien
gatgaaacagatgagtgttcggaca

SEQ ID NO: 2599240 - DNA, 25 bp, Homo sapien
tgttcggacataagacatcatgggt

SEQ ID NO: 2599241 - DNA, 25 bp, Homo sapien
gtgatctagagactaacgtgatttt

SEQ ID NO: 2599242 - DNA, 25 bp, Homo sapien
tagagactaacgtgatttttatcaa

SEQ ID NO: 2599243 - DNA, 25 bp, Homo sapien
ccaaagtgatctagagactaacgtg

SEQ ID NO: 2599244 - DNA, 25 bp, Homo sapien
gatctagagactaacgtgattttta

SEQ ID NO: 2599245 - DNA, 25 bp, Homo sapien
tatactagacccctgtgccttgcca

SEQ ID NO: 2599246 - DNA, 25 bp, Homo sapien
agaaaaattatactagacccctgtg

SEQ ID NO: 2599247 - DNA, 25 bp, Homo sapien
tagactaatgtgcccaagaagccca

SEQ ID NO: 2599248 - DNA, 25 bp, Homo sapien
actaatgtgcccaagaagcccagaa

SEQ ID NO: 2599249 - DNA, 25 bp, Homo sapien
gaaaggatatcactgtgtcaaaaag

SEQ ID NO: 2599250 - DNA, 25 bp, Homo sapien
ggtaccgcctcactcccatttagaa

SEQ ID NO: 2599251 - DNA, 25 bp, Homo sapien
tactcctgcatgtatatacaaaaga

SEQ ID NO: 2599252 - DNA, 25 bp, Homo sapien
gaaaatactatggaggtttctgaaa

SEQ ID NO: 2599253 - DNA, 25 bp, Homo sapien
gttatctcaaattacaaaatagcta

SEQ ID NO: 2599254 - DNA, 25 bp, Homo sapien
ctgccatccatacattttgggagaa

SEQ ID NO: 2599255 - DNA, 25 bp, Homo sapien
tttgttacacggcagaataataata

SEQ ID NO: 2599256 - DNA, 25 bp, Homo sapien
tatctcaaattacaaaatagctaaa

SEQ ID NO: 2599257 - DNA, 25 bp, Homo sapien
ggtgaagcttcatgacaattggtct

SEQ ID NO: 2599258 - DNA, 25 bp, Homo sapien
gggatgtaacatcaacgaatcagac

SEQ ID NO: 2599259 - DNA, 25 bp, Homo sapien
gacaattggtctcggcaataatttg

SEQ ID NO: 2599260 - DNA, 25 bp, Homo sapien
tatgtacactgtagcattactcaca

SEQ ID NO: 2599261 - DNA, 25 bp, Homo sapien
acaaacagggcacgtatattcactg

SEQ ID NO: 2599262 - DNA, 25 bp, Homo sapien
aacaaacagggcacgtatattcact

SEQ ID NO: 2599263 - DNA, 25 bp, Homo sapien
tcaacaaacagggcacgtatattca

SEQ ID NO: 2599264 - DNA, 25 bp, Homo sapien
caacaaacagggcacgtatattcac

SEQ ID NO: 2599265 - DNA, 25 bp, Homo sapien
atagtctgagatagcatcgaaagtt

SEQ ID NO: 2599266 - DNA, 25 bp, Homo sapien
aactgtataattacacctatgtaaa

SEQ ID NO: 2599267 - DNA, 25 bp, Homo sapien
agtctgagatagcatcgaaagttct

SEQ ID NO: 2599268 - DNA, 25 bp, Homo sapien
agatagtttctgaatggggtgacct

SEQ ID NO: 2599269 - DNA, 25 bp, Homo sapien
tagccaagatcagagtagagctgaa

SEQ ID NO: 2599270 - DNA, 25 bp, Homo sapien
agccaagatcagagtagagctgaag

SEQ ID NO: 2599271 - DNA, 25 bp, Homo sapien
aaacctgaaagctagcagaaaacaa

SEQ ID NO: 2599272 - DNA, 25 bp, Homo sapien
gccaagatcagagtagagctgaagg

SEQ ID NO: 2599273 - DNA, 25 bp, Homo sapien
cttgaggtaaagaggagatagtaca

SEQ ID NO: 2599274 - DNA, 25 bp, Homo sapien
actcgcattacaactcccattcgga

SEQ ID NO: 2599275 - DNA, 25 bp, Homo sapien
tgatgaacactgtgcaaacatcctc

SEQ ID NO: 2599276 - DNA, 25 bp, Homo sapien
tgcatccaccacaatggaattggct

SEQ ID NO: 2599277 - DNA, 25 bp, Homo sapien
gtaaagcacaatggcacacgtttat

SEQ ID NO: 2599278 - DNA, 25 bp, Homo sapien
taaagcacaatggcacacgtttatc

SEQ ID NO: 2599279 - DNA, 25 bp, Homo sapien
aaagcacaatggcacacgtttatct

SEQ ID NO: 2599280 - DNA, 25 bp, Homo sapien
cttagaaggtacctttctgctgttc

SEQ ID NO: 2599281 - DNA, 25 bp, Homo sapien
catcttagaaggtacctttctgctg

SEQ ID NO: 2599282 - DNA, 25 bp, Homo sapien
gtccagccaacgtgcccgctgtctt

SEQ ID NO: 2599283 - DNA, 25 bp, Homo sapien
cagccagccgagccctcaggattgt

SEQ ID NO: 2599284 - DNA, 25 bp, Homo sapien
tctagctacactgggggggatgtgg

SEQ ID NO: 2599285 - DNA, 25 bp, Homo sapien
tagctacactgggggggatgtggag

SEQ ID NO: 2599286 - DNA, 25 bp, Homo sapien
ctctcaacacatccgaatgtcagaa

SEQ ID NO: 2599287 - DNA, 25 bp, Homo sapien
aaactctcaacacatccgaatgtca

SEQ ID NO: 2599288 - DNA, 25 bp, Homo sapien
tttgggttcccaagatgtgggtgtg

SEQ ID NO: 2599289 - DNA, 25 bp, Homo sapien
caagtttttgggttcccaagatgtg

SEQ ID NO: 2599290 - DNA, 25 bp, Homo sapien
gagggcatctatactagccttgggc

SEQ ID NO: 2599291 - DNA, 25 bp, Homo sapien
gggcatctatactagccttgggcag

SEQ ID NO: 2599292 - DNA, 25 bp, Homo sapien
gctgccacgggaaacataagtgcat

SEQ ID NO: 2599293 - DNA, 25 bp, Homo sapien
gaatgggaggttcggcatgcacatc

SEQ ID NO: 2599294 - DNA, 25 bp, Homo sapien
gacatctttagagggtaagcacttg

SEQ ID NO: 2599295 - DNA, 25 bp, Homo sapien
aatcatggtcctcggttcaaaacag

SEQ ID NO: 2599296 - DNA, 25 bp, Homo sapien
ctgagacttaggtgacaggcctgca

SEQ ID NO: 2599297 - DNA, 25 bp, Homo sapien
tgagacttaggtgacaggcctgcag

SEQ ID NO: 2599298 - DNA, 25 bp, Homo sapien
ctttccttctccagccatggtctgg

SEQ ID NO: 2599299 - DNA, 25 bp, Homo sapien
tccttctccagccatggtctggaag

SEQ ID NO: 2599300 - DNA, 25 bp, Homo sapien
ccttctccagccatggtctggaaga

SEQ ID NO: 2599301 - DNA, 25 bp, Homo sapien
tctccagccatggtctggaagaaat

SEQ ID NO: 2599302 - DNA, 25 bp, Homo sapien
cagaatactctaaattgttatcatc

SEQ ID NO: 2599303 - DNA, 25 bp, Homo sapien
taattaaagcatacacaaacaacaa

SEQ ID NO: 2599304 - DNA, 25 bp, Homo sapien
tacaagaggttttacataagtctca

SEQ ID NO: 2599305 - DNA, 25 bp, Homo sapien
tgttatcatcttaaactagactatt

SEQ ID NO: 2599306 - DNA, 25 bp, Homo sapien
aaatgaacaataccacaggaaagac

SEQ ID NO: 2599307 - DNA, 25 bp, Homo sapien
agaagcaaacttaaaatggacagaa

SEQ ID NO: 2599308 - DNA, 25 bp, Homo sapien
attatctactaaacagatacttctg

SEQ ID NO: 2599309 - DNA, 25 bp, Homo sapien
tgcttacttatcactaccttacaaa

SEQ ID NO: 2599310 - DNA, 25 bp, Homo sapien
aacaagaatggatctgttatatatt

SEQ ID NO: 2599311 - DNA, 25 bp, Homo sapien
acaagaatggatctgttatatatta

SEQ ID NO: 2599312 - DNA, 25 bp, Homo sapien
agaatggatctgttatatattaaaa

SEQ ID NO: 2599313 - DNA, 25 bp, Homo sapien
aataaggtgactacataactggaac

SEQ ID NO: 2599314 - DNA, 25 bp, Homo sapien
ctaaagtggctctagtgtcctgggt

SEQ ID NO: 2599315 - DNA, 25 bp, Homo sapien
ggtcgattagaggttccacttgcca

SEQ ID NO: 2599316 - DNA, 25 bp, Homo sapien
aatttgcaagggaaagctgttctcc

SEQ ID NO: 2599317 - DNA, 25 bp, Homo sapien
acaaagacccgccaaacgccagaag

SEQ ID NO: 2599318 - DNA, 25 bp, Homo sapien
ctcccaaagcggaggaggcgaaaga

SEQ ID NO: 2599319 - DNA, 25 bp, Homo sapien
gagacaaagacccgccaaacgccag

SEQ ID NO: 2599320 - DNA, 25 bp, Homo sapien
ggatcccaagttcctgtgccagcgc

SEQ ID NO: 2599321 - DNA, 25 bp, Homo sapien
ggtctgttgtataatgcatcttagc

SEQ ID NO: 2599322 - DNA, 25 bp, Homo sapien
ctgggtctgttgtataatgcatctt

SEQ ID NO: 2599323 - DNA, 25 bp, Homo sapien
gggtctgttgtataatgcatcttag

SEQ ID NO: 2599324 - DNA, 25 bp, Homo sapien
tctgttgtataatgcatcttagcag

SEQ ID NO: 2599325 - DNA, 25 bp, Homo sapien
aggctcagggcctcgcagaagagct

SEQ ID NO: 2599326 - DNA, 25 bp, Homo sapien
tcagggcctcgcagaagagctcaca

SEQ ID NO: 2599327 - DNA, 25 bp, Homo sapien
gggcctcgcagaagagctcacagcc

SEQ ID NO: 2599328 - DNA, 25 bp, Homo sapien
ggctcagggcctcgcagaagagctc

SEQ ID NO: 2599329 - DNA, 25 bp, Homo sapien
agatgtccgagttgaagtgagtgtt

SEQ ID NO: 2599330 - DNA, 25 bp, Homo sapien
gcttgatgggaggtaggcccactcc

SEQ ID NO: 2599331 - DNA, 25 bp, Homo sapien
tgagtgttgaatgccacacagctga

SEQ ID NO: 2599332 - DNA, 25 bp, Homo sapien
ctcctggttacaagggtcagctgtg

SEQ ID NO: 2599333 - DNA, 25 bp, Homo sapien
tcaggtgacacactgtcgacagggc

SEQ ID NO: 2599334 - DNA, 25 bp, Homo sapien
aggtgacacactgtcgacagggccc

SEQ ID NO: 2599335 - DNA, 25 bp, Homo sapien
gtgacacactgtcgacagggcccat

SEQ ID NO: 2599336 - DNA, 25 bp, Homo sapien
ctcaggtgacacactgtcgacaggg

SEQ ID NO: 2599337 - DNA, 25 bp, Homo sapien
cagccaatgaggaaacccgaggaca

SEQ ID NO: 2599338 - DNA, 25 bp, Homo sapien
caggaacataggagtatctgcatag

SEQ ID NO: 2599339 - DNA, 25 bp, Homo sapien
tcacatctgagtagacgtacttggt

SEQ ID NO: 2599340 - DNA, 25 bp, Homo sapien
tggtccgcaactcacaactttttat

SEQ ID NO: 2599341 - DNA, 25 bp, Homo sapien
cctgtgtcttaaaacctgcccctgt

SEQ ID NO: 2599342 - DNA, 25 bp, Homo sapien
tcctgtgtcttaaaacctgcccctg

SEQ ID NO: 2599343 - DNA, 25 bp, Homo sapien
ctgtgtcttaaaacctgcccctgtg

SEQ ID NO: 2599344 - DNA, 25 bp, Homo sapien
ctcctctcccatgtcaactctttac

SEQ ID NO: 2599345 - DNA, 25 bp, Homo sapien
cctcctctcccatgtcaactcttta

SEQ ID NO: 2599346 - DNA, 25 bp, Homo sapien
ttctggaggctggtcccgcaagatt

SEQ ID NO: 2599347 - DNA, 25 bp, Homo sapien
tccttcaaccagcaactgtttgatg

SEQ ID NO: 2599348 - DNA, 25 bp, Homo sapien
cagggctacgggatgaaacagtgca

SEQ ID NO: 2599349 - DNA, 25 bp, Homo sapien
tgcaccacaggctctgttctggagg

SEQ ID NO: 2599350 - DNA, 25 bp, Homo sapien
tctgtgtgcaaactgttataacggc

SEQ ID NO: 2599351 - DNA, 25 bp, Homo sapien
tacagaaccgaagggccaacaagta

SEQ ID NO: 2599352 - DNA, 25 bp, Homo sapien
tactagtgatgatgtcaagcaactg

SEQ ID NO: 2599353 - DNA, 25 bp, Homo sapien
tacataagcacactctaggacccag

SEQ ID NO: 2599354 - DNA, 25 bp, Homo sapien
gaatcttccttcaattcagatgcaa

SEQ ID NO: 2599355 - DNA, 25 bp, Homo sapien
gctgtagagcattctgtgaccctga

SEQ ID NO: 2599356 - DNA, 25 bp, Homo sapien
gactgagcgtgattggaattctgca

SEQ ID NO: 2599357 - DNA, 25 bp, Homo sapien
gatgcaactaatctcctccttggtg

SEQ ID NO: 2599358 - DNA, 25 bp, Homo sapien
agacacacagaggtcaatccaaatt

SEQ ID NO: 2599359 - DNA, 25 bp, Homo sapien
tgttgtgtgctaggaagacacacag

SEQ ID NO: 2599360 - DNA, 25 bp, Homo sapien
agctgacagcatgcgatgaaggatc

SEQ ID NO: 2599361 - DNA, 25 bp, Homo sapien
gcgatgaaggatcctccaggttccc

SEQ ID NO: 2599362 - DNA, 25 bp, Homo sapien
cagcatgcgatgaaggatcctccag

SEQ ID NO: 2599363 - DNA, 25 bp, Homo sapien
caggagctgacagcatgcgatgaag

SEQ ID NO: 2599364 - DNA, 25 bp, Homo sapien
ctctttgtgaaaagactcagaggca

SEQ ID NO: 2599365 - DNA, 25 bp, Homo sapien
tgacaactgcgcaggtgtggaaagt

SEQ ID NO: 2599366 - DNA, 25 bp, Homo sapien
ttagcagaggaggttataacgggac

SEQ ID NO: 2599367 - DNA, 25 bp, Homo sapien
tataacgggacaagtgtggctgcag

SEQ ID NO: 2599368 - DNA, 25 bp, Homo sapien
caggttgtaaggcattggaaccctg

SEQ ID NO: 2599369 - DNA, 25 bp, Homo sapien
ctcacaggggcaggttgtaaggcat

SEQ ID NO: 2599370 - DNA, 25 bp, Homo sapien
tcacaggggcaggttgtaaggcatt

SEQ ID NO: 2599371 - DNA, 25 bp, Homo sapien
gggcaggttgtaaggcattggaacc

SEQ ID NO: 2599372 - DNA, 25 bp, Homo sapien
acaccattcttgctacctcatactg

SEQ ID NO: 2599373 - DNA, 25 bp, Homo sapien
tcttgctacctcatactgcttgtgt

SEQ ID NO: 2599374 - DNA, 25 bp, Homo sapien
ccagagatggcattgctggatgtga

SEQ ID NO: 2599375 - DNA, 25 bp, Homo sapien
cattcttgctacctcatactgcttg

SEQ ID NO: 2599376 - DNA, 25 bp, Homo sapien
gatcatcacctgatatttgtggcag

SEQ ID NO: 2599377 - DNA, 25 bp, Homo sapien
ggtgatcatcacctgatatttgtgg

SEQ ID NO: 2599378 - DNA, 25 bp, Homo sapien
tgagagtgtggcagaggtgatcatc

SEQ ID NO: 2599379 - DNA, 25 bp, Homo sapien
cagaggtgatcatcacctgatattt

SEQ ID NO: 2599380 - DNA, 25 bp, Homo sapien
tttttcatcctaactcaggcttgca

SEQ ID NO: 2599381 - DNA, 25 bp, Homo sapien
tttcatcctaactcaggcttgcagt

SEQ ID NO: 2599382 - DNA, 25 bp, Homo sapien
catcctaactcaggcttgcagtaaa

SEQ ID NO: 2599383 - DNA, 25 bp, Homo sapien
tcatcctaactcaggcttgcagtaa

SEQ ID NO: 2599384 - DNA, 25 bp, Homo sapien
aaggagatttcatccttccaccttg

SEQ ID NO: 2599385 - DNA, 25 bp, Homo sapien
tacagacacgtaccgcaacacccaa

SEQ ID NO: 2599386 - DNA, 25 bp, Homo sapien
cagtgtacagcagtatctgtttagt

SEQ ID NO: 2599387 - DNA, 25 bp, Homo sapien
ggagatgacattcagtgtacagcag

SEQ ID NO: 2599388 - DNA, 25 bp, Homo sapien
cttggtgagacgcagaaaggatcca

SEQ ID NO: 2599389 - DNA, 25 bp, Homo sapien
gaaagaccaggtttgcaacggagcc

SEQ ID NO: 2599390 - DNA, 25 bp, Homo sapien
ttggcataggccttgcagcactgaa

SEQ ID NO: 2599391 - DNA, 25 bp, Homo sapien
gatagtttgggtactcgtctggaca

SEQ ID NO: 2599392 - DNA, 25 bp, Homo sapien
tcatccatataaggcctcatgagca

SEQ ID NO: 2599393 - DNA, 25 bp, Homo sapien
ggaactcatccatataaggcctcat

SEQ ID NO: 2599394 - DNA, 25 bp, Homo sapien
atgtcaggaactcatccatataagg

SEQ ID NO: 2599395 - DNA, 25 bp, Homo sapien
tcatgtcaggaactcatccatataa

SEQ ID NO: 2599396 - DNA, 25 bp, Homo sapien
tcaagctctacaggcactaggcagt

SEQ ID NO: 2599397 - DNA, 25 bp, Homo sapien
gtgcatggtcccctcaagctctaca

SEQ ID NO: 2599398 - DNA, 25 bp, Homo sapien
atggatctggtgcatggtcccctca

SEQ ID NO: 2599399 - DNA, 25 bp, Homo sapien
gctctacaggcactaggcagtcagc

SEQ ID NO: 2599400 - DNA, 25 bp, Homo sapien
aaaactgatattggagacgctggag

SEQ ID NO: 2599401 - DNA, 25 bp, Homo sapien
taaaactgatattggagacgctgga

SEQ ID NO: 2599402 - DNA, 25 bp, Homo sapien
aaactgatattggagacgctggagc

SEQ ID NO: 2599403 - DNA, 25 bp, Homo sapien
ggtgttgactccctccttatgtgtg

SEQ ID NO: 2599404 - DNA, 25 bp, Homo sapien
gtgttgactccctccttatgtgtgg

SEQ ID NO: 2599405 - DNA, 25 bp, Homo sapien
tgttgactccctccttatgtgtgga

SEQ ID NO: 2599406 - DNA, 25 bp, Homo sapien
ttatgcagttatcagtgatgttgag

SEQ ID NO: 2599407 - DNA, 25 bp, Homo sapien
aaccctttgttatttgaaggtgatg

SEQ ID NO: 2599408 - DNA, 25 bp, Homo sapien
taaaaacatgccattgtcatttctg

SEQ ID NO: 2599409 - DNA, 25 bp, Homo sapien
tatttgcctagctagtgttccatct

SEQ ID NO: 2599410 - DNA, 25 bp, Homo sapien
cagatgtgcatcacaaaaaccagct

SEQ ID NO: 2599411 - DNA, 25 bp, Homo sapien
gaaatgcctttgtttggccaggcac

SEQ ID NO: 2599412 - DNA, 25 bp, Homo sapien
agcatgaccaagatggacaaactct

SEQ ID NO: 2599413 - DNA, 25 bp, Homo sapien
ccaacaatgtcggaggcagctgtgg

SEQ ID NO: 2599414 - DNA, 25 bp, Homo sapien
taaaggaacaagaacgacctagcat

SEQ ID NO: 2599415 - DNA, 25 bp, Homo sapien
agctcctgattgatcccgggccaaa

SEQ ID NO: 2599416 - DNA, 25 bp, Homo sapien
gatctggtgcattccggtcgacact

SEQ ID NO: 2599417 - DNA, 25 bp, Homo sapien
gaataattacttcagcccctgagtg

SEQ ID NO: 2599418 - DNA, 25 bp, Homo sapien
tcttgggccaagctaagcagcatct

SEQ ID NO: 2599419 - DNA, 25 bp, Homo sapien
cctttgtgttcacgctccttaatct

SEQ ID NO: 2599420 - DNA, 25 bp, Homo sapien
ccaacctcacctttgtgttcacgct

SEQ ID NO: 2599421 - DNA, 25 bp, Homo sapien
ttgtgttcacgctccttaatctcct

SEQ ID NO: 2599422 - DNA, 25 bp, Homo sapien
ctcacctttgtgttcacgctcctta

SEQ ID NO: 2599423 - DNA, 25 bp, Homo sapien
tattggcacagttatatagtcattt

SEQ ID NO: 2599424 - DNA, 25 bp, Homo sapien
attgatgtcgcgaattacatcattt

SEQ ID NO: 2599425 - DNA, 25 bp, Homo sapien
tgttatctcaactacatagcagaat

SEQ ID NO: 2599426 - DNA, 25 bp, Homo sapien
cgaattacatcattttgtattgtga

SEQ ID NO: 2599427 - DNA, 25 bp, Homo sapien
gatcaagtgcgaaatcaaactccag

SEQ ID NO: 2599428 - DNA, 25 bp, Homo sapien
gaactctctatcgttatgcaatgcc

SEQ ID NO: 2599429 - DNA, 25 bp, Homo sapien
tactattattgcgtggctacttgag

SEQ ID NO: 2599430 - DNA, 25 bp, Homo sapien
cctagagtatattctgtgagcgatg

SEQ ID NO: 2599431 - DNA, 25 bp, Homo sapien
cttcaactatcattgtgttctcagc

SEQ ID NO: 2599432 - DNA, 25 bp, Homo sapien
gagagaaacaggatctcaggttctt

SEQ ID NO: 2599433 - DNA, 25 bp, Homo sapien
tcaggttcttcttcaactatcattg

SEQ ID NO: 2599434 - DNA, 25 bp, Homo sapien
ggatctcaggttcttcttcaactat

SEQ ID NO: 2599435 - DNA, 25 bp, Homo sapien
gctgtttgaactgggtgacctcgac

SEQ ID NO: 2599436 - DNA, 25 bp, Homo sapien
tcagcgtaatgtagagaatgcctgc

SEQ ID NO: 2599437 - DNA, 25 bp, Homo sapien
tactcataagtgtcttccagccctg

SEQ ID NO: 2599438 - DNA, 25 bp, Homo sapien
aaatgagctatgctccacctcagcg

SEQ ID NO: 2599439 - DNA, 25 bp, Homo sapien
tagtgctcctgcattgggccataga

SEQ ID NO: 2599440 - DNA, 25 bp, Homo sapien
ccatagagttagtgatggcctggag

SEQ ID NO: 2599441 - DNA, 25 bp, Homo sapien
tgatttgttccatagtgctcctgca

SEQ ID NO: 2599442 - DNA, 25 bp, Homo sapien
tcaagatacctgatttgttccatag

SEQ ID NO: 2599443 - DNA, 25 bp, Homo sapien
gctgcattcagattgatgaggagct

SEQ ID NO: 2599444 - DNA, 25 bp, Homo sapien
gcttcttgatgtggccaactcctcc

SEQ ID NO: 2599445 - DNA, 25 bp, Homo sapien
aaaagaccaggtgcactaagccagc

SEQ ID NO: 2599446 - DNA, 25 bp, Homo sapien
caggtgcactaagccagcaaccaca

SEQ ID NO: 2599447 - DNA, 25 bp, Homo sapien
ccataagggaggttcttccccacag

SEQ ID NO: 2599448 - DNA, 25 bp, Homo sapien
cccacagtgtttagtcttccgacgc

SEQ ID NO: 2599449 - DNA, 25 bp, Homo sapien
gctggtatagcctgacatgatgaca

SEQ ID NO: 2599450 - DNA, 25 bp, Homo sapien
taatattccataagggaggttcttc

SEQ ID NO: 2599451 - DNA, 25 bp, Homo sapien
gaatcacttgctaaggtgaacccca

SEQ ID NO: 2599452 - DNA, 25 bp, Homo sapien
gaattctgtgagtgtcctaataggc

SEQ ID NO: 2599453 - DNA, 25 bp, Homo sapien
gagtgtcctaataggctggaatcac

SEQ ID NO: 2599454 - DNA, 25 bp, Homo sapien
ggctggaatcacttgctaaggtgaa

SEQ ID NO: 2599455 - DNA, 25 bp, Homo sapien
gaaccatgggcaccgagagtgcaca

SEQ ID NO: 2599456 - DNA, 25 bp, Homo sapien
gagagtgcacactgcccactagagt

SEQ ID NO: 2599457 - DNA, 25 bp, Homo sapien
gcacactgcccactagagttccatg

SEQ ID NO: 2599458 - DNA, 25 bp, Homo sapien
tctgaaaaactgtggcgttgaacca

SEQ ID NO: 2599459 - DNA, 25 bp, Homo sapien
tcaaaagtcagaacaacggcatggt

SEQ ID NO: 2599460 - DNA, 25 bp, Homo sapien
taaaggcaggcaattacatgcacca

SEQ ID NO: 2599461 - DNA, 25 bp, Homo sapien
tatatatggtttccccagatggtaa

SEQ ID NO: 2599462 - DNA, 25 bp, Homo sapien
gctacagtatagcttacaagggcat

SEQ ID NO: 2599463 - DNA, 25 bp, Homo sapien
ttttctagctcgtttcaattcttca

SEQ ID NO: 2599464 - DNA, 25 bp, Homo sapien
gacgatatcttcaacttgtactcga

SEQ ID NO: 2599465 - DNA, 25 bp, Homo sapien
tccttgggtcctttcgaatcaagaa

SEQ ID NO: 2599466 - DNA, 25 bp, Homo sapien
ttgtcttccaattgacattgccttg

SEQ ID NO: 2599467 - DNA, 25 bp, Homo sapien
gataaactctatgacaagatcttca

SEQ ID NO: 2599468 - DNA, 25 bp, Homo sapien
ccaaagccatacatcatacatcgca

SEQ ID NO: 2599469 - DNA, 25 bp, Homo sapien
caagaatatccactgactcagtata

SEQ ID NO: 2599470 - DNA, 25 bp, Homo sapien
gtataaggattctggtcatccccaa

SEQ ID NO: 2599471 - DNA, 25 bp, Homo sapien
tggtcaaaagcccaaatgccgcccc

SEQ ID NO: 2599472 - DNA, 25 bp, Homo sapien
taactgcacgtctgggtacagagaa

SEQ ID NO: 2599473 - DNA, 25 bp, Homo sapien
catgcacggttactaactgcacgtc

SEQ ID NO: 2599474 - DNA, 25 bp, Homo sapien
tcgccccagagctagagttccaata

SEQ ID NO: 2599475 - DNA, 25 bp, Homo sapien
gcgagatgggcacgaacctcgcgct

SEQ ID NO: 2599476 - DNA, 25 bp, Homo sapien
gcgctcacttgctgctcagtgccag

SEQ ID NO: 2599477 - DNA, 25 bp, Homo sapien
cagttctaaatcgagtcgctgcccc

SEQ ID NO: 2599478 - DNA, 25 bp, Homo sapien
ccatcccgaccattgatgtgagaaa

SEQ ID NO: 2599479 - DNA, 25 bp, Homo sapien
ctggtaatgtgggaaaggtgtggtc

SEQ ID NO: 2599480 - DNA, 25 bp, Homo sapien
ggtaatgtgggaaaggtgtggtcca

SEQ ID NO: 2599481 - DNA, 25 bp, Homo sapien
gaaaggtgtggtccaggaccggtga

SEQ ID NO: 2599482 - DNA, 25 bp, Homo sapien
taatgtgggaaaggtgtggtccagg

SEQ ID NO: 2599483 - DNA, 25 bp, Homo sapien
gtgacaggaggcgacgggtgaccat

SEQ ID NO: 2599484 - DNA, 25 bp, Homo sapien
tctccggggccgcaaacacagtcct

SEQ ID NO: 2599485 - DNA, 25 bp, Homo sapien
gggccgcccggtcggagccgtgtca

SEQ ID NO: 2599486 - DNA, 25 bp, Homo sapien
cggtcggagccgtgtcaggtggtga

SEQ ID NO: 2599487 - DNA, 25 bp, Homo sapien
agggctccagggcaagcccggagga

SEQ ID NO: 2599488 - DNA, 25 bp, Homo sapien
gcggcggaggagaacgcggctggga

SEQ ID NO: 2599489 - DNA, 25 bp, Homo sapien
gccagggccccgaagcggccggctc

SEQ ID NO: 2599490 - DNA, 25 bp, Homo sapien
gaggagcggcggaggagaacgcggc

SEQ ID NO: 2599491 - DNA, 25 bp, Homo sapien
catcagttcgtcaatccgtccttct

SEQ ID NO: 2599492 - DNA, 25 bp, Homo sapien
cgcgcgtcaatccatcagttcgtca

SEQ ID NO: 2599493 - DNA, 25 bp, Homo sapien
gtcaatccatcagttcgtcaatccg

SEQ ID NO: 2599494 - DNA, 25 bp, Homo sapien
taccgcccgcgcgtcaatccatcag

SEQ ID NO: 2599495 - DNA, 25 bp, Homo sapien
accgtggtgatttatattatcctgg

SEQ ID NO: 2599496 - DNA, 25 bp, Homo sapien
gaccgtggtgatttatattatcctg

SEQ ID NO: 2599497 - DNA, 25 bp, Homo sapien
agaccgtggtgatttatattatcct

SEQ ID NO: 2599498 - DNA, 25 bp, Homo sapien
cttcttctcttcttctggggaggga

SEQ ID NO: 2599499 - DNA, 25 bp, Homo sapien
gaaggagatcttttgcgagaggcat

SEQ ID NO: 2599500 - DNA, 25 bp, Homo sapien
ggatgaaggagatcttttgcgagag

SEQ ID NO: 2599501 - DNA, 25 bp, Homo sapien
ttcttctcttcttctggggagggat

SEQ ID NO: 2599502 - DNA, 25 bp, Homo sapien
cagagagcgggtcatataggcatca

SEQ ID NO: 2599503 - DNA, 25 bp, Homo sapien
taaactcggcatgattggtcagacg

SEQ ID NO: 2599504 - DNA, 25 bp, Homo sapien
gactggttagtccacaggtgaggcc

SEQ ID NO: 2599505 - DNA, 25 bp, Homo sapien
tcaaaacagtgaactcgtgcggtgc

SEQ ID NO: 2599506 - DNA, 25 bp, Homo sapien
catcgcgttgttaacacataaagct

SEQ ID NO: 2599507 - DNA, 25 bp, Homo sapien
tgctgacatcgcgttgttaacacat

SEQ ID NO: 2599508 - DNA, 25 bp, Homo sapien
gacatcgcgttgttaacacataaag

SEQ ID NO: 2599509 - DNA, 25 bp, Homo sapien
atcttctgctgacatcgcgttgtta

SEQ ID NO: 2599510 - DNA, 25 bp, Homo sapien
tctgtgagtaatttaagctgcctgt

SEQ ID NO: 2599511 - DNA, 25 bp, Homo sapien
ctattttaggctgaaccttggcatg

SEQ ID NO: 2599512 - DNA, 25 bp, Homo sapien
aaccttggcatgagggttcttggaa

SEQ ID NO: 2599513 - DNA, 25 bp, Homo sapien
gagtaatttaagctgcctgtctatt

SEQ ID NO: 2599514 - DNA, 25 bp, Homo sapien
tgagcacctctaagcacccatgtgc

SEQ ID NO: 2599515 - DNA, 25 bp, Homo sapien
ataacagccaccctagtgagcacct

SEQ ID NO: 2599516 - DNA, 25 bp, Homo sapien
acccatgtgccaggctcggggcccg

SEQ ID NO: 2599517 - DNA, 25 bp, Homo sapien
caggactgtggcagtaataacagcc

SEQ ID NO: 2599518 - DNA, 25 bp, Homo sapien
gtgacaaagtgagtctctgtcttga

SEQ ID NO: 2599519 - DNA, 25 bp, Homo sapien
tgacaaagtgagtctctgtcttgaa

SEQ ID NO: 2599520 - DNA, 25 bp, Homo sapien
gacaaagtgagtctctgtcttgaaa

SEQ ID NO: 2599521 - DNA, 25 bp, Homo sapien
ggtgacaaagtgagtctctgtcttg

SEQ ID NO: 2599522 - DNA, 25 bp, Homo sapien
gagtcaccacacccgtccaaaaata

SEQ ID NO: 2599523 - DNA, 25 bp, Homo sapien
taaaagtctgatgatctgatagtct

SEQ ID NO: 2599524 - DNA, 25 bp, Homo sapien
tattgagtactctagaaggtaaaag

SEQ ID NO: 2599525 - DNA, 25 bp, Homo sapien
gattggccaaactcagaaatacaaa

SEQ ID NO: 2599526 - DNA, 25 bp, Homo sapien
gttgtaaaagcacggatggatttgg

SEQ ID NO: 2599527 - DNA, 25 bp, Homo sapien
cttcgtaggagggaacacgtactgg

SEQ ID NO: 2599528 - DNA, 25 bp, Homo sapien
tcagggcttctcttctagccggttg

SEQ ID NO: 2599529 - DNA, 25 bp, Homo sapien
cagtggccttcgtaggagggaacac

SEQ ID NO: 2599530 - DNA, 25 bp, Homo sapien
tgcctgttgggccggttgcgcaccc

SEQ ID NO: 2599531 - DNA, 25 bp, Homo sapien
ccgggcctgcctgttgggccggttg

SEQ ID NO: 2599532 - DNA, 25 bp, Homo sapien
gcccacgccgcgcgcaccagcggcg

SEQ ID NO: 2599533 - DNA, 25 bp, Homo sapien
ctgttgggccggttgcgcaccccgg

SEQ ID NO: 2599534 - DNA, 25 bp, Homo sapien
tcgtggggttctccgggtcaagtga

SEQ ID NO: 2599535 - DNA, 25 bp, Homo sapien
gctctgtaggtccggcggcgcatct

SEQ ID NO: 2599536 - DNA, 25 bp, Homo sapien
ttgcatgatttcgtggggttctccg

SEQ ID NO: 2599537 - DNA, 25 bp, Homo sapien
ggtccggcggcgcatcttaggtgct

SEQ ID NO: 2599538 - DNA, 25 bp, Homo sapien
agaccagtctagccaacatagagaa

SEQ ID NO: 2599539 - DNA, 25 bp, Homo sapien
accagtctagccaacatagagaaac

SEQ ID NO: 2599540 - DNA, 25 bp, Homo sapien
tttaggtcgggtgtggtggcttaca

SEQ ID NO: 2599541 - DNA, 25 bp, Homo sapien
tcgggtgtggtggcttacatttgta

SEQ ID NO: 2599542 - DNA, 25 bp, Homo sapien
tattggaaggccttgagtagcaggc

SEQ ID NO: 2599543 - DNA, 25 bp, Homo sapien
ttaaagcccatatagggaacagtgg

SEQ ID NO: 2599544 - DNA, 25 bp, Homo sapien
gctaaggacttaggcattattcagt

SEQ ID NO: 2599545 - DNA, 25 bp, Homo sapien
tcagtaggtagtggttgctgtcaaa

SEQ ID NO: 2599546 - DNA, 25 bp, Homo sapien
tatatataatctgagtggctgcctg

SEQ ID NO: 2599547 - DNA, 25 bp, Homo sapien
tagccttggaggactcggtgtcgca

SEQ ID NO: 2599548 - DNA, 25 bp, Homo sapien
gaaaaattcacacaagcaaacgggc

SEQ ID NO: 2599549 - DNA, 25 bp, Homo sapien
tttaggcccttgacaagcacggcgg

SEQ ID NO: 2599550 - DNA, 25 bp, Homo sapien
gaagtactttgccatggagttagta

SEQ ID NO: 2599551 - DNA, 25 bp, Homo sapien
gagttagtaactcctgagcagacca

SEQ ID NO: 2599552 - DNA, 25 bp, Homo sapien
catcagtgtgtttggacagttcata

SEQ ID NO: 2599553 - DNA, 25 bp, Homo sapien
gcagaccattttagatggctcagca

SEQ ID NO: 2599554 - DNA, 25 bp, Homo sapien
gatcttatttgatcggatcgtgacc

SEQ ID NO: 2599555 - DNA, 25 bp, Homo sapien
ggccgacccgaaatgaaaagctctc

SEQ ID NO: 2599556 - DNA, 25 bp, Homo sapien
cgctgtgcagcgaggccccttaggc

SEQ ID NO: 2599557 - DNA, 25 bp, Homo sapien
atttgatcggatcgtgaccccagcc

SEQ ID NO: 2599558 - DNA, 25 bp, Homo sapien
gccttgctgcaacgatcttggccgc

SEQ ID NO: 2599559 - DNA, 25 bp, Homo sapien
gagaactggagtcaattcgggtgaa

SEQ ID NO: 2599560 - DNA, 25 bp, Homo sapien
gtccctccaggtcacgggtgcctcg

SEQ ID NO: 2599561 - DNA, 25 bp, Homo sapien
actggagtcaattcgggtgaatccg

SEQ ID NO: 2599562 - DNA, 25 bp, Homo sapien
gaagactgggagagcgtttccggca

SEQ ID NO: 2599563 - DNA, 25 bp, Homo sapien
aagactgggagagcgtttccggcat

SEQ ID NO: 2599564 - DNA, 25 bp, Homo sapien
ggaagactgggagagcgtttccggc

SEQ ID NO: 2599565 - DNA, 25 bp, Homo sapien
cttgcacaaatctatttaatggaag

SEQ ID NO: 2599566 - DNA, 25 bp, Homo sapien
tctatttaatggaagtgggccgcag

SEQ ID NO: 2599567 - DNA, 25 bp, Homo sapien
gtgggccgcagtatgtttcactata

SEQ ID NO: 2599568 - DNA, 25 bp, Homo sapien
ataattagttcagggatctgtcaac

SEQ ID NO: 2599569 - DNA, 25 bp, Homo sapien
tctttctttcgggagtagcctccat

SEQ ID NO: 2599570 - DNA, 25 bp, Homo sapien
atctttctttcgggagtagcctcca

SEQ ID NO: 2599571 - DNA, 25 bp, Homo sapien
catctttctttcgggagtagcctcc

SEQ ID NO: 2599572 - DNA, 25 bp, Homo sapien
tccttggatgctgtggatggactcc

SEQ ID NO: 2599573 - DNA, 25 bp, Homo sapien
ctcctttttagggttgatccagtgt

SEQ ID NO: 2599574 - DNA, 25 bp, Homo sapien
ctttttagggttgatccagtgtctg

SEQ ID NO: 2599575 - DNA, 25 bp, Homo sapien
ctatggatccttggatgctgtggat

SEQ ID NO: 2599576 - DNA, 25 bp, Homo sapien
taggtatcctgcgtggttttctggt

SEQ ID NO: 2599577 - DNA, 25 bp, Homo sapien
ctataggtatcctgcgtggttttct

SEQ ID NO: 2599578 - DNA, 25 bp, Homo sapien
tggtggttgtacaaggctgctaagc

SEQ ID NO: 2599579 - DNA, 25 bp, Homo sapien
tgctaagcggaagtccaggtcatcc

SEQ ID NO: 2599580 - DNA, 25 bp, Homo sapien
ctcgggatcaaaatagtaggcatcc

SEQ ID NO: 2599581 - DNA, 25 bp, Homo sapien
gggttgagttgagccgactccaggg

SEQ ID NO: 2599582 - DNA, 25 bp, Homo sapien
aaggtgtgttgggttcttatatggc

SEQ ID NO: 2599583 - DNA, 25 bp, Homo sapien
taattgtgggggttgagttgagccg

SEQ ID NO: 2599584 - DNA, 25 bp, Homo sapien
gcagcttgttgatgtgactctcgaa

SEQ ID NO: 2599585 - DNA, 25 bp, Homo sapien
ttgatgtgactctcgaacacagcag

SEQ ID NO: 2599586 - DNA, 25 bp, Homo sapien
gtgactctcgaacacagcagaggtg

SEQ ID NO: 2599587 - DNA, 25 bp, Homo sapien
gctgtcggcagcttgttgatgtgac

SEQ ID NO: 2599588 - DNA, 25 bp, Homo sapien
gttgatgtaatgagtgaagcaggca

SEQ ID NO: 2599589 - DNA, 25 bp, Homo sapien
tggtttggttgatgtaatgagtgaa

SEQ ID NO: 2599590 - DNA, 25 bp, Homo sapien
gagtgaagcaggcagtaatttcaga

SEQ ID NO: 2599591 - DNA, 25 bp, Homo sapien
tgtaatgagtgaagcaggcagtaat

SEQ ID NO: 2599592 - DNA, 25 bp, Homo sapien
gacaatccagcaagtttgctttgtg

SEQ ID NO: 2599593 - DNA, 25 bp, Homo sapien
tccagcaagtttgctttgtgtccag

SEQ ID NO: 2599594 - DNA, 25 bp, Homo sapien
caatccagcaagtttgctttgtgtc

SEQ ID NO: 2599595 - DNA, 25 bp, Homo sapien
cttgacaatccagcaagtttgcttt

SEQ ID NO: 2599596 - DNA, 25 bp, Homo sapien
tatgcaaccttcttcttggtccgtg

SEQ ID NO: 2599597 - DNA, 25 bp, Homo sapien
tggtccgtgcatttacatccagctg

SEQ ID NO: 2599598 - DNA, 25 bp, Homo sapien
ggcattggaatctatgcaaccttct

SEQ ID NO: 2599599 - DNA, 25 bp, Homo sapien
aaatccaaggcattggaatctatgc

SEQ ID NO: 2599600 - DNA, 25 bp, Homo sapien
taaaatgtaggcgtgagggtaagaa

SEQ ID NO: 2599601 - DNA, 25 bp, Homo sapien
attttattacagtacgtgtagtgta

SEQ ID NO: 2599602 - DNA, 25 bp, Homo sapien
cagtacgtgtagtgtatactaactg

SEQ ID NO: 2599603 - DNA, 25 bp, Homo sapien
tgtagtgtatactaactgaaaggga

SEQ ID NO: 2599604 - DNA, 25 bp, Homo sapien
tagtgtatactaactgaaagggaaa

SEQ ID NO: 2599605 - DNA, 25 bp, Homo sapien
tgtgacagcctaaaaccccactgag

SEQ ID NO: 2599606 - DNA, 25 bp, Homo sapien
tctaaatcagtggtattcctagctg

SEQ ID NO: 2599607 - DNA, 25 bp, Homo sapien
gaaatgtttagaatactgcactcac

SEQ ID NO: 2599608 - DNA, 25 bp, Homo sapien
ttgaacataccttttctcagctgca

SEQ ID NO: 2599609 - DNA, 25 bp, Homo sapien
ttcaaatactgctgtttccataaac

SEQ ID NO: 2599610 - DNA, 25 bp, Homo sapien
tcttctaacagcaaggaattctccc

SEQ ID NO: 2599611 - DNA, 25 bp, Homo sapien
agttcagcagtactttgattatata

SEQ ID NO: 2599612 - DNA, 25 bp, Homo sapien
tggccacattcttctaacagcaagg

SEQ ID NO: 2599613 - DNA, 25 bp, Homo sapien
gggctttcctgcacttggttgaagg

SEQ ID NO: 2599614 - DNA, 25 bp, Homo sapien
gaaagagctcctaatgtggtgacag

SEQ ID NO: 2599615 - DNA, 25 bp, Homo sapien
ctgcaagtggaagataagctgttca

SEQ ID NO: 2599616 - DNA, 25 bp, Homo sapien
gtatttcccacctatagcactgctg

SEQ ID NO: 2599617 - DNA, 25 bp, Homo sapien
gatgatattacactgtatttgtggt

SEQ ID NO: 2599618 - DNA, 25 bp, Homo sapien
ggactgatgatattacactgtattt

SEQ ID NO: 2599619 - DNA, 25 bp, Homo sapien
ggcaatatataataactggtatgca

SEQ ID NO: 2599620 - DNA, 25 bp, Homo sapien
caatatataataactggtatgcatt

SEQ ID NO: 2599621 - DNA, 25 bp, Homo sapien
atgaacttcgtaatttgttttgctg

SEQ ID NO: 2599622 - DNA, 25 bp, Homo sapien
ctatgaacttcgtaatttgttttgc

SEQ ID NO: 2599623 - DNA, 25 bp, Homo sapien
gttttgctgttggtcacttggagta

SEQ ID NO: 2599624 - DNA, 25 bp, Homo sapien
tgctgttggtcacttggagtagatc

SEQ ID NO: 2599625 - DNA, 25 bp, Homo sapien
aggtcttttgaaattaattgtctgg

SEQ ID NO: 2599626 - DNA, 25 bp, Homo sapien
gaaattaattgtctggctagtttga

SEQ ID NO: 2599627 - DNA, 25 bp, Homo sapien
cttttgaaattaattgtctggctag

SEQ ID NO: 2599628 - DNA, 25 bp, Homo sapien
tttgaaattaattgtctggctagtt

SEQ ID NO: 2599629 - DNA, 25 bp, Homo sapien
attatccagaaagagttaaatggtg

SEQ ID NO: 2599630 - DNA, 25 bp, Homo sapien
tttgtcatgcttaaggctgcttttg

SEQ ID NO: 2599631 - DNA, 25 bp, Homo sapien
tagttcgtaatagagaccactgggc

SEQ ID NO: 2599632 - DNA, 25 bp, Homo sapien
tggtgacaaaagagcgagttacaac

SEQ ID NO: 2599633 - DNA, 25 bp, Homo sapien
tgcaacaagataagacatactcctt

SEQ ID NO: 2599634 - DNA, 25 bp, Homo sapien
tatatattcacatgaatcaaaaagt

SEQ ID NO: 2599635 - DNA, 25 bp, Homo sapien
tataaaatgcaacaagataagacat

SEQ ID NO: 2599636 - DNA, 25 bp, Homo sapien
tctacccacaagcttggattttcct

SEQ ID NO: 2599637 - DNA, 25 bp, Homo sapien
gaaagcacgagcaggcagcaatgcc

SEQ ID NO: 2599638 - DNA, 25 bp, Homo sapien
gctgaatggcctacgagaccctctt

SEQ ID NO: 2599639 - DNA, 25 bp, Homo sapien
ggcagcaatgccttaaatgtgtatg

SEQ ID NO: 2599640 - DNA, 25 bp, Homo sapien
atgtgtatgtgctgaatggcctacg

SEQ ID NO: 2599641 - DNA, 25 bp, Homo sapien
aaattactagcaccatgatgaaagc

SEQ ID NO: 2599642 - DNA, 25 bp, Homo sapien
taagaccgtccaaacgctcaatgac

SEQ ID NO: 2599643 - DNA, 25 bp, Homo sapien
gcataagcaactgggaaattagctc

SEQ ID NO: 2599644 - DNA, 25 bp, Homo sapien
gatgggacctaataaagaccttcac

SEQ ID NO: 2599645 - DNA, 25 bp, Homo sapien
ctttggctccaagccttcagctgca

SEQ ID NO: 2599646 - DNA, 25 bp, Homo sapien
tgaatccgatactttggctccaagc

SEQ ID NO: 2599647 - DNA, 25 bp, Homo sapien
tcctgaatccgatactttggctcca

SEQ ID NO: 2599648 - DNA, 25 bp, Homo sapien
gaatccgatactttggctccaagcc

SEQ ID NO: 2599649 - DNA, 25 bp, Homo sapien
aagagagcagaaacgtgccgggcat

SEQ ID NO: 2599650 - DNA, 25 bp, Homo sapien
caatgagctttgattgcgcctctgc

SEQ ID NO: 2599651 - DNA, 25 bp, Homo sapien
tgtgctagctataacctgatgagga

SEQ ID NO: 2599652 - DNA, 25 bp, Homo sapien
tgggagcactagttaaacccaggag

SEQ ID NO: 2599653 - DNA, 25 bp, Homo sapien
tcagtggcctcggtgtcactacagg

SEQ ID NO: 2599654 - DNA, 25 bp, Homo sapien
tggcctcggtgtcactacaggcatc

SEQ ID NO: 2599655 - DNA, 25 bp, Homo sapien
agtggcctcggtgtcactacaggca

SEQ ID NO: 2599656 - DNA, 25 bp, Homo sapien
cctcggtgtcactacaggcatcttc

SEQ ID NO: 2599657 - DNA, 25 bp, Homo sapien
tgcacatagcctcaattacttaggg

SEQ ID NO: 2599658 - DNA, 25 bp, Homo sapien
caggttatctctgcatgcacatagc

SEQ ID NO: 2599659 - DNA, 25 bp, Homo sapien
ccatggctggccaaatgaaactctc

SEQ ID NO: 2599660 - DNA, 25 bp, Homo sapien
actgataaaagcaggacacaggtta

SEQ ID NO: 2599661 - DNA, 25 bp, Homo sapien
gctataactgtgcctgttaatagcc

SEQ ID NO: 2599662 - DNA, 25 bp, Homo sapien
tttttatgctcatcagtctttaata

SEQ ID NO: 2599663 - DNA, 25 bp, Homo sapien
tacatatataccacaaaaaactgtg

SEQ ID NO: 2599664 - DNA, 25 bp, Homo sapien
tggtaacttttggatttatgctgtc

SEQ ID NO: 2599665 - DNA, 25 bp, Homo sapien
tatgcctttgcttagctcccgctta

SEQ ID NO: 2599666 - DNA, 25 bp, Homo sapien
caaataggctgttatccagacgttc

SEQ ID NO: 2599667 - DNA, 25 bp, Homo sapien
tagtagctagcaaccactgaggtgc

SEQ ID NO: 2599668 - DNA, 25 bp, Homo sapien
tctgcaaagagactgagtaaacccc

SEQ ID NO: 2599669 - DNA, 25 bp, Homo sapien
cacaagaggaatgacgtctacgtaa

SEQ ID NO: 2599670 - DNA, 25 bp, Homo sapien
tatggtaaggagtgcttggttcatc

SEQ ID NO: 2599671 - DNA, 25 bp, Homo sapien
tgctggatgatacgtcgccaagatg

SEQ ID NO: 2599672 - DNA, 25 bp, Homo sapien
cgtcgccaagatgttcatttcatcc

SEQ ID NO: 2599673 - DNA, 25 bp, Homo sapien
gtctgctggatgatacgtcgccaag

SEQ ID NO: 2599674 - DNA, 25 bp, Homo sapien
gaatctggtgtgtaaaatggctccc

SEQ ID NO: 2599675 - DNA, 25 bp, Homo sapien
gggtaggagtcaaactatcatcgca

SEQ ID NO: 2599676 - DNA, 25 bp, Homo sapien
cagccgaggtagcatgttcccagat

SEQ ID NO: 2599677 - DNA, 25 bp, Homo sapien
catttgaggtccgttagcagttgct

SEQ ID NO: 2599678 - DNA, 25 bp, Homo sapien
gacaggactgtaactctaactcgac

SEQ ID NO: 2599679 - DNA, 25 bp, Homo sapien
cgacaggtcagtcccttttaagtga

SEQ ID NO: 2599680 - DNA, 25 bp, Homo sapien
taccctgccacagatactacagaag

SEQ ID NO: 2599681 - DNA, 25 bp, Homo sapien
tgggcccacgggaaattacagcaga

SEQ ID NO: 2599682 - DNA, 25 bp, Homo sapien
tgggccggtgcgaggccgtcgaggc

SEQ ID NO: 2599683 - DNA, 25 bp, Homo sapien
cattcccgcggggctgttcggccga

SEQ ID NO: 2599684 - DNA, 25 bp, Homo sapien
aagatccccttgatgggccggtgcg

SEQ ID NO: 2599685 - DNA, 25 bp, Homo sapien
tcagctcctcgtcgacattcccgcg

SEQ ID NO: 2599686 - DNA, 25 bp, Homo sapien
cgggcgctccggctgtcggctcagg

SEQ ID NO: 2599687 - DNA, 25 bp, Homo sapien
ggcgctccggctgtcggctcagggt

SEQ ID NO: 2599688 - DNA, 25 bp, Homo sapien
tgccgggcgctccggctgtcggctc

SEQ ID NO: 2599689 - DNA, 25 bp, Homo sapien
cgctccggctgtcggctcagggtcg

SEQ ID NO: 2599690 - DNA, 25 bp, Homo sapien
cagagactcgcaggcagccgcagat

SEQ ID NO: 2599691 - DNA, 25 bp, Homo sapien
aggcagccgcagatcccgctcaggg

SEQ ID NO: 2599692 - DNA, 25 bp, Homo sapien
ccgcgaagagaagggtcggcacagc

SEQ ID NO: 2599693 - DNA, 25 bp, Homo sapien
tcggcacagcagagactcgcaggca

SEQ ID NO: 2599694 - DNA, 25 bp, Homo sapien
ctaccgcagcggttgtcacgacaca

SEQ ID NO: 2599695 - DNA, 25 bp, Homo sapien
ccgcagcggttgtcacgacacaacg

SEQ ID NO: 2599696 - DNA, 25 bp, Homo sapien
gcagcggttgtcacgacacaacgac

SEQ ID NO: 2599697 - DNA, 25 bp, Homo sapien
caacgccgaacgggtggcggctact

SEQ ID NO: 2599698 - DNA, 25 bp, Homo sapien
cttgacccgcggctcgcggagagac

SEQ ID NO: 2599699 - DNA, 25 bp, Homo sapien
ctccagcgcaggagcgacgcgacgc

SEQ ID NO: 2599700 - DNA, 25 bp, Homo sapien
aagcggacccgccctctcgcgatat

SEQ ID NO: 2599701 - DNA, 25 bp, Homo sapien
gaagccaagcggacccgccctctcg

SEQ ID NO: 2599702 - DNA, 25 bp, Homo sapien
ctagggaggaggcggggagagggcg

SEQ ID NO: 2599703 - DNA, 25 bp, Homo sapien
ctccttttaccgctggagaagccga

SEQ ID NO: 2599704 - DNA, 25 bp, Homo sapien
agccgacggacagacgggcagcgac

SEQ ID NO: 2599705 - DNA, 25 bp, Homo sapien
tttaccgctggagaagccgacggac

SEQ ID NO: 2599706 - DNA, 25 bp, Homo sapien
ccttttaccgctggagaagccgacg

SEQ ID NO: 2599707 - DNA, 25 bp, Homo sapien
tgtgactgggcccttgattaagcaa

SEQ ID NO: 2599708 - DNA, 25 bp, Homo sapien
catccctgaactcaactgtgactgg

SEQ ID NO: 2599709 - DNA, 25 bp, Homo sapien
tctaatgaaagggactacgatcgta

SEQ ID NO: 2599710 - DNA, 25 bp, Homo sapien
taacaaacattggaacaggaggtga

SEQ ID NO: 2599711 - DNA, 25 bp, Homo sapien
agcctgcctgagtcatcagctaggt

SEQ ID NO: 2599712 - DNA, 25 bp, Homo sapien
catcagctaggtccacagagtagag

SEQ ID NO: 2599713 - DNA, 25 bp, Homo sapien
gtgcccccgcctaacatctggaaaa

SEQ ID NO: 2599714 - DNA, 25 bp, Homo sapien
tgagtcatcagctaggtccacagag

SEQ ID NO: 2599715 - DNA, 25 bp, Homo sapien
ctgtgttatcaggtgtttttatcaa

SEQ ID NO: 2599716 - DNA, 25 bp, Homo sapien
caagaccctctttgcgctcccgtgg

SEQ ID NO: 2599717 - DNA, 25 bp, Homo sapien
tatcaagtggttctctagacaggac

SEQ ID NO: 2599718 - DNA, 25 bp, Homo sapien
tgttatcaggtgtttttatcaagtg

SEQ ID NO: 2599719 - DNA, 25 bp, Homo sapien
cagaagaccattacggtgtatctct

SEQ ID NO: 2599720 - DNA, 25 bp, Homo sapien
gaccattacggtgtatctcttgctg

SEQ ID NO: 2599721 - DNA, 25 bp, Homo sapien
ttccagaagaccattacggtgtatc

SEQ ID NO: 2599722 - DNA, 25 bp, Homo sapien
aattccagaagaccattacggtgta

SEQ ID NO: 2599723 - DNA, 25 bp, Homo sapien
taaggcagtcctctccaaaggcata

SEQ ID NO: 2599724 - DNA, 25 bp, Homo sapien
tttgtactacgatggatgcggagcc

SEQ ID NO: 2599725 - DNA, 25 bp, Homo sapien
gctgacacgtggagactcttaacga

SEQ ID NO: 2599726 - DNA, 25 bp, Homo sapien
tggatgagacgctgagctgacacgt

SEQ ID NO: 2599727 - DNA, 25 bp, Homo sapien
ggggacacagctgactcatagagca

SEQ ID NO: 2599728 - DNA, 25 bp, Homo sapien
agctcctgagcccatttgtcacttc

SEQ ID NO: 2599729 - DNA, 25 bp, Homo sapien
cagctcctgagcccatttgtcactt

SEQ ID NO: 2599730 - DNA, 25 bp, Homo sapien
ggaattctgctagaactcagtatcc

SEQ ID NO: 2599731 - DNA, 25 bp, Homo sapien
ccttcagctcgctcactaatgtgaa

SEQ ID NO: 2599732 - DNA, 25 bp, Homo sapien
atgtgaatgtttggaggaggatacc

SEQ ID NO: 2599733 - DNA, 25 bp, Homo sapien
tcagtatccaatccacttggttctg

SEQ ID NO: 2599734 - DNA, 25 bp, Homo sapien
cacatgaccttgcagtaccagagct

SEQ ID NO: 2599735 - DNA, 25 bp, Homo sapien
tagctcaggtggacacatattggtc

SEQ ID NO: 2599736 - DNA, 25 bp, Homo sapien
tccagcgaggccatagaagtcagag

SEQ ID NO: 2599737 - DNA, 25 bp, Homo sapien
cacttcagtagtgcatggccggtag

SEQ ID NO: 2599738 - DNA, 25 bp, Homo sapien
ggtagagccacatgctttagattct

SEQ ID NO: 2599739 - DNA, 25 bp, Homo sapien
gggaggtagagccacatgctttaga

SEQ ID NO: 2599740 - DNA, 25 bp, Homo sapien
ctggggaggtagagccacatgcttt

SEQ ID NO: 2599741 - DNA, 25 bp, Homo sapien
agagccacatgctttagattctagc

SEQ ID NO: 2599742 - DNA, 25 bp, Homo sapien
ctcccccggcagtgagtgtggcttc

SEQ ID NO: 2599743 - DNA, 25 bp, Homo sapien
ccccggcagtgagtgtggcttcgta

SEQ ID NO: 2599744 - DNA, 25 bp, Homo sapien
cagtgagtgtggcttcgtagttctt

SEQ ID NO: 2599745 - DNA, 25 bp, Homo sapien
gagtgtggcttcgtagttcttacaa

SEQ ID NO: 2599746 - DNA, 25 bp, Homo sapien
aagcgaagcagaagtaacatggagt

SEQ ID NO: 2599747 - DNA, 25 bp, Homo sapien
tagggcatggttacatgttcaggtc

SEQ ID NO: 2599748 - DNA, 25 bp, Homo sapien
caacaagtttattttgcagctagca

SEQ ID NO: 2599749 - DNA, 25 bp, Homo sapien
tcaggtcaacttcctttgtcgtggt

SEQ ID NO: 2599750 - DNA, 25 bp, Homo sapien
caggatccagtacggtgccgatggc

SEQ ID NO: 2599751 - DNA, 25 bp, Homo sapien
ttctcatagtcggtggccaggatcc

SEQ ID NO: 2599752 - DNA, 25 bp, Homo sapien
tgcaggtacaggaatacacgagggc

SEQ ID NO: 2599753 - DNA, 25 bp, Homo sapien
tccaagcaaaatccacgtgaaaaag

SEQ ID NO: 2599754 - DNA, 25 bp, Homo sapien
gatgtgagctccataagtaccaagg

SEQ ID NO: 2599755 - DNA, 25 bp, Homo sapien
tatctgctaatgtttcgggccccag

SEQ ID NO: 2599756 - DNA, 25 bp, Homo sapien
ggtcacgtgtcagtatccacactgg

SEQ ID NO: 2599757 - DNA, 25 bp, Homo sapien
tcatcatggcaaccctagtgcgtga

SEQ ID NO: 2599758 - DNA, 25 bp, Homo sapien
ggcaggctctgtgaggttaactggg

SEQ ID NO: 2599759 - DNA, 25 bp, Homo sapien
ggcttcaccttcgatttgattcaca

SEQ ID NO: 2599760 - DNA, 25 bp, Homo sapien
taactggggtggcttcaccttcgat

SEQ ID NO: 2599761 - DNA, 25 bp, Homo sapien
aaaacttaacttccagcttggcagg

SEQ ID NO: 2599762 - DNA, 25 bp, Homo sapien
tgtgctctgatgttcccaagtactt

SEQ ID NO: 2599763 - DNA, 25 bp, Homo sapien
ctatggttagtggtgacggatgtcc

SEQ ID NO: 2599764 - DNA, 25 bp, Homo sapien
agggattctgggaactgtgctctga

SEQ ID NO: 2599765 - DNA, 25 bp, Homo sapien
gaaagtcagtaggttaatgctatgg

SEQ ID NO: 2599766 - DNA, 25 bp, Homo sapien
ctggatgcagcgtccattctcaaag

SEQ ID NO: 2599767 - DNA, 25 bp, Homo sapien
ttagtgagtagttggcctggatgca

SEQ ID NO: 2599768 - DNA, 25 bp, Homo sapien
gggatcttctcaatttcgtaccatc

SEQ ID NO: 2599769 - DNA, 25 bp, Homo sapien
caatttcgtaccatcttccgagata

SEQ ID NO: 2599770 - DNA, 25 bp, Homo sapien
ccctgggtgacaaagtgagactccg

SEQ ID NO: 2599771 - DNA, 25 bp, Homo sapien
cctgggtgacaaagtgagactccgt

SEQ ID NO: 2599772 - DNA, 25 bp, Homo sapien
aagatggtgatgctgcactccaccc

SEQ ID NO: 2599773 - DNA, 25 bp, Homo sapien
tgagccaagatggtgatgctgcact

SEQ ID NO: 2599774 - DNA, 25 bp, Homo sapien
cttgaggtgcgagtgtatgataaca

SEQ ID NO: 2599775 - DNA, 25 bp, Homo sapien
gagtgtatgataacaacttcgatgt

SEQ ID NO: 2599776 - DNA, 25 bp, Homo sapien
aacaacttcgatgttactgttgcca

SEQ ID NO: 2599777 - DNA, 25 bp, Homo sapien
tgttgccattcttaaaagagatcca

SEQ ID NO: 2599778 - DNA, 25 bp, Homo sapien
caccggaggattggggcacttccca

SEQ ID NO: 2599779 - DNA, 25 bp, Homo sapien
ctgccgcaccgaagaggccagccag

SEQ ID NO: 2599780 - DNA, 25 bp, Homo sapien
aaatgcttgtccctctgccgcaccg

SEQ ID NO: 2599781 - DNA, 25 bp, Homo sapien
aattctcctgcaccggaggattggg

SEQ ID NO: 2599782 - DNA, 25 bp, Homo sapien
gggtggctggagaagggacctggag

SEQ ID NO: 2599783 - DNA, 25 bp, Homo sapien
gctgggtggctggagaagggacctg

SEQ ID NO: 2599784 - DNA, 25 bp, Homo sapien
gggctgggtggctggagaagggacc

SEQ ID NO: 2599785 - DNA, 25 bp, Homo sapien
cttggggctgggtggctggagaagg

SEQ ID NO: 2599786 - DNA, 25 bp, Homo sapien
tttgacattctgttgagggtttttg

SEQ ID NO: 2599787 - DNA, 25 bp, Homo sapien
tgacattctgttgagggtttttgtt

SEQ ID NO: 2599788 - DNA, 25 bp, Homo sapien
tgttttgttttgagatggagtctca

SEQ ID NO: 2599789 - DNA, 25 bp, Homo sapien
tttgttttgttttgagatggagtct

SEQ ID NO: 2599790 - DNA, 25 bp, Homo sapien
ctgatgcaggataattgcttgaaca

SEQ ID NO: 2599791 - DNA, 25 bp, Homo sapien
ttgggcaacagagcaaaaactccat

SEQ ID NO: 2599792 - DNA, 25 bp, Homo sapien
aggcagaggttgcagtaagccaaga

SEQ ID NO: 2599793 - DNA, 25 bp, Homo sapien
tgcaggataattgcttgaacatggg

SEQ ID NO: 2599794 - DNA, 25 bp, Homo sapien
tgcattaagcttacccgtggagaag

SEQ ID NO: 2599795 - DNA, 25 bp, Homo sapien
gattttaagggtgctatgcgctcag

SEQ ID NO: 2599796 - DNA, 25 bp, Homo sapien
tagaatgtaagcctaggtctcccac

SEQ ID NO: 2599797 - DNA, 25 bp, Homo sapien
cataccaacgaggtgaatttgcccg

SEQ ID NO: 2599798 - DNA, 25 bp, Homo sapien
tctgtatcgaaacacaaagatggga

SEQ ID NO: 2599799 - DNA, 25 bp, Homo sapien
ggttggcctaaaagcttagtctgta

SEQ ID NO: 2599800 - DNA, 25 bp, Homo sapien
gagatgcctgtcttggtgactggcc

SEQ ID NO: 2599801 - DNA, 25 bp, Homo sapien
cagaatcagccgatttgagatgcct

SEQ ID NO: 2599802 - DNA, 25 bp, Homo sapien
cagttcagaccatcacaggcagtga

SEQ ID NO: 2599803 - DNA, 25 bp, Homo sapien
ggcaaagacactcacaatggacata

SEQ ID NO: 2599804 - DNA, 25 bp, Homo sapien
gagctggaatgaccacagttcagac

SEQ ID NO: 2599805 - DNA, 25 bp, Homo sapien
tcacacctccacagaagctaagggc

SEQ ID NO: 2599806 - DNA, 25 bp, Homo sapien
ggtccccgggatctgacgtcactct

SEQ ID NO: 2599807 - DNA, 25 bp, Homo sapien
tcatggtccccgggatctgacgtca

SEQ ID NO: 2599808 - DNA, 25 bp, Homo sapien
gggatctgacgtcactctcctcgct

SEQ ID NO: 2599809 - DNA, 25 bp, Homo sapien
atggtccccgggatctgacgtcact

SEQ ID NO: 2599810 - DNA, 25 bp, Homo sapien
ttttctcaccccgaaaatcagagac

SEQ ID NO: 2599811 - DNA, 25 bp, Homo sapien
ttctcaccccgaaaatcagagactg

SEQ ID NO: 2599812 - DNA, 25 bp, Homo sapien
tttctcaccccgaaaatcagagact

SEQ ID NO: 2599813 - DNA, 25 bp, Homo sapien
cagcaaagcagacggtgggtcgctc

SEQ ID NO: 2599814 - DNA, 25 bp, Homo sapien
tcccagcaaagcagacggtgggtcg

SEQ ID NO: 2599815 - DNA, 25 bp, Homo sapien
caaagcagacggtgggtcgctctgt

SEQ ID NO: 2599816 - DNA, 25 bp, Homo sapien
gcagacggtgggtcgctctgtatct

SEQ ID NO: 2599817 - DNA, 25 bp, Homo sapien
cagacgcatctgttctcgcctggct

SEQ ID NO: 2599818 - DNA, 25 bp, Homo sapien
ctgagaaccttcgggacgcccgctg

SEQ ID NO: 2599819 - DNA, 25 bp, Homo sapien
cagaggcatcaacgccctcctgcta

SEQ ID NO: 2599820 - DNA, 25 bp, Homo sapien
caaaatgccctccacggagacaagg

SEQ ID NO: 2599821 - DNA, 25 bp, Homo sapien
tgttgaagaactgcccgttccgcac

SEQ ID NO: 2599822 - DNA, 25 bp, Homo sapien
tgtgttgaagaactgcccgttccgc

SEQ ID NO: 2599823 - DNA, 25 bp, Homo sapien
ttccgcaccccgggccctagacaca

SEQ ID NO: 2599824 - DNA, 25 bp, Homo sapien
caccccgggccctagacacacggct

SEQ ID NO: 2599825 - DNA, 25 bp, Homo sapien
tcacggtttgattgaccaggtgtct

SEQ ID NO: 2599826 - DNA, 25 bp, Homo sapien
gactttctgtaatgagcgtgttggc

SEQ ID NO: 2599827 - DNA, 25 bp, Homo sapien
gaccaggtgtctgcaagtgtcagct

SEQ ID NO: 2599828 - DNA, 25 bp, Homo sapien
ctctagctgggacgggtgactttct

SEQ ID NO: 2599829 - DNA, 25 bp, Homo sapien
ctcctcatgcgggacgggaaaggcc

SEQ ID NO: 2599830 - DNA, 25 bp, Homo sapien
gacacgcagccatagaggacgtcct

SEQ ID NO: 2599831 - DNA, 25 bp, Homo sapien
tagcgaggaagaccccagcccgtgc

SEQ ID NO: 2599832 - DNA, 25 bp, Homo sapien
gggatgccggcgaggactagcgagg

SEQ ID NO: 2599833 - DNA, 25 bp, Homo sapien
tagctgcggaggtctgggctgcgcc

SEQ ID NO: 2599834 - DNA, 25 bp, Homo sapien
tgggttggcttttctcagtcctggg

SEQ ID NO: 2599835 - DNA, 25 bp, Homo sapien
ctgggttggcttttctcagtcctgg

SEQ ID NO: 2599836 - DNA, 25 bp, Homo sapien
aagggaggggcggtgcatagctgcg

SEQ ID NO: 2599837 - DNA, 25 bp, Homo sapien
tcctcaaaaacagagtgttatgaca

SEQ ID NO: 2599838 - DNA, 25 bp, Homo sapien
taaatagatggaaagatactcagta

SEQ ID NO: 2599839 - DNA, 25 bp, Homo sapien
taagtcagcaattccgctcctaggt

SEQ ID NO: 2599840 - DNA, 25 bp, Homo sapien
tagcccaaggattcacatagtcatg

SEQ ID NO: 2599841 - DNA, 25 bp, Homo sapien
ggctgaggtgtaatcttctgtgtgc

SEQ ID NO: 2599842 - DNA, 25 bp, Homo sapien
tggctgcaccatccagtccctgcgg

SEQ ID NO: 2599843 - DNA, 25 bp, Homo sapien
gggggtccaggctgacaaaggctcc

SEQ ID NO: 2599844 - DNA, 25 bp, Homo sapien
tccacgcggtcactcgggggtccag

SEQ ID NO: 2599845 - DNA, 25 bp, Homo sapien
gactccccgggaacttgtcaacatg

SEQ ID NO: 2599846 - DNA, 25 bp, Homo sapien
catagggtgaagtgccacctgcaac

SEQ ID NO: 2599847 - DNA, 25 bp, Homo sapien
gaacgcccctttcatgtacccagaa

SEQ ID NO: 2599848 - DNA, 25 bp, Homo sapien
gcattgaaccatacacggagctcct

SEQ ID NO: 2599849 - DNA, 25 bp, Homo sapien
tatactccaggctttacggtaactg

SEQ ID NO: 2599850 - DNA, 25 bp, Homo sapien
tggagctagcagtgcccagatttga

SEQ ID NO: 2599851 - DNA, 25 bp, Homo sapien
tctttccagtatatgaggcctgcct

SEQ ID NO: 2599852 - DNA, 25 bp, Homo sapien
tctgagctcagcgaaccgaattttg

SEQ ID NO: 2599853 - DNA, 25 bp, Homo sapien
tctctacgggccagtgggtcctgag

SEQ ID NO: 2599854 - DNA, 25 bp, Homo sapien
tacgcgacaggggactcgaggtcct

SEQ ID NO: 2599855 - DNA, 25 bp, Homo sapien
ggtccttgaggatcccaaactgccg

SEQ ID NO: 2599856 - DNA, 25 bp, Homo sapien
tcctgagagagtagggcttcgggcg

SEQ ID NO: 2599857 - DNA, 25 bp, Homo sapien
cactgggacccgaatgaggacatcc

SEQ ID NO: 2599858 - DNA, 25 bp, Homo sapien
catcgtgggaataccgtggaacaag

SEQ ID NO: 2599859 - DNA, 25 bp, Homo sapien
tctatgtgacgtggagtcgcactgg

SEQ ID NO: 2599860 - DNA, 25 bp, Homo sapien
agggccattcgccattccagagcag

SEQ ID NO: 2599861 - DNA, 25 bp, Homo sapien
ggaccggcccgtgcgttgagcgcct

SEQ ID NO: 2599862 - DNA, 25 bp, Homo sapien
tgcgttgagcgcctcggaggtgctc

SEQ ID NO: 2599863 - DNA, 25 bp, Homo sapien
gctgggaccgatatactgcaggagt

SEQ ID NO: 2599864 - DNA, 25 bp, Homo sapien
ggccaaaaccgctgggaccgatata

SEQ ID NO: 2599865 - DNA, 25 bp, Homo sapien
ggttccaggtcctacactgcttttc

SEQ ID NO: 2599866 - DNA, 25 bp, Homo sapien
ctggtttgttctgcctttggtgcca

SEQ ID NO: 2599867 - DNA, 25 bp, Homo sapien
agccccacggataacagggcagggc

SEQ ID NO: 2599868 - DNA, 25 bp, Homo sapien
ccagttggcctaatccagcttggga

SEQ ID NO: 2599869 - DNA, 25 bp, Homo sapien
aatgtccctttttattccatacgca

SEQ ID NO: 2599870 - DNA, 25 bp, Homo sapien
tccatacgcaaataagtagattcat

SEQ ID NO: 2599871 - DNA, 25 bp, Homo sapien
gctcctggaacggacgatgggaccc

SEQ ID NO: 2599872 - DNA, 25 bp, Homo sapien
aggctgcgacgtctgcagagagccc

SEQ ID NO: 2599873 - DNA, 25 bp, Homo sapien
ctttgttgcgctgggcttggcctga

SEQ ID NO: 2599874 - DNA, 25 bp, Homo sapien
atggccgaccgctcctcgctgaggc

SEQ ID NO: 2599875 - DNA, 25 bp, Homo sapien
tagttttcctttgttgcgctgggct

SEQ ID NO: 2599876 - DNA, 25 bp, Homo sapien
cagccttggacagccggttcgtagt

SEQ ID NO: 2599877 - DNA, 25 bp, Homo sapien
cattacattctagaggcgctcccca

SEQ ID NO: 2599878 - DNA, 25 bp, Homo sapien
gaggccgcaggagcgaccatccctt

SEQ ID NO: 2599879 - DNA, 25 bp, Homo sapien
cctgcgctcccgaggtatctaggag

SEQ ID NO: 2599880 - DNA, 25 bp, Homo sapien
gggcgtcccattacattctagaggc

SEQ ID NO: 2599881 - DNA, 25 bp, Homo sapien
tgcgcctgccgctgaatcgcgcgtc

SEQ ID NO: 2599882 - DNA, 25 bp, Homo sapien
gcctgccgctgaatcgcgcgtccac

SEQ ID NO: 2599883 - DNA, 25 bp, Homo sapien
ctgcgcctgccgctgaatcgcgcgt

SEQ ID NO: 2599884 - DNA, 25 bp, Homo sapien
ctgccgctgaatcgcgcgtccacac

SEQ ID NO: 2599885 - DNA, 25 bp, Homo sapien
tctgcgcccgcagaaagggcacgga

SEQ ID NO: 2599886 - DNA, 25 bp, Homo sapien
aggccaggcatctgcgcccgcagaa

SEQ ID NO: 2599887 - DNA, 25 bp, Homo sapien
ggcggccagcgggtaggcgagggcc

SEQ ID NO: 2599888 - DNA, 25 bp, Homo sapien
gccggggggctttcgtggtagagca

SEQ ID NO: 2599889 - DNA, 25 bp, Homo sapien
gccgcttccacttgttgcggcggtt

SEQ ID NO: 2599890 - DNA, 25 bp, Homo sapien
ccgcttccacttgttgcggcggttc

SEQ ID NO: 2599891 - DNA, 25 bp, Homo sapien
tgcgggagaagactgtgcgcgtctt

SEQ ID NO: 2599892 - DNA, 25 bp, Homo sapien
ctgcgggagaagactgtgcgcgtct

SEQ ID NO: 2599893 - DNA, 25 bp, Homo sapien
gccacgcgccgccagctccgctgcc

SEQ ID NO: 2599894 - DNA, 25 bp, Homo sapien
acgccgccgcgtgtctccccagccg

SEQ ID NO: 2599895 - DNA, 25 bp, Homo sapien
caacgccgccgcgtgtctccccagc

SEQ ID NO: 2599896 - DNA, 25 bp, Homo sapien
ccgcccacgccaacgccgccgcgtg

SEQ ID NO: 2599897 - DNA, 25 bp, Homo sapien
ccgtctccggtgagtcccggtcgct

SEQ ID NO: 2599898 - DNA, 25 bp, Homo sapien
cgtctccggtgagtcccggtcgctg

SEQ ID NO: 2599899 - DNA, 25 bp, Homo sapien
ctcctcgcccgtctccggtgagtcc

SEQ ID NO: 2599900 - DNA, 25 bp, Homo sapien
ctcgcccgtctccggtgagtcccgg

SEQ ID NO: 2599901 - DNA, 25 bp, Homo sapien
ctgacccaccctccccgcgccctca

SEQ ID NO: 2599902 - DNA, 25 bp, Homo sapien
cccaccctccccgcgccctcactca

SEQ ID NO: 2599903 - DNA, 25 bp, Homo sapien
ccaccctccccgcgccctcactcac

SEQ ID NO: 2599904 - DNA, 25 bp, Homo sapien
tgacccaccctccccgcgccctcac

SEQ ID NO: 2599905 - DNA, 25 bp, Homo sapien
tgctcggcgtcctcgtcttcggggt

SEQ ID NO: 2599906 - DNA, 25 bp, Homo sapien
gtgcgcccgtgggtaccagcgcgct

SEQ ID NO: 2599907 - DNA, 25 bp, Homo sapien
cgggctccgtcagctcgtcaggcat

SEQ ID NO: 2599908 - DNA, 25 bp, Homo sapien
ctggagctgctacccggaccgctgg

SEQ ID NO: 2599909 - DNA, 25 bp, Homo sapien
cccgatgaggaacgggctggccaat

SEQ ID NO: 2599910 - DNA, 25 bp, Homo sapien
cacgagtgtgcgtttgaatggctgt

SEQ ID NO: 2599911 - DNA, 25 bp, Homo sapien
tggaccgaccgtgagtaactgtgtg

SEQ ID NO: 2599912 - DNA, 25 bp, Homo sapien
tcaccgtccggccagagccgtaatt

SEQ ID NO: 2599913 - DNA, 25 bp, Homo sapien
aggttgttgggagtagaggctggcc

SEQ ID NO: 2599914 - DNA, 25 bp, Homo sapien
gtggtggccctgagcgcataacgct

SEQ ID NO: 2599915 - DNA, 25 bp, Homo sapien
cgtccctgacggtgccaggttgttg

SEQ ID NO: 2599916 - DNA, 25 bp, Homo sapien
aacgctcgcgggtgtcttcccactg

SEQ ID NO: 2599917 - DNA, 25 bp, Homo sapien
tggatccgaagcgaggaccgtgcac

SEQ ID NO: 2599918 - DNA, 25 bp, Homo sapien
gctggcgcgtccacactctgagtct

SEQ ID NO: 2599919 - DNA, 25 bp, Homo sapien
acgccgggtcccagagactttccag

SEQ ID NO: 2599920 - DNA, 25 bp, Homo sapien
ccagagactttccagcgacaactgc

SEQ ID NO: 2599921 - DNA, 25 bp, Homo sapien
tgtgggcaattgggcagattgttga

SEQ ID NO: 2599922 - DNA, 25 bp, Homo sapien
tgggcaattgggcagattgttgacg

SEQ ID NO: 2599923 - DNA, 25 bp, Homo sapien
ctggtcggcgaggcgtaggtgtggg

SEQ ID NO: 2599924 - DNA, 25 bp, Homo sapien
gtgtgggcaattgggcagattgttg

SEQ ID NO: 2599925 - DNA, 25 bp, Homo sapien
gcctcgctggatgctagcagccaga

SEQ ID NO: 2599926 - DNA, 25 bp, Homo sapien
cttggaacttccagcaaacgccctc

SEQ ID NO: 2599927 - DNA, 25 bp, Homo sapien
tcgctggatgctagcagccagatga

SEQ ID NO: 2599928 - DNA, 25 bp, Homo sapien
tggatgctagcagccagatgagtga

SEQ ID NO: 2599929 - DNA, 25 bp, Homo sapien
gtgccacggttccgtttctatcacg

SEQ ID NO: 2599930 - DNA, 25 bp, Homo sapien
tccgtttctatcacgtgtttcccca

SEQ ID NO: 2599931 - DNA, 25 bp, Homo sapien
gccacggttccgtttctatcacgtg

SEQ ID NO: 2599932 - DNA, 25 bp, Homo sapien
cacggttccgtttctatcacgtgtt

SEQ ID NO: 2599933 - DNA, 25 bp, Homo sapien
cttcgtagtgtggaacagccgtgga

SEQ ID NO: 2599934 - DNA, 25 bp, Homo sapien
gatgctcactccaagtcagggatgg

SEQ ID NO: 2599935 - DNA, 25 bp, Homo sapien
ctcctctggaagactcaaagccggg

SEQ ID NO: 2599936 - DNA, 25 bp, Homo sapien
gaacagccgtggatctgatgctcac

SEQ ID NO: 2599937 - DNA, 25 bp, Homo sapien
gatcttttatccaaaagctgatgct

SEQ ID NO: 2599938 - DNA, 25 bp, Homo sapien
ttgatcttttatccaaaagctgatg

SEQ ID NO: 2599939 - DNA, 25 bp, Homo sapien
tcttttatccaaaagctgatgctgg

SEQ ID NO: 2599940 - DNA, 25 bp, Homo sapien
tccaaaagctgatgctggctgtgca

SEQ ID NO: 2599941 - DNA, 25 bp, Homo sapien
actggctttggagaacctctcttct

SEQ ID NO: 2599942 - DNA, 25 bp, Homo sapien
cagcaggaagacagcgctattcatc

SEQ ID NO: 2599943 - DNA, 25 bp, Homo sapien
cagaaatttgtgagtttgggtccca

SEQ ID NO: 2599944 - DNA, 25 bp, Homo sapien
ctcttctcagagcccattacaaagg

SEQ ID NO: 2599945 - DNA, 25 bp, Homo sapien
cagcaaaaaacacagttcatacagc

SEQ ID NO: 2599946 - DNA, 25 bp, Homo sapien
agcaaaaaacacagttcatacagca

SEQ ID NO: 2599947 - DNA, 25 bp, Homo sapien
gcaaaaaacacagttcatacagcac

SEQ ID NO: 2599948 - DNA, 25 bp, Homo sapien
ggcacaggtcgctggcgcagcccat

SEQ ID NO: 2599949 - DNA, 25 bp, Homo sapien
gaggtggggcacaggtcgctggcgc

SEQ ID NO: 2599950 - DNA, 25 bp, Homo sapien
cacaagccgaggtggggcacaggtc

SEQ ID NO: 2599951 - DNA, 25 bp, Homo sapien
tggggcacaggtcgctggcgcagcc

SEQ ID NO: 2599952 - DNA, 25 bp, Homo sapien
gaggctcagaatcagcaaatggaga

SEQ ID NO: 2599953 - DNA, 25 bp, Homo sapien
gagacttcagtccaacagggtccat

SEQ ID NO: 2599954 - DNA, 25 bp, Homo sapien
gcaaagacagcatcacttaatgaaa

SEQ ID NO: 2599955 - DNA, 25 bp, Homo sapien
aaaaggcaattgaggaggcaaggac

SEQ ID NO: 2599956 - DNA, 25 bp, Homo sapien
attccaagatgaggctgcaatcggc

SEQ ID NO: 2599957 - DNA, 25 bp, Homo sapien
caactttaaagtgtaattccaagat

SEQ ID NO: 2599958 - DNA, 25 bp, Homo sapien
cacatagatgctctgactgaataca

SEQ ID NO: 2599959 - DNA, 25 bp, Homo sapien
tgtagcattcacatagatgctctga

SEQ ID NO: 2599960 - DNA, 25 bp, Homo sapien
acagaggcaggacttccaccaggag

SEQ ID NO: 2599961 - DNA, 25 bp, Homo sapien
ggctcctctggtccacagaggcagg

SEQ ID NO: 2599962 - DNA, 25 bp, Homo sapien
cacttcgggggagcaggctcctctg

SEQ ID NO: 2599963 - DNA, 25 bp, Homo sapien
aggacttccaccaggaggggagctt

SEQ ID NO: 2599964 - DNA, 25 bp, Homo sapien
cggaacgaagccactgccagcggcg

SEQ ID NO: 2599965 - DNA, 25 bp, Homo sapien
ggaacgaagccactgccagcggcgc

SEQ ID NO: 2599966 - DNA, 25 bp, Homo sapien
tcctgttctgcccatcgtgggaagt

SEQ ID NO: 2599967 - DNA, 25 bp, Homo sapien
ccctgggcgaccttcagcagtgtct

SEQ ID NO: 2599968 - DNA, 25 bp, Homo sapien
aactcgccccgaaagccgagaagcg

SEQ ID NO: 2599969 - DNA, 25 bp, Homo sapien
ccgaaagccgagaagcgctggaact

SEQ ID NO: 2599970 - DNA, 25 bp, Homo sapien
tgctgatcagacatgggaggaaacc

SEQ ID NO: 2599971 - DNA, 25 bp, Homo sapien
tagcgccccttaggagctgaagcac

SEQ ID NO: 2599972 - DNA, 25 bp, Homo sapien
ttgcccagaagagcggaattcctcc

SEQ ID NO: 2599973 - DNA, 25 bp, Homo sapien
ttaccttctggcagtccgtagcgcc

SEQ ID NO: 2599974 - DNA, 25 bp, Homo sapien
ctctgaactgaggtgttcaggtggg

SEQ ID NO: 2599975 - DNA, 25 bp, Homo sapien
cttggaagcgaacagtgcctccacc

SEQ ID NO: 2599976 - DNA, 25 bp, Homo sapien
gaactgaggtgttcaggtgggacag

SEQ ID NO: 2599977 - DNA, 25 bp, Homo sapien
tccttggaagcgaacagtgcctcca

SEQ ID NO: 2599978 - DNA, 25 bp, Homo sapien
gggtcacggcccaggccgacgctct

SEQ ID NO: 2599979 - DNA, 25 bp, Homo sapien
aaggcctctatcctcgggcgggtca

SEQ ID NO: 2599980 - DNA, 25 bp, Homo sapien
gggttctgcggtgtgtctctggtgg

SEQ ID NO: 2599981 - DNA, 25 bp, Homo sapien
tggtgggctgcgtttgttctttgat

SEQ ID NO: 2599982 - DNA, 25 bp, Homo sapien
tttccaaccggtagatgacctgcag

SEQ ID NO: 2599983 - DNA, 25 bp, Homo sapien
tgtggcatcttcacgcacttacggg

SEQ ID NO: 2599984 - DNA, 25 bp, Homo sapien
tcattacagggagggctttattcag

SEQ ID NO: 2599985 - DNA, 25 bp, Homo sapien
tgaggctactggattctccccaggg

SEQ ID NO: 2599986 - DNA, 25 bp, Homo sapien
gctgtcccacatggtggagcactta

SEQ ID NO: 2599987 - DNA, 25 bp, Homo sapien
tgctcaggccgcgatgctccacgtg

SEQ ID NO: 2599988 - DNA, 25 bp, Homo sapien
gccaactcgggttcttctagaagac

SEQ ID NO: 2599989 - DNA, 25 bp, Homo sapien
tctagaagacttgacggatgggctg

SEQ ID NO: 2599990 - DNA, 25 bp, Homo sapien
caggtgaccctaatatgtggcctca

SEQ ID NO: 2599991 - DNA, 25 bp, Homo sapien
atcaggtgaccctaatatgtggcct

SEQ ID NO: 2599992 - DNA, 25 bp, Homo sapien
tcaggtgaccctaatatgtggcctc

SEQ ID NO: 2599993 - DNA, 25 bp, Homo sapien
aggaggatggcagttaggcagctca

SEQ ID NO: 2599994 - DNA, 25 bp, Homo sapien
ggaggatggcagttaggcagctcat

SEQ ID NO: 2599995 - DNA, 25 bp, Homo sapien
gaggaggatggcagttaggcagctc

SEQ ID NO: 2599996 - DNA, 25 bp, Homo sapien
cctgccaggtttccaataaagaggc

SEQ ID NO: 2599997 - DNA, 25 bp, Homo sapien
ggtgacatccacagtctgggccctg

SEQ ID NO: 2599998 - DNA, 25 bp, Homo sapien
tatcctgtgtgcaacactgctaagc

SEQ ID NO: 2599999 - DNA, 25 bp, Homo sapien
gtcaaacatgtctcctgcaaggact

SEQ ID NO: 2600000 - DNA, 25 bp, Homo sapien
agctatgaataaatccttgggcagg

SEQ ID NO: 2600001 - DNA, 25 bp, Homo sapien
gctatgaataaatccttgggcaggt

SEQ ID NO: 2600002 - DNA, 25 bp, Homo sapien
tatgaataaatccttgggcaggtgc

SEQ ID NO: 2600003 - DNA, 25 bp, Homo sapien
ctatgaataaatccttgggcaggtg

SEQ ID NO: 2600004 - DNA, 25 bp, Homo sapien
aggctcttcagcagcagtgctgctg

SEQ ID NO: 2600005 - DNA, 25 bp, Homo sapien
tccagcacctcctgtaggcaggcaa

SEQ ID NO: 2600006 - DNA, 25 bp, Homo sapien
gcaggctcttcagcagcagtgctgc

SEQ ID NO: 2600007 - DNA, 25 bp, Homo sapien
gcacctcctgtaggcaggcaaacac

SEQ ID NO: 2600008 - DNA, 25 bp, Homo sapien
ctccatagcttccactgtgcccagg

SEQ ID NO: 2600009 - DNA, 25 bp, Homo sapien
gtcccagggcaatggtaggagggct

SEQ ID NO: 2600010 - DNA, 25 bp, Homo sapien
tggagggggctttgaccctggtgct

SEQ ID NO: 2600011 - DNA, 25 bp, Homo sapien
ggggctttgaccctggtgctagcac

SEQ ID NO: 2600012 - DNA, 25 bp, Homo sapien
gctttgaccctggtgctagcactgg

SEQ ID NO: 2600013 - DNA, 25 bp, Homo sapien
tgacctgtgggctaatgtccggctg

SEQ ID NO: 2600014 - DNA, 25 bp, Homo sapien
gcctgatgcttacctggggccgaat

SEQ ID NO: 2600015 - DNA, 25 bp, Homo sapien
cagacatcaacctgggtactgtggt

SEQ ID NO: 2600016 - DNA, 25 bp, Homo sapien
gtgaggtcgcttctttaaggttctg

SEQ ID NO: 2600017 - DNA, 25 bp, Homo sapien
catagggcctcatgtccagctggtg

SEQ ID NO: 2600018 - DNA, 25 bp, Homo sapien
cccgggtgtttacatagggcctcat

SEQ ID NO: 2600019 - DNA, 25 bp, Homo sapien
ctgagacccgggtgtttacataggg

SEQ ID NO: 2600020 - DNA, 25 bp, Homo sapien
tggtatccagctgggtcctaatgac

SEQ ID NO: 2600021 - DNA, 25 bp, Homo sapien
ctggaaaccgtgtattcacccatgg

SEQ ID NO: 2600022 - DNA, 25 bp, Homo sapien
gtattcacccatggcctgatggtca

SEQ ID NO: 2600023 - DNA, 25 bp, Homo sapien
cgtgtattcacccatggcctgatgg

SEQ ID NO: 2600024 - DNA, 25 bp, Homo sapien
gaaaccgtgtattcacccatggcct

SEQ ID NO: 2600025 - DNA, 25 bp, Homo sapien
tgatgtctaccagatcctggtatcc

SEQ ID NO: 2600026 - DNA, 25 bp, Homo sapien
ttcacctgaggcacgatgtccacct

SEQ ID NO: 2600027 - DNA, 25 bp, Homo sapien
acctaggacttgatattcacctggg

SEQ ID NO: 2600028 - DNA, 25 bp, Homo sapien
atgttcatctgagcactgagtctaa

SEQ ID NO: 2600029 - DNA, 25 bp, Homo sapien
cagggtcctatgttcaccttgggac

SEQ ID NO: 2600030 - DNA, 25 bp, Homo sapien
cctatgttcaccttgggactgggta

SEQ ID NO: 2600031 - DNA, 25 bp, Homo sapien
tgttcaccttgggactgggtaacca

SEQ ID NO: 2600032 - DNA, 25 bp, Homo sapien
ttgggactgggtaaccacctgaggc

SEQ ID NO: 2600033 - DNA, 25 bp, Homo sapien
ttcatcaggccccagctaaacactt

SEQ ID NO: 2600034 - DNA, 25 bp, Homo sapien
taaaggtgtgcatcaagacccaggt

SEQ ID NO: 2600035 - DNA, 25 bp, Homo sapien
gtgtaaatcaggctccagtatttca

SEQ ID NO: 2600036 - DNA, 25 bp, Homo sapien
ggtggagacccagtacacaggtgta

SEQ ID NO: 2600037 - DNA, 25 bp, Homo sapien
ctgggtggattcctcggctccaggt

SEQ ID NO: 2600038 - DNA, 25 bp, Homo sapien
caggtgaacaccaggttttaggtgg

SEQ ID NO: 2600039 - DNA, 25 bp, Homo sapien
catccggtcttcagctgaacatcag

SEQ ID NO: 2600040 - DNA, 25 bp, Homo sapien
taaagtaccagtggacatccatgct

SEQ ID NO: 2600041 - DNA, 25 bp, Homo sapien
cccacttctccgaggtgagcttttt

SEQ ID NO: 2600042 - DNA, 25 bp, Homo sapien
tttggagccagggatgctagtgtcc

SEQ ID NO: 2600043 - DNA, 25 bp, Homo sapien
ctagaggtaccgctagcggcccgag

SEQ ID NO: 2600044 - DNA, 25 bp, Homo sapien
tcatgagccctctgaccgcctagag

SEQ ID NO: 2600045 - DNA, 25 bp, Homo sapien
gaggtgcacccaggcctagaaccag

SEQ ID NO: 2600046 - DNA, 25 bp, Homo sapien
tgccggagtctcttctggtccttga

SEQ ID NO: 2600047 - DNA, 25 bp, Homo sapien
tctggtccttgaactagggtcgcca

SEQ ID NO: 2600048 - DNA, 25 bp, Homo sapien
tagcgggcccgaggtgcacccaggc

SEQ ID NO: 2600049 - DNA, 25 bp, Homo sapien
tcccctcatggaccttctgactttc

SEQ ID NO: 2600050 - DNA, 25 bp, Homo sapien
ccctcatggaccttctgactttctg

SEQ ID NO: 2600051 - DNA, 25 bp, Homo sapien
cttcccctcatggaccttctgactt

SEQ ID NO: 2600052 - DNA, 25 bp, Homo sapien
ctcatggaccttctgactttctgca

SEQ ID NO: 2600053 - DNA, 25 bp, Homo sapien
ttggatttcacccattggtggtagt

SEQ ID NO: 2600054 - DNA, 25 bp, Homo sapien
ggaatcaagatttaacacggacttg

SEQ ID NO: 2600055 - DNA, 25 bp, Homo sapien
atttcacccattggtggtagtggac

SEQ ID NO: 2600056 - DNA, 25 bp, Homo sapien
gaatcaagatttaacacggacttgg

SEQ ID NO: 2600057 - DNA, 25 bp, Homo sapien
gaaagctaacgcactgtttatttgg

SEQ ID NO: 2600058 - DNA, 25 bp, Homo sapien
ggattggggggaagcaccgtgccgc

SEQ ID NO: 2600059 - DNA, 25 bp, Homo sapien
ttggggggaagcaccgtgccgctgc

SEQ ID NO: 2600060 - DNA, 25 bp, Homo sapien
acgcactgtttatttgggggattgg

SEQ ID NO: 2600061 - DNA, 25 bp, Homo sapien
tacgatgggccatgcacttctggcg

SEQ ID NO: 2600062 - DNA, 25 bp, Homo sapien
agtacgatgggccatgcacttctgg

SEQ ID NO: 2600063 - DNA, 25 bp, Homo sapien
ccatgcacttctggcggtcgatgaa

SEQ ID NO: 2600064 - DNA, 25 bp, Homo sapien
tgggccatgcacttctggcggtcga

SEQ ID NO: 2600065 - DNA, 25 bp, Homo sapien
ctgggaagacgccatgaaaggatcc

SEQ ID NO: 2600066 - DNA, 25 bp, Homo sapien
cctgggaagacgccatgaaaggatc

SEQ ID NO: 2600067 - DNA, 25 bp, Homo sapien
accaggaaagcggctctagggcaga

SEQ ID NO: 2600068 - DNA, 25 bp, Homo sapien
ccaggaaagcggctctagggcagag

SEQ ID NO: 2600069 - DNA, 25 bp, Homo sapien
gccaccaggcatccgttaacaaggg

SEQ ID NO: 2600070 - DNA, 25 bp, Homo sapien
aaaggacggcccatctatgcctgta

SEQ ID NO: 2600071 - DNA, 25 bp, Homo sapien
gatatttgacggaaggaggcaccca

SEQ ID NO: 2600072 - DNA, 25 bp, Homo sapien
tagcccaggcgtaggtcatactttc

SEQ ID NO: 2600073 - DNA, 25 bp, Homo sapien
aaggagcttcctcccgggaagatga

SEQ ID NO: 2600074 - DNA, 25 bp, Homo sapien
tggggtgagaccacgtgggcacagg

SEQ ID NO: 2600075 - DNA, 25 bp, Homo sapien
cttgtctgaaggagcttcctcccgg

SEQ ID NO: 2600076 - DNA, 25 bp, Homo sapien
tctgaaggagcttcctcccgggaag

SEQ ID NO: 2600077 - DNA, 25 bp, Homo sapien
ctgtgtgtttaaggcgtgcttgcat

SEQ ID NO: 2600078 - DNA, 25 bp, Homo sapien
catgttgtgtgtggccgcagagtct

SEQ ID NO: 2600079 - DNA, 25 bp, Homo sapien
gacctgcccagtgtcatgtctatat

SEQ ID NO: 2600080 - DNA, 25 bp, Homo sapien
tgtttattggagagggtcgcagcga

SEQ ID NO: 2600081 - DNA, 25 bp, Homo sapien
gcatgttgggccggtgtgagagcag

SEQ ID NO: 2600082 - DNA, 25 bp, Homo sapien
ctgaactgggctgcatcgcggcaca

SEQ ID NO: 2600083 - DNA, 25 bp, Homo sapien
actgggctgcatcgcggcacagctg

SEQ ID NO: 2600084 - DNA, 25 bp, Homo sapien
catcgcggcacagctgcatgttggg

SEQ ID NO: 2600085 - DNA, 25 bp, Homo sapien
tcctgatctgtgatttcccgcagca

SEQ ID NO: 2600086 - DNA, 25 bp, Homo sapien
tccttcagtgccaccacgttgtgtt

SEQ ID NO: 2600087 - DNA, 25 bp, Homo sapien
ctacagccgggtctgggctatgtgc

SEQ ID NO: 2600088 - DNA, 25 bp, Homo sapien
tatgtgcagaggttcctccttgtcc

SEQ ID NO: 2600089 - DNA, 25 bp, Homo sapien
gacccaaatcctgctcaaggactgg

SEQ ID NO: 2600090 - DNA, 25 bp, Homo sapien
tacataggtttacggagaggtgaca

SEQ ID NO: 2600091 - DNA, 25 bp, Homo sapien
gggttgcaacacactgcgatcatac

SEQ ID NO: 2600092 - DNA, 25 bp, Homo sapien
gcctgttgtctcttagctctggtcc

SEQ ID NO: 2600093 - DNA, 25 bp, Homo sapien
ctgtgtgaacttggtccgggtctct

SEQ ID NO: 2600094 - DNA, 25 bp, Homo sapien
tgtgtgaacttggtccgggtctctg

SEQ ID NO: 2600095 - DNA, 25 bp, Homo sapien
agtgggcggtgttcgtgctccctct

SEQ ID NO: 2600096 - DNA, 25 bp, Homo sapien
ctggccttgggtggaaatgcaatcc

SEQ ID NO: 2600097 - DNA, 25 bp, Homo sapien
gtggaaatgcaatcctgccggtgcc

SEQ ID NO: 2600098 - DNA, 25 bp, Homo sapien
aggagtttgctatgctcaagtgggc

SEQ ID NO: 2600099 - DNA, 25 bp, Homo sapien
cgggcaaccaggctgtgcacgcgct

SEQ ID NO: 2600100 - DNA, 25 bp, Homo sapien
cctgtcctgtctacgggcaaccagg

SEQ ID NO: 2600101 - DNA, 25 bp, Homo sapien
gcacgcgctgggcacttgaggaggt

SEQ ID NO: 2600102 - DNA, 25 bp, Homo sapien
acagttgcccaagtgccctcggggg

SEQ ID NO: 2600103 - DNA, 25 bp, Homo sapien
cccctctcttggaaggtggtggagt

SEQ ID NO: 2600104 - DNA, 25 bp, Homo sapien
ccaggcagagggaggcgagaccaca

SEQ ID NO: 2600105 - DNA, 25 bp, Homo sapien
ggtggagtgccggatgagcctgcac

SEQ ID NO: 2600106 - DNA, 25 bp, Homo sapien
agccagggcaagcacggggcagagc

SEQ ID NO: 2600107 - DNA, 25 bp, Homo sapien
caagtcttgtcgaggttgtaggcct

SEQ ID NO: 2600108 - DNA, 25 bp, Homo sapien
cccgcaagtcttgtcgaggttgtag

SEQ ID NO: 2600109 - DNA, 25 bp, Homo sapien
agtcttgtcgaggttgtaggcctcc

SEQ ID NO: 2600110 - DNA, 25 bp, Homo sapien
tggcgcccgcaagtcttgtcgaggt

SEQ ID NO: 2600111 - DNA, 25 bp, Homo sapien
ggagtcatcccttgggcagccctcg

SEQ ID NO: 2600112 - DNA, 25 bp, Homo sapien
ggggtcaggagtcatcccttgggca

SEQ ID NO: 2600113 - DNA, 25 bp, Homo sapien
gagtcatcccttgggcagccctcga

SEQ ID NO: 2600114 - DNA, 25 bp, Homo sapien
aggagtcatcccttgggcagccctc

SEQ ID NO: 2600115 - DNA, 25 bp, Homo sapien
gcagctcctgaatgttccggatgag

SEQ ID NO: 2600116 - DNA, 25 bp, Homo sapien
cttgcatgatggctctcttcagcag

SEQ ID NO: 2600117 - DNA, 25 bp, Homo sapien
gaatgttccggatgagctcagcttc

SEQ ID NO: 2600118 - DNA, 25 bp, Homo sapien
catgatggctctcttcagcagctcc

SEQ ID NO: 2600119 - DNA, 25 bp, Homo sapien
cagagccggtccttggtgaggatcc

SEQ ID NO: 2600120 - DNA, 25 bp, Homo sapien
agccggtccttggtgaggatcccag

SEQ ID NO: 2600121 - DNA, 25 bp, Homo sapien
ctgagcaccagagccggtccttggt

SEQ ID NO: 2600122 - DNA, 25 bp, Homo sapien
caccagagccggtccttggtgagga

SEQ ID NO: 2600123 - DNA, 25 bp, Homo sapien
agcaggaggaagaccctgtgtttct

SEQ ID NO: 2600124 - DNA, 25 bp, Homo sapien
acccaggaacgttggcctgtccctg

SEQ ID NO: 2600125 - DNA, 25 bp, Homo sapien
gtgcacccaggaacgttggcctgtc

SEQ ID NO: 2600126 - DNA, 25 bp, Homo sapien
aaccagaaatagttgaatgccgggc

SEQ ID NO: 2600127 - DNA, 25 bp, Homo sapien
catcacttcgcaggcacccttgttg

SEQ ID NO: 2600128 - DNA, 25 bp, Homo sapien
tccatcacttcgcaggcacccttgt

SEQ ID NO: 2600129 - DNA, 25 bp, Homo sapien
gtgtctccatcacttcgcaggcacc

SEQ ID NO: 2600130 - DNA, 25 bp, Homo sapien
cacttcgcaggcacccttgttgcag

SEQ ID NO: 2600131 - DNA, 25 bp, Homo sapien
tggtcacgcaaaaggttggtgtgct

SEQ ID NO: 2600132 - DNA, 25 bp, Homo sapien
cacatggtcacgcaaaaggttggtg

SEQ ID NO: 2600133 - DNA, 25 bp, Homo sapien
caaaaggttggtgtgctggtggcgc

SEQ ID NO: 2600134 - DNA, 25 bp, Homo sapien
tctgtctccacatggtcacgcaaaa

SEQ ID NO: 2600135 - DNA, 25 bp, Homo sapien
ggtggccaggccggaggacgtgtag

SEQ ID NO: 2600136 - DNA, 25 bp, Homo sapien
cagctcgtagggtggcactgtctgt

SEQ ID NO: 2600137 - DNA, 25 bp, Homo sapien
ggtcagcttgttgcggtcagcccag

SEQ ID NO: 2600138 - DNA, 25 bp, Homo sapien
tcagcccagtgcagtcatcggtcgg

SEQ ID NO: 2600139 - DNA, 25 bp, Homo sapien
gggtgacacagtaaaccaagagctt

SEQ ID NO: 2600140 - DNA, 25 bp, Homo sapien
gtttcaaattcagtactgtgccgtc

SEQ ID NO: 2600141 - DNA, 25 bp, Homo sapien
tacctattcaagaggtggtgtgagg

SEQ ID NO: 2600142 - DNA, 25 bp, Homo sapien
tgtgccgtctgcttgatagatttgt

SEQ ID NO: 2600143 - DNA, 25 bp, Homo sapien
tgaggtttaggagagttatgtgccc

SEQ ID NO: 2600144 - DNA, 25 bp, Homo sapien
tgcacaataggttgagggacttctc

SEQ ID NO: 2600145 - DNA, 25 bp, Homo sapien
ggtggtttagtgacacggaccctgc

SEQ ID NO: 2600146 - DNA, 25 bp, Homo sapien
ttatttgcccggagtgtcatctgat

SEQ ID NO: 2600147 - DNA, 25 bp, Homo sapien
gcagtggatcatggcacaatttacc

SEQ ID NO: 2600148 - DNA, 25 bp, Homo sapien
ggagttaacggcattagcatgggat

SEQ ID NO: 2600149 - DNA, 25 bp, Homo sapien
taacggcattagcatgggattcaaa

SEQ ID NO: 2600150 - DNA, 25 bp, Homo sapien
ctataggagttaacggcattagcat

SEQ ID NO: 2600151 - DNA, 25 bp, Homo sapien
gcattagcatgggattcaaaagaaa

SEQ ID NO: 2600152 - DNA, 25 bp, Homo sapien
aacattgtagaggtaagtggctgaa

SEQ ID NO: 2600153 - DNA, 25 bp, Homo sapien
ctctgcttactgcacacaagcacat

SEQ ID NO: 2600154 - DNA, 25 bp, Homo sapien
tgaaaaacaggaacattgtagaggt

SEQ ID NO: 2600155 - DNA, 25 bp, Homo sapien
aagtggctgaaaatgctctgcttac

SEQ ID NO: 2600156 - DNA, 25 bp, Homo sapien
tcaataagactaaggaagggcttgt

SEQ ID NO: 2600157 - DNA, 25 bp, Homo sapien
ggttcactcaccctatggtccgtga

SEQ ID NO: 2600158 - DNA, 25 bp, Homo sapien
tcctaaatgtagtagctctgggcag

SEQ ID NO: 2600159 - DNA, 25 bp, Homo sapien
aactcccttatcctgcaagctgtag

SEQ ID NO: 2600160 - DNA, 25 bp, Homo sapien
gctattcagtaactacactataggt

SEQ ID NO: 2600161 - DNA, 25 bp, Homo sapien
tgttgctacaaagcatagattatga

SEQ ID NO: 2600162 - DNA, 25 bp, Homo sapien
gcagtgccatttctaactaggtgta

SEQ ID NO: 2600163 - DNA, 25 bp, Homo sapien
tagtctcgtcttttctctagtgcct

SEQ ID NO: 2600164 - DNA, 25 bp, Homo sapien
tagaacctatattacggaagtcagc

SEQ ID NO: 2600165 - DNA, 25 bp, Homo sapien
gaaccaatggttatataatacccag

SEQ ID NO: 2600166 - DNA, 25 bp, Homo sapien
cttttggaatggcaacacaagtgag

SEQ ID NO: 2600167 - DNA, 25 bp, Homo sapien
ttatatcacagaagtatgggctcac

SEQ ID NO: 2600168 - DNA, 25 bp, Homo sapien
ccacttctggtctcccgaaatagga

SEQ ID NO: 2600169 - DNA, 25 bp, Homo sapien
caaagaaacagtcatcccttctctt

SEQ ID NO: 2600170 - DNA, 25 bp, Homo sapien
tatttaaaagcgcaatattccttcc

SEQ ID NO: 2600171 - DNA, 25 bp, Homo sapien
cgaaataggaatgccaggtcagaca

SEQ ID NO: 2600172 - DNA, 25 bp, Homo sapien
cacgtctggaccaccttcagccaag

SEQ ID NO: 2600173 - DNA, 25 bp, Homo sapien
tggtggagagggtccccccatcttc

SEQ ID NO: 2600174 - DNA, 25 bp, Homo sapien
tcacgtctggaccaccttcagccaa

SEQ ID NO: 2600175 - DNA, 25 bp, Homo sapien
gtgatggtggagagggtccccccat

SEQ ID NO: 2600176 - DNA, 25 bp, Homo sapien
ctcgttggggaagttgaccagcatg

SEQ ID NO: 2600177 - DNA, 25 bp, Homo sapien
cggtgtagctctggccttgctgttc

SEQ ID NO: 2600178 - DNA, 25 bp, Homo sapien
caggcagcagaggctcgttggggaa

SEQ ID NO: 2600179 - DNA, 25 bp, Homo sapien
gggcggtgtagctctggccttgctg

SEQ ID NO: 2600180 - DNA, 25 bp, Homo sapien
cagccgtgctccctggtccagctca

SEQ ID NO: 2600181 - DNA, 25 bp, Homo sapien
cactccccataggaggccgagagca

SEQ ID NO: 2600182 - DNA, 25 bp, Homo sapien
gcatggggacaaccccctaagctgt

SEQ ID NO: 2600183 - DNA, 25 bp, Homo sapien
taagctgtccactccccataggagg

SEQ ID NO: 2600184 - DNA, 25 bp, Homo sapien
cctgtggagcacctcggggaccgct

SEQ ID NO: 2600185 - DNA, 25 bp, Homo sapien
cttcccaagtcgctcaagttctggc

SEQ ID NO: 2600186 - DNA, 25 bp, Homo sapien
cttcctgagacgcaggtactgggcg

SEQ ID NO: 2600187 - DNA, 25 bp, Homo sapien
cgctcaagttctggcggaacggcct

SEQ ID NO: 2600188 - DNA, 25 bp, Homo sapien
cacacgcaggctctaaatgggatat

SEQ ID NO: 2600189 - DNA, 25 bp, Homo sapien
tgctatggacagagacatgcagaca

SEQ ID NO: 2600190 - DNA, 25 bp, Homo sapien
tacaactaggcaacatcttttctcc

SEQ ID NO: 2600191 - DNA, 25 bp, Homo sapien
gtgttgagttagaatcgcccttctc

SEQ ID NO: 2600192 - DNA, 25 bp, Homo sapien
ttgagttaacagtccacccattggc

SEQ ID NO: 2600193 - DNA, 25 bp, Homo sapien
tggtgatgatggctatacattttcc

SEQ ID NO: 2600194 - DNA, 25 bp, Homo sapien
gggcatttctggtatctcaactggc

SEQ ID NO: 2600195 - DNA, 25 bp, Homo sapien
attaaaagaggagttacatgctggg

SEQ ID NO: 2600196 - DNA, 25 bp, Homo sapien
cggcctatgttgtttattatatatc

SEQ ID NO: 2600197 - DNA, 25 bp, Homo sapien
gcccggcctatgttgtttattatat

SEQ ID NO: 2600198 - DNA, 25 bp, Homo sapien
tatataactgatacgtatacatata

SEQ ID NO: 2600199 - DNA, 25 bp, Homo sapien
cccggcctatgttgtttattatata

SEQ ID NO: 2600200 - DNA, 25 bp, Homo sapien
aggaatattgggacttaatctcctt

SEQ ID NO: 2600201 - DNA, 25 bp, Homo sapien
catatattctgtaagcataaatatt

SEQ ID NO: 2600202 - DNA, 25 bp, Homo sapien
tagaaaatagtagaagataagcttt

SEQ ID NO: 2600203 - DNA, 25 bp, Homo sapien
taatctccttgaaactttgtcaccc

SEQ ID NO: 2600204 - DNA, 25 bp, Homo sapien
cctgggagatcctgttcagagattc

SEQ ID NO: 2600205 - DNA, 25 bp, Homo sapien
gagattctgacaggacaaaggtaaa

SEQ ID NO: 2600206 - DNA, 25 bp, Homo sapien
ccagagtggctgcagagatggtcac

SEQ ID NO: 2600207 - DNA, 25 bp, Homo sapien
aaagcacgtgtttcgatggacctgg

SEQ ID NO: 2600208 - DNA, 25 bp, Homo sapien
cagcttcccaaagtgctgcgattac

SEQ ID NO: 2600209 - DNA, 25 bp, Homo sapien
tggcgtttcacagtgttagcccgga

SEQ ID NO: 2600210 - DNA, 25 bp, Homo sapien
agatggcgtttcacagtgttagccc

SEQ ID NO: 2600211 - DNA, 25 bp, Homo sapien
agcttcccaaagtgctgcgattaca

SEQ ID NO: 2600212 - DNA, 25 bp, Homo sapien
ctgcacctggcaatttttaaatata

SEQ ID NO: 2600213 - DNA, 25 bp, Homo sapien
cacgcctggctaattttttgatttt

SEQ ID NO: 2600214 - DNA, 25 bp, Homo sapien
taatagagatgaggtttcaccatgt

SEQ ID NO: 2600215 - DNA, 25 bp, Homo sapien
tacagatgcatgctatcacgcctgg

SEQ ID NO: 2600216 - DNA, 25 bp, Homo sapien
aaaggcagtgctaaagggaagctta

SEQ ID NO: 2600217 - DNA, 25 bp, Homo sapien
aaggcagtgctaaagggaagcttac

SEQ ID NO: 2600218 - DNA, 25 bp, Homo sapien
aggcagtgctaaagggaagcttaca

SEQ ID NO: 2600219 - DNA, 25 bp, Homo sapien
aaataggtgacagtacaacagatgc

SEQ ID NO: 2600220 - DNA, 25 bp, Homo sapien
taggtgacagtacaacagatgccac

SEQ ID NO: 2600221 - DNA, 25 bp, Homo sapien
taaaataggtgacagtacaacagat

SEQ ID NO: 2600222 - DNA, 25 bp, Homo sapien
aataggtgacagtacaacagatgcc

SEQ ID NO: 2600223 - DNA, 25 bp, Homo sapien
actacttgaggtgacctagattcaa

SEQ ID NO: 2600224 - DNA, 25 bp, Homo sapien
acactacttgaggtgacctagattc

SEQ ID NO: 2600225 - DNA, 25 bp, Homo sapien
tcaacactacttgaggtgacctaga

SEQ ID NO: 2600226 - DNA, 25 bp, Homo sapien
caacactacttgaggtgacctagat

SEQ ID NO: 2600227 - DNA, 25 bp, Homo sapien
gattttccattgtgatgcagcttgg

SEQ ID NO: 2600228 - DNA, 25 bp, Homo sapien
tcttgcaaagctgagtggattattc

SEQ ID NO: 2600229 - DNA, 25 bp, Homo sapien
tgttaatttggttactccaagcaac

SEQ ID NO: 2600230 - DNA, 25 bp, Homo sapien
tattcctgtgattccatgattttcc

SEQ ID NO: 2600231 - DNA, 25 bp, Homo sapien
aaacaatggtaactaagagtgaggc

SEQ ID NO: 2600232 - DNA, 25 bp, Homo sapien
taactaagagtgaggctaaggccct

SEQ ID NO: 2600233 - DNA, 25 bp, Homo sapien
tggtaactaagagtgaggctaaggc

SEQ ID NO: 2600234 - DNA, 25 bp, Homo sapien
caatggtaactaagagtgaggctaa

SEQ ID NO: 2600235 - DNA, 25 bp, Homo sapien
ttattgcagctggaatcccccctcc

SEQ ID NO: 2600236 - DNA, 25 bp, Homo sapien
tctaacttgcttgggtacgacagtt

SEQ ID NO: 2600237 - DNA, 25 bp, Homo sapien
tggcatttctctctaacttgcttgg

SEQ ID NO: 2600238 - DNA, 25 bp, Homo sapien
tctctctaacttgcttgggtacgac

SEQ ID NO: 2600239 - DNA, 25 bp, Homo sapien
catttccactgcacaacacgccgtg

SEQ ID NO: 2600240 - DNA, 25 bp, Homo sapien
ccatttccactgtacaacatgctgt

SEQ ID NO: 2600241 - DNA, 25 bp, Homo sapien
gaccatttccactgtacaacatgct

SEQ ID NO: 2600242 - DNA, 25 bp, Homo sapien
accatttccactgtacaacatgctg

SEQ ID NO: 2600243 - DNA, 25 bp, Homo sapien
cacaacacgccatgctttagcggaa

SEQ ID NO: 2600244 - DNA, 25 bp, Homo sapien
ctatatctacaggtcagctttatct

SEQ ID NO: 2600245 - DNA, 25 bp, Homo sapien
ttcctttttaattcacagacaccca

SEQ ID NO: 2600246 - DNA, 25 bp, Homo sapien
tatatctacaggtcagctttatctt

SEQ ID NO: 2600247 - DNA, 25 bp, Homo sapien
cagagatttattcgtttcttgttgc

SEQ ID NO: 2600248 - DNA, 25 bp, Homo sapien
gaaacacccagaggacactggaaac

SEQ ID NO: 2600249 - DNA, 25 bp, Homo sapien
tcgtttcttgttgctcttggaaaca

SEQ ID NO: 2600250 - DNA, 25 bp, Homo sapien
ttgctcttggaaacacccagaggac

SEQ ID NO: 2600251 - DNA, 25 bp, Homo sapien
agggacatagaaccaagccccaggg

SEQ ID NO: 2600252 - DNA, 25 bp, Homo sapien
gctgctcagctacacgaccgccgct

SEQ ID NO: 2600253 - DNA, 25 bp, Homo sapien
tcagctacacgaccgccgctgggat

SEQ ID NO: 2600254 - DNA, 25 bp, Homo sapien
ccagggctgctcagctacacgaccg

SEQ ID NO: 2600255 - DNA, 25 bp, Homo sapien
gtgtctgatgaacatttgcccataa

SEQ ID NO: 2600256 - DNA, 25 bp, Homo sapien
catttgcccataaactcccacgttt

SEQ ID NO: 2600257 - DNA, 25 bp, Homo sapien
tgatgaacatttgcccataaactcc

SEQ ID NO: 2600258 - DNA, 25 bp, Homo sapien
ccagtgtctgatgaacatttgccca

SEQ ID NO: 2600259 - DNA, 25 bp, Homo sapien
tagacaagctagagtaaaagtgtcc

SEQ ID NO: 2600260 - DNA, 25 bp, Homo sapien
acaagctagagtaaaagtgtcccag

SEQ ID NO: 2600261 - DNA, 25 bp, Homo sapien
gacaagctagagtaaaagtgtccca

SEQ ID NO: 2600262 - DNA, 25 bp, Homo sapien
ttagacaagctagagtaaaagtgtc

SEQ ID NO: 2600263 - DNA, 25 bp, Homo sapien
gacgtacattgggacttttctgttg

SEQ ID NO: 2600264 - DNA, 25 bp, Homo sapien
cttacaccagggacgtacattggga

SEQ ID NO: 2600265 - DNA, 25 bp, Homo sapien
caccagggacgtacattgggacttt

SEQ ID NO: 2600266 - DNA, 25 bp, Homo sapien
cagggacgtacattgggacttttct

SEQ ID NO: 2600267 - DNA, 25 bp, Homo sapien
tgcatgtagagtaaagatgagaagg

SEQ ID NO: 2600268 - DNA, 25 bp, Homo sapien
ctgcatgtagagtaaagatgagaag

SEQ ID NO: 2600269 - DNA, 25 bp, Homo sapien
gcatgtagagtaaagatgagaaggc

SEQ ID NO: 2600270 - DNA, 25 bp, Homo sapien
aatgtctgacgtccacctttttcca

SEQ ID NO: 2600271 - DNA, 25 bp, Homo sapien
tgtctgacgtccacctttttccaat

SEQ ID NO: 2600272 - DNA, 25 bp, Homo sapien
tcaatgtctgacgtccacctttttc

SEQ ID NO: 2600273 - DNA, 25 bp, Homo sapien
tctgacgtccacctttttccaatta

SEQ ID NO: 2600274 - DNA, 25 bp, Homo sapien
tccagtcccaatctcgttttctcta

SEQ ID NO: 2600275 - DNA, 25 bp, Homo sapien
tctcgttttctctatcacattctac

SEQ ID NO: 2600276 - DNA, 25 bp, Homo sapien
cagtcccaatctcgttttctctatc

SEQ ID NO: 2600277 - DNA, 25 bp, Homo sapien
tcttgtttccagtcccaatctcgtt

SEQ ID NO: 2600278 - DNA, 25 bp, Homo sapien
caaatttgtgtttatgattgtgttg

SEQ ID NO: 2600279 - DNA, 25 bp, Homo sapien
aatttgtgtttatgattgtgttggg

SEQ ID NO: 2600280 - DNA, 25 bp, Homo sapien
aaatttgtgtttatgattgtgttgg

SEQ ID NO: 2600281 - DNA, 25 bp, Homo sapien
tgggaagttaatgttggatgcatct

SEQ ID NO: 2600282 - DNA, 25 bp, Homo sapien
catctttgacaattgatggaatgac

SEQ ID NO: 2600283 - DNA, 25 bp, Homo sapien
tgttgtggcccagaatgacaatgtt

SEQ ID NO: 2600284 - DNA, 25 bp, Homo sapien
caatccaaaccagtagttgggaagt

SEQ ID NO: 2600285 - DNA, 25 bp, Homo sapien
taggtttggtcttataaggcataca

SEQ ID NO: 2600286 - DNA, 25 bp, Homo sapien
aaacattcctgtgtaaaagtagtca

SEQ ID NO: 2600287 - DNA, 25 bp, Homo sapien
tagtcaccactcttactattcttca

SEQ ID NO: 2600288 - DNA, 25 bp, Homo sapien
cagcatctcattgacaaatcacaaa

SEQ ID NO: 2600289 - DNA, 25 bp, Homo sapien
aagttgctcttcagtactgcatata

SEQ ID NO: 2600290 - DNA, 25 bp, Homo sapien
agttgctcttcagtactgcatataa

SEQ ID NO: 2600291 - DNA, 25 bp, Homo sapien
gaagttgctcttcagtactgcatat

SEQ ID NO: 2600292 - DNA, 25 bp, Homo sapien
caccagtaggtggacctccttgacc

SEQ ID NO: 2600293 - DNA, 25 bp, Homo sapien
ccagtaggtggacctccttgaccat

SEQ ID NO: 2600294 - DNA, 25 bp, Homo sapien
ccaccagtaggtggacctccttgac

SEQ ID NO: 2600295 - DNA, 25 bp, Homo sapien
accagtaggtggacctccttgacca

SEQ ID NO: 2600296 - DNA, 25 bp, Homo sapien
tatccactaacccactgtggatttc

SEQ ID NO: 2600297 - DNA, 25 bp, Homo sapien
tgttccagaaactttattgatgcca

SEQ ID NO: 2600298 - DNA, 25 bp, Homo sapien
tgggaccagaggttttgtaatatcc

SEQ ID NO: 2600299 - DNA, 25 bp, Homo sapien
ccagaaactttattgatgccatttc

SEQ ID NO: 2600300 - DNA, 25 bp, Homo sapien
ttcattcataacagcctaaaatagg

SEQ ID NO: 2600301 - DNA, 25 bp, Homo sapien
ggccaatcctaaaaagctacatgct

SEQ ID NO: 2600302 - DNA, 25 bp, Homo sapien
aagggatacactattgatatgcaca

SEQ ID NO: 2600303 - DNA, 25 bp, Homo sapien
gaatgagtcttcagacacttgtgct

SEQ ID NO: 2600304 - DNA, 25 bp, Homo sapien
gccaggccgatcttcaacgtattaa

SEQ ID NO: 2600305 - DNA, 25 bp, Homo sapien
tataagggccaagaattgttgttcc

SEQ ID NO: 2600306 - DNA, 25 bp, Homo sapien
tactagccatgtgcttcagagcaag

SEQ ID NO: 2600307 - DNA, 25 bp, Homo sapien
aatgaaccctgaaagctggaaggac

SEQ ID NO: 2600308 - DNA, 25 bp, Homo sapien
atggcatggcttgtcatggccagct

SEQ ID NO: 2600309 - DNA, 25 bp, Homo sapien
gggagagtattcagatcctgcccac

SEQ ID NO: 2600310 - DNA, 25 bp, Homo sapien
catggcttgtcatggccagctcatg

SEQ ID NO: 2600311 - DNA, 25 bp, Homo sapien
atcttctccagggagagtattcaga

SEQ ID NO: 2600312 - DNA, 25 bp, Homo sapien
tagactctggcgacaaccaaggttc

SEQ ID NO: 2600313 - DNA, 25 bp, Homo sapien
taaaaaggcatgaggccctaggact

SEQ ID NO: 2600314 - DNA, 25 bp, Homo sapien
tcaataggtgaagatacgggactgc

SEQ ID NO: 2600315 - DNA, 25 bp, Homo sapien
tagtgagggcgcctacatactgcag

SEQ ID NO: 2600316 - DNA, 25 bp, Homo sapien
gagattaatgtacatcagccctccc

SEQ ID NO: 2600317 - DNA, 25 bp, Homo sapien
taaggaaagaacaatagctgggact

SEQ ID NO: 2600318 - DNA, 25 bp, Homo sapien
caacaagctaacaggctagaggcca

SEQ ID NO: 2600319 - DNA, 25 bp, Homo sapien
ctttctgggagactgtaaaaactca

SEQ ID NO: 2600320 - DNA, 25 bp, Homo sapien
ctgggactctggtcaaagacaggcc

SEQ ID NO: 2600321 - DNA, 25 bp, Homo sapien
tttaagaagacactacaaggcaggc

SEQ ID NO: 2600322 - DNA, 25 bp, Homo sapien
tcccctgaggatactgacggacaac

SEQ ID NO: 2600323 - DNA, 25 bp, Homo sapien
gatgagggtcccatttagagtccat

SEQ ID NO: 2600324 - DNA, 25 bp, Homo sapien
gagagaacccaaatagccgactgca

SEQ ID NO: 2600325 - DNA, 25 bp, Homo sapien
tgattgtatgcaggccgaccagaga

SEQ ID NO: 2600326 - DNA, 25 bp, Homo sapien
aaagcatgtcttccggagcagaggg

SEQ ID NO: 2600327 - DNA, 25 bp, Homo sapien
gtctgacatcaacgacacaggcggg

SEQ ID NO: 2600328 - DNA, 25 bp, Homo sapien
atgattacgcgcgatgccaacgacg

SEQ ID NO: 2600329 - DNA, 25 bp, Homo sapien
caactggagttgcacacgctcggaa

SEQ ID NO: 2600330 - DNA, 25 bp, Homo sapien
tcagccagagcgcagatcctaatcg

SEQ ID NO: 2600331 - DNA, 25 bp, Homo sapien
gctccctccggattttaaggctgaa

SEQ ID NO: 2600332 - DNA, 25 bp, Homo sapien
gccacccgtttctacgcagatctgt

SEQ ID NO: 2600333 - DNA, 25 bp, Homo sapien
cgtttctacgcagatctgtgcccca

SEQ ID NO: 2600334 - DNA, 25 bp, Homo sapien
tccccgccacccgtttctacgcaga

SEQ ID NO: 2600335 - DNA, 25 bp, Homo sapien
ttctacgcagatctgtgccccagtc

SEQ ID NO: 2600336 - DNA, 25 bp, Homo sapien
caggaaaagcggaagagggagcgaa

SEQ ID NO: 2600337 - DNA, 25 bp, Homo sapien
gagcgaaaaccaacgtgttcggtga

SEQ ID NO: 2600338 - DNA, 25 bp, Homo sapien
gtgacagaccccagcgccgactgag

SEQ ID NO: 2600339 - DNA, 25 bp, Homo sapien
caaactgataccgggttggagaggc

SEQ ID NO: 2600340 - DNA, 25 bp, Homo sapien
gatcagattgaggatgatggctctg

SEQ ID NO: 2600341 - DNA, 25 bp, Homo sapien
gatgcacttaacaatttgaccatgg

SEQ ID NO: 2600342 - DNA, 25 bp, Homo sapien
tacgattgtaagtttagacttggtc

SEQ ID NO: 2600343 - DNA, 25 bp, Homo sapien
ccagtagcaatgtggagttattgaa

SEQ ID NO: 2600344 - DNA, 25 bp, Homo sapien
tcttcaagttctcggaatttcttgg

SEQ ID NO: 2600345 - DNA, 25 bp, Homo sapien
taagaacccatgtagttcttcaagt

SEQ ID NO: 2600346 - DNA, 25 bp, Homo sapien
aatttcttgggtttcatggagcctc

SEQ ID NO: 2600347 - DNA, 25 bp, Homo sapien
tagtctgcagtagggcattgccttt

SEQ ID NO: 2600348 - DNA, 25 bp, Homo sapien
ccaggtccttaagtattagcaattg

SEQ ID NO: 2600349 - DNA, 25 bp, Homo sapien
gggtggagcctaatcttaaagacat

SEQ ID NO: 2600350 - DNA, 25 bp, Homo sapien
tccttaagctagtttctcaacctca

SEQ ID NO: 2600351 - DNA, 25 bp, Homo sapien
aacctcaaacttagcctctgaggag

SEQ ID NO: 2600352 - DNA, 25 bp, Homo sapien
caatgcagcttatcctgaagtgggt

SEQ ID NO: 2600353 - DNA, 25 bp, Homo sapien
agacttctgcaagatgccaagaggg

SEQ ID NO: 2600354 - DNA, 25 bp, Homo sapien
ggtctaatattgaggcctggcaatc

SEQ ID NO: 2600355 - DNA, 25 bp, Homo sapien
tggaaagttaactacgaactcctgc

SEQ ID NO: 2600356 - DNA, 25 bp, Homo sapien
attaagttgctctggtgaatcaccc

SEQ ID NO: 2600357 - DNA, 25 bp, Homo sapien
gatctttaccacaaccaagtgcttg

SEQ ID NO: 2600358 - DNA, 25 bp, Homo sapien
tgaacctgagcttctgatccgtaga

SEQ ID NO: 2600359 - DNA, 25 bp, Homo sapien
gccttccaaccagagccagatcttt

SEQ ID NO: 2600360 - DNA, 25 bp, Homo sapien
tcggctagcgcgtttggctgttaac

SEQ ID NO: 2600361 - DNA, 25 bp, Homo sapien
caaaaggcggatggtgctagctagc

SEQ ID NO: 2600362 - DNA, 25 bp, Homo sapien
ccatgtctctgtggcgcaatcggct

SEQ ID NO: 2600363 - DNA, 25 bp, Homo sapien
ttagaacgaaatcaggagctcagcc

SEQ ID NO: 2600364 - DNA, 25 bp, Homo sapien
tcgaaatcttggagattgagcaaga

SEQ ID NO: 2600365 - DNA, 25 bp, Homo sapien
ttccattttgtcctcgaaatcttgg

SEQ ID NO: 2600366 - DNA, 25 bp, Homo sapien
aatttccattttgtcctcgaaatct

SEQ ID NO: 2600367 - DNA, 25 bp, Homo sapien
tttccattttgtcctcgaaatcttg

SEQ ID NO: 2600368 - DNA, 25 bp, Homo sapien
caaattcttggaccttggacaggcc

SEQ ID NO: 2600369 - DNA, 25 bp, Homo sapien
gttttgtggcaaaccagcactccct

SEQ ID NO: 2600370 - DNA, 25 bp, Homo sapien
cagaggactggatccaacctgatca

SEQ ID NO: 2600371 - DNA, 25 bp, Homo sapien
ttggcacatgattctagcaagagcc

SEQ ID NO: 2600372 - DNA, 25 bp, Homo sapien
gctgccgattggtttgacaggtact

SEQ ID NO: 2600373 - DNA, 25 bp, Homo sapien
tgccgattggtttgacaggtactgg

SEQ ID NO: 2600374 - DNA, 25 bp, Homo sapien
gggctgccgattggtttgacaggta

SEQ ID NO: 2600375 - DNA, 25 bp, Homo sapien
gttggggctgccgattggtttgaca

SEQ ID NO: 2600376 - DNA, 25 bp, Homo sapien
agcccccagtccgtgggctccagtt

SEQ ID NO: 2600377 - DNA, 25 bp, Homo sapien
cagctgtccaagcacggcgagctgg

SEQ ID NO: 2600378 - DNA, 25 bp, Homo sapien
agtggagagctggcccgccagccgc

SEQ ID NO: 2600379 - DNA, 25 bp, Homo sapien
cagtccgtgggctccagttgaaccc

SEQ ID NO: 2600380 - DNA, 25 bp, Homo sapien
cacctttgtgtcttcaggccctgtg

SEQ ID NO: 2600381 - DNA, 25 bp, Homo sapien
ccctgtgtatgacctggcacagggc

SEQ ID NO: 2600382 - DNA, 25 bp, Homo sapien
cctgtgtatgacctggcacagggca

SEQ ID NO: 2600383 - DNA, 25 bp, Homo sapien
tttgtgtcttcaggccctgtgtatg

SEQ ID NO: 2600384 - DNA, 25 bp, Homo sapien
tttggttggtggcagcaagggatag

SEQ ID NO: 2600385 - DNA, 25 bp, Homo sapien
gattttggttggtggcagcaaggga

SEQ ID NO: 2600386 - DNA, 25 bp, Homo sapien
ttggttggtggcagcaagggatagg

SEQ ID NO: 2600387 - DNA, 25 bp, Homo sapien
ttagattttggttggtggcagcaag

SEQ ID NO: 2600388 - DNA, 25 bp, Homo sapien
gcctccacataggtcaattctgcca

SEQ ID NO: 2600389 - DNA, 25 bp, Homo sapien
tccacataggtcaattctgccagca

SEQ ID NO: 2600390 - DNA, 25 bp, Homo sapien
cataggtcaattctgccagcagtgg

SEQ ID NO: 2600391 - DNA, 25 bp, Homo sapien
ctgggtcgcctccacataggtcaat

SEQ ID NO: 2600392 - DNA, 25 bp, Homo sapien
gagattatacaggaccaagaagtaa

SEQ ID NO: 2600393 - DNA, 25 bp, Homo sapien
tatagagaccaaagagattatacag

SEQ ID NO: 2600394 - DNA, 25 bp, Homo sapien
aacccccagcacatcatgatagcat

SEQ ID NO: 2600395 - DNA, 25 bp, Homo sapien
gaccaaagagattatacaggaccaa

SEQ ID NO: 2600396 - DNA, 25 bp, Homo sapien
ttgacagggccaaatccggcacaag

SEQ ID NO: 2600397 - DNA, 25 bp, Homo sapien
cctctgttgggtgacataagccaca

SEQ ID NO: 2600398 - DNA, 25 bp, Homo sapien
ggtttgaggacaacctgcgcacagg

SEQ ID NO: 2600399 - DNA, 25 bp, Homo sapien
tgtctgtgcgatcaaggctgaccca

SEQ ID NO: 2600400 - DNA, 25 bp, Homo sapien
gagctgctgggacgacttgggggtt

SEQ ID NO: 2600401 - DNA, 25 bp, Homo sapien
agagctgctgggacgacttgggggt

SEQ ID NO: 2600402 - DNA, 25 bp, Homo sapien
cagagctgctgggacgacttggggg

SEQ ID NO: 2600403 - DNA, 25 bp, Homo sapien
ggtgcaccaactccagcaggttaag

SEQ ID NO: 2600404 - DNA, 25 bp, Homo sapien
tctcgccgagacaggtaaatgacat

SEQ ID NO: 2600405 - DNA, 25 bp, Homo sapien
aagatgaagagcaccgtcagccaga

SEQ ID NO: 2600406 - DNA, 25 bp, Homo sapien
gatcttggccatctgacgctctacg

SEQ ID NO: 2600407 - DNA, 25 bp, Homo sapien
gcagggaggtctgccacgcccgttc

SEQ ID NO: 2600408 - DNA, 25 bp, Homo sapien
cgcccagcaacaagcctgcagggag

SEQ ID NO: 2600409 - DNA, 25 bp, Homo sapien
gcatggcatccttctcgttcgccca

SEQ ID NO: 2600410 - DNA, 25 bp, Homo sapien
agggaggtctgccacgcccgttcta

SEQ ID NO: 2600411 - DNA, 25 bp, Homo sapien
gaggtggggacgatggccggagtga

SEQ ID NO: 2600412 - DNA, 25 bp, Homo sapien
ggaggtggggacgatggccggagtg

SEQ ID NO: 2600413 - DNA, 25 bp, Homo sapien
cctgccgggcggcccaggtggaggt

SEQ ID NO: 2600414 - DNA, 25 bp, Homo sapien
gccagggccctagttcagcgaaaat

SEQ ID NO: 2600415 - DNA, 25 bp, Homo sapien
aagtctaattacgaaggctggaagc

SEQ ID NO: 2600416 - DNA, 25 bp, Homo sapien
tgcagactacatgccctgttgagag

SEQ ID NO: 2600417 - DNA, 25 bp, Homo sapien
tttcaggtcatgacacagcactggg

SEQ ID NO: 2600418 - DNA, 25 bp, Homo sapien
tagcagtgccctaagtggccccttg

SEQ ID NO: 2600419 - DNA, 25 bp, Homo sapien
ccagggcgagcatcactttttgtgt

SEQ ID NO: 2600420 - DNA, 25 bp, Homo sapien
ccttaggtctgctgaggctagccca

SEQ ID NO: 2600421 - DNA, 25 bp, Homo sapien
cccttgcaggcagcgtagatagtta

SEQ ID NO: 2600422 - DNA, 25 bp, Homo sapien
cacagatggtgagtacgatgcagac

SEQ ID NO: 2600423 - DNA, 25 bp, Homo sapien
caccaggcgcggcatattgaagcca

SEQ ID NO: 2600424 - DNA, 25 bp, Homo sapien
ttgttcacaccgctcagtagggcct

SEQ ID NO: 2600425 - DNA, 25 bp, Homo sapien
ttctcggtaggtcgggcaatgtagc

SEQ ID NO: 2600426 - DNA, 25 bp, Homo sapien
gaactgttattcctcccaagctgca

SEQ ID NO: 2600427 - DNA, 25 bp, Homo sapien
tggagctgacttgcacctctgagca

SEQ ID NO: 2600428 - DNA, 25 bp, Homo sapien
caagaggtggattcaaggccaggct

SEQ ID NO: 2600429 - DNA, 25 bp, Homo sapien
ttatgagtcccattctacagcaggg

SEQ ID NO: 2600430 - DNA, 25 bp, Homo sapien
cctgtctgtccggacagagagcaga

SEQ ID NO: 2600431 - DNA, 25 bp, Homo sapien
ctgacggctgcttccacctgacaca

SEQ ID NO: 2600432 - DNA, 25 bp, Homo sapien
tgaagtgaaggttggagccctgtct

SEQ ID NO: 2600433 - DNA, 25 bp, Homo sapien
ctggtgggagttcacaagaactgaa

SEQ ID NO: 2600434 - DNA, 25 bp, Homo sapien
caaactgttaagtgccgcggcggca

SEQ ID NO: 2600435 - DNA, 25 bp, Homo sapien
tccgcttcctcaggcgtgaaatggg

SEQ ID NO: 2600436 - DNA, 25 bp, Homo sapien
ggcaggtccgactgcaatcaggact

SEQ ID NO: 2600437 - DNA, 25 bp, Homo sapien
cgcccacgctagtttgccgcgagta

SEQ ID NO: 2600438 - DNA, 25 bp, Homo sapien
agaagttcctccctgaccagctgcc

SEQ ID NO: 2600439 - DNA, 25 bp, Homo sapien
ttcctgccaccaggtaagaatccct

SEQ ID NO: 2600440 - DNA, 25 bp, Homo sapien
tgctcaggggtcaagtcagttgcgt

SEQ ID NO: 2600441 - DNA, 25 bp, Homo sapien
tcagttgcgtggctggcagtagtct

SEQ ID NO: 2600442 - DNA, 25 bp, Homo sapien
cctgggctgaagaggtgatggcaat

SEQ ID NO: 2600443 - DNA, 25 bp, Homo sapien
cagggcgtagagcttagattgtatc

SEQ ID NO: 2600444 - DNA, 25 bp, Homo sapien
tgatggcaatggatttcagggcgta

SEQ ID NO: 2600445 - DNA, 25 bp, Homo sapien
agcttttggtgccttgatcctgggc

SEQ ID NO: 2600446 - DNA, 25 bp, Homo sapien
gagctcactataagctggaccaagc

SEQ ID NO: 2600447 - DNA, 25 bp, Homo sapien
tgtcaggtcctggagtgagctcact

SEQ ID NO: 2600448 - DNA, 25 bp, Homo sapien
gcccctggaggatggatctggaatc

SEQ ID NO: 2600449 - DNA, 25 bp, Homo sapien
tctgaactggtcaggagtgccaccc

SEQ ID NO: 2600450 - DNA, 25 bp, Homo sapien
tgacaaaggcacgaggaatgacacc

SEQ ID NO: 2600451 - DNA, 25 bp, Homo sapien
cctagaggttcgagggaggatcaca

SEQ ID NO: 2600452 - DNA, 25 bp, Homo sapien
gaggttccagtgctcaggtgctcac

SEQ ID NO: 2600453 - DNA, 25 bp, Homo sapien
gggactcacctatccgggacctgtg

SEQ ID NO: 2600454 - DNA, 25 bp, Homo sapien
taagaggtttgacatatactgttgc

SEQ ID NO: 2600455 - DNA, 25 bp, Homo sapien
gccatatacaaaatccccagtagct

SEQ ID NO: 2600456 - DNA, 25 bp, Homo sapien
ctgctacggcaaggatgccactgcc

SEQ ID NO: 2600457 - DNA, 25 bp, Homo sapien
gggacctgttgatcttatctgctga

SEQ ID NO: 2600458 - DNA, 25 bp, Homo sapien
gggccgaagatctccatgcacctct

SEQ ID NO: 2600459 - DNA, 25 bp, Homo sapien
cgacccagccttcattaggacagag

SEQ ID NO: 2600460 - DNA, 25 bp, Homo sapien
ggcacgtatcgggtaggcattcccg

SEQ ID NO: 2600461 - DNA, 25 bp, Homo sapien
agaggacatatggtgggcacgtatc

SEQ ID NO: 2600462 - DNA, 25 bp, Homo sapien
tcataatccttgtagaggcggtgga

SEQ ID NO: 2600463 - DNA, 25 bp, Homo sapien
cttgctcaggttgtcgtacagggac

SEQ ID NO: 2600464 - DNA, 25 bp, Homo sapien
cactgtggagtacttgttcacgcca

SEQ ID NO: 2600465 - DNA, 25 bp, Homo sapien
tgggccgggagatgtaacagtccac

SEQ ID NO: 2600466 - DNA, 25 bp, Homo sapien
tatacctgggtgctacctgcccact

SEQ ID NO: 2600467 - DNA, 25 bp, Homo sapien
gcacgtggaaggtctatacctgggt

SEQ ID NO: 2600468 - DNA, 25 bp, Homo sapien
gaaggtctatacctgggtgctacct

SEQ ID NO: 2600469 - DNA, 25 bp, Homo sapien
gctacctgcccactcaggccttggg

SEQ ID NO: 2600470 - DNA, 25 bp, Homo sapien
tagggtagggattgcccctgtcctc

SEQ ID NO: 2600471 - DNA, 25 bp, Homo sapien
tggagatgggcacccttaatgctgg

SEQ ID NO: 2600472 - DNA, 25 bp, Homo sapien
taatgctggtgcgattgacaaaatc

SEQ ID NO: 2600473 - DNA, 25 bp, Homo sapien
gagatacctgcccaatggtccacag

SEQ ID NO: 2600474 - DNA, 25 bp, Homo sapien
tagatacatgtgaagacaatcatcc

SEQ ID NO: 2600475 - DNA, 25 bp, Homo sapien
gatacatgtgaagacaatcatcctg

SEQ ID NO: 2600476 - DNA, 25 bp, Homo sapien
tacatgtgaagacaatcatcctgca

SEQ ID NO: 2600477 - DNA, 25 bp, Homo sapien
gtgaagacaatcatcctgcatggat

SEQ ID NO: 2600478 - DNA, 25 bp, Homo sapien
gaaggcttgaattggacgatctgct

SEQ ID NO: 2600479 - DNA, 25 bp, Homo sapien
tactgaacaccaacaagagcctggc

SEQ ID NO: 2600480 - DNA, 25 bp, Homo sapien
tctaaagagaccgtaggaaggcttg

SEQ ID NO: 2600481 - DNA, 25 bp, Homo sapien
tgccaacccgtgtactggtgctggg

SEQ ID NO: 2600482 - DNA, 25 bp, Homo sapien
ccttcttgggtccagtagctgcttc

SEQ ID NO: 2600483 - DNA, 25 bp, Homo sapien
tgggtccagtagctgcttccttgtc

SEQ ID NO: 2600484 - DNA, 25 bp, Homo sapien
ttcttgggtccagtagctgcttcct

SEQ ID NO: 2600485 - DNA, 25 bp, Homo sapien
ccagtagctgcttccttgtccttgg

SEQ ID NO: 2600486 - DNA, 25 bp, Homo sapien
tattaagttctgacagtgggccaca

SEQ ID NO: 2600487 - DNA, 25 bp, Homo sapien
gaaaaggaaaccgagctgcagagca

SEQ ID NO: 2600488 - DNA, 25 bp, Homo sapien
tcaggttgcacctatgagagatgct

SEQ ID NO: 2600489 - DNA, 25 bp, Homo sapien
agttgaggactaggaactggctccc

SEQ ID NO: 2600490 - DNA, 25 bp, Homo sapien
tcttcacatggtctcgggggcggtc

SEQ ID NO: 2600491 - DNA, 25 bp, Homo sapien
ggcactcgtggcatctcttgctcac

SEQ ID NO: 2600492 - DNA, 25 bp, Homo sapien
tgtctgagcccagaaagatgaggtc

SEQ ID NO: 2600493 - DNA, 25 bp, Homo sapien
tgaggtcacccgaaaggaggtcgtc

SEQ ID NO: 2600494 - DNA, 25 bp, Homo sapien
catcaaagcagacgttggagcagcc

SEQ ID NO: 2600495 - DNA, 25 bp, Homo sapien
tattgggacatggatctgcgtggca

SEQ ID NO: 2600496 - DNA, 25 bp, Homo sapien
tagagaaaggcgatgtccacgctcg

SEQ ID NO: 2600497 - DNA, 25 bp, Homo sapien
tagatgagctccacgaggttgagca

SEQ ID NO: 2600498 - DNA, 25 bp, Homo sapien
tcatatccagaagcggggaaggttt

SEQ ID NO: 2600499 - DNA, 25 bp, Homo sapien
tgagtgactactcctcagggctctc

SEQ ID NO: 2600500 - DNA, 25 bp, Homo sapien
cagccggcaataggactcagcaagc

SEQ ID NO: 2600501 - DNA, 25 bp, Homo sapien
cccagcagccggcaataggactcag

SEQ ID NO: 2600502 - DNA, 25 bp, Homo sapien
cagggtgtccaggtgaaggggtcca

SEQ ID NO: 2600503 - DNA, 25 bp, Homo sapien
cccaggtcacttttagcacctggag

SEQ ID NO: 2600504 - DNA, 25 bp, Homo sapien
cctggtggtctgaggaatagaggat

SEQ ID NO: 2600505 - DNA, 25 bp, Homo sapien
aatagaggattgtggctggagatat

SEQ ID NO: 2600506 - DNA, 25 bp, Homo sapien
agcacacaaaccctgcatcagagct

SEQ ID NO: 2600507 - DNA, 25 bp, Homo sapien
cctgcatcagagctgcttccggtct

SEQ ID NO: 2600508 - DNA, 25 bp, Homo sapien
tgcttccggtctgagtgaaggtgga

SEQ ID NO: 2600509 - DNA, 25 bp, Homo sapien
tcagcacacaaaccctgcatcagag

SEQ ID NO: 2600510 - DNA, 25 bp, Homo sapien
catctcccaggagcttcttgggcat

SEQ ID NO: 2600511 - DNA, 25 bp, Homo sapien
caggtttctggcagcctgcagcttg

SEQ ID NO: 2600512 - DNA, 25 bp, Homo sapien
tgagaggggctctggcccatctccc

SEQ ID NO: 2600513 - DNA, 25 bp, Homo sapien
cagcaggtttctggcagcctgcagc

SEQ ID NO: 2600514 - DNA, 25 bp, Homo sapien
cctcagagccgttctgtgctgccag

SEQ ID NO: 2600515 - DNA, 25 bp, Homo sapien
agcgaccagccaccagcgaccagct

SEQ ID NO: 2600516 - DNA, 25 bp, Homo sapien
ccgccctcagagccgttctgtgctg

SEQ ID NO: 2600517 - DNA, 25 bp, Homo sapien
ccagcgaccagccaccagcgaccag

SEQ ID NO: 2600518 - DNA, 25 bp, Homo sapien
tcaaacttcaacttgtaaaggtgag

SEQ ID NO: 2600519 - DNA, 25 bp, Homo sapien
tgtgctagaacctcctctacggtca

SEQ ID NO: 2600520 - DNA, 25 bp, Homo sapien
tacggtcatctttggaccaagtttg

SEQ ID NO: 2600521 - DNA, 25 bp, Homo sapien
cctttgatgagttttccctccgtca

SEQ ID NO: 2600522 - DNA, 25 bp, Homo sapien
gctagaacctcctctacggtcatct

SEQ ID NO: 2600523 - DNA, 25 bp, Homo sapien
ggtgcaagtttcttggccatggagc

SEQ ID NO: 2600524 - DNA, 25 bp, Homo sapien
tacatttctattctgcgagctgcag

SEQ ID NO: 2600525 - DNA, 25 bp, Homo sapien
aacttcgggcaccttagcaggagga

SEQ ID NO: 2600526 - DNA, 25 bp, Homo sapien
tcaggagtcgttctgatatcaggcc

SEQ ID NO: 2600527 - DNA, 25 bp, Homo sapien
actggagttctcagctctcttacac

SEQ ID NO: 2600528 - DNA, 25 bp, Homo sapien
tccttccgcagctgactctgctagg

SEQ ID NO: 2600529 - DNA, 25 bp, Homo sapien
tgtgcctgcttcactggagttctca

SEQ ID NO: 2600530 - DNA, 25 bp, Homo sapien
gctaggaaatgtggaaagctgcagc

SEQ ID NO: 2600531 - DNA, 25 bp, Homo sapien
ataagaacctgacatccagcttccc

SEQ ID NO: 2600532 - DNA, 25 bp, Homo sapien
gggataagaacctgacatccagctt

SEQ ID NO: 2600533 - DNA, 25 bp, Homo sapien
ctgggataagaacctgacatccagc

SEQ ID NO: 2600534 - DNA, 25 bp, Homo sapien
gataagaacctgacatccagcttcc

SEQ ID NO: 2600535 - DNA, 25 bp, Homo sapien
taactcctttggaagatctccaaca

SEQ ID NO: 2600536 - DNA, 25 bp, Homo sapien
ctggcacctgtgaattctcatttag

SEQ ID NO: 2600537 - DNA, 25 bp, Homo sapien
tggccagacgttctgcacagttctg

SEQ ID NO: 2600538 - DNA, 25 bp, Homo sapien
aacgtcttgtgaaagacctgtggcc

SEQ ID NO: 2600539 - DNA, 25 bp, Homo sapien
taaataggctttacaggctcccctc

SEQ ID NO: 2600540 - DNA, 25 bp, Homo sapien
tattatggccgaaagcaacctggtg

SEQ ID NO: 2600541 - DNA, 25 bp, Homo sapien
gaaattggattaagctgggtcccta

SEQ ID NO: 2600542 - DNA, 25 bp, Homo sapien
caacctggtgcttcggcctggataa

SEQ ID NO: 2600543 - DNA, 25 bp, Homo sapien
cagtggatatcggtcacatgccagg

SEQ ID NO: 2600544 - DNA, 25 bp, Homo sapien
catcgacttcggttcacttcacgga

SEQ ID NO: 2600545 - DNA, 25 bp, Homo sapien
tcaaggacagagagcatagaccaag

SEQ ID NO: 2600546 - DNA, 25 bp, Homo sapien
catgcggaagtccaccgaagggtta

SEQ ID NO: 2600547 - DNA, 25 bp, Homo sapien
cctggaaacacacggattcaggact

SEQ ID NO: 2600548 - DNA, 25 bp, Homo sapien
tctgccaagccatctgctctgaggg

SEQ ID NO: 2600549 - DNA, 25 bp, Homo sapien
ttcacctggtgtgccagggcagaga

SEQ ID NO: 2600550 - DNA, 25 bp, Homo sapien
tcttcacctggtgtgccagggcaga

SEQ ID NO: 2600551 - DNA, 25 bp, Homo sapien
tcccgtatcctcatgatcatcatct

SEQ ID NO: 2600552 - DNA, 25 bp, Homo sapien
aagttggctttcaaatccgatctca

SEQ ID NO: 2600553 - DNA, 25 bp, Homo sapien
ggtttcctcctagcagatttagaga

SEQ ID NO: 2600554 - DNA, 25 bp, Homo sapien
gagaatttcccgtatcctcatgatc

SEQ ID NO: 2600555 - DNA, 25 bp, Homo sapien
gacctgggtttgtgcgagagtctcc

SEQ ID NO: 2600556 - DNA, 25 bp, Homo sapien
tttcggtctcaaagaacgggattgc

SEQ ID NO: 2600557 - DNA, 25 bp, Homo sapien
ttttctcagcccaggataaggcctg

SEQ ID NO: 2600558 - DNA, 25 bp, Homo sapien
tgtatgacacaaatatgcccactgg

SEQ ID NO: 2600559 - DNA, 25 bp, Homo sapien
ggttcaaggcctgtatccttaggaa

SEQ ID NO: 2600560 - DNA, 25 bp, Homo sapien
gaagcacatgaggtaatgaaggtct

SEQ ID NO: 2600561 - DNA, 25 bp, Homo sapien
ctgatgaaaatgagaggctaagtac

SEQ ID NO: 2600562 - DNA, 25 bp, Homo sapien
ggtctcagctcaggagaaccttggg

SEQ ID NO: 2600563 - DNA, 25 bp, Homo sapien
ctgctctgggtctgtaagaaaccgc

SEQ ID NO: 2600564 - DNA, 25 bp, Homo sapien
tgggtctgtaagaaaccgccggaca

SEQ ID NO: 2600565 - DNA, 25 bp, Homo sapien
tcctggaacacgtatctcagctcct

SEQ ID NO: 2600566 - DNA, 25 bp, Homo sapien
accgccggacagttcctggaacacg

SEQ ID NO: 2600567 - DNA, 25 bp, Homo sapien
cacgcagtaggatgctcttttacca

SEQ ID NO: 2600568 - DNA, 25 bp, Homo sapien
ggaatgtgccgaaactcagagaact

SEQ ID NO: 2600569 - DNA, 25 bp, Homo sapien
atgcagtaggatgctgtacccattt

SEQ ID NO: 2600570 - DNA, 25 bp, Homo sapien
tcaggtctcctttctagcctcagga

SEQ ID NO: 2600571 - DNA, 25 bp, Homo sapien
ttctggatggtatgaaggcagtgct

SEQ ID NO: 2600572 - DNA, 25 bp, Homo sapien
cctaaactggaagatttggacagcc

SEQ ID NO: 2600573 - DNA, 25 bp, Homo sapien
caggccacagctatcatgcaggtga

SEQ ID NO: 2600574 - DNA, 25 bp, Homo sapien
tattagggatagtgcaagctttctc

SEQ ID NO: 2600575 - DNA, 25 bp, Homo sapien
gagcctggcagaagggtgacaagac

SEQ ID NO: 2600576 - DNA, 25 bp, Homo sapien
catagggcacaggagctgttccgct

SEQ ID NO: 2600577 - DNA, 25 bp, Homo sapien
ggtgacaagactcatttatctcctg

SEQ ID NO: 2600578 - DNA, 25 bp, Homo sapien
taaataatggctgatcttcccatag

SEQ ID NO: 2600579 - DNA, 25 bp, Homo sapien
acatgtgcacggggcctccttggag

SEQ ID NO: 2600580 - DNA, 25 bp, Homo sapien
tcagtggtgagacggccagcaccat

SEQ ID NO: 2600581 - DNA, 25 bp, Homo sapien
gggccttaagctcctggaaggagca

SEQ ID NO: 2600582 - DNA, 25 bp, Homo sapien
gaagcactggtgtttcttcaaaacc

SEQ ID NO: 2600583 - DNA, 25 bp, Homo sapien
cccacgtttctacccatgcaggccc

SEQ ID NO: 2600584 - DNA, 25 bp, Homo sapien
ccacgtttctacccatgcaggcccc

SEQ ID NO: 2600585 - DNA, 25 bp, Homo sapien
ccccggtgcccggacaggccagacg

SEQ ID NO: 2600586 - DNA, 25 bp, Homo sapien
ccggtgcccggacaggccagacgct

SEQ ID NO: 2600587 - DNA, 25 bp, Homo sapien
tgcccggacaggccagacgctggtc

SEQ ID NO: 2600588 - DNA, 25 bp, Homo sapien
ggtgcccggacaggccagacgctgg

SEQ ID NO: 2600589 - DNA, 25 bp, Homo sapien
gatatttaacggaaggccggctgtc

SEQ ID NO: 2600590 - DNA, 25 bp, Homo sapien
cccgacaataggcagggaggctcga

SEQ ID NO: 2600591 - DNA, 25 bp, Homo sapien
tccttcccgttgacgagctgatgct

SEQ ID NO: 2600592 - DNA, 25 bp, Homo sapien
gattctttatgctctgtgcgcggcg

SEQ ID NO: 2600593 - DNA, 25 bp, Homo sapien
aatagacatacctataaataccagg

SEQ ID NO: 2600594 - DNA, 25 bp, Homo sapien
ggaacacactcggtggggccgctct

SEQ ID NO: 2600595 - DNA, 25 bp, Homo sapien
cactgttccacaggcggtcgcgcag

SEQ ID NO: 2600596 - DNA, 25 bp, Homo sapien
gtcgcgcagccccactaggtttggc

SEQ ID NO: 2600597 - DNA, 25 bp, Homo sapien
tcacaggcatccgttgataggcttc

SEQ ID NO: 2600598 - DNA, 25 bp, Homo sapien
acctcctggaccacgcctcccaaag

SEQ ID NO: 2600599 - DNA, 25 bp, Homo sapien
tggaccacgcctcccaaagggacca

SEQ ID NO: 2600600 - DNA, 25 bp, Homo sapien
ccacgcctcccaaagggaccaccat

SEQ ID NO: 2600601 - DNA, 25 bp, Homo sapien
gcccatcacctcctggaccacgcct

SEQ ID NO: 2600602 - DNA, 25 bp, Homo sapien
tccagagtcccgtggcctgagggat

SEQ ID NO: 2600603 - DNA, 25 bp, Homo sapien
ctgctgccccaaggaacgtactgct

SEQ ID NO: 2600604 - DNA, 25 bp, Homo sapien
gcctctcacagcagatgtggctcag

SEQ ID NO: 2600605 - DNA, 25 bp, Homo sapien
tgctcggaggtctttggatccagcc

SEQ ID NO: 2600606 - DNA, 25 bp, Homo sapien
tgtcttctcccggacatggcaggcc

SEQ ID NO: 2600607 - DNA, 25 bp, Homo sapien
ggctgctcaggggtgctcgggaaaa

SEQ ID NO: 2600608 - DNA, 25 bp, Homo sapien
tcttctcccggacatggcaggccag

SEQ ID NO: 2600609 - DNA, 25 bp, Homo sapien
ttctcccggacatggcaggccaggc

SEQ ID NO: 2600610 - DNA, 25 bp, Homo sapien
acagcgctggaaccacattcccagg

SEQ ID NO: 2600611 - DNA, 25 bp, Homo sapien
gagacaaagacgtgaccggctggcc

SEQ ID NO: 2600612 - DNA, 25 bp, Homo sapien
tgcagacccccagcagtaccgggga

SEQ ID NO: 2600613 - DNA, 25 bp, Homo sapien
acgtgaccggctggccacagcgctg

SEQ ID NO: 2600614 - DNA, 25 bp, Homo sapien
gggccaggcggaaagcctcttccag

SEQ ID NO: 2600615 - DNA, 25 bp, Homo sapien
ggccttcatccctgcactgacgggc

SEQ ID NO: 2600616 - DNA, 25 bp, Homo sapien
actgacgggccaggcggaaagcctc

SEQ ID NO: 2600617 - DNA, 25 bp, Homo sapien
catgaatgatgaggccttcatccct

SEQ ID NO: 2600618 - DNA, 25 bp, Homo sapien
tgggaggacaccgtgcaagggtcac

SEQ ID NO: 2600619 - DNA, 25 bp, Homo sapien
ctgggaggacaccgtgcaagggtca

SEQ ID NO: 2600620 - DNA, 25 bp, Homo sapien
actctccggaggtcagtcctgggcg

SEQ ID NO: 2600621 - DNA, 25 bp, Homo sapien
agagccaccccggaagggaagtcag

SEQ ID NO: 2600622 - DNA, 25 bp, Homo sapien
gggaagtcagtacacctgcagccct

SEQ ID NO: 2600623 - DNA, 25 bp, Homo sapien
cctgggcaccacttggagggctaag

SEQ ID NO: 2600624 - DNA, 25 bp, Homo sapien
tcctcgaaggtcgtggcggcgtcca

SEQ ID NO: 2600625 - DNA, 25 bp, Homo sapien
tggtgcagacgacacatgtctctca

SEQ ID NO: 2600626 - DNA, 25 bp, Homo sapien
ctcgaaggtcgtggcggcgtccacg

SEQ ID NO: 2600627 - DNA, 25 bp, Homo sapien
gaaggtcgtggcggcgtccacgctg

SEQ ID NO: 2600628 - DNA, 25 bp, Homo sapien
aggggacatgggcatctgttaccgt

SEQ ID NO: 2600629 - DNA, 25 bp, Homo sapien
agaggggacatgggcatctgttacc

SEQ ID NO: 2600630 - DNA, 25 bp, Homo sapien
catgggcatctgttaccgtggggca

SEQ ID NO: 2600631 - DNA, 25 bp, Homo sapien
ggacatgggcatctgttaccgtggg

SEQ ID NO: 2600632 - DNA, 25 bp, Homo sapien
ctggtcgggcactcgttcaagttca

SEQ ID NO: 2600633 - DNA, 25 bp, Homo sapien
tcgttcaagttcacccaaatgtggg

SEQ ID NO: 2600634 - DNA, 25 bp, Homo sapien
ggatgggcgcgagccgggtcggtgc

SEQ ID NO: 2600635 - DNA, 25 bp, Homo sapien
gggtgaccccgggatgggcgcgagc

SEQ ID NO: 2600636 - DNA, 25 bp, Homo sapien
caccaggaactccagagtgggagtc

SEQ ID NO: 2600637 - DNA, 25 bp, Homo sapien
cgccccaagctgacatccacgcctg

SEQ ID NO: 2600638 - DNA, 25 bp, Homo sapien
agtccaaaagtctgaccaccaggaa

SEQ ID NO: 2600639 - DNA, 25 bp, Homo sapien
catcaccctggggtcgccccaagct

SEQ ID NO: 2600640 - DNA, 25 bp, Homo sapien
cactgcaccccgaaggttccaggtg

SEQ ID NO: 2600641 - DNA, 25 bp, Homo sapien
tggacggtcagtcccccagaaatcc

SEQ ID NO: 2600642 - DNA, 25 bp, Homo sapien
tcttcaggtagggctggacggtcag

SEQ ID NO: 2600643 - DNA, 25 bp, Homo sapien
tctggttctggcaccaaacccgggc

SEQ ID NO: 2600644 - DNA, 25 bp, Homo sapien
gccagtgcaagtccggagcccgcat

SEQ ID NO: 2600645 - DNA, 25 bp, Homo sapien
ttttcgagatcccaaggaccagcca

SEQ ID NO: 2600646 - DNA, 25 bp, Homo sapien
caggagcagcttttcgagatcccaa

SEQ ID NO: 2600647 - DNA, 25 bp, Homo sapien
cagcttttcgagatcccaaggacca

SEQ ID NO: 2600648 - DNA, 25 bp, Homo sapien
gcagcagccaccctcgcgggagcgg

SEQ ID NO: 2600649 - DNA, 25 bp, Homo sapien
agccaccctcgcgggagcggaggtc

SEQ ID NO: 2600650 - DNA, 25 bp, Homo sapien
cagcagcagccaccctcgcgggagc

SEQ ID NO: 2600651 - DNA, 25 bp, Homo sapien
agcagccaccctcgcgggagcggag

SEQ ID NO: 2600652 - DNA, 25 bp, Homo sapien
ccccgtaatgcgccttgaggcggac

SEQ ID NO: 2600653 - DNA, 25 bp, Homo sapien
cccttccatcttggggccggtcctg

SEQ ID NO: 2600654 - DNA, 25 bp, Homo sapien
tcttggggccggtcctgctgggcat

SEQ ID NO: 2600655 - DNA, 25 bp, Homo sapien
ccgtaatgcgccttgaggcggacgc

SEQ ID NO: 2600656 - DNA, 25 bp, Homo sapien
accaggacttcagccacgtgctttc

SEQ ID NO: 2600657 - DNA, 25 bp, Homo sapien
tcatcccgcaggtcgtgcctggcgc

SEQ ID NO: 2600658 - DNA, 25 bp, Homo sapien
atcccgcaggtcgtgcctggcgcct

SEQ ID NO: 2600659 - DNA, 25 bp, Homo sapien
ggacttcagccacgtgctttcatcc

SEQ ID NO: 2600660 - DNA, 25 bp, Homo sapien
tgggtcatcgaagtccccccagtgg

SEQ ID NO: 2600661 - DNA, 25 bp, Homo sapien
tttctgggtcatcgaagtcccccca

SEQ ID NO: 2600662 - DNA, 25 bp, Homo sapien
tctgggtcatcgaagtccccccagt

SEQ ID NO: 2600663 - DNA, 25 bp, Homo sapien
atctttctgggtcatcgaagtcccc

SEQ ID NO: 2600664 - DNA, 25 bp, Homo sapien
tggagtctggcctggcaacatggcc

SEQ ID NO: 2600665 - DNA, 25 bp, Homo sapien
tggattcaggcacccgtcggcccag

SEQ ID NO: 2600666 - DNA, 25 bp, Homo sapien
cctggattcaggcacccgtcggccc

SEQ ID NO: 2600667 - DNA, 25 bp, Homo sapien
agccctggattcaggcacccgtcgg

SEQ ID NO: 2600668 - DNA, 25 bp, Homo sapien
tctggaatctgccaacgactcccat

SEQ ID NO: 2600669 - DNA, 25 bp, Homo sapien
ggcgacagatacagggtgtttgctc

SEQ ID NO: 2600670 - DNA, 25 bp, Homo sapien
tgtcgcccggcgacagatacagggt

SEQ ID NO: 2600671 - DNA, 25 bp, Homo sapien
catccagatcccggctgagggctgg

SEQ ID NO: 2600672 - DNA, 25 bp, Homo sapien
tttggaaaaactggctcaagagaca

SEQ ID NO: 2600673 - DNA, 25 bp, Homo sapien
gagggactggccagatgtttccttt

SEQ ID NO: 2600674 - DNA, 25 bp, Homo sapien
ttcatttgatggacgttggttgagg

SEQ ID NO: 2600675 - DNA, 25 bp, Homo sapien
ctgcatgggttcatttgatggacgt

SEQ ID NO: 2600676 - DNA, 25 bp, Homo sapien
ggagaggctggccccgggactgatg

SEQ ID NO: 2600677 - DNA, 25 bp, Homo sapien
ccccgggactgatgatgtgtgcagt

SEQ ID NO: 2600678 - DNA, 25 bp, Homo sapien
ctggccccgggactgatgatgtgtg

SEQ ID NO: 2600679 - DNA, 25 bp, Homo sapien
ggctggccccgggactgatgatgtg

SEQ ID NO: 2600680 - DNA, 25 bp, Homo sapien
ggtgccattcctccggcggcgtttc

SEQ ID NO: 2600681 - DNA, 25 bp, Homo sapien
gcgcccgagcttctgggtgccattc

SEQ ID NO: 2600682 - DNA, 25 bp, Homo sapien
gctcagcaatcctgtttttaagtcg

SEQ ID NO: 2600683 - DNA, 25 bp, Homo sapien
gcggccgcgcgcaatgcggagcttg

SEQ ID NO: 2600684 - DNA, 25 bp, Homo sapien
gaggctggcctggaagatagagcag

SEQ ID NO: 2600685 - DNA, 25 bp, Homo sapien
gggttgctgtgtccagggtctggag

SEQ ID NO: 2600686 - DNA, 25 bp, Homo sapien
agagccaacacagtgaggaggaggt

SEQ ID NO: 2600687 - DNA, 25 bp, Homo sapien
tgggcactgccactcccagcagagc

SEQ ID NO: 2600688 - DNA, 25 bp, Homo sapien
cccaccccgctcaatggtgccttcc

SEQ ID NO: 2600689 - DNA, 25 bp, Homo sapien
ctggaggaccgtctgtgtccgacat

SEQ ID NO: 2600690 - DNA, 25 bp, Homo sapien
tcccctggaggaccgtctgtgtccg

SEQ ID NO: 2600691 - DNA, 25 bp, Homo sapien
ccttcccctggaggaccgtctgtgt

SEQ ID NO: 2600692 - DNA, 25 bp, Homo sapien
tcctccatctcttatcccttctcga

SEQ ID NO: 2600693 - DNA, 25 bp, Homo sapien
tccatctcttatcccttctcgagcc

SEQ ID NO: 2600694 - DNA, 25 bp, Homo sapien
catctcttatcccttctcgagcccc

SEQ ID NO: 2600695 - DNA, 25 bp, Homo sapien
ctctcctccatctcttatcccttct

SEQ ID NO: 2600696 - DNA, 25 bp, Homo sapien
tgctgggaccagaaagacctcacaa

SEQ ID NO: 2600697 - DNA, 25 bp, Homo sapien
cccaggccaaggctttatttcatgc

SEQ ID NO: 2600698 - DNA, 25 bp, Homo sapien
caggccaaggctttatttcatgctg

SEQ ID NO: 2600699 - DNA, 25 bp, Homo sapien
catgctgggaccagaaagacctcac

SEQ ID NO: 2600700 - DNA, 25 bp, Homo sapien
actgttcaccggatggacgtccacc

SEQ ID NO: 2600701 - DNA, 25 bp, Homo sapien
acgctctgatcccgatcctgcagag

SEQ ID NO: 2600702 - DNA, 25 bp, Homo sapien
ctcccacgctctgatcccgatcctg

SEQ ID NO: 2600703 - DNA, 25 bp, Homo sapien
tcactgttcaccggatggacgtcca

SEQ ID NO: 2600704 - DNA, 25 bp, Homo sapien
gaacataaaaatccgcggctccctg

SEQ ID NO: 2600705 - DNA, 25 bp, Homo sapien
cataaaaatccgcggctccctgaag

SEQ ID NO: 2600706 - DNA, 25 bp, Homo sapien
tctgaacataaaaatccgcggctcc

SEQ ID NO: 2600707 - DNA, 25 bp, Homo sapien
ataaaaatccgcggctccctgaagg

SEQ ID NO: 2600708 - DNA, 25 bp, Homo sapien
ggccgactgtcatcccacttcgaaa

SEQ ID NO: 2600709 - DNA, 25 bp, Homo sapien
atcccacttcgaaacacgcagaggg

SEQ ID NO: 2600710 - DNA, 25 bp, Homo sapien
gaaggcagcccgagggctctttctc

SEQ ID NO: 2600711 - DNA, 25 bp, Homo sapien
tcctcttgttttccgtggccgactg

SEQ ID NO: 2600712 - DNA, 25 bp, Homo sapien
ggcgccaggacaagcgagggtggcc

SEQ ID NO: 2600713 - DNA, 25 bp, Homo sapien
gcgccaggacaagcgagggtggcct

SEQ ID NO: 2600714 - DNA, 25 bp, Homo sapien
cagcgcgggcgtaaatgtcaatggt

SEQ ID NO: 2600715 - DNA, 25 bp, Homo sapien
tcaatggtgtctgcgtcgatgggcc

SEQ ID NO: 2600716 - DNA, 25 bp, Homo sapien
tgtaggagcccatcaggttccccgg

SEQ ID NO: 2600717 - DNA, 25 bp, Homo sapien
gcgtatgccgcccagtagatgacat

SEQ ID NO: 2600718 - DNA, 25 bp, Homo sapien
ctgccctcggcctggagaccttgac

SEQ ID NO: 2600719 - DNA, 25 bp, Homo sapien
tctgccctcggcctggagaccttga

SEQ ID NO: 2600720 - DNA, 25 bp, Homo sapien
ctctgccctcggcctggagaccttg

SEQ ID NO: 2600721 - DNA, 25 bp, Homo sapien
tgagcgtggtcatcgtcagcaccgt

SEQ ID NO: 2600722 - DNA, 25 bp, Homo sapien
gatccagaagtagacgtccagtgcc

SEQ ID NO: 2600723 - DNA, 25 bp, Homo sapien
gaaatgagcaaaggcgtactccacc

SEQ ID NO: 2600724 - DNA, 25 bp, Homo sapien
cctgtagtcggcgttgaaatgagca

SEQ ID NO: 2600725 - DNA, 25 bp, Homo sapien
ctagagacaccctggcgggcaccgc

SEQ ID NO: 2600726 - DNA, 25 bp, Homo sapien
ggacggagggcatgtaggattggat

SEQ ID NO: 2600727 - DNA, 25 bp, Homo sapien
tggatgatgtacacgccgcggttcc

SEQ ID NO: 2600728 - DNA, 25 bp, Homo sapien
accgccgcctggctgatccagaagg

SEQ ID NO: 2600729 - DNA, 25 bp, Homo sapien
ctgccaggacagccaccgtcagtgc

SEQ ID NO: 2600730 - DNA, 25 bp, Homo sapien
ggacagccaccgtcagtgcccccat

SEQ ID NO: 2600731 - DNA, 25 bp, Homo sapien
ccaggacagccaccgtcagtgcccc

SEQ ID NO: 2600732 - DNA, 25 bp, Homo sapien
tgccaggacagccaccgtcagtgcc

SEQ ID NO: 2600733 - DNA, 25 bp, Homo sapien
cctctggtttcccataaatctggag

SEQ ID NO: 2600734 - DNA, 25 bp, Homo sapien
tctggtttcccataaatctggagtg

SEQ ID NO: 2600735 - DNA, 25 bp, Homo sapien
ctctggtttcccataaatctggagt

SEQ ID NO: 2600736 - DNA, 25 bp, Homo sapien
ctaaggcagcagcgtcccagctgca

SEQ ID NO: 2600737 - DNA, 25 bp, Homo sapien
taaggcagcagcgtcccagctgcat

SEQ ID NO: 2600738 - DNA, 25 bp, Homo sapien
aaggcagcagcgtcccagctgcatc

SEQ ID NO: 2600739 - DNA, 25 bp, Homo sapien
gctccgtggtgaagcggtagctggt

SEQ ID NO: 2600740 - DNA, 25 bp, Homo sapien
acgatgtcctccgatgagtaaccgt

SEQ ID NO: 2600741 - DNA, 25 bp, Homo sapien
tcctggctctccgaccagtagtaga

SEQ ID NO: 2600742 - DNA, 25 bp, Homo sapien
tgcagcttgtccagcccgtggatgt

SEQ ID NO: 2600743 - DNA, 25 bp, Homo sapien
gcatgcactcctgctcgtccatggg

SEQ ID NO: 2600744 - DNA, 25 bp, Homo sapien
ggccaggtccatgtcgcaggccaca

SEQ ID NO: 2600745 - DNA, 25 bp, Homo sapien
gtccatgtcgcaggccacagtggag

SEQ ID NO: 2600746 - DNA, 25 bp, Homo sapien
agcatgcactcctgctcgtccatgg

SEQ ID NO: 2600747 - DNA, 25 bp, Homo sapien
gcttgaggtgggtaatcctcccacc

SEQ ID NO: 2600748 - DNA, 25 bp, Homo sapien
ccgacttggcgttcacgatgaaggt

SEQ ID NO: 2600749 - DNA, 25 bp, Homo sapien
tgttctccaccgtcacgtcgtggaa

SEQ ID NO: 2600750 - DNA, 25 bp, Homo sapien
cttgtccacgaagcggctgtccaga

SEQ ID NO: 2600751 - DNA, 25 bp, Homo sapien
cgtcgtggaaccaggccgacttggc

SEQ ID NO: 2600752 - DNA, 25 bp, Homo sapien
ccagggcaagggccacattcacggg

SEQ ID NO: 2600753 - DNA, 25 bp, Homo sapien
tggcctctgagatgtggtcgatgct

SEQ ID NO: 2600754 - DNA, 25 bp, Homo sapien
catgttggcctctgagatgtggtcg

SEQ ID NO: 2600755 - DNA, 25 bp, Homo sapien
ctctgagatgtggtcgatgctggcc

SEQ ID NO: 2600756 - DNA, 25 bp, Homo sapien
gagcccacgtagtcgccgatgtcat

SEQ ID NO: 2600757 - DNA, 25 bp, Homo sapien
ctccgatgccaggccggaagttgcg

SEQ ID NO: 2600758 - DNA, 25 bp, Homo sapien
agccggctatcagcccgtccaggtt

SEQ ID NO: 2600759 - DNA, 25 bp, Homo sapien
aagttgcgggcgtagccggctatca

SEQ ID NO: 2600760 - DNA, 25 bp, Homo sapien
ctgcaccagcggagataggcacagg

SEQ ID NO: 2600761 - DNA, 25 bp, Homo sapien
gtcctgactctggtatgtcacggag

SEQ ID NO: 2600762 - DNA, 25 bp, Homo sapien
gtcaggatgtacaagggaggcagat

SEQ ID NO: 2600763 - DNA, 25 bp, Homo sapien
tctggtatgtcacggagacctcggg

SEQ ID NO: 2600764 - DNA, 25 bp, Homo sapien
gccctggggcccagtggtggcctga

SEQ ID NO: 2600765 - DNA, 25 bp, Homo sapien
cagtggtggcctgagcttggggttt

SEQ ID NO: 2600766 - DNA, 25 bp, Homo sapien
gggcccagtggtggcctgagcttgg

SEQ ID NO: 2600767 - DNA, 25 bp, Homo sapien
cctggggcccagtggtggcctgagc

SEQ ID NO: 2600768 - DNA, 25 bp, Homo sapien
cagatttaggactccaaactcaggg

SEQ ID NO: 2600769 - DNA, 25 bp, Homo sapien
aagtctacactcagatttaggactc

SEQ ID NO: 2600770 - DNA, 25 bp, Homo sapien
tacactcagatttaggactccaaac

SEQ ID NO: 2600771 - DNA, 25 bp, Homo sapien
actccaaactcagggggcagagtgg

SEQ ID NO: 2600772 - DNA, 25 bp, Homo sapien
aaggcgaagaggagcaccgccacca

SEQ ID NO: 2600773 - DNA, 25 bp, Homo sapien
gaagaggagcaccgccaccagcgca

SEQ ID NO: 2600774 - DNA, 25 bp, Homo sapien
aggcgaagaggagcaccgccaccag

SEQ ID NO: 2600775 - DNA, 25 bp, Homo sapien
gcgaagaggagcaccgccaccagcg

SEQ ID NO: 2600776 - DNA, 25 bp, Homo sapien
ggtaggagccgcagcacagcttctc

SEQ ID NO: 2600777 - DNA, 25 bp, Homo sapien
gaagaagccctatcatttccgtgga

SEQ ID NO: 2600778 - DNA, 25 bp, Homo sapien
tctgaggaggaaagcgatctggcac

SEQ ID NO: 2600779 - DNA, 25 bp, Homo sapien
taacagttcattgggaaaggtccag

SEQ ID NO: 2600780 - DNA, 25 bp, Homo sapien
tcttataaaagcgaacctgggctgg

SEQ ID NO: 2600781 - DNA, 25 bp, Homo sapien
cggcctcctaaattgttgggatgac

SEQ ID NO: 2600782 - DNA, 25 bp, Homo sapien
ttgggatgacaggtgtgagccaccg

SEQ ID NO: 2600783 - DNA, 25 bp, Homo sapien
cctcggcctcctaaattgttgggat

SEQ ID NO: 2600784 - DNA, 25 bp, Homo sapien
tcggcctcctaaattgttgggatga

SEQ ID NO: 2600785 - DNA, 25 bp, Homo sapien
gctcatgcatatgcgtgtccccgtg

SEQ ID NO: 2600786 - DNA, 25 bp, Homo sapien
ttgcagggtgctccgatggagctcc

SEQ ID NO: 2600787 - DNA, 25 bp, Homo sapien
tccctggcggggtgtcctgcatgtc

SEQ ID NO: 2600788 - DNA, 25 bp, Homo sapien
tccagcagatgtttgcagggtgctc

SEQ ID NO: 2600789 - DNA, 25 bp, Homo sapien
ttcccgctgggtcccgttggaggca

SEQ ID NO: 2600790 - DNA, 25 bp, Homo sapien
caatgtggtgactccttttgtcgtc

SEQ ID NO: 2600791 - DNA, 25 bp, Homo sapien
gttccaggcgctttcccgctgggtc

SEQ ID NO: 2600792 - DNA, 25 bp, Homo sapien
cctctcgcagtcaaggtctccgtgg

SEQ ID NO: 2600793 - DNA, 25 bp, Homo sapien
ctctgcacgcaaggggccatgggct

SEQ ID NO: 2600794 - DNA, 25 bp, Homo sapien
tggcagaagcgtctgtggactcacg

SEQ ID NO: 2600795 - DNA, 25 bp, Homo sapien
gggctggcagaagcgtctgtggact

SEQ ID NO: 2600796 - DNA, 25 bp, Homo sapien
gaagcgtctgtggactcacgggcat

SEQ ID NO: 2600797 - DNA, 25 bp, Homo sapien
tcccttagcctggcgcaggcctggc

SEQ ID NO: 2600798 - DNA, 25 bp, Homo sapien
atcccttagcctggcgcaggcctgg

SEQ ID NO: 2600799 - DNA, 25 bp, Homo sapien
ccttagcctggcgcaggcctggcat

SEQ ID NO: 2600800 - DNA, 25 bp, Homo sapien
gcatgtaggaggcacccgggaagtg

SEQ ID NO: 2600801 - DNA, 25 bp, Homo sapien
cgactccacgcagggcctttgagga

SEQ ID NO: 2600802 - DNA, 25 bp, Homo sapien
tcagaaagcaggagatcatcagtcg

SEQ ID NO: 2600803 - DNA, 25 bp, Homo sapien
actcatctgagaagcgactccacgc

SEQ ID NO: 2600804 - DNA, 25 bp, Homo sapien
tcatcagtcggattctgaaagagga

SEQ ID NO: 2600805 - DNA, 25 bp, Homo sapien
gggtagggacgatggtcctctcctg

SEQ ID NO: 2600806 - DNA, 25 bp, Homo sapien
aggtcaaggtcactgctgcaaccga

SEQ ID NO: 2600807 - DNA, 25 bp, Homo sapien
gctgcaaccgatgccctgctgggaa

SEQ ID NO: 2600808 - DNA, 25 bp, Homo sapien
gctgggaaagagaaagccttgggct

SEQ ID NO: 2600809 - DNA, 25 bp, Homo sapien
aggctcctggcatcctcgacagtgt

SEQ ID NO: 2600810 - DNA, 25 bp, Homo sapien
cagtgttcagagtcctcggctcacc

SEQ ID NO: 2600811 - DNA, 25 bp, Homo sapien
gacagtaccactgcctaggcggctt

SEQ ID NO: 2600812 - DNA, 25 bp, Homo sapien
cctatgcacccgcatgggctggggc

SEQ ID NO: 2600813 - DNA, 25 bp, Homo sapien
actcccccgtcatcatggccacaaa

SEQ ID NO: 2600814 - DNA, 25 bp, Homo sapien
ggactcccccgtcatcatggccaca

SEQ ID NO: 2600815 - DNA, 25 bp, Homo sapien
ttgaaggactcccccgtcatcatgg

SEQ ID NO: 2600816 - DNA, 25 bp, Homo sapien
aaggactcccccgtcatcatggcca

SEQ ID NO: 2600817 - DNA, 25 bp, Homo sapien
ttcatcatctgctccgcctccacct

SEQ ID NO: 2600818 - DNA, 25 bp, Homo sapien
ctcccctgcgttcattagcacgtac

SEQ ID NO: 2600819 - DNA, 25 bp, Homo sapien
tccacctcgttgaggggctcccctg

SEQ ID NO: 2600820 - DNA, 25 bp, Homo sapien
tccttgtcggcctccttcatcatct

SEQ ID NO: 2600821 - DNA, 25 bp, Homo sapien
actccatcggccctgcccgtgcccg

SEQ ID NO: 2600822 - DNA, 25 bp, Homo sapien
cactccatcggccctgcccgtgccc

SEQ ID NO: 2600823 - DNA, 25 bp, Homo sapien
ccactccatcggccctgcccgtgcc

SEQ ID NO: 2600824 - DNA, 25 bp, Homo sapien
ggtaaactcccattagtgccaggaa

SEQ ID NO: 2600825 - DNA, 25 bp, Homo sapien
tgccaggaaaccatcgcagttgaag

SEQ ID NO: 2600826 - DNA, 25 bp, Homo sapien
gtcaaagacacggaatgccgccctc

SEQ ID NO: 2600827 - DNA, 25 bp, Homo sapien
tgttccagtcaatgtagcccttgcc

SEQ ID NO: 2600828 - DNA, 25 bp, Homo sapien
gcctcttccccccgtaggcactgac

SEQ ID NO: 2600829 - DNA, 25 bp, Homo sapien
cttccccccgtaggcactgacacct

SEQ ID NO: 2600830 - DNA, 25 bp, Homo sapien
cgtaggcactgacacctgacccagg

SEQ ID NO: 2600831 - DNA, 25 bp, Homo sapien
ctcttccccccgtaggcactgacac

SEQ ID NO: 2600832 - DNA, 25 bp, Homo sapien
gccattgaggccagctcactcttgg

SEQ ID NO: 2600833 - DNA, 25 bp, Homo sapien
ttgatctgctcagccgacaggcgct

SEQ ID NO: 2600834 - DNA, 25 bp, Homo sapien
gtcgaacatctcaaagactcccttg

SEQ ID NO: 2600835 - DNA, 25 bp, Homo sapien
gggttgatacccagcaggctcatga

SEQ ID NO: 2600836 - DNA, 25 bp, Homo sapien
cggcatgaccaggagccccttctgc

SEQ ID NO: 2600837 - DNA, 25 bp, Homo sapien
gcatgaccaggagccccttctgccc

SEQ ID NO: 2600838 - DNA, 25 bp, Homo sapien
ggcatgaccaggagccccttctgcc

SEQ ID NO: 2600839 - DNA, 25 bp, Homo sapien
cattcctccattggcagcctttcaa

SEQ ID NO: 2600840 - DNA, 25 bp, Homo sapien
ggaagggtcagaggtaccccctgca

SEQ ID NO: 2600841 - DNA, 25 bp, Homo sapien
ttggcagcctttcaaggtgagtggt

SEQ ID NO: 2600842 - DNA, 25 bp, Homo sapien
tgcacccattcctccattggcagcc

SEQ ID NO: 2600843 - DNA, 25 bp, Homo sapien
agccagcgtgcgagggaacagcagc

SEQ ID NO: 2600844 - DNA, 25 bp, Homo sapien
gccagcgtgcgagggaacagcagca

SEQ ID NO: 2600845 - DNA, 25 bp, Homo sapien
cccaggattgggatacagcccagga

SEQ ID NO: 2600846 - DNA, 25 bp, Homo sapien
ccaggattgggatacagcccaggaa

SEQ ID NO: 2600847 - DNA, 25 bp, Homo sapien
tgggagccagctttcagaaagggct

SEQ ID NO: 2600848 - DNA, 25 bp, Homo sapien
gctgctgcccatctgggagccagct

SEQ ID NO: 2600849 - DNA, 25 bp, Homo sapien
agctttcagaaagggctgctccacc

SEQ ID NO: 2600850 - DNA, 25 bp, Homo sapien
catctgggagccagctttcagaaag

SEQ ID NO: 2600851 - DNA, 25 bp, Homo sapien
cccaggctccgtggcaggtcattgc

SEQ ID NO: 2600852 - DNA, 25 bp, Homo sapien
caggttccagctcaacctacccagc

SEQ ID NO: 2600853 - DNA, 25 bp, Homo sapien
ggcaggtcattgcacctccaggttc

SEQ ID NO: 2600854 - DNA, 25 bp, Homo sapien
cagagactccatcgggcacagagag

SEQ ID NO: 2600855 - DNA, 25 bp, Homo sapien
tggttgtctgacaggattctgcagg

SEQ ID NO: 2600856 - DNA, 25 bp, Homo sapien
tgtcggtggttgtctgacaggattc

SEQ ID NO: 2600857 - DNA, 25 bp, Homo sapien
ggtggttgtctgacaggattctgca

SEQ ID NO: 2600858 - DNA, 25 bp, Homo sapien
catgtcggtggttgtctgacaggat

SEQ ID NO: 2600859 - DNA, 25 bp, Homo sapien
cagattccaagagccttttatgggt

SEQ ID NO: 2600860 - DNA, 25 bp, Homo sapien
ccggggtccagattccaagagcctt

SEQ ID NO: 2600861 - DNA, 25 bp, Homo sapien
tggcagctgagttttagctgggcct

SEQ ID NO: 2600862 - DNA, 25 bp, Homo sapien
ttatgggtgggaaatcctgccggcc

SEQ ID NO: 2600863 - DNA, 25 bp, Homo sapien
caggaaagggctgagacatggcggg

SEQ ID NO: 2600864 - DNA, 25 bp, Homo sapien
aagatgggcaccgaaggctaagtgc

SEQ ID NO: 2600865 - DNA, 25 bp, Homo sapien
cctgaccctgaagatgggcaccgaa

SEQ ID NO: 2600866 - DNA, 25 bp, Homo sapien
gggctgagacatggcgggaccctca

SEQ ID NO: 2600867 - DNA, 25 bp, Homo sapien
acacgctgttccccgtgctgttccc

SEQ ID NO: 2600868 - DNA, 25 bp, Homo sapien
cacgctgttccccgtgctgttccct

SEQ ID NO: 2600869 - DNA, 25 bp, Homo sapien
ctgttccccgtgctgttccctcttc

SEQ ID NO: 2600870 - DNA, 25 bp, Homo sapien
tccctcttcactggaccaagctcca

SEQ ID NO: 2600871 - DNA, 25 bp, Homo sapien
agaggtgcggccctccagcaggtct

SEQ ID NO: 2600872 - DNA, 25 bp, Homo sapien
aggtcttcatgggaccctggtctca

SEQ ID NO: 2600873 - DNA, 25 bp, Homo sapien
ttcatgggaccctggtctcatgctg

SEQ ID NO: 2600874 - DNA, 25 bp, Homo sapien
atgggaccctggtctcatgctgtca

SEQ ID NO: 2600875 - DNA, 25 bp, Homo sapien
gtgagatttcttgttgaagacccat

SEQ ID NO: 2600876 - DNA, 25 bp, Homo sapien
cagtgagatttcttgttgaagaccc

SEQ ID NO: 2600877 - DNA, 25 bp, Homo sapien
agtgagatttcttgttgaagaccca

SEQ ID NO: 2600878 - DNA, 25 bp, Homo sapien
catcctggtggactcaacattggcc

SEQ ID NO: 2600879 - DNA, 25 bp, Homo sapien
gaacaaatgcatgaggcaccgcttg

SEQ ID NO: 2600880 - DNA, 25 bp, Homo sapien
caggacaggtcgaatgaacaaatgc

SEQ ID NO: 2600881 - DNA, 25 bp, Homo sapien
tgccagcatgtcacaaactctcagg

SEQ ID NO: 2600882 - DNA, 25 bp, Homo sapien
gggcttacgagtgaaactcaaagct

SEQ ID NO: 2600883 - DNA, 25 bp, Homo sapien
catcctgatgggcttacgagtgaaa

SEQ ID NO: 2600884 - DNA, 25 bp, Homo sapien
cctggagcccaacttaaagcagagg

SEQ ID NO: 2600885 - DNA, 25 bp, Homo sapien
gaaggttccagacatcctgatgggc

SEQ ID NO: 2600886 - DNA, 25 bp, Homo sapien
taaagccgggctgtgcctcagcttc

SEQ ID NO: 2600887 - DNA, 25 bp, Homo sapien
tgggttccataaagccgggctgtgc

SEQ ID NO: 2600888 - DNA, 25 bp, Homo sapien
tcagctgggttccataaagccgggc

SEQ ID NO: 2600889 - DNA, 25 bp, Homo sapien
cataaagccgggctgtgcctcagct

SEQ ID NO: 2600890 - DNA, 25 bp, Homo sapien
agcctcgttcgaatgtgacagcagc

SEQ ID NO: 2600891 - DNA, 25 bp, Homo sapien
tgtgagtttcccttccggactccca

SEQ ID NO: 2600892 - DNA, 25 bp, Homo sapien
gatttcgagcactgcgaacacggcg

SEQ ID NO: 2600893 - DNA, 25 bp, Homo sapien
cgtcaccccgcttggagtgggagct

SEQ ID NO: 2600894 - DNA, 25 bp, Homo sapien
catgaacttggggatgccctgggcc

SEQ ID NO: 2600895 - DNA, 25 bp, Homo sapien
ggtcggcatgggttgtggacatggc

SEQ ID NO: 2600896 - DNA, 25 bp, Homo sapien
ggcactccatcaccacgatggcctg

SEQ ID NO: 2600897 - DNA, 25 bp, Homo sapien
gacgtggtggaaaacctgttcctga

SEQ ID NO: 2600898 - DNA, 25 bp, Homo sapien
gacaggagtggtgcttttccaggcc

SEQ ID NO: 2600899 - DNA, 25 bp, Homo sapien
tccagcctggcaagcatggcgtgtt

SEQ ID NO: 2600900 - DNA, 25 bp, Homo sapien
ttccaagtttctggagcccctcttc

SEQ ID NO: 2600901 - DNA, 25 bp, Homo sapien
catatgccagctacaggcccaggtt

SEQ ID NO: 2600902 - DNA, 25 bp, Homo sapien
gggagcttgtgagcggatgggcgtc

SEQ ID NO: 2600903 - DNA, 25 bp, Homo sapien
caaacatgtgacaggtggaggtcct

SEQ ID NO: 2600904 - DNA, 25 bp, Homo sapien
acagcggtcggcaaacatgtgacag

SEQ ID NO: 2600905 - DNA, 25 bp, Homo sapien
cccttatatgtacacagcggtcggc

SEQ ID NO: 2600906 - DNA, 25 bp, Homo sapien
ctcggcaacgtgaagtgttcacgtc

SEQ ID NO: 2600907 - DNA, 25 bp, Homo sapien
agtgttcacgtcctgtgatgcagcc

SEQ ID NO: 2600908 - DNA, 25 bp, Homo sapien
tccaggccacttccggaactgcgag

SEQ ID NO: 2600909 - DNA, 25 bp, Homo sapien
acttccggaactgcgagggaacagc

SEQ ID NO: 2600910 - DNA, 25 bp, Homo sapien
tgtccgcggaaattcggttctgagc

SEQ ID NO: 2600911 - DNA, 25 bp, Homo sapien
ccgggaggatctgtccgcggaaatt

SEQ ID NO: 2600912 - DNA, 25 bp, Homo sapien
attcggttctgagcgtcgccggact

SEQ ID NO: 2600913 - DNA, 25 bp, Homo sapien
tcaagagctcacgttccgggaggat

SEQ ID NO: 2600914 - DNA, 25 bp, Homo sapien
tcttgccaggactagctgtgtcctg

SEQ ID NO: 2600915 - DNA, 25 bp, Homo sapien
ccctcttgccaggactagctgtgtc

SEQ ID NO: 2600916 - DNA, 25 bp, Homo sapien
gccaggactagctgtgtcctgcagc

SEQ ID NO: 2600917 - DNA, 25 bp, Homo sapien
caccctcttgccaggactagctgtg

SEQ ID NO: 2600918 - DNA, 25 bp, Homo sapien
agtggatttgttcgtgatcagcccc

SEQ ID NO: 2600919 - DNA, 25 bp, Homo sapien
tggatttgttcgtgatcagccccac

SEQ ID NO: 2600920 - DNA, 25 bp, Homo sapien
gatttgttcgtgatcagccccacac

SEQ ID NO: 2600921 - DNA, 25 bp, Homo sapien
ttagtggatttgttcgtgatcagcc

SEQ ID NO: 2600922 - DNA, 25 bp, Homo sapien
cagagccagaaagatagggtgtccg

SEQ ID NO: 2600923 - DNA, 25 bp, Homo sapien
aaagatagggtgtccgccacagcca

SEQ ID NO: 2600924 - DNA, 25 bp, Homo sapien
aaccagtgtggccaagtcggagggc

SEQ ID NO: 2600925 - DNA, 25 bp, Homo sapien
caggcaccgagaggtgcggatggcc

SEQ ID NO: 2600926 - DNA, 25 bp, Homo sapien
tcctgggccacgggattcatgaagg

SEQ ID NO: 2600927 - DNA, 25 bp, Homo sapien
tgggccacgggattcatgaagggca

SEQ ID NO: 2600928 - DNA, 25 bp, Homo sapien
attcatgaagggcaccgggtcaggc

SEQ ID NO: 2600929 - DNA, 25 bp, Homo sapien
tcatgaagggcaccgggtcaggccc

SEQ ID NO: 2600930 - DNA, 25 bp, Homo sapien
tatatgcgggggtcggggtcaggcc

SEQ ID NO: 2600931 - DNA, 25 bp, Homo sapien
gtatatgcgggggtcggggtcaggc

SEQ ID NO: 2600932 - DNA, 25 bp, Homo sapien
ctggtatatgcgggggtcggggtca

SEQ ID NO: 2600933 - DNA, 25 bp, Homo sapien
tggtatatgcgggggtcggggtcag

SEQ ID NO: 2600934 - DNA, 25 bp, Homo sapien
gtatatgcgggggtcggggtcaggc

SEQ ID NO: 2600935 - DNA, 25 bp, Homo sapien
tatatgcgggggtcggggtcaggcc

SEQ ID NO: 2600936 - DNA, 25 bp, Homo sapien
ctggtatatgcgggggtcggggtca

SEQ ID NO: 2600937 - DNA, 25 bp, Homo sapien
tggtatatgcgggggtcggggtcag

SEQ ID NO: 2600938 - DNA, 25 bp, Homo sapien
ccccgggcgcactgttgctggtata

SEQ ID NO: 2600939 - DNA, 25 bp, Homo sapien
actgttgctggtatatgcggtggtc

SEQ ID NO: 2600940 - DNA, 25 bp, Homo sapien
cgggcgcactgttgctggtatatgc

SEQ ID NO: 2600941 - DNA, 25 bp, Homo sapien
cgttgctggtatatgcggtggtcgg

SEQ ID NO: 2600942 - DNA, 25 bp, Homo sapien
tatatgcgggggtcggggtcaggcc

SEQ ID NO: 2600943 - DNA, 25 bp, Homo sapien
gtatatgcgggggtcggggtcaggc

SEQ ID NO: 2600944 - DNA, 25 bp, Homo sapien
ctggtatatgcgggggtcggggtca

SEQ ID NO: 2600945 - DNA, 25 bp, Homo sapien
tggtatatgcgggggtcggggtcag

SEQ ID NO: 2600946 - DNA, 25 bp, Homo sapien
ctggtatatgcgggggtcggggtca

SEQ ID NO: 2600947 - DNA, 25 bp, Homo sapien
tatatgcgggggtcggggtcaggcc

SEQ ID NO: 2600948 - DNA, 25 bp, Homo sapien
gttgctggtatatgcgggggtcggg

SEQ ID NO: 2600949 - DNA, 25 bp, Homo sapien
cgttgctggtatatgcgggggtcgg

SEQ ID NO: 2600950 - DNA, 25 bp, Homo sapien
gtatatgcgggggtcggggtcaggc

SEQ ID NO: 2600951 - DNA, 25 bp, Homo sapien
tatatgcgggggtcggggtcaggcc

SEQ ID NO: 2600952 - DNA, 25 bp, Homo sapien
ctggtatatgcgggggtcggggtca

SEQ ID NO: 2600953 - DNA, 25 bp, Homo sapien
tggtatatgcgggggtcggggtcag

SEQ ID NO: 2600954 - DNA, 25 bp, Homo sapien
ccgttgctggtatatgcggtggtcg

SEQ ID NO: 2600955 - DNA, 25 bp, Homo sapien
gtatatgcggtggtcggggtcaggc

SEQ ID NO: 2600956 - DNA, 25 bp, Homo sapien
atatgcggtggtcggggtcaggccc

SEQ ID NO: 2600957 - DNA, 25 bp, Homo sapien
cgttgctggtatatgcggtggtcgg

SEQ ID NO: 2600958 - DNA, 25 bp, Homo sapien
tatatgcgggggtcggggtcaggcc

SEQ ID NO: 2600959 - DNA, 25 bp, Homo sapien
ctggtatatgcgggggtcggggtca

SEQ ID NO: 2600960 - DNA, 25 bp, Homo sapien
ttgctggtatatgcgggggtcgggg

SEQ ID NO: 2600961 - DNA, 25 bp, Homo sapien
ctttgctggtatatgcgggggtcgg

SEQ ID NO: 2600962 - DNA, 25 bp, Homo sapien
tatatgcgggggtcggggtcaggcc

SEQ ID NO: 2600963 - DNA, 25 bp, Homo sapien
gttgctggtatatgcgggggtcggg

SEQ ID NO: 2600964 - DNA, 25 bp, Homo sapien
cgttgctggtatatgcgggggtcgg

SEQ ID NO: 2600965 - DNA, 25 bp, Homo sapien
ctggtatatgcgggggtcggggtca

SEQ ID NO: 2600966 - DNA, 25 bp, Homo sapien
tggtatatgcggtggtcggggtcag

SEQ ID NO: 2600967 - DNA, 25 bp, Homo sapien
atatgcggtggtcggggtcaggccc

SEQ ID NO: 2600968 - DNA, 25 bp, Homo sapien
gtatatgcggtggtcggggtcaggc

SEQ ID NO: 2600969 - DNA, 25 bp, Homo sapien
ctggtatatgcggtggtcggggtca

SEQ ID NO: 2600970 - DNA, 25 bp, Homo sapien
atatgcggtggtcggggtcaggccc

SEQ ID NO: 2600971 - DNA, 25 bp, Homo sapien
ccgttgctggtatatgcggtggtcg

SEQ ID NO: 2600972 - DNA, 25 bp, Homo sapien
gtatatgcggtggtcggggtcaggc

SEQ ID NO: 2600973 - DNA, 25 bp, Homo sapien
gttgctggtatatgcggtggtcggg

SEQ ID NO: 2600974 - DNA, 25 bp, Homo sapien
gtatatgcgggggtcgtttgtggtg

SEQ ID NO: 2600975 - DNA, 25 bp, Homo sapien
tatgcgggggtcgtttgtggtgtca

SEQ ID NO: 2600976 - DNA, 25 bp, Homo sapien
atgcgggggtcgtttgtggtgtcat

SEQ ID NO: 2600977 - DNA, 25 bp, Homo sapien
tatatgcgggggtcgtttgtggtgt

SEQ ID NO: 2600978 - DNA, 25 bp, Homo sapien
ccgggggcagctgcgggcccagact

SEQ ID NO: 2600979 - DNA, 25 bp, Homo sapien
tgcgggcccagacttcccggacgcc

SEQ ID NO: 2600980 - DNA, 25 bp, Homo sapien
ccagacttcccggacgccctggcgc

SEQ ID NO: 2600981 - DNA, 25 bp, Homo sapien
cagctgcgggcccagacttcccgga

SEQ ID NO: 2600982 - DNA, 25 bp, Homo sapien
cagaagccgagttcataggcaccca

SEQ ID NO: 2600983 - DNA, 25 bp, Homo sapien
ttctgtgcagcacctcgcagtgagc

SEQ ID NO: 2600984 - DNA, 25 bp, Homo sapien
ctaagctcagcaagccagcgtcgtg

SEQ ID NO: 2600985 - DNA, 25 bp, Homo sapien
gaagattcccaactgtcctcagagc

SEQ ID NO: 2600986 - DNA, 25 bp, Homo sapien
gataaagctgtcttccgtgaggctg

SEQ ID NO: 2600987 - DNA, 25 bp, Homo sapien
gatttagagatcttatgttccatca

SEQ ID NO: 2600988 - DNA, 25 bp, Homo sapien
tattagtcttggtcccagtgctgca

SEQ ID NO: 2600989 - DNA, 25 bp, Homo sapien
tcataaattgggctggcagacttcc

SEQ ID NO: 2600990 - DNA, 25 bp, Homo sapien
aagcctcacgccaggtccacagagg

SEQ ID NO: 2600991 - DNA, 25 bp, Homo sapien
caaagggaccctgaaattgccgcct

SEQ ID NO: 2600992 - DNA, 25 bp, Homo sapien
tgttctcattcagccaccggcacgg

SEQ ID NO: 2600993 - DNA, 25 bp, Homo sapien
gatggtccataggagactcagaaac

SEQ ID NO: 2600994 - DNA, 25 bp, Homo sapien
tctgtgacctcagaaagtcagtctg

SEQ ID NO: 2600995 - DNA, 25 bp, Homo sapien
gggagtccaggacaccgccttggat

SEQ ID NO: 2600996 - DNA, 25 bp, Homo sapien
gagtccaggacaccgccttggatgg

SEQ ID NO: 2600997 - DNA, 25 bp, Homo sapien
ccttggatggggtgaggctccgtct

SEQ ID NO: 2600998 - DNA, 25 bp, Homo sapien
cagaataaaactgcctgtccacctg

SEQ ID NO: 2600999 - DNA, 25 bp, Homo sapien
gtccacctgagcttgccgccctaaa

SEQ ID NO: 2601000 - DNA, 25 bp, Homo sapien
tgacagagggcctgctacccccagt

SEQ ID NO: 2601001 - DNA, 25 bp, Homo sapien
aaaatccctgacatgatacagaagt

SEQ ID NO: 2601002 - DNA, 25 bp, Homo sapien
cttcttctggagcagccggtcacag

SEQ ID NO: 2601003 - DNA, 25 bp, Homo sapien
tgctggcgcacacgggtatgagacc

SEQ ID NO: 2601004 - DNA, 25 bp, Homo sapien
gagcagccggtcacagctgtggtcc

SEQ ID NO: 2601005 - DNA, 25 bp, Homo sapien
gtcctgctggcgcacacgggtatga

SEQ ID NO: 2601006 - DNA, 25 bp, Homo sapien
ctaaaacacacagcgactgcacagt

SEQ ID NO: 2601007 - DNA, 25 bp, Homo sapien
aaccctgcatatcccatttgggtac

SEQ ID NO: 2601008 - DNA, 25 bp, Homo sapien
actgcacagtgcaaccctgcatatc

SEQ ID NO: 2601009 - DNA, 25 bp, Homo sapien
cccagagcagctcacgcgtgggtac

SEQ ID NO: 2601010 - DNA, 25 bp, Homo sapien
tccgctgtgttagcgtcccggccct

SEQ ID NO: 2601011 - DNA, 25 bp, Homo sapien
cacccaggcctcgttggggcaaggc

SEQ ID NO: 2601012 - DNA, 25 bp, Homo sapien
gccttgtgcagacacggtgggatct

SEQ ID NO: 2601013 - DNA, 25 bp, Homo sapien
gccaccggtgtcaggatctccagga

SEQ ID NO: 2601014 - DNA, 25 bp, Homo sapien
ttctctacctgggatgtgggacccc

SEQ ID NO: 2601015 - DNA, 25 bp, Homo sapien
catgctgtgggtctttatctgcctc

SEQ ID NO: 2601016 - DNA, 25 bp, Homo sapien
agagatggcacagacgccagcgacc

SEQ ID NO: 2601017 - DNA, 25 bp, Homo sapien
gcaggcaaggccttaggacagatgc

SEQ ID NO: 2601018 - DNA, 25 bp, Homo sapien
actgggcaatgtctgctgaagataa

SEQ ID NO: 2601019 - DNA, 25 bp, Homo sapien
taaggacgtcttcactgggccaggc

SEQ ID NO: 2601020 - DNA, 25 bp, Homo sapien
tgaagataaggacgtcttcactggg

SEQ ID NO: 2601021 - DNA, 25 bp, Homo sapien
ctgctgaagataaggacgtcttcac

SEQ ID NO: 2601022 - DNA, 25 bp, Homo sapien
ccagacatgtgggattgccggtgaa

SEQ ID NO: 2601023 - DNA, 25 bp, Homo sapien
ctggacacaatggaggaccccgtgt

SEQ ID NO: 2601024 - DNA, 25 bp, Homo sapien
ccaggtctgagaacagcaacttcca

SEQ ID NO: 2601025 - DNA, 25 bp, Homo sapien
tgccggtgaattaacaaaagccctg

SEQ ID NO: 2601026 - DNA, 25 bp, Homo sapien
tcatcgggcctgttacgcacgttct

SEQ ID NO: 2601027 - DNA, 25 bp, Homo sapien
cacccaaaggcacgggcaagttgca

SEQ ID NO: 2601028 - DNA, 25 bp, Homo sapien
gaaacaccttcttgcgtcctcgaaa

SEQ ID NO: 2601029 - DNA, 25 bp, Homo sapien
taaaggttcaggtcggtggacagac

SEQ ID NO: 2601030 - DNA, 25 bp, Homo sapien
ctgacaggctggtctgagcgctgct

SEQ ID NO: 2601031 - DNA, 25 bp, Homo sapien
catctttgtccgtgtggccatggga

SEQ ID NO: 2601032 - DNA, 25 bp, Homo sapien
tgcaccggtgtctatagtgaagcca

SEQ ID NO: 2601033 - DNA, 25 bp, Homo sapien
tgtgttgcgcacaggccttggaaag

SEQ ID NO: 2601034 - DNA, 25 bp, Homo sapien
ggctggggctgtaccacatctgggc

SEQ ID NO: 2601035 - DNA, 25 bp, Homo sapien
tccggctggggctgtaccacatctg

SEQ ID NO: 2601036 - DNA, 25 bp, Homo sapien
ccggctggggctgtaccacatctgg

SEQ ID NO: 2601037 - DNA, 25 bp, Homo sapien
ctccggctggggctgtaccacatct

SEQ ID NO: 2601038 - DNA, 25 bp, Homo sapien
gagaagggctctaagagaaatgctg

SEQ ID NO: 2601039 - DNA, 25 bp, Homo sapien
tgggcaggcactcccggatggcgga

SEQ ID NO: 2601040 - DNA, 25 bp, Homo sapien
gttatttatgacctcctccctctgg

SEQ ID NO: 2601041 - DNA, 25 bp, Homo sapien
tggcggaggcggcatgcgggctggg

SEQ ID NO: 2601042 - DNA, 25 bp, Homo sapien
agcgacagaggcaccaaggcccagg

SEQ ID NO: 2601043 - DNA, 25 bp, Homo sapien
gcggtggagtccacaccgccaggtc

SEQ ID NO: 2601044 - DNA, 25 bp, Homo sapien
tgattccagcgccagaactccgttc

SEQ ID NO: 2601045 - DNA, 25 bp, Homo sapien
caggtccctgcctcgctcaggatga

SEQ ID NO: 2601046 - DNA, 25 bp, Homo sapien
gctgcatccagacagtgggcactca

SEQ ID NO: 2601047 - DNA, 25 bp, Homo sapien
ggagcagactttccacatggtatca

SEQ ID NO: 2601048 - DNA, 25 bp, Homo sapien
gtagggtcagggctgcatccagaca

SEQ ID NO: 2601049 - DNA, 25 bp, Homo sapien
ggcactcagggccagtccacatggc

SEQ ID NO: 2601050 - DNA, 25 bp, Homo sapien
tgctgttaccaacgcccccaggttg

SEQ ID NO: 2601051 - DNA, 25 bp, Homo sapien
ccaggttgtgtttctcttcggaacg

SEQ ID NO: 2601052 - DNA, 25 bp, Homo sapien
ggaacgctccagatgcaatgccgat

SEQ ID NO: 2601053 - DNA, 25 bp, Homo sapien
gtgatgggaagctcaccaggaacca

SEQ ID NO: 2601054 - DNA, 25 bp, Homo sapien
tcggaaggtctctgcgaggctcctg

SEQ ID NO: 2601055 - DNA, 25 bp, Homo sapien
gcctcggtgaacacggacagatcgc

SEQ ID NO: 2601056 - DNA, 25 bp, Homo sapien
gccgcgcgcggaggcctcggtgaac

SEQ ID NO: 2601057 - DNA, 25 bp, Homo sapien
tcggacacccgggagcctccggctc

SEQ ID NO: 2601058 - DNA, 25 bp, Homo sapien
gtcgtctatgcagccagtggacgcc

SEQ ID NO: 2601059 - DNA, 25 bp, Homo sapien
cctgtggtctgtgagtcgtctatgc

SEQ ID NO: 2601060 - DNA, 25 bp, Homo sapien
agagcaagctcctggaccctgtggt

SEQ ID NO: 2601061 - DNA, 25 bp, Homo sapien
ccagggtcatgactagctcacattt

SEQ ID NO: 2601062 - DNA, 25 bp, Homo sapien
gccctcaagatccgggcccaggtga

SEQ ID NO: 2601063 - DNA, 25 bp, Homo sapien
ggatcgacggggagaccctgccact

SEQ ID NO: 2601064 - DNA, 25 bp, Homo sapien
gatggagcagcacccgggtcctgac

SEQ ID NO: 2601065 - DNA, 25 bp, Homo sapien
gacactcaaacccaacagatcactg

SEQ ID NO: 2601066 - DNA, 25 bp, Homo sapien
ggtggggccacacaaatctccagga

SEQ ID NO: 2601067 - DNA, 25 bp, Homo sapien
aggagaatgggaccttggctctact

SEQ ID NO: 2601068 - DNA, 25 bp, Homo sapien
cacgcccttgccggtcaaacttcac

SEQ ID NO: 2601069 - DNA, 25 bp, Homo sapien
gaatgggaccttggctctacttcca

SEQ ID NO: 2601070 - DNA, 25 bp, Homo sapien
ttctttcggtttcggatgcaaaaca

SEQ ID NO: 2601071 - DNA, 25 bp, Homo sapien
tctcgatacgtttggtctttcatgc

SEQ ID NO: 2601072 - DNA, 25 bp, Homo sapien
ccagcccagctctcgatacgtttgg

SEQ ID NO: 2601073 - DNA, 25 bp, Homo sapien
tctcggtctgctgacgtcagggtca

SEQ ID NO: 2601074 - DNA, 25 bp, Homo sapien
gtcctccggcccctgggccagctgc

SEQ ID NO: 2601075 - DNA, 25 bp, Homo sapien
agccccgcctctgcgtctgggtctc

SEQ ID NO: 2601076 - DNA, 25 bp, Homo sapien
agctcgtcctccggcccctgggcca

SEQ ID NO: 2601077 - DNA, 25 bp, Homo sapien
ctctgagagctgcagatcctccagc

SEQ ID NO: 2601078 - DNA, 25 bp, Homo sapien
catcgtcttccaccccatgccgagt

SEQ ID NO: 2601079 - DNA, 25 bp, Homo sapien
ttcatcgtcttccaccccatgccga

SEQ ID NO: 2601080 - DNA, 25 bp, Homo sapien
tcctcttcatcgtcttccaccccat

SEQ ID NO: 2601081 - DNA, 25 bp, Homo sapien
gccgagtgctcaggggcctcagtat

SEQ ID NO: 2601082 - DNA, 25 bp, Homo sapien
ggacagagttaccaatcccagtagg

SEQ ID NO: 2601083 - DNA, 25 bp, Homo sapien
agccccctgcaggatgggtacaggt

SEQ ID NO: 2601084 - DNA, 25 bp, Homo sapien
tggcaacactgaggttggccccagc

SEQ ID NO: 2601085 - DNA, 25 bp, Homo sapien
gccctcgtggctctgggaagtccag

SEQ ID NO: 2601086 - DNA, 25 bp, Homo sapien
aagaggtctttaaattgcttcctgt

SEQ ID NO: 2601087 - DNA, 25 bp, Homo sapien
aaagaggtctttaaattgcttcctg

SEQ ID NO: 2601088 - DNA, 25 bp, Homo sapien
tggaaggccaaagaaccaggggctc

SEQ ID NO: 2601089 - DNA, 25 bp, Homo sapien
ggccaatttctagtcccctctgttc

SEQ ID NO: 2601090 - DNA, 25 bp, Homo sapien
ggtgcccacatactggcctgggtga

SEQ ID NO: 2601091 - DNA, 25 bp, Homo sapien
gggtgacgaggtcagtccagccact

SEQ ID NO: 2601092 - DNA, 25 bp, Homo sapien
ccagtggctgtagtacaaggtcagg

SEQ ID NO: 2601093 - DNA, 25 bp, Homo sapien
tcagagacgccgaaggaaaccctct

SEQ ID NO: 2601094 - DNA, 25 bp, Homo sapien
gccaccttgcactcccggaggaacg

SEQ ID NO: 2601095 - DNA, 25 bp, Homo sapien
gccggcagtagttggccaccttgca

SEQ ID NO: 2601096 - DNA, 25 bp, Homo sapien
tagttggccaccttgcactcccgga

SEQ ID NO: 2601097 - DNA, 25 bp, Homo sapien
ttgcactcccggaggaacgacttca

SEQ ID NO: 2601098 - DNA, 25 bp, Homo sapien
cccatctcagggctcaagtgcatag

SEQ ID NO: 2601099 - DNA, 25 bp, Homo sapien
tgcccactactcacctctggaaata

SEQ ID NO: 2601100 - DNA, 25 bp, Homo sapien
aaataaagttttatgccaggcgtgg

SEQ ID NO: 2601101 - DNA, 25 bp, Homo sapien
ggtcctgtgcaaaaccacgcgtggt

SEQ ID NO: 2601102 - DNA, 25 bp, Homo sapien
gcagagatgccccaatgccaggtat

SEQ ID NO: 2601103 - DNA, 25 bp, Homo sapien
tgcagctgaacatccgtaggaagcc

SEQ ID NO: 2601104 - DNA, 25 bp, Homo sapien
aaaatacagtctcgctgacgtgcag

SEQ ID NO: 2601105 - DNA, 25 bp, Homo sapien
caggtatcaccacccaagaggacat

SEQ ID NO: 2601106 - DNA, 25 bp, Homo sapien
tccagggtgaggtcgtacagctgct

SEQ ID NO: 2601107 - DNA, 25 bp, Homo sapien
gggtgaggtcgtacagctgctccac

SEQ ID NO: 2601108 - DNA, 25 bp, Homo sapien
cagctccgggaagccgatgcagtgt

SEQ ID NO: 2601109 - DNA, 25 bp, Homo sapien
gtactccagggtgaggtcgtacagc

SEQ ID NO: 2601110 - DNA, 25 bp, Homo sapien
tgcaggttgacattggacagcttca

SEQ ID NO: 2601111 - DNA, 25 bp, Homo sapien
gccctggcttcctgttgaagtcgac

SEQ ID NO: 2601112 - DNA, 25 bp, Homo sapien
gccttctcctgcaggttgacattgg

SEQ ID NO: 2601113 - DNA, 25 bp, Homo sapien
gcttggagctcatgcgccctggctt

SEQ ID NO: 2601114 - DNA, 25 bp, Homo sapien
ccaagggccgtgtcaggctctctcg

SEQ ID NO: 2601115 - DNA, 25 bp, Homo sapien
caagggccgtgtcaggctctctcgg

SEQ ID NO: 2601116 - DNA, 25 bp, Homo sapien
aagggccgtgtcaggctctctcggc

SEQ ID NO: 2601117 - DNA, 25 bp, Homo sapien
ccccaagggccgtgtcaggctctct

SEQ ID NO: 2601118 - DNA, 25 bp, Homo sapien
ctagaggtccctgccacacagagta

SEQ ID NO: 2601119 - DNA, 25 bp, Homo sapien
agacctagaggtccctgccacacag

SEQ ID NO: 2601120 - DNA, 25 bp, Homo sapien
tggagacctagaggtccctgccaca

SEQ ID NO: 2601121 - DNA, 25 bp, Homo sapien
gtctggagacctagaggtccctgcc

SEQ ID NO: 2601122 - DNA, 25 bp, Homo sapien
ctgacaacatggcactgaggcccat

SEQ ID NO: 2601123 - DNA, 25 bp, Homo sapien
cattcctgacaacatggcactgagg

SEQ ID NO: 2601124 - DNA, 25 bp, Homo sapien
cccattcctgacaacatggcactga

SEQ ID NO: 2601125 - DNA, 25 bp, Homo sapien
tcctgacaacatggcactgaggccc

SEQ ID NO: 2601126 - DNA, 25 bp, Homo sapien
acacccgtgacaaggaggcggccag

SEQ ID NO: 2601127 - DNA, 25 bp, Homo sapien
gctccgggaagtcgccggacaactc

SEQ ID NO: 2601128 - DNA, 25 bp, Homo sapien
cacggaggagcactgtcctcgtgac

SEQ ID NO: 2601129 - DNA, 25 bp, Homo sapien
aactcagcacagacgcccggagcag

SEQ ID NO: 2601130 - DNA, 25 bp, Homo sapien
agagcagcgtcagggcacggatgca

SEQ ID NO: 2601131 - DNA, 25 bp, Homo sapien
cgtcagggcacggatgcagtgcatt

SEQ ID NO: 2601132 - DNA, 25 bp, Homo sapien
cccgagctccccgagagcagcgtca

SEQ ID NO: 2601133 - DNA, 25 bp, Homo sapien
agggcacggatgcagtgcattcgca

SEQ ID NO: 2601134 - DNA, 25 bp, Homo sapien
gcacatactgccagttgtacacaga

SEQ ID NO: 2601135 - DNA, 25 bp, Homo sapien
gcaagggggtagaccaagggctgga

SEQ ID NO: 2601136 - DNA, 25 bp, Homo sapien
ccaagggctggagggcttcgctggg

SEQ ID NO: 2601137 - DNA, 25 bp, Homo sapien
tgatacagccaatgatgacttgggc

SEQ ID NO: 2601138 - DNA, 25 bp, Homo sapien
agctccgtcaaggtccactgcatga

SEQ ID NO: 2601139 - DNA, 25 bp, Homo sapien
gctccgtcaaggtccactgcatgaa

SEQ ID NO: 2601140 - DNA, 25 bp, Homo sapien
gtcaaggtccactgcatgaaactga

SEQ ID NO: 2601141 - DNA, 25 bp, Homo sapien
tccgtcaaggtccactgcatgaaac

SEQ ID NO: 2601142 - DNA, 25 bp, Homo sapien
aaagtgtccttcttgtgccggcaga

SEQ ID NO: 2601143 - DNA, 25 bp, Homo sapien
aggaaagtgtccttcttgtgccggc

SEQ ID NO: 2601144 - DNA, 25 bp, Homo sapien
gccaaggaaagtgtccttcttgtgc

SEQ ID NO: 2601145 - DNA, 25 bp, Homo sapien
gtgtccttcttgtgccggcagactc

SEQ ID NO: 2601146 - DNA, 25 bp, Homo sapien
tttgctcacggactgagccgcgctg

SEQ ID NO: 2601147 - DNA, 25 bp, Homo sapien
gtggctttgctcacggactgagccg

SEQ ID NO: 2601148 - DNA, 25 bp, Homo sapien
ttgctcacggactgagccgcgctgc

SEQ ID NO: 2601149 - DNA, 25 bp, Homo sapien
gctttgctcacggactgagccgcgc

SEQ ID NO: 2601150 - DNA, 25 bp, Homo sapien
acaccgtcgtctccgacagacagga

SEQ ID NO: 2601151 - DNA, 25 bp, Homo sapien
caacaccgtcgtctccgacagacag

SEQ ID NO: 2601152 - DNA, 25 bp, Homo sapien
cgccaacaccgtcgtctccgacaga

SEQ ID NO: 2601153 - DNA, 25 bp, Homo sapien
cggccgccaacaccgtcgtctccga

SEQ ID NO: 2601154 - DNA, 25 bp, Homo sapien
agccttgatgtccacacgaagcttc

SEQ ID NO: 2601155 - DNA, 25 bp, Homo sapien
caggtaagccttgatgtccacacga

SEQ ID NO: 2601156 - DNA, 25 bp, Homo sapien
ggtaagccttgatgtccacacgaag

SEQ ID NO: 2601157 - DNA, 25 bp, Homo sapien
tggccgagcccaggtaagccttgat

SEQ ID NO: 2601158 - DNA, 25 bp, Homo sapien
tcaaaaaagctcagggccccttaca

SEQ ID NO: 2601159 - DNA, 25 bp, Homo sapien
actgccgcagactggtttcctttgg

SEQ ID NO: 2601160 - DNA, 25 bp, Homo sapien
agcatagcctctacgactctgcaga

SEQ ID NO: 2601161 - DNA, 25 bp, Homo sapien
gaggaccctctcaagtgcattagct

SEQ ID NO: 2601162 - DNA, 25 bp, Homo sapien
ggcaggaggatcaaactccaagccc

SEQ ID NO: 2601163 - DNA, 25 bp, Homo sapien
caggaggatcaaactccaagcccag

SEQ ID NO: 2601164 - DNA, 25 bp, Homo sapien
aggaggatcaaactccaagcccagg

SEQ ID NO: 2601165 - DNA, 25 bp, Homo sapien
atgccagtactcactgcactttggg

SEQ ID NO: 2601166 - DNA, 25 bp, Homo sapien
ccctgacctggtggctcaggctgca

SEQ ID NO: 2601167 - DNA, 25 bp, Homo sapien
ctcgacaggggtccctgacctggtg

SEQ ID NO: 2601168 - DNA, 25 bp, Homo sapien
ctgacctggtggctcaggctgcagt

SEQ ID NO: 2601169 - DNA, 25 bp, Homo sapien
gggtccctgacctggtggctcaggc

SEQ ID NO: 2601170 - DNA, 25 bp, Homo sapien
gctgtcggcgagacctctcctgtgg

SEQ ID NO: 2601171 - DNA, 25 bp, Homo sapien
acatggctctgttctatccgtccag

SEQ ID NO: 2601172 - DNA, 25 bp, Homo sapien
tgctccatgctctaccaaatgcttg

SEQ ID NO: 2601173 - DNA, 25 bp, Homo sapien
ccggaaccccaacgtgctccatgct

SEQ ID NO: 2601174 - DNA, 25 bp, Homo sapien
tatcctttgccacctttccaaacag

SEQ ID NO: 2601175 - DNA, 25 bp, Homo sapien
cagaaggtaaccagagcattgaatg

SEQ ID NO: 2601176 - DNA, 25 bp, Homo sapien
agacagccaatgaggtctctgatgc

SEQ ID NO: 2601177 - DNA, 25 bp, Homo sapien
gccaatgaggtctctgatgcagaag

SEQ ID NO: 2601178 - DNA, 25 bp, Homo sapien
acctggaatttgttggcctcagcac

SEQ ID NO: 2601179 - DNA, 25 bp, Homo sapien
gaatttgttggcctcagcactttcc

SEQ ID NO: 2601180 - DNA, 25 bp, Homo sapien
gcctgtaccacttcatggaacagct

SEQ ID NO: 2601181 - DNA, 25 bp, Homo sapien
ctggaatttgttggcctcagcactt

SEQ ID NO: 2601182 - DNA, 25 bp, Homo sapien
gcctgcttccatctctcaaccatgg

SEQ ID NO: 2601183 - DNA, 25 bp, Homo sapien
tgcttccatctctcaaccatggcga

SEQ ID NO: 2601184 - DNA, 25 bp, Homo sapien
tgcctgcttccatctctcaaccatg

SEQ ID NO: 2601185 - DNA, 25 bp, Homo sapien
tgctgcctgcttccatctctcaacc

SEQ ID NO: 2601186 - DNA, 25 bp, Homo sapien
agctgtccgagtcgctgaagtttag

SEQ ID NO: 2601187 - DNA, 25 bp, Homo sapien
ctcctcagagctgtccgagtcgctg

SEQ ID NO: 2601188 - DNA, 25 bp, Homo sapien
cctcagagctgtccgagtcgctgaa

SEQ ID NO: 2601189 - DNA, 25 bp, Homo sapien
tcagagctgtccgagtcgctgaagt

SEQ ID NO: 2601190 - DNA, 25 bp, Homo sapien
gatggtggcttcacccttccagagg

SEQ ID NO: 2601191 - DNA, 25 bp, Homo sapien
agtttggcacggaacaggagctcag

SEQ ID NO: 2601192 - DNA, 25 bp, Homo sapien
gggttaccaactagcaagacaggat

SEQ ID NO: 2601193 - DNA, 25 bp, Homo sapien
tcttatgacggtctacggcacctgg

SEQ ID NO: 2601194 - DNA, 25 bp, Homo sapien
tctccgcttgtggagaattttcgga

SEQ ID NO: 2601195 - DNA, 25 bp, Homo sapien
tcggattcggactcggagtcaaagc

SEQ ID NO: 2601196 - DNA, 25 bp, Homo sapien
cgtgcttcccgtgtctccgcttgtg

SEQ ID NO: 2601197 - DNA, 25 bp, Homo sapien
gagaattttcggactcggattcgga

SEQ ID NO: 2601198 - DNA, 25 bp, Homo sapien
tcttgcggctccccgcagctgccat

SEQ ID NO: 2601199 - DNA, 25 bp, Homo sapien
ctcttgcggctccccgcagctgcca

SEQ ID NO: 2601200 - DNA, 25 bp, Homo sapien
ccaacccgaagcgtgcaccccactt

SEQ ID NO: 2601201 - DNA, 25 bp, Homo sapien
cccacttccggccccagaatgccgc

SEQ ID NO: 2601202 - DNA, 25 bp, Homo sapien
gacaccaacccgaagcgtgcacccc

SEQ ID NO: 2601203 - DNA, 25 bp, Homo sapien
cacttccggccccagaatgccgcgc

SEQ ID NO: 2601204 - DNA, 25 bp, Homo sapien
tgcccgtttacacctttagcgtctg

SEQ ID NO: 2601205 - DNA, 25 bp, Homo sapien
cagaccccagctcgaattttgcaca

SEQ ID NO: 2601206 - DNA, 25 bp, Homo sapien
tcttgtagtgggtgcacacgcgtgc

SEQ ID NO: 2601207 - DNA, 25 bp, Homo sapien
ggagcagttgtccttcctgtcgtcg

SEQ ID NO: 2601208 - DNA, 25 bp, Homo sapien
gggcagctgcgcaactttgggtcct

SEQ ID NO: 2601209 - DNA, 25 bp, Homo sapien
ggcagagacctgcacggctcaggta

SEQ ID NO: 2601210 - DNA, 25 bp, Homo sapien
ccccgagtgcgctgactgtcttggc

SEQ ID NO: 2601211 - DNA, 25 bp, Homo sapien
cgacctgtacgactctggccatggg

SEQ ID NO: 2601212 - DNA, 25 bp, Homo sapien
tgtctgaaattaaccgaatgccctg

SEQ ID NO: 2601213 - DNA, 25 bp, Homo sapien
tccagccggagtgtcttgctgctca

SEQ ID NO: 2601214 - DNA, 25 bp, Homo sapien
gagccttcgctgtctcaggccagag

SEQ ID NO: 2601215 - DNA, 25 bp, Homo sapien
tggccacagtcctttgaggatcaag

SEQ ID NO: 2601216 - DNA, 25 bp, Homo sapien
ctggacgcggtagaagagaggggtc

SEQ ID NO: 2601217 - DNA, 25 bp, Homo sapien
gggcgcctgtggtcgtctcctcatc

SEQ ID NO: 2601218 - DNA, 25 bp, Homo sapien
cgcctgtggtcgtctcctcatcctg

SEQ ID NO: 2601219 - DNA, 25 bp, Homo sapien
tggacgcggtagaagagaggggtca

SEQ ID NO: 2601220 - DNA, 25 bp, Homo sapien
tgtggctgcggcgcccttgccccac

SEQ ID NO: 2601221 - DNA, 25 bp, Homo sapien
ctgccggcggaagtagcggatggca

SEQ ID NO: 2601222 - DNA, 25 bp, Homo sapien
ccggcggaagtagcggatggcagag

SEQ ID NO: 2601223 - DNA, 25 bp, Homo sapien
agatggtgccgacgttggccagcaa

SEQ ID NO: 2601224 - DNA, 25 bp, Homo sapien
cagagatggtgccgacgttggccag

SEQ ID NO: 2601225 - DNA, 25 bp, Homo sapien
gcgggcaaggtcggtgcggccaggg

SEQ ID NO: 2601226 - DNA, 25 bp, Homo sapien
gggcaaggtcggtgcggccagggcc

SEQ ID NO: 2601227 - DNA, 25 bp, Homo sapien
gcaccgtctgcccgcaagacccagc

SEQ ID NO: 2601228 - DNA, 25 bp, Homo sapien
agcctggctgtcggcaccgtctgcc

SEQ ID NO: 2601229 - DNA, 25 bp, Homo sapien
gggtatgcggatctgacgtcctcac

SEQ ID NO: 2601230 - DNA, 25 bp, Homo sapien
ctggggtatgcggatctgacgtcct

SEQ ID NO: 2601231 - DNA, 25 bp, Homo sapien
ggcgtctggggtatgcggatctgac

SEQ ID NO: 2601232 - DNA, 25 bp, Homo sapien
ttttccaggcgtctggggtatgcgg

SEQ ID NO: 2601233 - DNA, 25 bp, Homo sapien
ctggctgaaggcaaatgatgggaca

SEQ ID NO: 2601234 - DNA, 25 bp, Homo sapien
tgaaggcaaatgatgggacaggccc

SEQ ID NO: 2601235 - DNA, 25 bp, Homo sapien
gctgaaggcaaatgatgggacaggc

SEQ ID NO: 2601236 - DNA, 25 bp, Homo sapien
ttctggctgaaggcaaatgatggga

SEQ ID NO: 2601237 - DNA, 25 bp, Homo sapien
gaggccccgtgttctggtctgtaaa

SEQ ID NO: 2601238 - DNA, 25 bp, Homo sapien
gaactgccagtggaggccccgtgtt

SEQ ID NO: 2601239 - DNA, 25 bp, Homo sapien
taaagcatctcccagaggacatcag

SEQ ID NO: 2601240 - DNA, 25 bp, Homo sapien
ggcctcgtagagtgcctgaccctga

SEQ ID NO: 2601241 - DNA, 25 bp, Homo sapien
ctgcccgtctaagagccaggtggag

SEQ ID NO: 2601242 - DNA, 25 bp, Homo sapien
tcaagcctgtcctccccgaagaaga

SEQ ID NO: 2601243 - DNA, 25 bp, Homo sapien
cctccccgaagaagaagtgttcata

SEQ ID NO: 2601244 - DNA, 25 bp, Homo sapien
gccgctctaccacggctggcttgag

SEQ ID NO: 2601245 - DNA, 25 bp, Homo sapien
caggatcagctctcgggagcggctc

SEQ ID NO: 2601246 - DNA, 25 bp, Homo sapien
agaagaagaactcgtaggcctccgg

SEQ ID NO: 2601247 - DNA, 25 bp, Homo sapien
acctctgggctccaacgtctgggaa

SEQ ID NO: 2601248 - DNA, 25 bp, Homo sapien
cgtctgggaagaagaactcgcacat

SEQ ID NO: 2601249 - DNA, 25 bp, Homo sapien
gaacaggtgtagacacaagcccgct

SEQ ID NO: 2601250 - DNA, 25 bp, Homo sapien
tagacacagccgtgtcagattgcgg

SEQ ID NO: 2601251 - DNA, 25 bp, Homo sapien
tgacttagcccttgagacatctggg

SEQ ID NO: 2601252 - DNA, 25 bp, Homo sapien
tgtagacagagccacactggactga

SEQ ID NO: 2601253 - DNA, 25 bp, Homo sapien
ggtctccagaagacgccggaccagg

SEQ ID NO: 2601254 - DNA, 25 bp, Homo sapien
cagctcgcctcttctttcggctggg

SEQ ID NO: 2601255 - DNA, 25 bp, Homo sapien
caggtgtagacaggcccaaacctgg

SEQ ID NO: 2601256 - DNA, 25 bp, Homo sapien
gccatcagctttgccgtctcaggac

SEQ ID NO: 2601257 - DNA, 25 bp, Homo sapien
ggtggagcttctgcccgtgcggacg

SEQ ID NO: 2601258 - DNA, 25 bp, Homo sapien
ccgagggacggtggagcttctgccc

SEQ ID NO: 2601259 - DNA, 25 bp, Homo sapien
gacggtggagcttctgcccgtgcgg

SEQ ID NO: 2601260 - DNA, 25 bp, Homo sapien
agcttctgcccgtgcggacgtgctg

SEQ ID NO: 2601261 - DNA, 25 bp, Homo sapien
cggtccccagggccaagacaggctc

SEQ ID NO: 2601262 - DNA, 25 bp, Homo sapien
ggtccccagggccaagacaggctca

SEQ ID NO: 2601263 - DNA, 25 bp, Homo sapien
gtccccagggccaagacaggctcac

SEQ ID NO: 2601264 - DNA, 25 bp, Homo sapien
gaggccacactcatcggcggtggct

SEQ ID NO: 2601265 - DNA, 25 bp, Homo sapien
ctcatcggcggtggctgagaactcg

SEQ ID NO: 2601266 - DNA, 25 bp, Homo sapien
cagctagctgcccagttgggagagg

SEQ ID NO: 2601267 - DNA, 25 bp, Homo sapien
cactcatcggcggtggctgagaact

SEQ ID NO: 2601268 - DNA, 25 bp, Homo sapien
agctcccaccgcctcggggctccat

SEQ ID NO: 2601269 - DNA, 25 bp, Homo sapien
tcccaccgcctcggggctccatcca

SEQ ID NO: 2601270 - DNA, 25 bp, Homo sapien
ctgggagctcccaccgcctcggggc

SEQ ID NO: 2601271 - DNA, 25 bp, Homo sapien
accgcctcggggctccatccatgcc

SEQ ID NO: 2601272 - DNA, 25 bp, Homo sapien
tttcagggtccacccgatgggacca

SEQ ID NO: 2601273 - DNA, 25 bp, Homo sapien
tttgcacggcaaagcacctttcagg

SEQ ID NO: 2601274 - DNA, 25 bp, Homo sapien
gccagagctgtctttgcacggcaaa

SEQ ID NO: 2601275 - DNA, 25 bp, Homo sapien
acccgatgggaccagtgccctcggg

SEQ ID NO: 2601276 - DNA, 25 bp, Homo sapien
ctgagctgcccgtcctgggtcggca

SEQ ID NO: 2601277 - DNA, 25 bp, Homo sapien
tgggtcggcatggtgctaggctgtg

SEQ ID NO: 2601278 - DNA, 25 bp, Homo sapien
gtcggcatggtgctaggctgtggct

SEQ ID NO: 2601279 - DNA, 25 bp, Homo sapien
cccgtcctgggtcggcatggtgcta

SEQ ID NO: 2601280 - DNA, 25 bp, Homo sapien
acaaatagatggcatttgagggccc

SEQ ID NO: 2601281 - DNA, 25 bp, Homo sapien
ccctgtggccacatgagactcgtgc

SEQ ID NO: 2601282 - DNA, 25 bp, Homo sapien
actcgtgccagccatcagggtccag

SEQ ID NO: 2601283 - DNA, 25 bp, Homo sapien
tagatggcatttgagggccctccag

SEQ ID NO: 2601284 - DNA, 25 bp, Homo sapien
tggggttcacggtgcccattcccag

SEQ ID NO: 2601285 - DNA, 25 bp, Homo sapien
agctcagctccgatggcagcacgtc

SEQ ID NO: 2601286 - DNA, 25 bp, Homo sapien
aaacatccgatcaaacaggcaggtg

SEQ ID NO: 2601287 - DNA, 25 bp, Homo sapien
agggcgagggatccaacaataaaca

SEQ ID NO: 2601288 - DNA, 25 bp, Homo sapien
tgtcctcgggcccacgccgtgctct

SEQ ID NO: 2601289 - DNA, 25 bp, Homo sapien
tcctgggtggcatgcacgtggcatc

SEQ ID NO: 2601290 - DNA, 25 bp, Homo sapien
gcagcacatcctgggtggcatgcac

SEQ ID NO: 2601291 - DNA, 25 bp, Homo sapien
tggcatgcacgtggcatccgggccc

SEQ ID NO: 2601292 - DNA, 25 bp, Homo sapien
acgtggcatccgggccccacgtgga

SEQ ID NO: 2601293 - DNA, 25 bp, Homo sapien
cacgagatgagaaggctttggggct

SEQ ID NO: 2601294 - DNA, 25 bp, Homo sapien
gaggccgacggcaaggctgtggcca

SEQ ID NO: 2601295 - DNA, 25 bp, Homo sapien
gctgtggccagggagctgtgcgagg

SEQ ID NO: 2601296 - DNA, 25 bp, Homo sapien
gctttggggcttgggacaggagagg

SEQ ID NO: 2601297 - DNA, 25 bp, Homo sapien
gctgatccatgagcaaccatcgcat

SEQ ID NO: 2601298 - DNA, 25 bp, Homo sapien
cttgagacagtcggggagctgatcc

SEQ ID NO: 2601299 - DNA, 25 bp, Homo sapien
agacagtcggggagctgatccatga

SEQ ID NO: 2601300 - DNA, 25 bp, Homo sapien
tgagacagtcggggagctgatccat

SEQ ID NO: 2601301 - DNA, 25 bp, Homo sapien
tggagttcagggttgattgtttctg

SEQ ID NO: 2601302 - DNA, 25 bp, Homo sapien
gagttcagggttgattgtttctgga

SEQ ID NO: 2601303 - DNA, 25 bp, Homo sapien
tctggagttcgtggttgattgtttc

SEQ ID NO: 2601304 - DNA, 25 bp, Homo sapien
tttctggagttcgtggttgattgtt

SEQ ID NO: 2601305 - DNA, 25 bp, Homo sapien
cacagcagtatcctacctaagaaga

SEQ ID NO: 2601306 - DNA, 25 bp, Homo sapien
catctcttcgtgagggcagagcctc

SEQ ID NO: 2601307 - DNA, 25 bp, Homo sapien
tctgtgtcatccctggacaaagaag

SEQ ID NO: 2601308 - DNA, 25 bp, Homo sapien
ccttaataggatatctgagactggg

SEQ ID NO: 2601309 - DNA, 25 bp, Homo sapien
caggcgtctccgccgacagcttggg

SEQ ID NO: 2601310 - DNA, 25 bp, Homo sapien
gacgtgctgatggagcttcctcttc

SEQ ID NO: 2601311 - DNA, 25 bp, Homo sapien
tctccgccgacagcttgggcctcct

SEQ ID NO: 2601312 - DNA, 25 bp, Homo sapien
aacgacacgatgtcctggcccccag

SEQ ID NO: 2601313 - DNA, 25 bp, Homo sapien
cacctactattcagcagaaaaccaa

SEQ ID NO: 2601314 - DNA, 25 bp, Homo sapien
ccctccaccgagaagatgactttca

SEQ ID NO: 2601315 - DNA, 25 bp, Homo sapien
ccaagataaaaatcgctggggaggg

SEQ ID NO: 2601316 - DNA, 25 bp, Homo sapien
caaacatttattgacccttggtcct

SEQ ID NO: 2601317 - DNA, 25 bp, Homo sapien
ggcgtcctggctgggtgtaggcaga

SEQ ID NO: 2601318 - DNA, 25 bp, Homo sapien
gcgtcctggctgggtgtaggcagag

SEQ ID NO: 2601319 - DNA, 25 bp, Homo sapien
tcagccctcgccctctggagccccg

SEQ ID NO: 2601320 - DNA, 25 bp, Homo sapien
ccagctgggcccggatgatgcacca

SEQ ID NO: 2601321 - DNA, 25 bp, Homo sapien
tggagccccgtccagctgggcccgg

SEQ ID NO: 2601322 - DNA, 25 bp, Homo sapien
tgggcccggatgatgcaccacccag

SEQ ID NO: 2601323 - DNA, 25 bp, Homo sapien
acgcgggaccgggatggcgaccgcg

SEQ ID NO: 2601324 - DNA, 25 bp, Homo sapien
caacggcacgtgctcgggacgatga

SEQ ID NO: 2601325 - DNA, 25 bp, Homo sapien
ttcaggggaacgtccggcgctgcct

SEQ ID NO: 2601326 - DNA, 25 bp, Homo sapien
cgctgcctggtaactcggtggtcga

SEQ ID NO: 2601327 - DNA, 25 bp, Homo sapien
ctgctacagtctcggcaaaggccac

SEQ ID NO: 2601328 - DNA, 25 bp, Homo sapien
ggggcgccgcctccgatgcagtctc

SEQ ID NO: 2601329 - DNA, 25 bp, Homo sapien
ctagaacggggcgccgcctccgatg

SEQ ID NO: 2601330 - DNA, 25 bp, Homo sapien
tctctgctacagtctcggcaaaggc

SEQ ID NO: 2601331 - DNA, 25 bp, Homo sapien
gggcggcgggcagcgcccgggtcag

SEQ ID NO: 2601332 - DNA, 25 bp, Homo sapien
gcggcgggcagcgcccgggtcagac

SEQ ID NO: 2601333 - DNA, 25 bp, Homo sapien
tcagcgcagccacggcctccagggc

SEQ ID NO: 2601334 - DNA, 25 bp, Homo sapien
ctccagggcccacccgggccctgcg

SEQ ID NO: 2601335 - DNA, 25 bp, Homo sapien
cagccggccaggaagcggttcacct

SEQ ID NO: 2601336 - DNA, 25 bp, Homo sapien
cggcgcggtacttgcccagaacggc

SEQ ID NO: 2601337 - DNA, 25 bp, Homo sapien
tccgccagacactcgtggaagccgg

SEQ ID NO: 2601338 - DNA, 25 bp, Homo sapien
gcccgcgtagacctcgggcgctggg

SEQ ID NO: 2601339 - DNA, 25 bp, Homo sapien
gcaggtgtctcacggtcatctccag

SEQ ID NO: 2601340 - DNA, 25 bp, Homo sapien
tctccagcttcgagtggcgggagct

SEQ ID NO: 2601341 - DNA, 25 bp, Homo sapien
ggctccgcaggtgtctcacggtcat

SEQ ID NO: 2601342 - DNA, 25 bp, Homo sapien
ttctccagcttcgagtggcgggagc

SEQ ID NO: 2601343 - DNA, 25 bp, Homo sapien
ggataggcgggaggtccaggtcagc

SEQ ID NO: 2601344 - DNA, 25 bp, Homo sapien
gtccaggtcagctgcgacccagact

SEQ ID NO: 2601345 - DNA, 25 bp, Homo sapien
cagactccgggtctcgggccttcgc

SEQ ID NO: 2601346 - DNA, 25 bp, Homo sapien
ggaggtccaggtcagctgcgaccca

SEQ ID NO: 2601347 - DNA, 25 bp, Homo sapien
ttaatacgcgctcggcgccgcttct

SEQ ID NO: 2601348 - DNA, 25 bp, Homo sapien
gggttttgagctgagcgaggctctc

SEQ ID NO: 2601349 - DNA, 25 bp, Homo sapien
gccgcttctccatgaccggcttgga

SEQ ID NO: 2601350 - DNA, 25 bp, Homo sapien
gcttctccatgaccggcttggagga

SEQ ID NO: 2601351 - DNA, 25 bp, Homo sapien
ggtcgggcaccggctgagtcccgcg

SEQ ID NO: 2601352 - DNA, 25 bp, Homo sapien
tcgggcaccggctgagtcccgcgtc

SEQ ID NO: 2601353 - DNA, 25 bp, Homo sapien
gtcgggcaccggctgagtcccgcgt

SEQ ID NO: 2601354 - DNA, 25 bp, Homo sapien
gtttccccggcgtgtctgcggccat

SEQ ID NO: 2601355 - DNA, 25 bp, Homo sapien
tggccggcgctcctgccatcggcga

SEQ ID NO: 2601356 - DNA, 25 bp, Homo sapien
ggtttccccggcgtgtctgcggcca

SEQ ID NO: 2601357 - DNA, 25 bp, Homo sapien
atcggcgaggcgctcggtttccccg

SEQ ID NO: 2601358 - DNA, 25 bp, Homo sapien
cctagggcggatcccggctccaggc

SEQ ID NO: 2601359 - DNA, 25 bp, Homo sapien
gagcgcgcggcgatccgagccccta

SEQ ID NO: 2601360 - DNA, 25 bp, Homo sapien
ccgccacggaccacgggcgggctgg

SEQ ID NO: 2601361 - DNA, 25 bp, Homo sapien
ctatttaaggcctcgccgccgcggg

SEQ ID NO: 2601362 - DNA, 25 bp, Homo sapien
gtttgggccctgctcggtctccgag

SEQ ID NO: 2601363 - DNA, 25 bp, Homo sapien
accctcaggtgtgcggcctggagca

SEQ ID NO: 2601364 - DNA, 25 bp, Homo sapien
gagcctcggtctcgagcctcttggc

SEQ ID NO: 2601365 - DNA, 25 bp, Homo sapien
gagtttgatccgacaccggctcggc

SEQ ID NO: 2601366 - DNA, 25 bp, Homo sapien
cgcaagcctgctgggatgacgtcat

SEQ ID NO: 2601367 - DNA, 25 bp, Homo sapien
tcagcagtcacgtaagagaaccgaa

SEQ ID NO: 2601368 - DNA, 25 bp, Homo sapien
atgacgtcatgtggcccgtgtcgcc

SEQ ID NO: 2601369 - DNA, 25 bp, Homo sapien
tttttatttcgaatgccgctgcggg

SEQ ID NO: 2601370 - DNA, 25 bp, Homo sapien
cgcgagcgcccccagtggccgcagt

SEQ ID NO: 2601371 - DNA, 25 bp, Homo sapien
gaaagcccgcgagcgcccccagtgg

SEQ ID NO: 2601372 - DNA, 25 bp, Homo sapien
ccgcgagcgcccccagtggccgcag

SEQ ID NO: 2601373 - DNA, 25 bp, Homo sapien
gcgggaaagcccgcgagcgccccca

SEQ ID NO: 2601374 - DNA, 25 bp, Homo sapien
taaagcaagtgactgcaggtctggt

SEQ ID NO: 2601375 - DNA, 25 bp, Homo sapien
catttagtccacatgaattttgggc

SEQ ID NO: 2601376 - DNA, 25 bp, Homo sapien
cccagtttgtggtacattgttcagc

SEQ ID NO: 2601377 - DNA, 25 bp, Homo sapien
gggcttttggcctggagaactacga

SEQ ID NO: 2601378 - DNA, 25 bp, Homo sapien
tcctctatgtattccccagtgcttg

SEQ ID NO: 2601379 - DNA, 25 bp, Homo sapien
cctctatgtattccccagtgcttgt

SEQ ID NO: 2601380 - DNA, 25 bp, Homo sapien
ctctatgtattccccagtgcttgtt

SEQ ID NO: 2601381 - DNA, 25 bp, Homo sapien
ttcctctatgtattccccagtgctt

SEQ ID NO: 2601382 - DNA, 25 bp, Homo sapien
tgtttctcaattaaccatggggatg

SEQ ID NO: 2601383 - DNA, 25 bp, Homo sapien
tctctgggtagtttggagttcttgt

SEQ ID NO: 2601384 - DNA, 25 bp, Homo sapien
accaatctgagcaaatactgcccta

SEQ ID NO: 2601385 - DNA, 25 bp, Homo sapien
ccctaaaccgagtgttgttatctct

SEQ ID NO: 2601386 - DNA, 25 bp, Homo sapien
catccgagcaggatcaagggccgga

SEQ ID NO: 2601387 - DNA, 25 bp, Homo sapien
tggacaaatgcgacgaacctctgag

SEQ ID NO: 2601388 - DNA, 25 bp, Homo sapien
gtgttcatgaatctgcgcctgcggg

SEQ ID NO: 2601389 - DNA, 25 bp, Homo sapien
aagcccctgagcaccgtgttcatga

SEQ ID NO: 2601390 - DNA, 25 bp, Homo sapien
gagggcggagggcctacctctgtcc

SEQ ID NO: 2601391 - DNA, 25 bp, Homo sapien
gagggcctacctctgtccctcccca

SEQ ID NO: 2601392 - DNA, 25 bp, Homo sapien
ggcggagggcctacctctgtccctc

SEQ ID NO: 2601393 - DNA, 25 bp, Homo sapien
caggggctcctggtaggaagttggg

SEQ ID NO: 2601394 - DNA, 25 bp, Homo sapien
tgaatggacttgtcccgtctttgac

SEQ ID NO: 2601395 - DNA, 25 bp, Homo sapien
ggacttgtcccgtctttgacttctc

SEQ ID NO: 2601396 - DNA, 25 bp, Homo sapien
gcctgcgtgaatggacttgtcccgt

SEQ ID NO: 2601397 - DNA, 25 bp, Homo sapien
tgcttcccgcctgcgtgaatggact

SEQ ID NO: 2601398 - DNA, 25 bp, Homo sapien
gtcagttctgtggagatgacctctt

SEQ ID NO: 2601399 - DNA, 25 bp, Homo sapien
tggagatgacctctttgagagggcc

SEQ ID NO: 2601400 - DNA, 25 bp, Homo sapien
gggaatcgggttggtcagttctgtg

SEQ ID NO: 2601401 - DNA, 25 bp, Homo sapien
ggaatcgggttggtcagttctgtgg

SEQ ID NO: 2601402 - DNA, 25 bp, Homo sapien
ggtccggccagaggtcattccagcc

SEQ ID NO: 2601403 - DNA, 25 bp, Homo sapien
acaggtccggccagaggtcattcca

SEQ ID NO: 2601404 - DNA, 25 bp, Homo sapien
cacaggtccggccagaggtcattcc

SEQ ID NO: 2601405 - DNA, 25 bp, Homo sapien
ggccacaggtccggccagaggtcat

SEQ ID NO: 2601406 - DNA, 25 bp, Homo sapien
ttcctctgtcctcgtgcacgtgtct

SEQ ID NO: 2601407 - DNA, 25 bp, Homo sapien
cgtgtctcgcctcagcttgctgttg

SEQ ID NO: 2601408 - DNA, 25 bp, Homo sapien
gttcagcccgggctggtgctgcagg

SEQ ID NO: 2601409 - DNA, 25 bp, Homo sapien
tatgtccctgggttcagcccgggct

SEQ ID NO: 2601410 - DNA, 25 bp, Homo sapien
tgcgtccagcacgctgccccgtgtc

SEQ ID NO: 2601411 - DNA, 25 bp, Homo sapien
ccagcacgctgccccgtgtctggca

SEQ ID NO: 2601412 - DNA, 25 bp, Homo sapien
gcctctgagatgaccagtgtggttt

SEQ ID NO: 2601413 - DNA, 25 bp, Homo sapien
gtccagcacgctgccccgtgtctgg

SEQ ID NO: 2601414 - DNA, 25 bp, Homo sapien
aaggtttgagatgaaggcatgctgg

SEQ ID NO: 2601415 - DNA, 25 bp, Homo sapien
gaaggtttgagatgaaggcatgctg

SEQ ID NO: 2601416 - DNA, 25 bp, Homo sapien
tgaaggtttgagatgaaggcatgct

SEQ ID NO: 2601417 - DNA, 25 bp, Homo sapien
ctgaaggtttgagatgaaggcatgc

SEQ ID NO: 2601418 - DNA, 25 bp, Homo sapien
aaggagctgtgcattgaggggtgaa

SEQ ID NO: 2601419 - DNA, 25 bp, Homo sapien
tcacggttggcacctccacggggct

SEQ ID NO: 2601420 - DNA, 25 bp, Homo sapien
attgaggggtgaaagcccgtgcaga

SEQ ID NO: 2601421 - DNA, 25 bp, Homo sapien
gtgaaagcccgtgcagagaaccgtg

SEQ ID NO: 2601422 - DNA, 25 bp, Homo sapien
gcaccgagcgtttgggtggaccgga

SEQ ID NO: 2601423 - DNA, 25 bp, Homo sapien
cggaagtcagcgtctgcattcgagc

SEQ ID NO: 2601424 - DNA, 25 bp, Homo sapien
actccacgccagctgttttccttgg

SEQ ID NO: 2601425 - DNA, 25 bp, Homo sapien
cgtttgggtggaccggaagtcagcg

SEQ ID NO: 2601426 - DNA, 25 bp, Homo sapien
cgctggggagataaaaagtcagacc

SEQ ID NO: 2601427 - DNA, 25 bp, Homo sapien
acaccctgcgctggggagataaaaa

SEQ ID NO: 2601428 - DNA, 25 bp, Homo sapien
ctgcacacagcaagtcctgttctgg

SEQ ID NO: 2601429 - DNA, 25 bp, Homo sapien
aaatggggaatgcatgtgaaccacc

SEQ ID NO: 2601430 - DNA, 25 bp, Homo sapien
accgccggaacactgtcagcctggt

SEQ ID NO: 2601431 - DNA, 25 bp, Homo sapien
cctggtgtggacagtgccaaggtcc

SEQ ID NO: 2601432 - DNA, 25 bp, Homo sapien
tcagcaccgccggaacactgtcagc

SEQ ID NO: 2601433 - DNA, 25 bp, Homo sapien
cggaacactgtcagcctggtgtgga

SEQ ID NO: 2601434 - DNA, 25 bp, Homo sapien
tgctctggatgggacgtggcttggg

SEQ ID NO: 2601435 - DNA, 25 bp, Homo sapien
gtttcattggaacaccaggttccag

SEQ ID NO: 2601436 - DNA, 25 bp, Homo sapien
agctgctctggatgggacgtggctt

SEQ ID NO: 2601437 - DNA, 25 bp, Homo sapien
tgggtgagaacccttggctgagttt

SEQ ID NO: 2601438 - DNA, 25 bp, Homo sapien
tgccggcagctgtcgtctgcagagt

SEQ ID NO: 2601439 - DNA, 25 bp, Homo sapien
cagatggcttggtccgcggtgctgg

SEQ ID NO: 2601440 - DNA, 25 bp, Homo sapien
ctgggtgtgaccacgcggtggcact

SEQ ID NO: 2601441 - DNA, 25 bp, Homo sapien
ggcgccgggtccttgctttcctgga

SEQ ID NO: 2601442 - DNA, 25 bp, Homo sapien
gagggcagggtaatgggtgcgcagg

SEQ ID NO: 2601443 - DNA, 25 bp, Homo sapien
gagagggcagggtaatgggtgcgca

SEQ ID NO: 2601444 - DNA, 25 bp, Homo sapien
aggagagggcagggtaatgggtgcg

SEQ ID NO: 2601445 - DNA, 25 bp, Homo sapien
cagggtaatgggtgcgcaggggtcc

SEQ ID NO: 2601446 - DNA, 25 bp, Homo sapien
cgtcaggagtcccagatgggcccag

SEQ ID NO: 2601447 - DNA, 25 bp, Homo sapien
ggactacgcgtcaggagtcccagat

SEQ ID NO: 2601448 - DNA, 25 bp, Homo sapien
tacgcgtcaggagtcccagatgggc

SEQ ID NO: 2601449 - DNA, 25 bp, Homo sapien
gacgccggactacgcgtcaggagtc

SEQ ID NO: 2601450 - DNA, 25 bp, Homo sapien
tcaggcgggactcgtgtcccagaga

SEQ ID NO: 2601451 - DNA, 25 bp, Homo sapien
ccagggccgatctgggtgtcctgac

SEQ ID NO: 2601452 - DNA, 25 bp, Homo sapien
ggcctcctgcgccaatactgtgact

SEQ ID NO: 2601453 - DNA, 25 bp, Homo sapien
tgcagacagacctagtgccgaggga

SEQ ID NO: 2601454 - DNA, 25 bp, Homo sapien
tctttcccatctcgcctgagagcgg

SEQ ID NO: 2601455 - DNA, 25 bp, Homo sapien
tcctaggagcaggacccgatgaagc

SEQ ID NO: 2601456 - DNA, 25 bp, Homo sapien
ggctgggtgccgtgttactaactct

SEQ ID NO: 2601457 - DNA, 25 bp, Homo sapien
aatgccttaaactgcaacgtcccgt

SEQ ID NO: 2601458 - DNA, 25 bp, Homo sapien
tcttgctccgctttgtggtgggagc

SEQ ID NO: 2601459 - DNA, 25 bp, Homo sapien
gccctgcacagggatccttgtggct

SEQ ID NO: 2601460 - DNA, 25 bp, Homo sapien
cgcgctggcccgttggcttcttgct

SEQ ID NO: 2601461 - DNA, 25 bp, Homo sapien
ggtgggagcacggacttggagctcc

SEQ ID NO: 2601462 - DNA, 25 bp, Homo sapien
gaagcggaggcgtaggagcggccag

SEQ ID NO: 2601463 - DNA, 25 bp, Homo sapien
ggacagaggccacaggtcagagcag

SEQ ID NO: 2601464 - DNA, 25 bp, Homo sapien
acagaggccacaggtcagagcagca

SEQ ID NO: 2601465 - DNA, 25 bp, Homo sapien
cggaggcgtaggagcggccagaggc

SEQ ID NO: 2601466 - DNA, 25 bp, Homo sapien
ctggagggtgacgaggccttccgtg

SEQ ID NO: 2601467 - DNA, 25 bp, Homo sapien
ggagggtgacgaggccttccgtggc

SEQ ID NO: 2601468 - DNA, 25 bp, Homo sapien
gagaggcgctggtgggtcccaggtt

SEQ ID NO: 2601469 - DNA, 25 bp, Homo sapien
tggtgggtcccaggttggaggctgt

SEQ ID NO: 2601470 - DNA, 25 bp, Homo sapien
cccaggcagcgccttcgcggagttg

SEQ ID NO: 2601471 - DNA, 25 bp, Homo sapien
agaccctcgtgcaggtgagcccggc

SEQ ID NO: 2601472 - DNA, 25 bp, Homo sapien
cttcgcggagttgccggagggtgcg

SEQ ID NO: 2601473 - DNA, 25 bp, Homo sapien
agcggcgcggtgagaccctcgtgca

SEQ ID NO: 2601474 - DNA, 25 bp, Homo sapien
tccgtggcaaccctgacagccaagt

SEQ ID NO: 2601475 - DNA, 25 bp, Homo sapien
ggctgggccccgacgtccgtggcaa

SEQ ID NO: 2601476 - DNA, 25 bp, Homo sapien
ctgctgaggaccggctgggccccga

SEQ ID NO: 2601477 - DNA, 25 bp, Homo sapien
caagtcctccgtgggcttggagggc

SEQ ID NO: 2601478 - DNA, 25 bp, Homo sapien
agaagccgcccctgtgtggacagca

SEQ ID NO: 2601479 - DNA, 25 bp, Homo sapien
agagccaggtgtccagaagccgccc

SEQ ID NO: 2601480 - DNA, 25 bp, Homo sapien
ccaggagatgcccaagagccaggtg

SEQ ID NO: 2601481 - DNA, 25 bp, Homo sapien
tgggtatcatctatgcagccaggag

SEQ ID NO: 2601482 - DNA, 25 bp, Homo sapien
tccagtgccacaaaagtaaggagca

SEQ ID NO: 2601483 - DNA, 25 bp, Homo sapien
aatgtagtcctgagctccggagtcc

SEQ ID NO: 2601484 - DNA, 25 bp, Homo sapien
gccgcctgagtacaatgtagtcctg

SEQ ID NO: 2601485 - DNA, 25 bp, Homo sapien
cagttgtgatctcggacgtgggctc

SEQ ID NO: 2601486 - DNA, 25 bp, Homo sapien
tgccccggacacggagcacggctcc

SEQ ID NO: 2601487 - DNA, 25 bp, Homo sapien
ctgccccggacacggagcacggctc

SEQ ID NO: 2601488 - DNA, 25 bp, Homo sapien
ccccggacacggagcacggctccca

SEQ ID NO: 2601489 - DNA, 25 bp, Homo sapien
ctggttatgacactgccttcctgtt

SEQ ID NO: 2601490 - DNA, 25 bp, Homo sapien
cacccgaacatccagtctgactgga

SEQ ID NO: 2601491 - DNA, 25 bp, Homo sapien
tggagacagccggatgccctctgac

SEQ ID NO: 2601492 - DNA, 25 bp, Homo sapien
gggtccccatgtcatcctcaagatg

SEQ ID NO: 2601493 - DNA, 25 bp, Homo sapien
atggaggccatgaagattgtccacc

SEQ ID NO: 2601494 - DNA, 25 bp, Homo sapien
gggcagagcttatgttccaaggcct

SEQ ID NO: 2601495 - DNA, 25 bp, Homo sapien
cttatctgaacacagggtgggcgga

SEQ ID NO: 2601496 - DNA, 25 bp, Homo sapien
gtatctctgtttgctttcatgcctg

SEQ ID NO: 2601497 - DNA, 25 bp, Homo sapien
tgaattttcgcagcatggacccctc

SEQ ID NO: 2601498 - DNA, 25 bp, Homo sapien
cctggttgtgggttcagcaatggga

SEQ ID NO: 2601499 - DNA, 25 bp, Homo sapien
tggcagggtcaggcctctgggtagc

SEQ ID NO: 2601500 - DNA, 25 bp, Homo sapien
ggtttttccagcctggtcatcaggc

SEQ ID NO: 2601501 - DNA, 25 bp, Homo sapien
caatgggaggtcttgattgaaggcc

SEQ ID NO: 2601502 - DNA, 25 bp, Homo sapien
tccaggagcacgaagagcagtccca

SEQ ID NO: 2601503 - DNA, 25 bp, Homo sapien
tcagcagcgccaggcggcgggcaca

SEQ ID NO: 2601504 - DNA, 25 bp, Homo sapien
ccaggcggcgggcacagggtccccg

SEQ ID NO: 2601505 - DNA, 25 bp, Homo sapien
cagcgccaggcggcgggcacagggt

SEQ ID NO: 2601506 - DNA, 25 bp, Homo sapien
ctcagcagcgccaggcggcgggcac

SEQ ID NO: 2601507 - DNA, 25 bp, Homo sapien
tgcctgggccttaaggtaatcaggg

SEQ ID NO: 2601508 - DNA, 25 bp, Homo sapien
gggcagacgcccatgacaacagcca

SEQ ID NO: 2601509 - DNA, 25 bp, Homo sapien
ggattccgtttcaggagctcgggct

SEQ ID NO: 2601510 - DNA, 25 bp, Homo sapien
tgtcccggcatgtcccggcactgtg

SEQ ID NO: 2601511 - DNA, 25 bp, Homo sapien
tggtgggcgatgtcatccccgcgcc

SEQ ID NO: 2601512 - DNA, 25 bp, Homo sapien
cagtggtgggcgatgtcatccccgc

SEQ ID NO: 2601513 - DNA, 25 bp, Homo sapien
agcagcagtggtgggcgatgtcatc

SEQ ID NO: 2601514 - DNA, 25 bp, Homo sapien
cagcagtggtgggcgatgtcatccc

SEQ ID NO: 2601515 - DNA, 25 bp, Homo sapien
ccagcgtaggtcagtccggcctggc

SEQ ID NO: 2601516 - DNA, 25 bp, Homo sapien
gggcggagggccagcgtaggtcagt

SEQ ID NO: 2601517 - DNA, 25 bp, Homo sapien
tgcaagaggtgggttggctctgggg

SEQ ID NO: 2601518 - DNA, 25 bp, Homo sapien
tcagtccggcctggcgctgactgct

SEQ ID NO: 2601519 - DNA, 25 bp, Homo sapien
tgctgatgtgggcatatgggttctt

SEQ ID NO: 2601520 - DNA, 25 bp, Homo sapien
aggtggaagccacctctaactgctg

SEQ ID NO: 2601521 - DNA, 25 bp, Homo sapien
tatgggttcttgacgaccatctctt

SEQ ID NO: 2601522 - DNA, 25 bp, Homo sapien
ggtggaagccacctctaactgctgc

SEQ ID NO: 2601523 - DNA, 25 bp, Homo sapien
ctgtggtggcaacacggcagtctgt

SEQ ID NO: 2601524 - DNA, 25 bp, Homo sapien
gagctctaggtcccagtgcctgagt

SEQ ID NO: 2601525 - DNA, 25 bp, Homo sapien
gtcctctcggtcttctgagctctag

SEQ ID NO: 2601526 - DNA, 25 bp, Homo sapien
ttgagcgactggcagccgccttttc

SEQ ID NO: 2601527 - DNA, 25 bp, Homo sapien
tgtgtgcgtggtcttcaccgcccac

SEQ ID NO: 2601528 - DNA, 25 bp, Homo sapien
ggtgtcctcccagcttgatcagagg

SEQ ID NO: 2601529 - DNA, 25 bp, Homo sapien
aggtggcctgtgtgcgtggtcttca

SEQ ID NO: 2601530 - DNA, 25 bp, Homo sapien
gttccacaccgtgccttccacggtg

SEQ ID NO: 2601531 - DNA, 25 bp, Homo sapien
tgttgagacacccttgcttcctgaa

SEQ ID NO: 2601532 - DNA, 25 bp, Homo sapien
tgcgagcaaatgtacccagcctctt

SEQ ID NO: 2601533 - DNA, 25 bp, Homo sapien
gcctctctgggccacgctatgcgag

SEQ ID NO: 2601534 - DNA, 25 bp, Homo sapien
tccctagcgccctgctgttgagaca

SEQ ID NO: 2601535 - DNA, 25 bp, Homo sapien
gcagtgagccgttgatggctgccac

SEQ ID NO: 2601536 - DNA, 25 bp, Homo sapien
cccgtgggggtaacatccttggctg

SEQ ID NO: 2601537 - DNA, 25 bp, Homo sapien
tgagccgttgatggctgccactgca

SEQ ID NO: 2601538 - DNA, 25 bp, Homo sapien
gggggtaacatccttggctgcttca

SEQ ID NO: 2601539 - DNA, 25 bp, Homo sapien
ctgttccgtccgctgagagcgcggt

SEQ ID NO: 2601540 - DNA, 25 bp, Homo sapien
accgaggccgcctgttccgtccgct

SEQ ID NO: 2601541 - DNA, 25 bp, Homo sapien
ggcgctgctccaggaccgaaggcac

SEQ ID NO: 2601542 - DNA, 25 bp, Homo sapien
ccgaaggcacccgtgtccgtggacg

SEQ ID NO: 2601543 - DNA, 25 bp, Homo sapien
aaatgccaattctggagccccgagc

SEQ ID NO: 2601544 - DNA, 25 bp, Homo sapien
cgagcagccccaacgaaccagtttc

SEQ ID NO: 2601545 - DNA, 25 bp, Homo sapien
gaaatgccaattctggagccccgag

SEQ ID NO: 2601546 - DNA, 25 bp, Homo sapien
gagcagccccaacgaaccagtttct

SEQ ID NO: 2601547 - DNA, 25 bp, Homo sapien
cttgccatccgtggtccccaaaaag

SEQ ID NO: 2601548 - DNA, 25 bp, Homo sapien
cgccacacgcaagcaggttcaccag

SEQ ID NO: 2601549 - DNA, 25 bp, Homo sapien
atccgtggtccccaaaaagcatctg

SEQ ID NO: 2601550 - DNA, 25 bp, Homo sapien
ctctcccgccacacgcaagcaggtt

SEQ ID NO: 2601551 - DNA, 25 bp, Homo sapien
ttcatttcagctttccagaagccaa

SEQ ID NO: 2601552 - DNA, 25 bp, Homo sapien
agaagccaagtgtctcctcccttag

SEQ ID NO: 2601553 - DNA, 25 bp, Homo sapien
ctaaaggaagcatctgatgttcatc

SEQ ID NO: 2601554 - DNA, 25 bp, Homo sapien
cttagggccctcctcaaatcacctt

SEQ ID NO: 2601555 - DNA, 25 bp, Homo sapien
caggtgtgctaagagtgccagccca

SEQ ID NO: 2601556 - DNA, 25 bp, Homo sapien
gcatcaaaccaaagttcgtaggcca

SEQ ID NO: 2601557 - DNA, 25 bp, Homo sapien
tgtggcacctgactggcatcaaacc

SEQ ID NO: 2601558 - DNA, 25 bp, Homo sapien
tgcctatgagtatctgacacctgtt

SEQ ID NO: 2601559 - DNA, 25 bp, Homo sapien
caatctctctcgtggcacagggaag

SEQ ID NO: 2601560 - DNA, 25 bp, Homo sapien
ctgggatagtaagccaagcagtgcc

SEQ ID NO: 2601561 - DNA, 25 bp, Homo sapien
tgtgcaacagtactttcccaggatc

SEQ ID NO: 2601562 - DNA, 25 bp, Homo sapien
gaagtctggtctggatagacggcac

SEQ ID NO: 2601563 - DNA, 25 bp, Homo sapien
tctactcaaagcattaaacaaaagg

SEQ ID NO: 2601564 - DNA, 25 bp, Homo sapien
tcggctcgaggtcaacattctagtt

SEQ ID NO: 2601565 - DNA, 25 bp, Homo sapien
ttggaatagggaaacccggcactca

SEQ ID NO: 2601566 - DNA, 25 bp, Homo sapien
ctccggtgcgctgcaagtagggcct

SEQ ID NO: 2601567 - DNA, 25 bp, Homo sapien
ggcacaacagcatctcgaagacgaa

SEQ ID NO: 2601568 - DNA, 25 bp, Homo sapien
ttgagactcaggaccgtaagtaccc

SEQ ID NO: 2601569 - DNA, 25 bp, Homo sapien
tgcacgaagatctcgaaggtggcga

SEQ ID NO: 2601570 - DNA, 25 bp, Homo sapien
taagtacccagaaaaggcggagcac

SEQ ID NO: 2601571 - DNA, 25 bp, Homo sapien
tcagatggactttgccgtcctgggc

SEQ ID NO: 2601572 - DNA, 25 bp, Homo sapien
gggactcctcatacgccaagtgagt

SEQ ID NO: 2601573 - DNA, 25 bp, Homo sapien
gctggcagaggaccgagaccagctt

SEQ ID NO: 2601574 - DNA, 25 bp, Homo sapien
acagtgggcggacggaacagttctg

SEQ ID NO: 2601575 - DNA, 25 bp, Homo sapien
ccggcccgcactcaagacattctta

SEQ ID NO: 2601576 - DNA, 25 bp, Homo sapien
tccactcactctctcagttgctgat

SEQ ID NO: 2601577 - DNA, 25 bp, Homo sapien
gcagccggcccgcactcaagacatt

SEQ ID NO: 2601578 - DNA, 25 bp, Homo sapien
actctctcagttgctgatctcctgt

SEQ ID NO: 2601579 - DNA, 25 bp, Homo sapien
acttcaatgtctccaggttcccttc

SEQ ID NO: 2601580 - DNA, 25 bp, Homo sapien
tggagcgctagtcctactgcacttc

SEQ ID NO: 2601581 - DNA, 25 bp, Homo sapien
ttccttggagcgctagtcctactgc

SEQ ID NO: 2601582 - DNA, 25 bp, Homo sapien
actgcacttctccacttcaatgtct

SEQ ID NO: 2601583 - DNA, 25 bp, Homo sapien
tattagagagggcaaccggagcccc

SEQ ID NO: 2601584 - DNA, 25 bp, Homo sapien
ggtgcatgagataaaggagagctat

SEQ ID NO: 2601585 - DNA, 25 bp, Homo sapien
aaggtgcatgagataaaggagagct

SEQ ID NO: 2601586 - DNA, 25 bp, Homo sapien
ctgaaggtgcatgagataaaggaga

SEQ ID NO: 2601587 - DNA, 25 bp, Homo sapien
gaaggtgcatgagataaaggagagc

SEQ ID NO: 2601588 - DNA, 25 bp, Homo sapien
ctagacgccaggcaatgaaaacggg

SEQ ID NO: 2601589 - DNA, 25 bp, Homo sapien
gcacaaacaaatatcaccaggggct

SEQ ID NO: 2601590 - DNA, 25 bp, Homo sapien
caaatatcaccaggggctcgttaat

SEQ ID NO: 2601591 - DNA, 25 bp, Homo sapien
ccaggggctcgttaatcagattcac

SEQ ID NO: 2601592 - DNA, 25 bp, Homo sapien
tatcaccaggggctcgttaatcaga

SEQ ID NO: 2601593 - DNA, 25 bp, Homo sapien
tccgccataagggaaagacccgctc

SEQ ID NO: 2601594 - DNA, 25 bp, Homo sapien
gctctcagagaaaatgcgacgcctt

SEQ ID NO: 2601595 - DNA, 25 bp, Homo sapien
gagggatttatgtgagcagccagac

SEQ ID NO: 2601596 - DNA, 25 bp, Homo sapien
cacgtaagacctccggctgtaagga

SEQ ID NO: 2601597 - DNA, 25 bp, Homo sapien
ccgggcctcgcgacccagtctctcc

SEQ ID NO: 2601598 - DNA, 25 bp, Homo sapien
cgccgggcctcgcgacccagtctct

SEQ ID NO: 2601599 - DNA, 25 bp, Homo sapien
gccgggcctcgcgacccagtctctc

SEQ ID NO: 2601600 - DNA, 25 bp, Homo sapien
ggcgccgggcctcgcgacccagtct

SEQ ID NO: 2601601 - DNA, 25 bp, Homo sapien
tgcgggctcggcatcggggtgcgcc

SEQ ID NO: 2601602 - DNA, 25 bp, Homo sapien
cggcatcggggtgcgcccggtggtc

SEQ ID NO: 2601603 - DNA, 25 bp, Homo sapien
ctcggcatcggggtgcgcccggtgg

SEQ ID NO: 2601604 - DNA, 25 bp, Homo sapien
cgggctcggcatcggggtgcgcccg

SEQ ID NO: 2601605 - DNA, 25 bp, Homo sapien
tacaacacttagtgatgaggtgtag

SEQ ID NO: 2601606 - DNA, 25 bp, Homo sapien
acaacacttagtgatgaggtgtagg

SEQ ID NO: 2601607 - DNA, 25 bp, Homo sapien
cgtatagaggaagggccacgcgcac

SEQ ID NO: 2601608 - DNA, 25 bp, Homo sapien
acgatagcagcagcgcgcgtataga

SEQ ID NO: 2601609 - DNA, 25 bp, Homo sapien
ggccgggcagtcccgacagaagcca

SEQ ID NO: 2601610 - DNA, 25 bp, Homo sapien
tgcgaactgtcgaaatcgtaccggg

SEQ ID NO: 2601611 - DNA, 25 bp, Homo sapien
ccatagagcagtcgcaggaaggcag

SEQ ID NO: 2601612 - DNA, 25 bp, Homo sapien
gaaaaatggatcaacgaggacggca

SEQ ID NO: 2601613 - DNA, 25 bp, Homo sapien
gctcagggcctctatatcgacgaaa

SEQ ID NO: 2601614 - DNA, 25 bp, Homo sapien
ccaaaggtcattacgccgcagggta

SEQ ID NO: 2601615 - DNA, 25 bp, Homo sapien
tgactggaccgcgaatgactgacct

SEQ ID NO: 2601616 - DNA, 25 bp, Homo sapien
cagcagctggttgataacggacaca

SEQ ID NO: 2601617 - DNA, 25 bp, Homo sapien
atagagattagccacgccgatgcgg

SEQ ID NO: 2601618 - DNA, 25 bp, Homo sapien
gtgaagacgaattccccgcggtgaa

SEQ ID NO: 2601619 - DNA, 25 bp, Homo sapien
taacgtgagacatcaggaaagcgcg

SEQ ID NO: 2601620 - DNA, 25 bp, Homo sapien
catggagtggtccaccagaacgatt

SEQ ID NO: 2601621 - DNA, 25 bp, Homo sapien
tgtttgtagccatccccgaactggg

SEQ ID NO: 2601622 - DNA, 25 bp, Homo sapien
tcgcgtgcgccaggtaaacgtgtcc

SEQ ID NO: 2601623 - DNA, 25 bp, Homo sapien
aggcagctttcagtgtttttcgaga

SEQ ID NO: 2601624 - DNA, 25 bp, Homo sapien
ttcgagaaaatcagggcgcgaacgc

SEQ ID NO: 2601625 - DNA, 25 bp, Homo sapien
ggcagctttcagtgtttttcgagaa

SEQ ID NO: 2601626 - DNA, 25 bp, Homo sapien
cagtgtttttcgagaaaatcagggc

SEQ ID NO: 2601627 - DNA, 25 bp, Homo sapien
gaattcagtgccgtcgatctcaatc

SEQ ID NO: 2601628 - DNA, 25 bp, Homo sapien
gccgtcgatctcaatcagctgaata

SEQ ID NO: 2601629 - DNA, 25 bp, Homo sapien
tgatccataccgaattcagtgccgt

SEQ ID NO: 2601630 - DNA, 25 bp, Homo sapien
caatcagctgaataacgctgccggg

SEQ ID NO: 2601631 - DNA, 25 bp, Homo sapien
attttctgcggcgaaggctgcccac

SEQ ID NO: 2601632 - DNA, 25 bp, Homo sapien
cagattttctgcggcgaaggctgcc

SEQ ID NO: 2601633 - DNA, 25 bp, Homo sapien
taatggcgggcagattttctgcggc

SEQ ID NO: 2601634 - DNA, 25 bp, Homo sapien
ctgccagataatggcgggcagattt

SEQ ID NO: 2601635 - DNA, 25 bp, Homo sapien
taaaagagctgtacgcgctcatcgg

SEQ ID NO: 2601636 - DNA, 25 bp, Homo sapien
ggctgggaacctgtactcgataact

SEQ ID NO: 2601637 - DNA, 25 bp, Homo sapien
cacagcgcggtgacatagtttccga

SEQ ID NO: 2601638 - DNA, 25 bp, Homo sapien
tgaatatcgaaaggagagcacagct

SEQ ID NO: 2601639 - DNA, 25 bp, Homo sapien
cagccggaaaaccgccgaacggcag

SEQ ID NO: 2601640 - DNA, 25 bp, Homo sapien
cgcgtccgggccgtgacgatcctga

SEQ ID NO: 2601641 - DNA, 25 bp, Homo sapien
gcatccagcaatttttcacgcattt

SEQ ID NO: 2601642 - DNA, 25 bp, Homo sapien
gtgacgatcctgacaatcctgccgg

SEQ ID NO: 2601643 - DNA, 25 bp, Homo sapien
taaaattcacggataagcgaccagc

SEQ ID NO: 2601644 - DNA, 25 bp, Homo sapien
tcccagttgtcatcgtagagccgct

SEQ ID NO: 2601645 - DNA, 25 bp, Homo sapien
gactgaacaatcaggccgcaggctt

SEQ ID NO: 2601646 - DNA, 25 bp, Homo sapien
tgtctcctcgggcttatcggcaatg

SEQ ID NO: 2601647 - DNA, 25 bp, Homo sapien
aaggtgcccgaaaagatgatggaga

SEQ ID NO: 2601648 - DNA, 25 bp, Homo sapien
gaaaggtgcccgaaaagatgatgga

SEQ ID NO: 2601649 - DNA, 25 bp, Homo sapien
aaaggtgcccgaaaagatgatggag

SEQ ID NO: 2601650 - DNA, 25 bp, Homo sapien
ggtgcccgaaaagatgatggagaat

SEQ ID NO: 2601651 - DNA, 25 bp, Homo sapien
gccctgagcatctcgcgcaggtcgg

SEQ ID NO: 2601652 - DNA, 25 bp, Homo sapien
caccagcggtaaagaatgcagcgac

SEQ ID NO: 2601653 - DNA, 25 bp, Homo sapien
tttacccgcgccgaaggatggctgg

SEQ ID NO: 2601654 - DNA, 25 bp, Homo sapien
tgatagctgttgcactcatcgccgc

SEQ ID NO: 2601655 - DNA, 25 bp, Homo sapien
ggatgccccatagcgacggtattga

SEQ ID NO: 2601656 - DNA, 25 bp, Homo sapien
tataagcctcaacaagagcacgacg

SEQ ID NO: 2601657 - DNA, 25 bp, Homo sapien
ggtaacgaactgatctgctgaggca

SEQ ID NO: 2601658 - DNA, 25 bp, Homo sapien
aatctctatacgcttctgggtaacg

SEQ ID NO: 2601659 - DNA, 25 bp, Homo sapien
ggtagcgccacatgtcgttattgca

SEQ ID NO: 2601660 - DNA, 25 bp, Homo sapien
cctgttttgcgagtggcgtttgact

SEQ ID NO: 2601661 - DNA, 25 bp, Homo sapien
ttagtcaaagtcctgttttgcgagt

SEQ ID NO: 2601662 - DNA, 25 bp, Homo sapien
ttgcgagtggcgtttgactggttac

SEQ ID NO: 2601663 - DNA, 25 bp, Homo sapien
caaagtcctgttttgcgagtggcgt

SEQ ID NO: 2601664 - DNA, 25 bp, Homo sapien
tcagaaacggcaatgagcattttta

SEQ ID NO: 2601665 - DNA, 25 bp, Homo sapien
gcagatcgtcaggttgctcaaccgg

SEQ ID NO: 2601666 - DNA, 25 bp, Homo sapien
catttttaattttgcgaccgacagc

SEQ ID NO: 2601667 - DNA, 25 bp, Homo sapien
ttgctcaaccggagtatgcgcgctt

SEQ ID NO: 2601668 - DNA, 25 bp, Homo sapien
gggcatcccggcaatataggtctgg

SEQ ID NO: 2601669 - DNA, 25 bp, Homo sapien
tgtgtgcccttacggaactcccatt

SEQ ID NO: 2601670 - DNA, 25 bp, Homo sapien
cggcaatataggtctggtcctgtgt

SEQ ID NO: 2601671 - DNA, 25 bp, Homo sapien
ttcgttatcgacctggggcatcccg

SEQ ID NO: 2601672 - DNA, 25 bp, Homo sapien
tggcatcagccgtaatacgcctgac

SEQ ID NO: 2601673 - DNA, 25 bp, Homo sapien
gaatttgatccgctggcatcagccg

SEQ ID NO: 2601674 - DNA, 25 bp, Homo sapien
gcgttaaccagtttcgaatttgatc

SEQ ID NO: 2601675 - DNA, 25 bp, Homo sapien
cagtttcgaatttgatccgctggca

SEQ ID NO: 2601676 - DNA, 25 bp, Homo sapien
tccacttcgacatacaggagcgcgg

SEQ ID NO: 2601677 - DNA, 25 bp, Homo sapien
tttcggcgcgctgccgttgaactgg

SEQ ID NO: 2601678 - DNA, 25 bp, Homo sapien
taaaggataacgaagcttgctgtcg

SEQ ID NO: 2601679 - DNA, 25 bp, Homo sapien
cgatgacttccgcataggaaaacac

SEQ ID NO: 2601680 - DNA, 25 bp, Homo sapien
ttattccacgaaataccgcggcgag

SEQ ID NO: 2601681 - DNA, 25 bp, Homo sapien
gtaacgttctacaagcgccgaatcg

SEQ ID NO: 2601682 - DNA, 25 bp, Homo sapien
gcgcgtgcccatgccgtaaatttca

SEQ ID NO: 2601683 - DNA, 25 bp, Homo sapien
gcgattcttgtatgagccgcccgca

SEQ ID NO: 2601684 - DNA, 25 bp, Homo sapien
ccatcgaccgcgtcggtgcgcttca

SEQ ID NO: 2601685 - DNA, 25 bp, Homo sapien
catcgaccgcgtcggtgcgcttcac

SEQ ID NO: 2601686 - DNA, 25 bp, Homo sapien
gtagcccgccgctttcccaggtgag

SEQ ID NO: 2601687 - DNA, 25 bp, Homo sapien
gcagcgtcgccttccgaggtgtctt

SEQ ID NO: 2601688 - DNA, 25 bp, Homo sapien
aaaataaggtgggtccgctgtgctg

SEQ ID NO: 2601689 - DNA, 25 bp, Homo sapien
gcagcgttgcacgtgtggccccgct

SEQ ID NO: 2601690 - DNA, 25 bp, Homo sapien
tccctgtcgttagatgacgctctct

SEQ ID NO: 2601691 - DNA, 25 bp, Homo sapien
tagaatcgtgcatctatcaagtcgg

SEQ ID NO: 2601692 - DNA, 25 bp, Homo sapien
ttcttccgggttagatgcagggaca

SEQ ID NO: 2601693 - DNA, 25 bp, Homo sapien
caagtcggatgccacatcttgcagt

SEQ ID NO: 2601694 - DNA, 25 bp, Homo sapien
taaccttggttttgatgccacgtcc

SEQ ID NO: 2601695 - DNA, 25 bp, Homo sapien
aaggagagatgcttggaccaaccac

SEQ ID NO: 2601696 - DNA, 25 bp, Homo sapien
gccctggaacttcagactttgtcgg

SEQ ID NO: 2601697 - DNA, 25 bp, Homo sapien
tgggcatgtccaatattcagctcag

SEQ ID NO: 2601698 - DNA, 25 bp, Homo sapien
attaaatatcaatgtctttctggtc

SEQ ID NO: 2601699 - DNA, 25 bp, Homo sapien
tacaccaactcaacgaacataccgc

SEQ ID NO: 2601700 - DNA, 25 bp, Homo sapien
gtcgtacaccaactcaacgaacata

SEQ ID NO: 2601701 - DNA, 25 bp, Homo sapien
tcgtacaccaactcaacgaacatac

SEQ ID NO: 2601702 - DNA, 25 bp, Homo sapien
gcggcccgggcttgtagagccaggc

SEQ ID NO: 2601703 - DNA, 25 bp, Homo sapien
gcgcgttgaagaggcgggcggaagc

SEQ ID NO: 2601704 - DNA, 25 bp, Homo sapien
gcaagacgccaatgcgccttccggt

SEQ ID NO: 2601705 - DNA, 25 bp, Homo sapien
tgcagctcggtagcagcgtgcgcgt

SEQ ID NO: 2601706 - DNA, 25 bp, Homo sapien
taaccttggttttgatgccacgtcc

SEQ ID NO: 2601707 - DNA, 25 bp, Homo sapien
gccctggaacttcagactttgtcgg

SEQ ID NO: 2601708 - DNA, 25 bp, Homo sapien
aaggagagatgcttggaccaaccac

SEQ ID NO: 2601709 - DNA, 25 bp, Homo sapien
ggttgaaatgacacatgattccagg

SEQ ID NO: 2601710 - DNA, 25 bp, Homo sapien
tgggaccacacatgtgcaccactgt

SEQ ID NO: 2601711 - DNA, 25 bp, Homo sapien
caccactgtgccctatttttttgtt

SEQ ID NO: 2601712 - DNA, 25 bp, Homo sapien
aactgggaccacacatgtgcaccac

SEQ ID NO: 2601713 - DNA, 25 bp, Homo sapien
gcaccactgtgccctatttttttgt

SEQ ID NO: 2601714 - DNA, 25 bp, Homo sapien
tatgttgctgtcaaaaggcttcttc

SEQ ID NO: 2601715 - DNA, 25 bp, Homo sapien
ggaactcagttggtgtcctccatcc

SEQ ID NO: 2601716 - DNA, 25 bp, Homo sapien
cctcttcattgggatcggaactcag

SEQ ID NO: 2601717 - DNA, 25 bp, Homo sapien
cctagatagttgtagctttttctcc

SEQ ID NO: 2601718 - DNA, 25 bp, Homo sapien
acccaggtggcctttaaatccaatg

SEQ ID NO: 2601719 - DNA, 25 bp, Homo sapien
gtactgagttgaataaaagcccctc

SEQ ID NO: 2601720 - DNA, 25 bp, Homo sapien
actaagctccagaatttgtgaatgc

SEQ ID NO: 2601721 - DNA, 25 bp, Homo sapien
aatatatgtccaagtactaagctcc

SEQ ID NO: 2601722 - DNA, 25 bp, Homo sapien
ccagaaaggtggcccgacagggcca

SEQ ID NO: 2601723 - DNA, 25 bp, Homo sapien
agcaatacgcatcgtaagttcctgg

SEQ ID NO: 2601724 - DNA, 25 bp, Homo sapien
ggtcatccgttgtgaccgcttcggt

SEQ ID NO: 2601725 - DNA, 25 bp, Homo sapien
cagcgtttctactgatacccggtca

SEQ ID NO: 2601726 - DNA, 25 bp, Homo sapien
caatagacacagactcgttacgcgt

SEQ ID NO: 2601727 - DNA, 25 bp, Homo sapien
tatgtgcaaggtcaccagcgtttct

SEQ ID NO: 2601728 - DNA, 25 bp, Homo sapien
gccagcgcccgagatatcaggtcgt

SEQ ID NO: 2601729 - DNA, 25 bp, Homo sapien
gatttcccgggccagcgcccgagat

SEQ ID NO: 2601730 - DNA, 25 bp, Homo sapien
tctacgtcagtcacgcggataacga

SEQ ID NO: 2601731 - DNA, 25 bp, Homo sapien
gatatcaggtcgttagcctctacgt

SEQ ID NO: 2601732 - DNA, 25 bp, Homo sapien
gattgtcgaaatcagccattaggcc

SEQ ID NO: 2601733 - DNA, 25 bp, Homo sapien
tgttctctggatcgtcaaagacccc

SEQ ID NO: 2601734 - DNA, 25 bp, Homo sapien
tgttcacaaacaacgtcggcctggt

SEQ ID NO: 2601735 - DNA, 25 bp, Homo sapien
ccacgtatagtggtatccgcgcgcg

SEQ ID NO: 2601736 - DNA, 25 bp, Homo sapien
ggcgtcgcgaaaaacataacggcca

SEQ ID NO: 2601737 - DNA, 25 bp, Homo sapien
catgcgctggcattgggaaccatat

SEQ ID NO: 2601738 - DNA, 25 bp, Homo sapien
tgacctgcgcggcaccgagtttgat

SEQ ID NO: 2601739 - DNA, 25 bp, Homo sapien
taattcgggccgctgagtgccctga

SEQ ID NO: 2601740 - DNA, 25 bp, Homo sapien
tcttttctgcttcgaaagcagttgt

SEQ ID NO: 2601741 - DNA, 25 bp, Homo sapien
tcagttgttgcctgagggcatagcc

SEQ ID NO: 2601742 - DNA, 25 bp, Homo sapien
ggcatagccaagttgttttggcatt

SEQ ID NO: 2601743 - DNA, 25 bp, Homo sapien
gcatttcctcttcaagcatgcgttt

SEQ ID NO: 2601744 - DNA, 25 bp, Homo sapien
cttgccgtggctttatcgagcgtga

SEQ ID NO: 2601745 - DNA, 25 bp, Homo sapien
ccgtggctttatcgagcgtgacgcc

SEQ ID NO: 2601746 - DNA, 25 bp, Homo sapien
tggctttatcgagcgtgacgccggt

SEQ ID NO: 2601747 - DNA, 25 bp, Homo sapien
tttatcgagcgtgacgccggtgacg

SEQ ID NO: 2601748 - DNA, 25 bp, Homo sapien
gcagggttaaccgtcacattgagcg

SEQ ID NO: 2601749 - DNA, 25 bp, Homo sapien
taactgtggctttggcccggtcagc

SEQ ID NO: 2601750 - DNA, 25 bp, Homo sapien
gaaggatttatctgaggcactggca

SEQ ID NO: 2601751 - DNA, 25 bp, Homo sapien
cattgagcgttgtggttgcaccgac

SEQ ID NO: 2601752 - DNA, 25 bp, Homo sapien
tgcggccataaacgtcaggaactca

SEQ ID NO: 2601753 - DNA, 25 bp, Homo sapien
tgaagcgccgacagttcgaagatgg

SEQ ID NO: 2601754 - DNA, 25 bp, Homo sapien
caggaactcaatacgctgaagcgcc

SEQ ID NO: 2601755 - DNA, 25 bp, Homo sapien
tatttgagccaatcagcctggccgt

SEQ ID NO: 2601756 - DNA, 25 bp, Homo sapien
gccggatcgttatgccacaaagaca

SEQ ID NO: 2601757 - DNA, 25 bp, Homo sapien
cgttatgccacaaagacatcgcgat

SEQ ID NO: 2601758 - DNA, 25 bp, Homo sapien
gtttccacatccgtgccggccggat

SEQ ID NO: 2601759 - DNA, 25 bp, Homo sapien
cgtgccggccggatcgttatgccac

SEQ ID NO: 2601760 - DNA, 25 bp, Homo sapien
gatcgcctccggcggccagccgctc

SEQ ID NO: 2601761 - DNA, 25 bp, Homo sapien
cctccggcggccagccgctcagcac

SEQ ID NO: 2601762 - DNA, 25 bp, Homo sapien
gcctccggcggccagccgctcagca

SEQ ID NO: 2601763 - DNA, 25 bp, Homo sapien
cgatcgcctccggcggccagccgct

SEQ ID NO: 2601764 - DNA, 25 bp, Homo sapien
accggaacgagcatgccggagagca

SEQ ID NO: 2601765 - DNA, 25 bp, Homo sapien
ttcatcaaccggaacgagcatgccg

SEQ ID NO: 2601766 - DNA, 25 bp, Homo sapien
tgtcttcatcaaccggaacgagcat

SEQ ID NO: 2601767 - DNA, 25 bp, Homo sapien
gcagcgttgtcttcatcaaccggaa

SEQ ID NO: 2601768 - DNA, 25 bp, Homo sapien
gctcgctggcaagggcttttccgcc

SEQ ID NO: 2601769 - DNA, 25 bp, Homo sapien
agctcgctggcaagggcttttccgc

SEQ ID NO: 2601770 - DNA, 25 bp, Homo sapien
cgccgtaacggtttctgcgctttcg

SEQ ID NO: 2601771 - DNA, 25 bp, Homo sapien
tcagctcgctggcaagggcttttcc

SEQ ID NO: 2601772 - DNA, 25 bp, Homo sapien
cgctgatgacgctatccgaaggaga

SEQ ID NO: 2601773 - DNA, 25 bp, Homo sapien
ggtcatcagcgtgtcatcatccggc

SEQ ID NO: 2601774 - DNA, 25 bp, Homo sapien
gagctgcgcgtcctgaaaataatga

SEQ ID NO: 2601775 - DNA, 25 bp, Homo sapien
gcagctctgagaaatgcgcatcgag

SEQ ID NO: 2601776 - DNA, 25 bp, Homo sapien
tccagcttaataaccagatcgctaa

SEQ ID NO: 2601777 - DNA, 25 bp, Homo sapien
ctcgctgaaggtggcgcggtcaaca

SEQ ID NO: 2601778 - DNA, 25 bp, Homo sapien
ccagatcgctaatctgctgggccat

SEQ ID NO: 2601779 - DNA, 25 bp, Homo sapien
tttgattcgggcgacctgctcgctg

SEQ ID NO: 2601780 - DNA, 25 bp, Homo sapien
ttcatcctgacggcgggcatgcgct

SEQ ID NO: 2601781 - DNA, 25 bp, Homo sapien
gcgaacgccgttcctctaagaggaa

SEQ ID NO: 2601782 - DNA, 25 bp, Homo sapien
tcccattgagctggcgaacgccgtt

SEQ ID NO: 2601783 - DNA, 25 bp, Homo sapien
gttcgcaagcgacttcctttcccat

SEQ ID NO: 2601784 - DNA, 25 bp, Homo sapien
ctgggtgatgatgatacacaaatac

SEQ ID NO: 2601785 - DNA, 25 bp, Homo sapien
gacagatggctagatgataggtaga

SEQ ID NO: 2601786 - DNA, 25 bp, Homo sapien
gatagatagcctccaagacaatggg

SEQ ID NO: 2601787 - DNA, 25 bp, Homo sapien
tgatagatagttcatagctgggtga

SEQ ID NO: 2601788 - DNA, 25 bp, Homo sapien
tcttgcaactactagaggtctggtc

SEQ ID NO: 2601789 - DNA, 25 bp, Homo sapien
aggtctggtctttgacccacggtca

SEQ ID NO: 2601790 - DNA, 25 bp, Homo sapien
tgttgcttaaagtctcatactgggc

SEQ ID NO: 2601791 - DNA, 25 bp, Homo sapien
tgaactggacaagctctatctatct

SEQ ID NO: 2601792 - DNA, 25 bp, Homo sapien
ggccatatgaccttcaacatatatt

SEQ ID NO: 2601793 - DNA, 25 bp, Homo sapien
aatagtggctttgaatctgcattgc

SEQ ID NO: 2601794 - DNA, 25 bp, Homo sapien
tgatccaatatggttgtttttgaaa

SEQ ID NO: 2601795 - DNA, 25 bp, Homo sapien
tgtgtttgatccaatatggttgttt

SEQ ID NO: 2601796 - DNA, 25 bp, Homo sapien
taatgatcaattgaactccatatgg

SEQ ID NO: 2601797 - DNA, 25 bp, Homo sapien
ggaaaataatactcccaatcagaag

SEQ ID NO: 2601798 - DNA, 25 bp, Homo sapien
aatataggtacactcacaactaggg

SEQ ID NO: 2601799 - DNA, 25 bp, Homo sapien
tacatggtggtatagtcaatgcagc

SEQ ID NO: 2601800 - DNA, 25 bp, Homo sapien
gcggcccgggcttgtagagccaggc

SEQ ID NO: 2601801 - DNA, 25 bp, Homo sapien
gcgcgttgaagaggcgggcggaagc

SEQ ID NO: 2601802 - DNA, 25 bp, Homo sapien
gcaagacgccaatgcgccttccggt

SEQ ID NO: 2601803 - DNA, 25 bp, Homo sapien
tgcagctcggtagcagcgtgcgcgt

SEQ ID NO: 2601804 - DNA, 25 bp, Homo sapien
gggacgcactcaggtccggggcgcc

SEQ ID NO: 2601805 - DNA, 25 bp, Homo sapien
ggggacgcactcaggtccggggcgc

SEQ ID NO: 2601806 - DNA, 25 bp, Homo sapien
ggacgcactcaggtccggggcgccg

SEQ ID NO: 2601807 - DNA, 25 bp, Homo sapien
gacgcactcaggtccggggcgccgg

SEQ ID NO: 2601808 - DNA, 25 bp, Homo sapien
gcgcccagtccggggtctcctctgc

SEQ ID NO: 2601809 - DNA, 25 bp, Homo sapien
ccggggtctcctctgccacggccgc

SEQ ID NO: 2601810 - DNA, 25 bp, Homo sapien
ggcgcccagtccggggtctcctctg

SEQ ID NO: 2601811 - DNA, 25 bp, Homo sapien
agtccggggtctcctctgccacggc

SEQ ID NO: 2601812 - DNA, 25 bp, Homo sapien
cgtgtcgaagtcttgaaggcggttg

SEQ ID NO: 2601813 - DNA, 25 bp, Homo sapien
cgaagtcttgaaggcggttggcagg

SEQ ID NO: 2601814 - DNA, 25 bp, Homo sapien
tgtcgaagtcttgaaggcggttggc

SEQ ID NO: 2601815 - DNA, 25 bp, Homo sapien
cagcgtgtcgaagtcttgaaggcgg

SEQ ID NO: 2601816 - DNA, 25 bp, Homo sapien
tcaggacatgttaggatccgtcccc

SEQ ID NO: 2601817 - DNA, 25 bp, Homo sapien
caggacatgttaggatccgtcccca

SEQ ID NO: 2601818 - DNA, 25 bp, Homo sapien
cctgccctgcgccatacggaacaca

SEQ ID NO: 2601819 - DNA, 25 bp, Homo sapien
ctgtggccccgaccccaaggcttgt

SEQ ID NO: 2601820 - DNA, 25 bp, Homo sapien
cgccatacggaacacacagtaggtg

SEQ ID NO: 2601821 - DNA, 25 bp, Homo sapien
ctgcgccatacggaacacacagtag

SEQ ID NO: 2601822 - DNA, 25 bp, Homo sapien
ctgtggccccgaccccaaggcttgt

SEQ ID NO: 2601823 - DNA, 25 bp, Homo sapien
cattcacgatgttgtacggccatca

SEQ ID NO: 2601824 - DNA, 25 bp, Homo sapien
cacgggtgttcaattacctccttga

SEQ ID NO: 2601825 - DNA, 25 bp, Homo sapien
tctgaatgtcctttaaggcggagta

SEQ ID NO: 2601826 - DNA, 25 bp, Homo sapien
ttcacctagcacagtattctcaagg

SEQ ID NO: 2601827 - DNA, 25 bp, Homo sapien
aaagggatgatttggccgacggtca

SEQ ID NO: 2601828 - DNA, 25 bp, Homo sapien
gcccgctcctgcttggtgagagagt

SEQ ID NO: 2601829 - DNA, 25 bp, Homo sapien
ggcaggcgctctttgacttatcaag

SEQ ID NO: 2601830 - DNA, 25 bp, Homo sapien
ggtatctcgacctgccaagtataaa

SEQ ID NO: 2601831 - DNA, 25 bp, Homo sapien
ggagtcagacgtgtgcagatcactt

SEQ ID NO: 2601832 - DNA, 25 bp, Homo sapien
tgcctaaagggcgtgtgtgcacaca

SEQ ID NO: 2601833 - DNA, 25 bp, Homo sapien
cttataagtagaaatgcctaaaggg

SEQ ID NO: 2601834 - DNA, 25 bp, Homo sapien
actttgggagtcagacgtgtgcaga

SEQ ID NO: 2601835 - DNA, 25 bp, Homo sapien
tactgaggtaatcttggcacatttt

SEQ ID NO: 2601836 - DNA, 25 bp, Homo sapien
ggctaactctgagggaaactctttc

SEQ ID NO: 2601837 - DNA, 25 bp, Homo sapien
tctgccatgggagattgtaccttac

SEQ ID NO: 2601838 - DNA, 25 bp, Homo sapien
gggaaactctttctgccatgggaga

SEQ ID NO: 2601839 - DNA, 25 bp, Homo sapien
gcgcctggcccttgttttggctaac

SEQ ID NO: 2601840 - DNA, 25 bp, Homo sapien
gctaaaatgaggctgactaggaaaa

SEQ ID NO: 2601841 - DNA, 25 bp, Homo sapien
gaagctaaaatgaggctgactagga

SEQ ID NO: 2601842 - DNA, 25 bp, Homo sapien
cttgatgggaagaagctaaaatgag

SEQ ID NO: 2601843 - DNA, 25 bp, Homo sapien
ggctgactaggaaaatatcattact

SEQ ID NO: 2601844 - DNA, 25 bp, Homo sapien
gattctggtattctggtgctttcca

SEQ ID NO: 2601845 - DNA, 25 bp, Homo sapien
tggaaagattctggtattctggtgc

SEQ ID NO: 2601846 - DNA, 25 bp, Homo sapien
atcagtgagtggaaagattctggta

SEQ ID NO: 2601847 - DNA, 25 bp, Homo sapien
ctgaggtattaactctgatcatcag

SEQ ID NO: 2601848 - DNA, 25 bp, Homo sapien
tagtcctcagggtatggtggccaat

SEQ ID NO: 2601849 - DNA, 25 bp, Homo sapien
tgtaaatggagtgcataggcagcag

SEQ ID NO: 2601850 - DNA, 25 bp, Homo sapien
gcatctgtgtcagggttagtcctca

SEQ ID NO: 2601851 - DNA, 25 bp, Homo sapien
tgcactaggtgacgctgaagccaca

SEQ ID NO: 2601852 - DNA, 25 bp, Homo sapien
gcaattattgaaggagatgatacat

SEQ ID NO: 2601853 - DNA, 25 bp, Homo sapien
gacttcagagccatccctttaaaat

SEQ ID NO: 2601854 - DNA, 25 bp, Homo sapien
gcctcttcctagttttgcaacccag

SEQ ID NO: 2601855 - DNA, 25 bp, Homo sapien
catcaggcctccttttttcacggag

SEQ ID NO: 2601856 - DNA, 25 bp, Homo sapien
gatgttagcaccatttgatcgcttg

SEQ ID NO: 2601857 - DNA, 25 bp, Homo sapien
gatgagaccatatcgaggatgcact

SEQ ID NO: 2601858 - DNA, 25 bp, Homo sapien
aaaacaccaagatagctgggtgcgg

SEQ ID NO: 2601859 - DNA, 25 bp, Homo sapien
gatcgcttgaatgcacgtcataaca

SEQ ID NO: 2601860 - DNA, 25 bp, Homo sapien
ctctccgttcacagattgctgcatg

SEQ ID NO: 2601861 - DNA, 25 bp, Homo sapien
ttctctccgttcacagattgctgca

SEQ ID NO: 2601862 - DNA, 25 bp, Homo sapien
ctccgttcacagattgctgcatgga

SEQ ID NO: 2601863 - DNA, 25 bp, Homo sapien
ggcttctctccgttcacagattgct

SEQ ID NO: 2601864 - DNA, 25 bp, Homo sapien
ctgagttgtaggggtgacagttcac

SEQ ID NO: 2601865 - DNA, 25 bp, Homo sapien
gccctggaacttcagactttgtcgg

SEQ ID NO: 2601866 - DNA, 25 bp, Homo sapien
ggttgaaatgacacatgattccagg

SEQ ID NO: 2601867 - DNA, 25 bp, Homo sapien
gataaccttggttttgatgccacgt

SEQ ID NO: 2601868 - DNA, 25 bp, Homo sapien
tcgatgtggaatttcagaatgggct

SEQ ID NO: 2601869 - DNA, 25 bp, Homo sapien
cagctcttgaaaggagtgatggcat

SEQ ID NO: 2601870 - DNA, 25 bp, Homo sapien
aaggagagatgcttggaccaaccac

SEQ ID NO: 2601871 - DNA, 25 bp, Homo sapien
gggcatctaaattcctgtgctaaat

SEQ ID NO: 2601872 - DNA, 25 bp, Homo sapien
catatgtactctcactaaaactggt

SEQ ID NO: 2601873 - DNA, 25 bp, Homo sapien
tatgttgctgtcaaaaggcttcttc

SEQ ID NO: 2601874 - DNA, 25 bp, Homo sapien
ggaactcagttggtgtcctccatcc

SEQ ID NO: 2601875 - DNA, 25 bp, Homo sapien
cctcttcattgggatcggaactcag

SEQ ID NO: 2601876 - DNA, 25 bp, Homo sapien
cctagatagttgtagctttttctcc

SEQ ID NO: 2601877 - DNA, 25 bp, Homo sapien
acccaggtggcctttaaatccaatg

SEQ ID NO: 2601878 - DNA, 25 bp, Homo sapien
actaagctccagaatttgtgaatgc

SEQ ID NO: 2601879 - DNA, 25 bp, Homo sapien
aatatatgtccaagtactaagctcc

SEQ ID NO: 2601880 - DNA, 25 bp, Homo sapien
gtactgagttgaataaaagcccctc

SEQ ID NO: 2601881 - DNA, 25 bp, Homo sapien
cgttgggcactcacaaagttatgca

SEQ ID NO: 2601882 - DNA, 25 bp, Homo sapien
tcttgtacagtgaaacgttgggcac

SEQ ID NO: 2601883 - DNA, 25 bp, Homo sapien
gaacggctctgaaatgatgtggaaa

SEQ ID NO: 2601884 - DNA, 25 bp, Homo sapien
ggcatgcaaaactagagaacggctc

SEQ ID NO: 2601885 - DNA, 25 bp, Homo sapien
cattaataaggtgagaccttttggt

SEQ ID NO: 2601886 - DNA, 25 bp, Homo sapien
aactagactccagctgttttgactt

SEQ ID NO: 2601887 - DNA, 25 bp, Homo sapien
tgagggttcccattaaactagactc

SEQ ID NO: 2601888 - DNA, 25 bp, Homo sapien
gaattgctttaggagagtctctgtg

SEQ ID NO: 2601889 - DNA, 25 bp, Homo sapien
ctgggtgatgatgatacacaaatac

SEQ ID NO: 2601890 - DNA, 25 bp, Homo sapien
gacagatggctagatgataggtaga

SEQ ID NO: 2601891 - DNA, 25 bp, Homo sapien
gatagatagcctccaagacaatggg

SEQ ID NO: 2601892 - DNA, 25 bp, Homo sapien
tgatagatagttcatagctgggtga

SEQ ID NO: 2601893 - DNA, 25 bp, Homo sapien
cacctgcaggccactcaggatatcc

SEQ ID NO: 2601894 - DNA, 25 bp, Homo sapien
ctgcaggccactcaggatatccaaa

SEQ ID NO: 2601895 - DNA, 25 bp, Homo sapien
gccacctgcaggccactcaggatat

SEQ ID NO: 2601896 - DNA, 25 bp, Homo sapien
tcaggatatccaaagcgatccacat

SEQ ID NO: 2601897 - DNA, 25 bp, Homo sapien
ctcggcccagaggttgtcgaggaca

SEQ ID NO: 2601898 - DNA, 25 bp, Homo sapien
cctttcaggttctgtaagccccatg

SEQ ID NO: 2601899 - DNA, 25 bp, Homo sapien
cttgcgggatctcttggactcggcc

SEQ ID NO: 2601900 - DNA, 25 bp, Homo sapien
ccccatgcgggcaggagcgacttgc

SEQ ID NO: 2601901 - DNA, 25 bp, Homo sapien
cctgcggttccctgtaggaagccgt

SEQ ID NO: 2601902 - DNA, 25 bp, Homo sapien
ggatgacagtgaggcggtcagaagt

SEQ ID NO: 2601903 - DNA, 25 bp, Homo sapien
tctccttgaagtctcctaggtctca

SEQ ID NO: 2601904 - DNA, 25 bp, Homo sapien
tgaggcggtcagaagtcgcagctgg

SEQ ID NO: 2601905 - DNA, 25 bp, Homo sapien
ggtttctccttacatggagaactga

SEQ ID NO: 2601906 - DNA, 25 bp, Homo sapien
gtttctccttacatggagaactgat

SEQ ID NO: 2601907 - DNA, 25 bp, Homo sapien
tccttacatggagaactgatttttc

SEQ ID NO: 2601908 - DNA, 25 bp, Homo sapien
tctccttacatggagaactgatttt

SEQ ID NO: 2601909 - DNA, 25 bp, Homo sapien
ctgtaaatggagtgcataggcagca

SEQ ID NO: 2601910 - DNA, 25 bp, Homo sapien
ttgacaatgcgtttgttgaatggca

SEQ ID NO: 2601911 - DNA, 25 bp, Homo sapien
tgactgttgacaatgcgtttgttga

SEQ ID NO: 2601912 - DNA, 25 bp, Homo sapien
tgtaaatggagtgcataggcagcag

SEQ ID NO: 2601913 - DNA, 25 bp, Homo sapien
gacttcagagccatccctttaaaat

SEQ ID NO: 2601914 - DNA, 25 bp, Homo sapien
gcctcttcctagttttgcaacccag

SEQ ID NO: 2601915 - DNA, 25 bp, Homo sapien
gcaattattgaaggagatgatacat

SEQ ID NO: 2601916 - DNA, 25 bp, Homo sapien
catcaggcctccttttttcacggag

SEQ ID NO: 2601917 - DNA, 25 bp, Homo sapien
gatgttagcaccatttgatcgcttg

SEQ ID NO: 2601918 - DNA, 25 bp, Homo sapien
gatgagaccatatcgaggatgcact

SEQ ID NO: 2601919 - DNA, 25 bp, Homo sapien
aaaacaccaagatagctgggtgcgg

SEQ ID NO: 2601920 - DNA, 25 bp, Homo sapien
gatcgcttgaatgcacgtcataaca

SEQ ID NO: 2601921 - DNA, 25 bp, Homo sapien
ccgtgtggccgtttgcatcgactca

SEQ ID NO: 2601922 - DNA, 25 bp, Homo sapien
cacagattgccgcatggagatgaga

SEQ ID NO: 2601923 - DNA, 25 bp, Homo sapien
aatagagggtgaacagatctcctgc

SEQ ID NO: 2601924 - DNA, 25 bp, Homo sapien
cattgtgaatccatgaccgtgtggc

SEQ ID NO: 2601925 - DNA, 25 bp, Homo sapien
gccctggaacttcagactttgtcgg

SEQ ID NO: 2601926 - DNA, 25 bp, Homo sapien
taaccttggttttgatgccacgtcc

SEQ ID NO: 2601927 - DNA, 25 bp, Homo sapien
aaggagagatgcttggaccaaccac

SEQ ID NO: 2601928 - DNA, 25 bp, Homo sapien
ggttgaaatgacacatgattccagg

SEQ ID NO: 2601929 - DNA, 25 bp, Homo sapien
tatgttgctgtcaaaaggcttcttc

SEQ ID NO: 2601930 - DNA, 25 bp, Homo sapien
ggaactcagttggtgtcctccatcc

SEQ ID NO: 2601931 - DNA, 25 bp, Homo sapien
cctcttcattgggatcggaactcag

SEQ ID NO: 2601932 - DNA, 25 bp, Homo sapien
cctagatagttgtagctttttctcc

SEQ ID NO: 2601933 - DNA, 25 bp, Homo sapien
tatatgacttgtaaggcaagttggg

SEQ ID NO: 2601934 - DNA, 25 bp, Homo sapien
acccaggtggcctttaaatccaatg

SEQ ID NO: 2601935 - DNA, 25 bp, Homo sapien
caagtactaagctccagaatttgtg

SEQ ID NO: 2601936 - DNA, 25 bp, Homo sapien
gtactgagttgaataaaagcccctc

SEQ ID NO: 2601937 - DNA, 25 bp, Homo sapien
tgagggttcccattaaactagactc

SEQ ID NO: 2601938 - DNA, 25 bp, Homo sapien
cattaataaggtgagaccttttggt

SEQ ID NO: 2601939 - DNA, 25 bp, Homo sapien
aactagactccagctgttttgactt

SEQ ID NO: 2601940 - DNA, 25 bp, Homo sapien
gaattgctttaggagagtctctgtg

SEQ ID NO: 2601941 - DNA, 25 bp, Homo sapien
aaaaacactgagatttggtgttcat

SEQ ID NO: 2601942 - DNA, 25 bp, Homo sapien
aaaaaacactgagatttggtgttca

SEQ ID NO: 2601943 - DNA, 25 bp, Homo sapien
aacactgagatttggtgttcattca

SEQ ID NO: 2601944 - DNA, 25 bp, Homo sapien
aaacactgagatttggtgttcattc

SEQ ID NO: 2601945 - DNA, 25 bp, Homo sapien
tgaagcgggtgacgaaggcgcagct

SEQ ID NO: 2601946 - DNA, 25 bp, Homo sapien
ctgaagcgggtgacgaaggcgcagc

SEQ ID NO: 2601947 - DNA, 25 bp, Homo sapien
aagcgggtgacgaaggcgcagctgc

SEQ ID NO: 2601948 - DNA, 25 bp, Homo sapien
gcgggtgacgaaggcgcagctgctg

SEQ ID NO: 2601949 - DNA, 25 bp, Homo sapien
gcagcgtcgccttccgaggtgtctt

SEQ ID NO: 2601950 - DNA, 25 bp, Homo sapien
gcagcgttgcacgtgtggccccgct

SEQ ID NO: 2601951 - DNA, 25 bp, Homo sapien
gtagcccgccgctttcccaggtgag

SEQ ID NO: 2601952 - DNA, 25 bp, Homo sapien
gtgaggcacgtcgtcgcccagcgac

SEQ ID NO: 2601953 - DNA, 25 bp, Homo sapien
aataaggtgggtccgctgtgctgat

SEQ ID NO: 2601954 - DNA, 25 bp, Homo sapien
aaaataaggtgggtccgctgtgctg

SEQ ID NO: 2601955 - DNA, 25 bp, Homo sapien
aaggtgggtccgctgtgctgatcgg

SEQ ID NO: 2601956 - DNA, 25 bp, Homo sapien
ggtgggtccgctgtgctgatcggcc

SEQ ID NO: 2601957 - DNA, 25 bp, Homo sapien
atggcggtatcagcaccacgcgctc

SEQ ID NO: 2601958 - DNA, 25 bp, Homo sapien
gcgctcaccaactgagataaccgac

SEQ ID NO: 2601959 - DNA, 25 bp, Homo sapien
accacgcgctcaccaactgagataa

SEQ ID NO: 2601960 - DNA, 25 bp, Homo sapien
gatcaagcccgcgaccatggcggta

SEQ ID NO: 2601961 - DNA, 25 bp, Homo sapien
gcccgcgaccttggtgttatcagca

SEQ ID NO: 2601962 - DNA, 25 bp, Homo sapien
agtcgagcccgcgaccttggtgtta

SEQ ID NO: 2601963 - DNA, 25 bp, Homo sapien
tgttatcagcaccacgctcttacca

SEQ ID NO: 2601964 - DNA, 25 bp, Homo sapien
tggccggtgcgggagtcgagcccgc

SEQ ID NO: 2601965 - DNA, 25 bp, Homo sapien
tgcgccttcgtcacccgcttcagga

SEQ ID NO: 2601966 - DNA, 25 bp, Homo sapien
cgcttcaggacctgccgcagctgct

SEQ ID NO: 2601967 - DNA, 25 bp, Homo sapien
ccctggcccggagaagcctggccgc

SEQ ID NO: 2601968 - DNA, 25 bp, Homo sapien
gccacacgtgcaacgctgccctggc

SEQ ID NO: 2601969 - DNA, 25 bp, Homo sapien
ggctcggcgccagggtcccgctgga

SEQ ID NO: 2601970 - DNA, 25 bp, Homo sapien
gggcggcagcaggcgtggcgggcac

SEQ ID NO: 2601971 - DNA, 25 bp, Homo sapien
gcggcagcaggcgtggcgggcacgg

SEQ ID NO: 2601972 - DNA, 25 bp, Homo sapien
cgccagggtcccgctggagggcggc

SEQ ID NO: 2601973 - DNA, 25 bp, Homo sapien
cagacacgtgctactacgcctggtt

SEQ ID NO: 2601974 - DNA, 25 bp, Homo sapien
tgcccggccgggctgaatatcctca

SEQ ID NO: 2601975 - DNA, 25 bp, Homo sapien
gccgggctgaatatcctcaacaact

SEQ ID NO: 2601976 - DNA, 25 bp, Homo sapien
gacacgtgctactacgcctggttaa

SEQ ID NO: 2601977 - DNA, 25 bp, Homo sapien
acacaaatggcttctagttgctttc

SEQ ID NO: 2601978 - DNA, 25 bp, Homo sapien
gacacaaatggcttctagttgcttt

SEQ ID NO: 2601979 - DNA, 25 bp, Homo sapien
cttgacacaaatggcttctagttgc

SEQ ID NO: 2601980 - DNA, 25 bp, Homo sapien
tgacacaaatggcttctagttgctt

SEQ ID NO: 2601981 - DNA, 25 bp, Homo sapien
tgaccgtcggccaaatcatcccttt

SEQ ID NO: 2601982 - DNA, 25 bp, Homo sapien
tacttggcaggtcgagatacctgtc

SEQ ID NO: 2601983 - DNA, 25 bp, Homo sapien
ctgatgtaggaaacatgactgtggc

SEQ ID NO: 2601984 - DNA, 25 bp, Homo sapien
cagtagggacgttggccgttcctga

SEQ ID NO: 2601985 - DNA, 25 bp, Homo sapien
gcagcttgataagtcaaagagcgcc

SEQ ID NO: 2601986 - DNA, 25 bp, Homo sapien
cccacggagggtgctcccattggct

SEQ ID NO: 2601987 - DNA, 25 bp, Homo sapien
ttgataagtcaaagagcgcctgcct

SEQ ID NO: 2601988 - DNA, 25 bp, Homo sapien
tctgtgcacccacggagggtgctcc

SEQ ID NO: 2601989 - DNA, 25 bp, Homo sapien
aagcaggagcgggcccctccctcac

SEQ ID NO: 2601990 - DNA, 25 bp, Homo sapien
caagcaggagcgggcccctccctca

SEQ ID NO: 2601991 - DNA, 25 bp, Homo sapien
aggccaccgcgtgctgactctctca

SEQ ID NO: 2601992 - DNA, 25 bp, Homo sapien
caggccaccgcgtgctgactctctc

SEQ ID NO: 2601993 - DNA, 25 bp, Homo sapien
ggccaccgcgtgctgactctctcac

SEQ ID NO: 2601994 - DNA, 25 bp, Homo sapien
gaatggccgaaaacgacacccagat

SEQ ID NO: 2601995 - DNA, 25 bp, Homo sapien
tgagaatggccgaaaacgacaccca

SEQ ID NO: 2601996 - DNA, 25 bp, Homo sapien
gaaaacgacacccagatgcaaacat

SEQ ID NO: 2601997 - DNA, 25 bp, Homo sapien
acagtgtgagaatggccgaaaacga

SEQ ID NO: 2601998 - DNA, 25 bp, Homo sapien
ggacttcctggtagcacatatctag

SEQ ID NO: 2601999 - DNA, 25 bp, Homo sapien
catatctagacaagggcagtacaca

SEQ ID NO: 2602000 - DNA, 25 bp, Homo sapien
tgcaataaacttccaagcacagatg

SEQ ID NO: 2602001 - DNA, 25 bp, Homo sapien
ggctctccgtgcagtctcttggcat

SEQ ID NO: 2602002 - DNA, 25 bp, Homo sapien
tagtggctttgaatctgcattgccc

SEQ ID NO: 2602003 - DNA, 25 bp, Homo sapien
tcaatgcagctcacaatagtggctt

SEQ ID NO: 2602004 - DNA, 25 bp, Homo sapien
aatataggtacactcacaactaggg

SEQ ID NO: 2602005 - DNA, 25 bp, Homo sapien
tacatggtggtatagtcaatgcagc

SEQ ID NO: 2602006 - DNA, 25 bp, Homo sapien
gctcggaccgcaccttgatttcaga

SEQ ID NO: 2602007 - DNA, 25 bp, Homo sapien
cagacttctggtctctagaaatgtg

SEQ ID NO: 2602008 - DNA, 25 bp, Homo sapien
tggcacaatatctgttccctgcaac

SEQ ID NO: 2602009 - DNA, 25 bp, Homo sapien
tttattgagactcattcagtgtctc

SEQ ID NO: 2602010 - DNA, 25 bp, Homo sapien
agcgtctaccccttaccgggcattg

SEQ ID NO: 2602011 - DNA, 25 bp, Homo sapien
atgcacgaaaccacttatctaggtc

SEQ ID NO: 2602012 - DNA, 25 bp, Homo sapien
aacacctgacctggtacctacctat

SEQ ID NO: 2602013 - DNA, 25 bp, Homo sapien
tcacttgaaaaattgttaggccagt

SEQ ID NO: 2602014 - DNA, 25 bp, Homo sapien
aattgcacctgatgaaatggacgta

SEQ ID NO: 2602015 - DNA, 25 bp, Homo sapien
taaccccttagctttgtctggccag

SEQ ID NO: 2602016 - DNA, 25 bp, Homo sapien
tgtccatggccatcaagcggccagg

SEQ ID NO: 2602017 - DNA, 25 bp, Homo sapien
gcaaggatgtctcgattttcaaagc

SEQ ID NO: 2602018 - DNA, 25 bp, Homo sapien
cgctgactgcgtgagtgatgcagcc

SEQ ID NO: 2602019 - DNA, 25 bp, Homo sapien
tgacggccggcgcggaacactccat

SEQ ID NO: 2602020 - DNA, 25 bp, Homo sapien
tgatgcagccgcgattggtgttgac

SEQ ID NO: 2602021 - DNA, 25 bp, Homo sapien
caggacgctgactgcgtgagtgatg

SEQ ID NO: 2602022 - DNA, 25 bp, Homo sapien
tcggttgtgattggcatgttcctta

SEQ ID NO: 2602023 - DNA, 25 bp, Homo sapien
atttcttgcgtttttcaggaaatcg

SEQ ID NO: 2602024 - DNA, 25 bp, Homo sapien
caggaaatcggttgtgattggcatg

SEQ ID NO: 2602025 - DNA, 25 bp, Homo sapien
gcgtttttcaggaaatcggttgtga

SEQ ID NO: 2602026 - DNA, 25 bp, Homo sapien
agctctcagggtcccggacgccacc

SEQ ID NO: 2602027 - DNA, 25 bp, Homo sapien
tctcagggtcccggacgccacccag

SEQ ID NO: 2602028 - DNA, 25 bp, Homo sapien
ctcagggtcccggacgccacccagg

SEQ ID NO: 2602029 - DNA, 25 bp, Homo sapien
gctctcagggtcccggacgccaccc

SEQ ID NO: 2602030 - DNA, 25 bp, Homo sapien
caggggtccctacgtctgccttggg

SEQ ID NO: 2602031 - DNA, 25 bp, Homo sapien
tctgattgcgagagtccggaacgcc

SEQ ID NO: 2602032 - DNA, 25 bp, Homo sapien
tggagtccaagtctgattgcgagag

SEQ ID NO: 2602033 - DNA, 25 bp, Homo sapien
cccgttccgcgctgggtggagtcca

SEQ ID NO: 2602034 - DNA, 25 bp, Homo sapien
catcacgtgctcgtgattggcgtgc

SEQ ID NO: 2602035 - DNA, 25 bp, Homo sapien
cgacagcggctagcgcgcgcgcggg

SEQ ID NO: 2602036 - DNA, 25 bp, Homo sapien
cacatggcgcgtctggaggctgaac

SEQ ID NO: 2602037 - DNA, 25 bp, Homo sapien
cagggcccacatggcgcgtctggag

SEQ ID NO: 2602038 - DNA, 25 bp, Homo sapien
ggtgaaccagacacacgcgctgggt

SEQ ID NO: 2602039 - DNA, 25 bp, Homo sapien
cgggccccacttgacgtcagggtga

SEQ ID NO: 2602040 - DNA, 25 bp, Homo sapien
tcctcggcgttctcgtccgcatctt

SEQ ID NO: 2602041 - DNA, 25 bp, Homo sapien
tcgagtcatctgcgacttccccggg

SEQ ID NO: 2602042 - DNA, 25 bp, Homo sapien
agccgccgtttgtcccccgatatga

SEQ ID NO: 2602043 - DNA, 25 bp, Homo sapien
gagccgccgtttgtcccccgatatg

SEQ ID NO: 2602044 - DNA, 25 bp, Homo sapien
cttgagccgccgtttgtcccccgat

SEQ ID NO: 2602045 - DNA, 25 bp, Homo sapien
cgatatgactccgtccccccagggc

SEQ ID NO: 2602046 - DNA, 25 bp, Homo sapien
attgtctgcaccacggaccagccgt

SEQ ID NO: 2602047 - DNA, 25 bp, Homo sapien
tcctgtccggcgttttggtggacac

SEQ ID NO: 2602048 - DNA, 25 bp, Homo sapien
acggaccagccgtccagcgtgtgca

SEQ ID NO: 2602049 - DNA, 25 bp, Homo sapien
cgttttggtggacacgaccattgtc

SEQ ID NO: 2602050 - DNA, 25 bp, Homo sapien
gcaagacccccgtacttcagcatgt

SEQ ID NO: 2602051 - DNA, 25 bp, Homo sapien
ctgggcaatccgagaggccgcttcc

SEQ ID NO: 2602052 - DNA, 25 bp, Homo sapien
atgttttcggtagcggcggacagga

SEQ ID NO: 2602053 - DNA, 25 bp, Homo sapien
cgtacttcagcatgtctcggttgga

SEQ ID NO: 2602054 - DNA, 25 bp, Homo sapien
ctgggcaagtgagtagcgtcttccc

SEQ ID NO: 2602055 - DNA, 25 bp, Homo sapien
tactggaagcgggatggtcagaaac

SEQ ID NO: 2602056 - DNA, 25 bp, Homo sapien
ggcaagtgagtagcgtcttcccaac

SEQ ID NO: 2602057 - DNA, 25 bp, Homo sapien
tctactggaagcgggatggtcagaa

SEQ ID NO: 2602058 - DNA, 25 bp, Homo sapien
caggtgacccagggcagccgacccc

SEQ ID NO: 2602059 - DNA, 25 bp, Homo sapien
gtgacccagggcagccgacccccac

SEQ ID NO: 2602060 - DNA, 25 bp, Homo sapien
tgggcaggtgacccagggcagccga

SEQ ID NO: 2602061 - DNA, 25 bp, Homo sapien
ggcaggtgacccagggcagccgacc

SEQ ID NO: 2602062 - DNA, 25 bp, Homo sapien
tcctctccacgttcaggaagacgca

SEQ ID NO: 2602063 - DNA, 25 bp, Homo sapien
gcagccatcctctccacgttcagga

SEQ ID NO: 2602064 - DNA, 25 bp, Homo sapien
cgttcaggaagacgcacgtgatgtc

SEQ ID NO: 2602065 - DNA, 25 bp, Homo sapien
tccacgttcaggaagacgcacgtga

SEQ ID NO: 2602066 - DNA, 25 bp, Homo sapien
ggcctccttcgtgcgggcgttacag

SEQ ID NO: 2602067 - DNA, 25 bp, Homo sapien
aagatgtgcaggacgaccgtgaagc

SEQ ID NO: 2602068 - DNA, 25 bp, Homo sapien
gacgaccgtgaagcggtcaaacacc

SEQ ID NO: 2602069 - DNA, 25 bp, Homo sapien
cgttacagcggaagatgtgcaggac

SEQ ID NO: 2602070 - DNA, 25 bp, Homo sapien
tgtgcagcggcatctccgccagggc

SEQ ID NO: 2602071 - DNA, 25 bp, Homo sapien
gcagcggcatctccgccagggccac

SEQ ID NO: 2602072 - DNA, 25 bp, Homo sapien
ctgtgcagcggcatctccgccaggg

SEQ ID NO: 2602073 - DNA, 25 bp, Homo sapien
gtgcagcggcatctccgccagggcc

SEQ ID NO: 2602074 - DNA, 25 bp, Homo sapien
tctgcggacgctgtctccctcccgg

SEQ ID NO: 2602075 - DNA, 25 bp, Homo sapien
acactgtgagtgacgcgtgtcccgg

SEQ ID NO: 2602076 - DNA, 25 bp, Homo sapien
gtgtgggaacgggagtggctcggtc

SEQ ID NO: 2602077 - DNA, 25 bp, Homo sapien
aggagccgctgttgcggccccgctc

SEQ ID NO: 2602078 - DNA, 25 bp, Homo sapien
ctgaccccatgatgtagcgcgagcc

SEQ ID NO: 2602079 - DNA, 25 bp, Homo sapien
ccgactcctcggtacaggtgggcga

SEQ ID NO: 2602080 - DNA, 25 bp, Homo sapien
tacaggtgggcgacgtcccttttca

SEQ ID NO: 2602081 - DNA, 25 bp, Homo sapien
atgatgtagcgcgagccgactcctc

SEQ ID NO: 2602082 - DNA, 25 bp, Homo sapien
tgaggtcaatgagggcttcccgtga

SEQ ID NO: 2602083 - DNA, 25 bp, Homo sapien
gtgaggtcaatgagggcttcccgtg

SEQ ID NO: 2602084 - DNA, 25 bp, Homo sapien
tgtgaggtcaatgagggcttcccgt

SEQ ID NO: 2602085 - DNA, 25 bp, Homo sapien
ctgtgaggtcaatgagggcttcccg

SEQ ID NO: 2602086 - DNA, 25 bp, Homo sapien
ccacgccgggaaaggcacaagtgcg

SEQ ID NO: 2602087 - DNA, 25 bp, Homo sapien
gccccgacacgtcctgttccatgag

SEQ ID NO: 2602088 - DNA, 25 bp, Homo sapien
aagtgcgggcggtgccgcggagggt

SEQ ID NO: 2602089 - DNA, 25 bp, Homo sapien
acgggatctcgcctccgggtgtcca

SEQ ID NO: 2602090 - DNA, 25 bp, Homo sapien
gagatcacggggaactcccgcctcg

SEQ ID NO: 2602091 - DNA, 25 bp, Homo sapien
ctcttcttgcgaagcctgtccaagg

SEQ ID NO: 2602092 - DNA, 25 bp, Homo sapien
aggtgcctcttcttgcgaagcctgt

SEQ ID NO: 2602093 - DNA, 25 bp, Homo sapien
gcagttggtgtaccccaccacggag

SEQ ID NO: 2602094 - DNA, 25 bp, Homo sapien
gcccctcccctgggcgcgtgctcac

SEQ ID NO: 2602095 - DNA, 25 bp, Homo sapien
gtacggcaccactgagacgacaggg

SEQ ID NO: 2602096 - DNA, 25 bp, Homo sapien
cggcaccactgagacgacagggacc

SEQ ID NO: 2602097 - DNA, 25 bp, Homo sapien
gtcgtacggcaccactgagacgaca

SEQ ID NO: 2602098 - DNA, 25 bp, Homo sapien
tcgtacggcaccactgagacgacag

SEQ ID NO: 2602099 - DNA, 25 bp, Homo sapien
tcctgggtgagctctcacagcagct

SEQ ID NO: 2602100 - DNA, 25 bp, Homo sapien
gagaccacaggaaacccgtctcctg

SEQ ID NO: 2602101 - DNA, 25 bp, Homo sapien
tggtgtaccccacacggcgaccatg

SEQ ID NO: 2602102 - DNA, 25 bp, Homo sapien
gtagatgacatcctcaccttggctg

SEQ ID NO: 2602103 - DNA, 25 bp, Homo sapien
ccgtcgctgttctcgggccgatgga

SEQ ID NO: 2602104 - DNA, 25 bp, Homo sapien
agacccgacgcgtgggacaaagcca

SEQ ID NO: 2602105 - DNA, 25 bp, Homo sapien
tggatatagatacggcagtggtgcc

SEQ ID NO: 2602106 - DNA, 25 bp, Homo sapien
tgaggtcgtctgtgtagatttggca

SEQ ID NO: 2602107 - DNA, 25 bp, Homo sapien
ctggatggcggcatcgcccgtcagt

SEQ ID NO: 2602108 - DNA, 25 bp, Homo sapien
ccacgtcttccagggtggcggagaa

SEQ ID NO: 2602109 - DNA, 25 bp, Homo sapien
atggtgtccacgtacaggacggtca

SEQ ID NO: 2602110 - DNA, 25 bp, Homo sapien
tcagtgccttgatcagcgtggtctt

SEQ ID NO: 2602111 - DNA, 25 bp, Homo sapien
gcatcaccgtgctgtgtccgccact

SEQ ID NO: 2602112 - DNA, 25 bp, Homo sapien
tcaggcatcaccgtgctgtgtccgc

SEQ ID NO: 2602113 - DNA, 25 bp, Homo sapien
aggcatcaccgtgctgtgtccgcca

SEQ ID NO: 2602114 - DNA, 25 bp, Homo sapien
catcaccgtgctgtgtccgccactg

SEQ ID NO: 2602115 - DNA, 25 bp, Homo sapien
catatttcgggaacatggcgatcag

SEQ ID NO: 2602116 - DNA, 25 bp, Homo sapien
gcgccgttcttcgatgcggtcgtaa

SEQ ID NO: 2602117 - DNA, 25 bp, Homo sapien
tctttctcgtcggtgagttgctgct

SEQ ID NO: 2602118 - DNA, 25 bp, Homo sapien
gatcagttctttcgcccggtcgtcg

SEQ ID NO: 2602119 - DNA, 25 bp, Homo sapien
gcttcttttgggagaaacaggctac

SEQ ID NO: 2602120 - DNA, 25 bp, Homo sapien
ccatttgcgcttcttttgggagaaa

SEQ ID NO: 2602121 - DNA, 25 bp, Homo sapien
cgactagtgccatttgcgcttcttt

SEQ ID NO: 2602122 - DNA, 25 bp, Homo sapien
ttgcgcttcttttgggagaaacagg

SEQ ID NO: 2602123 - DNA, 25 bp, Homo sapien
taactgatgtcgaggcaaatagccc

SEQ ID NO: 2602124 - DNA, 25 bp, Homo sapien
gatagccgcaacgttgatgatcgcg

SEQ ID NO: 2602125 - DNA, 25 bp, Homo sapien
tattaacatggtcgatggcggcatc

SEQ ID NO: 2602126 - DNA, 25 bp, Homo sapien
tcagtggccgccttaatgaaaagcg

SEQ ID NO: 2602127 - DNA, 25 bp, Homo sapien
cttcccatgtcttatccattgcgat

SEQ ID NO: 2602128 - DNA, 25 bp, Homo sapien
aggacgtcgttaatctccttgataa

SEQ ID NO: 2602129 - DNA, 25 bp, Homo sapien
gggttacatcgcgttctggctggcg

SEQ ID NO: 2602130 - DNA, 25 bp, Homo sapien
tccttgataatttcgtctcctgctg

SEQ ID NO: 2602131 - DNA, 25 bp, Homo sapien
tgcggtagaatggtgtgcgtttcat

SEQ ID NO: 2602132 - DNA, 25 bp, Homo sapien
ctgcggtagaatggtgtgcgtttca

SEQ ID NO: 2602133 - DNA, 25 bp, Homo sapien
gaatcatccagataacgcgttcacg

SEQ ID NO: 2602134 - DNA, 25 bp, Homo sapien
aacgcgttcacggaggccggagaat

SEQ ID NO: 2602135 - DNA, 25 bp, Homo sapien
tccagataacgcgttcacggaggcc

SEQ ID NO: 2602136 - DNA, 25 bp, Homo sapien
aggccggagaattgcccggctcgcc

SEQ ID NO: 2602137 - DNA, 25 bp, Homo sapien
taaccaggtcgaatgtccggtcgca

SEQ ID NO: 2602138 - DNA, 25 bp, Homo sapien
tggcgacccggttaaactcaatgag

SEQ ID NO: 2602139 - DNA, 25 bp, Homo sapien
tgagcgatacgccaaacttctcggc

SEQ ID NO: 2602140 - DNA, 25 bp, Homo sapien
gatctgcgctatctgtccggtgccg

SEQ ID NO: 2602141 - DNA, 25 bp, Homo sapien
cgcgccgggtgaacagccgagattt

SEQ ID NO: 2602142 - DNA, 25 bp, Homo sapien
ttcctgcgactgctctatggcgcgc

SEQ ID NO: 2602143 - DNA, 25 bp, Homo sapien
cggcgacggcgtgctgcacgttcaa

SEQ ID NO: 2602144 - DNA, 25 bp, Homo sapien
catttcgtcgatatagaggccctga

SEQ ID NO: 2602145 - DNA, 25 bp, Homo sapien
tccggcagcagcgaatatttgccgc

SEQ ID NO: 2602146 - DNA, 25 bp, Homo sapien
tatttgccgccagcccatttaagga

SEQ ID NO: 2602147 - DNA, 25 bp, Homo sapien
tgcgcagcgccggttcttctatggg

SEQ ID NO: 2602148 - DNA, 25 bp, Homo sapien
ggatcaaacgatccagttccggcag

SEQ ID NO: 2602149 - DNA, 25 bp, Homo sapien
cacaaaaggctcaataaggcgttta

SEQ ID NO: 2602150 - DNA, 25 bp, Homo sapien
cccacaaaaggctcaataaggcgtt

SEQ ID NO: 2602151 - DNA, 25 bp, Homo sapien
tctgagttaaggaacaccgagccgc

SEQ ID NO: 2602152 - DNA, 25 bp, Homo sapien
aaggaagcgttcgtgcttgtctgag

SEQ ID NO: 2602153 - DNA, 25 bp, Homo sapien
acaggttaatcaggtcagcgctgac

SEQ ID NO: 2602154 - DNA, 25 bp, Homo sapien
gatacaggttaatcaggtcagcgct

SEQ ID NO: 2602155 - DNA, 25 bp, Homo sapien
ctgatacaggttaatcaggtcagcg

SEQ ID NO: 2602156 - DNA, 25 bp, Homo sapien
tacaggttaatcaggtcagcgctga

SEQ ID NO: 2602157 - DNA, 25 bp, Homo sapien
tcattaagatgcctgaatgccttca

SEQ ID NO: 2602158 - DNA, 25 bp, Homo sapien
gctgcgcgttgaatgcttcacgaat

SEQ ID NO: 2602159 - DNA, 25 bp, Homo sapien
tccaggttgtaacgaatcaggccgt

SEQ ID NO: 2602160 - DNA, 25 bp, Homo sapien
ccgattgaggtaaaggaatgctgct

SEQ ID NO: 2602161 - DNA, 25 bp, Homo sapien
tagttagtgaaaccagcggtgccgg

SEQ ID NO: 2602162 - DNA, 25 bp, Homo sapien
cactgacgcggtgcagattgaagcc

SEQ ID NO: 2602163 - DNA, 25 bp, Homo sapien
taaagttcaattacgcgcggtgcgg

SEQ ID NO: 2602164 - DNA, 25 bp, Homo sapien
gaagcggctcataaggcggatcgca

SEQ ID NO: 2602165 - DNA, 25 bp, Homo sapien
tttcattactggaacgccctggcga

SEQ ID NO: 2602166 - DNA, 25 bp, Homo sapien
gctgaagttgctcatatgccgccgt

SEQ ID NO: 2602167 - DNA, 25 bp, Homo sapien
cctgtttatggcattcggcgaccaa

SEQ ID NO: 2602168 - DNA, 25 bp, Homo sapien
taccgttgagaacttaagcctggcg

SEQ ID NO: 2602169 - DNA, 25 bp, Homo sapien
gcgagtgctgttgctaggaataaaa

SEQ ID NO: 2602170 - DNA, 25 bp, Homo sapien
aacatgccgtttaggatgctcccgg

SEQ ID NO: 2602171 - DNA, 25 bp, Homo sapien
caccagtggttagtttgtccatgcg

SEQ ID NO: 2602172 - DNA, 25 bp, Homo sapien
gaacggcagccttgtattgattgat

SEQ ID NO: 2602173 - DNA, 25 bp, Homo sapien
tcaacgttgggttcatctcggctcc

SEQ ID NO: 2602174 - DNA, 25 bp, Homo sapien
gcgaatgtcggtaccagtgtgccca

SEQ ID NO: 2602175 - DNA, 25 bp, Homo sapien
tgcagttctttacacgcacccggaa

SEQ ID NO: 2602176 - DNA, 25 bp, Homo sapien
gatgcgaaccttgatcagcgggtcg

SEQ ID NO: 2602177 - DNA, 25 bp, Homo sapien
gtggaagccacgaagtcaaaccgga

SEQ ID NO: 2602178 - DNA, 25 bp, Homo sapien
cagtagctgatgaactaacaggaga

SEQ ID NO: 2602179 - DNA, 25 bp, Homo sapien
agccccagctgtgtcgtggaagcca

SEQ ID NO: 2602180 - DNA, 25 bp, Homo sapien
accggatgtgtactttgcccctcag

SEQ ID NO: 2602181 - DNA, 25 bp, Homo sapien
cgagcggctggttatgtgtgaaaac

SEQ ID NO: 2602182 - DNA, 25 bp, Homo sapien
catccagcatgagcggcgtcatggc

SEQ ID NO: 2602183 - DNA, 25 bp, Homo sapien
catcccagacggtcagcttgccaga

SEQ ID NO: 2602184 - DNA, 25 bp, Homo sapien
gtcagttcgccaggaccatacgcag

SEQ ID NO: 2602185 - DNA, 25 bp, Homo sapien
ccagaaaggtggcccgacagggcca

SEQ ID NO: 2602186 - DNA, 25 bp, Homo sapien
agcaatacgcatcgtaagttcctga

SEQ ID NO: 2602187 - DNA, 25 bp, Homo sapien
ggtcatccgttgtgaccgcttcggt

SEQ ID NO: 2602188 - DNA, 25 bp, Homo sapien
cagcgtttctactgatacccggtca

SEQ ID NO: 2602189 - DNA, 25 bp, Homo sapien
caatagacacagactcgttacgcgt

SEQ ID NO: 2602190 - DNA, 25 bp, Homo sapien
tatgtgcaaggtcaccagcgtttct

SEQ ID NO: 2602191 - DNA, 25 bp, Homo sapien
gccagcgcccgagatatcaggtcgt

SEQ ID NO: 2602192 - DNA, 25 bp, Homo sapien
gatatcaggtcgttagcctctacgt

SEQ ID NO: 2602193 - DNA, 25 bp, Homo sapien
tctacgtcagtcacgcggataacga

SEQ ID NO: 2602194 - DNA, 25 bp, Homo sapien
gatttcccgggccagcgcccgagat

SEQ ID NO: 2602195 - DNA, 25 bp, Homo sapien
ccacgtatagtggtatccgcgcgcg

SEQ ID NO: 2602196 - DNA, 25 bp, Homo sapien
gattgtcgaaatcagccattaggcc

SEQ ID NO: 2602197 - DNA, 25 bp, Homo sapien
tgttctctggatcgtcaaagacccc

SEQ ID NO: 2602198 - DNA, 25 bp, Homo sapien
tgttcacaaacaacgtcggcctggt

SEQ ID NO: 2602199 - DNA, 25 bp, Homo sapien
catgcgctggcattgggaaccatat

SEQ ID NO: 2602200 - DNA, 25 bp, Homo sapien
ggcgtcgcgaaaaacataacggcca

SEQ ID NO: 2602201 - DNA, 25 bp, Homo sapien
taattcgggccgctgagtgccctga

SEQ ID NO: 2602202 - DNA, 25 bp, Homo sapien
tgacctgcgcggcaccgagtttgat

SEQ ID NO: 2602203 - DNA, 25 bp, Homo sapien
tcttttctgcttcgaaagcagttgt

SEQ ID NO: 2602204 - DNA, 25 bp, Homo sapien
ggcatagccaagttgttttggcatt

SEQ ID NO: 2602205 - DNA, 25 bp, Homo sapien
tcagttgttgcctgagggcatagcc

SEQ ID NO: 2602206 - DNA, 25 bp, Homo sapien
gcatttcctcttcaagcatgcgttt

SEQ ID NO: 2602207 - DNA, 25 bp, Homo sapien
cttgccgtggctttatcgagcgtga

SEQ ID NO: 2602208 - DNA, 25 bp, Homo sapien
ccgtggctttatcgagcgtgacgcc

SEQ ID NO: 2602209 - DNA, 25 bp, Homo sapien
tggctttatcgagcgtgacgccggt

SEQ ID NO: 2602210 - DNA, 25 bp, Homo sapien
tttatcgagcgtgacgccggtgacg

SEQ ID NO: 2602211 - DNA, 25 bp, Homo sapien
gcagggttaaccgtcacattgagcg

SEQ ID NO: 2602212 - DNA, 25 bp, Homo sapien
taactgtggctttggcccggtcagc

SEQ ID NO: 2602213 - DNA, 25 bp, Homo sapien
gaaggatttatctgaggcactggca

SEQ ID NO: 2602214 - DNA, 25 bp, Homo sapien
cattgagcgttgtggttgcaccgac

SEQ ID NO: 2602215 - DNA, 25 bp, Homo sapien
tgcggccataaacgtcaggaactca

SEQ ID NO: 2602216 - DNA, 25 bp, Homo sapien
caggaactcaatacgctgaagcgcc

SEQ ID NO: 2602217 - DNA, 25 bp, Homo sapien
tgaagcgccgacagttcgaagatgg

SEQ ID NO: 2602218 - DNA, 25 bp, Homo sapien
tatttgagccaatcagcctggccgt

SEQ ID NO: 2602219 - DNA, 25 bp, Homo sapien
tgctgatataacgtttccacatccg

SEQ ID NO: 2602220 - DNA, 25 bp, Homo sapien
cgttatgccacaaagacatcgcgat

SEQ ID NO: 2602221 - DNA, 25 bp, Homo sapien
tgccggccggatcgttatgccacaa

SEQ ID NO: 2602222 - DNA, 25 bp, Homo sapien
gtttccacatccgtgccggccggat

SEQ ID NO: 2602223 - DNA, 25 bp, Homo sapien
gatcgcctccggcggccagccgctc

SEQ ID NO: 2602224 - DNA, 25 bp, Homo sapien
cctccggcggccagccgctcagcac

SEQ ID NO: 2602225 - DNA, 25 bp, Homo sapien
gcctccggcggccagccgctcagca

SEQ ID NO: 2602226 - DNA, 25 bp, Homo sapien
cgatcgcctccggcggccagccgct

SEQ ID NO: 2602227 - DNA, 25 bp, Homo sapien
accggaacgagcatgccggagagca

SEQ ID NO: 2602228 - DNA, 25 bp, Homo sapien
tgtcttcatcaaccggaacgagcat

SEQ ID NO: 2602229 - DNA, 25 bp, Homo sapien
ttcatcaaccggaacgagcatgccg

SEQ ID NO: 2602230 - DNA, 25 bp, Homo sapien
gcagcgttgtcttcatcaaccggaa

SEQ ID NO: 2602231 - DNA, 25 bp, Homo sapien
gctcgctggcaagggcttttccgcc

SEQ ID NO: 2602232 - DNA, 25 bp, Homo sapien
tcagctcgctggcaagggcttttcc

SEQ ID NO: 2602233 - DNA, 25 bp, Homo sapien
agctcgctggcaagggcttttccgc

SEQ ID NO: 2602234 - DNA, 25 bp, Homo sapien
cgccgtaacggtttctgcgctttcg

SEQ ID NO: 2602235 - DNA, 25 bp, Homo sapien
cgctgatgacgctatccgaaggaga

SEQ ID NO: 2602236 - DNA, 25 bp, Homo sapien
gcagctctgagaaatgcgcatcgag

SEQ ID NO: 2602237 - DNA, 25 bp, Homo sapien
ggtcatcagcgtgtcatcatccggc

SEQ ID NO: 2602238 - DNA, 25 bp, Homo sapien
gagctgcgcgtcctgaaaataatga

SEQ ID NO: 2602239 - DNA, 25 bp, Homo sapien
tccagcttaataaccagatcgctaa

SEQ ID NO: 2602240 - DNA, 25 bp, Homo sapien
ccagatcgctaatctgctgggccat

SEQ ID NO: 2602241 - DNA, 25 bp, Homo sapien
tttgattcgggcgacctgctcgctg

SEQ ID NO: 2602242 - DNA, 25 bp, Homo sapien
ctcgctgaaggtggcgcggtcaaca

SEQ ID NO: 2602243 - DNA, 25 bp, Homo sapien
tgtgatgccattacctgccagtgag

SEQ ID NO: 2602244 - DNA, 25 bp, Homo sapien
tcagctgactgaggaatcgggtacg

SEQ ID NO: 2602245 - DNA, 25 bp, Homo sapien
taatcctgctgggtgatattgccct

SEQ ID NO: 2602246 - DNA, 25 bp, Homo sapien
tcaatctggcggaaaaaggatgccg

SEQ ID NO: 2602247 - DNA, 25 bp, Homo sapien
tggccgtcagaaaatgcagcgaatc

SEQ ID NO: 2602248 - DNA, 25 bp, Homo sapien
gacgtatctaacatcgcctgagcag

SEQ ID NO: 2602249 - DNA, 25 bp, Homo sapien
cgttgtgactgcattaaccggatca

SEQ ID NO: 2602250 - DNA, 25 bp, Homo sapien
caatctgttcatactgcgtggccgt

SEQ ID NO: 2602251 - DNA, 25 bp, Homo sapien
ggcatagtccggatcaaccttgaga

SEQ ID NO: 2602252 - DNA, 25 bp, Homo sapien
cattcagcaaaagagtcctggcgct

SEQ ID NO: 2602253 - DNA, 25 bp, Homo sapien
tgctcaaacttcacggcctggtcgg

SEQ ID NO: 2602254 - DNA, 25 bp, Homo sapien
gggatttttcctgcgccgtaagctg

SEQ ID NO: 2602255 - DNA, 25 bp, Homo sapien
tcacttctgcatccggaaagatccg

SEQ ID NO: 2602256 - DNA, 25 bp, Homo sapien
cagcatgcggttcagtttttcccga

SEQ ID NO: 2602257 - DNA, 25 bp, Homo sapien
gaaagatccggtgcactcgctttgt

SEQ ID NO: 2602258 - DNA, 25 bp, Homo sapien
gctgtttaagccgttcgcctgcatc

SEQ ID NO: 2602259 - DNA, 25 bp, Homo sapien
ggcccctccctcacgcggagccgct

SEQ ID NO: 2602260 - DNA, 25 bp, Homo sapien
gagccgctggcacggacagccccgg

SEQ ID NO: 2602261 - DNA, 25 bp, Homo sapien
cgctggcacggacagccccgggaag

SEQ ID NO: 2602262 - DNA, 25 bp, Homo sapien
gctggcacggacagccccgggaagg

SEQ ID NO: 2602263 - DNA, 25 bp, Homo sapien
tgatggccgtacaacatcgtgaatg

SEQ ID NO: 2602264 - DNA, 25 bp, Homo sapien
tgagacactttctacaacatgaacc

SEQ ID NO: 2602265 - DNA, 25 bp, Homo sapien
catgaaccttgagaatactgtgcta

SEQ ID NO: 2602266 - DNA, 25 bp, Homo sapien
gaagaaagcagcgtagtcaaaatca

SEQ ID NO: 2602267 - DNA, 25 bp, Homo sapien
gcatacaaggtaaatacacaggcca

SEQ ID NO: 2602268 - DNA, 25 bp, Homo sapien
tgcctaaagggcgtgtgtgcacaca

SEQ ID NO: 2602269 - DNA, 25 bp, Homo sapien
aggttgtagtgaactcagactgctc

SEQ ID NO: 2602270 - DNA, 25 bp, Homo sapien
tgggagtcagacgtgtgcagatcac

SEQ ID NO: 2602271 - DNA, 25 bp, Homo sapien
tggcgcgggctctgcaaggaaatca

SEQ ID NO: 2602272 - DNA, 25 bp, Homo sapien
gcccagaggttgtcgaggacagcct

SEQ ID NO: 2602273 - DNA, 25 bp, Homo sapien
gtggtgctgataccgccatggtcgc

SEQ ID NO: 2602274 - DNA, 25 bp, Homo sapien
catggtcgcgggcttgatccccgca

SEQ ID NO: 2602275 - DNA, 25 bp, Homo sapien
gccaggcctcaggattctcagagtt

SEQ ID NO: 2602276 - DNA, 25 bp, Homo sapien
gtcgagacccctgcagccgttattt

SEQ ID NO: 2602277 - DNA, 25 bp, Homo sapien
ttgatacacgaagttgccaggcctc

SEQ ID NO: 2602278 - DNA, 25 bp, Homo sapien
cctggcgcaaggattccgtgtatat

SEQ ID NO: 2602279 - DNA, 25 bp, Homo sapien
tgggtaagtcccataatcatggcag

SEQ ID NO: 2602280 - DNA, 25 bp, Homo sapien
caattcaagttgacatttcagtggg

SEQ ID NO: 2602281 - DNA, 25 bp, Homo sapien
aaagacccgcccctatgattgcagt

SEQ ID NO: 2602282 - DNA, 25 bp, Homo sapien
ttacaggtgcgtgccccaactcctg

SEQ ID NO: 2602283 - DNA, 25 bp, Homo sapien
atggcggtatcagcaccacgcgctc

SEQ ID NO: 2602284 - DNA, 25 bp, Homo sapien
gcgctcaccaactgagataaccgac

SEQ ID NO: 2602285 - DNA, 25 bp, Homo sapien
accacgcgctcaccaactgagataa

SEQ ID NO: 2602286 - DNA, 25 bp, Homo sapien
gatcaagcccgcgaccatggcggta

SEQ ID NO: 2602287 - DNA, 25 bp, Homo sapien
agtcgagcccgcgaccttggtgtta

SEQ ID NO: 2602288 - DNA, 25 bp, Homo sapien
gcccgcgaccttggtgttatcagca

SEQ ID NO: 2602289 - DNA, 25 bp, Homo sapien
tgttatcagcaccacgctcttacca

SEQ ID NO: 2602290 - DNA, 25 bp, Homo sapien
tggccggtgcgggagtcgagcccgc

SEQ ID NO: 2602291 - DNA, 25 bp, Homo sapien
ggagcacccgtcttcactgggcgat

SEQ ID NO: 2602292 - DNA, 25 bp, Homo sapien
ccaagggaacacgaggcggtgacat

SEQ ID NO: 2602293 - DNA, 25 bp, Homo sapien
tttgctccccgcctagaacggtgct

SEQ ID NO: 2602294 - DNA, 25 bp, Homo sapien
tcacagtacccgaaaggcgcatttt

SEQ ID NO: 2602295 - DNA, 25 bp, Homo sapien
gcggcagcaggcgtggcgggcacgg

SEQ ID NO: 2602296 - DNA, 25 bp, Homo sapien
ggctcggcgccagggtcccgctgga

SEQ ID NO: 2602297 - DNA, 25 bp, Homo sapien
gggcggcagcaggcgtggcgggcac

SEQ ID NO: 2602298 - DNA, 25 bp, Homo sapien
cgccagggtcccgctggagggcggc

SEQ ID NO: 2602299 - DNA, 25 bp, Homo sapien
gcgcgttgaagaggcgggcggaagc

SEQ ID NO: 2602300 - DNA, 25 bp, Homo sapien
gcaagacgccaatgcgccttccggt

SEQ ID NO: 2602301 - DNA, 25 bp, Homo sapien
tgcagctcggtagcagcgtgcgcgt

SEQ ID NO: 2602302 - DNA, 25 bp, Homo sapien
gcggcccgggcttgtagagccaggc

SEQ ID NO: 2602303 - DNA, 25 bp, Homo sapien
tcaggacatgttaggatccgtcccc

SEQ ID NO: 2602304 - DNA, 25 bp, Homo sapien
caggacatgttaggatccgtcccca

SEQ ID NO: 2602305 - DNA, 25 bp, Homo sapien
tttgaatctgcattgcccctggcca

SEQ ID NO: 2602306 - DNA, 25 bp, Homo sapien
tcaatgcagctcacaatagtggctt

SEQ ID NO: 2602307 - DNA, 25 bp, Homo sapien
aatataggtacactcacaactaggg

SEQ ID NO: 2602308 - DNA, 25 bp, Homo sapien
tacatggtggtatagtcaatgcagc

SEQ ID NO: 2602309 - DNA, 25 bp, Homo sapien
ctctacctcttcgggctcaggcgat

SEQ ID NO: 2602310 - DNA, 25 bp, Homo sapien
gcagcctctacctcttcgggctcag

SEQ ID NO: 2602311 - DNA, 25 bp, Homo sapien
tgcagcctctacctcttcgggctca

SEQ ID NO: 2602312 - DNA, 25 bp, Homo sapien
agcctctacctcttcgggctcaggc

SEQ ID NO: 2602313 - DNA, 25 bp, Homo sapien
gatgaaatgaaataacccacatggc

SEQ ID NO: 2602314 - DNA, 25 bp, Homo sapien
cagagcttggcaccgtatatatact

SEQ ID NO: 2602315 - DNA, 25 bp, Homo sapien
gatgttcccttccagtcagacacgt

SEQ ID NO: 2602316 - DNA, 25 bp, Homo sapien
acttttggagggtgattgtgaagat

SEQ ID NO: 2602317 - DNA, 25 bp, Homo sapien
tatgttgctgtcaaaaggcttcttc

SEQ ID NO: 2602318 - DNA, 25 bp, Homo sapien
ggaactcagttggtgtcctccatcc

SEQ ID NO: 2602319 - DNA, 25 bp, Homo sapien
cctcttcattgggatcggaactcag

SEQ ID NO: 2602320 - DNA, 25 bp, Homo sapien
cctagatagttgtagctttttctcc

SEQ ID NO: 2602321 - DNA, 25 bp, Homo sapien
tatatgacttgtaaggcaagttggg

SEQ ID NO: 2602322 - DNA, 25 bp, Homo sapien
gtactgagttgaataaaagcccctc

SEQ ID NO: 2602323 - DNA, 25 bp, Homo sapien
acccaggtggcctttaaatccaatg

SEQ ID NO: 2602324 - DNA, 25 bp, Homo sapien
caagtactaagctccagaatttgtg

SEQ ID NO: 2602325 - DNA, 25 bp, Homo sapien
tgagggttcccattaaactagactc

SEQ ID NO: 2602326 - DNA, 25 bp, Homo sapien
cattaataaggtgagaccttttggt

SEQ ID NO: 2602327 - DNA, 25 bp, Homo sapien
aactagactccagctgttttgactt

SEQ ID NO: 2602328 - DNA, 25 bp, Homo sapien
gaattgctttaggagagtctctgtg

SEQ ID NO: 2602329 - DNA, 25 bp, Homo sapien
ctgggtgatgatgatacacaaatac

SEQ ID NO: 2602330 - DNA, 25 bp, Homo sapien
gacagatggctagatgataggtaga

SEQ ID NO: 2602331 - DNA, 25 bp, Homo sapien
gatagatagcctccaagacaatggg

SEQ ID NO: 2602332 - DNA, 25 bp, Homo sapien
tgatagatagttcatagctgggtga

SEQ ID NO: 2602333 - DNA, 25 bp, Homo sapien
tcttgcaactactagaggtctggtc

SEQ ID NO: 2602334 - DNA, 25 bp, Homo sapien
tgttgcttaaagtctcatactgggc

SEQ ID NO: 2602335 - DNA, 25 bp, Homo sapien
catggtggtatagtcaatgcagctc

SEQ ID NO: 2602336 - DNA, 25 bp, Homo sapien
tttgaatctgcattgcccctggcca

SEQ ID NO: 2602337 - DNA, 25 bp, Homo sapien
gaggttgtagtgaactcagactgct

SEQ ID NO: 2602338 - DNA, 25 bp, Homo sapien
ttgtagtgaactcagactgctccac

SEQ ID NO: 2602339 - DNA, 25 bp, Homo sapien
tggaggttgtagtgaactcagactg

SEQ ID NO: 2602340 - DNA, 25 bp, Homo sapien
ggttgtagtgaactcagactgctcc

SEQ ID NO: 2602341 - DNA, 25 bp, Homo sapien
tagcatacaaggtaaatacacaggc

SEQ ID NO: 2602342 - DNA, 25 bp, Homo sapien
tcagcaatgtagtagcatacaaggt

SEQ ID NO: 2602343 - DNA, 25 bp, Homo sapien
aatgaaatcagcaatgtagtagcat

SEQ ID NO: 2602344 - DNA, 25 bp, Homo sapien
gcatacaaggtaaatacacaggcca

SEQ ID NO: 2602345 - DNA, 25 bp, Homo sapien
tgcctaaagggcgtgtgtgcacaca

SEQ ID NO: 2602346 - DNA, 25 bp, Homo sapien
ggagtcagacgtgtgcagatcactt

SEQ ID NO: 2602347 - DNA, 25 bp, Homo sapien
cttataagtagaaatgcctaaaggg

SEQ ID NO: 2602348 - DNA, 25 bp, Homo sapien
actttgggagtcagacgtgtgcaga

SEQ ID NO: 2602349 - DNA, 25 bp, Homo sapien
tactgaggtaatcttggcacatttt

SEQ ID NO: 2602350 - DNA, 25 bp, Homo sapien
ggctaactctgagggaaactctttc

SEQ ID NO: 2602351 - DNA, 25 bp, Homo sapien
gcgcctggcccttgttttggctaac

SEQ ID NO: 2602352 - DNA, 25 bp, Homo sapien
tctgccatgggagattgtaccttac

SEQ ID NO: 2602353 - DNA, 25 bp, Homo sapien
gggaaactctttctgccatgggaga

SEQ ID NO: 2602354 - DNA, 25 bp, Homo sapien
tcttcatttttgagttttctggaag

SEQ ID NO: 2602355 - DNA, 25 bp, Homo sapien
tctggaagagcatttattgcttttt

SEQ ID NO: 2602356 - DNA, 25 bp, Homo sapien
tttttgagttttctggaagagcatt

SEQ ID NO: 2602357 - DNA, 25 bp, Homo sapien
gttttctggaagagcatttattgct

SEQ ID NO: 2602358 - DNA, 25 bp, Homo sapien
gattctggtattctggtgctttcca

SEQ ID NO: 2602359 - DNA, 25 bp, Homo sapien
tggaaagattctggtattctggtgc

SEQ ID NO: 2602360 - DNA, 25 bp, Homo sapien
atcagtgagtggaaagattctggta

SEQ ID NO: 2602361 - DNA, 25 bp, Homo sapien
ctgaggtattaactctgatcatcag

SEQ ID NO: 2602362 - DNA, 25 bp, Homo sapien
tagtcctcagggtatggtggccaat

SEQ ID NO: 2602363 - DNA, 25 bp, Homo sapien
gcatctgtgtcagggttagtcctca

SEQ ID NO: 2602364 - DNA, 25 bp, Homo sapien
tgtaaatggagtgcataggcagcag

SEQ ID NO: 2602365 - DNA, 25 bp, Homo sapien
tgcactaggtgacgctgaagccaca

SEQ ID NO: 2602366 - DNA, 25 bp, Homo sapien
gaaggtttaacttgtctggtgcaat

SEQ ID NO: 2602367 - DNA, 25 bp, Homo sapien
tgtttcaatgaagttaagctcctct

SEQ ID NO: 2602368 - DNA, 25 bp, Homo sapien
tcttccgtattgcagtagtcctgac

SEQ ID NO: 2602369 - DNA, 25 bp, Homo sapien
tgacaatgtccagatcaaatgatcc

SEQ ID NO: 2602370 - DNA, 25 bp, Homo sapien
gaaaaattccaatgagccaacgcag

SEQ ID NO: 2602371 - DNA, 25 bp, Homo sapien
tccaatgagccaacgcagatagctt

SEQ ID NO: 2602372 - DNA, 25 bp, Homo sapien
cagatagctttacggcatttcctaa

SEQ ID NO: 2602373 - DNA, 25 bp, Homo sapien
ccaacgcagatagctttacggcatt

SEQ ID NO: 2602374 - DNA, 25 bp, Homo sapien
gggtacatgtgattactaaatacac

SEQ ID NO: 2602375 - DNA, 25 bp, Homo sapien
tgtgatcaagatattcatcacccta

SEQ ID NO: 2602376 - DNA, 25 bp, Homo sapien
ctgctgatttattgaacagtaggtc

SEQ ID NO: 2602377 - DNA, 25 bp, Homo sapien
tgccttttcgttaagctagaaacat

SEQ ID NO: 2602378 - DNA, 25 bp, Homo sapien
ggctctctccattgcataggctgaa

SEQ ID NO: 2602379 - DNA, 25 bp, Homo sapien
ggattatagtctcctgccgccatgc

SEQ ID NO: 2602380 - DNA, 25 bp, Homo sapien
tgaagcaggtatgacgtaggacact

SEQ ID NO: 2602381 - DNA, 25 bp, Homo sapien
cccttgaagggtgagcattttgccg

SEQ ID NO: 2602382 - DNA, 25 bp, Homo sapien
ttgtgggactttccactctataacc

SEQ ID NO: 2602383 - DNA, 25 bp, Homo sapien
gattgtgggactttccactctataa

SEQ ID NO: 2602384 - DNA, 25 bp, Homo sapien
aaaagattgtgggactttccactct

SEQ ID NO: 2602385 - DNA, 25 bp, Homo sapien
aaagattgtgggactttccactcta

SEQ ID NO: 2602386 - DNA, 25 bp, Homo sapien
gatgatagataataataggtaggta

SEQ ID NO: 2602387 - DNA, 25 bp, Homo sapien
gatagatcaatgacaggtagatgga

SEQ ID NO: 2602388 - DNA, 25 bp, Homo sapien
caagacaaaaatgtagattggtaga

SEQ ID NO: 2602389 - DNA, 25 bp, Homo sapien
gatgataaatggaatagatagatgg

SEQ ID NO: 2602390 - DNA, 25 bp, Homo sapien
ttcccttctttgcattctcgccaag

SEQ ID NO: 2602391 - DNA, 25 bp, Homo sapien
tctttgcattctcgccaagaggtca

SEQ ID NO: 2602392 - DNA, 25 bp, Homo sapien
tataagcaagcgttcccttctttgc

SEQ ID NO: 2602393 - DNA, 25 bp, Homo sapien
caacagcgtataagcaagcgttccc

SEQ ID NO: 2602394 - DNA, 25 bp, Homo sapien
attcagggcataagggtgcaggttt

SEQ ID NO: 2602395 - DNA, 25 bp, Homo sapien
gaccatggaagtcaatgttgaaaaa

SEQ ID NO: 2602396 - DNA, 25 bp, Homo sapien
aacagtgaacataataccagatagg

SEQ ID NO: 2602397 - DNA, 25 bp, Homo sapien
cctggttcatgaggagtgatttcac

SEQ ID NO: 2602398 - DNA, 25 bp, Homo sapien
gttgttggttgaaatgacacgtgat

SEQ ID NO: 2602399 - DNA, 25 bp, Homo sapien
tgttggttgaaatgacacgtgattc

SEQ ID NO: 2602400 - DNA, 25 bp, Homo sapien
gccctggaacttcagactttgtcag

SEQ ID NO: 2602401 - DNA, 25 bp, Homo sapien
gttggttgaaatgacacgtgattcc

SEQ ID NO: 2602402 - DNA, 25 bp, Homo sapien
tcgtgcagcccttgtggcctagcag

SEQ ID NO: 2602403 - DNA, 25 bp, Homo sapien
ggcggggccatatcgtgcagccctt

SEQ ID NO: 2602404 - DNA, 25 bp, Homo sapien
ctagcagcagctccccgtcgtcggc

SEQ ID NO: 2602405 - DNA, 25 bp, Homo sapien
ccatatcgtgcagcccttgtggcct

SEQ ID NO: 2602406 - DNA, 25 bp, Homo sapien
aaagagacccccctctctcctcagc

SEQ ID NO: 2602407 - DNA, 25 bp, Homo sapien
aagagacccccctctctcctcagca

SEQ ID NO: 2602408 - DNA, 25 bp, Homo sapien
gtaaagagacccccctctctcctca

SEQ ID NO: 2602409 - DNA, 25 bp, Homo sapien
agagacccccctctctcctcagcac

SEQ ID NO: 2602410 - DNA, 25 bp, Homo sapien
tagtcctcagggtatggtggccaat

SEQ ID NO: 2602411 - DNA, 25 bp, Homo sapien
gcatctgtgtcagggttagtcctca

SEQ ID NO: 2602412 - DNA, 25 bp, Homo sapien
tgtaaatggagtgcataggcagcag

SEQ ID NO: 2602413 - DNA, 25 bp, Homo sapien
tgcactaggtgacgctgaagccaca

SEQ ID NO: 2602414 - DNA, 25 bp, Homo sapien
gcctcttcctagttttgcaacccag

SEQ ID NO: 2602415 - DNA, 25 bp, Homo sapien
gacttcagagccatccctttaaaat

SEQ ID NO: 2602416 - DNA, 25 bp, Homo sapien
gcaattattgaaggagatgatacat

SEQ ID NO: 2602417 - DNA, 25 bp, Homo sapien
catcaggcctccttttttcacggag

SEQ ID NO: 2602418 - DNA, 25 bp, Homo sapien
gatgttagcaccatttgatcgcttg

SEQ ID NO: 2602419 - DNA, 25 bp, Homo sapien
aaaacaccaagatagctgggtgcgg

SEQ ID NO: 2602420 - DNA, 25 bp, Homo sapien
gatcgcttgaatgcacgtcataaca

SEQ ID NO: 2602421 - DNA, 25 bp, Homo sapien
gatgagaccatatcgaggatgcact

SEQ ID NO: 2602422 - DNA, 25 bp, Homo sapien
ccgtgtggccgtttgcatcgactca

SEQ ID NO: 2602423 - DNA, 25 bp, Homo sapien
cacagattgccgcatggagatgaga

SEQ ID NO: 2602424 - DNA, 25 bp, Homo sapien
aatagagggtgaacagatctcctgc

SEQ ID NO: 2602425 - DNA, 25 bp, Homo sapien
cattgtgaatccatgaccgtgtggc

SEQ ID NO: 2602426 - DNA, 25 bp, Homo sapien
ctgagttgtaggggtgacagttcac

SEQ ID NO: 2602427 - DNA, 25 bp, Homo sapien
cagctcttgaaaggagtgatggcat

SEQ ID NO: 2602428 - DNA, 25 bp, Homo sapien
aaggagagatgcttggaccaaccac

SEQ ID NO: 2602429 - DNA, 25 bp, Homo sapien
gggcatctaaattcctgtgctaaat

SEQ ID NO: 2602430 - DNA, 25 bp, Homo sapien
catatgtactctcactaaaactggt

SEQ ID NO: 2602431 - DNA, 25 bp, Homo sapien
ggaactcagttggtgtcctccatcc

SEQ ID NO: 2602432 - DNA, 25 bp, Homo sapien
tatgttgctgtcaaaaggcttcttc

SEQ ID NO: 2602433 - DNA, 25 bp, Homo sapien
cctagatagttgtagctttttctcc

SEQ ID NO: 2602434 - DNA, 25 bp, Homo sapien
cctcttcattgggatcggaactcag

SEQ ID NO: 2602435 - DNA, 25 bp, Homo sapien
tatatgacttgtaaggcaagttggg

SEQ ID NO: 2602436 - DNA, 25 bp, Homo sapien
acccaggtggcctttaaatccaatg

SEQ ID NO: 2602437 - DNA, 25 bp, Homo sapien
gtactgagttgaataaaagcccctc

SEQ ID NO: 2602438 - DNA, 25 bp, Homo sapien
caagtactaagctccagaatttgtg

SEQ ID NO: 2602439 - DNA, 25 bp, Homo sapien
ctgtggccccgaccccaaggcttgt

SEQ ID NO: 2602440 - DNA, 25 bp, Homo sapien
cctgccctgcgccatacggaacaca

SEQ ID NO: 2602441 - DNA, 25 bp, Homo sapien
cgccatacggaacacacagtaggtg

SEQ ID NO: 2602442 - DNA, 25 bp, Homo sapien
ctgcgccatacggaacacacagtag

SEQ ID NO: 2602443 - DNA, 25 bp, Homo sapien
cattcacgatgttgtacggccatca

SEQ ID NO: 2602444 - DNA, 25 bp, Homo sapien
cacgggtgttcaattacctccttga

SEQ ID NO: 2602445 - DNA, 25 bp, Homo sapien
tctgaatgtcctttaaggcggagta

SEQ ID NO: 2602446 - DNA, 25 bp, Homo sapien
ttcacctagcacagtattctcaagg

SEQ ID NO: 2602447 - DNA, 25 bp, Homo sapien
tctggtgtgtcaatagcctctggct

SEQ ID NO: 2602448 - DNA, 25 bp, Homo sapien
ggctgacgctgccattacagagggt

SEQ ID NO: 2602449 - DNA, 25 bp, Homo sapien
ggtcagtaaaaccaatggcagtgcg

SEQ ID NO: 2602450 - DNA, 25 bp, Homo sapien
aatggcagtgcgctcttggctgacg

SEQ ID NO: 2602451 - DNA, 25 bp, Homo sapien
aaagggatgatttggccgacggtca

SEQ ID NO: 2602452 - DNA, 25 bp, Homo sapien
gcccgctcctgcttggtgagagagt

SEQ ID NO: 2602453 - DNA, 25 bp, Homo sapien
ggcaggcgctctttgacttatcaag

SEQ ID NO: 2602454 - DNA, 25 bp, Homo sapien
ggtatctcgacctgccaagtataaa

SEQ ID NO: 2602455 - DNA, 25 bp, Homo sapien
cccctcgtgagaaccgagccacagt

SEQ ID NO: 2602456 - DNA, 25 bp, Homo sapien
cagcccctcgtgagaaccgagccac

SEQ ID NO: 2602457 - DNA, 25 bp, Homo sapien
cctcgtgagaaccgagccacagtca

SEQ ID NO: 2602458 - DNA, 25 bp, Homo sapien
cgtgagaaccgagccacagtcatgt

SEQ ID NO: 2602459 - DNA, 25 bp, Homo sapien
atggcggtatcagcaccacgcgctc

SEQ ID NO: 2602460 - DNA, 25 bp, Homo sapien
gcgctcaccaactgagataaccgac

SEQ ID NO: 2602461 - DNA, 25 bp, Homo sapien
gcgaccatggcggtatcagcaccac

SEQ ID NO: 2602462 - DNA, 25 bp, Homo sapien
accacgcgctcaccaactgagataa

SEQ ID NO: 2602463 - DNA, 25 bp, Homo sapien
gcccgcgaccttggtgttatcagca

SEQ ID NO: 2602464 - DNA, 25 bp, Homo sapien
agtcgagcccgcgaccttggtgtta

SEQ ID NO: 2602465 - DNA, 25 bp, Homo sapien
tgttatcagcaccacgctcttacca

SEQ ID NO: 2602466 - DNA, 25 bp, Homo sapien
tggccggtgcgggagtcgagcccgc

SEQ ID NO: 2602467 - DNA, 25 bp, Homo sapien
gtcgctgggcgacgacgtgcctcac

SEQ ID NO: 2602468 - DNA, 25 bp, Homo sapien
ccgccgcatccgccgcggcggctga

SEQ ID NO: 2602469 - DNA, 25 bp, Homo sapien
cctgggtcgctgggcgacgacgtgc

SEQ ID NO: 2602470 - DNA, 25 bp, Homo sapien
gggtcgctgggcgacgacgtgcctc

SEQ ID NO: 2602471 - DNA, 25 bp, Homo sapien
gcggcagcaggcgtggcgggcacgg

SEQ ID NO: 2602472 - DNA, 25 bp, Homo sapien
ggctcggcgccagggtcccgctgga

SEQ ID NO: 2602473 - DNA, 25 bp, Homo sapien
cgccagggtcccgctggagggcggc

SEQ ID NO: 2602474 - DNA, 25 bp, Homo sapien
gggcggcagcaggcgtggcgggcac

SEQ ID NO: 2602475 - DNA, 25 bp, Homo sapien
cagacacgtgctactacgcctggtt

SEQ ID NO: 2602476 - DNA, 25 bp, Homo sapien
tgcccggccgggctgaatatcctca

SEQ ID NO: 2602477 - DNA, 25 bp, Homo sapien
gccgggctgaatatcctcaacaact

SEQ ID NO: 2602478 - DNA, 25 bp, Homo sapien
gacacgtgctactacgcctggttaa

SEQ ID NO: 2602479 - DNA, 25 bp, Homo sapien
gcttctgcctcctgtatagctggga

SEQ ID NO: 2602480 - DNA, 25 bp, Homo sapien
cctgcttctgcctcctgtatagctg

SEQ ID NO: 2602481 - DNA, 25 bp, Homo sapien
cttctgcctcctgtatagctgggat

SEQ ID NO: 2602482 - DNA, 25 bp, Homo sapien
tgcttctgcctcctgtatagctggg

SEQ ID NO: 2602483 - DNA, 25 bp, Homo sapien
gattcctggtctccaatactggaaa

SEQ ID NO: 2602484 - DNA, 25 bp, Homo sapien
gagtaaacatctgttactttacacc

SEQ ID NO: 2602485 - DNA, 25 bp, Homo sapien
tacggcatccataggaattaaaaac

SEQ ID NO: 2602486 - DNA, 25 bp, Homo sapien
ctagaacctccagggggagcgcacc

SEQ ID NO: 2602487 - DNA, 25 bp, Homo sapien
tcttgtacagtgaaacgttgggcac

SEQ ID NO: 2602488 - DNA, 25 bp, Homo sapien
gaacggctctgaaatgatgtggaaa

SEQ ID NO: 2602489 - DNA, 25 bp, Homo sapien
ggcatgcaaaactagagaacggctc

SEQ ID NO: 2602490 - DNA, 25 bp, Homo sapien
cgttgggcactcacaaagttatgca

SEQ ID NO: 2602491 - DNA, 25 bp, Homo sapien
tgagggttcccattaaactagactc

SEQ ID NO: 2602492 - DNA, 25 bp, Homo sapien
cattaataaggtgagaccttttggt

SEQ ID NO: 2602493 - DNA, 25 bp, Homo sapien
aactagactccagctgttttgactt

SEQ ID NO: 2602494 - DNA, 25 bp, Homo sapien
gaattgctttaggagagtctctgtg

SEQ ID NO: 2602495 - DNA, 25 bp, Homo sapien
cagagagacgactgtatgaggacaa

SEQ ID NO: 2602496 - DNA, 25 bp, Homo sapien
ttgaaagagcatcaccagccaacca

SEQ ID NO: 2602497 - DNA, 25 bp, Homo sapien
gctgttgaagagagctgagccacaa

SEQ ID NO: 2602498 - DNA, 25 bp, Homo sapien
tatctcaagagaacttggaggcagc

SEQ ID NO: 2602499 - DNA, 25 bp, Homo sapien
tcttgcaactactagaggtctggtc

SEQ ID NO: 2602500 - DNA, 25 bp, Homo sapien
tgttgcttaaagtctcatactgggc

SEQ ID NO: 2602501 - DNA, 25 bp, Homo sapien
catggtggtatagtcaatgcagctc

SEQ ID NO: 2602502 - DNA, 25 bp, Homo sapien
tttgaatctgcattgcccctggcca

SEQ ID NO: 2602503 - DNA, 25 bp, Homo sapien
gctcggaccgcaccttgatttcaga

SEQ ID NO: 2602504 - DNA, 25 bp, Homo sapien
tttattgagactcattcagtgtctc

SEQ ID NO: 2602505 - DNA, 25 bp, Homo sapien
cagacttctggtctctagaaatgtg

SEQ ID NO: 2602506 - DNA, 25 bp, Homo sapien
tggcacaatatctgttccctgcaac

SEQ ID NO: 2602507 - DNA, 25 bp, Homo sapien
gagtatcagtatgccccatgtcaca

SEQ ID NO: 2602508 - DNA, 25 bp, Homo sapien
cagggtgtcaggaaatactagctca

SEQ ID NO: 2602509 - DNA, 25 bp, Homo sapien
taaccataaggcgtaaaattgacaa

SEQ ID NO: 2602510 - DNA, 25 bp, Homo sapien
tactagctcagcagagattctacat

SEQ ID NO: 2602511 - DNA, 25 bp, Homo sapien
gcggcccgggcttgtagagccaggc

SEQ ID NO: 2602512 - DNA, 25 bp, Homo sapien
gcgcgttgaagaggcgggcggaagc

SEQ ID NO: 2602513 - DNA, 25 bp, Homo sapien
gcaagacgccaatgcgccttccggt

SEQ ID NO: 2602514 - DNA, 25 bp, Homo sapien
tgcagctcggtagcagcgtgcgcgt

SEQ ID NO: 2602515 - DNA, 25 bp, Homo sapien
cgtgtcgaagtcttgaaggcggttg

SEQ ID NO: 2602516 - DNA, 25 bp, Homo sapien
cgaagtcttgaaggcggttggcagg

SEQ ID NO: 2602517 - DNA, 25 bp, Homo sapien
tgtcgaagtcttgaaggcggttggc

SEQ ID NO: 2602518 - DNA, 25 bp, Homo sapien
cagcgtgtcgaagtcttgaaggcgg

SEQ ID NO: 2602519 - DNA, 25 bp, Homo sapien
gaccctgccgctgggcacactggga

SEQ ID NO: 2602520 - DNA, 25 bp, Homo sapien
gaggctggcctgagggaccccgcgc

SEQ ID NO: 2602521 - DNA, 25 bp, Homo sapien
tggagaaatctgtacattccccgcc

SEQ ID NO: 2602522 - DNA, 25 bp, Homo sapien
aatctgtacattccccgccgaggac

SEQ ID NO: 2602523 - DNA, 25 bp, Homo sapien
tcaggacatgttaggatccgtcccc

SEQ ID NO: 2602524 - DNA, 25 bp, Homo sapien
caggacatgttaggatccgtcccca

SEQ ID NO: 2602525 - DNA, 25 bp, Homo sapien
aaatggaggcccgtgtccctgcggt

SEQ ID NO: 2602526 - DNA, 25 bp, Homo sapien
tgggcaaatggaggcccgtgtccct

SEQ ID NO: 2602527 - DNA, 25 bp, Homo sapien
ccctgccgctgggcaaatggaggcc

SEQ ID NO: 2602528 - DNA, 25 bp, Homo sapien
tccacgcctagaaccctgccgctgg

SEQ ID NO: 2602529 - DNA, 25 bp, Homo sapien
cagcgtccctattatccgatttgaa

SEQ ID NO: 2602530 - DNA, 25 bp, Homo sapien
tggtcgtagttattctcagcgtccc

SEQ ID NO: 2602531 - DNA, 25 bp, Homo sapien
ctctgacccacgagaggggcgcctt

SEQ ID NO: 2602532 - DNA, 25 bp, Homo sapien
tccgatttgaaatgagagcaggcgg

SEQ ID NO: 2602533 - DNA, 25 bp, Homo sapien
ctgcaggcgctccccgtcggcaaag

SEQ ID NO: 2602534 - DNA, 25 bp, Homo sapien
ggcattcgtgcagccttgtggcctg

SEQ ID NO: 2602535 - DNA, 25 bp, Homo sapien
ggcgggcgggggcattcgtgcagcc

SEQ ID NO: 2602536 - DNA, 25 bp, Homo sapien
gcgggggcattcgtgcagccttgtg

SEQ ID NO: 2602537 - DNA, 25 bp, Homo sapien
ggccgggaaacgcagccgcggagcc

SEQ ID NO: 2602538 - DNA, 25 bp, Homo sapien
tgggctcggagtccgctccgccgtc

SEQ ID NO: 2602539 - DNA, 25 bp, Homo sapien
tccgccgtcgccttcccgctggggc

SEQ ID NO: 2602540 - DNA, 25 bp, Homo sapien
acagcccttgcagccggatgagagg

SEQ ID NO: 2602541 - DNA, 25 bp, Homo sapien
cactgcgcgggaacgggttacgcgg

SEQ ID NO: 2602542 - DNA, 25 bp, Homo sapien
gcgcgggaacgggttacgcggctga

SEQ ID NO: 2602543 - DNA, 25 bp, Homo sapien
cgcggctgacgtccgccgcagcagc

SEQ ID NO: 2602544 - DNA, 25 bp, Homo sapien
gccactgcgcgggaacgggttacgc

SEQ ID NO: 2602545 - DNA, 25 bp, Homo sapien
gagacggacgttatggctggcagcg

SEQ ID NO: 2602546 - DNA, 25 bp, Homo sapien
aagcaagagaccatgggtatgcggc

SEQ ID NO: 2602547 - DNA, 25 bp, Homo sapien
agcgcggccaagagccgggcctttc

SEQ ID NO: 2602548 - DNA, 25 bp, Homo sapien
gctggcagcgtctcgataccaaatg

SEQ ID NO: 2602549 - DNA, 25 bp, Homo sapien
agtagtcgggtctaccagcacgcac

SEQ ID NO: 2602550 - DNA, 25 bp, Homo sapien
gtagtcgggtctaccagcacgcacc

SEQ ID NO: 2602551 - DNA, 25 bp, Homo sapien
tcgagacctctctgctacaaaaagt

SEQ ID NO: 2602552 - DNA, 25 bp, Homo sapien
ccacagaatgtatcagacaaaaggt

SEQ ID NO: 2602553 - DNA, 25 bp, Homo sapien
gatcatctgcattccaaacctcagt

SEQ ID NO: 2602554 - DNA, 25 bp, Homo sapien
tgttatggtggctaatacacttggg

SEQ ID NO: 2602555 - DNA, 25 bp, Homo sapien
tgtatttgcctaaaacgccatctgg

SEQ ID NO: 2602556 - DNA, 25 bp, Homo sapien
tgatgacaatacgatcgaaactgct

SEQ ID NO: 2602557 - DNA, 25 bp, Homo sapien
gccatctggctgctacgtagaggaa

SEQ ID NO: 2602558 - DNA, 25 bp, Homo sapien
tttgcttgagaaagtagcctgctcg

SEQ ID NO: 2602559 - DNA, 25 bp, Homo sapien
cccctatatcctgtgagtgtccttg

SEQ ID NO: 2602560 - DNA, 25 bp, Homo sapien
caggccattatcagtcttgaggggg

SEQ ID NO: 2602561 - DNA, 25 bp, Homo sapien
ctgtaaagcttcaagaagaccccct

SEQ ID NO: 2602562 - DNA, 25 bp, Homo sapien
gcttcaagaagaccccctatatcct

SEQ ID NO: 2602563 - DNA, 25 bp, Homo sapien
gagtcaccatgcctaatcaaacact

SEQ ID NO: 2602564 - DNA, 25 bp, Homo sapien
tttcacccaatagttatcagcccct

SEQ ID NO: 2602565 - DNA, 25 bp, Homo sapien
tgaagcttccagcaaataccactct

SEQ ID NO: 2602566 - DNA, 25 bp, Homo sapien
tctctgcctattctgggcctttcat

SEQ ID NO: 2602567 - DNA, 25 bp, Homo sapien
gctatggtttggctgttcgggaaac

SEQ ID NO: 2602568 - DNA, 25 bp, Homo sapien
atggtttggctgttcgggaaaccag

SEQ ID NO: 2602569 - DNA, 25 bp, Homo sapien
ttagagcagtgagtgctatggtttg

SEQ ID NO: 2602570 - DNA, 25 bp, Homo sapien
agtgctatggtttggctgttcggga

SEQ ID NO: 2602571 - DNA, 25 bp, Homo sapien
cttgtgtgatagcgactttctttct

SEQ ID NO: 2602572 - DNA, 25 bp, Homo sapien
tttgcttgtgtgatagcgactttct

SEQ ID NO: 2602573 - DNA, 25 bp, Homo sapien
tgcttgtgtgatagcgactttcttt

SEQ ID NO: 2602574 - DNA, 25 bp, Homo sapien
ttttgcttgtgtgatagcgactttc

SEQ ID NO: 2602575 - DNA, 25 bp, Homo sapien
cagaagtgccttcccaaagggccat

SEQ ID NO: 2602576 - DNA, 25 bp, Homo sapien
tggttttatgtctacctgagggcag

SEQ ID NO: 2602577 - DNA, 25 bp, Homo sapien
ctgtgaaatggctttcttggtttta

SEQ ID NO: 2602578 - DNA, 25 bp, Homo sapien
ggttttatgtctacctgagggcagg

SEQ ID NO: 2602579 - DNA, 25 bp, Homo sapien
cttggttttatgtctacctgagggc

SEQ ID NO: 2602580 - DNA, 25 bp, Homo sapien
gctcagcacacacaacagagttcca

SEQ ID NO: 2602581 - DNA, 25 bp, Homo sapien
gggtagccaaccttctaacatgagg

SEQ ID NO: 2602582 - DNA, 25 bp, Homo sapien
ggctgcactgttacatggcagctca

SEQ ID NO: 2602583 - DNA, 25 bp, Homo sapien
tagttagggtcaaatgggtagccaa

SEQ ID NO: 2602584 - DNA, 25 bp, Homo sapien
ttttgtaacgatctgtgcaatcatg

SEQ ID NO: 2602585 - DNA, 25 bp, Homo sapien
ggtgctactcagaatcgatagagac

SEQ ID NO: 2602586 - DNA, 25 bp, Homo sapien
gaatttttggtaacagctgtttgca

SEQ ID NO: 2602587 - DNA, 25 bp, Homo sapien
gaaggcacattatctcaggatcaaa

SEQ ID NO: 2602588 - DNA, 25 bp, Homo sapien
caaattacaaggtccattctctgat

SEQ ID NO: 2602589 - DNA, 25 bp, Homo sapien
agaggagatggaaccgatagcattc

SEQ ID NO: 2602590 - DNA, 25 bp, Homo sapien
atgtgctgtagagggcagaactgcc

SEQ ID NO: 2602591 - DNA, 25 bp, Homo sapien
gatggaaccgatagcattcagttta

SEQ ID NO: 2602592 - DNA, 25 bp, Homo sapien
ttatgcagctctaacccttaaattg

SEQ ID NO: 2602593 - DNA, 25 bp, Homo sapien
tatgcagctctaacccttaaattgt

SEQ ID NO: 2602594 - DNA, 25 bp, Homo sapien
tcaagggtatgtctaactaaattcc

SEQ ID NO: 2602595 - DNA, 25 bp, Homo sapien
gggacattatgaacttgatctgaca

SEQ ID NO: 2602596 - DNA, 25 bp, Homo sapien
gactgggtactgagatgggacatta

SEQ ID NO: 2602597 - DNA, 25 bp, Homo sapien
aatagaggcaatgccctttcaactg

SEQ ID NO: 2602598 - DNA, 25 bp, Homo sapien
tagtatatccaaccacgcaaatctt

SEQ ID NO: 2602599 - DNA, 25 bp, Homo sapien
taaagcttggagttgcactgatgtc

SEQ ID NO: 2602600 - DNA, 25 bp, Homo sapien
gtccaggctagttttctgactatca

SEQ ID NO: 2602601 - DNA, 25 bp, Homo sapien
taactaaacataagaccgtgaccca

SEQ ID NO: 2602602 - DNA, 25 bp, Homo sapien
tccttgaaacaagcggtaactgaat

SEQ ID NO: 2602603 - DNA, 25 bp, Homo sapien
gtaactgaatattactaagacagtt

SEQ ID NO: 2602604 - DNA, 25 bp, Homo sapien
tgagaaaactgcagttggggaactc

SEQ ID NO: 2602605 - DNA, 25 bp, Homo sapien
caagcttctcttgagttcctgacag

SEQ ID NO: 2602606 - DNA, 25 bp, Homo sapien
gctgtctgtgagtttttgccttacg

SEQ ID NO: 2602607 - DNA, 25 bp, Homo sapien
tcagaatcacagtagcaaagtaggg

SEQ ID NO: 2602608 - DNA, 25 bp, Homo sapien
tttcctctcagaatcacagtagcaa

SEQ ID NO: 2602609 - DNA, 25 bp, Homo sapien
gaattgctgtctgtgagtttttgcc

SEQ ID NO: 2602610 - DNA, 25 bp, Homo sapien
cctgaaggaacatgaactgctccat

SEQ ID NO: 2602611 - DNA, 25 bp, Homo sapien
tttacctgaaggaacatgaactgct

SEQ ID NO: 2602612 - DNA, 25 bp, Homo sapien
catccttaaaaataccctggggcat

SEQ ID NO: 2602613 - DNA, 25 bp, Homo sapien
tgctccatccttaaaaataccctgg

SEQ ID NO: 2602614 - DNA, 25 bp, Homo sapien
gctttgtagagcagttgagacactg

SEQ ID NO: 2602615 - DNA, 25 bp, Homo sapien
ggctttgtagagcagttgagacact

SEQ ID NO: 2602616 - DNA, 25 bp, Homo sapien
gttgagacactggatcttgaggaag

SEQ ID NO: 2602617 - DNA, 25 bp, Homo sapien
cagttgagacactggatcttgagga

SEQ ID NO: 2602618 - DNA, 25 bp, Homo sapien
tgccatctttaaaaggaatggggtc

SEQ ID NO: 2602619 - DNA, 25 bp, Homo sapien
catctttaaaaggaatggggtcatt

SEQ ID NO: 2602620 - DNA, 25 bp, Homo sapien
attgccatctttaaaaggaatgggg

SEQ ID NO: 2602621 - DNA, 25 bp, Homo sapien
aaaggaatggggtcatttttcagct

SEQ ID NO: 2602622 - DNA, 25 bp, Homo sapien
taaactgtaagtgtggtaactgctt

SEQ ID NO: 2602623 - DNA, 25 bp, Homo sapien
tttttgtccctgagagcctaaactg

SEQ ID NO: 2602624 - DNA, 25 bp, Homo sapien
tctgagaaaatcttggcctccatta

SEQ ID NO: 2602625 - DNA, 25 bp, Homo sapien
tgagaaaatcttggcctccattaag

SEQ ID NO: 2602626 - DNA, 25 bp, Homo sapien
tagatatccatatcaggtccctcca

SEQ ID NO: 2602627 - DNA, 25 bp, Homo sapien
ctacagcgatttgtgaggtccctga

SEQ ID NO: 2602628 - DNA, 25 bp, Homo sapien
agagagaattcagtcctccttccct

SEQ ID NO: 2602629 - DNA, 25 bp, Homo sapien
ttctgtggaccacttgtgctccctc

SEQ ID NO: 2602630 - DNA, 25 bp, Homo sapien
tgtgaattgcacaatgaatgttctt

SEQ ID NO: 2602631 - DNA, 25 bp, Homo sapien
ggacccctttatctcttgtgaattg

SEQ ID NO: 2602632 - DNA, 25 bp, Homo sapien
gaatgttcttatattcacaaccctc

SEQ ID NO: 2602633 - DNA, 25 bp, Homo sapien
tcatactcctccaggtatactcttc

SEQ ID NO: 2602634 - DNA, 25 bp, Homo sapien
cggcagcttcgggttgagcagatct

SEQ ID NO: 2602635 - DNA, 25 bp, Homo sapien
actcgccgtcggcagcttcgggttg

SEQ ID NO: 2602636 - DNA, 25 bp, Homo sapien
tctgtgtcgccactgggagagtagg

SEQ ID NO: 2602637 - DNA, 25 bp, Homo sapien
gggctggtttgcagctcgtactcgc

SEQ ID NO: 2602638 - DNA, 25 bp, Homo sapien
gagccgtcggtgttgactttaacca

SEQ ID NO: 2602639 - DNA, 25 bp, Homo sapien
gatagtcattacaacccaggcggtg

SEQ ID NO: 2602640 - DNA, 25 bp, Homo sapien
ttaaccatgcgctccaatgtgcggg

SEQ ID NO: 2602641 - DNA, 25 bp, Homo sapien
tcatccagagacttggtccccgaga

SEQ ID NO: 2602642 - DNA, 25 bp, Homo sapien
ggatggcggctcctggctgttagcg

SEQ ID NO: 2602643 - DNA, 25 bp, Homo sapien
tacaggcgaacttcgccccgaggct

SEQ ID NO: 2602644 - DNA, 25 bp, Homo sapien
ccaaggactacaggcgaacttcgcc

SEQ ID NO: 2602645 - DNA, 25 bp, Homo sapien
ttagcggccggttgagtccgctctg

SEQ ID NO: 2602646 - DNA, 25 bp, Homo sapien
taatgtggatttacagtcgtttccc

SEQ ID NO: 2602647 - DNA, 25 bp, Homo sapien
cggcagctcgaacagtaatgtggat

SEQ ID NO: 2602648 - DNA, 25 bp, Homo sapien
tttcccgcaggagtcggccgagacg

SEQ ID NO: 2602649 - DNA, 25 bp, Homo sapien
tgccagcagccggaggagagcaatg

SEQ ID NO: 2602650 - DNA, 25 bp, Homo sapien
cgcgaccagccttagagcgcggcgg

SEQ ID NO: 2602651 - DNA, 25 bp, Homo sapien
tagcggagaaacattttttgcacca

SEQ ID NO: 2602652 - DNA, 25 bp, Homo sapien
gcaggttttttggtctcgagtagcg

SEQ ID NO: 2602653 - DNA, 25 bp, Homo sapien
acattttttgcaccaccgcgaccag

SEQ ID NO: 2602654 - DNA, 25 bp, Homo sapien
ttcaatcacaaggttcagcagctca

SEQ ID NO: 2602655 - DNA, 25 bp, Homo sapien
tcaatcacaaggttcagcagctcag

SEQ ID NO: 2602656 - DNA, 25 bp, Homo sapien
gctcagaaaatttgtacccttccat

SEQ ID NO: 2602657 - DNA, 25 bp, Homo sapien
cagaatgggttctggtaaatcataa

SEQ ID NO: 2602658 - DNA, 25 bp, Homo sapien
atcataaaactgatattctgggaag

SEQ ID NO: 2602659 - DNA, 25 bp, Homo sapien
tttctctaagggtcagaatgggttc

SEQ ID NO: 2602660 - DNA, 25 bp, Homo sapien
tcacagaaggtgttaatcttttctc

SEQ ID NO: 2602661 - DNA, 25 bp, Homo sapien
gatattggtttacaggaaattcata

SEQ ID NO: 2602662 - DNA, 25 bp, Homo sapien
cagatattggtttacaggaaattca

SEQ ID NO: 2602663 - DNA, 25 bp, Homo sapien
caggaaattcatacactcttggaaa

SEQ ID NO: 2602664 - DNA, 25 bp, Homo sapien
atattggtttacaggaaattcatac

SEQ ID NO: 2602665 - DNA, 25 bp, Homo sapien
catctccataagattaaatactctt

SEQ ID NO: 2602666 - DNA, 25 bp, Homo sapien
atctccataagattaaatactcttc

SEQ ID NO: 2602667 - DNA, 25 bp, Homo sapien
tctccataagattaaatactcttct

SEQ ID NO: 2602668 - DNA, 25 bp, Homo sapien
taggcattatatttaactgctcttt

SEQ ID NO: 2602669 - DNA, 25 bp, Homo sapien
caaccagtcatcaagttttgtctgt

SEQ ID NO: 2602670 - DNA, 25 bp, Homo sapien
tcccagtattcaaccagtcatcaag

SEQ ID NO: 2602671 - DNA, 25 bp, Homo sapien
aatgactcccagtattcaaccagtc

SEQ ID NO: 2602672 - DNA, 25 bp, Homo sapien
gcatggtccccaaagttcatcgcca

SEQ ID NO: 2602673 - DNA, 25 bp, Homo sapien
catggtccccaaagttcatcgccat

SEQ ID NO: 2602674 - DNA, 25 bp, Homo sapien
tggcatggtccccaaagttcatcgc

SEQ ID NO: 2602675 - DNA, 25 bp, Homo sapien
ctggcatggtccccaaagttcatcg

SEQ ID NO: 2602676 - DNA, 25 bp, Homo sapien
gatcacatcatcatggcggaacccg

SEQ ID NO: 2602677 - DNA, 25 bp, Homo sapien
ggtacaggccctcttaatggcacgg

SEQ ID NO: 2602678 - DNA, 25 bp, Homo sapien
catcggatagacctgcatggatctc

SEQ ID NO: 2602679 - DNA, 25 bp, Homo sapien
gctgccgccgttcctgaggacttca

SEQ ID NO: 2602680 - DNA, 25 bp, Homo sapien
gttctgcatttaaagtcccggccac

SEQ ID NO: 2602681 - DNA, 25 bp, Homo sapien
tctgcatttaaagtcccggccacag

SEQ ID NO: 2602682 - DNA, 25 bp, Homo sapien
ctgttctgcatttaaagtcccggcc

SEQ ID NO: 2602683 - DNA, 25 bp, Homo sapien
acaggcccatactggccggcttctg

SEQ ID NO: 2602684 - DNA, 25 bp, Homo sapien
gggttcaggcatgtaatacacagct

SEQ ID NO: 2602685 - DNA, 25 bp, Homo sapien
cagaagaggttgcatgccctggacc

SEQ ID NO: 2602686 - DNA, 25 bp, Homo sapien
tagaggtgttgagtatggcagtccc

SEQ ID NO: 2602687 - DNA, 25 bp, Homo sapien
caaagaccaggtggatagatccctg

SEQ ID NO: 2602688 - DNA, 25 bp, Homo sapien
tcctcgggcatcactaactctttct

SEQ ID NO: 2602689 - DNA, 25 bp, Homo sapien
tctccttgggcatcactagatcttt

SEQ ID NO: 2602690 - DNA, 25 bp, Homo sapien
gctgtgtctcctgctaaacgtcagg

SEQ ID NO: 2602691 - DNA, 25 bp, Homo sapien
atctcctcgggcatcactaactctt

SEQ ID NO: 2602692 - DNA, 25 bp, Homo sapien
gctcttgctaaacctcagtgaggct

SEQ ID NO: 2602693 - DNA, 25 bp, Homo sapien
ggctcttgctaaacctcagtgaggc

SEQ ID NO: 2602694 - DNA, 25 bp, Homo sapien
catggctcttgctatcctccagagg

SEQ ID NO: 2602695 - DNA, 25 bp, Homo sapien
tggctcttgctaaacctcagtgagg

SEQ ID NO: 2602696 - DNA, 25 bp, Homo sapien
tgtttccatgggctatttttcacac

SEQ ID NO: 2602697 - DNA, 25 bp, Homo sapien
gtgtttccatgggctatttttcaca

SEQ ID NO: 2602698 - DNA, 25 bp, Homo sapien
aggcttctgttgctgggattctgag

SEQ ID NO: 2602699 - DNA, 25 bp, Homo sapien
ctgggattctgaggcctttttcctt

SEQ ID NO: 2602700 - DNA, 25 bp, Homo sapien
gagcatgaggcaggcttctgttgct

SEQ ID NO: 2602701 - DNA, 25 bp, Homo sapien
ctggagcatgaggcaggcttctgtt

SEQ ID NO: 2602702 - DNA, 25 bp, Homo sapien
aattcatggcattaccctgggcggc

SEQ ID NO: 2602703 - DNA, 25 bp, Homo sapien
ttgttcctggaaattcatggcatta

SEQ ID NO: 2602704 - DNA, 25 bp, Homo sapien
aatcaatgagtttacgctgggtcaa

SEQ ID NO: 2602705 - DNA, 25 bp, Homo sapien
gactctcttgcatttcgacgcgctt

SEQ ID NO: 2602706 - DNA, 25 bp, Homo sapien
tcagaattgaggtgttacttcttgt

SEQ ID NO: 2602707 - DNA, 25 bp, Homo sapien
cagaattgaggtgttacttcttgtg

SEQ ID NO: 2602708 - DNA, 25 bp, Homo sapien
gctttggcagatcttctaatgtcac

SEQ ID NO: 2602709 - DNA, 25 bp, Homo sapien
ggcagatcttctaatgtcacaggtt

SEQ ID NO: 2602710 - DNA, 25 bp, Homo sapien
tgcttgccccagtctagctctattt

SEQ ID NO: 2602711 - DNA, 25 bp, Homo sapien
agtctagctctatttttaacccaat

SEQ ID NO: 2602712 - DNA, 25 bp, Homo sapien
taacccaatttatcctcccaagaga

SEQ ID NO: 2602713 - DNA, 25 bp, Homo sapien
catccataacctggtgcccccaatg

SEQ ID NO: 2602714 - DNA, 25 bp, Homo sapien
ccttgcagcagttgccttgggtaag

SEQ ID NO: 2602715 - DNA, 25 bp, Homo sapien
taggcccagaaaatccctgacaaac

SEQ ID NO: 2602716 - DNA, 25 bp, Homo sapien
ttgaaggcagatctaaccaaccacc

SEQ ID NO: 2602717 - DNA, 25 bp, Homo sapien
caaacattgattttggtgagctggg

SEQ ID NO: 2602718 - DNA, 25 bp, Homo sapien
gatacacactacacagaagacacag

SEQ ID NO: 2602719 - DNA, 25 bp, Homo sapien
aaacctgccctgagatacacactac

SEQ ID NO: 2602720 - DNA, 25 bp, Homo sapien
ctgagcaaacctgccctgagataca

SEQ ID NO: 2602721 - DNA, 25 bp, Homo sapien
agcaaacctgccctgagatacacac

SEQ ID NO: 2602722 - DNA, 25 bp, Homo sapien
cacatgctggcatggccattatttg

SEQ ID NO: 2602723 - DNA, 25 bp, Homo sapien
aatcatgtggaaggtgcctaggtgc

SEQ ID NO: 2602724 - DNA, 25 bp, Homo sapien
aatgtgatcttcattagaatgtatt

SEQ ID NO: 2602725 - DNA, 25 bp, Homo sapien
tctgcactgtgagcagtaaatcatg

SEQ ID NO: 2602726 - DNA, 25 bp, Homo sapien
tgtaaaatgtcagcctgaggctatg

SEQ ID NO: 2602727 - DNA, 25 bp, Homo sapien
agtttaactctactccctctggtgg

SEQ ID NO: 2602728 - DNA, 25 bp, Homo sapien
tacacagccctttgttgcgttgcta

SEQ ID NO: 2602729 - DNA, 25 bp, Homo sapien
tagtctgttaagaagtacacagccc

SEQ ID NO: 2602730 - DNA, 25 bp, Homo sapien
catgttccatcatagctgatccaga

SEQ ID NO: 2602731 - DNA, 25 bp, Homo sapien
gagttgaggcattccacatgttcca

SEQ ID NO: 2602732 - DNA, 25 bp, Homo sapien
ttctttagtggagttgaggcattcc

SEQ ID NO: 2602733 - DNA, 25 bp, Homo sapien
catcatagctgatccagatacagaa

SEQ ID NO: 2602734 - DNA, 25 bp, Homo sapien
gaccctcaaagatatcacggtgaat

SEQ ID NO: 2602735 - DNA, 25 bp, Homo sapien
ccctcaaagatatcacggtgaatat

SEQ ID NO: 2602736 - DNA, 25 bp, Homo sapien
tgaccctcaaagatatcacggtgaa

SEQ ID NO: 2602737 - DNA, 25 bp, Homo sapien
tcaaagatatcacggtgaatattca

SEQ ID NO: 2602738 - DNA, 25 bp, Homo sapien
caatagacaggttagagctttctga

SEQ ID NO: 2602739 - DNA, 25 bp, Homo sapien
tagacattgtttgtcattgcgcatc

SEQ ID NO: 2602740 - DNA, 25 bp, Homo sapien
ttgtcattgcgcatccttacaatgg

SEQ ID NO: 2602741 - DNA, 25 bp, Homo sapien
tagccccatgaccaccactatatag

SEQ ID NO: 2602742 - DNA, 25 bp, Homo sapien
gatattctcttatcccatatgcagc

SEQ ID NO: 2602743 - DNA, 25 bp, Homo sapien
ttcctttgcatcagttctctgccat

SEQ ID NO: 2602744 - DNA, 25 bp, Homo sapien
agaataattcgggtattcctttgca

SEQ ID NO: 2602745 - DNA, 25 bp, Homo sapien
cccatatgcagcaaataacaagcac

SEQ ID NO: 2602746 - DNA, 25 bp, Homo sapien
gagaaggcagcactagtgtcagcca

SEQ ID NO: 2602747 - DNA, 25 bp, Homo sapien
agaaggcagcactagtgtcagccat

SEQ ID NO: 2602748 - DNA, 25 bp, Homo sapien
acacagtaatcatctggtagctcag

SEQ ID NO: 2602749 - DNA, 25 bp, Homo sapien
agtagacacagtaatcatctggtag

SEQ ID NO: 2602750 - DNA, 25 bp, Homo sapien
tctggtagctcagtaatagttacat

SEQ ID NO: 2602751 - DNA, 25 bp, Homo sapien
gctcagtaatagttacatcccttct

SEQ ID NO: 2602752 - DNA, 25 bp, Homo sapien
taataatccatgacggaggtttcat

SEQ ID NO: 2602753 - DNA, 25 bp, Homo sapien
tggctttaataatccatgacggagg

SEQ ID NO: 2602754 - DNA, 25 bp, Homo sapien
gctttaataatccatgacggaggtt

SEQ ID NO: 2602755 - DNA, 25 bp, Homo sapien
cttggctttaataatccatgacgga

SEQ ID NO: 2602756 - DNA, 25 bp, Homo sapien
agtaaaaaggcactgaatatagaag

SEQ ID NO: 2602757 - DNA, 25 bp, Homo sapien
aaaaggcactgaatatagaaggcat

SEQ ID NO: 2602758 - DNA, 25 bp, Homo sapien
aaaaaggcactgaatatagaaggca

SEQ ID NO: 2602759 - DNA, 25 bp, Homo sapien
taaaaaggcactgaatatagaaggc

SEQ ID NO: 2602760 - DNA, 25 bp, Homo sapien
tcagtaaaaacttttactggcaaga

SEQ ID NO: 2602761 - DNA, 25 bp, Homo sapien
tccacaatagcagaaatacactcag

SEQ ID NO: 2602762 - DNA, 25 bp, Homo sapien
atcatcatccacaatagcagaaata

SEQ ID NO: 2602763 - DNA, 25 bp, Homo sapien
catccacaatagcagaaatacactc

SEQ ID NO: 2602764 - DNA, 25 bp, Homo sapien
ttcagggcaaagtgccgcacacaca

SEQ ID NO: 2602765 - DNA, 25 bp, Homo sapien
atttcagggcaaagtgccgcacaca

SEQ ID NO: 2602766 - DNA, 25 bp, Homo sapien
catttcagggcaaagtgccgcacac

SEQ ID NO: 2602767 - DNA, 25 bp, Homo sapien
tttcagggcaaagtgccgcacacac

SEQ ID NO: 2602768 - DNA, 25 bp, Homo sapien
ctgattgtcgagttgctgcagattc

SEQ ID NO: 2602769 - DNA, 25 bp, Homo sapien
gattgtcgagttgctgcagattcat

SEQ ID NO: 2602770 - DNA, 25 bp, Homo sapien
tgattgtcgagttgctgcagattca

SEQ ID NO: 2602771 - DNA, 25 bp, Homo sapien
tgttgacaaaggagacacgacagag

SEQ ID NO: 2602772 - DNA, 25 bp, Homo sapien
tctgctctagaacacgctctctggt

SEQ ID NO: 2602773 - DNA, 25 bp, Homo sapien
gagacctggttttgatcagagaagc

SEQ ID NO: 2602774 - DNA, 25 bp, Homo sapien
gagagatatccatccaataggttga

SEQ ID NO: 2602775 - DNA, 25 bp, Homo sapien
tgcaggccattgcaaatggccatag

SEQ ID NO: 2602776 - DNA, 25 bp, Homo sapien
aggccattgcaaatggccatagcca

SEQ ID NO: 2602777 - DNA, 25 bp, Homo sapien
tttgcaggccattgcaaatggccat

SEQ ID NO: 2602778 - DNA, 25 bp, Homo sapien
agtttgcaggccattgcaaatggcc

SEQ ID NO: 2602779 - DNA, 25 bp, Homo sapien
gggattgaggttgagttcaacagca

SEQ ID NO: 2602780 - DNA, 25 bp, Homo sapien
tgaggttgagttcaacagcatgaac

SEQ ID NO: 2602781 - DNA, 25 bp, Homo sapien
gattgaggttgagttcaacagcatg

SEQ ID NO: 2602782 - DNA, 25 bp, Homo sapien
ttgagttcaacagcatgaactcccc

SEQ ID NO: 2602783 - DNA, 25 bp, Homo sapien
cactggtggcagaatttaaacattc

SEQ ID NO: 2602784 - DNA, 25 bp, Homo sapien
tatttcggccagaaactctgtagat

SEQ ID NO: 2602785 - DNA, 25 bp, Homo sapien
taaacattcgcttggttgcagattg

SEQ ID NO: 2602786 - DNA, 25 bp, Homo sapien
aactacatggcttaaatatttcggc

SEQ ID NO: 2602787 - DNA, 25 bp, Homo sapien
cagtggaataggtagtctgaagatt

SEQ ID NO: 2602788 - DNA, 25 bp, Homo sapien
agacaggaactgacttgctttataa

SEQ ID NO: 2602789 - DNA, 25 bp, Homo sapien
gaagatttaccaaaccaatagacag

SEQ ID NO: 2602790 - DNA, 25 bp, Homo sapien
cagccataggtccaagatcatcagt

SEQ ID NO: 2602791 - DNA, 25 bp, Homo sapien
cactaaagatatttggaaagcaaac

SEQ ID NO: 2602792 - DNA, 25 bp, Homo sapien
catacactaaagatatttggaaagc

SEQ ID NO: 2602793 - DNA, 25 bp, Homo sapien
tacactaaagatatttggaaagcaa

SEQ ID NO: 2602794 - DNA, 25 bp, Homo sapien
tcatacactaaagatatttggaaag

SEQ ID NO: 2602795 - DNA, 25 bp, Homo sapien
gctccagattgatggttgaatgcct

SEQ ID NO: 2602796 - DNA, 25 bp, Homo sapien
cagcagcaagtgtaccatttgaagg

SEQ ID NO: 2602797 - DNA, 25 bp, Homo sapien
tttaacggcctcataagaatgcaga

SEQ ID NO: 2602798 - DNA, 25 bp, Homo sapien
tgaatgccttcaggacagcagcaag

SEQ ID NO: 2602799 - DNA, 25 bp, Homo sapien
aaattctaggtgtcttcttgcccca

SEQ ID NO: 2602800 - DNA, 25 bp, Homo sapien
tgaggtagattgtctcgggagccac

SEQ ID NO: 2602801 - DNA, 25 bp, Homo sapien
tgatgatgaagaccagtagacacct

SEQ ID NO: 2602802 - DNA, 25 bp, Homo sapien
tctacccaatccgaaagtctacagg

SEQ ID NO: 2602803 - DNA, 25 bp, Homo sapien
gaatatatgctgaaccagaatacac

SEQ ID NO: 2602804 - DNA, 25 bp, Homo sapien
caaaggtaattgtgaatatatgctg

SEQ ID NO: 2602805 - DNA, 25 bp, Homo sapien
taattgtgaatatatgctgaaccag

SEQ ID NO: 2602806 - DNA, 25 bp, Homo sapien
tgaaccagaatacacatccacaatc

SEQ ID NO: 2602807 - DNA, 25 bp, Homo sapien
caattatgcatccaacgaagtgagg

SEQ ID NO: 2602808 - DNA, 25 bp, Homo sapien
tacacagtccaaggcgatccatggg

SEQ ID NO: 2602809 - DNA, 25 bp, Homo sapien
ggcaatgccagcaattcaaacgtgc

SEQ ID NO: 2602810 - DNA, 25 bp, Homo sapien
gaaaacgctgtcgttcaccatccct

SEQ ID NO: 2602811 - DNA, 25 bp, Homo sapien
cacatcacataaagtttagcatttt

SEQ ID NO: 2602812 - DNA, 25 bp, Homo sapien
acatcacataaagtttagcatttta

SEQ ID NO: 2602813 - DNA, 25 bp, Homo sapien
tacacatcacataaagtttagcatt

SEQ ID NO: 2602814 - DNA, 25 bp, Homo sapien
acacatcacataaagtttagcattt

SEQ ID NO: 2602815 - DNA, 25 bp, Homo sapien
tatagtctagcctcgctggcctgct

SEQ ID NO: 2602816 - DNA, 25 bp, Homo sapien
tcttactagcacgagaacttagagt

SEQ ID NO: 2602817 - DNA, 25 bp, Homo sapien
ttatttcttagaggcccagtcatca

SEQ ID NO: 2602818 - DNA, 25 bp, Homo sapien
gctatgaattgtcaccctgcccaca

SEQ ID NO: 2602819 - DNA, 25 bp, Homo sapien
tcaaacctgtgtacctaaggcaaaa

SEQ ID NO: 2602820 - DNA, 25 bp, Homo sapien
taagggtcagatatgttccagggtc

SEQ ID NO: 2602821 - DNA, 25 bp, Homo sapien
tacacaccttaggatttgtgggcca

SEQ ID NO: 2602822 - DNA, 25 bp, Homo sapien
acacaggttggtggctctggtcact

SEQ ID NO: 2602823 - DNA, 25 bp, Homo sapien
tgtgtctatcacacgaaccgctggg

SEQ ID NO: 2602824 - DNA, 25 bp, Homo sapien
cagctccatgattgacagcgtgagt

SEQ ID NO: 2602825 - DNA, 25 bp, Homo sapien
tttgctatagatctcccagacgcgc

SEQ ID NO: 2602826 - DNA, 25 bp, Homo sapien
tattatacaagggaaccggagtgga

SEQ ID NO: 2602827 - DNA, 25 bp, Homo sapien
tcaggtaacgttgcaacaggaaggg

SEQ ID NO: 2602828 - DNA, 25 bp, Homo sapien
gaaatgatgtgggccttcaaaaatg

SEQ ID NO: 2602829 - DNA, 25 bp, Homo sapien
tgaaaacagcaggatcaggtaacgt

SEQ ID NO: 2602830 - DNA, 25 bp, Homo sapien
caggatcaggtaacgttgcaacagg

SEQ ID NO: 2602831 - DNA, 25 bp, Homo sapien
atggatgaggctctatggctgtata

SEQ ID NO: 2602832 - DNA, 25 bp, Homo sapien
tggatgaggctctatggctgtatac

SEQ ID NO: 2602833 - DNA, 25 bp, Homo sapien
tgtttggtgcaatatatgtcagcat

SEQ ID NO: 2602834 - DNA, 25 bp, Homo sapien
ggggttggagctctgtttggtgcaa

SEQ ID NO: 2602835 - DNA, 25 bp, Homo sapien
tgaattttcatagattgcagcattt

SEQ ID NO: 2602836 - DNA, 25 bp, Homo sapien
tctaatttgtgcacaatctctgcag

SEQ ID NO: 2602837 - DNA, 25 bp, Homo sapien
tgcagcatttctaatttgtgcacaa

SEQ ID NO: 2602838 - DNA, 25 bp, Homo sapien
gaattttcatagattgcagcatttc

SEQ ID NO: 2602839 - DNA, 25 bp, Homo sapien
ggcctgcgttatctggatttctccc

SEQ ID NO: 2602840 - DNA, 25 bp, Homo sapien
tgggctgaggtagaaattggcctgc

SEQ ID NO: 2602841 - DNA, 25 bp, Homo sapien
gaggtagaaattggcctgcgttatc

SEQ ID NO: 2602842 - DNA, 25 bp, Homo sapien
tccttgtcgtttgtgggctgaggta

SEQ ID NO: 2602843 - DNA, 25 bp, Homo sapien
ggtttgatcctgtctggcgagcatc

SEQ ID NO: 2602844 - DNA, 25 bp, Homo sapien
gtctggcgagcatcagcatctttcc

SEQ ID NO: 2602845 - DNA, 25 bp, Homo sapien
ttatcgacaagcatccccattcagc

SEQ ID NO: 2602846 - DNA, 25 bp, Homo sapien
catatgcatctcagtggtttgatcc

SEQ ID NO: 2602847 - DNA, 25 bp, Homo sapien
ctgggtccaacatcaacagaggcca

SEQ ID NO: 2602848 - DNA, 25 bp, Homo sapien
tgggtccaacatcaacagaggccat

SEQ ID NO: 2602849 - DNA, 25 bp, Homo sapien
aataaaatagcaaacctgtccatgc

SEQ ID NO: 2602850 - DNA, 25 bp, Homo sapien
gaataaaatagcaaacctgtccatg

SEQ ID NO: 2602851 - DNA, 25 bp, Homo sapien
aaatagcaaacctgtccatgcactg

SEQ ID NO: 2602852 - DNA, 25 bp, Homo sapien
taaaatagcaaacctgtccatgcac

SEQ ID NO: 2602853 - DNA, 25 bp, Homo sapien
gaacagtgggtactgatagttcatt

SEQ ID NO: 2602854 - DNA, 25 bp, Homo sapien
accagcaagaacagtgggtactgat

SEQ ID NO: 2602855 - DNA, 25 bp, Homo sapien
caagaacagtgggtactgatagttc

SEQ ID NO: 2602856 - DNA, 25 bp, Homo sapien
cagcaagaacagtgggtactgatag

SEQ ID NO: 2602857 - DNA, 25 bp, Homo sapien
tcatctgcaagaacaccgttctaga

SEQ ID NO: 2602858 - DNA, 25 bp, Homo sapien
cgttctagagttgattctaagaggc

SEQ ID NO: 2602859 - DNA, 25 bp, Homo sapien
catttgcccaccttgaacactgctg

SEQ ID NO: 2602860 - DNA, 25 bp, Homo sapien
ggttgttcctactgccatttgccca

SEQ ID NO: 2602861 - DNA, 25 bp, Homo sapien
cactgccagctgggcaggacagctc

SEQ ID NO: 2602862 - DNA, 25 bp, Homo sapien
ctgggcaggacagctcccttcattc

SEQ ID NO: 2602863 - DNA, 25 bp, Homo sapien
caggacagctcccttcattcctcat

SEQ ID NO: 2602864 - DNA, 25 bp, Homo sapien
agctgggcaggacagctcccttcat

SEQ ID NO: 2602865 - DNA, 25 bp, Homo sapien
gcacatccagggtagtacggccata

SEQ ID NO: 2602866 - DNA, 25 bp, Homo sapien
gggcacatccagggtagtacggcca

SEQ ID NO: 2602867 - DNA, 25 bp, Homo sapien
cacatccagggtagtacggccatag

SEQ ID NO: 2602868 - DNA, 25 bp, Homo sapien
ggcacatccagggtagtacggccat

SEQ ID NO: 2602869 - DNA, 25 bp, Homo sapien
cagatccggattatttagaagtttc

SEQ ID NO: 2602870 - DNA, 25 bp, Homo sapien
tgaccgtcattgtgttagacatcac

SEQ ID NO: 2602871 - DNA, 25 bp, Homo sapien
tagaagtttcaaaagtccaccaatc

SEQ ID NO: 2602872 - DNA, 25 bp, Homo sapien
tagatgacgggcctaatgtgaccgt

SEQ ID NO: 2602873 - DNA, 25 bp, Homo sapien
ctcttttttctgtaaacttctcact

SEQ ID NO: 2602874 - DNA, 25 bp, Homo sapien
tactcttttttctgtaaacttctca

SEQ ID NO: 2602875 - DNA, 25 bp, Homo sapien
atacaagggctgttgtagaggagtt

SEQ ID NO: 2602876 - DNA, 25 bp, Homo sapien
aaagaacatagctttcagagctgca

SEQ ID NO: 2602877 - DNA, 25 bp, Homo sapien
tagaggagttgaaatcaagggcgct

SEQ ID NO: 2602878 - DNA, 25 bp, Homo sapien
tcaagggcgctatgaaagaacatag

SEQ ID NO: 2602879 - DNA, 25 bp, Homo sapien
gaactagtggtaaaacatccaagag

SEQ ID NO: 2602880 - DNA, 25 bp, Homo sapien
tgaggtttggtggatccacgcccct

SEQ ID NO: 2602881 - DNA, 25 bp, Homo sapien
caacaggtagtgaaacagcttaaga

SEQ ID NO: 2602882 - DNA, 25 bp, Homo sapien
ccaagagcactaggattgtgataca

SEQ ID NO: 2602883 - DNA, 25 bp, Homo sapien
cacacagctgagttcttagagttga

SEQ ID NO: 2602884 - DNA, 25 bp, Homo sapien
tagaatcttcttacacacgctgagt

SEQ ID NO: 2602885 - DNA, 25 bp, Homo sapien
tctcctggcacgaatataaagcaca

SEQ ID NO: 2602886 - DNA, 25 bp, Homo sapien
tgggctcctgctttattgtctctgt

SEQ ID NO: 2602887 - DNA, 25 bp, Homo sapien
gttgtagtttataaatattgcaaga

SEQ ID NO: 2602888 - DNA, 25 bp, Homo sapien
gtagtttataaatattgcaagacat

SEQ ID NO: 2602889 - DNA, 25 bp, Homo sapien
tcctgttgtagtttataaatattgc

SEQ ID NO: 2602890 - DNA, 25 bp, Homo sapien
tggtataaaaacatttcctgttgta

SEQ ID NO: 2602891 - DNA, 25 bp, Homo sapien
ttccatcatatcagagttacttcca

SEQ ID NO: 2602892 - DNA, 25 bp, Homo sapien
ccatcatatcagagttacttccaga

SEQ ID NO: 2602893 - DNA, 25 bp, Homo sapien
tccatcatatcagagttacttccag

SEQ ID NO: 2602894 - DNA, 25 bp, Homo sapien
catcatatcagagttacttccagaa

SEQ ID NO: 2602895 - DNA, 25 bp, Homo sapien
tgatcgtgacgatcctgaagacttg

SEQ ID NO: 2602896 - DNA, 25 bp, Homo sapien
ctttgatcgtgacgatcctgaagac

SEQ ID NO: 2602897 - DNA, 25 bp, Homo sapien
ttgatcgtgacgatcctgaagactt

SEQ ID NO: 2602898 - DNA, 25 bp, Homo sapien
ctctttgatcgtgacgatcctgaag

SEQ ID NO: 2602899 - DNA, 25 bp, Homo sapien
attttcattagacgcatcttcattt

SEQ ID NO: 2602900 - DNA, 25 bp, Homo sapien
catctgattctacatactttgttac

SEQ ID NO: 2602901 - DNA, 25 bp, Homo sapien
ttcattagacgcatcttcatttaca

SEQ ID NO: 2602902 - DNA, 25 bp, Homo sapien
agcagtgcagctcacaatcccatga

SEQ ID NO: 2602903 - DNA, 25 bp, Homo sapien
tttgaaaatgattgacctgttgtcc

SEQ ID NO: 2602904 - DNA, 25 bp, Homo sapien
caatgaagggtgtctataaatggaa

SEQ ID NO: 2602905 - DNA, 25 bp, Homo sapien
gaacttgcaatgaagggtgtctata

SEQ ID NO: 2602906 - DNA, 25 bp, Homo sapien
tagataggcccctggctgaactgaa

SEQ ID NO: 2602907 - DNA, 25 bp, Homo sapien
ctagataggcccctggctgaactga

SEQ ID NO: 2602908 - DNA, 25 bp, Homo sapien
cctagataggcccctggctgaactg

SEQ ID NO: 2602909 - DNA, 25 bp, Homo sapien
agataggcccctggctgaactgaat

SEQ ID NO: 2602910 - DNA, 25 bp, Homo sapien
tctgagtcacggctaatatcatcac

SEQ ID NO: 2602911 - DNA, 25 bp, Homo sapien
gagtcacggctaatatcatcactca

SEQ ID NO: 2602912 - DNA, 25 bp, Homo sapien
ccattccatctgagtcacggctaat

SEQ ID NO: 2602913 - DNA, 25 bp, Homo sapien
tccatctgagtcacggctaatatca

SEQ ID NO: 2602914 - DNA, 25 bp, Homo sapien
tgtggacaactcctttcgaccaagg

SEQ ID NO: 2602915 - DNA, 25 bp, Homo sapien
cagcatccatcgctcgaaactcgga

SEQ ID NO: 2602916 - DNA, 25 bp, Homo sapien
tcgaccaaggttgcgtagaatgcat

SEQ ID NO: 2602917 - DNA, 25 bp, Homo sapien
tacgctgttacatgcagtgaccaag

SEQ ID NO: 2602918 - DNA, 25 bp, Homo sapien
gctcactatctacctgttttcttga

SEQ ID NO: 2602919 - DNA, 25 bp, Homo sapien
acattctgatgcatgtgctcactat

SEQ ID NO: 2602920 - DNA, 25 bp, Homo sapien
gcatgtgctcactatctacctgttt

SEQ ID NO: 2602921 - DNA, 25 bp, Homo sapien
gatttcttatgttcaccaccggtac

SEQ ID NO: 2602922 - DNA, 25 bp, Homo sapien
tagtttctgtcggtcgcctcaaggg

SEQ ID NO: 2602923 - DNA, 25 bp, Homo sapien
cactgtcagaagaattacgcttatc

SEQ ID NO: 2602924 - DNA, 25 bp, Homo sapien
tcttcagaagtgttggcaggttcat

SEQ ID NO: 2602925 - DNA, 25 bp, Homo sapien
gatcttcgaagatcagattcctcta

SEQ ID NO: 2602926 - DNA, 25 bp, Homo sapien
atcagtatctgaagaagaactgtga

SEQ ID NO: 2602927 - DNA, 25 bp, Homo sapien
gaatttcattaatatcagtatctga

SEQ ID NO: 2602928 - DNA, 25 bp, Homo sapien
tgaagaagaactgtgactcatcctg

SEQ ID NO: 2602929 - DNA, 25 bp, Homo sapien
aagaactgtgactcatcctgctcac

SEQ ID NO: 2602930 - DNA, 25 bp, Homo sapien
cctttatcatctttccccgcctgag

SEQ ID NO: 2602931 - DNA, 25 bp, Homo sapien
catctttccccgcctgagtctttaa

SEQ ID NO: 2602932 - DNA, 25 bp, Homo sapien
tttatcatctttccccgcctgagtc

SEQ ID NO: 2602933 - DNA, 25 bp, Homo sapien
tttccccgcctgagtctttaaatca

SEQ ID NO: 2602934 - DNA, 25 bp, Homo sapien
tcaaaatctgagccagatgtagaac

SEQ ID NO: 2602935 - DNA, 25 bp, Homo sapien
caattttactcatgctctttatctc

SEQ ID NO: 2602936 - DNA, 25 bp, Homo sapien
ccaattttactcatgctctttatct

SEQ ID NO: 2602937 - DNA, 25 bp, Homo sapien
aattttactcatgctctttatctct

SEQ ID NO: 2602938 - DNA, 25 bp, Homo sapien
ttttactcatgctctttatctcttt

SEQ ID NO: 2602939 - DNA, 25 bp, Homo sapien
caaatttttgtgcccttgattatcc

SEQ ID NO: 2602940 - DNA, 25 bp, Homo sapien
aatttttgtgcccttgattatccat

SEQ ID NO: 2602941 - DNA, 25 bp, Homo sapien
aaatttttgtgcccttgattatcca

SEQ ID NO: 2602942 - DNA, 25 bp, Homo sapien
tggtcgtgtctttatcaactgtgcc

SEQ ID NO: 2602943 - DNA, 25 bp, Homo sapien
gacaaatttcttctcgctcaggtaa

SEQ ID NO: 2602944 - DNA, 25 bp, Homo sapien
ccatcagtggaagcacttgcttgct

SEQ ID NO: 2602945 - DNA, 25 bp, Homo sapien
gaaagcttatcgacaccatcagtgg

SEQ ID NO: 2602946 - DNA, 25 bp, Homo sapien
gcttccctcacctatagaattctga

SEQ ID NO: 2602947 - DNA, 25 bp, Homo sapien
tgtgaagacagcactaaattttcag

SEQ ID NO: 2602948 - DNA, 25 bp, Homo sapien
gaggatgtaatgtcagcttgcttcc

SEQ ID NO: 2602949 - DNA, 25 bp, Homo sapien
ccttttagtgcttgttcttagggag

SEQ ID NO: 2602950 - DNA, 25 bp, Homo sapien
ctattctcaggatcattgtcgtcat

SEQ ID NO: 2602951 - DNA, 25 bp, Homo sapien
cactgtgacaggcactgatttagat

SEQ ID NO: 2602952 - DNA, 25 bp, Homo sapien
ttctcaggatcattgtcgtcatcat

SEQ ID NO: 2602953 - DNA, 25 bp, Homo sapien
cactgatttagataaggcttcatct

SEQ ID NO: 2602954 - DNA, 25 bp, Homo sapien
ccatgcctagggtgtgttataatct

SEQ ID NO: 2602955 - DNA, 25 bp, Homo sapien
gcactcctggtttttacaacctgct

SEQ ID NO: 2602956 - DNA, 25 bp, Homo sapien
actgtgagcgagtctttctaaggca

SEQ ID NO: 2602957 - DNA, 25 bp, Homo sapien
tacaacctgcttgctgttccgttgc

SEQ ID NO: 2602958 - DNA, 25 bp, Homo sapien
tacagagagatacgatcaggtaact

SEQ ID NO: 2602959 - DNA, 25 bp, Homo sapien
taaaatacttgccagttacagagag

SEQ ID NO: 2602960 - DNA, 25 bp, Homo sapien
gaaagtatttgtatccccatcatga

SEQ ID NO: 2602961 - DNA, 25 bp, Homo sapien
taaaaaagtaggcaagcagaatctg

SEQ ID NO: 2602962 - DNA, 25 bp, Homo sapien
tatctactggctggacacctgtgtt

SEQ ID NO: 2602963 - DNA, 25 bp, Homo sapien
tcctgactgggaattctagtagaaa

SEQ ID NO: 2602964 - DNA, 25 bp, Homo sapien
ccatagaaggacaaaggtcaccact

SEQ ID NO: 2602965 - DNA, 25 bp, Homo sapien
ggtcaccactacacatcatatgtct

SEQ ID NO: 2602966 - DNA, 25 bp, Homo sapien
aatctcaacctggagtgagggaggc

SEQ ID NO: 2602967 - DNA, 25 bp, Homo sapien
taaaaataagtgtatttcgcatatt

SEQ ID NO: 2602968 - DNA, 25 bp, Homo sapien
tgcaagaactcaagctttaattttt

SEQ ID NO: 2602969 - DNA, 25 bp, Homo sapien
tatgtatttagaaatgcaagaactc

SEQ ID NO: 2602970 - DNA, 25 bp, Homo sapien
attagaggcacaggccgtgccactc

SEQ ID NO: 2602971 - DNA, 25 bp, Homo sapien
gctcaatattacatcttggggcagg

SEQ ID NO: 2602972 - DNA, 25 bp, Homo sapien
tagcatccaaagcagtcacgactct

SEQ ID NO: 2602973 - DNA, 25 bp, Homo sapien
agtaatggagccactcctccatttt

SEQ ID NO: 2602974 - DNA, 25 bp, Homo sapien
ggccacagagacttcaaggatatca

SEQ ID NO: 2602975 - DNA, 25 bp, Homo sapien
ggagtcacgggccacagagacttca

SEQ ID NO: 2602976 - DNA, 25 bp, Homo sapien
cacttgagaaccagctgaggctggc

SEQ ID NO: 2602977 - DNA, 25 bp, Homo sapien
atcatcacttgagaaccagctgagg

SEQ ID NO: 2602978 - DNA, 25 bp, Homo sapien
catcagaggaaagattggctttaat

SEQ ID NO: 2602979 - DNA, 25 bp, Homo sapien
tcctcatcagaggaaagattggctt

SEQ ID NO: 2602980 - DNA, 25 bp, Homo sapien
cagaggaaagattggctttaatttc

SEQ ID NO: 2602981 - DNA, 25 bp, Homo sapien
ctcatcagaggaaagattggcttta

SEQ ID NO: 2602982 - DNA, 25 bp, Homo sapien
cacagtcaatttgtgccgcaaaagc

SEQ ID NO: 2602983 - DNA, 25 bp, Homo sapien
tcactcacagtcaatttgtgccgca

SEQ ID NO: 2602984 - DNA, 25 bp, Homo sapien
tgtgccgcaaaagcctatgtctgta

SEQ ID NO: 2602985 - DNA, 25 bp, Homo sapien
gattctccgtcactcacagtcaatt

SEQ ID NO: 2602986 - DNA, 25 bp, Homo sapien
catcttcggattcactaacttcttc

SEQ ID NO: 2602987 - DNA, 25 bp, Homo sapien
gttctgggccgctgttcatcttcgg

SEQ ID NO: 2602988 - DNA, 25 bp, Homo sapien
taactcctgattcctgaaaatcaga

SEQ ID NO: 2602989 - DNA, 25 bp, Homo sapien
tcactaacttcttcactaactcctg

SEQ ID NO: 2602990 - DNA, 25 bp, Homo sapien
ctgtttatagctccgctgattttct

SEQ ID NO: 2602991 - DNA, 25 bp, Homo sapien
tctgtttatagctccgctgattttc

SEQ ID NO: 2602992 - DNA, 25 bp, Homo sapien
tttctgtttatagctccgctgattt

SEQ ID NO: 2602993 - DNA, 25 bp, Homo sapien
tttatagctccgctgattttcttcc

SEQ ID NO: 2602994 - DNA, 25 bp, Homo sapien
tcatcattttcatcttcctcctcct

SEQ ID NO: 2602995 - DNA, 25 bp, Homo sapien
catcattttcatcttcctcctcctc

SEQ ID NO: 2602996 - DNA, 25 bp, Homo sapien
atcattttcatcttcctcctcctct

SEQ ID NO: 2602997 - DNA, 25 bp, Homo sapien
cttggaatcatcattttcatcttcc

SEQ ID NO: 2602998 - DNA, 25 bp, Homo sapien
acgctccctctcagcaatacgtttt

SEQ ID NO: 2602999 - DNA, 25 bp, Homo sapien
agcaatacgttttcgtctctcttcc

SEQ ID NO: 2603000 - DNA, 25 bp, Homo sapien
caatttttctcgctcacgctccctc

SEQ ID NO: 2603001 - DNA, 25 bp, Homo sapien
agaatcttccgaattttctttctgc

SEQ ID NO: 2603002 - DNA, 25 bp, Homo sapien
tgaacctgcactaaaggttctttgg

SEQ ID NO: 2603003 - DNA, 25 bp, Homo sapien
atatttctatgaacctgcactaaag

SEQ ID NO: 2603004 - DNA, 25 bp, Homo sapien
accaacttggttgttattggacact

SEQ ID NO: 2603005 - DNA, 25 bp, Homo sapien
acacttggtgggtgaagcatcttca

SEQ ID NO: 2603006 - DNA, 25 bp, Homo sapien
cacagactcacagcagcaatcccac

SEQ ID NO: 2603007 - DNA, 25 bp, Homo sapien
agtgggcaagaatgcatcctgaacc

SEQ ID NO: 2603008 - DNA, 25 bp, Homo sapien
atgcatcctgaacctggagatttct

SEQ ID NO: 2603009 - DNA, 25 bp, Homo sapien
cttaccaaggcccatacagtgggca

SEQ ID NO: 2603010 - DNA, 25 bp, Homo sapien
attaagcaatcttacaatattatag

SEQ ID NO: 2603011 - DNA, 25 bp, Homo sapien
tcaccttcgtttaaatatccacaaa

SEQ ID NO: 2603012 - DNA, 25 bp, Homo sapien
ttgtcaccttcgtttaaatatccac

SEQ ID NO: 2603013 - DNA, 25 bp, Homo sapien
ttaagcaatcttacaatattatagc

SEQ ID NO: 2603014 - DNA, 25 bp, Homo sapien
atcttttaatccctcttgccacttc

SEQ ID NO: 2603015 - DNA, 25 bp, Homo sapien
tcaaagcagtattaagaggacaaac

SEQ ID NO: 2603016 - DNA, 25 bp, Homo sapien
ggacaaaccactaacgccgtgctga

SEQ ID NO: 2603017 - DNA, 25 bp, Homo sapien
aaatccagtttgtcacacaaaagaa

SEQ ID NO: 2603018 - DNA, 25 bp, Homo sapien
aaatagtttactatatgaatttcat

SEQ ID NO: 2603019 - DNA, 25 bp, Homo sapien
gctactaaaaacatgtgaatattaa

SEQ ID NO: 2603020 - DNA, 25 bp, Homo sapien
tagtttactatatgaatttcatgtg

SEQ ID NO: 2603021 - DNA, 25 bp, Homo sapien
tattaaatattcccactgaaatatg

SEQ ID NO: 2603022 - DNA, 25 bp, Homo sapien
atgtagcttctctcctgaggacgtt

SEQ ID NO: 2603023 - DNA, 25 bp, Homo sapien
tcctgaggacgtttcacagttgcta

SEQ ID NO: 2603024 - DNA, 25 bp, Homo sapien
gcctatgatcataacaccaccatct

SEQ ID NO: 2603025 - DNA, 25 bp, Homo sapien
ctatacatctcatagcctatgatca

SEQ ID NO: 2603026 - DNA, 25 bp, Homo sapien
gaacagctggcgacattaagggtga

SEQ ID NO: 2603027 - DNA, 25 bp, Homo sapien
cacctaatatttggatagctggaag

SEQ ID NO: 2603028 - DNA, 25 bp, Homo sapien
tattaacctttcatactgatggccc

SEQ ID NO: 2603029 - DNA, 25 bp, Homo sapien
cttaaaaggagataagcaagcagca

SEQ ID NO: 2603030 - DNA, 25 bp, Homo sapien
attttttagaatatggccttcatca

SEQ ID NO: 2603031 - DNA, 25 bp, Homo sapien
ttaaaataatcctcctccttgatcg

SEQ ID NO: 2603032 - DNA, 25 bp, Homo sapien
tagaattcatagctttagaaacagc

SEQ ID NO: 2603033 - DNA, 25 bp, Homo sapien
tcctccttgatcgtatagaattcat

SEQ ID NO: 2603034 - DNA, 25 bp, Homo sapien
tattcctgaactccttaatggatcc

SEQ ID NO: 2603035 - DNA, 25 bp, Homo sapien
gaatgtgagcacgttttttcatcac

SEQ ID NO: 2603036 - DNA, 25 bp, Homo sapien
taccatggtagaatctgcacactga

SEQ ID NO: 2603037 - DNA, 25 bp, Homo sapien
gaacacatccagctaacatctcata

SEQ ID NO: 2603038 - DNA, 25 bp, Homo sapien
aaaacatctttgaggctatcatcag

SEQ ID NO: 2603039 - DNA, 25 bp, Homo sapien
tctccaggattactttaaaagtggc

SEQ ID NO: 2603040 - DNA, 25 bp, Homo sapien
tatgtaaacgacaccactagtctgt

SEQ ID NO: 2603041 - DNA, 25 bp, Homo sapien
tatatccaaccaaaagaatagcctg

SEQ ID NO: 2603042 - DNA, 25 bp, Homo sapien
gcataatcttagctccttgcagtct

SEQ ID NO: 2603043 - DNA, 25 bp, Homo sapien
ccaagtgacagagactataggtgcg

SEQ ID NO: 2603044 - DNA, 25 bp, Homo sapien
acatattcgtgttttggaggcaaga

SEQ ID NO: 2603045 - DNA, 25 bp, Homo sapien
taagtagtactgatagagcttgcac

SEQ ID NO: 2603046 - DNA, 25 bp, Homo sapien
cactgaatagaagtcattctcacag

SEQ ID NO: 2603047 - DNA, 25 bp, Homo sapien
gaagtcattctcacagctaacacat

SEQ ID NO: 2603048 - DNA, 25 bp, Homo sapien
gagaaacaaactcatgaatttaact

SEQ ID NO: 2603049 - DNA, 25 bp, Homo sapien
ttttaggcatactacatgccttgcc

SEQ ID NO: 2603050 - DNA, 25 bp, Homo sapien
tcttcataacaaaagcacccagaaa

SEQ ID NO: 2603051 - DNA, 25 bp, Homo sapien
cattattcatatgtgctgtatatct

SEQ ID NO: 2603052 - DNA, 25 bp, Homo sapien
aaccacacgggtccacttatacaga

SEQ ID NO: 2603053 - DNA, 25 bp, Homo sapien
tacagttgacccttgcgcaccaaag

SEQ ID NO: 2603054 - DNA, 25 bp, Homo sapien
tttcatatatgcaggttctgcggga

SEQ ID NO: 2603055 - DNA, 25 bp, Homo sapien
tatacacaggcaggtcctagaacca

SEQ ID NO: 2603056 - DNA, 25 bp, Homo sapien
tcaaccaagtttctagattaggagt

SEQ ID NO: 2603057 - DNA, 25 bp, Homo sapien
ttttggcagtgtagagaagcttata

SEQ ID NO: 2603058 - DNA, 25 bp, Homo sapien
tacttgtgacataaacacttttggc

SEQ ID NO: 2603059 - DNA, 25 bp, Homo sapien
gacacaaaaattgtctatatcaacc

SEQ ID NO: 2603060 - DNA, 25 bp, Homo sapien
ccaccttcactattattgcccacac

SEQ ID NO: 2603061 - DNA, 25 bp, Homo sapien
ttccaccttcactattattgcccac

SEQ ID NO: 2603062 - DNA, 25 bp, Homo sapien
cttccaccttcactattattgccca

SEQ ID NO: 2603063 - DNA, 25 bp, Homo sapien
tccaccttcactattattgcccaca

SEQ ID NO: 2603064 - DNA, 25 bp, Homo sapien
accaaggatgagtccatattctact

SEQ ID NO: 2603065 - DNA, 25 bp, Homo sapien
ctttgctaatgtagtctagctgcaa

SEQ ID NO: 2603066 - DNA, 25 bp, Homo sapien
tttctttgctaatgtagtctagctg

SEQ ID NO: 2603067 - DNA, 25 bp, Homo sapien
aacaccaaggatgagtccatattct

SEQ ID NO: 2603068 - DNA, 25 bp, Homo sapien
gtataatcatcggagcttaaactca

SEQ ID NO: 2603069 - DNA, 25 bp, Homo sapien
tttgtataatcatcggagcttaaac

SEQ ID NO: 2603070 - DNA, 25 bp, Homo sapien
taatcatcggagcttaaactcatgg

SEQ ID NO: 2603071 - DNA, 25 bp, Homo sapien
catcggagcttaaactcatggaggt

SEQ ID NO: 2603072 - DNA, 25 bp, Homo sapien
caccacctccccgagatcttgaatt

SEQ ID NO: 2603073 - DNA, 25 bp, Homo sapien
gaattccagaccttaatcacttcaa

SEQ ID NO: 2603074 - DNA, 25 bp, Homo sapien
actgccacttccacttgagctacta

SEQ ID NO: 2603075 - DNA, 25 bp, Homo sapien
cacttgagctactatcttttttccc

SEQ ID NO: 2603076 - DNA, 25 bp, Homo sapien
ccatttaggcttatcagttccctcc

SEQ ID NO: 2603077 - DNA, 25 bp, Homo sapien
tcaatttaccatttaggcttatcag

SEQ ID NO: 2603078 - DNA, 25 bp, Homo sapien
tatcagttccctccttatgtctggg

SEQ ID NO: 2603079 - DNA, 25 bp, Homo sapien
cctccttatgtctgggcatatagta

SEQ ID NO: 2603080 - DNA, 25 bp, Homo sapien
cccagaagagtgagctctagataga

SEQ ID NO: 2603081 - DNA, 25 bp, Homo sapien
tggaacataagtaggtaaattagaa

SEQ ID NO: 2603082 - DNA, 25 bp, Homo sapien
taagacaaatggaacataagtaggt

SEQ ID NO: 2603083 - DNA, 25 bp, Homo sapien
aaggacagagactatcccagaagag

SEQ ID NO: 2603084 - DNA, 25 bp, Homo sapien
tctgtaacaaaatctttgtaccagt

SEQ ID NO: 2603085 - DNA, 25 bp, Homo sapien
gaatgctctaaaacctcagcatcag

SEQ ID NO: 2603086 - DNA, 25 bp, Homo sapien
taacaaaatctttgtaccagtctgg

SEQ ID NO: 2603087 - DNA, 25 bp, Homo sapien
aagtaccattttcccagaatgctct

SEQ ID NO: 2603088 - DNA, 25 bp, Homo sapien
aatcaagtccagagatatgagggac

SEQ ID NO: 2603089 - DNA, 25 bp, Homo sapien
caagtccagagatatgagggactgg

SEQ ID NO: 2603090 - DNA, 25 bp, Homo sapien
ctccctactagctaattcaagaaaa

SEQ ID NO: 2603091 - DNA, 25 bp, Homo sapien
tgtcttctccctactagctaattca

SEQ ID NO: 2603092 - DNA, 25 bp, Homo sapien
aaataattaagctcaatgctttaca

SEQ ID NO: 2603093 - DNA, 25 bp, Homo sapien
aaaactacctataagaagagcccag

SEQ ID NO: 2603094 - DNA, 25 bp, Homo sapien
taagaagagcccaggccaagatggc

SEQ ID NO: 2603095 - DNA, 25 bp, Homo sapien
tccctaaggattagtgatgctagac

SEQ ID NO: 2603096 - DNA, 25 bp, Homo sapien
acggtaatagtcaatgtttcgaagc

SEQ ID NO: 2603097 - DNA, 25 bp, Homo sapien
agtggaaccatctaaacggtaatag

SEQ ID NO: 2603098 - DNA, 25 bp, Homo sapien
ccatctaaacggtaatagtcaatgt

SEQ ID NO: 2603099 - DNA, 25 bp, Homo sapien
atagtcaatgtttcgaagccacttc

SEQ ID NO: 2603100 - DNA, 25 bp, Homo sapien
ccatactaatagctgtctggactgc

SEQ ID NO: 2603101 - DNA, 25 bp, Homo sapien
tatcttgcaccaaaactaatcgtgt

SEQ ID NO: 2603102 - DNA, 25 bp, Homo sapien
gcctggccccaaattgatacttaag

SEQ ID NO: 2603103 - DNA, 25 bp, Homo sapien
tttggcataaccctaacacagtgcc

SEQ ID NO: 2603104 - DNA, 25 bp, Homo sapien
aacagattactgtgaactgacaacc

SEQ ID NO: 2603105 - DNA, 25 bp, Homo sapien
gaactgacaaccagaattcaaatat

SEQ ID NO: 2603106 - DNA, 25 bp, Homo sapien
caaacagattactgtgaactgacaa

SEQ ID NO: 2603107 - DNA, 25 bp, Homo sapien
tgaatttgcccattgactagaaagg

SEQ ID NO: 2603108 - DNA, 25 bp, Homo sapien
agtattcagtgaatatgatggtcat

SEQ ID NO: 2603109 - DNA, 25 bp, Homo sapien
gagtattcagtgaatatgatggtca

SEQ ID NO: 2603110 - DNA, 25 bp, Homo sapien
ctttgaggtgaaagagtattcagtg

SEQ ID NO: 2603111 - DNA, 25 bp, Homo sapien
ggtgaaagagtattcagtgaatatg

SEQ ID NO: 2603112 - DNA, 25 bp, Homo sapien
ccttatcaaaaccacatcagctgct

SEQ ID NO: 2603113 - DNA, 25 bp, Homo sapien
cacattagccattgccagagctggg

SEQ ID NO: 2603114 - DNA, 25 bp, Homo sapien
tgtgcctgtgccaatagcaattccc

SEQ ID NO: 2603115 - DNA, 25 bp, Homo sapien
gaaggtagaacttcagcaaacacct

SEQ ID NO: 2603116 - DNA, 25 bp, Homo sapien
tcttgataagtcaatacttgccact

SEQ ID NO: 2603117 - DNA, 25 bp, Homo sapien
ttccaaccagattataaattagagc

SEQ ID NO: 2603118 - DNA, 25 bp, Homo sapien
cagcagctatgggaattccaaccag

SEQ ID NO: 2603119 - DNA, 25 bp, Homo sapien
tttatccgaatcctcttgactgtct

SEQ ID NO: 2603120 - DNA, 25 bp, Homo sapien
aagaaagtactacagaaacagatga

SEQ ID NO: 2603121 - DNA, 25 bp, Homo sapien
gagaagaaagtactacagaaacaga

SEQ ID NO: 2603122 - DNA, 25 bp, Homo sapien
gaagaaagtactacagaaacagatg

SEQ ID NO: 2603123 - DNA, 25 bp, Homo sapien
gcaaaaccaaaccaatgggcataaa

SEQ ID NO: 2603124 - DNA, 25 bp, Homo sapien
taaccaaaagtaaatgagatgctcg

SEQ ID NO: 2603125 - DNA, 25 bp, Homo sapien
caaataaccaaaagtaaatgagatg

SEQ ID NO: 2603126 - DNA, 25 bp, Homo sapien
ttcaaataaccaaaagtaaatgaga

SEQ ID NO: 2603127 - DNA, 25 bp, Homo sapien
aataaccaaaagtaaatgagatgct

SEQ ID NO: 2603128 - DNA, 25 bp, Homo sapien
caggagtgagtgcttgtcaggttca

SEQ ID NO: 2603129 - DNA, 25 bp, Homo sapien
ttagggagcgtttatcagacagtag

SEQ ID NO: 2603130 - DNA, 25 bp, Homo sapien
tataattaacaatccggtccagcaa

SEQ ID NO: 2603131 - DNA, 25 bp, Homo sapien
gctccgggcaggcagttcataactc

SEQ ID NO: 2603132 - DNA, 25 bp, Homo sapien
gaatccctaatataagagcatgaga

SEQ ID NO: 2603133 - DNA, 25 bp, Homo sapien
gaataacttagagtccaacttggca

SEQ ID NO: 2603134 - DNA, 25 bp, Homo sapien
taagtttccagactgagatcagcag

SEQ ID NO: 2603135 - DNA, 25 bp, Homo sapien
catattggagcatctaaaaaagcac

SEQ ID NO: 2603136 - DNA, 25 bp, Homo sapien
tgttatcttcagactaagggcatgg

SEQ ID NO: 2603137 - DNA, 25 bp, Homo sapien
caagttgtattataagatgggccac

SEQ ID NO: 2603138 - DNA, 25 bp, Homo sapien
cataggtgagtctgaaccggcactg

SEQ ID NO: 2603139 - DNA, 25 bp, Homo sapien
aatacaagaccaagaggatgactcc

SEQ ID NO: 2603140 - DNA, 25 bp, Homo sapien
gagacgcctggttttggctacaaaa

SEQ ID NO: 2603141 - DNA, 25 bp, Homo sapien
ctacagtagatggatattgcacaac

SEQ ID NO: 2603142 - DNA, 25 bp, Homo sapien
aaggcacatccttggcagaaatatg

SEQ ID NO: 2603143 - DNA, 25 bp, Homo sapien
gtccactgctgttttcggtaccaaa

SEQ ID NO: 2603144 - DNA, 25 bp, Homo sapien
gccactcagagacgacttctttatg

SEQ ID NO: 2603145 - DNA, 25 bp, Homo sapien
cagtaagatatcctccccttctttg

SEQ ID NO: 2603146 - DNA, 25 bp, Homo sapien
ttctttgccactcagagacgacttc

SEQ ID NO: 2603147 - DNA, 25 bp, Homo sapien
tcagagacgacttctttatgaattt

SEQ ID NO: 2603148 - DNA, 25 bp, Homo sapien
aacacagttgtgtgttctgagcctc

SEQ ID NO: 2603149 - DNA, 25 bp, Homo sapien
cagttgtgtgttctgagcctcttat

SEQ ID NO: 2603150 - DNA, 25 bp, Homo sapien
tgtgttctgagcctcttatggttgt

SEQ ID NO: 2603151 - DNA, 25 bp, Homo sapien
gttgtgtgttctgagcctcttatgg

SEQ ID NO: 2603152 - DNA, 25 bp, Homo sapien
gctcttggatctgttaatgagtctg

SEQ ID NO: 2603153 - DNA, 25 bp, Homo sapien
tggatctgttaatgagtctgggtgc

SEQ ID NO: 2603154 - DNA, 25 bp, Homo sapien
tctgttaatgagtctgggtgcaagt

SEQ ID NO: 2603155 - DNA, 25 bp, Homo sapien
catcttggggttatgaaactaacca

SEQ ID NO: 2603156 - DNA, 25 bp, Homo sapien
gcacaccagtctactgacaacagat

SEQ ID NO: 2603157 - DNA, 25 bp, Homo sapien
tgcttcttttagcttaggaggtgga

SEQ ID NO: 2603158 - DNA, 25 bp, Homo sapien
gtcatttgggtttgtgttggggcac

SEQ ID NO: 2603159 - DNA, 25 bp, Homo sapien
tgttggggcacaccagtctactgac

SEQ ID NO: 2603160 - DNA, 25 bp, Homo sapien
gatccggttttatctggacaggttg

SEQ ID NO: 2603161 - DNA, 25 bp, Homo sapien
ccggttttatctggacaggttgtat

SEQ ID NO: 2603162 - DNA, 25 bp, Homo sapien
tatatatggttttctaggggatccg

SEQ ID NO: 2603163 - DNA, 25 bp, Homo sapien
gcatggacctttccctttatatatg

SEQ ID NO: 2603164 - DNA, 25 bp, Homo sapien
acttctaaactgtaacttgaaatgt

SEQ ID NO: 2603165 - DNA, 25 bp, Homo sapien
ttctaaactgtaacttgaaatgtat

SEQ ID NO: 2603166 - DNA, 25 bp, Homo sapien
cttctaaactgtaacttgaaatgta

SEQ ID NO: 2603167 - DNA, 25 bp, Homo sapien
atgttccaccattatctttggatgg

SEQ ID NO: 2603168 - DNA, 25 bp, Homo sapien
gagtaggtgtttgaatagtcaatat

SEQ ID NO: 2603169 - DNA, 25 bp, Homo sapien
gtaggtgtttgaatagtcaatatat

SEQ ID NO: 2603170 - DNA, 25 bp, Homo sapien
aagagtaggtgtttgaatagtcaat

SEQ ID NO: 2603171 - DNA, 25 bp, Homo sapien
agagtaggtgtttgaatagtcaata

SEQ ID NO: 2603172 - DNA, 25 bp, Homo sapien
gtgtcatcttggttaccgtttgctt

SEQ ID NO: 2603173 - DNA, 25 bp, Homo sapien
tgcttttttgacatatacaagttct

SEQ ID NO: 2603174 - DNA, 25 bp, Homo sapien
tgtgtcatcttggttaccgtttgct

SEQ ID NO: 2603175 - DNA, 25 bp, Homo sapien
cttttttgacatatacaagttcttc

SEQ ID NO: 2603176 - DNA, 25 bp, Homo sapien
ctgtggattctacgggaattaattt

SEQ ID NO: 2603177 - DNA, 25 bp, Homo sapien
actgtggattctacgggaattaatt

SEQ ID NO: 2603178 - DNA, 25 bp, Homo sapien
ttaatttactcaatctgtatttcac

SEQ ID NO: 2603179 - DNA, 25 bp, Homo sapien
gattctacgggaattaatttactca

SEQ ID NO: 2603180 - DNA, 25 bp, Homo sapien
gaatgagacctttaacttcatagct

SEQ ID NO: 2603181 - DNA, 25 bp, Homo sapien
tttaacttcatagctcaagcaaggg

SEQ ID NO: 2603182 - DNA, 25 bp, Homo sapien
tagcctgtaatcagtgatttcagca

SEQ ID NO: 2603183 - DNA, 25 bp, Homo sapien
cttcatagctcaagcaagggcctgt

SEQ ID NO: 2603184 - DNA, 25 bp, Homo sapien
ttacattggaggaactgtcaggttt

SEQ ID NO: 2603185 - DNA, 25 bp, Homo sapien
acattggaggaactgtcaggtttac

SEQ ID NO: 2603186 - DNA, 25 bp, Homo sapien
tacattggaggaactgtcaggttta

SEQ ID NO: 2603187 - DNA, 25 bp, Homo sapien
tgttaactttctgcctcattggtct

SEQ ID NO: 2603188 - DNA, 25 bp, Homo sapien
ttaactttctgcctcattggtctgt

SEQ ID NO: 2603189 - DNA, 25 bp, Homo sapien
aactttctgcctcattggtctgtct

SEQ ID NO: 2603190 - DNA, 25 bp, Homo sapien
cttgttaactttctgcctcattggt

SEQ ID NO: 2603191 - DNA, 25 bp, Homo sapien
tcatcagaatcagcagtccacctgg

SEQ ID NO: 2603192 - DNA, 25 bp, Homo sapien
gactcatcagaatcagcagtccacc

SEQ ID NO: 2603193 - DNA, 25 bp, Homo sapien
atcagaatcagcagtccacctggcc

SEQ ID NO: 2603194 - DNA, 25 bp, Homo sapien
tcagactcatcagaatcagcagtcc

SEQ ID NO: 2603195 - DNA, 25 bp, Homo sapien
catttgatttataacccttggttca

SEQ ID NO: 2603196 - DNA, 25 bp, Homo sapien
aaaagattggtcagcacgacactgg

SEQ ID NO: 2603197 - DNA, 25 bp, Homo sapien
ggtaaaagattggtcagcacgacac

SEQ ID NO: 2603198 - DNA, 25 bp, Homo sapien
gaggtaaaagattggtcagcacgac

SEQ ID NO: 2603199 - DNA, 25 bp, Homo sapien
taaaagattggtcagcacgacactg

SEQ ID NO: 2603200 - DNA, 25 bp, Homo sapien
catatggcttaatcagtggcaaagg

SEQ ID NO: 2603201 - DNA, 25 bp, Homo sapien
gtctaggtcctgcatatggcttaat

SEQ ID NO: 2603202 - DNA, 25 bp, Homo sapien
aattaaggacttcagcctatagttt

SEQ ID NO: 2603203 - DNA, 25 bp, Homo sapien
cctgcatatggcttaatcagtggca

SEQ ID NO: 2603204 - DNA, 25 bp, Homo sapien
cacttaatcgtggaactagtctccc

SEQ ID NO: 2603205 - DNA, 25 bp, Homo sapien
taatcgtggaactagtctcccttgg

SEQ ID NO: 2603206 - DNA, 25 bp, Homo sapien
gcaccaacacttaatcgtggaacta

SEQ ID NO: 2603207 - DNA, 25 bp, Homo sapien
ctaacagcaccaacacttaatcgtg

SEQ ID NO: 2603208 - DNA, 25 bp, Homo sapien
taaatctttggcttgtcactgacat

SEQ ID NO: 2603209 - DNA, 25 bp, Homo sapien
gggcccaatcattgaaggattaatc

SEQ ID NO: 2603210 - DNA, 25 bp, Homo sapien
gcccaatcattgaaggattaatcag

SEQ ID NO: 2603211 - DNA, 25 bp, Homo sapien
cgaaaccatgttggtggtaataaga

SEQ ID NO: 2603212 - DNA, 25 bp, Homo sapien
gtgttctgtgacgaaaccatgttgg

SEQ ID NO: 2603213 - DNA, 25 bp, Homo sapien
attgggaaacctatgcagagtgcac

SEQ ID NO: 2603214 - DNA, 25 bp, Homo sapien
gggtaaaacccaactgctctgacat

SEQ ID NO: 2603215 - DNA, 25 bp, Homo sapien
tgatctgaattataccaatagcggg

SEQ ID NO: 2603216 - DNA, 25 bp, Homo sapien
cacacagttggtaaatgatggagct

SEQ ID NO: 2603217 - DNA, 25 bp, Homo sapien
tacttgatgccctctaggcagggtg

SEQ ID NO: 2603218 - DNA, 25 bp, Homo sapien
gagttatccctgcaggagtccttag

SEQ ID NO: 2603219 - DNA, 25 bp, Homo sapien
tatttcataccatggaggaaggctc

SEQ ID NO: 2603220 - DNA, 25 bp, Homo sapien
tcaagggcctactttatggcagaca

SEQ ID NO: 2603221 - DNA, 25 bp, Homo sapien
caagattcagctagtggccaagaga

SEQ ID NO: 2603222 - DNA, 25 bp, Homo sapien
caagagatgcagtgccaggaaccct

SEQ ID NO: 2603223 - DNA, 25 bp, Homo sapien
ggaacccttaaacagttgcacagca

SEQ ID NO: 2603224 - DNA, 25 bp, Homo sapien
tgtgcacagcccctaagtcaactta

SEQ ID NO: 2603225 - DNA, 25 bp, Homo sapien
atagagagcatccaactgaagaata

SEQ ID NO: 2603226 - DNA, 25 bp, Homo sapien
gtatgggtagccatgatatttagat

SEQ ID NO: 2603227 - DNA, 25 bp, Homo sapien
ctgtatgggtagccatgatatttag

SEQ ID NO: 2603228 - DNA, 25 bp, Homo sapien
aatagagagcatccaactgaagaat

SEQ ID NO: 2603229 - DNA, 25 bp, Homo sapien
aaatgttccataaagttcactggga

SEQ ID NO: 2603230 - DNA, 25 bp, Homo sapien
cttttcaaacacacacgattttcgt

SEQ ID NO: 2603231 - DNA, 25 bp, Homo sapien
gcttgttaaggcactacacatcttc

SEQ ID NO: 2603232 - DNA, 25 bp, Homo sapien
tccagtactccagtgtctatatatc

SEQ ID NO: 2603233 - DNA, 25 bp, Homo sapien
tgtaacaggcatatgtgggaacacc

SEQ ID NO: 2603234 - DNA, 25 bp, Homo sapien
tcttgctgagggctagacgtgtgct

SEQ ID NO: 2603235 - DNA, 25 bp, Homo sapien
tgggaacacctggtcaggacttact

SEQ ID NO: 2603236 - DNA, 25 bp, Homo sapien
tcatgttcacagctatcgagaagca

SEQ ID NO: 2603237 - DNA, 25 bp, Homo sapien
ccacaatagtggcatttcaggttac

SEQ ID NO: 2603238 - DNA, 25 bp, Homo sapien
taatttctatatacaggcatcagct

SEQ ID NO: 2603239 - DNA, 25 bp, Homo sapien
gggagtccttttctaactgagccta

SEQ ID NO: 2603240 - DNA, 25 bp, Homo sapien
ggtagttaacaccatactcaagcag

SEQ ID NO: 2603241 - DNA, 25 bp, Homo sapien
ccacatggcagggttattagaaggt

SEQ ID NO: 2603242 - DNA, 25 bp, Homo sapien
tggtcaatctgtacaaatcagggca

SEQ ID NO: 2603243 - DNA, 25 bp, Homo sapien
catggcagtagtattcccgtggtca

SEQ ID NO: 2603244 - DNA, 25 bp, Homo sapien
tggcaggtggcagtcatagtatctt

SEQ ID NO: 2603245 - DNA, 25 bp, Homo sapien
atatctttgtggtgttctctatatt

SEQ ID NO: 2603246 - DNA, 25 bp, Homo sapien
aatgttggtctgccttgctaggttg

SEQ ID NO: 2603247 - DNA, 25 bp, Homo sapien
gaatatctttgtggtgttctctata

SEQ ID NO: 2603248 - DNA, 25 bp, Homo sapien
gaatgttggtctgccttgctaggtt

SEQ ID NO: 2603249 - DNA, 25 bp, Homo sapien
cactgaagtctctgtcccacgagct

SEQ ID NO: 2603250 - DNA, 25 bp, Homo sapien
cacgagcttagtggtgagctagcaa

SEQ ID NO: 2603251 - DNA, 25 bp, Homo sapien
ggagctgaaagcttagagaccactc

SEQ ID NO: 2603252 - DNA, 25 bp, Homo sapien
gacttcacttactgcttgcactgag

SEQ ID NO: 2603253 - DNA, 25 bp, Homo sapien
tatggagagttggaagtactagaaa

SEQ ID NO: 2603254 - DNA, 25 bp, Homo sapien
tggggagagtttaggatagacttta

SEQ ID NO: 2603255 - DNA, 25 bp, Homo sapien
ctagaaatatttgctgcttaaggtc

SEQ ID NO: 2603256 - DNA, 25 bp, Homo sapien
ggatggtatgcaagattctattggg

SEQ ID NO: 2603257 - DNA, 25 bp, Homo sapien
gtaccctcttggagagaatgtcctg

SEQ ID NO: 2603258 - DNA, 25 bp, Homo sapien
tcttgtaccctcttggagagaatgt

SEQ ID NO: 2603259 - DNA, 25 bp, Homo sapien
tgtgtcactttcttgtaccctcttg

SEQ ID NO: 2603260 - DNA, 25 bp, Homo sapien
tcactttcttgtaccctcttggaga

SEQ ID NO: 2603261 - DNA, 25 bp, Homo sapien
ctcccctaacaggggatagaggagg

SEQ ID NO: 2603262 - DNA, 25 bp, Homo sapien
ttatcgctgccacggtctgcgtagc

SEQ ID NO: 2603263 - DNA, 25 bp, Homo sapien
tactgtgacttctccgattgtgtga

SEQ ID NO: 2603264 - DNA, 25 bp, Homo sapien
taagtcctacattggcttcccgtcg

SEQ ID NO: 2603265 - DNA, 25 bp, Homo sapien
cctgcgtacgtggatttatcgctgc

SEQ ID NO: 2603266 - DNA, 25 bp, Homo sapien
tagaggtacagatgttgagttccca

SEQ ID NO: 2603267 - DNA, 25 bp, Homo sapien
ctggcttaatgtcactggggttatt

SEQ ID NO: 2603268 - DNA, 25 bp, Homo sapien
ctagacacgggtactgtggtagttg

SEQ ID NO: 2603269 - DNA, 25 bp, Homo sapien
gggttattaatacacttcataagca

SEQ ID NO: 2603270 - DNA, 25 bp, Homo sapien
aactgatcatggaactattgcagat

SEQ ID NO: 2603271 - DNA, 25 bp, Homo sapien
cctggattttggttatgcctactac

SEQ ID NO: 2603272 - DNA, 25 bp, Homo sapien
gcctttgacctggaagtcaacttta

SEQ ID NO: 2603273 - DNA, 25 bp, Homo sapien
tattgcagatcacctttgagccaaa

SEQ ID NO: 2603274 - DNA, 25 bp, Homo sapien
tgcaatgagattcgtaaagataaca

SEQ ID NO: 2603275 - DNA, 25 bp, Homo sapien
gatgcaatgagattcgtaaagataa

SEQ ID NO: 2603276 - DNA, 25 bp, Homo sapien
ctggatgcaatgagattcgtaaaga

SEQ ID NO: 2603277 - DNA, 25 bp, Homo sapien
tggatgcaatgagattcgtaaagat

SEQ ID NO: 2603278 - DNA, 25 bp, Homo sapien
ccaggagtttgccaggatctggaat

SEQ ID NO: 2603279 - DNA, 25 bp, Homo sapien
ggcaaaaaatatcctgttggtgaat

SEQ ID NO: 2603280 - DNA, 25 bp, Homo sapien
tcctgttggtgaatgcactggagta

SEQ ID NO: 2603281 - DNA, 25 bp, Homo sapien
tgcactggagtatcgccaggagttt

SEQ ID NO: 2603282 - DNA, 25 bp, Homo sapien
gacatcagttctgtcggcgatccac

SEQ ID NO: 2603283 - DNA, 25 bp, Homo sapien
actcatatgtatcaccccgtttggg

SEQ ID NO: 2603284 - DNA, 25 bp, Homo sapien
gatccaccgggcaatctgctcagct

SEQ ID NO: 2603285 - DNA, 25 bp, Homo sapien
aaccccgcacctgtaactcatatgt

SEQ ID NO: 2603286 - DNA, 25 bp, Homo sapien
caaaagcaatcccaacataagggga

SEQ ID NO: 2603287 - DNA, 25 bp, Homo sapien
cataaggggaccagcataatttggg

SEQ ID NO: 2603288 - DNA, 25 bp, Homo sapien
cgaagatacacaagtccaccaataa

SEQ ID NO: 2603289 - DNA, 25 bp, Homo sapien
aattccatattacttcttcgaagat

SEQ ID NO: 2603290 - DNA, 25 bp, Homo sapien
ttaaggcttatatttcatcccaagg

SEQ ID NO: 2603291 - DNA, 25 bp, Homo sapien
gactatagaagcatggaaccacgcc

SEQ ID NO: 2603292 - DNA, 25 bp, Homo sapien
tcacaattcgataatacttcaaaag

SEQ ID NO: 2603293 - DNA, 25 bp, Homo sapien
tcatcccaaggatcacaattcgata

SEQ ID NO: 2603294 - DNA, 25 bp, Homo sapien
gattcttatgggcatatggtggtcc

SEQ ID NO: 2603295 - DNA, 25 bp, Homo sapien
tatgggcatatggtggtcctcttat

SEQ ID NO: 2603296 - DNA, 25 bp, Homo sapien
cacatgtcccgtgtggggattctta

SEQ ID NO: 2603297 - DNA, 25 bp, Homo sapien
ggtggtcctcttatatggttccaca

SEQ ID NO: 2603298 - DNA, 25 bp, Homo sapien
cagctacaaactgggcttgactgct

SEQ ID NO: 2603299 - DNA, 25 bp, Homo sapien
gaacaatgtgtgtttcagctacaaa

SEQ ID NO: 2603300 - DNA, 25 bp, Homo sapien
aatgtgtgtttcagctacaaactgg

SEQ ID NO: 2603301 - DNA, 25 bp, Homo sapien
gtgtttcagctacaaactgggcttg

SEQ ID NO: 2603302 - DNA, 25 bp, Homo sapien
ttctgcagagaagtccaccgttagt

SEQ ID NO: 2603303 - DNA, 25 bp, Homo sapien
ctgcagagaagtccaccgttagtct

SEQ ID NO: 2603304 - DNA, 25 bp, Homo sapien
tctagctgcccttaacagtttttat

SEQ ID NO: 2603305 - DNA, 25 bp, Homo sapien
gcagagaagtccaccgttagtctga

SEQ ID NO: 2603306 - DNA, 25 bp, Homo sapien
tccaaggtgagcaaaaattatgaca

SEQ ID NO: 2603307 - DNA, 25 bp, Homo sapien
caaggtgagcaaaaattatgacaaa

SEQ ID NO: 2603308 - DNA, 25 bp, Homo sapien
cagcagctgtattgccgcagttcta

SEQ ID NO: 2603309 - DNA, 25 bp, Homo sapien
ttcaagggtacctgaagcgaattgg

SEQ ID NO: 2603310 - DNA, 25 bp, Homo sapien
tattgccgcagttctagcttcacct

SEQ ID NO: 2603311 - DNA, 25 bp, Homo sapien
ggtacctgaagcgaattggcaccaa

SEQ ID NO: 2603312 - DNA, 25 bp, Homo sapien
aaatggcttgaagttgctagaacag

SEQ ID NO: 2603313 - DNA, 25 bp, Homo sapien
aagtccttgaaattcgccgccttca

SEQ ID NO: 2603314 - DNA, 25 bp, Homo sapien
tttccaagcacgcatgcgcagttgt

SEQ ID NO: 2603315 - DNA, 25 bp, Homo sapien
aatattgcggagttttcggagtcca

SEQ ID NO: 2603316 - DNA, 25 bp, Homo sapien
accaaaaccgccaacgcgctgccat

SEQ ID NO: 2603317 - DNA, 25 bp, Homo sapien
aggctgagggaacgtcgcaaacgat

SEQ ID NO: 2603318 - DNA, 25 bp, Homo sapien
gggaacgtcgcaaacgatgagcagc

SEQ ID NO: 2603319 - DNA, 25 bp, Homo sapien
acagagacacaccaaaaccgccaac

SEQ ID NO: 2603320 - DNA, 25 bp, Homo sapien
gaaaaccgcgtaattgaagccacca

SEQ ID NO: 2603321 - DNA, 25 bp, Homo sapien
ctgggaagaggcgaacagaccctct

SEQ ID NO: 2603322 - DNA, 25 bp, Homo sapien
catgctgctggaaaccgcgttctca

SEQ ID NO: 2603323 - DNA, 25 bp, Homo sapien
caccaaaggcatagaagcggcaggg

SEQ ID NO: 2603324 - DNA, 25 bp, Homo sapien
gaagacaaagagttacagttccttc

SEQ ID NO: 2603325 - DNA, 25 bp, Homo sapien
gacaaagagttacagttccttctct

SEQ ID NO: 2603326 - DNA, 25 bp, Homo sapien
gcacagaatgtacaggaaatagagt

SEQ ID NO: 2603327 - DNA, 25 bp, Homo sapien
gagtatgtgcacagtttttctctat

SEQ ID NO: 2603328 - DNA, 25 bp, Homo sapien
tacaggaaatagagttagaatgact

SEQ ID NO: 2603329 - DNA, 25 bp, Homo sapien
actgacgtagggtttgagtcctcgt

SEQ ID NO: 2603330 - DNA, 25 bp, Homo sapien
taaagtctttctcttctcttgaaac

SEQ ID NO: 2603331 - DNA, 25 bp, Homo sapien
gtttaaagtctttctcttctcttga

SEQ ID NO: 2603332 - DNA, 25 bp, Homo sapien
agtttaaagtctttctcttctcttg

SEQ ID NO: 2603333 - DNA, 25 bp, Homo sapien
aagtctttctcttctcttgaaacat

SEQ ID NO: 2603334 - DNA, 25 bp, Homo sapien
gaactcattaaatagctgactttgc

SEQ ID NO: 2603335 - DNA, 25 bp, Homo sapien
tatccatatttttaaccttggtcac

SEQ ID NO: 2603336 - DNA, 25 bp, Homo sapien
ggcagtcataattgtgcaggtttgc

SEQ ID NO: 2603337 - DNA, 25 bp, Homo sapien
tggtactgcggttgatggactgcac

SEQ ID NO: 2603338 - DNA, 25 bp, Homo sapien
tgtacataacacattctaccgctaa

SEQ ID NO: 2603339 - DNA, 25 bp, Homo sapien
gaggagaggtggcattgtacataac

SEQ ID NO: 2603340 - DNA, 25 bp, Homo sapien
ttcccattccgttcctggtgttgaa

SEQ ID NO: 2603341 - DNA, 25 bp, Homo sapien
acttttttatggattcgaggagagg

SEQ ID NO: 2603342 - DNA, 25 bp, Homo sapien
tgttccacagaaccactttaagtag

SEQ ID NO: 2603343 - DNA, 25 bp, Homo sapien
taatcaagacaggtagagtagttca

SEQ ID NO: 2603344 - DNA, 25 bp, Homo sapien
tagcggaaacctcatctgggtggac

SEQ ID NO: 2603345 - DNA, 25 bp, Homo sapien
tagaccaactaagaagaaaaggcag

SEQ ID NO: 2603346 - DNA, 25 bp, Homo sapien
ccaagcagtacacatgaacccaatt

SEQ ID NO: 2603347 - DNA, 25 bp, Homo sapien
ttatagccgggtagtattccatcat

SEQ ID NO: 2603348 - DNA, 25 bp, Homo sapien
catctcccaagcagtacacatgaac

SEQ ID NO: 2603349 - DNA, 25 bp, Homo sapien
ttcattcttatagccgggtagtatt

SEQ ID NO: 2603350 - DNA, 25 bp, Homo sapien
tgtgcgtgtgtttccagtttcaaaa

SEQ ID NO: 2603351 - DNA, 25 bp, Homo sapien
gcgtgtgtttccagtttcaaaatca

SEQ ID NO: 2603352 - DNA, 25 bp, Homo sapien
tgcgtgtgtttccagtttcaaaatc

SEQ ID NO: 2603353 - DNA, 25 bp, Homo sapien
atgtgcgtgtgtttccagtttcaaa

SEQ ID NO: 2603354 - DNA, 25 bp, Homo sapien
tctctctcgccaattgtcaccaaat

SEQ ID NO: 2603355 - DNA, 25 bp, Homo sapien
ccctctctctctcgccaattgtcac

SEQ ID NO: 2603356 - DNA, 25 bp, Homo sapien
ctcgccaattgtcaccaaattgatg

SEQ ID NO: 2603357 - DNA, 25 bp, Homo sapien
caattgtcaccaaattgatgggcat

SEQ ID NO: 2603358 - DNA, 25 bp, Homo sapien
ctgctttgatgtagtgggaagagaa

SEQ ID NO: 2603359 - DNA, 25 bp, Homo sapien
agtcactaagacacccacaatatcc

SEQ ID NO: 2603360 - DNA, 25 bp, Homo sapien
ccatctggggcagtgaagcattgat

SEQ ID NO: 2603361 - DNA, 25 bp, Homo sapien
cttgtaacttgtaaagaaactgctt

SEQ ID NO: 2603362 - DNA, 25 bp, Homo sapien
ttgtaatctggacaaagtaggagtc

SEQ ID NO: 2603363 - DNA, 25 bp, Homo sapien
tactagaggagtgccctttctggcc

SEQ ID NO: 2603364 - DNA, 25 bp, Homo sapien
tgttagtactagaggagtgcccttt

SEQ ID NO: 2603365 - DNA, 25 bp, Homo sapien
gacaaagtaggagtcacagccatgt

SEQ ID NO: 2603366 - DNA, 25 bp, Homo sapien
tgggtaccctaaaaggacatgtagc

SEQ ID NO: 2603367 - DNA, 25 bp, Homo sapien
tatttttgcaggtaaccgctgccct

SEQ ID NO: 2603368 - DNA, 25 bp, Homo sapien
tatttggctggtgtaatctagcccc

SEQ ID NO: 2603369 - DNA, 25 bp, Homo sapien
tgaggacacgtttgagttagggaac

SEQ ID NO: 2603370 - DNA, 25 bp, Homo sapien
tctgttgatagcattttgcaacctt

SEQ ID NO: 2603371 - DNA, 25 bp, Homo sapien
ggtcataaaggtttctgttgatagc

SEQ ID NO: 2603372 - DNA, 25 bp, Homo sapien
aaggtttctgttgatagcattttgc

SEQ ID NO: 2603373 - DNA, 25 bp, Homo sapien
tgaggggtcataaaggtttctgttg

SEQ ID NO: 2603374 - DNA, 25 bp, Homo sapien
ttttgtcacgtgtgatatatttgtg

SEQ ID NO: 2603375 - DNA, 25 bp, Homo sapien
gcgcatgtggatctctagtcacttg

SEQ ID NO: 2603376 - DNA, 25 bp, Homo sapien
cggtatgtaactgatggacttgact

SEQ ID NO: 2603377 - DNA, 25 bp, Homo sapien
tagtcacttgccaacacggtttctc

SEQ ID NO: 2603378 - DNA, 25 bp, Homo sapien
caggatttgcatcaggattgtgaca

SEQ ID NO: 2603379 - DNA, 25 bp, Homo sapien
ctgccctgcagcgcggtatcgttgg

SEQ ID NO: 2603380 - DNA, 25 bp, Homo sapien
cagcgcggtatcgttggactcttgg

SEQ ID NO: 2603381 - DNA, 25 bp, Homo sapien
ggcacaggatttgcatcaggattgt

SEQ ID NO: 2603382 - DNA, 25 bp, Homo sapien
tctaacaagctgacgctggacaagc

SEQ ID NO: 2603383 - DNA, 25 bp, Homo sapien
tgtcgcaaacctctttggccggagc

SEQ ID NO: 2603384 - DNA, 25 bp, Homo sapien
tggacaagctggacgttaaagggaa

SEQ ID NO: 2603385 - DNA, 25 bp, Homo sapien
aggtaattctgcacgtttgcccgcg

SEQ ID NO: 2603386 - DNA, 25 bp, Homo sapien
cgtgccggacgtgacaaacggaagc

SEQ ID NO: 2603387 - DNA, 25 bp, Homo sapien
aacggaagccgcacgtctcactagt

SEQ ID NO: 2603388 - DNA, 25 bp, Homo sapien
cctcgcagacggacagcgccaggga

SEQ ID NO: 2603389 - DNA, 25 bp, Homo sapien
gttccttgcggttcgcggcgtgccg

SEQ ID NO: 2603390 - DNA, 25 bp, Homo sapien
tgctcggcagccagtccatgggagt

SEQ ID NO: 2603391 - DNA, 25 bp, Homo sapien
agagcaatgagaacaaagcacagtg

SEQ ID NO: 2603392 - DNA, 25 bp, Homo sapien
cagagcaatgagaacaaagcacagt

SEQ ID NO: 2603393 - DNA, 25 bp, Homo sapien
ggtttgctcggcagccagtccatgg

SEQ ID NO: 2603394 - DNA, 25 bp, Homo sapien
tgcaacagataacaatgtgtgaata

SEQ ID NO: 2603395 - DNA, 25 bp, Homo sapien
cacagtgggaaaggttgcttgagca

SEQ ID NO: 2603396 - DNA, 25 bp, Homo sapien
atatataaaaagttcatgcaggctg

SEQ ID NO: 2603397 - DNA, 25 bp, Homo sapien
ggaaaatcttgacttatttcatgaa

SEQ ID NO: 2603398 - DNA, 25 bp, Homo sapien
ctaattgagggcggtcggcttcgac

SEQ ID NO: 2603399 - DNA, 25 bp, Homo sapien
ttgtggagcaattccgcctagcgcg

SEQ ID NO: 2603400 - DNA, 25 bp, Homo sapien
tctttcggtcggatatcttataggg

SEQ ID NO: 2603401 - DNA, 25 bp, Homo sapien
cctagcgcgctcatgtcttgagtcg

SEQ ID NO: 2603402 - DNA, 25 bp, Homo sapien
tcctggtttagacatgagagggtgt

SEQ ID NO: 2603403 - DNA, 25 bp, Homo sapien
ttcttcctggtttagacatgagagg

SEQ ID NO: 2603404 - DNA, 25 bp, Homo sapien
ctggtttagacatgagagggtgtat

SEQ ID NO: 2603405 - DNA, 25 bp, Homo sapien
cttcctggtttagacatgagagggt

SEQ ID NO: 2603406 - DNA, 25 bp, Homo sapien
tcttcggaccttgtgaacatttgta

SEQ ID NO: 2603407 - DNA, 25 bp, Homo sapien
cttcggaccttgtgaacatttgtaa

SEQ ID NO: 2603408 - DNA, 25 bp, Homo sapien
tcggaccttgtgaacatttgtaatg

SEQ ID NO: 2603409 - DNA, 25 bp, Homo sapien
cggaccttgtgaacatttgtaatgc

SEQ ID NO: 2603410 - DNA, 25 bp, Homo sapien
aagagagaggaagtagggctgtgaa

SEQ ID NO: 2603411 - DNA, 25 bp, Homo sapien
gaagagagaggaagtagggctgtga

SEQ ID NO: 2603412 - DNA, 25 bp, Homo sapien
agagaggaagtagggctgtgaagaa

SEQ ID NO: 2603413 - DNA, 25 bp, Homo sapien
aggaagtagggctgtgaagaaactc

SEQ ID NO: 2603414 - DNA, 25 bp, Homo sapien
tccgtacatttgacggcaagctctt

SEQ ID NO: 2603415 - DNA, 25 bp, Homo sapien
aggtctactgttccgctgctgctcc

SEQ ID NO: 2603416 - DNA, 25 bp, Homo sapien
caagaagtttggttgacgaaaatgc

SEQ ID NO: 2603417 - DNA, 25 bp, Homo sapien
tcctgctcaaaacgggccggcctaa

SEQ ID NO: 2603418 - DNA, 25 bp, Homo sapien
gaattcacacccatacttggatcca

SEQ ID NO: 2603419 - DNA, 25 bp, Homo sapien
caggaattgcaagtcataccctcaa

SEQ ID NO: 2603420 - DNA, 25 bp, Homo sapien
aatggtaacagaattcacacccata

SEQ ID NO: 2603421 - DNA, 25 bp, Homo sapien
caagtcataccctcaacagaaatgg

SEQ ID NO: 2603422 - DNA, 25 bp, Homo sapien
taagatacgcaatgacttggccagg

SEQ ID NO: 2603423 - DNA, 25 bp, Homo sapien
tctatgttgtcaccaatggcaagca

SEQ ID NO: 2603424 - DNA, 25 bp, Homo sapien
gacctagtcatcctacgtgattcca

SEQ ID NO: 2603425 - DNA, 25 bp, Homo sapien
ttactatggtcaagcaaaatgtccc

SEQ ID NO: 2603426 - DNA, 25 bp, Homo sapien
tcagtgctgcccaacagacatataa

SEQ ID NO: 2603427 - DNA, 25 bp, Homo sapien
cagacatataatgtaaggcatttca

SEQ ID NO: 2603428 - DNA, 25 bp, Homo sapien
caggaatgaaaagtgggcaatatag

SEQ ID NO: 2603429 - DNA, 25 bp, Homo sapien
gcaatatagatcagtgctgcccaac

SEQ ID NO: 2603430 - DNA, 25 bp, Homo sapien
ctacacaaaaacatcgaccaggatg

SEQ ID NO: 2603431 - DNA, 25 bp, Homo sapien
tacacaaaaacatcgaccaggatga

SEQ ID NO: 2603432 - DNA, 25 bp, Homo sapien
tccagccgtggacatgagacatccc

SEQ ID NO: 2603433 - DNA, 25 bp, Homo sapien
gacaaccagcaacagacatcatcag

SEQ ID NO: 2603434 - DNA, 25 bp, Homo sapien
catcaggacgtgatgattcaggacc

SEQ ID NO: 2603435 - DNA, 25 bp, Homo sapien
tatacatgctatatacgctgcctgc

SEQ ID NO: 2603436 - DNA, 25 bp, Homo sapien
gattccatatctttaatcttgtgaa

SEQ ID NO: 2603437 - DNA, 25 bp, Homo sapien
cagtagccactactcaattttgagg

SEQ ID NO: 2603438 - DNA, 25 bp, Homo sapien
caatcaacatacaaatgtaggtatc

SEQ ID NO: 2603439 - DNA, 25 bp, Homo sapien
ccactactcaattttgaggaagcac

SEQ ID NO: 2603440 - DNA, 25 bp, Homo sapien
gaaggcaacctagacctttctctga

SEQ ID NO: 2603441 - DNA, 25 bp, Homo sapien
ataaatgcgtaacttgtgaatgtgc

SEQ ID NO: 2603442 - DNA, 25 bp, Homo sapien
aggcaacctagacctttctctgact

SEQ ID NO: 2603443 - DNA, 25 bp, Homo sapien
ctctgactcttgaccataaatgcgt

SEQ ID NO: 2603444 - DNA, 25 bp, Homo sapien
cgcggaaacaaagcgacaccgctgc

SEQ ID NO: 2603445 - DNA, 25 bp, Homo sapien
gcaggagccgcggaaacaaagcgac

SEQ ID NO: 2603446 - DNA, 25 bp, Homo sapien
cccgcgcccggttacgatagaaatg

SEQ ID NO: 2603447 - DNA, 25 bp, Homo sapien
tagaaatgcactggagtcttagtcg

SEQ ID NO: 2603448 - DNA, 25 bp, Homo sapien
gtcccaaatgacacaaagcttcgct

SEQ ID NO: 2603449 - DNA, 25 bp, Homo sapien
tatgtaaatctctcactagacttgg

SEQ ID NO: 2603450 - DNA, 25 bp, Homo sapien
tacctagggatcactgagcctcctg

SEQ ID NO: 2603451 - DNA, 25 bp, Homo sapien
gagcctcctgtatctgattatgtaa

SEQ ID NO: 2603452 - DNA, 25 bp, Homo sapien
gccactgcagtcacactttgatcct

SEQ ID NO: 2603453 - DNA, 25 bp, Homo sapien
ccactgcagtcacactttgatcctg

SEQ ID NO: 2603454 - DNA, 25 bp, Homo sapien
cactgcagtcacactttgatcctgg

SEQ ID NO: 2603455 - DNA, 25 bp, Homo sapien
gatttatgatagtcccttattgatc

SEQ ID NO: 2603456 - DNA, 25 bp, Homo sapien
tgatcttttaatggctgtaggaaca

SEQ ID NO: 2603457 - DNA, 25 bp, Homo sapien
ctttcactcacgcatttatttgttt

SEQ ID NO: 2603458 - DNA, 25 bp, Homo sapien
taggaacattcctgatatgggtaat

SEQ ID NO: 2603459 - DNA, 25 bp, Homo sapien
gaggcccttctggacctggaaatcc

SEQ ID NO: 2603460 - DNA, 25 bp, Homo sapien
ggaggcccttctggacctggaaatc

SEQ ID NO: 2603461 - DNA, 25 bp, Homo sapien
cggaggcccttctggacctggaaat

SEQ ID NO: 2603462 - DNA, 25 bp, Homo sapien
aggcccttctggacctggaaatcca

SEQ ID NO: 2603463 - DNA, 25 bp, Homo sapien
tgattccttttggtcctggtggccc

SEQ ID NO: 2603464 - DNA, 25 bp, Homo sapien
cctggtggccctggaattccatcat

SEQ ID NO: 2603465 - DNA, 25 bp, Homo sapien
gtggccctggaattccatcatcacc

SEQ ID NO: 2603466 - DNA, 25 bp, Homo sapien
tctgattccttttggtcctggtggc

SEQ ID NO: 2603467 - DNA, 25 bp, Homo sapien
gaagacctggtgtccctggaaatcc

SEQ ID NO: 2603468 - DNA, 25 bp, Homo sapien
gaaatccaggaagtccaggaggacc

SEQ ID NO: 2603469 - DNA, 25 bp, Homo sapien
tggaaatccaggaagtccaggagga

SEQ ID NO: 2603470 - DNA, 25 bp, Homo sapien
aggaagacctggtgtccctggaaat

SEQ ID NO: 2603471 - DNA, 25 bp, Homo sapien
catccgggaataccttgaggtcctg

SEQ ID NO: 2603472 - DNA, 25 bp, Homo sapien
ggttccattgcatccgggaatacct

SEQ ID NO: 2603473 - DNA, 25 bp, Homo sapien
cattgcatccgggaataccttgagg

SEQ ID NO: 2603474 - DNA, 25 bp, Homo sapien
cttggttccattgcatccgggaata

SEQ ID NO: 2603475 - DNA, 25 bp, Homo sapien
ccgggactgcctggaaatccacgtt

SEQ ID NO: 2603476 - DNA, 25 bp, Homo sapien
gactgcctggaaatccacgttctcc

SEQ ID NO: 2603477 - DNA, 25 bp, Homo sapien
aaccgggactgcctggaaatccacg

SEQ ID NO: 2603478 - DNA, 25 bp, Homo sapien
gggactgcctggaaatccacgttct

SEQ ID NO: 2603479 - DNA, 25 bp, Homo sapien
ttcatacctgggatcccagggggtc

SEQ ID NO: 2603480 - DNA, 25 bp, Homo sapien
cttcatacctgggatcccagggggt

SEQ ID NO: 2603481 - DNA, 25 bp, Homo sapien
tcatacctgggatcccagggggtcc

SEQ ID NO: 2603482 - DNA, 25 bp, Homo sapien
gcagtgatgacataattatactacc

SEQ ID NO: 2603483 - DNA, 25 bp, Homo sapien
aggacctggatatcctggattaccc

SEQ ID NO: 2603484 - DNA, 25 bp, Homo sapien
gatatcctggattaccctttggtcc

SEQ ID NO: 2603485 - DNA, 25 bp, Homo sapien
ctggcagtgatgacataattatact

SEQ ID NO: 2603486 - DNA, 25 bp, Homo sapien
gaccaattggccctggtataccagt

SEQ ID NO: 2603487 - DNA, 25 bp, Homo sapien
ggccctggtataccagtgggaccag

SEQ ID NO: 2603488 - DNA, 25 bp, Homo sapien
ctgggggaccaattggccctggtat

SEQ ID NO: 2603489 - DNA, 25 bp, Homo sapien
ctggtataccagtgggaccaggtag

SEQ ID NO: 2603490 - DNA, 25 bp, Homo sapien
cttaggtcctggaagtcctggtgga

SEQ ID NO: 2603491 - DNA, 25 bp, Homo sapien
gaagtcctggtggaccaggagggcc

SEQ ID NO: 2603492 - DNA, 25 bp, Homo sapien
tggaagtcctggtggaccaggaggg

SEQ ID NO: 2603493 - DNA, 25 bp, Homo sapien
cctggaagtcctggtggaccaggag

SEQ ID NO: 2603494 - DNA, 25 bp, Homo sapien
tccctggaaatttaagcccatattc

SEQ ID NO: 2603495 - DNA, 25 bp, Homo sapien
tcaattggtcttttctgttcactga

SEQ ID NO: 2603496 - DNA, 25 bp, Homo sapien
actctacatcaattggtcttttctg

SEQ ID NO: 2603497 - DNA, 25 bp, Homo sapien
caggtgggccctgaagaccttgctc

SEQ ID NO: 2603498 - DNA, 25 bp, Homo sapien
tgttcactgatctgcccaggtggcc

SEQ ID NO: 2603499 - DNA, 25 bp, Homo sapien
ggaggaccacgtatccctggaggtc

SEQ ID NO: 2603500 - DNA, 25 bp, Homo sapien
tggaggaccacgtatccctggaggt

SEQ ID NO: 2603501 - DNA, 25 bp, Homo sapien
cttctcacctttctcaccacctggg

SEQ ID NO: 2603502 - DNA, 25 bp, Homo sapien
ctcacccttctcacctttctcacca

SEQ ID NO: 2603503 - DNA, 25 bp, Homo sapien
ctcacctttctcaccacctggggga

SEQ ID NO: 2603504 - DNA, 25 bp, Homo sapien
tggctctccttgctcacccttctca

SEQ ID NO: 2603505 - DNA, 25 bp, Homo sapien
cattttctccatctttgcctggttt

SEQ ID NO: 2603506 - DNA, 25 bp, Homo sapien
aggaattcctggttggccattttct

SEQ ID NO: 2603507 - DNA, 25 bp, Homo sapien
ccattttctccatctttgcctggtt

SEQ ID NO: 2603508 - DNA, 25 bp, Homo sapien
tttctccatctttgcctggtttacc

SEQ ID NO: 2603509 - DNA, 25 bp, Homo sapien
caatcaaggtgaaaaccagcagcct

SEQ ID NO: 2603510 - DNA, 25 bp, Homo sapien
tcagaacttaaccaaagcttgcagc

SEQ ID NO: 2603511 - DNA, 25 bp, Homo sapien
tagaggatagggtgacatcagcaca

SEQ ID NO: 2603512 - DNA, 25 bp, Homo sapien
caaatgatggtgttaggaaatctcc

SEQ ID NO: 2603513 - DNA, 25 bp, Homo sapien
gggttcaccagggtaaccaggatca

SEQ ID NO: 2603514 - DNA, 25 bp, Homo sapien
cagggtaaccaggatcaccaggcaa

SEQ ID NO: 2603515 - DNA, 25 bp, Homo sapien
gggtaaccaggatcaccaggcaaac

SEQ ID NO: 2603516 - DNA, 25 bp, Homo sapien
tcaccatcccttccgggttcaccag

SEQ ID NO: 2603517 - DNA, 25 bp, Homo sapien
caggtgggccagtgtcacctttttg

SEQ ID NO: 2603518 - DNA, 25 bp, Homo sapien
ccaggtgggccagtgtcaccttttt

SEQ ID NO: 2603519 - DNA, 25 bp, Homo sapien
tccaggtgggccagtgtcacctttt

SEQ ID NO: 2603520 - DNA, 25 bp, Homo sapien
ggcaacccaggcaacccaatgtttc

SEQ ID NO: 2603521 - DNA, 25 bp, Homo sapien
gccaggtggaccctgtattccagga

SEQ ID NO: 2603522 - DNA, 25 bp, Homo sapien
tattccaggaaatcctcgctctcct

SEQ ID NO: 2603523 - DNA, 25 bp, Homo sapien
tctcctatagttataccagtcccag

SEQ ID NO: 2603524 - DNA, 25 bp, Homo sapien
caggaatggaaattccaggtggtcc

SEQ ID NO: 2603525 - DNA, 25 bp, Homo sapien
cccaggctgtccgtcaagtccagga

SEQ ID NO: 2603526 - DNA, 25 bp, Homo sapien
ccaggaatggaaattccaggtggtc

SEQ ID NO: 2603527 - DNA, 25 bp, Homo sapien
aggctgtccgtcaagtccaggaggt

SEQ ID NO: 2603528 - DNA, 25 bp, Homo sapien
gggcctggttcacatatctcatcac

SEQ ID NO: 2603529 - DNA, 25 bp, Homo sapien
gccagaggataaaatagtgattacc

SEQ ID NO: 2603530 - DNA, 25 bp, Homo sapien
atatttagctaaagaaaccaggcac

SEQ ID NO: 2603531 - DNA, 25 bp, Homo sapien
catgtacacaaagttcaagattagg

SEQ ID NO: 2603532 - DNA, 25 bp, Homo sapien
caatagctccagaccaaatgtccat

SEQ ID NO: 2603533 - DNA, 25 bp, Homo sapien
gaggccctgaaataccagttccaat

SEQ ID NO: 2603534 - DNA, 25 bp, Homo sapien
ttccaatgcagttgaagcaagtgtc

SEQ ID NO: 2603535 - DNA, 25 bp, Homo sapien
tggaggccctgaaataccagttcca

SEQ ID NO: 2603536 - DNA, 25 bp, Homo sapien
cagttgaagcaagtgtcacctttgt

SEQ ID NO: 2603537 - DNA, 25 bp, Homo sapien
taatcctttgggaccagttgcacca

SEQ ID NO: 2603538 - DNA, 25 bp, Homo sapien
tggtaatcctttgggaccagttgca

SEQ ID NO: 2603539 - DNA, 25 bp, Homo sapien
aatcctttgggaccagttgcaccag

SEQ ID NO: 2603540 - DNA, 25 bp, Homo sapien
gtaatcctttgggaccagttgcacc

SEQ ID NO: 2603541 - DNA, 25 bp, Homo sapien
aaagtgaggatatcaccaggttcac

SEQ ID NO: 2603542 - DNA, 25 bp, Homo sapien
aagccctggcaatccatcctgtcca

SEQ ID NO: 2603543 - DNA, 25 bp, Homo sapien
ggaaaagtgaggatatcaccaggtt

SEQ ID NO: 2603544 - DNA, 25 bp, Homo sapien
tcctttcgggccaggaagccctggc

SEQ ID NO: 2603545 - DNA, 25 bp, Homo sapien
cagggggacccataggccctatatt

SEQ ID NO: 2603546 - DNA, 25 bp, Homo sapien
ctgccacaccttgtatgcctttttc

SEQ ID NO: 2603547 - DNA, 25 bp, Homo sapien
ccttgtatgcctttttcacctactg

SEQ ID NO: 2603548 - DNA, 25 bp, Homo sapien
gccacaccttgtatgcctttttcac

SEQ ID NO: 2603549 - DNA, 25 bp, Homo sapien
cacaccttgtatgcctttttcacct

SEQ ID NO: 2603550 - DNA, 25 bp, Homo sapien
tacactatagccacacgaaaagtta

SEQ ID NO: 2603551 - DNA, 25 bp, Homo sapien
aaaccattgtgatcccttgctaaga

SEQ ID NO: 2603552 - DNA, 25 bp, Homo sapien
gagttcaaatataaacggccaggga

SEQ ID NO: 2603553 - DNA, 25 bp, Homo sapien
tgtgtgtggtagctacctgtgtgct

SEQ ID NO: 2603554 - DNA, 25 bp, Homo sapien
gctgggttatagtctgacctggatc

SEQ ID NO: 2603555 - DNA, 25 bp, Homo sapien
tatagtctgacctggatccccttta

SEQ ID NO: 2603556 - DNA, 25 bp, Homo sapien
ccccggctgggttatagtctgacct

SEQ ID NO: 2603557 - DNA, 25 bp, Homo sapien
ttccccggctgggttatagtctgac

SEQ ID NO: 2603558 - DNA, 25 bp, Homo sapien
gcaagcctggttgccctggaagtcc

SEQ ID NO: 2603559 - DNA, 25 bp, Homo sapien
tggcaagcctggttgccctggaagt

SEQ ID NO: 2603560 - DNA, 25 bp, Homo sapien
taccaggtatccctggcaagcctgg

SEQ ID NO: 2603561 - DNA, 25 bp, Homo sapien
tctcctttgctaccaggtatccctg

SEQ ID NO: 2603562 - DNA, 25 bp, Homo sapien
ctggaaagccgggtggcccaggagg

SEQ ID NO: 2603563 - DNA, 25 bp, Homo sapien
ccaggagggccttctagaccaattc

SEQ ID NO: 2603564 - DNA, 25 bp, Homo sapien
aagacttggggcttgggatgatatc

SEQ ID NO: 2603565 - DNA, 25 bp, Homo sapien
gatgatatctgagtcaaaatagaga

SEQ ID NO: 2603566 - DNA, 25 bp, Homo sapien
tgaccttggactattaaagatgatt

SEQ ID NO: 2603567 - DNA, 25 bp, Homo sapien
gaccttggactattaaagatgattt

SEQ ID NO: 2603568 - DNA, 25 bp, Homo sapien
cacaacaaaaactcccatgactttt

SEQ ID NO: 2603569 - DNA, 25 bp, Homo sapien
caaaacacaacaaaaactcccatga

SEQ ID NO: 2603570 - DNA, 25 bp, Homo sapien
aaacacaacaaaaactcccatgact

SEQ ID NO: 2603571 - DNA, 25 bp, Homo sapien
acaaaacacaacaaaaactcccatg

SEQ ID NO: 2603572 - DNA, 25 bp, Homo sapien
cccaggtaatgcaaatcctggttca

SEQ ID NO: 2603573 - DNA, 25 bp, Homo sapien
caggtaatgcaaatcctggttcacc

SEQ ID NO: 2603574 - DNA, 25 bp, Homo sapien
tggcccaggtaatgcaaatcctggt

SEQ ID NO: 2603575 - DNA, 25 bp, Homo sapien
caggtggcccaggtaatgcaaatcc

SEQ ID NO: 2603576 - DNA, 25 bp, Homo sapien
tgcgtcctggaggacccggaggtcc

SEQ ID NO: 2603577 - DNA, 25 bp, Homo sapien
ggaccaagtgctcctttgaaacctg

SEQ ID NO: 2603578 - DNA, 25 bp, Homo sapien
agtgcgtcctggaggacccggaggt

SEQ ID NO: 2603579 - DNA, 25 bp, Homo sapien
tttggaccaagtgctcctttgaaac

SEQ ID NO: 2603580 - DNA, 25 bp, Homo sapien
gtagagagcaatccttgagatcttc

SEQ ID NO: 2603581 - DNA, 25 bp, Homo sapien
gattcaggtactagctggcatagaa

SEQ ID NO: 2603582 - DNA, 25 bp, Homo sapien
catttgagcttctactgattcaggt

SEQ ID NO: 2603583 - DNA, 25 bp, Homo sapien
gagtgtagtctactgatccaaaata

SEQ ID NO: 2603584 - DNA, 25 bp, Homo sapien
tacgggtttctatgtgaagcttcac

SEQ ID NO: 2603585 - DNA, 25 bp, Homo sapien
catccttagcagcacttattgtcag

SEQ ID NO: 2603586 - DNA, 25 bp, Homo sapien
taaggtatctactcaaattgtttgc

SEQ ID NO: 2603587 - DNA, 25 bp, Homo sapien
agtggctgcaccattctgtgtatta

SEQ ID NO: 2603588 - DNA, 25 bp, Homo sapien
tacacataagtatcaagagcaaagg

SEQ ID NO: 2603589 - DNA, 25 bp, Homo sapien
aacacctgagtcactagtccttggg

SEQ ID NO: 2603590 - DNA, 25 bp, Homo sapien
gggccatggcttataaacatgttca

SEQ ID NO: 2603591 - DNA, 25 bp, Homo sapien
ctttttactaactcagggccatggc

SEQ ID NO: 2603592 - DNA, 25 bp, Homo sapien
ggtccaggttgtccatttggtccaa

SEQ ID NO: 2603593 - DNA, 25 bp, Homo sapien
tggtccctgaacacctattcctggc

SEQ ID NO: 2603594 - DNA, 25 bp, Homo sapien
ccaggttgtccatttggtccaacat

SEQ ID NO: 2603595 - DNA, 25 bp, Homo sapien
caggttgacctattggcccaggaat

SEQ ID NO: 2603596 - DNA, 25 bp, Homo sapien
ggaacatcaagtccaggaggtcctg

SEQ ID NO: 2603597 - DNA, 25 bp, Homo sapien
cttctctcctggtattccatgtaaa

SEQ ID NO: 2603598 - DNA, 25 bp, Homo sapien
ctgggggtcctggaacatcaagtcc

SEQ ID NO: 2603599 - DNA, 25 bp, Homo sapien
tggatcccccttctctcctggtatt

SEQ ID NO: 2603600 - DNA, 25 bp, Homo sapien
ggtgctccggggatccctggactgc

SEQ ID NO: 2603601 - DNA, 25 bp, Homo sapien
gaggtcctataggaccaggtgctcc

SEQ ID NO: 2603602 - DNA, 25 bp, Homo sapien
gatcctggaggtcctataggaccag

SEQ ID NO: 2603603 - DNA, 25 bp, Homo sapien
gtcctataggaccaggtgctccggg

SEQ ID NO: 2603604 - DNA, 25 bp, Homo sapien
ttaagaccaggtacaccactcctgc

SEQ ID NO: 2603605 - DNA, 25 bp, Homo sapien
tgtagggccaggaagtcctggctga

SEQ ID NO: 2603606 - DNA, 25 bp, Homo sapien
ctgtagggccaggaagtcctggctg

SEQ ID NO: 2603607 - DNA, 25 bp, Homo sapien
tcctggctgaccctgcaagccatca

SEQ ID NO: 2603608 - DNA, 25 bp, Homo sapien
tggctgaccctgcaagccatcatca

SEQ ID NO: 2603609 - DNA, 25 bp, Homo sapien
tttggatccattggtccaggagggc

SEQ ID NO: 2603610 - DNA, 25 bp, Homo sapien
ccagaagatttggatccattggtcc

SEQ ID NO: 2603611 - DNA, 25 bp, Homo sapien
gaagatttggatccattggtccagg

SEQ ID NO: 2603612 - DNA, 25 bp, Homo sapien
tgagcccagaagatttggatccatt

SEQ ID NO: 2603613 - DNA, 25 bp, Homo sapien
ggttgtccactcagtccaggttgcc

SEQ ID NO: 2603614 - DNA, 25 bp, Homo sapien
tgtccactcagtccaggttgccctg

SEQ ID NO: 2603615 - DNA, 25 bp, Homo sapien
cactcagtccaggttgccctgggtc

SEQ ID NO: 2603616 - DNA, 25 bp, Homo sapien
tccaggttgtccactcagtccaggt

SEQ ID NO: 2603617 - DNA, 25 bp, Homo sapien
tgcttgagctctgtgatgtcatctg

SEQ ID NO: 2603618 - DNA, 25 bp, Homo sapien
tttttcctaggaccacagtattgcc

SEQ ID NO: 2603619 - DNA, 25 bp, Homo sapien
tatcaaggccatgtagtatggagtc

SEQ ID NO: 2603620 - DNA, 25 bp, Homo sapien
gtatggagtctagcgcaaataactg

SEQ ID NO: 2603621 - DNA, 25 bp, Homo sapien
agtccaggaggtcctataagacctg

SEQ ID NO: 2603622 - DNA, 25 bp, Homo sapien
ctggaaaacccatatcaccgatggt

SEQ ID NO: 2603623 - DNA, 25 bp, Homo sapien
caccgatggttcctttaagtccagg

SEQ ID NO: 2603624 - DNA, 25 bp, Homo sapien
ccaggaggtcctataagacctggct

SEQ ID NO: 2603625 - DNA, 25 bp, Homo sapien
tacttgtggattatctaagatgcat

SEQ ID NO: 2603626 - DNA, 25 bp, Homo sapien
ttttaaaaagctccgcaaactctga

SEQ ID NO: 2603627 - DNA, 25 bp, Homo sapien
tctgagttagataataatgagcctc

SEQ ID NO: 2603628 - DNA, 25 bp, Homo sapien
tttacaaaatatgctttacttgtgg

SEQ ID NO: 2603629 - DNA, 25 bp, Homo sapien
gacctggaagaccaatgcttgaaat

SEQ ID NO: 2603630 - DNA, 25 bp, Homo sapien
caatgcttgaaataccaggatcacc

SEQ ID NO: 2603631 - DNA, 25 bp, Homo sapien
gggagccaggttgtccaggaactcc

SEQ ID NO: 2603632 - DNA, 25 bp, Homo sapien
ctttgtcgcctttctgtccaggtaa

SEQ ID NO: 2603633 - DNA, 25 bp, Homo sapien
tctcttatccagaatatactatgtc

SEQ ID NO: 2603634 - DNA, 25 bp, Homo sapien
aaaacttaggaatgagcatagtatt

SEQ ID NO: 2603635 - DNA, 25 bp, Homo sapien
gtatgtgcctaaaactatatgccaa

SEQ ID NO: 2603636 - DNA, 25 bp, Homo sapien
cttaggaatgagcatagtattaaaa

SEQ ID NO: 2603637 - DNA, 25 bp, Homo sapien
tggccacaaaccctaaaacatatct

SEQ ID NO: 2603638 - DNA, 25 bp, Homo sapien
tggactggccacaaaccctaaaaca

SEQ ID NO: 2603639 - DNA, 25 bp, Homo sapien
cactaaaaagggatggactaacaag

SEQ ID NO: 2603640 - DNA, 25 bp, Homo sapien
tattcagaggactatctcagacacg

SEQ ID NO: 2603641 - DNA, 25 bp, Homo sapien
taataacattaggacaaaggccaac

SEQ ID NO: 2603642 - DNA, 25 bp, Homo sapien
tcctgttgagtccaatgattctgaa

SEQ ID NO: 2603643 - DNA, 25 bp, Homo sapien
ctgccactatcttgatccaagccat

SEQ ID NO: 2603644 - DNA, 25 bp, Homo sapien
tgtatttcagcatatagcaactcca

SEQ ID NO: 2603645 - DNA, 25 bp, Homo sapien
catacagaaatactcaggtgcatta

SEQ ID NO: 2603646 - DNA, 25 bp, Homo sapien
aagccatcaacatcattagcctgca

SEQ ID NO: 2603647 - DNA, 25 bp, Homo sapien
cttgcaggtgagtaagatctatttt

SEQ ID NO: 2603648 - DNA, 25 bp, Homo sapien
acttccttcctcacttagtacatac

SEQ ID NO: 2603649 - DNA, 25 bp, Homo sapien
tggtaatccgggcaaaccaggatct

SEQ ID NO: 2603650 - DNA, 25 bp, Homo sapien
ctggtaatccgggcaaaccaggatc

SEQ ID NO: 2603651 - DNA, 25 bp, Homo sapien
tcctggtaatccgggcaaaccagga

SEQ ID NO: 2603652 - DNA, 25 bp, Homo sapien
gtaatccgggcaaaccaggatctcc

SEQ ID NO: 2603653 - DNA, 25 bp, Homo sapien
caggagggccactaataccttttgg

SEQ ID NO: 2603654 - DNA, 25 bp, Homo sapien
gccactaataccttttggtccagga

SEQ ID NO: 2603655 - DNA, 25 bp, Homo sapien
caggaataccatcttgaccgggttt

SEQ ID NO: 2603656 - DNA, 25 bp, Homo sapien
ttgcctttttcgcctggaggccctg

SEQ ID NO: 2603657 - DNA, 25 bp, Homo sapien
gctggtccaggaataccatcttgac

SEQ ID NO: 2603658 - DNA, 25 bp, Homo sapien
gaataccatcttgaccgggtttgcc

SEQ ID NO: 2603659 - DNA, 25 bp, Homo sapien
gctaatagtctcaggatgaagagga

SEQ ID NO: 2603660 - DNA, 25 bp, Homo sapien
atgagctaatagtctcaggatgaag

SEQ ID NO: 2603661 - DNA, 25 bp, Homo sapien
gagctaatagtctcaggatgaagag

SEQ ID NO: 2603662 - DNA, 25 bp, Homo sapien
ctaatagtctcaggatgaagaggaa

SEQ ID NO: 2603663 - DNA, 25 bp, Homo sapien
tcctgggtttccaaagcctggttga

SEQ ID NO: 2603664 - DNA, 25 bp, Homo sapien
agtcctggaagtccagggggtcctg

SEQ ID NO: 2603665 - DNA, 25 bp, Homo sapien
cagaaagtcctggaagtccaggggg

SEQ ID NO: 2603666 - DNA, 25 bp, Homo sapien
ggaatcccaggtaatcctccatcac

SEQ ID NO: 2603667 - DNA, 25 bp, Homo sapien
tgcctttaggtccttccagagctgg

SEQ ID NO: 2603668 - DNA, 25 bp, Homo sapien
ctggttcgccctttggacctggaag

SEQ ID NO: 2603669 - DNA, 25 bp, Homo sapien
ttccagagctggacccggagaacca

SEQ ID NO: 2603670 - DNA, 25 bp, Homo sapien
caagtctcaaaatctgttcataacc

SEQ ID NO: 2603671 - DNA, 25 bp, Homo sapien
caaggatgaaaacgagcatttccaa

SEQ ID NO: 2603672 - DNA, 25 bp, Homo sapien
ctaggctcagtgacattaatcaagg

SEQ ID NO: 2603673 - DNA, 25 bp, Homo sapien
tgttcataacctatcaccagtgact

SEQ ID NO: 2603674 - DNA, 25 bp, Homo sapien
ctgtaggacctggatagggatcaaa

SEQ ID NO: 2603675 - DNA, 25 bp, Homo sapien
aaagttcaccaaggcccaatgtcat

SEQ ID NO: 2603676 - DNA, 25 bp, Homo sapien
agttcatatccatgcatctgtatat

SEQ ID NO: 2603677 - DNA, 25 bp, Homo sapien
agggatcaaagttcaccaaggccca

SEQ ID NO: 2603678 - DNA, 25 bp, Homo sapien
tctcctcgacataggtaaaacttag

SEQ ID NO: 2603679 - DNA, 25 bp, Homo sapien
tctactctactgcaatagtcctgaa

SEQ ID NO: 2603680 - DNA, 25 bp, Homo sapien
tcaggtagaaacaaatggctcccta

SEQ ID NO: 2603681 - DNA, 25 bp, Homo sapien
tgctccttggctgtaaataatcact

SEQ ID NO: 2603682 - DNA, 25 bp, Homo sapien
aacaagaaagtggatgcagcgaaca

SEQ ID NO: 2603683 - DNA, 25 bp, Homo sapien
tgatcaaactttagacaggctcctc

SEQ ID NO: 2603684 - DNA, 25 bp, Homo sapien
aatcggtttagagagagtcccttca

SEQ ID NO: 2603685 - DNA, 25 bp, Homo sapien
tgacggagcttttgaggtaacagaa

SEQ ID NO: 2603686 - DNA, 25 bp, Homo sapien
gatgaattgactggtatattttaaa

SEQ ID NO: 2603687 - DNA, 25 bp, Homo sapien
aatattgtccataagtagtaattac

SEQ ID NO: 2603688 - DNA, 25 bp, Homo sapien
tgtccataagtagtaattactaaag

SEQ ID NO: 2603689 - DNA, 25 bp, Homo sapien
taattactaaaggtatactgatgaa

SEQ ID NO: 2603690 - DNA, 25 bp, Homo sapien
tggccattaccaactgtacttttgc

SEQ ID NO: 2603691 - DNA, 25 bp, Homo sapien
ccaggaggctttcctattactattt

SEQ ID NO: 2603692 - DNA, 25 bp, Homo sapien
tacagttgactttaaaggcctcatt

SEQ ID NO: 2603693 - DNA, 25 bp, Homo sapien
tcaaaacatgaatatacgatggcca

SEQ ID NO: 2603694 - DNA, 25 bp, Homo sapien
ccaagtcttttgtcaccaggtggca

SEQ ID NO: 2603695 - DNA, 25 bp, Homo sapien
ggtccattaagcaaccagggagatc

SEQ ID NO: 2603696 - DNA, 25 bp, Homo sapien
gctgaggctgagactaagtaatcct

SEQ ID NO: 2603697 - DNA, 25 bp, Homo sapien
cagggagatcttatcattggccaag

SEQ ID NO: 2603698 - DNA, 25 bp, Homo sapien
gatctcctttcaaaccaggcaagcc

SEQ ID NO: 2603699 - DNA, 25 bp, Homo sapien
caggcaagccaggtagcccaggttg

SEQ ID NO: 2603700 - DNA, 25 bp, Homo sapien
accaggcaagccaggtagcccaggt

SEQ ID NO: 2603701 - DNA, 25 bp, Homo sapien
atctcctttcaaaccaggcaagcca

SEQ ID NO: 2603702 - DNA, 25 bp, Homo sapien
caaatctggaacaatgagagcatcg

SEQ ID NO: 2603703 - DNA, 25 bp, Homo sapien
ggctattgctctacttcaagtgcag

SEQ ID NO: 2603704 - DNA, 25 bp, Homo sapien
tcagccacccaactacaggaagaat

SEQ ID NO: 2603705 - DNA, 25 bp, Homo sapien
cactagagactggttgaggcaaaat

SEQ ID NO: 2603706 - DNA, 25 bp, Homo sapien
attccattgagacccggccggccag

SEQ ID NO: 2603707 - DNA, 25 bp, Homo sapien
ttgagacccggccggccaggattac

SEQ ID NO: 2603708 - DNA, 25 bp, Homo sapien
tttcattccattgagacccggccgg

SEQ ID NO: 2603709 - DNA, 25 bp, Homo sapien
cattgagacccggccggccaggatt

SEQ ID NO: 2603710 - DNA, 25 bp, Homo sapien
gatccaggtactccactgggtcctt

SEQ ID NO: 2603711 - DNA, 25 bp, Homo sapien
tgatccaggtactccactgggtcct

SEQ ID NO: 2603712 - DNA, 25 bp, Homo sapien
ctgatccaggtactccactgggtcc

SEQ ID NO: 2603713 - DNA, 25 bp, Homo sapien
tcctggtagaccctttagcccaggc

SEQ ID NO: 2603714 - DNA, 25 bp, Homo sapien
tctcctttaattatgatactctgtc

SEQ ID NO: 2603715 - DNA, 25 bp, Homo sapien
gatactctgtcctgaaggaccaggt

SEQ ID NO: 2603716 - DNA, 25 bp, Homo sapien
ctgtcctgaaggaccaggtaatcca

SEQ ID NO: 2603717 - DNA, 25 bp, Homo sapien
gccagggagtccattgcgtccagga

SEQ ID NO: 2603718 - DNA, 25 bp, Homo sapien
agggagtccattgcgtccaggatct

SEQ ID NO: 2603719 - DNA, 25 bp, Homo sapien
tgggtctcctttgcgccctcctgca

SEQ ID NO: 2603720 - DNA, 25 bp, Homo sapien
cagacctgggtctcctttgcgccct

SEQ ID NO: 2603721 - DNA, 25 bp, Homo sapien
cattgtggtgcatccgttgtctggc

SEQ ID NO: 2603722 - DNA, 25 bp, Homo sapien
gaaatccatgtgcaacagaggaggt

SEQ ID NO: 2603723 - DNA, 25 bp, Homo sapien
ggctgtggcgtgtaataagaaatcc

SEQ ID NO: 2603724 - DNA, 25 bp, Homo sapien
gacctgggggaccttgcaatccatc

SEQ ID NO: 2603725 - DNA, 25 bp, Homo sapien
ccaagtcttgaccgtgggctctttt

SEQ ID NO: 2603726 - DNA, 25 bp, Homo sapien
tcttgaccgtgggctcttttatttc

SEQ ID NO: 2603727 - DNA, 25 bp, Homo sapien
tactaaagcgacgaaggcagctgcc

SEQ ID NO: 2603728 - DNA, 25 bp, Homo sapien
ctaatgaatggctggatgctctggc

SEQ ID NO: 2603729 - DNA, 25 bp, Homo sapien
ggtagagagccagtaagaatagtca

SEQ ID NO: 2603730 - DNA, 25 bp, Homo sapien
tgttgcagaacatgaaaggcatggt

SEQ ID NO: 2603731 - DNA, 25 bp, Homo sapien
cagctggagcttcacatactgcaca

SEQ ID NO: 2603732 - DNA, 25 bp, Homo sapien
gggaatctggatcgtctgactgtga

SEQ ID NO: 2603733 - DNA, 25 bp, Homo sapien
tgtgaactgcgatcaccacagctgg

SEQ ID NO: 2603734 - DNA, 25 bp, Homo sapien
tccacagagaatcccatccctgagg

SEQ ID NO: 2603735 - DNA, 25 bp, Homo sapien
aatgtgccgcaatacccatgtgcca

SEQ ID NO: 2603736 - DNA, 25 bp, Homo sapien
tagtatccacaccaagggtagtcaa

SEQ ID NO: 2603737 - DNA, 25 bp, Homo sapien
ccatgtgccataatagcttagtgaa

SEQ ID NO: 2603738 - DNA, 25 bp, Homo sapien
tcaaatctagtgaaggaacaggccc

SEQ ID NO: 2603739 - DNA, 25 bp, Homo sapien
gaggctagggcttgacctgagcctt

SEQ ID NO: 2603740 - DNA, 25 bp, Homo sapien
gtagttacaggtacccctcccatga

SEQ ID NO: 2603741 - DNA, 25 bp, Homo sapien
acatgtctgacacatctacagttgc

SEQ ID NO: 2603742 - DNA, 25 bp, Homo sapien
ccatgacattcgatgaagggagctg

SEQ ID NO: 2603743 - DNA, 25 bp, Homo sapien
cctgagtcatgtatatgagaagaac

SEQ ID NO: 2603744 - DNA, 25 bp, Homo sapien
gaaggattactactaagctatcaca

SEQ ID NO: 2603745 - DNA, 25 bp, Homo sapien
ggtctcaatctagttgaacagctgc

SEQ ID NO: 2603746 - DNA, 25 bp, Homo sapien
cagctgctgacttattaggaaggtc

SEQ ID NO: 2603747 - DNA, 25 bp, Homo sapien
aataagaaataagacaatcagatcc

SEQ ID NO: 2603748 - DNA, 25 bp, Homo sapien
taagaaataagacaatcagatccac

SEQ ID NO: 2603749 - DNA, 25 bp, Homo sapien
aagaaataagacaatcagatccaca

SEQ ID NO: 2603750 - DNA, 25 bp, Homo sapien
gaaataagacaatcagatccacatt

SEQ ID NO: 2603751 - DNA, 25 bp, Homo sapien
ctaattcgtgtcctcaagtctcctg

SEQ ID NO: 2603752 - DNA, 25 bp, Homo sapien
tcaagtctcctgctttcagcgtttc

SEQ ID NO: 2603753 - DNA, 25 bp, Homo sapien
ttgacatcggctaattcgtgtcctc

SEQ ID NO: 2603754 - DNA, 25 bp, Homo sapien
agtctcctgctttcagcgtttctga

SEQ ID NO: 2603755 - DNA, 25 bp, Homo sapien
tatatatcacattttaaaacacaaa

SEQ ID NO: 2603756 - DNA, 25 bp, Homo sapien
aacacaaaaggaattcttcaaaatg

SEQ ID NO: 2603757 - DNA, 25 bp, Homo sapien
tatatatatatcacattttaaaaca

SEQ ID NO: 2603758 - DNA, 25 bp, Homo sapien
tatatatatcacattttaaaacaca

SEQ ID NO: 2603759 - DNA, 25 bp, Homo sapien
ggttactagtcagcatgttatcttg

SEQ ID NO: 2603760 - DNA, 25 bp, Homo sapien
ggcgcattgctgaggtacatctgaa

SEQ ID NO: 2603761 - DNA, 25 bp, Homo sapien
tatcttgatcatatatagtagcacc

SEQ ID NO: 2603762 - DNA, 25 bp, Homo sapien
tagagactttgctctggcgcattgc

SEQ ID NO: 2603763 - DNA, 25 bp, Homo sapien
cattaagtcaggagatgatagctag

SEQ ID NO: 2603764 - DNA, 25 bp, Homo sapien
gcaggattagtagcaccgtgaaaaa

SEQ ID NO: 2603765 - DNA, 25 bp, Homo sapien
gagactaaccaagtgttgtttccca

SEQ ID NO: 2603766 - DNA, 25 bp, Homo sapien
aaaacccgggatacagcaggattag

SEQ ID NO: 2603767 - DNA, 25 bp, Homo sapien
ggaaatattgaattggaaaacagat

SEQ ID NO: 2603768 - DNA, 25 bp, Homo sapien
aaggagcaaggaaatattgaattgg

SEQ ID NO: 2603769 - DNA, 25 bp, Homo sapien
ctggcaaaaatctgaattagcattt

SEQ ID NO: 2603770 - DNA, 25 bp, Homo sapien
tggcaaaaatctgaattagcatttc

SEQ ID NO: 2603771 - DNA, 25 bp, Homo sapien
caaaatgagacaacttccctcctgt

SEQ ID NO: 2603772 - DNA, 25 bp, Homo sapien
gaaccactgttgcatgctacattgg

SEQ ID NO: 2603773 - DNA, 25 bp, Homo sapien
tgctaaagcaattaggaaccactgt

SEQ ID NO: 2603774 - DNA, 25 bp, Homo sapien
gctaccttaagtcccagtttgctgc

SEQ ID NO: 2603775 - DNA, 25 bp, Homo sapien
gaaagcaagtcacgaatggtgtgca

SEQ ID NO: 2603776 - DNA, 25 bp, Homo sapien
agagtaagacttagagaccagtgcc

SEQ ID NO: 2603777 - DNA, 25 bp, Homo sapien
ccttgccacgcagaagggcggtaag

SEQ ID NO: 2603778 - DNA, 25 bp, Homo sapien
catgggccacaggataggaaagcaa

SEQ ID NO: 2603779 - DNA, 25 bp, Homo sapien
gctgtaccatcattggcaaacctca

SEQ ID NO: 2603780 - DNA, 25 bp, Homo sapien
tagagctttgttccgtggtggcaca

SEQ ID NO: 2603781 - DNA, 25 bp, Homo sapien
gacctttgagaacgtgacactagca

SEQ ID NO: 2603782 - DNA, 25 bp, Homo sapien
gacactagcaaggtggtgaccacag

SEQ ID NO: 2603783 - DNA, 25 bp, Homo sapien
tagaacagtgcacgcacgtgcaaag

SEQ ID NO: 2603784 - DNA, 25 bp, Homo sapien
cagtgcacgcacgtgcaaagatgct

SEQ ID NO: 2603785 - DNA, 25 bp, Homo sapien
tgcacgcacgtgcaaagatgctgtc

SEQ ID NO: 2603786 - DNA, 25 bp, Homo sapien
gaaagtagaacagtgcacgcacgtg

SEQ ID NO: 2603787 - DNA, 25 bp, Homo sapien
acaatatgtttgatgccagccacac

SEQ ID NO: 2603788 - DNA, 25 bp, Homo sapien
cacaatatgtttgatgccagccaca

SEQ ID NO: 2603789 - DNA, 25 bp, Homo sapien
tgtacagatccaaggctgtgctgcc

SEQ ID NO: 2603790 - DNA, 25 bp, Homo sapien
gcagaggcaaccttccttgtaggga

SEQ ID NO: 2603791 - DNA, 25 bp, Homo sapien
gagggcttcgccagatgttgatcac

SEQ ID NO: 2603792 - DNA, 25 bp, Homo sapien
tctggctgaaaaggtgagggccact

SEQ ID NO: 2603793 - DNA, 25 bp, Homo sapien
gtttcaacctgttgctaatgctgct

SEQ ID NO: 2603794 - DNA, 25 bp, Homo sapien
agcccaagacgttgccggtggctcg

SEQ ID NO: 2603795 - DNA, 25 bp, Homo sapien
gccgcagctgctggatttgactccg

SEQ ID NO: 2603796 - DNA, 25 bp, Homo sapien
taatgctgctgatgccgaagcagta

SEQ ID NO: 2603797 - DNA, 25 bp, Homo sapien
tgccaatggctcctcaaaatgtctc

SEQ ID NO: 2603798 - DNA, 25 bp, Homo sapien
gagtatgtgccaatgttacctggaa

SEQ ID NO: 2603799 - DNA, 25 bp, Homo sapien
cagaaatcctcagggtggctcttcc

SEQ ID NO: 2603800 - DNA, 25 bp, Homo sapien
gagctcacctttgggacagaatgac

SEQ ID NO: 2603801 - DNA, 25 bp, Homo sapien
tactggtggccgctcgcgcccctcc

SEQ ID NO: 2603802 - DNA, 25 bp, Homo sapien
ctggtggccgctcgcgcccctccat

SEQ ID NO: 2603803 - DNA, 25 bp, Homo sapien
ctctactggtggccgctcgcgcccc

SEQ ID NO: 2603804 - DNA, 25 bp, Homo sapien
tctactggtggccgctcgcgcccct

SEQ ID NO: 2603805 - DNA, 25 bp, Homo sapien
ttattcgtgtgcctcagagtcgcgg

SEQ ID NO: 2603806 - DNA, 25 bp, Homo sapien
aagaagctcgatccgccgccttgtg

SEQ ID NO: 2603807 - DNA, 25 bp, Homo sapien
ctcgggagtgcctgcagagcggtgg

SEQ ID NO: 2603808 - DNA, 25 bp, Homo sapien
gttctgagcgccctggtcgtcaacc

SEQ ID NO: 2603809 - DNA, 25 bp, Homo sapien
ggaacctgtgtttcgtgggctagaa

SEQ ID NO: 2603810 - DNA, 25 bp, Homo sapien
tcttgttgacgcgagggatgtgaaa

SEQ ID NO: 2603811 - DNA, 25 bp, Homo sapien
ttcggtctcgctcaaggaaaggaaa

SEQ ID NO: 2603812 - DNA, 25 bp, Homo sapien
tatggctgtatacattgcaggcccc

SEQ ID NO: 2603813 - DNA, 25 bp, Homo sapien
gcagtcacagtcagggatctctcag

SEQ ID NO: 2603814 - DNA, 25 bp, Homo sapien
tatatatgtgactacgcagctgaaa

SEQ ID NO: 2603815 - DNA, 25 bp, Homo sapien
tcattttggttgtaagtgcagggaa

SEQ ID NO: 2603816 - DNA, 25 bp, Homo sapien
gcagctgaaatatgtagcagtcaca

SEQ ID NO: 2603817 - DNA, 25 bp, Homo sapien
gggatgtttaagtccgcagaggttg

SEQ ID NO: 2603818 - DNA, 25 bp, Homo sapien
ggatgtttaagtccgcagaggttgt

SEQ ID NO: 2603819 - DNA, 25 bp, Homo sapien
ccctgcccacagtggtataatctag

SEQ ID NO: 2603820 - DNA, 25 bp, Homo sapien
gatgtttaagtccgcagaggttgtc

SEQ ID NO: 2603821 - DNA, 25 bp, Homo sapien
tttcttgcggtgggttagaatatcc

SEQ ID NO: 2603822 - DNA, 25 bp, Homo sapien
ctttcttgcggtgggttagaatatc

SEQ ID NO: 2603823 - DNA, 25 bp, Homo sapien
tcttgcggtgggttagaatatcctc

SEQ ID NO: 2603824 - DNA, 25 bp, Homo sapien
ttcttgcggtgggttagaatatcct

SEQ ID NO: 2603825 - DNA, 25 bp, Homo sapien
ttccaaatctagcatatgtactgca

SEQ ID NO: 2603826 - DNA, 25 bp, Homo sapien
agcatatgtactgcaaactgagccc

SEQ ID NO: 2603827 - DNA, 25 bp, Homo sapien
caaatctagcatatgtactgcaaac

SEQ ID NO: 2603828 - DNA, 25 bp, Homo sapien
tctagcatatgtactgcaaactgag

SEQ ID NO: 2603829 - DNA, 25 bp, Homo sapien
gttagataccatgaaatagtatgtg

SEQ ID NO: 2603830 - DNA, 25 bp, Homo sapien
caaggctcacaaagttccactatat

SEQ ID NO: 2603831 - DNA, 25 bp, Homo sapien
tacttggtaataaaatgttagatac

SEQ ID NO: 2603832 - DNA, 25 bp, Homo sapien
taaaattaggtccttcgtagattca

SEQ ID NO: 2603833 - DNA, 25 bp, Homo sapien
cacttaagatatgtaatttgtaagg

SEQ ID NO: 2603834 - DNA, 25 bp, Homo sapien
acttaagatatgtaatttgtaaggt

SEQ ID NO: 2603835 - DNA, 25 bp, Homo sapien
cttaagatatgtaatttgtaaggtc

SEQ ID NO: 2603836 - DNA, 25 bp, Homo sapien
acacttaagatatgtaatttgtaag

SEQ ID NO: 2603837 - DNA, 25 bp, Homo sapien
cctctattaaagcttgcagcaggac

SEQ ID NO: 2603838 - DNA, 25 bp, Homo sapien
gtacagaacaattacatctggattt

SEQ ID NO: 2603839 - DNA, 25 bp, Homo sapien
gcagcaggaccaccttcttaaagta

SEQ ID NO: 2603840 - DNA, 25 bp, Homo sapien
ttaggcacctaatgtaacgtgcatc

SEQ ID NO: 2603841 - DNA, 25 bp, Homo sapien
tgaaagcagcctcgggctaccaagt

SEQ ID NO: 2603842 - DNA, 25 bp, Homo sapien
gctaccaagtccaatgccatggcaa

SEQ ID NO: 2603843 - DNA, 25 bp, Homo sapien
gtccagtaggttatgcaatagcaca

SEQ ID NO: 2603844 - DNA, 25 bp, Homo sapien
cttctgagtaactggtagctgggac

SEQ ID NO: 2603845 - DNA, 25 bp, Homo sapien
aatggtcaccagcactgcatatggg

SEQ ID NO: 2603846 - DNA, 25 bp, Homo sapien
acacaatgatggacacaggatgacc

SEQ ID NO: 2603847 - DNA, 25 bp, Homo sapien
tatcatagcaggtagttaacactgc

SEQ ID NO: 2603848 - DNA, 25 bp, Homo sapien
gctctttcaggcttccgggtcaaaa

SEQ ID NO: 2603849 - DNA, 25 bp, Homo sapien
taacctgaaaggtcagaacctccag

SEQ ID NO: 2603850 - DNA, 25 bp, Homo sapien
tggcgacagtggcacaacaatgtgg

SEQ ID NO: 2603851 - DNA, 25 bp, Homo sapien
tgggattcattggacgttagaggct

SEQ ID NO: 2603852 - DNA, 25 bp, Homo sapien
gagaggcaactacattttaacctga

SEQ ID NO: 2603853 - DNA, 25 bp, Homo sapien
gactactcgactggtggatgctcaa

SEQ ID NO: 2603854 - DNA, 25 bp, Homo sapien
actaggctactgtgtactttggcaa

SEQ ID NO: 2603855 - DNA, 25 bp, Homo sapien
gatatggctatggaaactaggctac

SEQ ID NO: 2603856 - DNA, 25 bp, Homo sapien
taaatctcagcccaaggttcagtgt

SEQ ID NO: 2603857 - DNA, 25 bp, Homo sapien
tgtatagtgtgagaagaagtccagc

SEQ ID NO: 2603858 - DNA, 25 bp, Homo sapien
ggatatccagtcgttccaacaacat

SEQ ID NO: 2603859 - DNA, 25 bp, Homo sapien
aactgtcagctaggatcttgaaagg

SEQ ID NO: 2603860 - DNA, 25 bp, Homo sapien
tttgcactgagttgtcttgctaccc

SEQ ID NO: 2603861 - DNA, 25 bp, Homo sapien
caatggtgagtagaggtgagtccct

SEQ ID NO: 2603862 - DNA, 25 bp, Homo sapien
ccctgtgaaggcaagcgctattgat

SEQ ID NO: 2603863 - DNA, 25 bp, Homo sapien
tatgcctgacactggctaaagccct

SEQ ID NO: 2603864 - DNA, 25 bp, Homo sapien
gcttggccagtcatacactctcaga

SEQ ID NO: 2603865 - DNA, 25 bp, Homo sapien
atatgcaatgggattccatactggt

SEQ ID NO: 2603866 - DNA, 25 bp, Homo sapien
tgggattccatactggtggaaaggc

SEQ ID NO: 2603867 - DNA, 25 bp, Homo sapien
gtggaaaggcgccccgaaatggata

SEQ ID NO: 2603868 - DNA, 25 bp, Homo sapien
ttccatactggtggaaaggcgcccc

SEQ ID NO: 2603869 - DNA, 25 bp, Homo sapien
gatggtaactgccacctcttctcgg

SEQ ID NO: 2603870 - DNA, 25 bp, Homo sapien
tcccctctcaggtttgatggtaact

SEQ ID NO: 2603871 - DNA, 25 bp, Homo sapien
ctgtagagaaaggaagtcccctctc

SEQ ID NO: 2603872 - DNA, 25 bp, Homo sapien
ttttgtcaatgagctctttcatggt

SEQ ID NO: 2603873 - DNA, 25 bp, Homo sapien
tttgtcaatgagctctttcatggtc

SEQ ID NO: 2603874 - DNA, 25 bp, Homo sapien
gctggaagttatccgcggcccaata

SEQ ID NO: 2603875 - DNA, 25 bp, Homo sapien
gcatcccctagctcctgtagaccat

SEQ ID NO: 2603876 - DNA, 25 bp, Homo sapien
aaatcatctatcctacttgtctctc

SEQ ID NO: 2603877 - DNA, 25 bp, Homo sapien
tcccaactcttgagggtcattcctg

SEQ ID NO: 2603878 - DNA, 25 bp, Homo sapien
tgcccctttggttcattcctggaag

SEQ ID NO: 2603879 - DNA, 25 bp, Homo sapien
accagggtaactcattcctggaaga

SEQ ID NO: 2603880 - DNA, 25 bp, Homo sapien
ccctttggttcattcctggaagata

SEQ ID NO: 2603881 - DNA, 25 bp, Homo sapien
ttccatgtccccgaaaacaccacca

SEQ ID NO: 2603882 - DNA, 25 bp, Homo sapien
ggtttattcctggaagataccatcc

SEQ ID NO: 2603883 - DNA, 25 bp, Homo sapien
gaagataccatcctgctacaccatc

SEQ ID NO: 2603884 - DNA, 25 bp, Homo sapien
tcctggaagataccatcctgctaca

SEQ ID NO: 2603885 - DNA, 25 bp, Homo sapien
ggacctctaaccacccttgtggcag

SEQ ID NO: 2603886 - DNA, 25 bp, Homo sapien
aaagataagcaaaccgcctagcagt

SEQ ID NO: 2603887 - DNA, 25 bp, Homo sapien
cacagggcagacacttcgtgaggct

SEQ ID NO: 2603888 - DNA, 25 bp, Homo sapien
ggctcagaggtcacattgatattca

SEQ ID NO: 2603889 - DNA, 25 bp, Homo sapien
gacagagaatatccgagtggtgccc

SEQ ID NO: 2603890 - DNA, 25 bp, Homo sapien
gactggtcaacgtgagtgacaggat

SEQ ID NO: 2603891 - DNA, 25 bp, Homo sapien
cagcgtctctatgatgatgttgtca

SEQ ID NO: 2603892 - DNA, 25 bp, Homo sapien
tcagcttcacttggtctccgaggag

SEQ ID NO: 2603893 - DNA, 25 bp, Homo sapien
tgacaggatggttcagcttcacttg

SEQ ID NO: 2603894 - DNA, 25 bp, Homo sapien
atatgctccttttgactaaactgag

SEQ ID NO: 2603895 - DNA, 25 bp, Homo sapien
tatgctccttttgactaaactgagt

SEQ ID NO: 2603896 - DNA, 25 bp, Homo sapien
gctccttttgactaaactgagttac

SEQ ID NO: 2603897 - DNA, 25 bp, Homo sapien
tgctccttttgactaaactgagtta

SEQ ID NO: 2603898 - DNA, 25 bp, Homo sapien
ctggtctgaagtgaatcttggcagt

SEQ ID NO: 2603899 - DNA, 25 bp, Homo sapien
cagtcaaggtcggagggatcgcatt

SEQ ID NO: 2603900 - DNA, 25 bp, Homo sapien
ggatcgcattaattacgtatttgca

SEQ ID NO: 2603901 - DNA, 25 bp, Homo sapien
tgaatcttggcagtcaaggtcggag

SEQ ID NO: 2603902 - DNA, 25 bp, Homo sapien
gaaggcctccttgtaatacatcatg

SEQ ID NO: 2603903 - DNA, 25 bp, Homo sapien
tacatcatgcacttaatgacagctc

SEQ ID NO: 2603904 - DNA, 25 bp, Homo sapien
ccagaaggcctccttgtaatacatc

SEQ ID NO: 2603905 - DNA, 25 bp, Homo sapien
gctcccattggaagccgctgaatta

SEQ ID NO: 2603906 - DNA, 25 bp, Homo sapien
atcttcatcttcaatgatcatgcag

SEQ ID NO: 2603907 - DNA, 25 bp, Homo sapien
aggttattgaaattggagcatcttc

SEQ ID NO: 2603908 - DNA, 25 bp, Homo sapien
tcttcatcttcaatgatcatgcagc

SEQ ID NO: 2603909 - DNA, 25 bp, Homo sapien
tactgtaacagcgtgaggtttccgc

SEQ ID NO: 2603910 - DNA, 25 bp, Homo sapien
gacgaaaatattgcgccagtcagcg

SEQ ID NO: 2603911 - DNA, 25 bp, Homo sapien
caaggcatagtaatcagctccaggc

SEQ ID NO: 2603912 - DNA, 25 bp, Homo sapien
gaaatcagcaaatcacacgcagggt

SEQ ID NO: 2603913 - DNA, 25 bp, Homo sapien
tctgatccaccaggcgggcggtgta

SEQ ID NO: 2603914 - DNA, 25 bp, Homo sapien
tgatccaccaggcgggcggtgtagt

SEQ ID NO: 2603915 - DNA, 25 bp, Homo sapien
ttctgatccaccaggcgggcggtgt

SEQ ID NO: 2603916 - DNA, 25 bp, Homo sapien
ctgatccaccaggcgggcggtgtag

SEQ ID NO: 2603917 - DNA, 25 bp, Homo sapien
tcaggcctcctgcttatcgcgcagc

SEQ ID NO: 2603918 - DNA, 25 bp, Homo sapien
caggcctcctgcttatcgcgcagca

SEQ ID NO: 2603919 - DNA, 25 bp, Homo sapien
aggcctcctgcttatcgcgcagcac

SEQ ID NO: 2603920 - DNA, 25 bp, Homo sapien
tgctttgagggattgtgagcaccag

SEQ ID NO: 2603921 - DNA, 25 bp, Homo sapien
ttgagggattgtgagcaccaggcca

SEQ ID NO: 2603922 - DNA, 25 bp, Homo sapien
gctgctttgagggattgtgagcacc

SEQ ID NO: 2603923 - DNA, 25 bp, Homo sapien
ctttgagggattgtgagcaccaggc

SEQ ID NO: 2603924 - DNA, 25 bp, Homo sapien
aaatggtgcatgtcgccagtgtcca

SEQ ID NO: 2603925 - DNA, 25 bp, Homo sapien
tgaggtttcgctttacccatgcagg

SEQ ID NO: 2603926 - DNA, 25 bp, Homo sapien
cagtgcgcccagacttgatcaggta

SEQ ID NO: 2603927 - DNA, 25 bp, Homo sapien
gacgtgtggcggagttctaattcaa

SEQ ID NO: 2603928 - DNA, 25 bp, Homo sapien
tcttctcgcgccagtctttgagttg

SEQ ID NO: 2603929 - DNA, 25 bp, Homo sapien
tcgcgccagtctttgagttggagcc

SEQ ID NO: 2603930 - DNA, 25 bp, Homo sapien
gtctttgagttggagccggaagcac

SEQ ID NO: 2603931 - DNA, 25 bp, Homo sapien
ttgtgaaaggcttctcttctcgcgc

SEQ ID NO: 2603932 - DNA, 25 bp, Homo sapien
gggataatcatacggcctccttgac

SEQ ID NO: 2603933 - DNA, 25 bp, Homo sapien
cacggtgtagcttgatgccgtcttt

SEQ ID NO: 2603934 - DNA, 25 bp, Homo sapien
tcagatgctgagtgatagcaccaag

SEQ ID NO: 2603935 - DNA, 25 bp, Homo sapien
tagcaccaagatttccacggtgtag

SEQ ID NO: 2603936 - DNA, 25 bp, Homo sapien
gtgagaagttcatattgtggtcgca

SEQ ID NO: 2603937 - DNA, 25 bp, Homo sapien
gtgacaaggtgagaagttcatattg

SEQ ID NO: 2603938 - DNA, 25 bp, Homo sapien
tgtggtcgcatttaagtccccttaa

SEQ ID NO: 2603939 - DNA, 25 bp, Homo sapien
cccttaaatgcgcagaagtctgcca

SEQ ID NO: 2603940 - DNA, 25 bp, Homo sapien
catcatcgtctgtgtacggagccga

SEQ ID NO: 2603941 - DNA, 25 bp, Homo sapien
tgctactgcaatcatcgcgcgggat

SEQ ID NO: 2603942 - DNA, 25 bp, Homo sapien
tcatcaatttccatcgcagcgggca

SEQ ID NO: 2603943 - DNA, 25 bp, Homo sapien
tgtccttgcagatagtccagcggta

SEQ ID NO: 2603944 - DNA, 25 bp, Homo sapien
ggtcatcgctgtggccacgtagctc

SEQ ID NO: 2603945 - DNA, 25 bp, Homo sapien
acgtagctcgcctttcggttcacca

SEQ ID NO: 2603946 - DNA, 25 bp, Homo sapien
accttcaccgtataagtctctttca

SEQ ID NO: 2603947 - DNA, 25 bp, Homo sapien
tcttgcttcgcccatagtcgccata

SEQ ID NO: 2603948 - DNA, 25 bp, Homo sapien
cggcgaccaataggtgattgcttac

SEQ ID NO: 2603949 - DNA, 25 bp, Homo sapien
tgattgcttactgcgattaatcagc

SEQ ID NO: 2603950 - DNA, 25 bp, Homo sapien
agcgcaacatcgcaagcgcggcgac

SEQ ID NO: 2603951 - DNA, 25 bp, Homo sapien
tactgcgattaatcagcttcatcat

SEQ ID NO: 2603952 - DNA, 25 bp, Homo sapien
cgcggtgcggtagaattgctgatca

SEQ ID NO: 2603953 - DNA, 25 bp, Homo sapien
cactgacgcggtgcagattgaagcc

SEQ ID NO: 2603954 - DNA, 25 bp, Homo sapien
taaagttcaattacgcgcggtgcgg

SEQ ID NO: 2603955 - DNA, 25 bp, Homo sapien
gacatcactcgctgtttcgcgggta

SEQ ID NO: 2603956 - DNA, 25 bp, Homo sapien
tagttagtgaaaccagcggtgccgg

SEQ ID NO: 2603957 - DNA, 25 bp, Homo sapien
agcgtgcgcctgaagcctgcattca

SEQ ID NO: 2603958 - DNA, 25 bp, Homo sapien
tgcgtgagccttccgcttaaatgcc

SEQ ID NO: 2603959 - DNA, 25 bp, Homo sapien
gaagcggctcataaggcggatcgca

SEQ ID NO: 2603960 - DNA, 25 bp, Homo sapien
tcattaagatgcctgaatgccttca

SEQ ID NO: 2603961 - DNA, 25 bp, Homo sapien
gctgcgcgttgaatgcttcacgaat

SEQ ID NO: 2603962 - DNA, 25 bp, Homo sapien
tccaggttgtaacgaatcaggccgt

SEQ ID NO: 2603963 - DNA, 25 bp, Homo sapien
ccgattgaggtaaaggaatgctgct

SEQ ID NO: 2603964 - DNA, 25 bp, Homo sapien
acaggttaatcaggtcagcgctgac

SEQ ID NO: 2603965 - DNA, 25 bp, Homo sapien
gatacaggttaatcaggtcagcgct

SEQ ID NO: 2603966 - DNA, 25 bp, Homo sapien
ctgatacaggttaatcaggtcagcg

SEQ ID NO: 2603967 - DNA, 25 bp, Homo sapien
tacaggttaatcaggtcagcgctga

SEQ ID NO: 2603968 - DNA, 25 bp, Homo sapien
cacaaaaggctcaataaggcgttta

SEQ ID NO: 2603969 - DNA, 25 bp, Homo sapien
cccacaaaaggctcaataaggcgtt

SEQ ID NO: 2603970 - DNA, 25 bp, Homo sapien
tctgagttaaggaacaccgagccgc

SEQ ID NO: 2603971 - DNA, 25 bp, Homo sapien
aaggaagcgttcgtgcttgtctgag

SEQ ID NO: 2603972 - DNA, 25 bp, Homo sapien
ggatcaaacgatccagttccggcag

SEQ ID NO: 2603973 - DNA, 25 bp, Homo sapien
tatttgccgccagcccatttaagga

SEQ ID NO: 2603974 - DNA, 25 bp, Homo sapien
tgcgcagcgccggttcttctatggg

SEQ ID NO: 2603975 - DNA, 25 bp, Homo sapien
tccggcagcagcgaatatttgccgc

SEQ ID NO: 2603976 - DNA, 25 bp, Homo sapien
catttcgtcgatatagaggccctga

SEQ ID NO: 2603977 - DNA, 25 bp, Homo sapien
cgcgccgggtgaacagccgagattt

SEQ ID NO: 2603978 - DNA, 25 bp, Homo sapien
ttcctgcgactgctctatggcgcgc

SEQ ID NO: 2603979 - DNA, 25 bp, Homo sapien
cggcgacggcgtgctgcacgttcaa

SEQ ID NO: 2603980 - DNA, 25 bp, Homo sapien
taaccaggtcgaatgtccggtcgca

SEQ ID NO: 2603981 - DNA, 25 bp, Homo sapien
tgagcgatacgccaaacttctcggc

SEQ ID NO: 2603982 - DNA, 25 bp, Homo sapien
gaatcatccagataacgcgttcacg

SEQ ID NO: 2603983 - DNA, 25 bp, Homo sapien
gatctgcgctatctgtccggtgccg

SEQ ID NO: 2603984 - DNA, 25 bp, Homo sapien
tcttgcaaactcaggcgctttcggg

SEQ ID NO: 2603985 - DNA, 25 bp, Homo sapien
aaccaatgatctgtagcctggccga

SEQ ID NO: 2603986 - DNA, 25 bp, Homo sapien
ccctgagcgttgtgaatggatacca

SEQ ID NO: 2603987 - DNA, 25 bp, Homo sapien
tcataatcaagccagatgcgcgcga

SEQ ID NO: 2603988 - DNA, 25 bp, Homo sapien
taccaccttgattaaccggcaaagc

SEQ ID NO: 2603989 - DNA, 25 bp, Homo sapien
ttcccatgccgagggtgcgccagta

SEQ ID NO: 2603990 - DNA, 25 bp, Homo sapien
gggtgcgccagtaccaccttgatta

SEQ ID NO: 2603991 - DNA, 25 bp, Homo sapien
ttaaccggcaaagctccgttgctcc

SEQ ID NO: 2603992 - DNA, 25 bp, Homo sapien
aaactggtgccattgatcgtaacgg

SEQ ID NO: 2603993 - DNA, 25 bp, Homo sapien
ccaagagccgggattgataaactgg

SEQ ID NO: 2603994 - DNA, 25 bp, Homo sapien
gatcgtaacggtaatgttctggttg

SEQ ID NO: 2603995 - DNA, 25 bp, Homo sapien
ccgggattgataaactggtgccatt

SEQ ID NO: 2603996 - DNA, 25 bp, Homo sapien
gcaacctgctgcgaactgccattag

SEQ ID NO: 2603997 - DNA, 25 bp, Homo sapien
ccattccggtaagatattactggcg

SEQ ID NO: 2603998 - DNA, 25 bp, Homo sapien
tatatatgcggttaacgtgaagctc

SEQ ID NO: 2603999 - DNA, 25 bp, Homo sapien
taaataccatcacagggtagtcagc

SEQ ID NO: 2604000 - DNA, 25 bp, Homo sapien
gctgtattcgcccaacgacggaaac

SEQ ID NO: 2604001 - DNA, 25 bp, Homo sapien
tgagggcaccgtaaaagaccagctg

SEQ ID NO: 2604002 - DNA, 25 bp, Homo sapien
ctgccggaggtttgcccggcagcca

SEQ ID NO: 2604003 - DNA, 25 bp, Homo sapien
cgacggaaacgggtttgatgccata

SEQ ID NO: 2604004 - DNA, 25 bp, Homo sapien
gagtatcagtatgccccatgtcaca

SEQ ID NO: 2604005 - DNA, 25 bp, Homo sapien
cagggtgtcaggaaatactagctca

SEQ ID NO: 2604006 - DNA, 25 bp, Homo sapien
taaccataaggcgtaaaattgacaa

SEQ ID NO: 2604007 - DNA, 25 bp, Homo sapien
tactagctcagcagagattctacat

SEQ ID NO: 2604008 - DNA, 25 bp, Homo sapien
gctcggaccgcaccttgatttcaga

SEQ ID NO: 2604009 - DNA, 25 bp, Homo sapien
cacaaaattggaggtatgtaccttt

SEQ ID NO: 2604010 - DNA, 25 bp, Homo sapien
agtggaattgtcaacacaacacaaa

SEQ ID NO: 2604011 - DNA, 25 bp, Homo sapien
cccaatcagaaggacagaacaaaca

SEQ ID NO: 2604012 - DNA, 25 bp, Homo sapien
agagacaagtagaagtggtgggtgg

SEQ ID NO: 2604013 - DNA, 25 bp, Homo sapien
gagacaagtagaagtggtgggtggg

SEQ ID NO: 2604014 - DNA, 25 bp, Homo sapien
aagagacaagtagaagtggtgggtg

SEQ ID NO: 2604015 - DNA, 25 bp, Homo sapien
aaagagacaagtagaagtggtgggt

SEQ ID NO: 2604016 - DNA, 25 bp, Homo sapien
ctcagactgctccactgtactccag

SEQ ID NO: 2604017 - DNA, 25 bp, Homo sapien
tcagactgctccactgtactccagc

SEQ ID NO: 2604018 - DNA, 25 bp, Homo sapien
tgatggccgtacaacatcgtgaatg

SEQ ID NO: 2604019 - DNA, 25 bp, Homo sapien
tgagacactttctacaacatgaacc

SEQ ID NO: 2604020 - DNA, 25 bp, Homo sapien
catgaaccttgagaatactgtgcta

SEQ ID NO: 2604021 - DNA, 25 bp, Homo sapien
gaagaaagcagcgtagtcaaaatca

SEQ ID NO: 2604022 - DNA, 25 bp, Homo sapien
gcagcttgataagtcaaagagcgcc

SEQ ID NO: 2604023 - DNA, 25 bp, Homo sapien
ttgataagtcaaagagcgcctgcct

SEQ ID NO: 2604024 - DNA, 25 bp, Homo sapien
gcttgataagtcaaagagcgcctgc

SEQ ID NO: 2604025 - DNA, 25 bp, Homo sapien
tgataagtcaaagagcgcctgcctc

SEQ ID NO: 2604026 - DNA, 25 bp, Homo sapien
ctgtggccagtagggacgttggccg

SEQ ID NO: 2604027 - DNA, 25 bp, Homo sapien
tggccagtagggacgttggccgttc

SEQ ID NO: 2604028 - DNA, 25 bp, Homo sapien
gactgtggccagtagggacgttggc

SEQ ID NO: 2604029 - DNA, 25 bp, Homo sapien
cagtagggacgttggccgttcctga

SEQ ID NO: 2604030 - DNA, 25 bp, Homo sapien
gctttgctagatgatctttttcaac

SEQ ID NO: 2604031 - DNA, 25 bp, Homo sapien
tagaagttctaaccggcacacttag

SEQ ID NO: 2604032 - DNA, 25 bp, Homo sapien
tgcctaaagagcgtgtgtgcacaca

SEQ ID NO: 2604033 - DNA, 25 bp, Homo sapien
cccaggctggccattatatgtggct

SEQ ID NO: 2604034 - DNA, 25 bp, Homo sapien
ttcagttaacggagaaaaagcactg

SEQ ID NO: 2604035 - DNA, 25 bp, Homo sapien
tggaggctgtagtgaactcagactg

SEQ ID NO: 2604036 - DNA, 25 bp, Homo sapien
gaggctgtagtgaactcagactgcg

SEQ ID NO: 2604037 - DNA, 25 bp, Homo sapien
ggctgtagtgaactcagactgcgcc

SEQ ID NO: 2604038 - DNA, 25 bp, Homo sapien
gctgtagtgaactcagactgcgcca

SEQ ID NO: 2604039 - DNA, 25 bp, Homo sapien
tgctttatcgggagtttcagaaggg

SEQ ID NO: 2604040 - DNA, 25 bp, Homo sapien
taatgcaaacttacagcgactcaca

SEQ ID NO: 2604041 - DNA, 25 bp, Homo sapien
cagaggctattgacacaccagaagc

SEQ ID NO: 2604042 - DNA, 25 bp, Homo sapien
tcacacctgctttatcgggagtttc

SEQ ID NO: 2604043 - DNA, 25 bp, Homo sapien
gaatggccgaaaacgacacccagat

SEQ ID NO: 2604044 - DNA, 25 bp, Homo sapien
acagtgtgagaatggccgaaaacga

SEQ ID NO: 2604045 - DNA, 25 bp, Homo sapien
gaaaacgacacccagatgcaaacat

SEQ ID NO: 2604046 - DNA, 25 bp, Homo sapien
tgagaatggccgaaaacgacaccca

SEQ ID NO: 2604047 - DNA, 25 bp, Homo sapien
accgcgtgctgactctctcaccaag

SEQ ID NO: 2604048 - DNA, 25 bp, Homo sapien
ctgcaggccaccgcgtgctgactct

SEQ ID NO: 2604049 - DNA, 25 bp, Homo sapien
gcaggccaccgcgtgctgactctct

SEQ ID NO: 2604050 - DNA, 25 bp, Homo sapien
gtgctgactctctcaccaagcagga

SEQ ID NO: 2604051 - DNA, 25 bp, Homo sapien
gctggcacggacagccccgggaagg

SEQ ID NO: 2604052 - DNA, 25 bp, Homo sapien
gcagcttgataagtcaaagagcgcc

SEQ ID NO: 2604053 - DNA, 25 bp, Homo sapien
tgataagtcaaagagcgcctgcctc

SEQ ID NO: 2604054 - DNA, 25 bp, Homo sapien
gcttgataagtcaaagagcgcctgc

SEQ ID NO: 2604055 - DNA, 25 bp, Homo sapien
atgaccgtcggccaaatcatccctt

SEQ ID NO: 2604056 - DNA, 25 bp, Homo sapien
ctggcagatgaccgtcggccaaatc

SEQ ID NO: 2604057 - DNA, 25 bp, Homo sapien
tgaccgtcggccaaatcatcccttt

SEQ ID NO: 2604058 - DNA, 25 bp, Homo sapien
gcagatgaccgtcggccaaatcatc

SEQ ID NO: 2604059 - DNA, 25 bp, Homo sapien
cttggcaggtcgagatacctgtctc

SEQ ID NO: 2604060 - DNA, 25 bp, Homo sapien
tgatgtaggaaacatgactgtggct

SEQ ID NO: 2604061 - DNA, 25 bp, Homo sapien
ctggtgacgtggagtcccaccaggc

SEQ ID NO: 2604062 - DNA, 25 bp, Homo sapien
tcaacatggtgccctgtccatttgg

SEQ ID NO: 2604063 - DNA, 25 bp, Homo sapien
cattcctgggctacgtgcaaatcaa

SEQ ID NO: 2604064 - DNA, 25 bp, Homo sapien
caaatgacaactagattggctgtgc

SEQ ID NO: 2604065 - DNA, 25 bp, Homo sapien
aatctctctctaagggccaaacaca

SEQ ID NO: 2604066 - DNA, 25 bp, Homo sapien
gcatatccttcaagaacgatgtctg

SEQ ID NO: 2604067 - DNA, 25 bp, Homo sapien
ctgtggccccgaccccaaggcttgt

SEQ ID NO: 2604068 - DNA, 25 bp, Homo sapien
gaagctctgcttttcagcagacaag

SEQ ID NO: 2604069 - DNA, 25 bp, Homo sapien
aaataattttcacgccaccgtggca

SEQ ID NO: 2604070 - DNA, 25 bp, Homo sapien
gtggcacattctaaaccccttcaag

SEQ ID NO: 2604071 - DNA, 25 bp, Homo sapien
atctaacccggcacgactactgcaa

SEQ ID NO: 2604072 - DNA, 25 bp, Homo sapien
gcccgcgaccttggtgttatcagca

SEQ ID NO: 2604073 - DNA, 25 bp, Homo sapien
agtcgagcccgcgaccttggtgtta

SEQ ID NO: 2604074 - DNA, 25 bp, Homo sapien
tgttatcagcaccacgctcttacca

SEQ ID NO: 2604075 - DNA, 25 bp, Homo sapien
tggccggtgcgggagtcgagcccgc

SEQ ID NO: 2604076 - DNA, 25 bp, Homo sapien
atggcggtatcagcaccacgcgctc

SEQ ID NO: 2604077 - DNA, 25 bp, Homo sapien
gcgctcaccaactgagataaccgac

SEQ ID NO: 2604078 - DNA, 25 bp, Homo sapien
gcgaccatggcggtatcagcaccac

SEQ ID NO: 2604079 - DNA, 25 bp, Homo sapien
accacgcgctcaccaactgagataa

SEQ ID NO: 2604080 - DNA, 25 bp, Homo sapien
tcttgaactctcgtctacttggaaa

SEQ ID NO: 2604081 - DNA, 25 bp, Homo sapien
caagtcagccccattgctaaatgga

SEQ ID NO: 2604082 - DNA, 25 bp, Homo sapien
gaatcacaagcagtagaagccacac

SEQ ID NO: 2604083 - DNA, 25 bp, Homo sapien
gaaatcctcttatgtcaccaagtca

SEQ ID NO: 2604084 - DNA, 25 bp, Homo sapien
aggcctggcaccgagctgcctgtct

SEQ ID NO: 2604085 - DNA, 25 bp, Homo sapien
tttcaggcctggcaccgagctgcct

SEQ ID NO: 2604086 - DNA, 25 bp, Homo sapien
ttctcttccttcaacctcggcctcc

SEQ ID NO: 2604087 - DNA, 25 bp, Homo sapien
tccacccaccttgtagcaggatgag

SEQ ID NO: 2604088 - DNA, 25 bp, Homo sapien
gccaggcctcaggattctcagagtt

SEQ ID NO: 2604089 - DNA, 25 bp, Homo sapien
gtcgagacccctgcagccgttattt

SEQ ID NO: 2604090 - DNA, 25 bp, Homo sapien
ttgatacacgaagttgccaggcctc

SEQ ID NO: 2604091 - DNA, 25 bp, Homo sapien
cctggcgcaaggattccgtgtatat

SEQ ID NO: 2604092 - DNA, 25 bp, Homo sapien
tggcgcgggctctgcaaggaaatca

SEQ ID NO: 2604093 - DNA, 25 bp, Homo sapien
gagccctttcagacgctcgggcagc

SEQ ID NO: 2604094 - DNA, 25 bp, Homo sapien
tcggttatctcagttggtgagcgcg

SEQ ID NO: 2604095 - DNA, 25 bp, Homo sapien
cgtggtgctgataccgccatggtcg

SEQ ID NO: 2604096 - DNA, 25 bp, Homo sapien
cctttcaggttctgtaagccccatg

SEQ ID NO: 2604097 - DNA, 25 bp, Homo sapien
ctcggcccagaggttgtcgaggaca

SEQ ID NO: 2604098 - DNA, 25 bp, Homo sapien
cttgcgggatctcttggactcggcc

SEQ ID NO: 2604099 - DNA, 25 bp, Homo sapien
ccccatgcgggcaggagcgacttgc

SEQ ID NO: 2604100 - DNA, 25 bp, Homo sapien
cgcgggcttggcgaggaatcgctcg

SEQ ID NO: 2604101 - DNA, 25 bp, Homo sapien
agtccccgcggctggggcaaagcgg

SEQ ID NO: 2604102 - DNA, 25 bp, Homo sapien
ttggcgaggaatcgctcgtggacgg

SEQ ID NO: 2604103 - DNA, 25 bp, Homo sapien
aggcgcgcgggcttggcgaggaatc

SEQ ID NO: 2604104 - DNA, 25 bp, Homo sapien
ctgcaggccactcaggatatccaaa

SEQ ID NO: 2604105 - DNA, 25 bp, Homo sapien
cacctgcaggccactcaggatatcc

SEQ ID NO: 2604106 - DNA, 25 bp, Homo sapien
tcaggatatccaaagcgatccacat

SEQ ID NO: 2604107 - DNA, 25 bp, Homo sapien
gccacctgcaggccactcaggatat

SEQ ID NO: 2604108 - DNA, 25 bp, Homo sapien
tgtggtaagatacccatcatatgaa

SEQ ID NO: 2604109 - DNA, 25 bp, Homo sapien
aaatgtggtaagatacccatcatat

SEQ ID NO: 2604110 - DNA, 25 bp, Homo sapien
taagatacccatcatatgaaattca

SEQ ID NO: 2604111 - DNA, 25 bp, Homo sapien
cagggagcatcgtgaatgcgaagta

SEQ ID NO: 2604112 - DNA, 25 bp, Homo sapien
aggactccgcgtatccaggcaggat

SEQ ID NO: 2604113 - DNA, 25 bp, Homo sapien
ccttcaaggtacacgcagcctgggt

SEQ ID NO: 2604114 - DNA, 25 bp, Homo sapien
cctaaacgtttgctggtggacctag

SEQ ID NO: 2604115 - DNA, 25 bp, Homo sapien
cctgtaatgggcaccgaatgagtaa

SEQ ID NO: 2604116 - DNA, 25 bp, Homo sapien
aataaggtgggtccgctgtgctgat

SEQ ID NO: 2604117 - DNA, 25 bp, Homo sapien
aaggtgggtccgctgtgctgatcgg

SEQ ID NO: 2604118 - DNA, 25 bp, Homo sapien
ggtgggtccgctgtgctgatcggcc

SEQ ID NO: 2604119 - DNA, 25 bp, Homo sapien
aaaataaggtgggtccgctgtgctg

SEQ ID NO: 2604120 - DNA, 25 bp, Homo sapien
gtgaggcacgtcgtcgcccagcgac

SEQ ID NO: 2604121 - DNA, 25 bp, Homo sapien
gcagcgttgcacgtgtggccccgct

SEQ ID NO: 2604122 - DNA, 25 bp, Homo sapien
gtagcccgccgctttcccaggtgag

SEQ ID NO: 2604123 - DNA, 25 bp, Homo sapien
gcagcgtcgccttccgaggtgtctt

SEQ ID NO: 2604124 - DNA, 25 bp, Homo sapien
ccccgtgcccgccacgcctgctgcc

SEQ ID NO: 2604125 - DNA, 25 bp, Homo sapien
ccgtgcccgccacgcctgctgccgc

SEQ ID NO: 2604126 - DNA, 25 bp, Homo sapien
cccgtgcccgccacgcctgctgccg

SEQ ID NO: 2604127 - DNA, 25 bp, Homo sapien
gggtggccagtatccggccccagtc

SEQ ID NO: 2604128 - DNA, 25 bp, Homo sapien
cagtcaagactcagggtgtcccgaa

SEQ ID NO: 2604129 - DNA, 25 bp, Homo sapien
gctgagccccttagggacggcgttc

SEQ ID NO: 2604130 - DNA, 25 bp, Homo sapien
tggcgttttcaccccaggagcctca

SEQ ID NO: 2604131 - DNA, 25 bp, Homo sapien
tgcctagctcgtctgacacgccttt

SEQ ID NO: 2604132 - DNA, 25 bp, Homo sapien
cctagctcgtctgacacgcctttga

SEQ ID NO: 2604133 - DNA, 25 bp, Homo sapien
acgcctttgaccactcgttcagcct

SEQ ID NO: 2604134 - DNA, 25 bp, Homo sapien
tgtgctgcctagctcgtctgacacg

SEQ ID NO: 2604135 - DNA, 25 bp, Homo sapien
cagtgttctgggttgcttagctcgc

SEQ ID NO: 2604136 - DNA, 25 bp, Homo sapien
ctcgaagaacgaacatcaggcaggt

SEQ ID NO: 2604137 - DNA, 25 bp, Homo sapien
tgggcaactcgacctttttggactg

SEQ ID NO: 2604138 - DNA, 25 bp, Homo sapien
tcactcgtgattttagctgcctggg

SEQ ID NO: 2604139 - DNA, 25 bp, Homo sapien
gcatttcaacaaccacagcagactg

SEQ ID NO: 2604140 - DNA, 25 bp, Homo sapien
caaggcctgaaagctagtgatgaag

SEQ ID NO: 2604141 - DNA, 25 bp, Homo sapien
tggccgaggaaatcacaagcagctt

SEQ ID NO: 2604142 - DNA, 25 bp, Homo sapien
gataaaacatgacccagatacctgc

SEQ ID NO: 2604143 - DNA, 25 bp, Homo sapien
tttgaaagggcagatcgggtctccg

SEQ ID NO: 2604144 - DNA, 25 bp, Homo sapien
tagctactagcgaggccaagtcagg

SEQ ID NO: 2604145 - DNA, 25 bp, Homo sapien
ttgttgaggatattcagcccggccg

SEQ ID NO: 2604146 - DNA, 25 bp, Homo sapien
gatgttgtcgaaggtagctctcccc

SEQ ID NO: 2604147 - DNA, 25 bp, Homo sapien
cagggcaaggatgcatgaaggtaat

SEQ ID NO: 2604148 - DNA, 25 bp, Homo sapien
taatgacaaagagctggtgagagga

SEQ ID NO: 2604149 - DNA, 25 bp, Homo sapien
gcaaggatgcatgaaggtaatgaca

SEQ ID NO: 2604150 - DNA, 25 bp, Homo sapien
gaaggtaatgacaaagagctggtga

SEQ ID NO: 2604151 - DNA, 25 bp, Homo sapien
cagcggttcagaggtggtgttctct

SEQ ID NO: 2604152 - DNA, 25 bp, Homo sapien
cagaggtggtgttctcttggaccag

SEQ ID NO: 2604153 - DNA, 25 bp, Homo sapien
tcagcggttcagaggtggtgttctc

SEQ ID NO: 2604154 - DNA, 25 bp, Homo sapien
gttcagaggtggtgttctcttggac

SEQ ID NO: 2604155 - DNA, 25 bp, Homo sapien
tgagataaagtcttggtccagtgaa

SEQ ID NO: 2604156 - DNA, 25 bp, Homo sapien
gaatgataaggatgtattgacacgc

SEQ ID NO: 2604157 - DNA, 25 bp, Homo sapien
ttgcagttctgatgttgaaggacat

SEQ ID NO: 2604158 - DNA, 25 bp, Homo sapien
tcaataggagtcatctgtgcttgga

SEQ ID NO: 2604159 - DNA, 25 bp, Homo sapien
tttcatcgcatgatttggtaaccat

SEQ ID NO: 2604160 - DNA, 25 bp, Homo sapien
tcatctacatcacggaaatttattg

SEQ ID NO: 2604161 - DNA, 25 bp, Homo sapien
taacagatggttttgccgcagtctg

SEQ ID NO: 2604162 - DNA, 25 bp, Homo sapien
gaaatttattgcgttgtcatttgat

SEQ ID NO: 2604163 - DNA, 25 bp, Homo sapien
tcgggggccgatagatactgcaatt

SEQ ID NO: 2604164 - DNA, 25 bp, Homo sapien
cacaatcaggcagcgtttcgggggc

SEQ ID NO: 2604165 - DNA, 25 bp, Homo sapien
ccatggagaaagaaggtttttcatt

SEQ ID NO: 2604166 - DNA, 25 bp, Homo sapien
tcaatgcatgcagtcgattagagga

SEQ ID NO: 2604167 - DNA, 25 bp, Homo sapien
taaggtggtctctagctcaatggat

SEQ ID NO: 2604168 - DNA, 25 bp, Homo sapien
tctagctcaatggattttcttgcat

SEQ ID NO: 2604169 - DNA, 25 bp, Homo sapien
tgcttaaggtggtctctagctcaat

SEQ ID NO: 2604170 - DNA, 25 bp, Homo sapien
tggtctctagctcaatggattttct

SEQ ID NO: 2604171 - DNA, 25 bp, Homo sapien
agctcccaatgcaagctcaatattg

SEQ ID NO: 2604172 - DNA, 25 bp, Homo sapien
tattgattttatctggattgtggac

SEQ ID NO: 2604173 - DNA, 25 bp, Homo sapien
atctggattgtggactactgaatgc

SEQ ID NO: 2604174 - DNA, 25 bp, Homo sapien
tcccaatgcaagctcaatattgatt

SEQ ID NO: 2604175 - DNA, 25 bp, Homo sapien
tctgatgtgtttacattgttgacac

SEQ ID NO: 2604176 - DNA, 25 bp, Homo sapien
caagggattacactcaatatcccaa

SEQ ID NO: 2604177 - DNA, 25 bp, Homo sapien
aaggtctctgatgtgtttacattgt

SEQ ID NO: 2604178 - DNA, 25 bp, Homo sapien
caccatgttcaagggattacactca

SEQ ID NO: 2604179 - DNA, 25 bp, Homo sapien
tctgttgaatttcttccaattgtcc

SEQ ID NO: 2604180 - DNA, 25 bp, Homo sapien
tttctgttgaatttcttccaattgt

SEQ ID NO: 2604181 - DNA, 25 bp, Homo sapien
tgttgaatttcttccaattgtcctt

SEQ ID NO: 2604182 - DNA, 25 bp, Homo sapien
tcagcagcttcttttctgttgaatt

SEQ ID NO: 2604183 - DNA, 25 bp, Homo sapien
ctcgtcattggtcctggcatagcac

SEQ ID NO: 2604184 - DNA, 25 bp, Homo sapien
ttgtaccctctgaaactgcaaacct

SEQ ID NO: 2604185 - DNA, 25 bp, Homo sapien
accttctcgtcattggtcctggcat

SEQ ID NO: 2604186 - DNA, 25 bp, Homo sapien
atcttgtaccctctgaaactgcaaa

SEQ ID NO: 2604187 - DNA, 25 bp, Homo sapien
catgtagatggagtgttccgcgccg

SEQ ID NO: 2604188 - DNA, 25 bp, Homo sapien
gtcaacaccaatcgcggctgcatca

SEQ ID NO: 2604189 - DNA, 25 bp, Homo sapien
ggctgcatcactcacgcagtcagcg

SEQ ID NO: 2604190 - DNA, 25 bp, Homo sapien
ttagcacctgcatgtagatggagtg

SEQ ID NO: 2604191 - DNA, 25 bp, Homo sapien
ggtgcaatttccacggctatcaagt

SEQ ID NO: 2604192 - DNA, 25 bp, Homo sapien
gctttgaaaatcgagacatccttgc

SEQ ID NO: 2604193 - DNA, 25 bp, Homo sapien
aagtcctggccgcttgatggccatg

SEQ ID NO: 2604194 - DNA, 25 bp, Homo sapien
cattacgtccatttcatcaggtgca

SEQ ID NO: 2604195 - DNA, 25 bp, Homo sapien
catgtagatggagtgttccgcgccg

SEQ ID NO: 2604196 - DNA, 25 bp, Homo sapien
ttagcacctgcatgtagatggagtg

SEQ ID NO: 2604197 - DNA, 25 bp, Homo sapien
gtcaacaccaatcgcggctgcatca

SEQ ID NO: 2604198 - DNA, 25 bp, Homo sapien
ggctgcatcactcacgcagtcagcg

SEQ ID NO: 2604199 - DNA, 25 bp, Homo sapien
accaccacaccaggctaatttttct

SEQ ID NO: 2604200 - DNA, 25 bp, Homo sapien
accatattgcccatgctggcgtcaa

SEQ ID NO: 2604201 - DNA, 25 bp, Homo sapien
caccacaccaggctaatttttcttt

SEQ ID NO: 2604202 - DNA, 25 bp, Homo sapien
ttaccatattgcccatgctggcgtc

SEQ ID NO: 2604203 - DNA, 25 bp, Homo sapien
agataatggggtcttaccatattgc

SEQ ID NO: 2604204 - DNA, 25 bp, Homo sapien
ttttgtagataatggggtcttacca

SEQ ID NO: 2604205 - DNA, 25 bp, Homo sapien
ttgtagataatggggtcttaccata

SEQ ID NO: 2604206 - DNA, 25 bp, Homo sapien
gtagataatggggtcttaccatatt

SEQ ID NO: 2604207 - DNA, 25 bp, Homo sapien
gataatagggtcttaccatattgcc

SEQ ID NO: 2604208 - DNA, 25 bp, Homo sapien
ttttgtagataatagggtcttacca

SEQ ID NO: 2604209 - DNA, 25 bp, Homo sapien
ttgtagataatagggtcttaccata

SEQ ID NO: 2604210 - DNA, 25 bp, Homo sapien
gtagataatagggtcttaccatatt

SEQ ID NO: 2604211 - DNA, 25 bp, Homo sapien
agataatggggtcttaccatattgc

SEQ ID NO: 2604212 - DNA, 25 bp, Homo sapien
ttttgtagataatggggtcttacca

SEQ ID NO: 2604213 - DNA, 25 bp, Homo sapien
ttgtagataatggggtcttaccata

SEQ ID NO: 2604214 - DNA, 25 bp, Homo sapien
gtagataatggggtcttaccatatt

SEQ ID NO: 2604215 - DNA, 25 bp, Homo sapien
ttgtagataatggggtcttaccata

SEQ ID NO: 2604216 - DNA, 25 bp, Homo sapien
agataatggggtcttaccatattgc

SEQ ID NO: 2604217 - DNA, 25 bp, Homo sapien
tcttaccatattgcccatgctggtg

SEQ ID NO: 2604218 - DNA, 25 bp, Homo sapien
gtagataatggggtcttaccatatt

SEQ ID NO: 2604219 - DNA, 25 bp, Homo sapien
ttttgtagataatggggtcttacca

SEQ ID NO: 2604220 - DNA, 25 bp, Homo sapien
ttgtagataatggggtcttaccata

SEQ ID NO: 2604221 - DNA, 25 bp, Homo sapien
agataatggggtcttaccatattgc

SEQ ID NO: 2604222 - DNA, 25 bp, Homo sapien
gtagataatggggtcttaccatatt

SEQ ID NO: 2604223 - DNA, 25 bp, Homo sapien
ttttgtagataatggggtcttacca

SEQ ID NO: 2604224 - DNA, 25 bp, Homo sapien
ttgtagataatggggtcttaccata

SEQ ID NO: 2604225 - DNA, 25 bp, Homo sapien
agataatggggtcttaccatattgc

SEQ ID NO: 2604226 - DNA, 25 bp, Homo sapien
gtagataatggggtcttaccatatt

SEQ ID NO: 2604227 - DNA, 25 bp, Homo sapien
ttttgtagataatggggtcttacca

SEQ ID NO: 2604228 - DNA, 25 bp, Homo sapien
ttgtagataatggggtcttaccata

SEQ ID NO: 2604229 - DNA, 25 bp, Homo sapien
agataatggggtcttaccatattgc

SEQ ID NO: 2604230 - DNA, 25 bp, Homo sapien
gtagataatggggtcttaccatatt

SEQ ID NO: 2604231 - DNA, 25 bp, Homo sapien
caagagcctctttcacgcaggtgat

SEQ ID NO: 2604232 - DNA, 25 bp, Homo sapien
ggaattagcagctgggataccccga

SEQ ID NO: 2604233 - DNA, 25 bp, Homo sapien
caagagcccctttcacgtgggtgat

SEQ ID NO: 2604234 - DNA, 25 bp, Homo sapien
taatttacacaaacgcgcaggctac

SEQ ID NO: 2604235 - DNA, 25 bp, Homo sapien
tcaagcccccaaggctagacgtggg

SEQ ID NO: 2604236 - DNA, 25 bp, Homo sapien
caaggctagacacggtgactccggg

SEQ ID NO: 2604237 - DNA, 25 bp, Homo sapien
acggcagacatgaagacccctggga

SEQ ID NO: 2604238 - DNA, 25 bp, Homo sapien
tccaaggcagcattcgggaccctca

SEQ ID NO: 2604239 - DNA, 25 bp, Homo sapien
ttggactccacccagcgcggaacgg

SEQ ID NO: 2604240 - DNA, 25 bp, Homo sapien
ggactctcgcaatcagacttggact

SEQ ID NO: 2604241 - DNA, 25 bp, Homo sapien
ccaaggcagacgtagggacccctgg

SEQ ID NO: 2604242 - DNA, 25 bp, Homo sapien
agacccctgggcgacgtcacggacg

SEQ ID NO: 2604243 - DNA, 25 bp, Homo sapien
ctgaagggacgatctcataggtgga

SEQ ID NO: 2604244 - DNA, 25 bp, Homo sapien
ctggttcaccctgacgtcaagtggg

SEQ ID NO: 2604245 - DNA, 25 bp, Homo sapien
cagatgactcgaggtgaccgcggca

SEQ ID NO: 2604246 - DNA, 25 bp, Homo sapien
gaagtcgcagatgactcgaggtgac

SEQ ID NO: 2604247 - DNA, 25 bp, Homo sapien
caaacctgccggtggttcctcagta

SEQ ID NO: 2604248 - DNA, 25 bp, Homo sapien
gacaaacggcggctcaaggtgcctt

SEQ ID NO: 2604249 - DNA, 25 bp, Homo sapien
caaaatggctaattcctggaacaga

SEQ ID NO: 2604250 - DNA, 25 bp, Homo sapien
agatgaagccccgaactgctcagaa

SEQ ID NO: 2604251 - DNA, 25 bp, Homo sapien
gacgctactcacttgcccaggtggg

SEQ ID NO: 2604252 - DNA, 25 bp, Homo sapien
tccagtagagttgggaagacgctac

SEQ ID NO: 2604253 - DNA, 25 bp, Homo sapien
tagagtccaacaaacagggtaggcg

SEQ ID NO: 2604254 - DNA, 25 bp, Homo sapien
tatctgtgtcgagattcacaccggg

SEQ ID NO: 2604255 - DNA, 25 bp, Homo sapien
gacttcagagccatccctttaaaat

SEQ ID NO: 2604256 - DNA, 25 bp, Homo sapien
catcaggcctccttttttcacggag

SEQ ID NO: 2604257 - DNA, 25 bp, Homo sapien
gcaattattgaaggagatgatacat

SEQ ID NO: 2604258 - DNA, 25 bp, Homo sapien
gcctcttcctagttttgcaacccag

SEQ ID NO: 2604259 - DNA, 25 bp, Homo sapien
ccatagagcagtcgcaggaaggcag

SEQ ID NO: 2604260 - DNA, 25 bp, Homo sapien
gaaaaatggatcaacgaggacggca

SEQ ID NO: 2604261 - DNA, 25 bp, Homo sapien
gctcagggcctctatatcgacgaaa

SEQ ID NO: 2604262 - DNA, 25 bp, Homo sapien
ccaaaggtcattacgccgcagggta

SEQ ID NO: 2604263 - DNA, 25 bp, Homo sapien
ttatctcctgttagttcatcagcta

SEQ ID NO: 2604264 - DNA, 25 bp, Homo sapien
tcatgttttatctcctgttagttca

SEQ ID NO: 2604265 - DNA, 25 bp, Homo sapien
ttttatctcctgttagttcatcagc

SEQ ID NO: 2604266 - DNA, 25 bp, Homo sapien
tgttttatctcctgttagttcatca

SEQ ID NO: 2604267 - DNA, 25 bp, Homo sapien
gagggcctcaaggaggtaattgaac

SEQ ID NO: 2604268 - DNA, 25 bp, Homo sapien
ggcctcaaggaggtaattgaacacc

SEQ ID NO: 2604269 - DNA, 25 bp, Homo sapien
caaggaggtaattgaacacccgtgt

SEQ ID NO: 2604270 - DNA, 25 bp, Homo sapien
cctcaaggaggtaattgaacacccg

SEQ ID NO: 2604271 - DNA, 25 bp, Homo sapien
gcagcttgataagtcaaagagcgcc

SEQ ID NO: 2604272 - DNA, 25 bp, Homo sapien
ttgataagtcaaagagcgcctgcct

SEQ ID NO: 2604273 - DNA, 25 bp, Homo sapien
gcttgataagtcaaagagcgcctgc

SEQ ID NO: 2604274 - DNA, 25 bp, Homo sapien
tgataagtcaaagagcgcctgcctc

SEQ ID NO: 2604275 - DNA, 25 bp, Homo sapien
gccatgacgccgctcatgctggatg

SEQ ID NO: 2604276 - DNA, 25 bp, Homo sapien
gcacactgcgtatggtcctggcgaa

SEQ ID NO: 2604277 - DNA, 25 bp, Homo sapien
caagctgaccgtctgggatggtgct

SEQ ID NO: 2604278 - DNA, 25 bp, Homo sapien
ttttcacacataaccagccgctcgg

SEQ ID NO: 2604279 - DNA, 25 bp, Homo sapien
tcaggacatgttaggatccgtcccc

SEQ ID NO: 2604280 - DNA, 25 bp, Homo sapien
caggacatgttaggatccgtcccca

SEQ ID NO: 2604281 - DNA, 25 bp, Homo sapien
ccatgcggcttgtggaggccatcct

SEQ ID NO: 2604282 - DNA, 25 bp, Homo sapien
gggcttccgcggatgcagcctcgga

SEQ ID NO: 2604283 - DNA, 25 bp, Homo sapien
tcgaagtcttgaaggcggttggcag

SEQ ID NO: 2604284 - DNA, 25 bp, Homo sapien
cagcgtgtcgaagtcttgaaggcgg

SEQ ID NO: 2604285 - DNA, 25 bp, Homo sapien
tcttgcaaactcaggcgctttcggg

SEQ ID NO: 2604286 - DNA, 25 bp, Homo sapien
aaccaatgatctgtagcctggccga

SEQ ID NO: 2604287 - DNA, 25 bp, Homo sapien
ccctgagcgttgtgaatggatacca

SEQ ID NO: 2604288 - DNA, 25 bp, Homo sapien
tcataatcaagccagatgcgcgcga

SEQ ID NO: 2604289 - DNA, 25 bp, Homo sapien
ttcccatgccgagggtgcgccagta

SEQ ID NO: 2604290 - DNA, 25 bp, Homo sapien
taccaccttgattaaccggcaaagc

SEQ ID NO: 2604291 - DNA, 25 bp, Homo sapien
gggtgcgccagtaccaccttgatta

SEQ ID NO: 2604292 - DNA, 25 bp, Homo sapien
ttaaccggcaaagctccgttgctcc

SEQ ID NO: 2604293 - DNA, 25 bp, Homo sapien
aaactggtgccattgatcgtaacgg

SEQ ID NO: 2604294 - DNA, 25 bp, Homo sapien
ccaagagccgggattgataaactgg

SEQ ID NO: 2604295 - DNA, 25 bp, Homo sapien
gatcgtaacggtaatgttctggttg

SEQ ID NO: 2604296 - DNA, 25 bp, Homo sapien
ccgggattgataaactggtgccatt

SEQ ID NO: 2604297 - DNA, 25 bp, Homo sapien
tgtgctccctgacgcgacaatgcgc

SEQ ID NO: 2604298 - DNA, 25 bp, Homo sapien
tattgtgctccctgacgcgacaatg

SEQ ID NO: 2604299 - DNA, 25 bp, Homo sapien
gacaatgcgccgccctacgctgtta

SEQ ID NO: 2604300 - DNA, 25 bp, Homo sapien
cgacaatgcgccgccctacgctgtt

SEQ ID NO: 2604301 - DNA, 25 bp, Homo sapien
gctgtattcgcccaacgacggaaac

SEQ ID NO: 2604302 - DNA, 25 bp, Homo sapien
tgagggcaccgtaaaagaccagctg

SEQ ID NO: 2604303 - DNA, 25 bp, Homo sapien
ctgccggaggtttgcccggcagcca

SEQ ID NO: 2604304 - DNA, 25 bp, Homo sapien
cgacggaaacgggtttgatgccata

SEQ ID NO: 2604305 - DNA, 25 bp, Homo sapien
tcagaatactcccgttaatcggcca

SEQ ID NO: 2604306 - DNA, 25 bp, Homo sapien
cagaatactcccgttaatcggccaa

SEQ ID NO: 2604307 - DNA, 25 bp, Homo sapien
gaatctctgtataggccgtgtcgcc

SEQ ID NO: 2604308 - DNA, 25 bp, Homo sapien
cagttcaggattggcgtagtcggca

SEQ ID NO: 2604309 - DNA, 25 bp, Homo sapien
gctgacatctatcgaggacgtgccc

SEQ ID NO: 2604310 - DNA, 25 bp, Homo sapien
tattcttcggcgctgacaggacgct

SEQ ID NO: 2604311 - DNA, 25 bp, Homo sapien
tgccaaccgccagttcgttatcgac

SEQ ID NO: 2604312 - DNA, 25 bp, Homo sapien
tactggaccggaaggctgagcttga

SEQ ID NO: 2604313 - DNA, 25 bp, Homo sapien
gaaagattggtaaactggcgtgtcc

SEQ ID NO: 2604314 - DNA, 25 bp, Homo sapien
tggtggtgacagttgtgccaaccgc

SEQ ID NO: 2604315 - DNA, 25 bp, Homo sapien
gccagcggcgtatcgttgaggaaaa

SEQ ID NO: 2604316 - DNA, 25 bp, Homo sapien
ggaaaatattctgagcggtcaggtc

SEQ ID NO: 2604317 - DNA, 25 bp, Homo sapien
gcagatcgtcaggttgctcaaccgg

SEQ ID NO: 2604318 - DNA, 25 bp, Homo sapien
catttttaattttgcgaccgacagc

SEQ ID NO: 2604319 - DNA, 25 bp, Homo sapien
cctgttttgcgagtggcgtttgact

SEQ ID NO: 2604320 - DNA, 25 bp, Homo sapien
ttagtcaaagtcctgttttgcgagt

SEQ ID NO: 2604321 - DNA, 25 bp, Homo sapien
ttgcgagtggcgtttgactggttac

SEQ ID NO: 2604322 - DNA, 25 bp, Homo sapien
caaagtcctgttttgcgagtggcgt

SEQ ID NO: 2604323 - DNA, 25 bp, Homo sapien
ggtaacgaactgatctgctgaggca

SEQ ID NO: 2604324 - DNA, 25 bp, Homo sapien
aatctctatacgcttctgggtaacg

SEQ ID NO: 2604325 - DNA, 25 bp, Homo sapien
tataagcctcaacaagagcacgacg

SEQ ID NO: 2604326 - DNA, 25 bp, Homo sapien
ggtagcgccacatgtcgttattgca

SEQ ID NO: 2604327 - DNA, 25 bp, Homo sapien
gccattttaccttcgagaataagcg

SEQ ID NO: 2604328 - DNA, 25 bp, Homo sapien
aataagcgtcttaaccatgcattct

SEQ ID NO: 2604329 - DNA, 25 bp, Homo sapien
tcggcaacatcaaactgaacgcgtt

SEQ ID NO: 2604330 - DNA, 25 bp, Homo sapien
tgcattctgtccttatgcctgacca

SEQ ID NO: 2604331 - DNA, 25 bp, Homo sapien
tcccagttgtcatcgtagagccgct

SEQ ID NO: 2604332 - DNA, 25 bp, Homo sapien
gactgaacaatcaggccgcaggctt

SEQ ID NO: 2604333 - DNA, 25 bp, Homo sapien
tgtctcctcgggcttatcggcaatg

SEQ ID NO: 2604334 - DNA, 25 bp, Homo sapien
taaaattcacggataagcgaccagc

SEQ ID NO: 2604335 - DNA, 25 bp, Homo sapien
gacggatagcatccagcaatttttc

SEQ ID NO: 2604336 - DNA, 25 bp, Homo sapien
tccagcaatttttcacgcattttat

SEQ ID NO: 2604337 - DNA, 25 bp, Homo sapien
tagcatccagcaatttttcacgcat

SEQ ID NO: 2604338 - DNA, 25 bp, Homo sapien
ctgacggatagcatccagcaatttt

SEQ ID NO: 2604339 - DNA, 25 bp, Homo sapien
tgcaggtttgcagccggaaaaccgc

SEQ ID NO: 2604340 - DNA, 25 bp, Homo sapien
gcaggtttgcagccggaaaaccgcc

SEQ ID NO: 2604341 - DNA, 25 bp, Homo sapien
ctgcaggtttgcagccggaaaaccg

SEQ ID NO: 2604342 - DNA, 25 bp, Homo sapien
caggtttgcagccggaaaaccgccg

SEQ ID NO: 2604343 - DNA, 25 bp, Homo sapien
acgatcctgacaatcctgccggcgg

SEQ ID NO: 2604344 - DNA, 25 bp, Homo sapien
gggccgtgacgatcctgacaatcct

SEQ ID NO: 2604345 - DNA, 25 bp, Homo sapien
cgcgtccgggccgtgacgatcctga

SEQ ID NO: 2604346 - DNA, 25 bp, Homo sapien
gtgacgatcctgacaatcctgccgg

SEQ ID NO: 2604347 - DNA, 25 bp, Homo sapien
tgccgttgtaatcgcatccagtccc

SEQ ID NO: 2604348 - DNA, 25 bp, Homo sapien
catcggtcggtgtaccgtctttggt

SEQ ID NO: 2604349 - DNA, 25 bp, Homo sapien
tggtaaagtatttcgtgccgttgta

SEQ ID NO: 2604350 - DNA, 25 bp, Homo sapien
tctttcgacgggtcatcggtcggtg

SEQ ID NO: 2604351 - DNA, 25 bp, Homo sapien
tgccgggctcaagctgttgtatgtc

SEQ ID NO: 2604352 - DNA, 25 bp, Homo sapien
tattgtgcgcatgaaaacgcagcac

SEQ ID NO: 2604353 - DNA, 25 bp, Homo sapien
ctcttcctgaatattgtgcgcatga

SEQ ID NO: 2604354 - DNA, 25 bp, Homo sapien
gcatgaaaacgcagcacctgatcca

SEQ ID NO: 2604355 - DNA, 25 bp, Homo sapien
aggcagctttcagtgtttttcgaga

SEQ ID NO: 2604356 - DNA, 25 bp, Homo sapien
ggcagctttcagtgtttttcgagaa

SEQ ID NO: 2604357 - DNA, 25 bp, Homo sapien
ttcgagaaaatcagggcgcgaacgc

SEQ ID NO: 2604358 - DNA, 25 bp, Homo sapien
cagtgtttttcgagaaaatcagggc

SEQ ID NO: 2604359 - DNA, 25 bp, Homo sapien
tcgcgtgcgccaggtaaacgtgtcc

SEQ ID NO: 2604360 - DNA, 25 bp, Homo sapien
taacgtgagacatcaggaaagcgcg

SEQ ID NO: 2604361 - DNA, 25 bp, Homo sapien
catggagtggtccaccagaacgatt

SEQ ID NO: 2604362 - DNA, 25 bp, Homo sapien
tgtttgtagccatccccgaactggg

SEQ ID NO: 2604363 - DNA, 25 bp, Homo sapien
agctggtgaagtcccggaagctcgc

SEQ ID NO: 2604364 - DNA, 25 bp, Homo sapien
agcccgctgaacgttgcctgcgaaa

SEQ ID NO: 2604365 - DNA, 25 bp, Homo sapien
tcccggttgtcgtcaggctggtaag

SEQ ID NO: 2604366 - DNA, 25 bp, Homo sapien
aacggacacaatcattttgaggatt

SEQ ID NO: 2604367 - DNA, 25 bp, Homo sapien
cctgcgccatacggaacacacagta

SEQ ID NO: 2604368 - DNA, 25 bp, Homo sapien
tgcgccatacggaacacacagtagg

SEQ ID NO: 2604369 - DNA, 25 bp, Homo sapien
cctgccctgcgccatacggaacaca

SEQ ID NO: 2604370 - DNA, 25 bp, Homo sapien
cgccatacggaacacacagtaggtg

SEQ ID NO: 2604371 - DNA, 25 bp, Homo sapien
atcaggcgccatgtcccgctggagg

SEQ ID NO: 2604372 - DNA, 25 bp, Homo sapien
gtagttcatcaggcgccatgtcccg

SEQ ID NO: 2604373 - DNA, 25 bp, Homo sapien
gttcatcaggcgccatgtcccgctg

SEQ ID NO: 2604374 - DNA, 25 bp, Homo sapien
tcaggcgccatgtcccgctggaggg

SEQ ID NO: 2604375 - DNA, 25 bp, Homo sapien
gaagctctgcttttcagcagacaag

SEQ ID NO: 2604376 - DNA, 25 bp, Homo sapien
gtggcacattctaaaccccttcaag

SEQ ID NO: 2604377 - DNA, 25 bp, Homo sapien
atctaacccggcacgactactgcaa

SEQ ID NO: 2604378 - DNA, 25 bp, Homo sapien
aaataattttcacgccaccgtggca

SEQ ID NO: 2604379 - DNA, 25 bp, Homo sapien
cacaactggcttcgttcaacggagc

SEQ ID NO: 2604380 - DNA, 25 bp, Homo sapien
actggcttcgttcaacggagcacac

SEQ ID NO: 2604381 - DNA, 25 bp, Homo sapien
caactggcttcgttcaacggagcac

SEQ ID NO: 2604382 - DNA, 25 bp, Homo sapien
ctacacaactggcttcgttcaacgg

SEQ ID NO: 2604383 - DNA, 25 bp, Homo sapien
gaaccaccagcgagaaactcatcca

SEQ ID NO: 2604384 - DNA, 25 bp, Homo sapien
catccacttgctctggctgcaaaat

SEQ ID NO: 2604385 - DNA, 25 bp, Homo sapien
gaagaaatgtgaagcctaagatgtc

SEQ ID NO: 2604386 - DNA, 25 bp, Homo sapien
aacttgaaccaccagcgagaaactc

SEQ ID NO: 2604387 - DNA, 25 bp, Homo sapien
gcccgcgaccttggtgttatcagca

SEQ ID NO: 2604388 - DNA, 25 bp, Homo sapien
agtcgagcccgcgaccttggtgtta

SEQ ID NO: 2604389 - DNA, 25 bp, Homo sapien
tgttatcagcaccacgctcttacca

SEQ ID NO: 2604390 - DNA, 25 bp, Homo sapien
tggccggtgcgggagtcgagcccgc

SEQ ID NO: 2604391 - DNA, 25 bp, Homo sapien
atggcggtatcagcaccacgcgctc

SEQ ID NO: 2604392 - DNA, 25 bp, Homo sapien
gcgctcaccaactgagataaccgac

SEQ ID NO: 2604393 - DNA, 25 bp, Homo sapien
gcgaccatggcggtatcagcaccac

SEQ ID NO: 2604394 - DNA, 25 bp, Homo sapien
accacgcgctcaccaactgagataa

SEQ ID NO: 2604395 - DNA, 25 bp, Homo sapien
acatggtgagatcctctctctatta

SEQ ID NO: 2604396 - DNA, 25 bp, Homo sapien
catggtgagatcctctctctattaa

SEQ ID NO: 2604397 - DNA, 25 bp, Homo sapien
ggtgagatcctctctctattaaaaa

SEQ ID NO: 2604398 - DNA, 25 bp, Homo sapien
tgagatcctctctctattaaaaaaa

SEQ ID NO: 2604399 - DNA, 25 bp, Homo sapien
tttcctggcttcatggtgctcatca

SEQ ID NO: 2604400 - DNA, 25 bp, Homo sapien
ttcctggcttcatggtgctcatcat

SEQ ID NO: 2604401 - DNA, 25 bp, Homo sapien
ctttcctggcttcatggtgctcatc

SEQ ID NO: 2604402 - DNA, 25 bp, Homo sapien
aaaataaggtgggtccgctgtgctg

SEQ ID NO: 2604403 - DNA, 25 bp, Homo sapien
gcagcgttgcacgtgtggccccgct

SEQ ID NO: 2604404 - DNA, 25 bp, Homo sapien
gtagcccgccgctttcccaggtgag

SEQ ID NO: 2604405 - DNA, 25 bp, Homo sapien
gcagcgtcgccttccgaggtgtctt

SEQ ID NO: 2604406 - DNA, 25 bp, Homo sapien
gcgggtgacgaaggcgcagctgctg

SEQ ID NO: 2604407 - DNA, 25 bp, Homo sapien
tgaagcgggtgacgaaggcgcagct

SEQ ID NO: 2604408 - DNA, 25 bp, Homo sapien
ctgaagcgggtgacgaaggcgcagc

SEQ ID NO: 2604409 - DNA, 25 bp, Homo sapien
aagcgggtgacgaaggcgcagctgc

SEQ ID NO: 2604410 - DNA, 25 bp, Homo sapien
gccaggcctcaggattctcagagtt

SEQ ID NO: 2604411 - DNA, 25 bp, Homo sapien
gtcgagacccctgcagccgttattt

SEQ ID NO: 2604412 - DNA, 25 bp, Homo sapien
ttgatacacgaagttgccaggcctc

SEQ ID NO: 2604413 - DNA, 25 bp, Homo sapien
cctggcgcaaggattccgtgtatat

SEQ ID NO: 2604414 - DNA, 25 bp, Homo sapien
tggcgcgggctctgcaaggaaatca

SEQ ID NO: 2604415 - DNA, 25 bp, Homo sapien
tcggttatctcagttggtgagcgcg

SEQ ID NO: 2604416 - DNA, 25 bp, Homo sapien
cgtggtgctgataccgccatggtcg

SEQ ID NO: 2604417 - DNA, 25 bp, Homo sapien
gagccctttcagacgctcgggcagc

SEQ ID NO: 2604418 - DNA, 25 bp, Homo sapien
ctcggcccagaggttgtcgaggaca

SEQ ID NO: 2604419 - DNA, 25 bp, Homo sapien
cctttcaggttctgtaagccccatg

SEQ ID NO: 2604420 - DNA, 25 bp, Homo sapien
cttgcgggatctcttggactcggcc

SEQ ID NO: 2604421 - DNA, 25 bp, Homo sapien
ccccatgcgggcaggagcgacttgc

SEQ ID NO: 2604422 - DNA, 25 bp, Homo sapien
agtccccgcggctggggcaaagcgg

SEQ ID NO: 2604423 - DNA, 25 bp, Homo sapien
ttggcgaggaatcgctcgtggacgg

SEQ ID NO: 2604424 - DNA, 25 bp, Homo sapien
aggcgcgcgggcttggcgaggaatc

SEQ ID NO: 2604425 - DNA, 25 bp, Homo sapien
cgcgggcttggcgaggaatcgctcg

SEQ ID NO: 2604426 - DNA, 25 bp, Homo sapien
caaaagatctcaaaagaactcagtt

SEQ ID NO: 2604427 - DNA, 25 bp, Homo sapien
agatctcaaaagaactcagttgtca

SEQ ID NO: 2604428 - DNA, 25 bp, Homo sapien
ggaactaggaaagattgacttgggc

SEQ ID NO: 2604429 - DNA, 25 bp, Homo sapien
aagatctcaaaagaactcagttgtc

SEQ ID NO: 2604430 - DNA, 25 bp, Homo sapien
aataaggtgggtccgctgtgctgat

SEQ ID NO: 2604431 - DNA, 25 bp, Homo sapien
aaggtgggtccgctgtgctgatcgg

SEQ ID NO: 2604432 - DNA, 25 bp, Homo sapien
aaaataaggtgggtccgctgtgctg

SEQ ID NO: 2604433 - DNA, 25 bp, Homo sapien
ggtgggtccgctgtgctgatcggcc

SEQ ID NO: 2604434 - DNA, 25 bp, Homo sapien
gtgaggcacgtcgtcgcccagcgac

SEQ ID NO: 2604435 - DNA, 25 bp, Homo sapien
gcagcgttgcacgtgtggccccgct

SEQ ID NO: 2604436 - DNA, 25 bp, Homo sapien
gcagcgtcgccttccgaggtgtctt

SEQ ID NO: 2604437 - DNA, 25 bp, Homo sapien
gtagcccgccgctttcccaggtgag

SEQ ID NO: 2604438 - DNA, 25 bp, Homo sapien
aagcaggagcgggcccctccctcac

SEQ ID NO: 2604439 - DNA, 25 bp, Homo sapien
caagcaggagcgggcccctccctca

SEQ ID NO: 2604440 - DNA, 25 bp, Homo sapien
tctggcagatgaccgtcggccaaat

SEQ ID NO: 2604441 - DNA, 25 bp, Homo sapien
ttgataagtcaaagagcgcctgcct

SEQ ID NO: 2604442 - DNA, 25 bp, Homo sapien
gctggcacggacagccccgggaagg

SEQ ID NO: 2604443 - DNA, 25 bp, Homo sapien
tgaccgtcggccaaatcatcccttt

SEQ ID NO: 2604444 - DNA, 25 bp, Homo sapien
gggctggtgacgtggagtcccacca

SEQ ID NO: 2604445 - DNA, 25 bp, Homo sapien
gcagattggggctggactgtggcca

SEQ ID NO: 2604446 - DNA, 25 bp, Homo sapien
ctggtgacgtggagtcccaccaggc

SEQ ID NO: 2604447 - DNA, 25 bp, Homo sapien
cagtagggacgttggccgttcctga

SEQ ID NO: 2604448 - DNA, 25 bp, Homo sapien
cagacacgtgctactacgcctggtt

SEQ ID NO: 2604449 - DNA, 25 bp, Homo sapien
tgcccggccgggctgaatatcctca

SEQ ID NO: 2604450 - DNA, 25 bp, Homo sapien
gccgggctgaatatcctcaacaact

SEQ ID NO: 2604451 - DNA, 25 bp, Homo sapien
gacacgtgctactacgcctggttaa

SEQ ID NO: 2604452 - DNA, 25 bp, Homo sapien
catgtgcccctaaattcatcagttt

SEQ ID NO: 2604453 - DNA, 25 bp, Homo sapien
ctggggccgttgctgcttgtgccgt

SEQ ID NO: 2604454 - DNA, 25 bp, Homo sapien
cttgtgccgtgagcgacggccagcc

SEQ ID NO: 2604455 - DNA, 25 bp, Homo sapien
tgtgccgtgagcgacggccagccat

SEQ ID NO: 2604456 - DNA, 25 bp, Homo sapien
gctgcttgtgccgtgagcgacggcc

SEQ ID NO: 2604457 - DNA, 25 bp, Homo sapien
caataaatcagcagggtgactgtag

SEQ ID NO: 2604458 - DNA, 25 bp, Homo sapien
tgtttctagcttaacgaaaaggcaa

SEQ ID NO: 2604459 - DNA, 25 bp, Homo sapien
aatgtgaaggctgtcttagtcaaca

SEQ ID NO: 2604460 - DNA, 25 bp, Homo sapien
actgtgtaacagtcaagctgaggga

SEQ ID NO: 2604461 - DNA, 25 bp, Homo sapien
tatcgaagtgtatatttgcaaagtg

SEQ ID NO: 2604462 - DNA, 25 bp, Homo sapien
cagtcacttgctgatctattgaaca

SEQ ID NO: 2604463 - DNA, 25 bp, Homo sapien
gcggctcatcctgctacaaggtggg

SEQ ID NO: 2604464 - DNA, 25 bp, Homo sapien
gtaaactacagtcacttgctgatct

SEQ ID NO: 2604465 - DNA, 25 bp, Homo sapien
tgtaaatggagtgcataggcagcag

SEQ ID NO: 2604466 - DNA, 25 bp, Homo sapien
tagtcctcagggtatggtggccaat

SEQ ID NO: 2604467 - DNA, 25 bp, Homo sapien
gcatctgtgtcagggttagtcctca

SEQ ID NO: 2604468 - DNA, 25 bp, Homo sapien
tgcactaggtgacgctgaagccaca

SEQ ID NO: 2604469 - DNA, 25 bp, Homo sapien
gctttgctagatgatctttttcaac

SEQ ID NO: 2604470 - DNA, 25 bp, Homo sapien
tagaagttctaaccggcacacttag

SEQ ID NO: 2604471 - DNA, 25 bp, Homo sapien
cccaggctggccattatatgtggct

SEQ ID NO: 2604472 - DNA, 25 bp, Homo sapien
ttcagttaacggagaaaaagcactg

SEQ ID NO: 2604473 - DNA, 25 bp, Homo sapien
tgcctaaagagcgtgtgtgcacaca

SEQ ID NO: 2604474 - DNA, 25 bp, Homo sapien
tggaggctgtagtgaactcagactg

SEQ ID NO: 2604475 - DNA, 25 bp, Homo sapien
gaggctgtagtgaactcagactgcg

SEQ ID NO: 2604476 - DNA, 25 bp, Homo sapien
ggctgtagtgaactcagactgcgcc

SEQ ID NO: 2604477 - DNA, 25 bp, Homo sapien
gctgtagtgaactcagactgcgcca

SEQ ID NO: 2604478 - DNA, 25 bp, Homo sapien
tcacacctgctttatcgggagtttc

SEQ ID NO: 2604479 - DNA, 25 bp, Homo sapien
cagaggctattgacacaccagaagc

SEQ ID NO: 2604480 - DNA, 25 bp, Homo sapien
tgctttatcgggagtttcagaaggg

SEQ ID NO: 2604481 - DNA, 25 bp, Homo sapien
taatgcaaacttacagcgactcaca

SEQ ID NO: 2604482 - DNA, 25 bp, Homo sapien
accgcgtgctgactctctcaccaag

SEQ ID NO: 2604483 - DNA, 25 bp, Homo sapien
ctgcaggccaccgcgtgctgactct

SEQ ID NO: 2604484 - DNA, 25 bp, Homo sapien
gcaggccaccgcgtgctgactctct

SEQ ID NO: 2604485 - DNA, 25 bp, Homo sapien
gtgctgactctctcaccaagcagga

SEQ ID NO: 2604486 - DNA, 25 bp, Homo sapien
gctggcacggacagccccgggaagg

SEQ ID NO: 2604487 - DNA, 25 bp, Homo sapien
tctggcagatgaccgtcggccaaat

SEQ ID NO: 2604488 - DNA, 25 bp, Homo sapien
ttgataagtcaaagagcgcctgcct

SEQ ID NO: 2604489 - DNA, 25 bp, Homo sapien
tgaccgtcggccaaatcatcccttt

SEQ ID NO: 2604490 - DNA, 25 bp, Homo sapien
cttggcaggtcgagatacctgtctc

SEQ ID NO: 2604491 - DNA, 25 bp, Homo sapien
tgatgtaggaaacatgactgtggct

SEQ ID NO: 2604492 - DNA, 25 bp, Homo sapien
ctggtgacgtggagtcccaccaggc

SEQ ID NO: 2604493 - DNA, 25 bp, Homo sapien
tcaacatggtgccctgtccatttgg

SEQ ID NO: 2604494 - DNA, 25 bp, Homo sapien
cattcctgggctacgtgcaaatcaa

SEQ ID NO: 2604495 - DNA, 25 bp, Homo sapien
caaatgacaactagattggctgtgc

SEQ ID NO: 2604496 - DNA, 25 bp, Homo sapien
aatctctctctaagggccaaacaca

SEQ ID NO: 2604497 - DNA, 25 bp, Homo sapien
gcatatccttcaagaacgatgtctg

SEQ ID NO: 2604498 - DNA, 25 bp, Homo sapien
cctgcggttccctgtaggaagccgt

SEQ ID NO: 2604499 - DNA, 25 bp, Homo sapien
ggatgacagtgaggcggtcagaagt

SEQ ID NO: 2604500 - DNA, 25 bp, Homo sapien
tctccttgaagtctcctaggtctca

SEQ ID NO: 2604501 - DNA, 25 bp, Homo sapien
tgaggcggtcagaagtcgcagctgg

SEQ ID NO: 2604502 - DNA, 25 bp, Homo sapien
ctcggcccagaggttgtcgaggaca

SEQ ID NO: 2604503 - DNA, 25 bp, Homo sapien
cctttcaggttctgtaagccccatg

SEQ ID NO: 2604504 - DNA, 25 bp, Homo sapien
cttgcgggatctcttggactcggcc

SEQ ID NO: 2604505 - DNA, 25 bp, Homo sapien
ccccatgcgggcaggagcgacttgc

SEQ ID NO: 2604506 - DNA, 25 bp, Homo sapien
cacctgcaggccactcaggatatcc

SEQ ID NO: 2604507 - DNA, 25 bp, Homo sapien
ctgcaggccactcaggatatccaaa

SEQ ID NO: 2604508 - DNA, 25 bp, Homo sapien
gccacctgcaggccactcaggatat

SEQ ID NO: 2604509 - DNA, 25 bp, Homo sapien
tcaggatatccaaagcgatccacat

SEQ ID NO: 2604510 - DNA, 25 bp, Homo sapien
aggcctaggcaagtggatcatctga

SEQ ID NO: 2604511 - DNA, 25 bp, Homo sapien
accagcccgggcaacatggtgagat

SEQ ID NO: 2604512 - DNA, 25 bp, Homo sapien
ccaggagttggagaccagcccgggc

SEQ ID NO: 2604513 - DNA, 25 bp, Homo sapien
gcctaggcaagtggatcatctgagc

SEQ ID NO: 2604514 - DNA, 25 bp, Homo sapien
aataaggtgggtccgctgtgctgat

SEQ ID NO: 2604515 - DNA, 25 bp, Homo sapien
aaggtgggtccgctgtgctgatcgg

SEQ ID NO: 2604516 - DNA, 25 bp, Homo sapien
ggtgggtccgctgtgctgatcggcc

SEQ ID NO: 2604517 - DNA, 25 bp, Homo sapien
aaaataaggtgggtccgctgtgctg

SEQ ID NO: 2604518 - DNA, 25 bp, Homo sapien
gtgaggcacgtcgtcgcccagcgac

SEQ ID NO: 2604519 - DNA, 25 bp, Homo sapien
gcagcgttgcacgtgtggccccgct

SEQ ID NO: 2604520 - DNA, 25 bp, Homo sapien
gtagcccgccgctttcccaggtgag

SEQ ID NO: 2604521 - DNA, 25 bp, Homo sapien
gcagcgtcgccttccgaggtgtctt

SEQ ID NO: 2604522 - DNA, 25 bp, Homo sapien
ccccgtgcccgccacgcctgctgcc

SEQ ID NO: 2604523 - DNA, 25 bp, Homo sapien
ccgtgcccgccacgcctgctgccgc

SEQ ID NO: 2604524 - DNA, 25 bp, Homo sapien
cccgtgcccgccacgcctgctgccg

SEQ ID NO: 2604525 - DNA, 25 bp, Homo sapien
acgcctttgaccactcgttcagcct

SEQ ID NO: 2604526 - DNA, 25 bp, Homo sapien
cctagctcgtctgacacgcctttga

SEQ ID NO: 2604527 - DNA, 25 bp, Homo sapien
tgcctagctcgtctgacacgccttt

SEQ ID NO: 2604528 - DNA, 25 bp, Homo sapien
tgtgctgcctagctcgtctgacacg

SEQ ID NO: 2604529 - DNA, 25 bp, Homo sapien
ctggggccgttgctgcttgtgccgt

SEQ ID NO: 2604530 - DNA, 25 bp, Homo sapien
cttgtgccgtgagcgacggccagcc

SEQ ID NO: 2604531 - DNA, 25 bp, Homo sapien
tgtgccgtgagcgacggccagccat

SEQ ID NO: 2604532 - DNA, 25 bp, Homo sapien
gctgcttgtgccgtgagcgacggcc

SEQ ID NO: 2604533 - DNA, 25 bp, Homo sapien
aaacatttggtatcgagacgctgcc

SEQ ID NO: 2604534 - DNA, 25 bp, Homo sapien
gacgttcccggtagcgattggacag

SEQ ID NO: 2604535 - DNA, 25 bp, Homo sapien
gcggcaagcatatggtctggaaaca

SEQ ID NO: 2604536 - DNA, 25 bp, Homo sapien
gacaggatctttcgtaagggcgcct

SEQ ID NO: 2604537 - DNA, 25 bp, Homo sapien
gatgtatgccaatatcattattctc

SEQ ID NO: 2604538 - DNA, 25 bp, Homo sapien
cattattctcgttatttgtataacc

SEQ ID NO: 2604539 - DNA, 25 bp, Homo sapien
tcatcatcaatgtctcgtgaatttt

SEQ ID NO: 2604540 - DNA, 25 bp, Homo sapien
caatgtctcgtgaatttttgcgtgt

SEQ ID NO: 2604541 - DNA, 25 bp, Homo sapien
ttattcatcatagtccttggtgatg

SEQ ID NO: 2604542 - DNA, 25 bp, Homo sapien
ctgaataggaattggtcctgtcctt

SEQ ID NO: 2604543 - DNA, 25 bp, Homo sapien
aatctgaataggaattggtcctgtc

SEQ ID NO: 2604544 - DNA, 25 bp, Homo sapien
ttgatcaagcccagtaggttggaac

SEQ ID NO: 2604545 - DNA, 25 bp, Homo sapien
tctgaataggaattggtcctgtcct

SEQ ID NO: 2604546 - DNA, 25 bp, Homo sapien
gcagacatggagtaaagccacttac

SEQ ID NO: 2604547 - DNA, 25 bp, Homo sapien
tttccaagccccataactgcgtaag

SEQ ID NO: 2604548 - DNA, 25 bp, Homo sapien
tcagacgcatgctgcaacatcaact

SEQ ID NO: 2604549 - DNA, 25 bp, Homo sapien
taccttcagattgcctttcagacgc

SEQ ID NO: 2604550 - DNA, 25 bp, Homo sapien
ttggtggaatatcatctagttgttc

SEQ ID NO: 2604551 - DNA, 25 bp, Homo sapien
ggaatatcatctagttgttctttaa

SEQ ID NO: 2604552 - DNA, 25 bp, Homo sapien
caatgcttaggagtgaagttcagag

SEQ ID NO: 2604553 - DNA, 25 bp, Homo sapien
atgcaatgcttaggagtgaagttca

SEQ ID NO: 2604554 - DNA, 25 bp, Homo sapien
ttgggatcccctgctatgaacttcc

SEQ ID NO: 2604555 - DNA, 25 bp, Homo sapien
gacaggagtgagcttgggatcccct

SEQ ID NO: 2604556 - DNA, 25 bp, Homo sapien
tgagcttgggatcccctgctatgaa

SEQ ID NO: 2604557 - DNA, 25 bp, Homo sapien
ctataagacaggagtgagcttggga

SEQ ID NO: 2604558 - DNA, 25 bp, Homo sapien
tttaccacttcctcctcccaatatg

SEQ ID NO: 2604559 - DNA, 25 bp, Homo sapien
ttaccacttcctcctcccaatatgc

SEQ ID NO: 2604560 - DNA, 25 bp, Homo sapien
ccacttcctcctcccaatatgcact

SEQ ID NO: 2604561 - DNA, 25 bp, Homo sapien
acttcctcctcccaatatgcactcc

SEQ ID NO: 2604562 - DNA, 25 bp, Homo sapien
agttatcagagaatggaccttgtaa

SEQ ID NO: 2604563 - DNA, 25 bp, Homo sapien
cagagaatggaccttgtaatttggg

SEQ ID NO: 2604564 - DNA, 25 bp, Homo sapien
tttcaagaaatcatagttatcagag

SEQ ID NO: 2604565 - DNA, 25 bp, Homo sapien
ctttcaagaaatcatagttatcaga

SEQ ID NO: 2604566 - DNA, 25 bp, Homo sapien
aactgaatgctatcggttccatctc

SEQ ID NO: 2604567 - DNA, 25 bp, Homo sapien
gaatgctatcggttccatctcctct

SEQ ID NO: 2604568 - DNA, 25 bp, Homo sapien
taaactgaatgctatcggttccatc

SEQ ID NO: 2604569 - DNA, 25 bp, Homo sapien
actgaatgctatcggttccatctcc

SEQ ID NO: 2604570 - DNA, 25 bp, Homo sapien
tgaggcagagccacaagtggtttat

SEQ ID NO: 2604571 - DNA, 25 bp, Homo sapien
gacagtggagtcctaacaatcagat

SEQ ID NO: 2604572 - DNA, 25 bp, Homo sapien
ccacattgtggaattggtggagtga

SEQ ID NO: 2604573 - DNA, 25 bp, Homo sapien
caatcagataccacattgtggaatt

SEQ ID NO: 2604574 - DNA, 25 bp, Homo sapien
gggaaggtataacaccatacagtgc

SEQ ID NO: 2604575 - DNA, 25 bp, Homo sapien
agttggctcttgaggtgaaccttga

SEQ ID NO: 2604576 - DNA, 25 bp, Homo sapien
gagagatcattgagcattgtgggct

SEQ ID NO: 2604577 - DNA, 25 bp, Homo sapien
caactgtcatatgaacccagagaga

SEQ ID NO: 2604578 - DNA, 25 bp, Homo sapien
tctgcaagggatgtatgtatcagct

SEQ ID NO: 2604579 - DNA, 25 bp, Homo sapien
ggttagagctgcataagaacaattc

SEQ ID NO: 2604580 - DNA, 25 bp, Homo sapien
cagtctgtgactggtagagaatcac

SEQ ID NO: 2604581 - DNA, 25 bp, Homo sapien
tacagaactcactagggcaccatct

SEQ ID NO: 2604582 - DNA, 25 bp, Homo sapien
cacagttccaagcacattgtaggag

SEQ ID NO: 2604583 - DNA, 25 bp, Homo sapien
cattcatgtcaccacaagggctgta

SEQ ID NO: 2604584 - DNA, 25 bp, Homo sapien
cactttaagggtcagtgacatcctc

SEQ ID NO: 2604585 - DNA, 25 bp, Homo sapien
taaacagctaggttatgatgcacgt

SEQ ID NO: 2604586 - DNA, 25 bp, Homo sapien
tccatatctcatgacccactaaagg

SEQ ID NO: 2604587 - DNA, 25 bp, Homo sapien
tgtccatatctcatgacccactaaa

SEQ ID NO: 2604588 - DNA, 25 bp, Homo sapien
ccatatctcatgacccactaaaggg

SEQ ID NO: 2604589 - DNA, 25 bp, Homo sapien
catatctcatgacccactaaaggga

SEQ ID NO: 2604590 - DNA, 25 bp, Homo sapien
atcagcatacagaatattcacaatt

SEQ ID NO: 2604591 - DNA, 25 bp, Homo sapien
ttcacaatttgattacttaatccag

SEQ ID NO: 2604592 - DNA, 25 bp, Homo sapien
cagagctacaccaaggatgaaacaa

SEQ ID NO: 2604593 - DNA, 25 bp, Homo sapien
atttgattacttaatccagagctac

SEQ ID NO: 2604594 - DNA, 25 bp, Homo sapien
aataacaacttctatagactagccc

SEQ ID NO: 2604595 - DNA, 25 bp, Homo sapien
taataacttcgttctacaataacaa

SEQ ID NO: 2604596 - DNA, 25 bp, Homo sapien
actacttggagaattaataacttcg

SEQ ID NO: 2604597 - DNA, 25 bp, Homo sapien
tagctgtatgaaacttaaacataac

SEQ ID NO: 2604598 - DNA, 25 bp, Homo sapien
ctttttctgacctgatccacaaatt

SEQ ID NO: 2604599 - DNA, 25 bp, Homo sapien
acactttcatacatctgcctgaggg

SEQ ID NO: 2604600 - DNA, 25 bp, Homo sapien
tctgacctgatccacaaattctgga

SEQ ID NO: 2604601 - DNA, 25 bp, Homo sapien
aaaaattgcactcatctacaccagg

SEQ ID NO: 2604602 - DNA, 25 bp, Homo sapien
gatacaaagtatcactgaggccttt

SEQ ID NO: 2604603 - DNA, 25 bp, Homo sapien
gaaaacaacctttaatgtgatacaa

SEQ ID NO: 2604604 - DNA, 25 bp, Homo sapien
cagttagggatatgagaaatggcca

SEQ ID NO: 2604605 - DNA, 25 bp, Homo sapien
agaaaggaaacggtcacagaaatgc

SEQ ID NO: 2604606 - DNA, 25 bp, Homo sapien
ttatcctattttataagctacaaat

SEQ ID NO: 2604607 - DNA, 25 bp, Homo sapien
tcttctggaagcttacagacgcagg

SEQ ID NO: 2604608 - DNA, 25 bp, Homo sapien
gcttacagacgcaggctttgctgcc

SEQ ID NO: 2604609 - DNA, 25 bp, Homo sapien
tttccgcagaaaagtggtccaaagc

SEQ ID NO: 2604610 - DNA, 25 bp, Homo sapien
tgctgccctgctttcgccagtgcat

SEQ ID NO: 2604611 - DNA, 25 bp, Homo sapien
ccagtggtattaatgaggcaagcag

SEQ ID NO: 2604612 - DNA, 25 bp, Homo sapien
tacagacagcatcagattaaggtgc

SEQ ID NO: 2604613 - DNA, 25 bp, Homo sapien
ttaattgcctttgaagctcctgcca

SEQ ID NO: 2604614 - DNA, 25 bp, Homo sapien
taaggtgctggactatatacatggc

SEQ ID NO: 2604615 - DNA, 25 bp, Homo sapien
gtagggactgacaatgaatcagtag

SEQ ID NO: 2604616 - DNA, 25 bp, Homo sapien
gaatcagtagaaatggtgatgacta

SEQ ID NO: 2604617 - DNA, 25 bp, Homo sapien
gtgacttaagcttggaaccagggat

SEQ ID NO: 2604618 - DNA, 25 bp, Homo sapien
tatgaaggtgacttaagcttggaac

SEQ ID NO: 2604619 - DNA, 25 bp, Homo sapien
tgcttaatcctctggatgcagttct

SEQ ID NO: 2604620 - DNA, 25 bp, Homo sapien
catgcttaatcctctggatgcagtt

SEQ ID NO: 2604621 - DNA, 25 bp, Homo sapien
cttaatcctctggatgcagttctct

SEQ ID NO: 2604622 - DNA, 25 bp, Homo sapien
gcttaatcctctggatgcagttctc

SEQ ID NO: 2604623 - DNA, 25 bp, Homo sapien
gaaatgagtgtagaccacggttccc

SEQ ID NO: 2604624 - DNA, 25 bp, Homo sapien
gaggactaattatctgactgggcca

SEQ ID NO: 2604625 - DNA, 25 bp, Homo sapien
tataaagtgcctaccagttcttggc

SEQ ID NO: 2604626 - DNA, 25 bp, Homo sapien
tgtatggagccatagtggcctgcaa

SEQ ID NO: 2604627 - DNA, 25 bp, Homo sapien
gagagacagagatcgacacactgca

SEQ ID NO: 2604628 - DNA, 25 bp, Homo sapien
tcgacacactgcatgagccaaaaga

SEQ ID NO: 2604629 - DNA, 25 bp, Homo sapien
gacagagatcgacacactgcatgag

SEQ ID NO: 2604630 - DNA, 25 bp, Homo sapien
gagatcgacacactgcatgagccaa

SEQ ID NO: 2604631 - DNA, 25 bp, Homo sapien
cacaagccctgaatggaacaatcta

SEQ ID NO: 2604632 - DNA, 25 bp, Homo sapien
cacactctgggatgtccaaatctgg

SEQ ID NO: 2604633 - DNA, 25 bp, Homo sapien
gagaaagtcctgctacccacagggc

SEQ ID NO: 2604634 - DNA, 25 bp, Homo sapien
caaatctggttgagctaaacacatc

SEQ ID NO: 2604635 - DNA, 25 bp, Homo sapien
tcctgtgctgccaatgctgggcttc

SEQ ID NO: 2604636 - DNA, 25 bp, Homo sapien
cctgccactttccaaaatgattatg

SEQ ID NO: 2604637 - DNA, 25 bp, Homo sapien
ttatgaaaagctttgaatggagtca

SEQ ID NO: 2604638 - DNA, 25 bp, Homo sapien
ccaatgctgggcttctaattcctgc

SEQ ID NO: 2604639 - DNA, 25 bp, Homo sapien
gtccacatttcttaatggacgtagt

SEQ ID NO: 2604640 - DNA, 25 bp, Homo sapien
tagagtactgtttgtccacatttct

SEQ ID NO: 2604641 - DNA, 25 bp, Homo sapien
tgtccacatttcttaatggacgtag

SEQ ID NO: 2604642 - DNA, 25 bp, Homo sapien
agagtactgtttgtccacatttctt

SEQ ID NO: 2604643 - DNA, 25 bp, Homo sapien
gcaaaacctatcaaacttcaaatag

SEQ ID NO: 2604644 - DNA, 25 bp, Homo sapien
tattggacacgataaaaggacatga

SEQ ID NO: 2604645 - DNA, 25 bp, Homo sapien
gcctggcttggtctattcattacta

SEQ ID NO: 2604646 - DNA, 25 bp, Homo sapien
tataaaaatctagctgtaggttctc

SEQ ID NO: 2604647 - DNA, 25 bp, Homo sapien
tgttagcaggatgttcaactcccag

SEQ ID NO: 2604648 - DNA, 25 bp, Homo sapien
tcaaatgttagcaggatgttcaact

SEQ ID NO: 2604649 - DNA, 25 bp, Homo sapien
tgttcaactcccaggataatgatta

SEQ ID NO: 2604650 - DNA, 25 bp, Homo sapien
taatgattaagcgaagatttccttt

SEQ ID NO: 2604651 - DNA, 25 bp, Homo sapien
tattaaggtgaaatggaggtctgtg

SEQ ID NO: 2604652 - DNA, 25 bp, Homo sapien
tgaaatggaggtctgtgaaaaagct

SEQ ID NO: 2604653 - DNA, 25 bp, Homo sapien
tggaggtctgtgaaaaagctggact

SEQ ID NO: 2604654 - DNA, 25 bp, Homo sapien
aaaaaagtatatatagtgattctca

SEQ ID NO: 2604655 - DNA, 25 bp, Homo sapien
atgcctggtcctagtattaccggca

SEQ ID NO: 2604656 - DNA, 25 bp, Homo sapien
ctcctccacgaagcgtttccagata

SEQ ID NO: 2604657 - DNA, 25 bp, Homo sapien
ccacgaagcgtttccagatatctgc

SEQ ID NO: 2604658 - DNA, 25 bp, Homo sapien
tagtattaccggcattacctcctcc

SEQ ID NO: 2604659 - DNA, 25 bp, Homo sapien
tgcaaggaggctagcaaaaaatgct

SEQ ID NO: 2604660 - DNA, 25 bp, Homo sapien
gaaattggcttcatatacatcaggc

SEQ ID NO: 2604661 - DNA, 25 bp, Homo sapien
cagagcaagtctgtagaaattggct

SEQ ID NO: 2604662 - DNA, 25 bp, Homo sapien
gattagttgcaatctaactgcctga

SEQ ID NO: 2604663 - DNA, 25 bp, Homo sapien
catttctaatgatgagacctgccaa

SEQ ID NO: 2604664 - DNA, 25 bp, Homo sapien
aatgatgagacctgccaaaacttgt

SEQ ID NO: 2604665 - DNA, 25 bp, Homo sapien
gaacttctcggtttacattattggc

SEQ ID NO: 2604666 - DNA, 25 bp, Homo sapien
tcttttccattagaggtgactgtgg

SEQ ID NO: 2604667 - DNA, 25 bp, Homo sapien
caaattgctagtgctttccacagca

SEQ ID NO: 2604668 - DNA, 25 bp, Homo sapien
tttgtgcaatttcccttgaacatcc

SEQ ID NO: 2604669 - DNA, 25 bp, Homo sapien
tatgaacaagacttaatttgtgcaa

SEQ ID NO: 2604670 - DNA, 25 bp, Homo sapien
agcagggtaagttccgccctctttg

SEQ ID NO: 2604671 - DNA, 25 bp, Homo sapien
ctggaagcttgaactgcgaacaagg

SEQ ID NO: 2604672 - DNA, 25 bp, Homo sapien
ctgggaagcccagcgagccctcgaa

SEQ ID NO: 2604673 - DNA, 25 bp, Homo sapien
agttggttggtaaaagtgccgcctg

SEQ ID NO: 2604674 - DNA, 25 bp, Homo sapien
cttgaactgcgaacaaggccgacct

SEQ ID NO: 2604675 - DNA, 25 bp, Homo sapien
gaacctagctactattgcaccagcg

SEQ ID NO: 2604676 - DNA, 25 bp, Homo sapien
cccagggtcctatgtgtgtgcgaga

SEQ ID NO: 2604677 - DNA, 25 bp, Homo sapien
gacgaccgctgccagaagggtgctt

SEQ ID NO: 2604678 - DNA, 25 bp, Homo sapien
gtgaactccgggctgagccgaagct

SEQ ID NO: 2604679 - DNA, 25 bp, Homo sapien
gctaacatctgtccgactgggccag

SEQ ID NO: 2604680 - DNA, 25 bp, Homo sapien
cgtgggagataccaagtgccgagcc

SEQ ID NO: 2604681 - DNA, 25 bp, Homo sapien
tggatgcacgctagagcaggctctg

SEQ ID NO: 2604682 - DNA, 25 bp, Homo sapien
cagaaactcgcgtcagaagccttag

SEQ ID NO: 2604683 - DNA, 25 bp, Homo sapien
gggcgcgcagagcagctagggagca

SEQ ID NO: 2604684 - DNA, 25 bp, Homo sapien
aataggagtctagcggattcccagg

SEQ ID NO: 2604685 - DNA, 25 bp, Homo sapien
gaaataggagtctagcggattccca

SEQ ID NO: 2604686 - DNA, 25 bp, Homo sapien
gcaccgcgtgtgctcccaagggact

SEQ ID NO: 2604687 - DNA, 25 bp, Homo sapien
tataggtatttgcaaagagggagca

SEQ ID NO: 2604688 - DNA, 25 bp, Homo sapien
ggagttctctgaaccgtgtgttccc

SEQ ID NO: 2604689 - DNA, 25 bp, Homo sapien
tgggcgaacaccaaagcttccaact

SEQ ID NO: 2604690 - DNA, 25 bp, Homo sapien
agagaggtagtacagagtgacgcca

SEQ ID NO: 2604691 - DNA, 25 bp, Homo sapien
aaggggaggaaatacaaagagctga

SEQ ID NO: 2604692 - DNA, 25 bp, Homo sapien
gaggaaatacaaagagctgaacact

SEQ ID NO: 2604693 - DNA, 25 bp, Homo sapien
gggaggaaatacaaagagctgaaca

SEQ ID NO: 2604694 - DNA, 25 bp, Homo sapien
cacaccaccaaggggaggaaataca

SEQ ID NO: 2604695 - DNA, 25 bp, Homo sapien
ggctgtaaaattgcagtcaccagct

SEQ ID NO: 2604696 - DNA, 25 bp, Homo sapien
ctgtaaaattgcagtcaccagcttg

SEQ ID NO: 2604697 - DNA, 25 bp, Homo sapien
ccaaacagcttccataaacagggct

SEQ ID NO: 2604698 - DNA, 25 bp, Homo sapien
agggctgtaaaattgcagtcaccag

SEQ ID NO: 2604699 - DNA, 25 bp, Homo sapien
ccaattgtcaagtaagccaaactct

SEQ ID NO: 2604700 - DNA, 25 bp, Homo sapien
tcctttaccaattgtcaagtaagcc

SEQ ID NO: 2604701 - DNA, 25 bp, Homo sapien
actcttaatagttggcagtttgtta

SEQ ID NO: 2604702 - DNA, 25 bp, Homo sapien
gtaagccaaactcttaatagttggc

SEQ ID NO: 2604703 - DNA, 25 bp, Homo sapien
gatcctgcaaggcataagagggcat

SEQ ID NO: 2604704 - DNA, 25 bp, Homo sapien
caaggcataagagggcattgagagt

SEQ ID NO: 2604705 - DNA, 25 bp, Homo sapien
tcctgcaaggcataagagggcattg

SEQ ID NO: 2604706 - DNA, 25 bp, Homo sapien
cattgagagtctggaatggtgaatt

SEQ ID NO: 2604707 - DNA, 25 bp, Homo sapien
ctctggctcttctggtttacaaggg

SEQ ID NO: 2604708 - DNA, 25 bp, Homo sapien
aaggggtaaggtgcctcagggtcat

SEQ ID NO: 2604709 - DNA, 25 bp, Homo sapien
caaggggtaaggtgcctcagggtca

SEQ ID NO: 2604710 - DNA, 25 bp, Homo sapien
tggctcttctggtttacaaggggta

SEQ ID NO: 2604711 - DNA, 25 bp, Homo sapien
aacgaccagcattttgatcaatttc

SEQ ID NO: 2604712 - DNA, 25 bp, Homo sapien
ctacaagatgtcataacgaccagca

SEQ ID NO: 2604713 - DNA, 25 bp, Homo sapien
cataacgaccagcattttgatcaat

SEQ ID NO: 2604714 - DNA, 25 bp, Homo sapien
gatgtcataacgaccagcattttga

SEQ ID NO: 2604715 - DNA, 25 bp, Homo sapien
aagagagtttccgtacatatttcat

SEQ ID NO: 2604716 - DNA, 25 bp, Homo sapien
caaatgtgagtttatgtgcaaaagt

SEQ ID NO: 2604717 - DNA, 25 bp, Homo sapien
aaatgtgagtttatgtgcaaaagtt

SEQ ID NO: 2604718 - DNA, 25 bp, Homo sapien
atgtgagtttatgtgcaaaagtttg

SEQ ID NO: 2604719 - DNA, 25 bp, Homo sapien
cagcactctgcttcacgtggcactg

SEQ ID NO: 2604720 - DNA, 25 bp, Homo sapien
gcactctgcttcacgtggcactgct

SEQ ID NO: 2604721 - DNA, 25 bp, Homo sapien
actctgcttcacgtggcactgcttg

SEQ ID NO: 2604722 - DNA, 25 bp, Homo sapien
tctgcttcacgtggcactgcttgca

SEQ ID NO: 2604723 - DNA, 25 bp, Homo sapien
taggcagtacatctcgttttggctg

SEQ ID NO: 2604724 - DNA, 25 bp, Homo sapien
aattcgtctaggcagtacatctcgt

SEQ ID NO: 2604725 - DNA, 25 bp, Homo sapien
tttcttgtagaattcgtctaggcag

SEQ ID NO: 2604726 - DNA, 25 bp, Homo sapien
tgtagaattcgtctaggcagtacat

SEQ ID NO: 2604727 - DNA, 25 bp, Homo sapien
caggtcacacacatgaagcaggagg

SEQ ID NO: 2604728 - DNA, 25 bp, Homo sapien
cagggccctgatgatgtgctcccgg

SEQ ID NO: 2604729 - DNA, 25 bp, Homo sapien
ctggccacacttgccgcacttctcc

SEQ ID NO: 2604730 - DNA, 25 bp, Homo sapien
ctggatgcaccgggcacaggtcaca

SEQ ID NO: 2604731 - DNA, 25 bp, Homo sapien
ggtcgcccatcctggtagaagctct

SEQ ID NO: 2604732 - DNA, 25 bp, Homo sapien
aggggtcgcccatcctggtagaagc

SEQ ID NO: 2604733 - DNA, 25 bp, Homo sapien
agaggggtcgcccatcctggtagaa

SEQ ID NO: 2604734 - DNA, 25 bp, Homo sapien
tcgcagaggggtcgcccatcctggt

SEQ ID NO: 2604735 - DNA, 25 bp, Homo sapien
ctctttatggcctccacagccagct

SEQ ID NO: 2604736 - DNA, 25 bp, Homo sapien
gcctctttatggcctccacagccag

SEQ ID NO: 2604737 - DNA, 25 bp, Homo sapien
tgcctctttatggcctccacagcca

SEQ ID NO: 2604738 - DNA, 25 bp, Homo sapien
cctctttatggcctccacagccagc

SEQ ID NO: 2604739 - DNA, 25 bp, Homo sapien
gtggacgactctctctcaacaggct

SEQ ID NO: 2604740 - DNA, 25 bp, Homo sapien
tctgtggacgactctctctcaacag

SEQ ID NO: 2604741 - DNA, 25 bp, Homo sapien
gatgtctgtggacgactctctctca

SEQ ID NO: 2604742 - DNA, 25 bp, Homo sapien
acagatgtctgtggacgactctctc

SEQ ID NO: 2604743 - DNA, 25 bp, Homo sapien
ccaggctggactgaaggtccctcca

SEQ ID NO: 2604744 - DNA, 25 bp, Homo sapien
ccaggcccgaggggactgggcccag

SEQ ID NO: 2604745 - DNA, 25 bp, Homo sapien
ctggactgaaggtccctccactggg

SEQ ID NO: 2604746 - DNA, 25 bp, Homo sapien
tggggaaggcggaagctcttcctcc

SEQ ID NO: 2604747 - DNA, 25 bp, Homo sapien
cttcttcagaagacaggagcaccgg

SEQ ID NO: 2604748 - DNA, 25 bp, Homo sapien
cttcagaagacaggagcaccggagg

SEQ ID NO: 2604749 - DNA, 25 bp, Homo sapien
ttcttcagaagacaggagcaccgga

SEQ ID NO: 2604750 - DNA, 25 bp, Homo sapien
tcttcagaagacaggagcaccggag

SEQ ID NO: 2604751 - DNA, 25 bp, Homo sapien
ggctttcccgctaagccagctccgg

SEQ ID NO: 2604752 - DNA, 25 bp, Homo sapien
ctttcccgctaagccagctccgggt

SEQ ID NO: 2604753 - DNA, 25 bp, Homo sapien
ttcccgctaagccagctccgggtgc

SEQ ID NO: 2604754 - DNA, 25 bp, Homo sapien
gggctgggctttcccgctaagccag

SEQ ID NO: 2604755 - DNA, 25 bp, Homo sapien
caaccacagctaaatcgtggcacag

SEQ ID NO: 2604756 - DNA, 25 bp, Homo sapien
ggcccggaagttcaggccagctcca

SEQ ID NO: 2604757 - DNA, 25 bp, Homo sapien
tccgaaggcccggaagttcaggcca

SEQ ID NO: 2604758 - DNA, 25 bp, Homo sapien
tgtggctgggatccaattctcctgg

SEQ ID NO: 2604759 - DNA, 25 bp, Homo sapien
aaggcgctggtaccaaatacttctc

SEQ ID NO: 2604760 - DNA, 25 bp, Homo sapien
ggcgctggtaccaaatacttctcct

SEQ ID NO: 2604761 - DNA, 25 bp, Homo sapien
tagtgtttttgaaggcgctggtacc

SEQ ID NO: 2604762 - DNA, 25 bp, Homo sapien
ttttgaaggcgctggtaccaaatac

SEQ ID NO: 2604763 - DNA, 25 bp, Homo sapien
caatgcctgggcgatgaactgccat

SEQ ID NO: 2604764 - DNA, 25 bp, Homo sapien
tcaatgcctgggcgatgaactgcca

SEQ ID NO: 2604765 - DNA, 25 bp, Homo sapien
tctttgagggtcaggagagcagcaa

SEQ ID NO: 2604766 - DNA, 25 bp, Homo sapien
gccatagttaattgtaccctgggat

SEQ ID NO: 2604767 - DNA, 25 bp, Homo sapien
ctttgcttgagcaacaaaaactgtt

SEQ ID NO: 2604768 - DNA, 25 bp, Homo sapien
tcacaacgggccattctcaggtcca

SEQ ID NO: 2604769 - DNA, 25 bp, Homo sapien
cattgtcataatatgggttgtttag

SEQ ID NO: 2604770 - DNA, 25 bp, Homo sapien
gaagaaactcttgtctatatcattg

SEQ ID NO: 2604771 - DNA, 25 bp, Homo sapien
tcttccacccatgtctaaagtggta

SEQ ID NO: 2604772 - DNA, 25 bp, Homo sapien
ccacccatgtctaaagtggtagatg

SEQ ID NO: 2604773 - DNA, 25 bp, Homo sapien
ttttagaagtcagcatgttgtggcc

SEQ ID NO: 2604774 - DNA, 25 bp, Homo sapien
tccaattaaaatgacattacgtact

SEQ ID NO: 2604775 - DNA, 25 bp, Homo sapien
tctcgaactcctgtagcgggacata

SEQ ID NO: 2604776 - DNA, 25 bp, Homo sapien
ttttaattgcagataaatcatagta

SEQ ID NO: 2604777 - DNA, 25 bp, Homo sapien
tcttgaagttggcacagtcagcagt

SEQ ID NO: 2604778 - DNA, 25 bp, Homo sapien
aagttggcacagtcagcagttgcca

SEQ ID NO: 2604779 - DNA, 25 bp, Homo sapien
tgaagttggcacagtcagcagttgc

SEQ ID NO: 2604780 - DNA, 25 bp, Homo sapien
ttgaagttggcacagtcagcagttg

SEQ ID NO: 2604781 - DNA, 25 bp, Homo sapien
ggtgaactgacactctgcctcttat

SEQ ID NO: 2604782 - DNA, 25 bp, Homo sapien
tgtcttcttggtgaactgacactct

SEQ ID NO: 2604783 - DNA, 25 bp, Homo sapien
ttctttacatatctggatgctcaaa

SEQ ID NO: 2604784 - DNA, 25 bp, Homo sapien
tatctggatgctcaaatgttgggtg

SEQ ID NO: 2604785 - DNA, 25 bp, Homo sapien
caaggttttgtggatctagattcat

SEQ ID NO: 2604786 - DNA, 25 bp, Homo sapien
ttgtggatctagattcattaggaat

SEQ ID NO: 2604787 - DNA, 25 bp, Homo sapien
agagcagaggccctcccagcaacca

SEQ ID NO: 2604788 - DNA, 25 bp, Homo sapien
ggcagcaaggttttgtggatctaga

SEQ ID NO: 2604789 - DNA, 25 bp, Homo sapien
tattaaatggcccatgtggtcattc

SEQ ID NO: 2604790 - DNA, 25 bp, Homo sapien
tctgcaggaaaagtattaaatggcc

SEQ ID NO: 2604791 - DNA, 25 bp, Homo sapien
tcataatgccagcagtttctgcagg

SEQ ID NO: 2604792 - DNA, 25 bp, Homo sapien
cataatgccagcagtttctgcagga

SEQ ID NO: 2604793 - DNA, 25 bp, Homo sapien
ttttgctagatttggcagcatgggc

SEQ ID NO: 2604794 - DNA, 25 bp, Homo sapien
tttttccacctccatgaatatccat

SEQ ID NO: 2604795 - DNA, 25 bp, Homo sapien
cttcttttttccacctccatgaata

SEQ ID NO: 2604796 - DNA, 25 bp, Homo sapien
tcttttttccacctccatgaatatc

SEQ ID NO: 2604797 - DNA, 25 bp, Homo sapien
ttttttccacctccatgaatatcca

SEQ ID NO: 2604798 - DNA, 25 bp, Homo sapien
caggtgttaaatcctccactaatct

SEQ ID NO: 2604799 - DNA, 25 bp, Homo sapien
gcaggtgttaaatcctccactaatc

SEQ ID NO: 2604800 - DNA, 25 bp, Homo sapien
ctagcaggtgttaaatcctccacta

SEQ ID NO: 2604801 - DNA, 25 bp, Homo sapien
tagcaggtgttaaatcctccactaa

SEQ ID NO: 2604802 - DNA, 25 bp, Homo sapien
cagtacagagatcaaataagtctag

SEQ ID NO: 2604803 - DNA, 25 bp, Homo sapien
gatcaaataagtctagctgctcttc

SEQ ID NO: 2604804 - DNA, 25 bp, Homo sapien
tcaaataagtctagctgctcttcag

SEQ ID NO: 2604805 - DNA, 25 bp, Homo sapien
aaataagtctagctgctcttcagca

SEQ ID NO: 2604806 - DNA, 25 bp, Homo sapien
cattgagcctttacctcgactgagt

SEQ ID NO: 2604807 - DNA, 25 bp, Homo sapien
gggacatttcggctgtggccattga

SEQ ID NO: 2604808 - DNA, 25 bp, Homo sapien
tgtgagtggtatctgctgcccacaa

SEQ ID NO: 2604809 - DNA, 25 bp, Homo sapien
cacaacatcttatggacgaccacag

SEQ ID NO: 2604810 - DNA, 25 bp, Homo sapien
taatactctggcctgcgtactttgt

SEQ ID NO: 2604811 - DNA, 25 bp, Homo sapien
tctgtctttgaagtcgtgctcctct

SEQ ID NO: 2604812 - DNA, 25 bp, Homo sapien
actctggcctgcgtactttgttgta

SEQ ID NO: 2604813 - DNA, 25 bp, Homo sapien
gcctgcgtactttgttgtactttct

SEQ ID NO: 2604814 - DNA, 25 bp, Homo sapien
gaggcgctacatgtttccaagcagc

SEQ ID NO: 2604815 - DNA, 25 bp, Homo sapien
cttggaaattctgcgtgcggcctct

SEQ ID NO: 2604816 - DNA, 25 bp, Homo sapien
tctctggtcaccgatggggcatgac

SEQ ID NO: 2604817 - DNA, 25 bp, Homo sapien
ggcatgacaggaggcgctacatgtt

SEQ ID NO: 2604818 - DNA, 25 bp, Homo sapien
ccgaggtgtgttgggtgctgatctg

SEQ ID NO: 2604819 - DNA, 25 bp, Homo sapien
gccccagtggccgaggtgtgttggg

SEQ ID NO: 2604820 - DNA, 25 bp, Homo sapien
ggtgtgttgggtgctgatctgtgac

SEQ ID NO: 2604821 - DNA, 25 bp, Homo sapien
cagtggccgaggtgtgttgggtgct

SEQ ID NO: 2604822 - DNA, 25 bp, Homo sapien
actctgacctggctgacgtgcttgc

SEQ ID NO: 2604823 - DNA, 25 bp, Homo sapien
gctgtaacctcgtcctcacctggaa

SEQ ID NO: 2604824 - DNA, 25 bp, Homo sapien
catcatatcacctgtagctgtaacc

SEQ ID NO: 2604825 - DNA, 25 bp, Homo sapien
tgggtggggccgatttccctcctgc

SEQ ID NO: 2604826 - DNA, 25 bp, Homo sapien
acagtgagcccggacacaagcagcc

SEQ ID NO: 2604827 - DNA, 25 bp, Homo sapien
gtgagcccggacacaagcagccttc

SEQ ID NO: 2604828 - DNA, 25 bp, Homo sapien
gacacaagcagccttccatccggtt

SEQ ID NO: 2604829 - DNA, 25 bp, Homo sapien
atccggttccccctgcatctgccaa

SEQ ID NO: 2604830 - DNA, 25 bp, Homo sapien
tcaaagaagcatcatcggctggttc

SEQ ID NO: 2604831 - DNA, 25 bp, Homo sapien
tgaccagagccaccaacctgtgtct

SEQ ID NO: 2604832 - DNA, 25 bp, Homo sapien
gatgcttctcattaggtaacaggga

SEQ ID NO: 2604833 - DNA, 25 bp, Homo sapien
gaatctggaaactgttgaccctgga

SEQ ID NO: 2604834 - DNA, 25 bp, Homo sapien
gccacctgaatgacgatgtcatcct

SEQ ID NO: 2604835 - DNA, 25 bp, Homo sapien
catggccacctgaatgacgatgtca

SEQ ID NO: 2604836 - DNA, 25 bp, Homo sapien
ttcatggccacctgaatgacgatgt

SEQ ID NO: 2604837 - DNA, 25 bp, Homo sapien
ttcttcatggccacctgaatgacga

SEQ ID NO: 2604838 - DNA, 25 bp, Homo sapien
tgactgggagggcgtattcccacct

SEQ ID NO: 2604839 - DNA, 25 bp, Homo sapien
gctgactgggagggcgtattcccac

SEQ ID NO: 2604840 - DNA, 25 bp, Homo sapien
ctgggagggcgtattcccacctgat

SEQ ID NO: 2604841 - DNA, 25 bp, Homo sapien
gactgggagggcgtattcccacctg

SEQ ID NO: 2604842 - DNA, 25 bp, Homo sapien
tttttatactcaacgggatcctgga

SEQ ID NO: 2604843 - DNA, 25 bp, Homo sapien
tatactcaacgggatcctggaattt

SEQ ID NO: 2604844 - DNA, 25 bp, Homo sapien
ctcaacgggatcctggaatttatgt

SEQ ID NO: 2604845 - DNA, 25 bp, Homo sapien
ttttatactcaacgggatcctggaa

SEQ ID NO: 2604846 - DNA, 25 bp, Homo sapien
gtgcagccgaagtggacggccatcc

SEQ ID NO: 2604847 - DNA, 25 bp, Homo sapien
gaatccctggtgtcatcccagcagt

SEQ ID NO: 2604848 - DNA, 25 bp, Homo sapien
ggccatccagtgatgacttggcccc

SEQ ID NO: 2604849 - DNA, 25 bp, Homo sapien
gaagtggacggccatccagtgatga

SEQ ID NO: 2604850 - DNA, 25 bp, Homo sapien
tatcaccgtagcattcaacacacct

SEQ ID NO: 2604851 - DNA, 25 bp, Homo sapien
tgtatcccctgaagacgccgaaacg

SEQ ID NO: 2604852 - DNA, 25 bp, Homo sapien
gcctgtgcttgtagctatcaccgta

SEQ ID NO: 2604853 - DNA, 25 bp, Homo sapien
cgtggtattctcaccccaaagagtt

SEQ ID NO: 2604854 - DNA, 25 bp, Homo sapien
actgagagccaggatgccaactccc

SEQ ID NO: 2604855 - DNA, 25 bp, Homo sapien
tggtccagggttccagcactgagag

SEQ ID NO: 2604856 - DNA, 25 bp, Homo sapien
actcccaatgcatcatcagcctcct

SEQ ID NO: 2604857 - DNA, 25 bp, Homo sapien
atgccaactcccaatgcatcatcag

SEQ ID NO: 2604858 - DNA, 25 bp, Homo sapien
tcccatctgcaagcctacaattcta

SEQ ID NO: 2604859 - DNA, 25 bp, Homo sapien
atttaattgtgttaacagagggctt

SEQ ID NO: 2604860 - DNA, 25 bp, Homo sapien
tgtgttaacagagggctttggcctt

SEQ ID NO: 2604861 - DNA, 25 bp, Homo sapien
acagtacttagcacattcttctatt

SEQ ID NO: 2604862 - DNA, 25 bp, Homo sapien
tcacactgaagacacagtcagagtc

SEQ ID NO: 2604863 - DNA, 25 bp, Homo sapien
tggcagtgatggagcgcagtgccat

SEQ ID NO: 2604864 - DNA, 25 bp, Homo sapien
gaggatatctctctatcttataggc

SEQ ID NO: 2604865 - DNA, 25 bp, Homo sapien
tcttataggctttgagagaaactcc

SEQ ID NO: 2604866 - DNA, 25 bp, Homo sapien
catgtataagctccctcctgaggat

SEQ ID NO: 2604867 - DNA, 25 bp, Homo sapien
tagcgcccttgatttcaactcctct

SEQ ID NO: 2604868 - DNA, 25 bp, Homo sapien
tcatagcgcccttgatttcaactcc

SEQ ID NO: 2604869 - DNA, 25 bp, Homo sapien
atagcgcccttgatttcaactcctc

SEQ ID NO: 2604870 - DNA, 25 bp, Homo sapien
catagcgcccttgatttcaactcct

SEQ ID NO: 2604871 - DNA, 25 bp, Homo sapien
aatgtctgtcagacctctcattttt

SEQ ID NO: 2604872 - DNA, 25 bp, Homo sapien
taaaatgtctgtcagacctctcatt

SEQ ID NO: 2604873 - DNA, 25 bp, Homo sapien
aaatgtctgtcagacctctcatttt

SEQ ID NO: 2604874 - DNA, 25 bp, Homo sapien
aaaatgtctgtcagacctctcattt

SEQ ID NO: 2604875 - DNA, 25 bp, Homo sapien
gtgaaggtgtgtgcaacagtcgcta

SEQ ID NO: 2604876 - DNA, 25 bp, Homo sapien
aaggtgtgtgcaacagtcgctatca

SEQ ID NO: 2604877 - DNA, 25 bp, Homo sapien
ggtgtgtgcaacagtcgctatcaaa

SEQ ID NO: 2604878 - DNA, 25 bp, Homo sapien
tggtgaaggtgtgtgcaacagtcgc

SEQ ID NO: 2604879 - DNA, 25 bp, Homo sapien
gaaacttgatcactcctttgggact

SEQ ID NO: 2604880 - DNA, 25 bp, Homo sapien
gaaacaagggctactgggacagaat

SEQ ID NO: 2604881 - DNA, 25 bp, Homo sapien
tctatcaagtgtgggttggtagccc

SEQ ID NO: 2604882 - DNA, 25 bp, Homo sapien
gaggccaggtaataaggaagcttct

SEQ ID NO: 2604883 - DNA, 25 bp, Homo sapien
ctgtatgatttcagcagccaaagct

SEQ ID NO: 2604884 - DNA, 25 bp, Homo sapien
gctggatgatggactgaaacattac

SEQ ID NO: 2604885 - DNA, 25 bp, Homo sapien
gaaacattactatacaactgggaca

SEQ ID NO: 2604886 - DNA, 25 bp, Homo sapien
acagcactttgaatggtgaaaacac

SEQ ID NO: 2604887 - DNA, 25 bp, Homo sapien
taacagttggccagagtgtactgcc

SEQ ID NO: 2604888 - DNA, 25 bp, Homo sapien
gaaaagaagcgcatagaagccagtg

SEQ ID NO: 2604889 - DNA, 25 bp, Homo sapien
tccagtgatacctaaagcaaagccc

SEQ ID NO: 2604890 - DNA, 25 bp, Homo sapien
caataaagcaggagcccagtttcag

SEQ ID NO: 2604891 - DNA, 25 bp, Homo sapien
cttgggaaggtcctggatttttgct

SEQ ID NO: 2604892 - DNA, 25 bp, Homo sapien
attgggggtggtgcacgctgtaatg

SEQ ID NO: 2604893 - DNA, 25 bp, Homo sapien
ggaaggtcctggatttttgcttctc

SEQ ID NO: 2604894 - DNA, 25 bp, Homo sapien
tgggaaggtcctggatttttgcttc

SEQ ID NO: 2604895 - DNA, 25 bp, Homo sapien
tgttgcttgttgataagtcatttgt

SEQ ID NO: 2604896 - DNA, 25 bp, Homo sapien
tcctctcatatcaatctgctggtag

SEQ ID NO: 2604897 - DNA, 25 bp, Homo sapien
catgaggtgacccagtgttgcttgt

SEQ ID NO: 2604898 - DNA, 25 bp, Homo sapien
taagtattcgctgaacacagctgat

SEQ ID NO: 2604899 - DNA, 25 bp, Homo sapien
catctgttgttttgtcaatacatca

SEQ ID NO: 2604900 - DNA, 25 bp, Homo sapien
taatgctaacgcctgtacttgggcc

SEQ ID NO: 2604901 - DNA, 25 bp, Homo sapien
catcattgtagattgcttctcttcg

SEQ ID NO: 2604902 - DNA, 25 bp, Homo sapien
ctggctggcttgtctacttaatgct

SEQ ID NO: 2604903 - DNA, 25 bp, Homo sapien
ggttggaataagacaattgccaatt

SEQ ID NO: 2604904 - DNA, 25 bp, Homo sapien
aattggaggttggaataagacaatt

SEQ ID NO: 2604905 - DNA, 25 bp, Homo sapien
ggaggttggaataagacaattgcca

SEQ ID NO: 2604906 - DNA, 25 bp, Homo sapien
tggaataagacaattgccaattagc

SEQ ID NO: 2604907 - DNA, 25 bp, Homo sapien
aattatatcctcaagaggttgaatc

SEQ ID NO: 2604908 - DNA, 25 bp, Homo sapien
tatatcctcaagaggttgaatcctc

SEQ ID NO: 2604909 - DNA, 25 bp, Homo sapien
ttatatcctcaagaggttgaatcct

SEQ ID NO: 2604910 - DNA, 25 bp, Homo sapien
tatcctcaagaggttgaatcctcac

SEQ ID NO: 2604911 - DNA, 25 bp, Homo sapien
cactgtttgttgcttctacaacttt

SEQ ID NO: 2604912 - DNA, 25 bp, Homo sapien
caagcgagtcagcagccctattgtt

SEQ ID NO: 2604913 - DNA, 25 bp, Homo sapien
taattcaccgactgattcctttgtg

SEQ ID NO: 2604914 - DNA, 25 bp, Homo sapien
gccaacttagagcagtcggttttaa

SEQ ID NO: 2604915 - DNA, 25 bp, Homo sapien
aagaaggtgctatttcccaagcgag

SEQ ID NO: 2604916 - DNA, 25 bp, Homo sapien
ttggtatgttgaaacgcatggtcag

SEQ ID NO: 2604917 - DNA, 25 bp, Homo sapien
gaatataaggagtttgagagttgaa

SEQ ID NO: 2604918 - DNA, 25 bp, Homo sapien
tgattactcattgctgacagggctc

SEQ ID NO: 2604919 - DNA, 25 bp, Homo sapien
gacagggctcccaaattgaaaggaa

SEQ ID NO: 2604920 - DNA, 25 bp, Homo sapien
gttctttatgtatctgaaggagctc

SEQ ID NO: 2604921 - DNA, 25 bp, Homo sapien
gaaggagctctgcaagtatggtatc

SEQ ID NO: 2604922 - DNA, 25 bp, Homo sapien
atctgaaggagctctgcaagtatgg

SEQ ID NO: 2604923 - DNA, 25 bp, Homo sapien
tcatggtatcctacaatgtgttctt

SEQ ID NO: 2604924 - DNA, 25 bp, Homo sapien
aaagaccatacaaatgacaggactc

SEQ ID NO: 2604925 - DNA, 25 bp, Homo sapien
aaattttgtagacataggatctcag

SEQ ID NO: 2604926 - DNA, 25 bp, Homo sapien
gagattacaacaggtataatccatt

SEQ ID NO: 2604927 - DNA, 25 bp, Homo sapien
gacaggactcaataaagtctactga

SEQ ID NO: 2604928 - DNA, 25 bp, Homo sapien
tagaaacttgctatcgaagctgact

SEQ ID NO: 2604929 - DNA, 25 bp, Homo sapien
tagatcaatctccaaagtccactgt

SEQ ID NO: 2604930 - DNA, 25 bp, Homo sapien
tccactgttactgaccaggcaggca

SEQ ID NO: 2604931 - DNA, 25 bp, Homo sapien
tctctcacgccaatgtagaaacttg

SEQ ID NO: 2604932 - DNA, 25 bp, Homo sapien
aagacacacttgtagcctataaaca

SEQ ID NO: 2604933 - DNA, 25 bp, Homo sapien
tatactgttggtgttcaaccattgt

SEQ ID NO: 2604934 - DNA, 25 bp, Homo sapien
caaatctatgagaaagaaacaaccc

SEQ ID NO: 2604935 - DNA, 25 bp, Homo sapien
gaaaacgtttgcaatctatctatat

SEQ ID NO: 2604936 - DNA, 25 bp, Homo sapien
gctagtcataggtgtgattatgtac

SEQ ID NO: 2604937 - DNA, 25 bp, Homo sapien
gaaggaaataaataaggccatctag

SEQ ID NO: 2604938 - DNA, 25 bp, Homo sapien
aaaacttggtcatgaaaacactagt

SEQ ID NO: 2604939 - DNA, 25 bp, Homo sapien
tatgtactacatagcctcgaacccc

SEQ ID NO: 2604940 - DNA, 25 bp, Homo sapien
gagctagtggctcttgtattgaaca

SEQ ID NO: 2604941 - DNA, 25 bp, Homo sapien
taatagtactctctgcaacgatgga

SEQ ID NO: 2604942 - DNA, 25 bp, Homo sapien
tgtttgcactatccaagacagtagc

SEQ ID NO: 2604943 - DNA, 25 bp, Homo sapien
gatcacaggctctggaatactgctc

SEQ ID NO: 2604944 - DNA, 25 bp, Homo sapien
gggacattctgtggagacctaggac

SEQ ID NO: 2604945 - DNA, 25 bp, Homo sapien
tagagttggaagagcctgatacatc

SEQ ID NO: 2604946 - DNA, 25 bp, Homo sapien
tctaaatggcaggagttgtagcaga

SEQ ID NO: 2604947 - DNA, 25 bp, Homo sapien
tatagatttaatgggtcagaacaca

SEQ ID NO: 2604948 - DNA, 25 bp, Homo sapien
tcaaggtaaacgataatcgtcagca

SEQ ID NO: 2604949 - DNA, 25 bp, Homo sapien
acgataatcgtcagcaaacagggac

SEQ ID NO: 2604950 - DNA, 25 bp, Homo sapien
tgtatttatttatgcagctattgta

SEQ ID NO: 2604951 - DNA, 25 bp, Homo sapien
ggtaaacgataatcgtcagcaaaca

SEQ ID NO: 2604952 - DNA, 25 bp, Homo sapien
ttttccagaacagttggattagtac

SEQ ID NO: 2604953 - DNA, 25 bp, Homo sapien
tggattagtactcctagtaggaatc
